United States Patent Application Publication US 2014/0004565 A1 - sequence listing, part 93

SEQ ID NO: 2302954 - RNA, 19 nt, Artificial Sequence
  Description of Artificial Sequence: Synthetic oligonucleotide
ucuuauuacagugaaaugc

SEQ ID NO: 2302955 - RNA, 19 nt, Artificial Sequence
  Description of Artificial Sequence: Synthetic oligonucleotide
uuuaguagcaaaacacgcg

SEQ ID NO: 2302956 - RNA, 19 nt, Artificial Sequence
  Description of Artificial Sequence: Synthetic oligonucleotide
uuaguagcaaaacacgcgg

SEQ ID NO: 2302957 - RNA, 19 nt, Artificial Sequence
  Description of Artificial Sequence: Synthetic oligonucleotide
aguaauauuccacaaaaca

SEQ ID NO: 2302958 - RNA, 19 nt, Artificial Sequence
  Description of Artificial Sequence: Synthetic oligonucleotide
aaaguagauaaccugaaau

SEQ ID NO: 2302959 - RNA, 19 nt, Artificial Sequence
  Description of Artificial Sequence: Synthetic oligonucleotide
aaaggcauuugcuugcacg

SEQ ID NO: 2302960 - RNA, 19 nt, Artificial Sequence
  Description of Artificial Sequence: Synthetic oligonucleotide
uuucaguaaagaaaguuug

SEQ ID NO: 2302961 - RNA, 19 nt, Artificial Sequence
  Description of Artificial Sequence: Synthetic oligonucleotide
ugcaagauaauuuuauuca

SEQ ID NO: 2302962 - RNA, 19 nt, Artificial Sequence
  Description of Artificial Sequence: Synthetic oligonucleotide
uucauuucuaaucauguac

SEQ ID NO: 2302963 - RNA, 19 nt, Artificial Sequence
  Description of Artificial Sequence: Synthetic oligonucleotide
aaagaaggaaggaugcucc

SEQ ID NO: 2302964 - RNA, 19 nt, Artificial Sequence
  Description of Artificial Sequence: Synthetic oligonucleotide
aauagcaucaaagggugac

SEQ ID NO: 2302965 - RNA, 19 nt, Artificial Sequence
  Description of Artificial Sequence: Synthetic oligonucleotide
agacucaacgucuucaucg

SEQ ID NO: 2302966 - RNA, 19 nt, Artificial Sequence
  Description of Artificial Sequence: Synthetic oligonucleotide
aaaauagauaaacagucua

SEQ ID NO: 2302967 - RNA, 19 nt, Artificial Sequence
  Description of Artificial Sequence: Synthetic oligonucleotide
ucgaagagaaagaaggaag

SEQ ID NO: 2302968 - RNA, 19 nt, Artificial Sequence
  Description of Artificial Sequence: Synthetic oligonucleotide
uuaggagaggcauggaugg

SEQ ID NO: 2302969 - RNA, 19 nt, Artificial Sequence
  Description of Artificial Sequence: Synthetic oligonucleotide
aggauaguuaaguuaacuc

SEQ ID NO: 2302970 - RNA, 19 nt, Artificial Sequence
  Description of Artificial Sequence: Synthetic oligonucleotide
uuauucaagacucaacguc

SEQ ID NO: 2302971 - RNA, 19 nt, Artificial Sequence
  Description of Artificial Sequence: Synthetic oligonucleotide
ucuaaaaggauaguuaagu

SEQ ID NO: 2302972 - RNA, 19 nt, Artificial Sequence
  Description of Artificial Sequence: Synthetic oligonucleotide
aaacugucaccacuccucc

SEQ ID NO: 2302973 - RNA, 19 nt, Artificial Sequence
  Description of Artificial Sequence: Synthetic oligonucleotide
ugaaauagggcuugucagg

SEQ ID NO: 2302974 - RNA, 19 nt, Artificial Sequence
  Description of Artificial Sequence: Synthetic oligonucleotide
aaguaacagauucuucccg

SEQ ID NO: 2302975 - RNA, 19 nt, Artificial Sequence
  Description of Artificial Sequence: Synthetic oligonucleotide
ucaaagggugaccauaacc

SEQ ID NO: 2302976 - RNA, 19 nt, Artificial Sequence
  Description of Artificial Sequence: Synthetic oligonucleotide
aaauuauucaagacucaac

SEQ ID NO: 2302977 - RNA, 19 nt, Artificial Sequence
  Description of Artificial Sequence: Synthetic oligonucleotide
uaaccuugguaacacaucc

SEQ ID NO: 2302978 - RNA, 19 nt, Artificial Sequence
  Description of Artificial Sequence: Synthetic oligonucleotide
aguggagagauuccuaacg

SEQ ID NO: 2302979 - RNA, 19 nt, Artificial Sequence
  Description of Artificial Sequence: Synthetic oligonucleotide
gaaaugaauggcuuucaag

SEQ ID NO: 2302980 - RNA, 19 nt, Artificial Sequence
  Description of Artificial Sequence: Synthetic oligonucleotide
ucauuucuaaucauguacu

SEQ ID NO: 2302981 - RNA, 19 nt, Artificial Sequence
  Description of Artificial Sequence: Synthetic oligonucleotide
uauucaagacucaacgucu

SEQ ID NO: 2302982 - RNA, 19 nt, Artificial Sequence
  Description of Artificial Sequence: Synthetic oligonucleotide
auuccuaacguugucaagg

SEQ ID NO: 2302983 - RNA, 19 nt, Artificial Sequence
  Description of Artificial Sequence: Synthetic oligonucleotide
aguagauaaccugaaauag

SEQ ID NO: 2302984 - RNA, 19 nt, Artificial Sequence
  Description of Artificial Sequence: Synthetic oligonucleotide
aaguagauaaccugaaaua

SEQ ID NO: 2302985 - RNA, 19 nt, Artificial Sequence
  Description of Artificial Sequence: Synthetic oligonucleotide
uguuaauuuugcaaacugu

SEQ ID NO: 2302986 - RNA, 19 nt, Artificial Sequence
  Description of Artificial Sequence: Synthetic oligonucleotide
uuuguaucuguugaccugg

SEQ ID NO: 2302987 - RNA, 19 nt, Artificial Sequence
  Description of Artificial Sequence: Synthetic oligonucleotide
ucuggaagaucucugaaaa

SEQ ID NO: 2302988 - RNA, 19 nt, Artificial Sequence
  Description of Artificial Sequence: Synthetic oligonucleotide
aagcuaaugccuuuguaga

SEQ ID NO: 2302989 - RNA, 19 nt, Artificial Sequence
  Description of Artificial Sequence: Synthetic oligonucleotide
uccacaaaacauauuugcc

SEQ ID NO: 2302990 - RNA, 19 nt, Artificial Sequence
  Description of Artificial Sequence: Synthetic oligonucleotide
agaaauagcaucaaagggu

SEQ ID NO: 2302991 - RNA, 19 nt, Artificial Sequence
  Description of Artificial Sequence: Synthetic oligonucleotide
aaacagucuaaaaggauag

SEQ ID NO: 2302992 - RNA, 19 nt, Artificial Sequence
  Description of Artificial Sequence: Synthetic oligonucleotide
uuucuaaucauguacugua

SEQ ID NO: 2302993 - RNA, 19 nt, Artificial Sequence
  Description of Artificial Sequence: Synthetic oligonucleotide
gaaauagcaucaaagggug

SEQ ID NO: 2302994 - RNA, 19 nt, Artificial Sequence
  Description of Artificial Sequence: Synthetic oligonucleotide
aauagggcuugucaggaga

SEQ ID NO: 2302995 - RNA, 19 nt, Artificial Sequence
  Description of Artificial Sequence: Synthetic oligonucleotide
cuaaucauguacuguaaug

SEQ ID NO: 2302996 - RNA, 19 nt, Artificial Sequence
  Description of Artificial Sequence: Synthetic oligonucleotide
gaaucuuugggauagucaa

SEQ ID NO: 2302997 - RNA, 19 nt, Artificial Sequence
  Description of Artificial Sequence: Synthetic oligonucleotide
aacguugucaaggcuggcc

SEQ ID NO: 2302998 - RNA, 19 nt, Artificial Sequence
  Description of Artificial Sequence: Synthetic oligonucleotide
aauagauaaacagucuaaa

SEQ ID NO: 2302999 - RNA, 19 nt, Artificial Sequence
  Description of Artificial Sequence: Synthetic oligonucleotide
cucggaaaaugcuucacgg

SEQ ID NO: 2303000 - RNA, 19 nt, Artificial Sequence
  Description of Artificial Sequence: Synthetic oligonucleotide
uguccaacucggaaaaugc

SEQ ID NO: 2303001 - RNA, 19 nt, Artificial Sequence
  Description of Artificial Sequence: Synthetic oligonucleotide
uuaaguuaacucugaaagu

SEQ ID NO: 2303002 - RNA, 19 nt, Artificial Sequence
  Description of Artificial Sequence: Synthetic oligonucleotide
agucuaaaaggauaguuaa

SEQ ID NO: 2303003 - RNA, 19 nt, Artificial Sequence
  Description of Artificial Sequence: Synthetic oligonucleotide
aacgucuucaucgggacag

SEQ ID NO: 2303004 - RNA, 19 nt, Artificial Sequence
  Description of Artificial Sequence: Synthetic oligonucleotide
gcuacagaaaucaaaaucc

SEQ ID NO: 2303005 - RNA, 19 nt, Artificial Sequence
  Description of Artificial Sequence: Synthetic oligonucleotide
uaucuguugaccugggucu

SEQ ID NO: 2303006 - RNA, 19 nt, Artificial Sequence
  Description of Artificial Sequence: Synthetic oligonucleotide
cucugaaaguaacagauuc

SEQ ID NO: 2303007 - RNA, 19 nt, Artificial Sequence
  Description of Artificial Sequence: Synthetic oligonucleotide
gauaaccugaaauagggcu

SEQ ID NO: 2303008 - RNA, 19 nt, Artificial Sequence
  Description of Artificial Sequence: Synthetic oligonucleotide
uaagcaguacuguucgucc

SEQ ID NO: 2303009 - RNA, 19 nt, Artificial Sequence
  Description of Artificial Sequence: Synthetic oligonucleotide
cuaaugccuuuguagaggg

SEQ ID NO: 2303010 - RNA, 19 nt, Artificial Sequence
  Description of Artificial Sequence: Synthetic oligonucleotide
aggguuucaguaaagaaag

SEQ ID NO: 2303011 - RNA, 19 nt, Artificial Sequence
  Description of Artificial Sequence: Synthetic oligonucleotide
ucugaaaguaacagauucu

SEQ ID NO: 2303012 - RNA, 19 nt, Artificial Sequence
  Description of Artificial Sequence: Synthetic oligonucleotide
ucuucaucgggacagcagu

SEQ ID NO: 2303013 - RNA, 19 nt, Artificial Sequence
  Description of Artificial Sequence: Synthetic oligonucleotide
gaaaaugcuucacggagac

SEQ ID NO: 2303014 - RNA, 19 nt, Artificial Sequence
  Description of Artificial Sequence: Synthetic oligonucleotide
ucgauuaucuguccgaaua

SEQ ID NO: 2303015 - RNA, 19 nt, Artificial Sequence
  Description of Artificial Sequence: Synthetic oligonucleotide
ugcacggucagcucgaaga

SEQ ID NO: 2303016 - RNA, 19 nt, Artificial Sequence
  Description of Artificial Sequence: Synthetic oligonucleotide
uuaaaguaccugguguagg

SEQ ID NO: 2303017 - RNA, 19 nt, Artificial Sequence
  Description of Artificial Sequence: Synthetic oligonucleotide
cuaacguugucaaggcugg

SEQ ID NO: 2303018 - RNA, 19 nt, Artificial Sequence
  Description of Artificial Sequence: Synthetic oligonucleotide
auuauucaagacucaacgu

SEQ ID NO: 2303019 - RNA, 19 nt, Artificial Sequence
  Description of Artificial Sequence: Synthetic oligonucleotide
gugcaguuaaaguaccugg

SEQ ID NO: 2303020 - RNA, 19 nt, Artificial Sequence
  Description of Artificial Sequence: Synthetic oligonucleotide
guagauaaccugaaauagg

SEQ ID NO: 2303021 - RNA, 19 nt, Artificial Sequence
  Description of Artificial Sequence: Synthetic oligonucleotide
uaacauuggugcuacagaa

SEQ ID NO: 2303022 - RNA, 19 nt, Artificial Sequence
  Description of Artificial Sequence: Synthetic oligonucleotide
cuuuacaggauaaagcuaa

SEQ ID NO: 2303023 - RNA, 19 nt, Artificial Sequence
  Description of Artificial Sequence: Synthetic oligonucleotide
ucugacugcaagauaauuu

SEQ ID NO: 2303024 - RNA, 19 nt, Artificial Sequence
  Description of Artificial Sequence: Synthetic oligonucleotide
aaugagaggaauccucgau

SEQ ID NO: 2303025 - RNA, 19 nt, Artificial Sequence
  Description of Artificial Sequence: Synthetic oligonucleotide
aucuuugggauagucaagg

SEQ ID NO: 2303026 - RNA, 19 nt, Artificial Sequence
  Description of Artificial Sequence: Synthetic oligonucleotide
uggguguuaauuuugcaaa

SEQ ID NO: 2303027 - RNA, 19 nt, Artificial Sequence
  Description of Artificial Sequence: Synthetic oligonucleotide
cacuaagcaguacuguucg

SEQ ID NO: 2303028 - RNA, 19 nt, Artificial Sequence
  Description of Artificial Sequence: Synthetic oligonucleotide
guaaugagaggaauccucg

SEQ ID NO: 2303029 - RNA, 19 nt, Artificial Sequence
  Description of Artificial Sequence: Synthetic oligonucleotide
aaauagauaaacagucuaa

SEQ ID NO: 2303030 - RNA, 19 nt, Artificial Sequence
  Description of Artificial Sequence: Synthetic oligonucleotide
uguacuguaaugagaggaa

SEQ ID NO: 2303031 - RNA, 19 nt, Artificial Sequence
  Description of Artificial Sequence: Synthetic oligonucleotide
uccuucuagaaauagcauc

SEQ ID NO: 2303032 - RNA, 19 nt, Artificial Sequence
  Description of Artificial Sequence: Synthetic oligonucleotide
uucaguaaagaaaguuugu

SEQ ID NO: 2303033 - RNA, 19 nt, Artificial Sequence
  Description of Artificial Sequence: Synthetic oligonucleotide
auaacauuggugcuacaga

SEQ ID NO: 2303034 - RNA, 19 nt, Artificial Sequence
  Description of Artificial Sequence: Synthetic oligonucleotide
acagugaaaugcuuccauc

SEQ ID NO: 2303035 - RNA, 19 nt, Artificial Sequence
  Description of Artificial Sequence: Synthetic oligonucleotide
acucggaaaaugcuucacg

SEQ ID NO: 2303036 - RNA, 19 nt, Artificial Sequence
  Description of Artificial Sequence: Synthetic oligonucleotide
acuugucauguccaacucg

SEQ ID NO: 2303037 - RNA, 19 nt, Artificial Sequence
  Description of Artificial Sequence: Synthetic oligonucleotide
aguuuguaucuguugaccu

SEQ ID NO: 2303038 - RNA, 19 nt, Artificial Sequence
  Description of Artificial Sequence: Synthetic oligonucleotide
uauucauaacauuggugcu

SEQ ID NO: 2303039 - RNA, 19 nt, Artificial Sequence
  Description of Artificial Sequence: Synthetic oligonucleotide
auagauaaacagucuaaaa

SEQ ID NO: 2303040 - RNA, 19 nt, Artificial Sequence
  Description of Artificial Sequence: Synthetic oligonucleotide
aaggauaguuaaguuaacu

SEQ ID NO: 2303041 - RNA, 19 nt, Artificial Sequence
  Description of Artificial Sequence: Synthetic oligonucleotide
gacucaacgucuucaucgg

SEQ ID NO: 2303042 - RNA, 19 nt, Artificial Sequence
  Description of Artificial Sequence: Synthetic oligonucleotide
cagaacaucacuugucaug

SEQ ID NO: 2303043 - RNA, 19 nt, Artificial Sequence
  Description of Artificial Sequence: Synthetic oligonucleotide
cauaacauuggugcuacag

SEQ ID NO: 2303044 - RNA, 19 nt, Artificial Sequence
  Description of Artificial Sequence: Synthetic oligonucleotide
aguuaacucugaaaguaac

SEQ ID NO: 2303045 - RNA, 19 nt, Artificial Sequence
  Description of Artificial Sequence: Synthetic oligonucleotide
aguuaaguuaacucugaaa

SEQ ID NO: 2303046 - RNA, 19 nt, Artificial Sequence
  Description of Artificial Sequence: Synthetic oligonucleotide
aaaucaaaauccagagucu

SEQ ID NO: 2303047 - RNA, 19 nt, Artificial Sequence
  Description of Artificial Sequence: Synthetic oligonucleotide
agaaaucaaaauccagagu

SEQ ID NO: 2303048 - RNA, 19 nt, Artificial Sequence
  Description of Artificial Sequence: Synthetic oligonucleotide
aguaacagauucuucccga

SEQ ID NO: 2303049 - RNA, 19 nt, Artificial Sequence
  Description of Artificial Sequence: Synthetic oligonucleotide
aguagcaaaacacgcggca

SEQ ID NO: 2303050 - RNA, 19 nt, Artificial Sequence
  Description of Artificial Sequence: Synthetic oligonucleotide
uggguuaggagaggcaugg

SEQ ID NO: 2303051 - RNA, 19 nt, Artificial Sequence
  Description of Artificial Sequence: Synthetic oligonucleotide
caaggugggagcuuccugc

SEQ ID NO: 2303052 - RNA, 19 nt, Artificial Sequence
  Description of Artificial Sequence: Synthetic oligonucleotide
ugcaguuaaaguaccuggu

SEQ ID NO: 2303053 - RNA, 19 nt, Artificial Sequence
  Description of Artificial Sequence: Synthetic oligonucleotide
ucuaaucauguacuguaau

SEQ ID NO: 2303054 - RNA, 19 nt, Artificial Sequence
  Description of Artificial Sequence: Synthetic oligonucleotide
auguacuguaaugagagga

SEQ ID NO: 2303055 - RNA, 19 nt, Artificial Sequence
  Description of Artificial Sequence: Synthetic oligonucleotide
uucccgaaugauaaacucu

SEQ ID NO: 2303056 - RNA, 19 nt, Artificial Sequence
  Description of Artificial Sequence: Synthetic oligonucleotide
accauaaccuugguaacac

SEQ ID NO: 2303057 - RNA, 19 nt, Artificial Sequence
  Description of Artificial Sequence: Synthetic oligonucleotide
guaaagaaaguuuguaucu

SEQ ID NO: 2303058 - RNA, 19 nt, Artificial Sequence
  Description of Artificial Sequence: Synthetic oligonucleotide
agaggaauccucgauuauc

SEQ ID NO: 2303059 - RNA, 19 nt, Artificial Sequence
  Description of Artificial Sequence: Synthetic oligonucleotide
agaacaucacuugucaugu

SEQ ID NO: 2303060 - RNA, 19 nt, Artificial Sequence
  Description of Artificial Sequence: Synthetic oligonucleotide
auguucuuugaaaugaaug

SEQ ID NO: 2303061 - RNA, 19 nt, Artificial Sequence
  Description of Artificial Sequence: Synthetic oligonucleotide
ugaaaguaacagauucuuc

SEQ ID NO: 2303062 - RNA, 19 nt, Artificial Sequence
  Description of Artificial Sequence: Synthetic oligonucleotide
uggaugguccacugcacgg

SEQ ID NO: 2303063 - RNA, 19 nt, Artificial Sequence
  Description of Artificial Sequence: Synthetic oligonucleotide
cuucagccugaauaaaggc

SEQ ID NO: 2303064 - RNA, 19 nt, Artificial Sequence
  Description of Artificial Sequence: Synthetic oligonucleotide
uguccgaauagauacuuua

SEQ ID NO: 2303065 - RNA, 19 nt, Artificial Sequence
  Description of Artificial Sequence: Synthetic oligonucleotide
aaaggauaguuaaguuaac

SEQ ID NO: 2303066 - RNA, 19 nt, Artificial Sequence
  Description of Artificial Sequence: Synthetic oligonucleotide
aaugccuuuguagaggguu

SEQ ID NO: 2303067 - RNA, 19 nt, Artificial Sequence
  Description of Artificial Sequence: Synthetic oligonucleotide
aacucggaaaaugcuucac

SEQ ID NO: 2303068 - RNA, 19 nt, Artificial Sequence
  Description of Artificial Sequence: Synthetic oligonucleotide
cacuguaaccuugaguccg

SEQ ID NO: 2303069 - RNA, 19 nt, Artificial Sequence
  Description of Artificial Sequence: Synthetic oligonucleotide
aguacuguucguccucguc

SEQ ID NO: 2303070 - RNA, 19 nt, Artificial Sequence
  Description of Artificial Sequence: Synthetic oligonucleotide
aguuaaaguaccuggugua

SEQ ID NO: 2303071 - RNA, 19 nt, Artificial Sequence
  Description of Artificial Sequence: Synthetic oligonucleotide
cauuucuaaucauguacug

SEQ ID NO: 2303072 - RNA, 19 nt, Artificial Sequence
  Description of Artificial Sequence: Synthetic oligonucleotide
guuaggagaggcauggaug

SEQ ID NO: 2303073 - RNA, 19 nt, Artificial Sequence
  Description of Artificial Sequence: Synthetic oligonucleotide
uccgaagugcaguuaaagu

SEQ ID NO: 2303074 - RNA, 19 nt, Artificial Sequence
  Description of Artificial Sequence: Synthetic oligonucleotide
aaaacacgcggcauguucu

SEQ ID NO: 2303075 - RNA, 19 nt, Artificial Sequence
  Description of Artificial Sequence: Synthetic oligonucleotide
ucaguaaagaaaguuugua

SEQ ID NO: 2303076 - RNA, 19 nt, Artificial Sequence
  Description of Artificial Sequence: Synthetic oligonucleotide
aaaaugcuucacggagacc

SEQ ID NO: 2303077 - RNA, 19 nt, Artificial Sequence
  Description of Artificial Sequence: Synthetic oligonucleotide
agauaaccugaaauagggc

SEQ ID NO: 2303078 - RNA, 19 nt, Artificial Sequence
  Description of Artificial Sequence: Synthetic oligonucleotide
uucauaacauuggugcuac

SEQ ID NO: 2303079 - RNA, 19 nt, Artificial Sequence
  Description of Artificial Sequence: Synthetic oligonucleotide
uccuccuucuagaaauagc

SEQ ID NO: 2303080 - RNA, 19 nt, Artificial Sequence
  Description of Artificial Sequence: Synthetic oligonucleotide
ucccgaaugauaaacucuu

SEQ ID NO: 2303081 - RNA, 19 nt, Artificial Sequence
  Description of Artificial Sequence: Synthetic oligonucleotide
ugaccugggucuuauuaca

SEQ ID NO: 2303082 - RNA, 19 nt, Artificial Sequence
  Description of Artificial Sequence: Synthetic oligonucleotide
accuugguaacacauccga

SEQ ID NO: 2303083 - RNA, 19 nt, Artificial Sequence
  Description of Artificial Sequence: Synthetic oligonucleotide
gaggguuucaguaaagaaa

SEQ ID NO: 2303084 - RNA, 19 nt, Artificial Sequence
  Description of Artificial Sequence: Synthetic oligonucleotide
uuccuaacguugucaaggc

SEQ ID NO: 2303085 - RNA, 19 nt, Artificial Sequence
  Description of Artificial Sequence: Synthetic oligonucleotide
gaauccucgauuaucuguc

SEQ ID NO: 2303086 - RNA, 19 nt, Artificial Sequence
  Description of Artificial Sequence: Synthetic oligonucleotide
uucuaaucauguacuguaa

SEQ ID NO: 2303087 - RNA, 19 nt, Artificial Sequence
  Description of Artificial Sequence: Synthetic oligonucleotide
ucgcauuuuccacuguaac

SEQ ID NO: 2303088 - RNA, 19 nt, Artificial Sequence
  Description of Artificial Sequence: Synthetic oligonucleotide
uggugcuacagaaaucaaa

SEQ ID NO: 2303089 - RNA, 19 nt, Artificial Sequence
  Description of Artificial Sequence: Synthetic oligonucleotide
gauuccuaacguugucaag

SEQ ID NO: 2303090 - RNA, 19 nt, Artificial Sequence
  Description of Artificial Sequence: Synthetic oligonucleotide
ugguguaggacuugaucca

SEQ ID NO: 2303091 - RNA, 19 nt, Artificial Sequence
  Description of Artificial Sequence: Synthetic oligonucleotide
uaguagcaaaacacgcggc

SEQ ID NO: 2303092 - RNA, 19 nt, Artificial Sequence
  Description of Artificial Sequence: Synthetic oligonucleotide
uccaacucggaaaaugcuu

SEQ ID NO: 2303093 - RNA, 19 nt, Artificial Sequence
  Description of Artificial Sequence: Synthetic oligonucleotide
ccgaauagauacuuuacag

SEQ ID NO: 2303094 - RNA, 19 nt, Artificial Sequence
  Description of Artificial Sequence: Synthetic oligonucleotide
ucaacgucuucaucgggac

SEQ ID NO: 2303095 - RNA, 19 nt, Artificial Sequence
  Description of Artificial Sequence: Synthetic oligonucleotide
caguaauauuccacaaaac

SEQ ID NO: 2303096 - RNA, 19 nt, Artificial Sequence
  Description of Artificial Sequence: Synthetic oligonucleotide
uucuucccgaaugauaaac

SEQ ID NO: 2303097 - RNA, 19 nt, Artificial Sequence
  Description of Artificial Sequence: Synthetic oligonucleotide
uugcaaacugucaccacuc

SEQ ID NO: 2303098 - RNA, 19 nt, Artificial Sequence
  Description of Artificial Sequence: Synthetic oligonucleotide
auaaagcuaaugccuuugu

SEQ ID NO: 2303099 - RNA, 19 nt, Artificial Sequence
  Description of Artificial Sequence: Synthetic oligonucleotide
caaaacacgcggcauguuc

SEQ ID NO: 2303100 - RNA, 19 nt, Artificial Sequence
  Description of Artificial Sequence: Synthetic oligonucleotide
uaaugagaggaauccucga

SEQ ID NO: 2303101 - RNA, 19 nt, Artificial Sequence
  Description of Artificial Sequence: Synthetic oligonucleotide
gacacggugaucugcagaa

SEQ ID NO: 2303102 - RNA, 19 nt, Artificial Sequence
  Description of Artificial Sequence: Synthetic oligonucleotide
aaagggugaccauaaccuu

SEQ ID NO: 2303103 - RNA, 19 nt, Artificial Sequence
  Description of Artificial Sequence: Synthetic oligonucleotide
uaaccugaaauagggcuug

SEQ ID NO: 2303104 - RNA, 19 nt, Artificial Sequence
  Description of Artificial Sequence: Synthetic oligonucleotide
agugcaguuaaaguaccug

SEQ ID NO: 2303105 - RNA, 19 nt, Artificial Sequence
  Description of Artificial Sequence: Synthetic oligonucleotide
cgaauagauacuuuacagg

SEQ ID NO: 2303106 - RNA, 19 nt, Artificial Sequence
  Description of Artificial Sequence: Synthetic oligonucleotide
gaacgugcuggguuaggag

SEQ ID NO: 2303107 - RNA, 19 nt, Artificial Sequence
  Description of Artificial Sequence: Synthetic oligonucleotide
agauuccuaacguugucaa

SEQ ID NO: 2303108 - RNA, 19 nt, Artificial Sequence
  Description of Artificial Sequence: Synthetic oligonucleotide
caguaaauuauucaagacu

SEQ ID NO: 2303109 - RNA, 19 nt, Artificial Sequence
  Description of Artificial Sequence: Synthetic oligonucleotide
agugaaaugcuuccaucaa

SEQ ID NO: 2303110 - RNA, 19 nt, Artificial Sequence
  Description of Artificial Sequence: Synthetic oligonucleotide
aucaaagggugaccauaac

SEQ ID NO: 2303111 - RNA, 19 nt, Artificial Sequence
  Description of Artificial Sequence: Synthetic oligonucleotide
uucgcauuuuccacuguaa

SEQ ID NO: 2303112 - RNA, 19 nt, Artificial Sequence
  Description of Artificial Sequence: Synthetic oligonucleotide
acaguggagagauuccuaa

SEQ ID NO: 2303113 - RNA, 19 nt, Artificial Sequence
  Description of Artificial Sequence: Synthetic oligonucleotide
cauguacuguaaugagagg

SEQ ID NO: 2303114 - RNA, 19 nt, Artificial Sequence
  Description of Artificial Sequence: Synthetic oligonucleotide
gaagugcaguuaaaguacc

SEQ ID NO: 2303115 - RNA, 19 nt, Artificial Sequence
  Description of Artificial Sequence: Synthetic oligonucleotide
aucuucauuucuaaucaug

SEQ ID NO: 2303116 - RNA, 19 nt, Artificial Sequence
  Description of Artificial Sequence: Synthetic oligonucleotide
ggauaguuaaguuaacucu

SEQ ID NO: 2303117 - RNA, 19 nt, Artificial Sequence
  Description of Artificial Sequence: Synthetic oligonucleotide
aaccuugguaacacauccg

SEQ ID NO: 2303118 - RNA, 19 nt, Artificial Sequence
  Description of Artificial Sequence: Synthetic oligonucleotide
ugcaaacugucaccacucc

SEQ ID NO: 2303119 - RNA, 19 nt, Artificial Sequence
  Description of Artificial Sequence: Synthetic oligonucleotide
ucaaggugggagcuuccug

SEQ ID NO: 2303120 - RNA, 19 nt, Artificial Sequence
  Description of Artificial Sequence: Synthetic oligonucleotide
ccuaacguugucaaggcug

SEQ ID NO: 2303121 - RNA, 19 nt, Artificial Sequence
  Description of Artificial Sequence: Synthetic oligonucleotide
cugcauuuccaaaaguaga

SEQ ID NO: 2303122 - RNA, 19 nt, Artificial Sequence
  Description of Artificial Sequence: Synthetic oligonucleotide
cagugaaaugcuuccauca

SEQ ID NO: 2303123 - RNA, 19 nt, Artificial Sequence
  Description of Artificial Sequence: Synthetic oligonucleotide
uaguuaaguuaacucugaa

SEQ ID NO: 2303124 - RNA, 19 nt, Artificial Sequence
  Description of Artificial Sequence: Synthetic oligonucleotide
aggagacacggugaucugc

SEQ ID NO: 2303125 - RNA, 19 nt, Artificial Sequence
  Description of Artificial Sequence: Synthetic oligonucleotide
cacggagacccucugacug

SEQ ID NO: 2303126 - RNA, 19 nt, Artificial Sequence
  Description of Artificial Sequence: Synthetic oligonucleotide
uuauuacagugaaaugcuu

SEQ ID NO: 2303127 - RNA, 19 nt, Artificial Sequence
  Description of Artificial Sequence: Synthetic oligonucleotide
aucacuugucauguccaac

SEQ ID NO: 2303128 - RNA, 19 nt, Artificial Sequence
  Description of Artificial Sequence: Synthetic oligonucleotide
gaaggaugcuccucuucug

SEQ ID NO: 2303129 - RNA, 19 nt, Artificial Sequence
  Description of Artificial Sequence: Synthetic oligonucleotide
agaaucuuugggauaguca

SEQ ID NO: 2303130 - RNA, 19 nt, Artificial Sequence
  Description of Artificial Sequence: Synthetic oligonucleotide
acauccgaagugcaguuaa

SEQ ID NO: 2303131 - RNA, 19 nt, Artificial Sequence
  Description of Artificial Sequence: Synthetic oligonucleotide
gucaaggcuggccacuaag

SEQ ID NO: 2303132 - RNA, 19 nt, Artificial Sequence
  Description of Artificial Sequence: Synthetic oligonucleotide
auuugcccaucuucauuuc

SEQ ID NO: 2303133 - RNA, 19 nt, Artificial Sequence
  Description of Artificial Sequence: Synthetic oligonucleotide
auguccaacucggaaaaug

SEQ ID NO: 2303134 - RNA, 19 nt, Artificial Sequence
  Description of Artificial Sequence: Synthetic oligonucleotide
gagacccucugacugcaag

SEQ ID NO: 2303135 - RNA, 19 nt, Artificial Sequence
  Description of Artificial Sequence: Synthetic oligonucleotide
uagaggguuucaguaaaga

SEQ ID NO: 2303136 - RNA, 19 nt, Artificial Sequence
  Description of Artificial Sequence: Synthetic oligonucleotide
acagucuaaaaggauaguu

SEQ ID NO: 2303137 - RNA, 19 nt, Artificial Sequence
  Description of Artificial Sequence: Synthetic oligonucleotide
acguugucaaggcuggcca

SEQ ID NO: 2303138 - RNA, 19 nt, Artificial Sequence
  Description of Artificial Sequence: Synthetic oligonucleotide
gauuaucuguccgaauaga

SEQ ID NO: 2303139 - RNA, 19 nt, Artificial Sequence
  Description of Artificial Sequence: Synthetic oligonucleotide
auaguuaaguuaacucuga

SEQ ID NO: 2303140 - RNA, 19 nt, Artificial Sequence
  Description of Artificial Sequence: Synthetic oligonucleotide
auccgaagugcaguuaaag

SEQ ID NO: 2303141 - RNA, 19 nt, Artificial Sequence
  Description of Artificial Sequence: Synthetic oligonucleotide
gcuaaugccuuuguagagg

SEQ ID NO: 2303142 - RNA, 19 nt, Artificial Sequence
  Description of Artificial Sequence: Synthetic oligonucleotide
ugguccacugcacggucag

SEQ ID NO: 2303143 - RNA, 19 nt, Artificial Sequence
  Description of Artificial Sequence: Synthetic oligonucleotide
augagaggaauccucgauu

SEQ ID NO: 2303144 - RNA, 19 nt, Artificial Sequence
  Description of Artificial Sequence: Synthetic oligonucleotide
aucauguacuguaaugaga

SEQ ID NO: 2303145 - RNA, 19 nt, Artificial Sequence
  Description of Artificial Sequence: Synthetic oligonucleotide
acucaacgucuucaucggg

SEQ ID NO: 2303146 - RNA, 19 nt, Artificial Sequence
  Description of Artificial Sequence: Synthetic oligonucleotide
gggauagucaaggugggag

SEQ ID NO: 2303147 - RNA, 19 nt, Artificial Sequence
  Description of Artificial Sequence: Synthetic oligonucleotide
ucguccugaacgugcuggg

SEQ ID NO: 2303148 - RNA, 19 nt, Artificial Sequence
  Description of Artificial Sequence: Synthetic oligonucleotide
ccuucuagaaauagcauca

SEQ ID NO: 2303149 - RNA, 19 nt, Artificial Sequence
  Description of Artificial Sequence: Synthetic oligonucleotide
cagucuaaaaggauaguua

SEQ ID NO: 2303150 - RNA, 19 nt, Artificial Sequence
  Description of Artificial Sequence: Synthetic oligonucleotide
auuaucuguccgaauagau

SEQ ID NO: 2303151 - RNA, 19 nt, Artificial Sequence
  Description of Artificial Sequence: Synthetic oligonucleotide
ugaacgugcuggguuagga

SEQ ID NO: 2303152 - RNA, 19 nt, Artificial Sequence
  Description of Artificial Sequence: Synthetic oligonucleotide
ugacugcaagauaauuuua

SEQ ID NO: 2303153 - RNA, 19 nt, Artificial Sequence
  Description of Artificial Sequence: Synthetic oligonucleotide
gagauuccuaacguuguca

SEQ ID NO: 2303154 - RNA, 19 nt, Artificial Sequence
  Description of Artificial Sequence: Synthetic oligonucleotide
uucaagacucaacgucuuc

SEQ ID NO: 2303155 - RNA, 19 nt, Artificial Sequence
  Description of Artificial Sequence: Synthetic oligonucleotide
ggauagucaaggugggagc

SEQ ID NO: 2303156 - RNA, 19 nt, Artificial Sequence
  Description of Artificial Sequence: Synthetic oligonucleotide
acaaaacauauuugcccau

SEQ ID NO: 2303157 - RNA, 19 nt, Artificial Sequence
  Description of Artificial Sequence: Synthetic oligonucleotide
ggugcuacagaaaucaaaa

SEQ ID NO: 2303158 - RNA, 19 nt, Artificial Sequence
  Description of Artificial Sequence: Synthetic oligonucleotide
guugaccugggucuuauua

SEQ ID NO: 2303159 - RNA, 19 nt, Artificial Sequence
  Description of Artificial Sequence: Synthetic oligonucleotide
cugcagaacaucacuuguc

SEQ ID NO: 2303160 - RNA, 19 nt, Artificial Sequence
  Description of Artificial Sequence: Synthetic oligonucleotide
aucgggacagcaguaauau

SEQ ID NO: 2303161 - RNA, 19 nt, Artificial Sequence
  Description of Artificial Sequence: Synthetic oligonucleotide
cgaagugcaguuaaaguac

SEQ ID NO: 2303162 - RNA, 19 nt, Artificial Sequence
  Description of Artificial Sequence: Synthetic oligonucleotide
acacgcggcauguucuuug

SEQ ID NO: 2303163 - RNA, 19 nt, Artificial Sequence
  Description of Artificial Sequence: Synthetic oligonucleotide
agacacggugaucugcaga

SEQ ID NO: 2303164 - RNA, 19 nt, Artificial Sequence
  Description of Artificial Sequence: Synthetic oligonucleotide
cagcucgaagagaaagaag

SEQ ID NO: 2303165 - RNA, 19 nt, Artificial Sequence
  Description of Artificial Sequence: Synthetic oligonucleotide
agcaaaacacgcggcaugu

SEQ ID NO: 2303166 - RNA, 19 nt, Artificial Sequence
  Description of Artificial Sequence: Synthetic oligonucleotide
uccuaacguugucaaggcu

SEQ ID NO: 2303167 - RNA, 19 nt, Artificial Sequence
  Description of Artificial Sequence: Synthetic oligonucleotide
ccuccuucuagaaauagca

SEQ ID NO: 2303168 - RNA, 19 nt, Artificial Sequence
  Description of Artificial Sequence: Synthetic oligonucleotide
ucuguccgaauagauacuu

SEQ ID NO: 2303169 - RNA, 19 nt, Artificial Sequence
  Description of Artificial Sequence: Synthetic oligonucleotide
ggcauguucuuugaaauga

SEQ ID NO: 2303170 - RNA, 19 nt, Artificial Sequence
  Description of Artificial Sequence: Synthetic oligonucleotide
agacccucugacugcaaga

SEQ ID NO: 2303171 - RNA, 19 nt, Artificial Sequence
  Description of Artificial Sequence: Synthetic oligonucleotide
aggaauccucgauuaucug

SEQ ID NO: 2303172 - RNA, 19 nt, Artificial Sequence
  Description of Artificial Sequence: Synthetic oligonucleotide
cacgcacuucgcauuuucc

SEQ ID NO: 2303173 - RNA, 19 nt, Artificial Sequence
  Description of Artificial Sequence: Synthetic oligonucleotide
caucaaagggugaccauaa

SEQ ID NO: 2303174 - RNA, 19 nt, Artificial Sequence
  Description of Artificial Sequence: Synthetic oligonucleotide
uugucauguccaacucgga

SEQ ID NO: 2303175 - RNA, 19 nt, Artificial Sequence
  Description of Artificial Sequence: Synthetic oligonucleotide
guuucaguaaagaaaguuu

SEQ ID NO: 2303176 - RNA, 19 nt, Artificial Sequence
  Description of Artificial Sequence: Synthetic oligonucleotide
uccugaacgugcuggguua

SEQ ID NO: 2303177 - RNA, 19 nt, Artificial Sequence
  Description of Artificial Sequence: Synthetic oligonucleotide
gaggaauccucgauuaucu

SEQ ID NO: 2303178 - RNA, 19 nt, Artificial Sequence
  Description of Artificial Sequence: Synthetic oligonucleotide
aaacacgcggcauguucuu

SEQ ID NO: 2303179 - RNA, 19 nt, Artificial Sequence
  Description of Artificial Sequence: Synthetic oligonucleotide
agacaguggagagauuccu

SEQ ID NO: 2303180 - RNA, 19 nt, Artificial Sequence
  Description of Artificial Sequence: Synthetic oligonucleotide
aaauagcaucaaaggguga

SEQ ID NO: 2303181 - RNA, 19 nt, Artificial Sequence
  Description of Artificial Sequence: Synthetic oligonucleotide
ucguccucguccugaacgu

SEQ ID NO: 2303182 - RNA, 19 nt, Artificial Sequence
  Description of Artificial Sequence: Synthetic oligonucleotide
guccgaauagauacuuuac

SEQ ID NO: 2303183 - RNA, 19 nt, Artificial Sequence
  Description of Artificial Sequence: Synthetic oligonucleotide
uugcuugcacgcacuucgc

SEQ ID NO: 2303184 - RNA, 19 nt, Artificial Sequence
  Description of Artificial Sequence: Synthetic oligonucleotide
uucaucgggacagcaguaa

SEQ ID NO: 2303185 - RNA, 19 nt, Artificial Sequence
  Description of Artificial Sequence: Synthetic oligonucleotide
gaugguccacugcacgguc

SEQ ID NO: 2303186 - RNA, 19 nt, Artificial Sequence
  Description of Artificial Sequence: Synthetic oligonucleotide
cacggugaucugcagaaca

SEQ ID NO: 2303187 - RNA, 19 nt, Artificial Sequence
  Description of Artificial Sequence: Synthetic oligonucleotide
caguggagagauuccuaac

SEQ ID NO: 2303188 - RNA, 19 nt, Artificial Sequence
  Description of Artificial Sequence: Synthetic oligonucleotide
caguuaaaguaccuggugu

SEQ ID NO: 2303189 - RNA, 19 nt, Artificial Sequence
  Description of Artificial Sequence: Synthetic oligonucleotide
uguaaccuugaguccguuu

SEQ ID NO: 2303190 - RNA, 19 nt, Artificial Sequence
  Description of Artificial Sequence: Synthetic oligonucleotide
cuggguuaggagaggcaug

SEQ ID NO: 2303191 - RNA, 19 nt, Artificial Sequence
  Description of Artificial Sequence: Synthetic oligonucleotide
cugacugcaagauaauuuu

SEQ ID NO: 2303192 - RNA, 19 nt, Artificial Sequence
  Description of Artificial Sequence: Synthetic oligonucleotide
gcauggaugguccacugca

SEQ ID NO: 2303193 - RNA, 19 nt, Artificial Sequence
  Description of Artificial Sequence: Synthetic oligonucleotide
gagacacggugaucugcag

SEQ ID NO: 2303194 - RNA, 19 nt, Artificial Sequence
  Description of Artificial Sequence: Synthetic oligonucleotide
uuggugcuacagaaaucaa

SEQ ID NO: 2303195 - RNA, 19 nt, Artificial Sequence
  Description of Artificial Sequence: Synthetic oligonucleotide
aggcuggccacuaagcagu

SEQ ID NO: 2303196 - RNA, 19 nt, Artificial Sequence
  Description of Artificial Sequence: Synthetic oligonucleotide
cuaaaaggauaguuaaguu

SEQ ID NO: 2303197 - RNA, 19 nt, Artificial Sequence
  Description of Artificial Sequence: Synthetic oligonucleotide
uaaugccuuuguagagggu

SEQ ID NO: 2303198 - RNA, 19 nt, Artificial Sequence
  Description of Artificial Sequence: Synthetic oligonucleotide
cagaaucuuugggauaguc

SEQ ID NO: 2303199 - RNA, 19 nt, Artificial Sequence
  Description of Artificial Sequence: Synthetic oligonucleotide
gauagucaaggugggagcu

SEQ ID NO: 2303200 - RNA, 19 nt, Artificial Sequence
  Description of Artificial Sequence: Synthetic oligonucleotide
uguucguccucguccugaa

SEQ ID NO: 2303201 - RNA, 19 nt, Artificial Sequence
  Description of Artificial Sequence: Synthetic oligonucleotide
acggucagcucgaagagaa

SEQ ID NO: 2303202 - RNA, 19 nt, Artificial Sequence
  Description of Artificial Sequence: Synthetic oligonucleotide
acuuuacaggauaaagcua

SEQ ID NO: 2303203 - RNA, 19 nt, Artificial Sequence
  Description of Artificial Sequence: Synthetic oligonucleotide
acgugcuggguuaggagag

SEQ ID NO: 2303204 - RNA, 19 nt, Artificial Sequence
  Description of Artificial Sequence: Synthetic oligonucleotide
agucaaggugggagcuucc

SEQ ID NO: 2303205 - RNA, 19 nt, Artificial Sequence
  Description of Artificial Sequence: Synthetic oligonucleotide
acacauccgaagugcaguu

SEQ ID NO: 2303206 - RNA, 19 nt, Artificial Sequence
  Description of Artificial Sequence: Synthetic oligonucleotide
ucauaacauuggugcuaca

SEQ ID NO: 2303207 - RNA, 19 nt, Artificial Sequence
  Description of Artificial Sequence: Synthetic oligonucleotide
gaacaucacuugucauguc

SEQ ID NO: 2303208 - RNA, 19 nt, Artificial Sequence
  Description of Artificial Sequence: Synthetic oligonucleotide
ccgaagugcaguuaaagua

SEQ ID NO: 2303209 - RNA, 19 nt, Artificial Sequence
  Description of Artificial Sequence: Synthetic oligonucleotide
uugcacgcacuucgcauuu

SEQ ID NO: 2303210 - RNA, 19 nt, Artificial Sequence
  Description of Artificial Sequence: Synthetic oligonucleotide
aguaccugguguaggacuu

SEQ ID NO: 2303211 - RNA, 19 nt, Artificial Sequence
  Description of Artificial Sequence: Synthetic oligonucleotide
cgauuaucuguccgaauag

SEQ ID NO: 2303212 - RNA, 19 nt, Artificial Sequence
  Description of Artificial Sequence: Synthetic oligonucleotide
cuggccacuaagcaguacu

SEQ ID NO: 2303213 - RNA, 19 nt, Artificial Sequence
  Description of Artificial Sequence: Synthetic oligonucleotide
acacggugaucugcagaac

SEQ ID NO: 2303214 - RNA, 19 nt, Artificial Sequence
  Description of Artificial Sequence: Synthetic oligonucleotide
ugggauagucaagguggga

SEQ ID NO: 2303215 - RNA, 19 nt, Artificial Sequence
  Description of Artificial Sequence: Synthetic oligonucleotide
ccgaaugauaaacucuuga

SEQ ID NO: 2303216 - RNA, 19 nt, Artificial Sequence
  Description of Artificial Sequence: Synthetic oligonucleotide
gcacggucagcucgaagag

SEQ ID NO: 2303217 - RNA, 19 nt, Artificial Sequence
  Description of Artificial Sequence: Synthetic oligonucleotide
gcaguacuguucguccucg

SEQ ID NO: 2303218 - RNA, 19 nt, Artificial Sequence
  Description of Artificial Sequence: Synthetic oligonucleotide
aaccugaaauagggcuugu

SEQ ID NO: 2303219 - RNA, 19 nt, Artificial Sequence
  Description of Artificial Sequence: Synthetic oligonucleotide
caucgggacagcaguaaua

SEQ ID NO: 2303220 - RNA, 19 nt, Artificial Sequence
  Description of Artificial Sequence: Synthetic oligonucleotide
agccugaauaaaggcauuu

SEQ ID NO: 2303221 - RNA, 19 nt, Artificial Sequence
  Description of Artificial Sequence: Synthetic oligonucleotide
ccacuguaaccuugagucc

SEQ ID NO: 2303222 - RNA, 19 nt, Artificial Sequence
  Description of Artificial Sequence: Synthetic oligonucleotide
acuguaaccuugaguccgu

SEQ ID NO: 2303223 - RNA, 19 nt, Artificial Sequence
  Description of Artificial Sequence: Synthetic oligonucleotide
uaacguugucaaggcuggc

SEQ ID NO: 2303224 - RNA, 19 nt, Artificial Sequence
  Description of Artificial Sequence: Synthetic oligonucleotide
cugaacgugcuggguuagg

SEQ ID NO: 2303225 - RNA, 19 nt, Artificial Sequence
  Description of Artificial Sequence: Synthetic oligonucleotide
gaucugcagaacaucacuu

SEQ ID NO: 2303226 - RNA, 19 nt, Artificial Sequence
  Description of Artificial Sequence: Synthetic oligonucleotide
aucuguccgaauagauacu

SEQ ID NO: 2303227 - RNA, 19 nt, Artificial Sequence
  Description of Artificial Sequence: Synthetic oligonucleotide
gguuucaguaaagaaaguu

SEQ ID NO: 2303228 - RNA, 19 nt, Artificial Sequence
  Description of Artificial Sequence: Synthetic oligonucleotide
caucacuugucauguccaa

SEQ ID NO: 2303229 - RNA, 19 nt, Artificial Sequence
  Description of Artificial Sequence: Synthetic oligonucleotide
ggagacacggugaucugca

SEQ ID NO: 2303230 - RNA, 19 nt, Artificial Sequence
  Description of Artificial Sequence: Synthetic oligonucleotide
acggugaucugcagaacau

SEQ ID NO: 2303231 - RNA, 19 nt, Artificial Sequence
  Description of Artificial Sequence: Synthetic oligonucleotide
gagaggcauggauggucca

SEQ ID NO: 2303232 - RNA, 19 nt, Artificial Sequence
  Description of Artificial Sequence: Synthetic oligonucleotide
uugucaaggcuggccacua

SEQ ID NO: 2303233 - RNA, 19 nt, Artificial Sequence
  Description of Artificial Sequence: Synthetic oligonucleotide
auauuccacaaaacauauu

SEQ ID NO: 2303234 - RNA, 19 nt, Artificial Sequence
  Description of Artificial Sequence: Synthetic oligonucleotide
guuccuggguguuaauuuu

SEQ ID NO: 2303235 - RNA, 19 nt, Artificial Sequence
  Description of Artificial Sequence: Synthetic oligonucleotide
ucaagacaguggagagauu

SEQ ID NO: 2303236 - RNA, 19 nt, Artificial Sequence
  Description of Artificial Sequence: Synthetic oligonucleotide
cuucacggagacccucuga

SEQ ID NO: 2303237 - RNA, 19 nt, Artificial Sequence
  Description of Artificial Sequence: Synthetic oligonucleotide
cgcacuucgcauuuuccac

SEQ ID NO: 2303238 - RNA, 19 nt, Artificial Sequence
  Description of Artificial Sequence: Synthetic oligonucleotide
gguuaggagaggcauggau

SEQ ID NO: 2303239 - RNA, 19 nt, Artificial Sequence
  Description of Artificial Sequence: Synthetic oligonucleotide
cuucaucgggacagcagua

SEQ ID NO: 2303240 - RNA, 19 nt, Artificial Sequence
  Description of Artificial Sequence: Synthetic oligonucleotide
aacacgcggcauguucuuu

SEQ ID NO: 2303241 - RNA, 19 nt, Artificial Sequence
  Description of Artificial Sequence: Synthetic oligonucleotide
ucgggacagcaguaauauu

SEQ ID NO: 2303242 - RNA, 19 nt, Artificial Sequence
  Description of Artificial Sequence: Synthetic oligonucleotide
guaccugguguaggacuug

SEQ ID NO: 2303243 - RNA, 19 nt, Artificial Sequence
  Description of Artificial Sequence: Synthetic oligonucleotide
guagcaaaacacgcggcau

SEQ ID NO: 2303244 - RNA, 19 nt, Artificial Sequence
  Description of Artificial Sequence: Synthetic oligonucleotide
cugcacggucagcucgaag

SEQ ID NO: 2303245 - RNA, 19 nt, Artificial Sequence
  Description of Artificial Sequence: Synthetic oligonucleotide
cauccgaagugcaguuaaa

SEQ ID NO: 2303246 - RNA, 19 nt, Artificial Sequence
  Description of Artificial Sequence: Synthetic oligonucleotide
guacuguaaugagaggaau

SEQ ID NO: 2303247 - RNA, 19 nt, Artificial Sequence
  Description of Artificial Sequence: Synthetic oligonucleotide
gcaucaaagggugaccaua

SEQ ID NO: 2303248 - RNA, 19 nt, Artificial Sequence
  Description of Artificial Sequence: Synthetic oligonucleotide
uguugaccugggucuuauu

SEQ ID NO: 2303249 - RNA, 19 nt, Artificial Sequence
  Description of Artificial Sequence: Synthetic oligonucleotide
caacgucuucaucgggaca

SEQ ID NO: 2303250 - RNA, 19 nt, Artificial Sequence
  Description of Artificial Sequence: Synthetic oligonucleotide
cccgaaugauaaacucuug

SEQ ID NO: 2303251 - RNA, 19 nt, Artificial Sequence
  Description of Artificial Sequence: Synthetic oligonucleotide
cacgcggcauguucuuuga

SEQ ID NO: 2303252 - RNA, 19 nt, Artificial Sequence
  Description of Artificial Sequence: Synthetic oligonucleotide
gacccucugacugcaagau

SEQ ID NO: 2303253 - RNA, 19 nt, Artificial Sequence
  Description of Artificial Sequence: Synthetic oligonucleotide
augccuuuguagaggguuu

SEQ ID NO: 2303254 - RNA, 19 nt, Artificial Sequence
  Description of Artificial Sequence: Synthetic oligonucleotide
guugucaaggcuggccacu

SEQ ID NO: 2303255 - RNA, 19 nt, Artificial Sequence
  Description of Artificial Sequence: Synthetic oligonucleotide
acccucugacugcaagaua

SEQ ID NO: 2303256 - RNA, 19 nt, Artificial Sequence
  Description of Artificial Sequence: Synthetic oligonucleotide
cuugcacgcacuucgcauu

SEQ ID NO: 2303257 - RNA, 19 nt, Artificial Sequence
  Description of Artificial Sequence: Synthetic oligonucleotide
cuccuucuagaaauagcau

SEQ ID NO: 2303258 - RNA, 19 nt, Artificial Sequence
  Description of Artificial Sequence: Synthetic oligonucleotide
gcggcauguucuuugaaau

SEQ ID NO: 2303259 - RNA, 19 nt, Artificial Sequence
  Description of Artificial Sequence: Synthetic oligonucleotide
gcuucacggagacccucug

SEQ ID NO: 2303260 - RNA, 19 nt, Artificial Sequence
  Description of Artificial Sequence: Synthetic oligonucleotide
gcacgcacuucgcauuuuc

SEQ ID NO: 2303261 - RNA, 19 nt, Artificial Sequence
  Description of Artificial Sequence: Synthetic oligonucleotide
guccugaacgugcuggguu

SEQ ID NO: 2303262 - RNA, 19 nt, Artificial Sequence
  Description of Artificial Sequence: Synthetic oligonucleotide
gcaaacugucaccacuccu

SEQ ID NO: 2303263 - RNA, 19 nt, Artificial Sequence
  Description of Artificial Sequence: Synthetic oligonucleotide
gguguaggacuugauccaa

SEQ ID NO: 2303264 - RNA, 19 nt, Artificial Sequence
  Description of Artificial Sequence: Synthetic oligonucleotide
cggcauguucuuugaaaug

SEQ ID NO: 2303265 - RNA, 19 nt, Artificial Sequence
  Description of Artificial Sequence: Synthetic oligonucleotide
ccuggguguuaauuuugca

SEQ ID NO: 2303266 - RNA, 19 nt, Artificial Sequence
  Description of Artificial Sequence: Synthetic oligonucleotide
ugggagcuuccugcauuuc

SEQ ID NO: 2303267 - RNA, 19 nt, Artificial Sequence
  Description of Artificial Sequence: Synthetic oligonucleotide
acgcggcauguucuuugaa

SEQ ID NO: 2303268 - RNA, 19 nt, Artificial Sequence
  Description of Artificial Sequence: Synthetic oligonucleotide
cacggucagcucgaagaga

SEQ ID NO: 2303269 - RNA, 19 nt, Artificial Sequence
  Description of Artificial Sequence: Synthetic oligonucleotide
ccuugguaacacauccgaa

SEQ ID NO: 2303270 - RNA, 19 nt, Artificial Sequence
  Description of Artificial Sequence: Synthetic oligonucleotide
gcuugcacgcacuucgcau

SEQ ID NO: 2303271 - RNA, 19 nt, Artificial Sequence
  Description of Artificial Sequence: Synthetic oligonucleotide
cucgauuaucuguccgaau

SEQ ID NO: 2303272 - RNA, 19 nt, Artificial Sequence
  Description of Artificial Sequence: Synthetic oligonucleotide
cguugucaaggcuggccac

SEQ ID NO: 2303273 - RNA, 19 nt, Artificial Sequence
  Description of Artificial Sequence: Synthetic oligonucleotide
ccugaacgugcuggguuag

SEQ ID NO: 2303274 - RNA, 19 nt, Artificial Sequence
  Description of Artificial Sequence: Synthetic oligonucleotide
ugcacgcacuucgcauuuu

SEQ ID NO: 2303275 - RNA, 19 nt, Artificial Sequence
  Description of Artificial Sequence: Synthetic oligonucleotide
cucugacugcaagauaauu

SEQ ID NO: 2303276 - RNA, 19 nt, Artificial Sequence
  Description of Artificial Sequence: Synthetic oligonucleotide
gaauggcuuucaagacagu

SEQ ID NO: 2303277 - RNA, 19 nt, Artificial Sequence
  Description of Artificial Sequence: Synthetic oligonucleotide
cuguccgaauagauacuuu

SEQ ID NO: 2303278 - RNA, 19 nt, Artificial Sequence
  Description of Artificial Sequence: Synthetic oligonucleotide
accugguguaggacuugau

SEQ ID NO: 2303279 - RNA, 19 nt, Artificial Sequence
  Description of Artificial Sequence: Synthetic oligonucleotide
cacauccgaagugcaguua

SEQ ID NO: 2303280 - RNA, 19 nt, Artificial Sequence
  Description of Artificial Sequence: Synthetic oligonucleotide
ggaugguccacugcacggu

SEQ ID NO: 2303281 - RNA, 19 nt, Artificial Sequence
  Description of Artificial Sequence: Synthetic oligonucleotide
cgcggcauguucuuugaaa

SEQ ID NO: 2303282 - RNA, 19 nt, Artificial Sequence
  Description of Artificial Sequence: Synthetic oligonucleotide
acugcacggucagcucgaa

SEQ ID NO: 2303283 - RNA, 19 nt, Artificial Sequence
  Description of Artificial Sequence: Synthetic oligonucleotide
ggccacuaagcaguacugu

SEQ ID NO: 2303284 - RNA, 19 nt, Artificial Sequence
  Description of Artificial Sequence: Synthetic oligonucleotide
gcauuugcuugcacgcacu

SEQ ID NO: 2303285 - RNA, 19 nt, Artificial Sequence
  Description of Artificial Sequence: Synthetic oligonucleotide
cuguugaccugggucuuau

SEQ ID NO: 2303286 - RNA, 19 nt, Artificial Sequence
  Description of Artificial Sequence: Synthetic oligonucleotide
cggugaucugcagaacauc

SEQ ID NO: 2303287 - RNA, 19 nt, Artificial Sequence
  Description of Artificial Sequence: Synthetic oligonucleotide
caguacuguucguccucgu

SEQ ID NO: 2303288 - RNA, 19 nt, Artificial Sequence
  Description of Artificial Sequence: Synthetic oligonucleotide
ggguuucaguaaagaaagu

SEQ ID NO: 2303289 - RNA, 19 nt, Artificial Sequence
  Description of Artificial Sequence: Synthetic oligonucleotide
cauguccaacucggaaaau

SEQ ID NO: 2303290 - RNA, 19 nt, Artificial Sequence
  Description of Artificial Sequence: Synthetic oligonucleotide
cguccucguccugaacgug

SEQ ID NO: 2303291 - RNA, 19 nt, Artificial Sequence
  Description of Artificial Sequence: Synthetic oligonucleotide
ggagacccucugacugcaa

SEQ ID NO: 2303292 - RNA, 19 nt, Artificial Sequence
  Description of Artificial Sequence: Synthetic oligonucleotide
ggcuggccacuaagcagua

SEQ ID NO: 2303293 - RNA, 19 nt, Artificial Sequence
  Description of Artificial Sequence: Synthetic oligonucleotide
gcaaaacacgcggcauguu

SEQ ID NO: 2303294 - RNA, 19 nt, Artificial Sequence
  Description of Artificial Sequence: Synthetic oligonucleotide
cggucagcucgaagagaaa

SEQ ID NO: 2303295 - RNA, 19 nt, Artificial Sequence
  Description of Artificial Sequence: Synthetic oligonucleotide
cguccugaacgugcugggu

SEQ ID NO: 2303296 - RNA, 19 nt, Artificial Sequence
  Description of Artificial Sequence: Synthetic oligonucleotide
aaucauggcgcuuagagcc

SEQ ID NO: 2303297 - RNA, 19 nt, Artificial Sequence
  Description of Artificial Sequence: Synthetic oligonucleotide
gauguaaucguccucaacg

SEQ ID NO: 2303298 - RNA, 19 nt, Artificial Sequence
  Description of Artificial Sequence: Synthetic oligonucleotide
aaauauucgucaaacaugg

SEQ ID NO: 2303299 - RNA, 19 nt, Artificial Sequence
  Description of Artificial Sequence: Synthetic oligonucleotide
uugagaaucaacaaggaac

SEQ ID NO: 2303300 - RNA, 19 nt, Artificial Sequence
  Description of Artificial Sequence: Synthetic oligonucleotide
uauucgucaaacauggagg

SEQ ID NO: 2303301 - RNA, 19 nt, Artificial Sequence
  Description of Artificial Sequence: Synthetic oligonucleotide
uucuagagaaaucauggcg

SEQ ID NO: 2303302 - RNA, 19 nt, Artificial Sequence
  Description of Artificial Sequence: Synthetic oligonucleotide
agaaauaaacuugaaagac

SEQ ID NO: 2303303 - RNA, 19 nt, Artificial Sequence
  Description of Artificial Sequence: Synthetic oligonucleotide
gaucauauggcagaaaccg

SEQ ID NO: 2303304 - RNA, 19 nt, Artificial Sequence
  Description of Artificial Sequence: Synthetic oligonucleotide
ugaaucuucuagcagagag

SEQ ID NO: 2303305 - RNA, 19 nt, Artificial Sequence
  Description of Artificial Sequence: Synthetic oligonucleotide
caugauguuaacuuguggg

SEQ ID NO: 2303306 - RNA, 19 nt, Artificial Sequence
  Description of Artificial Sequence: Synthetic oligonucleotide
ucuagagaaaucauggcgc

SEQ ID NO: 2303307 - RNA, 19 nt, Artificial Sequence
  Description of Artificial Sequence: Synthetic oligonucleotide
aaaucauggcgcuuagagc

SEQ ID NO: 2303308 - RNA, 19 nt, Artificial Sequence
  Description of Artificial Sequence: Synthetic oligonucleotide
gaaaucauggcgcuuagag

SEQ ID NO: 2303309 - RNA, 19 nt, Artificial Sequence
  Description of Artificial Sequence: Synthetic oligonucleotide
ugagaaucaacaaggaaca

SEQ ID NO: 2303310 - RNA, 19 nt, Artificial Sequence
  Description of Artificial Sequence: Synthetic oligonucleotide
aguugaagugcucugcugc

SEQ ID NO: 2303311 - RNA, 19 nt, Artificial Sequence
  Description of Artificial Sequence: Synthetic oligonucleotide
auacaguucaaucugaccu

SEQ ID NO: 2303312 - RNA, 19 nt, Artificial Sequence
  Description of Artificial Sequence: Synthetic oligonucleotide
auuucuagagaaaucaugg

SEQ ID NO: 2303313 - RNA, 19 nt, Artificial Sequence
  Description of Artificial Sequence: Synthetic oligonucleotide
auauucgucaaacauggag

SEQ ID NO: 2303314 - RNA, 19 nt, Artificial Sequence
  Description of Artificial Sequence: Synthetic oligonucleotide
aauaccaauccuccauugg

SEQ ID NO: 2303315 - RNA, 19 nt, Artificial Sequence
  Description of Artificial Sequence: Synthetic oligonucleotide
uucaaucugaccuggacag

SEQ ID NO: 2303316 - RNA, 19 nt, Artificial Sequence
  Description of Artificial Sequence: Synthetic oligonucleotide
uguugaaucuucuagcaga

SEQ ID NO: 2303317 - RNA, 19 nt, Artificial Sequence
  Description of Artificial Sequence: Synthetic oligonucleotide
gagaguauaagucuggauc

SEQ ID NO: 2303318 - RNA, 19 nt, Artificial Sequence
  Description of Artificial Sequence: Synthetic oligonucleotide
uucucaauuuccuucuugg

SEQ ID NO: 2303319 - RNA, 19 nt, Artificial Sequence
  Description of Artificial Sequence: Synthetic oligonucleotide
uacugaauggcaaagucga

SEQ ID NO: 2303320 - RNA, 19 nt, Artificial Sequence
  Description of Artificial Sequence: Synthetic oligonucleotide
aacaguaggugcucuuccc

SEQ ID NO: 2303321 - RNA, 19 nt, Artificial Sequence
  Description of Artificial Sequence: Synthetic oligonucleotide
aaaaggauguaaucguccu

SEQ ID NO: 2303322 - RNA, 19 nt, Artificial Sequence
  Description of Artificial Sequence: Synthetic oligonucleotide
uuugucaugauguuaacuu

SEQ ID NO: 2303323 - RNA, 19 nt, Artificial Sequence
  Description of Artificial Sequence: Synthetic oligonucleotide
caugaauugagaaucaaca

SEQ ID NO: 2303324 - RNA, 19 nt, Artificial Sequence
  Description of Artificial Sequence: Synthetic oligonucleotide
auauggcagaaaccgaacc

SEQ ID NO: 2303325 - RNA, 19 nt, Artificial Sequence
  Description of Artificial Sequence: Synthetic oligonucleotide
caaacauggaggaagacuc

SEQ ID NO: 2303326 - RNA, 19 nt, Artificial Sequence
  Description of Artificial Sequence: Synthetic oligonucleotide
auaccaauccuccauuggg

SEQ ID NO: 2303327 - RNA, 19 nt, Artificial Sequence
  Description of Artificial Sequence: Synthetic oligonucleotide
accuguugaaucuucuagc

SEQ ID NO: 2303328 - RNA, 19 nt, Artificial Sequence
  Description of Artificial Sequence: Synthetic oligonucleotide
gaacacuccacacacucgg

SEQ ID NO: 2303329 - RNA, 19 nt, Artificial Sequence
  Description of Artificial Sequence: Synthetic oligonucleotide
aauaaacuugaaagacucc

SEQ ID NO: 2303330 - RNA, 19 nt, Artificial Sequence
  Description of Artificial Sequence: Synthetic oligonucleotide
ugcagaauaccaauccucc

SEQ ID NO: 2303331 - RNA, 19 nt, Artificial Sequence
  Description of Artificial Sequence: Synthetic oligonucleotide
aaguacuccaugcagaaua

SEQ ID NO: 2303332 - RNA, 19 nt, Artificial Sequence
  Description of Artificial Sequence: Synthetic oligonucleotide
cauccgacugaucauaugg

SEQ ID NO: 2303333 - RNA, 19 nt, Artificial Sequence
  Description of Artificial Sequence: Synthetic oligonucleotide
ucuagcagagaguauaagu

SEQ ID NO: 2303334 - RNA, 19 nt, Artificial Sequence
  Description of Artificial Sequence: Synthetic oligonucleotide
cuuagagccgccaggaugc

SEQ ID NO: 2303335 - RNA, 19 nt, Artificial Sequence
  Description of Artificial Sequence: Synthetic oligonucleotide
acuugugggauuucuagag

SEQ ID NO: 2303336 - RNA, 19 nt, Artificial Sequence
  Description of Artificial Sequence: Synthetic oligonucleotide
uccauugggaccaaaccgc

SEQ ID NO: 2303337 - RNA, 19 nt, Artificial Sequence
  Description of Artificial Sequence: Synthetic oligonucleotide
acaucguccaccucgauca

SEQ ID NO: 2303338 - RNA, 19 nt, Artificial Sequence
  Description of Artificial Sequence: Synthetic oligonucleotide
gaaucaacaaggaacacuc

SEQ ID NO: 2303339 - RNA, 19 nt, Artificial Sequence
  Description of Artificial Sequence: Synthetic oligonucleotide
caggaugccagaaauaaac

SEQ ID NO: 2303340 - RNA, 19 nt, Artificial Sequence
  Description of Artificial Sequence: Synthetic oligonucleotide
ucaugauguuaacuugugg

SEQ ID NO: 2303341 - RNA, 19 nt, Artificial Sequence
  Description of Artificial Sequence: Synthetic oligonucleotide
uccuuaaacuccaaguccu

SEQ ID NO: 2303342 - RNA, 19 nt, Artificial Sequence
  Description of Artificial Sequence: Synthetic oligonucleotide
uggacagagcgguugaggg

SEQ ID NO: 2303343 - RNA, 19 nt, Artificial Sequence
  Description of Artificial Sequence: Synthetic oligonucleotide
agguugaccaccuggacag

SEQ ID NO: 2303344 - RNA, 19 nt, Artificial Sequence
  Description of Artificial Sequence: Synthetic oligonucleotide
ugaccaccuggacagagcg

SEQ ID NO: 2303345 - RNA, 19 nt, Artificial Sequence
  Description of Artificial Sequence: Synthetic oligonucleotide
uuaaacuccaaguccuccc

SEQ ID NO: 2303346 - RNA, 19 nt, Artificial Sequence
  Description of Artificial Sequence: Synthetic oligonucleotide
ugaucauauggcagaaacc

SEQ ID NO: 2303347 - RNA, 19 nt, Artificial Sequence
  Description of Artificial Sequence: Synthetic oligonucleotide
cugaucauauggcagaaac

SEQ ID NO: 2303348 - RNA, 19 nt, Artificial Sequence
  Description of Artificial Sequence: Synthetic oligonucleotide
auaaacuugaaagacucca

SEQ ID NO: 2303349 - RNA, 19 nt, Artificial Sequence
  Description of Artificial Sequence: Synthetic oligonucleotide
ugucaugauguuaacuugu

SEQ ID NO: 2303350 - RNA, 19 nt, Artificial Sequence
  Description of Artificial Sequence: Synthetic oligonucleotide
ucauauggcagaaaccgaa

SEQ ID NO: 2303351 - RNA, 19 nt, Artificial Sequence
  Description of Artificial Sequence: Synthetic oligonucleotide
uauacaguucaaucugacc

SEQ ID NO: 2303352 - RNA, 19 nt, Artificial Sequence
  Description of Artificial Sequence: Synthetic oligonucleotide
ucaacaaggaacacuccac

SEQ ID NO: 2303353 - RNA, 19 nt, Artificial Sequence
  Description of Artificial Sequence: Synthetic oligonucleotide
ucgucaaacauggaggaag

SEQ ID NO: 2303354 - RNA, 19 nt, Artificial Sequence
  Description of Artificial Sequence: Synthetic oligonucleotide
uagucaaccucacucauuc

SEQ ID NO: 2303355 - RNA, 19 nt, Artificial Sequence
  Description of Artificial Sequence: Synthetic oligonucleotide
ucaaccucacucauucugc

SEQ ID NO: 2303356 - RNA, 19 nt, Artificial Sequence
  Description of Artificial Sequence: Synthetic oligonucleotide
cuccauugggaccaaaccg

SEQ ID NO: 2303357 - RNA, 19 nt, Artificial Sequence
  Description of Artificial Sequence: Synthetic oligonucleotide
uguauacaguucaaucuga

SEQ ID NO: 2303358 - RNA, 19 nt, Artificial Sequence
  Description of Artificial Sequence: Synthetic oligonucleotide
uggaccaauugcuucauca

SEQ ID NO: 2303359 - RNA, 19 nt, Artificial Sequence
  Description of Artificial Sequence: Synthetic oligonucleotide
ucucuagccagucaaaguu

SEQ ID NO: 2303360 - RNA, 19 nt, Artificial Sequence
  Description of Artificial Sequence: Synthetic oligonucleotide
guguauacaguucaaucug

SEQ ID NO: 2303361 - RNA, 19 nt, Artificial Sequence
  Description of Artificial Sequence: Synthetic oligonucleotide
uaaacuugaaagacuccac

SEQ ID NO: 2303362 - RNA, 19 nt, Artificial Sequence
  Description of Artificial Sequence: Synthetic oligonucleotide
aaccgaaccaugcuguagu

SEQ ID NO: 2303363 - RNA, 19 nt, Artificial Sequence
  Description of Artificial Sequence: Synthetic oligonucleotide
aucaacaaggaacacucca

SEQ ID NO: 2303364 - RNA, 19 nt, Artificial Sequence
  Description of Artificial Sequence: Synthetic oligonucleotide
cauaccgaggcauaccggc

SEQ ID NO: 2303365 - RNA, 19 nt, Artificial Sequence
  Description of Artificial Sequence: Synthetic oligonucleotide
uaagucaccuguugaaucu

SEQ ID NO: 2303366 - RNA, 19 nt, Artificial Sequence
  Description of Artificial Sequence: Synthetic oligonucleotide
uucuuaagucaccuguuga

SEQ ID NO: 2303367 - RNA, 19 nt, Artificial Sequence
  Description of Artificial Sequence: Synthetic oligonucleotide
uauaagucuggaucuagaa

SEQ ID NO: 2303368 - RNA, 19 nt, Artificial Sequence
  Description of Artificial Sequence: Synthetic oligonucleotide
agaacuguccuccaucaca

SEQ ID NO: 2303369 - RNA, 19 nt, Artificial Sequence
  Description of Artificial Sequence: Synthetic oligonucleotide
uggaggaagacucuucuuc

SEQ ID NO: 2303370 - RNA, 19 nt, Artificial Sequence
  Description of Artificial Sequence: Synthetic oligonucleotide
acuagcugcgcauaccgag

SEQ ID NO: 2303371 - RNA, 19 nt, Artificial Sequence
  Description of Artificial Sequence: Synthetic oligonucleotide
cuagaaacuucucaauuuc

SEQ ID NO: 2303372 - RNA, 19 nt, Artificial Sequence
  Description of Artificial Sequence: Synthetic oligonucleotide
augauguuaacuuguggga

SEQ ID NO: 2303373 - RNA, 19 nt, Artificial Sequence
  Description of Artificial Sequence: Synthetic oligonucleotide
ucuuaagucaccuguugaa

SEQ ID NO: 2303374 - RNA, 19 nt, Artificial Sequence
  Description of Artificial Sequence: Synthetic oligonucleotide
uuaagucaccuguugaauc

SEQ ID NO: 2303375 - RNA, 19 nt, Artificial Sequence
  Description of Artificial Sequence: Synthetic oligonucleotide
uucgucaacuucuugaauu

SEQ ID NO: 2303376 - RNA, 19 nt, Artificial Sequence
  Description of Artificial Sequence: Synthetic oligonucleotide
cagaaauaaacuugaaaga

SEQ ID NO: 2303377 - RNA, 19 nt, Artificial Sequence
  Description of Artificial Sequence: Synthetic oligonucleotide
uugucaugauguuaacuug

SEQ ID NO: 2303378 - RNA, 19 nt, Artificial Sequence
  Description of Artificial Sequence: Synthetic oligonucleotide
aagacuccaccaugaauug

SEQ ID NO: 2303379 - RNA, 19 nt, Artificial Sequence
  Description of Artificial Sequence: Synthetic oligonucleotide
accaauccuccauugggac

SEQ ID NO: 2303380 - RNA, 19 nt, Artificial Sequence
  Description of Artificial Sequence: Synthetic oligonucleotide
cucaacgugucccaggcag

SEQ ID NO: 2303381 - RNA, 19 nt, Artificial Sequence
  Description of Artificial Sequence: Synthetic oligonucleotide
ucuucuagcagagaguaua

SEQ ID NO: 2303382 - RNA, 19 nt, Artificial Sequence
  Description of Artificial Sequence: Synthetic oligonucleotide
aaccucacucauucugccg

SEQ ID NO: 2303383 - RNA, 19 nt, Artificial Sequence
  Description of Artificial Sequence: Synthetic oligonucleotide
ucuugaaaauauucgucaa

SEQ ID NO: 2303384 - RNA, 19 nt, Artificial Sequence
  Description of Artificial Sequence: Synthetic oligonucleotide
uguaaucguccucaacgug

SEQ ID NO: 2303385 - RNA, 19 nt, Artificial Sequence
  Description of Artificial Sequence: Synthetic oligonucleotide
uagcagagaguauaagucu

SEQ ID NO: 2303386 - RNA, 19 nt, Artificial Sequence
  Description of Artificial Sequence: Synthetic oligonucleotide
gucgaugugcugcagcacg

SEQ ID NO: 2303387 - RNA, 19 nt, Artificial Sequence
  Description of Artificial Sequence: Synthetic oligonucleotide
uccuuuggcuccuuaaacu

SEQ ID NO: 2303388 - RNA, 19 nt, Artificial Sequence
  Description of Artificial Sequence: Synthetic oligonucleotide
auucgucaaacauggagga

SEQ ID NO: 2303389 - RNA, 19 nt, Artificial Sequence
  Description of Artificial Sequence: Synthetic oligonucleotide
acaaggaacacuccacaca

SEQ ID NO: 2303390 - RNA, 19 nt, Artificial Sequence
  Description of Artificial Sequence: Synthetic oligonucleotide
auugagaaucaacaaggaa

SEQ ID NO: 2303391 - RNA, 19 nt, Artificial Sequence
  Description of Artificial Sequence: Synthetic oligonucleotide
agaaucaacaaggaacacu

SEQ ID NO: 2303392 - RNA, 19 nt, Artificial Sequence
  Description of Artificial Sequence: Synthetic oligonucleotide
aucacaggguaguugaagu

SEQ ID NO: 2303393 - RNA, 19 nt, Artificial Sequence
  Description of Artificial Sequence: Synthetic oligonucleotide
aauugagaaucaacaagga

SEQ ID NO: 2303394 - RNA, 19 nt, Artificial Sequence
  Description of Artificial Sequence: Synthetic oligonucleotide
aaucguccucaacgugucc

SEQ ID NO: 2303395 - RNA, 19 nt, Artificial Sequence
  Description of Artificial Sequence: Synthetic oligonucleotide
gucaaccucacucauucug

SEQ ID NO: 2303396 - RNA, 19 nt, Artificial Sequence
  Description of Artificial Sequence: Synthetic oligonucleotide
uugugggauuucuagagaa

SEQ ID NO: 2303397 - RNA, 19 nt, Artificial Sequence
  Description of Artificial Sequence: Synthetic oligonucleotide
ggcuuucuuacucagcagg

SEQ ID NO: 2303398 - RNA, 19 nt, Artificial Sequence
  Description of Artificial Sequence: Synthetic oligonucleotide
aucguccucaacguguccc

SEQ ID NO: 2303399 - RNA, 19 nt, Artificial Sequence
  Description of Artificial Sequence: Synthetic oligonucleotide
aaaccgcagagaacugucc

SEQ ID NO: 2303400 - RNA, 19 nt, Artificial Sequence
  Description of Artificial Sequence: Synthetic oligonucleotide
uaccaauccuccauuggga

SEQ ID NO: 2303401 - RNA, 19 nt, Artificial Sequence
  Description of Artificial Sequence: Synthetic oligonucleotide
guguguauacaguucaauc

SEQ ID NO: 2303402 - RNA, 19 nt, Artificial Sequence
  Description of Artificial Sequence: Synthetic oligonucleotide
agagaacuguccuccauca

SEQ ID NO: 2303403 - RNA, 19 nt, Artificial Sequence
  Description of Artificial Sequence: Synthetic oligonucleotide
aaccaugcuguagucauca

SEQ ID NO: 2303404 - RNA, 19 nt, Artificial Sequence
  Description of Artificial Sequence: Synthetic oligonucleotide
caccuguugaaucuucuag

SEQ ID NO: 2303405 - RNA, 19 nt, Artificial Sequence
  Description of Artificial Sequence: Synthetic oligonucleotide
aucuagaaacuucucaauu

SEQ ID NO: 2303406 - RNA, 19 nt, Artificial Sequence
  Description of Artificial Sequence: Synthetic oligonucleotide
uccgacugaucauauggca

SEQ ID NO: 2303407 - RNA, 19 nt, Artificial Sequence
  Description of Artificial Sequence: Synthetic oligonucleotide
ucgaucaguucccggaugu

SEQ ID NO: 2303408 - RNA, 19 nt, Artificial Sequence
  Description of Artificial Sequence: Synthetic oligonucleotide
guugaaucuucuagcagag

SEQ ID NO: 2303409 - RNA, 19 nt, Artificial Sequence
  Description of Artificial Sequence: Synthetic oligonucleotide
uuaacuugugggauuucua

SEQ ID NO: 2303410 - RNA, 19 nt, Artificial Sequence
  Description of Artificial Sequence: Synthetic oligonucleotide
uccaccucgaucaguuccc

SEQ ID NO: 2303411 - RNA, 19 nt, Artificial Sequence
  Description of Artificial Sequence: Synthetic oligonucleotide
guucaaucugaccuggaca

SEQ ID NO: 2303412 - RNA, 19 nt, Artificial Sequence
  Description of Artificial Sequence: Synthetic oligonucleotide
ugcuggaccaauugcuuca

SEQ ID NO: 2303413 - RNA, 19 nt, Artificial Sequence
  Description of Artificial Sequence: Synthetic oligonucleotide
uucgcagugcugaaccaug

SEQ ID NO: 2303414 - RNA, 19 nt, Artificial Sequence
  Description of Artificial Sequence: Synthetic oligonucleotide
aaguccuccccauacugaa

SEQ ID NO: 2303415 - RNA, 19 nt, Artificial Sequence
  Description of Artificial Sequence: Synthetic oligonucleotide
cuagcugcgcauaccgagg

SEQ ID NO: 2303416 - RNA, 19 nt, Artificial Sequence
  Description of Artificial Sequence: Synthetic oligonucleotide
aaaccgaaccaugcuguag

SEQ ID NO: 2303417 - RNA, 19 nt, Artificial Sequence
  Description of Artificial Sequence: Synthetic oligonucleotide
cucccuucagccuucgcgc

SEQ ID NO: 2303418 - RNA, 19 nt, Artificial Sequence
  Description of Artificial Sequence: Synthetic oligonucleotide
cagaaaccgaaccaugcug

SEQ ID NO: 2303419 - RNA, 19 nt, Artificial Sequence
  Description of Artificial Sequence: Synthetic oligonucleotide
uucucuagccagucaaagu

SEQ ID NO: 2303420 - RNA, 19 nt, Artificial Sequence
  Description of Artificial Sequence: Synthetic oligonucleotide
ucggaacucccacuguuca

SEQ ID NO: 2303421 - RNA, 19 nt, Artificial Sequence
  Description of Artificial Sequence: Synthetic oligonucleotide
ggcaaaguacuccaugcag

SEQ ID NO: 2303422 - RNA, 19 nt, Artificial Sequence
  Description of Artificial Sequence: Synthetic oligonucleotide
cacaggguaguugaagugc

SEQ ID NO: 2303423 - RNA, 19 nt, Artificial Sequence
  Description of Artificial Sequence: Synthetic oligonucleotide
aguacuccaugcagaauac

SEQ ID NO: 2303424 - RNA, 19 nt, Artificial Sequence
  Description of Artificial Sequence: Synthetic oligonucleotide
gaccaauugcuucaucaca

SEQ ID NO: 2303425 - RNA, 19 nt, Artificial Sequence
  Description of Artificial Sequence: Synthetic oligonucleotide
acaguucaaucugaccugg

SEQ ID NO: 2303426 - RNA, 19 nt, Artificial Sequence
  Description of Artificial Sequence: Synthetic oligonucleotide
ucaugcucuccucauccga

SEQ ID NO: 2303427 - RNA, 19 nt, Artificial Sequence
  Description of Artificial Sequence: Synthetic oligonucleotide
cauauggcagaaaccgaac

SEQ ID NO: 2303428 - RNA, 19 nt, Artificial Sequence
  Description of Artificial Sequence: Synthetic oligonucleotide
ugauguuaacuugugggau

SEQ ID NO: 2303429 - RNA, 19 nt, Artificial Sequence
  Description of Artificial Sequence: Synthetic oligonucleotide
ccguucuugaaaauauucg

SEQ ID NO: 2303430 - RNA, 19 nt, Artificial Sequence
  Description of Artificial Sequence: Synthetic oligonucleotide
uccaucacaucguccaccu

SEQ ID NO: 2303431 - RNA, 19 nt, Artificial Sequence
  Description of Artificial Sequence: Synthetic oligonucleotide
ucgcagugcugaaccaugg

SEQ ID NO: 2303432 - RNA, 19 nt, Artificial Sequence
  Description of Artificial Sequence: Synthetic oligonucleotide
accucacucauucugccgu

SEQ ID NO: 2303433 - RNA, 19 nt, Artificial Sequence
  Description of Artificial Sequence: Synthetic oligonucleotide
aggcauaccggcucuccgg

SEQ ID NO: 2303434 - RNA, 19 nt, Artificial Sequence
  Description of Artificial Sequence: Synthetic oligonucleotide
uaaucguccucaacguguc

SEQ ID NO: 2303435 - RNA, 19 nt, Artificial Sequence
  Description of Artificial Sequence: Synthetic oligonucleotide
ugugggauuucuagagaaa

SEQ ID NO: 2303436 - RNA, 19 nt, Artificial Sequence
  Description of Artificial Sequence: Synthetic oligonucleotide
gaugcucaugcucuccuca

SEQ ID NO: 2303437 - RNA, 19 nt, Artificial Sequence
  Description of Artificial Sequence: Synthetic oligonucleotide
auccgacugaucauauggc

SEQ ID NO: 2303438 - RNA, 19 nt, Artificial Sequence
  Description of Artificial Sequence: Synthetic oligonucleotide
aacucccacuguucaagcu

SEQ ID NO: 2303439 - RNA, 19 nt, Artificial Sequence
  Description of Artificial Sequence: Synthetic oligonucleotide
acacucggaacucccacug

SEQ ID NO: 2303440 - RNA, 19 nt, Artificial Sequence
  Description of Artificial Sequence: Synthetic oligonucleotide
caagcugcuggaccaauug

SEQ ID NO: 2303441 - RNA, 19 nt, Artificial Sequence
  Description of Artificial Sequence: Synthetic oligonucleotide
uaguugaagugcucugcug

SEQ ID NO: 2303442 - RNA, 19 nt, Artificial Sequence
  Description of Artificial Sequence: Synthetic oligonucleotide
gaggcauaccggcucuccg

SEQ ID NO: 2303443 - RNA, 19 nt, Artificial Sequence
  Description of Artificial Sequence: Synthetic oligonucleotide
gaccaaaccgcagagaacu

SEQ ID NO: 2303444 - RNA, 19 nt, Artificial Sequence
  Description of Artificial Sequence: Synthetic oligonucleotide
agaaaccgaaccaugcugu

SEQ ID NO: 2303445 - RNA, 19 nt, Artificial Sequence
  Description of Artificial Sequence: Synthetic oligonucleotide
ggaggaagacucuucuucc

SEQ ID NO: 2303446 - RNA, 19 nt, Artificial Sequence
  Description of Artificial Sequence: Synthetic oligonucleotide
gagaaaucauggcgcuuag

SEQ ID NO: 2303447 - RNA, 19 nt, Artificial Sequence
  Description of Artificial Sequence: Synthetic oligonucleotide
ggaucuagaaacuucucaa

SEQ ID NO: 2303448 - RNA, 19 nt, Artificial Sequence
  Description of Artificial Sequence: Synthetic oligonucleotide
agcagagaguauaagucug

SEQ ID NO: 2303449 - RNA, 19 nt, Artificial Sequence
  Description of Artificial Sequence: Synthetic oligonucleotide
ggcaaagucgaugugcugc

SEQ ID NO: 2303450 - RNA, 19 nt, Artificial Sequence
  Description of Artificial Sequence: Synthetic oligonucleotide
auucugccguucuugaaaa

SEQ ID NO: 2303451 - RNA, 19 nt, Artificial Sequence
  Description of Artificial Sequence: Synthetic oligonucleotide
guccuccccauacugaaug

SEQ ID NO: 2303452 - RNA, 19 nt, Artificial Sequence
  Description of Artificial Sequence: Synthetic oligonucleotide
aacuguccuccaucacauc

SEQ ID NO: 2303453 - RNA, 19 nt, Artificial Sequence
  Description of Artificial Sequence: Synthetic oligonucleotide
uccccauacugaauggcaa

SEQ ID NO: 2303454 - RNA, 19 nt, Artificial Sequence
  Description of Artificial Sequence: Synthetic oligonucleotide
caaccucacucauucugcc

SEQ ID NO: 2303455 - RNA, 19 nt, Artificial Sequence
  Description of Artificial Sequence: Synthetic oligonucleotide
gcuuucgucaacuucuuga

SEQ ID NO: 2303456 - RNA, 19 nt, Artificial Sequence
  Description of Artificial Sequence: Synthetic oligonucleotide
ucgucaacuucuugaauuu

SEQ ID NO: 2303457 - RNA, 19 nt, Artificial Sequence
  Description of Artificial Sequence: Synthetic oligonucleotide
ucacucauucugccguucu

SEQ ID NO: 2303458 - RNA, 19 nt, Artificial Sequence
  Description of Artificial Sequence: Synthetic oligonucleotide
ccaugcagaauaccaaucc

SEQ ID NO: 2303459 - RNA, 19 nt, Artificial Sequence
  Description of Artificial Sequence: Synthetic oligonucleotide
uagcugcgcauaccgaggc

SEQ ID NO: 2303460 - RNA, 19 nt, Artificial Sequence
  Description of Artificial Sequence: Synthetic oligonucleotide
uucuagcagagaguauaag

SEQ ID NO: 2303461 - RNA, 19 nt, Artificial Sequence
  Description of Artificial Sequence: Synthetic oligonucleotide
ucugccguucuugaaaaua

SEQ ID NO: 2303462 - RNA, 19 nt, Artificial Sequence
  Description of Artificial Sequence: Synthetic oligonucleotide
uggcuccuuaaacuccaag

SEQ ID NO: 2303463 - RNA, 19 nt, Artificial Sequence
  Description of Artificial Sequence: Synthetic oligonucleotide
cuuucgucaacuucuugaa

SEQ ID NO: 2303464 - RNA, 19 nt, Artificial Sequence
  Description of Artificial Sequence: Synthetic oligonucleotide
uuucgucaacuucuugaau

SEQ ID NO: 2303465 - RNA, 19 nt, Artificial Sequence
  Description of Artificial Sequence: Synthetic oligonucleotide
uggcuuucuuacucagcag

SEQ ID NO: 2303466 - RNA, 19 nt, Artificial Sequence
  Description of Artificial Sequence: Synthetic oligonucleotide
gaucaguucccggauguca

SEQ ID NO: 2303467 - RNA, 19 nt, Artificial Sequence
  Description of Artificial Sequence: Synthetic oligonucleotide
ucgaugugcugcagcacga

SEQ ID NO: 2303468 - RNA, 19 nt, Artificial Sequence
  Description of Artificial Sequence: Synthetic oligonucleotide
caaucugaccuggacaguc

SEQ ID NO: 2303469 - RNA, 19 nt, Artificial Sequence
  Description of Artificial Sequence: Synthetic oligonucleotide
acgugucccaggcaguucu

SEQ ID NO: 2303470 - RNA, 19 nt, Artificial Sequence
  Description of Artificial Sequence: Synthetic oligonucleotide
aucaguucccggaugucag

SEQ ID NO: 2303471 - RNA, 19 nt, Artificial Sequence
  Description of Artificial Sequence: Synthetic oligonucleotide
accgaaccaugcuguaguc

SEQ ID NO: 2303472 - RNA, 19 nt, Artificial Sequence
  Description of Artificial Sequence: Synthetic oligonucleotide
cauucugccguucuugaaa

SEQ ID NO: 2303473 - RNA, 19 nt, Artificial Sequence
  Description of Artificial Sequence: Synthetic oligonucleotide
gaauggcaaagucgaugug

SEQ ID NO: 2303474 - RNA, 19 nt, Artificial Sequence
  Description of Artificial Sequence: Synthetic oligonucleotide
guauacaguucaaucugac

SEQ ID NO: 2303475 - RNA, 19 nt, Artificial Sequence
  Description of Artificial Sequence: Synthetic oligonucleotide
gcuuagagccgccaggaug

SEQ ID NO: 2303476 - RNA, 19 nt, Artificial Sequence
  Description of Artificial Sequence: Synthetic oligonucleotide
aaacauggaggaagacucu

SEQ ID NO: 2303477 - RNA, 19 nt, Artificial Sequence
  Description of Artificial Sequence: Synthetic oligonucleotide
ucaacgugucccaggcagu

SEQ ID NO: 2303478 - RNA, 19 nt, Artificial Sequence
  Description of Artificial Sequence: Synthetic oligonucleotide
ucccuucagccuucgcgcg

SEQ ID NO: 2303479 - RNA, 19 nt, Artificial Sequence
  Description of Artificial Sequence: Synthetic oligonucleotide
ccaugaauugagaaucaac

SEQ ID NO: 2303480 - RNA, 19 nt, Artificial Sequence
  Description of Artificial Sequence: Synthetic oligonucleotide
caaucaggccacacacagc

SEQ ID NO: 2303481 - RNA, 19 nt, Artificial Sequence
  Description of Artificial Sequence: Synthetic oligonucleotide
aggguaguugaagugcucu

SEQ ID NO: 2303482 - RNA, 19 nt, Artificial Sequence
  Description of Artificial Sequence: Synthetic oligonucleotide
caauccuccauugggacca

SEQ ID NO: 2303483 - RNA, 19 nt, Artificial Sequence
  Description of Artificial Sequence: Synthetic oligonucleotide
ucaguucccggaugucagc

SEQ ID NO: 2303484 - RNA, 19 nt, Artificial Sequence
  Description of Artificial Sequence: Synthetic oligonucleotide
ggaacucccacuguucaag

SEQ ID NO: 2303485 - RNA, 19 nt, Artificial Sequence
  Description of Artificial Sequence: Synthetic oligonucleotide
ggcuucgcagugcugaacc

SEQ ID NO: 2303486 - RNA, 19 nt, Artificial Sequence
  Description of Artificial Sequence: Synthetic oligonucleotide
agagccgccaggaugccag

SEQ ID NO: 2303487 - RNA, 19 nt, Artificial Sequence
  Description of Artificial Sequence: Synthetic oligonucleotide
gaucuagaaacuucucaau

SEQ ID NO: 2303488 - RNA, 19 nt, Artificial Sequence
  Description of Artificial Sequence: Synthetic oligonucleotide
gguaguugaagugcucugc

SEQ ID NO: 2303489 - RNA, 19 nt, Artificial Sequence
  Description of Artificial Sequence: Synthetic oligonucleotide
aucacaggcagguguguau

SEQ ID NO: 2303490 - RNA, 19 nt, Artificial Sequence
  Description of Artificial Sequence: Synthetic oligonucleotide
agucaaaguuguuggcaaa

SEQ ID NO: 2303491 - RNA, 19 nt, Artificial Sequence
  Description of Artificial Sequence: Synthetic oligonucleotide
cacaucguccaccucgauc

SEQ ID NO: 2303492 - RNA, 19 nt, Artificial Sequence
  Description of Artificial Sequence: Synthetic oligonucleotide
cauugggaccaaaccgcag

SEQ ID NO: 2303493 - RNA, 19 nt, Artificial Sequence
  Description of Artificial Sequence: Synthetic oligonucleotide
aauauucgucaaacaugga

SEQ ID NO: 2303494 - RNA, 19 nt, Artificial Sequence
  Description of Artificial Sequence: Synthetic oligonucleotide
guccucaacgugucccagg

SEQ ID NO: 2303495 - RNA, 19 nt, Artificial Sequence
  Description of Artificial Sequence: Synthetic oligonucleotide
ggaccaauugcuucaucac

SEQ ID NO: 2303496 - RNA, 19 nt, Artificial Sequence
  Description of Artificial Sequence: Synthetic oligonucleotide
gagggcuucgcagugcuga

SEQ ID NO: 2303497 - RNA, 19 nt, Artificial Sequence
  Description of Artificial Sequence: Synthetic oligonucleotide
uaccgaggcauaccggcuc

SEQ ID NO: 2303498 - RNA, 19 nt, Artificial Sequence
  Description of Artificial Sequence: Synthetic oligonucleotide
ucaccuguugaaucuucua

SEQ ID NO: 2303499 - RNA, 19 nt, Artificial Sequence
  Description of Artificial Sequence: Synthetic oligonucleotide
guaaucguccucaacgugu

SEQ ID NO: 2303500 - RNA, 19 nt, Artificial Sequence
  Description of Artificial Sequence: Synthetic oligonucleotide
gauguuaacuugugggauu

SEQ ID NO: 2303501 - RNA, 19 nt, Artificial Sequence
  Description of Artificial Sequence: Synthetic oligonucleotide
ucguccucaacguguccca

SEQ ID NO: 2303502 - RNA, 19 nt, Artificial Sequence
  Description of Artificial Sequence: Synthetic oligonucleotide
aaaguacuccaugcagaau

SEQ ID NO: 2303503 - RNA, 19 nt, Artificial Sequence
  Description of Artificial Sequence: Synthetic oligonucleotide
ggggcccauaacuagcugc

SEQ ID NO: 2303504 - RNA, 19 nt, Artificial Sequence
  Description of Artificial Sequence: Synthetic oligonucleotide
uggcgcuuagagccgccag

SEQ ID NO: 2303505 - RNA, 19 nt, Artificial Sequence
  Description of Artificial Sequence: Synthetic oligonucleotide
cuccaucacaucguccacc

SEQ ID NO: 2303506 - RNA, 19 nt, Artificial Sequence
  Description of Artificial Sequence: Synthetic oligonucleotide
cucggaacucccacuguuc

SEQ ID NO: 2303507 - RNA, 19 nt, Artificial Sequence
  Description of Artificial Sequence: Synthetic oligonucleotide
agucgaugugcugcagcac

SEQ ID NO: 2303508 - RNA, 19 nt, Artificial Sequence
  Description of Artificial Sequence: Synthetic oligonucleotide
acucggaacucccacuguu

SEQ ID NO: 2303509 - RNA, 19 nt, Artificial Sequence
  Description of Artificial Sequence: Synthetic oligonucleotide
cuggaucuagaaacuucuc

SEQ ID NO: 2303510 - RNA, 19 nt, Artificial Sequence
  Description of Artificial Sequence: Synthetic oligonucleotide
ucaagcugcuggaccaauu

SEQ ID NO: 2303511 - RNA, 19 nt, Artificial Sequence
  Description of Artificial Sequence: Synthetic oligonucleotide
cuugugggauuucuagaga

SEQ ID NO: 2303512 - RNA, 19 nt, Artificial Sequence
  Description of Artificial Sequence: Synthetic oligonucleotide
ccgacugaucauauggcag

SEQ ID NO: 2303513 - RNA, 19 nt, Artificial Sequence
  Description of Artificial Sequence: Synthetic oligonucleotide
ccaauugcuucaucacagg

SEQ ID NO: 2303514 - RNA, 19 nt, Artificial Sequence
  Description of Artificial Sequence: Synthetic oligonucleotide
cuccccauacugaauggca

SEQ ID NO: 2303515 - RNA, 19 nt, Artificial Sequence
  Description of Artificial Sequence: Synthetic oligonucleotide
gccagaaauaaacuugaaa

SEQ ID NO: 2303516 - RNA, 19 nt, Artificial Sequence
  Description of Artificial Sequence: Synthetic oligonucleotide
ggcauaccggcucuccggg

SEQ ID NO: 2303517 - RNA, 19 nt, Artificial Sequence
  Description of Artificial Sequence: Synthetic oligonucleotide
acacuccacacacucggaa

SEQ ID NO: 2303518 - RNA, 19 nt, Artificial Sequence
  Description of Artificial Sequence: Synthetic oligonucleotide
gagaacuguccuccaucac

SEQ ID NO: 2303519 - RNA, 19 nt, Artificial Sequence
  Description of Artificial Sequence: Synthetic oligonucleotide
gcagagaguauaagucugg

SEQ ID NO: 2303520 - RNA, 19 nt, Artificial Sequence
  Description of Artificial Sequence: Synthetic oligonucleotide
ccuccauugggaccaaacc

SEQ ID NO: 2303521 - RNA, 19 nt, Artificial Sequence
  Description of Artificial Sequence: Synthetic oligonucleotide
cuucuagcagagaguauaa

SEQ ID NO: 2303522 - RNA, 19 nt, Artificial Sequence
  Description of Artificial Sequence: Synthetic oligonucleotide
caguucucuagccagucaa

SEQ ID NO: 2303523 - RNA, 19 nt, Artificial Sequence
  Description of Artificial Sequence: Synthetic oligonucleotide
aucauauggcagaaaccga

SEQ ID NO: 2303524 - RNA, 19 nt, Artificial Sequence
  Description of Artificial Sequence: Synthetic oligonucleotide
aucauggcgcuuagagccg

SEQ ID NO: 2303525 - RNA, 19 nt, Artificial Sequence
  Description of Artificial Sequence: Synthetic oligonucleotide
ggcgcuuagagccgccagg

SEQ ID NO: 2303526 - RNA, 19 nt, Artificial Sequence
  Description of Artificial Sequence: Synthetic oligonucleotide
caguucccggaugucagcc

SEQ ID NO: 2303527 - RNA, 19 nt, Artificial Sequence
  Description of Artificial Sequence: Synthetic oligonucleotide
uggcuucuuaagucaccug

SEQ ID NO: 2303528 - RNA, 19 nt, Artificial Sequence
  Description of Artificial Sequence: Synthetic oligonucleotide
agcgguugagggcuucgca

SEQ ID NO: 2303529 - RNA, 19 nt, Artificial Sequence
  Description of Artificial Sequence: Synthetic oligonucleotide
guaggugcucuucccgcug

SEQ ID NO: 2303530 - RNA, 19 nt, Artificial Sequence
  Description of Artificial Sequence: Synthetic oligonucleotide
agcuuucgucaacuucuug

SEQ ID NO: 2303531 - RNA, 19 nt, Artificial Sequence
  Description of Artificial Sequence: Synthetic oligonucleotide
guuaacuugugggauuucu

SEQ ID NO: 2303532 - RNA, 19 nt, Artificial Sequence
  Description of Artificial Sequence: Synthetic oligonucleotide
cuagagaaaucauggcgcu

SEQ ID NO: 2303533 - RNA, 19 nt, Artificial Sequence
  Description of Artificial Sequence: Synthetic oligonucleotide
ugccguucuugaaaauauu

SEQ ID NO: 2303534 - RNA, 19 nt, Artificial Sequence
  Description of Artificial Sequence: Synthetic oligonucleotide
aucugaccuggacagucaa

SEQ ID NO: 2303535 - RNA, 19 nt, Artificial Sequence
  Description of Artificial Sequence: Synthetic oligonucleotide
gcgguugagggcuucgcag

SEQ ID NO: 2303536 - RNA, 19 nt, Artificial Sequence
  Description of Artificial Sequence: Synthetic oligonucleotide
cucgaucaguucccggaug

SEQ ID NO: 2303537 - RNA, 19 nt, Artificial Sequence
  Description of Artificial Sequence: Synthetic oligonucleotide
ugcgcauaccgaggcauac

SEQ ID NO: 2303538 - RNA, 19 nt, Artificial Sequence
  Description of Artificial Sequence: Synthetic oligonucleotide
gggcccauaacuagcugcg

SEQ ID NO: 2303539 - RNA, 19 nt, Artificial Sequence
  Description of Artificial Sequence: Synthetic oligonucleotide
cagcacgaugcucaugcuc

SEQ ID NO: 2303540 - RNA, 19 nt, Artificial Sequence
  Description of Artificial Sequence: Synthetic oligonucleotide
ggcuucuuaagucaccugu

SEQ ID NO: 2303541 - RNA, 19 nt, Artificial Sequence
  Description of Artificial Sequence: Synthetic oligonucleotide
ccuguugaaucuucuagca

SEQ ID NO: 2303542 - RNA, 19 nt, Artificial Sequence
  Description of Artificial Sequence: Synthetic oligonucleotide
cacaggcagguguguauac

SEQ ID NO: 2303543 - RNA, 19 nt, Artificial Sequence
  Description of Artificial Sequence: Synthetic oligonucleotide
gaaccaugguggaacagua

SEQ ID NO: 2303544 - RNA, 19 nt, Artificial Sequence
  Description of Artificial Sequence: Synthetic oligonucleotide
aguucccggaugucagcca

SEQ ID NO: 2303545 - RNA, 19 nt, Artificial Sequence
  Description of Artificial Sequence: Synthetic oligonucleotide
aacuagcugcgcauaccga

SEQ ID NO: 2303546 - RNA, 19 nt, Artificial Sequence
  Description of Artificial Sequence: Synthetic oligonucleotide
agucaaccucacucauucu

SEQ ID NO: 2303547 - RNA, 19 nt, Artificial Sequence
  Description of Artificial Sequence: Synthetic oligonucleotide
agagcgguugagggcuucg

SEQ ID NO: 2303548 - RNA, 19 nt, Artificial Sequence
  Description of Artificial Sequence: Synthetic oligonucleotide
ucaaucugaccuggacagu

SEQ ID NO: 2303549 - RNA, 19 nt, Artificial Sequence
  Description of Artificial Sequence: Synthetic oligonucleotide
ucauggcgcuuagagccgc

SEQ ID NO: 2303550 - RNA, 19 nt, Artificial Sequence
  Description of Artificial Sequence: Synthetic oligonucleotide
cagaauaccaauccuccau

SEQ ID NO: 2303551 - RNA, 19 nt, Artificial Sequence
  Description of Artificial Sequence: Synthetic oligonucleotide
aucaaucaggccacacaca

SEQ ID NO: 2303552 - RNA, 19 nt, Artificial Sequence
  Description of Artificial Sequence: Synthetic oligonucleotide
ggacagagcgguugagggc

SEQ ID NO: 2303553 - RNA, 19 nt, Artificial Sequence
  Description of Artificial Sequence: Synthetic oligonucleotide
cgcauaccgaggcauaccg

SEQ ID NO: 2303554 - RNA, 19 nt, Artificial Sequence
  Description of Artificial Sequence: Synthetic oligonucleotide
ggguaguugaagugcucug

SEQ ID NO: 2303555 - RNA, 19 nt, Artificial Sequence
  Description of Artificial Sequence: Synthetic oligonucleotide
uggaacaguaggugcucuu

SEQ ID NO: 2303556 - RNA, 19 nt, Artificial Sequence
  Description of Artificial Sequence: Synthetic oligonucleotide
ucuuacucagcagguccau

SEQ ID NO: 2303557 - RNA, 19 nt, Artificial Sequence
  Description of Artificial Sequence: Synthetic oligonucleotide
ggauguaaucguccucaac

SEQ ID NO: 2303558 - RNA, 19 nt, Artificial Sequence
  Description of Artificial Sequence: Synthetic oligonucleotide
ccaauccuccauugggacc

SEQ ID NO: 2303559 - RNA, 19 nt, Artificial Sequence
  Description of Artificial Sequence: Synthetic oligonucleotide
aggccacacacagcuuucg

SEQ ID NO: 2303560 - RNA, 19 nt, Artificial Sequence
  Description of Artificial Sequence: Synthetic oligonucleotide
acaggcagguguguauaca

SEQ ID NO: 2303561 - RNA, 19 nt, Artificial Sequence
  Description of Artificial Sequence: Synthetic oligonucleotide
accgaggcauaccggcucu

SEQ ID NO: 2303562 - RNA, 19 nt, Artificial Sequence
  Description of Artificial Sequence: Synthetic oligonucleotide
aagucaccuguugaaucuu

SEQ ID NO: 2303563 - RNA, 19 nt, Artificial Sequence
  Description of Artificial Sequence: Synthetic oligonucleotide
aggauguaaucguccucaa

SEQ ID NO: 2303564 - RNA, 19 nt, Artificial Sequence
  Description of Artificial Sequence: Synthetic oligonucleotide
agaaaucauggcgcuuaga

SEQ ID NO: 2303565 - RNA, 19 nt, Artificial Sequence
  Description of Artificial Sequence: Synthetic oligonucleotide
gccguucuugaaaauauuc

SEQ ID NO: 2303566 - RNA, 19 nt, Artificial Sequence
  Description of Artificial Sequence: Synthetic oligonucleotide
gaacuguccuccaucacau

SEQ ID NO: 2303567 - RNA, 19 nt, Artificial Sequence
  Description of Artificial Sequence: Synthetic oligonucleotide
gccagucaaaguuguuggc

SEQ ID NO: 2303568 - RNA, 19 nt, Artificial Sequence
  Description of Artificial Sequence: Synthetic oligonucleotide
uguuaacuugugggauuuc

SEQ ID NO: 2303569 - RNA, 19 nt, Artificial Sequence
  Description of Artificial Sequence: Synthetic oligonucleotide
gucaaacauggaggaagac

SEQ ID NO: 2303570 - RNA, 19 nt, Artificial Sequence
  Description of Artificial Sequence: Synthetic oligonucleotide
gugggauuucuagagaaau

SEQ ID NO: 2303571 - RNA, 19 nt, Artificial Sequence
  Description of Artificial Sequence: Synthetic oligonucleotide
cuuacucagcagguccauc

SEQ ID NO: 2303572 - RNA, 19 nt, Artificial Sequence
  Description of Artificial Sequence: Synthetic oligonucleotide
cagagaguauaagucugga

SEQ ID NO: 2303573 - RNA, 19 nt, Artificial Sequence
  Description of Artificial Sequence: Synthetic oligonucleotide
caaagucgaugugcugcag

SEQ ID NO: 2303574 - RNA, 19 nt, Artificial Sequence
  Description of Artificial Sequence: Synthetic oligonucleotide
gaguauaagucuggaucua

SEQ ID NO: 2303575 - RNA, 19 nt, Artificial Sequence
  Description of Artificial Sequence: Synthetic oligonucleotide
uagagaaaucauggcgcuu

SEQ ID NO: 2303576 - RNA, 19 nt, Artificial Sequence
  Description of Artificial Sequence: Synthetic oligonucleotide
aguucucuagccagucaaa

SEQ ID NO: 2303577 - RNA, 19 nt, Artificial Sequence
  Description of Artificial Sequence: Synthetic oligonucleotide
cauggcgcuuagagccgcc

SEQ ID NO: 2303578 - RNA, 19 nt, Artificial Sequence
  Description of Artificial Sequence: Synthetic oligonucleotide
agacuccaccaugaauuga

SEQ ID NO: 2303579 - RNA, 19 nt, Artificial Sequence
  Description of Artificial Sequence: Synthetic oligonucleotide
uucaagcugcuggaccaau

SEQ ID NO: 2303580 - RNA, 19 nt, Artificial Sequence
  Description of Artificial Sequence: Synthetic oligonucleotide
auaccgaggcauaccggcu

SEQ ID NO: 2303581 - RNA, 19 nt, Artificial Sequence
  Description of Artificial Sequence: Synthetic oligonucleotide
cugccguucuugaaaauau

SEQ ID NO: 2303582 - RNA, 19 nt, Artificial Sequence
  Description of Artificial Sequence: Synthetic oligonucleotide
uucugccguucuugaaaau

SEQ ID NO: 2303583 - RNA, 19 nt, Artificial Sequence
  Description of Artificial Sequence: Synthetic oligonucleotide
gcccauaacuagcugcgca

SEQ ID NO: 2303584 - RNA, 19 nt, Artificial Sequence
  Description of Artificial Sequence: Synthetic oligonucleotide
ggaugccagaaauaaacuu

SEQ ID NO: 2303585 - RNA, 19 nt, Artificial Sequence
  Description of Artificial Sequence: Synthetic oligonucleotide
caucguccaccucgaucag

SEQ ID NO: 2303586 - RNA, 19 nt, Artificial Sequence
  Description of Artificial Sequence: Synthetic oligonucleotide
ccuuaaacuccaaguccuc

SEQ ID NO: 2303587 - RNA, 19 nt, Artificial Sequence
  Description of Artificial Sequence: Synthetic oligonucleotide
ccgcagagaacuguccucc

SEQ ID NO: 2303588 - RNA, 19 nt, Artificial Sequence
  Description of Artificial Sequence: Synthetic oligonucleotide
acuccaccaugaauugaga

SEQ ID NO: 2303589 - RNA, 19 nt, Artificial Sequence
  Description of Artificial Sequence: Synthetic oligonucleotide
cucacucauucugccguuc

SEQ ID NO: 2303590 - RNA, 19 nt, Artificial Sequence
  Description of Artificial Sequence: Synthetic oligonucleotide
gcauaccgaggcauaccgg

SEQ ID NO: 2303591 - RNA, 19 nt, Artificial Sequence
  Description of Artificial Sequence: Synthetic oligonucleotide
accaaaccgcagagaacug

SEQ ID NO: 2303592 - RNA, 19 nt, Artificial Sequence
  Description of Artificial Sequence: Synthetic oligonucleotide
ggcgcucacacucccuuca

SEQ ID NO: 2303593 - RNA, 19 nt, Artificial Sequence
  Description of Artificial Sequence: Synthetic oligonucleotide
gcagaaaccgaaccaugcu

SEQ ID NO: 2303594 - RNA, 19 nt, Artificial Sequence
  Description of Artificial Sequence: Synthetic oligonucleotide
gccgccggcgcucacacuc

SEQ ID NO: 2303595 - RNA, 19 nt, Artificial Sequence
  Description of Artificial Sequence: Synthetic oligonucleotide
uagagccgccaggaugcca

SEQ ID NO: 2303596 - RNA, 19 nt, Artificial Sequence
  Description of Artificial Sequence: Synthetic oligonucleotide
cacacagcuuucgucaacu

SEQ ID NO: 2303597 - RNA, 19 nt, Artificial Sequence
  Description of Artificial Sequence: Synthetic oligonucleotide
cauaccggcucuccggggu

SEQ ID NO: 2303598 - RNA, 19 nt, Artificial Sequence
  Description of Artificial Sequence: Synthetic oligonucleotide
cgacugaucauauggcaga

SEQ ID NO: 2303599 - RNA, 19 nt, Artificial Sequence
  Description of Artificial Sequence: Synthetic oligonucleotide
gcauaccggcucuccgggg

SEQ ID NO: 2303600 - RNA, 19 nt, Artificial Sequence
  Description of Artificial Sequence: Synthetic oligonucleotide
auaccggcucuccgggguu

SEQ ID NO: 2303601 - RNA, 19 nt, Artificial Sequence
  Description of Artificial Sequence: Synthetic oligonucleotide
ggcagguguguauacaguu

SEQ ID NO: 2303602 - RNA, 19 nt, Artificial Sequence
  Description of Artificial Sequence: Synthetic oligonucleotide
guucccggaugucagccau

SEQ ID NO: 2303603 - RNA, 19 nt, Artificial Sequence
  Description of Artificial Sequence: Synthetic oligonucleotide
cagguccaucuuugucaug

SEQ ID NO: 2303604 - RNA, 19 nt, Artificial Sequence
  Description of Artificial Sequence: Synthetic oligonucleotide
gcaguucucuagccaguca

SEQ ID NO: 2303605 - RNA, 19 nt, Artificial Sequence
  Description of Artificial Sequence: Synthetic oligonucleotide
ggcaguucucuagccaguc

SEQ ID NO: 2303606 - RNA, 19 nt, Artificial Sequence
  Description of Artificial Sequence: Synthetic oligonucleotide
ccauugggaccaaaccgca

SEQ ID NO: 2303607 - RNA, 19 nt, Artificial Sequence
  Description of Artificial Sequence: Synthetic oligonucleotide
aauccuccauugggaccaa

SEQ ID NO: 2303608 - RNA, 19 nt, Artificial Sequence
  Description of Artificial Sequence: Synthetic oligonucleotide
gguguguauacaguucaau

SEQ ID NO: 2303609 - RNA, 19 nt, Artificial Sequence
  Description of Artificial Sequence: Synthetic oligonucleotide
cucauccgacugaucauau

SEQ ID NO: 2303610 - RNA, 19 nt, Artificial Sequence
  Description of Artificial Sequence: Synthetic oligonucleotide
gcugcuggauccagguuga

SEQ ID NO: 2303611 - RNA, 19 nt, Artificial Sequence
  Description of Artificial Sequence: Synthetic oligonucleotide
gcuuucuuacucagcaggu

SEQ ID NO: 2303612 - RNA, 19 nt, Artificial Sequence
  Description of Artificial Sequence: Synthetic oligonucleotide
gcuucgcagugcugaacca

SEQ ID NO: 2303613 - RNA, 19 nt, Artificial Sequence
  Description of Artificial Sequence: Synthetic oligonucleotide
caucacaggcaggugugua

SEQ ID NO: 2303614 - RNA, 19 nt, Artificial Sequence
  Description of Artificial Sequence: Synthetic oligonucleotide
caauuuccuucuuggcuuu

SEQ ID NO: 2303615 - RNA, 19 nt, Artificial Sequence
  Description of Artificial Sequence: Synthetic oligonucleotide
gcgcucacacucccuucag

SEQ ID NO: 2303616 - RNA, 19 nt, Artificial Sequence
  Description of Artificial Sequence: Synthetic oligonucleotide
cgcggggcccauaacuagc

SEQ ID NO: 2303617 - RNA, 19 nt, Artificial Sequence
  Description of Artificial Sequence: Synthetic oligonucleotide
guagucaaccucacucauu

SEQ ID NO: 2303618 - RNA, 19 nt, Artificial Sequence
  Description of Artificial Sequence: Synthetic oligonucleotide
gcgcauaccgaggcauacc

SEQ ID NO: 2303619 - RNA, 19 nt, Artificial Sequence
  Description of Artificial Sequence: Synthetic oligonucleotide
ccaggaugccagaaauaaa

SEQ ID NO: 2303620 - RNA, 19 nt, Artificial Sequence
  Description of Artificial Sequence: Synthetic oligonucleotide
gcgcuuagagccgccagga

SEQ ID NO: 2303621 - RNA, 19 nt, Artificial Sequence
  Description of Artificial Sequence: Synthetic oligonucleotide
ggcccauaacuagcugcgc

SEQ ID NO: 2303622 - RNA, 19 nt, Artificial Sequence
  Description of Artificial Sequence: Synthetic oligonucleotide
cugcgcauaccgaggcaua

SEQ ID NO: 2303623 - RNA, 19 nt, Artificial Sequence
  Description of Artificial Sequence: Synthetic oligonucleotide
ccgcggggcccauaacuag

SEQ ID NO: 2303624 - RNA, 19 nt, Artificial Sequence
  Description of Artificial Sequence: Synthetic oligonucleotide
gagccgccaggaugccaga

SEQ ID NO: 2303625 - RNA, 19 nt, Artificial Sequence
  Description of Artificial Sequence: Synthetic oligonucleotide
cagagcgguugagggcuuc

SEQ ID NO: 2303626 - RNA, 19 nt, Artificial Sequence
  Description of Artificial Sequence: Synthetic oligonucleotide
cgcucacacucccuucagc

SEQ ID NO: 2303627 - RNA, 19 nt, Artificial Sequence
  Description of Artificial Sequence: Synthetic oligonucleotide
cuagccagucaaaguuguu

SEQ ID NO: 2303628 - RNA, 19 nt, Artificial Sequence
  Description of Artificial Sequence: Synthetic oligonucleotide
cccauaacuagcugcgcau

SEQ ID NO: 2303629 - RNA, 19 nt, Artificial Sequence
  Description of Artificial Sequence: Synthetic oligonucleotide
cugcccgcggggcccauaa

SEQ ID NO: 2303630 - RNA, 19 nt, Artificial Sequence
  Description of Artificial Sequence: Synthetic oligonucleotide
agccgccaggaugccagaa

SEQ ID NO: 2303631 - RNA, 19 nt, Artificial Sequence
  Description of Artificial Sequence: Synthetic oligonucleotide
cgaggcauaccggcucucc

SEQ ID NO: 2303632 - RNA, 19 nt, Artificial Sequence
  Description of Artificial Sequence: Synthetic oligonucleotide
cacucggaacucccacugu

SEQ ID NO: 2303633 - RNA, 19 nt, Artificial Sequence
  Description of Artificial Sequence: Synthetic oligonucleotide
ccucauccgacugaucaua

SEQ ID NO: 2303634 - RNA, 19 nt, Artificial Sequence
  Description of Artificial Sequence: Synthetic oligonucleotide
ccaugcuguagucaucaau

SEQ ID NO: 2303635 - RNA, 19 nt, Artificial Sequence
  Description of Artificial Sequence: Synthetic oligonucleotide
gcugcgcauaccgaggcau

SEQ ID NO: 2303636 - RNA, 19 nt, Artificial Sequence
  Description of Artificial Sequence: Synthetic oligonucleotide
cacucauucugccguucuu

SEQ ID NO: 2303637 - RNA, 19 nt, Artificial Sequence
  Description of Artificial Sequence: Synthetic oligonucleotide
ccgaaccaugcuguaguca

SEQ ID NO: 2303638 - RNA, 19 nt, Artificial Sequence
  Description of Artificial Sequence: Synthetic oligonucleotide
gggcuucgcagugcugaac

SEQ ID NO: 2303639 - RNA, 19 nt, Artificial Sequence
  Description of Artificial Sequence: Synthetic oligonucleotide
cagcuuucgucaacuucuu

SEQ ID NO: 2303640 - RNA, 19 nt, Artificial Sequence
  Description of Artificial Sequence: Synthetic oligonucleotide
caacgugucccaggcaguu

SEQ ID NO: 2303641 - RNA, 19 nt, Artificial Sequence
  Description of Artificial Sequence: Synthetic oligonucleotide
ccauaacuagcugcgcaua

SEQ ID NO: 2303642 - RNA, 19 nt, Artificial Sequence
  Description of Artificial Sequence: Synthetic oligonucleotide
acagagcgguugagggcuu

SEQ ID NO: 2303643 - RNA, 19 nt, Artificial Sequence
  Description of Artificial Sequence: Synthetic oligonucleotide
cccgcggggcccauaacua

SEQ ID NO: 2303644 - RNA, 19 nt, Artificial Sequence
  Description of Artificial Sequence: Synthetic oligonucleotide
ccucaacgugucccaggca

SEQ ID NO: 2303645 - RNA, 19 nt, Artificial Sequence
  Description of Artificial Sequence: Synthetic oligonucleotide
cgaucaguucccggauguc

SEQ ID NO: 2303646 - RNA, 19 nt, Artificial Sequence
  Description of Artificial Sequence: Synthetic oligonucleotide
cccggaugucagccaucac

SEQ ID NO: 2303647 - RNA, 19 nt, Artificial Sequence
  Description of Artificial Sequence: Synthetic oligonucleotide
cguccaccucgaucaguuc

SEQ ID NO: 2303648 - RNA, 19 nt, Artificial Sequence
  Description of Artificial Sequence: Synthetic oligonucleotide
gcggggcccauaacuagcu

SEQ ID NO: 2303649 - RNA, 19 nt, Artificial Sequence
  Description of Artificial Sequence: Synthetic oligonucleotide
cggaacucccacuguucaa

SEQ ID NO: 2303650 - RNA, 19 nt, Artificial Sequence
  Description of Artificial Sequence: Synthetic oligonucleotide
ccucgaucaguucccggau

SEQ ID NO: 2303651 - RNA, 19 nt, Artificial Sequence
  Description of Artificial Sequence: Synthetic oligonucleotide
cggggcccauaacuagcug

SEQ ID NO: 2303652 - RNA, 19 nt, Artificial Sequence
  Description of Artificial Sequence: Synthetic oligonucleotide
cggcgcucacacucccuuc

SEQ ID NO: 2303653 - RNA, 19 nt, Artificial Sequence
  Description of Artificial Sequence: Synthetic oligonucleotide
cgccggcgcucacacuccc

SEQ ID NO: 2303654 - RNA, 19 nt, Artificial Sequence
  Description of Artificial Sequence: Synthetic oligonucleotide
cggccgccggcgcucacac

SEQ ID NO: 2303655 - RNA, 19 nt, Artificial Sequence
  Description of Artificial Sequence: Synthetic oligonucleotide
ccgaggcauaccggcucuc

SEQ ID NO: 2303656 - RNA, 19 nt, Artificial Sequence
  Description of Artificial Sequence: Synthetic oligonucleotide
ccucacucauucugccguu

SEQ ID NO: 2303657 - RNA, 19 nt, Artificial Sequence
  Description of Artificial Sequence: Synthetic oligonucleotide
cgucaacuucuugaauuuu

SEQ ID NO: 2303658 - RNA, 19 nt, Artificial Sequence
  Description of Artificial Sequence: Synthetic oligonucleotide
gccggcgcucacacucccu

SEQ ID NO: 2303659 - RNA, 19 nt, Artificial Sequence
  Description of Artificial Sequence: Synthetic oligonucleotide
aagucugcuucuuaggacc

SEQ ID NO: 2303660 - RNA, 19 nt, Artificial Sequence
  Description of Artificial Sequence: Synthetic oligonucleotide
aagaaaauucaguuaacag

SEQ ID NO: 2303661 - RNA, 19 nt, Artificial Sequence
  Description of Artificial Sequence: Synthetic oligonucleotide
aagaaucaaucccucaccc

SEQ ID NO: 2303662 - RNA, 19 nt, Artificial Sequence
  Description of Artificial Sequence: Synthetic oligonucleotide
ucuaugaauucaaagggag

SEQ ID NO: 2303663 - RNA, 19 nt, Artificial Sequence
  Description of Artificial Sequence: Synthetic oligonucleotide
aaaggacuuauuuacaagu

SEQ ID NO: 2303664 - RNA, 19 nt, Artificial Sequence
  Description of Artificial Sequence: Synthetic oligonucleotide
ugccaaauaaccaggagag

SEQ ID NO: 2303665 - RNA, 19 nt, Artificial Sequence
  Description of Artificial Sequence: Synthetic oligonucleotide
uuugguuuggcaaaguuuc

SEQ ID NO: 2303666 - RNA, 19 nt, Artificial Sequence
  Description of Artificial Sequence: Synthetic oligonucleotide
aaaaggacuuauuuacaag

SEQ ID NO: 2303667 - RNA, 19 nt, Artificial Sequence
  Description of Artificial Sequence: Synthetic oligonucleotide
guugguuagguguagacag

SEQ ID NO: 2303668 - RNA, 19 nt, Artificial Sequence
  Description of Artificial Sequence: Synthetic oligonucleotide
uugucuaugucuacgguag

SEQ ID NO: 2303669 - RNA, 19 nt, Artificial Sequence
  Description of Artificial Sequence: Synthetic oligonucleotide
aauaggacuggguaaacau

SEQ ID NO: 2303670 - RNA, 19 nt, Artificial Sequence
  Description of Artificial Sequence: Synthetic oligonucleotide
uaaacaugcgacuugcucu

SEQ ID NO: 2303671 - RNA, 19 nt, Artificial Sequence
  Description of Artificial Sequence: Synthetic oligonucleotide
aguuucuaugaauucaaag

SEQ ID NO: 2303672 - RNA, 19 nt, Artificial Sequence
  Description of Artificial Sequence: Synthetic oligonucleotide
gaaguuagggccuauguca

SEQ ID NO: 2303673 - RNA, 19 nt, Artificial Sequence
  Description of Artificial Sequence: Synthetic oligonucleotide
acaaacaccaugcauguca

SEQ ID NO: 2303674 - RNA, 19 nt, Artificial Sequence
  Description of Artificial Sequence: Synthetic oligonucleotide
guuagguguagacagcugg

SEQ ID NO: 2303675 - RNA, 19 nt, Artificial Sequence
  Description of Artificial Sequence: Synthetic oligonucleotide
uggacgauucgauucaccg

SEQ ID NO: 2303676 - RNA, 19 nt, Artificial Sequence
  Description of Artificial Sequence: Synthetic oligonucleotide
ugucguauucccuuggugc

SEQ ID NO: 2303677 - RNA, 19 nt, Artificial Sequence
  Description of Artificial Sequence: Synthetic oligonucleotide
uggauuguaaacagagaag

SEQ ID NO: 2303678 - RNA, 19 nt, Artificial Sequence
  Description of Artificial Sequence: Synthetic oligonucleotide
uguuuggcaauauaaauuu

SEQ ID NO: 2303679 - RNA, 19 nt, Artificial Sequence
  Description of Artificial Sequence: Synthetic oligonucleotide
auuguaaacagagaagucu

SEQ ID NO: 2303680 - RNA, 19 nt, Artificial Sequence
  Description of Artificial Sequence: Synthetic oligonucleotide
uuggcaauauaaauuuggc

SEQ ID NO: 2303681 - RNA, 19 nt, Artificial Sequence
  Description of Artificial Sequence: Synthetic oligonucleotide
agucaguuuccacaugccc

SEQ ID NO: 2303682 - RNA, 19 nt, Artificial Sequence
  Description of Artificial Sequence: Synthetic oligonucleotide
uuucggaucaugugugugg

SEQ ID NO: 2303683 - RNA, 19 nt, Artificial Sequence
  Description of Artificial Sequence: Synthetic oligonucleotide
gacgauucgauucaccgug

SEQ ID NO: 2303684 - RNA, 19 nt, Artificial Sequence
  Description of Artificial Sequence: Synthetic oligonucleotide
ucuuucuggagucaguuuc

SEQ ID NO: 2303685 - RNA, 19 nt, Artificial Sequence
  Description of Artificial Sequence: Synthetic oligonucleotide
uaugaauucaaagggagaa

SEQ ID NO: 2303686 - RNA, 19 nt, Artificial Sequence
  Description of Artificial Sequence: Synthetic oligonucleotide
cucaauuuauagcaaguag

SEQ ID NO: 2303687 - RNA, 19 nt, Artificial Sequence
  Description of Artificial Sequence: Synthetic oligonucleotide
uacaaguugagcaugucau

SEQ ID NO: 2303688 - RNA, 19 nt, Artificial Sequence
  Description of Artificial Sequence: Synthetic oligonucleotide
agcccuagaacuuuccacg

SEQ ID NO: 2303689 - RNA, 19 nt, Artificial Sequence
  Description of Artificial Sequence: Synthetic oligonucleotide
uucuaugaauucaaaggga

SEQ ID NO: 2303690 - RNA, 19 nt, Artificial Sequence
  Description of Artificial Sequence: Synthetic oligonucleotide
ucuggagucaguuuccaca

SEQ ID NO: 2303691 - RNA, 19 nt, Artificial Sequence
  Description of Artificial Sequence: Synthetic oligonucleotide
acacugaacaagaaaauuc

SEQ ID NO: 2303692 - RNA, 19 nt, Artificial Sequence
  Description of Artificial Sequence: Synthetic oligonucleotide
uuacaaguugagcauguca

SEQ ID NO: 2303693 - RNA, 19 nt, Artificial Sequence
  Description of Artificial Sequence: Synthetic oligonucleotide
uccaugccaaauaaccagg

SEQ ID NO: 2303694 - RNA, 19 nt, Artificial Sequence
  Description of Artificial Sequence: Synthetic oligonucleotide
uguguggcggggaagaggc

SEQ ID NO: 2303695 - RNA, 19 nt, Artificial Sequence
  Description of Artificial Sequence: Synthetic oligonucleotide
gcaauauaaauuuggcugg

SEQ ID NO: 2303696 - RNA, 19 nt, Artificial Sequence
  Description of Artificial Sequence: Synthetic oligonucleotide
ugaauucaaagggagaagu

SEQ ID NO: 2303697 - RNA, 19 nt, Artificial Sequence
  Description of Artificial Sequence: Synthetic oligonucleotide
ugcccuuucuuauuugggg

SEQ ID NO: 2303698 - RNA, 19 nt, Artificial Sequence
  Description of Artificial Sequence: Synthetic oligonucleotide
gaaucaaucccucacccuc

SEQ ID NO: 2303699 - RNA, 19 nt, Artificial Sequence
  Description of Artificial Sequence: Synthetic oligonucleotide
caugucauaaguccaugcc

SEQ ID NO: 2303700 - RNA, 19 nt, Artificial Sequence
  Description of Artificial Sequence: Synthetic oligonucleotide
ucguagaugaccaccucag

SEQ ID NO: 2303701 - RNA, 19 nt, Artificial Sequence
  Description of Artificial Sequence: Synthetic oligonucleotide
aaguugagcaugucaucuc

SEQ ID NO: 2303702 - RNA, 19 nt, Artificial Sequence
  Description of Artificial Sequence: Synthetic oligonucleotide
augccaaauaaccaggaga

SEQ ID NO: 2303703 - RNA, 19 nt, Artificial Sequence
  Description of Artificial Sequence: Synthetic oligonucleotide
aaucaaucccucacccucc

SEQ ID NO: 2303704 - RNA, 19 nt, Artificial Sequence
  Description of Artificial Sequence: Synthetic oligonucleotide
aguuaacaguuccucaaag

SEQ ID NO: 2303705 - RNA, 19 nt, Artificial Sequence
  Description of Artificial Sequence: Synthetic oligonucleotide
aauaaccaggagaggaggg

SEQ ID NO: 2303706 - RNA, 19 nt, Artificial Sequence
  Description of Artificial Sequence: Synthetic oligonucleotide
gauauggauggagaagggg

SEQ ID NO: 2303707 - RNA, 19 nt, Artificial Sequence
  Description of Artificial Sequence: Synthetic oligonucleotide
ucaguuaacaguuccucaa

SEQ ID NO: 2303708 - RNA, 19 nt, Artificial Sequence
  Description of Artificial Sequence: Synthetic oligonucleotide
caaaguccaagaaucaauc

SEQ ID NO: 2303709 - RNA, 19 nt, Artificial Sequence
  Description of Artificial Sequence: Synthetic oligonucleotide
aagaggcguggguucaccc

SEQ ID NO: 2303710 - RNA, 19 nt, Artificial Sequence
  Description of Artificial Sequence: Synthetic oligonucleotide
agggugguagugcacaagg

SEQ ID NO: 2303711 - RNA, 19 nt, Artificial Sequence
  Description of Artificial Sequence: Synthetic oligonucleotide
caucucaauuuauagcaag

SEQ ID NO: 2303712 - RNA, 19 nt, Artificial Sequence
  Description of Artificial Sequence: Synthetic oligonucleotide
aggacuuauuuacaaguug

SEQ ID NO: 2303713 - RNA, 19 nt, Artificial Sequence
  Description of Artificial Sequence: Synthetic oligonucleotide
auucaguuaacaguuccuc

SEQ ID NO: 2303714 - RNA, 19 nt, Artificial Sequence
  Description of Artificial Sequence: Synthetic oligonucleotide
ugcaguguguucuggacug

SEQ ID NO: 2303715 - RNA, 19 nt, Artificial Sequence
  Description of Artificial Sequence: Synthetic oligonucleotide
cuaugucuacgguagguag

SEQ ID NO: 2303716 - RNA, 19 nt, Artificial Sequence
  Description of Artificial Sequence: Synthetic oligonucleotide
agaagucugcuucuuagga

SEQ ID NO: 2303717 - RNA, 19 nt, Artificial Sequence
  Description of Artificial Sequence: Synthetic oligonucleotide
uuggucucguagaugacca

SEQ ID NO: 2303718 - RNA, 19 nt, Artificial Sequence
  Description of Artificial Sequence: Synthetic oligonucleotide
uauuuacaaguugagcaug

SEQ ID NO: 2303719 - RNA, 19 nt, Artificial Sequence
  Description of Artificial Sequence: Synthetic oligonucleotide
gaugggauugucuaugucu

SEQ ID NO: 2303720 - RNA, 19 nt, Artificial Sequence
  Description of Artificial Sequence: Synthetic oligonucleotide
agacccaugggcguggccc

SEQ ID NO: 2303721 - RNA, 19 nt, Artificial Sequence
  Description of Artificial Sequence: Synthetic oligonucleotide
uguauggaugggauugucu

SEQ ID NO: 2303722 - RNA, 19 nt, Artificial Sequence
  Description of Artificial Sequence: Synthetic oligonucleotide
uaugucuacgguagguaga

SEQ ID NO: 2303723 - RNA, 19 nt, Artificial Sequence
  Description of Artificial Sequence: Synthetic oligonucleotide
auaaguccaugccaaauaa

SEQ ID NO: 2303724 - RNA, 19 nt, Artificial Sequence
  Description of Artificial Sequence: Synthetic oligonucleotide
augggcguggcccagagcu

SEQ ID NO: 2303725 - RNA, 19 nt, Artificial Sequence
  Description of Artificial Sequence: Synthetic oligonucleotide
gaaguuucggaucaugugu

SEQ ID NO: 2303726 - RNA, 19 nt, Artificial Sequence
  Description of Artificial Sequence: Synthetic oligonucleotide
caugcccuuucuuauuugg

SEQ ID NO: 2303727 - RNA, 19 nt, Artificial Sequence
  Description of Artificial Sequence: Synthetic oligonucleotide
cuacgguagguagauaugg

SEQ ID NO: 2303728 - RNA, 19 nt, Artificial Sequence
  Description of Artificial Sequence: Synthetic oligonucleotide
ugucucuggauuguaaaca

SEQ ID NO: 2303729 - RNA, 19 nt, Artificial Sequence
  Description of Artificial Sequence: Synthetic oligonucleotide
ucuacgguagguagauaug

SEQ ID NO: 2303730 - RNA, 19 nt, Artificial Sequence
  Description of Artificial Sequence: Synthetic oligonucleotide
aguggugagguuugguuug

SEQ ID NO: 2303731 - RNA, 19 nt, Artificial Sequence
  Description of Artificial Sequence: Synthetic oligonucleotide
gacugcauguguugguuag

SEQ ID NO: 2303732 - RNA, 19 nt, Artificial Sequence
  Description of Artificial Sequence: Synthetic oligonucleotide
ugagaccacaccacuggag

SEQ ID NO: 2303733 - RNA, 19 nt, Artificial Sequence
  Description of Artificial Sequence: Synthetic oligonucleotide
ucaaagggagaaguuucgg

SEQ ID NO: 2303734 - RNA, 19 nt, Artificial Sequence
  Description of Artificial Sequence: Synthetic oligonucleotide
ugguagugcacaaggaaaa

SEQ ID NO: 2303735 - RNA, 19 nt, Artificial Sequence
  Description of Artificial Sequence: Synthetic oligonucleotide
auucccuuggugcagucug

SEQ ID NO: 2303736 - RNA, 19 nt, Artificial Sequence
  Description of Artificial Sequence: Synthetic oligonucleotide
accguguguguauggaugg

SEQ ID NO: 2303737 - RNA, 19 nt, Artificial Sequence
  Description of Artificial Sequence: Synthetic oligonucleotide
gacuuauuuacaaguugag

SEQ ID NO: 2303738 - RNA, 19 nt, Artificial Sequence
  Description of Artificial Sequence: Synthetic oligonucleotide
gaagucugcuucuuaggac

SEQ ID NO: 2303739 - RNA, 19 nt, Artificial Sequence
  Description of Artificial Sequence: Synthetic oligonucleotide
ugagguuugguuuggcaaa

SEQ ID NO: 2303740 - RNA, 19 nt, Artificial Sequence
  Description of Artificial Sequence: Synthetic oligonucleotide
cuuucuggagucaguuucc

SEQ ID NO: 2303741 - RNA, 19 nt, Artificial Sequence
  Description of Artificial Sequence: Synthetic oligonucleotide
auauggauggagaagggga

SEQ ID NO: 2303742 - RNA, 19 nt, Artificial Sequence
  Description of Artificial Sequence: Synthetic oligonucleotide
aaacaugcgacuugcucuu

SEQ ID NO: 2303743 - RNA, 19 nt, Artificial Sequence
  Description of Artificial Sequence: Synthetic oligonucleotide
aguugagcaugucaucuca

SEQ ID NO: 2303744 - RNA, 19 nt, Artificial Sequence
  Description of Artificial Sequence: Synthetic oligonucleotide
auugucuaugucuacggua

SEQ ID NO: 2303745 - RNA, 19 nt, Artificial Sequence
  Description of Artificial Sequence: Synthetic oligonucleotide
uuauuuggggccaggccac

SEQ ID NO: 2303746 - RNA, 19 nt, Artificial Sequence
  Description of Artificial Sequence: Synthetic oligonucleotide
uggguaaacaugcgacuug

SEQ ID NO: 2303747 - RNA, 19 nt, Artificial Sequence
  Description of Artificial Sequence: Synthetic oligonucleotide
guguguauggaugggauug

SEQ ID NO: 2303748 - RNA, 19 nt, Artificial Sequence
  Description of Artificial Sequence: Synthetic oligonucleotide
aaguuucggaucaugugug

SEQ ID NO: 2303749 - RNA, 19 nt, Artificial Sequence
  Description of Artificial Sequence: Synthetic oligonucleotide
cuggacugauucuuucugg

SEQ ID NO: 2303750 - RNA, 19 nt, Artificial Sequence
  Description of Artificial Sequence: Synthetic oligonucleotide
uggacugauucuuucugga

SEQ ID NO: 2303751 - RNA, 19 nt, Artificial Sequence
  Description of Artificial Sequence: Synthetic oligonucleotide
ucugcccaguggcaguugg

SEQ ID NO: 2303752 - RNA, 19 nt, Artificial Sequence
  Description of Artificial Sequence: Synthetic oligonucleotide
uggucuugucucuggauug

SEQ ID NO: 2303753 - RNA, 19 nt, Artificial Sequence
  Description of Artificial Sequence: Synthetic oligonucleotide
ggauugucuaugucuacgg

SEQ ID NO: 2303754 - RNA, 19 nt, Artificial Sequence
  Description of Artificial Sequence: Synthetic oligonucleotide
aaguuagggccuaugucag

SEQ ID NO: 2303755 - RNA, 19 nt, Artificial Sequence
  Description of Artificial Sequence: Synthetic oligonucleotide
aucaaucccucacccuccc

SEQ ID NO: 2303756 - RNA, 19 nt, Artificial Sequence
  Description of Artificial Sequence: Synthetic oligonucleotide
uaaguccaugccaaauaac

SEQ ID NO: 2303757 - RNA, 19 nt, Artificial Sequence
  Description of Artificial Sequence: Synthetic oligonucleotide
gacuggguaaacaugcgac

SEQ ID NO: 2303758 - RNA, 19 nt, Artificial Sequence
  Description of Artificial Sequence: Synthetic oligonucleotide
ugucuaugucuacgguagg

SEQ ID NO: 2303759 - RNA, 19 nt, Artificial Sequence
  Description of Artificial Sequence: Synthetic oligonucleotide
ccaugcaugucauaagucc

SEQ ID NO: 2303760 - RNA, 19 nt, Artificial Sequence
  Description of Artificial Sequence: Synthetic oligonucleotide
aguccaagaaucaaucccu

SEQ ID NO: 2303761 - RNA, 19 nt, Artificial Sequence
  Description of Artificial Sequence: Synthetic oligonucleotide
uagggccuaugucaggcag

SEQ ID NO: 2303762 - RNA, 19 nt, Artificial Sequence
  Description of Artificial Sequence: Synthetic oligonucleotide
uuuggcuggacgauucgau

SEQ ID NO: 2303763 - RNA, 19 nt, Artificial Sequence
  Description of Artificial Sequence: Synthetic oligonucleotide
ugagcaugucaucucaauu

SEQ ID NO: 2303764 - RNA, 19 nt, Artificial Sequence
  Description of Artificial Sequence: Synthetic oligonucleotide
ugcgacuugcucuuccaug

SEQ ID NO: 2303765 - RNA, 19 nt, Artificial Sequence
  Description of Artificial Sequence: Synthetic oligonucleotide
cacccgaccacaaacacca

SEQ ID NO: 2303766 - RNA, 19 nt, Artificial Sequence
  Description of Artificial Sequence: Synthetic oligonucleotide
acuggguaaacaugcgacu

SEQ ID NO: 2303767 - RNA, 19 nt, Artificial Sequence
  Description of Artificial Sequence: Synthetic oligonucleotide
ucucaauuuauagcaagua

SEQ ID NO: 2303768 - RNA, 19 nt, Artificial Sequence
  Description of Artificial Sequence: Synthetic oligonucleotide
guggcaguuggucucguag

SEQ ID NO: 2303769 - RNA, 19 nt, Artificial Sequence
  Description of Artificial Sequence: Synthetic oligonucleotide
cuaugucaggcagugagac

SEQ ID NO: 2303770 - RNA, 19 nt, Artificial Sequence
  Description of Artificial Sequence: Synthetic oligonucleotide
uacgguagguagauaugga

SEQ ID NO: 2303771 - RNA, 19 nt, Artificial Sequence
  Description of Artificial Sequence: Synthetic oligonucleotide
uccaagaaucaaucccuca

SEQ ID NO: 2303772 - RNA, 19 nt, Artificial Sequence
  Description of Artificial Sequence: Synthetic oligonucleotide
agaaucaaucccucacccu

SEQ ID NO: 2303773 - RNA, 19 nt, Artificial Sequence
  Description of Artificial Sequence: Synthetic oligonucleotide
guuagggccuaugucaggc

SEQ ID NO: 2303774 - RNA, 19 nt, Artificial Sequence
  Description of Artificial Sequence: Synthetic oligonucleotide
gagcccuagaacuuuccac

SEQ ID NO: 2303775 - RNA, 19 nt, Artificial Sequence
  Description of Artificial Sequence: Synthetic oligonucleotide
ugaguggugagguuugguu

SEQ ID NO: 2303776 - RNA, 19 nt, Artificial Sequence
  Description of Artificial Sequence: Synthetic oligonucleotide
acugaacaagaaaauucag

SEQ ID NO: 2303777 - RNA, 19 nt, Artificial Sequence
  Description of Artificial Sequence: Synthetic oligonucleotide
caugccaaauaaccaggag

SEQ ID NO: 2303778 - RNA, 19 nt, Artificial Sequence
  Description of Artificial Sequence: Synthetic oligonucleotide
caugcaugucauaagucca

SEQ ID NO: 2303779 - RNA, 19 nt, Artificial Sequence
  Description of Artificial Sequence: Synthetic oligonucleotide
ucuugucucuggauuguaa

SEQ ID NO: 2303780 - RNA, 19 nt, Artificial Sequence
  Description of Artificial Sequence: Synthetic oligonucleotide
guuggucucguagaugacc

SEQ ID NO: 2303781 - RNA, 19 nt, Artificial Sequence
  Description of Artificial Sequence: Synthetic oligonucleotide
uucggaucauguguguggc

SEQ ID NO: 2303782 - RNA, 19 nt, Artificial Sequence
  Description of Artificial Sequence: Synthetic oligonucleotide
guauggaugggauugucua

SEQ ID NO: 2303783 - RNA, 19 nt, Artificial Sequence
  Description of Artificial Sequence: Synthetic oligonucleotide
cuaugaauucaaagggaga

SEQ ID NO: 2303784 - RNA, 19 nt, Artificial Sequence
  Description of Artificial Sequence: Synthetic oligonucleotide
gaucauguguguggcgggg

SEQ ID NO: 2303785 - RNA, 19 nt, Artificial Sequence
  Description of Artificial Sequence: Synthetic oligonucleotide
uauggaugggauugucuau

SEQ ID NO: 2303786 - RNA, 19 nt, Artificial Sequence
  Description of Artificial Sequence: Synthetic oligonucleotide
gacugauucuuucuggagu

SEQ ID NO: 2303787 - RNA, 19 nt, Artificial Sequence
  Description of Artificial Sequence: Synthetic oligonucleotide
ucauaaguccaugccaaau

SEQ ID NO: 2303788 - RNA, 19 nt, Artificial Sequence
  Description of Artificial Sequence: Synthetic oligonucleotide
aguuagggccuaugucagg

SEQ ID NO: 2303789 - RNA, 19 nt, Artificial Sequence
  Description of Artificial Sequence: Synthetic oligonucleotide
uuucuuauuuggggccagg

SEQ ID NO: 2303790 - RNA, 19 nt, Artificial Sequence
  Description of Artificial Sequence: Synthetic oligonucleotide
uggcuggacgauucgauuc

SEQ ID NO: 2303791 - RNA, 19 nt, Artificial Sequence
  Description of Artificial Sequence: Synthetic oligonucleotide
gcuucuuaggacccagagg

SEQ ID NO: 2303792 - RNA, 19 nt, Artificial Sequence
  Description of Artificial Sequence: Synthetic oligonucleotide
caccguguguguauggaug

SEQ ID NO: 2303793 - RNA, 19 nt, Artificial Sequence
  Description of Artificial Sequence: Synthetic oligonucleotide
auggaugggauugucuaug

SEQ ID NO: 2303794 - RNA, 19 nt, Artificial Sequence
  Description of Artificial Sequence: Synthetic oligonucleotide
ugguuagguguagacagcu

SEQ ID NO: 2303795 - RNA, 19 nt, Artificial Sequence
  Description of Artificial Sequence: Synthetic oligonucleotide
uucgauucaccgugugugu

SEQ ID NO: 2303796 - RNA, 19 nt, Artificial Sequence
  Description of Artificial Sequence: Synthetic oligonucleotide
uggcaaaguuucuaugaau

SEQ ID NO: 2303797 - RNA, 19 nt, Artificial Sequence
  Description of Artificial Sequence: Synthetic oligonucleotide
uaaccaggagaggagggca

SEQ ID NO: 2303798 - RNA, 19 nt, Artificial Sequence
  Description of Artificial Sequence: Synthetic oligonucleotide
aaggacuuauuuacaaguu

SEQ ID NO: 2303799 - RNA, 19 nt, Artificial Sequence
  Description of Artificial Sequence: Synthetic oligonucleotide
acgguagguagauauggau

SEQ ID NO: 2303800 - RNA, 19 nt, Artificial Sequence
  Description of Artificial Sequence: Synthetic oligonucleotide
ucuaugucuacgguaggua

SEQ ID NO: 2303801 - RNA, 19 nt, Artificial Sequence
  Description of Artificial Sequence: Synthetic oligonucleotide
uugagcaugucaucucaau

SEQ ID NO: 2303802 - RNA, 19 nt, Artificial Sequence
  Description of Artificial Sequence: Synthetic oligonucleotide
aucucaauuuauagcaagu

SEQ ID NO: 2303803 - RNA, 19 nt, Artificial Sequence
  Description of Artificial Sequence: Synthetic oligonucleotide
uggcaguuggucucguaga

SEQ ID NO: 2303804 - RNA, 19 nt, Artificial Sequence
  Description of Artificial Sequence: Synthetic oligonucleotide
guuaacaguuccucaaagu

SEQ ID NO: 2303805 - RNA, 19 nt, Artificial Sequence
  Description of Artificial Sequence: Synthetic oligonucleotide
uugguuuggcaaaguuucu

SEQ ID NO: 2303806 - RNA, 19 nt, Artificial Sequence
  Description of Artificial Sequence: Synthetic oligonucleotide
ggacuuauuuacaaguuga

SEQ ID NO: 2303807 - RNA, 19 nt, Artificial Sequence
  Description of Artificial Sequence: Synthetic oligonucleotide
ccaagaaucaaucccucac

SEQ ID NO: 2303808 - RNA, 19 nt, Artificial Sequence
  Description of Artificial Sequence: Synthetic oligonucleotide
uacugagacugcauguguu

SEQ ID NO: 2303809 - RNA, 19 nt, Artificial Sequence
  Description of Artificial Sequence: Synthetic oligonucleotide
ugcauguguugguuaggug

SEQ ID NO: 2303810 - RNA, 19 nt, Artificial Sequence
  Description of Artificial Sequence: Synthetic oligonucleotide
auaggacuggguaaacaug

SEQ ID NO: 2303811 - RNA, 19 nt, Artificial Sequence
  Description of Artificial Sequence: Synthetic oligonucleotide
gacuugcucuuccaugcac

SEQ ID NO: 2303812 - RNA, 19 nt, Artificial Sequence
  Description of Artificial Sequence: Synthetic oligonucleotide
agccacagacccaugggcg

SEQ ID NO: 2303813 - RNA, 19 nt, Artificial Sequence
  Description of Artificial Sequence: Synthetic oligonucleotide
gggauugucuaugucuacg

SEQ ID NO: 2303814 - RNA, 19 nt, Artificial Sequence
  Description of Artificial Sequence: Synthetic oligonucleotide
caggcagugagaccacacc

SEQ ID NO: 2303815 - RNA, 19 nt, Artificial Sequence
  Description of Artificial Sequence: Synthetic oligonucleotide
gagguuugguuuggcaaag

SEQ ID NO: 2303816 - RNA, 19 nt, Artificial Sequence
  Description of Artificial Sequence: Synthetic oligonucleotide
cuugucucuggauuguaaa

SEQ ID NO: 2303817 - RNA, 19 nt, Artificial Sequence
  Description of Artificial Sequence: Synthetic oligonucleotide
cauaaguccaugccaaaua

SEQ ID NO: 2303818 - RNA, 19 nt, Artificial Sequence
  Description of Artificial Sequence: Synthetic oligonucleotide
ucccacccgaccacaaaca

SEQ ID NO: 2303819 - RNA, 19 nt, Artificial Sequence
  Description of Artificial Sequence: Synthetic oligonucleotide
ggauuguaaacagagaagu

SEQ ID NO: 2303820 - RNA, 19 nt, Artificial Sequence
  Description of Artificial Sequence: Synthetic oligonucleotide
uggaugggauugucuaugu

SEQ ID NO: 2303821 - RNA, 19 nt, Artificial Sequence
  Description of Artificial Sequence: Synthetic oligonucleotide
uucaccguguguguaugga

SEQ ID NO: 2303822 - RNA, 19 nt, Artificial Sequence
  Description of Artificial Sequence: Synthetic oligonucleotide
gguagauauggauggagaa

SEQ ID NO: 2303823 - RNA, 19 nt, Artificial Sequence
  Description of Artificial Sequence: Synthetic oligonucleotide
aguuucggaucaugugugu

SEQ ID NO: 2303824 - RNA, 19 nt, Artificial Sequence
  Description of Artificial Sequence: Synthetic oligonucleotide
ggaaguuagggccuauguc

SEQ ID NO: 2303825 - RNA, 19 nt, Artificial Sequence
  Description of Artificial Sequence: Synthetic oligonucleotide
ugcaugucauaaguccaug

SEQ ID NO: 2303826 - RNA, 19 nt, Artificial Sequence
  Description of Artificial Sequence: Synthetic oligonucleotide
ucggaucauguguguggcg

SEQ ID NO: 2303827 - RNA, 19 nt, Artificial Sequence
  Description of Artificial Sequence: Synthetic oligonucleotide
uuuggggccaggccacacu

SEQ ID NO: 2303828 - RNA, 19 nt, Artificial Sequence
  Description of Artificial Sequence: Synthetic oligonucleotide
uuccacgguagggugguag

SEQ ID NO: 2303829 - RNA, 19 nt, Artificial Sequence
  Description of Artificial Sequence: Synthetic oligonucleotide
ugcgugucguauucccuug

SEQ ID NO: 2303830 - RNA, 19 nt, Artificial Sequence
  Description of Artificial Sequence: Synthetic oligonucleotide
gcgacuugcucuuccaugc

SEQ ID NO: 2303831 - RNA, 19 nt, Artificial Sequence
  Description of Artificial Sequence: Synthetic oligonucleotide
uguguguauggaugggauu

SEQ ID NO: 2303832 - RNA, 19 nt, Artificial Sequence
  Description of Artificial Sequence: Synthetic oligonucleotide
agguagauauggauggaga

SEQ ID NO: 2303833 - RNA, 19 nt, Artificial Sequence
  Description of Artificial Sequence: Synthetic oligonucleotide
uguguugguuagguguaga

SEQ ID NO: 2303834 - RNA, 19 nt, Artificial Sequence
  Description of Artificial Sequence: Synthetic oligonucleotide
cuggacgauucgauucacc

SEQ ID NO: 2303835 - RNA, 19 nt, Artificial Sequence
  Description of Artificial Sequence: Synthetic oligonucleotide
uguggcggggaagaggcgu

SEQ ID NO: 2303836 - RNA, 19 nt, Artificial Sequence
  Description of Artificial Sequence: Synthetic oligonucleotide
ggacugauucuuucuggag

SEQ ID NO: 2303837 - RNA, 19 nt, Artificial Sequence
  Description of Artificial Sequence: Synthetic oligonucleotide
cucguagaugaccaccuca

SEQ ID NO: 2303838 - RNA, 19 nt, Artificial Sequence
  Description of Artificial Sequence: Synthetic oligonucleotide
cagugagaccacaccacug

SEQ ID NO: 2303839 - RNA, 19 nt, Artificial Sequence
  Description of Artificial Sequence: Synthetic oligonucleotide
gucuacgguagguagauau

SEQ ID NO: 2303840 - RNA, 19 nt, Artificial Sequence
  Description of Artificial Sequence: Synthetic oligonucleotide
cucagccuccugcuuacag

SEQ ID NO: 2303841 - RNA, 19 nt, Artificial Sequence
  Description of Artificial Sequence: Synthetic oligonucleotide
guuucggaucaugugugug

SEQ ID NO: 2303842 - RNA, 19 nt, Artificial Sequence
  Description of Artificial Sequence: Synthetic oligonucleotide
agaggcguggguucacccu

SEQ ID NO: 2303843 - RNA, 19 nt, Artificial Sequence
  Description of Artificial Sequence: Synthetic oligonucleotide
ucguauucccuuggugcag

SEQ ID NO: 2303844 - RNA, 19 nt, Artificial Sequence
  Description of Artificial Sequence: Synthetic oligonucleotide
uuagggccuaugucaggca

SEQ ID NO: 2303845 - RNA, 19 nt, Artificial Sequence
  Description of Artificial Sequence: Synthetic oligonucleotide
cucacugaagccagagcca

SEQ ID NO: 2303846 - RNA, 19 nt, Artificial Sequence
  Description of Artificial Sequence: Synthetic oligonucleotide
cacgguagggugguagugc

SEQ ID NO: 2303847 - RNA, 19 nt, Artificial Sequence
  Description of Artificial Sequence: Synthetic oligonucleotide
gcaugucauaaguccaugc

SEQ ID NO: 2303848 - RNA, 19 nt, Artificial Sequence
  Description of Artificial Sequence: Synthetic oligonucleotide
acgguagggugguagugca

SEQ ID NO: 2303849 - RNA, 19 nt, Artificial Sequence
  Description of Artificial Sequence: Synthetic oligonucleotide
ucaccguguguguauggau

SEQ ID NO: 2303850 - RNA, 19 nt, Artificial Sequence
  Description of Artificial Sequence: Synthetic oligonucleotide
ugggauugucuaugucuac

SEQ ID NO: 2303851 - RNA, 19 nt, Artificial Sequence
  Description of Artificial Sequence: Synthetic oligonucleotide
gauucgauucaccgugugu

SEQ ID NO: 2303852 - RNA, 19 nt, Artificial Sequence
  Description of Artificial Sequence: Synthetic oligonucleotide
ggugguagugcacaaggaa

SEQ ID NO: 2303853 - RNA, 19 nt, Artificial Sequence
  Description of Artificial Sequence: Synthetic oligonucleotide
augucuacgguagguagau

SEQ ID NO: 2303854 - RNA, 19 nt, Artificial Sequence
  Description of Artificial Sequence: Synthetic oligonucleotide
gauugucuaugucuacggu

SEQ ID NO: 2303855 - RNA, 19 nt, Artificial Sequence
  Description of Artificial Sequence: Synthetic oligonucleotide
ugggguuggucuugucucu

SEQ ID NO: 2303856 - RNA, 19 nt, Artificial Sequence
  Description of Artificial Sequence: Synthetic oligonucleotide
ucucguagaugaccaccuc

SEQ ID NO: 2303857 - RNA, 19 nt, Artificial Sequence
  Description of Artificial Sequence: Synthetic oligonucleotide
gugguagugcacaaggaaa

SEQ ID NO: 2303858 - RNA, 19 nt, Artificial Sequence
  Description of Artificial Sequence: Synthetic oligonucleotide
cauguguugguuaggugua

SEQ ID NO: 2303859 - RNA, 19 nt, Artificial Sequence
  Description of Artificial Sequence: Synthetic oligonucleotide
ggguaaacaugcgacuugc

SEQ ID NO: 2303860 - RNA, 19 nt, Artificial Sequence
  Description of Artificial Sequence: Synthetic oligonucleotide
gaacuuuccacgguagggu

SEQ ID NO: 2303861 - RNA, 19 nt, Artificial Sequence
  Description of Artificial Sequence: Synthetic oligonucleotide
aacaugcgacuugcucuuc

SEQ ID NO: 2303862 - RNA, 19 nt, Artificial Sequence
  Description of Artificial Sequence: Synthetic oligonucleotide
auuuggcuggacgauucga

SEQ ID NO: 2303863 - RNA, 19 nt, Artificial Sequence
  Description of Artificial Sequence: Synthetic oligonucleotide
aaggaaguucugaguggug

SEQ ID NO: 2303864 - RNA, 19 nt, Artificial Sequence
  Description of Artificial Sequence: Synthetic oligonucleotide
cuuucuuauuuggggccag

SEQ ID NO: 2303865 - RNA, 19 nt, Artificial Sequence
  Description of Artificial Sequence: Synthetic oligonucleotide
aggagcccuagaacuuucc

SEQ ID NO: 2303866 - RNA, 19 nt, Artificial Sequence
  Description of Artificial Sequence: Synthetic oligonucleotide
uagggugguagugcacaag

SEQ ID NO: 2303867 - RNA, 19 nt, Artificial Sequence
  Description of Artificial Sequence: Synthetic oligonucleotide
cuuaggacccagaggucca

SEQ ID NO: 2303868 - RNA, 19 nt, Artificial Sequence
  Description of Artificial Sequence: Synthetic oligonucleotide
agagcucuccuuugggguu

SEQ ID NO: 2303869 - RNA, 19 nt, Artificial Sequence
  Description of Artificial Sequence: Synthetic oligonucleotide
uuaggacccagagguccag

SEQ ID NO: 2303870 - RNA, 19 nt, Artificial Sequence
  Description of Artificial Sequence: Synthetic oligonucleotide
uuggcuggacgauucgauu

SEQ ID NO: 2303871 - RNA, 19 nt, Artificial Sequence
  Description of Artificial Sequence: Synthetic oligonucleotide
gauggagaaggggaaguua

SEQ ID NO: 2303872 - RNA, 19 nt, Artificial Sequence
  Description of Artificial Sequence: Synthetic oligonucleotide
gaagaggcguggguucacc

SEQ ID NO: 2303873 - RNA, 19 nt, Artificial Sequence
  Description of Artificial Sequence: Synthetic oligonucleotide
guguguggcggggaagagg

SEQ ID NO: 2303874 - RNA, 19 nt, Artificial Sequence
  Description of Artificial Sequence: Synthetic oligonucleotide
augggauugucuaugucua

SEQ ID NO: 2303875 - RNA, 19 nt, Artificial Sequence
  Description of Artificial Sequence: Synthetic oligonucleotide
uauucccuuggugcagucu

SEQ ID NO: 2303876 - RNA, 19 nt, Artificial Sequence
  Description of Artificial Sequence: Synthetic oligonucleotide
agcugcucccugcgugucg

SEQ ID NO: 2303877 - RNA, 19 nt, Artificial Sequence
  Description of Artificial Sequence: Synthetic oligonucleotide
ggucucguagaugaccacc

SEQ ID NO: 2303878 - RNA, 19 nt, Artificial Sequence
  Description of Artificial Sequence: Synthetic oligonucleotide
cagcacaguguggaggagc

SEQ ID NO: 2303879 - RNA, 19 nt, Artificial Sequence
  Description of Artificial Sequence: Synthetic oligonucleotide
gcccuagaacuuuccacgg

SEQ ID NO: 2303880 - RNA, 19 nt, Artificial Sequence
  Description of Artificial Sequence: Synthetic oligonucleotide
ugucaggcagugagaccac

SEQ ID NO: 2303881 - RNA, 19 nt, Artificial Sequence
  Description of Artificial Sequence: Synthetic oligonucleotide
aguuggucucguagaugac

SEQ ID NO: 2303882 - RNA, 19 nt, Artificial Sequence
  Description of Artificial Sequence: Synthetic oligonucleotide
uggccacccagcacagugu

SEQ ID NO: 2303883 - RNA, 19 nt, Artificial Sequence
  Description of Artificial Sequence: Synthetic oligonucleotide
gaggucaggggaucagaaa

SEQ ID NO: 2303884 - RNA, 19 nt, Artificial Sequence
  Description of Artificial Sequence: Synthetic oligonucleotide
ggguucacccugcagugug

SEQ ID NO: 2303885 - RNA, 19 nt, Artificial Sequence
  Description of Artificial Sequence: Synthetic oligonucleotide
guguagacagcuggccacc

SEQ ID NO: 2303886 - RNA, 19 nt, Artificial Sequence
  Description of Artificial Sequence: Synthetic oligonucleotide
gaguggugagguuugguuu

SEQ ID NO: 2303887 - RNA, 19 nt, Artificial Sequence
  Description of Artificial Sequence: Synthetic oligonucleotide
cgguagguagauauggaug

SEQ ID NO: 2303888 - RNA, 19 nt, Artificial Sequence
  Description of Artificial Sequence: Synthetic oligonucleotide
caugcgacuugcucuucca

SEQ ID NO: 2303889 - RNA, 19 nt, Artificial Sequence
  Description of Artificial Sequence: Synthetic oligonucleotide
gguagggugguagugcaca

SEQ ID NO: 2303890 - RNA, 19 nt, Artificial Sequence
  Description of Artificial Sequence: Synthetic oligonucleotide
caguuaacaguuccucaaa

SEQ ID NO: 2303891 - RNA, 19 nt, Artificial Sequence
  Description of Artificial Sequence: Synthetic oligonucleotide
cucccugcgugucguauuc

SEQ ID NO: 2303892 - RNA, 19 nt, Artificial Sequence
  Description of Artificial Sequence: Synthetic oligonucleotide
ucgauucaccgugugugua

SEQ ID NO: 2303893 - RNA, 19 nt, Artificial Sequence
  Description of Artificial Sequence: Synthetic oligonucleotide
ggacuggguaaacaugcga

SEQ ID NO: 2303894 - RNA, 19 nt, Artificial Sequence
  Description of Artificial Sequence: Synthetic oligonucleotide
augcaugucauaaguccau

SEQ ID NO: 2303895 - RNA, 19 nt, Artificial Sequence
  Description of Artificial Sequence: Synthetic oligonucleotide
gucauaaguccaugccaaa

SEQ ID NO: 2303896 - RNA, 19 nt, Artificial Sequence
  Description of Artificial Sequence: Synthetic oligonucleotide
agaggucaggggaucagaa

SEQ ID NO: 2303897 - RNA, 19 nt, Artificial Sequence
  Description of Artificial Sequence: Synthetic oligonucleotide
uggucucguagaugaccac

SEQ ID NO: 2303898 - RNA, 19 nt, Artificial Sequence
  Description of Artificial Sequence: Synthetic oligonucleotide
guacugagacugcaugugu

SEQ ID NO: 2303899 - RNA, 19 nt, Artificial Sequence
  Description of Artificial Sequence: Synthetic oligonucleotide
gccaaauaaccaggagagg

SEQ ID NO: 2303900 - RNA, 19 nt, Artificial Sequence
  Description of Artificial Sequence: Synthetic oligonucleotide
augcgacuugcucuuccau

SEQ ID NO: 2303901 - RNA, 19 nt, Artificial Sequence
  Description of Artificial Sequence: Synthetic oligonucleotide
ggcuggacgauucgauuca

SEQ ID NO: 2303902 - RNA, 19 nt, Artificial Sequence
  Description of Artificial Sequence: Synthetic oligonucleotide
cagagcucuccuuuggggu

SEQ ID NO: 2303903 - RNA, 19 nt, Artificial Sequence
  Description of Artificial Sequence: Synthetic oligonucleotide
cuuccaugcaccagcugcu

SEQ ID NO: 2303904 - RNA, 19 nt, Artificial Sequence
  Description of Artificial Sequence: Synthetic oligonucleotide
gacccaugggcguggccca

SEQ ID NO: 2303905 - RNA, 19 nt, Artificial Sequence
  Description of Artificial Sequence: Synthetic oligonucleotide
uauuuggggccaggccaca

SEQ ID NO: 2303906 - RNA, 19 nt, Artificial Sequence
  Description of Artificial Sequence: Synthetic oligonucleotide
ccacccgaccacaaacacc

SEQ ID NO: 2303907 - RNA, 19 nt, Artificial Sequence
  Description of Artificial Sequence: Synthetic oligonucleotide
aucauguguguggcgggga

SEQ ID NO: 2303908 - RNA, 19 nt, Artificial Sequence
  Description of Artificial Sequence: Synthetic oligonucleotide
gguuuggcaaaguuucuau

SEQ ID NO: 2303909 - RNA, 19 nt, Artificial Sequence
  Description of Artificial Sequence: Synthetic oligonucleotide
uggcggggaagaggcgugg

SEQ ID NO: 2303910 - RNA, 19 nt, Artificial Sequence
  Description of Artificial Sequence: Synthetic oligonucleotide
ggagcccuagaacuuucca

SEQ ID NO: 2303911 - RNA, 19 nt, Artificial Sequence
  Description of Artificial Sequence: Synthetic oligonucleotide
aaggggaaguuagggccua

SEQ ID NO: 2303912 - RNA, 19 nt, Artificial Sequence
  Description of Artificial Sequence: Synthetic oligonucleotide
cacccagcacaguguggag

SEQ ID NO: 2303913 - RNA, 19 nt, Artificial Sequence
  Description of Artificial Sequence: Synthetic oligonucleotide
guagggugguagugcacaa

SEQ ID NO: 2303914 - RNA, 19 nt, Artificial Sequence
  Description of Artificial Sequence: Synthetic oligonucleotide
gucuaugucuacgguaggu

SEQ ID NO: 2303915 - RNA, 19 nt, Artificial Sequence
  Description of Artificial Sequence: Synthetic oligonucleotide
uggguucacccugcagugu

SEQ ID NO: 2303916 - RNA, 19 nt, Artificial Sequence
  Description of Artificial Sequence: Synthetic oligonucleotide
uuccaugcaccagcugcuc

SEQ ID NO: 2303917 - RNA, 19 nt, Artificial Sequence
  Description of Artificial Sequence: Synthetic oligonucleotide
ccucaaaguccaagaauca

SEQ ID NO: 2303918 - RNA, 19 nt, Artificial Sequence
  Description of Artificial Sequence: Synthetic oligonucleotide
gguuagguguagacagcug

SEQ ID NO: 2303919 - RNA, 19 nt, Artificial Sequence
  Description of Artificial Sequence: Synthetic oligonucleotide
gaggagcccuagaacuuuc

SEQ ID NO: 2303920 - RNA, 19 nt, Artificial Sequence
  Description of Artificial Sequence: Synthetic oligonucleotide
guguauggaugggauuguc

SEQ ID NO: 2303921 - RNA, 19 nt, Artificial Sequence
  Description of Artificial Sequence: Synthetic oligonucleotide
gggaaguuagggccuaugu

SEQ ID NO: 2303922 - RNA, 19 nt, Artificial Sequence
  Description of Artificial Sequence: Synthetic oligonucleotide
gcgugucguauucccuugg

SEQ ID NO: 2303923 - RNA, 19 nt, Artificial Sequence
  Description of Artificial Sequence: Synthetic oligonucleotide
ggccacccagcacagugug

SEQ ID NO: 2303924 - RNA, 19 nt, Artificial Sequence
  Description of Artificial Sequence: Synthetic oligonucleotide
gggccuaugucaggcagug

SEQ ID NO: 2303925 - RNA, 19 nt, Artificial Sequence
  Description of Artificial Sequence: Synthetic oligonucleotide
guugagcaugucaucucaa

SEQ ID NO: 2303926 - RNA, 19 nt, Artificial Sequence
  Description of Artificial Sequence: Synthetic oligonucleotide
gucucguagaugaccaccu

SEQ ID NO: 2303927 - RNA, 19 nt, Artificial Sequence
  Description of Artificial Sequence: Synthetic oligonucleotide
ggaugggauugucuauguc

SEQ ID NO: 2303928 - RNA, 19 nt, Artificial Sequence
  Description of Artificial Sequence: Synthetic oligonucleotide
agguccaggcucugcuaaa

SEQ ID NO: 2303929 - RNA, 19 nt, Artificial Sequence
  Description of Artificial Sequence: Synthetic oligonucleotide
guauucccuuggugcaguc

SEQ ID NO: 2303930 - RNA, 19 nt, Artificial Sequence
  Description of Artificial Sequence: Synthetic oligonucleotide
cccaguggcaguuggucuc

SEQ ID NO: 2303931 - RNA, 19 nt, Artificial Sequence
  Description of Artificial Sequence: Synthetic oligonucleotide
guucugaguggugagguuu

SEQ ID NO: 2303932 - RNA, 19 nt, Artificial Sequence
  Description of Artificial Sequence: Synthetic oligonucleotide
cacaguguggaggagcccu

SEQ ID NO: 2303933 - RNA, 19 nt, Artificial Sequence
  Description of Artificial Sequence: Synthetic oligonucleotide
ugggcguggcccagagcuc

SEQ ID NO: 2303934 - RNA, 19 nt, Artificial Sequence
  Description of Artificial Sequence: Synthetic oligonucleotide
agguuugguuuggcaaagu

SEQ ID NO: 2303935 - RNA, 19 nt, Artificial Sequence
  Description of Artificial Sequence: Synthetic oligonucleotide
caugggcguggcccagagc

SEQ ID NO: 2303936 - RNA, 19 nt, Artificial Sequence
  Description of Artificial Sequence: Synthetic oligonucleotide
ggggaucagaaaguacuga

SEQ ID NO: 2303937 - RNA, 19 nt, Artificial Sequence
  Description of Artificial Sequence: Synthetic oligonucleotide
aguguguucuggacugauu

SEQ ID NO: 2303938 - RNA, 19 nt, Artificial Sequence
  Description of Artificial Sequence: Synthetic oligonucleotide
acgauucgauucaccgugu

SEQ ID NO: 2303939 - RNA, 19 nt, Artificial Sequence
  Description of Artificial Sequence: Synthetic oligonucleotide
cugcaguguguucuggacu

SEQ ID NO: 2303940 - RNA, 19 nt, Artificial Sequence
  Description of Artificial Sequence: Synthetic oligonucleotide
ugcucccugcgugucguau

SEQ ID NO: 2303941 - RNA, 19 nt, Artificial Sequence
  Description of Artificial Sequence: Synthetic oligonucleotide
gcaguuggucucguagaug

SEQ ID NO: 2303942 - RNA, 19 nt, Artificial Sequence
  Description of Artificial Sequence: Synthetic oligonucleotide
ggacgauucgauucaccgu

SEQ ID NO: 2303943 - RNA, 19 nt, Artificial Sequence
  Description of Artificial Sequence: Synthetic oligonucleotide
ccaugccaaauaaccagga

SEQ ID NO: 2303944 - RNA, 19 nt, Artificial Sequence
  Description of Artificial Sequence: Synthetic oligonucleotide
guggcggggaagaggcgug

SEQ ID NO: 2303945 - RNA, 19 nt, Artificial Sequence
  Description of Artificial Sequence: Synthetic oligonucleotide
gcagaggucaggggaucag

SEQ ID NO: 2303946 - RNA, 19 nt, Artificial Sequence
  Description of Artificial Sequence: Synthetic oligonucleotide
cugcuucuuaggacccaga

SEQ ID NO: 2303947 - RNA, 19 nt, Artificial Sequence
  Description of Artificial Sequence: Synthetic oligonucleotide
cagacccaugggcguggcc

SEQ ID NO: 2303948 - RNA, 19 nt, Artificial Sequence
  Description of Artificial Sequence: Synthetic oligonucleotide
cuuuccacgguaggguggu

SEQ ID NO: 2303949 - RNA, 19 nt, Artificial Sequence
  Description of Artificial Sequence: Synthetic oligonucleotide
gcagugagaccacaccacu

SEQ ID NO: 2303950 - RNA, 19 nt, Artificial Sequence
  Description of Artificial Sequence: Synthetic oligonucleotide
cugcauguguugguuaggu

SEQ ID NO: 2303951 - RNA, 19 nt, Artificial Sequence
  Description of Artificial Sequence: Synthetic oligonucleotide
cccacccgaccacaaacac

SEQ ID NO: 2303952 - RNA, 19 nt, Artificial Sequence
  Description of Artificial Sequence: Synthetic oligonucleotide
agucugcccaguggcaguu

SEQ ID NO: 2303953 - RNA, 19 nt, Artificial Sequence
  Description of Artificial Sequence: Synthetic oligonucleotide
guguucuggacugauucuu

SEQ ID NO: 2303954 - RNA, 19 nt, Artificial Sequence
  Description of Artificial Sequence: Synthetic oligonucleotide
cacaugcccuuucuuauuu

SEQ ID NO: 2303955 - RNA, 19 nt, Artificial Sequence
  Description of Artificial Sequence: Synthetic oligonucleotide
ugucuacgguagguagaua

SEQ ID NO: 2303956 - RNA, 19 nt, Artificial Sequence
  Description of Artificial Sequence: Synthetic oligonucleotide
ggggaaguuagggccuaug

SEQ ID NO: 2303957 - RNA, 19 nt, Artificial Sequence
  Description of Artificial Sequence: Synthetic oligonucleotide
cuggguaaacaugcgacuu

SEQ ID NO: 2303958 - RNA, 19 nt, Artificial Sequence
  Description of Artificial Sequence: Synthetic oligonucleotide
ccagaaggaaguucugagu

SEQ ID NO: 2303959 - RNA, 19 nt, Artificial Sequence
  Description of Artificial Sequence: Synthetic oligonucleotide
ccacccagcacagugugga

SEQ ID NO: 2303960 - RNA, 19 nt, Artificial Sequence
  Description of Artificial Sequence: Synthetic oligonucleotide
cugcgugucguauucccuu

SEQ ID NO: 2303961 - RNA, 19 nt, Artificial Sequence
  Description of Artificial Sequence: Synthetic oligonucleotide
ccuuucuuauuuggggcca

SEQ ID NO: 2303962 - RNA, 19 nt, Artificial Sequence
  Description of Artificial Sequence: Synthetic oligonucleotide
ggcaguuggucucguagau

SEQ ID NO: 2303963 - RNA, 19 nt, Artificial Sequence
  Description of Artificial Sequence: Synthetic oligonucleotide
gggugguagugcacaagga

SEQ ID NO: 2303964 - RNA, 19 nt, Artificial Sequence
  Description of Artificial Sequence: Synthetic oligonucleotide
ccguguguguauggauggg

SEQ ID NO: 2303965 - RNA, 19 nt, Artificial Sequence
  Description of Artificial Sequence: Synthetic oligonucleotide
ccaugggcguggcccagag

SEQ ID NO: 2303966 - RNA, 19 nt, Artificial Sequence
  Description of Artificial Sequence: Synthetic oligonucleotide
cgauucgauucaccgugug

SEQ ID NO: 2303967 - RNA, 19 nt, Artificial Sequence
  Description of Artificial Sequence: Synthetic oligonucleotide
gccacccagcacagugugg

SEQ ID NO: 2303968 - RNA, 19 nt, Artificial Sequence
  Description of Artificial Sequence: Synthetic oligonucleotide
gcuggacgauucgauucac

SEQ ID NO: 2303969 - RNA, 19 nt, Artificial Sequence
  Description of Artificial Sequence: Synthetic oligonucleotide
gguccaggcucugcuaaaa

SEQ ID NO: 2303970 - RNA, 19 nt, Artificial Sequence
  Description of Artificial Sequence: Synthetic oligonucleotide
gccacagacccaugggcgu

SEQ ID NO: 2303971 - RNA, 19 nt, Artificial Sequence
  Description of Artificial Sequence: Synthetic oligonucleotide
ccagagguccaggcucugc

SEQ ID NO: 2303972 - RNA, 19 nt, Artificial Sequence
  Description of Artificial Sequence: Synthetic oligonucleotide
cagucugcccaguggcagu

SEQ ID NO: 2303973 - RNA, 19 nt, Artificial Sequence
  Description of Artificial Sequence: Synthetic oligonucleotide
ccacgguagggugguagug

SEQ ID NO: 2303974 - RNA, 19 nt, Artificial Sequence
  Description of Artificial Sequence: Synthetic oligonucleotide
ggucuugucucuggauugu

SEQ ID NO: 2303975 - RNA, 19 nt, Artificial Sequence
  Description of Artificial Sequence: Synthetic oligonucleotide
ccacagacccaugggcgug

SEQ ID NO: 2303976 - RNA, 19 nt, Artificial Sequence
  Description of Artificial Sequence: Synthetic oligonucleotide
gguaaacaugcgacuugcu

SEQ ID NO: 2303977 - RNA, 19 nt, Artificial Sequence
  Description of Artificial Sequence: Synthetic oligonucleotide
uuuccacgguaggguggua

SEQ ID NO: 2303978 - RNA, 19 nt, Artificial Sequence
  Description of Artificial Sequence: Synthetic oligonucleotide
cugaguggugagguuuggu

SEQ ID NO: 2303979 - RNA, 19 nt, Artificial Sequence
  Description of Artificial Sequence: Synthetic oligonucleotide
aggggaaguuagggccuau

SEQ ID NO: 2303980 - RNA, 19 nt, Artificial Sequence
  Description of Artificial Sequence: Synthetic oligonucleotide
gcccaguggcaguuggucu

SEQ ID NO: 2303981 - RNA, 19 nt, Artificial Sequence
  Description of Artificial Sequence: Synthetic oligonucleotide
cugcccaguggcaguuggu

SEQ ID NO: 2303982 - RNA, 19 nt, Artificial Sequence
  Description of Artificial Sequence: Synthetic oligonucleotide
ggcguggguucacccugca

SEQ ID NO: 2303983 - RNA, 19 nt, Artificial Sequence
  Description of Artificial Sequence: Synthetic oligonucleotide
cgaccacaaacaccaugca

SEQ ID NO: 2303984 - RNA, 19 nt, Artificial Sequence
  Description of Artificial Sequence: Synthetic oligonucleotide
cgguagggugguagugcac

SEQ ID NO: 2303985 - RNA, 19 nt, Artificial Sequence
  Description of Artificial Sequence: Synthetic oligonucleotide
ccugcgugucguauucccu

SEQ ID NO: 2303986 - RNA, 19 nt, Artificial Sequence
  Description of Artificial Sequence: Synthetic oligonucleotide
gggcguggcccagagcucu

SEQ ID NO: 2303987 - RNA, 19 nt, Artificial Sequence
  Description of Artificial Sequence: Synthetic oligonucleotide
cgauucaccguguguguau

SEQ ID NO: 2303988 - RNA, 19 nt, Artificial Sequence
  Description of Artificial Sequence: Synthetic oligonucleotide
gcucccugcgugucguauu

SEQ ID NO: 2303989 - RNA, 19 nt, Artificial Sequence
  Description of Artificial Sequence: Synthetic oligonucleotide
cgugucguauucccuuggu

SEQ ID NO: 2303990 - RNA, 19 nt, Artificial Sequence
  Description of Artificial Sequence: Synthetic oligonucleotide
ggcguggcccagagcucuc

SEQ ID NO: 2303991 - RNA, 19 nt, Artificial Sequence
  Description of Artificial Sequence: Synthetic oligonucleotide
cguauucccuuggugcagu

SEQ ID NO: 2303992 - RNA, 19 nt, Artificial Sequence
  Description of Artificial Sequence: Synthetic oligonucleotide
cccaugggcguggcccaga

SEQ ID NO: 2303993 - RNA, 19 nt, Artificial Sequence
  Description of Artificial Sequence: Synthetic oligonucleotide
aaaauuucccaauacugac

SEQ ID NO: 2303994 - RNA, 19 nt, Artificial Sequence
  Description of Artificial Sequence: Synthetic oligonucleotide
uacauuaaaacucauuggc

SEQ ID NO: 2303995 - RNA, 19 nt, Artificial Sequence
  Description of Artificial Sequence: Synthetic oligonucleotide
aaaacuagugaacugacaa

SEQ ID NO: 2303996 - RNA, 19 nt, Artificial Sequence
  Description of Artificial Sequence: Synthetic oligonucleotide
uuugauuagauauugcaac

SEQ ID NO: 2303997 - RNA, 19 nt, Artificial Sequence
  Description of Artificial Sequence: Synthetic oligonucleotide
agaucugacuuuuaguagc

SEQ ID NO: 2303998 - RNA, 19 nt, Artificial Sequence
  Description of Artificial Sequence: Synthetic oligonucleotide
uauaauuggcaaucgaucc

SEQ ID NO: 2303999 - RNA, 19 nt, Artificial Sequence
  Description of Artificial Sequence: Synthetic oligonucleotide
aaaacucauuggcuuagcc

SEQ ID NO: 2304000 - RNA, 19 nt, Artificial Sequence
  Description of Artificial Sequence: Synthetic oligonucleotide
agggauaucauccuugagg

SEQ ID NO: 2304001 - RNA, 19 nt, Artificial Sequence
  Description of Artificial Sequence: Synthetic oligonucleotide
uaaaauuucccaauacuga

SEQ ID NO: 2304002 - RNA, 19 nt, Artificial Sequence
  Description of Artificial Sequence: Synthetic oligonucleotide
ucaggcuaaauuuugacca

SEQ ID NO: 2304003 - RNA, 19 nt, Artificial Sequence
  Description of Artificial Sequence: Synthetic oligonucleotide
uauacauucucacugcucu

SEQ ID NO: 2304004 - RNA, 19 nt, Artificial Sequence
  Description of Artificial Sequence: Synthetic oligonucleotide
ugcaacauuaaaauuuccc

SEQ ID NO: 2304005 - RNA, 19 nt, Artificial Sequence
  Description of Artificial Sequence: Synthetic oligonucleotide
  modified_base (4)..(4): a, c, u, g, unknown or other
aagngaggguuguauuucc

SEQ ID NO: 2304006 - RNA, 19 nt, Artificial Sequence
  Description of Artificial Sequence: Synthetic oligonucleotide
gauacuggaguccaggagc

SEQ ID NO: 2304007 - RNA, 19 nt, Artificial Sequence
  Description of Artificial Sequence: Synthetic oligonucleotide
aguagcuuacauuaaaacu

SEQ ID NO: 2304008 - RNA, 19 nt, Artificial Sequence
  Description of Artificial Sequence: Synthetic oligonucleotide
ucaggguuugauuagauau

SEQ ID NO: 2304009 - RNA, 19 nt, Artificial Sequence
  Description of Artificial Sequence: Synthetic oligonucleotide
uauacucaggguuugauua

SEQ ID NO: 2304010 - RNA, 19 nt, Artificial Sequence
  Description of Artificial Sequence: Synthetic oligonucleotide
uuggcaaucgauccacugg

SEQ ID NO: 2304011 - RNA, 19 nt, Artificial Sequence
  Description of Artificial Sequence: Synthetic oligonucleotide
aaauuuugaccaaaacuag

SEQ ID NO: 2304012 - RNA, 19 nt, Artificial Sequence
  Description of Artificial Sequence: Synthetic oligonucleotide
  modified_base (5)..(5): a, c, u, g, unknown or other
aaagngaggguuguauuuc

SEQ ID NO: 2304013 - RNA, 19 nt, Artificial Sequence
  Description of Artificial Sequence: Synthetic oligonucleotide
augguacagugcuugagcc

SEQ ID NO: 2304014 - RNA, 19 nt, Artificial Sequence
  Description of Artificial Sequence: Synthetic oligonucleotide
uuagauauugcaacauuaa

SEQ ID NO: 2304015 - RNA, 19 nt, Artificial Sequence
  Description of Artificial Sequence: Synthetic oligonucleotide
uuuaguagcuuacauuaaa

SEQ ID NO: 2304016 - RNA, 19 nt, Artificial Sequence
  Description of Artificial Sequence: Synthetic oligonucleotide
accgucaucauuucgcuuc

SEQ ID NO: 2304017 - RNA, 19 nt, Artificial Sequence
  Description of Artificial Sequence: Synthetic oligonucleotide
aaagcagaagacaccaggg

SEQ ID NO: 2304018 - RNA, 19 nt, Artificial Sequence
  Description of Artificial Sequence: Synthetic oligonucleotide
auauaauuggcaaucgauc

SEQ ID NO: 2304019 - RNA, 19 nt, Artificial Sequence
  Description of Artificial Sequence: Synthetic oligonucleotide
ugaacugacaaaagaaaau

SEQ ID NO: 2304020 - RNA, 19 nt, Artificial Sequence
  Description of Artificial Sequence: Synthetic oligonucleotide
aaggcuaccugauauaauu

SEQ ID NO: 2304021 - RNA, 19 nt, Artificial Sequence
  Description of Artificial Sequence: Synthetic oligonucleotide
augaagugacuuuauugac

SEQ ID NO: 2304022 - RNA, 19 nt, Artificial Sequence
  Description of Artificial Sequence: Synthetic oligonucleotide
uuuccuaaucuccuggaga

SEQ ID NO: 2304023 - RNA, 19 nt, Artificial Sequence
  Description of Artificial Sequence: Synthetic oligonucleotide
uugauuagauauugcaaca

SEQ ID NO: 2304024 - RNA, 19 nt, Artificial Sequence
  Description of Artificial Sequence: Synthetic oligonucleotide
gggauaucauccuugaggg

SEQ ID NO: 2304025 - RNA, 19 nt, Artificial Sequence
  Description of Artificial Sequence: Synthetic oligonucleotide
uuugaccaaaacuagugaa

SEQ ID NO: 2304026 - RNA, 19 nt, Artificial Sequence
  Description of Artificial Sequence: Synthetic oligonucleotide
aaacagcucagacucacgu

SEQ ID NO: 2304027 - RNA, 19 nt, Artificial Sequence
  Description of Artificial Sequence: Synthetic oligonucleotide
uugagggugauacuggagu

SEQ ID NO: 2304028 - RNA, 19 nt, Artificial Sequence
  Description of Artificial Sequence: Synthetic oligonucleotide
cucagacucacguaauugg

SEQ ID NO: 2304029 - RNA, 19 nt, Artificial Sequence
  Description of Artificial Sequence: Synthetic oligonucleotide
auugcaacauuaaaauuuc

SEQ ID NO: 2304030 - RNA, 19 nt, Artificial Sequence
  Description of Artificial Sequence: Synthetic oligonucleotide
acagaucugacuuuuagua

SEQ ID NO: 2304031 - RNA, 19 nt, Artificial Sequence
  Description of Artificial Sequence: Synthetic oligonucleotide
uugaccaaaacuagugaac

SEQ ID NO: 2304032 - RNA, 19 nt, Artificial Sequence
  Description of Artificial Sequence: Synthetic oligonucleotide
uuaguagcuuacauuaaaa

SEQ ID NO: 2304033 - RNA, 19 nt, Artificial Sequence
  Description of Artificial Sequence: Synthetic oligonucleotide
aacuagugaacugacaaaa

SEQ ID NO: 2304034 - RNA, 19 nt, Artificial Sequence
  Description of Artificial Sequence: Synthetic oligonucleotide
ugauauaauuggcaaucga

SEQ ID NO: 2304035 - RNA, 19 nt, Artificial Sequence
  Description of Artificial Sequence: Synthetic oligonucleotide
acucaggcuaaauuuugac

SEQ ID NO: 2304036 - RNA, 19 nt, Artificial Sequence
  Description of Artificial Sequence: Synthetic oligonucleotide
aucauuucgcuucagcaca

SEQ ID NO: 2304037 - RNA, 19 nt, Artificial Sequence
  Description of Artificial Sequence: Synthetic oligonucleotide
ugacuaggauuccaguucc

SEQ ID NO: 2304038 - RNA, 19 nt, Artificial Sequence
  Description of Artificial Sequence: Synthetic oligonucleotide
uuguauuuccuaaucuccu

SEQ ID NO: 2304039 - RNA, 19 nt, Artificial Sequence
  Description of Artificial Sequence: Synthetic oligonucleotide
uuggcuuagccaaagcaga

SEQ ID NO: 2304040 - RNA, 19 nt, Artificial Sequence
  Description of Artificial Sequence: Synthetic oligonucleotide
gccaaggugaaacacaccg

SEQ ID NO: 2304041 - RNA, 19 nt, Artificial Sequence
  Description of Artificial Sequence: Synthetic oligonucleotide
auuuugaccaaaacuagug

SEQ ID NO: 2304042 - RNA, 19 nt, Artificial Sequence
  Description of Artificial Sequence: Synthetic oligonucleotide
agugauuagcaguaaggcu

SEQ ID NO: 2304043 - RNA, 19 nt, Artificial Sequence
  Description of Artificial Sequence: Synthetic oligonucleotide
uaguagcuuacauuaaaac

SEQ ID NO: 2304044 - RNA, 19 nt, Artificial Sequence
  Description of Artificial Sequence: Synthetic oligonucleotide
ugauacuggaguccaggag

SEQ ID NO: 2304045 - RNA, 19 nt, Artificial Sequence
  Description of Artificial Sequence: Synthetic oligonucleotide
uuagggaaacagcucagac

SEQ ID NO: 2304046 - RNA, 19 nt, Artificial Sequence
  Description of Artificial Sequence: Synthetic oligonucleotide
cucaggcuaaauuuugacc

SEQ ID NO: 2304047 - RNA, 19 nt, Artificial Sequence
  Description of Artificial Sequence: Synthetic oligonucleotide
uaauuuugcuuuucaggug

SEQ ID NO: 2304048 - RNA, 19 nt, Artificial Sequence
  Description of Artificial Sequence: Synthetic oligonucleotide
uggcaaucgauccacuggc

SEQ ID NO: 2304049 - RNA, 19 nt, Artificial Sequence
  Description of Artificial Sequence: Synthetic oligonucleotide
agauauugcaacauuaaaa

SEQ ID NO: 2304050 - RNA, 19 nt, Artificial Sequence
  Description of Artificial Sequence: Synthetic oligonucleotide
cacaccgucaucauuucgc

SEQ ID NO: 2304051 - RNA, 19 nt, Artificial Sequence
  Description of Artificial Sequence: Synthetic oligonucleotide
ugaagcuuuccugagcaag

SEQ ID NO: 2304052 - RNA, 19 nt, Artificial Sequence
  Description of Artificial Sequence: Synthetic oligonucleotide
uugagugucacaggaaggc

SEQ ID NO: 2304053 - RNA, 19 nt, Artificial Sequence
  Description of Artificial Sequence: Synthetic oligonucleotide
gaguuagggaaacagcuca

SEQ ID NO: 2304054 - RNA, 19 nt, Artificial Sequence
  Description of Artificial Sequence: Synthetic oligonucleotide
cacaagaugcuccacugcc

SEQ ID NO: 2304055 - RNA, 19 nt, Artificial Sequence
  Description of Artificial Sequence: Synthetic oligonucleotide
uuuagcacccugaguuagg

SEQ ID NO: 2304056 - RNA, 19 nt, Artificial Sequence
  Description of Artificial Sequence: Synthetic oligonucleotide
ucagacucacguaauugga

SEQ ID NO: 2304057 - RNA, 19 nt, Artificial Sequence
  Description of Artificial Sequence: Synthetic oligonucleotide
uuucgcuucagcacaagau

SEQ ID NO: 2304058 - RNA, 19 nt, Artificial Sequence
  Description of Artificial Sequence: Synthetic oligonucleotide
auuggcuuagccaaagcag

SEQ ID NO: 2304059 - RNA, 19 nt, Artificial Sequence
  Description of Artificial Sequence: Synthetic oligonucleotide
caucauuucgcuucagcac

SEQ ID NO: 2304060 - RNA, 19 nt, Artificial Sequence
  Description of Artificial Sequence: Synthetic oligonucleotide
uuccuaaucuccuggagaa

SEQ ID NO: 2304061 - RNA, 19 nt, Artificial Sequence
  Description of Artificial Sequence: Synthetic oligonucleotide
  modified_base (18)..(18): a, c, u, g, unknown or other
gcugucagagcucaaagng

SEQ ID NO: 2304062 - RNA, 19 nt, Artificial Sequence
  Description of Artificial Sequence: Synthetic oligonucleotide
gacagugauuagcaguaag

SEQ ID NO: 2304063 - RNA, 19 nt, Artificial Sequence
  Description of Artificial Sequence: Synthetic oligonucleotide
auaauuggcaaucgaucca

SEQ ID NO: 2304064 - RNA, 19 nt, Artificial Sequence
  Description of Artificial Sequence: Synthetic oligonucleotide
uguauacauucucacugcu

SEQ ID NO: 2304065 - RNA, 19 nt, Artificial Sequence
  Description of Artificial Sequence: Synthetic oligonucleotide
uaggauuccaguuccuugu

SEQ ID NO: 2304066 - RNA, 19 nt, Artificial Sequence
  Description of Artificial Sequence: Synthetic oligonucleotide
aaacacaccgucaucauuu

SEQ ID NO: 2304067 - RNA, 19 nt, Artificial Sequence
  Description of Artificial Sequence: Synthetic oligonucleotide
cugacuuuuaguagcuuac

SEQ ID NO: 2304068 - RNA, 19 nt, Artificial Sequence
  Description of Artificial Sequence: Synthetic oligonucleotide
uaauuggacagaucugacu

SEQ ID NO: 2304069 - RNA, 19 nt, Artificial Sequence
  Description of Artificial Sequence: Synthetic oligonucleotide
cuaggcggugcuuugcugg

SEQ ID NO: 2304070 - RNA, 19 nt, Artificial Sequence
  Description of Artificial Sequence: Synthetic oligonucleotide
uuuuagcacccugaguuag

SEQ ID NO: 2304071 - RNA, 19 nt, Artificial Sequence
  Description of Artificial Sequence: Synthetic oligonucleotide
auuaaaacucauuggcuua

SEQ ID NO: 2304072 - RNA, 19 nt, Artificial Sequence
  Description of Artificial Sequence: Synthetic oligonucleotide
acuggccuguuucccaucc

SEQ ID NO: 2304073 - RNA, 19 nt, Artificial Sequence
  Description of Artificial Sequence: Synthetic oligonucleotide
aucgcaggaagccauuuug

SEQ ID NO: 2304074 - RNA, 19 nt, Artificial Sequence
  Description of Artificial Sequence: Synthetic oligonucleotide
ugauuagcaguaaggcuac

SEQ ID NO: 2304075 - RNA, 19 nt, Artificial Sequence
  Description of Artificial Sequence: Synthetic oligonucleotide
aacacaccgucaucauuuc

SEQ ID NO: 2304076 - RNA, 19 nt, Artificial Sequence
  Description of Artificial Sequence: Synthetic oligonucleotide
auuuccuaaucuccuggag

SEQ ID NO: 2304077 - RNA, 19 nt, Artificial Sequence
  Description of Artificial Sequence: Synthetic oligonucleotide
acuuuuaguagcuuacauu

SEQ ID NO: 2304078 - RNA, 19 nt, Artificial Sequence
  Description of Artificial Sequence: Synthetic oligonucleotide
gacucacguaauuggacag

SEQ ID NO: 2304079 - RNA, 19 nt, Artificial Sequence
  Description of Artificial Sequence: Synthetic oligonucleotide
gguuugauuagauauugca

SEQ ID NO: 2304080 - RNA, 19 nt, Artificial Sequence
  Description of Artificial Sequence: Synthetic oligonucleotide
agacucacguaauuggaca

SEQ ID NO: 2304081 - RNA, 19 nt, Artificial Sequence
  Description of Artificial Sequence: Synthetic oligonucleotide
uccaguuccuuguauacau

SEQ ID NO: 2304082 - RNA, 19 nt, Artificial Sequence
  Description of Artificial Sequence: Synthetic oligonucleotide
cuucagcacaagaugcucc

SEQ ID NO: 2304083 - RNA, 19 nt, Artificial Sequence
  Description of Artificial Sequence: Synthetic oligonucleotide
uaccugauauaauuggcaa

SEQ ID NO: 2304084 - RNA, 19 nt, Artificial Sequence
  Description of Artificial Sequence: Synthetic oligonucleotide
uauuuccuaaucuccugga

SEQ ID NO: 2304085 - RNA, 19 nt, Artificial Sequence
  Description of Artificial Sequence: Synthetic oligonucleotide
cagugauuagcaguaaggc

SEQ ID NO: 2304086 - RNA, 19 nt, Artificial Sequence
  Description of Artificial Sequence: Synthetic oligonucleotide
uuuuaguagcuuacauuaa

SEQ ID NO: 2304087 - RNA, 19 nt, Artificial Sequence
  Description of Artificial Sequence: Synthetic oligonucleotide
uuucccauccacuguugag

SEQ ID NO: 2304088 - RNA, 19 nt, Artificial Sequence
  Description of Artificial Sequence: Synthetic oligonucleotide
  modified_base (7)..(7): a, c, u, g, unknown or other
ucaaagngaggguuguauu

SEQ ID NO: 2304089 - RNA, 19 nt, Artificial Sequence
  Description of Artificial Sequence: Synthetic oligonucleotide
gcaacauuaaaauuuccca

SEQ ID NO: 2304090 - RNA, 19 nt, Artificial Sequence
  Description of Artificial Sequence: Synthetic oligonucleotide
uuagcacccugaguuaggg

SEQ ID NO: 2304091 - RNA, 19 nt, Artificial Sequence
  Description of Artificial Sequence: Synthetic oligonucleotide
ugaguuagggaaacagcuc

SEQ ID NO: 2304092 - RNA, 19 nt, Artificial Sequence
  Description of Artificial Sequence: Synthetic oligonucleotide
acagcucagacucacguaa

SEQ ID NO: 2304093 - RNA, 19 nt, Artificial Sequence
  Description of Artificial Sequence: Synthetic oligonucleotide
uucccaauacugacuagga

SEQ ID NO: 2304094 - RNA, 19 nt, Artificial Sequence
  Description of Artificial Sequence: Synthetic oligonucleotide
uaauuggcaaucgauccac

SEQ ID NO: 2304095 - RNA, 19 nt, Artificial Sequence
  Description of Artificial Sequence: Synthetic oligonucleotide
agcacaagaugcuccacug

SEQ ID NO: 2304096 - RNA, 19 nt, Artificial Sequence
  Description of Artificial Sequence: Synthetic oligonucleotide
gagugucacaggaaggcgg

SEQ ID NO: 2304097 - RNA, 19 nt, Artificial Sequence
  Description of Artificial Sequence: Synthetic oligonucleotide
ugguacagugcuugagccg

SEQ ID NO: 2304098 - RNA, 19 nt, Artificial Sequence
  Description of Artificial Sequence: Synthetic oligonucleotide
ucauuggcacagauggcug

SEQ ID NO: 2304099 - RNA, 19 nt, Artificial Sequence
  Description of Artificial Sequence: Synthetic oligonucleotide
uugagcacugaggugaaca

SEQ ID NO: 2304100 - RNA, 19 nt, Artificial Sequence
  Description of Artificial Sequence: Synthetic oligonucleotide
uucagcacaagaugcucca

SEQ ID NO: 2304101 - RNA, 19 nt, Artificial Sequence
  Description of Artificial Sequence: Synthetic oligonucleotide
agcacccugaguuagggaa

SEQ ID NO: 2304102 - RNA, 19 nt, Artificial Sequence
  Description of Artificial Sequence: Synthetic oligonucleotide
auuagauauugcaacauua

SEQ ID NO: 2304103 - RNA, 19 nt, Artificial Sequence
  Description of Artificial Sequence: Synthetic oligonucleotide
aggggagcacuccacaaag

SEQ ID NO: 2304104 - RNA, 19 nt, Artificial Sequence
  Description of Artificial Sequence: Synthetic oligonucleotide
uucugaagcuuuccugagc

SEQ ID NO: 2304105 - RNA, 19 nt, Artificial Sequence
  Description of Artificial Sequence: Synthetic oligonucleotide
caggucacagccccgaagc

SEQ ID NO: 2304106 - RNA, 19 nt, Artificial Sequence
  Description of Artificial Sequence: Synthetic oligonucleotide
agugucacaggaaggcggc

SEQ ID NO: 2304107 - RNA, 19 nt, Artificial Sequence
  Description of Artificial Sequence: Synthetic oligonucleotide
cugauauaauuggcaaucg

SEQ ID NO: 2304108 - RNA, 19 nt, Artificial Sequence
  Description of Artificial Sequence: Synthetic oligonucleotide
ugagugucacaggaaggcg

SEQ ID NO: 2304109 - RNA, 19 nt, Artificial Sequence
  Description of Artificial Sequence: Synthetic oligonucleotide
uugcaacauuaaaauuucc

SEQ ID NO: 2304110 - RNA, 19 nt, Artificial Sequence
  Description of Artificial Sequence: Synthetic oligonucleotide
gugauuagcaguaaggcua

SEQ ID NO: 2304111 - RNA, 19 nt, Artificial Sequence
  Description of Artificial Sequence: Synthetic oligonucleotide
gauauaauuggcaaucgau

SEQ ID NO: 2304112 - RNA, 19 nt, Artificial Sequence
  Description of Artificial Sequence: Synthetic oligonucleotide
auguuggguagaugggagg

SEQ ID NO: 2304113 - RNA, 19 nt, Artificial Sequence
  Description of Artificial Sequence: Synthetic oligonucleotide
acauuaaaacucauuggcu

SEQ ID NO: 2304114 - RNA, 19 nt, Artificial Sequence
  Description of Artificial Sequence: Synthetic oligonucleotide
cacguaauuggacagaucu

SEQ ID NO: 2304115 - RNA, 19 nt, Artificial Sequence
  Description of Artificial Sequence: Synthetic oligonucleotide
cuaccugauauaauuggca

SEQ ID NO: 2304116 - RNA, 19 nt, Artificial Sequence
  Description of Artificial Sequence: Synthetic oligonucleotide
cagugauggggacagggcc

SEQ ID NO: 2304117 - RNA, 19 nt, Artificial Sequence
  Description of Artificial Sequence: Synthetic oligonucleotide
uccucggagaaugaaguga

SEQ ID NO: 2304118 - RNA, 19 nt, Artificial Sequence
  Description of Artificial Sequence: Synthetic oligonucleotide
ugauuagauauugcaacau

SEQ ID NO: 2304119 - RNA, 19 nt, Artificial Sequence
  Description of Artificial Sequence: Synthetic oligonucleotide
acugacuaggauuccaguu

SEQ ID NO: 2304120 - RNA, 19 nt, Artificial Sequence
  Description of Artificial Sequence: Synthetic oligonucleotide
guugagugucacaggaagg

SEQ ID NO: 2304121 - RNA, 19 nt, Artificial Sequence
  Description of Artificial Sequence: Synthetic oligonucleotide
uuuucaggugguucacaga

SEQ ID NO: 2304122 - RNA, 19 nt, Artificial Sequence
  Description of Artificial Sequence: Synthetic oligonucleotide
caaucgauccacuggccug

SEQ ID NO: 2304123 - RNA, 19 nt, Artificial Sequence
  Description of Artificial Sequence: Synthetic oligonucleotide
agugcuugagccggagcgc

SEQ ID NO: 2304124 - RNA, 19 nt, Artificial Sequence
  Description of Artificial Sequence: Synthetic oligonucleotide
ucugcauugggacgaccac

SEQ ID NO: 2304125 - RNA, 19 nt, Artificial Sequence
  Description of Artificial Sequence: Synthetic oligonucleotide
aaucgauccacuggccugu

SEQ ID NO: 2304126 - RNA, 19 nt, Artificial Sequence
  Description of Artificial Sequence: Synthetic oligonucleotide
agcacugaggugaacagcu

SEQ ID NO: 2304127 - RNA, 19 nt, Artificial Sequence
  Description of Artificial Sequence: Synthetic oligonucleotide
gauccacuggccuguuucc

SEQ ID NO: 2304128 - RNA, 19 nt, Artificial Sequence
  Description of Artificial Sequence: Synthetic oligonucleotide
acagugcuugagccggagc

SEQ ID NO: 2304129 - RNA, 19 nt, Artificial Sequence
  Description of Artificial Sequence: Synthetic oligonucleotide
gauuccaguuccuuguaua

SEQ ID NO: 2304130 - RNA, 19 nt, Artificial Sequence
  Description of Artificial Sequence: Synthetic oligonucleotide
ucauuggcuuagccaaagc

SEQ ID NO: 2304131 - RNA, 19 nt, Artificial Sequence
  Description of Artificial Sequence: Synthetic oligonucleotide
agaaugaagugacuuuauu

SEQ ID NO: 2304132 - RNA, 19 nt, Artificial Sequence
  Description of Artificial Sequence: Synthetic oligonucleotide
aggugaaacacaccgucau

SEQ ID NO: 2304133 - RNA, 19 nt, Artificial Sequence
  Description of Artificial Sequence: Synthetic oligonucleotide
aauggccccagaccauuga

SEQ ID NO: 2304134 - RNA, 19 nt, Artificial Sequence
  Description of Artificial Sequence: Synthetic oligonucleotide
cagacucacguaauuggac

SEQ ID NO: 2304135 - RNA, 19 nt, Artificial Sequence
  Description of Artificial Sequence: Synthetic oligonucleotide
cuucugaagcuuuccugag

SEQ ID NO: 2304136 - RNA, 19 nt, Artificial Sequence
  Description of Artificial Sequence: Synthetic oligonucleotide
cauuggcuuagccaaagca

SEQ ID NO: 2304137 - RNA, 19 nt, Artificial Sequence
  Description of Artificial Sequence: Synthetic oligonucleotide
auuucgcuucagcacaaga

SEQ ID NO: 2304138 - RNA, 19 nt, Artificial Sequence
  Description of Artificial Sequence: Synthetic oligonucleotide
ugcuccacugccacaguga

SEQ ID NO: 2304139 - RNA, 19 nt, Artificial Sequence
  Description of Artificial Sequence: Synthetic oligonucleotide
cuugagggugauacuggag

SEQ ID NO: 2304140 - RNA, 19 nt, Artificial Sequence
  Description of Artificial Sequence: Synthetic oligonucleotide
auuagcaguaaggcuaccu

SEQ ID NO: 2304141 - RNA, 19 nt, Artificial Sequence
  Description of Artificial Sequence: Synthetic oligonucleotide
cugaguuagggaaacagcu

SEQ ID NO: 2304142 - RNA, 19 nt, Artificial Sequence
  Description of Artificial Sequence: Synthetic oligonucleotide
ugagggugauacuggaguc

SEQ ID NO: 2304143 - RNA, 19 nt, Artificial Sequence
  Description of Artificial Sequence: Synthetic oligonucleotide
ggacagaucugacuuuuag

SEQ ID NO: 2304144 - RNA, 19 nt, Artificial Sequence
  Description of Artificial Sequence: Synthetic oligonucleotide
caaagaugcugggagacuc

SEQ ID NO: 2304145 - RNA, 19 nt, Artificial Sequence
  Description of Artificial Sequence: Synthetic oligonucleotide
aagaaucgcaggaagccau

SEQ ID NO: 2304146 - RNA, 19 nt, Artificial Sequence
  Description of Artificial Sequence: Synthetic oligonucleotide
ugacuuuuaguagcuuaca

SEQ ID NO: 2304147 - RNA, 19 nt, Artificial Sequence
  Description of Artificial Sequence: Synthetic oligonucleotide
aacagcucagacucacgua

SEQ ID NO: 2304148 - RNA, 19 nt, Artificial Sequence
  Description of Artificial Sequence: Synthetic oligonucleotide
ucgcaggaagccauuuugu

SEQ ID NO: 2304149 - RNA, 19 nt, Artificial Sequence
  Description of Artificial Sequence: Synthetic oligonucleotide
ggugauacuggaguccagg

SEQ ID NO: 2304150 - RNA, 19 nt, Artificial Sequence
  Description of Artificial Sequence: Synthetic oligonucleotide
uucuuguccugguuggcaa

SEQ ID NO: 2304151 - RNA, 19 nt, Artificial Sequence
  Description of Artificial Sequence: Synthetic oligonucleotide
uucacagaaccaguauacu

SEQ ID NO: 2304152 - RNA, 19 nt, Artificial Sequence
  Description of Artificial Sequence: Synthetic oligonucleotide
ugaaacacaccgucaucau

SEQ ID NO: 2304153 - RNA, 19 nt, Artificial Sequence
  Description of Artificial Sequence: Synthetic oligonucleotide
ugguucacagaaccaguau

SEQ ID NO: 2304154 - RNA, 19 nt, Artificial Sequence
  Description of Artificial Sequence: Synthetic oligonucleotide
aaucgcaggaagccauuuu

SEQ ID NO: 2304155 - RNA, 19 nt, Artificial Sequence
  Description of Artificial Sequence: Synthetic oligonucleotide
accauugagcacugaggug

SEQ ID NO: 2304156 - RNA, 19 nt, Artificial Sequence
  Description of Artificial Sequence: Synthetic oligonucleotide
uacugacuaggauuccagu

SEQ ID NO: 2304157 - RNA, 19 nt, Artificial Sequence
  Description of Artificial Sequence: Synthetic oligonucleotide
auacugacuaggauuccag

SEQ ID NO: 2304158 - RNA, 19 nt, Artificial Sequence
  Description of Artificial Sequence: Synthetic oligonucleotide
auuucccaauacugacuag

SEQ ID NO: 2304159 - RNA, 19 nt, Artificial Sequence
  Description of Artificial Sequence: Synthetic oligonucleotide
cauuaaaacucauuggcuu

SEQ ID NO: 2304160 - RNA, 19 nt, Artificial Sequence
  Description of Artificial Sequence: Synthetic oligonucleotide
aguaaggcuaccugauaua

SEQ ID NO: 2304161 - RNA, 19 nt, Artificial Sequence
  Description of Artificial Sequence: Synthetic oligonucleotide
ucggagaaugaagugacuu

SEQ ID NO: 2304162 - RNA, 19 nt, Artificial Sequence
  Description of Artificial Sequence: Synthetic oligonucleotide
acacaccgucaucauuucg

SEQ ID NO: 2304163 - RNA, 19 nt, Artificial Sequence
  Description of Artificial Sequence: Synthetic oligonucleotide
uaaaacucauuggcuuagc

SEQ ID NO: 2304164 - RNA, 19 nt, Artificial Sequence
  Description of Artificial Sequence: Synthetic oligonucleotide
ccugauauaauuggcaauc

SEQ ID NO: 2304165 - RNA, 19 nt, Artificial Sequence
  Description of Artificial Sequence: Synthetic oligonucleotide
cugcugucagagcucaaag

SEQ ID NO: 2304166 - RNA, 19 nt, Artificial Sequence
  Description of Artificial Sequence: Synthetic oligonucleotide
gcaccucuguccuaggcgg

SEQ ID NO: 2304167 - RNA, 19 nt, Artificial Sequence
  Description of Artificial Sequence: Synthetic oligonucleotide
uaaggcuaccugauauaau

SEQ ID NO: 2304168 - RNA, 19 nt, Artificial Sequence
  Description of Artificial Sequence: Synthetic oligonucleotide
cacuccucacagcaccucg

SEQ ID NO: 2304169 - RNA, 19 nt, Artificial Sequence
  Description of Artificial Sequence: Synthetic oligonucleotide
uggccuguuucccauccac

SEQ ID NO: 2304170 - RNA, 19 nt, Artificial Sequence
  Description of Artificial Sequence: Synthetic oligonucleotide
cugguuggcaaugguacag

SEQ ID NO: 2304171 - RNA, 19 nt, Artificial Sequence
  Description of Artificial Sequence: Synthetic oligonucleotide
  modified_base (10)..(10): a, c, u, g, unknown or other
agcucaaagngaggguugu

SEQ ID NO: 2304172 - RNA, 19 nt, Artificial Sequence
  Description of Artificial Sequence: Synthetic oligonucleotide
ggcaccucuguccuaggcg

SEQ ID NO: 2304173 - RNA, 19 nt, Artificial Sequence
  Description of Artificial Sequence: Synthetic oligonucleotide
gacagaucugacuuuuagu

SEQ ID NO: 2304174 - RNA, 19 nt, Artificial Sequence
  Description of Artificial Sequence: Synthetic oligonucleotide
acaccgucaucauuucgcu

SEQ ID NO: 2304175 - RNA, 19 nt, Artificial Sequence
  Description of Artificial Sequence: Synthetic oligonucleotide
ucccaauacugacuaggau

SEQ ID NO: 2304176 - RNA, 19 nt, Artificial Sequence
  Description of Artificial Sequence: Synthetic oligonucleotide
cacuguugagugucacagg

SEQ ID NO: 2304177 - RNA, 19 nt, Artificial Sequence
  Description of Artificial Sequence: Synthetic oligonucleotide
caaaacuagugaacugaca

SEQ ID NO: 2304178 - RNA, 19 nt, Artificial Sequence
  Description of Artificial Sequence: Synthetic oligonucleotide
gauuagauauugcaacauu

SEQ ID NO: 2304179 - RNA, 19 nt, Artificial Sequence
  Description of Artificial Sequence: Synthetic oligonucleotide
ccugaguuagggaaacagc

SEQ ID NO: 2304180 - RNA, 19 nt, Artificial Sequence
  Description of Artificial Sequence: Synthetic oligonucleotide
ucauuucgcuucagcacaa

SEQ ID NO: 2304181 - RNA, 19 nt, Artificial Sequence
  Description of Artificial Sequence: Synthetic oligonucleotide
uggcuuagccaaagcagaa

SEQ ID NO: 2304182 - RNA, 19 nt, Artificial Sequence
  Description of Artificial Sequence: Synthetic oligonucleotide
caaugguacagugcuugag

SEQ ID NO: 2304183 - RNA, 19 nt, Artificial Sequence
  Description of Artificial Sequence: Synthetic oligonucleotide
ggcaaugguacagugcuug

SEQ ID NO: 2304184 - RNA, 19 nt, Artificial Sequence
  Description of Artificial Sequence: Synthetic oligonucleotide
gcuuagccaaagcagaaga

SEQ ID NO: 2304185 - RNA, 19 nt, Artificial Sequence
  Description of Artificial Sequence: Synthetic oligonucleotide
aagugacuuuauugacagu

SEQ ID NO: 2304186 - RNA, 19 nt, Artificial Sequence
  Description of Artificial Sequence: Synthetic oligonucleotide
cucauuggcuuagccaaag

SEQ ID NO: 2304187 - RNA, 19 nt, Artificial Sequence
  Description of Artificial Sequence: Synthetic oligonucleotide
cagccccgaagcaagaauc

SEQ ID NO: 2304188 - RNA, 19 nt, Artificial Sequence
  Description of Artificial Sequence: Synthetic oligonucleotide
aguuagggaaacagcucag

SEQ ID NO: 2304189 - RNA, 19 nt, Artificial Sequence
  Description of Artificial Sequence: Synthetic oligonucleotide
augggagggauaucauccu

SEQ ID NO: 2304190 - RNA, 19 nt, Artificial Sequence
  Description of Artificial Sequence: Synthetic oligonucleotide
agacucaggcuaaauuuug

SEQ ID NO: 2304191 - RNA, 19 nt, Artificial Sequence
  Description of Artificial Sequence: Synthetic oligonucleotide
guaauuggacagaucugac

SEQ ID NO: 2304192 - RNA, 19 nt, Artificial Sequence
  Description of Artificial Sequence: Synthetic oligonucleotide
uacucaggguuugauuaga

SEQ ID NO: 2304193 - RNA, 19 nt, Artificial Sequence
  Description of Artificial Sequence: Synthetic oligonucleotide
uccuaggcggugcuuugcu

SEQ ID NO: 2304194 - RNA, 19 nt, Artificial Sequence
  Description of Artificial Sequence: Synthetic oligonucleotide
aguauacucaggguuugau

SEQ ID NO: 2304195 - RNA, 19 nt, Artificial Sequence
  Description of Artificial Sequence: Synthetic oligonucleotide
guaaggcuaccugauauaa

SEQ ID NO: 2304196 - RNA, 19 nt, Artificial Sequence
  Description of Artificial Sequence: Synthetic oligonucleotide
gacuuuuaguagcuuacau

SEQ ID NO: 2304197 - RNA, 19 nt, Artificial Sequence
  Description of Artificial Sequence: Synthetic oligonucleotide
auuggacagaucugacuuu

SEQ ID NO: 2304198 - RNA, 19 nt, Artificial Sequence
  Description of Artificial Sequence: Synthetic oligonucleotide
ccaaaacuagugaacugac

SEQ ID NO: 2304199 - RNA, 19 nt, Artificial Sequence
  Description of Artificial Sequence: Synthetic oligonucleotide
uguccuaggcggugcuuug

SEQ ID NO: 2304200 - RNA, 19 nt, Artificial Sequence
  Description of Artificial Sequence: Synthetic oligonucleotide
uuggacagaucugacuuuu

SEQ ID NO: 2304201 - RNA, 19 nt, Artificial Sequence
  Description of Artificial Sequence: Synthetic oligonucleotide
gugauacuggaguccagga

SEQ ID NO: 2304202 - RNA, 19 nt, Artificial Sequence
  Description of Artificial Sequence: Synthetic oligonucleotide
  modified_base (2)..(2): a, c, u, g, unknown or other
gngaggguuguauuuccua

SEQ ID NO: 2304203 - RNA, 19 nt, Artificial Sequence
  Description of Artificial Sequence: Synthetic oligonucleotide
auaucauccuugaggguga

SEQ ID NO: 2304204 - RNA, 19 nt, Artificial Sequence
  Description of Artificial Sequence: Synthetic oligonucleotide
acagaccccacuccucaca

SEQ ID NO: 2304205 - RNA, 19 nt, Artificial Sequence
  Description of Artificial Sequence: Synthetic oligonucleotide
ucacguaauuggacagauc

SEQ ID NO: 2304206 - RNA, 19 nt, Artificial Sequence
  Description of Artificial Sequence: Synthetic oligonucleotide
gaccacuggggcuuccuca

SEQ ID NO: 2304207 - RNA, 19 nt, Artificial Sequence
  Description of Artificial Sequence: Synthetic oligonucleotide
aucugcauugggacgacca

SEQ ID NO: 2304208 - RNA, 19 nt, Artificial Sequence
  Description of Artificial Sequence: Synthetic oligonucleotide
guauacauucucacugcuc

SEQ ID NO: 2304209 - RNA, 19 nt, Artificial Sequence
  Description of Artificial Sequence: Synthetic oligonucleotide
agccccgaagcaagaaucg

SEQ ID NO: 2304210 - RNA, 19 nt, Artificial Sequence
  Description of Artificial Sequence: Synthetic oligonucleotide
uccuaaucuccuggagaag

SEQ ID NO: 2304211 - RNA, 19 nt, Artificial Sequence
  Description of Artificial Sequence: Synthetic oligonucleotide
ucacaggaaggcggcuugg

SEQ ID NO: 2304212 - RNA, 19 nt, Artificial Sequence
  Description of Artificial Sequence: Synthetic oligonucleotide
cccgaagcaagaaucgcag

SEQ ID NO: 2304213 - RNA, 19 nt, Artificial Sequence
  Description of Artificial Sequence: Synthetic oligonucleotide
gacucaggcuaaauuuuga

SEQ ID NO: 2304214 - RNA, 19 nt, Artificial Sequence
  Description of Artificial Sequence: Synthetic oligonucleotide
ugggacgaccacuggggcu

SEQ ID NO: 2304215 - RNA, 19 nt, Artificial Sequence
  Description of Artificial Sequence: Synthetic oligonucleotide
ccucggagaaugaagugac

SEQ ID NO: 2304216 - RNA, 19 nt, Artificial Sequence
  Description of Artificial Sequence: Synthetic oligonucleotide
acagccccgaagcaagaau

SEQ ID NO: 2304217 - RNA, 19 nt, Artificial Sequence
  Description of Artificial Sequence: Synthetic oligonucleotide
auacuggaguccaggagcu

SEQ ID NO: 2304218 - RNA, 19 nt, Artificial Sequence
  Description of Artificial Sequence: Synthetic oligonucleotide
aauuggcaaucgauccacu

SEQ ID NO: 2304219 - RNA, 19 nt, Artificial Sequence
  Description of Artificial Sequence: Synthetic oligonucleotide
cucggcaccucuguccuag

SEQ ID NO: 2304220 - RNA, 19 nt, Artificial Sequence
  Description of Artificial Sequence: Synthetic oligonucleotide
acguaauuggacagaucug

SEQ ID NO: 2304221 - RNA, 19 nt, Artificial Sequence
  Description of Artificial Sequence: Synthetic oligonucleotide
accaguauacucaggguuu

SEQ ID NO: 2304222 - RNA, 19 nt, Artificial Sequence
  Description of Artificial Sequence: Synthetic oligonucleotide
cagggccaggggauguugg

SEQ ID NO: 2304223 - RNA, 19 nt, Artificial Sequence
  Description of Artificial Sequence: Synthetic oligonucleotide
accaggggagcacuccaca

SEQ ID NO: 2304224 - RNA, 19 nt, Artificial Sequence
  Description of Artificial Sequence: Synthetic oligonucleotide
uacagugcuugagccggag

SEQ ID NO: 2304225 - RNA, 19 nt, Artificial Sequence
  Description of Artificial Sequence: Synthetic oligonucleotide
ggaaacagcucagacucac

SEQ ID NO: 2304226 - RNA, 19 nt, Artificial Sequence
  Description of Artificial Sequence: Synthetic oligonucleotide
gguuggcaaugguacagug

SEQ ID NO: 2304227 - RNA, 19 nt, Artificial Sequence
  Description of Artificial Sequence: Synthetic oligonucleotide
ggagacucaggcuaaauuu

SEQ ID NO: 2304228 - RNA, 19 nt, Artificial Sequence
  Description of Artificial Sequence: Synthetic oligonucleotide
agccggagcgccaagguga

SEQ ID NO: 2304229 - RNA, 19 nt, Artificial Sequence
  Description of Artificial Sequence: Synthetic oligonucleotide
guuagggaaacagcucaga

SEQ ID NO: 2304230 - RNA, 19 nt, Artificial Sequence
  Description of Artificial Sequence: Synthetic oligonucleotide
acuccucacagcaccucgg

SEQ ID NO: 2304231 - RNA, 19 nt, Artificial Sequence
  Description of Artificial Sequence: Synthetic oligonucleotide
acucacguaauuggacaga

SEQ ID NO: 2304232 - RNA, 19 nt, Artificial Sequence
  Description of Artificial Sequence: Synthetic oligonucleotide
ugcuuuucaggugguucac

SEQ ID NO: 2304233 - RNA, 19 nt, Artificial Sequence
  Description of Artificial Sequence: Synthetic oligonucleotide
agcgccaaggugaaacaca

SEQ ID NO: 2304234 - RNA, 19 nt, Artificial Sequence
  Description of Artificial Sequence: Synthetic oligonucleotide
ggagggauaucauccuuga

SEQ ID NO: 2304235 - RNA, 19 nt, Artificial Sequence
  Description of Artificial Sequence: Synthetic oligonucleotide
cuggugacauccucucuca

SEQ ID NO: 2304236 - RNA, 19 nt, Artificial Sequence
  Description of Artificial Sequence: Synthetic oligonucleotide
ugguuggcaaugguacagu

SEQ ID NO: 2304237 - RNA, 19 nt, Artificial Sequence
  Description of Artificial Sequence: Synthetic oligonucleotide
auugagcacugaggugaac

SEQ ID NO: 2304238 - RNA, 19 nt, Artificial Sequence
  Description of Artificial Sequence: Synthetic oligonucleotide
agcucagacucacguaauu

SEQ ID NO: 2304239 - RNA, 19 nt, Artificial Sequence
  Description of Artificial Sequence: Synthetic oligonucleotide
uuccugagcaagucuuguu

SEQ ID NO: 2304240 - RNA, 19 nt, Artificial Sequence
  Description of Artificial Sequence: Synthetic oligonucleotide
  modified_base (6)..(6): a, c, u, g, unknown or other
caaagngaggguuguauuu

SEQ ID NO: 2304241 - RNA, 19 nt, Artificial Sequence
  Description of Artificial Sequence: Synthetic oligonucleotide
gggauguuggguagauggg

SEQ ID NO: 2304242 - RNA, 19 nt, Artificial Sequence
  Description of Artificial Sequence: Synthetic oligonucleotide
caagaaucgcaggaagcca

SEQ ID NO: 2304243 - RNA, 19 nt, Artificial Sequence
  Description of Artificial Sequence: Synthetic oligonucleotide
cauucucacugcucuccuc

SEQ ID NO: 2304244 - RNA, 19 nt, Artificial Sequence
  Description of Artificial Sequence: Synthetic oligonucleotide
gaucugacuuuuaguagcu

SEQ ID NO: 2304245 - RNA, 19 nt, Artificial Sequence
  Description of Artificial Sequence: Synthetic oligonucleotide
uggacagaucugacuuuua

SEQ ID NO: 2304246 - RNA, 19 nt, Artificial Sequence
  Description of Artificial Sequence: Synthetic oligonucleotide
gggagggauaucauccuug

SEQ ID NO: 2304247 - RNA, 19 nt, Artificial Sequence
  Description of Artificial Sequence: Synthetic oligonucleotide
gauuagcaguaaggcuacc

SEQ ID NO: 2304248 - RNA, 19 nt, Artificial Sequence
  Description of Artificial Sequence: Synthetic oligonucleotide
  modified_base (3)..(3): a, c, u, g, unknown or other
agngaggguuguauuuccu

SEQ ID NO: 2304249 - RNA, 19 nt, Artificial Sequence
  Description of Artificial Sequence: Synthetic oligonucleotide
caguaaggcuaccugauau

SEQ ID NO: 2304250 - RNA, 19 nt, Artificial Sequence
  Description of Artificial Sequence: Synthetic oligonucleotide
uggguagaugggagggaua

SEQ ID NO: 2304251 - RNA, 19 nt, Artificial Sequence
  Description of Artificial Sequence: Synthetic oligonucleotide
ggauguuggguagauggga

SEQ ID NO: 2304252 - RNA, 19 nt, Artificial Sequence
  Description of Artificial Sequence: Synthetic oligonucleotide
aggucacagccccgaagca

SEQ ID NO: 2304253 - RNA, 19 nt, Artificial Sequence
  Description of Artificial Sequence: Synthetic oligonucleotide
caggcuaaauuuugaccaa

SEQ ID NO: 2304254 - RNA, 19 nt, Artificial Sequence
  Description of Artificial Sequence: Synthetic oligonucleotide
ggcuuagccaaagcagaag

SEQ ID NO: 2304255 - RNA, 19 nt, Artificial Sequence
  Description of Artificial Sequence: Synthetic oligonucleotide
aggcuaaauuuugaccaaa

SEQ ID NO: 2304256 - RNA, 19 nt, Artificial Sequence
  Description of Artificial Sequence: Synthetic oligonucleotide
gagcgccaaggugaaacac

SEQ ID NO: 2304257 - RNA, 19 nt, Artificial Sequence
  Description of Artificial Sequence: Synthetic oligonucleotide
gcacaagaugcuccacugc

SEQ ID NO: 2304258 - RNA, 19 nt, Artificial Sequence
  Description of Artificial Sequence: Synthetic oligonucleotide
cguaauuggacagaucuga

SEQ ID NO: 2304259 - RNA, 19 nt, Artificial Sequence
  Description of Artificial Sequence: Synthetic oligonucleotide
cccugaguuagggaaacag

SEQ ID NO: 2304260 - RNA, 19 nt, Artificial Sequence
  Description of Artificial Sequence: Synthetic oligonucleotide
gugcuugagccggagcgcc

SEQ ID NO: 2304261 - RNA, 19 nt, Artificial Sequence
  Description of Artificial Sequence: Synthetic oligonucleotide
aggauuccaguuccuugua

SEQ ID NO: 2304262 - RNA, 19 nt, Artificial Sequence
  Description of Artificial Sequence: Synthetic oligonucleotide
ugacagugauuagcaguaa

SEQ ID NO: 2304263 - RNA, 19 nt, Artificial Sequence
  Description of Artificial Sequence: Synthetic oligonucleotide
gagacucaggcuaaauuuu

SEQ ID NO: 2304264 - RNA, 19 nt, Artificial Sequence
  Description of Artificial Sequence: Synthetic oligonucleotide
uggugacauccucucucau

SEQ ID NO: 2304265 - RNA, 19 nt, Artificial Sequence
  Description of Artificial Sequence: Synthetic oligonucleotide
cauuucgcuucagcacaag

SEQ ID NO: 2304266 - RNA, 19 nt, Artificial Sequence
  Description of Artificial Sequence: Synthetic oligonucleotide
ggguuugauuagauauugc

SEQ ID NO: 2304267 - RNA, 19 nt, Artificial Sequence
  Description of Artificial Sequence: Synthetic oligonucleotide
ccauccacuguugaguguc

SEQ ID NO: 2304268 - RNA, 19 nt, Artificial Sequence
  Description of Artificial Sequence: Synthetic oligonucleotide
ucggcaccucuguccuagg

SEQ ID NO: 2304269 - RNA, 19 nt, Artificial Sequence
  Description of Artificial Sequence: Synthetic oligonucleotide
caccaggggagcacuccac

SEQ ID NO: 2304270 - RNA, 19 nt, Artificial Sequence
  Description of Artificial Sequence: Synthetic oligonucleotide
cgaagcaagaaucgcagga

SEQ ID NO: 2304271 - RNA, 19 nt, Artificial Sequence
  Description of Artificial Sequence: Synthetic oligonucleotide
caucacagaccccacuccu

SEQ ID NO: 2304272 - RNA, 19 nt, Artificial Sequence
  Description of Artificial Sequence: Synthetic oligonucleotide
  modified_base (8)..(8): a, c, u, g, unknown or other
cucaaagngaggguuguau

SEQ ID NO: 2304273 - RNA, 19 nt, Artificial Sequence
  Description of Artificial Sequence: Synthetic oligonucleotide
guuggguagaugggaggga

SEQ ID NO: 2304274 - RNA, 19 nt, Artificial Sequence
  Description of Artificial Sequence: Synthetic oligonucleotide
cuugagccggagcgccaag

SEQ ID NO: 2304275 - RNA, 19 nt, Artificial Sequence
  Description of Artificial Sequence: Synthetic oligonucleotide
cccaauacugacuaggauu

SEQ ID NO: 2304276 - RNA, 19 nt, Artificial Sequence
  Description of Artificial Sequence: Synthetic oligonucleotide
ugggagacucaggcuaaau

SEQ ID NO: 2304277 - RNA, 19 nt, Artificial Sequence
  Description of Artificial Sequence: Synthetic oligonucleotide
ggcuaaauuuugaccaaaa

SEQ ID NO: 2304278 - RNA, 19 nt, Artificial Sequence
  Description of Artificial Sequence: Synthetic oligonucleotide
cauccacuguugaguguca

SEQ ID NO: 2304279 - RNA, 19 nt, Artificial Sequence
  Description of Artificial Sequence: Synthetic oligonucleotide
ggagcgccaaggugaaaca

SEQ ID NO: 2304280 - RNA, 19 nt, Artificial Sequence
  Description of Artificial Sequence: Synthetic oligonucleotide
ggugcuuugcuggugacau

SEQ ID NO: 2304281 - RNA, 19 nt, Artificial Sequence
  Description of Artificial Sequence: Synthetic oligonucleotide
caggguuugauuagauauu

SEQ ID NO: 2304282 - RNA, 19 nt, Artificial Sequence
  Description of Artificial Sequence: Synthetic oligonucleotide
gggagcacuccacaaagau

SEQ ID NO: 2304283 - RNA, 19 nt, Artificial Sequence
  Description of Artificial Sequence: Synthetic oligonucleotide
cacugcucuccucggagaa

SEQ ID NO: 2304284 - RNA, 19 nt, Artificial Sequence
  Description of Artificial Sequence: Synthetic oligonucleotide
cagcacaagaugcuccacu

SEQ ID NO: 2304285 - RNA, 19 nt, Artificial Sequence
  Description of Artificial Sequence: Synthetic oligonucleotide
guccuaggcggugcuuugc

SEQ ID NO: 2304286 - RNA, 19 nt, Artificial Sequence
  Description of Artificial Sequence: Synthetic oligonucleotide
gcaaucgauccacuggccu

SEQ ID NO: 2304287 - RNA, 19 nt, Artificial Sequence
  Description of Artificial Sequence: Synthetic oligonucleotide
ggcggugcuuugcugguga

SEQ ID NO: 2304288 - RNA, 19 nt, Artificial Sequence
  Description of Artificial Sequence: Synthetic oligonucleotide
ggcaaucgauccacuggcc

SEQ ID NO: 2304289 - RNA, 19 nt, Artificial Sequence
  Description of Artificial Sequence: Synthetic oligonucleotide
ccaggucacagccccgaag

SEQ ID NO: 2304290 - RNA, 19 nt, Artificial Sequence
  Description of Artificial Sequence: Synthetic oligonucleotide
ccaguauacucaggguuug

SEQ ID NO: 2304291 - RNA, 19 nt, Artificial Sequence
  Description of Artificial Sequence: Synthetic oligonucleotide
cuaaucuccuggagaaguu

SEQ ID NO: 2304292 - RNA, 19 nt, Artificial Sequence
  Description of Artificial Sequence: Synthetic oligonucleotide
uaucauccuugagggugau

SEQ ID NO: 2304293 - RNA, 19 nt, Artificial Sequence
  Description of Artificial Sequence: Synthetic oligonucleotide
agaaucgcaggaagccauu

SEQ ID NO: 2304294 - RNA, 19 nt, Artificial Sequence
  Description of Artificial Sequence: Synthetic oligonucleotide
cucacguaauuggacagau

SEQ ID NO: 2304295 - RNA, 19 nt, Artificial Sequence
  Description of Artificial Sequence: Synthetic oligonucleotide
cugaagcuuuccugagcaa

SEQ ID NO: 2304296 - RNA, 19 nt, Artificial Sequence
  Description of Artificial Sequence: Synthetic oligonucleotide
ucgauccacuggccuguuu

SEQ ID NO: 2304297 - RNA, 19 nt, Artificial Sequence
  Description of Artificial Sequence: Synthetic oligonucleotide
ccccgaagcaagaaucgca

SEQ ID NO: 2304298 - RNA, 19 nt, Artificial Sequence
  Description of Artificial Sequence: Synthetic oligonucleotide
gcggcuuggaagcugcucu

SEQ ID NO: 2304299 - RNA, 19 nt, Artificial Sequence
  Description of Artificial Sequence: Synthetic oligonucleotide
ccuugagggugauacugga

SEQ ID NO: 2304300 - RNA, 19 nt, Artificial Sequence
  Description of Artificial Sequence: Synthetic oligonucleotide
aucugacuuuuaguagcuu

SEQ ID NO: 2304301 - RNA, 19 nt, Artificial Sequence
  Description of Artificial Sequence: Synthetic oligonucleotide
caggagcucaaucugcauu

SEQ ID NO: 2304302 - RNA, 19 nt, Artificial Sequence
  Description of Artificial Sequence: Synthetic oligonucleotide
ucuguccuaggcggugcuu

SEQ ID NO: 2304303 - RNA, 19 nt, Artificial Sequence
  Description of Artificial Sequence: Synthetic oligonucleotide
cggagcgccaaggugaaac

SEQ ID NO: 2304304 - RNA, 19 nt, Artificial Sequence
  Description of Artificial Sequence: Synthetic oligonucleotide
ggugacauccucucucauu

SEQ ID NO: 2304305 - RNA, 19 nt, Artificial Sequence
  Description of Artificial Sequence: Synthetic oligonucleotide
ccuaaucuccuggagaagu

SEQ ID NO: 2304306 - RNA, 19 nt, Artificial Sequence
  Description of Artificial Sequence: Synthetic oligonucleotide
acgaccacuggggcuuccu

SEQ ID NO: 2304307 - RNA, 19 nt, Artificial Sequence
  Description of Artificial Sequence: Synthetic oligonucleotide
gugcuuugcuggugacauc

SEQ ID NO: 2304308 - RNA, 19 nt, Artificial Sequence
  Description of Artificial Sequence: Synthetic oligonucleotide
ggucacagccccgaagcaa

SEQ ID NO: 2304309 - RNA, 19 nt, Artificial Sequence
  Description of Artificial Sequence: Synthetic oligonucleotide
caguauacucaggguuuga

SEQ ID NO: 2304310 - RNA, 19 nt, Artificial Sequence
  Description of Artificial Sequence: Synthetic oligonucleotide
ccuaggcggugcuuugcug

SEQ ID NO: 2304311 - RNA, 19 nt, Artificial Sequence
  Description of Artificial Sequence: Synthetic oligonucleotide
cuccaggucacagccccga

SEQ ID NO: 2304312 - RNA, 19 nt, Artificial Sequence
  Description of Artificial Sequence: Synthetic oligonucleotide
gggagacucaggcuaaauu

SEQ ID NO: 2304313 - RNA, 19 nt, Artificial Sequence
  Description of Artificial Sequence: Synthetic oligonucleotide
cacaggaaggcggcuugga

SEQ ID NO: 2304314 - RNA, 19 nt, Artificial Sequence
  Description of Artificial Sequence: Synthetic oligonucleotide
cugcauugggacgaccacu

SEQ ID NO: 2304315 - RNA, 19 nt, Artificial Sequence
  Description of Artificial Sequence: Synthetic oligonucleotide
gaaucgcaggaagccauuu

SEQ ID NO: 2304316 - RNA, 19 nt, Artificial Sequence
  Description of Artificial Sequence: Synthetic oligonucleotide
ggguagaugggagggauau

SEQ ID NO: 2304317 - RNA, 19 nt, Artificial Sequence
  Description of Artificial Sequence: Synthetic oligonucleotide
ggugguucacagaaccagu

SEQ ID NO: 2304318 - RNA, 19 nt, Artificial Sequence
  Description of Artificial Sequence: Synthetic oligonucleotide
gcaguaaggcuaccugaua

SEQ ID NO: 2304319 - RNA, 19 nt, Artificial Sequence
  Description of Artificial Sequence: Synthetic oligonucleotide
gcuuacauuaaaacucauu

SEQ ID NO: 2304320 - RNA, 19 nt, Artificial Sequence
  Description of Artificial Sequence: Synthetic oligonucleotide
cucggagaaugaagugacu

SEQ ID NO: 2304321 - RNA, 19 nt, Artificial Sequence
  Description of Artificial Sequence: Synthetic oligonucleotide
gccccgaagcaagaaucgc

SEQ ID NO: 2304322 - RNA, 19 nt, Artificial Sequence
  Description of Artificial Sequence: Synthetic oligonucleotide
ggauaucauccuugagggu

SEQ ID NO: 2304323 - RNA, 19 nt, Artificial Sequence
  Description of Artificial Sequence: Synthetic oligonucleotide
gacgaccacuggggcuucc

SEQ ID NO: 2304324 - RNA, 19 nt, Artificial Sequence
  Description of Artificial Sequence: Synthetic oligonucleotide
gacuaggauuccaguuccu

SEQ ID NO: 2304325 - RNA, 19 nt, Artificial Sequence
  Description of Artificial Sequence: Synthetic oligonucleotide
gguagaugggagggauauc

SEQ ID NO: 2304326 - RNA, 19 nt, Artificial Sequence
  Description of Artificial Sequence: Synthetic oligonucleotide
gcuuuucaggugguucaca

SEQ ID NO: 2304327 - RNA, 19 nt, Artificial Sequence
  Description of Artificial Sequence: Synthetic oligonucleotide
cuggccuguuucccaucca

SEQ ID NO: 2304328 - RNA, 19 nt, Artificial Sequence
  Description of Artificial Sequence: Synthetic oligonucleotide
aggcggugcuuugcuggug

SEQ ID NO: 2304329 - RNA, 19 nt, Artificial Sequence
  Description of Artificial Sequence: Synthetic oligonucleotide
gccccagaccauugagcac

SEQ ID NO: 2304330 - RNA, 19 nt, Artificial Sequence
  Description of Artificial Sequence: Synthetic oligonucleotide
guacagugcuugagccgga

SEQ ID NO: 2304331 - RNA, 19 nt, Artificial Sequence
  Description of Artificial Sequence: Synthetic oligonucleotide
ccaaggugaaacacaccgu

SEQ ID NO: 2304332 - RNA, 19 nt, Artificial Sequence
  Description of Artificial Sequence: Synthetic oligonucleotide
cacagccccgaagcaagaa

SEQ ID NO: 2304333 - RNA, 19 nt, Artificial Sequence
  Description of Artificial Sequence: Synthetic oligonucleotide
ccccagaccauugagcacu

SEQ ID NO: 2304334 - RNA, 19 nt, Artificial Sequence
  Description of Artificial Sequence: Synthetic oligonucleotide
ggcggcuuggaagcugcuc

SEQ ID NO: 2304335 - RNA, 19 nt, Artificial Sequence
  Description of Artificial Sequence: Synthetic oligonucleotide
cacagauggcugagcugcu

SEQ ID NO: 2304336 - RNA, 19 nt, Artificial Sequence
  Description of Artificial Sequence: Synthetic oligonucleotide
cagcucagacucacguaau

SEQ ID NO: 2304337 - RNA, 19 nt, Artificial Sequence
  Description of Artificial Sequence: Synthetic oligonucleotide
ccaggggagcacuccacaa

SEQ ID NO: 2304338 - RNA, 19 nt, Artificial Sequence
  Description of Artificial Sequence: Synthetic oligonucleotide
gcacccugaguuagggaaa

SEQ ID NO: 2304339 - RNA, 19 nt, Artificial Sequence
  Description of Artificial Sequence: Synthetic oligonucleotide
gcaccucggcaccucuguc

SEQ ID NO: 2304340 - RNA, 19 nt, Artificial Sequence
  Description of Artificial Sequence: Synthetic oligonucleotide
gggacgaccacuggggcuu

SEQ ID NO: 2304341 - RNA, 19 nt, Artificial Sequence
  Description of Artificial Sequence: Synthetic oligonucleotide
aucgauccacuggccuguu

SEQ ID NO: 2304342 - RNA, 19 nt, Artificial Sequence
  Description of Artificial Sequence: Synthetic oligonucleotide
caccucuguccuaggcggu

SEQ ID NO: 2304343 - RNA, 19 nt, Artificial Sequence
  Description of Artificial Sequence: Synthetic oligonucleotide
cggcaccucuguccuaggc

SEQ ID NO: 2304344 - RNA, 19 nt, Artificial Sequence
  Description of Artificial Sequence: Synthetic oligonucleotide
  modified_base (9)..(9): a, c, u, g, unknown or other
gcucaaagngaggguugua

SEQ ID NO: 2304345 - RNA, 19 nt, Artificial Sequence
  Description of Artificial Sequence: Synthetic oligonucleotide
caggggauguuggguagau

SEQ ID NO: 2304346 - RNA, 19 nt, Artificial Sequence
  Description of Artificial Sequence: Synthetic oligonucleotide
caccgucaucauuucgcuu

SEQ ID NO: 2304347 - RNA, 19 nt, Artificial Sequence
  Description of Artificial Sequence: Synthetic oligonucleotide
gugucacaggaaggcggcu

SEQ ID NO: 2304348 - RNA, 19 nt, Artificial Sequence
  Description of Artificial Sequence: Synthetic oligonucleotide
gacagggccaggggauguu

SEQ ID NO: 2304349 - RNA, 19 nt, Artificial Sequence
  Description of Artificial Sequence: Synthetic oligonucleotide
cggagaaugaagugacuuu

SEQ ID NO: 2304350 - RNA, 19 nt, Artificial Sequence
  Description of Artificial Sequence: Synthetic oligonucleotide
gggccaggggauguugggu

SEQ ID NO: 2304351 - RNA, 19 nt, Artificial Sequence
  Description of Artificial Sequence: Synthetic oligonucleotide
gccggagcgccaaggugaa

SEQ ID NO: 2304352 - RNA, 19 nt, Artificial Sequence
  Description of Artificial Sequence: Synthetic oligonucleotide
cggugcuuugcuggugaca

SEQ ID NO: 2304353 - RNA, 19 nt, Artificial Sequence
  Description of Artificial Sequence: Synthetic oligonucleotide
ccucggcaccucuguccua

SEQ ID NO: 2304354 - RNA, 19 nt, Artificial Sequence
  Description of Artificial Sequence: Synthetic oligonucleotide
ccggagcgccaaggugaaa

SEQ ID NO: 2304355 - RNA, 19 nt, Artificial Sequence
  Description of Artificial Sequence: Synthetic oligonucleotide
  modified_base (1)..(1): a, c, u, g, unknown or other
ngaggguuguauuuccuaa

SEQ ID NO: 2304356 - RNA, 19 nt, Artificial Sequence
  Description of Artificial Sequence: Synthetic oligonucleotide
ugagacagaagccacucag

SEQ ID NO: 2304357 - RNA, 19 nt, Artificial Sequence
  Description of Artificial Sequence: Synthetic oligonucleotide
ucugguaaucuucauacgu

SEQ ID NO: 2304358 - RNA, 19 nt, Artificial Sequence
  Description of Artificial Sequence: Synthetic oligonucleotide
aaucuucauacgugaauuc

SEQ ID NO: 2304359 - RNA, 19 nt, Artificial Sequence
  Description of Artificial Sequence: Synthetic oligonucleotide
aaagaucugggccugaguu

SEQ ID NO: 2304360 - RNA, 19 nt, Artificial Sequence
  Description of Artificial Sequence: Synthetic oligonucleotide
ugaaauccugcccuuuccg

SEQ ID NO: 2304361 - RNA, 19 nt, Artificial Sequence
  Description of Artificial Sequence: Synthetic oligonucleotide
agacagaagccacucagcg

SEQ ID NO: 2304362 - RNA, 19 nt, Artificial Sequence
  Description of Artificial Sequence: Synthetic oligonucleotide
aaccacagaucacugccac

SEQ ID NO: 2304363 - RNA, 19 nt, Artificial Sequence
  Description of Artificial Sequence: Synthetic oligonucleotide
acagaagccacucagcggu

SEQ ID NO: 2304364 - RNA, 19 nt, Artificial Sequence
  Description of Artificial Sequence: Synthetic oligonucleotide
uccauggugucaccgacgg

SEQ ID NO: 2304365 - RNA, 19 nt, Artificial Sequence
  Description of Artificial Sequence: Synthetic oligonucleotide
aucacugccacuugagguc

SEQ ID NO: 2304366 - RNA, 19 nt, Artificial Sequence
  Description of Artificial Sequence: Synthetic oligonucleotide
ucuucauacgugaauucgu

SEQ ID NO: 2304367 - RNA, 19 nt, Artificial Sequence
  Description of Artificial Sequence: Synthetic oligonucleotide
cauggugucaccgacggcc

SEQ ID NO: 2304368 - RNA, 19 nt, Artificial Sequence
  Description of Artificial Sequence: Synthetic oligonucleotide
aaauccugcccuuuccgcu

SEQ ID NO: 2304369 - RNA, 19 nt, Artificial Sequence
  Description of Artificial Sequence: Synthetic oligonucleotide
aucuucauacgugaauucg

SEQ ID NO: 2304370 - RNA, 19 nt, Artificial Sequence
  Description of Artificial Sequence: Synthetic oligonucleotide
ucagugugagacagaagcc

SEQ ID NO: 2304371 - RNA, 19 nt, Artificial Sequence
  Description of Artificial Sequence: Synthetic oligonucleotide
ugggccugaguuaauuuag

SEQ ID NO: 2304372 - RNA, 19 nt, Artificial Sequence
  Description of Artificial Sequence: Synthetic oligonucleotide
ugguaaucuucauacguga

SEQ ID NO: 2304373 - RNA, 19 nt, Artificial Sequence
  Description of Artificial Sequence: Synthetic oligonucleotide
ucauacgugaauucguuuu

SEQ ID NO: 2304374 - RNA, 19 nt, Artificial Sequence
  Description of Artificial Sequence: Synthetic oligonucleotide
gacagaagccacucagcgg

SEQ ID NO: 2304375 - RNA, 19 nt, Artificial Sequence
  Description of Artificial Sequence: Synthetic oligonucleotide
cugguaaucuucauacgug

SEQ ID NO: 2304376 - RNA, 19 nt, Artificial Sequence
  Description of Artificial Sequence: Synthetic oligonucleotide
uaaucuucauacgugaauu

SEQ ID NO: 2304377 - RNA, 19 nt, Artificial Sequence
  Description of Artificial Sequence: Synthetic oligonucleotide
agaucacugccacuugagg

SEQ ID NO: 2304378 - RNA, 19 nt, Artificial Sequence
  Description of Artificial Sequence: Synthetic oligonucleotide
gaaauccugcccuuuccgc

SEQ ID NO: 2304379 - RNA, 19 nt, Artificial Sequence
  Description of Artificial Sequence: Synthetic oligonucleotide
gcucugguaaucuucauac

SEQ ID NO: 2304380 - RNA, 19 nt, Artificial Sequence
  Description of Artificial Sequence: Synthetic oligonucleotide
agugugagacagaagccac

SEQ ID NO: 2304381 - RNA, 19 nt, Artificial Sequence
  Description of Artificial Sequence: Synthetic oligonucleotide
cugaaauccugcccuuucc

SEQ ID NO: 2304382 - RNA, 19 nt, Artificial Sequence
  Description of Artificial Sequence: Synthetic oligonucleotide
cucugguaaucuucauacg

SEQ ID NO: 2304383 - RNA, 19 nt, Artificial Sequence
  Description of Artificial Sequence: Synthetic oligonucleotide
ucacugccacuugaggucg

SEQ ID NO: 2304384 - RNA, 19 nt, Artificial Sequence
  Description of Artificial Sequence: Synthetic oligonucleotide
gccugaguuaauuuagcag

SEQ ID NO: 2304385 - RNA, 19 nt, Artificial Sequence
  Description of Artificial Sequence: Synthetic oligonucleotide
aagaucugggccugaguua

SEQ ID NO: 2304386 - RNA, 19 nt, Artificial Sequence
  Description of Artificial Sequence: Synthetic oligonucleotide
acagaucacugccacuuga

SEQ ID NO: 2304387 - RNA, 19 nt, Artificial Sequence
  Description of Artificial Sequence: Synthetic oligonucleotide
ugugagacagaagccacuc

SEQ ID NO: 2304388 - RNA, 19 nt, Artificial Sequence
  Description of Artificial Sequence: Synthetic oligonucleotide
cagaucacugccacuugag

SEQ ID NO: 2304389 - RNA, 19 nt, Artificial Sequence
  Description of Artificial Sequence: Synthetic oligonucleotide
ugcccuuuccgcuccgcgg

SEQ ID NO: 2304390 - RNA, 19 nt, Artificial Sequence
  Description of Artificial Sequence: Synthetic oligonucleotide
uucuccauggugucaccga

SEQ ID NO: 2304391 - RNA, 19 nt, Artificial Sequence
  Description of Artificial Sequence: Synthetic oligonucleotide
gagacagaagccacucagc

SEQ ID NO: 2304392 - RNA, 19 nt, Artificial Sequence
  Description of Artificial Sequence: Synthetic oligonucleotide
agaagccacucagcggugc

SEQ ID NO: 2304393 - RNA, 19 nt, Artificial Sequence
  Description of Artificial Sequence: Synthetic oligonucleotide
uucauacgugaauucguuu

SEQ ID NO: 2304394 - RNA, 19 nt, Artificial Sequence
  Description of Artificial Sequence: Synthetic oligonucleotide
cuccauggugucaccgacg

SEQ ID NO: 2304395 - RNA, 19 nt, Artificial Sequence
  Description of Artificial Sequence: Synthetic oligonucleotide
auccugcccuuuccgcucc

SEQ ID NO: 2304396 - RNA, 19 nt, Artificial Sequence
  Description of Artificial Sequence: Synthetic oligonucleotide
agaucugggccugaguuaa

SEQ ID NO: 2304397 - RNA, 19 nt, Artificial Sequence
  Description of Artificial Sequence: Synthetic oligonucleotide
uuuucuccauggugucacc

SEQ ID NO: 2304398 - RNA, 19 nt, Artificial Sequence
  Description of Artificial Sequence: Synthetic oligonucleotide
gacggccgcgcugaaaucc

SEQ ID NO: 2304399 - RNA, 19 nt, Artificial Sequence
  Description of Artificial Sequence: Synthetic oligonucleotide
guaaucuucauacgugaau

SEQ ID NO: 2304400 - RNA, 19 nt, Artificial Sequence
  Description of Artificial Sequence: Synthetic oligonucleotide
acaccgucugagucugguc

SEQ ID NO: 2304401 - RNA, 19 nt, Artificial Sequence
  Description of Artificial Sequence: Synthetic oligonucleotide
ccugaguuaauuuagcagu

SEQ ID NO: 2304402 - RNA, 19 nt, Artificial Sequence
  Description of Artificial Sequence: Synthetic oligonucleotide
aagccacucagcggugcuc

SEQ ID NO: 2304403 - RNA, 19 nt, Artificial Sequence
  Description of Artificial Sequence: Synthetic oligonucleotide
ucugggccugaguuaauuu

SEQ ID NO: 2304404 - RNA, 19 nt, Artificial Sequence
  Description of Artificial Sequence: Synthetic oligonucleotide
ucagcggugcucugguaau

SEQ ID NO: 2304405 - RNA, 19 nt, Artificial Sequence
  Description of Artificial Sequence: Synthetic oligonucleotide
cagugugagacagaagcca

SEQ ID NO: 2304406 - RNA, 19 nt, Artificial Sequence
  Description of Artificial Sequence: Synthetic oligonucleotide
ucaccgacggccgcgcuga

SEQ ID NO: 2304407 - RNA, 19 nt, Artificial Sequence
  Description of Artificial Sequence: Synthetic oligonucleotide
auggugucaccgacggccg

SEQ ID NO: 2304408 - RNA, 19 nt, Artificial Sequence
  Description of Artificial Sequence: Synthetic oligonucleotide
accacagaucacugccacu

SEQ ID NO: 2304409 - RNA, 19 nt, Artificial Sequence
  Description of Artificial Sequence: Synthetic oligonucleotide
cacagaucacugccacuug

SEQ ID NO: 2304410 - RNA, 19 nt, Artificial Sequence
  Description of Artificial Sequence: Synthetic oligonucleotide
cugcccuuuccgcuccgcg

SEQ ID NO: 2304411 - RNA, 19 nt, Artificial Sequence
  Description of Artificial Sequence: Synthetic oligonucleotide
cucagcggugcucugguaa

SEQ ID NO: 2304412 - RNA, 19 nt, Artificial Sequence
  Description of Artificial Sequence: Synthetic oligonucleotide
cugggccugaguuaauuua

SEQ ID NO: 2304413 - RNA, 19 nt, Artificial Sequence
  Description of Artificial Sequence: Synthetic oligonucleotide
ggccugaguuaauuuagca

SEQ ID NO: 2304414 - RNA, 19 nt, Artificial Sequence
  Description of Artificial Sequence: Synthetic oligonucleotide
gcccuuuccgcuccgcggg

SEQ ID NO: 2304415 - RNA, 19 nt, Artificial Sequence
  Description of Artificial Sequence: Synthetic oligonucleotide
agcggugcucugguaaucu

SEQ ID NO: 2304416 - RNA, 19 nt, Artificial Sequence
  Description of Artificial Sequence: Synthetic oligonucleotide
ggugcucugguaaucuuca

SEQ ID NO: 2304417 - RNA, 19 nt, Artificial Sequence
  Description of Artificial Sequence: Synthetic oligonucleotide
gcugaaauccugcccuuuc

SEQ ID NO: 2304418 - RNA, 19 nt, Artificial Sequence
  Description of Artificial Sequence: Synthetic oligonucleotide
ggugucaccgacggccgcg

SEQ ID NO: 2304419 - RNA, 19 nt, Artificial Sequence
  Description of Artificial Sequence: Synthetic oligonucleotide
agccacucagcggugcucu

SEQ ID NO: 2304420 - RNA, 19 nt, Artificial Sequence
  Description of Artificial Sequence: Synthetic oligonucleotide
gucaccgacggccgcgcug

SEQ ID NO: 2304421 - RNA, 19 nt, Artificial Sequence
  Description of Artificial Sequence: Synthetic oligonucleotide
gugagacagaagccacuca

SEQ ID NO: 2304422 - RNA, 19 nt, Artificial Sequence
  Description of Artificial Sequence: Synthetic oligonucleotide
cuucauacgugaauucguu

SEQ ID NO: 2304423 - RNA, 19 nt, Artificial Sequence
  Description of Artificial Sequence: Synthetic oligonucleotide
uggugucaccgacggccgc

SEQ ID NO: 2304424 - RNA, 19 nt, Artificial Sequence
  Description of Artificial Sequence: Synthetic oligonucleotide
uccugcccuuuccgcuccg

SEQ ID NO: 2304425 - RNA, 19 nt, Artificial Sequence
  Description of Artificial Sequence: Synthetic oligonucleotide
cagaagccacucagcggug

SEQ ID NO: 2304426 - RNA, 19 nt, Artificial Sequence
  Description of Artificial Sequence: Synthetic oligonucleotide
gguaaucuucauacgugaa

SEQ ID NO: 2304427 - RNA, 19 nt, Artificial Sequence
  Description of Artificial Sequence: Synthetic oligonucleotide
gaagccacucagcggugcu

SEQ ID NO: 2304428 - RNA, 19 nt, Artificial Sequence
  Description of Artificial Sequence: Synthetic oligonucleotide
aucugggccugaguuaauu

SEQ ID NO: 2304429 - RNA, 19 nt, Artificial Sequence
  Description of Artificial Sequence: Synthetic oligonucleotide
gggccugaguuaauuuagc

SEQ ID NO: 2304430 - RNA, 19 nt, Artificial Sequence
  Description of Artificial Sequence: Synthetic oligonucleotide
gacaccgucugagucuggu

SEQ ID NO: 2304431 - RNA, 19 nt, Artificial Sequence
  Description of Artificial Sequence: Synthetic oligonucleotide
gccgcgcugaaauccugcc

SEQ ID NO: 2304432 - RNA, 19 nt, Artificial Sequence
  Description of Artificial Sequence: Synthetic oligonucleotide
ugucaccgacggccgcgcu

SEQ ID NO: 2304433 - RNA, 19 nt, Artificial Sequence
  Description of Artificial Sequence: Synthetic oligonucleotide
caaagaucugggccugagu

SEQ ID NO: 2304434 - RNA, 19 nt, Artificial Sequence
  Description of Artificial Sequence: Synthetic oligonucleotide
ggcgacaccgucugagucu

SEQ ID NO: 2304435 - RNA, 19 nt, Artificial Sequence
  Description of Artificial Sequence: Synthetic oligonucleotide
gcgggcgacaccgucugag

SEQ ID NO: 2304436 - RNA, 19 nt, Artificial Sequence
  Description of Artificial Sequence: Synthetic oligonucleotide
uuuccgcuccgcgggcgac

SEQ ID NO: 2304437 - RNA, 19 nt, Artificial Sequence
  Description of Artificial Sequence: Synthetic oligonucleotide
gcgacaccgucugagucug

SEQ ID NO: 2304438 - RNA, 19 nt, Artificial Sequence
  Description of Artificial Sequence: Synthetic oligonucleotide
gggcgacaccgucugaguc

SEQ ID NO: 2304439 - RNA, 19 nt, Artificial Sequence
  Description of Artificial Sequence: Synthetic oligonucleotide
cugccacuugaggucgaug

SEQ ID NO: 2304440 - RNA, 19 nt, Artificial Sequence
  Description of Artificial Sequence: Synthetic oligonucleotide
cuuuccgcuccgcgggcga

SEQ ID NO: 2304441 - RNA, 19 nt, Artificial Sequence
  Description of Artificial Sequence: Synthetic oligonucleotide
gugucaccgacggccgcgc

SEQ ID NO: 2304442 - RNA, 19 nt, Artificial Sequence
  Description of Artificial Sequence: Synthetic oligonucleotide
uccgcuccgcgggcgacac

SEQ ID NO: 2304443 - RNA, 19 nt, Artificial Sequence
  Description of Artificial Sequence: Synthetic oligonucleotide
acugccacuugaggucgau

SEQ ID NO: 2304444 - RNA, 19 nt, Artificial Sequence
  Description of Artificial Sequence: Synthetic oligonucleotide
acggccgcgcugaaauccu

SEQ ID NO: 2304445 - RNA, 19 nt, Artificial Sequence
  Description of Artificial Sequence: Synthetic oligonucleotide
gugugagacagaagccacu

SEQ ID NO: 2304446 - RNA, 19 nt, Artificial Sequence
  Description of Artificial Sequence: Synthetic oligonucleotide
ccgcgcugaaauccugccc

SEQ ID NO: 2304447 - RNA, 19 nt, Artificial Sequence
  Description of Artificial Sequence: Synthetic oligonucleotide
cggugcucugguaaucuuc

SEQ ID NO: 2304448 - RNA, 19 nt, Artificial Sequence
  Description of Artificial Sequence: Synthetic oligonucleotide
cgcuccgcgggcgacaccg

SEQ ID NO: 2304449 - RNA, 19 nt, Artificial Sequence
  Description of Artificial Sequence: Synthetic oligonucleotide
acucagcggugcucuggua

SEQ ID NO: 2304450 - RNA, 19 nt, Artificial Sequence
  Description of Artificial Sequence: Synthetic oligonucleotide
cuccgcgggcgacaccguc

SEQ ID NO: 2304451 - RNA, 19 nt, Artificial Sequence
  Description of Artificial Sequence: Synthetic oligonucleotide
cacucagcggugcucuggu

SEQ ID NO: 2304452 - RNA, 19 nt, Artificial Sequence
  Description of Artificial Sequence: Synthetic oligonucleotide
cagcggugcucugguaauc

SEQ ID NO: 2304453 - RNA, 19 nt, Artificial Sequence
  Description of Artificial Sequence: Synthetic oligonucleotide
ggccgcgcugaaauccugc

SEQ ID NO: 2304454 - RNA, 19 nt, Artificial Sequence
  Description of Artificial Sequence: Synthetic oligonucleotide
ccauggugucaccgacggc

SEQ ID NO: 2304455 - RNA, 19 nt, Artificial Sequence
  Description of Artificial Sequence: Synthetic oligonucleotide
cacugccacuugaggucga

SEQ ID NO: 2304456 - RNA, 19 nt, Artificial Sequence
  Description of Artificial Sequence: Synthetic oligonucleotide
cgcgcugaaauccugcccu

SEQ ID NO: 2304457 - RNA, 19 nt, Artificial Sequence
  Description of Artificial Sequence: Synthetic oligonucleotide
ccacagaucacugccacuu

SEQ ID NO: 2304458 - RNA, 19 nt, Artificial Sequence
  Description of Artificial Sequence: Synthetic oligonucleotide
accgacggccgcgcugaaa

SEQ ID NO: 2304459 - RNA, 19 nt, Artificial Sequence
  Description of Artificial Sequence: Synthetic oligonucleotide
gugcucugguaaucuucau

SEQ ID NO: 2304460 - RNA, 19 nt, Artificial Sequence
  Description of Artificial Sequence: Synthetic oligonucleotide
ccgcgggcgacaccgucug

SEQ ID NO: 2304461 - RNA, 19 nt, Artificial Sequence
  Description of Artificial Sequence: Synthetic oligonucleotide
cccuuuccgcuccgcgggc

SEQ ID NO: 2304462 - RNA, 19 nt, Artificial Sequence
  Description of Artificial Sequence: Synthetic oligonucleotide
ccgacggccgcgcugaaau

SEQ ID NO: 2304463 - RNA, 19 nt, Artificial Sequence
  Description of Artificial Sequence: Synthetic oligonucleotide
gaucugggccugaguuaau

SEQ ID NO: 2304464 - RNA, 19 nt, Artificial Sequence
  Description of Artificial Sequence: Synthetic oligonucleotide
ccugcccuuuccgcuccgc

SEQ ID NO: 2304465 - RNA, 19 nt, Artificial Sequence
  Description of Artificial Sequence: Synthetic oligonucleotide
cgacaccgucugagucugg

SEQ ID NO: 2304466 - RNA, 19 nt, Artificial Sequence
  Description of Artificial Sequence: Synthetic oligonucleotide
cgacggccgcgcugaaauc

SEQ ID NO: 2304467 - RNA, 19 nt, Artificial Sequence
  Description of Artificial Sequence: Synthetic oligonucleotide
gcggugcucugguaaucuu

SEQ ID NO: 2304468 - RNA, 19 nt, Artificial Sequence
  Description of Artificial Sequence: Synthetic oligonucleotide
cggccgcgcugaaauccug

SEQ ID NO: 2304469 - RNA, 19 nt, Artificial Sequence
  Description of Artificial Sequence: Synthetic oligonucleotide
gcgcugaaauccugcccuu

SEQ ID NO: 2304470 - RNA, 19 nt, Artificial Sequence
  Description of Artificial Sequence: Synthetic oligonucleotide
caccgacggccgcgcugaa

SEQ ID NO: 2304471 - RNA, 19 nt, Artificial Sequence
  Description of Artificial Sequence: Synthetic oligonucleotide
cgggcgacaccgucugagu

SEQ ID NO: 2304472 - RNA, 19 nt, Artificial Sequence
  Description of Artificial Sequence: Synthetic oligonucleotide
ccgcuccgcgggcgacacc

SEQ ID NO: 2304473 - RNA, 19 nt, Artificial Sequence
  Description of Artificial Sequence: Synthetic oligonucleotide
gcuccgcgggcgacaccgu

SEQ ID NO: 2304474 - RNA, 19 nt, Artificial Sequence
  Description of Artificial Sequence: Synthetic oligonucleotide
cgcgggcgacaccgucuga

SEQ ID NO: 2304475 - RNA, 19 nt, Artificial Sequence
  Description of Artificial Sequence: Synthetic oligonucleotide
aaggauaaaaggcaaagcc

SEQ ID NO: 2304476 - RNA, 19 nt, Artificial Sequence
  Description of Artificial Sequence: Synthetic oligonucleotide
aauccuauauggcaguuac

SEQ ID NO: 2304477 - RNA, 19 nt, Artificial Sequence
  Description of Artificial Sequence: Synthetic oligonucleotide
uuuugcagcgacuacaagg

SEQ ID NO: 2304478 - RNA, 19 nt, Artificial Sequence
  Description of Artificial Sequence: Synthetic oligonucleotide
uuugcagcgacuacaaggg

SEQ ID NO: 2304479 - RNA, 19 nt, Artificial Sequence
  Description of Artificial Sequence: Synthetic oligonucleotide
aagggacacacucauuucc

SEQ ID NO: 2304480 - RNA, 19 nt, Artificial Sequence
  Description of Artificial Sequence: Synthetic oligonucleotide
uggugaaugaaguaagccg

SEQ ID NO: 2304481 - RNA, 19 nt, Artificial Sequence
  Description of Artificial Sequence: Synthetic oligonucleotide
aaugaaguaagccgaccgg

SEQ ID NO: 2304482 - RNA, 19 nt, Artificial Sequence
  Description of Artificial Sequence: Synthetic oligonucleotide
ucugcaaggagaaaucucc

SEQ ID NO: 2304483 - RNA, 19 nt, Artificial Sequence
  Description of Artificial Sequence: Synthetic oligonucleotide
ucggaagaauccuauaugg

SEQ ID NO: 2304484 - RNA, 19 nt, Artificial Sequence
  Description of Artificial Sequence: Synthetic oligonucleotide
cuauauggcaguuacacac

SEQ ID NO: 2304485 - RNA, 19 nt, Artificial Sequence
  Description of Artificial Sequence: Synthetic oligonucleotide
gaaugaaguaagccgaccg

SEQ ID NO: 2304486 - RNA, 19 nt, Artificial Sequence
  Description of Artificial Sequence: Synthetic oligonucleotide
uggcacauuaaacugauga

SEQ ID NO: 2304487 - RNA, 19 nt, Artificial Sequence
  Description of Artificial Sequence: Synthetic oligonucleotide
gaaagucgaggguagauag

SEQ ID NO: 2304488 - RNA, 19 nt, Artificial Sequence
  Description of Artificial Sequence: Synthetic oligonucleotide
uuuacagggaauagccacg

SEQ ID NO: 2304489 - RNA, 19 nt, Artificial Sequence
  Description of Artificial Sequence: Synthetic oligonucleotide
ugacauuuccaguuggagg

SEQ ID NO: 2304490 - RNA, 19 nt, Artificial Sequence
  Description of Artificial Sequence: Synthetic oligonucleotide
agaaaucuccaccugggac

SEQ ID NO: 2304491 - RNA, 19 nt, Artificial Sequence
  Description of Artificial Sequence: Synthetic oligonucleotide
cucuuuacagggaauagcc

SEQ ID NO: 2304492 - RNA, 19 nt, Artificial Sequence
  Description of Artificial Sequence: Synthetic oligonucleotide
aggauaaaaggcaaagccc

SEQ ID NO: 2304493 - RNA, 19 nt, Artificial Sequence
  Description of Artificial Sequence: Synthetic oligonucleotide
ugaaggauaaaaggcaaag

SEQ ID NO: 2304494 - RNA, 19 nt, Artificial Sequence
  Description of Artificial Sequence: Synthetic oligonucleotide
gaagaauccuauauggcag

SEQ ID NO: 2304495 - RNA, 19 nt, Artificial Sequence
  Description of Artificial Sequence: Synthetic oligonucleotide
cacuugguacaacagaugg

SEQ ID NO: 2304496 - RNA, 19 nt, Artificial Sequence
  Description of Artificial Sequence: Synthetic oligonucleotide
acagucauucgccagguag

SEQ ID NO: 2304497 - RNA, 19 nt, Artificial Sequence
  Description of Artificial Sequence: Synthetic oligonucleotide
uauauccccaccagcagag

SEQ ID NO: 2304498 - RNA, 19 nt, Artificial Sequence
  Description of Artificial Sequence: Synthetic oligonucleotide
accccugagggguauaucc

SEQ ID NO: 2304499 - RNA, 19 nt, Artificial Sequence
  Description of Artificial Sequence: Synthetic oligonucleotide
gaauuauucagaggguggg

SEQ ID NO: 2304500 - RNA, 19 nt, Artificial Sequence
  Description of Artificial Sequence: Synthetic oligonucleotide
cauaucuugcaagugaggc

SEQ ID NO: 2304501 - RNA, 19 nt, Artificial Sequence
  Description of Artificial Sequence: Synthetic oligonucleotide
agguagguuccuuuguggc

SEQ ID NO: 2304502 - RNA, 19 nt, Artificial Sequence
  Description of Artificial Sequence: Synthetic oligonucleotide
aagcccgaggaagauaacc

SEQ ID NO: 2304503 - RNA, 19 nt, Artificial Sequence
  Description of Artificial Sequence: Synthetic oligonucleotide
uaaaggugccuuuagcaca

SEQ ID NO: 2304504 - RNA, 19 nt, Artificial Sequence
  Description of Artificial Sequence: Synthetic oligonucleotide
uucuuuccgacauaucuug

SEQ ID NO: 2304505 - RNA, 19 nt, Artificial Sequence
  Description of Artificial Sequence: Synthetic oligonucleotide
ggauaaaaggcaaagcccg

SEQ ID NO: 2304506 - RNA, 19 nt, Artificial Sequence
  Description of Artificial Sequence: Synthetic oligonucleotide
uccuauauggcaguuacac

SEQ ID NO: 2304507 - RNA, 19 nt, Artificial Sequence
  Description of Artificial Sequence: Synthetic oligonucleotide
acaacagauggaauuauuc

SEQ ID NO: 2304508 - RNA, 19 nt, Artificial Sequence
  Description of Artificial Sequence: Synthetic oligonucleotide
aaguaagccgaccggacca

SEQ ID NO: 2304509 - RNA, 19 nt, Artificial Sequence
  Description of Artificial Sequence: Synthetic oligonucleotide
uuuagaggcgcugaaaguc

SEQ ID NO: 2304510 - RNA, 19 nt, Artificial Sequence
  Description of Artificial Sequence: Synthetic oligonucleotide
ucuguuaucuucccuugcu

SEQ ID NO: 2304511 - RNA, 19 nt, Artificial Sequence
  Description of Artificial Sequence: Synthetic oligonucleotide
uccaguuggagguaggcac

SEQ ID NO: 2304512 - RNA, 19 nt, Artificial Sequence
  Description of Artificial Sequence: Synthetic oligonucleotide
ucauucgccagguagguuc

SEQ ID NO: 2304513 - RNA, 19 nt, Artificial Sequence
  Description of Artificial Sequence: Synthetic oligonucleotide
gacuacaagggacacacuc

SEQ ID NO: 2304514 - RNA, 19 nt, Artificial Sequence
  Description of Artificial Sequence: Synthetic oligonucleotide
aagugaggcauugucugac

SEQ ID NO: 2304515 - RNA, 19 nt, Artificial Sequence
  Description of Artificial Sequence: Synthetic oligonucleotide
ucucccugcagccacacac

SEQ ID NO: 2304516 - RNA, 19 nt, Artificial Sequence
  Description of Artificial Sequence: Synthetic oligonucleotide
uccuuguccgcucugcaag

SEQ ID NO: 2304517 - RNA, 19 nt, Artificial Sequence
  Description of Artificial Sequence: Synthetic oligonucleotide
cagggaauagccacggugc

SEQ ID NO: 2304518 - RNA, 19 nt, Artificial Sequence
  Description of Artificial Sequence: Synthetic oligonucleotide
auaaccaggggcaauaaca

SEQ ID NO: 2304519 - RNA, 19 nt, Artificial Sequence
  Description of Artificial Sequence: Synthetic oligonucleotide
gacauaucuugcaagugag

SEQ ID NO: 2304520 - RNA, 19 nt, Artificial Sequence
  Description of Artificial Sequence: Synthetic oligonucleotide
uaaccaggggcaauaacac

SEQ ID NO: 2304521 - RNA, 19 nt, Artificial Sequence
  Description of Artificial Sequence: Synthetic oligonucleotide
auauggcaguuacacacgg

SEQ ID NO: 2304522 - RNA, 19 nt, Artificial Sequence
  Description of Artificial Sequence: Synthetic oligonucleotide
acagggaauagccacggug

SEQ ID NO: 2304523 - RNA, 19 nt, Artificial Sequence
  Description of Artificial Sequence: Synthetic oligonucleotide
aacuaucccucuucucccg

SEQ ID NO: 2304524 - RNA, 19 nt, Artificial Sequence
  Description of Artificial Sequence: Synthetic oligonucleotide
guagauagagaucggggug

SEQ ID NO: 2304525 - RNA, 19 nt, Artificial Sequence
  Description of Artificial Sequence: Synthetic oligonucleotide
agauggaauuauucagagg

SEQ ID NO: 2304526 - RNA, 19 nt, Artificial Sequence
  Description of Artificial Sequence: Synthetic oligonucleotide
uguggcacuugguacaaca

SEQ ID NO: 2304527 - RNA, 19 nt, Artificial Sequence
  Description of Artificial Sequence: Synthetic oligonucleotide
guaggcacaacuugaaaca

SEQ ID NO: 2304528 - RNA, 19 nt, Artificial Sequence
  Description of Artificial Sequence: Synthetic oligonucleotide
gaaggauaaaaggcaaagc

SEQ ID NO: 2304529 - RNA, 19 nt, Artificial Sequence
  Description of Artificial Sequence: Synthetic oligonucleotide
gguuuagaggcgcugaaag

SEQ ID NO: 2304530 - RNA, 19 nt, Artificial Sequence
  Description of Artificial Sequence: Synthetic oligonucleotide
gaacuaucccucuucuccc

SEQ ID NO: 2304531 - RNA, 19 nt, Artificial Sequence
  Description of Artificial Sequence: Synthetic oligonucleotide
gaaguaagccgaccggacc

SEQ ID NO: 2304532 - RNA, 19 nt, Artificial Sequence
  Description of Artificial Sequence: Synthetic oligonucleotide
gugccauugaagcaggggc

SEQ ID NO: 2304533 - RNA, 19 nt, Artificial Sequence
  Description of Artificial Sequence: Synthetic oligonucleotide
uaucuugcaagugaggcau

SEQ ID NO: 2304534 - RNA, 19 nt, Artificial Sequence
  Description of Artificial Sequence: Synthetic oligonucleotide
ucucuuuacagggaauagc

SEQ ID NO: 2304535 - RNA, 19 nt, Artificial Sequence
  Description of Artificial Sequence: Synthetic oligonucleotide
acucauuuccauuucggaa

SEQ ID NO: 2304536 - RNA, 19 nt, Artificial Sequence
  Description of Artificial Sequence: Synthetic oligonucleotide
ucuuuacagggaauagcca

SEQ ID NO: 2304537 - RNA, 19 nt, Artificial Sequence
  Description of Artificial Sequence: Synthetic oligonucleotide
uccgacauaucuugcaagu

SEQ ID NO: 2304538 - RNA, 19 nt, Artificial Sequence
  Description of Artificial Sequence: Synthetic oligonucleotide
ucauuuccauuucggaaga

SEQ ID NO: 2304539 - RNA, 19 nt, Artificial Sequence
  Description of Artificial Sequence: Synthetic oligonucleotide
guacuggcacauuaaacug

SEQ ID NO: 2304540 - RNA, 19 nt, Artificial Sequence
  Description of Artificial Sequence: Synthetic oligonucleotide
ugcagcgacuacaagggac

SEQ ID NO: 2304541 - RNA, 19 nt, Artificial Sequence
  Description of Artificial Sequence: Synthetic oligonucleotide
uguccugacucucuuuaca

SEQ ID NO: 2304542 - RNA, 19 nt, Artificial Sequence
  Description of Artificial Sequence: Synthetic oligonucleotide
uacuggcacauuaaacuga

SEQ ID NO: 2304543 - RNA, 19 nt, Artificial Sequence
  Description of Artificial Sequence: Synthetic oligonucleotide
ugguacaacagauggaauu

SEQ ID NO: 2304544 - RNA, 19 nt, Artificial Sequence
  Description of Artificial Sequence: Synthetic oligonucleotide
cagucauucgccagguagg

SEQ ID NO: 2304545 - RNA, 19 nt, Artificial Sequence
  Description of Artificial Sequence: Synthetic oligonucleotide
gguaggcacaacuugaaac

SEQ ID NO: 2304546 - RNA, 19 nt, Artificial Sequence
  Description of Artificial Sequence: Synthetic oligonucleotide
uuacagggaauagccacgg

SEQ ID NO: 2304547 - RNA, 19 nt, Artificial Sequence
  Description of Artificial Sequence: Synthetic oligonucleotide
ugugacauuuccaguugga

SEQ ID NO: 2304548 - RNA, 19 nt, Artificial Sequence
  Description of Artificial Sequence: Synthetic oligonucleotide
uuuccgacauaucuugcaa

SEQ ID NO: 2304549 - RNA, 19 nt, Artificial Sequence
  Description of Artificial Sequence: Synthetic oligonucleotide
cugcaaucuguuaucuucc

SEQ ID NO: 2304550 - RNA, 19 nt, Artificial Sequence
  Description of Artificial Sequence: Synthetic oligonucleotide
acauuaaacugaugaagau

SEQ ID NO: 2304551 - RNA, 19 nt, Artificial Sequence
  Description of Artificial Sequence: Synthetic oligonucleotide
aggaccucgaacccaguag

SEQ ID NO: 2304552 - RNA, 19 nt, Artificial Sequence
  Description of Artificial Sequence: Synthetic oligonucleotide
uuccgacauaucuugcaag

SEQ ID NO: 2304553 - RNA, 19 nt, Artificial Sequence
  Description of Artificial Sequence: Synthetic oligonucleotide
cagcaauuggcaaggcugg

SEQ ID NO: 2304554 - RNA, 19 nt, Artificial Sequence
  Description of Artificial Sequence: Synthetic oligonucleotide
gguaaaggugccuuuagca

SEQ ID NO: 2304555 - RNA, 19 nt, Artificial Sequence
  Description of Artificial Sequence: Synthetic oligonucleotide
ugggacauuucuuuccgac

SEQ ID NO: 2304556 - RNA, 19 nt, Artificial Sequence
  Description of Artificial Sequence: Synthetic oligonucleotide
cugggaagcgguaaaggug

SEQ ID NO: 2304557 - RNA, 19 nt, Artificial Sequence
  Description of Artificial Sequence: Synthetic oligonucleotide
gaagggaccaguccaguga

SEQ ID NO: 2304558 - RNA, 19 nt, Artificial Sequence
  Description of Artificial Sequence: Synthetic oligonucleotide
uuaucuucccuugcuccgg

SEQ ID NO: 2304559 - RNA, 19 nt, Artificial Sequence
  Description of Artificial Sequence: Synthetic oligonucleotide
auaaaaggcaaagcccgag

SEQ ID NO: 2304560 - RNA, 19 nt, Artificial Sequence
  Description of Artificial Sequence: Synthetic oligonucleotide
cuggugaaugaaguaagcc

SEQ ID NO: 2304561 - RNA, 19 nt, Artificial Sequence
  Description of Artificial Sequence: Synthetic oligonucleotide
uuuagcacacucccugcaa

SEQ ID NO: 2304562 - RNA, 19 nt, Artificial Sequence
  Description of Artificial Sequence: Synthetic oligonucleotide
acuaucccucuucucccgc

SEQ ID NO: 2304563 - RNA, 19 nt, Artificial Sequence
  Description of Artificial Sequence: Synthetic oligonucleotide
cacacucauuuccauuucg

SEQ ID NO: 2304564 - RNA, 19 nt, Artificial Sequence
  Description of Artificial Sequence: Synthetic oligonucleotide
aauagccacggugccauug

SEQ ID NO: 2304565 - RNA, 19 nt, Artificial Sequence
  Description of Artificial Sequence: Synthetic oligonucleotide
ggaauuauucagagggugg

SEQ ID NO: 2304566 - RNA, 19 nt, Artificial Sequence
  Description of Artificial Sequence: Synthetic oligonucleotide
uuucccuggggacacgaac

SEQ ID NO: 2304567 - RNA, 19 nt, Artificial Sequence
  Description of Artificial Sequence: Synthetic oligonucleotide
ccugacucucuuuacaggg

SEQ ID NO: 2304568 - RNA, 19 nt, Artificial Sequence
  Description of Artificial Sequence: Synthetic oligonucleotide
aggcgcugaaagucgaggg

SEQ ID NO: 2304569 - RNA, 19 nt, Artificial Sequence
  Description of Artificial Sequence: Synthetic oligonucleotide
gggucugugacauuuccag

SEQ ID NO: 2304570 - RNA, 19 nt, Artificial Sequence
  Description of Artificial Sequence: Synthetic oligonucleotide
uucccuggggacacgaacu

SEQ ID NO: 2304571 - RNA, 19 nt, Artificial Sequence
  Description of Artificial Sequence: Synthetic oligonucleotide
ugacucucuuuacagggaa

SEQ ID NO: 2304572 - RNA, 19 nt, Artificial Sequence
  Description of Artificial Sequence: Synthetic oligonucleotide
ugccauugaagcaggggcu

SEQ ID NO: 2304573 - RNA, 19 nt, Artificial Sequence
  Description of Artificial Sequence: Synthetic oligonucleotide
agugaggcauugucugacg

SEQ ID NO: 2304574 - RNA, 19 nt, Artificial Sequence
  Description of Artificial Sequence: Synthetic oligonucleotide
ugaaugaaguaagccgacc

SEQ ID NO: 2304575 - RNA, 19 nt, Artificial Sequence
  Description of Artificial Sequence: Synthetic oligonucleotide
gcacauuaaacugaugaag

SEQ ID NO: 2304576 - RNA, 19 nt, Artificial Sequence
  Description of Artificial Sequence: Synthetic oligonucleotide
ugaggcauugucugacgug

SEQ ID NO: 2304577 - RNA, 19 nt, Artificial Sequence
  Description of Artificial Sequence: Synthetic oligonucleotide
gguacuggcacauuaaacu

SEQ ID NO: 2304578 - RNA, 19 nt, Artificial Sequence
  Description of Artificial Sequence: Synthetic oligonucleotide
ugcaaggagaaaucuccac

SEQ ID NO: 2304579 - RNA, 19 nt, Artificial Sequence
  Description of Artificial Sequence: Synthetic oligonucleotide
ucuuuccgacauaucuugc

SEQ ID NO: 2304580 - RNA, 19 nt, Artificial Sequence
  Description of Artificial Sequence: Synthetic oligonucleotide
acagauggaauuauucaga

SEQ ID NO: 2304581 - RNA, 19 nt, Artificial Sequence
  Description of Artificial Sequence: Synthetic oligonucleotide
gauaaccaggggcaauaac

SEQ ID NO: 2304582 - RNA, 19 nt, Artificial Sequence
  Description of Artificial Sequence: Synthetic oligonucleotide
ugcaaucuguuaucuuccc

SEQ ID NO: 2304583 - RNA, 19 nt, Artificial Sequence
  Description of Artificial Sequence: Synthetic oligonucleotide
cuuuguggcacuugguaca

SEQ ID NO: 2304584 - RNA, 19 nt, Artificial Sequence
  Description of Artificial Sequence: Synthetic oligonucleotide
accucgaacccaguaggcc

SEQ ID NO: 2304585 - RNA, 19 nt, Artificial Sequence
  Description of Artificial Sequence: Synthetic oligonucleotide
uguccgcucugcaaggaga

SEQ ID NO: 2304586 - RNA, 19 nt, Artificial Sequence
  Description of Artificial Sequence: Synthetic oligonucleotide
gcaagugaggcauugucug

SEQ ID NO: 2304587 - RNA, 19 nt, Artificial Sequence
  Description of Artificial Sequence: Synthetic oligonucleotide
aagauaaccaggggcaaua

SEQ ID NO: 2304588 - RNA, 19 nt, Artificial Sequence
  Description of Artificial Sequence: Synthetic oligonucleotide
agagaucggggugcggucc

SEQ ID NO: 2304589 - RNA, 19 nt, Artificial Sequence
  Description of Artificial Sequence: Synthetic oligonucleotide
ugcagcaauuggcaaggcu

SEQ ID NO: 2304590 - RNA, 19 nt, Artificial Sequence
  Description of Artificial Sequence: Synthetic oligonucleotide
uuagcacacucccugcaau

SEQ ID NO: 2304591 - RNA, 19 nt, Artificial Sequence
  Description of Artificial Sequence: Synthetic oligonucleotide
caagggaagggaccagucc

SEQ ID NO: 2304592 - RNA, 19 nt, Artificial Sequence
  Description of Artificial Sequence: Synthetic oligonucleotide
agggguauauccccaccag

SEQ ID NO: 2304593 - RNA, 19 nt, Artificial Sequence
  Description of Artificial Sequence: Synthetic oligonucleotide
caaagcccgaggaagauaa

SEQ ID NO: 2304594 - RNA, 19 nt, Artificial Sequence
  Description of Artificial Sequence: Synthetic oligonucleotide
auagagaucggggugcggu

SEQ ID NO: 2304595 - RNA, 19 nt, Artificial Sequence
  Description of Artificial Sequence: Synthetic oligonucleotide
aaccaggggcaauaacacu

SEQ ID NO: 2304596 - RNA, 19 nt, Artificial Sequence
  Description of Artificial Sequence: Synthetic oligonucleotide
ggaccucgaacccaguagg

SEQ ID NO: 2304597 - RNA, 19 nt, Artificial Sequence
  Description of Artificial Sequence: Synthetic oligonucleotide
cugugacauuuccaguugg

SEQ ID NO: 2304598 - RNA, 19 nt, Artificial Sequence
  Description of Artificial Sequence: Synthetic oligonucleotide
cucgaacccaguaggcccg

SEQ ID NO: 2304599 - RNA, 19 nt, Artificial Sequence
  Description of Artificial Sequence: Synthetic oligonucleotide
ugagggguauauccccacc

SEQ ID NO: 2304600 - RNA, 19 nt, Artificial Sequence
  Description of Artificial Sequence: Synthetic oligonucleotide
agccgaccggaccaggugg

SEQ ID NO: 2304601 - RNA, 19 nt, Artificial Sequence
  Description of Artificial Sequence: Synthetic oligonucleotide
auguccggccggcaguggc

SEQ ID NO: 2304602 - RNA, 19 nt, Artificial Sequence
  Description of Artificial Sequence: Synthetic oligonucleotide
uacaacagauggaauuauu

SEQ ID NO: 2304603 - RNA, 19 nt, Artificial Sequence
  Description of Artificial Sequence: Synthetic oligonucleotide
ggugaaugaaguaagccga

SEQ ID NO: 2304604 - RNA, 19 nt, Artificial Sequence
  Description of Artificial Sequence: Synthetic oligonucleotide
gugacauuuccaguuggag

SEQ ID NO: 2304605 - RNA, 19 nt, Artificial Sequence
  Description of Artificial Sequence: Synthetic oligonucleotide
cuccggacagucauucgcc

SEQ ID NO: 2304606 - RNA, 19 nt, Artificial Sequence
  Description of Artificial Sequence: Synthetic oligonucleotide
ucuugcaagugaggcauug

SEQ ID NO: 2304607 - RNA, 19 nt, Artificial Sequence
  Description of Artificial Sequence: Synthetic oligonucleotide
aguccacgcaucgaaagug

SEQ ID NO: 2304608 - RNA, 19 nt, Artificial Sequence
  Description of Artificial Sequence: Synthetic oligonucleotide
gcagcaauuggcaaggcug

SEQ ID NO: 2304609 - RNA, 19 nt, Artificial Sequence
  Description of Artificial Sequence: Synthetic oligonucleotide
cgaggguagauagagaucg

SEQ ID NO: 2304610 - RNA, 19 nt, Artificial Sequence
  Description of Artificial Sequence: Synthetic oligonucleotide
ccgaggaagauaaccaggg

SEQ ID NO: 2304611 - RNA, 19 nt, Artificial Sequence
  Description of Artificial Sequence: Synthetic oligonucleotide
aaggcuggugaaugaagua

SEQ ID NO: 2304612 - RNA, 19 nt, Artificial Sequence
  Description of Artificial Sequence: Synthetic oligonucleotide
uggcaguuacacacggugu

SEQ ID NO: 2304613 - RNA, 19 nt, Artificial Sequence
  Description of Artificial Sequence: Synthetic oligonucleotide
acgaacuaucccucuucuc

SEQ ID NO: 2304614 - RNA, 19 nt, Artificial Sequence
  Description of Artificial Sequence: Synthetic oligonucleotide
guagguuccuuuguggcac

SEQ ID NO: 2304615 - RNA, 19 nt, Artificial Sequence
  Description of Artificial Sequence: Synthetic oligonucleotide
uuguccgcucugcaaggag

SEQ ID NO: 2304616 - RNA, 19 nt, Artificial Sequence
  Description of Artificial Sequence: Synthetic oligonucleotide
augaaguaagccgaccgga

SEQ ID NO: 2304617 - RNA, 19 nt, Artificial Sequence
  Description of Artificial Sequence: Synthetic oligonucleotide
ggugcgguccuccaggacc

SEQ ID NO: 2304618 - RNA, 19 nt, Artificial Sequence
  Description of Artificial Sequence: Synthetic oligonucleotide
caauuggcaaggcugguga

SEQ ID NO: 2304619 - RNA, 19 nt, Artificial Sequence
  Description of Artificial Sequence: Synthetic oligonucleotide
ugaaagucgaggguagaua

SEQ ID NO: 2304620 - RNA, 19 nt, Artificial Sequence
  Description of Artificial Sequence: Synthetic oligonucleotide
gaccggaccagguggcccg

SEQ ID NO: 2304621 - RNA, 19 nt, Artificial Sequence
  Description of Artificial Sequence: Synthetic oligonucleotide
uuacacacgguguccugac

SEQ ID NO: 2304622 - RNA, 19 nt, Artificial Sequence
  Description of Artificial Sequence: Synthetic oligonucleotide
gaggcgcugaaagucgagg

SEQ ID NO: 2304623 - RNA, 19 nt, Artificial Sequence
  Description of Artificial Sequence: Synthetic oligonucleotide
guauauccccaccagcaga

SEQ ID NO: 2304624 - RNA, 19 nt, Artificial Sequence
  Description of Artificial Sequence: Synthetic oligonucleotide
acuacaagggacacacuca

SEQ ID NO: 2304625 - RNA, 19 nt, Artificial Sequence
  Description of Artificial Sequence: Synthetic oligonucleotide
uucucccgcuccccaaggg

SEQ ID NO: 2304626 - RNA, 19 nt, Artificial Sequence
  Description of Artificial Sequence: Synthetic oligonucleotide
aauuggcaaggcuggugaa

SEQ ID NO: 2304627 - RNA, 19 nt, Artificial Sequence
  Description of Artificial Sequence: Synthetic oligonucleotide
cucugcaaggagaaaucuc

SEQ ID NO: 2304628 - RNA, 19 nt, Artificial Sequence
  Description of Artificial Sequence: Synthetic oligonucleotide
aagccgaccggaccaggug

SEQ ID NO: 2304629 - RNA, 19 nt, Artificial Sequence
  Description of Artificial Sequence: Synthetic oligonucleotide
acauaucuugcaagugagg

SEQ ID NO: 2304630 - RNA, 19 nt, Artificial Sequence
  Description of Artificial Sequence: Synthetic oligonucleotide
gagggguauauccccacca

SEQ ID NO: 2304631 - RNA, 19 nt, Artificial Sequence
  Description of Artificial Sequence: Synthetic oligonucleotide
gguauauccccaccagcag

SEQ ID NO: 2304632 - RNA, 19 nt, Artificial Sequence
  Description of Artificial Sequence: Synthetic oligonucleotide
cauucgccagguagguucc

SEQ ID NO: 2304633 - RNA, 19 nt, Artificial Sequence
  Description of Artificial Sequence: Synthetic oligonucleotide
ggguagauagagaucgggg

SEQ ID NO: 2304634 - RNA, 19 nt, Artificial Sequence
  Description of Artificial Sequence: Synthetic oligonucleotide
uggggacacgaacuauccc

SEQ ID NO: 2304635 - RNA, 19 nt, Artificial Sequence
  Description of Artificial Sequence: Synthetic oligonucleotide
ucucccgcuccccaaggga

SEQ ID NO: 2304636 - RNA, 19 nt, Artificial Sequence
  Description of Artificial Sequence: Synthetic oligonucleotide
ucgaggguagauagagauc

SEQ ID NO: 2304637 - RNA, 19 nt, Artificial Sequence
  Description of Artificial Sequence: Synthetic oligonucleotide
uaagccgaccggaccaggu

SEQ ID NO: 2304638 - RNA, 19 nt, Artificial Sequence
  Description of Artificial Sequence: Synthetic oligonucleotide
ugggguaccuggguccugg

SEQ ID NO: 2304639 - RNA, 19 nt, Artificial Sequence
  Description of Artificial Sequence: Synthetic oligonucleotide
aggugccuuuagcacacuc

SEQ ID NO: 2304640 - RNA, 19 nt, Artificial Sequence
  Description of Artificial Sequence: Synthetic oligonucleotide
uccaccgcggguacuggca

SEQ ID NO: 2304641 - RNA, 19 nt, Artificial Sequence
  Description of Artificial Sequence: Synthetic oligonucleotide
agauagagaucggggugcg

SEQ ID NO: 2304642 - RNA, 19 nt, Artificial Sequence
  Description of Artificial Sequence: Synthetic oligonucleotide
uugguacaacagauggaau

SEQ ID NO: 2304643 - RNA, 19 nt, Artificial Sequence
  Description of Artificial Sequence: Synthetic oligonucleotide
aaagucgaggguagauaga

SEQ ID NO: 2304644 - RNA, 19 nt, Artificial Sequence
  Description of Artificial Sequence: Synthetic oligonucleotide
ggggcaauaacacuggggu

SEQ ID NO: 2304645 - RNA, 19 nt, Artificial Sequence
  Description of Artificial Sequence: Synthetic oligonucleotide
uaucuucccuugcuccgga

SEQ ID NO: 2304646 - RNA, 19 nt, Artificial Sequence
  Description of Artificial Sequence: Synthetic oligonucleotide
uccaccugggacauuucuu

SEQ ID NO: 2304647 - RNA, 19 nt, Artificial Sequence
  Description of Artificial Sequence: Synthetic oligonucleotide
gcgacuacaagggacacac

SEQ ID NO: 2304648 - RNA, 19 nt, Artificial Sequence
  Description of Artificial Sequence: Synthetic oligonucleotide
auuucggaagaauccuaua

SEQ ID NO: 2304649 - RNA, 19 nt, Artificial Sequence
  Description of Artificial Sequence: Synthetic oligonucleotide
gguagauagagaucggggu

SEQ ID NO: 2304650 - RNA, 19 nt, Artificial Sequence
  Description of Artificial Sequence: Synthetic oligonucleotide
uaggcacaacuugaaacaa

SEQ ID NO: 2304651 - RNA, 19 nt, Artificial Sequence
  Description of Artificial Sequence: Synthetic oligonucleotide
agacccauguccggccggc

SEQ ID NO: 2304652 - RNA, 19 nt, Artificial Sequence
  Description of Artificial Sequence: Synthetic oligonucleotide
ugcuccggacagucauucg

SEQ ID NO: 2304653 - RNA, 19 nt, Artificial Sequence
  Description of Artificial Sequence: Synthetic oligonucleotide
ugacgugguucugggaagc

SEQ ID NO: 2304654 - RNA, 19 nt, Artificial Sequence
  Description of Artificial Sequence: Synthetic oligonucleotide
aaagcccgaggaagauaac

SEQ ID NO: 2304655 - RNA, 19 nt, Artificial Sequence
  Description of Artificial Sequence: Synthetic oligonucleotide
ccucgaacccaguaggccc

SEQ ID NO: 2304656 - RNA, 19 nt, Artificial Sequence
  Description of Artificial Sequence: Synthetic oligonucleotide
acucucuuuacagggaaua

SEQ ID NO: 2304657 - RNA, 19 nt, Artificial Sequence
  Description of Artificial Sequence: Synthetic oligonucleotide
gcaguccacgcaucgaaag

SEQ ID NO: 2304658 - RNA, 19 nt, Artificial Sequence
  Description of Artificial Sequence: Synthetic oligonucleotide
uccggacagucauucgcca

SEQ ID NO: 2304659 - RNA, 19 nt, Artificial Sequence
  Description of Artificial Sequence: Synthetic oligonucleotide
gagacccauguccggccgg

SEQ ID NO: 2304660 - RNA, 19 nt, Artificial Sequence
  Description of Artificial Sequence: Synthetic oligonucleotide
cauuucuuuccgacauauc

SEQ ID NO: 2304661 - RNA, 19 nt, Artificial Sequence
  Description of Artificial Sequence: Synthetic oligonucleotide
gaggguagauagagaucgg

SEQ ID NO: 2304662 - RNA, 19 nt, Artificial Sequence
  Description of Artificial Sequence: Synthetic oligonucleotide
gauagagaucggggugcgg

SEQ ID NO: 2304663 - RNA, 19 nt, Artificial Sequence
  Description of Artificial Sequence: Synthetic oligonucleotide
acagugcagcaauuggcaa

SEQ ID NO: 2304664 - RNA, 19 nt, Artificial Sequence
  Description of Artificial Sequence: Synthetic oligonucleotide
uccccaagggaagggacca

SEQ ID NO: 2304665 - RNA, 19 nt, Artificial Sequence
  Description of Artificial Sequence: Synthetic oligonucleotide
cccgaggaagauaaccagg

SEQ ID NO: 2304666 - RNA, 19 nt, Artificial Sequence
  Description of Artificial Sequence: Synthetic oligonucleotide
cgggccucgguuuagaggc

SEQ ID NO: 2304667 - RNA, 19 nt, Artificial Sequence
  Description of Artificial Sequence: Synthetic oligonucleotide
ggcaguuacacacgguguc

SEQ ID NO: 2304668 - RNA, 19 nt, Artificial Sequence
  Description of Artificial Sequence: Synthetic oligonucleotide
cucccugcaaucuguuauc

SEQ ID NO: 2304669 - RNA, 19 nt, Artificial Sequence
  Description of Artificial Sequence: Synthetic oligonucleotide
agcccgaggaagauaacca

SEQ ID NO: 2304670 - RNA, 19 nt, Artificial Sequence
  Description of Artificial Sequence: Synthetic oligonucleotide
auggaauuauucagagggu

SEQ ID NO: 2304671 - RNA, 19 nt, Artificial Sequence
  Description of Artificial Sequence: Synthetic oligonucleotide
agucauucgccagguaggu

SEQ ID NO: 2304672 - RNA, 19 nt, Artificial Sequence
  Description of Artificial Sequence: Synthetic oligonucleotide
gcuccggacagucauucgc

SEQ ID NO: 2304673 - RNA, 19 nt, Artificial Sequence
  Description of Artificial Sequence: Synthetic oligonucleotide
auauccccaccagcagagc

SEQ ID NO: 2304674 - RNA, 19 nt, Artificial Sequence
  Description of Artificial Sequence: Synthetic oligonucleotide
gacgugguucugggaagcg

SEQ ID NO: 2304675 - RNA, 19 nt, Artificial Sequence
  Description of Artificial Sequence: Synthetic oligonucleotide
uaucccucuucucccgcuc

SEQ ID NO: 2304676 - RNA, 19 nt, Artificial Sequence
  Description of Artificial Sequence: Synthetic oligonucleotide
ucccgcuccccaagggaag

SEQ ID NO: 2304677 - RNA, 19 nt, Artificial Sequence
  Description of Artificial Sequence: Synthetic oligonucleotide
aucuucccuugcuccggac

SEQ ID NO: 2304678 - RNA, 19 nt, Artificial Sequence
  Description of Artificial Sequence: Synthetic oligonucleotide
caaucuguuaucuucccuu

SEQ ID NO: 2304679 - RNA, 19 nt, Artificial Sequence
  Description of Artificial Sequence: Synthetic oligonucleotide
agcacacucccugcaaucu

SEQ ID NO: 2304680 - RNA, 19 nt, Artificial Sequence
  Description of Artificial Sequence: Synthetic oligonucleotide
uagagaucggggugcgguc

SEQ ID NO: 2304681 - RNA, 19 nt, Artificial Sequence
  Description of Artificial Sequence: Synthetic oligonucleotide
ggguauauccccaccagca

SEQ ID NO: 2304682 - RNA, 19 nt, Artificial Sequence
  Description of Artificial Sequence: Synthetic oligonucleotide
aguaagccgaccggaccag

SEQ ID NO: 2304683 - RNA, 19 nt, Artificial Sequence
  Description of Artificial Sequence: Synthetic oligonucleotide
uugcagcgacuacaaggga

SEQ ID NO: 2304684 - RNA, 19 nt, Artificial Sequence
  Description of Artificial Sequence: Synthetic oligonucleotide
guuuagaggcgcugaaagu

SEQ ID NO: 2304685 - RNA, 19 nt, Artificial Sequence
  Description of Artificial Sequence: Synthetic oligonucleotide
guggcacuugguacaacag

SEQ ID NO: 2304686 - RNA, 19 nt, Artificial Sequence
  Description of Artificial Sequence: Synthetic oligonucleotide
cuucucccgcuccccaagg

SEQ ID NO: 2304687 - RNA, 19 nt, Artificial Sequence
  Description of Artificial Sequence: Synthetic oligonucleotide
uacacacgguguccugacu

SEQ ID NO: 2304688 - RNA, 19 nt, Artificial Sequence
  Description of Artificial Sequence: Synthetic oligonucleotide
gguagguuccuuuguggca

SEQ ID NO: 2304689 - RNA, 19 nt, Artificial Sequence
  Description of Artificial Sequence: Synthetic oligonucleotide
acccauguccggccggcag

SEQ ID NO: 2304690 - RNA, 19 nt, Artificial Sequence
  Description of Artificial Sequence: Synthetic oligonucleotide
uggcaaggcuggugaauga

SEQ ID NO: 2304691 - RNA, 19 nt, Artificial Sequence
  Description of Artificial Sequence: Synthetic oligonucleotide
gguacuuucccuggggaca

SEQ ID NO: 2304692 - RNA, 19 nt, Artificial Sequence
  Description of Artificial Sequence: Synthetic oligonucleotide
gggguauauccccaccagc

SEQ ID NO: 2304693 - RNA, 19 nt, Artificial Sequence
  Description of Artificial Sequence: Synthetic oligonucleotide
caaggcuggugaaugaagu

SEQ ID NO: 2304694 - RNA, 19 nt, Artificial Sequence
  Description of Artificial Sequence: Synthetic oligonucleotide
aagcgguaaaggugccuuu

SEQ ID NO: 2304695 - RNA, 19 nt, Artificial Sequence
  Description of Artificial Sequence: Synthetic oligonucleotide
gaccucgaacccaguaggc

SEQ ID NO: 2304696 - RNA, 19 nt, Artificial Sequence
  Description of Artificial Sequence: Synthetic oligonucleotide
aucuccaccugggacauuu

SEQ ID NO: 2304697 - RNA, 19 nt, Artificial Sequence
  Description of Artificial Sequence: Synthetic oligonucleotide
ucccugcaaucuguuaucu

SEQ ID NO: 2304698 - RNA, 19 nt, Artificial Sequence
  Description of Artificial Sequence: Synthetic oligonucleotide
ucggggugcgguccuccag

SEQ ID NO: 2304699 - RNA, 19 nt, Artificial Sequence
  Description of Artificial Sequence: Synthetic oligonucleotide
aguuggagguaggcacaac

SEQ ID NO: 2304700 - RNA, 19 nt, Artificial Sequence
  Description of Artificial Sequence: Synthetic oligonucleotide
uugcuccggacagucauuc

SEQ ID NO: 2304701 - RNA, 19 nt, Artificial Sequence
  Description of Artificial Sequence: Synthetic oligonucleotide
cagcaggccaggcacggug

SEQ ID NO: 2304702 - RNA, 19 nt, Artificial Sequence
  Description of Artificial Sequence: Synthetic oligonucleotide
uccacgcaucgaaaguguu

SEQ ID NO: 2304703 - RNA, 19 nt, Artificial Sequence
  Description of Artificial Sequence: Synthetic oligonucleotide
aguguccuuguccgcucug

SEQ ID NO: 2304704 - RNA, 19 nt, Artificial Sequence
  Description of Artificial Sequence: Synthetic oligonucleotide
ggggacacgaacuaucccu

SEQ ID NO: 2304705 - RNA, 19 nt, Artificial Sequence
  Description of Artificial Sequence: Synthetic oligonucleotide
ggagguaggcacaacuuga

SEQ ID NO: 2304706 - RNA, 19 nt, Artificial Sequence
  Description of Artificial Sequence: Synthetic oligonucleotide
uuccaccgcggguacuggc

SEQ ID NO: 2304707 - RNA, 19 nt, Artificial Sequence
  Description of Artificial Sequence: Synthetic oligonucleotide
guacuuucccuggggacac

SEQ ID NO: 2304708 - RNA, 19 nt, Artificial Sequence
  Description of Artificial Sequence: Synthetic oligonucleotide
cauugucugacgugguucu

SEQ ID NO: 2304709 - RNA, 19 nt, Artificial Sequence
  Description of Artificial Sequence: Synthetic oligonucleotide
cauuucggaagaauccuau

SEQ ID NO: 2304710 - RNA, 19 nt, Artificial Sequence
  Description of Artificial Sequence: Synthetic oligonucleotide
gcccgaggaagauaaccag

SEQ ID NO: 2304711 - RNA, 19 nt, Artificial Sequence
  Description of Artificial Sequence: Synthetic oligonucleotide
ggagacccauguccggccg

SEQ ID NO: 2304712 - RNA, 19 nt, Artificial Sequence
  Description of Artificial Sequence: Synthetic oligonucleotide
gaauccuauauggcaguua

SEQ ID NO: 2304713 - RNA, 19 nt, Artificial Sequence
  Description of Artificial Sequence: Synthetic oligonucleotide
ggacauuucuuuccgacau

SEQ ID NO: 2304714 - RNA, 19 nt, Artificial Sequence
  Description of Artificial Sequence: Synthetic oligonucleotide
gcgguaaaggugccuuuag

SEQ ID NO: 2304715 - RNA, 19 nt, Artificial Sequence
  Description of Artificial Sequence: Synthetic oligonucleotide
gcaguuacacacggugucc

SEQ ID NO: 2304716 - RNA, 19 nt, Artificial Sequence
  Description of Artificial Sequence: Synthetic oligonucleotide
gcuggugaaugaaguaagc

SEQ ID NO: 2304717 - RNA, 19 nt, Artificial Sequence
  Description of Artificial Sequence: Synthetic oligonucleotide
ccagguagguuccuuugug

SEQ ID NO: 2304718 - RNA, 19 nt, Artificial Sequence
  Description of Artificial Sequence: Synthetic oligonucleotide
agauaaccaggggcaauaa

SEQ ID NO: 2304719 - RNA, 19 nt, Artificial Sequence
  Description of Artificial Sequence: Synthetic oligonucleotide
ucccuugcuccggacaguc

SEQ ID NO: 2304720 - RNA, 19 nt, Artificial Sequence
  Description of Artificial Sequence: Synthetic oligonucleotide
acuuucccuggggacacga

SEQ ID NO: 2304721 - RNA, 19 nt, Artificial Sequence
  Description of Artificial Sequence: Synthetic oligonucleotide
ggguacuuucccuggggac

SEQ ID NO: 2304722 - RNA, 19 nt, Artificial Sequence
  Description of Artificial Sequence: Synthetic oligonucleotide
cuacaagggacacacucau

SEQ ID NO: 2304723 - RNA, 19 nt, Artificial Sequence
  Description of Artificial Sequence: Synthetic oligonucleotide
cccugagggguauaucccc

SEQ ID NO: 2304724 - RNA, 19 nt, Artificial Sequence
  Description of Artificial Sequence: Synthetic oligonucleotide
guaagccgaccggaccagg

SEQ ID NO: 2304725 - RNA, 19 nt, Artificial Sequence
  Description of Artificial Sequence: Synthetic oligonucleotide
agggaccaguccagugacc

SEQ ID NO: 2304726 - RNA, 19 nt, Artificial Sequence
  Description of Artificial Sequence: Synthetic oligonucleotide
gcaauaacacugggguacc

SEQ ID NO: 2304727 - RNA, 19 nt, Artificial Sequence
  Description of Artificial Sequence: Synthetic oligonucleotide
uagguuccuuuguggcacu

SEQ ID NO: 2304728 - RNA, 19 nt, Artificial Sequence
  Description of Artificial Sequence: Synthetic oligonucleotide
gcgggccucgguuuagagg

SEQ ID NO: 2304729 - RNA, 19 nt, Artificial Sequence
  Description of Artificial Sequence: Synthetic oligonucleotide
cugcaguccacgcaucgaa

SEQ ID NO: 2304730 - RNA, 19 nt, Artificial Sequence
  Description of Artificial Sequence: Synthetic oligonucleotide
ccuuguccgcucugcaagg

SEQ ID NO: 2304731 - RNA, 19 nt, Artificial Sequence
  Description of Artificial Sequence: Synthetic oligonucleotide
gaucggggugcgguccucc

SEQ ID NO: 2304732 - RNA, 19 nt, Artificial Sequence
  Description of Artificial Sequence: Synthetic oligonucleotide
aggcaaagcccgaggaaga

SEQ ID NO: 2304733 - RNA, 19 nt, Artificial Sequence
  Description of Artificial Sequence: Synthetic oligonucleotide
gaagcgguaaaggugccuu

SEQ ID NO: 2304734 - RNA, 19 nt, Artificial Sequence
  Description of Artificial Sequence: Synthetic oligonucleotide
gcaauuggcaaggcuggug

SEQ ID NO: 2304735 - RNA, 19 nt, Artificial Sequence
  Description of Artificial Sequence: Synthetic oligonucleotide
ucgccagguagguuccuuu

SEQ ID NO: 2304736 - RNA, 19 nt, Artificial Sequence
  Description of Artificial Sequence: Synthetic oligonucleotide
cggacagucauucgccagg

SEQ ID NO: 2304737 - RNA, 19 nt, Artificial Sequence
  Description of Artificial Sequence: Synthetic oligonucleotide
cucgguuuagaggcgcuga

SEQ ID NO: 2304738 - RNA, 19 nt, Artificial Sequence
  Description of Artificial Sequence: Synthetic oligonucleotide
agcgacuacaagggacaca

SEQ ID NO: 2304739 - RNA, 19 nt, Artificial Sequence
  Description of Artificial Sequence: Synthetic oligonucleotide
agcaauuggcaaggcuggu

SEQ ID NO: 2304740 - RNA, 19 nt, Artificial Sequence
  Description of Artificial Sequence: Synthetic oligonucleotide
agcgguaaaggugccuuua

SEQ ID NO: 2304741 - RNA, 19 nt, Artificial Sequence
  Description of Artificial Sequence: Synthetic oligonucleotide
ggggacagugcagcaauug

SEQ ID NO: 2304742 - RNA, 19 nt, Artificial Sequence
  Description of Artificial Sequence: Synthetic oligonucleotide
gcagcgacuacaagggaca

SEQ ID NO: 2304743 - RNA, 19 nt, Artificial Sequence
  Description of Artificial Sequence: Synthetic oligonucleotide
gggagacccauguccggcc

SEQ ID NO: 2304744 - RNA, 19 nt, Artificial Sequence
  Description of Artificial Sequence: Synthetic oligonucleotide
cgacauaucuugcaaguga

SEQ ID NO: 2304745 - RNA, 19 nt, Artificial Sequence
  Description of Artificial Sequence: Synthetic oligonucleotide
ccuauauggcaguuacaca

SEQ ID NO: 2304746 - RNA, 19 nt, Artificial Sequence
  Description of Artificial Sequence: Synthetic oligonucleotide
gaagauaaccaggggcaau

SEQ ID NO: 2304747 - RNA, 19 nt, Artificial Sequence
  Description of Artificial Sequence: Synthetic oligonucleotide
cauugaagcaggggcugca

SEQ ID NO: 2304748 - RNA, 19 nt, Artificial Sequence
  Description of Artificial Sequence: Synthetic oligonucleotide
agucgaggguagauagaga

SEQ ID NO: 2304749 - RNA, 19 nt, Artificial Sequence
  Description of Artificial Sequence: Synthetic oligonucleotide
auccuauauggcaguuaca

SEQ ID NO: 2304750 - RNA, 19 nt, Artificial Sequence
  Description of Artificial Sequence: Synthetic oligonucleotide
aggcacaacuugaaacaau

SEQ ID NO: 2304751 - RNA, 19 nt, Artificial Sequence
  Description of Artificial Sequence: Synthetic oligonucleotide
cuuccaccgcggguacugg

SEQ ID NO: 2304752 - RNA, 19 nt, Artificial Sequence
  Description of Artificial Sequence: Synthetic oligonucleotide
cacgguggggagacccaug

SEQ ID NO: 2304753 - RNA, 19 nt, Artificial Sequence
  Description of Artificial Sequence: Synthetic oligonucleotide
gugaggcauugucugacgu

SEQ ID NO: 2304754 - RNA, 19 nt, Artificial Sequence
  Description of Artificial Sequence: Synthetic oligonucleotide
cacacucccugcaaucugu

SEQ ID NO: 2304755 - RNA, 19 nt, Artificial Sequence
  Description of Artificial Sequence: Synthetic oligonucleotide
acgguguccugacucucuu

SEQ ID NO: 2304756 - RNA, 19 nt, Artificial Sequence
  Description of Artificial Sequence: Synthetic oligonucleotide
gggguacuuucccugggga

SEQ ID NO: 2304757 - RNA, 19 nt, Artificial Sequence
  Description of Artificial Sequence: Synthetic oligonucleotide
cucccgcuccccaagggaa

SEQ ID NO: 2304758 - RNA, 19 nt, Artificial Sequence
  Description of Artificial Sequence: Synthetic oligonucleotide
cacgaacuaucccucuucu

SEQ ID NO: 2304759 - RNA, 19 nt, Artificial Sequence
  Description of Artificial Sequence: Synthetic oligonucleotide
gguuccuuuguggcacuug

SEQ ID NO: 2304760 - RNA, 19 nt, Artificial Sequence
  Description of Artificial Sequence: Synthetic oligonucleotide
ggggagacccauguccggc

SEQ ID NO: 2304761 - RNA, 19 nt, Artificial Sequence
  Description of Artificial Sequence: Synthetic oligonucleotide
cgguaaaggugccuuuagc

SEQ ID NO: 2304762 - RNA, 19 nt, Artificial Sequence
  Description of Artificial Sequence: Synthetic oligonucleotide
gggacacgaacuaucccuc

SEQ ID NO: 2304763 - RNA, 19 nt, Artificial Sequence
  Description of Artificial Sequence: Synthetic oligonucleotide
guggcccgggcaguggcag

SEQ ID NO: 2304764 - RNA, 19 nt, Artificial Sequence
  Description of Artificial Sequence: Synthetic oligonucleotide
cacgcaucgaaaguguuuu

SEQ ID NO: 2304765 - RNA, 19 nt, Artificial Sequence
  Description of Artificial Sequence: Synthetic oligonucleotide
ggaauagccacggugccau

SEQ ID NO: 2304766 - RNA, 19 nt, Artificial Sequence
  Description of Artificial Sequence: Synthetic oligonucleotide
agaucggggugcgguccuc

SEQ ID NO: 2304767 - RNA, 19 nt, Artificial Sequence
  Description of Artificial Sequence: Synthetic oligonucleotide
uucgccagguagguuccuu

SEQ ID NO: 2304768 - RNA, 19 nt, Artificial Sequence
  Description of Artificial Sequence: Synthetic oligonucleotide
ggaagauaaccaggggcaa

SEQ ID NO: 2304769 - RNA, 19 nt, Artificial Sequence
  Description of Artificial Sequence: Synthetic oligonucleotide
caggagcaccagugacagc

SEQ ID NO: 2304770 - RNA, 19 nt, Artificial Sequence
  Description of Artificial Sequence: Synthetic oligonucleotide
gucugacgugguucuggga

SEQ ID NO: 2304771 - RNA, 19 nt, Artificial Sequence
  Description of Artificial Sequence: Synthetic oligonucleotide
cagcgacuacaagggacac

SEQ ID NO: 2304772 - RNA, 19 nt, Artificial Sequence
  Description of Artificial Sequence: Synthetic oligonucleotide
guucucccugcagccacac

SEQ ID NO: 2304773 - RNA, 19 nt, Artificial Sequence
  Description of Artificial Sequence: Synthetic oligonucleotide
cuuguccgcucugcaagga

SEQ ID NO: 2304774 - RNA, 19 nt, Artificial Sequence
  Description of Artificial Sequence: Synthetic oligonucleotide
ccgacauaucuugcaagug

SEQ ID NO: 2304775 - RNA, 19 nt, Artificial Sequence
  Description of Artificial Sequence: Synthetic oligonucleotide
uuguggcacuugguacaac

SEQ ID NO: 2304776 - RNA, 19 nt, Artificial Sequence
  Description of Artificial Sequence: Synthetic oligonucleotide
ucgaacccaguaggcccga

SEQ ID NO: 2304777 - RNA, 19 nt, Artificial Sequence
  Description of Artificial Sequence: Synthetic oligonucleotide
accgcggguacuggcacau

SEQ ID NO: 2304778 - RNA, 19 nt, Artificial Sequence
  Description of Artificial Sequence: Synthetic oligonucleotide
cauguccggccggcagugg

SEQ ID NO: 2304779 - RNA, 19 nt, Artificial Sequence
  Description of Artificial Sequence: Synthetic oligonucleotide
guccgcucugcaaggagaa

SEQ ID NO: 2304780 - RNA, 19 nt, Artificial Sequence
  Description of Artificial Sequence: Synthetic oligonucleotide
caggaccucgaacccagua

SEQ ID NO: 2304781 - RNA, 19 nt, Artificial Sequence
  Description of Artificial Sequence: Synthetic oligonucleotide
gagaucggggugcgguccu

SEQ ID NO: 2304782 - RNA, 19 nt, Artificial Sequence
  Description of Artificial Sequence: Synthetic oligonucleotide
agugaccccugagggguau

SEQ ID NO: 2304783 - RNA, 19 nt, Artificial Sequence
  Description of Artificial Sequence: Synthetic oligonucleotide
cugaaagucgaggguagau

SEQ ID NO: 2304784 - RNA, 19 nt, Artificial Sequence
  Description of Artificial Sequence: Synthetic oligonucleotide
gaccccugagggguauauc

SEQ ID NO: 2304785 - RNA, 19 nt, Artificial Sequence
  Description of Artificial Sequence: Synthetic oligonucleotide
uccgcucugcaaggagaaa

SEQ ID NO: 2304786 - RNA, 19 nt, Artificial Sequence
  Description of Artificial Sequence: Synthetic oligonucleotide
gggaauagccacggugcca

SEQ ID NO: 2304787 - RNA, 19 nt, Artificial Sequence
  Description of Artificial Sequence: Synthetic oligonucleotide
cuccaccugggacauuucu

SEQ ID NO: 2304788 - RNA, 19 nt, Artificial Sequence
  Description of Artificial Sequence: Synthetic oligonucleotide
gggcaauaacacuggggua

SEQ ID NO: 2304789 - RNA, 19 nt, Artificial Sequence
  Description of Artificial Sequence: Synthetic oligonucleotide
ggcgcugaaagucgagggu

SEQ ID NO: 2304790 - RNA, 19 nt, Artificial Sequence
  Description of Artificial Sequence: Synthetic oligonucleotide
aggcauugucugacguggu

SEQ ID NO: 2304791 - RNA, 19 nt, Artificial Sequence
  Description of Artificial Sequence: Synthetic oligonucleotide
caccaaagauuugcuggaa

SEQ ID NO: 2304792 - RNA, 19 nt, Artificial Sequence
  Description of Artificial Sequence: Synthetic oligonucleotide
ccaggcacgguggggagac

SEQ ID NO: 2304793 - RNA, 19 nt, Artificial Sequence
  Description of Artificial Sequence: Synthetic oligonucleotide
cuugcaagugaggcauugu

SEQ ID NO: 2304794 - RNA, 19 nt, Artificial Sequence
  Description of Artificial Sequence: Synthetic oligonucleotide
caguuacacacgguguccu

SEQ ID NO: 2304795 - RNA, 19 nt, Artificial Sequence
  Description of Artificial Sequence: Synthetic oligonucleotide
ggggucugugacauuucca

SEQ ID NO: 2304796 - RNA, 19 nt, Artificial Sequence
  Description of Artificial Sequence: Synthetic oligonucleotide
gacucucuuuacagggaau

SEQ ID NO: 2304797 - RNA, 19 nt, Artificial Sequence
  Description of Artificial Sequence: Synthetic oligonucleotide
guccacgcaucgaaagugu

SEQ ID NO: 2304798 - RNA, 19 nt, Artificial Sequence
  Description of Artificial Sequence: Synthetic oligonucleotide
gugcagcaauuggcaaggc

SEQ ID NO: 2304799 - RNA, 19 nt, Artificial Sequence
  Description of Artificial Sequence: Synthetic oligonucleotide
agcgcgggccucgguuuag

SEQ ID NO: 2304800 - RNA, 19 nt, Artificial Sequence
  Description of Artificial Sequence: Synthetic oligonucleotide
cggggugcgguccuccagg

SEQ ID NO: 2304801 - RNA, 19 nt, Artificial Sequence
  Description of Artificial Sequence: Synthetic oligonucleotide
ggccucgguuuagaggcgc

SEQ ID NO: 2304802 - RNA, 19 nt, Artificial Sequence
  Description of Artificial Sequence: Synthetic oligonucleotide
ccauuucggaagaauccua

SEQ ID NO: 2304803 - RNA, 19 nt, Artificial Sequence
  Description of Artificial Sequence: Synthetic oligonucleotide
cacgguguccugacucucu

SEQ ID NO: 2304804 - RNA, 19 nt, Artificial Sequence
  Description of Artificial Sequence: Synthetic oligonucleotide
caguuggagguaggcacaa

SEQ ID NO: 2304805 - RNA, 19 nt, Artificial Sequence
  Description of Artificial Sequence: Synthetic oligonucleotide
cacucccugcaaucuguua

SEQ ID NO: 2304806 - RNA, 19 nt, Artificial Sequence
  Description of Artificial Sequence: Synthetic oligonucleotide
ggacacacucauuuccauu

SEQ ID NO: 2304807 - RNA, 19 nt, Artificial Sequence
  Description of Artificial Sequence: Synthetic oligonucleotide
auucgccagguagguuccu

SEQ ID NO: 2304808 - RNA, 19 nt, Artificial Sequence
  Description of Artificial Sequence: Synthetic oligonucleotide
gcgguccuccaggaccucg

SEQ ID NO: 2304809 - RNA, 19 nt, Artificial Sequence
  Description of Artificial Sequence: Synthetic oligonucleotide
cccgcuccccaagggaagg

SEQ ID NO: 2304810 - RNA, 19 nt, Artificial Sequence
  Description of Artificial Sequence: Synthetic oligonucleotide
gugguucugggaagcggua

SEQ ID NO: 2304811 - RNA, 19 nt, Artificial Sequence
  Description of Artificial Sequence: Synthetic oligonucleotide
ccacggugccauugaagca

SEQ ID NO: 2304812 - RNA, 19 nt, Artificial Sequence
  Description of Artificial Sequence: Synthetic oligonucleotide
gggacacacucauuuccau

SEQ ID NO: 2304813 - RNA, 19 nt, Artificial Sequence
  Description of Artificial Sequence: Synthetic oligonucleotide
ccagugaccccugaggggu

SEQ ID NO: 2304814 - RNA, 19 nt, Artificial Sequence
  Description of Artificial Sequence: Synthetic oligonucleotide
cuugcuccggacagucauu

SEQ ID NO: 2304815 - RNA, 19 nt, Artificial Sequence
  Description of Artificial Sequence: Synthetic oligonucleotide
ccaccgcggguacuggcac

SEQ ID NO: 2304816 - RNA, 19 nt, Artificial Sequence
  Description of Artificial Sequence: Synthetic oligonucleotide
ccauguccggccggcagug

SEQ ID NO: 2304817 - RNA, 19 nt, Artificial Sequence
  Description of Artificial Sequence: Synthetic oligonucleotide
gacccauguccggccggca

SEQ ID NO: 2304818 - RNA, 19 nt, Artificial Sequence
  Description of Artificial Sequence: Synthetic oligonucleotide
agguuccuuuguggcacuu

SEQ ID NO: 2304819 - RNA, 19 nt, Artificial Sequence
  Description of Artificial Sequence: Synthetic oligonucleotide
ccucgguuuagaggcgcug

SEQ ID NO: 2304820 - RNA, 19 nt, Artificial Sequence
  Description of Artificial Sequence: Synthetic oligonucleotide
ggggugcgguccuccagga

SEQ ID NO: 2304821 - RNA, 19 nt, Artificial Sequence
  Description of Artificial Sequence: Synthetic oligonucleotide
caauaacacugggguaccu

SEQ ID NO: 2304822 - RNA, 19 nt, Artificial Sequence
  Description of Artificial Sequence: Synthetic oligonucleotide
cccgggcaguggcagcgcg

SEQ ID NO: 2304823 - RNA, 19 nt, Artificial Sequence
  Description of Artificial Sequence: Synthetic oligonucleotide
ggcauugucugacgugguu

SEQ ID NO: 2304824 - RNA, 19 nt, Artificial Sequence
  Description of Artificial Sequence: Synthetic oligonucleotide
ggacagucauucgccaggu

SEQ ID NO: 2304825 - RNA, 19 nt, Artificial Sequence
  Description of Artificial Sequence: Synthetic oligonucleotide
gcaaagcccgaggaagaua

SEQ ID NO: 2304826 - RNA, 19 nt, Artificial Sequence
  Description of Artificial Sequence: Synthetic oligonucleotide
ccuugcuccggacagucau

SEQ ID NO: 2304827 - RNA, 19 nt, Artificial Sequence
  Description of Artificial Sequence: Synthetic oligonucleotide
gcggguacuggcacauuaa

SEQ ID NO: 2304828 - RNA, 19 nt, Artificial Sequence
  Description of Artificial Sequence: Synthetic oligonucleotide
gguucucccugcagccaca

SEQ ID NO: 2304829 - RNA, 19 nt, Artificial Sequence
  Description of Artificial Sequence: Synthetic oligonucleotide
gggugcgguccuccaggac

SEQ ID NO: 2304830 - RNA, 19 nt, Artificial Sequence
  Description of Artificial Sequence: Synthetic oligonucleotide
gaauagccacggugccauu

SEQ ID NO: 2304831 - RNA, 19 nt, Artificial Sequence
  Description of Artificial Sequence: Synthetic oligonucleotide
caggcacgguggggagacc

SEQ ID NO: 2304832 - RNA, 19 nt, Artificial Sequence
  Description of Artificial Sequence: Synthetic oligonucleotide
cgaccggaccagguggccc

SEQ ID NO: 2304833 - RNA, 19 nt, Artificial Sequence
  Description of Artificial Sequence: Synthetic oligonucleotide
cggguacuggcacauuaaa

SEQ ID NO: 2304834 - RNA, 19 nt, Artificial Sequence
  Description of Artificial Sequence: Synthetic oligonucleotide
ggcaaagcccgaggaagau

SEQ ID NO: 2304835 - RNA, 19 nt, Artificial Sequence
  Description of Artificial Sequence: Synthetic oligonucleotide
ccgcuccccaagggaaggg

SEQ ID NO: 2304836 - RNA, 19 nt, Artificial Sequence
  Description of Artificial Sequence: Synthetic oligonucleotide
ccggcaguggccucucacu

SEQ ID NO: 2304837 - RNA, 19 nt, Artificial Sequence
  Description of Artificial Sequence: Synthetic oligonucleotide
ccacgcaucgaaaguguuu

SEQ ID NO: 2304838 - RNA, 19 nt, Artificial Sequence
  Description of Artificial Sequence: Synthetic oligonucleotide
gucauucgccagguagguu

SEQ ID NO: 2304839 - RNA, 19 nt, Artificial Sequence
  Description of Artificial Sequence: Synthetic oligonucleotide
gguggcccgggcaguggca

SEQ ID NO: 2304840 - RNA, 19 nt, Artificial Sequence
  Description of Artificial Sequence: Synthetic oligonucleotide
gggaagggaccaguccagu

SEQ ID NO: 2304841 - RNA, 19 nt, Artificial Sequence
  Description of Artificial Sequence: Synthetic oligonucleotide
ccgaccggaccagguggcc

SEQ ID NO: 2304842 - RNA, 19 nt, Artificial Sequence
  Description of Artificial Sequence: Synthetic oligonucleotide
cgcggguacuggcacauua

SEQ ID NO: 2304843 - RNA, 19 nt, Artificial Sequence
  Description of Artificial Sequence: Synthetic oligonucleotide
ccgcucugcaaggagaaau

SEQ ID NO: 2304844 - RNA, 19 nt, Artificial Sequence
  Description of Artificial Sequence: Synthetic oligonucleotide
cagcgcgggccucgguuua

SEQ ID NO: 2304845 - RNA, 19 nt, Artificial Sequence
  Description of Artificial Sequence: Synthetic oligonucleotide
gugaccccugagggguaua

SEQ ID NO: 2304846 - RNA, 19 nt, Artificial Sequence
  Description of Artificial Sequence: Synthetic oligonucleotide
cccaagggaagggaccagu

SEQ ID NO: 2304847 - RNA, 19 nt, Artificial Sequence
  Description of Artificial Sequence: Synthetic oligonucleotide
ccggaccagguggcccggg

SEQ ID NO: 2304848 - RNA, 19 nt, Artificial Sequence
  Description of Artificial Sequence: Synthetic oligonucleotide
cauuggggcuggggacagu

SEQ ID NO: 2304849 - RNA, 19 nt, Artificial Sequence
  Description of Artificial Sequence: Synthetic oligonucleotide
gccucgguuuagaggcgcu

SEQ ID NO: 2304850 - RNA, 19 nt, Artificial Sequence
  Description of Artificial Sequence: Synthetic oligonucleotide
gcacgguggggagacccau

SEQ ID NO: 2304851 - RNA, 19 nt, Artificial Sequence
  Description of Artificial Sequence: Synthetic oligonucleotide
ccaggaccucgaacccagu

SEQ ID NO: 2304852 - RNA, 19 nt, Artificial Sequence
  Description of Artificial Sequence: Synthetic oligonucleotide
ccggccggcaguggccucu

SEQ ID NO: 2304853 - RNA, 19 nt, Artificial Sequence
  Description of Artificial Sequence: Synthetic oligonucleotide
cggccggcaguggccucuc

SEQ ID NO: 2304854 - RNA, 19 nt, Artificial Sequence
  Description of Artificial Sequence: Synthetic oligonucleotide
ccgcggguacuggcacauu

SEQ ID NO: 2304855 - RNA, 19 nt, Artificial Sequence
  Description of Artificial Sequence: Synthetic oligonucleotide
aaggcauacuuccacagac

SEQ ID NO: 2304856 - RNA, 19 nt, Artificial Sequence
  Description of Artificial Sequence: Synthetic oligonucleotide
agucauggggcucaggggc

SEQ ID NO: 2304857 - RNA, 19 nt, Artificial Sequence
  Description of Artificial Sequence: Synthetic oligonucleotide
ucugcaaaugacaggaagc

SEQ ID NO: 2304858 - RNA, 19 nt, Artificial Sequence
  Description of Artificial Sequence: Synthetic oligonucleotide
uuugagauguuccuggcua

SEQ ID NO: 2304859 - RNA, 19 nt, Artificial Sequence
  Description of Artificial Sequence: Synthetic oligonucleotide
uguugcauguccaaggcau

SEQ ID NO: 2304860 - RNA, 19 nt, Artificial Sequence
  Description of Artificial Sequence: Synthetic oligonucleotide
aagacgcccacucgguagc

SEQ ID NO: 2304861 - RNA, 19 nt, Artificial Sequence
  Description of Artificial Sequence: Synthetic oligonucleotide
caugaggucagggaaaccg

SEQ ID NO: 2304862 - RNA, 19 nt, Artificial Sequence
  Description of Artificial Sequence: Synthetic oligonucleotide
uauaagggacccuugguuc

SEQ ID NO: 2304863 - RNA, 19 nt, Artificial Sequence
  Description of Artificial Sequence: Synthetic oligonucleotide
aauggggugaagccguucu

SEQ ID NO: 2304864 - RNA, 19 nt, Artificial Sequence
  Description of Artificial Sequence: Synthetic oligonucleotide
gauggcaauggcuuuggug

SEQ ID NO: 2304865 - RNA, 19 nt, Artificial Sequence
  Description of Artificial Sequence: Synthetic oligonucleotide
uuguccaccgccaugugca

SEQ ID NO: 2304866 - RNA, 19 nt, Artificial Sequence
  Description of Artificial Sequence: Synthetic oligonucleotide
ucuguugcauguccaaggc

SEQ ID NO: 2304867 - RNA, 19 nt, Artificial Sequence
  Description of Artificial Sequence: Synthetic oligonucleotide
agcugagcaguccugcagc

SEQ ID NO: 2304868 - RNA, 19 nt, Artificial Sequence
  Description of Artificial Sequence: Synthetic oligonucleotide
uuauaagggacccuugguu

SEQ ID NO: 2304869 - RNA, 19 nt, Artificial Sequence
  Description of Artificial Sequence: Synthetic oligonucleotide
ugcagcgaggggaagacgc

SEQ ID NO: 2304870 - RNA, 19 nt, Artificial Sequence
  Description of Artificial Sequence: Synthetic oligonucleotide
cucuguugcauguccaagg

SEQ ID NO: 2304871 - RNA, 19 nt, Artificial Sequence
  Description of Artificial Sequence: Synthetic oligonucleotide
uggugaacugcgcagaguc

SEQ ID NO: 2304872 - RNA, 19 nt, Artificial Sequence
  Description of Artificial Sequence: Synthetic oligonucleotide
uccugcagcacguaggaga

SEQ ID NO: 2304873 - RNA, 19 nt, Artificial Sequence
  Description of Artificial Sequence: Synthetic oligonucleotide
cauucaguuccaugaaggc

SEQ ID NO: 2304874 - RNA, 19 nt, Artificial Sequence
  Description of Artificial Sequence: Synthetic oligonucleotide
ugucugguguuugagaugu

SEQ ID NO: 2304875 - RNA, 19 nt, Artificial Sequence
  Description of Artificial Sequence: Synthetic oligonucleotide
gaagacgcccacucgguag

SEQ ID NO: 2304876 - RNA, 19 nt, Artificial Sequence
  Description of Artificial Sequence: Synthetic oligonucleotide
uuuggugaacugcgcagag

SEQ ID NO: 2304877 - RNA, 19 nt, Artificial Sequence
  Description of Artificial Sequence: Synthetic oligonucleotide
agauguuccuggcuagggg

SEQ ID NO: 2304878 - RNA, 19 nt, Artificial Sequence
  Description of Artificial Sequence: Synthetic oligonucleotide
uugcugagcacacccauga

SEQ ID NO: 2304879 - RNA, 19 nt, Artificial Sequence
  Description of Artificial Sequence: Synthetic oligonucleotide
agaagagcucugcaaauga

SEQ ID NO: 2304880 - RNA, 19 nt, Artificial Sequence
  Description of Artificial Sequence: Synthetic oligonucleotide
ugcaauggggugaagccgu

SEQ ID NO: 2304881 - RNA, 19 nt, Artificial Sequence
  Description of Artificial Sequence: Synthetic oligonucleotide
ugaggucagggaaaccgag

SEQ ID NO: 2304882 - RNA, 19 nt, Artificial Sequence
  Description of Artificial Sequence: Synthetic oligonucleotide
agcucugcaaaugacagga

SEQ ID NO: 2304883 - RNA, 19 nt, Artificial Sequence
  Description of Artificial Sequence: Synthetic oligonucleotide
auacgcugcagccauucag

SEQ ID NO: 2304884 - RNA, 19 nt, Artificial Sequence
  Description of Artificial Sequence: Synthetic oligonucleotide
uagcggcccacauuggugg

SEQ ID NO: 2304885 - RNA, 19 nt, Artificial Sequence
  Description of Artificial Sequence: Synthetic oligonucleotide
ggugaagccguucuugccg

SEQ ID NO: 2304886 - RNA, 19 nt, Artificial Sequence
  Description of Artificial Sequence: Synthetic oligonucleotide
cucugcaaaugacaggaag

SEQ ID NO: 2304887 - RNA, 19 nt, Artificial Sequence
  Description of Artificial Sequence: Synthetic oligonucleotide
uugguggucuccuugucca

SEQ ID NO: 2304888 - RNA, 19 nt, Artificial Sequence
  Description of Artificial Sequence: Synthetic oligonucleotide
uugaccacgugcagcgagg

SEQ ID NO: 2304889 - RNA, 19 nt, Artificial Sequence
  Description of Artificial Sequence: Synthetic oligonucleotide
ggcauacuuccacagacgg

SEQ ID NO: 2304890 - RNA, 19 nt, Artificial Sequence
  Description of Artificial Sequence: Synthetic oligonucleotide
agagcucugcaaaugacag

SEQ ID NO: 2304891 - RNA, 19 nt, Artificial Sequence
  Description of Artificial Sequence: Synthetic oligonucleotide
agggaaaccgagcugcaug

SEQ ID NO: 2304892 - RNA, 19 nt, Artificial Sequence
  Description of Artificial Sequence: Synthetic oligonucleotide
ucccguaccccuuugcuga

SEQ ID NO: 2304893 - RNA, 19 nt, Artificial Sequence
  Description of Artificial Sequence: Synthetic oligonucleotide
uuugcugagcacacccaug

SEQ ID NO: 2304894 - RNA, 19 nt, Artificial Sequence
  Description of Artificial Sequence: Synthetic oligonucleotide
uguuugagauguuccuggc

SEQ ID NO: 2304895 - RNA, 19 nt, Artificial Sequence
  Description of Artificial Sequence: Synthetic oligonucleotide
ccauucaguuccaugaagg

SEQ ID NO: 2304896 - RNA, 19 nt, Artificial Sequence
  Description of Artificial Sequence: Synthetic oligonucleotide
uacuuccacagacggauac

SEQ ID NO: 2304897 - RNA, 19 nt, Artificial Sequence
  Description of Artificial Sequence: Synthetic oligonucleotide
uacgcugcagccauucagu

SEQ ID NO: 2304898 - RNA, 19 nt, Artificial Sequence
  Description of Artificial Sequence: Synthetic oligonucleotide
aggagaagagcucugcaaa

SEQ ID NO: 2304899 - RNA, 19 nt, Artificial Sequence
  Description of Artificial Sequence: Synthetic oligonucleotide
gucagggaaaccgagcugc

SEQ ID NO: 2304900 - RNA, 19 nt, Artificial Sequence
  Description of Artificial Sequence: Synthetic oligonucleotide
ugcagcacguaggagaaga

SEQ ID NO: 2304901 - RNA, 19 nt, Artificial Sequence
  Description of Artificial Sequence: Synthetic oligonucleotide
cuugguuccuguccagggg

SEQ ID NO: 2304902 - RNA, 19 nt, Artificial Sequence
  Description of Artificial Sequence: Synthetic oligonucleotide
uaggagaagagcucugcaa

SEQ ID NO: 2304903 - RNA, 19 nt, Artificial Sequence
  Description of Artificial Sequence: Synthetic oligonucleotide
agcacguaggagaagagcu

SEQ ID NO: 2304904 - RNA, 19 nt, Artificial Sequence
  Description of Artificial Sequence: Synthetic oligonucleotide
cuccagguugcucuguugc

SEQ ID NO: 2304905 - RNA, 19 nt, Artificial Sequence
  Description of Artificial Sequence: Synthetic oligonucleotide
uccaaggcauacuuccaca

SEQ ID NO: 2304906 - RNA, 19 nt, Artificial Sequence
  Description of Artificial Sequence: Synthetic oligonucleotide
acuucccguaccccuuugc

SEQ ID NO: 2304907 - RNA, 19 nt, Artificial Sequence
  Description of Artificial Sequence: Synthetic oligonucleotide
uggggcacacuugagcagg

SEQ ID NO: 2304908 - RNA, 19 nt, Artificial Sequence
  Description of Artificial Sequence: Synthetic oligonucleotide
uccaccgccaugugcaaug

SEQ ID NO: 2304909 - RNA, 19 nt, Artificial Sequence
  Description of Artificial Sequence: Synthetic oligonucleotide
gagauguuccuggcuaggg

SEQ ID NO: 2304910 - RNA, 19 nt, Artificial Sequence
  Description of Artificial Sequence: Synthetic oligonucleotide
ugagauguuccuggcuagg

SEQ ID NO: 2304911 - RNA, 19 nt, Artificial Sequence
  Description of Artificial Sequence: Synthetic oligonucleotide
gagaagagcucugcaaaug

SEQ ID NO: 2304912 - RNA, 19 nt, Artificial Sequence
  Description of Artificial Sequence: Synthetic oligonucleotide
cuuagcugagcaguccugc

SEQ ID NO: 2304913 - RNA, 19 nt, Artificial Sequence
  Description of Artificial Sequence: Synthetic oligonucleotide
aggggugcacuccaccuuc

SEQ ID NO: 2304914 - RNA, 19 nt, Artificial Sequence
  Description of Artificial Sequence: Synthetic oligonucleotide
gagcucugcaaaugacagg

SEQ ID NO: 2304915 - RNA, 19 nt, Artificial Sequence
  Description of Artificial Sequence: Synthetic oligonucleotide
cagccauucaguuccauga

SEQ ID NO: 2304916 - RNA, 19 nt, Artificial Sequence
  Description of Artificial Sequence: Synthetic oligonucleotide
gcugagcacacccaugagg

SEQ ID NO: 2304917 - RNA, 19 nt, Artificial Sequence
  Description of Artificial Sequence: Synthetic oligonucleotide
uguccaaggcauacuucca

SEQ ID NO: 2304918 - RNA, 19 nt, Artificial Sequence
  Description of Artificial Sequence: Synthetic oligonucleotide
ugaacugcgcagagucgcc

SEQ ID NO: 2304919 - RNA, 19 nt, Artificial Sequence
  Description of Artificial Sequence: Synthetic oligonucleotide
ucugguguuugagauguuc

SEQ ID NO: 2304920 - RNA, 19 nt, Artificial Sequence
  Description of Artificial Sequence: Synthetic oligonucleotide
ugguuccuguccaggggcg

SEQ ID NO: 2304921 - RNA, 19 nt, Artificial Sequence
  Description of Artificial Sequence: Synthetic oligonucleotide
acgcccacucgguagcggc

SEQ ID NO: 2304922 - RNA, 19 nt, Artificial Sequence
  Description of Artificial Sequence: Synthetic oligonucleotide
cuuguccaccgccaugugc

SEQ ID NO: 2304923 - RNA, 19 nt, Artificial Sequence
  Description of Artificial Sequence: Synthetic oligonucleotide
ugcaaaugacaggaagcug

SEQ ID NO: 2304924 - RNA, 19 nt, Artificial Sequence
  Description of Artificial Sequence: Synthetic oligonucleotide
uugcccuuagcugagcagu

SEQ ID NO: 2304925 - RNA, 19 nt, Artificial Sequence
  Description of Artificial Sequence: Synthetic oligonucleotide
aacugcgcagagucgccug

SEQ ID NO: 2304926 - RNA, 19 nt, Artificial Sequence
  Description of Artificial Sequence: Synthetic oligonucleotide
uuagcugagcaguccugca

SEQ ID NO: 2304927 - RNA, 19 nt, Artificial Sequence
  Description of Artificial Sequence: Synthetic oligonucleotide
uccuuguccaccgccaugu

SEQ ID NO: 2304928 - RNA, 19 nt, Artificial Sequence
  Description of Artificial Sequence: Synthetic oligonucleotide
uagacugucugguguuuga

SEQ ID NO: 2304929 - RNA, 19 nt, Artificial Sequence
  Description of Artificial Sequence: Synthetic oligonucleotide
uaccccuuugcugagcaca

SEQ ID NO: 2304930 - RNA, 19 nt, Artificial Sequence
  Description of Artificial Sequence: Synthetic oligonucleotide
gugaacugcgcagagucgc

SEQ ID NO: 2304931 - RNA, 19 nt, Artificial Sequence
  Description of Artificial Sequence: Synthetic oligonucleotide
acacccaugaggucaggga

SEQ ID NO: 2304932 - RNA, 19 nt, Artificial Sequence
  Description of Artificial Sequence: Synthetic oligonucleotide
cagucauggggcucagggg

SEQ ID NO: 2304933 - RNA, 19 nt, Artificial Sequence
  Description of Artificial Sequence: Synthetic oligonucleotide
agcaccuugaccacgugca

SEQ ID NO: 2304934 - RNA, 19 nt, Artificial Sequence
  Description of Artificial Sequence: Synthetic oligonucleotide
ggggaagacgcccacucgg

SEQ ID NO: 2304935 - RNA, 19 nt, Artificial Sequence
  Description of Artificial Sequence: Synthetic oligonucleotide
ucgccuggcuccuugggca

SEQ ID NO: 2304936 - RNA, 19 nt, Artificial Sequence
  Description of Artificial Sequence: Synthetic oligonucleotide
uuccacagacggauacagc

SEQ ID NO: 2304937 - RNA, 19 nt, Artificial Sequence
  Description of Artificial Sequence: Synthetic oligonucleotide
gaagagcucugcaaaugac

SEQ ID NO: 2304938 - RNA, 19 nt, Artificial Sequence
  Description of Artificial Sequence: Synthetic oligonucleotide
caggcgguagacugucugg

SEQ ID NO: 2304939 - RNA, 19 nt, Artificial Sequence
  Description of Artificial Sequence: Synthetic oligonucleotide
aggaugauggcaauggcuu

SEQ ID NO: 2304940 - RNA, 19 nt, Artificial Sequence
  Description of Artificial Sequence: Synthetic oligonucleotide
gugcaauggggugaagccg

SEQ ID NO: 2304941 - RNA, 19 nt, Artificial Sequence
  Description of Artificial Sequence: Synthetic oligonucleotide
ugagcaggcgguagacugu

SEQ ID NO: 2304942 - RNA, 19 nt, Artificial Sequence
  Description of Artificial Sequence: Synthetic oligonucleotide
ggcacacuugagcaggcgg

SEQ ID NO: 2304943 - RNA, 19 nt, Artificial Sequence
  Description of Artificial Sequence: Synthetic oligonucleotide
accacgugcagcgagggga

SEQ ID NO: 2304944 - RNA, 19 nt, Artificial Sequence
  Description of Artificial Sequence: Synthetic oligonucleotide
uugcucuguugcaugucca

SEQ ID NO: 2304945 - RNA, 19 nt, Artificial Sequence
  Description of Artificial Sequence: Synthetic oligonucleotide
aggggaagacgcccacucg

SEQ ID NO: 2304946 - RNA, 19 nt, Artificial Sequence
  Description of Artificial Sequence: Synthetic oligonucleotide
ggaugugucagggugcgag

SEQ ID NO: 2304947 - RNA, 19 nt, Artificial Sequence
  Description of Artificial Sequence: Synthetic oligonucleotide
gacugucugguguuugaga

SEQ ID NO: 2304948 - RNA, 19 nt, Artificial Sequence
  Description of Artificial Sequence: Synthetic oligonucleotide
aagccguucuugccgcgug

SEQ ID NO: 2304949 - RNA, 19 nt, Artificial Sequence
  Description of Artificial Sequence: Synthetic oligonucleotide
gggaaaccgagcugcaugc

SEQ ID NO: 2304950 - RNA, 19 nt, Artificial Sequence
  Description of Artificial Sequence: Synthetic oligonucleotide
cugagcacacccaugaggu

SEQ ID NO: 2304951 - RNA, 19 nt, Artificial Sequence
  Description of Artificial Sequence: Synthetic oligonucleotide
gugcacuccaccuucucca

SEQ ID NO: 2304952 - RNA, 19 nt, Artificial Sequence
  Description of Artificial Sequence: Synthetic oligonucleotide
ugcugagcacacccaugag

SEQ ID NO: 2304953 - RNA, 19 nt, Artificial Sequence
  Description of Artificial Sequence: Synthetic oligonucleotide
uccagguugcucuguugca

SEQ ID NO: 2304954 - RNA, 19 nt, Artificial Sequence
  Description of Artificial Sequence: Synthetic oligonucleotide
gugaagccguucuugccgc

SEQ ID NO: 2304955 - RNA, 19 nt, Artificial Sequence
  Description of Artificial Sequence: Synthetic oligonucleotide
aguuccaugaaggccucca

SEQ ID NO: 2304956 - RNA, 19 nt, Artificial Sequence
  Description of Artificial Sequence: Synthetic oligonucleotide
ucagggaaaccgagcugca

SEQ ID NO: 2304957 - RNA, 19 nt, Artificial Sequence
  Description of Artificial Sequence: Synthetic oligonucleotide
uugcauguccaaggcauac

SEQ ID NO: 2304958 - RNA, 19 nt, Artificial Sequence
  Description of Artificial Sequence: Synthetic oligonucleotide
ugaccacgugcagcgaggg

SEQ ID NO: 2304959 - RNA, 19 nt, Artificial Sequence
  Description of Artificial Sequence: Synthetic oligonucleotide
aggauccucucccguauca

SEQ ID NO: 2304960 - RNA, 19 nt, Artificial Sequence
  Description of Artificial Sequence: Synthetic oligonucleotide
guaggagaagagcucugca

SEQ ID NO: 2304961 - RNA, 19 nt, Artificial Sequence
  Description of Artificial Sequence: Synthetic oligonucleotide
aggcauacuuccacagacg

SEQ ID NO: 2304962 - RNA, 19 nt, Artificial Sequence
  Description of Artificial Sequence: Synthetic oligonucleotide
gacccuugguuccugucca

SEQ ID NO: 2304963 - RNA, 19 nt, Artificial Sequence
  Description of Artificial Sequence: Synthetic oligonucleotide
gugcgagggacccaggauc

SEQ ID NO: 2304964 - RNA, 19 nt, Artificial Sequence
  Description of Artificial Sequence: Synthetic oligonucleotide
ugaagccguucuugccgcg

SEQ ID NO: 2304965 - RNA, 19 nt, Artificial Sequence
  Description of Artificial Sequence: Synthetic oligonucleotide
cauacuuccacagacggau

SEQ ID NO: 2304966 - RNA, 19 nt, Artificial Sequence
  Description of Artificial Sequence: Synthetic oligonucleotide
cagguugcucuguugcaug

SEQ ID NO: 2304967 - RNA, 19 nt, Artificial Sequence
  Description of Artificial Sequence: Synthetic oligonucleotide
ugcucuguugcauguccaa

SEQ ID NO: 2304968 - RNA, 19 nt, Artificial Sequence
  Description of Artificial Sequence: Synthetic oligonucleotide
agagucgccuggcuccuug

SEQ ID NO: 2304969 - RNA, 19 nt, Artificial Sequence
  Description of Artificial Sequence: Synthetic oligonucleotide
agucgccuggcuccuuggg

SEQ ID NO: 2304970 - RNA, 19 nt, Artificial Sequence
  Description of Artificial Sequence: Synthetic oligonucleotide
cagcaccuugaccacgugc

SEQ ID NO: 2304971 - RNA, 19 nt, Artificial Sequence
  Description of Artificial Sequence: Synthetic oligonucleotide
uguuccuggcuaggggugc

SEQ ID NO: 2304972 - RNA, 19 nt, Artificial Sequence
  Description of Artificial Sequence: Synthetic oligonucleotide
ggugcacuccaccuucucc

SEQ ID NO: 2304973 - RNA, 19 nt, Artificial Sequence
  Description of Artificial Sequence: Synthetic oligonucleotide
cagcacguaggagaagagc

SEQ ID NO: 2304974 - RNA, 19 nt, Artificial Sequence
  Description of Artificial Sequence: Synthetic oligonucleotide
guucuugccgcguggggca

SEQ ID NO: 2304975 - RNA, 19 nt, Artificial Sequence
  Description of Artificial Sequence: Synthetic oligonucleotide
gaagcugcuggcagucaug

SEQ ID NO: 2304976 - RNA, 19 nt, Artificial Sequence
  Description of Artificial Sequence: Synthetic oligonucleotide
ggacccuugguuccugucc

SEQ ID NO: 2304977 - RNA, 19 nt, Artificial Sequence
  Description of Artificial Sequence: Synthetic oligonucleotide
uggcuaggggugcacucca

SEQ ID NO: 2304978 - RNA, 19 nt, Artificial Sequence
  Description of Artificial Sequence: Synthetic oligonucleotide
ugcauguccaaggcauacu

SEQ ID NO: 2304979 - RNA, 19 nt, Artificial Sequence
  Description of Artificial Sequence: Synthetic oligonucleotide
cagguugcccuuagcugag

SEQ ID NO: 2304980 - RNA, 19 nt, Artificial Sequence
  Description of Artificial Sequence: Synthetic oligonucleotide
gagucgccuggcuccuugg

SEQ ID NO: 2304981 - RNA, 19 nt, Artificial Sequence
  Description of Artificial Sequence: Synthetic oligonucleotide
cuggcuaggggugcacucc

SEQ ID NO: 2304982 - RNA, 19 nt, Artificial Sequence
  Description of Artificial Sequence: Synthetic oligonucleotide
ccuugguuccuguccaggg

SEQ ID NO: 2304983 - RNA, 19 nt, Artificial Sequence
  Description of Artificial Sequence: Synthetic oligonucleotide
cuuauaagggacccuuggu

SEQ ID NO: 2304984 - RNA, 19 nt, Artificial Sequence
  Description of Artificial Sequence: Synthetic oligonucleotide
guagacugucugguguuug

SEQ ID NO: 2304985 - RNA, 19 nt, Artificial Sequence
  Description of Artificial Sequence: Synthetic oligonucleotide
agccguucuugccgcgugg

SEQ ID NO: 2304986 - RNA, 19 nt, Artificial Sequence
  Description of Artificial Sequence: Synthetic oligonucleotide
ugcccuuagcugagcaguc

SEQ ID NO: 2304987 - RNA, 19 nt, Artificial Sequence
  Description of Artificial Sequence: Synthetic oligonucleotide
gucgccuggcuccuugggc

SEQ ID NO: 2304988 - RNA, 19 nt, Artificial Sequence
  Description of Artificial Sequence: Synthetic oligonucleotide
cccuuugcugagcacaccc

SEQ ID NO: 2304989 - RNA, 19 nt, Artificial Sequence
  Description of Artificial Sequence: Synthetic oligonucleotide
uccacuucccguaccccuu

SEQ ID NO: 2304990 - RNA, 19 nt, Artificial Sequence
  Description of Artificial Sequence: Synthetic oligonucleotide
acuuccacagacggauaca

SEQ ID NO: 2304991 - RNA, 19 nt, Artificial Sequence
  Description of Artificial Sequence: Synthetic oligonucleotide
caaggcauacuuccacaga

SEQ ID NO: 2304992 - RNA, 19 nt, Artificial Sequence
  Description of Artificial Sequence: Synthetic oligonucleotide
cuuuggugaacugcgcaga

SEQ ID NO: 2304993 - RNA, 19 nt, Artificial Sequence
  Description of Artificial Sequence: Synthetic oligonucleotide
uggcaauggcuuuggugaa

SEQ ID NO: 2304994 - RNA, 19 nt, Artificial Sequence
  Description of Artificial Sequence: Synthetic oligonucleotide
ugagcacacccaugagguc

SEQ ID NO: 2304995 - RNA, 19 nt, Artificial Sequence
  Description of Artificial Sequence: Synthetic oligonucleotide
ugcgcagagucgccuggcu

SEQ ID NO: 2304996 - RNA, 19 nt, Artificial Sequence
  Description of Artificial Sequence: Synthetic oligonucleotide
ucggggucggccccgcagu

SEQ ID NO: 2304997 - RNA, 19 nt, Artificial Sequence
  Description of Artificial Sequence: Synthetic oligonucleotide
uaagggacccuugguuccu

SEQ ID NO: 2304998 - RNA, 19 nt, Artificial Sequence
  Description of Artificial Sequence: Synthetic oligonucleotide
uuggugaacugcgcagagu

SEQ ID NO: 2304999 - RNA, 19 nt, Artificial Sequence
  Description of Artificial Sequence: Synthetic oligonucleotide
gauccucucccguaucagu

SEQ ID NO: 2305000 - RNA, 19 nt, Artificial Sequence
  Description of Artificial Sequence: Synthetic oligonucleotide
uuccuguccaggggcgcgg

SEQ ID NO: 2305001 - RNA, 19 nt, Artificial Sequence
  Description of Artificial Sequence: Synthetic oligonucleotide
agguggaggaugauggcaa

SEQ ID NO: 2305002 - RNA, 19 nt, Artificial Sequence
  Description of Artificial Sequence: Synthetic oligonucleotide
ugccgcguggggcacacuu

SEQ ID NO: 2305003 - RNA, 19 nt, Artificial Sequence
  Description of Artificial Sequence: Synthetic oligonucleotide
gucagggugcgagggaccc

SEQ ID NO: 2305004 - RNA, 19 nt, Artificial Sequence
  Description of Artificial Sequence: Synthetic oligonucleotide
guuugagauguuccuggcu

SEQ ID NO: 2305005 - RNA, 19 nt, Artificial Sequence
  Description of Artificial Sequence: Synthetic oligonucleotide
cauugguggucuccuuguc

SEQ ID NO: 2305006 - RNA, 19 nt, Artificial Sequence
  Description of Artificial Sequence: Synthetic oligonucleotide
cagggugcgagggacccag

SEQ ID NO: 2305007 - RNA, 19 nt, Artificial Sequence
  Description of Artificial Sequence: Synthetic oligonucleotide
agcacacccaugaggucag

SEQ ID NO: 2305008 - RNA, 19 nt, Artificial Sequence
  Description of Artificial Sequence: Synthetic oligonucleotide
caauggcuuuggugaacug

SEQ ID NO: 2305009 - RNA, 19 nt, Artificial Sequence
  Description of Artificial Sequence: Synthetic oligonucleotide
auguuccuggcuaggggug

SEQ ID NO: 2305010 - RNA, 19 nt, Artificial Sequence
  Description of Artificial Sequence: Synthetic oligonucleotide
aggcgguagacugucuggu

SEQ ID NO: 2305011 - RNA, 19 nt, Artificial Sequence
  Description of Artificial Sequence: Synthetic oligonucleotide
gcaggcgguagacugucug

SEQ ID NO: 2305012 - RNA, 19 nt, Artificial Sequence
  Description of Artificial Sequence: Synthetic oligonucleotide
augcccagguugcccuuag

SEQ ID NO: 2305013 - RNA, 19 nt, Artificial Sequence
  Description of Artificial Sequence: Synthetic oligonucleotide
uggucuccuuguccaccgc

SEQ ID NO: 2305014 - RNA, 19 nt, Artificial Sequence
  Description of Artificial Sequence: Synthetic oligonucleotide
acccuugguuccuguccag

SEQ ID NO: 2305015 - RNA, 19 nt, Artificial Sequence
  Description of Artificial Sequence: Synthetic oligonucleotide
gacgcccacucgguagcgg

SEQ ID NO: 2305016 - RNA, 19 nt, Artificial Sequence
  Description of Artificial Sequence: Synthetic oligonucleotide
cgcagagucgccuggcucc

SEQ ID NO: 2305017 - RNA, 19 nt, Artificial Sequence
  Description of Artificial Sequence: Synthetic oligonucleotide
cagcgaggggaagacgccc

SEQ ID NO: 2305018 - RNA, 19 nt, Artificial Sequence
  Description of Artificial Sequence: Synthetic oligonucleotide
ugguggucuccuuguccac

SEQ ID NO: 2305019 - RNA, 19 nt, Artificial Sequence
  Description of Artificial Sequence: Synthetic oligonucleotide
gcguggggcacacuugagc

SEQ ID NO: 2305020 - RNA, 19 nt, Artificial Sequence
  Description of Artificial Sequence: Synthetic oligonucleotide
cuaggggugcacuccaccu

SEQ ID NO: 2305021 - RNA, 19 nt, Artificial Sequence
  Description of Artificial Sequence: Synthetic oligonucleotide
agguugcccuuagcugagc

SEQ ID NO: 2305022 - RNA, 19 nt, Artificial Sequence
  Description of Artificial Sequence: Synthetic oligonucleotide
aagggacccuugguuccug

SEQ ID NO: 2305023 - RNA, 19 nt, Artificial Sequence
  Description of Artificial Sequence: Synthetic oligonucleotide
ugcccagguugcccuuagc

SEQ ID NO: 2305024 - RNA, 19 nt, Artificial Sequence
  Description of Artificial Sequence: Synthetic oligonucleotide
gagcaggcgguagacuguc

SEQ ID NO: 2305025 - RNA, 19 nt, Artificial Sequence
  Description of Artificial Sequence: Synthetic oligonucleotide
acccaggauccucucccgu

SEQ ID NO: 2305026 - RNA, 19 nt, Artificial Sequence
  Description of Artificial Sequence: Synthetic oligonucleotide
cccgcaguccagcagcacc

SEQ ID NO: 2305027 - RNA, 19 nt, Artificial Sequence
  Description of Artificial Sequence: Synthetic oligonucleotide
uccuguccaggggcgcggg

SEQ ID NO: 2305028 - RNA, 19 nt, Artificial Sequence
  Description of Artificial Sequence: Synthetic oligonucleotide
ggauccucucccguaucag

SEQ ID NO: 2305029 - RNA, 19 nt, Artificial Sequence
  Description of Artificial Sequence: Synthetic oligonucleotide
cuggcagucauggggcuca

SEQ ID NO: 2305030 - RNA, 19 nt, Artificial Sequence
  Description of Artificial Sequence: Synthetic oligonucleotide
caccgccaugugcaauggg

SEQ ID NO: 2305031 - RNA, 19 nt, Artificial Sequence
  Description of Artificial Sequence: Synthetic oligonucleotide
acgugcagcgaggggaaga

SEQ ID NO: 2305032 - RNA, 19 nt, Artificial Sequence
  Description of Artificial Sequence: Synthetic oligonucleotide
cagcagcaccuugaccacg

SEQ ID NO: 2305033 - RNA, 19 nt, Artificial Sequence
  Description of Artificial Sequence: Synthetic oligonucleotide
ggcgguagacugucuggug

SEQ ID NO: 2305034 - RNA, 19 nt, Artificial Sequence
  Description of Artificial Sequence: Synthetic oligonucleotide
gguugcccuuagcugagca

SEQ ID NO: 2305035 - RNA, 19 nt, Artificial Sequence
  Description of Artificial Sequence: Synthetic oligonucleotide
agacgcccacucgguagcg

SEQ ID NO: 2305036 - RNA, 19 nt, Artificial Sequence
  Description of Artificial Sequence: Synthetic oligonucleotide
uccuggcuaggggugcacu

SEQ ID NO: 2305037 - RNA, 19 nt, Artificial Sequence
  Description of Artificial Sequence: Synthetic oligonucleotide
acgcugcagccauucaguu

SEQ ID NO: 2305038 - RNA, 19 nt, Artificial Sequence
  Description of Artificial Sequence: Synthetic oligonucleotide
acccaugaggucagggaaa

SEQ ID NO: 2305039 - RNA, 19 nt, Artificial Sequence
  Description of Artificial Sequence: Synthetic oligonucleotide
ucggccccgcaguccagca

SEQ ID NO: 2305040 - RNA, 19 nt, Artificial Sequence
  Description of Artificial Sequence: Synthetic oligonucleotide
agcccgcuccacuucccgu

SEQ ID NO: 2305041 - RNA, 19 nt, Artificial Sequence
  Description of Artificial Sequence: Synthetic oligonucleotide
cauacgcugcagccauuca

SEQ ID NO: 2305042 - RNA, 19 nt, Artificial Sequence
  Description of Artificial Sequence: Synthetic oligonucleotide
cacguaggagaagagcucu

SEQ ID NO: 2305043 - RNA, 19 nt, Artificial Sequence
  Description of Artificial Sequence: Synthetic oligonucleotide
cuucccguaccccuuugcu

SEQ ID NO: 2305044 - RNA, 19 nt, Artificial Sequence
  Description of Artificial Sequence: Synthetic oligonucleotide
agcgaggggaagacgccca

SEQ ID NO: 2305045 - RNA, 19 nt, Artificial Sequence
  Description of Artificial Sequence: Synthetic oligonucleotide
agggacccuugguuccugu

SEQ ID NO: 2305046 - RNA, 19 nt, Artificial Sequence
  Description of Artificial Sequence: Synthetic oligonucleotide
cguggggcacacuugagca

SEQ ID NO: 2305047 - RNA, 19 nt, Artificial Sequence
  Description of Artificial Sequence: Synthetic oligonucleotide
ggggcucaggggcuccagg

SEQ ID NO: 2305048 - RNA, 19 nt, Artificial Sequence
  Description of Artificial Sequence: Synthetic oligonucleotide
gugcagcgaggggaagacg

SEQ ID NO: 2305049 - RNA, 19 nt, Artificial Sequence
  Description of Artificial Sequence: Synthetic oligonucleotide
caggauccucucccguauc

SEQ ID NO: 2305050 - RNA, 19 nt, Artificial Sequence
  Description of Artificial Sequence: Synthetic oligonucleotide
guaccccuuugcugagcac

SEQ ID NO: 2305051 - RNA, 19 nt, Artificial Sequence
  Description of Artificial Sequence: Synthetic oligonucleotide
cccuuauaagggacccuug

SEQ ID NO: 2305052 - RNA, 19 nt, Artificial Sequence
  Description of Artificial Sequence: Synthetic oligonucleotide
agcggcccacauugguggu

SEQ ID NO: 2305053 - RNA, 19 nt, Artificial Sequence
  Description of Artificial Sequence: Synthetic oligonucleotide
ggaaaccgagcugcaugcc

SEQ ID NO: 2305054 - RNA, 19 nt, Artificial Sequence
  Description of Artificial Sequence: Synthetic oligonucleotide
ggagaagagcucugcaaau

SEQ ID NO: 2305055 - RNA, 19 nt, Artificial Sequence
  Description of Artificial Sequence: Synthetic oligonucleotide
caauggggugaagccguuc

SEQ ID NO: 2305056 - RNA, 19 nt, Artificial Sequence
  Description of Artificial Sequence: Synthetic oligonucleotide
ucagggugcgagggaccca

SEQ ID NO: 2305057 - RNA, 19 nt, Artificial Sequence
  Description of Artificial Sequence: Synthetic oligonucleotide
cuugccgcguggggcacac

SEQ ID NO: 2305058 - RNA, 19 nt, Artificial Sequence
  Description of Artificial Sequence: Synthetic oligonucleotide
cguucuugccgcguggggc

SEQ ID NO: 2305059 - RNA, 19 nt, Artificial Sequence
  Description of Artificial Sequence: Synthetic oligonucleotide
gcugagcaguccugcagca

SEQ ID NO: 2305060 - RNA, 19 nt, Artificial Sequence
  Description of Artificial Sequence: Synthetic oligonucleotide
cacuucccguaccccuuug

SEQ ID NO: 2305061 - RNA, 19 nt, Artificial Sequence
  Description of Artificial Sequence: Synthetic oligonucleotide
cugcgcagagucgccuggc

SEQ ID NO: 2305062 - RNA, 19 nt, Artificial Sequence
  Description of Artificial Sequence: Synthetic oligonucleotide
guugcauguccaaggcaua

SEQ ID NO: 2305063 - RNA, 19 nt, Artificial Sequence
  Description of Artificial Sequence: Synthetic oligonucleotide
cccaugaggucagggaaac

SEQ ID NO: 2305064 - RNA, 19 nt, Artificial Sequence
  Description of Artificial Sequence: Synthetic oligonucleotide
gccguucuugccgcguggg

SEQ ID NO: 2305065 - RNA, 19 nt, Artificial Sequence
  Description of Artificial Sequence: Synthetic oligonucleotide
ccuggcuaggggugcacuc

SEQ ID NO: 2305066 - RNA, 19 nt, Artificial Sequence
  Description of Artificial Sequence: Synthetic oligonucleotide
uuccuggcuaggggugcac

SEQ ID NO: 2305067 - RNA, 19 nt, Artificial Sequence
  Description of Artificial Sequence: Synthetic oligonucleotide
uucuugccgcguggggcac

SEQ ID NO: 2305068 - RNA, 19 nt, Artificial Sequence
  Description of Artificial Sequence: Synthetic oligonucleotide
caguuccaugaaggccucc

SEQ ID NO: 2305069 - RNA, 19 nt, Artificial Sequence
  Description of Artificial Sequence: Synthetic oligonucleotide
ugcagccauucaguuccau

SEQ ID NO: 2305070 - RNA, 19 nt, Artificial Sequence
  Description of Artificial Sequence: Synthetic oligonucleotide
caugugcaauggggugaag

SEQ ID NO: 2305071 - RNA, 19 nt, Artificial Sequence
  Description of Artificial Sequence: Synthetic oligonucleotide
ucuugccgcguggggcaca

SEQ ID NO: 2305072 - RNA, 19 nt, Artificial Sequence
  Description of Artificial Sequence: Synthetic oligonucleotide
gaacugcgcagagucgccu

SEQ ID NO: 2305073 - RNA, 19 nt, Artificial Sequence
  Description of Artificial Sequence: Synthetic oligonucleotide
gcccagguugcccuuagcu

SEQ ID NO: 2305074 - RNA, 19 nt, Artificial Sequence
  Description of Artificial Sequence: Synthetic oligonucleotide
gaagccguucuugccgcgu

SEQ ID NO: 2305075 - RNA, 19 nt, Artificial Sequence
  Description of Artificial Sequence: Synthetic oligonucleotide
gguuccuguccaggggcgc

SEQ ID NO: 2305076 - RNA, 19 nt, Artificial Sequence
  Description of Artificial Sequence: Synthetic oligonucleotide
cccuugguuccuguccagg

SEQ ID NO: 2305077 - RNA, 19 nt, Artificial Sequence
  Description of Artificial Sequence: Synthetic oligonucleotide
gggcacacuugagcaggcg

SEQ ID NO: 2305078 - RNA, 19 nt, Artificial Sequence
  Description of Artificial Sequence: Synthetic oligonucleotide
gcagcgaggggaagacgcc

SEQ ID NO: 2305079 - RNA, 19 nt, Artificial Sequence
  Description of Artificial Sequence: Synthetic oligonucleotide
uggcagucauggggcucag

SEQ ID NO: 2305080 - RNA, 19 nt, Artificial Sequence
  Description of Artificial Sequence: Synthetic oligonucleotide
auacuuccacagacggaua

SEQ ID NO: 2305081 - RNA, 19 nt, Artificial Sequence
  Description of Artificial Sequence: Synthetic oligonucleotide
gggugcgagggacccagga

SEQ ID NO: 2305082 - RNA, 19 nt, Artificial Sequence
  Description of Artificial Sequence: Synthetic oligonucleotide
ccuugggcagcugcagagc

SEQ ID NO: 2305083 - RNA, 19 nt, Artificial Sequence
  Description of Artificial Sequence: Synthetic oligonucleotide
ugucggggucggccccgca

SEQ ID NO: 2305084 - RNA, 19 nt, Artificial Sequence
  Description of Artificial Sequence: Synthetic oligonucleotide
ccuuugcugagcacaccca

SEQ ID NO: 2305085 - RNA, 19 nt, Artificial Sequence
  Description of Artificial Sequence: Synthetic oligonucleotide
gggucggccccgcagucca

SEQ ID NO: 2305086 - RNA, 19 nt, Artificial Sequence
  Description of Artificial Sequence: Synthetic oligonucleotide
cacacuugagcaggcggua

SEQ ID NO: 2305087 - RNA, 19 nt, Artificial Sequence
  Description of Artificial Sequence: Synthetic oligonucleotide
cugcagcacguaggagaag

SEQ ID NO: 2305088 - RNA, 19 nt, Artificial Sequence
  Description of Artificial Sequence: Synthetic oligonucleotide
gcccuuagcugagcagucc

SEQ ID NO: 2305089 - RNA, 19 nt, Artificial Sequence
  Description of Artificial Sequence: Synthetic oligonucleotide
ggaagacgcccacucggua

SEQ ID NO: 2305090 - RNA, 19 nt, Artificial Sequence
  Description of Artificial Sequence: Synthetic oligonucleotide
ccguucuugccgcgugggg

SEQ ID NO: 2305091 - RNA, 19 nt, Artificial Sequence
  Description of Artificial Sequence: Synthetic oligonucleotide
gggacccuugguuccuguc

SEQ ID NO: 2305092 - RNA, 19 nt, Artificial Sequence
  Description of Artificial Sequence: Synthetic oligonucleotide
ccggcugucggggucggcc

SEQ ID NO: 2305093 - RNA, 19 nt, Artificial Sequence
  Description of Artificial Sequence: Synthetic oligonucleotide
cacgugcagcgaggggaag

SEQ ID NO: 2305094 - RNA, 19 nt, Artificial Sequence
  Description of Artificial Sequence: Synthetic oligonucleotide
ggcugucggggucggcccc

SEQ ID NO: 2305095 - RNA, 19 nt, Artificial Sequence
  Description of Artificial Sequence: Synthetic oligonucleotide
gcgcagagucgccuggcuc

SEQ ID NO: 2305096 - RNA, 19 nt, Artificial Sequence
  Description of Artificial Sequence: Synthetic oligonucleotide
gcugucggggucggccccg

SEQ ID NO: 2305097 - RNA, 19 nt, Artificial Sequence
  Description of Artificial Sequence: Synthetic oligonucleotide
ggugcgagggacccaggau

SEQ ID NO: 2305098 - RNA, 19 nt, Artificial Sequence
  Description of Artificial Sequence: Synthetic oligonucleotide
gcacacuugagcaggcggu

SEQ ID NO: 2305099 - RNA, 19 nt, Artificial Sequence
  Description of Artificial Sequence: Synthetic oligonucleotide
ggaugauggcaauggcuuu

SEQ ID NO: 2305100 - RNA, 19 nt, Artificial Sequence
  Description of Artificial Sequence: Synthetic oligonucleotide
gucauggggcucaggggcu

SEQ ID NO: 2305101 - RNA, 19 nt, Artificial Sequence
  Description of Artificial Sequence: Synthetic oligonucleotide
ggcagucauggggcucagg

SEQ ID NO: 2305102 - RNA, 19 nt, Artificial Sequence
  Description of Artificial Sequence: Synthetic oligonucleotide
gggugcacuccaccuucuc

SEQ ID NO: 2305103 - RNA, 19 nt, Artificial Sequence
  Description of Artificial Sequence: Synthetic oligonucleotide
ggggcacacuugagcaggc

SEQ ID NO: 2305104 - RNA, 19 nt, Artificial Sequence
  Description of Artificial Sequence: Synthetic oligonucleotide
agggugcgagggacccagg

SEQ ID NO: 2305105 - RNA, 19 nt, Artificial Sequence
  Description of Artificial Sequence: Synthetic oligonucleotide
cguaccccuuugcugagca

SEQ ID NO: 2305106 - RNA, 19 nt, Artificial Sequence
  Description of Artificial Sequence: Synthetic oligonucleotide
ccaccgccaugugcaaugg

SEQ ID NO: 2305107 - RNA, 19 nt, Artificial Sequence
  Description of Artificial Sequence: Synthetic oligonucleotide
gcgaggggaagacgcccac

SEQ ID NO: 2305108 - RNA, 19 nt, Artificial Sequence
  Description of Artificial Sequence: Synthetic oligonucleotide
cugcagccauucaguucca

SEQ ID NO: 2305109 - RNA, 19 nt, Artificial Sequence
  Description of Artificial Sequence: Synthetic oligonucleotide
cccguaccccuuugcugag

SEQ ID NO: 2305110 - RNA, 19 nt, Artificial Sequence
  Description of Artificial Sequence: Synthetic oligonucleotide
gguggaggaugauggcaau

SEQ ID NO: 2305111 - RNA, 19 nt, Artificial Sequence
  Description of Artificial Sequence: Synthetic oligonucleotide
cugucggggucggccccgc

SEQ ID NO: 2305112 - RNA, 19 nt, Artificial Sequence
  Description of Artificial Sequence: Synthetic oligonucleotide
cccgcuccacuucccguac

SEQ ID NO: 2305113 - RNA, 19 nt, Artificial Sequence
  Description of Artificial Sequence: Synthetic oligonucleotide
gccgcguggggcacacuug

SEQ ID NO: 2305114 - RNA, 19 nt, Artificial Sequence
  Description of Artificial Sequence: Synthetic oligonucleotide
ccgcguggggcacacuuga

SEQ ID NO: 2305115 - RNA, 19 nt, Artificial Sequence
  Description of Artificial Sequence: Synthetic oligonucleotide
ccuuguccaccgccaugug

SEQ ID NO: 2305116 - RNA, 19 nt, Artificial Sequence
  Description of Artificial Sequence: Synthetic oligonucleotide
caugcccagguugcccuua

SEQ ID NO: 2305117 - RNA, 19 nt, Artificial Sequence
  Description of Artificial Sequence: Synthetic oligonucleotide
gggaagacgcccacucggu

SEQ ID NO: 2305118 - RNA, 19 nt, Artificial Sequence
  Description of Artificial Sequence: Synthetic oligonucleotide
guccaggggcgcgggcggc

SEQ ID NO: 2305119 - RNA, 19 nt, Artificial Sequence
  Description of Artificial Sequence: Synthetic oligonucleotide
cccaggauccucucccgua

SEQ ID NO: 2305120 - RNA, 19 nt, Artificial Sequence
  Description of Artificial Sequence: Synthetic oligonucleotide
gcccgcuccacuucccgua

SEQ ID NO: 2305121 - RNA, 19 nt, Artificial Sequence
  Description of Artificial Sequence: Synthetic oligonucleotide
cccuuagcugagcaguccu

SEQ ID NO: 2305122 - RNA, 19 nt, Artificial Sequence
  Description of Artificial Sequence: Synthetic oligonucleotide
caggggcgcgggcggccag

SEQ ID NO: 2305123 - RNA, 19 nt, Artificial Sequence
  Description of Artificial Sequence: Synthetic oligonucleotide
ccacgugcagcgaggggaa

SEQ ID NO: 2305124 - RNA, 19 nt, Artificial Sequence
  Description of Artificial Sequence: Synthetic oligonucleotide
ccaugugcaauggggugaa

SEQ ID NO: 2305125 - RNA, 19 nt, Artificial Sequence
  Description of Artificial Sequence: Synthetic oligonucleotide
ggcuaggggugcacuccac

SEQ ID NO: 2305126 - RNA, 19 nt, Artificial Sequence
  Description of Artificial Sequence: Synthetic oligonucleotide
cggcugucggggucggccc

SEQ ID NO: 2305127 - RNA, 19 nt, Artificial Sequence
  Description of Artificial Sequence: Synthetic oligonucleotide
cgcccacucgguagcggcc

SEQ ID NO: 2305128 - RNA, 19 nt, Artificial Sequence
  Description of Artificial Sequence: Synthetic oligonucleotide
cgguagcggcccacauugg

SEQ ID NO: 2305129 - RNA, 19 nt, Artificial Sequence
  Description of Artificial Sequence: Synthetic oligonucleotide
ccgcuccacuucccguacc

SEQ ID NO: 2305130 - RNA, 19 nt, Artificial Sequence
  Description of Artificial Sequence: Synthetic oligonucleotide
gcacacccaugaggucagg

SEQ ID NO: 2305131 - RNA, 19 nt, Artificial Sequence
  Description of Artificial Sequence: Synthetic oligonucleotide
ccgcaguccagcagcaccu

SEQ ID NO: 2305132 - RNA, 19 nt, Artificial Sequence
  Description of Artificial Sequence: Synthetic oligonucleotide
cgccuggcuccuugggcag

SEQ ID NO: 2305133 - RNA, 19 nt, Artificial Sequence
  Description of Artificial Sequence: Synthetic oligonucleotide
cgcguggggcacacuugag

SEQ ID NO: 2305134 - RNA, 19 nt, Artificial Sequence
  Description of Artificial Sequence: Synthetic oligonucleotide
gguagacugucugguguuu

SEQ ID NO: 2305135 - RNA, 19 nt, Artificial Sequence
  Description of Artificial Sequence: Synthetic oligonucleotide
cagggaaaccgagcugcau

SEQ ID NO: 2305136 - RNA, 19 nt, Artificial Sequence
  Description of Artificial Sequence: Synthetic oligonucleotide
ccaggauccucucccguau

SEQ ID NO: 2305137 - RNA, 19 nt, Artificial Sequence
  Description of Artificial Sequence: Synthetic oligonucleotide
ccgagcugcaugcccaggu

SEQ ID NO: 2305138 - RNA, 19 nt, Artificial Sequence
  Description of Artificial Sequence: Synthetic oligonucleotide
ccguaccccuuugcugagc

SEQ ID NO: 2305139 - RNA, 19 nt, Artificial Sequence
  Description of Artificial Sequence: Synthetic oligonucleotide
gcggcccacauuggugguc

SEQ ID NO: 2305140 - RNA, 19 nt, Artificial Sequence
  Description of Artificial Sequence: Synthetic oligonucleotide
uugccgcguggggcacacu

SEQ ID NO: 2305141 - RNA, 19 nt, Artificial Sequence
  Description of Artificial Sequence: Synthetic oligonucleotide
ggcccacauugguggucuc

SEQ ID NO: 2305142 - RNA, 19 nt, Artificial Sequence
  Description of Artificial Sequence: Synthetic oligonucleotide
ccagguugcucuguugcau

SEQ ID NO: 2305143 - RNA, 19 nt, Artificial Sequence
  Description of Artificial Sequence: Synthetic oligonucleotide
ccacucgguagcggcccac

SEQ ID NO: 2305144 - RNA, 19 nt, Artificial Sequence
  Description of Artificial Sequence: Synthetic oligonucleotide
guccaccgccaugugcaau

SEQ ID NO: 2305145 - RNA, 19 nt, Artificial Sequence
  Description of Artificial Sequence: Synthetic oligonucleotide
gcagagucgccuggcuccu

SEQ ID NO: 2305146 - RNA, 19 nt, Artificial Sequence
  Description of Artificial Sequence: Synthetic oligonucleotide
ccuugaccacgugcagcga

SEQ ID NO: 2305147 - RNA, 19 nt, Artificial Sequence
  Description of Artificial Sequence: Synthetic oligonucleotide
cggccccgcaguccagcag

SEQ ID NO: 2305148 - RNA, 19 nt, Artificial Sequence
  Description of Artificial Sequence: Synthetic oligonucleotide
ggggugcacuccaccuucu

SEQ ID NO: 2305149 - RNA, 19 nt, Artificial Sequence
  Description of Artificial Sequence: Synthetic oligonucleotide
ccccgcaguccagcagcac

SEQ ID NO: 2305150 - RNA, 19 nt, Artificial Sequence
  Description of Artificial Sequence: Synthetic oligonucleotide
gcaauggggugaagccguu

SEQ ID NO: 2305151 - RNA, 19 nt, Artificial Sequence
  Description of Artificial Sequence: Synthetic oligonucleotide
gggcuccagguugcucugu

SEQ ID NO: 2305152 - RNA, 19 nt, Artificial Sequence
  Description of Artificial Sequence: Synthetic oligonucleotide
ccaggggcgcgggcggcca

SEQ ID NO: 2305153 - RNA, 19 nt, Artificial Sequence
  Description of Artificial Sequence: Synthetic oligonucleotide
cggcccacauugguggucu

SEQ ID NO: 2305154 - RNA, 19 nt, Artificial Sequence
  Description of Artificial Sequence: Synthetic oligonucleotide
ccacuucccguaccccuuu

SEQ ID NO: 2305155 - RNA, 19 nt, Artificial Sequence
  Description of Artificial Sequence: Synthetic oligonucleotide
cagagucgccuggcuccuu

SEQ ID NO: 2305156 - RNA, 19 nt, Artificial Sequence
  Description of Artificial Sequence: Synthetic oligonucleotide
uaauuuaacacuuucuugg

SEQ ID NO: 2305157 - RNA, 19 nt, Artificial Sequence
  Description of Artificial Sequence: Synthetic oligonucleotide
ucagcuauuguucugaagg

SEQ ID NO: 2305158 - RNA, 19 nt, Artificial Sequence
  Description of Artificial Sequence: Synthetic oligonucleotide
uuacuuaagaguaaaauga

SEQ ID NO: 2305159 - RNA, 19 nt, Artificial Sequence
  Description of Artificial Sequence: Synthetic oligonucleotide
uaaaguaggaucaacauau

SEQ ID NO: 2305160 - RNA, 19 nt, Artificial Sequence
  Description of Artificial Sequence: Synthetic oligonucleotide
acagugacggaauaggucc

SEQ ID NO: 2305161 - RNA, 19 nt, Artificial Sequence
  Description of Artificial Sequence: Synthetic oligonucleotide
auuguuuucaggcacacag

SEQ ID NO: 2305162 - RNA, 19 nt, Artificial Sequence
  Description of Artificial Sequence: Synthetic oligonucleotide
auaucauucauuauuaagg

SEQ ID NO: 2305163 - RNA, 19 nt, Artificial Sequence
  Description of Artificial Sequence: Synthetic oligonucleotide
uauaauguagcuuuauucu

SEQ ID NO: 2305164 - RNA, 19 nt, Artificial Sequence
  Description of Artificial Sequence: Synthetic oligonucleotide
uacacuucaauguagaggu

SEQ ID NO: 2305165 - RNA, 19 nt, Artificial Sequence
  Description of Artificial Sequence: Synthetic oligonucleotide
auagaugaauaguauuucc

SEQ ID NO: 2305166 - RNA, 19 nt, Artificial Sequence
  Description of Artificial Sequence: Synthetic oligonucleotide
aauuuaacacuuucuuggg

SEQ ID NO: 2305167 - RNA, 19 nt, Artificial Sequence
  Description of Artificial Sequence: Synthetic oligonucleotide
aaagaagcuugaaagagac

SEQ ID NO: 2305168 - RNA, 19 nt, Artificial Sequence
  Description of Artificial Sequence: Synthetic oligonucleotide
uuuucaggcacacaggaug

SEQ ID NO: 2305169 - RNA, 19 nt, Artificial Sequence
  Description of Artificial Sequence: Synthetic oligonucleotide
ucugauguuugguagaugc

SEQ ID NO: 2305170 - RNA, 19 nt, Artificial Sequence
  Description of Artificial Sequence: Synthetic oligonucleotide
uuauaauguagcuuuauuc

SEQ ID NO: 2305171 - RNA, 19 nt, Artificial Sequence
  Description of Artificial Sequence: Synthetic oligonucleotide
aaugauggcagugaugguc

SEQ ID NO: 2305172 - RNA, 19 nt, Artificial Sequence
  Description of Artificial Sequence: Synthetic oligonucleotide
aagaguaaaaugauggcag

SEQ ID NO: 2305173 - RNA, 19 nt, Artificial Sequence
  Description of Artificial Sequence: Synthetic oligonucleotide
agaagcuugaaagagacag

SEQ ID NO: 2305174 - RNA, 19 nt, Artificial Sequence
  Description of Artificial Sequence: Synthetic oligonucleotide
ugaaguauaguccaugaau

SEQ ID NO: 2305175 - RNA, 19 nt, Artificial Sequence
  Description of Artificial Sequence: Synthetic oligonucleotide
gaaggaagcacuaagaguc

SEQ ID NO: 2305176 - RNA, 19 nt, Artificial Sequence
  Description of Artificial Sequence: Synthetic oligonucleotide
aucauaauuuaacacuuuc

SEQ ID NO: 2305177 - RNA, 19 nt, Artificial Sequence
  Description of Artificial Sequence: Synthetic oligonucleotide
agcacuaagagucgggcgc

SEQ ID NO: 2305178 - RNA, 19 nt, Artificial Sequence
  Description of Artificial Sequence: Synthetic oligonucleotide
aaguauaguccaugaauuc

SEQ ID NO: 2305179 - RNA, 19 nt, Artificial Sequence
  Description of Artificial Sequence: Synthetic oligonucleotide
accaaguccacacuuugcc

SEQ ID NO: 2305180 - RNA, 19 nt, Artificial Sequence
  Description of Artificial Sequence: Synthetic oligonucleotide
aguaguaagagcuguuuag

SEQ ID NO: 2305181 - RNA, 19 nt, Artificial Sequence
  Description of Artificial Sequence: Synthetic oligonucleotide
cugacuugaaguauagucc

SEQ ID NO: 2305182 - RNA, 19 nt, Artificial Sequence
  Description of Artificial Sequence: Synthetic oligonucleotide
ugguuaaggggcuugagcc

SEQ ID NO: 2305183 - RNA, 19 nt, Artificial Sequence
  Description of Artificial Sequence: Synthetic oligonucleotide
uuaagaguaaaaugauggc

SEQ ID NO: 2305184 - RNA, 19 nt, Artificial Sequence
  Description of Artificial Sequence: Synthetic oligonucleotide
ucauaauuuaacacuuucu

SEQ ID NO: 2305185 - RNA, 19 nt, Artificial Sequence
  Description of Artificial Sequence: Synthetic oligonucleotide
gauggucaacuucauacgg

SEQ ID NO: 2305186 - RNA, 19 nt, Artificial Sequence
  Description of Artificial Sequence: Synthetic oligonucleotide
aauaggucccuggauacac

SEQ ID NO: 2305187 - RNA, 19 nt, Artificial Sequence
  Description of Artificial Sequence: Synthetic oligonucleotide
uuaucauaauuuaacacuu

SEQ ID NO: 2305188 - RNA, 19 nt, Artificial Sequence
  Description of Artificial Sequence: Synthetic oligonucleotide
uucuauaaucucaaguuaa

SEQ ID NO: 2305189 - RNA, 19 nt, Artificial Sequence
  Description of Artificial Sequence: Synthetic oligonucleotide
auuaaggcaauuauaaugu

SEQ ID NO: 2305190 - RNA, 19 nt, Artificial Sequence
  Description of Artificial Sequence: Synthetic oligonucleotide
aaucaacagaugccucucc

SEQ ID NO: 2305191 - RNA, 19 nt, Artificial Sequence
  Description of Artificial Sequence: Synthetic oligonucleotide
gugauggucaacuucauac

SEQ ID NO: 2305192 - RNA, 19 nt, Artificial Sequence
  Description of Artificial Sequence: Synthetic oligonucleotide
uaagaguaaaaugauggca

SEQ ID NO: 2305193 - RNA, 19 nt, Artificial Sequence
  Description of Artificial Sequence: Synthetic oligonucleotide
ugauggucaacuucauacg

SEQ ID NO: 2305194 - RNA, 19 nt, Artificial Sequence
  Description of Artificial Sequence: Synthetic oligonucleotide
uguuuagacagcaccauuc

SEQ ID NO: 2305195 - RNA, 19 nt, Artificial Sequence
  Description of Artificial Sequence: Synthetic oligonucleotide
aauguagcuuuauucuucu

SEQ ID NO: 2305196 - RNA, 19 nt, Artificial Sequence
  Description of Artificial Sequence: Synthetic oligonucleotide
auuaaaguaggaucaacau

SEQ ID NO: 2305197 - RNA, 19 nt, Artificial Sequence
  Description of Artificial Sequence: Synthetic oligonucleotide
aaguaggaucaacauauca

SEQ ID NO: 2305198 - RNA, 19 nt, Artificial Sequence
  Description of Artificial Sequence: Synthetic oligonucleotide
uggucaacuucauacgggg

SEQ ID NO: 2305199 - RNA, 19 nt, Artificial Sequence
  Description of Artificial Sequence: Synthetic oligonucleotide
augaauucagcuauuguuc

SEQ ID NO: 2305200 - RNA, 19 nt, Artificial Sequence
  Description of Artificial Sequence: Synthetic oligonucleotide
aaagagacagacuccaguu

SEQ ID NO: 2305201 - RNA, 19 nt, Artificial Sequence
  Description of Artificial Sequence: Synthetic oligonucleotide
ucugcuguuucucuguucu

SEQ ID NO: 2305202 - RNA, 19 nt, Artificial Sequence
  Description of Artificial Sequence: Synthetic oligonucleotide
aagagacagacuccaguuc

SEQ ID NO: 2305203 - RNA, 19 nt, Artificial Sequence
  Description of Artificial Sequence: Synthetic oligonucleotide
auacacuucaauguagagg

SEQ ID NO: 2305204 - RNA, 19 nt, Artificial Sequence
  Description of Artificial Sequence: Synthetic oligonucleotide
uguagagguccuuagagau

SEQ ID NO: 2305205 - RNA, 19 nt, Artificial Sequence
  Description of Artificial Sequence: Synthetic oligonucleotide
uuagacagcaccauuccau

SEQ ID NO: 2305206 - RNA, 19 nt, Artificial Sequence
  Description of Artificial Sequence: Synthetic oligonucleotide
uuugcccugagucaacggc

SEQ ID NO: 2305207 - RNA, 19 nt, Artificial Sequence
  Description of Artificial Sequence: Synthetic oligonucleotide
uuucuauaaucucaaguua

SEQ ID NO: 2305208 - RNA, 19 nt, Artificial Sequence
  Description of Artificial Sequence: Synthetic oligonucleotide
accacaugagucuuccugg

SEQ ID NO: 2305209 - RNA, 19 nt, Artificial Sequence
  Description of Artificial Sequence: Synthetic oligonucleotide
uuugguagaugcuuccuga

SEQ ID NO: 2305210 - RNA, 19 nt, Artificial Sequence
  Description of Artificial Sequence: Synthetic oligonucleotide
uaaaaugauggcagugaug

SEQ ID NO: 2305211 - RNA, 19 nt, Artificial Sequence
  Description of Artificial Sequence: Synthetic oligonucleotide
aauucagcuauuguucuga

SEQ ID NO: 2305212 - RNA, 19 nt, Artificial Sequence
  Description of Artificial Sequence: Synthetic oligonucleotide
ucugugguaacgguagacg

SEQ ID NO: 2305213 - RNA, 19 nt, Artificial Sequence
  Description of Artificial Sequence: Synthetic oligonucleotide
aagcacuaagagucgggcg

SEQ ID NO: 2305214 - RNA, 19 nt, Artificial Sequence
  Description of Artificial Sequence: Synthetic oligonucleotide
cuucauacggggaagacca

SEQ ID NO: 2305215 - RNA, 19 nt, Artificial Sequence
  Description of Artificial Sequence: Synthetic oligonucleotide
acagccagcauuaaaguag

SEQ ID NO: 2305216 - RNA, 19 nt, Artificial Sequence
  Description of Artificial Sequence: Synthetic oligonucleotide
augaauaguauuucccaca

SEQ ID NO: 2305217 - RNA, 19 nt, Artificial Sequence
  Description of Artificial Sequence: Synthetic oligonucleotide
acuucauacggggaagacc

SEQ ID NO: 2305218 - RNA, 19 nt, Artificial Sequence
  Description of Artificial Sequence: Synthetic oligonucleotide
ucaacggcgaccacaugag

SEQ ID NO: 2305219 - RNA, 19 nt, Artificial Sequence
  Description of Artificial Sequence: Synthetic oligonucleotide
aaaagaagcuugaaagaga

SEQ ID NO: 2305220 - RNA, 19 nt, Artificial Sequence
  Description of Artificial Sequence: Synthetic oligonucleotide
uacuuaagaguaaaaugau

SEQ ID NO: 2305221 - RNA, 19 nt, Artificial Sequence
  Description of Artificial Sequence: Synthetic oligonucleotide
auuccauuauuguuuucag

SEQ ID NO: 2305222 - RNA, 19 nt, Artificial Sequence
  Description of Artificial Sequence: Synthetic oligonucleotide
ugagucuuccugguuaagg

SEQ ID NO: 2305223 - RNA, 19 nt, Artificial Sequence
  Description of Artificial Sequence: Synthetic oligonucleotide
uccccagucgagccgaucg

SEQ ID NO: 2305224 - RNA, 19 nt, Artificial Sequence
  Description of Artificial Sequence: Synthetic oligonucleotide
aguaaaaugauggcaguga

SEQ ID NO: 2305225 - RNA, 19 nt, Artificial Sequence
  Description of Artificial Sequence: Synthetic oligonucleotide
aacauaucauucauuauua

SEQ ID NO: 2305226 - RNA, 19 nt, Artificial Sequence
  Description of Artificial Sequence: Synthetic oligonucleotide
uccuuagagauguucucag

SEQ ID NO: 2305227 - RNA, 19 nt, Artificial Sequence
  Description of Artificial Sequence: Synthetic oligonucleotide
cuugagcccacagugacgg

SEQ ID NO: 2305228 - RNA, 19 nt, Artificial Sequence
  Description of Artificial Sequence: Synthetic oligonucleotide
uugcccugagucaacggcg

SEQ ID NO: 2305229 - RNA, 19 nt, Artificial Sequence
  Description of Artificial Sequence: Synthetic oligonucleotide
gaccacaugagucuuccug

SEQ ID NO: 2305230 - RNA, 19 nt, Artificial Sequence
  Description of Artificial Sequence: Synthetic oligonucleotide
uacggggaagaccaagucc

SEQ ID NO: 2305231 - RNA, 19 nt, Artificial Sequence
  Description of Artificial Sequence: Synthetic oligonucleotide
ugugguaacgguagacgug

SEQ ID NO: 2305232 - RNA, 19 nt, Artificial Sequence
  Description of Artificial Sequence: Synthetic oligonucleotide
cuaugucugaguacauggg

SEQ ID NO: 2305233 - RNA, 19 nt, Artificial Sequence
  Description of Artificial Sequence: Synthetic oligonucleotide
acugcccuucucuuggcgc

SEQ ID NO: 2305234 - RNA, 19 nt, Artificial Sequence
  Description of Artificial Sequence: Synthetic oligonucleotide
guuuagacagcaccauucc

SEQ ID NO: 2305235 - RNA, 19 nt, Artificial Sequence
  Description of Artificial Sequence: Synthetic oligonucleotide
aacggcgaccacaugaguc

SEQ ID NO: 2305236 - RNA, 19 nt, Artificial Sequence
  Description of Artificial Sequence: Synthetic oligonucleotide
aauuauaauguagcuuuau

SEQ ID NO: 2305237 - RNA, 19 nt, Artificial Sequence
  Description of Artificial Sequence: Synthetic oligonucleotide
aguauaguccaugaauuca

SEQ ID NO: 2305238 - RNA, 19 nt, Artificial Sequence
  Description of Artificial Sequence: Synthetic oligonucleotide
aacgguagacguggguugc

SEQ ID NO: 2305239 - RNA, 19 nt, Artificial Sequence
  Description of Artificial Sequence: Synthetic oligonucleotide
uaggaucaacauaucauuc

SEQ ID NO: 2305240 - RNA, 19 nt, Artificial Sequence
  Description of Artificial Sequence: Synthetic oligonucleotide
cuuuggaucgcucuggaga

SEQ ID NO: 2305241 - RNA, 19 nt, Artificial Sequence
  Description of Artificial Sequence: Synthetic oligonucleotide
uuuggaucgcucuggagaa

SEQ ID NO: 2305242 - RNA, 19 nt, Artificial Sequence
  Description of Artificial Sequence: Synthetic oligonucleotide
uaguaagagcuguuuagac

SEQ ID NO: 2305243 - RNA, 19 nt, Artificial Sequence
  Description of Artificial Sequence: Synthetic oligonucleotide
gaugcuuccugaaucaaca

SEQ ID NO: 2305244 - RNA, 19 nt, Artificial Sequence
  Description of Artificial Sequence: Synthetic oligonucleotide
ucuggcauagaugaauagu

SEQ ID NO: 2305245 - RNA, 19 nt, Artificial Sequence
  Description of Artificial Sequence: Synthetic oligonucleotide
agcacuucccuccccaguc

SEQ ID NO: 2305246 - RNA, 19 nt, Artificial Sequence
  Description of Artificial Sequence: Synthetic oligonucleotide
aucauucauuauuaaggca

SEQ ID NO: 2305247 - RNA, 19 nt, Artificial Sequence
  Description of Artificial Sequence: Synthetic oligonucleotide
gugguaacgguagacgugg

SEQ ID NO: 2305248 - RNA, 19 nt, Artificial Sequence
  Description of Artificial Sequence: Synthetic oligonucleotide
caucguuccugguaggggc

SEQ ID NO: 2305249 - RNA, 19 nt, Artificial Sequence
  Description of Artificial Sequence: Synthetic oligonucleotide
auaguccaugaauucagcu

SEQ ID NO: 2305250 - RNA, 19 nt, Artificial Sequence
  Description of Artificial Sequence: Synthetic oligonucleotide
ucaacuucauacggggaag

SEQ ID NO: 2305251 - RNA, 19 nt, Artificial Sequence
  Description of Artificial Sequence: Synthetic oligonucleotide
cagcauuaaaguaggauca

SEQ ID NO: 2305252 - RNA, 19 nt, Artificial Sequence
  Description of Artificial Sequence: Synthetic oligonucleotide
aguaggaucaacauaucau

SEQ ID NO: 2305253 - RNA, 19 nt, Artificial Sequence
  Description of Artificial Sequence: Synthetic oligonucleotide
uaacgguagacguggguug

SEQ ID NO: 2305254 - RNA, 19 nt, Artificial Sequence
  Description of Artificial Sequence: Synthetic oligonucleotide
ucuugggaaaucaguagua

SEQ ID NO: 2305255 - RNA, 19 nt, Artificial Sequence
  Description of Artificial Sequence: Synthetic oligonucleotide
agaguaaaaugauggcagu

SEQ ID NO: 2305256 - RNA, 19 nt, Artificial Sequence
  Description of Artificial Sequence: Synthetic oligonucleotide
uaguccaugaauucagcua

SEQ ID NO: 2305257 - RNA, 19 nt, Artificial Sequence
  Description of Artificial Sequence: Synthetic oligonucleotide
cauagaugaauaguauuuc

SEQ ID NO: 2305258 - RNA, 19 nt, Artificial Sequence
  Description of Artificial Sequence: Synthetic oligonucleotide
ugcccuaugucugaguaca

SEQ ID NO: 2305259 - RNA, 19 nt, Artificial Sequence
  Description of Artificial Sequence: Synthetic oligonucleotide
ucuuguuacuuaagaguaa

SEQ ID NO: 2305260 - RNA, 19 nt, Artificial Sequence
  Description of Artificial Sequence: Synthetic oligonucleotide
uugaaguauaguccaugaa

SEQ ID NO: 2305261 - RNA, 19 nt, Artificial Sequence
  Description of Artificial Sequence: Synthetic oligonucleotide
ugacggaauaggucccugg

SEQ ID NO: 2305262 - RNA, 19 nt, Artificial Sequence
  Description of Artificial Sequence: Synthetic oligonucleotide
acuuaagaguaaaaugaug

SEQ ID NO: 2305263 - RNA, 19 nt, Artificial Sequence
  Description of Artificial Sequence: Synthetic oligonucleotide
uucuugaccaugcccuaug

SEQ ID NO: 2305264 - RNA, 19 nt, Artificial Sequence
  Description of Artificial Sequence: Synthetic oligonucleotide
auacggggaagaccaaguc

SEQ ID NO: 2305265 - RNA, 19 nt, Artificial Sequence
  Description of Artificial Sequence: Synthetic oligonucleotide
cugguuaaggggcuugagc

SEQ ID NO: 2305266 - RNA, 19 nt, Artificial Sequence
  Description of Artificial Sequence: Synthetic oligonucleotide
aaaguaggaucaacauauc

SEQ ID NO: 2305267 - RNA, 19 nt, Artificial Sequence
  Description of Artificial Sequence: Synthetic oligonucleotide
gaguaaaaugauggcagug

SEQ ID NO: 2305268 - RNA, 19 nt, Artificial Sequence
  Description of Artificial Sequence: Synthetic oligonucleotide
cuugaaguauaguccauga

SEQ ID NO: 2305269 - RNA, 19 nt, Artificial Sequence
  Description of Artificial Sequence: Synthetic oligonucleotide
ccagcauuaaaguaggauc

SEQ ID NO: 2305270 - RNA, 19 nt, Artificial Sequence
  Description of Artificial Sequence: Synthetic oligonucleotide
gucaacggcgaccacauga

SEQ ID NO: 2305271 - RNA, 19 nt, Artificial Sequence
  Description of Artificial Sequence: Synthetic oligonucleotide
uucagcuauuguucugaag

SEQ ID NO: 2305272 - RNA, 19 nt, Artificial Sequence
  Description of Artificial Sequence: Synthetic oligonucleotide
aaggaagcacuaagagucg

SEQ ID NO: 2305273 - RNA, 19 nt, Artificial Sequence
  Description of Artificial Sequence: Synthetic oligonucleotide
agaaugcucugauguuugg

SEQ ID NO: 2305274 - RNA, 19 nt, Artificial Sequence
  Description of Artificial Sequence: Synthetic oligonucleotide
cuuccuucugugguaacgg

SEQ ID NO: 2305275 - RNA, 19 nt, Artificial Sequence
  Description of Artificial Sequence: Synthetic oligonucleotide
aagagcuguuuagacagca

SEQ ID NO: 2305276 - RNA, 19 nt, Artificial Sequence
  Description of Artificial Sequence: Synthetic oligonucleotide
gacuguacuccauguuucc

SEQ ID NO: 2305277 - RNA, 19 nt, Artificial Sequence
  Description of Artificial Sequence: Synthetic oligonucleotide
ucuugagaaugcucugaug

SEQ ID NO: 2305278 - RNA, 19 nt, Artificial Sequence
  Description of Artificial Sequence: Synthetic oligonucleotide
ugagucaacggcgaccaca

SEQ ID NO: 2305279 - RNA, 19 nt, Artificial Sequence
  Description of Artificial Sequence: Synthetic oligonucleotide
guagacguggguugccccg

SEQ ID NO: 2305280 - RNA, 19 nt, Artificial Sequence
  Description of Artificial Sequence: Synthetic oligonucleotide
acaugagucuuccugguua

SEQ ID NO: 2305281 - RNA, 19 nt, Artificial Sequence
  Description of Artificial Sequence: Synthetic oligonucleotide
guagaugcuuccugaauca

SEQ ID NO: 2305282 - RNA, 19 nt, Artificial Sequence
  Description of Artificial Sequence: Synthetic oligonucleotide
gguagaugcuuccugaauc

SEQ ID NO: 2305283 - RNA, 19 nt, Artificial Sequence
  Description of Artificial Sequence: Synthetic oligonucleotide
agacuguacuccauguuuc

SEQ ID NO: 2305284 - RNA, 19 nt, Artificial Sequence
  Description of Artificial Sequence: Synthetic oligonucleotide
gauguuugguagaugcuuc

SEQ ID NO: 2305285 - RNA, 19 nt, Artificial Sequence
  Description of Artificial Sequence: Synthetic oligonucleotide
ugauguuugguagaugcuu

SEQ ID NO: 2305286 - RNA, 19 nt, Artificial Sequence
  Description of Artificial Sequence: Synthetic oligonucleotide
gagaaugcucugauguuug

SEQ ID NO: 2305287 - RNA, 19 nt, Artificial Sequence
  Description of Artificial Sequence: Synthetic oligonucleotide
cugguaggggcccuggcgg

SEQ ID NO: 2305288 - RNA, 19 nt, Artificial Sequence
  Description of Artificial Sequence: Synthetic oligonucleotide
gggaaaucaguaguaagag

SEQ ID NO: 2305289 - RNA, 19 nt, Artificial Sequence
  Description of Artificial Sequence: Synthetic oligonucleotide
gaucgcugcagcgagcgcc

SEQ ID NO: 2305290 - RNA, 19 nt, Artificial Sequence
  Description of Artificial Sequence: Synthetic oligonucleotide
uggcauagaugaauaguau

SEQ ID NO: 2305291 - RNA, 19 nt, Artificial Sequence
  Description of Artificial Sequence: Synthetic oligonucleotide
auggucaacuucauacggg

SEQ ID NO: 2305292 - RNA, 19 nt, Artificial Sequence
  Description of Artificial Sequence: Synthetic oligonucleotide
guagcuuuauucuucuugu

SEQ ID NO: 2305293 - RNA, 19 nt, Artificial Sequence
  Description of Artificial Sequence: Synthetic oligonucleotide
cuggcauagaugaauagua

SEQ ID NO: 2305294 - RNA, 19 nt, Artificial Sequence
  Description of Artificial Sequence: Synthetic oligonucleotide
ucauacggggaagaccaag

SEQ ID NO: 2305295 - RNA, 19 nt, Artificial Sequence
  Description of Artificial Sequence: Synthetic oligonucleotide
ugaguacaugggcauuucu

SEQ ID NO: 2305296 - RNA, 19 nt, Artificial Sequence
  Description of Artificial Sequence: Synthetic oligonucleotide
ggaaaucaguaguaagagc

SEQ ID NO: 2305297 - RNA, 19 nt, Artificial Sequence
  Description of Artificial Sequence: Synthetic oligonucleotide
auuauuguuuucaggcaca

SEQ ID NO: 2305298 - RNA, 19 nt, Artificial Sequence
  Description of Artificial Sequence: Synthetic oligonucleotide
caugaauucagcuauuguu

SEQ ID NO: 2305299 - RNA, 19 nt, Artificial Sequence
  Description of Artificial Sequence: Synthetic oligonucleotide
ugcucugauguuugguaga

SEQ ID NO: 2305300 - RNA, 19 nt, Artificial Sequence
  Description of Artificial Sequence: Synthetic oligonucleotide
uuauuguuuucaggcacac

SEQ ID NO: 2305301 - RNA, 19 nt, Artificial Sequence
  Description of Artificial Sequence: Synthetic oligonucleotide
gucaacuucauacggggaa

SEQ ID NO: 2305302 - RNA, 19 nt, Artificial Sequence
  Description of Artificial Sequence: Synthetic oligonucleotide
gcuauuguucugaaggaag

SEQ ID NO: 2305303 - RNA, 19 nt, Artificial Sequence
  Description of Artificial Sequence: Synthetic oligonucleotide
uuaaggcaauuauaaugua

SEQ ID NO: 2305304 - RNA, 19 nt, Artificial Sequence
  Description of Artificial Sequence: Synthetic oligonucleotide
ugagaaugcucugauguuu

SEQ ID NO: 2305305 - RNA, 19 nt, Artificial Sequence
  Description of Artificial Sequence: Synthetic oligonucleotide
augcccuaugucugaguac

SEQ ID NO: 2305306 - RNA, 19 nt, Artificial Sequence
  Description of Artificial Sequence: Synthetic oligonucleotide
uggagaaugccaguucacu

SEQ ID NO: 2305307 - RNA, 19 nt, Artificial Sequence
  Description of Artificial Sequence: Synthetic oligonucleotide
acggcgaccacaugagucu

SEQ ID NO: 2305308 - RNA, 19 nt, Artificial Sequence
  Description of Artificial Sequence: Synthetic oligonucleotide
gaaguauaguccaugaauu

SEQ ID NO: 2305309 - RNA, 19 nt, Artificial Sequence
  Description of Artificial Sequence: Synthetic oligonucleotide
acggggaagaccaagucca

SEQ ID NO: 2305310 - RNA, 19 nt, Artificial Sequence
  Description of Artificial Sequence: Synthetic oligonucleotide
aguauuucccacacugacu

SEQ ID NO: 2305311 - RNA, 19 nt, Artificial Sequence
  Description of Artificial Sequence: Synthetic oligonucleotide
guaguaagagcuguuuaga

SEQ ID NO: 2305312 - RNA, 19 nt, Artificial Sequence
  Description of Artificial Sequence: Synthetic oligonucleotide
uggaggcuuccuucugugg

SEQ ID NO: 2305313 - RNA, 19 nt, Artificial Sequence
  Description of Artificial Sequence: Synthetic oligonucleotide
uggaucgcucuggagaaug

SEQ ID NO: 2305314 - RNA, 19 nt, Artificial Sequence
  Description of Artificial Sequence: Synthetic oligonucleotide
ggaauaggucccuggauac

SEQ ID NO: 2305315 - RNA, 19 nt, Artificial Sequence
  Description of Artificial Sequence: Synthetic oligonucleotide
gacggaauaggucccugga

SEQ ID NO: 2305316 - RNA, 19 nt, Artificial Sequence
  Description of Artificial Sequence: Synthetic oligonucleotide
cacuuucuugggaaaucag

SEQ ID NO: 2305317 - RNA, 19 nt, Artificial Sequence
  Description of Artificial Sequence: Synthetic oligonucleotide
ugguagaugcuuccugaau

SEQ ID NO: 2305318 - RNA, 19 nt, Artificial Sequence
  Description of Artificial Sequence: Synthetic oligonucleotide
cugcccuucucuuggcgcg

SEQ ID NO: 2305319 - RNA, 19 nt, Artificial Sequence
  Description of Artificial Sequence: Synthetic oligonucleotide
cuuugcccugagucaacgg

SEQ ID NO: 2305320 - RNA, 19 nt, Artificial Sequence
  Description of Artificial Sequence: Synthetic oligonucleotide
aggaagcacuaagagucgg

SEQ ID NO: 2305321 - RNA, 19 nt, Artificial Sequence
  Description of Artificial Sequence: Synthetic oligonucleotide
cacacuuugcccugaguca

SEQ ID NO: 2305322 - RNA, 19 nt, Artificial Sequence
  Description of Artificial Sequence: Synthetic oligonucleotide
caugggcauuucuggaggc

SEQ ID NO: 2305323 - RNA, 19 nt, Artificial Sequence
  Description of Artificial Sequence: Synthetic oligonucleotide
guaggaucaacauaucauu

SEQ ID NO: 2305324 - RNA, 19 nt, Artificial Sequence
  Description of Artificial Sequence: Synthetic oligonucleotide
aaggggcuugagcccacag

SEQ ID NO: 2305325 - RNA, 19 nt, Artificial Sequence
  Description of Artificial Sequence: Synthetic oligonucleotide
uguuugguagaugcuuccu

SEQ ID NO: 2305326 - RNA, 19 nt, Artificial Sequence
  Description of Artificial Sequence: Synthetic oligonucleotide
uugguagaugcuuccugaa

SEQ ID NO: 2305327 - RNA, 19 nt, Artificial Sequence
  Description of Artificial Sequence: Synthetic oligonucleotide
accauuccauuauuguuuu

SEQ ID NO: 2305328 - RNA, 19 nt, Artificial Sequence
  Description of Artificial Sequence: Synthetic oligonucleotide
uucugugguaacgguagac

SEQ ID NO: 2305329 - RNA, 19 nt, Artificial Sequence
  Description of Artificial Sequence: Synthetic oligonucleotide
agcuguuuagacagcacca

SEQ ID NO: 2305330 - RNA, 19 nt, Artificial Sequence
  Description of Artificial Sequence: Synthetic oligonucleotide
cucucuacagccagcauua

SEQ ID NO: 2305331 - RNA, 19 nt, Artificial Sequence
  Description of Artificial Sequence: Synthetic oligonucleotide
ucugaguacaugggcauuu

SEQ ID NO: 2305332 - RNA, 19 nt, Artificial Sequence
  Description of Artificial Sequence: Synthetic oligonucleotide
agagcuguuuagacagcac

SEQ ID NO: 2305333 - RNA, 19 nt, Artificial Sequence
  Description of Artificial Sequence: Synthetic oligonucleotide
gaucgcucuggagaaugcc

SEQ ID NO: 2305334 - RNA, 19 nt, Artificial Sequence
  Description of Artificial Sequence: Synthetic oligonucleotide
accaucguuccugguaggg

SEQ ID NO: 2305335 - RNA, 19 nt, Artificial Sequence
  Description of Artificial Sequence: Synthetic oligonucleotide
gguuaaggggcuugagccc

SEQ ID NO: 2305336 - RNA, 19 nt, Artificial Sequence
  Description of Artificial Sequence: Synthetic oligonucleotide
ugguaacgguagacguggg

SEQ ID NO: 2305337 - RNA, 19 nt, Artificial Sequence
  Description of Artificial Sequence: Synthetic oligonucleotide
aucguuccugguaggggcc

SEQ ID NO: 2305338 - RNA, 19 nt, Artificial Sequence
  Description of Artificial Sequence: Synthetic oligonucleotide
ugcccugagucaacggcga

SEQ ID NO: 2305339 - RNA, 19 nt, Artificial Sequence
  Description of Artificial Sequence: Synthetic oligonucleotide
gagucgggcgccuuucuuc

SEQ ID NO: 2305340 - RNA, 19 nt, Artificial Sequence
  Description of Artificial Sequence: Synthetic oligonucleotide
gaugccucuccucugcugu

SEQ ID NO: 2305341 - RNA, 19 nt, Artificial Sequence
  Description of Artificial Sequence: Synthetic oligonucleotide
uauuguuuucaggcacaca

SEQ ID NO: 2305342 - RNA, 19 nt, Artificial Sequence
  Description of Artificial Sequence: Synthetic oligonucleotide
agucgggcgccuuucuucu

SEQ ID NO: 2305343 - RNA, 19 nt, Artificial Sequence
  Description of Artificial Sequence: Synthetic oligonucleotide
agccgaucgcugcagcgag

SEQ ID NO: 2305344 - RNA, 19 nt, Artificial Sequence
  Description of Artificial Sequence: Synthetic oligonucleotide
guuaaggggcuugagccca

SEQ ID NO: 2305345 - RNA, 19 nt, Artificial Sequence
  Description of Artificial Sequence: Synthetic oligonucleotide
cagucgagccgaucgcugc

SEQ ID NO: 2305346 - RNA, 19 nt, Artificial Sequence
  Description of Artificial Sequence: Synthetic oligonucleotide
gaccgaccaucguuccugg

SEQ ID NO: 2305347 - RNA, 19 nt, Artificial Sequence
  Description of Artificial Sequence: Synthetic oligonucleotide
cagugacggaauagguccc

SEQ ID NO: 2305348 - RNA, 19 nt, Artificial Sequence
  Description of Artificial Sequence: Synthetic oligonucleotide
gaccaucguuccugguagg

SEQ ID NO: 2305349 - RNA, 19 nt, Artificial Sequence
  Description of Artificial Sequence: Synthetic oligonucleotide
guaaaaugauggcagugau

SEQ ID NO: 2305350 - RNA, 19 nt, Artificial Sequence
  Description of Artificial Sequence: Synthetic oligonucleotide
guccaccccgguuagcgcc

SEQ ID NO: 2305351 - RNA, 19 nt, Artificial Sequence
  Description of Artificial Sequence: Synthetic oligonucleotide
acacugacuugaaguauag

SEQ ID NO: 2305352 - RNA, 19 nt, Artificial Sequence
  Description of Artificial Sequence: Synthetic oligonucleotide
uuccuucugugguaacggu

SEQ ID NO: 2305353 - RNA, 19 nt, Artificial Sequence
  Description of Artificial Sequence: Synthetic oligonucleotide
cuguuucucuguucuugac

SEQ ID NO: 2305354 - RNA, 19 nt, Artificial Sequence
  Description of Artificial Sequence: Synthetic oligonucleotide
ccacacuuugcccugaguc

SEQ ID NO: 2305355 - RNA, 19 nt, Artificial Sequence
  Description of Artificial Sequence: Synthetic oligonucleotide
aagaagcuugaaagagaca

SEQ ID NO: 2305356 - RNA, 19 nt, Artificial Sequence
  Description of Artificial Sequence: Synthetic oligonucleotide
agacguggguugccccgcc

SEQ ID NO: 2305357 - RNA, 19 nt, Artificial Sequence
  Description of Artificial Sequence: Synthetic oligonucleotide
caguucacaaaggcugccc

SEQ ID NO: 2305358 - RNA, 19 nt, Artificial Sequence
  Description of Artificial Sequence: Synthetic oligonucleotide
agaugccucuccucugcug

SEQ ID NO: 2305359 - RNA, 19 nt, Artificial Sequence
  Description of Artificial Sequence: Synthetic oligonucleotide
acggaauaggucccuggau

SEQ ID NO: 2305360 - RNA, 19 nt, Artificial Sequence
  Description of Artificial Sequence: Synthetic oligonucleotide
agcuauuguucugaaggaa

SEQ ID NO: 2305361 - RNA, 19 nt, Artificial Sequence
  Description of Artificial Sequence: Synthetic oligonucleotide
ucccuccccagucgagccg

SEQ ID NO: 2305362 - RNA, 19 nt, Artificial Sequence
  Description of Artificial Sequence: Synthetic oligonucleotide
ggaagcacuaagagucggg

SEQ ID NO: 2305363 - RNA, 19 nt, Artificial Sequence
  Description of Artificial Sequence: Synthetic oligonucleotide
cagcuauuguucugaagga

SEQ ID NO: 2305364 - RNA, 19 nt, Artificial Sequence
  Description of Artificial Sequence: Synthetic oligonucleotide
guccuuagagauguucuca

SEQ ID NO: 2305365 - RNA, 19 nt, Artificial Sequence
  Description of Artificial Sequence: Synthetic oligonucleotide
uaggucccuggauacacuu

SEQ ID NO: 2305366 - RNA, 19 nt, Artificial Sequence
  Description of Artificial Sequence: Synthetic oligonucleotide
aggggcuugagcccacagu

SEQ ID NO: 2305367 - RNA, 19 nt, Artificial Sequence
  Description of Artificial Sequence: Synthetic oligonucleotide
auucagcuauuguucugaa

SEQ ID NO: 2305368 - RNA, 19 nt, Artificial Sequence
  Description of Artificial Sequence: Synthetic oligonucleotide
agcauuaaaguaggaucaa

SEQ ID NO: 2305369 - RNA, 19 nt, Artificial Sequence
  Description of Artificial Sequence: Synthetic oligonucleotide
ugccaguucacugcccuuc

SEQ ID NO: 2305370 - RNA, 19 nt, Artificial Sequence
  Description of Artificial Sequence: Synthetic oligonucleotide
cugcccucucuacagccag

SEQ ID NO: 2305371 - RNA, 19 nt, Artificial Sequence
  Description of Artificial Sequence: Synthetic oligonucleotide
caugcccuaugucugagua

SEQ ID NO: 2305372 - RNA, 19 nt, Artificial Sequence
  Description of Artificial Sequence: Synthetic oligonucleotide
uaagagucgggcgccuuuc

SEQ ID NO: 2305373 - RNA, 19 nt, Artificial Sequence
  Description of Artificial Sequence: Synthetic oligonucleotide
cuugggaaaucaguaguaa

SEQ ID NO: 2305374 - RNA, 19 nt, Artificial Sequence
  Description of Artificial Sequence: Synthetic oligonucleotide
uuaaggggcuugagcccac

SEQ ID NO: 2305375 - RNA, 19 nt, Artificial Sequence
  Description of Artificial Sequence: Synthetic oligonucleotide
augccucuugagaaugcuc

SEQ ID NO: 2305376 - RNA, 19 nt, Artificial Sequence
  Description of Artificial Sequence: Synthetic oligonucleotide
gagacagacuccaguucac

SEQ ID NO: 2305377 - RNA, 19 nt, Artificial Sequence
  Description of Artificial Sequence: Synthetic oligonucleotide
caugagucuuccugguuaa

SEQ ID NO: 2305378 - RNA, 19 nt, Artificial Sequence
  Description of Artificial Sequence: Synthetic oligonucleotide
gaauaggucccuggauaca

SEQ ID NO: 2305379 - RNA, 19 nt, Artificial Sequence
  Description of Artificial Sequence: Synthetic oligonucleotide
agucgagccgaucgcugca

SEQ ID NO: 2305380 - RNA, 19 nt, Artificial Sequence
  Description of Artificial Sequence: Synthetic oligonucleotide
auucauuauuaaggcaauu

SEQ ID NO: 2305381 - RNA, 19 nt, Artificial Sequence
  Description of Artificial Sequence: Synthetic oligonucleotide
cacugcccuucucuuggcg

SEQ ID NO: 2305382 - RNA, 19 nt, Artificial Sequence
  Description of Artificial Sequence: Synthetic oligonucleotide
acgguagacguggguugcc

SEQ ID NO: 2305383 - RNA, 19 nt, Artificial Sequence
  Description of Artificial Sequence: Synthetic oligonucleotide
gaauaguauuucccacacu

SEQ ID NO: 2305384 - RNA, 19 nt, Artificial Sequence
  Description of Artificial Sequence: Synthetic oligonucleotide
agcgccgcggucgccagac

SEQ ID NO: 2305385 - RNA, 19 nt, Artificial Sequence
  Description of Artificial Sequence: Synthetic oligonucleotide
ucgagccgaucgcugcagc

SEQ ID NO: 2305386 - RNA, 19 nt, Artificial Sequence
  Description of Artificial Sequence: Synthetic oligonucleotide
ucacaaaggcugcccucuc

SEQ ID NO: 2305387 - RNA, 19 nt, Artificial Sequence
  Description of Artificial Sequence: Synthetic oligonucleotide
gguccuuagagauguucuc

SEQ ID NO: 2305388 - RNA, 19 nt, Artificial Sequence
  Description of Artificial Sequence: Synthetic oligonucleotide
ccacgcugccuuuggaucg

SEQ ID NO: 2305389 - RNA, 19 nt, Artificial Sequence
  Description of Artificial Sequence: Synthetic oligonucleotide
ucuuggcgcgcuccagcac

SEQ ID NO: 2305390 - RNA, 19 nt, Artificial Sequence
  Description of Artificial Sequence: Synthetic oligonucleotide
gaccaugcccuaugucuga

SEQ ID NO: 2305391 - RNA, 19 nt, Artificial Sequence
  Description of Artificial Sequence: Synthetic oligonucleotide
gucgccagacuguacucca

SEQ ID NO: 2305392 - RNA, 19 nt, Artificial Sequence
  Description of Artificial Sequence: Synthetic oligonucleotide
cauacggggaagaccaagu

SEQ ID NO: 2305393 - RNA, 19 nt, Artificial Sequence
  Description of Artificial Sequence: Synthetic oligonucleotide
gguagacguggguugcccc

SEQ ID NO: 2305394 - RNA, 19 nt, Artificial Sequence
  Description of Artificial Sequence: Synthetic oligonucleotide
uucucuuggcgcgcuccag

SEQ ID NO: 2305395 - RNA, 19 nt, Artificial Sequence
  Description of Artificial Sequence: Synthetic oligonucleotide
uagacguggguugccccgc

SEQ ID NO: 2305396 - RNA, 19 nt, Artificial Sequence
  Description of Artificial Sequence: Synthetic oligonucleotide
ccuggauacacuucaaugu

SEQ ID NO: 2305397 - RNA, 19 nt, Artificial Sequence
  Description of Artificial Sequence: Synthetic oligonucleotide
uuagcgccgcggucgccag

SEQ ID NO: 2305398 - RNA, 19 nt, Artificial Sequence
  Description of Artificial Sequence: Synthetic oligonucleotide
cugugguaacgguagacgu

SEQ ID NO: 2305399 - RNA, 19 nt, Artificial Sequence
  Description of Artificial Sequence: Synthetic oligonucleotide
ugcccucucuacagccagc

SEQ ID NO: 2305400 - RNA, 19 nt, Artificial Sequence
  Description of Artificial Sequence: Synthetic oligonucleotide
uccugguuaaggggcuuga

SEQ ID NO: 2305401 - RNA, 19 nt, Artificial Sequence
  Description of Artificial Sequence: Synthetic oligonucleotide
caguaguaagagcuguuua

SEQ ID NO: 2305402 - RNA, 19 nt, Artificial Sequence
  Description of Artificial Sequence: Synthetic oligonucleotide
agugacggaauaggucccu

SEQ ID NO: 2305403 - RNA, 19 nt, Artificial Sequence
  Description of Artificial Sequence: Synthetic oligonucleotide
cauucauuauuaaggcaau

SEQ ID NO: 2305404 - RNA, 19 nt, Artificial Sequence
  Description of Artificial Sequence: Synthetic oligonucleotide
gaggcuuccuucuguggua

SEQ ID NO: 2305405 - RNA, 19 nt, Artificial Sequence
  Description of Artificial Sequence: Synthetic oligonucleotide
gcauuaaaguaggaucaac

SEQ ID NO: 2305406 - RNA, 19 nt, Artificial Sequence
  Description of Artificial Sequence: Synthetic oligonucleotide
ggaccgaccaucguuccug

SEQ ID NO: 2305407 - RNA, 19 nt, Artificial Sequence
  Description of Artificial Sequence: Synthetic oligonucleotide
uggguugccccgccuuccu

SEQ ID NO: 2305408 - RNA, 19 nt, Artificial Sequence
  Description of Artificial Sequence: Synthetic oligonucleotide
gaaugcucugauguuuggu

SEQ ID NO: 2305409 - RNA, 19 nt, Artificial Sequence
  Description of Artificial Sequence: Synthetic oligonucleotide
aggccaggaugccucuuga

SEQ ID NO: 2305410 - RNA, 19 nt, Artificial Sequence
  Description of Artificial Sequence: Synthetic oligonucleotide
guaacgguagacguggguu

SEQ ID NO: 2305411 - RNA, 19 nt, Artificial Sequence
  Description of Artificial Sequence: Synthetic oligonucleotide
cacuuugcccugagucaac

SEQ ID NO: 2305412 - RNA, 19 nt, Artificial Sequence
  Description of Artificial Sequence: Synthetic oligonucleotide
uuccucuggcauagaugaa

SEQ ID NO: 2305413 - RNA, 19 nt, Artificial Sequence
  Description of Artificial Sequence: Synthetic oligonucleotide
accaugcccuaugucugag

SEQ ID NO: 2305414 - RNA, 19 nt, Artificial Sequence
  Description of Artificial Sequence: Synthetic oligonucleotide
cagacuguacuccauguuu

SEQ ID NO: 2305415 - RNA, 19 nt, Artificial Sequence
  Description of Artificial Sequence: Synthetic oligonucleotide
aggucccuggauacacuuc

SEQ ID NO: 2305416 - RNA, 19 nt, Artificial Sequence
  Description of Artificial Sequence: Synthetic oligonucleotide
ccaggaugccucuugagaa

SEQ ID NO: 2305417 - RNA, 19 nt, Artificial Sequence
  Description of Artificial Sequence: Synthetic oligonucleotide
gcauagaugaauaguauuu

SEQ ID NO: 2305418 - RNA, 19 nt, Artificial Sequence
  Description of Artificial Sequence: Synthetic oligonucleotide
ucguuccugguaggggccc

SEQ ID NO: 2305419 - RNA, 19 nt, Artificial Sequence
  Description of Artificial Sequence: Synthetic oligonucleotide
augagucuuccugguuaag

SEQ ID NO: 2305420 - RNA, 19 nt, Artificial Sequence
  Description of Artificial Sequence: Synthetic oligonucleotide
cucuacagccagcauuaaa

SEQ ID NO: 2305421 - RNA, 19 nt, Artificial Sequence
  Description of Artificial Sequence: Synthetic oligonucleotide
guuagcgccgcggucgcca

SEQ ID NO: 2305422 - RNA, 19 nt, Artificial Sequence
  Description of Artificial Sequence: Synthetic oligonucleotide
cgaccaucguuccugguag

SEQ ID NO: 2305423 - RNA, 19 nt, Artificial Sequence
  Description of Artificial Sequence: Synthetic oligonucleotide
gagccgaucgcugcagcga

SEQ ID NO: 2305424 - RNA, 19 nt, Artificial Sequence
  Description of Artificial Sequence: Synthetic oligonucleotide
ggcauagaugaauaguauu

SEQ ID NO: 2305425 - RNA, 19 nt, Artificial Sequence
  Description of Artificial Sequence: Synthetic oligonucleotide
ccgguuagcgccgcggucg

SEQ ID NO: 2305426 - RNA, 19 nt, Artificial Sequence
  Description of Artificial Sequence: Synthetic oligonucleotide
gcacuucccuccccagucg

SEQ ID NO: 2305427 - RNA, 19 nt, Artificial Sequence
  Description of Artificial Sequence: Synthetic oligonucleotide
agagucgggcgccuuucuu

SEQ ID NO: 2305428 - RNA, 19 nt, Artificial Sequence
  Description of Artificial Sequence: Synthetic oligonucleotide
gcuugagcccacagugacg

SEQ ID NO: 2305429 - RNA, 19 nt, Artificial Sequence
  Description of Artificial Sequence: Synthetic oligonucleotide
caacuucauacggggaaga

SEQ ID NO: 2305430 - RNA, 19 nt, Artificial Sequence
  Description of Artificial Sequence: Synthetic oligonucleotide
uggggaccggggaccgacc

SEQ ID NO: 2305431 - RNA, 19 nt, Artificial Sequence
  Description of Artificial Sequence: Synthetic oligonucleotide
gaucaacauaucauucauu

SEQ ID NO: 2305432 - RNA, 19 nt, Artificial Sequence
  Description of Artificial Sequence: Synthetic oligonucleotide
ucgccagacuguacuccau

SEQ ID NO: 2305433 - RNA, 19 nt, Artificial Sequence
  Description of Artificial Sequence: Synthetic oligonucleotide
ggaggcuuccuucuguggu

SEQ ID NO: 2305434 - RNA, 19 nt, Artificial Sequence
  Description of Artificial Sequence: Synthetic oligonucleotide
accccgguuagcgccgcgg

SEQ ID NO: 2305435 - RNA, 19 nt, Artificial Sequence
  Description of Artificial Sequence: Synthetic oligonucleotide
gagucaacggcgaccacau

SEQ ID NO: 2305436 - RNA, 19 nt, Artificial Sequence
  Description of Artificial Sequence: Synthetic oligonucleotide
ggucgccagacuguacucc

SEQ ID NO: 2305437 - RNA, 19 nt, Artificial Sequence
  Description of Artificial Sequence: Synthetic oligonucleotide
agucaacggcgaccacaug

SEQ ID NO: 2305438 - RNA, 19 nt, Artificial Sequence
  Description of Artificial Sequence: Synthetic oligonucleotide
ccaucguuccugguagggg

SEQ ID NO: 2305439 - RNA, 19 nt, Artificial Sequence
  Description of Artificial Sequence: Synthetic oligonucleotide
gucgagccgaucgcugcag

SEQ ID NO: 2305440 - RNA, 19 nt, Artificial Sequence
  Description of Artificial Sequence: Synthetic oligonucleotide
cuggggaccggggaccgac

SEQ ID NO: 2305441 - RNA, 19 nt, Artificial Sequence
  Description of Artificial Sequence: Synthetic oligonucleotide
cuucucuuggcgcgcucca

SEQ ID NO: 2305442 - RNA, 19 nt, Artificial Sequence
  Description of Artificial Sequence: Synthetic oligonucleotide
cuuggcgcgcuccagcacu

SEQ ID NO: 2305443 - RNA, 19 nt, Artificial Sequence
  Description of Artificial Sequence: Synthetic oligonucleotide
cacgcugccuuuggaucgc

SEQ ID NO: 2305444 - RNA, 19 nt, Artificial Sequence
  Description of Artificial Sequence: Synthetic oligonucleotide
ccgaucgcugcagcgagcg

SEQ ID NO: 2305445 - RNA, 19 nt, Artificial Sequence
  Description of Artificial Sequence: Synthetic oligonucleotide
ggccaggaugccucuugag

SEQ ID NO: 2305446 - RNA, 19 nt, Artificial Sequence
  Description of Artificial Sequence: Synthetic oligonucleotide
guggguugccccgccuucc

SEQ ID NO: 2305447 - RNA, 19 nt, Artificial Sequence
  Description of Artificial Sequence: Synthetic oligonucleotide
ugcccuucucuuggcgcgc

SEQ ID NO: 2305448 - RNA, 19 nt, Artificial Sequence
  Description of Artificial Sequence: Synthetic oligonucleotide
uugagcccacagugacgga

SEQ ID NO: 2305449 - RNA, 19 nt, Artificial Sequence
  Description of Artificial Sequence: Synthetic oligonucleotide
gcacuaagagucgggcgcc

SEQ ID NO: 2305450 - RNA, 19 nt, Artificial Sequence
  Description of Artificial Sequence: Synthetic oligonucleotide
cccacgcugccuuuggauc

SEQ ID NO: 2305451 - RNA, 19 nt, Artificial Sequence
  Description of Artificial Sequence: Synthetic oligonucleotide
ggcgccuuucuucucucuc

SEQ ID NO: 2305452 - RNA, 19 nt, Artificial Sequence
  Description of Artificial Sequence: Synthetic oligonucleotide
ccugagucaacggcgacca

SEQ ID NO: 2305453 - RNA, 19 nt, Artificial Sequence
  Description of Artificial Sequence: Synthetic oligonucleotide
aggcuuccuucugugguaa

SEQ ID NO: 2305454 - RNA, 19 nt, Artificial Sequence
  Description of Artificial Sequence: Synthetic oligonucleotide
acguggguugccccgccuu

SEQ ID NO: 2305455 - RNA, 19 nt, Artificial Sequence
  Description of Artificial Sequence: Synthetic oligonucleotide
ggaucgcucuggagaaugc

SEQ ID NO: 2305456 - RNA, 19 nt, Artificial Sequence
  Description of Artificial Sequence: Synthetic oligonucleotide
cacuucccuccccagucga

SEQ ID NO: 2305457 - RNA, 19 nt, Artificial Sequence
  Description of Artificial Sequence: Synthetic oligonucleotide
gguccaccccgguuagcgc

SEQ ID NO: 2305458 - RNA, 19 nt, Artificial Sequence
  Description of Artificial Sequence: Synthetic oligonucleotide
ccagucgagccgaucgcug

SEQ ID NO: 2305459 - RNA, 19 nt, Artificial Sequence
  Description of Artificial Sequence: Synthetic oligonucleotide
agcccacagugacggaaua

SEQ ID NO: 2305460 - RNA, 19 nt, Artificial Sequence
  Description of Artificial Sequence: Synthetic oligonucleotide
uuggaucgcucuggagaau

SEQ ID NO: 2305461 - RNA, 19 nt, Artificial Sequence
  Description of Artificial Sequence: Synthetic oligonucleotide
guaggggcccuggcgguac

SEQ ID NO: 2305462 - RNA, 19 nt, Artificial Sequence
  Description of Artificial Sequence: Synthetic oligonucleotide
ggggaccgaccaucguucc

SEQ ID NO: 2305463 - RNA, 19 nt, Artificial Sequence
  Description of Artificial Sequence: Synthetic oligonucleotide
accgaccaucguuccuggu

SEQ ID NO: 2305464 - RNA, 19 nt, Artificial Sequence
  Description of Artificial Sequence: Synthetic oligonucleotide
cccugagucaacggcgacc

SEQ ID NO: 2305465 - RNA, 19 nt, Artificial Sequence
  Description of Artificial Sequence: Synthetic oligonucleotide
cgagccgaucgcugcagcg

SEQ ID NO: 2305466 - RNA, 19 nt, Artificial Sequence
  Description of Artificial Sequence: Synthetic oligonucleotide
cccuaugucugaguacaug

SEQ ID NO: 2305467 - RNA, 19 nt, Artificial Sequence
  Description of Artificial Sequence: Synthetic oligonucleotide
gguaacgguagacgugggu

SEQ ID NO: 2305468 - RNA, 19 nt, Artificial Sequence
  Description of Artificial Sequence: Synthetic oligonucleotide
acuaagagucgggcgccuu

SEQ ID NO: 2305469 - RNA, 19 nt, Artificial Sequence
  Description of Artificial Sequence: Synthetic oligonucleotide
uaggggcccuggcgguaca

SEQ ID NO: 2305470 - RNA, 19 nt, Artificial Sequence
  Description of Artificial Sequence: Synthetic oligonucleotide
ggucaacuucauacgggga

SEQ ID NO: 2305471 - RNA, 19 nt, Artificial Sequence
  Description of Artificial Sequence: Synthetic oligonucleotide
cuguuuagacagcaccauu

SEQ ID NO: 2305472 - RNA, 19 nt, Artificial Sequence
  Description of Artificial Sequence: Synthetic oligonucleotide
accggggaccgaccaucgu

SEQ ID NO: 2305473 - RNA, 19 nt, Artificial Sequence
  Description of Artificial Sequence: Synthetic oligonucleotide
caggaugccucuugagaau

SEQ ID NO: 2305474 - RNA, 19 nt, Artificial Sequence
  Description of Artificial Sequence: Synthetic oligonucleotide
ggaccggggaccgaccauc

SEQ ID NO: 2305475 - RNA, 19 nt, Artificial Sequence
  Description of Artificial Sequence: Synthetic oligonucleotide
gccagcauuaaaguaggau

SEQ ID NO: 2305476 - RNA, 19 nt, Artificial Sequence
  Description of Artificial Sequence: Synthetic oligonucleotide
ccugguuaaggggcuugag

SEQ ID NO: 2305477 - RNA, 19 nt, Artificial Sequence
  Description of Artificial Sequence: Synthetic oligonucleotide
cggaauaggucccuggaua

SEQ ID NO: 2305478 - RNA, 19 nt, Artificial Sequence
  Description of Artificial Sequence: Synthetic oligonucleotide
gcggucgccagacuguacu

SEQ ID NO: 2305479 - RNA, 19 nt, Artificial Sequence
  Description of Artificial Sequence: Synthetic oligonucleotide
ccgccuuccucuggcauag

SEQ ID NO: 2305480 - RNA, 19 nt, Artificial Sequence
  Description of Artificial Sequence: Synthetic oligonucleotide
cuaagagucgggcgccuuu

SEQ ID NO: 2305481 - RNA, 19 nt, Artificial Sequence
  Description of Artificial Sequence: Synthetic oligonucleotide
agcgccgguccaccccggu

SEQ ID NO: 2305482 - RNA, 19 nt, Artificial Sequence
  Description of Artificial Sequence: Synthetic oligonucleotide
gccgguccaccccgguuag

SEQ ID NO: 2305483 - RNA, 19 nt, Artificial Sequence
  Description of Artificial Sequence: Synthetic oligonucleotide
cgagcgccgguccaccccg

SEQ ID NO: 2305484 - RNA, 19 nt, Artificial Sequence
  Description of Artificial Sequence: Synthetic oligonucleotide
cggggaccgaccaucguuc

SEQ ID NO: 2305485 - RNA, 19 nt, Artificial Sequence
  Description of Artificial Sequence: Synthetic oligonucleotide
ccauuccauuauuguuuuc

SEQ ID NO: 2305486 - RNA, 19 nt, Artificial Sequence
  Description of Artificial Sequence: Synthetic oligonucleotide
ccccagucgagccgaucgc

SEQ ID NO: 2305487 - RNA, 19 nt, Artificial Sequence
  Description of Artificial Sequence: Synthetic oligonucleotide
gcuguuuagacagcaccau

SEQ ID NO: 2305488 - RNA, 19 nt, Artificial Sequence
  Description of Artificial Sequence: Synthetic oligonucleotide
ggggaccggggaccgacca

SEQ ID NO: 2305489 - RNA, 19 nt, Artificial Sequence
  Description of Artificial Sequence: Synthetic oligonucleotide
ccgaccaucguuccuggua

SEQ ID NO: 2305490 - RNA, 19 nt, Artificial Sequence
  Description of Artificial Sequence: Synthetic oligonucleotide
ggcuuccuucugugguaac

SEQ ID NO: 2305491 - RNA, 19 nt, Artificial Sequence
  Description of Artificial Sequence: Synthetic oligonucleotide
ccucucuacagccagcauu

SEQ ID NO: 2305492 - RNA, 19 nt, Artificial Sequence
  Description of Artificial Sequence: Synthetic oligonucleotide
caccccgguuagcgccgcg

SEQ ID NO: 2305493 - RNA, 19 nt, Artificial Sequence
  Description of Artificial Sequence: Synthetic oligonucleotide
gucgggcgccuuucuucuc

SEQ ID NO: 2305494 - RNA, 19 nt, Artificial Sequence
  Description of Artificial Sequence: Synthetic oligonucleotide
gucccuggauacacuucaa

SEQ ID NO: 2305495 - RNA, 19 nt, Artificial Sequence
  Description of Artificial Sequence: Synthetic oligonucleotide
gacguggguugccccgccu

SEQ ID NO: 2305496 - RNA, 19 nt, Artificial Sequence
  Description of Artificial Sequence: Synthetic oligonucleotide
cacaugagucuuccugguu

SEQ ID NO: 2305497 - RNA, 19 nt, Artificial Sequence
  Description of Artificial Sequence: Synthetic oligonucleotide
gcucugauguuugguagau

SEQ ID NO: 2305498 - RNA, 19 nt, Artificial Sequence
  Description of Artificial Sequence: Synthetic oligonucleotide
caacggcgaccacaugagu

SEQ ID NO: 2305499 - RNA, 19 nt, Artificial Sequence
  Description of Artificial Sequence: Synthetic oligonucleotide
cagaugccucuccucugcu

SEQ ID NO: 2305500 - RNA, 19 nt, Artificial Sequence
  Description of Artificial Sequence: Synthetic oligonucleotide
cuccccagucgagccgauc

SEQ ID NO: 2305501 - RNA, 19 nt, Artificial Sequence
  Description of Artificial Sequence: Synthetic oligonucleotide
cgguagacguggguugccc

SEQ ID NO: 2305502 - RNA, 19 nt, Artificial Sequence
  Description of Artificial Sequence: Synthetic oligonucleotide
gcgcuggggaccggggacc

SEQ ID NO: 2305503 - RNA, 19 nt, Artificial Sequence
  Description of Artificial Sequence: Synthetic oligonucleotide
ggcgaccacaugagucuuc

SEQ ID NO: 2305504 - RNA, 19 nt, Artificial Sequence
  Description of Artificial Sequence: Synthetic oligonucleotide
gcccugagucaacggcgac

SEQ ID NO: 2305505 - RNA, 19 nt, Artificial Sequence
  Description of Artificial Sequence: Synthetic oligonucleotide
gccaguucacugcccuucu

SEQ ID NO: 2305506 - RNA, 19 nt, Artificial Sequence
  Description of Artificial Sequence: Synthetic oligonucleotide
acgcugccuuuggaucgcu

SEQ ID NO: 2305507 - RNA, 19 nt, Artificial Sequence
  Description of Artificial Sequence: Synthetic oligonucleotide
ggguugccccgccuuccuc

SEQ ID NO: 2305508 - RNA, 19 nt, Artificial Sequence
  Description of Artificial Sequence: Synthetic oligonucleotide
uggcgcgcuccagcacuuc

SEQ ID NO: 2305509 - RNA, 19 nt, Artificial Sequence
  Description of Artificial Sequence: Synthetic oligonucleotide
gggaccgaccaucguuccu

SEQ ID NO: 2305510 - RNA, 19 nt, Artificial Sequence
  Description of Artificial Sequence: Synthetic oligonucleotide
cccgguuagcgccgcgguc

SEQ ID NO: 2305511 - RNA, 19 nt, Artificial Sequence
  Description of Artificial Sequence: Synthetic oligonucleotide
gguuagcgccgcggucgcc

SEQ ID NO: 2305512 - RNA, 19 nt, Artificial Sequence
  Description of Artificial Sequence: Synthetic oligonucleotide
cgccgcggucgccagacug

SEQ ID NO: 2305513 - RNA, 19 nt, Artificial Sequence
  Description of Artificial Sequence: Synthetic oligonucleotide
gccgaucgcugcagcgagc

SEQ ID NO: 2305514 - RNA, 19 nt, Artificial Sequence
  Description of Artificial Sequence: Synthetic oligonucleotide
cggucgccagacuguacuc

SEQ ID NO: 2305515 - RNA, 19 nt, Artificial Sequence
  Description of Artificial Sequence: Synthetic oligonucleotide
cacuaagagucgggcgccu

SEQ ID NO: 2305516 - RNA, 19 nt, Artificial Sequence
  Description of Artificial Sequence: Synthetic oligonucleotide
cgguuagcgccgcggucgc

SEQ ID NO: 2305517 - RNA, 19 nt, Artificial Sequence
  Description of Artificial Sequence: Synthetic oligonucleotide
gcgcuccagcacuucccuc

SEQ ID NO: 2305518 - RNA, 19 nt, Artificial Sequence
  Description of Artificial Sequence: Synthetic oligonucleotide
cccgccuuccucuggcaua

SEQ ID NO: 2305519 - RNA, 19 nt, Artificial Sequence
  Description of Artificial Sequence: Synthetic oligonucleotide
cgaucgcugcagcgagcgc

SEQ ID NO: 2305520 - RNA, 19 nt, Artificial Sequence
  Description of Artificial Sequence: Synthetic oligonucleotide
cccuccccagucgagccga

SEQ ID NO: 2305521 - RNA, 19 nt, Artificial Sequence
  Description of Artificial Sequence: Synthetic oligonucleotide
gccgcggucgccagacugu

SEQ ID NO: 2305522 - RNA, 19 nt, Artificial Sequence
  Description of Artificial Sequence: Synthetic oligonucleotide
ccccacgcugccuuuggau

SEQ ID NO: 2305523 - RNA, 19 nt, Artificial Sequence
  Description of Artificial Sequence: Synthetic oligonucleotide
ccggggaccgaccaucguu

SEQ ID NO: 2305524 - RNA, 19 nt, Artificial Sequence
  Description of Artificial Sequence: Synthetic oligonucleotide
ccaugcccuaugucugagu

SEQ ID NO: 2305525 - RNA, 19 nt, Artificial Sequence
  Description of Artificial Sequence: Synthetic oligonucleotide
cgcugccuuuggaucgcuc

SEQ ID NO: 2305526 - RNA, 19 nt, Artificial Sequence
  Description of Artificial Sequence: Synthetic oligonucleotide
cgcggucgccagacuguac

SEQ ID NO: 2305527 - RNA, 19 nt, Artificial Sequence
  Description of Artificial Sequence: Synthetic oligonucleotide
gccccgccuuccucuggca

SEQ ID NO: 2305528 - RNA, 19 nt, Artificial Sequence
  Description of Artificial Sequence: Synthetic oligonucleotide
cgccgguccaccccgguua

SEQ ID NO: 2305529 - RNA, 19 nt, Artificial Sequence
  Description of Artificial Sequence: Synthetic oligonucleotide
gggaccggggaccgaccau

SEQ ID NO: 2305530 - RNA, 19 nt, Artificial Sequence
  Description of Artificial Sequence: Synthetic oligonucleotide
cccagucgagccgaucgcu

SEQ ID NO: 2305531 - RNA, 19 nt, Artificial Sequence
  Description of Artificial Sequence: Synthetic oligonucleotide
ccgguccaccccgguuagc

SEQ ID NO: 2305532 - RNA, 19 nt, Artificial Sequence
  Description of Artificial Sequence: Synthetic oligonucleotide
gcuggggaccggggaccga

SEQ ID NO: 2305533 - RNA, 19 nt, Artificial Sequence
  Description of Artificial Sequence: Synthetic oligonucleotide
ccccgguuagcgccgcggu

SEQ ID NO: 2305534 - RNA, 19 nt, Artificial Sequence
  Description of Artificial Sequence: Synthetic oligonucleotide
ccgcggucgccagacugua

SEQ ID NO: 2305535 - RNA, 19 nt, Artificial Sequence
  Description of Artificial Sequence: Synthetic oligonucleotide
cgaccacaugagucuuccu

SEQ ID NO: 2305536 - RNA, 19 nt, Artificial Sequence
  Description of Artificial Sequence: Synthetic oligonucleotide
gcgccgguccaccccgguu

SEQ ID NO: 2305537 - RNA, 19 nt, Artificial Sequence
  Description of Artificial Sequence: Synthetic oligonucleotide
ccuccccagucgagccgau

SEQ ID NO: 2305538 - RNA, 19 nt, Artificial Sequence
  Description of Artificial Sequence: Synthetic oligonucleotide
cggcgaccacaugagucuu

SEQ ID NO: 2305539 - RNA, 19 nt, Artificial Sequence
  Description of Artificial Sequence: Synthetic oligonucleotide
cgccuuccucuggcauaga

SEQ ID NO: 2305540 - RNA, 19 nt, Artificial Sequence
  Description of Artificial Sequence: Synthetic oligonucleotide
uuucacgucacacacaacc

SEQ ID NO: 2305541 - RNA, 19 nt, Artificial Sequence
  Description of Artificial Sequence: Synthetic oligonucleotide
ucugccagcgacuuaaugg

SEQ ID NO: 2305542 - RNA, 19 nt, Artificial Sequence
  Description of Artificial Sequence: Synthetic oligonucleotide
uucacuguagagaagccgg

SEQ ID NO: 2305543 - RNA, 19 nt, Artificial Sequence
  Description of Artificial Sequence: Synthetic oligonucleotide
aaggcagacaaguucagag

SEQ ID NO: 2305544 - RNA, 19 nt, Artificial Sequence
  Description of Artificial Sequence: Synthetic oligonucleotide
uguaaagggaaccccaucc

SEQ ID NO: 2305545 - RNA, 19 nt, Artificial Sequence
  Description of Artificial Sequence: Synthetic oligonucleotide
aagggaaccccauccaugg

SEQ ID NO: 2305546 - RNA, 19 nt, Artificial Sequence
  Description of Artificial Sequence: Synthetic oligonucleotide
ucagaagguacuaacgccc

SEQ ID NO: 2305547 - RNA, 19 nt, Artificial Sequence
  Description of Artificial Sequence: Synthetic oligonucleotide
agacacagaaaguagccgg

SEQ ID NO: 2305548 - RNA, 19 nt, Artificial Sequence
  Description of Artificial Sequence: Synthetic oligonucleotide
caaucagucaguaaugcug

SEQ ID NO: 2305549 - RNA, 19 nt, Artificial Sequence
  Description of Artificial Sequence: Synthetic oligonucleotide
auaguuauacuccuucuca

SEQ ID NO: 2305550 - RNA, 19 nt, Artificial Sequence
  Description of Artificial Sequence: Synthetic oligonucleotide
agcucuugcccucaaaacg

SEQ ID NO: 2305551 - RNA, 19 nt, Artificial Sequence
  Description of Artificial Sequence: Synthetic oligonucleotide
gagacuaugagacgcuggg

SEQ ID NO: 2305552 - RNA, 19 nt, Artificial Sequence
  Description of Artificial Sequence: Synthetic oligonucleotide
gagacuggaugcuucauag

SEQ ID NO: 2305553 - RNA, 19 nt, Artificial Sequence
  Description of Artificial Sequence: Synthetic oligonucleotide
gaagccauaguuauacucc

SEQ ID NO: 2305554 - RNA, 19 nt, Artificial Sequence
  Description of Artificial Sequence: Synthetic oligonucleotide
uaccauagagacuggaugc

SEQ ID NO: 2305555 - RNA, 19 nt, Artificial Sequence
  Description of Artificial Sequence: Synthetic oligonucleotide
gucacacacaaccaugucg

SEQ ID NO: 2305556 - RNA, 19 nt, Artificial Sequence
  Description of Artificial Sequence: Synthetic oligonucleotide
auaccauagagacuggaug

SEQ ID NO: 2305557 - RNA, 19 nt, Artificial Sequence
  Description of Artificial Sequence: Synthetic oligonucleotide
gagagccuauccuagacag

SEQ ID NO: 2305558 - RNA, 19 nt, Artificial Sequence
  Description of Artificial Sequence: Synthetic oligonucleotide
aucaaucagucaguaaugc

SEQ ID NO: 2305559 - RNA, 19 nt, Artificial Sequence
  Description of Artificial Sequence: Synthetic oligonucleotide
aaguucagaggcccacagc

SEQ ID NO: 2305560 - RNA, 19 nt, Artificial Sequence
  Description of Artificial Sequence: Synthetic oligonucleotide
uuauacuccuucucaaugu

SEQ ID NO: 2305561 - RNA, 19 nt, Artificial Sequence
  Description of Artificial Sequence: Synthetic oligonucleotide
cuuucugagcgaaaccgcg

SEQ ID NO: 2305562 - RNA, 19 nt, Artificial Sequence
  Description of Artificial Sequence: Synthetic oligonucleotide
guagccggcuuucugagcg

SEQ ID NO: 2305563 - RNA, 19 nt, Artificial Sequence
  Description of Artificial Sequence: Synthetic oligonucleotide
gcugagauaccauagagac

SEQ ID NO: 2305564 - RNA, 19 nt, Artificial Sequence
  Description of Artificial Sequence: Synthetic oligonucleotide
auuucuugcaccagauggc

SEQ ID NO: 2305565 - RNA, 19 nt, Artificial Sequence
  Description of Artificial Sequence: Synthetic oligonucleotide
cuauccuagacaguguccg

SEQ ID NO: 2305566 - RNA, 19 nt, Artificial Sequence
  Description of Artificial Sequence: Synthetic oligonucleotide
aagguacuaacgcccuugg

SEQ ID NO: 2305567 - RNA, 19 nt, Artificial Sequence
  Description of Artificial Sequence: Synthetic oligonucleotide
aauccauccucccggggag

SEQ ID NO: 2305568 - RNA, 19 nt, Artificial Sequence
  Description of Artificial Sequence: Synthetic oligonucleotide
cucagaagguacuaacgcc

SEQ ID NO: 2305569 - RNA, 19 nt, Artificial Sequence
  Description of Artificial Sequence: Synthetic oligonucleotide
uuucugagcgaaaccgcgg

SEQ ID NO: 2305570 - RNA, 19 nt, Artificial Sequence
  Description of Artificial Sequence: Synthetic oligonucleotide
uggcugagauaccauagag

SEQ ID NO: 2305571 - RNA, 19 nt, Artificial Sequence
  Description of Artificial Sequence: Synthetic oligonucleotide
aguuucacgucacacacaa

SEQ ID NO: 2305572 - RNA, 19 nt, Artificial Sequence
  Description of Artificial Sequence: Synthetic oligonucleotide
ucguucacuguagagaagc

SEQ ID NO: 2305573 - RNA, 19 nt, Artificial Sequence
  Description of Artificial Sequence: Synthetic oligonucleotide
ucuagagggucguucacug

SEQ ID NO: 2305574 - RNA, 19 nt, Artificial Sequence
  Description of Artificial Sequence: Synthetic oligonucleotide
uuaaggcugacgaccagac

SEQ ID NO: 2305575 - RNA, 19 nt, Artificial Sequence
  Description of Artificial Sequence: Synthetic oligonucleotide
uccacggugcaggugaucg

SEQ ID NO: 2305576 - RNA, 19 nt, Artificial Sequence
  Description of Artificial Sequence: Synthetic oligonucleotide
aagccauaguuauacuccu

SEQ ID NO: 2305577 - RNA, 19 nt, Artificial Sequence
  Description of Artificial Sequence: Synthetic oligonucleotide
gguggauccagugagaggc

SEQ ID NO: 2305578 - RNA, 19 nt, Artificial Sequence
  Description of Artificial Sequence: Synthetic oligonucleotide
caggugaucgcgcugaaac

SEQ ID NO: 2305579 - RNA, 19 nt, Artificial Sequence
  Description of Artificial Sequence: Synthetic oligonucleotide
aggugaucgcgcugaaacc

SEQ ID NO: 2305580 - RNA, 19 nt, Artificial Sequence
  Description of Artificial Sequence: Synthetic oligonucleotide
uccgcagaguggaugcucg

SEQ ID NO: 2305581 - RNA, 19 nt, Artificial Sequence
  Description of Artificial Sequence: Synthetic oligonucleotide
uucacgucacacacaacca

SEQ ID NO: 2305582 - RNA, 19 nt, Artificial Sequence
  Description of Artificial Sequence: Synthetic oligonucleotide
caucaaucagucaguaaug

SEQ ID NO: 2305583 - RNA, 19 nt, Artificial Sequence
  Description of Artificial Sequence: Synthetic oligonucleotide
gacuuaauggucagguccc

SEQ ID NO: 2305584 - RNA, 19 nt, Artificial Sequence
  Description of Artificial Sequence: Synthetic oligonucleotide
uauacuccuucucaauguc

SEQ ID NO: 2305585 - RNA, 19 nt, Artificial Sequence
  Description of Artificial Sequence: Synthetic oligonucleotide
uucuuggacacagaggccu

SEQ ID NO: 2305586 - RNA, 19 nt, Artificial Sequence
  Description of Artificial Sequence: Synthetic oligonucleotide
gagucauuccuccgcagag

SEQ ID NO: 2305587 - RNA, 19 nt, Artificial Sequence
  Description of Artificial Sequence: Synthetic oligonucleotide
agaguggaugcucgagagc

SEQ ID NO: 2305588 - RNA, 19 nt, Artificial Sequence
  Description of Artificial Sequence: Synthetic oligonucleotide
agucaguaaugcugggagg

SEQ ID NO: 2305589 - RNA, 19 nt, Artificial Sequence
  Description of Artificial Sequence: Synthetic oligonucleotide
acuguagagaagccggaug

SEQ ID NO: 2305590 - RNA, 19 nt, Artificial Sequence
  Description of Artificial Sequence: Synthetic oligonucleotide
gaaaguagccggcuuucug

SEQ ID NO: 2305591 - RNA, 19 nt, Artificial Sequence
  Description of Artificial Sequence: Synthetic oligonucleotide
cauaguuauacuccuucuc

SEQ ID NO: 2305592 - RNA, 19 nt, Artificial Sequence
  Description of Artificial Sequence: Synthetic oligonucleotide
augcuucauagauggaguc

SEQ ID NO: 2305593 - RNA, 19 nt, Artificial Sequence
  Description of Artificial Sequence: Synthetic oligonucleotide
cauauccuggcugacagug

SEQ ID NO: 2305594 - RNA, 19 nt, Artificial Sequence
  Description of Artificial Sequence: Synthetic oligonucleotide
ugacgaccagaccaggccc

SEQ ID NO: 2305595 - RNA, 19 nt, Artificial Sequence
  Description of Artificial Sequence: Synthetic oligonucleotide
gauggcaaaaccacccaug

SEQ ID NO: 2305596 - RNA, 19 nt, Artificial Sequence
  Description of Artificial Sequence: Synthetic oligonucleotide
aaagggaaccccauccaug

SEQ ID NO: 2305597 - RNA, 19 nt, Artificial Sequence
  Description of Artificial Sequence: Synthetic oligonucleotide
auggcaaaaccacccaugu

SEQ ID NO: 2305598 - RNA, 19 nt, Artificial Sequence
  Description of Artificial Sequence: Synthetic oligonucleotide
ugcaguguaaagggaaccc

SEQ ID NO: 2305599 - RNA, 19 nt, Artificial Sequence
  Description of Artificial Sequence: Synthetic oligonucleotide
gguguuaaggcugacgacc

SEQ ID NO: 2305600 - RNA, 19 nt, Artificial Sequence
  Description of Artificial Sequence: Synthetic oligonucleotide
ucuugcccucaaaacgggg

SEQ ID NO: 2305601 - RNA, 19 nt, Artificial Sequence
  Description of Artificial Sequence: Synthetic oligonucleotide
ugaggguuccucaggcugc

SEQ ID NO: 2305602 - RNA, 19 nt, Artificial Sequence
  Description of Artificial Sequence: Synthetic oligonucleotide
guagagaagccggauggcg

SEQ ID NO: 2305603 - RNA, 19 nt, Artificial Sequence
  Description of Artificial Sequence: Synthetic oligonucleotide
uuaauggucagguccccaa

SEQ ID NO: 2305604 - RNA, 19 nt, Artificial Sequence
  Description of Artificial Sequence: Synthetic oligonucleotide
gaagguacuaacgcccuug

SEQ ID NO: 2305605 - RNA, 19 nt, Artificial Sequence
  Description of Artificial Sequence: Synthetic oligonucleotide
guucacuguagagaagccg

SEQ ID NO: 2305606 - RNA, 19 nt, Artificial Sequence
  Description of Artificial Sequence: Synthetic oligonucleotide
uaguuauacuccuucucaa

SEQ ID NO: 2305607 - RNA, 19 nt, Artificial Sequence
  Description of Artificial Sequence: Synthetic oligonucleotide
cauagagacuggaugcuuc

SEQ ID NO: 2305608 - RNA, 19 nt, Artificial Sequence
  Description of Artificial Sequence: Synthetic oligonucleotide
gaugcucgagagccuaucc

SEQ ID NO: 2305609 - RNA, 19 nt, Artificial Sequence
  Description of Artificial Sequence: Synthetic oligonucleotide
uaaagggaaccccauccau

SEQ ID NO: 2305610 - RNA, 19 nt, Artificial Sequence
  Description of Artificial Sequence: Synthetic oligonucleotide
gaauccauccucccgggga

SEQ ID NO: 2305611 - RNA, 19 nt, Artificial Sequence
  Description of Artificial Sequence: Synthetic oligonucleotide
cagaguggaugcucgagag

SEQ ID NO: 2305612 - RNA, 19 nt, Artificial Sequence
  Description of Artificial Sequence: Synthetic oligonucleotide
acaaccaugucggcagccc

SEQ ID NO: 2305613 - RNA, 19 nt, Artificial Sequence
  Description of Artificial Sequence: Synthetic oligonucleotide
cugacgaccagaccaggcc

SEQ ID NO: 2305614 - RNA, 19 nt, Artificial Sequence
  Description of Artificial Sequence: Synthetic oligonucleotide
gaucugcaugucuacuacc

SEQ ID NO: 2305615 - RNA, 19 nt, Artificial Sequence
  Description of Artificial Sequence: Synthetic oligonucleotide
aguuauacuccuucucaau

SEQ ID NO: 2305616 - RNA, 19 nt, Artificial Sequence
  Description of Artificial Sequence: Synthetic oligonucleotide
uccccaaaggcagacaagu

SEQ ID NO: 2305617 - RNA, 19 nt, Artificial Sequence
  Description of Artificial Sequence: Synthetic oligonucleotide
uagagggucguucacugua

SEQ ID NO: 2305618 - RNA, 19 nt, Artificial Sequence
  Description of Artificial Sequence: Synthetic oligonucleotide
gaaaccgcggccgaagcug

SEQ ID NO: 2305619 - RNA, 19 nt, Artificial Sequence
  Description of Artificial Sequence: Synthetic oligonucleotide
ucgagagccuauccuagac

SEQ ID NO: 2305620 - RNA, 19 nt, Artificial Sequence
  Description of Artificial Sequence: Synthetic oligonucleotide
cacgcagguauccaggcac

SEQ ID NO: 2305621 - RNA, 19 nt, Artificial Sequence
  Description of Artificial Sequence: Synthetic oligonucleotide
agcgacuuaauggucaggu

SEQ ID NO: 2305622 - RNA, 19 nt, Artificial Sequence
  Description of Artificial Sequence: Synthetic oligonucleotide
aguagccggcuuucugagc

SEQ ID NO: 2305623 - RNA, 19 nt, Artificial Sequence
  Description of Artificial Sequence: Synthetic oligonucleotide
gacagugcggggcuugggc

SEQ ID NO: 2305624 - RNA, 19 nt, Artificial Sequence
  Description of Artificial Sequence: Synthetic oligonucleotide
gacacagaaaguagccggc

SEQ ID NO: 2305625 - RNA, 19 nt, Artificial Sequence
  Description of Artificial Sequence: Synthetic oligonucleotide
gcucagaagguacuaacgc

SEQ ID NO: 2305626 - RNA, 19 nt, Artificial Sequence
  Description of Artificial Sequence: Synthetic oligonucleotide
ugaucgcgcugaaacccgg

SEQ ID NO: 2305627 - RNA, 19 nt, Artificial Sequence
  Description of Artificial Sequence: Synthetic oligonucleotide
uguuaaggcugacgaccag

SEQ ID NO: 2305628 - RNA, 19 nt, Artificial Sequence
  Description of Artificial Sequence: Synthetic oligonucleotide
ugggcaucaaucagucagu

SEQ ID NO: 2305629 - RNA, 19 nt, Artificial Sequence
  Description of Artificial Sequence: Synthetic oligonucleotide
cagacacagaaaguagccg

SEQ ID NO: 2305630 - RNA, 19 nt, Artificial Sequence
  Description of Artificial Sequence: Synthetic oligonucleotide
cugaggguuccucaggcug

SEQ ID NO: 2305631 - RNA, 19 nt, Artificial Sequence
  Description of Artificial Sequence: Synthetic oligonucleotide
cacgucacacacaaccaug

SEQ ID NO: 2305632 - RNA, 19 nt, Artificial Sequence
  Description of Artificial Sequence: Synthetic oligonucleotide
gagucuagagggucguuca

SEQ ID NO: 2305633 - RNA, 19 nt, Artificial Sequence
  Description of Artificial Sequence: Synthetic oligonucleotide
ucacgucacacacaaccau

SEQ ID NO: 2305634 - RNA, 19 nt, Artificial Sequence
  Description of Artificial Sequence: Synthetic oligonucleotide
uccaccacgaagccauagu

SEQ ID NO: 2305635 - RNA, 19 nt, Artificial Sequence
  Description of Artificial Sequence: Synthetic oligonucleotide
acuuaauggucaggucccc

SEQ ID NO: 2305636 - RNA, 19 nt, Artificial Sequence
  Description of Artificial Sequence: Synthetic oligonucleotide
caaguucagaggcccacag

SEQ ID NO: 2305637 - RNA, 19 nt, Artificial Sequence
  Description of Artificial Sequence: Synthetic oligonucleotide
gauccagugagaggccccg

SEQ ID NO: 2305638 - RNA, 19 nt, Artificial Sequence
  Description of Artificial Sequence: Synthetic oligonucleotide
ucagucaguaaugcuggga

SEQ ID NO: 2305639 - RNA, 19 nt, Artificial Sequence
  Description of Artificial Sequence: Synthetic oligonucleotide
uggguggauccagugagag

SEQ ID NO: 2305640 - RNA, 19 nt, Artificial Sequence
  Description of Artificial Sequence: Synthetic oligonucleotide
acagaaaguagccggcuuu

SEQ ID NO: 2305641 - RNA, 19 nt, Artificial Sequence
  Description of Artificial Sequence: Synthetic oligonucleotide
aguaaugcugggaggcagg

SEQ ID NO: 2305642 - RNA, 19 nt, Artificial Sequence
  Description of Artificial Sequence: Synthetic oligonucleotide
ucacuguagagaagccgga

SEQ ID NO: 2305643 - RNA, 19 nt, Artificial Sequence
  Description of Artificial Sequence: Synthetic oligonucleotide
agagacuaugagacgcugg

SEQ ID NO: 2305644 - RNA, 19 nt, Artificial Sequence
  Description of Artificial Sequence: Synthetic oligonucleotide
auggcugagauaccauaga

SEQ ID NO: 2305645 - RNA, 19 nt, Artificial Sequence
  Description of Artificial Sequence: Synthetic oligonucleotide
aucgcgcugaaacccgggg

SEQ ID NO: 2305646 - RNA, 19 nt, Artificial Sequence
  Description of Artificial Sequence: Synthetic oligonucleotide
gacuggaugcuucauagau

SEQ ID NO: 2305647 - RNA, 19 nt, Artificial Sequence
  Description of Artificial Sequence: Synthetic oligonucleotide
aucagucaguaaugcuggg

SEQ ID NO: 2305648 - RNA, 19 nt, Artificial Sequence
  Description of Artificial Sequence: Synthetic oligonucleotide
ugcucgagagccuauccua

SEQ ID NO: 2305649 - RNA, 19 nt, Artificial Sequence
  Description of Artificial Sequence: Synthetic oligonucleotide
agggucguucacuguagag

SEQ ID NO: 2305650 - RNA, 19 nt, Artificial Sequence
  Description of Artificial Sequence: Synthetic oligonucleotide
guaaagggaaccccaucca

SEQ ID NO: 2305651 - RNA, 19 nt, Artificial Sequence
  Description of Artificial Sequence: Synthetic oligonucleotide
gaagcuggcggucgcgccc

SEQ ID NO: 2305652 - RNA, 19 nt, Artificial Sequence
  Description of Artificial Sequence: Synthetic oligonucleotide
uauccuagacaguguccgc

SEQ ID NO: 2305653 - RNA, 19 nt, Artificial Sequence
  Description of Artificial Sequence: Synthetic oligonucleotide
uaaggcugacgaccagacc

SEQ ID NO: 2305654 - RNA, 19 nt, Artificial Sequence
  Description of Artificial Sequence: Synthetic oligonucleotide
uucacacacaugcgcuucu

SEQ ID NO: 2305655 - RNA, 19 nt, Artificial Sequence
  Description of Artificial Sequence: Synthetic oligonucleotide
agugagaggccccgcauau

SEQ ID NO: 2305656 - RNA, 19 nt, Artificial Sequence
  Description of Artificial Sequence: Synthetic oligonucleotide
cucuugcccucaaaacggg

SEQ ID NO: 2305657 - RNA, 19 nt, Artificial Sequence
  Description of Artificial Sequence: Synthetic oligonucleotide
gcucuugcccucaaaacgg

SEQ ID NO: 2305658 - RNA, 19 nt, Artificial Sequence
  Description of Artificial Sequence: Synthetic oligonucleotide
cacaugcgcuucuucuugg

SEQ ID NO: 2305659 - RNA, 19 nt, Artificial Sequence
  Description of Artificial Sequence: Synthetic oligonucleotide
agaggcccacagcucuugc

SEQ ID NO: 2305660 - RNA, 19 nt, Artificial Sequence
  Description of Artificial Sequence: Synthetic oligonucleotide
uaauggucagguccccaaa

SEQ ID NO: 2305661 - RNA, 19 nt, Artificial Sequence
  Description of Artificial Sequence: Synthetic oligonucleotide
agcgggcucagacacagaa

SEQ ID NO: 2305662 - RNA, 19 nt, Artificial Sequence
  Description of Artificial Sequence: Synthetic oligonucleotide
auggagucauuccuccgca

SEQ ID NO: 2305663 - RNA, 19 nt, Artificial Sequence
  Description of Artificial Sequence: Synthetic oligonucleotide
auauccuggcugacagugc

SEQ ID NO: 2305664 - RNA, 19 nt, Artificial Sequence
  Description of Artificial Sequence: Synthetic oligonucleotide
cagguauccaggcacuguc

SEQ ID NO: 2305665 - RNA, 19 nt, Artificial Sequence
  Description of Artificial Sequence: Synthetic oligonucleotide
gcaucaaucagucaguaau

SEQ ID NO: 2305666 - RNA, 19 nt, Artificial Sequence
  Description of Artificial Sequence: Synthetic oligonucleotide
cugcaugucuacuaccaca

SEQ ID NO: 2305667 - RNA, 19 nt, Artificial Sequence
  Description of Artificial Sequence: Synthetic oligonucleotide
agauggcaaaaccacccau

SEQ ID NO: 2305668 - RNA, 19 nt, Artificial Sequence
  Description of Artificial Sequence: Synthetic oligonucleotide
ggugaucgcgcugaaaccc

SEQ ID NO: 2305669 - RNA, 19 nt, Artificial Sequence
  Description of Artificial Sequence: Synthetic oligonucleotide
agacuaugagacgcugggg

SEQ ID NO: 2305670 - RNA, 19 nt, Artificial Sequence
  Description of Artificial Sequence: Synthetic oligonucleotide
cacggugcaggugaucgcg

SEQ ID NO: 2305671 - RNA, 19 nt, Artificial Sequence
  Description of Artificial Sequence: Synthetic oligonucleotide
ugucuuggucuucccacuc

SEQ ID NO: 2305672 - RNA, 19 nt, Artificial Sequence
  Description of Artificial Sequence: Synthetic oligonucleotide
gacgaccagaccaggcccg

SEQ ID NO: 2305673 - RNA, 19 nt, Artificial Sequence
  Description of Artificial Sequence: Synthetic oligonucleotide
uccucaggcugcccagcgg

SEQ ID NO: 2305674 - RNA, 19 nt, Artificial Sequence
  Description of Artificial Sequence: Synthetic oligonucleotide
guauccaggcacugucuug

SEQ ID NO: 2305675 - RNA, 19 nt, Artificial Sequence
  Description of Artificial Sequence: Synthetic oligonucleotide
ugagcgaaaccgcggccga

SEQ ID NO: 2305676 - RNA, 19 nt, Artificial Sequence
  Description of Artificial Sequence: Synthetic oligonucleotide
gaugcuucauagauggagu

SEQ ID NO: 2305677 - RNA, 19 nt, Artificial Sequence
  Description of Artificial Sequence: Synthetic oligonucleotide
agggaaccccauccauggc

SEQ ID NO: 2305678 - RNA, 19 nt, Artificial Sequence
  Description of Artificial Sequence: Synthetic oligonucleotide
ucacgaucugcaugucuac

SEQ ID NO: 2305679 - RNA, 19 nt, Artificial Sequence
  Description of Artificial Sequence: Synthetic oligonucleotide
caguguaaagggaacccca

SEQ ID NO: 2305680 - RNA, 19 nt, Artificial Sequence
  Description of Artificial Sequence: Synthetic oligonucleotide
agagacuggaugcuucaua

SEQ ID NO: 2305681 - RNA, 19 nt, Artificial Sequence
  Description of Artificial Sequence: Synthetic oligonucleotide
gacaaguucagaggcccac

SEQ ID NO: 2305682 - RNA, 19 nt, Artificial Sequence
  Description of Artificial Sequence: Synthetic oligonucleotide
aaaccgcggccgaagcugg

SEQ ID NO: 2305683 - RNA, 19 nt, Artificial Sequence
  Description of Artificial Sequence: Synthetic oligonucleotide
augucugccagcgacuuaa

SEQ ID NO: 2305684 - RNA, 19 nt, Artificial Sequence
  Description of Artificial Sequence: Synthetic oligonucleotide
augcucgagagccuauccu

SEQ ID NO: 2305685 - RNA, 19 nt, Artificial Sequence
  Description of Artificial Sequence: Synthetic oligonucleotide
acgaucugcaugucuacua

SEQ ID NO: 2305686 - RNA, 19 nt, Artificial Sequence
  Description of Artificial Sequence: Synthetic oligonucleotide
uccgccccggaauccaucc

SEQ ID NO: 2305687 - RNA, 19 nt, Artificial Sequence
  Description of Artificial Sequence: Synthetic oligonucleotide
caaaaccacccaugucccc

SEQ ID NO: 2305688 - RNA, 19 nt, Artificial Sequence
  Description of Artificial Sequence: Synthetic oligonucleotide
gccauaguuauacuccuuc

SEQ ID NO: 2305689 - RNA, 19 nt, Artificial Sequence
  Description of Artificial Sequence: Synthetic oligonucleotide
acacacaaccaugucggca

SEQ ID NO: 2305690 - RNA, 19 nt, Artificial Sequence
  Description of Artificial Sequence: Synthetic oligonucleotide
aucacgaucugcaugucua

SEQ ID NO: 2305691 - RNA, 19 nt, Artificial Sequence
  Description of Artificial Sequence: Synthetic oligonucleotide
agcuucacacacaugcgcu

SEQ ID NO: 2305692 - RNA, 19 nt, Artificial Sequence
  Description of Artificial Sequence: Synthetic oligonucleotide
cauuccuccgcagagugga

SEQ ID NO: 2305693 - RNA, 19 nt, Artificial Sequence
  Description of Artificial Sequence: Synthetic oligonucleotide
guuaaggcugacgaccaga

SEQ ID NO: 2305694 - RNA, 19 nt, Artificial Sequence
  Description of Artificial Sequence: Synthetic oligonucleotide
uggauccagugagaggccc

SEQ ID NO: 2305695 - RNA, 19 nt, Artificial Sequence
  Description of Artificial Sequence: Synthetic oligonucleotide
gaggcccacagcucuugcc

SEQ ID NO: 2305696 - RNA, 19 nt, Artificial Sequence
  Description of Artificial Sequence: Synthetic oligonucleotide
uccuagacaguguccgcuc

SEQ ID NO: 2305697 - RNA, 19 nt, Artificial Sequence
  Description of Artificial Sequence: Synthetic oligonucleotide
gugaucgcgcugaaacccg

SEQ ID NO: 2305698 - RNA, 19 nt, Artificial Sequence
  Description of Artificial Sequence: Synthetic oligonucleotide
uucuugcaccagauggcaa

SEQ ID NO: 2305699 - RNA, 19 nt, Artificial Sequence
  Description of Artificial Sequence: Synthetic oligonucleotide
accauagagacuggaugcu

SEQ ID NO: 2305700 - RNA, 19 nt, Artificial Sequence
  Description of Artificial Sequence: Synthetic oligonucleotide
agauaccauagagacugga

SEQ ID NO: 2305701 - RNA, 19 nt, Artificial Sequence
  Description of Artificial Sequence: Synthetic oligonucleotide
ccggaauccauccucccgg

SEQ ID NO: 2305702 - RNA, 19 nt, Artificial Sequence
  Description of Artificial Sequence: Synthetic oligonucleotide
gcgguguuaaggcugacga

SEQ ID NO: 2305703 - RNA, 19 nt, Artificial Sequence
  Description of Artificial Sequence: Synthetic oligonucleotide
uguccgcucaggguggcug

SEQ ID NO: 2305704 - RNA, 19 nt, Artificial Sequence
  Description of Artificial Sequence: Synthetic oligonucleotide
uggucuucccacucaguuu

SEQ ID NO: 2305705 - RNA, 19 nt, Artificial Sequence
  Description of Artificial Sequence: Synthetic oligonucleotide
cuuguccaucacgaucugc

SEQ ID NO: 2305706 - RNA, 19 nt, Artificial Sequence
  Description of Artificial Sequence: Synthetic oligonucleotide
caguguccgcucagggugg

SEQ ID NO: 2305707 - RNA, 19 nt, Artificial Sequence
  Description of Artificial Sequence: Synthetic oligonucleotide
agagggucguucacuguag

SEQ ID NO: 2305708 - RNA, 19 nt, Artificial Sequence
  Description of Artificial Sequence: Synthetic oligonucleotide
ccuauccuagacagugucc

SEQ ID NO: 2305709 - RNA, 19 nt, Artificial Sequence
  Description of Artificial Sequence: Synthetic oligonucleotide
agcgaaaccgcggccgaag

SEQ ID NO: 2305710 - RNA, 19 nt, Artificial Sequence
  Description of Artificial Sequence: Synthetic oligonucleotide
gcucagacacagaaaguag

SEQ ID NO: 2305711 - RNA, 19 nt, Artificial Sequence
  Description of Artificial Sequence: Synthetic oligonucleotide
gaucgcgcugaaacccggg

SEQ ID NO: 2305712 - RNA, 19 nt, Artificial Sequence
  Description of Artificial Sequence: Synthetic oligonucleotide
aguguaaagggaaccccau

SEQ ID NO: 2305713 - RNA, 19 nt, Artificial Sequence
  Description of Artificial Sequence: Synthetic oligonucleotide
cagaaaguagccggcuuuc

SEQ ID NO: 2305714 - RNA, 19 nt, Artificial Sequence
  Description of Artificial Sequence: Synthetic oligonucleotide
ggauuucuugcaccagaug

SEQ ID NO: 2305715 - RNA, 19 nt, Artificial Sequence
  Description of Artificial Sequence: Synthetic oligonucleotide
acaugcgcuucuucuugga

SEQ ID NO: 2305716 - RNA, 19 nt, Artificial Sequence
  Description of Artificial Sequence: Synthetic oligonucleotide
ucccacucaguuucacguc

SEQ ID NO: 2305717 - RNA, 19 nt, Artificial Sequence
  Description of Artificial Sequence: Synthetic oligonucleotide
cugcccagcgggcucagac

SEQ ID NO: 2305718 - RNA, 19 nt, Artificial Sequence
  Description of Artificial Sequence: Synthetic oligonucleotide
cuaccacauuguccugagg

SEQ ID NO: 2305719 - RNA, 19 nt, Artificial Sequence
  Description of Artificial Sequence: Synthetic oligonucleotide
acacagaaaguagccggcu

SEQ ID NO: 2305720 - RNA, 19 nt, Artificial Sequence
  Description of Artificial Sequence: Synthetic oligonucleotide
agucauuccuccgcagagu

SEQ ID NO: 2305721 - RNA, 19 nt, Artificial Sequence
  Description of Artificial Sequence: Synthetic oligonucleotide
uuccuccgcagaguggaug

SEQ ID NO: 2305722 - RNA, 19 nt, Artificial Sequence
  Description of Artificial Sequence: Synthetic oligonucleotide
agaaaguagccggcuuucu

SEQ ID NO: 2305723 - RNA, 19 nt, Artificial Sequence
  Description of Artificial Sequence: Synthetic oligonucleotide
guguuaaggcugacgacca

SEQ ID NO: 2305724 - RNA, 19 nt, Artificial Sequence
  Description of Artificial Sequence: Synthetic oligonucleotide
acaaguucagaggcccaca

SEQ ID NO: 2305725 - RNA, 19 nt, Artificial Sequence
  Description of Artificial Sequence: Synthetic oligonucleotide
acacgcagguauccaggca

SEQ ID NO: 2305726 - RNA, 19 nt, Artificial Sequence
  Description of Artificial Sequence: Synthetic oligonucleotide
gggcaccugaggcagagac

SEQ ID NO: 2305727 - RNA, 19 nt, Artificial Sequence
  Description of Artificial Sequence: Synthetic oligonucleotide
agaccaggcccgccagcgg

SEQ ID NO: 2305728 - RNA, 19 nt, Artificial Sequence
  Description of Artificial Sequence: Synthetic oligonucleotide
cugccagcgacuuaauggu

SEQ ID NO: 2305729 - RNA, 19 nt, Artificial Sequence
  Description of Artificial Sequence: Synthetic oligonucleotide
ggggcggcgguguuaaggc

SEQ ID NO: 2305730 - RNA, 19 nt, Artificial Sequence
  Description of Artificial Sequence: Synthetic oligonucleotide
ugacagugcggggcuuggg

SEQ ID NO: 2305731 - RNA, 19 nt, Artificial Sequence
  Description of Artificial Sequence: Synthetic oligonucleotide
ccacacgcagguauccagg

SEQ ID NO: 2305732 - RNA, 19 nt, Artificial Sequence
  Description of Artificial Sequence: Synthetic oligonucleotide
ugccagcgacuuaaugguc

SEQ ID NO: 2305733 - RNA, 19 nt, Artificial Sequence
  Description of Artificial Sequence: Synthetic oligonucleotide
acgaccagaccaggcccgc

SEQ ID NO: 2305734 - RNA, 19 nt, Artificial Sequence
  Description of Artificial Sequence: Synthetic oligonucleotide
cgcauauccuggcugacag

SEQ ID NO: 2305735 - RNA, 19 nt, Artificial Sequence
  Description of Artificial Sequence: Synthetic oligonucleotide
gggucguucacuguagaga

SEQ ID NO: 2305736 - RNA, 19 nt, Artificial Sequence
  Description of Artificial Sequence: Synthetic oligonucleotide
cuacuaccacauuguccug

SEQ ID NO: 2305737 - RNA, 19 nt, Artificial Sequence
  Description of Artificial Sequence: Synthetic oligonucleotide
gagggucguucacuguaga

SEQ ID NO: 2305738 - RNA, 19 nt, Artificial Sequence
  Description of Artificial Sequence: Synthetic oligonucleotide
agaagguacuaacgcccuu

SEQ ID NO: 2305739 - RNA, 19 nt, Artificial Sequence
  Description of Artificial Sequence: Synthetic oligonucleotide
cagcugcugucuuuuccac

SEQ ID NO: 2305740 - RNA, 19 nt, Artificial Sequence
  Description of Artificial Sequence: Synthetic oligonucleotide
acggugcaggugaucgcgc

SEQ ID NO: 2305741 - RNA, 19 nt, Artificial Sequence
  Description of Artificial Sequence: Synthetic oligonucleotide
gccuauccuagacaguguc

SEQ ID NO: 2305742 - RNA, 19 nt, Artificial Sequence
  Description of Artificial Sequence: Synthetic oligonucleotide
ggaaccccauccauggcug

SEQ ID NO: 2305743 - RNA, 19 nt, Artificial Sequence
  Description of Artificial Sequence: Synthetic oligonucleotide
gggcaucagcuucacacac

SEQ ID NO: 2305744 - RNA, 19 nt, Artificial Sequence
  Description of Artificial Sequence: Synthetic oligonucleotide
ggcgguguuaaggcugacg

SEQ ID NO: 2305745 - RNA, 19 nt, Artificial Sequence
  Description of Artificial Sequence: Synthetic oligonucleotide
ggcugagauaccauagaga

SEQ ID NO: 2305746 - RNA, 19 nt, Artificial Sequence
  Description of Artificial Sequence: Synthetic oligonucleotide
ccuuugcugggcugugugg

SEQ ID NO: 2305747 - RNA, 19 nt, Artificial Sequence
  Description of Artificial Sequence: Synthetic oligonucleotide
cuuaauggucaggucccca

SEQ ID NO: 2305748 - RNA, 19 nt, Artificial Sequence
  Description of Artificial Sequence: Synthetic oligonucleotide
auccagugagaggccccgc

SEQ ID NO: 2305749 - RNA, 19 nt, Artificial Sequence
  Description of Artificial Sequence: Synthetic oligonucleotide
uggaugcucgagagccuau

SEQ ID NO: 2305750 - RNA, 19 nt, Artificial Sequence
  Description of Artificial Sequence: Synthetic oligonucleotide
ccuuggauuucuugcacca

SEQ ID NO: 2305751 - RNA, 19 nt, Artificial Sequence
  Description of Artificial Sequence: Synthetic oligonucleotide
ggagucuagagggucguuc

SEQ ID NO: 2305752 - RNA, 19 nt, Artificial Sequence
  Description of Artificial Sequence: Synthetic oligonucleotide
gcagacaaguucagaggcc

SEQ ID NO: 2305753 - RNA, 19 nt, Artificial Sequence
  Description of Artificial Sequence: Synthetic oligonucleotide
caggcgugcagcugcuguc

SEQ ID NO: 2305754 - RNA, 19 nt, Artificial Sequence
  Description of Artificial Sequence: Synthetic oligonucleotide
gucguucacuguagagaag

SEQ ID NO: 2305755 - RNA, 19 nt, Artificial Sequence
  Description of Artificial Sequence: Synthetic oligonucleotide
uccauccucccggggagcu

SEQ ID NO: 2305756 - RNA, 19 nt, Artificial Sequence
  Description of Artificial Sequence: Synthetic oligonucleotide
cucgagagccuauccuaga

SEQ ID NO: 2305757 - RNA, 19 nt, Artificial Sequence
  Description of Artificial Sequence: Synthetic oligonucleotide
ccagcgacuuaauggucag

SEQ ID NO: 2305758 - RNA, 19 nt, Artificial Sequence
  Description of Artificial Sequence: Synthetic oligonucleotide
aaccgcggccgaagcuggc

SEQ ID NO: 2305759 - RNA, 19 nt, Artificial Sequence
  Description of Artificial Sequence: Synthetic oligonucleotide
uagagacuggaugcuucau

SEQ ID NO: 2305760 - RNA, 19 nt, Artificial Sequence
  Description of Artificial Sequence: Synthetic oligonucleotide
cccggaauccauccucccg

SEQ ID NO: 2305761 - RNA, 19 nt, Artificial Sequence
  Description of Artificial Sequence: Synthetic oligonucleotide
caguuucacgucacacaca

SEQ ID NO: 2305762 - RNA, 19 nt, Artificial Sequence
  Description of Artificial Sequence: Synthetic oligonucleotide
gcucgagagccuauccuag

SEQ ID NO: 2305763 - RNA, 19 nt, Artificial Sequence
  Description of Artificial Sequence: Synthetic oligonucleotide
guccgcucaggguggcugc

SEQ ID NO: 2305764 - RNA, 19 nt, Artificial Sequence
  Description of Artificial Sequence: Synthetic oligonucleotide
aagcuggcggucgcgcccu

SEQ ID NO: 2305765 - RNA, 19 nt, Artificial Sequence
  Description of Artificial Sequence: Synthetic oligonucleotide
cugagauaccauagagacu

SEQ ID NO: 2305766 - RNA, 19 nt, Artificial Sequence
  Description of Artificial Sequence: Synthetic oligonucleotide
gaaccccauccauggcuga

SEQ ID NO: 2305767 - RNA, 19 nt, Artificial Sequence
  Description of Artificial Sequence: Synthetic oligonucleotide
ggcggucgcgcccuccacg

SEQ ID NO: 2305768 - RNA, 19 nt, Artificial Sequence
  Description of Artificial Sequence: Synthetic oligonucleotide
ggucgcgcccuccacggug

SEQ ID NO: 2305769 - RNA, 19 nt, Artificial Sequence
  Description of Artificial Sequence: Synthetic oligonucleotide
cagaagguacuaacgcccu

SEQ ID NO: 2305770 - RNA, 19 nt, Artificial Sequence
  Description of Artificial Sequence: Synthetic oligonucleotide
agacaaguucagaggccca

SEQ ID NO: 2305771 - RNA, 19 nt, Artificial Sequence
  Description of Artificial Sequence: Synthetic oligonucleotide
cgaucugcaugucuacuac

SEQ ID NO: 2305772 - RNA, 19 nt, Artificial Sequence
  Description of Artificial Sequence: Synthetic oligonucleotide
ugucugccagcgacuuaau

SEQ ID NO: 2305773 - RNA, 19 nt, Artificial Sequence
  Description of Artificial Sequence: Synthetic oligonucleotide
cagcgacuuaauggucagg

SEQ ID NO: 2305774 - RNA, 19 nt, Artificial Sequence
  Description of Artificial Sequence: Synthetic oligonucleotide
agagccuauccuagacagu

SEQ ID NO: 2305775 - RNA, 19 nt, Artificial Sequence
  Description of Artificial Sequence: Synthetic oligonucleotide
gcugucuuuuccaccacga

SEQ ID NO: 2305776 - RNA, 19 nt, Artificial Sequence
  Description of Artificial Sequence: Synthetic oligonucleotide
gcaccugaggcagagacua

SEQ ID NO: 2305777 - RNA, 19 nt, Artificial Sequence
  Description of Artificial Sequence: Synthetic oligonucleotide
auccaggcacugucuuggu

SEQ ID NO: 2305778 - RNA, 19 nt, Artificial Sequence
  Description of Artificial Sequence: Synthetic oligonucleotide
ggcggcgguguuaaggcug

SEQ ID NO: 2305779 - RNA, 19 nt, Artificial Sequence
  Description of Artificial Sequence: Synthetic oligonucleotide
gggaaccccauccauggcu

SEQ ID NO: 2305780 - RNA, 19 nt, Artificial Sequence
  Description of Artificial Sequence: Synthetic oligonucleotide
gcuguguggguggauccag

SEQ ID NO: 2305781 - RNA, 19 nt, Artificial Sequence
  Description of Artificial Sequence: Synthetic oligonucleotide
cacucaguuucacgucaca

SEQ ID NO: 2305782 - RNA, 19 nt, Artificial Sequence
  Description of Artificial Sequence: Synthetic oligonucleotide
gccagcgacuuaaugguca

SEQ ID NO: 2305783 - RNA, 19 nt, Artificial Sequence
  Description of Artificial Sequence: Synthetic oligonucleotide
cguucacuguagagaagcc

SEQ ID NO: 2305784 - RNA, 19 nt, Artificial Sequence
  Description of Artificial Sequence: Synthetic oligonucleotide
cuugcaccagauggcaaaa

SEQ ID NO: 2305785 - RNA, 19 nt, Artificial Sequence
  Description of Artificial Sequence: Synthetic oligonucleotide
cuccgcagaguggaugcuc

SEQ ID NO: 2305786 - RNA, 19 nt, Artificial Sequence
  Description of Artificial Sequence: Synthetic oligonucleotide
gcccagcgggcucagacac

SEQ ID NO: 2305787 - RNA, 19 nt, Artificial Sequence
  Description of Artificial Sequence: Synthetic oligonucleotide
ggcaucaaucagucaguaa

SEQ ID NO: 2305788 - RNA, 19 nt, Artificial Sequence
  Description of Artificial Sequence: Synthetic oligonucleotide
ccagcgggcucagacacag

SEQ ID NO: 2305789 - RNA, 19 nt, Artificial Sequence
  Description of Artificial Sequence: Synthetic oligonucleotide
ccggcuuucugagcgaaac

SEQ ID NO: 2305790 - RNA, 19 nt, Artificial Sequence
  Description of Artificial Sequence: Synthetic oligonucleotide
cauccucccggggagcuca

SEQ ID NO: 2305791 - RNA, 19 nt, Artificial Sequence
  Description of Artificial Sequence: Synthetic oligonucleotide
ucuuggggccuuggauuuc

SEQ ID NO: 2305792 - RNA, 19 nt, Artificial Sequence
  Description of Artificial Sequence: Synthetic oligonucleotide
gggugcaguguaaagggaa

SEQ ID NO: 2305793 - RNA, 19 nt, Artificial Sequence
  Description of Artificial Sequence: Synthetic oligonucleotide
agccuauccuagacagugu

SEQ ID NO: 2305794 - RNA, 19 nt, Artificial Sequence
  Description of Artificial Sequence: Synthetic oligonucleotide
cagaggcccacagcucuug

SEQ ID NO: 2305795 - RNA, 19 nt, Artificial Sequence
  Description of Artificial Sequence: Synthetic oligonucleotide
ggucuuggggccuuggauu

SEQ ID NO: 2305796 - RNA, 19 nt, Artificial Sequence
  Description of Artificial Sequence: Synthetic oligonucleotide
gucgcgcccuccacggugc

SEQ ID NO: 2305797 - RNA, 19 nt, Artificial Sequence
  Description of Artificial Sequence: Synthetic oligonucleotide
cuggucuuggggccuugga

SEQ ID NO: 2305798 - RNA, 19 nt, Artificial Sequence
  Description of Artificial Sequence: Synthetic oligonucleotide
cugucuuggucuucccacu

SEQ ID NO: 2305799 - RNA, 19 nt, Artificial Sequence
  Description of Artificial Sequence: Synthetic oligonucleotide
cccuccacggugcagguga

SEQ ID NO: 2305800 - RNA, 19 nt, Artificial Sequence
  Description of Artificial Sequence: Synthetic oligonucleotide
agugcggggcuugggcacu

SEQ ID NO: 2305801 - RNA, 19 nt, Artificial Sequence
  Description of Artificial Sequence: Synthetic oligonucleotide
acgcagguauccaggcacu

SEQ ID NO: 2305802 - RNA, 19 nt, Artificial Sequence
  Description of Artificial Sequence: Synthetic oligonucleotide
ccacucaguuucacgucac

SEQ ID NO: 2305803 - RNA, 19 nt, Artificial Sequence
  Description of Artificial Sequence: Synthetic oligonucleotide
guaaugcugggaggcaggu

SEQ ID NO: 2305804 - RNA, 19 nt, Artificial Sequence
  Description of Artificial Sequence: Synthetic oligonucleotide
cacguccgccccggaaucc

SEQ ID NO: 2305805 - RNA, 19 nt, Artificial Sequence
  Description of Artificial Sequence: Synthetic oligonucleotide
ggagcucagaagguacuaa

SEQ ID NO: 2305806 - RNA, 19 nt, Artificial Sequence
  Description of Artificial Sequence: Synthetic oligonucleotide
cacacaugcgcuucuucuu

SEQ ID NO: 2305807 - RNA, 19 nt, Artificial Sequence
  Description of Artificial Sequence: Synthetic oligonucleotide
cagugagaggccccgcaua

SEQ ID NO: 2305808 - RNA, 19 nt, Artificial Sequence
  Description of Artificial Sequence: Synthetic oligonucleotide
ggcugacgaccagaccagg

SEQ ID NO: 2305809 - RNA, 19 nt, Artificial Sequence
  Description of Artificial Sequence: Synthetic oligonucleotide
agccauaguuauacuccuu

SEQ ID NO: 2305810 - RNA, 19 nt, Artificial Sequence
  Description of Artificial Sequence: Synthetic oligonucleotide
uggcggucgcgcccuccac

SEQ ID NO: 2305811 - RNA, 19 nt, Artificial Sequence
  Description of Artificial Sequence: Synthetic oligonucleotide
cuagagggucguucacugu

SEQ ID NO: 2305812 - RNA, 19 nt, Artificial Sequence
  Description of Artificial Sequence: Synthetic oligonucleotide
cggaauccauccucccggg

SEQ ID NO: 2305813 - RNA, 19 nt, Artificial Sequence
  Description of Artificial Sequence: Synthetic oligonucleotide
guggguggauccagugaga

SEQ ID NO: 2305814 - RNA, 19 nt, Artificial Sequence
  Description of Artificial Sequence: Synthetic oligonucleotide
ggaugcucgagagccuauc

SEQ ID NO: 2305815 - RNA, 19 nt, Artificial Sequence
  Description of Artificial Sequence: Synthetic oligonucleotide
ccauaguuauacuccuucu

SEQ ID NO: 2305816 - RNA, 19 nt, Artificial Sequence
  Description of Artificial Sequence: Synthetic oligonucleotide
ggcuccacguccgccccgg

SEQ ID NO: 2305817 - RNA, 19 nt, Artificial Sequence
  Description of Artificial Sequence: Synthetic oligonucleotide
cggggagcucagaagguac

SEQ ID NO: 2305818 - RNA, 19 nt, Artificial Sequence
  Description of Artificial Sequence: Synthetic oligonucleotide
cugccuuugcugggcugug

SEQ ID NO: 2305819 - RNA, 19 nt, Artificial Sequence
  Description of Artificial Sequence: Synthetic oligonucleotide
uuggggccuuggauuucuu

SEQ ID NO: 2305820 - RNA, 19 nt, Artificial Sequence
  Description of Artificial Sequence: Synthetic oligonucleotide
ccauggcugagauaccaua

SEQ ID NO: 2305821 - RNA, 19 nt, Artificial Sequence
  Description of Artificial Sequence: Synthetic oligonucleotide
uggagucuagagggucguu

SEQ ID NO: 2305822 - RNA, 19 nt, Artificial Sequence
  Description of Artificial Sequence: Synthetic oligonucleotide
agccggcuuucugagcgaa

SEQ ID NO: 2305823 - RNA, 19 nt, Artificial Sequence
  Description of Artificial Sequence: Synthetic oligonucleotide
gccccggaauccauccucc

SEQ ID NO: 2305824 - RNA, 19 nt, Artificial Sequence
  Description of Artificial Sequence: Synthetic oligonucleotide
ccacggugcaggugaucgc

SEQ ID NO: 2305825 - RNA, 19 nt, Artificial Sequence
  Description of Artificial Sequence: Synthetic oligonucleotide
cgguguuaaggcugacgac

SEQ ID NO: 2305826 - RNA, 19 nt, Artificial Sequence
  Description of Artificial Sequence: Synthetic oligonucleotide
ccuagacaguguccgcuca

SEQ ID NO: 2305827 - RNA, 19 nt, Artificial Sequence
  Description of Artificial Sequence: Synthetic oligonucleotide
cuucauagauggagucauu

SEQ ID NO: 2305828 - RNA, 19 nt, Artificial Sequence
  Description of Artificial Sequence: Synthetic oligonucleotide
cggcuuucugagcgaaacc

SEQ ID NO: 2305829 - RNA, 19 nt, Artificial Sequence
  Description of Artificial Sequence: Synthetic oligonucleotide
ucgcgcccuccacggugca

SEQ ID NO: 2305830 - RNA, 19 nt, Artificial Sequence
  Description of Artificial Sequence: Synthetic oligonucleotide
cacgaucugcaugucuacu

SEQ ID NO: 2305831 - RNA, 19 nt, Artificial Sequence
  Description of Artificial Sequence: Synthetic oligonucleotide
cgaagcuggcggucgcgcc

SEQ ID NO: 2305832 - RNA, 19 nt, Artificial Sequence
  Description of Artificial Sequence: Synthetic oligonucleotide
gccgaagcuggcggucgcg

SEQ ID NO: 2305833 - RNA, 19 nt, Artificial Sequence
  Description of Artificial Sequence: Synthetic oligonucleotide
cuguguggguggauccagu

SEQ ID NO: 2305834 - RNA, 19 nt, Artificial Sequence
  Description of Artificial Sequence: Synthetic oligonucleotide
ggccgaagcuggcggucgc

SEQ ID NO: 2305835 - RNA, 19 nt, Artificial Sequence
  Description of Artificial Sequence: Synthetic oligonucleotide
caggcccgccagcggcucc

SEQ ID NO: 2305836 - RNA, 19 nt, Artificial Sequence
  Description of Artificial Sequence: Synthetic oligonucleotide
gcaggcgugcagcugcugu

SEQ ID NO: 2305837 - RNA, 19 nt, Artificial Sequence
  Description of Artificial Sequence: Synthetic oligonucleotide
cuccacguccgccccggaa

SEQ ID NO: 2305838 - RNA, 19 nt, Artificial Sequence
  Description of Artificial Sequence: Synthetic oligonucleotide
cgcagaguggaugcucgag

SEQ ID NO: 2305839 - RNA, 19 nt, Artificial Sequence
  Description of Artificial Sequence: Synthetic oligonucleotide
gagcgaaaccgcggccgaa

SEQ ID NO: 2305840 - RNA, 19 nt, Artificial Sequence
  Description of Artificial Sequence: Synthetic oligonucleotide
ccgaagcuggcggucgcgc

SEQ ID NO: 2305841 - RNA, 19 nt, Artificial Sequence
  Description of Artificial Sequence: Synthetic oligonucleotide
cuccacggugcaggugauc

SEQ ID NO: 2305842 - RNA, 19 nt, Artificial Sequence
  Description of Artificial Sequence: Synthetic oligonucleotide
gggagcucagaagguacua

SEQ ID NO: 2305843 - RNA, 19 nt, Artificial Sequence
  Description of Artificial Sequence: Synthetic oligonucleotide
cacuguagagaagccggau

SEQ ID NO: 2305844 - RNA, 19 nt, Artificial Sequence
  Description of Artificial Sequence: Synthetic oligonucleotide
gggcaucaaucagucagua

SEQ ID NO: 2305845 - RNA, 19 nt, Artificial Sequence
  Description of Artificial Sequence: Synthetic oligonucleotide
gcugccuuugcugggcugu

SEQ ID NO: 2305846 - RNA, 19 nt, Artificial Sequence
  Description of Artificial Sequence: Synthetic oligonucleotide
ccacguccgccccggaauc

SEQ ID NO: 2305847 - RNA, 19 nt, Artificial Sequence
  Description of Artificial Sequence: Synthetic oligonucleotide
guccgccccggaauccauc

SEQ ID NO: 2305848 - RNA, 19 nt, Artificial Sequence
  Description of Artificial Sequence: Synthetic oligonucleotide
gcauauccuggcugacagu

SEQ ID NO: 2305849 - RNA, 19 nt, Artificial Sequence
  Description of Artificial Sequence: Synthetic oligonucleotide
cgccccggaauccauccuc

SEQ ID NO: 2305850 - RNA, 19 nt, Artificial Sequence
  Description of Artificial Sequence: Synthetic oligonucleotide
gcggcgguguuaaggcuga

SEQ ID NO: 2305851 - RNA, 19 nt, Artificial Sequence
  Description of Artificial Sequence: Synthetic oligonucleotide
ggggagcucagaagguacu

SEQ ID NO: 2305852 - RNA, 19 nt, Artificial Sequence
  Description of Artificial Sequence: Synthetic oligonucleotide
ccaccacgaagccauaguu

SEQ ID NO: 2305853 - RNA, 19 nt, Artificial Sequence
  Description of Artificial Sequence: Synthetic oligonucleotide
ccacgaagccauaguuaua

SEQ ID NO: 2305854 - RNA, 19 nt, Artificial Sequence
  Description of Artificial Sequence: Synthetic oligonucleotide
gggcucagacacagaaagu

SEQ ID NO: 2305855 - RNA, 19 nt, Artificial Sequence
  Description of Artificial Sequence: Synthetic oligonucleotide
cccgcauauccuggcugac

SEQ ID NO: 2305856 - RNA, 19 nt, Artificial Sequence
  Description of Artificial Sequence: Synthetic oligonucleotide
ccgcauauccuggcugaca

SEQ ID NO: 2305857 - RNA, 19 nt, Artificial Sequence
  Description of Artificial Sequence: Synthetic oligonucleotide
gcaggugaucgcgcugaaa

SEQ ID NO: 2305858 - RNA, 19 nt, Artificial Sequence
  Description of Artificial Sequence: Synthetic oligonucleotide
cagcgggcucagacacaga

SEQ ID NO: 2305859 - RNA, 19 nt, Artificial Sequence
  Description of Artificial Sequence: Synthetic oligonucleotide
ccgccagcggcuccacguc

SEQ ID NO: 2305860 - RNA, 19 nt, Artificial Sequence
  Description of Artificial Sequence: Synthetic oligonucleotide
cggccgaagcuggcggucg

SEQ ID NO: 2305861 - RNA, 19 nt, Artificial Sequence
  Description of Artificial Sequence: Synthetic oligonucleotide
ggcacuggucuuggggccu

SEQ ID NO: 2305862 - RNA, 19 nt, Artificial Sequence
  Description of Artificial Sequence: Synthetic oligonucleotide
ggcaggcgugcagcugcug

SEQ ID NO: 2305863 - RNA, 19 nt, Artificial Sequence
  Description of Artificial Sequence: Synthetic oligonucleotide
gcuggcggucgcgcccucc

SEQ ID NO: 2305864 - RNA, 19 nt, Artificial Sequence
  Description of Artificial Sequence: Synthetic oligonucleotide
caccugaggcagagacuau

SEQ ID NO: 2305865 - RNA, 19 nt, Artificial Sequence
  Description of Artificial Sequence: Synthetic oligonucleotide
gcggccgaagcuggcgguc

SEQ ID NO: 2305866 - RNA, 19 nt, Artificial Sequence
  Description of Artificial Sequence: Synthetic oligonucleotide
cauuguccugaggguuccu

SEQ ID NO: 2305867 - RNA, 19 nt, Artificial Sequence
  Description of Artificial Sequence: Synthetic oligonucleotide
cccacagcucuugcccuca

SEQ ID NO: 2305868 - RNA, 19 nt, Artificial Sequence
  Description of Artificial Sequence: Synthetic oligonucleotide
ccgcagaguggaugcucga

SEQ ID NO: 2305869 - RNA, 19 nt, Artificial Sequence
  Description of Artificial Sequence: Synthetic oligonucleotide
ggcccuuguccaucacgau

SEQ ID NO: 2305870 - RNA, 19 nt, Artificial Sequence
  Description of Artificial Sequence: Synthetic oligonucleotide
gggcggcgguguuaaggcu

SEQ ID NO: 2305871 - RNA, 19 nt, Artificial Sequence
  Description of Artificial Sequence: Synthetic oligonucleotide
cccagcgggcucagacaca

SEQ ID NO: 2305872 - RNA, 19 nt, Artificial Sequence
  Description of Artificial Sequence: Synthetic oligonucleotide
ccggggagcucagaaggua

SEQ ID NO: 2305873 - RNA, 19 nt, Artificial Sequence
  Description of Artificial Sequence: Synthetic oligonucleotide
cgaccagaccaggcccgcc

SEQ ID NO: 2305874 - RNA, 19 nt, Artificial Sequence
  Description of Artificial Sequence: Synthetic oligonucleotide
cccggggagcucagaaggu

SEQ ID NO: 2305875 - RNA, 19 nt, Artificial Sequence
  Description of Artificial Sequence: Synthetic oligonucleotide
guguccgcucaggguggcu

SEQ ID NO: 2305876 - RNA, 19 nt, Artificial Sequence
  Description of Artificial Sequence: Synthetic oligonucleotide
gccggcuuucugagcgaaa

SEQ ID NO: 2305877 - RNA, 19 nt, Artificial Sequence
  Description of Artificial Sequence: Synthetic oligonucleotide
gcgugcagcugcugucuuu

SEQ ID NO: 2305878 - RNA, 19 nt, Artificial Sequence
  Description of Artificial Sequence: Synthetic oligonucleotide
cggcuccacguccgccccg

SEQ ID NO: 2305879 - RNA, 19 nt, Artificial Sequence
  Description of Artificial Sequence: Synthetic oligonucleotide
ggcgugcagcugcugucuu

SEQ ID NO: 2305880 - RNA, 19 nt, Artificial Sequence
  Description of Artificial Sequence: Synthetic oligonucleotide
ccaggcccgccagcggcuc

SEQ ID NO: 2305881 - RNA, 19 nt, Artificial Sequence
  Description of Artificial Sequence: Synthetic oligonucleotide
cgcgcccuccacggugcag

SEQ ID NO: 2305882 - RNA, 19 nt, Artificial Sequence
  Description of Artificial Sequence: Synthetic oligonucleotide
ccgccccggaauccauccu

SEQ ID NO: 2305883 - RNA, 19 nt, Artificial Sequence
  Description of Artificial Sequence: Synthetic oligonucleotide
cgcggccgaagcuggcggu

SEQ ID NO: 2305884 - RNA, 19 nt, Artificial Sequence
  Description of Artificial Sequence: Synthetic oligonucleotide
cggcgguguuaaggcugac

SEQ ID NO: 2305885 - RNA, 19 nt, Artificial Sequence
  Description of Artificial Sequence: Synthetic oligonucleotide
cguccgccccggaauccau

SEQ ID NO: 2305886 - RNA, 19 nt, Artificial Sequence
  Description of Artificial Sequence: Synthetic oligonucleotide
cgcccuccacggugcaggu

SEQ ID NO: 2305887 - RNA, 19 nt, Artificial Sequence
  Description of Artificial Sequence: Synthetic oligonucleotide
cggucgcgcccuccacggu

SEQ ID NO: 2305888 - RNA, 19 nt, Artificial Sequence
  Description of Artificial Sequence: Synthetic oligonucleotide
uagacauuuauuuugauca

SEQ ID NO: 2305889 - RNA, 19 nt, Artificial Sequence
  Description of Artificial Sequence: Synthetic oligonucleotide
uucaauuaaagcuaggaga

SEQ ID NO: 2305890 - RNA, 19 nt, Artificial Sequence
  Description of Artificial Sequence: Synthetic oligonucleotide
aaacuuaguaucuuuucuc

SEQ ID NO: 2305891 - RNA, 19 nt, Artificial Sequence
  Description of Artificial Sequence: Synthetic oligonucleotide
aauaacuguacacaagaca

SEQ ID NO: 2305892 - RNA, 19 nt, Artificial Sequence
  Description of Artificial Sequence: Synthetic oligonucleotide
auuucgaaaaccuuugaag

SEQ ID NO: 2305893 - RNA, 19 nt, Artificial Sequence
  Description of Artificial Sequence: Synthetic oligonucleotide
ucaaucauggaaaacaauc

SEQ ID NO: 2305894 - RNA, 19 nt, Artificial Sequence
  Description of Artificial Sequence: Synthetic oligonucleotide
ugaauaaauaaacuuagua

SEQ ID NO: 2305895 - RNA, 19 nt, Artificial Sequence
  Description of Artificial Sequence: Synthetic oligonucleotide
uuaauagcugucaaacucc

SEQ ID NO: 2305896 - RNA, 19 nt, Artificial Sequence
  Description of Artificial Sequence: Synthetic oligonucleotide
gaaggcuugaaagauaccg

SEQ ID NO: 2305897 - RNA, 19 nt, Artificial Sequence
  Description of Artificial Sequence: Synthetic oligonucleotide
uacacaagacaccaggcgg

SEQ ID NO: 2305898 - RNA, 19 nt, Artificial Sequence
  Description of Artificial Sequence: Synthetic oligonucleotide
aauuaaagcuaggagaaug

SEQ ID NO: 2305899 - RNA, 19 nt, Artificial Sequence
  Description of Artificial Sequence: Synthetic oligonucleotide
aaagcuaccucccaauugu

SEQ ID NO: 2305900 - RNA, 19 nt, Artificial Sequence
  Description of Artificial Sequence: Synthetic oligonucleotide
guuauuugcccuuuggucc

SEQ ID NO: 2305901 - RNA, 19 nt, Artificial Sequence
  Description of Artificial Sequence: Synthetic oligonucleotide
aaagcuaggagaaugccuc

SEQ ID NO: 2305902 - RNA, 19 nt, Artificial Sequence
  Description of Artificial Sequence: Synthetic oligonucleotide
acaaaugcaacccaagugu

SEQ ID NO: 2305903 - RNA, 19 nt, Artificial Sequence
  Description of Artificial Sequence: Synthetic oligonucleotide
uagggcuuuaaacagacug

SEQ ID NO: 2305904 - RNA, 19 nt, Artificial Sequence
  Description of Artificial Sequence: Synthetic oligonucleotide
guauuagacauuuauuuug

SEQ ID NO: 2305905 - RNA, 19 nt, Artificial Sequence
  Description of Artificial Sequence: Synthetic oligonucleotide
auggaaaacaauccucccc

SEQ ID NO: 2305906 - RNA, 19 nt, Artificial Sequence
  Description of Artificial Sequence: Synthetic oligonucleotide
uuugccucuuaucugaacc

SEQ ID NO: 2305907 - RNA, 19 nt, Artificial Sequence
  Description of Artificial Sequence: Synthetic oligonucleotide
acagacuguaacuugaucu

SEQ ID NO: 2305908 - RNA, 19 nt, Artificial Sequence
  Description of Artificial Sequence: Synthetic oligonucleotide
uaaacuuaguaucuuuucu

SEQ ID NO: 2305909 - RNA, 19 nt, Artificial Sequence
  Description of Artificial Sequence: Synthetic oligonucleotide
uguaacuugaucuucugaa

SEQ ID NO: 2305910 - RNA, 19 nt, Artificial Sequence
  Description of Artificial Sequence: Synthetic oligonucleotide
uauuagacauuuauuuuga

SEQ ID NO: 2305911 - RNA, 19 nt, Artificial Sequence
  Description of Artificial Sequence: Synthetic oligonucleotide
agcacauguacauguacgc

SEQ ID NO: 2305912 - RNA, 19 nt, Artificial Sequence
  Description of Artificial Sequence: Synthetic oligonucleotide
caaucauggaaaacaaucc

SEQ ID NO: 2305913 - RNA, 19 nt, Artificial Sequence
  Description of Artificial Sequence: Synthetic oligonucleotide
uccacaauccgccaggggc

SEQ ID NO: 2305914 - RNA, 19 nt, Artificial Sequence
  Description of Artificial Sequence: Synthetic oligonucleotide
uggaaaacaauccucccca

SEQ ID NO: 2305915 - RNA, 19 nt, Artificial Sequence
  Description of Artificial Sequence: Synthetic oligonucleotide
uaaacagacuguaacuuga

SEQ ID NO: 2305916 - RNA, 19 nt, Artificial Sequence
  Description of Artificial Sequence: Synthetic oligonucleotide
aauccuacugaacugcagu

SEQ ID NO: 2305917 - RNA, 19 nt, Artificial Sequence
  Description of Artificial Sequence: Synthetic oligonucleotide
cuuaguaucuuuucucccc

SEQ ID NO: 2305918 - RNA, 19 nt, Artificial Sequence
  Description of Artificial Sequence: Synthetic oligonucleotide
acuuaguaucuuuucuccc

SEQ ID NO: 2305919 - RNA, 19 nt, Artificial Sequence
  Description of Artificial Sequence: Synthetic oligonucleotide
ugguauuagacauuuauuu

SEQ ID NO: 2305920 - RNA, 19 nt, Artificial Sequence
  Description of Artificial Sequence: Synthetic oligonucleotide
cuuaucugaaccauacuac

SEQ ID NO: 2305921 - RNA, 19 nt, Artificial Sequence
  Description of Artificial Sequence: Synthetic oligonucleotide
auuaaagcuaggagaaugc

SEQ ID NO: 2305922 - RNA, 19 nt, Artificial Sequence
  Description of Artificial Sequence: Synthetic oligonucleotide
ugugaaugucucuucgugg

SEQ ID NO: 2305923 - RNA, 19 nt, Artificial Sequence
  Description of Artificial Sequence: Synthetic oligonucleotide
aggcuugaaagauaccgcc

SEQ ID NO: 2305924 - RNA, 19 nt, Artificial Sequence
  Description of Artificial Sequence: Synthetic oligonucleotide
agugugaauaaauaaacuu

SEQ ID NO: 2305925 - RNA, 19 nt, Artificial Sequence
  Description of Artificial Sequence: Synthetic oligonucleotide
ucuccaaagggugaggacg

SEQ ID NO: 2305926 - RNA, 19 nt, Artificial Sequence
  Description of Artificial Sequence: Synthetic oligonucleotide
aauuucgaaaaccuuugaa

SEQ ID NO: 2305927 - RNA, 19 nt, Artificial Sequence
  Description of Artificial Sequence: Synthetic oligonucleotide
guuuuaauagcugucaaac

SEQ ID NO: 2305928 - RNA, 19 nt, Artificial Sequence
  Description of Artificial Sequence: Synthetic oligonucleotide
uccuuuaucuucuaagcac

SEQ ID NO: 2305929 - RNA, 19 nt, Artificial Sequence
  Description of Artificial Sequence: Synthetic oligonucleotide
uggagaauuucgaaaaccu

SEQ ID NO: 2305930 - RNA, 19 nt, Artificial Sequence
  Description of Artificial Sequence: Synthetic oligonucleotide
aacaauccuccccaaacug

SEQ ID NO: 2305931 - RNA, 19 nt, Artificial Sequence
  Description of Artificial Sequence: Synthetic oligonucleotide
aaauaaacuuaguaucuuu

SEQ ID NO: 2305932 - RNA, 19 nt, Artificial Sequence
  Description of Artificial Sequence: Synthetic oligonucleotide
uguuauuugcccuuugguc

SEQ ID NO: 2305933 - RNA, 19 nt, Artificial Sequence
  Description of Artificial Sequence: Synthetic oligonucleotide
uagugauggaguuccacgg

SEQ ID NO: 2305934 - RNA, 19 nt, Artificial Sequence
  Description of Artificial Sequence: Synthetic oligonucleotide
uuagacauuuauuuugauc

SEQ ID NO: 2305935 - RNA, 19 nt, Artificial Sequence
  Description of Artificial Sequence: Synthetic oligonucleotide
cuagugauggaguuccacg

SEQ ID NO: 2305936 - RNA, 19 nt, Artificial Sequence
  Description of Artificial Sequence: Synthetic oligonucleotide
aaggcuugaaagauaccgc

SEQ ID NO: 2305937 - RNA, 19 nt, Artificial Sequence
  Description of Artificial Sequence: Synthetic oligonucleotide
uguacauguacgcucuuga

SEQ ID NO: 2305938 - RNA, 19 nt, Artificial Sequence
  Description of Artificial Sequence: Synthetic oligonucleotide
ugugguuuacucccacugg

SEQ ID NO: 2305939 - RNA, 19 nt, Artificial Sequence
  Description of Artificial Sequence: Synthetic oligonucleotide
aaacaauccuccccaaacu

SEQ ID NO: 2305940 - RNA, 19 nt, Artificial Sequence
  Description of Artificial Sequence: Synthetic oligonucleotide
aguuucacuguuauuugcc

SEQ ID NO: 2305941 - RNA, 19 nt, Artificial Sequence
  Description of Artificial Sequence: Synthetic oligonucleotide
uggggaacugugcagaggc

SEQ ID NO: 2305942 - RNA, 19 nt, Artificial Sequence
  Description of Artificial Sequence: Synthetic oligonucleotide
auagcuaccgguccauuuc

SEQ ID NO: 2305943 - RNA, 19 nt, Artificial Sequence
  Description of Artificial Sequence: Synthetic oligonucleotide
acauguacgcucuugaaau

SEQ ID NO: 2305944 - RNA, 19 nt, Artificial Sequence
  Description of Artificial Sequence: Synthetic oligonucleotide
aagcacauguacauguacg

SEQ ID NO: 2305945 - RNA, 19 nt, Artificial Sequence
  Description of Artificial Sequence: Synthetic oligonucleotide
aagauaccgccaccuaugg

SEQ ID NO: 2305946 - RNA, 19 nt, Artificial Sequence
  Description of Artificial Sequence: Synthetic oligonucleotide
uuauugucugaauaacugu

SEQ ID NO: 2305947 - RNA, 19 nt, Artificial Sequence
  Description of Artificial Sequence: Synthetic oligonucleotide
acuguuauuugcccuuugg

SEQ ID NO: 2305948 - RNA, 19 nt, Artificial Sequence
  Description of Artificial Sequence: Synthetic oligonucleotide
uaaagcuaggagaaugccu

SEQ ID NO: 2305949 - RNA, 19 nt, Artificial Sequence
  Description of Artificial Sequence: Synthetic oligonucleotide
uguacacaagacaccaggc

SEQ ID NO: 2305950 - RNA, 19 nt, Artificial Sequence
  Description of Artificial Sequence: Synthetic oligonucleotide
ugaaauccuacugaacugc

SEQ ID NO: 2305951 - RNA, 19 nt, Artificial Sequence
  Description of Artificial Sequence: Synthetic oligonucleotide
uuuuaauagcugucaaacu

SEQ ID NO: 2305952 - RNA, 19 nt, Artificial Sequence
  Description of Artificial Sequence: Synthetic oligonucleotide
agacauuuauuuugaucac

SEQ ID NO: 2305953 - RNA, 19 nt, Artificial Sequence
  Description of Artificial Sequence: Synthetic oligonucleotide
uucuuugccucuuaucuga

SEQ ID NO: 2305954 - RNA, 19 nt, Artificial Sequence
  Description of Artificial Sequence: Synthetic oligonucleotide
ugacggucgaguuucacug

SEQ ID NO: 2305955 - RNA, 19 nt, Artificial Sequence
  Description of Artificial Sequence: Synthetic oligonucleotide
aacuguacacaagacacca

SEQ ID NO: 2305956 - RNA, 19 nt, Artificial Sequence
  Description of Artificial Sequence: Synthetic oligonucleotide
aaggaaaugacggucgagu

SEQ ID NO: 2305957 - RNA, 19 nt, Artificial Sequence
  Description of Artificial Sequence: Synthetic oligonucleotide
guacacaagacaccaggcg

SEQ ID NO: 2305958 - RNA, 19 nt, Artificial Sequence
  Description of Artificial Sequence: Synthetic oligonucleotide
aaugucucuucguggcccg

SEQ ID NO: 2305959 - RNA, 19 nt, Artificial Sequence
  Description of Artificial Sequence: Synthetic oligonucleotide
ucgaguuucacuguuauuu

SEQ ID NO: 2305960 - RNA, 19 nt, Artificial Sequence
  Description of Artificial Sequence: Synthetic oligonucleotide
uaacuugaucuucugaaau

SEQ ID NO: 2305961 - RNA, 19 nt, Artificial Sequence
  Description of Artificial Sequence: Synthetic oligonucleotide
aagcuaggagaaugccucc

SEQ ID NO: 2305962 - RNA, 19 nt, Artificial Sequence
  Description of Artificial Sequence: Synthetic oligonucleotide
aaagauaccgccaccuaug

SEQ ID NO: 2305963 - RNA, 19 nt, Artificial Sequence
  Description of Artificial Sequence: Synthetic oligonucleotide
acugcgaguggucuucagc

SEQ ID NO: 2305964 - RNA, 19 nt, Artificial Sequence
  Description of Artificial Sequence: Synthetic oligonucleotide
gaaaugacggucgaguuuc

SEQ ID NO: 2305965 - RNA, 19 nt, Artificial Sequence
  Description of Artificial Sequence: Synthetic oligonucleotide
ugucugaauaacuguacac

SEQ ID NO: 2305966 - RNA, 19 nt, Artificial Sequence
  Description of Artificial Sequence: Synthetic oligonucleotide
uuuaaacagacuguaacuu

SEQ ID NO: 2305967 - RNA, 19 nt, Artificial Sequence
  Description of Artificial Sequence: Synthetic oligonucleotide
uugaaggcaacugcgagug

SEQ ID NO: 2305968 - RNA, 19 nt, Artificial Sequence
  Description of Artificial Sequence: Synthetic oligonucleotide
acuggagaauuucgaaaac

SEQ ID NO: 2305969 - RNA, 19 nt, Artificial Sequence
  Description of Artificial Sequence: Synthetic oligonucleotide
ucacaaaugcaacccaagu

SEQ ID NO: 2305970 - RNA, 19 nt, Artificial Sequence
  Description of Artificial Sequence: Synthetic oligonucleotide
aggagaaugccucccauug

SEQ ID NO: 2305971 - RNA, 19 nt, Artificial Sequence
  Description of Artificial Sequence: Synthetic oligonucleotide
gauaccgccaccuauggua

SEQ ID NO: 2305972 - RNA, 19 nt, Artificial Sequence
  Description of Artificial Sequence: Synthetic oligonucleotide
uacauguacgcucuugaaa

SEQ ID NO: 2305973 - RNA, 19 nt, Artificial Sequence
  Description of Artificial Sequence: Synthetic oligonucleotide
aauaaacuuaguaucuuuu

SEQ ID NO: 2305974 - RNA, 19 nt, Artificial Sequence
  Description of Artificial Sequence: Synthetic oligonucleotide
augugugaaugucucuucg

SEQ ID NO: 2305975 - RNA, 19 nt, Artificial Sequence
  Description of Artificial Sequence: Synthetic oligonucleotide
ucugaaccauacuacaguc

SEQ ID NO: 2305976 - RNA, 19 nt, Artificial Sequence
  Description of Artificial Sequence: Synthetic oligonucleotide
aaguccugaaggaaaugac

SEQ ID NO: 2305977 - RNA, 19 nt, Artificial Sequence
  Description of Artificial Sequence: Synthetic oligonucleotide
auugucugaauaacuguac

SEQ ID NO: 2305978 - RNA, 19 nt, Artificial Sequence
  Description of Artificial Sequence: Synthetic oligonucleotide
uuaguaucuuuucuccccu

SEQ ID NO: 2305979 - RNA, 19 nt, Artificial Sequence
  Description of Artificial Sequence: Synthetic oligonucleotide
aucauggaaaacaauccuc

SEQ ID NO: 2305980 - RNA, 19 nt, Artificial Sequence
  Description of Artificial Sequence: Synthetic oligonucleotide
gugaaugucucuucguggc

SEQ ID NO: 2305981 - RNA, 19 nt, Artificial Sequence
  Description of Artificial Sequence: Synthetic oligonucleotide
gacccaaccauagcuaccg

SEQ ID NO: 2305982 - RNA, 19 nt, Artificial Sequence
  Description of Artificial Sequence: Synthetic oligonucleotide
aagugugaauaaauaaacu

SEQ ID NO: 2305983 - RNA, 19 nt, Artificial Sequence
  Description of Artificial Sequence: Synthetic oligonucleotide
ugaucacaaaugcaaccca

SEQ ID NO: 2305984 - RNA, 19 nt, Artificial Sequence
  Description of Artificial Sequence: Synthetic oligonucleotide
uagcugucaaacucccucg

SEQ ID NO: 2305985 - RNA, 19 nt, Artificial Sequence
  Description of Artificial Sequence: Synthetic oligonucleotide
uuaaagcuaggagaaugcc

SEQ ID NO: 2305986 - RNA, 19 nt, Artificial Sequence
  Description of Artificial Sequence: Synthetic oligonucleotide
aaaugugugaaugucucuu

SEQ ID NO: 2305987 - RNA, 19 nt, Artificial Sequence
  Description of Artificial Sequence: Synthetic oligonucleotide
agaauuucgaaaaccuuug

SEQ ID NO: 2305988 - RNA, 19 nt, Artificial Sequence
  Description of Artificial Sequence: Synthetic oligonucleotide
ucgaaaaccuuugaaggcu

SEQ ID NO: 2305989 - RNA, 19 nt, Artificial Sequence
  Description of Artificial Sequence: Synthetic oligonucleotide
aacugagggccauugggga

SEQ ID NO: 2305990 - RNA, 19 nt, Artificial Sequence
  Description of Artificial Sequence: Synthetic oligonucleotide
caagauaccagcuccuuca

SEQ ID NO: 2305991 - RNA, 19 nt, Artificial Sequence
  Description of Artificial Sequence: Synthetic oligonucleotide
aguccugaaggaaaugacg

SEQ ID NO: 2305992 - RNA, 19 nt, Artificial Sequence
  Description of Artificial Sequence: Synthetic oligonucleotide
auccuacugaacugcaguc

SEQ ID NO: 2305993 - RNA, 19 nt, Artificial Sequence
  Description of Artificial Sequence: Synthetic oligonucleotide
cacauguacauguacgcuc

SEQ ID NO: 2305994 - RNA, 19 nt, Artificial Sequence
  Description of Artificial Sequence: Synthetic oligonucleotide
agugacaggaauccuggga

SEQ ID NO: 2305995 - RNA, 19 nt, Artificial Sequence
  Description of Artificial Sequence: Synthetic oligonucleotide
ugguaaaggcaccaccaca

SEQ ID NO: 2305996 - RNA, 19 nt, Artificial Sequence
  Description of Artificial Sequence: Synthetic oligonucleotide
aggggcacggcucucucgc

SEQ ID NO: 2305997 - RNA, 19 nt, Artificial Sequence
  Description of Artificial Sequence: Synthetic oligonucleotide
uuauuugcccuuugguccu

SEQ ID NO: 2305998 - RNA, 19 nt, Artificial Sequence
  Description of Artificial Sequence: Synthetic oligonucleotide
ugguuuacucccacuggag

SEQ ID NO: 2305999 - RNA, 19 nt, Artificial Sequence
  Description of Artificial Sequence: Synthetic oligonucleotide
uugaaagauaccgccaccu

SEQ ID NO: 2306000 - RNA, 19 nt, Artificial Sequence
  Description of Artificial Sequence: Synthetic oligonucleotide
ugucaacaagauaccagcu

SEQ ID NO: 2306001 - RNA, 19 nt, Artificial Sequence
  Description of Artificial Sequence: Synthetic oligonucleotide
gagaaugccucccauugca

SEQ ID NO: 2306002 - RNA, 19 nt, Artificial Sequence
  Description of Artificial Sequence: Synthetic oligonucleotide
auguacgcucuugaaaugg

SEQ ID NO: 2306003 - RNA, 19 nt, Artificial Sequence
  Description of Artificial Sequence: Synthetic oligonucleotide
gauacugccgguagucucc

SEQ ID NO: 2306004 - RNA, 19 nt, Artificial Sequence
  Description of Artificial Sequence: Synthetic oligonucleotide
aucuuuucuccccucugag

SEQ ID NO: 2306005 - RNA, 19 nt, Artificial Sequence
  Description of Artificial Sequence: Synthetic oligonucleotide
cugucaaacucccucggag

SEQ ID NO: 2306006 - RNA, 19 nt, Artificial Sequence
  Description of Artificial Sequence: Synthetic oligonucleotide
aucuugucaacaagauacc

SEQ ID NO: 2306007 - RNA, 19 nt, Artificial Sequence
  Description of Artificial Sequence: Synthetic oligonucleotide
caaaugcaacccaagugug

SEQ ID NO: 2306008 - RNA, 19 nt, Artificial Sequence
  Description of Artificial Sequence: Synthetic oligonucleotide
caugguaaaggcaccacca

SEQ ID NO: 2306009 - RNA, 19 nt, Artificial Sequence
  Description of Artificial Sequence: Synthetic oligonucleotide
uacgcucuugaaaugguau

SEQ ID NO: 2306010 - RNA, 19 nt, Artificial Sequence
  Description of Artificial Sequence: Synthetic oligonucleotide
ugucaaacucccucggagu

SEQ ID NO: 2306011 - RNA, 19 nt, Artificial Sequence
  Description of Artificial Sequence: Synthetic oligonucleotide
guacccaugguaaaggcac

SEQ ID NO: 2306012 - RNA, 19 nt, Artificial Sequence
  Description of Artificial Sequence: Synthetic oligonucleotide
ugaaugucucuucguggcc

SEQ ID NO: 2306013 - RNA, 19 nt, Artificial Sequence
  Description of Artificial Sequence: Synthetic oligonucleotide
guccuacugauacugccgg

SEQ ID NO: 2306014 - RNA, 19 nt, Artificial Sequence
  Description of Artificial Sequence: Synthetic oligonucleotide
cagucaaucauggaaaaca

SEQ ID NO: 2306015 - RNA, 19 nt, Artificial Sequence
  Description of Artificial Sequence: Synthetic oligonucleotide
gugugaaugucucuucgug

SEQ ID NO: 2306016 - RNA, 19 nt, Artificial Sequence
  Description of Artificial Sequence: Synthetic oligonucleotide
acuagugauggaguuccac

SEQ ID NO: 2306017 - RNA, 19 nt, Artificial Sequence
  Description of Artificial Sequence: Synthetic oligonucleotide
gaaguccugaaggaaauga

SEQ ID NO: 2306018 - RNA, 19 nt, Artificial Sequence
  Description of Artificial Sequence: Synthetic oligonucleotide
gguaaaggcaccaccacag

SEQ ID NO: 2306019 - RNA, 19 nt, Artificial Sequence
  Description of Artificial Sequence: Synthetic oligonucleotide
ggcgcucugguuuuaauag

SEQ ID NO: 2306020 - RNA, 19 nt, Artificial Sequence
  Description of Artificial Sequence: Synthetic oligonucleotide
aaccauagcuaccggucca

SEQ ID NO: 2306021 - RNA, 19 nt, Artificial Sequence
  Description of Artificial Sequence: Synthetic oligonucleotide
accuuuuauugucugaaua

SEQ ID NO: 2306022 - RNA, 19 nt, Artificial Sequence
  Description of Artificial Sequence: Synthetic oligonucleotide
caaagcuaccucccaauug

SEQ ID NO: 2306023 - RNA, 19 nt, Artificial Sequence
  Description of Artificial Sequence: Synthetic oligonucleotide
caccuagggcuuuaaacag

SEQ ID NO: 2306024 - RNA, 19 nt, Artificial Sequence
  Description of Artificial Sequence: Synthetic oligonucleotide
aaugacggucgaguuucac

SEQ ID NO: 2306025 - RNA, 19 nt, Artificial Sequence
  Description of Artificial Sequence: Synthetic oligonucleotide
cugcaguccacccagugac

SEQ ID NO: 2306026 - RNA, 19 nt, Artificial Sequence
  Description of Artificial Sequence: Synthetic oligonucleotide
cuugaaagauaccgccacc

SEQ ID NO: 2306027 - RNA, 19 nt, Artificial Sequence
  Description of Artificial Sequence: Synthetic oligonucleotide
ugugugaaugucucuucgu

SEQ ID NO: 2306028 - RNA, 19 nt, Artificial Sequence
  Description of Artificial Sequence: Synthetic oligonucleotide
uuaaggcaccacuagugau

SEQ ID NO: 2306029 - RNA, 19 nt, Artificial Sequence
  Description of Artificial Sequence: Synthetic oligonucleotide
aaauccuacugaacugcag

SEQ ID NO: 2306030 - RNA, 19 nt, Artificial Sequence
  Description of Artificial Sequence: Synthetic oligonucleotide
uguacgcucuugaaauggu

SEQ ID NO: 2306031 - RNA, 19 nt, Artificial Sequence
  Description of Artificial Sequence: Synthetic oligonucleotide
cuccuucaauuaaagcuag

SEQ ID NO: 2306032 - RNA, 19 nt, Artificial Sequence
  Description of Artificial Sequence: Synthetic oligonucleotide
ggaaauuuucagucccagg

SEQ ID NO: 2306033 - RNA, 19 nt, Artificial Sequence
  Description of Artificial Sequence: Synthetic oligonucleotide
gugugaauaaauaaacuua

SEQ ID NO: 2306034 - RNA, 19 nt, Artificial Sequence
  Description of Artificial Sequence: Synthetic oligonucleotide
guuaaggcaccacuaguga

SEQ ID NO: 2306035 - RNA, 19 nt, Artificial Sequence
  Description of Artificial Sequence: Synthetic oligonucleotide
gucugaauaacuguacaca

SEQ ID NO: 2306036 - RNA, 19 nt, Artificial Sequence
  Description of Artificial Sequence: Synthetic oligonucleotide
aguccuacugauacugccg

SEQ ID NO: 2306037 - RNA, 19 nt, Artificial Sequence
  Description of Artificial Sequence: Synthetic oligonucleotide
aguuccacggaucuucuuu

SEQ ID NO: 2306038 - RNA, 19 nt, Artificial Sequence
  Description of Artificial Sequence: Synthetic oligonucleotide
cugugguuuacucccacug

SEQ ID NO: 2306039 - RNA, 19 nt, Artificial Sequence
  Description of Artificial Sequence: Synthetic oligonucleotide
gucaacaagauaccagcuc

SEQ ID NO: 2306040 - RNA, 19 nt, Artificial Sequence
  Description of Artificial Sequence: Synthetic oligonucleotide
augguacccaugguaaagg

SEQ ID NO: 2306041 - RNA, 19 nt, Artificial Sequence
  Description of Artificial Sequence: Synthetic oligonucleotide
uugccucuuaucugaacca

SEQ ID NO: 2306042 - RNA, 19 nt, Artificial Sequence
  Description of Artificial Sequence: Synthetic oligonucleotide
uucagcaaacugagggcca

SEQ ID NO: 2306043 - RNA, 19 nt, Artificial Sequence
  Description of Artificial Sequence: Synthetic oligonucleotide
uccacggaucuucuuugcc

SEQ ID NO: 2306044 - RNA, 19 nt, Artificial Sequence
  Description of Artificial Sequence: Synthetic oligonucleotide
uucacuguuauuugcccuu

SEQ ID NO: 2306045 - RNA, 19 nt, Artificial Sequence
  Description of Artificial Sequence: Synthetic oligonucleotide
cuacugauacugccgguag

SEQ ID NO: 2306046 - RNA, 19 nt, Artificial Sequence
  Description of Artificial Sequence: Synthetic oligonucleotide
augacggucgaguuucacu

SEQ ID NO: 2306047 - RNA, 19 nt, Artificial Sequence
  Description of Artificial Sequence: Synthetic oligonucleotide
ugcccuuugguccuuuauc

SEQ ID NO: 2306048 - RNA, 19 nt, Artificial Sequence
  Description of Artificial Sequence: Synthetic oligonucleotide
auggcuccuguuaaggcac

SEQ ID NO: 2306049 - RNA, 19 nt, Artificial Sequence
  Description of Artificial Sequence: Synthetic oligonucleotide
caaccauagcuaccggucc

SEQ ID NO: 2306050 - RNA, 19 nt, Artificial Sequence
  Description of Artificial Sequence: Synthetic oligonucleotide
gaauuucgaaaaccuuuga

SEQ ID NO: 2306051 - RNA, 19 nt, Artificial Sequence
  Description of Artificial Sequence: Synthetic oligonucleotide
uccuacugaacugcagucc

SEQ ID NO: 2306052 - RNA, 19 nt, Artificial Sequence
  Description of Artificial Sequence: Synthetic oligonucleotide
cucccacuggagaauuucg

SEQ ID NO: 2306053 - RNA, 19 nt, Artificial Sequence
  Description of Artificial Sequence: Synthetic oligonucleotide
aaaugcaacccaaguguga

SEQ ID NO: 2306054 - RNA, 19 nt, Artificial Sequence
  Description of Artificial Sequence: Synthetic oligonucleotide
aggaaauuuucagucccag

SEQ ID NO: 2306055 - RNA, 19 nt, Artificial Sequence
  Description of Artificial Sequence: Synthetic oligonucleotide
auuggggaacugugcagag

SEQ ID NO: 2306056 - RNA, 19 nt, Artificial Sequence
  Description of Artificial Sequence: Synthetic oligonucleotide
agcuaggagaaugccuccc

SEQ ID NO: 2306057 - RNA, 19 nt, Artificial Sequence
  Description of Artificial Sequence: Synthetic oligonucleotide
aggaaccuuuuauugucug

SEQ ID NO: 2306058 - RNA, 19 nt, Artificial Sequence
  Description of Artificial Sequence: Synthetic oligonucleotide
uaucuucuaagcacaugua

SEQ ID NO: 2306059 - RNA, 19 nt, Artificial Sequence
  Description of Artificial Sequence: Synthetic oligonucleotide
uccuguuaaggcaccacua

SEQ ID NO: 2306060 - RNA, 19 nt, Artificial Sequence
  Description of Artificial Sequence: Synthetic oligonucleotide
agccgacccaaccauagcu

SEQ ID NO: 2306061 - RNA, 19 nt, Artificial Sequence
  Description of Artificial Sequence: Synthetic oligonucleotide
ugguacccaugguaaaggc

SEQ ID NO: 2306062 - RNA, 19 nt, Artificial Sequence
  Description of Artificial Sequence: Synthetic oligonucleotide
ugcaaagcuaccucccaau

SEQ ID NO: 2306063 - RNA, 19 nt, Artificial Sequence
  Description of Artificial Sequence: Synthetic oligonucleotide
guuuacucccacuggagaa

SEQ ID NO: 2306064 - RNA, 19 nt, Artificial Sequence
  Description of Artificial Sequence: Synthetic oligonucleotide
accuaugguacccauggua

SEQ ID NO: 2306065 - RNA, 19 nt, Artificial Sequence
  Description of Artificial Sequence: Synthetic oligonucleotide
uccugaaggaaaugacggu

SEQ ID NO: 2306066 - RNA, 19 nt, Artificial Sequence
  Description of Artificial Sequence: Synthetic oligonucleotide
ugaaagauaccgccaccua

SEQ ID NO: 2306067 - RNA, 19 nt, Artificial Sequence
  Description of Artificial Sequence: Synthetic oligonucleotide
accauacuacagucaauca

SEQ ID NO: 2306068 - RNA, 19 nt, Artificial Sequence
  Description of Artificial Sequence: Synthetic oligonucleotide
uuuucuccccucugagucu

SEQ ID NO: 2306069 - RNA, 19 nt, Artificial Sequence
  Description of Artificial Sequence: Synthetic oligonucleotide
gaaggaaaugacggucgag

SEQ ID NO: 2306070 - RNA, 19 nt, Artificial Sequence
  Description of Artificial Sequence: Synthetic oligonucleotide
acucccacuggagaauuuc

SEQ ID NO: 2306071 - RNA, 19 nt, Artificial Sequence
  Description of Artificial Sequence: Synthetic oligonucleotide
accgccaccuaugguaccc

SEQ ID NO: 2306072 - RNA, 19 nt, Artificial Sequence
  Description of Artificial Sequence: Synthetic oligonucleotide
cacagucauccacaauccg

SEQ ID NO: 2306073 - RNA, 19 nt, Artificial Sequence
  Description of Artificial Sequence: Synthetic oligonucleotide
cuucugaaauccuacugaa

SEQ ID NO: 2306074 - RNA, 19 nt, Artificial Sequence
  Description of Artificial Sequence: Synthetic oligonucleotide
gccgguagucuccaaaggg

SEQ ID NO: 2306075 - RNA, 19 nt, Artificial Sequence
  Description of Artificial Sequence: Synthetic oligonucleotide
cugccgguagucuccaaag

SEQ ID NO: 2306076 - RNA, 19 nt, Artificial Sequence
  Description of Artificial Sequence: Synthetic oligonucleotide
aagauaccagcuccuucaa

SEQ ID NO: 2306077 - RNA, 19 nt, Artificial Sequence
  Description of Artificial Sequence: Synthetic oligonucleotide
cauguacgcucuugaaaug

SEQ ID NO: 2306078 - RNA, 19 nt, Artificial Sequence
  Description of Artificial Sequence: Synthetic oligonucleotide
gugguuuacucccacugga

SEQ ID NO: 2306079 - RNA, 19 nt, Artificial Sequence
  Description of Artificial Sequence: Synthetic oligonucleotide
acauguacauguacgcucu

SEQ ID NO: 2306080 - RNA, 19 nt, Artificial Sequence
  Description of Artificial Sequence: Synthetic oligonucleotide
uagcuaccgguccauuucu

SEQ ID NO: 2306081 - RNA, 19 nt, Artificial Sequence
  Description of Artificial Sequence: Synthetic oligonucleotide
aggcaaaucuugucaacaa

SEQ ID NO: 2306082 - RNA, 19 nt, Artificial Sequence
  Description of Artificial Sequence: Synthetic oligonucleotide
auaccgccaccuaugguac

SEQ ID NO: 2306083 - RNA, 19 nt, Artificial Sequence
  Description of Artificial Sequence: Synthetic oligonucleotide
uuuacucccacuggagaau

SEQ ID NO: 2306084 - RNA, 19 nt, Artificial Sequence
  Description of Artificial Sequence: Synthetic oligonucleotide
ccucuuaucugaaccauac

SEQ ID NO: 2306085 - RNA, 19 nt, Artificial Sequence
  Description of Artificial Sequence: Synthetic oligonucleotide
cugcgaguggucuucagca

SEQ ID NO: 2306086 - RNA, 19 nt, Artificial Sequence
  Description of Artificial Sequence: Synthetic oligonucleotide
gucaaacucccucggaguc

SEQ ID NO: 2306087 - RNA, 19 nt, Artificial Sequence
  Description of Artificial Sequence: Synthetic oligonucleotide
uacugauacugccgguagu

SEQ ID NO: 2306088 - RNA, 19 nt, Artificial Sequence
  Description of Artificial Sequence: Synthetic oligonucleotide
ggcaccacuagugauggag

SEQ ID NO: 2306089 - RNA, 19 nt, Artificial Sequence
  Description of Artificial Sequence: Synthetic oligonucleotide
cacggaucuucuuugccuc

SEQ ID NO: 2306090 - RNA, 19 nt, Artificial Sequence
  Description of Artificial Sequence: Synthetic oligonucleotide
cucuucguggcccgcuugg

SEQ ID NO: 2306091 - RNA, 19 nt, Artificial Sequence
  Description of Artificial Sequence: Synthetic oligonucleotide
aacugcgaguggucuucag

SEQ ID NO: 2306092 - RNA, 19 nt, Artificial Sequence
  Description of Artificial Sequence: Synthetic oligonucleotide
agucaaucauggaaaacaa

SEQ ID NO: 2306093 - RNA, 19 nt, Artificial Sequence
  Description of Artificial Sequence: Synthetic oligonucleotide
auaccagcuccuucaauua

SEQ ID NO: 2306094 - RNA, 19 nt, Artificial Sequence
  Description of Artificial Sequence: Synthetic oligonucleotide
agggcuuuaaacagacugu

SEQ ID NO: 2306095 - RNA, 19 nt, Artificial Sequence
  Description of Artificial Sequence: Synthetic oligonucleotide
gaaguccuacugauacugc

SEQ ID NO: 2306096 - RNA, 19 nt, Artificial Sequence
  Description of Artificial Sequence: Synthetic oligonucleotide
ugacaggaauccugggaaa

SEQ ID NO: 2306097 - RNA, 19 nt, Artificial Sequence
  Description of Artificial Sequence: Synthetic oligonucleotide
aggcggagaaguccugaag

SEQ ID NO: 2306098 - RNA, 19 nt, Artificial Sequence
  Description of Artificial Sequence: Synthetic oligonucleotide
gaaauccuacugaacugca

SEQ ID NO: 2306099 - RNA, 19 nt, Artificial Sequence
  Description of Artificial Sequence: Synthetic oligonucleotide
auccacaauccgccagggg

SEQ ID NO: 2306100 - RNA, 19 nt, Artificial Sequence
  Description of Artificial Sequence: Synthetic oligonucleotide
gguuuuaauagcugucaaa

SEQ ID NO: 2306101 - RNA, 19 nt, Artificial Sequence
  Description of Artificial Sequence: Synthetic oligonucleotide
aaacagacuguaacuugau

SEQ ID NO: 2306102 - RNA, 19 nt, Artificial Sequence
  Description of Artificial Sequence: Synthetic oligonucleotide
ccuguuaaggcaccacuag

SEQ ID NO: 2306103 - RNA, 19 nt, Artificial Sequence
  Description of Artificial Sequence: Synthetic oligonucleotide
ccuagggcuuuaaacagac

SEQ ID NO: 2306104 - RNA, 19 nt, Artificial Sequence
  Description of Artificial Sequence: Synthetic oligonucleotide
cuuugccucuuaucugaac

SEQ ID NO: 2306105 - RNA, 19 nt, Artificial Sequence
  Description of Artificial Sequence: Synthetic oligonucleotide
cugaaccauacuacaguca

SEQ ID NO: 2306106 - RNA, 19 nt, Artificial Sequence
  Description of Artificial Sequence: Synthetic oligonucleotide
augguauuagacauuuauu

SEQ ID NO: 2306107 - RNA, 19 nt, Artificial Sequence
  Description of Artificial Sequence: Synthetic oligonucleotide
cccaccuagggcuuuaaac

SEQ ID NO: 2306108 - RNA, 19 nt, Artificial Sequence
  Description of Artificial Sequence: Synthetic oligonucleotide
ucuuugccucuuaucugaa

SEQ ID NO: 2306109 - RNA, 19 nt, Artificial Sequence
  Description of Artificial Sequence: Synthetic oligonucleotide
ggugaggacgguaacuggc

SEQ ID NO: 2306110 - RNA, 19 nt, Artificial Sequence
  Description of Artificial Sequence: Synthetic oligonucleotide
ucucgcguacuccuccauc

SEQ ID NO: 2306111 - RNA, 19 nt, Artificial Sequence
  Description of Artificial Sequence: Synthetic oligonucleotide
gggaaagaaguccuacuga

SEQ ID NO: 2306112 - RNA, 19 nt, Artificial Sequence
  Description of Artificial Sequence: Synthetic oligonucleotide
ccaaccauagcuaccgguc

SEQ ID NO: 2306113 - RNA, 19 nt, Artificial Sequence
  Description of Artificial Sequence: Synthetic oligonucleotide
uggcgcucugguuuuaaua

SEQ ID NO: 2306114 - RNA, 19 nt, Artificial Sequence
  Description of Artificial Sequence: Synthetic oligonucleotide
ccaccuagggcuuuaaaca

SEQ ID NO: 2306115 - RNA, 19 nt, Artificial Sequence
  Description of Artificial Sequence: Synthetic oligonucleotide
acacaagacaccaggcgga

SEQ ID NO: 2306116 - RNA, 19 nt, Artificial Sequence
  Description of Artificial Sequence: Synthetic oligonucleotide
aacucccucggagucugug

SEQ ID NO: 2306117 - RNA, 19 nt, Artificial Sequence
  Description of Artificial Sequence: Synthetic oligonucleotide
cuacugaacugcaguccac

SEQ ID NO: 2306118 - RNA, 19 nt, Artificial Sequence
  Description of Artificial Sequence: Synthetic oligonucleotide
ccuuuaucuucuaagcaca

SEQ ID NO: 2306119 - RNA, 19 nt, Artificial Sequence
  Description of Artificial Sequence: Synthetic oligonucleotide
uugcagccgacccaaccau

SEQ ID NO: 2306120 - RNA, 19 nt, Artificial Sequence
  Description of Artificial Sequence: Synthetic oligonucleotide
caauccgccaggggcacgg

SEQ ID NO: 2306121 - RNA, 19 nt, Artificial Sequence
  Description of Artificial Sequence: Synthetic oligonucleotide
gguuuacucccacuggaga

SEQ ID NO: 2306122 - RNA, 19 nt, Artificial Sequence
  Description of Artificial Sequence: Synthetic oligonucleotide
auuguggcgcucugguuuu

SEQ ID NO: 2306123 - RNA, 19 nt, Artificial Sequence
  Description of Artificial Sequence: Synthetic oligonucleotide
ggauggcuccuguuaaggc

SEQ ID NO: 2306124 - RNA, 19 nt, Artificial Sequence
  Description of Artificial Sequence: Synthetic oligonucleotide
uaacuggcuugaaggcaac

SEQ ID NO: 2306125 - RNA, 19 nt, Artificial Sequence
  Description of Artificial Sequence: Synthetic oligonucleotide
accgguccauuucuugcug

SEQ ID NO: 2306126 - RNA, 19 nt, Artificial Sequence
  Description of Artificial Sequence: Synthetic oligonucleotide
cauuggggaacugugcaga

SEQ ID NO: 2306127 - RNA, 19 nt, Artificial Sequence
  Description of Artificial Sequence: Synthetic oligonucleotide
gguauuagacauuuauuuu

SEQ ID NO: 2306128 - RNA, 19 nt, Artificial Sequence
  Description of Artificial Sequence: Synthetic oligonucleotide
cucugguuuuaauagcugu

SEQ ID NO: 2306129 - RNA, 19 nt, Artificial Sequence
  Description of Artificial Sequence: Synthetic oligonucleotide
ggagaaugccucccauugc

SEQ ID NO: 2306130 - RNA, 19 nt, Artificial Sequence
  Description of Artificial Sequence: Synthetic oligonucleotide
uccgccaggggcacggcuc

SEQ ID NO: 2306131 - RNA, 19 nt, Artificial Sequence
  Description of Artificial Sequence: Synthetic oligonucleotide
uugcccuuugguccuuuau

SEQ ID NO: 2306132 - RNA, 19 nt, Artificial Sequence
  Description of Artificial Sequence: Synthetic oligonucleotide
cagaggcaaaucuugucaa

SEQ ID NO: 2306133 - RNA, 19 nt, Artificial Sequence
  Description of Artificial Sequence: Synthetic oligonucleotide
acuguacacaagacaccag

SEQ ID NO: 2306134 - RNA, 19 nt, Artificial Sequence
  Description of Artificial Sequence: Synthetic oligonucleotide
uaguaucuuuucuccccuc

SEQ ID NO: 2306135 - RNA, 19 nt, Artificial Sequence
  Description of Artificial Sequence: Synthetic oligonucleotide
ugcgaguggucuucagcaa

SEQ ID NO: 2306136 - RNA, 19 nt, Artificial Sequence
  Description of Artificial Sequence: Synthetic oligonucleotide
guacauguacgcucuugaa

SEQ ID NO: 2306137 - RNA, 19 nt, Artificial Sequence
  Description of Artificial Sequence: Synthetic oligonucleotide
cuugaaggcaacugcgagu

SEQ ID NO: 2306138 - RNA, 19 nt, Artificial Sequence
  Description of Artificial Sequence: Synthetic oligonucleotide
agauaccgccaccuauggu

SEQ ID NO: 2306139 - RNA, 19 nt, Artificial Sequence
  Description of Artificial Sequence: Synthetic oligonucleotide
gacuguaacuugaucuucu

SEQ ID NO: 2306140 - RNA, 19 nt, Artificial Sequence
  Description of Artificial Sequence: Synthetic oligonucleotide
ccuaugguacccaugguaa

SEQ ID NO: 2306141 - RNA, 19 nt, Artificial Sequence
  Description of Artificial Sequence: Synthetic oligonucleotide
uccuacugauacugccggu

SEQ ID NO: 2306142 - RNA, 19 nt, Artificial Sequence
  Description of Artificial Sequence: Synthetic oligonucleotide
aauccgccaggggcacggc

SEQ ID NO: 2306143 - RNA, 19 nt, Artificial Sequence
  Description of Artificial Sequence: Synthetic oligonucleotide
aacuggcuugaaggcaacu

SEQ ID NO: 2306144 - RNA, 19 nt, Artificial Sequence
  Description of Artificial Sequence: Synthetic oligonucleotide
ucccaauuguggcgcucug

SEQ ID NO: 2306145 - RNA, 19 nt, Artificial Sequence
  Description of Artificial Sequence: Synthetic oligonucleotide
cacaagacaccaggcggag

SEQ ID NO: 2306146 - RNA, 19 nt, Artificial Sequence
  Description of Artificial Sequence: Synthetic oligonucleotide
acccaaccauagcuaccgg

SEQ ID NO: 2306147 - RNA, 19 nt, Artificial Sequence
  Description of Artificial Sequence: Synthetic oligonucleotide
ugccucuuaucugaaccau

SEQ ID NO: 2306148 - RNA, 19 nt, Artificial Sequence
  Description of Artificial Sequence: Synthetic oligonucleotide
uugcugccaggauggcucc

SEQ ID NO: 2306149 - RNA, 19 nt, Artificial Sequence
  Description of Artificial Sequence: Synthetic oligonucleotide
gcuaccgguccauuucuug

SEQ ID NO: 2306150 - RNA, 19 nt, Artificial Sequence
  Description of Artificial Sequence: Synthetic oligonucleotide
gguaacuggcuugaaggca

SEQ ID NO: 2306151 - RNA, 19 nt, Artificial Sequence
  Description of Artificial Sequence: Synthetic oligonucleotide
cccaagugugaauaaauaa

SEQ ID NO: 2306152 - RNA, 19 nt, Artificial Sequence
  Description of Artificial Sequence: Synthetic oligonucleotide
acggaucuucuuugccucu

SEQ ID NO: 2306153 - RNA, 19 nt, Artificial Sequence
  Description of Artificial Sequence: Synthetic oligonucleotide
cuaugguacccaugguaaa

SEQ ID NO: 2306154 - RNA, 19 nt, Artificial Sequence
  Description of Artificial Sequence: Synthetic oligonucleotide
ucuucguggcccgcuuggc

SEQ ID NO: 2306155 - RNA, 19 nt, Artificial Sequence
  Description of Artificial Sequence: Synthetic oligonucleotide
uggcuccuguuaaggcacc

SEQ ID NO: 2306156 - RNA, 19 nt, Artificial Sequence
  Description of Artificial Sequence: Synthetic oligonucleotide
cacuguuauuugcccuuug

SEQ ID NO: 2306157 - RNA, 19 nt, Artificial Sequence
  Description of Artificial Sequence: Synthetic oligonucleotide
uuacucccacuggagaauu

SEQ ID NO: 2306158 - RNA, 19 nt, Artificial Sequence
  Description of Artificial Sequence: Synthetic oligonucleotide
acggucgaguuucacuguu

SEQ ID NO: 2306159 - RNA, 19 nt, Artificial Sequence
  Description of Artificial Sequence: Synthetic oligonucleotide
acccaagugugaauaaaua

SEQ ID NO: 2306160 - RNA, 19 nt, Artificial Sequence
  Description of Artificial Sequence: Synthetic oligonucleotide
ucggagucugugguuuacu

SEQ ID NO: 2306161 - RNA, 19 nt, Artificial Sequence
  Description of Artificial Sequence: Synthetic oligonucleotide
accuagggcuuuaaacaga

SEQ ID NO: 2306162 - RNA, 19 nt, Artificial Sequence
  Description of Artificial Sequence: Synthetic oligonucleotide
ugucucuucguggcccgcu

SEQ ID NO: 2306163 - RNA, 19 nt, Artificial Sequence
  Description of Artificial Sequence: Synthetic oligonucleotide
ugccucccauugcagccga

SEQ ID NO: 2306164 - RNA, 19 nt, Artificial Sequence
  Description of Artificial Sequence: Synthetic oligonucleotide
gacaccaggcggagaaguc

SEQ ID NO: 2306165 - RNA, 19 nt, Artificial Sequence
  Description of Artificial Sequence: Synthetic oligonucleotide
ccuacugaacugcagucca

SEQ ID NO: 2306166 - RNA, 19 nt, Artificial Sequence
  Description of Artificial Sequence: Synthetic oligonucleotide
aaaugacggucgaguuuca

SEQ ID NO: 2306167 - RNA, 19 nt, Artificial Sequence
  Description of Artificial Sequence: Synthetic oligonucleotide
cucgcguacuccuccaucu

SEQ ID NO: 2306168 - RNA, 19 nt, Artificial Sequence
  Description of Artificial Sequence: Synthetic oligonucleotide
ugcagccgacccaaccaua

SEQ ID NO: 2306169 - RNA, 19 nt, Artificial Sequence
  Description of Artificial Sequence: Synthetic oligonucleotide
cugggaaagaaguccuacu

SEQ ID NO: 2306170 - RNA, 19 nt, Artificial Sequence
  Description of Artificial Sequence: Synthetic oligonucleotide
augcaacccaagugugaau

SEQ ID NO: 2306171 - RNA, 19 nt, Artificial Sequence
  Description of Artificial Sequence: Synthetic oligonucleotide
gguacccaugguaaaggca

SEQ ID NO: 2306172 - RNA, 19 nt, Artificial Sequence
  Description of Artificial Sequence: Synthetic oligonucleotide
gcagccgacccaaccauag

SEQ ID NO: 2306173 - RNA, 19 nt, Artificial Sequence
  Description of Artificial Sequence: Synthetic oligonucleotide
gcaguccacccagugacag

SEQ ID NO: 2306174 - RNA, 19 nt, Artificial Sequence
  Description of Artificial Sequence: Synthetic oligonucleotide
cagccgacccaaccauagc

SEQ ID NO: 2306175 - RNA, 19 nt, Artificial Sequence
  Description of Artificial Sequence: Synthetic oligonucleotide
caacaagauaccagcuccu

SEQ ID NO: 2306176 - RNA, 19 nt, Artificial Sequence
  Description of Artificial Sequence: Synthetic oligonucleotide
gcggagaaguccugaagga

SEQ ID NO: 2306177 - RNA, 19 nt, Artificial Sequence
  Description of Artificial Sequence: Synthetic oligonucleotide
gcuaggagaaugccuccca

SEQ ID NO: 2306178 - RNA, 19 nt, Artificial Sequence
  Description of Artificial Sequence: Synthetic oligonucleotide
cgguaacuggcuugaaggc

SEQ ID NO: 2306179 - RNA, 19 nt, Artificial Sequence
  Description of Artificial Sequence: Synthetic oligonucleotide
cucggagucugugguuuac

SEQ ID NO: 2306180 - RNA, 19 nt, Artificial Sequence
  Description of Artificial Sequence: Synthetic oligonucleotide
ccgacccaaccauagcuac

SEQ ID NO: 2306181 - RNA, 19 nt, Artificial Sequence
  Description of Artificial Sequence: Synthetic oligonucleotide
cuccuguuaaggcaccacu

SEQ ID NO: 2306182 - RNA, 19 nt, Artificial Sequence
  Description of Artificial Sequence: Synthetic oligonucleotide
guaaaggcaccaccacagu

SEQ ID NO: 2306183 - RNA, 19 nt, Artificial Sequence
  Description of Artificial Sequence: Synthetic oligonucleotide
uacucccacuggagaauuu

SEQ ID NO: 2306184 - RNA, 19 nt, Artificial Sequence
  Description of Artificial Sequence: Synthetic oligonucleotide
caacccaagugugaauaaa

SEQ ID NO: 2306185 - RNA, 19 nt, Artificial Sequence
  Description of Artificial Sequence: Synthetic oligonucleotide
ucguggcccgcuuggccac

SEQ ID NO: 2306186 - RNA, 19 nt, Artificial Sequence
  Description of Artificial Sequence: Synthetic oligonucleotide
uguggcgcucugguuuuaa

SEQ ID NO: 2306187 - RNA, 19 nt, Artificial Sequence
  Description of Artificial Sequence: Synthetic oligonucleotide
ccacccagugacaggaauc

SEQ ID NO: 2306188 - RNA, 19 nt, Artificial Sequence
  Description of Artificial Sequence: Synthetic oligonucleotide
ggaaaacaauccuccccaa

SEQ ID NO: 2306189 - RNA, 19 nt, Artificial Sequence
  Description of Artificial Sequence: Synthetic oligonucleotide
uccaaagggugaggacggu

SEQ ID NO: 2306190 - RNA, 19 nt, Artificial Sequence
  Description of Artificial Sequence: Synthetic oligonucleotide
gcucugguuuuaauagcug

SEQ ID NO: 2306191 - RNA, 19 nt, Artificial Sequence
  Description of Artificial Sequence: Synthetic oligonucleotide
cacaauccgccaggggcac

SEQ ID NO: 2306192 - RNA, 19 nt, Artificial Sequence
  Description of Artificial Sequence: Synthetic oligonucleotide
acaauccgccaggggcacg

SEQ ID NO: 2306193 - RNA, 19 nt, Artificial Sequence
  Description of Artificial Sequence: Synthetic oligonucleotide
acaagacaccaggcggaga

SEQ ID NO: 2306194 - RNA, 19 nt, Artificial Sequence
  Description of Artificial Sequence: Synthetic oligonucleotide
gcaacugcgaguggucuuc

SEQ ID NO: 2306195 - RNA, 19 nt, Artificial Sequence
  Description of Artificial Sequence: Synthetic oligonucleotide
cgaguggucuucagcaaac

SEQ ID NO: 2306196 - RNA, 19 nt, Artificial Sequence
  Description of Artificial Sequence: Synthetic oligonucleotide
agucugugguuuacuccca

SEQ ID NO: 2306197 - RNA, 19 nt, Artificial Sequence
  Description of Artificial Sequence: Synthetic oligonucleotide
caggaaccuuuuauugucu

SEQ ID NO: 2306198 - RNA, 19 nt, Artificial Sequence
  Description of Artificial Sequence: Synthetic oligonucleotide
gcugucaaacucccucgga

SEQ ID NO: 2306199 - RNA, 19 nt, Artificial Sequence
  Description of Artificial Sequence: Synthetic oligonucleotide
gacggucgaguuucacugu

SEQ ID NO: 2306200 - RNA, 19 nt, Artificial Sequence
  Description of Artificial Sequence: Synthetic oligonucleotide
cauagcuaccgguccauuu

SEQ ID NO: 2306201 - RNA, 19 nt, Artificial Sequence
  Description of Artificial Sequence: Synthetic oligonucleotide
ggaaaugacggucgaguuu

SEQ ID NO: 2306202 - RNA, 19 nt, Artificial Sequence
  Description of Artificial Sequence: Synthetic oligonucleotide
gggcuuuaaacagacugua

SEQ ID NO: 2306203 - RNA, 19 nt, Artificial Sequence
  Description of Artificial Sequence: Synthetic oligonucleotide
auccgccaggggcacggcu

SEQ ID NO: 2306204 - RNA, 19 nt, Artificial Sequence
  Description of Artificial Sequence: Synthetic oligonucleotide
gaacugugcagaggcaaau

SEQ ID NO: 2306205 - RNA, 19 nt, Artificial Sequence
  Description of Artificial Sequence: Synthetic oligonucleotide
gucaaucauggaaaacaau

SEQ ID NO: 2306206 - RNA, 19 nt, Artificial Sequence
  Description of Artificial Sequence: Synthetic oligonucleotide
cucuuaucugaaccauacu

SEQ ID NO: 2306207 - RNA, 19 nt, Artificial Sequence
  Description of Artificial Sequence: Synthetic oligonucleotide
cccaauuguggcgcucugg

SEQ ID NO: 2306208 - RNA, 19 nt, Artificial Sequence
  Description of Artificial Sequence: Synthetic oligonucleotide
guacgcucuugaaauggua

SEQ ID NO: 2306209 - RNA, 19 nt, Artificial Sequence
  Description of Artificial Sequence: Synthetic oligonucleotide
accucccaauuguggcgcu

SEQ ID NO: 2306210 - RNA, 19 nt, Artificial Sequence
  Description of Artificial Sequence: Synthetic oligonucleotide
gugaggacgguaacuggcu

SEQ ID NO: 2306211 - RNA, 19 nt, Artificial Sequence
  Description of Artificial Sequence: Synthetic oligonucleotide
gcaacccaagugugaauaa

SEQ ID NO: 2306212 - RNA, 19 nt, Artificial Sequence
  Description of Artificial Sequence: Synthetic oligonucleotide
ggucgaguuucacuguuau

SEQ ID NO: 2306213 - RNA, 19 nt, Artificial Sequence
  Description of Artificial Sequence: Synthetic oligonucleotide
ccauacuacagucaaucau

SEQ ID NO: 2306214 - RNA, 19 nt, Artificial Sequence
  Description of Artificial Sequence: Synthetic oligonucleotide
ggcuuuaaacagacuguaa

SEQ ID NO: 2306215 - RNA, 19 nt, Artificial Sequence
  Description of Artificial Sequence: Synthetic oligonucleotide
caggcggagaaguccugaa

SEQ ID NO: 2306216 - RNA, 19 nt, Artificial Sequence
  Description of Artificial Sequence: Synthetic oligonucleotide
caccaggcggagaaguccu

SEQ ID NO: 2306217 - RNA, 19 nt, Artificial Sequence
  Description of Artificial Sequence: Synthetic oligonucleotide
ccucccauugcagccgacc

SEQ ID NO: 2306218 - RNA, 19 nt, Artificial Sequence
  Description of Artificial Sequence: Synthetic oligonucleotide
cuaggagaaugccucccau

SEQ ID NO: 2306219 - RNA, 19 nt, Artificial Sequence
  Description of Artificial Sequence: Synthetic oligonucleotide
acccagugacaggaauccu

SEQ ID NO: 2306220 - RNA, 19 nt, Artificial Sequence
  Description of Artificial Sequence: Synthetic oligonucleotide
gaaccauacuacagucaau

SEQ ID NO: 2306221 - RNA, 19 nt, Artificial Sequence
  Description of Artificial Sequence: Synthetic oligonucleotide
ccgcuuggccaccacugcc

SEQ ID NO: 2306222 - RNA, 19 nt, Artificial Sequence
  Description of Artificial Sequence: Synthetic oligonucleotide
ggcucucucgcguacuccu

SEQ ID NO: 2306223 - RNA, 19 nt, Artificial Sequence
  Description of Artificial Sequence: Synthetic oligonucleotide
cgacccaaccauagcuacc

SEQ ID NO: 2306224 - RNA, 19 nt, Artificial Sequence
  Description of Artificial Sequence: Synthetic oligonucleotide
uauuugcccuuugguccuu

SEQ ID NO: 2306225 - RNA, 19 nt, Artificial Sequence
  Description of Artificial Sequence: Synthetic oligonucleotide
ggagaauuucgaaaaccuu

SEQ ID NO: 2306226 - RNA, 19 nt, Artificial Sequence
  Description of Artificial Sequence: Synthetic oligonucleotide
cauuucuugcugccaggau

SEQ ID NO: 2306227 - RNA, 19 nt, Artificial Sequence
  Description of Artificial Sequence: Synthetic oligonucleotide
gccaccuaugguacccaug

SEQ ID NO: 2306228 - RNA, 19 nt, Artificial Sequence
  Description of Artificial Sequence: Synthetic oligonucleotide
gugcagaggcaaaucuugu

SEQ ID NO: 2306229 - RNA, 19 nt, Artificial Sequence
  Description of Artificial Sequence: Synthetic oligonucleotide
cuagggcuuuaaacagacu

SEQ ID NO: 2306230 - RNA, 19 nt, Artificial Sequence
  Description of Artificial Sequence: Synthetic oligonucleotide
cccaggaaccuuuuauugu

SEQ ID NO: 2306231 - RNA, 19 nt, Artificial Sequence
  Description of Artificial Sequence: Synthetic oligonucleotide
gcuccuguuaaggcaccac

SEQ ID NO: 2306232 - RNA, 19 nt, Artificial Sequence
  Description of Artificial Sequence: Synthetic oligonucleotide
ccgguagucuccaaagggu

SEQ ID NO: 2306233 - RNA, 19 nt, Artificial Sequence
  Description of Artificial Sequence: Synthetic oligonucleotide
cccucugagucucuuuuaa

SEQ ID NO: 2306234 - RNA, 19 nt, Artificial Sequence
  Description of Artificial Sequence: Synthetic oligonucleotide
cgcguacuccuccaucuug

SEQ ID NO: 2306235 - RNA, 19 nt, Artificial Sequence
  Description of Artificial Sequence: Synthetic oligonucleotide
aggcaccacuagugaugga

SEQ ID NO: 2306236 - RNA, 19 nt, Artificial Sequence
  Description of Artificial Sequence: Synthetic oligonucleotide
gcacauguacauguacgcu

SEQ ID NO: 2306237 - RNA, 19 nt, Artificial Sequence
  Description of Artificial Sequence: Synthetic oligonucleotide
uacugccgguagucuccaa

SEQ ID NO: 2306238 - RNA, 19 nt, Artificial Sequence
  Description of Artificial Sequence: Synthetic oligonucleotide
accaggcggagaaguccug

SEQ ID NO: 2306239 - RNA, 19 nt, Artificial Sequence
  Description of Artificial Sequence: Synthetic oligonucleotide
ccuacugauacugccggua

SEQ ID NO: 2306240 - RNA, 19 nt, Artificial Sequence
  Description of Artificial Sequence: Synthetic oligonucleotide
gucgaguuucacuguuauu

SEQ ID NO: 2306241 - RNA, 19 nt, Artificial Sequence
  Description of Artificial Sequence: Synthetic oligonucleotide
cucccaauuguggcgcucu

SEQ ID NO: 2306242 - RNA, 19 nt, Artificial Sequence
  Description of Artificial Sequence: Synthetic oligonucleotide
auuugcccuuugguccuuu

SEQ ID NO: 2306243 - RNA, 19 nt, Artificial Sequence
  Description of Artificial Sequence: Synthetic oligonucleotide
caauuguggcgcucugguu

SEQ ID NO: 2306244 - RNA, 19 nt, Artificial Sequence
  Description of Artificial Sequence: Synthetic oligonucleotide
gcaaagcuaccucccaauu

SEQ ID NO: 2306245 - RNA, 19 nt, Artificial Sequence
  Description of Artificial Sequence: Synthetic oligonucleotide
uggcccgcuuggccaccac

SEQ ID NO: 2306246 - RNA, 19 nt, Artificial Sequence
  Description of Artificial Sequence: Synthetic oligonucleotide
caacugcgaguggucuuca

SEQ ID NO: 2306247 - RNA, 19 nt, Artificial Sequence
  Description of Artificial Sequence: Synthetic oligonucleotide
agcuaccgguccauuucuu

SEQ ID NO: 2306248 - RNA, 19 nt, Artificial Sequence
  Description of Artificial Sequence: Synthetic oligonucleotide
ugccccaccuagggcuuua

SEQ ID NO: 2306249 - RNA, 19 nt, Artificial Sequence
  Description of Artificial Sequence: Synthetic oligonucleotide
cccaaccauagcuaccggu

SEQ ID NO: 2306250 - RNA, 19 nt, Artificial Sequence
  Description of Artificial Sequence: Synthetic oligonucleotide
gcacggcucucucgcguac

SEQ ID NO: 2306251 - RNA, 19 nt, Artificial Sequence
  Description of Artificial Sequence: Synthetic oligonucleotide
ggcacggcucucucgcgua

SEQ ID NO: 2306252 - RNA, 19 nt, Artificial Sequence
  Description of Artificial Sequence: Synthetic oligonucleotide
uuguggcgcucugguuuua

SEQ ID NO: 2306253 - RNA, 19 nt, Artificial Sequence
  Description of Artificial Sequence: Synthetic oligonucleotide
cagucccaggaaccuuuua

SEQ ID NO: 2306254 - RNA, 19 nt, Artificial Sequence
  Description of Artificial Sequence: Synthetic oligonucleotide
gccucuuaucugaaccaua

SEQ ID NO: 2306255 - RNA, 19 nt, Artificial Sequence
  Description of Artificial Sequence: Synthetic oligonucleotide
guggcgcucugguuuuaau

SEQ ID NO: 2306256 - RNA, 19 nt, Artificial Sequence
  Description of Artificial Sequence: Synthetic oligonucleotide
gccgacccaaccauagcua

SEQ ID NO: 2306257 - RNA, 19 nt, Artificial Sequence
  Description of Artificial Sequence: Synthetic oligonucleotide
caccuaugguacccauggu

SEQ ID NO: 2306258 - RNA, 19 nt, Artificial Sequence
  Description of Artificial Sequence: Synthetic oligonucleotide
ggcuccuguuaaggcacca

SEQ ID NO: 2306259 - RNA, 19 nt, Artificial Sequence
  Description of Artificial Sequence: Synthetic oligonucleotide
gucucuucguggcccgcuu

SEQ ID NO: 2306260 - RNA, 19 nt, Artificial Sequence
  Description of Artificial Sequence: Synthetic oligonucleotide
ccaggcggagaaguccuga

SEQ ID NO: 2306261 - RNA, 19 nt, Artificial Sequence
  Description of Artificial Sequence: Synthetic oligonucleotide
gggcacggcucucucgcgu

SEQ ID NO: 2306262 - RNA, 19 nt, Artificial Sequence
  Description of Artificial Sequence: Synthetic oligonucleotide
caccacagucauccacaau

SEQ ID NO: 2306263 - RNA, 19 nt, Artificial Sequence
  Description of Artificial Sequence: Synthetic oligonucleotide
ccucccaauuguggcgcuc

SEQ ID NO: 2306264 - RNA, 19 nt, Artificial Sequence
  Description of Artificial Sequence: Synthetic oligonucleotide
guggcccgcuuggccacca

SEQ ID NO: 2306265 - RNA, 19 nt, Artificial Sequence
  Description of Artificial Sequence: Synthetic oligonucleotide
cucucgcguacuccuccau

SEQ ID NO: 2306266 - RNA, 19 nt, Artificial Sequence
  Description of Artificial Sequence: Synthetic oligonucleotide
cacggcucucucgcguacu

SEQ ID NO: 2306267 - RNA, 19 nt, Artificial Sequence
  Description of Artificial Sequence: Synthetic oligonucleotide
ccccucugagucucuuuua

SEQ ID NO: 2306268 - RNA, 19 nt, Artificial Sequence
  Description of Artificial Sequence: Synthetic oligonucleotide
cggcucucucgcguacucc

SEQ ID NO: 2306269 - RNA, 19 nt, Artificial Sequence
  Description of Artificial Sequence: Synthetic oligonucleotide
ggccaccacugccccaccu

SEQ ID NO: 2306270 - RNA, 19 nt, Artificial Sequence
  Description of Artificial Sequence: Synthetic oligonucleotide
ccucggagucugugguuua

SEQ ID NO: 2306271 - RNA, 19 nt, Artificial Sequence
  Description of Artificial Sequence: Synthetic oligonucleotide
cggucgaguuucacuguua

SEQ ID NO: 2306272 - RNA, 19 nt, Artificial Sequence
  Description of Artificial Sequence: Synthetic oligonucleotide
ccccaccuagggcuuuaaa

SEQ ID NO: 2306273 - RNA, 19 nt, Artificial Sequence
  Description of Artificial Sequence: Synthetic oligonucleotide
gccucccauugcagccgac

SEQ ID NO: 2306274 - RNA, 19 nt, Artificial Sequence
  Description of Artificial Sequence: Synthetic oligonucleotide
cguggcccgcuuggccacc

SEQ ID NO: 2306275 - RNA, 19 nt, Artificial Sequence
  Description of Artificial Sequence: Synthetic oligonucleotide
ccgccaggggcacggcucu

SEQ ID NO: 2306276 - RNA, 19 nt, Artificial Sequence
  Description of Artificial Sequence: Synthetic oligonucleotide
gccccaccuagggcuuuaa

SEQ ID NO: 2306277 - RNA, 19 nt, Artificial Sequence
  Description of Artificial Sequence: Synthetic oligonucleotide
cgccaccuaugguacccau

SEQ ID NO: 2306278 - RNA, 19 nt, Artificial Sequence
  Description of Artificial Sequence: Synthetic oligonucleotide
cgccaggggcacggcucuc

SEQ ID NO: 2306279 - RNA, 19 nt, Artificial Sequence
  Description of Artificial Sequence: Synthetic oligonucleotide
auugauuugacacacuucc

SEQ ID NO: 2306280 - RNA, 19 nt, Artificial Sequence
  Description of Artificial Sequence: Synthetic oligonucleotide
aacuuuacuacccuaaauc

SEQ ID NO: 2306281 - RNA, 19 nt, Artificial Sequence
  Description of Artificial Sequence: Synthetic oligonucleotide
uuucuaauagcauugcugg

SEQ ID NO: 2306282 - RNA, 19 nt, Artificial Sequence
  Description of Artificial Sequence: Synthetic oligonucleotide
aauuccaggccuuggaugc

SEQ ID NO: 2306283 - RNA, 19 nt, Artificial Sequence
  Description of Artificial Sequence: Synthetic oligonucleotide
uauaauuuccucaacacuc

SEQ ID NO: 2306284 - RNA, 19 nt, Artificial Sequence
  Description of Artificial Sequence: Synthetic oligonucleotide
acuuuacuacccuaaaucc

SEQ ID NO: 2306285 - RNA, 19 nt, Artificial Sequence
  Description of Artificial Sequence: Synthetic oligonucleotide
auuuauagacauuuuauug

SEQ ID NO: 2306286 - RNA, 19 nt, Artificial Sequence
  Description of Artificial Sequence: Synthetic oligonucleotide
aaauaauaauccugcuccc

SEQ ID NO: 2306287 - RNA, 19 nt, Artificial Sequence
  Description of Artificial Sequence: Synthetic oligonucleotide
ucuaguaagacucucuaca

SEQ ID NO: 2306288 - RNA, 19 nt, Artificial Sequence
  Description of Artificial Sequence: Synthetic oligonucleotide
uauugaacucauuuuauug

SEQ ID NO: 2306289 - RNA, 19 nt, Artificial Sequence
  Description of Artificial Sequence: Synthetic oligonucleotide
uuuauaauuuccucaacac

SEQ ID NO: 2306290 - RNA, 19 nt, Artificial Sequence
  Description of Artificial Sequence: Synthetic oligonucleotide
auagacauuuuauugaacu

SEQ ID NO: 2306291 - RNA, 19 nt, Artificial Sequence
  Description of Artificial Sequence: Synthetic oligonucleotide
  modified_base (15)..(15): a, c, u, g, unknown or other
ugagaauaagcccunuucc

SEQ ID NO: 2306292 - RNA, 19 nt, Artificial Sequence
  Description of Artificial Sequence: Synthetic oligonucleotide
aaaccugauccacauuccc

SEQ ID NO: 2306293 - RNA, 19 nt, Artificial Sequence
  Description of Artificial Sequence: Synthetic oligonucleotide
  modified_base (14)..(14): a, c, u, g, unknown or other
gagaauaagcccunuuccc

SEQ ID NO: 2306294 - RNA, 19 nt, Artificial Sequence
  Description of Artificial Sequence: Synthetic oligonucleotide
aauaauccugcucccaaag

SEQ ID NO: 2306295 - RNA, 19 nt, Artificial Sequence
  Description of Artificial Sequence: Synthetic oligonucleotide
ugauuuauagacauuuuau

SEQ ID NO: 2306296 - RNA, 19 nt, Artificial Sequence
  Description of Artificial Sequence: Synthetic oligonucleotide
ugauuugacacacuucccc

SEQ ID NO: 2306297 - RNA, 19 nt, Artificial Sequence
  Description of Artificial Sequence: Synthetic oligonucleotide
ucuaucuuuauaauuuccu

SEQ ID NO: 2306298 - RNA, 19 nt, Artificial Sequence
  Description of Artificial Sequence: Synthetic oligonucleotide
ucccacauaacccuggcag

SEQ ID NO: 2306299 - RNA, 19 nt, Artificial Sequence
  Description of Artificial Sequence: Synthetic oligonucleotide
uuauaauuuccucaacacu

SEQ ID NO: 2306300 - RNA, 19 nt, Artificial Sequence
  Description of Artificial Sequence: Synthetic oligonucleotide
aacagcacccucuucuagg

SEQ ID NO: 2306301 - RNA, 19 nt, Artificial Sequence
  Description of Artificial Sequence: Synthetic oligonucleotide
gugcuaguaaaccugaucc

SEQ ID NO: 2306302 - RNA, 19 nt, Artificial Sequence
  Description of Artificial Sequence: Synthetic oligonucleotide
ugagaaagggccauaauua

SEQ ID NO: 2306303 - RNA, 19 nt, Artificial Sequence
  Description of Artificial Sequence: Synthetic oligonucleotide
auugaacucauuuuauuga

SEQ ID NO: 2306304 - RNA, 19 nt, Artificial Sequence
  Description of Artificial Sequence: Synthetic oligonucleotide
uguaccuaacuuuacuacc

SEQ ID NO: 2306305 - RNA, 19 nt, Artificial Sequence
  Description of Artificial Sequence: Synthetic oligonucleotide
uaauccugcucccaaaggc

SEQ ID NO: 2306306 - RNA, 19 nt, Artificial Sequence
  Description of Artificial Sequence: Synthetic oligonucleotide
ucaaacaagagugugcaug

SEQ ID NO: 2306307 - RNA, 19 nt, Artificial Sequence
  Description of Artificial Sequence: Synthetic oligonucleotide
acaugauacaaucuggggu

SEQ ID NO: 2306308 - RNA, 19 nt, Artificial Sequence
  Description of Artificial Sequence: Synthetic oligonucleotide
ucuaauagcauugcuggcc

SEQ ID NO: 2306309 - RNA, 19 nt, Artificial Sequence
  Description of Artificial Sequence: Synthetic oligonucleotide
  modified_base (7)..(7): a, c, u, g, unknown or other
agcccunuucccuucuucc

SEQ ID NO: 2306310 - RNA, 19 nt, Artificial Sequence
  Description of Artificial Sequence: Synthetic oligonucleotide
uuuuauugauuugacacac

SEQ ID NO: 2306311 - RNA, 19 nt, Artificial Sequence
  Description of Artificial Sequence: Synthetic oligonucleotide
aacagggaggucucuguac

SEQ ID NO: 2306312 - RNA, 19 nt, Artificial Sequence
  Description of Artificial Sequence: Synthetic oligonucleotide
ucuagcacaugauacaauc

SEQ ID NO: 2306313 - RNA, 19 nt, Artificial Sequence
  Description of Artificial Sequence: Synthetic oligonucleotide
ucacaagcccugaacaggg

SEQ ID NO: 2306314 - RNA, 19 nt, Artificial Sequence
  Description of Artificial Sequence: Synthetic oligonucleotide
ucucugguagcacuaaccc

SEQ ID NO: 2306315 - RNA, 19 nt, Artificial Sequence
  Description of Artificial Sequence: Synthetic oligonucleotide
aguaagacucucuacaaaa

SEQ ID NO: 2306316 - RNA, 19 nt, Artificial Sequence
  Description of Artificial Sequence: Synthetic oligonucleotide
guaaaccugauccacauuc

SEQ ID NO: 2306317 - RNA, 19 nt, Artificial Sequence
  Description of Artificial Sequence: Synthetic oligonucleotide
cugacacaggaaaugaggg

SEQ ID NO: 2306318 - RNA, 19 nt, Artificial Sequence
  Description of Artificial Sequence: Synthetic oligonucleotide
aaugcaaagggcacugggg

SEQ ID NO: 2306319 - RNA, 19 nt, Artificial Sequence
  Description of Artificial Sequence: Synthetic oligonucleotide
  modified_base (11)..(11): a, c, u, g, unknown or other
aauaagcccunuucccuuc

SEQ ID NO: 2306320 - RNA, 19 nt, Artificial Sequence
  Description of Artificial Sequence: Synthetic oligonucleotide
uuuacuacccuaaauccuu

SEQ ID NO: 2306321 - RNA, 19 nt, Artificial Sequence
  Description of Artificial Sequence: Synthetic oligonucleotide
caaacaagagugugcaugc

SEQ ID NO: 2306322 - RNA, 19 nt, Artificial Sequence
  Description of Artificial Sequence: Synthetic oligonucleotide
uuauugauuugacacacuu

SEQ ID NO: 2306323 - RNA, 19 nt, Artificial Sequence
  Description of Artificial Sequence: Synthetic oligonucleotide
auuucuaauagcauugcug

SEQ ID NO: 2306324 - RNA, 19 nt, Artificial Sequence
  Description of Artificial Sequence: Synthetic oligonucleotide
uuccucaacacucauguau

SEQ ID NO: 2306325 - RNA, 19 nt, Artificial Sequence
  Description of Artificial Sequence: Synthetic oligonucleotide
ucugggguaggcuaggcgc

SEQ ID NO: 2306326 - RNA, 19 nt, Artificial Sequence
  Description of Artificial Sequence: Synthetic oligonucleotide
  modified_base (16)..(16): a, c, u, g, unknown or other
gugagaauaagcccunuuc

SEQ ID NO: 2306327 - RNA, 19 nt, Artificial Sequence
  Description of Artificial Sequence: Synthetic oligonucleotide
cuuuauaauuuccucaaca

SEQ ID NO: 2306328 - RNA, 19 nt, Artificial Sequence
  Description of Artificial Sequence: Synthetic oligonucleotide
auggggaaaucaaugaugg

SEQ ID NO: 2306329 - RNA, 19 nt, Artificial Sequence
  Description of Artificial Sequence: Synthetic oligonucleotide
aaccugauccacauucccc

SEQ ID NO: 2306330 - RNA, 19 nt, Artificial Sequence
  Description of Artificial Sequence: Synthetic oligonucleotide
uguaugugaccaccaaccc

SEQ ID NO: 2306331 - RNA, 19 nt, Artificial Sequence
  Description of Artificial Sequence: Synthetic oligonucleotide
uccucaacacucauguaug

SEQ ID NO: 2306332 - RNA, 19 nt, Artificial Sequence
  Description of Artificial Sequence: Synthetic oligonucleotide
acaagagugugcaugcccc

SEQ ID NO: 2306333 - RNA, 19 nt, Artificial Sequence
  Description of Artificial Sequence: Synthetic oligonucleotide
aaaucaaugauggcuccug

SEQ ID NO: 2306334 - RNA, 19 nt, Artificial Sequence
  Description of Artificial Sequence: Synthetic oligonucleotide
cuuggaugcucucugguag

SEQ ID NO: 2306335 - RNA, 19 nt, Artificial Sequence
  Description of Artificial Sequence: Synthetic oligonucleotide
aauaauaauccugcuccca

SEQ ID NO: 2306336 - RNA, 19 nt, Artificial Sequence
  Description of Artificial Sequence: Synthetic oligonucleotide
cuaauagcauugcuggccc

SEQ ID NO: 2306337 - RNA, 19 nt, Artificial Sequence
  Description of Artificial Sequence: Synthetic oligonucleotide
acagucucccacauaaccc

SEQ ID NO: 2306338 - RNA, 19 nt, Artificial Sequence
  Description of Artificial Sequence: Synthetic oligonucleotide
guaauaaggccacugguga

SEQ ID NO: 2306339 - RNA, 19 nt, Artificial Sequence
  Description of Artificial Sequence: Synthetic oligonucleotide
acucauguaugugaccacc

SEQ ID NO: 2306340 - RNA, 19 nt, Artificial Sequence
  Description of Artificial Sequence: Synthetic oligonucleotide
uggucaaacaagagugugc

SEQ ID NO: 2306341 - RNA, 19 nt, Artificial Sequence
  Description of Artificial Sequence: Synthetic oligonucleotide
gaaagggccauaauuacuc

SEQ ID NO: 2306342 - RNA, 19 nt, Artificial Sequence
  Description of Artificial Sequence: Synthetic oligonucleotide
gaaaugaggggacaaugca

SEQ ID NO: 2306343 - RNA, 19 nt, Artificial Sequence
  Description of Artificial Sequence: Synthetic oligonucleotide
ucuuucacgccccucccag

SEQ ID NO: 2306344 - RNA, 19 nt, Artificial Sequence
  Description of Artificial Sequence: Synthetic oligonucleotide
cacaugauacaaucugggg

SEQ ID NO: 2306345 - RNA, 19 nt, Artificial Sequence
  Description of Artificial Sequence: Synthetic oligonucleotide
aaacaagagugugcaugcc

SEQ ID NO: 2306346 - RNA, 19 nt, Artificial Sequence
  Description of Artificial Sequence: Synthetic oligonucleotide
gauacaaucugggguaggc

SEQ ID NO: 2306347 - RNA, 19 nt, Artificial Sequence
  Description of Artificial Sequence: Synthetic oligonucleotide
cacagucucccacauaacc

SEQ ID NO: 2306348 - RNA, 19 nt, Artificial Sequence
  Description of Artificial Sequence: Synthetic oligonucleotide
aauuggcacagugagaaua

SEQ ID NO: 2306349 - RNA, 19 nt, Artificial Sequence
  Description of Artificial Sequence: Synthetic oligonucleotide
auaauaauccugcucccaa

SEQ ID NO: 2306350 - RNA, 19 nt, Artificial Sequence
  Description of Artificial Sequence: Synthetic oligonucleotide
uugaacucauuuuauugau

SEQ ID NO: 2306351 - RNA, 19 nt, Artificial Sequence
  Description of Artificial Sequence: Synthetic oligonucleotide
ucauuucccagacccucgg

SEQ ID NO: 2306352 - RNA, 19 nt, Artificial Sequence
  Description of Artificial Sequence: Synthetic oligonucleotide
  modified_base (8)..(8): a, c, u, g, unknown or other
aagcccunuucccuucuuc

SEQ ID NO: 2306353 - RNA, 19 nt, Artificial Sequence
  Description of Artificial Sequence: Synthetic oligonucleotide
gauuugacacacuucccca

SEQ ID NO: 2306354 - RNA, 19 nt, Artificial Sequence
  Description of Artificial Sequence: Synthetic oligonucleotide
uugauuugacacacuuccc

SEQ ID NO: 2306355 - RNA, 19 nt, Artificial Sequence
  Description of Artificial Sequence: Synthetic oligonucleotide
aaucuagcacaugauacaa

SEQ ID NO: 2306356 - RNA, 19 nt, Artificial Sequence
  Description of Artificial Sequence: Synthetic oligonucleotide
cuguaccuaacuuuacuac

SEQ ID NO: 2306357 - RNA, 19 nt, Artificial Sequence
  Description of Artificial Sequence: Synthetic oligonucleotide
agggccauaauuacucccc

SEQ ID NO: 2306358 - RNA, 19 nt, Artificial Sequence
  Description of Artificial Sequence: Synthetic oligonucleotide
cucucugguagcacuaacc

SEQ ID NO: 2306359 - RNA, 19 nt, Artificial Sequence
  Description of Artificial Sequence: Synthetic oligonucleotide
aaucaaugauggcuccuga

SEQ ID NO: 2306360 - RNA, 19 nt, Artificial Sequence
  Description of Artificial Sequence: Synthetic oligonucleotide
uaacuuuacuacccuaaau

SEQ ID NO: 2306361 - RNA, 19 nt, Artificial Sequence
  Description of Artificial Sequence: Synthetic oligonucleotide
aagagugugcaugccccgc

SEQ ID NO: 2306362 - RNA, 19 nt, Artificial Sequence
  Description of Artificial Sequence: Synthetic oligonucleotide
caaugcaaagggcacuggg

SEQ ID NO: 2306363 - RNA, 19 nt, Artificial Sequence
  Description of Artificial Sequence: Synthetic oligonucleotide
gacacaggaaaugagggga

SEQ ID NO: 2306364 - RNA, 19 nt, Artificial Sequence
  Description of Artificial Sequence: Synthetic oligonucleotide
uggcuccugagaaagggcc

SEQ ID NO: 2306365 - RNA, 19 nt, Artificial Sequence
  Description of Artificial Sequence: Synthetic oligonucleotide
uuuauugauuugacacacu

SEQ ID NO: 2306366 - RNA, 19 nt, Artificial Sequence
  Description of Artificial Sequence: Synthetic oligonucleotide
uuugacacacuuccccacu

SEQ ID NO: 2306367 - RNA, 19 nt, Artificial Sequence
  Description of Artificial Sequence: Synthetic oligonucleotide
augauggcuccugagaaag

SEQ ID NO: 2306368 - RNA, 19 nt, Artificial Sequence
  Description of Artificial Sequence: Synthetic oligonucleotide
guaccuaacuuuacuaccc

SEQ ID NO: 2306369 - RNA, 19 nt, Artificial Sequence
  Description of Artificial Sequence: Synthetic oligonucleotide
aaacccaggccugaccuag

SEQ ID NO: 2306370 - RNA, 19 nt, Artificial Sequence
  Description of Artificial Sequence: Synthetic oligonucleotide
uaggcgcugacacaggaaa

SEQ ID NO: 2306371 - RNA, 19 nt, Artificial Sequence
  Description of Artificial Sequence: Synthetic oligonucleotide
uucuaauagcauugcuggc

SEQ ID NO: 2306372 - RNA, 19 nt, Artificial Sequence
  Description of Artificial Sequence: Synthetic oligonucleotide
uuucacgccccucccaggc

SEQ ID NO: 2306373 - RNA, 19 nt, Artificial Sequence
  Description of Artificial Sequence: Synthetic oligonucleotide
ccaaucuagcacaugauac

SEQ ID NO: 2306374 - RNA, 19 nt, Artificial Sequence
  Description of Artificial Sequence: Synthetic oligonucleotide
uacccuaaauccuuccuuc

SEQ ID NO: 2306375 - RNA, 19 nt, Artificial Sequence
  Description of Artificial Sequence: Synthetic oligonucleotide
acaagcccugaacagggag

SEQ ID NO: 2306376 - RNA, 19 nt, Artificial Sequence
  Description of Artificial Sequence: Synthetic oligonucleotide
ugcuaguaaaccugaucca

SEQ ID NO: 2306377 - RNA, 19 nt, Artificial Sequence
  Description of Artificial Sequence: Synthetic oligonucleotide
cucugguagcacuaacccg

SEQ ID NO: 2306378 - RNA, 19 nt, Artificial Sequence
  Description of Artificial Sequence: Synthetic oligonucleotide
guaggcuaggcgcugacac

SEQ ID NO: 2306379 - RNA, 19 nt, Artificial Sequence
  Description of Artificial Sequence: Synthetic oligonucleotide
aauagcauugcuggccccu

SEQ ID NO: 2306380 - RNA, 19 nt, Artificial Sequence
  Description of Artificial Sequence: Synthetic oligonucleotide
guagcacuaacccgcacug

SEQ ID NO: 2306381 - RNA, 19 nt, Artificial Sequence
  Description of Artificial Sequence: Synthetic oligonucleotide
cuaaauccuuccuucuuuc

SEQ ID NO: 2306382 - RNA, 19 nt, Artificial Sequence
  Description of Artificial Sequence: Synthetic oligonucleotide
uaguaagacucucuacaaa

SEQ ID NO: 2306383 - RNA, 19 nt, Artificial Sequence
  Description of Artificial Sequence: Synthetic oligonucleotide
agcacuaacccgcacuggu

SEQ ID NO: 2306384 - RNA, 19 nt, Artificial Sequence
  Description of Artificial Sequence: Synthetic oligonucleotide
caacacucauguaugugac

SEQ ID NO: 2306385 - RNA, 19 nt, Artificial Sequence
  Description of Artificial Sequence: Synthetic oligonucleotide
agcucuaucuuuauaauuu

SEQ ID NO: 2306386 - RNA, 19 nt, Artificial Sequence
  Description of Artificial Sequence: Synthetic oligonucleotide
  modified_base (13)..(13): a, c, u, g, unknown or other
agaauaagcccunuucccu

SEQ ID NO: 2306387 - RNA, 19 nt, Artificial Sequence
  Description of Artificial Sequence: Synthetic oligonucleotide
ucggccaaacucuccaagc

SEQ ID NO: 2306388 - RNA, 19 nt, Artificial Sequence
  Description of Artificial Sequence: Synthetic oligonucleotide
auagcucuaucuuuauaau

SEQ ID NO: 2306389 - RNA, 19 nt, Artificial Sequence
  Description of Artificial Sequence: Synthetic oligonucleotide
aaaugaggggacaaugcaa

SEQ ID NO: 2306390 - RNA, 19 nt, Artificial Sequence
  Description of Artificial Sequence: Synthetic oligonucleotide
uaauaaggccacuggugac

SEQ ID NO: 2306391 - RNA, 19 nt, Artificial Sequence
  Description of Artificial Sequence: Synthetic oligonucleotide
aaucugggguaggcuaggc

SEQ ID NO: 2306392 - RNA, 19 nt, Artificial Sequence
  Description of Artificial Sequence: Synthetic oligonucleotide
gguaauaaggccacuggug

SEQ ID NO: 2306393 - RNA, 19 nt, Artificial Sequence
  Description of Artificial Sequence: Synthetic oligonucleotide
caugacugggaagaagggc

SEQ ID NO: 2306394 - RNA, 19 nt, Artificial Sequence
  Description of Artificial Sequence: Synthetic oligonucleotide
cuuccuucuuucacgcccc

SEQ ID NO: 2306395 - RNA, 19 nt, Artificial Sequence
  Description of Artificial Sequence: Synthetic oligonucleotide
ugacacacuuccccacucc

SEQ ID NO: 2306396 - RNA, 19 nt, Artificial Sequence
  Description of Artificial Sequence: Synthetic oligonucleotide
acuacccuaaauccuuccu

SEQ ID NO: 2306397 - RNA, 19 nt, Artificial Sequence
  Description of Artificial Sequence: Synthetic oligonucleotide
ugccauagcucuaucuuua

SEQ ID NO: 2306398 - RNA, 19 nt, Artificial Sequence
  Description of Artificial Sequence: Synthetic oligonucleotide
cucuaguaagacucucuac

SEQ ID NO: 2306399 - RNA, 19 nt, Artificial Sequence
  Description of Artificial Sequence: Synthetic oligonucleotide
ugaacucauuuuauugauu

SEQ ID NO: 2306400 - RNA, 19 nt, Artificial Sequence
  Description of Artificial Sequence: Synthetic oligonucleotide
uaccuaacuuuacuacccu

SEQ ID NO: 2306401 - RNA, 19 nt, Artificial Sequence
  Description of Artificial Sequence: Synthetic oligonucleotide
ugugcaugccccgcaacag

SEQ ID NO: 2306402 - RNA, 19 nt, Artificial Sequence
  Description of Artificial Sequence: Synthetic oligonucleotide
gggguaauaaggccacugg

SEQ ID NO: 2306403 - RNA, 19 nt, Artificial Sequence
  Description of Artificial Sequence: Synthetic oligonucleotide
uacuacccuaaauccuucc

SEQ ID NO: 2306404 - RNA, 19 nt, Artificial Sequence
  Description of Artificial Sequence: Synthetic oligonucleotide
cuaaagcagggucccaaac

SEQ ID NO: 2306405 - RNA, 19 nt, Artificial Sequence
  Description of Artificial Sequence: Synthetic oligonucleotide
cuaguaaaccugauccaca

SEQ ID NO: 2306406 - RNA, 19 nt, Artificial Sequence
  Description of Artificial Sequence: Synthetic oligonucleotide
acacuuccccacuccaauc

SEQ ID NO: 2306407 - RNA, 19 nt, Artificial Sequence
  Description of Artificial Sequence: Synthetic oligonucleotide
ucuaaagcagggucccaaa

SEQ ID NO: 2306408 - RNA, 19 nt, Artificial Sequence
  Description of Artificial Sequence: Synthetic oligonucleotide
cccuaauuggcacagugag

SEQ ID NO: 2306409 - RNA, 19 nt, Artificial Sequence
  Description of Artificial Sequence: Synthetic oligonucleotide
agugugcaugccccgcaac

SEQ ID NO: 2306410 - RNA, 19 nt, Artificial Sequence
  Description of Artificial Sequence: Synthetic oligonucleotide
cuaguaagacucucuacaa

SEQ ID NO: 2306411 - RNA, 19 nt, Artificial Sequence
  Description of Artificial Sequence: Synthetic oligonucleotide
ugcucccaaaggcaggggu

SEQ ID NO: 2306412 - RNA, 19 nt, Artificial Sequence
  Description of Artificial Sequence: Synthetic oligonucleotide
caagagugugcaugccccg

SEQ ID NO: 2306413 - RNA, 19 nt, Artificial Sequence
  Description of Artificial Sequence: Synthetic oligonucleotide
caaaggcagggguaauaag

SEQ ID NO: 2306414 - RNA, 19 nt, Artificial Sequence
  Description of Artificial Sequence: Synthetic oligonucleotide
ggaaaugaggggacaaugc

SEQ ID NO: 2306415 - RNA, 19 nt, Artificial Sequence
  Description of Artificial Sequence: Synthetic oligonucleotide
augaggggacaaugcaaag

SEQ ID NO: 2306416 - RNA, 19 nt, Artificial Sequence
  Description of Artificial Sequence: Synthetic oligonucleotide
ucucuguaccuaacuuuac

SEQ ID NO: 2306417 - RNA, 19 nt, Artificial Sequence
  Description of Artificial Sequence: Synthetic oligonucleotide
uuacuacccuaaauccuuc

SEQ ID NO: 2306418 - RNA, 19 nt, Artificial Sequence
  Description of Artificial Sequence: Synthetic oligonucleotide
cuggcaguccaugacuggg

SEQ ID NO: 2306419 - RNA, 19 nt, Artificial Sequence
  Description of Artificial Sequence: Synthetic oligonucleotide
aagcccugaacagggaggu

SEQ ID NO: 2306420 - RNA, 19 nt, Artificial Sequence
  Description of Artificial Sequence: Synthetic oligonucleotide
gcacaugauacaaucuggg

SEQ ID NO: 2306421 - RNA, 19 nt, Artificial Sequence
  Description of Artificial Sequence: Synthetic oligonucleotide
agaaagggccauaauuacu

SEQ ID NO: 2306422 - RNA, 19 nt, Artificial Sequence
  Description of Artificial Sequence: Synthetic oligonucleotide
aucccugcucauuucccag

SEQ ID NO: 2306423 - RNA, 19 nt, Artificial Sequence
  Description of Artificial Sequence: Synthetic oligonucleotide
accaacccuggcucuaaag

SEQ ID NO: 2306424 - RNA, 19 nt, Artificial Sequence
  Description of Artificial Sequence: Synthetic oligonucleotide
cugucacaagcccugaaca

SEQ ID NO: 2306425 - RNA, 19 nt, Artificial Sequence
  Description of Artificial Sequence: Synthetic oligonucleotide
ggaaaucaaugauggcucc

SEQ ID NO: 2306426 - RNA, 19 nt, Artificial Sequence
  Description of Artificial Sequence: Synthetic oligonucleotide
acaaucugggguaggcuag

SEQ ID NO: 2306427 - RNA, 19 nt, Artificial Sequence
  Description of Artificial Sequence: Synthetic oligonucleotide
cuuuacuacccuaaauccu

SEQ ID NO: 2306428 - RNA, 19 nt, Artificial Sequence
  Description of Artificial Sequence: Synthetic oligonucleotide
gggaauggggaaaucaaug

SEQ ID NO: 2306429 - RNA, 19 nt, Artificial Sequence
  Description of Artificial Sequence: Synthetic oligonucleotide
acauaacccuggcagucca

SEQ ID NO: 2306430 - RNA, 19 nt, Artificial Sequence
  Description of Artificial Sequence: Synthetic oligonucleotide
uucuuucacgccccuccca

SEQ ID NO: 2306431 - RNA, 19 nt, Artificial Sequence
  Description of Artificial Sequence: Synthetic oligonucleotide
  modified_base (17)..(17): a, c, u, g, unknown or other
agugagaauaagcccunuu

SEQ ID NO: 2306432 - RNA, 19 nt, Artificial Sequence
  Description of Artificial Sequence: Synthetic oligonucleotide
uggcaggugcuaguaaacc

SEQ ID NO: 2306433 - RNA, 19 nt, Artificial Sequence
  Description of Artificial Sequence: Synthetic oligonucleotide
uaacccuggcaguccauga

SEQ ID NO: 2306434 - RNA, 19 nt, Artificial Sequence
  Description of Artificial Sequence: Synthetic oligonucleotide
uaauagcauugcuggcccc

SEQ ID NO: 2306435 - RNA, 19 nt, Artificial Sequence
  Description of Artificial Sequence: Synthetic oligonucleotide
cagacccucggccaaacuc

SEQ ID NO: 2306436 - RNA, 19 nt, Artificial Sequence
  Description of Artificial Sequence: Synthetic oligonucleotide
ccuuccuucuuucacgccc

SEQ ID NO: 2306437 - RNA, 19 nt, Artificial Sequence
  Description of Artificial Sequence: Synthetic oligonucleotide
caggccccaagccaauucc

SEQ ID NO: 2306438 - RNA, 19 nt, Artificial Sequence
  Description of Artificial Sequence: Synthetic oligonucleotide
gcacagugagaauaagccc

SEQ ID NO: 2306439 - RNA, 19 nt, Artificial Sequence
  Description of Artificial Sequence: Synthetic oligonucleotide
  modified_base (4)..(4): a, c, u, g, unknown or other
ccunuucccuucuuccucc

SEQ ID NO: 2306440 - RNA, 19 nt, Artificial Sequence
  Description of Artificial Sequence: Synthetic oligonucleotide
ggucaaacaagagugugca

SEQ ID NO: 2306441 - RNA, 19 nt, Artificial Sequence
  Description of Artificial Sequence: Synthetic oligonucleotide
uggcccagcucuaguaaga

SEQ ID NO: 2306442 - RNA, 19 nt, Artificial Sequence
  Description of Artificial Sequence: Synthetic oligonucleotide
caugccccgcaacagcacc

SEQ ID NO: 2306443 - RNA, 19 nt, Artificial Sequence
  Description of Artificial Sequence: Synthetic oligonucleotide
ccaacccuggcucuaaagc

SEQ ID NO: 2306444 - RNA, 19 nt, Artificial Sequence
  Description of Artificial Sequence: Synthetic oligonucleotide
aggggacaaugcaaagggc

SEQ ID NO: 2306445 - RNA, 19 nt, Artificial Sequence
  Description of Artificial Sequence: Synthetic oligonucleotide
ccuucuuucacgccccucc

SEQ ID NO: 2306446 - RNA, 19 nt, Artificial Sequence
  Description of Artificial Sequence: Synthetic oligonucleotide
  modified_base (2)..(2): a, c, u, g, unknown or other
unuucccuucuuccuccca

SEQ ID NO: 2306447 - RNA, 19 nt, Artificial Sequence
  Description of Artificial Sequence: Synthetic oligonucleotide
cucaacacucauguaugug

SEQ ID NO: 2306448 - RNA, 19 nt, Artificial Sequence
  Description of Artificial Sequence: Synthetic oligonucleotide
ugcucauuucccagacccu

SEQ ID NO: 2306449 - RNA, 19 nt, Artificial Sequence
  Description of Artificial Sequence: Synthetic oligonucleotide
aaaacccaggccugaccua

SEQ ID NO: 2306450 - RNA, 19 nt, Artificial Sequence
  Description of Artificial Sequence: Synthetic oligonucleotide
auaacccuggcaguccaug

SEQ ID NO: 2306451 - RNA, 19 nt, Artificial Sequence
  Description of Artificial Sequence: Synthetic oligonucleotide
augauacaaucugggguag

SEQ ID NO: 2306452 - RNA, 19 nt, Artificial Sequence
  Description of Artificial Sequence: Synthetic oligonucleotide
cuaacuuuacuacccuaaa

SEQ ID NO: 2306453 - RNA, 19 nt, Artificial Sequence
  Description of Artificial Sequence: Synthetic oligonucleotide
acccuaaauccuuccuucu

SEQ ID NO: 2306454 - RNA, 19 nt, Artificial Sequence
  Description of Artificial Sequence: Synthetic oligonucleotide
acccgcacuggucaaacaa

SEQ ID NO: 2306455 - RNA, 19 nt, Artificial Sequence
  Description of Artificial Sequence: Synthetic oligonucleotide
ggugcuaguaaaccugauc

SEQ ID NO: 2306456 - RNA, 19 nt, Artificial Sequence
  Description of Artificial Sequence: Synthetic oligonucleotide
gcuaguaaaccugauccac

SEQ ID NO: 2306457 - RNA, 19 nt, Artificial Sequence
  Description of Artificial Sequence: Synthetic oligonucleotide
uaggcuaggcgcugacaca

SEQ ID NO: 2306458 - RNA, 19 nt, Artificial Sequence
  Description of Artificial Sequence: Synthetic oligonucleotide
cuuucacgccccucccagg

SEQ ID NO: 2306459 - RNA, 19 nt, Artificial Sequence
  Description of Artificial Sequence: Synthetic oligonucleotide
cacauaacccuggcagucc

SEQ ID NO: 2306460 - RNA, 19 nt, Artificial Sequence
  Description of Artificial Sequence: Synthetic oligonucleotide
  modified_base (3)..(3): a, c, u, g, unknown or other
cunuucccuucuuccuccc

SEQ ID NO: 2306461 - RNA, 19 nt, Artificial Sequence
  Description of Artificial Sequence: Synthetic oligonucleotide
agagugugcaugccccgca

SEQ ID NO: 2306462 - RNA, 19 nt, Artificial Sequence
  Description of Artificial Sequence: Synthetic oligonucleotide
agacccucggccaaacucu

SEQ ID NO: 2306463 - RNA, 19 nt, Artificial Sequence
  Description of Artificial Sequence: Synthetic oligonucleotide
cacuaacccgcacugguca

SEQ ID NO: 2306464 - RNA, 19 nt, Artificial Sequence
  Description of Artificial Sequence: Synthetic oligonucleotide
agcccugccugucaacaca

SEQ ID NO: 2306465 - RNA, 19 nt, Artificial Sequence
  Description of Artificial Sequence: Synthetic oligonucleotide
uagcacuaacccgcacugg

SEQ ID NO: 2306466 - RNA, 19 nt, Artificial Sequence
  Description of Artificial Sequence: Synthetic oligonucleotide
agcauugcuggccccugcu

SEQ ID NO: 2306467 - RNA, 19 nt, Artificial Sequence
  Description of Artificial Sequence: Synthetic oligonucleotide
auacaaucugggguaggcu

SEQ ID NO: 2306468 - RNA, 19 nt, Artificial Sequence
  Description of Artificial Sequence: Synthetic oligonucleotide
ggggaaaucaaugauggcu

SEQ ID NO: 2306469 - RNA, 19 nt, Artificial Sequence
  Description of Artificial Sequence: Synthetic oligonucleotide
acuggucaaacaagagugu

SEQ ID NO: 2306470 - RNA, 19 nt, Artificial Sequence
  Description of Artificial Sequence: Synthetic oligonucleotide
cuggccccugcuacaaggc

SEQ ID NO: 2306471 - RNA, 19 nt, Artificial Sequence
  Description of Artificial Sequence: Synthetic oligonucleotide
cuguuccucuccacagccc

SEQ ID NO: 2306472 - RNA, 19 nt, Artificial Sequence
  Description of Artificial Sequence: Synthetic oligonucleotide
uagcauugcuggccccugc

SEQ ID NO: 2306473 - RNA, 19 nt, Artificial Sequence
  Description of Artificial Sequence: Synthetic oligonucleotide
uucacgccccucccaggcc

SEQ ID NO: 2306474 - RNA, 19 nt, Artificial Sequence
  Description of Artificial Sequence: Synthetic oligonucleotide
cugcuacaaggccuuggag

SEQ ID NO: 2306475 - RNA, 19 nt, Artificial Sequence
  Description of Artificial Sequence: Synthetic oligonucleotide
cacucauguaugugaccac

SEQ ID NO: 2306476 - RNA, 19 nt, Artificial Sequence
  Description of Artificial Sequence: Synthetic oligonucleotide
guaugugaccaccaacccu

SEQ ID NO: 2306477 - RNA, 19 nt, Artificial Sequence
  Description of Artificial Sequence: Synthetic oligonucleotide
aguaaaccugauccacauu

SEQ ID NO: 2306478 - RNA, 19 nt, Artificial Sequence
  Description of Artificial Sequence: Synthetic oligonucleotide
acaggaaaugaggggacaa

SEQ ID NO: 2306479 - RNA, 19 nt, Artificial Sequence
  Description of Artificial Sequence: Synthetic oligonucleotide
ggggacaaugcaaagggca

SEQ ID NO: 2306480 - RNA, 19 nt, Artificial Sequence
  Description of Artificial Sequence: Synthetic oligonucleotide
gugugcaugccccgcaaca

SEQ ID NO: 2306481 - RNA, 19 nt, Artificial Sequence
  Description of Artificial Sequence: Synthetic oligonucleotide
gucucuguaccuaacuuua

SEQ ID NO: 2306482 - RNA, 19 nt, Artificial Sequence
  Description of Artificial Sequence: Synthetic oligonucleotide
uaacccgcacuggucaaac

SEQ ID NO: 2306483 - RNA, 19 nt, Artificial Sequence
  Description of Artificial Sequence: Synthetic oligonucleotide
gugcaugccccgcaacagc

SEQ ID NO: 2306484 - RNA, 19 nt, Artificial Sequence
  Description of Artificial Sequence: Synthetic oligonucleotide
uaauuggcacagugagaau

SEQ ID NO: 2306485 - RNA, 19 nt, Artificial Sequence
  Description of Artificial Sequence: Synthetic oligonucleotide
accuaacuuuacuacccua

SEQ ID NO: 2306486 - RNA, 19 nt, Artificial Sequence
  Description of Artificial Sequence: Synthetic oligonucleotide
aacccaggccugaccuagc

SEQ ID NO: 2306487 - RNA, 19 nt, Artificial Sequence
  Description of Artificial Sequence: Synthetic oligonucleotide
uccuuccuucuuucacgcc

SEQ ID NO: 2306488 - RNA, 19 nt, Artificial Sequence
  Description of Artificial Sequence: Synthetic oligonucleotide
caggccugaccuagccugg

SEQ ID NO: 2306489 - RNA, 19 nt, Artificial Sequence
  Description of Artificial Sequence: Synthetic oligonucleotide
ccaggccugaccuagccug

SEQ ID NO: 2306490 - RNA, 19 nt, Artificial Sequence
  Description of Artificial Sequence: Synthetic oligonucleotide
aacccgcacuggucaaaca

SEQ ID NO: 2306491 - RNA, 19 nt, Artificial Sequence
  Description of Artificial Sequence: Synthetic oligonucleotide
gugaccaccaacccuggcu

SEQ ID NO: 2306492 - RNA, 19 nt, Artificial Sequence
  Description of Artificial Sequence: Synthetic oligonucleotide
cugaacagggaggucucug

SEQ ID NO: 2306493 - RNA, 19 nt, Artificial Sequence
  Description of Artificial Sequence: Synthetic oligonucleotide
caggugcuaguaaaccuga

SEQ ID NO: 2306494 - RNA, 19 nt, Artificial Sequence
  Description of Artificial Sequence: Synthetic oligonucleotide
cuagcacaugauacaaucu

SEQ ID NO: 2306495 - RNA, 19 nt, Artificial Sequence
  Description of Artificial Sequence: Synthetic oligonucleotide
augccccgcaacagcaccc

SEQ ID NO: 2306496 - RNA, 19 nt, Artificial Sequence
  Description of Artificial Sequence: Synthetic oligonucleotide
ccuaacuuuacuacccuaa

SEQ ID NO: 2306497 - RNA, 19 nt, Artificial Sequence
  Description of Artificial Sequence: Synthetic oligonucleotide
acaauccccacaugccaua

SEQ ID NO: 2306498 - RNA, 19 nt, Artificial Sequence
  Description of Artificial Sequence: Synthetic oligonucleotide
caauccccacaugccauag

SEQ ID NO: 2306499 - RNA, 19 nt, Artificial Sequence
  Description of Artificial Sequence: Synthetic oligonucleotide
acccuggcucuaaagcagg

SEQ ID NO: 2306500 - RNA, 19 nt, Artificial Sequence
  Description of Artificial Sequence: Synthetic oligonucleotide
gaacagggaggucucugua

SEQ ID NO: 2306501 - RNA, 19 nt, Artificial Sequence
  Description of Artificial Sequence: Synthetic oligonucleotide
acuaacccgcacuggucaa

SEQ ID NO: 2306502 - RNA, 19 nt, Artificial Sequence
  Description of Artificial Sequence: Synthetic oligonucleotide
auagcauugcuggccccug

SEQ ID NO: 2306503 - RNA, 19 nt, Artificial Sequence
  Description of Artificial Sequence: Synthetic oligonucleotide
uggugacuucacauuucua

SEQ ID NO: 2306504 - RNA, 19 nt, Artificial Sequence
  Description of Artificial Sequence: Synthetic oligonucleotide
ggcagggguaauaaggcca

SEQ ID NO: 2306505 - RNA, 19 nt, Artificial Sequence
  Description of Artificial Sequence: Synthetic oligonucleotide
  modified_base (9)..(9): a, c, u, g, unknown or other
uaagcccunuucccuucuu

SEQ ID NO: 2306506 - RNA, 19 nt, Artificial Sequence
  Description of Artificial Sequence: Synthetic oligonucleotide
caugccauagcucuaucuu

SEQ ID NO: 2306507 - RNA, 19 nt, Artificial Sequence
  Description of Artificial Sequence: Synthetic oligonucleotide
cuucccuguuccucuccac

SEQ ID NO: 2306508 - RNA, 19 nt, Artificial Sequence
  Description of Artificial Sequence: Synthetic oligonucleotide
gguagcacuaacccgcacu

SEQ ID NO: 2306509 - RNA, 19 nt, Artificial Sequence
  Description of Artificial Sequence: Synthetic oligonucleotide
cucuguaccuaacuuuacu

SEQ ID NO: 2306510 - RNA, 19 nt, Artificial Sequence
  Description of Artificial Sequence: Synthetic oligonucleotide
cagucucccacauaacccu

SEQ ID NO: 2306511 - RNA, 19 nt, Artificial Sequence
  Description of Artificial Sequence: Synthetic oligonucleotide
cacccuccuccacaauccc

SEQ ID NO: 2306512 - RNA, 19 nt, Artificial Sequence
  Description of Artificial Sequence: Synthetic oligonucleotide
ugguagcacuaacccgcac

SEQ ID NO: 2306513 - RNA, 19 nt, Artificial Sequence
  Description of Artificial Sequence: Synthetic oligonucleotide
uuccuucuuucacgccccu

SEQ ID NO: 2306514 - RNA, 19 nt, Artificial Sequence
  Description of Artificial Sequence: Synthetic oligonucleotide
ugcuggccccugcuacaag

SEQ ID NO: 2306515 - RNA, 19 nt, Artificial Sequence
  Description of Artificial Sequence: Synthetic oligonucleotide
ugaccuagccuggcccagc

SEQ ID NO: 2306516 - RNA, 19 nt, Artificial Sequence
  Description of Artificial Sequence: Synthetic oligonucleotide
cccgcacuggucaaacaag

SEQ ID NO: 2306517 - RNA, 19 nt, Artificial Sequence
  Description of Artificial Sequence: Synthetic oligonucleotide
ggccuuggaugcucucugg

SEQ ID NO: 2306518 - RNA, 19 nt, Artificial Sequence
  Description of Artificial Sequence: Synthetic oligonucleotide
gcacuggucaaacaagagu

SEQ ID NO: 2306519 - RNA, 19 nt, Artificial Sequence
  Description of Artificial Sequence: Synthetic oligonucleotide
cucuaaagcagggucccaa

SEQ ID NO: 2306520 - RNA, 19 nt, Artificial Sequence
  Description of Artificial Sequence: Synthetic oligonucleotide
gcucuaguaagacucucua

SEQ ID NO: 2306521 - RNA, 19 nt, Artificial Sequence
  Description of Artificial Sequence: Synthetic oligonucleotide
gccugaccuagccuggccc

SEQ ID NO: 2306522 - RNA, 19 nt, Artificial Sequence
  Description of Artificial Sequence: Synthetic oligonucleotide
aucuagcacaugauacaau

SEQ ID NO: 2306523 - RNA, 19 nt, Artificial Sequence
  Description of Artificial Sequence: Synthetic oligonucleotide
ugcucucugguagcacuaa

SEQ ID NO: 2306524 - RNA, 19 nt, Artificial Sequence
  Description of Artificial Sequence: Synthetic oligonucleotide
gccaauuccaggccuugga

SEQ ID NO: 2306525 - RNA, 19 nt, Artificial Sequence
  Description of Artificial Sequence: Synthetic oligonucleotide
gcucauuucccagacccuc

SEQ ID NO: 2306526 - RNA, 19 nt, Artificial Sequence
  Description of Artificial Sequence: Synthetic oligonucleotide
ugggguaggcuaggcgcug

SEQ ID NO: 2306527 - RNA, 19 nt, Artificial Sequence
  Description of Artificial Sequence: Synthetic oligonucleotide
gagugugcaugccccgcaa

SEQ ID NO: 2306528 - RNA, 19 nt, Artificial Sequence
  Description of Artificial Sequence: Synthetic oligonucleotide
  modified_base (5)..(5): a, c, u, g, unknown or other
cccunuucccuucuuccuc

SEQ ID NO: 2306529 - RNA, 19 nt, Artificial Sequence
  Description of Artificial Sequence: Synthetic oligonucleotide
cuaggcgcugacacaggaa

SEQ ID NO: 2306530 - RNA, 19 nt, Artificial Sequence
  Description of Artificial Sequence: Synthetic oligonucleotide
ccuggcaguccaugacugg

SEQ ID NO: 2306531 - RNA, 19 nt, Artificial Sequence
  Description of Artificial Sequence: Synthetic oligonucleotide
cugaccuagccuggcccag

SEQ ID NO: 2306532 - RNA, 19 nt, Artificial Sequence
  Description of Artificial Sequence: Synthetic oligonucleotide
cacuuccccacuccaaucu

SEQ ID NO: 2306533 - RNA, 19 nt, Artificial Sequence
  Description of Artificial Sequence: Synthetic oligonucleotide
ccuaauuggcacagugaga

SEQ ID NO: 2306534 - RNA, 19 nt, Artificial Sequence
  Description of Artificial Sequence: Synthetic oligonucleotide
ugggguggaggagccccag

SEQ ID NO: 2306535 - RNA, 19 nt, Artificial Sequence
  Description of Artificial Sequence: Synthetic oligonucleotide
gcagggguaauaaggccac

SEQ ID NO: 2306536 - RNA, 19 nt, Artificial Sequence
  Description of Artificial Sequence: Synthetic oligonucleotide
ggcaggugcuaguaaaccu

SEQ ID NO: 2306537 - RNA, 19 nt, Artificial Sequence
  Description of Artificial Sequence: Synthetic oligonucleotide
cacaugccauagcucuauc

SEQ ID NO: 2306538 - RNA, 19 nt, Artificial Sequence
  Description of Artificial Sequence: Synthetic oligonucleotide
cuacccuaaauccuuccuu

SEQ ID NO: 2306539 - RNA, 19 nt, Artificial Sequence
  Description of Artificial Sequence: Synthetic oligonucleotide
gcuaggcgcugacacagga

SEQ ID NO: 2306540 - RNA, 19 nt, Artificial Sequence
  Description of Artificial Sequence: Synthetic oligonucleotide
cagcucuaguaagacucuc

SEQ ID NO: 2306541 - RNA, 19 nt, Artificial Sequence
  Description of Artificial Sequence: Synthetic oligonucleotide
ggucucuguaccuaacuuu

SEQ ID NO: 2306542 - RNA, 19 nt, Artificial Sequence
  Description of Artificial Sequence: Synthetic oligonucleotide
cacagcccugccugucaac

SEQ ID NO: 2306543 - RNA, 19 nt, Artificial Sequence
  Description of Artificial Sequence: Synthetic oligonucleotide
cacuccaaucuagcacaug

SEQ ID NO: 2306544 - RNA, 19 nt, Artificial Sequence
  Description of Artificial Sequence: Synthetic oligonucleotide
cccuggcaguccaugacug

SEQ ID NO: 2306545 - RNA, 19 nt, Artificial Sequence
  Description of Artificial Sequence: Synthetic oligonucleotide
cacaauccccacaugccau

SEQ ID NO: 2306546 - RNA, 19 nt, Artificial Sequence
  Description of Artificial Sequence: Synthetic oligonucleotide
cucccaaaggcagggguaa

SEQ ID NO: 2306547 - RNA, 19 nt, Artificial Sequence
  Description of Artificial Sequence: Synthetic oligonucleotide
cacacuuccccacuccaau

SEQ ID NO: 2306548 - RNA, 19 nt, Artificial Sequence
  Description of Artificial Sequence: Synthetic oligonucleotide
aggccacuggugacuucac

SEQ ID NO: 2306549 - RNA, 19 nt, Artificial Sequence
  Description of Artificial Sequence: Synthetic oligonucleotide
agccccagauggccucucu

SEQ ID NO: 2306550 - RNA, 19 nt, Artificial Sequence
  Description of Artificial Sequence: Synthetic oligonucleotide
gcucucugguagcacuaac

SEQ ID NO: 2306551 - RNA, 19 nt, Artificial Sequence
  Description of Artificial Sequence: Synthetic oligonucleotide
cacaagcccugaacaggga

SEQ ID NO: 2306552 - RNA, 19 nt, Artificial Sequence
  Description of Artificial Sequence: Synthetic oligonucleotide
ggcaguccaugacugggaa

SEQ ID NO: 2306553 - RNA, 19 nt, Artificial Sequence
  Description of Artificial Sequence: Synthetic oligonucleotide
gacccucggccaaacucuc

SEQ ID NO: 2306554 - RNA, 19 nt, Artificial Sequence
  Description of Artificial Sequence: Synthetic oligonucleotide
cccuguuccucuccacagc

SEQ ID NO: 2306555 - RNA, 19 nt, Artificial Sequence
  Description of Artificial Sequence: Synthetic oligonucleotide
agcccugaacagggagguc

SEQ ID NO: 2306556 - RNA, 19 nt, Artificial Sequence
  Description of Artificial Sequence: Synthetic oligonucleotide
aggccccaagccaauucca

SEQ ID NO: 2306557 - RNA, 19 nt, Artificial Sequence
  Description of Artificial Sequence: Synthetic oligonucleotide
cuccaaucuagcacaugau

SEQ ID NO: 2306558 - RNA, 19 nt, Artificial Sequence
  Description of Artificial Sequence: Synthetic oligonucleotide
cccugcucauuucccagac

SEQ ID NO: 2306559 - RNA, 19 nt, Artificial Sequence
  Description of Artificial Sequence: Synthetic oligonucleotide
gggaggucucuguaccuaa

SEQ ID NO: 2306560 - RNA, 19 nt, Artificial Sequence
  Description of Artificial Sequence: Synthetic oligonucleotide
cacgccccucccaggcccc

SEQ ID NO: 2306561 - RNA, 19 nt, Artificial Sequence
  Description of Artificial Sequence: Synthetic oligonucleotide
ccgcacuggucaaacaaga

SEQ ID NO: 2306562 - RNA, 19 nt, Artificial Sequence
  Description of Artificial Sequence: Synthetic oligonucleotide
cugggguaggcuaggcgcu

SEQ ID NO: 2306563 - RNA, 19 nt, Artificial Sequence
  Description of Artificial Sequence: Synthetic oligonucleotide
ccccuaauuggcacaguga

SEQ ID NO: 2306564 - RNA, 19 nt, Artificial Sequence
  Description of Artificial Sequence: Synthetic oligonucleotide
ggaggucucuguaccuaac

SEQ ID NO: 2306565 - RNA, 19 nt, Artificial Sequence
  Description of Artificial Sequence: Synthetic oligonucleotide
ccagauggccucucuggca

SEQ ID NO: 2306566 - RNA, 19 nt, Artificial Sequence
  Description of Artificial Sequence: Synthetic oligonucleotide
ggcccagcucuaguaagac

SEQ ID NO: 2306567 - RNA, 19 nt, Artificial Sequence
  Description of Artificial Sequence: Synthetic oligonucleotide
uccucccaucacccuccuc

SEQ ID NO: 2306568 - RNA, 19 nt, Artificial Sequence
  Description of Artificial Sequence: Synthetic oligonucleotide
gaccaccaacccuggcucu

SEQ ID NO: 2306569 - RNA, 19 nt, Artificial Sequence
  Description of Artificial Sequence: Synthetic oligonucleotide
accaccaacccuggcucua

SEQ ID NO: 2306570 - RNA, 19 nt, Artificial Sequence
  Description of Artificial Sequence: Synthetic oligonucleotide
gcgcugacacaggaaauga

SEQ ID NO: 2306571 - RNA, 19 nt, Artificial Sequence
  Description of Artificial Sequence: Synthetic oligonucleotide
caagccaauuccaggccuu

SEQ ID NO: 2306572 - RNA, 19 nt, Artificial Sequence
  Description of Artificial Sequence: Synthetic oligonucleotide
cucucuggcaggugcuagu

SEQ ID NO: 2306573 - RNA, 19 nt, Artificial Sequence
  Description of Artificial Sequence: Synthetic oligonucleotide
cacccucuucuaggcacac

SEQ ID NO: 2306574 - RNA, 19 nt, Artificial Sequence
  Description of Artificial Sequence: Synthetic oligonucleotide
cccugcuacaaggccuugg

SEQ ID NO: 2306575 - RNA, 19 nt, Artificial Sequence
  Description of Artificial Sequence: Synthetic oligonucleotide
aggugcuaguaaaccugau

SEQ ID NO: 2306576 - RNA, 19 nt, Artificial Sequence
  Description of Artificial Sequence: Synthetic oligonucleotide
aggcgcugacacaggaaau

SEQ ID NO: 2306577 - RNA, 19 nt, Artificial Sequence
  Description of Artificial Sequence: Synthetic oligonucleotide
ccugaccuagccuggccca

SEQ ID NO: 2306578 - RNA, 19 nt, Artificial Sequence
  Description of Artificial Sequence: Synthetic oligonucleotide
cuagccuggcccagcucua

SEQ ID NO: 2306579 - RNA, 19 nt, Artificial Sequence
  Description of Artificial Sequence: Synthetic oligonucleotide
gcacuaacccgcacugguc

SEQ ID NO: 2306580 - RNA, 19 nt, Artificial Sequence
  Description of Artificial Sequence: Synthetic oligonucleotide
gcccugaacagggaggucu

SEQ ID NO: 2306581 - RNA, 19 nt, Artificial Sequence
  Description of Artificial Sequence: Synthetic oligonucleotide
gguaggcuaggcgcugaca

SEQ ID NO: 2306582 - RNA, 19 nt, Artificial Sequence
  Description of Artificial Sequence: Synthetic oligonucleotide
cccucggccaaacucucca

SEQ ID NO: 2306583 - RNA, 19 nt, Artificial Sequence
  Description of Artificial Sequence: Synthetic oligonucleotide
ggguaggcuaggcgcugac

SEQ ID NO: 2306584 - RNA, 19 nt, Artificial Sequence
  Description of Artificial Sequence: Synthetic oligonucleotide
ccucucuggcaggugcuag

SEQ ID NO: 2306585 - RNA, 19 nt, Artificial Sequence
  Description of Artificial Sequence: Synthetic oligonucleotide
cagggaggucucuguaccu

SEQ ID NO: 2306586 - RNA, 19 nt, Artificial Sequence
  Description of Artificial Sequence: Synthetic oligonucleotide
  modified_base (6)..(6): a, c, u, g, unknown or other
gcccunuucccuucuuccu

SEQ ID NO: 2306587 - RNA, 19 nt, Artificial Sequence
  Description of Artificial Sequence: Synthetic oligonucleotide
cauaacccuggcaguccau

SEQ ID NO: 2306588 - RNA, 19 nt, Artificial Sequence
  Description of Artificial Sequence: Synthetic oligonucleotide
ccaagccaauuccaggccu

SEQ ID NO: 2306589 - RNA, 19 nt, Artificial Sequence
  Description of Artificial Sequence: Synthetic oligonucleotide
ccucaacacucauguaugu

SEQ ID NO: 2306590 - RNA, 19 nt, Artificial Sequence
  Description of Artificial Sequence: Synthetic oligonucleotide
caccaacccuggcucuaaa

SEQ ID NO: 2306591 - RNA, 19 nt, Artificial Sequence
  Description of Artificial Sequence: Synthetic oligonucleotide
gccauagcucuaucuuuau

SEQ ID NO: 2306592 - RNA, 19 nt, Artificial Sequence
  Description of Artificial Sequence: Synthetic oligonucleotide
gcaugccccgcaacagcac

SEQ ID NO: 2306593 - RNA, 19 nt, Artificial Sequence
  Description of Artificial Sequence: Synthetic oligonucleotide
gccccucccaggccccaag

SEQ ID NO: 2306594 - RNA, 19 nt, Artificial Sequence
  Description of Artificial Sequence: Synthetic oligonucleotide
gcccagcucuaguaagacu

SEQ ID NO: 2306595 - RNA, 19 nt, Artificial Sequence
  Description of Artificial Sequence: Synthetic oligonucleotide
gggguaggcuaggcgcuga

SEQ ID NO: 2306596 - RNA, 19 nt, Artificial Sequence
  Description of Artificial Sequence: Synthetic oligonucleotide
  modified_base (18)..(18): a, c, u, g, unknown or other
cagugagaauaagcccunu

SEQ ID NO: 2306597 - RNA, 19 nt, Artificial Sequence
  Description of Artificial Sequence: Synthetic oligonucleotide
cccagacccucggccaaac

SEQ ID NO: 2306598 - RNA, 19 nt, Artificial Sequence
  Description of Artificial Sequence: Synthetic oligonucleotide
cccuaaauccuuccuucuu

SEQ ID NO: 2306599 - RNA, 19 nt, Artificial Sequence
  Description of Artificial Sequence: Synthetic oligonucleotide
ccugagaaagggccauaau

SEQ ID NO: 2306600 - RNA, 19 nt, Artificial Sequence
  Description of Artificial Sequence: Synthetic oligonucleotide
ccccuucccuguuccucuc

SEQ ID NO: 2306601 - RNA, 19 nt, Artificial Sequence
  Description of Artificial Sequence: Synthetic oligonucleotide
ccacagcccugccugucaa

SEQ ID NO: 2306602 - RNA, 19 nt, Artificial Sequence
  Description of Artificial Sequence: Synthetic oligonucleotide
cagggguaauaaggccacu

SEQ ID NO: 2306603 - RNA, 19 nt, Artificial Sequence
  Description of Artificial Sequence: Synthetic oligonucleotide
ccccacccacugcauaaaa

SEQ ID NO: 2306604 - RNA, 19 nt, Artificial Sequence
  Description of Artificial Sequence: Synthetic oligonucleotide
ccacaugccauagcucuau

SEQ ID NO: 2306605 - RNA, 19 nt, Artificial Sequence
  Description of Artificial Sequence: Synthetic oligonucleotide
acgccccucccaggcccca

SEQ ID NO: 2306606 - RNA, 19 nt, Artificial Sequence
  Description of Artificial Sequence: Synthetic oligonucleotide
ggagccccagauggccucu

SEQ ID NO: 2306607 - RNA, 19 nt, Artificial Sequence
  Description of Artificial Sequence: Synthetic oligonucleotide
gccucucuggcaggugcua

SEQ ID NO: 2306608 - RNA, 19 nt, Artificial Sequence
  Description of Artificial Sequence: Synthetic oligonucleotide
cccaggccugaccuagccu

SEQ ID NO: 2306609 - RNA, 19 nt, Artificial Sequence
  Description of Artificial Sequence: Synthetic oligonucleotide
ccccugcuacaaggccuug

SEQ ID NO: 2306610 - RNA, 19 nt, Artificial Sequence
  Description of Artificial Sequence: Synthetic oligonucleotide
aaagcuacaagccaauggc

SEQ ID NO: 2306611 - RNA, 19 nt, Artificial Sequence
  Description of Artificial Sequence: Synthetic oligonucleotide
auuuaaauaacguugaagu

SEQ ID NO: 2306612 - RNA, 19 nt, Artificial Sequence
  Description of Artificial Sequence: Synthetic oligonucleotide
aaagcaaguauguuauucc

SEQ ID NO: 2306613 - RNA, 19 nt, Artificial Sequence
  Description of Artificial Sequence: Synthetic oligonucleotide
auuacauauguacacacgc

SEQ ID NO: 2306614 - RNA, 19 nt, Artificial Sequence
  Description of Artificial Sequence: Synthetic oligonucleotide
agaguuauacaucacaaac

SEQ ID NO: 2306615 - RNA, 19 nt, Artificial Sequence
  Description of Artificial Sequence: Synthetic oligonucleotide
aaauaaaguacgaugaggg

SEQ ID NO: 2306616 - RNA, 19 nt, Artificial Sequence
  Description of Artificial Sequence: Synthetic oligonucleotide
uccauaauaaauaaaguac

SEQ ID NO: 2306617 - RNA, 19 nt, Artificial Sequence
  Description of Artificial Sequence: Synthetic oligonucleotide
aguaucagcuucuacaggc

SEQ ID NO: 2306618 - RNA, 19 nt, Artificial Sequence
  Description of Artificial Sequence: Synthetic oligonucleotide
aaauagguuauuauuauuc

SEQ ID NO: 2306619 - RNA, 19 nt, Artificial Sequence
  Description of Artificial Sequence: Synthetic oligonucleotide
aauaaaguacgaugagggc

SEQ ID NO: 2306620 - RNA, 19 nt, Artificial Sequence
  Description of Artificial Sequence: Synthetic oligonucleotide
aauauaaggguauauuaca

SEQ ID NO: 2306621 - RNA, 19 nt, Artificial Sequence
  Description of Artificial Sequence: Synthetic oligonucleotide
uuaaauaacguugaagucc

SEQ ID NO: 2306622 - RNA, 19 nt, Artificial Sequence
  Description of Artificial Sequence: Synthetic oligonucleotide
aaacuagucucucuggaac

SEQ ID NO: 2306623 - RNA, 19 nt, Artificial Sequence
  Description of Artificial Sequence: Synthetic oligonucleotide
uuauucauaaagcaauccc

SEQ ID NO: 2306624 - RNA, 19 nt, Artificial Sequence
  Description of Artificial Sequence: Synthetic oligonucleotide
agucauuagaaguaucagc

SEQ ID NO: 2306625 - RNA, 19 nt, Artificial Sequence
  Description of Artificial Sequence: Synthetic oligonucleotide
aaggguauauuacauaugu

SEQ ID NO: 2306626 - RNA, 19 nt, Artificial Sequence
  Description of Artificial Sequence: Synthetic oligonucleotide
uugaauucacguaacaagc

SEQ ID NO: 2306627 - RNA, 19 nt, Artificial Sequence
  Description of Artificial Sequence: Synthetic oligonucleotide
aucacaaacaucuucaggu

SEQ ID NO: 2306628 - RNA, 19 nt, Artificial Sequence
  Description of Artificial Sequence: Synthetic oligonucleotide
gaaccaagcaggcagauag

SEQ ID NO: 2306629 - RNA, 19 nt, Artificial Sequence
  Description of Artificial Sequence: Synthetic oligonucleotide
uaauauaaggguauauuac

SEQ ID NO: 2306630 - RNA, 19 nt, Artificial Sequence
  Description of Artificial Sequence: Synthetic oligonucleotide
uauagaguuauacaucaca

SEQ ID NO: 2306631 - RNA, 19 nt, Artificial Sequence
  Description of Artificial Sequence: Synthetic oligonucleotide
aauagguuauuauuauuca

SEQ ID NO: 2306632 - RNA, 19 nt, Artificial Sequence
  Description of Artificial Sequence: Synthetic oligonucleotide
aauucacguaacaagcugc

SEQ ID NO: 2306633 - RNA, 19 nt, Artificial Sequence
  Description of Artificial Sequence: Synthetic oligonucleotide
auauuacauauguacacac

SEQ ID NO: 2306634 - RNA, 19 nt, Artificial Sequence
  Description of Artificial Sequence: Synthetic oligonucleotide
agaaguaucagcuucuaca

SEQ ID NO: 2306635 - RNA, 19 nt, Artificial Sequence
  Description of Artificial Sequence: Synthetic oligonucleotide
uauucauaaagcaaucccu

SEQ ID NO: 2306636 - RNA, 19 nt, Artificial Sequence
  Description of Artificial Sequence: Synthetic oligonucleotide
acugaagacaaugaugacc

SEQ ID NO: 2306637 - RNA, 19 nt, Artificial Sequence
  Description of Artificial Sequence: Synthetic oligonucleotide
uaaauaacguugaagucca

SEQ ID NO: 2306638 - RNA, 19 nt, Artificial Sequence
  Description of Artificial Sequence: Synthetic oligonucleotide
uauuacauauguacacacg

SEQ ID NO: 2306639 - RNA, 19 nt, Artificial Sequence
  Description of Artificial Sequence: Synthetic oligonucleotide
gaaguaucagcuucuacag

SEQ ID NO: 2306640 - RNA, 19 nt, Artificial Sequence
  Description of Artificial Sequence: Synthetic oligonucleotide
aaucccuucuuuccuaggg

SEQ ID NO: 2306641 - RNA, 19 nt, Artificial Sequence
  Description of Artificial Sequence: Synthetic oligonucleotide
acaagcugcauacacagag

SEQ ID NO: 2306642 - RNA, 19 nt, Artificial Sequence
  Description of Artificial Sequence: Synthetic oligonucleotide
aaaggcaagcgcaaaacac

SEQ ID NO: 2306643 - RNA, 19 nt, Artificial Sequence
  Description of Artificial Sequence: Synthetic oligonucleotide
uaacaagcugcauacacag

SEQ ID NO: 2306644 - RNA, 19 nt, Artificial Sequence
  Description of Artificial Sequence: Synthetic oligonucleotide
acaacaaccagaaaauagg

SEQ ID NO: 2306645 - RNA, 19 nt, Artificial Sequence
  Description of Artificial Sequence: Synthetic oligonucleotide
uuugcuaggauacuuggaa

SEQ ID NO: 2306646 - RNA, 19 nt, Artificial Sequence
  Description of Artificial Sequence: Synthetic oligonucleotide
cuuccuauuaccucugggg

SEQ ID NO: 2306647 - RNA, 19 nt, Artificial Sequence
  Description of Artificial Sequence: Synthetic oligonucleotide
aguuauacaucacaaacau

SEQ ID NO: 2306648 - RNA, 19 nt, Artificial Sequence
  Description of Artificial Sequence: Synthetic oligonucleotide
gauacuuggaagcaucuac

SEQ ID NO: 2306649 - RNA, 19 nt, Artificial Sequence
  Description of Artificial Sequence: Synthetic oligonucleotide
ucccuuauacauaauauaa

SEQ ID NO: 2306650 - RNA, 19 nt, Artificial Sequence
  Description of Artificial Sequence: Synthetic oligonucleotide
auucagucuuccuauuacc

SEQ ID NO: 2306651 - RNA, 19 nt, Artificial Sequence
  Description of Artificial Sequence: Synthetic oligonucleotide
agagagggcagacaacugc

SEQ ID NO: 2306652 - RNA, 19 nt, Artificial Sequence
  Description of Artificial Sequence: Synthetic oligonucleotide
cagauaagaagagaaaagg

SEQ ID NO: 2306653 - RNA, 19 nt, Artificial Sequence
  Description of Artificial Sequence: Synthetic oligonucleotide
ugaggauucagcuuuggcu

SEQ ID NO: 2306654 - RNA, 19 nt, Artificial Sequence
  Description of Artificial Sequence: Synthetic oligonucleotide
acaaccagaaaauagguua

SEQ ID NO: 2306655 - RNA, 19 nt, Artificial Sequence
  Description of Artificial Sequence: Synthetic oligonucleotide
ccuuauacauaauauaagg

SEQ ID NO: 2306656 - RNA, 19 nt, Artificial Sequence
  Description of Artificial Sequence: Synthetic oligonucleotide
uaaaguacgaugagggcac

SEQ ID NO: 2306657 - RNA, 19 nt, Artificial Sequence
  Description of Artificial Sequence: Synthetic oligonucleotide
auagguuauuauuauucag

SEQ ID NO: 2306658 - RNA, 19 nt, Artificial Sequence
  Description of Artificial Sequence: Synthetic oligonucleotide
ucauaaagcaaucccuucu

SEQ ID NO: 2306659 - RNA, 19 nt, Artificial Sequence
  Description of Artificial Sequence: Synthetic oligonucleotide
uuuaaauaacguugaaguc

SEQ ID NO: 2306660 - RNA, 19 nt, Artificial Sequence
  Description of Artificial Sequence: Synthetic oligonucleotide
aaucuucauuuaaauaacg

SEQ ID NO: 2306661 - RNA, 19 nt, Artificial Sequence
  Description of Artificial Sequence: Synthetic oligonucleotide
aagcgcaaaacacacagaa

SEQ ID NO: 2306662 - RNA, 19 nt, Artificial Sequence
  Description of Artificial Sequence: Synthetic oligonucleotide
aaaggugcagaaccuuggg

SEQ ID NO: 2306663 - RNA, 19 nt, Artificial Sequence
  Description of Artificial Sequence: Synthetic oligonucleotide
ugucuuccugcuaagaugu

SEQ ID NO: 2306664 - RNA, 19 nt, Artificial Sequence
  Description of Artificial Sequence: Synthetic oligonucleotide
acuacagaugcgcucuacc

SEQ ID NO: 2306665 - RNA, 19 nt, Artificial Sequence
  Description of Artificial Sequence: Synthetic oligonucleotide
uaaggaggcagcuuguuga

SEQ ID NO: 2306666 - RNA, 19 nt, Artificial Sequence
  Description of Artificial Sequence: Synthetic oligonucleotide
aucuacaggagacacacca

SEQ ID NO: 2306667 - RNA, 19 nt, Artificial Sequence
  Description of Artificial Sequence: Synthetic oligonucleotide
ucuucauuuaaauaacguu

SEQ ID NO: 2306668 - RNA, 19 nt, Artificial Sequence
  Description of Artificial Sequence: Synthetic oligonucleotide
uauucagucuuccuauuac

SEQ ID NO: 2306669 - RNA, 19 nt, Artificial Sequence
  Description of Artificial Sequence: Synthetic oligonucleotide
uuccuauuaccucuggggc

SEQ ID NO: 2306670 - RNA, 19 nt, Artificial Sequence
  Description of Artificial Sequence: Synthetic oligonucleotide
ggguauauuacauauguac

SEQ ID NO: 2306671 - RNA, 19 nt, Artificial Sequence
  Description of Artificial Sequence: Synthetic oligonucleotide
auaacguugaaguccauaa

SEQ ID NO: 2306672 - RNA, 19 nt, Artificial Sequence
  Description of Artificial Sequence: Synthetic oligonucleotide
ugcaucucccuccaaaggc

SEQ ID NO: 2306673 - RNA, 19 nt, Artificial Sequence
  Description of Artificial Sequence: Synthetic oligonucleotide
cauuuaaauaacguugaag

SEQ ID NO: 2306674 - RNA, 19 nt, Artificial Sequence
  Description of Artificial Sequence: Synthetic oligonucleotide
auaaaguacgaugagggca

SEQ ID NO: 2306675 - RNA, 19 nt, Artificial Sequence
  Description of Artificial Sequence: Synthetic oligonucleotide
gaauucacguaacaagcug

SEQ ID NO: 2306676 - RNA, 19 nt, Artificial Sequence
  Description of Artificial Sequence: Synthetic oligonucleotide
gaugagggcacccuuuaag

SEQ ID NO: 2306677 - RNA, 19 nt, Artificial Sequence
  Description of Artificial Sequence: Synthetic oligonucleotide
ugaaguccauaauaaauaa

SEQ ID NO: 2306678 - RNA, 19 nt, Artificial Sequence
  Description of Artificial Sequence: Synthetic oligonucleotide
ugcuaggauacuuggaagc

SEQ ID NO: 2306679 - RNA, 19 nt, Artificial Sequence
  Description of Artificial Sequence: Synthetic oligonucleotide
uuuccccugagcuuccucg

SEQ ID NO: 2306680 - RNA, 19 nt, Artificial Sequence
  Description of Artificial Sequence: Synthetic oligonucleotide
gaggauucagcuuuggcuc

SEQ ID NO: 2306681 - RNA, 19 nt, Artificial Sequence
  Description of Artificial Sequence: Synthetic oligonucleotide
aagcaaguauguuauucca

SEQ ID NO: 2306682 - RNA, 19 nt, Artificial Sequence
  Description of Artificial Sequence: Synthetic oligonucleotide
aaguaucagcuucuacagg

SEQ ID NO: 2306683 - RNA, 19 nt, Artificial Sequence
  Description of Artificial Sequence: Synthetic oligonucleotide
aacugaagacaaugaugac

SEQ ID NO: 2306684 - RNA, 19 nt, Artificial Sequence
  Description of Artificial Sequence: Synthetic oligonucleotide
augagggcacccuuuaagg

SEQ ID NO: 2306685 - RNA, 19 nt, Artificial Sequence
  Description of Artificial Sequence: Synthetic oligonucleotide
ucuuccuauuaccucuggg

SEQ ID NO: 2306686 - RNA, 19 nt, Artificial Sequence
  Description of Artificial Sequence: Synthetic oligonucleotide
aaaaggugcagaaccuugg

SEQ ID NO: 2306687 - RNA, 19 nt, Artificial Sequence
  Description of Artificial Sequence: Synthetic oligonucleotide
ugaauucacguaacaagcu

SEQ ID NO: 2306688 - RNA, 19 nt, Artificial Sequence
  Description of Artificial Sequence: Synthetic oligonucleotide
aagcccaccgacuacagau

SEQ ID NO: 2306689 - RNA, 19 nt, Artificial Sequence
  Description of Artificial Sequence: Synthetic oligonucleotide
accauuugaauguuuaaaa

SEQ ID NO: 2306690 - RNA, 19 nt, Artificial Sequence
  Description of Artificial Sequence: Synthetic oligonucleotide
gaaaaggcuauauagaguu

SEQ ID NO: 2306691 - RNA, 19 nt, Artificial Sequence
  Description of Artificial Sequence: Synthetic oligonucleotide
aaaggcuauauagaguuau

SEQ ID NO: 2306692 - RNA, 19 nt, Artificial Sequence
  Description of Artificial Sequence: Synthetic oligonucleotide
aagcaucuacaggagacac

SEQ ID NO: 2306693 - RNA, 19 nt, Artificial Sequence
  Description of Artificial Sequence: Synthetic oligonucleotide
gaaagcaaguauguuauuc

SEQ ID NO: 2306694 - RNA, 19 nt, Artificial Sequence
  Description of Artificial Sequence: Synthetic oligonucleotide
ugcaaacuagucucucugg

SEQ ID NO: 2306695 - RNA, 19 nt, Artificial Sequence
  Description of Artificial Sequence: Synthetic oligonucleotide
aagaaaaucuucauuuaaa

SEQ ID NO: 2306696 - RNA, 19 nt, Artificial Sequence
  Description of Artificial Sequence: Synthetic oligonucleotide
aacuagucucucuggaacu

SEQ ID NO: 2306697 - RNA, 19 nt, Artificial Sequence
  Description of Artificial Sequence: Synthetic oligonucleotide
uaaggguauauuacauaug

SEQ ID NO: 2306698 - RNA, 19 nt, Artificial Sequence
  Description of Artificial Sequence: Synthetic oligonucleotide
guccauaauaaauaaagua

SEQ ID NO: 2306699 - RNA, 19 nt, Artificial Sequence
  Description of Artificial Sequence: Synthetic oligonucleotide
ugcuaagauguucugcugu

SEQ ID NO: 2306700 - RNA, 19 nt, Artificial Sequence
  Description of Artificial Sequence: Synthetic oligonucleotide
aacucccuuauacauaaua

SEQ ID NO: 2306701 - RNA, 19 nt, Artificial Sequence
  Description of Artificial Sequence: Synthetic oligonucleotide
acagaggcaaccugacaac

SEQ ID NO: 2306702 - RNA, 19 nt, Artificial Sequence
  Description of Artificial Sequence: Synthetic oligonucleotide
gauagggaagcccaccgac

SEQ ID NO: 2306703 - RNA, 19 nt, Artificial Sequence
  Description of Artificial Sequence: Synthetic oligonucleotide
uauaaggguauauuacaua

SEQ ID NO: 2306704 - RNA, 19 nt, Artificial Sequence
  Description of Artificial Sequence: Synthetic oligonucleotide
cuacccaugucauuucccc

SEQ ID NO: 2306705 - RNA, 19 nt, Artificial Sequence
  Description of Artificial Sequence: Synthetic oligonucleotide
ucacguaacaagcugcaua

SEQ ID NO: 2306706 - RNA, 19 nt, Artificial Sequence
  Description of Artificial Sequence: Synthetic oligonucleotide
cugauacacaccucugugc

SEQ ID NO: 2306707 - RNA, 19 nt, Artificial Sequence
  Description of Artificial Sequence: Synthetic oligonucleotide
uuggaagcaucuacaggag

SEQ ID NO: 2306708 - RNA, 19 nt, Artificial Sequence
  Description of Artificial Sequence: Synthetic oligonucleotide
gcaaguauguuauuccaag

SEQ ID NO: 2306709 - RNA, 19 nt, Artificial Sequence
  Description of Artificial Sequence: Synthetic oligonucleotide
gcuucuacaggcuuuauuc

SEQ ID NO: 2306710 - RNA, 19 nt, Artificial Sequence
  Description of Artificial Sequence: Synthetic oligonucleotide
uugccagguucccagaaca

SEQ ID NO: 2306711 - RNA, 19 nt, Artificial Sequence
  Description of Artificial Sequence: Synthetic oligonucleotide
cacaaacaucuucaggugc

SEQ ID NO: 2306712 - RNA, 19 nt, Artificial Sequence
  Description of Artificial Sequence: Synthetic oligonucleotide
gaaaauagguuauuauuau

SEQ ID NO: 2306713 - RNA, 19 nt, Artificial Sequence
  Description of Artificial Sequence: Synthetic oligonucleotide
aaacaucuucaggugcugg

SEQ ID NO: 2306714 - RNA, 19 nt, Artificial Sequence
  Description of Artificial Sequence: Synthetic oligonucleotide
ucuacccaugucauuuccc

SEQ ID NO: 2306715 - RNA, 19 nt, Artificial Sequence
  Description of Artificial Sequence: Synthetic oligonucleotide
auaagaagagaaaaggcua

SEQ ID NO: 2306716 - RNA, 19 nt, Artificial Sequence
  Description of Artificial Sequence: Synthetic oligonucleotide
uuguugaauucacguaaca

SEQ ID NO: 2306717 - RNA, 19 nt, Artificial Sequence
  Description of Artificial Sequence: Synthetic oligonucleotide
acucugaggauucagcuuu

SEQ ID NO: 2306718 - RNA, 19 nt, Artificial Sequence
  Description of Artificial Sequence: Synthetic oligonucleotide
aaggcaagcgcaaaacaca

SEQ ID NO: 2306719 - RNA, 19 nt, Artificial Sequence
  Description of Artificial Sequence: Synthetic oligonucleotide
uagaguuauacaucacaaa

SEQ ID NO: 2306720 - RNA, 19 nt, Artificial Sequence
  Description of Artificial Sequence: Synthetic oligonucleotide
caagcugcauacacagagg

SEQ ID NO: 2306721 - RNA, 19 nt, Artificial Sequence
  Description of Artificial Sequence: Synthetic oligonucleotide
aaggugcagaaccuuggga

SEQ ID NO: 2306722 - RNA, 19 nt, Artificial Sequence
  Description of Artificial Sequence: Synthetic oligonucleotide
agaagaaaaucuucauuua

SEQ ID NO: 2306723 - RNA, 19 nt, Artificial Sequence
  Description of Artificial Sequence: Synthetic oligonucleotide
uccuauuaccucuggggca

SEQ ID NO: 2306724 - RNA, 19 nt, Artificial Sequence
  Description of Artificial Sequence: Synthetic oligonucleotide
cagauagggaagcccaccg

SEQ ID NO: 2306725 - RNA, 19 nt, Artificial Sequence
  Description of Artificial Sequence: Synthetic oligonucleotide
aaguacgaugagggcaccc

SEQ ID NO: 2306726 - RNA, 19 nt, Artificial Sequence
  Description of Artificial Sequence: Synthetic oligonucleotide
uuuggcucucugagaaaag

SEQ ID NO: 2306727 - RNA, 19 nt, Artificial Sequence
  Description of Artificial Sequence: Synthetic oligonucleotide
auagaguuauacaucacaa

SEQ ID NO: 2306728 - RNA, 19 nt, Artificial Sequence
  Description of Artificial Sequence: Synthetic oligonucleotide
ucuacaggcuuuauucaua

SEQ ID NO: 2306729 - RNA, 19 nt, Artificial Sequence
  Description of Artificial Sequence: Synthetic oligonucleotide
ucuacaggagacacaccac

SEQ ID NO: 2306730 - RNA, 19 nt, Artificial Sequence
  Description of Artificial Sequence: Synthetic oligonucleotide
caaugaguagagagggcag

SEQ ID NO: 2306731 - RNA, 19 nt, Artificial Sequence
  Description of Artificial Sequence: Synthetic oligonucleotide
caagagaauacugcagaag

SEQ ID NO: 2306732 - RNA, 19 nt, Artificial Sequence
  Description of Artificial Sequence: Synthetic oligonucleotide
accuugggaaccaagcagg

SEQ ID NO: 2306733 - RNA, 19 nt, Artificial Sequence
  Description of Artificial Sequence: Synthetic oligonucleotide
aagauguucugcugucuaa

SEQ ID NO: 2306734 - RNA, 19 nt, Artificial Sequence
  Description of Artificial Sequence: Synthetic oligonucleotide
aauaacguugaaguccaua

SEQ ID NO: 2306735 - RNA, 19 nt, Artificial Sequence
  Description of Artificial Sequence: Synthetic oligonucleotide
auacauaauauaaggguau

SEQ ID NO: 2306736 - RNA, 19 nt, Artificial Sequence
  Description of Artificial Sequence: Synthetic oligonucleotide
ggaacugaagacaaugaug

SEQ ID NO: 2306737 - RNA, 19 nt, Artificial Sequence
  Description of Artificial Sequence: Synthetic oligonucleotide
aacccaggaugucagcccu

SEQ ID NO: 2306738 - RNA, 19 nt, Artificial Sequence
  Description of Artificial Sequence: Synthetic oligonucleotide
uggcaugucuuccugcuaa

SEQ ID NO: 2306739 - RNA, 19 nt, Artificial Sequence
  Description of Artificial Sequence: Synthetic oligonucleotide
gaacccaggaugucagccc

SEQ ID NO: 2306740 - RNA, 19 nt, Artificial Sequence
  Description of Artificial Sequence: Synthetic oligonucleotide
caagcaggcagauagggaa

SEQ ID NO: 2306741 - RNA, 19 nt, Artificial Sequence
  Description of Artificial Sequence: Synthetic oligonucleotide
gcuauauagaguuauacau

SEQ ID NO: 2306742 - RNA, 19 nt, Artificial Sequence
  Description of Artificial Sequence: Synthetic oligonucleotide
auuagaaguaucagcuucu

SEQ ID NO: 2306743 - RNA, 19 nt, Artificial Sequence
  Description of Artificial Sequence: Synthetic oligonucleotide
caaccugacaacaaccaga

SEQ ID NO: 2306744 - RNA, 19 nt, Artificial Sequence
  Description of Artificial Sequence: Synthetic oligonucleotide
aucuucauuuaaauaacgu

SEQ ID NO: 2306745 - RNA, 19 nt, Artificial Sequence
  Description of Artificial Sequence: Synthetic oligonucleotide
uccaaaggcaagcgcaaaa

SEQ ID NO: 2306746 - RNA, 19 nt, Artificial Sequence
  Description of Artificial Sequence: Synthetic oligonucleotide
ugagggcacccuuuaagga

SEQ ID NO: 2306747 - RNA, 19 nt, Artificial Sequence
  Description of Artificial Sequence: Synthetic oligonucleotide
uacacagaggcaaccugac

SEQ ID NO: 2306748 - RNA, 19 nt, Artificial Sequence
  Description of Artificial Sequence: Synthetic oligonucleotide
accgacuacagaugcgcuc

SEQ ID NO: 2306749 - RNA, 19 nt, Artificial Sequence
  Description of Artificial Sequence: Synthetic oligonucleotide
gugcaaacuagucucucug

SEQ ID NO: 2306750 - RNA, 19 nt, Artificial Sequence
  Description of Artificial Sequence: Synthetic oligonucleotide
agguucccagaacauggcg

SEQ ID NO: 2306751 - RNA, 19 nt, Artificial Sequence
  Description of Artificial Sequence: Synthetic oligonucleotide
aaaguacgaugagggcacc

SEQ ID NO: 2306752 - RNA, 19 nt, Artificial Sequence
  Description of Artificial Sequence: Synthetic oligonucleotide
uagaaguaucagcuucuac

SEQ ID NO: 2306753 - RNA, 19 nt, Artificial Sequence
  Description of Artificial Sequence: Synthetic oligonucleotide
gaaccuugggaaccaagca

SEQ ID NO: 2306754 - RNA, 19 nt, Artificial Sequence
  Description of Artificial Sequence: Synthetic oligonucleotide
caggaugucagcccuuccc

SEQ ID NO: 2306755 - RNA, 19 nt, Artificial Sequence
  Description of Artificial Sequence: Synthetic oligonucleotide
aggcaaccugacaacaacc

SEQ ID NO: 2306756 - RNA, 19 nt, Artificial Sequence
  Description of Artificial Sequence: Synthetic oligonucleotide
uuuccuagggaggcaauga

SEQ ID NO: 2306757 - RNA, 19 nt, Artificial Sequence
  Description of Artificial Sequence: Synthetic oligonucleotide
uuugccagguucccagaac

SEQ ID NO: 2306758 - RNA, 19 nt, Artificial Sequence
  Description of Artificial Sequence: Synthetic oligonucleotide
uggagaaaugcaucucccu

SEQ ID NO: 2306759 - RNA, 19 nt, Artificial Sequence
  Description of Artificial Sequence: Synthetic oligonucleotide
uccuagggaggcaaugagu

SEQ ID NO: 2306760 - RNA, 19 nt, Artificial Sequence
  Description of Artificial Sequence: Synthetic oligonucleotide
augcgcucuacccauguca

SEQ ID NO: 2306761 - RNA, 19 nt, Artificial Sequence
  Description of Artificial Sequence: Synthetic oligonucleotide
aauuugccagguucccaga

SEQ ID NO: 2306762 - RNA, 19 nt, Artificial Sequence
  Description of Artificial Sequence: Synthetic oligonucleotide
auauaaggguauauuacau

SEQ ID NO: 2306763 - RNA, 19 nt, Artificial Sequence
  Description of Artificial Sequence: Synthetic oligonucleotide
agaaaaggcuauauagagu

SEQ ID NO: 2306764 - RNA, 19 nt, Artificial Sequence
  Description of Artificial Sequence: Synthetic oligonucleotide
uaacguugaaguccauaau

SEQ ID NO: 2306765 - RNA, 19 nt, Artificial Sequence
  Description of Artificial Sequence: Synthetic oligonucleotide
gcuuugcuaggauacuugg

SEQ ID NO: 2306766 - RNA, 19 nt, Artificial Sequence
  Description of Artificial Sequence: Synthetic oligonucleotide
aggcaagcgcaaaacacac

SEQ ID NO: 2306767 - RNA, 19 nt, Artificial Sequence
  Description of Artificial Sequence: Synthetic oligonucleotide
uggcggaaagcaaguaugu

SEQ ID NO: 2306768 - RNA, 19 nt, Artificial Sequence
  Description of Artificial Sequence: Synthetic oligonucleotide
cagaacauggcggaaagca

SEQ ID NO: 2306769 - RNA, 19 nt, Artificial Sequence
  Description of Artificial Sequence: Synthetic oligonucleotide
auggcggaaagcaaguaug

SEQ ID NO: 2306770 - RNA, 19 nt, Artificial Sequence
  Description of Artificial Sequence: Synthetic oligonucleotide
cacccuuuaaggaggcagc

SEQ ID NO: 2306771 - RNA, 19 nt, Artificial Sequence
  Description of Artificial Sequence: Synthetic oligonucleotide
acagaugcgcucuacccau

SEQ ID NO: 2306772 - RNA, 19 nt, Artificial Sequence
  Description of Artificial Sequence: Synthetic oligonucleotide
agaagagaaaaggcuauau

SEQ ID NO: 2306773 - RNA, 19 nt, Artificial Sequence
  Description of Artificial Sequence: Synthetic oligonucleotide
gaaaagcuacaagccaaug

SEQ ID NO: 2306774 - RNA, 19 nt, Artificial Sequence
  Description of Artificial Sequence: Synthetic oligonucleotide
ucauuagaaguaucagcuu

SEQ ID NO: 2306775 - RNA, 19 nt, Artificial Sequence
  Description of Artificial Sequence: Synthetic oligonucleotide
cccuuauacauaauauaag

SEQ ID NO: 2306776 - RNA, 19 nt, Artificial Sequence
  Description of Artificial Sequence: Synthetic oligonucleotide
uccugcuaagauguucugc

SEQ ID NO: 2306777 - RNA, 19 nt, Artificial Sequence
  Description of Artificial Sequence: Synthetic oligonucleotide
cugaggauucagcuuuggc

SEQ ID NO: 2306778 - RNA, 19 nt, Artificial Sequence
  Description of Artificial Sequence: Synthetic oligonucleotide
acauauguacacacgcuga

SEQ ID NO: 2306779 - RNA, 19 nt, Artificial Sequence
  Description of Artificial Sequence: Synthetic oligonucleotide
aguagagagggcagacaac

SEQ ID NO: 2306780 - RNA, 19 nt, Artificial Sequence
  Description of Artificial Sequence: Synthetic oligonucleotide
guaacaagcugcauacaca

SEQ ID NO: 2306781 - RNA, 19 nt, Artificial Sequence
  Description of Artificial Sequence: Synthetic oligonucleotide
ucugaggauucagcuuugg

SEQ ID NO: 2306782 - RNA, 19 nt, Artificial Sequence
  Description of Artificial Sequence: Synthetic oligonucleotide
acauaauauaaggguauau

SEQ ID NO: 2306783 - RNA, 19 nt, Artificial Sequence
  Description of Artificial Sequence: Synthetic oligonucleotide
uagggaagcccaccgacua

SEQ ID NO: 2306784 - RNA, 19 nt, Artificial Sequence
  Description of Artificial Sequence: Synthetic oligonucleotide
agugguggcaugucuuccu

SEQ ID NO: 2306785 - RNA, 19 nt, Artificial Sequence
  Description of Artificial Sequence: Synthetic oligonucleotide
accucugugcaaacuaguc

SEQ ID NO: 2306786 - RNA, 19 nt, Artificial Sequence
  Description of Artificial Sequence: Synthetic oligonucleotide
aagcuacaagccaauggca

SEQ ID NO: 2306787 - RNA, 19 nt, Artificial Sequence
  Description of Artificial Sequence: Synthetic oligonucleotide
gacacaccacaauuucuuc

SEQ ID NO: 2306788 - RNA, 19 nt, Artificial Sequence
  Description of Artificial Sequence: Synthetic oligonucleotide
cuggggcaccauuugaaug

SEQ ID NO: 2306789 - RNA, 19 nt, Artificial Sequence
  Description of Artificial Sequence: Synthetic oligonucleotide
ggagaaaugcaucucccuc

SEQ ID NO: 2306790 - RNA, 19 nt, Artificial Sequence
  Description of Artificial Sequence: Synthetic oligonucleotide
ucuuccugcuaagauguuc

SEQ ID NO: 2306791 - RNA, 19 nt, Artificial Sequence
  Description of Artificial Sequence: Synthetic oligonucleotide
agcuuguugaauucacgua

SEQ ID NO: 2306792 - RNA, 19 nt, Artificial Sequence
  Description of Artificial Sequence: Synthetic oligonucleotide
ggaagcaucuacaggagac

SEQ ID NO: 2306793 - RNA, 19 nt, Artificial Sequence
  Description of Artificial Sequence: Synthetic oligonucleotide
aaccaagcaggcagauagg

SEQ ID NO: 2306794 - RNA, 19 nt, Artificial Sequence
  Description of Artificial Sequence: Synthetic oligonucleotide
gcuuccucgagcuucuggc

SEQ ID NO: 2306795 - RNA, 19 nt, Artificial Sequence
  Description of Artificial Sequence: Synthetic oligonucleotide
auaaagcaaucccuucuuu

SEQ ID NO: 2306796 - RNA, 19 nt, Artificial Sequence
  Description of Artificial Sequence: Synthetic oligonucleotide
ugucauuuccccugagcuu

SEQ ID NO: 2306797 - RNA, 19 nt, Artificial Sequence
  Description of Artificial Sequence: Synthetic oligonucleotide
guucccagaacauggcgga

SEQ ID NO: 2306798 - RNA, 19 nt, Artificial Sequence
  Description of Artificial Sequence: Synthetic oligonucleotide
gauguucugcugucuaaaa

SEQ ID NO: 2306799 - RNA, 19 nt, Artificial Sequence
  Description of Artificial Sequence: Synthetic oligonucleotide
aacaacucccuuauacaua

SEQ ID NO: 2306800 - RNA, 19 nt, Artificial Sequence
  Description of Artificial Sequence: Synthetic oligonucleotide
uccucaucgcuacuggcuu

SEQ ID NO: 2306801 - RNA, 19 nt, Artificial Sequence
  Description of Artificial Sequence: Synthetic oligonucleotide
ggagucauuagaaguauca

SEQ ID NO: 2306802 - RNA, 19 nt, Artificial Sequence
  Description of Artificial Sequence: Synthetic oligonucleotide
auuauucagucuuccuauu

SEQ ID NO: 2306803 - RNA, 19 nt, Artificial Sequence
  Description of Artificial Sequence: Synthetic oligonucleotide
agggaagcccaccgacuac

SEQ ID NO: 2306804 - RNA, 19 nt, Artificial Sequence
  Description of Artificial Sequence: Synthetic oligonucleotide
ugcgcucuacccaugucau

SEQ ID NO: 2306805 - RNA, 19 nt, Artificial Sequence
  Description of Artificial Sequence: Synthetic oligonucleotide
acguugaaguccauaauaa

SEQ ID NO: 2306806 - RNA, 19 nt, Artificial Sequence
  Description of Artificial Sequence: Synthetic oligonucleotide
ggagacacaccacaauuuc

SEQ ID NO: 2306807 - RNA, 19 nt, Artificial Sequence
  Description of Artificial Sequence: Synthetic oligonucleotide
gaaguccauaauaaauaaa

SEQ ID NO: 2306808 - RNA, 19 nt, Artificial Sequence
  Description of Artificial Sequence: Synthetic oligonucleotide
aguacgaugagggcacccu

SEQ ID NO: 2306809 - RNA, 19 nt, Artificial Sequence
  Description of Artificial Sequence: Synthetic oligonucleotide
aagaagagaaaaggcuaua

SEQ ID NO: 2306810 - RNA, 19 nt, Artificial Sequence
  Description of Artificial Sequence: Synthetic oligonucleotide
uacucugaggauucagcuu

SEQ ID NO: 2306811 - RNA, 19 nt, Artificial Sequence
  Description of Artificial Sequence: Synthetic oligonucleotide
gaggcagcuuguugaauuc

SEQ ID NO: 2306812 - RNA, 19 nt, Artificial Sequence
  Description of Artificial Sequence: Synthetic oligonucleotide
augaugaccagugguggca

SEQ ID NO: 2306813 - RNA, 19 nt, Artificial Sequence
  Description of Artificial Sequence: Synthetic oligonucleotide
ugucagcccuucccucugg

SEQ ID NO: 2306814 - RNA, 19 nt, Artificial Sequence
  Description of Artificial Sequence: Synthetic oligonucleotide
agauagggaagcccaccga

SEQ ID NO: 2306815 - RNA, 19 nt, Artificial Sequence
  Description of Artificial Sequence: Synthetic oligonucleotide
gaagacaaugaugaccagu

SEQ ID NO: 2306816 - RNA, 19 nt, Artificial Sequence
  Description of Artificial Sequence: Synthetic oligonucleotide
aggauucagcuuuggcucu

SEQ ID NO: 2306817 - RNA, 19 nt, Artificial Sequence
  Description of Artificial Sequence: Synthetic oligonucleotide
ucccuccaaaggcaagcgc

SEQ ID NO: 2306818 - RNA, 19 nt, Artificial Sequence
  Description of Artificial Sequence: Synthetic oligonucleotide
auucacguaacaagcugca

SEQ ID NO: 2306819 - RNA, 19 nt, Artificial Sequence
  Description of Artificial Sequence: Synthetic oligonucleotide
auacacaccucugugcaaa

SEQ ID NO: 2306820 - RNA, 19 nt, Artificial Sequence
  Description of Artificial Sequence: Synthetic oligonucleotide
cuacaggcuuuauucauaa

SEQ ID NO: 2306821 - RNA, 19 nt, Artificial Sequence
  Description of Artificial Sequence: Synthetic oligonucleotide
cagguucccagaacauggc

SEQ ID NO: 2306822 - RNA, 19 nt, Artificial Sequence
  Description of Artificial Sequence: Synthetic oligonucleotide
agccgggagucauuagaag

SEQ ID NO: 2306823 - RNA, 19 nt, Artificial Sequence
  Description of Artificial Sequence: Synthetic oligonucleotide
acacacgcugauacacacc

SEQ ID NO: 2306824 - RNA, 19 nt, Artificial Sequence
  Description of Artificial Sequence: Synthetic oligonucleotide
uucuuuccuagggaggcaa

SEQ ID NO: 2306825 - RNA, 19 nt, Artificial Sequence
  Description of Artificial Sequence: Synthetic oligonucleotide
cuuuccuagggaggcaaug

SEQ ID NO: 2306826 - RNA, 19 nt, Artificial Sequence
  Description of Artificial Sequence: Synthetic oligonucleotide
guuauacaucacaaacauc

SEQ ID NO: 2306827 - RNA, 19 nt, Artificial Sequence
  Description of Artificial Sequence: Synthetic oligonucleotide
agaugcgcucuacccaugu

SEQ ID NO: 2306828 - RNA, 19 nt, Artificial Sequence
  Description of Artificial Sequence: Synthetic oligonucleotide
gcaaugaguagagagggca

SEQ ID NO: 2306829 - RNA, 19 nt, Artificial Sequence
  Description of Artificial Sequence: Synthetic oligonucleotide
acaccacaauuucuuccug

SEQ ID NO: 2306830 - RNA, 19 nt, Artificial Sequence
  Description of Artificial Sequence: Synthetic oligonucleotide
acaccucugugcaaacuag

SEQ ID NO: 2306831 - RNA, 19 nt, Artificial Sequence
  Description of Artificial Sequence: Synthetic oligonucleotide
agcccuucccucuggagaa

SEQ ID NO: 2306832 - RNA, 19 nt, Artificial Sequence
  Description of Artificial Sequence: Synthetic oligonucleotide
gucuuccuauuaccucugg

SEQ ID NO: 2306833 - RNA, 19 nt, Artificial Sequence
  Description of Artificial Sequence: Synthetic oligonucleotide
uuccugcuaagauguucug

SEQ ID NO: 2306834 - RNA, 19 nt, Artificial Sequence
  Description of Artificial Sequence: Synthetic oligonucleotide
guuauuccaagagaauacu

SEQ ID NO: 2306835 - RNA, 19 nt, Artificial Sequence
  Description of Artificial Sequence: Synthetic oligonucleotide
caacaaccagaaaauaggu

SEQ ID NO: 2306836 - RNA, 19 nt, Artificial Sequence
  Description of Artificial Sequence: Synthetic oligonucleotide
cauaauauaaggguauauu

SEQ ID NO: 2306837 - RNA, 19 nt, Artificial Sequence
  Description of Artificial Sequence: Synthetic oligonucleotide
agaaaagcuacaagccaau

SEQ ID NO: 2306838 - RNA, 19 nt, Artificial Sequence
  Description of Artificial Sequence: Synthetic oligonucleotide
gaugucagcccuucccucu

SEQ ID NO: 2306839 - RNA, 19 nt, Artificial Sequence
  Description of Artificial Sequence: Synthetic oligonucleotide
accucuggggcaccauuug

SEQ ID NO: 2306840 - RNA, 19 nt, Artificial Sequence
  Description of Artificial Sequence: Synthetic oligonucleotide
gugcagaaccuugggaacc

SEQ ID NO: 2306841 - RNA, 19 nt, Artificial Sequence
  Description of Artificial Sequence: Synthetic oligonucleotide
aggcagauagggaagccca

SEQ ID NO: 2306842 - RNA, 19 nt, Artificial Sequence
  Description of Artificial Sequence: Synthetic oligonucleotide
agcaaucccuucuuuccua

SEQ ID NO: 2306843 - RNA, 19 nt, Artificial Sequence
  Description of Artificial Sequence: Synthetic oligonucleotide
caccauuugaauguuuaaa

SEQ ID NO: 2306844 - RNA, 19 nt, Artificial Sequence
  Description of Artificial Sequence: Synthetic oligonucleotide
agcaaguauguuauuccaa

SEQ ID NO: 2306845 - RNA, 19 nt, Artificial Sequence
  Description of Artificial Sequence: Synthetic oligonucleotide
cacacgcugauacacaccu

SEQ ID NO: 2306846 - RNA, 19 nt, Artificial Sequence
  Description of Artificial Sequence: Synthetic oligonucleotide
gaugaccagugguggcaug

SEQ ID NO: 2306847 - RNA, 19 nt, Artificial Sequence
  Description of Artificial Sequence: Synthetic oligonucleotide
augaccagugguggcaugu

SEQ ID NO: 2306848 - RNA, 19 nt, Artificial Sequence
  Description of Artificial Sequence: Synthetic oligonucleotide
caucuacaggagacacacc

SEQ ID NO: 2306849 - RNA, 19 nt, Artificial Sequence
  Description of Artificial Sequence: Synthetic oligonucleotide
acacagaggcaaccugaca

SEQ ID NO: 2306850 - RNA, 19 nt, Artificial Sequence
  Description of Artificial Sequence: Synthetic oligonucleotide
uaccucuggggcaccauuu

SEQ ID NO: 2306851 - RNA, 19 nt, Artificial Sequence
  Description of Artificial Sequence: Synthetic oligonucleotide
cgcaaaacacacagaaaag

SEQ ID NO: 2306852 - RNA, 19 nt, Artificial Sequence
  Description of Artificial Sequence: Synthetic oligonucleotide
augucagcccuucccucug

SEQ ID NO: 2306853 - RNA, 19 nt, Artificial Sequence
  Description of Artificial Sequence: Synthetic oligonucleotide
gcaaucccuucuuuccuag

SEQ ID NO: 2306854 - RNA, 19 nt, Artificial Sequence
  Description of Artificial Sequence: Synthetic oligonucleotide
aaggcuauauagaguuaua

SEQ ID NO: 2306855 - RNA, 19 nt, Artificial Sequence
  Description of Artificial Sequence: Synthetic oligonucleotide
ucuuuccuagggaggcaau

SEQ ID NO: 2306856 - RNA, 19 nt, Artificial Sequence
  Description of Artificial Sequence: Synthetic oligonucleotide
gcggaaagcaaguauguua

SEQ ID NO: 2306857 - RNA, 19 nt, Artificial Sequence
  Description of Artificial Sequence: Synthetic oligonucleotide
agaacauggcggaaagcaa

SEQ ID NO: 2306858 - RNA, 19 nt, Artificial Sequence
  Description of Artificial Sequence: Synthetic oligonucleotide
cagcuuguugaauucacgu

SEQ ID NO: 2306859 - RNA, 19 nt, Artificial Sequence
  Description of Artificial Sequence: Synthetic oligonucleotide
aggauacuuggaagcaucu

SEQ ID NO: 2306860 - RNA, 19 nt, Artificial Sequence
  Description of Artificial Sequence: Synthetic oligonucleotide
uauuaccucuggggcacca

SEQ ID NO: 2306861 - RNA, 19 nt, Artificial Sequence
  Description of Artificial Sequence: Synthetic oligonucleotide
auagggaagcccaccgacu

SEQ ID NO: 2306862 - RNA, 19 nt, Artificial Sequence
  Description of Artificial Sequence: Synthetic oligonucleotide
cacgcugauacacaccucu

SEQ ID NO: 2306863 - RNA, 19 nt, Artificial Sequence
  Description of Artificial Sequence: Synthetic oligonucleotide
ugccagguucccagaacau

SEQ ID NO: 2306864 - RNA, 19 nt, Artificial Sequence
  Description of Artificial Sequence: Synthetic oligonucleotide
cuacaagccaauggcagaa

SEQ ID NO: 2306865 - RNA, 19 nt, Artificial Sequence
  Description of Artificial Sequence: Synthetic oligonucleotide
cucugaggauucagcuuug

SEQ ID NO: 2306866 - RNA, 19 nt, Artificial Sequence
  Description of Artificial Sequence: Synthetic oligonucleotide
aggagacacaccacaauuu

SEQ ID NO: 2306867 - RNA, 19 nt, Artificial Sequence
  Description of Artificial Sequence: Synthetic oligonucleotide
uacaggcuuuauucauaaa

SEQ ID NO: 2306868 - RNA, 19 nt, Artificial Sequence
  Description of Artificial Sequence: Synthetic oligonucleotide
gaugcgcucuacccauguc

SEQ ID NO: 2306869 - RNA, 19 nt, Artificial Sequence
  Description of Artificial Sequence: Synthetic oligonucleotide
ccuauuaccucuggggcac

SEQ ID NO: 2306870 - RNA, 19 nt, Artificial Sequence
  Description of Artificial Sequence: Synthetic oligonucleotide
acaccccgaggucaggaau

SEQ ID NO: 2306871 - RNA, 19 nt, Artificial Sequence
  Description of Artificial Sequence: Synthetic oligonucleotide
acgaugagggcacccuuua

SEQ ID NO: 2306872 - RNA, 19 nt, Artificial Sequence
  Description of Artificial Sequence: Synthetic oligonucleotide
caaccagaaaauagguuau

SEQ ID NO: 2306873 - RNA, 19 nt, Artificial Sequence
  Description of Artificial Sequence: Synthetic oligonucleotide
caagcgcaaaacacacaga

SEQ ID NO: 2306874 - RNA, 19 nt, Artificial Sequence
  Description of Artificial Sequence: Synthetic oligonucleotide
acccuuuaaggaggcagcu

SEQ ID NO: 2306875 - RNA, 19 nt, Artificial Sequence
  Description of Artificial Sequence: Synthetic oligonucleotide
ccgaggucaggaauuugcc

SEQ ID NO: 2306876 - RNA, 19 nt, Artificial Sequence
  Description of Artificial Sequence: Synthetic oligonucleotide
cagcccuucccucuggaga

SEQ ID NO: 2306877 - RNA, 19 nt, Artificial Sequence
  Description of Artificial Sequence: Synthetic oligonucleotide
uucacguaacaagcugcau

SEQ ID NO: 2306878 - RNA, 19 nt, Artificial Sequence
  Description of Artificial Sequence: Synthetic oligonucleotide
caccacaccccgaggucag

SEQ ID NO: 2306879 - RNA, 19 nt, Artificial Sequence
  Description of Artificial Sequence: Synthetic oligonucleotide
gagacacaccacaauuucu

SEQ ID NO: 2306880 - RNA, 19 nt, Artificial Sequence
  Description of Artificial Sequence: Synthetic oligonucleotide
agcaucuacaggagacaca

SEQ ID NO: 2306881 - RNA, 19 nt, Artificial Sequence
  Description of Artificial Sequence: Synthetic oligonucleotide
ccaccgacuacagaugcgc

SEQ ID NO: 2306882 - RNA, 19 nt, Artificial Sequence
  Description of Artificial Sequence: Synthetic oligonucleotide
ugugcagccgggagucauu

SEQ ID NO: 2306883 - RNA, 19 nt, Artificial Sequence
  Description of Artificial Sequence: Synthetic oligonucleotide
gcuaggauacuuggaagca

SEQ ID NO: 2306884 - RNA, 19 nt, Artificial Sequence
  Description of Artificial Sequence: Synthetic oligonucleotide
cauaaagcaaucccuucuu

SEQ ID NO: 2306885 - RNA, 19 nt, Artificial Sequence
  Description of Artificial Sequence: Synthetic oligonucleotide
guacacacgcugauacaca

SEQ ID NO: 2306886 - RNA, 19 nt, Artificial Sequence
  Description of Artificial Sequence: Synthetic oligonucleotide
cauauguacacacgcugau

SEQ ID NO: 2306887 - RNA, 19 nt, Artificial Sequence
  Description of Artificial Sequence: Synthetic oligonucleotide
agaggcaaccugacaacaa

SEQ ID NO: 2306888 - RNA, 19 nt, Artificial Sequence
  Description of Artificial Sequence: Synthetic oligonucleotide
agcgcaaaacacacagaaa

SEQ ID NO: 2306889 - RNA, 19 nt, Artificial Sequence
  Description of Artificial Sequence: Synthetic oligonucleotide
gcagauagggaagcccacc

SEQ ID NO: 2306890 - RNA, 19 nt, Artificial Sequence
  Description of Artificial Sequence: Synthetic oligonucleotide
aggcagcuuguugaauuca

SEQ ID NO: 2306891 - RNA, 19 nt, Artificial Sequence
  Description of Artificial Sequence: Synthetic oligonucleotide
cagccgggagucauuagaa

SEQ ID NO: 2306892 - RNA, 19 nt, Artificial Sequence
  Description of Artificial Sequence: Synthetic oligonucleotide
uucaggugcugggcuagaa

SEQ ID NO: 2306893 - RNA, 19 nt, Artificial Sequence
  Description of Artificial Sequence: Synthetic oligonucleotide
ucaucgcuacuggcuuugc

SEQ ID NO: 2306894 - RNA, 19 nt, Artificial Sequence
  Description of Artificial Sequence: Synthetic oligonucleotide
aggguauauuacauaugua

SEQ ID NO: 2306895 - RNA, 19 nt, Artificial Sequence
  Description of Artificial Sequence: Synthetic oligonucleotide
gcccaccgacuacagaugc

SEQ ID NO: 2306896 - RNA, 19 nt, Artificial Sequence
  Description of Artificial Sequence: Synthetic oligonucleotide
cagaggcaaccugacaaca

SEQ ID NO: 2306897 - RNA, 19 nt, Artificial Sequence
  Description of Artificial Sequence: Synthetic oligonucleotide
cauggcggaaagcaaguau

SEQ ID NO: 2306898 - RNA, 19 nt, Artificial Sequence
  Description of Artificial Sequence: Synthetic oligonucleotide
cuagucucucuggaacuga

SEQ ID NO: 2306899 - RNA, 19 nt, Artificial Sequence
  Description of Artificial Sequence: Synthetic oligonucleotide
ugaccagugguggcauguc

SEQ ID NO: 2306900 - RNA, 19 nt, Artificial Sequence
  Description of Artificial Sequence: Synthetic oligonucleotide
ggcaccauuugaauguuua

SEQ ID NO: 2306901 - RNA, 19 nt, Artificial Sequence
  Description of Artificial Sequence: Synthetic oligonucleotide
gaccagugguggcaugucu

SEQ ID NO: 2306902 - RNA, 19 nt, Artificial Sequence
  Description of Artificial Sequence: Synthetic oligonucleotide
ggcaaugaguagagagggc

SEQ ID NO: 2306903 - RNA, 19 nt, Artificial Sequence
  Description of Artificial Sequence: Synthetic oligonucleotide
acguaacaagcugcauaca

SEQ ID NO: 2306904 - RNA, 19 nt, Artificial Sequence
  Description of Artificial Sequence: Synthetic oligonucleotide
cagaugcgcucuacccaug

SEQ ID NO: 2306905 - RNA, 19 nt, Artificial Sequence
  Description of Artificial Sequence: Synthetic oligonucleotide
accagugguggcaugucuu

SEQ ID NO: 2306906 - RNA, 19 nt, Artificial Sequence
  Description of Artificial Sequence: Synthetic oligonucleotide
gccgggagucauuagaagu

SEQ ID NO: 2306907 - RNA, 19 nt, Artificial Sequence
  Description of Artificial Sequence: Synthetic oligonucleotide
acacgcugauacacaccuc

SEQ ID NO: 2306908 - RNA, 19 nt, Artificial Sequence
  Description of Artificial Sequence: Synthetic oligonucleotide
acgcugauacacaccucug

SEQ ID NO: 2306909 - RNA, 19 nt, Artificial Sequence
  Description of Artificial Sequence: Synthetic oligonucleotide
cuggcagagggccuuggua

SEQ ID NO: 2306910 - RNA, 19 nt, Artificial Sequence
  Description of Artificial Sequence: Synthetic oligonucleotide
agcccaccgacuacagaug

SEQ ID NO: 2306911 - RNA, 19 nt, Artificial Sequence
  Description of Artificial Sequence: Synthetic oligonucleotide
gccagguucccagaacaug

SEQ ID NO: 2306912 - RNA, 19 nt, Artificial Sequence
  Description of Artificial Sequence: Synthetic oligonucleotide
cuauuaccucuggggcacc

SEQ ID NO: 2306913 - RNA, 19 nt, Artificial Sequence
  Description of Artificial Sequence: Synthetic oligonucleotide
caucuucaggugcugggcu

SEQ ID NO: 2306914 - RNA, 19 nt, Artificial Sequence
  Description of Artificial Sequence: Synthetic oligonucleotide
auuaccucuggggcaccau

SEQ ID NO: 2306915 - RNA, 19 nt, Artificial Sequence
  Description of Artificial Sequence: Synthetic oligonucleotide
cccaccgacuacagaugcg

SEQ ID NO: 2306916 - RNA, 19 nt, Artificial Sequence
  Description of Artificial Sequence: Synthetic oligonucleotide
guaucagcuucuacaggcu

SEQ ID NO: 2306917 - RNA, 19 nt, Artificial Sequence
  Description of Artificial Sequence: Synthetic oligonucleotide
acauggcggaaagcaagua

SEQ ID NO: 2306918 - RNA, 19 nt, Artificial Sequence
  Description of Artificial Sequence: Synthetic oligonucleotide
gucagcccuucccucugga

SEQ ID NO: 2306919 - RNA, 19 nt, Artificial Sequence
  Description of Artificial Sequence: Synthetic oligonucleotide
gcucuacccaugucauuuc

SEQ ID NO: 2306920 - RNA, 19 nt, Artificial Sequence
  Description of Artificial Sequence: Synthetic oligonucleotide
ccgggagucauuagaagua

SEQ ID NO: 2306921 - RNA, 19 nt, Artificial Sequence
  Description of Artificial Sequence: Synthetic oligonucleotide
gggagucauuagaaguauc

SEQ ID NO: 2306922 - RNA, 19 nt, Artificial Sequence
  Description of Artificial Sequence: Synthetic oligonucleotide
cggaaagcaaguauguuau

SEQ ID NO: 2306923 - RNA, 19 nt, Artificial Sequence
  Description of Artificial Sequence: Synthetic oligonucleotide
cguugaaguccauaauaaa

SEQ ID NO: 2306924 - RNA, 19 nt, Artificial Sequence
  Description of Artificial Sequence: Synthetic oligonucleotide
ggcagauagggaagcccac

SEQ ID NO: 2306925 - RNA, 19 nt, Artificial Sequence
  Description of Artificial Sequence: Synthetic oligonucleotide
ccagaacauggcggaaagc

SEQ ID NO: 2306926 - RNA, 19 nt, Artificial Sequence
  Description of Artificial Sequence: Synthetic oligonucleotide
cacaccccgaggucaggaa

SEQ ID NO: 2306927 - RNA, 19 nt, Artificial Sequence
  Description of Artificial Sequence: Synthetic oligonucleotide
guggcaugucuuccugcua

SEQ ID NO: 2306928 - RNA, 19 nt, Artificial Sequence
  Description of Artificial Sequence: Synthetic oligonucleotide
ggauacuuggaagcaucua

SEQ ID NO: 2306929 - RNA, 19 nt, Artificial Sequence
  Description of Artificial Sequence: Synthetic oligonucleotide
cugggcuagaacccaggau

SEQ ID NO: 2306930 - RNA, 19 nt, Artificial Sequence
  Description of Artificial Sequence: Synthetic oligonucleotide
ccaggaugucagcccuucc

SEQ ID NO: 2306931 - RNA, 19 nt, Artificial Sequence
  Description of Artificial Sequence: Synthetic oligonucleotide
ggauucagcuuuggcucuc

SEQ ID NO: 2306932 - RNA, 19 nt, Artificial Sequence
  Description of Artificial Sequence: Synthetic oligonucleotide
caucgcuacuggcuuugcu

SEQ ID NO: 2306933 - RNA, 19 nt, Artificial Sequence
  Description of Artificial Sequence: Synthetic oligonucleotide
accccgaggucaggaauuu

SEQ ID NO: 2306934 - RNA, 19 nt, Artificial Sequence
  Description of Artificial Sequence: Synthetic oligonucleotide
ggcaagcgcaaaacacaca

SEQ ID NO: 2306935 - RNA, 19 nt, Artificial Sequence
  Description of Artificial Sequence: Synthetic oligonucleotide
ggcagacaacugccccacc

SEQ ID NO: 2306936 - RNA, 19 nt, Artificial Sequence
  Description of Artificial Sequence: Synthetic oligonucleotide
caccgacuacagaugcgcu

SEQ ID NO: 2306937 - RNA, 19 nt, Artificial Sequence
  Description of Artificial Sequence: Synthetic oligonucleotide
ggcuagaacccaggauguc

SEQ ID NO: 2306938 - RNA, 19 nt, Artificial Sequence
  Description of Artificial Sequence: Synthetic oligonucleotide
gugcagccgggagucauua

SEQ ID NO: 2306939 - RNA, 19 nt, Artificial Sequence
  Description of Artificial Sequence: Synthetic oligonucleotide
gucaggaauuugccagguu

SEQ ID NO: 2306940 - RNA, 19 nt, Artificial Sequence
  Description of Artificial Sequence: Synthetic oligonucleotide
caccccgaggucaggaauu

SEQ ID NO: 2306941 - RNA, 19 nt, Artificial Sequence
  Description of Artificial Sequence: Synthetic oligonucleotide
gggcuagaacccaggaugu

SEQ ID NO: 2306942 - RNA, 19 nt, Artificial Sequence
  Description of Artificial Sequence: Synthetic oligonucleotide
gggcacccuuuaaggaggc

SEQ ID NO: 2306943 - RNA, 19 nt, Artificial Sequence
  Description of Artificial Sequence: Synthetic oligonucleotide
ggucaggaauuugccaggu

SEQ ID NO: 2306944 - RNA, 19 nt, Artificial Sequence
  Description of Artificial Sequence: Synthetic oligonucleotide
ggaaccaagcaggcagaua

SEQ ID NO: 2306945 - RNA, 19 nt, Artificial Sequence
  Description of Artificial Sequence: Synthetic oligonucleotide
gcagagggccuugguacuc

SEQ ID NO: 2306946 - RNA, 19 nt, Artificial Sequence
  Description of Artificial Sequence: Synthetic oligonucleotide
ggaaagcaaguauguuauu

SEQ ID NO: 2306947 - RNA, 19 nt, Artificial Sequence
  Description of Artificial Sequence: Synthetic oligonucleotide
cuacuggcuuugcuaggau

SEQ ID NO: 2306948 - RNA, 19 nt, Artificial Sequence
  Description of Artificial Sequence: Synthetic oligonucleotide
ccgacuacagaugcgcucu

SEQ ID NO: 2306949 - RNA, 19 nt, Artificial Sequence
  Description of Artificial Sequence: Synthetic oligonucleotide
cagagggccuugguacucu

SEQ ID NO: 2306950 - RNA, 19 nt, Artificial Sequence
  Description of Artificial Sequence: Synthetic oligonucleotide
ccuugguacucugaggauu

SEQ ID NO: 2306951 - RNA, 19 nt, Artificial Sequence
  Description of Artificial Sequence: Synthetic oligonucleotide
ccucgagcuucuggcuggc

SEQ ID NO: 2306952 - RNA, 19 nt, Artificial Sequence
  Description of Artificial Sequence: Synthetic oligonucleotide
cugugcagccgggagucau

SEQ ID NO: 2306953 - RNA, 19 nt, Artificial Sequence
  Description of Artificial Sequence: Synthetic oligonucleotide
acccaggaugucagcccuu

SEQ ID NO: 2306954 - RNA, 19 nt, Artificial Sequence
  Description of Artificial Sequence: Synthetic oligonucleotide
gccuugguacucugaggau

SEQ ID NO: 2306955 - RNA, 19 nt, Artificial Sequence
  Description of Artificial Sequence: Synthetic oligonucleotide
ggcggaaagcaaguauguu

SEQ ID NO: 2306956 - RNA, 19 nt, Artificial Sequence
  Description of Artificial Sequence: Synthetic oligonucleotide
caacucccuuauacauaau

SEQ ID NO: 2306957 - RNA, 19 nt, Artificial Sequence
  Description of Artificial Sequence: Synthetic oligonucleotide
ccacaccccgaggucagga

SEQ ID NO: 2306958 - RNA, 19 nt, Artificial Sequence
  Description of Artificial Sequence: Synthetic oligonucleotide
gggaaccaagcaggcagau

SEQ ID NO: 2306959 - RNA, 19 nt, Artificial Sequence
  Description of Artificial Sequence: Synthetic oligonucleotide
cgcucuacccaugucauuu

SEQ ID NO: 2306960 - RNA, 19 nt, Artificial Sequence
  Description of Artificial Sequence: Synthetic oligonucleotide
ccccgaggucaggaauuug

SEQ ID NO: 2306961 - RNA, 19 nt, Artificial Sequence
  Description of Artificial Sequence: Synthetic oligonucleotide
ggggcaccauuugaauguu

SEQ ID NO: 2306962 - RNA, 19 nt, Artificial Sequence
  Description of Artificial Sequence: Synthetic oligonucleotide
cgggagucauuagaaguau

SEQ ID NO: 2306963 - RNA, 19 nt, Artificial Sequence
  Description of Artificial Sequence: Synthetic oligonucleotide
gcgcucuacccaugucauu

SEQ ID NO: 2306964 - RNA, 19 nt, Artificial Sequence
  Description of Artificial Sequence: Synthetic oligonucleotide
cccuuuaaggaggcagcuu

SEQ ID NO: 2306965 - RNA, 19 nt, Artificial Sequence
  Description of Artificial Sequence: Synthetic oligonucleotide
gggcaccauuugaauguuu

SEQ ID NO: 2306966 - RNA, 19 nt, Artificial Sequence
  Description of Artificial Sequence: Synthetic oligonucleotide
cgacuacagaugcgcucua

SEQ ID NO: 2306967 - RNA, 19 nt, Artificial Sequence
  Description of Artificial Sequence: Synthetic oligonucleotide
gaaacugacaaauuggucg

SEQ ID NO: 2306968 - RNA, 19 nt, Artificial Sequence
  Description of Artificial Sequence: Synthetic oligonucleotide
ucaacuacugaccauaugg

SEQ ID NO: 2306969 - RNA, 19 nt, Artificial Sequence
  Description of Artificial Sequence: Synthetic oligonucleotide
aaaugaguuagauaauggg

SEQ ID NO: 2306970 - RNA, 19 nt, Artificial Sequence
  Description of Artificial Sequence: Synthetic oligonucleotide
aaugaguuagauaaugggc

SEQ ID NO: 2306971 - RNA, 19 nt, Artificial Sequence
  Description of Artificial Sequence: Synthetic oligonucleotide
ucuugaaugauauaaauuc

SEQ ID NO: 2306972 - RNA, 19 nt, Artificial Sequence
  Description of Artificial Sequence: Synthetic oligonucleotide
aaauucagagauucagacc

SEQ ID NO: 2306973 - RNA, 19 nt, Artificial Sequence
  Description of Artificial Sequence: Synthetic oligonucleotide
uuagauaaugggcaggagg

SEQ ID NO: 2306974 - RNA, 19 nt, Artificial Sequence
  Description of Artificial Sequence: Synthetic oligonucleotide
auuucugauauauuuacuc

SEQ ID NO: 2306975 - RNA, 19 nt, Artificial Sequence
  Description of Artificial Sequence: Synthetic oligonucleotide
gaaugauauaaauucagag

SEQ ID NO: 2306976 - RNA, 19 nt, Artificial Sequence
  Description of Artificial Sequence: Synthetic oligonucleotide
guucucauuacauuaaacg

SEQ ID NO: 2306977 - RNA, 19 nt, Artificial Sequence
  Description of Artificial Sequence: Synthetic oligonucleotide
ugcgauggaaacuugaggg

SEQ ID NO: 2306978 - RNA, 19 nt, Artificial Sequence
  Description of Artificial Sequence: Synthetic oligonucleotide
cauucuuuaggucugaccc

SEQ ID NO: 2306979 - RNA, 19 nt, Artificial Sequence
  Description of Artificial Sequence: Synthetic oligonucleotide
augauauaaauucagagau

SEQ ID NO: 2306980 - RNA, 19 nt, Artificial Sequence
  Description of Artificial Sequence: Synthetic oligonucleotide
uuaguguagaccuuguugc

SEQ ID NO: 2306981 - RNA, 19 nt, Artificial Sequence
  Description of Artificial Sequence: Synthetic oligonucleotide
uucucauuacauuaaacgc

SEQ ID NO: 2306982 - RNA, 19 nt, Artificial Sequence
  Description of Artificial Sequence: Synthetic oligonucleotide
ucucauuacauuaaacgca

SEQ ID NO: 2306983 - RNA, 19 nt, Artificial Sequence
  Description of Artificial Sequence: Synthetic oligonucleotide
aaauaguucacauucuuua

SEQ ID NO: 2306984 - RNA, 19 nt, Artificial Sequence
  Description of Artificial Sequence: Synthetic oligonucleotide
auucagaccagcugaaucg

SEQ ID NO: 2306985 - RNA, 19 nt, Artificial Sequence
  Description of Artificial Sequence: Synthetic oligonucleotide
aaacgcaucuguaauaagg

SEQ ID NO: 2306986 - RNA, 19 nt, Artificial Sequence
  Description of Artificial Sequence: Synthetic oligonucleotide
acuggcuccaucuguaucc

SEQ ID NO: 2306987 - RNA, 19 nt, Artificial Sequence
  Description of Artificial Sequence: Synthetic oligonucleotide
aacagagaaagauggucgg

SEQ ID NO: 2306988 - RNA, 19 nt, Artificial Sequence
  Description of Artificial Sequence: Synthetic oligonucleotide
uggagaaacugacaaauug

SEQ ID NO: 2306989 - RNA, 19 nt, Artificial Sequence
  Description of Artificial Sequence: Synthetic oligonucleotide
uagauaaugggcaggagga

SEQ ID NO: 2306990 - RNA, 19 nt, Artificial Sequence
  Description of Artificial Sequence: Synthetic oligonucleotide
uuacauuaaacgcaucugu

SEQ ID NO: 2306991 - RNA, 19 nt, Artificial Sequence
  Description of Artificial Sequence: Synthetic oligonucleotide
gaguauuucuuaaugggcg

SEQ ID NO: 2306992 - RNA, 19 nt, Artificial Sequence
  Description of Artificial Sequence: Synthetic oligonucleotide
caaauuuccaugugcagcc

SEQ ID NO: 2306993 - RNA, 19 nt, Artificial Sequence
  Description of Artificial Sequence: Synthetic oligonucleotide
ugaaugauauaaauucaga

SEQ ID NO: 2306994 - RNA, 19 nt, Artificial Sequence
  Description of Artificial Sequence: Synthetic oligonucleotide
gaacagagaaagauggucg

SEQ ID NO: 2306995 - RNA, 19 nt, Artificial Sequence
  Description of Artificial Sequence: Synthetic oligonucleotide
aauaaggaggguuugcuua

SEQ ID NO: 2306996 - RNA, 19 nt, Artificial Sequence
  Description of Artificial Sequence: Synthetic oligonucleotide
gagaaauacauggagaaac

SEQ ID NO: 2306997 - RNA, 19 nt, Artificial Sequence
  Description of Artificial Sequence: Synthetic oligonucleotide
uacauggagaaacugacaa

SEQ ID NO: 2306998 - RNA, 19 nt, Artificial Sequence
  Description of Artificial Sequence: Synthetic oligonucleotide
gacagugguacaccgaagg

SEQ ID NO: 2306999 - RNA, 19 nt, Artificial Sequence
  Description of Artificial Sequence: Synthetic oligonucleotide
uaucccgugaguaaggccu

SEQ ID NO: 2307000 - RNA, 19 nt, Artificial Sequence
  Description of Artificial Sequence: Synthetic oligonucleotide
uggucguuaguuuacaugu

SEQ ID NO: 2307001 - RNA, 19 nt, Artificial Sequence
  Description of Artificial Sequence: Synthetic oligonucleotide
uucggaaaugucuuguaag

SEQ ID NO: 2307002 - RNA, 19 nt, Artificial Sequence
  Description of Artificial Sequence: Synthetic oligonucleotide
gagaaagauggucggagcg

SEQ ID NO: 2307003 - RNA, 19 nt, Artificial Sequence
  Description of Artificial Sequence: Synthetic oligonucleotide
aguauuucuuaaugggcgg

SEQ ID NO: 2307004 - RNA, 19 nt, Artificial Sequence
  Description of Artificial Sequence: Synthetic oligonucleotide
aaacugacaaauuggucgu

SEQ ID NO: 2307005 - RNA, 19 nt, Artificial Sequence
  Description of Artificial Sequence: Synthetic oligonucleotide
acauucuuuaggucugacc

SEQ ID NO: 2307006 - RNA, 19 nt, Artificial Sequence
  Description of Artificial Sequence: Synthetic oligonucleotide
uacucugacauucuuuuga

SEQ ID NO: 2307007 - RNA, 19 nt, Artificial Sequence
  Description of Artificial Sequence: Synthetic oligonucleotide
uguugcauccgucauaguc

SEQ ID NO: 2307008 - RNA, 19 nt, Artificial Sequence
  Description of Artificial Sequence: Synthetic oligonucleotide
cuuaguguagaccuuguug

SEQ ID NO: 2307009 - RNA, 19 nt, Artificial Sequence
  Description of Artificial Sequence: Synthetic oligonucleotide
ugaaucgaaauuaaaugua

SEQ ID NO: 2307010 - RNA, 19 nt, Artificial Sequence
  Description of Artificial Sequence: Synthetic oligonucleotide
gugaguaaggccuucuggg

SEQ ID NO: 2307011 - RNA, 19 nt, Artificial Sequence
  Description of Artificial Sequence: Synthetic oligonucleotide
uuucugauauauuuacucu

SEQ ID NO: 2307012 - RNA, 19 nt, Artificial Sequence
  Description of Artificial Sequence: Synthetic oligonucleotide
ugauauauuuacucugaca

SEQ ID NO: 2307013 - RNA, 19 nt, Artificial Sequence
  Description of Artificial Sequence: Synthetic oligonucleotide
agagaaagauggucggagc

SEQ ID NO: 2307014 - RNA, 19 nt, Artificial Sequence
  Description of Artificial Sequence: Synthetic oligonucleotide
gaagucuugaaugauauaa

SEQ ID NO: 2307015 - RNA, 19 nt, Artificial Sequence
  Description of Artificial Sequence: Synthetic oligonucleotide
cuuccuuuggguauccggg

SEQ ID NO: 2307016 - RNA, 19 nt, Artificial Sequence
  Description of Artificial Sequence: Synthetic oligonucleotide
ucguuaguuuacauguucc

SEQ ID NO: 2307017 - RNA, 19 nt, Artificial Sequence
  Description of Artificial Sequence: Synthetic oligonucleotide
aaauuggucguuaguuuac

SEQ ID NO: 2307018 - RNA, 19 nt, Artificial Sequence
  Description of Artificial Sequence: Synthetic oligonucleotide
gaaagggcggguuagagaa

SEQ ID NO: 2307019 - RNA, 19 nt, Artificial Sequence
  Description of Artificial Sequence: Synthetic oligonucleotide
gcugaaucgaaauuaaaug

SEQ ID NO: 2307020 - RNA, 19 nt, Artificial Sequence
  Description of Artificial Sequence: Synthetic oligonucleotide
ugaguaaggccuucugggg

SEQ ID NO: 2307021 - RNA, 19 nt, Artificial Sequence
  Description of Artificial Sequence: Synthetic oligonucleotide
aucgaaauuaaauguacau

SEQ ID NO: 2307022 - RNA, 19 nt, Artificial Sequence
  Description of Artificial Sequence: Synthetic oligonucleotide
auucuuuugagaaauacau

SEQ ID NO: 2307023 - RNA, 19 nt, Artificial Sequence
  Description of Artificial Sequence: Synthetic oligonucleotide
agcgagagaagcuucgguc

SEQ ID NO: 2307024 - RNA, 19 nt, Artificial Sequence
  Description of Artificial Sequence: Synthetic oligonucleotide
ucuguaauaaggaggguuu

SEQ ID NO: 2307025 - RNA, 19 nt, Artificial Sequence
  Description of Artificial Sequence: Synthetic oligonucleotide
uaaugggcgggcuggaggg

SEQ ID NO: 2307026 - RNA, 19 nt, Artificial Sequence
  Description of Artificial Sequence: Synthetic oligonucleotide
gaaucgaaauuaaauguac

SEQ ID NO: 2307027 - RNA, 19 nt, Artificial Sequence
  Description of Artificial Sequence: Synthetic oligonucleotide
aaggcuuugauuccaguua

SEQ ID NO: 2307028 - RNA, 19 nt, Artificial Sequence
  Description of Artificial Sequence: Synthetic oligonucleotide
auucuuuaggucugacccg

SEQ ID NO: 2307029 - RNA, 19 nt, Artificial Sequence
  Description of Artificial Sequence: Synthetic oligonucleotide
uuaaacgcaucuguaauaa

SEQ ID NO: 2307030 - RNA, 19 nt, Artificial Sequence
  Description of Artificial Sequence: Synthetic oligonucleotide
auauggaagucuugaauga

SEQ ID NO: 2307031 - RNA, 19 nt, Artificial Sequence
  Description of Artificial Sequence: Synthetic oligonucleotide
aagauggucggagcgagag

SEQ ID NO: 2307032 - RNA, 19 nt, Artificial Sequence
  Description of Artificial Sequence: Synthetic oligonucleotide
uucaagugcgagcucuuag

SEQ ID NO: 2307033 - RNA, 19 nt, Artificial Sequence
  Description of Artificial Sequence: Synthetic oligonucleotide
auuacauuaaacgcaucug

SEQ ID NO: 2307034 - RNA, 19 nt, Artificial Sequence
  Description of Artificial Sequence: Synthetic oligonucleotide
ucggaaaugucuuguaagu

SEQ ID NO: 2307035 - RNA, 19 nt, Artificial Sequence
  Description of Artificial Sequence: Synthetic oligonucleotide
ugacccgugguaaggaaag

SEQ ID NO: 2307036 - RNA, 19 nt, Artificial Sequence
  Description of Artificial Sequence: Synthetic oligonucleotide
gauucagaccagcugaauc

SEQ ID NO: 2307037 - RNA, 19 nt, Artificial Sequence
  Description of Artificial Sequence: Synthetic oligonucleotide
uucuuaaugggcgggcugg

SEQ ID NO: 2307038 - RNA, 19 nt, Artificial Sequence
  Description of Artificial Sequence: Synthetic oligonucleotide
ucuguaucccgugaguaag

SEQ ID NO: 2307039 - RNA, 19 nt, Artificial Sequence
  Description of Artificial Sequence: Synthetic oligonucleotide
uuggucguuaguuuacaug

SEQ ID NO: 2307040 - RNA, 19 nt, Artificial Sequence
  Description of Artificial Sequence: Synthetic oligonucleotide
ggaaacuugagggaggagg

SEQ ID NO: 2307041 - RNA, 19 nt, Artificial Sequence
  Description of Artificial Sequence: Synthetic oligonucleotide
cuuguugcauccgucauag

SEQ ID NO: 2307042 - RNA, 19 nt, Artificial Sequence
  Description of Artificial Sequence: Synthetic oligonucleotide
agucuugaaugauauaaau

SEQ ID NO: 2307043 - RNA, 19 nt, Artificial Sequence
  Description of Artificial Sequence: Synthetic oligonucleotide
aaucgaaauuaaauguaca

SEQ ID NO: 2307044 - RNA, 19 nt, Artificial Sequence
  Description of Artificial Sequence: Synthetic oligonucleotide
cuuguaaguucaucagacc

SEQ ID NO: 2307045 - RNA, 19 nt, Artificial Sequence
  Description of Artificial Sequence: Synthetic oligonucleotide
cugugugcuuucaagugcg

SEQ ID NO: 2307046 - RNA, 19 nt, Artificial Sequence
  Description of Artificial Sequence: Synthetic oligonucleotide
acauuaaacgcaucuguaa

SEQ ID NO: 2307047 - RNA, 19 nt, Artificial Sequence
  Description of Artificial Sequence: Synthetic oligonucleotide
aagcuucggucacaguccg

SEQ ID NO: 2307048 - RNA, 19 nt, Artificial Sequence
  Description of Artificial Sequence: Synthetic oligonucleotide
gcgaguauuucuuaauggg

SEQ ID NO: 2307049 - RNA, 19 nt, Artificial Sequence
  Description of Artificial Sequence: Synthetic oligonucleotide
ucccaggugcauuuguagg

SEQ ID NO: 2307050 - RNA, 19 nt, Artificial Sequence
  Description of Artificial Sequence: Synthetic oligonucleotide
uugcuuagcauccccagaa

SEQ ID NO: 2307051 - RNA, 19 nt, Artificial Sequence
  Description of Artificial Sequence: Synthetic oligonucleotide
aacgcaucuguaauaagga

SEQ ID NO: 2307052 - RNA, 19 nt, Artificial Sequence
  Description of Artificial Sequence: Synthetic oligonucleotide
uccaucuguaucccgugag

SEQ ID NO: 2307053 - RNA, 19 nt, Artificial Sequence
  Description of Artificial Sequence: Synthetic oligonucleotide
gcaucuguaauaaggaggg

SEQ ID NO: 2307054 - RNA, 19 nt, Artificial Sequence
  Description of Artificial Sequence: Synthetic oligonucleotide
acucugacauucuuuugag

SEQ ID NO: 2307055 - RNA, 19 nt, Artificial Sequence
  Description of Artificial Sequence: Synthetic oligonucleotide
gauggaaacuugagggagg

SEQ ID NO: 2307056 - RNA, 19 nt, Artificial Sequence
  Description of Artificial Sequence: Synthetic oligonucleotide
uaguuuacauguucccuug

SEQ ID NO: 2307057 - RNA, 19 nt, Artificial Sequence
  Description of Artificial Sequence: Synthetic oligonucleotide
uuucggaaaugucuuguaa

SEQ ID NO: 2307058 - RNA, 19 nt, Artificial Sequence
  Description of Artificial Sequence: Synthetic oligonucleotide
uuucuuaaugggcgggcug

SEQ ID NO: 2307059 - RNA, 19 nt, Artificial Sequence
  Description of Artificial Sequence: Synthetic oligonucleotide
acagugguacaccgaaggg

SEQ ID NO: 2307060 - RNA, 19 nt, Artificial Sequence
  Description of Artificial Sequence: Synthetic oligonucleotide
ucaagugcgagcucuuagu

SEQ ID NO: 2307061 - RNA, 19 nt, Artificial Sequence
  Description of Artificial Sequence: Synthetic oligonucleotide
ucgaaauuaaauguacaua

SEQ ID NO: 2307062 - RNA, 19 nt, Artificial Sequence
  Description of Artificial Sequence: Synthetic oligonucleotide
gaagcuucggucacagucc

SEQ ID NO: 2307063 - RNA, 19 nt, Artificial Sequence
  Description of Artificial Sequence: Synthetic oligonucleotide
cauggacagugguacaccg

SEQ ID NO: 2307064 - RNA, 19 nt, Artificial Sequence
  Description of Artificial Sequence: Synthetic oligonucleotide
aagggcggguuagagaauc

SEQ ID NO: 2307065 - RNA, 19 nt, Artificial Sequence
  Description of Artificial Sequence: Synthetic oligonucleotide
agcaaauuuccaugugcag

SEQ ID NO: 2307066 - RNA, 19 nt, Artificial Sequence
  Description of Artificial Sequence: Synthetic oligonucleotide
uugauuccaguuauguuuu

SEQ ID NO: 2307067 - RNA, 19 nt, Artificial Sequence
  Description of Artificial Sequence: Synthetic oligonucleotide
ggcgaguauuucuuaaugg

SEQ ID NO: 2307068 - RNA, 19 nt, Artificial Sequence
  Description of Artificial Sequence: Synthetic oligonucleotide
uggacagugguacaccgaa

SEQ ID NO: 2307069 - RNA, 19 nt, Artificial Sequence
  Description of Artificial Sequence: Synthetic oligonucleotide
uauccggggacuccacagg

SEQ ID NO: 2307070 - RNA, 19 nt, Artificial Sequence
  Description of Artificial Sequence: Synthetic oligonucleotide
guaaguucaucagaccgag

SEQ ID NO: 2307071 - RNA, 19 nt, Artificial Sequence
  Description of Artificial Sequence: Synthetic oligonucleotide
uaaggaaagggcggguuag

SEQ ID NO: 2307072 - RNA, 19 nt, Artificial Sequence
  Description of Artificial Sequence: Synthetic oligonucleotide
gaccgagcaaauuuccaug

SEQ ID NO: 2307073 - RNA, 19 nt, Artificial Sequence
  Description of Artificial Sequence: Synthetic oligonucleotide
gaaagauggucggagcgag

SEQ ID NO: 2307074 - RNA, 19 nt, Artificial Sequence
  Description of Artificial Sequence: Synthetic oligonucleotide
ggaaaugucuuguaaguuc

SEQ ID NO: 2307075 - RNA, 19 nt, Artificial Sequence
  Description of Artificial Sequence: Synthetic oligonucleotide
uguucccuuguucucauua

SEQ ID NO: 2307076 - RNA, 19 nt, Artificial Sequence
  Description of Artificial Sequence: Synthetic oligonucleotide
agaacaggggaugcucucc

SEQ ID NO: 2307077 - RNA, 19 nt, Artificial Sequence
  Description of Artificial Sequence: Synthetic oligonucleotide
uguagaccuuguugcaucc

SEQ ID NO: 2307078 - RNA, 19 nt, Artificial Sequence
  Description of Artificial Sequence: Synthetic oligonucleotide
guucacauucuuuaggucu

SEQ ID NO: 2307079 - RNA, 19 nt, Artificial Sequence
  Description of Artificial Sequence: Synthetic oligonucleotide
agaaacugacaaauugguc

SEQ ID NO: 2307080 - RNA, 19 nt, Artificial Sequence
  Description of Artificial Sequence: Synthetic oligonucleotide
ucuccugugcgauggaaac

SEQ ID NO: 2307081 - RNA, 19 nt, Artificial Sequence
  Description of Artificial Sequence: Synthetic oligonucleotide
aguuagauaaugggcagga

SEQ ID NO: 2307082 - RNA, 19 nt, Artificial Sequence
  Description of Artificial Sequence: Synthetic oligonucleotide
cugaaucgaaauuaaaugu

SEQ ID NO: 2307083 - RNA, 19 nt, Artificial Sequence
  Description of Artificial Sequence: Synthetic oligonucleotide
uauuucuuaaugggcgggc

SEQ ID NO: 2307084 - RNA, 19 nt, Artificial Sequence
  Description of Artificial Sequence: Synthetic oligonucleotide
ucagaacaggggaugcucu

SEQ ID NO: 2307085 - RNA, 19 nt, Artificial Sequence
  Description of Artificial Sequence: Synthetic oligonucleotide
ucauagucgcaucugugua

SEQ ID NO: 2307086 - RNA, 19 nt, Artificial Sequence
  Description of Artificial Sequence: Synthetic oligonucleotide
cacuaugaccgaagggugg

SEQ ID NO: 2307087 - RNA, 19 nt, Artificial Sequence
  Description of Artificial Sequence: Synthetic oligonucleotide
agugcgagcucuuagugua

SEQ ID NO: 2307088 - RNA, 19 nt, Artificial Sequence
  Description of Artificial Sequence: Synthetic oligonucleotide
gugcgauggaaacuugagg

SEQ ID NO: 2307089 - RNA, 19 nt, Artificial Sequence
  Description of Artificial Sequence: Synthetic oligonucleotide
caugucuggacagugcagc

SEQ ID NO: 2307090 - RNA, 19 nt, Artificial Sequence
  Description of Artificial Sequence: Synthetic oligonucleotide
gaguuagauaaugggcagg

SEQ ID NO: 2307091 - RNA, 19 nt, Artificial Sequence
  Description of Artificial Sequence: Synthetic oligonucleotide
ucggucacaguccggacac

SEQ ID NO: 2307092 - RNA, 19 nt, Artificial Sequence
  Description of Artificial Sequence: Synthetic oligonucleotide
auaaugggcaggaggagag

SEQ ID NO: 2307093 - RNA, 19 nt, Artificial Sequence
  Description of Artificial Sequence: Synthetic oligonucleotide
uacaccgaaggguugcgca

SEQ ID NO: 2307094 - RNA, 19 nt, Artificial Sequence
  Description of Artificial Sequence: Synthetic oligonucleotide
guuagagaaucaacuacug

SEQ ID NO: 2307095 - RNA, 19 nt, Artificial Sequence
  Description of Artificial Sequence: Synthetic oligonucleotide
cugacaaauuggucguuag

SEQ ID NO: 2307096 - RNA, 19 nt, Artificial Sequence
  Description of Artificial Sequence: Synthetic oligonucleotide
uucccuuguucucauuaca

SEQ ID NO: 2307097 - RNA, 19 nt, Artificial Sequence
  Description of Artificial Sequence: Synthetic oligonucleotide
agaaggggcgaguauuucu

SEQ ID NO: 2307098 - RNA, 19 nt, Artificial Sequence
  Description of Artificial Sequence: Synthetic oligonucleotide
guauuucuuaaugggcggg

SEQ ID NO: 2307099 - RNA, 19 nt, Artificial Sequence
  Description of Artificial Sequence: Synthetic oligonucleotide
agcugaaucgaaauuaaau

SEQ ID NO: 2307100 - RNA, 19 nt, Artificial Sequence
  Description of Artificial Sequence: Synthetic oligonucleotide
uucuccggauuccaugucu

SEQ ID NO: 2307101 - RNA, 19 nt, Artificial Sequence
  Description of Artificial Sequence: Synthetic oligonucleotide
gaaucaacuacugaccaua

SEQ ID NO: 2307102 - RNA, 19 nt, Artificial Sequence
  Description of Artificial Sequence: Synthetic oligonucleotide
gucuggacagugcagcugc

SEQ ID NO: 2307103 - RNA, 19 nt, Artificial Sequence
  Description of Artificial Sequence: Synthetic oligonucleotide
uugcauccgucauagucgc

SEQ ID NO: 2307104 - RNA, 19 nt, Artificial Sequence
  Description of Artificial Sequence: Synthetic oligonucleotide
aaggaggguuugcuuagca

SEQ ID NO: 2307105 - RNA, 19 nt, Artificial Sequence
  Description of Artificial Sequence: Synthetic oligonucleotide
acaccgaaggguugcgcac

SEQ ID NO: 2307106 - RNA, 19 nt, Artificial Sequence
  Description of Artificial Sequence: Synthetic oligonucleotide
cagagaaagauggucggag

SEQ ID NO: 2307107 - RNA, 19 nt, Artificial Sequence
  Description of Artificial Sequence: Synthetic oligonucleotide
agaaauacauggagaaacu

SEQ ID NO: 2307108 - RNA, 19 nt, Artificial Sequence
  Description of Artificial Sequence: Synthetic oligonucleotide
gauaaugggcaggaggaga

SEQ ID NO: 2307109 - RNA, 19 nt, Artificial Sequence
  Description of Artificial Sequence: Synthetic oligonucleotide
guauccuccgcuuccuuug

SEQ ID NO: 2307110 - RNA, 19 nt, Artificial Sequence
  Description of Artificial Sequence: Synthetic oligonucleotide
acgcaucuguaauaaggag

SEQ ID NO: 2307111 - RNA, 19 nt, Artificial Sequence
  Description of Artificial Sequence: Synthetic oligonucleotide
ucuccggauuccaugucug

SEQ ID NO: 2307112 - RNA, 19 nt, Artificial Sequence
  Description of Artificial Sequence: Synthetic oligonucleotide
agggagaacugccagcaga

SEQ ID NO: 2307113 - RNA, 19 nt, Artificial Sequence
  Description of Artificial Sequence: Synthetic oligonucleotide
auauauuuacucugacauu

SEQ ID NO: 2307114 - RNA, 19 nt, Artificial Sequence
  Description of Artificial Sequence: Synthetic oligonucleotide
aauuggucguuaguuuaca

SEQ ID NO: 2307115 - RNA, 19 nt, Artificial Sequence
  Description of Artificial Sequence: Synthetic oligonucleotide
guauccggggacuccacag

SEQ ID NO: 2307116 - RNA, 19 nt, Artificial Sequence
  Description of Artificial Sequence: Synthetic oligonucleotide
uauccuccgcuuccuuugg

SEQ ID NO: 2307117 - RNA, 19 nt, Artificial Sequence
  Description of Artificial Sequence: Synthetic oligonucleotide
agggugguucuccggauuc

SEQ ID NO: 2307118 - RNA, 19 nt, Artificial Sequence
  Description of Artificial Sequence: Synthetic oligonucleotide
cauuacauuaaacgcaucu

SEQ ID NO: 2307119 - RNA, 19 nt, Artificial Sequence
  Description of Artificial Sequence: Synthetic oligonucleotide
ucccuuguucucauuacau

SEQ ID NO: 2307120 - RNA, 19 nt, Artificial Sequence
  Description of Artificial Sequence: Synthetic oligonucleotide
accgagcaaauuuccaugu

SEQ ID NO: 2307121 - RNA, 19 nt, Artificial Sequence
  Description of Artificial Sequence: Synthetic oligonucleotide
gcaaauuuccaugugcagc

SEQ ID NO: 2307122 - RNA, 19 nt, Artificial Sequence
  Description of Artificial Sequence: Synthetic oligonucleotide
gucguuaguuuacauguuc

SEQ ID NO: 2307123 - RNA, 19 nt, Artificial Sequence
  Description of Artificial Sequence: Synthetic oligonucleotide
uuacucugacauucuuuug

SEQ ID NO: 2307124 - RNA, 19 nt, Artificial Sequence
  Description of Artificial Sequence: Synthetic oligonucleotide
ugaccauauggaagucuug

SEQ ID NO: 2307125 - RNA, 19 nt, Artificial Sequence
  Description of Artificial Sequence: Synthetic oligonucleotide
uaauaaggaggguuugcuu

SEQ ID NO: 2307126 - RNA, 19 nt, Artificial Sequence
  Description of Artificial Sequence: Synthetic oligonucleotide
aggguugcgcaccaggaga

SEQ ID NO: 2307127 - RNA, 19 nt, Artificial Sequence
  Description of Artificial Sequence: Synthetic oligonucleotide
ucgcaucuguguauccucc

SEQ ID NO: 2307128 - RNA, 19 nt, Artificial Sequence
  Description of Artificial Sequence: Synthetic oligonucleotide
uguaucccgugaguaaggc

SEQ ID NO: 2307129 - RNA, 19 nt, Artificial Sequence
  Description of Artificial Sequence: Synthetic oligonucleotide
gauggucggagcgagagaa

SEQ ID NO: 2307130 - RNA, 19 nt, Artificial Sequence
  Description of Artificial Sequence: Synthetic oligonucleotide
cuguguauccuccgcuucc

SEQ ID NO: 2307131 - RNA, 19 nt, Artificial Sequence
  Description of Artificial Sequence: Synthetic oligonucleotide
uaguguagaccuuguugca

SEQ ID NO: 2307132 - RNA, 19 nt, Artificial Sequence
  Description of Artificial Sequence: Synthetic oligonucleotide
ucuguguauccuccgcuuc

SEQ ID NO: 2307133 - RNA, 19 nt, Artificial Sequence
  Description of Artificial Sequence: Synthetic oligonucleotide
uuaggucugacccguggua

SEQ ID NO: 2307134 - RNA, 19 nt, Artificial Sequence
  Description of Artificial Sequence: Synthetic oligonucleotide
uuuucggaaaugucuugua

SEQ ID NO: 2307135 - RNA, 19 nt, Artificial Sequence
  Description of Artificial Sequence: Synthetic oligonucleotide
agaccagcugaaucgaaau

SEQ ID NO: 2307136 - RNA, 19 nt, Artificial Sequence
  Description of Artificial Sequence: Synthetic oligonucleotide
cuguaucccgugaguaagg

SEQ ID NO: 2307137 - RNA, 19 nt, Artificial Sequence
  Description of Artificial Sequence: Synthetic oligonucleotide
agaaucaacuacugaccau

SEQ ID NO: 2307138 - RNA, 19 nt, Artificial Sequence
  Description of Artificial Sequence: Synthetic oligonucleotide
caagugcgagcucuuagug

SEQ ID NO: 2307139 - RNA, 19 nt, Artificial Sequence
  Description of Artificial Sequence: Synthetic oligonucleotide
caaauuggucguuaguuua

SEQ ID NO: 2307140 - RNA, 19 nt, Artificial Sequence
  Description of Artificial Sequence: Synthetic oligonucleotide
uccuuuggguauccgggga

SEQ ID NO: 2307141 - RNA, 19 nt, Artificial Sequence
  Description of Artificial Sequence: Synthetic oligonucleotide
uggucggagcgagagaagc

SEQ ID NO: 2307142 - RNA, 19 nt, Artificial Sequence
  Description of Artificial Sequence: Synthetic oligonucleotide
gugguaaggaaagggcggg

SEQ ID NO: 2307143 - RNA, 19 nt, Artificial Sequence
  Description of Artificial Sequence: Synthetic oligonucleotide
aucaacuacugaccauaug

SEQ ID NO: 2307144 - RNA, 19 nt, Artificial Sequence
  Description of Artificial Sequence: Synthetic oligonucleotide
ggaggguuugcuuagcauc

SEQ ID NO: 2307145 - RNA, 19 nt, Artificial Sequence
  Description of Artificial Sequence: Synthetic oligonucleotide
uggauacuguauuucugau

SEQ ID NO: 2307146 - RNA, 19 nt, Artificial Sequence
  Description of Artificial Sequence: Synthetic oligonucleotide
gaccuuguugcauccguca

SEQ ID NO: 2307147 - RNA, 19 nt, Artificial Sequence
  Description of Artificial Sequence: Synthetic oligonucleotide
uauggaagucuugaaugau

SEQ ID NO: 2307148 - RNA, 19 nt, Artificial Sequence
  Description of Artificial Sequence: Synthetic oligonucleotide
acccgugguaaggaaaggg

SEQ ID NO: 2307149 - RNA, 19 nt, Artificial Sequence
  Description of Artificial Sequence: Synthetic oligonucleotide
cugcacuaugaccgaaggg

SEQ ID NO: 2307150 - RNA, 19 nt, Artificial Sequence
  Description of Artificial Sequence: Synthetic oligonucleotide
aucuguaucccgugaguaa

SEQ ID NO: 2307151 - RNA, 19 nt, Artificial Sequence
  Description of Artificial Sequence: Synthetic oligonucleotide
aacaggggaugcucuccug

SEQ ID NO: 2307152 - RNA, 19 nt, Artificial Sequence
  Description of Artificial Sequence: Synthetic oligonucleotide
cgaguauuucuuaaugggc

SEQ ID NO: 2307153 - RNA, 19 nt, Artificial Sequence
  Description of Artificial Sequence: Synthetic oligonucleotide
agaacugccagcagagggu

SEQ ID NO: 2307154 - RNA, 19 nt, Artificial Sequence
  Description of Artificial Sequence: Synthetic oligonucleotide
acauguucccuuguucuca

SEQ ID NO: 2307155 - RNA, 19 nt, Artificial Sequence
  Description of Artificial Sequence: Synthetic oligonucleotide
guguagaccuuguugcauc

SEQ ID NO: 2307156 - RNA, 19 nt, Artificial Sequence
  Description of Artificial Sequence: Synthetic oligonucleotide
ucuuaguguagaccuuguu

SEQ ID NO: 2307157 - RNA, 19 nt, Artificial Sequence
  Description of Artificial Sequence: Synthetic oligonucleotide
gacuccacagguagaggcc

SEQ ID NO: 2307158 - RNA, 19 nt, Artificial Sequence
  Description of Artificial Sequence: Synthetic oligonucleotide
guucccuuguucucauuac

SEQ ID NO: 2307159 - RNA, 19 nt, Artificial Sequence
  Description of Artificial Sequence: Synthetic oligonucleotide
aguaaggccuucugggguu

SEQ ID NO: 2307160 - RNA, 19 nt, Artificial Sequence
  Description of Artificial Sequence: Synthetic oligonucleotide
acaguccggacacuggaaa

SEQ ID NO: 2307161 - RNA, 19 nt, Artificial Sequence
  Description of Artificial Sequence: Synthetic oligonucleotide
uguauccuccgcuuccuuu

SEQ ID NO: 2307162 - RNA, 19 nt, Artificial Sequence
  Description of Artificial Sequence: Synthetic oligonucleotide
gcugcacuaugaccgaagg

SEQ ID NO: 2307163 - RNA, 19 nt, Artificial Sequence
  Description of Artificial Sequence: Synthetic oligonucleotide
aguuuacauguucccuugu

SEQ ID NO: 2307164 - RNA, 19 nt, Artificial Sequence
  Description of Artificial Sequence: Synthetic oligonucleotide
cucauuacauuaaacgcau

SEQ ID NO: 2307165 - RNA, 19 nt, Artificial Sequence
  Description of Artificial Sequence: Synthetic oligonucleotide
gaugcucuccugugcgaug

SEQ ID NO: 2307166 - RNA, 19 nt, Artificial Sequence
  Description of Artificial Sequence: Synthetic oligonucleotide
auuucuuaaugggcgggcu

SEQ ID NO: 2307167 - RNA, 19 nt, Artificial Sequence
  Description of Artificial Sequence: Synthetic oligonucleotide
agugguacaccgaaggguu

SEQ ID NO: 2307168 - RNA, 19 nt, Artificial Sequence
  Description of Artificial Sequence: Synthetic oligonucleotide
guaucccgugaguaaggcc

SEQ ID NO: 2307169 - RNA, 19 nt, Artificial Sequence
  Description of Artificial Sequence: Synthetic oligonucleotide
ccgugguaaggaaagggcg

SEQ ID NO: 2307170 - RNA, 19 nt, Artificial Sequence
  Description of Artificial Sequence: Synthetic oligonucleotide
uaugaccgaagggugguuc

SEQ ID NO: 2307171 - RNA, 19 nt, Artificial Sequence
  Description of Artificial Sequence: Synthetic oligonucleotide
uccugugcgauggaaacuu

SEQ ID NO: 2307172 - RNA, 19 nt, Artificial Sequence
  Description of Artificial Sequence: Synthetic oligonucleotide
ggggaugcucuccugugcg

SEQ ID NO: 2307173 - RNA, 19 nt, Artificial Sequence
  Description of Artificial Sequence: Synthetic oligonucleotide
augaccgaagggugguucu

SEQ ID NO: 2307174 - RNA, 19 nt, Artificial Sequence
  Description of Artificial Sequence: Synthetic oligonucleotide
guuagauaaugggcaggag

SEQ ID NO: 2307175 - RNA, 19 nt, Artificial Sequence
  Description of Artificial Sequence: Synthetic oligonucleotide
aggucugacccgugguaag

SEQ ID NO: 2307176 - RNA, 19 nt, Artificial Sequence
  Description of Artificial Sequence: Synthetic oligonucleotide
auauuuacucugacauucu

SEQ ID NO: 2307177 - RNA, 19 nt, Artificial Sequence
  Description of Artificial Sequence: Synthetic oligonucleotide
uccgucauagucgcaucug

SEQ ID NO: 2307178 - RNA, 19 nt, Artificial Sequence
  Description of Artificial Sequence: Synthetic oligonucleotide
auggaaacuugagggagga

SEQ ID NO: 2307179 - RNA, 19 nt, Artificial Sequence
  Description of Artificial Sequence: Synthetic oligonucleotide
aggaaagggcggguuagag

SEQ ID NO: 2307180 - RNA, 19 nt, Artificial Sequence
  Description of Artificial Sequence: Synthetic oligonucleotide
ugcuuagcauccccagaaa

SEQ ID NO: 2307181 - RNA, 19 nt, Artificial Sequence
  Description of Artificial Sequence: Synthetic oligonucleotide
auccgucauagucgcaucu

SEQ ID NO: 2307182 - RNA, 19 nt, Artificial Sequence
  Description of Artificial Sequence: Synthetic oligonucleotide
acugaccauauggaagucu

SEQ ID NO: 2307183 - RNA, 19 nt, Artificial Sequence
  Description of Artificial Sequence: Synthetic oligonucleotide
ggauuccaugucuggacag

SEQ ID NO: 2307184 - RNA, 19 nt, Artificial Sequence
  Description of Artificial Sequence: Synthetic oligonucleotide
cuguaauaaggaggguuug

SEQ ID NO: 2307185 - RNA, 19 nt, Artificial Sequence
  Description of Artificial Sequence: Synthetic oligonucleotide
cauuaaacgcaucuguaau

SEQ ID NO: 2307186 - RNA, 19 nt, Artificial Sequence
  Description of Artificial Sequence: Synthetic oligonucleotide
uccuccgcuuccuuugggu

SEQ ID NO: 2307187 - RNA, 19 nt, Artificial Sequence
  Description of Artificial Sequence: Synthetic oligonucleotide
uguguauccuccgcuuccu

SEQ ID NO: 2307188 - RNA, 19 nt, Artificial Sequence
  Description of Artificial Sequence: Synthetic oligonucleotide
guuaguuuacauguucccu

SEQ ID NO: 2307189 - RNA, 19 nt, Artificial Sequence
  Description of Artificial Sequence: Synthetic oligonucleotide
cauggagaaacugacaaau

SEQ ID NO: 2307190 - RNA, 19 nt, Artificial Sequence
  Description of Artificial Sequence: Synthetic oligonucleotide
gggcgaguauuucuuaaug

SEQ ID NO: 2307191 - RNA, 19 nt, Artificial Sequence
  Description of Artificial Sequence: Synthetic oligonucleotide
gucgcaucuguguauccuc

SEQ ID NO: 2307192 - RNA, 19 nt, Artificial Sequence
  Description of Artificial Sequence: Synthetic oligonucleotide
ucagaccagcugaaucgaa

SEQ ID NO: 2307193 - RNA, 19 nt, Artificial Sequence
  Description of Artificial Sequence: Synthetic oligonucleotide
uaggucugacccgugguaa

SEQ ID NO: 2307194 - RNA, 19 nt, Artificial Sequence
  Description of Artificial Sequence: Synthetic oligonucleotide
aguguagaccuuguugcau

SEQ ID NO: 2307195 - RNA, 19 nt, Artificial Sequence
  Description of Artificial Sequence: Synthetic oligonucleotide
gucacaguccggacacugg

SEQ ID NO: 2307196 - RNA, 19 nt, Artificial Sequence
  Description of Artificial Sequence: Synthetic oligonucleotide
aucuguguauccuccgcuu

SEQ ID NO: 2307197 - RNA, 19 nt, Artificial Sequence
  Description of Artificial Sequence: Synthetic oligonucleotide
gguggcaugcucagaacag

SEQ ID NO: 2307198 - RNA, 19 nt, Artificial Sequence
  Description of Artificial Sequence: Synthetic oligonucleotide
gaguaaggccuucuggggu

SEQ ID NO: 2307199 - RNA, 19 nt, Artificial Sequence
  Description of Artificial Sequence: Synthetic oligonucleotide
ucggagcgagagaagcuuc

SEQ ID NO: 2307200 - RNA, 19 nt, Artificial Sequence
  Description of Artificial Sequence: Synthetic oligonucleotide
agucgcaucuguguauccu

SEQ ID NO: 2307201 - RNA, 19 nt, Artificial Sequence
  Description of Artificial Sequence: Synthetic oligonucleotide
acagagaaagauggucgga

SEQ ID NO: 2307202 - RNA, 19 nt, Artificial Sequence
  Description of Artificial Sequence: Synthetic oligonucleotide
agaccuuguugcauccguc

SEQ ID NO: 2307203 - RNA, 19 nt, Artificial Sequence
  Description of Artificial Sequence: Synthetic oligonucleotide
gcaugcucagaacagggga

SEQ ID NO: 2307204 - RNA, 19 nt, Artificial Sequence
  Description of Artificial Sequence: Synthetic oligonucleotide
auccggggacuccacaggu

SEQ ID NO: 2307205 - RNA, 19 nt, Artificial Sequence
  Description of Artificial Sequence: Synthetic oligonucleotide
cuucccaggcugcacuaug

SEQ ID NO: 2307206 - RNA, 19 nt, Artificial Sequence
  Description of Artificial Sequence: Synthetic oligonucleotide
cccgugguaaggaaagggc

SEQ ID NO: 2307207 - RNA, 19 nt, Artificial Sequence
  Description of Artificial Sequence: Synthetic oligonucleotide
aaggaaagggcggguuaga

SEQ ID NO: 2307208 - RNA, 19 nt, Artificial Sequence
  Description of Artificial Sequence: Synthetic oligonucleotide
guagaccuuguugcauccg

SEQ ID NO: 2307209 - RNA, 19 nt, Artificial Sequence
  Description of Artificial Sequence: Synthetic oligonucleotide
uggguauccggggacucca

SEQ ID NO: 2307210 - RNA, 19 nt, Artificial Sequence
  Description of Artificial Sequence: Synthetic oligonucleotide
gaccgaagggugguucucc

SEQ ID NO: 2307211 - RNA, 19 nt, Artificial Sequence
  Description of Artificial Sequence: Synthetic oligonucleotide
gguuagagaaucaacuacu

SEQ ID NO: 2307212 - RNA, 19 nt, Artificial Sequence
  Description of Artificial Sequence: Synthetic oligonucleotide
gugagcuccgcuuguucac

SEQ ID NO: 2307213 - RNA, 19 nt, Artificial Sequence
  Description of Artificial Sequence: Synthetic oligonucleotide
uuggguauccggggacucc

SEQ ID NO: 2307214 - RNA, 19 nt, Artificial Sequence
  Description of Artificial Sequence: Synthetic oligonucleotide
aaggggcgaguauuucuua

SEQ ID NO: 2307215 - RNA, 19 nt, Artificial Sequence
  Description of Artificial Sequence: Synthetic oligonucleotide
uagucgcaucuguguaucc

SEQ ID NO: 2307216 - RNA, 19 nt, Artificial Sequence
  Description of Artificial Sequence: Synthetic oligonucleotide
aggagaaggggcgaguauu

SEQ ID NO: 2307217 - RNA, 19 nt, Artificial Sequence
  Description of Artificial Sequence: Synthetic oligonucleotide
acugacaaauuggucguua

SEQ ID NO: 2307218 - RNA, 19 nt, Artificial Sequence
  Description of Artificial Sequence: Synthetic oligonucleotide
ugagcuccgcuuguucaca

SEQ ID NO: 2307219 - RNA, 19 nt, Artificial Sequence
  Description of Artificial Sequence: Synthetic oligonucleotide
aggggcgaguauuucuuaa

SEQ ID NO: 2307220 - RNA, 19 nt, Artificial Sequence
  Description of Artificial Sequence: Synthetic oligonucleotide
cgugaguaaggccuucugg

SEQ ID NO: 2307221 - RNA, 19 nt, Artificial Sequence
  Description of Artificial Sequence: Synthetic oligonucleotide
accuuguugcauccgucau

SEQ ID NO: 2307222 - RNA, 19 nt, Artificial Sequence
  Description of Artificial Sequence: Synthetic oligonucleotide
cagaacaggggaugcucuc

SEQ ID NO: 2307223 - RNA, 19 nt, Artificial Sequence
  Description of Artificial Sequence: Synthetic oligonucleotide
uggugagcuccgcuuguuc

SEQ ID NO: 2307224 - RNA, 19 nt, Artificial Sequence
  Description of Artificial Sequence: Synthetic oligonucleotide
ucuuaaugggcgggcugga

SEQ ID NO: 2307225 - RNA, 19 nt, Artificial Sequence
  Description of Artificial Sequence: Synthetic oligonucleotide
cuuaaugggcgggcuggag

SEQ ID NO: 2307226 - RNA, 19 nt, Artificial Sequence
  Description of Artificial Sequence: Synthetic oligonucleotide
ggugagcuccgcuuguuca

SEQ ID NO: 2307227 - RNA, 19 nt, Artificial Sequence
  Description of Artificial Sequence: Synthetic oligonucleotide
ugcgagcucuuaguguaga

SEQ ID NO: 2307228 - RNA, 19 nt, Artificial Sequence
  Description of Artificial Sequence: Synthetic oligonucleotide
auccuccgcuuccuuuggg

SEQ ID NO: 2307229 - RNA, 19 nt, Artificial Sequence
  Description of Artificial Sequence: Synthetic oligonucleotide
cugugcgauggaaacuuga

SEQ ID NO: 2307230 - RNA, 19 nt, Artificial Sequence
  Description of Artificial Sequence: Synthetic oligonucleotide
gcgagagaagcuucgguca

SEQ ID NO: 2307231 - RNA, 19 nt, Artificial Sequence
  Description of Artificial Sequence: Synthetic oligonucleotide
uuuggguauccggggacuc

SEQ ID NO: 2307232 - RNA, 19 nt, Artificial Sequence
  Description of Artificial Sequence: Synthetic oligonucleotide
ccuuguucucauuacauua

SEQ ID NO: 2307233 - RNA, 19 nt, Artificial Sequence
  Description of Artificial Sequence: Synthetic oligonucleotide
gacccgugguaaggaaagg

SEQ ID NO: 2307234 - RNA, 19 nt, Artificial Sequence
  Description of Artificial Sequence: Synthetic oligonucleotide
guccggacacuggaaaggc

SEQ ID NO: 2307235 - RNA, 19 nt, Artificial Sequence
  Description of Artificial Sequence: Synthetic oligonucleotide
agauggucggagcgagaga

SEQ ID NO: 2307236 - RNA, 19 nt, Artificial Sequence
  Description of Artificial Sequence: Synthetic oligonucleotide
gcaucuguguauccuccgc

SEQ ID NO: 2307237 - RNA, 19 nt, Artificial Sequence
  Description of Artificial Sequence: Synthetic oligonucleotide
caucagaccgagcaaauuu

SEQ ID NO: 2307238 - RNA, 19 nt, Artificial Sequence
  Description of Artificial Sequence: Synthetic oligonucleotide
cacagguagaggccucuuc

SEQ ID NO: 2307239 - RNA, 19 nt, Artificial Sequence
  Description of Artificial Sequence: Synthetic oligonucleotide
gccaucacugguggcaugg

SEQ ID NO: 2307240 - RNA, 19 nt, Artificial Sequence
  Description of Artificial Sequence: Synthetic oligonucleotide
gcucuuaguguagaccuug

SEQ ID NO: 2307241 - RNA, 19 nt, Artificial Sequence
  Description of Artificial Sequence: Synthetic oligonucleotide
ggaaagggcggguuagaga

SEQ ID NO: 2307242 - RNA, 19 nt, Artificial Sequence
  Description of Artificial Sequence: Synthetic oligonucleotide
cauccgucauagucgcauc

SEQ ID NO: 2307243 - RNA, 19 nt, Artificial Sequence
  Description of Artificial Sequence: Synthetic oligonucleotide
cagaccagcugaaucgaaa

SEQ ID NO: 2307244 - RNA, 19 nt, Artificial Sequence
  Description of Artificial Sequence: Synthetic oligonucleotide
cucugacauucuuuugaga

SEQ ID NO: 2307245 - RNA, 19 nt, Artificial Sequence
  Description of Artificial Sequence: Synthetic oligonucleotide
uggcauggacagugguaca

SEQ ID NO: 2307246 - RNA, 19 nt, Artificial Sequence
  Description of Artificial Sequence: Synthetic oligonucleotide
gagauucagaccagcugaa

SEQ ID NO: 2307247 - RNA, 19 nt, Artificial Sequence
  Description of Artificial Sequence: Synthetic oligonucleotide
cuucggucacaguccggac

SEQ ID NO: 2307248 - RNA, 19 nt, Artificial Sequence
  Description of Artificial Sequence: Synthetic oligonucleotide
agaggccucuucccaggcu

SEQ ID NO: 2307249 - RNA, 19 nt, Artificial Sequence
  Description of Artificial Sequence: Synthetic oligonucleotide
caccgaaggguugcgcacc

SEQ ID NO: 2307250 - RNA, 19 nt, Artificial Sequence
  Description of Artificial Sequence: Synthetic oligonucleotide
auacuguauuucugauaua

SEQ ID NO: 2307251 - RNA, 19 nt, Artificial Sequence
  Description of Artificial Sequence: Synthetic oligonucleotide
uccgcuuccuuuggguauc

SEQ ID NO: 2307252 - RNA, 19 nt, Artificial Sequence
  Description of Artificial Sequence: Synthetic oligonucleotide
ccggauuccaugucuggac

SEQ ID NO: 2307253 - RNA, 19 nt, Artificial Sequence
  Description of Artificial Sequence: Synthetic oligonucleotide
gagaaggggcgaguauuuc

SEQ ID NO: 2307254 - RNA, 19 nt, Artificial Sequence
  Description of Artificial Sequence: Synthetic oligonucleotide
aacugacaaauuggucguu

SEQ ID NO: 2307255 - RNA, 19 nt, Artificial Sequence
  Description of Artificial Sequence: Synthetic oligonucleotide
ggagcgagagaagcuucgg

SEQ ID NO: 2307256 - RNA, 19 nt, Artificial Sequence
  Description of Artificial Sequence: Synthetic oligonucleotide
gcgauggaaacuugaggga

SEQ ID NO: 2307257 - RNA, 19 nt, Artificial Sequence
  Description of Artificial Sequence: Synthetic oligonucleotide
cugaccauauggaagucuu

SEQ ID NO: 2307258 - RNA, 19 nt, Artificial Sequence
  Description of Artificial Sequence: Synthetic oligonucleotide
cuucugggguuugaaagaa

SEQ ID NO: 2307259 - RNA, 19 nt, Artificial Sequence
  Description of Artificial Sequence: Synthetic oligonucleotide
gauuccaugucuggacagu

SEQ ID NO: 2307260 - RNA, 19 nt, Artificial Sequence
  Description of Artificial Sequence: Synthetic oligonucleotide
guuuacauguucccuuguu

SEQ ID NO: 2307261 - RNA, 19 nt, Artificial Sequence
  Description of Artificial Sequence: Synthetic oligonucleotide
gcacuaugaccgaagggug

SEQ ID NO: 2307262 - RNA, 19 nt, Artificial Sequence
  Description of Artificial Sequence: Synthetic oligonucleotide
gguacaccgaaggguugcg

SEQ ID NO: 2307263 - RNA, 19 nt, Artificial Sequence
  Description of Artificial Sequence: Synthetic oligonucleotide
agauucagaccagcugaau

SEQ ID NO: 2307264 - RNA, 19 nt, Artificial Sequence
  Description of Artificial Sequence: Synthetic oligonucleotide
ggcauggacagugguacac

SEQ ID NO: 2307265 - RNA, 19 nt, Artificial Sequence
  Description of Artificial Sequence: Synthetic oligonucleotide
caucuguaucccgugagua

SEQ ID NO: 2307266 - RNA, 19 nt, Artificial Sequence
  Description of Artificial Sequence: Synthetic oligonucleotide
gguucuccggauuccaugu

SEQ ID NO: 2307267 - RNA, 19 nt, Artificial Sequence
  Description of Artificial Sequence: Synthetic oligonucleotide
auggagaaacugacaaauu

SEQ ID NO: 2307268 - RNA, 19 nt, Artificial Sequence
  Description of Artificial Sequence: Synthetic oligonucleotide
gagcgagagaagcuucggu

SEQ ID NO: 2307269 - RNA, 19 nt, Artificial Sequence
  Description of Artificial Sequence: Synthetic oligonucleotide
cgaaggguugcgcaccagg

SEQ ID NO: 2307270 - RNA, 19 nt, Artificial Sequence
  Description of Artificial Sequence: Synthetic oligonucleotide
uccggggacuccacaggua

SEQ ID NO: 2307271 - RNA, 19 nt, Artificial Sequence
  Description of Artificial Sequence: Synthetic oligonucleotide
cagcugaaucgaaauuaaa

SEQ ID NO: 2307272 - RNA, 19 nt, Artificial Sequence
  Description of Artificial Sequence: Synthetic oligonucleotide
guacaccgaaggguugcgc

SEQ ID NO: 2307273 - RNA, 19 nt, Artificial Sequence
  Description of Artificial Sequence: Synthetic oligonucleotide
ugaccgaagggugguucuc

SEQ ID NO: 2307274 - RNA, 19 nt, Artificial Sequence
  Description of Artificial Sequence: Synthetic oligonucleotide
guucuccggauuccauguc

SEQ ID NO: 2307275 - RNA, 19 nt, Artificial Sequence
  Description of Artificial Sequence: Synthetic oligonucleotide
cuugagggaggagggagaa

SEQ ID NO: 2307276 - RNA, 19 nt, Artificial Sequence
  Description of Artificial Sequence: Synthetic oligonucleotide
caucuguguauccuccgcu

SEQ ID NO: 2307277 - RNA, 19 nt, Artificial Sequence
  Description of Artificial Sequence: Synthetic oligonucleotide
gcauggacagugguacacc

SEQ ID NO: 2307278 - RNA, 19 nt, Artificial Sequence
  Description of Artificial Sequence: Synthetic oligonucleotide
gguuugcuuagcaucccca

SEQ ID NO: 2307279 - RNA, 19 nt, Artificial Sequence
  Description of Artificial Sequence: Synthetic oligonucleotide
auggacagugguacaccga

SEQ ID NO: 2307280 - RNA, 19 nt, Artificial Sequence
  Description of Artificial Sequence: Synthetic oligonucleotide
ggcggguuagagaaucaac

SEQ ID NO: 2307281 - RNA, 19 nt, Artificial Sequence
  Description of Artificial Sequence: Synthetic oligonucleotide
gaaggggcgaguauuucuu

SEQ ID NO: 2307282 - RNA, 19 nt, Artificial Sequence
  Description of Artificial Sequence: Synthetic oligonucleotide
ucuucccaggcugcacuau

SEQ ID NO: 2307283 - RNA, 19 nt, Artificial Sequence
  Description of Artificial Sequence: Synthetic oligonucleotide
aaagggcggguuagagaau

SEQ ID NO: 2307284 - RNA, 19 nt, Artificial Sequence
  Description of Artificial Sequence: Synthetic oligonucleotide
cgagcucuuaguguagacc

SEQ ID NO: 2307285 - RNA, 19 nt, Artificial Sequence
  Description of Artificial Sequence: Synthetic oligonucleotide
ccuuuggguauccggggac

SEQ ID NO: 2307286 - RNA, 19 nt, Artificial Sequence
  Description of Artificial Sequence: Synthetic oligonucleotide
gcggguuagagaaucaacu

SEQ ID NO: 2307287 - RNA, 19 nt, Artificial Sequence
  Description of Artificial Sequence: Synthetic oligonucleotide
gugguacaccgaaggguug

SEQ ID NO: 2307288 - RNA, 19 nt, Artificial Sequence
  Description of Artificial Sequence: Synthetic oligonucleotide
uuguugcauccgucauagu

SEQ ID NO: 2307289 - RNA, 19 nt, Artificial Sequence
  Description of Artificial Sequence: Synthetic oligonucleotide
gaccagcugaaucgaaauu

SEQ ID NO: 2307290 - RNA, 19 nt, Artificial Sequence
  Description of Artificial Sequence: Synthetic oligonucleotide
cgucauagucgcaucugug

SEQ ID NO: 2307291 - RNA, 19 nt, Artificial Sequence
  Description of Artificial Sequence: Synthetic oligonucleotide
gaagggugguucuccggau

SEQ ID NO: 2307292 - RNA, 19 nt, Artificial Sequence
  Description of Artificial Sequence: Synthetic oligonucleotide
cacaguccggacacuggaa

SEQ ID NO: 2307293 - RNA, 19 nt, Artificial Sequence
  Description of Artificial Sequence: Synthetic oligonucleotide
gugcgagcucuuaguguag

SEQ ID NO: 2307294 - RNA, 19 nt, Artificial Sequence
  Description of Artificial Sequence: Synthetic oligonucleotide
gguauccggggacuccaca

SEQ ID NO: 2307295 - RNA, 19 nt, Artificial Sequence
  Description of Artificial Sequence: Synthetic oligonucleotide
cggagcgagagaagcuucg

SEQ ID NO: 2307296 - RNA, 19 nt, Artificial Sequence
  Description of Artificial Sequence: Synthetic oligonucleotide
cucuuaguguagaccuugu

SEQ ID NO: 2307297 - RNA, 19 nt, Artificial Sequence
  Description of Artificial Sequence: Synthetic oligonucleotide
caggcugcacuaugaccga

SEQ ID NO: 2307298 - RNA, 19 nt, Artificial Sequence
  Description of Artificial Sequence: Synthetic oligonucleotide
ccgcuuguucacagugagg

SEQ ID NO: 2307299 - RNA, 19 nt, Artificial Sequence
  Description of Artificial Sequence: Synthetic oligonucleotide
gaggguggugagcuccgcu

SEQ ID NO: 2307300 - RNA, 19 nt, Artificial Sequence
  Description of Artificial Sequence: Synthetic oligonucleotide
aggugcauuuguagggcuu

SEQ ID NO: 2307301 - RNA, 19 nt, Artificial Sequence
  Description of Artificial Sequence: Synthetic oligonucleotide
ggugguucuccggauucca

SEQ ID NO: 2307302 - RNA, 19 nt, Artificial Sequence
  Description of Artificial Sequence: Synthetic oligonucleotide
gcgagcucuuaguguagac

SEQ ID NO: 2307303 - RNA, 19 nt, Artificial Sequence
  Description of Artificial Sequence: Synthetic oligonucleotide
cuggacagugcagcugcca

SEQ ID NO: 2307304 - RNA, 19 nt, Artificial Sequence
  Description of Artificial Sequence: Synthetic oligonucleotide
agcucuuaguguagaccuu

SEQ ID NO: 2307305 - RNA, 19 nt, Artificial Sequence
  Description of Artificial Sequence: Synthetic oligonucleotide
cuuuggguauccggggacu

SEQ ID NO: 2307306 - RNA, 19 nt, Artificial Sequence
  Description of Artificial Sequence: Synthetic oligonucleotide
cauguucccuuguucucau

SEQ ID NO: 2307307 - RNA, 19 nt, Artificial Sequence
  Description of Artificial Sequence: Synthetic oligonucleotide
gguugcgcaccaggagaag

SEQ ID NO: 2307308 - RNA, 19 nt, Artificial Sequence
  Description of Artificial Sequence: Synthetic oligonucleotide
ccugugcgauggaaacuug

SEQ ID NO: 2307309 - RNA, 19 nt, Artificial Sequence
  Description of Artificial Sequence: Synthetic oligonucleotide
caggugcauuuguagggcu

SEQ ID NO: 2307310 - RNA, 19 nt, Artificial Sequence
  Description of Artificial Sequence: Synthetic oligonucleotide
ccgugaguaaggccuucug

SEQ ID NO: 2307311 - RNA, 19 nt, Artificial Sequence
  Description of Artificial Sequence: Synthetic oligonucleotide
agggcggguuagagaauca

SEQ ID NO: 2307312 - RNA, 19 nt, Artificial Sequence
  Description of Artificial Sequence: Synthetic oligonucleotide
ucccgugaguaaggccuuc

SEQ ID NO: 2307313 - RNA, 19 nt, Artificial Sequence
  Description of Artificial Sequence: Synthetic oligonucleotide
cuccgcuuccuuuggguau

SEQ ID NO: 2307314 - RNA, 19 nt, Artificial Sequence
  Description of Artificial Sequence: Synthetic oligonucleotide
gggaugcucuccugugcga

SEQ ID NO: 2307315 - RNA, 19 nt, Artificial Sequence
  Description of Artificial Sequence: Synthetic oligonucleotide
cgaagggugguucuccgga

SEQ ID NO: 2307316 - RNA, 19 nt, Artificial Sequence
  Description of Artificial Sequence: Synthetic oligonucleotide
gucggagcgagagaagcuu

SEQ ID NO: 2307317 - RNA, 19 nt, Artificial Sequence
  Description of Artificial Sequence: Synthetic oligonucleotide
cgcuuguucacagugaggu

SEQ ID NO: 2307318 - RNA, 19 nt, Artificial Sequence
  Description of Artificial Sequence: Synthetic oligonucleotide
ggguugcgcaccaggagaa

SEQ ID NO: 2307319 - RNA, 19 nt, Artificial Sequence
  Description of Artificial Sequence: Synthetic oligonucleotide
aucccgugaguaaggccuu

SEQ ID NO: 2307320 - RNA, 19 nt, Artificial Sequence
  Description of Artificial Sequence: Synthetic oligonucleotide
cuccugugcgauggaaacu

SEQ ID NO: 2307321 - RNA, 19 nt, Artificial Sequence
  Description of Artificial Sequence: Synthetic oligonucleotide
caucuguaauaaggagggu

SEQ ID NO: 2307322 - RNA, 19 nt, Artificial Sequence
  Description of Artificial Sequence: Synthetic oligonucleotide
gggcggguuagagaaucaa

SEQ ID NO: 2307323 - RNA, 19 nt, Artificial Sequence
  Description of Artificial Sequence: Synthetic oligonucleotide
ggagaaggggcgaguauuu

SEQ ID NO: 2307324 - RNA, 19 nt, Artificial Sequence
  Description of Artificial Sequence: Synthetic oligonucleotide
ccggacacuggaaaggcuu

SEQ ID NO: 2307325 - RNA, 19 nt, Artificial Sequence
  Description of Artificial Sequence: Synthetic oligonucleotide
ggucggagcgagagaagcu

SEQ ID NO: 2307326 - RNA, 19 nt, Artificial Sequence
  Description of Artificial Sequence: Synthetic oligonucleotide
ggaugcucuccugugcgau

SEQ ID NO: 2307327 - RNA, 19 nt, Artificial Sequence
  Description of Artificial Sequence: Synthetic oligonucleotide
ccuccgcuuccuuugggua

SEQ ID NO: 2307328 - RNA, 19 nt, Artificial Sequence
  Description of Artificial Sequence: Synthetic oligonucleotide
gcaccaggagaaggggcga

SEQ ID NO: 2307329 - RNA, 19 nt, Artificial Sequence
  Description of Artificial Sequence: Synthetic oligonucleotide
ccgucauagucgcaucugu

SEQ ID NO: 2307330 - RNA, 19 nt, Artificial Sequence
  Description of Artificial Sequence: Synthetic oligonucleotide
ggaggguggcaugcucaga

SEQ ID NO: 2307331 - RNA, 19 nt, Artificial Sequence
  Description of Artificial Sequence: Synthetic oligonucleotide
gcucuccugugcgauggaa

SEQ ID NO: 2307332 - RNA, 19 nt, Artificial Sequence
  Description of Artificial Sequence: Synthetic oligonucleotide
ggguauccggggacuccac

SEQ ID NO: 2307333 - RNA, 19 nt, Artificial Sequence
  Description of Artificial Sequence: Synthetic oligonucleotide
guaaggccuucugggguuu

SEQ ID NO: 2307334 - RNA, 19 nt, Artificial Sequence
  Description of Artificial Sequence: Synthetic oligonucleotide
ggucguuaguuuacauguu

SEQ ID NO: 2307335 - RNA, 19 nt, Artificial Sequence
  Description of Artificial Sequence: Synthetic oligonucleotide
ccgcuuccuuuggguaucc

SEQ ID NO: 2307336 - RNA, 19 nt, Artificial Sequence
  Description of Artificial Sequence: Synthetic oligonucleotide
cuaugaccgaagggugguu

SEQ ID NO: 2307337 - RNA, 19 nt, Artificial Sequence
  Description of Artificial Sequence: Synthetic oligonucleotide
guggugagcuccgcuuguu

SEQ ID NO: 2307338 - RNA, 19 nt, Artificial Sequence
  Description of Artificial Sequence: Synthetic oligonucleotide
cacugguggcauggacagu

SEQ ID NO: 2307339 - RNA, 19 nt, Artificial Sequence
  Description of Artificial Sequence: Synthetic oligonucleotide
gcgggcuggaggguggcau

SEQ ID NO: 2307340 - RNA, 19 nt, Artificial Sequence
  Description of Artificial Sequence: Synthetic oligonucleotide
cccgugaguaaggccuucu

SEQ ID NO: 2307341 - RNA, 19 nt, Artificial Sequence
  Description of Artificial Sequence: Synthetic oligonucleotide
ccacagguagaggccucuu

SEQ ID NO: 2307342 - RNA, 19 nt, Artificial Sequence
  Description of Artificial Sequence: Synthetic oligonucleotide
aagaucaugacauagcgac

SEQ ID NO: 2307343 - RNA, 19 nt, Artificial Sequence
  Description of Artificial Sequence: Synthetic oligonucleotide
uuuuacuacacacacacac

SEQ ID NO: 2307344 - RNA, 19 nt, Artificial Sequence
  Description of Artificial Sequence: Synthetic oligonucleotide
auagcagcagccuuguucc

SEQ ID NO: 2307345 - RNA, 19 nt, Artificial Sequence
  Description of Artificial Sequence: Synthetic oligonucleotide
acuacacacacacacacac

SEQ ID NO: 2307346 - RNA, 19 nt, Artificial Sequence
  Description of Artificial Sequence: Synthetic oligonucleotide
agcagugauaaacaccugc

SEQ ID NO: 2307347 - RNA, 19 nt, Artificial Sequence
  Description of Artificial Sequence: Synthetic oligonucleotide
aacucuuccccacucugcc

SEQ ID NO: 2307348 - RNA, 19 nt, Artificial Sequence
  Description of Artificial Sequence: Synthetic oligonucleotide
aagcaccaaccauacaucc

SEQ ID NO: 2307349 - RNA, 19 nt, Artificial Sequence
  Description of Artificial Sequence: Synthetic oligonucleotide
aaaucagacaccucuuucu

SEQ ID NO: 2307350 - RNA, 19 nt, Artificial Sequence
  Description of Artificial Sequence: Synthetic oligonucleotide
ugccacuucuaccacaucg

SEQ ID NO: 2307351 - RNA, 19 nt, Artificial Sequence
  Description of Artificial Sequence: Synthetic oligonucleotide
ucuaucuuguucaugggcu

SEQ ID NO: 2307352 - RNA, 19 nt, Artificial Sequence
  Description of Artificial Sequence: Synthetic oligonucleotide
aaucagacaccucuuucuc

SEQ ID NO: 2307353 - RNA, 19 nt, Artificial Sequence
  Description of Artificial Sequence: Synthetic oligonucleotide
aauaagguggcuauacuug

SEQ ID NO: 2307354 - RNA, 19 nt, Artificial Sequence
  Description of Artificial Sequence: Synthetic oligonucleotide
uuugaagaucaugacauag

SEQ ID NO: 2307355 - RNA, 19 nt, Artificial Sequence
  Description of Artificial Sequence: Synthetic oligonucleotide
cauccuuuuacgaaacucc

SEQ ID NO: 2307356 - RNA, 19 nt, Artificial Sequence
  Description of Artificial Sequence: Synthetic oligonucleotide
ucuccaaaggagaaggaug

SEQ ID NO: 2307357 - RNA, 19 nt, Artificial Sequence
  Description of Artificial Sequence: Synthetic oligonucleotide
acaagcaccaaccauacau

SEQ ID NO: 2307358 - RNA, 19 nt, Artificial Sequence
  Description of Artificial Sequence: Synthetic oligonucleotide
augccuaggagguaguugg

SEQ ID NO: 2307359 - RNA, 19 nt, Artificial Sequence
  Description of Artificial Sequence: Synthetic oligonucleotide
uacacacacacacacacac

SEQ ID NO: 2307360 - RNA, 19 nt, Artificial Sequence
  Description of Artificial Sequence: Synthetic oligonucleotide
uuacuacacacacacacac

SEQ ID NO: 2307361 - RNA, 19 nt, Artificial Sequence
  Description of Artificial Sequence: Synthetic oligonucleotide
uuuacuacacacacacaca

SEQ ID NO: 2307362 - RNA, 19 nt, Artificial Sequence
  Description of Artificial Sequence: Synthetic oligonucleotide
caugacauagcgacagucg

SEQ ID NO: 2307363 - RNA, 19 nt, Artificial Sequence
  Description of Artificial Sequence: Synthetic oligonucleotide
uauggagcgaguaucccgc

SEQ ID NO: 2307364 - RNA, 19 nt, Artificial Sequence
  Description of Artificial Sequence: Synthetic oligonucleotide
gauagcagcagccuuguuc

SEQ ID NO: 2307365 - RNA, 19 nt, Artificial Sequence
  Description of Artificial Sequence: Synthetic oligonucleotide
acaucguggaguaugcucc

SEQ ID NO: 2307366 - RNA, 19 nt, Artificial Sequence
  Description of Artificial Sequence: Synthetic oligonucleotide
cacacacacacacacaagc

SEQ ID NO: 2307367 - RNA, 19 nt, Artificial Sequence
  Description of Artificial Sequence: Synthetic oligonucleotide
uuuacgaaacuccacuuuu

SEQ ID NO: 2307368 - RNA, 19 nt, Artificial Sequence
  Description of Artificial Sequence: Synthetic oligonucleotide
gcucgaaucucauucaugg

SEQ ID NO: 2307369 - RNA, 19 nt, Artificial Sequence
  Description of Artificial Sequence: Synthetic oligonucleotide
gauggguccugauagcagc

SEQ ID NO: 2307370 - RNA, 19 nt, Artificial Sequence
  Description of Artificial Sequence: Synthetic oligonucleotide
auaguuuagagguggggcu

SEQ ID NO: 2307371 - RNA, 19 nt, Artificial Sequence
  Description of Artificial Sequence: Synthetic oligonucleotide
gaccucauaguuuagaggu

SEQ ID NO: 2307372 - RNA, 19 nt, Artificial Sequence
  Description of Artificial Sequence: Synthetic oligonucleotide
uucuauggagcgaguaucc

SEQ ID NO: 2307373 - RNA, 19 nt, Artificial Sequence
  Description of Artificial Sequence: Synthetic oligonucleotide
ucgucaucuucuccaaagg

SEQ ID NO: 2307374 - RNA, 19 nt, Artificial Sequence
  Description of Artificial Sequence: Synthetic oligonucleotide
acacacacacacaagcacc

SEQ ID NO: 2307375 - RNA, 19 nt, Artificial Sequence
  Description of Artificial Sequence: Synthetic oligonucleotide
cuauggagcgaguaucccg

SEQ ID NO: 2307376 - RNA, 19 nt, Artificial Sequence
  Description of Artificial Sequence: Synthetic oligonucleotide
agcugguaggaccucauag

SEQ ID NO: 2307377 - RNA, 19 nt, Artificial Sequence
  Description of Artificial Sequence: Synthetic oligonucleotide
agggaguugggugcgaugc

SEQ ID NO: 2307378 - RNA, 19 nt, Artificial Sequence
  Description of Artificial Sequence: Synthetic oligonucleotide
gucaaagggaguugggugc

SEQ ID NO: 2307379 - RNA, 19 nt, Artificial Sequence
  Description of Artificial Sequence: Synthetic oligonucleotide
aggaccucauaguuuagag

SEQ ID NO: 2307380 - RNA, 19 nt, Artificial Sequence
  Description of Artificial Sequence: Synthetic oligonucleotide
cacacacacacacacacac

SEQ ID NO: 2307381 - RNA, 19 nt, Artificial Sequence
  Description of Artificial Sequence: Synthetic oligonucleotide
ucuucagaugggcagccug

SEQ ID NO: 2307382 - RNA, 19 nt, Artificial Sequence
  Description of Artificial Sequence: Synthetic oligonucleotide
gacaccucuuucuccaucc

SEQ ID NO: 2307383 - RNA, 19 nt, Artificial Sequence
  Description of Artificial Sequence: Synthetic oligonucleotide
gauaaacaccugcuucucc

SEQ ID NO: 2307384 - RNA, 19 nt, Artificial Sequence
  Description of Artificial Sequence: Synthetic oligonucleotide
ucauaguuuagaggugggg

SEQ ID NO: 2307385 - RNA, 19 nt, Artificial Sequence
  Description of Artificial Sequence: Synthetic oligonucleotide
uggaugaaaucagacaccu

SEQ ID NO: 2307386 - RNA, 19 nt, Artificial Sequence
  Description of Artificial Sequence: Synthetic oligonucleotide
uuuuacgaaacuccacuuu

SEQ ID NO: 2307387 - RNA, 19 nt, Artificial Sequence
  Description of Artificial Sequence: Synthetic oligonucleotide
auagcgacagucgucaucu

SEQ ID NO: 2307388 - RNA, 19 nt, Artificial Sequence
  Description of Artificial Sequence: Synthetic oligonucleotide
aguagguccgccaucuugg

SEQ ID NO: 2307389 - RNA, 19 nt, Artificial Sequence
  Description of Artificial Sequence: Synthetic oligonucleotide
guaguuggcaacucuuccc

SEQ ID NO: 2307390 - RNA, 19 nt, Artificial Sequence
  Description of Artificial Sequence: Synthetic oligonucleotide
cacuucuaccacaucgugg

SEQ ID NO: 2307391 - RNA, 19 nt, Artificial Sequence
  Description of Artificial Sequence: Synthetic oligonucleotide
uacuuguccuuguagucgc

SEQ ID NO: 2307392 - RNA, 19 nt, Artificial Sequence
  Description of Artificial Sequence: Synthetic oligonucleotide
acguuucuuggcucgaauc

SEQ ID NO: 2307393 - RNA, 19 nt, Artificial Sequence
  Description of Artificial Sequence: Synthetic oligonucleotide
cuggaugaaaucagacacc

SEQ ID NO: 2307394 - RNA, 19 nt, Artificial Sequence
  Description of Artificial Sequence: Synthetic oligonucleotide
ccuggaugaaaucagacac

SEQ ID NO: 2307395 - RNA, 19 nt, Artificial Sequence
  Description of Artificial Sequence: Synthetic oligonucleotide
auacauccaaguugcagca

SEQ ID NO: 2307396 - RNA, 19 nt, Artificial Sequence
  Description of Artificial Sequence: Synthetic oligonucleotide
uucuccauccuuuuacgaa

SEQ ID NO: 2307397 - RNA, 19 nt, Artificial Sequence
  Description of Artificial Sequence: Synthetic oligonucleotide
aguaugcuccucucuaucu

SEQ ID NO: 2307398 - RNA, 19 nt, Artificial Sequence
  Description of Artificial Sequence: Synthetic oligonucleotide
cuuguuggccuguagcaug

SEQ ID NO: 2307399 - RNA, 19 nt, Artificial Sequence
  Description of Artificial Sequence: Synthetic oligonucleotide
uuucuugaccuguccacug

SEQ ID NO: 2307400 - RNA, 19 nt, Artificial Sequence
  Description of Artificial Sequence: Synthetic oligonucleotide
ugugaggccugccacuucu

SEQ ID NO: 2307401 - RNA, 19 nt, Artificial Sequence
  Description of Artificial Sequence: Synthetic oligonucleotide
cuuguucaugggcugaaac

SEQ ID NO: 2307402 - RNA, 19 nt, Artificial Sequence
  Description of Artificial Sequence: Synthetic oligonucleotide
uguagucgcuagcagggcu

SEQ ID NO: 2307403 - RNA, 19 nt, Artificial Sequence
  Description of Artificial Sequence: Synthetic oligonucleotide
ucugagggugcaaacuccu

SEQ ID NO: 2307404 - RNA, 19 nt, Artificial Sequence
  Description of Artificial Sequence: Synthetic oligonucleotide
cuagcagggcucaccaccg

SEQ ID NO: 2307405 - RNA, 19 nt, Artificial Sequence
  Description of Artificial Sequence: Synthetic oligonucleotide
auggccucuucuauggagc

SEQ ID NO: 2307406 - RNA, 19 nt, Artificial Sequence
  Description of Artificial Sequence: Synthetic oligonucleotide
ugaaaucagacaccucuuu

SEQ ID NO: 2307407 - RNA, 19 nt, Artificial Sequence
  Description of Artificial Sequence: Synthetic oligonucleotide
aguuuagagguggggcucc

SEQ ID NO: 2307408 - RNA, 19 nt, Artificial Sequence
  Description of Artificial Sequence: Synthetic oligonucleotide
cacacacacacacaagcac

SEQ ID NO: 2307409 - RNA, 19 nt, Artificial Sequence
  Description of Artificial Sequence: Synthetic oligonucleotide
acauccaaguugcagcagu

SEQ ID NO: 2307410 - RNA, 19 nt, Artificial Sequence
  Description of Artificial Sequence: Synthetic oligonucleotide
gacauagcgacagucguca

SEQ ID NO: 2307411 - RNA, 19 nt, Artificial Sequence
  Description of Artificial Sequence: Synthetic oligonucleotide
agcgacagucgucaucuuc

SEQ ID NO: 2307412 - RNA, 19 nt, Artificial Sequence
  Description of Artificial Sequence: Synthetic oligonucleotide
gaccuguccacuguccugg

SEQ ID NO: 2307413 - RNA, 19 nt, Artificial Sequence
  Description of Artificial Sequence: Synthetic oligonucleotide
caugccccugccuugcugg

SEQ ID NO: 2307414 - RNA, 19 nt, Artificial Sequence
  Description of Artificial Sequence: Synthetic oligonucleotide
uuugccaauaagguggcua

SEQ ID NO: 2307415 - RNA, 19 nt, Artificial Sequence
  Description of Artificial Sequence: Synthetic oligonucleotide
uccuuuuacgaaacuccac

SEQ ID NO: 2307416 - RNA, 19 nt, Artificial Sequence
  Description of Artificial Sequence: Synthetic oligonucleotide
uggaguaugcuccucucua

SEQ ID NO: 2307417 - RNA, 19 nt, Artificial Sequence
  Description of Artificial Sequence: Synthetic oligonucleotide
cauggccucuucuauggag

SEQ ID NO: 2307418 - RNA, 19 nt, Artificial Sequence
  Description of Artificial Sequence: Synthetic oligonucleotide
uccuuguagucgcuagcag

SEQ ID NO: 2307419 - RNA, 19 nt, Artificial Sequence
  Description of Artificial Sequence: Synthetic oligonucleotide
uacuacacacacacacaca

SEQ ID NO: 2307420 - RNA, 19 nt, Artificial Sequence
  Description of Artificial Sequence: Synthetic oligonucleotide
aguaucccgcuuguuggcc

SEQ ID NO: 2307421 - RNA, 19 nt, Artificial Sequence
  Description of Artificial Sequence: Synthetic oligonucleotide
uugccaauaagguggcuau

SEQ ID NO: 2307422 - RNA, 19 nt, Artificial Sequence
  Description of Artificial Sequence: Synthetic oligonucleotide
acgguaggaguccagcucu

SEQ ID NO: 2307423 - RNA, 19 nt, Artificial Sequence
  Description of Artificial Sequence: Synthetic oligonucleotide
cacaucguggaguaugcuc

SEQ ID NO: 2307424 - RNA, 19 nt, Artificial Sequence
  Description of Artificial Sequence: Synthetic oligonucleotide
cuucuauggagcgaguauc

SEQ ID NO: 2307425 - RNA, 19 nt, Artificial Sequence
  Description of Artificial Sequence: Synthetic oligonucleotide
uggccucuucuauggagcg

SEQ ID NO: 2307426 - RNA, 19 nt, Artificial Sequence
  Description of Artificial Sequence: Synthetic oligonucleotide
ucaugacauagcgacaguc

SEQ ID NO: 2307427 - RNA, 19 nt, Artificial Sequence
  Description of Artificial Sequence: Synthetic oligonucleotide
ugagggugcaaacuccuuu

SEQ ID NO: 2307428 - RNA, 19 nt, Artificial Sequence
  Description of Artificial Sequence: Synthetic oligonucleotide
gcuauacuuguccuuguag

SEQ ID NO: 2307429 - RNA, 19 nt, Artificial Sequence
  Description of Artificial Sequence: Synthetic oligonucleotide
accaaccauacauccaagu

SEQ ID NO: 2307430 - RNA, 19 nt, Artificial Sequence
  Description of Artificial Sequence: Synthetic oligonucleotide
cacacaagcaccaaccaua

SEQ ID NO: 2307431 - RNA, 19 nt, Artificial Sequence
  Description of Artificial Sequence: Synthetic oligonucleotide
caaguugcagcagugauaa

SEQ ID NO: 2307432 - RNA, 19 nt, Artificial Sequence
  Description of Artificial Sequence: Synthetic oligonucleotide
cuaggagguaguuggcaac

SEQ ID NO: 2307433 - RNA, 19 nt, Artificial Sequence
  Description of Artificial Sequence: Synthetic oligonucleotide
ugugggcugcaucuuuggc

SEQ ID NO: 2307434 - RNA, 19 nt, Artificial Sequence
  Description of Artificial Sequence: Synthetic oligonucleotide
cucgaaucucauucauggc

SEQ ID NO: 2307435 - RNA, 19 nt, Artificial Sequence
  Description of Artificial Sequence: Synthetic oligonucleotide
uucuugaccuguccacugu

SEQ ID NO: 2307436 - RNA, 19 nt, Artificial Sequence
  Description of Artificial Sequence: Synthetic oligonucleotide
uggucaccgaggcugggug

SEQ ID NO: 2307437 - RNA, 19 nt, Artificial Sequence
  Description of Artificial Sequence: Synthetic oligonucleotide
uucuaccacaucguggagu

SEQ ID NO: 2307438 - RNA, 19 nt, Artificial Sequence
  Description of Artificial Sequence: Synthetic oligonucleotide
guggcuauacuuguccuug

SEQ ID NO: 2307439 - RNA, 19 nt, Artificial Sequence
  Description of Artificial Sequence: Synthetic oligonucleotide
ucuauggagcgaguauccc

SEQ ID NO: 2307440 - RNA, 19 nt, Artificial Sequence
  Description of Artificial Sequence: Synthetic oligonucleotide
ucguggaguaugcuccucu

SEQ ID NO: 2307441 - RNA, 19 nt, Artificial Sequence
  Description of Artificial Sequence: Synthetic oligonucleotide
gacgguaggaguccagcuc

SEQ ID NO: 2307442 - RNA, 19 nt, Artificial Sequence
  Description of Artificial Sequence: Synthetic oligonucleotide
ggucuuguuggccuguagc

SEQ ID NO: 2307443 - RNA, 19 nt, Artificial Sequence
  Description of Artificial Sequence: Synthetic oligonucleotide
gggugcgaugccuaggagg

SEQ ID NO: 2307444 - RNA, 19 nt, Artificial Sequence
  Description of Artificial Sequence: Synthetic oligonucleotide
uuggccacgggcacacagc

SEQ ID NO: 2307445 - RNA, 19 nt, Artificial Sequence
  Description of Artificial Sequence: Synthetic oligonucleotide
cacacacacacacacacaa

SEQ ID NO: 2307446 - RNA, 19 nt, Artificial Sequence
  Description of Artificial Sequence: Synthetic oligonucleotide
ucgcuagcagggcucacca

SEQ ID NO: 2307447 - RNA, 19 nt, Artificial Sequence
  Description of Artificial Sequence: Synthetic oligonucleotide
gaguaucccgcuuguuggc

SEQ ID NO: 2307448 - RNA, 19 nt, Artificial Sequence
  Description of Artificial Sequence: Synthetic oligonucleotide
guuggccacgggcacacag

SEQ ID NO: 2307449 - RNA, 19 nt, Artificial Sequence
  Description of Artificial Sequence: Synthetic oligonucleotide
gcuagcagggcucaccacc

SEQ ID NO: 2307450 - RNA, 19 nt, Artificial Sequence
  Description of Artificial Sequence: Synthetic oligonucleotide
uucaugggcugaaacuuuu

SEQ ID NO: 2307451 - RNA, 19 nt, Artificial Sequence
  Description of Artificial Sequence: Synthetic oligonucleotide
gguaggaccucauaguuua

SEQ ID NO: 2307452 - RNA, 19 nt, Artificial Sequence
  Description of Artificial Sequence: Synthetic oligonucleotide
cagccuuguuccuccaugc

SEQ ID NO: 2307453 - RNA, 19 nt, Artificial Sequence
  Description of Artificial Sequence: Synthetic oligonucleotide
ucuccgugacgguaggagu

SEQ ID NO: 2307454 - RNA, 19 nt, Artificial Sequence
  Description of Artificial Sequence: Synthetic oligonucleotide
gaguaugcuccucucuauc

SEQ ID NO: 2307455 - RNA, 19 nt, Artificial Sequence
  Description of Artificial Sequence: Synthetic oligonucleotide
cauccaaguugcagcagug

SEQ ID NO: 2307456 - RNA, 19 nt, Artificial Sequence
  Description of Artificial Sequence: Synthetic oligonucleotide
ugacgguaggaguccagcu

SEQ ID NO: 2307457 - RNA, 19 nt, Artificial Sequence
  Description of Artificial Sequence: Synthetic oligonucleotide
guuggcaacucuuccccac

SEQ ID NO: 2307458 - RNA, 19 nt, Artificial Sequence
  Description of Artificial Sequence: Synthetic oligonucleotide
ugaccuguccacuguccug

SEQ ID NO: 2307459 - RNA, 19 nt, Artificial Sequence
  Description of Artificial Sequence: Synthetic oligonucleotide
agcuccuuuagcuuccguu

SEQ ID NO: 2307460 - RNA, 19 nt, Artificial Sequence
  Description of Artificial Sequence: Synthetic oligonucleotide
gcagacguuucuuggcucg

SEQ ID NO: 2307461 - RNA, 19 nt, Artificial Sequence
  Description of Artificial Sequence: Synthetic oligonucleotide
ugauaaacaccugcuucuc

SEQ ID NO: 2307462 - RNA, 19 nt, Artificial Sequence
  Description of Artificial Sequence: Synthetic oligonucleotide
aguugggugcgaugccuag

SEQ ID NO: 2307463 - RNA, 19 nt, Artificial Sequence
  Description of Artificial Sequence: Synthetic oligonucleotide
uucugagccagcuccuuua

SEQ ID NO: 2307464 - RNA, 19 nt, Artificial Sequence
  Description of Artificial Sequence: Synthetic oligonucleotide
uuggcaacucuuccccacu

SEQ ID NO: 2307465 - RNA, 19 nt, Artificial Sequence
  Description of Artificial Sequence: Synthetic oligonucleotide
cauaggucuuguuggccug

SEQ ID NO: 2307466 - RNA, 19 nt, Artificial Sequence
  Description of Artificial Sequence: Synthetic oligonucleotide
caguagguccgccaucuug

SEQ ID NO: 2307467 - RNA, 19 nt, Artificial Sequence
  Description of Artificial Sequence: Synthetic oligonucleotide
ugguaggaccucauaguuu

SEQ ID NO: 2307468 - RNA, 19 nt, Artificial Sequence
  Description of Artificial Sequence: Synthetic oligonucleotide
ccucauaguuuagaggugg

SEQ ID NO: 2307469 - RNA, 19 nt, Artificial Sequence
  Description of Artificial Sequence: Synthetic oligonucleotide
cuccgugacgguaggaguc

SEQ ID NO: 2307470 - RNA, 19 nt, Artificial Sequence
  Description of Artificial Sequence: Synthetic oligonucleotide
uccauccuuuuacgaaacu

SEQ ID NO: 2307471 - RNA, 19 nt, Artificial Sequence
  Description of Artificial Sequence: Synthetic oligonucleotide
cauagcgacagucgucauc

SEQ ID NO: 2307472 - RNA, 19 nt, Artificial Sequence
  Description of Artificial Sequence: Synthetic oligonucleotide
cuccauccuuuuacgaaac

SEQ ID NO: 2307473 - RNA, 19 nt, Artificial Sequence
  Description of Artificial Sequence: Synthetic oligonucleotide
cacacacacacaagcacca

SEQ ID NO: 2307474 - RNA, 19 nt, Artificial Sequence
  Description of Artificial Sequence: Synthetic oligonucleotide
gaggucaaagggaguuggg

SEQ ID NO: 2307475 - RNA, 19 nt, Artificial Sequence
  Description of Artificial Sequence: Synthetic oligonucleotide
cucuccgugacgguaggag

SEQ ID NO: 2307476 - RNA, 19 nt, Artificial Sequence
  Description of Artificial Sequence: Synthetic oligonucleotide
auccuuuuacgaaacucca

SEQ ID NO: 2307477 - RNA, 19 nt, Artificial Sequence
  Description of Artificial Sequence: Synthetic oligonucleotide
guagguccgccaucuuggg

SEQ ID NO: 2307478 - RNA, 19 nt, Artificial Sequence
  Description of Artificial Sequence: Synthetic oligonucleotide
cgaguaucccgcuuguugg

SEQ ID NO: 2307479 - RNA, 19 nt, Artificial Sequence
  Description of Artificial Sequence: Synthetic oligonucleotide
ggagcgaguaucccgcuug

SEQ ID NO: 2307480 - RNA, 19 nt, Artificial Sequence
  Description of Artificial Sequence: Synthetic oligonucleotide
uaguuuagagguggggcuc

SEQ ID NO: 2307481 - RNA, 19 nt, Artificial Sequence
  Description of Artificial Sequence: Synthetic oligonucleotide
gcgaguaucccgcuuguug

SEQ ID NO: 2307482 - RNA, 19 nt, Artificial Sequence
  Description of Artificial Sequence: Synthetic oligonucleotide
cuccaaaggagaaggaugu

SEQ ID NO: 2307483 - RNA, 19 nt, Artificial Sequence
  Description of Artificial Sequence: Synthetic oligonucleotide
ccugauagcagcagccuug

SEQ ID NO: 2307484 - RNA, 19 nt, Artificial Sequence
  Description of Artificial Sequence: Synthetic oligonucleotide
acacacacacacacaagca

SEQ ID NO: 2307485 - RNA, 19 nt, Artificial Sequence
  Description of Artificial Sequence: Synthetic oligonucleotide
guuucuuggcucgaaucuc

SEQ ID NO: 2307486 - RNA, 19 nt, Artificial Sequence
  Description of Artificial Sequence: Synthetic oligonucleotide
uccgugacgguaggagucc

SEQ ID NO: 2307487 - RNA, 19 nt, Artificial Sequence
  Description of Artificial Sequence: Synthetic oligonucleotide
ucccacuccucuccgugac

SEQ ID NO: 2307488 - RNA, 19 nt, Artificial Sequence
  Description of Artificial Sequence: Synthetic oligonucleotide
caggauggguccugauagc

SEQ ID NO: 2307489 - RNA, 19 nt, Artificial Sequence
  Description of Artificial Sequence: Synthetic oligonucleotide
uggaggucaaagggaguug

SEQ ID NO: 2307490 - RNA, 19 nt, Artificial Sequence
  Description of Artificial Sequence: Synthetic oligonucleotide
ugccuaggagguaguuggc

SEQ ID NO: 2307491 - RNA, 19 nt, Artificial Sequence
  Description of Artificial Sequence: Synthetic oligonucleotide
uuuagagguggggcuccag

SEQ ID NO: 2307492 - RNA, 19 nt, Artificial Sequence
  Description of Artificial Sequence: Synthetic oligonucleotide
gccuuguuccuccaugccc

SEQ ID NO: 2307493 - RNA, 19 nt, Artificial Sequence
  Description of Artificial Sequence: Synthetic oligonucleotide
guugggugcgaugccuagg

SEQ ID NO: 2307494 - RNA, 19 nt, Artificial Sequence
  Description of Artificial Sequence: Synthetic oligonucleotide
gguccugauagcagcagcc

SEQ ID NO: 2307495 - RNA, 19 nt, Artificial Sequence
  Description of Artificial Sequence: Synthetic oligonucleotide
caauaagguggcuauacuu

SEQ ID NO: 2307496 - RNA, 19 nt, Artificial Sequence
  Description of Artificial Sequence: Synthetic oligonucleotide
aaagggaguugggugcgau

SEQ ID NO: 2307497 - RNA, 19 nt, Artificial Sequence
  Description of Artificial Sequence: Synthetic oligonucleotide
gugacgguaggaguccagc

SEQ ID NO: 2307498 - RNA, 19 nt, Artificial Sequence
  Description of Artificial Sequence: Synthetic oligonucleotide
aggucuuguuggccuguag

SEQ ID NO: 2307499 - RNA, 19 nt, Artificial Sequence
  Description of Artificial Sequence: Synthetic oligonucleotide
ugggugcgaugccuaggag

SEQ ID NO: 2307500 - RNA, 19 nt, Artificial Sequence
  Description of Artificial Sequence: Synthetic oligonucleotide
uagguccgccaucuuggga

SEQ ID NO: 2307501 - RNA, 19 nt, Artificial Sequence
  Description of Artificial Sequence: Synthetic oligonucleotide
uucagaugggcagccugcu

SEQ ID NO: 2307502 - RNA, 19 nt, Artificial Sequence
  Description of Artificial Sequence: Synthetic oligonucleotide
cacacagccauaggucuug

SEQ ID NO: 2307503 - RNA, 19 nt, Artificial Sequence
  Description of Artificial Sequence: Synthetic oligonucleotide
accgcaggucccugcuugg

SEQ ID NO: 2307504 - RNA, 19 nt, Artificial Sequence
  Description of Artificial Sequence: Synthetic oligonucleotide
uuguagucgcuagcagggc

SEQ ID NO: 2307505 - RNA, 19 nt, Artificial Sequence
  Description of Artificial Sequence: Synthetic oligonucleotide
cuacacacacacacacaca

SEQ ID NO: 2307506 - RNA, 19 nt, Artificial Sequence
  Description of Artificial Sequence: Synthetic oligonucleotide
gcaccaaccauacauccaa

SEQ ID NO: 2307507 - RNA, 19 nt, Artificial Sequence
  Description of Artificial Sequence: Synthetic oligonucleotide
gccaauaagguggcuauac

SEQ ID NO: 2307508 - RNA, 19 nt, Artificial Sequence
  Description of Artificial Sequence: Synthetic oligonucleotide
uggcuauacuuguccuugu

SEQ ID NO: 2307509 - RNA, 19 nt, Artificial Sequence
  Description of Artificial Sequence: Synthetic oligonucleotide
uggcaacucuuccccacuc

SEQ ID NO: 2307510 - RNA, 19 nt, Artificial Sequence
  Description of Artificial Sequence: Synthetic oligonucleotide
acacacacacacacacaag

SEQ ID NO: 2307511 - RNA, 19 nt, Artificial Sequence
  Description of Artificial Sequence: Synthetic oligonucleotide
acgggcacacagccauagg

SEQ ID NO: 2307512 - RNA, 19 nt, Artificial Sequence
  Description of Artificial Sequence: Synthetic oligonucleotide
caccgcaggucccugcuug

SEQ ID NO: 2307513 - RNA, 19 nt, Artificial Sequence
  Description of Artificial Sequence: Synthetic oligonucleotide
agaucaugacauagcgaca

SEQ ID NO: 2307514 - RNA, 19 nt, Artificial Sequence
  Description of Artificial Sequence: Synthetic oligonucleotide
gaaggaugugaggccugcc

SEQ ID NO: 2307515 - RNA, 19 nt, Artificial Sequence
  Description of Artificial Sequence: Synthetic oligonucleotide
uguagcaugugggcugcau

SEQ ID NO: 2307516 - RNA, 19 nt, Artificial Sequence
  Description of Artificial Sequence: Synthetic oligonucleotide
gcagccuuguuccuccaug

SEQ ID NO: 2307517 - RNA, 19 nt, Artificial Sequence
  Description of Artificial Sequence: Synthetic oligonucleotide
uccucucuaucuuguucau

SEQ ID NO: 2307518 - RNA, 19 nt, Artificial Sequence
  Description of Artificial Sequence: Synthetic oligonucleotide
agcaccaaccauacaucca

SEQ ID NO: 2307519 - RNA, 19 nt, Artificial Sequence
  Description of Artificial Sequence: Synthetic oligonucleotide
gucgcuagcagggcucacc

SEQ ID NO: 2307520 - RNA, 19 nt, Artificial Sequence
  Description of Artificial Sequence: Synthetic oligonucleotide
guagucgcuagcagggcuc

SEQ ID NO: 2307521 - RNA, 19 nt, Artificial Sequence
  Description of Artificial Sequence: Synthetic oligonucleotide
accucauaguuuagaggug

SEQ ID NO: 2307522 - RNA, 19 nt, Artificial Sequence
  Description of Artificial Sequence: Synthetic oligonucleotide
accaccgcaggucccugcu

SEQ ID NO: 2307523 - RNA, 19 nt, Artificial Sequence
  Description of Artificial Sequence: Synthetic oligonucleotide
cacgggcacacagccauag

SEQ ID NO: 2307524 - RNA, 19 nt, Artificial Sequence
  Description of Artificial Sequence: Synthetic oligonucleotide
guaucccgcuuguuggcca

SEQ ID NO: 2307525 - RNA, 19 nt, Artificial Sequence
  Description of Artificial Sequence: Synthetic oligonucleotide
agcccaguagguccgccau

SEQ ID NO: 2307526 - RNA, 19 nt, Artificial Sequence
  Description of Artificial Sequence: Synthetic oligonucleotide
ucugccgcagacguuucuu

SEQ ID NO: 2307527 - RNA, 19 nt, Artificial Sequence
  Description of Artificial Sequence: Synthetic oligonucleotide
uccccacucugccgcagac

SEQ ID NO: 2307528 - RNA, 19 nt, Artificial Sequence
  Description of Artificial Sequence: Synthetic oligonucleotide
ggcucaccaccgcaggucc

SEQ ID NO: 2307529 - RNA, 19 nt, Artificial Sequence
  Description of Artificial Sequence: Synthetic oligonucleotide
uagucgcuagcagggcuca

SEQ ID NO: 2307530 - RNA, 19 nt, Artificial Sequence
  Description of Artificial Sequence: Synthetic oligonucleotide
uagcagggcucaccaccgc

SEQ ID NO: 2307531 - RNA, 19 nt, Artificial Sequence
  Description of Artificial Sequence: Synthetic oligonucleotide
ggucccacuccucuccgug

SEQ ID NO: 2307532 - RNA, 19 nt, Artificial Sequence
  Description of Artificial Sequence: Synthetic oligonucleotide
ccauccuuuuacgaaacuc

SEQ ID NO: 2307533 - RNA, 19 nt, Artificial Sequence
  Description of Artificial Sequence: Synthetic oligonucleotide
aucguggaguaugcuccuc

SEQ ID NO: 2307534 - RNA, 19 nt, Artificial Sequence
  Description of Artificial Sequence: Synthetic oligonucleotide
ggguccugauagcagcagc

SEQ ID NO: 2307535 - RNA, 19 nt, Artificial Sequence
  Description of Artificial Sequence: Synthetic oligonucleotide
gagggugcaaacuccuuuu

SEQ ID NO: 2307536 - RNA, 19 nt, Artificial Sequence
  Description of Artificial Sequence: Synthetic oligonucleotide
ccuuuuacgaaacuccacu

SEQ ID NO: 2307537 - RNA, 19 nt, Artificial Sequence
  Description of Artificial Sequence: Synthetic oligonucleotide
aggauggagcccaguaggu

SEQ ID NO: 2307538 - RNA, 19 nt, Artificial Sequence
  Description of Artificial Sequence: Synthetic oligonucleotide
ggauggguccugauagcag

SEQ ID NO: 2307539 - RNA, 19 nt, Artificial Sequence
  Description of Artificial Sequence: Synthetic oligonucleotide
acacacacacacacacaca

SEQ ID NO: 2307540 - RNA, 19 nt, Artificial Sequence
  Description of Artificial Sequence: Synthetic oligonucleotide
uggagcgaguaucccgcuu

SEQ ID NO: 2307541 - RNA, 19 nt, Artificial Sequence
  Description of Artificial Sequence: Synthetic oligonucleotide
gccgcagacguuucuuggc

SEQ ID NO: 2307542 - RNA, 19 nt, Artificial Sequence
  Description of Artificial Sequence: Synthetic oligonucleotide
aucuuguucaugggcugaa

SEQ ID NO: 2307543 - RNA, 19 nt, Artificial Sequence
  Description of Artificial Sequence: Synthetic oligonucleotide
guaggaccucauaguuuag

SEQ ID NO: 2307544 - RNA, 19 nt, Artificial Sequence
  Description of Artificial Sequence: Synthetic oligonucleotide
auggagcgaguaucccgcu

SEQ ID NO: 2307545 - RNA, 19 nt, Artificial Sequence
  Description of Artificial Sequence: Synthetic oligonucleotide
aggcuggguggcuucucca

SEQ ID NO: 2307546 - RNA, 19 nt, Artificial Sequence
  Description of Artificial Sequence: Synthetic oligonucleotide
cagcagugauaaacaccug

SEQ ID NO: 2307547 - RNA, 19 nt, Artificial Sequence
  Description of Artificial Sequence: Synthetic oligonucleotide
gcugguaggaccucauagu

SEQ ID NO: 2307548 - RNA, 19 nt, Artificial Sequence
  Description of Artificial Sequence: Synthetic oligonucleotide
aaguugcagcagugauaaa

SEQ ID NO: 2307549 - RNA, 19 nt, Artificial Sequence
  Description of Artificial Sequence: Synthetic oligonucleotide
gugacagcugguaggaccu

SEQ ID NO: 2307550 - RNA, 19 nt, Artificial Sequence
  Description of Artificial Sequence: Synthetic oligonucleotide
ggcucgaaucucauucaug

SEQ ID NO: 2307551 - RNA, 19 nt, Artificial Sequence
  Description of Artificial Sequence: Synthetic oligonucleotide
gacguuucuuggcucgaau

SEQ ID NO: 2307552 - RNA, 19 nt, Artificial Sequence
  Description of Artificial Sequence: Synthetic oligonucleotide
uguuggccuguagcaugug

SEQ ID NO: 2307553 - RNA, 19 nt, Artificial Sequence
  Description of Artificial Sequence: Synthetic oligonucleotide
guggaguaugcuccucucu

SEQ ID NO: 2307554 - RNA, 19 nt, Artificial Sequence
  Description of Artificial Sequence: Synthetic oligonucleotide
acauagcgacagucgucau

SEQ ID NO: 2307555 - RNA, 19 nt, Artificial Sequence
  Description of Artificial Sequence: Synthetic oligonucleotide
gcagugauaaacaccugcu

SEQ ID NO: 2307556 - RNA, 19 nt, Artificial Sequence
  Description of Artificial Sequence: Synthetic oligonucleotide
gggcacacagccauagguc

SEQ ID NO: 2307557 - RNA, 19 nt, Artificial Sequence
  Description of Artificial Sequence: Synthetic oligonucleotide
ugccaauaagguggcuaua

SEQ ID NO: 2307558 - RNA, 19 nt, Artificial Sequence
  Description of Artificial Sequence: Synthetic oligonucleotide
guaugcuccucucuaucuu

SEQ ID NO: 2307559 - RNA, 19 nt, Artificial Sequence
  Description of Artificial Sequence: Synthetic oligonucleotide
acuccucuccgugacggua

SEQ ID NO: 2307560 - RNA, 19 nt, Artificial Sequence
  Description of Artificial Sequence: Synthetic oligonucleotide
caccaccgcaggucccugc

SEQ ID NO: 2307561 - RNA, 19 nt, Artificial Sequence
  Description of Artificial Sequence: Synthetic oligonucleotide
gccauaggucuuguuggcc

SEQ ID NO: 2307562 - RNA, 19 nt, Artificial Sequence
  Description of Artificial Sequence: Synthetic oligonucleotide
ccuaggagguaguuggcaa

SEQ ID NO: 2307563 - RNA, 19 nt, Artificial Sequence
  Description of Artificial Sequence: Synthetic oligonucleotide
agucgcuagcagggcucac

SEQ ID NO: 2307564 - RNA, 19 nt, Artificial Sequence
  Description of Artificial Sequence: Synthetic oligonucleotide
ggagguaguuggcaacucu

SEQ ID NO: 2307565 - RNA, 19 nt, Artificial Sequence
  Description of Artificial Sequence: Synthetic oligonucleotide
agacguuucuuggcucgaa

SEQ ID NO: 2307566 - RNA, 19 nt, Artificial Sequence
  Description of Artificial Sequence: Synthetic oligonucleotide
gcagggcucaccaccgcag

SEQ ID NO: 2307567 - RNA, 19 nt, Artificial Sequence
  Description of Artificial Sequence: Synthetic oligonucleotide
ccugcucucgggccuugcg

SEQ ID NO: 2307568 - RNA, 19 nt, Artificial Sequence
  Description of Artificial Sequence: Synthetic oligonucleotide
ccuguagcaugugggcugc

SEQ ID NO: 2307569 - RNA, 19 nt, Artificial Sequence
  Description of Artificial Sequence: Synthetic oligonucleotide
gcuccuuuagcuuccguuu

SEQ ID NO: 2307570 - RNA, 19 nt, Artificial Sequence
  Description of Artificial Sequence: Synthetic oligonucleotide
ccaaguugcagcagugaua

SEQ ID NO: 2307571 - RNA, 19 nt, Artificial Sequence
  Description of Artificial Sequence: Synthetic oligonucleotide
gaguugggugcgaugccua

SEQ ID NO: 2307572 - RNA, 19 nt, Artificial Sequence
  Description of Artificial Sequence: Synthetic oligonucleotide
gagcgaguaucccgcuugu

SEQ ID NO: 2307573 - RNA, 19 nt, Artificial Sequence
  Description of Artificial Sequence: Synthetic oligonucleotide
gcgacagucgucaucuucu

SEQ ID NO: 2307574 - RNA, 19 nt, Artificial Sequence
  Description of Artificial Sequence: Synthetic oligonucleotide
cacaagcaccaaccauaca

SEQ ID NO: 2307575 - RNA, 19 nt, Artificial Sequence
  Description of Artificial Sequence: Synthetic oligonucleotide
ggcuauacuuguccuugua

SEQ ID NO: 2307576 - RNA, 19 nt, Artificial Sequence
  Description of Artificial Sequence: Synthetic oligonucleotide
agcaugugggcugcaucuu

SEQ ID NO: 2307577 - RNA, 19 nt, Artificial Sequence
  Description of Artificial Sequence: Synthetic oligonucleotide
guuuagagguggggcucca

SEQ ID NO: 2307578 - RNA, 19 nt, Artificial Sequence
  Description of Artificial Sequence: Synthetic oligonucleotide
cgaaucucauucauggccu

SEQ ID NO: 2307579 - RNA, 19 nt, Artificial Sequence
  Description of Artificial Sequence: Synthetic oligonucleotide
ccauaggucuuguuggccu

SEQ ID NO: 2307580 - RNA, 19 nt, Artificial Sequence
  Description of Artificial Sequence: Synthetic oligonucleotide
ggaguaugcuccucucuau

SEQ ID NO: 2307581 - RNA, 19 nt, Artificial Sequence
  Description of Artificial Sequence: Synthetic oligonucleotide
ggaugaaaucagacaccuc

SEQ ID NO: 2307582 - RNA, 19 nt, Artificial Sequence
  Description of Artificial Sequence: Synthetic oligonucleotide
caucguggaguaugcuccu

SEQ ID NO: 2307583 - RNA, 19 nt, Artificial Sequence
  Description of Artificial Sequence: Synthetic oligonucleotide
guccugauagcagcagccu

SEQ ID NO: 2307584 - RNA, 19 nt, Artificial Sequence
  Description of Artificial Sequence: Synthetic oligonucleotide
gguaggaguccagcucuuc

SEQ ID NO: 2307585 - RNA, 19 nt, Artificial Sequence
  Description of Artificial Sequence: Synthetic oligonucleotide
cugauagcagcagccuugu

SEQ ID NO: 2307586 - RNA, 19 nt, Artificial Sequence
  Description of Artificial Sequence: Synthetic oligonucleotide
uggcugcuccuuugccaau

SEQ ID NO: 2307587 - RNA, 19 nt, Artificial Sequence
  Description of Artificial Sequence: Synthetic oligonucleotide
gccuaggagguaguuggca

SEQ ID NO: 2307588 - RNA, 19 nt, Artificial Sequence
  Description of Artificial Sequence: Synthetic oligonucleotide
guucaugggcugaaacuuu

SEQ ID NO: 2307589 - RNA, 19 nt, Artificial Sequence
  Description of Artificial Sequence: Synthetic oligonucleotide
cacucugccgcagacguuu

SEQ ID NO: 2307590 - RNA, 19 nt, Artificial Sequence
  Description of Artificial Sequence: Synthetic oligonucleotide
ccaaccauacauccaaguu

SEQ ID NO: 2307591 - RNA, 19 nt, Artificial Sequence
  Description of Artificial Sequence: Synthetic oligonucleotide
cagacguuucuuggcucga

SEQ ID NO: 2307592 - RNA, 19 nt, Artificial Sequence
  Description of Artificial Sequence: Synthetic oligonucleotide
cguggaguaugcuccucuc

SEQ ID NO: 2307593 - RNA, 19 nt, Artificial Sequence
  Description of Artificial Sequence: Synthetic oligonucleotide
ggaguugggugcgaugccu

SEQ ID NO: 2307594 - RNA, 19 nt, Artificial Sequence
  Description of Artificial Sequence: Synthetic oligonucleotide
gggcucaccaccgcagguc

SEQ ID NO: 2307595 - RNA, 19 nt, Artificial Sequence
  Description of Artificial Sequence: Synthetic oligonucleotide
ggcaacucuuccccacucu

SEQ ID NO: 2307596 - RNA, 19 nt, Artificial Sequence
  Description of Artificial Sequence: Synthetic oligonucleotide
ccaauaagguggcuauacu

SEQ ID NO: 2307597 - RNA, 19 nt, Artificial Sequence
  Description of Artificial Sequence: Synthetic oligonucleotide
gcugcuccuuugccaauaa

SEQ ID NO: 2307598 - RNA, 19 nt, Artificial Sequence
  Description of Artificial Sequence: Synthetic oligonucleotide
agcgaguaucccgcuuguu

SEQ ID NO: 2307599 - RNA, 19 nt, Artificial Sequence
  Description of Artificial Sequence: Synthetic oligonucleotide
uugcgccggcucuccuggu

SEQ ID NO: 2307600 - RNA, 19 nt, Artificial Sequence
  Description of Artificial Sequence: Synthetic oligonucleotide
uagcgacagucgucaucuu

SEQ ID NO: 2307601 - RNA, 19 nt, Artificial Sequence
  Description of Artificial Sequence: Synthetic oligonucleotide
cgugacgguaggaguccag

SEQ ID NO: 2307602 - RNA, 19 nt, Artificial Sequence
  Description of Artificial Sequence: Synthetic oligonucleotide
ccaugccccugccuugcug

SEQ ID NO: 2307603 - RNA, 19 nt, Artificial Sequence
  Description of Artificial Sequence: Synthetic oligonucleotide
cgcagacguuucuuggcuc

SEQ ID NO: 2307604 - RNA, 19 nt, Artificial Sequence
  Description of Artificial Sequence: Synthetic oligonucleotide
gcgccggcucuccugguca

SEQ ID NO: 2307605 - RNA, 19 nt, Artificial Sequence
  Description of Artificial Sequence: Synthetic oligonucleotide
gccugagugacagcuggua

SEQ ID NO: 2307606 - RNA, 19 nt, Artificial Sequence
  Description of Artificial Sequence: Synthetic oligonucleotide
ggccuguagcaugugggcu

SEQ ID NO: 2307607 - RNA, 19 nt, Artificial Sequence
  Description of Artificial Sequence: Synthetic oligonucleotide
ggccucuucuauggagcga

SEQ ID NO: 2307608 - RNA, 19 nt, Artificial Sequence
  Description of Artificial Sequence: Synthetic oligonucleotide
ggcuggguggcuucuccau

SEQ ID NO: 2307609 - RNA, 19 nt, Artificial Sequence
  Description of Artificial Sequence: Synthetic oligonucleotide
cuggucaccgaggcugggu

SEQ ID NO: 2307610 - RNA, 19 nt, Artificial Sequence
  Description of Artificial Sequence: Synthetic oligonucleotide
ggccuugcgccggcucucc

SEQ ID NO: 2307611 - RNA, 19 nt, Artificial Sequence
  Description of Artificial Sequence: Synthetic oligonucleotide
gcaugugggcugcaucuuu

SEQ ID NO: 2307612 - RNA, 19 nt, Artificial Sequence
  Description of Artificial Sequence: Synthetic oligonucleotide
cgggcacacagccauaggu

SEQ ID NO: 2307613 - RNA, 19 nt, Artificial Sequence
  Description of Artificial Sequence: Synthetic oligonucleotide
cagacaccucuuucuccau

SEQ ID NO: 2307614 - RNA, 19 nt, Artificial Sequence
  Description of Artificial Sequence: Synthetic oligonucleotide
gcuccaggauggguccuga

SEQ ID NO: 2307615 - RNA, 19 nt, Artificial Sequence
  Description of Artificial Sequence: Synthetic oligonucleotide
ccgcagacguuucuuggcu

SEQ ID NO: 2307616 - RNA, 19 nt, Artificial Sequence
  Description of Artificial Sequence: Synthetic oligonucleotide
ccgcaggucccugcuuggc

SEQ ID NO: 2307617 - RNA, 19 nt, Artificial Sequence
  Description of Artificial Sequence: Synthetic oligonucleotide
gguccgccaucuugggaau

SEQ ID NO: 2307618 - RNA, 19 nt, Artificial Sequence
  Description of Artificial Sequence: Synthetic oligonucleotide
cacagccauaggucuuguu

SEQ ID NO: 2307619 - RNA, 19 nt, Artificial Sequence
  Description of Artificial Sequence: Synthetic oligonucleotide
cgcuagcagggcucaccac

SEQ ID NO: 2307620 - RNA, 19 nt, Artificial Sequence
  Description of Artificial Sequence: Synthetic oligonucleotide
gcuggaggucaaagggagu

SEQ ID NO: 2307621 - RNA, 19 nt, Artificial Sequence
  Description of Artificial Sequence: Synthetic oligonucleotide
gugcgaugccuaggaggua

SEQ ID NO: 2307622 - RNA, 19 nt, Artificial Sequence
  Description of Artificial Sequence: Synthetic oligonucleotide
gggccuugcgccggcucuc

SEQ ID NO: 2307623 - RNA, 19 nt, Artificial Sequence
  Description of Artificial Sequence: Synthetic oligonucleotide
ggccacgggcacacagcca

SEQ ID NO: 2307624 - RNA, 19 nt, Artificial Sequence
  Description of Artificial Sequence: Synthetic oligonucleotide
gcacacagccauaggucuu

SEQ ID NO: 2307625 - RNA, 19 nt, Artificial Sequence
  Description of Artificial Sequence: Synthetic oligonucleotide
ccucuucuauggagcgagu

SEQ ID NO: 2307626 - RNA, 19 nt, Artificial Sequence
  Description of Artificial Sequence: Synthetic oligonucleotide
cccugccuugcuggagguc

SEQ ID NO: 2307627 - RNA, 19 nt, Artificial Sequence
  Description of Artificial Sequence: Synthetic oligonucleotide
ccgugacgguaggagucca

SEQ ID NO: 2307628 - RNA, 19 nt, Artificial Sequence
  Description of Artificial Sequence: Synthetic oligonucleotide
gcgaugccuaggagguagu

SEQ ID NO: 2307629 - RNA, 19 nt, Artificial Sequence
  Description of Artificial Sequence: Synthetic oligonucleotide
caccgaggcuggguggcuu

SEQ ID NO: 2307630 - RNA, 19 nt, Artificial Sequence
  Description of Artificial Sequence: Synthetic oligonucleotide
ccacaucguggaguaugcu

SEQ ID NO: 2307631 - RNA, 19 nt, Artificial Sequence
  Description of Artificial Sequence: Synthetic oligonucleotide
ccacgggcacacagccaua

SEQ ID NO: 2307632 - RNA, 19 nt, Artificial Sequence
  Description of Artificial Sequence: Synthetic oligonucleotide
gccuugcgccggcucuccu

SEQ ID NO: 2307633 - RNA, 19 nt, Artificial Sequence
  Description of Artificial Sequence: Synthetic oligonucleotide
cucgggccuugcgccggcu

SEQ ID NO: 2307634 - RNA, 19 nt, Artificial Sequence
  Description of Artificial Sequence: Synthetic oligonucleotide
ccacucugccgcagacguu

SEQ ID NO: 2307635 - RNA, 19 nt, Artificial Sequence
  Description of Artificial Sequence: Synthetic oligonucleotide
ccaguagguccgccaucuu

SEQ ID NO: 2307636 - RNA, 19 nt, Artificial Sequence
  Description of Artificial Sequence: Synthetic oligonucleotide
cgaugccuaggagguaguu

SEQ ID NO: 2307637 - RNA, 19 nt, Artificial Sequence
  Description of Artificial Sequence: Synthetic oligonucleotide
ccaccgcaggucccugcuu

SEQ ID NO: 2307638 - RNA, 19 nt, Artificial Sequence
  Description of Artificial Sequence: Synthetic oligonucleotide
aaucauuaguugcuggucc

SEQ ID NO: 2307639 - RNA, 19 nt, Artificial Sequence
  Description of Artificial Sequence: Synthetic oligonucleotide
auauuucacgcuuagugcc

SEQ ID NO: 2307640 - RNA, 19 nt, Artificial Sequence
  Description of Artificial Sequence: Synthetic oligonucleotide
gaugcaucaauguaggaag

SEQ ID NO: 2307641 - RNA, 19 nt, Artificial Sequence
  Description of Artificial Sequence: Synthetic oligonucleotide
ugugcugccauacacauug

SEQ ID NO: 2307642 - RNA, 19 nt, Artificial Sequence
  Description of Artificial Sequence: Synthetic oligonucleotide
uguaaacuguucaucaggg

SEQ ID NO: 2307643 - RNA, 19 nt, Artificial Sequence
  Description of Artificial Sequence: Synthetic oligonucleotide
acgaugacuagccaggucc

SEQ ID NO: 2307644 - RNA, 19 nt, Artificial Sequence
  Description of Artificial Sequence: Synthetic oligonucleotide
ucuuuaaaucauuaguugc

SEQ ID NO: 2307645 - RNA, 19 nt, Artificial Sequence
  Description of Artificial Sequence: Synthetic oligonucleotide
ucuuggugggcucaaaagg

SEQ ID NO: 2307646 - RNA, 19 nt, Artificial Sequence
  Description of Artificial Sequence: Synthetic oligonucleotide
gauucuaugggccagcuuc

SEQ ID NO: 2307647 - RNA, 19 nt, Artificial Sequence
  Description of Artificial Sequence: Synthetic oligonucleotide
uuaaaucauuaguugcugg

SEQ ID NO: 2307648 - RNA, 19 nt, Artificial Sequence
  Description of Artificial Sequence: Synthetic oligonucleotide
uuugcacucacaaacugug

SEQ ID NO: 2307649 - RNA, 19 nt, Artificial Sequence
  Description of Artificial Sequence: Synthetic oligonucleotide
aaucaugacagagaaacga

SEQ ID NO: 2307650 - RNA, 19 nt, Artificial Sequence
  Description of Artificial Sequence: Synthetic oligonucleotide
auguuugccauauuucacg

SEQ ID NO: 2307651 - RNA, 19 nt, Artificial Sequence
  Description of Artificial Sequence: Synthetic oligonucleotide
cauauuucacgcuuagugc

SEQ ID NO: 2307652 - RNA, 19 nt, Artificial Sequence
  Description of Artificial Sequence: Synthetic oligonucleotide
uuggaugcaucaauguagg

SEQ ID NO: 2307653 - RNA, 19 nt, Artificial Sequence
  Description of Artificial Sequence: Synthetic oligonucleotide
gaugcugcgggcuucgugg

SEQ ID NO: 2307654 - RNA, 19 nt, Artificial Sequence
  Description of Artificial Sequence: Synthetic oligonucleotide
ucaugacagagaaacgagg

SEQ ID NO: 2307655 - RNA, 19 nt, Artificial Sequence
  Description of Artificial Sequence: Synthetic oligonucleotide
  modified_base (4)..(4): a, c, u, g, unknown or other
cucncaaggauucuauggg

SEQ ID NO: 2307656 - RNA, 19 nt, Artificial Sequence
  Description of Artificial Sequence: Synthetic oligonucleotide
  modified_base (10)..(10): a, c, u, g, unknown or other
ucuaagcucncaaggauuc

SEQ ID NO: 2307657 - RNA, 19 nt, Artificial Sequence
  Description of Artificial Sequence: Synthetic oligonucleotide
uguggcauugcugagaugu

SEQ ID NO: 2307658 - RNA, 19 nt, Artificial Sequence
  Description of Artificial Sequence: Synthetic oligonucleotide
aaaucauuaguugcugguc

SEQ ID NO: 2307659 - RNA, 19 nt, Artificial Sequence
  Description of Artificial Sequence: Synthetic oligonucleotide
gaucgcacaaagaacaugc

SEQ ID NO: 2307660 - RNA, 19 nt, Artificial Sequence
  Description of Artificial Sequence: Synthetic oligonucleotide
uguguuguugcuaugggau

SEQ ID NO: 2307661 - RNA, 19 nt, Artificial Sequence
  Description of Artificial Sequence: Synthetic oligonucleotide
accacugucguccacgcac

SEQ ID NO: 2307662 - RNA, 19 nt, Artificial Sequence
  Description of Artificial Sequence: Synthetic oligonucleotide
uuauggguggcugaugugg

SEQ ID NO: 2307663 - RNA, 19 nt, Artificial Sequence
  Description of Artificial Sequence: Synthetic oligonucleotide
uaaaucauuaguugcuggu

SEQ ID NO: 2307664 - RNA, 19 nt, Artificial Sequence
  Description of Artificial Sequence: Synthetic oligonucleotide
agauguuugccauauuuca

SEQ ID NO: 2307665 - RNA, 19 nt, Artificial Sequence
  Description of Artificial Sequence: Synthetic oligonucleotide
agagaaacgagggaggguc

SEQ ID NO: 2307666 - RNA, 19 nt, Artificial Sequence
  Description of Artificial Sequence: Synthetic oligonucleotide
auuggaugcaucaauguag

SEQ ID NO: 2307667 - RNA, 19 nt, Artificial Sequence
  Description of Artificial Sequence: Synthetic oligonucleotide
cacauugcugcaaugcugg

SEQ ID NO: 2307668 - RNA, 19 nt, Artificial Sequence
  Description of Artificial Sequence: Synthetic oligonucleotide
acaaacugugcaccugucc

SEQ ID NO: 2307669 - RNA, 19 nt, Artificial Sequence
  Description of Artificial Sequence: Synthetic oligonucleotide
ugagauguuugccauauuu

SEQ ID NO: 2307670 - RNA, 19 nt, Artificial Sequence
  Description of Artificial Sequence: Synthetic oligonucleotide
aagaacaugcagcgggcuc

SEQ ID NO: 2307671 - RNA, 19 nt, Artificial Sequence
  Description of Artificial Sequence: Synthetic oligonucleotide
gacacuaaggcuuuuccuc

SEQ ID NO: 2307672 - RNA, 19 nt, Artificial Sequence
  Description of Artificial Sequence: Synthetic oligonucleotide
cacugcaucaacaugugug

SEQ ID NO: 2307673 - RNA, 19 nt, Artificial Sequence
  Description of Artificial Sequence: Synthetic oligonucleotide
uucuaagccgccuugcucu

SEQ ID NO: 2307674 - RNA, 19 nt, Artificial Sequence
  Description of Artificial Sequence: Synthetic oligonucleotide
aguucaugagcagagaugu

SEQ ID NO: 2307675 - RNA, 19 nt, Artificial Sequence
  Description of Artificial Sequence: Synthetic oligonucleotide
uguguaaacuguucaucag

SEQ ID NO: 2307676 - RNA, 19 nt, Artificial Sequence
  Description of Artificial Sequence: Synthetic oligonucleotide
uucaugagcagagauguca

SEQ ID NO: 2307677 - RNA, 19 nt, Artificial Sequence
  Description of Artificial Sequence: Synthetic oligonucleotide
uuugccauauuucacgcuu

SEQ ID NO: 2307678 - RNA, 19 nt, Artificial Sequence
  Description of Artificial Sequence: Synthetic oligonucleotide
agagaaccgagccuggcuc

SEQ ID NO: 2307679 - RNA, 19 nt, Artificial Sequence
  Description of Artificial Sequence: Synthetic oligonucleotide
cuaugggccagcuucgagg

SEQ ID NO: 2307680 - RNA, 19 nt, Artificial Sequence
  Description of Artificial Sequence: Synthetic oligonucleotide
ucgcacaaagaacaugcag

SEQ ID NO: 2307681 - RNA, 19 nt, Artificial Sequence
  Description of Artificial Sequence: Synthetic oligonucleotide
aggugcuuagcgcagggac

SEQ ID NO: 2307682 - RNA, 19 nt, Artificial Sequence
  Description of Artificial Sequence: Synthetic oligonucleotide
auuaccucugucccaauca

SEQ ID NO: 2307683 - RNA, 19 nt, Artificial Sequence
  Description of Artificial Sequence: Synthetic oligonucleotide
uuucugaggucugugauga

SEQ ID NO: 2307684 - RNA, 19 nt, Artificial Sequence
  Description of Artificial Sequence: Synthetic oligonucleotide
cuuuguguuguugcuaugg

SEQ ID NO: 2307685 - RNA, 19 nt, Artificial Sequence
  Description of Artificial Sequence: Synthetic oligonucleotide
  modified_base (2)..(2): a, c, u, g, unknown or other
cncaaggauucuaugggcc

SEQ ID NO: 2307686 - RNA, 19 nt, Artificial Sequence
  Description of Artificial Sequence: Synthetic oligonucleotide
  modified_base (3)..(3): a, c, u, g, unknown or other
ucncaaggauucuaugggc

SEQ ID NO: 2307687 - RNA, 19 nt, Artificial Sequence
  Description of Artificial Sequence: Synthetic oligonucleotide
uguggaguccaggucaugg

SEQ ID NO: 2307688 - RNA, 19 nt, Artificial Sequence
  Description of Artificial Sequence: Synthetic oligonucleotide
cuugccagaccucugcacg

SEQ ID NO: 2307689 - RNA, 19 nt, Artificial Sequence
  Description of Artificial Sequence: Synthetic oligonucleotide
  modified_base (14)..(14): a, c, u, g, unknown or other
gccaucuaagcucncaagg

SEQ ID NO: 2307690 - RNA, 19 nt, Artificial Sequence
  Description of Artificial Sequence: Synthetic oligonucleotide
uguuugccauauuucacgc

SEQ ID NO: 2307691 - RNA, 19 nt, Artificial Sequence
  Description of Artificial Sequence: Synthetic oligonucleotide
aucaauguaggaagugagc

SEQ ID NO: 2307692 - RNA, 19 nt, Artificial Sequence
  Description of Artificial Sequence: Synthetic oligonucleotide
aaacuguucaucaggguga

SEQ ID NO: 2307693 - RNA, 19 nt, Artificial Sequence
  Description of Artificial Sequence: Synthetic oligonucleotide
uccaagugcuuaugggugg

SEQ ID NO: 2307694 - RNA, 19 nt, Artificial Sequence
  Description of Artificial Sequence: Synthetic oligonucleotide
aacgagggagggucauugc

SEQ ID NO: 2307695 - RNA, 19 nt, Artificial Sequence
  Description of Artificial Sequence: Synthetic oligonucleotide
uuaccucugucccaaucag

SEQ ID NO: 2307696 - RNA, 19 nt, Artificial Sequence
  Description of Artificial Sequence: Synthetic oligonucleotide
uccuuccaagugcuuaugg

SEQ ID NO: 2307697 - RNA, 19 nt, Artificial Sequence
  Description of Artificial Sequence: Synthetic oligonucleotide
aucaacauguguguaaacu

SEQ ID NO: 2307698 - RNA, 19 nt, Artificial Sequence
  Description of Artificial Sequence: Synthetic oligonucleotide
cucgaucgcacaaagaaca

SEQ ID NO: 2307699 - RNA, 19 nt, Artificial Sequence
  Description of Artificial Sequence: Synthetic oligonucleotide
  modified_base (5)..(5): a, c, u, g, unknown or other
gcucncaaggauucuaugg

SEQ ID NO: 2307700 - RNA, 19 nt, Artificial Sequence
  Description of Artificial Sequence: Synthetic oligonucleotide
augggauucaccacugucg

SEQ ID NO: 2307701 - RNA, 19 nt, Artificial Sequence
  Description of Artificial Sequence: Synthetic oligonucleotide
gcacaaagaacaugcagcg

SEQ ID NO: 2307702 - RNA, 19 nt, Artificial Sequence
  Description of Artificial Sequence: Synthetic oligonucleotide
uuaagcagacaggacagca

SEQ ID NO: 2307703 - RNA, 19 nt, Artificial Sequence
  Description of Artificial Sequence: Synthetic oligonucleotide
gagcagagaugucaugccg

SEQ ID NO: 2307704 - RNA, 19 nt, Artificial Sequence
  Description of Artificial Sequence: Synthetic oligonucleotide
ccauauuucacgcuuagug

SEQ ID NO: 2307705 - RNA, 19 nt, Artificial Sequence
  Description of Artificial Sequence: Synthetic oligonucleotide
uuagugccuucuaagccgc

SEQ ID NO: 2307706 - RNA, 19 nt, Artificial Sequence
  Description of Artificial Sequence: Synthetic oligonucleotide
aaggauucuaugggccagc

SEQ ID NO: 2307707 - RNA, 19 nt, Artificial Sequence
  Description of Artificial Sequence: Synthetic oligonucleotide
cacauuggaugcaucaaug

SEQ ID NO: 2307708 - RNA, 19 nt, Artificial Sequence
  Description of Artificial Sequence: Synthetic oligonucleotide
gucauggucaaggaacugg

SEQ ID NO: 2307709 - RNA, 19 nt, Artificial Sequence
  Description of Artificial Sequence: Synthetic oligonucleotide
accguuugcauuuccauaa

SEQ ID NO: 2307710 - RNA, 19 nt, Artificial Sequence
  Description of Artificial Sequence: Synthetic oligonucleotide
uucaccacugucguccacg

SEQ ID NO: 2307711 - RNA, 19 nt, Artificial Sequence
  Description of Artificial Sequence: Synthetic oligonucleotide
ugguugaucugcucucgcg

SEQ ID NO: 2307712 - RNA, 19 nt, Artificial Sequence
  Description of Artificial Sequence: Synthetic oligonucleotide
aaacgagggagggucauug

SEQ ID NO: 2307713 - RNA, 19 nt, Artificial Sequence
  Description of Artificial Sequence: Synthetic oligonucleotide
ucugaggucugugaugacc

SEQ ID NO: 2307714 - RNA, 19 nt, Artificial Sequence
  Description of Artificial Sequence: Synthetic oligonucleotide
uagcgcagggacacuaagg

SEQ ID NO: 2307715 - RNA, 19 nt, Artificial Sequence
  Description of Artificial Sequence: Synthetic oligonucleotide
guugaucugcucucgcggg

SEQ ID NO: 2307716 - RNA, 19 nt, Artificial Sequence
  Description of Artificial Sequence: Synthetic oligonucleotide
agcagagaugucaugccgc

SEQ ID NO: 2307717 - RNA, 19 nt, Artificial Sequence
  Description of Artificial Sequence: Synthetic oligonucleotide
caaagaacaugcagcgggc

SEQ ID NO: 2307718 - RNA, 19 nt, Artificial Sequence
  Description of Artificial Sequence: Synthetic oligonucleotide
uauuucacgcuuagugccu

SEQ ID NO: 2307719 - RNA, 19 nt, Artificial Sequence
  Description of Artificial Sequence: Synthetic oligonucleotide
ugggauucaccacugucgu

SEQ ID NO: 2307720 - RNA, 19 nt, Artificial Sequence
  Description of Artificial Sequence: Synthetic oligonucleotide
  modified_base (16)..(16): a, c, u, g, unknown or other
uugccaucuaagcucncaa

SEQ ID NO: 2307721 - RNA, 19 nt, Artificial Sequence
  Description of Artificial Sequence: Synthetic oligonucleotide
acauuggaugcaucaaugu

SEQ ID NO: 2307722 - RNA, 19 nt, Artificial Sequence
  Description of Artificial Sequence: Synthetic oligonucleotide
ugugaugaccguuugcauu

SEQ ID NO: 2307723 - RNA, 19 nt, Artificial Sequence
  Description of Artificial Sequence: Synthetic oligonucleotide
uuagcgcagggacacuaag

SEQ ID NO: 2307724 - RNA, 19 nt, Artificial Sequence
  Description of Artificial Sequence: Synthetic oligonucleotide
ugccauauuucacgcuuag

SEQ ID NO: 2307725 - RNA, 19 nt, Artificial Sequence
  Description of Artificial Sequence: Synthetic oligonucleotide
agaguucaugagcagagau

SEQ ID NO: 2307726 - RNA, 19 nt, Artificial Sequence
  Description of Artificial Sequence: Synthetic oligonucleotide
uguguguaaacuguucauc

SEQ ID NO: 2307727 - RNA, 19 nt, Artificial Sequence
  Description of Artificial Sequence: Synthetic oligonucleotide
ugcaucaacauguguguaa

SEQ ID NO: 2307728 - RNA, 19 nt, Artificial Sequence
  Description of Artificial Sequence: Synthetic oligonucleotide
gaagugagcugguugaucu

SEQ ID NO: 2307729 - RNA, 19 nt, Artificial Sequence
  Description of Artificial Sequence: Synthetic oligonucleotide
uuguguuguugcuauggga

SEQ ID NO: 2307730 - RNA, 19 nt, Artificial Sequence
  Description of Artificial Sequence: Synthetic oligonucleotide
gauguuugccauauuucac

SEQ ID NO: 2307731 - RNA, 19 nt, Artificial Sequence
  Description of Artificial Sequence: Synthetic oligonucleotide
caggccacgaugacuagcc

SEQ ID NO: 2307732 - RNA, 19 nt, Artificial Sequence
  Description of Artificial Sequence: Synthetic oligonucleotide
aaggaagcagaggcuugcc

SEQ ID NO: 2307733 - RNA, 19 nt, Artificial Sequence
  Description of Artificial Sequence: Synthetic oligonucleotide
uauggguggcugauguggc

SEQ ID NO: 2307734 - RNA, 19 nt, Artificial Sequence
  Description of Artificial Sequence: Synthetic oligonucleotide
ugagccgagacuccaggcu

SEQ ID NO: 2307735 - RNA, 19 nt, Artificial Sequence
  Description of Artificial Sequence: Synthetic oligonucleotide
uggcucagagccacgacug

SEQ ID NO: 2307736 - RNA, 19 nt, Artificial Sequence
  Description of Artificial Sequence: Synthetic oligonucleotide
ugcccuuaagcagacagga

SEQ ID NO: 2307737 - RNA, 19 nt, Artificial Sequence
  Description of Artificial Sequence: Synthetic oligonucleotide
acacuaaggcuuuuccucu

SEQ ID NO: 2307738 - RNA, 19 nt, Artificial Sequence
  Description of Artificial Sequence: Synthetic oligonucleotide
caauguaggaagugagcug

SEQ ID NO: 2307739 - RNA, 19 nt, Artificial Sequence
  Description of Artificial Sequence: Synthetic oligonucleotide
ucguccacgcacucugugg

SEQ ID NO: 2307740 - RNA, 19 nt, Artificial Sequence
  Description of Artificial Sequence: Synthetic oligonucleotide
uaugggccagcuucgaggu

SEQ ID NO: 2307741 - RNA, 19 nt, Artificial Sequence
  Description of Artificial Sequence: Synthetic oligonucleotide
ucuaugggccagcuucgag

SEQ ID NO: 2307742 - RNA, 19 nt, Artificial Sequence
  Description of Artificial Sequence: Synthetic oligonucleotide
gguugaucugcucucgcgg

SEQ ID NO: 2307743 - RNA, 19 nt, Artificial Sequence
  Description of Artificial Sequence: Synthetic oligonucleotide
cauguguguaaacuguuca

SEQ ID NO: 2307744 - RNA, 19 nt, Artificial Sequence
  Description of Artificial Sequence: Synthetic oligonucleotide
acgcuuagugccuucuaag

SEQ ID NO: 2307745 - RNA, 19 nt, Artificial Sequence
  Description of Artificial Sequence: Synthetic oligonucleotide
gaguucaugagcagagaug

SEQ ID NO: 2307746 - RNA, 19 nt, Artificial Sequence
  Description of Artificial Sequence: Synthetic oligonucleotide
  modified_base (15)..(15): a, c, u, g, unknown or other
ugccaucuaagcucncaag

SEQ ID NO: 2307747 - RNA, 19 nt, Artificial Sequence
  Description of Artificial Sequence: Synthetic oligonucleotide
uccacuuuguguuguugcu

SEQ ID NO: 2307748 - RNA, 19 nt, Artificial Sequence
  Description of Artificial Sequence: Synthetic oligonucleotide
aucauuaguugcugguccu

SEQ ID NO: 2307749 - RNA, 19 nt, Artificial Sequence
  Description of Artificial Sequence: Synthetic oligonucleotide
acgacuguggaguccaggu

SEQ ID NO: 2307750 - RNA, 19 nt, Artificial Sequence
  Description of Artificial Sequence: Synthetic oligonucleotide
cugcacgaugcccugacgc

SEQ ID NO: 2307751 - RNA, 19 nt, Artificial Sequence
  Description of Artificial Sequence: Synthetic oligonucleotide
gguuaucuguuuucugagg

SEQ ID NO: 2307752 - RNA, 19 nt, Artificial Sequence
  Description of Artificial Sequence: Synthetic oligonucleotide
cuccacuccgcacacgggg

SEQ ID NO: 2307753 - RNA, 19 nt, Artificial Sequence
  Description of Artificial Sequence: Synthetic oligonucleotide
uguuguugcuaugggauuc

SEQ ID NO: 2307754 - RNA, 19 nt, Artificial Sequence
  Description of Artificial Sequence: Synthetic oligonucleotide
acacauuggaugcaucaau

SEQ ID NO: 2307755 - RNA, 19 nt, Artificial Sequence
  Description of Artificial Sequence: Synthetic oligonucleotide
agaccucugcacgaugccc

SEQ ID NO: 2307756 - RNA, 19 nt, Artificial Sequence
  Description of Artificial Sequence: Synthetic oligonucleotide
ugcaucaauguaggaagug

SEQ ID NO: 2307757 - RNA, 19 nt, Artificial Sequence
  Description of Artificial Sequence: Synthetic oligonucleotide
cgcacaaagaacaugcagc

SEQ ID NO: 2307758 - RNA, 19 nt, Artificial Sequence
  Description of Artificial Sequence: Synthetic oligonucleotide
cauaaugaacuucuuuaaa

SEQ ID NO: 2307759 - RNA, 19 nt, Artificial Sequence
  Description of Artificial Sequence: Synthetic oligonucleotide
aagugagcugguugaucug

SEQ ID NO: 2307760 - RNA, 19 nt, Artificial Sequence
  Description of Artificial Sequence: Synthetic oligonucleotide
agugcuuauggguggcuga

SEQ ID NO: 2307761 - RNA, 19 nt, Artificial Sequence
  Description of Artificial Sequence: Synthetic oligonucleotide
aaagaacaugcagcgggcu

SEQ ID NO: 2307762 - RNA, 19 nt, Artificial Sequence
  Description of Artificial Sequence: Synthetic oligonucleotide
augcccugacgcaacaggc

SEQ ID NO: 2307763 - RNA, 19 nt, Artificial Sequence
  Description of Artificial Sequence: Synthetic oligonucleotide
gcuuagugccuucuaagcc

SEQ ID NO: 2307764 - RNA, 19 nt, Artificial Sequence
  Description of Artificial Sequence: Synthetic oligonucleotide
accucugucccaaucagug

SEQ ID NO: 2307765 - RNA, 19 nt, Artificial Sequence
  Description of Artificial Sequence: Synthetic oligonucleotide
gauuaccucugucccaauc

SEQ ID NO: 2307766 - RNA, 19 nt, Artificial Sequence
  Description of Artificial Sequence: Synthetic oligonucleotide
cacucacaaacugugcacc

SEQ ID NO: 2307767 - RNA, 19 nt, Artificial Sequence
  Description of Artificial Sequence: Synthetic oligonucleotide
ugcacgaugcccugacgca

SEQ ID NO: 2307768 - RNA, 19 nt, Artificial Sequence
  Description of Artificial Sequence: Synthetic oligonucleotide
gagccgagacuccaggcug

SEQ ID NO: 2307769 - RNA, 19 nt, Artificial Sequence
  Description of Artificial Sequence: Synthetic oligonucleotide
agcagaggcuugccagacc

SEQ ID NO: 2307770 - RNA, 19 nt, Artificial Sequence
  Description of Artificial Sequence: Synthetic oligonucleotide
ugcccugacgcaacaggcc

SEQ ID NO: 2307771 - RNA, 19 nt, Artificial Sequence
  Description of Artificial Sequence: Synthetic oligonucleotide
uuggugggcucaaaaggaa

SEQ ID NO: 2307772 - RNA, 19 nt, Artificial Sequence
  Description of Artificial Sequence: Synthetic oligonucleotide
auucuaugggccagcuucg

SEQ ID NO: 2307773 - RNA, 19 nt, Artificial Sequence
  Description of Artificial Sequence: Synthetic oligonucleotide
caugcagcgggcuccacuc

SEQ ID NO: 2307774 - RNA, 19 nt, Artificial Sequence
  Description of Artificial Sequence: Synthetic oligonucleotide
ugucaugccgcugccacac

SEQ ID NO: 2307775 - RNA, 19 nt, Artificial Sequence
  Description of Artificial Sequence: Synthetic oligonucleotide
gaugaccguuugcauuucc

SEQ ID NO: 2307776 - RNA, 19 nt, Artificial Sequence
  Description of Artificial Sequence: Synthetic oligonucleotide
augaacuucuuuaaaucau

SEQ ID NO: 2307777 - RNA, 19 nt, Artificial Sequence
  Description of Artificial Sequence: Synthetic oligonucleotide
cuucgaggugcuuagcgca

SEQ ID NO: 2307778 - RNA, 19 nt, Artificial Sequence
  Description of Artificial Sequence: Synthetic oligonucleotide
caugccgcugccacacacg

SEQ ID NO: 2307779 - RNA, 19 nt, Artificial Sequence
  Description of Artificial Sequence: Synthetic oligonucleotide
  modified_base (6)..(6): a, c, u, g, unknown or other
agcucncaaggauucuaug

SEQ ID NO: 2307780 - RNA, 19 nt, Artificial Sequence
  Description of Artificial Sequence: Synthetic oligonucleotide
gggugauuaccucuguccc

SEQ ID NO: 2307781 - RNA, 19 nt, Artificial Sequence
  Description of Artificial Sequence: Synthetic oligonucleotide
agcagacaggacagcaggc

SEQ ID NO: 2307782 - RNA, 19 nt, Artificial Sequence
  Description of Artificial Sequence: Synthetic oligonucleotide
gaugacuagccaggucccg

SEQ ID NO: 2307783 - RNA, 19 nt, Artificial Sequence
  Description of Artificial Sequence: Synthetic oligonucleotide
augacuagccaggucccgg

SEQ ID NO: 2307784 - RNA, 19 nt, Artificial Sequence
  Description of Artificial Sequence: Synthetic oligonucleotide
  modified_base (7)..(7): a, c, u, g, unknown or other
aagcucncaaggauucuau

SEQ ID NO: 2307785 - RNA, 19 nt, Artificial Sequence
  Description of Artificial Sequence: Synthetic oligonucleotide
acacacggggcucgaucgc

SEQ ID NO: 2307786 - RNA, 19 nt, Artificial Sequence
  Description of Artificial Sequence: Synthetic oligonucleotide
ggguacacagaguucauga

SEQ ID NO: 2307787 - RNA, 19 nt, Artificial Sequence
  Description of Artificial Sequence: Synthetic oligonucleotide
cugucguccacgcacucug

SEQ ID NO: 2307788 - RNA, 19 nt, Artificial Sequence
  Description of Artificial Sequence: Synthetic oligonucleotide
uacacauuggaugcaucaa

SEQ ID NO: 2307789 - RNA, 19 nt, Artificial Sequence
  Description of Artificial Sequence: Synthetic oligonucleotide
uggcugauguggcauugcu

SEQ ID NO: 2307790 - RNA, 19 nt, Artificial Sequence
  Description of Artificial Sequence: Synthetic oligonucleotide
ggcucgaucgcacaaagaa

SEQ ID NO: 2307791 - RNA, 19 nt, Artificial Sequence
  Description of Artificial Sequence: Synthetic oligonucleotide
cuucuaagccgccuugcuc

SEQ ID NO: 2307792 - RNA, 19 nt, Artificial Sequence
  Description of Artificial Sequence: Synthetic oligonucleotide
acgagggagggucauugcu

SEQ ID NO: 2307793 - RNA, 19 nt, Artificial Sequence
  Description of Artificial Sequence: Synthetic oligonucleotide
cuguucaucagggugauua

SEQ ID NO: 2307794 - RNA, 19 nt, Artificial Sequence
  Description of Artificial Sequence: Synthetic oligonucleotide
caacaggccacgaugacua

SEQ ID NO: 2307795 - RNA, 19 nt, Artificial Sequence
  Description of Artificial Sequence: Synthetic oligonucleotide
cacaaagaacaugcagcgg

SEQ ID NO: 2307796 - RNA, 19 nt, Artificial Sequence
  Description of Artificial Sequence: Synthetic oligonucleotide
guucaucagggugauuacc

SEQ ID NO: 2307797 - RNA, 19 nt, Artificial Sequence
  Description of Artificial Sequence: Synthetic oligonucleotide
ucuguggugcugagccgag

SEQ ID NO: 2307798 - RNA, 19 nt, Artificial Sequence
  Description of Artificial Sequence: Synthetic oligonucleotide
uugaucugcucucgcgggu

SEQ ID NO: 2307799 - RNA, 19 nt, Artificial Sequence
  Description of Artificial Sequence: Synthetic oligonucleotide
augcuggcccgucagagaa

SEQ ID NO: 2307800 - RNA, 19 nt, Artificial Sequence
  Description of Artificial Sequence: Synthetic oligonucleotide
  modified_base (8)..(8): a, c, u, g, unknown or other
uaagcucncaaggauucua

SEQ ID NO: 2307801 - RNA, 19 nt, Artificial Sequence
  Description of Artificial Sequence: Synthetic oligonucleotide
ugacuagccaggucccgga

SEQ ID NO: 2307802 - RNA, 19 nt, Artificial Sequence
  Description of Artificial Sequence: Synthetic oligonucleotide
cagacaggacagcaggcac

SEQ ID NO: 2307803 - RNA, 19 nt, Artificial Sequence
  Description of Artificial Sequence: Synthetic oligonucleotide
ucaccacugucguccacgc

SEQ ID NO: 2307804 - RNA, 19 nt, Artificial Sequence
  Description of Artificial Sequence: Synthetic oligonucleotide
cucucgcggguacacagag

SEQ ID NO: 2307805 - RNA, 19 nt, Artificial Sequence
  Description of Artificial Sequence: Synthetic oligonucleotide
ucugugcccuuaagcagac

SEQ ID NO: 2307806 - RNA, 19 nt, Artificial Sequence
  Description of Artificial Sequence: Synthetic oligonucleotide
caaugcuggcccgucagag

SEQ ID NO: 2307807 - RNA, 19 nt, Artificial Sequence
  Description of Artificial Sequence: Synthetic oligonucleotide
uuccacaaagcaggugacc

SEQ ID NO: 2307808 - RNA, 19 nt, Artificial Sequence
  Description of Artificial Sequence: Synthetic oligonucleotide
gagaugucaugccgcugcc

SEQ ID NO: 2307809 - RNA, 19 nt, Artificial Sequence
  Description of Artificial Sequence: Synthetic oligonucleotide
cuuauggguggcugaugug

SEQ ID NO: 2307810 - RNA, 19 nt, Artificial Sequence
  Description of Artificial Sequence: Synthetic oligonucleotide
ggcuccacuccgcacacgg

SEQ ID NO: 2307811 - RNA, 19 nt, Artificial Sequence
  Description of Artificial Sequence: Synthetic oligonucleotide
cuuaagcagacaggacagc

SEQ ID NO: 2307812 - RNA, 19 nt, Artificial Sequence
  Description of Artificial Sequence: Synthetic oligonucleotide
uugccagaccucugcacga

SEQ ID NO: 2307813 - RNA, 19 nt, Artificial Sequence
  Description of Artificial Sequence: Synthetic oligonucleotide
gggacacuaaggcuuuucc

SEQ ID NO: 2307814 - RNA, 19 nt, Artificial Sequence
  Description of Artificial Sequence: Synthetic oligonucleotide
ggggaaucaugacagagaa

SEQ ID NO: 2307815 - RNA, 19 nt, Artificial Sequence
  Description of Artificial Sequence: Synthetic oligonucleotide
cauuggaugcaucaaugua

SEQ ID NO: 2307816 - RNA, 19 nt, Artificial Sequence
  Description of Artificial Sequence: Synthetic oligonucleotide
ucgaucgcacaaagaacau

SEQ ID NO: 2307817 - RNA, 19 nt, Artificial Sequence
  Description of Artificial Sequence: Synthetic oligonucleotide
agaggcuugccagaccucu

SEQ ID NO: 2307818 - RNA, 19 nt, Artificial Sequence
  Description of Artificial Sequence: Synthetic oligonucleotide
aggcuggcaagcuuccaca

SEQ ID NO: 2307819 - RNA, 19 nt, Artificial Sequence
  Description of Artificial Sequence: Synthetic oligonucleotide
caucaacauguguguaaac

SEQ ID NO: 2307820 - RNA, 19 nt, Artificial Sequence
  Description of Artificial Sequence: Synthetic oligonucleotide
cugagccgagacuccaggc

SEQ ID NO: 2307821 - RNA, 19 nt, Artificial Sequence
  Description of Artificial Sequence: Synthetic oligonucleotide
cugauguggcauugcugag

SEQ ID NO: 2307822 - RNA, 19 nt, Artificial Sequence
  Description of Artificial Sequence: Synthetic oligonucleotide
acuuuguguuguugcuaug

SEQ ID NO: 2307823 - RNA, 19 nt, Artificial Sequence
  Description of Artificial Sequence: Synthetic oligonucleotide
acaugcagcgggcuccacu

SEQ ID NO: 2307824 - RNA, 19 nt, Artificial Sequence
  Description of Artificial Sequence: Synthetic oligonucleotide
agccgccuugcucucuugg

SEQ ID NO: 2307825 - RNA, 19 nt, Artificial Sequence
  Description of Artificial Sequence: Synthetic oligonucleotide
uugccauauuucacgcuua

SEQ ID NO: 2307826 - RNA, 19 nt, Artificial Sequence
  Description of Artificial Sequence: Synthetic oligonucleotide
ggaugcaucaauguaggaa

SEQ ID NO: 2307827 - RNA, 19 nt, Artificial Sequence
  Description of Artificial Sequence: Synthetic oligonucleotide
ccgagccuggcucagagcc

SEQ ID NO: 2307828 - RNA, 19 nt, Artificial Sequence
  Description of Artificial Sequence: Synthetic oligonucleotide
gaccguuugcauuuccaua

SEQ ID NO: 2307829 - RNA, 19 nt, Artificial Sequence
  Description of Artificial Sequence: Synthetic oligonucleotide
uggaugcaucaauguagga

SEQ ID NO: 2307830 - RNA, 19 nt, Artificial Sequence
  Description of Artificial Sequence: Synthetic oligonucleotide
ggccacgaugacuagccag

SEQ ID NO: 2307831 - RNA, 19 nt, Artificial Sequence
  Description of Artificial Sequence: Synthetic oligonucleotide
gcuucgaggugcuuagcgc

SEQ ID NO: 2307832 - RNA, 19 nt, Artificial Sequence
  Description of Artificial Sequence: Synthetic oligonucleotide
  modified_base (11)..(11): a, c, u, g, unknown or other
aucuaagcucncaaggauu

SEQ ID NO: 2307833 - RNA, 19 nt, Artificial Sequence
  Description of Artificial Sequence: Synthetic oligonucleotide
gugcccuuaagcagacagg

SEQ ID NO: 2307834 - RNA, 19 nt, Artificial Sequence
  Description of Artificial Sequence: Synthetic oligonucleotide
cugguugaucugcucucgc

SEQ ID NO: 2307835 - RNA, 19 nt, Artificial Sequence
  Description of Artificial Sequence: Synthetic oligonucleotide
uggccccacugcaucaaca

SEQ ID NO: 2307836 - RNA, 19 nt, Artificial Sequence
  Description of Artificial Sequence: Synthetic oligonucleotide
ucgaggugcuuagcgcagg

SEQ ID NO: 2307837 - RNA, 19 nt, Artificial Sequence
  Description of Artificial Sequence: Synthetic oligonucleotide
gauucaccacugucgucca

SEQ ID NO: 2307838 - RNA, 19 nt, Artificial Sequence
  Description of Artificial Sequence: Synthetic oligonucleotide
gagaaccgagccuggcuca

SEQ ID NO: 2307839 - RNA, 19 nt, Artificial Sequence
  Description of Artificial Sequence: Synthetic oligonucleotide
cccuuaagcagacaggaca

SEQ ID NO: 2307840 - RNA, 19 nt, Artificial Sequence
  Description of Artificial Sequence: Synthetic oligonucleotide
uggcccgucagagaaccga

SEQ ID NO: 2307841 - RNA, 19 nt, Artificial Sequence
  Description of Artificial Sequence: Synthetic oligonucleotide
uucacgcuuagugccuucu

SEQ ID NO: 2307842 - RNA, 19 nt, Artificial Sequence
  Description of Artificial Sequence: Synthetic oligonucleotide
guuuucugaggucugugau

SEQ ID NO: 2307843 - RNA, 19 nt, Artificial Sequence
  Description of Artificial Sequence: Synthetic oligonucleotide
gugauuaccucugucccaa

SEQ ID NO: 2307844 - RNA, 19 nt, Artificial Sequence
  Description of Artificial Sequence: Synthetic oligonucleotide
gcugagccgagacuccagg

SEQ ID NO: 2307845 - RNA, 19 nt, Artificial Sequence
  Description of Artificial Sequence: Synthetic oligonucleotide
aggucauggucaaggaacu

SEQ ID NO: 2307846 - RNA, 19 nt, Artificial Sequence
  Description of Artificial Sequence: Synthetic oligonucleotide
gugcuuagcgcagggacac

SEQ ID NO: 2307847 - RNA, 19 nt, Artificial Sequence
  Description of Artificial Sequence: Synthetic oligonucleotide
cacgaugcccugacgcaac

SEQ ID NO: 2307848 - RNA, 19 nt, Artificial Sequence
  Description of Artificial Sequence: Synthetic oligonucleotide
  modified_base (13)..(13): a, c, u, g, unknown or other
ccaucuaagcucncaagga

SEQ ID NO: 2307849 - RNA, 19 nt, Artificial Sequence
  Description of Artificial Sequence: Synthetic oligonucleotide
ggcaagcuuccacaaagca

SEQ ID NO: 2307850 - RNA, 19 nt, Artificial Sequence
  Description of Artificial Sequence: Synthetic oligonucleotide
  modified_base (17)..(17): a, c, u, g, unknown or other
guugccaucuaagcucnca

SEQ ID NO: 2307851 - RNA, 19 nt, Artificial Sequence
  Description of Artificial Sequence: Synthetic oligonucleotide
gaucugcucucgcggguac

SEQ ID NO: 2307852 - RNA, 19 nt, Artificial Sequence
  Description of Artificial Sequence: Synthetic oligonucleotide
ggugauuaccucuguccca

SEQ ID NO: 2307853 - RNA, 19 nt, Artificial Sequence
  Description of Artificial Sequence: Synthetic oligonucleotide
uaagccgccuugcucucuu

SEQ ID NO: 2307854 - RNA, 19 nt, Artificial Sequence
  Description of Artificial Sequence: Synthetic oligonucleotide
ucguggucugugcugccau

SEQ ID NO: 2307855 - RNA, 19 nt, Artificial Sequence
  Description of Artificial Sequence: Synthetic oligonucleotide
cccgucagagaaccgagcc

SEQ ID NO: 2307856 - RNA, 19 nt, Artificial Sequence
  Description of Artificial Sequence: Synthetic oligonucleotide
ucuaagccgccuugcucuc

SEQ ID NO: 2307857 - RNA, 19 nt, Artificial Sequence
  Description of Artificial Sequence: Synthetic oligonucleotide
guugcugguccuuccaagu

SEQ ID NO: 2307858 - RNA, 19 nt, Artificial Sequence
  Description of Artificial Sequence: Synthetic oligonucleotide
agcgggcuccacuccgcac

SEQ ID NO: 2307859 - RNA, 19 nt, Artificial Sequence
  Description of Artificial Sequence: Synthetic oligonucleotide
agugccuucuaagccgccu

SEQ ID NO: 2307860 - RNA, 19 nt, Artificial Sequence
  Description of Artificial Sequence: Synthetic oligonucleotide
guaaacuguucaucagggu

SEQ ID NO: 2307861 - RNA, 19 nt, Artificial Sequence
  Description of Artificial Sequence: Synthetic oligonucleotide
uguaggaagugagcugguu

SEQ ID NO: 2307862 - RNA, 19 nt, Artificial Sequence
  Description of Artificial Sequence: Synthetic oligonucleotide
gucguccacgcacucugug

SEQ ID NO: 2307863 - RNA, 19 nt, Artificial Sequence
  Description of Artificial Sequence: Synthetic oligonucleotide
cacgacuguggaguccagg

SEQ ID NO: 2307864 - RNA, 19 nt, Artificial Sequence
  Description of Artificial Sequence: Synthetic oligonucleotide
ccagcuucgaggugcuuag

SEQ ID NO: 2307865 - RNA, 19 nt, Artificial Sequence
  Description of Artificial Sequence: Synthetic oligonucleotide
guuguugcuaugggauuca

SEQ ID NO: 2307866 - RNA, 19 nt, Artificial Sequence
  Description of Artificial Sequence: Synthetic oligonucleotide
ugcuuauggguggcugaug

SEQ ID NO: 2307867 - RNA, 19 nt, Artificial Sequence
  Description of Artificial Sequence: Synthetic oligonucleotide
ucucgcggguacacagagu

SEQ ID NO: 2307868 - RNA, 19 nt, Artificial Sequence
  Description of Artificial Sequence: Synthetic oligonucleotide
ucauuaguugcugguccuu

SEQ ID NO: 2307869 - RNA, 19 nt, Artificial Sequence
  Description of Artificial Sequence: Synthetic oligonucleotide
ucacgcuuagugccuucua

SEQ ID NO: 2307870 - RNA, 19 nt, Artificial Sequence
  Description of Artificial Sequence: Synthetic oligonucleotide
  modified_base (12)..(12): a, c, u, g, unknown or other
caucuaagcucncaaggau

SEQ ID NO: 2307871 - RNA, 19 nt, Artificial Sequence
  Description of Artificial Sequence: Synthetic oligonucleotide
agggucauugcugcacaca

SEQ ID NO: 2307872 - RNA, 19 nt, Artificial Sequence
  Description of Artificial Sequence: Synthetic oligonucleotide
ugucguccacgcacucugu

SEQ ID NO: 2307873 - RNA, 19 nt, Artificial Sequence
  Description of Artificial Sequence: Synthetic oligonucleotide
cgcuuagugccuucuaagc

SEQ ID NO: 2307874 - RNA, 19 nt, Artificial Sequence
  Description of Artificial Sequence: Synthetic oligonucleotide
uggcauugcugagauguuu

SEQ ID NO: 2307875 - RNA, 19 nt, Artificial Sequence
  Description of Artificial Sequence: Synthetic oligonucleotide
uuucacgcuuagugccuuc

SEQ ID NO: 2307876 - RNA, 19 nt, Artificial Sequence
  Description of Artificial Sequence: Synthetic oligonucleotide
ugcugagauguuugccaua

SEQ ID NO: 2307877 - RNA, 19 nt, Artificial Sequence
  Description of Artificial Sequence: Synthetic oligonucleotide
cacgcuuagugccuucuaa

SEQ ID NO: 2307878 - RNA, 19 nt, Artificial Sequence
  Description of Artificial Sequence: Synthetic oligonucleotide
ugaucugcucucgcgggua

SEQ ID NO: 2307879 - RNA, 19 nt, Artificial Sequence
  Description of Artificial Sequence: Synthetic oligonucleotide
aacaugcagcgggcuccac

SEQ ID NO: 2307880 - RNA, 19 nt, Artificial Sequence
  Description of Artificial Sequence: Synthetic oligonucleotide
augcaucaauguaggaagu

SEQ ID NO: 2307881 - RNA, 19 nt, Artificial Sequence
  Description of Artificial Sequence: Synthetic oligonucleotide
guggucugugcugccauac

SEQ ID NO: 2307882 - RNA, 19 nt, Artificial Sequence
  Description of Artificial Sequence: Synthetic oligonucleotide
agaaacgagggagggucau

SEQ ID NO: 2307883 - RNA, 19 nt, Artificial Sequence
  Description of Artificial Sequence: Synthetic oligonucleotide
cacgaugacuagccagguc

SEQ ID NO: 2307884 - RNA, 19 nt, Artificial Sequence
  Description of Artificial Sequence: Synthetic oligonucleotide
acugucguccacgcacucu

SEQ ID NO: 2307885 - RNA, 19 nt, Artificial Sequence
  Description of Artificial Sequence: Synthetic oligonucleotide
ggcaccuuccaguuucaca

SEQ ID NO: 2307886 - RNA, 19 nt, Artificial Sequence
  Description of Artificial Sequence: Synthetic oligonucleotide
cacuuuguguuguugcuau

SEQ ID NO: 2307887 - RNA, 19 nt, Artificial Sequence
  Description of Artificial Sequence: Synthetic oligonucleotide
gcuuauggguggcugaugu

SEQ ID NO: 2307888 - RNA, 19 nt, Artificial Sequence
  Description of Artificial Sequence: Synthetic oligonucleotide
aucgcacaaagaacaugca

SEQ ID NO: 2307889 - RNA, 19 nt, Artificial Sequence
  Description of Artificial Sequence: Synthetic oligonucleotide
aggauucuaugggccagcu

SEQ ID NO: 2307890 - RNA, 19 nt, Artificial Sequence
  Description of Artificial Sequence: Synthetic oligonucleotide
gacaggacagcaggcaccu

SEQ ID NO: 2307891 - RNA, 19 nt, Artificial Sequence
  Description of Artificial Sequence: Synthetic oligonucleotide
cucuguggugcugagccga

SEQ ID NO: 2307892 - RNA, 19 nt, Artificial Sequence
  Description of Artificial Sequence: Synthetic oligonucleotide
gcuaugggauucaccacug

SEQ ID NO: 2307893 - RNA, 19 nt, Artificial Sequence
  Description of Artificial Sequence: Synthetic oligonucleotide
cuuagcgcagggacacuaa

SEQ ID NO: 2307894 - RNA, 19 nt, Artificial Sequence
  Description of Artificial Sequence: Synthetic oligonucleotide
acgaugcccugacgcaaca

SEQ ID NO: 2307895 - RNA, 19 nt, Artificial Sequence
  Description of Artificial Sequence: Synthetic oligonucleotide
ucgcggguacacagaguuc

SEQ ID NO: 2307896 - RNA, 19 nt, Artificial Sequence
  Description of Artificial Sequence: Synthetic oligonucleotide
cucgcggguacacagaguu

SEQ ID NO: 2307897 - RNA, 19 nt, Artificial Sequence
  Description of Artificial Sequence: Synthetic oligonucleotide
gccuugcucucuugguggg

SEQ ID NO: 2307898 - RNA, 19 nt, Artificial Sequence
  Description of Artificial Sequence: Synthetic oligonucleotide
gcuggcccgucagagaacc

SEQ ID NO: 2307899 - RNA, 19 nt, Artificial Sequence
  Description of Artificial Sequence: Synthetic oligonucleotide
guuugccauauuucacgcu

SEQ ID NO: 2307900 - RNA, 19 nt, Artificial Sequence
  Description of Artificial Sequence: Synthetic oligonucleotide
guccacgcacucuguggug

SEQ ID NO: 2307901 - RNA, 19 nt, Artificial Sequence
  Description of Artificial Sequence: Synthetic oligonucleotide
ugcuggcccgucagagaac

SEQ ID NO: 2307902 - RNA, 19 nt, Artificial Sequence
  Description of Artificial Sequence: Synthetic oligonucleotide
acacggggcucgaucgcac

SEQ ID NO: 2307903 - RNA, 19 nt, Artificial Sequence
  Description of Artificial Sequence: Synthetic oligonucleotide
cgccuugcucucuuggugg

SEQ ID NO: 2307904 - RNA, 19 nt, Artificial Sequence
  Description of Artificial Sequence: Synthetic oligonucleotide
gcaucaacauguguguaaa

SEQ ID NO: 2307905 - RNA, 19 nt, Artificial Sequence
  Description of Artificial Sequence: Synthetic oligonucleotide
gcucgaucgcacaaagaac

SEQ ID NO: 2307906 - RNA, 19 nt, Artificial Sequence
  Description of Artificial Sequence: Synthetic oligonucleotide
agaugucaugccgcugcca

SEQ ID NO: 2307907 - RNA, 19 nt, Artificial Sequence
  Description of Artificial Sequence: Synthetic oligonucleotide
auuucacgcuuagugccuu

SEQ ID NO: 2307908 - RNA, 19 nt, Artificial Sequence
  Description of Artificial Sequence: Synthetic oligonucleotide
cuggcucagagccacgacu

SEQ ID NO: 2307909 - RNA, 19 nt, Artificial Sequence
  Description of Artificial Sequence: Synthetic oligonucleotide
cgucagagaaccgagccug

SEQ ID NO: 2307910 - RNA, 19 nt, Artificial Sequence
  Description of Artificial Sequence: Synthetic oligonucleotide
ggacacuaaggcuuuuccu

SEQ ID NO: 2307911 - RNA, 19 nt, Artificial Sequence
  Description of Artificial Sequence: Synthetic oligonucleotide
aggcaccuuccaguuucac

SEQ ID NO: 2307912 - RNA, 19 nt, Artificial Sequence
  Description of Artificial Sequence: Synthetic oligonucleotide
ugaugaccguuugcauuuc

SEQ ID NO: 2307913 - RNA, 19 nt, Artificial Sequence
  Description of Artificial Sequence: Synthetic oligonucleotide
gaacaugcagcgggcucca

SEQ ID NO: 2307914 - RNA, 19 nt, Artificial Sequence
  Description of Artificial Sequence: Synthetic oligonucleotide
ugauuaccucugucccaau

SEQ ID NO: 2307915 - RNA, 19 nt, Artificial Sequence
  Description of Artificial Sequence: Synthetic oligonucleotide
ggugcuuagcgcagggaca

SEQ ID NO: 2307916 - RNA, 19 nt, Artificial Sequence
  Description of Artificial Sequence: Synthetic oligonucleotide
guggcugauguggcauugc

SEQ ID NO: 2307917 - RNA, 19 nt, Artificial Sequence
  Description of Artificial Sequence: Synthetic oligonucleotide
ggcugauguggcauugcug

SEQ ID NO: 2307918 - RNA, 19 nt, Artificial Sequence
  Description of Artificial Sequence: Synthetic oligonucleotide
aggaagugagcugguugau

SEQ ID NO: 2307919 - RNA, 19 nt, Artificial Sequence
  Description of Artificial Sequence: Synthetic oligonucleotide
cuggcccgucagagaaccg

SEQ ID NO: 2307920 - RNA, 19 nt, Artificial Sequence
  Description of Artificial Sequence: Synthetic oligonucleotide
acggggcucgaucgcacaa

SEQ ID NO: 2307921 - RNA, 19 nt, Artificial Sequence
  Description of Artificial Sequence: Synthetic oligonucleotide
ggaagugagcugguugauc

SEQ ID NO: 2307922 - RNA, 19 nt, Artificial Sequence
  Description of Artificial Sequence: Synthetic oligonucleotide
gguggcugauguggcauug

SEQ ID NO: 2307923 - RNA, 19 nt, Artificial Sequence
  Description of Artificial Sequence: Synthetic oligonucleotide
cgaugacuagccagguccc

SEQ ID NO: 2307924 - RNA, 19 nt, Artificial Sequence
  Description of Artificial Sequence: Synthetic oligonucleotide
gcccugacgcaacaggcca

SEQ ID NO: 2307925 - RNA, 19 nt, Artificial Sequence
  Description of Artificial Sequence: Synthetic oligonucleotide
gaggugcuuagcgcaggga

SEQ ID NO: 2307926 - RNA, 19 nt, Artificial Sequence
  Description of Artificial Sequence: Synthetic oligonucleotide
auguaggaagugagcuggu

SEQ ID NO: 2307927 - RNA, 19 nt, Artificial Sequence
  Description of Artificial Sequence: Synthetic oligonucleotide
ugccagaccucugcacgau

SEQ ID NO: 2307928 - RNA, 19 nt, Artificial Sequence
  Description of Artificial Sequence: Synthetic oligonucleotide
ucccggaugcugcgggcuu

SEQ ID NO: 2307929 - RNA, 19 nt, Artificial Sequence
  Description of Artificial Sequence: Synthetic oligonucleotide
ccaagugcuuauggguggc

SEQ ID NO: 2307930 - RNA, 19 nt, Artificial Sequence
  Description of Artificial Sequence: Synthetic oligonucleotide
ggucauggucaaggaacug

SEQ ID NO: 2307931 - RNA, 19 nt, Artificial Sequence
  Description of Artificial Sequence: Synthetic oligonucleotide
agcaggcaccuuccaguuu

SEQ ID NO: 2307932 - RNA, 19 nt, Artificial Sequence
  Description of Artificial Sequence: Synthetic oligonucleotide
ggcccgucagagaaccgag

SEQ ID NO: 2307933 - RNA, 19 nt, Artificial Sequence
  Description of Artificial Sequence: Synthetic oligonucleotide
acugugcaccuguccuuuu

SEQ ID NO: 2307934 - RNA, 19 nt, Artificial Sequence
  Description of Artificial Sequence: Synthetic oligonucleotide
guguuguugcuaugggauu

SEQ ID NO: 2307935 - RNA, 19 nt, Artificial Sequence
  Description of Artificial Sequence: Synthetic oligonucleotide
gccccacugcaucaacaug

SEQ ID NO: 2307936 - RNA, 19 nt, Artificial Sequence
  Description of Artificial Sequence: Synthetic oligonucleotide
gcugagauguuugccauau

SEQ ID NO: 2307937 - RNA, 19 nt, Artificial Sequence
  Description of Artificial Sequence: Synthetic oligonucleotide
ugcuuagcgcagggacacu

SEQ ID NO: 2307938 - RNA, 19 nt, Artificial Sequence
  Description of Artificial Sequence: Synthetic oligonucleotide
ccgccuugcucucuuggug

SEQ ID NO: 2307939 - RNA, 19 nt, Artificial Sequence
  Description of Artificial Sequence: Synthetic oligonucleotide
cacugucguccacgcacuc

SEQ ID NO: 2307940 - RNA, 19 nt, Artificial Sequence
  Description of Artificial Sequence: Synthetic oligonucleotide
cacacggggcucgaucgca

SEQ ID NO: 2307941 - RNA, 19 nt, Artificial Sequence
  Description of Artificial Sequence: Synthetic oligonucleotide
gguccuuccaagugcuuau

SEQ ID NO: 2307942 - RNA, 19 nt, Artificial Sequence
  Description of Artificial Sequence: Synthetic oligonucleotide
aucugcucucgcggguaca

SEQ ID NO: 2307943 - RNA, 19 nt, Artificial Sequence
  Description of Artificial Sequence: Synthetic oligonucleotide
ggucaaggaacuggcccca

SEQ ID NO: 2307944 - RNA, 19 nt, Artificial Sequence
  Description of Artificial Sequence: Synthetic oligonucleotide
cugcaaugcuggcccguca

SEQ ID NO: 2307945 - RNA, 19 nt, Artificial Sequence
  Description of Artificial Sequence: Synthetic oligonucleotide
gggauucaccacugucguc

SEQ ID NO: 2307946 - RNA, 19 nt, Artificial Sequence
  Description of Artificial Sequence: Synthetic oligonucleotide
gucaaggaacuggccccac

SEQ ID NO: 2307947 - RNA, 19 nt, Artificial Sequence
  Description of Artificial Sequence: Synthetic oligonucleotide
  modified_base (9)..(9): a, c, u, g, unknown or other
cuaagcucncaaggauucu

SEQ ID NO: 2307948 - RNA, 19 nt, Artificial Sequence
  Description of Artificial Sequence: Synthetic oligonucleotide
cagcuucgaggugcuuagc

SEQ ID NO: 2307949 - RNA, 19 nt, Artificial Sequence
  Description of Artificial Sequence: Synthetic oligonucleotide
gcaaugcuggcccgucaga

SEQ ID NO: 2307950 - RNA, 19 nt, Artificial Sequence
  Description of Artificial Sequence: Synthetic oligonucleotide
cacgcacucuguggugcug

SEQ ID NO: 2307951 - RNA, 19 nt, Artificial Sequence
  Description of Artificial Sequence: Synthetic oligonucleotide
ggcuggcaagcuuccacaa

SEQ ID NO: 2307952 - RNA, 19 nt, Artificial Sequence
  Description of Artificial Sequence: Synthetic oligonucleotide
gcuggcaagcuuccacaaa

SEQ ID NO: 2307953 - RNA, 19 nt, Artificial Sequence
  Description of Artificial Sequence: Synthetic oligonucleotide
guggugcugagccgagacu

SEQ ID NO: 2307954 - RNA, 19 nt, Artificial Sequence
  Description of Artificial Sequence: Synthetic oligonucleotide
cacggggcucgaucgcaca

SEQ ID NO: 2307955 - RNA, 19 nt, Artificial Sequence
  Description of Artificial Sequence: Synthetic oligonucleotide
cgaucgcacaaagaacaug

SEQ ID NO: 2307956 - RNA, 19 nt, Artificial Sequence
  Description of Artificial Sequence: Synthetic oligonucleotide
gcaacaggccacgaugacu

SEQ ID NO: 2307957 - RNA, 19 nt, Artificial Sequence
  Description of Artificial Sequence: Synthetic oligonucleotide
ggcugguuaucuguuuucu

SEQ ID NO: 2307958 - RNA, 19 nt, Artificial Sequence
  Description of Artificial Sequence: Synthetic oligonucleotide
gccauacacauuggaugca

SEQ ID NO: 2307959 - RNA, 19 nt, Artificial Sequence
  Description of Artificial Sequence: Synthetic oligonucleotide
cccugacgcaacaggccac

SEQ ID NO: 2307960 - RNA, 19 nt, Artificial Sequence
  Description of Artificial Sequence: Synthetic oligonucleotide
gaaacgagggagggucauu

SEQ ID NO: 2307961 - RNA, 19 nt, Artificial Sequence
  Description of Artificial Sequence: Synthetic oligonucleotide
gccagcuucgaggugcuua

SEQ ID NO: 2307962 - RNA, 19 nt, Artificial Sequence
  Description of Artificial Sequence: Synthetic oligonucleotide
cagagaaacgagggagggu

SEQ ID NO: 2307963 - RNA, 19 nt, Artificial Sequence
  Description of Artificial Sequence: Synthetic oligonucleotide
gcuuagcgcagggacacua

SEQ ID NO: 2307964 - RNA, 19 nt, Artificial Sequence
  Description of Artificial Sequence: Synthetic oligonucleotide
gcccuuaagcagacaggac

SEQ ID NO: 2307965 - RNA, 19 nt, Artificial Sequence
  Description of Artificial Sequence: Synthetic oligonucleotide
gugcuuauggguggcugau

SEQ ID NO: 2307966 - RNA, 19 nt, Artificial Sequence
  Description of Artificial Sequence: Synthetic oligonucleotide
ggccccacugcaucaacau

SEQ ID NO: 2307967 - RNA, 19 nt, Artificial Sequence
  Description of Artificial Sequence: Synthetic oligonucleotide
cacuaaggcuuuuccucuu

SEQ ID NO: 2307968 - RNA, 19 nt, Artificial Sequence
  Description of Artificial Sequence: Synthetic oligonucleotide
caccacugucguccacgca

SEQ ID NO: 2307969 - RNA, 19 nt, Artificial Sequence
  Description of Artificial Sequence: Synthetic oligonucleotide
gcacgaugcccugacgcaa

SEQ ID NO: 2307970 - RNA, 19 nt, Artificial Sequence
  Description of Artificial Sequence: Synthetic oligonucleotide
cugacgcaacaggccacga

SEQ ID NO: 2307971 - RNA, 19 nt, Artificial Sequence
  Description of Artificial Sequence: Synthetic oligonucleotide
gcccgucagagaaccgagc

SEQ ID NO: 2307972 - RNA, 19 nt, Artificial Sequence
  Description of Artificial Sequence: Synthetic oligonucleotide
cagcgggcuccacuccgca

SEQ ID NO: 2307973 - RNA, 19 nt, Artificial Sequence
  Description of Artificial Sequence: Synthetic oligonucleotide
gcagcgggcuccacuccgc

SEQ ID NO: 2307974 - RNA, 19 nt, Artificial Sequence
  Description of Artificial Sequence: Synthetic oligonucleotide
ccggaugcugcgggcuucg

SEQ ID NO: 2307975 - RNA, 19 nt, Artificial Sequence
  Description of Artificial Sequence: Synthetic oligonucleotide
gcgcagggacacuaaggcu

SEQ ID NO: 2307976 - RNA, 19 nt, Artificial Sequence
  Description of Artificial Sequence: Synthetic oligonucleotide
ggaacuggccccacugcau

SEQ ID NO: 2307977 - RNA, 19 nt, Artificial Sequence
  Description of Artificial Sequence: Synthetic oligonucleotide
cuguggugcugagccgaga

SEQ ID NO: 2307978 - RNA, 19 nt, Artificial Sequence
  Description of Artificial Sequence: Synthetic oligonucleotide
cugucccaaucaguguggu

SEQ ID NO: 2307979 - RNA, 19 nt, Artificial Sequence
  Description of Artificial Sequence: Synthetic oligonucleotide
caagugcuuauggguggcu

SEQ ID NO: 2307980 - RNA, 19 nt, Artificial Sequence
  Description of Artificial Sequence: Synthetic oligonucleotide
cugcucucgcggguacaca

SEQ ID NO: 2307981 - RNA, 19 nt, Artificial Sequence
  Description of Artificial Sequence: Synthetic oligonucleotide
ccuucuaagccgccuugcu

SEQ ID NO: 2307982 - RNA, 19 nt, Artificial Sequence
  Description of Artificial Sequence: Synthetic oligonucleotide
gcucucgcggguacacaga

SEQ ID NO: 2307983 - RNA, 19 nt, Artificial Sequence
  Description of Artificial Sequence: Synthetic oligonucleotide
gggcucgaucgcacaaaga

SEQ ID NO: 2307984 - RNA, 19 nt, Artificial Sequence
  Description of Artificial Sequence: Synthetic oligonucleotide
gccauauuucacgcuuagu

SEQ ID NO: 2307985 - RNA, 19 nt, Artificial Sequence
  Description of Artificial Sequence: Synthetic oligonucleotide
ccgcugccacacacggggc

SEQ ID NO: 2307986 - RNA, 19 nt, Artificial Sequence
  Description of Artificial Sequence: Synthetic oligonucleotide
gccgccuugcucucuuggu

SEQ ID NO: 2307987 - RNA, 19 nt, Artificial Sequence
  Description of Artificial Sequence: Synthetic oligonucleotide
ccacgacuguggaguccag

SEQ ID NO: 2307988 - RNA, 19 nt, Artificial Sequence
  Description of Artificial Sequence: Synthetic oligonucleotide
ggauucuaugggccagcuu

SEQ ID NO: 2307989 - RNA, 19 nt, Artificial Sequence
  Description of Artificial Sequence: Synthetic oligonucleotide
gggcuccacuccgcacacg

SEQ ID NO: 2307990 - RNA, 19 nt, Artificial Sequence
  Description of Artificial Sequence: Synthetic oligonucleotide
cugugcugccauacacauu

SEQ ID NO: 2307991 - RNA, 19 nt, Artificial Sequence
  Description of Artificial Sequence: Synthetic oligonucleotide
ccauacacauuggaugcau

SEQ ID NO: 2307992 - RNA, 19 nt, Artificial Sequence
  Description of Artificial Sequence: Synthetic oligonucleotide
cuaagccgccuugcucucu

SEQ ID NO: 2307993 - RNA, 19 nt, Artificial Sequence
  Description of Artificial Sequence: Synthetic oligonucleotide
cgaugcccugacgcaacag

SEQ ID NO: 2307994 - RNA, 19 nt, Artificial Sequence
  Description of Artificial Sequence: Synthetic oligonucleotide
ccgucagagaaccgagccu

SEQ ID NO: 2307995 - RNA, 19 nt, Artificial Sequence
  Description of Artificial Sequence: Synthetic oligonucleotide
cugagauguuugccauauu

SEQ ID NO: 2307996 - RNA, 19 nt, Artificial Sequence
  Description of Artificial Sequence: Synthetic oligonucleotide
ccacugucguccacgcacu

SEQ ID NO: 2307997 - RNA, 19 nt, Artificial Sequence
  Description of Artificial Sequence: Synthetic oligonucleotide
cguccacgcacucuguggu

SEQ ID NO: 2307998 - RNA, 19 nt, Artificial Sequence
  Description of Artificial Sequence: Synthetic oligonucleotide
cgggcuccacuccgcacac

SEQ ID NO: 2307999 - RNA, 19 nt, Artificial Sequence
  Description of Artificial Sequence: Synthetic oligonucleotide
ggguggcugauguggcauu

SEQ ID NO: 2308000 - RNA, 19 nt, Artificial Sequence
  Description of Artificial Sequence: Synthetic oligonucleotide
ccucugcacgaugcccuga

SEQ ID NO: 2308001 - RNA, 19 nt, Artificial Sequence
  Description of Artificial Sequence: Synthetic oligonucleotide
ccacgcacucuguggugcu

SEQ ID NO: 2308002 - RNA, 19 nt, Artificial Sequence
  Description of Artificial Sequence: Synthetic oligonucleotide
ccacgaugacuagccaggu

SEQ ID NO: 2308003 - RNA, 19 nt, Artificial Sequence
  Description of Artificial Sequence: Synthetic oligonucleotide
gcggguacacagaguucau

SEQ ID NO: 2308004 - RNA, 19 nt, Artificial Sequence
  Description of Artificial Sequence: Synthetic oligonucleotide
gccgagacuccaggcuggu

SEQ ID NO: 2308005 - RNA, 19 nt, Artificial Sequence
  Description of Artificial Sequence: Synthetic oligonucleotide
cggggcucgaucgcacaaa

SEQ ID NO: 2308006 - RNA, 19 nt, Artificial Sequence
  Description of Artificial Sequence: Synthetic oligonucleotide
ccgagacuccaggcugguu

SEQ ID NO: 2308007 - RNA, 19 nt, Artificial Sequence
  Description of Artificial Sequence: Synthetic oligonucleotide
ggccagcuucgaggugcuu

SEQ ID NO: 2308008 - RNA, 19 nt, Artificial Sequence
  Description of Artificial Sequence: Synthetic oligonucleotide
aaacccacugaucauuccc

SEQ ID NO: 2308009 - RNA, 19 nt, Artificial Sequence
  Description of Artificial Sequence: Synthetic oligonucleotide
cuuugcagaauacagaggc

SEQ ID NO: 2308010 - RNA, 19 nt, Artificial Sequence
  Description of Artificial Sequence: Synthetic oligonucleotide
aauacagaggcacugccca

SEQ ID NO: 2308011 - RNA, 19 nt, Artificial Sequence
  Description of Artificial Sequence: Synthetic oligonucleotide
agaauacagaggcacugcc

SEQ ID NO: 2308012 - RNA, 19 nt, Artificial Sequence
  Description of Artificial Sequence: Synthetic oligonucleotide
ucuuuuaccggacacccug

SEQ ID NO: 2308013 - RNA, 19 nt, Artificial Sequence
  Description of Artificial Sequence: Synthetic oligonucleotide
ugaucauucccacugcuga

SEQ ID NO: 2308014 - RNA, 19 nt, Artificial Sequence
  Description of Artificial Sequence: Synthetic oligonucleotide
uguccaaccgcucugcucu

SEQ ID NO: 2308015 - RNA, 19 nt, Artificial Sequence
  Description of Artificial Sequence: Synthetic oligonucleotide
uucuaugggcuccacaggc

SEQ ID NO: 2308016 - RNA, 19 nt, Artificial Sequence
  Description of Artificial Sequence: Synthetic oligonucleotide
ccauguaugucuuuuaccg

SEQ ID NO: 2308017 - RNA, 19 nt, Artificial Sequence
  Description of Artificial Sequence: Synthetic oligonucleotide
uuuguguccuugaccacgg

SEQ ID NO: 2308018 - RNA, 19 nt, Artificial Sequence
  Description of Artificial Sequence: Synthetic oligonucleotide
aucacauuccgcugcauag

SEQ ID NO: 2308019 - RNA, 19 nt, Artificial Sequence
  Description of Artificial Sequence: Synthetic oligonucleotide
ucggagauggggaucauca

SEQ ID NO: 2308020 - RNA, 19 nt, Artificial Sequence
  Description of Artificial Sequence: Synthetic oligonucleotide
ucuuugcagaauacagagg

SEQ ID NO: 2308021 - RNA, 19 nt, Artificial Sequence
  Description of Artificial Sequence: Synthetic oligonucleotide
aaccacucucccucgggcc

SEQ ID NO: 2308022 - RNA, 19 nt, Artificial Sequence
  Description of Artificial Sequence: Synthetic oligonucleotide
uaugucuuuuaccggacac

SEQ ID NO: 2308023 - RNA, 19 nt, Artificial Sequence
  Description of Artificial Sequence: Synthetic oligonucleotide
cagucuuugcagaauacag

SEQ ID NO: 2308024 - RNA, 19 nt, Artificial Sequence
  Description of Artificial Sequence: Synthetic oligonucleotide
uucagaggcaagauguacu

SEQ ID NO: 2308025 - RNA, 19 nt, Artificial Sequence
  Description of Artificial Sequence: Synthetic oligonucleotide
uucccacugcugaagacgg

SEQ ID NO: 2308026 - RNA, 19 nt, Artificial Sequence
  Description of Artificial Sequence: Synthetic oligonucleotide
agaucuuacacagccacag

SEQ ID NO: 2308027 - RNA, 19 nt, Artificial Sequence
  Description of Artificial Sequence: Synthetic oligonucleotide
auguaugucuuuuaccgga

SEQ ID NO: 2308028 - RNA, 19 nt, Artificial Sequence
  Description of Artificial Sequence: Synthetic oligonucleotide
uuuggugcagacuuucuuc

SEQ ID NO: 2308029 - RNA, 19 nt, Artificial Sequence
  Description of Artificial Sequence: Synthetic oligonucleotide
cauguguagacacggcugg

SEQ ID NO: 2308030 - RNA, 19 nt, Artificial Sequence
  Description of Artificial Sequence: Synthetic oligonucleotide
gguucuaugggcuccacag

SEQ ID NO: 2308031 - RNA, 19 nt, Artificial Sequence
  Description of Artificial Sequence: Synthetic oligonucleotide
uccauguaugucuuuuacc

SEQ ID NO: 2308032 - RNA, 19 nt, Artificial Sequence
  Description of Artificial Sequence: Synthetic oligonucleotide
cauguaugucuuuuaccgg

SEQ ID NO: 2308033 - RNA, 19 nt, Artificial Sequence
  Description of Artificial Sequence: Synthetic oligonucleotide
cagcuuggcucucagagcg

SEQ ID NO: 2308034 - RNA, 19 nt, Artificial Sequence
  Description of Artificial Sequence: Synthetic oligonucleotide
gguauguaugcacagacca

SEQ ID NO: 2308035 - RNA, 19 nt, Artificial Sequence
  Description of Artificial Sequence: Synthetic oligonucleotide
uuuuaccggacacccuggg

SEQ ID NO: 2308036 - RNA, 19 nt, Artificial Sequence
  Description of Artificial Sequence: Synthetic oligonucleotide
augucuuuuaccggacacc

SEQ ID NO: 2308037 - RNA, 19 nt, Artificial Sequence
  Description of Artificial Sequence: Synthetic oligonucleotide
ucacuggaaaccacucucc

SEQ ID NO: 2308038 - RNA, 19 nt, Artificial Sequence
  Description of Artificial Sequence: Synthetic oligonucleotide
uuugcagaauacagaggca

SEQ ID NO: 2308039 - RNA, 19 nt, Artificial Sequence
  Description of Artificial Sequence: Synthetic oligonucleotide
ucuccgucugguauguaug

SEQ ID NO: 2308040 - RNA, 19 nt, Artificial Sequence
  Description of Artificial Sequence: Synthetic oligonucleotide
cuuggggagcccuuuguag

SEQ ID NO: 2308041 - RNA, 19 nt, Artificial Sequence
  Description of Artificial Sequence: Synthetic oligonucleotide
aggcaagauguacuugggg

SEQ ID NO: 2308042 - RNA, 19 nt, Artificial Sequence
  Description of Artificial Sequence: Synthetic oligonucleotide
cagccguuccaccagacgc

SEQ ID NO: 2308043 - RNA, 19 nt, Artificial Sequence
  Description of Artificial Sequence: Synthetic oligonucleotide
caggaaucccaacaccucc

SEQ ID NO: 2308044 - RNA, 19 nt, Artificial Sequence
  Description of Artificial Sequence: Synthetic oligonucleotide
acugggagaggccguugcc

SEQ ID NO: 2308045 - RNA, 19 nt, Artificial Sequence
  Description of Artificial Sequence: Synthetic oligonucleotide
uuuaccggacacccugggc

SEQ ID NO: 2308046 - RNA, 19 nt, Artificial Sequence
  Description of Artificial Sequence: Synthetic oligonucleotide
gaauacagaggcacugccc

SEQ ID NO: 2308047 - RNA, 19 nt, Artificial Sequence
  Description of Artificial Sequence: Synthetic oligonucleotide
ucucagagcgagcugccga

SEQ ID NO: 2308048 - RNA, 19 nt, Artificial Sequence
  Description of Artificial Sequence: Synthetic oligonucleotide
uuggggagcccuuuguaga

SEQ ID NO: 2308049 - RNA, 19 nt, Artificial Sequence
  Description of Artificial Sequence: Synthetic oligonucleotide
ugcagaauacagaggcacu

SEQ ID NO: 2308050 - RNA, 19 nt, Artificial Sequence
  Description of Artificial Sequence: Synthetic oligonucleotide
aaaggucggagauggggau

SEQ ID NO: 2308051 - RNA, 19 nt, Artificial Sequence
  Description of Artificial Sequence: Synthetic oligonucleotide
ugagguccgagucacuguc

SEQ ID NO: 2308052 - RNA, 19 nt, Artificial Sequence
  Description of Artificial Sequence: Synthetic oligonucleotide
cuuuuaccggacacccugg

SEQ ID NO: 2308053 - RNA, 19 nt, Artificial Sequence
  Description of Artificial Sequence: Synthetic oligonucleotide
gacacggcuggcuucagca

SEQ ID NO: 2308054 - RNA, 19 nt, Artificial Sequence
  Description of Artificial Sequence: Synthetic oligonucleotide
ugucacuggaaaccacucu

SEQ ID NO: 2308055 - RNA, 19 nt, Artificial Sequence
  Description of Artificial Sequence: Synthetic oligonucleotide
ucgaucccgcauuuggugc

SEQ ID NO: 2308056 - RNA, 19 nt, Artificial Sequence
  Description of Artificial Sequence: Synthetic oligonucleotide
agguccgagucacugucac

SEQ ID NO: 2308057 - RNA, 19 nt, Artificial Sequence
  Description of Artificial Sequence: Synthetic oligonucleotide
agcacucugaggcuggggu

SEQ ID NO: 2308058 - RNA, 19 nt, Artificial Sequence
  Description of Artificial Sequence: Synthetic oligonucleotide
ucuaugggcuccacaggca

SEQ ID NO: 2308059 - RNA, 19 nt, Artificial Sequence
  Description of Artificial Sequence: Synthetic oligonucleotide
gcaagauguacuuggggag

SEQ ID NO: 2308060 - RNA, 19 nt, Artificial Sequence
  Description of Artificial Sequence: Synthetic oligonucleotide
gaaucccaacaccuccccg

SEQ ID NO: 2308061 - RNA, 19 nt, Artificial Sequence
  Description of Artificial Sequence: Synthetic oligonucleotide
uggaaaccacucucccucg

SEQ ID NO: 2308062 - RNA, 19 nt, Artificial Sequence
  Description of Artificial Sequence: Synthetic oligonucleotide
aggaaucccaacaccuccc

SEQ ID NO: 2308063 - RNA, 19 nt, Artificial Sequence
  Description of Artificial Sequence: Synthetic oligonucleotide
uacagaggcacugcccagg

SEQ ID NO: 2308064 - RNA, 19 nt, Artificial Sequence
  Description of Artificial Sequence: Synthetic oligonucleotide
augaccugcaggaugaccu

SEQ ID NO: 2308065 - RNA, 19 nt, Artificial Sequence
  Description of Artificial Sequence: Synthetic oligonucleotide
ggcaagauguacuugggga

SEQ ID NO: 2308066 - RNA, 19 nt, Artificial Sequence
  Description of Artificial Sequence: Synthetic oligonucleotide
caagauguacuuggggagc

SEQ ID NO: 2308067 - RNA, 19 nt, Artificial Sequence
  Description of Artificial Sequence: Synthetic oligonucleotide
auguccaaccgcucugcuc

SEQ ID NO: 2308068 - RNA, 19 nt, Artificial Sequence
  Description of Artificial Sequence: Synthetic oligonucleotide
ggagauggggaucaucagc

SEQ ID NO: 2308069 - RNA, 19 nt, Artificial Sequence
  Description of Artificial Sequence: Synthetic oligonucleotide
acugaucauucccacugcu

SEQ ID NO: 2308070 - RNA, 19 nt, Artificial Sequence
  Description of Artificial Sequence: Synthetic oligonucleotide
acuggaaaccacucucccu

SEQ ID NO: 2308071 - RNA, 19 nt, Artificial Sequence
  Description of Artificial Sequence: Synthetic oligonucleotide
cugaucauucccacugcug

SEQ ID NO: 2308072 - RNA, 19 nt, Artificial Sequence
  Description of Artificial Sequence: Synthetic oligonucleotide
cucgaucccgcauuuggug

SEQ ID NO: 2308073 - RNA, 19 nt, Artificial Sequence
  Description of Artificial Sequence: Synthetic oligonucleotide
ugcuucuccgucugguaug

SEQ ID NO: 2308074 - RNA, 19 nt, Artificial Sequence
  Description of Artificial Sequence: Synthetic oligonucleotide
guauguaugcacagaccag

SEQ ID NO: 2308075 - RNA, 19 nt, Artificial Sequence
  Description of Artificial Sequence: Synthetic oligonucleotide
acgcccgauccucugcugc

SEQ ID NO: 2308076 - RNA, 19 nt, Artificial Sequence
  Description of Artificial Sequence: Synthetic oligonucleotide
accucuuccagaccucucu

SEQ ID NO: 2308077 - RNA, 19 nt, Artificial Sequence
  Description of Artificial Sequence: Synthetic oligonucleotide
ggggcaaacccacugauca

SEQ ID NO: 2308078 - RNA, 19 nt, Artificial Sequence
  Description of Artificial Sequence: Synthetic oligonucleotide
uucuccgucugguauguau

SEQ ID NO: 2308079 - RNA, 19 nt, Artificial Sequence
  Description of Artificial Sequence: Synthetic oligonucleotide
caaaggucggagaugggga

SEQ ID NO: 2308080 - RNA, 19 nt, Artificial Sequence
  Description of Artificial Sequence: Synthetic oligonucleotide
uugaccacggugggugugg

SEQ ID NO: 2308081 - RNA, 19 nt, Artificial Sequence
  Description of Artificial Sequence: Synthetic oligonucleotide
aaccgcucugcucucugga

SEQ ID NO: 2308082 - RNA, 19 nt, Artificial Sequence
  Description of Artificial Sequence: Synthetic oligonucleotide
gcaaaggucggagaugggg

SEQ ID NO: 2308083 - RNA, 19 nt, Artificial Sequence
  Description of Artificial Sequence: Synthetic oligonucleotide
ugaagacggugucagccau

SEQ ID NO: 2308084 - RNA, 19 nt, Artificial Sequence
  Description of Artificial Sequence: Synthetic oligonucleotide
uugcuucuccgucugguau

SEQ ID NO: 2308085 - RNA, 19 nt, Artificial Sequence
  Description of Artificial Sequence: Synthetic oligonucleotide
cagagcgagcugccgaucg

SEQ ID NO: 2308086 - RNA, 19 nt, Artificial Sequence
  Description of Artificial Sequence: Synthetic oligonucleotide
agacacggcuggcuucagc

SEQ ID NO: 2308087 - RNA, 19 nt, Artificial Sequence
  Description of Artificial Sequence: Synthetic oligonucleotide
uguagacacggcuggcuuc

SEQ ID NO: 2308088 - RNA, 19 nt, Artificial Sequence
  Description of Artificial Sequence: Synthetic oligonucleotide
aaggucggagauggggauc

SEQ ID NO: 2308089 - RNA, 19 nt, Artificial Sequence
  Description of Artificial Sequence: Synthetic oligonucleotide
aacccacugaucauuccca

SEQ ID NO: 2308090 - RNA, 19 nt, Artificial Sequence
  Description of Artificial Sequence: Synthetic oligonucleotide
uccccucuaggcuugucac

SEQ ID NO: 2308091 - RNA, 19 nt, Artificial Sequence
  Description of Artificial Sequence: Synthetic oligonucleotide
gguggucacaucagcagcg

SEQ ID NO: 2308092 - RNA, 19 nt, Artificial Sequence
  Description of Artificial Sequence: Synthetic oligonucleotide
cuaggcuugucaccuuuug

SEQ ID NO: 2308093 - RNA, 19 nt, Artificial Sequence
  Description of Artificial Sequence: Synthetic oligonucleotide
auacagaggcacugcccag

SEQ ID NO: 2308094 - RNA, 19 nt, Artificial Sequence
  Description of Artificial Sequence: Synthetic oligonucleotide
gugggucugaggcaccugc

SEQ ID NO: 2308095 - RNA, 19 nt, Artificial Sequence
  Description of Artificial Sequence: Synthetic oligonucleotide
uccugggcaacuccaugcu

SEQ ID NO: 2308096 - RNA, 19 nt, Artificial Sequence
  Description of Artificial Sequence: Synthetic oligonucleotide
uuggggcaaacccacugau

SEQ ID NO: 2308097 - RNA, 19 nt, Artificial Sequence
  Description of Artificial Sequence: Synthetic oligonucleotide
gaggccguugcccaucaca

SEQ ID NO: 2308098 - RNA, 19 nt, Artificial Sequence
  Description of Artificial Sequence: Synthetic oligonucleotide
agcccuuuguagaaccagg

SEQ ID NO: 2308099 - RNA, 19 nt, Artificial Sequence
  Description of Artificial Sequence: Synthetic oligonucleotide
acacggcuggcuucagcac

SEQ ID NO: 2308100 - RNA, 19 nt, Artificial Sequence
  Description of Artificial Sequence: Synthetic oligonucleotide
gaucguuggggcaaaccca

SEQ ID NO: 2308101 - RNA, 19 nt, Artificial Sequence
  Description of Artificial Sequence: Synthetic oligonucleotide
cuuugcucacugcagaucu

SEQ ID NO: 2308102 - RNA, 19 nt, Artificial Sequence
  Description of Artificial Sequence: Synthetic oligonucleotide
cacauuccgcugcauaguc

SEQ ID NO: 2308103 - RNA, 19 nt, Artificial Sequence
  Description of Artificial Sequence: Synthetic oligonucleotide
ucacauuccgcugcauagu

SEQ ID NO: 2308104 - RNA, 19 nt, Artificial Sequence
  Description of Artificial Sequence: Synthetic oligonucleotide
ccacugaucauucccacug

SEQ ID NO: 2308105 - RNA, 19 nt, Artificial Sequence
  Description of Artificial Sequence: Synthetic oligonucleotide
gccucgaucccgcauuugg

SEQ ID NO: 2308106 - RNA, 19 nt, Artificial Sequence
  Description of Artificial Sequence: Synthetic oligonucleotide
aggcaccugccccagucuc

SEQ ID NO: 2308107 - RNA, 19 nt, Artificial Sequence
  Description of Artificial Sequence: Synthetic oligonucleotide
uguccauguaugucuuuua

SEQ ID NO: 2308108 - RNA, 19 nt, Artificial Sequence
  Description of Artificial Sequence: Synthetic oligonucleotide
aucagcccggccugguguc

SEQ ID NO: 2308109 - RNA, 19 nt, Artificial Sequence
  Description of Artificial Sequence: Synthetic oligonucleotide
ggugcagacuuucuuccug

SEQ ID NO: 2308110 - RNA, 19 nt, Artificial Sequence
  Description of Artificial Sequence: Synthetic oligonucleotide
gaucauucccacugcugaa

SEQ ID NO: 2308111 - RNA, 19 nt, Artificial Sequence
  Description of Artificial Sequence: Synthetic oligonucleotide
ucucccucgggcccaugug

SEQ ID NO: 2308112 - RNA, 19 nt, Artificial Sequence
  Description of Artificial Sequence: Synthetic oligonucleotide
gucaccuuuuguguccuug

SEQ ID NO: 2308113 - RNA, 19 nt, Artificial Sequence
  Description of Artificial Sequence: Synthetic oligonucleotide
cagccugucugcagcuugg

SEQ ID NO: 2308114 - RNA, 19 nt, Artificial Sequence
  Description of Artificial Sequence: Synthetic oligonucleotide
uggggagcccuuuguagaa

SEQ ID NO: 2308115 - RNA, 19 nt, Artificial Sequence
  Description of Artificial Sequence: Synthetic oligonucleotide
ccauguguagacacggcug

SEQ ID NO: 2308116 - RNA, 19 nt, Artificial Sequence
  Description of Artificial Sequence: Synthetic oligonucleotide
cuucagcacucugaggcug

SEQ ID NO: 2308117 - RNA, 19 nt, Artificial Sequence
  Description of Artificial Sequence: Synthetic oligonucleotide
gcagaauacagaggcacug

SEQ ID NO: 2308118 - RNA, 19 nt, Artificial Sequence
  Description of Artificial Sequence: Synthetic oligonucleotide
ggaucaucagcccggccug

SEQ ID NO: 2308119 - RNA, 19 nt, Artificial Sequence
  Description of Artificial Sequence: Synthetic oligonucleotide
cacugggagaggccguugc

SEQ ID NO: 2308120 - RNA, 19 nt, Artificial Sequence
  Description of Artificial Sequence: Synthetic oligonucleotide
uaugggcuccacaggcaaa

SEQ ID NO: 2308121 - RNA, 19 nt, Artificial Sequence
  Description of Artificial Sequence: Synthetic oligonucleotide
uggugcagacuuucuuccu

SEQ ID NO: 2308122 - RNA, 19 nt, Artificial Sequence
  Description of Artificial Sequence: Synthetic oligonucleotide
gccguugcccaucacauuc

SEQ ID NO: 2308123 - RNA, 19 nt, Artificial Sequence
  Description of Artificial Sequence: Synthetic oligonucleotide
cacaggggccgcuucuggc

SEQ ID NO: 2308124 - RNA, 19 nt, Artificial Sequence
  Description of Artificial Sequence: Synthetic oligonucleotide
aucccaacaccuccccgca

SEQ ID NO: 2308125 - RNA, 19 nt, Artificial Sequence
  Description of Artificial Sequence: Synthetic oligonucleotide
caccuuuuguguccuugac

SEQ ID NO: 2308126 - RNA, 19 nt, Artificial Sequence
  Description of Artificial Sequence: Synthetic oligonucleotide
cgaucguuggggcaaaccc

SEQ ID NO: 2308127 - RNA, 19 nt, Artificial Sequence
  Description of Artificial Sequence: Synthetic oligonucleotide
cauccugggcaacuccaug

SEQ ID NO: 2308128 - RNA, 19 nt, Artificial Sequence
  Description of Artificial Sequence: Synthetic oligonucleotide
caaccgcucugcucucugg

SEQ ID NO: 2308129 - RNA, 19 nt, Artificial Sequence
  Description of Artificial Sequence: Synthetic oligonucleotide
uccacaggcaaaggucgga

SEQ ID NO: 2308130 - RNA, 19 nt, Artificial Sequence
  Description of Artificial Sequence: Synthetic oligonucleotide
uggugucuucagaggcaag

SEQ ID NO: 2308131 - RNA, 19 nt, Artificial Sequence
  Description of Artificial Sequence: Synthetic oligonucleotide
gaucaucagcccggccugg

SEQ ID NO: 2308132 - RNA, 19 nt, Artificial Sequence
  Description of Artificial Sequence: Synthetic oligonucleotide
uugcucacugcagaucuua

SEQ ID NO: 2308133 - RNA, 19 nt, Artificial Sequence
  Description of Artificial Sequence: Synthetic oligonucleotide
aggucggagauggggauca

SEQ ID NO: 2308134 - RNA, 19 nt, Artificial Sequence
  Description of Artificial Sequence: Synthetic oligonucleotide
cuuggcucucagagcgagc

SEQ ID NO: 2308135 - RNA, 19 nt, Artificial Sequence
  Description of Artificial Sequence: Synthetic oligonucleotide
gucacaucagcagcgggga

SEQ ID NO: 2308136 - RNA, 19 nt, Artificial Sequence
  Description of Artificial Sequence: Synthetic oligonucleotide
agacgcccgauccucugcu

SEQ ID NO: 2308137 - RNA, 19 nt, Artificial Sequence
  Description of Artificial Sequence: Synthetic oligonucleotide
acuuggggagcccuuugua

SEQ ID NO: 2308138 - RNA, 19 nt, Artificial Sequence
  Description of Artificial Sequence: Synthetic oligonucleotide
uccgucugguauguaugca

SEQ ID NO: 2308139 - RNA, 19 nt, Artificial Sequence
  Description of Artificial Sequence: Synthetic oligonucleotide
ggaaaccacucucccucgg

SEQ ID NO: 2308140 - RNA, 19 nt, Artificial Sequence
  Description of Artificial Sequence: Synthetic oligonucleotide
ggcccauguguagacacgg

SEQ ID NO: 2308141 - RNA, 19 nt, Artificial Sequence
  Description of Artificial Sequence: Synthetic oligonucleotide
ggggaguuguccauguaug

SEQ ID NO: 2308142 - RNA, 19 nt, Artificial Sequence
  Description of Artificial Sequence: Synthetic oligonucleotide
cugggguucuaugggcucc

SEQ ID NO: 2308143 - RNA, 19 nt, Artificial Sequence
  Description of Artificial Sequence: Synthetic oligonucleotide
guagacacggcuggcuuca

SEQ ID NO: 2308144 - RNA, 19 nt, Artificial Sequence
  Description of Artificial Sequence: Synthetic oligonucleotide
ucagcagcggggaguuguc

SEQ ID NO: 2308145 - RNA, 19 nt, Artificial Sequence
  Description of Artificial Sequence: Synthetic oligonucleotide
agcggggaguuguccaugu

SEQ ID NO: 2308146 - RNA, 19 nt, Artificial Sequence
  Description of Artificial Sequence: Synthetic oligonucleotide
ucccgcauuuggugcagac

SEQ ID NO: 2308147 - RNA, 19 nt, Artificial Sequence
  Description of Artificial Sequence: Synthetic oligonucleotide
uuugcucacugcagaucuu

SEQ ID NO: 2308148 - RNA, 19 nt, Artificial Sequence
  Description of Artificial Sequence: Synthetic oligonucleotide
gucucacuggccaggcugc

SEQ ID NO: 2308149 - RNA, 19 nt, Artificial Sequence
  Description of Artificial Sequence: Synthetic oligonucleotide
cagaucuuacacagccaca

SEQ ID NO: 2308150 - RNA, 19 nt, Artificial Sequence
  Description of Artificial Sequence: Synthetic oligonucleotide
uaccggacacccugggcuc

SEQ ID NO: 2308151 - RNA, 19 nt, Artificial Sequence
  Description of Artificial Sequence: Synthetic oligonucleotide
cucgggcccauguguagac

SEQ ID NO: 2308152 - RNA, 19 nt, Artificial Sequence
  Description of Artificial Sequence: Synthetic oligonucleotide
ucccaacaccuccccgcag

SEQ ID NO: 2308153 - RNA, 19 nt, Artificial Sequence
  Description of Artificial Sequence: Synthetic oligonucleotide
cccuuuguagaaccaggcc

SEQ ID NO: 2308154 - RNA, 19 nt, Artificial Sequence
  Description of Artificial Sequence: Synthetic oligonucleotide
cagaccucucuuugcucac

SEQ ID NO: 2308155 - RNA, 19 nt, Artificial Sequence
  Description of Artificial Sequence: Synthetic oligonucleotide
gaucccgcauuuggugcag

SEQ ID NO: 2308156 - RNA, 19 nt, Artificial Sequence
  Description of Artificial Sequence: Synthetic oligonucleotide
agagcgagcugccgaucgu

SEQ ID NO: 2308157 - RNA, 19 nt, Artificial Sequence
  Description of Artificial Sequence: Synthetic oligonucleotide
ggaguuguccauguauguc

SEQ ID NO: 2308158 - RNA, 19 nt, Artificial Sequence
  Description of Artificial Sequence: Synthetic oligonucleotide
cucucagagcgagcugccg

SEQ ID NO: 2308159 - RNA, 19 nt, Artificial Sequence
  Description of Artificial Sequence: Synthetic oligonucleotide
caucacauuccgcugcaua

SEQ ID NO: 2308160 - RNA, 19 nt, Artificial Sequence
  Description of Artificial Sequence: Synthetic oligonucleotide
ccgucugguauguaugcac

SEQ ID NO: 2308161 - RNA, 19 nt, Artificial Sequence
  Description of Artificial Sequence: Synthetic oligonucleotide
cacccugggcucaggccgg

SEQ ID NO: 2308162 - RNA, 19 nt, Artificial Sequence
  Description of Artificial Sequence: Synthetic oligonucleotide
gggucugaggcaccugccc

SEQ ID NO: 2308163 - RNA, 19 nt, Artificial Sequence
  Description of Artificial Sequence: Synthetic oligonucleotide
cagaggcaagauguacuug

SEQ ID NO: 2308164 - RNA, 19 nt, Artificial Sequence
  Description of Artificial Sequence: Synthetic oligonucleotide
cugucugcagcuuggcucu

SEQ ID NO: 2308165 - RNA, 19 nt, Artificial Sequence
  Description of Artificial Sequence: Synthetic oligonucleotide
gauguacuuggggagcccu

SEQ ID NO: 2308166 - RNA, 19 nt, Artificial Sequence
  Description of Artificial Sequence: Synthetic oligonucleotide
guugcccaucacauuccgc

SEQ ID NO: 2308167 - RNA, 19 nt, Artificial Sequence
  Description of Artificial Sequence: Synthetic oligonucleotide
ucccucgggcccaugugua

SEQ ID NO: 2308168 - RNA, 19 nt, Artificial Sequence
  Description of Artificial Sequence: Synthetic oligonucleotide
cugccccagucucacuggc

SEQ ID NO: 2308169 - RNA, 19 nt, Artificial Sequence
  Description of Artificial Sequence: Synthetic oligonucleotide
gcgagcugccgaucguugg

SEQ ID NO: 2308170 - RNA, 19 nt, Artificial Sequence
  Description of Artificial Sequence: Synthetic oligonucleotide
ucguuggggcaaacccacu

SEQ ID NO: 2308171 - RNA, 19 nt, Artificial Sequence
  Description of Artificial Sequence: Synthetic oligonucleotide
aguuguccauguaugucuu

SEQ ID NO: 2308172 - RNA, 19 nt, Artificial Sequence
  Description of Artificial Sequence: Synthetic oligonucleotide
gcagucuuugcagaauaca

SEQ ID NO: 2308173 - RNA, 19 nt, Artificial Sequence
  Description of Artificial Sequence: Synthetic oligonucleotide
cuugaccacggugggugug

SEQ ID NO: 2308174 - RNA, 19 nt, Artificial Sequence
  Description of Artificial Sequence: Synthetic oligonucleotide
gccagguggucacaucagc

SEQ ID NO: 2308175 - RNA, 19 nt, Artificial Sequence
  Description of Artificial Sequence: Synthetic oligonucleotide
ugggguucuaugggcucca

SEQ ID NO: 2308176 - RNA, 19 nt, Artificial Sequence
  Description of Artificial Sequence: Synthetic oligonucleotide
acauuccgcugcauagucu

SEQ ID NO: 2308177 - RNA, 19 nt, Artificial Sequence
  Description of Artificial Sequence: Synthetic oligonucleotide
aggccguugcccaucacau

SEQ ID NO: 2308178 - RNA, 19 nt, Artificial Sequence
  Description of Artificial Sequence: Synthetic oligonucleotide
gacgcccgauccucugcug

SEQ ID NO: 2308179 - RNA, 19 nt, Artificial Sequence
  Description of Artificial Sequence: Synthetic oligonucleotide
augcacagaccagccuguc

SEQ ID NO: 2308180 - RNA, 19 nt, Artificial Sequence
  Description of Artificial Sequence: Synthetic oligonucleotide
gagaggccguugcccauca

SEQ ID NO: 2308181 - RNA, 19 nt, Artificial Sequence
  Description of Artificial Sequence: Synthetic oligonucleotide
ugugggucugaggcaccug

SEQ ID NO: 2308182 - RNA, 19 nt, Artificial Sequence
  Description of Artificial Sequence: Synthetic oligonucleotide
accgcucugcucucuggau

SEQ ID NO: 2308183 - RNA, 19 nt, Artificial Sequence
  Description of Artificial Sequence: Synthetic oligonucleotide
gcccuuuguagaaccaggc

SEQ ID NO: 2308184 - RNA, 19 nt, Artificial Sequence
  Description of Artificial Sequence: Synthetic oligonucleotide
gcuuggcucucagagcgag

SEQ ID NO: 2308185 - RNA, 19 nt, Artificial Sequence
  Description of Artificial Sequence: Synthetic oligonucleotide
ggcuugucaccuuuugugu

SEQ ID NO: 2308186 - RNA, 19 nt, Artificial Sequence
  Description of Artificial Sequence: Synthetic oligonucleotide
agcauccccucuaggcuug

SEQ ID NO: 2308187 - RNA, 19 nt, Artificial Sequence
  Description of Artificial Sequence: Synthetic oligonucleotide
uccccgcagagcagacacu

SEQ ID NO: 2308188 - RNA, 19 nt, Artificial Sequence
  Description of Artificial Sequence: Synthetic oligonucleotide
ugaccacgguggguguggc

SEQ ID NO: 2308189 - RNA, 19 nt, Artificial Sequence
  Description of Artificial Sequence: Synthetic oligonucleotide
agcgagcugccgaucguug

SEQ ID NO: 2308190 - RNA, 19 nt, Artificial Sequence
  Description of Artificial Sequence: Synthetic oligonucleotide
ccagguggucacaucagca

SEQ ID NO: 2308191 - RNA, 19 nt, Artificial Sequence
  Description of Artificial Sequence: Synthetic oligonucleotide
aggggccgcuucuggccgg

SEQ ID NO: 2308192 - RNA, 19 nt, Artificial Sequence
  Description of Artificial Sequence: Synthetic oligonucleotide
agaccucucuuugcucacu

SEQ ID NO: 2308193 - RNA, 19 nt, Artificial Sequence
  Description of Artificial Sequence: Synthetic oligonucleotide
gcaaacccacugaucauuc

SEQ ID NO: 2308194 - RNA, 19 nt, Artificial Sequence
  Description of Artificial Sequence: Synthetic oligonucleotide
cuuugcuucuccgucuggu

SEQ ID NO: 2308195 - RNA, 19 nt, Artificial Sequence
  Description of Artificial Sequence: Synthetic oligonucleotide
ucagagcgagcugccgauc

SEQ ID NO: 2308196 - RNA, 19 nt, Artificial Sequence
  Description of Artificial Sequence: Synthetic oligonucleotide
gaggccucgaucccgcauu

SEQ ID NO: 2308197 - RNA, 19 nt, Artificial Sequence
  Description of Artificial Sequence: Synthetic oligonucleotide
ucucacuggccaggcugcu

SEQ ID NO: 2308198 - RNA, 19 nt, Artificial Sequence
  Description of Artificial Sequence: Synthetic oligonucleotide
uggaggagcugagguccga

SEQ ID NO: 2308199 - RNA, 19 nt, Artificial Sequence
  Description of Artificial Sequence: Synthetic oligonucleotide
ucgggcccauguguagaca

SEQ ID NO: 2308200 - RNA, 19 nt, Artificial Sequence
  Description of Artificial Sequence: Synthetic oligonucleotide
augcugccaccagcauccc

SEQ ID NO: 2308201 - RNA, 19 nt, Artificial Sequence
  Description of Artificial Sequence: Synthetic oligonucleotide
ccagccugucugcagcuug

SEQ ID NO: 2308202 - RNA, 19 nt, Artificial Sequence
  Description of Artificial Sequence: Synthetic oligonucleotide
cacgguggguguggcacug

SEQ ID NO: 2308203 - RNA, 19 nt, Artificial Sequence
  Description of Artificial Sequence: Synthetic oligonucleotide
gucggagauggggaucauc

SEQ ID NO: 2308204 - RNA, 19 nt, Artificial Sequence
  Description of Artificial Sequence: Synthetic oligonucleotide
ccaacaccuccccgcagag

SEQ ID NO: 2308205 - RNA, 19 nt, Artificial Sequence
  Description of Artificial Sequence: Synthetic oligonucleotide
agacacugggagaggccgu

SEQ ID NO: 2308206 - RNA, 19 nt, Artificial Sequence
  Description of Artificial Sequence: Synthetic oligonucleotide
cccgagagauggcugggug

SEQ ID NO: 2308207 - RNA, 19 nt, Artificial Sequence
  Description of Artificial Sequence: Synthetic oligonucleotide
cccagucucacuggccagg

SEQ ID NO: 2308208 - RNA, 19 nt, Artificial Sequence
  Description of Artificial Sequence: Synthetic oligonucleotide
gaccacgguggguguggca

SEQ ID NO: 2308209 - RNA, 19 nt, Artificial Sequence
  Description of Artificial Sequence: Synthetic oligonucleotide
gcugggguucuaugggcuc

SEQ ID NO: 2308210 - RNA, 19 nt, Artificial Sequence
  Description of Artificial Sequence: Synthetic oligonucleotide
ggguucuaugggcuccaca

SEQ ID NO: 2308211 - RNA, 19 nt, Artificial Sequence
  Description of Artificial Sequence: Synthetic oligonucleotide
cucagagcgagcugccgau

SEQ ID NO: 2308212 - RNA, 19 nt, Artificial Sequence
  Description of Artificial Sequence: Synthetic oligonucleotide
cacggcuggcuucagcacu

SEQ ID NO: 2308213 - RNA, 19 nt, Artificial Sequence
  Description of Artificial Sequence: Synthetic oligonucleotide
gcugccgaucguuggggca

SEQ ID NO: 2308214 - RNA, 19 nt, Artificial Sequence
  Description of Artificial Sequence: Synthetic oligonucleotide
cccgcagagcagacacugg

SEQ ID NO: 2308215 - RNA, 19 nt, Artificial Sequence
  Description of Artificial Sequence: Synthetic oligonucleotide
aggccucgaucccgcauuu

SEQ ID NO: 2308216 - RNA, 19 nt, Artificial Sequence
  Description of Artificial Sequence: Synthetic oligonucleotide
cugccgaucguuggggcaa

SEQ ID NO: 2308217 - RNA, 19 nt, Artificial Sequence
  Description of Artificial Sequence: Synthetic oligonucleotide
ccgcucugcucucuggaug

SEQ ID NO: 2308218 - RNA, 19 nt, Artificial Sequence
  Description of Artificial Sequence: Synthetic oligonucleotide
cccgauccucugcugcucc

SEQ ID NO: 2308219 - RNA, 19 nt, Artificial Sequence
  Description of Artificial Sequence: Synthetic oligonucleotide
ggcaaaggucggagauggg

SEQ ID NO: 2308220 - RNA, 19 nt, Artificial Sequence
  Description of Artificial Sequence: Synthetic oligonucleotide
accagacgcccgauccucu

SEQ ID NO: 2308221 - RNA, 19 nt, Artificial Sequence
  Description of Artificial Sequence: Synthetic oligonucleotide
ccccgcagagcagacacug

SEQ ID NO: 2308222 - RNA, 19 nt, Artificial Sequence
  Description of Artificial Sequence: Synthetic oligonucleotide
cagcggggaguuguccaug

SEQ ID NO: 2308223 - RNA, 19 nt, Artificial Sequence
  Description of Artificial Sequence: Synthetic oligonucleotide
ccgaucguuggggcaaacc

SEQ ID NO: 2308224 - RNA, 19 nt, Artificial Sequence
  Description of Artificial Sequence: Synthetic oligonucleotide
gccgggguggguugucccc

SEQ ID NO: 2308225 - RNA, 19 nt, Artificial Sequence
  Description of Artificial Sequence: Synthetic oligonucleotide
cgggcccauguguagacac

SEQ ID NO: 2308226 - RNA, 19 nt, Artificial Sequence
  Description of Artificial Sequence: Synthetic oligonucleotide
ccgagagauggcuggguga

SEQ ID NO: 2308227 - RNA, 19 nt, Artificial Sequence
  Description of Artificial Sequence: Synthetic oligonucleotide
cccaacaccuccccgcaga

SEQ ID NO: 2308228 - RNA, 19 nt, Artificial Sequence
  Description of Artificial Sequence: Synthetic oligonucleotide
cucccucgggcccaugugu

SEQ ID NO: 2308229 - RNA, 19 nt, Artificial Sequence
  Description of Artificial Sequence: Synthetic oligonucleotide
ggccgggguggguuguccc

SEQ ID NO: 2308230 - RNA, 19 nt, Artificial Sequence
  Description of Artificial Sequence: Synthetic oligonucleotide
accggacacccugggcuca

SEQ ID NO: 2308231 - RNA, 19 nt, Artificial Sequence
  Description of Artificial Sequence: Synthetic oligonucleotide
ccaaccgcucugcucucug

SEQ ID NO: 2308232 - RNA, 19 nt, Artificial Sequence
  Description of Artificial Sequence: Synthetic oligonucleotide
ccagacgcccgauccucug

SEQ ID NO: 2308233 - RNA, 19 nt, Artificial Sequence
  Description of Artificial Sequence: Synthetic oligonucleotide
ccccauccugggcaacucc

SEQ ID NO: 2308234 - RNA, 19 nt, Artificial Sequence
  Description of Artificial Sequence: Synthetic oligonucleotide
ugccgaucguuggggcaaa

SEQ ID NO: 2308235 - RNA, 19 nt, Artificial Sequence
  Description of Artificial Sequence: Synthetic oligonucleotide
guccaaccgcucugcucuc

SEQ ID NO: 2308236 - RNA, 19 nt, Artificial Sequence
  Description of Artificial Sequence: Synthetic oligonucleotide
ggggaucaucagcccggcc

SEQ ID NO: 2308237 - RNA, 19 nt, Artificial Sequence
  Description of Artificial Sequence: Synthetic oligonucleotide
ggagaggccguugcccauc

SEQ ID NO: 2308238 - RNA, 19 nt, Artificial Sequence
  Description of Artificial Sequence: Synthetic oligonucleotide
cccauguguagacacggcu

SEQ ID NO: 2308239 - RNA, 19 nt, Artificial Sequence
  Description of Artificial Sequence: Synthetic oligonucleotide
caccuccccgcagagcaga

SEQ ID NO: 2308240 - RNA, 19 nt, Artificial Sequence
  Description of Artificial Sequence: Synthetic oligonucleotide
aggccccauccugggcaac

SEQ ID NO: 2308241 - RNA, 19 nt, Artificial Sequence
  Description of Artificial Sequence: Synthetic oligonucleotide
gucuuuuaccggacacccu

SEQ ID NO: 2308242 - RNA, 19 nt, Artificial Sequence
  Description of Artificial Sequence: Synthetic oligonucleotide
ggcaaacccacugaucauu

SEQ ID NO: 2308243 - RNA, 19 nt, Artificial Sequence
  Description of Artificial Sequence: Synthetic oligonucleotide
ccgcauuuggugcagacuu

SEQ ID NO: 2308244 - RNA, 19 nt, Artificial Sequence
  Description of Artificial Sequence: Synthetic oligonucleotide
gacacugggagaggccguu

SEQ ID NO: 2308245 - RNA, 19 nt, Artificial Sequence
  Description of Artificial Sequence: Synthetic oligonucleotide
cccgaccucuuccagaccu

SEQ ID NO: 2308246 - RNA, 19 nt, Artificial Sequence
  Description of Artificial Sequence: Synthetic oligonucleotide
cucucccucgggcccaugu

SEQ ID NO: 2308247 - RNA, 19 nt, Artificial Sequence
  Description of Artificial Sequence: Synthetic oligonucleotide
ggggagcccuuuguagaac

SEQ ID NO: 2308248 - RNA, 19 nt, Artificial Sequence
  Description of Artificial Sequence: Synthetic oligonucleotide
ccguuccaccagacgcccg

SEQ ID NO: 2308249 - RNA, 19 nt, Artificial Sequence
  Description of Artificial Sequence: Synthetic oligonucleotide
caucagcagcggggaguug

SEQ ID NO: 2308250 - RNA, 19 nt, Artificial Sequence
  Description of Artificial Sequence: Synthetic oligonucleotide
gcacugcccaggaauccca

SEQ ID NO: 2308251 - RNA, 19 nt, Artificial Sequence
  Description of Artificial Sequence: Synthetic oligonucleotide
cauccccucuaggcuuguc

SEQ ID NO: 2308252 - RNA, 19 nt, Artificial Sequence
  Description of Artificial Sequence: Synthetic oligonucleotide
acgguggguguggcacugu

SEQ ID NO: 2308253 - RNA, 19 nt, Artificial Sequence
  Description of Artificial Sequence: Synthetic oligonucleotide
ccgaccucuuccagaccuc

SEQ ID NO: 2308254 - RNA, 19 nt, Artificial Sequence
  Description of Artificial Sequence: Synthetic oligonucleotide
gagcgagcugccgaucguu

SEQ ID NO: 2308255 - RNA, 19 nt, Artificial Sequence
  Description of Artificial Sequence: Synthetic oligonucleotide
cgaucccgcauuuggugca

SEQ ID NO: 2308256 - RNA, 19 nt, Artificial Sequence
  Description of Artificial Sequence: Synthetic oligonucleotide
cugcucuggcugcccgaga

SEQ ID NO: 2308257 - RNA, 19 nt, Artificial Sequence
  Description of Artificial Sequence: Synthetic oligonucleotide
gggcaaacccacugaucau

SEQ ID NO: 2308258 - RNA, 19 nt, Artificial Sequence
  Description of Artificial Sequence: Synthetic oligonucleotide
ggggccgcuucuggccggg

SEQ ID NO: 2308259 - RNA, 19 nt, Artificial Sequence
  Description of Artificial Sequence: Synthetic oligonucleotide
ccucgaucccgcauuuggu

SEQ ID NO: 2308260 - RNA, 19 nt, Artificial Sequence
  Description of Artificial Sequence: Synthetic oligonucleotide
guccuugaccacggugggu

SEQ ID NO: 2308261 - RNA, 19 nt, Artificial Sequence
  Description of Artificial Sequence: Synthetic oligonucleotide
ggccucgaucccgcauuug

SEQ ID NO: 2308262 - RNA, 19 nt, Artificial Sequence
  Description of Artificial Sequence: Synthetic oligonucleotide
cccacugaucauucccacu

SEQ ID NO: 2308263 - RNA, 19 nt, Artificial Sequence
  Description of Artificial Sequence: Synthetic oligonucleotide
gcagcggggaguuguccau

SEQ ID NO: 2308264 - RNA, 19 nt, Artificial Sequence
  Description of Artificial Sequence: Synthetic oligonucleotide
gccugucugcagcuuggcu

SEQ ID NO: 2308265 - RNA, 19 nt, Artificial Sequence
  Description of Artificial Sequence: Synthetic oligonucleotide
ccucgggcccauguguaga

SEQ ID NO: 2308266 - RNA, 19 nt, Artificial Sequence
  Description of Artificial Sequence: Synthetic oligonucleotide
gggguucuaugggcuccac

SEQ ID NO: 2308267 - RNA, 19 nt, Artificial Sequence
  Description of Artificial Sequence: Synthetic oligonucleotide
acucucccucgggcccaug

SEQ ID NO: 2308268 - RNA, 19 nt, Artificial Sequence
  Description of Artificial Sequence: Synthetic oligonucleotide
gcccgauccucugcugcuc

SEQ ID NO: 2308269 - RNA, 19 nt, Artificial Sequence
  Description of Artificial Sequence: Synthetic oligonucleotide
ccccgaccucuuccagacc

SEQ ID NO: 2308270 - RNA, 19 nt, Artificial Sequence
  Description of Artificial Sequence: Synthetic oligonucleotide
guuccaccagacgcccgau

SEQ ID NO: 2308271 - RNA, 19 nt, Artificial Sequence
  Description of Artificial Sequence: Synthetic oligonucleotide
cacuguccuccaggcugga

SEQ ID NO: 2308272 - RNA, 19 nt, Artificial Sequence
  Description of Artificial Sequence: Synthetic oligonucleotide
ccggacacccugggcucag

SEQ ID NO: 2308273 - RNA, 19 nt, Artificial Sequence
  Description of Artificial Sequence: Synthetic oligonucleotide
ggccccauccugggcaacu

SEQ ID NO: 2308274 - RNA, 19 nt, Artificial Sequence
  Description of Artificial Sequence: Synthetic oligonucleotide
gggagaggccguugcccau

SEQ ID NO: 2308275 - RNA, 19 nt, Artificial Sequence
  Description of Artificial Sequence: Synthetic oligonucleotide
gcggggaguuguccaugua

SEQ ID NO: 2308276 - RNA, 19 nt, Artificial Sequence
  Description of Artificial Sequence: Synthetic oligonucleotide
cuucuccgucugguaugua

SEQ ID NO: 2308277 - RNA, 19 nt, Artificial Sequence
  Description of Artificial Sequence: Synthetic oligonucleotide
gccgaucguuggggcaaac

SEQ ID NO: 2308278 - RNA, 19 nt, Artificial Sequence
  Description of Artificial Sequence: Synthetic oligonucleotide
ggccguugcccaucacauu

SEQ ID NO: 2308279 - RNA, 19 nt, Artificial Sequence
  Description of Artificial Sequence: Synthetic oligonucleotide
ccacgguggguguggcacu

SEQ ID NO: 2308280 - RNA, 19 nt, Artificial Sequence
  Description of Artificial Sequence: Synthetic oligonucleotide
ccuccccgcagagcagaca

SEQ ID NO: 2308281 - RNA, 19 nt, Artificial Sequence
  Description of Artificial Sequence: Synthetic oligonucleotide
cgcccgauccucugcugcu

SEQ ID NO: 2308282 - RNA, 19 nt, Artificial Sequence
  Description of Artificial Sequence: Synthetic oligonucleotide
ccucuaggcuugucaccuu

SEQ ID NO: 2308283 - RNA, 19 nt, Artificial Sequence
  Description of Artificial Sequence: Synthetic oligonucleotide
ggucggagauggggaucau

SEQ ID NO: 2308284 - RNA, 19 nt, Artificial Sequence
  Description of Artificial Sequence: Synthetic oligonucleotide
cagcccggccuggugucuu

SEQ ID NO: 2308285 - RNA, 19 nt, Artificial Sequence
  Description of Artificial Sequence: Synthetic oligonucleotide
aauauuaggagauaugaag

SEQ ID NO: 2308286 - RNA, 19 nt, Artificial Sequence
  Description of Artificial Sequence: Synthetic oligonucleotide
accaauguaaccuugauac

SEQ ID NO: 2308287 - RNA, 19 nt, Artificial Sequence
  Description of Artificial Sequence: Synthetic oligonucleotide
aacuaugccauccuuauag

SEQ ID NO: 2308288 - RNA, 19 nt, Artificial Sequence
  Description of Artificial Sequence: Synthetic oligonucleotide
uaucaguugauccaugagg

SEQ ID NO: 2308289 - RNA, 19 nt, Artificial Sequence
  Description of Artificial Sequence: Synthetic oligonucleotide
aaaucagcuuccaagaugg

SEQ ID NO: 2308290 - RNA, 19 nt, Artificial Sequence
  Description of Artificial Sequence: Synthetic oligonucleotide
uaaauauuaggagauauga

SEQ ID NO: 2308291 - RNA, 19 nt, Artificial Sequence
  Description of Artificial Sequence: Synthetic oligonucleotide
gcugaugacacacagaucg

SEQ ID NO: 2308292 - RNA, 19 nt, Artificial Sequence
  Description of Artificial Sequence: Synthetic oligonucleotide
uaaacuuaucuucaaacac

SEQ ID NO: 2308293 - RNA, 19 nt, Artificial Sequence
  Description of Artificial Sequence: Synthetic oligonucleotide
uccaguaacaucuacuccc

SEQ ID NO: 2308294 - RNA, 19 nt, Artificial Sequence
  Description of Artificial Sequence: Synthetic oligonucleotide
agagauaaccaacuacccc

SEQ ID NO: 2308295 - RNA, 19 nt, Artificial Sequence
  Description of Artificial Sequence: Synthetic oligonucleotide
auaccugaaaagcaucugc

SEQ ID NO: 2308296 - RNA, 19 nt, Artificial Sequence
  Description of Artificial Sequence: Synthetic oligonucleotide
agcaauaaauauuaggaga

SEQ ID NO: 2308297 - RNA, 19 nt, Artificial Sequence
  Description of Artificial Sequence: Synthetic oligonucleotide
ucuucuagcaccucaaucu

SEQ ID NO: 2308298 - RNA, 19 nt, Artificial Sequence
  Description of Artificial Sequence: Synthetic oligonucleotide
aaggcaauuuaucaguuga

SEQ ID NO: 2308299 - RNA, 19 nt, Artificial Sequence
  Description of Artificial Sequence: Synthetic oligonucleotide
aauaaauauuaggagauau

SEQ ID NO: 2308300 - RNA, 19 nt, Artificial Sequence
  Description of Artificial Sequence: Synthetic oligonucleotide
ucaacauccgauuagcagu

SEQ ID NO: 2308301 - RNA, 19 nt, Artificial Sequence
  Description of Artificial Sequence: Synthetic oligonucleotide
agaaaguccagcuugcucu

SEQ ID NO: 2308302 - RNA, 19 nt, Artificial Sequence
  Description of Artificial Sequence: Synthetic oligonucleotide
aaccaacuaccccagcacc

SEQ ID NO: 2308303 - RNA, 19 nt, Artificial Sequence
  Description of Artificial Sequence: Synthetic oligonucleotide
ugaaacaccgacaccgccg

SEQ ID NO: 2308304 - RNA, 19 nt, Artificial Sequence
  Description of Artificial Sequence: Synthetic oligonucleotide
aucgauguugcuuccagac

SEQ ID NO: 2308305 - RNA, 19 nt, Artificial Sequence
  Description of Artificial Sequence: Synthetic oligonucleotide
ugucaaaagaaaacccucc

SEQ ID NO: 2308306 - RNA, 19 nt, Artificial Sequence
  Description of Artificial Sequence: Synthetic oligonucleotide
acagcaauaaauauuagga

SEQ ID NO: 2308307 - RNA, 19 nt, Artificial Sequence
  Description of Artificial Sequence: Synthetic oligonucleotide
auagaugcuauagagauga

SEQ ID NO: 2308308 - RNA, 19 nt, Artificial Sequence
  Description of Artificial Sequence: Synthetic oligonucleotide
cacagcaauaaauauuagg

SEQ ID NO: 2308309 - RNA, 19 nt, Artificial Sequence
  Description of Artificial Sequence: Synthetic oligonucleotide
aaacccuccgacuggugcc

SEQ ID NO: 2308310 - RNA, 19 nt, Artificial Sequence
  Description of Artificial Sequence: Synthetic oligonucleotide
uucaacauccgauuagcag

SEQ ID NO: 2308311 - RNA, 19 nt, Artificial Sequence
  Description of Artificial Sequence: Synthetic oligonucleotide
agucacaacucuuggaagg

SEQ ID NO: 2308312 - RNA, 19 nt, Artificial Sequence
  Description of Artificial Sequence: Synthetic oligonucleotide
aaccuugauaccugaaaag

SEQ ID NO: 2308313 - RNA, 19 nt, Artificial Sequence
  Description of Artificial Sequence: Synthetic oligonucleotide
gagauaaccaacuacccca

SEQ ID NO: 2308314 - RNA, 19 nt, Artificial Sequence
  Description of Artificial Sequence: Synthetic oligonucleotide
aagaaaguccagcuugcuc

SEQ ID NO: 2308315 - RNA, 19 nt, Artificial Sequence
  Description of Artificial Sequence: Synthetic oligonucleotide
uuagcagucacaacucuug

SEQ ID NO: 2308316 - RNA, 19 nt, Artificial Sequence
  Description of Artificial Sequence: Synthetic oligonucleotide
cauuaaagaugccagcugc

SEQ ID NO: 2308317 - RNA, 19 nt, Artificial Sequence
  Description of Artificial Sequence: Synthetic oligonucleotide
ucuucaaacacagccauug

SEQ ID NO: 2308318 - RNA, 19 nt, Artificial Sequence
  Description of Artificial Sequence: Synthetic oligonucleotide
ugcuauagagaugaggucc

SEQ ID NO: 2308319 - RNA, 19 nt, Artificial Sequence
  Description of Artificial Sequence: Synthetic oligonucleotide
ugggcacugaguauggacg

SEQ ID NO: 2308320 - RNA, 19 nt, Artificial Sequence
  Description of Artificial Sequence: Synthetic oligonucleotide
aaacacagccauugcugcc

SEQ ID NO: 2308321 - RNA, 19 nt, Artificial Sequence
  Description of Artificial Sequence: Synthetic oligonucleotide
accuugauaccugaaaagc

SEQ ID NO: 2308322 - RNA, 19 nt, Artificial Sequence
  Description of Artificial Sequence: Synthetic oligonucleotide
caauugucaaaagaaaacc

SEQ ID NO: 2308323 - RNA, 19 nt, Artificial Sequence
  Description of Artificial Sequence: Synthetic oligonucleotide
aagucauuaaagaugccag

SEQ ID NO: 2308324 - RNA, 19 nt, Artificial Sequence
  Description of Artificial Sequence: Synthetic oligonucleotide
uugucagcgacaaccaucc

SEQ ID NO: 2308325 - RNA, 19 nt, Artificial Sequence
  Description of Artificial Sequence: Synthetic oligonucleotide
acgaagaaaguccagcuug

SEQ ID NO: 2308326 - RNA, 19 nt, Artificial Sequence
  Description of Artificial Sequence: Synthetic oligonucleotide
aaacuuaucuucaaacaca

SEQ ID NO: 2308327 - RNA, 19 nt, Artificial Sequence
  Description of Artificial Sequence: Synthetic oligonucleotide
gauagccucacucaccagc

SEQ ID NO: 2308328 - RNA, 19 nt, Artificial Sequence
  Description of Artificial Sequence: Synthetic oligonucleotide
aguauggacgaagaaaguc

SEQ ID NO: 2308329 - RNA, 19 nt, Artificial Sequence
  Description of Artificial Sequence: Synthetic oligonucleotide
aaguccagcuugcucuugc

SEQ ID NO: 2308330 - RNA, 19 nt, Artificial Sequence
  Description of Artificial Sequence: Synthetic oligonucleotide
cugccaaggagccagaacc

SEQ ID NO: 2308331 - RNA, 19 nt, Artificial Sequence
  Description of Artificial Sequence: Synthetic oligonucleotide
uuuaucaguugauccauga

SEQ ID NO: 2308332 - RNA, 19 nt, Artificial Sequence
  Description of Artificial Sequence: Synthetic oligonucleotide
gucaaaagaaaacccuccg

SEQ ID NO: 2308333 - RNA, 19 nt, Artificial Sequence
  Description of Artificial Sequence: Synthetic oligonucleotide
uuaucaguugauccaugag

SEQ ID NO: 2308334 - RNA, 19 nt, Artificial Sequence
  Description of Artificial Sequence: Synthetic oligonucleotide
uaccccagcaccauucacg

SEQ ID NO: 2308335 - RNA, 19 nt, Artificial Sequence
  Description of Artificial Sequence: Synthetic oligonucleotide
uggagcuccaaguuggaag

SEQ ID NO: 2308336 - RNA, 19 nt, Artificial Sequence
  Description of Artificial Sequence: Synthetic oligonucleotide
uccauaucuggccuaaacu

SEQ ID NO: 2308337 - RNA, 19 nt, Artificial Sequence
  Description of Artificial Sequence: Synthetic oligonucleotide
agcaccucaaucuccagag

SEQ ID NO: 2308338 - RNA, 19 nt, Artificial Sequence
  Description of Artificial Sequence: Synthetic oligonucleotide
ugcgacaauugucaaaaga

SEQ ID NO: 2308339 - RNA, 19 nt, Artificial Sequence
  Description of Artificial Sequence: Synthetic oligonucleotide
uauggacgaagaaagucca

SEQ ID NO: 2308340 - RNA, 19 nt, Artificial Sequence
  Description of Artificial Sequence: Synthetic oligonucleotide
cagcaauaaauauuaggag

SEQ ID NO: 2308341 - RNA, 19 nt, Artificial Sequence
  Description of Artificial Sequence: Synthetic oligonucleotide
uugucaaaagaaaacccuc

SEQ ID NO: 2308342 - RNA, 19 nt, Artificial Sequence
  Description of Artificial Sequence: Synthetic oligonucleotide
cuuucucgcaccuguaccg

SEQ ID NO: 2308343 - RNA, 19 nt, Artificial Sequence
  Description of Artificial Sequence: Synthetic oligonucleotide
auucacgaaguguccaugg

SEQ ID NO: 2308344 - RNA, 19 nt, Artificial Sequence
  Description of Artificial Sequence: Synthetic oligonucleotide
uuugucagcgacaaccauc

SEQ ID NO: 2308345 - RNA, 19 nt, Artificial Sequence
  Description of Artificial Sequence: Synthetic oligonucleotide
gcaauuuaucaguugaucc

SEQ ID NO: 2308346 - RNA, 19 nt, Artificial Sequence
  Description of Artificial Sequence: Synthetic oligonucleotide
ugauaccugaaaagcaucu

SEQ ID NO: 2308347 - RNA, 19 nt, Artificial Sequence
  Description of Artificial Sequence: Synthetic oligonucleotide
auaaccaacuaccccagca

SEQ ID NO: 2308348 - RNA, 19 nt, Artificial Sequence
  Description of Artificial Sequence: Synthetic oligonucleotide
ugcuucaacauccgauuag

SEQ ID NO: 2308349 - RNA, 19 nt, Artificial Sequence
  Description of Artificial Sequence: Synthetic oligonucleotide
uggacagucucuucuagca

SEQ ID NO: 2308350 - RNA, 19 nt, Artificial Sequence
  Description of Artificial Sequence: Synthetic oligonucleotide
uguagugccuuucucgcac

SEQ ID NO: 2308351 - RNA, 19 nt, Artificial Sequence
  Description of Artificial Sequence: Synthetic oligonucleotide
uuuucgggcuuuuggaagc

SEQ ID NO: 2308352 - RNA, 19 nt, Artificial Sequence
  Description of Artificial Sequence: Synthetic oligonucleotide
guauggacgaagaaagucc

SEQ ID NO: 2308353 - RNA, 19 nt, Artificial Sequence
  Description of Artificial Sequence: Synthetic oligonucleotide
aaccuuguccccuucuugu

SEQ ID NO: 2308354 - RNA, 19 nt, Artificial Sequence
  Description of Artificial Sequence: Synthetic oligonucleotide
accuguaccggccaaaccu

SEQ ID NO: 2308355 - RNA, 19 nt, Artificial Sequence
  Description of Artificial Sequence: Synthetic oligonucleotide
aaaccuuguccccuucuug

SEQ ID NO: 2308356 - RNA, 19 nt, Artificial Sequence
  Description of Artificial Sequence: Synthetic oligonucleotide
ucuugugucugcuccaaga

SEQ ID NO: 2308357 - RNA, 19 nt, Artificial Sequence
  Description of Artificial Sequence: Synthetic oligonucleotide
aguugauccaugaggauag

SEQ ID NO: 2308358 - RNA, 19 nt, Artificial Sequence
  Description of Artificial Sequence: Synthetic oligonucleotide
aaagaugccagcugcgaua

SEQ ID NO: 2308359 - RNA, 19 nt, Artificial Sequence
  Description of Artificial Sequence: Synthetic oligonucleotide
accggccaaaccuuguccc

SEQ ID NO: 2308360 - RNA, 19 nt, Artificial Sequence
  Description of Artificial Sequence: Synthetic oligonucleotide
augaggauagaugcuauag

SEQ ID NO: 2308361 - RNA, 19 nt, Artificial Sequence
  Description of Artificial Sequence: Synthetic oligonucleotide
uuuggaagcuugaaccccu

SEQ ID NO: 2308362 - RNA, 19 nt, Artificial Sequence
  Description of Artificial Sequence: Synthetic oligonucleotide
auugcugccaaggagccag

SEQ ID NO: 2308363 - RNA, 19 nt, Artificial Sequence
  Description of Artificial Sequence: Synthetic oligonucleotide
agaugcuauagagaugagg

SEQ ID NO: 2308364 - RNA, 19 nt, Artificial Sequence
  Description of Artificial Sequence: Synthetic oligonucleotide
gaugccagcugcgauagcc

SEQ ID NO: 2308365 - RNA, 19 nt, Artificial Sequence
  Description of Artificial Sequence: Synthetic oligonucleotide
caaccaucccuucaguugc

SEQ ID NO: 2308366 - RNA, 19 nt, Artificial Sequence
  Description of Artificial Sequence: Synthetic oligonucleotide
gaguggagcuccaaguugg

SEQ ID NO: 2308367 - RNA, 19 nt, Artificial Sequence
  Description of Artificial Sequence: Synthetic oligonucleotide
agaacuaugccauccuuau

SEQ ID NO: 2308368 - RNA, 19 nt, Artificial Sequence
  Description of Artificial Sequence: Synthetic oligonucleotide
aaauauuaggagauaugaa

SEQ ID NO: 2308369 - RNA, 19 nt, Artificial Sequence
  Description of Artificial Sequence: Synthetic oligonucleotide
ucaugucugugucugcagc

SEQ ID NO: 2308370 - RNA, 19 nt, Artificial Sequence
  Description of Artificial Sequence: Synthetic oligonucleotide
acuggugccugaaacaccg

SEQ ID NO: 2308371 - RNA, 19 nt, Artificial Sequence
  Description of Artificial Sequence: Synthetic oligonucleotide
ugggguauaccccagucau

SEQ ID NO: 2308372 - RNA, 19 nt, Artificial Sequence
  Description of Artificial Sequence: Synthetic oligonucleotide
uuugguugggguggggugg

SEQ ID NO: 2308373 - RNA, 19 nt, Artificial Sequence
  Description of Artificial Sequence: Synthetic oligonucleotide
uuuuggaagcuugaacccc

SEQ ID NO: 2308374 - RNA, 19 nt, Artificial Sequence
  Description of Artificial Sequence: Synthetic oligonucleotide
cuuguccccuucuuguugg

SEQ ID NO: 2308375 - RNA, 19 nt, Artificial Sequence
  Description of Artificial Sequence: Synthetic oligonucleotide
agcugcgauagccucacuc

SEQ ID NO: 2308376 - RNA, 19 nt, Artificial Sequence
  Description of Artificial Sequence: Synthetic oligonucleotide
cacaacucuuggaaggcgg

SEQ ID NO: 2308377 - RNA, 19 nt, Artificial Sequence
  Description of Artificial Sequence: Synthetic oligonucleotide
uguugggcacugaguaugg

SEQ ID NO: 2308378 - RNA, 19 nt, Artificial Sequence
  Description of Artificial Sequence: Synthetic oligonucleotide
uaaggcaauuuaucaguug

SEQ ID NO: 2308379 - RNA, 19 nt, Artificial Sequence
  Description of Artificial Sequence: Synthetic oligonucleotide
cagagagauaaccaacuac

SEQ ID NO: 2308380 - RNA, 19 nt, Artificial Sequence
  Description of Artificial Sequence: Synthetic oligonucleotide
gaaacaccgacaccgccgc

SEQ ID NO: 2308381 - RNA, 19 nt, Artificial Sequence
  Description of Artificial Sequence: Synthetic oligonucleotide
cccaagucauuaaagaugc

SEQ ID NO: 2308382 - RNA, 19 nt, Artificial Sequence
  Description of Artificial Sequence: Synthetic oligonucleotide
uagcagucacaacucuugg

SEQ ID NO: 2308383 - RNA, 19 nt, Artificial Sequence
  Description of Artificial Sequence: Synthetic oligonucleotide
acauccgauuagcagucac

SEQ ID NO: 2308384 - RNA, 19 nt, Artificial Sequence
  Description of Artificial Sequence: Synthetic oligonucleotide
auuaaagaugccagcugcg

SEQ ID NO: 2308385 - RNA, 19 nt, Artificial Sequence
  Description of Artificial Sequence: Synthetic oligonucleotide
agaucgauguugcuuccag

SEQ ID NO: 2308386 - RNA, 19 nt, Artificial Sequence
  Description of Artificial Sequence: Synthetic oligonucleotide
uugcucuugcugaugacac

SEQ ID NO: 2308387 - RNA, 19 nt, Artificial Sequence
  Description of Artificial Sequence: Synthetic oligonucleotide
uuggaaggcggccaguggu

SEQ ID NO: 2308388 - RNA, 19 nt, Artificial Sequence
  Description of Artificial Sequence: Synthetic oligonucleotide
aucaguugauccaugagga

SEQ ID NO: 2308389 - RNA, 19 nt, Artificial Sequence
  Description of Artificial Sequence: Synthetic oligonucleotide
uuuugguugggguggggug

SEQ ID NO: 2308390 - RNA, 19 nt, Artificial Sequence
  Description of Artificial Sequence: Synthetic oligonucleotide
guauaccccagucauccag

SEQ ID NO: 2308391 - RNA, 19 nt, Artificial Sequence
  Description of Artificial Sequence: Synthetic oligonucleotide
ucugcuucaacauccgauu

SEQ ID NO: 2308392 - RNA, 19 nt, Artificial Sequence
  Description of Artificial Sequence: Synthetic oligonucleotide
uugauaccugaaaagcauc

SEQ ID NO: 2308393 - RNA, 19 nt, Artificial Sequence
  Description of Artificial Sequence: Synthetic oligonucleotide
uggacgaagaaaguccagc

SEQ ID NO: 2308394 - RNA, 19 nt, Artificial Sequence
  Description of Artificial Sequence: Synthetic oligonucleotide
uauaccccagucauccaga

SEQ ID NO: 2308395 - RNA, 19 nt, Artificial Sequence
  Description of Artificial Sequence: Synthetic oligonucleotide
uuguugggcacugaguaug

SEQ ID NO: 2308396 - RNA, 19 nt, Artificial Sequence
  Description of Artificial Sequence: Synthetic oligonucleotide
auaagcuggguugucaugu

SEQ ID NO: 2308397 - RNA, 19 nt, Artificial Sequence
  Description of Artificial Sequence: Synthetic oligonucleotide
cuucaguugcucuuguguc

SEQ ID NO: 2308398 - RNA, 19 nt, Artificial Sequence
  Description of Artificial Sequence: Synthetic oligonucleotide
agaguggagcuccaaguug

SEQ ID NO: 2308399 - RNA, 19 nt, Artificial Sequence
  Description of Artificial Sequence: Synthetic oligonucleotide
ucagugaggaccgcuguag

SEQ ID NO: 2308400 - RNA, 19 nt, Artificial Sequence
  Description of Artificial Sequence: Synthetic oligonucleotide
acacacagaucgauguugc

SEQ ID NO: 2308401 - RNA, 19 nt, Artificial Sequence
  Description of Artificial Sequence: Synthetic oligonucleotide
uccgacuggugccugaaac

SEQ ID NO: 2308402 - RNA, 19 nt, Artificial Sequence
  Description of Artificial Sequence: Synthetic oligonucleotide
uggguugucaugucugugu

SEQ ID NO: 2308403 - RNA, 19 nt, Artificial Sequence
  Description of Artificial Sequence: Synthetic oligonucleotide
ucgauguugcuuccagacc

SEQ ID NO: 2308404 - RNA, 19 nt, Artificial Sequence
  Description of Artificial Sequence: Synthetic oligonucleotide
cuaugccauccuuauagac

SEQ ID NO: 2308405 - RNA, 19 nt, Artificial Sequence
  Description of Artificial Sequence: Synthetic oligonucleotide
acccauggugacauaaggc

SEQ ID NO: 2308406 - RNA, 19 nt, Artificial Sequence
  Description of Artificial Sequence: Synthetic oligonucleotide
ucacgaaguguccaugguc

SEQ ID NO: 2308407 - RNA, 19 nt, Artificial Sequence
  Description of Artificial Sequence: Synthetic oligonucleotide
ugcaccaauguaaccuuga

SEQ ID NO: 2308408 - RNA, 19 nt, Artificial Sequence
  Description of Artificial Sequence: Synthetic oligonucleotide
accccuucuuugcaaaauc

SEQ ID NO: 2308409 - RNA, 19 nt, Artificial Sequence
  Description of Artificial Sequence: Synthetic oligonucleotide
aaaacuagggcugcaccaa

SEQ ID NO: 2308410 - RNA, 19 nt, Artificial Sequence
  Description of Artificial Sequence: Synthetic oligonucleotide
cauuccugcgacaauuguc

SEQ ID NO: 2308411 - RNA, 19 nt, Artificial Sequence
  Description of Artificial Sequence: Synthetic oligonucleotide
ugcgauagccucacucacc

SEQ ID NO: 2308412 - RNA, 19 nt, Artificial Sequence
  Description of Artificial Sequence: Synthetic oligonucleotide
caccucaaucuccagagug

SEQ ID NO: 2308413 - RNA, 19 nt, Artificial Sequence
  Description of Artificial Sequence: Synthetic oligonucleotide
cuucuuguugggcacugag

SEQ ID NO: 2308414 - RNA, 19 nt, Artificial Sequence
  Description of Artificial Sequence: Synthetic oligonucleotide
aucuggccuaaacuuaucu

SEQ ID NO: 2308415 - RNA, 19 nt, Artificial Sequence
  Description of Artificial Sequence: Synthetic oligonucleotide
gaaauaagcuggguuguca

SEQ ID NO: 2308416 - RNA, 19 nt, Artificial Sequence
  Description of Artificial Sequence: Synthetic oligonucleotide
gauagaugcuauagagaug

SEQ ID NO: 2308417 - RNA, 19 nt, Artificial Sequence
  Description of Artificial Sequence: Synthetic oligonucleotide
agccauugcugccaaggag

SEQ ID NO: 2308418 - RNA, 19 nt, Artificial Sequence
  Description of Artificial Sequence: Synthetic oligonucleotide
caaaacuagggcugcacca

SEQ ID NO: 2308419 - RNA, 19 nt, Artificial Sequence
  Description of Artificial Sequence: Synthetic oligonucleotide
ucgggcuuuuggaagcuug

SEQ ID NO: 2308420 - RNA, 19 nt, Artificial Sequence
  Description of Artificial Sequence: Synthetic oligonucleotide
ccuucuuugcaaaaucagc

SEQ ID NO: 2308421 - RNA, 19 nt, Artificial Sequence
  Description of Artificial Sequence: Synthetic oligonucleotide
acuagggcugcaccaaugu

SEQ ID NO: 2308422 - RNA, 19 nt, Artificial Sequence
  Description of Artificial Sequence: Synthetic oligonucleotide
agugaggaccgcuguagug

SEQ ID NO: 2308423 - RNA, 19 nt, Artificial Sequence
  Description of Artificial Sequence: Synthetic oligonucleotide
cauccuuauagaccacccc

SEQ ID NO: 2308424 - RNA, 19 nt, Artificial Sequence
  Description of Artificial Sequence: Synthetic oligonucleotide
ccaaguuggaagaaauaag

SEQ ID NO: 2308425 - RNA, 19 nt, Artificial Sequence
  Description of Artificial Sequence: Synthetic oligonucleotide
ugccaaggagccagaaccc

SEQ ID NO: 2308426 - RNA, 19 nt, Artificial Sequence
  Description of Artificial Sequence: Synthetic oligonucleotide
aaguguccauggucuggac

SEQ ID NO: 2308427 - RNA, 19 nt, Artificial Sequence
  Description of Artificial Sequence: Synthetic oligonucleotide
uucacgaaguguccauggu

SEQ ID NO: 2308428 - RNA, 19 nt, Artificial Sequence
  Description of Artificial Sequence: Synthetic oligonucleotide
ugucaugucugugucugca

SEQ ID NO: 2308429 - RNA, 19 nt, Artificial Sequence
  Description of Artificial Sequence: Synthetic oligonucleotide
accucaaucuccagagugg

SEQ ID NO: 2308430 - RNA, 19 nt, Artificial Sequence
  Description of Artificial Sequence: Synthetic oligonucleotide
ugaggaccgcuguagugcc

SEQ ID NO: 2308431 - RNA, 19 nt, Artificial Sequence
  Description of Artificial Sequence: Synthetic oligonucleotide
uguaaccuugauaccugaa

SEQ ID NO: 2308432 - RNA, 19 nt, Artificial Sequence
  Description of Artificial Sequence: Synthetic oligonucleotide
aacucuuggaaggcggcca

SEQ ID NO: 2308433 - RNA, 19 nt, Artificial Sequence
  Description of Artificial Sequence: Synthetic oligonucleotide
uaccggccaaaccuugucc

SEQ ID NO: 2308434 - RNA, 19 nt, Artificial Sequence
  Description of Artificial Sequence: Synthetic oligonucleotide
cagucauccagagagauaa

SEQ ID NO: 2308435 - RNA, 19 nt, Artificial Sequence
  Description of Artificial Sequence: Synthetic oligonucleotide
caacauccgauuagcaguc

SEQ ID NO: 2308436 - RNA, 19 nt, Artificial Sequence
  Description of Artificial Sequence: Synthetic oligonucleotide
uuucucgcaccuguaccgg

SEQ ID NO: 2308437 - RNA, 19 nt, Artificial Sequence
  Description of Artificial Sequence: Synthetic oligonucleotide
gguccaguaacaucuacuc

SEQ ID NO: 2308438 - RNA, 19 nt, Artificial Sequence
  Description of Artificial Sequence: Synthetic oligonucleotide
aagcuggguugucaugucu

SEQ ID NO: 2308439 - RNA, 19 nt, Artificial Sequence
  Description of Artificial Sequence: Synthetic oligonucleotide
gugaggaccgcuguagugc

SEQ ID NO: 2308440 - RNA, 19 nt, Artificial Sequence
  Description of Artificial Sequence: Synthetic oligonucleotide
acuaugccauccuuauaga

SEQ ID NO: 2308441 - RNA, 19 nt, Artificial Sequence
  Description of Artificial Sequence: Synthetic oligonucleotide
ucucgcaccuguaccggcc

SEQ ID NO: 2308442 - RNA, 19 nt, Artificial Sequence
  Description of Artificial Sequence: Synthetic oligonucleotide
uggugccugaaacaccgac

SEQ ID NO: 2308443 - RNA, 19 nt, Artificial Sequence
  Description of Artificial Sequence: Synthetic oligonucleotide
agggcugcaccaauguaac

SEQ ID NO: 2308444 - RNA, 19 nt, Artificial Sequence
  Description of Artificial Sequence: Synthetic oligonucleotide
ucuggccuaaacuuaucuu

SEQ ID NO: 2308445 - RNA, 19 nt, Artificial Sequence
  Description of Artificial Sequence: Synthetic oligonucleotide
agcaccauucacgaagugu

SEQ ID NO: 2308446 - RNA, 19 nt, Artificial Sequence
  Description of Artificial Sequence: Synthetic oligonucleotide
ggguauaccccagucaucc

SEQ ID NO: 2308447 - RNA, 19 nt, Artificial Sequence
  Description of Artificial Sequence: Synthetic oligonucleotide
ucuuggaaggcggccagug

SEQ ID NO: 2308448 - RNA, 19 nt, Artificial Sequence
  Description of Artificial Sequence: Synthetic oligonucleotide
aaucagcuuccaagauggc

SEQ ID NO: 2308449 - RNA, 19 nt, Artificial Sequence
  Description of Artificial Sequence: Synthetic oligonucleotide
uuuugucagcgacaaccau

SEQ ID NO: 2308450 - RNA, 19 nt, Artificial Sequence
  Description of Artificial Sequence: Synthetic oligonucleotide
aacaccgacaccgccgcca

SEQ ID NO: 2308451 - RNA, 19 nt, Artificial Sequence
  Description of Artificial Sequence: Synthetic oligonucleotide
guccaguaacaucuacucc

SEQ ID NO: 2308452 - RNA, 19 nt, Artificial Sequence
  Description of Artificial Sequence: Synthetic oligonucleotide
gauaaccaacuaccccagc

SEQ ID NO: 2308453 - RNA, 19 nt, Artificial Sequence
  Description of Artificial Sequence: Synthetic oligonucleotide
uaggagauaugaagugaau

SEQ ID NO: 2308454 - RNA, 19 nt, Artificial Sequence
  Description of Artificial Sequence: Synthetic oligonucleotide
cugaaacaccgacaccgcc

SEQ ID NO: 2308455 - RNA, 19 nt, Artificial Sequence
  Description of Artificial Sequence: Synthetic oligonucleotide
agcagucacaacucuugga

SEQ ID NO: 2308456 - RNA, 19 nt, Artificial Sequence
  Description of Artificial Sequence: Synthetic oligonucleotide
aaacuagggcugcaccaau

SEQ ID NO: 2308457 - RNA, 19 nt, Artificial Sequence
  Description of Artificial Sequence: Synthetic oligonucleotide
cuugauaccugaaaagcau

SEQ ID NO: 2308458 - RNA, 19 nt, Artificial Sequence
  Description of Artificial Sequence: Synthetic oligonucleotide
cuuggaaggcggccagugg

SEQ ID NO: 2308459 - RNA, 19 nt, Artificial Sequence
  Description of Artificial Sequence: Synthetic oligonucleotide
uguaccggccaaaccuugu

SEQ ID NO: 2308460 - RNA, 19 nt, Artificial Sequence
  Description of Artificial Sequence: Synthetic oligonucleotide
agcaccacagcaauaaaua

SEQ ID NO: 2308461 - RNA, 19 nt, Artificial Sequence
  Description of Artificial Sequence: Synthetic oligonucleotide
aggagauaugaagugaauu

SEQ ID NO: 2308462 - RNA, 19 nt, Artificial Sequence
  Description of Artificial Sequence: Synthetic oligonucleotide
aggauagaugcuauagaga

SEQ ID NO: 2308463 - RNA, 19 nt, Artificial Sequence
  Description of Artificial Sequence: Synthetic oligonucleotide
cugaguauggacgaagaaa

SEQ ID NO: 2308464 - RNA, 19 nt, Artificial Sequence
  Description of Artificial Sequence: Synthetic oligonucleotide
gcuguagugccuuucucgc

SEQ ID NO: 2308465 - RNA, 19 nt, Artificial Sequence
  Description of Artificial Sequence: Synthetic oligonucleotide
auaccccagucauccagag

SEQ ID NO: 2308466 - RNA, 19 nt, Artificial Sequence
  Description of Artificial Sequence: Synthetic oligonucleotide
ugcuuccagaccccaaguc

SEQ ID NO: 2308467 - RNA, 19 nt, Artificial Sequence
  Description of Artificial Sequence: Synthetic oligonucleotide
gauggcauuccugcgacaa

SEQ ID NO: 2308468 - RNA, 19 nt, Artificial Sequence
  Description of Artificial Sequence: Synthetic oligonucleotide
caccauucacgaagugucc

SEQ ID NO: 2308469 - RNA, 19 nt, Artificial Sequence
  Description of Artificial Sequence: Synthetic oligonucleotide
uugaaccccuucuuugcaa

SEQ ID NO: 2308470 - RNA, 19 nt, Artificial Sequence
  Description of Artificial Sequence: Synthetic oligonucleotide
gucaugucugugucugcag

SEQ ID NO: 2308471 - RNA, 19 nt, Artificial Sequence
  Description of Artificial Sequence: Synthetic oligonucleotide
accccagcaccauucacga

SEQ ID NO: 2308472 - RNA, 19 nt, Artificial Sequence
  Description of Artificial Sequence: Synthetic oligonucleotide
ggugagagaguggagcucc

SEQ ID NO: 2308473 - RNA, 19 nt, Artificial Sequence
  Description of Artificial Sequence: Synthetic oligonucleotide
gaaguguccauggucugga

SEQ ID NO: 2308474 - RNA, 19 nt, Artificial Sequence
  Description of Artificial Sequence: Synthetic oligonucleotide
caauguaaccuugauaccu

SEQ ID NO: 2308475 - RNA, 19 nt, Artificial Sequence
  Description of Artificial Sequence: Synthetic oligonucleotide
agcgacaaccaucccuuca

SEQ ID NO: 2308476 - RNA, 19 nt, Artificial Sequence
  Description of Artificial Sequence: Synthetic oligonucleotide
aacuagggcugcaccaaug

SEQ ID NO: 2308477 - RNA, 19 nt, Artificial Sequence
  Description of Artificial Sequence: Synthetic oligonucleotide
uugcuuccagaccccaagu

SEQ ID NO: 2308478 - RNA, 19 nt, Artificial Sequence
  Description of Artificial Sequence: Synthetic oligonucleotide
uagaugcuauagagaugag

SEQ ID NO: 2308479 - RNA, 19 nt, Artificial Sequence
  Description of Artificial Sequence: Synthetic oligonucleotide
agaacccauggugacauaa

SEQ ID NO: 2308480 - RNA, 19 nt, Artificial Sequence
  Description of Artificial Sequence: Synthetic oligonucleotide
auccgauuagcagucacaa

SEQ ID NO: 2308481 - RNA, 19 nt, Artificial Sequence
  Description of Artificial Sequence: Synthetic oligonucleotide
ggagcuccaaguuggaaga

SEQ ID NO: 2308482 - RNA, 19 nt, Artificial Sequence
  Description of Artificial Sequence: Synthetic oligonucleotide
ggagauaugaagugaauuu

SEQ ID NO: 2308483 - RNA, 19 nt, Artificial Sequence
  Description of Artificial Sequence: Synthetic oligonucleotide
gcgacaaccaucccuucag

SEQ ID NO: 2308484 - RNA, 19 nt, Artificial Sequence
  Description of Artificial Sequence: Synthetic oligonucleotide
gaucgauguugcuuccaga

SEQ ID NO: 2308485 - RNA, 19 nt, Artificial Sequence
  Description of Artificial Sequence: Synthetic oligonucleotide
aucugcuucaacauccgau

SEQ ID NO: 2308486 - RNA, 19 nt, Artificial Sequence
  Description of Artificial Sequence: Synthetic oligonucleotide
auaucuggccuaaacuuau

SEQ ID NO: 2308487 - RNA, 19 nt, Artificial Sequence
  Description of Artificial Sequence: Synthetic oligonucleotide
gcagucacaacucuuggaa

SEQ ID NO: 2308488 - RNA, 19 nt, Artificial Sequence
  Description of Artificial Sequence: Synthetic oligonucleotide
gcgacaauugucaaaagaa

SEQ ID NO: 2308489 - RNA, 19 nt, Artificial Sequence
  Description of Artificial Sequence: Synthetic oligonucleotide
uccgauuagcagucacaac

SEQ ID NO: 2308490 - RNA, 19 nt, Artificial Sequence
  Description of Artificial Sequence: Synthetic oligonucleotide
agaaaacccuccgacuggu

SEQ ID NO: 2308491 - RNA, 19 nt, Artificial Sequence
  Description of Artificial Sequence: Synthetic oligonucleotide
gauuagcagucacaacucu

SEQ ID NO: 2308492 - RNA, 19 nt, Artificial Sequence
  Description of Artificial Sequence: Synthetic oligonucleotide
cuugcugaugacacacaga

SEQ ID NO: 2308493 - RNA, 19 nt, Artificial Sequence
  Description of Artificial Sequence: Synthetic oligonucleotide
auuuaucaguugauccaug

SEQ ID NO: 2308494 - RNA, 19 nt, Artificial Sequence
  Description of Artificial Sequence: Synthetic oligonucleotide
cauccgauuagcagucaca

SEQ ID NO: 2308495 - RNA, 19 nt, Artificial Sequence
  Description of Artificial Sequence: Synthetic oligonucleotide
auagccucacucaccagcu

SEQ ID NO: 2308496 - RNA, 19 nt, Artificial Sequence
  Description of Artificial Sequence: Synthetic oligonucleotide
cuugugucugcuccaagaa

SEQ ID NO: 2308497 - RNA, 19 nt, Artificial Sequence
  Description of Artificial Sequence: Synthetic oligonucleotide
uccugcgacaauugucaaa

SEQ ID NO: 2308498 - RNA, 19 nt, Artificial Sequence
  Description of Artificial Sequence: Synthetic oligonucleotide
acuaccccagcaccauuca

SEQ ID NO: 2308499 - RNA, 19 nt, Artificial Sequence
  Description of Artificial Sequence: Synthetic oligonucleotide
ccaguaacaucuacucccc

SEQ ID NO: 2308500 - RNA, 19 nt, Artificial Sequence
  Description of Artificial Sequence: Synthetic oligonucleotide
acacagaucgauguugcuu

SEQ ID NO: 2308501 - RNA, 19 nt, Artificial Sequence
  Description of Artificial Sequence: Synthetic oligonucleotide
cuucaacauccgauuagca

SEQ ID NO: 2308502 - RNA, 19 nt, Artificial Sequence
  Description of Artificial Sequence: Synthetic oligonucleotide
accgcuguagugccuuucu

SEQ ID NO: 2308503 - RNA, 19 nt, Artificial Sequence
  Description of Artificial Sequence: Synthetic oligonucleotide
uaucuggccuaaacuuauc

SEQ ID NO: 2308504 - RNA, 19 nt, Artificial Sequence
  Description of Artificial Sequence: Synthetic oligonucleotide
accauucacgaagugucca

SEQ ID NO: 2308505 - RNA, 19 nt, Artificial Sequence
  Description of Artificial Sequence: Synthetic oligonucleotide
ugacuuucucagugaggac

SEQ ID NO: 2308506 - RNA, 19 nt, Artificial Sequence
  Description of Artificial Sequence: Synthetic oligonucleotide
ccaaaacuagggcugcacc

SEQ ID NO: 2308507 - RNA, 19 nt, Artificial Sequence
  Description of Artificial Sequence: Synthetic oligonucleotide
cugcgauagccucacucac

SEQ ID NO: 2308508 - RNA, 19 nt, Artificial Sequence
  Description of Artificial Sequence: Synthetic oligonucleotide
uucucgcaccuguaccggc

SEQ ID NO: 2308509 - RNA, 19 nt, Artificial Sequence
  Description of Artificial Sequence: Synthetic oligonucleotide
uugucaugucugugucugc

SEQ ID NO: 2308510 - RNA, 19 nt, Artificial Sequence
  Description of Artificial Sequence: Synthetic oligonucleotide
cauucacgaaguguccaug

SEQ ID NO: 2308511 - RNA, 19 nt, Artificial Sequence
  Description of Artificial Sequence: Synthetic oligonucleotide
ggcaauuuaucaguugauc

SEQ ID NO: 2308512 - RNA, 19 nt, Artificial Sequence
  Description of Artificial Sequence: Synthetic oligonucleotide
acgaaguguccauggucug

SEQ ID NO: 2308513 - RNA, 19 nt, Artificial Sequence
  Description of Artificial Sequence: Synthetic oligonucleotide
uugguuggggugggguggg

SEQ ID NO: 2308514 - RNA, 19 nt, Artificial Sequence
  Description of Artificial Sequence: Synthetic oligonucleotide
uggcauuccugcgacaauu

SEQ ID NO: 2308515 - RNA, 19 nt, Artificial Sequence
  Description of Artificial Sequence: Synthetic oligonucleotide
cacugaguauggacgaaga

SEQ ID NO: 2308516 - RNA, 19 nt, Artificial Sequence
  Description of Artificial Sequence: Synthetic oligonucleotide
uuguccccuucuuguuggg

SEQ ID NO: 2308517 - RNA, 19 nt, Artificial Sequence
  Description of Artificial Sequence: Synthetic oligonucleotide
ccauccuuauagaccaccc

SEQ ID NO: 2308518 - RNA, 19 nt, Artificial Sequence
  Description of Artificial Sequence: Synthetic oligonucleotide
ccaauguaaccuugauacc

SEQ ID NO: 2308519 - RNA, 19 nt, Artificial Sequence
  Description of Artificial Sequence: Synthetic oligonucleotide
gcaauaaauauuaggagau

SEQ ID NO: 2308520 - RNA, 19 nt, Artificial Sequence
  Description of Artificial Sequence: Synthetic oligonucleotide
gucagcgacaaccaucccu

SEQ ID NO: 2308521 - RNA, 19 nt, Artificial Sequence
  Description of Artificial Sequence: Synthetic oligonucleotide
gcugcgauagccucacuca

SEQ ID NO: 2308522 - RNA, 19 nt, Artificial Sequence
  Description of Artificial Sequence: Synthetic oligonucleotide
cuugaaccccuucuuugca

SEQ ID NO: 2308523 - RNA, 19 nt, Artificial Sequence
  Description of Artificial Sequence: Synthetic oligonucleotide
ccuuucucgcaccuguacc

SEQ ID NO: 2308524 - RNA, 19 nt, Artificial Sequence
  Description of Artificial Sequence: Synthetic oligonucleotide
gcuuccagaccccaaguca

SEQ ID NO: 2308525 - RNA, 19 nt, Artificial Sequence
  Description of Artificial Sequence: Synthetic oligonucleotide
ccuugauaccugaaaagca

SEQ ID NO: 2308526 - RNA, 19 nt, Artificial Sequence
  Description of Artificial Sequence: Synthetic oligonucleotide
auuagcagucacaacucuu

SEQ ID NO: 2308527 - RNA, 19 nt, Artificial Sequence
  Description of Artificial Sequence: Synthetic oligonucleotide
gacuggugccugaaacacc

SEQ ID NO: 2308528 - RNA, 19 nt, Artificial Sequence
  Description of Artificial Sequence: Synthetic oligonucleotide
guagugccuuucucgcacc

SEQ ID NO: 2308529 - RNA, 19 nt, Artificial Sequence
  Description of Artificial Sequence: Synthetic oligonucleotide
caacucuuggaaggcggcc

SEQ ID NO: 2308530 - RNA, 19 nt, Artificial Sequence
  Description of Artificial Sequence: Synthetic oligonucleotide
cgcuguagugccuuucucg

SEQ ID NO: 2308531 - RNA, 19 nt, Artificial Sequence
  Description of Artificial Sequence: Synthetic oligonucleotide
uaccccagucauccagaga

SEQ ID NO: 2308532 - RNA, 19 nt, Artificial Sequence
  Description of Artificial Sequence: Synthetic oligonucleotide
ccgauuagcagucacaacu

SEQ ID NO: 2308533 - RNA, 19 nt, Artificial Sequence
  Description of Artificial Sequence: Synthetic oligonucleotide
cuauagagaugagguccag

SEQ ID NO: 2308534 - RNA, 19 nt, Artificial Sequence
  Description of Artificial Sequence: Synthetic oligonucleotide
gcgauagccucacucacca

SEQ ID NO: 2308535 - RNA, 19 nt, Artificial Sequence
  Description of Artificial Sequence: Synthetic oligonucleotide
gcggccaguggugagagag

SEQ ID NO: 2308536 - RNA, 19 nt, Artificial Sequence
  Description of Artificial Sequence: Synthetic oligonucleotide
caguugauccaugaggaua

SEQ ID NO: 2308537 - RNA, 19 nt, Artificial Sequence
  Description of Artificial Sequence: Synthetic oligonucleotide
aacauccgauuagcaguca

SEQ ID NO: 2308538 - RNA, 19 nt, Artificial Sequence
  Description of Artificial Sequence: Synthetic oligonucleotide
cugaugacacacagaucga

SEQ ID NO: 2308539 - RNA, 19 nt, Artificial Sequence
  Description of Artificial Sequence: Synthetic oligonucleotide
uccuccauaucuggccuaa

SEQ ID NO: 2308540 - RNA, 19 nt, Artificial Sequence
  Description of Artificial Sequence: Synthetic oligonucleotide
cccgcaauaguagugccag

SEQ ID NO: 2308541 - RNA, 19 nt, Artificial Sequence
  Description of Artificial Sequence: Synthetic oligonucleotide
uccagaccccaagucauua

SEQ ID NO: 2308542 - RNA, 19 nt, Artificial Sequence
  Description of Artificial Sequence: Synthetic oligonucleotide
guaccggccaaaccuuguc

SEQ ID NO: 2308543 - RNA, 19 nt, Artificial Sequence
  Description of Artificial Sequence: Synthetic oligonucleotide
uuucgggcuuuuggaagcu

SEQ ID NO: 2308544 - RNA, 19 nt, Artificial Sequence
  Description of Artificial Sequence: Synthetic oligonucleotide
cugcgacaauugucaaaag

SEQ ID NO: 2308545 - RNA, 19 nt, Artificial Sequence
  Description of Artificial Sequence: Synthetic oligonucleotide
aacccuccgacuggugccu

SEQ ID NO: 2308546 - RNA, 19 nt, Artificial Sequence
  Description of Artificial Sequence: Synthetic oligonucleotide
aggagccagaacccauggu

SEQ ID NO: 2308547 - RNA, 19 nt, Artificial Sequence
  Description of Artificial Sequence: Synthetic oligonucleotide
caccuguaccggccaaacc

SEQ ID NO: 2308548 - RNA, 19 nt, Artificial Sequence
  Description of Artificial Sequence: Synthetic oligonucleotide
auggacgaagaaaguccag

SEQ ID NO: 2308549 - RNA, 19 nt, Artificial Sequence
  Description of Artificial Sequence: Synthetic oligonucleotide
cauggugacauaaggcaau

SEQ ID NO: 2308550 - RNA, 19 nt, Artificial Sequence
  Description of Artificial Sequence: Synthetic oligonucleotide
gcuuccaagauggcauucc

SEQ ID NO: 2308551 - RNA, 19 nt, Artificial Sequence
  Description of Artificial Sequence: Synthetic oligonucleotide
gacgaagaaaguccagcuu

SEQ ID NO: 2308552 - RNA, 19 nt, Artificial Sequence
  Description of Artificial Sequence: Synthetic oligonucleotide
caauaguagugccaguuuu

SEQ ID NO: 2308553 - RNA, 19 nt, Artificial Sequence
  Description of Artificial Sequence: Synthetic oligonucleotide
cuaccccagcaccauucac

SEQ ID NO: 2308554 - RNA, 19 nt, Artificial Sequence
  Description of Artificial Sequence: Synthetic oligonucleotide
gaacuaugccauccuuaua

SEQ ID NO: 2308555 - RNA, 19 nt, Artificial Sequence
  Description of Artificial Sequence: Synthetic oligonucleotide
caccaauguaaccuugaua

SEQ ID NO: 2308556 - RNA, 19 nt, Artificial Sequence
  Description of Artificial Sequence: Synthetic oligonucleotide
auccaugaggauagaugcu

SEQ ID NO: 2308557 - RNA, 19 nt, Artificial Sequence
  Description of Artificial Sequence: Synthetic oligonucleotide
cuuccagaccccaagucau

SEQ ID NO: 2308558 - RNA, 19 nt, Artificial Sequence
  Description of Artificial Sequence: Synthetic oligonucleotide
ggugggguauaccccaguc

SEQ ID NO: 2308559 - RNA, 19 nt, Artificial Sequence
  Description of Artificial Sequence: Synthetic oligonucleotide
uuccugcgacaauugucaa

SEQ ID NO: 2308560 - RNA, 19 nt, Artificial Sequence
  Description of Artificial Sequence: Synthetic oligonucleotide
ugucugcuccaagaacuau

SEQ ID NO: 2308561 - RNA, 19 nt, Artificial Sequence
  Description of Artificial Sequence: Synthetic oligonucleotide
uuccagaccccaagucauu

SEQ ID NO: 2308562 - RNA, 19 nt, Artificial Sequence
  Description of Artificial Sequence: Synthetic oligonucleotide
gacaaccaucccuucaguu

SEQ ID NO: 2308563 - RNA, 19 nt, Artificial Sequence
  Description of Artificial Sequence: Synthetic oligonucleotide
gcacugaguauggacgaag

SEQ ID NO: 2308564 - RNA, 19 nt, Artificial Sequence
  Description of Artificial Sequence: Synthetic oligonucleotide
agcuccaaguuggaagaaa

SEQ ID NO: 2308565 - RNA, 19 nt, Artificial Sequence
  Description of Artificial Sequence: Synthetic oligonucleotide
ggacgaagaaaguccagcu

SEQ ID NO: 2308566 - RNA, 19 nt, Artificial Sequence
  Description of Artificial Sequence: Synthetic oligonucleotide
gcuauagagaugaggucca

SEQ ID NO: 2308567 - RNA, 19 nt, Artificial Sequence
  Description of Artificial Sequence: Synthetic oligonucleotide
caugaggauagaugcuaua

SEQ ID NO: 2308568 - RNA, 19 nt, Artificial Sequence
  Description of Artificial Sequence: Synthetic oligonucleotide
uuggaagcuugaaccccuu

SEQ ID NO: 2308569 - RNA, 19 nt, Artificial Sequence
  Description of Artificial Sequence: Synthetic oligonucleotide
ggguugucaugucuguguc

SEQ ID NO: 2308570 - RNA, 19 nt, Artificial Sequence
  Description of Artificial Sequence: Synthetic oligonucleotide
ccugcgacaauugucaaaa

SEQ ID NO: 2308571 - RNA, 19 nt, Artificial Sequence
  Description of Artificial Sequence: Synthetic oligonucleotide
cgauuagcagucacaacuc

SEQ ID NO: 2308572 - RNA, 19 nt, Artificial Sequence
  Description of Artificial Sequence: Synthetic oligonucleotide
cuggguugucaugucugug

SEQ ID NO: 2308573 - RNA, 19 nt, Artificial Sequence
  Description of Artificial Sequence: Synthetic oligonucleotide
ugggguggggugggguggg

SEQ ID NO: 2308574 - RNA, 19 nt, Artificial Sequence
  Description of Artificial Sequence: Synthetic oligonucleotide
auggcauuccugcgacaau

SEQ ID NO: 2308575 - RNA, 19 nt, Artificial Sequence
  Description of Artificial Sequence: Synthetic oligonucleotide
cuguagugccuuucucgca

SEQ ID NO: 2308576 - RNA, 19 nt, Artificial Sequence
  Description of Artificial Sequence: Synthetic oligonucleotide
uuccuccauaucuggccua

SEQ ID NO: 2308577 - RNA, 19 nt, Artificial Sequence
  Description of Artificial Sequence: Synthetic oligonucleotide
gaagaaaguccagcuugcu

SEQ ID NO: 2308578 - RNA, 19 nt, Artificial Sequence
  Description of Artificial Sequence: Synthetic oligonucleotide
ggcugcaccaauguaaccu

SEQ ID NO: 2308579 - RNA, 19 nt, Artificial Sequence
  Description of Artificial Sequence: Synthetic oligonucleotide
ggugccugaaacaccgaca

SEQ ID NO: 2308580 - RNA, 19 nt, Artificial Sequence
  Description of Artificial Sequence: Synthetic oligonucleotide
aaccaucccuucaguugcu

SEQ ID NO: 2308581 - RNA, 19 nt, Artificial Sequence
  Description of Artificial Sequence: Synthetic oligonucleotide
ugccuuucucgcaccugua

SEQ ID NO: 2308582 - RNA, 19 nt, Artificial Sequence
  Description of Artificial Sequence: Synthetic oligonucleotide
gccuaaacuuaucuucaaa

SEQ ID NO: 2308583 - RNA, 19 nt, Artificial Sequence
  Description of Artificial Sequence: Synthetic oligonucleotide
ggcauuccugcgacaauug

SEQ ID NO: 2308584 - RNA, 19 nt, Artificial Sequence
  Description of Artificial Sequence: Synthetic oligonucleotide
cuuccaagauggcauuccu

SEQ ID NO: 2308585 - RNA, 19 nt, Artificial Sequence
  Description of Artificial Sequence: Synthetic oligonucleotide
ccuuguccccuucuuguug

SEQ ID NO: 2308586 - RNA, 19 nt, Artificial Sequence
  Description of Artificial Sequence: Synthetic oligonucleotide
ucuccagaguggugacuuu

SEQ ID NO: 2308587 - RNA, 19 nt, Artificial Sequence
  Description of Artificial Sequence: Synthetic oligonucleotide
gccuuucucgcaccuguac

SEQ ID NO: 2308588 - RNA, 19 nt, Artificial Sequence
  Description of Artificial Sequence: Synthetic oligonucleotide
ccauaucuggccuaaacuu

SEQ ID NO: 2308589 - RNA, 19 nt, Artificial Sequence
  Description of Artificial Sequence: Synthetic oligonucleotide
cuuguugggcacugaguau

SEQ ID NO: 2308590 - RNA, 19 nt, Artificial Sequence
  Description of Artificial Sequence: Synthetic oligonucleotide
aguggagcuccaaguugga

SEQ ID NO: 2308591 - RNA, 19 nt, Artificial Sequence
  Description of Artificial Sequence: Synthetic oligonucleotide
aggaccgcuguagugccuu

SEQ ID NO: 2308592 - RNA, 19 nt, Artificial Sequence
  Description of Artificial Sequence: Synthetic oligonucleotide
gguauaccccagucaucca

SEQ ID NO: 2308593 - RNA, 19 nt, Artificial Sequence
  Description of Artificial Sequence: Synthetic oligonucleotide
ucgcaccuguaccggccaa

SEQ ID NO: 2308594 - RNA, 19 nt, Artificial Sequence
  Description of Artificial Sequence: Synthetic oligonucleotide
ccggccaaaccuugucccc

SEQ ID NO: 2308595 - RNA, 19 nt, Artificial Sequence
  Description of Artificial Sequence: Synthetic oligonucleotide
ggccuaaacuuaucuucaa

SEQ ID NO: 2308596 - RNA, 19 nt, Artificial Sequence
  Description of Artificial Sequence: Synthetic oligonucleotide
gaccgcuguagugccuuuc

SEQ ID NO: 2308597 - RNA, 19 nt, Artificial Sequence
  Description of Artificial Sequence: Synthetic oligonucleotide
cccaaaacuagggcugcac

SEQ ID NO: 2308598 - RNA, 19 nt, Artificial Sequence
  Description of Artificial Sequence: Synthetic oligonucleotide
caagaacuaugccauccuu

SEQ ID NO: 2308599 - RNA, 19 nt, Artificial Sequence
  Description of Artificial Sequence: Synthetic oligonucleotide
caucccuucaguugcucuu

SEQ ID NO: 2308600 - RNA, 19 nt, Artificial Sequence
  Description of Artificial Sequence: Synthetic oligonucleotide
cucgcaccuguaccggcca

SEQ ID NO: 2308601 - RNA, 19 nt, Artificial Sequence
  Description of Artificial Sequence: Synthetic oligonucleotide
ccgacuggugccugaaaca

SEQ ID NO: 2308602 - RNA, 19 nt, Artificial Sequence
  Description of Artificial Sequence: Synthetic oligonucleotide
cgacuggugccugaaacac

SEQ ID NO: 2308603 - RNA, 19 nt, Artificial Sequence
  Description of Artificial Sequence: Synthetic oligonucleotide
ccagaguggugacuuucuc

SEQ ID NO: 2308604 - RNA, 19 nt, Artificial Sequence
  Description of Artificial Sequence: Synthetic oligonucleotide
gggcugcaccaauguaacc

SEQ ID NO: 2308605 - RNA, 19 nt, Artificial Sequence
  Description of Artificial Sequence: Synthetic oligonucleotide
guugggcacugaguaugga

SEQ ID NO: 2308606 - RNA, 19 nt, Artificial Sequence
  Description of Artificial Sequence: Synthetic oligonucleotide
cagcgacaaccaucccuuc

SEQ ID NO: 2308607 - RNA, 19 nt, Artificial Sequence
  Description of Artificial Sequence: Synthetic oligonucleotide
gguugucaugucugugucu

SEQ ID NO: 2308608 - RNA, 19 nt, Artificial Sequence
  Description of Artificial Sequence: Synthetic oligonucleotide
gugucugcuccaagaacua

SEQ ID NO: 2308609 - RNA, 19 nt, Artificial Sequence
  Description of Artificial Sequence: Synthetic oligonucleotide
gagcuccaaguuggaagaa

SEQ ID NO: 2308610 - RNA, 19 nt, Artificial Sequence
  Description of Artificial Sequence: Synthetic oligonucleotide
cacacagaucgauguugcu

SEQ ID NO: 2308611 - RNA, 19 nt, Artificial Sequence
  Description of Artificial Sequence: Synthetic oligonucleotide
gcaccuguaccggccaaac

SEQ ID NO: 2308612 - RNA, 19 nt, Artificial Sequence
  Description of Artificial Sequence: Synthetic oligonucleotide
cauugcugccaaggagcca

SEQ ID NO: 2308613 - RNA, 19 nt, Artificial Sequence
  Description of Artificial Sequence: Synthetic oligonucleotide
gccaaggagccagaaccca

SEQ ID NO: 2308614 - RNA, 19 nt, Artificial Sequence
  Description of Artificial Sequence: Synthetic oligonucleotide
cccuucaguugcucuugug

SEQ ID NO: 2308615 - RNA, 19 nt, Artificial Sequence
  Description of Artificial Sequence: Synthetic oligonucleotide
ccagagagauaaccaacua

SEQ ID NO: 2308616 - RNA, 19 nt, Artificial Sequence
  Description of Artificial Sequence: Synthetic oligonucleotide
cuggugccugaaacaccga

SEQ ID NO: 2308617 - RNA, 19 nt, Artificial Sequence
  Description of Artificial Sequence: Synthetic oligonucleotide
ccaagaacuaugccauccu

SEQ ID NO: 2308618 - RNA, 19 nt, Artificial Sequence
  Description of Artificial Sequence: Synthetic oligonucleotide
cagugaggaccgcuguagu

SEQ ID NO: 2308619 - RNA, 19 nt, Artificial Sequence
  Description of Artificial Sequence: Synthetic oligonucleotide
gggguauaccccagucauc

SEQ ID NO: 2308620 - RNA, 19 nt, Artificial Sequence
  Description of Artificial Sequence: Synthetic oligonucleotide
gggcuuuuggaagcuugaa

SEQ ID NO: 2308621 - RNA, 19 nt, Artificial Sequence
  Description of Artificial Sequence: Synthetic oligonucleotide
gccaaaccuuguccccuuc

SEQ ID NO: 2308622 - RNA, 19 nt, Artificial Sequence
  Description of Artificial Sequence: Synthetic oligonucleotide
ccccgcaauaguagugcca

SEQ ID NO: 2308623 - RNA, 19 nt, Artificial Sequence
  Description of Artificial Sequence: Synthetic oligonucleotide
ggcacugaguauggacgaa

SEQ ID NO: 2308624 - RNA, 19 nt, Artificial Sequence
  Description of Artificial Sequence: Synthetic oligonucleotide
ccagaccccaagucauuaa

SEQ ID NO: 2308625 - RNA, 19 nt, Artificial Sequence
  Description of Artificial Sequence: Synthetic oligonucleotide
cuccgacuggugccugaaa

SEQ ID NO: 2308626 - RNA, 19 nt, Artificial Sequence
  Description of Artificial Sequence: Synthetic oligonucleotide
ccgcuguagugccuuucuc

SEQ ID NO: 2308627 - RNA, 19 nt, Artificial Sequence
  Description of Artificial Sequence: Synthetic oligonucleotide
cgauagccucacucaccag

SEQ ID NO: 2308628 - RNA, 19 nt, Artificial Sequence
  Description of Artificial Sequence: Synthetic oligonucleotide
acccuccgacuggugccug

SEQ ID NO: 2308629 - RNA, 19 nt, Artificial Sequence
  Description of Artificial Sequence: Synthetic oligonucleotide
ccauucacgaaguguccau

SEQ ID NO: 2308630 - RNA, 19 nt, Artificial Sequence
  Description of Artificial Sequence: Synthetic oligonucleotide
cagaacccauggugacaua

SEQ ID NO: 2308631 - RNA, 19 nt, Artificial Sequence
  Description of Artificial Sequence: Synthetic oligonucleotide
ccaaggagccagaacccau

SEQ ID NO: 2308632 - RNA, 19 nt, Artificial Sequence
  Description of Artificial Sequence: Synthetic oligonucleotide
ccaucccuucaguugcucu

SEQ ID NO: 2308633 - RNA, 19 nt, Artificial Sequence
  Description of Artificial Sequence: Synthetic oligonucleotide
gaggaccgcuguagugccu

SEQ ID NO: 2308634 - RNA, 19 nt, Artificial Sequence
  Description of Artificial Sequence: Synthetic oligonucleotide
ccuguaccggccaaaccuu

SEQ ID NO: 2308635 - RNA, 19 nt, Artificial Sequence
  Description of Artificial Sequence: Synthetic oligonucleotide
caacuaccccagcaccauu

SEQ ID NO: 2308636 - RNA, 19 nt, Artificial Sequence
  Description of Artificial Sequence: Synthetic oligonucleotide
ggggugggguggggugggg

SEQ ID NO: 2308637 - RNA, 19 nt, Artificial Sequence
  Description of Artificial Sequence: Synthetic oligonucleotide
ggccaaaccuuguccccuu

SEQ ID NO: 2308638 - RNA, 19 nt, Artificial Sequence
  Description of Artificial Sequence: Synthetic oligonucleotide
ccaacuaccccagcaccau

SEQ ID NO: 2308639 - RNA, 19 nt, Artificial Sequence
  Description of Artificial Sequence: Synthetic oligonucleotide
cccuccgacuggugccuga

SEQ ID NO: 2308640 - RNA, 19 nt, Artificial Sequence
  Description of Artificial Sequence: Synthetic oligonucleotide
ccccaaaacuagggcugca

SEQ ID NO: 2308641 - RNA, 19 nt, Artificial Sequence
  Description of Artificial Sequence: Synthetic oligonucleotide
ccuccgacuggugccugaa

SEQ ID NO: 2308642 - RNA, 19 nt, Artificial Sequence
  Description of Artificial Sequence: Synthetic oligonucleotide
cgacaaccaucccuucagu

SEQ ID NO: 2308643 - RNA, 19 nt, Artificial Sequence
  Description of Artificial Sequence: Synthetic oligonucleotide
ggguggggugggguggggu

SEQ ID NO: 2308644 - RNA, 19 nt, Artificial Sequence
  Description of Artificial Sequence: Synthetic oligonucleotide
ccgcaauaguagugccagu

SEQ ID NO: 2308645 - RNA, 19 nt, Artificial Sequence
  Description of Artificial Sequence: Synthetic oligonucleotide
ggaccgcuguagugccuuu

SEQ ID NO: 2308646 - RNA, 19 nt, Artificial Sequence
  Description of Artificial Sequence: Synthetic oligonucleotide
cagcugcgauagccucacu

SEQ ID NO: 2308647 - RNA, 19 nt, Artificial Sequence
  Description of Artificial Sequence: Synthetic oligonucleotide
cggccaaaccuuguccccu

SEQ ID NO: 2308648 - RNA, 19 nt, Artificial Sequence
  Description of Artificial Sequence: Synthetic oligonucleotide
aaggaauuccccucgaagc

SEQ ID NO: 2308649 - RNA, 19 nt, Artificial Sequence
  Description of Artificial Sequence: Synthetic oligonucleotide
agggaggagacguugaacc

SEQ ID NO: 2308650 - RNA, 19 nt, Artificial Sequence
  Description of Artificial Sequence: Synthetic oligonucleotide
uccaccaccguacagggcg

SEQ ID NO: 2308651 - RNA, 19 nt, Artificial Sequence
  Description of Artificial Sequence: Synthetic oligonucleotide
aauagggcucagcuugucc

SEQ ID NO: 2308652 - RNA, 19 nt, Artificial Sequence
  Description of Artificial Sequence: Synthetic oligonucleotide
ugaggcuuagcacaauagg

SEQ ID NO: 2308653 - RNA, 19 nt, Artificial Sequence
  Description of Artificial Sequence: Synthetic oligonucleotide
aaaaccagcagggugagca

SEQ ID NO: 2308654 - RNA, 19 nt, Artificial Sequence
  Description of Artificial Sequence: Synthetic oligonucleotide
auagggcucagcuuguccc

SEQ ID NO: 2308655 - RNA, 19 nt, Artificial Sequence
  Description of Artificial Sequence: Synthetic oligonucleotide
aaggaaggaauuccccucg

SEQ ID NO: 2308656 - RNA, 19 nt, Artificial Sequence
  Description of Artificial Sequence: Synthetic oligonucleotide
agcagaaccuuacuguugg

SEQ ID NO: 2308657 - RNA, 19 nt, Artificial Sequence
  Description of Artificial Sequence: Synthetic oligonucleotide
uucaguagcugugagcugg

SEQ ID NO: 2308658 - RNA, 19 nt, Artificial Sequence
  Description of Artificial Sequence: Synthetic oligonucleotide
caugcaacaccacagcagg

SEQ ID NO: 2308659 - RNA, 19 nt, Artificial Sequence
  Description of Artificial Sequence: Synthetic oligonucleotide
cacaauagggcucagcuug

SEQ ID NO: 2308660 - RNA, 19 nt, Artificial Sequence
  Description of Artificial Sequence: Synthetic oligonucleotide
gaggcuuagcacaauaggg

SEQ ID NO: 2308661 - RNA, 19 nt, Artificial Sequence
  Description of Artificial Sequence: Synthetic oligonucleotide
aguagcugugagcuggagc

SEQ ID NO: 2308662 - RNA, 19 nt, Artificial Sequence
  Description of Artificial Sequence: Synthetic oligonucleotide
aggaauggcccucuccucc

SEQ ID NO: 2308663 - RNA, 19 nt, Artificial Sequence
  Description of Artificial Sequence: Synthetic oligonucleotide
uggaaggacacauaguguc

SEQ ID NO: 2308664 - RNA, 19 nt, Artificial Sequence
  Description of Artificial Sequence: Synthetic oligonucleotide
guugcagcucaccagaacc

SEQ ID NO: 2308665 - RNA, 19 nt, Artificial Sequence
  Description of Artificial Sequence: Synthetic oligonucleotide
uuccgcuugaagaagccag

SEQ ID NO: 2308666 - RNA, 19 nt, Artificial Sequence
  Description of Artificial Sequence: Synthetic oligonucleotide
cuugcuccugaucugaagc

SEQ ID NO: 2308667 - RNA, 19 nt, Artificial Sequence
  Description of Artificial Sequence: Synthetic oligonucleotide
ugcaccgugaccauggcuc

SEQ ID NO: 2308668 - RNA, 19 nt, Artificial Sequence
  Description of Artificial Sequence: Synthetic oligonucleotide
uugaggcuuagcacaauag

SEQ ID NO: 2308669 - RNA, 19 nt, Artificial Sequence
  Description of Artificial Sequence: Synthetic oligonucleotide
gacacguugaggcuuagca

SEQ ID NO: 2308670 - RNA, 19 nt, Artificial Sequence
  Description of Artificial Sequence: Synthetic oligonucleotide
aggcuuagcacaauagggc

SEQ ID NO: 2308671 - RNA, 19 nt, Artificial Sequence
  Description of Artificial Sequence: Synthetic oligonucleotide
acaaaggaaggaauucccc

SEQ ID NO: 2308672 - RNA, 19 nt, Artificial Sequence
  Description of Artificial Sequence: Synthetic oligonucleotide
uugcagcucaccagaaccg

SEQ ID NO: 2308673 - RNA, 19 nt, Artificial Sequence
  Description of Artificial Sequence: Synthetic oligonucleotide
gagauuguccgcuaggcaa

SEQ ID NO: 2308674 - RNA, 19 nt, Artificial Sequence
  Description of Artificial Sequence: Synthetic oligonucleotide
ugauucaguagcugugagc

SEQ ID NO: 2308675 - RNA, 19 nt, Artificial Sequence
  Description of Artificial Sequence: Synthetic oligonucleotide
gauucaguagcugugagcu

SEQ ID NO: 2308676 - RNA, 19 nt, Artificial Sequence
  Description of Artificial Sequence: Synthetic oligonucleotide
agaaccuuacuguugggau

SEQ ID NO: 2308677 - RNA, 19 nt, Artificial Sequence
  Description of Artificial Sequence: Synthetic oligonucleotide
uccuccaaggccagaagca

SEQ ID NO: 2308678 - RNA, 19 nt, Artificial Sequence
  Description of Artificial Sequence: Synthetic oligonucleotide
cuggguuccugcaggaacg

SEQ ID NO: 2308679 - RNA, 19 nt, Artificial Sequence
  Description of Artificial Sequence: Synthetic oligonucleotide
agaaccgggucuugcugcc

SEQ ID NO: 2308680 - RNA, 19 nt, Artificial Sequence
  Description of Artificial Sequence: Synthetic oligonucleotide
uccaugcaacaccacagca

SEQ ID NO: 2308681 - RNA, 19 nt, Artificial Sequence
  Description of Artificial Sequence: Synthetic oligonucleotide
cuuccacauggccaaaacc

SEQ ID NO: 2308682 - RNA, 19 nt, Artificial Sequence
  Description of Artificial Sequence: Synthetic oligonucleotide
ggagcugcggcacacacag

SEQ ID NO: 2308683 - RNA, 19 nt, Artificial Sequence
  Description of Artificial Sequence: Synthetic oligonucleotide
uguccgcuaggcaagcuga

SEQ ID NO: 2308684 - RNA, 19 nt, Artificial Sequence
  Description of Artificial Sequence: Synthetic oligonucleotide
agcaccggcaccgaguagg

SEQ ID NO: 2308685 - RNA, 19 nt, Artificial Sequence
  Description of Artificial Sequence: Synthetic oligonucleotide
uggucgauuccgcuugaag

SEQ ID NO: 2308686 - RNA, 19 nt, Artificial Sequence
  Description of Artificial Sequence: Synthetic oligonucleotide
agcacucccaccagcaccc

SEQ ID NO: 2308687 - RNA, 19 nt, Artificial Sequence
  Description of Artificial Sequence: Synthetic oligonucleotide
gacauggguuucuccaugc

SEQ ID NO: 2308688 - RNA, 19 nt, Artificial Sequence
  Description of Artificial Sequence: Synthetic oligonucleotide
ggcagcgacacguugaggc

SEQ ID NO: 2308689 - RNA, 19 nt, Artificial Sequence
  Description of Artificial Sequence: Synthetic oligonucleotide
caccagagaggaauggccc

SEQ ID NO: 2308690 - RNA, 19 nt, Artificial Sequence
  Description of Artificial Sequence: Synthetic oligonucleotide
ugcaggaacgccugucugc

SEQ ID NO: 2308691 - RNA, 19 nt, Artificial Sequence
  Description of Artificial Sequence: Synthetic oligonucleotide
cuaggcaagcugagcaccg

SEQ ID NO: 2308692 - RNA, 19 nt, Artificial Sequence
  Description of Artificial Sequence: Synthetic oligonucleotide
agcugcggcacacacaggu

SEQ ID NO: 2308693 - RNA, 19 nt, Artificial Sequence
  Description of Artificial Sequence: Synthetic oligonucleotide
ucuacuccagucucuucug

SEQ ID NO: 2308694 - RNA, 19 nt, Artificial Sequence
  Description of Artificial Sequence: Synthetic oligonucleotide
aggacacauaguguccugc

SEQ ID NO: 2308695 - RNA, 19 nt, Artificial Sequence
  Description of Artificial Sequence: Synthetic oligonucleotide
ucugcgcucgcgcugguga

SEQ ID NO: 2308696 - RNA, 19 nt, Artificial Sequence
  Description of Artificial Sequence: Synthetic oligonucleotide
uuguccgcuaggcaagcug

SEQ ID NO: 2308697 - RNA, 19 nt, Artificial Sequence
  Description of Artificial Sequence: Synthetic oligonucleotide
uccacgcucaccagcauuc

SEQ ID NO: 2308698 - RNA, 19 nt, Artificial Sequence
  Description of Artificial Sequence: Synthetic oligonucleotide
caacagcagaaccuuacug

SEQ ID NO: 2308699 - RNA, 19 nt, Artificial Sequence
  Description of Artificial Sequence: Synthetic oligonucleotide
ugaaccaggcgugcgacug

SEQ ID NO: 2308700 - RNA, 19 nt, Artificial Sequence
  Description of Artificial Sequence: Synthetic oligonucleotide
cugcggcacacacaggucg

SEQ ID NO: 2308701 - RNA, 19 nt, Artificial Sequence
  Description of Artificial Sequence: Synthetic oligonucleotide
uccgcuugaagaagccagc

SEQ ID NO: 2308702 - RNA, 19 nt, Artificial Sequence
  Description of Artificial Sequence: Synthetic oligonucleotide
accggcaccgaguagggca

SEQ ID NO: 2308703 - RNA, 19 nt, Artificial Sequence
  Description of Artificial Sequence: Synthetic oligonucleotide
gagaggaauggcccucucc

SEQ ID NO: 2308704 - RNA, 19 nt, Artificial Sequence
  Description of Artificial Sequence: Synthetic oligonucleotide
agagauuguccgcuaggca

SEQ ID NO: 2308705 - RNA, 19 nt, Artificial Sequence
  Description of Artificial Sequence: Synthetic oligonucleotide
ugcaacaccacagcagggu

SEQ ID NO: 2308706 - RNA, 19 nt, Artificial Sequence
  Description of Artificial Sequence: Synthetic oligonucleotide
cagaaccgggucuugcugc

SEQ ID NO: 2308707 - RNA, 19 nt, Artificial Sequence
  Description of Artificial Sequence: Synthetic oligonucleotide
agguggucgauuccgcuug

SEQ ID NO: 2308708 - RNA, 19 nt, Artificial Sequence
  Description of Artificial Sequence: Synthetic oligonucleotide
ugcagcucaccagaaccgg

SEQ ID NO: 2308709 - RNA, 19 nt, Artificial Sequence
  Description of Artificial Sequence: Synthetic oligonucleotide
cacaggcaacagcagaacc

SEQ ID NO: 2308710 - RNA, 19 nt, Artificial Sequence
  Description of Artificial Sequence: Synthetic oligonucleotide
cucgaagcucuacuguggc

SEQ ID NO: 2308711 - RNA, 19 nt, Artificial Sequence
  Description of Artificial Sequence: Synthetic oligonucleotide
acagcagaaccuuacuguu

SEQ ID NO: 2308712 - RNA, 19 nt, Artificial Sequence
  Description of Artificial Sequence: Synthetic oligonucleotide
gcgacugcagcacaaacug

SEQ ID NO: 2308713 - RNA, 19 nt, Artificial Sequence
  Description of Artificial Sequence: Synthetic oligonucleotide
ggucgauuccgcuugaaga

SEQ ID NO: 2308714 - RNA, 19 nt, Artificial Sequence
  Description of Artificial Sequence: Synthetic oligonucleotide
gaguggguagccuccaguc

SEQ ID NO: 2308715 - RNA, 19 nt, Artificial Sequence
  Description of Artificial Sequence: Synthetic oligonucleotide
cuccaguccagcuuuccug

SEQ ID NO: 2308716 - RNA, 19 nt, Artificial Sequence
  Description of Artificial Sequence: Synthetic oligonucleotide
ucgcacuccaccaccguac

SEQ ID NO: 2308717 - RNA, 19 nt, Artificial Sequence
  Description of Artificial Sequence: Synthetic oligonucleotide
gucgauuccgcuugaagaa

SEQ ID NO: 2308718 - RNA, 19 nt, Artificial Sequence
  Description of Artificial Sequence: Synthetic oligonucleotide
cagagauuguccgcuaggc

SEQ ID NO: 2308719 - RNA, 19 nt, Artificial Sequence
  Description of Artificial Sequence: Synthetic oligonucleotide
ucgauuccgcuugaagaag

SEQ ID NO: 2308720 - RNA, 19 nt, Artificial Sequence
  Description of Artificial Sequence: Synthetic oligonucleotide
gagucguugcagcucacca

SEQ ID NO: 2308721 - RNA, 19 nt, Artificial Sequence
  Description of Artificial Sequence: Synthetic oligonucleotide
aggaacgccugucugcgcu

SEQ ID NO: 2308722 - RNA, 19 nt, Artificial Sequence
  Description of Artificial Sequence: Synthetic oligonucleotide
ggacaaaggaaggaauucc

SEQ ID NO: 2308723 - RNA, 19 nt, Artificial Sequence
  Description of Artificial Sequence: Synthetic oligonucleotide
ggucuugcugcccuggcag

SEQ ID NO: 2308724 - RNA, 19 nt, Artificial Sequence
  Description of Artificial Sequence: Synthetic oligonucleotide
cuuagcacaauagggcuca

SEQ ID NO: 2308725 - RNA, 19 nt, Artificial Sequence
  Description of Artificial Sequence: Synthetic oligonucleotide
ugagcaccggcaccgagua

SEQ ID NO: 2308726 - RNA, 19 nt, Artificial Sequence
  Description of Artificial Sequence: Synthetic oligonucleotide
ccaccagggacaaaggaag

SEQ ID NO: 2308727 - RNA, 19 nt, Artificial Sequence
  Description of Artificial Sequence: Synthetic oligonucleotide
gucguugcagcucaccaga

SEQ ID NO: 2308728 - RNA, 19 nt, Artificial Sequence
  Description of Artificial Sequence: Synthetic oligonucleotide
agauuguccgcuaggcaag

SEQ ID NO: 2308729 - RNA, 19 nt, Artificial Sequence
  Description of Artificial Sequence: Synthetic oligonucleotide
gauuccgcuugaagaagcc

SEQ ID NO: 2308730 - RNA, 19 nt, Artificial Sequence
  Description of Artificial Sequence: Synthetic oligonucleotide
guuucuccaugcaacacca

SEQ ID NO: 2308731 - RNA, 19 nt, Artificial Sequence
  Description of Artificial Sequence: Synthetic oligonucleotide
caccgaguagggcagggag

SEQ ID NO: 2308732 - RNA, 19 nt, Artificial Sequence
  Description of Artificial Sequence: Synthetic oligonucleotide
acggccugcaccgugacca

SEQ ID NO: 2308733 - RNA, 19 nt, Artificial Sequence
  Description of Artificial Sequence: Synthetic oligonucleotide
cucgcgcuggugauggacc

SEQ ID NO: 2308734 - RNA, 19 nt, Artificial Sequence
  Description of Artificial Sequence: Synthetic oligonucleotide
agcucaccagaaccggguc

SEQ ID NO: 2308735 - RNA, 19 nt, Artificial Sequence
  Description of Artificial Sequence: Synthetic oligonucleotide
aaccgggucuugcugcccu

SEQ ID NO: 2308736 - RNA, 19 nt, Artificial Sequence
  Description of Artificial Sequence: Synthetic oligonucleotide
gaucugaagcuggaaggac

SEQ ID NO: 2308737 - RNA, 19 nt, Artificial Sequence
  Description of Artificial Sequence: Synthetic oligonucleotide
ucgaagcucuacuguggcc

SEQ ID NO: 2308738 - RNA, 19 nt, Artificial Sequence
  Description of Artificial Sequence: Synthetic oligonucleotide
guggguagccuccagucca

SEQ ID NO: 2308739 - RNA, 19 nt, Artificial Sequence
  Description of Artificial Sequence: Synthetic oligonucleotide
ucgcgcuggugauggaccg

SEQ ID NO: 2308740 - RNA, 19 nt, Artificial Sequence
  Description of Artificial Sequence: Synthetic oligonucleotide
aacgccugucugcgcucgc

SEQ ID NO: 2308741 - RNA, 19 nt, Artificial Sequence
  Description of Artificial Sequence: Synthetic oligonucleotide
ugucgccuucuucugccgc

SEQ ID NO: 2308742 - RNA, 19 nt, Artificial Sequence
  Description of Artificial Sequence: Synthetic oligonucleotide
gcacaaacugcuccugcgg

SEQ ID NO: 2308743 - RNA, 19 nt, Artificial Sequence
  Description of Artificial Sequence: Synthetic oligonucleotide
accagaaccgggucuugcu

SEQ ID NO: 2308744 - RNA, 19 nt, Artificial Sequence
  Description of Artificial Sequence: Synthetic oligonucleotide
ccaugcaacaccacagcag

SEQ ID NO: 2308745 - RNA, 19 nt, Artificial Sequence
  Description of Artificial Sequence: Synthetic oligonucleotide
gggucugcaccagagauug

SEQ ID NO: 2308746 - RNA, 19 nt, Artificial Sequence
  Description of Artificial Sequence: Synthetic oligonucleotide
caaaggaaggaauuccccu

SEQ ID NO: 2308747 - RNA, 19 nt, Artificial Sequence
  Description of Artificial Sequence: Synthetic oligonucleotide
auucaguagcugugagcug

SEQ ID NO: 2308748 - RNA, 19 nt, Artificial Sequence
  Description of Artificial Sequence: Synthetic oligonucleotide
caggucgucuuccccacag

SEQ ID NO: 2308749 - RNA, 19 nt, Artificial Sequence
  Description of Artificial Sequence: Synthetic oligonucleotide
agacguugaaccaggcgug

SEQ ID NO: 2308750 - RNA, 19 nt, Artificial Sequence
  Description of Artificial Sequence: Synthetic oligonucleotide
gucuacuccagucucuucu

SEQ ID NO: 2308751 - RNA, 19 nt, Artificial Sequence
  Description of Artificial Sequence: Synthetic oligonucleotide
uagccuccaguccagcuuu

SEQ ID NO: 2308752 - RNA, 19 nt, Artificial Sequence
  Description of Artificial Sequence: Synthetic oligonucleotide
uggagcugcggcacacaca

SEQ ID NO: 2308753 - RNA, 19 nt, Artificial Sequence
  Description of Artificial Sequence: Synthetic oligonucleotide
uaggcaagcugagcaccgg

SEQ ID NO: 2308754 - RNA, 19 nt, Artificial Sequence
  Description of Artificial Sequence: Synthetic oligonucleotide
acauggguuucuccaugca

SEQ ID NO: 2308755 - RNA, 19 nt, Artificial Sequence
  Description of Artificial Sequence: Synthetic oligonucleotide
cugcccucgugccaucucc

SEQ ID NO: 2308756 - RNA, 19 nt, Artificial Sequence
  Description of Artificial Sequence: Synthetic oligonucleotide
accgaguagggcagggagg

SEQ ID NO: 2308757 - RNA, 19 nt, Artificial Sequence
  Description of Artificial Sequence: Synthetic oligonucleotide
guugaggcuuagcacaaua

SEQ ID NO: 2308758 - RNA, 19 nt, Artificial Sequence
  Description of Artificial Sequence: Synthetic oligonucleotide
ugcggcacacacaggucgu

SEQ ID NO: 2308759 - RNA, 19 nt, Artificial Sequence
  Description of Artificial Sequence: Synthetic oligonucleotide
uaguguccugcuucuucca

SEQ ID NO: 2308760 - RNA, 19 nt, Artificial Sequence
  Description of Artificial Sequence: Synthetic oligonucleotide
guugaaccaggcgugcgac

SEQ ID NO: 2308761 - RNA, 19 nt, Artificial Sequence
  Description of Artificial Sequence: Synthetic oligonucleotide
gauuguccgcuaggcaagc

SEQ ID NO: 2308762 - RNA, 19 nt, Artificial Sequence
  Description of Artificial Sequence: Synthetic oligonucleotide
ggaaggacacauagugucc

SEQ ID NO: 2308763 - RNA, 19 nt, Artificial Sequence
  Description of Artificial Sequence: Synthetic oligonucleotide
gacguugaaccaggcgugc

SEQ ID NO: 2308764 - RNA, 19 nt, Artificial Sequence
  Description of Artificial Sequence: Synthetic oligonucleotide
cuugucccggaagucggcc

SEQ ID NO: 2308765 - RNA, 19 nt, Artificial Sequence
  Description of Artificial Sequence: Synthetic oligonucleotide
gaacgccugucugcgcucg

SEQ ID NO: 2308766 - RNA, 19 nt, Artificial Sequence
  Description of Artificial Sequence: Synthetic oligonucleotide
auuccccucgaagcucuac

SEQ ID NO: 2308767 - RNA, 19 nt, Artificial Sequence
  Description of Artificial Sequence: Synthetic oligonucleotide
gcuuuccuggucccugucg

SEQ ID NO: 2308768 - RNA, 19 nt, Artificial Sequence
  Description of Artificial Sequence: Synthetic oligonucleotide
aggcgugcgacugcagcac

SEQ ID NO: 2308769 - RNA, 19 nt, Artificial Sequence
  Description of Artificial Sequence: Synthetic oligonucleotide
ugggucugcaccagagauu

SEQ ID NO: 2308770 - RNA, 19 nt, Artificial Sequence
  Description of Artificial Sequence: Synthetic oligonucleotide
gaaccaggcgugcgacugc

SEQ ID NO: 2308771 - RNA, 19 nt, Artificial Sequence
  Description of Artificial Sequence: Synthetic oligonucleotide
cagggucuacuccagucuc

SEQ ID NO: 2308772 - RNA, 19 nt, Artificial Sequence
  Description of Artificial Sequence: Synthetic oligonucleotide
uccgggucugcuccuggac

SEQ ID NO: 2308773 - RNA, 19 nt, Artificial Sequence
  Description of Artificial Sequence: Synthetic oligonucleotide
ggugggcagccccagcacg

SEQ ID NO: 2308774 - RNA, 19 nt, Artificial Sequence
  Description of Artificial Sequence: Synthetic oligonucleotide
uucuugcuccugaucugaa

SEQ ID NO: 2308775 - RNA, 19 nt, Artificial Sequence
  Description of Artificial Sequence: Synthetic oligonucleotide
cauggguuucuccaugcaa

SEQ ID NO: 2308776 - RNA, 19 nt, Artificial Sequence
  Description of Artificial Sequence: Synthetic oligonucleotide
gcaggaacgccugucugcg

SEQ ID NO: 2308777 - RNA, 19 nt, Artificial Sequence
  Description of Artificial Sequence: Synthetic oligonucleotide
aggaaggaauuccccucga

SEQ ID NO: 2308778 - RNA, 19 nt, Artificial Sequence
  Description of Artificial Sequence: Synthetic oligonucleotide
cacaggucgucuuccccac

SEQ ID NO: 2308779 - RNA, 19 nt, Artificial Sequence
  Description of Artificial Sequence: Synthetic oligonucleotide
uugaaccaggcgugcgacu

SEQ ID NO: 2308780 - RNA, 19 nt, Artificial Sequence
  Description of Artificial Sequence: Synthetic oligonucleotide
guucuugcuccugaucuga

SEQ ID NO: 2308781 - RNA, 19 nt, Artificial Sequence
  Description of Artificial Sequence: Synthetic oligonucleotide
acguugaaccaggcgugcg

SEQ ID NO: 2308782 - RNA, 19 nt, Artificial Sequence
  Description of Artificial Sequence: Synthetic oligonucleotide
aaccaggcgugcgacugca

SEQ ID NO: 2308783 - RNA, 19 nt, Artificial Sequence
  Description of Artificial Sequence: Synthetic oligonucleotide
agggacaaaggaaggaauu

SEQ ID NO: 2308784 - RNA, 19 nt, Artificial Sequence
  Description of Artificial Sequence: Synthetic oligonucleotide
ccagagguggucgauuccg

SEQ ID NO: 2308785 - RNA, 19 nt, Artificial Sequence
  Description of Artificial Sequence: Synthetic oligonucleotide
ccagagauuguccgcuagg

SEQ ID NO: 2308786 - RNA, 19 nt, Artificial Sequence
  Description of Artificial Sequence: Synthetic oligonucleotide
uagcacaauagggcucagc

SEQ ID NO: 2308787 - RNA, 19 nt, Artificial Sequence
  Description of Artificial Sequence: Synthetic oligonucleotide
cagggcgccgagucguugc

SEQ ID NO: 2308788 - RNA, 19 nt, Artificial Sequence
  Description of Artificial Sequence: Synthetic oligonucleotide
aggaugauccgggucugcu

SEQ ID NO: 2308789 - RNA, 19 nt, Artificial Sequence
  Description of Artificial Sequence: Synthetic oligonucleotide
ucccugucgccuucuucug

SEQ ID NO: 2308790 - RNA, 19 nt, Artificial Sequence
  Description of Artificial Sequence: Synthetic oligonucleotide
cuggacugccacaggcaac

SEQ ID NO: 2308791 - RNA, 19 nt, Artificial Sequence
  Description of Artificial Sequence: Synthetic oligonucleotide
cagcucgcacuccaccacc

SEQ ID NO: 2308792 - RNA, 19 nt, Artificial Sequence
  Description of Artificial Sequence: Synthetic oligonucleotide
gggacaaaggaaggaauuc

SEQ ID NO: 2308793 - RNA, 19 nt, Artificial Sequence
  Description of Artificial Sequence: Synthetic oligonucleotide
cugucgccuucuucugccg

SEQ ID NO: 2308794 - RNA, 19 nt, Artificial Sequence
  Description of Artificial Sequence: Synthetic oligonucleotide
augcaacaccacagcaggg

SEQ ID NO: 2308795 - RNA, 19 nt, Artificial Sequence
  Description of Artificial Sequence: Synthetic oligonucleotide
ggcaacagcagaaccuuac

SEQ ID NO: 2308796 - RNA, 19 nt, Artificial Sequence
  Description of Artificial Sequence: Synthetic oligonucleotide
ucguugcagcucaccagaa

SEQ ID NO: 2308797 - RNA, 19 nt, Artificial Sequence
  Description of Artificial Sequence: Synthetic oligonucleotide
gcuaggcaagcugagcacc

SEQ ID NO: 2308798 - RNA, 19 nt, Artificial Sequence
  Description of Artificial Sequence: Synthetic oligonucleotide
gaaccuuacuguugggauu

SEQ ID NO: 2308799 - RNA, 19 nt, Artificial Sequence
  Description of Artificial Sequence: Synthetic oligonucleotide
gugcgacugcagcacaaac

SEQ ID NO: 2308800 - RNA, 19 nt, Artificial Sequence
  Description of Artificial Sequence: Synthetic oligonucleotide
cacccaccagagaggaaug

SEQ ID NO: 2308801 - RNA, 19 nt, Artificial Sequence
  Description of Artificial Sequence: Synthetic oligonucleotide
auggaccgggaggagggag

SEQ ID NO: 2308802 - RNA, 19 nt, Artificial Sequence
  Description of Artificial Sequence: Synthetic oligonucleotide
agcucgcacuccaccaccg

SEQ ID NO: 2308803 - RNA, 19 nt, Artificial Sequence
  Description of Artificial Sequence: Synthetic oligonucleotide
cagggaggagacguugaac

SEQ ID NO: 2308804 - RNA, 19 nt, Artificial Sequence
  Description of Artificial Sequence: Synthetic oligonucleotide
caguccagcuuuccugguc

SEQ ID NO: 2308805 - RNA, 19 nt, Artificial Sequence
  Description of Artificial Sequence: Synthetic oligonucleotide
caggcgugcgacugcagca

SEQ ID NO: 2308806 - RNA, 19 nt, Artificial Sequence
  Description of Artificial Sequence: Synthetic oligonucleotide
agggcucagcuugucccgg

SEQ ID NO: 2308807 - RNA, 19 nt, Artificial Sequence
  Description of Artificial Sequence: Synthetic oligonucleotide
gcaccgugaccauggcucg

SEQ ID NO: 2308808 - RNA, 19 nt, Artificial Sequence
  Description of Artificial Sequence: Synthetic oligonucleotide
cccucgaagcucuacugug

SEQ ID NO: 2308809 - RNA, 19 nt, Artificial Sequence
  Description of Artificial Sequence: Synthetic oligonucleotide
ggggcagcgacacguugag

SEQ ID NO: 2308810 - RNA, 19 nt, Artificial Sequence
  Description of Artificial Sequence: Synthetic oligonucleotide
cacauaguguccugcuucu

SEQ ID NO: 2308811 - RNA, 19 nt, Artificial Sequence
  Description of Artificial Sequence: Synthetic oligonucleotide
gcuugaagaagccagccuu

SEQ ID NO: 2308812 - RNA, 19 nt, Artificial Sequence
  Description of Artificial Sequence: Synthetic oligonucleotide
ugauccgggucugcuccug

SEQ ID NO: 2308813 - RNA, 19 nt, Artificial Sequence
  Description of Artificial Sequence: Synthetic oligonucleotide
guccagcuuuccugguccc

SEQ ID NO: 2308814 - RNA, 19 nt, Artificial Sequence
  Description of Artificial Sequence: Synthetic oligonucleotide
aggucgucuuccccacagu

SEQ ID NO: 2308815 - RNA, 19 nt, Artificial Sequence
  Description of Artificial Sequence: Synthetic oligonucleotide
accaccguacagggcgccg

SEQ ID NO: 2308816 - RNA, 19 nt, Artificial Sequence
  Description of Artificial Sequence: Synthetic oligonucleotide
accgugaccauggcucgcu

SEQ ID NO: 2308817 - RNA, 19 nt, Artificial Sequence
  Description of Artificial Sequence: Synthetic oligonucleotide
ggaugauccgggucugcuc

SEQ ID NO: 2308818 - RNA, 19 nt, Artificial Sequence
  Description of Artificial Sequence: Synthetic oligonucleotide
ucgugccaucucccgcagc

SEQ ID NO: 2308819 - RNA, 19 nt, Artificial Sequence
  Description of Artificial Sequence: Synthetic oligonucleotide
acgccugucugcgcucgcg

SEQ ID NO: 2308820 - RNA, 19 nt, Artificial Sequence
  Description of Artificial Sequence: Synthetic oligonucleotide
cugggucugcaccagagau

SEQ ID NO: 2308821 - RNA, 19 nt, Artificial Sequence
  Description of Artificial Sequence: Synthetic oligonucleotide
ggaauuccccucgaagcuc

SEQ ID NO: 2308822 - RNA, 19 nt, Artificial Sequence
  Description of Artificial Sequence: Synthetic oligonucleotide
caccguacagggcgccgag

SEQ ID NO: 2308823 - RNA, 19 nt, Artificial Sequence
  Description of Artificial Sequence: Synthetic oligonucleotide
cucgugccaucucccgcag

SEQ ID NO: 2308824 - RNA, 19 nt, Artificial Sequence
  Description of Artificial Sequence: Synthetic oligonucleotide
guagggcagggaggagacg

SEQ ID NO: 2308825 - RNA, 19 nt, Artificial Sequence
  Description of Artificial Sequence: Synthetic oligonucleotide
gaccauggcucgcugcccu

SEQ ID NO: 2308826 - RNA, 19 nt, Artificial Sequence
  Description of Artificial Sequence: Synthetic oligonucleotide
caggaacgccugucugcgc

SEQ ID NO: 2308827 - RNA, 19 nt, Artificial Sequence
  Description of Artificial Sequence: Synthetic oligonucleotide
caaaaccagcagggugagc

SEQ ID NO: 2308828 - RNA, 19 nt, Artificial Sequence
  Description of Artificial Sequence: Synthetic oligonucleotide
auuguccgcuaggcaagcu

SEQ ID NO: 2308829 - RNA, 19 nt, Artificial Sequence
  Description of Artificial Sequence: Synthetic oligonucleotide
ccagaaccgggucuugcug

SEQ ID NO: 2308830 - RNA, 19 nt, Artificial Sequence
  Description of Artificial Sequence: Synthetic oligonucleotide
gaaccgggucuugcugccc

SEQ ID NO: 2308831 - RNA, 19 nt, Artificial Sequence
  Description of Artificial Sequence: Synthetic oligonucleotide
acaggucgucuuccccaca

SEQ ID NO: 2308832 - RNA, 19 nt, Artificial Sequence
  Description of Artificial Sequence: Synthetic oligonucleotide
ggaaggaauuccccucgaa

SEQ ID NO: 2308833 - RNA, 19 nt, Artificial Sequence
  Description of Artificial Sequence: Synthetic oligonucleotide
gcuuagcacaauagggcuc

SEQ ID NO: 2308834 - RNA, 19 nt, Artificial Sequence
  Description of Artificial Sequence: Synthetic oligonucleotide
caauagggcucagcuuguc

SEQ ID NO: 2308835 - RNA, 19 nt, Artificial Sequence
  Description of Artificial Sequence: Synthetic oligonucleotide
acguugaggcuuagcacaa

SEQ ID NO: 2308836 - RNA, 19 nt, Artificial Sequence
  Description of Artificial Sequence: Synthetic oligonucleotide
ugcgcucgcgcuggugaug

SEQ ID NO: 2308837 - RNA, 19 nt, Artificial Sequence
  Description of Artificial Sequence: Synthetic oligonucleotide
cagggacaaaggaaggaau

SEQ ID NO: 2308838 - RNA, 19 nt, Artificial Sequence
  Description of Artificial Sequence: Synthetic oligonucleotide
gagcaccggcaccgaguag

SEQ ID NO: 2308839 - RNA, 19 nt, Artificial Sequence
  Description of Artificial Sequence: Synthetic oligonucleotide
guccgcuaggcaagcugag

SEQ ID NO: 2308840 - RNA, 19 nt, Artificial Sequence
  Description of Artificial Sequence: Synthetic oligonucleotide
agggcgccgagucguugca

SEQ ID NO: 2308841 - RNA, 19 nt, Artificial Sequence
  Description of Artificial Sequence: Synthetic oligonucleotide
caggaugauccgggucugc

SEQ ID NO: 2308842 - RNA, 19 nt, Artificial Sequence
  Description of Artificial Sequence: Synthetic oligonucleotide
accgggucuugcugcccug

SEQ ID NO: 2308843 - RNA, 19 nt, Artificial Sequence
  Description of Artificial Sequence: Synthetic oligonucleotide
caucucccgcagcucgcac

SEQ ID NO: 2308844 - RNA, 19 nt, Artificial Sequence
  Description of Artificial Sequence: Synthetic oligonucleotide
ccgcuaggcaagcugagca

SEQ ID NO: 2308845 - RNA, 19 nt, Artificial Sequence
  Description of Artificial Sequence: Synthetic oligonucleotide
aggccagaagcagcugggu

SEQ ID NO: 2308846 - RNA, 19 nt, Artificial Sequence
  Description of Artificial Sequence: Synthetic oligonucleotide
cacggccugcaccgugacc

SEQ ID NO: 2308847 - RNA, 19 nt, Artificial Sequence
  Description of Artificial Sequence: Synthetic oligonucleotide
uccuggucccugucgccuu

SEQ ID NO: 2308848 - RNA, 19 nt, Artificial Sequence
  Description of Artificial Sequence: Synthetic oligonucleotide
gcugagcaccggcaccgag

SEQ ID NO: 2308849 - RNA, 19 nt, Artificial Sequence
  Description of Artificial Sequence: Synthetic oligonucleotide
gauggaccgggaggaggga

SEQ ID NO: 2308850 - RNA, 19 nt, Artificial Sequence
  Description of Artificial Sequence: Synthetic oligonucleotide
cagcucaccagaaccgggu

SEQ ID NO: 2308851 - RNA, 19 nt, Artificial Sequence
  Description of Artificial Sequence: Synthetic oligonucleotide
cguacagggcgccgagucg

SEQ ID NO: 2308852 - RNA, 19 nt, Artificial Sequence
  Description of Artificial Sequence: Synthetic oligonucleotide
gccacaggcaacagcagaa

SEQ ID NO: 2308853 - RNA, 19 nt, Artificial Sequence
  Description of Artificial Sequence: Synthetic oligonucleotide
cucgcacuccaccaccgua

SEQ ID NO: 2308854 - RNA, 19 nt, Artificial Sequence
  Description of Artificial Sequence: Synthetic oligonucleotide
gcagggucuacuccagucu

SEQ ID NO: 2308855 - RNA, 19 nt, Artificial Sequence
  Description of Artificial Sequence: Synthetic oligonucleotide
ccgcuugaagaagccagcc

SEQ ID NO: 2308856 - RNA, 19 nt, Artificial Sequence
  Description of Artificial Sequence: Synthetic oligonucleotide
ccggcaccgaguagggcag

SEQ ID NO: 2308857 - RNA, 19 nt, Artificial Sequence
  Description of Artificial Sequence: Synthetic oligonucleotide
acagggcgccgagucguug

SEQ ID NO: 2308858 - RNA, 19 nt, Artificial Sequence
  Description of Artificial Sequence: Synthetic oligonucleotide
ggucuacuccagucucuuc

SEQ ID NO: 2308859 - RNA, 19 nt, Artificial Sequence
  Description of Artificial Sequence: Synthetic oligonucleotide
gcggagggugggcagcccc

SEQ ID NO: 2308860 - RNA, 19 nt, Artificial Sequence
  Description of Artificial Sequence: Synthetic oligonucleotide
gagcugcggcacacacagg

SEQ ID NO: 2308861 - RNA, 19 nt, Artificial Sequence
  Description of Artificial Sequence: Synthetic oligonucleotide
gggucuugcugcccuggca

SEQ ID NO: 2308862 - RNA, 19 nt, Artificial Sequence
  Description of Artificial Sequence: Synthetic oligonucleotide
agcgacacguugaggcuua

SEQ ID NO: 2308863 - RNA, 19 nt, Artificial Sequence
  Description of Artificial Sequence: Synthetic oligonucleotide
ccucgugccaucucccgca

SEQ ID NO: 2308864 - RNA, 19 nt, Artificial Sequence
  Description of Artificial Sequence: Synthetic oligonucleotide
acauaguguccugcuucuu

SEQ ID NO: 2308865 - RNA, 19 nt, Artificial Sequence
  Description of Artificial Sequence: Synthetic oligonucleotide
cgacugcagcacaaacugc

SEQ ID NO: 2308866 - RNA, 19 nt, Artificial Sequence
  Description of Artificial Sequence: Synthetic oligonucleotide
ggaguggguagccuccagu

SEQ ID NO: 2308867 - RNA, 19 nt, Artificial Sequence
  Description of Artificial Sequence: Synthetic oligonucleotide
ggaacgccugucugcgcuc

SEQ ID NO: 2308868 - RNA, 19 nt, Artificial Sequence
  Description of Artificial Sequence: Synthetic oligonucleotide
caccaccguacagggcgcc

SEQ ID NO: 2308869 - RNA, 19 nt, Artificial Sequence
  Description of Artificial Sequence: Synthetic oligonucleotide
ccagggacaaaggaaggaa

SEQ ID NO: 2308870 - RNA, 19 nt, Artificial Sequence
  Description of Artificial Sequence: Synthetic oligonucleotide
cccucgugccaucucccgc

SEQ ID NO: 2308871 - RNA, 19 nt, Artificial Sequence
  Description of Artificial Sequence: Synthetic oligonucleotide
gcacccaccagagaggaau

SEQ ID NO: 2308872 - RNA, 19 nt, Artificial Sequence
  Description of Artificial Sequence: Synthetic oligonucleotide
cgcuaggcaagcugagcac

SEQ ID NO: 2308873 - RNA, 19 nt, Artificial Sequence
  Description of Artificial Sequence: Synthetic oligonucleotide
ccgaguagggcagggagga

SEQ ID NO: 2308874 - RNA, 19 nt, Artificial Sequence
  Description of Artificial Sequence: Synthetic oligonucleotide
aauuccccucgaagcucua

SEQ ID NO: 2308875 - RNA, 19 nt, Artificial Sequence
  Description of Artificial Sequence: Synthetic oligonucleotide
accguacagggcgccgagu

SEQ ID NO: 2308876 - RNA, 19 nt, Artificial Sequence
  Description of Artificial Sequence: Synthetic oligonucleotide
ccauggcucgcugcccucg

SEQ ID NO: 2308877 - RNA, 19 nt, Artificial Sequence
  Description of Artificial Sequence: Synthetic oligonucleotide
cguugcagcucaccagaac

SEQ ID NO: 2308878 - RNA, 19 nt, Artificial Sequence
  Description of Artificial Sequence: Synthetic oligonucleotide
ccaccaccguacagggcgc

SEQ ID NO: 2308879 - RNA, 19 nt, Artificial Sequence
  Description of Artificial Sequence: Synthetic oligonucleotide
gguggucgauuccgcuuga

SEQ ID NO: 2308880 - RNA, 19 nt, Artificial Sequence
  Description of Artificial Sequence: Synthetic oligonucleotide
gcagcgacacguugaggcu

SEQ ID NO: 2308881 - RNA, 19 nt, Artificial Sequence
  Description of Artificial Sequence: Synthetic oligonucleotide
gcauucugauucaguagcu

SEQ ID NO: 2308882 - RNA, 19 nt, Artificial Sequence
  Description of Artificial Sequence: Synthetic oligonucleotide
caccagagauuguccgcua

SEQ ID NO: 2308883 - RNA, 19 nt, Artificial Sequence
  Description of Artificial Sequence: Synthetic oligonucleotide
caccggcaccgaguagggc

SEQ ID NO: 2308884 - RNA, 19 nt, Artificial Sequence
  Description of Artificial Sequence: Synthetic oligonucleotide
aggcaacagcagaaccuua

SEQ ID NO: 2308885 - RNA, 19 nt, Artificial Sequence
  Description of Artificial Sequence: Synthetic oligonucleotide
cguugaaccaggcgugcga

SEQ ID NO: 2308886 - RNA, 19 nt, Artificial Sequence
  Description of Artificial Sequence: Synthetic oligonucleotide
agcugagcaccggcaccga

SEQ ID NO: 2308887 - RNA, 19 nt, Artificial Sequence
  Description of Artificial Sequence: Synthetic oligonucleotide
accaggcgugcgacugcag

SEQ ID NO: 2308888 - RNA, 19 nt, Artificial Sequence
  Description of Artificial Sequence: Synthetic oligonucleotide
cgagucguugcagcucacc

SEQ ID NO: 2308889 - RNA, 19 nt, Artificial Sequence
  Description of Artificial Sequence: Synthetic oligonucleotide
cagcuuuccuggucccugu

SEQ ID NO: 2308890 - RNA, 19 nt, Artificial Sequence
  Description of Artificial Sequence: Synthetic oligonucleotide
ggcgugcgacugcagcaca

SEQ ID NO: 2308891 - RNA, 19 nt, Artificial Sequence
  Description of Artificial Sequence: Synthetic oligonucleotide
cgaagcucuacuguggccu

SEQ ID NO: 2308892 - RNA, 19 nt, Artificial Sequence
  Description of Artificial Sequence: Synthetic oligonucleotide
ccgggucugcuccuggaca

SEQ ID NO: 2308893 - RNA, 19 nt, Artificial Sequence
  Description of Artificial Sequence: Synthetic oligonucleotide
ggcucagcuugucccggaa

SEQ ID NO: 2308894 - RNA, 19 nt, Artificial Sequence
  Description of Artificial Sequence: Synthetic oligonucleotide
cugcaccgugaccauggcu

SEQ ID NO: 2308895 - RNA, 19 nt, Artificial Sequence
  Description of Artificial Sequence: Synthetic oligonucleotide
cagcugggucugcaccaga

SEQ ID NO: 2308896 - RNA, 19 nt, Artificial Sequence
  Description of Artificial Sequence: Synthetic oligonucleotide
cucgcugcccucgugccau

SEQ ID NO: 2308897 - RNA, 19 nt, Artificial Sequence
  Description of Artificial Sequence: Synthetic oligonucleotide
cuccacgcucaccagcauu

SEQ ID NO: 2308898 - RNA, 19 nt, Artificial Sequence
  Description of Artificial Sequence: Synthetic oligonucleotide
gcugcccucgugccaucuc

SEQ ID NO: 2308899 - RNA, 19 nt, Artificial Sequence
  Description of Artificial Sequence: Synthetic oligonucleotide
gccgcccagcacucccacc

SEQ ID NO: 2308900 - RNA, 19 nt, Artificial Sequence
  Description of Artificial Sequence: Synthetic oligonucleotide
agcacccaccagagaggaa

SEQ ID NO: 2308901 - RNA, 19 nt, Artificial Sequence
  Description of Artificial Sequence: Synthetic oligonucleotide
cgccugucugcgcucgcgc

SEQ ID NO: 2308902 - RNA, 19 nt, Artificial Sequence
  Description of Artificial Sequence: Synthetic oligonucleotide
cuccuggacauggguuucu

SEQ ID NO: 2308903 - RNA, 19 nt, Artificial Sequence
  Description of Artificial Sequence: Synthetic oligonucleotide
cgggucuugcugcccuggc

SEQ ID NO: 2308904 - RNA, 19 nt, Artificial Sequence
  Description of Artificial Sequence: Synthetic oligonucleotide
cugccgccaccaccaggga

SEQ ID NO: 2308905 - RNA, 19 nt, Artificial Sequence
  Description of Artificial Sequence: Synthetic oligonucleotide
ccgugaccauggcucgcug

SEQ ID NO: 2308906 - RNA, 19 nt, Artificial Sequence
  Description of Artificial Sequence: Synthetic oligonucleotide
cgacacguugaggcuuagc

SEQ ID NO: 2308907 - RNA, 19 nt, Artificial Sequence
  Description of Artificial Sequence: Synthetic oligonucleotide
cagcgacacguugaggcuu

SEQ ID NO: 2308908 - RNA, 19 nt, Artificial Sequence
  Description of Artificial Sequence: Synthetic oligonucleotide
ccucuggcggagggugggc

SEQ ID NO: 2308909 - RNA, 19 nt, Artificial Sequence
  Description of Artificial Sequence: Synthetic oligonucleotide
gccugucugcgcucgcgcu

SEQ ID NO: 2308910 - RNA, 19 nt, Artificial Sequence
  Description of Artificial Sequence: Synthetic oligonucleotide
cggccucuggcggagggug

SEQ ID NO: 2308911 - RNA, 19 nt, Artificial Sequence
  Description of Artificial Sequence: Synthetic oligonucleotide
gcgacacguugaggcuuag

SEQ ID NO: 2308912 - RNA, 19 nt, Artificial Sequence
  Description of Artificial Sequence: Synthetic oligonucleotide
ccgagucguugcagcucac

SEQ ID NO: 2308913 - RNA, 19 nt, Artificial Sequence
  Description of Artificial Sequence: Synthetic oligonucleotide
gcgccgagucguugcagcu

SEQ ID NO: 2308914 - RNA, 19 nt, Artificial Sequence
  Description of Artificial Sequence: Synthetic oligonucleotide
cugcgcucgcgcuggugau

SEQ ID NO: 2308915 - RNA, 19 nt, Artificial Sequence
  Description of Artificial Sequence: Synthetic oligonucleotide
cgcgcuggugauggaccgg

SEQ ID NO: 2308916 - RNA, 19 nt, Artificial Sequence
  Description of Artificial Sequence: Synthetic oligonucleotide
gcgugcgacugcagcacaa

SEQ ID NO: 2308917 - RNA, 19 nt, Artificial Sequence
  Description of Artificial Sequence: Synthetic oligonucleotide
cgcacuccaccaccguaca

SEQ ID NO: 2308918 - RNA, 19 nt, Artificial Sequence
  Description of Artificial Sequence: Synthetic oligonucleotide
ccaccguacagggcgccga

SEQ ID NO: 2308919 - RNA, 19 nt, Artificial Sequence
  Description of Artificial Sequence: Synthetic oligonucleotide
gcaggccgcccagcacucc

SEQ ID NO: 2308920 - RNA, 19 nt, Artificial Sequence
  Description of Artificial Sequence: Synthetic oligonucleotide
guccugcuucuuccagguu

SEQ ID NO: 2308921 - RNA, 19 nt, Artificial Sequence
  Description of Artificial Sequence: Synthetic oligonucleotide
gcucaccagcauucugauu

SEQ ID NO: 2308922 - RNA, 19 nt, Artificial Sequence
  Description of Artificial Sequence: Synthetic oligonucleotide
cgccgagucguugcagcuc

SEQ ID NO: 2308923 - RNA, 19 nt, Artificial Sequence
  Description of Artificial Sequence: Synthetic oligonucleotide
cgugcgacugcagcacaaa

SEQ ID NO: 2308924 - RNA, 19 nt, Artificial Sequence
  Description of Artificial Sequence: Synthetic oligonucleotide
gcacucccaccagcaccca

SEQ ID NO: 2308925 - RNA, 19 nt, Artificial Sequence
  Description of Artificial Sequence: Synthetic oligonucleotide
ggucugcaccagagauugu

SEQ ID NO: 2308926 - RNA, 19 nt, Artificial Sequence
  Description of Artificial Sequence: Synthetic oligonucleotide
cggcaccgaguagggcagg

SEQ ID NO: 2308927 - RNA, 19 nt, Artificial Sequence
  Description of Artificial Sequence: Synthetic oligonucleotide
ccacgcucaccagcauucu

SEQ ID NO: 2308928 - RNA, 19 nt, Artificial Sequence
  Description of Artificial Sequence: Synthetic oligonucleotide
cguugaggcuuagcacaau

SEQ ID NO: 2308929 - RNA, 19 nt, Artificial Sequence
  Description of Artificial Sequence: Synthetic oligonucleotide
uuacaaaagacucagugag

SEQ ID NO: 2308930 - RNA, 19 nt, Artificial Sequence
  Description of Artificial Sequence: Synthetic oligonucleotide
ugagauuauacucagaaau

SEQ ID NO: 2308931 - RNA, 19 nt, Artificial Sequence
  Description of Artificial Sequence: Synthetic oligonucleotide
aauuccaggauauacuaug

SEQ ID NO: 2308932 - RNA, 19 nt, Artificial Sequence
  Description of Artificial Sequence: Synthetic oligonucleotide
uugaauuccuccaugcugg

SEQ ID NO: 2308933 - RNA, 19 nt, Artificial Sequence
  Description of Artificial Sequence: Synthetic oligonucleotide
aaauacagcaauuccagga

SEQ ID NO: 2308934 - RNA, 19 nt, Artificial Sequence
  Description of Artificial Sequence: Synthetic oligonucleotide
aaauagaaugcccgcagcg

SEQ ID NO: 2308935 - RNA, 19 nt, Artificial Sequence
  Description of Artificial Sequence: Synthetic oligonucleotide
aaaauagaaugcccgcagc

SEQ ID NO: 2308936 - RNA, 19 nt, Artificial Sequence
  Description of Artificial Sequence: Synthetic oligonucleotide
uuuccuuagcaacauaucc

SEQ ID NO: 2308937 - RNA, 19 nt, Artificial Sequence
  Description of Artificial Sequence: Synthetic oligonucleotide
caugauucuagcauuauac

SEQ ID NO: 2308938 - RNA, 19 nt, Artificial Sequence
  Description of Artificial Sequence: Synthetic oligonucleotide
uaugacgccacaagcaugg

SEQ ID NO: 2308939 - RNA, 19 nt, Artificial Sequence
  Description of Artificial Sequence: Synthetic oligonucleotide
uuaaucaugaggaaggcua

SEQ ID NO: 2308940 - RNA, 19 nt, Artificial Sequence
  Description of Artificial Sequence: Synthetic oligonucleotide
ucuucauugccauaagucc

SEQ ID NO: 2308941 - RNA, 19 nt, Artificial Sequence
  Description of Artificial Sequence: Synthetic oligonucleotide
auaaaugacagcugcaucu

SEQ ID NO: 2308942 - RNA, 19 nt, Artificial Sequence
  Description of Artificial Sequence: Synthetic oligonucleotide
ucuaugaugauccaccauc

SEQ ID NO: 2308943 - RNA, 19 nt, Artificial Sequence
  Description of Artificial Sequence: Synthetic oligonucleotide
gaaaacagcauuacaaaag

SEQ ID NO: 2308944 - RNA, 19 nt, Artificial Sequence
  Description of Artificial Sequence: Synthetic oligonucleotide
ucgaaacucucaaagaacc

SEQ ID NO: 2308945 - RNA, 19 nt, Artificial Sequence
  Description of Artificial Sequence: Synthetic oligonucleotide
uuuagaccaugauagaagc

SEQ ID NO: 2308946 - RNA, 19 nt, Artificial Sequence
  Description of Artificial Sequence: Synthetic oligonucleotide
aaaauacagcaauuccagg

SEQ ID NO: 2308947 - RNA, 19 nt, Artificial Sequence
  Description of Artificial Sequence: Synthetic oligonucleotide
caacauauccuccaaagag

SEQ ID NO: 2308948 - RNA, 19 nt, Artificial Sequence
  Description of Artificial Sequence: Synthetic oligonucleotide
auaaguuuagaaaacagca

SEQ ID NO: 2308949 - RNA, 19 nt, Artificial Sequence
  Description of Artificial Sequence: Synthetic oligonucleotide
ugcucaacccuuuagacca

SEQ ID NO: 2308950 - RNA, 19 nt, Artificial Sequence
  Description of Artificial Sequence: Synthetic oligonucleotide
uacaaguuuaagcugagau

SEQ ID NO: 2308951 - RNA, 19 nt, Artificial Sequence
  Description of Artificial Sequence: Synthetic oligonucleotide
ucuagcauuauacaaguuu

SEQ ID NO: 2308952 - RNA, 19 nt, Artificial Sequence
  Description of Artificial Sequence: Synthetic oligonucleotide
auuacaaaagacucaguga

SEQ ID NO: 2308953 - RNA, 19 nt, Artificial Sequence
  Description of Artificial Sequence: Synthetic oligonucleotide
cuuuagaccaugauagaag

SEQ ID NO: 2308954 - RNA, 19 nt, Artificial Sequence
  Description of Artificial Sequence: Synthetic oligonucleotide
uacauaggaguucucauga

SEQ ID NO: 2308955 - RNA, 19 nt, Artificial Sequence
  Description of Artificial Sequence: Synthetic oligonucleotide
auauacuaugggcuuuucc

SEQ ID NO: 2308956 - RNA, 19 nt, Artificial Sequence
  Description of Artificial Sequence: Synthetic oligonucleotide
aguccaugcauucugagca

SEQ ID NO: 2308957 - RNA, 19 nt, Artificial Sequence
  Description of Artificial Sequence: Synthetic oligonucleotide
aacagcauuacaaaagacu

SEQ ID NO: 2308958 - RNA, 19 nt, Artificial Sequence
  Description of Artificial Sequence: Synthetic oligonucleotide
aagaugaaggcauucugga

SEQ ID NO: 2308959 - RNA, 19 nt, Artificial Sequence
  Description of Artificial Sequence: Synthetic oligonucleotide
aauacagcaauuccaggau

SEQ ID NO: 2308960 - RNA, 19 nt, Artificial Sequence
  Description of Artificial Sequence: Synthetic oligonucleotide
agugcucaacccuuuagac

SEQ ID NO: 2308961 - RNA, 19 nt, Artificial Sequence
  Description of Artificial Sequence: Synthetic oligonucleotide
acaagcaugguaugagugg

SEQ ID NO: 2308962 - RNA, 19 nt, Artificial Sequence
  Description of Artificial Sequence: Synthetic oligonucleotide
caaacuuaaacaccagccc

SEQ ID NO: 2308963 - RNA, 19 nt, Artificial Sequence
  Description of Artificial Sequence: Synthetic oligonucleotide
aauuccuccaugcugggau

SEQ ID NO: 2308964 - RNA, 19 nt, Artificial Sequence
  Description of Artificial Sequence: Synthetic oligonucleotide
auuauacucagaaauaagu

SEQ ID NO: 2308965 - RNA, 19 nt, Artificial Sequence
  Description of Artificial Sequence: Synthetic oligonucleotide
cucucaaagaaccuuuugc

SEQ ID NO: 2308966 - RNA, 19 nt, Artificial Sequence
  Description of Artificial Sequence: Synthetic oligonucleotide
uuuaagcugagauuauacu

SEQ ID NO: 2308967 - RNA, 19 nt, Artificial Sequence
  Description of Artificial Sequence: Synthetic oligonucleotide
uuauacucagaaauaaguu

SEQ ID NO: 2308968 - RNA, 19 nt, Artificial Sequence
  Description of Artificial Sequence: Synthetic oligonucleotide
gauacgagcgccugucugg

SEQ ID NO: 2308969 - RNA, 19 nt, Artificial Sequence
  Description of Artificial Sequence: Synthetic oligonucleotide
aaagagaauccacauggau

SEQ ID NO: 2308970 - RNA, 19 nt, Artificial Sequence
  Description of Artificial Sequence: Synthetic oligonucleotide
ugauucuagcauuauacaa

SEQ ID NO: 2308971 - RNA, 19 nt, Artificial Sequence
  Description of Artificial Sequence: Synthetic oligonucleotide
uucgacacugcguuaauca

SEQ ID NO: 2308972 - RNA, 19 nt, Artificial Sequence
  Description of Artificial Sequence: Synthetic oligonucleotide
augaggaaggcuauggucg

SEQ ID NO: 2308973 - RNA, 19 nt, Artificial Sequence
  Description of Artificial Sequence: Synthetic oligonucleotide
uagaaaacagcauuacaaa

SEQ ID NO: 2308974 - RNA, 19 nt, Artificial Sequence
  Description of Artificial Sequence: Synthetic oligonucleotide
acugcaaaagcugaacagg

SEQ ID NO: 2308975 - RNA, 19 nt, Artificial Sequence
  Description of Artificial Sequence: Synthetic oligonucleotide
uuacauaggaguucucaug

SEQ ID NO: 2308976 - RNA, 19 nt, Artificial Sequence
  Description of Artificial Sequence: Synthetic oligonucleotide
agcauuacaaaagacucag

SEQ ID NO: 2308977 - RNA, 19 nt, Artificial Sequence
  Description of Artificial Sequence: Synthetic oligonucleotide
uuguccauucgacacugcg

SEQ ID NO: 2308978 - RNA, 19 nt, Artificial Sequence
  Description of Artificial Sequence: Synthetic oligonucleotide
auaggaguucucaugauuc

SEQ ID NO: 2308979 - RNA, 19 nt, Artificial Sequence
  Description of Artificial Sequence: Synthetic oligonucleotide
acccuuuagaccaugauag

SEQ ID NO: 2308980 - RNA, 19 nt, Artificial Sequence
  Description of Artificial Sequence: Synthetic oligonucleotide
uguugcaguuuacauagga

SEQ ID NO: 2308981 - RNA, 19 nt, Artificial Sequence
  Description of Artificial Sequence: Synthetic oligonucleotide
acugcguuaaucaugagga

SEQ ID NO: 2308982 - RNA, 19 nt, Artificial Sequence
  Description of Artificial Sequence: Synthetic oligonucleotide
auucuagcauuauacaagu

SEQ ID NO: 2308983 - RNA, 19 nt, Artificial Sequence
  Description of Artificial Sequence: Synthetic oligonucleotide
gauuauacucagaaauaag

SEQ ID NO: 2308984 - RNA, 19 nt, Artificial Sequence
  Description of Artificial Sequence: Synthetic oligonucleotide
uagaaauccagacaucuuu

SEQ ID NO: 2308985 - RNA, 19 nt, Artificial Sequence
  Description of Artificial Sequence: Synthetic oligonucleotide
caucuuuucaggucagucc

SEQ ID NO: 2308986 - RNA, 19 nt, Artificial Sequence
  Description of Artificial Sequence: Synthetic oligonucleotide
cacauggaugcaaucaggg

SEQ ID NO: 2308987 - RNA, 19 nt, Artificial Sequence
  Description of Artificial Sequence: Synthetic oligonucleotide
ugccacacuagucuguugc

SEQ ID NO: 2308988 - RNA, 19 nt, Artificial Sequence
  Description of Artificial Sequence: Synthetic oligonucleotide
ugcgaccaaacuuaaacac

SEQ ID NO: 2308989 - RNA, 19 nt, Artificial Sequence
  Description of Artificial Sequence: Synthetic oligonucleotide
gcauuauacaaguuuaagc

SEQ ID NO: 2308990 - RNA, 19 nt, Artificial Sequence
  Description of Artificial Sequence: Synthetic oligonucleotide
cuaugaugauccaccaucc

SEQ ID NO: 2308991 - RNA, 19 nt, Artificial Sequence
  Description of Artificial Sequence: Synthetic oligonucleotide
aagcugagauuauacucag

SEQ ID NO: 2308992 - RNA, 19 nt, Artificial Sequence
  Description of Artificial Sequence: Synthetic oligonucleotide
aaggcuauggucgcuauga

SEQ ID NO: 2308993 - RNA, 19 nt, Artificial Sequence
  Description of Artificial Sequence: Synthetic oligonucleotide
ugcguuaaucaugaggaag

SEQ ID NO: 2308994 - RNA, 19 nt, Artificial Sequence
  Description of Artificial Sequence: Synthetic oligonucleotide
aacauauccuccaaagaga

SEQ ID NO: 2308995 - RNA, 19 nt, Artificial Sequence
  Description of Artificial Sequence: Synthetic oligonucleotide
ccaaacuuaaacaccagcc

SEQ ID NO: 2308996 - RNA, 19 nt, Artificial Sequence
  Description of Artificial Sequence: Synthetic oligonucleotide
uuuacauaggaguucucau

SEQ ID NO: 2308997 - RNA, 19 nt, Artificial Sequence
  Description of Artificial Sequence: Synthetic oligonucleotide
aagagccagauacgagcgc

SEQ ID NO: 2308998 - RNA, 19 nt, Artificial Sequence
  Description of Artificial Sequence: Synthetic oligonucleotide
aacccuuuagaccaugaua

SEQ ID NO: 2308999 - RNA, 19 nt, Artificial Sequence
  Description of Artificial Sequence: Synthetic oligonucleotide
auccagacaucuuuucagg

SEQ ID NO: 2309000 - RNA, 19 nt, Artificial Sequence
  Description of Artificial Sequence: Synthetic oligonucleotide
cacugcguuaaucaugagg

SEQ ID NO: 2309001 - RNA, 19 nt, Artificial Sequence
  Description of Artificial Sequence: Synthetic oligonucleotide
agagccagauacgagcgcc

SEQ ID NO: 2309002 - RNA, 19 nt, Artificial Sequence
  Description of Artificial Sequence: Synthetic oligonucleotide
ucuugcgccuucuagaaau

SEQ ID NO: 2309003 - RNA, 19 nt, Artificial Sequence
  Description of Artificial Sequence: Synthetic oligonucleotide
uacaaaagacucagugagc

SEQ ID NO: 2309004 - RNA, 19 nt, Artificial Sequence
  Description of Artificial Sequence: Synthetic oligonucleotide
gauccgaaggccaacauga

SEQ ID NO: 2309005 - RNA, 19 nt, Artificial Sequence
  Description of Artificial Sequence: Synthetic oligonucleotide
gauaaaugacagcugcauc

SEQ ID NO: 2309006 - RNA, 19 nt, Artificial Sequence
  Description of Artificial Sequence: Synthetic oligonucleotide
acuuaaacaccagcccucc

SEQ ID NO: 2309007 - RNA, 19 nt, Artificial Sequence
  Description of Artificial Sequence: Synthetic oligonucleotide
uccuuagcaacauauccuc

SEQ ID NO: 2309008 - RNA, 19 nt, Artificial Sequence
  Description of Artificial Sequence: Synthetic oligonucleotide
agcauuauacaaguuuaag

SEQ ID NO: 2309009 - RNA, 19 nt, Artificial Sequence
  Description of Artificial Sequence: Synthetic oligonucleotide
ugguugaauuccuccaugc

SEQ ID NO: 2309010 - RNA, 19 nt, Artificial Sequence
  Description of Artificial Sequence: Synthetic oligonucleotide
cucgaaacucucaaagaac

SEQ ID NO: 2309011 - RNA, 19 nt, Artificial Sequence
  Description of Artificial Sequence: Synthetic oligonucleotide
guaugagugguugaauucc

SEQ ID NO: 2309012 - RNA, 19 nt, Artificial Sequence
  Description of Artificial Sequence: Synthetic oligonucleotide
agauuauacucagaaauaa

SEQ ID NO: 2309013 - RNA, 19 nt, Artificial Sequence
  Description of Artificial Sequence: Synthetic oligonucleotide
cauucugagcaucuugcgc

SEQ ID NO: 2309014 - RNA, 19 nt, Artificial Sequence
  Description of Artificial Sequence: Synthetic oligonucleotide
gaugcaaucagggauccga

SEQ ID NO: 2309015 - RNA, 19 nt, Artificial Sequence
  Description of Artificial Sequence: Synthetic oligonucleotide
aaugacagcugcaucuaug

SEQ ID NO: 2309016 - RNA, 19 nt, Artificial Sequence
  Description of Artificial Sequence: Synthetic oligonucleotide
caaguuuaagcugagauua

SEQ ID NO: 2309017 - RNA, 19 nt, Artificial Sequence
  Description of Artificial Sequence: Synthetic oligonucleotide
acaucuuuucaggucaguc

SEQ ID NO: 2309018 - RNA, 19 nt, Artificial Sequence
  Description of Artificial Sequence: Synthetic oligonucleotide
acgagcgccugucuggccc

SEQ ID NO: 2309019 - RNA, 19 nt, Artificial Sequence
  Description of Artificial Sequence: Synthetic oligonucleotide
cuagcauuauacaaguuua

SEQ ID NO: 2309020 - RNA, 19 nt, Artificial Sequence
  Description of Artificial Sequence: Synthetic oligonucleotide
guuuaagcugagauuauac

SEQ ID NO: 2309021 - RNA, 19 nt, Artificial Sequence
  Description of Artificial Sequence: Synthetic oligonucleotide
agaggcggugucuucauug

SEQ ID NO: 2309022 - RNA, 19 nt, Artificial Sequence
  Description of Artificial Sequence: Synthetic oligonucleotide
uaugagugguugaauuccu

SEQ ID NO: 2309023 - RNA, 19 nt, Artificial Sequence
  Description of Artificial Sequence: Synthetic oligonucleotide
gcuauggucgcuaugacgc

SEQ ID NO: 2309024 - RNA, 19 nt, Artificial Sequence
  Description of Artificial Sequence: Synthetic oligonucleotide
agcaucuugcgccuucuag

SEQ ID NO: 2309025 - RNA, 19 nt, Artificial Sequence
  Description of Artificial Sequence: Synthetic oligonucleotide
aguucucaugauucuagca

SEQ ID NO: 2309026 - RNA, 19 nt, Artificial Sequence
  Description of Artificial Sequence: Synthetic oligonucleotide
cacaagcaugguaugagug

SEQ ID NO: 2309027 - RNA, 19 nt, Artificial Sequence
  Description of Artificial Sequence: Synthetic oligonucleotide
uguccauucgacacugcgu

SEQ ID NO: 2309028 - RNA, 19 nt, Artificial Sequence
  Description of Artificial Sequence: Synthetic oligonucleotide
ucgcuaugacgccacaagc

SEQ ID NO: 2309029 - RNA, 19 nt, Artificial Sequence
  Description of Artificial Sequence: Synthetic oligonucleotide
ugccauaaguccuccgugc

SEQ ID NO: 2309030 - RNA, 19 nt, Artificial Sequence
  Description of Artificial Sequence: Synthetic oligonucleotide
uuagcaacauauccuccaa

SEQ ID NO: 2309031 - RNA, 19 nt, Artificial Sequence
  Description of Artificial Sequence: Synthetic oligonucleotide
aaccguguuccucuucucu

SEQ ID NO: 2309032 - RNA, 19 nt, Artificial Sequence
  Description of Artificial Sequence: Synthetic oligonucleotide
uacucaugucaacaguuuc

SEQ ID NO: 2309033 - RNA, 19 nt, Artificial Sequence
  Description of Artificial Sequence: Synthetic oligonucleotide
gcaaaagcugaacaggggc

SEQ ID NO: 2309034 - RNA, 19 nt, Artificial Sequence
  Description of Artificial Sequence: Synthetic oligonucleotide
gcugcaucuaugaugaucc

SEQ ID NO: 2309035 - RNA, 19 nt, Artificial Sequence
  Description of Artificial Sequence: Synthetic oligonucleotide
aaugcccgcagcgauggag

SEQ ID NO: 2309036 - RNA, 19 nt, Artificial Sequence
  Description of Artificial Sequence: Synthetic oligonucleotide
gucaguccaagccuggagc

SEQ ID NO: 2309037 - RNA, 19 nt, Artificial Sequence
  Description of Artificial Sequence: Synthetic oligonucleotide
uuagaccaugauagaagcu

SEQ ID NO: 2309038 - RNA, 19 nt, Artificial Sequence
  Description of Artificial Sequence: Synthetic oligonucleotide
ucaugauucuagcauuaua

SEQ ID NO: 2309039 - RNA, 19 nt, Artificial Sequence
  Description of Artificial Sequence: Synthetic oligonucleotide
gucgcuaugacgccacaag

SEQ ID NO: 2309040 - RNA, 19 nt, Artificial Sequence
  Description of Artificial Sequence: Synthetic oligonucleotide
gacacugcguuaaucauga

SEQ ID NO: 2309041 - RNA, 19 nt, Artificial Sequence
  Description of Artificial Sequence: Synthetic oligonucleotide
uccucgaaacucucaaaga

SEQ ID NO: 2309042 - RNA, 19 nt, Artificial Sequence
  Description of Artificial Sequence: Synthetic oligonucleotide
uaaucaugaggaaggcuau

SEQ ID NO: 2309043 - RNA, 19 nt, Artificial Sequence
  Description of Artificial Sequence: Synthetic oligonucleotide
auuccaggauauacuaugg

SEQ ID NO: 2309044 - RNA, 19 nt, Artificial Sequence
  Description of Artificial Sequence: Synthetic oligonucleotide
auggaugcaaucagggauc

SEQ ID NO: 2309045 - RNA, 19 nt, Artificial Sequence
  Description of Artificial Sequence: Synthetic oligonucleotide
acuaugggcuuuuccuuag

SEQ ID NO: 2309046 - RNA, 19 nt, Artificial Sequence
  Description of Artificial Sequence: Synthetic oligonucleotide
caaaguuacucaugucaac

SEQ ID NO: 2309047 - RNA, 19 nt, Artificial Sequence
  Description of Artificial Sequence: Synthetic oligonucleotide
gaguucucaugauucuagc

SEQ ID NO: 2309048 - RNA, 19 nt, Artificial Sequence
  Description of Artificial Sequence: Synthetic oligonucleotide
accguguuccucuucucuc

SEQ ID NO: 2309049 - RNA, 19 nt, Artificial Sequence
  Description of Artificial Sequence: Synthetic oligonucleotide
agaaugcccgcagcgaugg

SEQ ID NO: 2309050 - RNA, 19 nt, Artificial Sequence
  Description of Artificial Sequence: Synthetic oligonucleotide
uaugaugauccaccauccu

SEQ ID NO: 2309051 - RNA, 19 nt, Artificial Sequence
  Description of Artificial Sequence: Synthetic oligonucleotide
gauagaagcugacaaaguu

SEQ ID NO: 2309052 - RNA, 19 nt, Artificial Sequence
  Description of Artificial Sequence: Synthetic oligonucleotide
uucucaugauucuagcauu

SEQ ID NO: 2309053 - RNA, 19 nt, Artificial Sequence
  Description of Artificial Sequence: Synthetic oligonucleotide
gcguuaaucaugaggaagg

SEQ ID NO: 2309054 - RNA, 19 nt, Artificial Sequence
  Description of Artificial Sequence: Synthetic oligonucleotide
ucucaugauucuagcauua

SEQ ID NO: 2309055 - RNA, 19 nt, Artificial Sequence
  Description of Artificial Sequence: Synthetic oligonucleotide
auaaguccuccgugcgacc

SEQ ID NO: 2309056 - RNA, 19 nt, Artificial Sequence
  Description of Artificial Sequence: Synthetic oligonucleotide
auagaaugcccgcagcgau

SEQ ID NO: 2309057 - RNA, 19 nt, Artificial Sequence
  Description of Artificial Sequence: Synthetic oligonucleotide
ugaggaaggcuauggucgc

SEQ ID NO: 2309058 - RNA, 19 nt, Artificial Sequence
  Description of Artificial Sequence: Synthetic oligonucleotide
ugguaugagugguugaauu

SEQ ID NO: 2309059 - RNA, 19 nt, Artificial Sequence
  Description of Artificial Sequence: Synthetic oligonucleotide
gcgacugugcuguagaggc

SEQ ID NO: 2309060 - RNA, 19 nt, Artificial Sequence
  Description of Artificial Sequence: Synthetic oligonucleotide
uccuuucccacugcaaaag

SEQ ID NO: 2309061 - RNA, 19 nt, Artificial Sequence
  Description of Artificial Sequence: Synthetic oligonucleotide
ugcgccuucuagaaaucca

SEQ ID NO: 2309062 - RNA, 19 nt, Artificial Sequence
  Description of Artificial Sequence: Synthetic oligonucleotide
agauacgagcgccugucug

SEQ ID NO: 2309063 - RNA, 19 nt, Artificial Sequence
  Description of Artificial Sequence: Synthetic oligonucleotide
cagacaucuuuucagguca

SEQ ID NO: 2309064 - RNA, 19 nt, Artificial Sequence
  Description of Artificial Sequence: Synthetic oligonucleotide
gcugagauuauacucagaa

SEQ ID NO: 2309065 - RNA, 19 nt, Artificial Sequence
  Description of Artificial Sequence: Synthetic oligonucleotide
uguagaggcggugucuuca

SEQ ID NO: 2309066 - RNA, 19 nt, Artificial Sequence
  Description of Artificial Sequence: Synthetic oligonucleotide
cuucuagaaauccagacau

SEQ ID NO: 2309067 - RNA, 19 nt, Artificial Sequence
  Description of Artificial Sequence: Synthetic oligonucleotide
gugcucaacccuuuagacc

SEQ ID NO: 2309068 - RNA, 19 nt, Artificial Sequence
  Description of Artificial Sequence: Synthetic oligonucleotide
agacucagugagcaguuga

SEQ ID NO: 2309069 - RNA, 19 nt, Artificial Sequence
  Description of Artificial Sequence: Synthetic oligonucleotide
uguagcugucaccucgcac

SEQ ID NO: 2309070 - RNA, 19 nt, Artificial Sequence
  Description of Artificial Sequence: Synthetic oligonucleotide
cauaaguccuccgugcgac

SEQ ID NO: 2309071 - RNA, 19 nt, Artificial Sequence
  Description of Artificial Sequence: Synthetic oligonucleotide
caguccaugcauucugagc

SEQ ID NO: 2309072 - RNA, 19 nt, Artificial Sequence
  Description of Artificial Sequence: Synthetic oligonucleotide
aaggccaacaugaaaccaa

SEQ ID NO: 2309073 - RNA, 19 nt, Artificial Sequence
  Description of Artificial Sequence: Synthetic oligonucleotide
uccagacaucuuuucaggu

SEQ ID NO: 2309074 - RNA, 19 nt, Artificial Sequence
  Description of Artificial Sequence: Synthetic oligonucleotide
gcaucuaugaugauccacc

SEQ ID NO: 2309075 - RNA, 19 nt, Artificial Sequence
  Description of Artificial Sequence: Synthetic oligonucleotide
aaacucucaaagaaccuuu

SEQ ID NO: 2309076 - RNA, 19 nt, Artificial Sequence
  Description of Artificial Sequence: Synthetic oligonucleotide
uagaaugcccgcagcgaug

SEQ ID NO: 2309077 - RNA, 19 nt, Artificial Sequence
  Description of Artificial Sequence: Synthetic oligonucleotide
ucaacccuuuagaccauga

SEQ ID NO: 2309078 - RNA, 19 nt, Artificial Sequence
  Description of Artificial Sequence: Synthetic oligonucleotide
aagccuggagccgggaguc

SEQ ID NO: 2309079 - RNA, 19 nt, Artificial Sequence
  Description of Artificial Sequence: Synthetic oligonucleotide
gagugguugaauuccucca

SEQ ID NO: 2309080 - RNA, 19 nt, Artificial Sequence
  Description of Artificial Sequence: Synthetic oligonucleotide
aaaugacagcugcaucuau

SEQ ID NO: 2309081 - RNA, 19 nt, Artificial Sequence
  Description of Artificial Sequence: Synthetic oligonucleotide
gauggaggcaaccguguuc

SEQ ID NO: 2309082 - RNA, 19 nt, Artificial Sequence
  Description of Artificial Sequence: Synthetic oligonucleotide
acauggaugcaaucaggga

SEQ ID NO: 2309083 - RNA, 19 nt, Artificial Sequence
  Description of Artificial Sequence: Synthetic oligonucleotide
ugguccucgaaacucucaa

SEQ ID NO: 2309084 - RNA, 19 nt, Artificial Sequence
  Description of Artificial Sequence: Synthetic oligonucleotide
gaugauccaccauccugug

SEQ ID NO: 2309085 - RNA, 19 nt, Artificial Sequence
  Description of Artificial Sequence: Synthetic oligonucleotide
uucuagaaauccagacauc

SEQ ID NO: 2309086 - RNA, 19 nt, Artificial Sequence
  Description of Artificial Sequence: Synthetic oligonucleotide
ugcaucuaugaugauccac

SEQ ID NO: 2309087 - RNA, 19 nt, Artificial Sequence
  Description of Artificial Sequence: Synthetic oligonucleotide
auacuaugggcuuuuccuu

SEQ ID NO: 2309088 - RNA, 19 nt, Artificial Sequence
  Description of Artificial Sequence: Synthetic oligonucleotide
acuagucuguugcaguuua

SEQ ID NO: 2309089 - RNA, 19 nt, Artificial Sequence
  Description of Artificial Sequence: Synthetic oligonucleotide
agcaugguaugagugguug

SEQ ID NO: 2309090 - RNA, 19 nt, Artificial Sequence
  Description of Artificial Sequence: Synthetic oligonucleotide
cuaugacgccacaagcaug

SEQ ID NO: 2309091 - RNA, 19 nt, Artificial Sequence
  Description of Artificial Sequence: Synthetic oligonucleotide
gaggcggugucuucauugc

SEQ ID NO: 2309092 - RNA, 19 nt, Artificial Sequence
  Description of Artificial Sequence: Synthetic oligonucleotide
uacuaugggcuuuuccuua

SEQ ID NO: 2309093 - RNA, 19 nt, Artificial Sequence
  Description of Artificial Sequence: Synthetic oligonucleotide
auacgagcgccugucuggc

SEQ ID NO: 2309094 - RNA, 19 nt, Artificial Sequence
  Description of Artificial Sequence: Synthetic oligonucleotide
ucgcacuuguccauucgac

SEQ ID NO: 2309095 - RNA, 19 nt, Artificial Sequence
  Description of Artificial Sequence: Synthetic oligonucleotide
aaaucccaugcagggcgac

SEQ ID NO: 2309096 - RNA, 19 nt, Artificial Sequence
  Description of Artificial Sequence: Synthetic oligonucleotide
gguaugagugguugaauuc

SEQ ID NO: 2309097 - RNA, 19 nt, Artificial Sequence
  Description of Artificial Sequence: Synthetic oligonucleotide
cagcaauuccaggauauac

SEQ ID NO: 2309098 - RNA, 19 nt, Artificial Sequence
  Description of Artificial Sequence: Synthetic oligonucleotide
ggcuauggucgcuaugacg

SEQ ID NO: 2309099 - RNA, 19 nt, Artificial Sequence
  Description of Artificial Sequence: Synthetic oligonucleotide
aaacaccagcccuccaaaa

SEQ ID NO: 2309100 - RNA, 19 nt, Artificial Sequence
  Description of Artificial Sequence: Synthetic oligonucleotide
cuuuucaggucaguccaag

SEQ ID NO: 2309101 - RNA, 19 nt, Artificial Sequence
  Description of Artificial Sequence: Synthetic oligonucleotide
aacaggggcaugccacacu

SEQ ID NO: 2309102 - RNA, 19 nt, Artificial Sequence
  Description of Artificial Sequence: Synthetic oligonucleotide
cugacaaaguuacucaugu

SEQ ID NO: 2309103 - RNA, 19 nt, Artificial Sequence
  Description of Artificial Sequence: Synthetic oligonucleotide
acauauccuccaaagagaa

SEQ ID NO: 2309104 - RNA, 19 nt, Artificial Sequence
  Description of Artificial Sequence: Synthetic oligonucleotide
gugguugaauuccuccaug

SEQ ID NO: 2309105 - RNA, 19 nt, Artificial Sequence
  Description of Artificial Sequence: Synthetic oligonucleotide
aggggcaugccacacuagu

SEQ ID NO: 2309106 - RNA, 19 nt, Artificial Sequence
  Description of Artificial Sequence: Synthetic oligonucleotide
auucgacacugcguuaauc

SEQ ID NO: 2309107 - RNA, 19 nt, Artificial Sequence
  Description of Artificial Sequence: Synthetic oligonucleotide
gugcgaccaaacuuaaaca

SEQ ID NO: 2309108 - RNA, 19 nt, Artificial Sequence
  Description of Artificial Sequence: Synthetic oligonucleotide
uccucuucucuccccaguc

SEQ ID NO: 2309109 - RNA, 19 nt, Artificial Sequence
  Description of Artificial Sequence: Synthetic oligonucleotide
gucaccucgcacuugucca

SEQ ID NO: 2309110 - RNA, 19 nt, Artificial Sequence
  Description of Artificial Sequence: Synthetic oligonucleotide
cauggaugcaaucagggau

SEQ ID NO: 2309111 - RNA, 19 nt, Artificial Sequence
  Description of Artificial Sequence: Synthetic oligonucleotide
aggcuauggucgcuaugac

SEQ ID NO: 2309112 - RNA, 19 nt, Artificial Sequence
  Description of Artificial Sequence: Synthetic oligonucleotide
cuucauugccauaaguccu

SEQ ID NO: 2309113 - RNA, 19 nt, Artificial Sequence
  Description of Artificial Sequence: Synthetic oligonucleotide
ugcugggauaaaugacagc

SEQ ID NO: 2309114 - RNA, 19 nt, Artificial Sequence
  Description of Artificial Sequence: Synthetic oligonucleotide
aaagacucagugagcaguu

SEQ ID NO: 2309115 - RNA, 19 nt, Artificial Sequence
  Description of Artificial Sequence: Synthetic oligonucleotide
cgugcgaccaaacuuaaac

SEQ ID NO: 2309116 - RNA, 19 nt, Artificial Sequence
  Description of Artificial Sequence: Synthetic oligonucleotide
uauggucgcuaugacgcca

SEQ ID NO: 2309117 - RNA, 19 nt, Artificial Sequence
  Description of Artificial Sequence: Synthetic oligonucleotide
ucgacacugcguuaaucau

SEQ ID NO: 2309118 - RNA, 19 nt, Artificial Sequence
  Description of Artificial Sequence: Synthetic oligonucleotide
cuauggucgcuaugacgcc

SEQ ID NO: 2309119 - RNA, 19 nt, Artificial Sequence
  Description of Artificial Sequence: Synthetic oligonucleotide
gaaccuuuugccucugccu

SEQ ID NO: 2309120 - RNA, 19 nt, Artificial Sequence
  Description of Artificial Sequence: Synthetic oligonucleotide
cauugccauaaguccuccg

SEQ ID NO: 2309121 - RNA, 19 nt, Artificial Sequence
  Description of Artificial Sequence: Synthetic oligonucleotide
gaaggcuauggucgcuaug

SEQ ID NO: 2309122 - RNA, 19 nt, Artificial Sequence
  Description of Artificial Sequence: Synthetic oligonucleotide
aggcugguccucgaaacuc

SEQ ID NO: 2309123 - RNA, 19 nt, Artificial Sequence
  Description of Artificial Sequence: Synthetic oligonucleotide
uaaguccuccgugcgacca

SEQ ID NO: 2309124 - RNA, 19 nt, Artificial Sequence
  Description of Artificial Sequence: Synthetic oligonucleotide
accaugauagaagcugaca

SEQ ID NO: 2309125 - RNA, 19 nt, Artificial Sequence
  Description of Artificial Sequence: Synthetic oligonucleotide
uggaugcaaucagggaucc

SEQ ID NO: 2309126 - RNA, 19 nt, Artificial Sequence
  Description of Artificial Sequence: Synthetic oligonucleotide
cagcauuacaaaagacuca

SEQ ID NO: 2309127 - RNA, 19 nt, Artificial Sequence
  Description of Artificial Sequence: Synthetic oligonucleotide
agcugaacaggggcaugcc

SEQ ID NO: 2309128 - RNA, 19 nt, Artificial Sequence
  Description of Artificial Sequence: Synthetic oligonucleotide
acacuagucuguugcaguu

SEQ ID NO: 2309129 - RNA, 19 nt, Artificial Sequence
  Description of Artificial Sequence: Synthetic oligonucleotide
aucuaugaugauccaccau

SEQ ID NO: 2309130 - RNA, 19 nt, Artificial Sequence
  Description of Artificial Sequence: Synthetic oligonucleotide
auacagcaauuccaggaua

SEQ ID NO: 2309131 - RNA, 19 nt, Artificial Sequence
  Description of Artificial Sequence: Synthetic oligonucleotide
caucuaugaugauccacca

SEQ ID NO: 2309132 - RNA, 19 nt, Artificial Sequence
  Description of Artificial Sequence: Synthetic oligonucleotide
gacgccacaagcaugguau

SEQ ID NO: 2309133 - RNA, 19 nt, Artificial Sequence
  Description of Artificial Sequence: Synthetic oligonucleotide
gcccagacagccuucacug

SEQ ID NO: 2309134 - RNA, 19 nt, Artificial Sequence
  Description of Artificial Sequence: Synthetic oligonucleotide
gccuucuagaaauccagac

SEQ ID NO: 2309135 - RNA, 19 nt, Artificial Sequence
  Description of Artificial Sequence: Synthetic oligonucleotide
gccauaaguccuccgugcg

SEQ ID NO: 2309136 - RNA, 19 nt, Artificial Sequence
  Description of Artificial Sequence: Synthetic oligonucleotide
aagacucagugagcaguug

SEQ ID NO: 2309137 - RNA, 19 nt, Artificial Sequence
  Description of Artificial Sequence: Synthetic oligonucleotide
aguuuaagcugagauuaua

SEQ ID NO: 2309138 - RNA, 19 nt, Artificial Sequence
  Description of Artificial Sequence: Synthetic oligonucleotide
ggauccgaaggccaacaug

SEQ ID NO: 2309139 - RNA, 19 nt, Artificial Sequence
  Description of Artificial Sequence: Synthetic oligonucleotide
cugagauuauacucagaaa

SEQ ID NO: 2309140 - RNA, 19 nt, Artificial Sequence
  Description of Artificial Sequence: Synthetic oligonucleotide
aaaaucccaugcagggcga

SEQ ID NO: 2309141 - RNA, 19 nt, Artificial Sequence
  Description of Artificial Sequence: Synthetic oligonucleotide
ucccaagugcucaacccuu

SEQ ID NO: 2309142 - RNA, 19 nt, Artificial Sequence
  Description of Artificial Sequence: Synthetic oligonucleotide
uugcgccuucuagaaaucc

SEQ ID NO: 2309143 - RNA, 19 nt, Artificial Sequence
  Description of Artificial Sequence: Synthetic oligonucleotide
aaagaaccuuuugccucug

SEQ ID NO: 2309144 - RNA, 19 nt, Artificial Sequence
  Description of Artificial Sequence: Synthetic oligonucleotide
aaguuuaagcugagauuau

SEQ ID NO: 2309145 - RNA, 19 nt, Artificial Sequence
  Description of Artificial Sequence: Synthetic oligonucleotide
augagugguugaauuccuc

SEQ ID NO: 2309146 - RNA, 19 nt, Artificial Sequence
  Description of Artificial Sequence: Synthetic oligonucleotide
accucgcacuuguccauuc

SEQ ID NO: 2309147 - RNA, 19 nt, Artificial Sequence
  Description of Artificial Sequence: Synthetic oligonucleotide
ggugucuucauugccauaa

SEQ ID NO: 2309148 - RNA, 19 nt, Artificial Sequence
  Description of Artificial Sequence: Synthetic oligonucleotide
acauaggaguucucaugau

SEQ ID NO: 2309149 - RNA, 19 nt, Artificial Sequence
  Description of Artificial Sequence: Synthetic oligonucleotide
caucuugcgccuucuagaa

SEQ ID NO: 2309150 - RNA, 19 nt, Artificial Sequence
  Description of Artificial Sequence: Synthetic oligonucleotide
gcaauuccaggauauacua

SEQ ID NO: 2309151 - RNA, 19 nt, Artificial Sequence
  Description of Artificial Sequence: Synthetic oligonucleotide
ugacgccacaagcauggua

SEQ ID NO: 2309152 - RNA, 19 nt, Artificial Sequence
  Description of Artificial Sequence: Synthetic oligonucleotide
cuaugggcuuuuccuuagc

SEQ ID NO: 2309153 - RNA, 19 nt, Artificial Sequence
  Description of Artificial Sequence: Synthetic oligonucleotide
cuguugcaguuuacauagg

SEQ ID NO: 2309154 - RNA, 19 nt, Artificial Sequence
  Description of Artificial Sequence: Synthetic oligonucleotide
auggucgcuaugacgccac

SEQ ID NO: 2309155 - RNA, 19 nt, Artificial Sequence
  Description of Artificial Sequence: Synthetic oligonucleotide
gcaucuugcgccuucuaga

SEQ ID NO: 2309156 - RNA, 19 nt, Artificial Sequence
  Description of Artificial Sequence: Synthetic oligonucleotide
ggucaguccaagccuggag

SEQ ID NO: 2309157 - RNA, 19 nt, Artificial Sequence
  Description of Artificial Sequence: Synthetic oligonucleotide
caaagaaccuuuugccucu

SEQ ID NO: 2309158 - RNA, 19 nt, Artificial Sequence
  Description of Artificial Sequence: Synthetic oligonucleotide
augcccgcagcgauggagg

SEQ ID NO: 2309159 - RNA, 19 nt, Artificial Sequence
  Description of Artificial Sequence: Synthetic oligonucleotide
aucccaugcagggcgacug

SEQ ID NO: 2309160 - RNA, 19 nt, Artificial Sequence
  Description of Artificial Sequence: Synthetic oligonucleotide
caugguaugagugguugaa

SEQ ID NO: 2309161 - RNA, 19 nt, Artificial Sequence
  Description of Artificial Sequence: Synthetic oligonucleotide
gcgaccaaacuuaaacacc

SEQ ID NO: 2309162 - RNA, 19 nt, Artificial Sequence
  Description of Artificial Sequence: Synthetic oligonucleotide
cuccgugcgaccaaacuua

SEQ ID NO: 2309163 - RNA, 19 nt, Artificial Sequence
  Description of Artificial Sequence: Synthetic oligonucleotide
gcagcgauggaggcaaccg

SEQ ID NO: 2309164 - RNA, 19 nt, Artificial Sequence
  Description of Artificial Sequence: Synthetic oligonucleotide
ugcuguagaggcggugucu

SEQ ID NO: 2309165 - RNA, 19 nt, Artificial Sequence
  Description of Artificial Sequence: Synthetic oligonucleotide
aacucucaaagaaccuuuu

SEQ ID NO: 2309166 - RNA, 19 nt, Artificial Sequence
  Description of Artificial Sequence: Synthetic oligonucleotide
gaccaugauagaagcugac

SEQ ID NO: 2309167 - RNA, 19 nt, Artificial Sequence
  Description of Artificial Sequence: Synthetic oligonucleotide
augauccaccauccuguga

SEQ ID NO: 2309168 - RNA, 19 nt, Artificial Sequence
  Description of Artificial Sequence: Synthetic oligonucleotide
ccagacaucuuuucagguc

SEQ ID NO: 2309169 - RNA, 19 nt, Artificial Sequence
  Description of Artificial Sequence: Synthetic oligonucleotide
auacaaguuuaagcugaga

SEQ ID NO: 2309170 - RNA, 19 nt, Artificial Sequence
  Description of Artificial Sequence: Synthetic oligonucleotide
cuugcgccuucuagaaauc

SEQ ID NO: 2309171 - RNA, 19 nt, Artificial Sequence
  Description of Artificial Sequence: Synthetic oligonucleotide
aguuuacauaggaguucuc

SEQ ID NO: 2309172 - RNA, 19 nt, Artificial Sequence
  Description of Artificial Sequence: Synthetic oligonucleotide
ccuucuagaaauccagaca

SEQ ID NO: 2309173 - RNA, 19 nt, Artificial Sequence
  Description of Artificial Sequence: Synthetic oligonucleotide
gauauacuaugggcuuuuc

SEQ ID NO: 2309174 - RNA, 19 nt, Artificial Sequence
  Description of Artificial Sequence: Synthetic oligonucleotide
gacucagugagcaguugaa

SEQ ID NO: 2309175 - RNA, 19 nt, Artificial Sequence
  Description of Artificial Sequence: Synthetic oligonucleotide
uccgugcgaccaaacuuaa

SEQ ID NO: 2309176 - RNA, 19 nt, Artificial Sequence
  Description of Artificial Sequence: Synthetic oligonucleotide
ucaccucgcacuuguccau

SEQ ID NO: 2309177 - RNA, 19 nt, Artificial Sequence
  Description of Artificial Sequence: Synthetic oligonucleotide
aaguccuccgugcgaccaa

SEQ ID NO: 2309178 - RNA, 19 nt, Artificial Sequence
  Description of Artificial Sequence: Synthetic oligonucleotide
agacaucuuuucaggucag

SEQ ID NO: 2309179 - RNA, 19 nt, Artificial Sequence
  Description of Artificial Sequence: Synthetic oligonucleotide
caguccaagccuggagccg

SEQ ID NO: 2309180 - RNA, 19 nt, Artificial Sequence
  Description of Artificial Sequence: Synthetic oligonucleotide
guccauucgacacugcguu

SEQ ID NO: 2309181 - RNA, 19 nt, Artificial Sequence
  Description of Artificial Sequence: Synthetic oligonucleotide
ccaggauauacuaugggcu

SEQ ID NO: 2309182 - RNA, 19 nt, Artificial Sequence
  Description of Artificial Sequence: Synthetic oligonucleotide
guuaaucaugaggaaggcu

SEQ ID NO: 2309183 - RNA, 19 nt, Artificial Sequence
  Description of Artificial Sequence: Synthetic oligonucleotide
ccucgaaacucucaaagaa

SEQ ID NO: 2309184 - RNA, 19 nt, Artificial Sequence
  Description of Artificial Sequence: Synthetic oligonucleotide
augcagggcgacugugcug

SEQ ID NO: 2309185 - RNA, 19 nt, Artificial Sequence
  Description of Artificial Sequence: Synthetic oligonucleotide
ggcgacugugcuguagagg

SEQ ID NO: 2309186 - RNA, 19 nt, Artificial Sequence
  Description of Artificial Sequence: Synthetic oligonucleotide
cucgcacuuguccauucga

SEQ ID NO: 2309187 - RNA, 19 nt, Artificial Sequence
  Description of Artificial Sequence: Synthetic oligonucleotide
gaacaggggcaugccacac

SEQ ID NO: 2309188 - RNA, 19 nt, Artificial Sequence
  Description of Artificial Sequence: Synthetic oligonucleotide
aggauauacuaugggcuuu

SEQ ID NO: 2309189 - RNA, 19 nt, Artificial Sequence
  Description of Artificial Sequence: Synthetic oligonucleotide
gcaguuuacauaggaguuc

SEQ ID NO: 2309190 - RNA, 19 nt, Artificial Sequence
  Description of Artificial Sequence: Synthetic oligonucleotide
augguaugagugguugaau

SEQ ID NO: 2309191 - RNA, 19 nt, Artificial Sequence
  Description of Artificial Sequence: Synthetic oligonucleotide
acgccacaagcaugguaug

SEQ ID NO: 2309192 - RNA, 19 nt, Artificial Sequence
  Description of Artificial Sequence: Synthetic oligonucleotide
ucccaugcagggcgacugu

SEQ ID NO: 2309193 - RNA, 19 nt, Artificial Sequence
  Description of Artificial Sequence: Synthetic oligonucleotide
cacacuagucuguugcagu

SEQ ID NO: 2309194 - RNA, 19 nt, Artificial Sequence
  Description of Artificial Sequence: Synthetic oligonucleotide
uccauucgacacugcguua

SEQ ID NO: 2309195 - RNA, 19 nt, Artificial Sequence
  Description of Artificial Sequence: Synthetic oligonucleotide
aggaguucucaugauucua

SEQ ID NO: 2309196 - RNA, 19 nt, Artificial Sequence
  Description of Artificial Sequence: Synthetic oligonucleotide
agggauccgaaggccaaca

SEQ ID NO: 2309197 - RNA, 19 nt, Artificial Sequence
  Description of Artificial Sequence: Synthetic oligonucleotide
caguuuacauaggaguucu

SEQ ID NO: 2309198 - RNA, 19 nt, Artificial Sequence
  Description of Artificial Sequence: Synthetic oligonucleotide
gcgccuucuagaaauccag

SEQ ID NO: 2309199 - RNA, 19 nt, Artificial Sequence
  Description of Artificial Sequence: Synthetic oligonucleotide
ugcccgcagcgauggaggc

SEQ ID NO: 2309200 - RNA, 19 nt, Artificial Sequence
  Description of Artificial Sequence: Synthetic oligonucleotide
ccaggcugguccucgaaac

SEQ ID NO: 2309201 - RNA, 19 nt, Artificial Sequence
  Description of Artificial Sequence: Synthetic oligonucleotide
augccacacuagucuguug

SEQ ID NO: 2309202 - RNA, 19 nt, Artificial Sequence
  Description of Artificial Sequence: Synthetic oligonucleotide
ccguguuccucuucucucc

SEQ ID NO: 2309203 - RNA, 19 nt, Artificial Sequence
  Description of Artificial Sequence: Synthetic oligonucleotide
aucuugcgccuucuagaaa

SEQ ID NO: 2309204 - RNA, 19 nt, Artificial Sequence
  Description of Artificial Sequence: Synthetic oligonucleotide
cauaggaguucucaugauu

SEQ ID NO: 2309205 - RNA, 19 nt, Artificial Sequence
  Description of Artificial Sequence: Synthetic oligonucleotide
guuuccuuucccacugcaa

SEQ ID NO: 2309206 - RNA, 19 nt, Artificial Sequence
  Description of Artificial Sequence: Synthetic oligonucleotide
cuuaaacaccagcccucca

SEQ ID NO: 2309207 - RNA, 19 nt, Artificial Sequence
  Description of Artificial Sequence: Synthetic oligonucleotide
ggauaaaugacagcugcau

SEQ ID NO: 2309208 - RNA, 19 nt, Artificial Sequence
  Description of Artificial Sequence: Synthetic oligonucleotide
caagcaugguaugaguggu

SEQ ID NO: 2309209 - RNA, 19 nt, Artificial Sequence
  Description of Artificial Sequence: Synthetic oligonucleotide
uacgagcgccugucuggcc

SEQ ID NO: 2309210 - RNA, 19 nt, Artificial Sequence
  Description of Artificial Sequence: Synthetic oligonucleotide
ccaugcagggcgacugugc

SEQ ID NO: 2309211 - RNA, 19 nt, Artificial Sequence
  Description of Artificial Sequence: Synthetic oligonucleotide
acacugcguuaaucaugag

SEQ ID NO: 2309212 - RNA, 19 nt, Artificial Sequence
  Description of Artificial Sequence: Synthetic oligonucleotide
gggcaugccacacuagucu

SEQ ID NO: 2309213 - RNA, 19 nt, Artificial Sequence
  Description of Artificial Sequence: Synthetic oligonucleotide
cucaacccuuuagaccaug

SEQ ID NO: 2309214 - RNA, 19 nt, Artificial Sequence
  Description of Artificial Sequence: Synthetic oligonucleotide
caggauauacuaugggcuu

SEQ ID NO: 2309215 - RNA, 19 nt, Artificial Sequence
  Description of Artificial Sequence: Synthetic oligonucleotide
cuguagaggcggugucuuc

SEQ ID NO: 2309216 - RNA, 19 nt, Artificial Sequence
  Description of Artificial Sequence: Synthetic oligonucleotide
caaccguguuccucuucuc

SEQ ID NO: 2309217 - RNA, 19 nt, Artificial Sequence
  Description of Artificial Sequence: Synthetic oligonucleotide
auccaccauccugugaaaa

SEQ ID NO: 2309218 - RNA, 19 nt, Artificial Sequence
  Description of Artificial Sequence: Synthetic oligonucleotide
cugguccucgaaacucuca

SEQ ID NO: 2309219 - RNA, 19 nt, Artificial Sequence
  Description of Artificial Sequence: Synthetic oligonucleotide
aagcaugguaugagugguu

SEQ ID NO: 2309220 - RNA, 19 nt, Artificial Sequence
  Description of Artificial Sequence: Synthetic oligonucleotide
cgacacugcguuaaucaug

SEQ ID NO: 2309221 - RNA, 19 nt, Artificial Sequence
  Description of Artificial Sequence: Synthetic oligonucleotide
cuagaaauccagacaucuu

SEQ ID NO: 2309222 - RNA, 19 nt, Artificial Sequence
  Description of Artificial Sequence: Synthetic oligonucleotide
uggucgcuaugacgccaca

SEQ ID NO: 2309223 - RNA, 19 nt, Artificial Sequence
  Description of Artificial Sequence: Synthetic oligonucleotide
gggauaaaugacagcugca

SEQ ID NO: 2309224 - RNA, 19 nt, Artificial Sequence
  Description of Artificial Sequence: Synthetic oligonucleotide
caggggcaugccacacuag

SEQ ID NO: 2309225 - RNA, 19 nt, Artificial Sequence
  Description of Artificial Sequence: Synthetic oligonucleotide
aggaaggcuauggucgcua

SEQ ID NO: 2309226 - RNA, 19 nt, Artificial Sequence
  Description of Artificial Sequence: Synthetic oligonucleotide
gcuaugacgccacaagcau

SEQ ID NO: 2309227 - RNA, 19 nt, Artificial Sequence
  Description of Artificial Sequence: Synthetic oligonucleotide
ccuuuagaccaugauagaa

SEQ ID NO: 2309228 - RNA, 19 nt, Artificial Sequence
  Description of Artificial Sequence: Synthetic oligonucleotide
gccucccaagugcucaacc

SEQ ID NO: 2309229 - RNA, 19 nt, Artificial Sequence
  Description of Artificial Sequence: Synthetic oligonucleotide
cucccaagugcucaacccu

SEQ ID NO: 2309230 - RNA, 19 nt, Artificial Sequence
  Description of Artificial Sequence: Synthetic oligonucleotide
cugcguuaaucaugaggaa

SEQ ID NO: 2309231 - RNA, 19 nt, Artificial Sequence
  Description of Artificial Sequence: Synthetic oligonucleotide
ccagauacgagcgccuguc

SEQ ID NO: 2309232 - RNA, 19 nt, Artificial Sequence
  Description of Artificial Sequence: Synthetic oligonucleotide
cguuaaucaugaggaaggc

SEQ ID NO: 2309233 - RNA, 19 nt, Artificial Sequence
  Description of Artificial Sequence: Synthetic oligonucleotide
caugcagggcgacugugcu

SEQ ID NO: 2309234 - RNA, 19 nt, Artificial Sequence
  Description of Artificial Sequence: Synthetic oligonucleotide
gcaaccguguuccucuucu

SEQ ID NO: 2309235 - RNA, 19 nt, Artificial Sequence
  Description of Artificial Sequence: Synthetic oligonucleotide
aggucaguccaagccugga

SEQ ID NO: 2309236 - RNA, 19 nt, Artificial Sequence
  Description of Artificial Sequence: Synthetic oligonucleotide
ccacacuagucuguugcag

SEQ ID NO: 2309237 - RNA, 19 nt, Artificial Sequence
  Description of Artificial Sequence: Synthetic oligonucleotide
ccucgcacuuguccauucg

SEQ ID NO: 2309238 - RNA, 19 nt, Artificial Sequence
  Description of Artificial Sequence: Synthetic oligonucleotide
gcaugguaugagugguuga

SEQ ID NO: 2309239 - RNA, 19 nt, Artificial Sequence
  Description of Artificial Sequence: Synthetic oligonucleotide
cagggcgacugugcuguag

SEQ ID NO: 2309240 - RNA, 19 nt, Artificial Sequence
  Description of Artificial Sequence: Synthetic oligonucleotide
cugcaucuaugaugaucca

SEQ ID NO: 2309241 - RNA, 19 nt, Artificial Sequence
  Description of Artificial Sequence: Synthetic oligonucleotide
gggcgacugugcuguagag

SEQ ID NO: 2309242 - RNA, 19 nt, Artificial Sequence
  Description of Artificial Sequence: Synthetic oligonucleotide
cacuuguccauucgacacu

SEQ ID NO: 2309243 - RNA, 19 nt, Artificial Sequence
  Description of Artificial Sequence: Synthetic oligonucleotide
uccuccaugcugggauaaa

SEQ ID NO: 2309244 - RNA, 19 nt, Artificial Sequence
  Description of Artificial Sequence: Synthetic oligonucleotide
cagggauccgaaggccaac

SEQ ID NO: 2309245 - RNA, 19 nt, Artificial Sequence
  Description of Artificial Sequence: Synthetic oligonucleotide
ggaugcaaucagggauccg

SEQ ID NO: 2309246 - RNA, 19 nt, Artificial Sequence
  Description of Artificial Sequence: Synthetic oligonucleotide
cugugcuguagaggcggug

SEQ ID NO: 2309247 - RNA, 19 nt, Artificial Sequence
  Description of Artificial Sequence: Synthetic oligonucleotide
uggaggcaaccguguuccu

SEQ ID NO: 2309248 - RNA, 19 nt, Artificial Sequence
  Description of Artificial Sequence: Synthetic oligonucleotide
gccacacuagucuguugca

SEQ ID NO: 2309249 - RNA, 19 nt, Artificial Sequence
  Description of Artificial Sequence: Synthetic oligonucleotide
guccaagccuggagccggg

SEQ ID NO: 2309250 - RNA, 19 nt, Artificial Sequence
  Description of Artificial Sequence: Synthetic oligonucleotide
ggaggcaaccguguuccuc

SEQ ID NO: 2309251 - RNA, 19 nt, Artificial Sequence
  Description of Artificial Sequence: Synthetic oligonucleotide
ccugucuggcccagacagc

SEQ ID NO: 2309252 - RNA, 19 nt, Artificial Sequence
  Description of Artificial Sequence: Synthetic oligonucleotide
gguccucgaaacucucaaa

SEQ ID NO: 2309253 - RNA, 19 nt, Artificial Sequence
  Description of Artificial Sequence: Synthetic oligonucleotide
agccuggagccgggagucg

SEQ ID NO: 2309254 - RNA, 19 nt, Artificial Sequence
  Description of Artificial Sequence: Synthetic oligonucleotide
cauauccuccaaagagaau

SEQ ID NO: 2309255 - RNA, 19 nt, Artificial Sequence
  Description of Artificial Sequence: Synthetic oligonucleotide
ggggcaugccacacuaguc

SEQ ID NO: 2309256 - RNA, 19 nt, Artificial Sequence
  Description of Artificial Sequence: Synthetic oligonucleotide
guagaggcggugucuucau

SEQ ID NO: 2309257 - RNA, 19 nt, Artificial Sequence
  Description of Artificial Sequence: Synthetic oligonucleotide
caacccuuuagaccaugau

SEQ ID NO: 2309258 - RNA, 19 nt, Artificial Sequence
  Description of Artificial Sequence: Synthetic oligonucleotide
auccgaaggccaacaugaa

SEQ ID NO: 2309259 - RNA, 19 nt, Artificial Sequence
  Description of Artificial Sequence: Synthetic oligonucleotide
gaaugcccgcagcgaugga

SEQ ID NO: 2309260 - RNA, 19 nt, Artificial Sequence
  Description of Artificial Sequence: Synthetic oligonucleotide
ccauaaguccuccgugcga

SEQ ID NO: 2309261 - RNA, 19 nt, Artificial Sequence
  Description of Artificial Sequence: Synthetic oligonucleotide
gagcaucuugcgccuucua

SEQ ID NO: 2309262 - RNA, 19 nt, Artificial Sequence
  Description of Artificial Sequence: Synthetic oligonucleotide
cgacugugcuguagaggcg

SEQ ID NO: 2309263 - RNA, 19 nt, Artificial Sequence
  Description of Artificial Sequence: Synthetic oligonucleotide
cgcacuuguccauucgaca

SEQ ID NO: 2309264 - RNA, 19 nt, Artificial Sequence
  Description of Artificial Sequence: Synthetic oligonucleotide
ccauucgacacugcguuaa

SEQ ID NO: 2309265 - RNA, 19 nt, Artificial Sequence
  Description of Artificial Sequence: Synthetic oligonucleotide
guccaugcauucugagcau

SEQ ID NO: 2309266 - RNA, 19 nt, Artificial Sequence
  Description of Artificial Sequence: Synthetic oligonucleotide
cccuuuagaccaugauaga

SEQ ID NO: 2309267 - RNA, 19 nt, Artificial Sequence
  Description of Artificial Sequence: Synthetic oligonucleotide
cagcgauggaggcaaccgu

SEQ ID NO: 2309268 - RNA, 19 nt, Artificial Sequence
  Description of Artificial Sequence: Synthetic oligonucleotide
ggcaaccguguuccucuuc

SEQ ID NO: 2309269 - RNA, 19 nt, Artificial Sequence
  Description of Artificial Sequence: Synthetic oligonucleotide
gcuuuuccuuagcaacaua

SEQ ID NO: 2309270 - RNA, 19 nt, Artificial Sequence
  Description of Artificial Sequence: Synthetic oligonucleotide
gaggaaggcuauggucgcu

SEQ ID NO: 2309271 - RNA, 19 nt, Artificial Sequence
  Description of Artificial Sequence: Synthetic oligonucleotide
cccaguccaugcauucuga

SEQ ID NO: 2309272 - RNA, 19 nt, Artificial Sequence
  Description of Artificial Sequence: Synthetic oligonucleotide
caugccacacuagucuguu

SEQ ID NO: 2309273 - RNA, 19 nt, Artificial Sequence
  Description of Artificial Sequence: Synthetic oligonucleotide
ggucgcuaugacgccacaa

SEQ ID NO: 2309274 - RNA, 19 nt, Artificial Sequence
  Description of Artificial Sequence: Synthetic oligonucleotide
cagauacgagcgccugucu

SEQ ID NO: 2309275 - RNA, 19 nt, Artificial Sequence
  Description of Artificial Sequence: Synthetic oligonucleotide
cauucgacacugcguuaau

SEQ ID NO: 2309276 - RNA, 19 nt, Artificial Sequence
  Description of Artificial Sequence: Synthetic oligonucleotide
ccacaagcaugguaugagu

SEQ ID NO: 2309277 - RNA, 19 nt, Artificial Sequence
  Description of Artificial Sequence: Synthetic oligonucleotide
guccuccgugcgaccaaac

SEQ ID NO: 2309278 - RNA, 19 nt, Artificial Sequence
  Description of Artificial Sequence: Synthetic oligonucleotide
ggaaggcuauggucgcuau

SEQ ID NO: 2309279 - RNA, 19 nt, Artificial Sequence
  Description of Artificial Sequence: Synthetic oligonucleotide
cccgcagcgauggaggcaa

SEQ ID NO: 2309280 - RNA, 19 nt, Artificial Sequence
  Description of Artificial Sequence: Synthetic oligonucleotide
gcauuacaaaagacucagu

SEQ ID NO: 2309281 - RNA, 19 nt, Artificial Sequence
  Description of Artificial Sequence: Synthetic oligonucleotide
cgccuucuagaaauccaga

SEQ ID NO: 2309282 - RNA, 19 nt, Artificial Sequence
  Description of Artificial Sequence: Synthetic oligonucleotide
gccagauacgagcgccugu

SEQ ID NO: 2309283 - RNA, 19 nt, Artificial Sequence
  Description of Artificial Sequence: Synthetic oligonucleotide
cgcagcgauggaggcaacc

SEQ ID NO: 2309284 - RNA, 19 nt, Artificial Sequence
  Description of Artificial Sequence: Synthetic oligonucleotide
ccaagugcucaacccuuua

SEQ ID NO: 2309285 - RNA, 19 nt, Artificial Sequence
  Description of Artificial Sequence: Synthetic oligonucleotide
cacuagucuguugcaguuu

SEQ ID NO: 2309286 - RNA, 19 nt, Artificial Sequence
  Description of Artificial Sequence: Synthetic oligonucleotide
ccuccgugcgaccaaacuu

SEQ ID NO: 2309287 - RNA, 19 nt, Artificial Sequence
  Description of Artificial Sequence: Synthetic oligonucleotide
gcuguagaggcggugucuu

SEQ ID NO: 2309288 - RNA, 19 nt, Artificial Sequence
  Description of Artificial Sequence: Synthetic oligonucleotide
gcgauggaggcaaccgugu

SEQ ID NO: 2309289 - RNA, 19 nt, Artificial Sequence
  Description of Artificial Sequence: Synthetic oligonucleotide
gggauccgaaggccaacau

SEQ ID NO: 2309290 - RNA, 19 nt, Artificial Sequence
  Description of Artificial Sequence: Synthetic oligonucleotide
gcaugccacacuagucugu

SEQ ID NO: 2309291 - RNA, 19 nt, Artificial Sequence
  Description of Artificial Sequence: Synthetic oligonucleotide
cgccacaagcaugguauga

SEQ ID NO: 2309292 - RNA, 19 nt, Artificial Sequence
  Description of Artificial Sequence: Synthetic oligonucleotide
gcccgcagcgauggaggca

SEQ ID NO: 2309293 - RNA, 19 nt, Artificial Sequence
  Description of Artificial Sequence: Synthetic oligonucleotide
ccgugcgaccaaacuuaaa

SEQ ID NO: 2309294 - RNA, 19 nt, Artificial Sequence
  Description of Artificial Sequence: Synthetic oligonucleotide
caccucgcacuuguccauu

SEQ ID NO: 2309295 - RNA, 19 nt, Artificial Sequence
  Description of Artificial Sequence: Synthetic oligonucleotide
ccgcagcgauggaggcaac

SEQ ID NO: 2309296 - RNA, 19 nt, Artificial Sequence
  Description of Artificial Sequence: Synthetic oligonucleotide
gcucaacccuuuagaccau

SEQ ID NO: 2309297 - RNA, 19 nt, Artificial Sequence
  Description of Artificial Sequence: Synthetic oligonucleotide
gcagggcgacugugcugua

SEQ ID NO: 2309298 - RNA, 19 nt, Artificial Sequence
  Description of Artificial Sequence: Synthetic oligonucleotide
cgauggaggcaaccguguu

SEQ ID NO: 2309299 - RNA, 19 nt, Artificial Sequence
  Description of Artificial Sequence: Synthetic oligonucleotide
aauuggugcaauuugaaag

SEQ ID NO: 2309300 - RNA, 19 nt, Artificial Sequence
  Description of Artificial Sequence: Synthetic oligonucleotide
uuugucauaaucuuuuacg

SEQ ID NO: 2309301 - RNA, 19 nt, Artificial Sequence
  Description of Artificial Sequence: Synthetic oligonucleotide
aauaauuuugucuccgggg

SEQ ID NO: 2309302 - RNA, 19 nt, Artificial Sequence
  Description of Artificial Sequence: Synthetic oligonucleotide
ucaauuuuaguuauuacug

SEQ ID NO: 2309303 - RNA, 19 nt, Artificial Sequence
  Description of Artificial Sequence: Synthetic oligonucleotide
uuaaucacagguaagauuc

SEQ ID NO: 2309304 - RNA, 19 nt, Artificial Sequence
  Description of Artificial Sequence: Synthetic oligonucleotide
acagccaucaguuucaaac

SEQ ID NO: 2309305 - RNA, 19 nt, Artificial Sequence
  Description of Artificial Sequence: Synthetic oligonucleotide
uguuuuaucaauuuuaguu

SEQ ID NO: 2309306 - RNA, 19 nt, Artificial Sequence
  Description of Artificial Sequence: Synthetic oligonucleotide
ugugauuuugucauaaucu

SEQ ID NO: 2309307 - RNA, 19 nt, Artificial Sequence
  Description of Artificial Sequence: Synthetic oligonucleotide
uuuaucuaccaacaaauca

SEQ ID NO: 2309308 - RNA, 19 nt, Artificial Sequence
  Description of Artificial Sequence: Synthetic oligonucleotide
uucaagauaaucugaaacc

SEQ ID NO: 2309309 - RNA, 19 nt, Artificial Sequence
  Description of Artificial Sequence: Synthetic oligonucleotide
aacacaauuuauuccacag

SEQ ID NO: 2309310 - RNA, 19 nt, Artificial Sequence
  Description of Artificial Sequence: Synthetic oligonucleotide
aauuaauuuacgguauuuc

SEQ ID NO: 2309311 - RNA, 19 nt, Artificial Sequence
  Description of Artificial Sequence: Synthetic oligonucleotide
acagguaagauucaagcuc

SEQ ID NO: 2309312 - RNA, 19 nt, Artificial Sequence
  Description of Artificial Sequence: Synthetic oligonucleotide
ucaacugucagguuguugc

SEQ ID NO: 2309313 - RNA, 19 nt, Artificial Sequence
  Description of Artificial Sequence: Synthetic oligonucleotide
uaaucuuuuacgauggcga

SEQ ID NO: 2309314 - RNA, 19 nt, Artificial Sequence
  Description of Artificial Sequence: Synthetic oligonucleotide
uguuagauaauuauguuuu

SEQ ID NO: 2309315 - RNA, 19 nt, Artificial Sequence
  Description of Artificial Sequence: Synthetic oligonucleotide
ucaugaucaacuaccagag

SEQ ID NO: 2309316 - RNA, 19 nt, Artificial Sequence
  Description of Artificial Sequence: Synthetic oligonucleotide
aauuuugucuccggggucc

SEQ ID NO: 2309317 - RNA, 19 nt, Artificial Sequence
  Description of Artificial Sequence: Synthetic oligonucleotide
aaguugaucaacugucagg

SEQ ID NO: 2309318 - RNA, 19 nt, Artificial Sequence
  Description of Artificial Sequence: Synthetic oligonucleotide
ucucucaugaucaacuacc

SEQ ID NO: 2309319 - RNA, 19 nt, Artificial Sequence
  Description of Artificial Sequence: Synthetic oligonucleotide
cacaauuuauuccacagcc

SEQ ID NO: 2309320 - RNA, 19 nt, Artificial Sequence
  Description of Artificial Sequence: Synthetic oligonucleotide
uuuacgauggcgauagaug

SEQ ID NO: 2309321 - RNA, 19 nt, Artificial Sequence
  Description of Artificial Sequence: Synthetic oligonucleotide
aaauuaaucacagguaaga

SEQ ID NO: 2309322 - RNA, 19 nt, Artificial Sequence
  Description of Artificial Sequence: Synthetic oligonucleotide
uuucuuuagucucucauga

SEQ ID NO: 2309323 - RNA, 19 nt, Artificial Sequence
  Description of Artificial Sequence: Synthetic oligonucleotide
aaccuacaaauacauuggc

SEQ ID NO: 2309324 - RNA, 19 nt, Artificial Sequence
  Description of Artificial Sequence: Synthetic oligonucleotide
ucaaaccuaaugcaguucc

SEQ ID NO: 2309325 - RNA, 19 nt, Artificial Sequence
  Description of Artificial Sequence: Synthetic oligonucleotide
uauuacuguugauaaaucc

SEQ ID NO: 2309326 - RNA, 19 nt, Artificial Sequence
  Description of Artificial Sequence: Synthetic oligonucleotide
auaauuauguuuuaucaau

SEQ ID NO: 2309327 - RNA, 19 nt, Artificial Sequence
  Description of Artificial Sequence: Synthetic oligonucleotide
uugaucaacugucagguug

SEQ ID NO: 2309328 - RNA, 19 nt, Artificial Sequence
  Description of Artificial Sequence: Synthetic oligonucleotide
gauuguagaggauaaacca

SEQ ID NO: 2309329 - RNA, 19 nt, Artificial Sequence
  Description of Artificial Sequence: Synthetic oligonucleotide
uguaucuuuaaccuccaca

SEQ ID NO: 2309330 - RNA, 19 nt, Artificial Sequence
  Description of Artificial Sequence: Synthetic oligonucleotide
ucuuuuacgauggcgauag

SEQ ID NO: 2309331 - RNA, 19 nt, Artificial Sequence
  Description of Artificial Sequence: Synthetic oligonucleotide
aaaucuuuagcuguuagau

SEQ ID NO: 2309332 - RNA, 19 nt, Artificial Sequence
  Description of Artificial Sequence: Synthetic oligonucleotide
aguucuguaucuuuaaccu

SEQ ID NO: 2309333 - RNA, 19 nt, Artificial Sequence
  Description of Artificial Sequence: Synthetic oligonucleotide
aacaaaucaagcaauuucu

SEQ ID NO: 2309334 - RNA, 19 nt, Artificial Sequence
  Description of Artificial Sequence: Synthetic oligonucleotide
gaaugucucaaacauauga

SEQ ID NO: 2309335 - RNA, 19 nt, Artificial Sequence
  Description of Artificial Sequence: Synthetic oligonucleotide
aucaguuucaaaccuaaug

SEQ ID NO: 2309336 - RNA, 19 nt, Artificial Sequence
  Description of Artificial Sequence: Synthetic oligonucleotide
augucucaaacauaugaac

SEQ ID NO: 2309337 - RNA, 19 nt, Artificial Sequence
  Description of Artificial Sequence: Synthetic oligonucleotide
uauuuuagaagcaccuucu

SEQ ID NO: 2309338 - RNA, 19 nt, Artificial Sequence
  Description of Artificial Sequence: Synthetic oligonucleotide
aucuuuagcuguuagauaa

SEQ ID NO: 2309339 - RNA, 19 nt, Artificial Sequence
  Description of Artificial Sequence: Synthetic oligonucleotide
augaucaacuaccagaggu

SEQ ID NO: 2309340 - RNA, 19 nt, Artificial Sequence
  Description of Artificial Sequence: Synthetic oligonucleotide
aguuuauuaaauucugggu

SEQ ID NO: 2309341 - RNA, 19 nt, Artificial Sequence
  Description of Artificial Sequence: Synthetic oligonucleotide
agauuguagaggauaaacc

SEQ ID NO: 2309342 - RNA, 19 nt, Artificial Sequence
  Description of Artificial Sequence: Synthetic oligonucleotide
uuacgauggcgauagaugc

SEQ ID NO: 2309343 - RNA, 19 nt, Artificial Sequence
  Description of Artificial Sequence: Synthetic oligonucleotide
acacaauuuauuccacagc

SEQ ID NO: 2309344 - RNA, 19 nt, Artificial Sequence
  Description of Artificial Sequence: Synthetic oligonucleotide
aaauacauuggcauaugag

SEQ ID NO: 2309345 - RNA, 19 nt, Artificial Sequence
  Description of Artificial Sequence: Synthetic oligonucleotide
aauuuuaguuauuacuguu

SEQ ID NO: 2309346 - RNA, 19 nt, Artificial Sequence
  Description of Artificial Sequence: Synthetic oligonucleotide
uccgaaauuaauuuacggu

SEQ ID NO: 2309347 - RNA, 19 nt, Artificial Sequence
  Description of Artificial Sequence: Synthetic oligonucleotide
ucuagcuuccuuaauuucu

SEQ ID NO: 2309348 - RNA, 19 nt, Artificial Sequence
  Description of Artificial Sequence: Synthetic oligonucleotide
ugagcgagcacuuuacacc

SEQ ID NO: 2309349 - RNA, 19 nt, Artificial Sequence
  Description of Artificial Sequence: Synthetic oligonucleotide
uugucauaaucuuuuacga

SEQ ID NO: 2309350 - RNA, 19 nt, Artificial Sequence
  Description of Artificial Sequence: Synthetic oligonucleotide
auaauuuugucuccggggu

SEQ ID NO: 2309351 - RNA, 19 nt, Artificial Sequence
  Description of Artificial Sequence: Synthetic oligonucleotide
aaguucauaggaaugucuc

SEQ ID NO: 2309352 - RNA, 19 nt, Artificial Sequence
  Description of Artificial Sequence: Synthetic oligonucleotide
aaaauuaaucacagguaag

SEQ ID NO: 2309353 - RNA, 19 nt, Artificial Sequence
  Description of Artificial Sequence: Synthetic oligonucleotide
uuuaaccuccacaucaggu

SEQ ID NO: 2309354 - RNA, 19 nt, Artificial Sequence
  Description of Artificial Sequence: Synthetic oligonucleotide
ugccuaauaauuuugucuc

SEQ ID NO: 2309355 - RNA, 19 nt, Artificial Sequence
  Description of Artificial Sequence: Synthetic oligonucleotide
ucuugacaaguucauagga

SEQ ID NO: 2309356 - RNA, 19 nt, Artificial Sequence
  Description of Artificial Sequence: Synthetic oligonucleotide
uaguuauuacuguugauaa

SEQ ID NO: 2309357 - RNA, 19 nt, Artificial Sequence
  Description of Artificial Sequence: Synthetic oligonucleotide
gauaauuauguuuuaucaa

SEQ ID NO: 2309358 - RNA, 19 nt, Artificial Sequence
  Description of Artificial Sequence: Synthetic oligonucleotide
uguccuucaggguacaagc

SEQ ID NO: 2309359 - RNA, 19 nt, Artificial Sequence
  Description of Artificial Sequence: Synthetic oligonucleotide
auaaucuuuuacgauggcg

SEQ ID NO: 2309360 - RNA, 19 nt, Artificial Sequence
  Description of Artificial Sequence: Synthetic oligonucleotide
uuaauuuacgguauuucuu

SEQ ID NO: 2309361 - RNA, 19 nt, Artificial Sequence
  Description of Artificial Sequence: Synthetic oligonucleotide
uuuuaucaauuuuaguuau

SEQ ID NO: 2309362 - RNA, 19 nt, Artificial Sequence
  Description of Artificial Sequence: Synthetic oligonucleotide
aaccuaaugcaguuccauc

SEQ ID NO: 2309363 - RNA, 19 nt, Artificial Sequence
  Description of Artificial Sequence: Synthetic oligonucleotide
uuaguuauuacuguugaua

SEQ ID NO: 2309364 - RNA, 19 nt, Artificial Sequence
  Description of Artificial Sequence: Synthetic oligonucleotide
ucuuuagucucucaugauc

SEQ ID NO: 2309365 - RNA, 19 nt, Artificial Sequence
  Description of Artificial Sequence: Synthetic oligonucleotide
auuggugcaauuugaaagu

SEQ ID NO: 2309366 - RNA, 19 nt, Artificial Sequence
  Description of Artificial Sequence: Synthetic oligonucleotide
ugaucaacuaccagaggug

SEQ ID NO: 2309367 - RNA, 19 nt, Artificial Sequence
  Description of Artificial Sequence: Synthetic oligonucleotide
uagaggauaaaccacucau

SEQ ID NO: 2309368 - RNA, 19 nt, Artificial Sequence
  Description of Artificial Sequence: Synthetic oligonucleotide
uuguagaggauaaaccacu

SEQ ID NO: 2309369 - RNA, 19 nt, Artificial Sequence
  Description of Artificial Sequence: Synthetic oligonucleotide
uauucuagcuuccuuaauu

SEQ ID NO: 2309370 - RNA, 19 nt, Artificial Sequence
  Description of Artificial Sequence: Synthetic oligonucleotide
aucuugacaaguucauagg

SEQ ID NO: 2309371 - RNA, 19 nt, Artificial Sequence
  Description of Artificial Sequence: Synthetic oligonucleotide
cucaaguugaucaacuguc

SEQ ID NO: 2309372 - RNA, 19 nt, Artificial Sequence
  Description of Artificial Sequence: Synthetic oligonucleotide
caaucucucaaguugauca

SEQ ID NO: 2309373 - RNA, 19 nt, Artificial Sequence
  Description of Artificial Sequence: Synthetic oligonucleotide
auuguagaggauaaaccac

SEQ ID NO: 2309374 - RNA, 19 nt, Artificial Sequence
  Description of Artificial Sequence: Synthetic oligonucleotide
uaauuuacgguauuucuuu

SEQ ID NO: 2309375 - RNA, 19 nt, Artificial Sequence
  Description of Artificial Sequence: Synthetic oligonucleotide
aaacacaauuuauuccaca

SEQ ID NO: 2309376 - RNA, 19 nt, Artificial Sequence
  Description of Artificial Sequence: Synthetic oligonucleotide
cuaauaauuuugucuccgg

SEQ ID NO: 2309377 - RNA, 19 nt, Artificial Sequence
  Description of Artificial Sequence: Synthetic oligonucleotide
ucucaaguugaucaacugu

SEQ ID NO: 2309378 - RNA, 19 nt, Artificial Sequence
  Description of Artificial Sequence: Synthetic oligonucleotide
cauaugaacuguucuuucc

SEQ ID NO: 2309379 - RNA, 19 nt, Artificial Sequence
  Description of Artificial Sequence: Synthetic oligonucleotide
ugcuccgaaauuaauuuac

SEQ ID NO: 2309380 - RNA, 19 nt, Artificial Sequence
  Description of Artificial Sequence: Synthetic oligonucleotide
uuacuucaagauaaucuga

SEQ ID NO: 2309381 - RNA, 19 nt, Artificial Sequence
  Description of Artificial Sequence: Synthetic oligonucleotide
ucauaggaaugucucaaac

SEQ ID NO: 2309382 - RNA, 19 nt, Artificial Sequence
  Description of Artificial Sequence: Synthetic oligonucleotide
ucaaacauaugaacuguuc

SEQ ID NO: 2309383 - RNA, 19 nt, Artificial Sequence
  Description of Artificial Sequence: Synthetic oligonucleotide
cucaugaucaacuaccaga

SEQ ID NO: 2309384 - RNA, 19 nt, Artificial Sequence
  Description of Artificial Sequence: Synthetic oligonucleotide
acauaugaacuguucuuuc

SEQ ID NO: 2309385 - RNA, 19 nt, Artificial Sequence
  Description of Artificial Sequence: Synthetic oligonucleotide
gcaauuugaaagugaaugg

SEQ ID NO: 2309386 - RNA, 19 nt, Artificial Sequence
  Description of Artificial Sequence: Synthetic oligonucleotide
uugcuuuuaucuaccaaca

SEQ ID NO: 2309387 - RNA, 19 nt, Artificial Sequence
  Description of Artificial Sequence: Synthetic oligonucleotide
uacuucaagauaaucugaa

SEQ ID NO: 2309388 - RNA, 19 nt, Artificial Sequence
  Description of Artificial Sequence: Synthetic oligonucleotide
guuuuaucaauuuuaguua

SEQ ID NO: 2309389 - RNA, 19 nt, Artificial Sequence
  Description of Artificial Sequence: Synthetic oligonucleotide
ugacaaguucauaggaaug

SEQ ID NO: 2309390 - RNA, 19 nt, Artificial Sequence
  Description of Artificial Sequence: Synthetic oligonucleotide
cuccgaaauuaauuuacgg

SEQ ID NO: 2309391 - RNA, 19 nt, Artificial Sequence
  Description of Artificial Sequence: Synthetic oligonucleotide
ucuuuauccaguucuguau

SEQ ID NO: 2309392 - RNA, 19 nt, Artificial Sequence
  Description of Artificial Sequence: Synthetic oligonucleotide
aggguacaagcucugugcc

SEQ ID NO: 2309393 - RNA, 19 nt, Artificial Sequence
  Description of Artificial Sequence: Synthetic oligonucleotide
uagcuguuagauaauuaug

SEQ ID NO: 2309394 - RNA, 19 nt, Artificial Sequence
  Description of Artificial Sequence: Synthetic oligonucleotide
uugacaaguucauaggaau

SEQ ID NO: 2309395 - RNA, 19 nt, Artificial Sequence
  Description of Artificial Sequence: Synthetic oligonucleotide
uuuauucuagcuuccuuaa

SEQ ID NO: 2309396 - RNA, 19 nt, Artificial Sequence
  Description of Artificial Sequence: Synthetic oligonucleotide
gaucaacuaccagaggugg

SEQ ID NO: 2309397 - RNA, 19 nt, Artificial Sequence
  Description of Artificial Sequence: Synthetic oligonucleotide
gauuacuucaagauaaucu

SEQ ID NO: 2309398 - RNA, 19 nt, Artificial Sequence
  Description of Artificial Sequence: Synthetic oligonucleotide
aucaggagcagauuguaga

SEQ ID NO: 2309399 - RNA, 19 nt, Artificial Sequence
  Description of Artificial Sequence: Synthetic oligonucleotide
accuaaugcaguuccauca

SEQ ID NO: 2309400 - RNA, 19 nt, Artificial Sequence
  Description of Artificial Sequence: Synthetic oligonucleotide
ucaaguugaucaacuguca

SEQ ID NO: 2309401 - RNA, 19 nt, Artificial Sequence
  Description of Artificial Sequence: Synthetic oligonucleotide
auaugaacuguucuuucca

SEQ ID NO: 2309402 - RNA, 19 nt, Artificial Sequence
  Description of Artificial Sequence: Synthetic oligonucleotide
auuaaucacagguaagauu

SEQ ID NO: 2309403 - RNA, 19 nt, Artificial Sequence
  Description of Artificial Sequence: Synthetic oligonucleotide
uaucaauuuuaguuauuac

SEQ ID NO: 2309404 - RNA, 19 nt, Artificial Sequence
  Description of Artificial Sequence: Synthetic oligonucleotide
uuuacaccaaggcucugca

SEQ ID NO: 2309405 - RNA, 19 nt, Artificial Sequence
  Description of Artificial Sequence: Synthetic oligonucleotide
aguuucaaaccuaaugcag

SEQ ID NO: 2309406 - RNA, 19 nt, Artificial Sequence
  Description of Artificial Sequence: Synthetic oligonucleotide
aaugucucaaacauaugaa

SEQ ID NO: 2309407 - RNA, 19 nt, Artificial Sequence
  Description of Artificial Sequence: Synthetic oligonucleotide
aauuaaucacagguaagau

SEQ ID NO: 2309408 - RNA, 19 nt, Artificial Sequence
  Description of Artificial Sequence: Synthetic oligonucleotide
uuauuacuguugauaaauc

SEQ ID NO: 2309409 - RNA, 19 nt, Artificial Sequence
  Description of Artificial Sequence: Synthetic oligonucleotide
ucucucaaguugaucaacu

SEQ ID NO: 2309410 - RNA, 19 nt, Artificial Sequence
  Description of Artificial Sequence: Synthetic oligonucleotide
uccaauucagcugcaauga

SEQ ID NO: 2309411 - RNA, 19 nt, Artificial Sequence
  Description of Artificial Sequence: Synthetic oligonucleotide
uacaaauacauuggcauau

SEQ ID NO: 2309412 - RNA, 19 nt, Artificial Sequence
  Description of Artificial Sequence: Synthetic oligonucleotide
aaucuuuuacgauggcgau

SEQ ID NO: 2309413 - RNA, 19 nt, Artificial Sequence
  Description of Artificial Sequence: Synthetic oligonucleotide
agcuguuagauaauuaugu

SEQ ID NO: 2309414 - RNA, 19 nt, Artificial Sequence
  Description of Artificial Sequence: Synthetic oligonucleotide
aggagcagauuguagagga

SEQ ID NO: 2309415 - RNA, 19 nt, Artificial Sequence
  Description of Artificial Sequence: Synthetic oligonucleotide
cauaauuggugcaauuuga

SEQ ID NO: 2309416 - RNA, 19 nt, Artificial Sequence
  Description of Artificial Sequence: Synthetic oligonucleotide
aacauaugaacuguucuuu

SEQ ID NO: 2309417 - RNA, 19 nt, Artificial Sequence
  Description of Artificial Sequence: Synthetic oligonucleotide
aggucaauaucuugcagga

SEQ ID NO: 2309418 - RNA, 19 nt, Artificial Sequence
  Description of Artificial Sequence: Synthetic oligonucleotide
guccaauucagcugcaaug

SEQ ID NO: 2309419 - RNA, 19 nt, Artificial Sequence
  Description of Artificial Sequence: Synthetic oligonucleotide
auaaaccacucaucuugac

SEQ ID NO: 2309420 - RNA, 19 nt, Artificial Sequence
  Description of Artificial Sequence: Synthetic oligonucleotide
uuuacgguauuucuuuauu

SEQ ID NO: 2309421 - RNA, 19 nt, Artificial Sequence
  Description of Artificial Sequence: Synthetic oligonucleotide
gggaauacaaucucucaag

SEQ ID NO: 2309422 - RNA, 19 nt, Artificial Sequence
  Description of Artificial Sequence: Synthetic oligonucleotide
cacaucagguuuauucuag

SEQ ID NO: 2309423 - RNA, 19 nt, Artificial Sequence
  Description of Artificial Sequence: Synthetic oligonucleotide
aagucaugaaaggacauua

SEQ ID NO: 2309424 - RNA, 19 nt, Artificial Sequence
  Description of Artificial Sequence: Synthetic oligonucleotide
uaauuggugcaauuugaaa

SEQ ID NO: 2309425 - RNA, 19 nt, Artificial Sequence
  Description of Artificial Sequence: Synthetic oligonucleotide
gauggcgauagaugcacug

SEQ ID NO: 2309426 - RNA, 19 nt, Artificial Sequence
  Description of Artificial Sequence: Synthetic oligonucleotide
ugucauaaucuuuuacgau

SEQ ID NO: 2309427 - RNA, 19 nt, Artificial Sequence
  Description of Artificial Sequence: Synthetic oligonucleotide
uccacagccaucaguuuca

SEQ ID NO: 2309428 - RNA, 19 nt, Artificial Sequence
  Description of Artificial Sequence: Synthetic oligonucleotide
cagauuguagaggauaaac

SEQ ID NO: 2309429 - RNA, 19 nt, Artificial Sequence
  Description of Artificial Sequence: Synthetic oligonucleotide
aggaaugucucaaacauau

SEQ ID NO: 2309430 - RNA, 19 nt, Artificial Sequence
  Description of Artificial Sequence: Synthetic oligonucleotide
guuuauucuagcuuccuua

SEQ ID NO: 2309431 - RNA, 19 nt, Artificial Sequence
  Description of Artificial Sequence: Synthetic oligonucleotide
aaucucucaaguugaucaa

SEQ ID NO: 2309432 - RNA, 19 nt, Artificial Sequence
  Description of Artificial Sequence: Synthetic oligonucleotide
aaggcucugcacauaauug

SEQ ID NO: 2309433 - RNA, 19 nt, Artificial Sequence
  Description of Artificial Sequence: Synthetic oligonucleotide
ccuuaauuucuucacagag

SEQ ID NO: 2309434 - RNA, 19 nt, Artificial Sequence
  Description of Artificial Sequence: Synthetic oligonucleotide
uacgguauuucuuuauuuu

SEQ ID NO: 2309435 - RNA, 19 nt, Artificial Sequence
  Description of Artificial Sequence: Synthetic oligonucleotide
uaccaacaaaucaagcaau

SEQ ID NO: 2309436 - RNA, 19 nt, Artificial Sequence
  Description of Artificial Sequence: Synthetic oligonucleotide
uuuuacgauggcgauagau

SEQ ID NO: 2309437 - RNA, 19 nt, Artificial Sequence
  Description of Artificial Sequence: Synthetic oligonucleotide
cauaggaaugucucaaaca

SEQ ID NO: 2309438 - RNA, 19 nt, Artificial Sequence
  Description of Artificial Sequence: Synthetic oligonucleotide
aguucauaggaaugucuca

SEQ ID NO: 2309439 - RNA, 19 nt, Artificial Sequence
  Description of Artificial Sequence: Synthetic oligonucleotide
uguagaggauaaaccacuc

SEQ ID NO: 2309440 - RNA, 19 nt, Artificial Sequence
  Description of Artificial Sequence: Synthetic oligonucleotide
uucuuuauccaguucugua

SEQ ID NO: 2309441 - RNA, 19 nt, Artificial Sequence
  Description of Artificial Sequence: Synthetic oligonucleotide
aauuuacgguauuucuuua

SEQ ID NO: 2309442 - RNA, 19 nt, Artificial Sequence
  Description of Artificial Sequence: Synthetic oligonucleotide
ucagaagacugcucaucag

SEQ ID NO: 2309443 - RNA, 19 nt, Artificial Sequence
  Description of Artificial Sequence: Synthetic oligonucleotide
ucugcacauaauuggugca

SEQ ID NO: 2309444 - RNA, 19 nt, Artificial Sequence
  Description of Artificial Sequence: Synthetic oligonucleotide
cuaccaacaaaucaagcaa

SEQ ID NO: 2309445 - RNA, 19 nt, Artificial Sequence
  Description of Artificial Sequence: Synthetic oligonucleotide
acgauggcgauagaugcac

SEQ ID NO: 2309446 - RNA, 19 nt, Artificial Sequence
  Description of Artificial Sequence: Synthetic oligonucleotide
uacauuggcauaugagaaa

SEQ ID NO: 2309447 - RNA, 19 nt, Artificial Sequence
  Description of Artificial Sequence: Synthetic oligonucleotide
uuauuaaauucugggucca

SEQ ID NO: 2309448 - RNA, 19 nt, Artificial Sequence
  Description of Artificial Sequence: Synthetic oligonucleotide
cagccaucaguuucaaacc

SEQ ID NO: 2309449 - RNA, 19 nt, Artificial Sequence
  Description of Artificial Sequence: Synthetic oligonucleotide
ugugccuaauaauuuuguc

SEQ ID NO: 2309450 - RNA, 19 nt, Artificial Sequence
  Description of Artificial Sequence: Synthetic oligonucleotide
uccacaagcugugauuuug

SEQ ID NO: 2309451 - RNA, 19 nt, Artificial Sequence
  Description of Artificial Sequence: Synthetic oligonucleotide
uucaagaagcucccagggu

SEQ ID NO: 2309452 - RNA, 19 nt, Artificial Sequence
  Description of Artificial Sequence: Synthetic oligonucleotide
auguuuuaucaauuuuagu

SEQ ID NO: 2309453 - RNA, 19 nt, Artificial Sequence
  Description of Artificial Sequence: Synthetic oligonucleotide
agaggauaaaccacucauc

SEQ ID NO: 2309454 - RNA, 19 nt, Artificial Sequence
  Description of Artificial Sequence: Synthetic oligonucleotide
caagaagcucccagggucc

SEQ ID NO: 2309455 - RNA, 19 nt, Artificial Sequence
  Description of Artificial Sequence: Synthetic oligonucleotide
uuuaguuauuacuguugau

SEQ ID NO: 2309456 - RNA, 19 nt, Artificial Sequence
  Description of Artificial Sequence: Synthetic oligonucleotide
uggugcaauuugaaaguga

SEQ ID NO: 2309457 - RNA, 19 nt, Artificial Sequence
  Description of Artificial Sequence: Synthetic oligonucleotide
uuuauuccacagccaucag

SEQ ID NO: 2309458 - RNA, 19 nt, Artificial Sequence
  Description of Artificial Sequence: Synthetic oligonucleotide
auuuacgguauuucuuuau

SEQ ID NO: 2309459 - RNA, 19 nt, Artificial Sequence
  Description of Artificial Sequence: Synthetic oligonucleotide
uuacgguauuucuuuauuu

SEQ ID NO: 2309460 - RNA, 19 nt, Artificial Sequence
  Description of Artificial Sequence: Synthetic oligonucleotide
aaaccuaaugcaguuccau

SEQ ID NO: 2309461 - RNA, 19 nt, Artificial Sequence
  Description of Artificial Sequence: Synthetic oligonucleotide
ucuguaucuuuaaccucca

SEQ ID NO: 2309462 - RNA, 19 nt, Artificial Sequence
  Description of Artificial Sequence: Synthetic oligonucleotide
uuugccugcuccgaaauua

SEQ ID NO: 2309463 - RNA, 19 nt, Artificial Sequence
  Description of Artificial Sequence: Synthetic oligonucleotide
cagguaagauucaagcuca

SEQ ID NO: 2309464 - RNA, 19 nt, Artificial Sequence
  Description of Artificial Sequence: Synthetic oligonucleotide
caguaaaccuacaaauaca

SEQ ID NO: 2309465 - RNA, 19 nt, Artificial Sequence
  Description of Artificial Sequence: Synthetic oligonucleotide
ugagugagcgagcacuuua

SEQ ID NO: 2309466 - RNA, 19 nt, Artificial Sequence
  Description of Artificial Sequence: Synthetic oligonucleotide
uaaucacagguaagauuca

SEQ ID NO: 2309467 - RNA, 19 nt, Artificial Sequence
  Description of Artificial Sequence: Synthetic oligonucleotide
gguuguugcuuuuaucuac

SEQ ID NO: 2309468 - RNA, 19 nt, Artificial Sequence
  Description of Artificial Sequence: Synthetic oligonucleotide
ugcacugacuaagaaggga

SEQ ID NO: 2309469 - RNA, 19 nt, Artificial Sequence
  Description of Artificial Sequence: Synthetic oligonucleotide
guuguugcuuuuaucuacc

SEQ ID NO: 2309470 - RNA, 19 nt, Artificial Sequence
  Description of Artificial Sequence: Synthetic oligonucleotide
ggaaaucuuuagcuguuag

SEQ ID NO: 2309471 - RNA, 19 nt, Artificial Sequence
  Description of Artificial Sequence: Synthetic oligonucleotide
aguuauuacuguugauaaa

SEQ ID NO: 2309472 - RNA, 19 nt, Artificial Sequence
  Description of Artificial Sequence: Synthetic oligonucleotide
ucugauggcucuucuggaa

SEQ ID NO: 2309473 - RNA, 19 nt, Artificial Sequence
  Description of Artificial Sequence: Synthetic oligonucleotide
uggcgauagaugcacugac

SEQ ID NO: 2309474 - RNA, 19 nt, Artificial Sequence
  Description of Artificial Sequence: Synthetic oligonucleotide
caguuucaaaccuaaugca

SEQ ID NO: 2309475 - RNA, 19 nt, Artificial Sequence
  Description of Artificial Sequence: Synthetic oligonucleotide
gagcgagcacuuuacacca

SEQ ID NO: 2309476 - RNA, 19 nt, Artificial Sequence
  Description of Artificial Sequence: Synthetic oligonucleotide
ugauuacuucaagauaauc

SEQ ID NO: 2309477 - RNA, 19 nt, Artificial Sequence
  Description of Artificial Sequence: Synthetic oligonucleotide
acauuggcauaugagaaaa

SEQ ID NO: 2309478 - RNA, 19 nt, Artificial Sequence
  Description of Artificial Sequence: Synthetic oligonucleotide
uucugauggcucuucugga

SEQ ID NO: 2309479 - RNA, 19 nt, Artificial Sequence
  Description of Artificial Sequence: Synthetic oligonucleotide
acaaucucucaaguugauc

SEQ ID NO: 2309480 - RNA, 19 nt, Artificial Sequence
  Description of Artificial Sequence: Synthetic oligonucleotide
uucauaggaaugucucaaa

SEQ ID NO: 2309481 - RNA, 19 nt, Artificial Sequence
  Description of Artificial Sequence: Synthetic oligonucleotide
uaccagagguggcacaggu

SEQ ID NO: 2309482 - RNA, 19 nt, Artificial Sequence
  Description of Artificial Sequence: Synthetic oligonucleotide
acuucaagauaaucugaaa

SEQ ID NO: 2309483 - RNA, 19 nt, Artificial Sequence
  Description of Artificial Sequence: Synthetic oligonucleotide
cagguuuauucuagcuucc

SEQ ID NO: 2309484 - RNA, 19 nt, Artificial Sequence
  Description of Artificial Sequence: Synthetic oligonucleotide
gugagcgagcacuuuacac

SEQ ID NO: 2309485 - RNA, 19 nt, Artificial Sequence
  Description of Artificial Sequence: Synthetic oligonucleotide
acgguauuucuuuauuuua

SEQ ID NO: 2309486 - RNA, 19 nt, Artificial Sequence
  Description of Artificial Sequence: Synthetic oligonucleotide
cucucaaguugaucaacug

SEQ ID NO: 2309487 - RNA, 19 nt, Artificial Sequence
  Description of Artificial Sequence: Synthetic oligonucleotide
caugaucaacuaccagagg

SEQ ID NO: 2309488 - RNA, 19 nt, Artificial Sequence
  Description of Artificial Sequence: Synthetic oligonucleotide
gauaaaccacucaucuuga

SEQ ID NO: 2309489 - RNA, 19 nt, Artificial Sequence
  Description of Artificial Sequence: Synthetic oligonucleotide
cuuugauuacuucaagaua

SEQ ID NO: 2309490 - RNA, 19 nt, Artificial Sequence
  Description of Artificial Sequence: Synthetic oligonucleotide
ccuaauaauuuugucuccg

SEQ ID NO: 2309491 - RNA, 19 nt, Artificial Sequence
  Description of Artificial Sequence: Synthetic oligonucleotide
aucaacuaccagagguggc

SEQ ID NO: 2309492 - RNA, 19 nt, Artificial Sequence
  Description of Artificial Sequence: Synthetic oligonucleotide
uuauucuagcuuccuuaau

SEQ ID NO: 2309493 - RNA, 19 nt, Artificial Sequence
  Description of Artificial Sequence: Synthetic oligonucleotide
uccaguucuguaucuuuaa

SEQ ID NO: 2309494 - RNA, 19 nt, Artificial Sequence
  Description of Artificial Sequence: Synthetic oligonucleotide
caaacauaugaacuguucu

SEQ ID NO: 2309495 - RNA, 19 nt, Artificial Sequence
  Description of Artificial Sequence: Synthetic oligonucleotide
uuggugcaauuugaaagug

SEQ ID NO: 2309496 - RNA, 19 nt, Artificial Sequence
  Description of Artificial Sequence: Synthetic oligonucleotide
aacuaccagagguggcaca

SEQ ID NO: 2309497 - RNA, 19 nt, Artificial Sequence
  Description of Artificial Sequence: Synthetic oligonucleotide
ucuuuagcuguuagauaau

SEQ ID NO: 2309498 - RNA, 19 nt, Artificial Sequence
  Description of Artificial Sequence: Synthetic oligonucleotide
uaggaaugucucaaacaua

SEQ ID NO: 2309499 - RNA, 19 nt, Artificial Sequence
  Description of Artificial Sequence: Synthetic oligonucleotide
ucuccgggguccuugucug

SEQ ID NO: 2309500 - RNA, 19 nt, Artificial Sequence
  Description of Artificial Sequence: Synthetic oligonucleotide
auaauuggugcaauuugaa

SEQ ID NO: 2309501 - RNA, 19 nt, Artificial Sequence
  Description of Artificial Sequence: Synthetic oligonucleotide
guagaggauaaaccacuca

SEQ ID NO: 2309502 - RNA, 19 nt, Artificial Sequence
  Description of Artificial Sequence: Synthetic oligonucleotide
aucaagcaauuucuuuagu

SEQ ID NO: 2309503 - RNA, 19 nt, Artificial Sequence
  Description of Artificial Sequence: Synthetic oligonucleotide
acaauuuauuccacagcca

SEQ ID NO: 2309504 - RNA, 19 nt, Artificial Sequence
  Description of Artificial Sequence: Synthetic oligonucleotide
gucucucaugaucaacuac

SEQ ID NO: 2309505 - RNA, 19 nt, Artificial Sequence
  Description of Artificial Sequence: Synthetic oligonucleotide
uacaaucucucaaguugau

SEQ ID NO: 2309506 - RNA, 19 nt, Artificial Sequence
  Description of Artificial Sequence: Synthetic oligonucleotide
guucauaggaaugucucaa

SEQ ID NO: 2309507 - RNA, 19 nt, Artificial Sequence
  Description of Artificial Sequence: Synthetic oligonucleotide
cacucaucuugacaaguuc

SEQ ID NO: 2309508 - RNA, 19 nt, Artificial Sequence
  Description of Artificial Sequence: Synthetic oligonucleotide
accuacaaauacauuggca

SEQ ID NO: 2309509 - RNA, 19 nt, Artificial Sequence
  Description of Artificial Sequence: Synthetic oligonucleotide
uucuuuagucucucaugau

SEQ ID NO: 2309510 - RNA, 19 nt, Artificial Sequence
  Description of Artificial Sequence: Synthetic oligonucleotide
auaucuugcaggaaaucuu

SEQ ID NO: 2309511 - RNA, 19 nt, Artificial Sequence
  Description of Artificial Sequence: Synthetic oligonucleotide
gaauggcucagaagacugc

SEQ ID NO: 2309512 - RNA, 19 nt, Artificial Sequence
  Description of Artificial Sequence: Synthetic oligonucleotide
uucaaaccuaaugcaguuc

SEQ ID NO: 2309513 - RNA, 19 nt, Artificial Sequence
  Description of Artificial Sequence: Synthetic oligonucleotide
ccgaaauuaauuuacggua

SEQ ID NO: 2309514 - RNA, 19 nt, Artificial Sequence
  Description of Artificial Sequence: Synthetic oligonucleotide
agugagcgagcacuuuaca

SEQ ID NO: 2309515 - RNA, 19 nt, Artificial Sequence
  Description of Artificial Sequence: Synthetic oligonucleotide
aggauaaaccacucaucuu

SEQ ID NO: 2309516 - RNA, 19 nt, Artificial Sequence
  Description of Artificial Sequence: Synthetic oligonucleotide
guuagauaauuauguuuua

SEQ ID NO: 2309517 - RNA, 19 nt, Artificial Sequence
  Description of Artificial Sequence: Synthetic oligonucleotide
uugucuggauuguauucua

SEQ ID NO: 2309518 - RNA, 19 nt, Artificial Sequence
  Description of Artificial Sequence: Synthetic oligonucleotide
augaacuguucuuuccauu

SEQ ID NO: 2309519 - RNA, 19 nt, Artificial Sequence
  Description of Artificial Sequence: Synthetic oligonucleotide
guguccuucaggguacaag

SEQ ID NO: 2309520 - RNA, 19 nt, Artificial Sequence
  Description of Artificial Sequence: Synthetic oligonucleotide
caagcucugugccuaauaa

SEQ ID NO: 2309521 - RNA, 19 nt, Artificial Sequence
  Description of Artificial Sequence: Synthetic oligonucleotide
cuacagaugaggucaauau

SEQ ID NO: 2309522 - RNA, 19 nt, Artificial Sequence
  Description of Artificial Sequence: Synthetic oligonucleotide
agguuguugcuuuuaucua

SEQ ID NO: 2309523 - RNA, 19 nt, Artificial Sequence
  Description of Artificial Sequence: Synthetic oligonucleotide
gugauuuugucauaaucuu

SEQ ID NO: 2309524 - RNA, 19 nt, Artificial Sequence
  Description of Artificial Sequence: Synthetic oligonucleotide
agacugcucaucaggagca

SEQ ID NO: 2309525 - RNA, 19 nt, Artificial Sequence
  Description of Artificial Sequence: Synthetic oligonucleotide
agcaccuucuuuauccagu

SEQ ID NO: 2309526 - RNA, 19 nt, Artificial Sequence
  Description of Artificial Sequence: Synthetic oligonucleotide
acugacuaagaagggaaua

SEQ ID NO: 2309527 - RNA, 19 nt, Artificial Sequence
  Description of Artificial Sequence: Synthetic oligonucleotide
ugcacauaauuggugcaau

SEQ ID NO: 2309528 - RNA, 19 nt, Artificial Sequence
  Description of Artificial Sequence: Synthetic oligonucleotide
gagugagcgagcacuuuac

SEQ ID NO: 2309529 - RNA, 19 nt, Artificial Sequence
  Description of Artificial Sequence: Synthetic oligonucleotide
uuacaccaaggcucugcac

SEQ ID NO: 2309530 - RNA, 19 nt, Artificial Sequence
  Description of Artificial Sequence: Synthetic oligonucleotide
agcagauuguagaggauaa

SEQ ID NO: 2309531 - RNA, 19 nt, Artificial Sequence
  Description of Artificial Sequence: Synthetic oligonucleotide
caauaucuugcaggaaauc

SEQ ID NO: 2309532 - RNA, 19 nt, Artificial Sequence
  Description of Artificial Sequence: Synthetic oligonucleotide
gagcagauuguagaggaua

SEQ ID NO: 2309533 - RNA, 19 nt, Artificial Sequence
  Description of Artificial Sequence: Synthetic oligonucleotide
gcuccgaaauuaauuuacg

SEQ ID NO: 2309534 - RNA, 19 nt, Artificial Sequence
  Description of Artificial Sequence: Synthetic oligonucleotide
cuucaggguacaagcucug

SEQ ID NO: 2309535 - RNA, 19 nt, Artificial Sequence
  Description of Artificial Sequence: Synthetic oligonucleotide
auggcgauagaugcacuga

SEQ ID NO: 2309536 - RNA, 19 nt, Artificial Sequence
  Description of Artificial Sequence: Synthetic oligonucleotide
uuuugccugcuccgaaauu

SEQ ID NO: 2309537 - RNA, 19 nt, Artificial Sequence
  Description of Artificial Sequence: Synthetic oligonucleotide
gccuaauaauuuugucucc

SEQ ID NO: 2309538 - RNA, 19 nt, Artificial Sequence
  Description of Artificial Sequence: Synthetic oligonucleotide
aucaacugucagguuguug

SEQ ID NO: 2309539 - RNA, 19 nt, Artificial Sequence
  Description of Artificial Sequence: Synthetic oligonucleotide
caaaccuaaugcaguucca

SEQ ID NO: 2309540 - RNA, 19 nt, Artificial Sequence
  Description of Artificial Sequence: Synthetic oligonucleotide
cugagcugagugagcgagc

SEQ ID NO: 2309541 - RNA, 19 nt, Artificial Sequence
  Description of Artificial Sequence: Synthetic oligonucleotide
gaagcucccaggguccuca

SEQ ID NO: 2309542 - RNA, 19 nt, Artificial Sequence
  Description of Artificial Sequence: Synthetic oligonucleotide
gcaggaaaucuuuagcugu

SEQ ID NO: 2309543 - RNA, 19 nt, Artificial Sequence
  Description of Artificial Sequence: Synthetic oligonucleotide
agucaugaaaggacauuaa

SEQ ID NO: 2309544 - RNA, 19 nt, Artificial Sequence
  Description of Artificial Sequence: Synthetic oligonucleotide
agagguggcacagguucug

SEQ ID NO: 2309545 - RNA, 19 nt, Artificial Sequence
  Description of Artificial Sequence: Synthetic oligonucleotide
accaacaaaucaagcaauu

SEQ ID NO: 2309546 - RNA, 19 nt, Artificial Sequence
  Description of Artificial Sequence: Synthetic oligonucleotide
agguuuauucuagcuuccu

SEQ ID NO: 2309547 - RNA, 19 nt, Artificial Sequence
  Description of Artificial Sequence: Synthetic oligonucleotide
uucaggguacaagcucugu

SEQ ID NO: 2309548 - RNA, 19 nt, Artificial Sequence
  Description of Artificial Sequence: Synthetic oligonucleotide
gcgagcacuuuacaccaag

SEQ ID NO: 2309549 - RNA, 19 nt, Artificial Sequence
  Description of Artificial Sequence: Synthetic oligonucleotide
gcgauagaugcacugacua

SEQ ID NO: 2309550 - RNA, 19 nt, Artificial Sequence
  Description of Artificial Sequence: Synthetic oligonucleotide
gggguccuugucuggauug

SEQ ID NO: 2309551 - RNA, 19 nt, Artificial Sequence
  Description of Artificial Sequence: Synthetic oligonucleotide
cuguaucuuuaaccuccac

SEQ ID NO: 2309552 - RNA, 19 nt, Artificial Sequence
  Description of Artificial Sequence: Synthetic oligonucleotide
uugucuccgggguccuugu

SEQ ID NO: 2309553 - RNA, 19 nt, Artificial Sequence
  Description of Artificial Sequence: Synthetic oligonucleotide
aucuuuuacgauggcgaua

SEQ ID NO: 2309554 - RNA, 19 nt, Artificial Sequence
  Description of Artificial Sequence: Synthetic oligonucleotide
cuaccagagguggcacagg

SEQ ID NO: 2309555 - RNA, 19 nt, Artificial Sequence
  Description of Artificial Sequence: Synthetic oligonucleotide
ugccugcuccgaaauuaau

SEQ ID NO: 2309556 - RNA, 19 nt, Artificial Sequence
  Description of Artificial Sequence: Synthetic oligonucleotide
caacuaccagagguggcac

SEQ ID NO: 2309557 - RNA, 19 nt, Artificial Sequence
  Description of Artificial Sequence: Synthetic oligonucleotide
uccgggguccuugucugga

SEQ ID NO: 2309558 - RNA, 19 nt, Artificial Sequence
  Description of Artificial Sequence: Synthetic oligonucleotide
gguacaagcucugugccua

SEQ ID NO: 2309559 - RNA, 19 nt, Artificial Sequence
  Description of Artificial Sequence: Synthetic oligonucleotide
cugugccuaauaauuuugu

SEQ ID NO: 2309560 - RNA, 19 nt, Artificial Sequence
  Description of Artificial Sequence: Synthetic oligonucleotide
uggguccaauucagcugca

SEQ ID NO: 2309561 - RNA, 19 nt, Artificial Sequence
  Description of Artificial Sequence: Synthetic oligonucleotide
cugcuccgaaauuaauuua

SEQ ID NO: 2309562 - RNA, 19 nt, Artificial Sequence
  Description of Artificial Sequence: Synthetic oligonucleotide
ggaaugucucaaacauaug

SEQ ID NO: 2309563 - RNA, 19 nt, Artificial Sequence
  Description of Artificial Sequence: Synthetic oligonucleotide
cugcacauaauuggugcaa

SEQ ID NO: 2309564 - RNA, 19 nt, Artificial Sequence
  Description of Artificial Sequence: Synthetic oligonucleotide
ugcucaucaggagcagauu

SEQ ID NO: 2309565 - RNA, 19 nt, Artificial Sequence
  Description of Artificial Sequence: Synthetic oligonucleotide
cuccgggguccuugucugg

SEQ ID NO: 2309566 - RNA, 19 nt, Artificial Sequence
  Description of Artificial Sequence: Synthetic oligonucleotide
gcaugugcaguguccuuca

SEQ ID NO: 2309567 - RNA, 19 nt, Artificial Sequence
  Description of Artificial Sequence: Synthetic oligonucleotide
ugucuccgggguccuuguc

SEQ ID NO: 2309568 - RNA, 19 nt, Artificial Sequence
  Description of Artificial Sequence: Synthetic oligonucleotide
gcuguuagauaauuauguu

SEQ ID NO: 2309569 - RNA, 19 nt, Artificial Sequence
  Description of Artificial Sequence: Synthetic oligonucleotide
uacaagcucugugccuaau

SEQ ID NO: 2309570 - RNA, 19 nt, Artificial Sequence
  Description of Artificial Sequence: Synthetic oligonucleotide
acuuuacaccaaggcucug

SEQ ID NO: 2309571 - RNA, 19 nt, Artificial Sequence
  Description of Artificial Sequence: Synthetic oligonucleotide
cuucuuuauccaguucugu

SEQ ID NO: 2309572 - RNA, 19 nt, Artificial Sequence
  Description of Artificial Sequence: Synthetic oligonucleotide
gcaguguccuucaggguac

SEQ ID NO: 2309573 - RNA, 19 nt, Artificial Sequence
  Description of Artificial Sequence: Synthetic oligonucleotide
gguaagauucaagcucaaa

SEQ ID NO: 2309574 - RNA, 19 nt, Artificial Sequence
  Description of Artificial Sequence: Synthetic oligonucleotide
cuuuagcuguuagauaauu

SEQ ID NO: 2309575 - RNA, 19 nt, Artificial Sequence
  Description of Artificial Sequence: Synthetic oligonucleotide
aaccaguuccaggcuuguu

SEQ ID NO: 2309576 - RNA, 19 nt, Artificial Sequence
  Description of Artificial Sequence: Synthetic oligonucleotide
uggcaugugcaguguccuu

SEQ ID NO: 2309577 - RNA, 19 nt, Artificial Sequence
  Description of Artificial Sequence: Synthetic oligonucleotide
acagguucugauggcucuu

SEQ ID NO: 2309578 - RNA, 19 nt, Artificial Sequence
  Description of Artificial Sequence: Synthetic oligonucleotide
gguuuauucuagcuuccuu

SEQ ID NO: 2309579 - RNA, 19 nt, Artificial Sequence
  Description of Artificial Sequence: Synthetic oligonucleotide
caacugucagguuguugcu

SEQ ID NO: 2309580 - RNA, 19 nt, Artificial Sequence
  Description of Artificial Sequence: Synthetic oligonucleotide
guacaagcucugugccuaa

SEQ ID NO: 2309581 - RNA, 19 nt, Artificial Sequence
  Description of Artificial Sequence: Synthetic oligonucleotide
ccugcuccgaaauuaauuu

SEQ ID NO: 2309582 - RNA, 19 nt, Artificial Sequence
  Description of Artificial Sequence: Synthetic oligonucleotide
cacugacuaagaagggaau

SEQ ID NO: 2309583 - RNA, 19 nt, Artificial Sequence
  Description of Artificial Sequence: Synthetic oligonucleotide
gguccaauucagcugcaau

SEQ ID NO: 2309584 - RNA, 19 nt, Artificial Sequence
  Description of Artificial Sequence: Synthetic oligonucleotide
agguaagauucaagcucaa

SEQ ID NO: 2309585 - RNA, 19 nt, Artificial Sequence
  Description of Artificial Sequence: Synthetic oligonucleotide
caucuucaagaagcuccca

SEQ ID NO: 2309586 - RNA, 19 nt, Artificial Sequence
  Description of Artificial Sequence: Synthetic oligonucleotide
guugaucaacugucagguu

SEQ ID NO: 2309587 - RNA, 19 nt, Artificial Sequence
  Description of Artificial Sequence: Synthetic oligonucleotide
cuuuuacgauggcgauaga

SEQ ID NO: 2309588 - RNA, 19 nt, Artificial Sequence
  Description of Artificial Sequence: Synthetic oligonucleotide
aguguccuucaggguacaa

SEQ ID NO: 2309589 - RNA, 19 nt, Artificial Sequence
  Description of Artificial Sequence: Synthetic oligonucleotide
gaaccaguuccaggcuugu

SEQ ID NO: 2309590 - RNA, 19 nt, Artificial Sequence
  Description of Artificial Sequence: Synthetic oligonucleotide
gcagauuguagaggauaaa

SEQ ID NO: 2309591 - RNA, 19 nt, Artificial Sequence
  Description of Artificial Sequence: Synthetic oligonucleotide
cgauagaugcacugacuaa

SEQ ID NO: 2309592 - RNA, 19 nt, Artificial Sequence
  Description of Artificial Sequence: Synthetic oligonucleotide
gccaucaguuucaaaccua

SEQ ID NO: 2309593 - RNA, 19 nt, Artificial Sequence
  Description of Artificial Sequence: Synthetic oligonucleotide
ggcgauagaugcacugacu

SEQ ID NO: 2309594 - RNA, 19 nt, Artificial Sequence
  Description of Artificial Sequence: Synthetic oligonucleotide
ccuaaugcaguuccaucau

SEQ ID NO: 2309595 - RNA, 19 nt, Artificial Sequence
  Description of Artificial Sequence: Synthetic oligonucleotide
agcgagcacuuuacaccaa

SEQ ID NO: 2309596 - RNA, 19 nt, Artificial Sequence
  Description of Artificial Sequence: Synthetic oligonucleotide
gcucugugccuaauaauuu

SEQ ID NO: 2309597 - RNA, 19 nt, Artificial Sequence
  Description of Artificial Sequence: Synthetic oligonucleotide
gccugcuccgaaauuaauu

SEQ ID NO: 2309598 - RNA, 19 nt, Artificial Sequence
  Description of Artificial Sequence: Synthetic oligonucleotide
ccaacaaaucaagcaauuu

SEQ ID NO: 2309599 - RNA, 19 nt, Artificial Sequence
  Description of Artificial Sequence: Synthetic oligonucleotide
caguguccuucaggguaca

SEQ ID NO: 2309600 - RNA, 19 nt, Artificial Sequence
  Description of Artificial Sequence: Synthetic oligonucleotide
cuccacaagcugugauuuu

SEQ ID NO: 2309601 - RNA, 19 nt, Artificial Sequence
  Description of Artificial Sequence: Synthetic oligonucleotide
ggguccaauucagcugcaa

SEQ ID NO: 2309602 - RNA, 19 nt, Artificial Sequence
  Description of Artificial Sequence: Synthetic oligonucleotide
ccaauucagcugcaaugau

SEQ ID NO: 2309603 - RNA, 19 nt, Artificial Sequence
  Description of Artificial Sequence: Synthetic oligonucleotide
caguuccaggcuuguuguu

SEQ ID NO: 2309604 - RNA, 19 nt, Artificial Sequence
  Description of Artificial Sequence: Synthetic oligonucleotide
ggguccuugucuggauugu

SEQ ID NO: 2309605 - RNA, 19 nt, Artificial Sequence
  Description of Artificial Sequence: Synthetic oligonucleotide
gcugagugagcgagcacuu

SEQ ID NO: 2309606 - RNA, 19 nt, Artificial Sequence
  Description of Artificial Sequence: Synthetic oligonucleotide
cugagugagcgagcacuuu

SEQ ID NO: 2309607 - RNA, 19 nt, Artificial Sequence
  Description of Artificial Sequence: Synthetic oligonucleotide
cgauggcgauagaugcacu

SEQ ID NO: 2309608 - RNA, 19 nt, Artificial Sequence
  Description of Artificial Sequence: Synthetic oligonucleotide
ccgggguccuugucuggau

SEQ ID NO: 2309609 - RNA, 19 nt, Artificial Sequence
  Description of Artificial Sequence: Synthetic oligonucleotide
cgggguccuugucuggauu

SEQ ID NO: 2309610 - RNA, 19 nt, Artificial Sequence
  Description of Artificial Sequence: Synthetic oligonucleotide
aacuauauagucugguagg

SEQ ID NO: 2309611 - RNA, 19 nt, Artificial Sequence
  Description of Artificial Sequence: Synthetic oligonucleotide
auacuuuuccaccucaucc

SEQ ID NO: 2309612 - RNA, 19 nt, Artificial Sequence
  Description of Artificial Sequence: Synthetic oligonucleotide
ucaguuauuggccugagga

SEQ ID NO: 2309613 - RNA, 19 nt, Artificial Sequence
  Description of Artificial Sequence: Synthetic oligonucleotide
ugaggaggcaacuauauag

SEQ ID NO: 2309614 - RNA, 19 nt, Artificial Sequence
  Description of Artificial Sequence: Synthetic oligonucleotide
guuguugaguuccagaagg

SEQ ID NO: 2309615 - RNA, 19 nt, Artificial Sequence
  Description of Artificial Sequence: Synthetic oligonucleotide
ugaaucuccaucuuccagg

SEQ ID NO: 2309616 - RNA, 19 nt, Artificial Sequence
  Description of Artificial Sequence: Synthetic oligonucleotide
aauucggcgguucagggag

SEQ ID NO: 2309617 - RNA, 19 nt, Artificial Sequence
  Description of Artificial Sequence: Synthetic oligonucleotide
uuucagcaaacucugcucg

SEQ ID NO: 2309618 - RNA, 19 nt, Artificial Sequence
  Description of Artificial Sequence: Synthetic oligonucleotide
aauacuuuuccaccucauc

SEQ ID NO: 2309619 - RNA, 19 nt, Artificial Sequence
  Description of Artificial Sequence: Synthetic oligonucleotide
ggaacaaucaguuauuggc

SEQ ID NO: 2309620 - RNA, 19 nt, Artificial Sequence
  Description of Artificial Sequence: Synthetic oligonucleotide
uucagcuugcuucuugucg

SEQ ID NO: 2309621 - RNA, 19 nt, Artificial Sequence
  Description of Artificial Sequence: Synthetic oligonucleotide
uuugguggaauacuccucc

SEQ ID NO: 2309622 - RNA, 19 nt, Artificial Sequence
  Description of Artificial Sequence: Synthetic oligonucleotide
acucugaauacuuuuccac

SEQ ID NO: 2309623 - RNA, 19 nt, Artificial Sequence
  Description of Artificial Sequence: Synthetic oligonucleotide
agacucugaauacuuuucc

SEQ ID NO: 2309624 - RNA, 19 nt, Artificial Sequence
  Description of Artificial Sequence: Synthetic oligonucleotide
ucagcuugcuucuugucgg

SEQ ID NO: 2309625 - RNA, 19 nt, Artificial Sequence
  Description of Artificial Sequence: Synthetic oligonucleotide
gcuaucagcgacuugaggg

SEQ ID NO: 2309626 - RNA, 19 nt, Artificial Sequence
  Description of Artificial Sequence: Synthetic oligonucleotide
uuuucuccaacuuugccac

SEQ ID NO: 2309627 - RNA, 19 nt, Artificial Sequence
  Description of Artificial Sequence: Synthetic oligonucleotide
uccucggaggcuaucagcg

SEQ ID NO: 2309628 - RNA, 19 nt, Artificial Sequence
  Description of Artificial Sequence: Synthetic oligonucleotide
aacaaucaguuauuggccu

SEQ ID NO: 2309629 - RNA, 19 nt, Artificial Sequence
  Description of Artificial Sequence: Synthetic oligonucleotide
gaauacuccuccucggagg

SEQ ID NO: 2309630 - RNA, 19 nt, Artificial Sequence
  Description of Artificial Sequence: Synthetic oligonucleotide
caacuauauagucugguag

SEQ ID NO: 2309631 - RNA, 19 nt, Artificial Sequence
  Description of Artificial Sequence: Synthetic oligonucleotide
uuacaaguuguugaguucc

SEQ ID NO: 2309632 - RNA, 19 nt, Artificial Sequence
  Description of Artificial Sequence: Synthetic oligonucleotide
uccuuguccaguuucagca

SEQ ID NO: 2309633 - RNA, 19 nt, Artificial Sequence
  Description of Artificial Sequence: Synthetic oligonucleotide
agaaguuuugaucuccucu

SEQ ID NO: 2309634 - RNA, 19 nt, Artificial Sequence
  Description of Artificial Sequence: Synthetic oligonucleotide
acuauauagucugguaggc

SEQ ID NO: 2309635 - RNA, 19 nt, Artificial Sequence
  Description of Artificial Sequence: Synthetic oligonucleotide
aguuauuggccugaggagg

SEQ ID NO: 2309636 - RNA, 19 nt, Artificial Sequence
  Description of Artificial Sequence: Synthetic oligonucleotide
uugaguuccagaagggucu

SEQ ID NO: 2309637 - RNA, 19 nt, Artificial Sequence
  Description of Artificial Sequence: Synthetic oligonucleotide
ucugaauacuuuuccaccu

SEQ ID NO: 2309638 - RNA, 19 nt, Artificial Sequence
  Description of Artificial Sequence: Synthetic oligonucleotide
agaucuuucagcaaacucu

SEQ ID NO: 2309639 - RNA, 19 nt, Artificial Sequence
  Description of Artificial Sequence: Synthetic oligonucleotide
cuucuugucggcuucggcc

SEQ ID NO: 2309640 - RNA, 19 nt, Artificial Sequence
  Description of Artificial Sequence: Synthetic oligonucleotide
cucugaauacuuuuccacc

SEQ ID NO: 2309641 - RNA, 19 nt, Artificial Sequence
  Description of Artificial Sequence: Synthetic oligonucleotide
gaacaaucaguuauuggcc

SEQ ID NO: 2309642 - RNA, 19 nt, Artificial Sequence
  Description of Artificial Sequence: Synthetic oligonucleotide
ugaauacuuuuccaccuca

SEQ ID NO: 2309643 - RNA, 19 nt, Artificial Sequence
  Description of Artificial Sequence: Synthetic oligonucleotide
ucuuugguggaauacuccu

SEQ ID NO: 2309644 - RNA, 19 nt, Artificial Sequence
  Description of Artificial Sequence: Synthetic oligonucleotide
ucuaccagcugaauucggc

SEQ ID NO: 2309645 - RNA, 19 nt, Artificial Sequence
  Description of Artificial Sequence: Synthetic oligonucleotide
gucaucaaugguuuucucc

SEQ ID NO: 2309646 - RNA, 19 nt, Artificial Sequence
  Description of Artificial Sequence: Synthetic oligonucleotide
ugaauucggcgguucaggg

SEQ ID NO: 2309647 - RNA, 19 nt, Artificial Sequence
  Description of Artificial Sequence: Synthetic oligonucleotide
uccucuaccagcugaauuc

SEQ ID NO: 2309648 - RNA, 19 nt, Artificial Sequence
  Description of Artificial Sequence: Synthetic oligonucleotide
aggaacaaucaguuauugg

SEQ ID NO: 2309649 - RNA, 19 nt, Artificial Sequence
  Description of Artificial Sequence: Synthetic oligonucleotide
auacuuguccucuuuggug

SEQ ID NO: 2309650 - RNA, 19 nt, Artificial Sequence
  Description of Artificial Sequence: Synthetic oligonucleotide
uuguugaguuccagaaggg

SEQ ID NO: 2309651 - RNA, 19 nt, Artificial Sequence
  Description of Artificial Sequence: Synthetic oligonucleotide
cuaucagcgacuugagggc

SEQ ID NO: 2309652 - RNA, 19 nt, Artificial Sequence
  Description of Artificial Sequence: Synthetic oligonucleotide
auucuccuuguccaguuuc

SEQ ID NO: 2309653 - RNA, 19 nt, Artificial Sequence
  Description of Artificial Sequence: Synthetic oligonucleotide
ugguccaugguucggagcu

SEQ ID NO: 2309654 - RNA, 19 nt, Artificial Sequence
  Description of Artificial Sequence: Synthetic oligonucleotide
ucggucuucagcuugcuuc

SEQ ID NO: 2309655 - RNA, 19 nt, Artificial Sequence
  Description of Artificial Sequence: Synthetic oligonucleotide
gaucuuucagcaaacucug

SEQ ID NO: 2309656 - RNA, 19 nt, Artificial Sequence
  Description of Artificial Sequence: Synthetic oligonucleotide
ucaaugguuuucuccaacu

SEQ ID NO: 2309657 - RNA, 19 nt, Artificial Sequence
  Description of Artificial Sequence: Synthetic oligonucleotide
aaugaccuucauuccucuc

SEQ ID NO: 2309658 - RNA, 19 nt, Artificial Sequence
  Description of Artificial Sequence: Synthetic oligonucleotide
aucagccgcuuucucagcc

SEQ ID NO: 2309659 - RNA, 19 nt, Artificial Sequence
  Description of Artificial Sequence: Synthetic oligonucleotide
gguggaauacuccuccucg

SEQ ID NO: 2309660 - RNA, 19 nt, Artificial Sequence
  Description of Artificial Sequence: Synthetic oligonucleotide
cuaccagcugaauucggcg

SEQ ID NO: 2309661 - RNA, 19 nt, Artificial Sequence
  Description of Artificial Sequence: Synthetic oligonucleotide
ugccacagaucuuucagca

SEQ ID NO: 2309662 - RNA, 19 nt, Artificial Sequence
  Description of Artificial Sequence: Synthetic oligonucleotide
uaccagcugaauucggcgg

SEQ ID NO: 2309663 - RNA, 19 nt, Artificial Sequence
  Description of Artificial Sequence: Synthetic oligonucleotide
agcccuuacaaguuguuga

SEQ ID NO: 2309664 - RNA, 19 nt, Artificial Sequence
  Description of Artificial Sequence: Synthetic oligonucleotide
guauuugcggucugagucc

SEQ ID NO: 2309665 - RNA, 19 nt, Artificial Sequence
  Description of Artificial Sequence: Synthetic oligonucleotide
uuugcggucugaguccucg

SEQ ID NO: 2309666 - RNA, 19 nt, Artificial Sequence
  Description of Artificial Sequence: Synthetic oligonucleotide
uagucugguaggcagcaca

SEQ ID NO: 2309667 - RNA, 19 nt, Artificial Sequence
  Description of Artificial Sequence: Synthetic oligonucleotide
aggaggcaacuauauaguc

SEQ ID NO: 2309668 - RNA, 19 nt, Artificial Sequence
  Description of Artificial Sequence: Synthetic oligonucleotide
cugggcauccuucacagac

SEQ ID NO: 2309669 - RNA, 19 nt, Artificial Sequence
  Description of Artificial Sequence: Synthetic oligonucleotide
uccuccagaaguuuugauc

SEQ ID NO: 2309670 - RNA, 19 nt, Artificial Sequence
  Description of Artificial Sequence: Synthetic oligonucleotide
caaggucuggugaaucucc

SEQ ID NO: 2309671 - RNA, 19 nt, Artificial Sequence
  Description of Artificial Sequence: Synthetic oligonucleotide
uucugagcgcuccagcucu

SEQ ID NO: 2309672 - RNA, 19 nt, Artificial Sequence
  Description of Artificial Sequence: Synthetic oligonucleotide
aguuuugaucuccucuuca

SEQ ID NO: 2309673 - RNA, 19 nt, Artificial Sequence
  Description of Artificial Sequence: Synthetic oligonucleotide
auaugcuuggccuccuuca

SEQ ID NO: 2309674 - RNA, 19 nt, Artificial Sequence
  Description of Artificial Sequence: Synthetic oligonucleotide
ugcaucggucuucagcuug

SEQ ID NO: 2309675 - RNA, 19 nt, Artificial Sequence
  Description of Artificial Sequence: Synthetic oligonucleotide
auauagucugguaggcagc

SEQ ID NO: 2309676 - RNA, 19 nt, Artificial Sequence
  Description of Artificial Sequence: Synthetic oligonucleotide
ucagcaaacucugcucggg

SEQ ID NO: 2309677 - RNA, 19 nt, Artificial Sequence
  Description of Artificial Sequence: Synthetic oligonucleotide
uuuugcagggcuguagcca

SEQ ID NO: 2309678 - RNA, 19 nt, Artificial Sequence
  Description of Artificial Sequence: Synthetic oligonucleotide
cuucacagacucugaauac

SEQ ID NO: 2309679 - RNA, 19 nt, Artificial Sequence
  Description of Artificial Sequence: Synthetic oligonucleotide
caugguucggagcuccucc

SEQ ID NO: 2309680 - RNA, 19 nt, Artificial Sequence
  Description of Artificial Sequence: Synthetic oligonucleotide
cuuacaaguuguugaguuc

SEQ ID NO: 2309681 - RNA, 19 nt, Artificial Sequence
  Description of Artificial Sequence: Synthetic oligonucleotide
uccagaaguuuugaucucc

SEQ ID NO: 2309682 - RNA, 19 nt, Artificial Sequence
  Description of Artificial Sequence: Synthetic oligonucleotide
uggaauacuccuccucgga

SEQ ID NO: 2309683 - RNA, 19 nt, Artificial Sequence
  Description of Artificial Sequence: Synthetic oligonucleotide
caguuauuggccugaggag

SEQ ID NO: 2309684 - RNA, 19 nt, Artificial Sequence
  Description of Artificial Sequence: Synthetic oligonucleotide
uucuugucggcuucggccu

SEQ ID NO: 2309685 - RNA, 19 nt, Artificial Sequence
  Description of Artificial Sequence: Synthetic oligonucleotide
uugagggccugguccaugg

SEQ ID NO: 2309686 - RNA, 19 nt, Artificial Sequence
  Description of Artificial Sequence: Synthetic oligonucleotide
acaaucaguuauuggccug

SEQ ID NO: 2309687 - RNA, 19 nt, Artificial Sequence
  Description of Artificial Sequence: Synthetic oligonucleotide
uccaccucauccucugucc

SEQ ID NO: 2309688 - RNA, 19 nt, Artificial Sequence
  Description of Artificial Sequence: Synthetic oligonucleotide
uucacagacucugaauacu

SEQ ID NO: 2309689 - RNA, 19 nt, Artificial Sequence
  Description of Artificial Sequence: Synthetic oligonucleotide
gacucugaauacuuuucca

SEQ ID NO: 2309690 - RNA, 19 nt, Artificial Sequence
  Description of Artificial Sequence: Synthetic oligonucleotide
uccaacuuugccacagauc

SEQ ID NO: 2309691 - RNA, 19 nt, Artificial Sequence
  Description of Artificial Sequence: Synthetic oligonucleotide
ugcuccgcacggucgaugg

SEQ ID NO: 2309692 - RNA, 19 nt, Artificial Sequence
  Description of Artificial Sequence: Synthetic oligonucleotide
guggaauacuccuccucgg

SEQ ID NO: 2309693 - RNA, 19 nt, Artificial Sequence
  Description of Artificial Sequence: Synthetic oligonucleotide
ugguuuucuccaacuuugc

SEQ ID NO: 2309694 - RNA, 19 nt, Artificial Sequence
  Description of Artificial Sequence: Synthetic oligonucleotide
cuuuugcagggcuguagcc

SEQ ID NO: 2309695 - RNA, 19 nt, Artificial Sequence
  Description of Artificial Sequence: Synthetic oligonucleotide
uugccacagaucuuucagc

SEQ ID NO: 2309696 - RNA, 19 nt, Artificial Sequence
  Description of Artificial Sequence: Synthetic oligonucleotide
uucuccuuguccaguuuca

SEQ ID NO: 2309697 - RNA, 19 nt, Artificial Sequence
  Description of Artificial Sequence: Synthetic oligonucleotide
aucaguuauuggccugagg

SEQ ID NO: 2309698 - RNA, 19 nt, Artificial Sequence
  Description of Artificial Sequence: Synthetic oligonucleotide
acagacucugaauacuuuu

SEQ ID NO: 2309699 - RNA, 19 nt, Artificial Sequence
  Description of Artificial Sequence: Synthetic oligonucleotide
ucgguggccuucuucuccg

SEQ ID NO: 2309700 - RNA, 19 nt, Artificial Sequence
  Description of Artificial Sequence: Synthetic oligonucleotide
ucggcuucggccugcuccg

SEQ ID NO: 2309701 - RNA, 19 nt, Artificial Sequence
  Description of Artificial Sequence: Synthetic oligonucleotide
cugaauucggcgguucagg

SEQ ID NO: 2309702 - RNA, 19 nt, Artificial Sequence
  Description of Artificial Sequence: Synthetic oligonucleotide
gucggcuucggccugcucc

SEQ ID NO: 2309703 - RNA, 19 nt, Artificial Sequence
  Description of Artificial Sequence: Synthetic oligonucleotide
cuugcaucggucuucagcu

SEQ ID NO: 2309704 - RNA, 19 nt, Artificial Sequence
  Description of Artificial Sequence: Synthetic oligonucleotide
cauggcccgguuuucaaug

SEQ ID NO: 2309705 - RNA, 19 nt, Artificial Sequence
  Description of Artificial Sequence: Synthetic oligonucleotide
ggccacaucugccucagcg

SEQ ID NO: 2309706 - RNA, 19 nt, Artificial Sequence
  Description of Artificial Sequence: Synthetic oligonucleotide
cagcccucucuucugagcg

SEQ ID NO: 2309707 - RNA, 19 nt, Artificial Sequence
  Description of Artificial Sequence: Synthetic oligonucleotide
cagacucugaauacuuuuc

SEQ ID NO: 2309708 - RNA, 19 nt, Artificial Sequence
  Description of Artificial Sequence: Synthetic oligonucleotide
guuauuggccugaggaggc

SEQ ID NO: 2309709 - RNA, 19 nt, Artificial Sequence
  Description of Artificial Sequence: Synthetic oligonucleotide
cagaucuuucagcaaacuc

SEQ ID NO: 2309710 - RNA, 19 nt, Artificial Sequence
  Description of Artificial Sequence: Synthetic oligonucleotide
uguugaguuccagaagggu

SEQ ID NO: 2309711 - RNA, 19 nt, Artificial Sequence
  Description of Artificial Sequence: Synthetic oligonucleotide
guugaguuccagaaggguc

SEQ ID NO: 2309712 - RNA, 19 nt, Artificial Sequence
  Description of Artificial Sequence: Synthetic oligonucleotide
guaggcagcacagccagcc

SEQ ID NO: 2309713 - RNA, 19 nt, Artificial Sequence
  Description of Artificial Sequence: Synthetic oligonucleotide
uguagccaggcgcuccugc

SEQ ID NO: 2309714 - RNA, 19 nt, Artificial Sequence
  Description of Artificial Sequence: Synthetic oligonucleotide
uucagggaggccacaucug

SEQ ID NO: 2309715 - RNA, 19 nt, Artificial Sequence
  Description of Artificial Sequence: Synthetic oligonucleotide
aaucaguuauuggccugag

SEQ ID NO: 2309716 - RNA, 19 nt, Artificial Sequence
  Description of Artificial Sequence: Synthetic oligonucleotide
cacagaucuuucagcaaac

SEQ ID NO: 2309717 - RNA, 19 nt, Artificial Sequence
  Description of Artificial Sequence: Synthetic oligonucleotide
gaaguuuugaucuccucuu

SEQ ID NO: 2309718 - RNA, 19 nt, Artificial Sequence
  Description of Artificial Sequence: Synthetic oligonucleotide
accuccucguauuugcggu

SEQ ID NO: 2309719 - RNA, 19 nt, Artificial Sequence
  Description of Artificial Sequence: Synthetic oligonucleotide
uccuucauggcccgguuuu

SEQ ID NO: 2309720 - RNA, 19 nt, Artificial Sequence
  Description of Artificial Sequence: Synthetic oligonucleotide
cacaucugccucagcgucg

SEQ ID NO: 2309721 - RNA, 19 nt, Artificial Sequence
  Description of Artificial Sequence: Synthetic oligonucleotide
ggaauacuccuccucggag

SEQ ID NO: 2309722 - RNA, 19 nt, Artificial Sequence
  Description of Artificial Sequence: Synthetic oligonucleotide
guagccaggcgcuccugcg

SEQ ID NO: 2309723 - RNA, 19 nt, Artificial Sequence
  Description of Artificial Sequence: Synthetic oligonucleotide
ugcggucugaguccucggc

SEQ ID NO: 2309724 - RNA, 19 nt, Artificial Sequence
  Description of Artificial Sequence: Synthetic oligonucleotide
uccuucacagacucugaau

SEQ ID NO: 2309725 - RNA, 19 nt, Artificial Sequence
  Description of Artificial Sequence: Synthetic oligonucleotide
gcuugcaucggucuucagc

SEQ ID NO: 2309726 - RNA, 19 nt, Artificial Sequence
  Description of Artificial Sequence: Synthetic oligonucleotide
ugguggaauacuccuccuc

SEQ ID NO: 2309727 - RNA, 19 nt, Artificial Sequence
  Description of Artificial Sequence: Synthetic oligonucleotide
cguauuugcggucugaguc

SEQ ID NO: 2309728 - RNA, 19 nt, Artificial Sequence
  Description of Artificial Sequence: Synthetic oligonucleotide
ucguauuugcggucugagu

SEQ ID NO: 2309729 - RNA, 19 nt, Artificial Sequence
  Description of Artificial Sequence: Synthetic oligonucleotide
caccuccucguauuugcgg

SEQ ID NO: 2309730 - RNA, 19 nt, Artificial Sequence
  Description of Artificial Sequence: Synthetic oligonucleotide
uaucagcgacuugagggcc

SEQ ID NO: 2309731 - RNA, 19 nt, Artificial Sequence
  Description of Artificial Sequence: Synthetic oligonucleotide
ugggcauccuucacagacu

SEQ ID NO: 2309732 - RNA, 19 nt, Artificial Sequence
  Description of Artificial Sequence: Synthetic oligonucleotide
gaauucggcgguucaggga

SEQ ID NO: 2309733 - RNA, 19 nt, Artificial Sequence
  Description of Artificial Sequence: Synthetic oligonucleotide
ugguccaaggucuggugaa

SEQ ID NO: 2309734 - RNA, 19 nt, Artificial Sequence
  Description of Artificial Sequence: Synthetic oligonucleotide
cucggaggcuaucagcgac

SEQ ID NO: 2309735 - RNA, 19 nt, Artificial Sequence
  Description of Artificial Sequence: Synthetic oligonucleotide
cuggugaaucuccaucuuc

SEQ ID NO: 2309736 - RNA, 19 nt, Artificial Sequence
  Description of Artificial Sequence: Synthetic oligonucleotide
agcccucucuucugagcgc

SEQ ID NO: 2309737 - RNA, 19 nt, Artificial Sequence
  Description of Artificial Sequence: Synthetic oligonucleotide
agggaggccacaucugccu

SEQ ID NO: 2309738 - RNA, 19 nt, Artificial Sequence
  Description of Artificial Sequence: Synthetic oligonucleotide
acaaguuguugaguuccag

SEQ ID NO: 2309739 - RNA, 19 nt, Artificial Sequence
  Description of Artificial Sequence: Synthetic oligonucleotide
accagcugaauucggcggu

SEQ ID NO: 2309740 - RNA, 19 nt, Artificial Sequence
  Description of Artificial Sequence: Synthetic oligonucleotide
uucggccugcuccgcacgg

SEQ ID NO: 2309741 - RNA, 19 nt, Artificial Sequence
  Description of Artificial Sequence: Synthetic oligonucleotide
cuccucggaggcuaucagc

SEQ ID NO: 2309742 - RNA, 19 nt, Artificial Sequence
  Description of Artificial Sequence: Synthetic oligonucleotide
ccaacuuugccacagaucu

SEQ ID NO: 2309743 - RNA, 19 nt, Artificial Sequence
  Description of Artificial Sequence: Synthetic oligonucleotide
ucugaguccucggcgauau

SEQ ID NO: 2309744 - RNA, 19 nt, Artificial Sequence
  Description of Artificial Sequence: Synthetic oligonucleotide
uauuugcggucugaguccu

SEQ ID NO: 2309745 - RNA, 19 nt, Artificial Sequence
  Description of Artificial Sequence: Synthetic oligonucleotide
aucuuucagcaaacucugc

SEQ ID NO: 2309746 - RNA, 19 nt, Artificial Sequence
  Description of Artificial Sequence: Synthetic oligonucleotide
gucgguggccuucuucucc

SEQ ID NO: 2309747 - RNA, 19 nt, Artificial Sequence
  Description of Artificial Sequence: Synthetic oligonucleotide
cucuaccagcugaauucgg

SEQ ID NO: 2309748 - RNA, 19 nt, Artificial Sequence
  Description of Artificial Sequence: Synthetic oligonucleotide
ugcgcccuauccaacuccu

SEQ ID NO: 2309749 - RNA, 19 nt, Artificial Sequence
  Description of Artificial Sequence: Synthetic oligonucleotide
gcuuuugcagggcuguagc

SEQ ID NO: 2309750 - RNA, 19 nt, Artificial Sequence
  Description of Artificial Sequence: Synthetic oligonucleotide
ucggaggcuaucagcgacu

SEQ ID NO: 2309751 - RNA, 19 nt, Artificial Sequence
  Description of Artificial Sequence: Synthetic oligonucleotide
cucguauuugcggucugag

SEQ ID NO: 2309752 - RNA, 19 nt, Artificial Sequence
  Description of Artificial Sequence: Synthetic oligonucleotide
uucggagcuccuccuccag

SEQ ID NO: 2309753 - RNA, 19 nt, Artificial Sequence
  Description of Artificial Sequence: Synthetic oligonucleotide
agggccugguccaugguuc

SEQ ID NO: 2309754 - RNA, 19 nt, Artificial Sequence
  Description of Artificial Sequence: Synthetic oligonucleotide
agcuuuugcagggcuguag

SEQ ID NO: 2309755 - RNA, 19 nt, Artificial Sequence
  Description of Artificial Sequence: Synthetic oligonucleotide
caggaacaaucaguuauug

SEQ ID NO: 2309756 - RNA, 19 nt, Artificial Sequence
  Description of Artificial Sequence: Synthetic oligonucleotide
cuugauggcguccauggcu

SEQ ID NO: 2309757 - RNA, 19 nt, Artificial Sequence
  Description of Artificial Sequence: Synthetic oligonucleotide
agucugguaggcagcacag

SEQ ID NO: 2309758 - RNA, 19 nt, Artificial Sequence
  Description of Artificial Sequence: Synthetic oligonucleotide
ucgauggcauucuccuugu

SEQ ID NO: 2309759 - RNA, 19 nt, Artificial Sequence
  Description of Artificial Sequence: Synthetic oligonucleotide
guucagggaggccacaucu

SEQ ID NO: 2309760 - RNA, 19 nt, Artificial Sequence
  Description of Artificial Sequence: Synthetic oligonucleotide
uccuccucuaccagcugaa

SEQ ID NO: 2309761 - RNA, 19 nt, Artificial Sequence
  Description of Artificial Sequence: Synthetic oligonucleotide
caggucaucaaugguuuuc

SEQ ID NO: 2309762 - RNA, 19 nt, Artificial Sequence
  Description of Artificial Sequence: Synthetic oligonucleotide
agggucugguccaaggucu

SEQ ID NO: 2309763 - RNA, 19 nt, Artificial Sequence
  Description of Artificial Sequence: Synthetic oligonucleotide
uucauggcccgguuuucaa

SEQ ID NO: 2309764 - RNA, 19 nt, Artificial Sequence
  Description of Artificial Sequence: Synthetic oligonucleotide
uagccaggcgcuccugcgc

SEQ ID NO: 2309765 - RNA, 19 nt, Artificial Sequence
  Description of Artificial Sequence: Synthetic oligonucleotide
cagggaggccacaucugcc

SEQ ID NO: 2309766 - RNA, 19 nt, Artificial Sequence
  Description of Artificial Sequence: Synthetic oligonucleotide
gcucucagccaccucagcc

SEQ ID NO: 2309767 - RNA, 19 nt, Artificial Sequence
  Description of Artificial Sequence: Synthetic oligonucleotide
uugguggaauacuccuccu

SEQ ID NO: 2309768 - RNA, 19 nt, Artificial Sequence
  Description of Artificial Sequence: Synthetic oligonucleotide
auuggccugaggaggcaac

SEQ ID NO: 2309769 - RNA, 19 nt, Artificial Sequence
  Description of Artificial Sequence: Synthetic oligonucleotide
gcccuuacaaguuguugag

SEQ ID NO: 2309770 - RNA, 19 nt, Artificial Sequence
  Description of Artificial Sequence: Synthetic oligonucleotide
gaucaccagcuuccuggcc

SEQ ID NO: 2309771 - RNA, 19 nt, Artificial Sequence
  Description of Artificial Sequence: Synthetic oligonucleotide
agcugaauucggcgguuca

SEQ ID NO: 2309772 - RNA, 19 nt, Artificial Sequence
  Description of Artificial Sequence: Synthetic oligonucleotide
cagaaguuuugaucuccuc

SEQ ID NO: 2309773 - RNA, 19 nt, Artificial Sequence
  Description of Artificial Sequence: Synthetic oligonucleotide
uccugcgcccuauccaacu

SEQ ID NO: 2309774 - RNA, 19 nt, Artificial Sequence
  Description of Artificial Sequence: Synthetic oligonucleotide
uugcagggcuguagccagg

SEQ ID NO: 2309775 - RNA, 19 nt, Artificial Sequence
  Description of Artificial Sequence: Synthetic oligonucleotide
ugaguuccagaagggucug

SEQ ID NO: 2309776 - RNA, 19 nt, Artificial Sequence
  Description of Artificial Sequence: Synthetic oligonucleotide
cuauauagucugguaggca

SEQ ID NO: 2309777 - RNA, 19 nt, Artificial Sequence
  Description of Artificial Sequence: Synthetic oligonucleotide
cugguccaugguucggagc

SEQ ID NO: 2309778 - RNA, 19 nt, Artificial Sequence
  Description of Artificial Sequence: Synthetic oligonucleotide
auagucugguaggcagcac

SEQ ID NO: 2309779 - RNA, 19 nt, Artificial Sequence
  Description of Artificial Sequence: Synthetic oligonucleotide
cacagccagcccuuacaag

SEQ ID NO: 2309780 - RNA, 19 nt, Artificial Sequence
  Description of Artificial Sequence: Synthetic oligonucleotide
caguuucagcaucugcauc

SEQ ID NO: 2309781 - RNA, 19 nt, Artificial Sequence
  Description of Artificial Sequence: Synthetic oligonucleotide
ucauggcccgguuuucaau

SEQ ID NO: 2309782 - RNA, 19 nt, Artificial Sequence
  Description of Artificial Sequence: Synthetic oligonucleotide
gguucggagcuccuccucc

SEQ ID NO: 2309783 - RNA, 19 nt, Artificial Sequence
  Description of Artificial Sequence: Synthetic oligonucleotide
uccuccucggaggcuauca

SEQ ID NO: 2309784 - RNA, 19 nt, Artificial Sequence
  Description of Artificial Sequence: Synthetic oligonucleotide
ggcuaucagcgacuugagg

SEQ ID NO: 2309785 - RNA, 19 nt, Artificial Sequence
  Description of Artificial Sequence: Synthetic oligonucleotide
gaggaggcaacuauauagu

SEQ ID NO: 2309786 - RNA, 19 nt, Artificial Sequence
  Description of Artificial Sequence: Synthetic oligonucleotide
agccagcccuuacaaguug

SEQ ID NO: 2309787 - RNA, 19 nt, Artificial Sequence
  Description of Artificial Sequence: Synthetic oligonucleotide
uugcggucugaguccucgg

SEQ ID NO: 2309788 - RNA, 19 nt, Artificial Sequence
  Description of Artificial Sequence: Synthetic oligonucleotide
augguucggagcuccuccu

SEQ ID NO: 2309789 - RNA, 19 nt, Artificial Sequence
  Description of Artificial Sequence: Synthetic oligonucleotide
cugcgcccuauccaacucc

SEQ ID NO: 2309790 - RNA, 19 nt, Artificial Sequence
  Description of Artificial Sequence: Synthetic oligonucleotide
gaagggucugguccaaggu

SEQ ID NO: 2309791 - RNA, 19 nt, Artificial Sequence
  Description of Artificial Sequence: Synthetic oligonucleotide
ugagcgcuccagcucuccu

SEQ ID NO: 2309792 - RNA, 19 nt, Artificial Sequence
  Description of Artificial Sequence: Synthetic oligonucleotide
uguccucuuugguggaaua

SEQ ID NO: 2309793 - RNA, 19 nt, Artificial Sequence
  Description of Artificial Sequence: Synthetic oligonucleotide
caaucaguuauuggccuga

SEQ ID NO: 2309794 - RNA, 19 nt, Artificial Sequence
  Description of Artificial Sequence: Synthetic oligonucleotide
uccucguauuugcggucug

SEQ ID NO: 2309795 - RNA, 19 nt, Artificial Sequence
  Description of Artificial Sequence: Synthetic oligonucleotide
uuauuggccugaggaggca

SEQ ID NO: 2309796 - RNA, 19 nt, Artificial Sequence
  Description of Artificial Sequence: Synthetic oligonucleotide
gaggccacaucugccucag

SEQ ID NO: 2309797 - RNA, 19 nt, Artificial Sequence
  Description of Artificial Sequence: Synthetic oligonucleotide
cuccagaaguuuugaucuc

SEQ ID NO: 2309798 - RNA, 19 nt, Artificial Sequence
  Description of Artificial Sequence: Synthetic oligonucleotide
uccgccugcuccaguuucu

SEQ ID NO: 2309799 - RNA, 19 nt, Artificial Sequence
  Description of Artificial Sequence: Synthetic oligonucleotide
auggcccgguuuucaauga

SEQ ID NO: 2309800 - RNA, 19 nt, Artificial Sequence
  Description of Artificial Sequence: Synthetic oligonucleotide
cucagcccucucuucugag

SEQ ID NO: 2309801 - RNA, 19 nt, Artificial Sequence
  Description of Artificial Sequence: Synthetic oligonucleotide
cugguaggcagcacagcca

SEQ ID NO: 2309802 - RNA, 19 nt, Artificial Sequence
  Description of Artificial Sequence: Synthetic oligonucleotide
gcggucugaguccucggcg

SEQ ID NO: 2309803 - RNA, 19 nt, Artificial Sequence
  Description of Artificial Sequence: Synthetic oligonucleotide
uggcccgguuuucaaugac

SEQ ID NO: 2309804 - RNA, 19 nt, Artificial Sequence
  Description of Artificial Sequence: Synthetic oligonucleotide
uauuggccugaggaggcaa

SEQ ID NO: 2309805 - RNA, 19 nt, Artificial Sequence
  Description of Artificial Sequence: Synthetic oligonucleotide
ccuccagaaguuuugaucu

SEQ ID NO: 2309806 - RNA, 19 nt, Artificial Sequence
  Description of Artificial Sequence: Synthetic oligonucleotide
ggaucaccagcuuccuggc

SEQ ID NO: 2309807 - RNA, 19 nt, Artificial Sequence
  Description of Artificial Sequence: Synthetic oligonucleotide
uacuccuccucggaggcua

SEQ ID NO: 2309808 - RNA, 19 nt, Artificial Sequence
  Description of Artificial Sequence: Synthetic oligonucleotide
gcaacuauauagucuggua

SEQ ID NO: 2309809 - RNA, 19 nt, Artificial Sequence
  Description of Artificial Sequence: Synthetic oligonucleotide
cuucggccugcuccgcacg

SEQ ID NO: 2309810 - RNA, 19 nt, Artificial Sequence
  Description of Artificial Sequence: Synthetic oligonucleotide
ucagcgacuugagggccug

SEQ ID NO: 2309811 - RNA, 19 nt, Artificial Sequence
  Description of Artificial Sequence: Synthetic oligonucleotide
cugguccaaggucugguga

SEQ ID NO: 2309812 - RNA, 19 nt, Artificial Sequence
  Description of Artificial Sequence: Synthetic oligonucleotide
agggcuguagccaggcgcu

SEQ ID NO: 2309813 - RNA, 19 nt, Artificial Sequence
  Description of Artificial Sequence: Synthetic oligonucleotide
cuauccaacuccuccucua

SEQ ID NO: 2309814 - RNA, 19 nt, Artificial Sequence
  Description of Artificial Sequence: Synthetic oligonucleotide
gagggccugcugcucuucc

SEQ ID NO: 2309815 - RNA, 19 nt, Artificial Sequence
  Description of Artificial Sequence: Synthetic oligonucleotide
caucagccgcuuucucagc

SEQ ID NO: 2309816 - RNA, 19 nt, Artificial Sequence
  Description of Artificial Sequence: Synthetic oligonucleotide
ggugaaucuccaucuucca

SEQ ID NO: 2309817 - RNA, 19 nt, Artificial Sequence
  Description of Artificial Sequence: Synthetic oligonucleotide
cagcccuuacaaguuguug

SEQ ID NO: 2309818 - RNA, 19 nt, Artificial Sequence
  Description of Artificial Sequence: Synthetic oligonucleotide
uucggcgguucagggaggc

SEQ ID NO: 2309819 - RNA, 19 nt, Artificial Sequence
  Description of Artificial Sequence: Synthetic oligonucleotide
ugguucggagcuccuccuc

SEQ ID NO: 2309820 - RNA, 19 nt, Artificial Sequence
  Description of Artificial Sequence: Synthetic oligonucleotide
ccuucacagacucugaaua

SEQ ID NO: 2309821 - RNA, 19 nt, Artificial Sequence
  Description of Artificial Sequence: Synthetic oligonucleotide
aggcaacuauauagucugg

SEQ ID NO: 2309822 - RNA, 19 nt, Artificial Sequence
  Description of Artificial Sequence: Synthetic oligonucleotide
guccucuuugguggaauac

SEQ ID NO: 2309823 - RNA, 19 nt, Artificial Sequence
  Description of Artificial Sequence: Synthetic oligonucleotide
cauccuucacagacucuga

SEQ ID NO: 2309824 - RNA, 19 nt, Artificial Sequence
  Description of Artificial Sequence: Synthetic oligonucleotide
ggcgauaugcuuggccucc

SEQ ID NO: 2309825 - RNA, 19 nt, Artificial Sequence
  Description of Artificial Sequence: Synthetic oligonucleotide
aguccucggcgauaugcuu

SEQ ID NO: 2309826 - RNA, 19 nt, Artificial Sequence
  Description of Artificial Sequence: Synthetic oligonucleotide
guucggagcuccuccucca

SEQ ID NO: 2309827 - RNA, 19 nt, Artificial Sequence
  Description of Artificial Sequence: Synthetic oligonucleotide
uccgcacggucgauggcau

SEQ ID NO: 2309828 - RNA, 19 nt, Artificial Sequence
  Description of Artificial Sequence: Synthetic oligonucleotide
ucagcgucgguggccuucu

SEQ ID NO: 2309829 - RNA, 19 nt, Artificial Sequence
  Description of Artificial Sequence: Synthetic oligonucleotide
ugccuggcucggcucucag

SEQ ID NO: 2309830 - RNA, 19 nt, Artificial Sequence
  Description of Artificial Sequence: Synthetic oligonucleotide
caggaucaccagcuuccug

SEQ ID NO: 2309831 - RNA, 19 nt, Artificial Sequence
  Description of Artificial Sequence: Synthetic oligonucleotide
aggcuaucagcgacuugag

SEQ ID NO: 2309832 - RNA, 19 nt, Artificial Sequence
  Description of Artificial Sequence: Synthetic oligonucleotide
agcugcuugcaucggucuu

SEQ ID NO: 2309833 - RNA, 19 nt, Artificial Sequence
  Description of Artificial Sequence: Synthetic oligonucleotide
gcuucuugucggcuucggc

SEQ ID NO: 2309834 - RNA, 19 nt, Artificial Sequence
  Description of Artificial Sequence: Synthetic oligonucleotide
agcgacuugagggccuggu

SEQ ID NO: 2309835 - RNA, 19 nt, Artificial Sequence
  Description of Artificial Sequence: Synthetic oligonucleotide
ggaggcaacuauauagucu

SEQ ID NO: 2309836 - RNA, 19 nt, Artificial Sequence
  Description of Artificial Sequence: Synthetic oligonucleotide
ucugagcgcuccagcucuc

SEQ ID NO: 2309837 - RNA, 19 nt, Artificial Sequence
  Description of Artificial Sequence: Synthetic oligonucleotide
cuucauggcccgguuuuca

SEQ ID NO: 2309838 - RNA, 19 nt, Artificial Sequence
  Description of Artificial Sequence: Synthetic oligonucleotide
ccacaucugccucagcguc

SEQ ID NO: 2309839 - RNA, 19 nt, Artificial Sequence
  Description of Artificial Sequence: Synthetic oligonucleotide
uggcguccauggcugcagu

SEQ ID NO: 2309840 - RNA, 19 nt, Artificial Sequence
  Description of Artificial Sequence: Synthetic oligonucleotide
cgcccuauccaacuccucc

SEQ ID NO: 2309841 - RNA, 19 nt, Artificial Sequence
  Description of Artificial Sequence: Synthetic oligonucleotide
cuccgcacggucgauggca

SEQ ID NO: 2309842 - RNA, 19 nt, Artificial Sequence
  Description of Artificial Sequence: Synthetic oligonucleotide
aucggucuucagcuugcuu

SEQ ID NO: 2309843 - RNA, 19 nt, Artificial Sequence
  Description of Artificial Sequence: Synthetic oligonucleotide
ggcccgguuuucaaugacc

SEQ ID NO: 2309844 - RNA, 19 nt, Artificial Sequence
  Description of Artificial Sequence: Synthetic oligonucleotide
ucuccgccugcuccaguuu

SEQ ID NO: 2309845 - RNA, 19 nt, Artificial Sequence
  Description of Artificial Sequence: Synthetic oligonucleotide
ugcuugcaucggucuucag

SEQ ID NO: 2309846 - RNA, 19 nt, Artificial Sequence
  Description of Artificial Sequence: Synthetic oligonucleotide
ccagcugcuugcaucgguc

SEQ ID NO: 2309847 - RNA, 19 nt, Artificial Sequence
  Description of Artificial Sequence: Synthetic oligonucleotide
auucggcgguucagggagg

SEQ ID NO: 2309848 - RNA, 19 nt, Artificial Sequence
  Description of Artificial Sequence: Synthetic oligonucleotide
uugcaucggucuucagcuu

SEQ ID NO: 2309849 - RNA, 19 nt, Artificial Sequence
  Description of Artificial Sequence: Synthetic oligonucleotide
aucagcgacuugagggccu

SEQ ID NO: 2309850 - RNA, 19 nt, Artificial Sequence
  Description of Artificial Sequence: Synthetic oligonucleotide
cugaggaggcaacuauaua

SEQ ID NO: 2309851 - RNA, 19 nt, Artificial Sequence
  Description of Artificial Sequence: Synthetic oligonucleotide
cucagcgucgguggccuuc

SEQ ID NO: 2309852 - RNA, 19 nt, Artificial Sequence
  Description of Artificial Sequence: Synthetic oligonucleotide
cuccugcgcccuauccaac

SEQ ID NO: 2309853 - RNA, 19 nt, Artificial Sequence
  Description of Artificial Sequence: Synthetic oligonucleotide
gaguccucggcgauaugcu

SEQ ID NO: 2309854 - RNA, 19 nt, Artificial Sequence
  Description of Artificial Sequence: Synthetic oligonucleotide
ccuuacaaguuguugaguu

SEQ ID NO: 2309855 - RNA, 19 nt, Artificial Sequence
  Description of Artificial Sequence: Synthetic oligonucleotide
cugccucagcgucgguggc

SEQ ID NO: 2309856 - RNA, 19 nt, Artificial Sequence
  Description of Artificial Sequence: Synthetic oligonucleotide
ccugguccaugguucggag

SEQ ID NO: 2309857 - RNA, 19 nt, Artificial Sequence
  Description of Artificial Sequence: Synthetic oligonucleotide
ggaggccacaucugccuca

SEQ ID NO: 2309858 - RNA, 19 nt, Artificial Sequence
  Description of Artificial Sequence: Synthetic oligonucleotide
gcuccugcgcccuauccaa

SEQ ID NO: 2309859 - RNA, 19 nt, Artificial Sequence
  Description of Artificial Sequence: Synthetic oligonucleotide
cagcacagccagcccuuac

SEQ ID NO: 2309860 - RNA, 19 nt, Artificial Sequence
  Description of Artificial Sequence: Synthetic oligonucleotide
uggccugaggaggcaacua

SEQ ID NO: 2309861 - RNA, 19 nt, Artificial Sequence
  Description of Artificial Sequence: Synthetic oligonucleotide
auuugcggucugaguccuc

SEQ ID NO: 2309862 - RNA, 19 nt, Artificial Sequence
  Description of Artificial Sequence: Synthetic oligonucleotide
ggcaacuauauagucuggu

SEQ ID NO: 2309863 - RNA, 19 nt, Artificial Sequence
  Description of Artificial Sequence: Synthetic oligonucleotide
cacggucgauggcauucuc

SEQ ID NO: 2309864 - RNA, 19 nt, Artificial Sequence
  Description of Artificial Sequence: Synthetic oligonucleotide
uccagcugccuggcucggc

SEQ ID NO: 2309865 - RNA, 19 nt, Artificial Sequence
  Description of Artificial Sequence: Synthetic oligonucleotide
ggcguccauggcugcagug

SEQ ID NO: 2309866 - RNA, 19 nt, Artificial Sequence
  Description of Artificial Sequence: Synthetic oligonucleotide
cuccaacuuugccacagau

SEQ ID NO: 2309867 - RNA, 19 nt, Artificial Sequence
  Description of Artificial Sequence: Synthetic oligonucleotide
cugcuugcaucggucuuca

SEQ ID NO: 2309868 - RNA, 19 nt, Artificial Sequence
  Description of Artificial Sequence: Synthetic oligonucleotide
gcuucggccugcuccgcac

SEQ ID NO: 2309869 - RNA, 19 nt, Artificial Sequence
  Description of Artificial Sequence: Synthetic oligonucleotide
ggaggcuaucagcgacuug

SEQ ID NO: 2309870 - RNA, 19 nt, Artificial Sequence
  Description of Artificial Sequence: Synthetic oligonucleotide
ucggcgguucagggaggcc

SEQ ID NO: 2309871 - RNA, 19 nt, Artificial Sequence
  Description of Artificial Sequence: Synthetic oligonucleotide
cucagccaccucagcccuc

SEQ ID NO: 2309872 - RNA, 19 nt, Artificial Sequence
  Description of Artificial Sequence: Synthetic oligonucleotide
caccucagcccucucuucu

SEQ ID NO: 2309873 - RNA, 19 nt, Artificial Sequence
  Description of Artificial Sequence: Synthetic oligonucleotide
cccuauccaacuccuccuc

SEQ ID NO: 2309874 - RNA, 19 nt, Artificial Sequence
  Description of Artificial Sequence: Synthetic oligonucleotide
ccuccucggaggcuaucag

SEQ ID NO: 2309875 - RNA, 19 nt, Artificial Sequence
  Description of Artificial Sequence: Synthetic oligonucleotide
cacagacucugaauacuuu

SEQ ID NO: 2309876 - RNA, 19 nt, Artificial Sequence
  Description of Artificial Sequence: Synthetic oligonucleotide
cuggcucggcucucagcca

SEQ ID NO: 2309877 - RNA, 19 nt, Artificial Sequence
  Description of Artificial Sequence: Synthetic oligonucleotide
cugcuccgcacggucgaug

SEQ ID NO: 2309878 - RNA, 19 nt, Artificial Sequence
  Description of Artificial Sequence: Synthetic oligonucleotide
gcgacuugagggccugguc

SEQ ID NO: 2309879 - RNA, 19 nt, Artificial Sequence
  Description of Artificial Sequence: Synthetic oligonucleotide
cagcugccuggcucggcuc

SEQ ID NO: 2309880 - RNA, 19 nt, Artificial Sequence
  Description of Artificial Sequence: Synthetic oligonucleotide
cagcaaacucugcucgggu

SEQ ID NO: 2309881 - RNA, 19 nt, Artificial Sequence
  Description of Artificial Sequence: Synthetic oligonucleotide
gccacaucugccucagcgu

SEQ ID NO: 2309882 - RNA, 19 nt, Artificial Sequence
  Description of Artificial Sequence: Synthetic oligonucleotide
ccugaggaggcaacuauau

SEQ ID NO: 2309883 - RNA, 19 nt, Artificial Sequence
  Description of Artificial Sequence: Synthetic oligonucleotide
ccuccucguauuugcgguc

SEQ ID NO: 2309884 - RNA, 19 nt, Artificial Sequence
  Description of Artificial Sequence: Synthetic oligonucleotide
cuggccaccuccucguauu

SEQ ID NO: 2309885 - RNA, 19 nt, Artificial Sequence
  Description of Artificial Sequence: Synthetic oligonucleotide
cagcugcuugcaucggucu

SEQ ID NO: 2309886 - RNA, 19 nt, Artificial Sequence
  Description of Artificial Sequence: Synthetic oligonucleotide
cuggagggccugcugcucu

SEQ ID NO: 2309887 - RNA, 19 nt, Artificial Sequence
  Description of Artificial Sequence: Synthetic oligonucleotide
cuguagccaggcgcuccug

SEQ ID NO: 2309888 - RNA, 19 nt, Artificial Sequence
  Description of Artificial Sequence: Synthetic oligonucleotide
gcgcuccugcgcccuaucc

SEQ ID NO: 2309889 - RNA, 19 nt, Artificial Sequence
  Description of Artificial Sequence: Synthetic oligonucleotide
cucggcucucagccaccuc

SEQ ID NO: 2309890 - RNA, 19 nt, Artificial Sequence
  Description of Artificial Sequence: Synthetic oligonucleotide
gguaggcagcacagccagc

SEQ ID NO: 2309891 - RNA, 19 nt, Artificial Sequence
  Description of Artificial Sequence: Synthetic oligonucleotide
ccagaaguuuugaucuccu

SEQ ID NO: 2309892 - RNA, 19 nt, Artificial Sequence
  Description of Artificial Sequence: Synthetic oligonucleotide
cuccucguauuugcggucu

SEQ ID NO: 2309893 - RNA, 19 nt, Artificial Sequence
  Description of Artificial Sequence: Synthetic oligonucleotide
ggccugguccaugguucgg

SEQ ID NO: 2309894 - RNA, 19 nt, Artificial Sequence
  Description of Artificial Sequence: Synthetic oligonucleotide
ccugcgcccuauccaacuc

SEQ ID NO: 2309895 - RNA, 19 nt, Artificial Sequence
  Description of Artificial Sequence: Synthetic oligonucleotide
cagcgacuugagggccugg

SEQ ID NO: 2309896 - RNA, 19 nt, Artificial Sequence
  Description of Artificial Sequence: Synthetic oligonucleotide
gcccgguuuucaaugaccu

SEQ ID NO: 2309897 - RNA, 19 nt, Artificial Sequence
  Description of Artificial Sequence: Synthetic oligonucleotide
ggccugaggaggcaacuau

SEQ ID NO: 2309898 - RNA, 19 nt, Artificial Sequence
  Description of Artificial Sequence: Synthetic oligonucleotide
cuccuccagaaguuuugau

SEQ ID NO: 2309899 - RNA, 19 nt, Artificial Sequence
  Description of Artificial Sequence: Synthetic oligonucleotide
cgcacggucgauggcauuc

SEQ ID NO: 2309900 - RNA, 19 nt, Artificial Sequence
  Description of Artificial Sequence: Synthetic oligonucleotide
gccugcuccgcacggucga

SEQ ID NO: 2309901 - RNA, 19 nt, Artificial Sequence
  Description of Artificial Sequence: Synthetic oligonucleotide
caacuuugccacagaucuu

SEQ ID NO: 2309902 - RNA, 19 nt, Artificial Sequence
  Description of Artificial Sequence: Synthetic oligonucleotide
gucugaguccucggcgaua

SEQ ID NO: 2309903 - RNA, 19 nt, Artificial Sequence
  Description of Artificial Sequence: Synthetic oligonucleotide
ccaccucagcccucucuuc

SEQ ID NO: 2309904 - RNA, 19 nt, Artificial Sequence
  Description of Artificial Sequence: Synthetic oligonucleotide
gcuccgcacggucgauggc

SEQ ID NO: 2309905 - RNA, 19 nt, Artificial Sequence
  Description of Artificial Sequence: Synthetic oligonucleotide
ggcuucggccugcuccgca

SEQ ID NO: 2309906 - RNA, 19 nt, Artificial Sequence
  Description of Artificial Sequence: Synthetic oligonucleotide
ccuucauggcccgguuuuc

SEQ ID NO: 2309907 - RNA, 19 nt, Artificial Sequence
  Description of Artificial Sequence: Synthetic oligonucleotide
gguccaugguucggagcuc

SEQ ID NO: 2309908 - RNA, 19 nt, Artificial Sequence
  Description of Artificial Sequence: Synthetic oligonucleotide
gguuuucaaugaccuucau

SEQ ID NO: 2309909 - RNA, 19 nt, Artificial Sequence
  Description of Artificial Sequence: Synthetic oligonucleotide
cggucugaguccucggcga

SEQ ID NO: 2309910 - RNA, 19 nt, Artificial Sequence
  Description of Artificial Sequence: Synthetic oligonucleotide
cggucgauggcauucuccu

SEQ ID NO: 2309911 - RNA, 19 nt, Artificial Sequence
  Description of Artificial Sequence: Synthetic oligonucleotide
cggcucucagccaccucag

SEQ ID NO: 2309912 - RNA, 19 nt, Artificial Sequence
  Description of Artificial Sequence: Synthetic oligonucleotide
gccugaggaggcaacuaua

SEQ ID NO: 2309913 - RNA, 19 nt, Artificial Sequence
  Description of Artificial Sequence: Synthetic oligonucleotide
ccucggaggcuaucagcga

SEQ ID NO: 2309914 - RNA, 19 nt, Artificial Sequence
  Description of Artificial Sequence: Synthetic oligonucleotide
ccuauccaacuccuccucu

SEQ ID NO: 2309915 - RNA, 19 nt, Artificial Sequence
  Description of Artificial Sequence: Synthetic oligonucleotide
cuccuccucggaggcuauc

SEQ ID NO: 2309916 - RNA, 19 nt, Artificial Sequence
  Description of Artificial Sequence: Synthetic oligonucleotide
acuccuccucggaggcuau

SEQ ID NO: 2309917 - RNA, 19 nt, Artificial Sequence
  Description of Artificial Sequence: Synthetic oligonucleotide
ccagcuuuugcagggcugu

SEQ ID NO: 2309918 - RNA, 19 nt, Artificial Sequence
  Description of Artificial Sequence: Synthetic oligonucleotide
ccucguauuugcggucuga

SEQ ID NO: 2309919 - RNA, 19 nt, Artificial Sequence
  Description of Artificial Sequence: Synthetic oligonucleotide
ggucugaguccucggcgau

SEQ ID NO: 2309920 - RNA, 19 nt, Artificial Sequence
  Description of Artificial Sequence: Synthetic oligonucleotide
cugccuggcucggcucuca

SEQ ID NO: 2309921 - RNA, 19 nt, Artificial Sequence
  Description of Artificial Sequence: Synthetic oligonucleotide
aggcgcuccugcgcccuau

SEQ ID NO: 2309922 - RNA, 19 nt, Artificial Sequence
  Description of Artificial Sequence: Synthetic oligonucleotide
cgcuccugcgcccuaucca

SEQ ID NO: 2309923 - RNA, 19 nt, Artificial Sequence
  Description of Artificial Sequence: Synthetic oligonucleotide
cggucuucagcuugcuucu

SEQ ID NO: 2309924 - RNA, 19 nt, Artificial Sequence
  Description of Artificial Sequence: Synthetic oligonucleotide
ggcgcuccugcgcccuauc

SEQ ID NO: 2309925 - RNA, 19 nt, Artificial Sequence
  Description of Artificial Sequence: Synthetic oligonucleotide
caucggucuucagcuugcu

SEQ ID NO: 2309926 - RNA, 19 nt, Artificial Sequence
  Description of Artificial Sequence: Synthetic oligonucleotide
gguccaaggucuggugaau

SEQ ID NO: 2309927 - RNA, 19 nt, Artificial Sequence
  Description of Artificial Sequence: Synthetic oligonucleotide
cagcuuuugcagggcugua

SEQ ID NO: 2309928 - RNA, 19 nt, Artificial Sequence
  Description of Artificial Sequence: Synthetic oligonucleotide
cccucucuucugagcgcuc

SEQ ID NO: 2309929 - RNA, 19 nt, Artificial Sequence
  Description of Artificial Sequence: Synthetic oligonucleotide
cggcgguucagggaggcca

SEQ ID NO: 2309930 - RNA, 19 nt, Artificial Sequence
  Description of Artificial Sequence: Synthetic oligonucleotide
gccucagcgucgguggccu

SEQ ID NO: 2309931 - RNA, 19 nt, Artificial Sequence
  Description of Artificial Sequence: Synthetic oligonucleotide
gcacggucgauggcauucu

SEQ ID NO: 2309932 - RNA, 19 nt, Artificial Sequence
  Description of Artificial Sequence: Synthetic oligonucleotide
cccuuacaaguuguugagu

SEQ ID NO: 2309933 - RNA, 19 nt, Artificial Sequence
  Description of Artificial Sequence: Synthetic oligonucleotide
gcgcccuauccaacuccuc

SEQ ID NO: 2309934 - RNA, 19 nt, Artificial Sequence
  Description of Artificial Sequence: Synthetic oligonucleotide
gcgauaugcuuggccuccu

SEQ ID NO: 2309935 - RNA, 19 nt, Artificial Sequence
  Description of Artificial Sequence: Synthetic oligonucleotide
cccgguuuucaaugaccuu

SEQ ID NO: 2309936 - RNA, 19 nt, Artificial Sequence
  Description of Artificial Sequence: Synthetic oligonucleotide
ccagcugaauucggcgguu

SEQ ID NO: 2309937 - RNA, 19 nt, Artificial Sequence
  Description of Artificial Sequence: Synthetic oligonucleotide
cggcuucggccugcuccgc

SEQ ID NO: 2309938 - RNA, 19 nt, Artificial Sequence
  Description of Artificial Sequence: Synthetic oligonucleotide
cgguucagggaggccacau

SEQ ID NO: 2309939 - RNA, 19 nt, Artificial Sequence
  Description of Artificial Sequence: Synthetic oligonucleotide
cggaggcuaucagcgacuu

SEQ ID NO: 2309940 - RNA, 19 nt, Artificial Sequence
  Description of Artificial Sequence: Synthetic oligonucleotide
cagcgucgguggccuucuu

SEQ ID NO: 2309941 - RNA, 19 nt, Artificial Sequence
  Description of Artificial Sequence: Synthetic oligonucleotide
ccugcuccgcacggucgau

SEQ ID NO: 2309942 - RNA, 19 nt, Artificial Sequence
  Description of Artificial Sequence: Synthetic oligonucleotide
ccgcacggucgauggcauu

SEQ ID NO: 2309943 - RNA, 19 nt, Artificial Sequence
  Description of Artificial Sequence: Synthetic oligonucleotide
cgcucucaucagccgcuuu

SEQ ID NO: 2309944 - RNA, 19 nt, Artificial Sequence
  Description of Artificial Sequence: Synthetic oligonucleotide
ccucagcgucgguggccuu

SEQ ID NO: 2309945 - RNA, 19 nt, Artificial Sequence
  Description of Artificial Sequence: Synthetic oligonucleotide
auaugcuucauccagauac

SEQ ID NO: 2309946 - RNA, 19 nt, Artificial Sequence
  Description of Artificial Sequence: Synthetic oligonucleotide
aaagcaaaggccuaacagg

SEQ ID NO: 2309947 - RNA, 19 nt, Artificial Sequence
  Description of Artificial Sequence: Synthetic oligonucleotide
aauuccuucccauagcugg

SEQ ID NO: 2309948 - RNA, 19 nt, Artificial Sequence
  Description of Artificial Sequence: Synthetic oligonucleotide
ugcugcaaaauccauaacg

SEQ ID NO: 2309949 - RNA, 19 nt, Artificial Sequence
  Description of Artificial Sequence: Synthetic oligonucleotide
uguacagugaacugaaggg

SEQ ID NO: 2309950 - RNA, 19 nt, Artificial Sequence
  Description of Artificial Sequence: Synthetic oligonucleotide
uuaaacucaaaugagcagg

SEQ ID NO: 2309951 - RNA, 19 nt, Artificial Sequence
  Description of Artificial Sequence: Synthetic oligonucleotide
aauucggccaacugccucc

SEQ ID NO: 2309952 - RNA, 19 nt, Artificial Sequence
  Description of Artificial Sequence: Synthetic oligonucleotide
ucaaagagcaugaugagaa

SEQ ID NO: 2309953 - RNA, 19 nt, Artificial Sequence
  Description of Artificial Sequence: Synthetic oligonucleotide
ucauuaaacucaaaugagc

SEQ ID NO: 2309954 - RNA, 19 nt, Artificial Sequence
  Description of Artificial Sequence: Synthetic oligonucleotide
auauucaaugauguuaacc

SEQ ID NO: 2309955 - RNA, 19 nt, Artificial Sequence
  Description of Artificial Sequence: Synthetic oligonucleotide
aacguaggaaaauuccuuc

SEQ ID NO: 2309956 - RNA, 19 nt, Artificial Sequence
  Description of Artificial Sequence: Synthetic oligonucleotide
uguugcaauaagcugacug

SEQ ID NO: 2309957 - RNA, 19 nt, Artificial Sequence
  Description of Artificial Sequence: Synthetic oligonucleotide
ugucccaugaaucaauacc

SEQ ID NO: 2309958 - RNA, 19 nt, Artificial Sequence
  Description of Artificial Sequence: Synthetic oligonucleotide
cuuguuauauucaaugaug

SEQ ID NO: 2309959 - RNA, 19 nt, Artificial Sequence
  Description of Artificial Sequence: Synthetic oligonucleotide
aauaccgacgcucccuccc

SEQ ID NO: 2309960 - RNA, 19 nt, Artificial Sequence
  Description of Artificial Sequence: Synthetic oligonucleotide
aacagaaggagagauggac

SEQ ID NO: 2309961 - RNA, 19 nt, Artificial Sequence
  Description of Artificial Sequence: Synthetic oligonucleotide
uggacucaggccuagauag

SEQ ID NO: 2309962 - RNA, 19 nt, Artificial Sequence
  Description of Artificial Sequence: Synthetic oligonucleotide
ucugcggagcuacagaagg

SEQ ID NO: 2309963 - RNA, 19 nt, Artificial Sequence
  Description of Artificial Sequence: Synthetic oligonucleotide
aagcaaaggccuaacaggc

SEQ ID NO: 2309964 - RNA, 19 nt, Artificial Sequence
  Description of Artificial Sequence: Synthetic oligonucleotide
aauccauaacguuucagga

SEQ ID NO: 2309965 - RNA, 19 nt, Artificial Sequence
  Description of Artificial Sequence: Synthetic oligonucleotide
caugaaucaauaccgacgc

SEQ ID NO: 2309966 - RNA, 19 nt, Artificial Sequence
  Description of Artificial Sequence: Synthetic oligonucleotide
aaauacaggugccucccac

SEQ ID NO: 2309967 - RNA, 19 nt, Artificial Sequence
  Description of Artificial Sequence: Synthetic oligonucleotide
ugcucauuaaacucaaaug

SEQ ID NO: 2309968 - RNA, 19 nt, Artificial Sequence
  Description of Artificial Sequence: Synthetic oligonucleotide
uccaauucggccaacugcc

SEQ ID NO: 2309969 - RNA, 19 nt, Artificial Sequence
  Description of Artificial Sequence: Synthetic oligonucleotide
acugguguuagugacuucc

SEQ ID NO: 2309970 - RNA, 19 nt, Artificial Sequence
  Description of Artificial Sequence: Synthetic oligonucleotide
aaaugacagcaccuccugc

SEQ ID NO: 2309971 - RNA, 19 nt, Artificial Sequence
  Description of Artificial Sequence: Synthetic oligonucleotide
gauguuaaccauuucuuca

SEQ ID NO: 2309972 - RNA, 19 nt, Artificial Sequence
  Description of Artificial Sequence: Synthetic oligonucleotide
auuaaacucaaaugagcag

SEQ ID NO: 2309973 - RNA, 19 nt, Artificial Sequence
  Description of Artificial Sequence: Synthetic oligonucleotide
uccaacguaggaaaauucc

SEQ ID NO: 2309974 - RNA, 19 nt, Artificial Sequence
  Description of Artificial Sequence: Synthetic oligonucleotide
uacuuagaggaucugcucc

SEQ ID NO: 2309975 - RNA, 19 nt, Artificial Sequence
  Description of Artificial Sequence: Synthetic oligonucleotide
uagaggaucugcuccaacg

SEQ ID NO: 2309976 - RNA, 19 nt, Artificial Sequence
  Description of Artificial Sequence: Synthetic oligonucleotide
aaaaugacagcaccuccug

SEQ ID NO: 2309977 - RNA, 19 nt, Artificial Sequence
  Description of Artificial Sequence: Synthetic oligonucleotide
aauaagcugacugugcaca

SEQ ID NO: 2309978 - RNA, 19 nt, Artificial Sequence
  Description of Artificial Sequence: Synthetic oligonucleotide
aaucaauaccgacgcuccc

SEQ ID NO: 2309979 - RNA, 19 nt, Artificial Sequence
  Description of Artificial Sequence: Synthetic oligonucleotide
aggagagauggacucaggc

SEQ ID NO: 2309980 - RNA, 19 nt, Artificial Sequence
  Description of Artificial Sequence: Synthetic oligonucleotide
guguacagugaacugaagg

SEQ ID NO: 2309981 - RNA, 19 nt, Artificial Sequence
  Description of Artificial Sequence: Synthetic oligonucleotide
uucaaggacucucucguag

SEQ ID NO: 2309982 - RNA, 19 nt, Artificial Sequence
  Description of Artificial Sequence: Synthetic oligonucleotide
uccauaacguuucaggauc

SEQ ID NO: 2309983 - RNA, 19 nt, Artificial Sequence
  Description of Artificial Sequence: Synthetic oligonucleotide
agaaagugcucauuaaacu

SEQ ID NO: 2309984 - RNA, 19 nt, Artificial Sequence
  Description of Artificial Sequence: Synthetic oligonucleotide
cuugaugugugucagccag

SEQ ID NO: 2309985 - RNA, 19 nt, Artificial Sequence
  Description of Artificial Sequence: Synthetic oligonucleotide
agauacuuagaggaucugc

SEQ ID NO: 2309986 - RNA, 19 nt, Artificial Sequence
  Description of Artificial Sequence: Synthetic oligonucleotide
uuccaauucggccaacugc

SEQ ID NO: 2309987 - RNA, 19 nt, Artificial Sequence
  Description of Artificial Sequence: Synthetic oligonucleotide
uccucuguuuccaauucgg

SEQ ID NO: 2309988 - RNA, 19 nt, Artificial Sequence
  Description of Artificial Sequence: Synthetic oligonucleotide
cauccagauacuuagagga

SEQ ID NO: 2309989 - RNA, 19 nt, Artificial Sequence
  Description of Artificial Sequence: Synthetic oligonucleotide
agaaauacaggugccuccc

SEQ ID NO: 2309990 - RNA, 19 nt, Artificial Sequence
  Description of Artificial Sequence: Synthetic oligonucleotide
uaacaggccauacuggugu

SEQ ID NO: 2309991 - RNA, 19 nt, Artificial Sequence
  Description of Artificial Sequence: Synthetic oligonucleotide
uucuaucagggccucaaag

SEQ ID NO: 2309992 - RNA, 19 nt, Artificial Sequence
  Description of Artificial Sequence: Synthetic oligonucleotide
cauaccuacagccaaguuc

SEQ ID NO: 2309993 - RNA, 19 nt, Artificial Sequence
  Description of Artificial Sequence: Synthetic oligonucleotide
ugagaaagugcucauuaaa

SEQ ID NO: 2309994 - RNA, 19 nt, Artificial Sequence
  Description of Artificial Sequence: Synthetic oligonucleotide
ugagcaggggaacugccgg

SEQ ID NO: 2309995 - RNA, 19 nt, Artificial Sequence
  Description of Artificial Sequence: Synthetic oligonucleotide
uguggguuuguucauuaca

SEQ ID NO: 2309996 - RNA, 19 nt, Artificial Sequence
  Description of Artificial Sequence: Synthetic oligonucleotide
cuaucagggccucaaagcc

SEQ ID NO: 2309997 - RNA, 19 nt, Artificial Sequence
  Description of Artificial Sequence: Synthetic oligonucleotide
gucccaugaaucaauaccg

SEQ ID NO: 2309998 - RNA, 19 nt, Artificial Sequence
  Description of Artificial Sequence: Synthetic oligonucleotide
guuagugacuuccaucuug

SEQ ID NO: 2309999 - RNA, 19 nt, Artificial Sequence
  Description of Artificial Sequence: Synthetic oligonucleotide
agguccucaggacaggugg

SEQ ID NO: 2310000 - RNA, 19 nt, Artificial Sequence
  Description of Artificial Sequence: Synthetic oligonucleotide
cauguuguggguuuguuca

SEQ ID NO: 2310001 - RNA, 19 nt, Artificial Sequence
  Description of Artificial Sequence: Synthetic oligonucleotide
gcucauuaaacucaaauga

SEQ ID NO: 2310002 - RNA, 19 nt, Artificial Sequence
  Description of Artificial Sequence: Synthetic oligonucleotide
ugaaucaauaccgacgcuc

SEQ ID NO: 2310003 - RNA, 19 nt, Artificial Sequence
  Description of Artificial Sequence: Synthetic oligonucleotide
ugcaauaagcugacugugc

SEQ ID NO: 2310004 - RNA, 19 nt, Artificial Sequence
  Description of Artificial Sequence: Synthetic oligonucleotide
agcaugaugagaaagugcu

SEQ ID NO: 2310005 - RNA, 19 nt, Artificial Sequence
  Description of Artificial Sequence: Synthetic oligonucleotide
cauagcuggagacucugcg

SEQ ID NO: 2310006 - RNA, 19 nt, Artificial Sequence
  Description of Artificial Sequence: Synthetic oligonucleotide
gaggaucugccacacacag

SEQ ID NO: 2310007 - RNA, 19 nt, Artificial Sequence
  Description of Artificial Sequence: Synthetic oligonucleotide
auaccuacagccaaguuca

SEQ ID NO: 2310008 - RNA, 19 nt, Artificial Sequence
  Description of Artificial Sequence: Synthetic oligonucleotide
cagguaagcaugcucaaag

SEQ ID NO: 2310009 - RNA, 19 nt, Artificial Sequence
  Description of Artificial Sequence: Synthetic oligonucleotide
aauacaggugccucccacu

SEQ ID NO: 2310010 - RNA, 19 nt, Artificial Sequence
  Description of Artificial Sequence: Synthetic oligonucleotide
guaagcaugcucaaagagc

SEQ ID NO: 2310011 - RNA, 19 nt, Artificial Sequence
  Description of Artificial Sequence: Synthetic oligonucleotide
aacuccuuguuauauucaa

SEQ ID NO: 2310012 - RNA, 19 nt, Artificial Sequence
  Description of Artificial Sequence: Synthetic oligonucleotide
uucaaugauguuaaccauu

SEQ ID NO: 2310013 - RNA, 19 nt, Artificial Sequence
  Description of Artificial Sequence: Synthetic oligonucleotide
gaugagaaagugcucauua

SEQ ID NO: 2310014 - RNA, 19 nt, Artificial Sequence
  Description of Artificial Sequence: Synthetic oligonucleotide
gaaucaauaccgacgcucc

SEQ ID NO: 2310015 - RNA, 19 nt, Artificial Sequence
  Description of Artificial Sequence: Synthetic oligonucleotide
caucgguccauguuguggg

SEQ ID NO: 2310016 - RNA, 19 nt, Artificial Sequence
  Description of Artificial Sequence: Synthetic oligonucleotide
ugauguuaaccauuucuuc

SEQ ID NO: 2310017 - RNA, 19 nt, Artificial Sequence
  Description of Artificial Sequence: Synthetic oligonucleotide
guggggaggucuuucaagg

SEQ ID NO: 2310018 - RNA, 19 nt, Artificial Sequence
  Description of Artificial Sequence: Synthetic oligonucleotide
cucaggccuagauaggucc

SEQ ID NO: 2310019 - RNA, 19 nt, Artificial Sequence
  Description of Artificial Sequence: Synthetic oligonucleotide
ucccugucaaugcacuggg

SEQ ID NO: 2310020 - RNA, 19 nt, Artificial Sequence
  Description of Artificial Sequence: Synthetic oligonucleotide
aagagcaugaugagaaagu

SEQ ID NO: 2310021 - RNA, 19 nt, Artificial Sequence
  Description of Artificial Sequence: Synthetic oligonucleotide
ccaugaaucaauaccgacg

SEQ ID NO: 2310022 - RNA, 19 nt, Artificial Sequence
  Description of Artificial Sequence: Synthetic oligonucleotide
cuagauagguccucaggac

SEQ ID NO: 2310023 - RNA, 19 nt, Artificial Sequence
  Description of Artificial Sequence: Synthetic oligonucleotide
acguuucaggaucccauac

SEQ ID NO: 2310024 - RNA, 19 nt, Artificial Sequence
  Description of Artificial Sequence: Synthetic oligonucleotide
gguaagcaugcucaaagag

SEQ ID NO: 2310025 - RNA, 19 nt, Artificial Sequence
  Description of Artificial Sequence: Synthetic oligonucleotide
ucaaagccacggauggucc

SEQ ID NO: 2310026 - RNA, 19 nt, Artificial Sequence
  Description of Artificial Sequence: Synthetic oligonucleotide
uaacguuucaggaucccau

SEQ ID NO: 2310027 - RNA, 19 nt, Artificial Sequence
  Description of Artificial Sequence: Synthetic oligonucleotide
guuggaaugggugaccagc

SEQ ID NO: 2310028 - RNA, 19 nt, Artificial Sequence
  Description of Artificial Sequence: Synthetic oligonucleotide
uaugcuucauccagauacu

SEQ ID NO: 2310029 - RNA, 19 nt, Artificial Sequence
  Description of Artificial Sequence: Synthetic oligonucleotide
ucaaggacucucucguagc

SEQ ID NO: 2310030 - RNA, 19 nt, Artificial Sequence
  Description of Artificial Sequence: Synthetic oligonucleotide
auguuaaccauuucuucau

SEQ ID NO: 2310031 - RNA, 19 nt, Artificial Sequence
  Description of Artificial Sequence: Synthetic oligonucleotide
uacagaaggccagaugacc

SEQ ID NO: 2310032 - RNA, 19 nt, Artificial Sequence
  Description of Artificial Sequence: Synthetic oligonucleotide
cugucaaugcacugggcag

SEQ ID NO: 2310033 - RNA, 19 nt, Artificial Sequence
  Description of Artificial Sequence: Synthetic oligonucleotide
uccaggaagagaagaaaua

SEQ ID NO: 2310034 - RNA, 19 nt, Artificial Sequence
  Description of Artificial Sequence: Synthetic oligonucleotide
ggaucccauaccuacagcc

SEQ ID NO: 2310035 - RNA, 19 nt, Artificial Sequence
  Description of Artificial Sequence: Synthetic oligonucleotide
cagaaggagagauggacuc

SEQ ID NO: 2310036 - RNA, 19 nt, Artificial Sequence
  Description of Artificial Sequence: Synthetic oligonucleotide
ugcagcguggaaucagucc

SEQ ID NO: 2310037 - RNA, 19 nt, Artificial Sequence
  Description of Artificial Sequence: Synthetic oligonucleotide
acuuagaggaucugcucca

SEQ ID NO: 2310038 - RNA, 19 nt, Artificial Sequence
  Description of Artificial Sequence: Synthetic oligonucleotide
gagaagaaauacaggugcc

SEQ ID NO: 2310039 - RNA, 19 nt, Artificial Sequence
  Description of Artificial Sequence: Synthetic oligonucleotide
uugcaauaagcugacugug

SEQ ID NO: 2310040 - RNA, 19 nt, Artificial Sequence
  Description of Artificial Sequence: Synthetic oligonucleotide
gaagaaauacaggugccuc

SEQ ID NO: 2310041 - RNA, 19 nt, Artificial Sequence
  Description of Artificial Sequence: Synthetic oligonucleotide
guacagugaacugaagggc

SEQ ID NO: 2310042 - RNA, 19 nt, Artificial Sequence
  Description of Artificial Sequence: Synthetic oligonucleotide
cuugccgagccaucggucc

SEQ ID NO: 2310043 - RNA, 19 nt, Artificial Sequence
  Description of Artificial Sequence: Synthetic oligonucleotide
agagcaugaugagaaagug

SEQ ID NO: 2310044 - RNA, 19 nt, Artificial Sequence
  Description of Artificial Sequence: Synthetic oligonucleotide
gaagggcaaacagaaggag

SEQ ID NO: 2310045 - RNA, 19 nt, Artificial Sequence
  Description of Artificial Sequence: Synthetic oligonucleotide
auaagcugacugugcacag

SEQ ID NO: 2310046 - RNA, 19 nt, Artificial Sequence
  Description of Artificial Sequence: Synthetic oligonucleotide
gaagucaccugcagcgugg

SEQ ID NO: 2310047 - RNA, 19 nt, Artificial Sequence
  Description of Artificial Sequence: Synthetic oligonucleotide
agaggaucugcuccaacgu

SEQ ID NO: 2310048 - RNA, 19 nt, Artificial Sequence
  Description of Artificial Sequence: Synthetic oligonucleotide
uacuguguacagugaacug

SEQ ID NO: 2310049 - RNA, 19 nt, Artificial Sequence
  Description of Artificial Sequence: Synthetic oligonucleotide
aaggccuaacaggccauac

SEQ ID NO: 2310050 - RNA, 19 nt, Artificial Sequence
  Description of Artificial Sequence: Synthetic oligonucleotide
guguuagugacuuccaucu

SEQ ID NO: 2310051 - RNA, 19 nt, Artificial Sequence
  Description of Artificial Sequence: Synthetic oligonucleotide
auccauaacguuucaggau

SEQ ID NO: 2310052 - RNA, 19 nt, Artificial Sequence
  Description of Artificial Sequence: Synthetic oligonucleotide
ugucaaugcacugggcagc

SEQ ID NO: 2310053 - RNA, 19 nt, Artificial Sequence
  Description of Artificial Sequence: Synthetic oligonucleotide
guaggaaaauuccuuccca

SEQ ID NO: 2310054 - RNA, 19 nt, Artificial Sequence
  Description of Artificial Sequence: Synthetic oligonucleotide
ucaauaccgacgcucccuc

SEQ ID NO: 2310055 - RNA, 19 nt, Artificial Sequence
  Description of Artificial Sequence: Synthetic oligonucleotide
gaaugggugaccagccugc

SEQ ID NO: 2310056 - RNA, 19 nt, Artificial Sequence
  Description of Artificial Sequence: Synthetic oligonucleotide
guugcaauaagcugacugu

SEQ ID NO: 2310057 - RNA, 19 nt, Artificial Sequence
  Description of Artificial Sequence: Synthetic oligonucleotide
ucccaugaaucaauaccga

SEQ ID NO: 2310058 - RNA, 19 nt, Artificial Sequence
  Description of Artificial Sequence: Synthetic oligonucleotide
ugcggagcuacagaaggcc

SEQ ID NO: 2310059 - RNA, 19 nt, Artificial Sequence
  Description of Artificial Sequence: Synthetic oligonucleotide
cuaacaggccauacuggug

SEQ ID NO: 2310060 - RNA, 19 nt, Artificial Sequence
  Description of Artificial Sequence: Synthetic oligonucleotide
ucccauaccuacagccaag

SEQ ID NO: 2310061 - RNA, 19 nt, Artificial Sequence
  Description of Artificial Sequence: Synthetic oligonucleotide
agcaugcucaaagagcaug

SEQ ID NO: 2310062 - RNA, 19 nt, Artificial Sequence
  Description of Artificial Sequence: Synthetic oligonucleotide
aaauuccuucccauagcug

SEQ ID NO: 2310063 - RNA, 19 nt, Artificial Sequence
  Description of Artificial Sequence: Synthetic oligonucleotide
aacguuucaggaucccaua

SEQ ID NO: 2310064 - RNA, 19 nt, Artificial Sequence
  Description of Artificial Sequence: Synthetic oligonucleotide
caauaagcugacugugcac

SEQ ID NO: 2310065 - RNA, 19 nt, Artificial Sequence
  Description of Artificial Sequence: Synthetic oligonucleotide
ucaggauauugaccuuggc

SEQ ID NO: 2310066 - RNA, 19 nt, Artificial Sequence
  Description of Artificial Sequence: Synthetic oligonucleotide
ugaccagguaagcaugcuc

SEQ ID NO: 2310067 - RNA, 19 nt, Artificial Sequence
  Description of Artificial Sequence: Synthetic oligonucleotide
ucugcuugcuguugcaaua

SEQ ID NO: 2310068 - RNA, 19 nt, Artificial Sequence
  Description of Artificial Sequence: Synthetic oligonucleotide
cucgguuccaggaugaucu

SEQ ID NO: 2310069 - RNA, 19 nt, Artificial Sequence
  Description of Artificial Sequence: Synthetic oligonucleotide
agguaagcaugcucaaaga

SEQ ID NO: 2310070 - RNA, 19 nt, Artificial Sequence
  Description of Artificial Sequence: Synthetic oligonucleotide
caaggacucucucguagcc

SEQ ID NO: 2310071 - RNA, 19 nt, Artificial Sequence
  Description of Artificial Sequence: Synthetic oligonucleotide
cucaaagccacggaugguc

SEQ ID NO: 2310072 - RNA, 19 nt, Artificial Sequence
  Description of Artificial Sequence: Synthetic oligonucleotide
ggccuaacaggccauacug

SEQ ID NO: 2310073 - RNA, 19 nt, Artificial Sequence
  Description of Artificial Sequence: Synthetic oligonucleotide
uucugucccaugaaucaau

SEQ ID NO: 2310074 - RNA, 19 nt, Artificial Sequence
  Description of Artificial Sequence: Synthetic oligonucleotide
aaagccacggaugguccug

SEQ ID NO: 2310075 - RNA, 19 nt, Artificial Sequence
  Description of Artificial Sequence: Synthetic oligonucleotide
acucaaaugagcaggggaa

SEQ ID NO: 2310076 - RNA, 19 nt, Artificial Sequence
  Description of Artificial Sequence: Synthetic oligonucleotide
uguuaaccauuucuucaua

SEQ ID NO: 2310077 - RNA, 19 nt, Artificial Sequence
  Description of Artificial Sequence: Synthetic oligonucleotide
augagaaagugcucauuaa

SEQ ID NO: 2310078 - RNA, 19 nt, Artificial Sequence
  Description of Artificial Sequence: Synthetic oligonucleotide
uguuggaaugggugaccag

SEQ ID NO: 2310079 - RNA, 19 nt, Artificial Sequence
  Description of Artificial Sequence: Synthetic oligonucleotide
ggauauugaccuuggcuug

SEQ ID NO: 2310080 - RNA, 19 nt, Artificial Sequence
  Description of Artificial Sequence: Synthetic oligonucleotide
uuagaggaucugcuccaac

SEQ ID NO: 2310081 - RNA, 19 nt, Artificial Sequence
  Description of Artificial Sequence: Synthetic oligonucleotide
guuucaggaucccauaccu

SEQ ID NO: 2310082 - RNA, 19 nt, Artificial Sequence
  Description of Artificial Sequence: Synthetic oligonucleotide
aggaugaucugggccaggg

SEQ ID NO: 2310083 - RNA, 19 nt, Artificial Sequence
  Description of Artificial Sequence: Synthetic oligonucleotide
aagccacggaugguccugc

SEQ ID NO: 2310084 - RNA, 19 nt, Artificial Sequence
  Description of Artificial Sequence: Synthetic oligonucleotide
aacugccggaggaucugcc

SEQ ID NO: 2310085 - RNA, 19 nt, Artificial Sequence
  Description of Artificial Sequence: Synthetic oligonucleotide
gauagguccucaggacagg

SEQ ID NO: 2310086 - RNA, 19 nt, Artificial Sequence
  Description of Artificial Sequence: Synthetic oligonucleotide
acaguccaggaagagaaga

SEQ ID NO: 2310087 - RNA, 19 nt, Artificial Sequence
  Description of Artificial Sequence: Synthetic oligonucleotide
cugcucccaaagcaaaggc

SEQ ID NO: 2310088 - RNA, 19 nt, Artificial Sequence
  Description of Artificial Sequence: Synthetic oligonucleotide
caaaugagcaggggaacug

SEQ ID NO: 2310089 - RNA, 19 nt, Artificial Sequence
  Description of Artificial Sequence: Synthetic oligonucleotide
ucugucccaugaaucaaua

SEQ ID NO: 2310090 - RNA, 19 nt, Artificial Sequence
  Description of Artificial Sequence: Synthetic oligonucleotide
aucaauaccgacgcucccu

SEQ ID NO: 2310091 - RNA, 19 nt, Artificial Sequence
  Description of Artificial Sequence: Synthetic oligonucleotide
cuccaacguaggaaaauuc

SEQ ID NO: 2310092 - RNA, 19 nt, Artificial Sequence
  Description of Artificial Sequence: Synthetic oligonucleotide
gguguuagugacuuccauc

SEQ ID NO: 2310093 - RNA, 19 nt, Artificial Sequence
  Description of Artificial Sequence: Synthetic oligonucleotide
cagaaggccagaugaccag

SEQ ID NO: 2310094 - RNA, 19 nt, Artificial Sequence
  Description of Artificial Sequence: Synthetic oligonucleotide
uucugcuugcuguugcaau

SEQ ID NO: 2310095 - RNA, 19 nt, Artificial Sequence
  Description of Artificial Sequence: Synthetic oligonucleotide
agcgcuguuggaaugggug

SEQ ID NO: 2310096 - RNA, 19 nt, Artificial Sequence
  Description of Artificial Sequence: Synthetic oligonucleotide
aggccagaugaccagguaa

SEQ ID NO: 2310097 - RNA, 19 nt, Artificial Sequence
  Description of Artificial Sequence: Synthetic oligonucleotide
ucaggccuagauagguccu

SEQ ID NO: 2310098 - RNA, 19 nt, Artificial Sequence
  Description of Artificial Sequence: Synthetic oligonucleotide
ugaccuuggcuuguaacuc

SEQ ID NO: 2310099 - RNA, 19 nt, Artificial Sequence
  Description of Artificial Sequence: Synthetic oligonucleotide
auaacguuucaggauccca

SEQ ID NO: 2310100 - RNA, 19 nt, Artificial Sequence
  Description of Artificial Sequence: Synthetic oligonucleotide
uucccauagcuggagacuc

SEQ ID NO: 2310101 - RNA, 19 nt, Artificial Sequence
  Description of Artificial Sequence: Synthetic oligonucleotide
ggaaugggugaccagccug

SEQ ID NO: 2310102 - RNA, 19 nt, Artificial Sequence
  Description of Artificial Sequence: Synthetic oligonucleotide
agccacucucuuucuauca

SEQ ID NO: 2310103 - RNA, 19 nt, Artificial Sequence
  Description of Artificial Sequence: Synthetic oligonucleotide
uuggaggccuccagcuugc

SEQ ID NO: 2310104 - RNA, 19 nt, Artificial Sequence
  Description of Artificial Sequence: Synthetic oligonucleotide
uaagcugacugugcacagc

SEQ ID NO: 2310105 - RNA, 19 nt, Artificial Sequence
  Description of Artificial Sequence: Synthetic oligonucleotide
ggaugguccugcuucucgg

SEQ ID NO: 2310106 - RNA, 19 nt, Artificial Sequence
  Description of Artificial Sequence: Synthetic oligonucleotide
gcaauaagcugacugugca

SEQ ID NO: 2310107 - RNA, 19 nt, Artificial Sequence
  Description of Artificial Sequence: Synthetic oligonucleotide
ugccuccucaggauauuga

SEQ ID NO: 2310108 - RNA, 19 nt, Artificial Sequence
  Description of Artificial Sequence: Synthetic oligonucleotide
ugguguuagugacuuccau

SEQ ID NO: 2310109 - RNA, 19 nt, Artificial Sequence
  Description of Artificial Sequence: Synthetic oligonucleotide
guggaaucagucccuucug

SEQ ID NO: 2310110 - RNA, 19 nt, Artificial Sequence
  Description of Artificial Sequence: Synthetic oligonucleotide
gaucccauaccuacagcca

SEQ ID NO: 2310111 - RNA, 19 nt, Artificial Sequence
  Description of Artificial Sequence: Synthetic oligonucleotide
ccaggaagagaagaaauac

SEQ ID NO: 2310112 - RNA, 19 nt, Artificial Sequence
  Description of Artificial Sequence: Synthetic oligonucleotide
ugaucugggccagggaagu

SEQ ID NO: 2310113 - RNA, 19 nt, Artificial Sequence
  Description of Artificial Sequence: Synthetic oligonucleotide
uauugaccuuggcuuguaa

SEQ ID NO: 2310114 - RNA, 19 nt, Artificial Sequence
  Description of Artificial Sequence: Synthetic oligonucleotide
caggccauacugguguuag

SEQ ID NO: 2310115 - RNA, 19 nt, Artificial Sequence
  Description of Artificial Sequence: Synthetic oligonucleotide
acagccaaguucaaggcua

SEQ ID NO: 2310116 - RNA, 19 nt, Artificial Sequence
  Description of Artificial Sequence: Synthetic oligonucleotide
cauaacguuucaggauccc

SEQ ID NO: 2310117 - RNA, 19 nt, Artificial Sequence
  Description of Artificial Sequence: Synthetic oligonucleotide
uuguggguuuguucauuac

SEQ ID NO: 2310118 - RNA, 19 nt, Artificial Sequence
  Description of Artificial Sequence: Synthetic oligonucleotide
uggggaggucuuucaagga

SEQ ID NO: 2310119 - RNA, 19 nt, Artificial Sequence
  Description of Artificial Sequence: Synthetic oligonucleotide
gugaccagccugcagccac

SEQ ID NO: 2310120 - RNA, 19 nt, Artificial Sequence
  Description of Artificial Sequence: Synthetic oligonucleotide
caggauauugaccuuggcu

SEQ ID NO: 2310121 - RNA, 19 nt, Artificial Sequence
  Description of Artificial Sequence: Synthetic oligonucleotide
auggacucaggccuagaua

SEQ ID NO: 2310122 - RNA, 19 nt, Artificial Sequence
  Description of Artificial Sequence: Synthetic oligonucleotide
aggccuaacaggccauacu

SEQ ID NO: 2310123 - RNA, 19 nt, Artificial Sequence
  Description of Artificial Sequence: Synthetic oligonucleotide
auacugguguuagugacuu

SEQ ID NO: 2310124 - RNA, 19 nt, Artificial Sequence
  Description of Artificial Sequence: Synthetic oligonucleotide
gacucugcggagcuacaga

SEQ ID NO: 2310125 - RNA, 19 nt, Artificial Sequence
  Description of Artificial Sequence: Synthetic oligonucleotide
gcaaaggccuaacaggcca

SEQ ID NO: 2310126 - RNA, 19 nt, Artificial Sequence
  Description of Artificial Sequence: Synthetic oligonucleotide
auacaggugccucccacuu

SEQ ID NO: 2310127 - RNA, 19 nt, Artificial Sequence
  Description of Artificial Sequence: Synthetic oligonucleotide
ugaugugugucagccaguu

SEQ ID NO: 2310128 - RNA, 19 nt, Artificial Sequence
  Description of Artificial Sequence: Synthetic oligonucleotide
ccuagauagguccucagga

SEQ ID NO: 2310129 - RNA, 19 nt, Artificial Sequence
  Description of Artificial Sequence: Synthetic oligonucleotide
augaaucaauaccgacgcu

SEQ ID NO: 2310130 - RNA, 19 nt, Artificial Sequence
  Description of Artificial Sequence: Synthetic oligonucleotide
cugcggagcuacagaaggc

SEQ ID NO: 2310131 - RNA, 19 nt, Artificial Sequence
  Description of Artificial Sequence: Synthetic oligonucleotide
gaaauacaggugccuccca

SEQ ID NO: 2310132 - RNA, 19 nt, Artificial Sequence
  Description of Artificial Sequence: Synthetic oligonucleotide
uguuagugacuuccaucuu

SEQ ID NO: 2310133 - RNA, 19 nt, Artificial Sequence
  Description of Artificial Sequence: Synthetic oligonucleotide
caauucggccaacugccuc

SEQ ID NO: 2310134 - RNA, 19 nt, Artificial Sequence
  Description of Artificial Sequence: Synthetic oligonucleotide
cguaggaaaauuccuuccc

SEQ ID NO: 2310135 - RNA, 19 nt, Artificial Sequence
  Description of Artificial Sequence: Synthetic oligonucleotide
uccuucccauagcuggaga

SEQ ID NO: 2310136 - RNA, 19 nt, Artificial Sequence
  Description of Artificial Sequence: Synthetic oligonucleotide
agcuugccgagccaucggu

SEQ ID NO: 2310137 - RNA, 19 nt, Artificial Sequence
  Description of Artificial Sequence: Synthetic oligonucleotide
ugccucccacuucugcuug

SEQ ID NO: 2310138 - RNA, 19 nt, Artificial Sequence
  Description of Artificial Sequence: Synthetic oligonucleotide
uuucaaggacucucucgua

SEQ ID NO: 2310139 - RNA, 19 nt, Artificial Sequence
  Description of Artificial Sequence: Synthetic oligonucleotide
ggccauacugguguuagug

SEQ ID NO: 2310140 - RNA, 19 nt, Artificial Sequence
  Description of Artificial Sequence: Synthetic oligonucleotide
cacaguccaggaagagaag

SEQ ID NO: 2310141 - RNA, 19 nt, Artificial Sequence
  Description of Artificial Sequence: Synthetic oligonucleotide
ugcuccaacguaggaaaau

SEQ ID NO: 2310142 - RNA, 19 nt, Artificial Sequence
  Description of Artificial Sequence: Synthetic oligonucleotide
uugccgagccaucggucca

SEQ ID NO: 2310143 - RNA, 19 nt, Artificial Sequence
  Description of Artificial Sequence: Synthetic oligonucleotide
aaggccagaugaccaggua

SEQ ID NO: 2310144 - RNA, 19 nt, Artificial Sequence
  Description of Artificial Sequence: Synthetic oligonucleotide
gucaaugcacugggcagcc

SEQ ID NO: 2310145 - RNA, 19 nt, Artificial Sequence
  Description of Artificial Sequence: Synthetic oligonucleotide
ggggaggucuuucaaggac

SEQ ID NO: 2310146 - RNA, 19 nt, Artificial Sequence
  Description of Artificial Sequence: Synthetic oligonucleotide
agacucugcggagcuacag

SEQ ID NO: 2310147 - RNA, 19 nt, Artificial Sequence
  Description of Artificial Sequence: Synthetic oligonucleotide
acucaggccuagauagguc

SEQ ID NO: 2310148 - RNA, 19 nt, Artificial Sequence
  Description of Artificial Sequence: Synthetic oligonucleotide
ugaugagaaagugcucauu

SEQ ID NO: 2310149 - RNA, 19 nt, Artificial Sequence
  Description of Artificial Sequence: Synthetic oligonucleotide
aaugggugaccagccugca

SEQ ID NO: 2310150 - RNA, 19 nt, Artificial Sequence
  Description of Artificial Sequence: Synthetic oligonucleotide
augggugaccagccugcag

SEQ ID NO: 2310151 - RNA, 19 nt, Artificial Sequence
  Description of Artificial Sequence: Synthetic oligonucleotide
cacacacaguccaggaaga

SEQ ID NO: 2310152 - RNA, 19 nt, Artificial Sequence
  Description of Artificial Sequence: Synthetic oligonucleotide
ucccauagcuggagacucu

SEQ ID NO: 2310153 - RNA, 19 nt, Artificial Sequence
  Description of Artificial Sequence: Synthetic oligonucleotide
cuuucuaucagggccucaa

SEQ ID NO: 2310154 - RNA, 19 nt, Artificial Sequence
  Description of Artificial Sequence: Synthetic oligonucleotide
ucguagcccauccucuguu

SEQ ID NO: 2310155 - RNA, 19 nt, Artificial Sequence
  Description of Artificial Sequence: Synthetic oligonucleotide
uacaggugccucccacuuc

SEQ ID NO: 2310156 - RNA, 19 nt, Artificial Sequence
  Description of Artificial Sequence: Synthetic oligonucleotide
caaaauccauaacguuuca

SEQ ID NO: 2310157 - RNA, 19 nt, Artificial Sequence
  Description of Artificial Sequence: Synthetic oligonucleotide
caauaccgacgcucccucc

SEQ ID NO: 2310158 - RNA, 19 nt, Artificial Sequence
  Description of Artificial Sequence: Synthetic oligonucleotide
gcuugcuguugcaauaagc

SEQ ID NO: 2310159 - RNA, 19 nt, Artificial Sequence
  Description of Artificial Sequence: Synthetic oligonucleotide
ccauaacguuucaggaucc

SEQ ID NO: 2310160 - RNA, 19 nt, Artificial Sequence
  Description of Artificial Sequence: Synthetic oligonucleotide
gagauggacucaggccuag

SEQ ID NO: 2310161 - RNA, 19 nt, Artificial Sequence
  Description of Artificial Sequence: Synthetic oligonucleotide
auaccgacgcucccucccu

SEQ ID NO: 2310162 - RNA, 19 nt, Artificial Sequence
  Description of Artificial Sequence: Synthetic oligonucleotide
ucccucccugucaaugcac

SEQ ID NO: 2310163 - RNA, 19 nt, Artificial Sequence
  Description of Artificial Sequence: Synthetic oligonucleotide
cccaugaaucaauaccgac

SEQ ID NO: 2310164 - RNA, 19 nt, Artificial Sequence
  Description of Artificial Sequence: Synthetic oligonucleotide
aacaggccauacugguguu

SEQ ID NO: 2310165 - RNA, 19 nt, Artificial Sequence
  Description of Artificial Sequence: Synthetic oligonucleotide
cagggccucaaagccacgg

SEQ ID NO: 2310166 - RNA, 19 nt, Artificial Sequence
  Description of Artificial Sequence: Synthetic oligonucleotide
cuacuguguacagugaacu

SEQ ID NO: 2310167 - RNA, 19 nt, Artificial Sequence
  Description of Artificial Sequence: Synthetic oligonucleotide
auagguccucaggacaggu

SEQ ID NO: 2310168 - RNA, 19 nt, Artificial Sequence
  Description of Artificial Sequence: Synthetic oligonucleotide
gauggacucaggccuagau

SEQ ID NO: 2310169 - RNA, 19 nt, Artificial Sequence
  Description of Artificial Sequence: Synthetic oligonucleotide
ucucgguuccaggaugauc

SEQ ID NO: 2310170 - RNA, 19 nt, Artificial Sequence
  Description of Artificial Sequence: Synthetic oligonucleotide
ucgguuccaggaugaucug

SEQ ID NO: 2310171 - RNA, 19 nt, Artificial Sequence
  Description of Artificial Sequence: Synthetic oligonucleotide
agcugacugugcacagcgc

SEQ ID NO: 2310172 - RNA, 19 nt, Artificial Sequence
  Description of Artificial Sequence: Synthetic oligonucleotide
gaacugccggaggaucugc

SEQ ID NO: 2310173 - RNA, 19 nt, Artificial Sequence
  Description of Artificial Sequence: Synthetic oligonucleotide
cagccacucucuuucuauc

SEQ ID NO: 2310174 - RNA, 19 nt, Artificial Sequence
  Description of Artificial Sequence: Synthetic oligonucleotide
ccugucaaugcacugggca

SEQ ID NO: 2310175 - RNA, 19 nt, Artificial Sequence
  Description of Artificial Sequence: Synthetic oligonucleotide
ccucuguuuccaauucggc

SEQ ID NO: 2310176 - RNA, 19 nt, Artificial Sequence
  Description of Artificial Sequence: Synthetic oligonucleotide
caaagagcaugaugagaaa

SEQ ID NO: 2310177 - RNA, 19 nt, Artificial Sequence
  Description of Artificial Sequence: Synthetic oligonucleotide
gacgcucccucccugucaa

SEQ ID NO: 2310178 - RNA, 19 nt, Artificial Sequence
  Description of Artificial Sequence: Synthetic oligonucleotide
gcugcaaaauccauaacgu

SEQ ID NO: 2310179 - RNA, 19 nt, Artificial Sequence
  Description of Artificial Sequence: Synthetic oligonucleotide
ggagacucugcggagcuac

SEQ ID NO: 2310180 - RNA, 19 nt, Artificial Sequence
  Description of Artificial Sequence: Synthetic oligonucleotide
ccaucgguccauguugugg

SEQ ID NO: 2310181 - RNA, 19 nt, Artificial Sequence
  Description of Artificial Sequence: Synthetic oligonucleotide
gccuccucaggauauugac

SEQ ID NO: 2310182 - RNA, 19 nt, Artificial Sequence
  Description of Artificial Sequence: Synthetic oligonucleotide
ccuucccauagcuggagac

SEQ ID NO: 2310183 - RNA, 19 nt, Artificial Sequence
  Description of Artificial Sequence: Synthetic oligonucleotide
gacucaggccuagauaggu

SEQ ID NO: 2310184 - RNA, 19 nt, Artificial Sequence
  Description of Artificial Sequence: Synthetic oligonucleotide
cugguguuagugacuucca

SEQ ID NO: 2310185 - RNA, 19 nt, Artificial Sequence
  Description of Artificial Sequence: Synthetic oligonucleotide
ccacggaugguccugcuuc

SEQ ID NO: 2310186 - RNA, 19 nt, Artificial Sequence
  Description of Artificial Sequence: Synthetic oligonucleotide
caacguaggaaaauuccuu

SEQ ID NO: 2310187 - RNA, 19 nt, Artificial Sequence
  Description of Artificial Sequence: Synthetic oligonucleotide
gcuacuguguacagugaac

SEQ ID NO: 2310188 - RNA, 19 nt, Artificial Sequence
  Description of Artificial Sequence: Synthetic oligonucleotide
ucuuucuaucagggccuca

SEQ ID NO: 2310189 - RNA, 19 nt, Artificial Sequence
  Description of Artificial Sequence: Synthetic oligonucleotide
uaccgacgcucccucccug

SEQ ID NO: 2310190 - RNA, 19 nt, Artificial Sequence
  Description of Artificial Sequence: Synthetic oligonucleotide
ccauguuguggguuuguuc

SEQ ID NO: 2310191 - RNA, 19 nt, Artificial Sequence
  Description of Artificial Sequence: Synthetic oligonucleotide
gugugucagccaguuggag

SEQ ID NO: 2310192 - RNA, 19 nt, Artificial Sequence
  Description of Artificial Sequence: Synthetic oligonucleotide
cugcagcguggaaucaguc

SEQ ID NO: 2310193 - RNA, 19 nt, Artificial Sequence
  Description of Artificial Sequence: Synthetic oligonucleotide
gagcaggggaacugccgga

SEQ ID NO: 2310194 - RNA, 19 nt, Artificial Sequence
  Description of Artificial Sequence: Synthetic oligonucleotide
augaccagguaagcaugcu

SEQ ID NO: 2310195 - RNA, 19 nt, Artificial Sequence
  Description of Artificial Sequence: Synthetic oligonucleotide
gaugguccugcuucucggu

SEQ ID NO: 2310196 - RNA, 19 nt, Artificial Sequence
  Description of Artificial Sequence: Synthetic oligonucleotide
gcucccucccugucaaugc

SEQ ID NO: 2310197 - RNA, 19 nt, Artificial Sequence
  Description of Artificial Sequence: Synthetic oligonucleotide
agguggggaggucuuucaa

SEQ ID NO: 2310198 - RNA, 19 nt, Artificial Sequence
  Description of Artificial Sequence: Synthetic oligonucleotide
aggccuagauagguccuca

SEQ ID NO: 2310199 - RNA, 19 nt, Artificial Sequence
  Description of Artificial Sequence: Synthetic oligonucleotide
accgacgcucccucccugu

SEQ ID NO: 2310200 - RNA, 19 nt, Artificial Sequence
  Description of Artificial Sequence: Synthetic oligonucleotide
aggcgguggucagaaucuc

SEQ ID NO: 2310201 - RNA, 19 nt, Artificial Sequence
  Description of Artificial Sequence: Synthetic oligonucleotide
cagaaucuccuugaugugu

SEQ ID NO: 2310202 - RNA, 19 nt, Artificial Sequence
  Description of Artificial Sequence: Synthetic oligonucleotide
cucucguagcccauccucu

SEQ ID NO: 2310203 - RNA, 19 nt, Artificial Sequence
  Description of Artificial Sequence: Synthetic oligonucleotide
agccaucgguccauguugu

SEQ ID NO: 2310204 - RNA, 19 nt, Artificial Sequence
  Description of Artificial Sequence: Synthetic oligonucleotide
aagcaugcucaaagagcau

SEQ ID NO: 2310205 - RNA, 19 nt, Artificial Sequence
  Description of Artificial Sequence: Synthetic oligonucleotide
gccaguuggaggccuccag

SEQ ID NO: 2310206 - RNA, 19 nt, Artificial Sequence
  Description of Artificial Sequence: Synthetic oligonucleotide
ggacucaggccuagauagg

SEQ ID NO: 2310207 - RNA, 19 nt, Artificial Sequence
  Description of Artificial Sequence: Synthetic oligonucleotide
ggccuagauagguccucag

SEQ ID NO: 2310208 - RNA, 19 nt, Artificial Sequence
  Description of Artificial Sequence: Synthetic oligonucleotide
uacugguguuagugacuuc

SEQ ID NO: 2310209 - RNA, 19 nt, Artificial Sequence
  Description of Artificial Sequence: Synthetic oligonucleotide
gcuguuggaaugggugacc

SEQ ID NO: 2310210 - RNA, 19 nt, Artificial Sequence
  Description of Artificial Sequence: Synthetic oligonucleotide
aggccauacugguguuagu

SEQ ID NO: 2310211 - RNA, 19 nt, Artificial Sequence
  Description of Artificial Sequence: Synthetic oligonucleotide
gcucccaaagcaaaggccu

SEQ ID NO: 2310212 - RNA, 19 nt, Artificial Sequence
  Description of Artificial Sequence: Synthetic oligonucleotide
gcuggagacucugcggagc

SEQ ID NO: 2310213 - RNA, 19 nt, Artificial Sequence
  Description of Artificial Sequence: Synthetic oligonucleotide
cugcaaaauccauaacguu

SEQ ID NO: 2310214 - RNA, 19 nt, Artificial Sequence
  Description of Artificial Sequence: Synthetic oligonucleotide
ccaacguaggaaaauuccu

SEQ ID NO: 2310215 - RNA, 19 nt, Artificial Sequence
  Description of Artificial Sequence: Synthetic oligonucleotide
ccagauacuuagaggaucu

SEQ ID NO: 2310216 - RNA, 19 nt, Artificial Sequence
  Description of Artificial Sequence: Synthetic oligonucleotide
cucuuucuaucagggccuc

SEQ ID NO: 2310217 - RNA, 19 nt, Artificial Sequence
  Description of Artificial Sequence: Synthetic oligonucleotide
cagguggggaggucuuuca

SEQ ID NO: 2310218 - RNA, 19 nt, Artificial Sequence
  Description of Artificial Sequence: Synthetic oligonucleotide
ggaggucuuucaaggacuc

SEQ ID NO: 2310219 - RNA, 19 nt, Artificial Sequence
  Description of Artificial Sequence: Synthetic oligonucleotide
agagauggacucaggccua

SEQ ID NO: 2310220 - RNA, 19 nt, Artificial Sequence
  Description of Artificial Sequence: Synthetic oligonucleotide
cauaugcuucauccagaua

SEQ ID NO: 2310221 - RNA, 19 nt, Artificial Sequence
  Description of Artificial Sequence: Synthetic oligonucleotide
caggccuagauagguccuc

SEQ ID NO: 2310222 - RNA, 19 nt, Artificial Sequence
  Description of Artificial Sequence: Synthetic oligonucleotide
gcgcuguuggaauggguga

SEQ ID NO: 2310223 - RNA, 19 nt, Artificial Sequence
  Description of Artificial Sequence: Synthetic oligonucleotide
cugggcagccaggcaggcg

SEQ ID NO: 2310224 - RNA, 19 nt, Artificial Sequence
  Description of Artificial Sequence: Synthetic oligonucleotide
cggaugguccugcuucucg

SEQ ID NO: 2310225 - RNA, 19 nt, Artificial Sequence
  Description of Artificial Sequence: Synthetic oligonucleotide
cuuagaggaucugcuccaa

SEQ ID NO: 2310226 - RNA, 19 nt, Artificial Sequence
  Description of Artificial Sequence: Synthetic oligonucleotide
cuucccauagcuggagacu

SEQ ID NO: 2310227 - RNA, 19 nt, Artificial Sequence
  Description of Artificial Sequence: Synthetic oligonucleotide
cucccaaagcaaaggccua

SEQ ID NO: 2310228 - RNA, 19 nt, Artificial Sequence
  Description of Artificial Sequence: Synthetic oligonucleotide
gccagaugaccagguaagc

SEQ ID NO: 2310229 - RNA, 19 nt, Artificial Sequence
  Description of Artificial Sequence: Synthetic oligonucleotide
ggaugaucugggccaggga

SEQ ID NO: 2310230 - RNA, 19 nt, Artificial Sequence
  Description of Artificial Sequence: Synthetic oligonucleotide
aggcaggcgguggucagaa

SEQ ID NO: 2310231 - RNA, 19 nt, Artificial Sequence
  Description of Artificial Sequence: Synthetic oligonucleotide
aggggaacugccggaggau

SEQ ID NO: 2310232 - RNA, 19 nt, Artificial Sequence
  Description of Artificial Sequence: Synthetic oligonucleotide
ggaggaucugccacacaca

SEQ ID NO: 2310233 - RNA, 19 nt, Artificial Sequence
  Description of Artificial Sequence: Synthetic oligonucleotide
agauggacucaggccuaga

SEQ ID NO: 2310234 - RNA, 19 nt, Artificial Sequence
  Description of Artificial Sequence: Synthetic oligonucleotide
uucucgguuccaggaugau

SEQ ID NO: 2310235 - RNA, 19 nt, Artificial Sequence
  Description of Artificial Sequence: Synthetic oligonucleotide
gagacucugcggagcuaca

SEQ ID NO: 2310236 - RNA, 19 nt, Artificial Sequence
  Description of Artificial Sequence: Synthetic oligonucleotide
cuggagacucugcggagcu

SEQ ID NO: 2310237 - RNA, 19 nt, Artificial Sequence
  Description of Artificial Sequence: Synthetic oligonucleotide
caaagccacggaugguccu

SEQ ID NO: 2310238 - RNA, 19 nt, Artificial Sequence
  Description of Artificial Sequence: Synthetic oligonucleotide
gcaugaugagaaagugcuc

SEQ ID NO: 2310239 - RNA, 19 nt, Artificial Sequence
  Description of Artificial Sequence: Synthetic oligonucleotide
agccacggaugguccugcu

SEQ ID NO: 2310240 - RNA, 19 nt, Artificial Sequence
  Description of Artificial Sequence: Synthetic oligonucleotide
gggaggucuuucaaggacu

SEQ ID NO: 2310241 - RNA, 19 nt, Artificial Sequence
  Description of Artificial Sequence: Synthetic oligonucleotide
ugccgagccaucgguccau

SEQ ID NO: 2310242 - RNA, 19 nt, Artificial Sequence
  Description of Artificial Sequence: Synthetic oligonucleotide
cugcuccaacguaggaaaa

SEQ ID NO: 2310243 - RNA, 19 nt, Artificial Sequence
  Description of Artificial Sequence: Synthetic oligonucleotide
agcguggaaucagucccuu

SEQ ID NO: 2310244 - RNA, 19 nt, Artificial Sequence
  Description of Artificial Sequence: Synthetic oligonucleotide
gcagccacucucuuucuau

SEQ ID NO: 2310245 - RNA, 19 nt, Artificial Sequence
  Description of Artificial Sequence: Synthetic oligonucleotide
uucggccaacugccuccuc

SEQ ID NO: 2310246 - RNA, 19 nt, Artificial Sequence
  Description of Artificial Sequence: Synthetic oligonucleotide
uggagacucugcggagcua

SEQ ID NO: 2310247 - RNA, 19 nt, Artificial Sequence
  Description of Artificial Sequence: Synthetic oligonucleotide
cucguagcccauccucugu

SEQ ID NO: 2310248 - RNA, 19 nt, Artificial Sequence
  Description of Artificial Sequence: Synthetic oligonucleotide
ggggaacugccggaggauc

SEQ ID NO: 2310249 - RNA, 19 nt, Artificial Sequence
  Description of Artificial Sequence: Synthetic oligonucleotide
gccaucgguccauguugug

SEQ ID NO: 2310250 - RNA, 19 nt, Artificial Sequence
  Description of Artificial Sequence: Synthetic oligonucleotide
cagcguggaaucagucccu

SEQ ID NO: 2310251 - RNA, 19 nt, Artificial Sequence
  Description of Artificial Sequence: Synthetic oligonucleotide
gcggagcuacagaaggcca

SEQ ID NO: 2310252 - RNA, 19 nt, Artificial Sequence
  Description of Artificial Sequence: Synthetic oligonucleotide
gcuugccgagccaucgguc

SEQ ID NO: 2310253 - RNA, 19 nt, Artificial Sequence
  Description of Artificial Sequence: Synthetic oligonucleotide
gggccucaaagccacggau

SEQ ID NO: 2310254 - RNA, 19 nt, Artificial Sequence
  Description of Artificial Sequence: Synthetic oligonucleotide
gcuccaacguaggaaaauu

SEQ ID NO: 2310255 - RNA, 19 nt, Artificial Sequence
  Description of Artificial Sequence: Synthetic oligonucleotide
gcguggaaucagucccuuc

SEQ ID NO: 2310256 - RNA, 19 nt, Artificial Sequence
  Description of Artificial Sequence: Synthetic oligonucleotide
gccggaggaucugccacac

SEQ ID NO: 2310257 - RNA, 19 nt, Artificial Sequence
  Description of Artificial Sequence: Synthetic oligonucleotide
cagcgcuguuggaaugggu

SEQ ID NO: 2310258 - RNA, 19 nt, Artificial Sequence
  Description of Artificial Sequence: Synthetic oligonucleotide
gggaagucaccugcagcgu

SEQ ID NO: 2310259 - RNA, 19 nt, Artificial Sequence
  Description of Artificial Sequence: Synthetic oligonucleotide
ccaauucggccaacugccu

SEQ ID NO: 2310260 - RNA, 19 nt, Artificial Sequence
  Description of Artificial Sequence: Synthetic oligonucleotide
ccgacgcucccucccuguc

SEQ ID NO: 2310261 - RNA, 19 nt, Artificial Sequence
  Description of Artificial Sequence: Synthetic oligonucleotide
cccucccugucaaugcacu

SEQ ID NO: 2310262 - RNA, 19 nt, Artificial Sequence
  Description of Artificial Sequence: Synthetic oligonucleotide
cuguugcaauaagcugacu

SEQ ID NO: 2310263 - RNA, 19 nt, Artificial Sequence
  Description of Artificial Sequence: Synthetic oligonucleotide
gccgagccaucgguccaug

SEQ ID NO: 2310264 - RNA, 19 nt, Artificial Sequence
  Description of Artificial Sequence: Synthetic oligonucleotide
cccauaccuacagccaagu

SEQ ID NO: 2310265 - RNA, 19 nt, Artificial Sequence
  Description of Artificial Sequence: Synthetic oligonucleotide
cgacgcucccucccuguca

SEQ ID NO: 2310266 - RNA, 19 nt, Artificial Sequence
  Description of Artificial Sequence: Synthetic oligonucleotide
gccacggaugguccugcuu

SEQ ID NO: 2310267 - RNA, 19 nt, Artificial Sequence
  Description of Artificial Sequence: Synthetic oligonucleotide
cgagccaucgguccauguu

SEQ ID NO: 2310268 - RNA, 19 nt, Artificial Sequence
  Description of Artificial Sequence: Synthetic oligonucleotide
ccauaccuacagccaaguu

SEQ ID NO: 2310269 - RNA, 19 nt, Artificial Sequence
  Description of Artificial Sequence: Synthetic oligonucleotide
ccggaggaucugccacaca

SEQ ID NO: 2310270 - RNA, 19 nt, Artificial Sequence
  Description of Artificial Sequence: Synthetic oligonucleotide
cguagcccauccucuguuu

SEQ ID NO: 2310271 - RNA, 19 nt, Artificial Sequence
  Description of Artificial Sequence: Synthetic oligonucleotide
ccgagccaucgguccaugu

SEQ ID NO: 2310272 - RNA, 19 nt, Artificial Sequence
  Description of Artificial Sequence: Synthetic oligonucleotide
ggcaggcgguggucagaau

SEQ ID NO: 2310273 - RNA, 19 nt, Artificial Sequence
  Description of Artificial Sequence: Synthetic oligonucleotide
gggcagccaggcaggcggu

SEQ ID NO: 2310274 - RNA, 19 nt, Artificial Sequence
  Description of Artificial Sequence: Synthetic oligonucleotide
aaauuuguagcccauguac

SEQ ID NO: 2310275 - RNA, 19 nt, Artificial Sequence
  Description of Artificial Sequence: Synthetic oligonucleotide
uuaaggaacagacgaaacc

SEQ ID NO: 2310276 - RNA, 19 nt, Artificial Sequence
  Description of Artificial Sequence: Synthetic oligonucleotide
uguuaaccuccccagaggg

SEQ ID NO: 2310277 - RNA, 19 nt, Artificial Sequence
  Description of Artificial Sequence: Synthetic oligonucleotide
cauuucaggagcuugugcc

SEQ ID NO: 2310278 - RNA, 19 nt, Artificial Sequence
  Description of Artificial Sequence: Synthetic oligonucleotide
cacguuuucaaacaucucc

SEQ ID NO: 2310279 - RNA, 19 nt, Artificial Sequence
  Description of Artificial Sequence: Synthetic oligonucleotide
uacagugucccuuggaacc

SEQ ID NO: 2310280 - RNA, 19 nt, Artificial Sequence
  Description of Artificial Sequence: Synthetic oligonucleotide
aacccagcggagcaggugg

SEQ ID NO: 2310281 - RNA, 19 nt, Artificial Sequence
  Description of Artificial Sequence: Synthetic oligonucleotide
uguagaagcuccuccacug

SEQ ID NO: 2310282 - RNA, 19 nt, Artificial Sequence
  Description of Artificial Sequence: Synthetic oligonucleotide
uguaguagcgcagcgcucg

SEQ ID NO: 2310283 - RNA, 19 nt, Artificial Sequence
  Description of Artificial Sequence: Synthetic oligonucleotide
uguacugcucaaaauuugu

SEQ ID NO: 2310284 - RNA, 19 nt, Artificial Sequence
  Description of Artificial Sequence: Synthetic oligonucleotide
ugugcguccagggagaagc

SEQ ID NO: 2310285 - RNA, 19 nt, Artificial Sequence
  Description of Artificial Sequence: Synthetic oligonucleotide
agggguuccagccaucccg

SEQ ID NO: 2310286 - RNA, 19 nt, Artificial Sequence
  Description of Artificial Sequence: Synthetic oligonucleotide
aaagucggggcccgggccg

SEQ ID NO: 2310287 - RNA, 19 nt, Artificial Sequence
  Description of Artificial Sequence: Synthetic oligonucleotide
aaaauuuguagcccaugua

SEQ ID NO: 2310288 - RNA, 19 nt, Artificial Sequence
  Description of Artificial Sequence: Synthetic oligonucleotide
agcgacgacaugugggacc

SEQ ID NO: 2310289 - RNA, 19 nt, Artificial Sequence
  Description of Artificial Sequence: Synthetic oligonucleotide
cucacuuagguacaguguc

SEQ ID NO: 2310290 - RNA, 19 nt, Artificial Sequence
  Description of Artificial Sequence: Synthetic oligonucleotide
auccccgugguacuggcgc

SEQ ID NO: 2310291 - RNA, 19 nt, Artificial Sequence
  Description of Artificial Sequence: Synthetic oligonucleotide
uuagguacagugucccuug

SEQ ID NO: 2310292 - RNA, 19 nt, Artificial Sequence
  Description of Artificial Sequence: Synthetic oligonucleotide
cuccaccucacuuagguac

SEQ ID NO: 2310293 - RNA, 19 nt, Artificial Sequence
  Description of Artificial Sequence: Synthetic oligonucleotide
aagcagcccaguucggacg

SEQ ID NO: 2310294 - RNA, 19 nt, Artificial Sequence
  Description of Artificial Sequence: Synthetic oligonucleotide
gugucgguguuccagaacc

SEQ ID NO: 2310295 - RNA, 19 nt, Artificial Sequence
  Description of Artificial Sequence: Synthetic oligonucleotide
caaacaucuccaugguagg

SEQ ID NO: 2310296 - RNA, 19 nt, Artificial Sequence
  Description of Artificial Sequence: Synthetic oligonucleotide
ucuccggagaagagcaggg

SEQ ID NO: 2310297 - RNA, 19 nt, Artificial Sequence
  Description of Artificial Sequence: Synthetic oligonucleotide
ucacuuagguacagugucc

SEQ ID NO: 2310298 - RNA, 19 nt, Artificial Sequence
  Description of Artificial Sequence: Synthetic oligonucleotide
guagggaagggucuuuaag

SEQ ID NO: 2310299 - RNA, 19 nt, Artificial Sequence
  Description of Artificial Sequence: Synthetic oligonucleotide
uuaaccuccccagaggggu

SEQ ID NO: 2310300 - RNA, 19 nt, Artificial Sequence
  Description of Artificial Sequence: Synthetic oligonucleotide
uccaugguagggaaggguc

SEQ ID NO: 2310301 - RNA, 19 nt, Artificial Sequence
  Description of Artificial Sequence: Synthetic oligonucleotide
accucacuuagguacagug

SEQ ID NO: 2310302 - RNA, 19 nt, Artificial Sequence
  Description of Artificial Sequence: Synthetic oligonucleotide
gaacggcccgaguacagcg

SEQ ID NO: 2310303 - RNA, 19 nt, Artificial Sequence
  Description of Artificial Sequence: Synthetic oligonucleotide
cacguugguguuaaccucc

SEQ ID NO: 2310304 - RNA, 19 nt, Artificial Sequence
  Description of Artificial Sequence: Synthetic oligonucleotide
ugucccuuggaaccgcgag

SEQ ID NO: 2310305 - RNA, 19 nt, Artificial Sequence
  Description of Artificial Sequence: Synthetic oligonucleotide
aacaucuccaugguaggga

SEQ ID NO: 2310306 - RNA, 19 nt, Artificial Sequence
  Description of Artificial Sequence: Synthetic oligonucleotide
auguacaugagcucccgga

SEQ ID NO: 2310307 - RNA, 19 nt, Artificial Sequence
  Description of Artificial Sequence: Synthetic oligonucleotide
agucagguguccucgccac

SEQ ID NO: 2310308 - RNA, 19 nt, Artificial Sequence
  Description of Artificial Sequence: Synthetic oligonucleotide
ugcucaaaauuuguagccc

SEQ ID NO: 2310309 - RNA, 19 nt, Artificial Sequence
  Description of Artificial Sequence: Synthetic oligonucleotide
gaacagacgaaacccucug

SEQ ID NO: 2310310 - RNA, 19 nt, Artificial Sequence
  Description of Artificial Sequence: Synthetic oligonucleotide
auuuguagcccauguacau

SEQ ID NO: 2310311 - RNA, 19 nt, Artificial Sequence
  Description of Artificial Sequence: Synthetic oligonucleotide
uccagaacccagcggagca

SEQ ID NO: 2310312 - RNA, 19 nt, Artificial Sequence
  Description of Artificial Sequence: Synthetic oligonucleotide
gguguuaaccuccccagag

SEQ ID NO: 2310313 - RNA, 19 nt, Artificial Sequence
  Description of Artificial Sequence: Synthetic oligonucleotide
uuagucagguguccucgcc

SEQ ID NO: 2310314 - RNA, 19 nt, Artificial Sequence
  Description of Artificial Sequence: Synthetic oligonucleotide
uucaugcacacagaggggu

SEQ ID NO: 2310315 - RNA, 19 nt, Artificial Sequence
  Description of Artificial Sequence: Synthetic oligonucleotide
guacaugagcucccggagg

SEQ ID NO: 2310316 - RNA, 19 nt, Artificial Sequence
  Description of Artificial Sequence: Synthetic oligonucleotide
aggggaacggcccgaguac

SEQ ID NO: 2310317 - RNA, 19 nt, Artificial Sequence
  Description of Artificial Sequence: Synthetic oligonucleotide
aaggggaacggcccgagua

SEQ ID NO: 2310318 - RNA, 19 nt, Artificial Sequence
  Description of Artificial Sequence: Synthetic oligonucleotide
ucgguguuccagaacccag

SEQ ID NO: 2310319 - RNA, 19 nt, Artificial Sequence
  Description of Artificial Sequence: Synthetic oligonucleotide
guagaagcuccuccacugg

SEQ ID NO: 2310320 - RNA, 19 nt, Artificial Sequence
  Description of Artificial Sequence: Synthetic oligonucleotide
agcuuagucagguguccuc

SEQ ID NO: 2310321 - RNA, 19 nt, Artificial Sequence
  Description of Artificial Sequence: Synthetic oligonucleotide
gacaugugggaccccuggg

SEQ ID NO: 2310322 - RNA, 19 nt, Artificial Sequence
  Description of Artificial Sequence: Synthetic oligonucleotide
cguagcacagagcagaagg

SEQ ID NO: 2310323 - RNA, 19 nt, Artificial Sequence
  Description of Artificial Sequence: Synthetic oligonucleotide
cugccagccagccuggacc

SEQ ID NO: 2310324 - RNA, 19 nt, Artificial Sequence
  Description of Artificial Sequence: Synthetic oligonucleotide
ucaaagucggggcccgggc

SEQ ID NO: 2310325 - RNA, 19 nt, Artificial Sequence
  Description of Artificial Sequence: Synthetic oligonucleotide
acacauguacugcucaaaa

SEQ ID NO: 2310326 - RNA, 19 nt, Artificial Sequence
  Description of Artificial Sequence: Synthetic oligonucleotide
gaagcagcccaguucggac

SEQ ID NO: 2310327 - RNA, 19 nt, Artificial Sequence
  Description of Artificial Sequence: Synthetic oligonucleotide
ugccucacguuuucaaaca

SEQ ID NO: 2310328 - RNA, 19 nt, Artificial Sequence
  Description of Artificial Sequence: Synthetic oligonucleotide
cuuggaggucuugaguucc

SEQ ID NO: 2310329 - RNA, 19 nt, Artificial Sequence
  Description of Artificial Sequence: Synthetic oligonucleotide
gggucuuuaaggaacagac

SEQ ID NO: 2310330 - RNA, 19 nt, Artificial Sequence
  Description of Artificial Sequence: Synthetic oligonucleotide
agggcugugcaucuccuug

SEQ ID NO: 2310331 - RNA, 19 nt, Artificial Sequence
  Description of Artificial Sequence: Synthetic oligonucleotide
agacgaaacccucuggguu

SEQ ID NO: 2310332 - RNA, 19 nt, Artificial Sequence
  Description of Artificial Sequence: Synthetic oligonucleotide
uagucagguguccucgcca

SEQ ID NO: 2310333 - RNA, 19 nt, Artificial Sequence
  Description of Artificial Sequence: Synthetic oligonucleotide
aaggaacagacgaaacccu

SEQ ID NO: 2310334 - RNA, 19 nt, Artificial Sequence
  Description of Artificial Sequence: Synthetic oligonucleotide
cucacguuuucaaacaucu

SEQ ID NO: 2310335 - RNA, 19 nt, Artificial Sequence
  Description of Artificial Sequence: Synthetic oligonucleotide
cacagaaguucaugcacac

SEQ ID NO: 2310336 - RNA, 19 nt, Artificial Sequence
  Description of Artificial Sequence: Synthetic oligonucleotide
ucccuuggaaccgcgaggc

SEQ ID NO: 2310337 - RNA, 19 nt, Artificial Sequence
  Description of Artificial Sequence: Synthetic oligonucleotide
aggagcuugugccuguaga

SEQ ID NO: 2310338 - RNA, 19 nt, Artificial Sequence
  Description of Artificial Sequence: Synthetic oligonucleotide
cacgcaguccaccucuccg

SEQ ID NO: 2310339 - RNA, 19 nt, Artificial Sequence
  Description of Artificial Sequence: Synthetic oligonucleotide
cacuuagguacaguguccc

SEQ ID NO: 2310340 - RNA, 19 nt, Artificial Sequence
  Description of Artificial Sequence: Synthetic oligonucleotide
gguguuccagaacccagcg

SEQ ID NO: 2310341 - RNA, 19 nt, Artificial Sequence
  Description of Artificial Sequence: Synthetic oligonucleotide
acgcaguccaccucuccgg

SEQ ID NO: 2310342 - RNA, 19 nt, Artificial Sequence
  Description of Artificial Sequence: Synthetic oligonucleotide
gacgggcgccgguagaagg

SEQ ID NO: 2310343 - RNA, 19 nt, Artificial Sequence
  Description of Artificial Sequence: Synthetic oligonucleotide
aggguagccgucccugagg

SEQ ID NO: 2310344 - RNA, 19 nt, Artificial Sequence
  Description of Artificial Sequence: Synthetic oligonucleotide
ccacauagcaggcuggagg

SEQ ID NO: 2310345 - RNA, 19 nt, Artificial Sequence
  Description of Artificial Sequence: Synthetic oligonucleotide
uagguacagugucccuugg

SEQ ID NO: 2310346 - RNA, 19 nt, Artificial Sequence
  Description of Artificial Sequence: Synthetic oligonucleotide
guacagugucccuuggaac

SEQ ID NO: 2310347 - RNA, 19 nt, Artificial Sequence
  Description of Artificial Sequence: Synthetic oligonucleotide
cuuuaaggaacagacgaaa

SEQ ID NO: 2310348 - RNA, 19 nt, Artificial Sequence
  Description of Artificial Sequence: Synthetic oligonucleotide
cauacgguguggucagcag

SEQ ID NO: 2310349 - RNA, 19 nt, Artificial Sequence
  Description of Artificial Sequence: Synthetic oligonucleotide
ugucgguguuccagaaccc

SEQ ID NO: 2310350 - RNA, 19 nt, Artificial Sequence
  Description of Artificial Sequence: Synthetic oligonucleotide
aacggcccgaguacagcgc

SEQ ID NO: 2310351 - RNA, 19 nt, Artificial Sequence
  Description of Artificial Sequence: Synthetic oligonucleotide
cuuagucagguguccucgc

SEQ ID NO: 2310352 - RNA, 19 nt, Artificial Sequence
  Description of Artificial Sequence: Synthetic oligonucleotide
gugccucacguuuucaaac

SEQ ID NO: 2310353 - RNA, 19 nt, Artificial Sequence
  Description of Artificial Sequence: Synthetic oligonucleotide
ggaagggucuuuaaggaac

SEQ ID NO: 2310354 - RNA, 19 nt, Artificial Sequence
  Description of Artificial Sequence: Synthetic oligonucleotide
aggaacagacgaaacccuc

SEQ ID NO: 2310355 - RNA, 19 nt, Artificial Sequence
  Description of Artificial Sequence: Synthetic oligonucleotide
uaccucucaggguagccgu

SEQ ID NO: 2310356 - RNA, 19 nt, Artificial Sequence
  Description of Artificial Sequence: Synthetic oligonucleotide
acagugucccuuggaaccg

SEQ ID NO: 2310357 - RNA, 19 nt, Artificial Sequence
  Description of Artificial Sequence: Synthetic oligonucleotide
uacagcgcgggcuccgugc

SEQ ID NO: 2310358 - RNA, 19 nt, Artificial Sequence
  Description of Artificial Sequence: Synthetic oligonucleotide
guagcacagagcagaaggc

SEQ ID NO: 2310359 - RNA, 19 nt, Artificial Sequence
  Description of Artificial Sequence: Synthetic oligonucleotide
ucauacgguguggucagca

SEQ ID NO: 2310360 - RNA, 19 nt, Artificial Sequence
  Description of Artificial Sequence: Synthetic oligonucleotide
uccggguuugucugcacac

SEQ ID NO: 2310361 - RNA, 19 nt, Artificial Sequence
  Description of Artificial Sequence: Synthetic oligonucleotide
guaccucucaggguagccg

SEQ ID NO: 2310362 - RNA, 19 nt, Artificial Sequence
  Description of Artificial Sequence: Synthetic oligonucleotide
guagccgucccugagguca

SEQ ID NO: 2310363 - RNA, 19 nt, Artificial Sequence
  Description of Artificial Sequence: Synthetic oligonucleotide
agcagcuuagucagguguc

SEQ ID NO: 2310364 - RNA, 19 nt, Artificial Sequence
  Description of Artificial Sequence: Synthetic oligonucleotide
caaaauuuguagcccaugu

SEQ ID NO: 2310365 - RNA, 19 nt, Artificial Sequence
  Description of Artificial Sequence: Synthetic oligonucleotide
ggcugcguagcacagagca

SEQ ID NO: 2310366 - RNA, 19 nt, Artificial Sequence
  Description of Artificial Sequence: Synthetic oligonucleotide
cauguacaugagcucccgg

SEQ ID NO: 2310367 - RNA, 19 nt, Artificial Sequence
  Description of Artificial Sequence: Synthetic oligonucleotide
acgaaacccucuggguucc

SEQ ID NO: 2310368 - RNA, 19 nt, Artificial Sequence
  Description of Artificial Sequence: Synthetic oligonucleotide
guucaugcacacagagggg

SEQ ID NO: 2310369 - RNA, 19 nt, Artificial Sequence
  Description of Artificial Sequence: Synthetic oligonucleotide
ugggcccaccauuucagga

SEQ ID NO: 2310370 - RNA, 19 nt, Artificial Sequence
  Description of Artificial Sequence: Synthetic oligonucleotide
gaggucuugaguuccacau

SEQ ID NO: 2310371 - RNA, 19 nt, Artificial Sequence
  Description of Artificial Sequence: Synthetic oligonucleotide
cuggaggcuguguggacgc

SEQ ID NO: 2310372 - RNA, 19 nt, Artificial Sequence
  Description of Artificial Sequence: Synthetic oligonucleotide
acggcccgaguacagcgcg

SEQ ID NO: 2310373 - RNA, 19 nt, Artificial Sequence
  Description of Artificial Sequence: Synthetic oligonucleotide
aagggucuuuaaggaacag

SEQ ID NO: 2310374 - RNA, 19 nt, Artificial Sequence
  Description of Artificial Sequence: Synthetic oligonucleotide
gaagggucuuuaaggaaca

SEQ ID NO: 2310375 - RNA, 19 nt, Artificial Sequence
  Description of Artificial Sequence: Synthetic oligonucleotide
gaaacccucuggguuccgg

SEQ ID NO: 2310376 - RNA, 19 nt, Artificial Sequence
  Description of Artificial Sequence: Synthetic oligonucleotide
caaagucggggcccgggcc

SEQ ID NO: 2310377 - RNA, 19 nt, Artificial Sequence
  Description of Artificial Sequence: Synthetic oligonucleotide
gcuuagucagguguccucg

SEQ ID NO: 2310378 - RNA, 19 nt, Artificial Sequence
  Description of Artificial Sequence: Synthetic oligonucleotide
aacccucuggguuccggaa

SEQ ID NO: 2310379 - RNA, 19 nt, Artificial Sequence
  Description of Artificial Sequence: Synthetic oligonucleotide
gacugggcccaccauuuca

SEQ ID NO: 2310380 - RNA, 19 nt, Artificial Sequence
  Description of Artificial Sequence: Synthetic oligonucleotide
ggggugguuccccaggcgg

SEQ ID NO: 2310381 - RNA, 19 nt, Artificial Sequence
  Description of Artificial Sequence: Synthetic oligonucleotide
gguuugucugcacacaugu

SEQ ID NO: 2310382 - RNA, 19 nt, Artificial Sequence
  Description of Artificial Sequence: Synthetic oligonucleotide
ucacgcaguccaccucucc

SEQ ID NO: 2310383 - RNA, 19 nt, Artificial Sequence
  Description of Artificial Sequence: Synthetic oligonucleotide
uuggaggucuugaguucca

SEQ ID NO: 2310384 - RNA, 19 nt, Artificial Sequence
  Description of Artificial Sequence: Synthetic oligonucleotide
accucuccggagaagagca

SEQ ID NO: 2310385 - RNA, 19 nt, Artificial Sequence
  Description of Artificial Sequence: Synthetic oligonucleotide
uucggacgggcgccgguag

SEQ ID NO: 2310386 - RNA, 19 nt, Artificial Sequence
  Description of Artificial Sequence: Synthetic oligonucleotide
agggucuuuaaggaacaga

SEQ ID NO: 2310387 - RNA, 19 nt, Artificial Sequence
  Description of Artificial Sequence: Synthetic oligonucleotide
gcucauacgguguggucag

SEQ ID NO: 2310388 - RNA, 19 nt, Artificial Sequence
  Description of Artificial Sequence: Synthetic oligonucleotide
gggccgguaccucucaggg

SEQ ID NO: 2310389 - RNA, 19 nt, Artificial Sequence
  Description of Artificial Sequence: Synthetic oligonucleotide
uggcgcugugcguccaggg

SEQ ID NO: 2310390 - RNA, 19 nt, Artificial Sequence
  Description of Artificial Sequence: Synthetic oligonucleotide
agccucugcgcccgggccg

SEQ ID NO: 2310391 - RNA, 19 nt, Artificial Sequence
  Description of Artificial Sequence: Synthetic oligonucleotide
acugggcccaccauuucag

SEQ ID NO: 2310392 - RNA, 19 nt, Artificial Sequence
  Description of Artificial Sequence: Synthetic oligonucleotide
acguugguguuaaccuccc

SEQ ID NO: 2310393 - RNA, 19 nt, Artificial Sequence
  Description of Artificial Sequence: Synthetic oligonucleotide
ugcguagcacagagcagaa

SEQ ID NO: 2310394 - RNA, 19 nt, Artificial Sequence
  Description of Artificial Sequence: Synthetic oligonucleotide
ucccggucgugccucacgu

SEQ ID NO: 2310395 - RNA, 19 nt, Artificial Sequence
  Description of Artificial Sequence: Synthetic oligonucleotide
agccagcgacgacaugugg

SEQ ID NO: 2310396 - RNA, 19 nt, Artificial Sequence
  Description of Artificial Sequence: Synthetic oligonucleotide
gucuccaccucacuuaggu

SEQ ID NO: 2310397 - RNA, 19 nt, Artificial Sequence
  Description of Artificial Sequence: Synthetic oligonucleotide
accauuucaggagcuugug

SEQ ID NO: 2310398 - RNA, 19 nt, Artificial Sequence
  Description of Artificial Sequence: Synthetic oligonucleotide
ucgugccucacguuuucaa

SEQ ID NO: 2310399 - RNA, 19 nt, Artificial Sequence
  Description of Artificial Sequence: Synthetic oligonucleotide
cugcguagcacagagcaga

SEQ ID NO: 2310400 - RNA, 19 nt, Artificial Sequence
  Description of Artificial Sequence: Synthetic oligonucleotide
gucaaagucggggcccggg

SEQ ID NO: 2310401 - RNA, 19 nt, Artificial Sequence
  Description of Artificial Sequence: Synthetic oligonucleotide
cucgccacgucacgguggc

SEQ ID NO: 2310402 - RNA, 19 nt, Artificial Sequence
  Description of Artificial Sequence: Synthetic oligonucleotide
uuccggaagccagcgacga

SEQ ID NO: 2310403 - RNA, 19 nt, Artificial Sequence
  Description of Artificial Sequence: Synthetic oligonucleotide
gguguggucagcagcuuag

SEQ ID NO: 2310404 - RNA, 19 nt, Artificial Sequence
  Description of Artificial Sequence: Synthetic oligonucleotide
guaguagcgcagcgcucgg

SEQ ID NO: 2310405 - RNA, 19 nt, Artificial Sequence
  Description of Artificial Sequence: Synthetic oligonucleotide
aucccggucgugccucacg

SEQ ID NO: 2310406 - RNA, 19 nt, Artificial Sequence
  Description of Artificial Sequence: Synthetic oligonucleotide
uccugccgcucauacggug

SEQ ID NO: 2310407 - RNA, 19 nt, Artificial Sequence
  Description of Artificial Sequence: Synthetic oligonucleotide
cagcgcucgggcauccccg

SEQ ID NO: 2310408 - RNA, 19 nt, Artificial Sequence
  Description of Artificial Sequence: Synthetic oligonucleotide
ucaucccggggccgguacc

SEQ ID NO: 2310409 - RNA, 19 nt, Artificial Sequence
  Description of Artificial Sequence: Synthetic oligonucleotide
ugcguccagggagaagcag

SEQ ID NO: 2310410 - RNA, 19 nt, Artificial Sequence
  Description of Artificial Sequence: Synthetic oligonucleotide
gccagcgacgacauguggg

SEQ ID NO: 2310411 - RNA, 19 nt, Artificial Sequence
  Description of Artificial Sequence: Synthetic oligonucleotide
guucacgcaguccaccucu

SEQ ID NO: 2310412 - RNA, 19 nt, Artificial Sequence
  Description of Artificial Sequence: Synthetic oligonucleotide
gguacuggcgcugugcguc

SEQ ID NO: 2310413 - RNA, 19 nt, Artificial Sequence
  Description of Artificial Sequence: Synthetic oligonucleotide
ugguuccccaggcggcugc

SEQ ID NO: 2310414 - RNA, 19 nt, Artificial Sequence
  Description of Artificial Sequence: Synthetic oligonucleotide
cugcacacauguacugcuc

SEQ ID NO: 2310415 - RNA, 19 nt, Artificial Sequence
  Description of Artificial Sequence: Synthetic oligonucleotide
gggucuccaccucacuuag

SEQ ID NO: 2310416 - RNA, 19 nt, Artificial Sequence
  Description of Artificial Sequence: Synthetic oligonucleotide
guguccucgccacgucacg

SEQ ID NO: 2310417 - RNA, 19 nt, Artificial Sequence
  Description of Artificial Sequence: Synthetic oligonucleotide
gcggcugcguagcacagag

SEQ ID NO: 2310418 - RNA, 19 nt, Artificial Sequence
  Description of Artificial Sequence: Synthetic oligonucleotide
ggaaccgcgaggccgccag

SEQ ID NO: 2310419 - RNA, 19 nt, Artificial Sequence
  Description of Artificial Sequence: Synthetic oligonucleotide
gucagguguccucgccacg

SEQ ID NO: 2310420 - RNA, 19 nt, Artificial Sequence
  Description of Artificial Sequence: Synthetic oligonucleotide
gucacgguggccccugcca

SEQ ID NO: 2310421 - RNA, 19 nt, Artificial Sequence
  Description of Artificial Sequence: Synthetic oligonucleotide
uaguagcgcagcgcucggg

SEQ ID NO: 2310422 - RNA, 19 nt, Artificial Sequence
  Description of Artificial Sequence: Synthetic oligonucleotide
aaccgcgaggccgccagcu

SEQ ID NO: 2310423 - RNA, 19 nt, Artificial Sequence
  Description of Artificial Sequence: Synthetic oligonucleotide
gaacccagcggagcaggug

SEQ ID NO: 2310424 - RNA, 19 nt, Artificial Sequence
  Description of Artificial Sequence: Synthetic oligonucleotide
ggagcuugugccuguagaa

SEQ ID NO: 2310425 - RNA, 19 nt, Artificial Sequence
  Description of Artificial Sequence: Synthetic oligonucleotide
ccauuucaggagcuugugc

SEQ ID NO: 2310426 - RNA, 19 nt, Artificial Sequence
  Description of Artificial Sequence: Synthetic oligonucleotide
caggguagccgucccugag

SEQ ID NO: 2310427 - RNA, 19 nt, Artificial Sequence
  Description of Artificial Sequence: Synthetic oligonucleotide
ggccuggcgagccucugcg

SEQ ID NO: 2310428 - RNA, 19 nt, Artificial Sequence
  Description of Artificial Sequence: Synthetic oligonucleotide
aggaacgacugggcccacc

SEQ ID NO: 2310429 - RNA, 19 nt, Artificial Sequence
  Description of Artificial Sequence: Synthetic oligonucleotide
cuccggagaagagcagggg

SEQ ID NO: 2310430 - RNA, 19 nt, Artificial Sequence
  Description of Artificial Sequence: Synthetic oligonucleotide
uagcgcagcgcucgggcau

SEQ ID NO: 2310431 - RNA, 19 nt, Artificial Sequence
  Description of Artificial Sequence: Synthetic oligonucleotide
aggucuugaguuccacaua

SEQ ID NO: 2310432 - RNA, 19 nt, Artificial Sequence
  Description of Artificial Sequence: Synthetic oligonucleotide
ggaacgacugggcccacca

SEQ ID NO: 2310433 - RNA, 19 nt, Artificial Sequence
  Description of Artificial Sequence: Synthetic oligonucleotide
cuugugccuguagaagcuc

SEQ ID NO: 2310434 - RNA, 19 nt, Artificial Sequence
  Description of Artificial Sequence: Synthetic oligonucleotide
acgggcgccgguagaaggg

SEQ ID NO: 2310435 - RNA, 19 nt, Artificial Sequence
  Description of Artificial Sequence: Synthetic oligonucleotide
ggccacguugguguuaacc

SEQ ID NO: 2310436 - RNA, 19 nt, Artificial Sequence
  Description of Artificial Sequence: Synthetic oligonucleotide
uggcgagccucugcgcccg

SEQ ID NO: 2310437 - RNA, 19 nt, Artificial Sequence
  Description of Artificial Sequence: Synthetic oligonucleotide
gcuguaguagcgcagcgcu

SEQ ID NO: 2310438 - RNA, 19 nt, Artificial Sequence
  Description of Artificial Sequence: Synthetic oligonucleotide
ugccgcucauacggugugg

SEQ ID NO: 2310439 - RNA, 19 nt, Artificial Sequence
  Description of Artificial Sequence: Synthetic oligonucleotide
guacuggcgcugugcgucc

SEQ ID NO: 2310440 - RNA, 19 nt, Artificial Sequence
  Description of Artificial Sequence: Synthetic oligonucleotide
ugguacuggcgcugugcgu

SEQ ID NO: 2310441 - RNA, 19 nt, Artificial Sequence
  Description of Artificial Sequence: Synthetic oligonucleotide
aggccgccagcugccagcc

SEQ ID NO: 2310442 - RNA, 19 nt, Artificial Sequence
  Description of Artificial Sequence: Synthetic oligonucleotide
cuguaguagcgcagcgcuc

SEQ ID NO: 2310443 - RNA, 19 nt, Artificial Sequence
  Description of Artificial Sequence: Synthetic oligonucleotide
ggaggaacgacugggccca

SEQ ID NO: 2310444 - RNA, 19 nt, Artificial Sequence
  Description of Artificial Sequence: Synthetic oligonucleotide
aguccaccucuccggagaa

SEQ ID NO: 2310445 - RNA, 19 nt, Artificial Sequence
  Description of Artificial Sequence: Synthetic oligonucleotide
cccauguacaugagcuccc

SEQ ID NO: 2310446 - RNA, 19 nt, Artificial Sequence
  Description of Artificial Sequence: Synthetic oligonucleotide
gccgguaccucucagggua

SEQ ID NO: 2310447 - RNA, 19 nt, Artificial Sequence
  Description of Artificial Sequence: Synthetic oligonucleotide
gccgguagaaggggaacgg

SEQ ID NO: 2310448 - RNA, 19 nt, Artificial Sequence
  Description of Artificial Sequence: Synthetic oligonucleotide
cacgguggccccugccagc

SEQ ID NO: 2310449 - RNA, 19 nt, Artificial Sequence
  Description of Artificial Sequence: Synthetic oligonucleotide
gucgguguuccagaaccca

SEQ ID NO: 2310450 - RNA, 19 nt, Artificial Sequence
  Description of Artificial Sequence: Synthetic oligonucleotide
gccuguagaagcuccucca

SEQ ID NO: 2310451 - RNA, 19 nt, Artificial Sequence
  Description of Artificial Sequence: Synthetic oligonucleotide
ccuggcgagccucugcgcc

SEQ ID NO: 2310452 - RNA, 19 nt, Artificial Sequence
  Description of Artificial Sequence: Synthetic oligonucleotide
gcacagaaguucaugcaca

SEQ ID NO: 2310453 - RNA, 19 nt, Artificial Sequence
  Description of Artificial Sequence: Synthetic oligonucleotide
ccucacguuuucaaacauc

SEQ ID NO: 2310454 - RNA, 19 nt, Artificial Sequence
  Description of Artificial Sequence: Synthetic oligonucleotide
aguucggacgggcgccggu

SEQ ID NO: 2310455 - RNA, 19 nt, Artificial Sequence
  Description of Artificial Sequence: Synthetic oligonucleotide
cucaaaauuuguagcccau

SEQ ID NO: 2310456 - RNA, 19 nt, Artificial Sequence
  Description of Artificial Sequence: Synthetic oligonucleotide
ccuguagaagcuccuccac

SEQ ID NO: 2310457 - RNA, 19 nt, Artificial Sequence
  Description of Artificial Sequence: Synthetic oligonucleotide
gcagcuuagucaggugucc

SEQ ID NO: 2310458 - RNA, 19 nt, Artificial Sequence
  Description of Artificial Sequence: Synthetic oligonucleotide
uccccgugguacuggcgcu

SEQ ID NO: 2310459 - RNA, 19 nt, Artificial Sequence
  Description of Artificial Sequence: Synthetic oligonucleotide
gcgacgacaugugggaccc

SEQ ID NO: 2310460 - RNA, 19 nt, Artificial Sequence
  Description of Artificial Sequence: Synthetic oligonucleotide
gggaagggucuuuaaggaa

SEQ ID NO: 2310461 - RNA, 19 nt, Artificial Sequence
  Description of Artificial Sequence: Synthetic oligonucleotide
guagcgcagcgcucgggca

SEQ ID NO: 2310462 - RNA, 19 nt, Artificial Sequence
  Description of Artificial Sequence: Synthetic oligonucleotide
cguccagggagaagcagcc

SEQ ID NO: 2310463 - RNA, 19 nt, Artificial Sequence
  Description of Artificial Sequence: Synthetic oligonucleotide
gugguccagccucucccug

SEQ ID NO: 2310464 - RNA, 19 nt, Artificial Sequence
  Description of Artificial Sequence: Synthetic oligonucleotide
ggugucgguguuccagaac

SEQ ID NO: 2310465 - RNA, 19 nt, Artificial Sequence
  Description of Artificial Sequence: Synthetic oligonucleotide
cagacgaaacccucugggu

SEQ ID NO: 2310466 - RNA, 19 nt, Artificial Sequence
  Description of Artificial Sequence: Synthetic oligonucleotide
auagcaggcuggaggcugu

SEQ ID NO: 2310467 - RNA, 19 nt, Artificial Sequence
  Description of Artificial Sequence: Synthetic oligonucleotide
cccugagcuccucaucccg

SEQ ID NO: 2310468 - RNA, 19 nt, Artificial Sequence
  Description of Artificial Sequence: Synthetic oligonucleotide
gguaccucucaggguagcc

SEQ ID NO: 2310469 - RNA, 19 nt, Artificial Sequence
  Description of Artificial Sequence: Synthetic oligonucleotide
gguuccagccaucccgguc

SEQ ID NO: 2310470 - RNA, 19 nt, Artificial Sequence
  Description of Artificial Sequence: Synthetic oligonucleotide
gacgacaugugggaccccu

SEQ ID NO: 2310471 - RNA, 19 nt, Artificial Sequence
  Description of Artificial Sequence: Synthetic oligonucleotide
gcguccagggagaagcagc

SEQ ID NO: 2310472 - RNA, 19 nt, Artificial Sequence
  Description of Artificial Sequence: Synthetic oligonucleotide
agcgcagcgcucgggcauc

SEQ ID NO: 2310473 - RNA, 19 nt, Artificial Sequence
  Description of Artificial Sequence: Synthetic oligonucleotide
ccauguacaugagcucccg

SEQ ID NO: 2310474 - RNA, 19 nt, Artificial Sequence
  Description of Artificial Sequence: Synthetic oligonucleotide
ccagcgacgacauguggga

SEQ ID NO: 2310475 - RNA, 19 nt, Artificial Sequence
  Description of Artificial Sequence: Synthetic oligonucleotide
acgacugggcccaccauuu

SEQ ID NO: 2310476 - RNA, 19 nt, Artificial Sequence
  Description of Artificial Sequence: Synthetic oligonucleotide
gaccccugggaggaacgac

SEQ ID NO: 2310477 - RNA, 19 nt, Artificial Sequence
  Description of Artificial Sequence: Synthetic oligonucleotide
cacacauguacugcucaaa

SEQ ID NO: 2310478 - RNA, 19 nt, Artificial Sequence
  Description of Artificial Sequence: Synthetic oligonucleotide
ugggaccccugggaggaac

SEQ ID NO: 2310479 - RNA, 19 nt, Artificial Sequence
  Description of Artificial Sequence: Synthetic oligonucleotide
uagccgucccugaggucaa

SEQ ID NO: 2310480 - RNA, 19 nt, Artificial Sequence
  Description of Artificial Sequence: Synthetic oligonucleotide
cuuagguacagugucccuu

SEQ ID NO: 2310481 - RNA, 19 nt, Artificial Sequence
  Description of Artificial Sequence: Synthetic oligonucleotide
cgacaugugggaccccugg

SEQ ID NO: 2310482 - RNA, 19 nt, Artificial Sequence
  Description of Artificial Sequence: Synthetic oligonucleotide
accgcgaggccgccagcug

SEQ ID NO: 2310483 - RNA, 19 nt, Artificial Sequence
  Description of Artificial Sequence: Synthetic oligonucleotide
ucccggggccgguaccucu

SEQ ID NO: 2310484 - RNA, 19 nt, Artificial Sequence
  Description of Artificial Sequence: Synthetic oligonucleotide
agcggagcaggugguccag

SEQ ID NO: 2310485 - RNA, 19 nt, Artificial Sequence
  Description of Artificial Sequence: Synthetic oligonucleotide
ccucgccacgucacggugg

SEQ ID NO: 2310486 - RNA, 19 nt, Artificial Sequence
  Description of Artificial Sequence: Synthetic oligonucleotide
cagugucccuuggaaccgc

SEQ ID NO: 2310487 - RNA, 19 nt, Artificial Sequence
  Description of Artificial Sequence: Synthetic oligonucleotide
guacagcgcgggcuccgug

SEQ ID NO: 2310488 - RNA, 19 nt, Artificial Sequence
  Description of Artificial Sequence: Synthetic oligonucleotide
ccaccauuucaggagcuug

SEQ ID NO: 2310489 - RNA, 19 nt, Artificial Sequence
  Description of Artificial Sequence: Synthetic oligonucleotide
ggcccgaguacagcgcggg

SEQ ID NO: 2310490 - RNA, 19 nt, Artificial Sequence
  Description of Artificial Sequence: Synthetic oligonucleotide
gguucacgcaguccaccuc

SEQ ID NO: 2310491 - RNA, 19 nt, Artificial Sequence
  Description of Artificial Sequence: Synthetic oligonucleotide
gaaccgcgaggccgccagc

SEQ ID NO: 2310492 - RNA, 19 nt, Artificial Sequence
  Description of Artificial Sequence: Synthetic oligonucleotide
gguguccucgccacgucac

SEQ ID NO: 2310493 - RNA, 19 nt, Artificial Sequence
  Description of Artificial Sequence: Synthetic oligonucleotide
gggucuggggagccuccgg

SEQ ID NO: 2310494 - RNA, 19 nt, Artificial Sequence
  Description of Artificial Sequence: Synthetic oligonucleotide
aguacagcgcgggcuccgu

SEQ ID NO: 2310495 - RNA, 19 nt, Artificial Sequence
  Description of Artificial Sequence: Synthetic oligonucleotide
agcgcgggcuccgugcgca

SEQ ID NO: 2310496 - RNA, 19 nt, Artificial Sequence
  Description of Artificial Sequence: Synthetic oligonucleotide
ggggucuccaccucacuua

SEQ ID NO: 2310497 - RNA, 19 nt, Artificial Sequence
  Description of Artificial Sequence: Synthetic oligonucleotide
gcccaguucggacgggcgc

SEQ ID NO: 2310498 - RNA, 19 nt, Artificial Sequence
  Description of Artificial Sequence: Synthetic oligonucleotide
aagucggggcccgggccgu

SEQ ID NO: 2310499 - RNA, 19 nt, Artificial Sequence
  Description of Artificial Sequence: Synthetic oligonucleotide
ggggcgggcuguaguagcg

SEQ ID NO: 2310500 - RNA, 19 nt, Artificial Sequence
  Description of Artificial Sequence: Synthetic oligonucleotide
cucauacgguguggucagc

SEQ ID NO: 2310501 - RNA, 19 nt, Artificial Sequence
  Description of Artificial Sequence: Synthetic oligonucleotide
cagcggagcagguggucca

SEQ ID NO: 2310502 - RNA, 19 nt, Artificial Sequence
  Description of Artificial Sequence: Synthetic oligonucleotide
gggguucacgcaguccacc

SEQ ID NO: 2310503 - RNA, 19 nt, Artificial Sequence
  Description of Artificial Sequence: Synthetic oligonucleotide
gcugcguagcacagagcag

SEQ ID NO: 2310504 - RNA, 19 nt, Artificial Sequence
  Description of Artificial Sequence: Synthetic oligonucleotide
gcauccccgugguacuggc

SEQ ID NO: 2310505 - RNA, 19 nt, Artificial Sequence
  Description of Artificial Sequence: Synthetic oligonucleotide
gggaccccugggaggaacg

SEQ ID NO: 2310506 - RNA, 19 nt, Artificial Sequence
  Description of Artificial Sequence: Synthetic oligonucleotide
acgacaugugggaccccug

SEQ ID NO: 2310507 - RNA, 19 nt, Artificial Sequence
  Description of Artificial Sequence: Synthetic oligonucleotide
ucccggaggaggggcggcc

SEQ ID NO: 2310508 - RNA, 19 nt, Artificial Sequence
  Description of Artificial Sequence: Synthetic oligonucleotide
ccagcggagcagguggucc

SEQ ID NO: 2310509 - RNA, 19 nt, Artificial Sequence
  Description of Artificial Sequence: Synthetic oligonucleotide
ccgaguacagcgcgggcuc

SEQ ID NO: 2310510 - RNA, 19 nt, Artificial Sequence
  Description of Artificial Sequence: Synthetic oligonucleotide
uuggaaccgcgaggccgcc

SEQ ID NO: 2310511 - RNA, 19 nt, Artificial Sequence
  Description of Artificial Sequence: Synthetic oligonucleotide
guuugucugcacacaugua

SEQ ID NO: 2310512 - RNA, 19 nt, Artificial Sequence
  Description of Artificial Sequence: Synthetic oligonucleotide
gggaacggcccgaguacag

SEQ ID NO: 2310513 - RNA, 19 nt, Artificial Sequence
  Description of Artificial Sequence: Synthetic oligonucleotide
ggucgugccucacguuuuc

SEQ ID NO: 2310514 - RNA, 19 nt, Artificial Sequence
  Description of Artificial Sequence: Synthetic oligonucleotide
aggccacguugguguuaac

SEQ ID NO: 2310515 - RNA, 19 nt, Artificial Sequence
  Description of Artificial Sequence: Synthetic oligonucleotide
cagguguccucgccacguc

SEQ ID NO: 2310516 - RNA, 19 nt, Artificial Sequence
  Description of Artificial Sequence: Synthetic oligonucleotide
ggcgcugugcguccaggga

SEQ ID NO: 2310517 - RNA, 19 nt, Artificial Sequence
  Description of Artificial Sequence: Synthetic oligonucleotide
cagcgacgacaugugggac

SEQ ID NO: 2310518 - RNA, 19 nt, Artificial Sequence
  Description of Artificial Sequence: Synthetic oligonucleotide
cugugcguccagggagaag

SEQ ID NO: 2310519 - RNA, 19 nt, Artificial Sequence
  Description of Artificial Sequence: Synthetic oligonucleotide
cgugguacuggcgcugugc

SEQ ID NO: 2310520 - RNA, 19 nt, Artificial Sequence
  Description of Artificial Sequence: Synthetic oligonucleotide
cacgucacgguggccccug

SEQ ID NO: 2310521 - RNA, 19 nt, Artificial Sequence
  Description of Artificial Sequence: Synthetic oligonucleotide
cccaguucggacgggcgcc

SEQ ID NO: 2310522 - RNA, 19 nt, Artificial Sequence
  Description of Artificial Sequence: Synthetic oligonucleotide
ggcgggcuguaguagcgca

SEQ ID NO: 2310523 - RNA, 19 nt, Artificial Sequence
  Description of Artificial Sequence: Synthetic oligonucleotide
cccuccugccgcucauacg

SEQ ID NO: 2310524 - RNA, 19 nt, Artificial Sequence
  Description of Artificial Sequence: Synthetic oligonucleotide
ugccagcccuccugccgcu

SEQ ID NO: 2310525 - RNA, 19 nt, Artificial Sequence
  Description of Artificial Sequence: Synthetic oligonucleotide
gccacgucacgguggcccc

SEQ ID NO: 2310526 - RNA, 19 nt, Artificial Sequence
  Description of Artificial Sequence: Synthetic oligonucleotide
gaaggggaacggcccgagu

SEQ ID NO: 2310527 - RNA, 19 nt, Artificial Sequence
  Description of Artificial Sequence: Synthetic oligonucleotide
aucccggggccgguaccuc

SEQ ID NO: 2310528 - RNA, 19 nt, Artificial Sequence
  Description of Artificial Sequence: Synthetic oligonucleotide
ggguagccgucccugaggu

SEQ ID NO: 2310529 - RNA, 19 nt, Artificial Sequence
  Description of Artificial Sequence: Synthetic oligonucleotide
ccggaagccagcgacgaca

SEQ ID NO: 2310530 - RNA, 19 nt, Artificial Sequence
  Description of Artificial Sequence: Synthetic oligonucleotide
caguucggacgggcgccgg

SEQ ID NO: 2310531 - RNA, 19 nt, Artificial Sequence
  Description of Artificial Sequence: Synthetic oligonucleotide
ccucacuuagguacagugu

SEQ ID NO: 2310532 - RNA, 19 nt, Artificial Sequence
  Description of Artificial Sequence: Synthetic oligonucleotide
cgccacgucacgguggccc

SEQ ID NO: 2310533 - RNA, 19 nt, Artificial Sequence
  Description of Artificial Sequence: Synthetic oligonucleotide
ggguucacgcaguccaccu

SEQ ID NO: 2310534 - RNA, 19 nt, Artificial Sequence
  Description of Artificial Sequence: Synthetic oligonucleotide
cgcucauacggugugguca

SEQ ID NO: 2310535 - RNA, 19 nt, Artificial Sequence
  Description of Artificial Sequence: Synthetic oligonucleotide
ggaagccagcgacgacaug

SEQ ID NO: 2310536 - RNA, 19 nt, Artificial Sequence
  Description of Artificial Sequence: Synthetic oligonucleotide
ccgcgaggccgccagcugc

SEQ ID NO: 2310537 - RNA, 19 nt, Artificial Sequence
  Description of Artificial Sequence: Synthetic oligonucleotide
gaacgacugggcccaccau

SEQ ID NO: 2310538 - RNA, 19 nt, Artificial Sequence
  Description of Artificial Sequence: Synthetic oligonucleotide
gcguagcacagagcagaag

SEQ ID NO: 2310539 - RNA, 19 nt, Artificial Sequence
  Description of Artificial Sequence: Synthetic oligonucleotide
cucccggaggaggggcggc

SEQ ID NO: 2310540 - RNA, 19 nt, Artificial Sequence
  Description of Artificial Sequence: Synthetic oligonucleotide
gucgugccucacguuuuca

SEQ ID NO: 2310541 - RNA, 19 nt, Artificial Sequence
  Description of Artificial Sequence: Synthetic oligonucleotide
ccccagaggggucugggga

SEQ ID NO: 2310542 - RNA, 19 nt, Artificial Sequence
  Description of Artificial Sequence: Synthetic oligonucleotide
ccgguaccucucaggguag

SEQ ID NO: 2310543 - RNA, 19 nt, Artificial Sequence
  Description of Artificial Sequence: Synthetic oligonucleotide
ccucuccggagaagagcag

SEQ ID NO: 2310544 - RNA, 19 nt, Artificial Sequence
  Description of Artificial Sequence: Synthetic oligonucleotide
ccagaggggucuggggagc

SEQ ID NO: 2310545 - RNA, 19 nt, Artificial Sequence
  Description of Artificial Sequence: Synthetic oligonucleotide
cucugcgcccgggccgccg

SEQ ID NO: 2310546 - RNA, 19 nt, Artificial Sequence
  Description of Artificial Sequence: Synthetic oligonucleotide
gcgggcuguaguagcgcag

SEQ ID NO: 2310547 - RNA, 19 nt, Artificial Sequence
  Description of Artificial Sequence: Synthetic oligonucleotide
gccgucccugaggucaaag

SEQ ID NO: 2310548 - RNA, 19 nt, Artificial Sequence
  Description of Artificial Sequence: Synthetic oligonucleotide
ggacgggcgccgguagaag

SEQ ID NO: 2310549 - RNA, 19 nt, Artificial Sequence
  Description of Artificial Sequence: Synthetic oligonucleotide
cgggcuguaguagcgcagc

SEQ ID NO: 2310550 - RNA, 19 nt, Artificial Sequence
  Description of Artificial Sequence: Synthetic oligonucleotide
gugucccuuggaaccgcga

SEQ ID NO: 2310551 - RNA, 19 nt, Artificial Sequence
  Description of Artificial Sequence: Synthetic oligonucleotide
caugguagggaagggucuu

SEQ ID NO: 2310552 - RNA, 19 nt, Artificial Sequence
  Description of Artificial Sequence: Synthetic oligonucleotide
ccaguucggacgggcgccg

SEQ ID NO: 2310553 - RNA, 19 nt, Artificial Sequence
  Description of Artificial Sequence: Synthetic oligonucleotide
guucggacgggcgccggua

SEQ ID NO: 2310554 - RNA, 19 nt, Artificial Sequence
  Description of Artificial Sequence: Synthetic oligonucleotide
ggggaacggcccgaguaca

SEQ ID NO: 2310555 - RNA, 19 nt, Artificial Sequence
  Description of Artificial Sequence: Synthetic oligonucleotide
gugcguccagggagaagca

SEQ ID NO: 2310556 - RNA, 19 nt, Artificial Sequence
  Description of Artificial Sequence: Synthetic oligonucleotide
ccaugguagggaagggucu

SEQ ID NO: 2310557 - RNA, 19 nt, Artificial Sequence
  Description of Artificial Sequence: Synthetic oligonucleotide
acccagcggagcagguggu

SEQ ID NO: 2310558 - RNA, 19 nt, Artificial Sequence
  Description of Artificial Sequence: Synthetic oligonucleotide
cguugguguuaaccucccc

SEQ ID NO: 2310559 - RNA, 19 nt, Artificial Sequence
  Description of Artificial Sequence: Synthetic oligonucleotide
gccuggcgagccucugcgc

SEQ ID NO: 2310560 - RNA, 19 nt, Artificial Sequence
  Description of Artificial Sequence: Synthetic oligonucleotide
cccuuggaaccgcgaggcc

SEQ ID NO: 2310561 - RNA, 19 nt, Artificial Sequence
  Description of Artificial Sequence: Synthetic oligonucleotide
cagcuuagucagguguccu

SEQ ID NO: 2310562 - RNA, 19 nt, Artificial Sequence
  Description of Artificial Sequence: Synthetic oligonucleotide
guguggucagcagcuuagu

SEQ ID NO: 2310563 - RNA, 19 nt, Artificial Sequence
  Description of Artificial Sequence: Synthetic oligonucleotide
gggcgggcuguaguagcgc

SEQ ID NO: 2310564 - RNA, 19 nt, Artificial Sequence
  Description of Artificial Sequence: Synthetic oligonucleotide
ucgccacgucacgguggcc

SEQ ID NO: 2310565 - RNA, 19 nt, Artificial Sequence
  Description of Artificial Sequence: Synthetic oligonucleotide
cugcgcccgggccgccggg

SEQ ID NO: 2310566 - RNA, 19 nt, Artificial Sequence
  Description of Artificial Sequence: Synthetic oligonucleotide
gaggaacgacugggcccac

SEQ ID NO: 2310567 - RNA, 19 nt, Artificial Sequence
  Description of Artificial Sequence: Synthetic oligonucleotide
gccucacguuuucaaacau

SEQ ID NO: 2310568 - RNA, 19 nt, Artificial Sequence
  Description of Artificial Sequence: Synthetic oligonucleotide
gcccgaguacagcgcgggc

SEQ ID NO: 2310569 - RNA, 19 nt, Artificial Sequence
  Description of Artificial Sequence: Synthetic oligonucleotide
gggcauccccgugguacug

SEQ ID NO: 2310570 - RNA, 19 nt, Artificial Sequence
  Description of Artificial Sequence: Synthetic oligonucleotide
gcagcccaguucggacggg

SEQ ID NO: 2310571 - RNA, 19 nt, Artificial Sequence
  Description of Artificial Sequence: Synthetic oligonucleotide
ggguuccggaagccagcga

SEQ ID NO: 2310572 - RNA, 19 nt, Artificial Sequence
  Description of Artificial Sequence: Synthetic oligonucleotide
gcgccgguagaaggggaac

SEQ ID NO: 2310573 - RNA, 19 nt, Artificial Sequence
  Description of Artificial Sequence: Synthetic oligonucleotide
ccccaggcggcugcguagc

SEQ ID NO: 2310574 - RNA, 19 nt, Artificial Sequence
  Description of Artificial Sequence: Synthetic oligonucleotide
caucccggggccgguaccu

SEQ ID NO: 2310575 - RNA, 19 nt, Artificial Sequence
  Description of Artificial Sequence: Synthetic oligonucleotide
ggcgccgguagaaggggaa

SEQ ID NO: 2310576 - RNA, 19 nt, Artificial Sequence
  Description of Artificial Sequence: Synthetic oligonucleotide
ggaccccugggaggaacga

SEQ ID NO: 2310577 - RNA, 19 nt, Artificial Sequence
  Description of Artificial Sequence: Synthetic oligonucleotide
ccugccgcucauacggugu

SEQ ID NO: 2310578 - RNA, 19 nt, Artificial Sequence
  Description of Artificial Sequence: Synthetic oligonucleotide
cgucacgguggccccugcc

SEQ ID NO: 2310579 - RNA, 19 nt, Artificial Sequence
  Description of Artificial Sequence: Synthetic oligonucleotide
gccuccggguuugucugca

SEQ ID NO: 2310580 - RNA, 19 nt, Artificial Sequence
  Description of Artificial Sequence: Synthetic oligonucleotide
agucggggcccgggccgug

SEQ ID NO: 2310581 - RNA, 19 nt, Artificial Sequence
  Description of Artificial Sequence: Synthetic oligonucleotide
ccggguuugucugcacaca

SEQ ID NO: 2310582 - RNA, 19 nt, Artificial Sequence
  Description of Artificial Sequence: Synthetic oligonucleotide
cgggcgccgguagaagggg

SEQ ID NO: 2310583 - RNA, 19 nt, Artificial Sequence
  Description of Artificial Sequence: Synthetic oligonucleotide
cgaguacagcgcgggcucc

SEQ ID NO: 2310584 - RNA, 19 nt, Artificial Sequence
  Description of Artificial Sequence: Synthetic oligonucleotide
cccggggccgguaccucuc

SEQ ID NO: 2310585 - RNA, 19 nt, Artificial Sequence
  Description of Artificial Sequence: Synthetic oligonucleotide
gccgcucauacgguguggu

SEQ ID NO: 2310586 - RNA, 19 nt, Artificial Sequence
  Description of Artificial Sequence: Synthetic oligonucleotide
cggcccgaguacagcgcgg

SEQ ID NO: 2310587 - RNA, 19 nt, Artificial Sequence
  Description of Artificial Sequence: Synthetic oligonucleotide
ccggaggaggggcggccug

SEQ ID NO: 2310588 - RNA, 19 nt, Artificial Sequence
  Description of Artificial Sequence: Synthetic oligonucleotide
ggcggcugcguagcacaga

SEQ ID NO: 2310589 - RNA, 19 nt, Artificial Sequence
  Description of Artificial Sequence: Synthetic oligonucleotide
ccgucccugaggucaaagu

SEQ ID NO: 2310590 - RNA, 19 nt, Artificial Sequence
  Description of Artificial Sequence: Synthetic oligonucleotide
gcgcucgggcauccccgug

SEQ ID NO: 2310591 - RNA, 19 nt, Artificial Sequence
  Description of Artificial Sequence: Synthetic oligonucleotide
cagggcugugcaucuccuu

SEQ ID NO: 2310592 - RNA, 19 nt, Artificial Sequence
  Description of Artificial Sequence: Synthetic oligonucleotide
ccccgugguacuggcgcug

SEQ ID NO: 2310593 - RNA, 19 nt, Artificial Sequence
  Description of Artificial Sequence: Synthetic oligonucleotide
cccgaguacagcgcgggcu

SEQ ID NO: 2310594 - RNA, 19 nt, Artificial Sequence
  Description of Artificial Sequence: Synthetic oligonucleotide
cggcugcguagcacagagc

SEQ ID NO: 2310595 - RNA, 19 nt, Artificial Sequence
  Description of Artificial Sequence: Synthetic oligonucleotide
cgguaccucucaggguagc

SEQ ID NO: 2310596 - RNA, 19 nt, Artificial Sequence
  Description of Artificial Sequence: Synthetic oligonucleotide
ccggucgugccucacguuu

SEQ ID NO: 2310597 - RNA, 19 nt, Artificial Sequence
  Description of Artificial Sequence: Synthetic oligonucleotide
agccgucccugaggucaaa

SEQ ID NO: 2310598 - RNA, 19 nt, Artificial Sequence
  Description of Artificial Sequence: Synthetic oligonucleotide
cgacugggcccaccauuuc

SEQ ID NO: 2310599 - RNA, 19 nt, Artificial Sequence
  Description of Artificial Sequence: Synthetic oligonucleotide
cccagcggagcaggugguc

SEQ ID NO: 2310600 - RNA, 19 nt, Artificial Sequence
  Description of Artificial Sequence: Synthetic oligonucleotide
cucgggcauccccguggua

SEQ ID NO: 2310601 - RNA, 19 nt, Artificial Sequence
  Description of Artificial Sequence: Synthetic oligonucleotide
gggcgccgguagaagggga

SEQ ID NO: 2310602 - RNA, 19 nt, Artificial Sequence
  Description of Artificial Sequence: Synthetic oligonucleotide
cgaaacccucuggguuccg

SEQ ID NO: 2310603 - RNA, 19 nt, Artificial Sequence
  Description of Artificial Sequence: Synthetic oligonucleotide
gcgcagcgcucgggcaucc

SEQ ID NO: 2310604 - RNA, 19 nt, Artificial Sequence
  Description of Artificial Sequence: Synthetic oligonucleotide
gcggccuggcgagccucug

SEQ ID NO: 2310605 - RNA, 19 nt, Artificial Sequence
  Description of Artificial Sequence: Synthetic oligonucleotide
gcccaccauuucaggagcu

SEQ ID NO: 2310606 - RNA, 19 nt, Artificial Sequence
  Description of Artificial Sequence: Synthetic oligonucleotide
ccgccggggucuccaccuc

SEQ ID NO: 2310607 - RNA, 19 nt, Artificial Sequence
  Description of Artificial Sequence: Synthetic oligonucleotide
ccggggccgguaccucuca

SEQ ID NO: 2310608 - RNA, 19 nt, Artificial Sequence
  Description of Artificial Sequence: Synthetic oligonucleotide
cgggcauccccgugguacu

SEQ ID NO: 2310609 - RNA, 19 nt, Artificial Sequence
  Description of Artificial Sequence: Synthetic oligonucleotide
cggacgggcgccgguagaa

SEQ ID NO: 2310610 - RNA, 19 nt, Artificial Sequence
  Description of Artificial Sequence: Synthetic oligonucleotide
cgacgacaugugggacccc

SEQ ID NO: 2310611 - RNA, 19 nt, Artificial Sequence
  Description of Artificial Sequence: Synthetic oligonucleotide
cccaccauuucaggagcuu

SEQ ID NO: 2310612 - RNA, 19 nt, Artificial Sequence
  Description of Artificial Sequence: Synthetic oligonucleotide
cgcagcgcucgggcauccc

SEQ ID NO: 2310613 - RNA, 19 nt, Artificial Sequence
  Description of Artificial Sequence: Synthetic oligonucleotide
ccucugcgcccgggccgcc

SEQ ID NO: 2310614 - RNA, 19 nt, Artificial Sequence
  Description of Artificial Sequence: Synthetic oligonucleotide
cggucgugccucacguuuu

SEQ ID NO: 2310615 - RNA, 19 nt, Artificial Sequence
  Description of Artificial Sequence: Synthetic oligonucleotide
ccggggucuccaccucacu

SEQ ID NO: 2310616 - RNA, 19 nt, Artificial Sequence
  Description of Artificial Sequence: Synthetic oligonucleotide
cccugccagccagccugga

SEQ ID NO: 2310617 - RNA, 19 nt, Artificial Sequence
  Description of Artificial Sequence: Synthetic oligonucleotide
cccggucgugccucacguu

SEQ ID NO: 2310618 - RNA, 19 nt, Artificial Sequence
  Description of Artificial Sequence: Synthetic oligonucleotide
ccacgucacgguggccccu

SEQ ID NO: 2310619 - RNA, 19 nt, Artificial Sequence
  Description of Artificial Sequence: Synthetic oligonucleotide
uaagagacacuccagaagc

SEQ ID NO: 2310620 - RNA, 19 nt, Artificial Sequence
  Description of Artificial Sequence: Synthetic oligonucleotide
aauaccagcucgugcaccc

SEQ ID NO: 2310621 - RNA, 19 nt, Artificial Sequence
  Description of Artificial Sequence: Synthetic oligonucleotide
auuaaaacaacagaagaug

SEQ ID NO: 2310622 - RNA, 19 nt, Artificial Sequence
  Description of Artificial Sequence: Synthetic oligonucleotide
aguaauaccagcucgugca

SEQ ID NO: 2310623 - RNA, 19 nt, Artificial Sequence
  Description of Artificial Sequence: Synthetic oligonucleotide
uagagguacacacccaugg

SEQ ID NO: 2310624 - RNA, 19 nt, Artificial Sequence
  Description of Artificial Sequence: Synthetic oligonucleotide
uaugcuuuugcauacuugu

SEQ ID NO: 2310625 - RNA, 19 nt, Artificial Sequence
  Description of Artificial Sequence: Synthetic oligonucleotide
uggagaaagcuuuucaaag

SEQ ID NO: 2310626 - RNA, 19 nt, Artificial Sequence
  Description of Artificial Sequence: Synthetic oligonucleotide
gaaagcuuuucaaaggcgg

SEQ ID NO: 2310627 - RNA, 19 nt, Artificial Sequence
  Description of Artificial Sequence: Synthetic oligonucleotide
uuaaccaccaguucacacc

SEQ ID NO: 2310628 - RNA, 19 nt, Artificial Sequence
  Description of Artificial Sequence: Synthetic oligonucleotide
uaaaacaacagaagaugca

SEQ ID NO: 2310629 - RNA, 19 nt, Artificial Sequence
  Description of Artificial Sequence: Synthetic oligonucleotide
gagaaagcuuuucaaaggc

SEQ ID NO: 2310630 - RNA, 19 nt, Artificial Sequence
  Description of Artificial Sequence: Synthetic oligonucleotide
gaagucaguuuucacaggc

SEQ ID NO: 2310631 - RNA, 19 nt, Artificial Sequence
  Description of Artificial Sequence: Synthetic oligonucleotide
uucauuucgguccaguauc

SEQ ID NO: 2310632 - RNA, 19 nt, Artificial Sequence
  Description of Artificial Sequence: Synthetic oligonucleotide
ugcucuaagagacacucca

SEQ ID NO: 2310633 - RNA, 19 nt, Artificial Sequence
  Description of Artificial Sequence: Synthetic oligonucleotide
agcauuuuggaaucggcag

SEQ ID NO: 2310634 - RNA, 19 nt, Artificial Sequence
  Description of Artificial Sequence: Synthetic oligonucleotide
ugucuugggcuucauuucg

SEQ ID NO: 2310635 - RNA, 19 nt, Artificial Sequence
  Description of Artificial Sequence: Synthetic oligonucleotide
acguaguaauaccagcucg

SEQ ID NO: 2310636 - RNA, 19 nt, Artificial Sequence
  Description of Artificial Sequence: Synthetic oligonucleotide
cauacuugugcuuaaccac

SEQ ID NO: 2310637 - RNA, 19 nt, Artificial Sequence
  Description of Artificial Sequence: Synthetic oligonucleotide
ucuacaugacugcaggugu

SEQ ID NO: 2310638 - RNA, 19 nt, Artificial Sequence
  Description of Artificial Sequence: Synthetic oligonucleotide
aagcaagaugaucuggucu

SEQ ID NO: 2310639 - RNA, 19 nt, Artificial Sequence
  Description of Artificial Sequence: Synthetic oligonucleotide
agcaagaugaucuggucug

SEQ ID NO: 2310640 - RNA, 19 nt, Artificial Sequence
  Description of Artificial Sequence: Synthetic oligonucleotide
aauccauuucgccaccucu

SEQ ID NO: 2310641 - RNA, 19 nt, Artificial Sequence
  Description of Artificial Sequence: Synthetic oligonucleotide
uuucacaggcaggagaggg

SEQ ID NO: 2310642 - RNA, 19 nt, Artificial Sequence
  Description of Artificial Sequence: Synthetic oligonucleotide
ucacguaguaauaccagcu

SEQ ID NO: 2310643 - RNA, 19 nt, Artificial Sequence
  Description of Artificial Sequence: Synthetic oligonucleotide
auacuugugcuuaaccacc

SEQ ID NO: 2310644 - RNA, 19 nt, Artificial Sequence
  Description of Artificial Sequence: Synthetic oligonucleotide
cacuccagaagcaagauga

SEQ ID NO: 2310645 - RNA, 19 nt, Artificial Sequence
  Description of Artificial Sequence: Synthetic oligonucleotide
uaucccacugcaauuguga

SEQ ID NO: 2310646 - RNA, 19 nt, Artificial Sequence
  Description of Artificial Sequence: Synthetic oligonucleotide
uugacauggcaacgggugg

SEQ ID NO: 2310647 - RNA, 19 nt, Artificial Sequence
  Description of Artificial Sequence: Synthetic oligonucleotide
auauaucugcuggaggcgc

SEQ ID NO: 2310648 - RNA, 19 nt, Artificial Sequence
  Description of Artificial Sequence: Synthetic oligonucleotide
uaaccaccaguucacacca

SEQ ID NO: 2310649 - RNA, 19 nt, Artificial Sequence
  Description of Artificial Sequence: Synthetic oligonucleotide
cagaagaugcagcugcucg

SEQ ID NO: 2310650 - RNA, 19 nt, Artificial Sequence
  Description of Artificial Sequence: Synthetic oligonucleotide
caauugugaagguggaggc

SEQ ID NO: 2310651 - RNA, 19 nt, Artificial Sequence
  Description of Artificial Sequence: Synthetic oligonucleotide
cagcauuucagacaccacc

SEQ ID NO: 2310652 - RNA, 19 nt, Artificial Sequence
  Description of Artificial Sequence: Synthetic oligonucleotide
agcucgagcacaguggggc

SEQ ID NO: 2310653 - RNA, 19 nt, Artificial Sequence
  Description of Artificial Sequence: Synthetic oligonucleotide
cucguuugcguuuuccggg

SEQ ID NO: 2310654 - RNA, 19 nt, Artificial Sequence
  Description of Artificial Sequence: Synthetic oligonucleotide
ugauccuccugcaggaacc

SEQ ID NO: 2310655 - RNA, 19 nt, Artificial Sequence
  Description of Artificial Sequence: Synthetic oligonucleotide
uccaguaucccacugcaau

SEQ ID NO: 2310656 - RNA, 19 nt, Artificial Sequence
  Description of Artificial Sequence: Synthetic oligonucleotide
uuuggaaucggcaggggua

SEQ ID NO: 2310657 - RNA, 19 nt, Artificial Sequence
  Description of Artificial Sequence: Synthetic oligonucleotide
uaguaauaccagcucgugc

SEQ ID NO: 2310658 - RNA, 19 nt, Artificial Sequence
  Description of Artificial Sequence: Synthetic oligonucleotide
agcucgugcacccuucucg

SEQ ID NO: 2310659 - RNA, 19 nt, Artificial Sequence
  Description of Artificial Sequence: Synthetic oligonucleotide
gagguacacacccauggcc

SEQ ID NO: 2310660 - RNA, 19 nt, Artificial Sequence
  Description of Artificial Sequence: Synthetic oligonucleotide
uucaaaggcggcuucucgc

SEQ ID NO: 2310661 - RNA, 19 nt, Artificial Sequence
  Description of Artificial Sequence: Synthetic oligonucleotide
acaccaucgauggcgaacc

SEQ ID NO: 2310662 - RNA, 19 nt, Artificial Sequence
  Description of Artificial Sequence: Synthetic oligonucleotide
uccucgcucaacaucagcu

SEQ ID NO: 2310663 - RNA, 19 nt, Artificial Sequence
  Description of Artificial Sequence: Synthetic oligonucleotide
uccauguguucccucaccc

SEQ ID NO: 2310664 - RNA, 19 nt, Artificial Sequence
  Description of Artificial Sequence: Synthetic oligonucleotide
aucgauggcgaaccucugc

SEQ ID NO: 2310665 - RNA, 19 nt, Artificial Sequence
  Description of Artificial Sequence: Synthetic oligonucleotide
uggucacguaguaauacca

SEQ ID NO: 2310666 - RNA, 19 nt, Artificial Sequence
  Description of Artificial Sequence: Synthetic oligonucleotide
uccccauagagguacacac

SEQ ID NO: 2310667 - RNA, 19 nt, Artificial Sequence
  Description of Artificial Sequence: Synthetic oligonucleotide
acucgaauccauuucgcca

SEQ ID NO: 2310668 - RNA, 19 nt, Artificial Sequence
  Description of Artificial Sequence: Synthetic oligonucleotide
cucgaauccauuucgccac

SEQ ID NO: 2310669 - RNA, 19 nt, Artificial Sequence
  Description of Artificial Sequence: Synthetic oligonucleotide
auggcgaaccucugcgucc

SEQ ID NO: 2310670 - RNA, 19 nt, Artificial Sequence
  Description of Artificial Sequence: Synthetic oligonucleotide
auuucagacaccaccuggg

SEQ ID NO: 2310671 - RNA, 19 nt, Artificial Sequence
  Description of Artificial Sequence: Synthetic oligonucleotide
acuguagccugccauguug

SEQ ID NO: 2310672 - RNA, 19 nt, Artificial Sequence
  Description of Artificial Sequence: Synthetic oligonucleotide
uuucgguccaguaucccac

SEQ ID NO: 2310673 - RNA, 19 nt, Artificial Sequence
  Description of Artificial Sequence: Synthetic oligonucleotide
ucugcucuaagagacacuc

SEQ ID NO: 2310674 - RNA, 19 nt, Artificial Sequence
  Description of Artificial Sequence: Synthetic oligonucleotide
ugcuuaaccaccaguucac

SEQ ID NO: 2310675 - RNA, 19 nt, Artificial Sequence
  Description of Artificial Sequence: Synthetic oligonucleotide
ccauauaucugcuggaggc

SEQ ID NO: 2310676 - RNA, 19 nt, Artificial Sequence
  Description of Artificial Sequence: Synthetic oligonucleotide
uucagacaccaccugggcc

SEQ ID NO: 2310677 - RNA, 19 nt, Artificial Sequence
  Description of Artificial Sequence: Synthetic oligonucleotide
ugaucuggucuggagaaag

SEQ ID NO: 2310678 - RNA, 19 nt, Artificial Sequence
  Description of Artificial Sequence: Synthetic oligonucleotide
gcaauugugaagguggagg

SEQ ID NO: 2310679 - RNA, 19 nt, Artificial Sequence
  Description of Artificial Sequence: Synthetic oligonucleotide
gaugcagcugcucgaacug

SEQ ID NO: 2310680 - RNA, 19 nt, Artificial Sequence
  Description of Artificial Sequence: Synthetic oligonucleotide
ucauuucgguccaguaucc

SEQ ID NO: 2310681 - RNA, 19 nt, Artificial Sequence
  Description of Artificial Sequence: Synthetic oligonucleotide
uuucagacaccaccugggc

SEQ ID NO: 2310682 - RNA, 19 nt, Artificial Sequence
  Description of Artificial Sequence: Synthetic oligonucleotide
aaccucugcguccugcucu

SEQ ID NO: 2310683 - RNA, 19 nt, Artificial Sequence
  Description of Artificial Sequence: Synthetic oligonucleotide
accagaucaucugaugggg

SEQ ID NO: 2310684 - RNA, 19 nt, Artificial Sequence
  Description of Artificial Sequence: Synthetic oligonucleotide
agggguauucuacaugacu

SEQ ID NO: 2310685 - RNA, 19 nt, Artificial Sequence
  Description of Artificial Sequence: Synthetic oligonucleotide
aaggcggcuucucgcuucc

SEQ ID NO: 2310686 - RNA, 19 nt, Artificial Sequence
  Description of Artificial Sequence: Synthetic oligonucleotide
agcggcagcauuuuggaau

SEQ ID NO: 2310687 - RNA, 19 nt, Artificial Sequence
  Description of Artificial Sequence: Synthetic oligonucleotide
cuuaaccaccaguucacac

SEQ ID NO: 2310688 - RNA, 19 nt, Artificial Sequence
  Description of Artificial Sequence: Synthetic oligonucleotide
uuuuccccacucauuaaaa

SEQ ID NO: 2310689 - RNA, 19 nt, Artificial Sequence
  Description of Artificial Sequence: Synthetic oligonucleotide
uacaugacugcaggugucg

SEQ ID NO: 2310690 - RNA, 19 nt, Artificial Sequence
  Description of Artificial Sequence: Synthetic oligonucleotide
gucacguaguaauaccagc

SEQ ID NO: 2310691 - RNA, 19 nt, Artificial Sequence
  Description of Artificial Sequence: Synthetic oligonucleotide
augacugcaggugucggcg

SEQ ID NO: 2310692 - RNA, 19 nt, Artificial Sequence
  Description of Artificial Sequence: Synthetic oligonucleotide
gaacacucgaugaggaaug

SEQ ID NO: 2310693 - RNA, 19 nt, Artificial Sequence
  Description of Artificial Sequence: Synthetic oligonucleotide
cugcgguucacucgaaucc

SEQ ID NO: 2310694 - RNA, 19 nt, Artificial Sequence
  Description of Artificial Sequence: Synthetic oligonucleotide
auuuuccccacucauuaaa

SEQ ID NO: 2310695 - RNA, 19 nt, Artificial Sequence
  Description of Artificial Sequence: Synthetic oligonucleotide
ugcguccugcucuuggagg

SEQ ID NO: 2310696 - RNA, 19 nt, Artificial Sequence
  Description of Artificial Sequence: Synthetic oligonucleotide
cauauaucugcuggaggcg

SEQ ID NO: 2310697 - RNA, 19 nt, Artificial Sequence
  Description of Artificial Sequence: Synthetic oligonucleotide
aacaucagcuccccauaga

SEQ ID NO: 2310698 - RNA, 19 nt, Artificial Sequence
  Description of Artificial Sequence: Synthetic oligonucleotide
ucgugcacccuucucgaag

SEQ ID NO: 2310699 - RNA, 19 nt, Artificial Sequence
  Description of Artificial Sequence: Synthetic oligonucleotide
auuucgguccaguauccca

SEQ ID NO: 2310700 - RNA, 19 nt, Artificial Sequence
  Description of Artificial Sequence: Synthetic oligonucleotide
ucacucgaauccauuucgc

SEQ ID NO: 2310701 - RNA, 19 nt, Artificial Sequence
  Description of Artificial Sequence: Synthetic oligonucleotide
uuuccccacucauuaaaac

SEQ ID NO: 2310702 - RNA, 19 nt, Artificial Sequence
  Description of Artificial Sequence: Synthetic oligonucleotide
ucaaaggcggcuucucgcu

SEQ ID NO: 2310703 - RNA, 19 nt, Artificial Sequence
  Description of Artificial Sequence: Synthetic oligonucleotide
gacaccagaucaucugaug

SEQ ID NO: 2310704 - RNA, 19 nt, Artificial Sequence
  Description of Artificial Sequence: Synthetic oligonucleotide
ucugcgguucacucgaauc

SEQ ID NO: 2310705 - RNA, 19 nt, Artificial Sequence
  Description of Artificial Sequence: Synthetic oligonucleotide
agcaccuucgggcaagcug

SEQ ID NO: 2310706 - RNA, 19 nt, Artificial Sequence
  Description of Artificial Sequence: Synthetic oligonucleotide
cucgcucaacaucagcucc

SEQ ID NO: 2310707 - RNA, 19 nt, Artificial Sequence
  Description of Artificial Sequence: Synthetic oligonucleotide
uucacaggcaggagagggc

SEQ ID NO: 2310708 - RNA, 19 nt, Artificial Sequence
  Description of Artificial Sequence: Synthetic oligonucleotide
ucgaacuguagccugccau

SEQ ID NO: 2310709 - RNA, 19 nt, Artificial Sequence
  Description of Artificial Sequence: Synthetic oligonucleotide
uucacaccaucgauggcga

SEQ ID NO: 2310710 - RNA, 19 nt, Artificial Sequence
  Description of Artificial Sequence: Synthetic oligonucleotide
gcauuuuggaaucggcagg

SEQ ID NO: 2310711 - RNA, 19 nt, Artificial Sequence
  Description of Artificial Sequence: Synthetic oligonucleotide
aacacucgaugaggaaugg

SEQ ID NO: 2310712 - RNA, 19 nt, Artificial Sequence
  Description of Artificial Sequence: Synthetic oligonucleotide
aauugugaagguggaggcu

SEQ ID NO: 2310713 - RNA, 19 nt, Artificial Sequence
  Description of Artificial Sequence: Synthetic oligonucleotide
ugauggggaugucuugggc

SEQ ID NO: 2310714 - RNA, 19 nt, Artificial Sequence
  Description of Artificial Sequence: Synthetic oligonucleotide
aagcuuuucaaaggcggcu

SEQ ID NO: 2310715 - RNA, 19 nt, Artificial Sequence
  Description of Artificial Sequence: Synthetic oligonucleotide
cacucgaauccauuucgcc

SEQ ID NO: 2310716 - RNA, 19 nt, Artificial Sequence
  Description of Artificial Sequence: Synthetic oligonucleotide
gaagcaagaugaucugguc

SEQ ID NO: 2310717 - RNA, 19 nt, Artificial Sequence
  Description of Artificial Sequence: Synthetic oligonucleotide
ucccacugcaauugugaag

SEQ ID NO: 2310718 - RNA, 19 nt, Artificial Sequence
  Description of Artificial Sequence: Synthetic oligonucleotide
agaagcaagaugaucuggu

SEQ ID NO: 2310719 - RNA, 19 nt, Artificial Sequence
  Description of Artificial Sequence: Synthetic oligonucleotide
ucgcucaacaucagcuccc

SEQ ID NO: 2310720 - RNA, 19 nt, Artificial Sequence
  Description of Artificial Sequence: Synthetic oligonucleotide
aaagcaccuucgggcaagc

SEQ ID NO: 2310721 - RNA, 19 nt, Artificial Sequence
  Description of Artificial Sequence: Synthetic oligonucleotide
guauucuacaugacugcag

SEQ ID NO: 2310722 - RNA, 19 nt, Artificial Sequence
  Description of Artificial Sequence: Synthetic oligonucleotide
ugggccgaggcucugucca

SEQ ID NO: 2310723 - RNA, 19 nt, Artificial Sequence
  Description of Artificial Sequence: Synthetic oligonucleotide
gagacacuccagaagcaag

SEQ ID NO: 2310724 - RNA, 19 nt, Artificial Sequence
  Description of Artificial Sequence: Synthetic oligonucleotide
cauggucacguaguaauac

SEQ ID NO: 2310725 - RNA, 19 nt, Artificial Sequence
  Description of Artificial Sequence: Synthetic oligonucleotide
gauggcgaaccucugcguc

SEQ ID NO: 2310726 - RNA, 19 nt, Artificial Sequence
  Description of Artificial Sequence: Synthetic oligonucleotide
gggguauucuacaugacug

SEQ ID NO: 2310727 - RNA, 19 nt, Artificial Sequence
  Description of Artificial Sequence: Synthetic oligonucleotide
acccgcucaaagcaccuuc

SEQ ID NO: 2310728 - RNA, 19 nt, Artificial Sequence
  Description of Artificial Sequence: Synthetic oligonucleotide
ugcguuuuccgggucugcg

SEQ ID NO: 2310729 - RNA, 19 nt, Artificial Sequence
  Description of Artificial Sequence: Synthetic oligonucleotide
uucccucacccgcucaaag

SEQ ID NO: 2310730 - RNA, 19 nt, Artificial Sequence
  Description of Artificial Sequence: Synthetic oligonucleotide
ucgaugaggaauggucucc

SEQ ID NO: 2310731 - RNA, 19 nt, Artificial Sequence
  Description of Artificial Sequence: Synthetic oligonucleotide
uuuucacaggcaggagagg

SEQ ID NO: 2310732 - RNA, 19 nt, Artificial Sequence
  Description of Artificial Sequence: Synthetic oligonucleotide
gucaguuuucacaggcagg

SEQ ID NO: 2310733 - RNA, 19 nt, Artificial Sequence
  Description of Artificial Sequence: Synthetic oligonucleotide
ucggcggaccugaagucag

SEQ ID NO: 2310734 - RNA, 19 nt, Artificial Sequence
  Description of Artificial Sequence: Synthetic oligonucleotide
uggggcgaacacucgauga

SEQ ID NO: 2310735 - RNA, 19 nt, Artificial Sequence
  Description of Artificial Sequence: Synthetic oligonucleotide
ucgggcaagcugcugcugc

SEQ ID NO: 2310736 - RNA, 19 nt, Artificial Sequence
  Description of Artificial Sequence: Synthetic oligonucleotide
ccacucauuaaaacaacag

SEQ ID NO: 2310737 - RNA, 19 nt, Artificial Sequence
  Description of Artificial Sequence: Synthetic oligonucleotide
aucggcagggguauucuac

SEQ ID NO: 2310738 - RNA, 19 nt, Artificial Sequence
  Description of Artificial Sequence: Synthetic oligonucleotide
cugauggggaugucuuggg

SEQ ID NO: 2310739 - RNA, 19 nt, Artificial Sequence
  Description of Artificial Sequence: Synthetic oligonucleotide
cccauagagguacacaccc

SEQ ID NO: 2310740 - RNA, 19 nt, Artificial Sequence
  Description of Artificial Sequence: Synthetic oligonucleotide
agggucuucugcucuaaga

SEQ ID NO: 2310741 - RNA, 19 nt, Artificial Sequence
  Description of Artificial Sequence: Synthetic oligonucleotide
ucucgcuucccucguuugc

SEQ ID NO: 2310742 - RNA, 19 nt, Artificial Sequence
  Description of Artificial Sequence: Synthetic oligonucleotide
ugcucgaacuguagccugc

SEQ ID NO: 2310743 - RNA, 19 nt, Artificial Sequence
  Description of Artificial Sequence: Synthetic oligonucleotide
ucucgaaguggugugggcu

SEQ ID NO: 2310744 - RNA, 19 nt, Artificial Sequence
  Description of Artificial Sequence: Synthetic oligonucleotide
cauuggcauggucacguag

SEQ ID NO: 2310745 - RNA, 19 nt, Artificial Sequence
  Description of Artificial Sequence: Synthetic oligonucleotide
ugcacccuucucgaagugg

SEQ ID NO: 2310746 - RNA, 19 nt, Artificial Sequence
  Description of Artificial Sequence: Synthetic oligonucleotide
auuggcauggucacguagu

SEQ ID NO: 2310747 - RNA, 19 nt, Artificial Sequence
  Description of Artificial Sequence: Synthetic oligonucleotide
cucacccgcucaaagcacc

SEQ ID NO: 2310748 - RNA, 19 nt, Artificial Sequence
  Description of Artificial Sequence: Synthetic oligonucleotide
ugcaauugugaagguggag

SEQ ID NO: 2310749 - RNA, 19 nt, Artificial Sequence
  Description of Artificial Sequence: Synthetic oligonucleotide
cacguaguaauaccagcuc

SEQ ID NO: 2310750 - RNA, 19 nt, Artificial Sequence
  Description of Artificial Sequence: Synthetic oligonucleotide
ugacaccagaucaucugau

SEQ ID NO: 2310751 - RNA, 19 nt, Artificial Sequence
  Description of Artificial Sequence: Synthetic oligonucleotide
ucccucacccgcucaaagc

SEQ ID NO: 2310752 - RNA, 19 nt, Artificial Sequence
  Description of Artificial Sequence: Synthetic oligonucleotide
ucggcagggguauucuaca

SEQ ID NO: 2310753 - RNA, 19 nt, Artificial Sequence
  Description of Artificial Sequence: Synthetic oligonucleotide
uaauaccagcucgugcacc

SEQ ID NO: 2310754 - RNA, 19 nt, Artificial Sequence
  Description of Artificial Sequence: Synthetic oligonucleotide
guaguaauaccagcucgug

SEQ ID NO: 2310755 - RNA, 19 nt, Artificial Sequence
  Description of Artificial Sequence: Synthetic oligonucleotide
ggguauucuacaugacugc

SEQ ID NO: 2310756 - RNA, 19 nt, Artificial Sequence
  Description of Artificial Sequence: Synthetic oligonucleotide
cucgaugaggaauggucuc

SEQ ID NO: 2310757 - RNA, 19 nt, Artificial Sequence
  Description of Artificial Sequence: Synthetic oligonucleotide
gccauauaucugcuggagg

SEQ ID NO: 2310758 - RNA, 19 nt, Artificial Sequence
  Description of Artificial Sequence: Synthetic oligonucleotide
aguaucccacugcaauugu

SEQ ID NO: 2310759 - RNA, 19 nt, Artificial Sequence
  Description of Artificial Sequence: Synthetic oligonucleotide
ugccagcccacucggcgcg

SEQ ID NO: 2310760 - RNA, 19 nt, Artificial Sequence
  Description of Artificial Sequence: Synthetic oligonucleotide
agaucaucugauggggaug

SEQ ID NO: 2310761 - RNA, 19 nt, Artificial Sequence
  Description of Artificial Sequence: Synthetic oligonucleotide
cucgcuucccucguuugcg

SEQ ID NO: 2310762 - RNA, 19 nt, Artificial Sequence
  Description of Artificial Sequence: Synthetic oligonucleotide
gcagggguauucuacauga

SEQ ID NO: 2310763 - RNA, 19 nt, Artificial Sequence
  Description of Artificial Sequence: Synthetic oligonucleotide
ucgaauccauuucgccacc

SEQ ID NO: 2310764 - RNA, 19 nt, Artificial Sequence
  Description of Artificial Sequence: Synthetic oligonucleotide
ccugaagucaguuuucaca

SEQ ID NO: 2310765 - RNA, 19 nt, Artificial Sequence
  Description of Artificial Sequence: Synthetic oligonucleotide
cagcauuuuggaaucggca

SEQ ID NO: 2310766 - RNA, 19 nt, Artificial Sequence
  Description of Artificial Sequence: Synthetic oligonucleotide
guaauaccagcucgugcac

SEQ ID NO: 2310767 - RNA, 19 nt, Artificial Sequence
  Description of Artificial Sequence: Synthetic oligonucleotide
ucugcguccugcucuugga

SEQ ID NO: 2310768 - RNA, 19 nt, Artificial Sequence
  Description of Artificial Sequence: Synthetic oligonucleotide
aucuggucuggagaaagcu

SEQ ID NO: 2310769 - RNA, 19 nt, Artificial Sequence
  Description of Artificial Sequence: Synthetic oligonucleotide
ucguuugcguuuuccgggu

SEQ ID NO: 2310770 - RNA, 19 nt, Artificial Sequence
  Description of Artificial Sequence: Synthetic oligonucleotide
gcagcucgagcacaguggg

SEQ ID NO: 2310771 - RNA, 19 nt, Artificial Sequence
  Description of Artificial Sequence: Synthetic oligonucleotide
agguacacacccauggccu

SEQ ID NO: 2310772 - RNA, 19 nt, Artificial Sequence
  Description of Artificial Sequence: Synthetic oligonucleotide
cuacaugacugcagguguc

SEQ ID NO: 2310773 - RNA, 19 nt, Artificial Sequence
  Description of Artificial Sequence: Synthetic oligonucleotide
ggccugauccuccugcagg

SEQ ID NO: 2310774 - RNA, 19 nt, Artificial Sequence
  Description of Artificial Sequence: Synthetic oligonucleotide
cugauccuccugcaggaac

SEQ ID NO: 2310775 - RNA, 19 nt, Artificial Sequence
  Description of Artificial Sequence: Synthetic oligonucleotide
cucugcguccugcucuugg

SEQ ID NO: 2310776 - RNA, 19 nt, Artificial Sequence
  Description of Artificial Sequence: Synthetic oligonucleotide
uucucgcuucccucguuug

SEQ ID NO: 2310777 - RNA, 19 nt, Artificial Sequence
  Description of Artificial Sequence: Synthetic oligonucleotide
uuggcauggucacguagua

SEQ ID NO: 2310778 - RNA, 19 nt, Artificial Sequence
  Description of Artificial Sequence: Synthetic oligonucleotide
gucgugccagcccacucgg

SEQ ID NO: 2310779 - RNA, 19 nt, Artificial Sequence
  Description of Artificial Sequence: Synthetic oligonucleotide
gaauccauuucgccaccuc

SEQ ID NO: 2310780 - RNA, 19 nt, Artificial Sequence
  Description of Artificial Sequence: Synthetic oligonucleotide
uuucgccaccucugcaccc

SEQ ID NO: 2310781 - RNA, 19 nt, Artificial Sequence
  Description of Artificial Sequence: Synthetic oligonucleotide
ucauaugcuuuugcauacu

SEQ ID NO: 2310782 - RNA, 19 nt, Artificial Sequence
  Description of Artificial Sequence: Synthetic oligonucleotide
accaucgauggcgaaccuc

SEQ ID NO: 2310783 - RNA, 19 nt, Artificial Sequence
  Description of Artificial Sequence: Synthetic oligonucleotide
uuggaaucggcagggguau

SEQ ID NO: 2310784 - RNA, 19 nt, Artificial Sequence
  Description of Artificial Sequence: Synthetic oligonucleotide
caaagcaccuucgggcaag

SEQ ID NO: 2310785 - RNA, 19 nt, Artificial Sequence
  Description of Artificial Sequence: Synthetic oligonucleotide
ccucguuugcguuuuccgg

SEQ ID NO: 2310786 - RNA, 19 nt, Artificial Sequence
  Description of Artificial Sequence: Synthetic oligonucleotide
cugcucuaagagacacucc

SEQ ID NO: 2310787 - RNA, 19 nt, Artificial Sequence
  Description of Artificial Sequence: Synthetic oligonucleotide
agagacacuccagaagcaa

SEQ ID NO: 2310788 - RNA, 19 nt, Artificial Sequence
  Description of Artificial Sequence: Synthetic oligonucleotide
aggccauauaucugcugga

SEQ ID NO: 2310789 - RNA, 19 nt, Artificial Sequence
  Description of Artificial Sequence: Synthetic oligonucleotide
gcacucugacaccagauca

SEQ ID NO: 2310790 - RNA, 19 nt, Artificial Sequence
  Description of Artificial Sequence: Synthetic oligonucleotide
agaauuuuccccacucauu

SEQ ID NO: 2310791 - RNA, 19 nt, Artificial Sequence
  Description of Artificial Sequence: Synthetic oligonucleotide
cacaccaucgauggcgaac

SEQ ID NO: 2310792 - RNA, 19 nt, Artificial Sequence
  Description of Artificial Sequence: Synthetic oligonucleotide
uguagccugccauguugac

SEQ ID NO: 2310793 - RNA, 19 nt, Artificial Sequence
  Description of Artificial Sequence: Synthetic oligonucleotide
ggucacguaguaauaccag

SEQ ID NO: 2310794 - RNA, 19 nt, Artificial Sequence
  Description of Artificial Sequence: Synthetic oligonucleotide
uuuuccgggucugcgguuc

SEQ ID NO: 2310795 - RNA, 19 nt, Artificial Sequence
  Description of Artificial Sequence: Synthetic oligonucleotide
auagagguacacacccaug

SEQ ID NO: 2310796 - RNA, 19 nt, Artificial Sequence
  Description of Artificial Sequence: Synthetic oligonucleotide
gcaccuucgggcaagcugc

SEQ ID NO: 2310797 - RNA, 19 nt, Artificial Sequence
  Description of Artificial Sequence: Synthetic oligonucleotide
uguguucccucacccgcuc

SEQ ID NO: 2310798 - RNA, 19 nt, Artificial Sequence
  Description of Artificial Sequence: Synthetic oligonucleotide
ugugggcuuggcagaauuu

SEQ ID NO: 2310799 - RNA, 19 nt, Artificial Sequence
  Description of Artificial Sequence: Synthetic oligonucleotide
aaucggcagggguauucua

SEQ ID NO: 2310800 - RNA, 19 nt, Artificial Sequence
  Description of Artificial Sequence: Synthetic oligonucleotide
cugccuggcauccucgcuc

SEQ ID NO: 2310801 - RNA, 19 nt, Artificial Sequence
  Description of Artificial Sequence: Synthetic oligonucleotide
gacaccaccugggccgagg

SEQ ID NO: 2310802 - RNA, 19 nt, Artificial Sequence
  Description of Artificial Sequence: Synthetic oligonucleotide
ggggcgaacacucgaugag

SEQ ID NO: 2310803 - RNA, 19 nt, Artificial Sequence
  Description of Artificial Sequence: Synthetic oligonucleotide
cugcucgaacuguagccug

SEQ ID NO: 2310804 - RNA, 19 nt, Artificial Sequence
  Description of Artificial Sequence: Synthetic oligonucleotide
ugccuggcauccucgcuca

SEQ ID NO: 2310805 - RNA, 19 nt, Artificial Sequence
  Description of Artificial Sequence: Synthetic oligonucleotide
cacugcaauugugaaggug

SEQ ID NO: 2310806 - RNA, 19 nt, Artificial Sequence
  Description of Artificial Sequence: Synthetic oligonucleotide
uggcagaauuuuccccacu

SEQ ID NO: 2310807 - RNA, 19 nt, Artificial Sequence
  Description of Artificial Sequence: Synthetic oligonucleotide
aucccacugcaauugugaa

SEQ ID NO: 2310808 - RNA, 19 nt, Artificial Sequence
  Description of Artificial Sequence: Synthetic oligonucleotide
gaagaugcagcugcucgaa

SEQ ID NO: 2310809 - RNA, 19 nt, Artificial Sequence
  Description of Artificial Sequence: Synthetic oligonucleotide
ucacccgcucaaagcaccu

SEQ ID NO: 2310810 - RNA, 19 nt, Artificial Sequence
  Description of Artificial Sequence: Synthetic oligonucleotide
ugcucuuggaggccauaua

SEQ ID NO: 2310811 - RNA, 19 nt, Artificial Sequence
  Description of Artificial Sequence: Synthetic oligonucleotide
gguccaguaucccacugca

SEQ ID NO: 2310812 - RNA, 19 nt, Artificial Sequence
  Description of Artificial Sequence: Synthetic oligonucleotide
uucgguccaguaucccacu

SEQ ID NO: 2310813 - RNA, 19 nt, Artificial Sequence
  Description of Artificial Sequence: Synthetic oligonucleotide
acccacucgucgugccagc

SEQ ID NO: 2310814 - RNA, 19 nt, Artificial Sequence
  Description of Artificial Sequence: Synthetic oligonucleotide
ugcacccacucgucgugcc

SEQ ID NO: 2310815 - RNA, 19 nt, Artificial Sequence
  Description of Artificial Sequence: Synthetic oligonucleotide
guaucccacugcaauugug

SEQ ID NO: 2310816 - RNA, 19 nt, Artificial Sequence
  Description of Artificial Sequence: Synthetic oligonucleotide
ugucggcggaccugaaguc

SEQ ID NO: 2310817 - RNA, 19 nt, Artificial Sequence
  Description of Artificial Sequence: Synthetic oligonucleotide
cauuucgguccaguauccc

SEQ ID NO: 2310818 - RNA, 19 nt, Artificial Sequence
  Description of Artificial Sequence: Synthetic oligonucleotide
gguauucuacaugacugca

SEQ ID NO: 2310819 - RNA, 19 nt, Artificial Sequence
  Description of Artificial Sequence: Synthetic oligonucleotide
ccuucgggcaagcugcugc

SEQ ID NO: 2310820 - RNA, 19 nt, Artificial Sequence
  Description of Artificial Sequence: Synthetic oligonucleotide
ucuguccauguguucccuc

SEQ ID NO: 2310821 - RNA, 19 nt, Artificial Sequence
  Description of Artificial Sequence: Synthetic oligonucleotide
ucgaaguggugugggcuug

SEQ ID NO: 2310822 - RNA, 19 nt, Artificial Sequence
  Description of Artificial Sequence: Synthetic oligonucleotide
uggcauuggcauggucacg

SEQ ID NO: 2310823 - RNA, 19 nt, Artificial Sequence
  Description of Artificial Sequence: Synthetic oligonucleotide
aaagggcccuguuguugau

SEQ ID NO: 2310824 - RNA, 19 nt, Artificial Sequence
  Description of Artificial Sequence: Synthetic oligonucleotide
ggcaacgggugguuccugg

SEQ ID NO: 2310825 - RNA, 19 nt, Artificial Sequence
  Description of Artificial Sequence: Synthetic oligonucleotide
uugcauacuugugcuuaac

SEQ ID NO: 2310826 - RNA, 19 nt, Artificial Sequence
  Description of Artificial Sequence: Synthetic oligonucleotide
gugucggcggaccugaagu

SEQ ID NO: 2310827 - RNA, 19 nt, Artificial Sequence
  Description of Artificial Sequence: Synthetic oligonucleotide
gcauccucgcucaacauca

SEQ ID NO: 2310828 - RNA, 19 nt, Artificial Sequence
  Description of Artificial Sequence: Synthetic oligonucleotide
cagcuccccauagagguac

SEQ ID NO: 2310829 - RNA, 19 nt, Artificial Sequence
  Description of Artificial Sequence: Synthetic oligonucleotide
ggccauauaucugcuggag

SEQ ID NO: 2310830 - RNA, 19 nt, Artificial Sequence
  Description of Artificial Sequence: Synthetic oligonucleotide
auaucugcuggaggcgcug

SEQ ID NO: 2310831 - RNA, 19 nt, Artificial Sequence
  Description of Artificial Sequence: Synthetic oligonucleotide
uucgccaccucugcaccca

SEQ ID NO: 2310832 - RNA, 19 nt, Artificial Sequence
  Description of Artificial Sequence: Synthetic oligonucleotide
uuuccgggucugcgguuca

SEQ ID NO: 2310833 - RNA, 19 nt, Artificial Sequence
  Description of Artificial Sequence: Synthetic oligonucleotide
cugcguccugcucuuggag

SEQ ID NO: 2310834 - RNA, 19 nt, Artificial Sequence
  Description of Artificial Sequence: Synthetic oligonucleotide
cuucauuucgguccaguau

SEQ ID NO: 2310835 - RNA, 19 nt, Artificial Sequence
  Description of Artificial Sequence: Synthetic oligonucleotide
ucagcuccccauagaggua

SEQ ID NO: 2310836 - RNA, 19 nt, Artificial Sequence
  Description of Artificial Sequence: Synthetic oligonucleotide
ggcauggucacguaguaau

SEQ ID NO: 2310837 - RNA, 19 nt, Artificial Sequence
  Description of Artificial Sequence: Synthetic oligonucleotide
cccucguuugcguuuuccg

SEQ ID NO: 2310838 - RNA, 19 nt, Artificial Sequence
  Description of Artificial Sequence: Synthetic oligonucleotide
cugcaauugugaaggugga

SEQ ID NO: 2310839 - RNA, 19 nt, Artificial Sequence
  Description of Artificial Sequence: Synthetic oligonucleotide
cauagagguacacacccau

SEQ ID NO: 2310840 - RNA, 19 nt, Artificial Sequence
  Description of Artificial Sequence: Synthetic oligonucleotide
gggcuuggcagaauuuucc

SEQ ID NO: 2310841 - RNA, 19 nt, Artificial Sequence
  Description of Artificial Sequence: Synthetic oligonucleotide
cuugugcuuaaccaccagu

SEQ ID NO: 2310842 - RNA, 19 nt, Artificial Sequence
  Description of Artificial Sequence: Synthetic oligonucleotide
gugccagcccacucggcgc

SEQ ID NO: 2310843 - RNA, 19 nt, Artificial Sequence
  Description of Artificial Sequence: Synthetic oligonucleotide
cagggguauucuacaugac

SEQ ID NO: 2310844 - RNA, 19 nt, Artificial Sequence
  Description of Artificial Sequence: Synthetic oligonucleotide
gcguuuuccgggucugcgg

SEQ ID NO: 2310845 - RNA, 19 nt, Artificial Sequence
  Description of Artificial Sequence: Synthetic oligonucleotide
cuggaggcgcugcaguguc

SEQ ID NO: 2310846 - RNA, 19 nt, Artificial Sequence
  Description of Artificial Sequence: Synthetic oligonucleotide
caccaguucacaccaucga

SEQ ID NO: 2310847 - RNA, 19 nt, Artificial Sequence
  Description of Artificial Sequence: Synthetic oligonucleotide
gggcgaacacucgaugagg

SEQ ID NO: 2310848 - RNA, 19 nt, Artificial Sequence
  Description of Artificial Sequence: Synthetic oligonucleotide
gaaccucugcguccugcuc

SEQ ID NO: 2310849 - RNA, 19 nt, Artificial Sequence
  Description of Artificial Sequence: Synthetic oligonucleotide
cagaauuuuccccacucau

SEQ ID NO: 2310850 - RNA, 19 nt, Artificial Sequence
  Description of Artificial Sequence: Synthetic oligonucleotide
guagccugccauguugaca

SEQ ID NO: 2310851 - RNA, 19 nt, Artificial Sequence
  Description of Artificial Sequence: Synthetic oligonucleotide
ggcacucugacaccagauc

SEQ ID NO: 2310852 - RNA, 19 nt, Artificial Sequence
  Description of Artificial Sequence: Synthetic oligonucleotide
ggcauccucgcucaacauc

SEQ ID NO: 2310853 - RNA, 19 nt, Artificial Sequence
  Description of Artificial Sequence: Synthetic oligonucleotide
cacucgucgugccagccca

SEQ ID NO: 2310854 - RNA, 19 nt, Artificial Sequence
  Description of Artificial Sequence: Synthetic oligonucleotide
acgggugguuccuggcaug

SEQ ID NO: 2310855 - RNA, 19 nt, Artificial Sequence
  Description of Artificial Sequence: Synthetic oligonucleotide
gcguccugcucuuggaggc

SEQ ID NO: 2310856 - RNA, 19 nt, Artificial Sequence
  Description of Artificial Sequence: Synthetic oligonucleotide
cagcucgagcacagugggg

SEQ ID NO: 2310857 - RNA, 19 nt, Artificial Sequence
  Description of Artificial Sequence: Synthetic oligonucleotide
caucgauggcgaaccucug

SEQ ID NO: 2310858 - RNA, 19 nt, Artificial Sequence
  Description of Artificial Sequence: Synthetic oligonucleotide
ucgcuucccucguuugcgu

SEQ ID NO: 2310859 - RNA, 19 nt, Artificial Sequence
  Description of Artificial Sequence: Synthetic oligonucleotide
gggucugcgguucacucga

SEQ ID NO: 2310860 - RNA, 19 nt, Artificial Sequence
  Description of Artificial Sequence: Synthetic oligonucleotide
uggcgaaccucugcguccu

SEQ ID NO: 2310861 - RNA, 19 nt, Artificial Sequence
  Description of Artificial Sequence: Synthetic oligonucleotide
auggcaacgggugguuccu

SEQ ID NO: 2310862 - RNA, 19 nt, Artificial Sequence
  Description of Artificial Sequence: Synthetic oligonucleotide
ggugucggcggaccugaag

SEQ ID NO: 2310863 - RNA, 19 nt, Artificial Sequence
  Description of Artificial Sequence: Synthetic oligonucleotide
cgaacuguagccugccaug

SEQ ID NO: 2310864 - RNA, 19 nt, Artificial Sequence
  Description of Artificial Sequence: Synthetic oligonucleotide
cacccacucgucgugccag

SEQ ID NO: 2310865 - RNA, 19 nt, Artificial Sequence
  Description of Artificial Sequence: Synthetic oligonucleotide
ucgucgugccagcccacuc

SEQ ID NO: 2310866 - RNA, 19 nt, Artificial Sequence
  Description of Artificial Sequence: Synthetic oligonucleotide
gcagcggcagcauuuugga

SEQ ID NO: 2310867 - RNA, 19 nt, Artificial Sequence
  Description of Artificial Sequence: Synthetic oligonucleotide
gcucgagcacaguggggcg

SEQ ID NO: 2310868 - RNA, 19 nt, Artificial Sequence
  Description of Artificial Sequence: Synthetic oligonucleotide
cccacucauuaaaacaaca

SEQ ID NO: 2310869 - RNA, 19 nt, Artificial Sequence
  Description of Artificial Sequence: Synthetic oligonucleotide
cgcucaaagcaccuucggg

SEQ ID NO: 2310870 - RNA, 19 nt, Artificial Sequence
  Description of Artificial Sequence: Synthetic oligonucleotide
cagaucaucugauggggau

SEQ ID NO: 2310871 - RNA, 19 nt, Artificial Sequence
  Description of Artificial Sequence: Synthetic oligonucleotide
acucggcgcgcaguccucg

SEQ ID NO: 2310872 - RNA, 19 nt, Artificial Sequence
  Description of Artificial Sequence: Synthetic oligonucleotide
caacgggugguuccuggca

SEQ ID NO: 2310873 - RNA, 19 nt, Artificial Sequence
  Description of Artificial Sequence: Synthetic oligonucleotide
aguggggcgaacacucgau

SEQ ID NO: 2310874 - RNA, 19 nt, Artificial Sequence
  Description of Artificial Sequence: Synthetic oligonucleotide
gcaguccucggccucgcgc

SEQ ID NO: 2310875 - RNA, 19 nt, Artificial Sequence
  Description of Artificial Sequence: Synthetic oligonucleotide
accugcucauaugcuuuug

SEQ ID NO: 2310876 - RNA, 19 nt, Artificial Sequence
  Description of Artificial Sequence: Synthetic oligonucleotide
caucugauggggaugucuu

SEQ ID NO: 2310877 - RNA, 19 nt, Artificial Sequence
  Description of Artificial Sequence: Synthetic oligonucleotide
ucgagcacaguggggcgaa

SEQ ID NO: 2310878 - RNA, 19 nt, Artificial Sequence
  Description of Artificial Sequence: Synthetic oligonucleotide
gcucuuggaggccauauau

SEQ ID NO: 2310879 - RNA, 19 nt, Artificial Sequence
  Description of Artificial Sequence: Synthetic oligonucleotide
uggcauccucgcucaacau

SEQ ID NO: 2310880 - RNA, 19 nt, Artificial Sequence
  Description of Artificial Sequence: Synthetic oligonucleotide
uucgggcaagcugcugcug

SEQ ID NO: 2310881 - RNA, 19 nt, Artificial Sequence
  Description of Artificial Sequence: Synthetic oligonucleotide
gcaacgggugguuccuggc

SEQ ID NO: 2310882 - RNA, 19 nt, Artificial Sequence
  Description of Artificial Sequence: Synthetic oligonucleotide
ucgugccagcccacucggc

SEQ ID NO: 2310883 - RNA, 19 nt, Artificial Sequence
  Description of Artificial Sequence: Synthetic oligonucleotide
uggaggcgcugcagugucu

SEQ ID NO: 2310884 - RNA, 19 nt, Artificial Sequence
  Description of Artificial Sequence: Synthetic oligonucleotide
gaaucggcagggguauucu

SEQ ID NO: 2310885 - RNA, 19 nt, Artificial Sequence
  Description of Artificial Sequence: Synthetic oligonucleotide
ggaaucggcagggguauuc

SEQ ID NO: 2310886 - RNA, 19 nt, Artificial Sequence
  Description of Artificial Sequence: Synthetic oligonucleotide
gucuccuggguggcagcgg

SEQ ID NO: 2310887 - RNA, 19 nt, Artificial Sequence
  Description of Artificial Sequence: Synthetic oligonucleotide
uccgggucugcgguucacu

SEQ ID NO: 2310888 - RNA, 19 nt, Artificial Sequence
  Description of Artificial Sequence: Synthetic oligonucleotide
ggcgaacacucgaugagga

SEQ ID NO: 2310889 - RNA, 19 nt, Artificial Sequence
  Description of Artificial Sequence: Synthetic oligonucleotide
ccucgcucaacaucagcuc

SEQ ID NO: 2310890 - RNA, 19 nt, Artificial Sequence
  Description of Artificial Sequence: Synthetic oligonucleotide
gucggcggaccugaaguca

SEQ ID NO: 2310891 - RNA, 19 nt, Artificial Sequence
  Description of Artificial Sequence: Synthetic oligonucleotide
cauaugcuuuugcauacuu

SEQ ID NO: 2310892 - RNA, 19 nt, Artificial Sequence
  Description of Artificial Sequence: Synthetic oligonucleotide
gugguuccuggcauggaaa

SEQ ID NO: 2310893 - RNA, 19 nt, Artificial Sequence
  Description of Artificial Sequence: Synthetic oligonucleotide
ccuucucgaaguggugugg

SEQ ID NO: 2310894 - RNA, 19 nt, Artificial Sequence
  Description of Artificial Sequence: Synthetic oligonucleotide
ucacaccaucgauggcgaa

SEQ ID NO: 2310895 - RNA, 19 nt, Artificial Sequence
  Description of Artificial Sequence: Synthetic oligonucleotide
gguucacucgaauccauuu

SEQ ID NO: 2310896 - RNA, 19 nt, Artificial Sequence
  Description of Artificial Sequence: Synthetic oligonucleotide
caguggggcgaacacucga

SEQ ID NO: 2310897 - RNA, 19 nt, Artificial Sequence
  Description of Artificial Sequence: Synthetic oligonucleotide
cccuucucgaaguggugug

SEQ ID NO: 2310898 - RNA, 19 nt, Artificial Sequence
  Description of Artificial Sequence: Synthetic oligonucleotide
augaucuggucuggagaaa

SEQ ID NO: 2310899 - RNA, 19 nt, Artificial Sequence
  Description of Artificial Sequence: Synthetic oligonucleotide
gugcacccuucucgaagug

SEQ ID NO: 2310900 - RNA, 19 nt, Artificial Sequence
  Description of Artificial Sequence: Synthetic oligonucleotide
cgucgugccagcccacucg

SEQ ID NO: 2310901 - RNA, 19 nt, Artificial Sequence
  Description of Artificial Sequence: Synthetic oligonucleotide
ccaucgauggcgaaccucu

SEQ ID NO: 2310902 - RNA, 19 nt, Artificial Sequence
  Description of Artificial Sequence: Synthetic oligonucleotide
cacccauggccugauccuc

SEQ ID NO: 2310903 - RNA, 19 nt, Artificial Sequence
  Description of Artificial Sequence: Synthetic oligonucleotide
aggaaccucuccaccugcu

SEQ ID NO: 2310904 - RNA, 19 nt, Artificial Sequence
  Description of Artificial Sequence: Synthetic oligonucleotide
aagcaccuucgggcaagcu

SEQ ID NO: 2310905 - RNA, 19 nt, Artificial Sequence
  Description of Artificial Sequence: Synthetic oligonucleotide
ggcauuggcauggucacgu

SEQ ID NO: 2310906 - RNA, 19 nt, Artificial Sequence
  Description of Artificial Sequence: Synthetic oligonucleotide
cccucacccgcucaaagca

SEQ ID NO: 2310907 - RNA, 19 nt, Artificial Sequence
  Description of Artificial Sequence: Synthetic oligonucleotide
caccucugcacccacucgu

SEQ ID NO: 2310908 - RNA, 19 nt, Artificial Sequence
  Description of Artificial Sequence: Synthetic oligonucleotide
uggggaugucuugggcuuc

SEQ ID NO: 2310909 - RNA, 19 nt, Artificial Sequence
  Description of Artificial Sequence: Synthetic oligonucleotide
ccgcucaaagcaccuucgg

SEQ ID NO: 2310910 - RNA, 19 nt, Artificial Sequence
  Description of Artificial Sequence: Synthetic oligonucleotide
acucgucgugccagcccac

SEQ ID NO: 2310911 - RNA, 19 nt, Artificial Sequence
  Description of Artificial Sequence: Synthetic oligonucleotide
cucugcacccacucgucgu

SEQ ID NO: 2310912 - RNA, 19 nt, Artificial Sequence
  Description of Artificial Sequence: Synthetic oligonucleotide
cucgaacuguagccugcca

SEQ ID NO: 2310913 - RNA, 19 nt, Artificial Sequence
  Description of Artificial Sequence: Synthetic oligonucleotide
caguccucggccucgcgcu

SEQ ID NO: 2310914 - RNA, 19 nt, Artificial Sequence
  Description of Artificial Sequence: Synthetic oligonucleotide
ccucacccgcucaaagcac

SEQ ID NO: 2310915 - RNA, 19 nt, Artificial Sequence
  Description of Artificial Sequence: Synthetic oligonucleotide
cuucgggcaagcugcugcu

SEQ ID NO: 2310916 - RNA, 19 nt, Artificial Sequence
  Description of Artificial Sequence: Synthetic oligonucleotide
uggcaacgggugguuccug

SEQ ID NO: 2310917 - RNA, 19 nt, Artificial Sequence
  Description of Artificial Sequence: Synthetic oligonucleotide
ccagaucaucugaugggga

SEQ ID NO: 2310918 - RNA, 19 nt, Artificial Sequence
  Description of Artificial Sequence: Synthetic oligonucleotide
cagcucgugcacccuucuc

SEQ ID NO: 2310919 - RNA, 19 nt, Artificial Sequence
  Description of Artificial Sequence: Synthetic oligonucleotide
cgggucugcgguucacucg

SEQ ID NO: 2310920 - RNA, 19 nt, Artificial Sequence
  Description of Artificial Sequence: Synthetic oligonucleotide
cucgaaguggugugggcuu

SEQ ID NO: 2310921 - RNA, 19 nt, Artificial Sequence
  Description of Artificial Sequence: Synthetic oligonucleotide
ccauagagguacacaccca

SEQ ID NO: 2310922 - RNA, 19 nt, Artificial Sequence
  Description of Artificial Sequence: Synthetic oligonucleotide
guguucccucacccgcuca

SEQ ID NO: 2310923 - RNA, 19 nt, Artificial Sequence
  Description of Artificial Sequence: Synthetic oligonucleotide
cggcuucucgcuucccucg

SEQ ID NO: 2310924 - RNA, 19 nt, Artificial Sequence
  Description of Artificial Sequence: Synthetic oligonucleotide
ccacucgucgugccagccc

SEQ ID NO: 2310925 - RNA, 19 nt, Artificial Sequence
  Description of Artificial Sequence: Synthetic oligonucleotide
cgguccaguaucccacugc

SEQ ID NO: 2310926 - RNA, 19 nt, Artificial Sequence
  Description of Artificial Sequence: Synthetic oligonucleotide
cguaguaauaccagcucgu

SEQ ID NO: 2310927 - RNA, 19 nt, Artificial Sequence
  Description of Artificial Sequence: Synthetic oligonucleotide
uucccucguuugcguuuuc

SEQ ID NO: 2310928 - RNA, 19 nt, Artificial Sequence
  Description of Artificial Sequence: Synthetic oligonucleotide
cacucggcgcgcaguccuc

SEQ ID NO: 2310929 - RNA, 19 nt, Artificial Sequence
  Description of Artificial Sequence: Synthetic oligonucleotide
uuccgggucugcgguucac

SEQ ID NO: 2310930 - RNA, 19 nt, Artificial Sequence
  Description of Artificial Sequence: Synthetic oligonucleotide
gcuuaaccaccaguucaca

SEQ ID NO: 2310931 - RNA, 19 nt, Artificial Sequence
  Description of Artificial Sequence: Synthetic oligonucleotide
aggcggcuucucgcuuccc

SEQ ID NO: 2310932 - RNA, 19 nt, Artificial Sequence
  Description of Artificial Sequence: Synthetic oligonucleotide
agcccacucggcgcgcagu

SEQ ID NO: 2310933 - RNA, 19 nt, Artificial Sequence
  Description of Artificial Sequence: Synthetic oligonucleotide
cuccaccugcucauaugcu

SEQ ID NO: 2310934 - RNA, 19 nt, Artificial Sequence
  Description of Artificial Sequence: Synthetic oligonucleotide
ccuggcauccucgcucaac

SEQ ID NO: 2310935 - RNA, 19 nt, Artificial Sequence
  Description of Artificial Sequence: Synthetic oligonucleotide
cucgugcacccuucucgaa

SEQ ID NO: 2310936 - RNA, 19 nt, Artificial Sequence
  Description of Artificial Sequence: Synthetic oligonucleotide
ccgggucugcgguucacuc

SEQ ID NO: 2310937 - RNA, 19 nt, Artificial Sequence
  Description of Artificial Sequence: Synthetic oligonucleotide
guccaguaucccacugcaa

SEQ ID NO: 2310938 - RNA, 19 nt, Artificial Sequence
  Description of Artificial Sequence: Synthetic oligonucleotide
cagcggcagcauuuuggaa

SEQ ID NO: 2310939 - RNA, 19 nt, Artificial Sequence
  Description of Artificial Sequence: Synthetic oligonucleotide
guucccucacccgcucaaa

SEQ ID NO: 2310940 - RNA, 19 nt, Artificial Sequence
  Description of Artificial Sequence: Synthetic oligonucleotide
accugggccgaggcucugu

SEQ ID NO: 2310941 - RNA, 19 nt, Artificial Sequence
  Description of Artificial Sequence: Synthetic oligonucleotide
uggaaucggcagggguauu

SEQ ID NO: 2310942 - RNA, 19 nt, Artificial Sequence
  Description of Artificial Sequence: Synthetic oligonucleotide
gucugcgguucacucgaau

SEQ ID NO: 2310943 - RNA, 19 nt, Artificial Sequence
  Description of Artificial Sequence: Synthetic oligonucleotide
gcauggucacguaguaaua

SEQ ID NO: 2310944 - RNA, 19 nt, Artificial Sequence
  Description of Artificial Sequence: Synthetic oligonucleotide
agcuccccauagagguaca

SEQ ID NO: 2310945 - RNA, 19 nt, Artificial Sequence
  Description of Artificial Sequence: Synthetic oligonucleotide
ggccgaggcucuguccaug

SEQ ID NO: 2310946 - RNA, 19 nt, Artificial Sequence
  Description of Artificial Sequence: Synthetic oligonucleotide
cgcucaacaucagcucccc

SEQ ID NO: 2310947 - RNA, 19 nt, Artificial Sequence
  Description of Artificial Sequence: Synthetic oligonucleotide
gcacccacucgucgugcca

SEQ ID NO: 2310948 - RNA, 19 nt, Artificial Sequence
  Description of Artificial Sequence: Synthetic oligonucleotide
gcgccugcagggccucuug

SEQ ID NO: 2310949 - RNA, 19 nt, Artificial Sequence
  Description of Artificial Sequence: Synthetic oligonucleotide
cgaaguggugugggcuugg

SEQ ID NO: 2310950 - RNA, 19 nt, Artificial Sequence
  Description of Artificial Sequence: Synthetic oligonucleotide
gcccacucggcgcgcaguc

SEQ ID NO: 2310951 - RNA, 19 nt, Artificial Sequence
  Description of Artificial Sequence: Synthetic oligonucleotide
ccugggccgaggcucuguc

SEQ ID NO: 2310952 - RNA, 19 nt, Artificial Sequence
  Description of Artificial Sequence: Synthetic oligonucleotide
cccacucgucgugccagcc

SEQ ID NO: 2310953 - RNA, 19 nt, Artificial Sequence
  Description of Artificial Sequence: Synthetic oligonucleotide
ccaguaucccacugcaauu

SEQ ID NO: 2310954 - RNA, 19 nt, Artificial Sequence
  Description of Artificial Sequence: Synthetic oligonucleotide
ggcuucauuucgguccagu

SEQ ID NO: 2310955 - RNA, 19 nt, Artificial Sequence
  Description of Artificial Sequence: Synthetic oligonucleotide
cgaacacucgaugaggaau

SEQ ID NO: 2310956 - RNA, 19 nt, Artificial Sequence
  Description of Artificial Sequence: Synthetic oligonucleotide
cggaccugaagucaguuuu

SEQ ID NO: 2310957 - RNA, 19 nt, Artificial Sequence
  Description of Artificial Sequence: Synthetic oligonucleotide
caaaggcggcuucucgcuu

SEQ ID NO: 2310958 - RNA, 19 nt, Artificial Sequence
  Description of Artificial Sequence: Synthetic oligonucleotide
cggcgcgcaguccucggcc

SEQ ID NO: 2310959 - RNA, 19 nt, Artificial Sequence
  Description of Artificial Sequence: Synthetic oligonucleotide
gcuucccucguuugcguuu

SEQ ID NO: 2310960 - RNA, 19 nt, Artificial Sequence
  Description of Artificial Sequence: Synthetic oligonucleotide
gcauuggcauggucacgua

SEQ ID NO: 2310961 - RNA, 19 nt, Artificial Sequence
  Description of Artificial Sequence: Synthetic oligonucleotide
ccgaggcucuguccaugug

SEQ ID NO: 2310962 - RNA, 19 nt, Artificial Sequence
  Description of Artificial Sequence: Synthetic oligonucleotide
ccaccugcucauaugcuuu

SEQ ID NO: 2310963 - RNA, 19 nt, Artificial Sequence
  Description of Artificial Sequence: Synthetic oligonucleotide
ggcuucucgcuucccucgu

SEQ ID NO: 2310964 - RNA, 19 nt, Artificial Sequence
  Description of Artificial Sequence: Synthetic oligonucleotide
gccgaggcucuguccaugu

SEQ ID NO: 2310965 - RNA, 19 nt, Artificial Sequence
  Description of Artificial Sequence: Synthetic oligonucleotide
ggcgaaccucugcguccug

SEQ ID NO: 2310966 - RNA, 19 nt, Artificial Sequence
  Description of Artificial Sequence: Synthetic oligonucleotide
caccuucgggcaagcugcu

SEQ ID NO: 2310967 - RNA, 19 nt, Artificial Sequence
  Description of Artificial Sequence: Synthetic oligonucleotide
guggcagcggcagcauuuu

SEQ ID NO: 2310968 - RNA, 19 nt, Artificial Sequence
  Description of Artificial Sequence: Synthetic oligonucleotide
cguuugcguuuuccggguc

SEQ ID NO: 2310969 - RNA, 19 nt, Artificial Sequence
  Description of Artificial Sequence: Synthetic oligonucleotide
cccacucggcgcgcagucc

SEQ ID NO: 2310970 - RNA, 19 nt, Artificial Sequence
  Description of Artificial Sequence: Synthetic oligonucleotide
cucgucgugccagcccacu

SEQ ID NO: 2310971 - RNA, 19 nt, Artificial Sequence
  Description of Artificial Sequence: Synthetic oligonucleotide
gggcuucauuucgguccag

SEQ ID NO: 2310972 - RNA, 19 nt, Artificial Sequence
  Description of Artificial Sequence: Synthetic oligonucleotide
gggcacucugacaccagau

SEQ ID NO: 2310973 - RNA, 19 nt, Artificial Sequence
  Description of Artificial Sequence: Synthetic oligonucleotide
caccaucgauggcgaaccu

SEQ ID NO: 2310974 - RNA, 19 nt, Artificial Sequence
  Description of Artificial Sequence: Synthetic oligonucleotide
ggcgcgcaguccucggccu

SEQ ID NO: 2310975 - RNA, 19 nt, Artificial Sequence
  Description of Artificial Sequence: Synthetic oligonucleotide
gcggaccugaagucaguuu

SEQ ID NO: 2310976 - RNA, 19 nt, Artificial Sequence
  Description of Artificial Sequence: Synthetic oligonucleotide
caccugggccgaggcucug

SEQ ID NO: 2310977 - RNA, 19 nt, Artificial Sequence
  Description of Artificial Sequence: Synthetic oligonucleotide
ccacucggcgcgcaguccu

SEQ ID NO: 2310978 - RNA, 19 nt, Artificial Sequence
  Description of Artificial Sequence: Synthetic oligonucleotide
cgaaccucugcguccugcu

SEQ ID NO: 2310979 - RNA, 19 nt, Artificial Sequence
  Description of Artificial Sequence: Synthetic oligonucleotide
cgcaguccucggccucgcg

SEQ ID NO: 2310980 - RNA, 19 nt, Artificial Sequence
  Description of Artificial Sequence: Synthetic oligonucleotide
ggcggaccugaagucaguu

SEQ ID NO: 2310981 - RNA, 19 nt, Artificial Sequence
  Description of Artificial Sequence: Synthetic oligonucleotide
gccagcccacucggcgcgc

SEQ ID NO: 2310982 - RNA, 19 nt, Artificial Sequence
  Description of Artificial Sequence: Synthetic oligonucleotide
ggucugcgguucacucgaa

SEQ ID NO: 2310983 - RNA, 19 nt, Artificial Sequence
  Description of Artificial Sequence: Synthetic oligonucleotide
ccagcucgugcacccuucu

SEQ ID NO: 2310984 - RNA, 19 nt, Artificial Sequence
  Description of Artificial Sequence: Synthetic oligonucleotide
cgauggcgaaccucugcgu

SEQ ID NO: 2310985 - RNA, 19 nt, Artificial Sequence
  Description of Artificial Sequence: Synthetic oligonucleotide
ggugugggcuuggcagaau

SEQ ID NO: 2310986 - RNA, 19 nt, Artificial Sequence
  Description of Artificial Sequence: Synthetic oligonucleotide
cacccgcucaaagcaccuu

SEQ ID NO: 2310987 - RNA, 19 nt, Artificial Sequence
  Description of Artificial Sequence: Synthetic oligonucleotide
ccugcucuuggaggccaua

SEQ ID NO: 2310988 - RNA, 19 nt, Artificial Sequence
  Description of Artificial Sequence: Synthetic oligonucleotide
cggcagggguauucuacau

SEQ ID NO: 2310989 - RNA, 19 nt, Artificial Sequence
  Description of Artificial Sequence: Synthetic oligonucleotide
cggcggaccugaagucagu

SEQ ID NO: 2310990 - RNA, 19 nt, Artificial Sequence
  Description of Artificial Sequence: Synthetic oligonucleotide
uggaguaugacacagguug

SEQ ID NO: 2310991 - RNA, 19 nt, Artificial Sequence
  Description of Artificial Sequence: Synthetic oligonucleotide
uguucgaagagauagggcc

SEQ ID NO: 2310992 - RNA, 19 nt, Artificial Sequence
  Description of Artificial Sequence: Synthetic oligonucleotide
gaagcuacagcacucagag

SEQ ID NO: 2310993 - RNA, 19 nt, Artificial Sequence
  Description of Artificial Sequence: Synthetic oligonucleotide
ucuuauauuccuuuguucu

SEQ ID NO: 2310994 - RNA, 19 nt, Artificial Sequence
  Description of Artificial Sequence: Synthetic oligonucleotide
uuuagacauggcuugacgg

SEQ ID NO: 2310995 - RNA, 19 nt, Artificial Sequence
  Description of Artificial Sequence: Synthetic oligonucleotide
auuuccaaccacugaaugc

SEQ ID NO: 2310996 - RNA, 19 nt, Artificial Sequence
  Description of Artificial Sequence: Synthetic oligonucleotide
uuuauggggauccauggcc

SEQ ID NO: 2310997 - RNA, 19 nt, Artificial Sequence
  Description of Artificial Sequence: Synthetic oligonucleotide
agagauagggccuuguuug

SEQ ID NO: 2310998 - RNA, 19 nt, Artificial Sequence
  Description of Artificial Sequence: Synthetic oligonucleotide
aauuuuccugaggaguucc

SEQ ID NO: 2310999 - RNA, 19 nt, Artificial Sequence
  Description of Artificial Sequence: Synthetic oligonucleotide
uuuacggucauuguuccgg

SEQ ID NO: 2311000 - RNA, 19 nt, Artificial Sequence
  Description of Artificial Sequence: Synthetic oligonucleotide
aaccuguucgaagagauag

SEQ ID NO: 2311001 - RNA, 19 nt, Artificial Sequence
  Description of Artificial Sequence: Synthetic oligonucleotide
ucuuuuacggucauuguuc

SEQ ID NO: 2311002 - RNA, 19 nt, Artificial Sequence
  Description of Artificial Sequence: Synthetic oligonucleotide
ucgaauauggauucgaauu

SEQ ID NO: 2311003 - RNA, 19 nt, Artificial Sequence
  Description of Artificial Sequence: Synthetic oligonucleotide
agaucacagauuuagacau

SEQ ID NO: 2311004 - RNA, 19 nt, Artificial Sequence
  Description of Artificial Sequence: Synthetic oligonucleotide
aucagugaugugcacaggg

SEQ ID NO: 2311005 - RNA, 19 nt, Artificial Sequence
  Description of Artificial Sequence: Synthetic oligonucleotide
agcuacagcacucagagaa

SEQ ID NO: 2311006 - RNA, 19 nt, Artificial Sequence
  Description of Artificial Sequence: Synthetic oligonucleotide
auucgaauuuuccugagga

SEQ ID NO: 2311007 - RNA, 19 nt, Artificial Sequence
  Description of Artificial Sequence: Synthetic oligonucleotide
caagaucacagauuuagac

SEQ ID NO: 2311008 - RNA, 19 nt, Artificial Sequence
  Description of Artificial Sequence: Synthetic oligonucleotide
uauggauucgaauuuuccu

SEQ ID NO: 2311009 - RNA, 19 nt, Artificial Sequence
  Description of Artificial Sequence: Synthetic oligonucleotide
guuuauggcucgaauaugg

SEQ ID NO: 2311010 - RNA, 19 nt, Artificial Sequence
  Description of Artificial Sequence: Synthetic oligonucleotide
auuuagacauggcuugacg

SEQ ID NO: 2311011 - RNA, 19 nt, Artificial Sequence
  Description of Artificial Sequence: Synthetic oligonucleotide
auggauucgaauuuuccug

SEQ ID NO: 2311012 - RNA, 19 nt, Artificial Sequence
  Description of Artificial Sequence: Synthetic oligonucleotide
cuuguuucgaguugucucc

SEQ ID NO: 2311013 - RNA, 19 nt, Artificial Sequence
  Description of Artificial Sequence: Synthetic oligonucleotide
ugacucuugguuuucacga

SEQ ID NO: 2311014 - RNA, 19 nt, Artificial Sequence
  Description of Artificial Sequence: Synthetic oligonucleotide
gauccauggccuuugcccg

SEQ ID NO: 2311015 - RNA, 19 nt, Artificial Sequence
  Description of Artificial Sequence: Synthetic oligonucleotide
uuccaguauagccuugggg

SEQ ID NO: 2311016 - RNA, 19 nt, Artificial Sequence
  Description of Artificial Sequence: Synthetic oligonucleotide
uugacucuugguuuucacg

SEQ ID NO: 2311017 - RNA, 19 nt, Artificial Sequence
  Description of Artificial Sequence: Synthetic oligonucleotide
uugguaaccuguucgaaga

SEQ ID NO: 2311018 - RNA, 19 nt, Artificial Sequence
  Description of Artificial Sequence: Synthetic oligonucleotide
uuugaacaccucuuccagg

SEQ ID NO: 2311019 - RNA, 19 nt, Artificial Sequence
  Description of Artificial Sequence: Synthetic oligonucleotide
uauggcucgaauauggauu

SEQ ID NO: 2311020 - RNA, 19 nt, Artificial Sequence
  Description of Artificial Sequence: Synthetic oligonucleotide
gauucgaauuuuccugagg

SEQ ID NO: 2311021 - RNA, 19 nt, Artificial Sequence
  Description of Artificial Sequence: Synthetic oligonucleotide
uuuccuggcaagcaccuug

SEQ ID NO: 2311022 - RNA, 19 nt, Artificial Sequence
  Description of Artificial Sequence: Synthetic oligonucleotide
auauggauucgaauuuucc

SEQ ID NO: 2311023 - RNA, 19 nt, Artificial Sequence
  Description of Artificial Sequence: Synthetic oligonucleotide
aucacagauuuagacaugg

SEQ ID NO: 2311024 - RNA, 19 nt, Artificial Sequence
  Description of Artificial Sequence: Synthetic oligonucleotide
aguauagccuuggggaucc

SEQ ID NO: 2311025 - RNA, 19 nt, Artificial Sequence
  Description of Artificial Sequence: Synthetic oligonucleotide
uuuuauggggauccauggc

SEQ ID NO: 2311026 - RNA, 19 nt, Artificial Sequence
  Description of Artificial Sequence: Synthetic oligonucleotide
uuugcccgcaagaucacag

SEQ ID NO: 2311027 - RNA, 19 nt, Artificial Sequence
  Description of Artificial Sequence: Synthetic oligonucleotide
cagauuuagacauggcuug

SEQ ID NO: 2311028 - RNA, 19 nt, Artificial Sequence
  Description of Artificial Sequence: Synthetic oligonucleotide
aaggcccucauagucaggg

SEQ ID NO: 2311029 - RNA, 19 nt, Artificial Sequence
  Description of Artificial Sequence: Synthetic oligonucleotide
ugugccuugacucuugguu

SEQ ID NO: 2311030 - RNA, 19 nt, Artificial Sequence
  Description of Artificial Sequence: Synthetic oligonucleotide
aguaguggcaucacagggc

SEQ ID NO: 2311031 - RNA, 19 nt, Artificial Sequence
  Description of Artificial Sequence: Synthetic oligonucleotide
uguuggcagaaaaggaagc

SEQ ID NO: 2311032 - RNA, 19 nt, Artificial Sequence
  Description of Artificial Sequence: Synthetic oligonucleotide
gaggaguuccgcuuccugg

SEQ ID NO: 2311033 - RNA, 19 nt, Artificial Sequence
  Description of Artificial Sequence: Synthetic oligonucleotide
uuagacauggcuugacggu

SEQ ID NO: 2311034 - RNA, 19 nt, Artificial Sequence
  Description of Artificial Sequence: Synthetic oligonucleotide
guaggaagggcuuguuucg

SEQ ID NO: 2311035 - RNA, 19 nt, Artificial Sequence
  Description of Artificial Sequence: Synthetic oligonucleotide
aaaggaagcuacagcacuc

SEQ ID NO: 2311036 - RNA, 19 nt, Artificial Sequence
  Description of Artificial Sequence: Synthetic oligonucleotide
gacgaagccaucuggagca

SEQ ID NO: 2311037 - RNA, 19 nt, Artificial Sequence
  Description of Artificial Sequence: Synthetic oligonucleotide
uugguuuucacgaacucuu

SEQ ID NO: 2311038 - RNA, 19 nt, Artificial Sequence
  Description of Artificial Sequence: Synthetic oligonucleotide
ucauagucagggaccacag

SEQ ID NO: 2311039 - RNA, 19 nt, Artificial Sequence
  Description of Artificial Sequence: Synthetic oligonucleotide
ugcagauucccucuuccug

SEQ ID NO: 2311040 - RNA, 19 nt, Artificial Sequence
  Description of Artificial Sequence: Synthetic oligonucleotide
ucgaauuuuccugaggagu

SEQ ID NO: 2311041 - RNA, 19 nt, Artificial Sequence
  Description of Artificial Sequence: Synthetic oligonucleotide
acugaaugcugucugauuu

SEQ ID NO: 2311042 - RNA, 19 nt, Artificial Sequence
  Description of Artificial Sequence: Synthetic oligonucleotide
gaaagcucagcuuuuccuc

SEQ ID NO: 2311043 - RNA, 19 nt, Artificial Sequence
  Description of Artificial Sequence: Synthetic oligonucleotide
cuuuuacggucauuguucc

SEQ ID NO: 2311044 - RNA, 19 nt, Artificial Sequence
  Description of Artificial Sequence: Synthetic oligonucleotide
uucgaacucggucuggaga

SEQ ID NO: 2311045 - RNA, 19 nt, Artificial Sequence
  Description of Artificial Sequence: Synthetic oligonucleotide
aggguguuggcagaaaagg

SEQ ID NO: 2311046 - RNA, 19 nt, Artificial Sequence
  Description of Artificial Sequence: Synthetic oligonucleotide
gaaagccugguaaaggccc

SEQ ID NO: 2311047 - RNA, 19 nt, Artificial Sequence
  Description of Artificial Sequence: Synthetic oligonucleotide
uaagcuucgcuuugaacac

SEQ ID NO: 2311048 - RNA, 19 nt, Artificial Sequence
  Description of Artificial Sequence: Synthetic oligonucleotide
uucgaauuuuccugaggag

SEQ ID NO: 2311049 - RNA, 19 nt, Artificial Sequence
  Description of Artificial Sequence: Synthetic oligonucleotide
uggauucgaauuuuccuga

SEQ ID NO: 2311050 - RNA, 19 nt, Artificial Sequence
  Description of Artificial Sequence: Synthetic oligonucleotide
uuccgguucucuuuaagcu

SEQ ID NO: 2311051 - RNA, 19 nt, Artificial Sequence
  Description of Artificial Sequence: Synthetic oligonucleotide
acggucauuguuccgguuc

SEQ ID NO: 2311052 - RNA, 19 nt, Artificial Sequence
  Description of Artificial Sequence: Synthetic oligonucleotide
cucuuuucuggaaagccug

SEQ ID NO: 2311053 - RNA, 19 nt, Artificial Sequence
  Description of Artificial Sequence: Synthetic oligonucleotide
uuucgaguugucucccggg

SEQ ID NO: 2311054 - RNA, 19 nt, Artificial Sequence
  Description of Artificial Sequence: Synthetic oligonucleotide
guaugacacagguuggcag

SEQ ID NO: 2311055 - RNA, 19 nt, Artificial Sequence
  Description of Artificial Sequence: Synthetic oligonucleotide
uuuauggcucgaauaugga

SEQ ID NO: 2311056 - RNA, 19 nt, Artificial Sequence
  Description of Artificial Sequence: Synthetic oligonucleotide
ucuaguaguuuucuucuuu

SEQ ID NO: 2311057 - RNA, 19 nt, Artificial Sequence
  Description of Artificial Sequence: Synthetic oligonucleotide
caguaguggcaucacaggg

SEQ ID NO: 2311058 - RNA, 19 nt, Artificial Sequence
  Description of Artificial Sequence: Synthetic oligonucleotide
caccuugguaaccuguucg

SEQ ID NO: 2311059 - RNA, 19 nt, Artificial Sequence
  Description of Artificial Sequence: Synthetic oligonucleotide
uuauggggauccauggccu

SEQ ID NO: 2311060 - RNA, 19 nt, Artificial Sequence
  Description of Artificial Sequence: Synthetic oligonucleotide
uuuaagcuucgcuuugaac

SEQ ID NO: 2311061 - RNA, 19 nt, Artificial Sequence
  Description of Artificial Sequence: Synthetic oligonucleotide
ugauaggggacgaagccau

SEQ ID NO: 2311062 - RNA, 19 nt, Artificial Sequence
  Description of Artificial Sequence: Synthetic oligonucleotide
ggauccauggccuuugccc

SEQ ID NO: 2311063 - RNA, 19 nt, Artificial Sequence
  Description of Artificial Sequence: Synthetic oligonucleotide
agagaaugccuucuuggca

SEQ ID NO: 2311064 - RNA, 19 nt, Artificial Sequence
  Description of Artificial Sequence: Synthetic oligonucleotide
aacucuuccucuaggccgg

SEQ ID NO: 2311065 - RNA, 19 nt, Artificial Sequence
  Description of Artificial Sequence: Synthetic oligonucleotide
cagagaaugccuucuuggc

SEQ ID NO: 2311066 - RNA, 19 nt, Artificial Sequence
  Description of Artificial Sequence: Synthetic oligonucleotide
uuuuacggucauuguuccg

SEQ ID NO: 2311067 - RNA, 19 nt, Artificial Sequence
  Description of Artificial Sequence: Synthetic oligonucleotide
agaaugccuucuuggcagc

SEQ ID NO: 2311068 - RNA, 19 nt, Artificial Sequence
  Description of Artificial Sequence: Synthetic oligonucleotide
uguuccgguucucuuuaag

SEQ ID NO: 2311069 - RNA, 19 nt, Artificial Sequence
  Description of Artificial Sequence: Synthetic oligonucleotide
cuggcaagcaccuugguaa

SEQ ID NO: 2311070 - RNA, 19 nt, Artificial Sequence
  Description of Artificial Sequence: Synthetic oligonucleotide
cuggaagugcugauagggg

SEQ ID NO: 2311071 - RNA, 19 nt, Artificial Sequence
  Description of Artificial Sequence: Synthetic oligonucleotide
ucgaacucggucuggagaa

SEQ ID NO: 2311072 - RNA, 19 nt, Artificial Sequence
  Description of Artificial Sequence: Synthetic oligonucleotide
agcaguaguggcaucacag

SEQ ID NO: 2311073 - RNA, 19 nt, Artificial Sequence
  Description of Artificial Sequence: Synthetic oligonucleotide
uuauggcucgaauauggau

SEQ ID NO: 2311074 - RNA, 19 nt, Artificial Sequence
  Description of Artificial Sequence: Synthetic oligonucleotide
ggcaguucggaguaggaag

SEQ ID NO: 2311075 - RNA, 19 nt, Artificial Sequence
  Description of Artificial Sequence: Synthetic oligonucleotide
aacucggucuggagaaagc

SEQ ID NO: 2311076 - RNA, 19 nt, Artificial Sequence
  Description of Artificial Sequence: Synthetic oligonucleotide
aaugccuucuuggcagcgg

SEQ ID NO: 2311077 - RNA, 19 nt, Artificial Sequence
  Description of Artificial Sequence: Synthetic oligonucleotide
uuuccugaggaguuccgcu

SEQ ID NO: 2311078 - RNA, 19 nt, Artificial Sequence
  Description of Artificial Sequence: Synthetic oligonucleotide
guuucgaguugucucccgg

SEQ ID NO: 2311079 - RNA, 19 nt, Artificial Sequence
  Description of Artificial Sequence: Synthetic oligonucleotide
gaagugcugauaggggacg

SEQ ID NO: 2311080 - RNA, 19 nt, Artificial Sequence
  Description of Artificial Sequence: Synthetic oligonucleotide
acagauuuagacauggcuu

SEQ ID NO: 2311081 - RNA, 19 nt, Artificial Sequence
  Description of Artificial Sequence: Synthetic oligonucleotide
gguaaaggcccucauaguc

SEQ ID NO: 2311082 - RNA, 19 nt, Artificial Sequence
  Description of Artificial Sequence: Synthetic oligonucleotide
gcagauucccucuuccugg

SEQ ID NO: 2311083 - RNA, 19 nt, Artificial Sequence
  Description of Artificial Sequence: Synthetic oligonucleotide
uucgcuuugaacaccucuu

SEQ ID NO: 2311084 - RNA, 19 nt, Artificial Sequence
  Description of Artificial Sequence: Synthetic oligonucleotide
caagugacauucugacugc

SEQ ID NO: 2311085 - RNA, 19 nt, Artificial Sequence
  Description of Artificial Sequence: Synthetic oligonucleotide
uguuuauggcucgaauaug

SEQ ID NO: 2311086 - RNA, 19 nt, Artificial Sequence
  Description of Artificial Sequence: Synthetic oligonucleotide
uuuucuggaaagccuggua

SEQ ID NO: 2311087 - RNA, 19 nt, Artificial Sequence
  Description of Artificial Sequence: Synthetic oligonucleotide
ugacauucugacugcagau

SEQ ID NO: 2311088 - RNA, 19 nt, Artificial Sequence
  Description of Artificial Sequence: Synthetic oligonucleotide
uuauauuccuuuguucuuu

SEQ ID NO: 2311089 - RNA, 19 nt, Artificial Sequence
  Description of Artificial Sequence: Synthetic oligonucleotide
uguuucgaguugucucccg

SEQ ID NO: 2311090 - RNA, 19 nt, Artificial Sequence
  Description of Artificial Sequence: Synthetic oligonucleotide
uucaagugacauucugacu

SEQ ID NO: 2311091 - RNA, 19 nt, Artificial Sequence
  Description of Artificial Sequence: Synthetic oligonucleotide
gcuggaagugcugauaggg

SEQ ID NO: 2311092 - RNA, 19 nt, Artificial Sequence
  Description of Artificial Sequence: Synthetic oligonucleotide
ugugugccuugacucuugg

SEQ ID NO: 2311093 - RNA, 19 nt, Artificial Sequence
  Description of Artificial Sequence: Synthetic oligonucleotide
aggggacgaagccaucugg

SEQ ID NO: 2311094 - RNA, 19 nt, Artificial Sequence
  Description of Artificial Sequence: Synthetic oligonucleotide
uccuccaacucuuucuuau

SEQ ID NO: 2311095 - RNA, 19 nt, Artificial Sequence
  Description of Artificial Sequence: Synthetic oligonucleotide
cugcuggaagugcugauag

SEQ ID NO: 2311096 - RNA, 19 nt, Artificial Sequence
  Description of Artificial Sequence: Synthetic oligonucleotide
guagcugcuggcugagggg

SEQ ID NO: 2311097 - RNA, 19 nt, Artificial Sequence
  Description of Artificial Sequence: Synthetic oligonucleotide
ugguaaccuguucgaagag

SEQ ID NO: 2311098 - RNA, 19 nt, Artificial Sequence
  Description of Artificial Sequence: Synthetic oligonucleotide
uuguuuguauucuucucuu

SEQ ID NO: 2311099 - RNA, 19 nt, Artificial Sequence
  Description of Artificial Sequence: Synthetic oligonucleotide
ucacagauuuagacauggc

SEQ ID NO: 2311100 - RNA, 19 nt, Artificial Sequence
  Description of Artificial Sequence: Synthetic oligonucleotide
ucuugguuuucacgaacuc

SEQ ID NO: 2311101 - RNA, 19 nt, Artificial Sequence
  Description of Artificial Sequence: Synthetic oligonucleotide
cuguucgaagagauagggc

SEQ ID NO: 2311102 - RNA, 19 nt, Artificial Sequence
  Description of Artificial Sequence: Synthetic oligonucleotide
auagccuuggggauccuuc

SEQ ID NO: 2311103 - RNA, 19 nt, Artificial Sequence
  Description of Artificial Sequence: Synthetic oligonucleotide
gugacauucugacugcaga

SEQ ID NO: 2311104 - RNA, 19 nt, Artificial Sequence
  Description of Artificial Sequence: Synthetic oligonucleotide
uguuuguauucuucucuuc

SEQ ID NO: 2311105 - RNA, 19 nt, Artificial Sequence
  Description of Artificial Sequence: Synthetic oligonucleotide
cauguuuauggcucgaaua

SEQ ID NO: 2311106 - RNA, 19 nt, Artificial Sequence
  Description of Artificial Sequence: Synthetic oligonucleotide
uucgaguugucucccgggu

SEQ ID NO: 2311107 - RNA, 19 nt, Artificial Sequence
  Description of Artificial Sequence: Synthetic oligonucleotide
gguagugugcuucugcuuc

SEQ ID NO: 2311108 - RNA, 19 nt, Artificial Sequence
  Description of Artificial Sequence: Synthetic oligonucleotide
uuugugcauuuccaaccac

SEQ ID NO: 2311109 - RNA, 19 nt, Artificial Sequence
  Description of Artificial Sequence: Synthetic oligonucleotide
gaugugcacagggagggug

SEQ ID NO: 2311110 - RNA, 19 nt, Artificial Sequence
  Description of Artificial Sequence: Synthetic oligonucleotide
uccaaccacugaaugcugu

SEQ ID NO: 2311111 - RNA, 19 nt, Artificial Sequence
  Description of Artificial Sequence: Synthetic oligonucleotide
uuccugguagcaucaguga

SEQ ID NO: 2311112 - RNA, 19 nt, Artificial Sequence
  Description of Artificial Sequence: Synthetic oligonucleotide
aaggaagcuacagcacuca

SEQ ID NO: 2311113 - RNA, 19 nt, Artificial Sequence
  Description of Artificial Sequence: Synthetic oligonucleotide
gaguaugacacagguuggc

SEQ ID NO: 2311114 - RNA, 19 nt, Artificial Sequence
  Description of Artificial Sequence: Synthetic oligonucleotide
gaggguguuggcagaaaag

SEQ ID NO: 2311115 - RNA, 19 nt, Artificial Sequence
  Description of Artificial Sequence: Synthetic oligonucleotide
caggguucacccgaggccg

SEQ ID NO: 2311116 - RNA, 19 nt, Artificial Sequence
  Description of Artificial Sequence: Synthetic oligonucleotide
ccuucuaguaguuuucuuc

SEQ ID NO: 2311117 - RNA, 19 nt, Artificial Sequence
  Description of Artificial Sequence: Synthetic oligonucleotide
uccugguagcaucagugau

SEQ ID NO: 2311118 - RNA, 19 nt, Artificial Sequence
  Description of Artificial Sequence: Synthetic oligonucleotide
aggaguuccgcuuccugga

SEQ ID NO: 2311119 - RNA, 19 nt, Artificial Sequence
  Description of Artificial Sequence: Synthetic oligonucleotide
uuuuccucccggguacggg

SEQ ID NO: 2311120 - RNA, 19 nt, Artificial Sequence
  Description of Artificial Sequence: Synthetic oligonucleotide
gguuuucacgaacucuucc

SEQ ID NO: 2311121 - RNA, 19 nt, Artificial Sequence
  Description of Artificial Sequence: Synthetic oligonucleotide
cacaggguucacccgaggc

SEQ ID NO: 2311122 - RNA, 19 nt, Artificial Sequence
  Description of Artificial Sequence: Synthetic oligonucleotide
ggcugguuccaguauagcc

SEQ ID NO: 2311123 - RNA, 19 nt, Artificial Sequence
  Description of Artificial Sequence: Synthetic oligonucleotide
guuggcaguucggaguagg

SEQ ID NO: 2311124 - RNA, 19 nt, Artificial Sequence
  Description of Artificial Sequence: Synthetic oligonucleotide
auuguuccgguucucuuua

SEQ ID NO: 2311125 - RNA, 19 nt, Artificial Sequence
  Description of Artificial Sequence: Synthetic oligonucleotide
gaacucggucuggagaaag

SEQ ID NO: 2311126 - RNA, 19 nt, Artificial Sequence
  Description of Artificial Sequence: Synthetic oligonucleotide
cauagucagggaccacagg

SEQ ID NO: 2311127 - RNA, 19 nt, Artificial Sequence
  Description of Artificial Sequence: Synthetic oligonucleotide
uuuccucccggguacgggu

SEQ ID NO: 2311128 - RNA, 19 nt, Artificial Sequence
  Description of Artificial Sequence: Synthetic oligonucleotide
agggccguggaguaugaca

SEQ ID NO: 2311129 - RNA, 19 nt, Artificial Sequence
  Description of Artificial Sequence: Synthetic oligonucleotide
aguaugacacagguuggca

SEQ ID NO: 2311130 - RNA, 19 nt, Artificial Sequence
  Description of Artificial Sequence: Synthetic oligonucleotide
uucacgaacucuuccucua

SEQ ID NO: 2311131 - RNA, 19 nt, Artificial Sequence
  Description of Artificial Sequence: Synthetic oligonucleotide
cuucuaguaguuuucuucu

SEQ ID NO: 2311132 - RNA, 19 nt, Artificial Sequence
  Description of Artificial Sequence: Synthetic oligonucleotide
auucgaacucggucuggag

SEQ ID NO: 2311133 - RNA, 19 nt, Artificial Sequence
  Description of Artificial Sequence: Synthetic oligonucleotide
uaggggacgaagccaucug

SEQ ID NO: 2311134 - RNA, 19 nt, Artificial Sequence
  Description of Artificial Sequence: Synthetic oligonucleotide
gcaguaguggcaucacagg

SEQ ID NO: 2311135 - RNA, 19 nt, Artificial Sequence
  Description of Artificial Sequence: Synthetic oligonucleotide
gauccuucuaguaguuuuc

SEQ ID NO: 2311136 - RNA, 19 nt, Artificial Sequence
  Description of Artificial Sequence: Synthetic oligonucleotide
accuugguaaccuguucga

SEQ ID NO: 2311137 - RNA, 19 nt, Artificial Sequence
  Description of Artificial Sequence: Synthetic oligonucleotide
guagcaucagugaugugca

SEQ ID NO: 2311138 - RNA, 19 nt, Artificial Sequence
  Description of Artificial Sequence: Synthetic oligonucleotide
ucgcuuugaacaccucuuc

SEQ ID NO: 2311139 - RNA, 19 nt, Artificial Sequence
  Description of Artificial Sequence: Synthetic oligonucleotide
guuuucacgaacucuuccu

SEQ ID NO: 2311140 - RNA, 19 nt, Artificial Sequence
  Description of Artificial Sequence: Synthetic oligonucleotide
ggagcauguuuauggcucg

SEQ ID NO: 2311141 - RNA, 19 nt, Artificial Sequence
  Description of Artificial Sequence: Synthetic oligonucleotide
gaauucgaacucggucugg

SEQ ID NO: 2311142 - RNA, 19 nt, Artificial Sequence
  Description of Artificial Sequence: Synthetic oligonucleotide
gcuuguuucgaguugucuc

SEQ ID NO: 2311143 - RNA, 19 nt, Artificial Sequence
  Description of Artificial Sequence: Synthetic oligonucleotide
aguggcaucacagggccgu

SEQ ID NO: 2311144 - RNA, 19 nt, Artificial Sequence
  Description of Artificial Sequence: Synthetic oligonucleotide
gcagaaaaggaagcuacag

SEQ ID NO: 2311145 - RNA, 19 nt, Artificial Sequence
  Description of Artificial Sequence: Synthetic oligonucleotide
uuggcaguucggaguagga

SEQ ID NO: 2311146 - RNA, 19 nt, Artificial Sequence
  Description of Artificial Sequence: Synthetic oligonucleotide
cacagauuuagacauggcu

SEQ ID NO: 2311147 - RNA, 19 nt, Artificial Sequence
  Description of Artificial Sequence: Synthetic oligonucleotide
agggugucccgguagugug

SEQ ID NO: 2311148 - RNA, 19 nt, Artificial Sequence
  Description of Artificial Sequence: Synthetic oligonucleotide
aggaagcuacagcacucag

SEQ ID NO: 2311149 - RNA, 19 nt, Artificial Sequence
  Description of Artificial Sequence: Synthetic oligonucleotide
ggacgaagccaucuggagc

SEQ ID NO: 2311150 - RNA, 19 nt, Artificial Sequence
  Description of Artificial Sequence: Synthetic oligonucleotide
uccgguucucuuuaagcuu

SEQ ID NO: 2311151 - RNA, 19 nt, Artificial Sequence
  Description of Artificial Sequence: Synthetic oligonucleotide
ugguuuucacgaacucuuc

SEQ ID NO: 2311152 - RNA, 19 nt, Artificial Sequence
  Description of Artificial Sequence: Synthetic oligonucleotide
uccaacucuuucuuauauu

SEQ ID NO: 2311153 - RNA, 19 nt, Artificial Sequence
  Description of Artificial Sequence: Synthetic oligonucleotide
gaccacaggguucacccga

SEQ ID NO: 2311154 - RNA, 19 nt, Artificial Sequence
  Description of Artificial Sequence: Synthetic oligonucleotide
ggaauucgaacucggucug

SEQ ID NO: 2311155 - RNA, 19 nt, Artificial Sequence
  Description of Artificial Sequence: Synthetic oligonucleotide
cuuucuuauauuccuuugu

SEQ ID NO: 2311156 - RNA, 19 nt, Artificial Sequence
  Description of Artificial Sequence: Synthetic oligonucleotide
gaaugccuucuuggcagcg

SEQ ID NO: 2311157 - RNA, 19 nt, Artificial Sequence
  Description of Artificial Sequence: Synthetic oligonucleotide
uucggaguaggaagggcuu

SEQ ID NO: 2311158 - RNA, 19 nt, Artificial Sequence
  Description of Artificial Sequence: Synthetic oligonucleotide
ccuguucgaagagauaggg

SEQ ID NO: 2311159 - RNA, 19 nt, Artificial Sequence
  Description of Artificial Sequence: Synthetic oligonucleotide
uuguuucgaguugucuccc

SEQ ID NO: 2311160 - RNA, 19 nt, Artificial Sequence
  Description of Artificial Sequence: Synthetic oligonucleotide
agugacauucugacugcag

SEQ ID NO: 2311161 - RNA, 19 nt, Artificial Sequence
  Description of Artificial Sequence: Synthetic oligonucleotide
ugcccgcaagaucacagau

SEQ ID NO: 2311162 - RNA, 19 nt, Artificial Sequence
  Description of Artificial Sequence: Synthetic oligonucleotide
auaggggacgaagccaucu

SEQ ID NO: 2311163 - RNA, 19 nt, Artificial Sequence
  Description of Artificial Sequence: Synthetic oligonucleotide
uccugaggaguuccgcuuc

SEQ ID NO: 2311164 - RNA, 19 nt, Artificial Sequence
  Description of Artificial Sequence: Synthetic oligonucleotide
gcuuuuauggggauccaug

SEQ ID NO: 2311165 - RNA, 19 nt, Artificial Sequence
  Description of Artificial Sequence: Synthetic oligonucleotide
cgcaagaucacagauuuag

SEQ ID NO: 2311166 - RNA, 19 nt, Artificial Sequence
  Description of Artificial Sequence: Synthetic oligonucleotide
gaauuuuccugaggaguuc

SEQ ID NO: 2311167 - RNA, 19 nt, Artificial Sequence
  Description of Artificial Sequence: Synthetic oligonucleotide
uuccgcuuccuggaguuug

SEQ ID NO: 2311168 - RNA, 19 nt, Artificial Sequence
  Description of Artificial Sequence: Synthetic oligonucleotide
aguuccgcuuccuggaguu

SEQ ID NO: 2311169 - RNA, 19 nt, Artificial Sequence
  Description of Artificial Sequence: Synthetic oligonucleotide
gcaguucggaguaggaagg

SEQ ID NO: 2311170 - RNA, 19 nt, Artificial Sequence
  Description of Artificial Sequence: Synthetic oligonucleotide
cucggucuggagaaagcuc

SEQ ID NO: 2311171 - RNA, 19 nt, Artificial Sequence
  Description of Artificial Sequence: Synthetic oligonucleotide
uaguggcaucacagggccg

SEQ ID NO: 2311172 - RNA, 19 nt, Artificial Sequence
  Description of Artificial Sequence: Synthetic oligonucleotide
agauuuagacauggcuuga

SEQ ID NO: 2311173 - RNA, 19 nt, Artificial Sequence
  Description of Artificial Sequence: Synthetic oligonucleotide
guacggguagcggugcggg

SEQ ID NO: 2311174 - RNA, 19 nt, Artificial Sequence
  Description of Artificial Sequence: Synthetic oligonucleotide
aguugucucccggguuucc

SEQ ID NO: 2311175 - RNA, 19 nt, Artificial Sequence
  Description of Artificial Sequence: Synthetic oligonucleotide
ggaguaugacacagguugg

SEQ ID NO: 2311176 - RNA, 19 nt, Artificial Sequence
  Description of Artificial Sequence: Synthetic oligonucleotide
acucggucuggagaaagcu

SEQ ID NO: 2311177 - RNA, 19 nt, Artificial Sequence
  Description of Artificial Sequence: Synthetic oligonucleotide
accuguucgaagagauagg

SEQ ID NO: 2311178 - RNA, 19 nt, Artificial Sequence
  Description of Artificial Sequence: Synthetic oligonucleotide
ggauucgaauuuuccugag

SEQ ID NO: 2311179 - RNA, 19 nt, Artificial Sequence
  Description of Artificial Sequence: Synthetic oligonucleotide
agacauggcuugacgguuc

SEQ ID NO: 2311180 - RNA, 19 nt, Artificial Sequence
  Description of Artificial Sequence: Synthetic oligonucleotide
uucuaguaguuuucuucuu

SEQ ID NO: 2311181 - RNA, 19 nt, Artificial Sequence
  Description of Artificial Sequence: Synthetic oligonucleotide
ucuaggccggccugccuca

SEQ ID NO: 2311182 - RNA, 19 nt, Artificial Sequence
  Description of Artificial Sequence: Synthetic oligonucleotide
uaaccuguucgaagagaua

SEQ ID NO: 2311183 - RNA, 19 nt, Artificial Sequence
  Description of Artificial Sequence: Synthetic oligonucleotide
ugucccgguagugugcuuc

SEQ ID NO: 2311184 - RNA, 19 nt, Artificial Sequence
  Description of Artificial Sequence: Synthetic oligonucleotide
aagccugguaaaggcccuc

SEQ ID NO: 2311185 - RNA, 19 nt, Artificial Sequence
  Description of Artificial Sequence: Synthetic oligonucleotide
uuccugaggaguuccgcuu

SEQ ID NO: 2311186 - RNA, 19 nt, Artificial Sequence
  Description of Artificial Sequence: Synthetic oligonucleotide
gauagggccuuguuuguau

SEQ ID NO: 2311187 - RNA, 19 nt, Artificial Sequence
  Description of Artificial Sequence: Synthetic oligonucleotide
gggacgaagccaucuggag

SEQ ID NO: 2311188 - RNA, 19 nt, Artificial Sequence
  Description of Artificial Sequence: Synthetic oligonucleotide
ggaaagccugguaaaggcc

SEQ ID NO: 2311189 - RNA, 19 nt, Artificial Sequence
  Description of Artificial Sequence: Synthetic oligonucleotide
cucuaggccggccugccuc

SEQ ID NO: 2311190 - RNA, 19 nt, Artificial Sequence
  Description of Artificial Sequence: Synthetic oligonucleotide
uacggguagcggugcgggg

SEQ ID NO: 2311191 - RNA, 19 nt, Artificial Sequence
  Description of Artificial Sequence: Synthetic oligonucleotide
aggccggaauucgaacucg

SEQ ID NO: 2311192 - RNA, 19 nt, Artificial Sequence
  Description of Artificial Sequence: Synthetic oligonucleotide
uaggaagggcuuguuucga

SEQ ID NO: 2311193 - RNA, 19 nt, Artificial Sequence
  Description of Artificial Sequence: Synthetic oligonucleotide
gcugaggggacuucucagc

SEQ ID NO: 2311194 - RNA, 19 nt, Artificial Sequence
  Description of Artificial Sequence: Synthetic oligonucleotide
uccucccggguacggguag

SEQ ID NO: 2311195 - RNA, 19 nt, Artificial Sequence
  Description of Artificial Sequence: Synthetic oligonucleotide
gaggggacuucucagcagu

SEQ ID NO: 2311196 - RNA, 19 nt, Artificial Sequence
  Description of Artificial Sequence: Synthetic oligonucleotide
ugccuugacucuugguuuu

SEQ ID NO: 2311197 - RNA, 19 nt, Artificial Sequence
  Description of Artificial Sequence: Synthetic oligonucleotide
auccuucuaguaguuuucu

SEQ ID NO: 2311198 - RNA, 19 nt, Artificial Sequence
  Description of Artificial Sequence: Synthetic oligonucleotide
uccgcuuccuggaguuugu

SEQ ID NO: 2311199 - RNA, 19 nt, Artificial Sequence
  Description of Artificial Sequence: Synthetic oligonucleotide
cugaggggacuucucagca

SEQ ID NO: 2311200 - RNA, 19 nt, Artificial Sequence
  Description of Artificial Sequence: Synthetic oligonucleotide
uucgaagagauagggccuu

SEQ ID NO: 2311201 - RNA, 19 nt, Artificial Sequence
  Description of Artificial Sequence: Synthetic oligonucleotide
ucgaguugucucccggguu

SEQ ID NO: 2311202 - RNA, 19 nt, Artificial Sequence
  Description of Artificial Sequence: Synthetic oligonucleotide
aagugcugauaggggacga

SEQ ID NO: 2311203 - RNA, 19 nt, Artificial Sequence
  Description of Artificial Sequence: Synthetic oligonucleotide
uccuucuaguaguuuucuu

SEQ ID NO: 2311204 - RNA, 19 nt, Artificial Sequence
  Description of Artificial Sequence: Synthetic oligonucleotide
uagcggugcggggagcccg

SEQ ID NO: 2311205 - RNA, 19 nt, Artificial Sequence
  Description of Artificial Sequence: Synthetic oligonucleotide
aaaggcccucauagucagg

SEQ ID NO: 2311206 - RNA, 19 nt, Artificial Sequence
  Description of Artificial Sequence: Synthetic oligonucleotide
caguucggaguaggaaggg

SEQ ID NO: 2311207 - RNA, 19 nt, Artificial Sequence
  Description of Artificial Sequence: Synthetic oligonucleotide
cuuuuccucccggguacgg

SEQ ID NO: 2311208 - RNA, 19 nt, Artificial Sequence
  Description of Artificial Sequence: Synthetic oligonucleotide
gccuuggggauccuucuag

SEQ ID NO: 2311209 - RNA, 19 nt, Artificial Sequence
  Description of Artificial Sequence: Synthetic oligonucleotide
uggcaucacagggccgugg

SEQ ID NO: 2311210 - RNA, 19 nt, Artificial Sequence
  Description of Artificial Sequence: Synthetic oligonucleotide
cugauaggggacgaagcca

SEQ ID NO: 2311211 - RNA, 19 nt, Artificial Sequence
  Description of Artificial Sequence: Synthetic oligonucleotide
uucacccgaggccggaauu

SEQ ID NO: 2311212 - RNA, 19 nt, Artificial Sequence
  Description of Artificial Sequence: Synthetic oligonucleotide
uggcaguucggaguaggaa

SEQ ID NO: 2311213 - RNA, 19 nt, Artificial Sequence
  Description of Artificial Sequence: Synthetic oligonucleotide
cuuccucuaggccggccug

SEQ ID NO: 2311214 - RNA, 19 nt, Artificial Sequence
  Description of Artificial Sequence: Synthetic oligonucleotide
guaaccuguucgaagagau

SEQ ID NO: 2311215 - RNA, 19 nt, Artificial Sequence
  Description of Artificial Sequence: Synthetic oligonucleotide
uggcucgaauauggauucg

SEQ ID NO: 2311216 - RNA, 19 nt, Artificial Sequence
  Description of Artificial Sequence: Synthetic oligonucleotide
cugugugccuugacucuug

SEQ ID NO: 2311217 - RNA, 19 nt, Artificial Sequence
  Description of Artificial Sequence: Synthetic oligonucleotide
agcuucgcuuugaacaccu

SEQ ID NO: 2311218 - RNA, 19 nt, Artificial Sequence
  Description of Artificial Sequence: Synthetic oligonucleotide
auagggccuuguuuguauu

SEQ ID NO: 2311219 - RNA, 19 nt, Artificial Sequence
  Description of Artificial Sequence: Synthetic oligonucleotide
cagcucuuuucuggaaagc

SEQ ID NO: 2311220 - RNA, 19 nt, Artificial Sequence
  Description of Artificial Sequence: Synthetic oligonucleotide
gaagggcuuguuucgaguu

SEQ ID NO: 2311221 - RNA, 19 nt, Artificial Sequence
  Description of Artificial Sequence: Synthetic oligonucleotide
ucagggugucccgguagug

SEQ ID NO: 2311222 - RNA, 19 nt, Artificial Sequence
  Description of Artificial Sequence: Synthetic oligonucleotide
cuucgcuuugaacaccucu

SEQ ID NO: 2311223 - RNA, 19 nt, Artificial Sequence
  Description of Artificial Sequence: Synthetic oligonucleotide
caucagugaugugcacagg

SEQ ID NO: 2311224 - RNA, 19 nt, Artificial Sequence
  Description of Artificial Sequence: Synthetic oligonucleotide
caucuggagcauguuuaug

SEQ ID NO: 2311225 - RNA, 19 nt, Artificial Sequence
  Description of Artificial Sequence: Synthetic oligonucleotide
ucacccgaggccggaauuc

SEQ ID NO: 2311226 - RNA, 19 nt, Artificial Sequence
  Description of Artificial Sequence: Synthetic oligonucleotide
gggccguggaguaugacac

SEQ ID NO: 2311227 - RNA, 19 nt, Artificial Sequence
  Description of Artificial Sequence: Synthetic oligonucleotide
uggccuuugcccgcaagau

SEQ ID NO: 2311228 - RNA, 19 nt, Artificial Sequence
  Description of Artificial Sequence: Synthetic oligonucleotide
uauggggauccauggccuu

SEQ ID NO: 2311229 - RNA, 19 nt, Artificial Sequence
  Description of Artificial Sequence: Synthetic oligonucleotide
gaaugcugucugauuuguc

SEQ ID NO: 2311230 - RNA, 19 nt, Artificial Sequence
  Description of Artificial Sequence: Synthetic oligonucleotide
ccggaauucgaacucgguc

SEQ ID NO: 2311231 - RNA, 19 nt, Artificial Sequence
  Description of Artificial Sequence: Synthetic oligonucleotide
cuuggggauccuucuagua

SEQ ID NO: 2311232 - RNA, 19 nt, Artificial Sequence
  Description of Artificial Sequence: Synthetic oligonucleotide
gagauagggccuuguuugu

SEQ ID NO: 2311233 - RNA, 19 nt, Artificial Sequence
  Description of Artificial Sequence: Synthetic oligonucleotide
cucgaauauggauucgaau

SEQ ID NO: 2311234 - RNA, 19 nt, Artificial Sequence
  Description of Artificial Sequence: Synthetic oligonucleotide
uuccucuaggccggccugc

SEQ ID NO: 2311235 - RNA, 19 nt, Artificial Sequence
  Description of Artificial Sequence: Synthetic oligonucleotide
gcagcgggguagcugcugg

SEQ ID NO: 2311236 - RNA, 19 nt, Artificial Sequence
  Description of Artificial Sequence: Synthetic oligonucleotide
cacccgaggccggaauucg

SEQ ID NO: 2311237 - RNA, 19 nt, Artificial Sequence
  Description of Artificial Sequence: Synthetic oligonucleotide
uagcaucagugaugugcac

SEQ ID NO: 2311238 - RNA, 19 nt, Artificial Sequence
  Description of Artificial Sequence: Synthetic oligonucleotide
cugguagcaucagugaugu

SEQ ID NO: 2311239 - RNA, 19 nt, Artificial Sequence
  Description of Artificial Sequence: Synthetic oligonucleotide
cacagguuggcaguucgga

SEQ ID NO: 2311240 - RNA, 19 nt, Artificial Sequence
  Description of Artificial Sequence: Synthetic oligonucleotide
ggugcggggagcccggcug

SEQ ID NO: 2311241 - RNA, 19 nt, Artificial Sequence
  Description of Artificial Sequence: Synthetic oligonucleotide
uccaggcuuuuauggggau

SEQ ID NO: 2311242 - RNA, 19 nt, Artificial Sequence
  Description of Artificial Sequence: Synthetic oligonucleotide
gccguggaguaugacacag

SEQ ID NO: 2311243 - RNA, 19 nt, Artificial Sequence
  Description of Artificial Sequence: Synthetic oligonucleotide
ggaguuccgcuuccuggag

SEQ ID NO: 2311244 - RNA, 19 nt, Artificial Sequence
  Description of Artificial Sequence: Synthetic oligonucleotide
acggguagcggugcgggga

SEQ ID NO: 2311245 - RNA, 19 nt, Artificial Sequence
  Description of Artificial Sequence: Synthetic oligonucleotide
gguaaccuguucgaagaga

SEQ ID NO: 2311246 - RNA, 19 nt, Artificial Sequence
  Description of Artificial Sequence: Synthetic oligonucleotide
uccucuaggccggccugcc

SEQ ID NO: 2311247 - RNA, 19 nt, Artificial Sequence
  Description of Artificial Sequence: Synthetic oligonucleotide
ggaagcuacagcacucaga

SEQ ID NO: 2311248 - RNA, 19 nt, Artificial Sequence
  Description of Artificial Sequence: Synthetic oligonucleotide
cuggcugaggggacuucuc

SEQ ID NO: 2311249 - RNA, 19 nt, Artificial Sequence
  Description of Artificial Sequence: Synthetic oligonucleotide
uccuggcaagcaccuuggu

SEQ ID NO: 2311250 - RNA, 19 nt, Artificial Sequence
  Description of Artificial Sequence: Synthetic oligonucleotide
gguacggguagcggugcgg

SEQ ID NO: 2311251 - RNA, 19 nt, Artificial Sequence
  Description of Artificial Sequence: Synthetic oligonucleotide
ugucucccggguuucccuu

SEQ ID NO: 2311252 - RNA, 19 nt, Artificial Sequence
  Description of Artificial Sequence: Synthetic oligonucleotide
ggauccuucuaguaguuuu

SEQ ID NO: 2311253 - RNA, 19 nt, Artificial Sequence
  Description of Artificial Sequence: Synthetic oligonucleotide
guucgaagagauagggccu

SEQ ID NO: 2311254 - RNA, 19 nt, Artificial Sequence
  Description of Artificial Sequence: Synthetic oligonucleotide
ucccggguacggguagcgg

SEQ ID NO: 2311255 - RNA, 19 nt, Artificial Sequence
  Description of Artificial Sequence: Synthetic oligonucleotide
uuuguccccaagggcuggu

SEQ ID NO: 2311256 - RNA, 19 nt, Artificial Sequence
  Description of Artificial Sequence: Synthetic oligonucleotide
ugaugugcacagggagggu

SEQ ID NO: 2311257 - RNA, 19 nt, Artificial Sequence
  Description of Artificial Sequence: Synthetic oligonucleotide
uccccaagggcugguucca

SEQ ID NO: 2311258 - RNA, 19 nt, Artificial Sequence
  Description of Artificial Sequence: Synthetic oligonucleotide
ggaggguguuggcagaaaa

SEQ ID NO: 2311259 - RNA, 19 nt, Artificial Sequence
  Description of Artificial Sequence: Synthetic oligonucleotide
ggggacuucucagcaguag

SEQ ID NO: 2311260 - RNA, 19 nt, Artificial Sequence
  Description of Artificial Sequence: Synthetic oligonucleotide
ugacacagguuggcaguuc

SEQ ID NO: 2311261 - RNA, 19 nt, Artificial Sequence
  Description of Artificial Sequence: Synthetic oligonucleotide
gggauccauggccuuugcc

SEQ ID NO: 2311262 - RNA, 19 nt, Artificial Sequence
  Description of Artificial Sequence: Synthetic oligonucleotide
cucccggguacggguagcg

SEQ ID NO: 2311263 - RNA, 19 nt, Artificial Sequence
  Description of Artificial Sequence: Synthetic oligonucleotide
ccaaccacugaaugcuguc

SEQ ID NO: 2311264 - RNA, 19 nt, Artificial Sequence
  Description of Artificial Sequence: Synthetic oligonucleotide
agauagggccuuguuugua

SEQ ID NO: 2311265 - RNA, 19 nt, Artificial Sequence
  Description of Artificial Sequence: Synthetic oligonucleotide
gacauggcuugacgguucu

SEQ ID NO: 2311266 - RNA, 19 nt, Artificial Sequence
  Description of Artificial Sequence: Synthetic oligonucleotide
agcgggguagcugcuggcu

SEQ ID NO: 2311267 - RNA, 19 nt, Artificial Sequence
  Description of Artificial Sequence: Synthetic oligonucleotide
ccggguuucccuucucuug

SEQ ID NO: 2311268 - RNA, 19 nt, Artificial Sequence
  Description of Artificial Sequence: Synthetic oligonucleotide
ggguguuggcagaaaagga

SEQ ID NO: 2311269 - RNA, 19 nt, Artificial Sequence
  Description of Artificial Sequence: Synthetic oligonucleotide
cacagggaggguguuggca

SEQ ID NO: 2311270 - RNA, 19 nt, Artificial Sequence
  Description of Artificial Sequence: Synthetic oligonucleotide
agugcugauaggggacgaa

SEQ ID NO: 2311271 - RNA, 19 nt, Artificial Sequence
  Description of Artificial Sequence: Synthetic oligonucleotide
gaguugucucccggguuuc

SEQ ID NO: 2311272 - RNA, 19 nt, Artificial Sequence
  Description of Artificial Sequence: Synthetic oligonucleotide
cccgguagugugcuucugc

SEQ ID NO: 2311273 - RNA, 19 nt, Artificial Sequence
  Description of Artificial Sequence: Synthetic oligonucleotide
gugccuugacucuugguuu

SEQ ID NO: 2311274 - RNA, 19 nt, Artificial Sequence
  Description of Artificial Sequence: Synthetic oligonucleotide
ggcucgaauauggauucga

SEQ ID NO: 2311275 - RNA, 19 nt, Artificial Sequence
  Description of Artificial Sequence: Synthetic oligonucleotide
uacggucauuguuccgguu

SEQ ID NO: 2311276 - RNA, 19 nt, Artificial Sequence
  Description of Artificial Sequence: Synthetic oligonucleotide
gcaagaucacagauuuaga

SEQ ID NO: 2311277 - RNA, 19 nt, Artificial Sequence
  Description of Artificial Sequence: Synthetic oligonucleotide
ggcaucacagggccgugga

SEQ ID NO: 2311278 - RNA, 19 nt, Artificial Sequence
  Description of Artificial Sequence: Synthetic oligonucleotide
cucuuccugguagcaucag

SEQ ID NO: 2311279 - RNA, 19 nt, Artificial Sequence
  Description of Artificial Sequence: Synthetic oligonucleotide
agccugguaaaggcccuca

SEQ ID NO: 2311280 - RNA, 19 nt, Artificial Sequence
  Description of Artificial Sequence: Synthetic oligonucleotide
gguagcggugcggggagcc

SEQ ID NO: 2311281 - RNA, 19 nt, Artificial Sequence
  Description of Artificial Sequence: Synthetic oligonucleotide
ggccggaauucgaacucgg

SEQ ID NO: 2311282 - RNA, 19 nt, Artificial Sequence
  Description of Artificial Sequence: Synthetic oligonucleotide
ugguagcaucagugaugug

SEQ ID NO: 2311283 - RNA, 19 nt, Artificial Sequence
  Description of Artificial Sequence: Synthetic oligonucleotide
cagcgggguagcugcuggc

SEQ ID NO: 2311284 - RNA, 19 nt, Artificial Sequence
  Description of Artificial Sequence: Synthetic oligonucleotide
ccguggaguaugacacagg

SEQ ID NO: 2311285 - RNA, 19 nt, Artificial Sequence
  Description of Artificial Sequence: Synthetic oligonucleotide
agccuuggggauccuucua

SEQ ID NO: 2311286 - RNA, 19 nt, Artificial Sequence
  Description of Artificial Sequence: Synthetic oligonucleotide
cagcaguaguggcaucaca

SEQ ID NO: 2311287 - RNA, 19 nt, Artificial Sequence
  Description of Artificial Sequence: Synthetic oligonucleotide
cggaauucgaacucggucu

SEQ ID NO: 2311288 - RNA, 19 nt, Artificial Sequence
  Description of Artificial Sequence: Synthetic oligonucleotide
gggacuucucagcaguagu

SEQ ID NO: 2311289 - RNA, 19 nt, Artificial Sequence
  Description of Artificial Sequence: Synthetic oligonucleotide
gcacucagagaaugccuuc

SEQ ID NO: 2311290 - RNA, 19 nt, Artificial Sequence
  Description of Artificial Sequence: Synthetic oligonucleotide
aggguucacccgaggccgg

SEQ ID NO: 2311291 - RNA, 19 nt, Artificial Sequence
  Description of Artificial Sequence: Synthetic oligonucleotide
gccggccugccucagggug

SEQ ID NO: 2311292 - RNA, 19 nt, Artificial Sequence
  Description of Artificial Sequence: Synthetic oligonucleotide
ggguacggguagcggugcg

SEQ ID NO: 2311293 - RNA, 19 nt, Artificial Sequence
  Description of Artificial Sequence: Synthetic oligonucleotide
gguucucuuuaagcuucgc

SEQ ID NO: 2311294 - RNA, 19 nt, Artificial Sequence
  Description of Artificial Sequence: Synthetic oligonucleotide
agcccggcugcuggaagug

SEQ ID NO: 2311295 - RNA, 19 nt, Artificial Sequence
  Description of Artificial Sequence: Synthetic oligonucleotide
ggcaagcaccuugguaacc

SEQ ID NO: 2311296 - RNA, 19 nt, Artificial Sequence
  Description of Artificial Sequence: Synthetic oligonucleotide
gcuuuuccucccggguacg

SEQ ID NO: 2311297 - RNA, 19 nt, Artificial Sequence
  Description of Artificial Sequence: Synthetic oligonucleotide
gucucccggguuucccuuc

SEQ ID NO: 2311298 - RNA, 19 nt, Artificial Sequence
  Description of Artificial Sequence: Synthetic oligonucleotide
ccggguacggguagcggug

SEQ ID NO: 2311299 - RNA, 19 nt, Artificial Sequence
  Description of Artificial Sequence: Synthetic oligonucleotide
ggggacgaagccaucugga

SEQ ID NO: 2311300 - RNA, 19 nt, Artificial Sequence
  Description of Artificial Sequence: Synthetic oligonucleotide
cuuugcccgcaagaucaca

SEQ ID NO: 2311301 - RNA, 19 nt, Artificial Sequence
  Description of Artificial Sequence: Synthetic oligonucleotide
guagcggugcggggagccc

SEQ ID NO: 2311302 - RNA, 19 nt, Artificial Sequence
  Description of Artificial Sequence: Synthetic oligonucleotide
auggggauccauggccuuu

SEQ ID NO: 2311303 - RNA, 19 nt, Artificial Sequence
  Description of Artificial Sequence: Synthetic oligonucleotide
ucccgguagugugcuucug

SEQ ID NO: 2311304 - RNA, 19 nt, Artificial Sequence
  Description of Artificial Sequence: Synthetic oligonucleotide
cauggcuugacgguucuuu

SEQ ID NO: 2311305 - RNA, 19 nt, Artificial Sequence
  Description of Artificial Sequence: Synthetic oligonucleotide
agcggugcggggagcccgg

SEQ ID NO: 2311306 - RNA, 19 nt, Artificial Sequence
  Description of Artificial Sequence: Synthetic oligonucleotide
aggcuuuuauggggaucca

SEQ ID NO: 2311307 - RNA, 19 nt, Artificial Sequence
  Description of Artificial Sequence: Synthetic oligonucleotide
agggaggguguuggcagaa

SEQ ID NO: 2311308 - RNA, 19 nt, Artificial Sequence
  Description of Artificial Sequence: Synthetic oligonucleotide
gcaagcaccuugguaaccu

SEQ ID NO: 2311309 - RNA, 19 nt, Artificial Sequence
  Description of Artificial Sequence: Synthetic oligonucleotide
cagauucccucuuccuggu

SEQ ID NO: 2311310 - RNA, 19 nt, Artificial Sequence
  Description of Artificial Sequence: Synthetic oligonucleotide
gcucgaauauggauucgaa

SEQ ID NO: 2311311 - RNA, 19 nt, Artificial Sequence
  Description of Artificial Sequence: Synthetic oligonucleotide
ccgaggccggaauucgaac

SEQ ID NO: 2311312 - RNA, 19 nt, Artificial Sequence
  Description of Artificial Sequence: Synthetic oligonucleotide
cccgcaagaucacagauuu

SEQ ID NO: 2311313 - RNA, 19 nt, Artificial Sequence
  Description of Artificial Sequence: Synthetic oligonucleotide
cguggaguaugacacaggu

SEQ ID NO: 2311314 - RNA, 19 nt, Artificial Sequence
  Description of Artificial Sequence: Synthetic oligonucleotide
guggcaucacagggccgug

SEQ ID NO: 2311315 - RNA, 19 nt, Artificial Sequence
  Description of Artificial Sequence: Synthetic oligonucleotide
gggguagcugcuggcugag

SEQ ID NO: 2311316 - RNA, 19 nt, Artificial Sequence
  Description of Artificial Sequence: Synthetic oligonucleotide
gggugucccgguagugugc

SEQ ID NO: 2311317 - RNA, 19 nt, Artificial Sequence
  Description of Artificial Sequence: Synthetic oligonucleotide
gguuggcaguucggaguag

SEQ ID NO: 2311318 - RNA, 19 nt, Artificial Sequence
  Description of Artificial Sequence: Synthetic oligonucleotide
ccuuugcccgcaagaucac

SEQ ID NO: 2311319 - RNA, 19 nt, Artificial Sequence
  Description of Artificial Sequence: Synthetic oligonucleotide
acagggccguggaguauga

SEQ ID NO: 2311320 - RNA, 19 nt, Artificial Sequence
  Description of Artificial Sequence: Synthetic oligonucleotide
cgaauauggauucgaauuu

SEQ ID NO: 2311321 - RNA, 19 nt, Artificial Sequence
  Description of Artificial Sequence: Synthetic oligonucleotide
ccaagggcugguuccagua

SEQ ID NO: 2311322 - RNA, 19 nt, Artificial Sequence
  Description of Artificial Sequence: Synthetic oligonucleotide
uuguccccaagggcugguu

SEQ ID NO: 2311323 - RNA, 19 nt, Artificial Sequence
  Description of Artificial Sequence: Synthetic oligonucleotide
gucccgguagugugcuucu

SEQ ID NO: 2311324 - RNA, 19 nt, Artificial Sequence
  Description of Artificial Sequence: Synthetic oligonucleotide
ccuggcaagcaccuuggua

SEQ ID NO: 2311325 - RNA, 19 nt, Artificial Sequence
  Description of Artificial Sequence: Synthetic oligonucleotide
cuaggccggccugccucag

SEQ ID NO: 2311326 - RNA, 19 nt, Artificial Sequence
  Description of Artificial Sequence: Synthetic oligonucleotide
guucacccgaggccggaau

SEQ ID NO: 2311327 - RNA, 19 nt, Artificial Sequence
  Description of Artificial Sequence: Synthetic oligonucleotide
ggccguggaguaugacaca

SEQ ID NO: 2311328 - RNA, 19 nt, Artificial Sequence
  Description of Artificial Sequence: Synthetic oligonucleotide
gugugccuugacucuuggu

SEQ ID NO: 2311329 - RNA, 19 nt, Artificial Sequence
  Description of Artificial Sequence: Synthetic oligonucleotide
cgaauuuuccugaggaguu

SEQ ID NO: 2311330 - RNA, 19 nt, Artificial Sequence
  Description of Artificial Sequence: Synthetic oligonucleotide
acccgaggccggaauucga

SEQ ID NO: 2311331 - RNA, 19 nt, Artificial Sequence
  Description of Artificial Sequence: Synthetic oligonucleotide
acgaagccaucuggagcau

SEQ ID NO: 2311332 - RNA, 19 nt, Artificial Sequence
  Description of Artificial Sequence: Synthetic oligonucleotide
cagggugucccgguagugu

SEQ ID NO: 2311333 - RNA, 19 nt, Artificial Sequence
  Description of Artificial Sequence: Synthetic oligonucleotide
ccaguauagccuuggggau

SEQ ID NO: 2311334 - RNA, 19 nt, Artificial Sequence
  Description of Artificial Sequence: Synthetic oligonucleotide
ggcagcgggguagcugcug

SEQ ID NO: 2311335 - RNA, 19 nt, Artificial Sequence
  Description of Artificial Sequence: Synthetic oligonucleotide
cagggccguggaguaugac

SEQ ID NO: 2311336 - RNA, 19 nt, Artificial Sequence
  Description of Artificial Sequence: Synthetic oligonucleotide
ccuccaacucuuucuuaua

SEQ ID NO: 2311337 - RNA, 19 nt, Artificial Sequence
  Description of Artificial Sequence: Synthetic oligonucleotide
acaccucuuccaggcuuuu

SEQ ID NO: 2311338 - RNA, 19 nt, Artificial Sequence
  Description of Artificial Sequence: Synthetic oligonucleotide
ggugucccgguagugugcu

SEQ ID NO: 2311339 - RNA, 19 nt, Artificial Sequence
  Description of Artificial Sequence: Synthetic oligonucleotide
ccgguagugugcuucugcu

SEQ ID NO: 2311340 - RNA, 19 nt, Artificial Sequence
  Description of Artificial Sequence: Synthetic oligonucleotide
cccgaggccggaauucgaa

SEQ ID NO: 2311341 - RNA, 19 nt, Artificial Sequence
  Description of Artificial Sequence: Synthetic oligonucleotide
ccuugguaaccuguucgaa

SEQ ID NO: 2311342 - RNA, 19 nt, Artificial Sequence
  Description of Artificial Sequence: Synthetic oligonucleotide
ggcuuuuauggggauccau

SEQ ID NO: 2311343 - RNA, 19 nt, Artificial Sequence
  Description of Artificial Sequence: Synthetic oligonucleotide
cggguagcggugcggggag

SEQ ID NO: 2311344 - RNA, 19 nt, Artificial Sequence
  Description of Artificial Sequence: Synthetic oligonucleotide
ccuuggggauccuucuagu

SEQ ID NO: 2311345 - RNA, 19 nt, Artificial Sequence
  Description of Artificial Sequence: Synthetic oligonucleotide
cgaggccggaauucgaacu

SEQ ID NO: 2311346 - RNA, 19 nt, Artificial Sequence
  Description of Artificial Sequence: Synthetic oligonucleotide
cccggguacggguagcggu

SEQ ID NO: 2311347 - RNA, 19 nt, Artificial Sequence
  Description of Artificial Sequence: Synthetic oligonucleotide
gaccuuggccugagccacu

SEQ ID NO: 2311348 - RNA, 19 nt, Artificial Sequence
  Description of Artificial Sequence: Synthetic oligonucleotide
gcuucgcuuugaacaccuc

SEQ ID NO: 2311349 - RNA, 19 nt, Artificial Sequence
  Description of Artificial Sequence: Synthetic oligonucleotide
cagggaccacaggguucac

SEQ ID NO: 2311350 - RNA, 19 nt, Artificial Sequence
  Description of Artificial Sequence: Synthetic oligonucleotide
caccucuuccaggcuuuua

SEQ ID NO: 2311351 - RNA, 19 nt, Artificial Sequence
  Description of Artificial Sequence: Synthetic oligonucleotide
gguucacccgaggccggaa

SEQ ID NO: 2311352 - RNA, 19 nt, Artificial Sequence
  Description of Artificial Sequence: Synthetic oligonucleotide
ccucccggguacggguagc

SEQ ID NO: 2311353 - RNA, 19 nt, Artificial Sequence
  Description of Artificial Sequence: Synthetic oligonucleotide
gcccggcugcuggaagugc

SEQ ID NO: 2311354 - RNA, 19 nt, Artificial Sequence
  Description of Artificial Sequence: Synthetic oligonucleotide
ggguucacccgaggccgga

SEQ ID NO: 2311355 - RNA, 19 nt, Artificial Sequence
  Description of Artificial Sequence: Synthetic oligonucleotide
ggguagcggugcggggagc

SEQ ID NO: 2311356 - RNA, 19 nt, Artificial Sequence
  Description of Artificial Sequence: Synthetic oligonucleotide
gggaggguguuggcagaaa

SEQ ID NO: 2311357 - RNA, 19 nt, Artificial Sequence
  Description of Artificial Sequence: Synthetic oligonucleotide
cggguacggguagcggugc

SEQ ID NO: 2311358 - RNA, 19 nt, Artificial Sequence
  Description of Artificial Sequence: Synthetic oligonucleotide
gccggaauucgaacucggu

SEQ ID NO: 2311359 - RNA, 19 nt, Artificial Sequence
  Description of Artificial Sequence: Synthetic oligonucleotide
ggaguaggaagggcuuguu

SEQ ID NO: 2311360 - RNA, 19 nt, Artificial Sequence
  Description of Artificial Sequence: Synthetic oligonucleotide
ccgcuuccuggaguuuguc

SEQ ID NO: 2311361 - RNA, 19 nt, Artificial Sequence
  Description of Artificial Sequence: Synthetic oligonucleotide
ccgcaagaucacagauuua

SEQ ID NO: 2311362 - RNA, 19 nt, Artificial Sequence
  Description of Artificial Sequence: Synthetic oligonucleotide
guuccgcuuccuggaguuu

SEQ ID NO: 2311363 - RNA, 19 nt, Artificial Sequence
  Description of Artificial Sequence: Synthetic oligonucleotide
ccggccugccucagggugu

SEQ ID NO: 2311364 - RNA, 19 nt, Artificial Sequence
  Description of Artificial Sequence: Synthetic oligonucleotide
cccggguuucccuucucuu

SEQ ID NO: 2311365 - RNA, 19 nt, Artificial Sequence
  Description of Artificial Sequence: Synthetic oligonucleotide
gugucccgguagugugcuu

SEQ ID NO: 2311366 - RNA, 19 nt, Artificial Sequence
  Description of Artificial Sequence: Synthetic oligonucleotide
cgaacucggucuggagaaa

SEQ ID NO: 2311367 - RNA, 19 nt, Artificial Sequence
  Description of Artificial Sequence: Synthetic oligonucleotide
gcggugcggggagcccggc

SEQ ID NO: 2311368 - RNA, 19 nt, Artificial Sequence
  Description of Artificial Sequence: Synthetic oligonucleotide
cggccugccucaggguguc

SEQ ID NO: 2311369 - RNA, 19 nt, Artificial Sequence
  Description of Artificial Sequence: Synthetic oligonucleotide
cgguagugugcuucugcuu

SEQ ID NO: 2311370 - RNA, 19 nt, Artificial Sequence
  Description of Artificial Sequence: Synthetic oligonucleotide
ccucuaggccggccugccu

SEQ ID NO: 2311371 - RNA, 19 nt, Artificial Sequence
  Description of Artificial Sequence: Synthetic oligonucleotide
cggugcggggagcccggcu

SEQ ID NO: 2311372 - RNA, 19 nt, Artificial Sequence
  Description of Artificial Sequence: Synthetic oligonucleotide
aaugaguuagaucaaagcc

SEQ ID NO: 2311373 - RNA, 19 nt, Artificial Sequence
  Description of Artificial Sequence: Synthetic oligonucleotide
aauaacacagcacuaacac

SEQ ID NO: 2311374 - RNA, 19 nt, Artificial Sequence
  Description of Artificial Sequence: Synthetic oligonucleotide
aauggauauuuccaaaugc

SEQ ID NO: 2311375 - RNA, 19 nt, Artificial Sequence
  Description of Artificial Sequence: Synthetic oligonucleotide
uguaaaauaacacagcacu

SEQ ID NO: 2311376 - RNA, 19 nt, Artificial Sequence
  Description of Artificial Sequence: Synthetic oligonucleotide
uauuuaggaaauaagauca

SEQ ID NO: 2311377 - RNA, 19 nt, Artificial Sequence
  Description of Artificial Sequence: Synthetic oligonucleotide
uguaauaaagcaaaggggu

SEQ ID NO: 2311378 - RNA, 19 nt, Artificial Sequence
  Description of Artificial Sequence: Synthetic oligonucleotide
uaauuauuguaucagaaug

SEQ ID NO: 2311379 - RNA, 19 nt, Artificial Sequence
  Description of Artificial Sequence: Synthetic oligonucleotide
agcacuaacacacagggac

SEQ ID NO: 2311380 - RNA, 19 nt, Artificial Sequence
  Description of Artificial Sequence: Synthetic oligonucleotide
uacacaagcgaucaaaggg

SEQ ID NO: 2311381 - RNA, 19 nt, Artificial Sequence
  Description of Artificial Sequence: Synthetic oligonucleotide
aauauugauagauuucuug

SEQ ID NO: 2311382 - RNA, 19 nt, Artificial Sequence
  Description of Artificial Sequence: Synthetic oligonucleotide
ucuuauuuaggaaauaaga

SEQ ID NO: 2311383 - RNA, 19 nt, Artificial Sequence
  Description of Artificial Sequence: Synthetic oligonucleotide
uguucuauaucccaaaaga

SEQ ID NO: 2311384 - RNA, 19 nt, Artificial Sequence
  Description of Artificial Sequence: Synthetic oligonucleotide
uguacgauacaaaacagug

SEQ ID NO: 2311385 - RNA, 19 nt, Artificial Sequence
  Description of Artificial Sequence: Synthetic oligonucleotide
aaauuagaauauuaguuga

SEQ ID NO: 2311386 - RNA, 19 nt, Artificial Sequence
  Description of Artificial Sequence: Synthetic oligonucleotide
aucagaaugcaauuuacac

SEQ ID NO: 2311387 - RNA, 19 nt, Artificial Sequence
  Description of Artificial Sequence: Synthetic oligonucleotide
uacuguacgauacaaaaca

SEQ ID NO: 2311388 - RNA, 19 nt, Artificial Sequence
  Description of Artificial Sequence: Synthetic oligonucleotide
aguaauguacaucauuuuc

SEQ ID NO: 2311389 - RNA, 19 nt, Artificial Sequence
  Description of Artificial Sequence: Synthetic oligonucleotide
aacagcaucaguaaaagug

SEQ ID NO: 2311390 - RNA, 19 nt, Artificial Sequence
  Description of Artificial Sequence: Synthetic oligonucleotide
aaaguaguguuuuacaaaa

SEQ ID NO: 2311391 - RNA, 19 nt, Artificial Sequence
  Description of Artificial Sequence: Synthetic oligonucleotide
aaaaguauguucuucccgu

SEQ ID NO: 2311392 - RNA, 19 nt, Artificial Sequence
  Description of Artificial Sequence: Synthetic oligonucleotide
cuaaguuccuaucacaucc

SEQ ID NO: 2311393 - RNA, 19 nt, Artificial Sequence
  Description of Artificial Sequence: Synthetic oligonucleotide
uauuguaucagaaugcaau

SEQ ID NO: 2311394 - RNA, 19 nt, Artificial Sequence
  Description of Artificial Sequence: Synthetic oligonucleotide
ggaaauaagaucaauauug

SEQ ID NO: 2311395 - RNA, 19 nt, Artificial Sequence
  Description of Artificial Sequence: Synthetic oligonucleotide
uucuauaucccaaaagaca

SEQ ID NO: 2311396 - RNA, 19 nt, Artificial Sequence
  Description of Artificial Sequence: Synthetic oligonucleotide
ugaguuagaucaaagccag

SEQ ID NO: 2311397 - RNA, 19 nt, Artificial Sequence
  Description of Artificial Sequence: Synthetic oligonucleotide
aguuagaucaaagccaggc

SEQ ID NO: 2311398 - RNA, 19 nt, Artificial Sequence
  Description of Artificial Sequence: Synthetic oligonucleotide
acauauuuaauauuccugu

SEQ ID NO: 2311399 - RNA, 19 nt, Artificial Sequence
  Description of Artificial Sequence: Synthetic oligonucleotide
ucuauaucccaaaagacau

SEQ ID NO: 2311400 - RNA, 19 nt, Artificial Sequence
  Description of Artificial Sequence: Synthetic oligonucleotide
aaugccuguguaauaaagc

SEQ ID NO: 2311401 - RNA, 19 nt, Artificial Sequence
  Description of Artificial Sequence: Synthetic oligonucleotide
acuuaaaucuauuuugcug

SEQ ID NO: 2311402 - RNA, 19 nt, Artificial Sequence
  Description of Artificial Sequence: Synthetic oligonucleotide
aaagccaggcaucccauac

SEQ ID NO: 2311403 - RNA, 19 nt, Artificial Sequence
  Description of Artificial Sequence: Synthetic oligonucleotide
uuuacacaagcgaucaaag

SEQ ID NO: 2311404 - RNA, 19 nt, Artificial Sequence
  Description of Artificial Sequence: Synthetic oligonucleotide
aaacaguguaaaauaacac

SEQ ID NO: 2311405 - RNA, 19 nt, Artificial Sequence
  Description of Artificial Sequence: Synthetic oligonucleotide
aaguauguucuucccgugc

SEQ ID NO: 2311406 - RNA, 19 nt, Artificial Sequence
  Description of Artificial Sequence: Synthetic oligonucleotide
uacacuaacauuaguaaaa

SEQ ID NO: 2311407 - RNA, 19 nt, Artificial Sequence
  Description of Artificial Sequence: Synthetic oligonucleotide
uagauuucuuguuugagca

SEQ ID NO: 2311408 - RNA, 19 nt, Artificial Sequence
  Description of Artificial Sequence: Synthetic oligonucleotide
uucuuauuuaggaaauaag

SEQ ID NO: 2311409 - RNA, 19 nt, Artificial Sequence
  Description of Artificial Sequence: Synthetic oligonucleotide
uguuugagcagauaccgag

SEQ ID NO: 2311410 - RNA, 19 nt, Artificial Sequence
  Description of Artificial Sequence: Synthetic oligonucleotide
ugagcagguauacuguacg

SEQ ID NO: 2311411 - RNA, 19 nt, Artificial Sequence
  Description of Artificial Sequence: Synthetic oligonucleotide
ucaauauugauagauuucu

SEQ ID NO: 2311412 - RNA, 19 nt, Artificial Sequence
  Description of Artificial Sequence: Synthetic oligonucleotide
uacaaaaguauguucuucc

SEQ ID NO: 2311413 - RNA, 19 nt, Artificial Sequence
  Description of Artificial Sequence: Synthetic oligonucleotide
uacgauacaaaacagugua

SEQ ID NO: 2311414 - RNA, 19 nt, Artificial Sequence
  Description of Artificial Sequence: Synthetic oligonucleotide
uaaaagugugguuaggaga

SEQ ID NO: 2311415 - RNA, 19 nt, Artificial Sequence
  Description of Artificial Sequence: Synthetic oligonucleotide
uaggagauaauuauuguau

SEQ ID NO: 2311416 - RNA, 19 nt, Artificial Sequence
  Description of Artificial Sequence: Synthetic oligonucleotide
ucaggcaauauucacauua

SEQ ID NO: 2311417 - RNA, 19 nt, Artificial Sequence
  Description of Artificial Sequence: Synthetic oligonucleotide
aaaggaagaugugagcagg

SEQ ID NO: 2311418 - RNA, 19 nt, Artificial Sequence
  Description of Artificial Sequence: Synthetic oligonucleotide
guuaacuacagagacaggc

SEQ ID NO: 2311419 - RNA, 19 nt, Artificial Sequence
  Description of Artificial Sequence: Synthetic oligonucleotide
aaaugcacuguaaaggaag

SEQ ID NO: 2311420 - RNA, 19 nt, Artificial Sequence
  Description of Artificial Sequence: Synthetic oligonucleotide
uaucccaaaagacauauuu

SEQ ID NO: 2311421 - RNA, 19 nt, Artificial Sequence
  Description of Artificial Sequence: Synthetic oligonucleotide
uuuaaccuggaacuguagc

SEQ ID NO: 2311422 - RNA, 19 nt, Artificial Sequence
  Description of Artificial Sequence: Synthetic oligonucleotide
uaugaaagggcugaaaagu

SEQ ID NO: 2311423 - RNA, 19 nt, Artificial Sequence
  Description of Artificial Sequence: Synthetic oligonucleotide
aacauuaguaaaaguuuac

SEQ ID NO: 2311424 - RNA, 19 nt, Artificial Sequence
  Description of Artificial Sequence: Synthetic oligonucleotide
uuugagucuauccaugcgu

SEQ ID NO: 2311425 - RNA, 19 nt, Artificial Sequence
  Description of Artificial Sequence: Synthetic oligonucleotide
uagaauauuaguugaaaua

SEQ ID NO: 2311426 - RNA, 19 nt, Artificial Sequence
  Description of Artificial Sequence: Synthetic oligonucleotide
cuuguuugagcagauaccg

SEQ ID NO: 2311427 - RNA, 19 nt, Artificial Sequence
  Description of Artificial Sequence: Synthetic oligonucleotide
aguaguguuuuacaaaagu

SEQ ID NO: 2311428 - RNA, 19 nt, Artificial Sequence
  Description of Artificial Sequence: Synthetic oligonucleotide
gagauaauuauuguaucag

SEQ ID NO: 2311429 - RNA, 19 nt, Artificial Sequence
  Description of Artificial Sequence: Synthetic oligonucleotide
auaugaaagggcugaaaag

SEQ ID NO: 2311430 - RNA, 19 nt, Artificial Sequence
  Description of Artificial Sequence: Synthetic oligonucleotide
agaauauuaguugaaauau

SEQ ID NO: 2311431 - RNA, 19 nt, Artificial Sequence
  Description of Artificial Sequence: Synthetic oligonucleotide
aauauucacauuaauggau

SEQ ID NO: 2311432 - RNA, 19 nt, Artificial Sequence
  Description of Artificial Sequence: Synthetic oligonucleotide
gagaagacugaacucaggc

SEQ ID NO: 2311433 - RNA, 19 nt, Artificial Sequence
  Description of Artificial Sequence: Synthetic oligonucleotide
uuuaagaggaaaguagugu

SEQ ID NO: 2311434 - RNA, 19 nt, Artificial Sequence
  Description of Artificial Sequence: Synthetic oligonucleotide
gucucggugaaucuggugg

SEQ ID NO: 2311435 - RNA, 19 nt, Artificial Sequence
  Description of Artificial Sequence: Synthetic oligonucleotide
uuucuuuuacacaagcgau

SEQ ID NO: 2311436 - RNA, 19 nt, Artificial Sequence
  Description of Artificial Sequence: Synthetic oligonucleotide
uaguaaaaguuuacaaaca

SEQ ID NO: 2311437 - RNA, 19 nt, Artificial Sequence
  Description of Artificial Sequence: Synthetic oligonucleotide
uguagcuaugcucaacagc

SEQ ID NO: 2311438 - RNA, 19 nt, Artificial Sequence
  Description of Artificial Sequence: Synthetic oligonucleotide
uuagaucaaagccaggcau

SEQ ID NO: 2311439 - RNA, 19 nt, Artificial Sequence
  Description of Artificial Sequence: Synthetic oligonucleotide
ucuuguuugagcagauacc

SEQ ID NO: 2311440 - RNA, 19 nt, Artificial Sequence
  Description of Artificial Sequence: Synthetic oligonucleotide
uuacacaagcgaucaaagg

SEQ ID NO: 2311441 - RNA, 19 nt, Artificial Sequence
  Description of Artificial Sequence: Synthetic oligonucleotide
uccaguuggggacugaaug

SEQ ID NO: 2311442 - RNA, 19 nt, Artificial Sequence
  Description of Artificial Sequence: Synthetic oligonucleotide
auaccgagaagacugaacu

SEQ ID NO: 2311443 - RNA, 19 nt, Artificial Sequence
  Description of Artificial Sequence: Synthetic oligonucleotide
uuaaccuggaacuguagcu

SEQ ID NO: 2311444 - RNA, 19 nt, Artificial Sequence
  Description of Artificial Sequence: Synthetic oligonucleotide
gacauauuuaauauuccug

SEQ ID NO: 2311445 - RNA, 19 nt, Artificial Sequence
  Description of Artificial Sequence: Synthetic oligonucleotide
caaugaguuagaucaaagc

SEQ ID NO: 2311446 - RNA, 19 nt, Artificial Sequence
  Description of Artificial Sequence: Synthetic oligonucleotide
uuaacuacagagacaggcu

SEQ ID NO: 2311447 - RNA, 19 nt, Artificial Sequence
  Description of Artificial Sequence: Synthetic oligonucleotide
aaauaagaucaauauugau

SEQ ID NO: 2311448 - RNA, 19 nt, Artificial Sequence
  Description of Artificial Sequence: Synthetic oligonucleotide
uguacucccagucaguaaa

SEQ ID NO: 2311449 - RNA, 19 nt, Artificial Sequence
  Description of Artificial Sequence: Synthetic oligonucleotide
ucaguaaaagugugguuag

SEQ ID NO: 2311450 - RNA, 19 nt, Artificial Sequence
  Description of Artificial Sequence: Synthetic oligonucleotide
ugcauaauaacaucuggau

SEQ ID NO: 2311451 - RNA, 19 nt, Artificial Sequence
  Description of Artificial Sequence: Synthetic oligonucleotide
gaaucugguggacuuaacc

SEQ ID NO: 2311452 - RNA, 19 nt, Artificial Sequence
  Description of Artificial Sequence: Synthetic oligonucleotide
uguaucagaaugcaauuua

SEQ ID NO: 2311453 - RNA, 19 nt, Artificial Sequence
  Description of Artificial Sequence: Synthetic oligonucleotide
uaacauuaguaaaaguuua

SEQ ID NO: 2311454 - RNA, 19 nt, Artificial Sequence
  Description of Artificial Sequence: Synthetic oligonucleotide
aggagauaauuauuguauc

SEQ ID NO: 2311455 - RNA, 19 nt, Artificial Sequence
  Description of Artificial Sequence: Synthetic oligonucleotide
ugaaugagacucauguacu

SEQ ID NO: 2311456 - RNA, 19 nt, Artificial Sequence
  Description of Artificial Sequence: Synthetic oligonucleotide
aaugcaauuuacacuaaca

SEQ ID NO: 2311457 - RNA, 19 nt, Artificial Sequence
  Description of Artificial Sequence: Synthetic oligonucleotide
caaaaguauguucuucccg

SEQ ID NO: 2311458 - RNA, 19 nt, Artificial Sequence
  Description of Artificial Sequence: Synthetic oligonucleotide
agacauauuuaauauuccu

SEQ ID NO: 2311459 - RNA, 19 nt, Artificial Sequence
  Description of Artificial Sequence: Synthetic oligonucleotide
uuugcuguucuauauccca

SEQ ID NO: 2311460 - RNA, 19 nt, Artificial Sequence
  Description of Artificial Sequence: Synthetic oligonucleotide
cugaacucaggcaauauuc

SEQ ID NO: 2311461 - RNA, 19 nt, Artificial Sequence
  Description of Artificial Sequence: Synthetic oligonucleotide
acacaagcgaucaaagggc

SEQ ID NO: 2311462 - RNA, 19 nt, Artificial Sequence
  Description of Artificial Sequence: Synthetic oligonucleotide
cuaacuagccuccaaugag

SEQ ID NO: 2311463 - RNA, 19 nt, Artificial Sequence
  Description of Artificial Sequence: Synthetic oligonucleotide
aaaagugugguuaggagau

SEQ ID NO: 2311464 - RNA, 19 nt, Artificial Sequence
  Description of Artificial Sequence: Synthetic oligonucleotide
gugaguuaacuacagagac

SEQ ID NO: 2311465 - RNA, 19 nt, Artificial Sequence
  Description of Artificial Sequence: Synthetic oligonucleotide
uaucagaaugcaauuuaca

SEQ ID NO: 2311466 - RNA, 19 nt, Artificial Sequence
  Description of Artificial Sequence: Synthetic oligonucleotide
gaaaacuuccaguugggga

SEQ ID NO: 2311467 - RNA, 19 nt, Artificial Sequence
  Description of Artificial Sequence: Synthetic oligonucleotide
aaaggggucucggugaauc

SEQ ID NO: 2311468 - RNA, 19 nt, Artificial Sequence
  Description of Artificial Sequence: Synthetic oligonucleotide
cauaauaacaucuggauau

SEQ ID NO: 2311469 - RNA, 19 nt, Artificial Sequence
  Description of Artificial Sequence: Synthetic oligonucleotide
ugugguuaggagauaauua

SEQ ID NO: 2311470 - RNA, 19 nt, Artificial Sequence
  Description of Artificial Sequence: Synthetic oligonucleotide
ugaacucaggcaauauuca

SEQ ID NO: 2311471 - RNA, 19 nt, Artificial Sequence
  Description of Artificial Sequence: Synthetic oligonucleotide
aauuuacacuaacauuagu

SEQ ID NO: 2311472 - RNA, 19 nt, Artificial Sequence
  Description of Artificial Sequence: Synthetic oligonucleotide
aacacuaugggaaauuaaa

SEQ ID NO: 2311473 - RNA, 19 nt, Artificial Sequence
  Description of Artificial Sequence: Synthetic oligonucleotide
agauaauuauuguaucaga

SEQ ID NO: 2311474 - RNA, 19 nt, Artificial Sequence
  Description of Artificial Sequence: Synthetic oligonucleotide
uuaggagauaauuauugua

SEQ ID NO: 2311475 - RNA, 19 nt, Artificial Sequence
  Description of Artificial Sequence: Synthetic oligonucleotide
uaauaaagcaaaggggucu

SEQ ID NO: 2311476 - RNA, 19 nt, Artificial Sequence
  Description of Artificial Sequence: Synthetic oligonucleotide
auguacaucauuuucuuuu

SEQ ID NO: 2311477 - RNA, 19 nt, Artificial Sequence
  Description of Artificial Sequence: Synthetic oligonucleotide
gauaauuauuguaucagaa

SEQ ID NO: 2311478 - RNA, 19 nt, Artificial Sequence
  Description of Artificial Sequence: Synthetic oligonucleotide
cuagccuccaaugaguuag

SEQ ID NO: 2311479 - RNA, 19 nt, Artificial Sequence
  Description of Artificial Sequence: Synthetic oligonucleotide
uuucuuauuuaggaaauaa

SEQ ID NO: 2311480 - RNA, 19 nt, Artificial Sequence
  Description of Artificial Sequence: Synthetic oligonucleotide
aguguuuuacaaaaguaug

SEQ ID NO: 2311481 - RNA, 19 nt, Artificial Sequence
  Description of Artificial Sequence: Synthetic oligonucleotide
aaaugccuguguaauaaag

SEQ ID NO: 2311482 - RNA, 19 nt, Artificial Sequence
  Description of Artificial Sequence: Synthetic oligonucleotide
uuuuacacaagcgaucaaa

SEQ ID NO: 2311483 - RNA, 19 nt, Artificial Sequence
  Description of Artificial Sequence: Synthetic oligonucleotide
uggaaaacuuccaguuggg

SEQ ID NO: 2311484 - RNA, 19 nt, Artificial Sequence
  Description of Artificial Sequence: Synthetic oligonucleotide
uuaaccgucagcacacagu

SEQ ID NO: 2311485 - RNA, 19 nt, Artificial Sequence
  Description of Artificial Sequence: Synthetic oligonucleotide
guagcuaugcucaacagca

SEQ ID NO: 2311486 - RNA, 19 nt, Artificial Sequence
  Description of Artificial Sequence: Synthetic oligonucleotide
aagcaaaggggucucggug

SEQ ID NO: 2311487 - RNA, 19 nt, Artificial Sequence
  Description of Artificial Sequence: Synthetic oligonucleotide
augcaauuuacacuaacau

SEQ ID NO: 2311488 - RNA, 19 nt, Artificial Sequence
  Description of Artificial Sequence: Synthetic oligonucleotide
aaauaacacagcacuaaca

SEQ ID NO: 2311489 - RNA, 19 nt, Artificial Sequence
  Description of Artificial Sequence: Synthetic oligonucleotide
uauuuugcuguucuauauc

SEQ ID NO: 2311490 - RNA, 19 nt, Artificial Sequence
  Description of Artificial Sequence: Synthetic oligonucleotide
uuugagcagauaccgagaa

SEQ ID NO: 2311491 - RNA, 19 nt, Artificial Sequence
  Description of Artificial Sequence: Synthetic oligonucleotide
caugcguagauuuguuucc

SEQ ID NO: 2311492 - RNA, 19 nt, Artificial Sequence
  Description of Artificial Sequence: Synthetic oligonucleotide
caccuugugaguuaacuac

SEQ ID NO: 2311493 - RNA, 19 nt, Artificial Sequence
  Description of Artificial Sequence: Synthetic oligonucleotide
aaaguauguucuucccgug

SEQ ID NO: 2311494 - RNA, 19 nt, Artificial Sequence
  Description of Artificial Sequence: Synthetic oligonucleotide
auuaauggauauuuccaaa

SEQ ID NO: 2311495 - RNA, 19 nt, Artificial Sequence
  Description of Artificial Sequence: Synthetic oligonucleotide
augccuguguaauaaagca

SEQ ID NO: 2311496 - RNA, 19 nt, Artificial Sequence
  Description of Artificial Sequence: Synthetic oligonucleotide
gaaauaagaucaauauuga

SEQ ID NO: 2311497 - RNA, 19 nt, Artificial Sequence
  Description of Artificial Sequence: Synthetic oligonucleotide
uuuugcuguucuauauccc

SEQ ID NO: 2311498 - RNA, 19 nt, Artificial Sequence
  Description of Artificial Sequence: Synthetic oligonucleotide
aaagcaaaggggucucggu

SEQ ID NO: 2311499 - RNA, 19 nt, Artificial Sequence
  Description of Artificial Sequence: Synthetic oligonucleotide
ugcaauuuacacuaacauu

SEQ ID NO: 2311500 - RNA, 19 nt, Artificial Sequence
  Description of Artificial Sequence: Synthetic oligonucleotide
agcagguaucacuuccacc

SEQ ID NO: 2311501 - RNA, 19 nt, Artificial Sequence
  Description of Artificial Sequence: Synthetic oligonucleotide
uucuuuuacacaagcgauc

SEQ ID NO: 2311502 - RNA, 19 nt, Artificial Sequence
  Description of Artificial Sequence: Synthetic oligonucleotide
ugauagauuucuuguuuga

SEQ ID NO: 2311503 - RNA, 19 nt, Artificial Sequence
  Description of Artificial Sequence: Synthetic oligonucleotide
caguguaaaauaacacagc

SEQ ID NO: 2311504 - RNA, 19 nt, Artificial Sequence
  Description of Artificial Sequence: Synthetic oligonucleotide
uaacuagccuccaaugagu

SEQ ID NO: 2311505 - RNA, 19 nt, Artificial Sequence
  Description of Artificial Sequence: Synthetic oligonucleotide
auuuacacuaacauuagua

SEQ ID NO: 2311506 - RNA, 19 nt, Artificial Sequence
  Description of Artificial Sequence: Synthetic oligonucleotide
cauuaguaaaaguuuacaa

SEQ ID NO: 2311507 - RNA, 19 nt, Artificial Sequence
  Description of Artificial Sequence: Synthetic oligonucleotide
acugcucuuucuuuaaccu

SEQ ID NO: 2311508 - RNA, 19 nt, Artificial Sequence
  Description of Artificial Sequence: Synthetic oligonucleotide
augaguuagaucaaagcca

SEQ ID NO: 2311509 - RNA, 19 nt, Artificial Sequence
  Description of Artificial Sequence: Synthetic oligonucleotide
uuguuucccuccuaacuag

SEQ ID NO: 2311510 - RNA, 19 nt, Artificial Sequence
  Description of Artificial Sequence: Synthetic oligonucleotide
acuguaaaggaagauguga

SEQ ID NO: 2311511 - RNA, 19 nt, Artificial Sequence
  Description of Artificial Sequence: Synthetic oligonucleotide
aauaacaucuggauaugaa

SEQ ID NO: 2311512 - RNA, 19 nt, Artificial Sequence
  Description of Artificial Sequence: Synthetic oligonucleotide
acauccauggacuguguug

SEQ ID NO: 2311513 - RNA, 19 nt, Artificial Sequence
  Description of Artificial Sequence: Synthetic oligonucleotide
uaaagcaaaggggucucgg

SEQ ID NO: 2311514 - RNA, 19 nt, Artificial Sequence
  Description of Artificial Sequence: Synthetic oligonucleotide
cacgccacaacacuauggg

SEQ ID NO: 2311515 - RNA, 19 nt, Artificial Sequence
  Description of Artificial Sequence: Synthetic oligonucleotide
ucuggauaugaaagggcug

SEQ ID NO: 2311516 - RNA, 19 nt, Artificial Sequence
  Description of Artificial Sequence: Synthetic oligonucleotide
caauauucacauuaaugga

SEQ ID NO: 2311517 - RNA, 19 nt, Artificial Sequence
  Description of Artificial Sequence: Synthetic oligonucleotide
aacgcuaacagugcucucu

SEQ ID NO: 2311518 - RNA, 19 nt, Artificial Sequence
  Description of Artificial Sequence: Synthetic oligonucleotide
aggaaaguaguguuuuaca

SEQ ID NO: 2311519 - RNA, 19 nt, Artificial Sequence
  Description of Artificial Sequence: Synthetic oligonucleotide
acucaggcaauauucacau

SEQ ID NO: 2311520 - RNA, 19 nt, Artificial Sequence
  Description of Artificial Sequence: Synthetic oligonucleotide
auacuguacgauacaaaac

SEQ ID NO: 2311521 - RNA, 19 nt, Artificial Sequence
  Description of Artificial Sequence: Synthetic oligonucleotide
cagguauacuguacgauac

SEQ ID NO: 2311522 - RNA, 19 nt, Artificial Sequence
  Description of Artificial Sequence: Synthetic oligonucleotide
auggacuguguugaaacac

SEQ ID NO: 2311523 - RNA, 19 nt, Artificial Sequence
  Description of Artificial Sequence: Synthetic oligonucleotide
caucuggauaugaaagggc

SEQ ID NO: 2311524 - RNA, 19 nt, Artificial Sequence
  Description of Artificial Sequence: Synthetic oligonucleotide
aguauguucuucccgugca

SEQ ID NO: 2311525 - RNA, 19 nt, Artificial Sequence
  Description of Artificial Sequence: Synthetic oligonucleotide
gguuaggagauaauuauug

SEQ ID NO: 2311526 - RNA, 19 nt, Artificial Sequence
  Description of Artificial Sequence: Synthetic oligonucleotide
cuuauuuaggaaauaagau

SEQ ID NO: 2311527 - RNA, 19 nt, Artificial Sequence
  Description of Artificial Sequence: Synthetic oligonucleotide
acacuaacauuaguaaaag

SEQ ID NO: 2311528 - RNA, 19 nt, Artificial Sequence
  Description of Artificial Sequence: Synthetic oligonucleotide
auuagaauauuaguugaaa

SEQ ID NO: 2311529 - RNA, 19 nt, Artificial Sequence
  Description of Artificial Sequence: Synthetic oligonucleotide
uaaccgucagcacacaguu

SEQ ID NO: 2311530 - RNA, 19 nt, Artificial Sequence
  Description of Artificial Sequence: Synthetic oligonucleotide
uccuaacuagccuccaaug

SEQ ID NO: 2311531 - RNA, 19 nt, Artificial Sequence
  Description of Artificial Sequence: Synthetic oligonucleotide
uggacuguguugaaacacu

SEQ ID NO: 2311532 - RNA, 19 nt, Artificial Sequence
  Description of Artificial Sequence: Synthetic oligonucleotide
aagugcauaauaacaucug

SEQ ID NO: 2311533 - RNA, 19 nt, Artificial Sequence
  Description of Artificial Sequence: Synthetic oligonucleotide
auuguaucagaaugcaauu

SEQ ID NO: 2311534 - RNA, 19 nt, Artificial Sequence
  Description of Artificial Sequence: Synthetic oligonucleotide
uuauuguaucagaaugcaa

SEQ ID NO: 2311535 - RNA, 19 nt, Artificial Sequence
  Description of Artificial Sequence: Synthetic oligonucleotide
ucuuuaaccuggaacugua

SEQ ID NO: 2311536 - RNA, 19 nt, Artificial Sequence
  Description of Artificial Sequence: Synthetic oligonucleotide
cuguucuauaucccaaaag

SEQ ID NO: 2311537 - RNA, 19 nt, Artificial Sequence
  Description of Artificial Sequence: Synthetic oligonucleotide
acaggcuaaguuccuauca

SEQ ID NO: 2311538 - RNA, 19 nt, Artificial Sequence
  Description of Artificial Sequence: Synthetic oligonucleotide
aacucaggcaauauucaca

SEQ ID NO: 2311539 - RNA, 19 nt, Artificial Sequence
  Description of Artificial Sequence: Synthetic oligonucleotide
uuuccaaaugccuguguaa

SEQ ID NO: 2311540 - RNA, 19 nt, Artificial Sequence
  Description of Artificial Sequence: Synthetic oligonucleotide
aaacacugcucuuucuuua

SEQ ID NO: 2311541 - RNA, 19 nt, Artificial Sequence
  Description of Artificial Sequence: Synthetic oligonucleotide
uagaucaaagccaggcauc

SEQ ID NO: 2311542 - RNA, 19 nt, Artificial Sequence
  Description of Artificial Sequence: Synthetic oligonucleotide
gcagauaccgagaagacug

SEQ ID NO: 2311543 - RNA, 19 nt, Artificial Sequence
  Description of Artificial Sequence: Synthetic oligonucleotide
gaucaauauugauagauuu

SEQ ID NO: 2311544 - RNA, 19 nt, Artificial Sequence
  Description of Artificial Sequence: Synthetic oligonucleotide
gaagaugugagcagguauc

SEQ ID NO: 2311545 - RNA, 19 nt, Artificial Sequence
  Description of Artificial Sequence: Synthetic oligonucleotide
cacugcucuuucuuuaacc

SEQ ID NO: 2311546 - RNA, 19 nt, Artificial Sequence
  Description of Artificial Sequence: Synthetic oligonucleotide
aacuguagcuaugcucaac

SEQ ID NO: 2311547 - RNA, 19 nt, Artificial Sequence
  Description of Artificial Sequence: Synthetic oligonucleotide
aucugguggacuuaaccgu

SEQ ID NO: 2311548 - RNA, 19 nt, Artificial Sequence
  Description of Artificial Sequence: Synthetic oligonucleotide
uguacaucauuuucuuuua

SEQ ID NO: 2311549 - RNA, 19 nt, Artificial Sequence
  Description of Artificial Sequence: Synthetic oligonucleotide
uaaguuccuaucacaucca

SEQ ID NO: 2311550 - RNA, 19 nt, Artificial Sequence
  Description of Artificial Sequence: Synthetic oligonucleotide
guucuauaucccaaaagac

SEQ ID NO: 2311551 - RNA, 19 nt, Artificial Sequence
  Description of Artificial Sequence: Synthetic oligonucleotide
gaacucaggcaauauucac

SEQ ID NO: 2311552 - RNA, 19 nt, Artificial Sequence
  Description of Artificial Sequence: Synthetic oligonucleotide
gacucauguacucccaguc

SEQ ID NO: 2311553 - RNA, 19 nt, Artificial Sequence
  Description of Artificial Sequence: Synthetic oligonucleotide
gaaugagacucauguacuc

SEQ ID NO: 2311554 - RNA, 19 nt, Artificial Sequence
  Description of Artificial Sequence: Synthetic oligonucleotide
aaugcacuguaaaggaaga

SEQ ID NO: 2311555 - RNA, 19 nt, Artificial Sequence
  Description of Artificial Sequence: Synthetic oligonucleotide
aagaggaaaguaguguuuu

SEQ ID NO: 2311556 - RNA, 19 nt, Artificial Sequence
  Description of Artificial Sequence: Synthetic oligonucleotide
ggagauaauuauuguauca

SEQ ID NO: 2311557 - RNA, 19 nt, Artificial Sequence
  Description of Artificial Sequence: Synthetic oligonucleotide
accgagaagacugaacuca

SEQ ID NO: 2311558 - RNA, 19 nt, Artificial Sequence
  Description of Artificial Sequence: Synthetic oligonucleotide
ugagcagguaucacuucca

SEQ ID NO: 2311559 - RNA, 19 nt, Artificial Sequence
  Description of Artificial Sequence: Synthetic oligonucleotide
ugagucuauccaugcguag

SEQ ID NO: 2311560 - RNA, 19 nt, Artificial Sequence
  Description of Artificial Sequence: Synthetic oligonucleotide
aagaugugagcagguauca

SEQ ID NO: 2311561 - RNA, 19 nt, Artificial Sequence
  Description of Artificial Sequence: Synthetic oligonucleotide
ggacagaacgcuaacagug

SEQ ID NO: 2311562 - RNA, 19 nt, Artificial Sequence
  Description of Artificial Sequence: Synthetic oligonucleotide
accgucagcacacaguuuu

SEQ ID NO: 2311563 - RNA, 19 nt, Artificial Sequence
  Description of Artificial Sequence: Synthetic oligonucleotide
uauucacauuaauggauau

SEQ ID NO: 2311564 - RNA, 19 nt, Artificial Sequence
  Description of Artificial Sequence: Synthetic oligonucleotide
agaacgcuaacagugcucu

SEQ ID NO: 2311565 - RNA, 19 nt, Artificial Sequence
  Description of Artificial Sequence: Synthetic oligonucleotide
uaauaacaucuggauauga

SEQ ID NO: 2311566 - RNA, 19 nt, Artificial Sequence
  Description of Artificial Sequence: Synthetic oligonucleotide
uggggacugaaugagacuc

SEQ ID NO: 2311567 - RNA, 19 nt, Artificial Sequence
  Description of Artificial Sequence: Synthetic oligonucleotide
uguuucccuccuaacuagc

SEQ ID NO: 2311568 - RNA, 19 nt, Artificial Sequence
  Description of Artificial Sequence: Synthetic oligonucleotide
ucugguggacuuaaccguc

SEQ ID NO: 2311569 - RNA, 19 nt, Artificial Sequence
  Description of Artificial Sequence: Synthetic oligonucleotide
ggaacuguagcuaugcuca

SEQ ID NO: 2311570 - RNA, 19 nt, Artificial Sequence
  Description of Artificial Sequence: Synthetic oligonucleotide
acagggacagaacgcuaac

SEQ ID NO: 2311571 - RNA, 19 nt, Artificial Sequence
  Description of Artificial Sequence: Synthetic oligonucleotide
auaauaacaucuggauaug

SEQ ID NO: 2311572 - RNA, 19 nt, Artificial Sequence
  Description of Artificial Sequence: Synthetic oligonucleotide
acacacagggacagaacgc

SEQ ID NO: 2311573 - RNA, 19 nt, Artificial Sequence
  Description of Artificial Sequence: Synthetic oligonucleotide
guggacuuaaccgucagca

SEQ ID NO: 2311574 - RNA, 19 nt, Artificial Sequence
  Description of Artificial Sequence: Synthetic oligonucleotide
uugagucuauccaugcgua

SEQ ID NO: 2311575 - RNA, 19 nt, Artificial Sequence
  Description of Artificial Sequence: Synthetic oligonucleotide
gacuuaaccgucagcacac

SEQ ID NO: 2311576 - RNA, 19 nt, Artificial Sequence
  Description of Artificial Sequence: Synthetic oligonucleotide
guugaaacacugcucuuuc

SEQ ID NO: 2311577 - RNA, 19 nt, Artificial Sequence
  Description of Artificial Sequence: Synthetic oligonucleotide
uucuuuaaccuggaacugu

SEQ ID NO: 2311578 - RNA, 19 nt, Artificial Sequence
  Description of Artificial Sequence: Synthetic oligonucleotide
cuauccaugcguagauuug

SEQ ID NO: 2311579 - RNA, 19 nt, Artificial Sequence
  Description of Artificial Sequence: Synthetic oligonucleotide
ugccuguguaauaaagcaa

SEQ ID NO: 2311580 - RNA, 19 nt, Artificial Sequence
  Description of Artificial Sequence: Synthetic oligonucleotide
augcguagauuuguuuccc

SEQ ID NO: 2311581 - RNA, 19 nt, Artificial Sequence
  Description of Artificial Sequence: Synthetic oligonucleotide
aucuggauaugaaagggcu

SEQ ID NO: 2311582 - RNA, 19 nt, Artificial Sequence
  Description of Artificial Sequence: Synthetic oligonucleotide
uauccaugcguagauuugu

SEQ ID NO: 2311583 - RNA, 19 nt, Artificial Sequence
  Description of Artificial Sequence: Synthetic oligonucleotide
uaagaucaauauugauaga

SEQ ID NO: 2311584 - RNA, 19 nt, Artificial Sequence
  Description of Artificial Sequence: Synthetic oligonucleotide
uccaccuugugaguuaacu

SEQ ID NO: 2311585 - RNA, 19 nt, Artificial Sequence
  Description of Artificial Sequence: Synthetic oligonucleotide
uuguuugagcagauaccga

SEQ ID NO: 2311586 - RNA, 19 nt, Artificial Sequence
  Description of Artificial Sequence: Synthetic oligonucleotide
gacagaacgcuaacagugc

SEQ ID NO: 2311587 - RNA, 19 nt, Artificial Sequence
  Description of Artificial Sequence: Synthetic oligonucleotide
guaucagaaugcaauuuac

SEQ ID NO: 2311588 - RNA, 19 nt, Artificial Sequence
  Description of Artificial Sequence: Synthetic oligonucleotide
acuguacgauacaaaacag

SEQ ID NO: 2311589 - RNA, 19 nt, Artificial Sequence
  Description of Artificial Sequence: Synthetic oligonucleotide
gagacucauguacucccag

SEQ ID NO: 2311590 - RNA, 19 nt, Artificial Sequence
  Description of Artificial Sequence: Synthetic oligonucleotide
ugagacucauguacuccca

SEQ ID NO: 2311591 - RNA, 19 nt, Artificial Sequence
  Description of Artificial Sequence: Synthetic oligonucleotide
uaugcucaacagcaucagu

SEQ ID NO: 2311592 - RNA, 19 nt, Artificial Sequence
  Description of Artificial Sequence: Synthetic oligonucleotide
uguugaaacacugcucuuu

SEQ ID NO: 2311593 - RNA, 19 nt, Artificial Sequence
  Description of Artificial Sequence: Synthetic oligonucleotide
gauaccgagaagacugaac

SEQ ID NO: 2311594 - RNA, 19 nt, Artificial Sequence
  Description of Artificial Sequence: Synthetic oligonucleotide
ucccgugcacgccacaaca

SEQ ID NO: 2311595 - RNA, 19 nt, Artificial Sequence
  Description of Artificial Sequence: Synthetic oligonucleotide
guaauaaagcaaagggguc

SEQ ID NO: 2311596 - RNA, 19 nt, Artificial Sequence
  Description of Artificial Sequence: Synthetic oligonucleotide
acuacagagacaggcuaag

SEQ ID NO: 2311597 - RNA, 19 nt, Artificial Sequence
  Description of Artificial Sequence: Synthetic oligonucleotide
aagugugguuaggagauaa

SEQ ID NO: 2311598 - RNA, 19 nt, Artificial Sequence
  Description of Artificial Sequence: Synthetic oligonucleotide
agucuauccaugcguagau

SEQ ID NO: 2311599 - RNA, 19 nt, Artificial Sequence
  Description of Artificial Sequence: Synthetic oligonucleotide
acagaacgcuaacagugcu

SEQ ID NO: 2311600 - RNA, 19 nt, Artificial Sequence
  Description of Artificial Sequence: Synthetic oligonucleotide
ugguuaggagauaauuauu

SEQ ID NO: 2311601 - RNA, 19 nt, Artificial Sequence
  Description of Artificial Sequence: Synthetic oligonucleotide
cuuaaccgucagcacacag

SEQ ID NO: 2311602 - RNA, 19 nt, Artificial Sequence
  Description of Artificial Sequence: Synthetic oligonucleotide
uucccuccuaacuagccuc

SEQ ID NO: 2311603 - RNA, 19 nt, Artificial Sequence
  Description of Artificial Sequence: Synthetic oligonucleotide
ucucggugaaucuggugga

SEQ ID NO: 2311604 - RNA, 19 nt, Artificial Sequence
  Description of Artificial Sequence: Synthetic oligonucleotide
agugcucucuggaugguuc

SEQ ID NO: 2311605 - RNA, 19 nt, Artificial Sequence
  Description of Artificial Sequence: Synthetic oligonucleotide
ggaaaguaguguuuuacaa

SEQ ID NO: 2311606 - RNA, 19 nt, Artificial Sequence
  Description of Artificial Sequence: Synthetic oligonucleotide
ucauguacucccagucagu

SEQ ID NO: 2311607 - RNA, 19 nt, Artificial Sequence
  Description of Artificial Sequence: Synthetic oligonucleotide
guuggggacugaaugagac

SEQ ID NO: 2311608 - RNA, 19 nt, Artificial Sequence
  Description of Artificial Sequence: Synthetic oligonucleotide
agguaucacuuccaccuug

SEQ ID NO: 2311609 - RNA, 19 nt, Artificial Sequence
  Description of Artificial Sequence: Synthetic oligonucleotide
aaguuccuaucacauccau

SEQ ID NO: 2311610 - RNA, 19 nt, Artificial Sequence
  Description of Artificial Sequence: Synthetic oligonucleotide
cuaucacauccauggacug

SEQ ID NO: 2311611 - RNA, 19 nt, Artificial Sequence
  Description of Artificial Sequence: Synthetic oligonucleotide
caggcuaaguuccuaucac

SEQ ID NO: 2311612 - RNA, 19 nt, Artificial Sequence
  Description of Artificial Sequence: Synthetic oligonucleotide
uugcuguucuauaucccaa

SEQ ID NO: 2311613 - RNA, 19 nt, Artificial Sequence
  Description of Artificial Sequence: Synthetic oligonucleotide
auauucacauuaauggaua

SEQ ID NO: 2311614 - RNA, 19 nt, Artificial Sequence
  Description of Artificial Sequence: Synthetic oligonucleotide
aggcaucccauacuuaaau

SEQ ID NO: 2311615 - RNA, 19 nt, Artificial Sequence
  Description of Artificial Sequence: Synthetic oligonucleotide
aggcuaaguuccuaucaca

SEQ ID NO: 2311616 - RNA, 19 nt, Artificial Sequence
  Description of Artificial Sequence: Synthetic oligonucleotide
ugcuguucuauaucccaaa

SEQ ID NO: 2311617 - RNA, 19 nt, Artificial Sequence
  Description of Artificial Sequence: Synthetic oligonucleotide
agguauacuguacgauaca

SEQ ID NO: 2311618 - RNA, 19 nt, Artificial Sequence
  Description of Artificial Sequence: Synthetic oligonucleotide
auaaagcaaaggggucucg

SEQ ID NO: 2311619 - RNA, 19 nt, Artificial Sequence
  Description of Artificial Sequence: Synthetic oligonucleotide
aagcgaucaaagggcagug

SEQ ID NO: 2311620 - RNA, 19 nt, Artificial Sequence
  Description of Artificial Sequence: Synthetic oligonucleotide
guuaggagauaauuauugu

SEQ ID NO: 2311621 - RNA, 19 nt, Artificial Sequence
  Description of Artificial Sequence: Synthetic oligonucleotide
gugguuaggagauaauuau

SEQ ID NO: 2311622 - RNA, 19 nt, Artificial Sequence
  Description of Artificial Sequence: Synthetic oligonucleotide
agacucauguacucccagu

SEQ ID NO: 2311623 - RNA, 19 nt, Artificial Sequence
  Description of Artificial Sequence: Synthetic oligonucleotide
aacuacagagacaggcuaa

SEQ ID NO: 2311624 - RNA, 19 nt, Artificial Sequence
  Description of Artificial Sequence: Synthetic oligonucleotide
cuggauaugaaagggcuga

SEQ ID NO: 2311625 - RNA, 19 nt, Artificial Sequence
  Description of Artificial Sequence: Synthetic oligonucleotide
ggacuuaaccgucagcaca

SEQ ID NO: 2311626 - RNA, 19 nt, Artificial Sequence
  Description of Artificial Sequence: Synthetic oligonucleotide
cuguagcuaugcucaacag

SEQ ID NO: 2311627 - RNA, 19 nt, Artificial Sequence
  Description of Artificial Sequence: Synthetic oligonucleotide
agaugugagcagguaucac

SEQ ID NO: 2311628 - RNA, 19 nt, Artificial Sequence
  Description of Artificial Sequence: Synthetic oligonucleotide
uuccuaucacauccaugga

SEQ ID NO: 2311629 - RNA, 19 nt, Artificial Sequence
  Description of Artificial Sequence: Synthetic oligonucleotide
acugaaugagacucaugua

SEQ ID NO: 2311630 - RNA, 19 nt, Artificial Sequence
  Description of Artificial Sequence: Synthetic oligonucleotide
agcgaucaaagggcagugc

SEQ ID NO: 2311631 - RNA, 19 nt, Artificial Sequence
  Description of Artificial Sequence: Synthetic oligonucleotide
ccaaugaguuagaucaaag

SEQ ID NO: 2311632 - RNA, 19 nt, Artificial Sequence
  Description of Artificial Sequence: Synthetic oligonucleotide
ucccuccuaacuagccucc

SEQ ID NO: 2311633 - RNA, 19 nt, Artificial Sequence
  Description of Artificial Sequence: Synthetic oligonucleotide
aaggggucucggugaaucu

SEQ ID NO: 2311634 - RNA, 19 nt, Artificial Sequence
  Description of Artificial Sequence: Synthetic oligonucleotide
cauccauggacuguguuga

SEQ ID NO: 2311635 - RNA, 19 nt, Artificial Sequence
  Description of Artificial Sequence: Synthetic oligonucleotide
aaacuuccaguuggggacu

SEQ ID NO: 2311636 - RNA, 19 nt, Artificial Sequence
  Description of Artificial Sequence: Synthetic oligonucleotide
ggcugaaaaguucuuauua

SEQ ID NO: 2311637 - RNA, 19 nt, Artificial Sequence
  Description of Artificial Sequence: Synthetic oligonucleotide
agacaggcuaaguuccuau

SEQ ID NO: 2311638 - RNA, 19 nt, Artificial Sequence
  Description of Artificial Sequence: Synthetic oligonucleotide
gagucuauccaugcguaga

SEQ ID NO: 2311639 - RNA, 19 nt, Artificial Sequence
  Description of Artificial Sequence: Synthetic oligonucleotide
uaucacauccauggacugu

SEQ ID NO: 2311640 - RNA, 19 nt, Artificial Sequence
  Description of Artificial Sequence: Synthetic oligonucleotide
guacaucauuuucuuuuac

SEQ ID NO: 2311641 - RNA, 19 nt, Artificial Sequence
  Description of Artificial Sequence: Synthetic oligonucleotide
ugcacgccacaacacuaug

SEQ ID NO: 2311642 - RNA, 19 nt, Artificial Sequence
  Description of Artificial Sequence: Synthetic oligonucleotide
ugaaucugguggacuuaac

SEQ ID NO: 2311643 - RNA, 19 nt, Artificial Sequence
  Description of Artificial Sequence: Synthetic oligonucleotide
uaccgagaagacugaacuc

SEQ ID NO: 2311644 - RNA, 19 nt, Artificial Sequence
  Description of Artificial Sequence: Synthetic oligonucleotide
gacaggcuaaguuccuauc

SEQ ID NO: 2311645 - RNA, 19 nt, Artificial Sequence
  Description of Artificial Sequence: Synthetic oligonucleotide
uuggggacugaaugagacu

SEQ ID NO: 2311646 - RNA, 19 nt, Artificial Sequence
  Description of Artificial Sequence: Synthetic oligonucleotide
acgcuaacagugcucucug

SEQ ID NO: 2311647 - RNA, 19 nt, Artificial Sequence
  Description of Artificial Sequence: Synthetic oligonucleotide
ggaaaacuuccaguugggg

SEQ ID NO: 2311648 - RNA, 19 nt, Artificial Sequence
  Description of Artificial Sequence: Synthetic oligonucleotide
gagcagguaucacuuccac

SEQ ID NO: 2311649 - RNA, 19 nt, Artificial Sequence
  Description of Artificial Sequence: Synthetic oligonucleotide
agcagauaccgagaagacu

SEQ ID NO: 2311650 - RNA, 19 nt, Artificial Sequence
  Description of Artificial Sequence: Synthetic oligonucleotide
ugcguagauuuguuucccu

SEQ ID NO: 2311651 - RNA, 19 nt, Artificial Sequence
  Description of Artificial Sequence: Synthetic oligonucleotide
ccaugcguagauuuguuuc

SEQ ID NO: 2311652 - RNA, 19 nt, Artificial Sequence
  Description of Artificial Sequence: Synthetic oligonucleotide
gagcagguauacuguacga

SEQ ID NO: 2311653 - RNA, 19 nt, Artificial Sequence
  Description of Artificial Sequence: Synthetic oligonucleotide
caucccauacuuaaaucua

SEQ ID NO: 2311654 - RNA, 19 nt, Artificial Sequence
  Description of Artificial Sequence: Synthetic oligonucleotide
guuucccuccuaacuagcc

SEQ ID NO: 2311655 - RNA, 19 nt, Artificial Sequence
  Description of Artificial Sequence: Synthetic oligonucleotide
caguaaaagugugguuagg

SEQ ID NO: 2311656 - RNA, 19 nt, Artificial Sequence
  Description of Artificial Sequence: Synthetic oligonucleotide
cagaacgcuaacagugcuc

SEQ ID NO: 2311657 - RNA, 19 nt, Artificial Sequence
  Description of Artificial Sequence: Synthetic oligonucleotide
aagacugaacucaggcaau

SEQ ID NO: 2311658 - RNA, 19 nt, Artificial Sequence
  Description of Artificial Sequence: Synthetic oligonucleotide
cguagauuuguuucccucc

SEQ ID NO: 2311659 - RNA, 19 nt, Artificial Sequence
  Description of Artificial Sequence: Synthetic oligonucleotide
ucacaguaauguacaucau

SEQ ID NO: 2311660 - RNA, 19 nt, Artificial Sequence
  Description of Artificial Sequence: Synthetic oligonucleotide
ugugagcagguaucacuuc

SEQ ID NO: 2311661 - RNA, 19 nt, Artificial Sequence
  Description of Artificial Sequence: Synthetic oligonucleotide
acaacacuaugggaaauua

SEQ ID NO: 2311662 - RNA, 19 nt, Artificial Sequence
  Description of Artificial Sequence: Synthetic oligonucleotide
aguuccuaucacauccaug

SEQ ID NO: 2311663 - RNA, 19 nt, Artificial Sequence
  Description of Artificial Sequence: Synthetic oligonucleotide
gaguuagaucaaagccagg

SEQ ID NO: 2311664 - RNA, 19 nt, Artificial Sequence
  Description of Artificial Sequence: Synthetic oligonucleotide
uagauuuguuucccuccua

SEQ ID NO: 2311665 - RNA, 19 nt, Artificial Sequence
  Description of Artificial Sequence: Synthetic oligonucleotide
cuugugaguuaacuacaga

SEQ ID NO: 2311666 - RNA, 19 nt, Artificial Sequence
  Description of Artificial Sequence: Synthetic oligonucleotide
uccaugcguagauuuguuu

SEQ ID NO: 2311667 - RNA, 19 nt, Artificial Sequence
  Description of Artificial Sequence: Synthetic oligonucleotide
aacuagccuccaaugaguu

SEQ ID NO: 2311668 - RNA, 19 nt, Artificial Sequence
  Description of Artificial Sequence: Synthetic oligonucleotide
gagcagauaccgagaagac

SEQ ID NO: 2311669 - RNA, 19 nt, Artificial Sequence
  Description of Artificial Sequence: Synthetic oligonucleotide
cauggacuguguugaaaca

SEQ ID NO: 2311670 - RNA, 19 nt, Artificial Sequence
  Description of Artificial Sequence: Synthetic oligonucleotide
agcagguauacuguacgau

SEQ ID NO: 2311671 - RNA, 19 nt, Artificial Sequence
  Description of Artificial Sequence: Synthetic oligonucleotide
gcauaauaacaucuggaua

SEQ ID NO: 2311672 - RNA, 19 nt, Artificial Sequence
  Description of Artificial Sequence: Synthetic oligonucleotide
agccaggcaucccauacuu

SEQ ID NO: 2311673 - RNA, 19 nt, Artificial Sequence
  Description of Artificial Sequence: Synthetic oligonucleotide
gaucaaagccaggcauccc

SEQ ID NO: 2311674 - RNA, 19 nt, Artificial Sequence
  Description of Artificial Sequence: Synthetic oligonucleotide
augaaagggcugaaaaguu

SEQ ID NO: 2311675 - RNA, 19 nt, Artificial Sequence
  Description of Artificial Sequence: Synthetic oligonucleotide
aguuaacuacagagacagg

SEQ ID NO: 2311676 - RNA, 19 nt, Artificial Sequence
  Description of Artificial Sequence: Synthetic oligonucleotide
uuccaguuggggacugaau

SEQ ID NO: 2311677 - RNA, 19 nt, Artificial Sequence
  Description of Artificial Sequence: Synthetic oligonucleotide
guuugagcagauaccgaga

SEQ ID NO: 2311678 - RNA, 19 nt, Artificial Sequence
  Description of Artificial Sequence: Synthetic oligonucleotide
cuguacgauacaaaacagu

SEQ ID NO: 2311679 - RNA, 19 nt, Artificial Sequence
  Description of Artificial Sequence: Synthetic oligonucleotide
ucacuuccaccuugugagu

SEQ ID NO: 2311680 - RNA, 19 nt, Artificial Sequence
  Description of Artificial Sequence: Synthetic oligonucleotide
caacacuaugggaaauuaa

SEQ ID NO: 2311681 - RNA, 19 nt, Artificial Sequence
  Description of Artificial Sequence: Synthetic oligonucleotide
ucggugaaucugguggacu

SEQ ID NO: 2311682 - RNA, 19 nt, Artificial Sequence
  Description of Artificial Sequence: Synthetic oligonucleotide
gguauacuguacgauacaa

SEQ ID NO: 2311683 - RNA, 19 nt, Artificial Sequence
  Description of Artificial Sequence: Synthetic oligonucleotide
guucuucccgugcacgcca

SEQ ID NO: 2311684 - RNA, 19 nt, Artificial Sequence
  Description of Artificial Sequence: Synthetic oligonucleotide
gcuaaguuccuaucacauc

SEQ ID NO: 2311685 - RNA, 19 nt, Artificial Sequence
  Description of Artificial Sequence: Synthetic oligonucleotide
acgccacaacacuauggga

SEQ ID NO: 2311686 - RNA, 19 nt, Artificial Sequence
  Description of Artificial Sequence: Synthetic oligonucleotide
gcuaugcucaacagcauca

SEQ ID NO: 2311687 - RNA, 19 nt, Artificial Sequence
  Description of Artificial Sequence: Synthetic oligonucleotide
gcagguauacuguacgaua

SEQ ID NO: 2311688 - RNA, 19 nt, Artificial Sequence
  Description of Artificial Sequence: Synthetic oligonucleotide
ggggucucggugaaucugg

SEQ ID NO: 2311689 - RNA, 19 nt, Artificial Sequence
  Description of Artificial Sequence: Synthetic oligonucleotide
cuauaucccaaaagacaua

SEQ ID NO: 2311690 - RNA, 19 nt, Artificial Sequence
  Description of Artificial Sequence: Synthetic oligonucleotide
gccuguguaauaaagcaaa

SEQ ID NO: 2311691 - RNA, 19 nt, Artificial Sequence
  Description of Artificial Sequence: Synthetic oligonucleotide
uggauaugaaagggcugaa

SEQ ID NO: 2311692 - RNA, 19 nt, Artificial Sequence
  Description of Artificial Sequence: Synthetic oligonucleotide
ggcaucccauacuuaaauc

SEQ ID NO: 2311693 - RNA, 19 nt, Artificial Sequence
  Description of Artificial Sequence: Synthetic oligonucleotide
aggggucucggugaaucug

SEQ ID NO: 2311694 - RNA, 19 nt, Artificial Sequence
  Description of Artificial Sequence: Synthetic oligonucleotide
gcugaaaaguucuuauuau

SEQ ID NO: 2311695 - RNA, 19 nt, Artificial Sequence
  Description of Artificial Sequence: Synthetic oligonucleotide
guacgauacaaaacagugu

SEQ ID NO: 2311696 - RNA, 19 nt, Artificial Sequence
  Description of Artificial Sequence: Synthetic oligonucleotide
ccuaacuagccuccaauga

SEQ ID NO: 2311697 - RNA, 19 nt, Artificial Sequence
  Description of Artificial Sequence: Synthetic oligonucleotide
acuagccuccaaugaguua

SEQ ID NO: 2311698 - RNA, 19 nt, Artificial Sequence
  Description of Artificial Sequence: Synthetic oligonucleotide
gcacuguaaaggaagaugu

SEQ ID NO: 2311699 - RNA, 19 nt, Artificial Sequence
  Description of Artificial Sequence: Synthetic oligonucleotide
acuaacacacagggacaga

SEQ ID NO: 2311700 - RNA, 19 nt, Artificial Sequence
  Description of Artificial Sequence: Synthetic oligonucleotide
acgauacaaaacaguguaa

SEQ ID NO: 2311701 - RNA, 19 nt, Artificial Sequence
  Description of Artificial Sequence: Synthetic oligonucleotide
ccuaucacauccauggacu

SEQ ID NO: 2311702 - RNA, 19 nt, Artificial Sequence
  Description of Artificial Sequence: Synthetic oligonucleotide
gcacgccacaacacuaugg

SEQ ID NO: 2311703 - RNA, 19 nt, Artificial Sequence
  Description of Artificial Sequence: Synthetic oligonucleotide
cagauaccgagaagacuga

SEQ ID NO: 2311704 - RNA, 19 nt, Artificial Sequence
  Description of Artificial Sequence: Synthetic oligonucleotide
aaagugugguuaggagaua

SEQ ID NO: 2311705 - RNA, 19 nt, Artificial Sequence
  Description of Artificial Sequence: Synthetic oligonucleotide
ccgagaagacugaacucag

SEQ ID NO: 2311706 - RNA, 19 nt, Artificial Sequence
  Description of Artificial Sequence: Synthetic oligonucleotide
gugaaucugguggacuuaa

SEQ ID NO: 2311707 - RNA, 19 nt, Artificial Sequence
  Description of Artificial Sequence: Synthetic oligonucleotide
ggaagaugugagcagguau

SEQ ID NO: 2311708 - RNA, 19 nt, Artificial Sequence
  Description of Artificial Sequence: Synthetic oligonucleotide
cacaguaauguacaucauu

SEQ ID NO: 2311709 - RNA, 19 nt, Artificial Sequence
  Description of Artificial Sequence: Synthetic oligonucleotide
gcguagauuuguuucccuc

SEQ ID NO: 2311710 - RNA, 19 nt, Artificial Sequence
  Description of Artificial Sequence: Synthetic oligonucleotide
gcaucaguaaaaguguggu

SEQ ID NO: 2311711 - RNA, 19 nt, Artificial Sequence
  Description of Artificial Sequence: Synthetic oligonucleotide
agauaccgagaagacugaa

SEQ ID NO: 2311712 - RNA, 19 nt, Artificial Sequence
  Description of Artificial Sequence: Synthetic oligonucleotide
gaacgcuaacagugcucuc

SEQ ID NO: 2311713 - RNA, 19 nt, Artificial Sequence
  Description of Artificial Sequence: Synthetic oligonucleotide
agacugaacucaggcaaua

SEQ ID NO: 2311714 - RNA, 19 nt, Artificial Sequence
  Description of Artificial Sequence: Synthetic oligonucleotide
gcuguucuauaucccaaaa

SEQ ID NO: 2311715 - RNA, 19 nt, Artificial Sequence
  Description of Artificial Sequence: Synthetic oligonucleotide
cucggugaaucugguggac

SEQ ID NO: 2311716 - RNA, 19 nt, Artificial Sequence
  Description of Artificial Sequence: Synthetic oligonucleotide
cuuuuacacaagcgaucaa

SEQ ID NO: 2311717 - RNA, 19 nt, Artificial Sequence
  Description of Artificial Sequence: Synthetic oligonucleotide
uuccaccuugugaguuaac

SEQ ID NO: 2311718 - RNA, 19 nt, Artificial Sequence
  Description of Artificial Sequence: Synthetic oligonucleotide
gccuccaaugaguuagauc

SEQ ID NO: 2311719 - RNA, 19 nt, Artificial Sequence
  Description of Artificial Sequence: Synthetic oligonucleotide
gccacaacacuaugggaaa

SEQ ID NO: 2311720 - RNA, 19 nt, Artificial Sequence
  Description of Artificial Sequence: Synthetic oligonucleotide
agugugguuaggagauaau

SEQ ID NO: 2311721 - RNA, 19 nt, Artificial Sequence
  Description of Artificial Sequence: Synthetic oligonucleotide
ggucucggugaaucuggug

SEQ ID NO: 2311722 - RNA, 19 nt, Artificial Sequence
  Description of Artificial Sequence: Synthetic oligonucleotide
cuccaaugaguuagaucaa

SEQ ID NO: 2311723 - RNA, 19 nt, Artificial Sequence
  Description of Artificial Sequence: Synthetic oligonucleotide
acuuaaccgucagcacaca

SEQ ID NO: 2311724 - RNA, 19 nt, Artificial Sequence
  Description of Artificial Sequence: Synthetic oligonucleotide
gcgaucaaagggcagugcu

SEQ ID NO: 2311725 - RNA, 19 nt, Artificial Sequence
  Description of Artificial Sequence: Synthetic oligonucleotide
caggcaucccauacuuaaa

SEQ ID NO: 2311726 - RNA, 19 nt, Artificial Sequence
  Description of Artificial Sequence: Synthetic oligonucleotide
gugugguuaggagauaauu

SEQ ID NO: 2311727 - RNA, 19 nt, Artificial Sequence
  Description of Artificial Sequence: Synthetic oligonucleotide
caguaauguacaucauuuu

SEQ ID NO: 2311728 - RNA, 19 nt, Artificial Sequence
  Description of Artificial Sequence: Synthetic oligonucleotide
cuccuaacuagccuccaau

SEQ ID NO: 2311729 - RNA, 19 nt, Artificial Sequence
  Description of Artificial Sequence: Synthetic oligonucleotide
gggacagaacgcuaacagu

SEQ ID NO: 2311730 - RNA, 19 nt, Artificial Sequence
  Description of Artificial Sequence: Synthetic oligonucleotide
ggauaugaaagggcugaaa

SEQ ID NO: 2311731 - RNA, 19 nt, Artificial Sequence
  Description of Artificial Sequence: Synthetic oligonucleotide
ccauacuuaaaucuauuuu

SEQ ID NO: 2311732 - RNA, 19 nt, Artificial Sequence
  Description of Artificial Sequence: Synthetic oligonucleotide
gcucaacagcaucaguaaa

SEQ ID NO: 2311733 - RNA, 19 nt, Artificial Sequence
  Description of Artificial Sequence: Synthetic oligonucleotide
ggcagugcugagcagguau

SEQ ID NO: 2311734 - RNA, 19 nt, Artificial Sequence
  Description of Artificial Sequence: Synthetic oligonucleotide
caucaguaaaagugugguu

SEQ ID NO: 2311735 - RNA, 19 nt, Artificial Sequence
  Description of Artificial Sequence: Synthetic oligonucleotide
ggacugaaugagacucaug

SEQ ID NO: 2311736 - RNA, 19 nt, Artificial Sequence
  Description of Artificial Sequence: Synthetic oligonucleotide
ggcuaaguuccuaucacau

SEQ ID NO: 2311737 - RNA, 19 nt, Artificial Sequence
  Description of Artificial Sequence: Synthetic oligonucleotide
auccaugcguagauuuguu

SEQ ID NO: 2311738 - RNA, 19 nt, Artificial Sequence
  Description of Artificial Sequence: Synthetic oligonucleotide
gacugaacucaggcaauau

SEQ ID NO: 2311739 - RNA, 19 nt, Artificial Sequence
  Description of Artificial Sequence: Synthetic oligonucleotide
aaccgucagcacacaguuu

SEQ ID NO: 2311740 - RNA, 19 nt, Artificial Sequence
  Description of Artificial Sequence: Synthetic oligonucleotide
guacucccagucaguaaaa

SEQ ID NO: 2311741 - RNA, 19 nt, Artificial Sequence
  Description of Artificial Sequence: Synthetic oligonucleotide
gguaucacuuccaccuugu

SEQ ID NO: 2311742 - RNA, 19 nt, Artificial Sequence
  Description of Artificial Sequence: Synthetic oligonucleotide
gugcucucuggaugguucu

SEQ ID NO: 2311743 - RNA, 19 nt, Artificial Sequence
  Description of Artificial Sequence: Synthetic oligonucleotide
ccaccuugugaguuaacua

SEQ ID NO: 2311744 - RNA, 19 nt, Artificial Sequence
  Description of Artificial Sequence: Synthetic oligonucleotide
cccgugcacgccacaacac

SEQ ID NO: 2311745 - RNA, 19 nt, Artificial Sequence
  Description of Artificial Sequence: Synthetic oligonucleotide
cuggaacuguagcuaugcu

SEQ ID NO: 2311746 - RNA, 19 nt, Artificial Sequence
  Description of Artificial Sequence: Synthetic oligonucleotide
guguugaaacacugcucuu

SEQ ID NO: 2311747 - RNA, 19 nt, Artificial Sequence
  Description of Artificial Sequence: Synthetic oligonucleotide
ggugaaucugguggacuua

SEQ ID NO: 2311748 - RNA, 19 nt, Artificial Sequence
  Description of Artificial Sequence: Synthetic oligonucleotide
cccauacuuaaaucuauuu

SEQ ID NO: 2311749 - RNA, 19 nt, Artificial Sequence
  Description of Artificial Sequence: Synthetic oligonucleotide
gggcugaaaaguucuuauu

SEQ ID NO: 2311750 - RNA, 19 nt, Artificial Sequence
  Description of Artificial Sequence: Synthetic oligonucleotide
gugcacgccacaacacuau

SEQ ID NO: 2311751 - RNA, 19 nt, Artificial Sequence
  Description of Artificial Sequence: Synthetic oligonucleotide
cacauccauggacuguguu

SEQ ID NO: 2311752 - RNA, 19 nt, Artificial Sequence
  Description of Artificial Sequence: Synthetic oligonucleotide
cgugcacgccacaacacua

SEQ ID NO: 2311753 - RNA, 19 nt, Artificial Sequence
  Description of Artificial Sequence: Synthetic oligonucleotide
ccuccuaacuagccuccaa

SEQ ID NO: 2311754 - RNA, 19 nt, Artificial Sequence
  Description of Artificial Sequence: Synthetic oligonucleotide
cucaggcaauauucacauu

SEQ ID NO: 2311755 - RNA, 19 nt, Artificial Sequence
  Description of Artificial Sequence: Synthetic oligonucleotide
ccgugcacgccacaacacu

SEQ ID NO: 2311756 - RNA, 19 nt, Artificial Sequence
  Description of Artificial Sequence: Synthetic oligonucleotide
gccaggcaucccauacuua

SEQ ID NO: 2311757 - RNA, 19 nt, Artificial Sequence
  Description of Artificial Sequence: Synthetic oligonucleotide
gggucucggugaaucuggu

SEQ ID NO: 2311758 - RNA, 19 nt, Artificial Sequence
  Description of Artificial Sequence: Synthetic oligonucleotide
cccuccuaacuagccucca

SEQ ID NO: 2311759 - RNA, 19 nt, Artificial Sequence
  Description of Artificial Sequence: Synthetic oligonucleotide
ccacaacacuaugggaaau

SEQ ID NO: 2311760 - RNA, 19 nt, Artificial Sequence
  Description of Artificial Sequence: Synthetic oligonucleotide
aucgauauagcccaacugg

SEQ ID NO: 2311761 - RNA, 19 nt, Artificial Sequence
  Description of Artificial Sequence: Synthetic oligonucleotide
aaaggacucaagaagagac

SEQ ID NO: 2311762 - RNA, 19 nt, Artificial Sequence
  Description of Artificial Sequence: Synthetic oligonucleotide
aaagacaucacuucccucu

SEQ ID NO: 2311763 - RNA, 19 nt, Artificial Sequence
  Description of Artificial Sequence: Synthetic oligonucleotide
agcuacagaacccaaagac

SEQ ID NO: 2311764 - RNA, 19 nt, Artificial Sequence
  Description of Artificial Sequence: Synthetic oligonucleotide
gaagcucccacauucaggg

SEQ ID NO: 2311765 - RNA, 19 nt, Artificial Sequence
  Description of Artificial Sequence: Synthetic oligonucleotide
ugucgcaggagaaagagcc

SEQ ID NO: 2311766 - RNA, 19 nt, Artificial Sequence
  Description of Artificial Sequence: Synthetic oligonucleotide
uguuuguucaaguaggacu

SEQ ID NO: 2311767 - RNA, 19 nt, Artificial Sequence
  Description of Artificial Sequence: Synthetic oligonucleotide
gauauagcccaacuggagg

SEQ ID NO: 2311768 - RNA, 19 nt, Artificial Sequence
  Description of Artificial Sequence: Synthetic oligonucleotide
uuuagcgacugccaugucg

SEQ ID NO: 2311769 - RNA, 19 nt, Artificial Sequence
  Description of Artificial Sequence: Synthetic oligonucleotide
auuggcaucagugaacacc

SEQ ID NO: 2311770 - RNA, 19 nt, Artificial Sequence
  Description of Artificial Sequence: Synthetic oligonucleotide
auauagcccaacuggaggc

SEQ ID NO: 2311771 - RNA, 19 nt, Artificial Sequence
  Description of Artificial Sequence: Synthetic oligonucleotide
acaaucugaaauccaaagg

SEQ ID NO: 2311772 - RNA, 19 nt, Artificial Sequence
  Description of Artificial Sequence: Synthetic oligonucleotide
ugacugaacaaucugaaau

SEQ ID NO: 2311773 - RNA, 19 nt, Artificial Sequence
  Description of Artificial Sequence: Synthetic oligonucleotide
aacccaaagacaucacuuc

SEQ ID NO: 2311774 - RNA, 19 nt, Artificial Sequence
  Description of Artificial Sequence: Synthetic oligonucleotide
ucccucugcauucacagcg

SEQ ID NO: 2311775 - RNA, 19 nt, Artificial Sequence
  Description of Artificial Sequence: Synthetic oligonucleotide
  modified_base (4)..(4): a, c, u, g, unknown or other
ucunacccagccuuguagg

SEQ ID NO: 2311776 - RNA, 19 nt, Artificial Sequence
  Description of Artificial Sequence: Synthetic oligonucleotide
uuagaacggaagaagcucc

SEQ ID NO: 2311777 - RNA, 19 nt, Artificial Sequence
  Description of Artificial Sequence: Synthetic oligonucleotide
aagaagagacauguucugc

SEQ ID NO: 2311778 - RNA, 19 nt, Artificial Sequence
  Description of Artificial Sequence: Synthetic oligonucleotide
acugaacaaucugaaaucc

SEQ ID NO: 2311779 - RNA, 19 nt, Artificial Sequence
  Description of Artificial Sequence: Synthetic oligonucleotide
aggaagaucgauauagccc

SEQ ID NO: 2311780 - RNA, 19 nt, Artificial Sequence
  Description of Artificial Sequence: Synthetic oligonucleotide
ucgcuuaccagucaguuga

SEQ ID NO: 2311781 - RNA, 19 nt, Artificial Sequence
  Description of Artificial Sequence: Synthetic oligonucleotide
auccaaaggacucaagaag

SEQ ID NO: 2311782 - RNA, 19 nt, Artificial Sequence
  Description of Artificial Sequence: Synthetic oligonucleotide
ugaacaaucugaaauccaa

SEQ ID NO: 2311783 - RNA, 19 nt, Artificial Sequence
  Description of Artificial Sequence: Synthetic oligonucleotide
gaagucagcaguugagggg

SEQ ID NO: 2311784 - RNA, 19 nt, Artificial Sequence
  Description of Artificial Sequence: Synthetic oligonucleotide
uuagcgacugccaugucgc

SEQ ID NO: 2311785 - RNA, 19 nt, Artificial Sequence
  Description of Artificial Sequence: Synthetic oligonucleotide
ccuuguaggaggaagaucg

SEQ ID NO: 2311786 - RNA, 19 nt, Artificial Sequence
  Description of Artificial Sequence: Synthetic oligonucleotide
aaggcuguuuguucugugg

SEQ ID NO: 2311787 - RNA, 19 nt, Artificial Sequence
  Description of Artificial Sequence: Synthetic oligonucleotide
aggaggaagaucgauauag

SEQ ID NO: 2311788 - RNA, 19 nt, Artificial Sequence
  Description of Artificial Sequence: Synthetic oligonucleotide
  modified_base (5)..(5): a, c, u, g, unknown or other
uucunacccagccuuguag

SEQ ID NO: 2311789 - RNA, 19 nt, Artificial Sequence
  Description of Artificial Sequence: Synthetic oligonucleotide
acccaaagacaucacuucc

SEQ ID NO: 2311790 - RNA, 19 nt, Artificial Sequence
  Description of Artificial Sequence: Synthetic oligonucleotide
agugacgccgugcugggcc

SEQ ID NO: 2311791 - RNA, 19 nt, Artificial Sequence
  Description of Artificial Sequence: Synthetic oligonucleotide
uacucucagcuacagaacc

SEQ ID NO: 2311792 - RNA, 19 nt, Artificial Sequence
  Description of Artificial Sequence: Synthetic oligonucleotide
acauucagggcauggguac

SEQ ID NO: 2311793 - RNA, 19 nt, Artificial Sequence
  Description of Artificial Sequence: Synthetic oligonucleotide
gaggaagaucgauauagcc

SEQ ID NO: 2311794 - RNA, 19 nt, Artificial Sequence
  Description of Artificial Sequence: Synthetic oligonucleotide
accugcuucucucaagccc

SEQ ID NO: 2311795 - RNA, 19 nt, Artificial Sequence
  Description of Artificial Sequence: Synthetic oligonucleotide
ucccgcacaggccacaugg

SEQ ID NO: 2311796 - RNA, 19 nt, Artificial Sequence
  Description of Artificial Sequence: Synthetic oligonucleotide
uuaccagucaguugaggag

SEQ ID NO: 2311797 - RNA, 19 nt, Artificial Sequence
  Description of Artificial Sequence: Synthetic oligonucleotide
cucacuucccuucaggccc

SEQ ID NO: 2311798 - RNA, 19 nt, Artificial Sequence
  Description of Artificial Sequence: Synthetic oligonucleotide
gauccacuaaagaugacgc

SEQ ID NO: 2311799 - RNA, 19 nt, Artificial Sequence
  Description of Artificial Sequence: Synthetic oligonucleotide
uucccuucaggccccaugg

SEQ ID NO: 2311800 - RNA, 19 nt, Artificial Sequence
  Description of Artificial Sequence: Synthetic oligonucleotide
  modified_base (11)..(11): a, c, u, g, unknown or other
agcccauucunacccagcc

SEQ ID NO: 2311801 - RNA, 19 nt, Artificial Sequence
  Description of Artificial Sequence: Synthetic oligonucleotide
gacugaacaaucugaaauc

SEQ ID NO: 2311802 - RNA, 19 nt, Artificial Sequence
  Description of Artificial Sequence: Synthetic oligonucleotide
agcguuucucagcaguccc

SEQ ID NO: 2311803 - RNA, 19 nt, Artificial Sequence
  Description of Artificial Sequence: Synthetic oligonucleotide
  modified_base (17)..(17): a, c, u, g, unknown or other
auggguagcccauucunac

SEQ ID NO: 2311804 - RNA, 19 nt, Artificial Sequence
  Description of Artificial Sequence: Synthetic oligonucleotide
agaagagacauguucugcu

SEQ ID NO: 2311805 - RNA, 19 nt, Artificial Sequence
  Description of Artificial Sequence: Synthetic oligonucleotide
cacagcaugucucacuucc

SEQ ID NO: 2311806 - RNA, 19 nt, Artificial Sequence
  Description of Artificial Sequence: Synthetic oligonucleotide
aagcuuggccugcaauagc

SEQ ID NO: 2311807 - RNA, 19 nt, Artificial Sequence
  Description of Artificial Sequence: Synthetic oligonucleotide
ugucucacuucccuucagg

SEQ ID NO: 2311808 - RNA, 19 nt, Artificial Sequence
  Description of Artificial Sequence: Synthetic oligonucleotide
ucgauauagcccaacugga

SEQ ID NO: 2311809 - RNA, 19 nt, Artificial Sequence
  Description of Artificial Sequence: Synthetic oligonucleotide
gaucgauauagcccaacug

SEQ ID NO: 2311810 - RNA, 19 nt, Artificial Sequence
  Description of Artificial Sequence: Synthetic oligonucleotide
auggguacuucuucucccc

SEQ ID NO: 2311811 - RNA, 19 nt, Artificial Sequence
  Description of Artificial Sequence: Synthetic oligonucleotide
aacggaagaagcucccaca

SEQ ID NO: 2311812 - RNA, 19 nt, Artificial Sequence
  Description of Artificial Sequence: Synthetic oligonucleotide
gacauguucugcuggggag

SEQ ID NO: 2311813 - RNA, 19 nt, Artificial Sequence
  Description of Artificial Sequence: Synthetic oligonucleotide
gacuuagaacggaagaagc

SEQ ID NO: 2311814 - RNA, 19 nt, Artificial Sequence
  Description of Artificial Sequence: Synthetic oligonucleotide
ggaagaucgauauagccca

SEQ ID NO: 2311815 - RNA, 19 nt, Artificial Sequence
  Description of Artificial Sequence: Synthetic oligonucleotide
uguaggaggaagaucgaua

SEQ ID NO: 2311816 - RNA, 19 nt, Artificial Sequence
  Description of Artificial Sequence: Synthetic oligonucleotide
gaagagacauguucugcug

SEQ ID NO: 2311817 - RNA, 19 nt, Artificial Sequence
  Description of Artificial Sequence: Synthetic oligonucleotide
ucuuccucgggcugcaugc

SEQ ID NO: 2311818 - RNA, 19 nt, Artificial Sequence
  Description of Artificial Sequence: Synthetic oligonucleotide
augacgcaaaugcugacug

SEQ ID NO: 2311819 - RNA, 19 nt, Artificial Sequence
  Description of Artificial Sequence: Synthetic oligonucleotide
gagaaagagccguuggcac

SEQ ID NO: 2311820 - RNA, 19 nt, Artificial Sequence
  Description of Artificial Sequence: Synthetic oligonucleotide
caaguaggacuuagaacgg

SEQ ID NO: 2311821 - RNA, 19 nt, Artificial Sequence
  Description of Artificial Sequence: Synthetic oligonucleotide
cuuagaacggaagaagcuc

SEQ ID NO: 2311822 - RNA, 19 nt, Artificial Sequence
  Description of Artificial Sequence: Synthetic oligonucleotide
ucuggcgucuucaggucgg

SEQ ID NO: 2311823 - RNA, 19 nt, Artificial Sequence
  Description of Artificial Sequence: Synthetic oligonucleotide
aagaucgauauagcccaac

SEQ ID NO: 2311824 - RNA, 19 nt, Artificial Sequence
  Description of Artificial Sequence: Synthetic oligonucleotide
aaauacucucagcuacaga

SEQ ID NO: 2311825 - RNA, 19 nt, Artificial Sequence
  Description of Artificial Sequence: Synthetic oligonucleotide
ucucacuucccuucaggcc

SEQ ID NO: 2311826 - RNA, 19 nt, Artificial Sequence
  Description of Artificial Sequence: Synthetic oligonucleotide
cuuaccagucaguugagga

SEQ ID NO: 2311827 - RNA, 19 nt, Artificial Sequence
  Description of Artificial Sequence: Synthetic oligonucleotide
gaagcuuggccugcaauag

SEQ ID NO: 2311828 - RNA, 19 nt, Artificial Sequence
  Description of Artificial Sequence: Synthetic oligonucleotide
  modified_base (16)..(16): a, c, u, g, unknown or other
uggguagcccauucunacc

SEQ ID NO: 2311829 - RNA, 19 nt, Artificial Sequence
  Description of Artificial Sequence: Synthetic oligonucleotide
ggaagaagcucccacauuc

SEQ ID NO: 2311830 - RNA, 19 nt, Artificial Sequence
  Description of Artificial Sequence: Synthetic oligonucleotide
agaacccaaagacaucacu

SEQ ID NO: 2311831 - RNA, 19 nt, Artificial Sequence
  Description of Artificial Sequence: Synthetic oligonucleotide
cacuggaugccacauuggg

SEQ ID NO: 2311832 - RNA, 19 nt, Artificial Sequence
  Description of Artificial Sequence: Synthetic oligonucleotide
agaucgauauagcccaacu

SEQ ID NO: 2311833 - RNA, 19 nt, Artificial Sequence
  Description of Artificial Sequence: Synthetic oligonucleotide
caugucgcaggagaaagag

SEQ ID NO: 2311834 - RNA, 19 nt, Artificial Sequence
  Description of Artificial Sequence: Synthetic oligonucleotide
uaccagucaguugaggagc

SEQ ID NO: 2311835 - RNA, 19 nt, Artificial Sequence
  Description of Artificial Sequence: Synthetic oligonucleotide
gaaaggugagccgagggca

SEQ ID NO: 2311836 - RNA, 19 nt, Artificial Sequence
  Description of Artificial Sequence: Synthetic oligonucleotide
uagaacggaagaagcuccc

SEQ ID NO: 2311837 - RNA, 19 nt, Artificial Sequence
  Description of Artificial Sequence: Synthetic oligonucleotide
uuguucaaguaggacuuag

SEQ ID NO: 2311838 - RNA, 19 nt, Artificial Sequence
  Description of Artificial Sequence: Synthetic oligonucleotide
agaaagagccguuggcacu

SEQ ID NO: 2311839 - RNA, 19 nt, Artificial Sequence
  Description of Artificial Sequence: Synthetic oligonucleotide
agaugacgcaaaugcugac

SEQ ID NO: 2311840 - RNA, 19 nt, Artificial Sequence
  Description of Artificial Sequence: Synthetic oligonucleotide
uggagacacagcaugucuc

SEQ ID NO: 2311841 - RNA, 19 nt, Artificial Sequence
  Description of Artificial Sequence: Synthetic oligonucleotide
gacucaagaagagacaugu

SEQ ID NO: 2311842 - RNA, 19 nt, Artificial Sequence
  Description of Artificial Sequence: Synthetic oligonucleotide
gaacggaagaagcucccac

SEQ ID NO: 2311843 - RNA, 19 nt, Artificial Sequence
  Description of Artificial Sequence: Synthetic oligonucleotide
agugaacaccuucccgcac

SEQ ID NO: 2311844 - RNA, 19 nt, Artificial Sequence
  Description of Artificial Sequence: Synthetic oligonucleotide
uggaaggauaccugcuucu

SEQ ID NO: 2311845 - RNA, 19 nt, Artificial Sequence
  Description of Artificial Sequence: Synthetic oligonucleotide
caggagaaagagccguugg

SEQ ID NO: 2311846 - RNA, 19 nt, Artificial Sequence
  Description of Artificial Sequence: Synthetic oligonucleotide
aagggcccggacaugcacc

SEQ ID NO: 2311847 - RNA, 19 nt, Artificial Sequence
  Description of Artificial Sequence: Synthetic oligonucleotide
acucucagcuacagaaccc

SEQ ID NO: 2311848 - RNA, 19 nt, Artificial Sequence
  Description of Artificial Sequence: Synthetic oligonucleotide
gagccgauuggcaucagug

SEQ ID NO: 2311849 - RNA, 19 nt, Artificial Sequence
  Description of Artificial Sequence: Synthetic oligonucleotide
gucucacuucccuucaggc

SEQ ID NO: 2311850 - RNA, 19 nt, Artificial Sequence
  Description of Artificial Sequence: Synthetic oligonucleotide
agaagcucccacauucagg

SEQ ID NO: 2311851 - RNA, 19 nt, Artificial Sequence
  Description of Artificial Sequence: Synthetic oligonucleotide
agacauguucugcugggga

SEQ ID NO: 2311852 - RNA, 19 nt, Artificial Sequence
  Description of Artificial Sequence: Synthetic oligonucleotide
uggauguguuuguucaagu

SEQ ID NO: 2311853 - RNA, 19 nt, Artificial Sequence
  Description of Artificial Sequence: Synthetic oligonucleotide
  modified_base (2)..(2): a, c, u, g, unknown or other
unacccagccuuguaggag

SEQ ID NO: 2311854 - RNA, 19 nt, Artificial Sequence
  Description of Artificial Sequence: Synthetic oligonucleotide
agacccaaacauggagucc

SEQ ID NO: 2311855 - RNA, 19 nt, Artificial Sequence
  Description of Artificial Sequence: Synthetic oligonucleotide
acuuagaacggaagaagcu

SEQ ID NO: 2311856 - RNA, 19 nt, Artificial Sequence
  Description of Artificial Sequence: Synthetic oligonucleotide
acuggaugccacauugggg

SEQ ID NO: 2311857 - RNA, 19 nt, Artificial Sequence
  Description of Artificial Sequence: Synthetic oligonucleotide
augcugacugaacaaucug

SEQ ID NO: 2311858 - RNA, 19 nt, Artificial Sequence
  Description of Artificial Sequence: Synthetic oligonucleotide
gcuagugacgccgugcugg

SEQ ID NO: 2311859 - RNA, 19 nt, Artificial Sequence
  Description of Artificial Sequence: Synthetic oligonucleotide
gacccaaacauggagucca

SEQ ID NO: 2311860 - RNA, 19 nt, Artificial Sequence
  Description of Artificial Sequence: Synthetic oligonucleotide
uucaggucgggguccuccg

SEQ ID NO: 2311861 - RNA, 19 nt, Artificial Sequence
  Description of Artificial Sequence: Synthetic oligonucleotide
gaugccacauuggggaaug

SEQ ID NO: 2311862 - RNA, 19 nt, Artificial Sequence
  Description of Artificial Sequence: Synthetic oligonucleotide
uuggcacucuguuucucug

SEQ ID NO: 2311863 - RNA, 19 nt, Artificial Sequence
  Description of Artificial Sequence: Synthetic oligonucleotide
uguugccggagccgauugg

SEQ ID NO: 2311864 - RNA, 19 nt, Artificial Sequence
  Description of Artificial Sequence: Synthetic oligonucleotide
ggacuuagaacggaagaag

SEQ ID NO: 2311865 - RNA, 19 nt, Artificial Sequence
  Description of Artificial Sequence: Synthetic oligonucleotide
cuuccugggacguccccgg

SEQ ID NO: 2311866 - RNA, 19 nt, Artificial Sequence
  Description of Artificial Sequence: Synthetic oligonucleotide
uacagaacccaaagacauc

SEQ ID NO: 2311867 - RNA, 19 nt, Artificial Sequence
  Description of Artificial Sequence: Synthetic oligonucleotide
gguaacacaggcagggaag

SEQ ID NO: 2311868 - RNA, 19 nt, Artificial Sequence
  Description of Artificial Sequence: Synthetic oligonucleotide
guaggacuuagaacggaag

SEQ ID NO: 2311869 - RNA, 19 nt, Artificial Sequence
  Description of Artificial Sequence: Synthetic oligonucleotide
uccggagauggguagccca

SEQ ID NO: 2311870 - RNA, 19 nt, Artificial Sequence
  Description of Artificial Sequence: Synthetic oligonucleotide
agguaacacaggcagggaa

SEQ ID NO: 2311871 - RNA, 19 nt, Artificial Sequence
  Description of Artificial Sequence: Synthetic oligonucleotide
cuacagaacccaaagacau

SEQ ID NO: 2311872 - RNA, 19 nt, Artificial Sequence
  Description of Artificial Sequence: Synthetic oligonucleotide
aggacucaagaagagacau

SEQ ID NO: 2311873 - RNA, 19 nt, Artificial Sequence
  Description of Artificial Sequence: Synthetic oligonucleotide
aggacuuagaacggaagaa

SEQ ID NO: 2311874 - RNA, 19 nt, Artificial Sequence
  Description of Artificial Sequence: Synthetic oligonucleotide
ugggcaagcgguccacccc

SEQ ID NO: 2311875 - RNA, 19 nt, Artificial Sequence
  Description of Artificial Sequence: Synthetic oligonucleotide
gagacauguucugcugggg

SEQ ID NO: 2311876 - RNA, 19 nt, Artificial Sequence
  Description of Artificial Sequence: Synthetic oligonucleotide
  modified_base (15)..(15): a, c, u, g, unknown or other
ggguagcccauucunaccc

SEQ ID NO: 2311877 - RNA, 19 nt, Artificial Sequence
  Description of Artificial Sequence: Synthetic oligonucleotide
cuagugacgccgugcuggg

SEQ ID NO: 2311878 - RNA, 19 nt, Artificial Sequence
  Description of Artificial Sequence: Synthetic oligonucleotide
ugcaccuucuggauguguu

SEQ ID NO: 2311879 - RNA, 19 nt, Artificial Sequence
  Description of Artificial Sequence: Synthetic oligonucleotide
uuuguucuguggagacaca

SEQ ID NO: 2311880 - RNA, 19 nt, Artificial Sequence
  Description of Artificial Sequence: Synthetic oligonucleotide
ggggagagaaaggugagcc

SEQ ID NO: 2311881 - RNA, 19 nt, Artificial Sequence
  Description of Artificial Sequence: Synthetic oligonucleotide
agccgauuggcaucaguga

SEQ ID NO: 2311882 - RNA, 19 nt, Artificial Sequence
  Description of Artificial Sequence: Synthetic oligonucleotide
auuggggaaugaagaaguc

SEQ ID NO: 2311883 - RNA, 19 nt, Artificial Sequence
  Description of Artificial Sequence: Synthetic oligonucleotide
cugaacaaucugaaaucca

SEQ ID NO: 2311884 - RNA, 19 nt, Artificial Sequence
  Description of Artificial Sequence: Synthetic oligonucleotide
acaggcagggaagcuuggc

SEQ ID NO: 2311885 - RNA, 19 nt, Artificial Sequence
  Description of Artificial Sequence: Synthetic oligonucleotide
cugguccaccucaggaucc

SEQ ID NO: 2311886 - RNA, 19 nt, Artificial Sequence
  Description of Artificial Sequence: Synthetic oligonucleotide
ucaggucgggguccuccgg

SEQ ID NO: 2311887 - RNA, 19 nt, Artificial Sequence
  Description of Artificial Sequence: Synthetic oligonucleotide
cucgcuuaccagucaguug

SEQ ID NO: 2311888 - RNA, 19 nt, Artificial Sequence
  Description of Artificial Sequence: Synthetic oligonucleotide
uagcccaacuggaggcuag

SEQ ID NO: 2311889 - RNA, 19 nt, Artificial Sequence
  Description of Artificial Sequence: Synthetic oligonucleotide
ugacgcaaaugcugacuga

SEQ ID NO: 2311890 - RNA, 19 nt, Artificial Sequence
  Description of Artificial Sequence: Synthetic oligonucleotide
gacgcaaaugcugacugaa

SEQ ID NO: 2311891 - RNA, 19 nt, Artificial Sequence
  Description of Artificial Sequence: Synthetic oligonucleotide
cucuggcgucuucaggucg

SEQ ID NO: 2311892 - RNA, 19 nt, Artificial Sequence
  Description of Artificial Sequence: Synthetic oligonucleotide
gcgacugccaugucgcagg

SEQ ID NO: 2311893 - RNA, 19 nt, Artificial Sequence
  Description of Artificial Sequence: Synthetic oligonucleotide
ucacuucccuucaggcccc

SEQ ID NO: 2311894 - RNA, 19 nt, Artificial Sequence
  Description of Artificial Sequence: Synthetic oligonucleotide
gucaguugaggagcacugg

SEQ ID NO: 2311895 - RNA, 19 nt, Artificial Sequence
  Description of Artificial Sequence: Synthetic oligonucleotide
cccaaagacaucacuuccc

SEQ ID NO: 2311896 - RNA, 19 nt, Artificial Sequence
  Description of Artificial Sequence: Synthetic oligonucleotide
uauagcccaacuggaggcu

SEQ ID NO: 2311897 - RNA, 19 nt, Artificial Sequence
  Description of Artificial Sequence: Synthetic oligonucleotide
aggcuagugacgccgugcu

SEQ ID NO: 2311898 - RNA, 19 nt, Artificial Sequence
  Description of Artificial Sequence: Synthetic oligonucleotide
auguugccggagccgauug

SEQ ID NO: 2311899 - RNA, 19 nt, Artificial Sequence
  Description of Artificial Sequence: Synthetic oligonucleotide
guugaggggauaggggccc

SEQ ID NO: 2311900 - RNA, 19 nt, Artificial Sequence
  Description of Artificial Sequence: Synthetic oligonucleotide
gaggcuagugacgccgugc

SEQ ID NO: 2311901 - RNA, 19 nt, Artificial Sequence
  Description of Artificial Sequence: Synthetic oligonucleotide
uaccugcuucucucaagcc

SEQ ID NO: 2311902 - RNA, 19 nt, Artificial Sequence
  Description of Artificial Sequence: Synthetic oligonucleotide
aggauaccugcuucucuca

SEQ ID NO: 2311903 - RNA, 19 nt, Artificial Sequence
  Description of Artificial Sequence: Synthetic oligonucleotide
guugccggagccgauuggc

SEQ ID NO: 2311904 - RNA, 19 nt, Artificial Sequence
  Description of Artificial Sequence: Synthetic oligonucleotide
  modified_base (18)..(18): a, c, u, g, unknown or other
gauggguagcccauucuna

SEQ ID NO: 2311905 - RNA, 19 nt, Artificial Sequence
  Description of Artificial Sequence: Synthetic oligonucleotide
uccugggacguccccggcc

SEQ ID NO: 2311906 - RNA, 19 nt, Artificial Sequence
  Description of Artificial Sequence: Synthetic oligonucleotide
cuucaggucgggguccucc

SEQ ID NO: 2311907 - RNA, 19 nt, Artificial Sequence
  Description of Artificial Sequence: Synthetic oligonucleotide
uuguaggaggaagaucgau

SEQ ID NO: 2311908 - RNA, 19 nt, Artificial Sequence
  Description of Artificial Sequence: Synthetic oligonucleotide
gccacauuggggaaugaag

SEQ ID NO: 2311909 - RNA, 19 nt, Artificial Sequence
  Description of Artificial Sequence: Synthetic oligonucleotide
gaaggauaccugcuucucu

SEQ ID NO: 2311910 - RNA, 19 nt, Artificial Sequence
  Description of Artificial Sequence: Synthetic oligonucleotide
gaagaagcucccacauuca

SEQ ID NO: 2311911 - RNA, 19 nt, Artificial Sequence
  Description of Artificial Sequence: Synthetic oligonucleotide
  modified_base (3)..(3): a, c, u, g, unknown or other
cunacccagccuuguagga

SEQ ID NO: 2311912 - RNA, 19 nt, Artificial Sequence
  Description of Artificial Sequence: Synthetic oligonucleotide
aagcgguccaccccaggua

SEQ ID NO: 2311913 - RNA, 19 nt, Artificial Sequence
  Description of Artificial Sequence: Synthetic oligonucleotide
cuucccuucaggccccaug

SEQ ID NO: 2311914 - RNA, 19 nt, Artificial Sequence
  Description of Artificial Sequence: Synthetic oligonucleotide
gcauggguacuucuucucc

SEQ ID NO: 2311915 - RNA, 19 nt, Artificial Sequence
  Description of Artificial Sequence: Synthetic oligonucleotide
ucucagcuacagaacccaa

SEQ ID NO: 2311916 - RNA, 19 nt, Artificial Sequence
  Description of Artificial Sequence: Synthetic oligonucleotide
ggagagaaaggugagccga

SEQ ID NO: 2311917 - RNA, 19 nt, Artificial Sequence
  Description of Artificial Sequence: Synthetic oligonucleotide
acgcaaaugcugacugaac

SEQ ID NO: 2311918 - RNA, 19 nt, Artificial Sequence
  Description of Artificial Sequence: Synthetic oligonucleotide
gccguuggcacucuguuuc

SEQ ID NO: 2311919 - RNA, 19 nt, Artificial Sequence
  Description of Artificial Sequence: Synthetic oligonucleotide
agcgguccaccccagguaa

SEQ ID NO: 2311920 - RNA, 19 nt, Artificial Sequence
  Description of Artificial Sequence: Synthetic oligonucleotide
cugaaauccaaaggacuca

SEQ ID NO: 2311921 - RNA, 19 nt, Artificial Sequence
  Description of Artificial Sequence: Synthetic oligonucleotide
uggggagagaaaggugagc

SEQ ID NO: 2311922 - RNA, 19 nt, Artificial Sequence
  Description of Artificial Sequence: Synthetic oligonucleotide
guacuucuucuccccauca

SEQ ID NO: 2311923 - RNA, 19 nt, Artificial Sequence
  Description of Artificial Sequence: Synthetic oligonucleotide
gcaguugaggggauagggg

SEQ ID NO: 2311924 - RNA, 19 nt, Artificial Sequence
  Description of Artificial Sequence: Synthetic oligonucleotide
gggauaggggcccagccac

SEQ ID NO: 2311925 - RNA, 19 nt, Artificial Sequence
  Description of Artificial Sequence: Synthetic oligonucleotide
augucucacuucccuucag

SEQ ID NO: 2311926 - RNA, 19 nt, Artificial Sequence
  Description of Artificial Sequence: Synthetic oligonucleotide
auggacugcugguccaccu

SEQ ID NO: 2311927 - RNA, 19 nt, Artificial Sequence
  Description of Artificial Sequence: Synthetic oligonucleotide
ggagacacagcaugucuca

SEQ ID NO: 2311928 - RNA, 19 nt, Artificial Sequence
  Description of Artificial Sequence: Synthetic oligonucleotide
uugccggagccgauuggca

SEQ ID NO: 2311929 - RNA, 19 nt, Artificial Sequence
  Description of Artificial Sequence: Synthetic oligonucleotide
caccuucuggauguguuug

SEQ ID NO: 2311930 - RNA, 19 nt, Artificial Sequence
  Description of Artificial Sequence: Synthetic oligonucleotide
uuccucgggcugcaugcug

SEQ ID NO: 2311931 - RNA, 19 nt, Artificial Sequence
  Description of Artificial Sequence: Synthetic oligonucleotide
ucucuggcgucuucagguc

SEQ ID NO: 2311932 - RNA, 19 nt, Artificial Sequence
  Description of Artificial Sequence: Synthetic oligonucleotide
gaugacgcaaaugcugacu

SEQ ID NO: 2311933 - RNA, 19 nt, Artificial Sequence
  Description of Artificial Sequence: Synthetic oligonucleotide
gauuggcaucagugaacac

SEQ ID NO: 2311934 - RNA, 19 nt, Artificial Sequence
  Description of Artificial Sequence: Synthetic oligonucleotide
ccggacaugcaccuucugg

SEQ ID NO: 2311935 - RNA, 19 nt, Artificial Sequence
  Description of Artificial Sequence: Synthetic oligonucleotide
aagagccguuggcacucug

SEQ ID NO: 2311936 - RNA, 19 nt, Artificial Sequence
  Description of Artificial Sequence: Synthetic oligonucleotide
  modified_base (6)..(6): a, c, u, g, unknown or other
auucunacccagccuugua

SEQ ID NO: 2311937 - RNA, 19 nt, Artificial Sequence
  Description of Artificial Sequence: Synthetic oligonucleotide
gccaugucgcaggagaaag

SEQ ID NO: 2311938 - RNA, 19 nt, Artificial Sequence
  Description of Artificial Sequence: Synthetic oligonucleotide
agcgacugccaugucgcag

SEQ ID NO: 2311939 - RNA, 19 nt, Artificial Sequence
  Description of Artificial Sequence: Synthetic oligonucleotide
ugggacguccccggccucg

SEQ ID NO: 2311940 - RNA, 19 nt, Artificial Sequence
  Description of Artificial Sequence: Synthetic oligonucleotide
cuuguaggaggaagaucga

SEQ ID NO: 2311941 - RNA, 19 nt, Artificial Sequence
  Description of Artificial Sequence: Synthetic oligonucleotide
gugagccgagggcagggcc

SEQ ID NO: 2311942 - RNA, 19 nt, Artificial Sequence
  Description of Artificial Sequence: Synthetic oligonucleotide
gcaugucucacuucccuuc

SEQ ID NO: 2311943 - RNA, 19 nt, Artificial Sequence
  Description of Artificial Sequence: Synthetic oligonucleotide
agaacggaagaagcuccca

SEQ ID NO: 2311944 - RNA, 19 nt, Artificial Sequence
  Description of Artificial Sequence: Synthetic oligonucleotide
cacaggcagggaagcuugg

SEQ ID NO: 2311945 - RNA, 19 nt, Artificial Sequence
  Description of Artificial Sequence: Synthetic oligonucleotide
uuuguucaaguaggacuua

SEQ ID NO: 2311946 - RNA, 19 nt, Artificial Sequence
  Description of Artificial Sequence: Synthetic oligonucleotide
gguacuucuucuccccauc

SEQ ID NO: 2311947 - RNA, 19 nt, Artificial Sequence
  Description of Artificial Sequence: Synthetic oligonucleotide
cucagcuacagaacccaaa

SEQ ID NO: 2311948 - RNA, 19 nt, Artificial Sequence
  Description of Artificial Sequence: Synthetic oligonucleotide
uggaggcuagugacgccgu

SEQ ID NO: 2311949 - RNA, 19 nt, Artificial Sequence
  Description of Artificial Sequence: Synthetic oligonucleotide
gauaggggcccagccacca

SEQ ID NO: 2311950 - RNA, 19 nt, Artificial Sequence
  Description of Artificial Sequence: Synthetic oligonucleotide
uggaugccacauuggggaa

SEQ ID NO: 2311951 - RNA, 19 nt, Artificial Sequence
  Description of Artificial Sequence: Synthetic oligonucleotide
caccucaggauccacuaaa

SEQ ID NO: 2311952 - RNA, 19 nt, Artificial Sequence
  Description of Artificial Sequence: Synthetic oligonucleotide
aggucgggguccuccggag

SEQ ID NO: 2311953 - RNA, 19 nt, Artificial Sequence
  Description of Artificial Sequence: Synthetic oligonucleotide
cugcugguccaccucagga

SEQ ID NO: 2311954 - RNA, 19 nt, Artificial Sequence
  Description of Artificial Sequence: Synthetic oligonucleotide
ggauguguuuguucaagua

SEQ ID NO: 2311955 - RNA, 19 nt, Artificial Sequence
  Description of Artificial Sequence: Synthetic oligonucleotide
agggcccggacaugcaccu

SEQ ID NO: 2311956 - RNA, 19 nt, Artificial Sequence
  Description of Artificial Sequence: Synthetic oligonucleotide
  modified_base (14)..(14): a, c, u, g, unknown or other
gguagcccauucunaccca

SEQ ID NO: 2311957 - RNA, 19 nt, Artificial Sequence
  Description of Artificial Sequence: Synthetic oligonucleotide
ugggccucauguugccgga

SEQ ID NO: 2311958 - RNA, 19 nt, Artificial Sequence
  Description of Artificial Sequence: Synthetic oligonucleotide
cacucuguuucucuggcgu

SEQ ID NO: 2311959 - RNA, 19 nt, Artificial Sequence
  Description of Artificial Sequence: Synthetic oligonucleotide
cuggagacccaaacaugga

SEQ ID NO: 2311960 - RNA, 19 nt, Artificial Sequence
  Description of Artificial Sequence: Synthetic oligonucleotide
ugccaugucgcaggagaaa

SEQ ID NO: 2311961 - RNA, 19 nt, Artificial Sequence
  Description of Artificial Sequence: Synthetic oligonucleotide
ucacuucccucugcauuca

SEQ ID NO: 2311962 - RNA, 19 nt, Artificial Sequence
  Description of Artificial Sequence: Synthetic oligonucleotide
ccgauuggcaucagugaac

SEQ ID NO: 2311963 - RNA, 19 nt, Artificial Sequence
  Description of Artificial Sequence: Synthetic oligonucleotide
uuuuagcgacugccauguc

SEQ ID NO: 2311964 - RNA, 19 nt, Artificial Sequence
  Description of Artificial Sequence: Synthetic oligonucleotide
ucauguugccggagccgau

SEQ ID NO: 2311965 - RNA, 19 nt, Artificial Sequence
  Description of Artificial Sequence: Synthetic oligonucleotide
uccuccggagauggguagc

SEQ ID NO: 2311966 - RNA, 19 nt, Artificial Sequence
  Description of Artificial Sequence: Synthetic oligonucleotide
caccaugggcaagcggucc

SEQ ID NO: 2311967 - RNA, 19 nt, Artificial Sequence
  Description of Artificial Sequence: Synthetic oligonucleotide
gcacucuguuucucuggcg

SEQ ID NO: 2311968 - RNA, 19 nt, Artificial Sequence
  Description of Artificial Sequence: Synthetic oligonucleotide
agagccguuggcacucugu

SEQ ID NO: 2311969 - RNA, 19 nt, Artificial Sequence
  Description of Artificial Sequence: Synthetic oligonucleotide
ccagccuuguaggaggaag

SEQ ID NO: 2311970 - RNA, 19 nt, Artificial Sequence
  Description of Artificial Sequence: Synthetic oligonucleotide
gcuguuuguucuguggaga

SEQ ID NO: 2311971 - RNA, 19 nt, Artificial Sequence
  Description of Artificial Sequence: Synthetic oligonucleotide
gcuuaccagucaguugagg

SEQ ID NO: 2311972 - RNA, 19 nt, Artificial Sequence
  Description of Artificial Sequence: Synthetic oligonucleotide
uuccugggacguccccggc

SEQ ID NO: 2311973 - RNA, 19 nt, Artificial Sequence
  Description of Artificial Sequence: Synthetic oligonucleotide
cacagcguuucucagcagu

SEQ ID NO: 2311974 - RNA, 19 nt, Artificial Sequence
  Description of Artificial Sequence: Synthetic oligonucleotide
ggccucgcuuaccagucag

SEQ ID NO: 2311975 - RNA, 19 nt, Artificial Sequence
  Description of Artificial Sequence: Synthetic oligonucleotide
gccgauuggcaucagugaa

SEQ ID NO: 2311976 - RNA, 19 nt, Artificial Sequence
  Description of Artificial Sequence: Synthetic oligonucleotide
ggcauggguacuucuucuc

SEQ ID NO: 2311977 - RNA, 19 nt, Artificial Sequence
  Description of Artificial Sequence: Synthetic oligonucleotide
caaaugcugacugaacaau

SEQ ID NO: 2311978 - RNA, 19 nt, Artificial Sequence
  Description of Artificial Sequence: Synthetic oligonucleotide
acaggccacauggaaggau

SEQ ID NO: 2311979 - RNA, 19 nt, Artificial Sequence
  Description of Artificial Sequence: Synthetic oligonucleotide
ggacucaagaagagacaug

SEQ ID NO: 2311980 - RNA, 19 nt, Artificial Sequence
  Description of Artificial Sequence: Synthetic oligonucleotide
accagucaguugaggagca

SEQ ID NO: 2311981 - RNA, 19 nt, Artificial Sequence
  Description of Artificial Sequence: Synthetic oligonucleotide
uggcgucuucaggucgggg

SEQ ID NO: 2311982 - RNA, 19 nt, Artificial Sequence
  Description of Artificial Sequence: Synthetic oligonucleotide
uagcgacugccaugucgca

SEQ ID NO: 2311983 - RNA, 19 nt, Artificial Sequence
  Description of Artificial Sequence: Synthetic oligonucleotide
  modified_base (8)..(8): a, c, u, g, unknown or other
ccauucunacccagccuug

SEQ ID NO: 2311984 - RNA, 19 nt, Artificial Sequence
  Description of Artificial Sequence: Synthetic oligonucleotide
ggccucauguugccggagc

SEQ ID NO: 2311985 - RNA, 19 nt, Artificial Sequence
  Description of Artificial Sequence: Synthetic oligonucleotide
cgcaaaugcugacugaaca

SEQ ID NO: 2311986 - RNA, 19 nt, Artificial Sequence
  Description of Artificial Sequence: Synthetic oligonucleotide
cgugcugggccucauguug

SEQ ID NO: 2311987 - RNA, 19 nt, Artificial Sequence
  Description of Artificial Sequence: Synthetic oligonucleotide
  modified_base (7)..(7): a, c, u, g, unknown or other
cauucunacccagccuugu

SEQ ID NO: 2311988 - RNA, 19 nt, Artificial Sequence
  Description of Artificial Sequence: Synthetic oligonucleotide
agccguuggcacucuguuu

SEQ ID NO: 2311989 - RNA, 19 nt, Artificial Sequence
  Description of Artificial Sequence: Synthetic oligonucleotide
cccuggagacccaaacaug

SEQ ID NO: 2311990 - RNA, 19 nt, Artificial Sequence
  Description of Artificial Sequence: Synthetic oligonucleotide
ggggauaggggcccagcca

SEQ ID NO: 2311991 - RNA, 19 nt, Artificial Sequence
  Description of Artificial Sequence: Synthetic oligonucleotide
gaagaucgauauagcccaa

SEQ ID NO: 2311992 - RNA, 19 nt, Artificial Sequence
  Description of Artificial Sequence: Synthetic oligonucleotide
uucaggccccauggacugc

SEQ ID NO: 2311993 - RNA, 19 nt, Artificial Sequence
  Description of Artificial Sequence: Synthetic oligonucleotide
ccacuaaagaugacgcaaa

SEQ ID NO: 2311994 - RNA, 19 nt, Artificial Sequence
  Description of Artificial Sequence: Synthetic oligonucleotide
acccaaacauggaguccag

SEQ ID NO: 2311995 - RNA, 19 nt, Artificial Sequence
  Description of Artificial Sequence: Synthetic oligonucleotide
cuccggagauggguagccc

SEQ ID NO: 2311996 - RNA, 19 nt, Artificial Sequence
  Description of Artificial Sequence: Synthetic oligonucleotide
auagcccaacuggaggcua

SEQ ID NO: 2311997 - RNA, 19 nt, Artificial Sequence
  Description of Artificial Sequence: Synthetic oligonucleotide
caagcgguccaccccaggu

SEQ ID NO: 2311998 - RNA, 19 nt, Artificial Sequence
  Description of Artificial Sequence: Synthetic oligonucleotide
gcgucuucaggucgggguc

SEQ ID NO: 2311999 - RNA, 19 nt, Artificial Sequence
  Description of Artificial Sequence: Synthetic oligonucleotide
cagcaugucucacuucccu

SEQ ID NO: 2312000 - RNA, 19 nt, Artificial Sequence
  Description of Artificial Sequence: Synthetic oligonucleotide
ucgggguccuccggagaug

SEQ ID NO: 2312001 - RNA, 19 nt, Artificial Sequence
  Description of Artificial Sequence: Synthetic oligonucleotide
gccaccaugggcaagcggu

SEQ ID NO: 2312002 - RNA, 19 nt, Artificial Sequence
  Description of Artificial Sequence: Synthetic oligonucleotide
gggcaagcgguccacccca

SEQ ID NO: 2312003 - RNA, 19 nt, Artificial Sequence
  Description of Artificial Sequence: Synthetic oligonucleotide
uugaggggauaggggccca

SEQ ID NO: 2312004 - RNA, 19 nt, Artificial Sequence
  Description of Artificial Sequence: Synthetic oligonucleotide
ggauaccugcuucucucaa

SEQ ID NO: 2312005 - RNA, 19 nt, Artificial Sequence
  Description of Artificial Sequence: Synthetic oligonucleotide
acucaagaagagacauguu

SEQ ID NO: 2312006 - RNA, 19 nt, Artificial Sequence
  Description of Artificial Sequence: Synthetic oligonucleotide
ggcgucuucaggucggggu

SEQ ID NO: 2312007 - RNA, 19 nt, Artificial Sequence
  Description of Artificial Sequence: Synthetic oligonucleotide
gagccguuggcacucuguu

SEQ ID NO: 2312008 - RNA, 19 nt, Artificial Sequence
  Description of Artificial Sequence: Synthetic oligonucleotide
ggccacauggaaggauacc

SEQ ID NO: 2312009 - RNA, 19 nt, Artificial Sequence
  Description of Artificial Sequence: Synthetic oligonucleotide
gcaagcgguccaccccagg

SEQ ID NO: 2312010 - RNA, 19 nt, Artificial Sequence
  Description of Artificial Sequence: Synthetic oligonucleotide
cccaacuggaggcuaguga

SEQ ID NO: 2312011 - RNA, 19 nt, Artificial Sequence
  Description of Artificial Sequence: Synthetic oligonucleotide
acguccccggccucgcuua

SEQ ID NO: 2312012 - RNA, 19 nt, Artificial Sequence
  Description of Artificial Sequence: Synthetic oligonucleotide
gcguuucucagcagucccc

SEQ ID NO: 2312013 - RNA, 19 nt, Artificial Sequence
  Description of Artificial Sequence: Synthetic oligonucleotide
ccucaggauccacuaaaga

SEQ ID NO: 2312014 - RNA, 19 nt, Artificial Sequence
  Description of Artificial Sequence: Synthetic oligonucleotide
ggaggcuagugacgccgug

SEQ ID NO: 2312015 - RNA, 19 nt, Artificial Sequence
  Description of Artificial Sequence: Synthetic oligonucleotide
cagguaacacaggcaggga

SEQ ID NO: 2312016 - RNA, 19 nt, Artificial Sequence
  Description of Artificial Sequence: Synthetic oligonucleotide
ccuccggagauggguagcc

SEQ ID NO: 2312017 - RNA, 19 nt, Artificial Sequence
  Description of Artificial Sequence: Synthetic oligonucleotide
gucgggguccuccggagau

SEQ ID NO: 2312018 - RNA, 19 nt, Artificial Sequence
  Description of Artificial Sequence: Synthetic oligonucleotide
ggcuagugacgccgugcug

SEQ ID NO: 2312019 - RNA, 19 nt, Artificial Sequence
  Description of Artificial Sequence: Synthetic oligonucleotide
gccuuguaggaggaagauc

SEQ ID NO: 2312020 - RNA, 19 nt, Artificial Sequence
  Description of Artificial Sequence: Synthetic oligonucleotide
cgauuggcaucagugaaca

SEQ ID NO: 2312021 - RNA, 19 nt, Artificial Sequence
  Description of Artificial Sequence: Synthetic oligonucleotide
  modified_base (9)..(9): a, c, u, g, unknown or other
cccauucunacccagccuu

SEQ ID NO: 2312022 - RNA, 19 nt, Artificial Sequence
  Description of Artificial Sequence: Synthetic oligonucleotide
ggauaggggcccagccacc

SEQ ID NO: 2312023 - RNA, 19 nt, Artificial Sequence
  Description of Artificial Sequence: Synthetic oligonucleotide
gggcauggguacuucuucu

SEQ ID NO: 2312024 - RNA, 19 nt, Artificial Sequence
  Description of Artificial Sequence: Synthetic oligonucleotide
gcagggaagcuuggccugc

SEQ ID NO: 2312025 - RNA, 19 nt, Artificial Sequence
  Description of Artificial Sequence: Synthetic oligonucleotide
ggacaugcaccuucuggau

SEQ ID NO: 2312026 - RNA, 19 nt, Artificial Sequence
  Description of Artificial Sequence: Synthetic oligonucleotide
cccaaacauggaguccagc

SEQ ID NO: 2312027 - RNA, 19 nt, Artificial Sequence
  Description of Artificial Sequence: Synthetic oligonucleotide
  modified_base (10)..(10): a, c, u, g, unknown or other
gcccauucunacccagccu

SEQ ID NO: 2312028 - RNA, 19 nt, Artificial Sequence
  Description of Artificial Sequence: Synthetic oligonucleotide
ccaccccagguaacacagg

SEQ ID NO: 2312029 - RNA, 19 nt, Artificial Sequence
  Description of Artificial Sequence: Synthetic oligonucleotide
gguccaccccagguaacac

SEQ ID NO: 2312030 - RNA, 19 nt, Artificial Sequence
  Description of Artificial Sequence: Synthetic oligonucleotide
ccaugucgcaggagaaaga

SEQ ID NO: 2312031 - RNA, 19 nt, Artificial Sequence
  Description of Artificial Sequence: Synthetic oligonucleotide
ggugagccgagggcagggc

SEQ ID NO: 2312032 - RNA, 19 nt, Artificial Sequence
  Description of Artificial Sequence: Synthetic oligonucleotide
cauucagggcauggguacu

SEQ ID NO: 2312033 - RNA, 19 nt, Artificial Sequence
  Description of Artificial Sequence: Synthetic oligonucleotide
gccgugcugggccucaugu

SEQ ID NO: 2312034 - RNA, 19 nt, Artificial Sequence
  Description of Artificial Sequence: Synthetic oligonucleotide
augccacauuggggaauga

SEQ ID NO: 2312035 - RNA, 19 nt, Artificial Sequence
  Description of Artificial Sequence: Synthetic oligonucleotide
gucagcaguugaggggaua

SEQ ID NO: 2312036 - RNA, 19 nt, Artificial Sequence
  Description of Artificial Sequence: Synthetic oligonucleotide
ggcagguuaggggcaggga

SEQ ID NO: 2312037 - RNA, 19 nt, Artificial Sequence
  Description of Artificial Sequence: Synthetic oligonucleotide
ggucgggguccuccggaga

SEQ ID NO: 2312038 - RNA, 19 nt, Artificial Sequence
  Description of Artificial Sequence: Synthetic oligonucleotide
gugacgccgugcugggccu

SEQ ID NO: 2312039 - RNA, 19 nt, Artificial Sequence
  Description of Artificial Sequence: Synthetic oligonucleotide
ggagccgauuggcaucagu

SEQ ID NO: 2312040 - RNA, 19 nt, Artificial Sequence
  Description of Artificial Sequence: Synthetic oligonucleotide
gccuuccugggacgucccc

SEQ ID NO: 2312041 - RNA, 19 nt, Artificial Sequence
  Description of Artificial Sequence: Synthetic oligonucleotide
cgcuuaccagucaguugag

SEQ ID NO: 2312042 - RNA, 19 nt, Artificial Sequence
  Description of Artificial Sequence: Synthetic oligonucleotide
gcccaacuggaggcuagug

SEQ ID NO: 2312043 - RNA, 19 nt, Artificial Sequence
  Description of Artificial Sequence: Synthetic oligonucleotide
ggccccauggacugcuggu

SEQ ID NO: 2312044 - RNA, 19 nt, Artificial Sequence
  Description of Artificial Sequence: Synthetic oligonucleotide
guccccggccucgcuuacc

SEQ ID NO: 2312045 - RNA, 19 nt, Artificial Sequence
  Description of Artificial Sequence: Synthetic oligonucleotide
ggcaagcgguccaccccag

SEQ ID NO: 2312046 - RNA, 19 nt, Artificial Sequence
  Description of Artificial Sequence: Synthetic oligonucleotide
cugggacguccccggccuc

SEQ ID NO: 2312047 - RNA, 19 nt, Artificial Sequence
  Description of Artificial Sequence: Synthetic oligonucleotide
cguuucucagcagucccca

SEQ ID NO: 2312048 - RNA, 19 nt, Artificial Sequence
  Description of Artificial Sequence: Synthetic oligonucleotide
ggagcacuggaugccacau

SEQ ID NO: 2312049 - RNA, 19 nt, Artificial Sequence
  Description of Artificial Sequence: Synthetic oligonucleotide
cauguugccggagccgauu

SEQ ID NO: 2312050 - RNA, 19 nt, Artificial Sequence
  Description of Artificial Sequence: Synthetic oligonucleotide
gggccucauguugccggag

SEQ ID NO: 2312051 - RNA, 19 nt, Artificial Sequence
  Description of Artificial Sequence: Synthetic oligonucleotide
gguccaccucaggauccac

SEQ ID NO: 2312052 - RNA, 19 nt, Artificial Sequence
  Description of Artificial Sequence: Synthetic oligonucleotide
gcaccuucuggauguguuu

SEQ ID NO: 2312053 - RNA, 19 nt, Artificial Sequence
  Description of Artificial Sequence: Synthetic oligonucleotide
acuucccuucaggccccau

SEQ ID NO: 2312054 - RNA, 19 nt, Artificial Sequence
  Description of Artificial Sequence: Synthetic oligonucleotide
cucgggcugcaugcugcca

SEQ ID NO: 2312055 - RNA, 19 nt, Artificial Sequence
  Description of Artificial Sequence: Synthetic oligonucleotide
ggccuuccugggacguccc

SEQ ID NO: 2312056 - RNA, 19 nt, Artificial Sequence
  Description of Artificial Sequence: Synthetic oligonucleotide
cuuccucgggcugcaugcu

SEQ ID NO: 2312057 - RNA, 19 nt, Artificial Sequence
  Description of Artificial Sequence: Synthetic oligonucleotide
gcgguccaccccagguaac

SEQ ID NO: 2312058 - RNA, 19 nt, Artificial Sequence
  Description of Artificial Sequence: Synthetic oligonucleotide
cuucccgcacaggccacau

SEQ ID NO: 2312059 - RNA, 19 nt, Artificial Sequence
  Description of Artificial Sequence: Synthetic oligonucleotide
ccggagauggguagcccau

SEQ ID NO: 2312060 - RNA, 19 nt, Artificial Sequence
  Description of Artificial Sequence: Synthetic oligonucleotide
ccucgcuuaccagucaguu

SEQ ID NO: 2312061 - RNA, 19 nt, Artificial Sequence
  Description of Artificial Sequence: Synthetic oligonucleotide
cacuucccuucaggcccca

SEQ ID NO: 2312062 - RNA, 19 nt, Artificial Sequence
  Description of Artificial Sequence: Synthetic oligonucleotide
cgguccaccccagguaaca

SEQ ID NO: 2312063 - RNA, 19 nt, Artificial Sequence
  Description of Artificial Sequence: Synthetic oligonucleotide
ccguuggcacucuguuucu

SEQ ID NO: 2312064 - RNA, 19 nt, Artificial Sequence
  Description of Artificial Sequence: Synthetic oligonucleotide
gccucgcuuaccagucagu

SEQ ID NO: 2312065 - RNA, 19 nt, Artificial Sequence
  Description of Artificial Sequence: Synthetic oligonucleotide
acgccgugcugggccucau

SEQ ID NO: 2312066 - RNA, 19 nt, Artificial Sequence
  Description of Artificial Sequence: Synthetic oligonucleotide
ccgagggcagggccuaagu

SEQ ID NO: 2312067 - RNA, 19 nt, Artificial Sequence
  Description of Artificial Sequence: Synthetic oligonucleotide
cguccccggccucgcuuac

SEQ ID NO: 2312068 - RNA, 19 nt, Artificial Sequence
  Description of Artificial Sequence: Synthetic oligonucleotide
cggaagaagcucccacauu

SEQ ID NO: 2312069 - RNA, 19 nt, Artificial Sequence
  Description of Artificial Sequence: Synthetic oligonucleotide
ccgugcugggccucauguu

SEQ ID NO: 2312070 - RNA, 19 nt, Artificial Sequence
  Description of Artificial Sequence: Synthetic oligonucleotide
cggagccgauuggcaucag

SEQ ID NO: 2312071 - RNA, 19 nt, Artificial Sequence
  Description of Artificial Sequence: Synthetic oligonucleotide
cggagauggguagcccauu

SEQ ID NO: 2312072 - RNA, 19 nt, Artificial Sequence
  Description of Artificial Sequence: Synthetic oligonucleotide
gggcccggacaugcaccuu

SEQ ID NO: 2312073 - RNA, 19 nt, Artificial Sequence
  Description of Artificial Sequence: Synthetic oligonucleotide
uuaaguagcaacaacaaac

SEQ ID NO: 2312074 - RNA, 19 nt, Artificial Sequence
  Description of Artificial Sequence: Synthetic oligonucleotide
uauguaagcauuaaguagc

SEQ ID NO: 2312075 - RNA, 19 nt, Artificial Sequence
  Description of Artificial Sequence: Synthetic oligonucleotide
uuucuuuucagccagacua

SEQ ID NO: 2312076 - RNA, 19 nt, Artificial Sequence
  Description of Artificial Sequence: Synthetic oligonucleotide
uucaugaagagacaucagg

SEQ ID NO: 2312077 - RNA, 19 nt, Artificial Sequence
  Description of Artificial Sequence: Synthetic oligonucleotide
aaaagauucaaacaccuuu

SEQ ID NO: 2312078 - RNA, 19 nt, Artificial Sequence
  Description of Artificial Sequence: Synthetic oligonucleotide
ucauuuacuaucuccacag

SEQ ID NO: 2312079 - RNA, 19 nt, Artificial Sequence
  Description of Artificial Sequence: Synthetic oligonucleotide
uuuauuugcagacacugac

SEQ ID NO: 2312080 - RNA, 19 nt, Artificial Sequence
  Description of Artificial Sequence: Synthetic oligonucleotide
cuaaaguuugccaagacuc

SEQ ID NO: 2312081 - RNA, 19 nt, Artificial Sequence
  Description of Artificial Sequence: Synthetic oligonucleotide
cauuguguaugcuucaucg

SEQ ID NO: 2312082 - RNA, 19 nt, Artificial Sequence
  Description of Artificial Sequence: Synthetic oligonucleotide
uaagcauuaaguagcaaca

SEQ ID NO: 2312083 - RNA, 19 nt, Artificial Sequence
  Description of Artificial Sequence: Synthetic oligonucleotide
uuugccaagacucccauga

SEQ ID NO: 2312084 - RNA, 19 nt, Artificial Sequence
  Description of Artificial Sequence: Synthetic oligonucleotide
gaaaacuccgaauugccag

SEQ ID NO: 2312085 - RNA, 19 nt, Artificial Sequence
  Description of Artificial Sequence: Synthetic oligonucleotide
aucuguauguuauguaagc

SEQ ID NO: 2312086 - RNA, 19 nt, Artificial Sequence
  Description of Artificial Sequence: Synthetic oligonucleotide
auuggauauauguggaggg

SEQ ID NO: 2312087 - RNA, 19 nt, Artificial Sequence
  Description of Artificial Sequence: Synthetic oligonucleotide
uuguguaugcuucaucggg

SEQ ID NO: 2312088 - RNA, 19 nt, Artificial Sequence
  Description of Artificial Sequence: Synthetic oligonucleotide
acagcaacaaucucaucgc

SEQ ID NO: 2312089 - RNA, 19 nt, Artificial Sequence
  Description of Artificial Sequence: Synthetic oligonucleotide
cagacuagcgccuucaucc

SEQ ID NO: 2312090 - RNA, 19 nt, Artificial Sequence
  Description of Artificial Sequence: Synthetic oligonucleotide
uccuaauccaagcugagca

SEQ ID NO: 2312091 - RNA, 19 nt, Artificial Sequence
  Description of Artificial Sequence: Synthetic oligonucleotide
aaaacuccgaauugccagg

SEQ ID NO: 2312092 - RNA, 19 nt, Artificial Sequence
  Description of Artificial Sequence: Synthetic oligonucleotide
uaaguagcaacaacaaaca

SEQ ID NO: 2312093 - RNA, 19 nt, Artificial Sequence
  Description of Artificial Sequence: Synthetic oligonucleotide
uggguuacgcuuaacagcc

SEQ ID NO: 2312094 - RNA, 19 nt, Artificial Sequence
  Description of Artificial Sequence: Synthetic oligonucleotide
uuuacuaucuccacaguuc

SEQ ID NO: 2312095 - RNA, 19 nt, Artificial Sequence
  Description of Artificial Sequence: Synthetic oligonucleotide
uuugauaaagacagagcca

SEQ ID NO: 2312096 - RNA, 19 nt, Artificial Sequence
  Description of Artificial Sequence: Synthetic oligonucleotide
uuuucagccagacuagcgc

SEQ ID NO: 2312097 - RNA, 19 nt, Artificial Sequence
  Description of Artificial Sequence: Synthetic oligonucleotide
aggacuaucucuccuaauc

SEQ ID NO: 2312098 - RNA, 19 nt, Artificial Sequence
  Description of Artificial Sequence: Synthetic oligonucleotide
ugauuucaucucauaaagg

SEQ ID NO: 2312099 - RNA, 19 nt, Artificial Sequence
  Description of Artificial Sequence: Synthetic oligonucleotide
guaagcauuaaguagcaac

SEQ ID NO: 2312100 - RNA, 19 nt, Artificial Sequence
  Description of Artificial Sequence: Synthetic oligonucleotide
aaaggguggcaucaucugg

SEQ ID NO: 2312101 - RNA, 19 nt, Artificial Sequence
  Description of Artificial Sequence: Synthetic oligonucleotide
aagauucaaacaccuuuuc

SEQ ID NO: 2312102 - RNA, 19 nt, Artificial Sequence
  Description of Artificial Sequence: Synthetic oligonucleotide
cauucugaaagccacuccg

SEQ ID NO: 2312103 - RNA, 19 nt, Artificial Sequence
  Description of Artificial Sequence: Synthetic oligonucleotide
aucgcuuucaaagucauag

SEQ ID NO: 2312104 - RNA, 19 nt, Artificial Sequence
  Description of Artificial Sequence: Synthetic oligonucleotide
uaucuguauguuauguaag

SEQ ID NO: 2312105 - RNA, 19 nt, Artificial Sequence
  Description of Artificial Sequence: Synthetic oligonucleotide
uuacuaucuccacaguucc

SEQ ID NO: 2312106 - RNA, 19 nt, Artificial Sequence
  Description of Artificial Sequence: Synthetic oligonucleotide
uauuucaggguucauugga

SEQ ID NO: 2312107 - RNA, 19 nt, Artificial Sequence
  Description of Artificial Sequence: Synthetic oligonucleotide
agcauuaaguagcaacaac

SEQ ID NO: 2312108 - RNA, 19 nt, Artificial Sequence
  Description of Artificial Sequence: Synthetic oligonucleotide
agaagcugacacaauaacc

SEQ ID NO: 2312109 - RNA, 19 nt, Artificial Sequence
  Description of Artificial Sequence: Synthetic oligonucleotide
uuguuuuauuugcagacac

SEQ ID NO: 2312110 - RNA, 19 nt, Artificial Sequence
  Description of Artificial Sequence: Synthetic oligonucleotide
agcgccuucauccuucagc

SEQ ID NO: 2312111 - RNA, 19 nt, Artificial Sequence
  Description of Artificial Sequence: Synthetic oligonucleotide
uguacugcuggaaacauuu

SEQ ID NO: 2312112 - RNA, 19 nt, Artificial Sequence
  Description of Artificial Sequence: Synthetic oligonucleotide
uaaaguuugccaagacucc

SEQ ID NO: 2312113 - RNA, 19 nt, Artificial Sequence
  Description of Artificial Sequence: Synthetic oligonucleotide
auaucuguauguuauguaa

SEQ ID NO: 2312114 - RNA, 19 nt, Artificial Sequence
  Description of Artificial Sequence: Synthetic oligonucleotide
uucauuggauauaugugga

SEQ ID NO: 2312115 - RNA, 19 nt, Artificial Sequence
  Description of Artificial Sequence: Synthetic oligonucleotide
uguauguuauguaagcauu

SEQ ID NO: 2312116 - RNA, 19 nt, Artificial Sequence
  Description of Artificial Sequence: Synthetic oligonucleotide
uuacucuucuguuugcagc

SEQ ID NO: 2312117 - RNA, 19 nt, Artificial Sequence
  Description of Artificial Sequence: Synthetic oligonucleotide
ucuuccacccaaaggaagc

SEQ ID NO: 2312118 - RNA, 19 nt, Artificial Sequence
  Description of Artificial Sequence: Synthetic oligonucleotide
uugauaaagacagagccau

SEQ ID NO: 2312119 - RNA, 19 nt, Artificial Sequence
  Description of Artificial Sequence: Synthetic oligonucleotide
uguguaugcuucaucgggc

SEQ ID NO: 2312120 - RNA, 19 nt, Artificial Sequence
  Description of Artificial Sequence: Synthetic oligonucleotide
aauugccaggacuaucucu

SEQ ID NO: 2312121 - RNA, 19 nt, Artificial Sequence
  Description of Artificial Sequence: Synthetic oligonucleotide
uuugcuggcgugaacccag

SEQ ID NO: 2312122 - RNA, 19 nt, Artificial Sequence
  Description of Artificial Sequence: Synthetic oligonucleotide
cuuucuugcccaagaaagg

SEQ ID NO: 2312123 - RNA, 19 nt, Artificial Sequence
  Description of Artificial Sequence: Synthetic oligonucleotide
ugcacacacagcaacaauc

SEQ ID NO: 2312124 - RNA, 19 nt, Artificial Sequence
  Description of Artificial Sequence: Synthetic oligonucleotide
auuguguaugcuucaucgg

SEQ ID NO: 2312125 - RNA, 19 nt, Artificial Sequence
  Description of Artificial Sequence: Synthetic oligonucleotide
uuuugaauugccuccuggu

SEQ ID NO: 2312126 - RNA, 19 nt, Artificial Sequence
  Description of Artificial Sequence: Synthetic oligonucleotide
uauuugcagacacugacuu

SEQ ID NO: 2312127 - RNA, 19 nt, Artificial Sequence
  Description of Artificial Sequence: Synthetic oligonucleotide
uucuuuucagccagacuag

SEQ ID NO: 2312128 - RNA, 19 nt, Artificial Sequence
  Description of Artificial Sequence: Synthetic oligonucleotide
uugaauugccuccugguau

SEQ ID NO: 2312129 - RNA, 19 nt, Artificial Sequence
  Description of Artificial Sequence: Synthetic oligonucleotide
agcaacaacaaacaacaaa

SEQ ID NO: 2312130 - RNA, 19 nt, Artificial Sequence
  Description of Artificial Sequence: Synthetic oligonucleotide
uauguggagggcuacuuga

SEQ ID NO: 2312131 - RNA, 19 nt, Artificial Sequence
  Description of Artificial Sequence: Synthetic oligonucleotide
cuggaaacauuucaugaag

SEQ ID NO: 2312132 - RNA, 19 nt, Artificial Sequence
  Description of Artificial Sequence: Synthetic oligonucleotide
uaucuuuucuuuucagcca

SEQ ID NO: 2312133 - RNA, 19 nt, Artificial Sequence
  Description of Artificial Sequence: Synthetic oligonucleotide
uacucuucuguuugcagcc

SEQ ID NO: 2312134 - RNA, 19 nt, Artificial Sequence
  Description of Artificial Sequence: Synthetic oligonucleotide
auauuucaggguucauugg

SEQ ID NO: 2312135 - RNA, 19 nt, Artificial Sequence
  Description of Artificial Sequence: Synthetic oligonucleotide
uacugcuggaaacauuuca

SEQ ID NO: 2312136 - RNA, 19 nt, Artificial Sequence
  Description of Artificial Sequence: Synthetic oligonucleotide
ugaaaacuccgaauugcca

SEQ ID NO: 2312137 - RNA, 19 nt, Artificial Sequence
  Description of Artificial Sequence: Synthetic oligonucleotide
guuauguaagcauuaagua

SEQ ID NO: 2312138 - RNA, 19 nt, Artificial Sequence
  Description of Artificial Sequence: Synthetic oligonucleotide
aacaccuuuucauugugua

SEQ ID NO: 2312139 - RNA, 19 nt, Artificial Sequence
  Description of Artificial Sequence: Synthetic oligonucleotide
ucucuccuaauccaagcug

SEQ ID NO: 2312140 - RNA, 19 nt, Artificial Sequence
  Description of Artificial Sequence: Synthetic oligonucleotide
auguuauguaagcauuaag

SEQ ID NO: 2312141 - RNA, 19 nt, Artificial Sequence
  Description of Artificial Sequence: Synthetic oligonucleotide
acaauaaccauuguuuuau

SEQ ID NO: 2312142 - RNA, 19 nt, Artificial Sequence
  Description of Artificial Sequence: Synthetic oligonucleotide
auugccaggacuaucucuc

SEQ ID NO: 2312143 - RNA, 19 nt, Artificial Sequence
  Description of Artificial Sequence: Synthetic oligonucleotide
ugcuucaucccacuuuuga

SEQ ID NO: 2312144 - RNA, 19 nt, Artificial Sequence
  Description of Artificial Sequence: Synthetic oligonucleotide
uguuuuauuugcagacacu

SEQ ID NO: 2312145 - RNA, 19 nt, Artificial Sequence
  Description of Artificial Sequence: Synthetic oligonucleotide
aggaccugugauuucaucu

SEQ ID NO: 2312146 - RNA, 19 nt, Artificial Sequence
  Description of Artificial Sequence: Synthetic oligonucleotide
guggguuacgcuuaacagc

SEQ ID NO: 2312147 - RNA, 19 nt, Artificial Sequence
  Description of Artificial Sequence: Synthetic oligonucleotide
cuuagauaccuucucacca

SEQ ID NO: 2312148 - RNA, 19 nt, Artificial Sequence
  Description of Artificial Sequence: Synthetic oligonucleotide
uucugcaacagcugcacac

SEQ ID NO: 2312149 - RNA, 19 nt, Artificial Sequence
  Description of Artificial Sequence: Synthetic oligonucleotide
auuaaguagcaacaacaaa

SEQ ID NO: 2312150 - RNA, 19 nt, Artificial Sequence
  Description of Artificial Sequence: Synthetic oligonucleotide
ucgggcuuugauaaagaca

SEQ ID NO: 2312151 - RNA, 19 nt, Artificial Sequence
  Description of Artificial Sequence: Synthetic oligonucleotide
uaucucuccuaauccaagc

SEQ ID NO: 2312152 - RNA, 19 nt, Artificial Sequence
  Description of Artificial Sequence: Synthetic oligonucleotide
auuuacuaucuccacaguu

SEQ ID NO: 2312153 - RNA, 19 nt, Artificial Sequence
  Description of Artificial Sequence: Synthetic oligonucleotide
uuagauaccuucucaccaa

SEQ ID NO: 2312154 - RNA, 19 nt, Artificial Sequence
  Description of Artificial Sequence: Synthetic oligonucleotide
aucgggcuuugauaaagac

SEQ ID NO: 2312155 - RNA, 19 nt, Artificial Sequence
  Description of Artificial Sequence: Synthetic oligonucleotide
aaagauucaaacaccuuuu

SEQ ID NO: 2312156 - RNA, 19 nt, Artificial Sequence
  Description of Artificial Sequence: Synthetic oligonucleotide
uuugaauugccuccuggua

SEQ ID NO: 2312157 - RNA, 19 nt, Artificial Sequence
  Description of Artificial Sequence: Synthetic oligonucleotide
ucauagucagggauugacu

SEQ ID NO: 2312158 - RNA, 19 nt, Artificial Sequence
  Description of Artificial Sequence: Synthetic oligonucleotide
ucuguauguuauguaagca

SEQ ID NO: 2312159 - RNA, 19 nt, Artificial Sequence
  Description of Artificial Sequence: Synthetic oligonucleotide
ucagggauugacucuggug

SEQ ID NO: 2312160 - RNA, 19 nt, Artificial Sequence
  Description of Artificial Sequence: Synthetic oligonucleotide
auaaagacagagccaucug

SEQ ID NO: 2312161 - RNA, 19 nt, Artificial Sequence
  Description of Artificial Sequence: Synthetic oligonucleotide
cauccuucucaucagcagc

SEQ ID NO: 2312162 - RNA, 19 nt, Artificial Sequence
  Description of Artificial Sequence: Synthetic oligonucleotide
ucaucgggcuuugauaaag

SEQ ID NO: 2312163 - RNA, 19 nt, Artificial Sequence
  Description of Artificial Sequence: Synthetic oligonucleotide
uuuucaauccucugugcua

SEQ ID NO: 2312164 - RNA, 19 nt, Artificial Sequence
  Description of Artificial Sequence: Synthetic oligonucleotide
uccuuccuccguuugcugg

SEQ ID NO: 2312165 - RNA, 19 nt, Artificial Sequence
  Description of Artificial Sequence: Synthetic oligonucleotide
acgaccuaaaguuugccaa

SEQ ID NO: 2312166 - RNA, 19 nt, Artificial Sequence
  Description of Artificial Sequence: Synthetic oligonucleotide
accuaaaguuugccaagac

SEQ ID NO: 2312167 - RNA, 19 nt, Artificial Sequence
  Description of Artificial Sequence: Synthetic oligonucleotide
ugcauguacugcuggaaac

SEQ ID NO: 2312168 - RNA, 19 nt, Artificial Sequence
  Description of Artificial Sequence: Synthetic oligonucleotide
cagggauugacucugguga

SEQ ID NO: 2312169 - RNA, 19 nt, Artificial Sequence
  Description of Artificial Sequence: Synthetic oligonucleotide
agauaucuguauguuaugu

SEQ ID NO: 2312170 - RNA, 19 nt, Artificial Sequence
  Description of Artificial Sequence: Synthetic oligonucleotide
uaauccaagcugagcacga

SEQ ID NO: 2312171 - RNA, 19 nt, Artificial Sequence
  Description of Artificial Sequence: Synthetic oligonucleotide
agcugcagugcuucauccc

SEQ ID NO: 2312172 - RNA, 19 nt, Artificial Sequence
  Description of Artificial Sequence: Synthetic oligonucleotide
augaguguggguuacgcuu

SEQ ID NO: 2312173 - RNA, 19 nt, Artificial Sequence
  Description of Artificial Sequence: Synthetic oligonucleotide
aaacugcugcgacguggcc

SEQ ID NO: 2312174 - RNA, 19 nt, Artificial Sequence
  Description of Artificial Sequence: Synthetic oligonucleotide
ugaauugccuccugguauc

SEQ ID NO: 2312175 - RNA, 19 nt, Artificial Sequence
  Description of Artificial Sequence: Synthetic oligonucleotide
aacuccgaauugccaggac

SEQ ID NO: 2312176 - RNA, 19 nt, Artificial Sequence
  Description of Artificial Sequence: Synthetic oligonucleotide
ucucauuuacuaucuccac

SEQ ID NO: 2312177 - RNA, 19 nt, Artificial Sequence
  Description of Artificial Sequence: Synthetic oligonucleotide
auaaaggguggcaucaucu

SEQ ID NO: 2312178 - RNA, 19 nt, Artificial Sequence
  Description of Artificial Sequence: Synthetic oligonucleotide
gacuaucucuccuaaucca

SEQ ID NO: 2312179 - RNA, 19 nt, Artificial Sequence
  Description of Artificial Sequence: Synthetic oligonucleotide
cuggugagaugucuguucc

SEQ ID NO: 2312180 - RNA, 19 nt, Artificial Sequence
  Description of Artificial Sequence: Synthetic oligonucleotide
aaagucauagucagggauu

SEQ ID NO: 2312181 - RNA, 19 nt, Artificial Sequence
  Description of Artificial Sequence: Synthetic oligonucleotide
uauguuauguaagcauuaa

SEQ ID NO: 2312182 - RNA, 19 nt, Artificial Sequence
  Description of Artificial Sequence: Synthetic oligonucleotide
uguuuacucuucuguuugc

SEQ ID NO: 2312183 - RNA, 19 nt, Artificial Sequence
  Description of Artificial Sequence: Synthetic oligonucleotide
uccgccagagcagauaucu

SEQ ID NO: 2312184 - RNA, 19 nt, Artificial Sequence
  Description of Artificial Sequence: Synthetic oligonucleotide
auagucagggauugacucu

SEQ ID NO: 2312185 - RNA, 19 nt, Artificial Sequence
  Description of Artificial Sequence: Synthetic oligonucleotide
aucucaucgcuuucaaagu

SEQ ID NO: 2312186 - RNA, 19 nt, Artificial Sequence
  Description of Artificial Sequence: Synthetic oligonucleotide
aagacucccaugagugugg

SEQ ID NO: 2312187 - RNA, 19 nt, Artificial Sequence
  Description of Artificial Sequence: Synthetic oligonucleotide
uggaggguuuccuuccucc

SEQ ID NO: 2312188 - RNA, 19 nt, Artificial Sequence
  Description of Artificial Sequence: Synthetic oligonucleotide
agugcuucaucccacuuuu

SEQ ID NO: 2312189 - RNA, 19 nt, Artificial Sequence
  Description of Artificial Sequence: Synthetic oligonucleotide
aauccaagcugagcacgac

SEQ ID NO: 2312190 - RNA, 19 nt, Artificial Sequence
  Description of Artificial Sequence: Synthetic oligonucleotide
uuggauauauguggagggc

SEQ ID NO: 2312191 - RNA, 19 nt, Artificial Sequence
  Description of Artificial Sequence: Synthetic oligonucleotide
auuucaucucauaaagggu

SEQ ID NO: 2312192 - RNA, 19 nt, Artificial Sequence
  Description of Artificial Sequence: Synthetic oligonucleotide
gugaacccagcuuccaucc

SEQ ID NO: 2312193 - RNA, 19 nt, Artificial Sequence
  Description of Artificial Sequence: Synthetic oligonucleotide
ggcuuugauaaagacagag

SEQ ID NO: 2312194 - RNA, 19 nt, Artificial Sequence
  Description of Artificial Sequence: Synthetic oligonucleotide
cuucaucgggcuuugauaa

SEQ ID NO: 2312195 - RNA, 19 nt, Artificial Sequence
  Description of Artificial Sequence: Synthetic oligonucleotide
aucucuccuaauccaagcu

SEQ ID NO: 2312196 - RNA, 19 nt, Artificial Sequence
  Description of Artificial Sequence: Synthetic oligonucleotide
ucucauaaaggguggcauc

SEQ ID NO: 2312197 - RNA, 19 nt, Artificial Sequence
  Description of Artificial Sequence: Synthetic oligonucleotide
cuggcgugaacccagcuuc

SEQ ID NO: 2312198 - RNA, 19 nt, Artificial Sequence
  Description of Artificial Sequence: Synthetic oligonucleotide
gaaagccacuccguggucc

SEQ ID NO: 2312199 - RNA, 19 nt, Artificial Sequence
  Description of Artificial Sequence: Synthetic oligonucleotide
aacauuucaugaagagaca

SEQ ID NO: 2312200 - RNA, 19 nt, Artificial Sequence
  Description of Artificial Sequence: Synthetic oligonucleotide
gcugacacaauaaccauug

SEQ ID NO: 2312201 - RNA, 19 nt, Artificial Sequence
  Description of Artificial Sequence: Synthetic oligonucleotide
agggauugacucuggugag

SEQ ID NO: 2312202 - RNA, 19 nt, Artificial Sequence
  Description of Artificial Sequence: Synthetic oligonucleotide
cacaguuccagaagcugac

SEQ ID NO: 2312203 - RNA, 19 nt, Artificial Sequence
  Description of Artificial Sequence: Synthetic oligonucleotide
gucauagucagggauugac

SEQ ID NO: 2312204 - RNA, 19 nt, Artificial Sequence
  Description of Artificial Sequence: Synthetic oligonucleotide
uuccauauuucaggguuca

SEQ ID NO: 2312205 - RNA, 19 nt, Artificial Sequence
  Description of Artificial Sequence: Synthetic oligonucleotide
aagcauuaaguagcaacaa

SEQ ID NO: 2312206 - RNA, 19 nt, Artificial Sequence
  Description of Artificial Sequence: Synthetic oligonucleotide
agcacgaccuaaaguuugc

SEQ ID NO: 2312207 - RNA, 19 nt, Artificial Sequence
  Description of Artificial Sequence: Synthetic oligonucleotide
gaagccauucugaaagcca

SEQ ID NO: 2312208 - RNA, 19 nt, Artificial Sequence
  Description of Artificial Sequence: Synthetic oligonucleotide
acauuucaugaagagacau

SEQ ID NO: 2312209 - RNA, 19 nt, Artificial Sequence
  Description of Artificial Sequence: Synthetic oligonucleotide
uuacgcuuaacagccauuu

SEQ ID NO: 2312210 - RNA, 19 nt, Artificial Sequence
  Description of Artificial Sequence: Synthetic oligonucleotide
gauauauguggagggcuac

SEQ ID NO: 2312211 - RNA, 19 nt, Artificial Sequence
  Description of Artificial Sequence: Synthetic oligonucleotide
caagacucccaugagugug

SEQ ID NO: 2312212 - RNA, 19 nt, Artificial Sequence
  Description of Artificial Sequence: Synthetic oligonucleotide
ugaguguggguuacgcuua

SEQ ID NO: 2312213 - RNA, 19 nt, Artificial Sequence
  Description of Artificial Sequence: Synthetic oligonucleotide
ugcaacagcugcacacaca

SEQ ID NO: 2312214 - RNA, 19 nt, Artificial Sequence
  Description of Artificial Sequence: Synthetic oligonucleotide
uguuccuucugguggaauu

SEQ ID NO: 2312215 - RNA, 19 nt, Artificial Sequence
  Description of Artificial Sequence: Synthetic oligonucleotide
ugcgacguggccuuagaua

SEQ ID NO: 2312216 - RNA, 19 nt, Artificial Sequence
  Description of Artificial Sequence: Synthetic oligonucleotide
ugcccaagaaaggucuucc

SEQ ID NO: 2312217 - RNA, 19 nt, Artificial Sequence
  Description of Artificial Sequence: Synthetic oligonucleotide
caguuccagaagcugacac

SEQ ID NO: 2312218 - RNA, 19 nt, Artificial Sequence
  Description of Artificial Sequence: Synthetic oligonucleotide
cuuccauauuucaggguuc

SEQ ID NO: 2312219 - RNA, 19 nt, Artificial Sequence
  Description of Artificial Sequence: Synthetic oligonucleotide
uuucaggguucauuggaua

SEQ ID NO: 2312220 - RNA, 19 nt, Artificial Sequence
  Description of Artificial Sequence: Synthetic oligonucleotide
uagaagagcccucuuccuu

SEQ ID NO: 2312221 - RNA, 19 nt, Artificial Sequence
  Description of Artificial Sequence: Synthetic oligonucleotide
gcuucaaacugcugcgacg

SEQ ID NO: 2312222 - RNA, 19 nt, Artificial Sequence
  Description of Artificial Sequence: Synthetic oligonucleotide
caucccacuuuugaauugc

SEQ ID NO: 2312223 - RNA, 19 nt, Artificial Sequence
  Description of Artificial Sequence: Synthetic oligonucleotide
uguggagggcuacuugaaa

SEQ ID NO: 2312224 - RNA, 19 nt, Artificial Sequence
  Description of Artificial Sequence: Synthetic oligonucleotide
gcgacguggccuuagauac

SEQ ID NO: 2312225 - RNA, 19 nt, Artificial Sequence
  Description of Artificial Sequence: Synthetic oligonucleotide
agagacaucaggaccugug

SEQ ID NO: 2312226 - RNA, 19 nt, Artificial Sequence
  Description of Artificial Sequence: Synthetic oligonucleotide
ccaagaaaggucuuccuuc

SEQ ID NO: 2312227 - RNA, 19 nt, Artificial Sequence
  Description of Artificial Sequence: Synthetic oligonucleotide
acuagcgccuucauccuuc

SEQ ID NO: 2312228 - RNA, 19 nt, Artificial Sequence
  Description of Artificial Sequence: Synthetic oligonucleotide
ugagcacgaccuaaaguuu

SEQ ID NO: 2312229 - RNA, 19 nt, Artificial Sequence
  Description of Artificial Sequence: Synthetic oligonucleotide
cauaaaggguggcaucauc

SEQ ID NO: 2312230 - RNA, 19 nt, Artificial Sequence
  Description of Artificial Sequence: Synthetic oligonucleotide
cugagcacgaccuaaaguu

SEQ ID NO: 2312231 - RNA, 19 nt, Artificial Sequence
  Description of Artificial Sequence: Synthetic oligonucleotide
uccacccaaaggaagccau

SEQ ID NO: 2312232 - RNA, 19 nt, Artificial Sequence
  Description of Artificial Sequence: Synthetic oligonucleotide
gagcacgaccuaaaguuug

SEQ ID NO: 2312233 - RNA, 19 nt, Artificial Sequence
  Description of Artificial Sequence: Synthetic oligonucleotide
cagauaucuguauguuaug

SEQ ID NO: 2312234 - RNA, 19 nt, Artificial Sequence
  Description of Artificial Sequence: Synthetic oligonucleotide
ugauaaagacagagccauc

SEQ ID NO: 2312235 - RNA, 19 nt, Artificial Sequence
  Description of Artificial Sequence: Synthetic oligonucleotide
uacuaucuccacaguucca

SEQ ID NO: 2312236 - RNA, 19 nt, Artificial Sequence
  Description of Artificial Sequence: Synthetic oligonucleotide
gaacccagcuuccauccuc

SEQ ID NO: 2312237 - RNA, 19 nt, Artificial Sequence
  Description of Artificial Sequence: Synthetic oligonucleotide
ccuuagauaccuucucacc

SEQ ID NO: 2312238 - RNA, 19 nt, Artificial Sequence
  Description of Artificial Sequence: Synthetic oligonucleotide
acuuuugaauugccuccug

SEQ ID NO: 2312239 - RNA, 19 nt, Artificial Sequence
  Description of Artificial Sequence: Synthetic oligonucleotide
uagauaccuucucaccaau

SEQ ID NO: 2312240 - RNA, 19 nt, Artificial Sequence
  Description of Artificial Sequence: Synthetic oligonucleotide
aaacuccgaauugccagga

SEQ ID NO: 2312241 - RNA, 19 nt, Artificial Sequence
  Description of Artificial Sequence: Synthetic oligonucleotide
acaaucucaucgcuuucaa

SEQ ID NO: 2312242 - RNA, 19 nt, Artificial Sequence
  Description of Artificial Sequence: Synthetic oligonucleotide
aucucauaaaggguggcau

SEQ ID NO: 2312243 - RNA, 19 nt, Artificial Sequence
  Description of Artificial Sequence: Synthetic oligonucleotide
caaaggaagccauucugaa

SEQ ID NO: 2312244 - RNA, 19 nt, Artificial Sequence
  Description of Artificial Sequence: Synthetic oligonucleotide
uauauguggagggcuacuu

SEQ ID NO: 2312245 - RNA, 19 nt, Artificial Sequence
  Description of Artificial Sequence: Synthetic oligonucleotide
gacucuggugagaugucug

SEQ ID NO: 2312246 - RNA, 19 nt, Artificial Sequence
  Description of Artificial Sequence: Synthetic oligonucleotide
ggguucauuggauauaugu

SEQ ID NO: 2312247 - RNA, 19 nt, Artificial Sequence
  Description of Artificial Sequence: Synthetic oligonucleotide
ugugcuacuuucugcuguu

SEQ ID NO: 2312248 - RNA, 19 nt, Artificial Sequence
  Description of Artificial Sequence: Synthetic oligonucleotide
uaugcuucaucgggcuuug

SEQ ID NO: 2312249 - RNA, 19 nt, Artificial Sequence
  Description of Artificial Sequence: Synthetic oligonucleotide
uacgcuuaacagccauuuc

SEQ ID NO: 2312250 - RNA, 19 nt, Artificial Sequence
  Description of Artificial Sequence: Synthetic oligonucleotide
gcuacuugaaaacuccgaa

SEQ ID NO: 2312251 - RNA, 19 nt, Artificial Sequence
  Description of Artificial Sequence: Synthetic oligonucleotide
gagggcuacuugaaaacuc

SEQ ID NO: 2312252 - RNA, 19 nt, Artificial Sequence
  Description of Artificial Sequence: Synthetic oligonucleotide
cccacuuuugaauugccuc

SEQ ID NO: 2312253 - RNA, 19 nt, Artificial Sequence
  Description of Artificial Sequence: Synthetic oligonucleotide
aagagcccucuuccuucuc

SEQ ID NO: 2312254 - RNA, 19 nt, Artificial Sequence
  Description of Artificial Sequence: Synthetic oligonucleotide
agauaccuucucaccaauc

SEQ ID NO: 2312255 - RNA, 19 nt, Artificial Sequence
  Description of Artificial Sequence: Synthetic oligonucleotide
gaauugccaggacuaucuc

SEQ ID NO: 2312256 - RNA, 19 nt, Artificial Sequence
  Description of Artificial Sequence: Synthetic oligonucleotide
gaagagacaucaggaccug

SEQ ID NO: 2312257 - RNA, 19 nt, Artificial Sequence
  Description of Artificial Sequence: Synthetic oligonucleotide
aguuugccaagacucccau

SEQ ID NO: 2312258 - RNA, 19 nt, Artificial Sequence
  Description of Artificial Sequence: Synthetic oligonucleotide
aucccacuuuugaauugcc

SEQ ID NO: 2312259 - RNA, 19 nt, Artificial Sequence
  Description of Artificial Sequence: Synthetic oligonucleotide
acuaucucuccuaauccaa

SEQ ID NO: 2312260 - RNA, 19 nt, Artificial Sequence
  Description of Artificial Sequence: Synthetic oligonucleotide
cuguauguuauguaagcau

SEQ ID NO: 2312261 - RNA, 19 nt, Artificial Sequence
  Description of Artificial Sequence: Synthetic oligonucleotide
gcuuaacagccauuucugc

SEQ ID NO: 2312262 - RNA, 19 nt, Artificial Sequence
  Description of Artificial Sequence: Synthetic oligonucleotide
ggaggguuuccuuccuccg

SEQ ID NO: 2312263 - RNA, 19 nt, Artificial Sequence
  Description of Artificial Sequence: Synthetic oligonucleotide
auauauguggagggcuacu

SEQ ID NO: 2312264 - RNA, 19 nt, Artificial Sequence
  Description of Artificial Sequence: Synthetic oligonucleotide
auguaagcauuaaguagca

SEQ ID NO: 2312265 - RNA, 19 nt, Artificial Sequence
  Description of Artificial Sequence: Synthetic oligonucleotide
agacuagcgccuucauccu

SEQ ID NO: 2312266 - RNA, 19 nt, Artificial Sequence
  Description of Artificial Sequence: Synthetic oligonucleotide
acugcugcgacguggccuu

SEQ ID NO: 2312267 - RNA, 19 nt, Artificial Sequence
  Description of Artificial Sequence: Synthetic oligonucleotide
uguuugcagccuuccugga

SEQ ID NO: 2312268 - RNA, 19 nt, Artificial Sequence
  Description of Artificial Sequence: Synthetic oligonucleotide
guuuacucuucuguuugca

SEQ ID NO: 2312269 - RNA, 19 nt, Artificial Sequence
  Description of Artificial Sequence: Synthetic oligonucleotide
cacgaccuaaaguuugcca

SEQ ID NO: 2312270 - RNA, 19 nt, Artificial Sequence
  Description of Artificial Sequence: Synthetic oligonucleotide
cuccuaauccaagcugagc

SEQ ID NO: 2312271 - RNA, 19 nt, Artificial Sequence
  Description of Artificial Sequence: Synthetic oligonucleotide
gccuuagauaccuucucac

SEQ ID NO: 2312272 - RNA, 19 nt, Artificial Sequence
  Description of Artificial Sequence: Synthetic oligonucleotide
uggcgugaacccagcuucc

SEQ ID NO: 2312273 - RNA, 19 nt, Artificial Sequence
  Description of Artificial Sequence: Synthetic oligonucleotide
uguaugcuucaucgggcuu

SEQ ID NO: 2312274 - RNA, 19 nt, Artificial Sequence
  Description of Artificial Sequence: Synthetic oligonucleotide
ugaacccagcuuccauccu

SEQ ID NO: 2312275 - RNA, 19 nt, Artificial Sequence
  Description of Artificial Sequence: Synthetic oligonucleotide
ucaggguucauuggauaua

SEQ ID NO: 2312276 - RNA, 19 nt, Artificial Sequence
  Description of Artificial Sequence: Synthetic oligonucleotide
uguaagcauuaaguagcaa

SEQ ID NO: 2312277 - RNA, 19 nt, Artificial Sequence
  Description of Artificial Sequence: Synthetic oligonucleotide
uccuccguuugcuggcgug

SEQ ID NO: 2312278 - RNA, 19 nt, Artificial Sequence
  Description of Artificial Sequence: Synthetic oligonucleotide
uggugagaugucuguuccu

SEQ ID NO: 2312279 - RNA, 19 nt, Artificial Sequence
  Description of Artificial Sequence: Synthetic oligonucleotide
cuccgaauugccaggacua

SEQ ID NO: 2312280 - RNA, 19 nt, Artificial Sequence
  Description of Artificial Sequence: Synthetic oligonucleotide
cacccaaaggaagccauuc

SEQ ID NO: 2312281 - RNA, 19 nt, Artificial Sequence
  Description of Artificial Sequence: Synthetic oligonucleotide
uucaucgggcuuugauaaa

SEQ ID NO: 2312282 - RNA, 19 nt, Artificial Sequence
  Description of Artificial Sequence: Synthetic oligonucleotide
ccuaauccaagcugagcac

SEQ ID NO: 2312283 - RNA, 19 nt, Artificial Sequence
  Description of Artificial Sequence: Synthetic oligonucleotide
uuccacccaaaggaagcca

SEQ ID NO: 2312284 - RNA, 19 nt, Artificial Sequence
  Description of Artificial Sequence: Synthetic oligonucleotide
gacaucaggaccugugauu

SEQ ID NO: 2312285 - RNA, 19 nt, Artificial Sequence
  Description of Artificial Sequence: Synthetic oligonucleotide
cuucaaacugcugcgacgu

SEQ ID NO: 2312286 - RNA, 19 nt, Artificial Sequence
  Description of Artificial Sequence: Synthetic oligonucleotide
aguguggguuacgcuuaac

SEQ ID NO: 2312287 - RNA, 19 nt, Artificial Sequence
  Description of Artificial Sequence: Synthetic oligonucleotide
uucaauccucugugcuacu

SEQ ID NO: 2312288 - RNA, 19 nt, Artificial Sequence
  Description of Artificial Sequence: Synthetic oligonucleotide
agacucccaugaguguggg

SEQ ID NO: 2312289 - RNA, 19 nt, Artificial Sequence
  Description of Artificial Sequence: Synthetic oligonucleotide
cuacuugaaaacuccgaau

SEQ ID NO: 2312290 - RNA, 19 nt, Artificial Sequence
  Description of Artificial Sequence: Synthetic oligonucleotide
uccguuugcuggcgugaac

SEQ ID NO: 2312291 - RNA, 19 nt, Artificial Sequence
  Description of Artificial Sequence: Synthetic oligonucleotide
uugcccaagaaaggucuuc

SEQ ID NO: 2312292 - RNA, 19 nt, Artificial Sequence
  Description of Artificial Sequence: Synthetic oligonucleotide
ucaauccucugugcuacuu

SEQ ID NO: 2312293 - RNA, 19 nt, Artificial Sequence
  Description of Artificial Sequence: Synthetic oligonucleotide
caucgggcuuugauaaaga

SEQ ID NO: 2312294 - RNA, 19 nt, Artificial Sequence
  Description of Artificial Sequence: Synthetic oligonucleotide
gcagauaucuguauguuau

SEQ ID NO: 2312295 - RNA, 19 nt, Artificial Sequence
  Description of Artificial Sequence: Synthetic oligonucleotide
uugcuggcgugaacccagc

SEQ ID NO: 2312296 - RNA, 19 nt, Artificial Sequence
  Description of Artificial Sequence: Synthetic oligonucleotide
caggaccugugauuucauc

SEQ ID NO: 2312297 - RNA, 19 nt, Artificial Sequence
  Description of Artificial Sequence: Synthetic oligonucleotide
ccguuugcuggcgugaacc

SEQ ID NO: 2312298 - RNA, 19 nt, Artificial Sequence
  Description of Artificial Sequence: Synthetic oligonucleotide
ccauucugaaagccacucc

SEQ ID NO: 2312299 - RNA, 19 nt, Artificial Sequence
  Description of Artificial Sequence: Synthetic oligonucleotide
aagcugagcacgaccuaaa

SEQ ID NO: 2312300 - RNA, 19 nt, Artificial Sequence
  Description of Artificial Sequence: Synthetic oligonucleotide
gguuuccuuccuccguuug

SEQ ID NO: 2312301 - RNA, 19 nt, Artificial Sequence
  Description of Artificial Sequence: Synthetic oligonucleotide
gcuucaucgggcuuugaua

SEQ ID NO: 2312302 - RNA, 19 nt, Artificial Sequence
  Description of Artificial Sequence: Synthetic oligonucleotide
agagccaucugggguagaa

SEQ ID NO: 2312303 - RNA, 19 nt, Artificial Sequence
  Description of Artificial Sequence: Synthetic oligonucleotide
gacguggccuuagauaccu

SEQ ID NO: 2312304 - RNA, 19 nt, Artificial Sequence
  Description of Artificial Sequence: Synthetic oligonucleotide
uccgaauugccaggacuau

SEQ ID NO: 2312305 - RNA, 19 nt, Artificial Sequence
  Description of Artificial Sequence: Synthetic oligonucleotide
gggcuacuugaaaacuccg

SEQ ID NO: 2312306 - RNA, 19 nt, Artificial Sequence
  Description of Artificial Sequence: Synthetic oligonucleotide
agucagggauugacucugg

SEQ ID NO: 2312307 - RNA, 19 nt, Artificial Sequence
  Description of Artificial Sequence: Synthetic oligonucleotide
ugcuggcgugaacccagcu

SEQ ID NO: 2312308 - RNA, 19 nt, Artificial Sequence
  Description of Artificial Sequence: Synthetic oligonucleotide
cagcuguuuacucuucugu

SEQ ID NO: 2312309 - RNA, 19 nt, Artificial Sequence
  Description of Artificial Sequence: Synthetic oligonucleotide
guuugcuggcgugaaccca

SEQ ID NO: 2312310 - RNA, 19 nt, Artificial Sequence
  Description of Artificial Sequence: Synthetic oligonucleotide
cgaccuaaaguuugccaag

SEQ ID NO: 2312311 - RNA, 19 nt, Artificial Sequence
  Description of Artificial Sequence: Synthetic oligonucleotide
agccagacuagcgccuuca

SEQ ID NO: 2312312 - RNA, 19 nt, Artificial Sequence
  Description of Artificial Sequence: Synthetic oligonucleotide
aauugccuccugguaucuu

SEQ ID NO: 2312313 - RNA, 19 nt, Artificial Sequence
  Description of Artificial Sequence: Synthetic oligonucleotide
uagcgccuucauccuucag

SEQ ID NO: 2312314 - RNA, 19 nt, Artificial Sequence
  Description of Artificial Sequence: Synthetic oligonucleotide
ccaugaguguggguuacgc

SEQ ID NO: 2312315 - RNA, 19 nt, Artificial Sequence
  Description of Artificial Sequence: Synthetic oligonucleotide
ugcugcgacguggccuuag

SEQ ID NO: 2312316 - RNA, 19 nt, Artificial Sequence
  Description of Artificial Sequence: Synthetic oligonucleotide
ggcuacuugaaaacuccga

SEQ ID NO: 2312317 - RNA, 19 nt, Artificial Sequence
  Description of Artificial Sequence: Synthetic oligonucleotide
agucauagucagggauuga

SEQ ID NO: 2312318 - RNA, 19 nt, Artificial Sequence
  Description of Artificial Sequence: Synthetic oligonucleotide
caugaguguggguuacgcu

SEQ ID NO: 2312319 - RNA, 19 nt, Artificial Sequence
  Description of Artificial Sequence: Synthetic oligonucleotide
ccuaaaguuugccaagacu

SEQ ID NO: 2312320 - RNA, 19 nt, Artificial Sequence
  Description of Artificial Sequence: Synthetic oligonucleotide
ucagccagacuagcgccuu

SEQ ID NO: 2312321 - RNA, 19 nt, Artificial Sequence
  Description of Artificial Sequence: Synthetic oligonucleotide
gaguguggguuacgcuuaa

SEQ ID NO: 2312322 - RNA, 19 nt, Artificial Sequence
  Description of Artificial Sequence: Synthetic oligonucleotide
ggauauauguggagggcua

SEQ ID NO: 2312323 - RNA, 19 nt, Artificial Sequence
  Description of Artificial Sequence: Synthetic oligonucleotide
agccauucugaaagccacu

SEQ ID NO: 2312324 - RNA, 19 nt, Artificial Sequence
  Description of Artificial Sequence: Synthetic oligonucleotide
accugugauuucaucucau

SEQ ID NO: 2312325 - RNA, 19 nt, Artificial Sequence
  Description of Artificial Sequence: Synthetic oligonucleotide
auguggagggcuacuugaa

SEQ ID NO: 2312326 - RNA, 19 nt, Artificial Sequence
  Description of Artificial Sequence: Synthetic oligonucleotide
cgugaacccagcuuccauc

SEQ ID NO: 2312327 - RNA, 19 nt, Artificial Sequence
  Description of Artificial Sequence: Synthetic oligonucleotide
uccuccgccagagcagaua

SEQ ID NO: 2312328 - RNA, 19 nt, Artificial Sequence
  Description of Artificial Sequence: Synthetic oligonucleotide
guaugcuucaucgggcuuu

SEQ ID NO: 2312329 - RNA, 19 nt, Artificial Sequence
  Description of Artificial Sequence: Synthetic oligonucleotide
cauuuacuaucuccacagu

SEQ ID NO: 2312330 - RNA, 19 nt, Artificial Sequence
  Description of Artificial Sequence: Synthetic oligonucleotide
gcugagcacgaccuaaagu

SEQ ID NO: 2312331 - RNA, 19 nt, Artificial Sequence
  Description of Artificial Sequence: Synthetic oligonucleotide
cguggccuuagauaccuuc

SEQ ID NO: 2312332 - RNA, 19 nt, Artificial Sequence
  Description of Artificial Sequence: Synthetic oligonucleotide
cguuugcuggcgugaaccc

SEQ ID NO: 2312333 - RNA, 19 nt, Artificial Sequence
  Description of Artificial Sequence: Synthetic oligonucleotide
gagcagauaucuguauguu

SEQ ID NO: 2312334 - RNA, 19 nt, Artificial Sequence
  Description of Artificial Sequence: Synthetic oligonucleotide
gcgccuucauccuucagcu

SEQ ID NO: 2312335 - RNA, 19 nt, Artificial Sequence
  Description of Artificial Sequence: Synthetic oligonucleotide
aggguucauuggauauaug

SEQ ID NO: 2312336 - RNA, 19 nt, Artificial Sequence
  Description of Artificial Sequence: Synthetic oligonucleotide
ccuuccauauuucaggguu

SEQ ID NO: 2312337 - RNA, 19 nt, Artificial Sequence
  Description of Artificial Sequence: Synthetic oligonucleotide
gguuacgcuuaacagccau

SEQ ID NO: 2312338 - RNA, 19 nt, Artificial Sequence
  Description of Artificial Sequence: Synthetic oligonucleotide
ccagacuagcgccuucauc

SEQ ID NO: 2312339 - RNA, 19 nt, Artificial Sequence
  Description of Artificial Sequence: Synthetic oligonucleotide
cucccaugaguguggguua

SEQ ID NO: 2312340 - RNA, 19 nt, Artificial Sequence
  Description of Artificial Sequence: Synthetic oligonucleotide
gaauugccuccugguaucu

SEQ ID NO: 2312341 - RNA, 19 nt, Artificial Sequence
  Description of Artificial Sequence: Synthetic oligonucleotide
caggguucauuggauauau

SEQ ID NO: 2312342 - RNA, 19 nt, Artificial Sequence
  Description of Artificial Sequence: Synthetic oligonucleotide
gcacgaccuaaaguuugcc

SEQ ID NO: 2312343 - RNA, 19 nt, Artificial Sequence
  Description of Artificial Sequence: Synthetic oligonucleotide
gucagggauugacucuggu

SEQ ID NO: 2312344 - RNA, 19 nt, Artificial Sequence
  Description of Artificial Sequence: Synthetic oligonucleotide
cuccgccagagcagauauc

SEQ ID NO: 2312345 - RNA, 19 nt, Artificial Sequence
  Description of Artificial Sequence: Synthetic oligonucleotide
gagcccucuuccuucucau

SEQ ID NO: 2312346 - RNA, 19 nt, Artificial Sequence
  Description of Artificial Sequence: Synthetic oligonucleotide
ggcaucaucuggggucagc

SEQ ID NO: 2312347 - RNA, 19 nt, Artificial Sequence
  Description of Artificial Sequence: Synthetic oligonucleotide
gccaggacuaucucuccua

SEQ ID NO: 2312348 - RNA, 19 nt, Artificial Sequence
  Description of Artificial Sequence: Synthetic oligonucleotide
gggauugacucuggugaga

SEQ ID NO: 2312349 - RNA, 19 nt, Artificial Sequence
  Description of Artificial Sequence: Synthetic oligonucleotide
ggagggcuacuugaaaacu

SEQ ID NO: 2312350 - RNA, 19 nt, Artificial Sequence
  Description of Artificial Sequence: Synthetic oligonucleotide
caucgcuuucaaagucaua

SEQ ID NO: 2312351 - RNA, 19 nt, Artificial Sequence
  Description of Artificial Sequence: Synthetic oligonucleotide
caauccucugugcuacuuu

SEQ ID NO: 2312352 - RNA, 19 nt, Artificial Sequence
  Description of Artificial Sequence: Synthetic oligonucleotide
ggugagaugucuguuccuu

SEQ ID NO: 2312353 - RNA, 19 nt, Artificial Sequence
  Description of Artificial Sequence: Synthetic oligonucleotide
cugacacaauaaccauugu

SEQ ID NO: 2312354 - RNA, 19 nt, Artificial Sequence
  Description of Artificial Sequence: Synthetic oligonucleotide
ccgaauugccaggacuauc

SEQ ID NO: 2312355 - RNA, 19 nt, Artificial Sequence
  Description of Artificial Sequence: Synthetic oligonucleotide
ccucuuccacccaaaggaa

SEQ ID NO: 2312356 - RNA, 19 nt, Artificial Sequence
  Description of Artificial Sequence: Synthetic oligonucleotide
gacuagcgccuucauccuu

SEQ ID NO: 2312357 - RNA, 19 nt, Artificial Sequence
  Description of Artificial Sequence: Synthetic oligonucleotide
guuacgcuuaacagccauu

SEQ ID NO: 2312358 - RNA, 19 nt, Artificial Sequence
  Description of Artificial Sequence: Synthetic oligonucleotide
cagcugcauccuucucauc

SEQ ID NO: 2312359 - RNA, 19 nt, Artificial Sequence
  Description of Artificial Sequence: Synthetic oligonucleotide
ccaggacuaucucuccuaa

SEQ ID NO: 2312360 - RNA, 19 nt, Artificial Sequence
  Description of Artificial Sequence: Synthetic oligonucleotide
gcugcgacguggccuuaga

SEQ ID NO: 2312361 - RNA, 19 nt, Artificial Sequence
  Description of Artificial Sequence: Synthetic oligonucleotide
cccaugaguguggguuacg

SEQ ID NO: 2312362 - RNA, 19 nt, Artificial Sequence
  Description of Artificial Sequence: Synthetic oligonucleotide
cuugcccaagaaaggucuu

SEQ ID NO: 2312363 - RNA, 19 nt, Artificial Sequence
  Description of Artificial Sequence: Synthetic oligonucleotide
cgacguggccuuagauacc

SEQ ID NO: 2312364 - RNA, 19 nt, Artificial Sequence
  Description of Artificial Sequence: Synthetic oligonucleotide
ccgccagagcagauaucug

SEQ ID NO: 2312365 - RNA, 19 nt, Artificial Sequence
  Description of Artificial Sequence: Synthetic oligonucleotide
caggacuaucucuccuaau

SEQ ID NO: 2312366 - RNA, 19 nt, Artificial Sequence
  Description of Artificial Sequence: Synthetic oligonucleotide
cuccguuugcuggcgugaa

SEQ ID NO: 2312367 - RNA, 19 nt, Artificial Sequence
  Description of Artificial Sequence: Synthetic oligonucleotide
ggcgugaacccagcuucca

SEQ ID NO: 2312368 - RNA, 19 nt, Artificial Sequence
  Description of Artificial Sequence: Synthetic oligonucleotide
gcuggcgugaacccagcuu

SEQ ID NO: 2312369 - RNA, 19 nt, Artificial Sequence
  Description of Artificial Sequence: Synthetic oligonucleotide
gccacuccguggucccgug

SEQ ID NO: 2312370 - RNA, 19 nt, Artificial Sequence
  Description of Artificial Sequence: Synthetic oligonucleotide
gggcuuugauaaagacaga

SEQ ID NO: 2312371 - RNA, 19 nt, Artificial Sequence
  Description of Artificial Sequence: Synthetic oligonucleotide
cccaagaaaggucuuccuu

SEQ ID NO: 2312372 - RNA, 19 nt, Artificial Sequence
  Description of Artificial Sequence: Synthetic oligonucleotide
augcuucaucgggcuuuga

SEQ ID NO: 2312373 - RNA, 19 nt, Artificial Sequence
  Description of Artificial Sequence: Synthetic oligonucleotide
cugcgacguggccuuagau

SEQ ID NO: 2312374 - RNA, 19 nt, Artificial Sequence
  Description of Artificial Sequence: Synthetic oligonucleotide
ggguuacgcuuaacagcca

SEQ ID NO: 2312375 - RNA, 19 nt, Artificial Sequence
  Description of Artificial Sequence: Synthetic oligonucleotide
ccuccguuugcuggcguga

SEQ ID NO: 2312376 - RNA, 19 nt, Artificial Sequence
  Description of Artificial Sequence: Synthetic oligonucleotide
gccuuccuggaggguuucc

SEQ ID NO: 2312377 - RNA, 19 nt, Artificial Sequence
  Description of Artificial Sequence: Synthetic oligonucleotide
ccuccgccagagcagauau

SEQ ID NO: 2312378 - RNA, 19 nt, Artificial Sequence
  Description of Artificial Sequence: Synthetic oligonucleotide
gcgugaacccagcuuccau

SEQ ID NO: 2312379 - RNA, 19 nt, Artificial Sequence
  Description of Artificial Sequence: Synthetic oligonucleotide
cuguuccuucugguggaau

SEQ ID NO: 2312380 - RNA, 19 nt, Artificial Sequence
  Description of Artificial Sequence: Synthetic oligonucleotide
acguggccuuagauaccuu

SEQ ID NO: 2312381 - RNA, 19 nt, Artificial Sequence
  Description of Artificial Sequence: Synthetic oligonucleotide
gggguagaagagcccucuu

SEQ ID NO: 2312382 - RNA, 19 nt, Artificial Sequence
  Description of Artificial Sequence: Synthetic oligonucleotide
gccagacuagcgccuucau

SEQ ID NO: 2312383 - RNA, 19 nt, Artificial Sequence
  Description of Artificial Sequence: Synthetic oligonucleotide
ccacccaaaggaagccauu

SEQ ID NO: 2312384 - RNA, 19 nt, Artificial Sequence
  Description of Artificial Sequence: Synthetic oligonucleotide
cuccuccgccagagcagau

SEQ ID NO: 2312385 - RNA, 19 nt, Artificial Sequence
  Description of Artificial Sequence: Synthetic oligonucleotide
cugcugcgacguggccuua

SEQ ID NO: 2312386 - RNA, 19 nt, Artificial Sequence
  Description of Artificial Sequence: Synthetic oligonucleotide
uucacaauaaauuagagga

SEQ ID NO: 2312387 - RNA, 19 nt, Artificial Sequence
  Description of Artificial Sequence: Synthetic oligonucleotide
acagaaaucagacaucucc

SEQ ID NO: 2312388 - RNA, 19 nt, Artificial Sequence
  Description of Artificial Sequence: Synthetic oligonucleotide
cuauaaauaccauagcugc

SEQ ID NO: 2312389 - RNA, 19 nt, Artificial Sequence
  Description of Artificial Sequence: Synthetic oligonucleotide
uagauaaucagacaaggca

SEQ ID NO: 2312390 - RNA, 19 nt, Artificial Sequence
  Description of Artificial Sequence: Synthetic oligonucleotide
uccaauguggacaggaugg

SEQ ID NO: 2312391 - RNA, 19 nt, Artificial Sequence
  Description of Artificial Sequence: Synthetic oligonucleotide
agugacacugauuauguac

SEQ ID NO: 2312392 - RNA, 19 nt, Artificial Sequence
  Description of Artificial Sequence: Synthetic oligonucleotide
acaucuacaggcugaaugc

SEQ ID NO: 2312393 - RNA, 19 nt, Artificial Sequence
  Description of Artificial Sequence: Synthetic oligonucleotide
aaauuagaggagcuguccg

SEQ ID NO: 2312394 - RNA, 19 nt, Artificial Sequence
  Description of Artificial Sequence: Synthetic oligonucleotide
aauaaauuagaggagcugu

SEQ ID NO: 2312395 - RNA, 19 nt, Artificial Sequence
  Description of Artificial Sequence: Synthetic oligonucleotide
aaucagacaaggcacuuag

SEQ ID NO: 2312396 - RNA, 19 nt, Artificial Sequence
  Description of Artificial Sequence: Synthetic oligonucleotide
uguagaagucucuugauga

SEQ ID NO: 2312397 - RNA, 19 nt, Artificial Sequence
  Description of Artificial Sequence: Synthetic oligonucleotide
uucaggugcgaucagagag

SEQ ID NO: 2312398 - RNA, 19 nt, Artificial Sequence
  Description of Artificial Sequence: Synthetic oligonucleotide
ugcuauaaauaccauagcu

SEQ ID NO: 2312399 - RNA, 19 nt, Artificial Sequence
  Description of Artificial Sequence: Synthetic oligonucleotide
uucaauaaggcuccugucc

SEQ ID NO: 2312400 - RNA, 19 nt, Artificial Sequence
  Description of Artificial Sequence: Synthetic oligonucleotide
aauuagaggagcuguccgg

SEQ ID NO: 2312401 - RNA, 19 nt, Artificial Sequence
  Description of Artificial Sequence: Synthetic oligonucleotide
uuuucaauaaggcuccugu

SEQ ID NO: 2312402 - RNA, 19 nt, Artificial Sequence
  Description of Artificial Sequence: Synthetic oligonucleotide
auguaccugacauugcucc

SEQ ID NO: 2312403 - RNA, 19 nt, Artificial Sequence
  Description of Artificial Sequence: Synthetic oligonucleotide
aaaguuagguguugagcac

SEQ ID NO: 2312404 - RNA, 19 nt, Artificial Sequence
  Description of Artificial Sequence: Synthetic oligonucleotide
aaggaguuggcaaugcugc

SEQ ID NO: 2312405 - RNA, 19 nt, Artificial Sequence
  Description of Artificial Sequence: Synthetic oligonucleotide
gauuauguaccugacauug

SEQ ID NO: 2312406 - RNA, 19 nt, Artificial Sequence
  Description of Artificial Sequence: Synthetic oligonucleotide
cuucacaauaaauuagagg

SEQ ID NO: 2312407 - RNA, 19 nt, Artificial Sequence
  Description of Artificial Sequence: Synthetic oligonucleotide
aaugcuuuucagauucucc

SEQ ID NO: 2312408 - RNA, 19 nt, Artificial Sequence
  Description of Artificial Sequence: Synthetic oligonucleotide
acucuuuucaauaaggcuc

SEQ ID NO: 2312409 - RNA, 19 nt, Artificial Sequence
  Description of Artificial Sequence: Synthetic oligonucleotide
cugagaucuauucaaaccc

SEQ ID NO: 2312410 - RNA, 19 nt, Artificial Sequence
  Description of Artificial Sequence: Synthetic oligonucleotide
aacucuuuucaauaaggcu

SEQ ID NO: 2312411 - RNA, 19 nt, Artificial Sequence
  Description of Artificial Sequence: Synthetic oligonucleotide
aaguuuucugcauguagag

SEQ ID NO: 2312412 - RNA, 19 nt, Artificial Sequence
  Description of Artificial Sequence: Synthetic oligonucleotide
aauaccauagcugccaacu

SEQ ID NO: 2312413 - RNA, 19 nt, Artificial Sequence
  Description of Artificial Sequence: Synthetic oligonucleotide
cucuccuagagauuuaagg

SEQ ID NO: 2312414 - RNA, 19 nt, Artificial Sequence
  Description of Artificial Sequence: Synthetic oligonucleotide
acuacagcacaccaugugg

SEQ ID NO: 2312415 - RNA, 19 nt, Artificial Sequence
  Description of Artificial Sequence: Synthetic oligonucleotide
aaucagacaucuccugagg

SEQ ID NO: 2312416 - RNA, 19 nt, Artificial Sequence
  Description of Artificial Sequence: Synthetic oligonucleotide
aaggcacuuagugucaagc

SEQ ID NO: 2312417 - RNA, 19 nt, Artificial Sequence
  Description of Artificial Sequence: Synthetic oligonucleotide
aacucggcuauuuucaggu

SEQ ID NO: 2312418 - RNA, 19 nt, Artificial Sequence
  Description of Artificial Sequence: Synthetic oligonucleotide
cauagauaaucagacaagg

SEQ ID NO: 2312419 - RNA, 19 nt, Artificial Sequence
  Description of Artificial Sequence: Synthetic oligonucleotide
uuuucaggugcgaucagag

SEQ ID NO: 2312420 - RNA, 19 nt, Artificial Sequence
  Description of Artificial Sequence: Synthetic oligonucleotide
ucacaauaaauuagaggag

SEQ ID NO: 2312421 - RNA, 19 nt, Artificial Sequence
  Description of Artificial Sequence: Synthetic oligonucleotide
ucguaguugucauggaugg

SEQ ID NO: 2312422 - RNA, 19 nt, Artificial Sequence
  Description of Artificial Sequence: Synthetic oligonucleotide
uauaaauaccauagcugcc

SEQ ID NO: 2312423 - RNA, 19 nt, Artificial Sequence
  Description of Artificial Sequence: Synthetic oligonucleotide
ugcacuacagcacaccaug

SEQ ID NO: 2312424 - RNA, 19 nt, Artificial Sequence
  Description of Artificial Sequence: Synthetic oligonucleotide
uuuucaucacaauaugcac

SEQ ID NO: 2312425 - RNA, 19 nt, Artificial Sequence
  Description of Artificial Sequence: Synthetic oligonucleotide
ucaauaaggcuccugucca

SEQ ID NO: 2312426 - RNA, 19 nt, Artificial Sequence
  Description of Artificial Sequence: Synthetic oligonucleotide
uaccauagcugccaacucg

SEQ ID NO: 2312427 - RNA, 19 nt, Artificial Sequence
  Description of Artificial Sequence: Synthetic oligonucleotide
agugucaagcuguagaagu

SEQ ID NO: 2312428 - RNA, 19 nt, Artificial Sequence
  Description of Artificial Sequence: Synthetic oligonucleotide
guuuucugcauguagagga

SEQ ID NO: 2312429 - RNA, 19 nt, Artificial Sequence
  Description of Artificial Sequence: Synthetic oligonucleotide
uuauguaccugacauugcu

SEQ ID NO: 2312430 - RNA, 19 nt, Artificial Sequence
  Description of Artificial Sequence: Synthetic oligonucleotide
gaagguuccuuccacauca

SEQ ID NO: 2312431 - RNA, 19 nt, Artificial Sequence
  Description of Artificial Sequence: Synthetic oligonucleotide
ugaugauucucgucaaucc

SEQ ID NO: 2312432 - RNA, 19 nt, Artificial Sequence
  Description of Artificial Sequence: Synthetic oligonucleotide
aucagacaucuccugaggc

SEQ ID NO: 2312433 - RNA, 19 nt, Artificial Sequence
  Description of Artificial Sequence: Synthetic oligonucleotide
uugagcacauagauaauca

SEQ ID NO: 2312434 - RNA, 19 nt, Artificial Sequence
  Description of Artificial Sequence: Synthetic oligonucleotide
uucugcauguagaggaagg

SEQ ID NO: 2312435 - RNA, 19 nt, Artificial Sequence
  Description of Artificial Sequence: Synthetic oligonucleotide
cauguugcuauaaauacca

SEQ ID NO: 2312436 - RNA, 19 nt, Artificial Sequence
  Description of Artificial Sequence: Synthetic oligonucleotide
uuaagggcagcugaugagg

SEQ ID NO: 2312437 - RNA, 19 nt, Artificial Sequence
  Description of Artificial Sequence: Synthetic oligonucleotide
uccuagagauuuaagggca

SEQ ID NO: 2312438 - RNA, 19 nt, Artificial Sequence
  Description of Artificial Sequence: Synthetic oligonucleotide
auagauaaucagacaaggc

SEQ ID NO: 2312439 - RNA, 19 nt, Artificial Sequence
  Description of Artificial Sequence: Synthetic oligonucleotide
ugauucucgucaauccagg

SEQ ID NO: 2312440 - RNA, 19 nt, Artificial Sequence
  Description of Artificial Sequence: Synthetic oligonucleotide
caaaguuagguguugagca

SEQ ID NO: 2312441 - RNA, 19 nt, Artificial Sequence
  Description of Artificial Sequence: Synthetic oligonucleotide
cuccuagagauuuaagggc

SEQ ID NO: 2312442 - RNA, 19 nt, Artificial Sequence
  Description of Artificial Sequence: Synthetic oligonucleotide
ucaaaguuagguguugagc

SEQ ID NO: 2312443 - RNA, 19 nt, Artificial Sequence
  Description of Artificial Sequence: Synthetic oligonucleotide
ugaggccuccagcugaucg

SEQ ID NO: 2312444 - RNA, 19 nt, Artificial Sequence
  Description of Artificial Sequence: Synthetic oligonucleotide
uuugggaaggugucguuag

SEQ ID NO: 2312445 - RNA, 19 nt, Artificial Sequence
  Description of Artificial Sequence: Synthetic oligonucleotide
cucacugcagauaaugaug

SEQ ID NO: 2312446 - RNA, 19 nt, Artificial Sequence
  Description of Artificial Sequence: Synthetic oligonucleotide
uccggugacagcauccggg

SEQ ID NO: 2312447 - RNA, 19 nt, Artificial Sequence
  Description of Artificial Sequence: Synthetic oligonucleotide
agugccaugcccaggagcc

SEQ ID NO: 2312448 - RNA, 19 nt, Artificial Sequence
  Description of Artificial Sequence: Synthetic oligonucleotide
ucggcuauuuucaggugcg

SEQ ID NO: 2312449 - RNA, 19 nt, Artificial Sequence
  Description of Artificial Sequence: Synthetic oligonucleotide
uaaauuagaggagcugucc

SEQ ID NO: 2312450 - RNA, 19 nt, Artificial Sequence
  Description of Artificial Sequence: Synthetic oligonucleotide
acauguugcuauaaauacc

SEQ ID NO: 2312451 - RNA, 19 nt, Artificial Sequence
  Description of Artificial Sequence: Synthetic oligonucleotide
cugaucguaguugucaugg

SEQ ID NO: 2312452 - RNA, 19 nt, Artificial Sequence
  Description of Artificial Sequence: Synthetic oligonucleotide
caaacccugauuuuccagc

SEQ ID NO: 2312453 - RNA, 19 nt, Artificial Sequence
  Description of Artificial Sequence: Synthetic oligonucleotide
ugagcacauagauaaucag

SEQ ID NO: 2312454 - RNA, 19 nt, Artificial Sequence
  Description of Artificial Sequence: Synthetic oligonucleotide
auucaaacccugauuuucc

SEQ ID NO: 2312455 - RNA, 19 nt, Artificial Sequence
  Description of Artificial Sequence: Synthetic oligonucleotide
auaaauaccauagcugcca

SEQ ID NO: 2312456 - RNA, 19 nt, Artificial Sequence
  Description of Artificial Sequence: Synthetic oligonucleotide
cacaucuacaggcugaaug

SEQ ID NO: 2312457 - RNA, 19 nt, Artificial Sequence
  Description of Artificial Sequence: Synthetic oligonucleotide
ggugucguuaguuugcagg

SEQ ID NO: 2312458 - RNA, 19 nt, Artificial Sequence
  Description of Artificial Sequence: Synthetic oligonucleotide
uaugcacuacagcacacca

SEQ ID NO: 2312459 - RNA, 19 nt, Artificial Sequence
  Description of Artificial Sequence: Synthetic oligonucleotide
ucacaauaugcacuacagc

SEQ ID NO: 2312460 - RNA, 19 nt, Artificial Sequence
  Description of Artificial Sequence: Synthetic oligonucleotide
uucaaaguuagguguugag

SEQ ID NO: 2312461 - RNA, 19 nt, Artificial Sequence
  Description of Artificial Sequence: Synthetic oligonucleotide
uucucgucaauccaggcua

SEQ ID NO: 2312462 - RNA, 19 nt, Artificial Sequence
  Description of Artificial Sequence: Synthetic oligonucleotide
gagauuuaagggcagcuga

SEQ ID NO: 2312463 - RNA, 19 nt, Artificial Sequence
  Description of Artificial Sequence: Synthetic oligonucleotide
uucaucacaauaugcacua

SEQ ID NO: 2312464 - RNA, 19 nt, Artificial Sequence
  Description of Artificial Sequence: Synthetic oligonucleotide
gagagcugagaccucagcc

SEQ ID NO: 2312465 - RNA, 19 nt, Artificial Sequence
  Description of Artificial Sequence: Synthetic oligonucleotide
ugagaucuauucaaacccu

SEQ ID NO: 2312466 - RNA, 19 nt, Artificial Sequence
  Description of Artificial Sequence: Synthetic oligonucleotide
agcaauuuccaagaaaaga

SEQ ID NO: 2312467 - RNA, 19 nt, Artificial Sequence
  Description of Artificial Sequence: Synthetic oligonucleotide
augucuagcucuccuagag

SEQ ID NO: 2312468 - RNA, 19 nt, Artificial Sequence
  Description of Artificial Sequence: Synthetic oligonucleotide
cuguccacagaaaucagac

SEQ ID NO: 2312469 - RNA, 19 nt, Artificial Sequence
  Description of Artificial Sequence: Synthetic oligonucleotide
agaugucuagcucuccuag

SEQ ID NO: 2312470 - RNA, 19 nt, Artificial Sequence
  Description of Artificial Sequence: Synthetic oligonucleotide
gaugguucuggucgcauug

SEQ ID NO: 2312471 - RNA, 19 nt, Artificial Sequence
  Description of Artificial Sequence: Synthetic oligonucleotide
gugucguuaguuugcaggg

SEQ ID NO: 2312472 - RNA, 19 nt, Artificial Sequence
  Description of Artificial Sequence: Synthetic oligonucleotide
cacauagauaaucagacaa

SEQ ID NO: 2312473 - RNA, 19 nt, Artificial Sequence
  Description of Artificial Sequence: Synthetic oligonucleotide
augcuuuucagauucucca

SEQ ID NO: 2312474 - RNA, 19 nt, Artificial Sequence
  Description of Artificial Sequence: Synthetic oligonucleotide
cuuagugucaagcuguaga

SEQ ID NO: 2312475 - RNA, 19 nt, Artificial Sequence
  Description of Artificial Sequence: Synthetic oligonucleotide
aauaugcacuacagcacac

SEQ ID NO: 2312476 - RNA, 19 nt, Artificial Sequence
  Description of Artificial Sequence: Synthetic oligonucleotide
uuugccucaugaccucugg

SEQ ID NO: 2312477 - RNA, 19 nt, Artificial Sequence
  Description of Artificial Sequence: Synthetic oligonucleotide
ucaggugcgaucagagagc

SEQ ID NO: 2312478 - RNA, 19 nt, Artificial Sequence
  Description of Artificial Sequence: Synthetic oligonucleotide
uugcuauaaauaccauagc

SEQ ID NO: 2312479 - RNA, 19 nt, Artificial Sequence
  Description of Artificial Sequence: Synthetic oligonucleotide
gaugauucucgucaaucca

SEQ ID NO: 2312480 - RNA, 19 nt, Artificial Sequence
  Description of Artificial Sequence: Synthetic oligonucleotide
uguugcuauaaauaccaua

SEQ ID NO: 2312481 - RNA, 19 nt, Artificial Sequence
  Description of Artificial Sequence: Synthetic oligonucleotide
agucucuugaugauucucg

SEQ ID NO: 2312482 - RNA, 19 nt, Artificial Sequence
  Description of Artificial Sequence: Synthetic oligonucleotide
ucaaacccugauuuuccag

SEQ ID NO: 2312483 - RNA, 19 nt, Artificial Sequence
  Description of Artificial Sequence: Synthetic oligonucleotide
auaaauuagaggagcuguc

SEQ ID NO: 2312484 - RNA, 19 nt, Artificial Sequence
  Description of Artificial Sequence: Synthetic oligonucleotide
agcugaugaggccuccagc

SEQ ID NO: 2312485 - RNA, 19 nt, Artificial Sequence
  Description of Artificial Sequence: Synthetic oligonucleotide
gcugauuugccucaugacc

SEQ ID NO: 2312486 - RNA, 19 nt, Artificial Sequence
  Description of Artificial Sequence: Synthetic oligonucleotide
cucuccucuucaaaguuag

SEQ ID NO: 2312487 - RNA, 19 nt, Artificial Sequence
  Description of Artificial Sequence: Synthetic oligonucleotide
gaaggaguuggcaaugcug

SEQ ID NO: 2312488 - RNA, 19 nt, Artificial Sequence
  Description of Artificial Sequence: Synthetic oligonucleotide
acauagauaaucagacaag

SEQ ID NO: 2312489 - RNA, 19 nt, Artificial Sequence
  Description of Artificial Sequence: Synthetic oligonucleotide
gcuauaaauaccauagcug

SEQ ID NO: 2312490 - RNA, 19 nt, Artificial Sequence
  Description of Artificial Sequence: Synthetic oligonucleotide
gcugagaucuauucaaacc

SEQ ID NO: 2312491 - RNA, 19 nt, Artificial Sequence
  Description of Artificial Sequence: Synthetic oligonucleotide
acaagugccaugcccagga

SEQ ID NO: 2312492 - RNA, 19 nt, Artificial Sequence
  Description of Artificial Sequence: Synthetic oligonucleotide
auuauguaccugacauugc

SEQ ID NO: 2312493 - RNA, 19 nt, Artificial Sequence
  Description of Artificial Sequence: Synthetic oligonucleotide
cuuuugauuucugggaaac

SEQ ID NO: 2312494 - RNA, 19 nt, Artificial Sequence
  Description of Artificial Sequence: Synthetic oligonucleotide
agguguugagcacauagau

SEQ ID NO: 2312495 - RNA, 19 nt, Artificial Sequence
  Description of Artificial Sequence: Synthetic oligonucleotide
uagguguugagcacauaga

SEQ ID NO: 2312496 - RNA, 19 nt, Artificial Sequence
  Description of Artificial Sequence: Synthetic oligonucleotide
acugauuauguaccugaca

SEQ ID NO: 2312497 - RNA, 19 nt, Artificial Sequence
  Description of Artificial Sequence: Synthetic oligonucleotide
aaggcuccuguccacagaa

SEQ ID NO: 2312498 - RNA, 19 nt, Artificial Sequence
  Description of Artificial Sequence: Synthetic oligonucleotide
gaaggugucguuaguuugc

SEQ ID NO: 2312499 - RNA, 19 nt, Artificial Sequence
  Description of Artificial Sequence: Synthetic oligonucleotide
ucuacaggcugaaugcuuu

SEQ ID NO: 2312500 - RNA, 19 nt, Artificial Sequence
  Description of Artificial Sequence: Synthetic oligonucleotide
uugaugauucucgucaauc

SEQ ID NO: 2312501 - RNA, 19 nt, Artificial Sequence
  Description of Artificial Sequence: Synthetic oligonucleotide
ucucuguagaaggucagga

SEQ ID NO: 2312502 - RNA, 19 nt, Artificial Sequence
  Description of Artificial Sequence: Synthetic oligonucleotide
auaccauagcugccaacuc

SEQ ID NO: 2312503 - RNA, 19 nt, Artificial Sequence
  Description of Artificial Sequence: Synthetic oligonucleotide
ggaaacucuuuucaauaag

SEQ ID NO: 2312504 - RNA, 19 nt, Artificial Sequence
  Description of Artificial Sequence: Synthetic oligonucleotide
uuucaauaaggcuccuguc

SEQ ID NO: 2312505 - RNA, 19 nt, Artificial Sequence
  Description of Artificial Sequence: Synthetic oligonucleotide
ucugggaaacucuuuucaa

SEQ ID NO: 2312506 - RNA, 19 nt, Artificial Sequence
  Description of Artificial Sequence: Synthetic oligonucleotide
caauaaauuagaggagcug

SEQ ID NO: 2312507 - RNA, 19 nt, Artificial Sequence
  Description of Artificial Sequence: Synthetic oligonucleotide
uauguaccugacauugcuc

SEQ ID NO: 2312508 - RNA, 19 nt, Artificial Sequence
  Description of Artificial Sequence: Synthetic oligonucleotide
uuuucugcauguagaggaa

SEQ ID NO: 2312509 - RNA, 19 nt, Artificial Sequence
  Description of Artificial Sequence: Synthetic oligonucleotide
auggugacauuugggaagg

SEQ ID NO: 2312510 - RNA, 19 nt, Artificial Sequence
  Description of Artificial Sequence: Synthetic oligonucleotide
acuucacaauaaauuagag

SEQ ID NO: 2312511 - RNA, 19 nt, Artificial Sequence
  Description of Artificial Sequence: Synthetic oligonucleotide
augauucucgucaauccag

SEQ ID NO: 2312512 - RNA, 19 nt, Artificial Sequence
  Description of Artificial Sequence: Synthetic oligonucleotide
acaauaaauuagaggagcu

SEQ ID NO: 2312513 - RNA, 19 nt, Artificial Sequence
  Description of Artificial Sequence: Synthetic oligonucleotide
uaaauaccauagcugccaa

SEQ ID NO: 2312514 - RNA, 19 nt, Artificial Sequence
  Description of Artificial Sequence: Synthetic oligonucleotide
uggcuuccugacuacagug

SEQ ID NO: 2312515 - RNA, 19 nt, Artificial Sequence
  Description of Artificial Sequence: Synthetic oligonucleotide
gauucucgucaauccaggc

SEQ ID NO: 2312516 - RNA, 19 nt, Artificial Sequence
  Description of Artificial Sequence: Synthetic oligonucleotide
gaucagagagcugagaccu

SEQ ID NO: 2312517 - RNA, 19 nt, Artificial Sequence
  Description of Artificial Sequence: Synthetic oligonucleotide
uucaaacccugauuuucca

SEQ ID NO: 2312518 - RNA, 19 nt, Artificial Sequence
  Description of Artificial Sequence: Synthetic oligonucleotide
caauaugcacuacagcaca

SEQ ID NO: 2312519 - RNA, 19 nt, Artificial Sequence
  Description of Artificial Sequence: Synthetic oligonucleotide
aucguaguugucauggaug

SEQ ID NO: 2312520 - RNA, 19 nt, Artificial Sequence
  Description of Artificial Sequence: Synthetic oligonucleotide
agaggagcuguccggugac

SEQ ID NO: 2312521 - RNA, 19 nt, Artificial Sequence
  Description of Artificial Sequence: Synthetic oligonucleotide
uccagcugaucguaguugu

SEQ ID NO: 2312522 - RNA, 19 nt, Artificial Sequence
  Description of Artificial Sequence: Synthetic oligonucleotide
ugggagagccacuucacaa

SEQ ID NO: 2312523 - RNA, 19 nt, Artificial Sequence
  Description of Artificial Sequence: Synthetic oligonucleotide
aucagcaauuuccaagaaa

SEQ ID NO: 2312524 - RNA, 19 nt, Artificial Sequence
  Description of Artificial Sequence: Synthetic oligonucleotide
agagauuuaagggcagcug

SEQ ID NO: 2312525 - RNA, 19 nt, Artificial Sequence
  Description of Artificial Sequence: Synthetic oligonucleotide
uagagauuuaagggcagcu

SEQ ID NO: 2312526 - RNA, 19 nt, Artificial Sequence
  Description of Artificial Sequence: Synthetic oligonucleotide
gagcacauagauaaucaga

SEQ ID NO: 2312527 - RNA, 19 nt, Artificial Sequence
  Description of Artificial Sequence: Synthetic oligonucleotide
agcagcugagaucuauuca

SEQ ID NO: 2312528 - RNA, 19 nt, Artificial Sequence
  Description of Artificial Sequence: Synthetic oligonucleotide
accauagcugccaacucgg

SEQ ID NO: 2312529 - RNA, 19 nt, Artificial Sequence
  Description of Artificial Sequence: Synthetic oligonucleotide
cugauuauguaccugacau

SEQ ID NO: 2312530 - RNA, 19 nt, Artificial Sequence
  Description of Artificial Sequence: Synthetic oligonucleotide
ugucuagcucuccuagaga

SEQ ID NO: 2312531 - RNA, 19 nt, Artificial Sequence
  Description of Artificial Sequence: Synthetic oligonucleotide
aagaugucuagcucuccua

SEQ ID NO: 2312532 - RNA, 19 nt, Artificial Sequence
  Description of Artificial Sequence: Synthetic oligonucleotide
guugagcacauagauaauc

SEQ ID NO: 2312533 - RNA, 19 nt, Artificial Sequence
  Description of Artificial Sequence: Synthetic oligonucleotide
auaaggcuccuguccacag

SEQ ID NO: 2312534 - RNA, 19 nt, Artificial Sequence
  Description of Artificial Sequence: Synthetic oligonucleotide
agagaagguuccuuccaca

SEQ ID NO: 2312535 - RNA, 19 nt, Artificial Sequence
  Description of Artificial Sequence: Synthetic oligonucleotide
gugugcaccgagcagagga

SEQ ID NO: 2312536 - RNA, 19 nt, Artificial Sequence
  Description of Artificial Sequence: Synthetic oligonucleotide
caacucggcuauuuucagg

SEQ ID NO: 2312537 - RNA, 19 nt, Artificial Sequence
  Description of Artificial Sequence: Synthetic oligonucleotide
gagaucuauucaaacccug

SEQ ID NO: 2312538 - RNA, 19 nt, Artificial Sequence
  Description of Artificial Sequence: Synthetic oligonucleotide
ucugcauguagaggaagga

SEQ ID NO: 2312539 - RNA, 19 nt, Artificial Sequence
  Description of Artificial Sequence: Synthetic oligonucleotide
uuugcagggcucuuuugau

SEQ ID NO: 2312540 - RNA, 19 nt, Artificial Sequence
  Description of Artificial Sequence: Synthetic oligonucleotide
ucagagagcugagaccuca

SEQ ID NO: 2312541 - RNA, 19 nt, Artificial Sequence
  Description of Artificial Sequence: Synthetic oligonucleotide
ucuugaugauucucgucaa

SEQ ID NO: 2312542 - RNA, 19 nt, Artificial Sequence
  Description of Artificial Sequence: Synthetic oligonucleotide
uguccggugacagcauccg

SEQ ID NO: 2312543 - RNA, 19 nt, Artificial Sequence
  Description of Artificial Sequence: Synthetic oligonucleotide
ugcugauuugccucaugac

SEQ ID NO: 2312544 - RNA, 19 nt, Artificial Sequence
  Description of Artificial Sequence: Synthetic oligonucleotide
uguaccugacauugcucca

SEQ ID NO: 2312545 - RNA, 19 nt, Artificial Sequence
  Description of Artificial Sequence: Synthetic oligonucleotide
agcacacaucuacaggcug

SEQ ID NO: 2312546 - RNA, 19 nt, Artificial Sequence
  Description of Artificial Sequence: Synthetic oligonucleotide
aggcuauggggugugcacc

SEQ ID NO: 2312547 - RNA, 19 nt, Artificial Sequence
  Description of Artificial Sequence: Synthetic oligonucleotide
agagccacuucacaauaaa

SEQ ID NO: 2312548 - RNA, 19 nt, Artificial Sequence
  Description of Artificial Sequence: Synthetic oligonucleotide
caucacaauaugcacuaca

SEQ ID NO: 2312549 - RNA, 19 nt, Artificial Sequence
  Description of Artificial Sequence: Synthetic oligonucleotide
ggaaggugucguuaguuug

SEQ ID NO: 2312550 - RNA, 19 nt, Artificial Sequence
  Description of Artificial Sequence: Synthetic oligonucleotide
uagugucaagcuguagaag

SEQ ID NO: 2312551 - RNA, 19 nt, Artificial Sequence
  Description of Artificial Sequence: Synthetic oligonucleotide
gaggcuauggggugugcac

SEQ ID NO: 2312552 - RNA, 19 nt, Artificial Sequence
  Description of Artificial Sequence: Synthetic oligonucleotide
uuuccagcgaggccccagc

SEQ ID NO: 2312553 - RNA, 19 nt, Artificial Sequence
  Description of Artificial Sequence: Synthetic oligonucleotide
agcccagaagagaagguuc

SEQ ID NO: 2312554 - RNA, 19 nt, Artificial Sequence
  Description of Artificial Sequence: Synthetic oligonucleotide
guagaaggucaggaggcgg

SEQ ID NO: 2312555 - RNA, 19 nt, Artificial Sequence
  Description of Artificial Sequence: Synthetic oligonucleotide
ugauuauguaccugacauu

SEQ ID NO: 2312556 - RNA, 19 nt, Artificial Sequence
  Description of Artificial Sequence: Synthetic oligonucleotide
ggcacuuagugucaagcug

SEQ ID NO: 2312557 - RNA, 19 nt, Artificial Sequence
  Description of Artificial Sequence: Synthetic oligonucleotide
auuagaggagcuguccggu

SEQ ID NO: 2312558 - RNA, 19 nt, Artificial Sequence
  Description of Artificial Sequence: Synthetic oligonucleotide
ggugcgaucagagagcuga

SEQ ID NO: 2312559 - RNA, 19 nt, Artificial Sequence
  Description of Artificial Sequence: Synthetic oligonucleotide
gacacugauuauguaccug

SEQ ID NO: 2312560 - RNA, 19 nt, Artificial Sequence
  Description of Artificial Sequence: Synthetic oligonucleotide
aggcacuuagugucaagcu

SEQ ID NO: 2312561 - RNA, 19 nt, Artificial Sequence
  Description of Artificial Sequence: Synthetic oligonucleotide
ugccaacucggcuauuuuc

SEQ ID NO: 2312562 - RNA, 19 nt, Artificial Sequence
  Description of Artificial Sequence: Synthetic oligonucleotide
ucucuugaugauucucguc

SEQ ID NO: 2312563 - RNA, 19 nt, Artificial Sequence
  Description of Artificial Sequence: Synthetic oligonucleotide
ugaaugcuuuucagauucu

SEQ ID NO: 2312564 - RNA, 19 nt, Artificial Sequence
  Description of Artificial Sequence: Synthetic oligonucleotide
uucuggucgcauugguggc

SEQ ID NO: 2312565 - RNA, 19 nt, Artificial Sequence
  Description of Artificial Sequence: Synthetic oligonucleotide
cacuacagcacaccaugug

SEQ ID NO: 2312566 - RNA, 19 nt, Artificial Sequence
  Description of Artificial Sequence: Synthetic oligonucleotide
acauuugggaaggugucgu

SEQ ID NO: 2312567 - RNA, 19 nt, Artificial Sequence
  Description of Artificial Sequence: Synthetic oligonucleotide
guacacagcauaggccugg

SEQ ID NO: 2312568 - RNA, 19 nt, Artificial Sequence
  Description of Artificial Sequence: Synthetic oligonucleotide
uccuguccacagaaaucag

SEQ ID NO: 2312569 - RNA, 19 nt, Artificial Sequence
  Description of Artificial Sequence: Synthetic oligonucleotide
gaugucuagcucuccuaga

SEQ ID NO: 2312570 - RNA, 19 nt, Artificial Sequence
  Description of Artificial Sequence: Synthetic oligonucleotide
agccacuucacaauaaauu

SEQ ID NO: 2312571 - RNA, 19 nt, Artificial Sequence
  Description of Artificial Sequence: Synthetic oligonucleotide
gaaugcuuuucagauucuc

SEQ ID NO: 2312572 - RNA, 19 nt, Artificial Sequence
  Description of Artificial Sequence: Synthetic oligonucleotide
cugcauguagaggaaggag

SEQ ID NO: 2312573 - RNA, 19 nt, Artificial Sequence
  Description of Artificial Sequence: Synthetic oligonucleotide
gauaaucagacaaggcacu

SEQ ID NO: 2312574 - RNA, 19 nt, Artificial Sequence
  Description of Artificial Sequence: Synthetic oligonucleotide
ucuccaauguggacaggau

SEQ ID NO: 2312575 - RNA, 19 nt, Artificial Sequence
  Description of Artificial Sequence: Synthetic oligonucleotide
gcuauuuucaggugcgauc

SEQ ID NO: 2312576 - RNA, 19 nt, Artificial Sequence
  Description of Artificial Sequence: Synthetic oligonucleotide
agaucuauucaaacccuga

SEQ ID NO: 2312577 - RNA, 19 nt, Artificial Sequence
  Description of Artificial Sequence: Synthetic oligonucleotide
gcucuuuugauuucuggga

SEQ ID NO: 2312578 - RNA, 19 nt, Artificial Sequence
  Description of Artificial Sequence: Synthetic oligonucleotide
auccgggaugucucaacag

SEQ ID NO: 2312579 - RNA, 19 nt, Artificial Sequence
  Description of Artificial Sequence: Synthetic oligonucleotide
cuguccggugacagcaucc

SEQ ID NO: 2312580 - RNA, 19 nt, Artificial Sequence
  Description of Artificial Sequence: Synthetic oligonucleotide
ugaucguaguugucaugga

SEQ ID NO: 2312581 - RNA, 19 nt, Artificial Sequence
  Description of Artificial Sequence: Synthetic oligonucleotide
uggggugugcaccgagcag

SEQ ID NO: 2312582 - RNA, 19 nt, Artificial Sequence
  Description of Artificial Sequence: Synthetic oligonucleotide
gaucuauucaaacccugau

SEQ ID NO: 2312583 - RNA, 19 nt, Artificial Sequence
  Description of Artificial Sequence: Synthetic oligonucleotide
aaggugucguuaguuugca

SEQ ID NO: 2312584 - RNA, 19 nt, Artificial Sequence
  Description of Artificial Sequence: Synthetic oligonucleotide
ugucguuaguuugcagggc

SEQ ID NO: 2312585 - RNA, 19 nt, Artificial Sequence
  Description of Artificial Sequence: Synthetic oligonucleotide
cucuuuugauuucugggaa

SEQ ID NO: 2312586 - RNA, 19 nt, Artificial Sequence
  Description of Artificial Sequence: Synthetic oligonucleotide
uguugagcacauagauaau

SEQ ID NO: 2312587 - RNA, 19 nt, Artificial Sequence
  Description of Artificial Sequence: Synthetic oligonucleotide
gauuuuccagcgaggcccc

SEQ ID NO: 2312588 - RNA, 19 nt, Artificial Sequence
  Description of Artificial Sequence: Synthetic oligonucleotide
gcgaucagagagcugagac

SEQ ID NO: 2312589 - RNA, 19 nt, Artificial Sequence
  Description of Artificial Sequence: Synthetic oligonucleotide
gccacuucacaauaaauua

SEQ ID NO: 2312590 - RNA, 19 nt, Artificial Sequence
  Description of Artificial Sequence: Synthetic oligonucleotide
acaucuccugaggcuaugg

SEQ ID NO: 2312591 - RNA, 19 nt, Artificial Sequence
  Description of Artificial Sequence: Synthetic oligonucleotide
ucguuaguuugcagggcuc

SEQ ID NO: 2312592 - RNA, 19 nt, Artificial Sequence
  Description of Artificial Sequence: Synthetic oligonucleotide
ucuccugaugguccuugaa

SEQ ID NO: 2312593 - RNA, 19 nt, Artificial Sequence
  Description of Artificial Sequence: Synthetic oligonucleotide
gucucuguagaaggucagg

SEQ ID NO: 2312594 - RNA, 19 nt, Artificial Sequence
  Description of Artificial Sequence: Synthetic oligonucleotide
agcugaucguaguugucau

SEQ ID NO: 2312595 - RNA, 19 nt, Artificial Sequence
  Description of Artificial Sequence: Synthetic oligonucleotide
ugcaccgagcagaggacaa

SEQ ID NO: 2312596 - RNA, 19 nt, Artificial Sequence
  Description of Artificial Sequence: Synthetic oligonucleotide
uaaucagacaaggcacuua

SEQ ID NO: 2312597 - RNA, 19 nt, Artificial Sequence
  Description of Artificial Sequence: Synthetic oligonucleotide
ggcuauggggugugcaccg

SEQ ID NO: 2312598 - RNA, 19 nt, Artificial Sequence
  Description of Artificial Sequence: Synthetic oligonucleotide
uacagcacaccauguggua

SEQ ID NO: 2312599 - RNA, 19 nt, Artificial Sequence
  Description of Artificial Sequence: Synthetic oligonucleotide
augauggggcuuuccacau

SEQ ID NO: 2312600 - RNA, 19 nt, Artificial Sequence
  Description of Artificial Sequence: Synthetic oligonucleotide
cagcauaggccugggagag

SEQ ID NO: 2312601 - RNA, 19 nt, Artificial Sequence
  Description of Artificial Sequence: Synthetic oligonucleotide
ucuagcucuccuagagauu

SEQ ID NO: 2312602 - RNA, 19 nt, Artificial Sequence
  Description of Artificial Sequence: Synthetic oligonucleotide
accugacauugcuccaaag

SEQ ID NO: 2312603 - RNA, 19 nt, Artificial Sequence
  Description of Artificial Sequence: Synthetic oligonucleotide
ugacuacagugacacugau

SEQ ID NO: 2312604 - RNA, 19 nt, Artificial Sequence
  Description of Artificial Sequence: Synthetic oligonucleotide
uagaagucucuugaugauu

SEQ ID NO: 2312605 - RNA, 19 nt, Artificial Sequence
  Description of Artificial Sequence: Synthetic oligonucleotide
gucuagcucuccuagagau

SEQ ID NO: 2312606 - RNA, 19 nt, Artificial Sequence
  Description of Artificial Sequence: Synthetic oligonucleotide
ucgcauugguggcuuccug

SEQ ID NO: 2312607 - RNA, 19 nt, Artificial Sequence
  Description of Artificial Sequence: Synthetic oligonucleotide
agauuuaagggcagcugau

SEQ ID NO: 2312608 - RNA, 19 nt, Artificial Sequence
  Description of Artificial Sequence: Synthetic oligonucleotide
aggagcuguccggugacag

SEQ ID NO: 2312609 - RNA, 19 nt, Artificial Sequence
  Description of Artificial Sequence: Synthetic oligonucleotide
acuuagugucaagcuguag

SEQ ID NO: 2312610 - RNA, 19 nt, Artificial Sequence
  Description of Artificial Sequence: Synthetic oligonucleotide
agauaaugauggggcuuuc

SEQ ID NO: 2312611 - RNA, 19 nt, Artificial Sequence
  Description of Artificial Sequence: Synthetic oligonucleotide
cugacauugcuccaaaguu

SEQ ID NO: 2312612 - RNA, 19 nt, Artificial Sequence
  Description of Artificial Sequence: Synthetic oligonucleotide
gagaagguuccuuccacau

SEQ ID NO: 2312613 - RNA, 19 nt, Artificial Sequence
  Description of Artificial Sequence: Synthetic oligonucleotide
agccacauguugcuauaaa

SEQ ID NO: 2312614 - RNA, 19 nt, Artificial Sequence
  Description of Artificial Sequence: Synthetic oligonucleotide
gucguuaguuugcagggcu

SEQ ID NO: 2312615 - RNA, 19 nt, Artificial Sequence
  Description of Artificial Sequence: Synthetic oligonucleotide
gcuuccugacuacagugac

SEQ ID NO: 2312616 - RNA, 19 nt, Artificial Sequence
  Description of Artificial Sequence: Synthetic oligonucleotide
acucggcuauuuucaggug

SEQ ID NO: 2312617 - RNA, 19 nt, Artificial Sequence
  Description of Artificial Sequence: Synthetic oligonucleotide
cuucaaaguuagguguuga

SEQ ID NO: 2312618 - RNA, 19 nt, Artificial Sequence
  Description of Artificial Sequence: Synthetic oligonucleotide
ccgagcagaggacaagugc

SEQ ID NO: 2312619 - RNA, 19 nt, Artificial Sequence
  Description of Artificial Sequence: Synthetic oligonucleotide
ugcgaucagagagcugaga

SEQ ID NO: 2312620 - RNA, 19 nt, Artificial Sequence
  Description of Artificial Sequence: Synthetic oligonucleotide
gggaaacucuuuucaauaa

SEQ ID NO: 2312621 - RNA, 19 nt, Artificial Sequence
  Description of Artificial Sequence: Synthetic oligonucleotide
aggugucguuaguuugcag

SEQ ID NO: 2312622 - RNA, 19 nt, Artificial Sequence
  Description of Artificial Sequence: Synthetic oligonucleotide
ucuggucgcauugguggcu

SEQ ID NO: 2312623 - RNA, 19 nt, Artificial Sequence
  Description of Artificial Sequence: Synthetic oligonucleotide
uugguggcuuccugacuac

SEQ ID NO: 2312624 - RNA, 19 nt, Artificial Sequence
  Description of Artificial Sequence: Synthetic oligonucleotide
ccgggaugucucaacagcc

SEQ ID NO: 2312625 - RNA, 19 nt, Artificial Sequence
  Description of Artificial Sequence: Synthetic oligonucleotide
ucaucacaauaugcacuac

SEQ ID NO: 2312626 - RNA, 19 nt, Artificial Sequence
  Description of Artificial Sequence: Synthetic oligonucleotide
ccuagagauuuaagggcag

SEQ ID NO: 2312627 - RNA, 19 nt, Artificial Sequence
  Description of Artificial Sequence: Synthetic oligonucleotide
cauccgggaugucucaaca

SEQ ID NO: 2312628 - RNA, 19 nt, Artificial Sequence
  Description of Artificial Sequence: Synthetic oligonucleotide
agcauaggccugggagagc

SEQ ID NO: 2312629 - RNA, 19 nt, Artificial Sequence
  Description of Artificial Sequence: Synthetic oligonucleotide
ggauggugacauuugggaa

SEQ ID NO: 2312630 - RNA, 19 nt, Artificial Sequence
  Description of Artificial Sequence: Synthetic oligonucleotide
gucaagcuguagaagucuc

SEQ ID NO: 2312631 - RNA, 19 nt, Artificial Sequence
  Description of Artificial Sequence: Synthetic oligonucleotide
gcuugucuccugauggucc

SEQ ID NO: 2312632 - RNA, 19 nt, Artificial Sequence
  Description of Artificial Sequence: Synthetic oligonucleotide
gcauugguggcuuccugac

SEQ ID NO: 2312633 - RNA, 19 nt, Artificial Sequence
  Description of Artificial Sequence: Synthetic oligonucleotide
guccggugacagcauccgg

SEQ ID NO: 2312634 - RNA, 19 nt, Artificial Sequence
  Description of Artificial Sequence: Synthetic oligonucleotide
gcacauagauaaucagaca

SEQ ID NO: 2312635 - RNA, 19 nt, Artificial Sequence
  Description of Artificial Sequence: Synthetic oligonucleotide
ccacauaucucuccucuuc

SEQ ID NO: 2312636 - RNA, 19 nt, Artificial Sequence
  Description of Artificial Sequence: Synthetic oligonucleotide
ccugaugguccuugaacac

SEQ ID NO: 2312637 - RNA, 19 nt, Artificial Sequence
  Description of Artificial Sequence: Synthetic oligonucleotide
ucuuuucaauaaggcuccu

SEQ ID NO: 2312638 - RNA, 19 nt, Artificial Sequence
  Description of Artificial Sequence: Synthetic oligonucleotide
agcucuccuagagauuuaa

SEQ ID NO: 2312639 - RNA, 19 nt, Artificial Sequence
  Description of Artificial Sequence: Synthetic oligonucleotide
acacccugucucuguagaa

SEQ ID NO: 2312640 - RNA, 19 nt, Artificial Sequence
  Description of Artificial Sequence: Synthetic oligonucleotide
gccaacucggcuauuuuca

SEQ ID NO: 2312641 - RNA, 19 nt, Artificial Sequence
  Description of Artificial Sequence: Synthetic oligonucleotide
cagccagcagcugagaucu

SEQ ID NO: 2312642 - RNA, 19 nt, Artificial Sequence
  Description of Artificial Sequence: Synthetic oligonucleotide
ccaacucggcuauuuucag

SEQ ID NO: 2312643 - RNA, 19 nt, Artificial Sequence
  Description of Artificial Sequence: Synthetic oligonucleotide
caagugccaugcccaggag

SEQ ID NO: 2312644 - RNA, 19 nt, Artificial Sequence
  Description of Artificial Sequence: Synthetic oligonucleotide
uccugaggcuauggggugu

SEQ ID NO: 2312645 - RNA, 19 nt, Artificial Sequence
  Description of Artificial Sequence: Synthetic oligonucleotide
gcagaggacaagugccaug

SEQ ID NO: 2312646 - RNA, 19 nt, Artificial Sequence
  Description of Artificial Sequence: Synthetic oligonucleotide
gcugaucguaguugucaug

SEQ ID NO: 2312647 - RNA, 19 nt, Artificial Sequence
  Description of Artificial Sequence: Synthetic oligonucleotide
ggagcuguccggugacagc

SEQ ID NO: 2312648 - RNA, 19 nt, Artificial Sequence
  Description of Artificial Sequence: Synthetic oligonucleotide
aucuacaggcugaaugcuu

SEQ ID NO: 2312649 - RNA, 19 nt, Artificial Sequence
  Description of Artificial Sequence: Synthetic oligonucleotide
cagacaucuccugaggcua

SEQ ID NO: 2312650 - RNA, 19 nt, Artificial Sequence
  Description of Artificial Sequence: Synthetic oligonucleotide
guaccugacauugcuccaa

SEQ ID NO: 2312651 - RNA, 19 nt, Artificial Sequence
  Description of Artificial Sequence: Synthetic oligonucleotide
agcagaggacaagugccau

SEQ ID NO: 2312652 - RNA, 19 nt, Artificial Sequence
  Description of Artificial Sequence: Synthetic oligonucleotide
auucuccaauguggacagg

SEQ ID NO: 2312653 - RNA, 19 nt, Artificial Sequence
  Description of Artificial Sequence: Synthetic oligonucleotide
accgagcagaggacaagug

SEQ ID NO: 2312654 - RNA, 19 nt, Artificial Sequence
  Description of Artificial Sequence: Synthetic oligonucleotide
uccugacuacagugacacu

SEQ ID NO: 2312655 - RNA, 19 nt, Artificial Sequence
  Description of Artificial Sequence: Synthetic oligonucleotide
aggaggcggcuggucacac

SEQ ID NO: 2312656 - RNA, 19 nt, Artificial Sequence
  Description of Artificial Sequence: Synthetic oligonucleotide
ggagagccacuucacaaua

SEQ ID NO: 2312657 - RNA, 19 nt, Artificial Sequence
  Description of Artificial Sequence: Synthetic oligonucleotide
ggggcuuuccacauaucuc

SEQ ID NO: 2312658 - RNA, 19 nt, Artificial Sequence
  Description of Artificial Sequence: Synthetic oligonucleotide
uggaugguucuggucgcau

SEQ ID NO: 2312659 - RNA, 19 nt, Artificial Sequence
  Description of Artificial Sequence: Synthetic oligonucleotide
aucagacaaggcacuuagu

SEQ ID NO: 2312660 - RNA, 19 nt, Artificial Sequence
  Description of Artificial Sequence: Synthetic oligonucleotide
ggggugugcaccgagcaga

SEQ ID NO: 2312661 - RNA, 19 nt, Artificial Sequence
  Description of Artificial Sequence: Synthetic oligonucleotide
gcacuuagugucaagcugu

SEQ ID NO: 2312662 - RNA, 19 nt, Artificial Sequence
  Description of Artificial Sequence: Synthetic oligonucleotide
gguguugagcacauagaua

SEQ ID NO: 2312663 - RNA, 19 nt, Artificial Sequence
  Description of Artificial Sequence: Synthetic oligonucleotide
gguacacagcauaggccug

SEQ ID NO: 2312664 - RNA, 19 nt, Artificial Sequence
  Description of Artificial Sequence: Synthetic oligonucleotide
augcacuacagcacaccau

SEQ ID NO: 2312665 - RNA, 19 nt, Artificial Sequence
  Description of Artificial Sequence: Synthetic oligonucleotide
gauuugccucaugaccucu

SEQ ID NO: 2312666 - RNA, 19 nt, Artificial Sequence
  Description of Artificial Sequence: Synthetic oligonucleotide
gccacauguugcuauaaau

SEQ ID NO: 2312667 - RNA, 19 nt, Artificial Sequence
  Description of Artificial Sequence: Synthetic oligonucleotide
auguugcuauaaauaccau

SEQ ID NO: 2312668 - RNA, 19 nt, Artificial Sequence
  Description of Artificial Sequence: Synthetic oligonucleotide
ccccucacugcagauaaug

SEQ ID NO: 2312669 - RNA, 19 nt, Artificial Sequence
  Description of Artificial Sequence: Synthetic oligonucleotide
ggucgcauugguggcuucc

SEQ ID NO: 2312670 - RNA, 19 nt, Artificial Sequence
  Description of Artificial Sequence: Synthetic oligonucleotide
cacuuagugucaagcugua

SEQ ID NO: 2312671 - RNA, 19 nt, Artificial Sequence
  Description of Artificial Sequence: Synthetic oligonucleotide
gcauccgggaugucucaac

SEQ ID NO: 2312672 - RNA, 19 nt, Artificial Sequence
  Description of Artificial Sequence: Synthetic oligonucleotide
gcucuccuagagauuuaag

SEQ ID NO: 2312673 - RNA, 19 nt, Artificial Sequence
  Description of Artificial Sequence: Synthetic oligonucleotide
cuugaugauucucgucaau

SEQ ID NO: 2312674 - RNA, 19 nt, Artificial Sequence
  Description of Artificial Sequence: Synthetic oligonucleotide
cagcacacaucuacaggcu

SEQ ID NO: 2312675 - RNA, 19 nt, Artificial Sequence
  Description of Artificial Sequence: Synthetic oligonucleotide
gugcaccgagcagaggaca

SEQ ID NO: 2312676 - RNA, 19 nt, Artificial Sequence
  Description of Artificial Sequence: Synthetic oligonucleotide
ggcuccuguccacagaaau

SEQ ID NO: 2312677 - RNA, 19 nt, Artificial Sequence
  Description of Artificial Sequence: Synthetic oligonucleotide
ggcuugucuccugaugguc

SEQ ID NO: 2312678 - RNA, 19 nt, Artificial Sequence
  Description of Artificial Sequence: Synthetic oligonucleotide
caucuacaggcugaaugcu

SEQ ID NO: 2312679 - RNA, 19 nt, Artificial Sequence
  Description of Artificial Sequence: Synthetic oligonucleotide
agcauccgggaugucucaa

SEQ ID NO: 2312680 - RNA, 19 nt, Artificial Sequence
  Description of Artificial Sequence: Synthetic oligonucleotide
cccucacugcagauaauga

SEQ ID NO: 2312681 - RNA, 19 nt, Artificial Sequence
  Description of Artificial Sequence: Synthetic oligonucleotide
gggagagccacuucacaau

SEQ ID NO: 2312682 - RNA, 19 nt, Artificial Sequence
  Description of Artificial Sequence: Synthetic oligonucleotide
ccagcgaggccccagccca

SEQ ID NO: 2312683 - RNA, 19 nt, Artificial Sequence
  Description of Artificial Sequence: Synthetic oligonucleotide
gacuacagugacacugauu

SEQ ID NO: 2312684 - RNA, 19 nt, Artificial Sequence
  Description of Artificial Sequence: Synthetic oligonucleotide
cagcauccgggaugucuca

SEQ ID NO: 2312685 - RNA, 19 nt, Artificial Sequence
  Description of Artificial Sequence: Synthetic oligonucleotide
cauaggccugggagagcca

SEQ ID NO: 2312686 - RNA, 19 nt, Artificial Sequence
  Description of Artificial Sequence: Synthetic oligonucleotide
uggucgcauugguggcuuc

SEQ ID NO: 2312687 - RNA, 19 nt, Artificial Sequence
  Description of Artificial Sequence: Synthetic oligonucleotide
gcuguccggugacagcauc

SEQ ID NO: 2312688 - RNA, 19 nt, Artificial Sequence
  Description of Artificial Sequence: Synthetic oligonucleotide
cauugguggcuuccugacu

SEQ ID NO: 2312689 - RNA, 19 nt, Artificial Sequence
  Description of Artificial Sequence: Synthetic oligonucleotide
gaugaggccuccagcugau

SEQ ID NO: 2312690 - RNA, 19 nt, Artificial Sequence
  Description of Artificial Sequence: Synthetic oligonucleotide
gcaccgagcagaggacaag

SEQ ID NO: 2312691 - RNA, 19 nt, Artificial Sequence
  Description of Artificial Sequence: Synthetic oligonucleotide
ggugugcaccgagcagagg

SEQ ID NO: 2312692 - RNA, 19 nt, Artificial Sequence
  Description of Artificial Sequence: Synthetic oligonucleotide
ccagcugaucguaguuguc

SEQ ID NO: 2312693 - RNA, 19 nt, Artificial Sequence
  Description of Artificial Sequence: Synthetic oligonucleotide
auuuuccagcgaggcccca

SEQ ID NO: 2312694 - RNA, 19 nt, Artificial Sequence
  Description of Artificial Sequence: Synthetic oligonucleotide
guuggcaaugcugcugauu

SEQ ID NO: 2312695 - RNA, 19 nt, Artificial Sequence
  Description of Artificial Sequence: Synthetic oligonucleotide
ccucacugcagauaaugau

SEQ ID NO: 2312696 - RNA, 19 nt, Artificial Sequence
  Description of Artificial Sequence: Synthetic oligonucleotide
ucaugaccucugggcuugu

SEQ ID NO: 2312697 - RNA, 19 nt, Artificial Sequence
  Description of Artificial Sequence: Synthetic oligonucleotide
ccggugacagcauccggga

SEQ ID NO: 2312698 - RNA, 19 nt, Artificial Sequence
  Description of Artificial Sequence: Synthetic oligonucleotide
caccgagcagaggacaagu

SEQ ID NO: 2312699 - RNA, 19 nt, Artificial Sequence
  Description of Artificial Sequence: Synthetic oligonucleotide
gccccagcccagaagagaa

SEQ ID NO: 2312700 - RNA, 19 nt, Artificial Sequence
  Description of Artificial Sequence: Synthetic oligonucleotide
ccuugaacacccugucucu

SEQ ID NO: 2312701 - RNA, 19 nt, Artificial Sequence
  Description of Artificial Sequence: Synthetic oligonucleotide
gucgcauugguggcuuccu

SEQ ID NO: 2312702 - RNA, 19 nt, Artificial Sequence
  Description of Artificial Sequence: Synthetic oligonucleotide
cauuugggaaggugucguu

SEQ ID NO: 2312703 - RNA, 19 nt, Artificial Sequence
  Description of Artificial Sequence: Synthetic oligonucleotide
ccugaggcuauggggugug

SEQ ID NO: 2312704 - RNA, 19 nt, Artificial Sequence
  Description of Artificial Sequence: Synthetic oligonucleotide
cagccacauguugcuauaa

SEQ ID NO: 2312705 - RNA, 19 nt, Artificial Sequence
  Description of Artificial Sequence: Synthetic oligonucleotide
ggcuauuuucaggugcgau

SEQ ID NO: 2312706 - RNA, 19 nt, Artificial Sequence
  Description of Artificial Sequence: Synthetic oligonucleotide
cagcccagaagagaagguu

SEQ ID NO: 2312707 - RNA, 19 nt, Artificial Sequence
  Description of Artificial Sequence: Synthetic oligonucleotide
gugccaugcccaggagcca

SEQ ID NO: 2312708 - RNA, 19 nt, Artificial Sequence
  Description of Artificial Sequence: Synthetic oligonucleotide
ggaugguucuggucgcauu

SEQ ID NO: 2312709 - RNA, 19 nt, Artificial Sequence
  Description of Artificial Sequence: Synthetic oligonucleotide
ggaggcggcuggucacaca

SEQ ID NO: 2312710 - RNA, 19 nt, Artificial Sequence
  Description of Artificial Sequence: Synthetic oligonucleotide
gcagcugaugaggccucca

SEQ ID NO: 2312711 - RNA, 19 nt, Artificial Sequence
  Description of Artificial Sequence: Synthetic oligonucleotide
gcuauggggugugcaccga

SEQ ID NO: 2312712 - RNA, 19 nt, Artificial Sequence
  Description of Artificial Sequence: Synthetic oligonucleotide
cugccaacucggcuauuuu

SEQ ID NO: 2312713 - RNA, 19 nt, Artificial Sequence
  Description of Artificial Sequence: Synthetic oligonucleotide
gcggcuggucacacagcac

SEQ ID NO: 2312714 - RNA, 19 nt, Artificial Sequence
  Description of Artificial Sequence: Synthetic oligonucleotide
gcacuacagcacaccaugu

SEQ ID NO: 2312715 - RNA, 19 nt, Artificial Sequence
  Description of Artificial Sequence: Synthetic oligonucleotide
ccaauguggacaggauggu

SEQ ID NO: 2312716 - RNA, 19 nt, Artificial Sequence
  Description of Artificial Sequence: Synthetic oligonucleotide
cuggucgcauugguggcuu

SEQ ID NO: 2312717 - RNA, 19 nt, Artificial Sequence
  Description of Artificial Sequence: Synthetic oligonucleotide
cguuaguuugcagggcucu

SEQ ID NO: 2312718 - RNA, 19 nt, Artificial Sequence
  Description of Artificial Sequence: Synthetic oligonucleotide
gcgaggccccagcccagaa

SEQ ID NO: 2312719 - RNA, 19 nt, Artificial Sequence
  Description of Artificial Sequence: Synthetic oligonucleotide
cggcuauuuucaggugcga

SEQ ID NO: 2312720 - RNA, 19 nt, Artificial Sequence
  Description of Artificial Sequence: Synthetic oligonucleotide
aauaucuagaucuauggac

SEQ ID NO: 2312721 - RNA, 19 nt, Artificial Sequence
  Description of Artificial Sequence: Synthetic oligonucleotide
uuugcuaucucaauaacca

SEQ ID NO: 2312722 - RNA, 19 nt, Artificial Sequence
  Description of Artificial Sequence: Synthetic oligonucleotide
ugucgaauagaagagaugg

SEQ ID NO: 2312723 - RNA, 19 nt, Artificial Sequence
  Description of Artificial Sequence: Synthetic oligonucleotide
aaacaguaggaccagaaca

SEQ ID NO: 2312724 - RNA, 19 nt, Artificial Sequence
  Description of Artificial Sequence: Synthetic oligonucleotide
aaaacaguaggaccagaac

SEQ ID NO: 2312725 - RNA, 19 nt, Artificial Sequence
  Description of Artificial Sequence: Synthetic oligonucleotide
aagggacagauucuguucc

SEQ ID NO: 2312726 - RNA, 19 nt, Artificial Sequence
  Description of Artificial Sequence: Synthetic oligonucleotide
gaaagaaaacaguaggacc

SEQ ID NO: 2312727 - RNA, 19 nt, Artificial Sequence
  Description of Artificial Sequence: Synthetic oligonucleotide
aggaccagaacacacgugc

SEQ ID NO: 2312728 - RNA, 19 nt, Artificial Sequence
  Description of Artificial Sequence: Synthetic oligonucleotide
aaagaaaacaguaggacca

SEQ ID NO: 2312729 - RNA, 19 nt, Artificial Sequence
  Description of Artificial Sequence: Synthetic oligonucleotide
ugcaacacaacauacucag

SEQ ID NO: 2312730 - RNA, 19 nt, Artificial Sequence
  Description of Artificial Sequence: Synthetic oligonucleotide
aguaguuguggucaugucg

SEQ ID NO: 2312731 - RNA, 19 nt, Artificial Sequence
  Description of Artificial Sequence: Synthetic oligonucleotide
auagaagagauggaggagc

SEQ ID NO: 2312732 - RNA, 19 nt, Artificial Sequence
  Description of Artificial Sequence: Synthetic oligonucleotide
ugagcuacccagcagcugg

SEQ ID NO: 2312733 - RNA, 19 nt, Artificial Sequence
  Description of Artificial Sequence: Synthetic oligonucleotide
aacaguaggaccagaacac

SEQ ID NO: 2312734 - RNA, 19 nt, Artificial Sequence
  Description of Artificial Sequence: Synthetic oligonucleotide
aauaaccauggccugaagu

SEQ ID NO: 2312735 - RNA, 19 nt, Artificial Sequence
  Description of Artificial Sequence: Synthetic oligonucleotide
gaauagaagagauggagga

SEQ ID NO: 2312736 - RNA, 19 nt, Artificial Sequence
  Description of Artificial Sequence: Synthetic oligonucleotide
aauucguauuuuguucugc

SEQ ID NO: 2312737 - RNA, 19 nt, Artificial Sequence
  Description of Artificial Sequence: Synthetic oligonucleotide
uucaguugaucuagaaggg

SEQ ID NO: 2312738 - RNA, 19 nt, Artificial Sequence
  Description of Artificial Sequence: Synthetic oligonucleotide
ucguauuuuguucugcagc

SEQ ID NO: 2312739 - RNA, 19 nt, Artificial Sequence
  Description of Artificial Sequence: Synthetic oligonucleotide
ucuagaauucguauuuugu

SEQ ID NO: 2312740 - RNA, 19 nt, Artificial Sequence
  Description of Artificial Sequence: Synthetic oligonucleotide
ucgaauagaagagauggag

SEQ ID NO: 2312741 - RNA, 19 nt, Artificial Sequence
  Description of Artificial Sequence: Synthetic oligonucleotide
aaccccuccuuuucaaagc

SEQ ID NO: 2312742 - RNA, 19 nt, Artificial Sequence
  Description of Artificial Sequence: Synthetic oligonucleotide
agaacauccagcgaugccg

SEQ ID NO: 2312743 - RNA, 19 nt, Artificial Sequence
  Description of Artificial Sequence: Synthetic oligonucleotide
caguaaauccucuaccucc

SEQ ID NO: 2312744 - RNA, 19 nt, Artificial Sequence
  Description of Artificial Sequence: Synthetic oligonucleotide
aagacccugcucuccaacc

SEQ ID NO: 2312745 - RNA, 19 nt, Artificial Sequence
  Description of Artificial Sequence: Synthetic oligonucleotide
uguuucgaaucuuucuccg

SEQ ID NO: 2312746 - RNA, 19 nt, Artificial Sequence
  Description of Artificial Sequence: Synthetic oligonucleotide
ugcuaucucaauaaccaug

SEQ ID NO: 2312747 - RNA, 19 nt, Artificial Sequence
  Description of Artificial Sequence: Synthetic oligonucleotide
uagaucuauggacacaugu

SEQ ID NO: 2312748 - RNA, 19 nt, Artificial Sequence
  Description of Artificial Sequence: Synthetic oligonucleotide
agaauucguauuuuguucu

SEQ ID NO: 2312749 - RNA, 19 nt, Artificial Sequence
  Description of Artificial Sequence: Synthetic oligonucleotide
aacccucccacauacaccu

SEQ ID NO: 2312750 - RNA, 19 nt, Artificial Sequence
  Description of Artificial Sequence: Synthetic oligonucleotide
uuugagaaccuguuccucc

SEQ ID NO: 2312751 - RNA, 19 nt, Artificial Sequence
  Description of Artificial Sequence: Synthetic oligonucleotide
gagcugagaacauccagcg

SEQ ID NO: 2312752 - RNA, 19 nt, Artificial Sequence
  Description of Artificial Sequence: Synthetic oligonucleotide
aauccucuaccucccaguc

SEQ ID NO: 2312753 - RNA, 19 nt, Artificial Sequence
  Description of Artificial Sequence: Synthetic oligonucleotide
uuuucaaagcucccaauau

SEQ ID NO: 2312754 - RNA, 19 nt, Artificial Sequence
  Description of Artificial Sequence: Synthetic oligonucleotide
gaucuauggacacauguuc

SEQ ID NO: 2312755 - RNA, 19 nt, Artificial Sequence
  Description of Artificial Sequence: Synthetic oligonucleotide
agcucaguaaauccucuac

SEQ ID NO: 2312756 - RNA, 19 nt, Artificial Sequence
  Description of Artificial Sequence: Synthetic oligonucleotide
aauagaagagauggaggag

SEQ ID NO: 2312757 - RNA, 19 nt, Artificial Sequence
  Description of Artificial Sequence: Synthetic oligonucleotide
ucuuguuucgaaucuuucu

SEQ ID NO: 2312758 - RNA, 19 nt, Artificial Sequence
  Description of Artificial Sequence: Synthetic oligonucleotide
cuuguuucgaaucuuucuc

SEQ ID NO: 2312759 - RNA, 19 nt, Artificial Sequence
  Description of Artificial Sequence: Synthetic oligonucleotide
acaggcauuggagucacgc

SEQ ID NO: 2312760 - RNA, 19 nt, Artificial Sequence
  Description of Artificial Sequence: Synthetic oligonucleotide
aguaaauccucuaccuccc

SEQ ID NO: 2312761 - RNA, 19 nt, Artificial Sequence
  Description of Artificial Sequence: Synthetic oligonucleotide
uuguuucgaaucuuucucc

SEQ ID NO: 2312762 - RNA, 19 nt, Artificial Sequence
  Description of Artificial Sequence: Synthetic oligonucleotide
aaauccucuaccucccagu

SEQ ID NO: 2312763 - RNA, 19 nt, Artificial Sequence
  Description of Artificial Sequence: Synthetic oligonucleotide
aucuauggacacauguucc

SEQ ID NO: 2312764 - RNA, 19 nt, Artificial Sequence
  Description of Artificial Sequence: Synthetic oligonucleotide
ucagaggaguacauagcag

SEQ ID NO: 2312765 - RNA, 19 nt, Artificial Sequence
  Description of Artificial Sequence: Synthetic oligonucleotide
ggucaugucgaauagaaga

SEQ ID NO: 2312766 - RNA, 19 nt, Artificial Sequence
  Description of Artificial Sequence: Synthetic oligonucleotide
caaagcucccaauaucuag

SEQ ID NO: 2312767 - RNA, 19 nt, Artificial Sequence
  Description of Artificial Sequence: Synthetic oligonucleotide
aggcaugcaguguaggagg

SEQ ID NO: 2312768 - RNA, 19 nt, Artificial Sequence
  Description of Artificial Sequence: Synthetic oligonucleotide
aaucuuucuccguauccgu

SEQ ID NO: 2312769 - RNA, 19 nt, Artificial Sequence
  Description of Artificial Sequence: Synthetic oligonucleotide
ugaucuagaagggacagau

SEQ ID NO: 2312770 - RNA, 19 nt, Artificial Sequence
  Description of Artificial Sequence: Synthetic oligonucleotide
acauacaccuucuucuucu

SEQ ID NO: 2312771 - RNA, 19 nt, Artificial Sequence
  Description of Artificial Sequence: Synthetic oligonucleotide
auaucuagaucuauggaca

SEQ ID NO: 2312772 - RNA, 19 nt, Artificial Sequence
  Description of Artificial Sequence: Synthetic oligonucleotide
gaugccgagggacugagca

SEQ ID NO: 2312773 - RNA, 19 nt, Artificial Sequence
  Description of Artificial Sequence: Synthetic oligonucleotide
ugugggagggaguaguugu

SEQ ID NO: 2312774 - RNA, 19 nt, Artificial Sequence
  Description of Artificial Sequence: Synthetic oligonucleotide
uccuccaccuuugugagag

SEQ ID NO: 2312775 - RNA, 19 nt, Artificial Sequence
  Description of Artificial Sequence: Synthetic oligonucleotide
ugucagaggaguacauagc

SEQ ID NO: 2312776 - RNA, 19 nt, Artificial Sequence
  Description of Artificial Sequence: Synthetic oligonucleotide
uccucuagaauucguauuu

SEQ ID NO: 2312777 - RNA, 19 nt, Artificial Sequence
  Description of Artificial Sequence: Synthetic oligonucleotide
ucuagaucuauggacacau

SEQ ID NO: 2312778 - RNA, 19 nt, Artificial Sequence
  Description of Artificial Sequence: Synthetic oligonucleotide
auuucaagacccugcucuc

SEQ ID NO: 2312779 - RNA, 19 nt, Artificial Sequence
  Description of Artificial Sequence: Synthetic oligonucleotide
gaaccccuccuuuucaaag

SEQ ID NO: 2312780 - RNA, 19 nt, Artificial Sequence
  Description of Artificial Sequence: Synthetic oligonucleotide
ucuauggacacauguuccu

SEQ ID NO: 2312781 - RNA, 19 nt, Artificial Sequence
  Description of Artificial Sequence: Synthetic oligonucleotide
uccuucagugacuuugacc

SEQ ID NO: 2312782 - RNA, 19 nt, Artificial Sequence
  Description of Artificial Sequence: Synthetic oligonucleotide
cuagaaaucuccugcucug

SEQ ID NO: 2312783 - RNA, 19 nt, Artificial Sequence
  Description of Artificial Sequence: Synthetic oligonucleotide
uuucgaaucuuucuccgua

SEQ ID NO: 2312784 - RNA, 19 nt, Artificial Sequence
  Description of Artificial Sequence: Synthetic oligonucleotide
guuugcuaucucaauaacc

SEQ ID NO: 2312785 - RNA, 19 nt, Artificial Sequence
  Description of Artificial Sequence: Synthetic oligonucleotide
uuugugagaggaagugcug

SEQ ID NO: 2312786 - RNA, 19 nt, Artificial Sequence
  Description of Artificial Sequence: Synthetic oligonucleotide
aaagcucccaauaucuaga

SEQ ID NO: 2312787 - RNA, 19 nt, Artificial Sequence
  Description of Artificial Sequence: Synthetic oligonucleotide
uguuugcuaucucaauaac

SEQ ID NO: 2312788 - RNA, 19 nt, Artificial Sequence
  Description of Artificial Sequence: Synthetic oligonucleotide
uauccguuugagaaccugu

SEQ ID NO: 2312789 - RNA, 19 nt, Artificial Sequence
  Description of Artificial Sequence: Synthetic oligonucleotide
cauccagcgaugccgaggg

SEQ ID NO: 2312790 - RNA, 19 nt, Artificial Sequence
  Description of Artificial Sequence: Synthetic oligonucleotide
ucagccuagaaaucuccug

SEQ ID NO: 2312791 - RNA, 19 nt, Artificial Sequence
  Description of Artificial Sequence: Synthetic oligonucleotide
aguaggaccagaacacacg

SEQ ID NO: 2312792 - RNA, 19 nt, Artificial Sequence
  Description of Artificial Sequence: Synthetic oligonucleotide
auucguauuuuguucugca

SEQ ID NO: 2312793 - RNA, 19 nt, Artificial Sequence
  Description of Artificial Sequence: Synthetic oligonucleotide
uugaccgcugggcaggcag

SEQ ID NO: 2312794 - RNA, 19 nt, Artificial Sequence
  Description of Artificial Sequence: Synthetic oligonucleotide
uagaagagauggaggagcu

SEQ ID NO: 2312795 - RNA, 19 nt, Artificial Sequence
  Description of Artificial Sequence: Synthetic oligonucleotide
uuguggucaugucgaauag

SEQ ID NO: 2312796 - RNA, 19 nt, Artificial Sequence
  Description of Artificial Sequence: Synthetic oligonucleotide
uaucuagaucuauggacac

SEQ ID NO: 2312797 - RNA, 19 nt, Artificial Sequence
  Description of Artificial Sequence: Synthetic oligonucleotide
ucugccugaggcaugcagu

SEQ ID NO: 2312798 - RNA, 19 nt, Artificial Sequence
  Description of Artificial Sequence: Synthetic oligonucleotide
ugacuuugaccgcugggca

SEQ ID NO: 2312799 - RNA, 19 nt, Artificial Sequence
  Description of Artificial Sequence: Synthetic oligonucleotide
uguguauuucaagacccug

SEQ ID NO: 2312800 - RNA, 19 nt, Artificial Sequence
  Description of Artificial Sequence: Synthetic oligonucleotide
cucuagaauucguauuuug

SEQ ID NO: 2312801 - RNA, 19 nt, Artificial Sequence
  Description of Artificial Sequence: Synthetic oligonucleotide
ggacacauguuccuguggg

SEQ ID NO: 2312802 - RNA, 19 nt, Artificial Sequence
  Description of Artificial Sequence: Synthetic oligonucleotide
aaggccggcagcuccaagu

SEQ ID NO: 2312803 - RNA, 19 nt, Artificial Sequence
  Description of Artificial Sequence: Synthetic oligonucleotide
uguuccucuagaauucgua

SEQ ID NO: 2312804 - RNA, 19 nt, Artificial Sequence
  Description of Artificial Sequence: Synthetic oligonucleotide
acauacucagcuggcacac

SEQ ID NO: 2312805 - RNA, 19 nt, Artificial Sequence
  Description of Artificial Sequence: Synthetic oligonucleotide
ucuugcggcuuucuugagc

SEQ ID NO: 2312806 - RNA, 19 nt, Artificial Sequence
  Description of Artificial Sequence: Synthetic oligonucleotide
guugaucuagaagggacag

SEQ ID NO: 2312807 - RNA, 19 nt, Artificial Sequence
  Description of Artificial Sequence: Synthetic oligonucleotide
agucacgcggaaccccucc

SEQ ID NO: 2312808 - RNA, 19 nt, Artificial Sequence
  Description of Artificial Sequence: Synthetic oligonucleotide
aagugcugagggcagacua

SEQ ID NO: 2312809 - RNA, 19 nt, Artificial Sequence
  Description of Artificial Sequence: Synthetic oligonucleotide
aaucuccugcucuguaacu

SEQ ID NO: 2312810 - RNA, 19 nt, Artificial Sequence
  Description of Artificial Sequence: Synthetic oligonucleotide
ugacaguccucacugggaa

SEQ ID NO: 2312811 - RNA, 19 nt, Artificial Sequence
  Description of Artificial Sequence: Synthetic oligonucleotide
aagcugacggugcaacaca

SEQ ID NO: 2312812 - RNA, 19 nt, Artificial Sequence
  Description of Artificial Sequence: Synthetic oligonucleotide
uggagcaucugcucugagc

SEQ ID NO: 2312813 - RNA, 19 nt, Artificial Sequence
  Description of Artificial Sequence: Synthetic oligonucleotide
ugaggcaugcaguguagga

SEQ ID NO: 2312814 - RNA, 19 nt, Artificial Sequence
  Description of Artificial Sequence: Synthetic oligonucleotide
uggucaugucgaauagaag

SEQ ID NO: 2312815 - RNA, 19 nt, Artificial Sequence
  Description of Artificial Sequence: Synthetic oligonucleotide
ggugcaacacaacauacuc

SEQ ID NO: 2312816 - RNA, 19 nt, Artificial Sequence
  Description of Artificial Sequence: Synthetic oligonucleotide
gacuuugaccgcugggcag

SEQ ID NO: 2312817 - RNA, 19 nt, Artificial Sequence
  Description of Artificial Sequence: Synthetic oligonucleotide
agcaucagccuagaaaucu

SEQ ID NO: 2312818 - RNA, 19 nt, Artificial Sequence
  Description of Artificial Sequence: Synthetic oligonucleotide
ucuaccucccagucgcuca

SEQ ID NO: 2312819 - RNA, 19 nt, Artificial Sequence
  Description of Artificial Sequence: Synthetic oligonucleotide
cuugcggcuuucuugagca

SEQ ID NO: 2312820 - RNA, 19 nt, Artificial Sequence
  Description of Artificial Sequence: Synthetic oligonucleotide
cacauguuccugugggagg

SEQ ID NO: 2312821 - RNA, 19 nt, Artificial Sequence
  Description of Artificial Sequence: Synthetic oligonucleotide
guaguuguggucaugucga

SEQ ID NO: 2312822 - RNA, 19 nt, Artificial Sequence
  Description of Artificial Sequence: Synthetic oligonucleotide
acacauguuccugugggag

SEQ ID NO: 2312823 - RNA, 19 nt, Artificial Sequence
  Description of Artificial Sequence: Synthetic oligonucleotide
cuccguauccguuugagaa

SEQ ID NO: 2312824 - RNA, 19 nt, Artificial Sequence
  Description of Artificial Sequence: Synthetic oligonucleotide
cagaguucucggaaaggcc

SEQ ID NO: 2312825 - RNA, 19 nt, Artificial Sequence
  Description of Artificial Sequence: Synthetic oligonucleotide
gagauggaggagcugagaa

SEQ ID NO: 2312826 - RNA, 19 nt, Artificial Sequence
  Description of Artificial Sequence: Synthetic oligonucleotide
caacauacucagcuggcac

SEQ ID NO: 2312827 - RNA, 19 nt, Artificial Sequence
  Description of Artificial Sequence: Synthetic oligonucleotide
uucagugacuuugaccgcu

SEQ ID NO: 2312828 - RNA, 19 nt, Artificial Sequence
  Description of Artificial Sequence: Synthetic oligonucleotide
cagacuaagccccuccuuc

SEQ ID NO: 2312829 - RNA, 19 nt, Artificial Sequence
  Description of Artificial Sequence: Synthetic oligonucleotide
gaaaacaguaggaccagaa

SEQ ID NO: 2312830 - RNA, 19 nt, Artificial Sequence
  Description of Artificial Sequence: Synthetic oligonucleotide
ucccacauacaccuucuuc

SEQ ID NO: 2312831 - RNA, 19 nt, Artificial Sequence
  Description of Artificial Sequence: Synthetic oligonucleotide
gaagcugacggugcaacac

SEQ ID NO: 2312832 - RNA, 19 nt, Artificial Sequence
  Description of Artificial Sequence: Synthetic oligonucleotide
ucucuuguuucgaaucuuu

SEQ ID NO: 2312833 - RNA, 19 nt, Artificial Sequence
  Description of Artificial Sequence: Synthetic oligonucleotide
agggacugagcagagagcu

SEQ ID NO: 2312834 - RNA, 19 nt, Artificial Sequence
  Description of Artificial Sequence: Synthetic oligonucleotide
gcucccaauaucuagaucu

SEQ ID NO: 2312835 - RNA, 19 nt, Artificial Sequence
  Description of Artificial Sequence: Synthetic oligonucleotide
gaaaucuccugcucuguaa

SEQ ID NO: 2312836 - RNA, 19 nt, Artificial Sequence
  Description of Artificial Sequence: Synthetic oligonucleotide
ugacggugcaacacaacau

SEQ ID NO: 2312837 - RNA, 19 nt, Artificial Sequence
  Description of Artificial Sequence: Synthetic oligonucleotide
aguacauagcagguacaag

SEQ ID NO: 2312838 - RNA, 19 nt, Artificial Sequence
  Description of Artificial Sequence: Synthetic oligonucleotide
uacucagcuggcacacucc

SEQ ID NO: 2312839 - RNA, 19 nt, Artificial Sequence
  Description of Artificial Sequence: Synthetic oligonucleotide
uugugagaggaagugcuga

SEQ ID NO: 2312840 - RNA, 19 nt, Artificial Sequence
  Description of Artificial Sequence: Synthetic oligonucleotide
caguaggaccagaacacac

SEQ ID NO: 2312841 - RNA, 19 nt, Artificial Sequence
  Description of Artificial Sequence: Synthetic oligonucleotide
ucucggaaaggccggcagc

SEQ ID NO: 2312842 - RNA, 19 nt, Artificial Sequence
  Description of Artificial Sequence: Synthetic oligonucleotide
gcuguguauuucaagaccc

SEQ ID NO: 2312843 - RNA, 19 nt, Artificial Sequence
  Description of Artificial Sequence: Synthetic oligonucleotide
caggcauuggagucacgcg

SEQ ID NO: 2312844 - RNA, 19 nt, Artificial Sequence
  Description of Artificial Sequence: Synthetic oligonucleotide
ugagaacauccagcgaugc

SEQ ID NO: 2312845 - RNA, 19 nt, Artificial Sequence
  Description of Artificial Sequence: Synthetic oligonucleotide
caauaucuagaucuaugga

SEQ ID NO: 2312846 - RNA, 19 nt, Artificial Sequence
  Description of Artificial Sequence: Synthetic oligonucleotide
uccguauccguuugagaac

SEQ ID NO: 2312847 - RNA, 19 nt, Artificial Sequence
  Description of Artificial Sequence: Synthetic oligonucleotide
aagcucccaauaucuagau

SEQ ID NO: 2312848 - RNA, 19 nt, Artificial Sequence
  Description of Artificial Sequence: Synthetic oligonucleotide
ucaaagcucccaauaucua

SEQ ID NO: 2312849 - RNA, 19 nt, Artificial Sequence
  Description of Artificial Sequence: Synthetic oligonucleotide
uucuccguauccguuugag

SEQ ID NO: 2312850 - RNA, 19 nt, Artificial Sequence
  Description of Artificial Sequence: Synthetic oligonucleotide
gguggcgucugccugaggc

SEQ ID NO: 2312851 - RNA, 19 nt, Artificial Sequence
  Description of Artificial Sequence: Synthetic oligonucleotide
acgaagcugacggugcaac

SEQ ID NO: 2312852 - RNA, 19 nt, Artificial Sequence
  Description of Artificial Sequence: Synthetic oligonucleotide
uccguuugagaaccuguuc

SEQ ID NO: 2312853 - RNA, 19 nt, Artificial Sequence
  Description of Artificial Sequence: Synthetic oligonucleotide
ucgcucagugcuugcacag

SEQ ID NO: 2312854 - RNA, 19 nt, Artificial Sequence
  Description of Artificial Sequence: Synthetic oligonucleotide
ugggcaggcagcuucuccu

SEQ ID NO: 2312855 - RNA, 19 nt, Artificial Sequence
  Description of Artificial Sequence: Synthetic oligonucleotide
cugagaacauccagcgaug

SEQ ID NO: 2312856 - RNA, 19 nt, Artificial Sequence
  Description of Artificial Sequence: Synthetic oligonucleotide
agagagcucaguaaauccu

SEQ ID NO: 2312857 - RNA, 19 nt, Artificial Sequence
  Description of Artificial Sequence: Synthetic oligonucleotide
ccguuugagaaccuguucc

SEQ ID NO: 2312858 - RNA, 19 nt, Artificial Sequence
  Description of Artificial Sequence: Synthetic oligonucleotide
caacccucccacauacacc

SEQ ID NO: 2312859 - RNA, 19 nt, Artificial Sequence
  Description of Artificial Sequence: Synthetic oligonucleotide
cuuuucaaagcucccaaua

SEQ ID NO: 2312860 - RNA, 19 nt, Artificial Sequence
  Description of Artificial Sequence: Synthetic oligonucleotide
uuucaagacccugcucucc

SEQ ID NO: 2312861 - RNA, 19 nt, Artificial Sequence
  Description of Artificial Sequence: Synthetic oligonucleotide
cagcggagccuccacaucc

SEQ ID NO: 2312862 - RNA, 19 nt, Artificial Sequence
  Description of Artificial Sequence: Synthetic oligonucleotide
ucuuucuccguauccguuu

SEQ ID NO: 2312863 - RNA, 19 nt, Artificial Sequence
  Description of Artificial Sequence: Synthetic oligonucleotide
gacggugcaacacaacaua

SEQ ID NO: 2312864 - RNA, 19 nt, Artificial Sequence
  Description of Artificial Sequence: Synthetic oligonucleotide
cugacggugcaacacaaca

SEQ ID NO: 2312865 - RNA, 19 nt, Artificial Sequence
  Description of Artificial Sequence: Synthetic oligonucleotide
agacuaagccccuccuucu

SEQ ID NO: 2312866 - RNA, 19 nt, Artificial Sequence
  Description of Artificial Sequence: Synthetic oligonucleotide
uuccucuagaauucguauu

SEQ ID NO: 2312867 - RNA, 19 nt, Artificial Sequence
  Description of Artificial Sequence: Synthetic oligonucleotide
uucgaaucuuucuccguau

SEQ ID NO: 2312868 - RNA, 19 nt, Artificial Sequence
  Description of Artificial Sequence: Synthetic oligonucleotide
acggugcaacacaacauac

SEQ ID NO: 2312869 - RNA, 19 nt, Artificial Sequence
  Description of Artificial Sequence: Synthetic oligonucleotide
ucgaaucuuucuccguauc

SEQ ID NO: 2312870 - RNA, 19 nt, Artificial Sequence
  Description of Artificial Sequence: Synthetic oligonucleotide
gaguucucggaaaggccgg

SEQ ID NO: 2312871 - RNA, 19 nt, Artificial Sequence
  Description of Artificial Sequence: Synthetic oligonucleotide
ggagcugagaacauccagc

SEQ ID NO: 2312872 - RNA, 19 nt, Artificial Sequence
  Description of Artificial Sequence: Synthetic oligonucleotide
uaggaccagaacacacgug

SEQ ID NO: 2312873 - RNA, 19 nt, Artificial Sequence
  Description of Artificial Sequence: Synthetic oligonucleotide
gcagguacaagaagaaggc

SEQ ID NO: 2312874 - RNA, 19 nt, Artificial Sequence
  Description of Artificial Sequence: Synthetic oligonucleotide
agccuagaaaucuccugcu

SEQ ID NO: 2312875 - RNA, 19 nt, Artificial Sequence
  Description of Artificial Sequence: Synthetic oligonucleotide
agcucccaauaucuagauc

SEQ ID NO: 2312876 - RNA, 19 nt, Artificial Sequence
  Description of Artificial Sequence: Synthetic oligonucleotide
acauccagcgaugccgagg

SEQ ID NO: 2312877 - RNA, 19 nt, Artificial Sequence
  Description of Artificial Sequence: Synthetic oligonucleotide
ugcggcuuucuugagcagc

SEQ ID NO: 2312878 - RNA, 19 nt, Artificial Sequence
  Description of Artificial Sequence: Synthetic oligonucleotide
cuccaaguccagcggagcc

SEQ ID NO: 2312879 - RNA, 19 nt, Artificial Sequence
  Description of Artificial Sequence: Synthetic oligonucleotide
gagcagcucucuuguuucg

SEQ ID NO: 2312880 - RNA, 19 nt, Artificial Sequence
  Description of Artificial Sequence: Synthetic oligonucleotide
cuuucuccguauccguuug

SEQ ID NO: 2312881 - RNA, 19 nt, Artificial Sequence
  Description of Artificial Sequence: Synthetic oligonucleotide
cucaguaaauccucuaccu

SEQ ID NO: 2312882 - RNA, 19 nt, Artificial Sequence
  Description of Artificial Sequence: Synthetic oligonucleotide
ucuccguauccguuugaga

SEQ ID NO: 2312883 - RNA, 19 nt, Artificial Sequence
  Description of Artificial Sequence: Synthetic oligonucleotide
gccuccacaucccugcucg

SEQ ID NO: 2312884 - RNA, 19 nt, Artificial Sequence
  Description of Artificial Sequence: Synthetic oligonucleotide
aguucucggaaaggccggc

SEQ ID NO: 2312885 - RNA, 19 nt, Artificial Sequence
  Description of Artificial Sequence: Synthetic oligonucleotide
uccagcgaugccgagggac

SEQ ID NO: 2312886 - RNA, 19 nt, Artificial Sequence
  Description of Artificial Sequence: Synthetic oligonucleotide
uugcuaucucaauaaccau

SEQ ID NO: 2312887 - RNA, 19 nt, Artificial Sequence
  Description of Artificial Sequence: Synthetic oligonucleotide
uguggucaugucgaauaga

SEQ ID NO: 2312888 - RNA, 19 nt, Artificial Sequence
  Description of Artificial Sequence: Synthetic oligonucleotide
uguaggaggcaggaagcgu

SEQ ID NO: 2312889 - RNA, 19 nt, Artificial Sequence
  Description of Artificial Sequence: Synthetic oligonucleotide
ugcugagggcagacuaagc

SEQ ID NO: 2312890 - RNA, 19 nt, Artificial Sequence
  Description of Artificial Sequence: Synthetic oligonucleotide
cugccugaggcaugcagug

SEQ ID NO: 2312891 - RNA, 19 nt, Artificial Sequence
  Description of Artificial Sequence: Synthetic oligonucleotide
cuagaauucguauuuuguu

SEQ ID NO: 2312892 - RNA, 19 nt, Artificial Sequence
  Description of Artificial Sequence: Synthetic oligonucleotide
gaguacauagcagguacaa

SEQ ID NO: 2312893 - RNA, 19 nt, Artificial Sequence
  Description of Artificial Sequence: Synthetic oligonucleotide
cuucagugacuuugaccgc

SEQ ID NO: 2312894 - RNA, 19 nt, Artificial Sequence
  Description of Artificial Sequence: Synthetic oligonucleotide
gucugccugaggcaugcag

SEQ ID NO: 2312895 - RNA, 19 nt, Artificial Sequence
  Description of Artificial Sequence: Synthetic oligonucleotide
cuauggacacauguuccug

SEQ ID NO: 2312896 - RNA, 19 nt, Artificial Sequence
  Description of Artificial Sequence: Synthetic oligonucleotide
agaucuauggacacauguu

SEQ ID NO: 2312897 - RNA, 19 nt, Artificial Sequence
  Description of Artificial Sequence: Synthetic oligonucleotide
gacacauguuccuguggga

SEQ ID NO: 2312898 - RNA, 19 nt, Artificial Sequence
  Description of Artificial Sequence: Synthetic oligonucleotide
uugugucagaggaguacau

SEQ ID NO: 2312899 - RNA, 19 nt, Artificial Sequence
  Description of Artificial Sequence: Synthetic oligonucleotide
agaggaguacauagcaggu

SEQ ID NO: 2312900 - RNA, 19 nt, Artificial Sequence
  Description of Artificial Sequence: Synthetic oligonucleotide
cuagaucuauggacacaug

SEQ ID NO: 2312901 - RNA, 19 nt, Artificial Sequence
  Description of Artificial Sequence: Synthetic oligonucleotide
uuucuccguauccguuuga

SEQ ID NO: 2312902 - RNA, 19 nt, Artificial Sequence
  Description of Artificial Sequence: Synthetic oligonucleotide
uugaucuagaagggacaga

SEQ ID NO: 2312903 - RNA, 19 nt, Artificial Sequence
  Description of Artificial Sequence: Synthetic oligonucleotide
uaaccauggccugaaguuu

SEQ ID NO: 2312904 - RNA, 19 nt, Artificial Sequence
  Description of Artificial Sequence: Synthetic oligonucleotide
caugucgaauagaagagau

SEQ ID NO: 2312905 - RNA, 19 nt, Artificial Sequence
  Description of Artificial Sequence: Synthetic oligonucleotide
ucuccugaugacaguccuc

SEQ ID NO: 2312906 - RNA, 19 nt, Artificial Sequence
  Description of Artificial Sequence: Synthetic oligonucleotide
ugugucagaggaguacaua

SEQ ID NO: 2312907 - RNA, 19 nt, Artificial Sequence
  Description of Artificial Sequence: Synthetic oligonucleotide
augucgaauagaagagaug

SEQ ID NO: 2312908 - RNA, 19 nt, Artificial Sequence
  Description of Artificial Sequence: Synthetic oligonucleotide
uccagcggagccuccacau

SEQ ID NO: 2312909 - RNA, 19 nt, Artificial Sequence
  Description of Artificial Sequence: Synthetic oligonucleotide
ucuccaacccucccacaua

SEQ ID NO: 2312910 - RNA, 19 nt, Artificial Sequence
  Description of Artificial Sequence: Synthetic oligonucleotide
gcucagugcuugcacagag

SEQ ID NO: 2312911 - RNA, 19 nt, Artificial Sequence
  Description of Artificial Sequence: Synthetic oligonucleotide
cuccugaugacaguccuca

SEQ ID NO: 2312912 - RNA, 19 nt, Artificial Sequence
  Description of Artificial Sequence: Synthetic oligonucleotide
guauccguuugagaaccug

SEQ ID NO: 2312913 - RNA, 19 nt, Artificial Sequence
  Description of Artificial Sequence: Synthetic oligonucleotide
acaguaggaccagaacaca

SEQ ID NO: 2312914 - RNA, 19 nt, Artificial Sequence
  Description of Artificial Sequence: Synthetic oligonucleotide
guaggaccagaacacacgu

SEQ ID NO: 2312915 - RNA, 19 nt, Artificial Sequence
  Description of Artificial Sequence: Synthetic oligonucleotide
gacuaagccccuccuucuc

SEQ ID NO: 2312916 - RNA, 19 nt, Artificial Sequence
  Description of Artificial Sequence: Synthetic oligonucleotide
uccugcucuguaacuguau

SEQ ID NO: 2312917 - RNA, 19 nt, Artificial Sequence
  Description of Artificial Sequence: Synthetic oligonucleotide
caagacccugcucuccaac

SEQ ID NO: 2312918 - RNA, 19 nt, Artificial Sequence
  Description of Artificial Sequence: Synthetic oligonucleotide
uggagucacgcggaacccc

SEQ ID NO: 2312919 - RNA, 19 nt, Artificial Sequence
  Description of Artificial Sequence: Synthetic oligonucleotide
ugaccgcugggcaggcagc

SEQ ID NO: 2312920 - RNA, 19 nt, Artificial Sequence
  Description of Artificial Sequence: Synthetic oligonucleotide
cacgugcugccgcugcugg

SEQ ID NO: 2312921 - RNA, 19 nt, Artificial Sequence
  Description of Artificial Sequence: Synthetic oligonucleotide
cugaggcaugcaguguagg

SEQ ID NO: 2312922 - RNA, 19 nt, Artificial Sequence
  Description of Artificial Sequence: Synthetic oligonucleotide
guuugagaaccuguuccuc

SEQ ID NO: 2312923 - RNA, 19 nt, Artificial Sequence
  Description of Artificial Sequence: Synthetic oligonucleotide
uucuugcggcuuucuugag

SEQ ID NO: 2312924 - RNA, 19 nt, Artificial Sequence
  Description of Artificial Sequence: Synthetic oligonucleotide
agcugagaacauccagcga

SEQ ID NO: 2312925 - RNA, 19 nt, Artificial Sequence
  Description of Artificial Sequence: Synthetic oligonucleotide
agccuccacaucccugcuc

SEQ ID NO: 2312926 - RNA, 19 nt, Artificial Sequence
  Description of Artificial Sequence: Synthetic oligonucleotide
agcggagccuccacauccc

SEQ ID NO: 2312927 - RNA, 19 nt, Artificial Sequence
  Description of Artificial Sequence: Synthetic oligonucleotide
augacaguccucacuggga

SEQ ID NO: 2312928 - RNA, 19 nt, Artificial Sequence
  Description of Artificial Sequence: Synthetic oligonucleotide
gugcugagggcagacuaag

SEQ ID NO: 2312929 - RNA, 19 nt, Artificial Sequence
  Description of Artificial Sequence: Synthetic oligonucleotide
cagugacuuugaccgcugg

SEQ ID NO: 2312930 - RNA, 19 nt, Artificial Sequence
  Description of Artificial Sequence: Synthetic oligonucleotide
guuccucuagaauucguau

SEQ ID NO: 2312931 - RNA, 19 nt, Artificial Sequence
  Description of Artificial Sequence: Synthetic oligonucleotide
aacacacgugcugccgcug

SEQ ID NO: 2312932 - RNA, 19 nt, Artificial Sequence
  Description of Artificial Sequence: Synthetic oligonucleotide
ucccaauaucuagaucuau

SEQ ID NO: 2312933 - RNA, 19 nt, Artificial Sequence
  Description of Artificial Sequence: Synthetic oligonucleotide
accucccagucgcucagug

SEQ ID NO: 2312934 - RNA, 19 nt, Artificial Sequence
  Description of Artificial Sequence: Synthetic oligonucleotide
ucaagacccugcucuccaa

SEQ ID NO: 2312935 - RNA, 19 nt, Artificial Sequence
  Description of Artificial Sequence: Synthetic oligonucleotide
aucagccuagaaaucuccu

SEQ ID NO: 2312936 - RNA, 19 nt, Artificial Sequence
  Description of Artificial Sequence: Synthetic oligonucleotide
gucgaauagaagagaugga

SEQ ID NO: 2312937 - RNA, 19 nt, Artificial Sequence
  Description of Artificial Sequence: Synthetic oligonucleotide
cucccagucgcucagugcu

SEQ ID NO: 2312938 - RNA, 19 nt, Artificial Sequence
  Description of Artificial Sequence: Synthetic oligonucleotide
cauuggagucacgcggaac

SEQ ID NO: 2312939 - RNA, 19 nt, Artificial Sequence
  Description of Artificial Sequence: Synthetic oligonucleotide
aguuguggucaugucgaau

SEQ ID NO: 2312940 - RNA, 19 nt, Artificial Sequence
  Description of Artificial Sequence: Synthetic oligonucleotide
cacaucccugcucggucgc

SEQ ID NO: 2312941 - RNA, 19 nt, Artificial Sequence
  Description of Artificial Sequence: Synthetic oligonucleotide
ggagggaguaguugugguc

SEQ ID NO: 2312942 - RNA, 19 nt, Artificial Sequence
  Description of Artificial Sequence: Synthetic oligonucleotide
guuucgaaucuuucuccgu

SEQ ID NO: 2312943 - RNA, 19 nt, Artificial Sequence
  Description of Artificial Sequence: Synthetic oligonucleotide
agcuggcuugugcuguccu

SEQ ID NO: 2312944 - RNA, 19 nt, Artificial Sequence
  Description of Artificial Sequence: Synthetic oligonucleotide
uugcggcuuucuugagcag

SEQ ID NO: 2312945 - RNA, 19 nt, Artificial Sequence
  Description of Artificial Sequence: Synthetic oligonucleotide
caucugcucugagcuaccc

SEQ ID NO: 2312946 - RNA, 19 nt, Artificial Sequence
  Description of Artificial Sequence: Synthetic oligonucleotide
gcagagagcucaguaaauc

SEQ ID NO: 2312947 - RNA, 19 nt, Artificial Sequence
  Description of Artificial Sequence: Synthetic oligonucleotide
gagcucaguaaauccucua

SEQ ID NO: 2312948 - RNA, 19 nt, Artificial Sequence
  Description of Artificial Sequence: Synthetic oligonucleotide
gaggaguacauagcaggua

SEQ ID NO: 2312949 - RNA, 19 nt, Artificial Sequence
  Description of Artificial Sequence: Synthetic oligonucleotide
caggcagcuucuccugaug

SEQ ID NO: 2312950 - RNA, 19 nt, Artificial Sequence
  Description of Artificial Sequence: Synthetic oligonucleotide
ccacaucccugcucggucg

SEQ ID NO: 2312951 - RNA, 19 nt, Artificial Sequence
  Description of Artificial Sequence: Synthetic oligonucleotide
agugcugagggcagacuaa

SEQ ID NO: 2312952 - RNA, 19 nt, Artificial Sequence
  Description of Artificial Sequence: Synthetic oligonucleotide
guuccugugggagggagua

SEQ ID NO: 2312953 - RNA, 19 nt, Artificial Sequence
  Description of Artificial Sequence: Synthetic oligonucleotide
agggaguaguuguggucau

SEQ ID NO: 2312954 - RNA, 19 nt, Artificial Sequence
  Description of Artificial Sequence: Synthetic oligonucleotide
agcagagagcucaguaaau

SEQ ID NO: 2312955 - RNA, 19 nt, Artificial Sequence
  Description of Artificial Sequence: Synthetic oligonucleotide
ucacgcggaaccccuccuu

SEQ ID NO: 2312956 - RNA, 19 nt, Artificial Sequence
  Description of Artificial Sequence: Synthetic oligonucleotide
cucagucagcaucagccua

SEQ ID NO: 2312957 - RNA, 19 nt, Artificial Sequence
  Description of Artificial Sequence: Synthetic oligonucleotide
uuccugugggagggaguag

SEQ ID NO: 2312958 - RNA, 19 nt, Artificial Sequence
  Description of Artificial Sequence: Synthetic oligonucleotide
agcagcucucuuguuucga

SEQ ID NO: 2312959 - RNA, 19 nt, Artificial Sequence
  Description of Artificial Sequence: Synthetic oligonucleotide
ccuugugucagaggaguac

SEQ ID NO: 2312960 - RNA, 19 nt, Artificial Sequence
  Description of Artificial Sequence: Synthetic oligonucleotide
cucccaauaucuagaucua

SEQ ID NO: 2312961 - RNA, 19 nt, Artificial Sequence
  Description of Artificial Sequence: Synthetic oligonucleotide
uacccagcagcuggcuugu

SEQ ID NO: 2312962 - RNA, 19 nt, Artificial Sequence
  Description of Artificial Sequence: Synthetic oligonucleotide
guggcgucugccugaggca

SEQ ID NO: 2312963 - RNA, 19 nt, Artificial Sequence
  Description of Artificial Sequence: Synthetic oligonucleotide
auccguuugagaaccuguu

SEQ ID NO: 2312964 - RNA, 19 nt, Artificial Sequence
  Description of Artificial Sequence: Synthetic oligonucleotide
uggcgucugccugaggcau

SEQ ID NO: 2312965 - RNA, 19 nt, Artificial Sequence
  Description of Artificial Sequence: Synthetic oligonucleotide
agggcagacuaagccccuc

SEQ ID NO: 2312966 - RNA, 19 nt, Artificial Sequence
  Description of Artificial Sequence: Synthetic oligonucleotide
caucccugcucggucgcag

SEQ ID NO: 2312967 - RNA, 19 nt, Artificial Sequence
  Description of Artificial Sequence: Synthetic oligonucleotide
gggcagacuaagccccucc

SEQ ID NO: 2312968 - RNA, 19 nt, Artificial Sequence
  Description of Artificial Sequence: Synthetic oligonucleotide
ccugaggcaugcaguguag

SEQ ID NO: 2312969 - RNA, 19 nt, Artificial Sequence
  Description of Artificial Sequence: Synthetic oligonucleotide
cuuugaccgcugggcaggc

SEQ ID NO: 2312970 - RNA, 19 nt, Artificial Sequence
  Description of Artificial Sequence: Synthetic oligonucleotide
ccaagagcuucuucucuuc

SEQ ID NO: 2312971 - RNA, 19 nt, Artificial Sequence
  Description of Artificial Sequence: Synthetic oligonucleotide
cugagcuacccagcagcug

SEQ ID NO: 2312972 - RNA, 19 nt, Artificial Sequence
  Description of Artificial Sequence: Synthetic oligonucleotide
aagcguugcuggaggccug

SEQ ID NO: 2312973 - RNA, 19 nt, Artificial Sequence
  Description of Artificial Sequence: Synthetic oligonucleotide
cuguguauuucaagacccu

SEQ ID NO: 2312974 - RNA, 19 nt, Artificial Sequence
  Description of Artificial Sequence: Synthetic oligonucleotide
guucugggcuguguauuuc

SEQ ID NO: 2312975 - RNA, 19 nt, Artificial Sequence
  Description of Artificial Sequence: Synthetic oligonucleotide
ggacagauucuguuccucu

SEQ ID NO: 2312976 - RNA, 19 nt, Artificial Sequence
  Description of Artificial Sequence: Synthetic oligonucleotide
cucuaccucccagucgcuc

SEQ ID NO: 2312977 - RNA, 19 nt, Artificial Sequence
  Description of Artificial Sequence: Synthetic oligonucleotide
gggcacgaagcugacggug

SEQ ID NO: 2312978 - RNA, 19 nt, Artificial Sequence
  Description of Artificial Sequence: Synthetic oligonucleotide
cacaggcauuggagucacg

SEQ ID NO: 2312979 - RNA, 19 nt, Artificial Sequence
  Description of Artificial Sequence: Synthetic oligonucleotide
agcugacggugcaacacaa

SEQ ID NO: 2312980 - RNA, 19 nt, Artificial Sequence
  Description of Artificial Sequence: Synthetic oligonucleotide
guaggaggcaggaagcguu

SEQ ID NO: 2312981 - RNA, 19 nt, Artificial Sequence
  Description of Artificial Sequence: Synthetic oligonucleotide
ggcauuggagucacgcgga

SEQ ID NO: 2312982 - RNA, 19 nt, Artificial Sequence
  Description of Artificial Sequence: Synthetic oligonucleotide
ggcuugugcuguccuucag

SEQ ID NO: 2312983 - RNA, 19 nt, Artificial Sequence
  Description of Artificial Sequence: Synthetic oligonucleotide
gcaacacaacauacucagc

SEQ ID NO: 2312984 - RNA, 19 nt, Artificial Sequence
  Description of Artificial Sequence: Synthetic oligonucleotide
agcgaugccgagggacuga

SEQ ID NO: 2312985 - RNA, 19 nt, Artificial Sequence
  Description of Artificial Sequence: Synthetic oligonucleotide
ggaguacauagcagguaca

SEQ ID NO: 2312986 - RNA, 19 nt, Artificial Sequence
  Description of Artificial Sequence: Synthetic oligonucleotide
uuugaccgcugggcaggca

SEQ ID NO: 2312987 - RNA, 19 nt, Artificial Sequence
  Description of Artificial Sequence: Synthetic oligonucleotide
ucccagucgcucagugcuu

SEQ ID NO: 2312988 - RNA, 19 nt, Artificial Sequence
  Description of Artificial Sequence: Synthetic oligonucleotide
gcucucuuguuucgaaucu

SEQ ID NO: 2312989 - RNA, 19 nt, Artificial Sequence
  Description of Artificial Sequence: Synthetic oligonucleotide
caccuuugugagaggaagu

SEQ ID NO: 2312990 - RNA, 19 nt, Artificial Sequence
  Description of Artificial Sequence: Synthetic oligonucleotide
acgcggaaccccuccuuuu

SEQ ID NO: 2312991 - RNA, 19 nt, Artificial Sequence
  Description of Artificial Sequence: Synthetic oligonucleotide
cucuccaacccucccacau

SEQ ID NO: 2312992 - RNA, 19 nt, Artificial Sequence
  Description of Artificial Sequence: Synthetic oligonucleotide
cucggaaaggccggcagcu

SEQ ID NO: 2312993 - RNA, 19 nt, Artificial Sequence
  Description of Artificial Sequence: Synthetic oligonucleotide
acgugcugccgcugcuggu

SEQ ID NO: 2312994 - RNA, 19 nt, Artificial Sequence
  Description of Artificial Sequence: Synthetic oligonucleotide
cagcgaugccgagggacug

SEQ ID NO: 2312995 - RNA, 19 nt, Artificial Sequence
  Description of Artificial Sequence: Synthetic oligonucleotide
cccucccacauacaccuuc

SEQ ID NO: 2312996 - RNA, 19 nt, Artificial Sequence
  Description of Artificial Sequence: Synthetic oligonucleotide
gccugaggcaugcagugua

SEQ ID NO: 2312997 - RNA, 19 nt, Artificial Sequence
  Description of Artificial Sequence: Synthetic oligonucleotide
gaagugcugagggcagacu

SEQ ID NO: 2312998 - RNA, 19 nt, Artificial Sequence
  Description of Artificial Sequence: Synthetic oligonucleotide
gcagcucucuuguuucgaa

SEQ ID NO: 2312999 - RNA, 19 nt, Artificial Sequence
  Description of Artificial Sequence: Synthetic oligonucleotide
gggacagauucuguuccuc

SEQ ID NO: 2313000 - RNA, 19 nt, Artificial Sequence
  Description of Artificial Sequence: Synthetic oligonucleotide
agcuacccagcagcuggcu

SEQ ID NO: 2313001 - RNA, 19 nt, Artificial Sequence
  Description of Artificial Sequence: Synthetic oligonucleotide
cuguuccucuagaauucgu

SEQ ID NO: 2313002 - RNA, 19 nt, Artificial Sequence
  Description of Artificial Sequence: Synthetic oligonucleotide
gaaaggccggcagcuccaa

SEQ ID NO: 2313003 - RNA, 19 nt, Artificial Sequence
  Description of Artificial Sequence: Synthetic oligonucleotide
gggaguaguuguggucaug

SEQ ID NO: 2313004 - RNA, 19 nt, Artificial Sequence
  Description of Artificial Sequence: Synthetic oligonucleotide
gcgaugccgagggacugag

SEQ ID NO: 2313005 - RNA, 19 nt, Artificial Sequence
  Description of Artificial Sequence: Synthetic oligonucleotide
acaucccugcucggucgca

SEQ ID NO: 2313006 - RNA, 19 nt, Artificial Sequence
  Description of Artificial Sequence: Synthetic oligonucleotide
gagucacgcggaaccccuc

SEQ ID NO: 2313007 - RNA, 19 nt, Artificial Sequence
  Description of Artificial Sequence: Synthetic oligonucleotide
ggccugaaguuucuucagu

SEQ ID NO: 2313008 - RNA, 19 nt, Artificial Sequence
  Description of Artificial Sequence: Synthetic oligonucleotide
auccagcgaugccgaggga

SEQ ID NO: 2313009 - RNA, 19 nt, Artificial Sequence
  Description of Artificial Sequence: Synthetic oligonucleotide
ccagucgcucagugcuugc

SEQ ID NO: 2313010 - RNA, 19 nt, Artificial Sequence
  Description of Artificial Sequence: Synthetic oligonucleotide
uaccucccagucgcucagu

SEQ ID NO: 2313011 - RNA, 19 nt, Artificial Sequence
  Description of Artificial Sequence: Synthetic oligonucleotide
gcugacggugcaacacaac

SEQ ID NO: 2313012 - RNA, 19 nt, Artificial Sequence
  Description of Artificial Sequence: Synthetic oligonucleotide
gucacgcggaaccccuccu

SEQ ID NO: 2313013 - RNA, 19 nt, Artificial Sequence
  Description of Artificial Sequence: Synthetic oligonucleotide
gguucugggcuguguauuu

SEQ ID NO: 2313014 - RNA, 19 nt, Artificial Sequence
  Description of Artificial Sequence: Synthetic oligonucleotide
ccuccacaucccugcucgg

SEQ ID NO: 2313015 - RNA, 19 nt, Artificial Sequence
  Description of Artificial Sequence: Synthetic oligonucleotide
gcauuggagucacgcggaa

SEQ ID NO: 2313016 - RNA, 19 nt, Artificial Sequence
  Description of Artificial Sequence: Synthetic oligonucleotide
cacgaagcugacggugcaa

SEQ ID NO: 2313017 - RNA, 19 nt, Artificial Sequence
  Description of Artificial Sequence: Synthetic oligonucleotide
ccccuccuuuucaaagcuc

SEQ ID NO: 2313018 - RNA, 19 nt, Artificial Sequence
  Description of Artificial Sequence: Synthetic oligonucleotide
ggagucacgcggaaccccu

SEQ ID NO: 2313019 - RNA, 19 nt, Artificial Sequence
  Description of Artificial Sequence: Synthetic oligonucleotide
cguuugagaaccuguuccu

SEQ ID NO: 2313020 - RNA, 19 nt, Artificial Sequence
  Description of Artificial Sequence: Synthetic oligonucleotide
gccgagggacugagcagag

SEQ ID NO: 2313021 - RNA, 19 nt, Artificial Sequence
  Description of Artificial Sequence: Synthetic oligonucleotide
gggacugagcagagagcuc

SEQ ID NO: 2313022 - RNA, 19 nt, Artificial Sequence
  Description of Artificial Sequence: Synthetic oligonucleotide
gcaugcaguguaggaggca

SEQ ID NO: 2313023 - RNA, 19 nt, Artificial Sequence
  Description of Artificial Sequence: Synthetic oligonucleotide
gggguggcgucugccugag

SEQ ID NO: 2313024 - RNA, 19 nt, Artificial Sequence
  Description of Artificial Sequence: Synthetic oligonucleotide
gagggcagacuaagccccu

SEQ ID NO: 2313025 - RNA, 19 nt, Artificial Sequence
  Description of Artificial Sequence: Synthetic oligonucleotide
cgcggaaccccuccuuuuc

SEQ ID NO: 2313026 - RNA, 19 nt, Artificial Sequence
  Description of Artificial Sequence: Synthetic oligonucleotide
cuccacaucccugcucggu

SEQ ID NO: 2313027 - RNA, 19 nt, Artificial Sequence
  Description of Artificial Sequence: Synthetic oligonucleotide
ggcgucugccugaggcaug

SEQ ID NO: 2313028 - RNA, 19 nt, Artificial Sequence
  Description of Artificial Sequence: Synthetic oligonucleotide
gcggcuuucuugagcagcu

SEQ ID NO: 2313029 - RNA, 19 nt, Artificial Sequence
  Description of Artificial Sequence: Synthetic oligonucleotide
gcucuccaacccucccaca

SEQ ID NO: 2313030 - RNA, 19 nt, Artificial Sequence
  Description of Artificial Sequence: Synthetic oligonucleotide
ccagcgaugccgagggacu

SEQ ID NO: 2313031 - RNA, 19 nt, Artificial Sequence
  Description of Artificial Sequence: Synthetic oligonucleotide
cacgcggaaccccuccuuu

SEQ ID NO: 2313032 - RNA, 19 nt, Artificial Sequence
  Description of Artificial Sequence: Synthetic oligonucleotide
cacacgugcugccgcugcu

SEQ ID NO: 2313033 - RNA, 19 nt, Artificial Sequence
  Description of Artificial Sequence: Synthetic oligonucleotide
cauacucagcuggcacacu

SEQ ID NO: 2313034 - RNA, 19 nt, Artificial Sequence
  Description of Artificial Sequence: Synthetic oligonucleotide
cggugcaacacaacauacu

SEQ ID NO: 2313035 - RNA, 19 nt, Artificial Sequence
  Description of Artificial Sequence: Synthetic oligonucleotide
ggguggcgucugccugagg

SEQ ID NO: 2313036 - RNA, 19 nt, Artificial Sequence
  Description of Artificial Sequence: Synthetic oligonucleotide
ccccuugugucagaggagu

SEQ ID NO: 2313037 - RNA, 19 nt, Artificial Sequence
  Description of Artificial Sequence: Synthetic oligonucleotide
cucccacauacaccuucuu

SEQ ID NO: 2313038 - RNA, 19 nt, Artificial Sequence
  Description of Artificial Sequence: Synthetic oligonucleotide
cccuugugucagaggagua

SEQ ID NO: 2313039 - RNA, 19 nt, Artificial Sequence
  Description of Artificial Sequence: Synthetic oligonucleotide
gcggagccuccacaucccu

SEQ ID NO: 2313040 - RNA, 19 nt, Artificial Sequence
  Description of Artificial Sequence: Synthetic oligonucleotide
acccucccacauacaccuu

SEQ ID NO: 2313041 - RNA, 19 nt, Artificial Sequence
  Description of Artificial Sequence: Synthetic oligonucleotide
ccucuagaauucguauuuu

SEQ ID NO: 2313042 - RNA, 19 nt, Artificial Sequence
  Description of Artificial Sequence: Synthetic oligonucleotide
ccgagggacugagcagaga

SEQ ID NO: 2313043 - RNA, 19 nt, Artificial Sequence
  Description of Artificial Sequence: Synthetic oligonucleotide
cguauccguuugagaaccu

SEQ ID NO: 2313044 - RNA, 19 nt, Artificial Sequence
  Description of Artificial Sequence: Synthetic oligonucleotide
cgucugccugaggcaugca

SEQ ID NO: 2313045 - RNA, 19 nt, Artificial Sequence
  Description of Artificial Sequence: Synthetic oligonucleotide
aaggagguuagccagagcc

SEQ ID NO: 2313046 - RNA, 19 nt, Artificial Sequence
  Description of Artificial Sequence: Synthetic oligonucleotide
aauucgaauugccuuaagc

SEQ ID NO: 2313047 - RNA, 19 nt, Artificial Sequence
  Description of Artificial Sequence: Synthetic oligonucleotide
aucuggauuauuuacgucc

SEQ ID NO: 2313048 - RNA, 19 nt, Artificial Sequence
  Description of Artificial Sequence: Synthetic oligonucleotide
aauugccuuaagcauaacc

SEQ ID NO: 2313049 - RNA, 19 nt, Artificial Sequence
  Description of Artificial Sequence: Synthetic oligonucleotide
ucuaaauucgguuucaucu

SEQ ID NO: 2313050 - RNA, 19 nt, Artificial Sequence
  Description of Artificial Sequence: Synthetic oligonucleotide
aagucuaacagccaaacca

SEQ ID NO: 2313051 - RNA, 19 nt, Artificial Sequence
  Description of Artificial Sequence: Synthetic oligonucleotide
aauaaaguuucuaaauucg

SEQ ID NO: 2313052 - RNA, 19 nt, Artificial Sequence
  Description of Artificial Sequence: Synthetic oligonucleotide
auuauuuacguccagguug

SEQ ID NO: 2313053 - RNA, 19 nt, Artificial Sequence
  Description of Artificial Sequence: Synthetic oligonucleotide
uuuggaucagcaaugauug

SEQ ID NO: 2313054 - RNA, 19 nt, Artificial Sequence
  Description of Artificial Sequence: Synthetic oligonucleotide
caaguaaucgucaugacgc

SEQ ID NO: 2313055 - RNA, 19 nt, Artificial Sequence
  Description of Artificial Sequence: Synthetic oligonucleotide
uuaagcauaaccaaguaau

SEQ ID NO: 2313056 - RNA, 19 nt, Artificial Sequence
  Description of Artificial Sequence: Synthetic oligonucleotide
auauucaagucuaacagcc

SEQ ID NO: 2313057 - RNA, 19 nt, Artificial Sequence
  Description of Artificial Sequence: Synthetic oligonucleotide
auuaucuccauauucaagu

SEQ ID NO: 2313058 - RNA, 19 nt, Artificial Sequence
  Description of Artificial Sequence: Synthetic oligonucleotide
aucgucaugacgcugaauc

SEQ ID NO: 2313059 - RNA, 19 nt, Artificial Sequence
  Description of Artificial Sequence: Synthetic oligonucleotide
guuaucaggagcuaagucc

SEQ ID NO: 2313060 - RNA, 19 nt, Artificial Sequence
  Description of Artificial Sequence: Synthetic oligonucleotide
aaagaugugaggcgggcgg

SEQ ID NO: 2313061 - RNA, 19 nt, Artificial Sequence
  Description of Artificial Sequence: Synthetic oligonucleotide
uguuagacgcuccugaacc

SEQ ID NO: 2313062 - RNA, 19 nt, Artificial Sequence
  Description of Artificial Sequence: Synthetic oligonucleotide
aauucgguuucaucuuugc

SEQ ID NO: 2313063 - RNA, 19 nt, Artificial Sequence
  Description of Artificial Sequence: Synthetic oligonucleotide
aaagccaagaauguguuug

SEQ ID NO: 2313064 - RNA, 19 nt, Artificial Sequence
  Description of Artificial Sequence: Synthetic oligonucleotide
aaaucuggauuauuuacgu

SEQ ID NO: 2313065 - RNA, 19 nt, Artificial Sequence
  Description of Artificial Sequence: Synthetic oligonucleotide
aagcauaaccaaguaaucg

SEQ ID NO: 2313066 - RNA, 19 nt, Artificial Sequence
  Description of Artificial Sequence: Synthetic oligonucleotide
agcaaugauugccugaacg

SEQ ID NO: 2313067 - RNA, 19 nt, Artificial Sequence
  Description of Artificial Sequence: Synthetic oligonucleotide
ugcaguugaagccugcggg

SEQ ID NO: 2313068 - RNA, 19 nt, Artificial Sequence
  Description of Artificial Sequence: Synthetic oligonucleotide
uucguuaagaacugcaucu

SEQ ID NO: 2313069 - RNA, 19 nt, Artificial Sequence
  Description of Artificial Sequence: Synthetic oligonucleotide
uguuugauuugcuuuagca

SEQ ID NO: 2313070 - RNA, 19 nt, Artificial Sequence
  Description of Artificial Sequence: Synthetic oligonucleotide
aaaguuucuaaauucgguu

SEQ ID NO: 2313071 - RNA, 19 nt, Artificial Sequence
  Description of Artificial Sequence: Synthetic oligonucleotide
auucgaauugccuuaagca

SEQ ID NO: 2313072 - RNA, 19 nt, Artificial Sequence
  Description of Artificial Sequence: Synthetic oligonucleotide
ugcuuuagcaacugcaucc

SEQ ID NO: 2313073 - RNA, 19 nt, Artificial Sequence
  Description of Artificial Sequence: Synthetic oligonucleotide
ucuucuaugugcagcaacc

SEQ ID NO: 2313074 - RNA, 19 nt, Artificial Sequence
  Description of Artificial Sequence: Synthetic oligonucleotide
uaaaguuucuaaauucggu

SEQ ID NO: 2313075 - RNA, 19 nt, Artificial Sequence
  Description of Artificial Sequence: Synthetic oligonucleotide
ucggagauacuucucaaag

SEQ ID NO: 2313076 - RNA, 19 nt, Artificial Sequence
  Description of Artificial Sequence: Synthetic oligonucleotide
uccauauucaagucuaaca

SEQ ID NO: 2313077 - RNA, 19 nt, Artificial Sequence
  Description of Artificial Sequence: Synthetic oligonucleotide
ucuaugugcagcaaccgca

SEQ ID NO: 2313078 - RNA, 19 nt, Artificial Sequence
  Description of Artificial Sequence: Synthetic oligonucleotide
aaagcaacagguaagcccu

SEQ ID NO: 2313079 - RNA, 19 nt, Artificial Sequence
  Description of Artificial Sequence: Synthetic oligonucleotide
uuauuuacguccagguuga

SEQ ID NO: 2313080 - RNA, 19 nt, Artificial Sequence
  Description of Artificial Sequence: Synthetic oligonucleotide
ucuucaaucuuguaguguc

SEQ ID NO: 2313081 - RNA, 19 nt, Artificial Sequence
  Description of Artificial Sequence: Synthetic oligonucleotide
aaccaaguaaucgucauga

SEQ ID NO: 2313082 - RNA, 19 nt, Artificial Sequence
  Description of Artificial Sequence: Synthetic oligonucleotide
cauauucaagucuaacagc

SEQ ID NO: 2313083 - RNA, 19 nt, Artificial Sequence
  Description of Artificial Sequence: Synthetic oligonucleotide
ugucuaaagcaacagguaa

SEQ ID NO: 2313084 - RNA, 19 nt, Artificial Sequence
  Description of Artificial Sequence: Synthetic oligonucleotide
uuugauuuccaaacacaug

SEQ ID NO: 2313085 - RNA, 19 nt, Artificial Sequence
  Description of Artificial Sequence: Synthetic oligonucleotide
ucaagccaaacaauaaagu

SEQ ID NO: 2313086 - RNA, 19 nt, Artificial Sequence
  Description of Artificial Sequence: Synthetic oligonucleotide
uucagcauuaucuccauau

SEQ ID NO: 2313087 - RNA, 19 nt, Artificial Sequence
  Description of Artificial Sequence: Synthetic oligonucleotide
agcauaaccaaguaaucgu

SEQ ID NO: 2313088 - RNA, 19 nt, Artificial Sequence
  Description of Artificial Sequence: Synthetic oligonucleotide
ugaucaauggcucugcauu

SEQ ID NO: 2313089 - RNA, 19 nt, Artificial Sequence
  Description of Artificial Sequence: Synthetic oligonucleotide
uuuagcaacugcauccugu

SEQ ID NO: 2313090 - RNA, 19 nt, Artificial Sequence
  Description of Artificial Sequence: Synthetic oligonucleotide
aagggcaguuaacaucucg

SEQ ID NO: 2313091 - RNA, 19 nt, Artificial Sequence
  Description of Artificial Sequence: Synthetic oligonucleotide
acaauaaaguuucuaaauu

SEQ ID NO: 2313092 - RNA, 19 nt, Artificial Sequence
  Description of Artificial Sequence: Synthetic oligonucleotide
ucuccugaaucuugaaagg

SEQ ID NO: 2313093 - RNA, 19 nt, Artificial Sequence
  Description of Artificial Sequence: Synthetic oligonucleotide
ugaaucugaaggagguuag

SEQ ID NO: 2313094 - RNA, 19 nt, Artificial Sequence
  Description of Artificial Sequence: Synthetic oligonucleotide
ugcauccuguguuagacgc

SEQ ID NO: 2313095 - RNA, 19 nt, Artificial Sequence
  Description of Artificial Sequence: Synthetic oligonucleotide
cuuguuaucaggagcuaag

SEQ ID NO: 2313096 - RNA, 19 nt, Artificial Sequence
  Description of Artificial Sequence: Synthetic oligonucleotide
auugccuuaagcauaacca

SEQ ID NO: 2313097 - RNA, 19 nt, Artificial Sequence
  Description of Artificial Sequence: Synthetic oligonucleotide
uggauguuucucaaguuac

SEQ ID NO: 2313098 - RNA, 19 nt, Artificial Sequence
  Description of Artificial Sequence: Synthetic oligonucleotide
uccaacuuuccccagucug

SEQ ID NO: 2313099 - RNA, 19 nt, Artificial Sequence
  Description of Artificial Sequence: Synthetic oligonucleotide
uggauuauuuacguccagg

SEQ ID NO: 2313100 - RNA, 19 nt, Artificial Sequence
  Description of Artificial Sequence: Synthetic oligonucleotide
ucuggauuauuuacgucca

SEQ ID NO: 2313101 - RNA, 19 nt, Artificial Sequence
  Description of Artificial Sequence: Synthetic oligonucleotide
ucucaaguuaccucugucu

SEQ ID NO: 2313102 - RNA, 19 nt, Artificial Sequence
  Description of Artificial Sequence: Synthetic oligonucleotide
uucgaauugccuuaagcau

SEQ ID NO: 2313103 - RNA, 19 nt, Artificial Sequence
  Description of Artificial Sequence: Synthetic oligonucleotide
uggaucagcaaugauugcc

SEQ ID NO: 2313104 - RNA, 19 nt, Artificial Sequence
  Description of Artificial Sequence: Synthetic oligonucleotide
ugguccucaagccaaacaa

SEQ ID NO: 2313105 - RNA, 19 nt, Artificial Sequence
  Description of Artificial Sequence: Synthetic oligonucleotide
guuaccucugucuucaauc

SEQ ID NO: 2313106 - RNA, 19 nt, Artificial Sequence
  Description of Artificial Sequence: Synthetic oligonucleotide
agcagcuucguuaagaacu

SEQ ID NO: 2313107 - RNA, 19 nt, Artificial Sequence
  Description of Artificial Sequence: Synthetic oligonucleotide
ugaacggcuacuauggcuu

SEQ ID NO: 2313108 - RNA, 19 nt, Artificial Sequence
  Description of Artificial Sequence: Synthetic oligonucleotide
aaccgcaagaucugagcag

SEQ ID NO: 2313109 - RNA, 19 nt, Artificial Sequence
  Description of Artificial Sequence: Synthetic oligonucleotide
uaucuccauauucaagucu

SEQ ID NO: 2313110 - RNA, 19 nt, Artificial Sequence
  Description of Artificial Sequence: Synthetic oligonucleotide
uucuaugugcagcaaccgc

SEQ ID NO: 2313111 - RNA, 19 nt, Artificial Sequence
  Description of Artificial Sequence: Synthetic oligonucleotide
caagaucugagcagcuucg

SEQ ID NO: 2313112 - RNA, 19 nt, Artificial Sequence
  Description of Artificial Sequence: Synthetic oligonucleotide
ccauauucaagucuaacag

SEQ ID NO: 2313113 - RNA, 19 nt, Artificial Sequence
  Description of Artificial Sequence: Synthetic oligonucleotide
agaagcugaguccuggugu

SEQ ID NO: 2313114 - RNA, 19 nt, Artificial Sequence
  Description of Artificial Sequence: Synthetic oligonucleotide
gaaccaaaauucgaauugc

SEQ ID NO: 2313115 - RNA, 19 nt, Artificial Sequence
  Description of Artificial Sequence: Synthetic oligonucleotide
uguuaucaggagcuaaguc

SEQ ID NO: 2313116 - RNA, 19 nt, Artificial Sequence
  Description of Artificial Sequence: Synthetic oligonucleotide
ucuccugugucaaagccaa

SEQ ID NO: 2313117 - RNA, 19 nt, Artificial Sequence
  Description of Artificial Sequence: Synthetic oligonucleotide
gcaaugauugccugaacgg

SEQ ID NO: 2313118 - RNA, 19 nt, Artificial Sequence
  Description of Artificial Sequence: Synthetic oligonucleotide
agggccgugagcuugcguc

SEQ ID NO: 2313119 - RNA, 19 nt, Artificial Sequence
  Description of Artificial Sequence: Synthetic oligonucleotide
aacaucucggagauacuuc

SEQ ID NO: 2313120 - RNA, 19 nt, Artificial Sequence
  Description of Artificial Sequence: Synthetic oligonucleotide
ucgaauugccuuaagcaua

SEQ ID NO: 2313121 - RNA, 19 nt, Artificial Sequence
  Description of Artificial Sequence: Synthetic oligonucleotide
aaugauugccugaacggcu

SEQ ID NO: 2313122 - RNA, 19 nt, Artificial Sequence
  Description of Artificial Sequence: Synthetic oligonucleotide
cagucaauugcuucuugcc

SEQ ID NO: 2313123 - RNA, 19 nt, Artificial Sequence
  Description of Artificial Sequence: Synthetic oligonucleotide
uaaccaaguaaucgucaug

SEQ ID NO: 2313124 - RNA, 19 nt, Artificial Sequence
  Description of Artificial Sequence: Synthetic oligonucleotide
agcauuaucuccauauuca

SEQ ID NO: 2313125 - RNA, 19 nt, Artificial Sequence
  Description of Artificial Sequence: Synthetic oligonucleotide
uuaccucugucuucaaucu

SEQ ID NO: 2313126 - RNA, 19 nt, Artificial Sequence
  Description of Artificial Sequence: Synthetic oligonucleotide
gacauuugauuuccaaaca

SEQ ID NO: 2313127 - RNA, 19 nt, Artificial Sequence
  Description of Artificial Sequence: Synthetic oligonucleotide
caugacaccagccuuaaaa

SEQ ID NO: 2313128 - RNA, 19 nt, Artificial Sequence
  Description of Artificial Sequence: Synthetic oligonucleotide
uuugucuguagcucucuga

SEQ ID NO: 2313129 - RNA, 19 nt, Artificial Sequence
  Description of Artificial Sequence: Synthetic oligonucleotide
aaauucgaauugccuuaag

SEQ ID NO: 2313130 - RNA, 19 nt, Artificial Sequence
  Description of Artificial Sequence: Synthetic oligonucleotide
uagugucugauuuucuggu

SEQ ID NO: 2313131 - RNA, 19 nt, Artificial Sequence
  Description of Artificial Sequence: Synthetic oligonucleotide
gugucugauuuucuggucc

SEQ ID NO: 2313132 - RNA, 19 nt, Artificial Sequence
  Description of Artificial Sequence: Synthetic oligonucleotide
ucaagucuaacagccaaac

SEQ ID NO: 2313133 - RNA, 19 nt, Artificial Sequence
  Description of Artificial Sequence: Synthetic oligonucleotide
aacuugggccagucacugc

SEQ ID NO: 2313134 - RNA, 19 nt, Artificial Sequence
  Description of Artificial Sequence: Synthetic oligonucleotide
uuuguuugauuugcuuuag

SEQ ID NO: 2313135 - RNA, 19 nt, Artificial Sequence
  Description of Artificial Sequence: Synthetic oligonucleotide
uuugcaguugaagccugcg

SEQ ID NO: 2313136 - RNA, 19 nt, Artificial Sequence
  Description of Artificial Sequence: Synthetic oligonucleotide
uugugguaguccagggccg

SEQ ID NO: 2313137 - RNA, 19 nt, Artificial Sequence
  Description of Artificial Sequence: Synthetic oligonucleotide
agugucugauuuucugguc

SEQ ID NO: 2313138 - RNA, 19 nt, Artificial Sequence
  Description of Artificial Sequence: Synthetic oligonucleotide
aaguaaucgucaugacgcu

SEQ ID NO: 2313139 - RNA, 19 nt, Artificial Sequence
  Description of Artificial Sequence: Synthetic oligonucleotide
auaaccaaguaaucgucau

SEQ ID NO: 2313140 - RNA, 19 nt, Artificial Sequence
  Description of Artificial Sequence: Synthetic oligonucleotide
uugucuaaagcaacaggua

SEQ ID NO: 2313141 - RNA, 19 nt, Artificial Sequence
  Description of Artificial Sequence: Synthetic oligonucleotide
ugaaucuugaaagggcagu

SEQ ID NO: 2313142 - RNA, 19 nt, Artificial Sequence
  Description of Artificial Sequence: Synthetic oligonucleotide
aagaugugaggcgggcggc

SEQ ID NO: 2313143 - RNA, 19 nt, Artificial Sequence
  Description of Artificial Sequence: Synthetic oligonucleotide
aaucuuguagugucugauu

SEQ ID NO: 2313144 - RNA, 19 nt, Artificial Sequence
  Description of Artificial Sequence: Synthetic oligonucleotide
uugccuuaagcauaaccaa

SEQ ID NO: 2313145 - RNA, 19 nt, Artificial Sequence
  Description of Artificial Sequence: Synthetic oligonucleotide
cacaugguucccaucacac

SEQ ID NO: 2313146 - RNA, 19 nt, Artificial Sequence
  Description of Artificial Sequence: Synthetic oligonucleotide
aagccaagaauguguuugu

SEQ ID NO: 2313147 - RNA, 19 nt, Artificial Sequence
  Description of Artificial Sequence: Synthetic oligonucleotide
cuucguuaagaacugcauc

SEQ ID NO: 2313148 - RNA, 19 nt, Artificial Sequence
  Description of Artificial Sequence: Synthetic oligonucleotide
cuugaaagggcaguuaaca

SEQ ID NO: 2313149 - RNA, 19 nt, Artificial Sequence
  Description of Artificial Sequence: Synthetic oligonucleotide
gaaagggcaguuaacaucu

SEQ ID NO: 2313150 - RNA, 19 nt, Artificial Sequence
  Description of Artificial Sequence: Synthetic oligonucleotide
caucacacuaagcagguga

SEQ ID NO: 2313151 - RNA, 19 nt, Artificial Sequence
  Description of Artificial Sequence: Synthetic oligonucleotide
gacgcugaaucugaaggag

SEQ ID NO: 2313152 - RNA, 19 nt, Artificial Sequence
  Description of Artificial Sequence: Synthetic oligonucleotide
caaugauugccugaacggc

SEQ ID NO: 2313153 - RNA, 19 nt, Artificial Sequence
  Description of Artificial Sequence: Synthetic oligonucleotide
ugccugaacggcuacuaug

SEQ ID NO: 2313154 - RNA, 19 nt, Artificial Sequence
  Description of Artificial Sequence: Synthetic oligonucleotide
ucaauugcuucuugccucu

SEQ ID NO: 2313155 - RNA, 19 nt, Artificial Sequence
  Description of Artificial Sequence: Synthetic oligonucleotide
uuuagcugcguugucagua

SEQ ID NO: 2313156 - RNA, 19 nt, Artificial Sequence
  Description of Artificial Sequence: Synthetic oligonucleotide
aaacacaugcuggugcaca

SEQ ID NO: 2313157 - RNA, 19 nt, Artificial Sequence
  Description of Artificial Sequence: Synthetic oligonucleotide
uuguuugauuugcuuuagc

SEQ ID NO: 2313158 - RNA, 19 nt, Artificial Sequence
  Description of Artificial Sequence: Synthetic oligonucleotide
caucuccugugucaaagcc

SEQ ID NO: 2313159 - RNA, 19 nt, Artificial Sequence
  Description of Artificial Sequence: Synthetic oligonucleotide
uaaauucgguuucaucuuu

SEQ ID NO: 2313160 - RNA, 19 nt, Artificial Sequence
  Description of Artificial Sequence: Synthetic oligonucleotide
uugaaagggcaguuaacau

SEQ ID NO: 2313161 - RNA, 19 nt, Artificial Sequence
  Description of Artificial Sequence: Synthetic oligonucleotide
ccaaguaaucgucaugacg

SEQ ID NO: 2313162 - RNA, 19 nt, Artificial Sequence
  Description of Artificial Sequence: Synthetic oligonucleotide
ucaaucuuguagugucuga

SEQ ID NO: 2313163 - RNA, 19 nt, Artificial Sequence
  Description of Artificial Sequence: Synthetic oligonucleotide
ugucaaagccaagaaugug

SEQ ID NO: 2313164 - RNA, 19 nt, Artificial Sequence
  Description of Artificial Sequence: Synthetic oligonucleotide
cugaaucuugaaagggcag

SEQ ID NO: 2313165 - RNA, 19 nt, Artificial Sequence
  Description of Artificial Sequence: Synthetic oligonucleotide
agcucuucuaugugcagca

SEQ ID NO: 2313166 - RNA, 19 nt, Artificial Sequence
  Description of Artificial Sequence: Synthetic oligonucleotide
cagcauuaucuccauauuc

SEQ ID NO: 2313167 - RNA, 19 nt, Artificial Sequence
  Description of Artificial Sequence: Synthetic oligonucleotide
uucaagucuaacagccaaa

SEQ ID NO: 2313168 - RNA, 19 nt, Artificial Sequence
  Description of Artificial Sequence: Synthetic oligonucleotide
ucaaguuaccucugucuuc

SEQ ID NO: 2313169 - RNA, 19 nt, Artificial Sequence
  Description of Artificial Sequence: Synthetic oligonucleotide
gcaguuaacaucucggaga

SEQ ID NO: 2313170 - RNA, 19 nt, Artificial Sequence
  Description of Artificial Sequence: Synthetic oligonucleotide
aaaauucgaauugccuuaa

SEQ ID NO: 2313171 - RNA, 19 nt, Artificial Sequence
  Description of Artificial Sequence: Synthetic oligonucleotide
caaaauucgaauugccuua

SEQ ID NO: 2313172 - RNA, 19 nt, Artificial Sequence
  Description of Artificial Sequence: Synthetic oligonucleotide
ucugauuuucugguccuca

SEQ ID NO: 2313173 - RNA, 19 nt, Artificial Sequence
  Description of Artificial Sequence: Synthetic oligonucleotide
acuuuccccagucuguggu

SEQ ID NO: 2313174 - RNA, 19 nt, Artificial Sequence
  Description of Artificial Sequence: Synthetic oligonucleotide
ugacaccagccuuaaaauc

SEQ ID NO: 2313175 - RNA, 19 nt, Artificial Sequence
  Description of Artificial Sequence: Synthetic oligonucleotide
caagucuaacagccaaacc

SEQ ID NO: 2313176 - RNA, 19 nt, Artificial Sequence
  Description of Artificial Sequence: Synthetic oligonucleotide
cuuaagcauaaccaaguaa

SEQ ID NO: 2313177 - RNA, 19 nt, Artificial Sequence
  Description of Artificial Sequence: Synthetic oligonucleotide
ugucugauuuucugguccu

SEQ ID NO: 2313178 - RNA, 19 nt, Artificial Sequence
  Description of Artificial Sequence: Synthetic oligonucleotide
uucucaaguuaccucuguc

SEQ ID NO: 2313179 - RNA, 19 nt, Artificial Sequence
  Description of Artificial Sequence: Synthetic oligonucleotide
aguccuggugugcucaucu

SEQ ID NO: 2313180 - RNA, 19 nt, Artificial Sequence
  Description of Artificial Sequence: Synthetic oligonucleotide
guuagccagagccaugaca

SEQ ID NO: 2313181 - RNA, 19 nt, Artificial Sequence
  Description of Artificial Sequence: Synthetic oligonucleotide
aucuuugcaguugaagccu

SEQ ID NO: 2313182 - RNA, 19 nt, Artificial Sequence
  Description of Artificial Sequence: Synthetic oligonucleotide
cuucuaugugcagcaaccg

SEQ ID NO: 2313183 - RNA, 19 nt, Artificial Sequence
  Description of Artificial Sequence: Synthetic oligonucleotide
ucuugccucuccugaaucu

SEQ ID NO: 2313184 - RNA, 19 nt, Artificial Sequence
  Description of Artificial Sequence: Synthetic oligonucleotide
uguguuagacgcuccugaa

SEQ ID NO: 2313185 - RNA, 19 nt, Artificial Sequence
  Description of Artificial Sequence: Synthetic oligonucleotide
auucgguuucaucuuugca

SEQ ID NO: 2313186 - RNA, 19 nt, Artificial Sequence
  Description of Artificial Sequence: Synthetic oligonucleotide
gaagccugcgggguugugg

SEQ ID NO: 2313187 - RNA, 19 nt, Artificial Sequence
  Description of Artificial Sequence: Synthetic oligonucleotide
ugcgucggaacaugguccc

SEQ ID NO: 2313188 - RNA, 19 nt, Artificial Sequence
  Description of Artificial Sequence: Synthetic oligonucleotide
aggagcuaaguccuuguau

SEQ ID NO: 2313189 - RNA, 19 nt, Artificial Sequence
  Description of Artificial Sequence: Synthetic oligonucleotide
uugaucaauggcucugcau

SEQ ID NO: 2313190 - RNA, 19 nt, Artificial Sequence
  Description of Artificial Sequence: Synthetic oligonucleotide
aacugcauccuguguuaga

SEQ ID NO: 2313191 - RNA, 19 nt, Artificial Sequence
  Description of Artificial Sequence: Synthetic oligonucleotide
ggcaguuaacaucucggag

SEQ ID NO: 2313192 - RNA, 19 nt, Artificial Sequence
  Description of Artificial Sequence: Synthetic oligonucleotide
ucuuguuaucaggagcuaa

SEQ ID NO: 2313193 - RNA, 19 nt, Artificial Sequence
  Description of Artificial Sequence: Synthetic oligonucleotide
uuaacaucucggagauacu

SEQ ID NO: 2313194 - RNA, 19 nt, Artificial Sequence
  Description of Artificial Sequence: Synthetic oligonucleotide
guccagguugaucaauggc

SEQ ID NO: 2313195 - RNA, 19 nt, Artificial Sequence
  Description of Artificial Sequence: Synthetic oligonucleotide
gugcacaugguucccauca

SEQ ID NO: 2313196 - RNA, 19 nt, Artificial Sequence
  Description of Artificial Sequence: Synthetic oligonucleotide
cucuucuaugugcagcaac

SEQ ID NO: 2313197 - RNA, 19 nt, Artificial Sequence
  Description of Artificial Sequence: Synthetic oligonucleotide
guaaucgucaugacgcuga

SEQ ID NO: 2313198 - RNA, 19 nt, Artificial Sequence
  Description of Artificial Sequence: Synthetic oligonucleotide
ucaggagcuaaguccuugu

SEQ ID NO: 2313199 - RNA, 19 nt, Artificial Sequence
  Description of Artificial Sequence: Synthetic oligonucleotide
cuuuggaucagcaaugauu

SEQ ID NO: 2313200 - RNA, 19 nt, Artificial Sequence
  Description of Artificial Sequence: Synthetic oligonucleotide
ucgucaugacgcugaaucu

SEQ ID NO: 2313201 - RNA, 19 nt, Artificial Sequence
  Description of Artificial Sequence: Synthetic oligonucleotide
gagauacuucucaaagaac

SEQ ID NO: 2313202 - RNA, 19 nt, Artificial Sequence
  Description of Artificial Sequence: Synthetic oligonucleotide
aucacacuaagcaggugag

SEQ ID NO: 2313203 - RNA, 19 nt, Artificial Sequence
  Description of Artificial Sequence: Synthetic oligonucleotide
gcaggugagaagcugaguc

SEQ ID NO: 2313204 - RNA, 19 nt, Artificial Sequence
  Description of Artificial Sequence: Synthetic oligonucleotide
uugccucuccugaaucuug

SEQ ID NO: 2313205 - RNA, 19 nt, Artificial Sequence
  Description of Artificial Sequence: Synthetic oligonucleotide
agucuaacagccaaaccaa

SEQ ID NO: 2313206 - RNA, 19 nt, Artificial Sequence
  Description of Artificial Sequence: Synthetic oligonucleotide
caaguuaccucugucuuca

SEQ ID NO: 2313207 - RNA, 19 nt, Artificial Sequence
  Description of Artificial Sequence: Synthetic oligonucleotide
caugguucccaucacacua

SEQ ID NO: 2313208 - RNA, 19 nt, Artificial Sequence
  Description of Artificial Sequence: Synthetic oligonucleotide
uccuggugugcucaucuuc

SEQ ID NO: 2313209 - RNA, 19 nt, Artificial Sequence
  Description of Artificial Sequence: Synthetic oligonucleotide
uuagcugcguugucaguau

SEQ ID NO: 2313210 - RNA, 19 nt, Artificial Sequence
  Description of Artificial Sequence: Synthetic oligonucleotide
uccuguguuagacgcuccu

SEQ ID NO: 2313211 - RNA, 19 nt, Artificial Sequence
  Description of Artificial Sequence: Synthetic oligonucleotide
gaaucugaaggagguuagc

SEQ ID NO: 2313212 - RNA, 19 nt, Artificial Sequence
  Description of Artificial Sequence: Synthetic oligonucleotide
gauguuucucaaguuaccu

SEQ ID NO: 2313213 - RNA, 19 nt, Artificial Sequence
  Description of Artificial Sequence: Synthetic oligonucleotide
acaugguucccaucacacu

SEQ ID NO: 2313214 - RNA, 19 nt, Artificial Sequence
  Description of Artificial Sequence: Synthetic oligonucleotide
guggauguuucucaaguua

SEQ ID NO: 2313215 - RNA, 19 nt, Artificial Sequence
  Description of Artificial Sequence: Synthetic oligonucleotide
gcaguugaagccugcgggg

SEQ ID NO: 2313216 - RNA, 19 nt, Artificial Sequence
  Description of Artificial Sequence: Synthetic oligonucleotide
uuggaucagcaaugauugc

SEQ ID NO: 2313217 - RNA, 19 nt, Artificial Sequence
  Description of Artificial Sequence: Synthetic oligonucleotide
aguaaucgucaugacgcug

SEQ ID NO: 2313218 - RNA, 19 nt, Artificial Sequence
  Description of Artificial Sequence: Synthetic oligonucleotide
gccugaacggcuacuaugg

SEQ ID NO: 2313219 - RNA, 19 nt, Artificial Sequence
  Description of Artificial Sequence: Synthetic oligonucleotide
ucucggagauacuucucaa

SEQ ID NO: 2313220 - RNA, 19 nt, Artificial Sequence
  Description of Artificial Sequence: Synthetic oligonucleotide
cugcauccuguguuagacg

SEQ ID NO: 2313221 - RNA, 19 nt, Artificial Sequence
  Description of Artificial Sequence: Synthetic oligonucleotide
cuuugcaguugaagccugc

SEQ ID NO: 2313222 - RNA, 19 nt, Artificial Sequence
  Description of Artificial Sequence: Synthetic oligonucleotide
aggugagaagcugaguccu

SEQ ID NO: 2313223 - RNA, 19 nt, Artificial Sequence
  Description of Artificial Sequence: Synthetic oligonucleotide
ucuccauauucaagucuaa

SEQ ID NO: 2313224 - RNA, 19 nt, Artificial Sequence
  Description of Artificial Sequence: Synthetic oligonucleotide
gcuccugaaccaaaauucg

SEQ ID NO: 2313225 - RNA, 19 nt, Artificial Sequence
  Description of Artificial Sequence: Synthetic oligonucleotide
uuccaaacacaugcuggug

SEQ ID NO: 2313226 - RNA, 19 nt, Artificial Sequence
  Description of Artificial Sequence: Synthetic oligonucleotide
cuguguuagacgcuccuga

SEQ ID NO: 2313227 - RNA, 19 nt, Artificial Sequence
  Description of Artificial Sequence: Synthetic oligonucleotide
gucaaagccaagaaugugu

SEQ ID NO: 2313228 - RNA, 19 nt, Artificial Sequence
  Description of Artificial Sequence: Synthetic oligonucleotide
ggugugcucaucuuccaac

SEQ ID NO: 2313229 - RNA, 19 nt, Artificial Sequence
  Description of Artificial Sequence: Synthetic oligonucleotide
ggaacaugguccccgcugc

SEQ ID NO: 2313230 - RNA, 19 nt, Artificial Sequence
  Description of Artificial Sequence: Synthetic oligonucleotide
ucguuaagaacugcaucuc

SEQ ID NO: 2313231 - RNA, 19 nt, Artificial Sequence
  Description of Artificial Sequence: Synthetic oligonucleotide
agguugaucaauggcucug

SEQ ID NO: 2313232 - RNA, 19 nt, Artificial Sequence
  Description of Artificial Sequence: Synthetic oligonucleotide
guguuagacgcuccugaac

SEQ ID NO: 2313233 - RNA, 19 nt, Artificial Sequence
  Description of Artificial Sequence: Synthetic oligonucleotide
gugagcuugcgucggaaca

SEQ ID NO: 2313234 - RNA, 19 nt, Artificial Sequence
  Description of Artificial Sequence: Synthetic oligonucleotide
guuucuaaauucgguuuca

SEQ ID NO: 2313235 - RNA, 19 nt, Artificial Sequence
  Description of Artificial Sequence: Synthetic oligonucleotide
aguuaccucugucuucaau

SEQ ID NO: 2313236 - RNA, 19 nt, Artificial Sequence
  Description of Artificial Sequence: Synthetic oligonucleotide
gauuauuuacguccagguu

SEQ ID NO: 2313237 - RNA, 19 nt, Artificial Sequence
  Description of Artificial Sequence: Synthetic oligonucleotide
ggauuauuuacguccaggu

SEQ ID NO: 2313238 - RNA, 19 nt, Artificial Sequence
  Description of Artificial Sequence: Synthetic oligonucleotide
caagccaaacaauaaaguu

SEQ ID NO: 2313239 - RNA, 19 nt, Artificial Sequence
  Description of Artificial Sequence: Synthetic oligonucleotide
caaccgcaagaucugagca

SEQ ID NO: 2313240 - RNA, 19 nt, Artificial Sequence
  Description of Artificial Sequence: Synthetic oligonucleotide
gcaaccgcaagaucugagc

SEQ ID NO: 2313241 - RNA, 19 nt, Artificial Sequence
  Description of Artificial Sequence: Synthetic oligonucleotide
acgcuccugaaccaaaauu

SEQ ID NO: 2313242 - RNA, 19 nt, Artificial Sequence
  Description of Artificial Sequence: Synthetic oligonucleotide
aagaucugagcagcuucgu

SEQ ID NO: 2313243 - RNA, 19 nt, Artificial Sequence
  Description of Artificial Sequence: Synthetic oligonucleotide
acgcugaaucugaaggagg

SEQ ID NO: 2313244 - RNA, 19 nt, Artificial Sequence
  Description of Artificial Sequence: Synthetic oligonucleotide
ugcuguggauguuucucaa

SEQ ID NO: 2313245 - RNA, 19 nt, Artificial Sequence
  Description of Artificial Sequence: Synthetic oligonucleotide
agcuucguuaagaacugca

SEQ ID NO: 2313246 - RNA, 19 nt, Artificial Sequence
  Description of Artificial Sequence: Synthetic oligonucleotide
uuagacgcuccugaaccaa

SEQ ID NO: 2313247 - RNA, 19 nt, Artificial Sequence
  Description of Artificial Sequence: Synthetic oligonucleotide
ccagucaauugcuucuugc

SEQ ID NO: 2313248 - RNA, 19 nt, Artificial Sequence
  Description of Artificial Sequence: Synthetic oligonucleotide
ugagcuugcgucggaacau

SEQ ID NO: 2313249 - RNA, 19 nt, Artificial Sequence
  Description of Artificial Sequence: Synthetic oligonucleotide
accaagaagccagucaauu

SEQ ID NO: 2313250 - RNA, 19 nt, Artificial Sequence
  Description of Artificial Sequence: Synthetic oligonucleotide
guuagacgcuccugaacca

SEQ ID NO: 2313251 - RNA, 19 nt, Artificial Sequence
  Description of Artificial Sequence: Synthetic oligonucleotide
ugauugccugaacggcuac

SEQ ID NO: 2313252 - RNA, 19 nt, Artificial Sequence
  Description of Artificial Sequence: Synthetic oligonucleotide
cuggauuauuuacguccag

SEQ ID NO: 2313253 - RNA, 19 nt, Artificial Sequence
  Description of Artificial Sequence: Synthetic oligonucleotide
cucaaagaacuugggccag

SEQ ID NO: 2313254 - RNA, 19 nt, Artificial Sequence
  Description of Artificial Sequence: Synthetic oligonucleotide
guuaagaacugcaucuccu

SEQ ID NO: 2313255 - RNA, 19 nt, Artificial Sequence
  Description of Artificial Sequence: Synthetic oligonucleotide
cauccuguguuagacgcuc

SEQ ID NO: 2313256 - RNA, 19 nt, Artificial Sequence
  Description of Artificial Sequence: Synthetic oligonucleotide
guggucugucuuuggauca

SEQ ID NO: 2313257 - RNA, 19 nt, Artificial Sequence
  Description of Artificial Sequence: Synthetic oligonucleotide
uugggccagucacugcugu

SEQ ID NO: 2313258 - RNA, 19 nt, Artificial Sequence
  Description of Artificial Sequence: Synthetic oligonucleotide
cugaaucugaaggagguua

SEQ ID NO: 2313259 - RNA, 19 nt, Artificial Sequence
  Description of Artificial Sequence: Synthetic oligonucleotide
gucuaacagccaaaccaag

SEQ ID NO: 2313260 - RNA, 19 nt, Artificial Sequence
  Description of Artificial Sequence: Synthetic oligonucleotide
uggugugcucaucuuccaa

SEQ ID NO: 2313261 - RNA, 19 nt, Artificial Sequence
  Description of Artificial Sequence: Synthetic oligonucleotide
agccaagaauguguuuguc

SEQ ID NO: 2313262 - RNA, 19 nt, Artificial Sequence
  Description of Artificial Sequence: Synthetic oligonucleotide
uagacgcuccugaaccaaa

SEQ ID NO: 2313263 - RNA, 19 nt, Artificial Sequence
  Description of Artificial Sequence: Synthetic oligonucleotide
uggucugucuuuggaucag

SEQ ID NO: 2313264 - RNA, 19 nt, Artificial Sequence
  Description of Artificial Sequence: Synthetic oligonucleotide
ccaagaagccagucaauug

SEQ ID NO: 2313265 - RNA, 19 nt, Artificial Sequence
  Description of Artificial Sequence: Synthetic oligonucleotide
ucacugcuguggauguuuc

SEQ ID NO: 2313266 - RNA, 19 nt, Artificial Sequence
  Description of Artificial Sequence: Synthetic oligonucleotide
agguaagcccucuuuuguu

SEQ ID NO: 2313267 - RNA, 19 nt, Artificial Sequence
  Description of Artificial Sequence: Synthetic oligonucleotide
aucuccugugucaaagcca

SEQ ID NO: 2313268 - RNA, 19 nt, Artificial Sequence
  Description of Artificial Sequence: Synthetic oligonucleotide
cgcuccugaaccaaaauuc

SEQ ID NO: 2313269 - RNA, 19 nt, Artificial Sequence
  Description of Artificial Sequence: Synthetic oligonucleotide
ucaaagaacuugggccagu

SEQ ID NO: 2313270 - RNA, 19 nt, Artificial Sequence
  Description of Artificial Sequence: Synthetic oligonucleotide
caagaauguguuugucuaa

SEQ ID NO: 2313271 - RNA, 19 nt, Artificial Sequence
  Description of Artificial Sequence: Synthetic oligonucleotide
ccugaaucuugaaagggca

SEQ ID NO: 2313272 - RNA, 19 nt, Artificial Sequence
  Description of Artificial Sequence: Synthetic oligonucleotide
agaucugagcagcuucguu

SEQ ID NO: 2313273 - RNA, 19 nt, Artificial Sequence
  Description of Artificial Sequence: Synthetic oligonucleotide
gucuguggucugucuuugg

SEQ ID NO: 2313274 - RNA, 19 nt, Artificial Sequence
  Description of Artificial Sequence: Synthetic oligonucleotide
guugaucaauggcucugca

SEQ ID NO: 2313275 - RNA, 19 nt, Artificial Sequence
  Description of Artificial Sequence: Synthetic oligonucleotide
ggauguuucucaaguuacc

SEQ ID NO: 2313276 - RNA, 19 nt, Artificial Sequence
  Description of Artificial Sequence: Synthetic oligonucleotide
ugcgggguugugguagucc

SEQ ID NO: 2313277 - RNA, 19 nt, Artificial Sequence
  Description of Artificial Sequence: Synthetic oligonucleotide
caaagaacuugggccaguc

SEQ ID NO: 2313278 - RNA, 19 nt, Artificial Sequence
  Description of Artificial Sequence: Synthetic oligonucleotide
cuaaauucgguuucaucuu

SEQ ID NO: 2313279 - RNA, 19 nt, Artificial Sequence
  Description of Artificial Sequence: Synthetic oligonucleotide
aacggcuacuauggcuuca

SEQ ID NO: 2313280 - RNA, 19 nt, Artificial Sequence
  Description of Artificial Sequence: Synthetic oligonucleotide
acguccagguugaucaaug

SEQ ID NO: 2313281 - RNA, 19 nt, Artificial Sequence
  Description of Artificial Sequence: Synthetic oligonucleotide
uugccugaacggcuacuau

SEQ ID NO: 2313282 - RNA, 19 nt, Artificial Sequence
  Description of Artificial Sequence: Synthetic oligonucleotide
agcaaccgcaagaucugag

SEQ ID NO: 2313283 - RNA, 19 nt, Artificial Sequence
  Description of Artificial Sequence: Synthetic oligonucleotide
ggcuacuauggcuucauua

SEQ ID NO: 2313284 - RNA, 19 nt, Artificial Sequence
  Description of Artificial Sequence: Synthetic oligonucleotide
ugguaguccagggccguga

SEQ ID NO: 2313285 - RNA, 19 nt, Artificial Sequence
  Description of Artificial Sequence: Synthetic oligonucleotide
agcuaaguccuuguauuuu

SEQ ID NO: 2313286 - RNA, 19 nt, Artificial Sequence
  Description of Artificial Sequence: Synthetic oligonucleotide
gaugugaggcgggcggcgc

SEQ ID NO: 2313287 - RNA, 19 nt, Artificial Sequence
  Description of Artificial Sequence: Synthetic oligonucleotide
ugugaggcgggcggcgcag

SEQ ID NO: 2313288 - RNA, 19 nt, Artificial Sequence
  Description of Artificial Sequence: Synthetic oligonucleotide
gguugaucaauggcucugc

SEQ ID NO: 2313289 - RNA, 19 nt, Artificial Sequence
  Description of Artificial Sequence: Synthetic oligonucleotide
gggccagucacugcugugg

SEQ ID NO: 2313290 - RNA, 19 nt, Artificial Sequence
  Description of Artificial Sequence: Synthetic oligonucleotide
gaucaauggcucugcauuu

SEQ ID NO: 2313291 - RNA, 19 nt, Artificial Sequence
  Description of Artificial Sequence: Synthetic oligonucleotide
uuacguccagguugaucaa

SEQ ID NO: 2313292 - RNA, 19 nt, Artificial Sequence
  Description of Artificial Sequence: Synthetic oligonucleotide
cguuaagaacugcaucucc

SEQ ID NO: 2313293 - RNA, 19 nt, Artificial Sequence
  Description of Artificial Sequence: Synthetic oligonucleotide
aaccaagaagccagucaau

SEQ ID NO: 2313294 - RNA, 19 nt, Artificial Sequence
  Description of Artificial Sequence: Synthetic oligonucleotide
acuaagcaggugagaagcu

SEQ ID NO: 2313295 - RNA, 19 nt, Artificial Sequence
  Description of Artificial Sequence: Synthetic oligonucleotide
gucggaacaugguccccgc

SEQ ID NO: 2313296 - RNA, 19 nt, Artificial Sequence
  Description of Artificial Sequence: Synthetic oligonucleotide
cucggagauacuucucaaa

SEQ ID NO: 2313297 - RNA, 19 nt, Artificial Sequence
  Description of Artificial Sequence: Synthetic oligonucleotide
cugaacggcuacuauggcu

SEQ ID NO: 2313298 - RNA, 19 nt, Artificial Sequence
  Description of Artificial Sequence: Synthetic oligonucleotide
uaccucugucuucaaucuu

SEQ ID NO: 2313299 - RNA, 19 nt, Artificial Sequence
  Description of Artificial Sequence: Synthetic oligonucleotide
aggagguuagccagagcca

SEQ ID NO: 2313300 - RNA, 19 nt, Artificial Sequence
  Description of Artificial Sequence: Synthetic oligonucleotide
gaacggcuacuauggcuuc

SEQ ID NO: 2313301 - RNA, 19 nt, Artificial Sequence
  Description of Artificial Sequence: Synthetic oligonucleotide
ggagcuaaguccuuguauu

SEQ ID NO: 2313302 - RNA, 19 nt, Artificial Sequence
  Description of Artificial Sequence: Synthetic oligonucleotide
ugggccagucacugcugug

SEQ ID NO: 2313303 - RNA, 19 nt, Artificial Sequence
  Description of Artificial Sequence: Synthetic oligonucleotide
ucggaacaugguccccgcu

SEQ ID NO: 2313304 - RNA, 19 nt, Artificial Sequence
  Description of Artificial Sequence: Synthetic oligonucleotide
cugguccucaagccaaaca

SEQ ID NO: 2313305 - RNA, 19 nt, Artificial Sequence
  Description of Artificial Sequence: Synthetic oligonucleotide
ucugguccucaagccaaac

SEQ ID NO: 2313306 - RNA, 19 nt, Artificial Sequence
  Description of Artificial Sequence: Synthetic oligonucleotide
aaucgucaugacgcugaau

SEQ ID NO: 2313307 - RNA, 19 nt, Artificial Sequence
  Description of Artificial Sequence: Synthetic oligonucleotide
ccagucacugcuguggaug

SEQ ID NO: 2313308 - RNA, 19 nt, Artificial Sequence
  Description of Artificial Sequence: Synthetic oligonucleotide
uaucaggagcuaaguccuu

SEQ ID NO: 2313309 - RNA, 19 nt, Artificial Sequence
  Description of Artificial Sequence: Synthetic oligonucleotide
caguuaacaucucggagau

SEQ ID NO: 2313310 - RNA, 19 nt, Artificial Sequence
  Description of Artificial Sequence: Synthetic oligonucleotide
uucuuguuaucaggagcua

SEQ ID NO: 2313311 - RNA, 19 nt, Artificial Sequence
  Description of Artificial Sequence: Synthetic oligonucleotide
cucaaguuaccucugucuu

SEQ ID NO: 2313312 - RNA, 19 nt, Artificial Sequence
  Description of Artificial Sequence: Synthetic oligonucleotide
aagcccucuuuuguuugau

SEQ ID NO: 2313313 - RNA, 19 nt, Artificial Sequence
  Description of Artificial Sequence: Synthetic oligonucleotide
gggcaguuaacaucucgga

SEQ ID NO: 2313314 - RNA, 19 nt, Artificial Sequence
  Description of Artificial Sequence: Synthetic oligonucleotide
aaguuaccucugucuucaa

SEQ ID NO: 2313315 - RNA, 19 nt, Artificial Sequence
  Description of Artificial Sequence: Synthetic oligonucleotide
gaaucuugaaagggcaguu

SEQ ID NO: 2313316 - RNA, 19 nt, Artificial Sequence
  Description of Artificial Sequence: Synthetic oligonucleotide
uacguccagguugaucaau

SEQ ID NO: 2313317 - RNA, 19 nt, Artificial Sequence
  Description of Artificial Sequence: Synthetic oligonucleotide
gggccgugagcuugcgucg

SEQ ID NO: 2313318 - RNA, 19 nt, Artificial Sequence
  Description of Artificial Sequence: Synthetic oligonucleotide
augauugccugaacggcua

SEQ ID NO: 2313319 - RNA, 19 nt, Artificial Sequence
  Description of Artificial Sequence: Synthetic oligonucleotide
cagguaagcccucuuuugu

SEQ ID NO: 2313320 - RNA, 19 nt, Artificial Sequence
  Description of Artificial Sequence: Synthetic oligonucleotide
gagcuaaguccuuguauuu

SEQ ID NO: 2313321 - RNA, 19 nt, Artificial Sequence
  Description of Artificial Sequence: Synthetic oligonucleotide
augguucccaucacacuaa

SEQ ID NO: 2313322 - RNA, 19 nt, Artificial Sequence
  Description of Artificial Sequence: Synthetic oligonucleotide
cagcaaugauugccugaac

SEQ ID NO: 2313323 - RNA, 19 nt, Artificial Sequence
  Description of Artificial Sequence: Synthetic oligonucleotide
augugaggcgggcggcgca

SEQ ID NO: 2313324 - RNA, 19 nt, Artificial Sequence
  Description of Artificial Sequence: Synthetic oligonucleotide
agcaggugagaagcugagu

SEQ ID NO: 2313325 - RNA, 19 nt, Artificial Sequence
  Description of Artificial Sequence: Synthetic oligonucleotide
augguccccgcugcucgcg

SEQ ID NO: 2313326 - RNA, 19 nt, Artificial Sequence
  Description of Artificial Sequence: Synthetic oligonucleotide
gucuucaaucuuguagugu

SEQ ID NO: 2313327 - RNA, 19 nt, Artificial Sequence
  Description of Artificial Sequence: Synthetic oligonucleotide
ugcucgcgcuggccgcccg

SEQ ID NO: 2313328 - RNA, 19 nt, Artificial Sequence
  Description of Artificial Sequence: Synthetic oligonucleotide
cguccagguugaucaaugg

SEQ ID NO: 2313329 - RNA, 19 nt, Artificial Sequence
  Description of Artificial Sequence: Synthetic oligonucleotide
gugcucaucuuccaacuuu

SEQ ID NO: 2313330 - RNA, 19 nt, Artificial Sequence
  Description of Artificial Sequence: Synthetic oligonucleotide
cagcuucguuaagaacugc

SEQ ID NO: 2313331 - RNA, 19 nt, Artificial Sequence
  Description of Artificial Sequence: Synthetic oligonucleotide
gcaacugcauccuguguua

SEQ ID NO: 2313332 - RNA, 19 nt, Artificial Sequence
  Description of Artificial Sequence: Synthetic oligonucleotide
cuacuauggcuucauuaau

SEQ ID NO: 2313333 - RNA, 19 nt, Artificial Sequence
  Description of Artificial Sequence: Synthetic oligonucleotide
caugcuggugcacaugguu

SEQ ID NO: 2313334 - RNA, 19 nt, Artificial Sequence
  Description of Artificial Sequence: Synthetic oligonucleotide
caaucuuguagugucugau

SEQ ID NO: 2313335 - RNA, 19 nt, Artificial Sequence
  Description of Artificial Sequence: Synthetic oligonucleotide
agcugcguugucaguauuu

SEQ ID NO: 2313336 - RNA, 19 nt, Artificial Sequence
  Description of Artificial Sequence: Synthetic oligonucleotide
uagcugcguugucaguauu

SEQ ID NO: 2313337 - RNA, 19 nt, Artificial Sequence
  Description of Artificial Sequence: Synthetic oligonucleotide
agcccucuuuuguuugauu

SEQ ID NO: 2313338 - RNA, 19 nt, Artificial Sequence
  Description of Artificial Sequence: Synthetic oligonucleotide
gaauugccuuaagcauaac

SEQ ID NO: 2313339 - RNA, 19 nt, Artificial Sequence
  Description of Artificial Sequence: Synthetic oligonucleotide
uugaagccugcgggguugu

SEQ ID NO: 2313340 - RNA, 19 nt, Artificial Sequence
  Description of Artificial Sequence: Synthetic oligonucleotide
gguucccaucacacuaagc

SEQ ID NO: 2313341 - RNA, 19 nt, Artificial Sequence
  Description of Artificial Sequence: Synthetic oligonucleotide
agacgcuccugaaccaaaa

SEQ ID NO: 2313342 - RNA, 19 nt, Artificial Sequence
  Description of Artificial Sequence: Synthetic oligonucleotide
ccugaacggcuacuauggc

SEQ ID NO: 2313343 - RNA, 19 nt, Artificial Sequence
  Description of Artificial Sequence: Synthetic oligonucleotide
gacgcuccugaaccaaaau

SEQ ID NO: 2313344 - RNA, 19 nt, Artificial Sequence
  Description of Artificial Sequence: Synthetic oligonucleotide
gccugcgggguugugguag

SEQ ID NO: 2313345 - RNA, 19 nt, Artificial Sequence
  Description of Artificial Sequence: Synthetic oligonucleotide
gucugauuuucugguccuc

SEQ ID NO: 2313346 - RNA, 19 nt, Artificial Sequence
  Description of Artificial Sequence: Synthetic oligonucleotide
gcgggguugugguagucca

SEQ ID NO: 2313347 - RNA, 19 nt, Artificial Sequence
  Description of Artificial Sequence: Synthetic oligonucleotide
cuauggcuucauuaauuuu

SEQ ID NO: 2313348 - RNA, 19 nt, Artificial Sequence
  Description of Artificial Sequence: Synthetic oligonucleotide
ggugagaagcugaguccug

SEQ ID NO: 2313349 - RNA, 19 nt, Artificial Sequence
  Description of Artificial Sequence: Synthetic oligonucleotide
gguaagcccucuuuuguuu

SEQ ID NO: 2313350 - RNA, 19 nt, Artificial Sequence
  Description of Artificial Sequence: Synthetic oligonucleotide
cgaauugccuuaagcauaa

SEQ ID NO: 2313351 - RNA, 19 nt, Artificial Sequence
  Description of Artificial Sequence: Synthetic oligonucleotide
gauugccugaacggcuacu

SEQ ID NO: 2313352 - RNA, 19 nt, Artificial Sequence
  Description of Artificial Sequence: Synthetic oligonucleotide
gaacaugguccccgcugcu

SEQ ID NO: 2313353 - RNA, 19 nt, Artificial Sequence
  Description of Artificial Sequence: Synthetic oligonucleotide
acaugcuggugcacauggu

SEQ ID NO: 2313354 - RNA, 19 nt, Artificial Sequence
  Description of Artificial Sequence: Synthetic oligonucleotide
cggaacaugguccccgcug

SEQ ID NO: 2313355 - RNA, 19 nt, Artificial Sequence
  Description of Artificial Sequence: Synthetic oligonucleotide
ggugcacaugguucccauc

SEQ ID NO: 2313356 - RNA, 19 nt, Artificial Sequence
  Description of Artificial Sequence: Synthetic oligonucleotide
gugcagcaaccgcaagauc

SEQ ID NO: 2313357 - RNA, 19 nt, Artificial Sequence
  Description of Artificial Sequence: Synthetic oligonucleotide
uauuuacguccagguugau

SEQ ID NO: 2313358 - RNA, 19 nt, Artificial Sequence
  Description of Artificial Sequence: Synthetic oligonucleotide
ugaagccugcgggguugug

SEQ ID NO: 2313359 - RNA, 19 nt, Artificial Sequence
  Description of Artificial Sequence: Synthetic oligonucleotide
cgucggaacaugguccccg

SEQ ID NO: 2313360 - RNA, 19 nt, Artificial Sequence
  Description of Artificial Sequence: Synthetic oligonucleotide
guccccgcugcucgcgcug

SEQ ID NO: 2313361 - RNA, 19 nt, Artificial Sequence
  Description of Artificial Sequence: Synthetic oligonucleotide
cggagauacuucucaaaga

SEQ ID NO: 2313362 - RNA, 19 nt, Artificial Sequence
  Description of Artificial Sequence: Synthetic oligonucleotide
ccuuaagcauaaccaagua

SEQ ID NO: 2313363 - RNA, 19 nt, Artificial Sequence
  Description of Artificial Sequence: Synthetic oligonucleotide
caggagcuaaguccuugua

SEQ ID NO: 2313364 - RNA, 19 nt, Artificial Sequence
  Description of Artificial Sequence: Synthetic oligonucleotide
aguuaacaucucggagaua

SEQ ID NO: 2313365 - RNA, 19 nt, Artificial Sequence
  Description of Artificial Sequence: Synthetic oligonucleotide
ggccgugagcuugcgucgg

SEQ ID NO: 2313366 - RNA, 19 nt, Artificial Sequence
  Description of Artificial Sequence: Synthetic oligonucleotide
ggagguuagccagagccau

SEQ ID NO: 2313367 - RNA, 19 nt, Artificial Sequence
  Description of Artificial Sequence: Synthetic oligonucleotide
cuggugcacaugguuccca

SEQ ID NO: 2313368 - RNA, 19 nt, Artificial Sequence
  Description of Artificial Sequence: Synthetic oligonucleotide
caaagccaagaauguguuu

SEQ ID NO: 2313369 - RNA, 19 nt, Artificial Sequence
  Description of Artificial Sequence: Synthetic oligonucleotide
gcuucguuaagaacugcau

SEQ ID NO: 2313370 - RNA, 19 nt, Artificial Sequence
  Description of Artificial Sequence: Synthetic oligonucleotide
cgugagcuugcgucggaac

SEQ ID NO: 2313371 - RNA, 19 nt, Artificial Sequence
  Description of Artificial Sequence: Synthetic oligonucleotide
gcucucugagcucuucuau

SEQ ID NO: 2313372 - RNA, 19 nt, Artificial Sequence
  Description of Artificial Sequence: Synthetic oligonucleotide
cagcaaccgcaagaucuga

SEQ ID NO: 2313373 - RNA, 19 nt, Artificial Sequence
  Description of Artificial Sequence: Synthetic oligonucleotide
cuccgccgggacaggaaaa

SEQ ID NO: 2313374 - RNA, 19 nt, Artificial Sequence
  Description of Artificial Sequence: Synthetic oligonucleotide
cgcugaaucugaaggaggu

SEQ ID NO: 2313375 - RNA, 19 nt, Artificial Sequence
  Description of Artificial Sequence: Synthetic oligonucleotide
gcucgcgcuggccgcccgg

SEQ ID NO: 2313376 - RNA, 19 nt, Artificial Sequence
  Description of Artificial Sequence: Synthetic oligonucleotide
agccugcgggguuguggua

SEQ ID NO: 2313377 - RNA, 19 nt, Artificial Sequence
  Description of Artificial Sequence: Synthetic oligonucleotide
gccaugacaccagccuuaa

SEQ ID NO: 2313378 - RNA, 19 nt, Artificial Sequence
  Description of Artificial Sequence: Synthetic oligonucleotide
cugcucgcgcuggccgccc

SEQ ID NO: 2313379 - RNA, 19 nt, Artificial Sequence
  Description of Artificial Sequence: Synthetic oligonucleotide
gcugcucgcgcuggccgcc

SEQ ID NO: 2313380 - RNA, 19 nt, Artificial Sequence
  Description of Artificial Sequence: Synthetic oligonucleotide
cgggguugugguaguccag

SEQ ID NO: 2313381 - RNA, 19 nt, Artificial Sequence
  Description of Artificial Sequence: Synthetic oligonucleotide
cugcgggguugugguaguc

SEQ ID NO: 2313382 - RNA, 19 nt, Artificial Sequence
  Description of Artificial Sequence: Synthetic oligonucleotide
gggcggcgcaggcaccggc

SEQ ID NO: 2313383 - RNA, 19 nt, Artificial Sequence
  Description of Artificial Sequence: Synthetic oligonucleotide
gccucuccugaaucuugaa

SEQ ID NO: 2313384 - RNA, 19 nt, Artificial Sequence
  Description of Artificial Sequence: Synthetic oligonucleotide
gcugcguugucaguauuuu

SEQ ID NO: 2313385 - RNA, 19 nt, Artificial Sequence
  Description of Artificial Sequence: Synthetic oligonucleotide
gcgcaggcaccggcgacgc

SEQ ID NO: 2313386 - RNA, 19 nt, Artificial Sequence
  Description of Artificial Sequence: Synthetic oligonucleotide
gcaacagguaagcccucuu

SEQ ID NO: 2313387 - RNA, 19 nt, Artificial Sequence
  Description of Artificial Sequence: Synthetic oligonucleotide
ccuccgccgggacaggaaa

SEQ ID NO: 2313388 - RNA, 19 nt, Artificial Sequence
  Description of Artificial Sequence: Synthetic oligonucleotide
gcgucggaacauggucccc

SEQ ID NO: 2313389 - RNA, 19 nt, Artificial Sequence
  Description of Artificial Sequence: Synthetic oligonucleotide
gccaaacaauaaaguuucu

SEQ ID NO: 2313390 - RNA, 19 nt, Artificial Sequence
  Description of Artificial Sequence: Synthetic oligonucleotide
gccgugagcuugcgucgga

SEQ ID NO: 2313391 - RNA, 19 nt, Artificial Sequence
  Description of Artificial Sequence: Synthetic oligonucleotide
gcggcgcaggcaccggcga

SEQ ID NO: 2313392 - RNA, 19 nt, Artificial Sequence
  Description of Artificial Sequence: Synthetic oligonucleotide
gcauccuguguuagacgcu

SEQ ID NO: 2313393 - RNA, 19 nt, Artificial Sequence
  Description of Artificial Sequence: Synthetic oligonucleotide
cccuugaaaaugugacauu

SEQ ID NO: 2313394 - RNA, 19 nt, Artificial Sequence
  Description of Artificial Sequence: Synthetic oligonucleotide
cccagucuguggucugucu

SEQ ID NO: 2313395 - RNA, 19 nt, Artificial Sequence
  Description of Artificial Sequence: Synthetic oligonucleotide
cagggccgugagcuugcgu

SEQ ID NO: 2313396 - RNA, 19 nt, Artificial Sequence
  Description of Artificial Sequence: Synthetic oligonucleotide
ggccuccgccgggacagga

SEQ ID NO: 2313397 - RNA, 19 nt, Artificial Sequence
  Description of Artificial Sequence: Synthetic oligonucleotide
ccgcaagaucugagcagcu

SEQ ID NO: 2313398 - RNA, 19 nt, Artificial Sequence
  Description of Artificial Sequence: Synthetic oligonucleotide
ccugcgggguugugguagu

SEQ ID NO: 2313399 - RNA, 19 nt, Artificial Sequence
  Description of Artificial Sequence: Synthetic oligonucleotide
ccgugagcuugcgucggaa

SEQ ID NO: 2313400 - RNA, 19 nt, Artificial Sequence
  Description of Artificial Sequence: Synthetic oligonucleotide
cggcgcaggcaccggcgac

SEQ ID NO: 2313401 - RNA, 19 nt, Artificial Sequence
  Description of Artificial Sequence: Synthetic oligonucleotide
cgcaggcaccggcgacgcg

SEQ ID NO: 2313402 - RNA, 19 nt, Artificial Sequence
  Description of Artificial Sequence: Synthetic oligonucleotide
cccgggccuccgccgggac

SEQ ID NO: 2313403 - RNA, 19 nt, Artificial Sequence
  Description of Artificial Sequence: Synthetic oligonucleotide
gcccgggccuccgccggga

SEQ ID NO: 2313404 - RNA, 19 nt, Artificial Sequence
  Description of Artificial Sequence: Synthetic oligonucleotide
cgcaagaucugagcagcuu

SEQ ID NO: 2313405 - RNA, 19 nt, Artificial Sequence
  Description of Artificial Sequence: Synthetic oligonucleotide
uuuaagggaaccaagagag

SEQ ID NO: 2313406 - RNA, 19 nt, Artificial Sequence
  Description of Artificial Sequence: Synthetic oligonucleotide
uguaugacagauaacacag

SEQ ID NO: 2313407 - RNA, 19 nt, Artificial Sequence
  Description of Artificial Sequence: Synthetic oligonucleotide
aaggaaaucaaacucagca

SEQ ID NO: 2313408 - RNA, 19 nt, Artificial Sequence
  Description of Artificial Sequence: Synthetic oligonucleotide
aaacagguugucuacacac

SEQ ID NO: 2313409 - RNA, 19 nt, Artificial Sequence
  Description of Artificial Sequence: Synthetic oligonucleotide
uaccuuuaagcaaugaagg

SEQ ID NO: 2313410 - RNA, 19 nt, Artificial Sequence
  Description of Artificial Sequence: Synthetic oligonucleotide
aagcuacuguccuagaggc

SEQ ID NO: 2313411 - RNA, 19 nt, Artificial Sequence
  Description of Artificial Sequence: Synthetic oligonucleotide
agaguacucaugcagaugg

SEQ ID NO: 2313412 - RNA, 19 nt, Artificial Sequence
  Description of Artificial Sequence: Synthetic oligonucleotide
ugaaucaccuuauaaauac

SEQ ID NO: 2313413 - RNA, 19 nt, Artificial Sequence
  Description of Artificial Sequence: Synthetic oligonucleotide
accaagagaguacucaugc

SEQ ID NO: 2313414 - RNA, 19 nt, Artificial Sequence
  Description of Artificial Sequence: Synthetic oligonucleotide
uuuuaagugaugcuagccc

SEQ ID NO: 2313415 - RNA, 19 nt, Artificial Sequence
  Description of Artificial Sequence: Synthetic oligonucleotide
uugucauugagccucuugg

SEQ ID NO: 2313416 - RNA, 19 nt, Artificial Sequence
  Description of Artificial Sequence: Synthetic oligonucleotide
aaauacuccacaaacacca

SEQ ID NO: 2313417 - RNA, 19 nt, Artificial Sequence
  Description of Artificial Sequence: Synthetic oligonucleotide
ucuguaaugaaucaccuua

SEQ ID NO: 2313418 - RNA, 19 nt, Artificial Sequence
  Description of Artificial Sequence: Synthetic oligonucleotide
uaaugaaucaccuuauaaa

SEQ ID NO: 2313419 - RNA, 19 nt, Artificial Sequence
  Description of Artificial Sequence: Synthetic oligonucleotide
acuccauuccauuaggagg

SEQ ID NO: 2313420 - RNA, 19 nt, Artificial Sequence
  Description of Artificial Sequence: Synthetic oligonucleotide
aaugcuggcuggcaggaac

SEQ ID NO: 2313421 - RNA, 19 nt, Artificial Sequence
  Description of Artificial Sequence: Synthetic oligonucleotide
uuuaagugaugcuagcccc

SEQ ID NO: 2313422 - RNA, 19 nt, Artificial Sequence
  Description of Artificial Sequence: Synthetic oligonucleotide
uucuugaccauuuaaggga

SEQ ID NO: 2313423 - RNA, 19 nt, Artificial Sequence
  Description of Artificial Sequence: Synthetic oligonucleotide
ucagcaaccucuuuucagg

SEQ ID NO: 2313424 - RNA, 19 nt, Artificial Sequence
  Description of Artificial Sequence: Synthetic oligonucleotide
agcacacacacacacacac

SEQ ID NO: 2313425 - RNA, 19 nt, Artificial Sequence
  Description of Artificial Sequence: Synthetic oligonucleotide
aacucagcaaccucuuuuc

SEQ ID NO: 2313426 - RNA, 19 nt, Artificial Sequence
  Description of Artificial Sequence: Synthetic oligonucleotide
guugucuacacacacuggg

SEQ ID NO: 2313427 - RNA, 19 nt, Artificial Sequence
  Description of Artificial Sequence: Synthetic oligonucleotide
aacaucuguaaugaaucac

SEQ ID NO: 2313428 - RNA, 19 nt, Artificial Sequence
  Description of Artificial Sequence: Synthetic oligonucleotide
uuuggaguaaacagguugu

SEQ ID NO: 2313429 - RNA, 19 nt, Artificial Sequence
  Description of Artificial Sequence: Synthetic oligonucleotide
auuuaagggaaccaagaga

SEQ ID NO: 2313430 - RNA, 19 nt, Artificial Sequence
  Description of Artificial Sequence: Synthetic oligonucleotide
cuauguaugacagauaaca

SEQ ID NO: 2313431 - RNA, 19 nt, Artificial Sequence
  Description of Artificial Sequence: Synthetic oligonucleotide
aaugcugguucccuuggag

SEQ ID NO: 2313432 - RNA, 19 nt, Artificial Sequence
  Description of Artificial Sequence: Synthetic oligonucleotide
auaccuuuaagcaaugaag

SEQ ID NO: 2313433 - RNA, 19 nt, Artificial Sequence
  Description of Artificial Sequence: Synthetic oligonucleotide
cauuccauuaggaggagag

SEQ ID NO: 2313434 - RNA, 19 nt, Artificial Sequence
  Description of Artificial Sequence: Synthetic oligonucleotide
agugacucuaacaagcagg

SEQ ID NO: 2313435 - RNA, 19 nt, Artificial Sequence
  Description of Artificial Sequence: Synthetic oligonucleotide
uucaggaaaaucacuuccc

SEQ ID NO: 2313436 - RNA, 19 nt, Artificial Sequence
  Description of Artificial Sequence: Synthetic oligonucleotide
caagagaguacucaugcag

SEQ ID NO: 2313437 - RNA, 19 nt, Artificial Sequence
  Description of Artificial Sequence: Synthetic oligonucleotide
cacacacacacacacacgg

SEQ ID NO: 2313438 - RNA, 19 nt, Artificial Sequence
  Description of Artificial Sequence: Synthetic oligonucleotide
auguaugacagauaacaca

SEQ ID NO: 2313439 - RNA, 19 nt, Artificial Sequence
  Description of Artificial Sequence: Synthetic oligonucleotide
ugucuacacacacugggcc

SEQ ID NO: 2313440 - RNA, 19 nt, Artificial Sequence
  Description of Artificial Sequence: Synthetic oligonucleotide
uauguaugacagauaacac

SEQ ID NO: 2313441 - RNA, 19 nt, Artificial Sequence
  Description of Artificial Sequence: Synthetic oligonucleotide
uuggcuaaagggaggaagc

SEQ ID NO: 2313442 - RNA, 19 nt, Artificial Sequence
  Description of Artificial Sequence: Synthetic oligonucleotide
uuuggcuaaagggaggaag

SEQ ID NO: 2313443 - RNA, 19 nt, Artificial Sequence
  Description of Artificial Sequence: Synthetic oligonucleotide
cuuuaagcaaugaaggaga

SEQ ID NO: 2313444 - RNA, 19 nt, Artificial Sequence
  Description of Artificial Sequence: Synthetic oligonucleotide
aaucaccuuauaaauaccu

SEQ ID NO: 2313445 - RNA, 19 nt, Artificial Sequence
  Description of Artificial Sequence: Synthetic oligonucleotide
uguguuugcagaagugggc

SEQ ID NO: 2313446 - RNA, 19 nt, Artificial Sequence
  Description of Artificial Sequence: Synthetic oligonucleotide
ugcuaaggagggcugagag

SEQ ID NO: 2313447 - RNA, 19 nt, Artificial Sequence
  Description of Artificial Sequence: Synthetic oligonucleotide
gacucuaacaagcaggaaa

SEQ ID NO: 2313448 - RNA, 19 nt, Artificial Sequence
  Description of Artificial Sequence: Synthetic oligonucleotide
gacaagcacacacacacac

SEQ ID NO: 2313449 - RNA, 19 nt, Artificial Sequence
  Description of Artificial Sequence: Synthetic oligonucleotide
gaugguuccaagucacugc

SEQ ID NO: 2313450 - RNA, 19 nt, Artificial Sequence
  Description of Artificial Sequence: Synthetic oligonucleotide
acugcuaugggcuugcgaa

SEQ ID NO: 2313451 - RNA, 19 nt, Artificial Sequence
  Description of Artificial Sequence: Synthetic oligonucleotide
aaaucaaacucagcaaccu

SEQ ID NO: 2313452 - RNA, 19 nt, Artificial Sequence
  Description of Artificial Sequence: Synthetic oligonucleotide
gaaaucaaacucagcaacc

SEQ ID NO: 2313453 - RNA, 19 nt, Artificial Sequence
  Description of Artificial Sequence: Synthetic oligonucleotide
agguugucuacacacacug

SEQ ID NO: 2313454 - RNA, 19 nt, Artificial Sequence
  Description of Artificial Sequence: Synthetic oligonucleotide
ucaggaaaaucacuuccca

SEQ ID NO: 2313455 - RNA, 19 nt, Artificial Sequence
  Description of Artificial Sequence: Synthetic oligonucleotide
caagcacacacacacacac

SEQ ID NO: 2313456 - RNA, 19 nt, Artificial Sequence
  Description of Artificial Sequence: Synthetic oligonucleotide
uuuaagcaaugaaggagac

SEQ ID NO: 2313457 - RNA, 19 nt, Artificial Sequence
  Description of Artificial Sequence: Synthetic oligonucleotide
ggaaaucaaacucagcaac

SEQ ID NO: 2313458 - RNA, 19 nt, Artificial Sequence
  Description of Artificial Sequence: Synthetic oligonucleotide
agauaacacagagaagggg

SEQ ID NO: 2313459 - RNA, 19 nt, Artificial Sequence
  Description of Artificial Sequence: Synthetic oligonucleotide
aagugggcuauguaugaca

SEQ ID NO: 2313460 - RNA, 19 nt, Artificial Sequence
  Description of Artificial Sequence: Synthetic oligonucleotide
cacacacacacacacacac

SEQ ID NO: 2313461 - RNA, 19 nt, Artificial Sequence
  Description of Artificial Sequence: Synthetic oligonucleotide
uggagaugguuccaaguca

SEQ ID NO: 2313462 - RNA, 19 nt, Artificial Sequence
  Description of Artificial Sequence: Synthetic oligonucleotide
cuguccuagaggcagcugg

SEQ ID NO: 2313463 - RNA, 19 nt, Artificial Sequence
  Description of Artificial Sequence: Synthetic oligonucleotide
uugucuacacacacugggc

SEQ ID NO: 2313464 - RNA, 19 nt, Artificial Sequence
  Description of Artificial Sequence: Synthetic oligonucleotide
ucagugacucuaacaagca

SEQ ID NO: 2313465 - RNA, 19 nt, Artificial Sequence
  Description of Artificial Sequence: Synthetic oligonucleotide
uaaacagguugucuacaca

SEQ ID NO: 2313466 - RNA, 19 nt, Artificial Sequence
  Description of Artificial Sequence: Synthetic oligonucleotide
uugaccauuuaagggaacc

SEQ ID NO: 2313467 - RNA, 19 nt, Artificial Sequence
  Description of Artificial Sequence: Synthetic oligonucleotide
ucuugaccauuuaagggaa

SEQ ID NO: 2313468 - RNA, 19 nt, Artificial Sequence
  Description of Artificial Sequence: Synthetic oligonucleotide
uuaggaggagaggagaagu

SEQ ID NO: 2313469 - RNA, 19 nt, Artificial Sequence
  Description of Artificial Sequence: Synthetic oligonucleotide
gaguaaacagguugucuac

SEQ ID NO: 2313470 - RNA, 19 nt, Artificial Sequence
  Description of Artificial Sequence: Synthetic oligonucleotide
uaugggcuugcgaagggca

SEQ ID NO: 2313471 - RNA, 19 nt, Artificial Sequence
  Description of Artificial Sequence: Synthetic oligonucleotide
ggcccuguaagucucauag

SEQ ID NO: 2313472 - RNA, 19 nt, Artificial Sequence
  Description of Artificial Sequence: Synthetic oligonucleotide
gauaacacagagaaggggu

SEQ ID NO: 2313473 - RNA, 19 nt, Artificial Sequence
  Description of Artificial Sequence: Synthetic oligonucleotide
ugcugacagacgauggagc

SEQ ID NO: 2313474 - RNA, 19 nt, Artificial Sequence
  Description of Artificial Sequence: Synthetic oligonucleotide
ucucccuacacauggucug

SEQ ID NO: 2313475 - RNA, 19 nt, Artificial Sequence
  Description of Artificial Sequence: Synthetic oligonucleotide
cucagcaaccucuuuucag

SEQ ID NO: 2313476 - RNA, 19 nt, Artificial Sequence
  Description of Artificial Sequence: Synthetic oligonucleotide
auugucauugagccucuug

SEQ ID NO: 2313477 - RNA, 19 nt, Artificial Sequence
  Description of Artificial Sequence: Synthetic oligonucleotide
cauggauuacugucguggc

SEQ ID NO: 2313478 - RNA, 19 nt, Artificial Sequence
  Description of Artificial Sequence: Synthetic oligonucleotide
uggcuagggagcaaugcug

SEQ ID NO: 2313479 - RNA, 19 nt, Artificial Sequence
  Description of Artificial Sequence: Synthetic oligonucleotide
guaaacagguugucuacac

SEQ ID NO: 2313480 - RNA, 19 nt, Artificial Sequence
  Description of Artificial Sequence: Synthetic oligonucleotide
uguaaugaaucaccuuaua

SEQ ID NO: 2313481 - RNA, 19 nt, Artificial Sequence
  Description of Artificial Sequence: Synthetic oligonucleotide
cuccauuccauuaggagga

SEQ ID NO: 2313482 - RNA, 19 nt, Artificial Sequence
  Description of Artificial Sequence: Synthetic oligonucleotide
guguguuugcagaaguggg

SEQ ID NO: 2313483 - RNA, 19 nt, Artificial Sequence
  Description of Artificial Sequence: Synthetic oligonucleotide
ucuaacaagcaggaaaauu

SEQ ID NO: 2313484 - RNA, 19 nt, Artificial Sequence
  Description of Artificial Sequence: Synthetic oligonucleotide
agccucuuggcccuguaag

SEQ ID NO: 2313485 - RNA, 19 nt, Artificial Sequence
  Description of Artificial Sequence: Synthetic oligonucleotide
ugcuaugggcuugcgaagg

SEQ ID NO: 2313486 - RNA, 19 nt, Artificial Sequence
  Description of Artificial Sequence: Synthetic oligonucleotide
auaacacagagaagggguc

SEQ ID NO: 2313487 - RNA, 19 nt, Artificial Sequence
  Description of Artificial Sequence: Synthetic oligonucleotide
ugcuuucuugaccauuuaa

SEQ ID NO: 2313488 - RNA, 19 nt, Artificial Sequence
  Description of Artificial Sequence: Synthetic oligonucleotide
aagucucauaguggcugcc

SEQ ID NO: 2313489 - RNA, 19 nt, Artificial Sequence
  Description of Artificial Sequence: Synthetic oligonucleotide
ccaacaucuguaaugaauc

SEQ ID NO: 2313490 - RNA, 19 nt, Artificial Sequence
  Description of Artificial Sequence: Synthetic oligonucleotide
uggggcugcugacagacga

SEQ ID NO: 2313491 - RNA, 19 nt, Artificial Sequence
  Description of Artificial Sequence: Synthetic oligonucleotide
uguguccacgcucaccgga

SEQ ID NO: 2313492 - RNA, 19 nt, Artificial Sequence
  Description of Artificial Sequence: Synthetic oligonucleotide
uccuagaggcagcuggccc

SEQ ID NO: 2313493 - RNA, 19 nt, Artificial Sequence
  Description of Artificial Sequence: Synthetic oligonucleotide
gaaucaccuuauaaauacc

SEQ ID NO: 2313494 - RNA, 19 nt, Artificial Sequence
  Description of Artificial Sequence: Synthetic oligonucleotide
auggcuagggagcaaugcu

SEQ ID NO: 2313495 - RNA, 19 nt, Artificial Sequence
  Description of Artificial Sequence: Synthetic oligonucleotide
gauggcuagggagcaaugc

SEQ ID NO: 2313496 - RNA, 19 nt, Artificial Sequence
  Description of Artificial Sequence: Synthetic oligonucleotide
aacaagcaggaaaauugcu

SEQ ID NO: 2313497 - RNA, 19 nt, Artificial Sequence
  Description of Artificial Sequence: Synthetic oligonucleotide
aggagaggagaaguuuggc

SEQ ID NO: 2313498 - RNA, 19 nt, Artificial Sequence
  Description of Artificial Sequence: Synthetic oligonucleotide
gagcugaaaggaaaaggug

SEQ ID NO: 2313499 - RNA, 19 nt, Artificial Sequence
  Description of Artificial Sequence: Synthetic oligonucleotide
uuaagggaaccaagagagu

SEQ ID NO: 2313500 - RNA, 19 nt, Artificial Sequence
  Description of Artificial Sequence: Synthetic oligonucleotide
ccuuauaaauaccuuuaag

SEQ ID NO: 2313501 - RNA, 19 nt, Artificial Sequence
  Description of Artificial Sequence: Synthetic oligonucleotide
auuaggaggagaggagaag

SEQ ID NO: 2313502 - RNA, 19 nt, Artificial Sequence
  Description of Artificial Sequence: Synthetic oligonucleotide
ggcuauguaugacagauaa

SEQ ID NO: 2313503 - RNA, 19 nt, Artificial Sequence
  Description of Artificial Sequence: Synthetic oligonucleotide
agaugguuccaagucacug

SEQ ID NO: 2313504 - RNA, 19 nt, Artificial Sequence
  Description of Artificial Sequence: Synthetic oligonucleotide
ccuuuaagcaaugaaggag

SEQ ID NO: 2313505 - RNA, 19 nt, Artificial Sequence
  Description of Artificial Sequence: Synthetic oligonucleotide
auuccauuaggaggagagg

SEQ ID NO: 2313506 - RNA, 19 nt, Artificial Sequence
  Description of Artificial Sequence: Synthetic oligonucleotide
agggaggaagcuacugucc

SEQ ID NO: 2313507 - RNA, 19 nt, Artificial Sequence
  Description of Artificial Sequence: Synthetic oligonucleotide
agagaguacucaugcagau

SEQ ID NO: 2313508 - RNA, 19 nt, Artificial Sequence
  Description of Artificial Sequence: Synthetic oligonucleotide
cagacgauggagcaggaca

SEQ ID NO: 2313509 - RNA, 19 nt, Artificial Sequence
  Description of Artificial Sequence: Synthetic oligonucleotide
accuuauaaauaccuuuaa

SEQ ID NO: 2313510 - RNA, 19 nt, Artificial Sequence
  Description of Artificial Sequence: Synthetic oligonucleotide
ugaccauuuaagggaacca

SEQ ID NO: 2313511 - RNA, 19 nt, Artificial Sequence
  Description of Artificial Sequence: Synthetic oligonucleotide
uggaguaaacagguugucu

SEQ ID NO: 2313512 - RNA, 19 nt, Artificial Sequence
  Description of Artificial Sequence: Synthetic oligonucleotide
agaggagaaguuuggcuaa

SEQ ID NO: 2313513 - RNA, 19 nt, Artificial Sequence
  Description of Artificial Sequence: Synthetic oligonucleotide
ccuguaagucucauagugg

SEQ ID NO: 2313514 - RNA, 19 nt, Artificial Sequence
  Description of Artificial Sequence: Synthetic oligonucleotide
aaccaagagaguacucaug

SEQ ID NO: 2313515 - RNA, 19 nt, Artificial Sequence
  Description of Artificial Sequence: Synthetic oligonucleotide
cuugcgaagggcaggagaa

SEQ ID NO: 2313516 - RNA, 19 nt, Artificial Sequence
  Description of Artificial Sequence: Synthetic oligonucleotide
ugguggguuggacaagcac

SEQ ID NO: 2313517 - RNA, 19 nt, Artificial Sequence
  Description of Artificial Sequence: Synthetic oligonucleotide
aguaaacagguugucuaca

SEQ ID NO: 2313518 - RNA, 19 nt, Artificial Sequence
  Description of Artificial Sequence: Synthetic oligonucleotide
agaggcagcuggccccucc

SEQ ID NO: 2313519 - RNA, 19 nt, Artificial Sequence
  Description of Artificial Sequence: Synthetic oligonucleotide
ucaugcagauggauggcua

SEQ ID NO: 2313520 - RNA, 19 nt, Artificial Sequence
  Description of Artificial Sequence: Synthetic oligonucleotide
uguccacgcucaccggagg

SEQ ID NO: 2313521 - RNA, 19 nt, Artificial Sequence
  Description of Artificial Sequence: Synthetic oligonucleotide
cacacacugggccagccac

SEQ ID NO: 2313522 - RNA, 19 nt, Artificial Sequence
  Description of Artificial Sequence: Synthetic oligonucleotide
gucucauaguggcugccag

SEQ ID NO: 2313523 - RNA, 19 nt, Artificial Sequence
  Description of Artificial Sequence: Synthetic oligonucleotide
aacagguugucuacacaca

SEQ ID NO: 2313524 - RNA, 19 nt, Artificial Sequence
  Description of Artificial Sequence: Synthetic oligonucleotide
ucauaguggcugccagcag

SEQ ID NO: 2313525 - RNA, 19 nt, Artificial Sequence
  Description of Artificial Sequence: Synthetic oligonucleotide
ggaguaaacagguugucua

SEQ ID NO: 2313526 - RNA, 19 nt, Artificial Sequence
  Description of Artificial Sequence: Synthetic oligonucleotide
cccuguaagucucauagug

SEQ ID NO: 2313527 - RNA, 19 nt, Artificial Sequence
  Description of Artificial Sequence: Synthetic oligonucleotide
cacacacacacacacggca

SEQ ID NO: 2313528 - RNA, 19 nt, Artificial Sequence
  Description of Artificial Sequence: Synthetic oligonucleotide
acacacacacacacacggc

SEQ ID NO: 2313529 - RNA, 19 nt, Artificial Sequence
  Description of Artificial Sequence: Synthetic oligonucleotide
ugggccagccaccagugau

SEQ ID NO: 2313530 - RNA, 19 nt, Artificial Sequence
  Description of Artificial Sequence: Synthetic oligonucleotide
caccuuauaaauaccuuua

SEQ ID NO: 2313531 - RNA, 19 nt, Artificial Sequence
  Description of Artificial Sequence: Synthetic oligonucleotide
acgcucaccggagggaggc

SEQ ID NO: 2313532 - RNA, 19 nt, Artificial Sequence
  Description of Artificial Sequence: Synthetic oligonucleotide
uuacugucguggcuuuccu

SEQ ID NO: 2313533 - RNA, 19 nt, Artificial Sequence
  Description of Artificial Sequence: Synthetic oligonucleotide
auggucuggggcugcugac

SEQ ID NO: 2313534 - RNA, 19 nt, Artificial Sequence
  Description of Artificial Sequence: Synthetic oligonucleotide
cagugacucuaacaagcag

SEQ ID NO: 2313535 - RNA, 19 nt, Artificial Sequence
  Description of Artificial Sequence: Synthetic oligonucleotide
uggcaggaacuccauucca

SEQ ID NO: 2313536 - RNA, 19 nt, Artificial Sequence
  Description of Artificial Sequence: Synthetic oligonucleotide
aacacagagaaggggucau

SEQ ID NO: 2313537 - RNA, 19 nt, Artificial Sequence
  Description of Artificial Sequence: Synthetic oligonucleotide
gcugaaaggaaaagguggc

SEQ ID NO: 2313538 - RNA, 19 nt, Artificial Sequence
  Description of Artificial Sequence: Synthetic oligonucleotide
gcuaaggagggcugagagg

SEQ ID NO: 2313539 - RNA, 19 nt, Artificial Sequence
  Description of Artificial Sequence: Synthetic oligonucleotide
agaaggggucaucauggau

SEQ ID NO: 2313540 - RNA, 19 nt, Artificial Sequence
  Description of Artificial Sequence: Synthetic oligonucleotide
gagaguacucaugcagaug

SEQ ID NO: 2313541 - RNA, 19 nt, Artificial Sequence
  Description of Artificial Sequence: Synthetic oligonucleotide
caacaucuguaaugaauca

SEQ ID NO: 2313542 - RNA, 19 nt, Artificial Sequence
  Description of Artificial Sequence: Synthetic oligonucleotide
augacagauaacacagaga

SEQ ID NO: 2313543 - RNA, 19 nt, Artificial Sequence
  Description of Artificial Sequence: Synthetic oligonucleotide
gugacucuaacaagcagga

SEQ ID NO: 2313544 - RNA, 19 nt, Artificial Sequence
  Description of Artificial Sequence: Synthetic oligonucleotide
ggguuggacaagcacacac

SEQ ID NO: 2313545 - RNA, 19 nt, Artificial Sequence
  Description of Artificial Sequence: Synthetic oligonucleotide
uggugcuugggaugugugu

SEQ ID NO: 2313546 - RNA, 19 nt, Artificial Sequence
  Description of Artificial Sequence: Synthetic oligonucleotide
ggaaccaagagaguacuca

SEQ ID NO: 2313547 - RNA, 19 nt, Artificial Sequence
  Description of Artificial Sequence: Synthetic oligonucleotide
ugggcuugcgaagggcagg

SEQ ID NO: 2313548 - RNA, 19 nt, Artificial Sequence
  Description of Artificial Sequence: Synthetic oligonucleotide
ugcagaagugggcuaugua

SEQ ID NO: 2313549 - RNA, 19 nt, Artificial Sequence
  Description of Artificial Sequence: Synthetic oligonucleotide
cucauaguggcugccagca

SEQ ID NO: 2313550 - RNA, 19 nt, Artificial Sequence
  Description of Artificial Sequence: Synthetic oligonucleotide
cauuaggaggagaggagaa

SEQ ID NO: 2313551 - RNA, 19 nt, Artificial Sequence
  Description of Artificial Sequence: Synthetic oligonucleotide
cuugccuccccaacaucug

SEQ ID NO: 2313552 - RNA, 19 nt, Artificial Sequence
  Description of Artificial Sequence: Synthetic oligonucleotide
gauggauggcuagggagca

SEQ ID NO: 2313553 - RNA, 19 nt, Artificial Sequence
  Description of Artificial Sequence: Synthetic oligonucleotide
cugcuaugggcuugcgaag

SEQ ID NO: 2313554 - RNA, 19 nt, Artificial Sequence
  Description of Artificial Sequence: Synthetic oligonucleotide
acacacacacacacacacg

SEQ ID NO: 2313555 - RNA, 19 nt, Artificial Sequence
  Description of Artificial Sequence: Synthetic oligonucleotide
ggugcuugggaugugugug

SEQ ID NO: 2313556 - RNA, 19 nt, Artificial Sequence
  Description of Artificial Sequence: Synthetic oligonucleotide
ugucguggcuuuccucugu

SEQ ID NO: 2313557 - RNA, 19 nt, Artificial Sequence
  Description of Artificial Sequence: Synthetic oligonucleotide
augaaucaccuuauaaaua

SEQ ID NO: 2313558 - RNA, 19 nt, Artificial Sequence
  Description of Artificial Sequence: Synthetic oligonucleotide
cuugaccauuuaagggaac

SEQ ID NO: 2313559 - RNA, 19 nt, Artificial Sequence
  Description of Artificial Sequence: Synthetic oligonucleotide
cacccuugucccacagugg

SEQ ID NO: 2313560 - RNA, 19 nt, Artificial Sequence
  Description of Artificial Sequence: Synthetic oligonucleotide
uugccuccccaacaucugu

SEQ ID NO: 2313561 - RNA, 19 nt, Artificial Sequence
  Description of Artificial Sequence: Synthetic oligonucleotide
aagucacugcuaugggcuu

SEQ ID NO: 2313562 - RNA, 19 nt, Artificial Sequence
  Description of Artificial Sequence: Synthetic oligonucleotide
gaagugggcuauguaugac

SEQ ID NO: 2313563 - RNA, 19 nt, Artificial Sequence
  Description of Artificial Sequence: Synthetic oligonucleotide
cacaaacaccagacaggcc

SEQ ID NO: 2313564 - RNA, 19 nt, Artificial Sequence
  Description of Artificial Sequence: Synthetic oligonucleotide
acagacgauggagcaggac

SEQ ID NO: 2313565 - RNA, 19 nt, Artificial Sequence
  Description of Artificial Sequence: Synthetic oligonucleotide
guggguuggacaagcacac

SEQ ID NO: 2313566 - RNA, 19 nt, Artificial Sequence
  Description of Artificial Sequence: Synthetic oligonucleotide
gaaccaagagaguacucau

SEQ ID NO: 2313567 - RNA, 19 nt, Artificial Sequence
  Description of Artificial Sequence: Synthetic oligonucleotide
ucccuacacauggucuggg

SEQ ID NO: 2313568 - RNA, 19 nt, Artificial Sequence
  Description of Artificial Sequence: Synthetic oligonucleotide
gguggguuggacaagcaca

SEQ ID NO: 2313569 - RNA, 19 nt, Artificial Sequence
  Description of Artificial Sequence: Synthetic oligonucleotide
guccacgcucaccggaggg

SEQ ID NO: 2313570 - RNA, 19 nt, Artificial Sequence
  Description of Artificial Sequence: Synthetic oligonucleotide
cuaugggcuugcgaagggc

SEQ ID NO: 2313571 - RNA, 19 nt, Artificial Sequence
  Description of Artificial Sequence: Synthetic oligonucleotide
cuacacauggucuggggcu

SEQ ID NO: 2313572 - RNA, 19 nt, Artificial Sequence
  Description of Artificial Sequence: Synthetic oligonucleotide
ccuacacauggucuggggc

SEQ ID NO: 2313573 - RNA, 19 nt, Artificial Sequence
  Description of Artificial Sequence: Synthetic oligonucleotide
ccuagaggcagcuggcccc

SEQ ID NO: 2313574 - RNA, 19 nt, Artificial Sequence
  Description of Artificial Sequence: Synthetic oligonucleotide
ugcuugggaugugugugug

SEQ ID NO: 2313575 - RNA, 19 nt, Artificial Sequence
  Description of Artificial Sequence: Synthetic oligonucleotide
cagcugaccucagugacuc

SEQ ID NO: 2313576 - RNA, 19 nt, Artificial Sequence
  Description of Artificial Sequence: Synthetic oligonucleotide
agacgauggagcaggacaa

SEQ ID NO: 2313577 - RNA, 19 nt, Artificial Sequence
  Description of Artificial Sequence: Synthetic oligonucleotide
gagaaggggucaucaugga

SEQ ID NO: 2313578 - RNA, 19 nt, Artificial Sequence
  Description of Artificial Sequence: Synthetic oligonucleotide
aaccucuuuucaggaaaau

SEQ ID NO: 2313579 - RNA, 19 nt, Artificial Sequence
  Description of Artificial Sequence: Synthetic oligonucleotide
aagcacacacacacacaca

SEQ ID NO: 2313580 - RNA, 19 nt, Artificial Sequence
  Description of Artificial Sequence: Synthetic oligonucleotide
cucccuacacauggucugg

SEQ ID NO: 2313581 - RNA, 19 nt, Artificial Sequence
  Description of Artificial Sequence: Synthetic oligonucleotide
ccucccaccugcuaaggag

SEQ ID NO: 2313582 - RNA, 19 nt, Artificial Sequence
  Description of Artificial Sequence: Synthetic oligonucleotide
uugcgaagggcaggagaag

SEQ ID NO: 2313583 - RNA, 19 nt, Artificial Sequence
  Description of Artificial Sequence: Synthetic oligonucleotide
gcugacagacgauggagca

SEQ ID NO: 2313584 - RNA, 19 nt, Artificial Sequence
  Description of Artificial Sequence: Synthetic oligonucleotide
gcaaccucuuuucaggaaa

SEQ ID NO: 2313585 - RNA, 19 nt, Artificial Sequence
  Description of Artificial Sequence: Synthetic oligonucleotide
acaagcacacacacacaca

SEQ ID NO: 2313586 - RNA, 19 nt, Artificial Sequence
  Description of Artificial Sequence: Synthetic oligonucleotide
uccauuccauuaggaggag

SEQ ID NO: 2313587 - RNA, 19 nt, Artificial Sequence
  Description of Artificial Sequence: Synthetic oligonucleotide
gcuaugggcuugcgaaggg

SEQ ID NO: 2313588 - RNA, 19 nt, Artificial Sequence
  Description of Artificial Sequence: Synthetic oligonucleotide
agucucauaguggcugcca

SEQ ID NO: 2313589 - RNA, 19 nt, Artificial Sequence
  Description of Artificial Sequence: Synthetic oligonucleotide
cauaguggcugccagcagu

SEQ ID NO: 2313590 - RNA, 19 nt, Artificial Sequence
  Description of Artificial Sequence: Synthetic oligonucleotide
cgauggagcaggacaaugc

SEQ ID NO: 2313591 - RNA, 19 nt, Artificial Sequence
  Description of Artificial Sequence: Synthetic oligonucleotide
aacaccagacaggccugca

SEQ ID NO: 2313592 - RNA, 19 nt, Artificial Sequence
  Description of Artificial Sequence: Synthetic oligonucleotide
gguugucuacacacacugg

SEQ ID NO: 2313593 - RNA, 19 nt, Artificial Sequence
  Description of Artificial Sequence: Synthetic oligonucleotide
uacuguccuagaggcagcu

SEQ ID NO: 2313594 - RNA, 19 nt, Artificial Sequence
  Description of Artificial Sequence: Synthetic oligonucleotide
acacagagaaggggucauc

SEQ ID NO: 2313595 - RNA, 19 nt, Artificial Sequence
  Description of Artificial Sequence: Synthetic oligonucleotide
gucacugcuaugggcuugc

SEQ ID NO: 2313596 - RNA, 19 nt, Artificial Sequence
  Description of Artificial Sequence: Synthetic oligonucleotide
ugagaggggcugugguggu

SEQ ID NO: 2313597 - RNA, 19 nt, Artificial Sequence
  Description of Artificial Sequence: Synthetic oligonucleotide
ggaaaagguggcuggaggu

SEQ ID NO: 2313598 - RNA, 19 nt, Artificial Sequence
  Description of Artificial Sequence: Synthetic oligonucleotide
ggagaggagaaguuuggcu

SEQ ID NO: 2313599 - RNA, 19 nt, Artificial Sequence
  Description of Artificial Sequence: Synthetic oligonucleotide
agucacugcuaugggcuug

SEQ ID NO: 2313600 - RNA, 19 nt, Artificial Sequence
  Description of Artificial Sequence: Synthetic oligonucleotide
uccacgcucaccggaggga

SEQ ID NO: 2313601 - RNA, 19 nt, Artificial Sequence
  Description of Artificial Sequence: Synthetic oligonucleotide
caaccucuuuucaggaaaa

SEQ ID NO: 2313602 - RNA, 19 nt, Artificial Sequence
  Description of Artificial Sequence: Synthetic oligonucleotide
cuguguccacgcucaccgg

SEQ ID NO: 2313603 - RNA, 19 nt, Artificial Sequence
  Description of Artificial Sequence: Synthetic oligonucleotide
guaugacagauaacacaga

SEQ ID NO: 2313604 - RNA, 19 nt, Artificial Sequence
  Description of Artificial Sequence: Synthetic oligonucleotide
guguccacgcucaccggag

SEQ ID NO: 2313605 - RNA, 19 nt, Artificial Sequence
  Description of Artificial Sequence: Synthetic oligonucleotide
cacgcucaccggagggagg

SEQ ID NO: 2313606 - RNA, 19 nt, Artificial Sequence
  Description of Artificial Sequence: Synthetic oligonucleotide
caaugaaggagacacccuu

SEQ ID NO: 2313607 - RNA, 19 nt, Artificial Sequence
  Description of Artificial Sequence: Synthetic oligonucleotide
cuguaaugaaucaccuuau

SEQ ID NO: 2313608 - RNA, 19 nt, Artificial Sequence
  Description of Artificial Sequence: Synthetic oligonucleotide
cagcaaccucuuuucagga

SEQ ID NO: 2313609 - RNA, 19 nt, Artificial Sequence
  Description of Artificial Sequence: Synthetic oligonucleotide
guguuugcagaagugggcu

SEQ ID NO: 2313610 - RNA, 19 nt, Artificial Sequence
  Description of Artificial Sequence: Synthetic oligonucleotide
gcaggacaaugcuggcugg

SEQ ID NO: 2313611 - RNA, 19 nt, Artificial Sequence
  Description of Artificial Sequence: Synthetic oligonucleotide
augggcuugcgaagggcag

SEQ ID NO: 2313612 - RNA, 19 nt, Artificial Sequence
  Description of Artificial Sequence: Synthetic oligonucleotide
ucguggcuuuccucugugu

SEQ ID NO: 2313613 - RNA, 19 nt, Artificial Sequence
  Description of Artificial Sequence: Synthetic oligonucleotide
gguuccaagucacugcuau

SEQ ID NO: 2313614 - RNA, 19 nt, Artificial Sequence
  Description of Artificial Sequence: Synthetic oligonucleotide
acacacacacacacggcaa

SEQ ID NO: 2313615 - RNA, 19 nt, Artificial Sequence
  Description of Artificial Sequence: Synthetic oligonucleotide
acacacacacacacacaca

SEQ ID NO: 2313616 - RNA, 19 nt, Artificial Sequence
  Description of Artificial Sequence: Synthetic oligonucleotide
caucauggauuacugucgu

SEQ ID NO: 2313617 - RNA, 19 nt, Artificial Sequence
  Description of Artificial Sequence: Synthetic oligonucleotide
gcuugcgaagggcaggaga

SEQ ID NO: 2313618 - RNA, 19 nt, Artificial Sequence
  Description of Artificial Sequence: Synthetic oligonucleotide
acacacacacacggcaaaa

SEQ ID NO: 2313619 - RNA, 19 nt, Artificial Sequence
  Description of Artificial Sequence: Synthetic oligonucleotide
gauuacugucguggcuuuc

SEQ ID NO: 2313620 - RNA, 19 nt, Artificial Sequence
  Description of Artificial Sequence: Synthetic oligonucleotide
caccugcuaaggagggcug

SEQ ID NO: 2313621 - RNA, 19 nt, Artificial Sequence
  Description of Artificial Sequence: Synthetic oligonucleotide
auaguggcugccagcaguu

SEQ ID NO: 2313622 - RNA, 19 nt, Artificial Sequence
  Description of Artificial Sequence: Synthetic oligonucleotide
ccuuggagaugguuccaag

SEQ ID NO: 2313623 - RNA, 19 nt, Artificial Sequence
  Description of Artificial Sequence: Synthetic oligonucleotide
uggugguggguuggacaag

SEQ ID NO: 2313624 - RNA, 19 nt, Artificial Sequence
  Description of Artificial Sequence: Synthetic oligonucleotide
cacacacacacacggcaaa

SEQ ID NO: 2313625 - RNA, 19 nt, Artificial Sequence
  Description of Artificial Sequence: Synthetic oligonucleotide
ucacugcuaugggcuugcg

SEQ ID NO: 2313626 - RNA, 19 nt, Artificial Sequence
  Description of Artificial Sequence: Synthetic oligonucleotide
ggacagagcugaaaggaaa

SEQ ID NO: 2313627 - RNA, 19 nt, Artificial Sequence
  Description of Artificial Sequence: Synthetic oligonucleotide
gaguacucaugcagaugga

SEQ ID NO: 2313628 - RNA, 19 nt, Artificial Sequence
  Description of Artificial Sequence: Synthetic oligonucleotide
cauugagccucuuggcccu

SEQ ID NO: 2313629 - RNA, 19 nt, Artificial Sequence
  Description of Artificial Sequence: Synthetic oligonucleotide
uggguuggacaagcacaca

SEQ ID NO: 2313630 - RNA, 19 nt, Artificial Sequence
  Description of Artificial Sequence: Synthetic oligonucleotide
ggagaagcucuugggugag

SEQ ID NO: 2313631 - RNA, 19 nt, Artificial Sequence
  Description of Artificial Sequence: Synthetic oligonucleotide
cccuacacauggucugggg

SEQ ID NO: 2313632 - RNA, 19 nt, Artificial Sequence
  Description of Artificial Sequence: Synthetic oligonucleotide
gcuauguaugacagauaac

SEQ ID NO: 2313633 - RNA, 19 nt, Artificial Sequence
  Description of Artificial Sequence: Synthetic oligonucleotide
ucaccggagggaggccucc

SEQ ID NO: 2313634 - RNA, 19 nt, Artificial Sequence
  Description of Artificial Sequence: Synthetic oligonucleotide
cucuuggcccuguaagucu

SEQ ID NO: 2313635 - RNA, 19 nt, Artificial Sequence
  Description of Artificial Sequence: Synthetic oligonucleotide
acuguccuagaggcagcug

SEQ ID NO: 2313636 - RNA, 19 nt, Artificial Sequence
  Description of Artificial Sequence: Synthetic oligonucleotide
cucaccggagggaggccuc

SEQ ID NO: 2313637 - RNA, 19 nt, Artificial Sequence
  Description of Artificial Sequence: Synthetic oligonucleotide
accugcuaaggagggcuga

SEQ ID NO: 2313638 - RNA, 19 nt, Artificial Sequence
  Description of Artificial Sequence: Synthetic oligonucleotide
gaggagaaguuuggcuaaa

SEQ ID NO: 2313639 - RNA, 19 nt, Artificial Sequence
  Description of Artificial Sequence: Synthetic oligonucleotide
gagccucuuggcccuguaa

SEQ ID NO: 2313640 - RNA, 19 nt, Artificial Sequence
  Description of Artificial Sequence: Synthetic oligonucleotide
cacugcuaugggcuugcga

SEQ ID NO: 2313641 - RNA, 19 nt, Artificial Sequence
  Description of Artificial Sequence: Synthetic oligonucleotide
uggcccuguaagucucaua

SEQ ID NO: 2313642 - RNA, 19 nt, Artificial Sequence
  Description of Artificial Sequence: Synthetic oligonucleotide
agcuacuguccuagaggca

SEQ ID NO: 2313643 - RNA, 19 nt, Artificial Sequence
  Description of Artificial Sequence: Synthetic oligonucleotide
cccaacaucuguaaugaau

SEQ ID NO: 2313644 - RNA, 19 nt, Artificial Sequence
  Description of Artificial Sequence: Synthetic oligonucleotide
cccuugucccacagugggg

SEQ ID NO: 2313645 - RNA, 19 nt, Artificial Sequence
  Description of Artificial Sequence: Synthetic oligonucleotide
cugaaaggaaaagguggcu

SEQ ID NO: 2313646 - RNA, 19 nt, Artificial Sequence
  Description of Artificial Sequence: Synthetic oligonucleotide
ccaagagaguacucaugca

SEQ ID NO: 2313647 - RNA, 19 nt, Artificial Sequence
  Description of Artificial Sequence: Synthetic oligonucleotide
gggagcaaugcugguuccc

SEQ ID NO: 2313648 - RNA, 19 nt, Artificial Sequence
  Description of Artificial Sequence: Synthetic oligonucleotide
aggccuccauugucauuga

SEQ ID NO: 2313649 - RNA, 19 nt, Artificial Sequence
  Description of Artificial Sequence: Synthetic oligonucleotide
cguggcuuuccucuguguc

SEQ ID NO: 2313650 - RNA, 19 nt, Artificial Sequence
  Description of Artificial Sequence: Synthetic oligonucleotide
ccucuuggcccuguaaguc

SEQ ID NO: 2313651 - RNA, 19 nt, Artificial Sequence
  Description of Artificial Sequence: Synthetic oligonucleotide
gugcuugggaugugugugu

SEQ ID NO: 2313652 - RNA, 19 nt, Artificial Sequence
  Description of Artificial Sequence: Synthetic oligonucleotide
gacacccuugucccacagu

SEQ ID NO: 2313653 - RNA, 19 nt, Artificial Sequence
  Description of Artificial Sequence: Synthetic oligonucleotide
ggccuccauugucauugag

SEQ ID NO: 2313654 - RNA, 19 nt, Artificial Sequence
  Description of Artificial Sequence: Synthetic oligonucleotide
gcugguucccuuggagaug

SEQ ID NO: 2313655 - RNA, 19 nt, Artificial Sequence
  Description of Artificial Sequence: Synthetic oligonucleotide
accggagggaggccuccau

SEQ ID NO: 2313656 - RNA, 19 nt, Artificial Sequence
  Description of Artificial Sequence: Synthetic oligonucleotide
gagaugguuccaagucacu

SEQ ID NO: 2313657 - RNA, 19 nt, Artificial Sequence
  Description of Artificial Sequence: Synthetic oligonucleotide
ggauggcuagggagcaaug

SEQ ID NO: 2313658 - RNA, 19 nt, Artificial Sequence
  Description of Artificial Sequence: Synthetic oligonucleotide
ggcuaaagggaggaagcua

SEQ ID NO: 2313659 - RNA, 19 nt, Artificial Sequence
  Description of Artificial Sequence: Synthetic oligonucleotide
ggaggaagcuacuguccua

SEQ ID NO: 2313660 - RNA, 19 nt, Artificial Sequence
  Description of Artificial Sequence: Synthetic oligonucleotide
gcugaccucagugacucua

SEQ ID NO: 2313661 - RNA, 19 nt, Artificial Sequence
  Description of Artificial Sequence: Synthetic oligonucleotide
ggagcaaugcugguucccu

SEQ ID NO: 2313662 - RNA, 19 nt, Artificial Sequence
  Description of Artificial Sequence: Synthetic oligonucleotide
ggacaagcacacacacaca

SEQ ID NO: 2313663 - RNA, 19 nt, Artificial Sequence
  Description of Artificial Sequence: Synthetic oligonucleotide
auggauggcuagggagcaa

SEQ ID NO: 2313664 - RNA, 19 nt, Artificial Sequence
  Description of Artificial Sequence: Synthetic oligonucleotide
ggccccucccaccugcuaa

SEQ ID NO: 2313665 - RNA, 19 nt, Artificial Sequence
  Description of Artificial Sequence: Synthetic oligonucleotide
gcacacacacacacacaca

SEQ ID NO: 2313666 - RNA, 19 nt, Artificial Sequence
  Description of Artificial Sequence: Synthetic oligonucleotide
gggaaccaagagaguacuc

SEQ ID NO: 2313667 - RNA, 19 nt, Artificial Sequence
  Description of Artificial Sequence: Synthetic oligonucleotide
ggccagccaccagugauga

SEQ ID NO: 2313668 - RNA, 19 nt, Artificial Sequence
  Description of Artificial Sequence: Synthetic oligonucleotide
cugcaggacagagcugaaa

SEQ ID NO: 2313669 - RNA, 19 nt, Artificial Sequence
  Description of Artificial Sequence: Synthetic oligonucleotide
uaguggcugccagcaguuu

SEQ ID NO: 2313670 - RNA, 19 nt, Artificial Sequence
  Description of Artificial Sequence: Synthetic oligonucleotide
gggcuugcgaagggcagga

SEQ ID NO: 2313671 - RNA, 19 nt, Artificial Sequence
  Description of Artificial Sequence: Synthetic oligonucleotide
cuagaggcagcuggccccu

SEQ ID NO: 2313672 - RNA, 19 nt, Artificial Sequence
  Description of Artificial Sequence: Synthetic oligonucleotide
ggauuacugucguggcuuu

SEQ ID NO: 2313673 - RNA, 19 nt, Artificial Sequence
  Description of Artificial Sequence: Synthetic oligonucleotide
gcuagggagcaaugcuggu

SEQ ID NO: 2313674 - RNA, 19 nt, Artificial Sequence
  Description of Artificial Sequence: Synthetic oligonucleotide
ggcuugcgaagggcaggag

SEQ ID NO: 2313675 - RNA, 19 nt, Artificial Sequence
  Description of Artificial Sequence: Synthetic oligonucleotide
ccagccaccagugaugauu

SEQ ID NO: 2313676 - RNA, 19 nt, Artificial Sequence
  Description of Artificial Sequence: Synthetic oligonucleotide
cccaccugcuaaggagggc

SEQ ID NO: 2313677 - RNA, 19 nt, Artificial Sequence
  Description of Artificial Sequence: Synthetic oligonucleotide
ccaccugcuaaggagggcu

SEQ ID NO: 2313678 - RNA, 19 nt, Artificial Sequence
  Description of Artificial Sequence: Synthetic oligonucleotide
ccauuccauuaggaggaga

SEQ ID NO: 2313679 - RNA, 19 nt, Artificial Sequence
  Description of Artificial Sequence: Synthetic oligonucleotide
cccuugccuccccaacauc

SEQ ID NO: 2313680 - RNA, 19 nt, Artificial Sequence
  Description of Artificial Sequence: Synthetic oligonucleotide
gggcuauguaugacagaua

SEQ ID NO: 2313681 - RNA, 19 nt, Artificial Sequence
  Description of Artificial Sequence: Synthetic oligonucleotide
ggggcuguggugguggguu

SEQ ID NO: 2313682 - RNA, 19 nt, Artificial Sequence
  Description of Artificial Sequence: Synthetic oligonucleotide
gcucaccggagggaggccu

SEQ ID NO: 2313683 - RNA, 19 nt, Artificial Sequence
  Description of Artificial Sequence: Synthetic oligonucleotide
caccggagggaggccucca

SEQ ID NO: 2313684 - RNA, 19 nt, Artificial Sequence
  Description of Artificial Sequence: Synthetic oligonucleotide
ccccuugccuccccaacau

SEQ ID NO: 2313685 - RNA, 19 nt, Artificial Sequence
  Description of Artificial Sequence: Synthetic oligonucleotide
cgcucaccggagggaggcc

SEQ ID NO: 2313686 - RNA, 19 nt, Artificial Sequence
  Description of Artificial Sequence: Synthetic oligonucleotide
ccggagggaggccuccauu

SEQ ID NO: 2313687 - RNA, 19 nt, Artificial Sequence
  Description of Artificial Sequence: Synthetic oligonucleotide
uuauuauuaucuaugaggg

SEQ ID NO: 2313688 - RNA, 19 nt, Artificial Sequence
  Description of Artificial Sequence: Synthetic oligonucleotide
accaaaaugaccuagcuac

SEQ ID NO: 2313689 - RNA, 19 nt, Artificial Sequence
  Description of Artificial Sequence: Synthetic oligonucleotide
ucaaguuuaacacuguuag

SEQ ID NO: 2313690 - RNA, 19 nt, Artificial Sequence
  Description of Artificial Sequence: Synthetic oligonucleotide
uuuacaucaaguuuaacac

SEQ ID NO: 2313691 - RNA, 19 nt, Artificial Sequence
  Description of Artificial Sequence: Synthetic oligonucleotide
ugaauuagcaaguuuuagg

SEQ ID NO: 2313692 - RNA, 19 nt, Artificial Sequence
  Description of Artificial Sequence: Synthetic oligonucleotide
aauaauuucaaccuuuauu

SEQ ID NO: 2313693 - RNA, 19 nt, Artificial Sequence
  Description of Artificial Sequence: Synthetic oligonucleotide
uaaacagucugacuuacgg

SEQ ID NO: 2313694 - RNA, 19 nt, Artificial Sequence
  Description of Artificial Sequence: Synthetic oligonucleotide
uaaacgugagaauucaggg

SEQ ID NO: 2313695 - RNA, 19 nt, Artificial Sequence
  Description of Artificial Sequence: Synthetic oligonucleotide
aauuagcaaguuuuaggac

SEQ ID NO: 2313696 - RNA, 19 nt, Artificial Sequence
  Description of Artificial Sequence: Synthetic oligonucleotide
uuugagaugaaccuguaaa

SEQ ID NO: 2313697 - RNA, 19 nt, Artificial Sequence
  Description of Artificial Sequence: Synthetic oligonucleotide
aaguuuaacacuguuagca

SEQ ID NO: 2313698 - RNA, 19 nt, Artificial Sequence
  Description of Artificial Sequence: Synthetic oligonucleotide
ucaaguaucagucucucac

SEQ ID NO: 2313699 - RNA, 19 nt, Artificial Sequence
  Description of Artificial Sequence: Synthetic oligonucleotide
ugugagauacgacaggaag

SEQ ID NO: 2313700 - RNA, 19 nt, Artificial Sequence
  Description of Artificial Sequence: Synthetic oligonucleotide
aauacuugacaacaguggu

SEQ ID NO: 2313701 - RNA, 19 nt, Artificial Sequence
  Description of Artificial Sequence: Synthetic oligonucleotide
acugauagucauuacagag

SEQ ID NO: 2313702 - RNA, 19 nt, Artificial Sequence
  Description of Artificial Sequence: Synthetic oligonucleotide
aaaggaaguguguaugauc

SEQ ID NO: 2313703 - RNA, 19 nt, Artificial Sequence
  Description of Artificial Sequence: Synthetic oligonucleotide
aaguguguaugaucuauac

SEQ ID NO: 2313704 - RNA, 19 nt, Artificial Sequence
  Description of Artificial Sequence: Synthetic oligonucleotide
aaacauuaggguuuuaaaa

SEQ ID NO: 2313705 - RNA, 19 nt, Artificial Sequence
  Description of Artificial Sequence: Synthetic oligonucleotide
acaaaaucgggguuucucc

SEQ ID NO: 2313706 - RNA, 19 nt, Artificial Sequence
  Description of Artificial Sequence: Synthetic oligonucleotide
agaacaaauacuugacaac

SEQ ID NO: 2313707 - RNA, 19 nt, Artificial Sequence
  Description of Artificial Sequence: Synthetic oligonucleotide
uuaguugaaucccguaugg

SEQ ID NO: 2313708 - RNA, 19 nt, Artificial Sequence
  Description of Artificial Sequence: Synthetic oligonucleotide
aacaaucgaaaauauauua

SEQ ID NO: 2313709 - RNA, 19 nt, Artificial Sequence
  Description of Artificial Sequence: Synthetic oligonucleotide
auagucauuacagaguccg

SEQ ID NO: 2313710 - RNA, 19 nt, Artificial Sequence
  Description of Artificial Sequence: Synthetic oligonucleotide
caagcaagcacaaaaucgg

SEQ ID NO: 2313711 - RNA, 19 nt, Artificial Sequence
  Description of Artificial Sequence: Synthetic oligonucleotide
auuagcaaguuuuaggaca

SEQ ID NO: 2313712 - RNA, 19 nt, Artificial Sequence
  Description of Artificial Sequence: Synthetic oligonucleotide
aacagucugacuuacgggu

SEQ ID NO: 2313713 - RNA, 19 nt, Artificial Sequence
  Description of Artificial Sequence: Synthetic oligonucleotide
acaaaguucuaucaaccac

SEQ ID NO: 2313714 - RNA, 19 nt, Artificial Sequence
  Description of Artificial Sequence: Synthetic oligonucleotide
ucgaaaauauauuacagua

SEQ ID NO: 2313715 - RNA, 19 nt, Artificial Sequence
  Description of Artificial Sequence: Synthetic oligonucleotide
caaaguucuaucaaccacc

SEQ ID NO: 2313716 - RNA, 19 nt, Artificial Sequence
  Description of Artificial Sequence: Synthetic oligonucleotide
uuuaguugaaucccguaug

SEQ ID NO: 2313717 - RNA, 19 nt, Artificial Sequence
  Description of Artificial Sequence: Synthetic oligonucleotide
aaccaugugagauacgaca

SEQ ID NO: 2313718 - RNA, 19 nt, Artificial Sequence
  Description of Artificial Sequence: Synthetic oligonucleotide
aaucgaaaauauauuacag

SEQ ID NO: 2313719 - RNA, 19 nt, Artificial Sequence
  Description of Artificial Sequence: Synthetic oligonucleotide
aaguuuuaggacaaaguuc

SEQ ID NO: 2313720 - RNA, 19 nt, Artificial Sequence
  Description of Artificial Sequence: Synthetic oligonucleotide
auuacaguaacaauuaaga

SEQ ID NO: 2313721 - RNA, 19 nt, Artificial Sequence
  Description of Artificial Sequence: Synthetic oligonucleotide
ucugagguacuucacauga

SEQ ID NO: 2313722 - RNA, 19 nt, Artificial Sequence
  Description of Artificial Sequence: Synthetic oligonucleotide
acugacauguuuuaguuga

SEQ ID NO: 2313723 - RNA, 19 nt, Artificial Sequence
  Description of Artificial Sequence: Synthetic oligonucleotide
aguugaaucccguaugguc

SEQ ID NO: 2313724 - RNA, 19 nt, Artificial Sequence
  Description of Artificial Sequence: Synthetic oligonucleotide
aacgugagaauucagggau

SEQ ID NO: 2313725 - RNA, 19 nt, Artificial Sequence
  Description of Artificial Sequence: Synthetic oligonucleotide
aggacaaaguucuaucaac

SEQ ID NO: 2313726 - RNA, 19 nt, Artificial Sequence
  Description of Artificial Sequence: Synthetic oligonucleotide
ugagaugaaccuguaaacg

SEQ ID NO: 2313727 - RNA, 19 nt, Artificial Sequence
  Description of Artificial Sequence: Synthetic oligonucleotide
uucacagucagacaacaga

SEQ ID NO: 2313728 - RNA, 19 nt, Artificial Sequence
  Description of Artificial Sequence: Synthetic oligonucleotide
uaaccuuugguauaaacau

SEQ ID NO: 2313729 - RNA, 19 nt, Artificial Sequence
  Description of Artificial Sequence: Synthetic oligonucleotide
aaaaucgggguuucuccac

SEQ ID NO: 2313730 - RNA, 19 nt, Artificial Sequence
  Description of Artificial Sequence: Synthetic oligonucleotide
uuagcaaugcacacagugc

SEQ ID NO: 2313731 - RNA, 19 nt, Artificial Sequence
  Description of Artificial Sequence: Synthetic oligonucleotide
ucauuacagaguccgauug

SEQ ID NO: 2313732 - RNA, 19 nt, Artificial Sequence
  Description of Artificial Sequence: Synthetic oligonucleotide
uagcaaugcacacagugcc

SEQ ID NO: 2313733 - RNA, 19 nt, Artificial Sequence
  Description of Artificial Sequence: Synthetic oligonucleotide
aucuaugagggguaaacag

SEQ ID NO: 2313734 - RNA, 19 nt, Artificial Sequence
  Description of Artificial Sequence: Synthetic oligonucleotide
augaccuagcuacuuaugg

SEQ ID NO: 2313735 - RNA, 19 nt, Artificial Sequence
  Description of Artificial Sequence: Synthetic oligonucleotide
uugguauaaacauuagggu

SEQ ID NO: 2313736 - RNA, 19 nt, Artificial Sequence
  Description of Artificial Sequence: Synthetic oligonucleotide
uacuugacaacagugguag

SEQ ID NO: 2313737 - RNA, 19 nt, Artificial Sequence
  Description of Artificial Sequence: Synthetic oligonucleotide
acaaucgaaaauauauuac

SEQ ID NO: 2313738 - RNA, 19 nt, Artificial Sequence
  Description of Artificial Sequence: Synthetic oligonucleotide
aguucuaucaaccaccaua

SEQ ID NO: 2313739 - RNA, 19 nt, Artificial Sequence
  Description of Artificial Sequence: Synthetic oligonucleotide
uuuuaguugaaucccguau

SEQ ID NO: 2313740 - RNA, 19 nt, Artificial Sequence
  Description of Artificial Sequence: Synthetic oligonucleotide
ugacccaugacugacaugu

SEQ ID NO: 2313741 - RNA, 19 nt, Artificial Sequence
  Description of Artificial Sequence: Synthetic oligonucleotide
agugagagaauuaaauuag

SEQ ID NO: 2313742 - RNA, 19 nt, Artificial Sequence
  Description of Artificial Sequence: Synthetic oligonucleotide
aaggaaguguguaugaucu

SEQ ID NO: 2313743 - RNA, 19 nt, Artificial Sequence
  Description of Artificial Sequence: Synthetic oligonucleotide
gaucuauacaugaugcucc

SEQ ID NO: 2313744 - RNA, 19 nt, Artificial Sequence
  Description of Artificial Sequence: Synthetic oligonucleotide
uacgacaggaagcaguccc

SEQ ID NO: 2313745 - RNA, 19 nt, Artificial Sequence
  Description of Artificial Sequence: Synthetic oligonucleotide
guaaacgugagaauucagg

SEQ ID NO: 2313746 - RNA, 19 nt, Artificial Sequence
  Description of Artificial Sequence: Synthetic oligonucleotide
uccacugauagucauuaca

SEQ ID NO: 2313747 - RNA, 19 nt, Artificial Sequence
  Description of Artificial Sequence: Synthetic oligonucleotide
aaagagagauuauuauuau

SEQ ID NO: 2313748 - RNA, 19 nt, Artificial Sequence
  Description of Artificial Sequence: Synthetic oligonucleotide
auauauuacaguaacaauu

SEQ ID NO: 2313749 - RNA, 19 nt, Artificial Sequence
  Description of Artificial Sequence: Synthetic oligonucleotide
ugagagaauuaaauuagaa

SEQ ID NO: 2313750 - RNA, 19 nt, Artificial Sequence
  Description of Artificial Sequence: Synthetic oligonucleotide
aaacgaguccccuucccuc

SEQ ID NO: 2313751 - RNA, 19 nt, Artificial Sequence
  Description of Artificial Sequence: Synthetic oligonucleotide
aucgaaaauauauuacagu

SEQ ID NO: 2313752 - RNA, 19 nt, Artificial Sequence
  Description of Artificial Sequence: Synthetic oligonucleotide
ugaccuagcuacuuauggg

SEQ ID NO: 2313753 - RNA, 19 nt, Artificial Sequence
  Description of Artificial Sequence: Synthetic oligonucleotide
uuaggacaaaguucuauca

SEQ ID NO: 2313754 - RNA, 19 nt, Artificial Sequence
  Description of Artificial Sequence: Synthetic oligonucleotide
aaacgugagaauucaggga

SEQ ID NO: 2313755 - RNA, 19 nt, Artificial Sequence
  Description of Artificial Sequence: Synthetic oligonucleotide
gagagaauuaaauuagaaa

SEQ ID NO: 2313756 - RNA, 19 nt, Artificial Sequence
  Description of Artificial Sequence: Synthetic oligonucleotide
uugcaaaggaaagaaagug

SEQ ID NO: 2313757 - RNA, 19 nt, Artificial Sequence
  Description of Artificial Sequence: Synthetic oligonucleotide
aaaaucugaauuagcaagu

SEQ ID NO: 2313758 - RNA, 19 nt, Artificial Sequence
  Description of Artificial Sequence: Synthetic oligonucleotide
uucacaugaacacacucaa

SEQ ID NO: 2313759 - RNA, 19 nt, Artificial Sequence
  Description of Artificial Sequence: Synthetic oligonucleotide
aucuauacaugaugcuccc

SEQ ID NO: 2313760 - RNA, 19 nt, Artificial Sequence
  Description of Artificial Sequence: Synthetic oligonucleotide
accaccauaaaacauucga

SEQ ID NO: 2313761 - RNA, 19 nt, Artificial Sequence
  Description of Artificial Sequence: Synthetic oligonucleotide
guaugaucuauacaugaug

SEQ ID NO: 2313762 - RNA, 19 nt, Artificial Sequence
  Description of Artificial Sequence: Synthetic oligonucleotide
aauuaagaacaaauacuug

SEQ ID NO: 2313763 - RNA, 19 nt, Artificial Sequence
  Description of Artificial Sequence: Synthetic oligonucleotide
ugagauacgacaggaagca

SEQ ID NO: 2313764 - RNA, 19 nt, Artificial Sequence
  Description of Artificial Sequence: Synthetic oligonucleotide
uguguaugaucuauacaug

SEQ ID NO: 2313765 - RNA, 19 nt, Artificial Sequence
  Description of Artificial Sequence: Synthetic oligonucleotide
ugagguacuucacaugaac

SEQ ID NO: 2313766 - RNA, 19 nt, Artificial Sequence
  Description of Artificial Sequence: Synthetic oligonucleotide
ugacuuacggguauccaug

SEQ ID NO: 2313767 - RNA, 19 nt, Artificial Sequence
  Description of Artificial Sequence: Synthetic oligonucleotide
acacucaaguaucagucuc

SEQ ID NO: 2313768 - RNA, 19 nt, Artificial Sequence
  Description of Artificial Sequence: Synthetic oligonucleotide
uauccauggagcaaaggaa

SEQ ID NO: 2313769 - RNA, 19 nt, Artificial Sequence
  Description of Artificial Sequence: Synthetic oligonucleotide
caaucgaaaauauauuaca

SEQ ID NO: 2313770 - RNA, 19 nt, Artificial Sequence
  Description of Artificial Sequence: Synthetic oligonucleotide
uaucaaccaccauaaaaca

SEQ ID NO: 2313771 - RNA, 19 nt, Artificial Sequence
  Description of Artificial Sequence: Synthetic oligonucleotide
aaacauucgaauugacuuu

SEQ ID NO: 2313772 - RNA, 19 nt, Artificial Sequence
  Description of Artificial Sequence: Synthetic oligonucleotide
ugcaguguaaccuuuggua

SEQ ID NO: 2313773 - RNA, 19 nt, Artificial Sequence
  Description of Artificial Sequence: Synthetic oligonucleotide
aaaugaccuagcuacuuau

SEQ ID NO: 2313774 - RNA, 19 nt, Artificial Sequence
  Description of Artificial Sequence: Synthetic oligonucleotide
accaagcaagcacaaaauc

SEQ ID NO: 2313775 - RNA, 19 nt, Artificial Sequence
  Description of Artificial Sequence: Synthetic oligonucleotide
uuacggguauccauggagc

SEQ ID NO: 2313776 - RNA, 19 nt, Artificial Sequence
  Description of Artificial Sequence: Synthetic oligonucleotide
uuaucuaugagggguaaac

SEQ ID NO: 2313777 - RNA, 19 nt, Artificial Sequence
  Description of Artificial Sequence: Synthetic oligonucleotide
agagauuauuauuaucuau

SEQ ID NO: 2313778 - RNA, 19 nt, Artificial Sequence
  Description of Artificial Sequence: Synthetic oligonucleotide
aaucccguauggucucacc

SEQ ID NO: 2313779 - RNA, 19 nt, Artificial Sequence
  Description of Artificial Sequence: Synthetic oligonucleotide
cuuacggguauccauggag

SEQ ID NO: 2313780 - RNA, 19 nt, Artificial Sequence
  Description of Artificial Sequence: Synthetic oligonucleotide
uuacaguaacaauuaagaa

SEQ ID NO: 2313781 - RNA, 19 nt, Artificial Sequence
  Description of Artificial Sequence: Synthetic oligonucleotide
aaaacgaguccccuucccu

SEQ ID NO: 2313782 - RNA, 19 nt, Artificial Sequence
  Description of Artificial Sequence: Synthetic oligonucleotide
auacaugaugcucccuuac

SEQ ID NO: 2313783 - RNA, 19 nt, Artificial Sequence
  Description of Artificial Sequence: Synthetic oligonucleotide
guauccauggagcaaagga

SEQ ID NO: 2313784 - RNA, 19 nt, Artificial Sequence
  Description of Artificial Sequence: Synthetic oligonucleotide
uuacaucaaguuuaacacu

SEQ ID NO: 2313785 - RNA, 19 nt, Artificial Sequence
  Description of Artificial Sequence: Synthetic oligonucleotide
uguaaacgugagaauucag

SEQ ID NO: 2313786 - RNA, 19 nt, Artificial Sequence
  Description of Artificial Sequence: Synthetic oligonucleotide
aaaaugaccuagcuacuua

SEQ ID NO: 2313787 - RNA, 19 nt, Artificial Sequence
  Description of Artificial Sequence: Synthetic oligonucleotide
uacaaggaaggcuuugugu

SEQ ID NO: 2313788 - RNA, 19 nt, Artificial Sequence
  Description of Artificial Sequence: Synthetic oligonucleotide
gaaccuguaaacgugagaa

SEQ ID NO: 2313789 - RNA, 19 nt, Artificial Sequence
  Description of Artificial Sequence: Synthetic oligonucleotide
ugaucuauacaugaugcuc

SEQ ID NO: 2313790 - RNA, 19 nt, Artificial Sequence
  Description of Artificial Sequence: Synthetic oligonucleotide
augaacacacucaaguauc

SEQ ID NO: 2313791 - RNA, 19 nt, Artificial Sequence
  Description of Artificial Sequence: Synthetic oligonucleotide
uguaugaucuauacaugau

SEQ ID NO: 2313792 - RNA, 19 nt, Artificial Sequence
  Description of Artificial Sequence: Synthetic oligonucleotide
uguaaccuuugguauaaac

SEQ ID NO: 2313793 - RNA, 19 nt, Artificial Sequence
  Description of Artificial Sequence: Synthetic oligonucleotide
cuaugagggguaaacaguc

SEQ ID NO: 2313794 - RNA, 19 nt, Artificial Sequence
  Description of Artificial Sequence: Synthetic oligonucleotide
uucaaccuuuauuaaacaa

SEQ ID NO: 2313795 - RNA, 19 nt, Artificial Sequence
  Description of Artificial Sequence: Synthetic oligonucleotide
acuuaugggauuuucuuuu

SEQ ID NO: 2313796 - RNA, 19 nt, Artificial Sequence
  Description of Artificial Sequence: Synthetic oligonucleotide
ugaacacacucaaguauca

SEQ ID NO: 2313797 - RNA, 19 nt, Artificial Sequence
  Description of Artificial Sequence: Synthetic oligonucleotide
aacuugcaaaccaugugag

SEQ ID NO: 2313798 - RNA, 19 nt, Artificial Sequence
  Description of Artificial Sequence: Synthetic oligonucleotide
uguuuuaguugaaucccgu

SEQ ID NO: 2313799 - RNA, 19 nt, Artificial Sequence
  Description of Artificial Sequence: Synthetic oligonucleotide
agagugagagaauuaaauu

SEQ ID NO: 2313800 - RNA, 19 nt, Artificial Sequence
  Description of Artificial Sequence: Synthetic oligonucleotide
guguguaugaucuauacau

SEQ ID NO: 2313801 - RNA, 19 nt, Artificial Sequence
  Description of Artificial Sequence: Synthetic oligonucleotide
ucugaauuagcaaguuuua

SEQ ID NO: 2313802 - RNA, 19 nt, Artificial Sequence
  Description of Artificial Sequence: Synthetic oligonucleotide
ucccuuacuuuccagugca

SEQ ID NO: 2313803 - RNA, 19 nt, Artificial Sequence
  Description of Artificial Sequence: Synthetic oligonucleotide
gaagcagucccugccaagg

SEQ ID NO: 2313804 - RNA, 19 nt, Artificial Sequence
  Description of Artificial Sequence: Synthetic oligonucleotide
uuauuaucuaugaggggua

SEQ ID NO: 2313805 - RNA, 19 nt, Artificial Sequence
  Description of Artificial Sequence: Synthetic oligonucleotide
gacuuacggguauccaugg

SEQ ID NO: 2313806 - RNA, 19 nt, Artificial Sequence
  Description of Artificial Sequence: Synthetic oligonucleotide
uuuucagcaccagggaaag

SEQ ID NO: 2313807 - RNA, 19 nt, Artificial Sequence
  Description of Artificial Sequence: Synthetic oligonucleotide
aauucagggaucugaggua

SEQ ID NO: 2313808 - RNA, 19 nt, Artificial Sequence
  Description of Artificial Sequence: Synthetic oligonucleotide
uaggacaaaguucuaucaa

SEQ ID NO: 2313809 - RNA, 19 nt, Artificial Sequence
  Description of Artificial Sequence: Synthetic oligonucleotide
uuuaaccaagcaagcacaa

SEQ ID NO: 2313810 - RNA, 19 nt, Artificial Sequence
  Description of Artificial Sequence: Synthetic oligonucleotide
guguaugaucuauacauga

SEQ ID NO: 2313811 - RNA, 19 nt, Artificial Sequence
  Description of Artificial Sequence: Synthetic oligonucleotide
agugugacccaugacugac

SEQ ID NO: 2313812 - RNA, 19 nt, Artificial Sequence
  Description of Artificial Sequence: Synthetic oligonucleotide
gagaauucagggaucugag

SEQ ID NO: 2313813 - RNA, 19 nt, Artificial Sequence
  Description of Artificial Sequence: Synthetic oligonucleotide
gaccuagcuacuuauggga

SEQ ID NO: 2313814 - RNA, 19 nt, Artificial Sequence
  Description of Artificial Sequence: Synthetic oligonucleotide
ugagggguaaacagucuga

SEQ ID NO: 2313815 - RNA, 19 nt, Artificial Sequence
  Description of Artificial Sequence: Synthetic oligonucleotide
auaaauaauuucaaccuuu

SEQ ID NO: 2313816 - RNA, 19 nt, Artificial Sequence
  Description of Artificial Sequence: Synthetic oligonucleotide
ugcaaaccaugugagauac

SEQ ID NO: 2313817 - RNA, 19 nt, Artificial Sequence
  Description of Artificial Sequence: Synthetic oligonucleotide
augagggguaaacagucug

SEQ ID NO: 2313818 - RNA, 19 nt, Artificial Sequence
  Description of Artificial Sequence: Synthetic oligonucleotide
aaaccaugugagauacgac

SEQ ID NO: 2313819 - RNA, 19 nt, Artificial Sequence
  Description of Artificial Sequence: Synthetic oligonucleotide
cuuugugugugcagugugc

SEQ ID NO: 2313820 - RNA, 19 nt, Artificial Sequence
  Description of Artificial Sequence: Synthetic oligonucleotide
ugggcuuuacccucugugc

SEQ ID NO: 2313821 - RNA, 19 nt, Artificial Sequence
  Description of Artificial Sequence: Synthetic oligonucleotide
aaacaaucgaaaauauauu

SEQ ID NO: 2313822 - RNA, 19 nt, Artificial Sequence
  Description of Artificial Sequence: Synthetic oligonucleotide
aagcaagcacaaaaucggg

SEQ ID NO: 2313823 - RNA, 19 nt, Artificial Sequence
  Description of Artificial Sequence: Synthetic oligonucleotide
aaguaucagucucucacuu

SEQ ID NO: 2313824 - RNA, 19 nt, Artificial Sequence
  Description of Artificial Sequence: Synthetic oligonucleotide
caaguuuaacacuguuagc

SEQ ID NO: 2313825 - RNA, 19 nt, Artificial Sequence
  Description of Artificial Sequence: Synthetic oligonucleotide
cacuguuagcaguucacag

SEQ ID NO: 2313826 - RNA, 19 nt, Artificial Sequence
  Description of Artificial Sequence: Synthetic oligonucleotide
aaaguucuaucaaccacca

SEQ ID NO: 2313827 - RNA, 19 nt, Artificial Sequence
  Description of Artificial Sequence: Synthetic oligonucleotide
ccauaaaacauucgaauug

SEQ ID NO: 2313828 - RNA, 19 nt, Artificial Sequence
  Description of Artificial Sequence: Synthetic oligonucleotide
acaggguucugcuacugug

SEQ ID NO: 2313829 - RNA, 19 nt, Artificial Sequence
  Description of Artificial Sequence: Synthetic oligonucleotide
cuucacaugaacacacuca

SEQ ID NO: 2313830 - RNA, 19 nt, Artificial Sequence
  Description of Artificial Sequence: Synthetic oligonucleotide
uuuugagaugaaccuguaa

SEQ ID NO: 2313831 - RNA, 19 nt, Artificial Sequence
  Description of Artificial Sequence: Synthetic oligonucleotide
auaaaacauucgaauugac

SEQ ID NO: 2313832 - RNA, 19 nt, Artificial Sequence
  Description of Artificial Sequence: Synthetic oligonucleotide
caacuugcaaaccauguga

SEQ ID NO: 2313833 - RNA, 19 nt, Artificial Sequence
  Description of Artificial Sequence: Synthetic oligonucleotide
cauaaaacauucgaauuga

SEQ ID NO: 2313834 - RNA, 19 nt, Artificial Sequence
  Description of Artificial Sequence: Synthetic oligonucleotide
aaggcuuugugugugcagu

SEQ ID NO: 2313835 - RNA, 19 nt, Artificial Sequence
  Description of Artificial Sequence: Synthetic oligonucleotide
ugacugacauguuuuaguu

SEQ ID NO: 2313836 - RNA, 19 nt, Artificial Sequence
  Description of Artificial Sequence: Synthetic oligonucleotide
agcaaguuuuaggacaaag

SEQ ID NO: 2313837 - RNA, 19 nt, Artificial Sequence
  Description of Artificial Sequence: Synthetic oligonucleotide
aagcagucccugccaaggg

SEQ ID NO: 2313838 - RNA, 19 nt, Artificial Sequence
  Description of Artificial Sequence: Synthetic oligonucleotide
uacaugaugcucccuuacu

SEQ ID NO: 2313839 - RNA, 19 nt, Artificial Sequence
  Description of Artificial Sequence: Synthetic oligonucleotide
agcaaaggaaguguguaug

SEQ ID NO: 2313840 - RNA, 19 nt, Artificial Sequence
  Description of Artificial Sequence: Synthetic oligonucleotide
uugacaacagugguagugu

SEQ ID NO: 2313841 - RNA, 19 nt, Artificial Sequence
  Description of Artificial Sequence: Synthetic oligonucleotide
agggaucugagguacuuca

SEQ ID NO: 2313842 - RNA, 19 nt, Artificial Sequence
  Description of Artificial Sequence: Synthetic oligonucleotide
gacugacauguuuuaguug

SEQ ID NO: 2313843 - RNA, 19 nt, Artificial Sequence
  Description of Artificial Sequence: Synthetic oligonucleotide
cauuacagaguccgauugc

SEQ ID NO: 2313844 - RNA, 19 nt, Artificial Sequence
  Description of Artificial Sequence: Synthetic oligonucleotide
gugagauacgacaggaagc

SEQ ID NO: 2313845 - RNA, 19 nt, Artificial Sequence
  Description of Artificial Sequence: Synthetic oligonucleotide
aagaaagugcagggucuac

SEQ ID NO: 2313846 - RNA, 19 nt, Artificial Sequence
  Description of Artificial Sequence: Synthetic oligonucleotide
gauacgacaggaagcaguc

SEQ ID NO: 2313847 - RNA, 19 nt, Artificial Sequence
  Description of Artificial Sequence: Synthetic oligonucleotide
augaucuauacaugaugcu

SEQ ID NO: 2313848 - RNA, 19 nt, Artificial Sequence
  Description of Artificial Sequence: Synthetic oligonucleotide
auguuuuaguugaaucccg

SEQ ID NO: 2313849 - RNA, 19 nt, Artificial Sequence
  Description of Artificial Sequence: Synthetic oligonucleotide
cugaauuagcaaguuuuag

SEQ ID NO: 2313850 - RNA, 19 nt, Artificial Sequence
  Description of Artificial Sequence: Synthetic oligonucleotide
aacgaguccccuucccucu

SEQ ID NO: 2313851 - RNA, 19 nt, Artificial Sequence
  Description of Artificial Sequence: Synthetic oligonucleotide
uguccccuuagcaaugcac

SEQ ID NO: 2313852 - RNA, 19 nt, Artificial Sequence
  Description of Artificial Sequence: Synthetic oligonucleotide
aaggaaggcuuugugugug

SEQ ID NO: 2313853 - RNA, 19 nt, Artificial Sequence
  Description of Artificial Sequence: Synthetic oligonucleotide
ccacugauagucauuacag

SEQ ID NO: 2313854 - RNA, 19 nt, Artificial Sequence
  Description of Artificial Sequence: Synthetic oligonucleotide
accaccuacgccugcagug

SEQ ID NO: 2313855 - RNA, 19 nt, Artificial Sequence
  Description of Artificial Sequence: Synthetic oligonucleotide
uacuuaugggauuuucuuu

SEQ ID NO: 2313856 - RNA, 19 nt, Artificial Sequence
  Description of Artificial Sequence: Synthetic oligonucleotide
gagaugaaccuguaaacgu

SEQ ID NO: 2313857 - RNA, 19 nt, Artificial Sequence
  Description of Artificial Sequence: Synthetic oligonucleotide
aacauucgaauugacuuuu

SEQ ID NO: 2313858 - RNA, 19 nt, Artificial Sequence
  Description of Artificial Sequence: Synthetic oligonucleotide
ucuacaaggaaggcuuugu

SEQ ID NO: 2313859 - RNA, 19 nt, Artificial Sequence
  Description of Artificial Sequence: Synthetic oligonucleotide
agaugaaccuguaaacgug

SEQ ID NO: 2313860 - RNA, 19 nt, Artificial Sequence
  Description of Artificial Sequence: Synthetic oligonucleotide
caaaccaugugagauacga

SEQ ID NO: 2313861 - RNA, 19 nt, Artificial Sequence
  Description of Artificial Sequence: Synthetic oligonucleotide
aacacaacuugcaaaccau

SEQ ID NO: 2313862 - RNA, 19 nt, Artificial Sequence
  Description of Artificial Sequence: Synthetic oligonucleotide
gaaagugcagggucuacaa

SEQ ID NO: 2313863 - RNA, 19 nt, Artificial Sequence
  Description of Artificial Sequence: Synthetic oligonucleotide
aaugaccuagcuacuuaug

SEQ ID NO: 2313864 - RNA, 19 nt, Artificial Sequence
  Description of Artificial Sequence: Synthetic oligonucleotide
uccgauugcaaaggaaaga

SEQ ID NO: 2313865 - RNA, 19 nt, Artificial Sequence
  Description of Artificial Sequence: Synthetic oligonucleotide
caaccaccauaaaacauuc

SEQ ID NO: 2313866 - RNA, 19 nt, Artificial Sequence
  Description of Artificial Sequence: Synthetic oligonucleotide
gguuucuccacugauaguc

SEQ ID NO: 2313867 - RNA, 19 nt, Artificial Sequence
  Description of Artificial Sequence: Synthetic oligonucleotide
cacaggaaaacgagucccc

SEQ ID NO: 2313868 - RNA, 19 nt, Artificial Sequence
  Description of Artificial Sequence: Synthetic oligonucleotide
aaaucugaauuagcaaguu

SEQ ID NO: 2313869 - RNA, 19 nt, Artificial Sequence
  Description of Artificial Sequence: Synthetic oligonucleotide
guacuucacaugaacacac

SEQ ID NO: 2313870 - RNA, 19 nt, Artificial Sequence
  Description of Artificial Sequence: Synthetic oligonucleotide
uauacaugaugcucccuua

SEQ ID NO: 2313871 - RNA, 19 nt, Artificial Sequence
  Description of Artificial Sequence: Synthetic oligonucleotide
cacaugaacacacucaagu

SEQ ID NO: 2313872 - RNA, 19 nt, Artificial Sequence
  Description of Artificial Sequence: Synthetic oligonucleotide
gagagauuauuauuaucua

SEQ ID NO: 2313873 - RNA, 19 nt, Artificial Sequence
  Description of Artificial Sequence: Synthetic oligonucleotide
ugacaacagugguagugug

SEQ ID NO: 2313874 - RNA, 19 nt, Artificial Sequence
  Description of Artificial Sequence: Synthetic oligonucleotide
agauacgacaggaagcagu

SEQ ID NO: 2313875 - RNA, 19 nt, Artificial Sequence
  Description of Artificial Sequence: Synthetic oligonucleotide
acaacagagugagagaauu

SEQ ID NO: 2313876 - RNA, 19 nt, Artificial Sequence
  Description of Artificial Sequence: Synthetic oligonucleotide
agcaaugcacacagugccc

SEQ ID NO: 2313877 - RNA, 19 nt, Artificial Sequence
  Description of Artificial Sequence: Synthetic oligonucleotide
uacggguauccauggagca

SEQ ID NO: 2313878 - RNA, 19 nt, Artificial Sequence
  Description of Artificial Sequence: Synthetic oligonucleotide
gaugaaccuguaaacguga

SEQ ID NO: 2313879 - RNA, 19 nt, Artificial Sequence
  Description of Artificial Sequence: Synthetic oligonucleotide
guauggucucaccaggcac

SEQ ID NO: 2313880 - RNA, 19 nt, Artificial Sequence
  Description of Artificial Sequence: Synthetic oligonucleotide
uguuagcaguucacaguca

SEQ ID NO: 2313881 - RNA, 19 nt, Artificial Sequence
  Description of Artificial Sequence: Synthetic oligonucleotide
ucuccacugauagucauua

SEQ ID NO: 2313882 - RNA, 19 nt, Artificial Sequence
  Description of Artificial Sequence: Synthetic oligonucleotide
gugggcuuuacccucugug

SEQ ID NO: 2313883 - RNA, 19 nt, Artificial Sequence
  Description of Artificial Sequence: Synthetic oligonucleotide
aaccaagcaagcacaaaau

SEQ ID NO: 2313884 - RNA, 19 nt, Artificial Sequence
  Description of Artificial Sequence: Synthetic oligonucleotide
accagggaaagagagauua

SEQ ID NO: 2313885 - RNA, 19 nt, Artificial Sequence
  Description of Artificial Sequence: Synthetic oligonucleotide
aguccgauugcaaaggaaa

SEQ ID NO: 2313886 - RNA, 19 nt, Artificial Sequence
  Description of Artificial Sequence: Synthetic oligonucleotide
ggacaaaguucuaucaacc

SEQ ID NO: 2313887 - RNA, 19 nt, Artificial Sequence
  Description of Artificial Sequence: Synthetic oligonucleotide
aucugagguacuucacaug

SEQ ID NO: 2313888 - RNA, 19 nt, Artificial Sequence
  Description of Artificial Sequence: Synthetic oligonucleotide
cauuuugagaugaaccugu

SEQ ID NO: 2313889 - RNA, 19 nt, Artificial Sequence
  Description of Artificial Sequence: Synthetic oligonucleotide
aaccuguaaacgugagaau

SEQ ID NO: 2313890 - RNA, 19 nt, Artificial Sequence
  Description of Artificial Sequence: Synthetic oligonucleotide
agugcaguuuccaacucug

SEQ ID NO: 2313891 - RNA, 19 nt, Artificial Sequence
  Description of Artificial Sequence: Synthetic oligonucleotide
cuacaaggaaggcuuugug

SEQ ID NO: 2313892 - RNA, 19 nt, Artificial Sequence
  Description of Artificial Sequence: Synthetic oligonucleotide
gauagucauuacagagucc

SEQ ID NO: 2313893 - RNA, 19 nt, Artificial Sequence
  Description of Artificial Sequence: Synthetic oligonucleotide
agcuacuuaugggauuuuc

SEQ ID NO: 2313894 - RNA, 19 nt, Artificial Sequence
  Description of Artificial Sequence: Synthetic oligonucleotide
accuguaaacgugagaauu

SEQ ID NO: 2313895 - RNA, 19 nt, Artificial Sequence
  Description of Artificial Sequence: Synthetic oligonucleotide
aaccaccauaaaacauucg

SEQ ID NO: 2313896 - RNA, 19 nt, Artificial Sequence
  Description of Artificial Sequence: Synthetic oligonucleotide
acuugcaaaccaugugaga

SEQ ID NO: 2313897 - RNA, 19 nt, Artificial Sequence
  Description of Artificial Sequence: Synthetic oligonucleotide
aguguaaccuuugguauaa

SEQ ID NO: 2313898 - RNA, 19 nt, Artificial Sequence
  Description of Artificial Sequence: Synthetic oligonucleotide
aguucacagucagacaaca

SEQ ID NO: 2313899 - RNA, 19 nt, Artificial Sequence
  Description of Artificial Sequence: Synthetic oligonucleotide
guuuccaacucugugcaca

SEQ ID NO: 2313900 - RNA, 19 nt, Artificial Sequence
  Description of Artificial Sequence: Synthetic oligonucleotide
aaugcacacagugcccacu

SEQ ID NO: 2313901 - RNA, 19 nt, Artificial Sequence
  Description of Artificial Sequence: Synthetic oligonucleotide
gagguacuucacaugaaca

SEQ ID NO: 2313902 - RNA, 19 nt, Artificial Sequence
  Description of Artificial Sequence: Synthetic oligonucleotide
agaacacaggaaaacgagu

SEQ ID NO: 2313903 - RNA, 19 nt, Artificial Sequence
  Description of Artificial Sequence: Synthetic oligonucleotide
agcacaaaaucgggguuuc

SEQ ID NO: 2313904 - RNA, 19 nt, Artificial Sequence
  Description of Artificial Sequence: Synthetic oligonucleotide
guaaacagucugacuuacg

SEQ ID NO: 2313905 - RNA, 19 nt, Artificial Sequence
  Description of Artificial Sequence: Synthetic oligonucleotide
agucauuacagaguccgau

SEQ ID NO: 2313906 - RNA, 19 nt, Artificial Sequence
  Description of Artificial Sequence: Synthetic oligonucleotide
aaagaaagugcagggucua

SEQ ID NO: 2313907 - RNA, 19 nt, Artificial Sequence
  Description of Artificial Sequence: Synthetic oligonucleotide
uuacuuuccagugcaguuu

SEQ ID NO: 2313908 - RNA, 19 nt, Artificial Sequence
  Description of Artificial Sequence: Synthetic oligonucleotide
uugaaucccguauggucuc

SEQ ID NO: 2313909 - RNA, 19 nt, Artificial Sequence
  Description of Artificial Sequence: Synthetic oligonucleotide
cucccuuacuuuccagugc

SEQ ID NO: 2313910 - RNA, 19 nt, Artificial Sequence
  Description of Artificial Sequence: Synthetic oligonucleotide
caaaaucgggguuucucca

SEQ ID NO: 2313911 - RNA, 19 nt, Artificial Sequence
  Description of Artificial Sequence: Synthetic oligonucleotide
agaaagugcagggucuaca

SEQ ID NO: 2313912 - RNA, 19 nt, Artificial Sequence
  Description of Artificial Sequence: Synthetic oligonucleotide
uauuaucuaugagggguaa

SEQ ID NO: 2313913 - RNA, 19 nt, Artificial Sequence
  Description of Artificial Sequence: Synthetic oligonucleotide
cacaaaaucgggguuucuc

SEQ ID NO: 2313914 - RNA, 19 nt, Artificial Sequence
  Description of Artificial Sequence: Synthetic oligonucleotide
caguuuccaacucugugca

SEQ ID NO: 2313915 - RNA, 19 nt, Artificial Sequence
  Description of Artificial Sequence: Synthetic oligonucleotide
ucucaccaggcacuguguc

SEQ ID NO: 2313916 - RNA, 19 nt, Artificial Sequence
  Description of Artificial Sequence: Synthetic oligonucleotide
uagucauuacagaguccga

SEQ ID NO: 2313917 - RNA, 19 nt, Artificial Sequence
  Description of Artificial Sequence: Synthetic oligonucleotide
auacgacaggaagcagucc

SEQ ID NO: 2313918 - RNA, 19 nt, Artificial Sequence
  Description of Artificial Sequence: Synthetic oligonucleotide
guuuaacacuguuagcagu

SEQ ID NO: 2313919 - RNA, 19 nt, Artificial Sequence
  Description of Artificial Sequence: Synthetic oligonucleotide
ucugacuuacggguaucca

SEQ ID NO: 2313920 - RNA, 19 nt, Artificial Sequence
  Description of Artificial Sequence: Synthetic oligonucleotide
gagggguaaacagucugac

SEQ ID NO: 2313921 - RNA, 19 nt, Artificial Sequence
  Description of Artificial Sequence: Synthetic oligonucleotide
gaucugagguacuucacau

SEQ ID NO: 2313922 - RNA, 19 nt, Artificial Sequence
  Description of Artificial Sequence: Synthetic oligonucleotide
uccccuuagcaaugcacac

SEQ ID NO: 2313923 - RNA, 19 nt, Artificial Sequence
  Description of Artificial Sequence: Synthetic oligonucleotide
cugauagucauuacagagu

SEQ ID NO: 2313924 - RNA, 19 nt, Artificial Sequence
  Description of Artificial Sequence: Synthetic oligonucleotide
agaguccgauugcaaagga

SEQ ID NO: 2313925 - RNA, 19 nt, Artificial Sequence
  Description of Artificial Sequence: Synthetic oligonucleotide
cccuuagcaaugcacacag

SEQ ID NO: 2313926 - RNA, 19 nt, Artificial Sequence
  Description of Artificial Sequence: Synthetic oligonucleotide
uuaaccaagcaagcacaaa

SEQ ID NO: 2313927 - RNA, 19 nt, Artificial Sequence
  Description of Artificial Sequence: Synthetic oligonucleotide
ugacauguuuuaguugaau

SEQ ID NO: 2313928 - RNA, 19 nt, Artificial Sequence
  Description of Artificial Sequence: Synthetic oligonucleotide
ggucucaccaggcacugug

SEQ ID NO: 2313929 - RNA, 19 nt, Artificial Sequence
  Description of Artificial Sequence: Synthetic oligonucleotide
aguaucagucucucacuuu

SEQ ID NO: 2313930 - RNA, 19 nt, Artificial Sequence
  Description of Artificial Sequence: Synthetic oligonucleotide
agggguaaacagucugacu

SEQ ID NO: 2313931 - RNA, 19 nt, Artificial Sequence
  Description of Artificial Sequence: Synthetic oligonucleotide
agggucuacaaggaaggcu

SEQ ID NO: 2313932 - RNA, 19 nt, Artificial Sequence
  Description of Artificial Sequence: Synthetic oligonucleotide
caugaacacacucaaguau

SEQ ID NO: 2313933 - RNA, 19 nt, Artificial Sequence
  Description of Artificial Sequence: Synthetic oligonucleotide
caguucacagucagacaac

SEQ ID NO: 2313934 - RNA, 19 nt, Artificial Sequence
  Description of Artificial Sequence: Synthetic oligonucleotide
aucaaccaccauaaaacau

SEQ ID NO: 2313935 - RNA, 19 nt, Artificial Sequence
  Description of Artificial Sequence: Synthetic oligonucleotide
caacucugugcacacgguc

SEQ ID NO: 2313936 - RNA, 19 nt, Artificial Sequence
  Description of Artificial Sequence: Synthetic oligonucleotide
gugguagugugacccauga

SEQ ID NO: 2313937 - RNA, 19 nt, Artificial Sequence
  Description of Artificial Sequence: Synthetic oligonucleotide
gacaacagugguaguguga

SEQ ID NO: 2313938 - RNA, 19 nt, Artificial Sequence
  Description of Artificial Sequence: Synthetic oligonucleotide
uguguccccuuagcaaugc

SEQ ID NO: 2313939 - RNA, 19 nt, Artificial Sequence
  Description of Artificial Sequence: Synthetic oligonucleotide
cacugauagucauuacaga

SEQ ID NO: 2313940 - RNA, 19 nt, Artificial Sequence
  Description of Artificial Sequence: Synthetic oligonucleotide
cuguaaacgugagaauuca

SEQ ID NO: 2313941 - RNA, 19 nt, Artificial Sequence
  Description of Artificial Sequence: Synthetic oligonucleotide
gguacuucacaugaacaca

SEQ ID NO: 2313942 - RNA, 19 nt, Artificial Sequence
  Description of Artificial Sequence: Synthetic oligonucleotide
aaguucuaucaaccaccau

SEQ ID NO: 2313943 - RNA, 19 nt, Artificial Sequence
  Description of Artificial Sequence: Synthetic oligonucleotide
guuuuaguugaaucccgua

SEQ ID NO: 2313944 - RNA, 19 nt, Artificial Sequence
  Description of Artificial Sequence: Synthetic oligonucleotide
ugugcacacgguccugcuc

SEQ ID NO: 2313945 - RNA, 19 nt, Artificial Sequence
  Description of Artificial Sequence: Synthetic oligonucleotide
gugagagaauuaaauuaga

SEQ ID NO: 2313946 - RNA, 19 nt, Artificial Sequence
  Description of Artificial Sequence: Synthetic oligonucleotide
ggaucugagguacuucaca

SEQ ID NO: 2313947 - RNA, 19 nt, Artificial Sequence
  Description of Artificial Sequence: Synthetic oligonucleotide
acagugguagugugaccca

SEQ ID NO: 2313948 - RNA, 19 nt, Artificial Sequence
  Description of Artificial Sequence: Synthetic oligonucleotide
aggcuuugugugugcagug

SEQ ID NO: 2313949 - RNA, 19 nt, Artificial Sequence
  Description of Artificial Sequence: Synthetic oligonucleotide
guaucagucucucacuuuu

SEQ ID NO: 2313950 - RNA, 19 nt, Artificial Sequence
  Description of Artificial Sequence: Synthetic oligonucleotide
ugguagugugacccaugac

SEQ ID NO: 2313951 - RNA, 19 nt, Artificial Sequence
  Description of Artificial Sequence: Synthetic oligonucleotide
uucuccacugauagucauu

SEQ ID NO: 2313952 - RNA, 19 nt, Artificial Sequence
  Description of Artificial Sequence: Synthetic oligonucleotide
acaggaaaacgaguccccu

SEQ ID NO: 2313953 - RNA, 19 nt, Artificial Sequence
  Description of Artificial Sequence: Synthetic oligonucleotide
ucuauacaugaugcucccu

SEQ ID NO: 2313954 - RNA, 19 nt, Artificial Sequence
  Description of Artificial Sequence: Synthetic oligonucleotide
gggguaaacagucugacuu

SEQ ID NO: 2313955 - RNA, 19 nt, Artificial Sequence
  Description of Artificial Sequence: Synthetic oligonucleotide
acuuacggguauccaugga

SEQ ID NO: 2313956 - RNA, 19 nt, Artificial Sequence
  Description of Artificial Sequence: Synthetic oligonucleotide
gguaaacagucugacuuac

SEQ ID NO: 2313957 - RNA, 19 nt, Artificial Sequence
  Description of Artificial Sequence: Synthetic oligonucleotide
gcucccuuacuuuccagug

SEQ ID NO: 2313958 - RNA, 19 nt, Artificial Sequence
  Description of Artificial Sequence: Synthetic oligonucleotide
agggcaucauuuauuuaca

SEQ ID NO: 2313959 - RNA, 19 nt, Artificial Sequence
  Description of Artificial Sequence: Synthetic oligonucleotide
cacaacuugcaaaccaugu

SEQ ID NO: 2313960 - RNA, 19 nt, Artificial Sequence
  Description of Artificial Sequence: Synthetic oligonucleotide
gagauacgacaggaagcag

SEQ ID NO: 2313961 - RNA, 19 nt, Artificial Sequence
  Description of Artificial Sequence: Synthetic oligonucleotide
augaaccuguaaacgugag

SEQ ID NO: 2313962 - RNA, 19 nt, Artificial Sequence
  Description of Artificial Sequence: Synthetic oligonucleotide
caacagugguagugugacc

SEQ ID NO: 2313963 - RNA, 19 nt, Artificial Sequence
  Description of Artificial Sequence: Synthetic oligonucleotide
agucugacuuacggguauc

SEQ ID NO: 2313964 - RNA, 19 nt, Artificial Sequence
  Description of Artificial Sequence: Synthetic oligonucleotide
ggaaaacgaguccccuucc

SEQ ID NO: 2313965 - RNA, 19 nt, Artificial Sequence
  Description of Artificial Sequence: Synthetic oligonucleotide
gcuuugugugugcagugug

SEQ ID NO: 2313966 - RNA, 19 nt, Artificial Sequence
  Description of Artificial Sequence: Synthetic oligonucleotide
ggaaagagagauuauuauu

SEQ ID NO: 2313967 - RNA, 19 nt, Artificial Sequence
  Description of Artificial Sequence: Synthetic oligonucleotide
gucugacuuacggguaucc

SEQ ID NO: 2313968 - RNA, 19 nt, Artificial Sequence
  Description of Artificial Sequence: Synthetic oligonucleotide
auacuugacaacaguggua

SEQ ID NO: 2313969 - RNA, 19 nt, Artificial Sequence
  Description of Artificial Sequence: Synthetic oligonucleotide
gucuacaaggaaggcuuug

SEQ ID NO: 2313970 - RNA, 19 nt, Artificial Sequence
  Description of Artificial Sequence: Synthetic oligonucleotide
cuguguccccuuagcaaug

SEQ ID NO: 2313971 - RNA, 19 nt, Artificial Sequence
  Description of Artificial Sequence: Synthetic oligonucleotide
acgugagaauucagggauc

SEQ ID NO: 2313972 - RNA, 19 nt, Artificial Sequence
  Description of Artificial Sequence: Synthetic oligonucleotide
cuacgccugcaguguaacc

SEQ ID NO: 2313973 - RNA, 19 nt, Artificial Sequence
  Description of Artificial Sequence: Synthetic oligonucleotide
gaaguguguaugaucuaua

SEQ ID NO: 2313974 - RNA, 19 nt, Artificial Sequence
  Description of Artificial Sequence: Synthetic oligonucleotide
cuuacuuuccagugcaguu

SEQ ID NO: 2313975 - RNA, 19 nt, Artificial Sequence
  Description of Artificial Sequence: Synthetic oligonucleotide
auuaucuaugagggguaaa

SEQ ID NO: 2313976 - RNA, 19 nt, Artificial Sequence
  Description of Artificial Sequence: Synthetic oligonucleotide
ugugggcuuuacccucugu

SEQ ID NO: 2313977 - RNA, 19 nt, Artificial Sequence
  Description of Artificial Sequence: Synthetic oligonucleotide
ugcacacagugcccacugu

SEQ ID NO: 2313978 - RNA, 19 nt, Artificial Sequence
  Description of Artificial Sequence: Synthetic oligonucleotide
cuuuccagugcaguuucca

SEQ ID NO: 2313979 - RNA, 19 nt, Artificial Sequence
  Description of Artificial Sequence: Synthetic oligonucleotide
uuuacccucugugcaccac

SEQ ID NO: 2313980 - RNA, 19 nt, Artificial Sequence
  Description of Artificial Sequence: Synthetic oligonucleotide
ucagggaucugagguacuu

SEQ ID NO: 2313981 - RNA, 19 nt, Artificial Sequence
  Description of Artificial Sequence: Synthetic oligonucleotide
aucgggguuucuccacuga

SEQ ID NO: 2313982 - RNA, 19 nt, Artificial Sequence
  Description of Artificial Sequence: Synthetic oligonucleotide
gguauccauggagcaaagg

SEQ ID NO: 2313983 - RNA, 19 nt, Artificial Sequence
  Description of Artificial Sequence: Synthetic oligonucleotide
caaguaucagucucucacu

SEQ ID NO: 2313984 - RNA, 19 nt, Artificial Sequence
  Description of Artificial Sequence: Synthetic oligonucleotide
ccucugugcaccaccuacg

SEQ ID NO: 2313985 - RNA, 19 nt, Artificial Sequence
  Description of Artificial Sequence: Synthetic oligonucleotide
acgaguccccuucccucuc

SEQ ID NO: 2313986 - RNA, 19 nt, Artificial Sequence
  Description of Artificial Sequence: Synthetic oligonucleotide
agugguagugugacccaug

SEQ ID NO: 2313987 - RNA, 19 nt, Artificial Sequence
  Description of Artificial Sequence: Synthetic oligonucleotide
ggcuuuacccucugugcac

SEQ ID NO: 2313988 - RNA, 19 nt, Artificial Sequence
  Description of Artificial Sequence: Synthetic oligonucleotide
cucaaguaucagucucuca

SEQ ID NO: 2313989 - RNA, 19 nt, Artificial Sequence
  Description of Artificial Sequence: Synthetic oligonucleotide
augcucccuuacuuuccag

SEQ ID NO: 2313990 - RNA, 19 nt, Artificial Sequence
  Description of Artificial Sequence: Synthetic oligonucleotide
cccguauggucucaccagg

SEQ ID NO: 2313991 - RNA, 19 nt, Artificial Sequence
  Description of Artificial Sequence: Synthetic oligonucleotide
gggcuuuacccucugugca

SEQ ID NO: 2313992 - RNA, 19 nt, Artificial Sequence
  Description of Artificial Sequence: Synthetic oligonucleotide
ugaaucccguauggucuca

SEQ ID NO: 2313993 - RNA, 19 nt, Artificial Sequence
  Description of Artificial Sequence: Synthetic oligonucleotide
cugacuuacggguauccau

SEQ ID NO: 2313994 - RNA, 19 nt, Artificial Sequence
  Description of Artificial Sequence: Synthetic oligonucleotide
caguguaaccuuugguaua

SEQ ID NO: 2313995 - RNA, 19 nt, Artificial Sequence
  Description of Artificial Sequence: Synthetic oligonucleotide
cuccacugauagucauuac

SEQ ID NO: 2313996 - RNA, 19 nt, Artificial Sequence
  Description of Artificial Sequence: Synthetic oligonucleotide
ggagcaaaggaagugugua

SEQ ID NO: 2313997 - RNA, 19 nt, Artificial Sequence
  Description of Artificial Sequence: Synthetic oligonucleotide
agcaccagggaaagagaga

SEQ ID NO: 2313998 - RNA, 19 nt, Artificial Sequence
  Description of Artificial Sequence: Synthetic oligonucleotide
cacucaaguaucagucucu

SEQ ID NO: 2313999 - RNA, 19 nt, Artificial Sequence
  Description of Artificial Sequence: Synthetic oligonucleotide
gucauuacagaguccgauu

SEQ ID NO: 2314000 - RNA, 19 nt, Artificial Sequence
  Description of Artificial Sequence: Synthetic oligonucleotide
gaguccgauugcaaaggaa

SEQ ID NO: 2314001 - RNA, 19 nt, Artificial Sequence
  Description of Artificial Sequence: Synthetic oligonucleotide
ugcucacaggguucugcua

SEQ ID NO: 2314002 - RNA, 19 nt, Artificial Sequence
  Description of Artificial Sequence: Synthetic oligonucleotide
aggaaguguguaugaucua

SEQ ID NO: 2314003 - RNA, 19 nt, Artificial Sequence
  Description of Artificial Sequence: Synthetic oligonucleotide
caacagagugagagaauua

SEQ ID NO: 2314004 - RNA, 19 nt, Artificial Sequence
  Description of Artificial Sequence: Synthetic oligonucleotide
gaaucccguauggucucac

SEQ ID NO: 2314005 - RNA, 19 nt, Artificial Sequence
  Description of Artificial Sequence: Synthetic oligonucleotide
accuagcuacuuaugggau

SEQ ID NO: 2314006 - RNA, 19 nt, Artificial Sequence
  Description of Artificial Sequence: Synthetic oligonucleotide
ccaccauaaaacauucgaa

SEQ ID NO: 2314007 - RNA, 19 nt, Artificial Sequence
  Description of Artificial Sequence: Synthetic oligonucleotide
cagggucuacaaggaaggc

SEQ ID NO: 2314008 - RNA, 19 nt, Artificial Sequence
  Description of Artificial Sequence: Synthetic oligonucleotide
uauaaacauuaggguuuua

SEQ ID NO: 2314009 - RNA, 19 nt, Artificial Sequence
  Description of Artificial Sequence: Synthetic oligonucleotide
auuuugagaugaaccugua

SEQ ID NO: 2314010 - RNA, 19 nt, Artificial Sequence
  Description of Artificial Sequence: Synthetic oligonucleotide
acgacaggaagcagucccu

SEQ ID NO: 2314011 - RNA, 19 nt, Artificial Sequence
  Description of Artificial Sequence: Synthetic oligonucleotide
gugagaauucagggaucug

SEQ ID NO: 2314012 - RNA, 19 nt, Artificial Sequence
  Description of Artificial Sequence: Synthetic oligonucleotide
cacacucaaguaucagucu

SEQ ID NO: 2314013 - RNA, 19 nt, Artificial Sequence
  Description of Artificial Sequence: Synthetic oligonucleotide
ggguaaacagucugacuua

SEQ ID NO: 2314014 - RNA, 19 nt, Artificial Sequence
  Description of Artificial Sequence: Synthetic oligonucleotide
augugagauacgacaggaa

SEQ ID NO: 2314015 - RNA, 19 nt, Artificial Sequence
  Description of Artificial Sequence: Synthetic oligonucleotide
ccauggagcaaaggaagug

SEQ ID NO: 2314016 - RNA, 19 nt, Artificial Sequence
  Description of Artificial Sequence: Synthetic oligonucleotide
gcaaugcacacagugccca

SEQ ID NO: 2314017 - RNA, 19 nt, Artificial Sequence
  Description of Artificial Sequence: Synthetic oligonucleotide
cacagucagacaacagagu

SEQ ID NO: 2314018 - RNA, 19 nt, Artificial Sequence
  Description of Artificial Sequence: Synthetic oligonucleotide
acagucugacuuacgggua

SEQ ID NO: 2314019 - RNA, 19 nt, Artificial Sequence
  Description of Artificial Sequence: Synthetic oligonucleotide
cagggaucugagguacuuc

SEQ ID NO: 2314020 - RNA, 19 nt, Artificial Sequence
  Description of Artificial Sequence: Synthetic oligonucleotide
caggguucugcuacugugu

SEQ ID NO: 2314021 - RNA, 19 nt, Artificial Sequence
  Description of Artificial Sequence: Synthetic oligonucleotide
caucaaguuuaacacuguu

SEQ ID NO: 2314022 - RNA, 19 nt, Artificial Sequence
  Description of Artificial Sequence: Synthetic oligonucleotide
gcuacuuaugggauuuucu

SEQ ID NO: 2314023 - RNA, 19 nt, Artificial Sequence
  Description of Artificial Sequence: Synthetic oligonucleotide
caagggcaucauuuauuua

SEQ ID NO: 2314024 - RNA, 19 nt, Artificial Sequence
  Description of Artificial Sequence: Synthetic oligonucleotide
caccaggcacugugucccc

SEQ ID NO: 2314025 - RNA, 19 nt, Artificial Sequence
  Description of Artificial Sequence: Synthetic oligonucleotide
caaaaugaccuagcuacuu

SEQ ID NO: 2314026 - RNA, 19 nt, Artificial Sequence
  Description of Artificial Sequence: Synthetic oligonucleotide
cuucccucuccccucagau

SEQ ID NO: 2314027 - RNA, 19 nt, Artificial Sequence
  Description of Artificial Sequence: Synthetic oligonucleotide
gacaacagagugagagaau

SEQ ID NO: 2314028 - RNA, 19 nt, Artificial Sequence
  Description of Artificial Sequence: Synthetic oligonucleotide
cagugcaguuuccaacucu

SEQ ID NO: 2314029 - RNA, 19 nt, Artificial Sequence
  Description of Artificial Sequence: Synthetic oligonucleotide
gcaaaccaugugagauacg

SEQ ID NO: 2314030 - RNA, 19 nt, Artificial Sequence
  Description of Artificial Sequence: Synthetic oligonucleotide
cugugggcuuuacccucug

SEQ ID NO: 2314031 - RNA, 19 nt, Artificial Sequence
  Description of Artificial Sequence: Synthetic oligonucleotide
gggaucugagguacuucac

SEQ ID NO: 2314032 - RNA, 19 nt, Artificial Sequence
  Description of Artificial Sequence: Synthetic oligonucleotide
guguccccuuagcaaugca

SEQ ID NO: 2314033 - RNA, 19 nt, Artificial Sequence
  Description of Artificial Sequence: Synthetic oligonucleotide
ggguauccauggagcaaag

SEQ ID NO: 2314034 - RNA, 19 nt, Artificial Sequence
  Description of Artificial Sequence: Synthetic oligonucleotide
cucacaggguucugcuacu

SEQ ID NO: 2314035 - RNA, 19 nt, Artificial Sequence
  Description of Artificial Sequence: Synthetic oligonucleotide
ccuacgccugcaguguaac

SEQ ID NO: 2314036 - RNA, 19 nt, Artificial Sequence
  Description of Artificial Sequence: Synthetic oligonucleotide
cagucugacuuacggguau

SEQ ID NO: 2314037 - RNA, 19 nt, Artificial Sequence
  Description of Artificial Sequence: Synthetic oligonucleotide
ccaagggcaucauuuauuu

SEQ ID NO: 2314038 - RNA, 19 nt, Artificial Sequence
  Description of Artificial Sequence: Synthetic oligonucleotide
uggucucaccaggcacugu

SEQ ID NO: 2314039 - RNA, 19 nt, Artificial Sequence
  Description of Artificial Sequence: Synthetic oligonucleotide
uagcuacuuaugggauuuu

SEQ ID NO: 2314040 - RNA, 19 nt, Artificial Sequence
  Description of Artificial Sequence: Synthetic oligonucleotide
accuacgccugcaguguaa

SEQ ID NO: 2314041 - RNA, 19 nt, Artificial Sequence
  Description of Artificial Sequence: Synthetic oligonucleotide
caggaaaacgaguccccuu

SEQ ID NO: 2314042 - RNA, 19 nt, Artificial Sequence
  Description of Artificial Sequence: Synthetic oligonucleotide
cacaggguucugcuacugu

SEQ ID NO: 2314043 - RNA, 19 nt, Artificial Sequence
  Description of Artificial Sequence: Synthetic oligonucleotide
gccugcaguguaaccuuug

SEQ ID NO: 2314044 - RNA, 19 nt, Artificial Sequence
  Description of Artificial Sequence: Synthetic oligonucleotide
gucagacaacagagugaga

SEQ ID NO: 2314045 - RNA, 19 nt, Artificial Sequence
  Description of Artificial Sequence: Synthetic oligonucleotide
gcuacuguguccagguuuu

SEQ ID NO: 2314046 - RNA, 19 nt, Artificial Sequence
  Description of Artificial Sequence: Synthetic oligonucleotide
gggcaucauuuauuuacau

SEQ ID NO: 2314047 - RNA, 19 nt, Artificial Sequence
  Description of Artificial Sequence: Synthetic oligonucleotide
cgauugcaaaggaaagaaa

SEQ ID NO: 2314048 - RNA, 19 nt, Artificial Sequence
  Description of Artificial Sequence: Synthetic oligonucleotide
ggcuuugugugugcagugu

SEQ ID NO: 2314049 - RNA, 19 nt, Artificial Sequence
  Description of Artificial Sequence: Synthetic oligonucleotide
ccccuuagcaaugcacaca

SEQ ID NO: 2314050 - RNA, 19 nt, Artificial Sequence
  Description of Artificial Sequence: Synthetic oligonucleotide
caggcacuguguccccuua

SEQ ID NO: 2314051 - RNA, 19 nt, Artificial Sequence
  Description of Artificial Sequence: Synthetic oligonucleotide
caccaccuacgccugcagu

SEQ ID NO: 2314052 - RNA, 19 nt, Artificial Sequence
  Description of Artificial Sequence: Synthetic oligonucleotide
ccacugugggcuuuacccu

SEQ ID NO: 2314053 - RNA, 19 nt, Artificial Sequence
  Description of Artificial Sequence: Synthetic oligonucleotide
caccuacgccugcagugua

SEQ ID NO: 2314054 - RNA, 19 nt, Artificial Sequence
  Description of Artificial Sequence: Synthetic oligonucleotide
cgugagaauucagggaucu

SEQ ID NO: 2314055 - RNA, 19 nt, Artificial Sequence
  Description of Artificial Sequence: Synthetic oligonucleotide
cccucuccccucagaugug

SEQ ID NO: 2314056 - RNA, 19 nt, Artificial Sequence
  Description of Artificial Sequence: Synthetic oligonucleotide
cagugguagugugacccau

SEQ ID NO: 2314057 - RNA, 19 nt, Artificial Sequence
  Description of Artificial Sequence: Synthetic oligonucleotide
cagucccugccaagggcau

SEQ ID NO: 2314058 - RNA, 19 nt, Artificial Sequence
  Description of Artificial Sequence: Synthetic oligonucleotide
ccagggaaagagagauuau

SEQ ID NO: 2314059 - RNA, 19 nt, Artificial Sequence
  Description of Artificial Sequence: Synthetic oligonucleotide
gacccaugacugacauguu

SEQ ID NO: 2314060 - RNA, 19 nt, Artificial Sequence
  Description of Artificial Sequence: Synthetic oligonucleotide
cgguccugcuccaccaaaa

SEQ ID NO: 2314061 - RNA, 19 nt, Artificial Sequence
  Description of Artificial Sequence: Synthetic oligonucleotide
ccaccuacgccugcagugu

SEQ ID NO: 2314062 - RNA, 19 nt, Artificial Sequence
  Description of Artificial Sequence: Synthetic oligonucleotide
ccucuccccucagaugugu

SEQ ID NO: 2314063 - RNA, 19 nt, Artificial Sequence
  Description of Artificial Sequence: Synthetic oligonucleotide
ccaggcacuguguccccuu

SEQ ID NO: 2314064 - RNA, 19 nt, Artificial Sequence
  Description of Artificial Sequence: Synthetic oligonucleotide
cgccugcaguguaaccuuu

SEQ ID NO: 2314065 - RNA, 19 nt, Artificial Sequence
  Description of Artificial Sequence: Synthetic oligonucleotide
ugugcugacaugaugaggg

SEQ ID NO: 2314066 - RNA, 19 nt, Artificial Sequence
  Description of Artificial Sequence: Synthetic oligonucleotide
aaugaucacagguuagccc

SEQ ID NO: 2314067 - RNA, 19 nt, Artificial Sequence
  Description of Artificial Sequence: Synthetic oligonucleotide
guaaacaauacacagacug

SEQ ID NO: 2314068 - RNA, 19 nt, Artificial Sequence
  Description of Artificial Sequence: Synthetic oligonucleotide
uaaaucuucuaauugauga

SEQ ID NO: 2314069 - RNA, 19 nt, Artificial Sequence
  Description of Artificial Sequence: Synthetic oligonucleotide
uagaauuuuguacucaucc

SEQ ID NO: 2314070 - RNA, 19 nt, Artificial Sequence
  Description of Artificial Sequence: Synthetic oligonucleotide
ucgaguaucgacaauaucu

SEQ ID NO: 2314071 - RNA, 19 nt, Artificial Sequence
  Description of Artificial Sequence: Synthetic oligonucleotide
aucaccaucacacaaauca

SEQ ID NO: 2314072 - RNA, 19 nt, Artificial Sequence
  Description of Artificial Sequence: Synthetic oligonucleotide
uuugacagaaaagaaaucc

SEQ ID NO: 2314073 - RNA, 19 nt, Artificial Sequence
  Description of Artificial Sequence: Synthetic oligonucleotide
gugaacauuucuuugaagg

SEQ ID NO: 2314074 - RNA, 19 nt, Artificial Sequence
  Description of Artificial Sequence: Synthetic oligonucleotide
aguaagguuacuuucuagg

SEQ ID NO: 2314075 - RNA, 19 nt, Artificial Sequence
  Description of Artificial Sequence: Synthetic oligonucleotide
ucaaacucuguacaagugg

SEQ ID NO: 2314076 - RNA, 19 nt, Artificial Sequence
  Description of Artificial Sequence: Synthetic oligonucleotide
aagaacaugggcauggugg

SEQ ID NO: 2314077 - RNA, 19 nt, Artificial Sequence
  Description of Artificial Sequence: Synthetic oligonucleotide
aauaucuaccaaaucuucc

SEQ ID NO: 2314078 - RNA, 19 nt, Artificial Sequence
  Description of Artificial Sequence: Synthetic oligonucleotide
uaaacaauacacagacugg

SEQ ID NO: 2314079 - RNA, 19 nt, Artificial Sequence
  Description of Artificial Sequence: Synthetic oligonucleotide
acaguaaucauccagacuu

SEQ ID NO: 2314080 - RNA, 19 nt, Artificial Sequence
  Description of Artificial Sequence: Synthetic oligonucleotide
uaagguuacuuucuaggcg

SEQ ID NO: 2314081 - RNA, 19 nt, Artificial Sequence
  Description of Artificial Sequence: Synthetic oligonucleotide
uaaucauccagacuugacc

SEQ ID NO: 2314082 - RNA, 19 nt, Artificial Sequence
  Description of Artificial Sequence: Synthetic oligonucleotide
uaucuaaacaaaagcaucu

SEQ ID NO: 2314083 - RNA, 19 nt, Artificial Sequence
  Description of Artificial Sequence: Synthetic oligonucleotide
ucuuccuucaguaagguua

SEQ ID NO: 2314084 - RNA, 19 nt, Artificial Sequence
  Description of Artificial Sequence: Synthetic oligonucleotide
ucugaauacaccaggugag

SEQ ID NO: 2314085 - RNA, 19 nt, Artificial Sequence
  Description of Artificial Sequence: Synthetic oligonucleotide
uucuaaaucuucuaauuga

SEQ ID NO: 2314086 - RNA, 19 nt, Artificial Sequence
  Description of Artificial Sequence: Synthetic oligonucleotide
ugugcuugggcacugcugg

SEQ ID NO: 2314087 - RNA, 19 nt, Artificial Sequence
  Description of Artificial Sequence: Synthetic oligonucleotide
ugaaccauuucauagucug

SEQ ID NO: 2314088 - RNA, 19 nt, Artificial Sequence
  Description of Artificial Sequence: Synthetic oligonucleotide
uaauugaugaguucgagua

SEQ ID NO: 2314089 - RNA, 19 nt, Artificial Sequence
  Description of Artificial Sequence: Synthetic oligonucleotide
uuuuaaacugguaaagcuc

SEQ ID NO: 2314090 - RNA, 19 nt, Artificial Sequence
  Description of Artificial Sequence: Synthetic oligonucleotide
agaaauccaagucaauauc

SEQ ID NO: 2314091 - RNA, 19 nt, Artificial Sequence
  Description of Artificial Sequence: Synthetic oligonucleotide
aagguuacuuucuaggcgu

SEQ ID NO: 2314092 - RNA, 19 nt, Artificial Sequence
  Description of Artificial Sequence: Synthetic oligonucleotide
caguaaacaauacacagac

SEQ ID NO: 2314093 - RNA, 19 nt, Artificial Sequence
  Description of Artificial Sequence: Synthetic oligonucleotide
gaauuuuguacucauccug

SEQ ID NO: 2314094 - RNA, 19 nt, Artificial Sequence
  Description of Artificial Sequence: Synthetic oligonucleotide
ugucaacuugcucaggagg

SEQ ID NO: 2314095 - RNA, 19 nt, Artificial Sequence
  Description of Artificial Sequence: Synthetic oligonucleotide
aguaucgacaauaucuacc

SEQ ID NO: 2314096 - RNA, 19 nt, Artificial Sequence
  Description of Artificial Sequence: Synthetic oligonucleotide
cuucuaauugaugaguucg

SEQ ID NO: 2314097 - RNA, 19 nt, Artificial Sequence
  Description of Artificial Sequence: Synthetic oligonucleotide
aauaucuaaacaaaagcau

SEQ ID NO: 2314098 - RNA, 19 nt, Artificial Sequence
  Description of Artificial Sequence: Synthetic oligonucleotide
gacaauaucuaccaaaucu

SEQ ID NO: 2314099 - RNA, 19 nt, Artificial Sequence
  Description of Artificial Sequence: Synthetic oligonucleotide
uuucaguaaacaauacaca

SEQ ID NO: 2314100 - RNA, 19 nt, Artificial Sequence
  Description of Artificial Sequence: Synthetic oligonucleotide
uucugugcugacaugauga

SEQ ID NO: 2314101 - RNA, 19 nt, Artificial Sequence
  Description of Artificial Sequence: Synthetic oligonucleotide
uguacaaguggaacuagug

SEQ ID NO: 2314102 - RNA, 19 nt, Artificial Sequence
  Description of Artificial Sequence: Synthetic oligonucleotide
auaucuaaacaaaagcauc

SEQ ID NO: 2314103 - RNA, 19 nt, Artificial Sequence
  Description of Artificial Sequence: Synthetic oligonucleotide
caagaguaggcuuuggaag

SEQ ID NO: 2314104 - RNA, 19 nt, Artificial Sequence
  Description of Artificial Sequence: Synthetic oligonucleotide
aaaucuuccuucaguaagg

SEQ ID NO: 2314105 - RNA, 19 nt, Artificial Sequence
  Description of Artificial Sequence: Synthetic oligonucleotide
aauacaccaggugaguguc

SEQ ID NO: 2314106 - RNA, 19 nt, Artificial Sequence
  Description of Artificial Sequence: Synthetic oligonucleotide
aacucuguacaaguggaac

SEQ ID NO: 2314107 - RNA, 19 nt, Artificial Sequence
  Description of Artificial Sequence: Synthetic oligonucleotide
caaaucuuccuucaguaag

SEQ ID NO: 2314108 - RNA, 19 nt, Artificial Sequence
  Description of Artificial Sequence: Synthetic oligonucleotide
uugacagaaaagaaaucca

SEQ ID NO: 2314109 - RNA, 19 nt, Artificial Sequence
  Description of Artificial Sequence: Synthetic oligonucleotide
cacagacuggauaagauac

SEQ ID NO: 2314110 - RNA, 19 nt, Artificial Sequence
  Description of Artificial Sequence: Synthetic oligonucleotide
aaagcaucuccauucuuca

SEQ ID NO: 2314111 - RNA, 19 nt, Artificial Sequence
  Description of Artificial Sequence: Synthetic oligonucleotide
auaucuaccaaaucuuccu

SEQ ID NO: 2314112 - RNA, 19 nt, Artificial Sequence
  Description of Artificial Sequence: Synthetic oligonucleotide
aaacaauacacagacugga

SEQ ID NO: 2314113 - RNA, 19 nt, Artificial Sequence
  Description of Artificial Sequence: Synthetic oligonucleotide
ugagugaacauuucuuuga

SEQ ID NO: 2314114 - RNA, 19 nt, Artificial Sequence
  Description of Artificial Sequence: Synthetic oligonucleotide
ucuaaaucuucuaauugau

SEQ ID NO: 2314115 - RNA, 19 nt, Artificial Sequence
  Description of Artificial Sequence: Synthetic oligonucleotide
uucauagucugguacuucc

SEQ ID NO: 2314116 - RNA, 19 nt, Artificial Sequence
  Description of Artificial Sequence: Synthetic oligonucleotide
uagucugguacuuccaucc

SEQ ID NO: 2314117 - RNA, 19 nt, Artificial Sequence
  Description of Artificial Sequence: Synthetic oligonucleotide
acugguaaagcuccuguag

SEQ ID NO: 2314118 - RNA, 19 nt, Artificial Sequence
  Description of Artificial Sequence: Synthetic oligonucleotide
cuugcgauugucacaagag

SEQ ID NO: 2314119 - RNA, 19 nt, Artificial Sequence
  Description of Artificial Sequence: Synthetic oligonucleotide
uacaaguggaacuagugau

SEQ ID NO: 2314120 - RNA, 19 nt, Artificial Sequence
  Description of Artificial Sequence: Synthetic oligonucleotide
gaugaguucgaguaucgac

SEQ ID NO: 2314121 - RNA, 19 nt, Artificial Sequence
  Description of Artificial Sequence: Synthetic oligonucleotide
cuggugaaccauuucauag

SEQ ID NO: 2314122 - RNA, 19 nt, Artificial Sequence
  Description of Artificial Sequence: Synthetic oligonucleotide
aaguggaacuagugauucc

SEQ ID NO: 2314123 - RNA, 19 nt, Artificial Sequence
  Description of Artificial Sequence: Synthetic oligonucleotide
uucaguaagguuacuuucu

SEQ ID NO: 2314124 - RNA, 19 nt, Artificial Sequence
  Description of Artificial Sequence: Synthetic oligonucleotide
gucaauaucuaaacaaaag

SEQ ID NO: 2314125 - RNA, 19 nt, Artificial Sequence
  Description of Artificial Sequence: Synthetic oligonucleotide
gaacuagugauuccauucc

SEQ ID NO: 2314126 - RNA, 19 nt, Artificial Sequence
  Description of Artificial Sequence: Synthetic oligonucleotide
ucugaaugaucacagguua

SEQ ID NO: 2314127 - RNA, 19 nt, Artificial Sequence
  Description of Artificial Sequence: Synthetic oligonucleotide
aaucuucuaauugaugagu

SEQ ID NO: 2314128 - RNA, 19 nt, Artificial Sequence
  Description of Artificial Sequence: Synthetic oligonucleotide
cuagugauuccauuccagg

SEQ ID NO: 2314129 - RNA, 19 nt, Artificial Sequence
  Description of Artificial Sequence: Synthetic oligonucleotide
aaacugguaaagcuccugu

SEQ ID NO: 2314130 - RNA, 19 nt, Artificial Sequence
  Description of Artificial Sequence: Synthetic oligonucleotide
uugaugaguucgaguaucg

SEQ ID NO: 2314131 - RNA, 19 nt, Artificial Sequence
  Description of Artificial Sequence: Synthetic oligonucleotide
guaagguuacuuucuaggc

SEQ ID NO: 2314132 - RNA, 19 nt, Artificial Sequence
  Description of Artificial Sequence: Synthetic oligonucleotide
uguccagggucccauagag

SEQ ID NO: 2314133 - RNA, 19 nt, Artificial Sequence
  Description of Artificial Sequence: Synthetic oligonucleotide
aauuuuguacucauccuga

SEQ ID NO: 2314134 - RNA, 19 nt, Artificial Sequence
  Description of Artificial Sequence: Synthetic oligonucleotide
auugaugaguucgaguauc

SEQ ID NO: 2314135 - RNA, 19 nt, Artificial Sequence
  Description of Artificial Sequence: Synthetic oligonucleotide
ucuaccaaaucuuccuuca

SEQ ID NO: 2314136 - RNA, 19 nt, Artificial Sequence
  Description of Artificial Sequence: Synthetic oligonucleotide
auuugagcgggcuugguga

SEQ ID NO: 2314137 - RNA, 19 nt, Artificial Sequence
  Description of Artificial Sequence: Synthetic oligonucleotide
auuuccagaaucuccccag

SEQ ID NO: 2314138 - RNA, 19 nt, Artificial Sequence
  Description of Artificial Sequence: Synthetic oligonucleotide
ucgacaauaucuaccaaau

SEQ ID NO: 2314139 - RNA, 19 nt, Artificial Sequence
  Description of Artificial Sequence: Synthetic oligonucleotide
aggaccuuuuccugaaugg

SEQ ID NO: 2314140 - RNA, 19 nt, Artificial Sequence
  Description of Artificial Sequence: Synthetic oligonucleotide
gagugagugcagcacacgg

SEQ ID NO: 2314141 - RNA, 19 nt, Artificial Sequence
  Description of Artificial Sequence: Synthetic oligonucleotide
guaucgacaauaucuacca

SEQ ID NO: 2314142 - RNA, 19 nt, Artificial Sequence
  Description of Artificial Sequence: Synthetic oligonucleotide
agaauuuuguacucauccu

SEQ ID NO: 2314143 - RNA, 19 nt, Artificial Sequence
  Description of Artificial Sequence: Synthetic oligonucleotide
ugaaugaucacagguuagc

SEQ ID NO: 2314144 - RNA, 19 nt, Artificial Sequence
  Description of Artificial Sequence: Synthetic oligonucleotide
aaccauuucauagucuggu

SEQ ID NO: 2314145 - RNA, 19 nt, Artificial Sequence
  Description of Artificial Sequence: Synthetic oligonucleotide
ugcgauugucacaagagua

SEQ ID NO: 2314146 - RNA, 19 nt, Artificial Sequence
  Description of Artificial Sequence: Synthetic oligonucleotide
ucuaauugaugaguucgag

SEQ ID NO: 2314147 - RNA, 19 nt, Artificial Sequence
  Description of Artificial Sequence: Synthetic oligonucleotide
aacaugggcaugguggcuc

SEQ ID NO: 2314148 - RNA, 19 nt, Artificial Sequence
  Description of Artificial Sequence: Synthetic oligonucleotide
aaacaaaagcaucuccauu

SEQ ID NO: 2314149 - RNA, 19 nt, Artificial Sequence
  Description of Artificial Sequence: Synthetic oligonucleotide
aacuagugauuccauucca

SEQ ID NO: 2314150 - RNA, 19 nt, Artificial Sequence
  Description of Artificial Sequence: Synthetic oligonucleotide
aucgacaauaucuaccaaa

SEQ ID NO: 2314151 - RNA, 19 nt, Artificial Sequence
  Description of Artificial Sequence: Synthetic oligonucleotide
uucuaauugaugaguucga

SEQ ID NO: 2314152 - RNA, 19 nt, Artificial Sequence
  Description of Artificial Sequence: Synthetic oligonucleotide
cuaaaucuucuaauugaug

SEQ ID NO: 2314153 - RNA, 19 nt, Artificial Sequence
  Description of Artificial Sequence: Synthetic oligonucleotide
aauacacagacuggauaag

SEQ ID NO: 2314154 - RNA, 19 nt, Artificial Sequence
  Description of Artificial Sequence: Synthetic oligonucleotide
aauugaugaguucgaguau

SEQ ID NO: 2314155 - RNA, 19 nt, Artificial Sequence
  Description of Artificial Sequence: Synthetic oligonucleotide
uuuugacagaaaagaaauc

SEQ ID NO: 2314156 - RNA, 19 nt, Artificial Sequence
  Description of Artificial Sequence: Synthetic oligonucleotide
aagucaauaucuaaacaaa

SEQ ID NO: 2314157 - RNA, 19 nt, Artificial Sequence
  Description of Artificial Sequence: Synthetic oligonucleotide
uagugauuccauuccagga

SEQ ID NO: 2314158 - RNA, 19 nt, Artificial Sequence
  Description of Artificial Sequence: Synthetic oligonucleotide
cuccuguagaauuuuguac

SEQ ID NO: 2314159 - RNA, 19 nt, Artificial Sequence
  Description of Artificial Sequence: Synthetic oligonucleotide
agugauuccauuccaggau

SEQ ID NO: 2314160 - RNA, 19 nt, Artificial Sequence
  Description of Artificial Sequence: Synthetic oligonucleotide
cuucaguaagguuacuuuc

SEQ ID NO: 2314161 - RNA, 19 nt, Artificial Sequence
  Description of Artificial Sequence: Synthetic oligonucleotide
gauaagauacucaauuucu

SEQ ID NO: 2314162 - RNA, 19 nt, Artificial Sequence
  Description of Artificial Sequence: Synthetic oligonucleotide
uuuuguacucauccugagu

SEQ ID NO: 2314163 - RNA, 19 nt, Artificial Sequence
  Description of Artificial Sequence: Synthetic oligonucleotide
aguucugaaugaucacagg

SEQ ID NO: 2314164 - RNA, 19 nt, Artificial Sequence
  Description of Artificial Sequence: Synthetic oligonucleotide
acaagaguaggcuuuggaa

SEQ ID NO: 2314165 - RNA, 19 nt, Artificial Sequence
  Description of Artificial Sequence: Synthetic oligonucleotide
gaguucugaaugaucacag

SEQ ID NO: 2314166 - RNA, 19 nt, Artificial Sequence
  Description of Artificial Sequence: Synthetic oligonucleotide
gacuggauaagauacucaa

SEQ ID NO: 2314167 - RNA, 19 nt, Artificial Sequence
  Description of Artificial Sequence: Synthetic oligonucleotide
auuuuguacucauccugag

SEQ ID NO: 2314168 - RNA, 19 nt, Artificial Sequence
  Description of Artificial Sequence: Synthetic oligonucleotide
gaucauuugagcgggcuug

SEQ ID NO: 2314169 - RNA, 19 nt, Artificial Sequence
  Description of Artificial Sequence: Synthetic oligonucleotide
agaaucuccccagugcugg

SEQ ID NO: 2314170 - RNA, 19 nt, Artificial Sequence
  Description of Artificial Sequence: Synthetic oligonucleotide
gacuccucugaauacacca

SEQ ID NO: 2314171 - RNA, 19 nt, Artificial Sequence
  Description of Artificial Sequence: Synthetic oligonucleotide
aggauuugaagcccaucuc

SEQ ID NO: 2314172 - RNA, 19 nt, Artificial Sequence
  Description of Artificial Sequence: Synthetic oligonucleotide
auagagugagugcagcaca

SEQ ID NO: 2314173 - RNA, 19 nt, Artificial Sequence
  Description of Artificial Sequence: Synthetic oligonucleotide
gauacucaauuucuucuuc

SEQ ID NO: 2314174 - RNA, 19 nt, Artificial Sequence
  Description of Artificial Sequence: Synthetic oligonucleotide
auugucacaagaguaggcu

SEQ ID NO: 2314175 - RNA, 19 nt, Artificial Sequence
  Description of Artificial Sequence: Synthetic oligonucleotide
gugagugcagcacacggag

SEQ ID NO: 2314176 - RNA, 19 nt, Artificial Sequence
  Description of Artificial Sequence: Synthetic oligonucleotide
ucauccugagugaacauuu

SEQ ID NO: 2314177 - RNA, 19 nt, Artificial Sequence
  Description of Artificial Sequence: Synthetic oligonucleotide
aucacagguuagcccagcc

SEQ ID NO: 2314178 - RNA, 19 nt, Artificial Sequence
  Description of Artificial Sequence: Synthetic oligonucleotide
aggagacuccucugaauac

SEQ ID NO: 2314179 - RNA, 19 nt, Artificial Sequence
  Description of Artificial Sequence: Synthetic oligonucleotide
aucuaaacaaaagcaucuc

SEQ ID NO: 2314180 - RNA, 19 nt, Artificial Sequence
  Description of Artificial Sequence: Synthetic oligonucleotide
uugcuucuaaaucuucuaa

SEQ ID NO: 2314181 - RNA, 19 nt, Artificial Sequence
  Description of Artificial Sequence: Synthetic oligonucleotide
gaacauuucuuugaaggga

SEQ ID NO: 2314182 - RNA, 19 nt, Artificial Sequence
  Description of Artificial Sequence: Synthetic oligonucleotide
cagaagaacaugggcaugg

SEQ ID NO: 2314183 - RNA, 19 nt, Artificial Sequence
  Description of Artificial Sequence: Synthetic oligonucleotide
gauuugaagcccaucucug

SEQ ID NO: 2314184 - RNA, 19 nt, Artificial Sequence
  Description of Artificial Sequence: Synthetic oligonucleotide
cucugaauacaccagguga

SEQ ID NO: 2314185 - RNA, 19 nt, Artificial Sequence
  Description of Artificial Sequence: Synthetic oligonucleotide
aacauuucuuugaagggau

SEQ ID NO: 2314186 - RNA, 19 nt, Artificial Sequence
  Description of Artificial Sequence: Synthetic oligonucleotide
uggugaaccauuucauagu

SEQ ID NO: 2314187 - RNA, 19 nt, Artificial Sequence
  Description of Artificial Sequence: Synthetic oligonucleotide
uacacagacuggauaagau

SEQ ID NO: 2314188 - RNA, 19 nt, Artificial Sequence
  Description of Artificial Sequence: Synthetic oligonucleotide
ugcuucuaaaucuucuaau

SEQ ID NO: 2314189 - RNA, 19 nt, Artificial Sequence
  Description of Artificial Sequence: Synthetic oligonucleotide
ggauaagauacucaauuuc

SEQ ID NO: 2314190 - RNA, 19 nt, Artificial Sequence
  Description of Artificial Sequence: Synthetic oligonucleotide
cacagguuagcccagccug

SEQ ID NO: 2314191 - RNA, 19 nt, Artificial Sequence
  Description of Artificial Sequence: Synthetic oligonucleotide
uugcgauugucacaagagu

SEQ ID NO: 2314192 - RNA, 19 nt, Artificial Sequence
  Description of Artificial Sequence: Synthetic oligonucleotide
caccaucacacaaaucagc

SEQ ID NO: 2314193 - RNA, 19 nt, Artificial Sequence
  Description of Artificial Sequence: Synthetic oligonucleotide
uggauaagauacucaauuu

SEQ ID NO: 2314194 - RNA, 19 nt, Artificial Sequence
  Description of Artificial Sequence: Synthetic oligonucleotide
acaauacacagacuggaua

SEQ ID NO: 2314195 - RNA, 19 nt, Artificial Sequence
  Description of Artificial Sequence: Synthetic oligonucleotide
aguggaacuagugauucca

SEQ ID NO: 2314196 - RNA, 19 nt, Artificial Sequence
  Description of Artificial Sequence: Synthetic oligonucleotide
cuuccuucaguaagguuac

SEQ ID NO: 2314197 - RNA, 19 nt, Artificial Sequence
  Description of Artificial Sequence: Synthetic oligonucleotide
caucacacaaaucagcaaa

SEQ ID NO: 2314198 - RNA, 19 nt, Artificial Sequence
  Description of Artificial Sequence: Synthetic oligonucleotide
ugaauacaccaggugagug

SEQ ID NO: 2314199 - RNA, 19 nt, Artificial Sequence
  Description of Artificial Sequence: Synthetic oligonucleotide
ucugugcugacaugaugag

SEQ ID NO: 2314200 - RNA, 19 nt, Artificial Sequence
  Description of Artificial Sequence: Synthetic oligonucleotide
ugucacaagaguaggcuuu

SEQ ID NO: 2314201 - RNA, 19 nt, Artificial Sequence
  Description of Artificial Sequence: Synthetic oligonucleotide
accaaaucuuccuucagua

SEQ ID NO: 2314202 - RNA, 19 nt, Artificial Sequence
  Description of Artificial Sequence: Synthetic oligonucleotide
ucuucuaauugaugaguuc

SEQ ID NO: 2314203 - RNA, 19 nt, Artificial Sequence
  Description of Artificial Sequence: Synthetic oligonucleotide
ggaacuagugauuccauuc

SEQ ID NO: 2314204 - RNA, 19 nt, Artificial Sequence
  Description of Artificial Sequence: Synthetic oligonucleotide
caaacucuguacaagugga

SEQ ID NO: 2314205 - RNA, 19 nt, Artificial Sequence
  Description of Artificial Sequence: Synthetic oligonucleotide
gaggaccuuuuccugaaug

SEQ ID NO: 2314206 - RNA, 19 nt, Artificial Sequence
  Description of Artificial Sequence: Synthetic oligonucleotide
ugaagcccaucucuguaca

SEQ ID NO: 2314207 - RNA, 19 nt, Artificial Sequence
  Description of Artificial Sequence: Synthetic oligonucleotide
cugaaugaucacagguuag

SEQ ID NO: 2314208 - RNA, 19 nt, Artificial Sequence
  Description of Artificial Sequence: Synthetic oligonucleotide
augaguucgaguaucgaca

SEQ ID NO: 2314209 - RNA, 19 nt, Artificial Sequence
  Description of Artificial Sequence: Synthetic oligonucleotide
gauugucacaagaguaggc

SEQ ID NO: 2314210 - RNA, 19 nt, Artificial Sequence
  Description of Artificial Sequence: Synthetic oligonucleotide
guacaaguggaacuaguga

SEQ ID NO: 2314211 - RNA, 19 nt, Artificial Sequence
  Description of Artificial Sequence: Synthetic oligonucleotide
auuugaagcccaucucugu

SEQ ID NO: 2314212 - RNA, 19 nt, Artificial Sequence
  Description of Artificial Sequence: Synthetic oligonucleotide
agccuggugaaccauuuca

SEQ ID NO: 2314213 - RNA, 19 nt, Artificial Sequence
  Description of Artificial Sequence: Synthetic oligonucleotide
uccucugaauacaccaggu

SEQ ID NO: 2314214 - RNA, 19 nt, Artificial Sequence
  Description of Artificial Sequence: Synthetic oligonucleotide
cuccucugaauacaccagg

SEQ ID NO: 2314215 - RNA, 19 nt, Artificial Sequence
  Description of Artificial Sequence: Synthetic oligonucleotide
ugaguucgaguaucgacaa

SEQ ID NO: 2314216 - RNA, 19 nt, Artificial Sequence
  Description of Artificial Sequence: Synthetic oligonucleotide
gaagaacaugggcauggug

SEQ ID NO: 2314217 - RNA, 19 nt, Artificial Sequence
  Description of Artificial Sequence: Synthetic oligonucleotide
agggaguucugaaugauca

SEQ ID NO: 2314218 - RNA, 19 nt, Artificial Sequence
  Description of Artificial Sequence: Synthetic oligonucleotide
uccugagugaacauuucuu

SEQ ID NO: 2314219 - RNA, 19 nt, Artificial Sequence
  Description of Artificial Sequence: Synthetic oligonucleotide
ucauagucugguacuucca

SEQ ID NO: 2314220 - RNA, 19 nt, Artificial Sequence
  Description of Artificial Sequence: Synthetic oligonucleotide
ugguaaagcuccuguagaa

SEQ ID NO: 2314221 - RNA, 19 nt, Artificial Sequence
  Description of Artificial Sequence: Synthetic oligonucleotide
gaaccauuucauagucugg

SEQ ID NO: 2314222 - RNA, 19 nt, Artificial Sequence
  Description of Artificial Sequence: Synthetic oligonucleotide
ucaguaagguuacuuucua

SEQ ID NO: 2314223 - RNA, 19 nt, Artificial Sequence
  Description of Artificial Sequence: Synthetic oligonucleotide
gaaauccaagucaauaucu

SEQ ID NO: 2314224 - RNA, 19 nt, Artificial Sequence
  Description of Artificial Sequence: Synthetic oligonucleotide
ugagugcagcacacggagg

SEQ ID NO: 2314225 - RNA, 19 nt, Artificial Sequence
  Description of Artificial Sequence: Synthetic oligonucleotide
acacggaggaccuuuuccu

SEQ ID NO: 2314226 - RNA, 19 nt, Artificial Sequence
  Description of Artificial Sequence: Synthetic oligonucleotide
accaggugaguguccaggg

SEQ ID NO: 2314227 - RNA, 19 nt, Artificial Sequence
  Description of Artificial Sequence: Synthetic oligonucleotide
cacacggaggaccuuuucc

SEQ ID NO: 2314228 - RNA, 19 nt, Artificial Sequence
  Description of Artificial Sequence: Synthetic oligonucleotide
caggaggacaguaaucauc

SEQ ID NO: 2314229 - RNA, 19 nt, Artificial Sequence
  Description of Artificial Sequence: Synthetic oligonucleotide
ucugguacuuccauccguu

SEQ ID NO: 2314230 - RNA, 19 nt, Artificial Sequence
  Description of Artificial Sequence: Synthetic oligonucleotide
aguguccagggucccauag

SEQ ID NO: 2314231 - RNA, 19 nt, Artificial Sequence
  Description of Artificial Sequence: Synthetic oligonucleotide
aagaggagacuccucugaa

SEQ ID NO: 2314232 - RNA, 19 nt, Artificial Sequence
  Description of Artificial Sequence: Synthetic oligonucleotide
aguucgaguaucgacaaua

SEQ ID NO: 2314233 - RNA, 19 nt, Artificial Sequence
  Description of Artificial Sequence: Synthetic oligonucleotide
gaguaucgacaauaucuac

SEQ ID NO: 2314234 - RNA, 19 nt, Artificial Sequence
  Description of Artificial Sequence: Synthetic oligonucleotide
ucuguacaaguggaacuag

SEQ ID NO: 2314235 - RNA, 19 nt, Artificial Sequence
  Description of Artificial Sequence: Synthetic oligonucleotide
uccagacuugaccuugcga

SEQ ID NO: 2314236 - RNA, 19 nt, Artificial Sequence
  Description of Artificial Sequence: Synthetic oligonucleotide
cauagagugagugcagcac

SEQ ID NO: 2314237 - RNA, 19 nt, Artificial Sequence
  Description of Artificial Sequence: Synthetic oligonucleotide
gaggagacuccucugaaua

SEQ ID NO: 2314238 - RNA, 19 nt, Artificial Sequence
  Description of Artificial Sequence: Synthetic oligonucleotide
agucugguacuuccauccg

SEQ ID NO: 2314239 - RNA, 19 nt, Artificial Sequence
  Description of Artificial Sequence: Synthetic oligonucleotide
guucugaaugaucacaggu

SEQ ID NO: 2314240 - RNA, 19 nt, Artificial Sequence
  Description of Artificial Sequence: Synthetic oligonucleotide
caguaagguuacuuucuag

SEQ ID NO: 2314241 - RNA, 19 nt, Artificial Sequence
  Description of Artificial Sequence: Synthetic oligonucleotide
agguggguggaucauuuga

SEQ ID NO: 2314242 - RNA, 19 nt, Artificial Sequence
  Description of Artificial Sequence: Synthetic oligonucleotide
acuagugauuccauuccag

SEQ ID NO: 2314243 - RNA, 19 nt, Artificial Sequence
  Description of Artificial Sequence: Synthetic oligonucleotide
aacugguaaagcuccugua

SEQ ID NO: 2314244 - RNA, 19 nt, Artificial Sequence
  Description of Artificial Sequence: Synthetic oligonucleotide
aggugaguguccagggucc

SEQ ID NO: 2314245 - RNA, 19 nt, Artificial Sequence
  Description of Artificial Sequence: Synthetic oligonucleotide
ugcucaggaggacaguaau

SEQ ID NO: 2314246 - RNA, 19 nt, Artificial Sequence
  Description of Artificial Sequence: Synthetic oligonucleotide
caaguggaacuagugauuc

SEQ ID NO: 2314247 - RNA, 19 nt, Artificial Sequence
  Description of Artificial Sequence: Synthetic oligonucleotide
uuccugaauggugucaacu

SEQ ID NO: 2314248 - RNA, 19 nt, Artificial Sequence
  Description of Artificial Sequence: Synthetic oligonucleotide
ucacagguuagcccagccu

SEQ ID NO: 2314249 - RNA, 19 nt, Artificial Sequence
  Description of Artificial Sequence: Synthetic oligonucleotide
ugaugagggaguucugaau

SEQ ID NO: 2314250 - RNA, 19 nt, Artificial Sequence
  Description of Artificial Sequence: Synthetic oligonucleotide
auccugagugaacauuucu

SEQ ID NO: 2314251 - RNA, 19 nt, Artificial Sequence
  Description of Artificial Sequence: Synthetic oligonucleotide
gguggaucauuugagcggg

SEQ ID NO: 2314252 - RNA, 19 nt, Artificial Sequence
  Description of Artificial Sequence: Synthetic oligonucleotide
ucccauagagugagugcag

SEQ ID NO: 2314253 - RNA, 19 nt, Artificial Sequence
  Description of Artificial Sequence: Synthetic oligonucleotide
uucgaguaucgacaauauc

SEQ ID NO: 2314254 - RNA, 19 nt, Artificial Sequence
  Description of Artificial Sequence: Synthetic oligonucleotide
cauuugagcgggcuuggug

SEQ ID NO: 2314255 - RNA, 19 nt, Artificial Sequence
  Description of Artificial Sequence: Synthetic oligonucleotide
ugaccuugcgauugucaca

SEQ ID NO: 2314256 - RNA, 19 nt, Artificial Sequence
  Description of Artificial Sequence: Synthetic oligonucleotide
aacaauacacagacuggau

SEQ ID NO: 2314257 - RNA, 19 nt, Artificial Sequence
  Description of Artificial Sequence: Synthetic oligonucleotide
caugguggcucuuggcaag

SEQ ID NO: 2314258 - RNA, 19 nt, Artificial Sequence
  Description of Artificial Sequence: Synthetic oligonucleotide
uguacucauccugagugaa

SEQ ID NO: 2314259 - RNA, 19 nt, Artificial Sequence
  Description of Artificial Sequence: Synthetic oligonucleotide
agucaauaucuaaacaaaa

SEQ ID NO: 2314260 - RNA, 19 nt, Artificial Sequence
  Description of Artificial Sequence: Synthetic oligonucleotide
ccauuccaggauuugaagc

SEQ ID NO: 2314261 - RNA, 19 nt, Artificial Sequence
  Description of Artificial Sequence: Synthetic oligonucleotide
augagggaguucugaauga

SEQ ID NO: 2314262 - RNA, 19 nt, Artificial Sequence
  Description of Artificial Sequence: Synthetic oligonucleotide
uuuccagaaucuccccagu

SEQ ID NO: 2314263 - RNA, 19 nt, Artificial Sequence
  Description of Artificial Sequence: Synthetic oligonucleotide
aagguggguggaucauuug

SEQ ID NO: 2314264 - RNA, 19 nt, Artificial Sequence
  Description of Artificial Sequence: Synthetic oligonucleotide
ggucuccagaagaacaugg

SEQ ID NO: 2314265 - RNA, 19 nt, Artificial Sequence
  Description of Artificial Sequence: Synthetic oligonucleotide
guggguggaucauuugagc

SEQ ID NO: 2314266 - RNA, 19 nt, Artificial Sequence
  Description of Artificial Sequence: Synthetic oligonucleotide
augaugagggaguucugaa

SEQ ID NO: 2314267 - RNA, 19 nt, Artificial Sequence
  Description of Artificial Sequence: Synthetic oligonucleotide
gugucaacuugcucaggag

SEQ ID NO: 2314268 - RNA, 19 nt, Artificial Sequence
  Description of Artificial Sequence: Synthetic oligonucleotide
gucuccagaagaacauggg

SEQ ID NO: 2314269 - RNA, 19 nt, Artificial Sequence
  Description of Artificial Sequence: Synthetic oligonucleotide
uuggcaagcauggucacuu

SEQ ID NO: 2314270 - RNA, 19 nt, Artificial Sequence
  Description of Artificial Sequence: Synthetic oligonucleotide
auacacagacuggauaaga

SEQ ID NO: 2314271 - RNA, 19 nt, Artificial Sequence
  Description of Artificial Sequence: Synthetic oligonucleotide
aagcccaucucuguacagu

SEQ ID NO: 2314272 - RNA, 19 nt, Artificial Sequence
  Description of Artificial Sequence: Synthetic oligonucleotide
gauuccauuccaggauuug

SEQ ID NO: 2314273 - RNA, 19 nt, Artificial Sequence
  Description of Artificial Sequence: Synthetic oligonucleotide
aguaaucauccagacuuga

SEQ ID NO: 2314274 - RNA, 19 nt, Artificial Sequence
  Description of Artificial Sequence: Synthetic oligonucleotide
auuccauuccaggauuuga

SEQ ID NO: 2314275 - RNA, 19 nt, Artificial Sequence
  Description of Artificial Sequence: Synthetic oligonucleotide
caggugaguguccaggguc

SEQ ID NO: 2314276 - RNA, 19 nt, Artificial Sequence
  Description of Artificial Sequence: Synthetic oligonucleotide
ggugaaccauuucauaguc

SEQ ID NO: 2314277 - RNA, 19 nt, Artificial Sequence
  Description of Artificial Sequence: Synthetic oligonucleotide
cuggauaagauacucaauu

SEQ ID NO: 2314278 - RNA, 19 nt, Artificial Sequence
  Description of Artificial Sequence: Synthetic oligonucleotide
aucauuugagcgggcuugg

SEQ ID NO: 2314279 - RNA, 19 nt, Artificial Sequence
  Description of Artificial Sequence: Synthetic oligonucleotide
auccaagucaauaucuaaa

SEQ ID NO: 2314280 - RNA, 19 nt, Artificial Sequence
  Description of Artificial Sequence: Synthetic oligonucleotide
caguaaucauccagacuug

SEQ ID NO: 2314281 - RNA, 19 nt, Artificial Sequence
  Description of Artificial Sequence: Synthetic oligonucleotide
ugguacuuccauccguuuu

SEQ ID NO: 2314282 - RNA, 19 nt, Artificial Sequence
  Description of Artificial Sequence: Synthetic oligonucleotide
cugguaaagcuccuguaga

SEQ ID NO: 2314283 - RNA, 19 nt, Artificial Sequence
  Description of Artificial Sequence: Synthetic oligonucleotide
ucuucugugcugacaugau

SEQ ID NO: 2314284 - RNA, 19 nt, Artificial Sequence
  Description of Artificial Sequence: Synthetic oligonucleotide
gaccuugcgauugucacaa

SEQ ID NO: 2314285 - RNA, 19 nt, Artificial Sequence
  Description of Artificial Sequence: Synthetic oligonucleotide
auccagacuugaccuugcg

SEQ ID NO: 2314286 - RNA, 19 nt, Artificial Sequence
  Description of Artificial Sequence: Synthetic oligonucleotide
uaucgacaauaucuaccaa

SEQ ID NO: 2314287 - RNA, 19 nt, Artificial Sequence
  Description of Artificial Sequence: Synthetic oligonucleotide
gucaacuugcucaggagga

SEQ ID NO: 2314288 - RNA, 19 nt, Artificial Sequence
  Description of Artificial Sequence: Synthetic oligonucleotide
ugauuccauuccaggauuu

SEQ ID NO: 2314289 - RNA, 19 nt, Artificial Sequence
  Description of Artificial Sequence: Synthetic oligonucleotide
guaaucauccagacuugac

SEQ ID NO: 2314290 - RNA, 19 nt, Artificial Sequence
  Description of Artificial Sequence: Synthetic oligonucleotide
ccauuucauagucugguac

SEQ ID NO: 2314291 - RNA, 19 nt, Artificial Sequence
  Description of Artificial Sequence: Synthetic oligonucleotide
gucccauagagugagugca

SEQ ID NO: 2314292 - RNA, 19 nt, Artificial Sequence
  Description of Artificial Sequence: Synthetic oligonucleotide
uggaacuagugauuccauu

SEQ ID NO: 2314293 - RNA, 19 nt, Artificial Sequence
  Description of Artificial Sequence: Synthetic oligonucleotide
gcgauugucacaagaguag

SEQ ID NO: 2314294 - RNA, 19 nt, Artificial Sequence
  Description of Artificial Sequence: Synthetic oligonucleotide
agagugagugcagcacacg

SEQ ID NO: 2314295 - RNA, 19 nt, Artificial Sequence
  Description of Artificial Sequence: Synthetic oligonucleotide
uggaucauuugagcgggcu

SEQ ID NO: 2314296 - RNA, 19 nt, Artificial Sequence
  Description of Artificial Sequence: Synthetic oligonucleotide
ucacaagaguaggcuuugg

SEQ ID NO: 2314297 - RNA, 19 nt, Artificial Sequence
  Description of Artificial Sequence: Synthetic oligonucleotide
ucaacuugcucaggaggac

SEQ ID NO: 2314298 - RNA, 19 nt, Artificial Sequence
  Description of Artificial Sequence: Synthetic oligonucleotide
acggaggaccuuuuccuga

SEQ ID NO: 2314299 - RNA, 19 nt, Artificial Sequence
  Description of Artificial Sequence: Synthetic oligonucleotide
caccaggugaguguccagg

SEQ ID NO: 2314300 - RNA, 19 nt, Artificial Sequence
  Description of Artificial Sequence: Synthetic oligonucleotide
ggugucaacuugcucagga

SEQ ID NO: 2314301 - RNA, 19 nt, Artificial Sequence
  Description of Artificial Sequence: Synthetic oligonucleotide
uugcucaggaggacaguaa

SEQ ID NO: 2314302 - RNA, 19 nt, Artificial Sequence
  Description of Artificial Sequence: Synthetic oligonucleotide
cagggucccauagagugag

SEQ ID NO: 2314303 - RNA, 19 nt, Artificial Sequence
  Description of Artificial Sequence: Synthetic oligonucleotide
cugugcugacaugaugagg

SEQ ID NO: 2314304 - RNA, 19 nt, Artificial Sequence
  Description of Artificial Sequence: Synthetic oligonucleotide
ugaugaguucgaguaucga

SEQ ID NO: 2314305 - RNA, 19 nt, Artificial Sequence
  Description of Artificial Sequence: Synthetic oligonucleotide
ucaggaggacaguaaucau

SEQ ID NO: 2314306 - RNA, 19 nt, Artificial Sequence
  Description of Artificial Sequence: Synthetic oligonucleotide
cauccagacuugaccuugc

SEQ ID NO: 2314307 - RNA, 19 nt, Artificial Sequence
  Description of Artificial Sequence: Synthetic oligonucleotide
agaggagacuccucugaau

SEQ ID NO: 2314308 - RNA, 19 nt, Artificial Sequence
  Description of Artificial Sequence: Synthetic oligonucleotide
acagguuagcccagccugg

SEQ ID NO: 2314309 - RNA, 19 nt, Artificial Sequence
  Description of Artificial Sequence: Synthetic oligonucleotide
cauuuccagaaucucccca

SEQ ID NO: 2314310 - RNA, 19 nt, Artificial Sequence
  Description of Artificial Sequence: Synthetic oligonucleotide
caggauuugaagcccaucu

SEQ ID NO: 2314311 - RNA, 19 nt, Artificial Sequence
  Description of Artificial Sequence: Synthetic oligonucleotide
gacaguaaucauccagacu

SEQ ID NO: 2314312 - RNA, 19 nt, Artificial Sequence
  Description of Artificial Sequence: Synthetic oligonucleotide
acuccucugaauacaccag

SEQ ID NO: 2314313 - RNA, 19 nt, Artificial Sequence
  Description of Artificial Sequence: Synthetic oligonucleotide
ggacaguaaucauccagac

SEQ ID NO: 2314314 - RNA, 19 nt, Artificial Sequence
  Description of Artificial Sequence: Synthetic oligonucleotide
agcacuuugggaggccaag

SEQ ID NO: 2314315 - RNA, 19 nt, Artificial Sequence
  Description of Artificial Sequence: Synthetic oligonucleotide
cagaaucuccccagugcug

SEQ ID NO: 2314316 - RNA, 19 nt, Artificial Sequence
  Description of Artificial Sequence: Synthetic oligonucleotide
uuugagcgggcuuggugau

SEQ ID NO: 2314317 - RNA, 19 nt, Artificial Sequence
  Description of Artificial Sequence: Synthetic oligonucleotide
ggauuugaagcccaucucu

SEQ ID NO: 2314318 - RNA, 19 nt, Artificial Sequence
  Description of Artificial Sequence: Synthetic oligonucleotide
gguuagcccagccugguga

SEQ ID NO: 2314319 - RNA, 19 nt, Artificial Sequence
  Description of Artificial Sequence: Synthetic oligonucleotide
guagaauuuuguacucauc

SEQ ID NO: 2314320 - RNA, 19 nt, Artificial Sequence
  Description of Artificial Sequence: Synthetic oligonucleotide
uggucuccagaagaacaug

SEQ ID NO: 2314321 - RNA, 19 nt, Artificial Sequence
  Description of Artificial Sequence: Synthetic oligonucleotide
cacaagaguaggcuuugga

SEQ ID NO: 2314322 - RNA, 19 nt, Artificial Sequence
  Description of Artificial Sequence: Synthetic oligonucleotide
aucacacaaaucagcaaaa

SEQ ID NO: 2314323 - RNA, 19 nt, Artificial Sequence
  Description of Artificial Sequence: Synthetic oligonucleotide
cauccugagugaacauuuc

SEQ ID NO: 2314324 - RNA, 19 nt, Artificial Sequence
  Description of Artificial Sequence: Synthetic oligonucleotide
cacggaggaccuuuuccug

SEQ ID NO: 2314325 - RNA, 19 nt, Artificial Sequence
  Description of Artificial Sequence: Synthetic oligonucleotide
ggaguucugaaugaucaca

SEQ ID NO: 2314326 - RNA, 19 nt, Artificial Sequence
  Description of Artificial Sequence: Synthetic oligonucleotide
ugagggaguucugaaugau

SEQ ID NO: 2314327 - RNA, 19 nt, Artificial Sequence
  Description of Artificial Sequence: Synthetic oligonucleotide
gucacaagaguaggcuuug

SEQ ID NO: 2314328 - RNA, 19 nt, Artificial Sequence
  Description of Artificial Sequence: Synthetic oligonucleotide
auacaccaggugagugucc

SEQ ID NO: 2314329 - RNA, 19 nt, Artificial Sequence
  Description of Artificial Sequence: Synthetic oligonucleotide
gaaucuccccagugcuggc

SEQ ID NO: 2314330 - RNA, 19 nt, Artificial Sequence
  Description of Artificial Sequence: Synthetic oligonucleotide
agcccaucucuguacaguu

SEQ ID NO: 2314331 - RNA, 19 nt, Artificial Sequence
  Description of Artificial Sequence: Synthetic oligonucleotide
aagcuccuguagaauuuug

SEQ ID NO: 2314332 - RNA, 19 nt, Artificial Sequence
  Description of Artificial Sequence: Synthetic oligonucleotide
agugagugcagcacacgga

SEQ ID NO: 2314333 - RNA, 19 nt, Artificial Sequence
  Description of Artificial Sequence: Synthetic oligonucleotide
acaaguggaacuagugauu

SEQ ID NO: 2314334 - RNA, 19 nt, Artificial Sequence
  Description of Artificial Sequence: Synthetic oligonucleotide
gcaucuccauucuucagca

SEQ ID NO: 2314335 - RNA, 19 nt, Artificial Sequence
  Description of Artificial Sequence: Synthetic oligonucleotide
acagacuggauaagauacu

SEQ ID NO: 2314336 - RNA, 19 nt, Artificial Sequence
  Description of Artificial Sequence: Synthetic oligonucleotide
gaucacagguuagcccagc

SEQ ID NO: 2314337 - RNA, 19 nt, Artificial Sequence
  Description of Artificial Sequence: Synthetic oligonucleotide
uccaggauuugaagcccau

SEQ ID NO: 2314338 - RNA, 19 nt, Artificial Sequence
  Description of Artificial Sequence: Synthetic oligonucleotide
gagggaguucugaaugauc

SEQ ID NO: 2314339 - RNA, 19 nt, Artificial Sequence
  Description of Artificial Sequence: Synthetic oligonucleotide
acuggauaagauacucaau

SEQ ID NO: 2314340 - RNA, 19 nt, Artificial Sequence
  Description of Artificial Sequence: Synthetic oligonucleotide
agcgggcuuggugaugcac

SEQ ID NO: 2314341 - RNA, 19 nt, Artificial Sequence
  Description of Artificial Sequence: Synthetic oligonucleotide
aucauccagacuugaccuu

SEQ ID NO: 2314342 - RNA, 19 nt, Artificial Sequence
  Description of Artificial Sequence: Synthetic oligonucleotide
cuguagaauuuuguacuca

SEQ ID NO: 2314343 - RNA, 19 nt, Artificial Sequence
  Description of Artificial Sequence: Synthetic oligonucleotide
ugcuggucuccagaagaac

SEQ ID NO: 2314344 - RNA, 19 nt, Artificial Sequence
  Description of Artificial Sequence: Synthetic oligonucleotide
acaugggcaugguggcucu

SEQ ID NO: 2314345 - RNA, 19 nt, Artificial Sequence
  Description of Artificial Sequence: Synthetic oligonucleotide
acucauccugagugaacau

SEQ ID NO: 2314346 - RNA, 19 nt, Artificial Sequence
  Description of Artificial Sequence: Synthetic oligonucleotide
cucuguacaaguggaacua

SEQ ID NO: 2314347 - RNA, 19 nt, Artificial Sequence
  Description of Artificial Sequence: Synthetic oligonucleotide
agaguaggcuuuggaagau

SEQ ID NO: 2314348 - RNA, 19 nt, Artificial Sequence
  Description of Artificial Sequence: Synthetic oligonucleotide
agguuagcccagccuggug

SEQ ID NO: 2314349 - RNA, 19 nt, Artificial Sequence
  Description of Artificial Sequence: Synthetic oligonucleotide
cacugcuggucuccagaag

SEQ ID NO: 2314350 - RNA, 19 nt, Artificial Sequence
  Description of Artificial Sequence: Synthetic oligonucleotide
uggugucaacuugcucagg

SEQ ID NO: 2314351 - RNA, 19 nt, Artificial Sequence
  Description of Artificial Sequence: Synthetic oligonucleotide
ccaagucaauaucuaaaca

SEQ ID NO: 2314352 - RNA, 19 nt, Artificial Sequence
  Description of Artificial Sequence: Synthetic oligonucleotide
acaccaggugaguguccag

SEQ ID NO: 2314353 - RNA, 19 nt, Artificial Sequence
  Description of Artificial Sequence: Synthetic oligonucleotide
gcuggucuccagaagaaca

SEQ ID NO: 2314354 - RNA, 19 nt, Artificial Sequence
  Description of Artificial Sequence: Synthetic oligonucleotide
guuagcccagccuggugaa

SEQ ID NO: 2314355 - RNA, 19 nt, Artificial Sequence
  Description of Artificial Sequence: Synthetic oligonucleotide
ggagacuccucugaauaca

SEQ ID NO: 2314356 - RNA, 19 nt, Artificial Sequence
  Description of Artificial Sequence: Synthetic oligonucleotide
guacucauccugagugaac

SEQ ID NO: 2314357 - RNA, 19 nt, Artificial Sequence
  Description of Artificial Sequence: Synthetic oligonucleotide
ccucugaauacaccaggug

SEQ ID NO: 2314358 - RNA, 19 nt, Artificial Sequence
  Description of Artificial Sequence: Synthetic oligonucleotide
gggaguucugaaugaucac

SEQ ID NO: 2314359 - RNA, 19 nt, Artificial Sequence
  Description of Artificial Sequence: Synthetic oligonucleotide
gcuccuguagaauuuugua

SEQ ID NO: 2314360 - RNA, 19 nt, Artificial Sequence
  Description of Artificial Sequence: Synthetic oligonucleotide
ucauuugagcgggcuuggu

SEQ ID NO: 2314361 - RNA, 19 nt, Artificial Sequence
  Description of Artificial Sequence: Synthetic oligonucleotide
gcgggcuuggugaugcacg

SEQ ID NO: 2314362 - RNA, 19 nt, Artificial Sequence
  Description of Artificial Sequence: Synthetic oligonucleotide
cagugcuggcugugcuugg

SEQ ID NO: 2314363 - RNA, 19 nt, Artificial Sequence
  Description of Artificial Sequence: Synthetic oligonucleotide
cgauugucacaagaguagg

SEQ ID NO: 2314364 - RNA, 19 nt, Artificial Sequence
  Description of Artificial Sequence: Synthetic oligonucleotide
cuguacaaguggaacuagu

SEQ ID NO: 2314365 - RNA, 19 nt, Artificial Sequence
  Description of Artificial Sequence: Synthetic oligonucleotide
ucuccccagugcuggcugu

SEQ ID NO: 2314366 - RNA, 19 nt, Artificial Sequence
  Description of Artificial Sequence: Synthetic oligonucleotide
gggucccauagagugagug

SEQ ID NO: 2314367 - RNA, 19 nt, Artificial Sequence
  Description of Artificial Sequence: Synthetic oligonucleotide
guguccagggucccauaga

SEQ ID NO: 2314368 - RNA, 19 nt, Artificial Sequence
  Description of Artificial Sequence: Synthetic oligonucleotide
ggcacugcuggucuccaga

SEQ ID NO: 2314369 - RNA, 19 nt, Artificial Sequence
  Description of Artificial Sequence: Synthetic oligonucleotide
gugauuccauuccaggauu

SEQ ID NO: 2314370 - RNA, 19 nt, Artificial Sequence
  Description of Artificial Sequence: Synthetic oligonucleotide
ccagacuugaccuugcgau

SEQ ID NO: 2314371 - RNA, 19 nt, Artificial Sequence
  Description of Artificial Sequence: Synthetic oligonucleotide
cauagucugguacuuccau

SEQ ID NO: 2314372 - RNA, 19 nt, Artificial Sequence
  Description of Artificial Sequence: Synthetic oligonucleotide
uggcaagcauggucacuuc

SEQ ID NO: 2314373 - RNA, 19 nt, Artificial Sequence
  Description of Artificial Sequence: Synthetic oligonucleotide
guuacuuucuaggcguuuu

SEQ ID NO: 2314374 - RNA, 19 nt, Artificial Sequence
  Description of Artificial Sequence: Synthetic oligonucleotide
uugagcgggcuuggugaug

SEQ ID NO: 2314375 - RNA, 19 nt, Artificial Sequence
  Description of Artificial Sequence: Synthetic oligonucleotide
gugcugacaugaugaggga

SEQ ID NO: 2314376 - RNA, 19 nt, Artificial Sequence
  Description of Artificial Sequence: Synthetic oligonucleotide
gucugguacuuccauccgu

SEQ ID NO: 2314377 - RNA, 19 nt, Artificial Sequence
  Description of Artificial Sequence: Synthetic oligonucleotide
cugcuggucuccagaagaa

SEQ ID NO: 2314378 - RNA, 19 nt, Artificial Sequence
  Description of Artificial Sequence: Synthetic oligonucleotide
uuagcccagccuggugaac

SEQ ID NO: 2314379 - RNA, 19 nt, Artificial Sequence
  Description of Artificial Sequence: Synthetic oligonucleotide
uccccagugcuggcugugc

SEQ ID NO: 2314380 - RNA, 19 nt, Artificial Sequence
  Description of Artificial Sequence: Synthetic oligonucleotide
cuccauucuucagcauuuc

SEQ ID NO: 2314381 - RNA, 19 nt, Artificial Sequence
  Description of Artificial Sequence: Synthetic oligonucleotide
cccauagagugagugcagc

SEQ ID NO: 2314382 - RNA, 19 nt, Artificial Sequence
  Description of Artificial Sequence: Synthetic oligonucleotide
ccuugcgauugucacaaga

SEQ ID NO: 2314383 - RNA, 19 nt, Artificial Sequence
  Description of Artificial Sequence: Synthetic oligonucleotide
ggcuuggugaugcacgccu

SEQ ID NO: 2314384 - RNA, 19 nt, Artificial Sequence
  Description of Artificial Sequence: Synthetic oligonucleotide
accuugcgauugucacaag

SEQ ID NO: 2314385 - RNA, 19 nt, Artificial Sequence
  Description of Artificial Sequence: Synthetic oligonucleotide
gcugacaugaugagggagu

SEQ ID NO: 2314386 - RNA, 19 nt, Artificial Sequence
  Description of Artificial Sequence: Synthetic oligonucleotide
caagguggguggaucauuu

SEQ ID NO: 2314387 - RNA, 19 nt, Artificial Sequence
  Description of Artificial Sequence: Synthetic oligonucleotide
ccauagagugagugcagca

SEQ ID NO: 2314388 - RNA, 19 nt, Artificial Sequence
  Description of Artificial Sequence: Synthetic oligonucleotide
cagccuggugaaccauuuc

SEQ ID NO: 2314389 - RNA, 19 nt, Artificial Sequence
  Description of Artificial Sequence: Synthetic oligonucleotide
ugguggcucuuggcaagca

SEQ ID NO: 2314390 - RNA, 19 nt, Artificial Sequence
  Description of Artificial Sequence: Synthetic oligonucleotide
guucgaguaucgacaauau

SEQ ID NO: 2314391 - RNA, 19 nt, Artificial Sequence
  Description of Artificial Sequence: Synthetic oligonucleotide
cgaguaucgacaauaucua

SEQ ID NO: 2314392 - RNA, 19 nt, Artificial Sequence
  Description of Artificial Sequence: Synthetic oligonucleotide
ggccaagguggguggauca

SEQ ID NO: 2314393 - RNA, 19 nt, Artificial Sequence
  Description of Artificial Sequence: Synthetic oligonucleotide
cugaauacaccaggugagu

SEQ ID NO: 2314394 - RNA, 19 nt, Artificial Sequence
  Description of Artificial Sequence: Synthetic oligonucleotide
gggcaugguggcucuuggc

SEQ ID NO: 2314395 - RNA, 19 nt, Artificial Sequence
  Description of Artificial Sequence: Synthetic oligonucleotide
gugaaccauuucauagucu

SEQ ID NO: 2314396 - RNA, 19 nt, Artificial Sequence
  Description of Artificial Sequence: Synthetic oligonucleotide
gcucaggaggacaguaauc

SEQ ID NO: 2314397 - RNA, 19 nt, Artificial Sequence
  Description of Artificial Sequence: Synthetic oligonucleotide
ggugaguguccaggguccc

SEQ ID NO: 2314398 - RNA, 19 nt, Artificial Sequence
  Description of Artificial Sequence: Synthetic oligonucleotide
guggaucauuugagcgggc

SEQ ID NO: 2314399 - RNA, 19 nt, Artificial Sequence
  Description of Artificial Sequence: Synthetic oligonucleotide
ccagaaucuccccagugcu

SEQ ID NO: 2314400 - RNA, 19 nt, Artificial Sequence
  Description of Artificial Sequence: Synthetic oligonucleotide
cgacaauaucuaccaaauc

SEQ ID NO: 2314401 - RNA, 19 nt, Artificial Sequence
  Description of Artificial Sequence: Synthetic oligonucleotide
gguaaagcuccuguagaau

SEQ ID NO: 2314402 - RNA, 19 nt, Artificial Sequence
  Description of Artificial Sequence: Synthetic oligonucleotide
ggcaagcauggucacuucu

SEQ ID NO: 2314403 - RNA, 19 nt, Artificial Sequence
  Description of Artificial Sequence: Synthetic oligonucleotide
ccuucaguaagguuacuuu

SEQ ID NO: 2314404 - RNA, 19 nt, Artificial Sequence
  Description of Artificial Sequence: Synthetic oligonucleotide
ccaucacacaaaucagcaa

SEQ ID NO: 2314405 - RNA, 19 nt, Artificial Sequence
  Description of Artificial Sequence: Synthetic oligonucleotide
ccuggugaaccauuucaua

SEQ ID NO: 2314406 - RNA, 19 nt, Artificial Sequence
  Description of Artificial Sequence: Synthetic oligonucleotide
gcacugcuggucuccagaa

SEQ ID NO: 2314407 - RNA, 19 nt, Artificial Sequence
  Description of Artificial Sequence: Synthetic oligonucleotide
cgggcuuggugaugcacgc

SEQ ID NO: 2314408 - RNA, 19 nt, Artificial Sequence
  Description of Artificial Sequence: Synthetic oligonucleotide
gaguucgaguaucgacaau

SEQ ID NO: 2314409 - RNA, 19 nt, Artificial Sequence
  Description of Artificial Sequence: Synthetic oligonucleotide
gugaguguccaggguccca

SEQ ID NO: 2314410 - RNA, 19 nt, Artificial Sequence
  Description of Artificial Sequence: Synthetic oligonucleotide
cuccccagugcuggcugug

SEQ ID NO: 2314411 - RNA, 19 nt, Artificial Sequence
  Description of Artificial Sequence: Synthetic oligonucleotide
agguuacuuucuaggcguu

SEQ ID NO: 2314412 - RNA, 19 nt, Artificial Sequence
  Description of Artificial Sequence: Synthetic oligonucleotide
cagcacuuugggaggccaa

SEQ ID NO: 2314413 - RNA, 19 nt, Artificial Sequence
  Description of Artificial Sequence: Synthetic oligonucleotide
ggaucauuugagcgggcuu

SEQ ID NO: 2314414 - RNA, 19 nt, Artificial Sequence
  Description of Artificial Sequence: Synthetic oligonucleotide
ccaggauuugaagcccauc

SEQ ID NO: 2314415 - RNA, 19 nt, Artificial Sequence
  Description of Artificial Sequence: Synthetic oligonucleotide
cuuggcaagcauggucacu

SEQ ID NO: 2314416 - RNA, 19 nt, Artificial Sequence
  Description of Artificial Sequence: Synthetic oligonucleotide
guggaacuagugauuccau

SEQ ID NO: 2314417 - RNA, 19 nt, Artificial Sequence
  Description of Artificial Sequence: Synthetic oligonucleotide
agcacacggaggaccuuuu

SEQ ID NO: 2314418 - RNA, 19 nt, Artificial Sequence
  Description of Artificial Sequence: Synthetic oligonucleotide
guaggcuuuggaagauuuu

SEQ ID NO: 2314419 - RNA, 19 nt, Artificial Sequence
  Description of Artificial Sequence: Synthetic oligonucleotide
cugacaugaugagggaguu

SEQ ID NO: 2314420 - RNA, 19 nt, Artificial Sequence
  Description of Artificial Sequence: Synthetic oligonucleotide
gaguaggcuuuggaagauu

SEQ ID NO: 2314421 - RNA, 19 nt, Artificial Sequence
  Description of Artificial Sequence: Synthetic oligonucleotide
gggcuuggugaugcacgcc

SEQ ID NO: 2314422 - RNA, 19 nt, Artificial Sequence
  Description of Artificial Sequence: Synthetic oligonucleotide
cuggcugugcuugggcacu

SEQ ID NO: 2314423 - RNA, 19 nt, Artificial Sequence
  Description of Artificial Sequence: Synthetic oligonucleotide
ccaucaccaucacacaaau

SEQ ID NO: 2314424 - RNA, 19 nt, Artificial Sequence
  Description of Artificial Sequence: Synthetic oligonucleotide
gguggcucuuggcaagcau

SEQ ID NO: 2314425 - RNA, 19 nt, Artificial Sequence
  Description of Artificial Sequence: Synthetic oligonucleotide
gcaagcauggucacuucuu

SEQ ID NO: 2314426 - RNA, 19 nt, Artificial Sequence
  Description of Artificial Sequence: Synthetic oligonucleotide
gugcuugggcacugcuggu

SEQ ID NO: 2314427 - RNA, 19 nt, Artificial Sequence
  Description of Artificial Sequence: Synthetic oligonucleotide
gaggccaagguggguggau

SEQ ID NO: 2314428 - RNA, 19 nt, Artificial Sequence
  Description of Artificial Sequence: Synthetic oligonucleotide
cugguacuuccauccguuu

SEQ ID NO: 2314429 - RNA, 19 nt, Artificial Sequence
  Description of Artificial Sequence: Synthetic oligonucleotide
guccagggucccauagagu

SEQ ID NO: 2314430 - RNA, 19 nt, Artificial Sequence
  Description of Artificial Sequence: Synthetic oligonucleotide
cagguuagcccagccuggu

SEQ ID NO: 2314431 - RNA, 19 nt, Artificial Sequence
  Description of Artificial Sequence: Synthetic oligonucleotide
agggucccauagagugagu

SEQ ID NO: 2314432 - RNA, 19 nt, Artificial Sequence
  Description of Artificial Sequence: Synthetic oligonucleotide
gccuggugaaccauuucau

SEQ ID NO: 2314433 - RNA, 19 nt, Artificial Sequence
  Description of Artificial Sequence: Synthetic oligonucleotide
cccagcacuuugggaggcc

SEQ ID NO: 2314434 - RNA, 19 nt, Artificial Sequence
  Description of Artificial Sequence: Synthetic oligonucleotide
ggaggccaaggugggugga

SEQ ID NO: 2314435 - RNA, 19 nt, Artificial Sequence
  Description of Artificial Sequence: Synthetic oligonucleotide
gguuacuuucuaggcguuu

SEQ ID NO: 2314436 - RNA, 19 nt, Artificial Sequence
  Description of Artificial Sequence: Synthetic oligonucleotide
cagcacacggaggaccuuu

SEQ ID NO: 2314437 - RNA, 19 nt, Artificial Sequence
  Description of Artificial Sequence: Synthetic oligonucleotide
cggaggaccuuuuccugaa

SEQ ID NO: 2314438 - RNA, 19 nt, Artificial Sequence
  Description of Artificial Sequence: Synthetic oligonucleotide
ggaggaccuuuuccugaau

SEQ ID NO: 2314439 - RNA, 19 nt, Artificial Sequence
  Description of Artificial Sequence: Synthetic oligonucleotide
ccaggugaguguccagggu

SEQ ID NO: 2314440 - RNA, 19 nt, Artificial Sequence
  Description of Artificial Sequence: Synthetic oligonucleotide
ccagccuggugaaccauuu

SEQ ID NO: 2314441 - RNA, 19 nt, Artificial Sequence
  Description of Artificial Sequence: Synthetic oligonucleotide
ggcucuuggcaagcauggu

SEQ ID NO: 2314442 - RNA, 19 nt, Artificial Sequence
  Description of Artificial Sequence: Synthetic oligonucleotide
gccaagguggguggaucau

SEQ ID NO: 2314443 - RNA, 19 nt, Artificial Sequence
  Description of Artificial Sequence: Synthetic oligonucleotide
ccaagguggguggaucauu

SEQ ID NO: 2314444 - RNA, 19 nt, Artificial Sequence
  Description of Artificial Sequence: Synthetic oligonucleotide
ccccagugcuggcugugcu

SEQ ID NO: 2314445 - RNA, 19 nt, Artificial Sequence
  Description of Artificial Sequence: Synthetic oligonucleotide
gcccaucucuguacaguuu

SEQ ID NO: 2314446 - RNA, 19 nt, Artificial Sequence
  Description of Artificial Sequence: Synthetic oligonucleotide
caugggcaugguggcucuu

SEQ ID NO: 2314447 - RNA, 19 nt, Artificial Sequence
  Description of Artificial Sequence: Synthetic oligonucleotide
aaguagacccagcagaucc

SEQ ID NO: 2314448 - RNA, 19 nt, Artificial Sequence
  Description of Artificial Sequence: Synthetic oligonucleotide
aaaagaagcagagugucac

SEQ ID NO: 2314449 - RNA, 19 nt, Artificial Sequence
  Description of Artificial Sequence: Synthetic oligonucleotide
auacacugcacuuccaucc

SEQ ID NO: 2314450 - RNA, 19 nt, Artificial Sequence
  Description of Artificial Sequence: Synthetic oligonucleotide
cauuaccugauuuacaggg

SEQ ID NO: 2314451 - RNA, 19 nt, Artificial Sequence
  Description of Artificial Sequence: Synthetic oligonucleotide
uaucgcaucagguucaggg

SEQ ID NO: 2314452 - RNA, 19 nt, Artificial Sequence
  Description of Artificial Sequence: Synthetic oligonucleotide
gaagacaauugccugaggg

SEQ ID NO: 2314453 - RNA, 19 nt, Artificial Sequence
  Description of Artificial Sequence: Synthetic oligonucleotide
ucuuccgaaacaaaguaag

SEQ ID NO: 2314454 - RNA, 19 nt, Artificial Sequence
  Description of Artificial Sequence: Synthetic oligonucleotide
aagacaauugccugagggg

SEQ ID NO: 2314455 - RNA, 19 nt, Artificial Sequence
  Description of Artificial Sequence: Synthetic oligonucleotide
uccaauuuccagaacuugg

SEQ ID NO: 2314456 - RNA, 19 nt, Artificial Sequence
  Description of Artificial Sequence: Synthetic oligonucleotide
uguaaggccauucaccuug

SEQ ID NO: 2314457 - RNA, 19 nt, Artificial Sequence
  Description of Artificial Sequence: Synthetic oligonucleotide
aaugccacgugugaguggc

SEQ ID NO: 2314458 - RNA, 19 nt, Artificial Sequence
  Description of Artificial Sequence: Synthetic oligonucleotide
agcaaccggaaguagaccc

SEQ ID NO: 2314459 - RNA, 19 nt, Artificial Sequence
  Description of Artificial Sequence: Synthetic oligonucleotide
aaagaagcagagugucacc

SEQ ID NO: 2314460 - RNA, 19 nt, Artificial Sequence
  Description of Artificial Sequence: Synthetic oligonucleotide
acauacuucccauaaauca

SEQ ID NO: 2314461 - RNA, 19 nt, Artificial Sequence
  Description of Artificial Sequence: Synthetic oligonucleotide
aaauaagugggguucacau

SEQ ID NO: 2314462 - RNA, 19 nt, Artificial Sequence
  Description of Artificial Sequence: Synthetic oligonucleotide
uccgaaacaaaguaagggc

SEQ ID NO: 2314463 - RNA, 19 nt, Artificial Sequence
  Description of Artificial Sequence: Synthetic oligonucleotide
ucccgaaugacuccggugg

SEQ ID NO: 2314464 - RNA, 19 nt, Artificial Sequence
  Description of Artificial Sequence: Synthetic oligonucleotide
ucuaaaaguuuucaccaca

SEQ ID NO: 2314465 - RNA, 19 nt, Artificial Sequence
  Description of Artificial Sequence: Synthetic oligonucleotide
accauguuccaguuggugc

SEQ ID NO: 2314466 - RNA, 19 nt, Artificial Sequence
  Description of Artificial Sequence: Synthetic oligonucleotide
aggcaaaagaagcagagug

SEQ ID NO: 2314467 - RNA, 19 nt, Artificial Sequence
  Description of Artificial Sequence: Synthetic oligonucleotide
uuccgaaacaaaguaaggg

SEQ ID NO: 2314468 - RNA, 19 nt, Artificial Sequence
  Description of Artificial Sequence: Synthetic oligonucleotide
uacauaagggguucuauca

SEQ ID NO: 2314469 - RNA, 19 nt, Artificial Sequence
  Description of Artificial Sequence: Synthetic oligonucleotide
cauacuucccauaaaucag

SEQ ID NO: 2314470 - RNA, 19 nt, Artificial Sequence
  Description of Artificial Sequence: Synthetic oligonucleotide
uucacaaaggcuccaacac

SEQ ID NO: 2314471 - RNA, 19 nt, Artificial Sequence
  Description of Artificial Sequence: Synthetic oligonucleotide
uaaaaguuuucaccacagg

SEQ ID NO: 2314472 - RNA, 19 nt, Artificial Sequence
  Description of Artificial Sequence: Synthetic oligonucleotide
aggccauucaccuugcuag

SEQ ID NO: 2314473 - RNA, 19 nt, Artificial Sequence
  Description of Artificial Sequence: Synthetic oligonucleotide
cuaaaaguuuucaccacag

SEQ ID NO: 2314474 - RNA, 19 nt, Artificial Sequence
  Description of Artificial Sequence: Synthetic oligonucleotide
cugacggucaggaugauac

SEQ ID NO: 2314475 - RNA, 19 nt, Artificial Sequence
  Description of Artificial Sequence: Synthetic oligonucleotide
gagacugacggucaggaug

SEQ ID NO: 2314476 - RNA, 19 nt, Artificial Sequence
  Description of Artificial Sequence: Synthetic oligonucleotide
gagauugugcauucggugc

SEQ ID NO: 2314477 - RNA, 19 nt, Artificial Sequence
  Description of Artificial Sequence: Synthetic oligonucleotide
ugacauacuucccauaaau

SEQ ID NO: 2314478 - RNA, 19 nt, Artificial Sequence
  Description of Artificial Sequence: Synthetic oligonucleotide
aucuaaaaguuuucaccac

SEQ ID NO: 2314479 - RNA, 19 nt, Artificial Sequence
  Description of Artificial Sequence: Synthetic oligonucleotide
caucuaaaaguuuucacca

SEQ ID NO: 2314480 - RNA, 19 nt, Artificial Sequence
  Description of Artificial Sequence: Synthetic oligonucleotide
auaagugggguucacauua

SEQ ID NO: 2314481 - RNA, 19 nt, Artificial Sequence
  Description of Artificial Sequence: Synthetic oligonucleotide
acuagcauauaccugcgca

SEQ ID NO: 2314482 - RNA, 19 nt, Artificial Sequence
  Description of Artificial Sequence: Synthetic oligonucleotide
acauaagggguucuaucac

SEQ ID NO: 2314483 - RNA, 19 nt, Artificial Sequence
  Description of Artificial Sequence: Synthetic oligonucleotide
aagugggguucacauuacc

SEQ ID NO: 2314484 - RNA, 19 nt, Artificial Sequence
  Description of Artificial Sequence: Synthetic oligonucleotide
aucgcaucagguucagggc

SEQ ID NO: 2314485 - RNA, 19 nt, Artificial Sequence
  Description of Artificial Sequence: Synthetic oligonucleotide
cuacuuccaacccaggaag

SEQ ID NO: 2314486 - RNA, 19 nt, Artificial Sequence
  Description of Artificial Sequence: Synthetic oligonucleotide
cuccuuagggaccuggugg

SEQ ID NO: 2314487 - RNA, 19 nt, Artificial Sequence
  Description of Artificial Sequence: Synthetic oligonucleotide
cauaagggguucuaucacc

SEQ ID NO: 2314488 - RNA, 19 nt, Artificial Sequence
  Description of Artificial Sequence: Synthetic oligonucleotide
uugucuuccgaaacaaagu

SEQ ID NO: 2314489 - RNA, 19 nt, Artificial Sequence
  Description of Artificial Sequence: Synthetic oligonucleotide
aaaucaggcaaaagaagca

SEQ ID NO: 2314490 - RNA, 19 nt, Artificial Sequence
  Description of Artificial Sequence: Synthetic oligonucleotide
guuguaucgcaucagguuc

SEQ ID NO: 2314491 - RNA, 19 nt, Artificial Sequence
  Description of Artificial Sequence: Synthetic oligonucleotide
aaacaaaguaagggccagc

SEQ ID NO: 2314492 - RNA, 19 nt, Artificial Sequence
  Description of Artificial Sequence: Synthetic oligonucleotide
aaggccauguugucuuccg

SEQ ID NO: 2314493 - RNA, 19 nt, Artificial Sequence
  Description of Artificial Sequence: Synthetic oligonucleotide
ccaucuaaaaguuuucacc

SEQ ID NO: 2314494 - RNA, 19 nt, Artificial Sequence
  Description of Artificial Sequence: Synthetic oligonucleotide
gugcuuguauucuucagag

SEQ ID NO: 2314495 - RNA, 19 nt, Artificial Sequence
  Description of Artificial Sequence: Synthetic oligonucleotide
uuacaggggacccacucug

SEQ ID NO: 2314496 - RNA, 19 nt, Artificial Sequence
  Description of Artificial Sequence: Synthetic oligonucleotide
ugucuuccgaaacaaagua

SEQ ID NO: 2314497 - RNA, 19 nt, Artificial Sequence
  Description of Artificial Sequence: Synthetic oligonucleotide
cuagcauauaccugcgcag

SEQ ID NO: 2314498 - RNA, 19 nt, Artificial Sequence
  Description of Artificial Sequence: Synthetic oligonucleotide
uacacugcacuuccauccg

SEQ ID NO: 2314499 - RNA, 19 nt, Artificial Sequence
  Description of Artificial Sequence: Synthetic oligonucleotide
acauuaccugauuuacagg

SEQ ID NO: 2314500 - RNA, 19 nt, Artificial Sequence
  Description of Artificial Sequence: Synthetic oligonucleotide
cuuccgaaacaaaguaagg

SEQ ID NO: 2314501 - RNA, 19 nt, Artificial Sequence
  Description of Artificial Sequence: Synthetic oligonucleotide
cuucccauaaaucaggcaa

SEQ ID NO: 2314502 - RNA, 19 nt, Artificial Sequence
  Description of Artificial Sequence: Synthetic oligonucleotide
ugggcuuagaccaucuaaa

SEQ ID NO: 2314503 - RNA, 19 nt, Artificial Sequence
  Description of Artificial Sequence: Synthetic oligonucleotide
aaaguaagggccagcgaag

SEQ ID NO: 2314504 - RNA, 19 nt, Artificial Sequence
  Description of Artificial Sequence: Synthetic oligonucleotide
augcguugggcccacuagc

SEQ ID NO: 2314505 - RNA, 19 nt, Artificial Sequence
  Description of Artificial Sequence: Synthetic oligonucleotide
ucuucagaggcaucgugca

SEQ ID NO: 2314506 - RNA, 19 nt, Artificial Sequence
  Description of Artificial Sequence: Synthetic oligonucleotide
acugacauacuucccauaa

SEQ ID NO: 2314507 - RNA, 19 nt, Artificial Sequence
  Description of Artificial Sequence: Synthetic oligonucleotide
uguuguaucgcaucagguu

SEQ ID NO: 2314508 - RNA, 19 nt, Artificial Sequence
  Description of Artificial Sequence: Synthetic oligonucleotide
uggguuacucacuuuguac

SEQ ID NO: 2314509 - RNA, 19 nt, Artificial Sequence
  Description of Artificial Sequence: Synthetic oligonucleotide
uuuacaggggacccacucu

SEQ ID NO: 2314510 - RNA, 19 nt, Artificial Sequence
  Description of Artificial Sequence: Synthetic oligonucleotide
aaugggguauacacugcac

SEQ ID NO: 2314511 - RNA, 19 nt, Artificial Sequence
  Description of Artificial Sequence: Synthetic oligonucleotide
cuuauaaaggaggcagggg

SEQ ID NO: 2314512 - RNA, 19 nt, Artificial Sequence
  Description of Artificial Sequence: Synthetic oligonucleotide
accugauuuacaggggacc

SEQ ID NO: 2314513 - RNA, 19 nt, Artificial Sequence
  Description of Artificial Sequence: Synthetic oligonucleotide
uggugcuauuguuguaucg

SEQ ID NO: 2314514 - RNA, 19 nt, Artificial Sequence
  Description of Artificial Sequence: Synthetic oligonucleotide
ucacauuaccugauuuaca

SEQ ID NO: 2314515 - RNA, 19 nt, Artificial Sequence
  Description of Artificial Sequence: Synthetic oligonucleotide
aauaagugggguucacauu

SEQ ID NO: 2314516 - RNA, 19 nt, Artificial Sequence
  Description of Artificial Sequence: Synthetic oligonucleotide
uagcauauaccugcgcagg

SEQ ID NO: 2314517 - RNA, 19 nt, Artificial Sequence
  Description of Artificial Sequence: Synthetic oligonucleotide
aucgugcacagcugugucc

SEQ ID NO: 2314518 - RNA, 19 nt, Artificial Sequence
  Description of Artificial Sequence: Synthetic oligonucleotide
aaaaccacgugagcaccgg

SEQ ID NO: 2314519 - RNA, 19 nt, Artificial Sequence
  Description of Artificial Sequence: Synthetic oligonucleotide
auacuucccauaaaucagg

SEQ ID NO: 2314520 - RNA, 19 nt, Artificial Sequence
  Description of Artificial Sequence: Synthetic oligonucleotide
uuguuguaucgcaucaggu

SEQ ID NO: 2314521 - RNA, 19 nt, Artificial Sequence
  Description of Artificial Sequence: Synthetic oligonucleotide
gaagucccgaaugacuccg

SEQ ID NO: 2314522 - RNA, 19 nt, Artificial Sequence
  Description of Artificial Sequence: Synthetic oligonucleotide
gucaggaugauacccagca

SEQ ID NO: 2314523 - RNA, 19 nt, Artificial Sequence
  Description of Artificial Sequence: Synthetic oligonucleotide
ccaacacugacauacuucc

SEQ ID NO: 2314524 - RNA, 19 nt, Artificial Sequence
  Description of Artificial Sequence: Synthetic oligonucleotide
agcauauaccugcgcaggg

SEQ ID NO: 2314525 - RNA, 19 nt, Artificial Sequence
  Description of Artificial Sequence: Synthetic oligonucleotide
ugucacagcagagauugug

SEQ ID NO: 2314526 - RNA, 19 nt, Artificial Sequence
  Description of Artificial Sequence: Synthetic oligonucleotide
agcagauccauggugccac

SEQ ID NO: 2314527 - RNA, 19 nt, Artificial Sequence
  Description of Artificial Sequence: Synthetic oligonucleotide
cccacuagcauauaccugc

SEQ ID NO: 2314528 - RNA, 19 nt, Artificial Sequence
  Description of Artificial Sequence: Synthetic oligonucleotide
uuguaucgcaucagguuca

SEQ ID NO: 2314529 - RNA, 19 nt, Artificial Sequence
  Description of Artificial Sequence: Synthetic oligonucleotide
uacuucccauaaaucaggc

SEQ ID NO: 2314530 - RNA, 19 nt, Artificial Sequence
  Description of Artificial Sequence: Synthetic oligonucleotide
ugcagcaaccggaaguaga

SEQ ID NO: 2314531 - RNA, 19 nt, Artificial Sequence
  Description of Artificial Sequence: Synthetic oligonucleotide
ugcgcaggguccaauuucc

SEQ ID NO: 2314532 - RNA, 19 nt, Artificial Sequence
  Description of Artificial Sequence: Synthetic oligonucleotide
caaaguaagggccagcgaa

SEQ ID NO: 2314533 - RNA, 19 nt, Artificial Sequence
  Description of Artificial Sequence: Synthetic oligonucleotide
uucauugcagcaaccggaa

SEQ ID NO: 2314534 - RNA, 19 nt, Artificial Sequence
  Description of Artificial Sequence: Synthetic oligonucleotide
uucagaggcaucgugcaca

SEQ ID NO: 2314535 - RNA, 19 nt, Artificial Sequence
  Description of Artificial Sequence: Synthetic oligonucleotide
guggagacuccuuagggac

SEQ ID NO: 2314536 - RNA, 19 nt, Artificial Sequence
  Description of Artificial Sequence: Synthetic oligonucleotide
uauacacugcacuuccauc

SEQ ID NO: 2314537 - RNA, 19 nt, Artificial Sequence
  Description of Artificial Sequence: Synthetic oligonucleotide
gguucuaucaccagcauga

SEQ ID NO: 2314538 - RNA, 19 nt, Artificial Sequence
  Description of Artificial Sequence: Synthetic oligonucleotide
uauuguuguaucgcaucag

SEQ ID NO: 2314539 - RNA, 19 nt, Artificial Sequence
  Description of Artificial Sequence: Synthetic oligonucleotide
ucacagcagagauugugca

SEQ ID NO: 2314540 - RNA, 19 nt, Artificial Sequence
  Description of Artificial Sequence: Synthetic oligonucleotide
gugggguucacauuaccug

SEQ ID NO: 2314541 - RNA, 19 nt, Artificial Sequence
  Description of Artificial Sequence: Synthetic oligonucleotide
aaaccacgugagcaccggg

SEQ ID NO: 2314542 - RNA, 19 nt, Artificial Sequence
  Description of Artificial Sequence: Synthetic oligonucleotide
aaaggcuccaacacugaca

SEQ ID NO: 2314543 - RNA, 19 nt, Artificial Sequence
  Description of Artificial Sequence: Synthetic oligonucleotide
cacgugagcaccgggaugg

SEQ ID NO: 2314544 - RNA, 19 nt, Artificial Sequence
  Description of Artificial Sequence: Synthetic oligonucleotide
agauugugcauucggugcu

SEQ ID NO: 2314545 - RNA, 19 nt, Artificial Sequence
  Description of Artificial Sequence: Synthetic oligonucleotide
uaagggccagcgaaguccc

SEQ ID NO: 2314546 - RNA, 19 nt, Artificial Sequence
  Description of Artificial Sequence: Synthetic oligonucleotide
gagccccuuauaaaggagg

SEQ ID NO: 2314547 - RNA, 19 nt, Artificial Sequence
  Description of Artificial Sequence: Synthetic oligonucleotide
augggguauacacugcacu

SEQ ID NO: 2314548 - RNA, 19 nt, Artificial Sequence
  Description of Artificial Sequence: Synthetic oligonucleotide
auuaccugauuuacagggg

SEQ ID NO: 2314549 - RNA, 19 nt, Artificial Sequence
  Description of Artificial Sequence: Synthetic oligonucleotide
ugacccuacuuccaaccca

SEQ ID NO: 2314550 - RNA, 19 nt, Artificial Sequence
  Description of Artificial Sequence: Synthetic oligonucleotide
ccgaaacaaaguaagggcc

SEQ ID NO: 2314551 - RNA, 19 nt, Artificial Sequence
  Description of Artificial Sequence: Synthetic oligonucleotide
ggggcaaaagaacuggacc

SEQ ID NO: 2314552 - RNA, 19 nt, Artificial Sequence
  Description of Artificial Sequence: Synthetic oligonucleotide
gguucauugcagcaaccgg

SEQ ID NO: 2314553 - RNA, 19 nt, Artificial Sequence
  Description of Artificial Sequence: Synthetic oligonucleotide
gacggucaggaugauaccc

SEQ ID NO: 2314554 - RNA, 19 nt, Artificial Sequence
  Description of Artificial Sequence: Synthetic oligonucleotide
aguaagggccagcgaaguc

SEQ ID NO: 2314555 - RNA, 19 nt, Artificial Sequence
  Description of Artificial Sequence: Synthetic oligonucleotide
uuccaguuggugcuauugu

SEQ ID NO: 2314556 - RNA, 19 nt, Artificial Sequence
  Description of Artificial Sequence: Synthetic oligonucleotide
gcagagauugugcauucgg

SEQ ID NO: 2314557 - RNA, 19 nt, Artificial Sequence
  Description of Artificial Sequence: Synthetic oligonucleotide
gaugagacugacggucagg

SEQ ID NO: 2314558 - RNA, 19 nt, Artificial Sequence
  Description of Artificial Sequence: Synthetic oligonucleotide
acccacucugcauguaagg

SEQ ID NO: 2314559 - RNA, 19 nt, Artificial Sequence
  Description of Artificial Sequence: Synthetic oligonucleotide
aaggccauucaccuugcua

SEQ ID NO: 2314560 - RNA, 19 nt, Artificial Sequence
  Description of Artificial Sequence: Synthetic oligonucleotide
ggggcaaugggguauacac

SEQ ID NO: 2314561 - RNA, 19 nt, Artificial Sequence
  Description of Artificial Sequence: Synthetic oligonucleotide
auauaccugcgcagggucc

SEQ ID NO: 2314562 - RNA, 19 nt, Artificial Sequence
  Description of Artificial Sequence: Synthetic oligonucleotide
ggcuuagaccaucuaaaag

SEQ ID NO: 2314563 - RNA, 19 nt, Artificial Sequence
  Description of Artificial Sequence: Synthetic oligonucleotide
agccccuuauaaaggaggc

SEQ ID NO: 2314564 - RNA, 19 nt, Artificial Sequence
  Description of Artificial Sequence: Synthetic oligonucleotide
ugcucugauggguuacuca

SEQ ID NO: 2314565 - RNA, 19 nt, Artificial Sequence
  Description of Artificial Sequence: Synthetic oligonucleotide
ucgugcacagcuguguccc

SEQ ID NO: 2314566 - RNA, 19 nt, Artificial Sequence
  Description of Artificial Sequence: Synthetic oligonucleotide
cccauguggccaaugaugg

SEQ ID NO: 2314567 - RNA, 19 nt, Artificial Sequence
  Description of Artificial Sequence: Synthetic oligonucleotide
cuuguauucuucagaggca

SEQ ID NO: 2314568 - RNA, 19 nt, Artificial Sequence
  Description of Artificial Sequence: Synthetic oligonucleotide
uguacauaagggguucuau

SEQ ID NO: 2314569 - RNA, 19 nt, Artificial Sequence
  Description of Artificial Sequence: Synthetic oligonucleotide
guucauugcagcaaccgga

SEQ ID NO: 2314570 - RNA, 19 nt, Artificial Sequence
  Description of Artificial Sequence: Synthetic oligonucleotide
ugcguugggcccacuagca

SEQ ID NO: 2314571 - RNA, 19 nt, Artificial Sequence
  Description of Artificial Sequence: Synthetic oligonucleotide
gacccuacuuccaacccag

SEQ ID NO: 2314572 - RNA, 19 nt, Artificial Sequence
  Description of Artificial Sequence: Synthetic oligonucleotide
ugcuauuguuguaucgcau

SEQ ID NO: 2314573 - RNA, 19 nt, Artificial Sequence
  Description of Artificial Sequence: Synthetic oligonucleotide
accggaaguagacccagca

SEQ ID NO: 2314574 - RNA, 19 nt, Artificial Sequence
  Description of Artificial Sequence: Synthetic oligonucleotide
ucauugcagcaaccggaag

SEQ ID NO: 2314575 - RNA, 19 nt, Artificial Sequence
  Description of Artificial Sequence: Synthetic oligonucleotide
uaagggguucuaucaccag

SEQ ID NO: 2314576 - RNA, 19 nt, Artificial Sequence
  Description of Artificial Sequence: Synthetic oligonucleotide
uuagaccaucuaaaaguuu

SEQ ID NO: 2314577 - RNA, 19 nt, Artificial Sequence
  Description of Artificial Sequence: Synthetic oligonucleotide
uucggugcuuguauucuuc

SEQ ID NO: 2314578 - RNA, 19 nt, Artificial Sequence
  Description of Artificial Sequence: Synthetic oligonucleotide
gggcaaaagaacuggacca

SEQ ID NO: 2314579 - RNA, 19 nt, Artificial Sequence
  Description of Artificial Sequence: Synthetic oligonucleotide
caugcguugggcccacuag

SEQ ID NO: 2314580 - RNA, 19 nt, Artificial Sequence
  Description of Artificial Sequence: Synthetic oligonucleotide
aggggacccacucugcaug

SEQ ID NO: 2314581 - RNA, 19 nt, Artificial Sequence
  Description of Artificial Sequence: Synthetic oligonucleotide
uccagaacuuggcaggcuu

SEQ ID NO: 2314582 - RNA, 19 nt, Artificial Sequence
  Description of Artificial Sequence: Synthetic oligonucleotide
cuuuguacauaagggguuc

SEQ ID NO: 2314583 - RNA, 19 nt, Artificial Sequence
  Description of Artificial Sequence: Synthetic oligonucleotide
uggaaauaagugggguuca

SEQ ID NO: 2314584 - RNA, 19 nt, Artificial Sequence
  Description of Artificial Sequence: Synthetic oligonucleotide
acuccuuagggaccuggug

SEQ ID NO: 2314585 - RNA, 19 nt, Artificial Sequence
  Description of Artificial Sequence: Synthetic oligonucleotide
ugggguauacacugcacuu

SEQ ID NO: 2314586 - RNA, 19 nt, Artificial Sequence
  Description of Artificial Sequence: Synthetic oligonucleotide
uaagugggguucacauuac

SEQ ID NO: 2314587 - RNA, 19 nt, Artificial Sequence
  Description of Artificial Sequence: Synthetic oligonucleotide
ucugcauguaaggccauuc

SEQ ID NO: 2314588 - RNA, 19 nt, Artificial Sequence
  Description of Artificial Sequence: Synthetic oligonucleotide
acaaaguaagggccagcga

SEQ ID NO: 2314589 - RNA, 19 nt, Artificial Sequence
  Description of Artificial Sequence: Synthetic oligonucleotide
augagacugacggucagga

SEQ ID NO: 2314590 - RNA, 19 nt, Artificial Sequence
  Description of Artificial Sequence: Synthetic oligonucleotide
ggguuacucacuuuguaca

SEQ ID NO: 2314591 - RNA, 19 nt, Artificial Sequence
  Description of Artificial Sequence: Synthetic oligonucleotide
aggggaagcggcuccgcuc

SEQ ID NO: 2314592 - RNA, 19 nt, Artificial Sequence
  Description of Artificial Sequence: Synthetic oligonucleotide
uccaguuggugcuauuguu

SEQ ID NO: 2314593 - RNA, 19 nt, Artificial Sequence
  Description of Artificial Sequence: Synthetic oligonucleotide
agacugacggucaggauga

SEQ ID NO: 2314594 - RNA, 19 nt, Artificial Sequence
  Description of Artificial Sequence: Synthetic oligonucleotide
gaccaucuaaaaguuuuca

SEQ ID NO: 2314595 - RNA, 19 nt, Artificial Sequence
  Description of Artificial Sequence: Synthetic oligonucleotide
acuucccauaaaucaggca

SEQ ID NO: 2314596 - RNA, 19 nt, Artificial Sequence
  Description of Artificial Sequence: Synthetic oligonucleotide
acacugcacuuccauccgg

SEQ ID NO: 2314597 - RNA, 19 nt, Artificial Sequence
  Description of Artificial Sequence: Synthetic oligonucleotide
cacaccacgcaguagggga

SEQ ID NO: 2314598 - RNA, 19 nt, Artificial Sequence
  Description of Artificial Sequence: Synthetic oligonucleotide
caaaagaagcagaguguca

SEQ ID NO: 2314599 - RNA, 19 nt, Artificial Sequence
  Description of Artificial Sequence: Synthetic oligonucleotide
ugggcccacuagcauauac

SEQ ID NO: 2314600 - RNA, 19 nt, Artificial Sequence
  Description of Artificial Sequence: Synthetic oligonucleotide
ugauacccagcagaaggac

SEQ ID NO: 2314601 - RNA, 19 nt, Artificial Sequence
  Description of Artificial Sequence: Synthetic oligonucleotide
acgcaguaggggaagcggc

SEQ ID NO: 2314602 - RNA, 19 nt, Artificial Sequence
  Description of Artificial Sequence: Synthetic oligonucleotide
cugacccuacuuccaaccc

SEQ ID NO: 2314603 - RNA, 19 nt, Artificial Sequence
  Description of Artificial Sequence: Synthetic oligonucleotide
acacugacauacuucccau

SEQ ID NO: 2314604 - RNA, 19 nt, Artificial Sequence
  Description of Artificial Sequence: Synthetic oligonucleotide
gcuauuguuguaucgcauc

SEQ ID NO: 2314605 - RNA, 19 nt, Artificial Sequence
  Description of Artificial Sequence: Synthetic oligonucleotide
gauacccagcagaaggaca

SEQ ID NO: 2314606 - RNA, 19 nt, Artificial Sequence
  Description of Artificial Sequence: Synthetic oligonucleotide
acgugugaguggcaguugu

SEQ ID NO: 2314607 - RNA, 19 nt, Artificial Sequence
  Description of Artificial Sequence: Synthetic oligonucleotide
uuuguacauaagggguucu

SEQ ID NO: 2314608 - RNA, 19 nt, Artificial Sequence
  Description of Artificial Sequence: Synthetic oligonucleotide
auugcagcaaccggaagua

SEQ ID NO: 2314609 - RNA, 19 nt, Artificial Sequence
  Description of Artificial Sequence: Synthetic oligonucleotide
uauucuucagaggcaucgu

SEQ ID NO: 2314610 - RNA, 19 nt, Artificial Sequence
  Description of Artificial Sequence: Synthetic oligonucleotide
cacgcaguaggggaagcgg

SEQ ID NO: 2314611 - RNA, 19 nt, Artificial Sequence
  Description of Artificial Sequence: Synthetic oligonucleotide
caauuuccagaacuuggca

SEQ ID NO: 2314612 - RNA, 19 nt, Artificial Sequence
  Description of Artificial Sequence: Synthetic oligonucleotide
aaccggaaguagacccagc

SEQ ID NO: 2314613 - RNA, 19 nt, Artificial Sequence
  Description of Artificial Sequence: Synthetic oligonucleotide
uguaucgcaucagguucag

SEQ ID NO: 2314614 - RNA, 19 nt, Artificial Sequence
  Description of Artificial Sequence: Synthetic oligonucleotide
uccauccggagcccugacc

SEQ ID NO: 2314615 - RNA, 19 nt, Artificial Sequence
  Description of Artificial Sequence: Synthetic oligonucleotide
gugcuauuguuguaucgca

SEQ ID NO: 2314616 - RNA, 19 nt, Artificial Sequence
  Description of Artificial Sequence: Synthetic oligonucleotide
guccaauuuccagaacuug

SEQ ID NO: 2314617 - RNA, 19 nt, Artificial Sequence
  Description of Artificial Sequence: Synthetic oligonucleotide
auacccagcagaaggacaa

SEQ ID NO: 2314618 - RNA, 19 nt, Artificial Sequence
  Description of Artificial Sequence: Synthetic oligonucleotide
ggguucauugcagcaaccg

SEQ ID NO: 2314619 - RNA, 19 nt, Artificial Sequence
  Description of Artificial Sequence: Synthetic oligonucleotide
auggguuacucacuuugua

SEQ ID NO: 2314620 - RNA, 19 nt, Artificial Sequence
  Description of Artificial Sequence: Synthetic oligonucleotide
aaccacgugagcaccggga

SEQ ID NO: 2314621 - RNA, 19 nt, Artificial Sequence
  Description of Artificial Sequence: Synthetic oligonucleotide
ggugguggagacuccuuag

SEQ ID NO: 2314622 - RNA, 19 nt, Artificial Sequence
  Description of Artificial Sequence: Synthetic oligonucleotide
gugggcuuagaccaucuaa

SEQ ID NO: 2314623 - RNA, 19 nt, Artificial Sequence
  Description of Artificial Sequence: Synthetic oligonucleotide
agacuccuuagggaccugg

SEQ ID NO: 2314624 - RNA, 19 nt, Artificial Sequence
  Description of Artificial Sequence: Synthetic oligonucleotide
gacccacucugcauguaag

SEQ ID NO: 2314625 - RNA, 19 nt, Artificial Sequence
  Description of Artificial Sequence: Synthetic oligonucleotide
ugccacgugugaguggcag

SEQ ID NO: 2314626 - RNA, 19 nt, Artificial Sequence
  Description of Artificial Sequence: Synthetic oligonucleotide
uuggugcuauuguuguauc

SEQ ID NO: 2314627 - RNA, 19 nt, Artificial Sequence
  Description of Artificial Sequence: Synthetic oligonucleotide
ccccuuauaaaggaggcag

SEQ ID NO: 2314628 - RNA, 19 nt, Artificial Sequence
  Description of Artificial Sequence: Synthetic oligonucleotide
ucccauaaaucaggcaaaa

SEQ ID NO: 2314629 - RNA, 19 nt, Artificial Sequence
  Description of Artificial Sequence: Synthetic oligonucleotide
cauugcagcaaccggaagu

SEQ ID NO: 2314630 - RNA, 19 nt, Artificial Sequence
  Description of Artificial Sequence: Synthetic oligonucleotide
caaugccacgugugagugg

SEQ ID NO: 2314631 - RNA, 19 nt, Artificial Sequence
  Description of Artificial Sequence: Synthetic oligonucleotide
agaagcagagugucaccau

SEQ ID NO: 2314632 - RNA, 19 nt, Artificial Sequence
  Description of Artificial Sequence: Synthetic oligonucleotide
acuuuguacauaagggguu

SEQ ID NO: 2314633 - RNA, 19 nt, Artificial Sequence
  Description of Artificial Sequence: Synthetic oligonucleotide
ugugcauucggugcuugua

SEQ ID NO: 2314634 - RNA, 19 nt, Artificial Sequence
  Description of Artificial Sequence: Synthetic oligonucleotide
augauacccagcagaagga

SEQ ID NO: 2314635 - RNA, 19 nt, Artificial Sequence
  Description of Artificial Sequence: Synthetic oligonucleotide
agcgaagucccgaaugacu

SEQ ID NO: 2314636 - RNA, 19 nt, Artificial Sequence
  Description of Artificial Sequence: Synthetic oligonucleotide
gugaguggcaguugucaca

SEQ ID NO: 2314637 - RNA, 19 nt, Artificial Sequence
  Description of Artificial Sequence: Synthetic oligonucleotide
gcaaaagaacuggaccagg

SEQ ID NO: 2314638 - RNA, 19 nt, Artificial Sequence
  Description of Artificial Sequence: Synthetic oligonucleotide
agcagagauugugcauucg

SEQ ID NO: 2314639 - RNA, 19 nt, Artificial Sequence
  Description of Artificial Sequence: Synthetic oligonucleotide
aggguccaauuuccagaac

SEQ ID NO: 2314640 - RNA, 19 nt, Artificial Sequence
  Description of Artificial Sequence: Synthetic oligonucleotide
agcaccgggaugggcgucc

SEQ ID NO: 2314641 - RNA, 19 nt, Artificial Sequence
  Description of Artificial Sequence: Synthetic oligonucleotide
cacagcugugucccaugcg

SEQ ID NO: 2314642 - RNA, 19 nt, Artificial Sequence
  Description of Artificial Sequence: Synthetic oligonucleotide
ccugacccuacuuccaacc

SEQ ID NO: 2314643 - RNA, 19 nt, Artificial Sequence
  Description of Artificial Sequence: Synthetic oligonucleotide
aggguucauugcagcaacc

SEQ ID NO: 2314644 - RNA, 19 nt, Artificial Sequence
  Description of Artificial Sequence: Synthetic oligonucleotide
agcugcucugauggguuac

SEQ ID NO: 2314645 - RNA, 19 nt, Artificial Sequence
  Description of Artificial Sequence: Synthetic oligonucleotide
aggaugauacccagcagaa

SEQ ID NO: 2314646 - RNA, 19 nt, Artificial Sequence
  Description of Artificial Sequence: Synthetic oligonucleotide
ugcauucggugcuuguauu

SEQ ID NO: 2314647 - RNA, 19 nt, Artificial Sequence
  Description of Artificial Sequence: Synthetic oligonucleotide
gguggagacuccuuaggga

SEQ ID NO: 2314648 - RNA, 19 nt, Artificial Sequence
  Description of Artificial Sequence: Synthetic oligonucleotide
ugcccauguggccaaugau

SEQ ID NO: 2314649 - RNA, 19 nt, Artificial Sequence
  Description of Artificial Sequence: Synthetic oligonucleotide
gugucccaugcguugggcc

SEQ ID NO: 2314650 - RNA, 19 nt, Artificial Sequence
  Description of Artificial Sequence: Synthetic oligonucleotide
uggaugugcagaugcccau

SEQ ID NO: 2314651 - RNA, 19 nt, Artificial Sequence
  Description of Artificial Sequence: Synthetic oligonucleotide
cacuagcauauaccugcgc

SEQ ID NO: 2314652 - RNA, 19 nt, Artificial Sequence
  Description of Artificial Sequence: Synthetic oligonucleotide
gugugaguggcaguuguca

SEQ ID NO: 2314653 - RNA, 19 nt, Artificial Sequence
  Description of Artificial Sequence: Synthetic oligonucleotide
cccuuauaaaggaggcagg

SEQ ID NO: 2314654 - RNA, 19 nt, Artificial Sequence
  Description of Artificial Sequence: Synthetic oligonucleotide
acaggguucauugcagcaa

SEQ ID NO: 2314655 - RNA, 19 nt, Artificial Sequence
  Description of Artificial Sequence: Synthetic oligonucleotide
gacuccgguggaugugcag

SEQ ID NO: 2314656 - RNA, 19 nt, Artificial Sequence
  Description of Artificial Sequence: Synthetic oligonucleotide
guggcaguugucacagcag

SEQ ID NO: 2314657 - RNA, 19 nt, Artificial Sequence
  Description of Artificial Sequence: Synthetic oligonucleotide
gucccgaaugacuccggug

SEQ ID NO: 2314658 - RNA, 19 nt, Artificial Sequence
  Description of Artificial Sequence: Synthetic oligonucleotide
accacgugagcaccgggau

SEQ ID NO: 2314659 - RNA, 19 nt, Artificial Sequence
  Description of Artificial Sequence: Synthetic oligonucleotide
caaccggaaguagacccag

SEQ ID NO: 2314660 - RNA, 19 nt, Artificial Sequence
  Description of Artificial Sequence: Synthetic oligonucleotide
gguggaugugcagaugccc

SEQ ID NO: 2314661 - RNA, 19 nt, Artificial Sequence
  Description of Artificial Sequence: Synthetic oligonucleotide
gaaugacuccgguggaugu

SEQ ID NO: 2314662 - RNA, 19 nt, Artificial Sequence
  Description of Artificial Sequence: Synthetic oligonucleotide
agucccgaaugacuccggu

SEQ ID NO: 2314663 - RNA, 19 nt, Artificial Sequence
  Description of Artificial Sequence: Synthetic oligonucleotide
guucuaucaccagcaugag

SEQ ID NO: 2314664 - RNA, 19 nt, Artificial Sequence
  Description of Artificial Sequence: Synthetic oligonucleotide
cugcgcaggguccaauuuc

SEQ ID NO: 2314665 - RNA, 19 nt, Artificial Sequence
  Description of Artificial Sequence: Synthetic oligonucleotide
ucagggccaaugccacgug

SEQ ID NO: 2314666 - RNA, 19 nt, Artificial Sequence
  Description of Artificial Sequence: Synthetic oligonucleotide
gaaguagacccagcagauc

SEQ ID NO: 2314667 - RNA, 19 nt, Artificial Sequence
  Description of Artificial Sequence: Synthetic oligonucleotide
uuagggaccuggugggcuu

SEQ ID NO: 2314668 - RNA, 19 nt, Artificial Sequence
  Description of Artificial Sequence: Synthetic oligonucleotide
ugugucccaugcguugggc

SEQ ID NO: 2314669 - RNA, 19 nt, Artificial Sequence
  Description of Artificial Sequence: Synthetic oligonucleotide
uuguacauaagggguucua

SEQ ID NO: 2314670 - RNA, 19 nt, Artificial Sequence
  Description of Artificial Sequence: Synthetic oligonucleotide
aagucccgaaugacuccgg

SEQ ID NO: 2314671 - RNA, 19 nt, Artificial Sequence
  Description of Artificial Sequence: Synthetic oligonucleotide
gggaugggcguccacacca

SEQ ID NO: 2314672 - RNA, 19 nt, Artificial Sequence
  Description of Artificial Sequence: Synthetic oligonucleotide
ccgguggaugugcagaugc

SEQ ID NO: 2314673 - RNA, 19 nt, Artificial Sequence
  Description of Artificial Sequence: Synthetic oligonucleotide
guggaugugcagaugccca

SEQ ID NO: 2314674 - RNA, 19 nt, Artificial Sequence
  Description of Artificial Sequence: Synthetic oligonucleotide
cugcauguaaggccauuca

SEQ ID NO: 2314675 - RNA, 19 nt, Artificial Sequence
  Description of Artificial Sequence: Synthetic oligonucleotide
gccagcgaagucccgaaug

SEQ ID NO: 2314676 - RNA, 19 nt, Artificial Sequence
  Description of Artificial Sequence: Synthetic oligonucleotide
aguuuucaccacagguuga

SEQ ID NO: 2314677 - RNA, 19 nt, Artificial Sequence
  Description of Artificial Sequence: Synthetic oligonucleotide
gaggcaucgugcacagcug

SEQ ID NO: 2314678 - RNA, 19 nt, Artificial Sequence
  Description of Artificial Sequence: Synthetic oligonucleotide
caggguccaauuuccagaa

SEQ ID NO: 2314679 - RNA, 19 nt, Artificial Sequence
  Description of Artificial Sequence: Synthetic oligonucleotide
cuuccaacccaggaagaca

SEQ ID NO: 2314680 - RNA, 19 nt, Artificial Sequence
  Description of Artificial Sequence: Synthetic oligonucleotide
cugugucccaugcguuggg

SEQ ID NO: 2314681 - RNA, 19 nt, Artificial Sequence
  Description of Artificial Sequence: Synthetic oligonucleotide
auugugcauucggugcuug

SEQ ID NO: 2314682 - RNA, 19 nt, Artificial Sequence
  Description of Artificial Sequence: Synthetic oligonucleotide
caugaggacucccugggcu

SEQ ID NO: 2314683 - RNA, 19 nt, Artificial Sequence
  Description of Artificial Sequence: Synthetic oligonucleotide
ugagacugacggucaggau

SEQ ID NO: 2314684 - RNA, 19 nt, Artificial Sequence
  Description of Artificial Sequence: Synthetic oligonucleotide
ugacuccgguggaugugca

SEQ ID NO: 2314685 - RNA, 19 nt, Artificial Sequence
  Description of Artificial Sequence: Synthetic oligonucleotide
ggaagacaauugccugagg

SEQ ID NO: 2314686 - RNA, 19 nt, Artificial Sequence
  Description of Artificial Sequence: Synthetic oligonucleotide
ggagcccugacccuacuuc

SEQ ID NO: 2314687 - RNA, 19 nt, Artificial Sequence
  Description of Artificial Sequence: Synthetic oligonucleotide
caccauguuccaguuggug

SEQ ID NO: 2314688 - RNA, 19 nt, Artificial Sequence
  Description of Artificial Sequence: Synthetic oligonucleotide
uugcagcaaccggaaguag

SEQ ID NO: 2314689 - RNA, 19 nt, Artificial Sequence
  Description of Artificial Sequence: Synthetic oligonucleotide
uaaggccauucaccuugcu

SEQ ID NO: 2314690 - RNA, 19 nt, Artificial Sequence
  Description of Artificial Sequence: Synthetic oligonucleotide
acggucaggaugauaccca

SEQ ID NO: 2314691 - RNA, 19 nt, Artificial Sequence
  Description of Artificial Sequence: Synthetic oligonucleotide
ccauguugucuuccgaaac

SEQ ID NO: 2314692 - RNA, 19 nt, Artificial Sequence
  Description of Artificial Sequence: Synthetic oligonucleotide
aguagacccagcagaucca

SEQ ID NO: 2314693 - RNA, 19 nt, Artificial Sequence
  Description of Artificial Sequence: Synthetic oligonucleotide
gucuuccgaaacaaaguaa

SEQ ID NO: 2314694 - RNA, 19 nt, Artificial Sequence
  Description of Artificial Sequence: Synthetic oligonucleotide
cagagauugugcauucggu

SEQ ID NO: 2314695 - RNA, 19 nt, Artificial Sequence
  Description of Artificial Sequence: Synthetic oligonucleotide
cacugcacuuccauccgga

SEQ ID NO: 2314696 - RNA, 19 nt, Artificial Sequence
  Description of Artificial Sequence: Synthetic oligonucleotide
auguaaggccauucaccuu

SEQ ID NO: 2314697 - RNA, 19 nt, Artificial Sequence
  Description of Artificial Sequence: Synthetic oligonucleotide
auguggccaaugaugggga

SEQ ID NO: 2314698 - RNA, 19 nt, Artificial Sequence
  Description of Artificial Sequence: Synthetic oligonucleotide
accgggaugggcguccaca

SEQ ID NO: 2314699 - RNA, 19 nt, Artificial Sequence
  Description of Artificial Sequence: Synthetic oligonucleotide
gauggguuacucacuuugu

SEQ ID NO: 2314700 - RNA, 19 nt, Artificial Sequence
  Description of Artificial Sequence: Synthetic oligonucleotide
ggaccuggugggcuuagac

SEQ ID NO: 2314701 - RNA, 19 nt, Artificial Sequence
  Description of Artificial Sequence: Synthetic oligonucleotide
ccacuagcauauaccugcg

SEQ ID NO: 2314702 - RNA, 19 nt, Artificial Sequence
  Description of Artificial Sequence: Synthetic oligonucleotide
ggaugauacccagcagaag

SEQ ID NO: 2314703 - RNA, 19 nt, Artificial Sequence
  Description of Artificial Sequence: Synthetic oligonucleotide
cagcaaccggaaguagacc

SEQ ID NO: 2314704 - RNA, 19 nt, Artificial Sequence
  Description of Artificial Sequence: Synthetic oligonucleotide
cugacauacuucccauaaa

SEQ ID NO: 2314705 - RNA, 19 nt, Artificial Sequence
  Description of Artificial Sequence: Synthetic oligonucleotide
cuugcuagccagggcccag

SEQ ID NO: 2314706 - RNA, 19 nt, Artificial Sequence
  Description of Artificial Sequence: Synthetic oligonucleotide
gcgaagucccgaaugacuc

SEQ ID NO: 2314707 - RNA, 19 nt, Artificial Sequence
  Description of Artificial Sequence: Synthetic oligonucleotide
ccuacuuccaacccaggaa

SEQ ID NO: 2314708 - RNA, 19 nt, Artificial Sequence
  Description of Artificial Sequence: Synthetic oligonucleotide
uccggagcccugacccuac

SEQ ID NO: 2314709 - RNA, 19 nt, Artificial Sequence
  Description of Artificial Sequence: Synthetic oligonucleotide
uuccauccggagcccugac

SEQ ID NO: 2314710 - RNA, 19 nt, Artificial Sequence
  Description of Artificial Sequence: Synthetic oligonucleotide
guuacucacuuuguacaua

SEQ ID NO: 2314711 - RNA, 19 nt, Artificial Sequence
  Description of Artificial Sequence: Synthetic oligonucleotide
cccacucugcauguaaggc

SEQ ID NO: 2314712 - RNA, 19 nt, Artificial Sequence
  Description of Artificial Sequence: Synthetic oligonucleotide
uccaacccaggaagacaau

SEQ ID NO: 2314713 - RNA, 19 nt, Artificial Sequence
  Description of Artificial Sequence: Synthetic oligonucleotide
gggcccacuagcauauacc

SEQ ID NO: 2314714 - RNA, 19 nt, Artificial Sequence
  Description of Artificial Sequence: Synthetic oligonucleotide
cugauuuacaggggaccca

SEQ ID NO: 2314715 - RNA, 19 nt, Artificial Sequence
  Description of Artificial Sequence: Synthetic oligonucleotide
ugcuagccagggcccagau

SEQ ID NO: 2314716 - RNA, 19 nt, Artificial Sequence
  Description of Artificial Sequence: Synthetic oligonucleotide
ggaaauaagugggguucac

SEQ ID NO: 2314717 - RNA, 19 nt, Artificial Sequence
  Description of Artificial Sequence: Synthetic oligonucleotide
uccgguggaugugcagaug

SEQ ID NO: 2314718 - RNA, 19 nt, Artificial Sequence
  Description of Artificial Sequence: Synthetic oligonucleotide
cggaaguagacccagcaga

SEQ ID NO: 2314719 - RNA, 19 nt, Artificial Sequence
  Description of Artificial Sequence: Synthetic oligonucleotide
ggccauguugucuuccgaa

SEQ ID NO: 2314720 - RNA, 19 nt, Artificial Sequence
  Description of Artificial Sequence: Synthetic oligonucleotide
gacucccugggcuggaaau

SEQ ID NO: 2314721 - RNA, 19 nt, Artificial Sequence
  Description of Artificial Sequence: Synthetic oligonucleotide
cagcgaagucccgaaugac

SEQ ID NO: 2314722 - RNA, 19 nt, Artificial Sequence
  Description of Artificial Sequence: Synthetic oligonucleotide
gggguauacacugcacuuc

SEQ ID NO: 2314723 - RNA, 19 nt, Artificial Sequence
  Description of Artificial Sequence: Synthetic oligonucleotide
gggcuuagaccaucuaaaa

SEQ ID NO: 2314724 - RNA, 19 nt, Artificial Sequence
  Description of Artificial Sequence: Synthetic oligonucleotide
ccauguggccaaugauggg

SEQ ID NO: 2314725 - RNA, 19 nt, Artificial Sequence
  Description of Artificial Sequence: Synthetic oligonucleotide
aguugucacagcagagauu

SEQ ID NO: 2314726 - RNA, 19 nt, Artificial Sequence
  Description of Artificial Sequence: Synthetic oligonucleotide
uugcuagccagggcccaga

SEQ ID NO: 2314727 - RNA, 19 nt, Artificial Sequence
  Description of Artificial Sequence: Synthetic oligonucleotide
gcacagcugugucccaugc

SEQ ID NO: 2314728 - RNA, 19 nt, Artificial Sequence
  Description of Artificial Sequence: Synthetic oligonucleotide
gguuacucacuuuguacau

SEQ ID NO: 2314729 - RNA, 19 nt, Artificial Sequence
  Description of Artificial Sequence: Synthetic oligonucleotide
caccacgcaguaggggaag

SEQ ID NO: 2314730 - RNA, 19 nt, Artificial Sequence
  Description of Artificial Sequence: Synthetic oligonucleotide
aggggcaaugggguauaca

SEQ ID NO: 2314731 - RNA, 19 nt, Artificial Sequence
  Description of Artificial Sequence: Synthetic oligonucleotide
gugcauucggugcuuguau

SEQ ID NO: 2314732 - RNA, 19 nt, Artificial Sequence
  Description of Artificial Sequence: Synthetic oligonucleotide
ccaaugccacgugugagug

SEQ ID NO: 2314733 - RNA, 19 nt, Artificial Sequence
  Description of Artificial Sequence: Synthetic oligonucleotide
accugcgcaggguccaauu

SEQ ID NO: 2314734 - RNA, 19 nt, Artificial Sequence
  Description of Artificial Sequence: Synthetic oligonucleotide
aagggccagcgaagucccg

SEQ ID NO: 2314735 - RNA, 19 nt, Artificial Sequence
  Description of Artificial Sequence: Synthetic oligonucleotide
ugccagggagccccuuaua

SEQ ID NO: 2314736 - RNA, 19 nt, Artificial Sequence
  Description of Artificial Sequence: Synthetic oligonucleotide
cccagaugaggggcaaugg

SEQ ID NO: 2314737 - RNA, 19 nt, Artificial Sequence
  Description of Artificial Sequence: Synthetic oligonucleotide
cgaagucccgaaugacucc

SEQ ID NO: 2314738 - RNA, 19 nt, Artificial Sequence
  Description of Artificial Sequence: Synthetic oligonucleotide
guaggggaagcggcuccgc

SEQ ID NO: 2314739 - RNA, 19 nt, Artificial Sequence
  Description of Artificial Sequence: Synthetic oligonucleotide
cacgugugaguggcaguug

SEQ ID NO: 2314740 - RNA, 19 nt, Artificial Sequence
  Description of Artificial Sequence: Synthetic oligonucleotide
ggacccacucugcauguaa

SEQ ID NO: 2314741 - RNA, 19 nt, Artificial Sequence
  Description of Artificial Sequence: Synthetic oligonucleotide
cucugauggguuacucacu

SEQ ID NO: 2314742 - RNA, 19 nt, Artificial Sequence
  Description of Artificial Sequence: Synthetic oligonucleotide
ccagcgaagucccgaauga

SEQ ID NO: 2314743 - RNA, 19 nt, Artificial Sequence
  Description of Artificial Sequence: Synthetic oligonucleotide
cugcucugauggguuacuc

SEQ ID NO: 2314744 - RNA, 19 nt, Artificial Sequence
  Description of Artificial Sequence: Synthetic oligonucleotide
guggccaaugauggggaaa

SEQ ID NO: 2314745 - RNA, 19 nt, Artificial Sequence
  Description of Artificial Sequence: Synthetic oligonucleotide
acucccugggcuggaaaua

SEQ ID NO: 2314746 - RNA, 19 nt, Artificial Sequence
  Description of Artificial Sequence: Synthetic oligonucleotide
guugggcccacuagcauau

SEQ ID NO: 2314747 - RNA, 19 nt, Artificial Sequence
  Description of Artificial Sequence: Synthetic oligonucleotide
cacugacauacuucccaua

SEQ ID NO: 2314748 - RNA, 19 nt, Artificial Sequence
  Description of Artificial Sequence: Synthetic oligonucleotide
agcccugacccuacuucca

SEQ ID NO: 2314749 - RNA, 19 nt, Artificial Sequence
  Description of Artificial Sequence: Synthetic oligonucleotide
acccuacuuccaacccagg

SEQ ID NO: 2314750 - RNA, 19 nt, Artificial Sequence
  Description of Artificial Sequence: Synthetic oligonucleotide
gggcguccacaccacgcag

SEQ ID NO: 2314751 - RNA, 19 nt, Artificial Sequence
  Description of Artificial Sequence: Synthetic oligonucleotide
gcuggaaauaagugggguu

SEQ ID NO: 2314752 - RNA, 19 nt, Artificial Sequence
  Description of Artificial Sequence: Synthetic oligonucleotide
acgugagcaccgggauggg

SEQ ID NO: 2314753 - RNA, 19 nt, Artificial Sequence
  Description of Artificial Sequence: Synthetic oligonucleotide
cagaugcccauguggccaa

SEQ ID NO: 2314754 - RNA, 19 nt, Artificial Sequence
  Description of Artificial Sequence: Synthetic oligonucleotide
cucccugggcuggaaauaa

SEQ ID NO: 2314755 - RNA, 19 nt, Artificial Sequence
  Description of Artificial Sequence: Synthetic oligonucleotide
caccagcaugaggacuccc

SEQ ID NO: 2314756 - RNA, 19 nt, Artificial Sequence
  Description of Artificial Sequence: Synthetic oligonucleotide
cgaaugacuccgguggaug

SEQ ID NO: 2314757 - RNA, 19 nt, Artificial Sequence
  Description of Artificial Sequence: Synthetic oligonucleotide
gacuccuuagggaccuggu

SEQ ID NO: 2314758 - RNA, 19 nt, Artificial Sequence
  Description of Artificial Sequence: Synthetic oligonucleotide
agggaccuggugggcuuag

SEQ ID NO: 2314759 - RNA, 19 nt, Artificial Sequence
  Description of Artificial Sequence: Synthetic oligonucleotide
gcaaccggaaguagaccca

SEQ ID NO: 2314760 - RNA, 19 nt, Artificial Sequence
  Description of Artificial Sequence: Synthetic oligonucleotide
gagacuccuuagggaccug

SEQ ID NO: 2314761 - RNA, 19 nt, Artificial Sequence
  Description of Artificial Sequence: Synthetic oligonucleotide
cagauccauggugccacca

SEQ ID NO: 2314762 - RNA, 19 nt, Artificial Sequence
  Description of Artificial Sequence: Synthetic oligonucleotide
gucccaugcguugggccca

SEQ ID NO: 2314763 - RNA, 19 nt, Artificial Sequence
  Description of Artificial Sequence: Synthetic oligonucleotide
auccggagcccugacccua

SEQ ID NO: 2314764 - RNA, 19 nt, Artificial Sequence
  Description of Artificial Sequence: Synthetic oligonucleotide
ggagacuccuuagggaccu

SEQ ID NO: 2314765 - RNA, 19 nt, Artificial Sequence
  Description of Artificial Sequence: Synthetic oligonucleotide
gaggggcaaugggguauac

SEQ ID NO: 2314766 - RNA, 19 nt, Artificial Sequence
  Description of Artificial Sequence: Synthetic oligonucleotide
ccaaaggccauguugucuu

SEQ ID NO: 2314767 - RNA, 19 nt, Artificial Sequence
  Description of Artificial Sequence: Synthetic oligonucleotide
gauugugcauucggugcuu

SEQ ID NO: 2314768 - RNA, 19 nt, Artificial Sequence
  Description of Artificial Sequence: Synthetic oligonucleotide
cuccaacacugacauacuu

SEQ ID NO: 2314769 - RNA, 19 nt, Artificial Sequence
  Description of Artificial Sequence: Synthetic oligonucleotide
ccagggagccccuuauaaa

SEQ ID NO: 2314770 - RNA, 19 nt, Artificial Sequence
  Description of Artificial Sequence: Synthetic oligonucleotide
ccacgugagcaccgggaug

SEQ ID NO: 2314771 - RNA, 19 nt, Artificial Sequence
  Description of Artificial Sequence: Synthetic oligonucleotide
guagacccagcagauccau

SEQ ID NO: 2314772 - RNA, 19 nt, Artificial Sequence
  Description of Artificial Sequence: Synthetic oligonucleotide
cgguggaugugcagaugcc

SEQ ID NO: 2314773 - RNA, 19 nt, Artificial Sequence
  Description of Artificial Sequence: Synthetic oligonucleotide
gguccaauuuccagaacuu

SEQ ID NO: 2314774 - RNA, 19 nt, Artificial Sequence
  Description of Artificial Sequence: Synthetic oligonucleotide
uaccugcgcaggguccaau

SEQ ID NO: 2314775 - RNA, 19 nt, Artificial Sequence
  Description of Artificial Sequence: Synthetic oligonucleotide
ccuuagggaccuggugggc

SEQ ID NO: 2314776 - RNA, 19 nt, Artificial Sequence
  Description of Artificial Sequence: Synthetic oligonucleotide
ggaugggcguccacaccac

SEQ ID NO: 2314777 - RNA, 19 nt, Artificial Sequence
  Description of Artificial Sequence: Synthetic oligonucleotide
cagaggcaucgugcacagc

SEQ ID NO: 2314778 - RNA, 19 nt, Artificial Sequence
  Description of Artificial Sequence: Synthetic oligonucleotide
gccccuuauaaaggaggca

SEQ ID NO: 2314779 - RNA, 19 nt, Artificial Sequence
  Description of Artificial Sequence: Synthetic oligonucleotide
auaccugcgcaggguccaa

SEQ ID NO: 2314780 - RNA, 19 nt, Artificial Sequence
  Description of Artificial Sequence: Synthetic oligonucleotide
cuccgguggaugugcagau

SEQ ID NO: 2314781 - RNA, 19 nt, Artificial Sequence
  Description of Artificial Sequence: Synthetic oligonucleotide
ggugggcuuagaccaucua

SEQ ID NO: 2314782 - RNA, 19 nt, Artificial Sequence
  Description of Artificial Sequence: Synthetic oligonucleotide
cagcugcucugauggguua

SEQ ID NO: 2314783 - RNA, 19 nt, Artificial Sequence
  Description of Artificial Sequence: Synthetic oligonucleotide
gcguccacaccacgcagua

SEQ ID NO: 2314784 - RNA, 19 nt, Artificial Sequence
  Description of Artificial Sequence: Synthetic oligonucleotide
caggggacccacucugcau

SEQ ID NO: 2314785 - RNA, 19 nt, Artificial Sequence
  Description of Artificial Sequence: Synthetic oligonucleotide
cagggccaaugccacgugu

SEQ ID NO: 2314786 - RNA, 19 nt, Artificial Sequence
  Description of Artificial Sequence: Synthetic oligonucleotide
cauccggagcccugacccu

SEQ ID NO: 2314787 - RNA, 19 nt, Artificial Sequence
  Description of Artificial Sequence: Synthetic oligonucleotide
gagcaccgggaugggcguc

SEQ ID NO: 2314788 - RNA, 19 nt, Artificial Sequence
  Description of Artificial Sequence: Synthetic oligonucleotide
cguugggcccacuagcaua

SEQ ID NO: 2314789 - RNA, 19 nt, Artificial Sequence
  Description of Artificial Sequence: Synthetic oligonucleotide
cugauggguuacucacuuu

SEQ ID NO: 2314790 - RNA, 19 nt, Artificial Sequence
  Description of Artificial Sequence: Synthetic oligonucleotide
caccgggaugggcguccac

SEQ ID NO: 2314791 - RNA, 19 nt, Artificial Sequence
  Description of Artificial Sequence: Synthetic oligonucleotide
cccgaaugacuccggugga

SEQ ID NO: 2314792 - RNA, 19 nt, Artificial Sequence
  Description of Artificial Sequence: Synthetic oligonucleotide
uugggcccacuagcauaua

SEQ ID NO: 2314793 - RNA, 19 nt, Artificial Sequence
  Description of Artificial Sequence: Synthetic oligonucleotide
cugccagggagccccuuau

SEQ ID NO: 2314794 - RNA, 19 nt, Artificial Sequence
  Description of Artificial Sequence: Synthetic oligonucleotide
ggggacccacucugcaugu

SEQ ID NO: 2314795 - RNA, 19 nt, Artificial Sequence
  Description of Artificial Sequence: Synthetic oligonucleotide
cgggaugggcguccacacc

SEQ ID NO: 2314796 - RNA, 19 nt, Artificial Sequence
  Description of Artificial Sequence: Synthetic oligonucleotide
augccacgugugaguggca

SEQ ID NO: 2314797 - RNA, 19 nt, Artificial Sequence
  Description of Artificial Sequence: Synthetic oligonucleotide
gggguucacauuaccugau

SEQ ID NO: 2314798 - RNA, 19 nt, Artificial Sequence
  Description of Artificial Sequence: Synthetic oligonucleotide
ggcguccacaccacgcagu

SEQ ID NO: 2314799 - RNA, 19 nt, Artificial Sequence
  Description of Artificial Sequence: Synthetic oligonucleotide
gcuccaacacugacauacu

SEQ ID NO: 2314800 - RNA, 19 nt, Artificial Sequence
  Description of Artificial Sequence: Synthetic oligonucleotide
gccacgugugaguggcagu

SEQ ID NO: 2314801 - RNA, 19 nt, Artificial Sequence
  Description of Artificial Sequence: Synthetic oligonucleotide
gcugcucugauggguuacu

SEQ ID NO: 2314802 - RNA, 19 nt, Artificial Sequence
  Description of Artificial Sequence: Synthetic oligonucleotide
uccugccagggagccccuu

SEQ ID NO: 2314803 - RNA, 19 nt, Artificial Sequence
  Description of Artificial Sequence: Synthetic oligonucleotide
ccaugcguugggcccacua

SEQ ID NO: 2314804 - RNA, 19 nt, Artificial Sequence
  Description of Artificial Sequence: Synthetic oligonucleotide
gcaucagguucagggccaa

SEQ ID NO: 2314805 - RNA, 19 nt, Artificial Sequence
  Description of Artificial Sequence: Synthetic oligonucleotide
ccaacccaggaagacaauu

SEQ ID NO: 2314806 - RNA, 19 nt, Artificial Sequence
  Description of Artificial Sequence: Synthetic oligonucleotide
gcgcaggguccaauuucca

SEQ ID NO: 2314807 - RNA, 19 nt, Artificial Sequence
  Description of Artificial Sequence: Synthetic oligonucleotide
ccugccagggagccccuua

SEQ ID NO: 2314808 - RNA, 19 nt, Artificial Sequence
  Description of Artificial Sequence: Synthetic oligonucleotide
ccagaacuuggcaggcuuu

SEQ ID NO: 2314809 - RNA, 19 nt, Artificial Sequence
  Description of Artificial Sequence: Synthetic oligonucleotide
gcguugggcccacuagcau

SEQ ID NO: 2314810 - RNA, 19 nt, Artificial Sequence
  Description of Artificial Sequence: Synthetic oligonucleotide
ccacgugugaguggcaguu

SEQ ID NO: 2314811 - RNA, 19 nt, Artificial Sequence
  Description of Artificial Sequence: Synthetic oligonucleotide
gacugacggucaggaugau

SEQ ID NO: 2314812 - RNA, 19 nt, Artificial Sequence
  Description of Artificial Sequence: Synthetic oligonucleotide
ccugcgcaggguccaauuu

SEQ ID NO: 2314813 - RNA, 19 nt, Artificial Sequence
  Description of Artificial Sequence: Synthetic oligonucleotide
ggccagcgaagucccgaau

SEQ ID NO: 2314814 - RNA, 19 nt, Artificial Sequence
  Description of Artificial Sequence: Synthetic oligonucleotide
gcaccgggaugggcgucca

SEQ ID NO: 2314815 - RNA, 19 nt, Artificial Sequence
  Description of Artificial Sequence: Synthetic oligonucleotide
ccgaaugacuccgguggau

SEQ ID NO: 2314816 - RNA, 19 nt, Artificial Sequence
  Description of Artificial Sequence: Synthetic oligonucleotide
ggcuccgcuccacguccau

SEQ ID NO: 2314817 - RNA, 19 nt, Artificial Sequence
  Description of Artificial Sequence: Synthetic oligonucleotide
ccggagcccugacccuacu

SEQ ID NO: 2314818 - RNA, 19 nt, Artificial Sequence
  Description of Artificial Sequence: Synthetic oligonucleotide
cggagcccugacccuacuu

SEQ ID NO: 2314819 - RNA, 19 nt, Artificial Sequence
  Description of Artificial Sequence: Synthetic oligonucleotide
cccaugcguugggcccacu

SEQ ID NO: 2314820 - RNA, 19 nt, Artificial Sequence
  Description of Artificial Sequence: Synthetic oligonucleotide
gauaaugucaccuaggccc

SEQ ID NO: 2314821 - RNA, 19 nt, Artificial Sequence
  Description of Artificial Sequence: Synthetic oligonucleotide
aaaaccuuauaccagccuc

SEQ ID NO: 2314822 - RNA, 19 nt, Artificial Sequence
  Description of Artificial Sequence: Synthetic oligonucleotide
gauaaagcgguccaaaacc

SEQ ID NO: 2314823 - RNA, 19 nt, Artificial Sequence
  Description of Artificial Sequence: Synthetic oligonucleotide
ugaucuaucaccaucuucu

SEQ ID NO: 2314824 - RNA, 19 nt, Artificial Sequence
  Description of Artificial Sequence: Synthetic oligonucleotide
auagguaggaguuccagac

SEQ ID NO: 2314825 - RNA, 19 nt, Artificial Sequence
  Description of Artificial Sequence: Synthetic oligonucleotide
aacuacagggcccacaaag

SEQ ID NO: 2314826 - RNA, 19 nt, Artificial Sequence
  Description of Artificial Sequence: Synthetic oligonucleotide
agugcguccaccuuggugg

SEQ ID NO: 2314827 - RNA, 19 nt, Artificial Sequence
  Description of Artificial Sequence: Synthetic oligonucleotide
uguaguuuggcccaauugu

SEQ ID NO: 2314828 - RNA, 19 nt, Artificial Sequence
  Description of Artificial Sequence: Synthetic oligonucleotide
gaugcauucccuuugagga

SEQ ID NO: 2314829 - RNA, 19 nt, Artificial Sequence
  Description of Artificial Sequence: Synthetic oligonucleotide
gaaaacacggggcaaaggc

SEQ ID NO: 2314830 - RNA, 19 nt, Artificial Sequence
  Description of Artificial Sequence: Synthetic oligonucleotide
uugcuuaacuauaagucag

SEQ ID NO: 2314831 - RNA, 19 nt, Artificial Sequence
  Description of Artificial Sequence: Synthetic oligonucleotide
agaaccuggacuuuccacg

SEQ ID NO: 2314832 - RNA, 19 nt, Artificial Sequence
  Description of Artificial Sequence: Synthetic oligonucleotide
uaagucaguaucuauucgc

SEQ ID NO: 2314833 - RNA, 19 nt, Artificial Sequence
  Description of Artificial Sequence: Synthetic oligonucleotide
aauguccaagcauuccagg

SEQ ID NO: 2314834 - RNA, 19 nt, Artificial Sequence
  Description of Artificial Sequence: Synthetic oligonucleotide
uccucuguagagcaguccg

SEQ ID NO: 2314835 - RNA, 19 nt, Artificial Sequence
  Description of Artificial Sequence: Synthetic oligonucleotide
agauaaugucaccuaggcc

SEQ ID NO: 2314836 - RNA, 19 nt, Artificial Sequence
  Description of Artificial Sequence: Synthetic oligonucleotide
gagauaaugucaccuaggc

SEQ ID NO: 2314837 - RNA, 19 nt, Artificial Sequence
  Description of Artificial Sequence: Synthetic oligonucleotide
aaaccuuauaccagccucc

SEQ ID NO: 2314838 - RNA, 19 nt, Artificial Sequence
  Description of Artificial Sequence: Synthetic oligonucleotide
ugacauuccauugagcacc

SEQ ID NO: 2314839 - RNA, 19 nt, Artificial Sequence
  Description of Artificial Sequence: Synthetic oligonucleotide
aguuccagacaacagcaac

SEQ ID NO: 2314840 - RNA, 19 nt, Artificial Sequence
  Description of Artificial Sequence: Synthetic oligonucleotide
ugacccagcugucagaacc

SEQ ID NO: 2314841 - RNA, 19 nt, Artificial Sequence
  Description of Artificial Sequence: Synthetic oligonucleotide
auaagucaguaucuauucg

SEQ ID NO: 2314842 - RNA, 19 nt, Artificial Sequence
  Description of Artificial Sequence: Synthetic oligonucleotide
uugagcaccccuaccaggg

SEQ ID NO: 2314843 - RNA, 19 nt, Artificial Sequence
  Description of Artificial Sequence: Synthetic oligonucleotide
aacagccuagaaaacacgg

SEQ ID NO: 2314844 - RNA, 19 nt, Artificial Sequence
  Description of Artificial Sequence: Synthetic oligonucleotide
uggcuaacugcacagcagg

SEQ ID NO: 2314845 - RNA, 19 nt, Artificial Sequence
  Description of Artificial Sequence: Synthetic oligonucleotide
gaggacaucagaugccugg

SEQ ID NO: 2314846 - RNA, 19 nt, Artificial Sequence
  Description of Artificial Sequence: Synthetic oligonucleotide
uaacuauaagucaguaucu

SEQ ID NO: 2314847 - RNA, 19 nt, Artificial Sequence
  Description of Artificial Sequence: Synthetic oligonucleotide
aguccgugauguuagcagc

SEQ ID NO: 2314848 - RNA, 19 nt, Artificial Sequence
  Description of Artificial Sequence: Synthetic oligonucleotide
ugguaugcccgccagagug

SEQ ID NO: 2314849 - RNA, 19 nt, Artificial Sequence
  Description of Artificial Sequence: Synthetic oligonucleotide
aacagccaaccuguaaugc

SEQ ID NO: 2314850 - RNA, 19 nt, Artificial Sequence
  Description of Artificial Sequence: Synthetic oligonucleotide
ucaguaucuauucgcgugc

SEQ ID NO: 2314851 - RNA, 19 nt, Artificial Sequence
  Description of Artificial Sequence: Synthetic oligonucleotide
aagucaguaucuauucgcg

SEQ ID NO: 2314852 - RNA, 19 nt, Artificial Sequence
  Description of Artificial Sequence: Synthetic oligonucleotide
ugugagccacaucaugugg

SEQ ID NO: 2314853 - RNA, 19 nt, Artificial Sequence
  Description of Artificial Sequence: Synthetic oligonucleotide
ucaccuaggcccaucagug

SEQ ID NO: 2314854 - RNA, 19 nt, Artificial Sequence
  Description of Artificial Sequence: Synthetic oligonucleotide
guugcugugagauaauguc

SEQ ID NO: 2314855 - RNA, 19 nt, Artificial Sequence
  Description of Artificial Sequence: Synthetic oligonucleotide
uggagcuugggucacaggu

SEQ ID NO: 2314856 - RNA, 19 nt, Artificial Sequence
  Description of Artificial Sequence: Synthetic oligonucleotide
ucuauucgcgugcaugugc

SEQ ID NO: 2314857 - RNA, 19 nt, Artificial Sequence
  Description of Artificial Sequence: Synthetic oligonucleotide
gaaccaggcaggcuuagag

SEQ ID NO: 2314858 - RNA, 19 nt, Artificial Sequence
  Description of Artificial Sequence: Synthetic oligonucleotide
cugaacaacagccaaccug

SEQ ID NO: 2314859 - RNA, 19 nt, Artificial Sequence
  Description of Artificial Sequence: Synthetic oligonucleotide
aggcuuagagcugaugugc

SEQ ID NO: 2314860 - RNA, 19 nt, Artificial Sequence
  Description of Artificial Sequence: Synthetic oligonucleotide
uaucuauucgcgugcaugu

SEQ ID NO: 2314861 - RNA, 19 nt, Artificial Sequence
  Description of Artificial Sequence: Synthetic oligonucleotide
acaacagccaaccuguaau

SEQ ID NO: 2314862 - RNA, 19 nt, Artificial Sequence
  Description of Artificial Sequence: Synthetic oligonucleotide
cuugcuuaacuauaaguca

SEQ ID NO: 2314863 - RNA, 19 nt, Artificial Sequence
  Description of Artificial Sequence: Synthetic oligonucleotide
gaugccuggagcuuggguc

SEQ ID NO: 2314864 - RNA, 19 nt, Artificial Sequence
  Description of Artificial Sequence: Synthetic oligonucleotide
cagccuagaaaacacgggg

SEQ ID NO: 2314865 - RNA, 19 nt, Artificial Sequence
  Description of Artificial Sequence: Synthetic oligonucleotide
uucccuuugaggacaaugu

SEQ ID NO: 2314866 - RNA, 19 nt, Artificial Sequence
  Description of Artificial Sequence: Synthetic oligonucleotide
gacaucagaugccuggagc

SEQ ID NO: 2314867 - RNA, 19 nt, Artificial Sequence
  Description of Artificial Sequence: Synthetic oligonucleotide
uaguuuggcccaauugucc

SEQ ID NO: 2314868 - RNA, 19 nt, Artificial Sequence
  Description of Artificial Sequence: Synthetic oligonucleotide
gaaccuggacuuuccacgg

SEQ ID NO: 2314869 - RNA, 19 nt, Artificial Sequence
  Description of Artificial Sequence: Synthetic oligonucleotide
aauuguccugugcugacau

SEQ ID NO: 2314870 - RNA, 19 nt, Artificial Sequence
  Description of Artificial Sequence: Synthetic oligonucleotide
uucagugcguccaccuugg

SEQ ID NO: 2314871 - RNA, 19 nt, Artificial Sequence
  Description of Artificial Sequence: Synthetic oligonucleotide
cuauucgcgugcaugugcg

SEQ ID NO: 2314872 - RNA, 19 nt, Artificial Sequence
  Description of Artificial Sequence: Synthetic oligonucleotide
uugcuaagaauugaacuca

SEQ ID NO: 2314873 - RNA, 19 nt, Artificial Sequence
  Description of Artificial Sequence: Synthetic oligonucleotide
auugagcaccccuaccagg

SEQ ID NO: 2314874 - RNA, 19 nt, Artificial Sequence
  Description of Artificial Sequence: Synthetic oligonucleotide
ucugguaugcccgccagag

SEQ ID NO: 2314875 - RNA, 19 nt, Artificial Sequence
  Description of Artificial Sequence: Synthetic oligonucleotide
uuggcuaacugcacagcag

SEQ ID NO: 2314876 - RNA, 19 nt, Artificial Sequence
  Description of Artificial Sequence: Synthetic oligonucleotide
gugagauaaugucaccuag

SEQ ID NO: 2314877 - RNA, 19 nt, Artificial Sequence
  Description of Artificial Sequence: Synthetic oligonucleotide
agagauaguaguuggugau

SEQ ID NO: 2314878 - RNA, 19 nt, Artificial Sequence
  Description of Artificial Sequence: Synthetic oligonucleotide
aaacagccuagaaaacacg

SEQ ID NO: 2314879 - RNA, 19 nt, Artificial Sequence
  Description of Artificial Sequence: Synthetic oligonucleotide
ugugauugcuaagaauuga

SEQ ID NO: 2314880 - RNA, 19 nt, Artificial Sequence
  Description of Artificial Sequence: Synthetic oligonucleotide
gugcagguguuucagaggc

SEQ ID NO: 2314881 - RNA, 19 nt, Artificial Sequence
  Description of Artificial Sequence: Synthetic oligonucleotide
ugaugugccuuccaggaua

SEQ ID NO: 2314882 - RNA, 19 nt, Artificial Sequence
  Description of Artificial Sequence: Synthetic oligonucleotide
agugcagguguuucagagg

SEQ ID NO: 2314883 - RNA, 19 nt, Artificial Sequence
  Description of Artificial Sequence: Synthetic oligonucleotide
ugucugguguuccuggaga

SEQ ID NO: 2314884 - RNA, 19 nt, Artificial Sequence
  Description of Artificial Sequence: Synthetic oligonucleotide
uguagagcaguccgugaug

SEQ ID NO: 2314885 - RNA, 19 nt, Artificial Sequence
  Description of Artificial Sequence: Synthetic oligonucleotide
cacaucauguggcuucucg

SEQ ID NO: 2314886 - RNA, 19 nt, Artificial Sequence
  Description of Artificial Sequence: Synthetic oligonucleotide
acuauaagucaguaucuau

SEQ ID NO: 2314887 - RNA, 19 nt, Artificial Sequence
  Description of Artificial Sequence: Synthetic oligonucleotide
accauggucagaguccggc

SEQ ID NO: 2314888 - RNA, 19 nt, Artificial Sequence
  Description of Artificial Sequence: Synthetic oligonucleotide
cuuuccacggaugugcagc

SEQ ID NO: 2314889 - RNA, 19 nt, Artificial Sequence
  Description of Artificial Sequence: Synthetic oligonucleotide
uccaggauagguaggaguu

SEQ ID NO: 2314890 - RNA, 19 nt, Artificial Sequence
  Description of Artificial Sequence: Synthetic oligonucleotide
acuacagggcccacaaagc

SEQ ID NO: 2314891 - RNA, 19 nt, Artificial Sequence
  Description of Artificial Sequence: Synthetic oligonucleotide
gguccaaaaccuuauacca

SEQ ID NO: 2314892 - RNA, 19 nt, Artificial Sequence
  Description of Artificial Sequence: Synthetic oligonucleotide
caacacacugaacaacagc

SEQ ID NO: 2314893 - RNA, 19 nt, Artificial Sequence
  Description of Artificial Sequence: Synthetic oligonucleotide
ugugagauaaugucaccua

SEQ ID NO: 2314894 - RNA, 19 nt, Artificial Sequence
  Description of Artificial Sequence: Synthetic oligonucleotide
caauguccaagcauuccag

SEQ ID NO: 2314895 - RNA, 19 nt, Artificial Sequence
  Description of Artificial Sequence: Synthetic oligonucleotide
ugcaaggugcaagccaugg

SEQ ID NO: 2314896 - RNA, 19 nt, Artificial Sequence
  Description of Artificial Sequence: Synthetic oligonucleotide
cacugaacaacagccaacc

SEQ ID NO: 2314897 - RNA, 19 nt, Artificial Sequence
  Description of Artificial Sequence: Synthetic oligonucleotide
cacagcaggccagagauag

SEQ ID NO: 2314898 - RNA, 19 nt, Artificial Sequence
  Description of Artificial Sequence: Synthetic oligonucleotide
uccacggaugugcagccag

SEQ ID NO: 2314899 - RNA, 19 nt, Artificial Sequence
  Description of Artificial Sequence: Synthetic oligonucleotide
ucagaugccuggagcuugg

SEQ ID NO: 2314900 - RNA, 19 nt, Artificial Sequence
  Description of Artificial Sequence: Synthetic oligonucleotide
aacaacagccaaccuguaa

SEQ ID NO: 2314901 - RNA, 19 nt, Artificial Sequence
  Description of Artificial Sequence: Synthetic oligonucleotide
agccuagaaaacacggggc

SEQ ID NO: 2314902 - RNA, 19 nt, Artificial Sequence
  Description of Artificial Sequence: Synthetic oligonucleotide
aucauguggcuucucggag

SEQ ID NO: 2314903 - RNA, 19 nt, Artificial Sequence
  Description of Artificial Sequence: Synthetic oligonucleotide
ucauguggcuucucggagc

SEQ ID NO: 2314904 - RNA, 19 nt, Artificial Sequence
  Description of Artificial Sequence: Synthetic oligonucleotide
gcugacauuccauugagca

SEQ ID NO: 2314905 - RNA, 19 nt, Artificial Sequence
  Description of Artificial Sequence: Synthetic oligonucleotide
augcauucccuuugaggac

SEQ ID NO: 2314906 - RNA, 19 nt, Artificial Sequence
  Description of Artificial Sequence: Synthetic oligonucleotide
gaaggugcaucagugcaag

SEQ ID NO: 2314907 - RNA, 19 nt, Artificial Sequence
  Description of Artificial Sequence: Synthetic oligonucleotide
uacagggcccacaaagcca

SEQ ID NO: 2314908 - RNA, 19 nt, Artificial Sequence
  Description of Artificial Sequence: Synthetic oligonucleotide
guaucuauucgcgugcaug

SEQ ID NO: 2314909 - RNA, 19 nt, Artificial Sequence
  Description of Artificial Sequence: Synthetic oligonucleotide
ugcucuugcuuaacuauaa

SEQ ID NO: 2314910 - RNA, 19 nt, Artificial Sequence
  Description of Artificial Sequence: Synthetic oligonucleotide
ugcgugugagugcaggugu

SEQ ID NO: 2314911 - RNA, 19 nt, Artificial Sequence
  Description of Artificial Sequence: Synthetic oligonucleotide
ucccgcuguaguuuggccc

SEQ ID NO: 2314912 - RNA, 19 nt, Artificial Sequence
  Description of Artificial Sequence: Synthetic oligonucleotide
cauguggcuucucggagcc

SEQ ID NO: 2314913 - RNA, 19 nt, Artificial Sequence
  Description of Artificial Sequence: Synthetic oligonucleotide
auucccuuugaggacaaug

SEQ ID NO: 2314914 - RNA, 19 nt, Artificial Sequence
  Description of Artificial Sequence: Synthetic oligonucleotide
aacuauaagucaguaucua

SEQ ID NO: 2314915 - RNA, 19 nt, Artificial Sequence
  Description of Artificial Sequence: Synthetic oligonucleotide
cuguaguuuggcccaauug

SEQ ID NO: 2314916 - RNA, 19 nt, Artificial Sequence
  Description of Artificial Sequence: Synthetic oligonucleotide
uuccagacaacagcaacac

SEQ ID NO: 2314917 - RNA, 19 nt, Artificial Sequence
  Description of Artificial Sequence: Synthetic oligonucleotide
uuuccacggaugugcagcc

SEQ ID NO: 2314918 - RNA, 19 nt, Artificial Sequence
  Description of Artificial Sequence: Synthetic oligonucleotide
aguuggcuaacugcacagc

SEQ ID NO: 2314919 - RNA, 19 nt, Artificial Sequence
  Description of Artificial Sequence: Synthetic oligonucleotide
ggauaaagcgguccaaaac

SEQ ID NO: 2314920 - RNA, 19 nt, Artificial Sequence
  Description of Artificial Sequence: Synthetic oligonucleotide
acggaugugcagccagggc

SEQ ID NO: 2314921 - RNA, 19 nt, Artificial Sequence
  Description of Artificial Sequence: Synthetic oligonucleotide
aaugucaccuaggcccauc

SEQ ID NO: 2314922 - RNA, 19 nt, Artificial Sequence
  Description of Artificial Sequence: Synthetic oligonucleotide
ugaggacaauguccaagca

SEQ ID NO: 2314923 - RNA, 19 nt, Artificial Sequence
  Description of Artificial Sequence: Synthetic oligonucleotide
ugcaagccauggaaccagg

SEQ ID NO: 2314924 - RNA, 19 nt, Artificial Sequence
  Description of Artificial Sequence: Synthetic oligonucleotide
ggugccagggauaaagcgg

SEQ ID NO: 2314925 - RNA, 19 nt, Artificial Sequence
  Description of Artificial Sequence: Synthetic oligonucleotide
ugcauucccuuugaggaca

SEQ ID NO: 2314926 - RNA, 19 nt, Artificial Sequence
  Description of Artificial Sequence: Synthetic oligonucleotide
acaccauggucagaguccg

SEQ ID NO: 2314927 - RNA, 19 nt, Artificial Sequence
  Description of Artificial Sequence: Synthetic oligonucleotide
uaacugcacagcaggccag

SEQ ID NO: 2314928 - RNA, 19 nt, Artificial Sequence
  Description of Artificial Sequence: Synthetic oligonucleotide
ucagaaccuggacuuucca

SEQ ID NO: 2314929 - RNA, 19 nt, Artificial Sequence
  Description of Artificial Sequence: Synthetic oligonucleotide
acagccuagaaaacacggg

SEQ ID NO: 2314930 - RNA, 19 nt, Artificial Sequence
  Description of Artificial Sequence: Synthetic oligonucleotide
agaaaacacggggcaaagg

SEQ ID NO: 2314931 - RNA, 19 nt, Artificial Sequence
  Description of Artificial Sequence: Synthetic oligonucleotide
ccuuauaccagccuccaac

SEQ ID NO: 2314932 - RNA, 19 nt, Artificial Sequence
  Description of Artificial Sequence: Synthetic oligonucleotide
acacugaacaacagccaac

SEQ ID NO: 2314933 - RNA, 19 nt, Artificial Sequence
  Description of Artificial Sequence: Synthetic oligonucleotide
acacuuggguccucuguag

SEQ ID NO: 2314934 - RNA, 19 nt, Artificial Sequence
  Description of Artificial Sequence: Synthetic oligonucleotide
auaaagcgguccaaaaccu

SEQ ID NO: 2314935 - RNA, 19 nt, Artificial Sequence
  Description of Artificial Sequence: Synthetic oligonucleotide
ucuguagagcaguccguga

SEQ ID NO: 2314936 - RNA, 19 nt, Artificial Sequence
  Description of Artificial Sequence: Synthetic oligonucleotide
cugaaggugcaucagugca

SEQ ID NO: 2314937 - RNA, 19 nt, Artificial Sequence
  Description of Artificial Sequence: Synthetic oligonucleotide
agucaguaucuauucgcgu

SEQ ID NO: 2314938 - RNA, 19 nt, Artificial Sequence
  Description of Artificial Sequence: Synthetic oligonucleotide
gguagaaguuggcuaacug

SEQ ID NO: 2314939 - RNA, 19 nt, Artificial Sequence
  Description of Artificial Sequence: Synthetic oligonucleotide
cagagauaguaguugguga

SEQ ID NO: 2314940 - RNA, 19 nt, Artificial Sequence
  Description of Artificial Sequence: Synthetic oligonucleotide
gaugugccuuccaggauag

SEQ ID NO: 2314941 - RNA, 19 nt, Artificial Sequence
  Description of Artificial Sequence: Synthetic oligonucleotide
aggacaauguccaagcauu

SEQ ID NO: 2314942 - RNA, 19 nt, Artificial Sequence
  Description of Artificial Sequence: Synthetic oligonucleotide
aaagcgguccaaaaccuua

SEQ ID NO: 2314943 - RNA, 19 nt, Artificial Sequence
  Description of Artificial Sequence: Synthetic oligonucleotide
ugagcaccccuaccagggg

SEQ ID NO: 2314944 - RNA, 19 nt, Artificial Sequence
  Description of Artificial Sequence: Synthetic oligonucleotide
ggugcaucagugcaaggug

SEQ ID NO: 2314945 - RNA, 19 nt, Artificial Sequence
  Description of Artificial Sequence: Synthetic oligonucleotide
ugcugacauuccauugagc

SEQ ID NO: 2314946 - RNA, 19 nt, Artificial Sequence
  Description of Artificial Sequence: Synthetic oligonucleotide
cugaucuaucaccaucuuc

SEQ ID NO: 2314947 - RNA, 19 nt, Artificial Sequence
  Description of Artificial Sequence: Synthetic oligonucleotide
aggcccaucagugacccag

SEQ ID NO: 2314948 - RNA, 19 nt, Artificial Sequence
  Description of Artificial Sequence: Synthetic oligonucleotide
ugcaugugcgugugagugc

SEQ ID NO: 2314949 - RNA, 19 nt, Artificial Sequence
  Description of Artificial Sequence: Synthetic oligonucleotide
cagaaccuggacuuuccac

SEQ ID NO: 2314950 - RNA, 19 nt, Artificial Sequence
  Description of Artificial Sequence: Synthetic oligonucleotide
guaggaguuccagacaaca

SEQ ID NO: 2314951 - RNA, 19 nt, Artificial Sequence
  Description of Artificial Sequence: Synthetic oligonucleotide
aaccuuauaccagccucca

SEQ ID NO: 2314952 - RNA, 19 nt, Artificial Sequence
  Description of Artificial Sequence: Synthetic oligonucleotide
aggaaacagccuagaaaac

SEQ ID NO: 2314953 - RNA, 19 nt, Artificial Sequence
  Description of Artificial Sequence: Synthetic oligonucleotide
uuauaccagccuccaacua

SEQ ID NO: 2314954 - RNA, 19 nt, Artificial Sequence
  Description of Artificial Sequence: Synthetic oligonucleotide
augugauugcuaagaauug

SEQ ID NO: 2314955 - RNA, 19 nt, Artificial Sequence
  Description of Artificial Sequence: Synthetic oligonucleotide
uuuggcccaauuguccugu

SEQ ID NO: 2314956 - RNA, 19 nt, Artificial Sequence
  Description of Artificial Sequence: Synthetic oligonucleotide
uuagagcugaugugccuuc

SEQ ID NO: 2314957 - RNA, 19 nt, Artificial Sequence
  Description of Artificial Sequence: Synthetic oligonucleotide
guaguuuggcccaauuguc

SEQ ID NO: 2314958 - RNA, 19 nt, Artificial Sequence
  Description of Artificial Sequence: Synthetic oligonucleotide
caucauguggcuucucgga

SEQ ID NO: 2314959 - RNA, 19 nt, Artificial Sequence
  Description of Artificial Sequence: Synthetic oligonucleotide
agucccgcuguaguuuggc

SEQ ID NO: 2314960 - RNA, 19 nt, Artificial Sequence
  Description of Artificial Sequence: Synthetic oligonucleotide
ggaaacagccuagaaaaca

SEQ ID NO: 2314961 - RNA, 19 nt, Artificial Sequence
  Description of Artificial Sequence: Synthetic oligonucleotide
ugucaccuaggcccaucag

SEQ ID NO: 2314962 - RNA, 19 nt, Artificial Sequence
  Description of Artificial Sequence: Synthetic oligonucleotide
aguugcugugagauaaugu

SEQ ID NO: 2314963 - RNA, 19 nt, Artificial Sequence
  Description of Artificial Sequence: Synthetic oligonucleotide
aggguagucccgcuguagu

SEQ ID NO: 2314964 - RNA, 19 nt, Artificial Sequence
  Description of Artificial Sequence: Synthetic oligonucleotide
gugagccacaucauguggc

SEQ ID NO: 2314965 - RNA, 19 nt, Artificial Sequence
  Description of Artificial Sequence: Synthetic oligonucleotide
uccagacaacagcaacaca

SEQ ID NO: 2314966 - RNA, 19 nt, Artificial Sequence
  Description of Artificial Sequence: Synthetic oligonucleotide
cuaggcccaucagugaccc

SEQ ID NO: 2314967 - RNA, 19 nt, Artificial Sequence
  Description of Artificial Sequence: Synthetic oligonucleotide
ucugguguuccuggagacc

SEQ ID NO: 2314968 - RNA, 19 nt, Artificial Sequence
  Description of Artificial Sequence: Synthetic oligonucleotide
auaaugucaccuaggccca

SEQ ID NO: 2314969 - RNA, 19 nt, Artificial Sequence
  Description of Artificial Sequence: Synthetic oligonucleotide
gugauguuagcagcugagc

SEQ ID NO: 2314970 - RNA, 19 nt, Artificial Sequence
  Description of Artificial Sequence: Synthetic oligonucleotide
uucgcgugcaugugcgugu

SEQ ID NO: 2314971 - RNA, 19 nt, Artificial Sequence
  Description of Artificial Sequence: Synthetic oligonucleotide
augugcgugugagugcagg

SEQ ID NO: 2314972 - RNA, 19 nt, Artificial Sequence
  Description of Artificial Sequence: Synthetic oligonucleotide
acugaacaacagccaaccu

SEQ ID NO: 2314973 - RNA, 19 nt, Artificial Sequence
  Description of Artificial Sequence: Synthetic oligonucleotide
aguccugaugcauucccuu

SEQ ID NO: 2314974 - RNA, 19 nt, Artificial Sequence
  Description of Artificial Sequence: Synthetic oligonucleotide
uggacuuuccacggaugug

SEQ ID NO: 2314975 - RNA, 19 nt, Artificial Sequence
  Description of Artificial Sequence: Synthetic oligonucleotide
uugggucacaggugguugu

SEQ ID NO: 2314976 - RNA, 19 nt, Artificial Sequence
  Description of Artificial Sequence: Synthetic oligonucleotide
ccuaccaggggaaggaaac

SEQ ID NO: 2314977 - RNA, 19 nt, Artificial Sequence
  Description of Artificial Sequence: Synthetic oligonucleotide
acagcccaugcacaccaug

SEQ ID NO: 2314978 - RNA, 19 nt, Artificial Sequence
  Description of Artificial Sequence: Synthetic oligonucleotide
cucuguagagcaguccgug

SEQ ID NO: 2314979 - RNA, 19 nt, Artificial Sequence
  Description of Artificial Sequence: Synthetic oligonucleotide
cuuauaccagccuccaacu

SEQ ID NO: 2314980 - RNA, 19 nt, Artificial Sequence
  Description of Artificial Sequence: Synthetic oligonucleotide
gacauuccauugagcaccc

SEQ ID NO: 2314981 - RNA, 19 nt, Artificial Sequence
  Description of Artificial Sequence: Synthetic oligonucleotide
gugauugcuaagaauugaa

SEQ ID NO: 2314982 - RNA, 19 nt, Artificial Sequence
  Description of Artificial Sequence: Synthetic oligonucleotide
auaccagccuccaacuaca

SEQ ID NO: 2314983 - RNA, 19 nt, Artificial Sequence
  Description of Artificial Sequence: Synthetic oligonucleotide
gugcaucagugcaaggugc

SEQ ID NO: 2314984 - RNA, 19 nt, Artificial Sequence
  Description of Artificial Sequence: Synthetic oligonucleotide
augucaccuaggcccauca

SEQ ID NO: 2314985 - RNA, 19 nt, Artificial Sequence
  Description of Artificial Sequence: Synthetic oligonucleotide
cuuaacuauaagucaguau

SEQ ID NO: 2314986 - RNA, 19 nt, Artificial Sequence
  Description of Artificial Sequence: Synthetic oligonucleotide
cgguccaaaaccuuauacc

SEQ ID NO: 2314987 - RNA, 19 nt, Artificial Sequence
  Description of Artificial Sequence: Synthetic oligonucleotide
auucgcgugcaugugcgug

SEQ ID NO: 2314988 - RNA, 19 nt, Artificial Sequence
  Description of Artificial Sequence: Synthetic oligonucleotide
gaggacaauguccaagcau

SEQ ID NO: 2314989 - RNA, 19 nt, Artificial Sequence
  Description of Artificial Sequence: Synthetic oligonucleotide
ccaaaaccuuauaccagcc

SEQ ID NO: 2314990 - RNA, 19 nt, Artificial Sequence
  Description of Artificial Sequence: Synthetic oligonucleotide
uugguggugccagggauaa

SEQ ID NO: 2314991 - RNA, 19 nt, Artificial Sequence
  Description of Artificial Sequence: Synthetic oligonucleotide
agaugccuggagcuugggu

SEQ ID NO: 2314992 - RNA, 19 nt, Artificial Sequence
  Description of Artificial Sequence: Synthetic oligonucleotide
agagcugaugugccuucca

SEQ ID NO: 2314993 - RNA, 19 nt, Artificial Sequence
  Description of Artificial Sequence: Synthetic oligonucleotide
agugacccagcugucagaa

SEQ ID NO: 2314994 - RNA, 19 nt, Artificial Sequence
  Description of Artificial Sequence: Synthetic oligonucleotide
gagaccccgccucuccacc

SEQ ID NO: 2314995 - RNA, 19 nt, Artificial Sequence
  Description of Artificial Sequence: Synthetic oligonucleotide
uagucccgcuguaguuugg

SEQ ID NO: 2314996 - RNA, 19 nt, Artificial Sequence
  Description of Artificial Sequence: Synthetic oligonucleotide
gucagaaccuggacuuucc

SEQ ID NO: 2314997 - RNA, 19 nt, Artificial Sequence
  Description of Artificial Sequence: Synthetic oligonucleotide
cugaugcauucccuuugag

SEQ ID NO: 2314998 - RNA, 19 nt, Artificial Sequence
  Description of Artificial Sequence: Synthetic oligonucleotide
cacggaugugcagccaggg

SEQ ID NO: 2314999 - RNA, 19 nt, Artificial Sequence
  Description of Artificial Sequence: Synthetic oligonucleotide
ugguguuccuggagacccc

SEQ ID NO: 2315000 - RNA, 19 nt, Artificial Sequence
  Description of Artificial Sequence: Synthetic oligonucleotide
cagugcguccaccuuggug

SEQ ID NO: 2315001 - RNA, 19 nt, Artificial Sequence
  Description of Artificial Sequence: Synthetic oligonucleotide
aguaucuauucgcgugcau

SEQ ID NO: 2315002 - RNA, 19 nt, Artificial Sequence
  Description of Artificial Sequence: Synthetic oligonucleotide
gcuaacugcacagcaggcc

SEQ ID NO: 2315003 - RNA, 19 nt, Artificial Sequence
  Description of Artificial Sequence: Synthetic oligonucleotide
gccaaccuguaaugcaggg

SEQ ID NO: 2315004 - RNA, 19 nt, Artificial Sequence
  Description of Artificial Sequence: Synthetic oligonucleotide
gcgguccaaaaccuuauac

SEQ ID NO: 2315005 - RNA, 19 nt, Artificial Sequence
  Description of Artificial Sequence: Synthetic oligonucleotide
acacacugaacaacagcca

SEQ ID NO: 2315006 - RNA, 19 nt, Artificial Sequence
  Description of Artificial Sequence: Synthetic oligonucleotide
uguuagcagcugagccacc

SEQ ID NO: 2315007 - RNA, 19 nt, Artificial Sequence
  Description of Artificial Sequence: Synthetic oligonucleotide
cauggaaccaggcaggcuu

SEQ ID NO: 2315008 - RNA, 19 nt, Artificial Sequence
  Description of Artificial Sequence: Synthetic oligonucleotide
agucagugcucuugcuuaa

SEQ ID NO: 2315009 - RNA, 19 nt, Artificial Sequence
  Description of Artificial Sequence: Synthetic oligonucleotide
uagagcugaugugccuucc

SEQ ID NO: 2315010 - RNA, 19 nt, Artificial Sequence
  Description of Artificial Sequence: Synthetic oligonucleotide
aucuauucgcgugcaugug

SEQ ID NO: 2315011 - RNA, 19 nt, Artificial Sequence
  Description of Artificial Sequence: Synthetic oligonucleotide
ggcugaaggugcaucagug

SEQ ID NO: 2315012 - RNA, 19 nt, Artificial Sequence
  Description of Artificial Sequence: Synthetic oligonucleotide
caguugcugugagauaaug

SEQ ID NO: 2315013 - RNA, 19 nt, Artificial Sequence
  Description of Artificial Sequence: Synthetic oligonucleotide
uauucgcgugcaugugcgu

SEQ ID NO: 2315014 - RNA, 19 nt, Artificial Sequence
  Description of Artificial Sequence: Synthetic oligonucleotide
agguagaaguuggcuaacu

SEQ ID NO: 2315015 - RNA, 19 nt, Artificial Sequence
  Description of Artificial Sequence: Synthetic oligonucleotide
aagcgguccaaaaccuuau

SEQ ID NO: 2315016 - RNA, 19 nt, Artificial Sequence
  Description of Artificial Sequence: Synthetic oligonucleotide
ggaugugcagccagggccc

SEQ ID NO: 2315017 - RNA, 19 nt, Artificial Sequence
  Description of Artificial Sequence: Synthetic oligonucleotide
cagguguuucagaggccag

SEQ ID NO: 2315018 - RNA, 19 nt, Artificial Sequence
  Description of Artificial Sequence: Synthetic oligonucleotide
agguguuucagaggccaga

SEQ ID NO: 2315019 - RNA, 19 nt, Artificial Sequence
  Description of Artificial Sequence: Synthetic oligonucleotide
gagcaccccuaccagggga

SEQ ID NO: 2315020 - RNA, 19 nt, Artificial Sequence
  Description of Artificial Sequence: Synthetic oligonucleotide
ugggucacaggugguugug

SEQ ID NO: 2315021 - RNA, 19 nt, Artificial Sequence
  Description of Artificial Sequence: Synthetic oligonucleotide
guaugcccgccagagugcc

SEQ ID NO: 2315022 - RNA, 19 nt, Artificial Sequence
  Description of Artificial Sequence: Synthetic oligonucleotide
caccuugguggugccaggg

SEQ ID NO: 2315023 - RNA, 19 nt, Artificial Sequence
  Description of Artificial Sequence: Synthetic oligonucleotide
cagacaacagcaacacacu

SEQ ID NO: 2315024 - RNA, 19 nt, Artificial Sequence
  Description of Artificial Sequence: Synthetic oligonucleotide
gguguuccuggagaccccg

SEQ ID NO: 2315025 - RNA, 19 nt, Artificial Sequence
  Description of Artificial Sequence: Synthetic oligonucleotide
agcaggccagagauaguag

SEQ ID NO: 2315026 - RNA, 19 nt, Artificial Sequence
  Description of Artificial Sequence: Synthetic oligonucleotide
ucaggguagucccgcugua

SEQ ID NO: 2315027 - RNA, 19 nt, Artificial Sequence
  Description of Artificial Sequence: Synthetic oligonucleotide
ccauugagcaccccuacca

SEQ ID NO: 2315028 - RNA, 19 nt, Artificial Sequence
  Description of Artificial Sequence: Synthetic oligonucleotide
accccuaccaggggaagga

SEQ ID NO: 2315029 - RNA, 19 nt, Artificial Sequence
  Description of Artificial Sequence: Synthetic oligonucleotide
cugugagauaaugucaccu

SEQ ID NO: 2315030 - RNA, 19 nt, Artificial Sequence
  Description of Artificial Sequence: Synthetic oligonucleotide
cacacuuggguccucugua

SEQ ID NO: 2315031 - RNA, 19 nt, Artificial Sequence
  Description of Artificial Sequence: Synthetic oligonucleotide
acauuccauugagcacccc

SEQ ID NO: 2315032 - RNA, 19 nt, Artificial Sequence
  Description of Artificial Sequence: Synthetic oligonucleotide
gacuuuccacggaugugca

SEQ ID NO: 2315033 - RNA, 19 nt, Artificial Sequence
  Description of Artificial Sequence: Synthetic oligonucleotide
guagagcaguccgugaugu

SEQ ID NO: 2315034 - RNA, 19 nt, Artificial Sequence
  Description of Artificial Sequence: Synthetic oligonucleotide
gggauaaagcgguccaaaa

SEQ ID NO: 2315035 - RNA, 19 nt, Artificial Sequence
  Description of Artificial Sequence: Synthetic oligonucleotide
caucagugacccagcuguc

SEQ ID NO: 2315036 - RNA, 19 nt, Artificial Sequence
  Description of Artificial Sequence: Synthetic oligonucleotide
caaaaccuuauaccagccu

SEQ ID NO: 2315037 - RNA, 19 nt, Artificial Sequence
  Description of Artificial Sequence: Synthetic oligonucleotide
ggggaaggaaacagccuag

SEQ ID NO: 2315038 - RNA, 19 nt, Artificial Sequence
  Description of Artificial Sequence: Synthetic oligonucleotide
cucggagccacacuugggu

SEQ ID NO: 2315039 - RNA, 19 nt, Artificial Sequence
  Description of Artificial Sequence: Synthetic oligonucleotide
caggguagucccgcuguag

SEQ ID NO: 2315040 - RNA, 19 nt, Artificial Sequence
  Description of Artificial Sequence: Synthetic oligonucleotide
ccuaggcccaucagugacc

SEQ ID NO: 2315041 - RNA, 19 nt, Artificial Sequence
  Description of Artificial Sequence: Synthetic oligonucleotide
gugugagugcagguguuuc

SEQ ID NO: 2315042 - RNA, 19 nt, Artificial Sequence
  Description of Artificial Sequence: Synthetic oligonucleotide
ccaauuguccugugcugac

SEQ ID NO: 2315043 - RNA, 19 nt, Artificial Sequence
  Description of Artificial Sequence: Synthetic oligonucleotide
cuggacuuuccacggaugu

SEQ ID NO: 2315044 - RNA, 19 nt, Artificial Sequence
  Description of Artificial Sequence: Synthetic oligonucleotide
cagugcucuugcuuaacua

SEQ ID NO: 2315045 - RNA, 19 nt, Artificial Sequence
  Description of Artificial Sequence: Synthetic oligonucleotide
ggcaucaggguagucccgc

SEQ ID NO: 2315046 - RNA, 19 nt, Artificial Sequence
  Description of Artificial Sequence: Synthetic oligonucleotide
caccccuaccaggggaagg

SEQ ID NO: 2315047 - RNA, 19 nt, Artificial Sequence
  Description of Artificial Sequence: Synthetic oligonucleotide
accuuauaccagccuccaa

SEQ ID NO: 2315048 - RNA, 19 nt, Artificial Sequence
  Description of Artificial Sequence: Synthetic oligonucleotide
gaucuaucaccaucuucuu

SEQ ID NO: 2315049 - RNA, 19 nt, Artificial Sequence
  Description of Artificial Sequence: Synthetic oligonucleotide
agcgguccaaaaccuuaua

SEQ ID NO: 2315050 - RNA, 19 nt, Artificial Sequence
  Description of Artificial Sequence: Synthetic oligonucleotide
caugugcgugugagugcag

SEQ ID NO: 2315051 - RNA, 19 nt, Artificial Sequence
  Description of Artificial Sequence: Synthetic oligonucleotide
gaccagguagaaguuggcu

SEQ ID NO: 2315052 - RNA, 19 nt, Artificial Sequence
  Description of Artificial Sequence: Synthetic oligonucleotide
cauggucagaguccggccu

SEQ ID NO: 2315053 - RNA, 19 nt, Artificial Sequence
  Description of Artificial Sequence: Synthetic oligonucleotide
gccagggauaaagcggucc

SEQ ID NO: 2315054 - RNA, 19 nt, Artificial Sequence
  Description of Artificial Sequence: Synthetic oligonucleotide
gcccaauuguccugugcug

SEQ ID NO: 2315055 - RNA, 19 nt, Artificial Sequence
  Description of Artificial Sequence: Synthetic oligonucleotide
ccauggucagaguccggcc

SEQ ID NO: 2315056 - RNA, 19 nt, Artificial Sequence
  Description of Artificial Sequence: Synthetic oligonucleotide
caccauggucagaguccgg

SEQ ID NO: 2315057 - RNA, 19 nt, Artificial Sequence
  Description of Artificial Sequence: Synthetic oligonucleotide
gguaugcccgccagagugc

SEQ ID NO: 2315058 - RNA, 19 nt, Artificial Sequence
  Description of Artificial Sequence: Synthetic oligonucleotide
cuuugaggacaauguccaa

SEQ ID NO: 2315059 - RNA, 19 nt, Artificial Sequence
  Description of Artificial Sequence: Synthetic oligonucleotide
ucgcgugcaugugcgugug

SEQ ID NO: 2315060 - RNA, 19 nt, Artificial Sequence
  Description of Artificial Sequence: Synthetic oligonucleotide
ugccagggauaaagcgguc

SEQ ID NO: 2315061 - RNA, 19 nt, Artificial Sequence
  Description of Artificial Sequence: Synthetic oligonucleotide
caauuguccugugcugaca

SEQ ID NO: 2315062 - RNA, 19 nt, Artificial Sequence
  Description of Artificial Sequence: Synthetic oligonucleotide
gcaugugcgugugagugca

SEQ ID NO: 2315063 - RNA, 19 nt, Artificial Sequence
  Description of Artificial Sequence: Synthetic oligonucleotide
gguguuucagaggccagaa

SEQ ID NO: 2315064 - RNA, 19 nt, Artificial Sequence
  Description of Artificial Sequence: Synthetic oligonucleotide
cagcaggccagagauagua

SEQ ID NO: 2315065 - RNA, 19 nt, Artificial Sequence
  Description of Artificial Sequence: Synthetic oligonucleotide
cuaccaggggaaggaaaca

SEQ ID NO: 2315066 - RNA, 19 nt, Artificial Sequence
  Description of Artificial Sequence: Synthetic oligonucleotide
cuguagagcaguccgugau

SEQ ID NO: 2315067 - RNA, 19 nt, Artificial Sequence
  Description of Artificial Sequence: Synthetic oligonucleotide
ggcuaacugcacagcaggc

SEQ ID NO: 2315068 - RNA, 19 nt, Artificial Sequence
  Description of Artificial Sequence: Synthetic oligonucleotide
aggauagguaggaguucca

SEQ ID NO: 2315069 - RNA, 19 nt, Artificial Sequence
  Description of Artificial Sequence: Synthetic oligonucleotide
gucagugcucuugcuuaac

SEQ ID NO: 2315070 - RNA, 19 nt, Artificial Sequence
  Description of Artificial Sequence: Synthetic oligonucleotide
ccaacuacagggcccacaa

SEQ ID NO: 2315071 - RNA, 19 nt, Artificial Sequence
  Description of Artificial Sequence: Synthetic oligonucleotide
ggacaauguccaagcauuc

SEQ ID NO: 2315072 - RNA, 19 nt, Artificial Sequence
  Description of Artificial Sequence: Synthetic oligonucleotide
gcuuaacuauaagucagua

SEQ ID NO: 2315073 - RNA, 19 nt, Artificial Sequence
  Description of Artificial Sequence: Synthetic oligonucleotide
gcccaugcacaccaugguc

SEQ ID NO: 2315074 - RNA, 19 nt, Artificial Sequence
  Description of Artificial Sequence: Synthetic oligonucleotide
ccuggacuuuccacggaug

SEQ ID NO: 2315075 - RNA, 19 nt, Artificial Sequence
  Description of Artificial Sequence: Synthetic oligonucleotide
uuccacggaugugcagcca

SEQ ID NO: 2315076 - RNA, 19 nt, Artificial Sequence
  Description of Artificial Sequence: Synthetic oligonucleotide
ccaccaugugauugcuaag

SEQ ID NO: 2315077 - RNA, 19 nt, Artificial Sequence
  Description of Artificial Sequence: Synthetic oligonucleotide
caguaucuauucgcgugca

SEQ ID NO: 2315078 - RNA, 19 nt, Artificial Sequence
  Description of Artificial Sequence: Synthetic oligonucleotide
guuccuggagaccccgccu

SEQ ID NO: 2315079 - RNA, 19 nt, Artificial Sequence
  Description of Artificial Sequence: Synthetic oligonucleotide
ccagggauaaagcggucca

SEQ ID NO: 2315080 - RNA, 19 nt, Artificial Sequence
  Description of Artificial Sequence: Synthetic oligonucleotide
gcaaggugcaagccaugga

SEQ ID NO: 2315081 - RNA, 19 nt, Artificial Sequence
  Description of Artificial Sequence: Synthetic oligonucleotide
gugacccagcugucagaac

SEQ ID NO: 2315082 - RNA, 19 nt, Artificial Sequence
  Description of Artificial Sequence: Synthetic oligonucleotide
acccagcugucagaaccug

SEQ ID NO: 2315083 - RNA, 19 nt, Artificial Sequence
  Description of Artificial Sequence: Synthetic oligonucleotide
gguaggaguuccagacaac

SEQ ID NO: 2315084 - RNA, 19 nt, Artificial Sequence
  Description of Artificial Sequence: Synthetic oligonucleotide
ggagaccccgccucuccac

SEQ ID NO: 2315085 - RNA, 19 nt, Artificial Sequence
  Description of Artificial Sequence: Synthetic oligonucleotide
uaaugucaccuaggcccau

SEQ ID NO: 2315086 - RNA, 19 nt, Artificial Sequence
  Description of Artificial Sequence: Synthetic oligonucleotide
agaguccggccugucuggu

SEQ ID NO: 2315087 - RNA, 19 nt, Artificial Sequence
  Description of Artificial Sequence: Synthetic oligonucleotide
ggugguugugagccacauc

SEQ ID NO: 2315088 - RNA, 19 nt, Artificial Sequence
  Description of Artificial Sequence: Synthetic oligonucleotide
gacccagcugucagaaccu

SEQ ID NO: 2315089 - RNA, 19 nt, Artificial Sequence
  Description of Artificial Sequence: Synthetic oligonucleotide
cccgcuguaguuuggccca

SEQ ID NO: 2315090 - RNA, 19 nt, Artificial Sequence
  Description of Artificial Sequence: Synthetic oligonucleotide
cccaucagugacccagcug

SEQ ID NO: 2315091 - RNA, 19 nt, Artificial Sequence
  Description of Artificial Sequence: Synthetic oligonucleotide
caggccagagauaguaguu

SEQ ID NO: 2315092 - RNA, 19 nt, Artificial Sequence
  Description of Artificial Sequence: Synthetic oligonucleotide
cucugguaugcccgccaga

SEQ ID NO: 2315093 - RNA, 19 nt, Artificial Sequence
  Description of Artificial Sequence: Synthetic oligonucleotide
ugccuggagcuugggucac

SEQ ID NO: 2315094 - RNA, 19 nt, Artificial Sequence
  Description of Artificial Sequence: Synthetic oligonucleotide
cccaauuguccugugcuga

SEQ ID NO: 2315095 - RNA, 19 nt, Artificial Sequence
  Description of Artificial Sequence: Synthetic oligonucleotide
caguccugaugcauucccu

SEQ ID NO: 2315096 - RNA, 19 nt, Artificial Sequence
  Description of Artificial Sequence: Synthetic oligonucleotide
ugcccgccagagugccaug

SEQ ID NO: 2315097 - RNA, 19 nt, Artificial Sequence
  Description of Artificial Sequence: Synthetic oligonucleotide
cagggauaaagcgguccaa

SEQ ID NO: 2315098 - RNA, 19 nt, Artificial Sequence
  Description of Artificial Sequence: Synthetic oligonucleotide
gggcaucaggguagucccg

SEQ ID NO: 2315099 - RNA, 19 nt, Artificial Sequence
  Description of Artificial Sequence: Synthetic oligonucleotide
ccaggauagguaggaguuc

SEQ ID NO: 2315100 - RNA, 19 nt, Artificial Sequence
  Description of Artificial Sequence: Synthetic oligonucleotide
agcuugggucacagguggu

SEQ ID NO: 2315101 - RNA, 19 nt, Artificial Sequence
  Description of Artificial Sequence: Synthetic oligonucleotide
ugagggcaucaggguaguc

SEQ ID NO: 2315102 - RNA, 19 nt, Artificial Sequence
  Description of Artificial Sequence: Synthetic oligonucleotide
uccggccugucugguguuc

SEQ ID NO: 2315103 - RNA, 19 nt, Artificial Sequence
  Description of Artificial Sequence: Synthetic oligonucleotide
caacuacagggcccacaaa

SEQ ID NO: 2315104 - RNA, 19 nt, Artificial Sequence
  Description of Artificial Sequence: Synthetic oligonucleotide
gguccucuguagagcaguc

SEQ ID NO: 2315105 - RNA, 19 nt, Artificial Sequence
  Description of Artificial Sequence: Synthetic oligonucleotide
ccgugauguuagcagcuga

SEQ ID NO: 2315106 - RNA, 19 nt, Artificial Sequence
  Description of Artificial Sequence: Synthetic oligonucleotide
cugguaugcccgccagagu

SEQ ID NO: 2315107 - RNA, 19 nt, Artificial Sequence
  Description of Artificial Sequence: Synthetic oligonucleotide
gcccgccagagugccaugc

SEQ ID NO: 2315108 - RNA, 19 nt, Artificial Sequence
  Description of Artificial Sequence: Synthetic oligonucleotide
cccuaccaggggaaggaaa

SEQ ID NO: 2315109 - RNA, 19 nt, Artificial Sequence
  Description of Artificial Sequence: Synthetic oligonucleotide
cuccaacuacagggcccac

SEQ ID NO: 2315110 - RNA, 19 nt, Artificial Sequence
  Description of Artificial Sequence: Synthetic oligonucleotide
cccgccucuccaccaguug

SEQ ID NO: 2315111 - RNA, 19 nt, Artificial Sequence
  Description of Artificial Sequence: Synthetic oligonucleotide
gcaccccuaccaggggaag

SEQ ID NO: 2315112 - RNA, 19 nt, Artificial Sequence
  Description of Artificial Sequence: Synthetic oligonucleotide
gcuguaguuuggcccaauu

SEQ ID NO: 2315113 - RNA, 19 nt, Artificial Sequence
  Description of Artificial Sequence: Synthetic oligonucleotide
ccugugcugacauuccauu

SEQ ID NO: 2315114 - RNA, 19 nt, Artificial Sequence
  Description of Artificial Sequence: Synthetic oligonucleotide
caucagaugccuggagcuu

SEQ ID NO: 2315115 - RNA, 19 nt, Artificial Sequence
  Description of Artificial Sequence: Synthetic oligonucleotide
ccggccugucugguguucc

SEQ ID NO: 2315116 - RNA, 19 nt, Artificial Sequence
  Description of Artificial Sequence: Synthetic oligonucleotide
gccagagauaguaguuggu

SEQ ID NO: 2315117 - RNA, 19 nt, Artificial Sequence
  Description of Artificial Sequence: Synthetic oligonucleotide
cagggcccacaaagccaca

SEQ ID NO: 2315118 - RNA, 19 nt, Artificial Sequence
  Description of Artificial Sequence: Synthetic oligonucleotide
ccuugguggugccagggau

SEQ ID NO: 2315119 - RNA, 19 nt, Artificial Sequence
  Description of Artificial Sequence: Synthetic oligonucleotide
cccucugguaugcccgcca

SEQ ID NO: 2315120 - RNA, 19 nt, Artificial Sequence
  Description of Artificial Sequence: Synthetic oligonucleotide
gcaucaggguagucccgcu

SEQ ID NO: 2315121 - RNA, 19 nt, Artificial Sequence
  Description of Artificial Sequence: Synthetic oligonucleotide
ccucuguagagcaguccgu

SEQ ID NO: 2315122 - RNA, 19 nt, Artificial Sequence
  Description of Artificial Sequence: Synthetic oligonucleotide
ccuggagaccccgccucuc

SEQ ID NO: 2315123 - RNA, 19 nt, Artificial Sequence
  Description of Artificial Sequence: Synthetic oligonucleotide
gcauucccuuugaggacaa

SEQ ID NO: 2315124 - RNA, 19 nt, Artificial Sequence
  Description of Artificial Sequence: Synthetic oligonucleotide
ggucagaguccggccuguc

SEQ ID NO: 2315125 - RNA, 19 nt, Artificial Sequence
  Description of Artificial Sequence: Synthetic oligonucleotide
gagccacacuuggguccuc

SEQ ID NO: 2315126 - RNA, 19 nt, Artificial Sequence
  Description of Artificial Sequence: Synthetic oligonucleotide
ccaagcauuccaggcugaa

SEQ ID NO: 2315127 - RNA, 19 nt, Artificial Sequence
  Description of Artificial Sequence: Synthetic oligonucleotide
cacagcccaugcacaccau

SEQ ID NO: 2315128 - RNA, 19 nt, Artificial Sequence
  Description of Artificial Sequence: Synthetic oligonucleotide
ccaguugcugugagauaau

SEQ ID NO: 2315129 - RNA, 19 nt, Artificial Sequence
  Description of Artificial Sequence: Synthetic oligonucleotide
ccacaucauguggcuucuc

SEQ ID NO: 2315130 - RNA, 19 nt, Artificial Sequence
  Description of Artificial Sequence: Synthetic oligonucleotide
guccggccugucugguguu

SEQ ID NO: 2315131 - RNA, 19 nt, Artificial Sequence
  Description of Artificial Sequence: Synthetic oligonucleotide
gcgugugagugcagguguu

SEQ ID NO: 2315132 - RNA, 19 nt, Artificial Sequence
  Description of Artificial Sequence: Synthetic oligonucleotide
ccccuaccaggggaaggaa

SEQ ID NO: 2315133 - RNA, 19 nt, Artificial Sequence
  Description of Artificial Sequence: Synthetic oligonucleotide
ccgcuguaguuuggcccaa

SEQ ID NO: 2315134 - RNA, 19 nt, Artificial Sequence
  Description of Artificial Sequence: Synthetic oligonucleotide
cggccugucugguguuccu

SEQ ID NO: 2315135 - RNA, 19 nt, Artificial Sequence
  Description of Artificial Sequence: Synthetic oligonucleotide
ccccgccucuccaccaguu

SEQ ID NO: 2315136 - RNA, 19 nt, Artificial Sequence
  Description of Artificial Sequence: Synthetic oligonucleotide
aaucccaacaccacaaucc

SEQ ID NO: 2315137 - RNA, 19 nt, Artificial Sequence
  Description of Artificial Sequence: Synthetic oligonucleotide
agugaugcacucuucagcc

SEQ ID NO: 2315138 - RNA, 19 nt, Artificial Sequence
  Description of Artificial Sequence: Synthetic oligonucleotide
agagauguucuucaggagc

SEQ ID NO: 2315139 - RNA, 19 nt, Artificial Sequence
  Description of Artificial Sequence: Synthetic oligonucleotide
auuaugagcagcaagaaag

SEQ ID NO: 2315140 - RNA, 19 nt, Artificial Sequence
  Description of Artificial Sequence: Synthetic oligonucleotide
uaagauacagguaggacug

SEQ ID NO: 2315141 - RNA, 19 nt, Artificial Sequence
  Description of Artificial Sequence: Synthetic oligonucleotide
uucaggagcaacaaguugc

SEQ ID NO: 2315142 - RNA, 19 nt, Artificial Sequence
  Description of Artificial Sequence: Synthetic oligonucleotide
uuugcgcugaaucacgugg

SEQ ID NO: 2315143 - RNA, 19 nt, Artificial Sequence
  Description of Artificial Sequence: Synthetic oligonucleotide
ugccguaagauacagguag

SEQ ID NO: 2315144 - RNA, 19 nt, Artificial Sequence
  Description of Artificial Sequence: Synthetic oligonucleotide
ugugccguaagauacaggu

SEQ ID NO: 2315145 - RNA, 19 nt, Artificial Sequence
  Description of Artificial Sequence: Synthetic oligonucleotide
aacauuugucgccacaucu

SEQ ID NO: 2315146 - RNA, 19 nt, Artificial Sequence
  Description of Artificial Sequence: Synthetic oligonucleotide
gagaggagcaccuugcccg

SEQ ID NO: 2315147 - RNA, 19 nt, Artificial Sequence
  Description of Artificial Sequence: Synthetic oligonucleotide
uuaagugcuagucacucca

SEQ ID NO: 2315148 - RNA, 19 nt, Artificial Sequence
  Description of Artificial Sequence: Synthetic oligonucleotide
ugaggaguuacuuaaggga

SEQ ID NO: 2315149 - RNA, 19 nt, Artificial Sequence
  Description of Artificial Sequence: Synthetic oligonucleotide
ggaacugacaccaagaugc

SEQ ID NO: 2315150 - RNA, 19 nt, Artificial Sequence
  Description of Artificial Sequence: Synthetic oligonucleotide
gaaucucucgaucacacug

SEQ ID NO: 2315151 - RNA, 19 nt, Artificial Sequence
  Description of Artificial Sequence: Synthetic oligonucleotide
acccuuuucucucagaaag

SEQ ID NO: 2315152 - RNA, 19 nt, Artificial Sequence
  Description of Artificial Sequence: Synthetic oligonucleotide
agaaagcagaaccaagggg

SEQ ID NO: 2315153 - RNA, 19 nt, Artificial Sequence
  Description of Artificial Sequence: Synthetic oligonucleotide
uuugucgccacaucuauca

SEQ ID NO: 2315154 - RNA, 19 nt, Artificial Sequence
  Description of Artificial Sequence: Synthetic oligonucleotide
aguugcugggcagagaugc

SEQ ID NO: 2315155 - RNA, 19 nt, Artificial Sequence
  Description of Artificial Sequence: Synthetic oligonucleotide
gacagagaccuuuaaaaug

SEQ ID NO: 2315156 - RNA, 19 nt, Artificial Sequence
  Description of Artificial Sequence: Synthetic oligonucleotide
auacagguaggacugcagc

SEQ ID NO: 2315157 - RNA, 19 nt, Artificial Sequence
  Description of Artificial Sequence: Synthetic oligonucleotide
acugauuaugagcagcaag

SEQ ID NO: 2315158 - RNA, 19 nt, Artificial Sequence
  Description of Artificial Sequence: Synthetic oligonucleotide
uuacuuaagggagaggagc

SEQ ID NO: 2315159 - RNA, 19 nt, Artificial Sequence
  Description of Artificial Sequence: Synthetic oligonucleotide
aaaauagcugugccguaag

SEQ ID NO: 2315160 - RNA, 19 nt, Artificial Sequence
  Description of Artificial Sequence: Synthetic oligonucleotide
uguagagagacguuuucug

SEQ ID NO: 2315161 - RNA, 19 nt, Artificial Sequence
  Description of Artificial Sequence: Synthetic oligonucleotide
gaaagcagaaccaagggga

SEQ ID NO: 2315162 - RNA, 19 nt, Artificial Sequence
  Description of Artificial Sequence: Synthetic oligonucleotide
agagaugcgauguuuccuc

SEQ ID NO: 2315163 - RNA, 19 nt, Artificial Sequence
  Description of Artificial Sequence: Synthetic oligonucleotide
uguaguucacgcuggacug

SEQ ID NO: 2315164 - RNA, 19 nt, Artificial Sequence
  Description of Artificial Sequence: Synthetic oligonucleotide
ugcgauguuuccuccagcg

SEQ ID NO: 2315165 - RNA, 19 nt, Artificial Sequence
  Description of Artificial Sequence: Synthetic oligonucleotide
agaccuuuaaaaugcagga

SEQ ID NO: 2315166 - RNA, 19 nt, Artificial Sequence
  Description of Artificial Sequence: Synthetic oligonucleotide
guagagagacguuuucugg

SEQ ID NO: 2315167 - RNA, 19 nt, Artificial Sequence
  Description of Artificial Sequence: Synthetic oligonucleotide
uccaguuugaacacagcac

SEQ ID NO: 2315168 - RNA, 19 nt, Artificial Sequence
  Description of Artificial Sequence: Synthetic oligonucleotide
ucgaucacacugauuauga

SEQ ID NO: 2315169 - RNA, 19 nt, Artificial Sequence
  Description of Artificial Sequence: Synthetic oligonucleotide
aacaguuuccccaggcugg

SEQ ID NO: 2315170 - RNA, 19 nt, Artificial Sequence
  Description of Artificial Sequence: Synthetic oligonucleotide
gaggaguuacuuaagggag

SEQ ID NO: 2315171 - RNA, 19 nt, Artificial Sequence
  Description of Artificial Sequence: Synthetic oligonucleotide
gaagacaucuccucccacc

SEQ ID NO: 2315172 - RNA, 19 nt, Artificial Sequence
  Description of Artificial Sequence: Synthetic oligonucleotide
gugaggaguuacuuaaggg

SEQ ID NO: 2315173 - RNA, 19 nt, Artificial Sequence
  Description of Artificial Sequence: Synthetic oligonucleotide
ugucacuagaacaguuucc

SEQ ID NO: 2315174 - RNA, 19 nt, Artificial Sequence
  Description of Artificial Sequence: Synthetic oligonucleotide
cagaguuggggcaagaauc

SEQ ID NO: 2315175 - RNA, 19 nt, Artificial Sequence
  Description of Artificial Sequence: Synthetic oligonucleotide
cugauuaugagcagcaaga

SEQ ID NO: 2315176 - RNA, 19 nt, Artificial Sequence
  Description of Artificial Sequence: Synthetic oligonucleotide
ucuaucacugcaaggccug

SEQ ID NO: 2315177 - RNA, 19 nt, Artificial Sequence
  Description of Artificial Sequence: Synthetic oligonucleotide
aaggggaacugacaccaag

SEQ ID NO: 2315178 - RNA, 19 nt, Artificial Sequence
  Description of Artificial Sequence: Synthetic oligonucleotide
aguaccgcagggcagagga

SEQ ID NO: 2315179 - RNA, 19 nt, Artificial Sequence
  Description of Artificial Sequence: Synthetic oligonucleotide
acugacaccaagaugcauc

SEQ ID NO: 2315180 - RNA, 19 nt, Artificial Sequence
  Description of Artificial Sequence: Synthetic oligonucleotide
aagacaucuccucccacca

SEQ ID NO: 2315181 - RNA, 19 nt, Artificial Sequence
  Description of Artificial Sequence: Synthetic oligonucleotide
uagagagacguuuucugga

SEQ ID NO: 2315182 - RNA, 19 nt, Artificial Sequence
  Description of Artificial Sequence: Synthetic oligonucleotide
guaagauacagguaggacu

SEQ ID NO: 2315183 - RNA, 19 nt, Artificial Sequence
  Description of Artificial Sequence: Synthetic oligonucleotide
uagcugugccguaagauac

SEQ ID NO: 2315184 - RNA, 19 nt, Artificial Sequence
  Description of Artificial Sequence: Synthetic oligonucleotide
ugcaucgccagcuugcacu

SEQ ID NO: 2315185 - RNA, 19 nt, Artificial Sequence
  Description of Artificial Sequence: Synthetic oligonucleotide
cucucgaucacacugauua

SEQ ID NO: 2315186 - RNA, 19 nt, Artificial Sequence
  Description of Artificial Sequence: Synthetic oligonucleotide
cauagcauuuaagugcuag

SEQ ID NO: 2315187 - RNA, 19 nt, Artificial Sequence
  Description of Artificial Sequence: Synthetic oligonucleotide
gaugcgauguuuccuccag

SEQ ID NO: 2315188 - RNA, 19 nt, Artificial Sequence
  Description of Artificial Sequence: Synthetic oligonucleotide
gacugcagcaucuuguaga

SEQ ID NO: 2315189 - RNA, 19 nt, Artificial Sequence
  Description of Artificial Sequence: Synthetic oligonucleotide
uuaagggagaggagcaccu

SEQ ID NO: 2315190 - RNA, 19 nt, Artificial Sequence
  Description of Artificial Sequence: Synthetic oligonucleotide
aauagcugugccguaagau

SEQ ID NO: 2315191 - RNA, 19 nt, Artificial Sequence
  Description of Artificial Sequence: Synthetic oligonucleotide
ugggugaggaguuacuuaa

SEQ ID NO: 2315192 - RNA, 19 nt, Artificial Sequence
  Description of Artificial Sequence: Synthetic oligonucleotide
gucagugaggaagacagag

SEQ ID NO: 2315193 - RNA, 19 nt, Artificial Sequence
  Description of Artificial Sequence: Synthetic oligonucleotide
uggggcaagaaucucucga

SEQ ID NO: 2315194 - RNA, 19 nt, Artificial Sequence
  Description of Artificial Sequence: Synthetic oligonucleotide
ccuuuaaaaugcaggaggg

SEQ ID NO: 2315195 - RNA, 19 nt, Artificial Sequence
  Description of Artificial Sequence: Synthetic oligonucleotide
ggagcaacaaguugcuggg

SEQ ID NO: 2315196 - RNA, 19 nt, Artificial Sequence
  Description of Artificial Sequence: Synthetic oligonucleotide
uugguagcgaccccaguac

SEQ ID NO: 2315197 - RNA, 19 nt, Artificial Sequence
  Description of Artificial Sequence: Synthetic oligonucleotide
agcaacaaguugcugggca

SEQ ID NO: 2315198 - RNA, 19 nt, Artificial Sequence
  Description of Artificial Sequence: Synthetic oligonucleotide
aaauagcugugccguaaga

SEQ ID NO: 2315199 - RNA, 19 nt, Artificial Sequence
  Description of Artificial Sequence: Synthetic oligonucleotide
auagcauuuaagugcuagu

SEQ ID NO: 2315200 - RNA, 19 nt, Artificial Sequence
  Description of Artificial Sequence: Synthetic oligonucleotide
ccaguuugaacacagcacc

SEQ ID NO: 2315201 - RNA, 19 nt, Artificial Sequence
  Description of Artificial Sequence: Synthetic oligonucleotide
cacaucuaucacugcaagg

SEQ ID NO: 2315202 - RNA, 19 nt, Artificial Sequence
  Description of Artificial Sequence: Synthetic oligonucleotide
aagauacagguaggacugc

SEQ ID NO: 2315203 - RNA, 19 nt, Artificial Sequence
  Description of Artificial Sequence: Synthetic oligonucleotide
cagugaugcacucuucagc

SEQ ID NO: 2315204 - RNA, 19 nt, Artificial Sequence
  Description of Artificial Sequence: Synthetic oligonucleotide
gcauuuaagugcuagucac

SEQ ID NO: 2315205 - RNA, 19 nt, Artificial Sequence
  Description of Artificial Sequence: Synthetic oligonucleotide
ugaugcacucuucagccau

SEQ ID NO: 2315206 - RNA, 19 nt, Artificial Sequence
  Description of Artificial Sequence: Synthetic oligonucleotide
cuuaagggagaggagcacc

SEQ ID NO: 2315207 - RNA, 19 nt, Artificial Sequence
  Description of Artificial Sequence: Synthetic oligonucleotide
caggaagacaucuccuccc

SEQ ID NO: 2315208 - RNA, 19 nt, Artificial Sequence
  Description of Artificial Sequence: Synthetic oligonucleotide
gauuaugagcagcaagaaa

SEQ ID NO: 2315209 - RNA, 19 nt, Artificial Sequence
  Description of Artificial Sequence: Synthetic oligonucleotide
gaccuuuaaaaugcaggag

SEQ ID NO: 2315210 - RNA, 19 nt, Artificial Sequence
  Description of Artificial Sequence: Synthetic oligonucleotide
aacaaguugcugggcagag

SEQ ID NO: 2315211 - RNA, 19 nt, Artificial Sequence
  Description of Artificial Sequence: Synthetic oligonucleotide
cagccauagcauuuaagug

SEQ ID NO: 2315212 - RNA, 19 nt, Artificial Sequence
  Description of Artificial Sequence: Synthetic oligonucleotide
augaccuuggcccggagaa

SEQ ID NO: 2315213 - RNA, 19 nt, Artificial Sequence
  Description of Artificial Sequence: Synthetic oligonucleotide
augcucuacagccaaaaua

SEQ ID NO: 2315214 - RNA, 19 nt, Artificial Sequence
  Description of Artificial Sequence: Synthetic oligonucleotide
cacuagaacaguuucccca

SEQ ID NO: 2315215 - RNA, 19 nt, Artificial Sequence
  Description of Artificial Sequence: Synthetic oligonucleotide
uucuggucagugaugcacu

SEQ ID NO: 2315216 - RNA, 19 nt, Artificial Sequence
  Description of Artificial Sequence: Synthetic oligonucleotide
acuucucgucgcuuccagc

SEQ ID NO: 2315217 - RNA, 19 nt, Artificial Sequence
  Description of Artificial Sequence: Synthetic oligonucleotide
uggauuugcgcugaaucac

SEQ ID NO: 2315218 - RNA, 19 nt, Artificial Sequence
  Description of Artificial Sequence: Synthetic oligonucleotide
ucuuguagagagacguuuu

SEQ ID NO: 2315219 - RNA, 19 nt, Artificial Sequence
  Description of Artificial Sequence: Synthetic oligonucleotide
auagcugugccguaagaua

SEQ ID NO: 2315220 - RNA, 19 nt, Artificial Sequence
  Description of Artificial Sequence: Synthetic oligonucleotide
gacguuuucuggaauccgc

SEQ ID NO: 2315221 - RNA, 19 nt, Artificial Sequence
  Description of Artificial Sequence: Synthetic oligonucleotide
gaaucccaacaccacaauc

SEQ ID NO: 2315222 - RNA, 19 nt, Artificial Sequence
  Description of Artificial Sequence: Synthetic oligonucleotide
acaauccugccuucccacg

SEQ ID NO: 2315223 - RNA, 19 nt, Artificial Sequence
  Description of Artificial Sequence: Synthetic oligonucleotide
aaggcaaaguccugguguu

SEQ ID NO: 2315224 - RNA, 19 nt, Artificial Sequence
  Description of Artificial Sequence: Synthetic oligonucleotide
gauacagguaggacugcag

SEQ ID NO: 2315225 - RNA, 19 nt, Artificial Sequence
  Description of Artificial Sequence: Synthetic oligonucleotide
gagacguuuucuggaaucc

SEQ ID NO: 2315226 - RNA, 19 nt, Artificial Sequence
  Description of Artificial Sequence: Synthetic oligonucleotide
cuucuggucagugaugcac

SEQ ID NO: 2315227 - RNA, 19 nt, Artificial Sequence
  Description of Artificial Sequence: Synthetic oligonucleotide
aagcagaaccaaggggaac

SEQ ID NO: 2315228 - RNA, 19 nt, Artificial Sequence
  Description of Artificial Sequence: Synthetic oligonucleotide
ucacuagaacaguuucccc

SEQ ID NO: 2315229 - RNA, 19 nt, Artificial Sequence
  Description of Artificial Sequence: Synthetic oligonucleotide
cacacugauuaugagcagc

SEQ ID NO: 2315230 - RNA, 19 nt, Artificial Sequence
  Description of Artificial Sequence: Synthetic oligonucleotide
ucucgucgcuuccagcugc

SEQ ID NO: 2315231 - RNA, 19 nt, Artificial Sequence
  Description of Artificial Sequence: Synthetic oligonucleotide
guuacuuaagggagaggag

SEQ ID NO: 2315232 - RNA, 19 nt, Artificial Sequence
  Description of Artificial Sequence: Synthetic oligonucleotide
aguuuccccaggcugggug

SEQ ID NO: 2315233 - RNA, 19 nt, Artificial Sequence
  Description of Artificial Sequence: Synthetic oligonucleotide
agcaccaaugugcgggcgg

SEQ ID NO: 2315234 - RNA, 19 nt, Artificial Sequence
  Description of Artificial Sequence: Synthetic oligonucleotide
uuguagagagacguuuucu

SEQ ID NO: 2315235 - RNA, 19 nt, Artificial Sequence
  Description of Artificial Sequence: Synthetic oligonucleotide
uaugaccuuggcccggaga

SEQ ID NO: 2315236 - RNA, 19 nt, Artificial Sequence
  Description of Artificial Sequence: Synthetic oligonucleotide
guggauuugcgcugaauca

SEQ ID NO: 2315237 - RNA, 19 nt, Artificial Sequence
  Description of Artificial Sequence: Synthetic oligonucleotide
ugucgccacaucuaucacu

SEQ ID NO: 2315238 - RNA, 19 nt, Artificial Sequence
  Description of Artificial Sequence: Synthetic oligonucleotide
ugauuaugagcagcaagaa

SEQ ID NO: 2315239 - RNA, 19 nt, Artificial Sequence
  Description of Artificial Sequence: Synthetic oligonucleotide
agcagaaccaaggggaacu

SEQ ID NO: 2315240 - RNA, 19 nt, Artificial Sequence
  Description of Artificial Sequence: Synthetic oligonucleotide
ucacgcuggacugugcacc

SEQ ID NO: 2315241 - RNA, 19 nt, Artificial Sequence
  Description of Artificial Sequence: Synthetic oligonucleotide
cuuguagagagacguuuuc

SEQ ID NO: 2315242 - RNA, 19 nt, Artificial Sequence
  Description of Artificial Sequence: Synthetic oligonucleotide
agcgaaucccaacaccaca

SEQ ID NO: 2315243 - RNA, 19 nt, Artificial Sequence
  Description of Artificial Sequence: Synthetic oligonucleotide
agggagaggagcaccuugc

SEQ ID NO: 2315244 - RNA, 19 nt, Artificial Sequence
  Description of Artificial Sequence: Synthetic oligonucleotide
gucgccacaucuaucacug

SEQ ID NO: 2315245 - RNA, 19 nt, Artificial Sequence
  Description of Artificial Sequence: Synthetic oligonucleotide
uacagccaaaauagcugug

SEQ ID NO: 2315246 - RNA, 19 nt, Artificial Sequence
  Description of Artificial Sequence: Synthetic oligonucleotide
ugcgcugaaucacguggag

SEQ ID NO: 2315247 - RNA, 19 nt, Artificial Sequence
  Description of Artificial Sequence: Synthetic oligonucleotide
agagagacguuuucuggaa

SEQ ID NO: 2315248 - RNA, 19 nt, Artificial Sequence
  Description of Artificial Sequence: Synthetic oligonucleotide
uggaauccgccacaagguc

SEQ ID NO: 2315249 - RNA, 19 nt, Artificial Sequence
  Description of Artificial Sequence: Synthetic oligonucleotide
agaacauuugucgccacau

SEQ ID NO: 2315250 - RNA, 19 nt, Artificial Sequence
  Description of Artificial Sequence: Synthetic oligonucleotide
cucgaucacacugauuaug

SEQ ID NO: 2315251 - RNA, 19 nt, Artificial Sequence
  Description of Artificial Sequence: Synthetic oligonucleotide
agcuugcacuucucgucgc

SEQ ID NO: 2315252 - RNA, 19 nt, Artificial Sequence
  Description of Artificial Sequence: Synthetic oligonucleotide
aagugcuagucacuccaau

SEQ ID NO: 2315253 - RNA, 19 nt, Artificial Sequence
  Description of Artificial Sequence: Synthetic oligonucleotide
ggcccgaugcucuacagcc

SEQ ID NO: 2315254 - RNA, 19 nt, Artificial Sequence
  Description of Artificial Sequence: Synthetic oligonucleotide
gagaugcgauguuuccucc

SEQ ID NO: 2315255 - RNA, 19 nt, Artificial Sequence
  Description of Artificial Sequence: Synthetic oligonucleotide
uugcgcugaaucacgugga

SEQ ID NO: 2315256 - RNA, 19 nt, Artificial Sequence
  Description of Artificial Sequence: Synthetic oligonucleotide
caauccugccuucccacgc

SEQ ID NO: 2315257 - RNA, 19 nt, Artificial Sequence
  Description of Artificial Sequence: Synthetic oligonucleotide
agacguuuucuggaauccg

SEQ ID NO: 2315258 - RNA, 19 nt, Artificial Sequence
  Description of Artificial Sequence: Synthetic oligonucleotide
guagcgaccccaguacagg

SEQ ID NO: 2315259 - RNA, 19 nt, Artificial Sequence
  Description of Artificial Sequence: Synthetic oligonucleotide
aguacaggcccauggcaga

SEQ ID NO: 2315260 - RNA, 19 nt, Artificial Sequence
  Description of Artificial Sequence: Synthetic oligonucleotide
uuggggcaagaaucucucg

SEQ ID NO: 2315261 - RNA, 19 nt, Artificial Sequence
  Description of Artificial Sequence: Synthetic oligonucleotide
gcccggagaacauuugucg

SEQ ID NO: 2315262 - RNA, 19 nt, Artificial Sequence
  Description of Artificial Sequence: Synthetic oligonucleotide
ccucccaccaugucaaugg

SEQ ID NO: 2315263 - RNA, 19 nt, Artificial Sequence
  Description of Artificial Sequence: Synthetic oligonucleotide
auuugcgcugaaucacgug

SEQ ID NO: 2315264 - RNA, 19 nt, Artificial Sequence
  Description of Artificial Sequence: Synthetic oligonucleotide
cacaauccugccuucccac

SEQ ID NO: 2315265 - RNA, 19 nt, Artificial Sequence
  Description of Artificial Sequence: Synthetic oligonucleotide
aggagcaccuugcccgugg

SEQ ID NO: 2315266 - RNA, 19 nt, Artificial Sequence
  Description of Artificial Sequence: Synthetic oligonucleotide
auucaccccaccgcugccc

SEQ ID NO: 2315267 - RNA, 19 nt, Artificial Sequence
  Description of Artificial Sequence: Synthetic oligonucleotide
aaaaugcaggagggagauc

SEQ ID NO: 2315268 - RNA, 19 nt, Artificial Sequence
  Description of Artificial Sequence: Synthetic oligonucleotide
uccgccacaaggucuucug

SEQ ID NO: 2315269 - RNA, 19 nt, Artificial Sequence
  Description of Artificial Sequence: Synthetic oligonucleotide
agcaagaaagcagaaccaa

SEQ ID NO: 2315270 - RNA, 19 nt, Artificial Sequence
  Description of Artificial Sequence: Synthetic oligonucleotide
aguccugguguugguagcg

SEQ ID NO: 2315271 - RNA, 19 nt, Artificial Sequence
  Description of Artificial Sequence: Synthetic oligonucleotide
guacccuuuucucucagaa

SEQ ID NO: 2315272 - RNA, 19 nt, Artificial Sequence
  Description of Artificial Sequence: Synthetic oligonucleotide
gaacauuugucgccacauc

SEQ ID NO: 2315273 - RNA, 19 nt, Artificial Sequence
  Description of Artificial Sequence: Synthetic oligonucleotide
agagaccuuuaaaaugcag

SEQ ID NO: 2315274 - RNA, 19 nt, Artificial Sequence
  Description of Artificial Sequence: Synthetic oligonucleotide
acaccaagaugcaucacca

SEQ ID NO: 2315275 - RNA, 19 nt, Artificial Sequence
  Description of Artificial Sequence: Synthetic oligonucleotide
uucucgucgcuuccagcug

SEQ ID NO: 2315276 - RNA, 19 nt, Artificial Sequence
  Description of Artificial Sequence: Synthetic oligonucleotide
gauguucuucaggagcaac

SEQ ID NO: 2315277 - RNA, 19 nt, Artificial Sequence
  Description of Artificial Sequence: Synthetic oligonucleotide
agggcagaggacaagcucu

SEQ ID NO: 2315278 - RNA, 19 nt, Artificial Sequence
  Description of Artificial Sequence: Synthetic oligonucleotide
aucgccagcuugcacuucu

SEQ ID NO: 2315279 - RNA, 19 nt, Artificial Sequence
  Description of Artificial Sequence: Synthetic oligonucleotide
agaaucucucgaucacacu

SEQ ID NO: 2315280 - RNA, 19 nt, Artificial Sequence
  Description of Artificial Sequence: Synthetic oligonucleotide
cucuacagccaaaauagcu

SEQ ID NO: 2315281 - RNA, 19 nt, Artificial Sequence
  Description of Artificial Sequence: Synthetic oligonucleotide
guugguagcgaccccagua

SEQ ID NO: 2315282 - RNA, 19 nt, Artificial Sequence
  Description of Artificial Sequence: Synthetic oligonucleotide
uaagugcuagucacuccaa

SEQ ID NO: 2315283 - RNA, 19 nt, Artificial Sequence
  Description of Artificial Sequence: Synthetic oligonucleotide
ggcaaaguccugguguugg

SEQ ID NO: 2315284 - RNA, 19 nt, Artificial Sequence
  Description of Artificial Sequence: Synthetic oligonucleotide
gcugcggacagacuccagg

SEQ ID NO: 2315285 - RNA, 19 nt, Artificial Sequence
  Description of Artificial Sequence: Synthetic oligonucleotide
ugguagcgaccccaguaca

SEQ ID NO: 2315286 - RNA, 19 nt, Artificial Sequence
  Description of Artificial Sequence: Synthetic oligonucleotide
aucuaucacugcaaggccu

SEQ ID NO: 2315287 - RNA, 19 nt, Artificial Sequence
  Description of Artificial Sequence: Synthetic oligonucleotide
guaggacugcagcaucuug

SEQ ID NO: 2315288 - RNA, 19 nt, Artificial Sequence
  Description of Artificial Sequence: Synthetic oligonucleotide
aguuggggcaagaaucucu

SEQ ID NO: 2315289 - RNA, 19 nt, Artificial Sequence
  Description of Artificial Sequence: Synthetic oligonucleotide
ggauuugcgcugaaucacg

SEQ ID NO: 2315290 - RNA, 19 nt, Artificial Sequence
  Description of Artificial Sequence: Synthetic oligonucleotide
uagcgaccccaguacaggc

SEQ ID NO: 2315291 - RNA, 19 nt, Artificial Sequence
  Description of Artificial Sequence: Synthetic oligonucleotide
cagcuaugaccuuggcccg

SEQ ID NO: 2315292 - RNA, 19 nt, Artificial Sequence
  Description of Artificial Sequence: Synthetic oligonucleotide
cuugcccguggauuugcgc

SEQ ID NO: 2315293 - RNA, 19 nt, Artificial Sequence
  Description of Artificial Sequence: Synthetic oligonucleotide
caggcugcggacagacucc

SEQ ID NO: 2315294 - RNA, 19 nt, Artificial Sequence
  Description of Artificial Sequence: Synthetic oligonucleotide
cagcaagaaagcagaacca

SEQ ID NO: 2315295 - RNA, 19 nt, Artificial Sequence
  Description of Artificial Sequence: Synthetic oligonucleotide
uggcaguaccgcagggcag

SEQ ID NO: 2315296 - RNA, 19 nt, Artificial Sequence
  Description of Artificial Sequence: Synthetic oligonucleotide
aucacguggaggaaggcau

SEQ ID NO: 2315297 - RNA, 19 nt, Artificial Sequence
  Description of Artificial Sequence: Synthetic oligonucleotide
auuugucgccacaucuauc

SEQ ID NO: 2315298 - RNA, 19 nt, Artificial Sequence
  Description of Artificial Sequence: Synthetic oligonucleotide
uucacgcuggacugugcac

SEQ ID NO: 2315299 - RNA, 19 nt, Artificial Sequence
  Description of Artificial Sequence: Synthetic oligonucleotide
cugugcaccccucugcauc

SEQ ID NO: 2315300 - RNA, 19 nt, Artificial Sequence
  Description of Artificial Sequence: Synthetic oligonucleotide
gccacauucaccccaccgc

SEQ ID NO: 2315301 - RNA, 19 nt, Artificial Sequence
  Description of Artificial Sequence: Synthetic oligonucleotide
gcaagaaagcagaaccaag

SEQ ID NO: 2315302 - RNA, 19 nt, Artificial Sequence
  Description of Artificial Sequence: Synthetic oligonucleotide
uggcccggagaacauuugu

SEQ ID NO: 2315303 - RNA, 19 nt, Artificial Sequence
  Description of Artificial Sequence: Synthetic oligonucleotide
cuguaguucacgcuggacu

SEQ ID NO: 2315304 - RNA, 19 nt, Artificial Sequence
  Description of Artificial Sequence: Synthetic oligonucleotide
uaguucacgcuggacugug

SEQ ID NO: 2315305 - RNA, 19 nt, Artificial Sequence
  Description of Artificial Sequence: Synthetic oligonucleotide
uccuccagcgaaucccaac

SEQ ID NO: 2315306 - RNA, 19 nt, Artificial Sequence
  Description of Artificial Sequence: Synthetic oligonucleotide
agauacagguaggacugca

SEQ ID NO: 2315307 - RNA, 19 nt, Artificial Sequence
  Description of Artificial Sequence: Synthetic oligonucleotide
gggaacugacaccaagaug

SEQ ID NO: 2315308 - RNA, 19 nt, Artificial Sequence
  Description of Artificial Sequence: Synthetic oligonucleotide
uucaccccaccgcugccca

SEQ ID NO: 2315309 - RNA, 19 nt, Artificial Sequence
  Description of Artificial Sequence: Synthetic oligonucleotide
gcggacagacuccaggaag

SEQ ID NO: 2315310 - RNA, 19 nt, Artificial Sequence
  Description of Artificial Sequence: Synthetic oligonucleotide
guucacgcuggacugugca

SEQ ID NO: 2315311 - RNA, 19 nt, Artificial Sequence
  Description of Artificial Sequence: Synthetic oligonucleotide
ucuggucagugaugcacuc

SEQ ID NO: 2315312 - RNA, 19 nt, Artificial Sequence
  Description of Artificial Sequence: Synthetic oligonucleotide
gcggcugucacuagaacag

SEQ ID NO: 2315313 - RNA, 19 nt, Artificial Sequence
  Description of Artificial Sequence: Synthetic oligonucleotide
ugcggacagacuccaggaa

SEQ ID NO: 2315314 - RNA, 19 nt, Artificial Sequence
  Description of Artificial Sequence: Synthetic oligonucleotide
caccaagaugcaucaccag

SEQ ID NO: 2315315 - RNA, 19 nt, Artificial Sequence
  Description of Artificial Sequence: Synthetic oligonucleotide
uuggcccggagaacauuug

SEQ ID NO: 2315316 - RNA, 19 nt, Artificial Sequence
  Description of Artificial Sequence: Synthetic oligonucleotide
gcaagaaucucucgaucac

SEQ ID NO: 2315317 - RNA, 19 nt, Artificial Sequence
  Description of Artificial Sequence: Synthetic oligonucleotide
uguugguagcgaccccagu

SEQ ID NO: 2315318 - RNA, 19 nt, Artificial Sequence
  Description of Artificial Sequence: Synthetic oligonucleotide
ucuucuggucagugaugca

SEQ ID NO: 2315319 - RNA, 19 nt, Artificial Sequence
  Description of Artificial Sequence: Synthetic oligonucleotide
ucucgaucacacugauuau

SEQ ID NO: 2315320 - RNA, 19 nt, Artificial Sequence
  Description of Artificial Sequence: Synthetic oligonucleotide
caguuugaacacagcacca

SEQ ID NO: 2315321 - RNA, 19 nt, Artificial Sequence
  Description of Artificial Sequence: Synthetic oligonucleotide
ugcacucuucagccauagc

SEQ ID NO: 2315322 - RNA, 19 nt, Artificial Sequence
  Description of Artificial Sequence: Synthetic oligonucleotide
cacgcuggacugugcaccc

SEQ ID NO: 2315323 - RNA, 19 nt, Artificial Sequence
  Description of Artificial Sequence: Synthetic oligonucleotide
cugugccguaagauacagg

SEQ ID NO: 2315324 - RNA, 19 nt, Artificial Sequence
  Description of Artificial Sequence: Synthetic oligonucleotide
uugucgccacaucuaucac

SEQ ID NO: 2315325 - RNA, 19 nt, Artificial Sequence
  Description of Artificial Sequence: Synthetic oligonucleotide
ccaggaagacaucuccucc

SEQ ID NO: 2315326 - RNA, 19 nt, Artificial Sequence
  Description of Artificial Sequence: Synthetic oligonucleotide
gagggagaucagaucccgg

SEQ ID NO: 2315327 - RNA, 19 nt, Artificial Sequence
  Description of Artificial Sequence: Synthetic oligonucleotide
ggagggagaucagaucccg

SEQ ID NO: 2315328 - RNA, 19 nt, Artificial Sequence
  Description of Artificial Sequence: Synthetic oligonucleotide
ucacguggaggaaggcauc

SEQ ID NO: 2315329 - RNA, 19 nt, Artificial Sequence
  Description of Artificial Sequence: Synthetic oligonucleotide
cuucucgucgcuuccagcu

SEQ ID NO: 2315330 - RNA, 19 nt, Artificial Sequence
  Description of Artificial Sequence: Synthetic oligonucleotide
ccggagaacauuugucgcc

SEQ ID NO: 2315331 - RNA, 19 nt, Artificial Sequence
  Description of Artificial Sequence: Synthetic oligonucleotide
cagcgaaucccaacaccac

SEQ ID NO: 2315332 - RNA, 19 nt, Artificial Sequence
  Description of Artificial Sequence: Synthetic oligonucleotide
agaggagcaccuugcccgu

SEQ ID NO: 2315333 - RNA, 19 nt, Artificial Sequence
  Description of Artificial Sequence: Synthetic oligonucleotide
aguucacgcuggacugugc

SEQ ID NO: 2315334 - RNA, 19 nt, Artificial Sequence
  Description of Artificial Sequence: Synthetic oligonucleotide
augcacucuucagccauag

SEQ ID NO: 2315335 - RNA, 19 nt, Artificial Sequence
  Description of Artificial Sequence: Synthetic oligonucleotide
ugcaccccucugcaucgcc

SEQ ID NO: 2315336 - RNA, 19 nt, Artificial Sequence
  Description of Artificial Sequence: Synthetic oligonucleotide
caaguugcugggcagagau

SEQ ID NO: 2315337 - RNA, 19 nt, Artificial Sequence
  Description of Artificial Sequence: Synthetic oligonucleotide
cuggaauccgccacaaggu

SEQ ID NO: 2315338 - RNA, 19 nt, Artificial Sequence
  Description of Artificial Sequence: Synthetic oligonucleotide
ggcggcugucacuagaaca

SEQ ID NO: 2315339 - RNA, 19 nt, Artificial Sequence
  Description of Artificial Sequence: Synthetic oligonucleotide
agcuaugaccuuggcccgg

SEQ ID NO: 2315340 - RNA, 19 nt, Artificial Sequence
  Description of Artificial Sequence: Synthetic oligonucleotide
caauggccacauucacccc

SEQ ID NO: 2315341 - RNA, 19 nt, Artificial Sequence
  Description of Artificial Sequence: Synthetic oligonucleotide
uccugccuucccacgccag

SEQ ID NO: 2315342 - RNA, 19 nt, Artificial Sequence
  Description of Artificial Sequence: Synthetic oligonucleotide
cguggauuugcgcugaauc

SEQ ID NO: 2315343 - RNA, 19 nt, Artificial Sequence
  Description of Artificial Sequence: Synthetic oligonucleotide
guugcugggcagagaugcg

SEQ ID NO: 2315344 - RNA, 19 nt, Artificial Sequence
  Description of Artificial Sequence: Synthetic oligonucleotide
ccagcgaaucccaacacca

SEQ ID NO: 2315345 - RNA, 19 nt, Artificial Sequence
  Description of Artificial Sequence: Synthetic oligonucleotide
accaaugugcgggcggaug

SEQ ID NO: 2315346 - RNA, 19 nt, Artificial Sequence
  Description of Artificial Sequence: Synthetic oligonucleotide
cugcggacagacuccagga

SEQ ID NO: 2315347 - RNA, 19 nt, Artificial Sequence
  Description of Artificial Sequence: Synthetic oligonucleotide
cauuuaagugcuagucacu

SEQ ID NO: 2315348 - RNA, 19 nt, Artificial Sequence
  Description of Artificial Sequence: Synthetic oligonucleotide
ugguguugguagcgacccc

SEQ ID NO: 2315349 - RNA, 19 nt, Artificial Sequence
  Description of Artificial Sequence: Synthetic oligonucleotide
gguagcgaccccaguacag

SEQ ID NO: 2315350 - RNA, 19 nt, Artificial Sequence
  Description of Artificial Sequence: Synthetic oligonucleotide
aaguugcugggcagagaug

SEQ ID NO: 2315351 - RNA, 19 nt, Artificial Sequence
  Description of Artificial Sequence: Synthetic oligonucleotide
acauuugucgccacaucua

SEQ ID NO: 2315352 - RNA, 19 nt, Artificial Sequence
  Description of Artificial Sequence: Synthetic oligonucleotide
caccccucugcaucgccag

SEQ ID NO: 2315353 - RNA, 19 nt, Artificial Sequence
  Description of Artificial Sequence: Synthetic oligonucleotide
agcaccuugcccguggauu

SEQ ID NO: 2315354 - RNA, 19 nt, Artificial Sequence
  Description of Artificial Sequence: Synthetic oligonucleotide
ugccuucccacgccaggcu

SEQ ID NO: 2315355 - RNA, 19 nt, Artificial Sequence
  Description of Artificial Sequence: Synthetic oligonucleotide
ggcggaugagcccuugcug

SEQ ID NO: 2315356 - RNA, 19 nt, Artificial Sequence
  Description of Artificial Sequence: Synthetic oligonucleotide
cuccagcgaaucccaacac

SEQ ID NO: 2315357 - RNA, 19 nt, Artificial Sequence
  Description of Artificial Sequence: Synthetic oligonucleotide
cccggagaacauuugucgc

SEQ ID NO: 2315358 - RNA, 19 nt, Artificial Sequence
  Description of Artificial Sequence: Synthetic oligonucleotide
guacaggcccauggcagag

SEQ ID NO: 2315359 - RNA, 19 nt, Artificial Sequence
  Description of Artificial Sequence: Synthetic oligonucleotide
aauccgccacaaggucuuc

SEQ ID NO: 2315360 - RNA, 19 nt, Artificial Sequence
  Description of Artificial Sequence: Synthetic oligonucleotide
ccaggcugcggacagacuc

SEQ ID NO: 2315361 - RNA, 19 nt, Artificial Sequence
  Description of Artificial Sequence: Synthetic oligonucleotide
cauucaccccaccgcugcc

SEQ ID NO: 2315362 - RNA, 19 nt, Artificial Sequence
  Description of Artificial Sequence: Synthetic oligonucleotide
cagagaccuuuaaaaugca

SEQ ID NO: 2315363 - RNA, 19 nt, Artificial Sequence
  Description of Artificial Sequence: Synthetic oligonucleotide
agaucagaucccgggucug

SEQ ID NO: 2315364 - RNA, 19 nt, Artificial Sequence
  Description of Artificial Sequence: Synthetic oligonucleotide
agcggcggcugucacuaga

SEQ ID NO: 2315365 - RNA, 19 nt, Artificial Sequence
  Description of Artificial Sequence: Synthetic oligonucleotide
gagcaacaaguugcugggc

SEQ ID NO: 2315366 - RNA, 19 nt, Artificial Sequence
  Description of Artificial Sequence: Synthetic oligonucleotide
cuucccacgccaggcugcg

SEQ ID NO: 2315367 - RNA, 19 nt, Artificial Sequence
  Description of Artificial Sequence: Synthetic oligonucleotide
ucucucgaucacacugauu

SEQ ID NO: 2315368 - RNA, 19 nt, Artificial Sequence
  Description of Artificial Sequence: Synthetic oligonucleotide
gaugcucuacagccaaaau

SEQ ID NO: 2315369 - RNA, 19 nt, Artificial Sequence
  Description of Artificial Sequence: Synthetic oligonucleotide
gccguaagauacagguagg

SEQ ID NO: 2315370 - RNA, 19 nt, Artificial Sequence
  Description of Artificial Sequence: Synthetic oligonucleotide
gccaaaauagcugugccgu

SEQ ID NO: 2315371 - RNA, 19 nt, Artificial Sequence
  Description of Artificial Sequence: Synthetic oligonucleotide
gcgaccccaguacaggccc

SEQ ID NO: 2315372 - RNA, 19 nt, Artificial Sequence
  Description of Artificial Sequence: Synthetic oligonucleotide
ccaaggggaacugacacca

SEQ ID NO: 2315373 - RNA, 19 nt, Artificial Sequence
  Description of Artificial Sequence: Synthetic oligonucleotide
guguugguagcgaccccag

SEQ ID NO: 2315374 - RNA, 19 nt, Artificial Sequence
  Description of Artificial Sequence: Synthetic oligonucleotide
cugcccuggcuguaguuca

SEQ ID NO: 2315375 - RNA, 19 nt, Artificial Sequence
  Description of Artificial Sequence: Synthetic oligonucleotide
agacaucuccucccaccau

SEQ ID NO: 2315376 - RNA, 19 nt, Artificial Sequence
  Description of Artificial Sequence: Synthetic oligonucleotide
cagacuccaggaagacauc

SEQ ID NO: 2315377 - RNA, 19 nt, Artificial Sequence
  Description of Artificial Sequence: Synthetic oligonucleotide
ucacugcaucuuugaggcu

SEQ ID NO: 2315378 - RNA, 19 nt, Artificial Sequence
  Description of Artificial Sequence: Synthetic oligonucleotide
gcugugccguaagauacag

SEQ ID NO: 2315379 - RNA, 19 nt, Artificial Sequence
  Description of Artificial Sequence: Synthetic oligonucleotide
cauuugucgccacaucuau

SEQ ID NO: 2315380 - RNA, 19 nt, Artificial Sequence
  Description of Artificial Sequence: Synthetic oligonucleotide
gauuugcgcugaaucacgu

SEQ ID NO: 2315381 - RNA, 19 nt, Artificial Sequence
  Description of Artificial Sequence: Synthetic oligonucleotide
acugugcaccccucugcau

SEQ ID NO: 2315382 - RNA, 19 nt, Artificial Sequence
  Description of Artificial Sequence: Synthetic oligonucleotide
caacaaguugcugggcaga

SEQ ID NO: 2315383 - RNA, 19 nt, Artificial Sequence
  Description of Artificial Sequence: Synthetic oligonucleotide
gggcaagaaucucucgauc

SEQ ID NO: 2315384 - RNA, 19 nt, Artificial Sequence
  Description of Artificial Sequence: Synthetic oligonucleotide
ugagcccuugcuggcagua

SEQ ID NO: 2315385 - RNA, 19 nt, Artificial Sequence
  Description of Artificial Sequence: Synthetic oligonucleotide
cguaagauacagguaggac

SEQ ID NO: 2315386 - RNA, 19 nt, Artificial Sequence
  Description of Artificial Sequence: Synthetic oligonucleotide
gggucugcugccuggguga

SEQ ID NO: 2315387 - RNA, 19 nt, Artificial Sequence
  Description of Artificial Sequence: Synthetic oligonucleotide
caccaugucaauggccaca

SEQ ID NO: 2315388 - RNA, 19 nt, Artificial Sequence
  Description of Artificial Sequence: Synthetic oligonucleotide
uggccacauucaccccacc

SEQ ID NO: 2315389 - RNA, 19 nt, Artificial Sequence
  Description of Artificial Sequence: Synthetic oligonucleotide
agcugugccguaagauaca

SEQ ID NO: 2315390 - RNA, 19 nt, Artificial Sequence
  Description of Artificial Sequence: Synthetic oligonucleotide
gcgcugaaucacguggagg

SEQ ID NO: 2315391 - RNA, 19 nt, Artificial Sequence
  Description of Artificial Sequence: Synthetic oligonucleotide
uaagggagaggagcaccuu

SEQ ID NO: 2315392 - RNA, 19 nt, Artificial Sequence
  Description of Artificial Sequence: Synthetic oligonucleotide
gagagacguuuucuggaau

SEQ ID NO: 2315393 - RNA, 19 nt, Artificial Sequence
  Description of Artificial Sequence: Synthetic oligonucleotide
ccuccagcgaaucccaaca

SEQ ID NO: 2315394 - RNA, 19 nt, Artificial Sequence
  Description of Artificial Sequence: Synthetic oligonucleotide
caccccaccgcugcccacc

SEQ ID NO: 2315395 - RNA, 19 nt, Artificial Sequence
  Description of Artificial Sequence: Synthetic oligonucleotide
gaauccgccacaaggucuu

SEQ ID NO: 2315396 - RNA, 19 nt, Artificial Sequence
  Description of Artificial Sequence: Synthetic oligonucleotide
cugcagcuaugaccuuggc

SEQ ID NO: 2315397 - RNA, 19 nt, Artificial Sequence
  Description of Artificial Sequence: Synthetic oligonucleotide
augagcccuugcuggcagu

SEQ ID NO: 2315398 - RNA, 19 nt, Artificial Sequence
  Description of Artificial Sequence: Synthetic oligonucleotide
gcuggcaguaccgcagggc

SEQ ID NO: 2315399 - RNA, 19 nt, Artificial Sequence
  Description of Artificial Sequence: Synthetic oligonucleotide
gccauagcauuuaagugcu

SEQ ID NO: 2315400 - RNA, 19 nt, Artificial Sequence
  Description of Artificial Sequence: Synthetic oligonucleotide
cuccaggaagacaucuccu

SEQ ID NO: 2315401 - RNA, 19 nt, Artificial Sequence
  Description of Artificial Sequence: Synthetic oligonucleotide
cacguggaggaaggcauca

SEQ ID NO: 2315402 - RNA, 19 nt, Artificial Sequence
  Description of Artificial Sequence: Synthetic oligonucleotide
cgaucacacugauuaugag

SEQ ID NO: 2315403 - RNA, 19 nt, Artificial Sequence
  Description of Artificial Sequence: Synthetic oligonucleotide
cugcaucgccagcuugcac

SEQ ID NO: 2315404 - RNA, 19 nt, Artificial Sequence
  Description of Artificial Sequence: Synthetic oligonucleotide
gcccuugcuggcaguaccg

SEQ ID NO: 2315405 - RNA, 19 nt, Artificial Sequence
  Description of Artificial Sequence: Synthetic oligonucleotide
cuuggcccggagaacauuu

SEQ ID NO: 2315406 - RNA, 19 nt, Artificial Sequence
  Description of Artificial Sequence: Synthetic oligonucleotide
gggcccgaugcucuacagc

SEQ ID NO: 2315407 - RNA, 19 nt, Artificial Sequence
  Description of Artificial Sequence: Synthetic oligonucleotide
cugggcagagaugcgaugu

SEQ ID NO: 2315408 - RNA, 19 nt, Artificial Sequence
  Description of Artificial Sequence: Synthetic oligonucleotide
cagcaccaaugugcgggcg

SEQ ID NO: 2315409 - RNA, 19 nt, Artificial Sequence
  Description of Artificial Sequence: Synthetic oligonucleotide
ccaguacaggcccauggca

SEQ ID NO: 2315410 - RNA, 19 nt, Artificial Sequence
  Description of Artificial Sequence: Synthetic oligonucleotide
gaugcacucuucagccaua

SEQ ID NO: 2315411 - RNA, 19 nt, Artificial Sequence
  Description of Artificial Sequence: Synthetic oligonucleotide
cgauguuuccuccagcgaa

SEQ ID NO: 2315412 - RNA, 19 nt, Artificial Sequence
  Description of Artificial Sequence: Synthetic oligonucleotide
ccaaugugcgggcggauga

SEQ ID NO: 2315413 - RNA, 19 nt, Artificial Sequence
  Description of Artificial Sequence: Synthetic oligonucleotide
caguaccgcagggcagagg

SEQ ID NO: 2315414 - RNA, 19 nt, Artificial Sequence
  Description of Artificial Sequence: Synthetic oligonucleotide
gcgaaucccaacaccacaa

SEQ ID NO: 2315415 - RNA, 19 nt, Artificial Sequence
  Description of Artificial Sequence: Synthetic oligonucleotide
gagcccuugcuggcaguac

SEQ ID NO: 2315416 - RNA, 19 nt, Artificial Sequence
  Description of Artificial Sequence: Synthetic oligonucleotide
cagaaccaaggggaacuga

SEQ ID NO: 2315417 - RNA, 19 nt, Artificial Sequence
  Description of Artificial Sequence: Synthetic oligonucleotide
ggaauccgccacaaggucu

SEQ ID NO: 2315418 - RNA, 19 nt, Artificial Sequence
  Description of Artificial Sequence: Synthetic oligonucleotide
gcgauguuuccuccagcga

SEQ ID NO: 2315419 - RNA, 19 nt, Artificial Sequence
  Description of Artificial Sequence: Synthetic oligonucleotide
gccacaucuaucacugcaa

SEQ ID NO: 2315420 - RNA, 19 nt, Artificial Sequence
  Description of Artificial Sequence: Synthetic oligonucleotide
ccgccacaaggucuucugg

SEQ ID NO: 2315421 - RNA, 19 nt, Artificial Sequence
  Description of Artificial Sequence: Synthetic oligonucleotide
gcuguaguucacgcuggac

SEQ ID NO: 2315422 - RNA, 19 nt, Artificial Sequence
  Description of Artificial Sequence: Synthetic oligonucleotide
ggcccggagaacauuuguc

SEQ ID NO: 2315423 - RNA, 19 nt, Artificial Sequence
  Description of Artificial Sequence: Synthetic oligonucleotide
ggggcaagaaucucucgau

SEQ ID NO: 2315424 - RNA, 19 nt, Artificial Sequence
  Description of Artificial Sequence: Synthetic oligonucleotide
gggagaucagaucccgggu

SEQ ID NO: 2315425 - RNA, 19 nt, Artificial Sequence
  Description of Artificial Sequence: Synthetic oligonucleotide
cugcaucuuugaggcugcc

SEQ ID NO: 2315426 - RNA, 19 nt, Artificial Sequence
  Description of Artificial Sequence: Synthetic oligonucleotide
cacugauuaugagcagcaa

SEQ ID NO: 2315427 - RNA, 19 nt, Artificial Sequence
  Description of Artificial Sequence: Synthetic oligonucleotide
cggacagacuccaggaaga

SEQ ID NO: 2315428 - RNA, 19 nt, Artificial Sequence
  Description of Artificial Sequence: Synthetic oligonucleotide
guaguucacgcuggacugu

SEQ ID NO: 2315429 - RNA, 19 nt, Artificial Sequence
  Description of Artificial Sequence: Synthetic oligonucleotide
ccacaauccugccuuccca

SEQ ID NO: 2315430 - RNA, 19 nt, Artificial Sequence
  Description of Artificial Sequence: Synthetic oligonucleotide
acguggaggaaggcaucau

SEQ ID NO: 2315431 - RNA, 19 nt, Artificial Sequence
  Description of Artificial Sequence: Synthetic oligonucleotide
gagcagaguuggggcaaga

SEQ ID NO: 2315432 - RNA, 19 nt, Artificial Sequence
  Description of Artificial Sequence: Synthetic oligonucleotide
cggaugagcccuugcuggc

SEQ ID NO: 2315433 - RNA, 19 nt, Artificial Sequence
  Description of Artificial Sequence: Synthetic oligonucleotide
ugcgggcccgaugcucuac

SEQ ID NO: 2315434 - RNA, 19 nt, Artificial Sequence
  Description of Artificial Sequence: Synthetic oligonucleotide
cguuuucuggaauccgcca

SEQ ID NO: 2315435 - RNA, 19 nt, Artificial Sequence
  Description of Artificial Sequence: Synthetic oligonucleotide
accgcagggcagaggacaa

SEQ ID NO: 2315436 - RNA, 19 nt, Artificial Sequence
  Description of Artificial Sequence: Synthetic oligonucleotide
gugccguaagauacaggua

SEQ ID NO: 2315437 - RNA, 19 nt, Artificial Sequence
  Description of Artificial Sequence: Synthetic oligonucleotide
ccguaagauacagguagga

SEQ ID NO: 2315438 - RNA, 19 nt, Artificial Sequence
  Description of Artificial Sequence: Synthetic oligonucleotide
cgccacaucuaucacugca

SEQ ID NO: 2315439 - RNA, 19 nt, Artificial Sequence
  Description of Artificial Sequence: Synthetic oligonucleotide
ccuugcuggcaguaccgca

SEQ ID NO: 2315440 - RNA, 19 nt, Artificial Sequence
  Description of Artificial Sequence: Synthetic oligonucleotide
cgccagcuugcacuucucg

SEQ ID NO: 2315441 - RNA, 19 nt, Artificial Sequence
  Description of Artificial Sequence: Synthetic oligonucleotide
ggagcaccuugcccgugga

SEQ ID NO: 2315442 - RNA, 19 nt, Artificial Sequence
  Description of Artificial Sequence: Synthetic oligonucleotide
gcaccaaugugcgggcgga

SEQ ID NO: 2315443 - RNA, 19 nt, Artificial Sequence
  Description of Artificial Sequence: Synthetic oligonucleotide
cccgaugcucuacagccaa

SEQ ID NO: 2315444 - RNA, 19 nt, Artificial Sequence
  Description of Artificial Sequence: Synthetic oligonucleotide
ggucagugaggaagacaga

SEQ ID NO: 2315445 - RNA, 19 nt, Artificial Sequence
  Description of Artificial Sequence: Synthetic oligonucleotide
gcugaaucacguggaggaa

SEQ ID NO: 2315446 - RNA, 19 nt, Artificial Sequence
  Description of Artificial Sequence: Synthetic oligonucleotide
gggcggaugagcccuugcu

SEQ ID NO: 2315447 - RNA, 19 nt, Artificial Sequence
  Description of Artificial Sequence: Synthetic oligonucleotide
ccaaaauagcugugccgua

SEQ ID NO: 2315448 - RNA, 19 nt, Artificial Sequence
  Description of Artificial Sequence: Synthetic oligonucleotide
gcugucacuagaacaguuu

SEQ ID NO: 2315449 - RNA, 19 nt, Artificial Sequence
  Description of Artificial Sequence: Synthetic oligonucleotide
gcaguaccgcagggcagag

SEQ ID NO: 2315450 - RNA, 19 nt, Artificial Sequence
  Description of Artificial Sequence: Synthetic oligonucleotide
gaucccgggucugcugccu

SEQ ID NO: 2315451 - RNA, 19 nt, Artificial Sequence
  Description of Artificial Sequence: Synthetic oligonucleotide
cgggucugcugccugggug

SEQ ID NO: 2315452 - RNA, 19 nt, Artificial Sequence
  Description of Artificial Sequence: Synthetic oligonucleotide
cccuugcuggcaguaccgc

SEQ ID NO: 2315453 - RNA, 19 nt, Artificial Sequence
  Description of Artificial Sequence: Synthetic oligonucleotide
cuggucagugaugcacucu

SEQ ID NO: 2315454 - RNA, 19 nt, Artificial Sequence
  Description of Artificial Sequence: Synthetic oligonucleotide
gugcgggcggaugagcccu

SEQ ID NO: 2315455 - RNA, 19 nt, Artificial Sequence
  Description of Artificial Sequence: Synthetic oligonucleotide
ugcgggcggaugagcccuu

SEQ ID NO: 2315456 - RNA, 19 nt, Artificial Sequence
  Description of Artificial Sequence: Synthetic oligonucleotide
caucgccagcuugcacuuc

SEQ ID NO: 2315457 - RNA, 19 nt, Artificial Sequence
  Description of Artificial Sequence: Synthetic oligonucleotide
cggagaacauuugucgcca

SEQ ID NO: 2315458 - RNA, 19 nt, Artificial Sequence
  Description of Artificial Sequence: Synthetic oligonucleotide
gcaccuugcccguggauuu

SEQ ID NO: 2315459 - RNA, 19 nt, Artificial Sequence
  Description of Artificial Sequence: Synthetic oligonucleotide
cagcggcggcugucacuag

SEQ ID NO: 2315460 - RNA, 19 nt, Artificial Sequence
  Description of Artificial Sequence: Synthetic oligonucleotide
gcacuucucgucgcuucca

SEQ ID NO: 2315461 - RNA, 19 nt, Artificial Sequence
  Description of Artificial Sequence: Synthetic oligonucleotide
ggugcgggcccgaugcucu

SEQ ID NO: 2315462 - RNA, 19 nt, Artificial Sequence
  Description of Artificial Sequence: Synthetic oligonucleotide
cuaucacugcaaggccugu

SEQ ID NO: 2315463 - RNA, 19 nt, Artificial Sequence
  Description of Artificial Sequence: Synthetic oligonucleotide
cccacgccaggcugcggac

SEQ ID NO: 2315464 - RNA, 19 nt, Artificial Sequence
  Description of Artificial Sequence: Synthetic oligonucleotide
ccagcggcggcugucacua

SEQ ID NO: 2315465 - RNA, 19 nt, Artificial Sequence
  Description of Artificial Sequence: Synthetic oligonucleotide
cccgggucugcugccuggg

SEQ ID NO: 2315466 - RNA, 19 nt, Artificial Sequence
  Description of Artificial Sequence: Synthetic oligonucleotide
gaccccaguacaggcccau

SEQ ID NO: 2315467 - RNA, 19 nt, Artificial Sequence
  Description of Artificial Sequence: Synthetic oligonucleotide
cgaugcucuacagccaaaa

SEQ ID NO: 2315468 - RNA, 19 nt, Artificial Sequence
  Description of Artificial Sequence: Synthetic oligonucleotide
ggcugcggacagacuccag

SEQ ID NO: 2315469 - RNA, 19 nt, Artificial Sequence
  Description of Artificial Sequence: Synthetic oligonucleotide
gcggcggcugucacuagaa

SEQ ID NO: 2315470 - RNA, 19 nt, Artificial Sequence
  Description of Artificial Sequence: Synthetic oligonucleotide
gcaucgccagcuugcacuu

SEQ ID NO: 2315471 - RNA, 19 nt, Artificial Sequence
  Description of Artificial Sequence: Synthetic oligonucleotide
gcccgaugcucuacagcca

SEQ ID NO: 2315472 - RNA, 19 nt, Artificial Sequence
  Description of Artificial Sequence: Synthetic oligonucleotide
cgggcccgaugcucuacag

SEQ ID NO: 2315473 - RNA, 19 nt, Artificial Sequence
  Description of Artificial Sequence: Synthetic oligonucleotide
gcccguggauuugcgcuga

SEQ ID NO: 2315474 - RNA, 19 nt, Artificial Sequence
  Description of Artificial Sequence: Synthetic oligonucleotide
cgggcggaugagcccuugc

SEQ ID NO: 2315475 - RNA, 19 nt, Artificial Sequence
  Description of Artificial Sequence: Synthetic oligonucleotide
gugcgggcccgaugcucua

SEQ ID NO: 2315476 - RNA, 19 nt, Artificial Sequence
  Description of Artificial Sequence: Synthetic oligonucleotide
cugccugggugaggaguua

SEQ ID NO: 2315477 - RNA, 19 nt, Artificial Sequence
  Description of Artificial Sequence: Synthetic oligonucleotide
ccauagcauuuaagugcua

SEQ ID NO: 2315478 - RNA, 19 nt, Artificial Sequence
  Description of Artificial Sequence: Synthetic oligonucleotide
ccgaugcucuacagccaaa

SEQ ID NO: 2315479 - RNA, 19 nt, Artificial Sequence
  Description of Artificial Sequence: Synthetic oligonucleotide
cggcggcugucacuagaac

SEQ ID NO: 2315480 - RNA, 19 nt, Artificial Sequence
  Description of Artificial Sequence: Synthetic oligonucleotide
gcgggcggaugagcccuug

SEQ ID NO: 2315481 - RNA, 19 nt, Artificial Sequence
  Description of Artificial Sequence: Synthetic oligonucleotide
ccacgccaggcugcggaca

SEQ ID NO: 2315482 - RNA, 19 nt, Artificial Sequence
  Description of Artificial Sequence: Synthetic oligonucleotide
caccaaugugcgggcggau

SEQ ID NO: 2315483 - RNA, 19 nt, Artificial Sequence
  Description of Artificial Sequence: Synthetic oligonucleotide
cccguggauuugcgcugaa

SEQ ID NO: 2315484 - RNA, 19 nt, Artificial Sequence
  Description of Artificial Sequence: Synthetic oligonucleotide
ccguggauuugcgcugaau

SEQ ID NO: 2315485 - RNA, 19 nt, Artificial Sequence
  Description of Artificial Sequence: Synthetic oligonucleotide
cggcugucacuagaacagu

SEQ ID NO: 2315486 - RNA, 19 nt, Artificial Sequence
  Description of Artificial Sequence: Synthetic oligonucleotide
ccgggucugcugccugggu

SEQ ID NO: 2315487 - RNA, 19 nt, Artificial Sequence
  Description of Artificial Sequence: Synthetic oligonucleotide
aauucaacggcuucuuccc

SEQ ID NO: 2315488 - RNA, 19 nt, Artificial Sequence
  Description of Artificial Sequence: Synthetic oligonucleotide
aauauuauucaggugugcc

SEQ ID NO: 2315489 - RNA, 19 nt, Artificial Sequence
  Description of Artificial Sequence: Synthetic oligonucleotide
aagaggaaagguucaaacc

SEQ ID NO: 2315490 - RNA, 19 nt, Artificial Sequence
  Description of Artificial Sequence: Synthetic oligonucleotide
aaaagcagcagccagguca

SEQ ID NO: 2315491 - RNA, 19 nt, Artificial Sequence
  Description of Artificial Sequence: Synthetic oligonucleotide
aauucugcaaugucaacuc

SEQ ID NO: 2315492 - RNA, 19 nt, Artificial Sequence
  Description of Artificial Sequence: Synthetic oligonucleotide
aauuucagcugucagagca

SEQ ID NO: 2315493 - RNA, 19 nt, Artificial Sequence
  Description of Artificial Sequence: Synthetic oligonucleotide
auuuguucuaagcugcugc

SEQ ID NO: 2315494 - RNA, 19 nt, Artificial Sequence
  Description of Artificial Sequence: Synthetic oligonucleotide
acaucaauggcauggagac

SEQ ID NO: 2315495 - RNA, 19 nt, Artificial Sequence
  Description of Artificial Sequence: Synthetic oligonucleotide
aagucuucuacccauagcu

SEQ ID NO: 2315496 - RNA, 19 nt, Artificial Sequence
  Description of Artificial Sequence: Synthetic oligonucleotide
aucgauaagucuucuaccc

SEQ ID NO: 2315497 - RNA, 19 nt, Artificial Sequence
  Description of Artificial Sequence: Synthetic oligonucleotide
aaugucaacucagcaaucc

SEQ ID NO: 2315498 - RNA, 19 nt, Artificial Sequence
  Description of Artificial Sequence: Synthetic oligonucleotide
uuaucgauaagucuucuac

SEQ ID NO: 2315499 - RNA, 19 nt, Artificial Sequence
  Description of Artificial Sequence: Synthetic oligonucleotide
gacauuacugcuuacaaca

SEQ ID NO: 2315500 - RNA, 19 nt, Artificial Sequence
  Description of Artificial Sequence: Synthetic oligonucleotide
uucaggugugccuugaugg

SEQ ID NO: 2315501 - RNA, 19 nt, Artificial Sequence
  Description of Artificial Sequence: Synthetic oligonucleotide
aguuauuuaucacaggaca

SEQ ID NO: 2315502 - RNA, 19 nt, Artificial Sequence
  Description of Artificial Sequence: Synthetic oligonucleotide
ucuguagugaccauguacu

SEQ ID NO: 2315503 - RNA, 19 nt, Artificial Sequence
  Description of Artificial Sequence: Synthetic oligonucleotide
acugcuuacaacaggaacc

SEQ ID NO: 2315504 - RNA, 19 nt, Artificial Sequence
  Description of Artificial Sequence: Synthetic oligonucleotide
uacauuaucgauaagucuu

SEQ ID NO: 2315505 - RNA, 19 nt, Artificial Sequence
  Description of Artificial Sequence: Synthetic oligonucleotide
gauucaaguucucuguggg

SEQ ID NO: 2315506 - RNA, 19 nt, Artificial Sequence
  Description of Artificial Sequence: Synthetic oligonucleotide
uguacuauugccucauuug

SEQ ID NO: 2315507 - RNA, 19 nt, Artificial Sequence
  Description of Artificial Sequence: Synthetic oligonucleotide
acuauugccucauuuguuc

SEQ ID NO: 2315508 - RNA, 19 nt, Artificial Sequence
  Description of Artificial Sequence: Synthetic oligonucleotide
uuaauggcaugugugagcg

SEQ ID NO: 2315509 - RNA, 19 nt, Artificial Sequence
  Description of Artificial Sequence: Synthetic oligonucleotide
ucuacauuaucgauaaguc

SEQ ID NO: 2315510 - RNA, 19 nt, Artificial Sequence
  Description of Artificial Sequence: Synthetic oligonucleotide
ugugugagcgauauaagcu

SEQ ID NO: 2315511 - RNA, 19 nt, Artificial Sequence
  Description of Artificial Sequence: Synthetic oligonucleotide
uuccuguggaaauucaacg

SEQ ID NO: 2315512 - RNA, 19 nt, Artificial Sequence
  Description of Artificial Sequence: Synthetic oligonucleotide
ucugagaggggacugaaca

SEQ ID NO: 2315513 - RNA, 19 nt, Artificial Sequence
  Description of Artificial Sequence: Synthetic oligonucleotide
aucuguagugaccauguac

SEQ ID NO: 2315514 - RNA, 19 nt, Artificial Sequence
  Description of Artificial Sequence: Synthetic oligonucleotide
uggagauugaacuacugga

SEQ ID NO: 2315515 - RNA, 19 nt, Artificial Sequence
  Description of Artificial Sequence: Synthetic oligonucleotide
cugagauaguuuaacaggc

SEQ ID NO: 2315516 - RNA, 19 nt, Artificial Sequence
  Description of Artificial Sequence: Synthetic oligonucleotide
uuauuggccagauucaagu

SEQ ID NO: 2315517 - RNA, 19 nt, Artificial Sequence
  Description of Artificial Sequence: Synthetic oligonucleotide
aacaguucuccucaggaga

SEQ ID NO: 2315518 - RNA, 19 nt, Artificial Sequence
  Description of Artificial Sequence: Synthetic oligonucleotide
uaguuuaacaggcaacucu

SEQ ID NO: 2315519 - RNA, 19 nt, Artificial Sequence
  Description of Artificial Sequence: Synthetic oligonucleotide
cucauuuguucuaagcugc

SEQ ID NO: 2315520 - RNA, 19 nt, Artificial Sequence
  Description of Artificial Sequence: Synthetic oligonucleotide
aguaauuucagcugucaga

SEQ ID NO: 2315521 - RNA, 19 nt, Artificial Sequence
  Description of Artificial Sequence: Synthetic oligonucleotide
aaguaauuucagcugucag

SEQ ID NO: 2315522 - RNA, 19 nt, Artificial Sequence
  Description of Artificial Sequence: Synthetic oligonucleotide
agcaggacgagucugaaca

SEQ ID NO: 2315523 - RNA, 19 nt, Artificial Sequence
  Description of Artificial Sequence: Synthetic oligonucleotide
agcaguuuugcugcgagcc

SEQ ID NO: 2315524 - RNA, 19 nt, Artificial Sequence
  Description of Artificial Sequence: Synthetic oligonucleotide
acuauguucuucucugagg

SEQ ID NO: 2315525 - RNA, 19 nt, Artificial Sequence
  Description of Artificial Sequence: Synthetic oligonucleotide
gauugaacuacuggaaaag

SEQ ID NO: 2315526 - RNA, 19 nt, Artificial Sequence
  Description of Artificial Sequence: Synthetic oligonucleotide
uuugcugcgagccuccaug

SEQ ID NO: 2315527 - RNA, 19 nt, Artificial Sequence
  Description of Artificial Sequence: Synthetic oligonucleotide
ugacccgacaauauuauuc

SEQ ID NO: 2315528 - RNA, 19 nt, Artificial Sequence
  Description of Artificial Sequence: Synthetic oligonucleotide
agacauuacugcuuacaac

SEQ ID NO: 2315529 - RNA, 19 nt, Artificial Sequence
  Description of Artificial Sequence: Synthetic oligonucleotide
acacagguguucuugauug

SEQ ID NO: 2315530 - RNA, 19 nt, Artificial Sequence
  Description of Artificial Sequence: Synthetic oligonucleotide
agauucaaguucucugugg

SEQ ID NO: 2315531 - RNA, 19 nt, Artificial Sequence
  Description of Artificial Sequence: Synthetic oligonucleotide
auugaacuacuggaaaagc

SEQ ID NO: 2315532 - RNA, 19 nt, Artificial Sequence
  Description of Artificial Sequence: Synthetic oligonucleotide
uaucgauaagucuucuacc

SEQ ID NO: 2315533 - RNA, 19 nt, Artificial Sequence
  Description of Artificial Sequence: Synthetic oligonucleotide
ugguguuaacaucacagcu

SEQ ID NO: 2315534 - RNA, 19 nt, Artificial Sequence
  Description of Artificial Sequence: Synthetic oligonucleotide
uacuauguucuucucugag

SEQ ID NO: 2315535 - RNA, 19 nt, Artificial Sequence
  Description of Artificial Sequence: Synthetic oligonucleotide
auauaagcugcucaucugu

SEQ ID NO: 2315536 - RNA, 19 nt, Artificial Sequence
  Description of Artificial Sequence: Synthetic oligonucleotide
uguucuaagcugcugccca

SEQ ID NO: 2315537 - RNA, 19 nt, Artificial Sequence
  Description of Artificial Sequence: Synthetic oligonucleotide
ucugcaaugucaacucagc

SEQ ID NO: 2315538 - RNA, 19 nt, Artificial Sequence
  Description of Artificial Sequence: Synthetic oligonucleotide
cuuaauggcaugugugagc

SEQ ID NO: 2315539 - RNA, 19 nt, Artificial Sequence
  Description of Artificial Sequence: Synthetic oligonucleotide
uaacaggcaacucuuccug

SEQ ID NO: 2315540 - RNA, 19 nt, Artificial Sequence
  Description of Artificial Sequence: Synthetic oligonucleotide
uugauugcuguucucuaug

SEQ ID NO: 2315541 - RNA, 19 nt, Artificial Sequence
  Description of Artificial Sequence: Synthetic oligonucleotide
uuaacaucacagcuggcuc

SEQ ID NO: 2315542 - RNA, 19 nt, Artificial Sequence
  Description of Artificial Sequence: Synthetic oligonucleotide
uuuguucuaagcugcugcc

SEQ ID NO: 2315543 - RNA, 19 nt, Artificial Sequence
  Description of Artificial Sequence: Synthetic oligonucleotide
uuugcuuggcucccgaagu

SEQ ID NO: 2315544 - RNA, 19 nt, Artificial Sequence
  Description of Artificial Sequence: Synthetic oligonucleotide
uuauuuaucacaggacagu

SEQ ID NO: 2315545 - RNA, 19 nt, Artificial Sequence
  Description of Artificial Sequence: Synthetic oligonucleotide
gauauaagcugcucaucug

SEQ ID NO: 2315546 - RNA, 19 nt, Artificial Sequence
  Description of Artificial Sequence: Synthetic oligonucleotide
uuaacaggcaacucuuccu

SEQ ID NO: 2315547 - RNA, 19 nt, Artificial Sequence
  Description of Artificial Sequence: Synthetic oligonucleotide
uuccuuuguacuauugccu

SEQ ID NO: 2315548 - RNA, 19 nt, Artificial Sequence
  Description of Artificial Sequence: Synthetic oligonucleotide
ucugaggagaaguaauuuc

SEQ ID NO: 2315549 - RNA, 19 nt, Artificial Sequence
  Description of Artificial Sequence: Synthetic oligonucleotide
uguucuugauugcuguucu

SEQ ID NO: 2315550 - RNA, 19 nt, Artificial Sequence
  Description of Artificial Sequence: Synthetic oligonucleotide
uggugaagaggaaagguuc

SEQ ID NO: 2315551 - RNA, 19 nt, Artificial Sequence
  Description of Artificial Sequence: Synthetic oligonucleotide
auauuauucaggugugccu

SEQ ID NO: 2315552 - RNA, 19 nt, Artificial Sequence
  Description of Artificial Sequence: Synthetic oligonucleotide
uacugcuuacaacaggaac

SEQ ID NO: 2315553 - RNA, 19 nt, Artificial Sequence
  Description of Artificial Sequence: Synthetic oligonucleotide
ugagaggggacugaacagg

SEQ ID NO: 2315554 - RNA, 19 nt, Artificial Sequence
  Description of Artificial Sequence: Synthetic oligonucleotide
cuggagauugaacuacugg

SEQ ID NO: 2315555 - RNA, 19 nt, Artificial Sequence
  Description of Artificial Sequence: Synthetic oligonucleotide
ucuucuacccauagcugcc

SEQ ID NO: 2315556 - RNA, 19 nt, Artificial Sequence
  Description of Artificial Sequence: Synthetic oligonucleotide
aaaauaugugcugggaaau

SEQ ID NO: 2315557 - RNA, 19 nt, Artificial Sequence
  Description of Artificial Sequence: Synthetic oligonucleotide
aacucagcaauccguguca

SEQ ID NO: 2315558 - RNA, 19 nt, Artificial Sequence
  Description of Artificial Sequence: Synthetic oligonucleotide
ccugagauaguuuaacagg

SEQ ID NO: 2315559 - RNA, 19 nt, Artificial Sequence
  Description of Artificial Sequence: Synthetic oligonucleotide
cucuaugacuuccacagug

SEQ ID NO: 2315560 - RNA, 19 nt, Artificial Sequence
  Description of Artificial Sequence: Synthetic oligonucleotide
ugucaacucagcaauccgu

SEQ ID NO: 2315561 - RNA, 19 nt, Artificial Sequence
  Description of Artificial Sequence: Synthetic oligonucleotide
cuugauggcugaauucugc

SEQ ID NO: 2315562 - RNA, 19 nt, Artificial Sequence
  Description of Artificial Sequence: Synthetic oligonucleotide
ugucagagcaucgaugagc

SEQ ID NO: 2315563 - RNA, 19 nt, Artificial Sequence
  Description of Artificial Sequence: Synthetic oligonucleotide
agauaguuuaacaggcaac

SEQ ID NO: 2315564 - RNA, 19 nt, Artificial Sequence
  Description of Artificial Sequence: Synthetic oligonucleotide
auaagucuucuacccauag

SEQ ID NO: 2315565 - RNA, 19 nt, Artificial Sequence
  Description of Artificial Sequence: Synthetic oligonucleotide
auuacugcuuacaacagga

SEQ ID NO: 2315566 - RNA, 19 nt, Artificial Sequence
  Description of Artificial Sequence: Synthetic oligonucleotide
ucuuaauggcaugugugag

SEQ ID NO: 2315567 - RNA, 19 nt, Artificial Sequence
  Description of Artificial Sequence: Synthetic oligonucleotide
cacaggacaguucuuaaug

SEQ ID NO: 2315568 - RNA, 19 nt, Artificial Sequence
  Description of Artificial Sequence: Synthetic oligonucleotide
aguucuuaauggcaugugu

SEQ ID NO: 2315569 - RNA, 19 nt, Artificial Sequence
  Description of Artificial Sequence: Synthetic oligonucleotide
ggaguuauuuaucacagga

SEQ ID NO: 2315570 - RNA, 19 nt, Artificial Sequence
  Description of Artificial Sequence: Synthetic oligonucleotide
gaggagaaguaauuucagc

SEQ ID NO: 2315571 - RNA, 19 nt, Artificial Sequence
  Description of Artificial Sequence: Synthetic oligonucleotide
ugagauaguuuaacaggca

SEQ ID NO: 2315572 - RNA, 19 nt, Artificial Sequence
  Description of Artificial Sequence: Synthetic oligonucleotide
gaacaguucuccucaggag

SEQ ID NO: 2315573 - RNA, 19 nt, Artificial Sequence
  Description of Artificial Sequence: Synthetic oligonucleotide
uaagucuucuacccauagc

SEQ ID NO: 2315574 - RNA, 19 nt, Artificial Sequence
  Description of Artificial Sequence: Synthetic oligonucleotide
ugcuacuuggugcuggaga

SEQ ID NO: 2315575 - RNA, 19 nt, Artificial Sequence
  Description of Artificial Sequence: Synthetic oligonucleotide
agauugaacuacuggaaaa

SEQ ID NO: 2315576 - RNA, 19 nt, Artificial Sequence
  Description of Artificial Sequence: Synthetic oligonucleotide
aauggcaugugugagcgau

SEQ ID NO: 2315577 - RNA, 19 nt, Artificial Sequence
  Description of Artificial Sequence: Synthetic oligonucleotide
auaagcugcucaucuguag

SEQ ID NO: 2315578 - RNA, 19 nt, Artificial Sequence
  Description of Artificial Sequence: Synthetic oligonucleotide
auucaaguucucugugggg

SEQ ID NO: 2315579 - RNA, 19 nt, Artificial Sequence
  Description of Artificial Sequence: Synthetic oligonucleotide
augucaacucagcaauccg

SEQ ID NO: 2315580 - RNA, 19 nt, Artificial Sequence
  Description of Artificial Sequence: Synthetic oligonucleotide
aauuccgaguugcucuucu

SEQ ID NO: 2315581 - RNA, 19 nt, Artificial Sequence
  Description of Artificial Sequence: Synthetic oligonucleotide
ggugguguuaacaucacag

SEQ ID NO: 2315582 - RNA, 19 nt, Artificial Sequence
  Description of Artificial Sequence: Synthetic oligonucleotide
accucuacauuaucgauaa

SEQ ID NO: 2315583 - RNA, 19 nt, Artificial Sequence
  Description of Artificial Sequence: Synthetic oligonucleotide
cuauguucuucucugagga

SEQ ID NO: 2315584 - RNA, 19 nt, Artificial Sequence
  Description of Artificial Sequence: Synthetic oligonucleotide
uguagugaccauguacugc

SEQ ID NO: 2315585 - RNA, 19 nt, Artificial Sequence
  Description of Artificial Sequence: Synthetic oligonucleotide
gugugagcgauauaagcug

SEQ ID NO: 2315586 - RNA, 19 nt, Artificial Sequence
  Description of Artificial Sequence: Synthetic oligonucleotide
ucugcaauccguuccucca

SEQ ID NO: 2315587 - RNA, 19 nt, Artificial Sequence
  Description of Artificial Sequence: Synthetic oligonucleotide
uggaguuauuuaucacagg

SEQ ID NO: 2315588 - RNA, 19 nt, Artificial Sequence
  Description of Artificial Sequence: Synthetic oligonucleotide
uugcuguucucuaugacuu

SEQ ID NO: 2315589 - RNA, 19 nt, Artificial Sequence
  Description of Artificial Sequence: Synthetic oligonucleotide
ucagcaauccgugucauua

SEQ ID NO: 2315590 - RNA, 19 nt, Artificial Sequence
  Description of Artificial Sequence: Synthetic oligonucleotide
gacccgacaauauuauuca

SEQ ID NO: 2315591 - RNA, 19 nt, Artificial Sequence
  Description of Artificial Sequence: Synthetic oligonucleotide
agcuggagcaguuuugcug

SEQ ID NO: 2315592 - RNA, 19 nt, Artificial Sequence
  Description of Artificial Sequence: Synthetic oligonucleotide
ggauucguggagcaggacg

SEQ ID NO: 2315593 - RNA, 19 nt, Artificial Sequence
  Description of Artificial Sequence: Synthetic oligonucleotide
aggaaccucuacauuaucg

SEQ ID NO: 2315594 - RNA, 19 nt, Artificial Sequence
  Description of Artificial Sequence: Synthetic oligonucleotide
aauuauuggccagauucaa

SEQ ID NO: 2315595 - RNA, 19 nt, Artificial Sequence
  Description of Artificial Sequence: Synthetic oligonucleotide
gauaguuuaacaggcaacu

SEQ ID NO: 2315596 - RNA, 19 nt, Artificial Sequence
  Description of Artificial Sequence: Synthetic oligonucleotide
aauccguuccuccaugcua

SEQ ID NO: 2315597 - RNA, 19 nt, Artificial Sequence
  Description of Artificial Sequence: Synthetic oligonucleotide
ucgauaagucuucuaccca

SEQ ID NO: 2315598 - RNA, 19 nt, Artificial Sequence
  Description of Artificial Sequence: Synthetic oligonucleotide
aauaugugcugggaaauua

SEQ ID NO: 2315599 - RNA, 19 nt, Artificial Sequence
  Description of Artificial Sequence: Synthetic oligonucleotide
gagauaguuuaacaggcaa

SEQ ID NO: 2315600 - RNA, 19 nt, Artificial Sequence
  Description of Artificial Sequence: Synthetic oligonucleotide
uagcugcccguucugaugc

SEQ ID NO: 2315601 - RNA, 19 nt, Artificial Sequence
  Description of Artificial Sequence: Synthetic oligonucleotide
auucaacggcuucuucccc

SEQ ID NO: 2315602 - RNA, 19 nt, Artificial Sequence
  Description of Artificial Sequence: Synthetic oligonucleotide
ugguacuauguucuucucu

SEQ ID NO: 2315603 - RNA, 19 nt, Artificial Sequence
  Description of Artificial Sequence: Synthetic oligonucleotide
uucagcugucagagcaucg

SEQ ID NO: 2315604 - RNA, 19 nt, Artificial Sequence
  Description of Artificial Sequence: Synthetic oligonucleotide
uauguccuuccuuuguacu

SEQ ID NO: 2315605 - RNA, 19 nt, Artificial Sequence
  Description of Artificial Sequence: Synthetic oligonucleotide
uccgaguugcucuucugcc

SEQ ID NO: 2315606 - RNA, 19 nt, Artificial Sequence
  Description of Artificial Sequence: Synthetic oligonucleotide
gagaauuccgaguugcucu

SEQ ID NO: 2315607 - RNA, 19 nt, Artificial Sequence
  Description of Artificial Sequence: Synthetic oligonucleotide
cuggaaaagcagcagccag

SEQ ID NO: 2315608 - RNA, 19 nt, Artificial Sequence
  Description of Artificial Sequence: Synthetic oligonucleotide
uugauggcugaauucugca

SEQ ID NO: 2315609 - RNA, 19 nt, Artificial Sequence
  Description of Artificial Sequence: Synthetic oligonucleotide
ugauugcuguucucuauga

SEQ ID NO: 2315610 - RNA, 19 nt, Artificial Sequence
  Description of Artificial Sequence: Synthetic oligonucleotide
uguacugcugaagucucgc

SEQ ID NO: 2315611 - RNA, 19 nt, Artificial Sequence
  Description of Artificial Sequence: Synthetic oligonucleotide
aacacagguguucuugauu

SEQ ID NO: 2315612 - RNA, 19 nt, Artificial Sequence
  Description of Artificial Sequence: Synthetic oligonucleotide
agcgauauaagcugcucau

SEQ ID NO: 2315613 - RNA, 19 nt, Artificial Sequence
  Description of Artificial Sequence: Synthetic oligonucleotide
acauuaucgauaagucuuc

SEQ ID NO: 2315614 - RNA, 19 nt, Artificial Sequence
  Description of Artificial Sequence: Synthetic oligonucleotide
guuugcuuggcucccgaag

SEQ ID NO: 2315615 - RNA, 19 nt, Artificial Sequence
  Description of Artificial Sequence: Synthetic oligonucleotide
uggaaauucaacggcuucu

SEQ ID NO: 2315616 - RNA, 19 nt, Artificial Sequence
  Description of Artificial Sequence: Synthetic oligonucleotide
gaguuauuuaucacaggac

SEQ ID NO: 2315617 - RNA, 19 nt, Artificial Sequence
  Description of Artificial Sequence: Synthetic oligonucleotide
gugguguuaacaucacagc

SEQ ID NO: 2315618 - RNA, 19 nt, Artificial Sequence
  Description of Artificial Sequence: Synthetic oligonucleotide
gagauugaacuacuggaaa

SEQ ID NO: 2315619 - RNA, 19 nt, Artificial Sequence
  Description of Artificial Sequence: Synthetic oligonucleotide
caugugugagcgauauaag

SEQ ID NO: 2315620 - RNA, 19 nt, Artificial Sequence
  Description of Artificial Sequence: Synthetic oligonucleotide
uguucucuaugacuuccac

SEQ ID NO: 2315621 - RNA, 19 nt, Artificial Sequence
  Description of Artificial Sequence: Synthetic oligonucleotide
uuguacuauugccucauuu

SEQ ID NO: 2315622 - RNA, 19 nt, Artificial Sequence
  Description of Artificial Sequence: Synthetic oligonucleotide
aaccaacaaguuucugcug

SEQ ID NO: 2315623 - RNA, 19 nt, Artificial Sequence
  Description of Artificial Sequence: Synthetic oligonucleotide
acuacuggaaaagcagcag

SEQ ID NO: 2315624 - RNA, 19 nt, Artificial Sequence
  Description of Artificial Sequence: Synthetic oligonucleotide
auggcugaauucugcaaug

SEQ ID NO: 2315625 - RNA, 19 nt, Artificial Sequence
  Description of Artificial Sequence: Synthetic oligonucleotide
uucuacccauagcugcccg

SEQ ID NO: 2315626 - RNA, 19 nt, Artificial Sequence
  Description of Artificial Sequence: Synthetic oligonucleotide
uguucucccacugacccga

SEQ ID NO: 2315627 - RNA, 19 nt, Artificial Sequence
  Description of Artificial Sequence: Synthetic oligonucleotide
ucugagaacacagguguuc

SEQ ID NO: 2315628 - RNA, 19 nt, Artificial Sequence
  Description of Artificial Sequence: Synthetic oligonucleotide
ggcauggagacauuacugc

SEQ ID NO: 2315629 - RNA, 19 nt, Artificial Sequence
  Description of Artificial Sequence: Synthetic oligonucleotide
ugucgguucaacucugcaa

SEQ ID NO: 2315630 - RNA, 19 nt, Artificial Sequence
  Description of Artificial Sequence: Synthetic oligonucleotide
uauaagcugcucaucugua

SEQ ID NO: 2315631 - RNA, 19 nt, Artificial Sequence
  Description of Artificial Sequence: Synthetic oligonucleotide
gugcugggaaauuauuggc

SEQ ID NO: 2315632 - RNA, 19 nt, Artificial Sequence
  Description of Artificial Sequence: Synthetic oligonucleotide
gguucaacucugcaauccg

SEQ ID NO: 2315633 - RNA, 19 nt, Artificial Sequence
  Description of Artificial Sequence: Synthetic oligonucleotide
augcuugacucucuugucu

SEQ ID NO: 2315634 - RNA, 19 nt, Artificial Sequence
  Description of Artificial Sequence: Synthetic oligonucleotide
ucauuuguucuaagcugcu

SEQ ID NO: 2315635 - RNA, 19 nt, Artificial Sequence
  Description of Artificial Sequence: Synthetic oligonucleotide
agaacacagguguucuuga

SEQ ID NO: 2315636 - RNA, 19 nt, Artificial Sequence
  Description of Artificial Sequence: Synthetic oligonucleotide
gauucguggagcaggacga

SEQ ID NO: 2315637 - RNA, 19 nt, Artificial Sequence
  Description of Artificial Sequence: Synthetic oligonucleotide
uucaacucugcaauccguu

SEQ ID NO: 2315638 - RNA, 19 nt, Artificial Sequence
  Description of Artificial Sequence: Synthetic oligonucleotide
gguguuaacaucacagcug

SEQ ID NO: 2315639 - RNA, 19 nt, Artificial Sequence
  Description of Artificial Sequence: Synthetic oligonucleotide
cugaauucugcaaugucaa

SEQ ID NO: 2315640 - RNA, 19 nt, Artificial Sequence
  Description of Artificial Sequence: Synthetic oligonucleotide
cugggugguguuaacauca

SEQ ID NO: 2315641 - RNA, 19 nt, Artificial Sequence
  Description of Artificial Sequence: Synthetic oligonucleotide
gacuuccacagugggaggg

SEQ ID NO: 2315642 - RNA, 19 nt, Artificial Sequence
  Description of Artificial Sequence: Synthetic oligonucleotide
gauugcuguucucuaugac

SEQ ID NO: 2315643 - RNA, 19 nt, Artificial Sequence
  Description of Artificial Sequence: Synthetic oligonucleotide
auuauuggccagauucaag

SEQ ID NO: 2315644 - RNA, 19 nt, Artificial Sequence
  Description of Artificial Sequence: Synthetic oligonucleotide
cugagaggggacugaacag

SEQ ID NO: 2315645 - RNA, 19 nt, Artificial Sequence
  Description of Artificial Sequence: Synthetic oligonucleotide
caauccgugucauuauguc

SEQ ID NO: 2315646 - RNA, 19 nt, Artificial Sequence
  Description of Artificial Sequence: Synthetic oligonucleotide
agcaauccgugucauuaug

SEQ ID NO: 2315647 - RNA, 19 nt, Artificial Sequence
  Description of Artificial Sequence: Synthetic oligonucleotide
uuguucucccacugacccg

SEQ ID NO: 2315648 - RNA, 19 nt, Artificial Sequence
  Description of Artificial Sequence: Synthetic oligonucleotide
ugcaauccguuccuccaug

SEQ ID NO: 2315649 - RNA, 19 nt, Artificial Sequence
  Description of Artificial Sequence: Synthetic oligonucleotide
ucccuguuugcuuggcucc

SEQ ID NO: 2315650 - RNA, 19 nt, Artificial Sequence
  Description of Artificial Sequence: Synthetic oligonucleotide
agaaguaauuucagcuguc

SEQ ID NO: 2315651 - RNA, 19 nt, Artificial Sequence
  Description of Artificial Sequence: Synthetic oligonucleotide
cuucugagaacacaggugu

SEQ ID NO: 2315652 - RNA, 19 nt, Artificial Sequence
  Description of Artificial Sequence: Synthetic oligonucleotide
ggugacacuggugaagagg

SEQ ID NO: 2315653 - RNA, 19 nt, Artificial Sequence
  Description of Artificial Sequence: Synthetic oligonucleotide
uacuauugccucauuuguu

SEQ ID NO: 2315654 - RNA, 19 nt, Artificial Sequence
  Description of Artificial Sequence: Synthetic oligonucleotide
ucguggagcaggacgaguc

SEQ ID NO: 2315655 - RNA, 19 nt, Artificial Sequence
  Description of Artificial Sequence: Synthetic oligonucleotide
gagcgauauaagcugcuca

SEQ ID NO: 2315656 - RNA, 19 nt, Artificial Sequence
  Description of Artificial Sequence: Synthetic oligonucleotide
uucccuguuugcuuggcuc

SEQ ID NO: 2315657 - RNA, 19 nt, Artificial Sequence
  Description of Artificial Sequence: Synthetic oligonucleotide
cccgacaauauuauucagg

SEQ ID NO: 2315658 - RNA, 19 nt, Artificial Sequence
  Description of Artificial Sequence: Synthetic oligonucleotide
gaugcuugacucucuuguc

SEQ ID NO: 2315659 - RNA, 19 nt, Artificial Sequence
  Description of Artificial Sequence: Synthetic oligonucleotide
ucaacucagcaauccgugu

SEQ ID NO: 2315660 - RNA, 19 nt, Artificial Sequence
  Description of Artificial Sequence: Synthetic oligonucleotide
cugggaaauuauuggccag

SEQ ID NO: 2315661 - RNA, 19 nt, Artificial Sequence
  Description of Artificial Sequence: Synthetic oligonucleotide
uaauuucagcugucagagc

SEQ ID NO: 2315662 - RNA, 19 nt, Artificial Sequence
  Description of Artificial Sequence: Synthetic oligonucleotide
ucuugucuggaguuauuua

SEQ ID NO: 2315663 - RNA, 19 nt, Artificial Sequence
  Description of Artificial Sequence: Synthetic oligonucleotide
auggagacauuacugcuua

SEQ ID NO: 2315664 - RNA, 19 nt, Artificial Sequence
  Description of Artificial Sequence: Synthetic oligonucleotide
acacuggugaagaggaaag

SEQ ID NO: 2315665 - RNA, 19 nt, Artificial Sequence
  Description of Artificial Sequence: Synthetic oligonucleotide
cugaacaguucuccucagg

SEQ ID NO: 2315666 - RNA, 19 nt, Artificial Sequence
  Description of Artificial Sequence: Synthetic oligonucleotide
augugcugggaaauuauug

SEQ ID NO: 2315667 - RNA, 19 nt, Artificial Sequence
  Description of Artificial Sequence: Synthetic oligonucleotide
caacucagcaauccguguc

SEQ ID NO: 2315668 - RNA, 19 nt, Artificial Sequence
  Description of Artificial Sequence: Synthetic oligonucleotide
ugauggcugaauucugcaa

SEQ ID NO: 2315669 - RNA, 19 nt, Artificial Sequence
  Description of Artificial Sequence: Synthetic oligonucleotide
agucucgccugcgugguac

SEQ ID NO: 2315670 - RNA, 19 nt, Artificial Sequence
  Description of Artificial Sequence: Synthetic oligonucleotide
aaccucuacauuaucgaua

SEQ ID NO: 2315671 - RNA, 19 nt, Artificial Sequence
  Description of Artificial Sequence: Synthetic oligonucleotide
aguuuaacaggcaacucuu

SEQ ID NO: 2315672 - RNA, 19 nt, Artificial Sequence
  Description of Artificial Sequence: Synthetic oligonucleotide
ggaaccucuacauuaucga

SEQ ID NO: 2315673 - RNA, 19 nt, Artificial Sequence
  Description of Artificial Sequence: Synthetic oligonucleotide
aaauaugugcugggaaauu

SEQ ID NO: 2315674 - RNA, 19 nt, Artificial Sequence
  Description of Artificial Sequence: Synthetic oligonucleotide
uccacagugggagggauuc

SEQ ID NO: 2315675 - RNA, 19 nt, Artificial Sequence
  Description of Artificial Sequence: Synthetic oligonucleotide
guuaacaucacagcuggcu

SEQ ID NO: 2315676 - RNA, 19 nt, Artificial Sequence
  Description of Artificial Sequence: Synthetic oligonucleotide
ggagagaauuccgaguugc

SEQ ID NO: 2315677 - RNA, 19 nt, Artificial Sequence
  Description of Artificial Sequence: Synthetic oligonucleotide
auuaucgauaagucuucua

SEQ ID NO: 2315678 - RNA, 19 nt, Artificial Sequence
  Description of Artificial Sequence: Synthetic oligonucleotide
gccagauucaaguucucug

SEQ ID NO: 2315679 - RNA, 19 nt, Artificial Sequence
  Description of Artificial Sequence: Synthetic oligonucleotide
uuguucuaagcugcugccc

SEQ ID NO: 2315680 - RNA, 19 nt, Artificial Sequence
  Description of Artificial Sequence: Synthetic oligonucleotide
cccugagauaguuuaacag

SEQ ID NO: 2315681 - RNA, 19 nt, Artificial Sequence
  Description of Artificial Sequence: Synthetic oligonucleotide
gacgagucugaacaguucu

SEQ ID NO: 2315682 - RNA, 19 nt, Artificial Sequence
  Description of Artificial Sequence: Synthetic oligonucleotide
acgggcacuucccuguuug

SEQ ID NO: 2315683 - RNA, 19 nt, Artificial Sequence
  Description of Artificial Sequence: Synthetic oligonucleotide
ucuaucagcuggagcaguu

SEQ ID NO: 2315684 - RNA, 19 nt, Artificial Sequence
  Description of Artificial Sequence: Synthetic oligonucleotide
ugacuuccacagugggagg

SEQ ID NO: 2315685 - RNA, 19 nt, Artificial Sequence
  Description of Artificial Sequence: Synthetic oligonucleotide
guucucuaugacuuccaca

SEQ ID NO: 2315686 - RNA, 19 nt, Artificial Sequence
  Description of Artificial Sequence: Synthetic oligonucleotide
auucugcaaugucaacuca

SEQ ID NO: 2315687 - RNA, 19 nt, Artificial Sequence
  Description of Artificial Sequence: Synthetic oligonucleotide
ucacaggacaguucuuaau

SEQ ID NO: 2315688 - RNA, 19 nt, Artificial Sequence
  Description of Artificial Sequence: Synthetic oligonucleotide
guacuauugccucauuugu

SEQ ID NO: 2315689 - RNA, 19 nt, Artificial Sequence
  Description of Artificial Sequence: Synthetic oligonucleotide
uauugccucauuuguucua

SEQ ID NO: 2315690 - RNA, 19 nt, Artificial Sequence
  Description of Artificial Sequence: Synthetic oligonucleotide
aggagagaauuccgaguug

SEQ ID NO: 2315691 - RNA, 19 nt, Artificial Sequence
  Description of Artificial Sequence: Synthetic oligonucleotide
uauuggccagauucaaguu

SEQ ID NO: 2315692 - RNA, 19 nt, Artificial Sequence
  Description of Artificial Sequence: Synthetic oligonucleotide
cuguagugaccauguacug

SEQ ID NO: 2315693 - RNA, 19 nt, Artificial Sequence
  Description of Artificial Sequence: Synthetic oligonucleotide
ucucuaugacuuccacagu

SEQ ID NO: 2315694 - RNA, 19 nt, Artificial Sequence
  Description of Artificial Sequence: Synthetic oligonucleotide
ugccuugauggcugaauuc

SEQ ID NO: 2315695 - RNA, 19 nt, Artificial Sequence
  Description of Artificial Sequence: Synthetic oligonucleotide
cugaagucucgccugcgug

SEQ ID NO: 2315696 - RNA, 19 nt, Artificial Sequence
  Description of Artificial Sequence: Synthetic oligonucleotide
uuauucaggugugccuuga

SEQ ID NO: 2315697 - RNA, 19 nt, Artificial Sequence
  Description of Artificial Sequence: Synthetic oligonucleotide
gcugaauucugcaauguca

SEQ ID NO: 2315698 - RNA, 19 nt, Artificial Sequence
  Description of Artificial Sequence: Synthetic oligonucleotide
gacacuggugaagaggaaa

SEQ ID NO: 2315699 - RNA, 19 nt, Artificial Sequence
  Description of Artificial Sequence: Synthetic oligonucleotide
acccgacaauauuauucag

SEQ ID NO: 2315700 - RNA, 19 nt, Artificial Sequence
  Description of Artificial Sequence: Synthetic oligonucleotide
cuuacaacaggaaccucua

SEQ ID NO: 2315701 - RNA, 19 nt, Artificial Sequence
  Description of Artificial Sequence: Synthetic oligonucleotide
ccuccaugcuacuuggugc

SEQ ID NO: 2315702 - RNA, 19 nt, Artificial Sequence
  Description of Artificial Sequence: Synthetic oligonucleotide
ggcccaugcucugagaggg

SEQ ID NO: 2315703 - RNA, 19 nt, Artificial Sequence
  Description of Artificial Sequence: Synthetic oligonucleotide
ugcccaucuccaagcacug

SEQ ID NO: 2315704 - RNA, 19 nt, Artificial Sequence
  Description of Artificial Sequence: Synthetic oligonucleotide
caggucacgggcacuuccc

SEQ ID NO: 2315705 - RNA, 19 nt, Artificial Sequence
  Description of Artificial Sequence: Synthetic oligonucleotide
cacuggugaagaggaaagg

SEQ ID NO: 2315706 - RNA, 19 nt, Artificial Sequence
  Description of Artificial Sequence: Synthetic oligonucleotide
aacucuuccuguggaaauu

SEQ ID NO: 2315707 - RNA, 19 nt, Artificial Sequence
  Description of Artificial Sequence: Synthetic oligonucleotide
cggaacaucaauggcaugg

SEQ ID NO: 2315708 - RNA, 19 nt, Artificial Sequence
  Description of Artificial Sequence: Synthetic oligonucleotide
ugagcgauauaagcugcuc

SEQ ID NO: 2315709 - RNA, 19 nt, Artificial Sequence
  Description of Artificial Sequence: Synthetic oligonucleotide
aggggacugaacaggugac

SEQ ID NO: 2315710 - RNA, 19 nt, Artificial Sequence
  Description of Artificial Sequence: Synthetic oligonucleotide
gagcaguuuugcugcgagc

SEQ ID NO: 2315711 - RNA, 19 nt, Artificial Sequence
  Description of Artificial Sequence: Synthetic oligonucleotide
ucuacccauagcugcccgu

SEQ ID NO: 2315712 - RNA, 19 nt, Artificial Sequence
  Description of Artificial Sequence: Synthetic oligonucleotide
auuccgaguugcucuucug

SEQ ID NO: 2315713 - RNA, 19 nt, Artificial Sequence
  Description of Artificial Sequence: Synthetic oligonucleotide
agucuucuacccauagcug

SEQ ID NO: 2315714 - RNA, 19 nt, Artificial Sequence
  Description of Artificial Sequence: Synthetic oligonucleotide
guguucuugauugcuguuc

SEQ ID NO: 2315715 - RNA, 19 nt, Artificial Sequence
  Description of Artificial Sequence: Synthetic oligonucleotide
ugugccuugauggcugaau

SEQ ID NO: 2315716 - RNA, 19 nt, Artificial Sequence
  Description of Artificial Sequence: Synthetic oligonucleotide
ugggagggauucguggagc

SEQ ID NO: 2315717 - RNA, 19 nt, Artificial Sequence
  Description of Artificial Sequence: Synthetic oligonucleotide
uauucaggugugccuugau

SEQ ID NO: 2315718 - RNA, 19 nt, Artificial Sequence
  Description of Artificial Sequence: Synthetic oligonucleotide
uugccucauuuguucuaag

SEQ ID NO: 2315719 - RNA, 19 nt, Artificial Sequence
  Description of Artificial Sequence: Synthetic oligonucleotide
ugggugguguuaacaucac

SEQ ID NO: 2315720 - RNA, 19 nt, Artificial Sequence
  Description of Artificial Sequence: Synthetic oligonucleotide
auaugugcugggaaauuau

SEQ ID NO: 2315721 - RNA, 19 nt, Artificial Sequence
  Description of Artificial Sequence: Synthetic oligonucleotide
acgagucugaacaguucuc

SEQ ID NO: 2315722 - RNA, 19 nt, Artificial Sequence
  Description of Artificial Sequence: Synthetic oligonucleotide
uggcaugugugagcgauau

SEQ ID NO: 2315723 - RNA, 19 nt, Artificial Sequence
  Description of Artificial Sequence: Synthetic oligonucleotide
uagugaccauguacugcug

SEQ ID NO: 2315724 - RNA, 19 nt, Artificial Sequence
  Description of Artificial Sequence: Synthetic oligonucleotide
ucgccugcgugguacuaug

SEQ ID NO: 2315725 - RNA, 19 nt, Artificial Sequence
  Description of Artificial Sequence: Synthetic oligonucleotide
uucugagaacacagguguu

SEQ ID NO: 2315726 - RNA, 19 nt, Artificial Sequence
  Description of Artificial Sequence: Synthetic oligonucleotide
uuaucacaggacaguucuu

SEQ ID NO: 2315727 - RNA, 19 nt, Artificial Sequence
  Description of Artificial Sequence: Synthetic oligonucleotide
gugcuggagauugaacuac

SEQ ID NO: 2315728 - RNA, 19 nt, Artificial Sequence
  Description of Artificial Sequence: Synthetic oligonucleotide
cuucuacccauagcugccc

SEQ ID NO: 2315729 - RNA, 19 nt, Artificial Sequence
  Description of Artificial Sequence: Synthetic oligonucleotide
cacugacccgacaauauua

SEQ ID NO: 2315730 - RNA, 19 nt, Artificial Sequence
  Description of Artificial Sequence: Synthetic oligonucleotide
uuuugcugcgagccuccau

SEQ ID NO: 2315731 - RNA, 19 nt, Artificial Sequence
  Description of Artificial Sequence: Synthetic oligonucleotide
ccucggaacaucaauggca

SEQ ID NO: 2315732 - RNA, 19 nt, Artificial Sequence
  Description of Artificial Sequence: Synthetic oligonucleotide
gaaccucuacauuaucgau

SEQ ID NO: 2315733 - RNA, 19 nt, Artificial Sequence
  Description of Artificial Sequence: Synthetic oligonucleotide
ucgguucaacucugcaauc

SEQ ID NO: 2315734 - RNA, 19 nt, Artificial Sequence
  Description of Artificial Sequence: Synthetic oligonucleotide
cucugucgguucaacucug

SEQ ID NO: 2315735 - RNA, 19 nt, Artificial Sequence
  Description of Artificial Sequence: Synthetic oligonucleotide
acugacccgacaauauuau

SEQ ID NO: 2315736 - RNA, 19 nt, Artificial Sequence
  Description of Artificial Sequence: Synthetic oligonucleotide
cugcaaugucaacucagca

SEQ ID NO: 2315737 - RNA, 19 nt, Artificial Sequence
  Description of Artificial Sequence: Synthetic oligonucleotide
ggagacauuacugcuuaca

SEQ ID NO: 2315738 - RNA, 19 nt, Artificial Sequence
  Description of Artificial Sequence: Synthetic oligonucleotide
uguuugcuuggcucccgaa

SEQ ID NO: 2315739 - RNA, 19 nt, Artificial Sequence
  Description of Artificial Sequence: Synthetic oligonucleotide
auguacugcugaagucucg

SEQ ID NO: 2315740 - RNA, 19 nt, Artificial Sequence
  Description of Artificial Sequence: Synthetic oligonucleotide
cugucagagcaucgaugag

SEQ ID NO: 2315741 - RNA, 19 nt, Artificial Sequence
  Description of Artificial Sequence: Synthetic oligonucleotide
ucggaacaucaauggcaug

SEQ ID NO: 2315742 - RNA, 19 nt, Artificial Sequence
  Description of Artificial Sequence: Synthetic oligonucleotide
caguuuugcugcgagccuc

SEQ ID NO: 2315743 - RNA, 19 nt, Artificial Sequence
  Description of Artificial Sequence: Synthetic oligonucleotide
ccccucggaacaucaaugg

SEQ ID NO: 2315744 - RNA, 19 nt, Artificial Sequence
  Description of Artificial Sequence: Synthetic oligonucleotide
cucugagaggggacugaac

SEQ ID NO: 2315745 - RNA, 19 nt, Artificial Sequence
  Description of Artificial Sequence: Synthetic oligonucleotide
gauaagucuucuacccaua

SEQ ID NO: 2315746 - RNA, 19 nt, Artificial Sequence
  Description of Artificial Sequence: Synthetic oligonucleotide
cuguggaaauucaacggcu

SEQ ID NO: 2315747 - RNA, 19 nt, Artificial Sequence
  Description of Artificial Sequence: Synthetic oligonucleotide
agcugcucaucuguaguga

SEQ ID NO: 2315748 - RNA, 19 nt, Artificial Sequence
  Description of Artificial Sequence: Synthetic oligonucleotide
ugacacuggugaagaggaa

SEQ ID NO: 2315749 - RNA, 19 nt, Artificial Sequence
  Description of Artificial Sequence: Synthetic oligonucleotide
gagcaggacgagucugaac

SEQ ID NO: 2315750 - RNA, 19 nt, Artificial Sequence
  Description of Artificial Sequence: Synthetic oligonucleotide
gugaccauguacugcugaa

SEQ ID NO: 2315751 - RNA, 19 nt, Artificial Sequence
  Description of Artificial Sequence: Synthetic oligonucleotide
ugagaacacagguguucuu

SEQ ID NO: 2315752 - RNA, 19 nt, Artificial Sequence
  Description of Artificial Sequence: Synthetic oligonucleotide
cugcccguucugaugcuug

SEQ ID NO: 2315753 - RNA, 19 nt, Artificial Sequence
  Description of Artificial Sequence: Synthetic oligonucleotide
gaaaagcagcagccagguc

SEQ ID NO: 2315754 - RNA, 19 nt, Artificial Sequence
  Description of Artificial Sequence: Synthetic oligonucleotide
cauccccuuguucucccac

SEQ ID NO: 2315755 - RNA, 19 nt, Artificial Sequence
  Description of Artificial Sequence: Synthetic oligonucleotide
ggaaagguucaaaccaaca

SEQ ID NO: 2315756 - RNA, 19 nt, Artificial Sequence
  Description of Artificial Sequence: Synthetic oligonucleotide
cugcgugguacuauguucu

SEQ ID NO: 2315757 - RNA, 19 nt, Artificial Sequence
  Description of Artificial Sequence: Synthetic oligonucleotide
uggagacauuacugcuuac

SEQ ID NO: 2315758 - RNA, 19 nt, Artificial Sequence
  Description of Artificial Sequence: Synthetic oligonucleotide
gggacugaacaggugacac

SEQ ID NO: 2315759 - RNA, 19 nt, Artificial Sequence
  Description of Artificial Sequence: Synthetic oligonucleotide
gguucaaaccaacaaguuu

SEQ ID NO: 2315760 - RNA, 19 nt, Artificial Sequence
  Description of Artificial Sequence: Synthetic oligonucleotide
cucggaacaucaauggcau

SEQ ID NO: 2315761 - RNA, 19 nt, Artificial Sequence
  Description of Artificial Sequence: Synthetic oligonucleotide
gcacuucccuguuugcuug

SEQ ID NO: 2315762 - RNA, 19 nt, Artificial Sequence
  Description of Artificial Sequence: Synthetic oligonucleotide
ccugcgugguacuauguuc

SEQ ID NO: 2315763 - RNA, 19 nt, Artificial Sequence
  Description of Artificial Sequence: Synthetic oligonucleotide
uacccauagcugcccguuc

SEQ ID NO: 2315764 - RNA, 19 nt, Artificial Sequence
  Description of Artificial Sequence: Synthetic oligonucleotide
uucuaagcugcugcccauc

SEQ ID NO: 2315765 - RNA, 19 nt, Artificial Sequence
  Description of Artificial Sequence: Synthetic oligonucleotide
uucguggagcaggacgagu

SEQ ID NO: 2315766 - RNA, 19 nt, Artificial Sequence
  Description of Artificial Sequence: Synthetic oligonucleotide
ucccacugacccgacaaua

SEQ ID NO: 2315767 - RNA, 19 nt, Artificial Sequence
  Description of Artificial Sequence: Synthetic oligonucleotide
ccgacaauauuauucaggu

SEQ ID NO: 2315768 - RNA, 19 nt, Artificial Sequence
  Description of Artificial Sequence: Synthetic oligonucleotide
auucguggagcaggacgag

SEQ ID NO: 2315769 - RNA, 19 nt, Artificial Sequence
  Description of Artificial Sequence: Synthetic oligonucleotide
caugcucugucgguucaac

SEQ ID NO: 2315770 - RNA, 19 nt, Artificial Sequence
  Description of Artificial Sequence: Synthetic oligonucleotide
caugcuacuuggugcugga

SEQ ID NO: 2315771 - RNA, 19 nt, Artificial Sequence
  Description of Artificial Sequence: Synthetic oligonucleotide
gcaauccguuccuccaugc

SEQ ID NO: 2315772 - RNA, 19 nt, Artificial Sequence
  Description of Artificial Sequence: Synthetic oligonucleotide
aggucacgggcacuucccu

SEQ ID NO: 2315773 - RNA, 19 nt, Artificial Sequence
  Description of Artificial Sequence: Synthetic oligonucleotide
auuucagcugucagagcau

SEQ ID NO: 2315774 - RNA, 19 nt, Artificial Sequence
  Description of Artificial Sequence: Synthetic oligonucleotide
agguucaaaccaacaaguu

SEQ ID NO: 2315775 - RNA, 19 nt, Artificial Sequence
  Description of Artificial Sequence: Synthetic oligonucleotide
ucaauggcauggagacauu

SEQ ID NO: 2315776 - RNA, 19 nt, Artificial Sequence
  Description of Artificial Sequence: Synthetic oligonucleotide
caacaaguuucugcugcuc

SEQ ID NO: 2315777 - RNA, 19 nt, Artificial Sequence
  Description of Artificial Sequence: Synthetic oligonucleotide
caggagagaauuccgaguu

SEQ ID NO: 2315778 - RNA, 19 nt, Artificial Sequence
  Description of Artificial Sequence: Synthetic oligonucleotide
ccguucugaugcuugacuc

SEQ ID NO: 2315779 - RNA, 19 nt, Artificial Sequence
  Description of Artificial Sequence: Synthetic oligonucleotide
cuauugccucauuuguucu

SEQ ID NO: 2315780 - RNA, 19 nt, Artificial Sequence
  Description of Artificial Sequence: Synthetic oligonucleotide
aggacgagucugaacaguu

SEQ ID NO: 2315781 - RNA, 19 nt, Artificial Sequence
  Description of Artificial Sequence: Synthetic oligonucleotide
cuccaugcuacuuggugcu

SEQ ID NO: 2315782 - RNA, 19 nt, Artificial Sequence
  Description of Artificial Sequence: Synthetic oligonucleotide
cuggugaagaggaaagguu

SEQ ID NO: 2315783 - RNA, 19 nt, Artificial Sequence
  Description of Artificial Sequence: Synthetic oligonucleotide
cuuggugcuggagauugaa

SEQ ID NO: 2315784 - RNA, 19 nt, Artificial Sequence
  Description of Artificial Sequence: Synthetic oligonucleotide
gugguacuauguucuucuc

SEQ ID NO: 2315785 - RNA, 19 nt, Artificial Sequence
  Description of Artificial Sequence: Synthetic oligonucleotide
gcugcgagccuccaugcuc

SEQ ID NO: 2315786 - RNA, 19 nt, Artificial Sequence
  Description of Artificial Sequence: Synthetic oligonucleotide
ggaacaucaauggcaugga

SEQ ID NO: 2315787 - RNA, 19 nt, Artificial Sequence
  Description of Artificial Sequence: Synthetic oligonucleotide
uuggcucccgaaguccauc

SEQ ID NO: 2315788 - RNA, 19 nt, Artificial Sequence
  Description of Artificial Sequence: Synthetic oligonucleotide
guccauccccuuguucucc

SEQ ID NO: 2315789 - RNA, 19 nt, Artificial Sequence
  Description of Artificial Sequence: Synthetic oligonucleotide
uccaugcuacuuggugcug

SEQ ID NO: 2315790 - RNA, 19 nt, Artificial Sequence
  Description of Artificial Sequence: Synthetic oligonucleotide
agggauucguggagcagga

SEQ ID NO: 2315791 - RNA, 19 nt, Artificial Sequence
  Description of Artificial Sequence: Synthetic oligonucleotide
cugucgguucaacucugca

SEQ ID NO: 2315792 - RNA, 19 nt, Artificial Sequence
  Description of Artificial Sequence: Synthetic oligonucleotide
cugcuuacaacaggaaccu

SEQ ID NO: 2315793 - RNA, 19 nt, Artificial Sequence
  Description of Artificial Sequence: Synthetic oligonucleotide
gaacacagguguucuugau

SEQ ID NO: 2315794 - RNA, 19 nt, Artificial Sequence
  Description of Artificial Sequence: Synthetic oligonucleotide
ugcgugguacuauguucuu

SEQ ID NO: 2315795 - RNA, 19 nt, Artificial Sequence
  Description of Artificial Sequence: Synthetic oligonucleotide
gaauuccgaguugcucuuc

SEQ ID NO: 2315796 - RNA, 19 nt, Artificial Sequence
  Description of Artificial Sequence: Synthetic oligonucleotide
gugucauuauguccuuccu

SEQ ID NO: 2315797 - RNA, 19 nt, Artificial Sequence
  Description of Artificial Sequence: Synthetic oligonucleotide
ggucacgggcacuucccug

SEQ ID NO: 2315798 - RNA, 19 nt, Artificial Sequence
  Description of Artificial Sequence: Synthetic oligonucleotide
uccguuccuccaugcuacu

SEQ ID NO: 2315799 - RNA, 19 nt, Artificial Sequence
  Description of Artificial Sequence: Synthetic oligonucleotide
uggccagauucaaguucuc

SEQ ID NO: 2315800 - RNA, 19 nt, Artificial Sequence
  Description of Artificial Sequence: Synthetic oligonucleotide
uccgugucauuauguccuu

SEQ ID NO: 2315801 - RNA, 19 nt, Artificial Sequence
  Description of Artificial Sequence: Synthetic oligonucleotide
gcuggagauugaacuacug

SEQ ID NO: 2315802 - RNA, 19 nt, Artificial Sequence
  Description of Artificial Sequence: Synthetic oligonucleotide
gcucuaucagcuggagcag

SEQ ID NO: 2315803 - RNA, 19 nt, Artificial Sequence
  Description of Artificial Sequence: Synthetic oligonucleotide
ugcuuacaacaggaaccuc

SEQ ID NO: 2315804 - RNA, 19 nt, Artificial Sequence
  Description of Artificial Sequence: Synthetic oligonucleotide
ccugggugguguuaacauc

SEQ ID NO: 2315805 - RNA, 19 nt, Artificial Sequence
  Description of Artificial Sequence: Synthetic oligonucleotide
acucucuugucuggaguua

SEQ ID NO: 2315806 - RNA, 19 nt, Artificial Sequence
  Description of Artificial Sequence: Synthetic oligonucleotide
gaagucucgccugcguggu

SEQ ID NO: 2315807 - RNA, 19 nt, Artificial Sequence
  Description of Artificial Sequence: Synthetic oligonucleotide
guucaacucugcaauccgu

SEQ ID NO: 2315808 - RNA, 19 nt, Artificial Sequence
  Description of Artificial Sequence: Synthetic oligonucleotide
gcucugucgguucaacucu

SEQ ID NO: 2315809 - RNA, 19 nt, Artificial Sequence
  Description of Artificial Sequence: Synthetic oligonucleotide
cugcgagccuccaugcucu

SEQ ID NO: 2315810 - RNA, 19 nt, Artificial Sequence
  Description of Artificial Sequence: Synthetic oligonucleotide
uucuuccccucggaacauc

SEQ ID NO: 2315811 - RNA, 19 nt, Artificial Sequence
  Description of Artificial Sequence: Synthetic oligonucleotide
ggagggauucguggagcag

SEQ ID NO: 2315812 - RNA, 19 nt, Artificial Sequence
  Description of Artificial Sequence: Synthetic oligonucleotide
caauggcauggagacauua

SEQ ID NO: 2315813 - RNA, 19 nt, Artificial Sequence
  Description of Artificial Sequence: Synthetic oligonucleotide
gggagggauucguggagca

SEQ ID NO: 2315814 - RNA, 19 nt, Artificial Sequence
  Description of Artificial Sequence: Synthetic oligonucleotide
cgguucaacucugcaaucc

SEQ ID NO: 2315815 - RNA, 19 nt, Artificial Sequence
  Description of Artificial Sequence: Synthetic oligonucleotide
cuguuugcuuggcucccga

SEQ ID NO: 2315816 - RNA, 19 nt, Artificial Sequence
  Description of Artificial Sequence: Synthetic oligonucleotide
ccuuuguacuauugccuca

SEQ ID NO: 2315817 - RNA, 19 nt, Artificial Sequence
  Description of Artificial Sequence: Synthetic oligonucleotide
aagucucgccugcguggua

SEQ ID NO: 2315818 - RNA, 19 nt, Artificial Sequence
  Description of Artificial Sequence: Synthetic oligonucleotide
caugcucugagaggggacu

SEQ ID NO: 2315819 - RNA, 19 nt, Artificial Sequence
  Description of Artificial Sequence: Synthetic oligonucleotide
gccccugagauaguuuaac

SEQ ID NO: 2315820 - RNA, 19 nt, Artificial Sequence
  Description of Artificial Sequence: Synthetic oligonucleotide
cucccgaaguccauccccu

SEQ ID NO: 2315821 - RNA, 19 nt, Artificial Sequence
  Description of Artificial Sequence: Synthetic oligonucleotide
cauuaucgauaagucuucu

SEQ ID NO: 2315822 - RNA, 19 nt, Artificial Sequence
  Description of Artificial Sequence: Synthetic oligonucleotide
gcgauauaagcugcucauc

SEQ ID NO: 2315823 - RNA, 19 nt, Artificial Sequence
  Description of Artificial Sequence: Synthetic oligonucleotide
gggugguguuaacaucaca

SEQ ID NO: 2315824 - RNA, 19 nt, Artificial Sequence
  Description of Artificial Sequence: Synthetic oligonucleotide
agccaggucacgggcacuu

SEQ ID NO: 2315825 - RNA, 19 nt, Artificial Sequence
  Description of Artificial Sequence: Synthetic oligonucleotide
guucuaagcugcugcccau

SEQ ID NO: 2315826 - RNA, 19 nt, Artificial Sequence
  Description of Artificial Sequence: Synthetic oligonucleotide
ccccugagauaguuuaaca

SEQ ID NO: 2315827 - RNA, 19 nt, Artificial Sequence
  Description of Artificial Sequence: Synthetic oligonucleotide
ggacgagucugaacaguuc

SEQ ID NO: 2315828 - RNA, 19 nt, Artificial Sequence
  Description of Artificial Sequence: Synthetic oligonucleotide
caauccguuccuccaugcu

SEQ ID NO: 2315829 - RNA, 19 nt, Artificial Sequence
  Description of Artificial Sequence: Synthetic oligonucleotide
ggcucccgaaguccauccc

SEQ ID NO: 2315830 - RNA, 19 nt, Artificial Sequence
  Description of Artificial Sequence: Synthetic oligonucleotide
ggacugaacaggugacacu

SEQ ID NO: 2315831 - RNA, 19 nt, Artificial Sequence
  Description of Artificial Sequence: Synthetic oligonucleotide
gcaauccgugucauuaugu

SEQ ID NO: 2315832 - RNA, 19 nt, Artificial Sequence
  Description of Artificial Sequence: Synthetic oligonucleotide
caucuguagugaccaugua

SEQ ID NO: 2315833 - RNA, 19 nt, Artificial Sequence
  Description of Artificial Sequence: Synthetic oligonucleotide
ggugugccuugauggcuga

SEQ ID NO: 2315834 - RNA, 19 nt, Artificial Sequence
  Description of Artificial Sequence: Synthetic oligonucleotide
ggaaauuauuggccagauu

SEQ ID NO: 2315835 - RNA, 19 nt, Artificial Sequence
  Description of Artificial Sequence: Synthetic oligonucleotide
cagcaauccgugucauuau

SEQ ID NO: 2315836 - RNA, 19 nt, Artificial Sequence
  Description of Artificial Sequence: Synthetic oligonucleotide
gcugaagucucgccugcgu

SEQ ID NO: 2315837 - RNA, 19 nt, Artificial Sequence
  Description of Artificial Sequence: Synthetic oligonucleotide
gccugggugguguuaacau

SEQ ID NO: 2315838 - RNA, 19 nt, Artificial Sequence
  Description of Artificial Sequence: Synthetic oligonucleotide
caggacgagucugaacagu

SEQ ID NO: 2315839 - RNA, 19 nt, Artificial Sequence
  Description of Artificial Sequence: Synthetic oligonucleotide
gcgugguacuauguucuuc

SEQ ID NO: 2315840 - RNA, 19 nt, Artificial Sequence
  Description of Artificial Sequence: Synthetic oligonucleotide
gcaguuuugcugcgagccu

SEQ ID NO: 2315841 - RNA, 19 nt, Artificial Sequence
  Description of Artificial Sequence: Synthetic oligonucleotide
cgauaagucuucuacccau

SEQ ID NO: 2315842 - RNA, 19 nt, Artificial Sequence
  Description of Artificial Sequence: Synthetic oligonucleotide
auggcaugugugagcgaua

SEQ ID NO: 2315843 - RNA, 19 nt, Artificial Sequence
  Description of Artificial Sequence: Synthetic oligonucleotide
gguguucuugauugcuguu

SEQ ID NO: 2315844 - RNA, 19 nt, Artificial Sequence
  Description of Artificial Sequence: Synthetic oligonucleotide
ccaacaaguuucugcugcu

SEQ ID NO: 2315845 - RNA, 19 nt, Artificial Sequence
  Description of Artificial Sequence: Synthetic oligonucleotide
cugacccgacaauauuauu

SEQ ID NO: 2315846 - RNA, 19 nt, Artificial Sequence
  Description of Artificial Sequence: Synthetic oligonucleotide
ggagcaggacgagucugaa

SEQ ID NO: 2315847 - RNA, 19 nt, Artificial Sequence
  Description of Artificial Sequence: Synthetic oligonucleotide
cagcugucagagcaucgau

SEQ ID NO: 2315848 - RNA, 19 nt, Artificial Sequence
  Description of Artificial Sequence: Synthetic oligonucleotide
cuacccauagcugcccguu

SEQ ID NO: 2315849 - RNA, 19 nt, Artificial Sequence
  Description of Artificial Sequence: Synthetic oligonucleotide
ggccagauucaaguucucu

SEQ ID NO: 2315850 - RNA, 19 nt, Artificial Sequence
  Description of Artificial Sequence: Synthetic oligonucleotide
gcccaugcucugagagggg

SEQ ID NO: 2315851 - RNA, 19 nt, Artificial Sequence
  Description of Artificial Sequence: Synthetic oligonucleotide
ggggcucuucugagaacac

SEQ ID NO: 2315852 - RNA, 19 nt, Artificial Sequence
  Description of Artificial Sequence: Synthetic oligonucleotide
ccgaaguccauccccuugu

SEQ ID NO: 2315853 - RNA, 19 nt, Artificial Sequence
  Description of Artificial Sequence: Synthetic oligonucleotide
cuaucagcuggagcaguuu

SEQ ID NO: 2315854 - RNA, 19 nt, Artificial Sequence
  Description of Artificial Sequence: Synthetic oligonucleotide
gggauucguggagcaggac

SEQ ID NO: 2315855 - RNA, 19 nt, Artificial Sequence
  Description of Artificial Sequence: Synthetic oligonucleotide
cguucugaugcuugacucu

SEQ ID NO: 2315856 - RNA, 19 nt, Artificial Sequence
  Description of Artificial Sequence: Synthetic oligonucleotide
cccguucugaugcuugacu

SEQ ID NO: 2315857 - RNA, 19 nt, Artificial Sequence
  Description of Artificial Sequence: Synthetic oligonucleotide
gucucgccugcgugguacu

SEQ ID NO: 2315858 - RNA, 19 nt, Artificial Sequence
  Description of Artificial Sequence: Synthetic oligonucleotide
cgggcacuucccuguuugc

SEQ ID NO: 2315859 - RNA, 19 nt, Artificial Sequence
  Description of Artificial Sequence: Synthetic oligonucleotide
ccgaguugcucuucugccu

SEQ ID NO: 2315860 - RNA, 19 nt, Artificial Sequence
  Description of Artificial Sequence: Synthetic oligonucleotide
gcccguucugaugcuugac

SEQ ID NO: 2315861 - RNA, 19 nt, Artificial Sequence
  Description of Artificial Sequence: Synthetic oligonucleotide
cggccccugagauaguuua

SEQ ID NO: 2315862 - RNA, 19 nt, Artificial Sequence
  Description of Artificial Sequence: Synthetic oligonucleotide
ggccccugagauaguuuaa

SEQ ID NO: 2315863 - RNA, 19 nt, Artificial Sequence
  Description of Artificial Sequence: Synthetic oligonucleotide
gccugcgugguacuauguu

SEQ ID NO: 2315864 - RNA, 19 nt, Artificial Sequence
  Description of Artificial Sequence: Synthetic oligonucleotide
ccccuuguucucccacuga

SEQ ID NO: 2315865 - RNA, 19 nt, Artificial Sequence
  Description of Artificial Sequence: Synthetic oligonucleotide
cuacuuggugcuggagauu

SEQ ID NO: 2315866 - RNA, 19 nt, Artificial Sequence
  Description of Artificial Sequence: Synthetic oligonucleotide
ggggccggccccugagaua

SEQ ID NO: 2315867 - RNA, 19 nt, Artificial Sequence
  Description of Artificial Sequence: Synthetic oligonucleotide
gcucuucugccuggguggu

SEQ ID NO: 2315868 - RNA, 19 nt, Artificial Sequence
  Description of Artificial Sequence: Synthetic oligonucleotide
gcgagccuccaugcucugu

SEQ ID NO: 2315869 - RNA, 19 nt, Artificial Sequence
  Description of Artificial Sequence: Synthetic oligonucleotide
gccggccccugagauaguu

SEQ ID NO: 2315870 - RNA, 19 nt, Artificial Sequence
  Description of Artificial Sequence: Synthetic oligonucleotide
cgaaguccauccccuuguu

SEQ ID NO: 2315871 - RNA, 19 nt, Artificial Sequence
  Description of Artificial Sequence: Synthetic oligonucleotide
ccggccccugagauaguuu

SEQ ID NO: 2315872 - RNA, 19 nt, Artificial Sequence
  Description of Artificial Sequence: Synthetic oligonucleotide
cgccugcgugguacuaugu

SEQ ID NO: 2315873 - RNA, 19 nt, Artificial Sequence
  Description of Artificial Sequence: Synthetic oligonucleotide
ccguuccuccaugcuacuu

SEQ ID NO: 2315874 - RNA, 19 nt, Artificial Sequence
  Description of Artificial Sequence: Synthetic oligonucleotide
ggccggccccugagauagu

SEQ ID NO: 2315875 - RNA, 19 nt, Artificial Sequence
  Description of Artificial Sequence: Synthetic oligonucleotide
uuuaaagccacccauaagc

SEQ ID NO: 2315876 - RNA, 19 nt, Artificial Sequence
  Description of Artificial Sequence: Synthetic oligonucleotide
uaaucuugcaacuugauag

SEQ ID NO: 2315877 - RNA, 19 nt, Artificial Sequence
  Description of Artificial Sequence: Synthetic oligonucleotide
aaaauugauuaagaaaugc

SEQ ID NO: 2315878 - RNA, 19 nt, Artificial Sequence
  Description of Artificial Sequence: Synthetic oligonucleotide
aaaacaaacaaaacaaaac

SEQ ID NO: 2315879 - RNA, 19 nt, Artificial Sequence
  Description of Artificial Sequence: Synthetic oligonucleotide
aacuugauagacuuggagg

SEQ ID NO: 2315880 - RNA, 19 nt, Artificial Sequence
  Description of Artificial Sequence: Synthetic oligonucleotide
aagccaauuuggcagaugc

SEQ ID NO: 2315881 - RNA, 19 nt, Artificial Sequence
  Description of Artificial Sequence: Synthetic oligonucleotide
uaaaguuuaaucuugcaac

SEQ ID NO: 2315882 - RNA, 19 nt, Artificial Sequence
  Description of Artificial Sequence: Synthetic oligonucleotide
aagaaagguuuccaugucc

SEQ ID NO: 2315883 - RNA, 19 nt, Artificial Sequence
  Description of Artificial Sequence: Synthetic oligonucleotide
aauugauuaagaaaugcag

SEQ ID NO: 2315884 - RNA, 19 nt, Artificial Sequence
  Description of Artificial Sequence: Synthetic oligonucleotide
aagacuucuugucuagggc

SEQ ID NO: 2315885 - RNA, 19 nt, Artificial Sequence
  Description of Artificial Sequence: Synthetic oligonucleotide
gauuaagaaaugcaguuug

SEQ ID NO: 2315886 - RNA, 19 nt, Artificial Sequence
  Description of Artificial Sequence: Synthetic oligonucleotide
uugucuagggccauguugg

SEQ ID NO: 2315887 - RNA, 19 nt, Artificial Sequence
  Description of Artificial Sequence: Synthetic oligonucleotide
ugcaguuugaggaacagga

SEQ ID NO: 2315888 - RNA, 19 nt, Artificial Sequence
  Description of Artificial Sequence: Synthetic oligonucleotide
aaaaguccucaguaucugc

SEQ ID NO: 2315889 - RNA, 19 nt, Artificial Sequence
  Description of Artificial Sequence: Synthetic oligonucleotide
uuuggcagaugcaaaauug

SEQ ID NO: 2315890 - RNA, 19 nt, Artificial Sequence
  Description of Artificial Sequence: Synthetic oligonucleotide
uuugcuuaccuccucagca

SEQ ID NO: 2315891 - RNA, 19 nt, Artificial Sequence
  Description of Artificial Sequence: Synthetic oligonucleotide
accagcuuugcuuaccucc

SEQ ID NO: 2315892 - RNA, 19 nt, Artificial Sequence
  Description of Artificial Sequence: Synthetic oligonucleotide
acuuccgguguucugaagc

SEQ ID NO: 2315893 - RNA, 19 nt, Artificial Sequence
  Description of Artificial Sequence: Synthetic oligonucleotide
aucugcaggugccugaucc

SEQ ID NO: 2315894 - RNA, 19 nt, Artificial Sequence
  Description of Artificial Sequence: Synthetic oligonucleotide
ugcaacuugauagacuugg

SEQ ID NO: 2315895 - RNA, 19 nt, Artificial Sequence
  Description of Artificial Sequence: Synthetic oligonucleotide
aaagccacccauaagcuuc

SEQ ID NO: 2315896 - RNA, 19 nt, Artificial Sequence
  Description of Artificial Sequence: Synthetic oligonucleotide
ucuucguuuucaaagccag

SEQ ID NO: 2315897 - RNA, 19 nt, Artificial Sequence
  Description of Artificial Sequence: Synthetic oligonucleotide
gaagacuucuugucuaggg

SEQ ID NO: 2315898 - RNA, 19 nt, Artificial Sequence
  Description of Artificial Sequence: Synthetic oligonucleotide
aaauugauuaagaaaugca

SEQ ID NO: 2315899 - RNA, 19 nt, Artificial Sequence
  Description of Artificial Sequence: Synthetic oligonucleotide
auaaaguuuaaucuugcaa

SEQ ID NO: 2315900 - RNA, 19 nt, Artificial Sequence
  Description of Artificial Sequence: Synthetic oligonucleotide
cuguucuucguuuucaaag

SEQ ID NO: 2315901 - RNA, 19 nt, Artificial Sequence
  Description of Artificial Sequence: Synthetic oligonucleotide
uguucuucguuuucaaagc

SEQ ID NO: 2315902 - RNA, 19 nt, Artificial Sequence
  Description of Artificial Sequence: Synthetic oligonucleotide
auccaagccaauuuggcag

SEQ ID NO: 2315903 - RNA, 19 nt, Artificial Sequence
  Description of Artificial Sequence: Synthetic oligonucleotide
ucuagggccauguuggacc

SEQ ID NO: 2315904 - RNA, 19 nt, Artificial Sequence
  Description of Artificial Sequence: Synthetic oligonucleotide
gaagccucugucuugcccg

SEQ ID NO: 2315905 - RNA, 19 nt, Artificial Sequence
  Description of Artificial Sequence: Synthetic oligonucleotide
aaagccagcagugucccac

SEQ ID NO: 2315906 - RNA, 19 nt, Artificial Sequence
  Description of Artificial Sequence: Synthetic oligonucleotide
uuaagaaaugcaguuugag

SEQ ID NO: 2315907 - RNA, 19 nt, Artificial Sequence
  Description of Artificial Sequence: Synthetic oligonucleotide
ugucuugcccgacuggugg

SEQ ID NO: 2315908 - RNA, 19 nt, Artificial Sequence
  Description of Artificial Sequence: Synthetic oligonucleotide
aaucuugcaacuugauaga

SEQ ID NO: 2315909 - RNA, 19 nt, Artificial Sequence
  Description of Artificial Sequence: Synthetic oligonucleotide
ucuggugaggucuucagac

SEQ ID NO: 2315910 - RNA, 19 nt, Artificial Sequence
  Description of Artificial Sequence: Synthetic oligonucleotide
auaguccugcugcagauuc

SEQ ID NO: 2315911 - RNA, 19 nt, Artificial Sequence
  Description of Artificial Sequence: Synthetic oligonucleotide
uguuuaaagccacccauaa

SEQ ID NO: 2315912 - RNA, 19 nt, Artificial Sequence
  Description of Artificial Sequence: Synthetic oligonucleotide
ucaauguagaagaccuugc

SEQ ID NO: 2315913 - RNA, 19 nt, Artificial Sequence
  Description of Artificial Sequence: Synthetic oligonucleotide
caaacaaaacaaaacaaaa

SEQ ID NO: 2315914 - RNA, 19 nt, Artificial Sequence
  Description of Artificial Sequence: Synthetic oligonucleotide
aagguuuccauguccagaa

SEQ ID NO: 2315915 - RNA, 19 nt, Artificial Sequence
  Description of Artificial Sequence: Synthetic oligonucleotide
agaugcaaaauugauuaag

SEQ ID NO: 2315916 - RNA, 19 nt, Artificial Sequence
  Description of Artificial Sequence: Synthetic oligonucleotide
ugauccaagccaauuuggc

SEQ ID NO: 2315917 - RNA, 19 nt, Artificial Sequence
  Description of Artificial Sequence: Synthetic oligonucleotide
aacaggacaauaaaguuua

SEQ ID NO: 2315918 - RNA, 19 nt, Artificial Sequence
  Description of Artificial Sequence: Synthetic oligonucleotide
uucguuuucaaagccagca

SEQ ID NO: 2315919 - RNA, 19 nt, Artificial Sequence
  Description of Artificial Sequence: Synthetic oligonucleotide
cagacaugagccuugggag

SEQ ID NO: 2315920 - RNA, 19 nt, Artificial Sequence
  Description of Artificial Sequence: Synthetic oligonucleotide
caaaauugauuaagaaaug

SEQ ID NO: 2315921 - RNA, 19 nt, Artificial Sequence
  Description of Artificial Sequence: Synthetic oligonucleotide
agagucuuggggaagaaag

SEQ ID NO: 2315922 - RNA, 19 nt, Artificial Sequence
  Description of Artificial Sequence: Synthetic oligonucleotide
ugaaugauggggacagaug

SEQ ID NO: 2315923 - RNA, 19 nt, Artificial Sequence
  Description of Artificial Sequence: Synthetic oligonucleotide
uuaaucuugcaacuugaua

SEQ ID NO: 2315924 - RNA, 19 nt, Artificial Sequence
  Description of Artificial Sequence: Synthetic oligonucleotide
uugaggaacaggacaauaa

SEQ ID NO: 2315925 - RNA, 19 nt, Artificial Sequence
  Description of Artificial Sequence: Synthetic oligonucleotide
auugauuaagaaaugcagu

SEQ ID NO: 2315926 - RNA, 19 nt, Artificial Sequence
  Description of Artificial Sequence: Synthetic oligonucleotide
uucuucuucuucuucuuca

SEQ ID NO: 2315927 - RNA, 19 nt, Artificial Sequence
  Description of Artificial Sequence: Synthetic oligonucleotide
ugaggaacaggacaauaaa

SEQ ID NO: 2315928 - RNA, 19 nt, Artificial Sequence
  Description of Artificial Sequence: Synthetic oligonucleotide
auagacuuggaggcguucc

SEQ ID NO: 2315929 - RNA, 19 nt, Artificial Sequence
  Description of Artificial Sequence: Synthetic oligonucleotide
uuggcagaugcaaaauuga

SEQ ID NO: 2315930 - RNA, 19 nt, Artificial Sequence
  Description of Artificial Sequence: Synthetic oligonucleotide
ugcagauucugccggagca

SEQ ID NO: 2315931 - RNA, 19 nt, Artificial Sequence
  Description of Artificial Sequence: Synthetic oligonucleotide
ucagaggagaagcccaggc

SEQ ID NO: 2315932 - RNA, 19 nt, Artificial Sequence
  Description of Artificial Sequence: Synthetic oligonucleotide
aaguccucaguaucugcag

SEQ ID NO: 2315933 - RNA, 19 nt, Artificial Sequence
  Description of Artificial Sequence: Synthetic oligonucleotide
uagucaugcugggagagcg

SEQ ID NO: 2315934 - RNA, 19 nt, Artificial Sequence
  Description of Artificial Sequence: Synthetic oligonucleotide
cucaguaucugcaggugcc

SEQ ID NO: 2315935 - RNA, 19 nt, Artificial Sequence
  Description of Artificial Sequence: Synthetic oligonucleotide
agcauccccagccucauag

SEQ ID NO: 2315936 - RNA, 19 nt, Artificial Sequence
  Description of Artificial Sequence: Synthetic oligonucleotide
gaaugauggggacagaugu

SEQ ID NO: 2315937 - RNA, 19 nt, Artificial Sequence
  Description of Artificial Sequence: Synthetic oligonucleotide
uucuucguuuucaaagcca

SEQ ID NO: 2315938 - RNA, 19 nt, Artificial Sequence
  Description of Artificial Sequence: Synthetic oligonucleotide
gggacagauguuuaaagcc

SEQ ID NO: 2315939 - RNA, 19 nt, Artificial Sequence
  Description of Artificial Sequence: Synthetic oligonucleotide
agacaugagccuugggagg

SEQ ID NO: 2315940 - RNA, 19 nt, Artificial Sequence
  Description of Artificial Sequence: Synthetic oligonucleotide
cugauccaagccaauuugg

SEQ ID NO: 2315941 - RNA, 19 nt, Artificial Sequence
  Description of Artificial Sequence: Synthetic oligonucleotide
gagagcggcugaaugaugg

SEQ ID NO: 2315942 - RNA, 19 nt, Artificial Sequence
  Description of Artificial Sequence: Synthetic oligonucleotide
ucguuuucaaagccagcag

SEQ ID NO: 2315943 - RNA, 19 nt, Artificial Sequence
  Description of Artificial Sequence: Synthetic oligonucleotide
aaacuggguucccuuccac

SEQ ID NO: 2315944 - RNA, 19 nt, Artificial Sequence
  Description of Artificial Sequence: Synthetic oligonucleotide
uguuggaccuguuagucau

SEQ ID NO: 2315945 - RNA, 19 nt, Artificial Sequence
  Description of Artificial Sequence: Synthetic oligonucleotide
uggggacagauguuuaaag

SEQ ID NO: 2315946 - RNA, 19 nt, Artificial Sequence
  Description of Artificial Sequence: Synthetic oligonucleotide
uagacuuggaggcguuccg

SEQ ID NO: 2315947 - RNA, 19 nt, Artificial Sequence
  Description of Artificial Sequence: Synthetic oligonucleotide
ucuugcaacuugauagacu

SEQ ID NO: 2315948 - RNA, 19 nt, Artificial Sequence
  Description of Artificial Sequence: Synthetic oligonucleotide
ucuucagacaugagccuug

SEQ ID NO: 2315949 - RNA, 19 nt, Artificial Sequence
  Description of Artificial Sequence: Synthetic oligonucleotide
aaugcaguuugaggaacag

SEQ ID NO: 2315950 - RNA, 19 nt, Artificial Sequence
  Description of Artificial Sequence: Synthetic oligonucleotide
uuuaaucuugcaacuugau

SEQ ID NO: 2315951 - RNA, 19 nt, Artificial Sequence
  Description of Artificial Sequence: Synthetic oligonucleotide
uuuagcuucuguucuucgu

SEQ ID NO: 2315952 - RNA, 19 nt, Artificial Sequence
  Description of Artificial Sequence: Synthetic oligonucleotide
agauguuuaaagccaccca

SEQ ID NO: 2315953 - RNA, 19 nt, Artificial Sequence
  Description of Artificial Sequence: Synthetic oligonucleotide
uuagcuucuguucuucguu

SEQ ID NO: 2315954 - RNA, 19 nt, Artificial Sequence
  Description of Artificial Sequence: Synthetic oligonucleotide
agaaaugcaguuugaggaa

SEQ ID NO: 2315955 - RNA, 19 nt, Artificial Sequence
  Description of Artificial Sequence: Synthetic oligonucleotide
guuuucaaagccagcagug

SEQ ID NO: 2315956 - RNA, 19 nt, Artificial Sequence
  Description of Artificial Sequence: Synthetic oligonucleotide
gcagaugcaaaauugauua

SEQ ID NO: 2315957 - RNA, 19 nt, Artificial Sequence
  Description of Artificial Sequence: Synthetic oligonucleotide
guuuaaagccacccauaag

SEQ ID NO: 2315958 - RNA, 19 nt, Artificial Sequence
  Description of Artificial Sequence: Synthetic oligonucleotide
augagcaugggugcagagc

SEQ ID NO: 2315959 - RNA, 19 nt, Artificial Sequence
  Description of Artificial Sequence: Synthetic oligonucleotide
gauguuuaaagccacccau

SEQ ID NO: 2315960 - RNA, 19 nt, Artificial Sequence
  Description of Artificial Sequence: Synthetic oligonucleotide
uggacuucuuaccagcuuu

SEQ ID NO: 2315961 - RNA, 19 nt, Artificial Sequence
  Description of Artificial Sequence: Synthetic oligonucleotide
uuuggacuucuuaccagcu

SEQ ID NO: 2315962 - RNA, 19 nt, Artificial Sequence
  Description of Artificial Sequence: Synthetic oligonucleotide
uccucagccuccauccucc

SEQ ID NO: 2315963 - RNA, 19 nt, Artificial Sequence
  Description of Artificial Sequence: Synthetic oligonucleotide
aaggcugacugcuccucag

SEQ ID NO: 2315964 - RNA, 19 nt, Artificial Sequence
  Description of Artificial Sequence: Synthetic oligonucleotide
gcaaaauugauuaagaaau

SEQ ID NO: 2315965 - RNA, 19 nt, Artificial Sequence
  Description of Artificial Sequence: Synthetic oligonucleotide
cagauguuuaaagccaccc

SEQ ID NO: 2315966 - RNA, 19 nt, Artificial Sequence
  Description of Artificial Sequence: Synthetic oligonucleotide
ggacaauaaaguuuaaucu

SEQ ID NO: 2315967 - RNA, 19 nt, Artificial Sequence
  Description of Artificial Sequence: Synthetic oligonucleotide
uuaccagcuuugcuuaccu

SEQ ID NO: 2315968 - RNA, 19 nt, Artificial Sequence
  Description of Artificial Sequence: Synthetic oligonucleotide
acccauaagcuucaggaau

SEQ ID NO: 2315969 - RNA, 19 nt, Artificial Sequence
  Description of Artificial Sequence: Synthetic oligonucleotide
gagucuuggggaagaaagg

SEQ ID NO: 2315970 - RNA, 19 nt, Artificial Sequence
  Description of Artificial Sequence: Synthetic oligonucleotide
aauuuggcagaugcaaaau

SEQ ID NO: 2315971 - RNA, 19 nt, Artificial Sequence
  Description of Artificial Sequence: Synthetic oligonucleotide
cauagagccaagagucuug

SEQ ID NO: 2315972 - RNA, 19 nt, Artificial Sequence
  Description of Artificial Sequence: Synthetic oligonucleotide
cuuccgguguucugaagcc

SEQ ID NO: 2315973 - RNA, 19 nt, Artificial Sequence
  Description of Artificial Sequence: Synthetic oligonucleotide
ugaagacuucuugucuagg

SEQ ID NO: 2315974 - RNA, 19 nt, Artificial Sequence
  Description of Artificial Sequence: Synthetic oligonucleotide
auagagccaagagucuugg

SEQ ID NO: 2315975 - RNA, 19 nt, Artificial Sequence
  Description of Artificial Sequence: Synthetic oligonucleotide
acuucuuaccagcuuugcu

SEQ ID NO: 2315976 - RNA, 19 nt, Artificial Sequence
  Description of Artificial Sequence: Synthetic oligonucleotide
agccucauagagccaagag

SEQ ID NO: 2315977 - RNA, 19 nt, Artificial Sequence
  Description of Artificial Sequence: Synthetic oligonucleotide
uucuuaccagcuuugcuua

SEQ ID NO: 2315978 - RNA, 19 nt, Artificial Sequence
  Description of Artificial Sequence: Synthetic oligonucleotide
cugaagacuucuugucuag

SEQ ID NO: 2315979 - RNA, 19 nt, Artificial Sequence
  Description of Artificial Sequence: Synthetic oligonucleotide
aucuugcaacuugauagac

SEQ ID NO: 2315980 - RNA, 19 nt, Artificial Sequence
  Description of Artificial Sequence: Synthetic oligonucleotide
ugggagagcggcugaauga

SEQ ID NO: 2315981 - RNA, 19 nt, Artificial Sequence
  Description of Artificial Sequence: Synthetic oligonucleotide
acagauguuuaaagccacc

SEQ ID NO: 2315982 - RNA, 19 nt, Artificial Sequence
  Description of Artificial Sequence: Synthetic oligonucleotide
gaagaaagguuuccauguc

SEQ ID NO: 2315983 - RNA, 19 nt, Artificial Sequence
  Description of Artificial Sequence: Synthetic oligonucleotide
gaaaugcaguuugaggaac

SEQ ID NO: 2315984 - RNA, 19 nt, Artificial Sequence
  Description of Artificial Sequence: Synthetic oligonucleotide
ggaccuguuagucaugcug

SEQ ID NO: 2315985 - RNA, 19 nt, Artificial Sequence
  Description of Artificial Sequence: Synthetic oligonucleotide
uccacuuccgguguucuga

SEQ ID NO: 2315986 - RNA, 19 nt, Artificial Sequence
  Description of Artificial Sequence: Synthetic oligonucleotide
agaaagguuuccaugucca

SEQ ID NO: 2315987 - RNA, 19 nt, Artificial Sequence
  Description of Artificial Sequence: Synthetic oligonucleotide
aguuugaggaacaggacaa

SEQ ID NO: 2315988 - RNA, 19 nt, Artificial Sequence
  Description of Artificial Sequence: Synthetic oligonucleotide
gccauguuggaccuguuag

SEQ ID NO: 2315989 - RNA, 19 nt, Artificial Sequence
  Description of Artificial Sequence: Synthetic oligonucleotide
uugauagacuuggaggcgu

SEQ ID NO: 2315990 - RNA, 19 nt, Artificial Sequence
  Description of Artificial Sequence: Synthetic oligonucleotide
acuggccaaacuggguucc

SEQ ID NO: 2315991 - RNA, 19 nt, Artificial Sequence
  Description of Artificial Sequence: Synthetic oligonucleotide
acgauugcacuuccagcuc

SEQ ID NO: 2315992 - RNA, 19 nt, Artificial Sequence
  Description of Artificial Sequence: Synthetic oligonucleotide
cuuugcuuaccuccucagc

SEQ ID NO: 2315993 - RNA, 19 nt, Artificial Sequence
  Description of Artificial Sequence: Synthetic oligonucleotide
gacagauguuuaaagccac

SEQ ID NO: 2315994 - RNA, 19 nt, Artificial Sequence
  Description of Artificial Sequence: Synthetic oligonucleotide
caguuugaggaacaggaca

SEQ ID NO: 2315995 - RNA, 19 nt, Artificial Sequence
  Description of Artificial Sequence: Synthetic oligonucleotide
ugcuuaccuccucagcaug

SEQ ID NO: 2315996 - RNA, 19 nt, Artificial Sequence
  Description of Artificial Sequence: Synthetic oligonucleotide
uggcagaugcaaaauugau

SEQ ID NO: 2315997 - RNA, 19 nt, Artificial Sequence
  Description of Artificial Sequence: Synthetic oligonucleotide
gggaagaaagguuuccaug

SEQ ID NO: 2315998 - RNA, 19 nt, Artificial Sequence
  Description of Artificial Sequence: Synthetic oligonucleotide
agucuuggggaagaaaggu

SEQ ID NO: 2315999 - RNA, 19 nt, Artificial Sequence
  Description of Artificial Sequence: Synthetic oligonucleotide
aaaugcaguuugaggaaca

SEQ ID NO: 2316000 - RNA, 19 nt, Artificial Sequence
  Description of Artificial Sequence: Synthetic oligonucleotide
ggggacagauguuuaaagc

SEQ ID NO: 2316001 - RNA, 19 nt, Artificial Sequence
  Description of Artificial Sequence: Synthetic oligonucleotide
cauggcccggucauagucc

SEQ ID NO: 2316002 - RNA, 19 nt, Artificial Sequence
  Description of Artificial Sequence: Synthetic oligonucleotide
guuuaaucuugcaacuuga

SEQ ID NO: 2316003 - RNA, 19 nt, Artificial Sequence
  Description of Artificial Sequence: Synthetic oligonucleotide
uucugaagccucugucuug

SEQ ID NO: 2316004 - RNA, 19 nt, Artificial Sequence
  Description of Artificial Sequence: Synthetic oligonucleotide
uucugccggagcaugucug

SEQ ID NO: 2316005 - RNA, 19 nt, Artificial Sequence
  Description of Artificial Sequence: Synthetic oligonucleotide
uuggaccuguuagucaugc

SEQ ID NO: 2316006 - RNA, 19 nt, Artificial Sequence
  Description of Artificial Sequence: Synthetic oligonucleotide
ucuucuucuucuucuucau

SEQ ID NO: 2316007 - RNA, 19 nt, Artificial Sequence
  Description of Artificial Sequence: Synthetic oligonucleotide
cauguuggaccuguuaguc

SEQ ID NO: 2316008 - RNA, 19 nt, Artificial Sequence
  Description of Artificial Sequence: Synthetic oligonucleotide
aggcugacugcuccucagc

SEQ ID NO: 2316009 - RNA, 19 nt, Artificial Sequence
  Description of Artificial Sequence: Synthetic oligonucleotide
cagaggagaagcccaggcc

SEQ ID NO: 2316010 - RNA, 19 nt, Artificial Sequence
  Description of Artificial Sequence: Synthetic oligonucleotide
ucugucuugcccgacuggu

SEQ ID NO: 2316011 - RNA, 19 nt, Artificial Sequence
  Description of Artificial Sequence: Synthetic oligonucleotide
aaguuuaaucuugcaacuu

SEQ ID NO: 2316012 - RNA, 19 nt, Artificial Sequence
  Description of Artificial Sequence: Synthetic oligonucleotide
uuugaggaacaggacaaua

SEQ ID NO: 2316013 - RNA, 19 nt, Artificial Sequence
  Description of Artificial Sequence: Synthetic oligonucleotide
caauuuggcagaugcaaaa

SEQ ID NO: 2316014 - RNA, 19 nt, Artificial Sequence
  Description of Artificial Sequence: Synthetic oligonucleotide
uucagacaugagccuuggg

SEQ ID NO: 2316015 - RNA, 19 nt, Artificial Sequence
  Description of Artificial Sequence: Synthetic oligonucleotide
cauccccagccucauagag

SEQ ID NO: 2316016 - RNA, 19 nt, Artificial Sequence
  Description of Artificial Sequence: Synthetic oligonucleotide
ggaagaaagguuuccaugu

SEQ ID NO: 2316017 - RNA, 19 nt, Artificial Sequence
  Description of Artificial Sequence: Synthetic oligonucleotide
cugacugcuccucagccuc

SEQ ID NO: 2316018 - RNA, 19 nt, Artificial Sequence
  Description of Artificial Sequence: Synthetic oligonucleotide
cuuaccagcuuugcuuacc

SEQ ID NO: 2316019 - RNA, 19 nt, Artificial Sequence
  Description of Artificial Sequence: Synthetic oligonucleotide
gagcggcugaaugaugggg

SEQ ID NO: 2316020 - RNA, 19 nt, Artificial Sequence
  Description of Artificial Sequence: Synthetic oligonucleotide
  modified_base (5)..(5): a, c, u, g, unknown or other
ucccngcucuuucugcccc

SEQ ID NO: 2316021 - RNA, 19 nt, Artificial Sequence
  Description of Artificial Sequence: Synthetic oligonucleotide
agcuuugcuuaccuccuca

SEQ ID NO: 2316022 - RNA, 19 nt, Artificial Sequence
  Description of Artificial Sequence: Synthetic oligonucleotide
auguuggaccuguuaguca

SEQ ID NO: 2316023 - RNA, 19 nt, Artificial Sequence
  Description of Artificial Sequence: Synthetic oligonucleotide
aggugccugauccaagcca

SEQ ID NO: 2316024 - RNA, 19 nt, Artificial Sequence
  Description of Artificial Sequence: Synthetic oligonucleotide
ugcaggugccugauccaag

SEQ ID NO: 2316025 - RNA, 19 nt, Artificial Sequence
  Description of Artificial Sequence: Synthetic oligonucleotide
guagaagaccuugcgggcc

SEQ ID NO: 2316026 - RNA, 19 nt, Artificial Sequence
  Description of Artificial Sequence: Synthetic oligonucleotide
uccgguguucugaagccuc

SEQ ID NO: 2316027 - RNA, 19 nt, Artificial Sequence
  Description of Artificial Sequence: Synthetic oligonucleotide
agcaugggugcagagcauc

SEQ ID NO: 2316028 - RNA, 19 nt, Artificial Sequence
  Description of Artificial Sequence: Synthetic oligonucleotide
uugcaacuugauagacuug

SEQ ID NO: 2316029 - RNA, 19 nt, Artificial Sequence
  Description of Artificial Sequence: Synthetic oligonucleotide
ucuucuucuucuucuucuu

SEQ ID NO: 2316030 - RNA, 19 nt, Artificial Sequence
  Description of Artificial Sequence: Synthetic oligonucleotide
gauggggacagauguuuaa

SEQ ID NO: 2316031 - RNA, 19 nt, Artificial Sequence
  Description of Artificial Sequence: Synthetic oligonucleotide
uuagucaugcugggagagc

SEQ ID NO: 2316032 - RNA, 19 nt, Artificial Sequence
  Description of Artificial Sequence: Synthetic oligonucleotide
gucauaguccugcugcaga

SEQ ID NO: 2316033 - RNA, 19 nt, Artificial Sequence
  Description of Artificial Sequence: Synthetic oligonucleotide
cacgauugcacuuccagcu

SEQ ID NO: 2316034 - RNA, 19 nt, Artificial Sequence
  Description of Artificial Sequence: Synthetic oligonucleotide
agguuuccauguccagaac

SEQ ID NO: 2316035 - RNA, 19 nt, Artificial Sequence
  Description of Artificial Sequence: Synthetic oligonucleotide
augcaguuugaggaacagg

SEQ ID NO: 2316036 - RNA, 19 nt, Artificial Sequence
  Description of Artificial Sequence: Synthetic oligonucleotide
ugccggagcaugucugaag

SEQ ID NO: 2316037 - RNA, 19 nt, Artificial Sequence
  Description of Artificial Sequence: Synthetic oligonucleotide
caugccuggggucugguga

SEQ ID NO: 2316038 - RNA, 19 nt, Artificial Sequence
  Description of Artificial Sequence: Synthetic oligonucleotide
uagagccaagagucuuggg

SEQ ID NO: 2316039 - RNA, 19 nt, Artificial Sequence
  Description of Artificial Sequence: Synthetic oligonucleotide
uugcuuaccuccucagcau

SEQ ID NO: 2316040 - RNA, 19 nt, Artificial Sequence
  Description of Artificial Sequence: Synthetic oligonucleotide
gucccacuggccaaacugg

SEQ ID NO: 2316041 - RNA, 19 nt, Artificial Sequence
  Description of Artificial Sequence: Synthetic oligonucleotide
ucugccggagcaugucuga

SEQ ID NO: 2316042 - RNA, 19 nt, Artificial Sequence
  Description of Artificial Sequence: Synthetic oligonucleotide
ugggugcagagcaucccca

SEQ ID NO: 2316043 - RNA, 19 nt, Artificial Sequence
  Description of Artificial Sequence: Synthetic oligonucleotide
cuuaccuccucagcaugcc

SEQ ID NO: 2316044 - RNA, 19 nt, Artificial Sequence
  Description of Artificial Sequence: Synthetic oligonucleotide
uucuugucuagggccaugu

SEQ ID NO: 2316045 - RNA, 19 nt, Artificial Sequence
  Description of Artificial Sequence: Synthetic oligonucleotide
  modified_base (10)..(10): a, c, u, g, unknown or other
ugggcucccngcucuuucu

SEQ ID NO: 2316046 - RNA, 19 nt, Artificial Sequence
  Description of Artificial Sequence: Synthetic oligonucleotide
cugggagagcggcugaaug

SEQ ID NO: 2316047 - RNA, 19 nt, Artificial Sequence
  Description of Artificial Sequence: Synthetic oligonucleotide
gacuucuuaccagcuuugc

SEQ ID NO: 2316048 - RNA, 19 nt, Artificial Sequence
  Description of Artificial Sequence: Synthetic oligonucleotide
cuucuuaccagcuuugcuu

SEQ ID NO: 2316049 - RNA, 19 nt, Artificial Sequence
  Description of Artificial Sequence: Synthetic oligonucleotide
cuucuucuucuucuucuuc

SEQ ID NO: 2316050 - RNA, 19 nt, Artificial Sequence
  Description of Artificial Sequence: Synthetic oligonucleotide
uuaccuccucagcaugccu

SEQ ID NO: 2316051 - RNA, 19 nt, Artificial Sequence
  Description of Artificial Sequence: Synthetic oligonucleotide
ugauggggacagauguuua

SEQ ID NO: 2316052 - RNA, 19 nt, Artificial Sequence
  Description of Artificial Sequence: Synthetic oligonucleotide
cuugggagguggccugugg

SEQ ID NO: 2316053 - RNA, 19 nt, Artificial Sequence
  Description of Artificial Sequence: Synthetic oligonucleotide
cuucagacaugagccuugg

SEQ ID NO: 2316054 - RNA, 19 nt, Artificial Sequence
  Description of Artificial Sequence: Synthetic oligonucleotide
cuuucugccccaaggcuga

SEQ ID NO: 2316055 - RNA, 19 nt, Artificial Sequence
  Description of Artificial Sequence: Synthetic oligonucleotide
cuuggaggcguuccgguca

SEQ ID NO: 2316056 - RNA, 19 nt, Artificial Sequence
  Description of Artificial Sequence: Synthetic oligonucleotide
aaugauggggacagauguu

SEQ ID NO: 2316057 - RNA, 19 nt, Artificial Sequence
  Description of Artificial Sequence: Synthetic oligonucleotide
uccucaguaucugcaggug

SEQ ID NO: 2316058 - RNA, 19 nt, Artificial Sequence
  Description of Artificial Sequence: Synthetic oligonucleotide
aagccagcagugucccacu

SEQ ID NO: 2316059 - RNA, 19 nt, Artificial Sequence
  Description of Artificial Sequence: Synthetic oligonucleotide
uuggacuucuuaccagcuu

SEQ ID NO: 2316060 - RNA, 19 nt, Artificial Sequence
  Description of Artificial Sequence: Synthetic oligonucleotide
ccugauccaagccaauuug

SEQ ID NO: 2316061 - RNA, 19 nt, Artificial Sequence
  Description of Artificial Sequence: Synthetic oligonucleotide
ucuuaccagcuuugcuuac

SEQ ID NO: 2316062 - RNA, 19 nt, Artificial Sequence
  Description of Artificial Sequence: Synthetic oligonucleotide
aagagucuuggggaagaaa

SEQ ID NO: 2316063 - RNA, 19 nt, Artificial Sequence
  Description of Artificial Sequence: Synthetic oligonucleotide
caugagcaugggugcagag

SEQ ID NO: 2316064 - RNA, 19 nt, Artificial Sequence
  Description of Artificial Sequence: Synthetic oligonucleotide
aggccagccccacgauugc

SEQ ID NO: 2316065 - RNA, 19 nt, Artificial Sequence
  Description of Artificial Sequence: Synthetic oligonucleotide
ugccccaaggcugacugcu

SEQ ID NO: 2316066 - RNA, 19 nt, Artificial Sequence
  Description of Artificial Sequence: Synthetic oligonucleotide
ggacagauguuuaaagcca

SEQ ID NO: 2316067 - RNA, 19 nt, Artificial Sequence
  Description of Artificial Sequence: Synthetic oligonucleotide
gagguggccugugguaagg

SEQ ID NO: 2316068 - RNA, 19 nt, Artificial Sequence
  Description of Artificial Sequence: Synthetic oligonucleotide
gucuucuucuucuucuucu

SEQ ID NO: 2316069 - RNA, 19 nt, Artificial Sequence
  Description of Artificial Sequence: Synthetic oligonucleotide
cucugucuugcccgacugg

SEQ ID NO: 2316070 - RNA, 19 nt, Artificial Sequence
  Description of Artificial Sequence: Synthetic oligonucleotide
agccccacgauugcacuuc

SEQ ID NO: 2316071 - RNA, 19 nt, Artificial Sequence
  Description of Artificial Sequence: Synthetic oligonucleotide
ugucuagggccauguugga

SEQ ID NO: 2316072 - RNA, 19 nt, Artificial Sequence
  Description of Artificial Sequence: Synthetic oligonucleotide
  modified_base (7)..(7): a, c, u, g, unknown or other
gcucccngcucuuucugcc

SEQ ID NO: 2316073 - RNA, 19 nt, Artificial Sequence
  Description of Artificial Sequence: Synthetic oligonucleotide
cugcagauucugccggagc

SEQ ID NO: 2316074 - RNA, 19 nt, Artificial Sequence
  Description of Artificial Sequence: Synthetic oligonucleotide
aagaccuugcgggccucag

SEQ ID NO: 2316075 - RNA, 19 nt, Artificial Sequence
  Description of Artificial Sequence: Synthetic oligonucleotide
ugauagacuuggaggcguu

SEQ ID NO: 2316076 - RNA, 19 nt, Artificial Sequence
  Description of Artificial Sequence: Synthetic oligonucleotide
  modified_base (6)..(6): a, c, u, g, unknown or other
cucccngcucuuucugccc

SEQ ID NO: 2316077 - RNA, 19 nt, Artificial Sequence
  Description of Artificial Sequence: Synthetic oligonucleotide
auggcccggucauaguccu

SEQ ID NO: 2316078 - RNA, 19 nt, Artificial Sequence
  Description of Artificial Sequence: Synthetic oligonucleotide
guuuccauguccagaaccu

SEQ ID NO: 2316079 - RNA, 19 nt, Artificial Sequence
  Description of Artificial Sequence: Synthetic oligonucleotide
gauucugccggagcauguc

SEQ ID NO: 2316080 - RNA, 19 nt, Artificial Sequence
  Description of Artificial Sequence: Synthetic oligonucleotide
agccaagagucuuggggaa

SEQ ID NO: 2316081 - RNA, 19 nt, Artificial Sequence
  Description of Artificial Sequence: Synthetic oligonucleotide
cugugguaaggacuuccuc

SEQ ID NO: 2316082 - RNA, 19 nt, Artificial Sequence
  Description of Artificial Sequence: Synthetic oligonucleotide
caugggugcagagcauccc

SEQ ID NO: 2316083 - RNA, 19 nt, Artificial Sequence
  Description of Artificial Sequence: Synthetic oligonucleotide
ucccuuccacuuccggugu

SEQ ID NO: 2316084 - RNA, 19 nt, Artificial Sequence
  Description of Artificial Sequence: Synthetic oligonucleotide
agcggcugaaugaugggga

SEQ ID NO: 2316085 - RNA, 19 nt, Artificial Sequence
  Description of Artificial Sequence: Synthetic oligonucleotide
gcaggugccugauccaagc

SEQ ID NO: 2316086 - RNA, 19 nt, Artificial Sequence
  Description of Artificial Sequence: Synthetic oligonucleotide
aggcguuccggucaaugua

SEQ ID NO: 2316087 - RNA, 19 nt, Artificial Sequence
  Description of Artificial Sequence: Synthetic oligonucleotide
cagauucugccggagcaug

SEQ ID NO: 2316088 - RNA, 19 nt, Artificial Sequence
  Description of Artificial Sequence: Synthetic oligonucleotide
gcuuugcuuaccuccucag

SEQ ID NO: 2316089 - RNA, 19 nt, Artificial Sequence
  Description of Artificial Sequence: Synthetic oligonucleotide
ggcugacugcuccucagcc

SEQ ID NO: 2316090 - RNA, 19 nt, Artificial Sequence
  Description of Artificial Sequence: Synthetic oligonucleotide
caggugccugauccaagcc

SEQ ID NO: 2316091 - RNA, 19 nt, Artificial Sequence
  Description of Artificial Sequence: Synthetic oligonucleotide
auguuuaaagccacccaua

SEQ ID NO: 2316092 - RNA, 19 nt, Artificial Sequence
  Description of Artificial Sequence: Synthetic oligonucleotide
cccacgauugcacuuccag

SEQ ID NO: 2316093 - RNA, 19 nt, Artificial Sequence
  Description of Artificial Sequence: Synthetic oligonucleotide
ugguaaggacuuccuccuc

SEQ ID NO: 2316094 - RNA, 19 nt, Artificial Sequence
  Description of Artificial Sequence: Synthetic oligonucleotide
cugucuugcccgacuggug

SEQ ID NO: 2316095 - RNA, 19 nt, Artificial Sequence
  Description of Artificial Sequence: Synthetic oligonucleotide
ggcguuccggucaauguag

SEQ ID NO: 2316096 - RNA, 19 nt, Artificial Sequence
  Description of Artificial Sequence: Synthetic oligonucleotide
ccacgauugcacuuccagc

SEQ ID NO: 2316097 - RNA, 19 nt, Artificial Sequence
  Description of Artificial Sequence: Synthetic oligonucleotide
gguucccuuccacuuccgg

SEQ ID NO: 2316098 - RNA, 19 nt, Artificial Sequence
  Description of Artificial Sequence: Synthetic oligonucleotide
uuggaggcguuccggucaa

SEQ ID NO: 2316099 - RNA, 19 nt, Artificial Sequence
  Description of Artificial Sequence: Synthetic oligonucleotide
agccuugggagguggccug

SEQ ID NO: 2316100 - RNA, 19 nt, Artificial Sequence
  Description of Artificial Sequence: Synthetic oligonucleotide
gauagacuuggaggcguuc

SEQ ID NO: 2316101 - RNA, 19 nt, Artificial Sequence
  Description of Artificial Sequence: Synthetic oligonucleotide
auggggacagauguuuaaa

SEQ ID NO: 2316102 - RNA, 19 nt, Artificial Sequence
  Description of Artificial Sequence: Synthetic oligonucleotide
ccucaguaucugcaggugc

SEQ ID NO: 2316103 - RNA, 19 nt, Artificial Sequence
  Description of Artificial Sequence: Synthetic oligonucleotide
cagagcauccccagccuca

SEQ ID NO: 2316104 - RNA, 19 nt, Artificial Sequence
  Description of Artificial Sequence: Synthetic oligonucleotide
agggccauguuggaccugu

SEQ ID NO: 2316105 - RNA, 19 nt, Artificial Sequence
  Description of Artificial Sequence: Synthetic oligonucleotide
aagcccaggccagccccac

SEQ ID NO: 2316106 - RNA, 19 nt, Artificial Sequence
  Description of Artificial Sequence: Synthetic oligonucleotide
caaacuggguucccuucca

SEQ ID NO: 2316107 - RNA, 19 nt, Artificial Sequence
  Description of Artificial Sequence: Synthetic oligonucleotide
agugucccacuggccaaac

SEQ ID NO: 2316108 - RNA, 19 nt, Artificial Sequence
  Description of Artificial Sequence: Synthetic oligonucleotide
gccaauuuggcagaugcaa

SEQ ID NO: 2316109 - RNA, 19 nt, Artificial Sequence
  Description of Artificial Sequence: Synthetic oligonucleotide
gucuggugaggucuucaga

SEQ ID NO: 2316110 - RNA, 19 nt, Artificial Sequence
  Description of Artificial Sequence: Synthetic oligonucleotide
aagccacccauaagcuuca

SEQ ID NO: 2316111 - RNA, 19 nt, Artificial Sequence
  Description of Artificial Sequence: Synthetic oligonucleotide
uggaccuguuagucaugcu

SEQ ID NO: 2316112 - RNA, 19 nt, Artificial Sequence
  Description of Artificial Sequence: Synthetic oligonucleotide
guucccuuccacuuccggu

SEQ ID NO: 2316113 - RNA, 19 nt, Artificial Sequence
  Description of Artificial Sequence: Synthetic oligonucleotide
gaggcguuccggucaaugu

SEQ ID NO: 2316114 - RNA, 19 nt, Artificial Sequence
  Description of Artificial Sequence: Synthetic oligonucleotide
cagaugcaaaauugauuaa

SEQ ID NO: 2316115 - RNA, 19 nt, Artificial Sequence
  Description of Artificial Sequence: Synthetic oligonucleotide
uuccgguguucugaagccu

SEQ ID NO: 2316116 - RNA, 19 nt, Artificial Sequence
  Description of Artificial Sequence: Synthetic oligonucleotide
cacccauaagcuucaggaa

SEQ ID NO: 2316117 - RNA, 19 nt, Artificial Sequence
  Description of Artificial Sequence: Synthetic oligonucleotide
agaccuugcgggccucaga

SEQ ID NO: 2316118 - RNA, 19 nt, Artificial Sequence
  Description of Artificial Sequence: Synthetic oligonucleotide
ucagcaugccuggggucug

SEQ ID NO: 2316119 - RNA, 19 nt, Artificial Sequence
  Description of Artificial Sequence: Synthetic oligonucleotide
gguaaggacuuccuccucu

SEQ ID NO: 2316120 - RNA, 19 nt, Artificial Sequence
  Description of Artificial Sequence: Synthetic oligonucleotide
uaucugcaggugccugauc

SEQ ID NO: 2316121 - RNA, 19 nt, Artificial Sequence
  Description of Artificial Sequence: Synthetic oligonucleotide
gagcaugucugaagacuuc

SEQ ID NO: 2316122 - RNA, 19 nt, Artificial Sequence
  Description of Artificial Sequence: Synthetic oligonucleotide
gccggagcaugucugaaga

SEQ ID NO: 2316123 - RNA, 19 nt, Artificial Sequence
  Description of Artificial Sequence: Synthetic oligonucleotide
gccagcagugucccacugg

SEQ ID NO: 2316124 - RNA, 19 nt, Artificial Sequence
  Description of Artificial Sequence: Synthetic oligonucleotide
gccacccauaagcuucagg

SEQ ID NO: 2316125 - RNA, 19 nt, Artificial Sequence
  Description of Artificial Sequence: Synthetic oligonucleotide
gcucauggcccggucauag

SEQ ID NO: 2316126 - RNA, 19 nt, Artificial Sequence
  Description of Artificial Sequence: Synthetic oligonucleotide
guucugaagccucugucuu

SEQ ID NO: 2316127 - RNA, 19 nt, Artificial Sequence
  Description of Artificial Sequence: Synthetic oligonucleotide
cugguggucuucuucuucu

SEQ ID NO: 2316128 - RNA, 19 nt, Artificial Sequence
  Description of Artificial Sequence: Synthetic oligonucleotide
auugcacuuccagcucaug

SEQ ID NO: 2316129 - RNA, 19 nt, Artificial Sequence
  Description of Artificial Sequence: Synthetic oligonucleotide
agauucugccggagcaugu

SEQ ID NO: 2316130 - RNA, 19 nt, Artificial Sequence
  Description of Artificial Sequence: Synthetic oligonucleotide
ggucauaguccugcugcag

SEQ ID NO: 2316131 - RNA, 19 nt, Artificial Sequence
  Description of Artificial Sequence: Synthetic oligonucleotide
ggucuucuucuucuucuuc

SEQ ID NO: 2316132 - RNA, 19 nt, Artificial Sequence
  Description of Artificial Sequence: Synthetic oligonucleotide
ugccugauccaagccaauu

SEQ ID NO: 2316133 - RNA, 19 nt, Artificial Sequence
  Description of Artificial Sequence: Synthetic oligonucleotide
caagccaauuuggcagaug

SEQ ID NO: 2316134 - RNA, 19 nt, Artificial Sequence
  Description of Artificial Sequence: Synthetic oligonucleotide
uggccaaacuggguucccu

SEQ ID NO: 2316135 - RNA, 19 nt, Artificial Sequence
  Description of Artificial Sequence: Synthetic oligonucleotide
caguaucugcaggugccug

SEQ ID NO: 2316136 - RNA, 19 nt, Artificial Sequence
  Description of Artificial Sequence: Synthetic oligonucleotide
ggagguggccugugguaag

SEQ ID NO: 2316137 - RNA, 19 nt, Artificial Sequence
  Description of Artificial Sequence: Synthetic oligonucleotide
  modified_base (11)..(11): a, c, u, g, unknown or other
cugggcucccngcucuuuc

SEQ ID NO: 2316138 - RNA, 19 nt, Artificial Sequence
  Description of Artificial Sequence: Synthetic oligonucleotide
gucuagggccauguuggac

SEQ ID NO: 2316139 - RNA, 19 nt, Artificial Sequence
  Description of Artificial Sequence: Synthetic oligonucleotide
cucauagagccaagagucu

SEQ ID NO: 2316140 - RNA, 19 nt, Artificial Sequence
  Description of Artificial Sequence: Synthetic oligonucleotide
ccggucaauguagaagacc

SEQ ID NO: 2316141 - RNA, 19 nt, Artificial Sequence
  Description of Artificial Sequence: Synthetic oligonucleotide
ggacuucuuaccagcuuug

SEQ ID NO: 2316142 - RNA, 19 nt, Artificial Sequence
  Description of Artificial Sequence: Synthetic oligonucleotide
cacuuccgguguucugaag

SEQ ID NO: 2316143 - RNA, 19 nt, Artificial Sequence
  Description of Artificial Sequence: Synthetic oligonucleotide
  modified_base (19)..(19): a, c, u, g, unknown or other
ugugcucucugggcucccn

SEQ ID NO: 2316144 - RNA, 19 nt, Artificial Sequence
  Description of Artificial Sequence: Synthetic oligonucleotide
agccaauuuggcagaugca

SEQ ID NO: 2316145 - RNA, 19 nt, Artificial Sequence
  Description of Artificial Sequence: Synthetic oligonucleotide
ucuugcccgacuggugguc

SEQ ID NO: 2316146 - RNA, 19 nt, Artificial Sequence
  Description of Artificial Sequence: Synthetic oligonucleotide
cuucuugucuagggccaug

SEQ ID NO: 2316147 - RNA, 19 nt, Artificial Sequence
  Description of Artificial Sequence: Synthetic oligonucleotide
gcuuaccuccucagcaugc

SEQ ID NO: 2316148 - RNA, 19 nt, Artificial Sequence
  Description of Artificial Sequence: Synthetic oligonucleotide
gguggccugugguaaggac

SEQ ID NO: 2316149 - RNA, 19 nt, Artificial Sequence
  Description of Artificial Sequence: Synthetic oligonucleotide
guuggaccuguuagucaug

SEQ ID NO: 2316150 - RNA, 19 nt, Artificial Sequence
  Description of Artificial Sequence: Synthetic oligonucleotide
caaggcugacugcuccuca

SEQ ID NO: 2316151 - RNA, 19 nt, Artificial Sequence
  Description of Artificial Sequence: Synthetic oligonucleotide
  modified_base (8)..(8): a, c, u, g, unknown or other
ggcucccngcucuuucugc

SEQ ID NO: 2316152 - RNA, 19 nt, Artificial Sequence
  Description of Artificial Sequence: Synthetic oligonucleotide
gcaguuugaggaacaggac

SEQ ID NO: 2316153 - RNA, 19 nt, Artificial Sequence
  Description of Artificial Sequence: Synthetic oligonucleotide
ggugaggucuucagacaug

SEQ ID NO: 2316154 - RNA, 19 nt, Artificial Sequence
  Description of Artificial Sequence: Synthetic oligonucleotide
cauccuccaugagcauggg

SEQ ID NO: 2316155 - RNA, 19 nt, Artificial Sequence
  Description of Artificial Sequence: Synthetic oligonucleotide
ccaauuuggcagaugcaaa

SEQ ID NO: 2316156 - RNA, 19 nt, Artificial Sequence
  Description of Artificial Sequence: Synthetic oligonucleotide
ggugccugauccaagccaa

SEQ ID NO: 2316157 - RNA, 19 nt, Artificial Sequence
  Description of Artificial Sequence: Synthetic oligonucleotide
ggccucagaggagaagccc

SEQ ID NO: 2316158 - RNA, 19 nt, Artificial Sequence
  Description of Artificial Sequence: Synthetic oligonucleotide
agcccaggccagccccacg

SEQ ID NO: 2316159 - RNA, 19 nt, Artificial Sequence
  Description of Artificial Sequence: Synthetic oligonucleotide
guggccugugguaaggacu

SEQ ID NO: 2316160 - RNA, 19 nt, Artificial Sequence
  Description of Artificial Sequence: Synthetic oligonucleotide
augcugggagagcggcuga

SEQ ID NO: 2316161 - RNA, 19 nt, Artificial Sequence
  Description of Artificial Sequence: Synthetic oligonucleotide
gccaaacuggguucccuuc

SEQ ID NO: 2316162 - RNA, 19 nt, Artificial Sequence
  Description of Artificial Sequence: Synthetic oligonucleotide
agagcauccccagccucau

SEQ ID NO: 2316163 - RNA, 19 nt, Artificial Sequence
  Description of Artificial Sequence: Synthetic oligonucleotide
  modified_base (2)..(2): a, c, u, g, unknown or other
cngcucuuucugccccaag

SEQ ID NO: 2316164 - RNA, 19 nt, Artificial Sequence
  Description of Artificial Sequence: Synthetic oligonucleotide
gcaugggugcagagcaucc

SEQ ID NO: 2316165 - RNA, 19 nt, Artificial Sequence
  Description of Artificial Sequence: Synthetic oligonucleotide
gcggcugaaugauggggac

SEQ ID NO: 2316166 - RNA, 19 nt, Artificial Sequence
  Description of Artificial Sequence: Synthetic oligonucleotide
cggucaauguagaagaccu

SEQ ID NO: 2316167 - RNA, 19 nt, Artificial Sequence
  Description of Artificial Sequence: Synthetic oligonucleotide
guaaggacuuccuccucuu

SEQ ID NO: 2316168 - RNA, 19 nt, Artificial Sequence
  Description of Artificial Sequence: Synthetic oligonucleotide
gccaagagucuuggggaag

SEQ ID NO: 2316169 - RNA, 19 nt, Artificial Sequence
  Description of Artificial Sequence: Synthetic oligonucleotide
caggacaauaaaguuuaau

SEQ ID NO: 2316170 - RNA, 19 nt, Artificial Sequence
  Description of Artificial Sequence: Synthetic oligonucleotide
ccucugucuugcccgacug

SEQ ID NO: 2316171 - RNA, 19 nt, Artificial Sequence
  Description of Artificial Sequence: Synthetic oligonucleotide
cuagggccauguuggaccu

SEQ ID NO: 2316172 - RNA, 19 nt, Artificial Sequence
  Description of Artificial Sequence: Synthetic oligonucleotide
gaagaccuugcgggccuca

SEQ ID NO: 2316173 - RNA, 19 nt, Artificial Sequence
  Description of Artificial Sequence: Synthetic oligonucleotide
uuccagcucauggcccggu

SEQ ID NO: 2316174 - RNA, 19 nt, Artificial Sequence
  Description of Artificial Sequence: Synthetic oligonucleotide
ccgacugguggucuucuuc

SEQ ID NO: 2316175 - RNA, 19 nt, Artificial Sequence
  Description of Artificial Sequence: Synthetic oligonucleotide
uggcccggucauaguccug

SEQ ID NO: 2316176 - RNA, 19 nt, Artificial Sequence
  Description of Artificial Sequence: Synthetic oligonucleotide
gaagcccaggccagcccca

SEQ ID NO: 2316177 - RNA, 19 nt, Artificial Sequence
  Description of Artificial Sequence: Synthetic oligonucleotide
agccucugucuugcccgac

SEQ ID NO: 2316178 - RNA, 19 nt, Artificial Sequence
  Description of Artificial Sequence: Synthetic oligonucleotide
cgggccucagaggagaagc

SEQ ID NO: 2316179 - RNA, 19 nt, Artificial Sequence
  Description of Artificial Sequence: Synthetic oligonucleotide
gagccuugggagguggccu

SEQ ID NO: 2316180 - RNA, 19 nt, Artificial Sequence
  Description of Artificial Sequence: Synthetic oligonucleotide
cuggggucuggugaggucu

SEQ ID NO: 2316181 - RNA, 19 nt, Artificial Sequence
  Description of Artificial Sequence: Synthetic oligonucleotide
ggucuucagacaugagccu

SEQ ID NO: 2316182 - RNA, 19 nt, Artificial Sequence
  Description of Artificial Sequence: Synthetic oligonucleotide
cagcaugccuggggucugg

SEQ ID NO: 2316183 - RNA, 19 nt, Artificial Sequence
  Description of Artificial Sequence: Synthetic oligonucleotide
agguggccugugguaagga

SEQ ID NO: 2316184 - RNA, 19 nt, Artificial Sequence
  Description of Artificial Sequence: Synthetic oligonucleotide
cuccaugagcaugggugca

SEQ ID NO: 2316185 - RNA, 19 nt, Artificial Sequence
  Description of Artificial Sequence: Synthetic oligonucleotide
acaggacaauaaaguuuaa

SEQ ID NO: 2316186 - RNA, 19 nt, Artificial Sequence
  Description of Artificial Sequence: Synthetic oligonucleotide
  modified_base (9)..(9): a, c, u, g, unknown or other
gggcucccngcucuuucug

SEQ ID NO: 2316187 - RNA, 19 nt, Artificial Sequence
  Description of Artificial Sequence: Synthetic oligonucleotide
gcaacuugauagacuugga

SEQ ID NO: 2316188 - RNA, 19 nt, Artificial Sequence
  Description of Artificial Sequence: Synthetic oligonucleotide
ggcagaugcaaaauugauu

SEQ ID NO: 2316189 - RNA, 19 nt, Artificial Sequence
  Description of Artificial Sequence: Synthetic oligonucleotide
gauugcacuuccagcucau

SEQ ID NO: 2316190 - RNA, 19 nt, Artificial Sequence
  Description of Artificial Sequence: Synthetic oligonucleotide
ggagagcggcugaaugaug

SEQ ID NO: 2316191 - RNA, 19 nt, Artificial Sequence
  Description of Artificial Sequence: Synthetic oligonucleotide
ugcccgacugguggucuuc

SEQ ID NO: 2316192 - RNA, 19 nt, Artificial Sequence
  Description of Artificial Sequence: Synthetic oligonucleotide
  modified_base (12)..(12): a, c, u, g, unknown or other
ucugggcucccngcucuuu

SEQ ID NO: 2316193 - RNA, 19 nt, Artificial Sequence
  Description of Artificial Sequence: Synthetic oligonucleotide
ccagccucauagagccaag

SEQ ID NO: 2316194 - RNA, 19 nt, Artificial Sequence
  Description of Artificial Sequence: Synthetic oligonucleotide
cugcaggugccugauccaa

SEQ ID NO: 2316195 - RNA, 19 nt, Artificial Sequence
  Description of Artificial Sequence: Synthetic oligonucleotide
ggagcaugucugaagacuu

SEQ ID NO: 2316196 - RNA, 19 nt, Artificial Sequence
  Description of Artificial Sequence: Synthetic oligonucleotide
uugcccgacugguggucuu

SEQ ID NO: 2316197 - RNA, 19 nt, Artificial Sequence
  Description of Artificial Sequence: Synthetic oligonucleotide
ccaagagucuuggggaaga

SEQ ID NO: 2316198 - RNA, 19 nt, Artificial Sequence
  Description of Artificial Sequence: Synthetic oligonucleotide
gcaugccuggggucuggug

SEQ ID NO: 2316199 - RNA, 19 nt, Artificial Sequence
  Description of Artificial Sequence: Synthetic oligonucleotide
guaucugcaggugccugau

SEQ ID NO: 2316200 - RNA, 19 nt, Artificial Sequence
  Description of Artificial Sequence: Synthetic oligonucleotide
gcagugucccacuggccaa

SEQ ID NO: 2316201 - RNA, 19 nt, Artificial Sequence
  Description of Artificial Sequence: Synthetic oligonucleotide
ggccauguuggaccuguua

SEQ ID NO: 2316202 - RNA, 19 nt, Artificial Sequence
  Description of Artificial Sequence: Synthetic oligonucleotide
ccggagcaugucugaagac

SEQ ID NO: 2316203 - RNA, 19 nt, Artificial Sequence
  Description of Artificial Sequence: Synthetic oligonucleotide
gucuugcccgacugguggu

SEQ ID NO: 2316204 - RNA, 19 nt, Artificial Sequence
  Description of Artificial Sequence: Synthetic oligonucleotide
gcauccccagccucauaga

SEQ ID NO: 2316205 - RNA, 19 nt, Artificial Sequence
  Description of Artificial Sequence: Synthetic oligonucleotide
gcugacugcuccucagccu

SEQ ID NO: 2316206 - RNA, 19 nt, Artificial Sequence
  Description of Artificial Sequence: Synthetic oligonucleotide
ccauguuggaccuguuagu

SEQ ID NO: 2316207 - RNA, 19 nt, Artificial Sequence
  Description of Artificial Sequence: Synthetic oligonucleotide
cgauugcacuuccagcuca

SEQ ID NO: 2316208 - RNA, 19 nt, Artificial Sequence
  Description of Artificial Sequence: Synthetic oligonucleotide
gccugauccaagccaauuu

SEQ ID NO: 2316209 - RNA, 19 nt, Artificial Sequence
  Description of Artificial Sequence: Synthetic oligonucleotide
gccagccccacgauugcac

SEQ ID NO: 2316210 - RNA, 19 nt, Artificial Sequence
  Description of Artificial Sequence: Synthetic oligonucleotide
gccccacgauugcacuucc

SEQ ID NO: 2316211 - RNA, 19 nt, Artificial Sequence
  Description of Artificial Sequence: Synthetic oligonucleotide
ccagcuuugcuuaccuccu

SEQ ID NO: 2316212 - RNA, 19 nt, Artificial Sequence
  Description of Artificial Sequence: Synthetic oligonucleotide
cccauaagcuucaggaauu

SEQ ID NO: 2316213 - RNA, 19 nt, Artificial Sequence
  Description of Artificial Sequence: Synthetic oligonucleotide
ccucagcaugccugggguc

SEQ ID NO: 2316214 - RNA, 19 nt, Artificial Sequence
  Description of Artificial Sequence: Synthetic oligonucleotide
cugugcucucugggcuccc

SEQ ID NO: 2316215 - RNA, 19 nt, Artificial Sequence
  Description of Artificial Sequence: Synthetic oligonucleotide
cagcucauggcccggucau

SEQ ID NO: 2316216 - RNA, 19 nt, Artificial Sequence
  Description of Artificial Sequence: Synthetic oligonucleotide
gggucuggugaggucuuca

SEQ ID NO: 2316217 - RNA, 19 nt, Artificial Sequence
  Description of Artificial Sequence: Synthetic oligonucleotide
ccuuccacuuccgguguuc

SEQ ID NO: 2316218 - RNA, 19 nt, Artificial Sequence
  Description of Artificial Sequence: Synthetic oligonucleotide
ccaaggcugacugcuccuc

SEQ ID NO: 2316219 - RNA, 19 nt, Artificial Sequence
  Description of Artificial Sequence: Synthetic oligonucleotide
cauaagcuucaggaauuuu

SEQ ID NO: 2316220 - RNA, 19 nt, Artificial Sequence
  Description of Artificial Sequence: Synthetic oligonucleotide
cucauggcccggucauagu

SEQ ID NO: 2316221 - RNA, 19 nt, Artificial Sequence
  Description of Artificial Sequence: Synthetic oligonucleotide
gggagagcggcugaaugau

SEQ ID NO: 2316222 - RNA, 19 nt, Artificial Sequence
  Description of Artificial Sequence: Synthetic oligonucleotide
ccugugguaaggacuuccu

SEQ ID NO: 2316223 - RNA, 19 nt, Artificial Sequence
  Description of Artificial Sequence: Synthetic oligonucleotide
cagugucccacuggccaaa

SEQ ID NO: 2316224 - RNA, 19 nt, Artificial Sequence
  Description of Artificial Sequence: Synthetic oligonucleotide
cccagccucauagagccaa

SEQ ID NO: 2316225 - RNA, 19 nt, Artificial Sequence
  Description of Artificial Sequence: Synthetic oligonucleotide
gagcauccccagccucaua

SEQ ID NO: 2316226 - RNA, 19 nt, Artificial Sequence
  Description of Artificial Sequence: Synthetic oligonucleotide
cuugcccgacugguggucu

SEQ ID NO: 2316227 - RNA, 19 nt, Artificial Sequence
  Description of Artificial Sequence: Synthetic oligonucleotide
cugccggagcaugucugaa

SEQ ID NO: 2316228 - RNA, 19 nt, Artificial Sequence
  Description of Artificial Sequence: Synthetic oligonucleotide
cauaguccugcugcagauu

SEQ ID NO: 2316229 - RNA, 19 nt, Artificial Sequence
  Description of Artificial Sequence: Synthetic oligonucleotide
ccacuuccgguguucugaa

SEQ ID NO: 2316230 - RNA, 19 nt, Artificial Sequence
  Description of Artificial Sequence: Synthetic oligonucleotide
gagcaugggugcagagcau

SEQ ID NO: 2316231 - RNA, 19 nt, Artificial Sequence
  Description of Artificial Sequence: Synthetic oligonucleotide
gcguuccggucaauguaga

SEQ ID NO: 2316232 - RNA, 19 nt, Artificial Sequence
  Description of Artificial Sequence: Synthetic oligonucleotide
  modified_base (4)..(4): a, c, u, g, unknown or other
cccngcucuuucugcccca

SEQ ID NO: 2316233 - RNA, 19 nt, Artificial Sequence
  Description of Artificial Sequence: Synthetic oligonucleotide
gcagauucugccggagcau

SEQ ID NO: 2316234 - RNA, 19 nt, Artificial Sequence
  Description of Artificial Sequence: Synthetic oligonucleotide
cggagcaugucugaagacu

SEQ ID NO: 2316235 - RNA, 19 nt, Artificial Sequence
  Description of Artificial Sequence: Synthetic oligonucleotide
ccuugggagguggccugug

SEQ ID NO: 2316236 - RNA, 19 nt, Artificial Sequence
  Description of Artificial Sequence: Synthetic oligonucleotide
cucagccuccauccuccau

SEQ ID NO: 2316237 - RNA, 19 nt, Artificial Sequence
  Description of Artificial Sequence: Synthetic oligonucleotide
cguuccggucaauguagaa

SEQ ID NO: 2316238 - RNA, 19 nt, Artificial Sequence
  Description of Artificial Sequence: Synthetic oligonucleotide
cagccccacgauugcacuu

SEQ ID NO: 2316239 - RNA, 19 nt, Artificial Sequence
  Description of Artificial Sequence: Synthetic oligonucleotide
ccagccccacgauugcacu

SEQ ID NO: 2316240 - RNA, 19 nt, Artificial Sequence
  Description of Artificial Sequence: Synthetic oligonucleotide
cgguguucugaagccucug

SEQ ID NO: 2316241 - RNA, 19 nt, Artificial Sequence
  Description of Artificial Sequence: Synthetic oligonucleotide
cccaaggcugacugcuccu

SEQ ID NO: 2316242 - RNA, 19 nt, Artificial Sequence
  Description of Artificial Sequence: Synthetic oligonucleotide
ccgguguucugaagccucu

SEQ ID NO: 2316243 - RNA, 19 nt, Artificial Sequence
  Description of Artificial Sequence: Synthetic oligonucleotide
ccccacgauugcacuucca

SEQ ID NO: 2316244 - RNA, 19 nt, Artificial Sequence
  Description of Artificial Sequence: Synthetic oligonucleotide
gugccugauccaagccaau

SEQ ID NO: 2316245 - RNA, 19 nt, Artificial Sequence
  Description of Artificial Sequence: Synthetic oligonucleotide
  modified_base (3)..(3): a, c, u, g, unknown or other
ccngcucuuucugccccaa

SEQ ID NO: 2316246 - RNA, 19 nt, Artificial Sequence
  Description of Artificial Sequence: Synthetic oligonucleotide
gcugggagagcggcugaau

SEQ ID NO: 2316247 - RNA, 19 nt, Artificial Sequence
  Description of Artificial Sequence: Synthetic oligonucleotide
gcccggucauaguccugcu

SEQ ID NO: 2316248 - RNA, 19 nt, Artificial Sequence
  Description of Artificial Sequence: Synthetic oligonucleotide
gcccgacugguggucuucu

SEQ ID NO: 2316249 - RNA, 19 nt, Artificial Sequence
  Description of Artificial Sequence: Synthetic oligonucleotide
ccaagccaauuuggcagau

SEQ ID NO: 2316250 - RNA, 19 nt, Artificial Sequence
  Description of Artificial Sequence: Synthetic oligonucleotide
cccgacugguggucuucuu

SEQ ID NO: 2316251 - RNA, 19 nt, Artificial Sequence
  Description of Artificial Sequence: Synthetic oligonucleotide
cccuuccacuuccgguguu

SEQ ID NO: 2316252 - RNA, 19 nt, Artificial Sequence
  Description of Artificial Sequence: Synthetic oligonucleotide
  modified_base (1)..(1): a, c, u, g, unknown or other
ngcucuuucugccccaagg

SEQ ID NO: 2316253 - RNA, 19 nt, Artificial Sequence
  Description of Artificial Sequence: Synthetic oligonucleotide
uuuacuaaacuccaaaucc

SEQ ID NO: 2316254 - RNA, 19 nt, Artificial Sequence
  Description of Artificial Sequence: Synthetic oligonucleotide
aaugaaaagggccuaagag

SEQ ID NO: 2316255 - RNA, 19 nt, Artificial Sequence
  Description of Artificial Sequence: Synthetic oligonucleotide
uauucaucaaagcugaugc

SEQ ID NO: 2316256 - RNA, 19 nt, Artificial Sequence
  Description of Artificial Sequence: Synthetic oligonucleotide
ugaaaagggccuaagaggg

SEQ ID NO: 2316257 - RNA, 19 nt, Artificial Sequence
  Description of Artificial Sequence: Synthetic oligonucleotide
auuuugagaguauacagac

SEQ ID NO: 2316258 - RNA, 19 nt, Artificial Sequence
  Description of Artificial Sequence: Synthetic oligonucleotide
auagcagucagccaucucc

SEQ ID NO: 2316259 - RNA, 19 nt, Artificial Sequence
  Description of Artificial Sequence: Synthetic oligonucleotide
aagauaauacuggugcugc

SEQ ID NO: 2316260 - RNA, 19 nt, Artificial Sequence
  Description of Artificial Sequence: Synthetic oligonucleotide
uuauuuuaguggcagagca

SEQ ID NO: 2316261 - RNA, 19 nt, Artificial Sequence
  Description of Artificial Sequence: Synthetic oligonucleotide
uaagaaauugguaggaaga

SEQ ID NO: 2316262 - RNA, 19 nt, Artificial Sequence
  Description of Artificial Sequence: Synthetic oligonucleotide
ugaauagaaagcaugggaa

SEQ ID NO: 2316263 - RNA, 19 nt, Artificial Sequence
  Description of Artificial Sequence: Synthetic oligonucleotide
aaagcugaugcgcccaucg

SEQ ID NO: 2316264 - RNA, 19 nt, Artificial Sequence
  Description of Artificial Sequence: Synthetic oligonucleotide
uccaguauucaucaaagcu

SEQ ID NO: 2316265 - RNA, 19 nt, Artificial Sequence
  Description of Artificial Sequence: Synthetic oligonucleotide
agagaggaaagguagagug

SEQ ID NO: 2316266 - RNA, 19 nt, Artificial Sequence
  Description of Artificial Sequence: Synthetic oligonucleotide
aaaagggccuaagaggggc

SEQ ID NO: 2316267 - RNA, 19 nt, Artificial Sequence
  Description of Artificial Sequence: Synthetic oligonucleotide
ugugcuuggaaacauauuu

SEQ ID NO: 2316268 - RNA, 19 nt, Artificial Sequence
  Description of Artificial Sequence: Synthetic oligonucleotide
agaguauacagacucaaca

SEQ ID NO: 2316269 - RNA, 19 nt, Artificial Sequence
  Description of Artificial Sequence: Synthetic oligonucleotide
agguagagugaauagaaag

SEQ ID NO: 2316270 - RNA, 19 nt, Artificial Sequence
  Description of Artificial Sequence: Synthetic oligonucleotide
gaagagaagaagauaauac

SEQ ID NO: 2316271 - RNA, 19 nt, Artificial Sequence
  Description of Artificial Sequence: Synthetic oligonucleotide
uuacuaaacuccaaaucca

SEQ ID NO: 2316272 - RNA, 19 nt, Artificial Sequence
  Description of Artificial Sequence: Synthetic oligonucleotide
aacucuugagggcccaccc

SEQ ID NO: 2316273 - RNA, 19 nt, Artificial Sequence
  Description of Artificial Sequence: Synthetic oligonucleotide
cuaagaaauugguaggaag

SEQ ID NO: 2316274 - RNA, 19 nt, Artificial Sequence
  Description of Artificial Sequence: Synthetic oligonucleotide
aagaaauugguaggaagag

SEQ ID NO: 2316275 - RNA, 19 nt, Artificial Sequence
  Description of Artificial Sequence: Synthetic oligonucleotide
gagaagagaggaaagguag

SEQ ID NO: 2316276 - RNA, 19 nt, Artificial Sequence
  Description of Artificial Sequence: Synthetic oligonucleotide
uacuaaacuccaaauccag

SEQ ID NO: 2316277 - RNA, 19 nt, Artificial Sequence
  Description of Artificial Sequence: Synthetic oligonucleotide
ugcuauucagcaaggguag

SEQ ID NO: 2316278 - RNA, 19 nt, Artificial Sequence
  Description of Artificial Sequence: Synthetic oligonucleotide
ucaucaaagcugaugcgcc

SEQ ID NO: 2316279 - RNA, 19 nt, Artificial Sequence
  Description of Artificial Sequence: Synthetic oligonucleotide
ucugggccuaagaagaugc

SEQ ID NO: 2316280 - RNA, 19 nt, Artificial Sequence
  Description of Artificial Sequence: Synthetic oligonucleotide
uccaccaggacgacaacgg

SEQ ID NO: 2316281 - RNA, 19 nt, Artificial Sequence
  Description of Artificial Sequence: Synthetic oligonucleotide
cauaggacuggugauaccg

SEQ ID NO: 2316282 - RNA, 19 nt, Artificial Sequence
  Description of Artificial Sequence: Synthetic oligonucleotide
uauuuuaguggcagagcag

SEQ ID NO: 2316283 - RNA, 19 nt, Artificial Sequence
  Description of Artificial Sequence: Synthetic oligonucleotide
cuuuauuuuaguggcagag

SEQ ID NO: 2316284 - RNA, 19 nt, Artificial Sequence
  Description of Artificial Sequence: Synthetic oligonucleotide
auucagcaaggguaggagc

SEQ ID NO: 2316285 - RNA, 19 nt, Artificial Sequence
  Description of Artificial Sequence: Synthetic oligonucleotide
ccagcuaagaaauugguag

SEQ ID NO: 2316286 - RNA, 19 nt, Artificial Sequence
  Description of Artificial Sequence: Synthetic oligonucleotide
agaaguuuuccaccaggac

SEQ ID NO: 2316287 - RNA, 19 nt, Artificial Sequence
  Description of Artificial Sequence: Synthetic oligonucleotide
aaauccagccuuuauuuua

SEQ ID NO: 2316288 - RNA, 19 nt, Artificial Sequence
  Description of Artificial Sequence: Synthetic oligonucleotide
ugugcuauucagcaagggu

SEQ ID NO: 2316289 - RNA, 19 nt, Artificial Sequence
  Description of Artificial Sequence: Synthetic oligonucleotide
cucuguauagcagucagcc

SEQ ID NO: 2316290 - RNA, 19 nt, Artificial Sequence
  Description of Artificial Sequence: Synthetic oligonucleotide
aaguuuuccaccaggacga

SEQ ID NO: 2316291 - RNA, 19 nt, Artificial Sequence
  Description of Artificial Sequence: Synthetic oligonucleotide
gucauucccagacagagac

SEQ ID NO: 2316292 - RNA, 19 nt, Artificial Sequence
  Description of Artificial Sequence: Synthetic oligonucleotide
gaugagguuggccauagga

SEQ ID NO: 2316293 - RNA, 19 nt, Artificial Sequence
  Description of Artificial Sequence: Synthetic oligonucleotide
cagccuuuauuuuaguggc

SEQ ID NO: 2316294 - RNA, 19 nt, Artificial Sequence
  Description of Artificial Sequence: Synthetic oligonucleotide
uuuauuuuaguggcagagc

SEQ ID NO: 2316295 - RNA, 19 nt, Artificial Sequence
  Description of Artificial Sequence: Synthetic oligonucleotide
uauagaaguuuuccaccag

SEQ ID NO: 2316296 - RNA, 19 nt, Artificial Sequence
  Description of Artificial Sequence: Synthetic oligonucleotide
uaaacuccaaauccagccu

SEQ ID NO: 2316297 - RNA, 19 nt, Artificial Sequence
  Description of Artificial Sequence: Synthetic oligonucleotide
ucaacaaaugaggaaacuc

SEQ ID NO: 2316298 - RNA, 19 nt, Artificial Sequence
  Description of Artificial Sequence: Synthetic oligonucleotide
ggugauaccgccuaucaug

SEQ ID NO: 2316299 - RNA, 19 nt, Artificial Sequence
  Description of Artificial Sequence: Synthetic oligonucleotide
agauaauacuggugcugcc

SEQ ID NO: 2316300 - RNA, 19 nt, Artificial Sequence
  Description of Artificial Sequence: Synthetic oligonucleotide
aguauacagacucaacaaa

SEQ ID NO: 2316301 - RNA, 19 nt, Artificial Sequence
  Description of Artificial Sequence: Synthetic oligonucleotide
gacgacaacggccuucucc

SEQ ID NO: 2316302 - RNA, 19 nt, Artificial Sequence
  Description of Artificial Sequence: Synthetic oligonucleotide
cugaucuuguucuugacca

SEQ ID NO: 2316303 - RNA, 19 nt, Artificial Sequence
  Description of Artificial Sequence: Synthetic oligonucleotide
agagugaauagaaagcaug

SEQ ID NO: 2316304 - RNA, 19 nt, Artificial Sequence
  Description of Artificial Sequence: Synthetic oligonucleotide
agugaauagaaagcauggg

SEQ ID NO: 2316305 - RNA, 19 nt, Artificial Sequence
  Description of Artificial Sequence: Synthetic oligonucleotide
gaagaagauaauacuggug

SEQ ID NO: 2316306 - RNA, 19 nt, Artificial Sequence
  Description of Artificial Sequence: Synthetic oligonucleotide
aauccagccuuuauuuuag

SEQ ID NO: 2316307 - RNA, 19 nt, Artificial Sequence
  Description of Artificial Sequence: Synthetic oligonucleotide
cagcuaagaaauugguagg

SEQ ID NO: 2316308 - RNA, 19 nt, Artificial Sequence
  Description of Artificial Sequence: Synthetic oligonucleotide
ccuaagaagaugcaggccc

SEQ ID NO: 2316309 - RNA, 19 nt, Artificial Sequence
  Description of Artificial Sequence: Synthetic oligonucleotide
gaguauacagacucaacaa

SEQ ID NO: 2316310 - RNA, 19 nt, Artificial Sequence
  Description of Artificial Sequence: Synthetic oligonucleotide
acuaaacuccaaauccagc

SEQ ID NO: 2316311 - RNA, 19 nt, Artificial Sequence
  Description of Artificial Sequence: Synthetic oligonucleotide
gaggaaacucuugagggcc

SEQ ID NO: 2316312 - RNA, 19 nt, Artificial Sequence
  Description of Artificial Sequence: Synthetic oligonucleotide
cauuuugagaguauacaga

SEQ ID NO: 2316313 - RNA, 19 nt, Artificial Sequence
  Description of Artificial Sequence: Synthetic oligonucleotide
aaagcaugggaagaacacu

SEQ ID NO: 2316314 - RNA, 19 nt, Artificial Sequence
  Description of Artificial Sequence: Synthetic oligonucleotide
ucaugguccaguauucauc

SEQ ID NO: 2316315 - RNA, 19 nt, Artificial Sequence
  Description of Artificial Sequence: Synthetic oligonucleotide
gauaccgccuaucaugguc

SEQ ID NO: 2316316 - RNA, 19 nt, Artificial Sequence
  Description of Artificial Sequence: Synthetic oligonucleotide
aaugccucuccacccagcu

SEQ ID NO: 2316317 - RNA, 19 nt, Artificial Sequence
  Description of Artificial Sequence: Synthetic oligonucleotide
agcaucuugcggaagcugc

SEQ ID NO: 2316318 - RNA, 19 nt, Artificial Sequence
  Description of Artificial Sequence: Synthetic oligonucleotide
ccagccuuuauuuuagugg

SEQ ID NO: 2316319 - RNA, 19 nt, Artificial Sequence
  Description of Artificial Sequence: Synthetic oligonucleotide
guagagugaauagaaagca

SEQ ID NO: 2316320 - RNA, 19 nt, Artificial Sequence
  Description of Artificial Sequence: Synthetic oligonucleotide
ccaguauucaucaaagcug

SEQ ID NO: 2316321 - RNA, 19 nt, Artificial Sequence
  Description of Artificial Sequence: Synthetic oligonucleotide
auaccgccuaucauggucc

SEQ ID NO: 2316322 - RNA, 19 nt, Artificial Sequence
  Description of Artificial Sequence: Synthetic oligonucleotide
gaaagguagagugaauaga

SEQ ID NO: 2316323 - RNA, 19 nt, Artificial Sequence
  Description of Artificial Sequence: Synthetic oligonucleotide
aaauugguaggaagagaag

SEQ ID NO: 2316324 - RNA, 19 nt, Artificial Sequence
  Description of Artificial Sequence: Synthetic oligonucleotide
acgacaacggccuucucca

SEQ ID NO: 2316325 - RNA, 19 nt, Artificial Sequence
  Description of Artificial Sequence: Synthetic oligonucleotide
gacccagaaucagacaagg

SEQ ID NO: 2316326 - RNA, 19 nt, Artificial Sequence
  Description of Artificial Sequence: Synthetic oligonucleotide
ggaaagguagagugaauag

SEQ ID NO: 2316327 - RNA, 19 nt, Artificial Sequence
  Description of Artificial Sequence: Synthetic oligonucleotide
gguagagugaauagaaagc

SEQ ID NO: 2316328 - RNA, 19 nt, Artificial Sequence
  Description of Artificial Sequence: Synthetic oligonucleotide
ucuccagcucuguauagca

SEQ ID NO: 2316329 - RNA, 19 nt, Artificial Sequence
  Description of Artificial Sequence: Synthetic oligonucleotide
guauucaucaaagcugaug

SEQ ID NO: 2316330 - RNA, 19 nt, Artificial Sequence
  Description of Artificial Sequence: Synthetic oligonucleotide
uccagccuuuauuuuagug

SEQ ID NO: 2316331 - RNA, 19 nt, Artificial Sequence
  Description of Artificial Sequence: Synthetic oligonucleotide
ucagcugccuuccgguucc

SEQ ID NO: 2316332 - RNA, 19 nt, Artificial Sequence
  Description of Artificial Sequence: Synthetic oligonucleotide
ugguccaguauucaucaaa

SEQ ID NO: 2316333 - RNA, 19 nt, Artificial Sequence
  Description of Artificial Sequence: Synthetic oligonucleotide
agagaggaggcucaaccca

SEQ ID NO: 2316334 - RNA, 19 nt, Artificial Sequence
  Description of Artificial Sequence: Synthetic oligonucleotide
gugauaccgccuaucaugg

SEQ ID NO: 2316335 - RNA, 19 nt, Artificial Sequence
  Description of Artificial Sequence: Synthetic oligonucleotide
caagguucagacaggaaca

SEQ ID NO: 2316336 - RNA, 19 nt, Artificial Sequence
  Description of Artificial Sequence: Synthetic oligonucleotide
cuaucaugguccaguauuc

SEQ ID NO: 2316337 - RNA, 19 nt, Artificial Sequence
  Description of Artificial Sequence: Synthetic oligonucleotide
uagagugaauagaaagcau

SEQ ID NO: 2316338 - RNA, 19 nt, Artificial Sequence
  Description of Artificial Sequence: Synthetic oligonucleotide
cugggaaugccucuccacc

SEQ ID NO: 2316339 - RNA, 19 nt, Artificial Sequence
  Description of Artificial Sequence: Synthetic oligonucleotide
cucucugggccuaagaaga

SEQ ID NO: 2316340 - RNA, 19 nt, Artificial Sequence
  Description of Artificial Sequence: Synthetic oligonucleotide
uuuaguggcagagcagaga

SEQ ID NO: 2316341 - RNA, 19 nt, Artificial Sequence
  Description of Artificial Sequence: Synthetic oligonucleotide
uguauagcagucagccauc

SEQ ID NO: 2316342 - RNA, 19 nt, Artificial Sequence
  Description of Artificial Sequence: Synthetic oligonucleotide
acccagguuaggucauucc

SEQ ID NO: 2316343 - RNA, 19 nt, Artificial Sequence
  Description of Artificial Sequence: Synthetic oligonucleotide
gacagacccagaaucagac

SEQ ID NO: 2316344 - RNA, 19 nt, Artificial Sequence
  Description of Artificial Sequence: Synthetic oligonucleotide
accucaagcagcaagcuga

SEQ ID NO: 2316345 - RNA, 19 nt, Artificial Sequence
  Description of Artificial Sequence: Synthetic oligonucleotide
ugggaaugccucuccaccc

SEQ ID NO: 2316346 - RNA, 19 nt, Artificial Sequence
  Description of Artificial Sequence: Synthetic oligonucleotide
caugguccaguauucauca

SEQ ID NO: 2316347 - RNA, 19 nt, Artificial Sequence
  Description of Artificial Sequence: Synthetic oligonucleotide
acucaacaaaugaggaaac

SEQ ID NO: 2316348 - RNA, 19 nt, Artificial Sequence
  Description of Artificial Sequence: Synthetic oligonucleotide
ccagaaucagacaagguuc

SEQ ID NO: 2316349 - RNA, 19 nt, Artificial Sequence
  Description of Artificial Sequence: Synthetic oligonucleotide
cagguuaggucauucccag

SEQ ID NO: 2316350 - RNA, 19 nt, Artificial Sequence
  Description of Artificial Sequence: Synthetic oligonucleotide
uacuggugcugccacuucc

SEQ ID NO: 2316351 - RNA, 19 nt, Artificial Sequence
  Description of Artificial Sequence: Synthetic oligonucleotide
uaggacuggugauaccgcc

SEQ ID NO: 2316352 - RNA, 19 nt, Artificial Sequence
  Description of Artificial Sequence: Synthetic oligonucleotide
augugguucagcucucucu

SEQ ID NO: 2316353 - RNA, 19 nt, Artificial Sequence
  Description of Artificial Sequence: Synthetic oligonucleotide
aagaacacuggcaggacau

SEQ ID NO: 2316354 - RNA, 19 nt, Artificial Sequence
  Description of Artificial Sequence: Synthetic oligonucleotide
aagagaggaaagguagagu

SEQ ID NO: 2316355 - RNA, 19 nt, Artificial Sequence
  Description of Artificial Sequence: Synthetic oligonucleotide
gaugcgcccaucgugguug

SEQ ID NO: 2316356 - RNA, 19 nt, Artificial Sequence
  Description of Artificial Sequence: Synthetic oligonucleotide
ucuguauagcagucagcca

SEQ ID NO: 2316357 - RNA, 19 nt, Artificial Sequence
  Description of Artificial Sequence: Synthetic oligonucleotide
aauacuggugcugccacuu

SEQ ID NO: 2316358 - RNA, 19 nt, Artificial Sequence
  Description of Artificial Sequence: Synthetic oligonucleotide
acaggaacauuuugagagu

SEQ ID NO: 2316359 - RNA, 19 nt, Artificial Sequence
  Description of Artificial Sequence: Synthetic oligonucleotide
agacucaacaaaugaggaa

SEQ ID NO: 2316360 - RNA, 19 nt, Artificial Sequence
  Description of Artificial Sequence: Synthetic oligonucleotide
caccaggacgacaacggcc

SEQ ID NO: 2316361 - RNA, 19 nt, Artificial Sequence
  Description of Artificial Sequence: Synthetic oligonucleotide
agaaauugguaggaagaga

SEQ ID NO: 2316362 - RNA, 19 nt, Artificial Sequence
  Description of Artificial Sequence: Synthetic oligonucleotide
agcugaugcgcccaucgug

SEQ ID NO: 2316363 - RNA, 19 nt, Artificial Sequence
  Description of Artificial Sequence: Synthetic oligonucleotide
uuccgguucccuguguccg

SEQ ID NO: 2316364 - RNA, 19 nt, Artificial Sequence
  Description of Artificial Sequence: Synthetic oligonucleotide
ugggccuaagaagaugcag

SEQ ID NO: 2316365 - RNA, 19 nt, Artificial Sequence
  Description of Artificial Sequence: Synthetic oligonucleotide
gaacacuggcaggacaugc

SEQ ID NO: 2316366 - RNA, 19 nt, Artificial Sequence
  Description of Artificial Sequence: Synthetic oligonucleotide
gcagagaggaggcucaacc

SEQ ID NO: 2316367 - RNA, 19 nt, Artificial Sequence
  Description of Artificial Sequence: Synthetic oligonucleotide
agaaagcaugggaagaaca

SEQ ID NO: 2316368 - RNA, 19 nt, Artificial Sequence
  Description of Artificial Sequence: Synthetic oligonucleotide
ggagaccucaagcagcaag

SEQ ID NO: 2316369 - RNA, 19 nt, Artificial Sequence
  Description of Artificial Sequence: Synthetic oligonucleotide
gacaacggccuucuccagc

SEQ ID NO: 2316370 - RNA, 19 nt, Artificial Sequence
  Description of Artificial Sequence: Synthetic oligonucleotide
cagacucaacaaaugagga

SEQ ID NO: 2316371 - RNA, 19 nt, Artificial Sequence
  Description of Artificial Sequence: Synthetic oligonucleotide
auagaaagcaugggaagaa

SEQ ID NO: 2316372 - RNA, 19 nt, Artificial Sequence
  Description of Artificial Sequence: Synthetic oligonucleotide
agcuaagaaauugguagga

SEQ ID NO: 2316373 - RNA, 19 nt, Artificial Sequence
  Description of Artificial Sequence: Synthetic oligonucleotide
aacccagguuaggucauuc

SEQ ID NO: 2316374 - RNA, 19 nt, Artificial Sequence
  Description of Artificial Sequence: Synthetic oligonucleotide
gaaucagacaagguucaga

SEQ ID NO: 2316375 - RNA, 19 nt, Artificial Sequence
  Description of Artificial Sequence: Synthetic oligonucleotide
auugguaggaagagaagaa

SEQ ID NO: 2316376 - RNA, 19 nt, Artificial Sequence
  Description of Artificial Sequence: Synthetic oligonucleotide
acagagacagcuggacagg

SEQ ID NO: 2316377 - RNA, 19 nt, Artificial Sequence
  Description of Artificial Sequence: Synthetic oligonucleotide
aucaugguccaguauucau

SEQ ID NO: 2316378 - RNA, 19 nt, Artificial Sequence
  Description of Artificial Sequence: Synthetic oligonucleotide
aggaaagguagagugaaua

SEQ ID NO: 2316379 - RNA, 19 nt, Artificial Sequence
  Description of Artificial Sequence: Synthetic oligonucleotide
gaccucaagcagcaagcug

SEQ ID NO: 2316380 - RNA, 19 nt, Artificial Sequence
  Description of Artificial Sequence: Synthetic oligonucleotide
cagaaucagacaagguuca

SEQ ID NO: 2316381 - RNA, 19 nt, Artificial Sequence
  Description of Artificial Sequence: Synthetic oligonucleotide
gguaggagcaggucuggag

SEQ ID NO: 2316382 - RNA, 19 nt, Artificial Sequence
  Description of Artificial Sequence: Synthetic oligonucleotide
gggccuaagaagaugcagg

SEQ ID NO: 2316383 - RNA, 19 nt, Artificial Sequence
  Description of Artificial Sequence: Synthetic oligonucleotide
ggaugagcuugucagcugc

SEQ ID NO: 2316384 - RNA, 19 nt, Artificial Sequence
  Description of Artificial Sequence: Synthetic oligonucleotide
caaugaaaagggccuaaga

SEQ ID NO: 2316385 - RNA, 19 nt, Artificial Sequence
  Description of Artificial Sequence: Synthetic oligonucleotide
cuaagaagaugcaggccca

SEQ ID NO: 2316386 - RNA, 19 nt, Artificial Sequence
  Description of Artificial Sequence: Synthetic oligonucleotide
cuuccgguucccugugucc

SEQ ID NO: 2316387 - RNA, 19 nt, Artificial Sequence
  Description of Artificial Sequence: Synthetic oligonucleotide
aggacagacccagaaucag

SEQ ID NO: 2316388 - RNA, 19 nt, Artificial Sequence
  Description of Artificial Sequence: Synthetic oligonucleotide
ggccuaagaagaugcaggc

SEQ ID NO: 2316389 - RNA, 19 nt, Artificial Sequence
  Description of Artificial Sequence: Synthetic oligonucleotide
uggaugagcuugucagcug

SEQ ID NO: 2316390 - RNA, 19 nt, Artificial Sequence
  Description of Artificial Sequence: Synthetic oligonucleotide
gugcuauucagcaagggua

SEQ ID NO: 2316391 - RNA, 19 nt, Artificial Sequence
  Description of Artificial Sequence: Synthetic oligonucleotide
uaauacuggugcugccacu

SEQ ID NO: 2316392 - RNA, 19 nt, Artificial Sequence
  Description of Artificial Sequence: Synthetic oligonucleotide
acccugggaaugccucucc

SEQ ID NO: 2316393 - RNA, 19 nt, Artificial Sequence
  Description of Artificial Sequence: Synthetic oligonucleotide
gcugaugcgcccaucgugg

SEQ ID NO: 2316394 - RNA, 19 nt, Artificial Sequence
  Description of Artificial Sequence: Synthetic oligonucleotide
cuguauagcagucagccau

SEQ ID NO: 2316395 - RNA, 19 nt, Artificial Sequence
  Description of Artificial Sequence: Synthetic oligonucleotide
cucuugagggcccacccuc

SEQ ID NO: 2316396 - RNA, 19 nt, Artificial Sequence
  Description of Artificial Sequence: Synthetic oligonucleotide
accaggacgacaacggccu

SEQ ID NO: 2316397 - RNA, 19 nt, Artificial Sequence
  Description of Artificial Sequence: Synthetic oligonucleotide
guuaggucauucccagaca

SEQ ID NO: 2316398 - RNA, 19 nt, Artificial Sequence
  Description of Artificial Sequence: Synthetic oligonucleotide
aagaagaugcaggcccagu

SEQ ID NO: 2316399 - RNA, 19 nt, Artificial Sequence
  Description of Artificial Sequence: Synthetic oligonucleotide
uugagggcccacccucuug

SEQ ID NO: 2316400 - RNA, 19 nt, Artificial Sequence
  Description of Artificial Sequence: Synthetic oligonucleotide
ucaacccagguuaggucau

SEQ ID NO: 2316401 - RNA, 19 nt, Artificial Sequence
  Description of Artificial Sequence: Synthetic oligonucleotide
agacagcuggacaggcacc

SEQ ID NO: 2316402 - RNA, 19 nt, Artificial Sequence
  Description of Artificial Sequence: Synthetic oligonucleotide
uggugauaccgccuaucau

SEQ ID NO: 2316403 - RNA, 19 nt, Artificial Sequence
  Description of Artificial Sequence: Synthetic oligonucleotide
agaaucagacaagguucag

SEQ ID NO: 2316404 - RNA, 19 nt, Artificial Sequence
  Description of Artificial Sequence: Synthetic oligonucleotide
cuggcacucuugcuggcgc

SEQ ID NO: 2316405 - RNA, 19 nt, Artificial Sequence
  Description of Artificial Sequence: Synthetic oligonucleotide
cuaagaggggccucuagcu

SEQ ID NO: 2316406 - RNA, 19 nt, Artificial Sequence
  Description of Artificial Sequence: Synthetic oligonucleotide
aguucugccccagcuggag

SEQ ID NO: 2316407 - RNA, 19 nt, Artificial Sequence
  Description of Artificial Sequence: Synthetic oligonucleotide
aggacaugcaugggucagg

SEQ ID NO: 2316408 - RNA, 19 nt, Artificial Sequence
  Description of Artificial Sequence: Synthetic oligonucleotide
cuggugauaccgccuauca

SEQ ID NO: 2316409 - RNA, 19 nt, Artificial Sequence
  Description of Artificial Sequence: Synthetic oligonucleotide
cccagguuaggucauuccc

SEQ ID NO: 2316410 - RNA, 19 nt, Artificial Sequence
  Description of Artificial Sequence: Synthetic oligonucleotide
acucuugagggcccacccu

SEQ ID NO: 2316411 - RNA, 19 nt, Artificial Sequence
  Description of Artificial Sequence: Synthetic oligonucleotide
gcaugggaagaacacuggc

SEQ ID NO: 2316412 - RNA, 19 nt, Artificial Sequence
  Description of Artificial Sequence: Synthetic oligonucleotide
ggaagagaagaagauaaua

SEQ ID NO: 2316413 - RNA, 19 nt, Artificial Sequence
  Description of Artificial Sequence: Synthetic oligonucleotide
ggagcugggagaccucaag

SEQ ID NO: 2316414 - RNA, 19 nt, Artificial Sequence
  Description of Artificial Sequence: Synthetic oligonucleotide
gaggcucaacccagguuag

SEQ ID NO: 2316415 - RNA, 19 nt, Artificial Sequence
  Description of Artificial Sequence: Synthetic oligonucleotide
ucucugggccuaagaagau

SEQ ID NO: 2316416 - RNA, 19 nt, Artificial Sequence
  Description of Artificial Sequence: Synthetic oligonucleotide
cuugcggaagcugcucuug

SEQ ID NO: 2316417 - RNA, 19 nt, Artificial Sequence
  Description of Artificial Sequence: Synthetic oligonucleotide
cugccucacuccucucugg

SEQ ID NO: 2316418 - RNA, 19 nt, Artificial Sequence
  Description of Artificial Sequence: Synthetic oligonucleotide
caggucuggagggagaaga

SEQ ID NO: 2316419 - RNA, 19 nt, Artificial Sequence
  Description of Artificial Sequence: Synthetic oligonucleotide
caggacaugcaugggucag

SEQ ID NO: 2316420 - RNA, 19 nt, Artificial Sequence
  Description of Artificial Sequence: Synthetic oligonucleotide
caugggucaggacaaugaa

SEQ ID NO: 2316421 - RNA, 19 nt, Artificial Sequence
  Description of Artificial Sequence: Synthetic oligonucleotide
agcagagaggaggcucaac

SEQ ID NO: 2316422 - RNA, 19 nt, Artificial Sequence
  Description of Artificial Sequence: Synthetic oligonucleotide
ccucuugugcuauucagca

SEQ ID NO: 2316423 - RNA, 19 nt, Artificial Sequence
  Description of Artificial Sequence: Synthetic oligonucleotide
aagggccuaagaggggccu

SEQ ID NO: 2316424 - RNA, 19 nt, Artificial Sequence
  Description of Artificial Sequence: Synthetic oligonucleotide
uguccgucagcaugugguu

SEQ ID NO: 2316425 - RNA, 19 nt, Artificial Sequence
  Description of Artificial Sequence: Synthetic oligonucleotide
caugugguucagcucucuc

SEQ ID NO: 2316426 - RNA, 19 nt, Artificial Sequence
  Description of Artificial Sequence: Synthetic oligonucleotide
caucgugguuggcauccag

SEQ ID NO: 2316427 - RNA, 19 nt, Artificial Sequence
  Description of Artificial Sequence: Synthetic oligonucleotide
gcucuugcugaucuuguuc

SEQ ID NO: 2316428 - RNA, 19 nt, Artificial Sequence
  Description of Artificial Sequence: Synthetic oligonucleotide
agaccucaagcagcaagcu

SEQ ID NO: 2316429 - RNA, 19 nt, Artificial Sequence
  Description of Artificial Sequence: Synthetic oligonucleotide
gaaugccucuccacccagc

SEQ ID NO: 2316430 - RNA, 19 nt, Artificial Sequence
  Description of Artificial Sequence: Synthetic oligonucleotide
aggguaggagcaggucugg

SEQ ID NO: 2316431 - RNA, 19 nt, Artificial Sequence
  Description of Artificial Sequence: Synthetic oligonucleotide
ugauaccgccuaucauggu

SEQ ID NO: 2316432 - RNA, 19 nt, Artificial Sequence
  Description of Artificial Sequence: Synthetic oligonucleotide
cuugcuggcgcugcuccug

SEQ ID NO: 2316433 - RNA, 19 nt, Artificial Sequence
  Description of Artificial Sequence: Synthetic oligonucleotide
ugccuuccgguucccugug

SEQ ID NO: 2316434 - RNA, 19 nt, Artificial Sequence
  Description of Artificial Sequence: Synthetic oligonucleotide
gacaugcaugggucaggac

SEQ ID NO: 2316435 - RNA, 19 nt, Artificial Sequence
  Description of Artificial Sequence: Synthetic oligonucleotide
cagcuggacaggcacccug

SEQ ID NO: 2316436 - RNA, 19 nt, Artificial Sequence
  Description of Artificial Sequence: Synthetic oligonucleotide
ugcucuugcugaucuuguu

SEQ ID NO: 2316437 - RNA, 19 nt, Artificial Sequence
  Description of Artificial Sequence: Synthetic oligonucleotide
agguuaggucauucccaga

SEQ ID NO: 2316438 - RNA, 19 nt, Artificial Sequence
  Description of Artificial Sequence: Synthetic oligonucleotide
ggaaugccucuccacccag

SEQ ID NO: 2316439 - RNA, 19 nt, Artificial Sequence
  Description of Artificial Sequence: Synthetic oligonucleotide
augggucaggacaaugaaa

SEQ ID NO: 2316440 - RNA, 19 nt, Artificial Sequence
  Description of Artificial Sequence: Synthetic oligonucleotide
guguccgucagcauguggu

SEQ ID NO: 2316441 - RNA, 19 nt, Artificial Sequence
  Description of Artificial Sequence: Synthetic oligonucleotide
gaaacucuugagggcccac

SEQ ID NO: 2316442 - RNA, 19 nt, Artificial Sequence
  Description of Artificial Sequence: Synthetic oligonucleotide
guucccuguguccgucagc

SEQ ID NO: 2316443 - RNA, 19 nt, Artificial Sequence
  Description of Artificial Sequence: Synthetic oligonucleotide
aggaggcucaacccagguu

SEQ ID NO: 2316444 - RNA, 19 nt, Artificial Sequence
  Description of Artificial Sequence: Synthetic oligonucleotide
gguucagacaggaacauuu

SEQ ID NO: 2316445 - RNA, 19 nt, Artificial Sequence
  Description of Artificial Sequence: Synthetic oligonucleotide
uaccgccuaucauggucca

SEQ ID NO: 2316446 - RNA, 19 nt, Artificial Sequence
  Description of Artificial Sequence: Synthetic oligonucleotide
auccagccuuuauuuuagu

SEQ ID NO: 2316447 - RNA, 19 nt, Artificial Sequence
  Description of Artificial Sequence: Synthetic oligonucleotide
ugaugcgcccaucgugguu

SEQ ID NO: 2316448 - RNA, 19 nt, Artificial Sequence
  Description of Artificial Sequence: Synthetic oligonucleotide
ggucaggacagacccagaa

SEQ ID NO: 2316449 - RNA, 19 nt, Artificial Sequence
  Description of Artificial Sequence: Synthetic oligonucleotide
ccagguuaggucauuccca

SEQ ID NO: 2316450 - RNA, 19 nt, Artificial Sequence
  Description of Artificial Sequence: Synthetic oligonucleotide
aggaacauuuugagaguau

SEQ ID NO: 2316451 - RNA, 19 nt, Artificial Sequence
  Description of Artificial Sequence: Synthetic oligonucleotide
cccuguguccgucagcaug

SEQ ID NO: 2316452 - RNA, 19 nt, Artificial Sequence
  Description of Artificial Sequence: Synthetic oligonucleotide
gccauaggacuggugauac

SEQ ID NO: 2316453 - RNA, 19 nt, Artificial Sequence
  Description of Artificial Sequence: Synthetic oligonucleotide
ccacccagcuaagaaauug

SEQ ID NO: 2316454 - RNA, 19 nt, Artificial Sequence
  Description of Artificial Sequence: Synthetic oligonucleotide
agagacagcuggacaggca

SEQ ID NO: 2316455 - RNA, 19 nt, Artificial Sequence
  Description of Artificial Sequence: Synthetic oligonucleotide
gcuauucagcaaggguagg

SEQ ID NO: 2316456 - RNA, 19 nt, Artificial Sequence
  Description of Artificial Sequence: Synthetic oligonucleotide
aggcucaacccagguuagg

SEQ ID NO: 2316457 - RNA, 19 nt, Artificial Sequence
  Description of Artificial Sequence: Synthetic oligonucleotide
augcgcccaucgugguugg

SEQ ID NO: 2316458 - RNA, 19 nt, Artificial Sequence
  Description of Artificial Sequence: Synthetic oligonucleotide
agccaucucccugccucac

SEQ ID NO: 2316459 - RNA, 19 nt, Artificial Sequence
  Description of Artificial Sequence: Synthetic oligonucleotide
caggaacauuuugagagua

SEQ ID NO: 2316460 - RNA, 19 nt, Artificial Sequence
  Description of Artificial Sequence: Synthetic oligonucleotide
gcucaacccagguuagguc

SEQ ID NO: 2316461 - RNA, 19 nt, Artificial Sequence
  Description of Artificial Sequence: Synthetic oligonucleotide
gcuaagaaauugguaggaa

SEQ ID NO: 2316462 - RNA, 19 nt, Artificial Sequence
  Description of Artificial Sequence: Synthetic oligonucleotide
ccugggaaugccucuccac

SEQ ID NO: 2316463 - RNA, 19 nt, Artificial Sequence
  Description of Artificial Sequence: Synthetic oligonucleotide
gggaaugccucuccaccca

SEQ ID NO: 2316464 - RNA, 19 nt, Artificial Sequence
  Description of Artificial Sequence: Synthetic oligonucleotide
guuggccauaggacuggug

SEQ ID NO: 2316465 - RNA, 19 nt, Artificial Sequence
  Description of Artificial Sequence: Synthetic oligonucleotide
cucaacaaaugaggaaacu

SEQ ID NO: 2316466 - RNA, 19 nt, Artificial Sequence
  Description of Artificial Sequence: Synthetic oligonucleotide
caggacgacaacggccuuc

SEQ ID NO: 2316467 - RNA, 19 nt, Artificial Sequence
  Description of Artificial Sequence: Synthetic oligonucleotide
ggaagaacacuggcaggac

SEQ ID NO: 2316468 - RNA, 19 nt, Artificial Sequence
  Description of Artificial Sequence: Synthetic oligonucleotide
augguccaguauucaucaa

SEQ ID NO: 2316469 - RNA, 19 nt, Artificial Sequence
  Description of Artificial Sequence: Synthetic oligonucleotide
gcuggcacucuugcuggcg

SEQ ID NO: 2316470 - RNA, 19 nt, Artificial Sequence
  Description of Artificial Sequence: Synthetic oligonucleotide
acccagaaucagacaaggu

SEQ ID NO: 2316471 - RNA, 19 nt, Artificial Sequence
  Description of Artificial Sequence: Synthetic oligonucleotide
aguauucaucaaagcugau

SEQ ID NO: 2316472 - RNA, 19 nt, Artificial Sequence
  Description of Artificial Sequence: Synthetic oligonucleotide
cugggccuaagaagaugca

SEQ ID NO: 2316473 - RNA, 19 nt, Artificial Sequence
  Description of Artificial Sequence: Synthetic oligonucleotide
gccuaagaggggccucuag

SEQ ID NO: 2316474 - RNA, 19 nt, Artificial Sequence
  Description of Artificial Sequence: Synthetic oligonucleotide
agaggucaggacagaccca

SEQ ID NO: 2316475 - RNA, 19 nt, Artificial Sequence
  Description of Artificial Sequence: Synthetic oligonucleotide
ccuuuauuuuaguggcaga

SEQ ID NO: 2316476 - RNA, 19 nt, Artificial Sequence
  Description of Artificial Sequence: Synthetic oligonucleotide
ggacaugcaugggucagga

SEQ ID NO: 2316477 - RNA, 19 nt, Artificial Sequence
  Description of Artificial Sequence: Synthetic oligonucleotide
cacccucuugugcuauuca

SEQ ID NO: 2316478 - RNA, 19 nt, Artificial Sequence
  Description of Artificial Sequence: Synthetic oligonucleotide
gcucuguauagcagucagc

SEQ ID NO: 2316479 - RNA, 19 nt, Artificial Sequence
  Description of Artificial Sequence: Synthetic oligonucleotide
ggacuggugauaccgccua

SEQ ID NO: 2316480 - RNA, 19 nt, Artificial Sequence
  Description of Artificial Sequence: Synthetic oligonucleotide
caggcacccugggaaugcc

SEQ ID NO: 2316481 - RNA, 19 nt, Artificial Sequence
  Description of Artificial Sequence: Synthetic oligonucleotide
cccagaaucagacaagguu

SEQ ID NO: 2316482 - RNA, 19 nt, Artificial Sequence
  Description of Artificial Sequence: Synthetic oligonucleotide
gagacagacucuggccucu

SEQ ID NO: 2316483 - RNA, 19 nt, Artificial Sequence
  Description of Artificial Sequence: Synthetic oligonucleotide
gcuuggaaacauauuuaua

SEQ ID NO: 2316484 - RNA, 19 nt, Artificial Sequence
  Description of Artificial Sequence: Synthetic oligonucleotide
agacagacucuggccucug

SEQ ID NO: 2316485 - RNA, 19 nt, Artificial Sequence
  Description of Artificial Sequence: Synthetic oligonucleotide
cuccucucugggccuaaga

SEQ ID NO: 2316486 - RNA, 19 nt, Artificial Sequence
  Description of Artificial Sequence: Synthetic oligonucleotide
cacccugggaaugccucuc

SEQ ID NO: 2316487 - RNA, 19 nt, Artificial Sequence
  Description of Artificial Sequence: Synthetic oligonucleotide
accgccuaucaugguccag

SEQ ID NO: 2316488 - RNA, 19 nt, Artificial Sequence
  Description of Artificial Sequence: Synthetic oligonucleotide
acuccucucugggccuaag

SEQ ID NO: 2316489 - RNA, 19 nt, Artificial Sequence
  Description of Artificial Sequence: Synthetic oligonucleotide
cugccuuccgguucccugu

SEQ ID NO: 2316490 - RNA, 19 nt, Artificial Sequence
  Description of Artificial Sequence: Synthetic oligonucleotide
ggaaacucuugagggccca

SEQ ID NO: 2316491 - RNA, 19 nt, Artificial Sequence
  Description of Artificial Sequence: Synthetic oligonucleotide
ucccuguguccgucagcau

SEQ ID NO: 2316492 - RNA, 19 nt, Artificial Sequence
  Description of Artificial Sequence: Synthetic oligonucleotide
ggcacucuugcuggcgcug

SEQ ID NO: 2316493 - RNA, 19 nt, Artificial Sequence
  Description of Artificial Sequence: Synthetic oligonucleotide
ggacaaugaaaagggccua

SEQ ID NO: 2316494 - RNA, 19 nt, Artificial Sequence
  Description of Artificial Sequence: Synthetic oligonucleotide
aggcccaguucugccccag

SEQ ID NO: 2316495 - RNA, 19 nt, Artificial Sequence
  Description of Artificial Sequence: Synthetic oligonucleotide
gaggaaagguagagugaau

SEQ ID NO: 2316496 - RNA, 19 nt, Artificial Sequence
  Description of Artificial Sequence: Synthetic oligonucleotide
ggcucaacccagguuaggu

SEQ ID NO: 2316497 - RNA, 19 nt, Artificial Sequence
  Description of Artificial Sequence: Synthetic oligonucleotide
cuguguccgucagcaugug

SEQ ID NO: 2316498 - RNA, 19 nt, Artificial Sequence
  Description of Artificial Sequence: Synthetic oligonucleotide
cugugcuuggaaacauauu

SEQ ID NO: 2316499 - RNA, 19 nt, Artificial Sequence
  Description of Artificial Sequence: Synthetic oligonucleotide
gcacucuugcuggcgcugc

SEQ ID NO: 2316500 - RNA, 19 nt, Artificial Sequence
  Description of Artificial Sequence: Synthetic oligonucleotide
gacuggugauaccgccuau

SEQ ID NO: 2316501 - RNA, 19 nt, Artificial Sequence
  Description of Artificial Sequence: Synthetic oligonucleotide
ggccauaggacuggugaua

SEQ ID NO: 2316502 - RNA, 19 nt, Artificial Sequence
  Description of Artificial Sequence: Synthetic oligonucleotide
gggccucuagcugcugccc

SEQ ID NO: 2316503 - RNA, 19 nt, Artificial Sequence
  Description of Artificial Sequence: Synthetic oligonucleotide
augcaugggucaggacaau

SEQ ID NO: 2316504 - RNA, 19 nt, Artificial Sequence
  Description of Artificial Sequence: Synthetic oligonucleotide
aggucaggacagacccaga

SEQ ID NO: 2316505 - RNA, 19 nt, Artificial Sequence
  Description of Artificial Sequence: Synthetic oligonucleotide
ugcgcccaucgugguuggc

SEQ ID NO: 2316506 - RNA, 19 nt, Artificial Sequence
  Description of Artificial Sequence: Synthetic oligonucleotide
cugaugcgcccaucguggu

SEQ ID NO: 2316507 - RNA, 19 nt, Artificial Sequence
  Description of Artificial Sequence: Synthetic oligonucleotide
gccucuccacccagcuaag

SEQ ID NO: 2316508 - RNA, 19 nt, Artificial Sequence
  Description of Artificial Sequence: Synthetic oligonucleotide
ggcggaugagguuggccau

SEQ ID NO: 2316509 - RNA, 19 nt, Artificial Sequence
  Description of Artificial Sequence: Synthetic oligonucleotide
cugccacagccaggagcug

SEQ ID NO: 2316510 - RNA, 19 nt, Artificial Sequence
  Description of Artificial Sequence: Synthetic oligonucleotide
ggguaggagcaggucugga

SEQ ID NO: 2316511 - RNA, 19 nt, Artificial Sequence
  Description of Artificial Sequence: Synthetic oligonucleotide
gcagcaucuugcggaagcu

SEQ ID NO: 2316512 - RNA, 19 nt, Artificial Sequence
  Description of Artificial Sequence: Synthetic oligonucleotide
gcccaucgugguuggcauc

SEQ ID NO: 2316513 - RNA, 19 nt, Artificial Sequence
  Description of Artificial Sequence: Synthetic oligonucleotide
cuugagggcccacccucuu

SEQ ID NO: 2316514 - RNA, 19 nt, Artificial Sequence
  Description of Artificial Sequence: Synthetic oligonucleotide
ccgucagcaugugguucag

SEQ ID NO: 2316515 - RNA, 19 nt, Artificial Sequence
  Description of Artificial Sequence: Synthetic oligonucleotide
gccuaucaugguccaguau

SEQ ID NO: 2316516 - RNA, 19 nt, Artificial Sequence
  Description of Artificial Sequence: Synthetic oligonucleotide
ccgccuaucaugguccagu

SEQ ID NO: 2316517 - RNA, 19 nt, Artificial Sequence
  Description of Artificial Sequence: Synthetic oligonucleotide
cucuagcugcugcccugcu

SEQ ID NO: 2316518 - RNA, 19 nt, Artificial Sequence
  Description of Artificial Sequence: Synthetic oligonucleotide
ggacgacaacggccuucuc

SEQ ID NO: 2316519 - RNA, 19 nt, Artificial Sequence
  Description of Artificial Sequence: Synthetic oligonucleotide
gcggaugagguuggccaua

SEQ ID NO: 2316520 - RNA, 19 nt, Artificial Sequence
  Description of Artificial Sequence: Synthetic oligonucleotide
gguuggccauaggacuggu

SEQ ID NO: 2316521 - RNA, 19 nt, Artificial Sequence
  Description of Artificial Sequence: Synthetic oligonucleotide
ggcccacccucuugugcua

SEQ ID NO: 2316522 - RNA, 19 nt, Artificial Sequence
  Description of Artificial Sequence: Synthetic oligonucleotide
ggcacucuugcuggcggau

SEQ ID NO: 2316523 - RNA, 19 nt, Artificial Sequence
  Description of Artificial Sequence: Synthetic oligonucleotide
cgccuaucaugguccagua

SEQ ID NO: 2316524 - RNA, 19 nt, Artificial Sequence
  Description of Artificial Sequence: Synthetic oligonucleotide
ggccuaagaggggccucua

SEQ ID NO: 2316525 - RNA, 19 nt, Artificial Sequence
  Description of Artificial Sequence: Synthetic oligonucleotide
caacccagguuaggucauu

SEQ ID NO: 2316526 - RNA, 19 nt, Artificial Sequence
  Description of Artificial Sequence: Synthetic oligonucleotide
cgcccaucgugguuggcau

SEQ ID NO: 2316527 - RNA, 19 nt, Artificial Sequence
  Description of Artificial Sequence: Synthetic oligonucleotide
gcccacccucuugugcuau

SEQ ID NO: 2316528 - RNA, 19 nt, Artificial Sequence
  Description of Artificial Sequence: Synthetic oligonucleotide
cccacccucuugugcuauu

SEQ ID NO: 2316529 - RNA, 19 nt, Artificial Sequence
  Description of Artificial Sequence: Synthetic oligonucleotide
ccaggacgacaacggccuu

SEQ ID NO: 2316530 - RNA, 19 nt, Artificial Sequence
  Description of Artificial Sequence: Synthetic oligonucleotide
aaauacaacauguauaagc

SEQ ID NO: 2316531 - RNA, 19 nt, Artificial Sequence
  Description of Artificial Sequence: Synthetic oligonucleotide
aauguagcguucaagaagc

SEQ ID NO: 2316532 - RNA, 19 nt, Artificial Sequence
  Description of Artificial Sequence: Synthetic oligonucleotide
uuuagguaugcuaugaugu

SEQ ID NO: 2316533 - RNA, 19 nt, Artificial Sequence
  Description of Artificial Sequence: Synthetic oligonucleotide
ugagaugccuuguagaccg

SEQ ID NO: 2316534 - RNA, 19 nt, Artificial Sequence
  Description of Artificial Sequence: Synthetic oligonucleotide
ucuaaagugggcauguaag

SEQ ID NO: 2316535 - RNA, 19 nt, Artificial Sequence
  Description of Artificial Sequence: Synthetic oligonucleotide
aaguacaucaggcugaggu

SEQ ID NO: 2316536 - RNA, 19 nt, Artificial Sequence
  Description of Artificial Sequence: Synthetic oligonucleotide
uuuccgaggauuaugacug

SEQ ID NO: 2316537 - RNA, 19 nt, Artificial Sequence
  Description of Artificial Sequence: Synthetic oligonucleotide
agaagaguggaucaugagg

SEQ ID NO: 2316538 - RNA, 19 nt, Artificial Sequence
  Description of Artificial Sequence: Synthetic oligonucleotide
augcuaaaauaacaaauac

SEQ ID NO: 2316539 - RNA, 19 nt, Artificial Sequence
  Description of Artificial Sequence: Synthetic oligonucleotide
aauacaacauguauaagca

SEQ ID NO: 2316540 - RNA, 19 nt, Artificial Sequence
  Description of Artificial Sequence: Synthetic oligonucleotide
gaauguagcguucaagaag

SEQ ID NO: 2316541 - RNA, 19 nt, Artificial Sequence
  Description of Artificial Sequence: Synthetic oligonucleotide
uacaacauguauaagcaac

SEQ ID NO: 2316542 - RNA, 19 nt, Artificial Sequence
  Description of Artificial Sequence: Synthetic oligonucleotide
uucgcuaugaugaccgugg

SEQ ID NO: 2316543 - RNA, 19 nt, Artificial Sequence
  Description of Artificial Sequence: Synthetic oligonucleotide
aagaauauccaaggaaccg

SEQ ID NO: 2316544 - RNA, 19 nt, Artificial Sequence
  Description of Artificial Sequence: Synthetic oligonucleotide
uuuggauuaggguacaaac

SEQ ID NO: 2316545 - RNA, 19 nt, Artificial Sequence
  Description of Artificial Sequence: Synthetic oligonucleotide
ugaacuuucaguggguugg

SEQ ID NO: 2316546 - RNA, 19 nt, Artificial Sequence
  Description of Artificial Sequence: Synthetic oligonucleotide
aauagccucggcuucugac

SEQ ID NO: 2316547 - RNA, 19 nt, Artificial Sequence
  Description of Artificial Sequence: Synthetic oligonucleotide
uggauuaggguacaaacac

SEQ ID NO: 2316548 - RNA, 19 nt, Artificial Sequence
  Description of Artificial Sequence: Synthetic oligonucleotide
acugucugaacuuucagug

SEQ ID NO: 2316549 - RNA, 19 nt, Artificial Sequence
  Description of Artificial Sequence: Synthetic oligonucleotide
uguauaagcaacagaagau

SEQ ID NO: 2316550 - RNA, 19 nt, Artificial Sequence
  Description of Artificial Sequence: Synthetic oligonucleotide
uguguugccagaagagugg

SEQ ID NO: 2316551 - RNA, 19 nt, Artificial Sequence
  Description of Artificial Sequence: Synthetic oligonucleotide
uucauuuggauuaggguac

SEQ ID NO: 2316552 - RNA, 19 nt, Artificial Sequence
  Description of Artificial Sequence: Synthetic oligonucleotide
uaauucucacugcauacag

SEQ ID NO: 2316553 - RNA, 19 nt, Artificial Sequence
  Description of Artificial Sequence: Synthetic oligonucleotide
gauuaggguacaaacacag

SEQ ID NO: 2316554 - RNA, 19 nt, Artificial Sequence
  Description of Artificial Sequence: Synthetic oligonucleotide
uuugaagaauauccaagga

SEQ ID NO: 2316555 - RNA, 19 nt, Artificial Sequence
  Description of Artificial Sequence: Synthetic oligonucleotide
ugaggcaauauuccugggg

SEQ ID NO: 2316556 - RNA, 19 nt, Artificial Sequence
  Description of Artificial Sequence: Synthetic oligonucleotide
aagaguggaucaugagggc

SEQ ID NO: 2316557 - RNA, 19 nt, Artificial Sequence
  Description of Artificial Sequence: Synthetic oligonucleotide
uauaagcaacagaagauuc

SEQ ID NO: 2316558 - RNA, 19 nt, Artificial Sequence
  Description of Artificial Sequence: Synthetic oligonucleotide
aaugcuaaaauaacaaaua

SEQ ID NO: 2316559 - RNA, 19 nt, Artificial Sequence
  Description of Artificial Sequence: Synthetic oligonucleotide
cuaaagugggcauguaagg

SEQ ID NO: 2316560 - RNA, 19 nt, Artificial Sequence
  Description of Artificial Sequence: Synthetic oligonucleotide
cguacuuugaagaauaucc

SEQ ID NO: 2316561 - RNA, 19 nt, Artificial Sequence
  Description of Artificial Sequence: Synthetic oligonucleotide
uucaagaagcaaaugcaga

SEQ ID NO: 2316562 - RNA, 19 nt, Artificial Sequence
  Description of Artificial Sequence: Synthetic oligonucleotide
aacauguauaagcaacaga

SEQ ID NO: 2316563 - RNA, 19 nt, Artificial Sequence
  Description of Artificial Sequence: Synthetic oligonucleotide
ucaagaagcaaaugcagaa

SEQ ID NO: 2316564 - RNA, 19 nt, Artificial Sequence
  Description of Artificial Sequence: Synthetic oligonucleotide
uuuuccgaggauuaugacu

SEQ ID NO: 2316565 - RNA, 19 nt, Artificial Sequence
  Description of Artificial Sequence: Synthetic oligonucleotide
acauguauaagcaacagaa

SEQ ID NO: 2316566 - RNA, 19 nt, Artificial Sequence
  Description of Artificial Sequence: Synthetic oligonucleotide
uuugcuguggugauacuga

SEQ ID NO: 2316567 - RNA, 19 nt, Artificial Sequence
  Description of Artificial Sequence: Synthetic oligonucleotide
uuggauuaggguacaaaca

SEQ ID NO: 2316568 - RNA, 19 nt, Artificial Sequence
  Description of Artificial Sequence: Synthetic oligonucleotide
uagaaucugggucuaaagu

SEQ ID NO: 2316569 - RNA, 19 nt, Artificial Sequence
  Description of Artificial Sequence: Synthetic oligonucleotide
aagauucgcuaugaugacc

SEQ ID NO: 2316570 - RNA, 19 nt, Artificial Sequence
  Description of Artificial Sequence: Synthetic oligonucleotide
aagaggauagaaucugggu

SEQ ID NO: 2316571 - RNA, 19 nt, Artificial Sequence
  Description of Artificial Sequence: Synthetic oligonucleotide
aguguuuugagaugccuug

SEQ ID NO: 2316572 - RNA, 19 nt, Artificial Sequence
  Description of Artificial Sequence: Synthetic oligonucleotide
ucuucauuuggauuagggu

SEQ ID NO: 2316573 - RNA, 19 nt, Artificial Sequence
  Description of Artificial Sequence: Synthetic oligonucleotide
aauauccaaggaaccgucc

SEQ ID NO: 2316574 - RNA, 19 nt, Artificial Sequence
  Description of Artificial Sequence: Synthetic oligonucleotide
uugacauaguccugaagcc

SEQ ID NO: 2316575 - RNA, 19 nt, Artificial Sequence
  Description of Artificial Sequence: Synthetic oligonucleotide
ucuccuaauucucacugca

SEQ ID NO: 2316576 - RNA, 19 nt, Artificial Sequence
  Description of Artificial Sequence: Synthetic oligonucleotide
gauugaaucuccuaauucu

SEQ ID NO: 2316577 - RNA, 19 nt, Artificial Sequence
  Description of Artificial Sequence: Synthetic oligonucleotide
uuucuucuaggcuugacau

SEQ ID NO: 2316578 - RNA, 19 nt, Artificial Sequence
  Description of Artificial Sequence: Synthetic oligonucleotide
uaagcaacagaagauucgc

SEQ ID NO: 2316579 - RNA, 19 nt, Artificial Sequence
  Description of Artificial Sequence: Synthetic oligonucleotide
cucagggaaagaaugcugc

SEQ ID NO: 2316580 - RNA, 19 nt, Artificial Sequence
  Description of Artificial Sequence: Synthetic oligonucleotide
cuuuagguaugcuaugaug

SEQ ID NO: 2316581 - RNA, 19 nt, Artificial Sequence
  Description of Artificial Sequence: Synthetic oligonucleotide
auagaaucugggucuaaag

SEQ ID NO: 2316582 - RNA, 19 nt, Artificial Sequence
  Description of Artificial Sequence: Synthetic oligonucleotide
agauucgcuaugaugaccg

SEQ ID NO: 2316583 - RNA, 19 nt, Artificial Sequence
  Description of Artificial Sequence: Synthetic oligonucleotide
ucuaggcuugacauagucc

SEQ ID NO: 2316584 - RNA, 19 nt, Artificial Sequence
  Description of Artificial Sequence: Synthetic oligonucleotide
gaagaggauagaaucuggg

SEQ ID NO: 2316585 - RNA, 19 nt, Artificial Sequence
  Description of Artificial Sequence: Synthetic oligonucleotide
gaagaauauccaaggaacc

SEQ ID NO: 2316586 - RNA, 19 nt, Artificial Sequence
  Description of Artificial Sequence: Synthetic oligonucleotide
cuucaaguacaucaggcug

SEQ ID NO: 2316587 - RNA, 19 nt, Artificial Sequence
  Description of Artificial Sequence: Synthetic oligonucleotide
auaagcaacagaagauucg

SEQ ID NO: 2316588 - RNA, 19 nt, Artificial Sequence
  Description of Artificial Sequence: Synthetic oligonucleotide
aaugcagaauccacaggac

SEQ ID NO: 2316589 - RNA, 19 nt, Artificial Sequence
  Description of Artificial Sequence: Synthetic oligonucleotide
ucugggaauagccucggcu

SEQ ID NO: 2316590 - RNA, 19 nt, Artificial Sequence
  Description of Artificial Sequence: Synthetic oligonucleotide
aucauccguacuuugaaga

SEQ ID NO: 2316591 - RNA, 19 nt, Artificial Sequence
  Description of Artificial Sequence: Synthetic oligonucleotide
gacagucgcaccuucucgg

SEQ ID NO: 2316592 - RNA, 19 nt, Artificial Sequence
  Description of Artificial Sequence: Synthetic oligonucleotide
agucgcaccuucucggacc

SEQ ID NO: 2316593 - RNA, 19 nt, Artificial Sequence
  Description of Artificial Sequence: Synthetic oligonucleotide
uugaaucuccuaauucuca

SEQ ID NO: 2316594 - RNA, 19 nt, Artificial Sequence
  Description of Artificial Sequence: Synthetic oligonucleotide
ugguguacuuuucugggca

SEQ ID NO: 2316595 - RNA, 19 nt, Artificial Sequence
  Description of Artificial Sequence: Synthetic oligonucleotide
uggcugacaggccaggucc

SEQ ID NO: 2316596 - RNA, 19 nt, Artificial Sequence
  Description of Artificial Sequence: Synthetic oligonucleotide
uaggguacaaacacagcac

SEQ ID NO: 2316597 - RNA, 19 nt, Artificial Sequence
  Description of Artificial Sequence: Synthetic oligonucleotide
guuuugagaugccuuguag

SEQ ID NO: 2316598 - RNA, 19 nt, Artificial Sequence
  Description of Artificial Sequence: Synthetic oligonucleotide
cugaauguagcguucaaga

SEQ ID NO: 2316599 - RNA, 19 nt, Artificial Sequence
  Description of Artificial Sequence: Synthetic oligonucleotide
auugaaucuccuaauucuc

SEQ ID NO: 2316600 - RNA, 19 nt, Artificial Sequence
  Description of Artificial Sequence: Synthetic oligonucleotide
ugagguuuggcucgauuga

SEQ ID NO: 2316601 - RNA, 19 nt, Artificial Sequence
  Description of Artificial Sequence: Synthetic oligonucleotide
ugaagccggucucugaggc

SEQ ID NO: 2316602 - RNA, 19 nt, Artificial Sequence
  Description of Artificial Sequence: Synthetic oligonucleotide
ugaaucuccuaauucucac

SEQ ID NO: 2316603 - RNA, 19 nt, Artificial Sequence
  Description of Artificial Sequence: Synthetic oligonucleotide
ugauacugaauguagcguu

SEQ ID NO: 2316604 - RNA, 19 nt, Artificial Sequence
  Description of Artificial Sequence: Synthetic oligonucleotide
uggugauacugaauguagc

SEQ ID NO: 2316605 - RNA, 19 nt, Artificial Sequence
  Description of Artificial Sequence: Synthetic oligonucleotide
cauguaaggagugcugugg

SEQ ID NO: 2316606 - RNA, 19 nt, Artificial Sequence
  Description of Artificial Sequence: Synthetic oligonucleotide
agguccaacaaccgcuuac

SEQ ID NO: 2316607 - RNA, 19 nt, Artificial Sequence
  Description of Artificial Sequence: Synthetic oligonucleotide
ucaucauccguacuuugaa

SEQ ID NO: 2316608 - RNA, 19 nt, Artificial Sequence
  Description of Artificial Sequence: Synthetic oligonucleotide
cugagguuuggcucgauug

SEQ ID NO: 2316609 - RNA, 19 nt, Artificial Sequence
  Description of Artificial Sequence: Synthetic oligonucleotide
guucaagaagcaaaugcag

SEQ ID NO: 2316610 - RNA, 19 nt, Artificial Sequence
  Description of Artificial Sequence: Synthetic oligonucleotide
uggaucaugagggcgagug

SEQ ID NO: 2316611 - RNA, 19 nt, Artificial Sequence
  Description of Artificial Sequence: Synthetic oligonucleotide
uaugcuaugaugucuccuu

SEQ ID NO: 2316612 - RNA, 19 nt, Artificial Sequence
  Description of Artificial Sequence: Synthetic oligonucleotide
uguagaccgguagaucugg

SEQ ID NO: 2316613 - RNA, 19 nt, Artificial Sequence
  Description of Artificial Sequence: Synthetic oligonucleotide
agugggucaucauccguac

SEQ ID NO: 2316614 - RNA, 19 nt, Artificial Sequence
  Description of Artificial Sequence: Synthetic oligonucleotide
ugaauguagcguucaagaa

SEQ ID NO: 2316615 - RNA, 19 nt, Artificial Sequence
  Description of Artificial Sequence: Synthetic oligonucleotide
aacaaccgcuuacucaaca

SEQ ID NO: 2316616 - RNA, 19 nt, Artificial Sequence
  Description of Artificial Sequence: Synthetic oligonucleotide
aggaggagugcuguguugc

SEQ ID NO: 2316617 - RNA, 19 nt, Artificial Sequence
  Description of Artificial Sequence: Synthetic oligonucleotide
accuucucggaccugcgcg

SEQ ID NO: 2316618 - RNA, 19 nt, Artificial Sequence
  Description of Artificial Sequence: Synthetic oligonucleotide
gacggccagaaucagcucc

SEQ ID NO: 2316619 - RNA, 19 nt, Artificial Sequence
  Description of Artificial Sequence: Synthetic oligonucleotide
cuguguugccagaagagug

SEQ ID NO: 2316620 - RNA, 19 nt, Artificial Sequence
  Description of Artificial Sequence: Synthetic oligonucleotide
aaucugggucuaaaguggg

SEQ ID NO: 2316621 - RNA, 19 nt, Artificial Sequence
  Description of Artificial Sequence: Synthetic oligonucleotide
aggauuaugacugucugaa

SEQ ID NO: 2316622 - RNA, 19 nt, Artificial Sequence
  Description of Artificial Sequence: Synthetic oligonucleotide
uccuaauucucacugcaua

SEQ ID NO: 2316623 - RNA, 19 nt, Artificial Sequence
  Description of Artificial Sequence: Synthetic oligonucleotide
auauccaaggaaccguccu

SEQ ID NO: 2316624 - RNA, 19 nt, Artificial Sequence
  Description of Artificial Sequence: Synthetic oligonucleotide
ucaacagggcguugugccg

SEQ ID NO: 2316625 - RNA, 19 nt, Artificial Sequence
  Description of Artificial Sequence: Synthetic oligonucleotide
uaugaugaccgugggaaga

SEQ ID NO: 2316626 - RNA, 19 nt, Artificial Sequence
  Description of Artificial Sequence: Synthetic oligonucleotide
acaaccgcuuacucaacag

SEQ ID NO: 2316627 - RNA, 19 nt, Artificial Sequence
  Description of Artificial Sequence: Synthetic oligonucleotide
agaauauccaaggaaccgu

SEQ ID NO: 2316628 - RNA, 19 nt, Artificial Sequence
  Description of Artificial Sequence: Synthetic oligonucleotide
guaaggagugcugugggag

SEQ ID NO: 2316629 - RNA, 19 nt, Artificial Sequence
  Description of Artificial Sequence: Synthetic oligonucleotide
uuagguaugcuaugauguc

SEQ ID NO: 2316630 - RNA, 19 nt, Artificial Sequence
  Description of Artificial Sequence: Synthetic oligonucleotide
gaggauagaaucugggucu

SEQ ID NO: 2316631 - RNA, 19 nt, Artificial Sequence
  Description of Artificial Sequence: Synthetic oligonucleotide
agaguggaucaugagggcg

SEQ ID NO: 2316632 - RNA, 19 nt, Artificial Sequence
  Description of Artificial Sequence: Synthetic oligonucleotide
aggguacaaacacagcaca

SEQ ID NO: 2316633 - RNA, 19 nt, Artificial Sequence
  Description of Artificial Sequence: Synthetic oligonucleotide
gcguucaagaagcaaaugc

SEQ ID NO: 2316634 - RNA, 19 nt, Artificial Sequence
  Description of Artificial Sequence: Synthetic oligonucleotide
gaagcaaaugcagaaucca

SEQ ID NO: 2316635 - RNA, 19 nt, Artificial Sequence
  Description of Artificial Sequence: Synthetic oligonucleotide
ugcuaugaugucuccuugc

SEQ ID NO: 2316636 - RNA, 19 nt, Artificial Sequence
  Description of Artificial Sequence: Synthetic oligonucleotide
agcaacagaagauucgcua

SEQ ID NO: 2316637 - RNA, 19 nt, Artificial Sequence
  Description of Artificial Sequence: Synthetic oligonucleotide
agggcgaguguuuugagau

SEQ ID NO: 2316638 - RNA, 19 nt, Artificial Sequence
  Description of Artificial Sequence: Synthetic oligonucleotide
uuuggcucgauugaaucuc

SEQ ID NO: 2316639 - RNA, 19 nt, Artificial Sequence
  Description of Artificial Sequence: Synthetic oligonucleotide
gaagauucgcuaugaugac

SEQ ID NO: 2316640 - RNA, 19 nt, Artificial Sequence
  Description of Artificial Sequence: Synthetic oligonucleotide
cugcacacagaagaggagg

SEQ ID NO: 2316641 - RNA, 19 nt, Artificial Sequence
  Description of Artificial Sequence: Synthetic oligonucleotide
uugccagaagaguggauca

SEQ ID NO: 2316642 - RNA, 19 nt, Artificial Sequence
  Description of Artificial Sequence: Synthetic oligonucleotide
caaccgcuuacucaacagg

SEQ ID NO: 2316643 - RNA, 19 nt, Artificial Sequence
  Description of Artificial Sequence: Synthetic oligonucleotide
cuaggcuugacauaguccu

SEQ ID NO: 2316644 - RNA, 19 nt, Artificial Sequence
  Description of Artificial Sequence: Synthetic oligonucleotide
augccuuguagaccgguag

SEQ ID NO: 2316645 - RNA, 19 nt, Artificial Sequence
  Description of Artificial Sequence: Synthetic oligonucleotide
auagccucggcuucugacu

SEQ ID NO: 2316646 - RNA, 19 nt, Artificial Sequence
  Description of Artificial Sequence: Synthetic oligonucleotide
uaugacugucugaacuuuc

SEQ ID NO: 2316647 - RNA, 19 nt, Artificial Sequence
  Description of Artificial Sequence: Synthetic oligonucleotide
uugguguacuuuucugggc

SEQ ID NO: 2316648 - RNA, 19 nt, Artificial Sequence
  Description of Artificial Sequence: Synthetic oligonucleotide
ucaaguacaucaggcugag

SEQ ID NO: 2316649 - RNA, 19 nt, Artificial Sequence
  Description of Artificial Sequence: Synthetic oligonucleotide
ucgauugaaucuccuaauu

SEQ ID NO: 2316650 - RNA, 19 nt, Artificial Sequence
  Description of Artificial Sequence: Synthetic oligonucleotide
aaucagcuccagguacagc

SEQ ID NO: 2316651 - RNA, 19 nt, Artificial Sequence
  Description of Artificial Sequence: Synthetic oligonucleotide
uguggugauacugaaugua

SEQ ID NO: 2316652 - RNA, 19 nt, Artificial Sequence
  Description of Artificial Sequence: Synthetic oligonucleotide
agguaugcuaugaugucuc

SEQ ID NO: 2316653 - RNA, 19 nt, Artificial Sequence
  Description of Artificial Sequence: Synthetic oligonucleotide
guggugauacugaauguag

SEQ ID NO: 2316654 - RNA, 19 nt, Artificial Sequence
  Description of Artificial Sequence: Synthetic oligonucleotide
acaacauguauaagcaaca

SEQ ID NO: 2316655 - RNA, 19 nt, Artificial Sequence
  Description of Artificial Sequence: Synthetic oligonucleotide
uguaaggagugcuguggga

SEQ ID NO: 2316656 - RNA, 19 nt, Artificial Sequence
  Description of Artificial Sequence: Synthetic oligonucleotide
uugagaugccuuguagacc

SEQ ID NO: 2316657 - RNA, 19 nt, Artificial Sequence
  Description of Artificial Sequence: Synthetic oligonucleotide
uagguaugcuaugaugucu

SEQ ID NO: 2316658 - RNA, 19 nt, Artificial Sequence
  Description of Artificial Sequence: Synthetic oligonucleotide
uacaucaggcugagguuug

SEQ ID NO: 2316659 - RNA, 19 nt, Artificial Sequence
  Description of Artificial Sequence: Synthetic oligonucleotide
gaggcaauauuccuggggu

SEQ ID NO: 2316660 - RNA, 19 nt, Artificial Sequence
  Description of Artificial Sequence: Synthetic oligonucleotide
gucucugaggcaauauucc

SEQ ID NO: 2316661 - RNA, 19 nt, Artificial Sequence
  Description of Artificial Sequence: Synthetic oligonucleotide
agaccgguagaucugggaa

SEQ ID NO: 2316662 - RNA, 19 nt, Artificial Sequence
  Description of Artificial Sequence: Synthetic oligonucleotide
uagcguucaagaagcaaau

SEQ ID NO: 2316663 - RNA, 19 nt, Artificial Sequence
  Description of Artificial Sequence: Synthetic oligonucleotide
uaaggagugcugugggaga

SEQ ID NO: 2316664 - RNA, 19 nt, Artificial Sequence
  Description of Artificial Sequence: Synthetic oligonucleotide
auaacaaauacaacaugua

SEQ ID NO: 2316665 - RNA, 19 nt, Artificial Sequence
  Description of Artificial Sequence: Synthetic oligonucleotide
gauacugaauguagcguuc

SEQ ID NO: 2316666 - RNA, 19 nt, Artificial Sequence
  Description of Artificial Sequence: Synthetic oligonucleotide
aguggguugguguacuuuu

SEQ ID NO: 2316667 - RNA, 19 nt, Artificial Sequence
  Description of Artificial Sequence: Synthetic oligonucleotide
caacauguauaagcaacag

SEQ ID NO: 2316668 - RNA, 19 nt, Artificial Sequence
  Description of Artificial Sequence: Synthetic oligonucleotide
auacaacauguauaagcaa

SEQ ID NO: 2316669 - RNA, 19 nt, Artificial Sequence
  Description of Artificial Sequence: Synthetic oligonucleotide
uuggcucgauugaaucucc

SEQ ID NO: 2316670 - RNA, 19 nt, Artificial Sequence
  Description of Artificial Sequence: Synthetic oligonucleotide
guugccagaagaguggauc

SEQ ID NO: 2316671 - RNA, 19 nt, Artificial Sequence
  Description of Artificial Sequence: Synthetic oligonucleotide
guagcguucaagaagcaaa

SEQ ID NO: 2316672 - RNA, 19 nt, Artificial Sequence
  Description of Artificial Sequence: Synthetic oligonucleotide
aggagugggucaucauccg

SEQ ID NO: 2316673 - RNA, 19 nt, Artificial Sequence
  Description of Artificial Sequence: Synthetic oligonucleotide
cuaugaugaccgugggaag

SEQ ID NO: 2316674 - RNA, 19 nt, Artificial Sequence
  Description of Artificial Sequence: Synthetic oligonucleotide
ugccuuguagaccgguaga

SEQ ID NO: 2316675 - RNA, 19 nt, Artificial Sequence
  Description of Artificial Sequence: Synthetic oligonucleotide
gaggauuaugacugucuga

SEQ ID NO: 2316676 - RNA, 19 nt, Artificial Sequence
  Description of Artificial Sequence: Synthetic oligonucleotide
cugaacuuucaguggguug

SEQ ID NO: 2316677 - RNA, 19 nt, Artificial Sequence
  Description of Artificial Sequence: Synthetic oligonucleotide
gaccgugggaagaggauag

SEQ ID NO: 2316678 - RNA, 19 nt, Artificial Sequence
  Description of Artificial Sequence: Synthetic oligonucleotide
aguacaucaggcugagguu

SEQ ID NO: 2316679 - RNA, 19 nt, Artificial Sequence
  Description of Artificial Sequence: Synthetic oligonucleotide
ucgcuaugaugaccguggg

SEQ ID NO: 2316680 - RNA, 19 nt, Artificial Sequence
  Description of Artificial Sequence: Synthetic oligonucleotide
uuacucaacagggcguugu

SEQ ID NO: 2316681 - RNA, 19 nt, Artificial Sequence
  Description of Artificial Sequence: Synthetic oligonucleotide
uacucaacagggcguugug

SEQ ID NO: 2316682 - RNA, 19 nt, Artificial Sequence
  Description of Artificial Sequence: Synthetic oligonucleotide
accgcuuacucaacagggc

SEQ ID NO: 2316683 - RNA, 19 nt, Artificial Sequence
  Description of Artificial Sequence: Synthetic oligonucleotide
aggacggccagaaucagcu

SEQ ID NO: 2316684 - RNA, 19 nt, Artificial Sequence
  Description of Artificial Sequence: Synthetic oligonucleotide
ggaaccguccuccagccug

SEQ ID NO: 2316685 - RNA, 19 nt, Artificial Sequence
  Description of Artificial Sequence: Synthetic oligonucleotide
ccuaauucucacugcauac

SEQ ID NO: 2316686 - RNA, 19 nt, Artificial Sequence
  Description of Artificial Sequence: Synthetic oligonucleotide
uagaccgguagaucuggga

SEQ ID NO: 2316687 - RNA, 19 nt, Artificial Sequence
  Description of Artificial Sequence: Synthetic oligonucleotide
gauagaaucugggucuaaa

SEQ ID NO: 2316688 - RNA, 19 nt, Artificial Sequence
  Description of Artificial Sequence: Synthetic oligonucleotide
augcuaugaugucuccuug

SEQ ID NO: 2316689 - RNA, 19 nt, Artificial Sequence
  Description of Artificial Sequence: Synthetic oligonucleotide
uauuccuggggugagcaua

SEQ ID NO: 2316690 - RNA, 19 nt, Artificial Sequence
  Description of Artificial Sequence: Synthetic oligonucleotide
guacaaacacagcacaccu

SEQ ID NO: 2316691 - RNA, 19 nt, Artificial Sequence
  Description of Artificial Sequence: Synthetic oligonucleotide
ugggaauagccucggcuuc

SEQ ID NO: 2316692 - RNA, 19 nt, Artificial Sequence
  Description of Artificial Sequence: Synthetic oligonucleotide
augaugaccgugggaagag

SEQ ID NO: 2316693 - RNA, 19 nt, Artificial Sequence
  Description of Artificial Sequence: Synthetic oligonucleotide
uguagcguucaagaagcaa

SEQ ID NO: 2316694 - RNA, 19 nt, Artificial Sequence
  Description of Artificial Sequence: Synthetic oligonucleotide
ugggcauguaaggagugcu

SEQ ID NO: 2316695 - RNA, 19 nt, Artificial Sequence
  Description of Artificial Sequence: Synthetic oligonucleotide
gcuaugaugaccgugggaa

SEQ ID NO: 2316696 - RNA, 19 nt, Artificial Sequence
  Description of Artificial Sequence: Synthetic oligonucleotide
cugaagccggucucugagg

SEQ ID NO: 2316697 - RNA, 19 nt, Artificial Sequence
  Description of Artificial Sequence: Synthetic oligonucleotide
aggcaauauuccuggggug

SEQ ID NO: 2316698 - RNA, 19 nt, Artificial Sequence
  Description of Artificial Sequence: Synthetic oligonucleotide
augcugcacacagaagagg

SEQ ID NO: 2316699 - RNA, 19 nt, Artificial Sequence
  Description of Artificial Sequence: Synthetic oligonucleotide
cuggguguccaggaguggg

SEQ ID NO: 2316700 - RNA, 19 nt, Artificial Sequence
  Description of Artificial Sequence: Synthetic oligonucleotide
aucugggaauagccucggc

SEQ ID NO: 2316701 - RNA, 19 nt, Artificial Sequence
  Description of Artificial Sequence: Synthetic oligonucleotide
gaugaccgugggaagagga

SEQ ID NO: 2316702 - RNA, 19 nt, Artificial Sequence
  Description of Artificial Sequence: Synthetic oligonucleotide
auucgcuaugaugaccgug

SEQ ID NO: 2316703 - RNA, 19 nt, Artificial Sequence
  Description of Artificial Sequence: Synthetic oligonucleotide
gucuaaagugggcauguaa

SEQ ID NO: 2316704 - RNA, 19 nt, Artificial Sequence
  Description of Artificial Sequence: Synthetic oligonucleotide
ugaugaccgugggaagagg

SEQ ID NO: 2316705 - RNA, 19 nt, Artificial Sequence
  Description of Artificial Sequence: Synthetic oligonucleotide
ugagggcgaguguuuugag

SEQ ID NO: 2316706 - RNA, 19 nt, Artificial Sequence
  Description of Artificial Sequence: Synthetic oligonucleotide
ugggucuaaagugggcaug

SEQ ID NO: 2316707 - RNA, 19 nt, Artificial Sequence
  Description of Artificial Sequence: Synthetic oligonucleotide
aagccggucucugaggcaa

SEQ ID NO: 2316708 - RNA, 19 nt, Artificial Sequence
  Description of Artificial Sequence: Synthetic oligonucleotide
uacugaauguagcguucaa

SEQ ID NO: 2316709 - RNA, 19 nt, Artificial Sequence
  Description of Artificial Sequence: Synthetic oligonucleotide
aucagacagcucagggagc

SEQ ID NO: 2316710 - RNA, 19 nt, Artificial Sequence
  Description of Artificial Sequence: Synthetic oligonucleotide
uuaugacugucugaacuuu

SEQ ID NO: 2316711 - RNA, 19 nt, Artificial Sequence
  Description of Artificial Sequence: Synthetic oligonucleotide
gaguggaucaugagggcga

SEQ ID NO: 2316712 - RNA, 19 nt, Artificial Sequence
  Description of Artificial Sequence: Synthetic oligonucleotide
uucuucuaggcuugacaua

SEQ ID NO: 2316713 - RNA, 19 nt, Artificial Sequence
  Description of Artificial Sequence: Synthetic oligonucleotide
augagggcgaguguuuuga

SEQ ID NO: 2316714 - RNA, 19 nt, Artificial Sequence
  Description of Artificial Sequence: Synthetic oligonucleotide
ugugccgcuuuagguaugc

SEQ ID NO: 2316715 - RNA, 19 nt, Artificial Sequence
  Description of Artificial Sequence: Synthetic oligonucleotide
ggcgaguguuuugagaugc

SEQ ID NO: 2316716 - RNA, 19 nt, Artificial Sequence
  Description of Artificial Sequence: Synthetic oligonucleotide
ugccgcuuuagguaugcua

SEQ ID NO: 2316717 - RNA, 19 nt, Artificial Sequence
  Description of Artificial Sequence: Synthetic oligonucleotide
gaaucuccuaauucucacu

SEQ ID NO: 2316718 - RNA, 19 nt, Artificial Sequence
  Description of Artificial Sequence: Synthetic oligonucleotide
aacuuucaguggguuggug

SEQ ID NO: 2316719 - RNA, 19 nt, Artificial Sequence
  Description of Artificial Sequence: Synthetic oligonucleotide
gagggcgaguguuuugaga

SEQ ID NO: 2316720 - RNA, 19 nt, Artificial Sequence
  Description of Artificial Sequence: Synthetic oligonucleotide
cauacagcaucagacagcu

SEQ ID NO: 2316721 - RNA, 19 nt, Artificial Sequence
  Description of Artificial Sequence: Synthetic oligonucleotide
acagcaucagacagcucag

SEQ ID NO: 2316722 - RNA, 19 nt, Artificial Sequence
  Description of Artificial Sequence: Synthetic oligonucleotide
cugaggcaauauuccuggg

SEQ ID NO: 2316723 - RNA, 19 nt, Artificial Sequence
  Description of Artificial Sequence: Synthetic oligonucleotide
uguacuuuucugggcacuu

SEQ ID NO: 2316724 - RNA, 19 nt, Artificial Sequence
  Description of Artificial Sequence: Synthetic oligonucleotide
aggcuugacauaguccuga

SEQ ID NO: 2316725 - RNA, 19 nt, Artificial Sequence
  Description of Artificial Sequence: Synthetic oligonucleotide
ggcguugugccgcuuuagg

SEQ ID NO: 2316726 - RNA, 19 nt, Artificial Sequence
  Description of Artificial Sequence: Synthetic oligonucleotide
uccguacuuugaagaauau

SEQ ID NO: 2316727 - RNA, 19 nt, Artificial Sequence
  Description of Artificial Sequence: Synthetic oligonucleotide
caacagggcguugugccgc

SEQ ID NO: 2316728 - RNA, 19 nt, Artificial Sequence
  Description of Artificial Sequence: Synthetic oligonucleotide
ccgcuuacucaacagggcg

SEQ ID NO: 2316729 - RNA, 19 nt, Artificial Sequence
  Description of Artificial Sequence: Synthetic oligonucleotide
auccguacuuugaagaaua

SEQ ID NO: 2316730 - RNA, 19 nt, Artificial Sequence
  Description of Artificial Sequence: Synthetic oligonucleotide
uucugacuuugcuguggug

SEQ ID NO: 2316731 - RNA, 19 nt, Artificial Sequence
  Description of Artificial Sequence: Synthetic oligonucleotide
aacagggcguugugccgcu

SEQ ID NO: 2316732 - RNA, 19 nt, Artificial Sequence
  Description of Artificial Sequence: Synthetic oligonucleotide
aguggaucaugagggcgag

SEQ ID NO: 2316733 - RNA, 19 nt, Artificial Sequence
  Description of Artificial Sequence: Synthetic oligonucleotide
gcucgauugaaucuccuaa

SEQ ID NO: 2316734 - RNA, 19 nt, Artificial Sequence
  Description of Artificial Sequence: Synthetic oligonucleotide
caggacggccagaaucagc

SEQ ID NO: 2316735 - RNA, 19 nt, Artificial Sequence
  Description of Artificial Sequence: Synthetic oligonucleotide
uucugggcacuugucuuca

SEQ ID NO: 2316736 - RNA, 19 nt, Artificial Sequence
  Description of Artificial Sequence: Synthetic oligonucleotide
ugaccgugggaagaggaua

SEQ ID NO: 2316737 - RNA, 19 nt, Artificial Sequence
  Description of Artificial Sequence: Synthetic oligonucleotide
guuuggcucgauugaaucu

SEQ ID NO: 2316738 - RNA, 19 nt, Artificial Sequence
  Description of Artificial Sequence: Synthetic oligonucleotide
gagggcccgggacagucgc

SEQ ID NO: 2316739 - RNA, 19 nt, Artificial Sequence
  Description of Artificial Sequence: Synthetic oligonucleotide
agccugaccucuccaccag

SEQ ID NO: 2316740 - RNA, 19 nt, Artificial Sequence
  Description of Artificial Sequence: Synthetic oligonucleotide
uccuggggugagcauaauu

SEQ ID NO: 2316741 - RNA, 19 nt, Artificial Sequence
  Description of Artificial Sequence: Synthetic oligonucleotide
agcguucaagaagcaaaug

SEQ ID NO: 2316742 - RNA, 19 nt, Artificial Sequence
  Description of Artificial Sequence: Synthetic oligonucleotide
gaggaggaggagugcugug

SEQ ID NO: 2316743 - RNA, 19 nt, Artificial Sequence
  Description of Artificial Sequence: Synthetic oligonucleotide
aggaggaggagugcugugu

SEQ ID NO: 2316744 - RNA, 19 nt, Artificial Sequence
  Description of Artificial Sequence: Synthetic oligonucleotide
cugaccucuccaccagcgc

SEQ ID NO: 2316745 - RNA, 19 nt, Artificial Sequence
  Description of Artificial Sequence: Synthetic oligonucleotide
augacccgccgucgcggcc

SEQ ID NO: 2316746 - RNA, 19 nt, Artificial Sequence
  Description of Artificial Sequence: Synthetic oligonucleotide
acaucaggcugagguuugg

SEQ ID NO: 2316747 - RNA, 19 nt, Artificial Sequence
  Description of Artificial Sequence: Synthetic oligonucleotide
ggccaggacggccagaauc

SEQ ID NO: 2316748 - RNA, 19 nt, Artificial Sequence
  Description of Artificial Sequence: Synthetic oligonucleotide
gagugggucaucauccgua

SEQ ID NO: 2316749 - RNA, 19 nt, Artificial Sequence
  Description of Artificial Sequence: Synthetic oligonucleotide
ggcaauauuccugggguga

SEQ ID NO: 2316750 - RNA, 19 nt, Artificial Sequence
  Description of Artificial Sequence: Synthetic oligonucleotide
cacagcacaccuguuaaaa

SEQ ID NO: 2316751 - RNA, 19 nt, Artificial Sequence
  Description of Artificial Sequence: Synthetic oligonucleotide
gaaccguccuccagccugc

SEQ ID NO: 2316752 - RNA, 19 nt, Artificial Sequence
  Description of Artificial Sequence: Synthetic oligonucleotide
cuggcugacaggccagguc

SEQ ID NO: 2316753 - RNA, 19 nt, Artificial Sequence
  Description of Artificial Sequence: Synthetic oligonucleotide
uggcucgauugaaucuccu

SEQ ID NO: 2316754 - RNA, 19 nt, Artificial Sequence
  Description of Artificial Sequence: Synthetic oligonucleotide
gcauacagcaucagacagc

SEQ ID NO: 2316755 - RNA, 19 nt, Artificial Sequence
  Description of Artificial Sequence: Synthetic oligonucleotide
agugggcauguaaggagug

SEQ ID NO: 2316756 - RNA, 19 nt, Artificial Sequence
  Description of Artificial Sequence: Synthetic oligonucleotide
aaccguccuccagccugcc

SEQ ID NO: 2316757 - RNA, 19 nt, Artificial Sequence
  Description of Artificial Sequence: Synthetic oligonucleotide
uccgaggauuaugacuguc

SEQ ID NO: 2316758 - RNA, 19 nt, Artificial Sequence
  Description of Artificial Sequence: Synthetic oligonucleotide
guagaccgguagaucuggg

SEQ ID NO: 2316759 - RNA, 19 nt, Artificial Sequence
  Description of Artificial Sequence: Synthetic oligonucleotide
acacagcacaccuguuaaa

SEQ ID NO: 2316760 - RNA, 19 nt, Artificial Sequence
  Description of Artificial Sequence: Synthetic oligonucleotide
ggauuaugacugucugaac

SEQ ID NO: 2316761 - RNA, 19 nt, Artificial Sequence
  Description of Artificial Sequence: Synthetic oligonucleotide
ucacugcauacagcaucag

SEQ ID NO: 2316762 - RNA, 19 nt, Artificial Sequence
  Description of Artificial Sequence: Synthetic oligonucleotide
caugacccgccgucgcggc

SEQ ID NO: 2316763 - RNA, 19 nt, Artificial Sequence
  Description of Artificial Sequence: Synthetic oligonucleotide
gaucaugagggcgaguguu

SEQ ID NO: 2316764 - RNA, 19 nt, Artificial Sequence
  Description of Artificial Sequence: Synthetic oligonucleotide
uuccgaggauuaugacugu

SEQ ID NO: 2316765 - RNA, 19 nt, Artificial Sequence
  Description of Artificial Sequence: Synthetic oligonucleotide
ucaugagggcgaguguuuu

SEQ ID NO: 2316766 - RNA, 19 nt, Artificial Sequence
  Description of Artificial Sequence: Synthetic oligonucleotide
gugauacugaauguagcgu

SEQ ID NO: 2316767 - RNA, 19 nt, Artificial Sequence
  Description of Artificial Sequence: Synthetic oligonucleotide
caucaggcugagguuuggc

SEQ ID NO: 2316768 - RNA, 19 nt, Artificial Sequence
  Description of Artificial Sequence: Synthetic oligonucleotide
gaagccggucucugaggca

SEQ ID NO: 2316769 - RNA, 19 nt, Artificial Sequence
  Description of Artificial Sequence: Synthetic oligonucleotide
auauuccuggggugagcau

SEQ ID NO: 2316770 - RNA, 19 nt, Artificial Sequence
  Description of Artificial Sequence: Synthetic oligonucleotide
gcaauauuccuggggugag

SEQ ID NO: 2316771 - RNA, 19 nt, Artificial Sequence
  Description of Artificial Sequence: Synthetic oligonucleotide
ccagaagaguggaucauga

SEQ ID NO: 2316772 - RNA, 19 nt, Artificial Sequence
  Description of Artificial Sequence: Synthetic oligonucleotide
ggauuaggguacaaacaca

SEQ ID NO: 2316773 - RNA, 19 nt, Artificial Sequence
  Description of Artificial Sequence: Synthetic oligonucleotide
ccaggagugggucaucauc

SEQ ID NO: 2316774 - RNA, 19 nt, Artificial Sequence
  Description of Artificial Sequence: Synthetic oligonucleotide
accgguagaucugggaaua

SEQ ID NO: 2316775 - RNA, 19 nt, Artificial Sequence
  Description of Artificial Sequence: Synthetic oligonucleotide
cuuacucaacagggcguug

SEQ ID NO: 2316776 - RNA, 19 nt, Artificial Sequence
  Description of Artificial Sequence: Synthetic oligonucleotide
cucgauugaaucuccuaau

SEQ ID NO: 2316777 - RNA, 19 nt, Artificial Sequence
  Description of Artificial Sequence: Synthetic oligonucleotide
aggccagguccaacaaccg

SEQ ID NO: 2316778 - RNA, 19 nt, Artificial Sequence
  Description of Artificial Sequence: Synthetic oligonucleotide
ggccagaaucagcuccagg

SEQ ID NO: 2316779 - RNA, 19 nt, Artificial Sequence
  Description of Artificial Sequence: Synthetic oligonucleotide
cgaggauuaugacugucug

SEQ ID NO: 2316780 - RNA, 19 nt, Artificial Sequence
  Description of Artificial Sequence: Synthetic oligonucleotide
cugccagccugaccucucc

SEQ ID NO: 2316781 - RNA, 19 nt, Artificial Sequence
  Description of Artificial Sequence: Synthetic oligonucleotide
ggccagguccaacaaccgc

SEQ ID NO: 2316782 - RNA, 19 nt, Artificial Sequence
  Description of Artificial Sequence: Synthetic oligonucleotide
cugggaauagccucggcuu

SEQ ID NO: 2316783 - RNA, 19 nt, Artificial Sequence
  Description of Artificial Sequence: Synthetic oligonucleotide
uccaggagugggucaucau

SEQ ID NO: 2316784 - RNA, 19 nt, Artificial Sequence
  Description of Artificial Sequence: Synthetic oligonucleotide
gaccgguagaucugggaau

SEQ ID NO: 2316785 - RNA, 19 nt, Artificial Sequence
  Description of Artificial Sequence: Synthetic oligonucleotide
cagucgcaccuucucggac

SEQ ID NO: 2316786 - RNA, 19 nt, Artificial Sequence
  Description of Artificial Sequence: Synthetic oligonucleotide
gcaacagaagauucgcuau

SEQ ID NO: 2316787 - RNA, 19 nt, Artificial Sequence
  Description of Artificial Sequence: Synthetic oligonucleotide
gcuaugaugucuccuugcu

SEQ ID NO: 2316788 - RNA, 19 nt, Artificial Sequence
  Description of Artificial Sequence: Synthetic oligonucleotide
gaugccuuguagaccggua

SEQ ID NO: 2316789 - RNA, 19 nt, Artificial Sequence
  Description of Artificial Sequence: Synthetic oligonucleotide
gaguguuuugagaugccuu

SEQ ID NO: 2316790 - RNA, 19 nt, Artificial Sequence
  Description of Artificial Sequence: Synthetic oligonucleotide
gccaugacccgccgucgcg

SEQ ID NO: 2316791 - RNA, 19 nt, Artificial Sequence
  Description of Artificial Sequence: Synthetic oligonucleotide
guacaucaggcugagguuu

SEQ ID NO: 2316792 - RNA, 19 nt, Artificial Sequence
  Description of Artificial Sequence: Synthetic oligonucleotide
guaugcuaugaugucuccu

SEQ ID NO: 2316793 - RNA, 19 nt, Artificial Sequence
  Description of Artificial Sequence: Synthetic oligonucleotide
augaccgugggaagaggau

SEQ ID NO: 2316794 - RNA, 19 nt, Artificial Sequence
  Description of Artificial Sequence: Synthetic oligonucleotide
agguuuggcucgauugaau

SEQ ID NO: 2316795 - RNA, 19 nt, Artificial Sequence
  Description of Artificial Sequence: Synthetic oligonucleotide
aucaugagggcgaguguuu

SEQ ID NO: 2316796 - RNA, 19 nt, Artificial Sequence
  Description of Artificial Sequence: Synthetic oligonucleotide
cuucugacuuugcuguggu

SEQ ID NO: 2316797 - RNA, 19 nt, Artificial Sequence
  Description of Artificial Sequence: Synthetic oligonucleotide
gccaggacggccagaauca

SEQ ID NO: 2316798 - RNA, 19 nt, Artificial Sequence
  Description of Artificial Sequence: Synthetic oligonucleotide
gauucgcuaugaugaccgu

SEQ ID NO: 2316799 - RNA, 19 nt, Artificial Sequence
  Description of Artificial Sequence: Synthetic oligonucleotide
gggcgaguguuuugagaug

SEQ ID NO: 2316800 - RNA, 19 nt, Artificial Sequence
  Description of Artificial Sequence: Synthetic oligonucleotide
cuguggugauacugaaugu

SEQ ID NO: 2316801 - RNA, 19 nt, Artificial Sequence
  Description of Artificial Sequence: Synthetic oligonucleotide
guccaggagugggucauca

SEQ ID NO: 2316802 - RNA, 19 nt, Artificial Sequence
  Description of Artificial Sequence: Synthetic oligonucleotide
ggcuucugacuuugcugug

SEQ ID NO: 2316803 - RNA, 19 nt, Artificial Sequence
  Description of Artificial Sequence: Synthetic oligonucleotide
agggcguugugccgcuuua

SEQ ID NO: 2316804 - RNA, 19 nt, Artificial Sequence
  Description of Artificial Sequence: Synthetic oligonucleotide
ccuggggugagcauaauuu

SEQ ID NO: 2316805 - RNA, 19 nt, Artificial Sequence
  Description of Artificial Sequence: Synthetic oligonucleotide
gugggagaggcuggguguc

SEQ ID NO: 2316806 - RNA, 19 nt, Artificial Sequence
  Description of Artificial Sequence: Synthetic oligonucleotide
auguagcguucaagaagca

SEQ ID NO: 2316807 - RNA, 19 nt, Artificial Sequence
  Description of Artificial Sequence: Synthetic oligonucleotide
ccguacuuugaagaauauc

SEQ ID NO: 2316808 - RNA, 19 nt, Artificial Sequence
  Description of Artificial Sequence: Synthetic oligonucleotide
gccgccaugacccgccguc

SEQ ID NO: 2316809 - RNA, 19 nt, Artificial Sequence
  Description of Artificial Sequence: Synthetic oligonucleotide
ggcccgaugcccugccagc

SEQ ID NO: 2316810 - RNA, 19 nt, Artificial Sequence
  Description of Artificial Sequence: Synthetic oligonucleotide
gaacuuucaguggguuggu

SEQ ID NO: 2316811 - RNA, 19 nt, Artificial Sequence
  Description of Artificial Sequence: Synthetic oligonucleotide
gccgcuuuagguaugcuau

SEQ ID NO: 2316812 - RNA, 19 nt, Artificial Sequence
  Description of Artificial Sequence: Synthetic oligonucleotide
ggcucgauugaaucuccua

SEQ ID NO: 2316813 - RNA, 19 nt, Artificial Sequence
  Description of Artificial Sequence: Synthetic oligonucleotide
ccuuguagaccgguagauc

SEQ ID NO: 2316814 - RNA, 19 nt, Artificial Sequence
  Description of Artificial Sequence: Synthetic oligonucleotide
accgugggaagaggauaga

SEQ ID NO: 2316815 - RNA, 19 nt, Artificial Sequence
  Description of Artificial Sequence: Synthetic oligonucleotide
gucgcggcccgaugcccug

SEQ ID NO: 2316816 - RNA, 19 nt, Artificial Sequence
  Description of Artificial Sequence: Synthetic oligonucleotide
ggaccugcgcgccccgccc

SEQ ID NO: 2316817 - RNA, 19 nt, Artificial Sequence
  Description of Artificial Sequence: Synthetic oligonucleotide
ccgcuuuagguaugcuaug

SEQ ID NO: 2316818 - RNA, 19 nt, Artificial Sequence
  Description of Artificial Sequence: Synthetic oligonucleotide
ccaugacccgccgucgcgg

SEQ ID NO: 2316819 - RNA, 19 nt, Artificial Sequence
  Description of Artificial Sequence: Synthetic oligonucleotide
cuaugaugucuccuugcuu

SEQ ID NO: 2316820 - RNA, 19 nt, Artificial Sequence
  Description of Artificial Sequence: Synthetic oligonucleotide
gucgcaccuucucggaccu

SEQ ID NO: 2316821 - RNA, 19 nt, Artificial Sequence
  Description of Artificial Sequence: Synthetic oligonucleotide
cugggcucagggaaagaau

SEQ ID NO: 2316822 - RNA, 19 nt, Artificial Sequence
  Description of Artificial Sequence: Synthetic oligonucleotide
cucggaccugcgcgccccg

SEQ ID NO: 2316823 - RNA, 19 nt, Artificial Sequence
  Description of Artificial Sequence: Synthetic oligonucleotide
ggcgcgagggcccgggaca

SEQ ID NO: 2316824 - RNA, 19 nt, Artificial Sequence
  Description of Artificial Sequence: Synthetic oligonucleotide
cguugugccgcuuuaggua

SEQ ID NO: 2316825 - RNA, 19 nt, Artificial Sequence
  Description of Artificial Sequence: Synthetic oligonucleotide
cauccguacuuugaagaau

SEQ ID NO: 2316826 - RNA, 19 nt, Artificial Sequence
  Description of Artificial Sequence: Synthetic oligonucleotide
gcuuuagguaugcuaugau

SEQ ID NO: 2316827 - RNA, 19 nt, Artificial Sequence
  Description of Artificial Sequence: Synthetic oligonucleotide
ccagaaucagcuccaggua

SEQ ID NO: 2316828 - RNA, 19 nt, Artificial Sequence
  Description of Artificial Sequence: Synthetic oligonucleotide
ggcucagggaaagaaugcu

SEQ ID NO: 2316829 - RNA, 19 nt, Artificial Sequence
  Description of Artificial Sequence: Synthetic oligonucleotide
gcguugugccgcuuuaggu

SEQ ID NO: 2316830 - RNA, 19 nt, Artificial Sequence
  Description of Artificial Sequence: Synthetic oligonucleotide
cgcaccuucucggaccugc

SEQ ID NO: 2316831 - RNA, 19 nt, Artificial Sequence
  Description of Artificial Sequence: Synthetic oligonucleotide
gggucuaaagugggcaugu

SEQ ID NO: 2316832 - RNA, 19 nt, Artificial Sequence
  Description of Artificial Sequence: Synthetic oligonucleotide
gcgaguguuuugagaugcc

SEQ ID NO: 2316833 - RNA, 19 nt, Artificial Sequence
  Description of Artificial Sequence: Synthetic oligonucleotide
gccugaccucuccaccagc

SEQ ID NO: 2316834 - RNA, 19 nt, Artificial Sequence
  Description of Artificial Sequence: Synthetic oligonucleotide
agccucggcuucugacuuu

SEQ ID NO: 2316835 - RNA, 19 nt, Artificial Sequence
  Description of Artificial Sequence: Synthetic oligonucleotide
ggagugcuguguugccaga

SEQ ID NO: 2316836 - RNA, 19 nt, Artificial Sequence
  Description of Artificial Sequence: Synthetic oligonucleotide
cuucuaggcuugacauagu

SEQ ID NO: 2316837 - RNA, 19 nt, Artificial Sequence
  Description of Artificial Sequence: Synthetic oligonucleotide
ccgaggauuaugacugucu

SEQ ID NO: 2316838 - RNA, 19 nt, Artificial Sequence
  Description of Artificial Sequence: Synthetic oligonucleotide
ggaucaugagggcgagugu

SEQ ID NO: 2316839 - RNA, 19 nt, Artificial Sequence
  Description of Artificial Sequence: Synthetic oligonucleotide
ccgaugcccugccagccug

SEQ ID NO: 2316840 - RNA, 19 nt, Artificial Sequence
  Description of Artificial Sequence: Synthetic oligonucleotide
gggcguugugccgcuuuag

SEQ ID NO: 2316841 - RNA, 19 nt, Artificial Sequence
  Description of Artificial Sequence: Synthetic oligonucleotide
ggacggccagaaucagcuc

SEQ ID NO: 2316842 - RNA, 19 nt, Artificial Sequence
  Description of Artificial Sequence: Synthetic oligonucleotide
ucgcggcccgaugcccugc

SEQ ID NO: 2316843 - RNA, 19 nt, Artificial Sequence
  Description of Artificial Sequence: Synthetic oligonucleotide
cgcuuuagguaugcuauga

SEQ ID NO: 2316844 - RNA, 19 nt, Artificial Sequence
  Description of Artificial Sequence: Synthetic oligonucleotide
gcccgaugcccugccagcc

SEQ ID NO: 2316845 - RNA, 19 nt, Artificial Sequence
  Description of Artificial Sequence: Synthetic oligonucleotide
ccugccagccugaccucuc

SEQ ID NO: 2316846 - RNA, 19 nt, Artificial Sequence
  Description of Artificial Sequence: Synthetic oligonucleotide
gggcccgggacagucgcac

SEQ ID NO: 2316847 - RNA, 19 nt, Artificial Sequence
  Description of Artificial Sequence: Synthetic oligonucleotide
ggcccgggacagucgcacc

SEQ ID NO: 2316848 - RNA, 19 nt, Artificial Sequence
  Description of Artificial Sequence: Synthetic oligonucleotide
ggauagaaucugggucuaa

SEQ ID NO: 2316849 - RNA, 19 nt, Artificial Sequence
  Description of Artificial Sequence: Synthetic oligonucleotide
ccgguagaucugggaauag

SEQ ID NO: 2316850 - RNA, 19 nt, Artificial Sequence
  Description of Artificial Sequence: Synthetic oligonucleotide
gggcgcgagggcccgggac

SEQ ID NO: 2316851 - RNA, 19 nt, Artificial Sequence
  Description of Artificial Sequence: Synthetic oligonucleotide
cagguccaacaaccgcuua

SEQ ID NO: 2316852 - RNA, 19 nt, Artificial Sequence
  Description of Artificial Sequence: Synthetic oligonucleotide
gcuuacucaacagggcguu

SEQ ID NO: 2316853 - RNA, 19 nt, Artificial Sequence
  Description of Artificial Sequence: Synthetic oligonucleotide
cgagggcccgggacagucg

SEQ ID NO: 2316854 - RNA, 19 nt, Artificial Sequence
  Description of Artificial Sequence: Synthetic oligonucleotide
ccaccagcgcccgggcgcg

SEQ ID NO: 2316855 - RNA, 19 nt, Artificial Sequence
  Description of Artificial Sequence: Synthetic oligonucleotide
gcgagggcccgggacaguc

SEQ ID NO: 2316856 - RNA, 19 nt, Artificial Sequence
  Description of Artificial Sequence: Synthetic oligonucleotide
ugccgcccgccgccaugac

SEQ ID NO: 2316857 - RNA, 19 nt, Artificial Sequence
  Description of Artificial Sequence: Synthetic oligonucleotide
cggcccgaugcccugccag

SEQ ID NO: 2316858 - RNA, 19 nt, Artificial Sequence
  Description of Artificial Sequence: Synthetic oligonucleotide
ggucuaaagugggcaugua

SEQ ID NO: 2316859 - RNA, 19 nt, Artificial Sequence
  Description of Artificial Sequence: Synthetic oligonucleotide
gcgcgagggcccgggacag

SEQ ID NO: 2316860 - RNA, 19 nt, Artificial Sequence
  Description of Artificial Sequence: Synthetic oligonucleotide
cgcuaugaugaccguggga

SEQ ID NO: 2316861 - RNA, 19 nt, Artificial Sequence
  Description of Artificial Sequence: Synthetic oligonucleotide
cgccaugacccgccgucgc

SEQ ID NO: 2316862 - RNA, 19 nt, Artificial Sequence
  Description of Artificial Sequence: Synthetic oligonucleotide
agggcccgggacagucgca

SEQ ID NO: 2316863 - RNA, 19 nt, Artificial Sequence
  Description of Artificial Sequence: Synthetic oligonucleotide
gcccgggacagucgcaccu

SEQ ID NO: 2316864 - RNA, 19 nt, Artificial Sequence
  Description of Artificial Sequence: Synthetic oligonucleotide
caguggguugguguacuuu

SEQ ID NO: 2316865 - RNA, 19 nt, Artificial Sequence
  Description of Artificial Sequence: Synthetic oligonucleotide
cgcuuacucaacagggcgu

SEQ ID NO: 2316866 - RNA, 19 nt, Artificial Sequence
  Description of Artificial Sequence: Synthetic oligonucleotide
cggaccugcgcgccccgcc

SEQ ID NO: 2316867 - RNA, 19 nt, Artificial Sequence
  Description of Artificial Sequence: Synthetic oligonucleotide
agccggucucugaggcaau

SEQ ID NO: 2316868 - RNA, 19 nt, Artificial Sequence
  Description of Artificial Sequence: Synthetic oligonucleotide
guggaucaugagggcgagu

SEQ ID NO: 2316869 - RNA, 19 nt, Artificial Sequence
  Description of Artificial Sequence: Synthetic oligonucleotide
cagggcguugugccgcuuu

SEQ ID NO: 2316870 - RNA, 19 nt, Artificial Sequence
  Description of Artificial Sequence: Synthetic oligonucleotide
ccgucgcggcccgaugccc

SEQ ID NO: 2316871 - RNA, 19 nt, Artificial Sequence
  Description of Artificial Sequence: Synthetic oligonucleotide
cgaguguuuugagaugccu

SEQ ID NO: 2316872 - RNA, 19 nt, Artificial Sequence
  Description of Artificial Sequence: Synthetic oligonucleotide
acagggcguugugccgcuu

SEQ ID NO: 2316873 - RNA, 19 nt, Artificial Sequence
  Description of Artificial Sequence: Synthetic oligonucleotide
cugcgcgccccgccccgga

SEQ ID NO: 2316874 - RNA, 19 nt, Artificial Sequence
  Description of Artificial Sequence: Synthetic oligonucleotide
gugccgcuuuagguaugcu

SEQ ID NO: 2316875 - RNA, 19 nt, Artificial Sequence
  Description of Artificial Sequence: Synthetic oligonucleotide
cgccccgccccggacacac

SEQ ID NO: 2316876 - RNA, 19 nt, Artificial Sequence
  Description of Artificial Sequence: Synthetic oligonucleotide
cgcggcccgaugcccugcc

SEQ ID NO: 2316877 - RNA, 19 nt, Artificial Sequence
  Description of Artificial Sequence: Synthetic oligonucleotide
gcccgccgccaugacccgc

SEQ ID NO: 2316878 - RNA, 19 nt, Artificial Sequence
  Description of Artificial Sequence: Synthetic oligonucleotide
gcggcccgaugcccugcca

SEQ ID NO: 2316879 - RNA, 19 nt, Artificial Sequence
  Description of Artificial Sequence: Synthetic oligonucleotide
cccgaugcccugccagccu

SEQ ID NO: 2316880 - RNA, 19 nt, Artificial Sequence
  Description of Artificial Sequence: Synthetic oligonucleotide
ccggucucugaggcaauau

SEQ ID NO: 2316881 - RNA, 19 nt, Artificial Sequence
  Description of Artificial Sequence: Synthetic oligonucleotide
cgucgcggcccgaugcccu

SEQ ID NO: 2316882 - RNA, 19 nt, Artificial Sequence
  Description of Artificial Sequence: Synthetic oligonucleotide
caccagcgcccgggcgcga

SEQ ID NO: 2316883 - RNA, 19 nt, Artificial Sequence
  Description of Artificial Sequence: Synthetic oligonucleotide
ggcugagguuuggcucgau

SEQ ID NO: 2316884 - RNA, 19 nt, Artificial Sequence
  Description of Artificial Sequence: Synthetic oligonucleotide
cccgggacagucgcaccuu

SEQ ID NO: 2316885 - RNA, 19 nt, Artificial Sequence
  Description of Artificial Sequence: Synthetic oligonucleotide
cgggcgcgagggcccggga

SEQ ID NO: 2316886 - RNA, 19 nt, Artificial Sequence
  Description of Artificial Sequence: Synthetic oligonucleotide
cccgccgucgcggcccgau

SEQ ID NO: 2316887 - RNA, 19 nt, Artificial Sequence
  Description of Artificial Sequence: Synthetic oligonucleotide
cgcgagggcccgggacagu

SEQ ID NO: 2316888 - RNA, 19 nt, Artificial Sequence
  Description of Artificial Sequence: Synthetic oligonucleotide
aaagcgaauaaucagacag

SEQ ID NO: 2316889 - RNA, 19 nt, Artificial Sequence
  Description of Artificial Sequence: Synthetic oligonucleotide
uguucuucuugucagaugg

SEQ ID NO: 2316890 - RNA, 19 nt, Artificial Sequence
  Description of Artificial Sequence: Synthetic oligonucleotide
ucauauacuaggauaaugc

SEQ ID NO: 2316891 - RNA, 19 nt, Artificial Sequence
  Description of Artificial Sequence: Synthetic oligonucleotide
uauacuaggauaaugccca

SEQ ID NO: 2316892 - RNA, 19 nt, Artificial Sequence
  Description of Artificial Sequence: Synthetic oligonucleotide
aaucagacaggucuugccc

SEQ ID NO: 2316893 - RNA, 19 nt, Artificial Sequence
  Description of Artificial Sequence: Synthetic oligonucleotide
cagacuugcaguuugaucc

SEQ ID NO: 2316894 - RNA, 19 nt, Artificial Sequence
  Description of Artificial Sequence: Synthetic oligonucleotide
ucucaaaccccuuucaacg

SEQ ID NO: 2316895 - RNA, 19 nt, Artificial Sequence
  Description of Artificial Sequence: Synthetic oligonucleotide
uucugaauauucucgaacg

SEQ ID NO: 2316896 - RNA, 19 nt, Artificial Sequence
  Description of Artificial Sequence: Synthetic oligonucleotide
gaggcauucucuuugaugc

SEQ ID NO: 2316897 - RNA, 19 nt, Artificial Sequence
  Description of Artificial Sequence: Synthetic oligonucleotide
ucuugaaucguucuuggcc

SEQ ID NO: 2316898 - RNA, 19 nt, Artificial Sequence
  Description of Artificial Sequence: Synthetic oligonucleotide
aaaucaauuccgauggugg

SEQ ID NO: 2316899 - RNA, 19 nt, Artificial Sequence
  Description of Artificial Sequence: Synthetic oligonucleotide
guaguuauugucuugaauc

SEQ ID NO: 2316900 - RNA, 19 nt, Artificial Sequence
  Description of Artificial Sequence: Synthetic oligonucleotide
uaggcuuuggccauggcgg

SEQ ID NO: 2316901 - RNA, 19 nt, Artificial Sequence
  Description of Artificial Sequence: Synthetic oligonucleotide
uaguuauugucuugaaucg

SEQ ID NO: 2316902 - RNA, 19 nt, Artificial Sequence
  Description of Artificial Sequence: Synthetic oligonucleotide
caaggaauguccuucagcc

SEQ ID NO: 2316903 - RNA, 19 nt, Artificial Sequence
  Description of Artificial Sequence: Synthetic oligonucleotide
cuugaaaucaauuccgaug

SEQ ID NO: 2316904 - RNA, 19 nt, Artificial Sequence
  Description of Artificial Sequence: Synthetic oligonucleotide
aaaaucggauuccaugcuc

SEQ ID NO: 2316905 - RNA, 19 nt, Artificial Sequence
  Description of Artificial Sequence: Synthetic oligonucleotide
gauuccaugcucucgagcc

SEQ ID NO: 2316906 - RNA, 19 nt, Artificial Sequence
  Description of Artificial Sequence: Synthetic oligonucleotide
auauacuaggauaaugccc

SEQ ID NO: 2316907 - RNA, 19 nt, Artificial Sequence
  Description of Artificial Sequence: Synthetic oligonucleotide
ucauccacauucauacugg

SEQ ID NO: 2316908 - RNA, 19 nt, Artificial Sequence
  Description of Artificial Sequence: Synthetic oligonucleotide
ucgggaaaagccaacacug

SEQ ID NO: 2316909 - RNA, 19 nt, Artificial Sequence
  Description of Artificial Sequence: Synthetic oligonucleotide
ugcaaagcgaauaaucaga

SEQ ID NO: 2316910 - RNA, 19 nt, Artificial Sequence
  Description of Artificial Sequence: Synthetic oligonucleotide
ggaauugaaagccucaucc

SEQ ID NO: 2316911 - RNA, 19 nt, Artificial Sequence
  Description of Artificial Sequence: Synthetic oligonucleotide
aacucccucaggucuagcc

SEQ ID NO: 2316912 - RNA, 19 nt, Artificial Sequence
  Description of Artificial Sequence: Synthetic oligonucleotide
acguucacacccuugauuc

SEQ ID NO: 2316913 - RNA, 19 nt, Artificial Sequence
  Description of Artificial Sequence: Synthetic oligonucleotide
acaaggaauguccuucagc

SEQ ID NO: 2316914 - RNA, 19 nt, Artificial Sequence
  Description of Artificial Sequence: Synthetic oligonucleotide
aguguuguugaaguugucc

SEQ ID NO: 2316915 - RNA, 19 nt, Artificial Sequence
  Description of Artificial Sequence: Synthetic oligonucleotide
uuaucagcaguucaucuac

SEQ ID NO: 2316916 - RNA, 19 nt, Artificial Sequence
  Description of Artificial Sequence: Synthetic oligonucleotide
aaggaauguccuucagccc

SEQ ID NO: 2316917 - RNA, 19 nt, Artificial Sequence
  Description of Artificial Sequence: Synthetic oligonucleotide
gaaagccucauccacauuc

SEQ ID NO: 2316918 - RNA, 19 nt, Artificial Sequence
  Description of Artificial Sequence: Synthetic oligonucleotide
cauauacuaggauaaugcc

SEQ ID NO: 2316919 - RNA, 19 nt, Artificial Sequence
  Description of Artificial Sequence: Synthetic oligonucleotide
uaggauaaugcccauggcu

SEQ ID NO: 2316920 - RNA, 19 nt, Artificial Sequence
  Description of Artificial Sequence: Synthetic oligonucleotide
aacgauuucucaucuguga

SEQ ID NO: 2316921 - RNA, 19 nt, Artificial Sequence
  Description of Artificial Sequence: Synthetic oligonucleotide
uaaguguuguugaaguugu

SEQ ID NO: 2316922 - RNA, 19 nt, Artificial Sequence
  Description of Artificial Sequence: Synthetic oligonucleotide
uucaggucagugcuggagg

SEQ ID NO: 2316923 - RNA, 19 nt, Artificial Sequence
  Description of Artificial Sequence: Synthetic oligonucleotide
ugagcaagaugucacgggc

SEQ ID NO: 2316924 - RNA, 19 nt, Artificial Sequence
  Description of Artificial Sequence: Synthetic oligonucleotide
aucagcaguucaucuaccc

SEQ ID NO: 2316925 - RNA, 19 nt, Artificial Sequence
  Description of Artificial Sequence: Synthetic oligonucleotide
ucaacguucacacccuuga

SEQ ID NO: 2316926 - RNA, 19 nt, Artificial Sequence
  Description of Artificial Sequence: Synthetic oligonucleotide
ucuauuuccacaguucgga

SEQ ID NO: 2316927 - RNA, 19 nt, Artificial Sequence
  Description of Artificial Sequence: Synthetic oligonucleotide
gaugucauauacuaggaua

SEQ ID NO: 2316928 - RNA, 19 nt, Artificial Sequence
  Description of Artificial Sequence: Synthetic oligonucleotide
agccuguucuuucagcacc

SEQ ID NO: 2316929 - RNA, 19 nt, Artificial Sequence
  Description of Artificial Sequence: Synthetic oligonucleotide
aggucuagccuccagguuc

SEQ ID NO: 2316930 - RNA, 19 nt, Artificial Sequence
  Description of Artificial Sequence: Synthetic oligonucleotide
uucauacuggauuuggcac

SEQ ID NO: 2316931 - RNA, 19 nt, Artificial Sequence
  Description of Artificial Sequence: Synthetic oligonucleotide
ucaucuaccccucuaguuc

SEQ ID NO: 2316932 - RNA, 19 nt, Artificial Sequence
  Description of Artificial Sequence: Synthetic oligonucleotide
aguuugauccucuugcccu

SEQ ID NO: 2316933 - RNA, 19 nt, Artificial Sequence
  Description of Artificial Sequence: Synthetic oligonucleotide
uugguguucuucuugucag

SEQ ID NO: 2316934 - RNA, 19 nt, Artificial Sequence
  Description of Artificial Sequence: Synthetic oligonucleotide
ugucuugaaucguucuugg

SEQ ID NO: 2316935 - RNA, 19 nt, Artificial Sequence
  Description of Artificial Sequence: Synthetic oligonucleotide
auguaaguguuguugaagu

SEQ ID NO: 2316936 - RNA, 19 nt, Artificial Sequence
  Description of Artificial Sequence: Synthetic oligonucleotide
auaggcgguaguuauuguc

SEQ ID NO: 2316937 - RNA, 19 nt, Artificial Sequence
  Description of Artificial Sequence: Synthetic oligonucleotide
aaucaauuccgauggugga

SEQ ID NO: 2316938 - RNA, 19 nt, Artificial Sequence
  Description of Artificial Sequence: Synthetic oligonucleotide
agcagaaggcgcuccaccc

SEQ ID NO: 2316939 - RNA, 19 nt, Artificial Sequence
  Description of Artificial Sequence: Synthetic oligonucleotide
uugagcaagaugucacggg

SEQ ID NO: 2316940 - RNA, 19 nt, Artificial Sequence
  Description of Artificial Sequence: Synthetic oligonucleotide
ugaauauucucgaacgauu

SEQ ID NO: 2316941 - RNA, 19 nt, Artificial Sequence
  Description of Artificial Sequence: Synthetic oligonucleotide
aaugcccauggcuccacgg

SEQ ID NO: 2316942 - RNA, 19 nt, Artificial Sequence
  Description of Artificial Sequence: Synthetic oligonucleotide
gauguaaguguuguugaag

SEQ ID NO: 2316943 - RNA, 19 nt, Artificial Sequence
  Description of Artificial Sequence: Synthetic oligonucleotide
aaaagccaacacugguagg

SEQ ID NO: 2316944 - RNA, 19 nt, Artificial Sequence
  Description of Artificial Sequence: Synthetic oligonucleotide
guaggcuuuggccauggcg

SEQ ID NO: 2316945 - RNA, 19 nt, Artificial Sequence
  Description of Artificial Sequence: Synthetic oligonucleotide
ucugaauauucucgaacga

SEQ ID NO: 2316946 - RNA, 19 nt, Artificial Sequence
  Description of Artificial Sequence: Synthetic oligonucleotide
uuuucauccaguucugaau

SEQ ID NO: 2316947 - RNA, 19 nt, Artificial Sequence
  Description of Artificial Sequence: Synthetic oligonucleotide
aguucaucuaccccucuag

SEQ ID NO: 2316948 - RNA, 19 nt, Artificial Sequence
  Description of Artificial Sequence: Synthetic oligonucleotide
uaauaggcgguaguuauug

SEQ ID NO: 2316949 - RNA, 19 nt, Artificial Sequence
  Description of Artificial Sequence: Synthetic oligonucleotide
aacacugguaggcgggauc

SEQ ID NO: 2316950 - RNA, 19 nt, Artificial Sequence
  Description of Artificial Sequence: Synthetic oligonucleotide
aggaauguccuucagccca

SEQ ID NO: 2316951 - RNA, 19 nt, Artificial Sequence
  Description of Artificial Sequence: Synthetic oligonucleotide
aggauaaugcccauggcuc

SEQ ID NO: 2316952 - RNA, 19 nt, Artificial Sequence
  Description of Artificial Sequence: Synthetic oligonucleotide
gaaaucaauuccgauggug

SEQ ID NO: 2316953 - RNA, 19 nt, Artificial Sequence
  Description of Artificial Sequence: Synthetic oligonucleotide
guaaguguuguugaaguug

SEQ ID NO: 2316954 - RNA, 19 nt, Artificial Sequence
  Description of Artificial Sequence: Synthetic oligonucleotide
auaaucagacaggucuugc

SEQ ID NO: 2316955 - RNA, 19 nt, Artificial Sequence
  Description of Artificial Sequence: Synthetic oligonucleotide
ucucgagccagcuuaucag

SEQ ID NO: 2316956 - RNA, 19 nt, Artificial Sequence
  Description of Artificial Sequence: Synthetic oligonucleotide
guucccaccaguuucuccc

SEQ ID NO: 2316957 - RNA, 19 nt, Artificial Sequence
  Description of Artificial Sequence: Synthetic oligonucleotide
uaaucagacaggucuugcc

SEQ ID NO: 2316958 - RNA, 19 nt, Artificial Sequence
  Description of Artificial Sequence: Synthetic oligonucleotide
aagcgaauaaucagacagg

SEQ ID NO: 2316959 - RNA, 19 nt, Artificial Sequence
  Description of Artificial Sequence: Synthetic oligonucleotide
ucuccuuaucagcaguuca

SEQ ID NO: 2316960 - RNA, 19 nt, Artificial Sequence
  Description of Artificial Sequence: Synthetic oligonucleotide
uucucaaaccccuuucaac

SEQ ID NO: 2316961 - RNA, 19 nt, Artificial Sequence
  Description of Artificial Sequence: Synthetic oligonucleotide
uaggcgguaguuauugucu

SEQ ID NO: 2316962 - RNA, 19 nt, Artificial Sequence
  Description of Artificial Sequence: Synthetic oligonucleotide
auuccgaugguggagaugu

SEQ ID NO: 2316963 - RNA, 19 nt, Artificial Sequence
  Description of Artificial Sequence: Synthetic oligonucleotide
aaucggauuccaugcucuc

SEQ ID NO: 2316964 - RNA, 19 nt, Artificial Sequence
  Description of Artificial Sequence: Synthetic oligonucleotide
aauguccuucagcccaggg

SEQ ID NO: 2316965 - RNA, 19 nt, Artificial Sequence
  Description of Artificial Sequence: Synthetic oligonucleotide
auauucucgaacgauuucu

SEQ ID NO: 2316966 - RNA, 19 nt, Artificial Sequence
  Description of Artificial Sequence: Synthetic oligonucleotide
aguuguccucugcaaagcg

SEQ ID NO: 2316967 - RNA, 19 nt, Artificial Sequence
  Description of Artificial Sequence: Synthetic oligonucleotide
acauucauacuggauuugg

SEQ ID NO: 2316968 - RNA, 19 nt, Artificial Sequence
  Description of Artificial Sequence: Synthetic oligonucleotide
gagauguaaguguuguuga

SEQ ID NO: 2316969 - RNA, 19 nt, Artificial Sequence
  Description of Artificial Sequence: Synthetic oligonucleotide
gaugucacgggccagggaa

SEQ ID NO: 2316970 - RNA, 19 nt, Artificial Sequence
  Description of Artificial Sequence: Synthetic oligonucleotide
cugcaaagcgaauaaucag

SEQ ID NO: 2316971 - RNA, 19 nt, Artificial Sequence
  Description of Artificial Sequence: Synthetic oligonucleotide
uugucuugaaucguucuug

SEQ ID NO: 2316972 - RNA, 19 nt, Artificial Sequence
  Description of Artificial Sequence: Synthetic oligonucleotide
ccuuucaacguucacaccc

SEQ ID NO: 2316973 - RNA, 19 nt, Artificial Sequence
  Description of Artificial Sequence: Synthetic oligonucleotide
gaauugaaagccucaucca

SEQ ID NO: 2316974 - RNA, 19 nt, Artificial Sequence
  Description of Artificial Sequence: Synthetic oligonucleotide
ucggauuccaugcucucga

SEQ ID NO: 2316975 - RNA, 19 nt, Artificial Sequence
  Description of Artificial Sequence: Synthetic oligonucleotide
cucuauuuccacaguucgg

SEQ ID NO: 2316976 - RNA, 19 nt, Artificial Sequence
  Description of Artificial Sequence: Synthetic oligonucleotide
aacguucacacccuugauu

SEQ ID NO: 2316977 - RNA, 19 nt, Artificial Sequence
  Description of Artificial Sequence: Synthetic oligonucleotide
uccaguucugaauauucuc

SEQ ID NO: 2316978 - RNA, 19 nt, Artificial Sequence
  Description of Artificial Sequence: Synthetic oligonucleotide
gaugcuuuucauccaguuc

SEQ ID NO: 2316979 - RNA, 19 nt, Artificial Sequence
  Description of Artificial Sequence: Synthetic oligonucleotide
cauggcuccacgguaauag

SEQ ID NO: 2316980 - RNA, 19 nt, Artificial Sequence
  Description of Artificial Sequence: Synthetic oligonucleotide
uuaucagccuguucuuuca

SEQ ID NO: 2316981 - RNA, 19 nt, Artificial Sequence
  Description of Artificial Sequence: Synthetic oligonucleotide
caucuaccccucuaguucc

SEQ ID NO: 2316982 - RNA, 19 nt, Artificial Sequence
  Description of Artificial Sequence: Synthetic oligonucleotide
ugucagauggcuucagguc

SEQ ID NO: 2316983 - RNA, 19 nt, Artificial Sequence
  Description of Artificial Sequence: Synthetic oligonucleotide
aaaucggauuccaugcucu

SEQ ID NO: 2316984 - RNA, 19 nt, Artificial Sequence
  Description of Artificial Sequence: Synthetic oligonucleotide
caacuugaagagguggucg

SEQ ID NO: 2316985 - RNA, 19 nt, Artificial Sequence
  Description of Artificial Sequence: Synthetic oligonucleotide
ccaguucugaauauucucg

SEQ ID NO: 2316986 - RNA, 19 nt, Artificial Sequence
  Description of Artificial Sequence: Synthetic oligonucleotide
cuugagcaagaugucacgg

SEQ ID NO: 2316987 - RNA, 19 nt, Artificial Sequence
  Description of Artificial Sequence: Synthetic oligonucleotide
uucucgaacgauuucucau

SEQ ID NO: 2316988 - RNA, 19 nt, Artificial Sequence
  Description of Artificial Sequence: Synthetic oligonucleotide
uauuuccacaguucggauc

SEQ ID NO: 2316989 - RNA, 19 nt, Artificial Sequence
  Description of Artificial Sequence: Synthetic oligonucleotide
cccaguguaauccucagcc

SEQ ID NO: 2316990 - RNA, 19 nt, Artificial Sequence
  Description of Artificial Sequence: Synthetic oligonucleotide
ggagauguaaguguuguug

SEQ ID NO: 2316991 - RNA, 19 nt, Artificial Sequence
  Description of Artificial Sequence: Synthetic oligonucleotide
uauucucgaacgauuucuc

SEQ ID NO: 2316992 - RNA, 19 nt, Artificial Sequence
  Description of Artificial Sequence: Synthetic oligonucleotide
gucauauacuaggauaaug

SEQ ID NO: 2316993 - RNA, 19 nt, Artificial Sequence
  Description of Artificial Sequence: Synthetic oligonucleotide
cuuaucagccuguucuuuc

SEQ ID NO: 2316994 - RNA, 19 nt, Artificial Sequence
  Description of Artificial Sequence: Synthetic oligonucleotide
ucaggucuagccuccaggu

SEQ ID NO: 2316995 - RNA, 19 nt, Artificial Sequence
  Description of Artificial Sequence: Synthetic oligonucleotide
ucucgaacgauuucucauc

SEQ ID NO: 2316996 - RNA, 19 nt, Artificial Sequence
  Description of Artificial Sequence: Synthetic oligonucleotide
uggauuuggcacuugucuc

SEQ ID NO: 2316997 - RNA, 19 nt, Artificial Sequence
  Description of Artificial Sequence: Synthetic oligonucleotide
uuugcugugguuccccgau

SEQ ID NO: 2316998 - RNA, 19 nt, Artificial Sequence
  Description of Artificial Sequence: Synthetic oligonucleotide
ugaggaggccacaaggaau

SEQ ID NO: 2316999 - RNA, 19 nt, Artificial Sequence
  Description of Artificial Sequence: Synthetic oligonucleotide
uucaacguucacacccuug

SEQ ID NO: 2317000 - RNA, 19 nt, Artificial Sequence
  Description of Artificial Sequence: Synthetic oligonucleotide
cucaggucuagccuccagg

SEQ ID NO: 2317001 - RNA, 19 nt, Artificial Sequence
  Description of Artificial Sequence: Synthetic oligonucleotide
uccucugcaaagcgaauaa

SEQ ID NO: 2317002 - RNA, 19 nt, Artificial Sequence
  Description of Artificial Sequence: Synthetic oligonucleotide
uguuccccagcagaaggcg

SEQ ID NO: 2317003 - RNA, 19 nt, Artificial Sequence
  Description of Artificial Sequence: Synthetic oligonucleotide
aagccaacacugguaggcg

SEQ ID NO: 2317004 - RNA, 19 nt, Artificial Sequence
  Description of Artificial Sequence: Synthetic oligonucleotide
cucuuugaugcuuuucauc

SEQ ID NO: 2317005 - RNA, 19 nt, Artificial Sequence
  Description of Artificial Sequence: Synthetic oligonucleotide
aauaggcgguaguuauugu

SEQ ID NO: 2317006 - RNA, 19 nt, Artificial Sequence
  Description of Artificial Sequence: Synthetic oligonucleotide
gacuugagcaagaugucac

SEQ ID NO: 2317007 - RNA, 19 nt, Artificial Sequence
  Description of Artificial Sequence: Synthetic oligonucleotide
agcgaauaaucagacaggu

SEQ ID NO: 2317008 - RNA, 19 nt, Artificial Sequence
  Description of Artificial Sequence: Synthetic oligonucleotide
guggucguaggcuuuggcc

SEQ ID NO: 2317009 - RNA, 19 nt, Artificial Sequence
  Description of Artificial Sequence: Synthetic oligonucleotide
uggcuccacgguaauaggc

SEQ ID NO: 2317010 - RNA, 19 nt, Artificial Sequence
  Description of Artificial Sequence: Synthetic oligonucleotide
uuguuccccagcagaaggc

SEQ ID NO: 2317011 - RNA, 19 nt, Artificial Sequence
  Description of Artificial Sequence: Synthetic oligonucleotide
ucaucugugaugucauaua

SEQ ID NO: 2317012 - RNA, 19 nt, Artificial Sequence
  Description of Artificial Sequence: Synthetic oligonucleotide
aagagguggucguaggcuu

SEQ ID NO: 2317013 - RNA, 19 nt, Artificial Sequence
  Description of Artificial Sequence: Synthetic oligonucleotide
uaucagcaguucaucuacc

SEQ ID NO: 2317014 - RNA, 19 nt, Artificial Sequence
  Description of Artificial Sequence: Synthetic oligonucleotide
aucagacaggucuugccca

SEQ ID NO: 2317015 - RNA, 19 nt, Artificial Sequence
  Description of Artificial Sequence: Synthetic oligonucleotide
aagaugucacgggccaggg

SEQ ID NO: 2317016 - RNA, 19 nt, Artificial Sequence
  Description of Artificial Sequence: Synthetic oligonucleotide
guaauccucagcccaacuc

SEQ ID NO: 2317017 - RNA, 19 nt, Artificial Sequence
  Description of Artificial Sequence: Synthetic oligonucleotide
ucggaucuugaaaucaauu

SEQ ID NO: 2317018 - RNA, 19 nt, Artificial Sequence
  Description of Artificial Sequence: Synthetic oligonucleotide
auugucuugaaucguucuu

SEQ ID NO: 2317019 - RNA, 19 nt, Artificial Sequence
  Description of Artificial Sequence: Synthetic oligonucleotide
uucaucuaccccucuaguu

SEQ ID NO: 2317020 - RNA, 19 nt, Artificial Sequence
  Description of Artificial Sequence: Synthetic oligonucleotide
accaguuucuccccagugu

SEQ ID NO: 2317021 - RNA, 19 nt, Artificial Sequence
  Description of Artificial Sequence: Synthetic oligonucleotide
aaccccuuucaacguucac

SEQ ID NO: 2317022 - RNA, 19 nt, Artificial Sequence
  Description of Artificial Sequence: Synthetic oligonucleotide
uguaauccucagcccaacu

SEQ ID NO: 2317023 - RNA, 19 nt, Artificial Sequence
  Description of Artificial Sequence: Synthetic oligonucleotide
auucucgaacgauuucuca

SEQ ID NO: 2317024 - RNA, 19 nt, Artificial Sequence
  Description of Artificial Sequence: Synthetic oligonucleotide
ccucuauuuccacaguucg

SEQ ID NO: 2317025 - RNA, 19 nt, Artificial Sequence
  Description of Artificial Sequence: Synthetic oligonucleotide
acgauuucucaucugugau

SEQ ID NO: 2317026 - RNA, 19 nt, Artificial Sequence
  Description of Artificial Sequence: Synthetic oligonucleotide
cugugaugucauauacuag

SEQ ID NO: 2317027 - RNA, 19 nt, Artificial Sequence
  Description of Artificial Sequence: Synthetic oligonucleotide
agguucagggugaggaggc

SEQ ID NO: 2317028 - RNA, 19 nt, Artificial Sequence
  Description of Artificial Sequence: Synthetic oligonucleotide
cucgagccagcuuaucagc

SEQ ID NO: 2317029 - RNA, 19 nt, Artificial Sequence
  Description of Artificial Sequence: Synthetic oligonucleotide
uugaaucguucuuggccag

SEQ ID NO: 2317030 - RNA, 19 nt, Artificial Sequence
  Description of Artificial Sequence: Synthetic oligonucleotide
gaucgggagggcuggcagg

SEQ ID NO: 2317031 - RNA, 19 nt, Artificial Sequence
  Description of Artificial Sequence: Synthetic oligonucleotide
uguaaguguuguugaaguu

SEQ ID NO: 2317032 - RNA, 19 nt, Artificial Sequence
  Description of Artificial Sequence: Synthetic oligonucleotide
gaacgauuucucaucugug

SEQ ID NO: 2317033 - RNA, 19 nt, Artificial Sequence
  Description of Artificial Sequence: Synthetic oligonucleotide
ugguaggcgggaucgggag

SEQ ID NO: 2317034 - RNA, 19 nt, Artificial Sequence
  Description of Artificial Sequence: Synthetic oligonucleotide
caagaugucacgggccagg

SEQ ID NO: 2317035 - RNA, 19 nt, Artificial Sequence
  Description of Artificial Sequence: Synthetic oligonucleotide
agccaacacugguaggcgg

SEQ ID NO: 2317036 - RNA, 19 nt, Artificial Sequence
  Description of Artificial Sequence: Synthetic oligonucleotide
aguucugaauauucucgaa

SEQ ID NO: 2317037 - RNA, 19 nt, Artificial Sequence
  Description of Artificial Sequence: Synthetic oligonucleotide
uccugacuugagcaagaug

SEQ ID NO: 2317038 - RNA, 19 nt, Artificial Sequence
  Description of Artificial Sequence: Synthetic oligonucleotide
agauguaaguguuguugaa

SEQ ID NO: 2317039 - RNA, 19 nt, Artificial Sequence
  Description of Artificial Sequence: Synthetic oligonucleotide
guaggcgggaucgggaggg

SEQ ID NO: 2317040 - RNA, 19 nt, Artificial Sequence
  Description of Artificial Sequence: Synthetic oligonucleotide
aguuauugucuugaaucgu

SEQ ID NO: 2317041 - RNA, 19 nt, Artificial Sequence
  Description of Artificial Sequence: Synthetic oligonucleotide
ccugacuugagcaagaugu

SEQ ID NO: 2317042 - RNA, 19 nt, Artificial Sequence
  Description of Artificial Sequence: Synthetic oligonucleotide
uaaugcccauggcuccacg

SEQ ID NO: 2317043 - RNA, 19 nt, Artificial Sequence
  Description of Artificial Sequence: Synthetic oligonucleotide
auggcuccacgguaauagg

SEQ ID NO: 2317044 - RNA, 19 nt, Artificial Sequence
  Description of Artificial Sequence: Synthetic oligonucleotide
aucggauuccaugcucucg

SEQ ID NO: 2317045 - RNA, 19 nt, Artificial Sequence
  Description of Artificial Sequence: Synthetic oligonucleotide
cuuaucagcaguucaucua

SEQ ID NO: 2317046 - RNA, 19 nt, Artificial Sequence
  Description of Artificial Sequence: Synthetic oligonucleotide
augcucucgagccagcuua

SEQ ID NO: 2317047 - RNA, 19 nt, Artificial Sequence
  Description of Artificial Sequence: Synthetic oligonucleotide
agacuugcaguuugauccu

SEQ ID NO: 2317048 - RNA, 19 nt, Artificial Sequence
  Description of Artificial Sequence: Synthetic oligonucleotide
ucaaaccccuuucaacguu

SEQ ID NO: 2317049 - RNA, 19 nt, Artificial Sequence
  Description of Artificial Sequence: Synthetic oligonucleotide
ggauaaugcccauggcucc

SEQ ID NO: 2317050 - RNA, 19 nt, Artificial Sequence
  Description of Artificial Sequence: Synthetic oligonucleotide
cuucaggucagugcuggag

SEQ ID NO: 2317051 - RNA, 19 nt, Artificial Sequence
  Description of Artificial Sequence: Synthetic oligonucleotide
caaaccccuuucaacguuc

SEQ ID NO: 2317052 - RNA, 19 nt, Artificial Sequence
  Description of Artificial Sequence: Synthetic oligonucleotide
ucagacaggucuugcccac

SEQ ID NO: 2317053 - RNA, 19 nt, Artificial Sequence
  Description of Artificial Sequence: Synthetic oligonucleotide
caguguaauccucagccca

SEQ ID NO: 2317054 - RNA, 19 nt, Artificial Sequence
  Description of Artificial Sequence: Synthetic oligonucleotide
cagcuuaucagccuguucu

SEQ ID NO: 2317055 - RNA, 19 nt, Artificial Sequence
  Description of Artificial Sequence: Synthetic oligonucleotide
uaccccucuaguucccacc

SEQ ID NO: 2317056 - RNA, 19 nt, Artificial Sequence
  Description of Artificial Sequence: Synthetic oligonucleotide
acugguaggcgggaucggg

SEQ ID NO: 2317057 - RNA, 19 nt, Artificial Sequence
  Description of Artificial Sequence: Synthetic oligonucleotide
uccuuccccuuccuuuucc

SEQ ID NO: 2317058 - RNA, 19 nt, Artificial Sequence
  Description of Artificial Sequence: Synthetic oligonucleotide
agcccaacucccucagguc

SEQ ID NO: 2317059 - RNA, 19 nt, Artificial Sequence
  Description of Artificial Sequence: Synthetic oligonucleotide
cacacccuugauuccuucc

SEQ ID NO: 2317060 - RNA, 19 nt, Artificial Sequence
  Description of Artificial Sequence: Synthetic oligonucleotide
accccuuucaacguucaca

SEQ ID NO: 2317061 - RNA, 19 nt, Artificial Sequence
  Description of Artificial Sequence: Synthetic oligonucleotide
cugacuugagcaagauguc

SEQ ID NO: 2317062 - RNA, 19 nt, Artificial Sequence
  Description of Artificial Sequence: Synthetic oligonucleotide
uuggccuccaugucacacu

SEQ ID NO: 2317063 - RNA, 19 nt, Artificial Sequence
  Description of Artificial Sequence: Synthetic oligonucleotide
aaggcgcuccaccccagca

SEQ ID NO: 2317064 - RNA, 19 nt, Artificial Sequence
  Description of Artificial Sequence: Synthetic oligonucleotide
ucgaacgauuucucaucug

SEQ ID NO: 2317065 - RNA, 19 nt, Artificial Sequence
  Description of Artificial Sequence: Synthetic oligonucleotide
caguucugaauauucucga

SEQ ID NO: 2317066 - RNA, 19 nt, Artificial Sequence
  Description of Artificial Sequence: Synthetic oligonucleotide
gucuugaaucguucuuggc

SEQ ID NO: 2317067 - RNA, 19 nt, Artificial Sequence
  Description of Artificial Sequence: Synthetic oligonucleotide
ucuagccuccagguucagg

SEQ ID NO: 2317068 - RNA, 19 nt, Artificial Sequence
  Description of Artificial Sequence: Synthetic oligonucleotide
cgaauaaucagacaggucu

SEQ ID NO: 2317069 - RNA, 19 nt, Artificial Sequence
  Description of Artificial Sequence: Synthetic oligonucleotide
ggauuuggcacuugucuca

SEQ ID NO: 2317070 - RNA, 19 nt, Artificial Sequence
  Description of Artificial Sequence: Synthetic oligonucleotide
uucuuucagcaccuuccuc

SEQ ID NO: 2317071 - RNA, 19 nt, Artificial Sequence
  Description of Artificial Sequence: Synthetic oligonucleotide
uacuaggauaaugcccaug

SEQ ID NO: 2317072 - RNA, 19 nt, Artificial Sequence
  Description of Artificial Sequence: Synthetic oligonucleotide
aucuugaaaucaauuccga

SEQ ID NO: 2317073 - RNA, 19 nt, Artificial Sequence
  Description of Artificial Sequence: Synthetic oligonucleotide
uccuuaucagcaguucauc

SEQ ID NO: 2317074 - RNA, 19 nt, Artificial Sequence
  Description of Artificial Sequence: Synthetic oligonucleotide
uccccaguguaauccucag

SEQ ID NO: 2317075 - RNA, 19 nt, Artificial Sequence
  Description of Artificial Sequence: Synthetic oligonucleotide
ggcuccacgguaauaggcg

SEQ ID NO: 2317076 - RNA, 19 nt, Artificial Sequence
  Description of Artificial Sequence: Synthetic oligonucleotide
ccucuugcccucuauuucc

SEQ ID NO: 2317077 - RNA, 19 nt, Artificial Sequence
  Description of Artificial Sequence: Synthetic oligonucleotide
agccuccagguucagggug

SEQ ID NO: 2317078 - RNA, 19 nt, Artificial Sequence
  Description of Artificial Sequence: Synthetic oligonucleotide
cacaguucggaucuugaaa

SEQ ID NO: 2317079 - RNA, 19 nt, Artificial Sequence
  Description of Artificial Sequence: Synthetic oligonucleotide
auaaugcccauggcuccac

SEQ ID NO: 2317080 - RNA, 19 nt, Artificial Sequence
  Description of Artificial Sequence: Synthetic oligonucleotide
ugguuccccgaucuccggc

SEQ ID NO: 2317081 - RNA, 19 nt, Artificial Sequence
  Description of Artificial Sequence: Synthetic oligonucleotide
auccucuugcccucuauuu

SEQ ID NO: 2317082 - RNA, 19 nt, Artificial Sequence
  Description of Artificial Sequence: Synthetic oligonucleotide
gauuccuuccccuuccuuu

SEQ ID NO: 2317083 - RNA, 19 nt, Artificial Sequence
  Description of Artificial Sequence: Synthetic oligonucleotide
agcaguucaucuaccccuc

SEQ ID NO: 2317084 - RNA, 19 nt, Artificial Sequence
  Description of Artificial Sequence: Synthetic oligonucleotide
ggaggggucgggaaaagcc

SEQ ID NO: 2317085 - RNA, 19 nt, Artificial Sequence
  Description of Artificial Sequence: Synthetic oligonucleotide
gauaaugcccauggcucca

SEQ ID NO: 2317086 - RNA, 19 nt, Artificial Sequence
  Description of Artificial Sequence: Synthetic oligonucleotide
aaguguuguugaaguuguc

SEQ ID NO: 2317087 - RNA, 19 nt, Artificial Sequence
  Description of Artificial Sequence: Synthetic oligonucleotide
ugguguucuucuugucaga

SEQ ID NO: 2317088 - RNA, 19 nt, Artificial Sequence
  Description of Artificial Sequence: Synthetic oligonucleotide
cacccuugauuccuucccc

SEQ ID NO: 2317089 - RNA, 19 nt, Artificial Sequence
  Description of Artificial Sequence: Synthetic oligonucleotide
ucuugucagauggcuucag

SEQ ID NO: 2317090 - RNA, 19 nt, Artificial Sequence
  Description of Artificial Sequence: Synthetic oligonucleotide
ccccuuucaacguucacac

SEQ ID NO: 2317091 - RNA, 19 nt, Artificial Sequence
  Description of Artificial Sequence: Synthetic oligonucleotide
guuugauccucuugcccuc

SEQ ID NO: 2317092 - RNA, 19 nt, Artificial Sequence
  Description of Artificial Sequence: Synthetic oligonucleotide
caaagcgaauaaucagaca

SEQ ID NO: 2317093 - RNA, 19 nt, Artificial Sequence
  Description of Artificial Sequence: Synthetic oligonucleotide
cacaaggaauguccuucag

SEQ ID NO: 2317094 - RNA, 19 nt, Artificial Sequence
  Description of Artificial Sequence: Synthetic oligonucleotide
uugauuccuuccccuuccu

SEQ ID NO: 2317095 - RNA, 19 nt, Artificial Sequence
  Description of Artificial Sequence: Synthetic oligonucleotide
cuugcccucuauuuccaca

SEQ ID NO: 2317096 - RNA, 19 nt, Artificial Sequence
  Description of Artificial Sequence: Synthetic oligonucleotide
gcaaagcgaauaaucagac

SEQ ID NO: 2317097 - RNA, 19 nt, Artificial Sequence
  Description of Artificial Sequence: Synthetic oligonucleotide
cucucgagccagcuuauca

SEQ ID NO: 2317098 - RNA, 19 nt, Artificial Sequence
  Description of Artificial Sequence: Synthetic oligonucleotide
aucuccggccuccugacuu

SEQ ID NO: 2317099 - RNA, 19 nt, Artificial Sequence
  Description of Artificial Sequence: Synthetic oligonucleotide
gaauauucucgaacgauuu

SEQ ID NO: 2317100 - RNA, 19 nt, Artificial Sequence
  Description of Artificial Sequence: Synthetic oligonucleotide
cuuggccuccaugucacac

SEQ ID NO: 2317101 - RNA, 19 nt, Artificial Sequence
  Description of Artificial Sequence: Synthetic oligonucleotide
ucguaggcuuuggccaugg

SEQ ID NO: 2317102 - RNA, 19 nt, Artificial Sequence
  Description of Artificial Sequence: Synthetic oligonucleotide
agggagcacuuguuggugu

SEQ ID NO: 2317103 - RNA, 19 nt, Artificial Sequence
  Description of Artificial Sequence: Synthetic oligonucleotide
uccucagcccaacucccuc

SEQ ID NO: 2317104 - RNA, 19 nt, Artificial Sequence
  Description of Artificial Sequence: Synthetic oligonucleotide
uucuccuuaucagcaguuc

SEQ ID NO: 2317105 - RNA, 19 nt, Artificial Sequence
  Description of Artificial Sequence: Synthetic oligonucleotide
auccaguucugaauauucu

SEQ ID NO: 2317106 - RNA, 19 nt, Artificial Sequence
  Description of Artificial Sequence: Synthetic oligonucleotide
aggcgcuccaccccagcag

SEQ ID NO: 2317107 - RNA, 19 nt, Artificial Sequence
  Description of Artificial Sequence: Synthetic oligonucleotide
ucacgggccagggaauuga

SEQ ID NO: 2317108 - RNA, 19 nt, Artificial Sequence
  Description of Artificial Sequence: Synthetic oligonucleotide
gcuccacgguaauaggcgg

SEQ ID NO: 2317109 - RNA, 19 nt, Artificial Sequence
  Description of Artificial Sequence: Synthetic oligonucleotide
gaagagguggucguaggcu

SEQ ID NO: 2317110 - RNA, 19 nt, Artificial Sequence
  Description of Artificial Sequence: Synthetic oligonucleotide
uccucuuggccuccauguc

SEQ ID NO: 2317111 - RNA, 19 nt, Artificial Sequence
  Description of Artificial Sequence: Synthetic oligonucleotide
aaaccccuuucaacguuca

SEQ ID NO: 2317112 - RNA, 19 nt, Artificial Sequence
  Description of Artificial Sequence: Synthetic oligonucleotide
uuucaacguucacacccuu

SEQ ID NO: 2317113 - RNA, 19 nt, Artificial Sequence
  Description of Artificial Sequence: Synthetic oligonucleotide
ggccauggcggacacuggg

SEQ ID NO: 2317114 - RNA, 19 nt, Artificial Sequence
  Description of Artificial Sequence: Synthetic oligonucleotide
cagcaguucaucuaccccu

SEQ ID NO: 2317115 - RNA, 19 nt, Artificial Sequence
  Description of Artificial Sequence: Synthetic oligonucleotide
agcuuaucagccuguucuu

SEQ ID NO: 2317116 - RNA, 19 nt, Artificial Sequence
  Description of Artificial Sequence: Synthetic oligonucleotide
cucagcccaacucccucag

SEQ ID NO: 2317117 - RNA, 19 nt, Artificial Sequence
  Description of Artificial Sequence: Synthetic oligonucleotide
gaggggucgggaaaagcca

SEQ ID NO: 2317118 - RNA, 19 nt, Artificial Sequence
  Description of Artificial Sequence: Synthetic oligonucleotide
cacauucauacuggauuug

SEQ ID NO: 2317119 - RNA, 19 nt, Artificial Sequence
  Description of Artificial Sequence: Synthetic oligonucleotide
ucuugcccucuauuuccac

SEQ ID NO: 2317120 - RNA, 19 nt, Artificial Sequence
  Description of Artificial Sequence: Synthetic oligonucleotide
caccaguuucuccccagug

SEQ ID NO: 2317121 - RNA, 19 nt, Artificial Sequence
  Description of Artificial Sequence: Synthetic oligonucleotide
cuucucaaaccccuuucaa

SEQ ID NO: 2317122 - RNA, 19 nt, Artificial Sequence
  Description of Artificial Sequence: Synthetic oligonucleotide
guuucuccccaguguaauc

SEQ ID NO: 2317123 - RNA, 19 nt, Artificial Sequence
  Description of Artificial Sequence: Synthetic oligonucleotide
ggauuccaugcucucgagc

SEQ ID NO: 2317124 - RNA, 19 nt, Artificial Sequence
  Description of Artificial Sequence: Synthetic oligonucleotide
cgggccagggaauugaaag

SEQ ID NO: 2317125 - RNA, 19 nt, Artificial Sequence
  Description of Artificial Sequence: Synthetic oligonucleotide
ccgaugguggagauguaag

SEQ ID NO: 2317126 - RNA, 19 nt, Artificial Sequence
  Description of Artificial Sequence: Synthetic oligonucleotide
uggccuccaugucacacuu

SEQ ID NO: 2317127 - RNA, 19 nt, Artificial Sequence
  Description of Artificial Sequence: Synthetic oligonucleotide
uuugauccucuugcccucu

SEQ ID NO: 2317128 - RNA, 19 nt, Artificial Sequence
  Description of Artificial Sequence: Synthetic oligonucleotide
gaauguccuucagcccagg

SEQ ID NO: 2317129 - RNA, 19 nt, Artificial Sequence
  Description of Artificial Sequence: Synthetic oligonucleotide
aggcauucucuuugaugcu

SEQ ID NO: 2317130 - RNA, 19 nt, Artificial Sequence
  Description of Artificial Sequence: Synthetic oligonucleotide
ggaggguuugcugugguuc

SEQ ID NO: 2317131 - RNA, 19 nt, Artificial Sequence
  Description of Artificial Sequence: Synthetic oligonucleotide
cagccuguucuuucagcac

SEQ ID NO: 2317132 - RNA, 19 nt, Artificial Sequence
  Description of Artificial Sequence: Synthetic oligonucleotide
ugauuccuuccccuuccuu

SEQ ID NO: 2317133 - RNA, 19 nt, Artificial Sequence
  Description of Artificial Sequence: Synthetic oligonucleotide
ggaucgggagggcuggcag

SEQ ID NO: 2317134 - RNA, 19 nt, Artificial Sequence
  Description of Artificial Sequence: Synthetic oligonucleotide
uucacacccuugauuccuu

SEQ ID NO: 2317135 - RNA, 19 nt, Artificial Sequence
  Description of Artificial Sequence: Synthetic oligonucleotide
gaaggcgcuccaccccagc

SEQ ID NO: 2317136 - RNA, 19 nt, Artificial Sequence
  Description of Artificial Sequence: Synthetic oligonucleotide
ccaguguaauccucagccc

SEQ ID NO: 2317137 - RNA, 19 nt, Artificial Sequence
  Description of Artificial Sequence: Synthetic oligonucleotide
cuuucaacguucacacccu

SEQ ID NO: 2317138 - RNA, 19 nt, Artificial Sequence
  Description of Artificial Sequence: Synthetic oligonucleotide
uguccucugcaaagcgaau

SEQ ID NO: 2317139 - RNA, 19 nt, Artificial Sequence
  Description of Artificial Sequence: Synthetic oligonucleotide
uccacgguaauaggcggua

SEQ ID NO: 2317140 - RNA, 19 nt, Artificial Sequence
  Description of Artificial Sequence: Synthetic oligonucleotide
guuauugucuugaaucguu

SEQ ID NO: 2317141 - RNA, 19 nt, Artificial Sequence
  Description of Artificial Sequence: Synthetic oligonucleotide
uccaccccagcagaggcau

SEQ ID NO: 2317142 - RNA, 19 nt, Artificial Sequence
  Description of Artificial Sequence: Synthetic oligonucleotide
gccacaaggaauguccuuc

SEQ ID NO: 2317143 - RNA, 19 nt, Artificial Sequence
  Description of Artificial Sequence: Synthetic oligonucleotide
cuccccaguguaauccuca

SEQ ID NO: 2317144 - RNA, 19 nt, Artificial Sequence
  Description of Artificial Sequence: Synthetic oligonucleotide
gagguggucguaggcuuug

SEQ ID NO: 2317145 - RNA, 19 nt, Artificial Sequence
  Description of Artificial Sequence: Synthetic oligonucleotide
uagccuccagguucagggu

SEQ ID NO: 2317146 - RNA, 19 nt, Artificial Sequence
  Description of Artificial Sequence: Synthetic oligonucleotide
uuccccucauucuccuuau

SEQ ID NO: 2317147 - RNA, 19 nt, Artificial Sequence
  Description of Artificial Sequence: Synthetic oligonucleotide
auacuaggauaaugcccau

SEQ ID NO: 2317148 - RNA, 19 nt, Artificial Sequence
  Description of Artificial Sequence: Synthetic oligonucleotide
gaauaaucagacaggucuu

SEQ ID NO: 2317149 - RNA, 19 nt, Artificial Sequence
  Description of Artificial Sequence: Synthetic oligonucleotide
acuugcaguuugauccucu

SEQ ID NO: 2317150 - RNA, 19 nt, Artificial Sequence
  Description of Artificial Sequence: Synthetic oligonucleotide
cuaccccucuaguucccac

SEQ ID NO: 2317151 - RNA, 19 nt, Artificial Sequence
  Description of Artificial Sequence: Synthetic oligonucleotide
ugcccucuauuuccacagu

SEQ ID NO: 2317152 - RNA, 19 nt, Artificial Sequence
  Description of Artificial Sequence: Synthetic oligonucleotide
agaugucacgggccaggga

SEQ ID NO: 2317153 - RNA, 19 nt, Artificial Sequence
  Description of Artificial Sequence: Synthetic oligonucleotide
cuaguucccaccaguuucu

SEQ ID NO: 2317154 - RNA, 19 nt, Artificial Sequence
  Description of Artificial Sequence: Synthetic oligonucleotide
guggagauguaaguguugu

SEQ ID NO: 2317155 - RNA, 19 nt, Artificial Sequence
  Description of Artificial Sequence: Synthetic oligonucleotide
ggaaaagccaacacuggua

SEQ ID NO: 2317156 - RNA, 19 nt, Artificial Sequence
  Description of Artificial Sequence: Synthetic oligonucleotide
gucagugcuggaggguuug

SEQ ID NO: 2317157 - RNA, 19 nt, Artificial Sequence
  Description of Artificial Sequence: Synthetic oligonucleotide
cccucuauuuccacaguuc

SEQ ID NO: 2317158 - RNA, 19 nt, Artificial Sequence
  Description of Artificial Sequence: Synthetic oligonucleotide
aggcgguaguuauugucuu

SEQ ID NO: 2317159 - RNA, 19 nt, Artificial Sequence
  Description of Artificial Sequence: Synthetic oligonucleotide
ugcucucgagccagcuuau

SEQ ID NO: 2317160 - RNA, 19 nt, Artificial Sequence
  Description of Artificial Sequence: Synthetic oligonucleotide
ggcgguaguuauugucuug

SEQ ID NO: 2317161 - RNA, 19 nt, Artificial Sequence
  Description of Artificial Sequence: Synthetic oligonucleotide
cugaauauucucgaacgau

SEQ ID NO: 2317162 - RNA, 19 nt, Artificial Sequence
  Description of Artificial Sequence: Synthetic oligonucleotide
guuccccagcagaaggcgc

SEQ ID NO: 2317163 - RNA, 19 nt, Artificial Sequence
  Description of Artificial Sequence: Synthetic oligonucleotide
ugaaagccucauccacauu

SEQ ID NO: 2317164 - RNA, 19 nt, Artificial Sequence
  Description of Artificial Sequence: Synthetic oligonucleotide
cagaaggcgcuccacccca

SEQ ID NO: 2317165 - RNA, 19 nt, Artificial Sequence
  Description of Artificial Sequence: Synthetic oligonucleotide
gcagaaggcgcuccacccc

SEQ ID NO: 2317166 - RNA, 19 nt, Artificial Sequence
  Description of Artificial Sequence: Synthetic oligonucleotide
guucaucuaccccucuagu

SEQ ID NO: 2317167 - RNA, 19 nt, Artificial Sequence
  Description of Artificial Sequence: Synthetic oligonucleotide
cagggagcacuuguuggug

SEQ ID NO: 2317168 - RNA, 19 nt, Artificial Sequence
  Description of Artificial Sequence: Synthetic oligonucleotide
gguggucguaggcuuuggc

SEQ ID NO: 2317169 - RNA, 19 nt, Artificial Sequence
  Description of Artificial Sequence: Synthetic oligonucleotide
gguggagauguaaguguug

SEQ ID NO: 2317170 - RNA, 19 nt, Artificial Sequence
  Description of Artificial Sequence: Synthetic oligonucleotide
cugguaggcgggaucggga

SEQ ID NO: 2317171 - RNA, 19 nt, Artificial Sequence
  Description of Artificial Sequence: Synthetic oligonucleotide
auucuccuuaucagcaguu

SEQ ID NO: 2317172 - RNA, 19 nt, Artificial Sequence
  Description of Artificial Sequence: Synthetic oligonucleotide
cucgaacgauuucucaucu

SEQ ID NO: 2317173 - RNA, 19 nt, Artificial Sequence
  Description of Artificial Sequence: Synthetic oligonucleotide
uugcugugguuccccgauc

SEQ ID NO: 2317174 - RNA, 19 nt, Artificial Sequence
  Description of Artificial Sequence: Synthetic oligonucleotide
guucacacccuugauuccu

SEQ ID NO: 2317175 - RNA, 19 nt, Artificial Sequence
  Description of Artificial Sequence: Synthetic oligonucleotide
guucagggugaggaggcca

SEQ ID NO: 2317176 - RNA, 19 nt, Artificial Sequence
  Description of Artificial Sequence: Synthetic oligonucleotide
cuccuuaucagcaguucau

SEQ ID NO: 2317177 - RNA, 19 nt, Artificial Sequence
  Description of Artificial Sequence: Synthetic oligonucleotide
gggaaaagccaacacuggu

SEQ ID NO: 2317178 - RNA, 19 nt, Artificial Sequence
  Description of Artificial Sequence: Synthetic oligonucleotide
ucuuggccuccaugucaca

SEQ ID NO: 2317179 - RNA, 19 nt, Artificial Sequence
  Description of Artificial Sequence: Synthetic oligonucleotide
uccggccuccugacuugag

SEQ ID NO: 2317180 - RNA, 19 nt, Artificial Sequence
  Description of Artificial Sequence: Synthetic oligonucleotide
cucaaaccccuuucaacgu

SEQ ID NO: 2317181 - RNA, 19 nt, Artificial Sequence
  Description of Artificial Sequence: Synthetic oligonucleotide
guguaauccucagcccaac

SEQ ID NO: 2317182 - RNA, 19 nt, Artificial Sequence
  Description of Artificial Sequence: Synthetic oligonucleotide
gacuugcaguuugauccuc

SEQ ID NO: 2317183 - RNA, 19 nt, Artificial Sequence
  Description of Artificial Sequence: Synthetic oligonucleotide
uggaggguuugcugugguu

SEQ ID NO: 2317184 - RNA, 19 nt, Artificial Sequence
  Description of Artificial Sequence: Synthetic oligonucleotide
gcgguaguuauugucuuga

SEQ ID NO: 2317185 - RNA, 19 nt, Artificial Sequence
  Description of Artificial Sequence: Synthetic oligonucleotide
uugauccucuugcccucua

SEQ ID NO: 2317186 - RNA, 19 nt, Artificial Sequence
  Description of Artificial Sequence: Synthetic oligonucleotide
agguggucguaggcuuugg

SEQ ID NO: 2317187 - RNA, 19 nt, Artificial Sequence
  Description of Artificial Sequence: Synthetic oligonucleotide
guccucugcaaagcgaaua

SEQ ID NO: 2317188 - RNA, 19 nt, Artificial Sequence
  Description of Artificial Sequence: Synthetic oligonucleotide
ugucacgggccagggaauu

SEQ ID NO: 2317189 - RNA, 19 nt, Artificial Sequence
  Description of Artificial Sequence: Synthetic oligonucleotide
gccauggcggacacugggg

SEQ ID NO: 2317190 - RNA, 19 nt, Artificial Sequence
  Description of Artificial Sequence: Synthetic oligonucleotide
caguuucuccccaguguaa

SEQ ID NO: 2317191 - RNA, 19 nt, Artificial Sequence
  Description of Artificial Sequence: Synthetic oligonucleotide
gccuccugacuugagcaag

SEQ ID NO: 2317192 - RNA, 19 nt, Artificial Sequence
  Description of Artificial Sequence: Synthetic oligonucleotide
cagcccaacucccucaggu

SEQ ID NO: 2317193 - RNA, 19 nt, Artificial Sequence
  Description of Artificial Sequence: Synthetic oligonucleotide
gcagaggcauucucuuuga

SEQ ID NO: 2317194 - RNA, 19 nt, Artificial Sequence
  Description of Artificial Sequence: Synthetic oligonucleotide
gcccagggagcacuuguug

SEQ ID NO: 2317195 - RNA, 19 nt, Artificial Sequence
  Description of Artificial Sequence: Synthetic oligonucleotide
gucacgggccagggaauug

SEQ ID NO: 2317196 - RNA, 19 nt, Artificial Sequence
  Description of Artificial Sequence: Synthetic oligonucleotide
cacugguaggcgggaucgg

SEQ ID NO: 2317197 - RNA, 19 nt, Artificial Sequence
  Description of Artificial Sequence: Synthetic oligonucleotide
auacuggauuuggcacuug

SEQ ID NO: 2317198 - RNA, 19 nt, Artificial Sequence
  Description of Artificial Sequence: Synthetic oligonucleotide
gcagcaacuugaagaggug

SEQ ID NO: 2317199 - RNA, 19 nt, Artificial Sequence
  Description of Artificial Sequence: Synthetic oligonucleotide
aggggucgggaaaagccaa

SEQ ID NO: 2317200 - RNA, 19 nt, Artificial Sequence
  Description of Artificial Sequence: Synthetic oligonucleotide
uaguucccaccaguuucuc

SEQ ID NO: 2317201 - RNA, 19 nt, Artificial Sequence
  Description of Artificial Sequence: Synthetic oligonucleotide
caguucaucuaccccucua

SEQ ID NO: 2317202 - RNA, 19 nt, Artificial Sequence
  Description of Artificial Sequence: Synthetic oligonucleotide
cacgguaauaggcgguagu

SEQ ID NO: 2317203 - RNA, 19 nt, Artificial Sequence
  Description of Artificial Sequence: Synthetic oligonucleotide
cagcugugucccagacuug

SEQ ID NO: 2317204 - RNA, 19 nt, Artificial Sequence
  Description of Artificial Sequence: Synthetic oligonucleotide
ccucuuggccuccauguca

SEQ ID NO: 2317205 - RNA, 19 nt, Artificial Sequence
  Description of Artificial Sequence: Synthetic oligonucleotide
agaaggcgcuccaccccag

SEQ ID NO: 2317206 - RNA, 19 nt, Artificial Sequence
  Description of Artificial Sequence: Synthetic oligonucleotide
ggcgcuccaccccagcaga

SEQ ID NO: 2317207 - RNA, 19 nt, Artificial Sequence
  Description of Artificial Sequence: Synthetic oligonucleotide
ggucuagccuccagguuca

SEQ ID NO: 2317208 - RNA, 19 nt, Artificial Sequence
  Description of Artificial Sequence: Synthetic oligonucleotide
ccaguuucuccccagugua

SEQ ID NO: 2317209 - RNA, 19 nt, Artificial Sequence
  Description of Artificial Sequence: Synthetic oligonucleotide
cguucacacccuugauucc

SEQ ID NO: 2317210 - RNA, 19 nt, Artificial Sequence
  Description of Artificial Sequence: Synthetic oligonucleotide
ccuuaucagcaguucaucu

SEQ ID NO: 2317211 - RNA, 19 nt, Artificial Sequence
  Description of Artificial Sequence: Synthetic oligonucleotide
uuccgaugguggagaugua

SEQ ID NO: 2317212 - RNA, 19 nt, Artificial Sequence
  Description of Artificial Sequence: Synthetic oligonucleotide
gcaagaugucacgggccag

SEQ ID NO: 2317213 - RNA, 19 nt, Artificial Sequence
  Description of Artificial Sequence: Synthetic oligonucleotide
gucguaggcuuuggccaug

SEQ ID NO: 2317214 - RNA, 19 nt, Artificial Sequence
  Description of Artificial Sequence: Synthetic oligonucleotide
gcgaauaaucagacagguc

SEQ ID NO: 2317215 - RNA, 19 nt, Artificial Sequence
  Description of Artificial Sequence: Synthetic oligonucleotide
cccuuucaacguucacacc

SEQ ID NO: 2317216 - RNA, 19 nt, Artificial Sequence
  Description of Artificial Sequence: Synthetic oligonucleotide
cuccaccccagcagaggca

SEQ ID NO: 2317217 - RNA, 19 nt, Artificial Sequence
  Description of Artificial Sequence: Synthetic oligonucleotide
ccggccuccugacuugagc

SEQ ID NO: 2317218 - RNA, 19 nt, Artificial Sequence
  Description of Artificial Sequence: Synthetic oligonucleotide
ccacaaggaauguccuuca

SEQ ID NO: 2317219 - RNA, 19 nt, Artificial Sequence
  Description of Artificial Sequence: Synthetic oligonucleotide
cgaacgauuucucaucugu

SEQ ID NO: 2317220 - RNA, 19 nt, Artificial Sequence
  Description of Artificial Sequence: Synthetic oligonucleotide
gcuuuggccauggcggaca

SEQ ID NO: 2317221 - RNA, 19 nt, Artificial Sequence
  Description of Artificial Sequence: Synthetic oligonucleotide
gguucagggugaggaggcc

SEQ ID NO: 2317222 - RNA, 19 nt, Artificial Sequence
  Description of Artificial Sequence: Synthetic oligonucleotide
ccagcuuaucagccuguuc

SEQ ID NO: 2317223 - RNA, 19 nt, Artificial Sequence
  Description of Artificial Sequence: Synthetic oligonucleotide
ggcgggaucgggagggcug

SEQ ID NO: 2317224 - RNA, 19 nt, Artificial Sequence
  Description of Artificial Sequence: Synthetic oligonucleotide
agagguggucguaggcuuu

SEQ ID NO: 2317225 - RNA, 19 nt, Artificial Sequence
  Description of Artificial Sequence: Synthetic oligonucleotide
ccccaguguaauccucagc

SEQ ID NO: 2317226 - RNA, 19 nt, Artificial Sequence
  Description of Artificial Sequence: Synthetic oligonucleotide
gcccaacucccucaggucu

SEQ ID NO: 2317227 - RNA, 19 nt, Artificial Sequence
  Description of Artificial Sequence: Synthetic oligonucleotide
gcgggaucgggagggcugg

SEQ ID NO: 2317228 - RNA, 19 nt, Artificial Sequence
  Description of Artificial Sequence: Synthetic oligonucleotide
augucacgggccagggaau

SEQ ID NO: 2317229 - RNA, 19 nt, Artificial Sequence
  Description of Artificial Sequence: Synthetic oligonucleotide
cuccacgguaauaggcggu

SEQ ID NO: 2317230 - RNA, 19 nt, Artificial Sequence
  Description of Artificial Sequence: Synthetic oligonucleotide
cucuaguucccaccaguuu

SEQ ID NO: 2317231 - RNA, 19 nt, Artificial Sequence
  Description of Artificial Sequence: Synthetic oligonucleotide
gcuuuucauccaguucuga

SEQ ID NO: 2317232 - RNA, 19 nt, Artificial Sequence
  Description of Artificial Sequence: Synthetic oligonucleotide
ggagcacuuguugguguuc

SEQ ID NO: 2317233 - RNA, 19 nt, Artificial Sequence
  Description of Artificial Sequence: Synthetic oligonucleotide
cauacuggauuuggcacuu

SEQ ID NO: 2317234 - RNA, 19 nt, Artificial Sequence
  Description of Artificial Sequence: Synthetic oligonucleotide
caacucccucaggucuagc

SEQ ID NO: 2317235 - RNA, 19 nt, Artificial Sequence
  Description of Artificial Sequence: Synthetic oligonucleotide
ccacauucauacuggauuu

SEQ ID NO: 2317236 - RNA, 19 nt, Artificial Sequence
  Description of Artificial Sequence: Synthetic oligonucleotide
ggccagcugugucccagac

SEQ ID NO: 2317237 - RNA, 19 nt, Artificial Sequence
  Description of Artificial Sequence: Synthetic oligonucleotide
cuucagcccagggagcacu

SEQ ID NO: 2317238 - RNA, 19 nt, Artificial Sequence
  Description of Artificial Sequence: Synthetic oligonucleotide
ccgaucuccggccuccuga

SEQ ID NO: 2317239 - RNA, 19 nt, Artificial Sequence
  Description of Artificial Sequence: Synthetic oligonucleotide
uuuccacaguucggaucuu

SEQ ID NO: 2317240 - RNA, 19 nt, Artificial Sequence
  Description of Artificial Sequence: Synthetic oligonucleotide
gaucuccggccuccugacu

SEQ ID NO: 2317241 - RNA, 19 nt, Artificial Sequence
  Description of Artificial Sequence: Synthetic oligonucleotide
ucgggagggcuggcaggca

SEQ ID NO: 2317242 - RNA, 19 nt, Artificial Sequence
  Description of Artificial Sequence: Synthetic oligonucleotide
cacgggccagggaauugaa

SEQ ID NO: 2317243 - RNA, 19 nt, Artificial Sequence
  Description of Artificial Sequence: Synthetic oligonucleotide
aggcgggaucgggagggcu

SEQ ID NO: 2317244 - RNA, 19 nt, Artificial Sequence
  Description of Artificial Sequence: Synthetic oligonucleotide
cgaucuccggccuccugac

SEQ ID NO: 2317245 - RNA, 19 nt, Artificial Sequence
  Description of Artificial Sequence: Synthetic oligonucleotide
acgggccagggaauugaaa

SEQ ID NO: 2317246 - RNA, 19 nt, Artificial Sequence
  Description of Artificial Sequence: Synthetic oligonucleotide
ggccuccugacuugagcaa

SEQ ID NO: 2317247 - RNA, 19 nt, Artificial Sequence
  Description of Artificial Sequence: Synthetic oligonucleotide
ccaacucccucaggucuag

SEQ ID NO: 2317248 - RNA, 19 nt, Artificial Sequence
  Description of Artificial Sequence: Synthetic oligonucleotide
ggucguaggcuuuggccau

SEQ ID NO: 2317249 - RNA, 19 nt, Artificial Sequence
  Description of Artificial Sequence: Synthetic oligonucleotide
ccucagcccaacucccuca

SEQ ID NO: 2317250 - RNA, 19 nt, Artificial Sequence
  Description of Artificial Sequence: Synthetic oligonucleotide
caacguucacacccuugau

SEQ ID NO: 2317251 - RNA, 19 nt, Artificial Sequence
  Description of Artificial Sequence: Synthetic oligonucleotide
gucuagccuccagguucag

SEQ ID NO: 2317252 - RNA, 19 nt, Artificial Sequence
  Description of Artificial Sequence: Synthetic oligonucleotide
ggggucgggaaaagccaac

SEQ ID NO: 2317253 - RNA, 19 nt, Artificial Sequence
  Description of Artificial Sequence: Synthetic oligonucleotide
ccacgguaauaggcgguag

SEQ ID NO: 2317254 - RNA, 19 nt, Artificial Sequence
  Description of Artificial Sequence: Synthetic oligonucleotide
cggauuccaugcucucgag

SEQ ID NO: 2317255 - RNA, 19 nt, Artificial Sequence
  Description of Artificial Sequence: Synthetic oligonucleotide
ccagggagcacuuguuggu

SEQ ID NO: 2317256 - RNA, 19 nt, Artificial Sequence
  Description of Artificial Sequence: Synthetic oligonucleotide
cggccuccugacuugagca

SEQ ID NO: 2317257 - RNA, 19 nt, Artificial Sequence
  Description of Artificial Sequence: Synthetic oligonucleotide
ccagcagaaggcgcuccac

SEQ ID NO: 2317258 - RNA, 19 nt, Artificial Sequence
  Description of Artificial Sequence: Synthetic oligonucleotide
ccccucuaguucccaccag

SEQ ID NO: 2317259 - RNA, 19 nt, Artificial Sequence
  Description of Artificial Sequence: Synthetic oligonucleotide
gcccucuauuuccacaguu

SEQ ID NO: 2317260 - RNA, 19 nt, Artificial Sequence
  Description of Artificial Sequence: Synthetic oligonucleotide
gggaucgggagggcuggca

SEQ ID NO: 2317261 - RNA, 19 nt, Artificial Sequence
  Description of Artificial Sequence: Synthetic oligonucleotide
gccagggaauugaaagccu

SEQ ID NO: 2317262 - RNA, 19 nt, Artificial Sequence
  Description of Artificial Sequence: Synthetic oligonucleotide
gagggcuggcaggcagaaa

SEQ ID NO: 2317263 - RNA, 19 nt, Artificial Sequence
  Description of Artificial Sequence: Synthetic oligonucleotide
caggucuagccuccagguu

SEQ ID NO: 2317264 - RNA, 19 nt, Artificial Sequence
  Description of Artificial Sequence: Synthetic oligonucleotide
cccaacucccucaggucua

SEQ ID NO: 2317265 - RNA, 19 nt, Artificial Sequence
  Description of Artificial Sequence: Synthetic oligonucleotide
cuccggccuccugacuuga

SEQ ID NO: 2317266 - RNA, 19 nt, Artificial Sequence
  Description of Artificial Sequence: Synthetic oligonucleotide
ccaacacugguaggcggga

SEQ ID NO: 2317267 - RNA, 19 nt, Artificial Sequence
  Description of Artificial Sequence: Synthetic oligonucleotide
gcaguucaucuaccccucu

SEQ ID NO: 2317268 - RNA, 19 nt, Artificial Sequence
  Description of Artificial Sequence: Synthetic oligonucleotide
gcuuaucagccuguucuuu

SEQ ID NO: 2317269 - RNA, 19 nt, Artificial Sequence
  Description of Artificial Sequence: Synthetic oligonucleotide
cuccugacuugagcaagau

SEQ ID NO: 2317270 - RNA, 19 nt, Artificial Sequence
  Description of Artificial Sequence: Synthetic oligonucleotide
gcgcuccaccccagcagag

SEQ ID NO: 2317271 - RNA, 19 nt, Artificial Sequence
  Description of Artificial Sequence: Synthetic oligonucleotide
ccucuaguucccaccaguu

SEQ ID NO: 2317272 - RNA, 19 nt, Artificial Sequence
  Description of Artificial Sequence: Synthetic oligonucleotide
gcucucgagccagcuuauc

SEQ ID NO: 2317273 - RNA, 19 nt, Artificial Sequence
  Description of Artificial Sequence: Synthetic oligonucleotide
cccgaucuccggccuccug

SEQ ID NO: 2317274 - RNA, 19 nt, Artificial Sequence
  Description of Artificial Sequence: Synthetic oligonucleotide
cgguaguuauugucuugaa

SEQ ID NO: 2317275 - RNA, 19 nt, Artificial Sequence
  Description of Artificial Sequence: Synthetic oligonucleotide
caacacugguaggcgggau

SEQ ID NO: 2317276 - RNA, 19 nt, Artificial Sequence
  Description of Artificial Sequence: Synthetic oligonucleotide
cccuugauuccuuccccuu

SEQ ID NO: 2317277 - RNA, 19 nt, Artificial Sequence
  Description of Artificial Sequence: Synthetic oligonucleotide
ccauggcuccacgguaaua

SEQ ID NO: 2317278 - RNA, 19 nt, Artificial Sequence
  Description of Artificial Sequence: Synthetic oligonucleotide
cgggaucgggagggcuggc

SEQ ID NO: 2317279 - RNA, 19 nt, Artificial Sequence
  Description of Artificial Sequence: Synthetic oligonucleotide
ccccuuccuuuucccugcu

SEQ ID NO: 2317280 - RNA, 19 nt, Artificial Sequence
  Description of Artificial Sequence: Synthetic oligonucleotide
augaaauucaaccucaugg

SEQ ID NO: 2317281 - RNA, 19 nt, Artificial Sequence
  Description of Artificial Sequence: Synthetic oligonucleotide
auuugaucccaucaaaucc

SEQ ID NO: 2317282 - RNA, 19 nt, Artificial Sequence
  Description of Artificial Sequence: Synthetic oligonucleotide
uuuauugaagguuuggucc

SEQ ID NO: 2317283 - RNA, 19 nt, Artificial Sequence
  Description of Artificial Sequence: Synthetic oligonucleotide
aagcaaagguuucaggucc

SEQ ID NO: 2317284 - RNA, 19 nt, Artificial Sequence
  Description of Artificial Sequence: Synthetic oligonucleotide
uuuuguuuuguuuuguuug

SEQ ID NO: 2317285 - RNA, 19 nt, Artificial Sequence
  Description of Artificial Sequence: Synthetic oligonucleotide
ugggcuuucauaauguggg

SEQ ID NO: 2317286 - RNA, 19 nt, Artificial Sequence
  Description of Artificial Sequence: Synthetic oligonucleotide
  modified_base (16)..(16): a, c, u, g, unknown or other
aacucucuggguuggnacc

SEQ ID NO: 2317287 - RNA, 19 nt, Artificial Sequence
  Description of Artificial Sequence: Synthetic oligonucleotide
ucgaacagggccaaaaggg

SEQ ID NO: 2317288 - RNA, 19 nt, Artificial Sequence
  Description of Artificial Sequence: Synthetic oligonucleotide
auuuauugaagguuugguc

SEQ ID NO: 2317289 - RNA, 19 nt, Artificial Sequence
  Description of Artificial Sequence: Synthetic oligonucleotide
aagacaagugaauggcccc

SEQ ID NO: 2317290 - RNA, 19 nt, Artificial Sequence
  Description of Artificial Sequence: Synthetic oligonucleotide
uaaagcaaagguuucaggu

SEQ ID NO: 2317291 - RNA, 19 nt, Artificial Sequence
  Description of Artificial Sequence: Synthetic oligonucleotide
aagaacucgaagcccaggg

SEQ ID NO: 2317292 - RNA, 19 nt, Artificial Sequence
  Description of Artificial Sequence: Synthetic oligonucleotide
uuugaucccaucaaauccc

SEQ ID NO: 2317293 - RNA, 19 nt, Artificial Sequence
  Description of Artificial Sequence: Synthetic oligonucleotide
cugagaaucgaacagggcc

SEQ ID NO: 2317294 - RNA, 19 nt, Artificial Sequence
  Description of Artificial Sequence: Synthetic oligonucleotide
aguaguaagucucucccgg

SEQ ID NO: 2317295 - RNA, 19 nt, Artificial Sequence
  Description of Artificial Sequence: Synthetic oligonucleotide
aauacaaaccagcaugaaa

SEQ ID NO: 2317296 - RNA, 19 nt, Artificial Sequence
  Description of Artificial Sequence: Synthetic oligonucleotide
ucuagguaaucguugaggc

SEQ ID NO: 2317297 - RNA, 19 nt, Artificial Sequence
  Description of Artificial Sequence: Synthetic oligonucleotide
gaagaugucuagguaaucg

SEQ ID NO: 2317298 - RNA, 19 nt, Artificial Sequence
  Description of Artificial Sequence: Synthetic oligonucleotide
uccuagagggcacagauga

SEQ ID NO: 2317299 - RNA, 19 nt, Artificial Sequence
  Description of Artificial Sequence: Synthetic oligonucleotide
agugugagcuaccaugccc

SEQ ID NO: 2317300 - RNA, 19 nt, Artificial Sequence
  Description of Artificial Sequence: Synthetic oligonucleotide
uggcucaaggauuugaucc

SEQ ID NO: 2317301 - RNA, 19 nt, Artificial Sequence
  Description of Artificial Sequence: Synthetic oligonucleotide
gacaagaccaucaaagcag

SEQ ID NO: 2317302 - RNA, 19 nt, Artificial Sequence
  Description of Artificial Sequence: Synthetic oligonucleotide
ugaaucuuucugagaaucg

SEQ ID NO: 2317303 - RNA, 19 nt, Artificial Sequence
  Description of Artificial Sequence: Synthetic oligonucleotide
ucauaaugugggcagaaga

SEQ ID NO: 2317304 - RNA, 19 nt, Artificial Sequence
  Description of Artificial Sequence: Synthetic oligonucleotide
aacaauugccccugggaag

SEQ ID NO: 2317305 - RNA, 19 nt, Artificial Sequence
  Description of Artificial Sequence: Synthetic oligonucleotide
augggugauuuauugaagg

SEQ ID NO: 2317306 - RNA, 19 nt, Artificial Sequence
  Description of Artificial Sequence: Synthetic oligonucleotide
uagguaaucguugaggccc

SEQ ID NO: 2317307 - RNA, 19 nt, Artificial Sequence
  Description of Artificial Sequence: Synthetic oligonucleotide
gagaaugggugauuuauug

SEQ ID NO: 2317308 - RNA, 19 nt, Artificial Sequence
  Description of Artificial Sequence: Synthetic oligonucleotide
agaccaucaaagcagcuag

SEQ ID NO: 2317309 - RNA, 19 nt, Artificial Sequence
  Description of Artificial Sequence: Synthetic oligonucleotide
aaucgaacagggccaaaag

SEQ ID NO: 2317310 - RNA, 19 nt, Artificial Sequence
  Description of Artificial Sequence: Synthetic oligonucleotide
uuuguuuuguuuuguuuug

SEQ ID NO: 2317311 - RNA, 19 nt, Artificial Sequence
  Description of Artificial Sequence: Synthetic oligonucleotide
aucgcuggaaggcauuugc

SEQ ID NO: 2317312 - RNA, 19 nt, Artificial Sequence
  Description of Artificial Sequence: Synthetic oligonucleotide
uguaguaguaagucucucc

SEQ ID NO: 2317313 - RNA, 19 nt, Artificial Sequence
  Description of Artificial Sequence: Synthetic oligonucleotide
caguccaccauguauaaag

SEQ ID NO: 2317314 - RNA, 19 nt, Artificial Sequence
  Description of Artificial Sequence: Synthetic oligonucleotide
agauguaguaguaagucuc

SEQ ID NO: 2317315 - RNA, 19 nt, Artificial Sequence
  Description of Artificial Sequence: Synthetic oligonucleotide
ucaaaucccggucuucuag

SEQ ID NO: 2317316 - RNA, 19 nt, Artificial Sequence
  Description of Artificial Sequence: Synthetic oligonucleotide
gauuugaucccaucaaauc

SEQ ID NO: 2317317 - RNA, 19 nt, Artificial Sequence
  Description of Artificial Sequence: Synthetic oligonucleotide
gagggcacagaugacaugg

SEQ ID NO: 2317318 - RNA, 19 nt, Artificial Sequence
  Description of Artificial Sequence: Synthetic oligonucleotide
aagguuucaggucccuccg

SEQ ID NO: 2317319 - RNA, 19 nt, Artificial Sequence
  Description of Artificial Sequence: Synthetic oligonucleotide
ugccuugcagaccucauag

SEQ ID NO: 2317320 - RNA, 19 nt, Artificial Sequence
  Description of Artificial Sequence: Synthetic oligonucleotide
aagaugucuagguaaucgu

SEQ ID NO: 2317321 - RNA, 19 nt, Artificial Sequence
  Description of Artificial Sequence: Synthetic oligonucleotide
aucgaacagggccaaaagg

SEQ ID NO: 2317322 - RNA, 19 nt, Artificial Sequence
  Description of Artificial Sequence: Synthetic oligonucleotide
ugauuuauugaagguuugg

SEQ ID NO: 2317323 - RNA, 19 nt, Artificial Sequence
  Description of Artificial Sequence: Synthetic oligonucleotide
gaacucgaagcccagggag

SEQ ID NO: 2317324 - RNA, 19 nt, Artificial Sequence
  Description of Artificial Sequence: Synthetic oligonucleotide
ugccccaugagaaugggug

SEQ ID NO: 2317325 - RNA, 19 nt, Artificial Sequence
  Description of Artificial Sequence: Synthetic oligonucleotide
  modified_base (9)..(9): a, c, u, g, unknown or other
uggguuggnaccgagaugu

SEQ ID NO: 2317326 - RNA, 19 nt, Artificial Sequence
  Description of Artificial Sequence: Synthetic oligonucleotide
uggaguuccaguagacagg

SEQ ID NO: 2317327 - RNA, 19 nt, Artificial Sequence
  Description of Artificial Sequence: Synthetic oligonucleotide
ugaagguuugguccaaaca

SEQ ID NO: 2317328 - RNA, 19 nt, Artificial Sequence
  Description of Artificial Sequence: Synthetic oligonucleotide
aggagucucaagcaccggc

SEQ ID NO: 2317329 - RNA, 19 nt, Artificial Sequence
  Description of Artificial Sequence: Synthetic oligonucleotide
aaaucccggucuucuaggg

SEQ ID NO: 2317330 - RNA, 19 nt, Artificial Sequence
  Description of Artificial Sequence: Synthetic oligonucleotide
gagacaagaccaucaaagc

SEQ ID NO: 2317331 - RNA, 19 nt, Artificial Sequence
  Description of Artificial Sequence: Synthetic oligonucleotide
ucaaccucauggcaagucc

SEQ ID NO: 2317332 - RNA, 19 nt, Artificial Sequence
  Description of Artificial Sequence: Synthetic oligonucleotide
uuaguggaguuccaguaga

SEQ ID NO: 2317333 - RNA, 19 nt, Artificial Sequence
  Description of Artificial Sequence: Synthetic oligonucleotide
aagugugagcuaccaugcc

SEQ ID NO: 2317334 - RNA, 19 nt, Artificial Sequence
  Description of Artificial Sequence: Synthetic oligonucleotide
uccaccauguauaaagcaa

SEQ ID NO: 2317335 - RNA, 19 nt, Artificial Sequence
  Description of Artificial Sequence: Synthetic oligonucleotide
uaaucguugaggcccagcu

SEQ ID NO: 2317336 - RNA, 19 nt, Artificial Sequence
  Description of Artificial Sequence: Synthetic oligonucleotide
cacagcauccccucgaagc

SEQ ID NO: 2317337 - RNA, 19 nt, Artificial Sequence
  Description of Artificial Sequence: Synthetic oligonucleotide
agacaagaccaucaaagca

SEQ ID NO: 2317338 - RNA, 19 nt, Artificial Sequence
  Description of Artificial Sequence: Synthetic oligonucleotide
accgagauguaguaguaag

SEQ ID NO: 2317339 - RNA, 19 nt, Artificial Sequence
  Description of Artificial Sequence: Synthetic oligonucleotide
ggagacaagaccaucaaag

SEQ ID NO: 2317340 - RNA, 19 nt, Artificial Sequence
  Description of Artificial Sequence: Synthetic oligonucleotide
ucucccuuaccccaaggcc

SEQ ID NO: 2317341 - RNA, 19 nt, Artificial Sequence
  Description of Artificial Sequence: Synthetic oligonucleotide
cuaggagucucaagcaccg

SEQ ID NO: 2317342 - RNA, 19 nt, Artificial Sequence
  Description of Artificial Sequence: Synthetic oligonucleotide
cucccuuaccccaaggccg

SEQ ID NO: 2317343 - RNA, 19 nt, Artificial Sequence
  Description of Artificial Sequence: Synthetic oligonucleotide
aaaggggcgaaaggcagcg

SEQ ID NO: 2317344 - RNA, 19 nt, Artificial Sequence
  Description of Artificial Sequence: Synthetic oligonucleotide
aaucguugaggcccagcuc

SEQ ID NO: 2317345 - RNA, 19 nt, Artificial Sequence
  Description of Artificial Sequence: Synthetic oligonucleotide
aucaaagcagcuaggaguc

SEQ ID NO: 2317346 - RNA, 19 nt, Artificial Sequence
  Description of Artificial Sequence: Synthetic oligonucleotide
gaaauucaaccucauggca

SEQ ID NO: 2317347 - RNA, 19 nt, Artificial Sequence
  Description of Artificial Sequence: Synthetic oligonucleotide
ugggagggcaacaauugcc

SEQ ID NO: 2317348 - RNA, 19 nt, Artificial Sequence
  Description of Artificial Sequence: Synthetic oligonucleotide
uugaucccaucaaaucccg

SEQ ID NO: 2317349 - RNA, 19 nt, Artificial Sequence
  Description of Artificial Sequence: Synthetic oligonucleotide
aguccgucuucauagaaga

SEQ ID NO: 2317350 - RNA, 19 nt, Artificial Sequence
  Description of Artificial Sequence: Synthetic oligonucleotide
uaguaguaagucucucccg

SEQ ID NO: 2317351 - RNA, 19 nt, Artificial Sequence
  Description of Artificial Sequence: Synthetic oligonucleotide
agcuaggagucucaagcac

SEQ ID NO: 2317352 - RNA, 19 nt, Artificial Sequence
  Description of Artificial Sequence: Synthetic oligonucleotide
aaucccggucuucuagggg

SEQ ID NO: 2317353 - RNA, 19 nt, Artificial Sequence
  Description of Artificial Sequence: Synthetic oligonucleotide
aucgcugaaucuuucugag

SEQ ID NO: 2317354 - RNA, 19 nt, Artificial Sequence
  Description of Artificial Sequence: Synthetic oligonucleotide
aaauucaaccucauggcaa

SEQ ID NO: 2317355 - RNA, 19 nt, Artificial Sequence
  Description of Artificial Sequence: Synthetic oligonucleotide
ugagcuaccaugccccaug

SEQ ID NO: 2317356 - RNA, 19 nt, Artificial Sequence
  Description of Artificial Sequence: Synthetic oligonucleotide
gcagcgagcacuuccaucg

SEQ ID NO: 2317357 - RNA, 19 nt, Artificial Sequence
  Description of Artificial Sequence: Synthetic oligonucleotide
aaugggugauuuauugaag

SEQ ID NO: 2317358 - RNA, 19 nt, Artificial Sequence
  Description of Artificial Sequence: Synthetic oligonucleotide
guuaguggaguuccaguag

SEQ ID NO: 2317359 - RNA, 19 nt, Artificial Sequence
  Description of Artificial Sequence: Synthetic oligonucleotide
auguauaaagcaaagguuu

SEQ ID NO: 2317360 - RNA, 19 nt, Artificial Sequence
  Description of Artificial Sequence: Synthetic oligonucleotide
ucgaagcccagggagaagg

SEQ ID NO: 2317361 - RNA, 19 nt, Artificial Sequence
  Description of Artificial Sequence: Synthetic oligonucleotide
gcagcuaggagucucaagc

SEQ ID NO: 2317362 - RNA, 19 nt, Artificial Sequence
  Description of Artificial Sequence: Synthetic oligonucleotide
acaaaccagcaugaaauuc

SEQ ID NO: 2317363 - RNA, 19 nt, Artificial Sequence
  Description of Artificial Sequence: Synthetic oligonucleotide
uaguaagucucucccggcc

SEQ ID NO: 2317364 - RNA, 19 nt, Artificial Sequence
  Description of Artificial Sequence: Synthetic oligonucleotide
uuugguccaaacacuuaca

SEQ ID NO: 2317365 - RNA, 19 nt, Artificial Sequence
  Description of Artificial Sequence: Synthetic oligonucleotide
uccgucuucauagaagaca

SEQ ID NO: 2317366 - RNA, 19 nt, Artificial Sequence
  Description of Artificial Sequence: Synthetic oligonucleotide
agaccucauagccugacca

SEQ ID NO: 2317367 - RNA, 19 nt, Artificial Sequence
  Description of Artificial Sequence: Synthetic oligonucleotide
agaaugggugauuuauuga

SEQ ID NO: 2317368 - RNA, 19 nt, Artificial Sequence
  Description of Artificial Sequence: Synthetic oligonucleotide
accauguauaaagcaaagg

SEQ ID NO: 2317369 - RNA, 19 nt, Artificial Sequence
  Description of Artificial Sequence: Synthetic oligonucleotide
aucccaucaaaucccgguc

SEQ ID NO: 2317370 - RNA, 19 nt, Artificial Sequence
  Description of Artificial Sequence: Synthetic oligonucleotide
aaggccgacuuccugcuca

SEQ ID NO: 2317371 - RNA, 19 nt, Artificial Sequence
  Description of Artificial Sequence: Synthetic oligonucleotide
cuagguaaucguugaggcc

SEQ ID NO: 2317372 - RNA, 19 nt, Artificial Sequence
  Description of Artificial Sequence: Synthetic oligonucleotide
uccccuuugcucuuggcca

SEQ ID NO: 2317373 - RNA, 19 nt, Artificial Sequence
  Description of Artificial Sequence: Synthetic oligonucleotide
caaccucauggcaaguccg

SEQ ID NO: 2317374 - RNA, 19 nt, Artificial Sequence
  Description of Artificial Sequence: Synthetic oligonucleotide
aaguccgucuucauagaag

SEQ ID NO: 2317375 - RNA, 19 nt, Artificial Sequence
  Description of Artificial Sequence: Synthetic oligonucleotide
caucaaagcagcuaggagu

SEQ ID NO: 2317376 - RNA, 19 nt, Artificial Sequence
  Description of Artificial Sequence: Synthetic oligonucleotide
gcuuucauaaugugggcag

SEQ ID NO: 2317377 - RNA, 19 nt, Artificial Sequence
  Description of Artificial Sequence: Synthetic oligonucleotide
cugaaucuuucugagaauc

SEQ ID NO: 2317378 - RNA, 19 nt, Artificial Sequence
  Description of Artificial Sequence: Synthetic oligonucleotide
  modified_base (17)..(17): a, c, u, g, unknown or other
gaacucucuggguuggnac

SEQ ID NO: 2317379 - RNA, 19 nt, Artificial Sequence
  Description of Artificial Sequence: Synthetic oligonucleotide
gaaucuuucugagaaucga

SEQ ID NO: 2317380 - RNA, 19 nt, Artificial Sequence
  Description of Artificial Sequence: Synthetic oligonucleotide
aagguuugguccaaacacu

SEQ ID NO: 2317381 - RNA, 19 nt, Artificial Sequence
  Description of Artificial Sequence: Synthetic oligonucleotide
caccauguauaaagcaaag

SEQ ID NO: 2317382 - RNA, 19 nt, Artificial Sequence
  Description of Artificial Sequence: Synthetic oligonucleotide
ugucuuuggcuuuggcccc

SEQ ID NO: 2317383 - RNA, 19 nt, Artificial Sequence
  Description of Artificial Sequence: Synthetic oligonucleotide
auagccugaccaguccacc

SEQ ID NO: 2317384 - RNA, 19 nt, Artificial Sequence
  Description of Artificial Sequence: Synthetic oligonucleotide
ucccaucaaaucccggucu

SEQ ID NO: 2317385 - RNA, 19 nt, Artificial Sequence
  Description of Artificial Sequence: Synthetic oligonucleotide
uuggccaggagcccacuug

SEQ ID NO: 2317386 - RNA, 19 nt, Artificial Sequence
  Description of Artificial Sequence: Synthetic oligonucleotide
ugaucccaucaaaucccgg

SEQ ID NO: 2317387 - RNA, 19 nt, Artificial Sequence
  Description of Artificial Sequence: Synthetic oligonucleotide
aguaagucucucccggcca

SEQ ID NO: 2317388 - RNA, 19 nt, Artificial Sequence
  Description of Artificial Sequence: Synthetic oligonucleotide
aggauuugaucccaucaaa

SEQ ID NO: 2317389 - RNA, 19 nt, Artificial Sequence
  Description of Artificial Sequence: Synthetic oligonucleotide
gggagaagggugugaaucg

SEQ ID NO: 2317390 - RNA, 19 nt, Artificial Sequence
  Description of Artificial Sequence: Synthetic oligonucleotide
agcaugaaauucaaccuca

SEQ ID NO: 2317391 - RNA, 19 nt, Artificial Sequence
  Description of Artificial Sequence: Synthetic oligonucleotide
guuuguuuuguuuuguuuu

SEQ ID NO: 2317392 - RNA, 19 nt, Artificial Sequence
  Description of Artificial Sequence: Synthetic oligonucleotide
aggggcgaaaggcagcgag

SEQ ID NO: 2317393 - RNA, 19 nt, Artificial Sequence
  Description of Artificial Sequence: Synthetic oligonucleotide
uguucccaugucuuuggcu

SEQ ID NO: 2317394 - RNA, 19 nt, Artificial Sequence
  Description of Artificial Sequence: Synthetic oligonucleotide
auccccucgaagcagccug

SEQ ID NO: 2317395 - RNA, 19 nt, Artificial Sequence
  Description of Artificial Sequence: Synthetic oligonucleotide
uaccccaaggccgacuucc

SEQ ID NO: 2317396 - RNA, 19 nt, Artificial Sequence
  Description of Artificial Sequence: Synthetic oligonucleotide
gauuuauugaagguuuggu

SEQ ID NO: 2317397 - RNA, 19 nt, Artificial Sequence
  Description of Artificial Sequence: Synthetic oligonucleotide
auugccccugggaagaguc

SEQ ID NO: 2317398 - RNA, 19 nt, Artificial Sequence
  Description of Artificial Sequence: Synthetic oligonucleotide
acaauugccccugggaaga

SEQ ID NO: 2317399 - RNA, 19 nt, Artificial Sequence
  Description of Artificial Sequence: Synthetic oligonucleotide
gacaguccgcagcaggggc

SEQ ID NO: 2317400 - RNA, 19 nt, Artificial Sequence
  Description of Artificial Sequence: Synthetic oligonucleotide
ugguccaaacacuuacaaa

SEQ ID NO: 2317401 - RNA, 19 nt, Artificial Sequence
  Description of Artificial Sequence: Synthetic oligonucleotide
guaguaagucucucccggc

SEQ ID NO: 2317402 - RNA, 19 nt, Artificial Sequence
  Description of Artificial Sequence: Synthetic oligonucleotide
guauaaagcaaagguuuca

SEQ ID NO: 2317403 - RNA, 19 nt, Artificial Sequence
  Description of Artificial Sequence: Synthetic oligonucleotide
ccuugcagaccucauagcc

SEQ ID NO: 2317404 - RNA, 19 nt, Artificial Sequence
  Description of Artificial Sequence: Synthetic oligonucleotide
cuaccaugccccaugagaa

SEQ ID NO: 2317405 - RNA, 19 nt, Artificial Sequence
  Description of Artificial Sequence: Synthetic oligonucleotide
ucgcuggaaggcauuugcc

SEQ ID NO: 2317406 - RNA, 19 nt, Artificial Sequence
  Description of Artificial Sequence: Synthetic oligonucleotide
  modified_base (4)..(4): a, c, u, g, unknown or other
uggnaccgagauguaguag

SEQ ID NO: 2317407 - RNA, 19 nt, Artificial Sequence
  Description of Artificial Sequence: Synthetic oligonucleotide
gaucccaucaaaucccggu

SEQ ID NO: 2317408 - RNA, 19 nt, Artificial Sequence
  Description of Artificial Sequence: Synthetic oligonucleotide
uaguggaguuccaguagac

SEQ ID NO: 2317409 - RNA, 19 nt, Artificial Sequence
  Description of Artificial Sequence: Synthetic oligonucleotide
agccgcaucgccccugggg

SEQ ID NO: 2317410 - RNA, 19 nt, Artificial Sequence
  Description of Artificial Sequence: Synthetic oligonucleotide
agucucaagcaccggccag

SEQ ID NO: 2317411 - RNA, 19 nt, Artificial Sequence
  Description of Artificial Sequence: Synthetic oligonucleotide
  modified_base (5)..(5): a, c, u, g, unknown or other
uuggnaccgagauguagua

SEQ ID NO: 2317412 - RNA, 19 nt, Artificial Sequence
  Description of Artificial Sequence: Synthetic oligonucleotide
agcaaagguuucagguccc

SEQ ID NO: 2317413 - RNA, 19 nt, Artificial Sequence
  Description of Artificial Sequence: Synthetic oligonucleotide
gaagggugugaaucgcuga

SEQ ID NO: 2317414 - RNA, 19 nt, Artificial Sequence
  Description of Artificial Sequence: Synthetic oligonucleotide
cauagccugaccaguccac

SEQ ID NO: 2317415 - RNA, 19 nt, Artificial Sequence
  Description of Artificial Sequence: Synthetic oligonucleotide
cagaugacauggcuucccc

SEQ ID NO: 2317416 - RNA, 19 nt, Artificial Sequence
  Description of Artificial Sequence: Synthetic oligonucleotide
guagacaggguggcggagg

SEQ ID NO: 2317417 - RNA, 19 nt, Artificial Sequence
  Description of Artificial Sequence: Synthetic oligonucleotide
auguaguaguaagucucuc

SEQ ID NO: 2317418 - RNA, 19 nt, Artificial Sequence
  Description of Artificial Sequence: Synthetic oligonucleotide
gcuaccaugccccaugaga

SEQ ID NO: 2317419 - RNA, 19 nt, Artificial Sequence
  Description of Artificial Sequence: Synthetic oligonucleotide
ucccuuaccccaaggccga

SEQ ID NO: 2317420 - RNA, 19 nt, Artificial Sequence
  Description of Artificial Sequence: Synthetic oligonucleotide
agcagcuaggagucucaag

SEQ ID NO: 2317421 - RNA, 19 nt, Artificial Sequence
  Description of Artificial Sequence: Synthetic oligonucleotide
cauaaugugggcagaagau

SEQ ID NO: 2317422 - RNA, 19 nt, Artificial Sequence
  Description of Artificial Sequence: Synthetic oligonucleotide
aacucgaagcccagggaga

SEQ ID NO: 2317423 - RNA, 19 nt, Artificial Sequence
  Description of Artificial Sequence: Synthetic oligonucleotide
ggcucaaggauuugauccc

SEQ ID NO: 2317424 - RNA, 19 nt, Artificial Sequence
  Description of Artificial Sequence: Synthetic oligonucleotide
  modified_base (7)..(7): a, c, u, g, unknown or other
gguuggnaccgagauguag

SEQ ID NO: 2317425 - RNA, 19 nt, Artificial Sequence
  Description of Artificial Sequence: Synthetic oligonucleotide
cugggagggcaacaauugc

SEQ ID NO: 2317426 - RNA, 19 nt, Artificial Sequence
  Description of Artificial Sequence: Synthetic oligonucleotide
accaugccccaugagaaug

SEQ ID NO: 2317427 - RNA, 19 nt, Artificial Sequence
  Description of Artificial Sequence: Synthetic oligonucleotide
cuagagggcacagaugaca

SEQ ID NO: 2317428 - RNA, 19 nt, Artificial Sequence
  Description of Artificial Sequence: Synthetic oligonucleotide
agaagggugugaaucgcug

SEQ ID NO: 2317429 - RNA, 19 nt, Artificial Sequence
  Description of Artificial Sequence: Synthetic oligonucleotide
uucaaccucauggcaaguc

SEQ ID NO: 2317430 - RNA, 19 nt, Artificial Sequence
  Description of Artificial Sequence: Synthetic oligonucleotide
accggccagaacucucugg

SEQ ID NO: 2317431 - RNA, 19 nt, Artificial Sequence
  Description of Artificial Sequence: Synthetic oligonucleotide
agaugacauggcuuccccu

SEQ ID NO: 2317432 - RNA, 19 nt, Artificial Sequence
  Description of Artificial Sequence: Synthetic oligonucleotide
gaccaucaaagcagcuagg

SEQ ID NO: 2317433 - RNA, 19 nt, Artificial Sequence
  Description of Artificial Sequence: Synthetic oligonucleotide
agguuucaggucccuccgg

SEQ ID NO: 2317434 - RNA, 19 nt, Artificial Sequence
  Description of Artificial Sequence: Synthetic oligonucleotide
aaggcagcgagcacuucca

SEQ ID NO: 2317435 - RNA, 19 nt, Artificial Sequence
  Description of Artificial Sequence: Synthetic oligonucleotide
uccccucgaagcagccugg

SEQ ID NO: 2317436 - RNA, 19 nt, Artificial Sequence
  Description of Artificial Sequence: Synthetic oligonucleotide
guuuuguuuuguuuguuuu

SEQ ID NO: 2317437 - RNA, 19 nt, Artificial Sequence
  Description of Artificial Sequence: Synthetic oligonucleotide
gaugacauggcuuccccuu

SEQ ID NO: 2317438 - RNA, 19 nt, Artificial Sequence
  Description of Artificial Sequence: Synthetic oligonucleotide
  modified_base (3)..(3): a, c, u, g, unknown or other
ggnaccgagauguaguagu

SEQ ID NO: 2317439 - RNA, 19 nt, Artificial Sequence
  Description of Artificial Sequence: Synthetic oligonucleotide
caagaacucgaagcccagg

SEQ ID NO: 2317440 - RNA, 19 nt, Artificial Sequence
  Description of Artificial Sequence: Synthetic oligonucleotide
ggccaaaaggggcgaaagg

SEQ ID NO: 2317441 - RNA, 19 nt, Artificial Sequence
  Description of Artificial Sequence: Synthetic oligonucleotide
gaagaguccuagagggcac

SEQ ID NO: 2317442 - RNA, 19 nt, Artificial Sequence
  Description of Artificial Sequence: Synthetic oligonucleotide
gauguaguaguaagucucu

SEQ ID NO: 2317443 - RNA, 19 nt, Artificial Sequence
  Description of Artificial Sequence: Synthetic oligonucleotide
gaccaguccaccauguaua

SEQ ID NO: 2317444 - RNA, 19 nt, Artificial Sequence
  Description of Artificial Sequence: Synthetic oligonucleotide
aaccucauggcaaguccgu

SEQ ID NO: 2317445 - RNA, 19 nt, Artificial Sequence
  Description of Artificial Sequence: Synthetic oligonucleotide
ucgcugaaucuuucugaga

SEQ ID NO: 2317446 - RNA, 19 nt, Artificial Sequence
  Description of Artificial Sequence: Synthetic oligonucleotide
ugugagcuaccaugcccca

SEQ ID NO: 2317447 - RNA, 19 nt, Artificial Sequence
  Description of Artificial Sequence: Synthetic oligonucleotide
gagucucaagcaccggcca

SEQ ID NO: 2317448 - RNA, 19 nt, Artificial Sequence
  Description of Artificial Sequence: Synthetic oligonucleotide
guuuuguuuuguuuuguuu

SEQ ID NO: 2317449 - RNA, 19 nt, Artificial Sequence
  Description of Artificial Sequence: Synthetic oligonucleotide
aagaguccuagagggcaca

SEQ ID NO: 2317450 - RNA, 19 nt, Artificial Sequence
  Description of Artificial Sequence: Synthetic oligonucleotide
gcuaggagucucaagcacc

SEQ ID NO: 2317451 - RNA, 19 nt, Artificial Sequence
  Description of Artificial Sequence: Synthetic oligonucleotide
  modified_base (6)..(6): a, c, u, g, unknown or other
guuggnaccgagauguagu

SEQ ID NO: 2317452 - RNA, 19 nt, Artificial Sequence
  Description of Artificial Sequence: Synthetic oligonucleotide
gguuaguggaguuccagua

SEQ ID NO: 2317453 - RNA, 19 nt, Artificial Sequence
  Description of Artificial Sequence: Synthetic oligonucleotide
cgaacagggccaaaagggg

SEQ ID NO: 2317454 - RNA, 19 nt, Artificial Sequence
  Description of Artificial Sequence: Synthetic oligonucleotide
guggcucaaggauuugauc

SEQ ID NO: 2317455 - RNA, 19 nt, Artificial Sequence
  Description of Artificial Sequence: Synthetic oligonucleotide
accaguccaccauguauaa

SEQ ID NO: 2317456 - RNA, 19 nt, Artificial Sequence
  Description of Artificial Sequence: Synthetic oligonucleotide
uuccaucgcuggaaggcau

SEQ ID NO: 2317457 - RNA, 19 nt, Artificial Sequence
  Description of Artificial Sequence: Synthetic oligonucleotide
cagaccucauagccugacc

SEQ ID NO: 2317458 - RNA, 19 nt, Artificial Sequence
  Description of Artificial Sequence: Synthetic oligonucleotide
gggagggcaacaauugccc

SEQ ID NO: 2317459 - RNA, 19 nt, Artificial Sequence
  Description of Artificial Sequence: Synthetic oligonucleotide
aggccgacuuccugcucac

SEQ ID NO: 2317460 - RNA, 19 nt, Artificial Sequence
  Description of Artificial Sequence: Synthetic oligonucleotide
aauugccccugggaagagu

SEQ ID NO: 2317461 - RNA, 19 nt, Artificial Sequence
  Description of Artificial Sequence: Synthetic oligonucleotide
gggugugaaucgcugaauc

SEQ ID NO: 2317462 - RNA, 19 nt, Artificial Sequence
  Description of Artificial Sequence: Synthetic oligonucleotide
cuugcagaccucauagccu

SEQ ID NO: 2317463 - RNA, 19 nt, Artificial Sequence
  Description of Artificial Sequence: Synthetic oligonucleotide
accucauagccugaccagu

SEQ ID NO: 2317464 - RNA, 19 nt, Artificial Sequence
  Description of Artificial Sequence: Synthetic oligonucleotide
uugccccugggaagagucc

SEQ ID NO: 2317465 - RNA, 19 nt, Artificial Sequence
  Description of Artificial Sequence: Synthetic oligonucleotide
ccggccagaacucucuggg

SEQ ID NO: 2317466 - RNA, 19 nt, Artificial Sequence
  Description of Artificial Sequence: Synthetic oligonucleotide
gagggcaacaauugccccu

SEQ ID NO: 2317467 - RNA, 19 nt, Artificial Sequence
  Description of Artificial Sequence: Synthetic oligonucleotide
agcgagcacuuccaucgcu

SEQ ID NO: 2317468 - RNA, 19 nt, Artificial Sequence
  Description of Artificial Sequence: Synthetic oligonucleotide
cccaaggccgacuuccugc

SEQ ID NO: 2317469 - RNA, 19 nt, Artificial Sequence
  Description of Artificial Sequence: Synthetic oligonucleotide
uaagucucucccggccaag

SEQ ID NO: 2317470 - RNA, 19 nt, Artificial Sequence
  Description of Artificial Sequence: Synthetic oligonucleotide
aguggcucaaggauuugau

SEQ ID NO: 2317471 - RNA, 19 nt, Artificial Sequence
  Description of Artificial Sequence: Synthetic oligonucleotide
uaggagucucaagcaccgg

SEQ ID NO: 2317472 - RNA, 19 nt, Artificial Sequence
  Description of Artificial Sequence: Synthetic oligonucleotide
accucauggcaaguccguc

SEQ ID NO: 2317473 - RNA, 19 nt, Artificial Sequence
  Description of Artificial Sequence: Synthetic oligonucleotide
gagccgagcagcgcggccc

SEQ ID NO: 2317474 - RNA, 19 nt, Artificial Sequence
  Description of Artificial Sequence: Synthetic oligonucleotide
gagcccacuuguucccaug

SEQ ID NO: 2317475 - RNA, 19 nt, Artificial Sequence
  Description of Artificial Sequence: Synthetic oligonucleotide
uaccaugccccaugagaau

SEQ ID NO: 2317476 - RNA, 19 nt, Artificial Sequence
  Description of Artificial Sequence: Synthetic oligonucleotide
cagcuaggagucucaagca

SEQ ID NO: 2317477 - RNA, 19 nt, Artificial Sequence
  Description of Artificial Sequence: Synthetic oligonucleotide
cacagaugacauggcuucc

SEQ ID NO: 2317478 - RNA, 19 nt, Artificial Sequence
  Description of Artificial Sequence: Synthetic oligonucleotide
agcuaccaugccccaugag

SEQ ID NO: 2317479 - RNA, 19 nt, Artificial Sequence
  Description of Artificial Sequence: Synthetic oligonucleotide
  modified_base (18)..(18): a, c, u, g, unknown or other
agaacucucuggguuggna

SEQ ID NO: 2317480 - RNA, 19 nt, Artificial Sequence
  Description of Artificial Sequence: Synthetic oligonucleotide
agaguccuagagggcacag

SEQ ID NO: 2317481 - RNA, 19 nt, Artificial Sequence
  Description of Artificial Sequence: Synthetic oligonucleotide
augacauggcuuccccuuu

SEQ ID NO: 2317482 - RNA, 19 nt, Artificial Sequence
  Description of Artificial Sequence: Synthetic oligonucleotide
agccugaccaguccaccau

SEQ ID NO: 2317483 - RNA, 19 nt, Artificial Sequence
  Description of Artificial Sequence: Synthetic oligonucleotide
ugcagaccucauagccuga

SEQ ID NO: 2317484 - RNA, 19 nt, Artificial Sequence
  Description of Artificial Sequence: Synthetic oligonucleotide
cuuucauaaugugggcaga

SEQ ID NO: 2317485 - RNA, 19 nt, Artificial Sequence
  Description of Artificial Sequence: Synthetic oligonucleotide
ggagggcaacaauugcccc

SEQ ID NO: 2317486 - RNA, 19 nt, Artificial Sequence
  Description of Artificial Sequence: Synthetic oligonucleotide
aagcagccugggguuagug

SEQ ID NO: 2317487 - RNA, 19 nt, Artificial Sequence
  Description of Artificial Sequence: Synthetic oligonucleotide
cuuccccuuugcucuuggc

SEQ ID NO: 2317488 - RNA, 19 nt, Artificial Sequence
  Description of Artificial Sequence: Synthetic oligonucleotide
guaagucucucccggccaa

SEQ ID NO: 2317489 - RNA, 19 nt, Artificial Sequence
  Description of Artificial Sequence: Synthetic oligonucleotide
ucaaagcagcuaggagucu

SEQ ID NO: 2317490 - RNA, 19 nt, Artificial Sequence
  Description of Artificial Sequence: Synthetic oligonucleotide
uccaucgcuggaaggcauu

SEQ ID NO: 2317491 - RNA, 19 nt, Artificial Sequence
  Description of Artificial Sequence: Synthetic oligonucleotide
ccaugccccaugagaaugg

SEQ ID NO: 2317492 - RNA, 19 nt, Artificial Sequence
  Description of Artificial Sequence: Synthetic oligonucleotide
agcaccggccagaacucuc

SEQ ID NO: 2317493 - RNA, 19 nt, Artificial Sequence
  Description of Artificial Sequence: Synthetic oligonucleotide
  modified_base (2)..(2): a, c, u, g, unknown or other
gnaccgagauguaguagua

SEQ ID NO: 2317494 - RNA, 19 nt, Artificial Sequence
  Description of Artificial Sequence: Synthetic oligonucleotide
caaagguuucaggucccuc

SEQ ID NO: 2317495 - RNA, 19 nt, Artificial Sequence
  Description of Artificial Sequence: Synthetic oligonucleotide
cucuuggccaggagcccac

SEQ ID NO: 2317496 - RNA, 19 nt, Artificial Sequence
  Description of Artificial Sequence: Synthetic oligonucleotide
gguccagucuggucuggcc

SEQ ID NO: 2317497 - RNA, 19 nt, Artificial Sequence
  Description of Artificial Sequence: Synthetic oligonucleotide
cucccggccaagaacucga

SEQ ID NO: 2317498 - RNA, 19 nt, Artificial Sequence
  Description of Artificial Sequence: Synthetic oligonucleotide
caaguccgucuucauagaa

SEQ ID NO: 2317499 - RNA, 19 nt, Artificial Sequence
  Description of Artificial Sequence: Synthetic oligonucleotide
gugaaucgcugaaucuuuc

SEQ ID NO: 2317500 - RNA, 19 nt, Artificial Sequence
  Description of Artificial Sequence: Synthetic oligonucleotide
gagcuaccaugccccauga

SEQ ID NO: 2317501 - RNA, 19 nt, Artificial Sequence
  Description of Artificial Sequence: Synthetic oligonucleotide
gagaaucgaacagggccaa

SEQ ID NO: 2317502 - RNA, 19 nt, Artificial Sequence
  Description of Artificial Sequence: Synthetic oligonucleotide
uuaccccaaggccgacuuc

SEQ ID NO: 2317503 - RNA, 19 nt, Artificial Sequence
  Description of Artificial Sequence: Synthetic oligonucleotide
caugagaaugggugauuua

SEQ ID NO: 2317504 - RNA, 19 nt, Artificial Sequence
  Description of Artificial Sequence: Synthetic oligonucleotide
ggugugaaucgcugaaucu

SEQ ID NO: 2317505 - RNA, 19 nt, Artificial Sequence
  Description of Artificial Sequence: Synthetic oligonucleotide
gggccaaaaggggcgaaag

SEQ ID NO: 2317506 - RNA, 19 nt, Artificial Sequence
  Description of Artificial Sequence: Synthetic oligonucleotide
gagcagcgcggcccagagg

SEQ ID NO: 2317507 - RNA, 19 nt, Artificial Sequence
  Description of Artificial Sequence: Synthetic oligonucleotide
cuuccaucgcuggaaggca

SEQ ID NO: 2317508 - RNA, 19 nt, Artificial Sequence
  Description of Artificial Sequence: Synthetic oligonucleotide
gggguuaguggaguuccag

SEQ ID NO: 2317509 - RNA, 19 nt, Artificial Sequence
  Description of Artificial Sequence: Synthetic oligonucleotide
ccaccauguauaaagcaaa

SEQ ID NO: 2317510 - RNA, 19 nt, Artificial Sequence
  Description of Artificial Sequence: Synthetic oligonucleotide
aagcagcuaggagucucaa

SEQ ID NO: 2317511 - RNA, 19 nt, Artificial Sequence
  Description of Artificial Sequence: Synthetic oligonucleotide
auucaaccucauggcaagu

SEQ ID NO: 2317512 - RNA, 19 nt, Artificial Sequence
  Description of Artificial Sequence: Synthetic oligonucleotide
gccgacuuccugcucacca

SEQ ID NO: 2317513 - RNA, 19 nt, Artificial Sequence
  Description of Artificial Sequence: Synthetic oligonucleotide
caucgcuggaaggcauuug

SEQ ID NO: 2317514 - RNA, 19 nt, Artificial Sequence
  Description of Artificial Sequence: Synthetic oligonucleotide
gagaagggugugaaucgcu

SEQ ID NO: 2317515 - RNA, 19 nt, Artificial Sequence
  Description of Artificial Sequence: Synthetic oligonucleotide
cagcgagcacuuccaucgc

SEQ ID NO: 2317516 - RNA, 19 nt, Artificial Sequence
  Description of Artificial Sequence: Synthetic oligonucleotide
agguaaucguugaggccca

SEQ ID NO: 2317517 - RNA, 19 nt, Artificial Sequence
  Description of Artificial Sequence: Synthetic oligonucleotide
acaguccgcagcaggggca

SEQ ID NO: 2317518 - RNA, 19 nt, Artificial Sequence
  Description of Artificial Sequence: Synthetic oligonucleotide
ccugggcuuucauaaugug

SEQ ID NO: 2317519 - RNA, 19 nt, Artificial Sequence
  Description of Artificial Sequence: Synthetic oligonucleotide
agcgcggcccagaggacag

SEQ ID NO: 2317520 - RNA, 19 nt, Artificial Sequence
  Description of Artificial Sequence: Synthetic oligonucleotide
gaguccuagagggcacaga

SEQ ID NO: 2317521 - RNA, 19 nt, Artificial Sequence
  Description of Artificial Sequence: Synthetic oligonucleotide
ggauuugaucccaucaaau

SEQ ID NO: 2317522 - RNA, 19 nt, Artificial Sequence
  Description of Artificial Sequence: Synthetic oligonucleotide
acagggccaaaaggggcga

SEQ ID NO: 2317523 - RNA, 19 nt, Artificial Sequence
  Description of Artificial Sequence: Synthetic oligonucleotide
gcuuccccuuugcucuugg

SEQ ID NO: 2317524 - RNA, 19 nt, Artificial Sequence
  Description of Artificial Sequence: Synthetic oligonucleotide
gggaagaguccuagagggc

SEQ ID NO: 2317525 - RNA, 19 nt, Artificial Sequence
  Description of Artificial Sequence: Synthetic oligonucleotide
caauugccccugggaagag

SEQ ID NO: 2317526 - RNA, 19 nt, Artificial Sequence
  Description of Artificial Sequence: Synthetic oligonucleotide
gggcgaaaggcagcgagca

SEQ ID NO: 2317527 - RNA, 19 nt, Artificial Sequence
  Description of Artificial Sequence: Synthetic oligonucleotide
cucgaagcccagggagaag

SEQ ID NO: 2317528 - RNA, 19 nt, Artificial Sequence
  Description of Artificial Sequence: Synthetic oligonucleotide
gcgagcacuuccaucgcug

SEQ ID NO: 2317529 - RNA, 19 nt, Artificial Sequence
  Description of Artificial Sequence: Synthetic oligonucleotide
ucccggccaagaacucgaa

SEQ ID NO: 2317530 - RNA, 19 nt, Artificial Sequence
  Description of Artificial Sequence: Synthetic oligonucleotide
cucucccggccaagaacuc

SEQ ID NO: 2317531 - RNA, 19 nt, Artificial Sequence
  Description of Artificial Sequence: Synthetic oligonucleotide
agccgagcagcgcggccca

SEQ ID NO: 2317532 - RNA, 19 nt, Artificial Sequence
  Description of Artificial Sequence: Synthetic oligonucleotide
ccgacuuccugcucaccac

SEQ ID NO: 2317533 - RNA, 19 nt, Artificial Sequence
  Description of Artificial Sequence: Synthetic oligonucleotide
aaggggcgaaaggcagcga

SEQ ID NO: 2317534 - RNA, 19 nt, Artificial Sequence
  Description of Artificial Sequence: Synthetic oligonucleotide
gaaaggcagcgagcacuuc

SEQ ID NO: 2317535 - RNA, 19 nt, Artificial Sequence
  Description of Artificial Sequence: Synthetic oligonucleotide
ggguuaguggaguuccagu

SEQ ID NO: 2317536 - RNA, 19 nt, Artificial Sequence
  Description of Artificial Sequence: Synthetic oligonucleotide
ucgccccugggguccaguc

SEQ ID NO: 2317537 - RNA, 19 nt, Artificial Sequence
  Description of Artificial Sequence: Synthetic oligonucleotide
cuuaccccaaggccgacuu

SEQ ID NO: 2317538 - RNA, 19 nt, Artificial Sequence
  Description of Artificial Sequence: Synthetic oligonucleotide
gccccaugagaauggguga

SEQ ID NO: 2317539 - RNA, 19 nt, Artificial Sequence
  Description of Artificial Sequence: Synthetic oligonucleotide
ggggcgaaaggcagcgagc

SEQ ID NO: 2317540 - RNA, 19 nt, Artificial Sequence
  Description of Artificial Sequence: Synthetic oligonucleotide
  modified_base (14)..(14): a, c, u, g, unknown or other
cucucuggguuggnaccga

SEQ ID NO: 2317541 - RNA, 19 nt, Artificial Sequence
  Description of Artificial Sequence: Synthetic oligonucleotide
aggguggcggaggcuggag

SEQ ID NO: 2317542 - RNA, 19 nt, Artificial Sequence
  Description of Artificial Sequence: Synthetic oligonucleotide
gcucaaggauuugauccca

SEQ ID NO: 2317543 - RNA, 19 nt, Artificial Sequence
  Description of Artificial Sequence: Synthetic oligonucleotide
caccggccagaacucucug

SEQ ID NO: 2317544 - RNA, 19 nt, Artificial Sequence
  Description of Artificial Sequence: Synthetic oligonucleotide
aggcagcgagcacuuccau

SEQ ID NO: 2317545 - RNA, 19 nt, Artificial Sequence
  Description of Artificial Sequence: Synthetic oligonucleotide
caagaccaucaaagcagcu

SEQ ID NO: 2317546 - RNA, 19 nt, Artificial Sequence
  Description of Artificial Sequence: Synthetic oligonucleotide
agaaucgaacagggccaaa

SEQ ID NO: 2317547 - RNA, 19 nt, Artificial Sequence
  Description of Artificial Sequence: Synthetic oligonucleotide
aggcgcgagccgagcagcg

SEQ ID NO: 2317548 - RNA, 19 nt, Artificial Sequence
  Description of Artificial Sequence: Synthetic oligonucleotide
caaggccgacuuccugcuc

SEQ ID NO: 2317549 - RNA, 19 nt, Artificial Sequence
  Description of Artificial Sequence: Synthetic oligonucleotide
augccccaugagaaugggu

SEQ ID NO: 2317550 - RNA, 19 nt, Artificial Sequence
  Description of Artificial Sequence: Synthetic oligonucleotide
gcagaccucauagccugac

SEQ ID NO: 2317551 - RNA, 19 nt, Artificial Sequence
  Description of Artificial Sequence: Synthetic oligonucleotide
ggccagaacucucuggguu

SEQ ID NO: 2317552 - RNA, 19 nt, Artificial Sequence
  Description of Artificial Sequence: Synthetic oligonucleotide
cugaccaguccaccaugua

SEQ ID NO: 2317553 - RNA, 19 nt, Artificial Sequence
  Description of Artificial Sequence: Synthetic oligonucleotide
gguuugguccaaacacuua

SEQ ID NO: 2317554 - RNA, 19 nt, Artificial Sequence
  Description of Artificial Sequence: Synthetic oligonucleotide
uggucuggcccggcugguc

SEQ ID NO: 2317555 - RNA, 19 nt, Artificial Sequence
  Description of Artificial Sequence: Synthetic oligonucleotide
uggcuuccccuuugcucuu

SEQ ID NO: 2317556 - RNA, 19 nt, Artificial Sequence
  Description of Artificial Sequence: Synthetic oligonucleotide
ccgagauguaguaguaagu

SEQ ID NO: 2317557 - RNA, 19 nt, Artificial Sequence
  Description of Artificial Sequence: Synthetic oligonucleotide
gcccagaggacaguccgca

SEQ ID NO: 2317558 - RNA, 19 nt, Artificial Sequence
  Description of Artificial Sequence: Synthetic oligonucleotide
ggcacagaugacauggcuu

SEQ ID NO: 2317559 - RNA, 19 nt, Artificial Sequence
  Description of Artificial Sequence: Synthetic oligonucleotide
ggggcagcagccgcaucgc

SEQ ID NO: 2317560 - RNA, 19 nt, Artificial Sequence
  Description of Artificial Sequence: Synthetic oligonucleotide
gccgcaucgccccuggggu

SEQ ID NO: 2317561 - RNA, 19 nt, Artificial Sequence
  Description of Artificial Sequence: Synthetic oligonucleotide
accccaaggccgacuuccu

SEQ ID NO: 2317562 - RNA, 19 nt, Artificial Sequence
  Description of Artificial Sequence: Synthetic oligonucleotide
cagcgcggcccagaggaca

SEQ ID NO: 2317563 - RNA, 19 nt, Artificial Sequence
  Description of Artificial Sequence: Synthetic oligonucleotide
gaagcagccugggguuagu

SEQ ID NO: 2317564 - RNA, 19 nt, Artificial Sequence
  Description of Artificial Sequence: Synthetic oligonucleotide
  modified_base (19)..(19): a, c, u, g, unknown or other
cagaacucucuggguuggn

SEQ ID NO: 2317565 - RNA, 19 nt, Artificial Sequence
  Description of Artificial Sequence: Synthetic oligonucleotide
aucgccccugggguccagu

SEQ ID NO: 2317566 - RNA, 19 nt, Artificial Sequence
  Description of Artificial Sequence: Synthetic oligonucleotide
cgaagcagccugggguuag

SEQ ID NO: 2317567 - RNA, 19 nt, Artificial Sequence
  Description of Artificial Sequence: Synthetic oligonucleotide
cgcaucgccccuggggucc

SEQ ID NO: 2317568 - RNA, 19 nt, Artificial Sequence
  Description of Artificial Sequence: Synthetic oligonucleotide
cgcgagccgagcagcgcgg

SEQ ID NO: 2317569 - RNA, 19 nt, Artificial Sequence
  Description of Artificial Sequence: Synthetic oligonucleotide
ggcuuccccuuugcucuug

SEQ ID NO: 2317570 - RNA, 19 nt, Artificial Sequence
  Description of Artificial Sequence: Synthetic oligonucleotide
gaguuccaguagacagggu

SEQ ID NO: 2317571 - RNA, 19 nt, Artificial Sequence
  Description of Artificial Sequence: Synthetic oligonucleotide
cccggaggcgcgagccgag

SEQ ID NO: 2317572 - RNA, 19 nt, Artificial Sequence
  Description of Artificial Sequence: Synthetic oligonucleotide
gugagcuaccaugccccau

SEQ ID NO: 2317573 - RNA, 19 nt, Artificial Sequence
  Description of Artificial Sequence: Synthetic oligonucleotide
gcaaagguuucaggucccu

SEQ ID NO: 2317574 - RNA, 19 nt, Artificial Sequence
  Description of Artificial Sequence: Synthetic oligonucleotide
gcccagggagaagggugug

SEQ ID NO: 2317575 - RNA, 19 nt, Artificial Sequence
  Description of Artificial Sequence: Synthetic oligonucleotide
ccaugagaaugggugauuu

SEQ ID NO: 2317576 - RNA, 19 nt, Artificial Sequence
  Description of Artificial Sequence: Synthetic oligonucleotide
cauccccucgaagcagccu

SEQ ID NO: 2317577 - RNA, 19 nt, Artificial Sequence
  Description of Artificial Sequence: Synthetic oligonucleotide
gcaccggccagaacucucu

SEQ ID NO: 2317578 - RNA, 19 nt, Artificial Sequence
  Description of Artificial Sequence: Synthetic oligonucleotide
gcggaggcuggagcacccc

SEQ ID NO: 2317579 - RNA, 19 nt, Artificial Sequence
  Description of Artificial Sequence: Synthetic oligonucleotide
cgagccgagcagcgcggcc

SEQ ID NO: 2317580 - RNA, 19 nt, Artificial Sequence
  Description of Artificial Sequence: Synthetic oligonucleotide
cccugggaagaguccuaga

SEQ ID NO: 2317581 - RNA, 19 nt, Artificial Sequence
  Description of Artificial Sequence: Synthetic oligonucleotide
ccgcaucgccccugggguc

SEQ ID NO: 2317582 - RNA, 19 nt, Artificial Sequence
  Description of Artificial Sequence: Synthetic oligonucleotide
gcgagccgagcagcgcggc

SEQ ID NO: 2317583 - RNA, 19 nt, Artificial Sequence
  Description of Artificial Sequence: Synthetic oligonucleotide
caucgccccugggguccag

SEQ ID NO: 2317584 - RNA, 19 nt, Artificial Sequence
  Description of Artificial Sequence: Synthetic oligonucleotide
ggcccugggcuuucauaau

SEQ ID NO: 2317585 - RNA, 19 nt, Artificial Sequence
  Description of Artificial Sequence: Synthetic oligonucleotide
cccaucaaaucccggucuu

SEQ ID NO: 2317586 - RNA, 19 nt, Artificial Sequence
  Description of Artificial Sequence: Synthetic oligonucleotide
ccaguccaccauguauaaa

SEQ ID NO: 2317587 - RNA, 19 nt, Artificial Sequence
  Description of Artificial Sequence: Synthetic oligonucleotide
ccccaguggcucaaggauu

SEQ ID NO: 2317588 - RNA, 19 nt, Artificial Sequence
  Description of Artificial Sequence: Synthetic oligonucleotide
gcagcgcggcccagaggac

SEQ ID NO: 2317589 - RNA, 19 nt, Artificial Sequence
  Description of Artificial Sequence: Synthetic oligonucleotide
  modified_base (8)..(8): a, c, u, g, unknown or other
ggguuggnaccgagaugua

SEQ ID NO: 2317590 - RNA, 19 nt, Artificial Sequence
  Description of Artificial Sequence: Synthetic oligonucleotide
cgcggcccagaggacaguc

SEQ ID NO: 2317591 - RNA, 19 nt, Artificial Sequence
  Description of Artificial Sequence: Synthetic oligonucleotide
gccugggguuaguggaguu

SEQ ID NO: 2317592 - RNA, 19 nt, Artificial Sequence
  Description of Artificial Sequence: Synthetic oligonucleotide
cccuuaccccaaggccgac

SEQ ID NO: 2317593 - RNA, 19 nt, Artificial Sequence
  Description of Artificial Sequence: Synthetic oligonucleotide
gcaucgccccuggggucca

SEQ ID NO: 2317594 - RNA, 19 nt, Artificial Sequence
  Description of Artificial Sequence: Synthetic oligonucleotide
ccuuaccccaaggccgacu

SEQ ID NO: 2317595 - RNA, 19 nt, Artificial Sequence
  Description of Artificial Sequence: Synthetic oligonucleotide
cccaugagaaugggugauu

SEQ ID NO: 2317596 - RNA, 19 nt, Artificial Sequence
  Description of Artificial Sequence: Synthetic oligonucleotide
ccaucgcuggaaggcauuu

SEQ ID NO: 2317597 - RNA, 19 nt, Artificial Sequence
  Description of Artificial Sequence: Synthetic oligonucleotide
ggccaggagcccacuuguu

SEQ ID NO: 2317598 - RNA, 19 nt, Artificial Sequence
  Description of Artificial Sequence: Synthetic oligonucleotide
cgccccugggguccagucu

SEQ ID NO: 2317599 - RNA, 19 nt, Artificial Sequence
  Description of Artificial Sequence: Synthetic oligonucleotide
gcgcggcccagaggacagu

SEQ ID NO: 2317600 - RNA, 19 nt, Artificial Sequence
  Description of Artificial Sequence: Synthetic oligonucleotide
  modified_base (1)..(1): a, c, u, g, unknown or other
naccgagauguaguaguaa

SEQ ID NO: 2317601 - RNA, 19 nt, Artificial Sequence
  Description of Artificial Sequence: Synthetic oligonucleotide
aaaucuaaaugccuaaggc

SEQ ID NO: 2317602 - RNA, 19 nt, Artificial Sequence
  Description of Artificial Sequence: Synthetic oligonucleotide
aggaacaaaaucuaaaugc

SEQ ID NO: 2317603 - RNA, 19 nt, Artificial Sequence
  Description of Artificial Sequence: Synthetic oligonucleotide
aauacacuaaagcauaguc

SEQ ID NO: 2317604 - RNA, 19 nt, Artificial Sequence
  Description of Artificial Sequence: Synthetic oligonucleotide
uaugagauaagcuuuauug

SEQ ID NO: 2317605 - RNA, 19 nt, Artificial Sequence
  Description of Artificial Sequence: Synthetic oligonucleotide
agcuuuauuguauagagac

SEQ ID NO: 2317606 - RNA, 19 nt, Artificial Sequence
  Description of Artificial Sequence: Synthetic oligonucleotide
ugguaaaagaaucugacag

SEQ ID NO: 2317607 - RNA, 19 nt, Artificial Sequence
  Description of Artificial Sequence: Synthetic oligonucleotide
aauucaauauuucuagcuc

SEQ ID NO: 2317608 - RNA, 19 nt, Artificial Sequence
  Description of Artificial Sequence: Synthetic oligonucleotide
uaucauaggaacaaaaucu

SEQ ID NO: 2317609 - RNA, 19 nt, Artificial Sequence
  Description of Artificial Sequence: Synthetic oligonucleotide
  modified_base (7)..(7): a, c, u, g, unknown or other
uuaucunucuuauuggugc

SEQ ID NO: 2317610 - RNA, 19 nt, Artificial Sequence
  Description of Artificial Sequence: Synthetic oligonucleotide
aaaagaaucugacaggacu

SEQ ID NO: 2317611 - RNA, 19 nt, Artificial Sequence
  Description of Artificial Sequence: Synthetic oligonucleotide
uauaauaacaccccaguga

SEQ ID NO: 2317612 - RNA, 19 nt, Artificial Sequence
  Description of Artificial Sequence: Synthetic oligonucleotide
aaaagaauagcuuuucuaa

SEQ ID NO: 2317613 - RNA, 19 nt, Artificial Sequence
  Description of Artificial Sequence: Synthetic oligonucleotide
aauaacaccccagugauag

SEQ ID NO: 2317614 - RNA, 19 nt, Artificial Sequence
  Description of Artificial Sequence: Synthetic oligonucleotide
auucaauauuucuagcucc

SEQ ID NO: 2317615 - RNA, 19 nt, Artificial Sequence
  Description of Artificial Sequence: Synthetic oligonucleotide
  modified_base (11)..(11): a, c, u, g, unknown or other
ucucuuaucunucuuauug

SEQ ID NO: 2317616 - RNA, 19 nt, Artificial Sequence
  Description of Artificial Sequence: Synthetic oligonucleotide
uguauagagacgcaaaaca

SEQ ID NO: 2317617 - RNA, 19 nt, Artificial Sequence
  Description of Artificial Sequence: Synthetic oligonucleotide
ucagaguagaacauguggg

SEQ ID NO: 2317618 - RNA, 19 nt, Artificial Sequence
  Description of Artificial Sequence: Synthetic oligonucleotide
aauaaacaagcgcuuuccc

SEQ ID NO: 2317619 - RNA, 19 nt, Artificial Sequence
  Description of Artificial Sequence: Synthetic oligonucleotide
uaagcuuuauuguauagag

SEQ ID NO: 2317620 - RNA, 19 nt, Artificial Sequence
  Description of Artificial Sequence: Synthetic oligonucleotide
uauagagacgcaaaacagg

SEQ ID NO: 2317621 - RNA, 19 nt, Artificial Sequence
  Description of Artificial Sequence: Synthetic oligonucleotide
uagaauucaauauuucuag

SEQ ID NO: 2317622 - RNA, 19 nt, Artificial Sequence
  Description of Artificial Sequence: Synthetic oligonucleotide
aacagggaagcuuuauagc

SEQ ID NO: 2317623 - RNA, 19 nt, Artificial Sequence
  Description of Artificial Sequence: Synthetic oligonucleotide
uuuucuaaaaggucagagg

SEQ ID NO: 2317624 - RNA, 19 nt, Artificial Sequence
  Description of Artificial Sequence: Synthetic oligonucleotide
uacacuaaagcauagucca

SEQ ID NO: 2317625 - RNA, 19 nt, Artificial Sequence
  Description of Artificial Sequence: Synthetic oligonucleotide
agcaucucgacuuuccugc

SEQ ID NO: 2317626 - RNA, 19 nt, Artificial Sequence
  Description of Artificial Sequence: Synthetic oligonucleotide
uucuuuagacauuaaagca

SEQ ID NO: 2317627 - RNA, 19 nt, Artificial Sequence
  Description of Artificial Sequence: Synthetic oligonucleotide
cuuuauuguauagagacgc

SEQ ID NO: 2317628 - RNA, 19 nt, Artificial Sequence
  Description of Artificial Sequence: Synthetic oligonucleotide
acagggaagcuuuauagcg

SEQ ID NO: 2317629 - RNA, 19 nt, Artificial Sequence
  Description of Artificial Sequence: Synthetic oligonucleotide
uuagacugagccuacauac

SEQ ID NO: 2317630 - RNA, 19 nt, Artificial Sequence
  Description of Artificial Sequence: Synthetic oligonucleotide
uaagugauuugucucaccc

SEQ ID NO: 2317631 - RNA, 19 nt, Artificial Sequence
  Description of Artificial Sequence: Synthetic oligonucleotide
uugaaucuuccuaucauag

SEQ ID NO: 2317632 - RNA, 19 nt, Artificial Sequence
  Description of Artificial Sequence: Synthetic oligonucleotide
ucuauaauaacaccccagu

SEQ ID NO: 2317633 - RNA, 19 nt, Artificial Sequence
  Description of Artificial Sequence: Synthetic oligonucleotide
uuaagcauggugucaaugc

SEQ ID NO: 2317634 - RNA, 19 nt, Artificial Sequence
  Description of Artificial Sequence: Synthetic oligonucleotide
uaucgucugaucaaauggg

SEQ ID NO: 2317635 - RNA, 19 nt, Artificial Sequence
  Description of Artificial Sequence: Synthetic oligonucleotide
acgacugcaauaaacaagc

SEQ ID NO: 2317636 - RNA, 19 nt, Artificial Sequence
  Description of Artificial Sequence: Synthetic oligonucleotide
agaauucaauauuucuagc

SEQ ID NO: 2317637 - RNA, 19 nt, Artificial Sequence
  Description of Artificial Sequence: Synthetic oligonucleotide
ucaacaaaagaauagcuuu

SEQ ID NO: 2317638 - RNA, 19 nt, Artificial Sequence
  Description of Artificial Sequence: Synthetic oligonucleotide
cuaucgucugaucaaaugg

SEQ ID NO: 2317639 - RNA, 19 nt, Artificial Sequence
  Description of Artificial Sequence: Synthetic oligonucleotide
gaacagggaagcuuuauag

SEQ ID NO: 2317640 - RNA, 19 nt, Artificial Sequence
  Description of Artificial Sequence: Synthetic oligonucleotide
ucugguaaaagaaucugac

SEQ ID NO: 2317641 - RNA, 19 nt, Artificial Sequence
  Description of Artificial Sequence: Synthetic oligonucleotide
uuaauugauuugaaaugag

SEQ ID NO: 2317642 - RNA, 19 nt, Artificial Sequence
  Description of Artificial Sequence: Synthetic oligonucleotide
uaaacaagcgcuuucccug

SEQ ID NO: 2317643 - RNA, 19 nt, Artificial Sequence
  Description of Artificial Sequence: Synthetic oligonucleotide
ugaaaugagaaaauguauu

SEQ ID NO: 2317644 - RNA, 19 nt, Artificial Sequence
  Description of Artificial Sequence: Synthetic oligonucleotide
acuaaagcauaguccacgc

SEQ ID NO: 2317645 - RNA, 19 nt, Artificial Sequence
  Description of Artificial Sequence: Synthetic oligonucleotide
  modified_base (10)..(10): a, c, u, g, unknown or other
cucuuaucunucuuauugg

SEQ ID NO: 2317646 - RNA, 19 nt, Artificial Sequence
  Description of Artificial Sequence: Synthetic oligonucleotide
uccacgcaaacuuagacug

SEQ ID NO: 2317647 - RNA, 19 nt, Artificial Sequence
  Description of Artificial Sequence: Synthetic oligonucleotide
ugagucacagccauuggag

SEQ ID NO: 2317648 - RNA, 19 nt, Artificial Sequence
  Description of Artificial Sequence: Synthetic oligonucleotide
uaaagcauaguccacgcaa

SEQ ID NO: 2317649 - RNA, 19 nt, Artificial Sequence
  Description of Artificial Sequence: Synthetic oligonucleotide
uucuauaauaacaccccag

SEQ ID NO: 2317650 - RNA, 19 nt, Artificial Sequence
  Description of Artificial Sequence: Synthetic oligonucleotide
gacauuaaagcaaacuuug

SEQ ID NO: 2317651 - RNA, 19 nt, Artificial Sequence
  Description of Artificial Sequence: Synthetic oligonucleotide
ugggauucuauaauaacac

SEQ ID NO: 2317652 - RNA, 19 nt, Artificial Sequence
  Description of Artificial Sequence: Synthetic oligonucleotide
gauucuauaauaacacccc

SEQ ID NO: 2317653 - RNA, 19 nt, Artificial Sequence
  Description of Artificial Sequence: Synthetic oligonucleotide
auacacuaaagcauagucc

SEQ ID NO: 2317654 - RNA, 19 nt, Artificial Sequence
  Description of Artificial Sequence: Synthetic oligonucleotide
agcuuuauagcgaggaucc

SEQ ID NO: 2317655 - RNA, 19 nt, Artificial Sequence
  Description of Artificial Sequence: Synthetic oligonucleotide
agaauagcuuuucuaaaag

SEQ ID NO: 2317656 - RNA, 19 nt, Artificial Sequence
  Description of Artificial Sequence: Synthetic oligonucleotide
uggaucauagggaugaccu

SEQ ID NO: 2317657 - RNA, 19 nt, Artificial Sequence
  Description of Artificial Sequence: Synthetic oligonucleotide
aagaauagcuuuucuaaaa

SEQ ID NO: 2317658 - RNA, 19 nt, Artificial Sequence
  Description of Artificial Sequence: Synthetic oligonucleotide
uaauugauuugaaaugaga

SEQ ID NO: 2317659 - RNA, 19 nt, Artificial Sequence
  Description of Artificial Sequence: Synthetic oligonucleotide
aaugccuaaggcuuuucug

SEQ ID NO: 2317660 - RNA, 19 nt, Artificial Sequence
  Description of Artificial Sequence: Synthetic oligonucleotide
uaggaacaaaaucuaaaug

SEQ ID NO: 2317661 - RNA, 19 nt, Artificial Sequence
  Description of Artificial Sequence: Synthetic oligonucleotide
gaaucuuccuaucauagga

SEQ ID NO: 2317662 - RNA, 19 nt, Artificial Sequence
  Description of Artificial Sequence: Synthetic oligonucleotide
aauaagugauuugucucac

SEQ ID NO: 2317663 - RNA, 19 nt, Artificial Sequence
  Description of Artificial Sequence: Synthetic oligonucleotide
auuuugauauccuugggau

SEQ ID NO: 2317664 - RNA, 19 nt, Artificial Sequence
  Description of Artificial Sequence: Synthetic oligonucleotide
acugcaauaaacaagcgcu

SEQ ID NO: 2317665 - RNA, 19 nt, Artificial Sequence
  Description of Artificial Sequence: Synthetic oligonucleotide
cucagaguagaacaugugg

SEQ ID NO: 2317666 - RNA, 19 nt, Artificial Sequence
  Description of Artificial Sequence: Synthetic oligonucleotide
aagcuuuauagcgaggauc

SEQ ID NO: 2317667 - RNA, 19 nt, Artificial Sequence
  Description of Artificial Sequence: Synthetic oligonucleotide
auaauaacaccccagugau

SEQ ID NO: 2317668 - RNA, 19 nt, Artificial Sequence
  Description of Artificial Sequence: Synthetic oligonucleotide
uuuggagucugguaaaaga

SEQ ID NO: 2317669 - RNA, 19 nt, Artificial Sequence
  Description of Artificial Sequence: Synthetic oligonucleotide
aguagaaucugagcuaucg

SEQ ID NO: 2317670 - RNA, 19 nt, Artificial Sequence
  Description of Artificial Sequence: Synthetic oligonucleotide
uucaauauuucuagcuccc

SEQ ID NO: 2317671 - RNA, 19 nt, Artificial Sequence
  Description of Artificial Sequence: Synthetic oligonucleotide
gaucauagggaugaccugg

SEQ ID NO: 2317672 - RNA, 19 nt, Artificial Sequence
  Description of Artificial Sequence: Synthetic oligonucleotide
uuugauauccuugggauuc

SEQ ID NO: 2317673 - RNA, 19 nt, Artificial Sequence
  Description of Artificial Sequence: Synthetic oligonucleotide
caaauaagugauuugucuc

SEQ ID NO: 2317674 - RNA, 19 nt, Artificial Sequence
  Description of Artificial Sequence: Synthetic oligonucleotide
ucacccauaauauuuaauu

SEQ ID NO: 2317675 - RNA, 19 nt, Artificial Sequence
  Description of Artificial Sequence: Synthetic oligonucleotide
ucugacgacugcaauaaac

SEQ ID NO: 2317676 - RNA, 19 nt, Artificial Sequence
  Description of Artificial Sequence: Synthetic oligonucleotide
cuuauuggugcaacgagug

SEQ ID NO: 2317677 - RNA, 19 nt, Artificial Sequence
  Description of Artificial Sequence: Synthetic oligonucleotide
uucaacaaaagaauagcuu

SEQ ID NO: 2317678 - RNA, 19 nt, Artificial Sequence
  Description of Artificial Sequence: Synthetic oligonucleotide
  modified_base (9)..(9): a, c, u, g, unknown or other
ucuuaucunucuuauuggu

SEQ ID NO: 2317679 - RNA, 19 nt, Artificial Sequence
  Description of Artificial Sequence: Synthetic oligonucleotide
gacugcaauaaacaagcgc

SEQ ID NO: 2317680 - RNA, 19 nt, Artificial Sequence
  Description of Artificial Sequence: Synthetic oligonucleotide
auagcgaggauccagcagu

SEQ ID NO: 2317681 - RNA, 19 nt, Artificial Sequence
  Description of Artificial Sequence: Synthetic oligonucleotide
ucauuuugauauccuuggg

SEQ ID NO: 2317682 - RNA, 19 nt, Artificial Sequence
  Description of Artificial Sequence: Synthetic oligonucleotide
ugagguagaauucaauauu

SEQ ID NO: 2317683 - RNA, 19 nt, Artificial Sequence
  Description of Artificial Sequence: Synthetic oligonucleotide
ugagauaagcuuuauugua

SEQ ID NO: 2317684 - RNA, 19 nt, Artificial Sequence
  Description of Artificial Sequence: Synthetic oligonucleotide
agugauaguugaaucuucc

SEQ ID NO: 2317685 - RNA, 19 nt, Artificial Sequence
  Description of Artificial Sequence: Synthetic oligonucleotide
uaagcauggugucaaugcc

SEQ ID NO: 2317686 - RNA, 19 nt, Artificial Sequence
  Description of Artificial Sequence: Synthetic oligonucleotide
aguccacgcaaacuuagac

SEQ ID NO: 2317687 - RNA, 19 nt, Artificial Sequence
  Description of Artificial Sequence: Synthetic oligonucleotide
uauuguauagagacgcaaa

SEQ ID NO: 2317688 - RNA, 19 nt, Artificial Sequence
  Description of Artificial Sequence: Synthetic oligonucleotide
ugauaguugaaucuuccua

SEQ ID NO: 2317689 - RNA, 19 nt, Artificial Sequence
  Description of Artificial Sequence: Synthetic oligonucleotide
uucccuguuaacaagcuau

SEQ ID NO: 2317690 - RNA, 19 nt, Artificial Sequence
  Description of Artificial Sequence: Synthetic oligonucleotide
aagcauaguccacgcaaac

SEQ ID NO: 2317691 - RNA, 19 nt, Artificial Sequence
  Description of Artificial Sequence: Synthetic oligonucleotide
ucugagguagaauucaaua

SEQ ID NO: 2317692 - RNA, 19 nt, Artificial Sequence
  Description of Artificial Sequence: Synthetic oligonucleotide
  modified_base (8)..(8): a, c, u, g, unknown or other
acaggcunuccccugugcc

SEQ ID NO: 2317693 - RNA, 19 nt, Artificial Sequence
  Description of Artificial Sequence: Synthetic oligonucleotide
ugauuugucucacccauaa

SEQ ID NO: 2317694 - RNA, 19 nt, Artificial Sequence
  Description of Artificial Sequence: Synthetic oligonucleotide
aagcauggugucaaugccc

SEQ ID NO: 2317695 - RNA, 19 nt, Artificial Sequence
  Description of Artificial Sequence: Synthetic oligonucleotide
uuaagucuugccuguacug

SEQ ID NO: 2317696 - RNA, 19 nt, Artificial Sequence
  Description of Artificial Sequence: Synthetic oligonucleotide
auaaacaagcgcuuucccu

SEQ ID NO: 2317697 - RNA, 19 nt, Artificial Sequence
  Description of Artificial Sequence: Synthetic oligonucleotide
uccaaguucaucauuuaua

SEQ ID NO: 2317698 - RNA, 19 nt, Artificial Sequence
  Description of Artificial Sequence: Synthetic oligonucleotide
  modified_base (8)..(8): a, c, u, g, unknown or other
cuuaucunucuuauuggug

SEQ ID NO: 2317699 - RNA, 19 nt, Artificial Sequence
  Description of Artificial Sequence: Synthetic oligonucleotide
uagaaucugagcuaucguc

SEQ ID NO: 2317700 - RNA, 19 nt, Artificial Sequence
  Description of Artificial Sequence: Synthetic oligonucleotide
ugucucacccauaauauuu

SEQ ID NO: 2317701 - RNA, 19 nt, Artificial Sequence
  Description of Artificial Sequence: Synthetic oligonucleotide
acaagcuaucuccucaaag

SEQ ID NO: 2317702 - RNA, 19 nt, Artificial Sequence
  Description of Artificial Sequence: Synthetic oligonucleotide
uuggagucugguaaaagaa

SEQ ID NO: 2317703 - RNA, 19 nt, Artificial Sequence
  Description of Artificial Sequence: Synthetic oligonucleotide
ugagccuacauacaguauu

SEQ ID NO: 2317704 - RNA, 19 nt, Artificial Sequence
  Description of Artificial Sequence: Synthetic oligonucleotide
aacaaaaucuaaaugccua

SEQ ID NO: 2317705 - RNA, 19 nt, Artificial Sequence
  Description of Artificial Sequence: Synthetic oligonucleotide
  modified_base (15)..(15): a, c, u, g, unknown or other
agugaccacaggcunuccc

SEQ ID NO: 2317706 - RNA, 19 nt, Artificial Sequence
  Description of Artificial Sequence: Synthetic oligonucleotide
uauagcgaggauccagcag

SEQ ID NO: 2317707 - RNA, 19 nt, Artificial Sequence
  Description of Artificial Sequence: Synthetic oligonucleotide
ucuuccuaucauaggaaca

SEQ ID NO: 2317708 - RNA, 19 nt, Artificial Sequence
  Description of Artificial Sequence: Synthetic oligonucleotide
  modified_base (3)..(3): a, c, u, g, unknown or other
cunucuuauuggugcaacg

SEQ ID NO: 2317709 - RNA, 19 nt, Artificial Sequence
  Description of Artificial Sequence: Synthetic oligonucleotide
agagacgcaaaacagguua

SEQ ID NO: 2317710 - RNA, 19 nt, Artificial Sequence
  Description of Artificial Sequence: Synthetic oligonucleotide
uuuaaguggggacccugag

SEQ ID NO: 2317711 - RNA, 19 nt, Artificial Sequence
  Description of Artificial Sequence: Synthetic oligonucleotide
aaaugccuaaggcuuuucu

SEQ ID NO: 2317712 - RNA, 19 nt, Artificial Sequence
  Description of Artificial Sequence: Synthetic oligonucleotide
auuaagucuugccuguacu

SEQ ID NO: 2317713 - RNA, 19 nt, Artificial Sequence
  Description of Artificial Sequence: Synthetic oligonucleotide
uguuaacaagcuaucuccu

SEQ ID NO: 2317714 - RNA, 19 nt, Artificial Sequence
  Description of Artificial Sequence: Synthetic oligonucleotide
ggauucuauaauaacaccc

SEQ ID NO: 2317715 - RNA, 19 nt, Artificial Sequence
  Description of Artificial Sequence: Synthetic oligonucleotide
uauccuugggauucuauaa

SEQ ID NO: 2317716 - RNA, 19 nt, Artificial Sequence
  Description of Artificial Sequence: Synthetic oligonucleotide
auuguauagagacgcaaaa

SEQ ID NO: 2317717 - RNA, 19 nt, Artificial Sequence
  Description of Artificial Sequence: Synthetic oligonucleotide
cagaguagaacaugugggc

SEQ ID NO: 2317718 - RNA, 19 nt, Artificial Sequence
  Description of Artificial Sequence: Synthetic oligonucleotide
gacgacugcaauaaacaag

SEQ ID NO: 2317719 - RNA, 19 nt, Artificial Sequence
  Description of Artificial Sequence: Synthetic oligonucleotide
aagaugguaccuggggucg

SEQ ID NO: 2317720 - RNA, 19 nt, Artificial Sequence
  Description of Artificial Sequence: Synthetic oligonucleotide
ucgucugaucaaaugggag

SEQ ID NO: 2317721 - RNA, 19 nt, Artificial Sequence
  Description of Artificial Sequence: Synthetic oligonucleotide
ucuagcucccugauuaagu

SEQ ID NO: 2317722 - RNA, 19 nt, Artificial Sequence
  Description of Artificial Sequence: Synthetic oligonucleotide
  modified_base (2)..(2): a, c, u, g, unknown or other
unucuuauuggugcaacga

SEQ ID NO: 2317723 - RNA, 19 nt, Artificial Sequence
  Description of Artificial Sequence: Synthetic oligonucleotide
cuugggauucuauaauaac

SEQ ID NO: 2317724 - RNA, 19 nt, Artificial Sequence
  Description of Artificial Sequence: Synthetic oligonucleotide
caauaaacaagcgcuuucc

SEQ ID NO: 2317725 - RNA, 19 nt, Artificial Sequence
  Description of Artificial Sequence: Synthetic oligonucleotide
auugucuccccaaagagca

SEQ ID NO: 2317726 - RNA, 19 nt, Artificial Sequence
  Description of Artificial Sequence: Synthetic oligonucleotide
aaaugagaaaauguauuuu

SEQ ID NO: 2317727 - RNA, 19 nt, Artificial Sequence
  Description of Artificial Sequence: Synthetic oligonucleotide
cauuaaagcaaacuuugga

SEQ ID NO: 2317728 - RNA, 19 nt, Artificial Sequence
  Description of Artificial Sequence: Synthetic oligonucleotide
cuauaauaacaccccagug

SEQ ID NO: 2317729 - RNA, 19 nt, Artificial Sequence
  Description of Artificial Sequence: Synthetic oligonucleotide
  modified_base (14)..(14): a, c, u, g, unknown or other
gugaccacaggcunucccc

SEQ ID NO: 2317730 - RNA, 19 nt, Artificial Sequence
  Description of Artificial Sequence: Synthetic oligonucleotide
uuuucugacgacugcaaua

SEQ ID NO: 2317731 - RNA, 19 nt, Artificial Sequence
  Description of Artificial Sequence: Synthetic oligonucleotide
gaugaccuggcucagagua

SEQ ID NO: 2317732 - RNA, 19 nt, Artificial Sequence
  Description of Artificial Sequence: Synthetic oligonucleotide
ucauaggaacaaaaucuaa

SEQ ID NO: 2317733 - RNA, 19 nt, Artificial Sequence
  Description of Artificial Sequence: Synthetic oligonucleotide
ucuuaugagauaagcuuua

SEQ ID NO: 2317734 - RNA, 19 nt, Artificial Sequence
  Description of Artificial Sequence: Synthetic oligonucleotide
auucuauaauaacacccca

SEQ ID NO: 2317735 - RNA, 19 nt, Artificial Sequence
  Description of Artificial Sequence: Synthetic oligonucleotide
gucagaggcaaauaaguga

SEQ ID NO: 2317736 - RNA, 19 nt, Artificial Sequence
  Description of Artificial Sequence: Synthetic oligonucleotide
uuucugacgacugcaauaa

SEQ ID NO: 2317737 - RNA, 19 nt, Artificial Sequence
  Description of Artificial Sequence: Synthetic oligonucleotide
agggaagcuuuauagcgag

SEQ ID NO: 2317738 - RNA, 19 nt, Artificial Sequence
  Description of Artificial Sequence: Synthetic oligonucleotide
aagugauuugucucaccca

SEQ ID NO: 2317739 - RNA, 19 nt, Artificial Sequence
  Description of Artificial Sequence: Synthetic oligonucleotide
uccuaucauaggaacaaaa

SEQ ID NO: 2317740 - RNA, 19 nt, Artificial Sequence
  Description of Artificial Sequence: Synthetic oligonucleotide
auuggugcaacgagugacc

SEQ ID NO: 2317741 - RNA, 19 nt, Artificial Sequence
  Description of Artificial Sequence: Synthetic oligonucleotide
auagagacgcaaaacaggu

SEQ ID NO: 2317742 - RNA, 19 nt, Artificial Sequence
  Description of Artificial Sequence: Synthetic oligonucleotide
ugccagugucuuuaagugg

SEQ ID NO: 2317743 - RNA, 19 nt, Artificial Sequence
  Description of Artificial Sequence: Synthetic oligonucleotide
aaagcaaacuuuggagucu

SEQ ID NO: 2317744 - RNA, 19 nt, Artificial Sequence
  Description of Artificial Sequence: Synthetic oligonucleotide
acaaaaucuaaaugccuaa

SEQ ID NO: 2317745 - RNA, 19 nt, Artificial Sequence
  Description of Artificial Sequence: Synthetic oligonucleotide
  modified_base (13)..(13): a, c, u, g, unknown or other
ucucucuuaucunucuuau

SEQ ID NO: 2317746 - RNA, 19 nt, Artificial Sequence
  Description of Artificial Sequence: Synthetic oligonucleotide
ugagcuaucgucugaucaa

SEQ ID NO: 2317747 - RNA, 19 nt, Artificial Sequence
  Description of Artificial Sequence: Synthetic oligonucleotide
gaguagaacaugugggcac

SEQ ID NO: 2317748 - RNA, 19 nt, Artificial Sequence
  Description of Artificial Sequence: Synthetic oligonucleotide
cauaggaacaaaaucuaaa

SEQ ID NO: 2317749 - RNA, 19 nt, Artificial Sequence
  Description of Artificial Sequence: Synthetic oligonucleotide
aggcaaauaagugauuugu

SEQ ID NO: 2317750 - RNA, 19 nt, Artificial Sequence
  Description of Artificial Sequence: Synthetic oligonucleotide
uuauuguauagagacgcaa

SEQ ID NO: 2317751 - RNA, 19 nt, Artificial Sequence
  Description of Artificial Sequence: Synthetic oligonucleotide
gaggcaaauaagugauuug

SEQ ID NO: 2317752 - RNA, 19 nt, Artificial Sequence
  Description of Artificial Sequence: Synthetic oligonucleotide
  modified_base (6)..(6): a, c, u, g, unknown or other
uaucunucuuauuggugca

SEQ ID NO: 2317753 - RNA, 19 nt, Artificial Sequence
  Description of Artificial Sequence: Synthetic oligonucleotide
uuguauagagacgcaaaac

SEQ ID NO: 2317754 - RNA, 19 nt, Artificial Sequence
  Description of Artificial Sequence: Synthetic oligonucleotide
cauuuugauauccuuggga

SEQ ID NO: 2317755 - RNA, 19 nt, Artificial Sequence
  Description of Artificial Sequence: Synthetic oligonucleotide
aggacuucauuuugauauc

SEQ ID NO: 2317756 - RNA, 19 nt, Artificial Sequence
  Description of Artificial Sequence: Synthetic oligonucleotide
aaacaagcgcuuucccugu

SEQ ID NO: 2317757 - RNA, 19 nt, Artificial Sequence
  Description of Artificial Sequence: Synthetic oligonucleotide
caauauuucuagcucccug

SEQ ID NO: 2317758 - RNA, 19 nt, Artificial Sequence
  Description of Artificial Sequence: Synthetic oligonucleotide
  modified_base (4)..(4): a, c, u, g, unknown or other
ucunucuuauuggugcaac

SEQ ID NO: 2317759 - RNA, 19 nt, Artificial Sequence
  Description of Artificial Sequence: Synthetic oligonucleotide
gaaaugagaaaauguauuu

SEQ ID NO: 2317760 - RNA, 19 nt, Artificial Sequence
  Description of Artificial Sequence: Synthetic oligonucleotide
aaagaaucugacaggacuu

SEQ ID NO: 2317761 - RNA, 19 nt, Artificial Sequence
  Description of Artificial Sequence: Synthetic oligonucleotide
cugacgacugcaauaaaca

SEQ ID NO: 2317762 - RNA, 19 nt, Artificial Sequence
  Description of Artificial Sequence: Synthetic oligonucleotide
gugccagugucuuuaagug

SEQ ID NO: 2317763 - RNA, 19 nt, Artificial Sequence
  Description of Artificial Sequence: Synthetic oligonucleotide
ugaacagggaagcuuuaua

SEQ ID NO: 2317764 - RNA, 19 nt, Artificial Sequence
  Description of Artificial Sequence: Synthetic oligonucleotide
ugacaggacuucauuuuga

SEQ ID NO: 2317765 - RNA, 19 nt, Artificial Sequence
  Description of Artificial Sequence: Synthetic oligonucleotide
agggacuuaagcauggugu

SEQ ID NO: 2317766 - RNA, 19 nt, Artificial Sequence
  Description of Artificial Sequence: Synthetic oligonucleotide
acuucuuaugagauaagcu

SEQ ID NO: 2317767 - RNA, 19 nt, Artificial Sequence
  Description of Artificial Sequence: Synthetic oligonucleotide
caggacuucauuuugauau

SEQ ID NO: 2317768 - RNA, 19 nt, Artificial Sequence
  Description of Artificial Sequence: Synthetic oligonucleotide
agugcacacuucuuaugag

SEQ ID NO: 2317769 - RNA, 19 nt, Artificial Sequence
  Description of Artificial Sequence: Synthetic oligonucleotide
uuauuggugcaacgaguga

SEQ ID NO: 2317770 - RNA, 19 nt, Artificial Sequence
  Description of Artificial Sequence: Synthetic oligonucleotide
acugagccuacauacagua

SEQ ID NO: 2317771 - RNA, 19 nt, Artificial Sequence
  Description of Artificial Sequence: Synthetic oligonucleotide
uuaugagauaagcuuuauu

SEQ ID NO: 2317772 - RNA, 19 nt, Artificial Sequence
  Description of Artificial Sequence: Synthetic oligonucleotide
aaagagcaucucgacuuuc

SEQ ID NO: 2317773 - RNA, 19 nt, Artificial Sequence
  Description of Artificial Sequence: Synthetic oligonucleotide
guagaauucaauauuucua

SEQ ID NO: 2317774 - RNA, 19 nt, Artificial Sequence
  Description of Artificial Sequence: Synthetic oligonucleotide
aaacuuagacugagccuac

SEQ ID NO: 2317775 - RNA, 19 nt, Artificial Sequence
  Description of Artificial Sequence: Synthetic oligonucleotide
aaucugagcuaucgucuga

SEQ ID NO: 2317776 - RNA, 19 nt, Artificial Sequence
  Description of Artificial Sequence: Synthetic oligonucleotide
gcaacgagugaccacaggc

SEQ ID NO: 2317777 - RNA, 19 nt, Artificial Sequence
  Description of Artificial Sequence: Synthetic oligonucleotide
ucuaaaugccuaaggcuuu

SEQ ID NO: 2317778 - RNA, 19 nt, Artificial Sequence
  Description of Artificial Sequence: Synthetic oligonucleotide
uuauagcgaggauccagca

SEQ ID NO: 2317779 - RNA, 19 nt, Artificial Sequence
  Description of Artificial Sequence: Synthetic oligonucleotide
cuugccauggcuuccuuca

SEQ ID NO: 2317780 - RNA, 19 nt, Artificial Sequence
  Description of Artificial Sequence: Synthetic oligonucleotide
aagcgcuuucccuguuaac

SEQ ID NO: 2317781 - RNA, 19 nt, Artificial Sequence
  Description of Artificial Sequence: Synthetic oligonucleotide
agacgcaaaacagguuagc

SEQ ID NO: 2317782 - RNA, 19 nt, Artificial Sequence
  Description of Artificial Sequence: Synthetic oligonucleotide
ugacgacugcaauaaacaa

SEQ ID NO: 2317783 - RNA, 19 nt, Artificial Sequence
  Description of Artificial Sequence: Synthetic oligonucleotide
caaacuuagacugagccua

SEQ ID NO: 2317784 - RNA, 19 nt, Artificial Sequence
  Description of Artificial Sequence: Synthetic oligonucleotide
cuagcucccugauuaaguc

SEQ ID NO: 2317785 - RNA, 19 nt, Artificial Sequence
  Description of Artificial Sequence: Synthetic oligonucleotide
aauccaaguucaucauuua

SEQ ID NO: 2317786 - RNA, 19 nt, Artificial Sequence
  Description of Artificial Sequence: Synthetic oligonucleotide
aagcaaacuuuggagucug

SEQ ID NO: 2317787 - RNA, 19 nt, Artificial Sequence
  Description of Artificial Sequence: Synthetic oligonucleotide
agcgcuuucccuguuaaca

SEQ ID NO: 2317788 - RNA, 19 nt, Artificial Sequence
  Description of Artificial Sequence: Synthetic oligonucleotide
aucucgacuuuccugcuga

SEQ ID NO: 2317789 - RNA, 19 nt, Artificial Sequence
  Description of Artificial Sequence: Synthetic oligonucleotide
ucccugauuaagucuugcc

SEQ ID NO: 2317790 - RNA, 19 nt, Artificial Sequence
  Description of Artificial Sequence: Synthetic oligonucleotide
aucauagggaugaccuggc

SEQ ID NO: 2317791 - RNA, 19 nt, Artificial Sequence
  Description of Artificial Sequence: Synthetic oligonucleotide
agacauuaaagcaaacuuu

SEQ ID NO: 2317792 - RNA, 19 nt, Artificial Sequence
  Description of Artificial Sequence: Synthetic oligonucleotide
ugcaacgagugaccacagg

SEQ ID NO: 2317793 - RNA, 19 nt, Artificial Sequence
  Description of Artificial Sequence: Synthetic oligonucleotide
uguggcaaagaugguaccu

SEQ ID NO: 2317794 - RNA, 19 nt, Artificial Sequence
  Description of Artificial Sequence: Synthetic oligonucleotide
uuuugauauccuugggauu

SEQ ID NO: 2317795 - RNA, 19 nt, Artificial Sequence
  Description of Artificial Sequence: Synthetic oligonucleotide
gagcaucucgacuuuccug

SEQ ID NO: 2317796 - RNA, 19 nt, Artificial Sequence
  Description of Artificial Sequence: Synthetic oligonucleotide
cugacaggacuucauuuug

SEQ ID NO: 2317797 - RNA, 19 nt, Artificial Sequence
  Description of Artificial Sequence: Synthetic oligonucleotide
agaguagaacaugugggca

SEQ ID NO: 2317798 - RNA, 19 nt, Artificial Sequence
  Description of Artificial Sequence: Synthetic oligonucleotide
agguagaauucaauauuuc

SEQ ID NO: 2317799 - RNA, 19 nt, Artificial Sequence
  Description of Artificial Sequence: Synthetic oligonucleotide
ucuuuaaguggggacccug

SEQ ID NO: 2317800 - RNA, 19 nt, Artificial Sequence
  Description of Artificial Sequence: Synthetic oligonucleotide
uccuugggauucuauaaua

SEQ ID NO: 2317801 - RNA, 19 nt, Artificial Sequence
  Description of Artificial Sequence: Synthetic oligonucleotide
aaagcauaguccacgcaaa

SEQ ID NO: 2317802 - RNA, 19 nt, Artificial Sequence
  Description of Artificial Sequence: Synthetic oligonucleotide
cuuaagcauggugucaaug

SEQ ID NO: 2317803 - RNA, 19 nt, Artificial Sequence
  Description of Artificial Sequence: Synthetic oligonucleotide
caagcuaucuccucaaagu

SEQ ID NO: 2317804 - RNA, 19 nt, Artificial Sequence
  Description of Artificial Sequence: Synthetic oligonucleotide
gacuuuccugcugaggaug

SEQ ID NO: 2317805 - RNA, 19 nt, Artificial Sequence
  Description of Artificial Sequence: Synthetic oligonucleotide
gggauucuauaauaacacc

SEQ ID NO: 2317806 - RNA, 19 nt, Artificial Sequence
  Description of Artificial Sequence: Synthetic oligonucleotide
cugagcuaucgucugauca

SEQ ID NO: 2317807 - RNA, 19 nt, Artificial Sequence
  Description of Artificial Sequence: Synthetic oligonucleotide
guaccuggggucguggagg

SEQ ID NO: 2317808 - RNA, 19 nt, Artificial Sequence
  Description of Artificial Sequence: Synthetic oligonucleotide
gguagaauucaauauuucu

SEQ ID NO: 2317809 - RNA, 19 nt, Artificial Sequence
  Description of Artificial Sequence: Synthetic oligonucleotide
gagacgcaaaacagguuag

SEQ ID NO: 2317810 - RNA, 19 nt, Artificial Sequence
  Description of Artificial Sequence: Synthetic oligonucleotide
aagcuuuauuguauagaga

SEQ ID NO: 2317811 - RNA, 19 nt, Artificial Sequence
  Description of Artificial Sequence: Synthetic oligonucleotide
agucagugcacacuucuua

SEQ ID NO: 2317812 - RNA, 19 nt, Artificial Sequence
  Description of Artificial Sequence: Synthetic oligonucleotide
cugguaaaagaaucugaca

SEQ ID NO: 2317813 - RNA, 19 nt, Artificial Sequence
  Description of Artificial Sequence: Synthetic oligonucleotide
ucugugaacagggaagcuu

SEQ ID NO: 2317814 - RNA, 19 nt, Artificial Sequence
  Description of Artificial Sequence: Synthetic oligonucleotide
acuuagacugagccuacau

SEQ ID NO: 2317815 - RNA, 19 nt, Artificial Sequence
  Description of Artificial Sequence: Synthetic oligonucleotide
auccaaguucaucauuuau

SEQ ID NO: 2317816 - RNA, 19 nt, Artificial Sequence
  Description of Artificial Sequence: Synthetic oligonucleotide
  modified_base (13)..(13): a, c, u, g, unknown or other
ugaccacaggcunuccccu

SEQ ID NO: 2317817 - RNA, 19 nt, Artificial Sequence
  Description of Artificial Sequence: Synthetic oligonucleotide
caaaguagaaucugagcua

SEQ ID NO: 2317818 - RNA, 19 nt, Artificial Sequence
  Description of Artificial Sequence: Synthetic oligonucleotide
auauuucuagcucccugau

SEQ ID NO: 2317819 - RNA, 19 nt, Artificial Sequence
  Description of Artificial Sequence: Synthetic oligonucleotide
ugccuaaggcuuuucugac

SEQ ID NO: 2317820 - RNA, 19 nt, Artificial Sequence
  Description of Artificial Sequence: Synthetic oligonucleotide
uucuagcucccugauuaag

SEQ ID NO: 2317821 - RNA, 19 nt, Artificial Sequence
  Description of Artificial Sequence: Synthetic oligonucleotide
cacgcaaacuuagacugag

SEQ ID NO: 2317822 - RNA, 19 nt, Artificial Sequence
  Description of Artificial Sequence: Synthetic oligonucleotide
  modified_base (2)..(2): a, c, u, g, unknown or other
unuccccugugccaguguc

SEQ ID NO: 2317823 - RNA, 19 nt, Artificial Sequence
  Description of Artificial Sequence: Synthetic oligonucleotide
auacaguauuucaacaaaa

SEQ ID NO: 2317824 - RNA, 19 nt, Artificial Sequence
  Description of Artificial Sequence: Synthetic oligonucleotide
aaaaggucagaggcaaaua

SEQ ID NO: 2317825 - RNA, 19 nt, Artificial Sequence
  Description of Artificial Sequence: Synthetic oligonucleotide
gcuaucgucugaucaaaug

SEQ ID NO: 2317826 - RNA, 19 nt, Artificial Sequence
  Description of Artificial Sequence: Synthetic oligonucleotide
ucaauauuucuagcucccu

SEQ ID NO: 2317827 - RNA, 19 nt, Artificial Sequence
  Description of Artificial Sequence: Synthetic oligonucleotide
acgcaaaacagguuagcuu

SEQ ID NO: 2317828 - RNA, 19 nt, Artificial Sequence
  Description of Artificial Sequence: Synthetic oligonucleotide
aucauaggaacaaaaucua

SEQ ID NO: 2317829 - RNA, 19 nt, Artificial Sequence
  Description of Artificial Sequence: Synthetic oligonucleotide
gcaaauaagugauuugucu

SEQ ID NO: 2317830 - RNA, 19 nt, Artificial Sequence
  Description of Artificial Sequence: Synthetic oligonucleotide
uuucccuguuaacaagcua

SEQ ID NO: 2317831 - RNA, 19 nt, Artificial Sequence
  Description of Artificial Sequence: Synthetic oligonucleotide
cuuccuaucauaggaacaa

SEQ ID NO: 2317832 - RNA, 19 nt, Artificial Sequence
  Description of Artificial Sequence: Synthetic oligonucleotide
gcuuuauuguauagagacg

SEQ ID NO: 2317833 - RNA, 19 nt, Artificial Sequence
  Description of Artificial Sequence: Synthetic oligonucleotide
cgcaaaacagguuagcuuc

SEQ ID NO: 2317834 - RNA, 19 nt, Artificial Sequence
  Description of Artificial Sequence: Synthetic oligonucleotide
uaguccacgcaaacuuaga

SEQ ID NO: 2317835 - RNA, 19 nt, Artificial Sequence
  Description of Artificial Sequence: Synthetic oligonucleotide
uggccguguccucugaggu

SEQ ID NO: 2317836 - RNA, 19 nt, Artificial Sequence
  Description of Artificial Sequence: Synthetic oligonucleotide
ucucacccauaauauuuaa

SEQ ID NO: 2317837 - RNA, 19 nt, Artificial Sequence
  Description of Artificial Sequence: Synthetic oligonucleotide
cagugauaguugaaucuuc

SEQ ID NO: 2317838 - RNA, 19 nt, Artificial Sequence
  Description of Artificial Sequence: Synthetic oligonucleotide
gaacaaaaucuaaaugccu

SEQ ID NO: 2317839 - RNA, 19 nt, Artificial Sequence
  Description of Artificial Sequence: Synthetic oligonucleotide
gaggauccagcaguguggc

SEQ ID NO: 2317840 - RNA, 19 nt, Artificial Sequence
  Description of Artificial Sequence: Synthetic oligonucleotide
aacaccccagugauaguug

SEQ ID NO: 2317841 - RNA, 19 nt, Artificial Sequence
  Description of Artificial Sequence: Synthetic oligonucleotide
cagugcacacuucuuauga

SEQ ID NO: 2317842 - RNA, 19 nt, Artificial Sequence
  Description of Artificial Sequence: Synthetic oligonucleotide
ucccuguuaacaagcuauc

SEQ ID NO: 2317843 - RNA, 19 nt, Artificial Sequence
  Description of Artificial Sequence: Synthetic oligonucleotide
cgcaaacuuagacugagcc

SEQ ID NO: 2317844 - RNA, 19 nt, Artificial Sequence
  Description of Artificial Sequence: Synthetic oligonucleotide
uaacaccccagugauaguu

SEQ ID NO: 2317845 - RNA, 19 nt, Artificial Sequence
  Description of Artificial Sequence: Synthetic oligonucleotide
acacuaaagcauaguccac

SEQ ID NO: 2317846 - RNA, 19 nt, Artificial Sequence
  Description of Artificial Sequence: Synthetic oligonucleotide
cuugccuguacugcucugc

SEQ ID NO: 2317847 - RNA, 19 nt, Artificial Sequence
  Description of Artificial Sequence: Synthetic oligonucleotide
  modified_base (14)..(14): a, c, u, g, unknown or other
cucucucuuaucunucuua

SEQ ID NO: 2317848 - RNA, 19 nt, Artificial Sequence
  Description of Artificial Sequence: Synthetic oligonucleotide
guggccguguccucugagg

SEQ ID NO: 2317849 - RNA, 19 nt, Artificial Sequence
  Description of Artificial Sequence: Synthetic oligonucleotide
gggaugaccuggcucagag

SEQ ID NO: 2317850 - RNA, 19 nt, Artificial Sequence
  Description of Artificial Sequence: Synthetic oligonucleotide
agcauaguccacgcaaacu

SEQ ID NO: 2317851 - RNA, 19 nt, Artificial Sequence
  Description of Artificial Sequence: Synthetic oligonucleotide
ucauagggaugaccuggcu

SEQ ID NO: 2317852 - RNA, 19 nt, Artificial Sequence
  Description of Artificial Sequence: Synthetic oligonucleotide
cuuuaaguggggacccuga

SEQ ID NO: 2317853 - RNA, 19 nt, Artificial Sequence
  Description of Artificial Sequence: Synthetic oligonucleotide
ccaaguucaucauuuauaa

SEQ ID NO: 2317854 - RNA, 19 nt, Artificial Sequence
  Description of Artificial Sequence: Synthetic oligonucleotide
aaguagaaucugagcuauc

SEQ ID NO: 2317855 - RNA, 19 nt, Artificial Sequence
  Description of Artificial Sequence: Synthetic oligonucleotide
uaauaacaccccagugaua

SEQ ID NO: 2317856 - RNA, 19 nt, Artificial Sequence
  Description of Artificial Sequence: Synthetic oligonucleotide
ggagucugguaaaagaauc

SEQ ID NO: 2317857 - RNA, 19 nt, Artificial Sequence
  Description of Artificial Sequence: Synthetic oligonucleotide
gcaauaaacaagcgcuuuc

SEQ ID NO: 2317858 - RNA, 19 nt, Artificial Sequence
  Description of Artificial Sequence: Synthetic oligonucleotide
uagcgaggauccagcagug

SEQ ID NO: 2317859 - RNA, 19 nt, Artificial Sequence
  Description of Artificial Sequence: Synthetic oligonucleotide
gucugguaaaagaaucuga

SEQ ID NO: 2317860 - RNA, 19 nt, Artificial Sequence
  Description of Artificial Sequence: Synthetic oligonucleotide
uagaacaugugggcacuca

SEQ ID NO: 2317861 - RNA, 19 nt, Artificial Sequence
  Description of Artificial Sequence: Synthetic oligonucleotide
ggugcaacgagugaccaca

SEQ ID NO: 2317862 - RNA, 19 nt, Artificial Sequence
  Description of Artificial Sequence: Synthetic oligonucleotide
accuggcucagaguagaac

SEQ ID NO: 2317863 - RNA, 19 nt, Artificial Sequence
  Description of Artificial Sequence: Synthetic oligonucleotide
  modified_base (15)..(15): a, c, u, g, unknown or other
ucucucucuuaucunucuu

SEQ ID NO: 2317864 - RNA, 19 nt, Artificial Sequence
  Description of Artificial Sequence: Synthetic oligonucleotide
gagauaagcuuuauuguau

SEQ ID NO: 2317865 - RNA, 19 nt, Artificial Sequence
  Description of Artificial Sequence: Synthetic oligonucleotide
acaccccagugauaguuga

SEQ ID NO: 2317866 - RNA, 19 nt, Artificial Sequence
  Description of Artificial Sequence: Synthetic oligonucleotide
cugagguagaauucaauau

SEQ ID NO: 2317867 - RNA, 19 nt, Artificial Sequence
  Description of Artificial Sequence: Synthetic oligonucleotide
cuuagacugagccuacaua

SEQ ID NO: 2317868 - RNA, 19 nt, Artificial Sequence
  Description of Artificial Sequence: Synthetic oligonucleotide
ggucagaggcaaauaagug

SEQ ID NO: 2317869 - RNA, 19 nt, Artificial Sequence
  Description of Artificial Sequence: Synthetic oligonucleotide
guacugcucugccucuucc

SEQ ID NO: 2317870 - RNA, 19 nt, Artificial Sequence
  Description of Artificial Sequence: Synthetic oligonucleotide
  modified_base (7)..(7): a, c, u, g, unknown or other
caggcunuccccugugcca

SEQ ID NO: 2317871 - RNA, 19 nt, Artificial Sequence
  Description of Artificial Sequence: Synthetic oligonucleotide
cagggaagcuuuauagcga

SEQ ID NO: 2317872 - RNA, 19 nt, Artificial Sequence
  Description of Artificial Sequence: Synthetic oligonucleotide
  modified_base (6)..(6): a, c, u, g, unknown or other
aggcunuccccugugccag

SEQ ID NO: 2317873 - RNA, 19 nt, Artificial Sequence
  Description of Artificial Sequence: Synthetic oligonucleotide
aucgucugaucaaauggga

SEQ ID NO: 2317874 - RNA, 19 nt, Artificial Sequence
  Description of Artificial Sequence: Synthetic oligonucleotide
uagagacgcaaaacagguu

SEQ ID NO: 2317875 - RNA, 19 nt, Artificial Sequence
  Description of Artificial Sequence: Synthetic oligonucleotide
aacuuagacugagccuaca

SEQ ID NO: 2317876 - RNA, 19 nt, Artificial Sequence
  Description of Artificial Sequence: Synthetic oligonucleotide
gggacuuaagcaugguguc

SEQ ID NO: 2317877 - RNA, 19 nt, Artificial Sequence
  Description of Artificial Sequence: Synthetic oligonucleotide
acaggcggcuugccauggc

SEQ ID NO: 2317878 - RNA, 19 nt, Artificial Sequence
  Description of Artificial Sequence: Synthetic oligonucleotide
gccuacauacaguauuuca

SEQ ID NO: 2317879 - RNA, 19 nt, Artificial Sequence
  Description of Artificial Sequence: Synthetic oligonucleotide
acgcaaacuuagacugagc

SEQ ID NO: 2317880 - RNA, 19 nt, Artificial Sequence
  Description of Artificial Sequence: Synthetic oligonucleotide
gagguagaauucaauauuu

SEQ ID NO: 2317881 - RNA, 19 nt, Artificial Sequence
  Description of Artificial Sequence: Synthetic oligonucleotide
guguggcaaagaugguacc

SEQ ID NO: 2317882 - RNA, 19 nt, Artificial Sequence
  Description of Artificial Sequence: Synthetic oligonucleotide
  modified_base (9)..(9): a, c, u, g, unknown or other
cacaggcunuccccugugc

SEQ ID NO: 2317883 - RNA, 19 nt, Artificial Sequence
  Description of Artificial Sequence: Synthetic oligonucleotide
gcuaucuccucaaaguaga

SEQ ID NO: 2317884 - RNA, 19 nt, Artificial Sequence
  Description of Artificial Sequence: Synthetic oligonucleotide
  modified_base (11)..(11): a, c, u, g, unknown or other
accacaggcunuccccugu

SEQ ID NO: 2317885 - RNA, 19 nt, Artificial Sequence
  Description of Artificial Sequence: Synthetic oligonucleotide
caaagaugguaccuggggu

SEQ ID NO: 2317886 - RNA, 19 nt, Artificial Sequence
  Description of Artificial Sequence: Synthetic oligonucleotide
ggaucauagggaugaccug

SEQ ID NO: 2317887 - RNA, 19 nt, Artificial Sequence
  Description of Artificial Sequence: Synthetic oligonucleotide
  modified_base (12)..(12): a, c, u, g, unknown or other
gaccacaggcunuccccug

SEQ ID NO: 2317888 - RNA, 19 nt, Artificial Sequence
  Description of Artificial Sequence: Synthetic oligonucleotide
ucugagcuaucgucugauc

SEQ ID NO: 2317889 - RNA, 19 nt, Artificial Sequence
  Description of Artificial Sequence: Synthetic oligonucleotide
gacgcaaaacagguuagcu

SEQ ID NO: 2317890 - RNA, 19 nt, Artificial Sequence
  Description of Artificial Sequence: Synthetic oligonucleotide
gccuaaggcuuuucugacg

SEQ ID NO: 2317891 - RNA, 19 nt, Artificial Sequence
  Description of Artificial Sequence: Synthetic oligonucleotide
uugauauccuugggauucu

SEQ ID NO: 2317892 - RNA, 19 nt, Artificial Sequence
  Description of Artificial Sequence: Synthetic oligonucleotide
gagucugguaaaagaaucu

SEQ ID NO: 2317893 - RNA, 19 nt, Artificial Sequence
  Description of Artificial Sequence: Synthetic oligonucleotide
cuaaagcauaguccacgca

SEQ ID NO: 2317894 - RNA, 19 nt, Artificial Sequence
  Description of Artificial Sequence: Synthetic oligonucleotide
gcgaggauccagcagugug

SEQ ID NO: 2317895 - RNA, 19 nt, Artificial Sequence
  Description of Artificial Sequence: Synthetic oligonucleotide
gcuuucccuguuaacaagc

SEQ ID NO: 2317896 - RNA, 19 nt, Artificial Sequence
  Description of Artificial Sequence: Synthetic oligonucleotide
cuaaggcuuuucugacgac

SEQ ID NO: 2317897 - RNA, 19 nt, Artificial Sequence
  Description of Artificial Sequence: Synthetic oligonucleotide
auaacaccccagugauagu

SEQ ID NO: 2317898 - RNA, 19 nt, Artificial Sequence
  Description of Artificial Sequence: Synthetic oligonucleotide
guccacgcaaacuuagacu

SEQ ID NO: 2317899 - RNA, 19 nt, Artificial Sequence
  Description of Artificial Sequence: Synthetic oligonucleotide
uggugcaacgagugaccac

SEQ ID NO: 2317900 - RNA, 19 nt, Artificial Sequence
  Description of Artificial Sequence: Synthetic oligonucleotide
guagaaucugagcuaucgu

SEQ ID NO: 2317901 - RNA, 19 nt, Artificial Sequence
  Description of Artificial Sequence: Synthetic oligonucleotide
gaugguaccuggggucgug

SEQ ID NO: 2317902 - RNA, 19 nt, Artificial Sequence
  Description of Artificial Sequence: Synthetic oligonucleotide
cgaggauccagcagugugg

SEQ ID NO: 2317903 - RNA, 19 nt, Artificial Sequence
  Description of Artificial Sequence: Synthetic oligonucleotide
caucucgacuuuccugcug

SEQ ID NO: 2317904 - RNA, 19 nt, Artificial Sequence
  Description of Artificial Sequence: Synthetic oligonucleotide
uuccuaucauaggaacaaa

SEQ ID NO: 2317905 - RNA, 19 nt, Artificial Sequence
  Description of Artificial Sequence: Synthetic oligonucleotide
cucccugauuaagucuugc

SEQ ID NO: 2317906 - RNA, 19 nt, Artificial Sequence
  Description of Artificial Sequence: Synthetic oligonucleotide
acuuaagcauggugucaau

SEQ ID NO: 2317907 - RNA, 19 nt, Artificial Sequence
  Description of Artificial Sequence: Synthetic oligonucleotide
aucugagcuaucgucugau

SEQ ID NO: 2317908 - RNA, 19 nt, Artificial Sequence
  Description of Artificial Sequence: Synthetic oligonucleotide
caacaaaagaauagcuuuu

SEQ ID NO: 2317909 - RNA, 19 nt, Artificial Sequence
  Description of Artificial Sequence: Synthetic oligonucleotide
ugguaccuggggucgugga

SEQ ID NO: 2317910 - RNA, 19 nt, Artificial Sequence
  Description of Artificial Sequence: Synthetic oligonucleotide
ugccuguacugcucugccu

SEQ ID NO: 2317911 - RNA, 19 nt, Artificial Sequence
  Description of Artificial Sequence: Synthetic oligonucleotide
  modified_base (5)..(5): a, c, u, g, unknown or other
aucunucuuauuggugcaa

SEQ ID NO: 2317912 - RNA, 19 nt, Artificial Sequence
  Description of Artificial Sequence: Synthetic oligonucleotide
uaaaugccuaaggcuuuuc

SEQ ID NO: 2317913 - RNA, 19 nt, Artificial Sequence
  Description of Artificial Sequence: Synthetic oligonucleotide
gaagcuuuauagcgaggau

SEQ ID NO: 2317914 - RNA, 19 nt, Artificial Sequence
  Description of Artificial Sequence: Synthetic oligonucleotide
gccguguccucugagguag

SEQ ID NO: 2317915 - RNA, 19 nt, Artificial Sequence
  Description of Artificial Sequence: Synthetic oligonucleotide
augaccuggcucagaguag

SEQ ID NO: 2317916 - RNA, 19 nt, Artificial Sequence
  Description of Artificial Sequence: Synthetic oligonucleotide
acuuuggagucugguaaaa

SEQ ID NO: 2317917 - RNA, 19 nt, Artificial Sequence
  Description of Artificial Sequence: Synthetic oligonucleotide
augguaccuggggucgugg

SEQ ID NO: 2317918 - RNA, 19 nt, Artificial Sequence
  Description of Artificial Sequence: Synthetic oligonucleotide
caacgagugaccacaggcu

SEQ ID NO: 2317919 - RNA, 19 nt, Artificial Sequence
  Description of Artificial Sequence: Synthetic oligonucleotide
aacaagcgcuuucccuguu

SEQ ID NO: 2317920 - RNA, 19 nt, Artificial Sequence
  Description of Artificial Sequence: Synthetic oligonucleotide
gagcuaucgucugaucaaa

SEQ ID NO: 2317921 - RNA, 19 nt, Artificial Sequence
  Description of Artificial Sequence: Synthetic oligonucleotide
uguggaucauagggaugac

SEQ ID NO: 2317922 - RNA, 19 nt, Artificial Sequence
  Description of Artificial Sequence: Synthetic oligonucleotide
acaagcgcuuucccuguua

SEQ ID NO: 2317923 - RNA, 19 nt, Artificial Sequence
  Description of Artificial Sequence: Synthetic oligonucleotide
agcaaacuuuggagucugg

SEQ ID NO: 2317924 - RNA, 19 nt, Artificial Sequence
  Description of Artificial Sequence: Synthetic oligonucleotide
cugugccagugucuuuaag

SEQ ID NO: 2317925 - RNA, 19 nt, Artificial Sequence
  Description of Artificial Sequence: Synthetic oligonucleotide
cuaaaaggucagaggcaaa

SEQ ID NO: 2317926 - RNA, 19 nt, Artificial Sequence
  Description of Artificial Sequence: Synthetic oligonucleotide
uugucuccccaaagagcau

SEQ ID NO: 2317927 - RNA, 19 nt, Artificial Sequence
  Description of Artificial Sequence: Synthetic oligonucleotide
gcaaacuuagacugagccu

SEQ ID NO: 2317928 - RNA, 19 nt, Artificial Sequence
  Description of Artificial Sequence: Synthetic oligonucleotide
cugugaacagggaagcuuu

SEQ ID NO: 2317929 - RNA, 19 nt, Artificial Sequence
  Description of Artificial Sequence: Synthetic oligonucleotide
cuuucccuguuaacaagcu

SEQ ID NO: 2317930 - RNA, 19 nt, Artificial Sequence
  Description of Artificial Sequence: Synthetic oligonucleotide
caagcgcuuucccuguuaa

SEQ ID NO: 2317931 - RNA, 19 nt, Artificial Sequence
  Description of Artificial Sequence: Synthetic oligonucleotide
gcauaguccacgcaaacuu

SEQ ID NO: 2317932 - RNA, 19 nt, Artificial Sequence
  Description of Artificial Sequence: Synthetic oligonucleotide
ccagugucuuuaagugggg

SEQ ID NO: 2317933 - RNA, 19 nt, Artificial Sequence
  Description of Artificial Sequence: Synthetic oligonucleotide
ggcuuuucugacgacugca

SEQ ID NO: 2317934 - RNA, 19 nt, Artificial Sequence
  Description of Artificial Sequence: Synthetic oligonucleotide
ccuugggauucuauaauaa

SEQ ID NO: 2317935 - RNA, 19 nt, Artificial Sequence
  Description of Artificial Sequence: Synthetic oligonucleotide
ugauauccuugggauucua

SEQ ID NO: 2317936 - RNA, 19 nt, Artificial Sequence
  Description of Artificial Sequence: Synthetic oligonucleotide
ccuaucauaggaacaaaau

SEQ ID NO: 2317937 - RNA, 19 nt, Artificial Sequence
  Description of Artificial Sequence: Synthetic oligonucleotide
uccccugugccagugucuu

SEQ ID NO: 2317938 - RNA, 19 nt, Artificial Sequence
  Description of Artificial Sequence: Synthetic oligonucleotide
caguguggcaaagauggua

SEQ ID NO: 2317939 - RNA, 19 nt, Artificial Sequence
  Description of Artificial Sequence: Synthetic oligonucleotide
  modified_base (18)..(18): a, c, u, g, unknown or other
acgagugaccacaggcunu

SEQ ID NO: 2317940 - RNA, 19 nt, Artificial Sequence
  Description of Artificial Sequence: Synthetic oligonucleotide
cagguuagcuucucucucu

SEQ ID NO: 2317941 - RNA, 19 nt, Artificial Sequence
  Description of Artificial Sequence: Synthetic oligonucleotide
gucguggaggguggcagac

SEQ ID NO: 2317942 - RNA, 19 nt, Artificial Sequence
  Description of Artificial Sequence: Synthetic oligonucleotide
gggucguggaggguggcag

SEQ ID NO: 2317943 - RNA, 19 nt, Artificial Sequence
  Description of Artificial Sequence: Synthetic oligonucleotide
ggacuuaagcaugguguca

SEQ ID NO: 2317944 - RNA, 19 nt, Artificial Sequence
  Description of Artificial Sequence: Synthetic oligonucleotide
gugcaacgagugaccacag

SEQ ID NO: 2317945 - RNA, 19 nt, Artificial Sequence
  Description of Artificial Sequence: Synthetic oligonucleotide
ucguggaggguggcagaca

SEQ ID NO: 2317946 - RNA, 19 nt, Artificial Sequence
  Description of Artificial Sequence: Synthetic oligonucleotide
gagccuacauacaguauuu

SEQ ID NO: 2317947 - RNA, 19 nt, Artificial Sequence
  Description of Artificial Sequence: Synthetic oligonucleotide
cagugucuuuaagugggga

SEQ ID NO: 2317948 - RNA, 19 nt, Artificial Sequence
  Description of Artificial Sequence: Synthetic oligonucleotide
gguggccguguccucugag

SEQ ID NO: 2317949 - RNA, 19 nt, Artificial Sequence
  Description of Artificial Sequence: Synthetic oligonucleotide
agcuaucgucugaucaaau

SEQ ID NO: 2317950 - RNA, 19 nt, Artificial Sequence
  Description of Artificial Sequence: Synthetic oligonucleotide
cccagugauaguugaaucu

SEQ ID NO: 2317951 - RNA, 19 nt, Artificial Sequence
  Description of Artificial Sequence: Synthetic oligonucleotide
cuggcucagaguagaacau

SEQ ID NO: 2317952 - RNA, 19 nt, Artificial Sequence
  Description of Artificial Sequence: Synthetic oligonucleotide
agaugguaccuggggucgu

SEQ ID NO: 2317953 - RNA, 19 nt, Artificial Sequence
  Description of Artificial Sequence: Synthetic oligonucleotide
cgacugcaauaaacaagcg

SEQ ID NO: 2317954 - RNA, 19 nt, Artificial Sequence
  Description of Artificial Sequence: Synthetic oligonucleotide
ggcggcuugccauggcuuc

SEQ ID NO: 2317955 - RNA, 19 nt, Artificial Sequence
  Description of Artificial Sequence: Synthetic oligonucleotide
gcgcuuucccuguuaacaa

SEQ ID NO: 2317956 - RNA, 19 nt, Artificial Sequence
  Description of Artificial Sequence: Synthetic oligonucleotide
cugcaauaaacaagcgcuu

SEQ ID NO: 2317957 - RNA, 19 nt, Artificial Sequence
  Description of Artificial Sequence: Synthetic oligonucleotide
agcgaggauccagcagugu

SEQ ID NO: 2317958 - RNA, 19 nt, Artificial Sequence
  Description of Artificial Sequence: Synthetic oligonucleotide
cccugauuaagucuugccu

SEQ ID NO: 2317959 - RNA, 19 nt, Artificial Sequence
  Description of Artificial Sequence: Synthetic oligonucleotide
  modified_base (4)..(4): a, c, u, g, unknown or other
gcunuccccugugccagug

SEQ ID NO: 2317960 - RNA, 19 nt, Artificial Sequence
  Description of Artificial Sequence: Synthetic oligonucleotide
agggaugaccuggcucaga

SEQ ID NO: 2317961 - RNA, 19 nt, Artificial Sequence
  Description of Artificial Sequence: Synthetic oligonucleotide
gugauuugucucacccaua

SEQ ID NO: 2317962 - RNA, 19 nt, Artificial Sequence
  Description of Artificial Sequence: Synthetic oligonucleotide
caaagagcaucucgacuuu

SEQ ID NO: 2317963 - RNA, 19 nt, Artificial Sequence
  Description of Artificial Sequence: Synthetic oligonucleotide
caccccagugauaguugaa

SEQ ID NO: 2317964 - RNA, 19 nt, Artificial Sequence
  Description of Artificial Sequence: Synthetic oligonucleotide
gcacacuucuuaugagaua

SEQ ID NO: 2317965 - RNA, 19 nt, Artificial Sequence
  Description of Artificial Sequence: Synthetic oligonucleotide
  modified_base (12)..(12): a, c, u, g, unknown or other
cucucuuaucunucuuauu

SEQ ID NO: 2317966 - RNA, 19 nt, Artificial Sequence
  Description of Artificial Sequence: Synthetic oligonucleotide
ggucguggaggguggcaga

SEQ ID NO: 2317967 - RNA, 19 nt, Artificial Sequence
  Description of Artificial Sequence: Synthetic oligonucleotide
cuaaaugccuaaggcuuuu

SEQ ID NO: 2317968 - RNA, 19 nt, Artificial Sequence
  Description of Artificial Sequence: Synthetic oligonucleotide
cugagccuacauacaguau

SEQ ID NO: 2317969 - RNA, 19 nt, Artificial Sequence
  Description of Artificial Sequence: Synthetic oligonucleotide
gcuuuauagcgaggaucca

SEQ ID NO: 2317970 - RNA, 19 nt, Artificial Sequence
  Description of Artificial Sequence: Synthetic oligonucleotide
gagucagugcacacuucuu

SEQ ID NO: 2317971 - RNA, 19 nt, Artificial Sequence
  Description of Artificial Sequence: Synthetic oligonucleotide
gaccuggcucagaguagaa

SEQ ID NO: 2317972 - RNA, 19 nt, Artificial Sequence
  Description of Artificial Sequence: Synthetic oligonucleotide
gcaaaacagguuagcuucu

SEQ ID NO: 2317973 - RNA, 19 nt, Artificial Sequence
  Description of Artificial Sequence: Synthetic oligonucleotide
ccagcaguguggcaaagau

SEQ ID NO: 2317974 - RNA, 19 nt, Artificial Sequence
  Description of Artificial Sequence: Synthetic oligonucleotide
ccacgcaaacuuagacuga

SEQ ID NO: 2317975 - RNA, 19 nt, Artificial Sequence
  Description of Artificial Sequence: Synthetic oligonucleotide
gucuuuaaguggggacccu

SEQ ID NO: 2317976 - RNA, 19 nt, Artificial Sequence
  Description of Artificial Sequence: Synthetic oligonucleotide
gcggcuugccauggcuucc

SEQ ID NO: 2317977 - RNA, 19 nt, Artificial Sequence
  Description of Artificial Sequence: Synthetic oligonucleotide
cucugugaacagggaagcu

SEQ ID NO: 2317978 - RNA, 19 nt, Artificial Sequence
  Description of Artificial Sequence: Synthetic oligonucleotide
  modified_base (3)..(3): a, c, u, g, unknown or other
cunuccccugugccagugu

SEQ ID NO: 2317979 - RNA, 19 nt, Artificial Sequence
  Description of Artificial Sequence: Synthetic oligonucleotide
ccagugauaguugaaucuu

SEQ ID NO: 2317980 - RNA, 19 nt, Artificial Sequence
  Description of Artificial Sequence: Synthetic oligonucleotide
gggagucagugcacacuuc

SEQ ID NO: 2317981 - RNA, 19 nt, Artificial Sequence
  Description of Artificial Sequence: Synthetic oligonucleotide
ggccguguccucugaggua

SEQ ID NO: 2317982 - RNA, 19 nt, Artificial Sequence
  Description of Artificial Sequence: Synthetic oligonucleotide
gcaucucgacuuuccugcu

SEQ ID NO: 2317983 - RNA, 19 nt, Artificial Sequence
  Description of Artificial Sequence: Synthetic oligonucleotide
cccuguuaacaagcuaucu

SEQ ID NO: 2317984 - RNA, 19 nt, Artificial Sequence
  Description of Artificial Sequence: Synthetic oligonucleotide
  modified_base (5)..(5): a, c, u, g, unknown or other
ggcunuccccugugccagu

SEQ ID NO: 2317985 - RNA, 19 nt, Artificial Sequence
  Description of Artificial Sequence: Synthetic oligonucleotide
cgacuuuccugcugaggau

SEQ ID NO: 2317986 - RNA, 19 nt, Artificial Sequence
  Description of Artificial Sequence: Synthetic oligonucleotide
ggcuugccauggcuuccuu

SEQ ID NO: 2317987 - RNA, 19 nt, Artificial Sequence
  Description of Artificial Sequence: Synthetic oligonucleotide
  modified_base (1)..(1): a, c, u, g, unknown or other
nucuuauuggugcaacgag

SEQ ID NO: 2317988 - RNA, 19 nt, Artificial Sequence
  Description of Artificial Sequence: Synthetic oligonucleotide
cuguauaaaacuuacaggg

SEQ ID NO: 2317989 - RNA, 19 nt, Artificial Sequence
  Description of Artificial Sequence: Synthetic oligonucleotide
uaaguauugauuuauacug

SEQ ID NO: 2317990 - RNA, 19 nt, Artificial Sequence
  Description of Artificial Sequence: Synthetic oligonucleotide
auagcgauaaugcacaggc

SEQ ID NO: 2317991 - RNA, 19 nt, Artificial Sequence
  Description of Artificial Sequence: Synthetic oligonucleotide
aaaugaggacuucagauuc

SEQ ID NO: 2317992 - RNA, 19 nt, Artificial Sequence
  Description of Artificial Sequence: Synthetic oligonucleotide
ucaaaaugauuucagaaca

SEQ ID NO: 2317993 - RNA, 19 nt, Artificial Sequence
  Description of Artificial Sequence: Synthetic oligonucleotide
auuaaaguagaacacagga

SEQ ID NO: 2317994 - RNA, 19 nt, Artificial Sequence
  Description of Artificial Sequence: Synthetic oligonucleotide
uauuaaaaggucucugugg

SEQ ID NO: 2317995 - RNA, 19 nt, Artificial Sequence
  Description of Artificial Sequence: Synthetic oligonucleotide
aguguguauagucaguccc

SEQ ID NO: 2317996 - RNA, 19 nt, Artificial Sequence
  Description of Artificial Sequence: Synthetic oligonucleotide
uuuucucucgcaaugaagc

SEQ ID NO: 2317997 - RNA, 19 nt, Artificial Sequence
  Description of Artificial Sequence: Synthetic oligonucleotide
aaauagggaacucuugguc

SEQ ID NO: 2317998 - RNA, 19 nt, Artificial Sequence
  Description of Artificial Sequence: Synthetic oligonucleotide
uggacaaauagucaggggc

SEQ ID NO: 2317999 - RNA, 19 nt, Artificial Sequence
  Description of Artificial Sequence: Synthetic oligonucleotide
aaugauuucagaacaagug

SEQ ID NO: 2318000 - RNA, 19 nt, Artificial Sequence
  Description of Artificial Sequence: Synthetic oligonucleotide
uaaaguagaacacaggauu

SEQ ID NO: 2318001 - RNA, 19 nt, Artificial Sequence
  Description of Artificial Sequence: Synthetic oligonucleotide
uguauagucagucccacug

SEQ ID NO: 2318002 - RNA, 19 nt, Artificial Sequence
  Description of Artificial Sequence: Synthetic oligonucleotide
uugcugaccacaaucaggg

SEQ ID NO: 2318003 - RNA, 19 nt, Artificial Sequence
  Description of Artificial Sequence: Synthetic oligonucleotide
ucuuuggacaaauagucag

SEQ ID NO: 2318004 - RNA, 19 nt, Artificial Sequence
  Description of Artificial Sequence: Synthetic oligonucleotide
ucuggucucauuuauuagg

SEQ ID NO: 2318005 - RNA, 19 nt, Artificial Sequence
  Description of Artificial Sequence: Synthetic oligonucleotide
augaagccaacucauaugg

SEQ ID NO: 2318006 - RNA, 19 nt, Artificial Sequence
  Description of Artificial Sequence: Synthetic oligonucleotide
auuaaaacuuucugacacc

SEQ ID NO: 2318007 - RNA, 19 nt, Artificial Sequence
  Description of Artificial Sequence: Synthetic oligonucleotide
aaacaaucgaugcacugag

SEQ ID NO: 2318008 - RNA, 19 nt, Artificial Sequence
  Description of Artificial Sequence: Synthetic oligonucleotide
uuuccgugcauaaaugagg

SEQ ID NO: 2318009 - RNA, 19 nt, Artificial Sequence
  Description of Artificial Sequence: Synthetic oligonucleotide
ucacagaacacacuaaaga

SEQ ID NO: 2318010 - RNA, 19 nt, Artificial Sequence
  Description of Artificial Sequence: Synthetic oligonucleotide
ugauuucagaacaaguggc

SEQ ID NO: 2318011 - RNA, 19 nt, Artificial Sequence
  Description of Artificial Sequence: Synthetic oligonucleotide
aagaaguguguauagucag

SEQ ID NO: 2318012 - RNA, 19 nt, Artificial Sequence
  Description of Artificial Sequence: Synthetic oligonucleotide
aauagggaacucuugguca

SEQ ID NO: 2318013 - RNA, 19 nt, Artificial Sequence
  Description of Artificial Sequence: Synthetic oligonucleotide
aaggauuaaaguagaacac

SEQ ID NO: 2318014 - RNA, 19 nt, Artificial Sequence
  Description of Artificial Sequence: Synthetic oligonucleotide
uuauacugcaugcuguucc

SEQ ID NO: 2318015 - RNA, 19 nt, Artificial Sequence
  Description of Artificial Sequence: Synthetic oligonucleotide
aaugaagccaacucauaug

SEQ ID NO: 2318016 - RNA, 19 nt, Artificial Sequence
  Description of Artificial Sequence: Synthetic oligonucleotide
acuacaaggauuaaaguag

SEQ ID NO: 2318017 - RNA, 19 nt, Artificial Sequence
  Description of Artificial Sequence: Synthetic oligonucleotide
aauggccauauuugaaaac

SEQ ID NO: 2318018 - RNA, 19 nt, Artificial Sequence
  Description of Artificial Sequence: Synthetic oligonucleotide
cagacuacaaggauuaaag

SEQ ID NO: 2318019 - RNA, 19 nt, Artificial Sequence
  Description of Artificial Sequence: Synthetic oligonucleotide
ucauagaaaacauguaacu

SEQ ID NO: 2318020 - RNA, 19 nt, Artificial Sequence
  Description of Artificial Sequence: Synthetic oligonucleotide
ugauuuauacugcaugcug

SEQ ID NO: 2318021 - RNA, 19 nt, Artificial Sequence
  Description of Artificial Sequence: Synthetic oligonucleotide
aaguguguauagucagucc

SEQ ID NO: 2318022 - RNA, 19 nt, Artificial Sequence
  Description of Artificial Sequence: Synthetic oligonucleotide
aguucuuaaguauugauuu

SEQ ID NO: 2318023 - RNA, 19 nt, Artificial Sequence
  Description of Artificial Sequence: Synthetic oligonucleotide
ugcgaugucuaauuaagag

SEQ ID NO: 2318024 - RNA, 19 nt, Artificial Sequence
  Description of Artificial Sequence: Synthetic oligonucleotide
agcauuucaaaauagggaa

SEQ ID NO: 2318025 - RNA, 19 nt, Artificial Sequence
  Description of Artificial Sequence: Synthetic oligonucleotide
cucaaaaugauuucagaac

SEQ ID NO: 2318026 - RNA, 19 nt, Artificial Sequence
  Description of Artificial Sequence: Synthetic oligonucleotide
aaguauugauuuauacugc

SEQ ID NO: 2318027 - RNA, 19 nt, Artificial Sequence
  Description of Artificial Sequence: Synthetic oligonucleotide
aaucgaugcacugagcauc

SEQ ID NO: 2318028 - RNA, 19 nt, Artificial Sequence
  Description of Artificial Sequence: Synthetic oligonucleotide
auuaaaaggucucugugga

SEQ ID NO: 2318029 - RNA, 19 nt, Artificial Sequence
  Description of Artificial Sequence: Synthetic oligonucleotide
agccaacucauauggaucc

SEQ ID NO: 2318030 - RNA, 19 nt, Artificial Sequence
  Description of Artificial Sequence: Synthetic oligonucleotide
aauucuugccucaaaauga

SEQ ID NO: 2318031 - RNA, 19 nt, Artificial Sequence
  Description of Artificial Sequence: Synthetic oligonucleotide
aaaauagggaacucuuggu

SEQ ID NO: 2318032 - RNA, 19 nt, Artificial Sequence
  Description of Artificial Sequence: Synthetic oligonucleotide
aaugagcagagucacagaa

SEQ ID NO: 2318033 - RNA, 19 nt, Artificial Sequence
  Description of Artificial Sequence: Synthetic oligonucleotide
uuuaguucuggucucauuu

SEQ ID NO: 2318034 - RNA, 19 nt, Artificial Sequence
  Description of Artificial Sequence: Synthetic oligonucleotide
uuauuagguucauagaaaa

SEQ ID NO: 2318035 - RNA, 19 nt, Artificial Sequence
  Description of Artificial Sequence: Synthetic oligonucleotide
cuaauuaagagccggcaag

SEQ ID NO: 2318036 - RNA, 19 nt, Artificial Sequence
  Description of Artificial Sequence: Synthetic oligonucleotide
acuaaagaaguguguauag

SEQ ID NO: 2318037 - RNA, 19 nt, Artificial Sequence
  Description of Artificial Sequence: Synthetic oligonucleotide
cuauauuaaaacuuucuga

SEQ ID NO: 2318038 - RNA, 19 nt, Artificial Sequence
  Description of Artificial Sequence: Synthetic oligonucleotide
uuuggacaaauagucaggg

SEQ ID NO: 2318039 - RNA, 19 nt, Artificial Sequence
  Description of Artificial Sequence: Synthetic oligonucleotide
acauguaacuguauaaaac

SEQ ID NO: 2318040 - RNA, 19 nt, Artificial Sequence
  Description of Artificial Sequence: Synthetic oligonucleotide
aacuuucugacaccaucac

SEQ ID NO: 2318041 - RNA, 19 nt, Artificial Sequence
  Description of Artificial Sequence: Synthetic oligonucleotide
uauguggccggugauagcg

SEQ ID NO: 2318042 - RNA, 19 nt, Artificial Sequence
  Description of Artificial Sequence: Synthetic oligonucleotide
aacauguaacuguauaaaa

SEQ ID NO: 2318043 - RNA, 19 nt, Artificial Sequence
  Description of Artificial Sequence: Synthetic oligonucleotide
cauauuugaaaacagacua

SEQ ID NO: 2318044 - RNA, 19 nt, Artificial Sequence
  Description of Artificial Sequence: Synthetic oligonucleotide
caucaguaaaucuggauug

SEQ ID NO: 2318045 - RNA, 19 nt, Artificial Sequence
  Description of Artificial Sequence: Synthetic oligonucleotide
uuauaccagagccgaaggg

SEQ ID NO: 2318046 - RNA, 19 nt, Artificial Sequence
  Description of Artificial Sequence: Synthetic oligonucleotide
gaugcgaugucuaauuaag

SEQ ID NO: 2318047 - RNA, 19 nt, Artificial Sequence
  Description of Artificial Sequence: Synthetic oligonucleotide
uguaacuguauaaaacuua

SEQ ID NO: 2318048 - RNA, 19 nt, Artificial Sequence
  Description of Artificial Sequence: Synthetic oligonucleotide
ugcuacuucugacuuagcc

SEQ ID NO: 2318049 - RNA, 19 nt, Artificial Sequence
  Description of Artificial Sequence: Synthetic oligonucleotide
uuaaaguagaacacaggau

SEQ ID NO: 2318050 - RNA, 19 nt, Artificial Sequence
  Description of Artificial Sequence: Synthetic oligonucleotide
caguacaucaguaaaucug

SEQ ID NO: 2318051 - RNA, 19 nt, Artificial Sequence
  Description of Artificial Sequence: Synthetic oligonucleotide
aacucuuggucacaguaca

SEQ ID NO: 2318052 - RNA, 19 nt, Artificial Sequence
  Description of Artificial Sequence: Synthetic oligonucleotide
uuaagagccggcaagucuc

SEQ ID NO: 2318053 - RNA, 19 nt, Artificial Sequence
  Description of Artificial Sequence: Synthetic oligonucleotide
acaaucgaugcacugagca

SEQ ID NO: 2318054 - RNA, 19 nt, Artificial Sequence
  Description of Artificial Sequence: Synthetic oligonucleotide
acaaguggcccuuauacca

SEQ ID NO: 2318055 - RNA, 19 nt, Artificial Sequence
  Description of Artificial Sequence: Synthetic oligonucleotide
uuaaaacuuucugacacca

SEQ ID NO: 2318056 - RNA, 19 nt, Artificial Sequence
  Description of Artificial Sequence: Synthetic oligonucleotide
uggcccuuauaccagagcc

SEQ ID NO: 2318057 - RNA, 19 nt, Artificial Sequence
  Description of Artificial Sequence: Synthetic oligonucleotide
aaagaaguguguauaguca

SEQ ID NO: 2318058 - RNA, 19 nt, Artificial Sequence
  Description of Artificial Sequence: Synthetic oligonucleotide
guaaugagcagagucacag

SEQ ID NO: 2318059 - RNA, 19 nt, Artificial Sequence
  Description of Artificial Sequence: Synthetic oligonucleotide
aguauugauuuauacugca

SEQ ID NO: 2318060 - RNA, 19 nt, Artificial Sequence
  Description of Artificial Sequence: Synthetic oligonucleotide
ucacuuuuauuaaaagguc

SEQ ID NO: 2318061 - RNA, 19 nt, Artificial Sequence
  Description of Artificial Sequence: Synthetic oligonucleotide
uccaucuuuccuauguggc

SEQ ID NO: 2318062 - RNA, 19 nt, Artificial Sequence
  Description of Artificial Sequence: Synthetic oligonucleotide
aacacacuaaagaagugug

SEQ ID NO: 2318063 - RNA, 19 nt, Artificial Sequence
  Description of Artificial Sequence: Synthetic oligonucleotide
aaaugauuucagaacaagu

SEQ ID NO: 2318064 - RNA, 19 nt, Artificial Sequence
  Description of Artificial Sequence: Synthetic oligonucleotide
gacuacaaggauuaaagua

SEQ ID NO: 2318065 - RNA, 19 nt, Artificial Sequence
  Description of Artificial Sequence: Synthetic oligonucleotide
aaacauguaacuguauaaa

SEQ ID NO: 2318066 - RNA, 19 nt, Artificial Sequence
  Description of Artificial Sequence: Synthetic oligonucleotide
acaucaguaaaucuggauu

SEQ ID NO: 2318067 - RNA, 19 nt, Artificial Sequence
  Description of Artificial Sequence: Synthetic oligonucleotide
ucuaauuaagagccggcaa

SEQ ID NO: 2318068 - RNA, 19 nt, Artificial Sequence
  Description of Artificial Sequence: Synthetic oligonucleotide
aaaggucucuguggaaacc

SEQ ID NO: 2318069 - RNA, 19 nt, Artificial Sequence
  Description of Artificial Sequence: Synthetic oligonucleotide
auauuaaaacuuucugaca

SEQ ID NO: 2318070 - RNA, 19 nt, Artificial Sequence
  Description of Artificial Sequence: Synthetic oligonucleotide
auagggaacucuuggucac

SEQ ID NO: 2318071 - RNA, 19 nt, Artificial Sequence
  Description of Artificial Sequence: Synthetic oligonucleotide
aaauggccauauuugaaaa

SEQ ID NO: 2318072 - RNA, 19 nt, Artificial Sequence
  Description of Artificial Sequence: Synthetic oligonucleotide
uucaaaauagggaacucuu

SEQ ID NO: 2318073 - RNA, 19 nt, Artificial Sequence
  Description of Artificial Sequence: Synthetic oligonucleotide
ucuguggaaaccaucuuuc

SEQ ID NO: 2318074 - RNA, 19 nt, Artificial Sequence
  Description of Artificial Sequence: Synthetic oligonucleotide
ucugacuuagcccagcauu

SEQ ID NO: 2318075 - RNA, 19 nt, Artificial Sequence
  Description of Artificial Sequence: Synthetic oligonucleotide
uggauugcugaccacaauc

SEQ ID NO: 2318076 - RNA, 19 nt, Artificial Sequence
  Description of Artificial Sequence: Synthetic oligonucleotide
gucucuaaguccucaaugc

SEQ ID NO: 2318077 - RNA, 19 nt, Artificial Sequence
  Description of Artificial Sequence: Synthetic oligonucleotide
uuccgugcauaaaugagga

SEQ ID NO: 2318078 - RNA, 19 nt, Artificial Sequence
  Description of Artificial Sequence: Synthetic oligonucleotide
uauuagguucauagaaaac

SEQ ID NO: 2318079 - RNA, 19 nt, Artificial Sequence
  Description of Artificial Sequence: Synthetic oligonucleotide
auuaagagccggcaagucu

SEQ ID NO: 2318080 - RNA, 19 nt, Artificial Sequence
  Description of Artificial Sequence: Synthetic oligonucleotide
ucuaaguccucaaugcuuu

SEQ ID NO: 2318081 - RNA, 19 nt, Artificial Sequence
  Description of Artificial Sequence: Synthetic oligonucleotide
cuuauaccagagccgaagg

SEQ ID NO: 2318082 - RNA, 19 nt, Artificial Sequence
  Description of Artificial Sequence: Synthetic oligonucleotide
ugucuaauuaagagccggc

SEQ ID NO: 2318083 - RNA, 19 nt, Artificial Sequence
  Description of Artificial Sequence: Synthetic oligonucleotide
uaaaugaggacuucagauu

SEQ ID NO: 2318084 - RNA, 19 nt, Artificial Sequence
  Description of Artificial Sequence: Synthetic oligonucleotide
ucuuuccgugcauaaauga

SEQ ID NO: 2318085 - RNA, 19 nt, Artificial Sequence
  Description of Artificial Sequence: Synthetic oligonucleotide
aaggccuggaaacaaucga

SEQ ID NO: 2318086 - RNA, 19 nt, Artificial Sequence
  Description of Artificial Sequence: Synthetic oligonucleotide
agcgauaaugcacaggcaa

SEQ ID NO: 2318087 - RNA, 19 nt, Artificial Sequence
  Description of Artificial Sequence: Synthetic oligonucleotide
gaacacaggauuguaauga

SEQ ID NO: 2318088 - RNA, 19 nt, Artificial Sequence
  Description of Artificial Sequence: Synthetic oligonucleotide
aucaguaaaucuggauugc

SEQ ID NO: 2318089 - RNA, 19 nt, Artificial Sequence
  Description of Artificial Sequence: Synthetic oligonucleotide
auuguaaugagcagaguca

SEQ ID NO: 2318090 - RNA, 19 nt, Artificial Sequence
  Description of Artificial Sequence: Synthetic oligonucleotide
agagucacagaacacacua

SEQ ID NO: 2318091 - RNA, 19 nt, Artificial Sequence
  Description of Artificial Sequence: Synthetic oligonucleotide
augucuaauuaagagccgg

SEQ ID NO: 2318092 - RNA, 19 nt, Artificial Sequence
  Description of Artificial Sequence: Synthetic oligonucleotide
aagccaacucauauggauc

SEQ ID NO: 2318093 - RNA, 19 nt, Artificial Sequence
  Description of Artificial Sequence: Synthetic oligonucleotide
uagguucauagaaaacaug

SEQ ID NO: 2318094 - RNA, 19 nt, Artificial Sequence
  Description of Artificial Sequence: Synthetic oligonucleotide
aacucauauggauccacaa

SEQ ID NO: 2318095 - RNA, 19 nt, Artificial Sequence
  Description of Artificial Sequence: Synthetic oligonucleotide
uggccauauuugaaaacag

SEQ ID NO: 2318096 - RNA, 19 nt, Artificial Sequence
  Description of Artificial Sequence: Synthetic oligonucleotide
uuggacaaauagucagggg

SEQ ID NO: 2318097 - RNA, 19 nt, Artificial Sequence
  Description of Artificial Sequence: Synthetic oligonucleotide
agaacacaggauuguaaug

SEQ ID NO: 2318098 - RNA, 19 nt, Artificial Sequence
  Description of Artificial Sequence: Synthetic oligonucleotide
ucucuaaguccucaaugcu

SEQ ID NO: 2318099 - RNA, 19 nt, Artificial Sequence
  Description of Artificial Sequence: Synthetic oligonucleotide
cauguaacuguauaaaacu

SEQ ID NO: 2318100 - RNA, 19 nt, Artificial Sequence
  Description of Artificial Sequence: Synthetic oligonucleotide
ucacaguacaucaguaaau

SEQ ID NO: 2318101 - RNA, 19 nt, Artificial Sequence
  Description of Artificial Sequence: Synthetic oligonucleotide
cuccaucuuuccuaugugg

SEQ ID NO: 2318102 - RNA, 19 nt, Artificial Sequence
  Description of Artificial Sequence: Synthetic oligonucleotide
gaaacaaucgaugcacuga

SEQ ID NO: 2318103 - RNA, 19 nt, Artificial Sequence
  Description of Artificial Sequence: Synthetic oligonucleotide
uucuuaaguauugauuuau

SEQ ID NO: 2318104 - RNA, 19 nt, Artificial Sequence
  Description of Artificial Sequence: Synthetic oligonucleotide
augcacugagcaucuuucc

SEQ ID NO: 2318105 - RNA, 19 nt, Artificial Sequence
  Description of Artificial Sequence: Synthetic oligonucleotide
uuucucucgcaaugaagcc

SEQ ID NO: 2318106 - RNA, 19 nt, Artificial Sequence
  Description of Artificial Sequence: Synthetic oligonucleotide
uucuggucucauuuauuag

SEQ ID NO: 2318107 - RNA, 19 nt, Artificial Sequence
  Description of Artificial Sequence: Synthetic oligonucleotide
ggauuaaaguagaacacag

SEQ ID NO: 2318108 - RNA, 19 nt, Artificial Sequence
  Description of Artificial Sequence: Synthetic oligonucleotide
gacuucagauucuuuggac

SEQ ID NO: 2318109 - RNA, 19 nt, Artificial Sequence
  Description of Artificial Sequence: Synthetic oligonucleotide
uuucugacaccaucacugc

SEQ ID NO: 2318110 - RNA, 19 nt, Artificial Sequence
  Description of Artificial Sequence: Synthetic oligonucleotide
auggccauauuugaaaaca

SEQ ID NO: 2318111 - RNA, 19 nt, Artificial Sequence
  Description of Artificial Sequence: Synthetic oligonucleotide
gaaaugggcgcgcgggacg

SEQ ID NO: 2318112 - RNA, 19 nt, Artificial Sequence
  Description of Artificial Sequence: Synthetic oligonucleotide
ugcauaaaugaggacuuca

SEQ ID NO: 2318113 - RNA, 19 nt, Artificial Sequence
  Description of Artificial Sequence: Synthetic oligonucleotide
uaauuaagagccggcaagu

SEQ ID NO: 2318114 - RNA, 19 nt, Artificial Sequence
  Description of Artificial Sequence: Synthetic oligonucleotide
uuguaaugagcagagucac

SEQ ID NO: 2318115 - RNA, 19 nt, Artificial Sequence
  Description of Artificial Sequence: Synthetic oligonucleotide
uauacugcaugcuguucca

SEQ ID NO: 2318116 - RNA, 19 nt, Artificial Sequence
  Description of Artificial Sequence: Synthetic oligonucleotide
ucucucgcaaugaagccaa

SEQ ID NO: 2318117 - RNA, 19 nt, Artificial Sequence
  Description of Artificial Sequence: Synthetic oligonucleotide
gaugucuaauuaagagccg

SEQ ID NO: 2318118 - RNA, 19 nt, Artificial Sequence
  Description of Artificial Sequence: Synthetic oligonucleotide
aggauuguaaugagcagag

SEQ ID NO: 2318119 - RNA, 19 nt, Artificial Sequence
  Description of Artificial Sequence: Synthetic oligonucleotide
uugauuuauacugcaugcu

SEQ ID NO: 2318120 - RNA, 19 nt, Artificial Sequence
  Description of Artificial Sequence: Synthetic oligonucleotide
caguaaaucuggauugcug

SEQ ID NO: 2318121 - RNA, 19 nt, Artificial Sequence
  Description of Artificial Sequence: Synthetic oligonucleotide
cugacgaccagcccagccg

SEQ ID NO: 2318122 - RNA, 19 nt, Artificial Sequence
  Description of Artificial Sequence: Synthetic oligonucleotide
aaguagaacacaggauugu

SEQ ID NO: 2318123 - RNA, 19 nt, Artificial Sequence
  Description of Artificial Sequence: Synthetic oligonucleotide
agacuacaaggauuaaagu

SEQ ID NO: 2318124 - RNA, 19 nt, Artificial Sequence
  Description of Artificial Sequence: Synthetic oligonucleotide
gaaguguguauagucaguc

SEQ ID NO: 2318125 - RNA, 19 nt, Artificial Sequence
  Description of Artificial Sequence: Synthetic oligonucleotide
guggaaaccaucuuucaaa

SEQ ID NO: 2318126 - RNA, 19 nt, Artificial Sequence
  Description of Artificial Sequence: Synthetic oligonucleotide
uguaaugagcagagucaca

SEQ ID NO: 2318127 - RNA, 19 nt, Artificial Sequence
  Description of Artificial Sequence: Synthetic oligonucleotide
uacaucaguaaaucuggau

SEQ ID NO: 2318128 - RNA, 19 nt, Artificial Sequence
  Description of Artificial Sequence: Synthetic oligonucleotide
ggucucauuuauuagguuc

SEQ ID NO: 2318129 - RNA, 19 nt, Artificial Sequence
  Description of Artificial Sequence: Synthetic oligonucleotide
ggggcuucuauauuaaaac

SEQ ID NO: 2318130 - RNA, 19 nt, Artificial Sequence
  Description of Artificial Sequence: Synthetic oligonucleotide
cuugccucaaaaugauuuc

SEQ ID NO: 2318131 - RNA, 19 nt, Artificial Sequence
  Description of Artificial Sequence: Synthetic oligonucleotide
uacugcaugcuguuccacc

SEQ ID NO: 2318132 - RNA, 19 nt, Artificial Sequence
  Description of Artificial Sequence: Synthetic oligonucleotide
auuuauacugcaugcuguu

SEQ ID NO: 2318133 - RNA, 19 nt, Artificial Sequence
  Description of Artificial Sequence: Synthetic oligonucleotide
guaaaucuggauugcugac

SEQ ID NO: 2318134 - RNA, 19 nt, Artificial Sequence
  Description of Artificial Sequence: Synthetic oligonucleotide
cauuuauuagguucauaga

SEQ ID NO: 2318135 - RNA, 19 nt, Artificial Sequence
  Description of Artificial Sequence: Synthetic oligonucleotide
uucugacaccaucacugcc

SEQ ID NO: 2318136 - RNA, 19 nt, Artificial Sequence
  Description of Artificial Sequence: Synthetic oligonucleotide
ggugauagcgauaaugcac

SEQ ID NO: 2318137 - RNA, 19 nt, Artificial Sequence
  Description of Artificial Sequence: Synthetic oligonucleotide
gcgaugucuaauuaagagc

SEQ ID NO: 2318138 - RNA, 19 nt, Artificial Sequence
  Description of Artificial Sequence: Synthetic oligonucleotide
gaugcacugagcaucuuuc

SEQ ID NO: 2318139 - RNA, 19 nt, Artificial Sequence
  Description of Artificial Sequence: Synthetic oligonucleotide
acacuaaagaaguguguau

SEQ ID NO: 2318140 - RNA, 19 nt, Artificial Sequence
  Description of Artificial Sequence: Synthetic oligonucleotide
uggaaacaaucgaugcacu

SEQ ID NO: 2318141 - RNA, 19 nt, Artificial Sequence
  Description of Artificial Sequence: Synthetic oligonucleotide
uacaaggauuaaaguagaa

SEQ ID NO: 2318142 - RNA, 19 nt, Artificial Sequence
  Description of Artificial Sequence: Synthetic oligonucleotide
ugacgaccagcccagccgc

SEQ ID NO: 2318143 - RNA, 19 nt, Artificial Sequence
  Description of Artificial Sequence: Synthetic oligonucleotide
uagucaggggcuucuauau

SEQ ID NO: 2318144 - RNA, 19 nt, Artificial Sequence
  Description of Artificial Sequence: Synthetic oligonucleotide
gugauagcgauaaugcaca

SEQ ID NO: 2318145 - RNA, 19 nt, Artificial Sequence
  Description of Artificial Sequence: Synthetic oligonucleotide
uucucucgcaaugaagcca

SEQ ID NO: 2318146 - RNA, 19 nt, Artificial Sequence
  Description of Artificial Sequence: Synthetic oligonucleotide
uaguucuggucucauuuau

SEQ ID NO: 2318147 - RNA, 19 nt, Artificial Sequence
  Description of Artificial Sequence: Synthetic oligonucleotide
aucuuuccuauguggccgg

SEQ ID NO: 2318148 - RNA, 19 nt, Artificial Sequence
  Description of Artificial Sequence: Synthetic oligonucleotide
uuaaaaggucucuguggaa

SEQ ID NO: 2318149 - RNA, 19 nt, Artificial Sequence
  Description of Artificial Sequence: Synthetic oligonucleotide
ugaagccaacucauaugga

SEQ ID NO: 2318150 - RNA, 19 nt, Artificial Sequence
  Description of Artificial Sequence: Synthetic oligonucleotide
ugauagcgauaaugcacag

SEQ ID NO: 2318151 - RNA, 19 nt, Artificial Sequence
  Description of Artificial Sequence: Synthetic oligonucleotide
caaguggcccuuauaccag

SEQ ID NO: 2318152 - RNA, 19 nt, Artificial Sequence
  Description of Artificial Sequence: Synthetic oligonucleotide
gaagccaacucauauggau

SEQ ID NO: 2318153 - RNA, 19 nt, Artificial Sequence
  Description of Artificial Sequence: Synthetic oligonucleotide
gauuuauacugcaugcugu

SEQ ID NO: 2318154 - RNA, 19 nt, Artificial Sequence
  Description of Artificial Sequence: Synthetic oligonucleotide
ucaguaaaucuggauugcu

SEQ ID NO: 2318155 - RNA, 19 nt, Artificial Sequence
  Description of Artificial Sequence: Synthetic oligonucleotide
cccacuggaacuuguaggg

SEQ ID NO: 2318156 - RNA, 19 nt, Artificial Sequence
  Description of Artificial Sequence: Synthetic oligonucleotide
uguguauagucagucccac

SEQ ID NO: 2318157 - RNA, 19 nt, Artificial Sequence
  Description of Artificial Sequence: Synthetic oligonucleotide
ccggugauagcgauaaugc

SEQ ID NO: 2318158 - RNA, 19 nt, Artificial Sequence
  Description of Artificial Sequence: Synthetic oligonucleotide
auagucaggggcuucuaua

SEQ ID NO: 2318159 - RNA, 19 nt, Artificial Sequence
  Description of Artificial Sequence: Synthetic oligonucleotide
uaaaacuuucugacaccau

SEQ ID NO: 2318160 - RNA, 19 nt, Artificial Sequence
  Description of Artificial Sequence: Synthetic oligonucleotide
ugggaugcgaugucuaauu

SEQ ID NO: 2318161 - RNA, 19 nt, Artificial Sequence
  Description of Artificial Sequence: Synthetic oligonucleotide
aaugaggacuucagauucu

SEQ ID NO: 2318162 - RNA, 19 nt, Artificial Sequence
  Description of Artificial Sequence: Synthetic oligonucleotide
gagccugacgaccagccca

SEQ ID NO: 2318163 - RNA, 19 nt, Artificial Sequence
  Description of Artificial Sequence: Synthetic oligonucleotide
cucaaguccgcggcgagcc

SEQ ID NO: 2318164 - RNA, 19 nt, Artificial Sequence
  Description of Artificial Sequence: Synthetic oligonucleotide
cacuuuuauuaaaaggucu

SEQ ID NO: 2318165 - RNA, 19 nt, Artificial Sequence
  Description of Artificial Sequence: Synthetic oligonucleotide
cugcucacgucgcagcgcg

SEQ ID NO: 2318166 - RNA, 19 nt, Artificial Sequence
  Description of Artificial Sequence: Synthetic oligonucleotide
uguuccaccggcagaucuc

SEQ ID NO: 2318167 - RNA, 19 nt, Artificial Sequence
  Description of Artificial Sequence: Synthetic oligonucleotide
gacuuagcccagcauuuca

SEQ ID NO: 2318168 - RNA, 19 nt, Artificial Sequence
  Description of Artificial Sequence: Synthetic oligonucleotide
uuuauacugcaugcuguuc

SEQ ID NO: 2318169 - RNA, 19 nt, Artificial Sequence
  Description of Artificial Sequence: Synthetic oligonucleotide
aaguggcccuuauaccaga

SEQ ID NO: 2318170 - RNA, 19 nt, Artificial Sequence
  Description of Artificial Sequence: Synthetic oligonucleotide
cacugagcaucuuuccgug

SEQ ID NO: 2318171 - RNA, 19 nt, Artificial Sequence
  Description of Artificial Sequence: Synthetic oligonucleotide
acagacuacaaggauuaaa

SEQ ID NO: 2318172 - RNA, 19 nt, Artificial Sequence
  Description of Artificial Sequence: Synthetic oligonucleotide
uuuuaguucuggucucauu

SEQ ID NO: 2318173 - RNA, 19 nt, Artificial Sequence
  Description of Artificial Sequence: Synthetic oligonucleotide
uagcgauaaugcacaggca

SEQ ID NO: 2318174 - RNA, 19 nt, Artificial Sequence
  Description of Artificial Sequence: Synthetic oligonucleotide
ugcggucgcggaaggaggc

SEQ ID NO: 2318175 - RNA, 19 nt, Artificial Sequence
  Description of Artificial Sequence: Synthetic oligonucleotide
gucuaauuaagagccggca

SEQ ID NO: 2318176 - RNA, 19 nt, Artificial Sequence
  Description of Artificial Sequence: Synthetic oligonucleotide
gucaggggcuucuauauua

SEQ ID NO: 2318177 - RNA, 19 nt, Artificial Sequence
  Description of Artificial Sequence: Synthetic oligonucleotide
ucucgcaaugaagccaacu

SEQ ID NO: 2318178 - RNA, 19 nt, Artificial Sequence
  Description of Artificial Sequence: Synthetic oligonucleotide
agaacaaguggcccuuaua

SEQ ID NO: 2318179 - RNA, 19 nt, Artificial Sequence
  Description of Artificial Sequence: Synthetic oligonucleotide
guucuuaaguauugauuua

SEQ ID NO: 2318180 - RNA, 19 nt, Artificial Sequence
  Description of Artificial Sequence: Synthetic oligonucleotide
uggccggugauagcgauaa

SEQ ID NO: 2318181 - RNA, 19 nt, Artificial Sequence
  Description of Artificial Sequence: Synthetic oligonucleotide
gacgccggagcgccgacgc

SEQ ID NO: 2318182 - RNA, 19 nt, Artificial Sequence
  Description of Artificial Sequence: Synthetic oligonucleotide
agcgccgacgcccgaaaug

SEQ ID NO: 2318183 - RNA, 19 nt, Artificial Sequence
  Description of Artificial Sequence: Synthetic oligonucleotide
acuggaacuuguaggguca

SEQ ID NO: 2318184 - RNA, 19 nt, Artificial Sequence
  Description of Artificial Sequence: Synthetic oligonucleotide
acaaucagggugucuccau

SEQ ID NO: 2318185 - RNA, 19 nt, Artificial Sequence
  Description of Artificial Sequence: Synthetic oligonucleotide
cugcggucgcggaaggagg

SEQ ID NO: 2318186 - RNA, 19 nt, Artificial Sequence
  Description of Artificial Sequence: Synthetic oligonucleotide
aaaugggcgcgcgggacga

SEQ ID NO: 2318187 - RNA, 19 nt, Artificial Sequence
  Description of Artificial Sequence: Synthetic oligonucleotide
aguagaacacaggauugua

SEQ ID NO: 2318188 - RNA, 19 nt, Artificial Sequence
  Description of Artificial Sequence: Synthetic oligonucleotide
ugagcaucuuuccgugcau

SEQ ID NO: 2318189 - RNA, 19 nt, Artificial Sequence
  Description of Artificial Sequence: Synthetic oligonucleotide
uucugacuuagcccagcau

SEQ ID NO: 2318190 - RNA, 19 nt, Artificial Sequence
  Description of Artificial Sequence: Synthetic oligonucleotide
agaaguguguauagucagu

SEQ ID NO: 2318191 - RNA, 19 nt, Artificial Sequence
  Description of Artificial Sequence: Synthetic oligonucleotide
cacacuaaagaagugugua

SEQ ID NO: 2318192 - RNA, 19 nt, Artificial Sequence
  Description of Artificial Sequence: Synthetic oligonucleotide
aggggcuucuauauuaaaa

SEQ ID NO: 2318193 - RNA, 19 nt, Artificial Sequence
  Description of Artificial Sequence: Synthetic oligonucleotide
auacugcaugcuguuccac

SEQ ID NO: 2318194 - RNA, 19 nt, Artificial Sequence
  Description of Artificial Sequence: Synthetic oligonucleotide
cugcaugcuguuccaccgg

SEQ ID NO: 2318195 - RNA, 19 nt, Artificial Sequence
  Description of Artificial Sequence: Synthetic oligonucleotide
cacuaaagaaguguguaua

SEQ ID NO: 2318196 - RNA, 19 nt, Artificial Sequence
  Description of Artificial Sequence: Synthetic oligonucleotide
uucagaacaaguggcccuu

SEQ ID NO: 2318197 - RNA, 19 nt, Artificial Sequence
  Description of Artificial Sequence: Synthetic oligonucleotide
gucgcucaaguccgcggcg

SEQ ID NO: 2318198 - RNA, 19 nt, Artificial Sequence
  Description of Artificial Sequence: Synthetic oligonucleotide
ccggcaagucucuaagucc

SEQ ID NO: 2318199 - RNA, 19 nt, Artificial Sequence
  Description of Artificial Sequence: Synthetic oligonucleotide
guuccaccggcagaucucc

SEQ ID NO: 2318200 - RNA, 19 nt, Artificial Sequence
  Description of Artificial Sequence: Synthetic oligonucleotide
acgaccagcccagccgccc

SEQ ID NO: 2318201 - RNA, 19 nt, Artificial Sequence
  Description of Artificial Sequence: Synthetic oligonucleotide
cuggucucauuuauuaggu

SEQ ID NO: 2318202 - RNA, 19 nt, Artificial Sequence
  Description of Artificial Sequence: Synthetic oligonucleotide
agagccggcaagucucuaa

SEQ ID NO: 2318203 - RNA, 19 nt, Artificial Sequence
  Description of Artificial Sequence: Synthetic oligonucleotide
cuauguggccggugauagc

SEQ ID NO: 2318204 - RNA, 19 nt, Artificial Sequence
  Description of Artificial Sequence: Synthetic oligonucleotide
uggaacuuguagggucaag

SEQ ID NO: 2318205 - RNA, 19 nt, Artificial Sequence
  Description of Artificial Sequence: Synthetic oligonucleotide
ucucauuuauuagguucau

SEQ ID NO: 2318206 - RNA, 19 nt, Artificial Sequence
  Description of Artificial Sequence: Synthetic oligonucleotide
caucuuuccgugcauaaau

SEQ ID NO: 2318207 - RNA, 19 nt, Artificial Sequence
  Description of Artificial Sequence: Synthetic oligonucleotide
gaacuuguagggucaaguu

SEQ ID NO: 2318208 - RNA, 19 nt, Artificial Sequence
  Description of Artificial Sequence: Synthetic oligonucleotide
uccaccggcagaucuccuc

SEQ ID NO: 2318209 - RNA, 19 nt, Artificial Sequence
  Description of Artificial Sequence: Synthetic oligonucleotide
uccgugcauaaaugaggac

SEQ ID NO: 2318210 - RNA, 19 nt, Artificial Sequence
  Description of Artificial Sequence: Synthetic oligonucleotide
guguguauagucaguccca

SEQ ID NO: 2318211 - RNA, 19 nt, Artificial Sequence
  Description of Artificial Sequence: Synthetic oligonucleotide
cuaaguccucaaugcuuuc

SEQ ID NO: 2318212 - RNA, 19 nt, Artificial Sequence
  Description of Artificial Sequence: Synthetic oligonucleotide
ugaggacuucagauucuuu

SEQ ID NO: 2318213 - RNA, 19 nt, Artificial Sequence
  Description of Artificial Sequence: Synthetic oligonucleotide
caaguucuuaaguauugau

SEQ ID NO: 2318214 - RNA, 19 nt, Artificial Sequence
  Description of Artificial Sequence: Synthetic oligonucleotide
ccuauguggccggugauag

SEQ ID NO: 2318215 - RNA, 19 nt, Artificial Sequence
  Description of Artificial Sequence: Synthetic oligonucleotide
aucgaugcacugagcaucu

SEQ ID NO: 2318216 - RNA, 19 nt, Artificial Sequence
  Description of Artificial Sequence: Synthetic oligonucleotide
gacgcccgaaaugggcgcg

SEQ ID NO: 2318217 - RNA, 19 nt, Artificial Sequence
  Description of Artificial Sequence: Synthetic oligonucleotide
guggcccuuauaccagagc

SEQ ID NO: 2318218 - RNA, 19 nt, Artificial Sequence
  Description of Artificial Sequence: Synthetic oligonucleotide
ggaugcgaugucuaauuaa

SEQ ID NO: 2318219 - RNA, 19 nt, Artificial Sequence
  Description of Artificial Sequence: Synthetic oligonucleotide
uuccuauguggccggugau

SEQ ID NO: 2318220 - RNA, 19 nt, Artificial Sequence
  Description of Artificial Sequence: Synthetic oligonucleotide
aaauagucaggggcuucua

SEQ ID NO: 2318221 - RNA, 19 nt, Artificial Sequence
  Description of Artificial Sequence: Synthetic oligonucleotide
ggcccuuauaccagagccg

SEQ ID NO: 2318222 - RNA, 19 nt, Artificial Sequence
  Description of Artificial Sequence: Synthetic oligonucleotide
uccuauguggccggugaua

SEQ ID NO: 2318223 - RNA, 19 nt, Artificial Sequence
  Description of Artificial Sequence: Synthetic oligonucleotide
augcgaugucuaauuaaga

SEQ ID NO: 2318224 - RNA, 19 nt, Artificial Sequence
  Description of Artificial Sequence: Synthetic oligonucleotide
ugucuccaucuuuccuaug

SEQ ID NO: 2318225 - RNA, 19 nt, Artificial Sequence
  Description of Artificial Sequence: Synthetic oligonucleotide
aggccuggaaacaaucgau

SEQ ID NO: 2318226 - RNA, 19 nt, Artificial Sequence
  Description of Artificial Sequence: Synthetic oligonucleotide
aacagacuacaaggauuaa

SEQ ID NO: 2318227 - RNA, 19 nt, Artificial Sequence
  Description of Artificial Sequence: Synthetic oligonucleotide
gccggcaagucucuaaguc

SEQ ID NO: 2318228 - RNA, 19 nt, Artificial Sequence
  Description of Artificial Sequence: Synthetic oligonucleotide
augggcgcgcgggacgagc

SEQ ID NO: 2318229 - RNA, 19 nt, Artificial Sequence
  Description of Artificial Sequence: Synthetic oligonucleotide
ccgacgcccgaaaugggcg

SEQ ID NO: 2318230 - RNA, 19 nt, Artificial Sequence
  Description of Artificial Sequence: Synthetic oligonucleotide
agccaggacgccggagcgc

SEQ ID NO: 2318231 - RNA, 19 nt, Artificial Sequence
  Description of Artificial Sequence: Synthetic oligonucleotide
aguggcccuuauaccagag

SEQ ID NO: 2318232 - RNA, 19 nt, Artificial Sequence
  Description of Artificial Sequence: Synthetic oligonucleotide
accggcagaucuccucacu

SEQ ID NO: 2318233 - RNA, 19 nt, Artificial Sequence
  Description of Artificial Sequence: Synthetic oligonucleotide
gcgccgacgcccgaaaugg

SEQ ID NO: 2318234 - RNA, 19 nt, Artificial Sequence
  Description of Artificial Sequence: Synthetic oligonucleotide
uagggaacucuuggucaca

SEQ ID NO: 2318235 - RNA, 19 nt, Artificial Sequence
  Description of Artificial Sequence: Synthetic oligonucleotide
agucaggggcuucuauauu

SEQ ID NO: 2318236 - RNA, 19 nt, Artificial Sequence
  Description of Artificial Sequence: Synthetic oligonucleotide
agccugacgaccagcccag

SEQ ID NO: 2318237 - RNA, 19 nt, Artificial Sequence
  Description of Artificial Sequence: Synthetic oligonucleotide
cuuuccuauguggccggug

SEQ ID NO: 2318238 - RNA, 19 nt, Artificial Sequence
  Description of Artificial Sequence: Synthetic oligonucleotide
augaggacuucagauucuu

SEQ ID NO: 2318239 - RNA, 19 nt, Artificial Sequence
  Description of Artificial Sequence: Synthetic oligonucleotide
ucaaguccgcggcgagccu

SEQ ID NO: 2318240 - RNA, 19 nt, Artificial Sequence
  Description of Artificial Sequence: Synthetic oligonucleotide
agccggcaagucucuaagu

SEQ ID NO: 2318241 - RNA, 19 nt, Artificial Sequence
  Description of Artificial Sequence: Synthetic oligonucleotide
ggccauauuugaaaacaga

SEQ ID NO: 2318242 - RNA, 19 nt, Artificial Sequence
  Description of Artificial Sequence: Synthetic oligonucleotide
cacagcgcccgcagccagg

SEQ ID NO: 2318243 - RNA, 19 nt, Artificial Sequence
  Description of Artificial Sequence: Synthetic oligonucleotide
gggcuucuauauuaaaacu

SEQ ID NO: 2318244 - RNA, 19 nt, Artificial Sequence
  Description of Artificial Sequence: Synthetic oligonucleotide
uucagagcacagggagcug

SEQ ID NO: 2318245 - RNA, 19 nt, Artificial Sequence
  Description of Artificial Sequence: Synthetic oligonucleotide
ucgcucaaguccgcggcga

SEQ ID NO: 2318246 - RNA, 19 nt, Artificial Sequence
  Description of Artificial Sequence: Synthetic oligonucleotide
gcugcggucgcggaaggag

SEQ ID NO: 2318247 - RNA, 19 nt, Artificial Sequence
  Description of Artificial Sequence: Synthetic oligonucleotide
ggaacuuguagggucaagu

SEQ ID NO: 2318248 - RNA, 19 nt, Artificial Sequence
  Description of Artificial Sequence: Synthetic oligonucleotide
auagucagucccacuggaa

SEQ ID NO: 2318249 - RNA, 19 nt, Artificial Sequence
  Description of Artificial Sequence: Synthetic oligonucleotide
cuccaaauuucacuuuuau

SEQ ID NO: 2318250 - RNA, 19 nt, Artificial Sequence
  Description of Artificial Sequence: Synthetic oligonucleotide
gguucauagaaaacaugua

SEQ ID NO: 2318251 - RNA, 19 nt, Artificial Sequence
  Description of Artificial Sequence: Synthetic oligonucleotide
aguucuggucucauuuauu

SEQ ID NO: 2318252 - RNA, 19 nt, Artificial Sequence
  Description of Artificial Sequence: Synthetic oligonucleotide
ugggcgcgcgggacgagcu

SEQ ID NO: 2318253 - RNA, 19 nt, Artificial Sequence
  Description of Artificial Sequence: Synthetic oligonucleotide
ggacaaauagucaggggcu

SEQ ID NO: 2318254 - RNA, 19 nt, Artificial Sequence
  Description of Artificial Sequence: Synthetic oligonucleotide
caaguccgcggcgagccug

SEQ ID NO: 2318255 - RNA, 19 nt, Artificial Sequence
  Description of Artificial Sequence: Synthetic oligonucleotide
cugacuuagcccagcauuu

SEQ ID NO: 2318256 - RNA, 19 nt, Artificial Sequence
  Description of Artificial Sequence: Synthetic oligonucleotide
cucuguggaaaccaucuuu

SEQ ID NO: 2318257 - RNA, 19 nt, Artificial Sequence
  Description of Artificial Sequence: Synthetic oligonucleotide
cacaaucagggugucucca

SEQ ID NO: 2318258 - RNA, 19 nt, Artificial Sequence
  Description of Artificial Sequence: Synthetic oligonucleotide
guauugauuuauacugcau

SEQ ID NO: 2318259 - RNA, 19 nt, Artificial Sequence
  Description of Artificial Sequence: Synthetic oligonucleotide
ucacgucgcagcgcgcacu

SEQ ID NO: 2318260 - RNA, 19 nt, Artificial Sequence
  Description of Artificial Sequence: Synthetic oligonucleotide
ggcuucuauauuaaaacuu

SEQ ID NO: 2318261 - RNA, 19 nt, Artificial Sequence
  Description of Artificial Sequence: Synthetic oligonucleotide
uuguagggucaaguucuua

SEQ ID NO: 2318262 - RNA, 19 nt, Artificial Sequence
  Description of Artificial Sequence: Synthetic oligonucleotide
ucuuuccuauguggccggu

SEQ ID NO: 2318263 - RNA, 19 nt, Artificial Sequence
  Description of Artificial Sequence: Synthetic oligonucleotide
cugcuacuucugacuuagc

SEQ ID NO: 2318264 - RNA, 19 nt, Artificial Sequence
  Description of Artificial Sequence: Synthetic oligonucleotide
aaguccgcggcgagccuga

SEQ ID NO: 2318265 - RNA, 19 nt, Artificial Sequence
  Description of Artificial Sequence: Synthetic oligonucleotide
aaugggcgcgcgggacgag

SEQ ID NO: 2318266 - RNA, 19 nt, Artificial Sequence
  Description of Artificial Sequence: Synthetic oligonucleotide
cacgucgcagcgcgcacuc

SEQ ID NO: 2318267 - RNA, 19 nt, Artificial Sequence
  Description of Artificial Sequence: Synthetic oligonucleotide
caaucgaugcacugagcau

SEQ ID NO: 2318268 - RNA, 19 nt, Artificial Sequence
  Description of Artificial Sequence: Synthetic oligonucleotide
gugcauaaaugaggacuuc

SEQ ID NO: 2318269 - RNA, 19 nt, Artificial Sequence
  Description of Artificial Sequence: Synthetic oligonucleotide
ccaacucauauggauccac

SEQ ID NO: 2318270 - RNA, 19 nt, Artificial Sequence
  Description of Artificial Sequence: Synthetic oligonucleotide
cucacgucgcagcgcgcac

SEQ ID NO: 2318271 - RNA, 19 nt, Artificial Sequence
  Description of Artificial Sequence: Synthetic oligonucleotide
gcgucgcucaaguccgcgg

SEQ ID NO: 2318272 - RNA, 19 nt, Artificial Sequence
  Description of Artificial Sequence: Synthetic oligonucleotide
ugcucacgucgcagcgcgc

SEQ ID NO: 2318273 - RNA, 19 nt, Artificial Sequence
  Description of Artificial Sequence: Synthetic oligonucleotide
guccgcggcgagccugacg

SEQ ID NO: 2318274 - RNA, 19 nt, Artificial Sequence
  Description of Artificial Sequence: Synthetic oligonucleotide
caccggcagaucuccucac

SEQ ID NO: 2318275 - RNA, 19 nt, Artificial Sequence
  Description of Artificial Sequence: Synthetic oligonucleotide
gacgagcugcggucgcgga

SEQ ID NO: 2318276 - RNA, 19 nt, Artificial Sequence
  Description of Artificial Sequence: Synthetic oligonucleotide
cuguuccaccggcagaucu

SEQ ID NO: 2318277 - RNA, 19 nt, Artificial Sequence
  Description of Artificial Sequence: Synthetic oligonucleotide
cucauuuauuagguucaua

SEQ ID NO: 2318278 - RNA, 19 nt, Artificial Sequence
  Description of Artificial Sequence: Synthetic oligonucleotide
guguauagucagucccacu

SEQ ID NO: 2318279 - RNA, 19 nt, Artificial Sequence
  Description of Artificial Sequence: Synthetic oligonucleotide
ugaccacaaucaggguguc

SEQ ID NO: 2318280 - RNA, 19 nt, Artificial Sequence
  Description of Artificial Sequence: Synthetic oligonucleotide
ggacgagcugcggucgcgg

SEQ ID NO: 2318281 - RNA, 19 nt, Artificial Sequence
  Description of Artificial Sequence: Synthetic oligonucleotide
cucucgcaaugaagccaac

SEQ ID NO: 2318282 - RNA, 19 nt, Artificial Sequence
  Description of Artificial Sequence: Synthetic oligonucleotide
gagcaucuuuccgugcaua

SEQ ID NO: 2318283 - RNA, 19 nt, Artificial Sequence
  Description of Artificial Sequence: Synthetic oligonucleotide
ccgugcauaaaugaggacu

SEQ ID NO: 2318284 - RNA, 19 nt, Artificial Sequence
  Description of Artificial Sequence: Synthetic oligonucleotide
gcgagccugacgaccagcc

SEQ ID NO: 2318285 - RNA, 19 nt, Artificial Sequence
  Description of Artificial Sequence: Synthetic oligonucleotide
gacgaccagcccagccgcc

SEQ ID NO: 2318286 - RNA, 19 nt, Artificial Sequence
  Description of Artificial Sequence: Synthetic oligonucleotide
gcgauaaugcacaggcaaa

SEQ ID NO: 2318287 - RNA, 19 nt, Artificial Sequence
  Description of Artificial Sequence: Synthetic oligonucleotide
cgucgcucaaguccgcggc

SEQ ID NO: 2318288 - RNA, 19 nt, Artificial Sequence
  Description of Artificial Sequence: Synthetic oligonucleotide
gccgacgcccgaaaugggc

SEQ ID NO: 2318289 - RNA, 19 nt, Artificial Sequence
  Description of Artificial Sequence: Synthetic oligonucleotide
gcugggaugcgaugucuaa

SEQ ID NO: 2318290 - RNA, 19 nt, Artificial Sequence
  Description of Artificial Sequence: Synthetic oligonucleotide
gggaugcgaugucuaauua

SEQ ID NO: 2318291 - RNA, 19 nt, Artificial Sequence
  Description of Artificial Sequence: Synthetic oligonucleotide
ggcgucgcucaaguccgcg

SEQ ID NO: 2318292 - RNA, 19 nt, Artificial Sequence
  Description of Artificial Sequence: Synthetic oligonucleotide
aagagccggcaagucucua

SEQ ID NO: 2318293 - RNA, 19 nt, Artificial Sequence
  Description of Artificial Sequence: Synthetic oligonucleotide
gggacgagcugcggucgcg

SEQ ID NO: 2318294 - RNA, 19 nt, Artificial Sequence
  Description of Artificial Sequence: Synthetic oligonucleotide
ggucgcggaaggaggcugc

SEQ ID NO: 2318295 - RNA, 19 nt, Artificial Sequence
  Description of Artificial Sequence: Synthetic oligonucleotide
ggcagaucuccucacuuuu

SEQ ID NO: 2318296 - RNA, 19 nt, Artificial Sequence
  Description of Artificial Sequence: Synthetic oligonucleotide
gcugcucacgucgcagcgc

SEQ ID NO: 2318297 - RNA, 19 nt, Artificial Sequence
  Description of Artificial Sequence: Synthetic oligonucleotide
gcccgaaaugggcgcgcgg

SEQ ID NO: 2318298 - RNA, 19 nt, Artificial Sequence
  Description of Artificial Sequence: Synthetic oligonucleotide
gcgggacgagcugcggucg

SEQ ID NO: 2318299 - RNA, 19 nt, Artificial Sequence
  Description of Artificial Sequence: Synthetic oligonucleotide
ucgcggaaggaggcugcuc

SEQ ID NO: 2318300 - RNA, 19 nt, Artificial Sequence
  Description of Artificial Sequence: Synthetic oligonucleotide
gcaaugaagccaacucaua

SEQ ID NO: 2318301 - RNA, 19 nt, Artificial Sequence
  Description of Artificial Sequence: Synthetic oligonucleotide
gcucaaguccgcggcgagc

SEQ ID NO: 2318302 - RNA, 19 nt, Artificial Sequence
  Description of Artificial Sequence: Synthetic oligonucleotide
ccucaaugcuuucuccaaa

SEQ ID NO: 2318303 - RNA, 19 nt, Artificial Sequence
  Description of Artificial Sequence: Synthetic oligonucleotide
cgagcugcggucgcggaag

SEQ ID NO: 2318304 - RNA, 19 nt, Artificial Sequence
  Description of Artificial Sequence: Synthetic oligonucleotide
cuuguagggucaaguucuu

SEQ ID NO: 2318305 - RNA, 19 nt, Artificial Sequence
  Description of Artificial Sequence: Synthetic oligonucleotide
ccaccggcagaucuccuca

SEQ ID NO: 2318306 - RNA, 19 nt, Artificial Sequence
  Description of Artificial Sequence: Synthetic oligonucleotide
cgauaaugcacaggcaaaa

SEQ ID NO: 2318307 - RNA, 19 nt, Artificial Sequence
  Description of Artificial Sequence: Synthetic oligonucleotide
cagaacaaguggcccuuau

SEQ ID NO: 2318308 - RNA, 19 nt, Artificial Sequence
  Description of Artificial Sequence: Synthetic oligonucleotide
aguccgcggcgagccugac

SEQ ID NO: 2318309 - RNA, 19 nt, Artificial Sequence
  Description of Artificial Sequence: Synthetic oligonucleotide
cuggaacuuguagggucaa

SEQ ID NO: 2318310 - RNA, 19 nt, Artificial Sequence
  Description of Artificial Sequence: Synthetic oligonucleotide
cgcaaugaagccaacucau

SEQ ID NO: 2318311 - RNA, 19 nt, Artificial Sequence
  Description of Artificial Sequence: Synthetic oligonucleotide
cggaaggaggcugcucacg

SEQ ID NO: 2318312 - RNA, 19 nt, Artificial Sequence
  Description of Artificial Sequence: Synthetic oligonucleotide
ccagccgcccagaggagca

SEQ ID NO: 2318313 - RNA, 19 nt, Artificial Sequence
  Description of Artificial Sequence: Synthetic oligonucleotide
cgugcauaaaugaggacuu

SEQ ID NO: 2318314 - RNA, 19 nt, Artificial Sequence
  Description of Artificial Sequence: Synthetic oligonucleotide
cgaaaugggcgcgcgggac

SEQ ID NO: 2318315 - RNA, 19 nt, Artificial Sequence
  Description of Artificial Sequence: Synthetic oligonucleotide
cgacgcccgaaaugggcgc

SEQ ID NO: 2318316 - RNA, 19 nt, Artificial Sequence
  Description of Artificial Sequence: Synthetic oligonucleotide
cugggaugcgaugucuaau

SEQ ID NO: 2318317 - RNA, 19 nt, Artificial Sequence
  Description of Artificial Sequence: Synthetic oligonucleotide
cuggauugcugaccacaau

SEQ ID NO: 2318318 - RNA, 19 nt, Artificial Sequence
  Description of Artificial Sequence: Synthetic oligonucleotide
ggacgccggagcgccgacg

SEQ ID NO: 2318319 - RNA, 19 nt, Artificial Sequence
  Description of Artificial Sequence: Synthetic oligonucleotide
caggacgccggagcgccga

SEQ ID NO: 2318320 - RNA, 19 nt, Artificial Sequence
  Description of Artificial Sequence: Synthetic oligonucleotide
gccggagcgccgacgcccg

SEQ ID NO: 2318321 - RNA, 19 nt, Artificial Sequence
  Description of Artificial Sequence: Synthetic oligonucleotide
cgagccugacgaccagccc

SEQ ID NO: 2318322 - RNA, 19 nt, Artificial Sequence
  Description of Artificial Sequence: Synthetic oligonucleotide
ccagcccagccgcccagag

SEQ ID NO: 2318323 - RNA, 19 nt, Artificial Sequence
  Description of Artificial Sequence: Synthetic oligonucleotide
cccagccgcccagaggagc

SEQ ID NO: 2318324 - RNA, 19 nt, Artificial Sequence
  Description of Artificial Sequence: Synthetic oligonucleotide
gcggcgagccugacgacca

SEQ ID NO: 2318325 - RNA, 19 nt, Artificial Sequence
  Description of Artificial Sequence: Synthetic oligonucleotide
ggagcgccgacgcccgaaa

SEQ ID NO: 2318326 - RNA, 19 nt, Artificial Sequence
  Description of Artificial Sequence: Synthetic oligonucleotide
cugcugggaugcgaugucu

SEQ ID NO: 2318327 - RNA, 19 nt, Artificial Sequence
  Description of Artificial Sequence: Synthetic oligonucleotide
ccgaaaugggcgcgcggga

SEQ ID NO: 2318328 - RNA, 19 nt, Artificial Sequence
  Description of Artificial Sequence: Synthetic oligonucleotide
cgcggcgagccugacgacc

SEQ ID NO: 2318329 - RNA, 19 nt, Artificial Sequence
  Description of Artificial Sequence: Synthetic oligonucleotide
guggccggugauagcgaua

SEQ ID NO: 2318330 - RNA, 19 nt, Artificial Sequence
  Description of Artificial Sequence: Synthetic oligonucleotide
cgcucaaguccgcggcgag

SEQ ID NO: 2318331 - RNA, 19 nt, Artificial Sequence
  Description of Artificial Sequence: Synthetic oligonucleotide
gagcgccgacgcccgaaau

SEQ ID NO: 2318332 - RNA, 19 nt, Artificial Sequence
  Description of Artificial Sequence: Synthetic oligonucleotide
gcgcgcgggacgagcugcg

SEQ ID NO: 2318333 - RNA, 19 nt, Artificial Sequence
  Description of Artificial Sequence: Synthetic oligonucleotide
cgccgacgcccgaaauggg

SEQ ID NO: 2318334 - RNA, 19 nt, Artificial Sequence
  Description of Artificial Sequence: Synthetic oligonucleotide
gucgcggaaggaggcugcu

SEQ ID NO: 2318335 - RNA, 19 nt, Artificial Sequence
  Description of Artificial Sequence: Synthetic oligonucleotide
cggucgcggaaggaggcug

SEQ ID NO: 2318336 - RNA, 19 nt, Artificial Sequence
  Description of Artificial Sequence: Synthetic oligonucleotide
cgggacgagcugcggucgc

SEQ ID NO: 2318337 - RNA, 19 nt, Artificial Sequence
  Description of Artificial Sequence: Synthetic oligonucleotide
cgcccgaaaugggcgcgcg

SEQ ID NO: 2318338 - RNA, 19 nt, Artificial Sequence
  Description of Artificial Sequence: Synthetic oligonucleotide
gggcgucgcucaaguccgc

SEQ ID NO: 2318339 - RNA, 19 nt, Artificial Sequence
  Description of Artificial Sequence: Synthetic oligonucleotide
gcgcgggacgagcugcggu

SEQ ID NO: 2318340 - RNA, 19 nt, Artificial Sequence
  Description of Artificial Sequence: Synthetic oligonucleotide
gcccagccgcccagaggag

SEQ ID NO: 2318341 - RNA, 19 nt, Artificial Sequence
  Description of Artificial Sequence: Synthetic oligonucleotide
ccggcagaucuccucacuu

SEQ ID NO: 2318342 - RNA, 19 nt, Artificial Sequence
  Description of Artificial Sequence: Synthetic oligonucleotide
gccugacgaccagcccagc

SEQ ID NO: 2318343 - RNA, 19 nt, Artificial Sequence
  Description of Artificial Sequence: Synthetic oligonucleotide
cggcgagccugacgaccag

SEQ ID NO: 2318344 - RNA, 19 nt, Artificial Sequence
  Description of Artificial Sequence: Synthetic oligonucleotide
cgcgcgggacgagcugcgg

SEQ ID NO: 2318345 - RNA, 19 nt, Artificial Sequence
  Description of Artificial Sequence: Synthetic oligonucleotide
ccgcccagaggagcagcca

SEQ ID NO: 2318346 - RNA, 19 nt, Artificial Sequence
  Description of Artificial Sequence: Synthetic oligonucleotide
gcggucgcggaaggaggcu

SEQ ID NO: 2318347 - RNA, 19 nt, Artificial Sequence
  Description of Artificial Sequence: Synthetic oligonucleotide
cggagcgccgacgcccgaa

SEQ ID NO: 2318348 - RNA, 19 nt, Artificial Sequence
  Description of Artificial Sequence: Synthetic oligonucleotide
ccggagcgccgacgcccga

SEQ ID NO: 2318349 - RNA, 19 nt, Artificial Sequence
  Description of Artificial Sequence: Synthetic oligonucleotide
uaaucaaucucccggaugg

SEQ ID NO: 2318350 - RNA, 19 nt, Artificial Sequence
  Description of Artificial Sequence: Synthetic oligonucleotide
aaggaauguacccagggac

SEQ ID NO: 2318351 - RNA, 19 nt, Artificial Sequence
  Description of Artificial Sequence: Synthetic oligonucleotide
aguguaaucaaucucccgg

SEQ ID NO: 2318352 - RNA, 19 nt, Artificial Sequence
  Description of Artificial Sequence: Synthetic oligonucleotide
uuguaggggaacuugagcg

SEQ ID NO: 2318353 - RNA, 19 nt, Artificial Sequence
  Description of Artificial Sequence: Synthetic oligonucleotide
cuugauaugcuucaccucg

SEQ ID NO: 2318354 - RNA, 19 nt, Artificial Sequence
  Description of Artificial Sequence: Synthetic oligonucleotide
acugggaugagacuugagc

SEQ ID NO: 2318355 - RNA, 19 nt, Artificial Sequence
  Description of Artificial Sequence: Synthetic oligonucleotide
aaggaaaccaaccgauccg

SEQ ID NO: 2318356 - RNA, 19 nt, Artificial Sequence
  Description of Artificial Sequence: Synthetic oligonucleotide
aaccuugauaugcuucacc

SEQ ID NO: 2318357 - RNA, 19 nt, Artificial Sequence
  Description of Artificial Sequence: Synthetic oligonucleotide
cuauguacaaggaauguac

SEQ ID NO: 2318358 - RNA, 19 nt, Artificial Sequence
  Description of Artificial Sequence: Synthetic oligonucleotide
gaaggaaaccaaccgaucc

SEQ ID NO: 2318359 - RNA, 19 nt, Artificial Sequence
  Description of Artificial Sequence: Synthetic oligonucleotide
ggucauaacagcuugcagg

SEQ ID NO: 2318360 - RNA, 19 nt, Artificial Sequence
  Description of Artificial Sequence: Synthetic oligonucleotide
  modified_base (12)..(12): a, c, u, g, unknown or other
gagguguaaacncuggacc

SEQ ID NO: 2318361 - RNA, 19 nt, Artificial Sequence
  Description of Artificial Sequence: Synthetic oligonucleotide
ugagguaggucccacuggg

SEQ ID NO: 2318362 - RNA, 19 nt, Artificial Sequence
  Description of Artificial Sequence: Synthetic oligonucleotide
aaugacccgagguguaaac

SEQ ID NO: 2318363 - RNA, 19 nt, Artificial Sequence
  Description of Artificial Sequence: Synthetic oligonucleotide
uugaagcuuuccuugagag

SEQ ID NO: 2318364 - RNA, 19 nt, Artificial Sequence
  Description of Artificial Sequence: Synthetic oligonucleotide
  modified_base (11)..(11): a, c, u, g, unknown or other
agguguaaacncuggaccg

SEQ ID NO: 2318365 - RNA, 19 nt, Artificial Sequence
  Description of Artificial Sequence: Synthetic oligonucleotide
aucccuaugggucauaaca

SEQ ID NO: 2318366 - RNA, 19 nt, Artificial Sequence
  Description of Artificial Sequence: Synthetic oligonucleotide
ugacuucugaccuuggcug

SEQ ID NO: 2318367 - RNA, 19 nt, Artificial Sequence
  Description of Artificial Sequence: Synthetic oligonucleotide
agcaaaguuguaccuggcc

SEQ ID NO: 2318368 - RNA, 19 nt, Artificial Sequence
  Description of Artificial Sequence: Synthetic oligonucleotide
gucauaacagcuugcaggc

SEQ ID NO: 2318369 - RNA, 19 nt, Artificial Sequence
  Description of Artificial Sequence: Synthetic oligonucleotide
uguacaaggaauguaccca

SEQ ID NO: 2318370 - RNA, 19 nt, Artificial Sequence
  Description of Artificial Sequence: Synthetic oligonucleotide
aaaccaaccgauccgucca

SEQ ID NO: 2318371 - RNA, 19 nt, Artificial Sequence
  Description of Artificial Sequence: Synthetic oligonucleotide
agugauguggauccaguug

SEQ ID NO: 2318372 - RNA, 19 nt, Artificial Sequence
  Description of Artificial Sequence: Synthetic oligonucleotide
ucccuaugggucauaacag

SEQ ID NO: 2318373 - RNA, 19 nt, Artificial Sequence
  Description of Artificial Sequence: Synthetic oligonucleotide
  modified_base (6)..(6): a, c, u, g, unknown or other
aaaccnuggguacgcagug

SEQ ID NO: 2318374 - RNA, 19 nt, Artificial Sequence
  Description of Artificial Sequence: Synthetic oligonucleotide
gaugagguaggucccacug

SEQ ID NO: 2318375 - RNA, 19 nt, Artificial Sequence
  Description of Artificial Sequence: Synthetic oligonucleotide
agauuguccgucugcugcc

SEQ ID NO: 2318376 - RNA, 19 nt, Artificial Sequence
  Description of Artificial Sequence: Synthetic oligonucleotide
  modified_base (6)..(6): a, c, u, g, unknown or other
uaaacncuggaccggcuug

SEQ ID NO: 2318377 - RNA, 19 nt, Artificial Sequence
  Description of Artificial Sequence: Synthetic oligonucleotide
uguaccuggccacagcugu

SEQ ID NO: 2318378 - RNA, 19 nt, Artificial Sequence
  Description of Artificial Sequence: Synthetic oligonucleotide
auucgucucgccuuuccac

SEQ ID NO: 2318379 - RNA, 19 nt, Artificial Sequence
  Description of Artificial Sequence: Synthetic oligonucleotide
cugaccuuggcugucaucc

SEQ ID NO: 2318380 - RNA, 19 nt, Artificial Sequence
  Description of Artificial Sequence: Synthetic oligonucleotide
gauccguccauucgucucg

SEQ ID NO: 2318381 - RNA, 19 nt, Artificial Sequence
  Description of Artificial Sequence: Synthetic oligonucleotide
ugggaugagacuugagcag

SEQ ID NO: 2318382 - RNA, 19 nt, Artificial Sequence
  Description of Artificial Sequence: Synthetic oligonucleotide
acauacgucgaaggaaacc

SEQ ID NO: 2318383 - RNA, 19 nt, Artificial Sequence
  Description of Artificial Sequence: Synthetic oligonucleotide
  modified_base (15)..(15): a, c, u, g, unknown or other
guugccagcaaaccnuggg

SEQ ID NO: 2318384 - RNA, 19 nt, Artificial Sequence
  Description of Artificial Sequence: Synthetic oligonucleotide
acugguaguacuccacaag

SEQ ID NO: 2318385 - RNA, 19 nt, Artificial Sequence
  Description of Artificial Sequence: Synthetic oligonucleotide
ucgaaggaaaccaaccgau

SEQ ID NO: 2318386 - RNA, 19 nt, Artificial Sequence
  Description of Artificial Sequence: Synthetic oligonucleotide
uguccaacugcuugaagcu

SEQ ID NO: 2318387 - RNA, 19 nt, Artificial Sequence
  Description of Artificial Sequence: Synthetic oligonucleotide
cuuccacauacgucgaagg

SEQ ID NO: 2318388 - RNA, 19 nt, Artificial Sequence
  Description of Artificial Sequence: Synthetic oligonucleotide
auaugcuucaccucgucau

SEQ ID NO: 2318389 - RNA, 19 nt, Artificial Sequence
  Description of Artificial Sequence: Synthetic oligonucleotide
guacaaggaauguacccag

SEQ ID NO: 2318390 - RNA, 19 nt, Artificial Sequence
  Description of Artificial Sequence: Synthetic oligonucleotide
uacgcaguguaaucaaucu

SEQ ID NO: 2318391 - RNA, 19 nt, Artificial Sequence
  Description of Artificial Sequence: Synthetic oligonucleotide
  modified_base (16)..(16): a, c, u, g, unknown or other
uguugccagcaaaccnugg

SEQ ID NO: 2318392 - RNA, 19 nt, Artificial Sequence
  Description of Artificial Sequence: Synthetic oligonucleotide
caaaguuguaccuggccac

SEQ ID NO: 2318393 - RNA, 19 nt, Artificial Sequence
  Description of Artificial Sequence: Synthetic oligonucleotide
aguuguaccuggccacagc

SEQ ID NO: 2318394 - RNA, 19 nt, Artificial Sequence
  Description of Artificial Sequence: Synthetic oligonucleotide
cuuguaggggaacuugagc

SEQ ID NO: 2318395 - RNA, 19 nt, Artificial Sequence
  Description of Artificial Sequence: Synthetic oligonucleotide
aaucaaucucccggauggc

SEQ ID NO: 2318396 - RNA, 19 nt, Artificial Sequence
  Description of Artificial Sequence: Synthetic oligonucleotide
aaccgauccguccauucgu

SEQ ID NO: 2318397 - RNA, 19 nt, Artificial Sequence
  Description of Artificial Sequence: Synthetic oligonucleotide
uuccauguugccagcaaac

SEQ ID NO: 2318398 - RNA, 19 nt, Artificial Sequence
  Description of Artificial Sequence: Synthetic oligonucleotide
ucuuccacauacgucgaag

SEQ ID NO: 2318399 - RNA, 19 nt, Artificial Sequence
  Description of Artificial Sequence: Synthetic oligonucleotide
  modified_base (18)..(18): a, c, u, g, unknown or other
ugacccgagguguaaacnc

SEQ ID NO: 2318400 - RNA, 19 nt, Artificial Sequence
  Description of Artificial Sequence: Synthetic oligonucleotide
ugaacuugaugcugauggc

SEQ ID NO: 2318401 - RNA, 19 nt, Artificial Sequence
  Description of Artificial Sequence: Synthetic oligonucleotide
ugagcguaguguccaacug

SEQ ID NO: 2318402 - RNA, 19 nt, Artificial Sequence
  Description of Artificial Sequence: Synthetic oligonucleotide
guaaucaaucucccggaug

SEQ ID NO: 2318403 - RNA, 19 nt, Artificial Sequence
  Description of Artificial Sequence: Synthetic oligonucleotide
cuccacaaccuugauaugc

SEQ ID NO: 2318404 - RNA, 19 nt, Artificial Sequence
  Description of Artificial Sequence: Synthetic oligonucleotide
ucccgugcagcaaaguugu

SEQ ID NO: 2318405 - RNA, 19 nt, Artificial Sequence
  Description of Artificial Sequence: Synthetic oligonucleotide
guaguacuccacaagcucc

SEQ ID NO: 2318406 - RNA, 19 nt, Artificial Sequence
  Description of Artificial Sequence: Synthetic oligonucleotide
cugggaugagacuugagca

SEQ ID NO: 2318407 - RNA, 19 nt, Artificial Sequence
  Description of Artificial Sequence: Synthetic oligonucleotide
acacccaucccuauggguc

SEQ ID NO: 2318408 - RNA, 19 nt, Artificial Sequence
  Description of Artificial Sequence: Synthetic oligonucleotide
gagcguaguguccaacugc

SEQ ID NO: 2318409 - RNA, 19 nt, Artificial Sequence
  Description of Artificial Sequence: Synthetic oligonucleotide
aacacccaucccuaugggu

SEQ ID NO: 2318410 - RNA, 19 nt, Artificial Sequence
  Description of Artificial Sequence: Synthetic oligonucleotide
uucgucucgccuuuccacc

SEQ ID NO: 2318411 - RNA, 19 nt, Artificial Sequence
  Description of Artificial Sequence: Synthetic oligonucleotide
aacuugagcguagugucca

SEQ ID NO: 2318412 - RNA, 19 nt, Artificial Sequence
  Description of Artificial Sequence: Synthetic oligonucleotide
aacuugaugcugauggcga

SEQ ID NO: 2318413 - RNA, 19 nt, Artificial Sequence
  Description of Artificial Sequence: Synthetic oligonucleotide
uguaggggaacuugagcgu

SEQ ID NO: 2318414 - RNA, 19 nt, Artificial Sequence
  Description of Artificial Sequence: Synthetic oligonucleotide
uaguacuccacaagcucca

SEQ ID NO: 2318415 - RNA, 19 nt, Artificial Sequence
  Description of Artificial Sequence: Synthetic oligonucleotide
ucgccuuuccaccagcccu

SEQ ID NO: 2318416 - RNA, 19 nt, Artificial Sequence
  Description of Artificial Sequence: Synthetic oligonucleotide
gcagcaaaguuguaccugg

SEQ ID NO: 2318417 - RNA, 19 nt, Artificial Sequence
  Description of Artificial Sequence: Synthetic oligonucleotide
uucaccacgucaccuuccc

SEQ ID NO: 2318418 - RNA, 19 nt, Artificial Sequence
  Description of Artificial Sequence: Synthetic oligonucleotide
acgcaguguaaucaaucuc

SEQ ID NO: 2318419 - RNA, 19 nt, Artificial Sequence
  Description of Artificial Sequence: Synthetic oligonucleotide
ugaagcuuuccuugagaga

SEQ ID NO: 2318420 - RNA, 19 nt, Artificial Sequence
  Description of Artificial Sequence: Synthetic oligonucleotide
uacgucgaaggaaaccaac

SEQ ID NO: 2318421 - RNA, 19 nt, Artificial Sequence
  Description of Artificial Sequence: Synthetic oligonucleotide
uugagcguaguguccaacu

SEQ ID NO: 2318422 - RNA, 19 nt, Artificial Sequence
  Description of Artificial Sequence: Synthetic oligonucleotide
acaguggaacacccauccc

SEQ ID NO: 2318423 - RNA, 19 nt, Artificial Sequence
  Description of Artificial Sequence: Synthetic oligonucleotide
agggacagguaacccaggg

SEQ ID NO: 2318424 - RNA, 19 nt, Artificial Sequence
  Description of Artificial Sequence: Synthetic oligonucleotide
caagucucgccuucacugg

SEQ ID NO: 2318425 - RNA, 19 nt, Artificial Sequence
  Description of Artificial Sequence: Synthetic oligonucleotide
cucccgaagaacaucugug

SEQ ID NO: 2318426 - RNA, 19 nt, Artificial Sequence
  Description of Artificial Sequence: Synthetic oligonucleotide
caggcggugacuucugacc

SEQ ID NO: 2318427 - RNA, 19 nt, Artificial Sequence
  Description of Artificial Sequence: Synthetic oligonucleotide
accgauucggcuguagauc

SEQ ID NO: 2318428 - RNA, 19 nt, Artificial Sequence
  Description of Artificial Sequence: Synthetic oligonucleotide
cauacgucgaaggaaacca

SEQ ID NO: 2318429 - RNA, 19 nt, Artificial Sequence
  Description of Artificial Sequence: Synthetic oligonucleotide
ggaacuugagcguaguguc

SEQ ID NO: 2318430 - RNA, 19 nt, Artificial Sequence
  Description of Artificial Sequence: Synthetic oligonucleotide
gauaugcuucaccucguca

SEQ ID NO: 2318431 - RNA, 19 nt, Artificial Sequence
  Description of Artificial Sequence: Synthetic oligonucleotide
uguaaucaaucucccggau

SEQ ID NO: 2318432 - RNA, 19 nt, Artificial Sequence
  Description of Artificial Sequence: Synthetic oligonucleotide
uccacauacgucgaaggaa

SEQ ID NO: 2318433 - RNA, 19 nt, Artificial Sequence
  Description of Artificial Sequence: Synthetic oligonucleotide
uggaacacccaucccuaug

SEQ ID NO: 2318434 - RNA, 19 nt, Artificial Sequence
  Description of Artificial Sequence: Synthetic oligonucleotide
ggugguagcacgucucccg

SEQ ID NO: 2318435 - RNA, 19 nt, Artificial Sequence
  Description of Artificial Sequence: Synthetic oligonucleotide
uguggucagcacaggauuc

SEQ ID NO: 2318436 - RNA, 19 nt, Artificial Sequence
  Description of Artificial Sequence: Synthetic oligonucleotide
ugagcagauuguccgucug

SEQ ID NO: 2318437 - RNA, 19 nt, Artificial Sequence
  Description of Artificial Sequence: Synthetic oligonucleotide
ugcagcaaaguuguaccug

SEQ ID NO: 2318438 - RNA, 19 nt, Artificial Sequence
  Description of Artificial Sequence: Synthetic oligonucleotide
agguccuggugguagcacg

SEQ ID NO: 2318439 - RNA, 19 nt, Artificial Sequence
  Description of Artificial Sequence: Synthetic oligonucleotide
  modified_base (10)..(10): a, c, u, g, unknown or other
gguguaaacncuggaccgg

SEQ ID NO: 2318440 - RNA, 19 nt, Artificial Sequence
  Description of Artificial Sequence: Synthetic oligonucleotide
uccauguugccagcaaacc

SEQ ID NO: 2318441 - RNA, 19 nt, Artificial Sequence
  Description of Artificial Sequence: Synthetic oligonucleotide
ggacagguaacccagggca

SEQ ID NO: 2318442 - RNA, 19 nt, Artificial Sequence
  Description of Artificial Sequence: Synthetic oligonucleotide
cgcaguguaaucaaucucc

SEQ ID NO: 2318443 - RNA, 19 nt, Artificial Sequence
  Description of Artificial Sequence: Synthetic oligonucleotide
aaaguuguaccuggccaca

SEQ ID NO: 2318444 - RNA, 19 nt, Artificial Sequence
  Description of Artificial Sequence: Synthetic oligonucleotide
guagaucuucaccacguca

SEQ ID NO: 2318445 - RNA, 19 nt, Artificial Sequence
  Description of Artificial Sequence: Synthetic oligonucleotide
ucgcucucugaugagguag

SEQ ID NO: 2318446 - RNA, 19 nt, Artificial Sequence
  Description of Artificial Sequence: Synthetic oligonucleotide
caaccgauccguccauucg

SEQ ID NO: 2318447 - RNA, 19 nt, Artificial Sequence
  Description of Artificial Sequence: Synthetic oligonucleotide
uggccauguugccugagcu

SEQ ID NO: 2318448 - RNA, 19 nt, Artificial Sequence
  Description of Artificial Sequence: Synthetic oligonucleotide
uccuguccaagucucgccu

SEQ ID NO: 2318449 - RNA, 19 nt, Artificial Sequence
  Description of Artificial Sequence: Synthetic oligonucleotide
uggguacgcaguguaauca

SEQ ID NO: 2318450 - RNA, 19 nt, Artificial Sequence
  Description of Artificial Sequence: Synthetic oligonucleotide
ugcuugaagcuuuccuuga

SEQ ID NO: 2318451 - RNA, 19 nt, Artificial Sequence
  Description of Artificial Sequence: Synthetic oligonucleotide
aagucucgccuucacugga

SEQ ID NO: 2318452 - RNA, 19 nt, Artificial Sequence
  Description of Artificial Sequence: Synthetic oligonucleotide
ugggucauaacagcuugca

SEQ ID NO: 2318453 - RNA, 19 nt, Artificial Sequence
  Description of Artificial Sequence: Synthetic oligonucleotide
uguagaucuucaccacguc

SEQ ID NO: 2318454 - RNA, 19 nt, Artificial Sequence
  Description of Artificial Sequence: Synthetic oligonucleotide
gucgaaggaaaccaaccga

SEQ ID NO: 2318455 - RNA, 19 nt, Artificial Sequence
  Description of Artificial Sequence: Synthetic oligonucleotide
cucugaugagguagguccc

SEQ ID NO: 2318456 - RNA, 19 nt, Artificial Sequence
  Description of Artificial Sequence: Synthetic oligonucleotide
  modified_base (8)..(8): a, c, u, g, unknown or other
uguaaacncuggaccggcu

SEQ ID NO: 2318457 - RNA, 19 nt, Artificial Sequence
  Description of Artificial Sequence: Synthetic oligonucleotide
guguaaucaaucucccgga

SEQ ID NO: 2318458 - RNA, 19 nt, Artificial Sequence
  Description of Artificial Sequence: Synthetic oligonucleotide
gucaccuucccgcagcgac

SEQ ID NO: 2318459 - RNA, 19 nt, Artificial Sequence
  Description of Artificial Sequence: Synthetic oligonucleotide
agcacaggauuccucuaug

SEQ ID NO: 2318460 - RNA, 19 nt, Artificial Sequence
  Description of Artificial Sequence: Synthetic oligonucleotide
uaggggaacuugagcguag

SEQ ID NO: 2318461 - RNA, 19 nt, Artificial Sequence
  Description of Artificial Sequence: Synthetic oligonucleotide
auggcgggcggccaacagg

SEQ ID NO: 2318462 - RNA, 19 nt, Artificial Sequence
  Description of Artificial Sequence: Synthetic oligonucleotide
  modified_base (5)..(5): a, c, u, g, unknown or other
aaacncuggaccggcuuga

SEQ ID NO: 2318463 - RNA, 19 nt, Artificial Sequence
  Description of Artificial Sequence: Synthetic oligonucleotide
uccaagucucgccuucacu

SEQ ID NO: 2318464 - RNA, 19 nt, Artificial Sequence
  Description of Artificial Sequence: Synthetic oligonucleotide
gagcagauuguccgucugc

SEQ ID NO: 2318465 - RNA, 19 nt, Artificial Sequence
  Description of Artificial Sequence: Synthetic oligonucleotide
uuguaccuggccacagcug

SEQ ID NO: 2318466 - RNA, 19 nt, Artificial Sequence
  Description of Artificial Sequence: Synthetic oligonucleotide
ccaagucucgccuucacug

SEQ ID NO: 2318467 - RNA, 19 nt, Artificial Sequence
  Description of Artificial Sequence: Synthetic oligonucleotide
ugucccgugcagcaaaguu

SEQ ID NO: 2318468 - RNA, 19 nt, Artificial Sequence
  Description of Artificial Sequence: Synthetic oligonucleotide
aaguuguaccuggccacag

SEQ ID NO: 2318469 - RNA, 19 nt, Artificial Sequence
  Description of Artificial Sequence: Synthetic oligonucleotide
gaauguacccagggacagg

SEQ ID NO: 2318470 - RNA, 19 nt, Artificial Sequence
  Description of Artificial Sequence: Synthetic oligonucleotide
uggucgcucucugaugagg

SEQ ID NO: 2318471 - RNA, 19 nt, Artificial Sequence
  Description of Artificial Sequence: Synthetic oligonucleotide
gaacuugagcguagugucc

SEQ ID NO: 2318472 - RNA, 19 nt, Artificial Sequence
  Description of Artificial Sequence: Synthetic oligonucleotide
uggcgggcggccaacaggu

SEQ ID NO: 2318473 - RNA, 19 nt, Artificial Sequence
  Description of Artificial Sequence: Synthetic oligonucleotide
  modified_base (3)..(3): a, c, u, g, unknown or other
acncuggaccggcuugagg

SEQ ID NO: 2318474 - RNA, 19 nt, Artificial Sequence
  Description of Artificial Sequence: Synthetic oligonucleotide
gugguagcacgucucccgg

SEQ ID NO: 2318475 - RNA, 19 nt, Artificial Sequence
  Description of Artificial Sequence: Synthetic oligonucleotide
ggcaggguuucacagauga

SEQ ID NO: 2318476 - RNA, 19 nt, Artificial Sequence
  Description of Artificial Sequence: Synthetic oligonucleotide
uaugcuucaccucgucauu

SEQ ID NO: 2318477 - RNA, 19 nt, Artificial Sequence
  Description of Artificial Sequence: Synthetic oligonucleotide
ugccaaugacccgaggugu

SEQ ID NO: 2318478 - RNA, 19 nt, Artificial Sequence
  Description of Artificial Sequence: Synthetic oligonucleotide
gacagguaacccagggcag

SEQ ID NO: 2318479 - RNA, 19 nt, Artificial Sequence
  Description of Artificial Sequence: Synthetic oligonucleotide
uggcugucauccacacccg

SEQ ID NO: 2318480 - RNA, 19 nt, Artificial Sequence
  Description of Artificial Sequence: Synthetic oligonucleotide
agguaggucccacugggau

SEQ ID NO: 2318481 - RNA, 19 nt, Artificial Sequence
  Description of Artificial Sequence: Synthetic oligonucleotide
cuugaagcuuuccuugaga

SEQ ID NO: 2318482 - RNA, 19 nt, Artificial Sequence
  Description of Artificial Sequence: Synthetic oligonucleotide
  modified_base (10)..(10): a, c, u, g, unknown or other
cagcaaaccnuggguacgc

SEQ ID NO: 2318483 - RNA, 19 nt, Artificial Sequence
  Description of Artificial Sequence: Synthetic oligonucleotide
caccucgucauugaacuug

SEQ ID NO: 2318484 - RNA, 19 nt, Artificial Sequence
  Description of Artificial Sequence: Synthetic oligonucleotide
gauuguccgucugcugccg

SEQ ID NO: 2318485 - RNA, 19 nt, Artificial Sequence
  Description of Artificial Sequence: Synthetic oligonucleotide
agcgacagcucccgcaugu

SEQ ID NO: 2318486 - RNA, 19 nt, Artificial Sequence
  Description of Artificial Sequence: Synthetic oligonucleotide
ucugcugccguuccauguu

SEQ ID NO: 2318487 - RNA, 19 nt, Artificial Sequence
  Description of Artificial Sequence: Synthetic oligonucleotide
augggucauaacagcuugc

SEQ ID NO: 2318488 - RNA, 19 nt, Artificial Sequence
  Description of Artificial Sequence: Synthetic oligonucleotide
cuugaugcugauggcgaag

SEQ ID NO: 2318489 - RNA, 19 nt, Artificial Sequence
  Description of Artificial Sequence: Synthetic oligonucleotide
cuucaccacgucaccuucc

SEQ ID NO: 2318490 - RNA, 19 nt, Artificial Sequence
  Description of Artificial Sequence: Synthetic oligonucleotide
ucgccuucacuggacaccc

SEQ ID NO: 2318491 - RNA, 19 nt, Artificial Sequence
  Description of Artificial Sequence: Synthetic oligonucleotide
  modified_base (7)..(7): a, c, u, g, unknown or other
caaaccnuggguacgcagu

SEQ ID NO: 2318492 - RNA, 19 nt, Artificial Sequence
  Description of Artificial Sequence: Synthetic oligonucleotide
  modified_base (9)..(9): a, c, u, g, unknown or other
guguaaacncuggaccggc

SEQ ID NO: 2318493 - RNA, 19 nt, Artificial Sequence
  Description of Artificial Sequence: Synthetic oligonucleotide
guucccagagccauggaga

SEQ ID NO: 2318494 - RNA, 19 nt, Artificial Sequence
  Description of Artificial Sequence: Synthetic oligonucleotide
uugccugagcucccucucc

SEQ ID NO: 2318495 - RNA, 19 nt, Artificial Sequence
  Description of Artificial Sequence: Synthetic oligonucleotide
agcuuuccuugagagagug

SEQ ID NO: 2318496 - RNA, 19 nt, Artificial Sequence
  Description of Artificial Sequence: Synthetic oligonucleotide
aggaaaccaaccgauccgu

SEQ ID NO: 2318497 - RNA, 19 nt, Artificial Sequence
  Description of Artificial Sequence: Synthetic oligonucleotide
aggaauguacccagggaca

SEQ ID NO: 2318498 - RNA, 19 nt, Artificial Sequence
  Description of Artificial Sequence: Synthetic oligonucleotide
agagaguggcacugguagu

SEQ ID NO: 2318499 - RNA, 19 nt, Artificial Sequence
  Description of Artificial Sequence: Synthetic oligonucleotide
ugguagcacgucucccggg

SEQ ID NO: 2318500 - RNA, 19 nt, Artificial Sequence
  Description of Artificial Sequence: Synthetic oligonucleotide
  modified_base (18)..(18): a, c, u, g, unknown or other
cauguugccagcaaaccnu

SEQ ID NO: 2318501 - RNA, 19 nt, Artificial Sequence
  Description of Artificial Sequence: Synthetic oligonucleotide
aggcggugacuucugaccu

SEQ ID NO: 2318502 - RNA, 19 nt, Artificial Sequence
  Description of Artificial Sequence: Synthetic oligonucleotide
  modified_base (4)..(4): a, c, u, g, unknown or other
aacncuggaccggcuugag

SEQ ID NO: 2318503 - RNA, 19 nt, Artificial Sequence
  Description of Artificial Sequence: Synthetic oligonucleotide
  modified_base (4)..(4): a, c, u, g, unknown or other
accnuggguacgcagugua

SEQ ID NO: 2318504 - RNA, 19 nt, Artificial Sequence
  Description of Artificial Sequence: Synthetic oligonucleotide
agcagauuguccgucugcu

SEQ ID NO: 2318505 - RNA, 19 nt, Artificial Sequence
  Description of Artificial Sequence: Synthetic oligonucleotide
ugauguggauccaguuguc

SEQ ID NO: 2318506 - RNA, 19 nt, Artificial Sequence
  Description of Artificial Sequence: Synthetic oligonucleotide
ucugcuggucgcucucuga

SEQ ID NO: 2318507 - RNA, 19 nt, Artificial Sequence
  Description of Artificial Sequence: Synthetic oligonucleotide
  modified_base (2)..(2): a, c, u, g, unknown or other
cncuggaccggcuugaggu

SEQ ID NO: 2318508 - RNA, 19 nt, Artificial Sequence
  Description of Artificial Sequence: Synthetic oligonucleotide
uagcacgucucccgggacu

SEQ ID NO: 2318509 - RNA, 19 nt, Artificial Sequence
  Description of Artificial Sequence: Synthetic oligonucleotide
agcguaguguccaacugcu

SEQ ID NO: 2318510 - RNA, 19 nt, Artificial Sequence
  Description of Artificial Sequence: Synthetic oligonucleotide
ggaauguacccagggacag

SEQ ID NO: 2318511 - RNA, 19 nt, Artificial Sequence
  Description of Artificial Sequence: Synthetic oligonucleotide
uucggcuguagaucuucac

SEQ ID NO: 2318512 - RNA, 19 nt, Artificial Sequence
  Description of Artificial Sequence: Synthetic oligonucleotide
cucagugauguggauccag

SEQ ID NO: 2318513 - RNA, 19 nt, Artificial Sequence
  Description of Artificial Sequence: Synthetic oligonucleotide
ugcugccguuccauguugc

SEQ ID NO: 2318514 - RNA, 19 nt, Artificial Sequence
  Description of Artificial Sequence: Synthetic oligonucleotide
guacgcaguguaaucaauc

SEQ ID NO: 2318515 - RNA, 19 nt, Artificial Sequence
  Description of Artificial Sequence: Synthetic oligonucleotide
agaccucccgaagaacauc

SEQ ID NO: 2318516 - RNA, 19 nt, Artificial Sequence
  Description of Artificial Sequence: Synthetic oligonucleotide
ucauaacagcuugcaggcc

SEQ ID NO: 2318517 - RNA, 19 nt, Artificial Sequence
  Description of Artificial Sequence: Synthetic oligonucleotide
ucccgggacuuguagggga

SEQ ID NO: 2318518 - RNA, 19 nt, Artificial Sequence
  Description of Artificial Sequence: Synthetic oligonucleotide
ucccacugggaugagacuu

SEQ ID NO: 2318519 - RNA, 19 nt, Artificial Sequence
  Description of Artificial Sequence: Synthetic oligonucleotide
caucugugaguccugucca

SEQ ID NO: 2318520 - RNA, 19 nt, Artificial Sequence
  Description of Artificial Sequence: Synthetic oligonucleotide
ucgucucgccuuuccacca

SEQ ID NO: 2318521 - RNA, 19 nt, Artificial Sequence
  Description of Artificial Sequence: Synthetic oligonucleotide
caugucccgugcagcaaag

SEQ ID NO: 2318522 - RNA, 19 nt, Artificial Sequence
  Description of Artificial Sequence: Synthetic oligonucleotide
cugguccccaccgauucgg

SEQ ID NO: 2318523 - RNA, 19 nt, Artificial Sequence
  Description of Artificial Sequence: Synthetic oligonucleotide
acccgccuggccauguugc

SEQ ID NO: 2318524 - RNA, 19 nt, Artificial Sequence
  Description of Artificial Sequence: Synthetic oligonucleotide
gccauguugccugagcucc

SEQ ID NO: 2318525 - RNA, 19 nt, Artificial Sequence
  Description of Artificial Sequence: Synthetic oligonucleotide
guuguaccuggccacagcu

SEQ ID NO: 2318526 - RNA, 19 nt, Artificial Sequence
  Description of Artificial Sequence: Synthetic oligonucleotide
gucagcacaggauuccucu

SEQ ID NO: 2318527 - RNA, 19 nt, Artificial Sequence
  Description of Artificial Sequence: Synthetic oligonucleotide
ugcuggucgcucucugaug

SEQ ID NO: 2318528 - RNA, 19 nt, Artificial Sequence
  Description of Artificial Sequence: Synthetic oligonucleotide
cagcaaaguuguaccuggc

SEQ ID NO: 2318529 - RNA, 19 nt, Artificial Sequence
  Description of Artificial Sequence: Synthetic oligonucleotide
ucuccacaaccuugauaug

SEQ ID NO: 2318530 - RNA, 19 nt, Artificial Sequence
  Description of Artificial Sequence: Synthetic oligonucleotide
acgucaccuucccgcagcg

SEQ ID NO: 2318531 - RNA, 19 nt, Artificial Sequence
  Description of Artificial Sequence: Synthetic oligonucleotide
uaccuggccacagcugugc

SEQ ID NO: 2318532 - RNA, 19 nt, Artificial Sequence
  Description of Artificial Sequence: Synthetic oligonucleotide
cacauacgucgaaggaaac

SEQ ID NO: 2318533 - RNA, 19 nt, Artificial Sequence
  Description of Artificial Sequence: Synthetic oligonucleotide
auaacagcuugcaggccug

SEQ ID NO: 2318534 - RNA, 19 nt, Artificial Sequence
  Description of Artificial Sequence: Synthetic oligonucleotide
ggugacuucugaccuuggc

SEQ ID NO: 2318535 - RNA, 19 nt, Artificial Sequence
  Description of Artificial Sequence: Synthetic oligonucleotide
  modified_base (8)..(8): a, c, u, g, unknown or other
gcaaaccnuggguacgcag

SEQ ID NO: 2318536 - RNA, 19 nt, Artificial Sequence
  Description of Artificial Sequence: Synthetic oligonucleotide
  modified_base (5)..(5): a, c, u, g, unknown or other
aaccnuggguacgcagugu

SEQ ID NO: 2318537 - RNA, 19 nt, Artificial Sequence
  Description of Artificial Sequence: Synthetic oligonucleotide
cucgccuuuccaccagccc

SEQ ID NO: 2318538 - RNA, 19 nt, Artificial Sequence
  Description of Artificial Sequence: Synthetic oligonucleotide
  modified_base (19)..(19): a, c, u, g, unknown or other
augacccgagguguaaacn

SEQ ID NO: 2318539 - RNA, 19 nt, Artificial Sequence
  Description of Artificial Sequence: Synthetic oligonucleotide
cgaagaacaucugugaguc

SEQ ID NO: 2318540 - RNA, 19 nt, Artificial Sequence
  Description of Artificial Sequence: Synthetic oligonucleotide
aaccaaccgauccguccau

SEQ ID NO: 2318541 - RNA, 19 nt, Artificial Sequence
  Description of Artificial Sequence: Synthetic oligonucleotide
cguaguguccaacugcuug

SEQ ID NO: 2318542 - RNA, 19 nt, Artificial Sequence
  Description of Artificial Sequence: Synthetic oligonucleotide
gguaacccagggcagguga

SEQ ID NO: 2318543 - RNA, 19 nt, Artificial Sequence
  Description of Artificial Sequence: Synthetic oligonucleotide
agucucgccuucacuggac

SEQ ID NO: 2318544 - RNA, 19 nt, Artificial Sequence
  Description of Artificial Sequence: Synthetic oligonucleotide
uccccaccgauucggcugu

SEQ ID NO: 2318545 - RNA, 19 nt, Artificial Sequence
  Description of Artificial Sequence: Synthetic oligonucleotide
  modified_base (13)..(13): a, c, u, g, unknown or other
cgagguguaaacncuggac

SEQ ID NO: 2318546 - RNA, 19 nt, Artificial Sequence
  Description of Artificial Sequence: Synthetic oligonucleotide
gggucauaacagcuugcag

SEQ ID NO: 2318547 - RNA, 19 nt, Artificial Sequence
  Description of Artificial Sequence: Synthetic oligonucleotide
cugauggcgaagcgcucag

SEQ ID NO: 2318548 - RNA, 19 nt, Artificial Sequence
  Description of Artificial Sequence: Synthetic oligonucleotide
  modified_base (16)..(16): a, c, u, g, unknown or other
acccgagguguaaacncug

SEQ ID NO: 2318549 - RNA, 19 nt, Artificial Sequence
  Description of Artificial Sequence: Synthetic oligonucleotide
gaguccuguccaagucucg

SEQ ID NO: 2318550 - RNA, 19 nt, Artificial Sequence
  Description of Artificial Sequence: Synthetic oligonucleotide
cccuaugggucauaacagc

SEQ ID NO: 2318551 - RNA, 19 nt, Artificial Sequence
  Description of Artificial Sequence: Synthetic oligonucleotide
accggcuugagguccuggu

SEQ ID NO: 2318552 - RNA, 19 nt, Artificial Sequence
  Description of Artificial Sequence: Synthetic oligonucleotide
guggcacugguaguacucc

SEQ ID NO: 2318553 - RNA, 19 nt, Artificial Sequence
  Description of Artificial Sequence: Synthetic oligonucleotide
gcuggucgcucucugauga

SEQ ID NO: 2318554 - RNA, 19 nt, Artificial Sequence
  Description of Artificial Sequence: Synthetic oligonucleotide
cuggaccggcuugaggucc

SEQ ID NO: 2318555 - RNA, 19 nt, Artificial Sequence
  Description of Artificial Sequence: Synthetic oligonucleotide
auguugccugagcucccuc

SEQ ID NO: 2318556 - RNA, 19 nt, Artificial Sequence
  Description of Artificial Sequence: Synthetic oligonucleotide
  modified_base (12)..(12): a, c, u, g, unknown or other
gccagcaaaccnuggguac

SEQ ID NO: 2318557 - RNA, 19 nt, Artificial Sequence
  Description of Artificial Sequence: Synthetic oligonucleotide
auccguccauucgucucgc

SEQ ID NO: 2318558 - RNA, 19 nt, Artificial Sequence
  Description of Artificial Sequence: Synthetic oligonucleotide
caguggaacacccaucccu

SEQ ID NO: 2318559 - RNA, 19 nt, Artificial Sequence
  Description of Artificial Sequence: Synthetic oligonucleotide
  modified_base (17)..(17): a, c, u, g, unknown or other
auguugccagcaaaccnug

SEQ ID NO: 2318560 - RNA, 19 nt, Artificial Sequence
  Description of Artificial Sequence: Synthetic oligonucleotide
aguggaacacccaucccua

SEQ ID NO: 2318561 - RNA, 19 nt, Artificial Sequence
  Description of Artificial Sequence: Synthetic oligonucleotide
cuugagcguaguguccaac

SEQ ID NO: 2318562 - RNA, 19 nt, Artificial Sequence
  Description of Artificial Sequence: Synthetic oligonucleotide
ggacuuguaggggaacuug

SEQ ID NO: 2318563 - RNA, 19 nt, Artificial Sequence
  Description of Artificial Sequence: Synthetic oligonucleotide
accgauccguccauucguc

SEQ ID NO: 2318564 - RNA, 19 nt, Artificial Sequence
  Description of Artificial Sequence: Synthetic oligonucleotide
cccgaagaacaucugugag

SEQ ID NO: 2318565 - RNA, 19 nt, Artificial Sequence
  Description of Artificial Sequence: Synthetic oligonucleotide
caucccuaugggucauaac

SEQ ID NO: 2318566 - RNA, 19 nt, Artificial Sequence
  Description of Artificial Sequence: Synthetic oligonucleotide
ggagaccucccgaagaaca

SEQ ID NO: 2318567 - RNA, 19 nt, Artificial Sequence
  Description of Artificial Sequence: Synthetic oligonucleotide
  modified_base (7)..(7): a, c, u, g, unknown or other
guaaacncuggaccggcuu

SEQ ID NO: 2318568 - RNA, 19 nt, Artificial Sequence
  Description of Artificial Sequence: Synthetic oligonucleotide
  modified_base (11)..(11): a, c, u, g, unknown or other
ccagcaaaccnuggguacg

SEQ ID NO: 2318569 - RNA, 19 nt, Artificial Sequence
  Description of Artificial Sequence: Synthetic oligonucleotide
aagcuuuccuugagagagu

SEQ ID NO: 2318570 - RNA, 19 nt, Artificial Sequence
  Description of Artificial Sequence: Synthetic oligonucleotide
cauucgucucgccuuucca

SEQ ID NO: 2318571 - RNA, 19 nt, Artificial Sequence
  Description of Artificial Sequence: Synthetic oligonucleotide
cucucugaugagguagguc

SEQ ID NO: 2318572 - RNA, 19 nt, Artificial Sequence
  Description of Artificial Sequence: Synthetic oligonucleotide
ugguccccaccgauucggc

SEQ ID NO: 2318573 - RNA, 19 nt, Artificial Sequence
  Description of Artificial Sequence: Synthetic oligonucleotide
guacccagggacagguaac

SEQ ID NO: 2318574 - RNA, 19 nt, Artificial Sequence
  Description of Artificial Sequence: Synthetic oligonucleotide
uggauccaguugucuuucu

SEQ ID NO: 2318575 - RNA, 19 nt, Artificial Sequence
  Description of Artificial Sequence: Synthetic oligonucleotide
gacuucugaccuuggcugu

SEQ ID NO: 2318576 - RNA, 19 nt, Artificial Sequence
  Description of Artificial Sequence: Synthetic oligonucleotide
gguagcacgucucccggga

SEQ ID NO: 2318577 - RNA, 19 nt, Artificial Sequence
  Description of Artificial Sequence: Synthetic oligonucleotide
auuguccgucugcugccgu

SEQ ID NO: 2318578 - RNA, 19 nt, Artificial Sequence
  Description of Artificial Sequence: Synthetic oligonucleotide
uggaccggcuugagguccu

SEQ ID NO: 2318579 - RNA, 19 nt, Artificial Sequence
  Description of Artificial Sequence: Synthetic oligonucleotide
cacccaucccuauggguca

SEQ ID NO: 2318580 - RNA, 19 nt, Artificial Sequence
  Description of Artificial Sequence: Synthetic oligonucleotide
uucugaccuuggcugucau

SEQ ID NO: 2318581 - RNA, 19 nt, Artificial Sequence
  Description of Artificial Sequence: Synthetic oligonucleotide
ccacauacgucgaaggaaa

SEQ ID NO: 2318582 - RNA, 19 nt, Artificial Sequence
  Description of Artificial Sequence: Synthetic oligonucleotide
cagcugugccaaugacccg

SEQ ID NO: 2318583 - RNA, 19 nt, Artificial Sequence
  Description of Artificial Sequence: Synthetic oligonucleotide
gggcaggugacaguggaac

SEQ ID NO: 2318584 - RNA, 19 nt, Artificial Sequence
  Description of Artificial Sequence: Synthetic oligonucleotide
aucucccggauggcgggcg

SEQ ID NO: 2318585 - RNA, 19 nt, Artificial Sequence
  Description of Artificial Sequence: Synthetic oligonucleotide
ggauuccucuauguacaag

SEQ ID NO: 2318586 - RNA, 19 nt, Artificial Sequence
  Description of Artificial Sequence: Synthetic oligonucleotide
cuggucgcucucugaugag

SEQ ID NO: 2318587 - RNA, 19 nt, Artificial Sequence
  Description of Artificial Sequence: Synthetic oligonucleotide
ggauccaguugucuuucuc

SEQ ID NO: 2318588 - RNA, 19 nt, Artificial Sequence
  Description of Artificial Sequence: Synthetic oligonucleotide
cacugguaguacuccacaa

SEQ ID NO: 2318589 - RNA, 19 nt, Artificial Sequence
  Description of Artificial Sequence: Synthetic oligonucleotide
uguccgucugcugccguuc

SEQ ID NO: 2318590 - RNA, 19 nt, Artificial Sequence
  Description of Artificial Sequence: Synthetic oligonucleotide
gucucgccuuuccaccagc

SEQ ID NO: 2318591 - RNA, 19 nt, Artificial Sequence
  Description of Artificial Sequence: Synthetic oligonucleotide
guaacccagggcaggugac

SEQ ID NO: 2318592 - RNA, 19 nt, Artificial Sequence
  Description of Artificial Sequence: Synthetic oligonucleotide
  modified_base (19)..(19): a, c, u, g, unknown or other
ccauguugccagcaaaccn

SEQ ID NO: 2318593 - RNA, 19 nt, Artificial Sequence
  Description of Artificial Sequence: Synthetic oligonucleotide
gaggccaggagguggacuu

SEQ ID NO: 2318594 - RNA, 19 nt, Artificial Sequence
  Description of Artificial Sequence: Synthetic oligonucleotide
gggaugagacuugagcaga

SEQ ID NO: 2318595 - RNA, 19 nt, Artificial Sequence
  Description of Artificial Sequence: Synthetic oligonucleotide
guagcacgucucccgggac

SEQ ID NO: 2318596 - RNA, 19 nt, Artificial Sequence
  Description of Artificial Sequence: Synthetic oligonucleotide
guccaagucucgccuucac

SEQ ID NO: 2318597 - RNA, 19 nt, Artificial Sequence
  Description of Artificial Sequence: Synthetic oligonucleotide
cucccgggacuuguagggg

SEQ ID NO: 2318598 - RNA, 19 nt, Artificial Sequence
  Description of Artificial Sequence: Synthetic oligonucleotide
guguggucagcacaggauu

SEQ ID NO: 2318599 - RNA, 19 nt, Artificial Sequence
  Description of Artificial Sequence: Synthetic oligonucleotide
gcagauuguccgucugcug

SEQ ID NO: 2318600 - RNA, 19 nt, Artificial Sequence
  Description of Artificial Sequence: Synthetic oligonucleotide
cuaugggucauaacagcuu

SEQ ID NO: 2318601 - RNA, 19 nt, Artificial Sequence
  Description of Artificial Sequence: Synthetic oligonucleotide
guaggggaacuugagcgua

SEQ ID NO: 2318602 - RNA, 19 nt, Artificial Sequence
  Description of Artificial Sequence: Synthetic oligonucleotide
auacgucgaaggaaaccaa

SEQ ID NO: 2318603 - RNA, 19 nt, Artificial Sequence
  Description of Artificial Sequence: Synthetic oligonucleotide
uuguccgucugcugccguu

SEQ ID NO: 2318604 - RNA, 19 nt, Artificial Sequence
  Description of Artificial Sequence: Synthetic oligonucleotide
uuggugcucuggguguggu

SEQ ID NO: 2318605 - RNA, 19 nt, Artificial Sequence
  Description of Artificial Sequence: Synthetic oligonucleotide
gaccggcuugagguccugg

SEQ ID NO: 2318606 - RNA, 19 nt, Artificial Sequence
  Description of Artificial Sequence: Synthetic oligonucleotide
gagguccuggugguagcac

SEQ ID NO: 2318607 - RNA, 19 nt, Artificial Sequence
  Description of Artificial Sequence: Synthetic oligonucleotide
  modified_base (9)..(9): a, c, u, g, unknown or other
agcaaaccnuggguacgca

SEQ ID NO: 2318608 - RNA, 19 nt, Artificial Sequence
  Description of Artificial Sequence: Synthetic oligonucleotide
gcugccguuccauguugcc

SEQ ID NO: 2318609 - RNA, 19 nt, Artificial Sequence
  Description of Artificial Sequence: Synthetic oligonucleotide
guccgucugcugccguucc

SEQ ID NO: 2318610 - RNA, 19 nt, Artificial Sequence
  Description of Artificial Sequence: Synthetic oligonucleotide
auucggcuguagaucuuca

SEQ ID NO: 2318611 - RNA, 19 nt, Artificial Sequence
  Description of Artificial Sequence: Synthetic oligonucleotide
uccguccauucgucucgcc

SEQ ID NO: 2318612 - RNA, 19 nt, Artificial Sequence
  Description of Artificial Sequence: Synthetic oligonucleotide
uccacugggcaggguuuca

SEQ ID NO: 2318613 - RNA, 19 nt, Artificial Sequence
  Description of Artificial Sequence: Synthetic oligonucleotide
ccauucgucucgccuuucc

SEQ ID NO: 2318614 - RNA, 19 nt, Artificial Sequence
  Description of Artificial Sequence: Synthetic oligonucleotide
aggggaacuugagcguagu

SEQ ID NO: 2318615 - RNA, 19 nt, Artificial Sequence
  Description of Artificial Sequence: Synthetic oligonucleotide
ccaaccgauccguccauuc

SEQ ID NO: 2318616 - RNA, 19 nt, Artificial Sequence
  Description of Artificial Sequence: Synthetic oligonucleotide
cacccgccuggccauguug

SEQ ID NO: 2318617 - RNA, 19 nt, Artificial Sequence
  Description of Artificial Sequence: Synthetic oligonucleotide
  modified_base (17)..(17): a, c, u, g, unknown or other
gacccgagguguaaacncu

SEQ ID NO: 2318618 - RNA, 19 nt, Artificial Sequence
  Description of Artificial Sequence: Synthetic oligonucleotide
ccgugcagcaaaguuguac

SEQ ID NO: 2318619 - RNA, 19 nt, Artificial Sequence
  Description of Artificial Sequence: Synthetic oligonucleotide
gugcagcaaaguuguaccu

SEQ ID NO: 2318620 - RNA, 19 nt, Artificial Sequence
  Description of Artificial Sequence: Synthetic oligonucleotide
gucugcugccguuccaugu

SEQ ID NO: 2318621 - RNA, 19 nt, Artificial Sequence
  Description of Artificial Sequence: Synthetic oligonucleotide
agguaacccagggcaggug

SEQ ID NO: 2318622 - RNA, 19 nt, Artificial Sequence
  Description of Artificial Sequence: Synthetic oligonucleotide
gcaggcggugacuucugac

SEQ ID NO: 2318623 - RNA, 19 nt, Artificial Sequence
  Description of Artificial Sequence: Synthetic oligonucleotide
ccuaugggucauaacagcu

SEQ ID NO: 2318624 - RNA, 19 nt, Artificial Sequence
  Description of Artificial Sequence: Synthetic oligonucleotide
ccuuggcugucauccacac

SEQ ID NO: 2318625 - RNA, 19 nt, Artificial Sequence
  Description of Artificial Sequence: Synthetic oligonucleotide
ucccggauggcgggcggcc

SEQ ID NO: 2318626 - RNA, 19 nt, Artificial Sequence
  Description of Artificial Sequence: Synthetic oligonucleotide
guaccuggccacagcugug

SEQ ID NO: 2318627 - RNA, 19 nt, Artificial Sequence
  Description of Artificial Sequence: Synthetic oligonucleotide
ggguacgcaguguaaucaa

SEQ ID NO: 2318628 - RNA, 19 nt, Artificial Sequence
  Description of Artificial Sequence: Synthetic oligonucleotide
gagguaggucccacuggga

SEQ ID NO: 2318629 - RNA, 19 nt, Artificial Sequence
  Description of Artificial Sequence: Synthetic oligonucleotide
ggcugucauccacacccgc

SEQ ID NO: 2318630 - RNA, 19 nt, Artificial Sequence
  Description of Artificial Sequence: Synthetic oligonucleotide
cuucacuggacacccuccu

SEQ ID NO: 2318631 - RNA, 19 nt, Artificial Sequence
  Description of Artificial Sequence: Synthetic oligonucleotide
cccacugggaugagacuug

SEQ ID NO: 2318632 - RNA, 19 nt, Artificial Sequence
  Description of Artificial Sequence: Synthetic oligonucleotide
gcggugacuucugaccuug

SEQ ID NO: 2318633 - RNA, 19 nt, Artificial Sequence
  Description of Artificial Sequence: Synthetic oligonucleotide
  modified_base (2)..(2): a, c, u, g, unknown or other
cnuggguacgcaguguaau

SEQ ID NO: 2318634 - RNA, 19 nt, Artificial Sequence
  Description of Artificial Sequence: Synthetic oligonucleotide
cugccguuccauguugcca

SEQ ID NO: 2318635 - RNA, 19 nt, Artificial Sequence
  Description of Artificial Sequence: Synthetic oligonucleotide
agcacgucucccgggacuu

SEQ ID NO: 2318636 - RNA, 19 nt, Artificial Sequence
  Description of Artificial Sequence: Synthetic oligonucleotide
ggggagaccucccgaagaa

SEQ ID NO: 2318637 - RNA, 19 nt, Artificial Sequence
  Description of Artificial Sequence: Synthetic oligonucleotide
gcugauggcgaagcgcuca

SEQ ID NO: 2318638 - RNA, 19 nt, Artificial Sequence
  Description of Artificial Sequence: Synthetic oligonucleotide
caccgauucggcuguagau

SEQ ID NO: 2318639 - RNA, 19 nt, Artificial Sequence
  Description of Artificial Sequence: Synthetic oligonucleotide
gcaugucccgugcagcaaa

SEQ ID NO: 2318640 - RNA, 19 nt, Artificial Sequence
  Description of Artificial Sequence: Synthetic oligonucleotide
ggugacaguggaacaccca

SEQ ID NO: 2318641 - RNA, 19 nt, Artificial Sequence
  Description of Artificial Sequence: Synthetic oligonucleotide
ccauguugccugagcuccc

SEQ ID NO: 2318642 - RNA, 19 nt, Artificial Sequence
  Description of Artificial Sequence: Synthetic oligonucleotide
augucccgugcagcaaagu

SEQ ID NO: 2318643 - RNA, 19 nt, Artificial Sequence
  Description of Artificial Sequence: Synthetic oligonucleotide
gagaccucccgaagaacau

SEQ ID NO: 2318644 - RNA, 19 nt, Artificial Sequence
  Description of Artificial Sequence: Synthetic oligonucleotide
uccauucgucucgccuuuc

SEQ ID NO: 2318645 - RNA, 19 nt, Artificial Sequence
  Description of Artificial Sequence: Synthetic oligonucleotide
gucgcucucugaugaggua

SEQ ID NO: 2318646 - RNA, 19 nt, Artificial Sequence
  Description of Artificial Sequence: Synthetic oligonucleotide
cgauccguccauucgucuc

SEQ ID NO: 2318647 - RNA, 19 nt, Artificial Sequence
  Description of Artificial Sequence: Synthetic oligonucleotide
ccugguccccaccgauucg

SEQ ID NO: 2318648 - RNA, 19 nt, Artificial Sequence
  Description of Artificial Sequence: Synthetic oligonucleotide
gaugagacuugagcagauu

SEQ ID NO: 2318649 - RNA, 19 nt, Artificial Sequence
  Description of Artificial Sequence: Synthetic oligonucleotide
cucuuccacauacgucgaa

SEQ ID NO: 2318650 - RNA, 19 nt, Artificial Sequence
  Description of Artificial Sequence: Synthetic oligonucleotide
ggaaaccaaccgauccguc

SEQ ID NO: 2318651 - RNA, 19 nt, Artificial Sequence
  Description of Artificial Sequence: Synthetic oligonucleotide
gcugugccaaugacccgag

SEQ ID NO: 2318652 - RNA, 19 nt, Artificial Sequence
  Description of Artificial Sequence: Synthetic oligonucleotide
aggucccacugggaugaga

SEQ ID NO: 2318653 - RNA, 19 nt, Artificial Sequence
  Description of Artificial Sequence: Synthetic oligonucleotide
ccgauucggcuguagaucu

SEQ ID NO: 2318654 - RNA, 19 nt, Artificial Sequence
  Description of Artificial Sequence: Synthetic oligonucleotide
cagcacaggauuccucuau

SEQ ID NO: 2318655 - RNA, 19 nt, Artificial Sequence
  Description of Artificial Sequence: Synthetic oligonucleotide
cccgcagcgacagcucccg

SEQ ID NO: 2318656 - RNA, 19 nt, Artificial Sequence
  Description of Artificial Sequence: Synthetic oligonucleotide
cugcuggucgcucucugau

SEQ ID NO: 2318657 - RNA, 19 nt, Artificial Sequence
  Description of Artificial Sequence: Synthetic oligonucleotide
ggcaguucccagagccaug

SEQ ID NO: 2318658 - RNA, 19 nt, Artificial Sequence
  Description of Artificial Sequence: Synthetic oligonucleotide
cagugauguggauccaguu

SEQ ID NO: 2318659 - RNA, 19 nt, Artificial Sequence
  Description of Artificial Sequence: Synthetic oligonucleotide
cucccggauggcgggcggc

SEQ ID NO: 2318660 - RNA, 19 nt, Artificial Sequence
  Description of Artificial Sequence: Synthetic oligonucleotide
agggcaggugacaguggaa

SEQ ID NO: 2318661 - RNA, 19 nt, Artificial Sequence
  Description of Artificial Sequence: Synthetic oligonucleotide
gggagaccucccgaagaac

SEQ ID NO: 2318662 - RNA, 19 nt, Artificial Sequence
  Description of Artificial Sequence: Synthetic oligonucleotide
cgccuuuccaccagcccug

SEQ ID NO: 2318663 - RNA, 19 nt, Artificial Sequence
  Description of Artificial Sequence: Synthetic oligonucleotide
cauccacugggcaggguuu

SEQ ID NO: 2318664 - RNA, 19 nt, Artificial Sequence
  Description of Artificial Sequence: Synthetic oligonucleotide
cccgcaugucccgugcagc

SEQ ID NO: 2318665 - RNA, 19 nt, Artificial Sequence
  Description of Artificial Sequence: Synthetic oligonucleotide
ggucgcucucugaugaggu

SEQ ID NO: 2318666 - RNA, 19 nt, Artificial Sequence
  Description of Artificial Sequence: Synthetic oligonucleotide
accaaccgauccguccauu

SEQ ID NO: 2318667 - RNA, 19 nt, Artificial Sequence
  Description of Artificial Sequence: Synthetic oligonucleotide
guggaacacccaucccuau

SEQ ID NO: 2318668 - RNA, 19 nt, Artificial Sequence
  Description of Artificial Sequence: Synthetic oligonucleotide
ccaccgauucggcuguaga

SEQ ID NO: 2318669 - RNA, 19 nt, Artificial Sequence
  Description of Artificial Sequence: Synthetic oligonucleotide
cgucucccgggacuuguag

SEQ ID NO: 2318670 - RNA, 19 nt, Artificial Sequence
  Description of Artificial Sequence: Synthetic oligonucleotide
guccauucgucucgccuuu

SEQ ID NO: 2318671 - RNA, 19 nt, Artificial Sequence
  Description of Artificial Sequence: Synthetic oligonucleotide
gcuccaggaggcucucaaa

SEQ ID NO: 2318672 - RNA, 19 nt, Artificial Sequence
  Description of Artificial Sequence: Synthetic oligonucleotide
ggccaggagguggacuuca

SEQ ID NO: 2318673 - RNA, 19 nt, Artificial Sequence
  Description of Artificial Sequence: Synthetic oligonucleotide
cauguugccugagcucccu

SEQ ID NO: 2318674 - RNA, 19 nt, Artificial Sequence
  Description of Artificial Sequence: Synthetic oligonucleotide
cccgccuggccauguugcc

SEQ ID NO: 2318675 - RNA, 19 nt, Artificial Sequence
  Description of Artificial Sequence: Synthetic oligonucleotide
gccaacagguggccuucca

SEQ ID NO: 2318676 - RNA, 19 nt, Artificial Sequence
  Description of Artificial Sequence: Synthetic oligonucleotide
acacccgccuggccauguu

SEQ ID NO: 2318677 - RNA, 19 nt, Artificial Sequence
  Description of Artificial Sequence: Synthetic oligonucleotide
ccgcaugucccgugcagca

SEQ ID NO: 2318678 - RNA, 19 nt, Artificial Sequence
  Description of Artificial Sequence: Synthetic oligonucleotide
gcagcgacagcucccgcau

SEQ ID NO: 2318679 - RNA, 19 nt, Artificial Sequence
  Description of Artificial Sequence: Synthetic oligonucleotide
ccucuuccacauacgucga

SEQ ID NO: 2318680 - RNA, 19 nt, Artificial Sequence
  Description of Artificial Sequence: Synthetic oligonucleotide
  modified_base (3)..(3): a, c, u, g, unknown or other
ccnuggguacgcaguguaa

SEQ ID NO: 2318681 - RNA, 19 nt, Artificial Sequence
  Description of Artificial Sequence: Synthetic oligonucleotide
gguacgcaguguaaucaau

SEQ ID NO: 2318682 - RNA, 19 nt, Artificial Sequence
  Description of Artificial Sequence: Synthetic oligonucleotide
cagguaacccagggcaggu

SEQ ID NO: 2318683 - RNA, 19 nt, Artificial Sequence
  Description of Artificial Sequence: Synthetic oligonucleotide
ccucuccuuggugcucugg

SEQ ID NO: 2318684 - RNA, 19 nt, Artificial Sequence
  Description of Artificial Sequence: Synthetic oligonucleotide
auguacccagggacaggua

SEQ ID NO: 2318685 - RNA, 19 nt, Artificial Sequence
  Description of Artificial Sequence: Synthetic oligonucleotide
gguccuggugguagcacgu

SEQ ID NO: 2318686 - RNA, 19 nt, Artificial Sequence
  Description of Artificial Sequence: Synthetic oligonucleotide
cacuggacacccuccucuu

SEQ ID NO: 2318687 - RNA, 19 nt, Artificial Sequence
  Description of Artificial Sequence: Synthetic oligonucleotide
ggaugagacuugagcagau

SEQ ID NO: 2318688 - RNA, 19 nt, Artificial Sequence
  Description of Artificial Sequence: Synthetic oligonucleotide
cgucucgccuuuccaccag

SEQ ID NO: 2318689 - RNA, 19 nt, Artificial Sequence
  Description of Artificial Sequence: Synthetic oligonucleotide
cacgucucccgggacuugu

SEQ ID NO: 2318690 - RNA, 19 nt, Artificial Sequence
  Description of Artificial Sequence: Synthetic oligonucleotide
gccaaugacccgaggugua

SEQ ID NO: 2318691 - RNA, 19 nt, Artificial Sequence
  Description of Artificial Sequence: Synthetic oligonucleotide
cgcagcgacagcucccgca

SEQ ID NO: 2318692 - RNA, 19 nt, Artificial Sequence
  Description of Artificial Sequence: Synthetic oligonucleotide
ccaaugacccgagguguaa

SEQ ID NO: 2318693 - RNA, 19 nt, Artificial Sequence
  Description of Artificial Sequence: Synthetic oligonucleotide
cggugacuucugaccuugg

SEQ ID NO: 2318694 - RNA, 19 nt, Artificial Sequence
  Description of Artificial Sequence: Synthetic oligonucleotide
ccauccacugggcaggguu

SEQ ID NO: 2318695 - RNA, 19 nt, Artificial Sequence
  Description of Artificial Sequence: Synthetic oligonucleotide
ccaucccuaugggucauaa

SEQ ID NO: 2318696 - RNA, 19 nt, Artificial Sequence
  Description of Artificial Sequence: Synthetic oligonucleotide
ccguccauucgucucgccu

SEQ ID NO: 2318697 - RNA, 19 nt, Artificial Sequence
  Description of Artificial Sequence: Synthetic oligonucleotide
acgucucccgggacuugua

SEQ ID NO: 2318698 - RNA, 19 nt, Artificial Sequence
  Description of Artificial Sequence: Synthetic oligonucleotide
cccgggacuuguaggggaa

SEQ ID NO: 2318699 - RNA, 19 nt, Artificial Sequence
  Description of Artificial Sequence: Synthetic oligonucleotide
gcgacagcucccgcauguc

SEQ ID NO: 2318700 - RNA, 19 nt, Artificial Sequence
  Description of Artificial Sequence: Synthetic oligonucleotide
ccgggacuuguaggggaac

SEQ ID NO: 2318701 - RNA, 19 nt, Artificial Sequence
  Description of Artificial Sequence: Synthetic oligonucleotide
gcggccaacagguggccuu

SEQ ID NO: 2318702 - RNA, 19 nt, Artificial Sequence
  Description of Artificial Sequence: Synthetic oligonucleotide
ggcgaagcgcucagccucu

SEQ ID NO: 2318703 - RNA, 19 nt, Artificial Sequence
  Description of Artificial Sequence: Synthetic oligonucleotide
gcacgucucccgggacuug

SEQ ID NO: 2318704 - RNA, 19 nt, Artificial Sequence
  Description of Artificial Sequence: Synthetic oligonucleotide
cguccauucgucucgccuu

SEQ ID NO: 2318705 - RNA, 19 nt, Artificial Sequence
  Description of Artificial Sequence: Synthetic oligonucleotide
ggaccggcuugagguccug

SEQ ID NO: 2318706 - RNA, 19 nt, Artificial Sequence
  Description of Artificial Sequence: Synthetic oligonucleotide
ggcggugacuucugaccuu

SEQ ID NO: 2318707 - RNA, 19 nt, Artificial Sequence
  Description of Artificial Sequence: Synthetic oligonucleotide
gcgaagcgcucagccucug

SEQ ID NO: 2318708 - RNA, 19 nt, Artificial Sequence
  Description of Artificial Sequence: Synthetic oligonucleotide
ccguuccauguugccagca

SEQ ID NO: 2318709 - RNA, 19 nt, Artificial Sequence
  Description of Artificial Sequence: Synthetic oligonucleotide
ccgauccguccauucgucu

SEQ ID NO: 2318710 - RNA, 19 nt, Artificial Sequence
  Description of Artificial Sequence: Synthetic oligonucleotide
ccucagugauguggaucca

SEQ ID NO: 2318711 - RNA, 19 nt, Artificial Sequence
  Description of Artificial Sequence: Synthetic oligonucleotide
ccgcagcgacagcucccgc

SEQ ID NO: 2318712 - RNA, 19 nt, Artificial Sequence
  Description of Artificial Sequence: Synthetic oligonucleotide
cggauggcgggcggccaac

SEQ ID NO: 2318713 - RNA, 19 nt, Artificial Sequence
  Description of Artificial Sequence: Synthetic oligonucleotide
ggcggccaacagguggccu

SEQ ID NO: 2318714 - RNA, 19 nt, Artificial Sequence
  Description of Artificial Sequence: Synthetic oligonucleotide
cccgugcagcaaaguugua

SEQ ID NO: 2318715 - RNA, 19 nt, Artificial Sequence
  Description of Artificial Sequence: Synthetic oligonucleotide
cgucaccuucccgcagcga

SEQ ID NO: 2318716 - RNA, 19 nt, Artificial Sequence
  Description of Artificial Sequence: Synthetic oligonucleotide
cgauucggcuguagaucuu

SEQ ID NO: 2318717 - RNA, 19 nt, Artificial Sequence
  Description of Artificial Sequence: Synthetic oligonucleotide
cccaucccuaugggucaua

SEQ ID NO: 2318718 - RNA, 19 nt, Artificial Sequence
  Description of Artificial Sequence: Synthetic oligonucleotide
ccccaccgauucggcugua

SEQ ID NO: 2318719 - RNA, 19 nt, Artificial Sequence
  Description of Artificial Sequence: Synthetic oligonucleotide
  modified_base (1)..(1): a, c, u, g, unknown or other
nuggguacgcaguguaauc

SEQ ID NO: 2318720 - RNA, 19 nt, Artificial Sequence
  Description of Artificial Sequence: Synthetic oligonucleotide
  modified_base (1)..(1): a, c, u, g, unknown or other
ncuggaccggcuugagguc

SEQ ID NO: 2318721 - RNA, 19 nt, Artificial Sequence
  Description of Artificial Sequence: Synthetic oligonucleotide
aaaagucuaccuuugagcc

SEQ ID NO: 2318722 - RNA, 19 nt, Artificial Sequence
  Description of Artificial Sequence: Synthetic oligonucleotide
aaugaauagcucuagggcu

SEQ ID NO: 2318723 - RNA, 19 nt, Artificial Sequence
  Description of Artificial Sequence: Synthetic oligonucleotide
uaauacgagagauauugcg

SEQ ID NO: 2318724 - RNA, 19 nt, Artificial Sequence
  Description of Artificial Sequence: Synthetic oligonucleotide
cauaauacgagagauauug

SEQ ID NO: 2318725 - RNA, 19 nt, Artificial Sequence
  Description of Artificial Sequence: Synthetic oligonucleotide
uauuuuauaaaagucuacc

SEQ ID NO: 2318726 - RNA, 19 nt, Artificial Sequence
  Description of Artificial Sequence: Synthetic oligonucleotide
ugggcaauaucccaguugg

SEQ ID NO: 2318727 - RNA, 19 nt, Artificial Sequence
  Description of Artificial Sequence: Synthetic oligonucleotide
uguaugaacgggcaucucg

SEQ ID NO: 2318728 - RNA, 19 nt, Artificial Sequence
  Description of Artificial Sequence: Synthetic oligonucleotide
ucugacucaacacugguug

SEQ ID NO: 2318729 - RNA, 19 nt, Artificial Sequence
  Description of Artificial Sequence: Synthetic oligonucleotide
agcuacaccaagcaugucc

SEQ ID NO: 2318730 - RNA, 19 nt, Artificial Sequence
  Description of Artificial Sequence: Synthetic oligonucleotide
gaaugaauagcucuagggc

SEQ ID NO: 2318731 - RNA, 19 nt, Artificial Sequence
  Description of Artificial Sequence: Synthetic oligonucleotide
aauacgagagauauugcgg

SEQ ID NO: 2318732 - RNA, 19 nt, Artificial Sequence
  Description of Artificial Sequence: Synthetic oligonucleotide
aaaccgauuguaugaacgg

SEQ ID NO: 2318733 - RNA, 19 nt, Artificial Sequence
  Description of Artificial Sequence: Synthetic oligonucleotide
ugcagcaauaaccacuccg

SEQ ID NO: 2318734 - RNA, 19 nt, Artificial Sequence
  Description of Artificial Sequence: Synthetic oligonucleotide
gaggauucaucuuggagcg

SEQ ID NO: 2318735 - RNA, 19 nt, Artificial Sequence
  Description of Artificial Sequence: Synthetic oligonucleotide
cuguaucucauucaaagcc

SEQ ID NO: 2318736 - RNA, 19 nt, Artificial Sequence
  Description of Artificial Sequence: Synthetic oligonucleotide
aaguaugcgccauagccag

SEQ ID NO: 2318737 - RNA, 19 nt, Artificial Sequence
  Description of Artificial Sequence: Synthetic oligonucleotide
gaaaccgauuguaugaacg

SEQ ID NO: 2318738 - RNA, 19 nt, Artificial Sequence
  Description of Artificial Sequence: Synthetic oligonucleotide
auagcuguguccaucaccc

SEQ ID NO: 2318739 - RNA, 19 nt, Artificial Sequence
  Description of Artificial Sequence: Synthetic oligonucleotide
gagaacuugcuucaaauac

SEQ ID NO: 2318740 - RNA, 19 nt, Artificial Sequence
  Description of Artificial Sequence: Synthetic oligonucleotide
aagggaacagcuucaacug

SEQ ID NO: 2318741 - RNA, 19 nt, Artificial Sequence
  Description of Artificial Sequence: Synthetic oligonucleotide
uguaucucauucaaagcca

SEQ ID NO: 2318742 - RNA, 19 nt, Artificial Sequence
  Description of Artificial Sequence: Synthetic oligonucleotide
uucauaagcuacaccaagc

SEQ ID NO: 2318743 - RNA, 19 nt, Artificial Sequence
  Description of Artificial Sequence: Synthetic oligonucleotide
auuugaaaccgauuguaug

SEQ ID NO: 2318744 - RNA, 19 nt, Artificial Sequence
  Description of Artificial Sequence: Synthetic oligonucleotide
ucauaagcuacaccaagca

SEQ ID NO: 2318745 - RNA, 19 nt, Artificial Sequence
  Description of Artificial Sequence: Synthetic oligonucleotide
agauauugcggaaacgagc

SEQ ID NO: 2318746 - RNA, 19 nt, Artificial Sequence
  Description of Artificial Sequence: Synthetic oligonucleotide
caugcagcguucuacaagc

SEQ ID NO: 2318747 - RNA, 19 nt, Artificial Sequence
  Description of Artificial Sequence: Synthetic oligonucleotide
ugaacgggcaucucgguag

SEQ ID NO: 2318748 - RNA, 19 nt, Artificial Sequence
  Description of Artificial Sequence: Synthetic oligonucleotide
uccaucuuagucuccacag

SEQ ID NO: 2318749 - RNA, 19 nt, Artificial Sequence
  Description of Artificial Sequence: Synthetic oligonucleotide
aagucuaccuuugagccag

SEQ ID NO: 2318750 - RNA, 19 nt, Artificial Sequence
  Description of Artificial Sequence: Synthetic oligonucleotide
agugcugucguugacucgc

SEQ ID NO: 2318751 - RNA, 19 nt, Artificial Sequence
  Description of Artificial Sequence: Synthetic oligonucleotide
uaagcuacaccaagcaugu

SEQ ID NO: 2318752 - RNA, 19 nt, Artificial Sequence
  Description of Artificial Sequence: Synthetic oligonucleotide
aucaaucaccaucuggccg

SEQ ID NO: 2318753 - RNA, 19 nt, Artificial Sequence
  Description of Artificial Sequence: Synthetic oligonucleotide
auaagcuacaccaagcaug

SEQ ID NO: 2318754 - RNA, 19 nt, Artificial Sequence
  Description of Artificial Sequence: Synthetic oligonucleotide
accaugaaugaauagcucu

SEQ ID NO: 2318755 - RNA, 19 nt, Artificial Sequence
  Description of Artificial Sequence: Synthetic oligonucleotide
ucagucugacucaacacug

SEQ ID NO: 2318756 - RNA, 19 nt, Artificial Sequence
  Description of Artificial Sequence: Synthetic oligonucleotide
ucaaauacuggaagucggc

SEQ ID NO: 2318757 - RNA, 19 nt, Artificial Sequence
  Description of Artificial Sequence: Synthetic oligonucleotide
ucgaacuucaccccgagua

SEQ ID NO: 2318758 - RNA, 19 nt, Artificial Sequence
  Description of Artificial Sequence: Synthetic oligonucleotide
cauagaagggaacagcuuc

SEQ ID NO: 2318759 - RNA, 19 nt, Artificial Sequence
  Description of Artificial Sequence: Synthetic oligonucleotide
aauagcucuagggcuauag

SEQ ID NO: 2318760 - RNA, 19 nt, Artificial Sequence
  Description of Artificial Sequence: Synthetic oligonucleotide
uugucaaccaugaaugaau

SEQ ID NO: 2318761 - RNA, 19 nt, Artificial Sequence
  Description of Artificial Sequence: Synthetic oligonucleotide
ucuguaucucauucaaagc

SEQ ID NO: 2318762 - RNA, 19 nt, Artificial Sequence
  Description of Artificial Sequence: Synthetic oligonucleotide
auagugcugucguugacuc

SEQ ID NO: 2318763 - RNA, 19 nt, Artificial Sequence
  Description of Artificial Sequence: Synthetic oligonucleotide
auagcucuagggcuauagc

SEQ ID NO: 2318764 - RNA, 19 nt, Artificial Sequence
  Description of Artificial Sequence: Synthetic oligonucleotide
uuuucaguuacaguggcaa

SEQ ID NO: 2318765 - RNA, 19 nt, Artificial Sequence
  Description of Artificial Sequence: Synthetic oligonucleotide
uugacucgcauaauacgag

SEQ ID NO: 2318766 - RNA, 19 nt, Artificial Sequence
  Description of Artificial Sequence: Synthetic oligonucleotide
agagauauugcggaaacga

SEQ ID NO: 2318767 - RNA, 19 nt, Artificial Sequence
  Description of Artificial Sequence: Synthetic oligonucleotide
ucaagcauagaagggaaca

SEQ ID NO: 2318768 - RNA, 19 nt, Artificial Sequence
  Description of Artificial Sequence: Synthetic oligonucleotide
uucaacugcgggcaguuca

SEQ ID NO: 2318769 - RNA, 19 nt, Artificial Sequence
  Description of Artificial Sequence: Synthetic oligonucleotide
gacgcgguaaaacugcccc

SEQ ID NO: 2318770 - RNA, 19 nt, Artificial Sequence
  Description of Artificial Sequence: Synthetic oligonucleotide
ucgaagcagaggcugagcc

SEQ ID NO: 2318771 - RNA, 19 nt, Artificial Sequence
  Description of Artificial Sequence: Synthetic oligonucleotide
auacgagagauauugcgga

SEQ ID NO: 2318772 - RNA, 19 nt, Artificial Sequence
  Description of Artificial Sequence: Synthetic oligonucleotide
agcaauaaccacuccgcag

SEQ ID NO: 2318773 - RNA, 19 nt, Artificial Sequence
  Description of Artificial Sequence: Synthetic oligonucleotide
uagugaaggggcuucauaa

SEQ ID NO: 2318774 - RNA, 19 nt, Artificial Sequence
  Description of Artificial Sequence: Synthetic oligonucleotide
ucuacaagcucucgggccu

SEQ ID NO: 2318775 - RNA, 19 nt, Artificial Sequence
  Description of Artificial Sequence: Synthetic oligonucleotide
uauugcggaaacgagccag

SEQ ID NO: 2318776 - RNA, 19 nt, Artificial Sequence
  Description of Artificial Sequence: Synthetic oligonucleotide
ugaaggggcuucauaagcu

SEQ ID NO: 2318777 - RNA, 19 nt, Artificial Sequence
  Description of Artificial Sequence: Synthetic oligonucleotide
ucuuagucuccacagccga

SEQ ID NO: 2318778 - RNA, 19 nt, Artificial Sequence
  Description of Artificial Sequence: Synthetic oligonucleotide
aaccgauuguaugaacggg

SEQ ID NO: 2318779 - RNA, 19 nt, Artificial Sequence
  Description of Artificial Sequence: Synthetic oligonucleotide
uguacauggcccuugucaa

SEQ ID NO: 2318780 - RNA, 19 nt, Artificial Sequence
  Description of Artificial Sequence: Synthetic oligonucleotide
aaagucuaccuuugagcca

SEQ ID NO: 2318781 - RNA, 19 nt, Artificial Sequence
  Description of Artificial Sequence: Synthetic oligonucleotide
uucucuagaacuucucgaa

SEQ ID NO: 2318782 - RNA, 19 nt, Artificial Sequence
  Description of Artificial Sequence: Synthetic oligonucleotide
aauaaccacuccgcagucg

SEQ ID NO: 2318783 - RNA, 19 nt, Artificial Sequence
  Description of Artificial Sequence: Synthetic oligonucleotide
ccaaguaugcgccauagcc

SEQ ID NO: 2318784 - RNA, 19 nt, Artificial Sequence
  Description of Artificial Sequence: Synthetic oligonucleotide
ucucauucaaagccacuga

SEQ ID NO: 2318785 - RNA, 19 nt, Artificial Sequence
  Description of Artificial Sequence: Synthetic oligonucleotide
auaauacgagagauauugc

SEQ ID NO: 2318786 - RNA, 19 nt, Artificial Sequence
  Description of Artificial Sequence: Synthetic oligonucleotide
ucguugacucgcauaauac

SEQ ID NO: 2318787 - RNA, 19 nt, Artificial Sequence
  Description of Artificial Sequence: Synthetic oligonucleotide
uccgcagucgaacuucacc

SEQ ID NO: 2318788 - RNA, 19 nt, Artificial Sequence
  Description of Artificial Sequence: Synthetic oligonucleotide
ugauuggacccucgcagag

SEQ ID NO: 2318789 - RNA, 19 nt, Artificial Sequence
  Description of Artificial Sequence: Synthetic oligonucleotide
ucauucaaagccacugauc

SEQ ID NO: 2318790 - RNA, 19 nt, Artificial Sequence
  Description of Artificial Sequence: Synthetic oligonucleotide
aucaugugggcaauauccc

SEQ ID NO: 2318791 - RNA, 19 nt, Artificial Sequence
  Description of Artificial Sequence: Synthetic oligonucleotide
guaugaacgggcaucucgg

SEQ ID NO: 2318792 - RNA, 19 nt, Artificial Sequence
  Description of Artificial Sequence: Synthetic oligonucleotide
auaaccacuccgcagucga

SEQ ID NO: 2318793 - RNA, 19 nt, Artificial Sequence
  Description of Artificial Sequence: Synthetic oligonucleotide
agugaaggggcuucauaag

SEQ ID NO: 2318794 - RNA, 19 nt, Artificial Sequence
  Description of Artificial Sequence: Synthetic oligonucleotide
uucaccccgaguaccgacg

SEQ ID NO: 2318795 - RNA, 19 nt, Artificial Sequence
  Description of Artificial Sequence: Synthetic oligonucleotide
ucaaagggcugauuuauuu

SEQ ID NO: 2318796 - RNA, 19 nt, Artificial Sequence
  Description of Artificial Sequence: Synthetic oligonucleotide
uuucaaagggcugauuuau

SEQ ID NO: 2318797 - RNA, 19 nt, Artificial Sequence
  Description of Artificial Sequence: Synthetic oligonucleotide
gguaaaacugccccggagc

SEQ ID NO: 2318798 - RNA, 19 nt, Artificial Sequence
  Description of Artificial Sequence: Synthetic oligonucleotide
cuaccuuugagccagcuaa

SEQ ID NO: 2318799 - RNA, 19 nt, Artificial Sequence
  Description of Artificial Sequence: Synthetic oligonucleotide
aaccacuccgcagucgaac

SEQ ID NO: 2318800 - RNA, 19 nt, Artificial Sequence
  Description of Artificial Sequence: Synthetic oligonucleotide
gagauauugcggaaacgag

SEQ ID NO: 2318801 - RNA, 19 nt, Artificial Sequence
  Description of Artificial Sequence: Synthetic oligonucleotide
aaccaugaaugaauagcuc

SEQ ID NO: 2318802 - RNA, 19 nt, Artificial Sequence
  Description of Artificial Sequence: Synthetic oligonucleotide
gugaaggggcuucauaagc

SEQ ID NO: 2318803 - RNA, 19 nt, Artificial Sequence
  Description of Artificial Sequence: Synthetic oligonucleotide
cacagaggauucaucuugg

SEQ ID NO: 2318804 - RNA, 19 nt, Artificial Sequence
  Description of Artificial Sequence: Synthetic oligonucleotide
ucaugugggcaauauccca

SEQ ID NO: 2318805 - RNA, 19 nt, Artificial Sequence
  Description of Artificial Sequence: Synthetic oligonucleotide
gcggaaacgagccagggag

SEQ ID NO: 2318806 - RNA, 19 nt, Artificial Sequence
  Description of Artificial Sequence: Synthetic oligonucleotide
aacugcgggcaguucaucu

SEQ ID NO: 2318807 - RNA, 19 nt, Artificial Sequence
  Description of Artificial Sequence: Synthetic oligonucleotide
aacuucaccccgaguaccg

SEQ ID NO: 2318808 - RNA, 19 nt, Artificial Sequence
  Description of Artificial Sequence: Synthetic oligonucleotide
ucaucuuggagcgucggcu

SEQ ID NO: 2318809 - RNA, 19 nt, Artificial Sequence
  Description of Artificial Sequence: Synthetic oligonucleotide
uacauggcccuugucaacc

SEQ ID NO: 2318810 - RNA, 19 nt, Artificial Sequence
  Description of Artificial Sequence: Synthetic oligonucleotide
uggaagucggcguagucuc

SEQ ID NO: 2318811 - RNA, 19 nt, Artificial Sequence
  Description of Artificial Sequence: Synthetic oligonucleotide
ugucaaccaugaaugaaua

SEQ ID NO: 2318812 - RNA, 19 nt, Artificial Sequence
  Description of Artificial Sequence: Synthetic oligonucleotide
cacaacgccuccaucuuag

SEQ ID NO: 2318813 - RNA, 19 nt, Artificial Sequence
  Description of Artificial Sequence: Synthetic oligonucleotide
ugacucgcauaauacgaga

SEQ ID NO: 2318814 - RNA, 19 nt, Artificial Sequence
  Description of Artificial Sequence: Synthetic oligonucleotide
guugacucgcauaauacga

SEQ ID NO: 2318815 - RNA, 19 nt, Artificial Sequence
  Description of Artificial Sequence: Synthetic oligonucleotide
acucaacacugguuguuuc

SEQ ID NO: 2318816 - RNA, 19 nt, Artificial Sequence
  Description of Artificial Sequence: Synthetic oligonucleotide
caugaaugaauagcucuag

SEQ ID NO: 2318817 - RNA, 19 nt, Artificial Sequence
  Description of Artificial Sequence: Synthetic oligonucleotide
auuguaugaacgggcaucu

SEQ ID NO: 2318818 - RNA, 19 nt, Artificial Sequence
  Description of Artificial Sequence: Synthetic oligonucleotide
agaacuugcuucaaauacu

SEQ ID NO: 2318819 - RNA, 19 nt, Artificial Sequence
  Description of Artificial Sequence: Synthetic oligonucleotide
auuucaaagggcugauuua

SEQ ID NO: 2318820 - RNA, 19 nt, Artificial Sequence
  Description of Artificial Sequence: Synthetic oligonucleotide
gacucgcauaauacgagag

SEQ ID NO: 2318821 - RNA, 19 nt, Artificial Sequence
  Description of Artificial Sequence: Synthetic oligonucleotide
ucgggccucagucugacuc

SEQ ID NO: 2318822 - RNA, 19 nt, Artificial Sequence
  Description of Artificial Sequence: Synthetic oligonucleotide
uagggcuauagcugugucc

SEQ ID NO: 2318823 - RNA, 19 nt, Artificial Sequence
  Description of Artificial Sequence: Synthetic oligonucleotide
cuguacauggcccuuguca

SEQ ID NO: 2318824 - RNA, 19 nt, Artificial Sequence
  Description of Artificial Sequence: Synthetic oligonucleotide
ucgguaguacagcacucgc

SEQ ID NO: 2318825 - RNA, 19 nt, Artificial Sequence
  Description of Artificial Sequence: Synthetic oligonucleotide
aguaccgacgucccaguca

SEQ ID NO: 2318826 - RNA, 19 nt, Artificial Sequence
  Description of Artificial Sequence: Synthetic oligonucleotide
gagagauauugcggaaacg

SEQ ID NO: 2318827 - RNA, 19 nt, Artificial Sequence
  Description of Artificial Sequence: Synthetic oligonucleotide
uaaaacugccccggagccg

SEQ ID NO: 2318828 - RNA, 19 nt, Artificial Sequence
  Description of Artificial Sequence: Synthetic oligonucleotide
acucgcauaauacgagaga

SEQ ID NO: 2318829 - RNA, 19 nt, Artificial Sequence
  Description of Artificial Sequence: Synthetic oligonucleotide
caucuggccgagaacuugc

SEQ ID NO: 2318830 - RNA, 19 nt, Artificial Sequence
  Description of Artificial Sequence: Synthetic oligonucleotide
gucaaccaugaaugaauag

SEQ ID NO: 2318831 - RNA, 19 nt, Artificial Sequence
  Description of Artificial Sequence: Synthetic oligonucleotide
agcauagaagggaacagcu

SEQ ID NO: 2318832 - RNA, 19 nt, Artificial Sequence
  Description of Artificial Sequence: Synthetic oligonucleotide
cccuugucaaccaugaaug

SEQ ID NO: 2318833 - RNA, 19 nt, Artificial Sequence
  Description of Artificial Sequence: Synthetic oligonucleotide
aaacgagccagggagccgu

SEQ ID NO: 2318834 - RNA, 19 nt, Artificial Sequence
  Description of Artificial Sequence: Synthetic oligonucleotide
aucaccaucuggccgagaa

SEQ ID NO: 2318835 - RNA, 19 nt, Artificial Sequence
  Description of Artificial Sequence: Synthetic oligonucleotide
ugcgccauagccaguggcu

SEQ ID NO: 2318836 - RNA, 19 nt, Artificial Sequence
  Description of Artificial Sequence: Synthetic oligonucleotide
gaagcgcccagcauagugc

SEQ ID NO: 2318837 - RNA, 19 nt, Artificial Sequence
  Description of Artificial Sequence: Synthetic oligonucleotide
aacacugguuguuucucua

SEQ ID NO: 2318838 - RNA, 19 nt, Artificial Sequence
  Description of Artificial Sequence: Synthetic oligonucleotide
ugaaaccgauuguaugaac

SEQ ID NO: 2318839 - RNA, 19 nt, Artificial Sequence
  Description of Artificial Sequence: Synthetic oligonucleotide
caagcauagaagggaacag

SEQ ID NO: 2318840 - RNA, 19 nt, Artificial Sequence
  Description of Artificial Sequence: Synthetic oligonucleotide
acacugguuguuucucuag

SEQ ID NO: 2318841 - RNA, 19 nt, Artificial Sequence
  Description of Artificial Sequence: Synthetic oligonucleotide
caauaucccaguuggucuc

SEQ ID NO: 2318842 - RNA, 19 nt, Artificial Sequence
  Description of Artificial Sequence: Synthetic oligonucleotide
guucuacaagcucucgggc

SEQ ID NO: 2318843 - RNA, 19 nt, Artificial Sequence
  Description of Artificial Sequence: Synthetic oligonucleotide
ugguguuccacagaggauu

SEQ ID NO: 2318844 - RNA, 19 nt, Artificial Sequence
  Description of Artificial Sequence: Synthetic oligonucleotide
uuacaguggcaauuugaaa

SEQ ID NO: 2318845 - RNA, 19 nt, Artificial Sequence
  Description of Artificial Sequence: Synthetic oligonucleotide
cagucugacucaacacugg

SEQ ID NO: 2318846 - RNA, 19 nt, Artificial Sequence
  Description of Artificial Sequence: Synthetic oligonucleotide
gagcgucggcuguacaugg

SEQ ID NO: 2318847 - RNA, 19 nt, Artificial Sequence
  Description of Artificial Sequence: Synthetic oligonucleotide
uucaguuacaguggcaauu

SEQ ID NO: 2318848 - RNA, 19 nt, Artificial Sequence
  Description of Artificial Sequence: Synthetic oligonucleotide
aagucggcguagucucccg

SEQ ID NO: 2318849 - RNA, 19 nt, Artificial Sequence
  Description of Artificial Sequence: Synthetic oligonucleotide
guaccgacgucccagucac

SEQ ID NO: 2318850 - RNA, 19 nt, Artificial Sequence
  Description of Artificial Sequence: Synthetic oligonucleotide
uggcccuucuaucucgaca

SEQ ID NO: 2318851 - RNA, 19 nt, Artificial Sequence
  Description of Artificial Sequence: Synthetic oligonucleotide
ucaguuacaguggcaauuu

SEQ ID NO: 2318852 - RNA, 19 nt, Artificial Sequence
  Description of Artificial Sequence: Synthetic oligonucleotide
caaccaugaaugaauagcu

SEQ ID NO: 2318853 - RNA, 19 nt, Artificial Sequence
  Description of Artificial Sequence: Synthetic oligonucleotide
agucugacucaacacuggu

SEQ ID NO: 2318854 - RNA, 19 nt, Artificial Sequence
  Description of Artificial Sequence: Synthetic oligonucleotide
cucgguaguacagcacucg

SEQ ID NO: 2318855 - RNA, 19 nt, Artificial Sequence
  Description of Artificial Sequence: Synthetic oligonucleotide
acuggaagucggcguaguc

SEQ ID NO: 2318856 - RNA, 19 nt, Artificial Sequence
  Description of Artificial Sequence: Synthetic oligonucleotide
uggucucugcugacagugg

SEQ ID NO: 2318857 - RNA, 19 nt, Artificial Sequence
  Description of Artificial Sequence: Synthetic oligonucleotide
gaggcugagccaaguaugc

SEQ ID NO: 2318858 - RNA, 19 nt, Artificial Sequence
  Description of Artificial Sequence: Synthetic oligonucleotide
ugcggaaacgagccaggga

SEQ ID NO: 2318859 - RNA, 19 nt, Artificial Sequence
  Description of Artificial Sequence: Synthetic oligonucleotide
uggccgagaacuugcuuca

SEQ ID NO: 2318860 - RNA, 19 nt, Artificial Sequence
  Description of Artificial Sequence: Synthetic oligonucleotide
acugcgggcaguucaucug

SEQ ID NO: 2318861 - RNA, 19 nt, Artificial Sequence
  Description of Artificial Sequence: Synthetic oligonucleotide
ucuaccuuugagccagcua

SEQ ID NO: 2318862 - RNA, 19 nt, Artificial Sequence
  Description of Artificial Sequence: Synthetic oligonucleotide
ucaacugcgggcaguucau

SEQ ID NO: 2318863 - RNA, 19 nt, Artificial Sequence
  Description of Artificial Sequence: Synthetic oligonucleotide
ucgcaugcagcguucuaca

SEQ ID NO: 2318864 - RNA, 19 nt, Artificial Sequence
  Description of Artificial Sequence: Synthetic oligonucleotide
ucucccgaagcgcccagca

SEQ ID NO: 2318865 - RNA, 19 nt, Artificial Sequence
  Description of Artificial Sequence: Synthetic oligonucleotide
agccaguggcuagugaagg

SEQ ID NO: 2318866 - RNA, 19 nt, Artificial Sequence
  Description of Artificial Sequence: Synthetic oligonucleotide
auagaagggaacagcuuca

SEQ ID NO: 2318867 - RNA, 19 nt, Artificial Sequence
  Description of Artificial Sequence: Synthetic oligonucleotide
uucuaucucgacaccuuuu

SEQ ID NO: 2318868 - RNA, 19 nt, Artificial Sequence
  Description of Artificial Sequence: Synthetic oligonucleotide
cguucuacaagcucucggg

SEQ ID NO: 2318869 - RNA, 19 nt, Artificial Sequence
  Description of Artificial Sequence: Synthetic oligonucleotide
ucggcguagucucccgaag

SEQ ID NO: 2318870 - RNA, 19 nt, Artificial Sequence
  Description of Artificial Sequence: Synthetic oligonucleotide
ucuagggcuauagcugugu

SEQ ID NO: 2318871 - RNA, 19 nt, Artificial Sequence
  Description of Artificial Sequence: Synthetic oligonucleotide
ggcugagccaaguaugcgc

SEQ ID NO: 2318872 - RNA, 19 nt, Artificial Sequence
  Description of Artificial Sequence: Synthetic oligonucleotide
uaugaacgggcaucucggu

SEQ ID NO: 2318873 - RNA, 19 nt, Artificial Sequence
  Description of Artificial Sequence: Synthetic oligonucleotide
ggcguagucucccgaagcg

SEQ ID NO: 2318874 - RNA, 19 nt, Artificial Sequence
  Description of Artificial Sequence: Synthetic oligonucleotide
agucgaacuucaccccgag

SEQ ID NO: 2318875 - RNA, 19 nt, Artificial Sequence
  Description of Artificial Sequence: Synthetic oligonucleotide
ucgcauaauacgagagaua

SEQ ID NO: 2318876 - RNA, 19 nt, Artificial Sequence
  Description of Artificial Sequence: Synthetic oligonucleotide
acgcgguaaaacugccccg

SEQ ID NO: 2318877 - RNA, 19 nt, Artificial Sequence
  Description of Artificial Sequence: Synthetic oligonucleotide
auugcggaaacgagccagg

SEQ ID NO: 2318878 - RNA, 19 nt, Artificial Sequence
  Description of Artificial Sequence: Synthetic oligonucleotide
aucccaguuggucucugcu

SEQ ID NO: 2318879 - RNA, 19 nt, Artificial Sequence
  Description of Artificial Sequence: Synthetic oligonucleotide
caucuuggagcgucggcug

SEQ ID NO: 2318880 - RNA, 19 nt, Artificial Sequence
  Description of Artificial Sequence: Synthetic oligonucleotide
agccagcuaauucaagcau

SEQ ID NO: 2318881 - RNA, 19 nt, Artificial Sequence
  Description of Artificial Sequence: Synthetic oligonucleotide
auucaucuuggagcgucgg

SEQ ID NO: 2318882 - RNA, 19 nt, Artificial Sequence
  Description of Artificial Sequence: Synthetic oligonucleotide
gaaacgagccagggagccg

SEQ ID NO: 2318883 - RNA, 19 nt, Artificial Sequence
  Description of Artificial Sequence: Synthetic oligonucleotide
uacgagagauauugcggaa

SEQ ID NO: 2318884 - RNA, 19 nt, Artificial Sequence
  Description of Artificial Sequence: Synthetic oligonucleotide
gaagucggcguagucuccc

SEQ ID NO: 2318885 - RNA, 19 nt, Artificial Sequence
  Description of Artificial Sequence: Synthetic oligonucleotide
guaugcgccauagccagug

SEQ ID NO: 2318886 - RNA, 19 nt, Artificial Sequence
  Description of Artificial Sequence: Synthetic oligonucleotide
guaucucauucaaagccac

SEQ ID NO: 2318887 - RNA, 19 nt, Artificial Sequence
  Description of Artificial Sequence: Synthetic oligonucleotide
ggcccuucuaucucgacac

SEQ ID NO: 2318888 - RNA, 19 nt, Artificial Sequence
  Description of Artificial Sequence: Synthetic oligonucleotide
cugucguugacucgcauaa

SEQ ID NO: 2318889 - RNA, 19 nt, Artificial Sequence
  Description of Artificial Sequence: Synthetic oligonucleotide
uucaaagggcugauuuauu

SEQ ID NO: 2318890 - RNA, 19 nt, Artificial Sequence
  Description of Artificial Sequence: Synthetic oligonucleotide
acugccccggagccggccc

SEQ ID NO: 2318891 - RNA, 19 nt, Artificial Sequence
  Description of Artificial Sequence: Synthetic oligonucleotide
uggagcgucggcuguacau

SEQ ID NO: 2318892 - RNA, 19 nt, Artificial Sequence
  Description of Artificial Sequence: Synthetic oligonucleotide
gauuggacccucgcagagc

SEQ ID NO: 2318893 - RNA, 19 nt, Artificial Sequence
  Description of Artificial Sequence: Synthetic oligonucleotide
ucucgguaguacagcacuc

SEQ ID NO: 2318894 - RNA, 19 nt, Artificial Sequence
  Description of Artificial Sequence: Synthetic oligonucleotide
cucgcaugcagcguucuac

SEQ ID NO: 2318895 - RNA, 19 nt, Artificial Sequence
  Description of Artificial Sequence: Synthetic oligonucleotide
uugcggaaacgagccaggg

SEQ ID NO: 2318896 - RNA, 19 nt, Artificial Sequence
  Description of Artificial Sequence: Synthetic oligonucleotide
ucgcagagcgcggacgccg

SEQ ID NO: 2318897 - RNA, 19 nt, Artificial Sequence
  Description of Artificial Sequence: Synthetic oligonucleotide
gcccgugacucccacaacg

SEQ ID NO: 2318898 - RNA, 19 nt, Artificial Sequence
  Description of Artificial Sequence: Synthetic oligonucleotide
ccgcagucgaacuucaccc

SEQ ID NO: 2318899 - RNA, 19 nt, Artificial Sequence
  Description of Artificial Sequence: Synthetic oligonucleotide
gcagucgaacuucaccccg

SEQ ID NO: 2318900 - RNA, 19 nt, Artificial Sequence
  Description of Artificial Sequence: Synthetic oligonucleotide
cauuucaaagggcugauuu

SEQ ID NO: 2318901 - RNA, 19 nt, Artificial Sequence
  Description of Artificial Sequence: Synthetic oligonucleotide
agccaaguaugcgccauag

SEQ ID NO: 2318902 - RNA, 19 nt, Artificial Sequence
  Description of Artificial Sequence: Synthetic oligonucleotide
cagcauagugcugucguug

SEQ ID NO: 2318903 - RNA, 19 nt, Artificial Sequence
  Description of Artificial Sequence: Synthetic oligonucleotide
uaucccaguuggucucugc

SEQ ID NO: 2318904 - RNA, 19 nt, Artificial Sequence
  Description of Artificial Sequence: Synthetic oligonucleotide
ugucugcagcaauaaccac

SEQ ID NO: 2318905 - RNA, 19 nt, Artificial Sequence
  Description of Artificial Sequence: Synthetic oligonucleotide
gcaugcagcguucuacaag

SEQ ID NO: 2318906 - RNA, 19 nt, Artificial Sequence
  Description of Artificial Sequence: Synthetic oligonucleotide
caucucgguaguacagcac

SEQ ID NO: 2318907 - RNA, 19 nt, Artificial Sequence
  Description of Artificial Sequence: Synthetic oligonucleotide
accacuccgcagucgaacu

SEQ ID NO: 2318908 - RNA, 19 nt, Artificial Sequence
  Description of Artificial Sequence: Synthetic oligonucleotide
cguugacucgcauaauacg

SEQ ID NO: 2318909 - RNA, 19 nt, Artificial Sequence
  Description of Artificial Sequence: Synthetic oligonucleotide
auauugcggaaacgagcca

SEQ ID NO: 2318910 - RNA, 19 nt, Artificial Sequence
  Description of Artificial Sequence: Synthetic oligonucleotide
agcacucgcaugcagcguu

SEQ ID NO: 2318911 - RNA, 19 nt, Artificial Sequence
  Description of Artificial Sequence: Synthetic oligonucleotide
ggcaauaucccaguugguc

SEQ ID NO: 2318912 - RNA, 19 nt, Artificial Sequence
  Description of Artificial Sequence: Synthetic oligonucleotide
gcguucuacaagcucucgg

SEQ ID NO: 2318913 - RNA, 19 nt, Artificial Sequence
  Description of Artificial Sequence: Synthetic oligonucleotide
gacgggacgcgguaaaacu

SEQ ID NO: 2318914 - RNA, 19 nt, Artificial Sequence
  Description of Artificial Sequence: Synthetic oligonucleotide
caugagggcgcagggagug

SEQ ID NO: 2318915 - RNA, 19 nt, Artificial Sequence
  Description of Artificial Sequence: Synthetic oligonucleotide
gcuauagcuguguccauca

SEQ ID NO: 2318916 - RNA, 19 nt, Artificial Sequence
  Description of Artificial Sequence: Synthetic oligonucleotide
gcaauaaccacuccgcagu

SEQ ID NO: 2318917 - RNA, 19 nt, Artificial Sequence
  Description of Artificial Sequence: Synthetic oligonucleotide
cuucaccccgaguaccgac

SEQ ID NO: 2318918 - RNA, 19 nt, Artificial Sequence
  Description of Artificial Sequence: Synthetic oligonucleotide
guacagcacucgcaugcag

SEQ ID NO: 2318919 - RNA, 19 nt, Artificial Sequence
  Description of Artificial Sequence: Synthetic oligonucleotide
cucagucugacucaacacu

SEQ ID NO: 2318920 - RNA, 19 nt, Artificial Sequence
  Description of Artificial Sequence: Synthetic oligonucleotide
cuugucaaccaugaaugaa

SEQ ID NO: 2318921 - RNA, 19 nt, Artificial Sequence
  Description of Artificial Sequence: Synthetic oligonucleotide
gugauuggacccucgcaga

SEQ ID NO: 2318922 - RNA, 19 nt, Artificial Sequence
  Description of Artificial Sequence: Synthetic oligonucleotide
uaccuuugagccagcuaau

SEQ ID NO: 2318923 - RNA, 19 nt, Artificial Sequence
  Description of Artificial Sequence: Synthetic oligonucleotide
ucaccccgaguaccgacgu

SEQ ID NO: 2318924 - RNA, 19 nt, Artificial Sequence
  Description of Artificial Sequence: Synthetic oligonucleotide
ggucucugcugacaguggc

SEQ ID NO: 2318925 - RNA, 19 nt, Artificial Sequence
  Description of Artificial Sequence: Synthetic oligonucleotide
accgacgucccagucacca

SEQ ID NO: 2318926 - RNA, 19 nt, Artificial Sequence
  Description of Artificial Sequence: Synthetic oligonucleotide
ggaaacgagccagggagcc

SEQ ID NO: 2318927 - RNA, 19 nt, Artificial Sequence
  Description of Artificial Sequence: Synthetic oligonucleotide
guacauggcccuugucaac

SEQ ID NO: 2318928 - RNA, 19 nt, Artificial Sequence
  Description of Artificial Sequence: Synthetic oligonucleotide
augaacgggcaucucggua

SEQ ID NO: 2318929 - RNA, 19 nt, Artificial Sequence
  Description of Artificial Sequence: Synthetic oligonucleotide
ugaauagcucuagggcuau

SEQ ID NO: 2318930 - RNA, 19 nt, Artificial Sequence
  Description of Artificial Sequence: Synthetic oligonucleotide
ugacucaacacugguuguu

SEQ ID NO: 2318931 - RNA, 19 nt, Artificial Sequence
  Description of Artificial Sequence: Synthetic oligonucleotide
gguaguacagcacucgcau

SEQ ID NO: 2318932 - RNA, 19 nt, Artificial Sequence
  Description of Artificial Sequence: Synthetic oligonucleotide
ugugggcaauaucccaguu

SEQ ID NO: 2318933 - RNA, 19 nt, Artificial Sequence
  Description of Artificial Sequence: Synthetic oligonucleotide
agcguucuacaagcucucg

SEQ ID NO: 2318934 - RNA, 19 nt, Artificial Sequence
  Description of Artificial Sequence: Synthetic oligonucleotide
gguccgggugauuggaccc

SEQ ID NO: 2318935 - RNA, 19 nt, Artificial Sequence
  Description of Artificial Sequence: Synthetic oligonucleotide
acgagagauauugcggaaa

SEQ ID NO: 2318936 - RNA, 19 nt, Artificial Sequence
  Description of Artificial Sequence: Synthetic oligonucleotide
agcucucgggccucagucu

SEQ ID NO: 2318937 - RNA, 19 nt, Artificial Sequence
  Description of Artificial Sequence: Synthetic oligonucleotide
aggcugagccaaguaugcg

SEQ ID NO: 2318938 - RNA, 19 nt, Artificial Sequence
  Description of Artificial Sequence: Synthetic oligonucleotide
cuagggcuauagcuguguc

SEQ ID NO: 2318939 - RNA, 19 nt, Artificial Sequence
  Description of Artificial Sequence: Synthetic oligonucleotide
ccaagcauguccacauaac

SEQ ID NO: 2318940 - RNA, 19 nt, Artificial Sequence
  Description of Artificial Sequence: Synthetic oligonucleotide
gucucugcugacaguggcc

SEQ ID NO: 2318941 - RNA, 19 nt, Artificial Sequence
  Description of Artificial Sequence: Synthetic oligonucleotide
augggguucuggguccggg

SEQ ID NO: 2318942 - RNA, 19 nt, Artificial Sequence
  Description of Artificial Sequence: Synthetic oligonucleotide
gcuacaccaagcaugucca

SEQ ID NO: 2318943 - RNA, 19 nt, Artificial Sequence
  Description of Artificial Sequence: Synthetic oligonucleotide
acgggacgcgguaaaacug

SEQ ID NO: 2318944 - RNA, 19 nt, Artificial Sequence
  Description of Artificial Sequence: Synthetic oligonucleotide
ucuggccgagaacuugcuu

SEQ ID NO: 2318945 - RNA, 19 nt, Artificial Sequence
  Description of Artificial Sequence: Synthetic oligonucleotide
gccucagucugacucaaca

SEQ ID NO: 2318946 - RNA, 19 nt, Artificial Sequence
  Description of Artificial Sequence: Synthetic oligonucleotide
cucuagggcuauagcugug

SEQ ID NO: 2318947 - RNA, 19 nt, Artificial Sequence
  Description of Artificial Sequence: Synthetic oligonucleotide
cagcguucuacaagcucuc

SEQ ID NO: 2318948 - RNA, 19 nt, Artificial Sequence
  Description of Artificial Sequence: Synthetic oligonucleotide
cucgcauaauacgagagau

SEQ ID NO: 2318949 - RNA, 19 nt, Artificial Sequence
  Description of Artificial Sequence: Synthetic oligonucleotide
agcccgugacucccacaac

SEQ ID NO: 2318950 - RNA, 19 nt, Artificial Sequence
  Description of Artificial Sequence: Synthetic oligonucleotide
cucaacacugguuguuucu

SEQ ID NO: 2318951 - RNA, 19 nt, Artificial Sequence
  Description of Artificial Sequence: Synthetic oligonucleotide
cagcaauaaccacuccgca

SEQ ID NO: 2318952 - RNA, 19 nt, Artificial Sequence
  Description of Artificial Sequence: Synthetic oligonucleotide
uaaccacuccgcagucgaa

SEQ ID NO: 2318953 - RNA, 19 nt, Artificial Sequence
  Description of Artificial Sequence: Synthetic oligonucleotide
cacuccgcagucgaacuuc

SEQ ID NO: 2318954 - RNA, 19 nt, Artificial Sequence
  Description of Artificial Sequence: Synthetic oligonucleotide
ugacucccacaacgccucc

SEQ ID NO: 2318955 - RNA, 19 nt, Artificial Sequence
  Description of Artificial Sequence: Synthetic oligonucleotide
guagucucccgaagcgccc

SEQ ID NO: 2318956 - RNA, 19 nt, Artificial Sequence
  Description of Artificial Sequence: Synthetic oligonucleotide
cucauucaaagccacugau

SEQ ID NO: 2318957 - RNA, 19 nt, Artificial Sequence
  Description of Artificial Sequence: Synthetic oligonucleotide
uggguccgggugauuggac

SEQ ID NO: 2318958 - RNA, 19 nt, Artificial Sequence
  Description of Artificial Sequence: Synthetic oligonucleotide
gggcaguucaucuguaucu

SEQ ID NO: 2318959 - RNA, 19 nt, Artificial Sequence
  Description of Artificial Sequence: Synthetic oligonucleotide
uuggagcgucggcuguaca

SEQ ID NO: 2318960 - RNA, 19 nt, Artificial Sequence
  Description of Artificial Sequence: Synthetic oligonucleotide
uggcuagugaaggggcuuc

SEQ ID NO: 2318961 - RNA, 19 nt, Artificial Sequence
  Description of Artificial Sequence: Synthetic oligonucleotide
uggccagcccgugacuccc

SEQ ID NO: 2318962 - RNA, 19 nt, Artificial Sequence
  Description of Artificial Sequence: Synthetic oligonucleotide
cugacaguggcccuucuau

SEQ ID NO: 2318963 - RNA, 19 nt, Artificial Sequence
  Description of Artificial Sequence: Synthetic oligonucleotide
agggaguggacgggacgcg

SEQ ID NO: 2318964 - RNA, 19 nt, Artificial Sequence
  Description of Artificial Sequence: Synthetic oligonucleotide
uagucucccgaagcgccca

SEQ ID NO: 2318965 - RNA, 19 nt, Artificial Sequence
  Description of Artificial Sequence: Synthetic oligonucleotide
acgccggguccaugagggc

SEQ ID NO: 2318966 - RNA, 19 nt, Artificial Sequence
  Description of Artificial Sequence: Synthetic oligonucleotide
ggagcgucggcuguacaug

SEQ ID NO: 2318967 - RNA, 19 nt, Artificial Sequence
  Description of Artificial Sequence: Synthetic oligonucleotide
agucggcguagucucccga

SEQ ID NO: 2318968 - RNA, 19 nt, Artificial Sequence
  Description of Artificial Sequence: Synthetic oligonucleotide
cuuggagcgucggcuguac

SEQ ID NO: 2318969 - RNA, 19 nt, Artificial Sequence
  Description of Artificial Sequence: Synthetic oligonucleotide
ucucgggccucagucugac

SEQ ID NO: 2318970 - RNA, 19 nt, Artificial Sequence
  Description of Artificial Sequence: Synthetic oligonucleotide
gaguaccgacgucccaguc

SEQ ID NO: 2318971 - RNA, 19 nt, Artificial Sequence
  Description of Artificial Sequence: Synthetic oligonucleotide
gcgucggcuguacauggcc

SEQ ID NO: 2318972 - RNA, 19 nt, Artificial Sequence
  Description of Artificial Sequence: Synthetic oligonucleotide
cagcccgugacucccacaa

SEQ ID NO: 2318973 - RNA, 19 nt, Artificial Sequence
  Description of Artificial Sequence: Synthetic oligonucleotide
cccgaagcgcccagcauag

SEQ ID NO: 2318974 - RNA, 19 nt, Artificial Sequence
  Description of Artificial Sequence: Synthetic oligonucleotide
cagucgaacuucaccccga

SEQ ID NO: 2318975 - RNA, 19 nt, Artificial Sequence
  Description of Artificial Sequence: Synthetic oligonucleotide
cccgugacucccacaacgc

SEQ ID NO: 2318976 - RNA, 19 nt, Artificial Sequence
  Description of Artificial Sequence: Synthetic oligonucleotide
agcuucaacugcgggcagu

SEQ ID NO: 2318977 - RNA, 19 nt, Artificial Sequence
  Description of Artificial Sequence: Synthetic oligonucleotide
ugcugucguugacucgcau

SEQ ID NO: 2318978 - RNA, 19 nt, Artificial Sequence
  Description of Artificial Sequence: Synthetic oligonucleotide
ucuuggagcgucggcugua

SEQ ID NO: 2318979 - RNA, 19 nt, Artificial Sequence
  Description of Artificial Sequence: Synthetic oligonucleotide
accuuugagccagcuaauu

SEQ ID NO: 2318980 - RNA, 19 nt, Artificial Sequence
  Description of Artificial Sequence: Synthetic oligonucleotide
cuggaagucggcguagucu

SEQ ID NO: 2318981 - RNA, 19 nt, Artificial Sequence
  Description of Artificial Sequence: Synthetic oligonucleotide
ccgaguaccgacgucccag

SEQ ID NO: 2318982 - RNA, 19 nt, Artificial Sequence
  Description of Artificial Sequence: Synthetic oligonucleotide
uuguaugaacgggcaucuc

SEQ ID NO: 2318983 - RNA, 19 nt, Artificial Sequence
  Description of Artificial Sequence: Synthetic oligonucleotide
gcagcguucuacaagcucu

SEQ ID NO: 2318984 - RNA, 19 nt, Artificial Sequence
  Description of Artificial Sequence: Synthetic oligonucleotide
ugcgggcaguucaucugua

SEQ ID NO: 2318985 - RNA, 19 nt, Artificial Sequence
  Description of Artificial Sequence: Synthetic oligonucleotide
caaucaccaucuggccgag

SEQ ID NO: 2318986 - RNA, 19 nt, Artificial Sequence
  Description of Artificial Sequence: Synthetic oligonucleotide
agucuaccuuugagccagc

SEQ ID NO: 2318987 - RNA, 19 nt, Artificial Sequence
  Description of Artificial Sequence: Synthetic oligonucleotide
gggugauuggacccucgca

SEQ ID NO: 2318988 - RNA, 19 nt, Artificial Sequence
  Description of Artificial Sequence: Synthetic oligonucleotide
ugucguugacucgcauaau

SEQ ID NO: 2318989 - RNA, 19 nt, Artificial Sequence
  Description of Artificial Sequence: Synthetic oligonucleotide
gccaaguaugcgccauagc

SEQ ID NO: 2318990 - RNA, 19 nt, Artificial Sequence
  Description of Artificial Sequence: Synthetic oligonucleotide
gucggcguagucucccgaa

SEQ ID NO: 2318991 - RNA, 19 nt, Artificial Sequence
  Description of Artificial Sequence: Synthetic oligonucleotide
cgaacuucaccccgaguac

SEQ ID NO: 2318992 - RNA, 19 nt, Artificial Sequence
  Description of Artificial Sequence: Synthetic oligonucleotide
acuucaccccgaguaccga

SEQ ID NO: 2318993 - RNA, 19 nt, Artificial Sequence
  Description of Artificial Sequence: Synthetic oligonucleotide
cgaagcgcccagcauagug

SEQ ID NO: 2318994 - RNA, 19 nt, Artificial Sequence
  Description of Artificial Sequence: Synthetic oligonucleotide
gcccuugucaaccaugaau

SEQ ID NO: 2318995 - RNA, 19 nt, Artificial Sequence
  Description of Artificial Sequence: Synthetic oligonucleotide
ccucgcagagcgcggacgc

SEQ ID NO: 2318996 - RNA, 19 nt, Artificial Sequence
  Description of Artificial Sequence: Synthetic oligonucleotide
gggaguggacgggacgcgg

SEQ ID NO: 2318997 - RNA, 19 nt, Artificial Sequence
  Description of Artificial Sequence: Synthetic oligonucleotide
aguggacgggacgcgguaa

SEQ ID NO: 2318998 - RNA, 19 nt, Artificial Sequence
  Description of Artificial Sequence: Synthetic oligonucleotide
gaguggacgggacgcggua

SEQ ID NO: 2318999 - RNA, 19 nt, Artificial Sequence
  Description of Artificial Sequence: Synthetic oligonucleotide
uaccgacgucccagucacc

SEQ ID NO: 2319000 - RNA, 19 nt, Artificial Sequence
  Description of Artificial Sequence: Synthetic oligonucleotide
aaucaccaucuggccgaga

SEQ ID NO: 2319001 - RNA, 19 nt, Artificial Sequence
  Description of Artificial Sequence: Synthetic oligonucleotide
gacucaacacugguuguuu

SEQ ID NO: 2319002 - RNA, 19 nt, Artificial Sequence
  Description of Artificial Sequence: Synthetic oligonucleotide
gaacgggcaucucgguagu

SEQ ID NO: 2319003 - RNA, 19 nt, Artificial Sequence
  Description of Artificial Sequence: Synthetic oligonucleotide
ggacgggacgcgguaaaac

SEQ ID NO: 2319004 - RNA, 19 nt, Artificial Sequence
  Description of Artificial Sequence: Synthetic oligonucleotide
acuccgcagucgaacuuca

SEQ ID NO: 2319005 - RNA, 19 nt, Artificial Sequence
  Description of Artificial Sequence: Synthetic oligonucleotide
cuccgcagucgaacuucac

SEQ ID NO: 2319006 - RNA, 19 nt, Artificial Sequence
  Description of Artificial Sequence: Synthetic oligonucleotide
acugaucaugugggcaaua

SEQ ID NO: 2319007 - RNA, 19 nt, Artificial Sequence
  Description of Artificial Sequence: Synthetic oligonucleotide
caugggguucuggguccgg

SEQ ID NO: 2319008 - RNA, 19 nt, Artificial Sequence
  Description of Artificial Sequence: Synthetic oligonucleotide
cgcgguaaaacugccccgg

SEQ ID NO: 2319009 - RNA, 19 nt, Artificial Sequence
  Description of Artificial Sequence: Synthetic oligonucleotide
ccuugucaaccaugaauga

SEQ ID NO: 2319010 - RNA, 19 nt, Artificial Sequence
  Description of Artificial Sequence: Synthetic oligonucleotide
cagcuucaacugcgggcag

SEQ ID NO: 2319011 - RNA, 19 nt, Artificial Sequence
  Description of Artificial Sequence: Synthetic oligonucleotide
acucgcaugcagcguucua

SEQ ID NO: 2319012 - RNA, 19 nt, Artificial Sequence
  Description of Artificial Sequence: Synthetic oligonucleotide
guggacgggacgcgguaaa

SEQ ID NO: 2319013 - RNA, 19 nt, Artificial Sequence
  Description of Artificial Sequence: Synthetic oligonucleotide
gcugucguugacucgcaua

SEQ ID NO: 2319014 - RNA, 19 nt, Artificial Sequence
  Description of Artificial Sequence: Synthetic oligonucleotide
ccgugacucccacaacgcc

SEQ ID NO: 2319015 - RNA, 19 nt, Artificial Sequence
  Description of Artificial Sequence: Synthetic oligonucleotide
guuggucucugcugacagu

SEQ ID NO: 2319016 - RNA, 19 nt, Artificial Sequence
  Description of Artificial Sequence: Synthetic oligonucleotide
cgcagucgaacuucacccc

SEQ ID NO: 2319017 - RNA, 19 nt, Artificial Sequence
  Description of Artificial Sequence: Synthetic oligonucleotide
cucgcagagcgcggacgcc

SEQ ID NO: 2319018 - RNA, 19 nt, Artificial Sequence
  Description of Artificial Sequence: Synthetic oligonucleotide
ggacgcgguaaaacugccc

SEQ ID NO: 2319019 - RNA, 19 nt, Artificial Sequence
  Description of Artificial Sequence: Synthetic oligonucleotide
acgagccagggagccguag

SEQ ID NO: 2319020 - RNA, 19 nt, Artificial Sequence
  Description of Artificial Sequence: Synthetic oligonucleotide
cuucuaucucgacaccuuu

SEQ ID NO: 2319021 - RNA, 19 nt, Artificial Sequence
  Description of Artificial Sequence: Synthetic oligonucleotide
aggauucaucuuggagcgu

SEQ ID NO: 2319022 - RNA, 19 nt, Artificial Sequence
  Description of Artificial Sequence: Synthetic oligonucleotide
guggcccuucuaucucgac

SEQ ID NO: 2319023 - RNA, 19 nt, Artificial Sequence
  Description of Artificial Sequence: Synthetic oligonucleotide
aucuggccgagaacuugcu

SEQ ID NO: 2319024 - RNA, 19 nt, Artificial Sequence
  Description of Artificial Sequence: Synthetic oligonucleotide
gcguagucucccgaagcgc

SEQ ID NO: 2319025 - RNA, 19 nt, Artificial Sequence
  Description of Artificial Sequence: Synthetic oligonucleotide
uccgggugauuggacccuc

SEQ ID NO: 2319026 - RNA, 19 nt, Artificial Sequence
  Description of Artificial Sequence: Synthetic oligonucleotide
cgguaaaacugccccggag

SEQ ID NO: 2319027 - RNA, 19 nt, Artificial Sequence
  Description of Artificial Sequence: Synthetic oligonucleotide
cgucggcuguacauggccc

SEQ ID NO: 2319028 - RNA, 19 nt, Artificial Sequence
  Description of Artificial Sequence: Synthetic oligonucleotide
cuucaacugcgggcaguuc

SEQ ID NO: 2319029 - RNA, 19 nt, Artificial Sequence
  Description of Artificial Sequence: Synthetic oligonucleotide
aguaugcgccauagccagu

SEQ ID NO: 2319030 - RNA, 19 nt, Artificial Sequence
  Description of Artificial Sequence: Synthetic oligonucleotide
ggagccguaggagcccagc

SEQ ID NO: 2319031 - RNA, 19 nt, Artificial Sequence
  Description of Artificial Sequence: Synthetic oligonucleotide
ggaagucggcguagucucc

SEQ ID NO: 2319032 - RNA, 19 nt, Artificial Sequence
  Description of Artificial Sequence: Synthetic oligonucleotide
cagcuaauucaagcauaga

SEQ ID NO: 2319033 - RNA, 19 nt, Artificial Sequence
  Description of Artificial Sequence: Synthetic oligonucleotide
ucggcuguacauggcccuu

SEQ ID NO: 2319034 - RNA, 19 nt, Artificial Sequence
  Description of Artificial Sequence: Synthetic oligonucleotide
gggacgcgguaaaacugcc

SEQ ID NO: 2319035 - RNA, 19 nt, Artificial Sequence
  Description of Artificial Sequence: Synthetic oligonucleotide
cggaaacgagccagggagc

SEQ ID NO: 2319036 - RNA, 19 nt, Artificial Sequence
  Description of Artificial Sequence: Synthetic oligonucleotide
cgcauaauacgagagauau

SEQ ID NO: 2319037 - RNA, 19 nt, Artificial Sequence
  Description of Artificial Sequence: Synthetic oligonucleotide
ccaguuggucucugcugac

SEQ ID NO: 2319038 - RNA, 19 nt, Artificial Sequence
  Description of Artificial Sequence: Synthetic oligonucleotide
cugcgggcaguucaucugu

SEQ ID NO: 2319039 - RNA, 19 nt, Artificial Sequence
  Description of Artificial Sequence: Synthetic oligonucleotide
caacugcgggcaguucauc

SEQ ID NO: 2319040 - RNA, 19 nt, Artificial Sequence
  Description of Artificial Sequence: Synthetic oligonucleotide
gcggacgccggguccauga

SEQ ID NO: 2319041 - RNA, 19 nt, Artificial Sequence
  Description of Artificial Sequence: Synthetic oligonucleotide
gcccuucuaucucgacacc

SEQ ID NO: 2319042 - RNA, 19 nt, Artificial Sequence
  Description of Artificial Sequence: Synthetic oligonucleotide
gccggguccaugagggcgc

SEQ ID NO: 2319043 - RNA, 19 nt, Artificial Sequence
  Description of Artificial Sequence: Synthetic oligonucleotide
ccgggugauuggacccucg

SEQ ID NO: 2319044 - RNA, 19 nt, Artificial Sequence
  Description of Artificial Sequence: Synthetic oligonucleotide
gcccagcauagugcugucg

SEQ ID NO: 2319045 - RNA, 19 nt, Artificial Sequence
  Description of Artificial Sequence: Synthetic oligonucleotide
ccccgaguaccgacguccc

SEQ ID NO: 2319046 - RNA, 19 nt, Artificial Sequence
  Description of Artificial Sequence: Synthetic oligonucleotide
cgccauagccaguggcuag

SEQ ID NO: 2319047 - RNA, 19 nt, Artificial Sequence
  Description of Artificial Sequence: Synthetic oligonucleotide
gcuguacauggcccuuguc

SEQ ID NO: 2319048 - RNA, 19 nt, Artificial Sequence
  Description of Artificial Sequence: Synthetic oligonucleotide
gucgaacuucaccccgagu

SEQ ID NO: 2319049 - RNA, 19 nt, Artificial Sequence
  Description of Artificial Sequence: Synthetic oligonucleotide
gcagagcgcggacgccggg

SEQ ID NO: 2319050 - RNA, 19 nt, Artificial Sequence
  Description of Artificial Sequence: Synthetic oligonucleotide
ggacccucgcagagcgcgg

SEQ ID NO: 2319051 - RNA, 19 nt, Artificial Sequence
  Description of Artificial Sequence: Synthetic oligonucleotide
caccccgaguaccgacguc

SEQ ID NO: 2319052 - RNA, 19 nt, Artificial Sequence
  Description of Artificial Sequence: Synthetic oligonucleotide
gcgguaaaacugccccgga

SEQ ID NO: 2319053 - RNA, 19 nt, Artificial Sequence
  Description of Artificial Sequence: Synthetic oligonucleotide
cgccggguccaugagggcg

SEQ ID NO: 2319054 - RNA, 19 nt, Artificial Sequence
  Description of Artificial Sequence: Synthetic oligonucleotide
cgggugauuggacccucgc

SEQ ID NO: 2319055 - RNA, 19 nt, Artificial Sequence
  Description of Artificial Sequence: Synthetic oligonucleotide
gcugacaguggcccuucua

SEQ ID NO: 2319056 - RNA, 19 nt, Artificial Sequence
  Description of Artificial Sequence: Synthetic oligonucleotide
cgguaguacagcacucgca

SEQ ID NO: 2319057 - RNA, 19 nt, Artificial Sequence
  Description of Artificial Sequence: Synthetic oligonucleotide
cccucgcagagcgcggacg

SEQ ID NO: 2319058 - RNA, 19 nt, Artificial Sequence
  Description of Artificial Sequence: Synthetic oligonucleotide
cgugacucccacaacgccu

SEQ ID NO: 2319059 - RNA, 19 nt, Artificial Sequence
  Description of Artificial Sequence: Synthetic oligonucleotide
aacgagccagggagccgua

SEQ ID NO: 2319060 - RNA, 19 nt, Artificial Sequence
  Description of Artificial Sequence: Synthetic oligonucleotide
ccaugggguucuggguccg

SEQ ID NO: 2319061 - RNA, 19 nt, Artificial Sequence
  Description of Artificial Sequence: Synthetic oligonucleotide
cucugcugacaguggcccu

SEQ ID NO: 2319062 - RNA, 19 nt, Artificial Sequence
  Description of Artificial Sequence: Synthetic oligonucleotide
guggcuagugaaggggcuu

SEQ ID NO: 2319063 - RNA, 19 nt, Artificial Sequence
  Description of Artificial Sequence: Synthetic oligonucleotide
cauggcccuugucaaccau

SEQ ID NO: 2319064 - RNA, 19 nt, Artificial Sequence
  Description of Artificial Sequence: Synthetic oligonucleotide
guccgggugauuggacccu

SEQ ID NO: 2319065 - RNA, 19 nt, Artificial Sequence
  Description of Artificial Sequence: Synthetic oligonucleotide
gccagcccgugacucccac

SEQ ID NO: 2319066 - RNA, 19 nt, Artificial Sequence
  Description of Artificial Sequence: Synthetic oligonucleotide
gccauagccaguggcuagu

SEQ ID NO: 2319067 - RNA, 19 nt, Artificial Sequence
  Description of Artificial Sequence: Synthetic oligonucleotide
gcacucgcaugcagcguuc

SEQ ID NO: 2319068 - RNA, 19 nt, Artificial Sequence
  Description of Artificial Sequence: Synthetic oligonucleotide
gcauaauacgagagauauu

SEQ ID NO: 2319069 - RNA, 19 nt, Artificial Sequence
  Description of Artificial Sequence: Synthetic oligonucleotide
ggaguggacgggacgcggu

SEQ ID NO: 2319070 - RNA, 19 nt, Artificial Sequence
  Description of Artificial Sequence: Synthetic oligonucleotide
gcuucaacugcgggcaguu

SEQ ID NO: 2319071 - RNA, 19 nt, Artificial Sequence
  Description of Artificial Sequence: Synthetic oligonucleotide
cccagcaugucugcagcaa

SEQ ID NO: 2319072 - RNA, 19 nt, Artificial Sequence
  Description of Artificial Sequence: Synthetic oligonucleotide
cucccgaagcgcccagcau

SEQ ID NO: 2319073 - RNA, 19 nt, Artificial Sequence
  Description of Artificial Sequence: Synthetic oligonucleotide
cgggccucagucugacuca

SEQ ID NO: 2319074 - RNA, 19 nt, Artificial Sequence
  Description of Artificial Sequence: Synthetic oligonucleotide
cacucgcaugcagcguucu

SEQ ID NO: 2319075 - RNA, 19 nt, Artificial Sequence
  Description of Artificial Sequence: Synthetic oligonucleotide
gggagccguaggagcccag

SEQ ID NO: 2319076 - RNA, 19 nt, Artificial Sequence
  Description of Artificial Sequence: Synthetic oligonucleotide
cagagcgcggacgccgggu

SEQ ID NO: 2319077 - RNA, 19 nt, Artificial Sequence
  Description of Artificial Sequence: Synthetic oligonucleotide
gcuagugaaggggcuucau

SEQ ID NO: 2319078 - RNA, 19 nt, Artificial Sequence
  Description of Artificial Sequence: Synthetic oligonucleotide
cggacgccggguccaugag

SEQ ID NO: 2319079 - RNA, 19 nt, Artificial Sequence
  Description of Artificial Sequence: Synthetic oligonucleotide
gggcaauaucccaguuggu

SEQ ID NO: 2319080 - RNA, 19 nt, Artificial Sequence
  Description of Artificial Sequence: Synthetic oligonucleotide
ccagcccgugacucccaca

SEQ ID NO: 2319081 - RNA, 19 nt, Artificial Sequence
  Description of Artificial Sequence: Synthetic oligonucleotide
cagcacucgcaugcagcgu

SEQ ID NO: 2319082 - RNA, 19 nt, Artificial Sequence
  Description of Artificial Sequence: Synthetic oligonucleotide
cccgaguaccgacguccca

SEQ ID NO: 2319083 - RNA, 19 nt, Artificial Sequence
  Description of Artificial Sequence: Synthetic oligonucleotide
ggccgagaacuugcuucaa

SEQ ID NO: 2319084 - RNA, 19 nt, Artificial Sequence
  Description of Artificial Sequence: Synthetic oligonucleotide
cucgggccucagucugacu

SEQ ID NO: 2319085 - RNA, 19 nt, Artificial Sequence
  Description of Artificial Sequence: Synthetic oligonucleotide
cgauuguaugaacgggcau

SEQ ID NO: 2319086 - RNA, 19 nt, Artificial Sequence
  Description of Artificial Sequence: Synthetic oligonucleotide
gggcuauagcuguguccau

SEQ ID NO: 2319087 - RNA, 19 nt, Artificial Sequence
  Description of Artificial Sequence: Synthetic oligonucleotide
cccacaacgccuccaucuu

SEQ ID NO: 2319088 - RNA, 19 nt, Artificial Sequence
  Description of Artificial Sequence: Synthetic oligonucleotide
ggcccaguggccagcccgu

SEQ ID NO: 2319089 - RNA, 19 nt, Artificial Sequence
  Description of Artificial Sequence: Synthetic oligonucleotide
ggccagcccgugacuccca

SEQ ID NO: 2319090 - RNA, 19 nt, Artificial Sequence
  Description of Artificial Sequence: Synthetic oligonucleotide
ccacuccgcagucgaacuu

SEQ ID NO: 2319091 - RNA, 19 nt, Artificial Sequence
  Description of Artificial Sequence: Synthetic oligonucleotide
ccggguccaugagggcgca

SEQ ID NO: 2319092 - RNA, 19 nt, Artificial Sequence
  Description of Artificial Sequence: Synthetic oligonucleotide
ccgaagcgcccagcauagu

SEQ ID NO: 2319093 - RNA, 19 nt, Artificial Sequence
  Description of Artificial Sequence: Synthetic oligonucleotide
uuuuauuuaguguugauag

SEQ ID NO: 2319094 - RNA, 19 nt, Artificial Sequence
  Description of Artificial Sequence: Synthetic oligonucleotide
ucuauaagaaacaugaaug

SEQ ID NO: 2319095 - RNA, 19 nt, Artificial Sequence
  Description of Artificial Sequence: Synthetic oligonucleotide
acuaaaagacauuacauac

SEQ ID NO: 2319096 - RNA, 19 nt, Artificial Sequence
  Description of Artificial Sequence: Synthetic oligonucleotide
auaauuacacauuccaucc

SEQ ID NO: 2319097 - RNA, 19 nt, Artificial Sequence
  Description of Artificial Sequence: Synthetic oligonucleotide
agcaaaaccauuuauuacc

SEQ ID NO: 2319098 - RNA, 19 nt, Artificial Sequence
  Description of Artificial Sequence: Synthetic oligonucleotide
gaucucauaaaucagagcc

SEQ ID NO: 2319099 - RNA, 19 nt, Artificial Sequence
  Description of Artificial Sequence: Synthetic oligonucleotide
aaagaugaaaacaugauag

SEQ ID NO: 2319100 - RNA, 19 nt, Artificial Sequence
  Description of Artificial Sequence: Synthetic oligonucleotide
agaaaauucugacaaauac

SEQ ID NO: 2319101 - RNA, 19 nt, Artificial Sequence
  Description of Artificial Sequence: Synthetic oligonucleotide
uucucuauaagaaacauga

SEQ ID NO: 2319102 - RNA, 19 nt, Artificial Sequence
  Description of Artificial Sequence: Synthetic oligonucleotide
aguguugauaguuuguucc

SEQ ID NO: 2319103 - RNA, 19 nt, Artificial Sequence
  Description of Artificial Sequence: Synthetic oligonucleotide
aaaauucugacaaauacuc

SEQ ID NO: 2319104 - RNA, 19 nt, Artificial Sequence
  Description of Artificial Sequence: Synthetic oligonucleotide
aaaauugucagccauaauu

SEQ ID NO: 2319105 - RNA, 19 nt, Artificial Sequence
  Description of Artificial Sequence: Synthetic oligonucleotide
uauuagaaaauucugacaa

SEQ ID NO: 2319106 - RNA, 19 nt, Artificial Sequence
  Description of Artificial Sequence: Synthetic oligonucleotide
uuacauacuauuaaguucu

SEQ ID NO: 2319107 - RNA, 19 nt, Artificial Sequence
  Description of Artificial Sequence: Synthetic oligonucleotide
uauaaucuggacaaaauac

SEQ ID NO: 2319108 - RNA, 19 nt, Artificial Sequence
  Description of Artificial Sequence: Synthetic oligonucleotide
uguaaauacaaauucugcc

SEQ ID NO: 2319109 - RNA, 19 nt, Artificial Sequence
  Description of Artificial Sequence: Synthetic oligonucleotide
uaaggaauuuauaaucugg

SEQ ID NO: 2319110 - RNA, 19 nt, Artificial Sequence
  Description of Artificial Sequence: Synthetic oligonucleotide
aaaauacuauauuagaaaa

SEQ ID NO: 2319111 - RNA, 19 nt, Artificial Sequence
  Description of Artificial Sequence: Synthetic oligonucleotide
aaguucugaacuuaguguc

SEQ ID NO: 2319112 - RNA, 19 nt, Artificial Sequence
  Description of Artificial Sequence: Synthetic oligonucleotide
uaaauucucuauaagaaac

SEQ ID NO: 2319113 - RNA, 19 nt, Artificial Sequence
  Description of Artificial Sequence: Synthetic oligonucleotide
uauauuagaaaauucugac

SEQ ID NO: 2319114 - RNA, 19 nt, Artificial Sequence
  Description of Artificial Sequence: Synthetic oligonucleotide
aaacaugauagacaaaaca

SEQ ID NO: 2319115 - RNA, 19 nt, Artificial Sequence
  Description of Artificial Sequence: Synthetic oligonucleotide
ucuaaauucucuauaagaa

SEQ ID NO: 2319116 - RNA, 19 nt, Artificial Sequence
  Description of Artificial Sequence: Synthetic oligonucleotide
auuacuaaaagacauuaca

SEQ ID NO: 2319117 - RNA, 19 nt, Artificial Sequence
  Description of Artificial Sequence: Synthetic oligonucleotide
uacuauauuagaaaauucu

SEQ ID NO: 2319118 - RNA, 19 nt, Artificial Sequence
  Description of Artificial Sequence: Synthetic oligonucleotide
cuauaagaaacaugaaugg

SEQ ID NO: 2319119 - RNA, 19 nt, Artificial Sequence
  Description of Artificial Sequence: Synthetic oligonucleotide
uaagaaacaugaaugggag

SEQ ID NO: 2319120 - RNA, 19 nt, Artificial Sequence
  Description of Artificial Sequence: Synthetic oligonucleotide
uacuauuaaguucugaacu

SEQ ID NO: 2319121 - RNA, 19 nt, Artificial Sequence
  Description of Artificial Sequence: Synthetic oligonucleotide
uuaaguucugaacuuagug

SEQ ID NO: 2319122 - RNA, 19 nt, Artificial Sequence
  Description of Artificial Sequence: Synthetic oligonucleotide
guaaauacaaauucugccc

SEQ ID NO: 2319123 - RNA, 19 nt, Artificial Sequence
  Description of Artificial Sequence: Synthetic oligonucleotide
guuaguauuuuauuuagug

SEQ ID NO: 2319124 - RNA, 19 nt, Artificial Sequence
  Description of Artificial Sequence: Synthetic oligonucleotide
ugaacuuagugucuggucc

SEQ ID NO: 2319125 - RNA, 19 nt, Artificial Sequence
  Description of Artificial Sequence: Synthetic oligonucleotide
gaauuuauaaucuggacaa

SEQ ID NO: 2319126 - RNA, 19 nt, Artificial Sequence
  Description of Artificial Sequence: Synthetic oligonucleotide
accuaaggaauuuauaauc

SEQ ID NO: 2319127 - RNA, 19 nt, Artificial Sequence
  Description of Artificial Sequence: Synthetic oligonucleotide
aauuuucucgauucauacg

SEQ ID NO: 2319128 - RNA, 19 nt, Artificial Sequence
  Description of Artificial Sequence: Synthetic oligonucleotide
aauugucagccauaauuac

SEQ ID NO: 2319129 - RNA, 19 nt, Artificial Sequence
  Description of Artificial Sequence: Synthetic oligonucleotide
aauguaaauacaaauucug

SEQ ID NO: 2319130 - RNA, 19 nt, Artificial Sequence
  Description of Artificial Sequence: Synthetic oligonucleotide
aauucugcccaagauacac

SEQ ID NO: 2319131 - RNA, 19 nt, Artificial Sequence
  Description of Artificial Sequence: Synthetic oligonucleotide
uguuccaugaaucuacuga

SEQ ID NO: 2319132 - RNA, 19 nt, Artificial Sequence
  Description of Artificial Sequence: Synthetic oligonucleotide
uugcauacuagcaaaacca

SEQ ID NO: 2319133 - RNA, 19 nt, Artificial Sequence
  Description of Artificial Sequence: Synthetic oligonucleotide
aaaacaucuuucucaguuc

SEQ ID NO: 2319134 - RNA, 19 nt, Artificial Sequence
  Description of Artificial Sequence: Synthetic oligonucleotide
uuggcuaacacaauagcgc

SEQ ID NO: 2319135 - RNA, 19 nt, Artificial Sequence
  Description of Artificial Sequence: Synthetic oligonucleotide
aauacuauauuagaaaauu

SEQ ID NO: 2319136 - RNA, 19 nt, Artificial Sequence
  Description of Artificial Sequence: Synthetic oligonucleotide
acaugaaugggaguuaugc

SEQ ID NO: 2319137 - RNA, 19 nt, Artificial Sequence
  Description of Artificial Sequence: Synthetic oligonucleotide
auuuucucgauucauacgu

SEQ ID NO: 2319138 - RNA, 19 nt, Artificial Sequence
  Description of Artificial Sequence: Synthetic oligonucleotide
auacuauuaaguucugaac

SEQ ID NO: 2319139 - RNA, 19 nt, Artificial Sequence
  Description of Artificial Sequence: Synthetic oligonucleotide
uaauguaaauacaaauucu

SEQ ID NO: 2319140 - RNA, 19 nt, Artificial Sequence
  Description of Artificial Sequence: Synthetic oligonucleotide
ugacaaauacucuaaauuc

SEQ ID NO: 2319141 - RNA, 19 nt, Artificial Sequence
  Description of Artificial Sequence: Synthetic oligonucleotide
uauaagaaacaugaauggg

SEQ ID NO: 2319142 - RNA, 19 nt, Artificial Sequence
  Description of Artificial Sequence: Synthetic oligonucleotide
uaaauacaaauucugccca

SEQ ID NO: 2319143 - RNA, 19 nt, Artificial Sequence
  Description of Artificial Sequence: Synthetic oligonucleotide
aaaagaugaaaacaugaua

SEQ ID NO: 2319144 - RNA, 19 nt, Artificial Sequence
  Description of Artificial Sequence: Synthetic oligonucleotide
uuaccuaaggaauuuauaa

SEQ ID NO: 2319145 - RNA, 19 nt, Artificial Sequence
  Description of Artificial Sequence: Synthetic oligonucleotide
aauucugacaaauacucua

SEQ ID NO: 2319146 - RNA, 19 nt, Artificial Sequence
  Description of Artificial Sequence: Synthetic oligonucleotide
ugauaauguaaauacaaau

SEQ ID NO: 2319147 - RNA, 19 nt, Artificial Sequence
  Description of Artificial Sequence: Synthetic oligonucleotide
gacaaaacaucuuucucag

SEQ ID NO: 2319148 - RNA, 19 nt, Artificial Sequence
  Description of Artificial Sequence: Synthetic oligonucleotide
uaaaagacauuacauacua

SEQ ID NO: 2319149 - RNA, 19 nt, Artificial Sequence
  Description of Artificial Sequence: Synthetic oligonucleotide
uuguuaguauuuuauuuag

SEQ ID NO: 2319150 - RNA, 19 nt, Artificial Sequence
  Description of Artificial Sequence: Synthetic oligonucleotide
uuacuaaaagacauuacau

SEQ ID NO: 2319151 - RNA, 19 nt, Artificial Sequence
  Description of Artificial Sequence: Synthetic oligonucleotide
aauacucuaaauucucuau

SEQ ID NO: 2319152 - RNA, 19 nt, Artificial Sequence
  Description of Artificial Sequence: Synthetic oligonucleotide
uauuaaguucugaacuuag

SEQ ID NO: 2319153 - RNA, 19 nt, Artificial Sequence
  Description of Artificial Sequence: Synthetic oligonucleotide
agacaaaacaucuuucuca

SEQ ID NO: 2319154 - RNA, 19 nt, Artificial Sequence
  Description of Artificial Sequence: Synthetic oligonucleotide
uuaguauuuuauuuagugu

SEQ ID NO: 2319155 - RNA, 19 nt, Artificial Sequence
  Description of Artificial Sequence: Synthetic oligonucleotide
uuuguuaguauuuuauuua

SEQ ID NO: 2319156 - RNA, 19 nt, Artificial Sequence
  Description of Artificial Sequence: Synthetic oligonucleotide
agagaaaacacacucccug

SEQ ID NO: 2319157 - RNA, 19 nt, Artificial Sequence
  Description of Artificial Sequence: Synthetic oligonucleotide
uaaguucugaacuuagugu

SEQ ID NO: 2319158 - RNA, 19 nt, Artificial Sequence
  Description of Artificial Sequence: Synthetic oligonucleotide
uaauuuucucgauucauac

SEQ ID NO: 2319159 - RNA, 19 nt, Artificial Sequence
  Description of Artificial Sequence: Synthetic oligonucleotide
uuauaaucuggacaaaaua

SEQ ID NO: 2319160 - RNA, 19 nt, Artificial Sequence
  Description of Artificial Sequence: Synthetic oligonucleotide
uggacaaaauacuauauua

SEQ ID NO: 2319161 - RNA, 19 nt, Artificial Sequence
  Description of Artificial Sequence: Synthetic oligonucleotide
aggaauuuauaaucuggac

SEQ ID NO: 2319162 - RNA, 19 nt, Artificial Sequence
  Description of Artificial Sequence: Synthetic oligonucleotide
uugucagccauaauuacac

SEQ ID NO: 2319163 - RNA, 19 nt, Artificial Sequence
  Description of Artificial Sequence: Synthetic oligonucleotide
ugaaucuugcauacuagca

SEQ ID NO: 2319164 - RNA, 19 nt, Artificial Sequence
  Description of Artificial Sequence: Synthetic oligonucleotide
uuuauaaucuggacaaaau

SEQ ID NO: 2319165 - RNA, 19 nt, Artificial Sequence
  Description of Artificial Sequence: Synthetic oligonucleotide
auguaaauacaaauucugc

SEQ ID NO: 2319166 - RNA, 19 nt, Artificial Sequence
  Description of Artificial Sequence: Synthetic oligonucleotide
aagaugaaaacaugauaga

SEQ ID NO: 2319167 - RNA, 19 nt, Artificial Sequence
  Description of Artificial Sequence: Synthetic oligonucleotide
auagacaaaacaucuuucu

SEQ ID NO: 2319168 - RNA, 19 nt, Artificial Sequence
  Description of Artificial Sequence: Synthetic oligonucleotide
aaaacaugauagacaaaac

SEQ ID NO: 2319169 - RNA, 19 nt, Artificial Sequence
  Description of Artificial Sequence: Synthetic oligonucleotide
uaaaucagagcccuuaauu

SEQ ID NO: 2319170 - RNA, 19 nt, Artificial Sequence
  Description of Artificial Sequence: Synthetic oligonucleotide
cuugcauacuagcaaaacc

SEQ ID NO: 2319171 - RNA, 19 nt, Artificial Sequence
  Description of Artificial Sequence: Synthetic oligonucleotide
ugauagacaaaacaucuuu

SEQ ID NO: 2319172 - RNA, 19 nt, Artificial Sequence
  Description of Artificial Sequence: Synthetic oligonucleotide
aaucuugcauacuagcaaa

SEQ ID NO: 2319173 - RNA, 19 nt, Artificial Sequence
  Description of Artificial Sequence: Synthetic oligonucleotide
ucuuucucaguucuuaaaa

SEQ ID NO: 2319174 - RNA, 19 nt, Artificial Sequence
  Description of Artificial Sequence: Synthetic oligonucleotide
ucuacugaaucuugcauac

SEQ ID NO: 2319175 - RNA, 19 nt, Artificial Sequence
  Description of Artificial Sequence: Synthetic oligonucleotide
augggaguuaugcaaagag

SEQ ID NO: 2319176 - RNA, 19 nt, Artificial Sequence
  Description of Artificial Sequence: Synthetic oligonucleotide
auauuagaaaauucugaca

SEQ ID NO: 2319177 - RNA, 19 nt, Artificial Sequence
  Description of Artificial Sequence: Synthetic oligonucleotide
ugaaucuacugaaucuugc

SEQ ID NO: 2319178 - RNA, 19 nt, Artificial Sequence
  Description of Artificial Sequence: Synthetic oligonucleotide
cuauauuagaaaauucuga

SEQ ID NO: 2319179 - RNA, 19 nt, Artificial Sequence
  Description of Artificial Sequence: Synthetic oligonucleotide
agagcccuuaauuuucucg

SEQ ID NO: 2319180 - RNA, 19 nt, Artificial Sequence
  Description of Artificial Sequence: Synthetic oligonucleotide
auaguuuguuccaugaauc

SEQ ID NO: 2319181 - RNA, 19 nt, Artificial Sequence
  Description of Artificial Sequence: Synthetic oligonucleotide
gaugaaaacaugauagaca

SEQ ID NO: 2319182 - RNA, 19 nt, Artificial Sequence
  Description of Artificial Sequence: Synthetic oligonucleotide
ugcagugauuacuaaaaga

SEQ ID NO: 2319183 - RNA, 19 nt, Artificial Sequence
  Description of Artificial Sequence: Synthetic oligonucleotide
uacuaaaagacauuacaua

SEQ ID NO: 2319184 - RNA, 19 nt, Artificial Sequence
  Description of Artificial Sequence: Synthetic oligonucleotide
auuuaguguugauaguuug

SEQ ID NO: 2319185 - RNA, 19 nt, Artificial Sequence
  Description of Artificial Sequence: Synthetic oligonucleotide
auaagaaacaugaauggga

SEQ ID NO: 2319186 - RNA, 19 nt, Artificial Sequence
  Description of Artificial Sequence: Synthetic oligonucleotide
uuuaguguugauaguuugu

SEQ ID NO: 2319187 - RNA, 19 nt, Artificial Sequence
  Description of Artificial Sequence: Synthetic oligonucleotide
uuaauuuucucgauucaua

SEQ ID NO: 2319188 - RNA, 19 nt, Artificial Sequence
  Description of Artificial Sequence: Synthetic oligonucleotide
acuauauuagaaaauucug

SEQ ID NO: 2319189 - RNA, 19 nt, Artificial Sequence
  Description of Artificial Sequence: Synthetic oligonucleotide
guuggcuaacacaauagcg

SEQ ID NO: 2319190 - RNA, 19 nt, Artificial Sequence
  Description of Artificial Sequence: Synthetic oligonucleotide
aaaacacacucccugcagu

SEQ ID NO: 2319191 - RNA, 19 nt, Artificial Sequence
  Description of Artificial Sequence: Synthetic oligonucleotide
aaucuacugaaucuugcau

SEQ ID NO: 2319192 - RNA, 19 nt, Artificial Sequence
  Description of Artificial Sequence: Synthetic oligonucleotide
aauacaaauucugcccaag

SEQ ID NO: 2319193 - RNA, 19 nt, Artificial Sequence
  Description of Artificial Sequence: Synthetic oligonucleotide
cucuaaauucucuauaaga

SEQ ID NO: 2319194 - RNA, 19 nt, Artificial Sequence
  Description of Artificial Sequence: Synthetic oligonucleotide
uuacacauuccauccaaug

SEQ ID NO: 2319195 - RNA, 19 nt, Artificial Sequence
  Description of Artificial Sequence: Synthetic oligonucleotide
aguuaugcaaagagaaaac

SEQ ID NO: 2319196 - RNA, 19 nt, Artificial Sequence
  Description of Artificial Sequence: Synthetic oligonucleotide
acaugauagacaaaacauc

SEQ ID NO: 2319197 - RNA, 19 nt, Artificial Sequence
  Description of Artificial Sequence: Synthetic oligonucleotide
ggaauuuauaaucuggaca

SEQ ID NO: 2319198 - RNA, 19 nt, Artificial Sequence
  Description of Artificial Sequence: Synthetic oligonucleotide
uccaugaaucuacugaauc

SEQ ID NO: 2319199 - RNA, 19 nt, Artificial Sequence
  Description of Artificial Sequence: Synthetic oligonucleotide
uugauaguuuguuccauga

SEQ ID NO: 2319200 - RNA, 19 nt, Artificial Sequence
  Description of Artificial Sequence: Synthetic oligonucleotide
uaaucuggacaaaauacua

SEQ ID NO: 2319201 - RNA, 19 nt, Artificial Sequence
  Description of Artificial Sequence: Synthetic oligonucleotide
acaaauacucuaaauucuc

SEQ ID NO: 2319202 - RNA, 19 nt, Artificial Sequence
  Description of Artificial Sequence: Synthetic oligonucleotide
augaaugggaguuaugcaa

SEQ ID NO: 2319203 - RNA, 19 nt, Artificial Sequence
  Description of Artificial Sequence: Synthetic oligonucleotide
aaacacacucccugcagug

SEQ ID NO: 2319204 - RNA, 19 nt, Artificial Sequence
  Description of Artificial Sequence: Synthetic oligonucleotide
aaggaauuuauaaucugga

SEQ ID NO: 2319205 - RNA, 19 nt, Artificial Sequence
  Description of Artificial Sequence: Synthetic oligonucleotide
uuauuuaguguugauaguu

SEQ ID NO: 2319206 - RNA, 19 nt, Artificial Sequence
  Description of Artificial Sequence: Synthetic oligonucleotide
gaaaacacacucccugcag

SEQ ID NO: 2319207 - RNA, 19 nt, Artificial Sequence
  Description of Artificial Sequence: Synthetic oligonucleotide
agugauuacuaaaagacau

SEQ ID NO: 2319208 - RNA, 19 nt, Artificial Sequence
  Description of Artificial Sequence: Synthetic oligonucleotide
aaauugucagccauaauua

SEQ ID NO: 2319209 - RNA, 19 nt, Artificial Sequence
  Description of Artificial Sequence: Synthetic oligonucleotide
uccaaugaucucauaaauc

SEQ ID NO: 2319210 - RNA, 19 nt, Artificial Sequence
  Description of Artificial Sequence: Synthetic oligonucleotide
cuaaggaauuuauaaucug

SEQ ID NO: 2319211 - RNA, 19 nt, Artificial Sequence
  Description of Artificial Sequence: Synthetic oligonucleotide
uuuauuuaguguugauagu

SEQ ID NO: 2319212 - RNA, 19 nt, Artificial Sequence
  Description of Artificial Sequence: Synthetic oligonucleotide
cugaaucuugcauacuagc

SEQ ID NO: 2319213 - RNA, 19 nt, Artificial Sequence
  Description of Artificial Sequence: Synthetic oligonucleotide
agacauuacauacuauuaa

SEQ ID NO: 2319214 - RNA, 19 nt, Artificial Sequence
  Description of Artificial Sequence: Synthetic oligonucleotide
cauacuauuaaguucugaa

SEQ ID NO: 2319215 - RNA, 19 nt, Artificial Sequence
  Description of Artificial Sequence: Synthetic oligonucleotide
accauuuauuaccuaagga

SEQ ID NO: 2319216 - RNA, 19 nt, Artificial Sequence
  Description of Artificial Sequence: Synthetic oligonucleotide
ugauuacuaaaagacauua

SEQ ID NO: 2319217 - RNA, 19 nt, Artificial Sequence
  Description of Artificial Sequence: Synthetic oligonucleotide
aaauucucuauaagaaaca

SEQ ID NO: 2319218 - RNA, 19 nt, Artificial Sequence
  Description of Artificial Sequence: Synthetic oligonucleotide
uacugaaucuugcauacua

SEQ ID NO: 2319219 - RNA, 19 nt, Artificial Sequence
  Description of Artificial Sequence: Synthetic oligonucleotide
auacuauauuagaaaauuc

SEQ ID NO: 2319220 - RNA, 19 nt, Artificial Sequence
  Description of Artificial Sequence: Synthetic oligonucleotide
aaauacuauauuagaaaau

SEQ ID NO: 2319221 - RNA, 19 nt, Artificial Sequence
  Description of Artificial Sequence: Synthetic oligonucleotide
uauuaccuaaggaauuuau

SEQ ID NO: 2319222 - RNA, 19 nt, Artificial Sequence
  Description of Artificial Sequence: Synthetic oligonucleotide
acucuaaauucucuauaag

SEQ ID NO: 2319223 - RNA, 19 nt, Artificial Sequence
  Description of Artificial Sequence: Synthetic oligonucleotide
uacaaauucugcccaagau

SEQ ID NO: 2319224 - RNA, 19 nt, Artificial Sequence
  Description of Artificial Sequence: Synthetic oligonucleotide
ucauacgugacuguauucu

SEQ ID NO: 2319225 - RNA, 19 nt, Artificial Sequence
  Description of Artificial Sequence: Synthetic oligonucleotide
ugaaugggaguuaugcaaa

SEQ ID NO: 2319226 - RNA, 19 nt, Artificial Sequence
  Description of Artificial Sequence: Synthetic oligonucleotide
uguuaguauuuuauuuagu

SEQ ID NO: 2319227 - RNA, 19 nt, Artificial Sequence
  Description of Artificial Sequence: Synthetic oligonucleotide
aucucauaaaucagagccc

SEQ ID NO: 2319228 - RNA, 19 nt, Artificial Sequence
  Description of Artificial Sequence: Synthetic oligonucleotide
uagacaaaacaucuuucuc

SEQ ID NO: 2319229 - RNA, 19 nt, Artificial Sequence
  Description of Artificial Sequence: Synthetic oligonucleotide
ucugacaaauacucuaaau

SEQ ID NO: 2319230 - RNA, 19 nt, Artificial Sequence
  Description of Artificial Sequence: Synthetic oligonucleotide
gacuguauucuucccagug

SEQ ID NO: 2319231 - RNA, 19 nt, Artificial Sequence
  Description of Artificial Sequence: Synthetic oligonucleotide
agaaacaugaaugggaguu

SEQ ID NO: 2319232 - RNA, 19 nt, Artificial Sequence
  Description of Artificial Sequence: Synthetic oligonucleotide
uagcaaaaccauuuauuac

SEQ ID NO: 2319233 - RNA, 19 nt, Artificial Sequence
  Description of Artificial Sequence: Synthetic oligonucleotide
ucuggacaaaauacuauau

SEQ ID NO: 2319234 - RNA, 19 nt, Artificial Sequence
  Description of Artificial Sequence: Synthetic oligonucleotide
ugcaaagagaaaacacacu

SEQ ID NO: 2319235 - RNA, 19 nt, Artificial Sequence
  Description of Artificial Sequence: Synthetic oligonucleotide
gaaucuugcauacuagcaa

SEQ ID NO: 2319236 - RNA, 19 nt, Artificial Sequence
  Description of Artificial Sequence: Synthetic oligonucleotide
acuauuaaguucugaacuu

SEQ ID NO: 2319237 - RNA, 19 nt, Artificial Sequence
  Description of Artificial Sequence: Synthetic oligonucleotide
auaaucuggacaaaauacu

SEQ ID NO: 2319238 - RNA, 19 nt, Artificial Sequence
  Description of Artificial Sequence: Synthetic oligonucleotide
acaaaauacuauauuagaa

SEQ ID NO: 2319239 - RNA, 19 nt, Artificial Sequence
  Description of Artificial Sequence: Synthetic oligonucleotide
acacauuccauccaaugau

SEQ ID NO: 2319240 - RNA, 19 nt, Artificial Sequence
  Description of Artificial Sequence: Synthetic oligonucleotide
ugggaguuaugcaaagaga

SEQ ID NO: 2319241 - RNA, 19 nt, Artificial Sequence
  Description of Artificial Sequence: Synthetic oligonucleotide
caaugaucucauaaaucag

SEQ ID NO: 2319242 - RNA, 19 nt, Artificial Sequence
  Description of Artificial Sequence: Synthetic oligonucleotide
gaacuuagugucugguccc

SEQ ID NO: 2319243 - RNA, 19 nt, Artificial Sequence
  Description of Artificial Sequence: Synthetic oligonucleotide
uuucucgauucauacguga

SEQ ID NO: 2319244 - RNA, 19 nt, Artificial Sequence
  Description of Artificial Sequence: Synthetic oligonucleotide
aaauacaaauucugcccaa

SEQ ID NO: 2319245 - RNA, 19 nt, Artificial Sequence
  Description of Artificial Sequence: Synthetic oligonucleotide
uucugcccaagauacacca

SEQ ID NO: 2319246 - RNA, 19 nt, Artificial Sequence
  Description of Artificial Sequence: Synthetic oligonucleotide
gaguuaugcaaagagaaaa

SEQ ID NO: 2319247 - RNA, 19 nt, Artificial Sequence
  Description of Artificial Sequence: Synthetic oligonucleotide
aguauuuuauuuaguguug

SEQ ID NO: 2319248 - RNA, 19 nt, Artificial Sequence
  Description of Artificial Sequence: Synthetic oligonucleotide
aacuuagugucuggucccc

SEQ ID NO: 2319249 - RNA, 19 nt, Artificial Sequence
  Description of Artificial Sequence: Synthetic oligonucleotide
caugauagacaaaacaucu

SEQ ID NO: 2319250 - RNA, 19 nt, Artificial Sequence
  Description of Artificial Sequence: Synthetic oligonucleotide
guuuguuccaugaaucuac

SEQ ID NO: 2319251 - RNA, 19 nt, Artificial Sequence
  Description of Artificial Sequence: Synthetic oligonucleotide
gaaucuacugaaucuugca

SEQ ID NO: 2319252 - RNA, 19 nt, Artificial Sequence
  Description of Artificial Sequence: Synthetic oligonucleotide
gcagugauuacuaaaagac

SEQ ID NO: 2319253 - RNA, 19 nt, Artificial Sequence
  Description of Artificial Sequence: Synthetic oligonucleotide
auuccauccaaugaucuca

SEQ ID NO: 2319254 - RNA, 19 nt, Artificial Sequence
  Description of Artificial Sequence: Synthetic oligonucleotide
ugaucucauaaaucagagc

SEQ ID NO: 2319255 - RNA, 19 nt, Artificial Sequence
  Description of Artificial Sequence: Synthetic oligonucleotide
ucucgauucauacgugacu

SEQ ID NO: 2319256 - RNA, 19 nt, Artificial Sequence
  Description of Artificial Sequence: Synthetic oligonucleotide
uuuauuaccuaaggaauuu

SEQ ID NO: 2319257 - RNA, 19 nt, Artificial Sequence
  Description of Artificial Sequence: Synthetic oligonucleotide
uagaaaauucugacaaaua

SEQ ID NO: 2319258 - RNA, 19 nt, Artificial Sequence
  Description of Artificial Sequence: Synthetic oligonucleotide
gauaauguaaauacaaauu

SEQ ID NO: 2319259 - RNA, 19 nt, Artificial Sequence
  Description of Artificial Sequence: Synthetic oligonucleotide
ggacaaaauacuauauuag

SEQ ID NO: 2319260 - RNA, 19 nt, Artificial Sequence
  Description of Artificial Sequence: Synthetic oligonucleotide
aagaaacaugaaugggagu

SEQ ID NO: 2319261 - RNA, 19 nt, Artificial Sequence
  Description of Artificial Sequence: Synthetic oligonucleotide
uaguuuguuccaugaaucu

SEQ ID NO: 2319262 - RNA, 19 nt, Artificial Sequence
  Description of Artificial Sequence: Synthetic oligonucleotide
uaccuaaggaauuuauaau

SEQ ID NO: 2319263 - RNA, 19 nt, Artificial Sequence
  Description of Artificial Sequence: Synthetic oligonucleotide
ucagccauaauuacacauu

SEQ ID NO: 2319264 - RNA, 19 nt, Artificial Sequence
  Description of Artificial Sequence: Synthetic oligonucleotide
gauagacaaaacaucuuuc

SEQ ID NO: 2319265 - RNA, 19 nt, Artificial Sequence
  Description of Artificial Sequence: Synthetic oligonucleotide
uuuucucgauucauacgug

SEQ ID NO: 2319266 - RNA, 19 nt, Artificial Sequence
  Description of Artificial Sequence: Synthetic oligonucleotide
gaaugggaguuaugcaaag

SEQ ID NO: 2319267 - RNA, 19 nt, Artificial Sequence
  Description of Artificial Sequence: Synthetic oligonucleotide
cuaaauucucuauaagaaa

SEQ ID NO: 2319268 - RNA, 19 nt, Artificial Sequence
  Description of Artificial Sequence: Synthetic oligonucleotide
uggcuaacacaauagcgcu

SEQ ID NO: 2319269 - RNA, 19 nt, Artificial Sequence
  Description of Artificial Sequence: Synthetic oligonucleotide
ccaaugaucucauaaauca

SEQ ID NO: 2319270 - RNA, 19 nt, Artificial Sequence
  Description of Artificial Sequence: Synthetic oligonucleotide
gauuacuaaaagacauuac

SEQ ID NO: 2319271 - RNA, 19 nt, Artificial Sequence
  Description of Artificial Sequence: Synthetic oligonucleotide
guugauaguuuguuccaug

SEQ ID NO: 2319272 - RNA, 19 nt, Artificial Sequence
  Description of Artificial Sequence: Synthetic oligonucleotide
cuguauucuucccagugug

SEQ ID NO: 2319273 - RNA, 19 nt, Artificial Sequence
  Description of Artificial Sequence: Synthetic oligonucleotide
agaaaacacacucccugca

SEQ ID NO: 2319274 - RNA, 19 nt, Artificial Sequence
  Description of Artificial Sequence: Synthetic oligonucleotide
gauaguuuguuccaugaau

SEQ ID NO: 2319275 - RNA, 19 nt, Artificial Sequence
  Description of Artificial Sequence: Synthetic oligonucleotide
gaaaauucugacaaauacu

SEQ ID NO: 2319276 - RNA, 19 nt, Artificial Sequence
  Description of Artificial Sequence: Synthetic oligonucleotide
acuguauucuucccagugu

SEQ ID NO: 2319277 - RNA, 19 nt, Artificial Sequence
  Description of Artificial Sequence: Synthetic oligonucleotide
auuagaaaauucugacaaa

SEQ ID NO: 2319278 - RNA, 19 nt, Artificial Sequence
  Description of Artificial Sequence: Synthetic oligonucleotide
uucucgauucauacgugac

SEQ ID NO: 2319279 - RNA, 19 nt, Artificial Sequence
  Description of Artificial Sequence: Synthetic oligonucleotide
cucgauucauacgugacug

SEQ ID NO: 2319280 - RNA, 19 nt, Artificial Sequence
  Description of Artificial Sequence: Synthetic oligonucleotide
uacuagcaaaaccauuuau

SEQ ID NO: 2319281 - RNA, 19 nt, Artificial Sequence
  Description of Artificial Sequence: Synthetic oligonucleotide
aucuggacaaaauacuaua

SEQ ID NO: 2319282 - RNA, 19 nt, Artificial Sequence
  Description of Artificial Sequence: Synthetic oligonucleotide
auuuuauuuaguguugaua

SEQ ID NO: 2319283 - RNA, 19 nt, Artificial Sequence
  Description of Artificial Sequence: Synthetic oligonucleotide
auccaaugaucucauaaau

SEQ ID NO: 2319284 - RNA, 19 nt, Artificial Sequence
  Description of Artificial Sequence: Synthetic oligonucleotide
uuuguuccaugaaucuacu

SEQ ID NO: 2319285 - RNA, 19 nt, Artificial Sequence
  Description of Artificial Sequence: Synthetic oligonucleotide
aaauucugacaaauacucu

SEQ ID NO: 2319286 - RNA, 19 nt, Artificial Sequence
  Description of Artificial Sequence: Synthetic oligonucleotide
aucuacugaaucuugcaua

SEQ ID NO: 2319287 - RNA, 19 nt, Artificial Sequence
  Description of Artificial Sequence: Synthetic oligonucleotide
aaucuggacaaaauacuau

SEQ ID NO: 2319288 - RNA, 19 nt, Artificial Sequence
  Description of Artificial Sequence: Synthetic oligonucleotide
ugcauacuagcaaaaccau

SEQ ID NO: 2319289 - RNA, 19 nt, Artificial Sequence
  Description of Artificial Sequence: Synthetic oligonucleotide
auacaaauucugcccaaga

SEQ ID NO: 2319290 - RNA, 19 nt, Artificial Sequence
  Description of Artificial Sequence: Synthetic oligonucleotide
uauuuuauuuaguguugau

SEQ ID NO: 2319291 - RNA, 19 nt, Artificial Sequence
  Description of Artificial Sequence: Synthetic oligonucleotide
ugauaguuuguuccaugaa

SEQ ID NO: 2319292 - RNA, 19 nt, Artificial Sequence
  Description of Artificial Sequence: Synthetic oligonucleotide
auucauacgugacuguauu

SEQ ID NO: 2319293 - RNA, 19 nt, Artificial Sequence
  Description of Artificial Sequence: Synthetic oligonucleotide
ucauaaaucagagcccuua

SEQ ID NO: 2319294 - RNA, 19 nt, Artificial Sequence
  Description of Artificial Sequence: Synthetic oligonucleotide
guuaugcaaagagaaaaca

SEQ ID NO: 2319295 - RNA, 19 nt, Artificial Sequence
  Description of Artificial Sequence: Synthetic oligonucleotide
uucugaacuuagugucugg

SEQ ID NO: 2319296 - RNA, 19 nt, Artificial Sequence
  Description of Artificial Sequence: Synthetic oligonucleotide
gagcccuuaauuuucucga

SEQ ID NO: 2319297 - RNA, 19 nt, Artificial Sequence
  Description of Artificial Sequence: Synthetic oligonucleotide
aucagagcccuuaauuuuc

SEQ ID NO: 2319298 - RNA, 19 nt, Artificial Sequence
  Description of Artificial Sequence: Synthetic oligonucleotide
ucugguccccugauaaugu

SEQ ID NO: 2319299 - RNA, 19 nt, Artificial Sequence
  Description of Artificial Sequence: Synthetic oligonucleotide
aaacaugaaugggaguuau

SEQ ID NO: 2319300 - RNA, 19 nt, Artificial Sequence
  Description of Artificial Sequence: Synthetic oligonucleotide
guuccaugaaucuacugaa

SEQ ID NO: 2319301 - RNA, 19 nt, Artificial Sequence
  Description of Artificial Sequence: Synthetic oligonucleotide
caagauacaccaaaccaaa

SEQ ID NO: 2319302 - RNA, 19 nt, Artificial Sequence
  Description of Artificial Sequence: Synthetic oligonucleotide
uuaguguugauaguuuguu

SEQ ID NO: 2319303 - RNA, 19 nt, Artificial Sequence
  Description of Artificial Sequence: Synthetic oligonucleotide
auacucuaaauucucuaua

SEQ ID NO: 2319304 - RNA, 19 nt, Artificial Sequence
  Description of Artificial Sequence: Synthetic oligonucleotide
ucucuauaagaaacaugaa

SEQ ID NO: 2319305 - RNA, 19 nt, Artificial Sequence
  Description of Artificial Sequence: Synthetic oligonucleotide
cauuuauuaccuaaggaau

SEQ ID NO: 2319306 - RNA, 19 nt, Artificial Sequence
  Description of Artificial Sequence: Synthetic oligonucleotide
cagagguuggcuaacacaa

SEQ ID NO: 2319307 - RNA, 19 nt, Artificial Sequence
  Description of Artificial Sequence: Synthetic oligonucleotide
gccauaauuacacauucca

SEQ ID NO: 2319308 - RNA, 19 nt, Artificial Sequence
  Description of Artificial Sequence: Synthetic oligonucleotide
gacaaauacucuaaauucu

SEQ ID NO: 2319309 - RNA, 19 nt, Artificial Sequence
  Description of Artificial Sequence: Synthetic oligonucleotide
ucuugcauacuagcaaaac

SEQ ID NO: 2319310 - RNA, 19 nt, Artificial Sequence
  Description of Artificial Sequence: Synthetic oligonucleotide
auaaaucagagcccuuaau

SEQ ID NO: 2319311 - RNA, 19 nt, Artificial Sequence
  Description of Artificial Sequence: Synthetic oligonucleotide
agccauaauuacacauucc

SEQ ID NO: 2319312 - RNA, 19 nt, Artificial Sequence
  Description of Artificial Sequence: Synthetic oligonucleotide
uuagugucugguccccuga

SEQ ID NO: 2319313 - RNA, 19 nt, Artificial Sequence
  Description of Artificial Sequence: Synthetic oligonucleotide
ccauuuauuaccuaaggaa

SEQ ID NO: 2319314 - RNA, 19 nt, Artificial Sequence
  Description of Artificial Sequence: Synthetic oligonucleotide
aaugggaguuaugcaaaga

SEQ ID NO: 2319315 - RNA, 19 nt, Artificial Sequence
  Description of Artificial Sequence: Synthetic oligonucleotide
uucugacaaauacucuaaa

SEQ ID NO: 2319316 - RNA, 19 nt, Artificial Sequence
  Description of Artificial Sequence: Synthetic oligonucleotide
cagccauaauuacacauuc

SEQ ID NO: 2319317 - RNA, 19 nt, Artificial Sequence
  Description of Artificial Sequence: Synthetic oligonucleotide
ccccugauaauguaaauac

SEQ ID NO: 2319318 - RNA, 19 nt, Artificial Sequence
  Description of Artificial Sequence: Synthetic oligonucleotide
ucugaacuuagugucuggu

SEQ ID NO: 2319319 - RNA, 19 nt, Artificial Sequence
  Description of Artificial Sequence: Synthetic oligonucleotide
cuaaaagacauuacauacu

SEQ ID NO: 2319320 - RNA, 19 nt, Artificial Sequence
  Description of Artificial Sequence: Synthetic oligonucleotide
auuuauuaccuaaggaauu

SEQ ID NO: 2319321 - RNA, 19 nt, Artificial Sequence
  Description of Artificial Sequence: Synthetic oligonucleotide
uucccagugugcauccucu

SEQ ID NO: 2319322 - RNA, 19 nt, Artificial Sequence
  Description of Artificial Sequence: Synthetic oligonucleotide
auucucuauaagaaacaug

SEQ ID NO: 2319323 - RNA, 19 nt, Artificial Sequence
  Description of Artificial Sequence: Synthetic oligonucleotide
uacauacuauuaaguucug

SEQ ID NO: 2319324 - RNA, 19 nt, Artificial Sequence
  Description of Artificial Sequence: Synthetic oligonucleotide
ugcccaagauacaccaaac

SEQ ID NO: 2319325 - RNA, 19 nt, Artificial Sequence
  Description of Artificial Sequence: Synthetic oligonucleotide
uaguguugauaguuuguuc

SEQ ID NO: 2319326 - RNA, 19 nt, Artificial Sequence
  Description of Artificial Sequence: Synthetic oligonucleotide
cacauuccauccaaugauc

SEQ ID NO: 2319327 - RNA, 19 nt, Artificial Sequence
  Description of Artificial Sequence: Synthetic oligonucleotide
ucagagcccuuaauuuucu

SEQ ID NO: 2319328 - RNA, 19 nt, Artificial Sequence
  Description of Artificial Sequence: Synthetic oligonucleotide
guauuuuauuuaguguuga

SEQ ID NO: 2319329 - RNA, 19 nt, Artificial Sequence
  Description of Artificial Sequence: Synthetic oligonucleotide
cagugauuacuaaaagaca

SEQ ID NO: 2319330 - RNA, 19 nt, Artificial Sequence
  Description of Artificial Sequence: Synthetic oligonucleotide
aagagaaaacacacucccu

SEQ ID NO: 2319331 - RNA, 19 nt, Artificial Sequence
  Description of Artificial Sequence: Synthetic oligonucleotide
auucugcccaagauacacc

SEQ ID NO: 2319332 - RNA, 19 nt, Artificial Sequence
  Description of Artificial Sequence: Synthetic oligonucleotide
cauccaaugaucucauaaa

SEQ ID NO: 2319333 - RNA, 19 nt, Artificial Sequence
  Description of Artificial Sequence: Synthetic oligonucleotide
cucuauaagaaacaugaau

SEQ ID NO: 2319334 - RNA, 19 nt, Artificial Sequence
  Description of Artificial Sequence: Synthetic oligonucleotide
cugcagugauuacuaaaag

SEQ ID NO: 2319335 - RNA, 19 nt, Artificial Sequence
  Description of Artificial Sequence: Synthetic oligonucleotide
caugaaugggaguuaugca

SEQ ID NO: 2319336 - RNA, 19 nt, Artificial Sequence
  Description of Artificial Sequence: Synthetic oligonucleotide
gguuggcuaacacaauagc

SEQ ID NO: 2319337 - RNA, 19 nt, Artificial Sequence
  Description of Artificial Sequence: Synthetic oligonucleotide
cugaacuuagugucugguc

SEQ ID NO: 2319338 - RNA, 19 nt, Artificial Sequence
  Description of Artificial Sequence: Synthetic oligonucleotide
ccugauaauguaaauacaa

SEQ ID NO: 2319339 - RNA, 19 nt, Artificial Sequence
  Description of Artificial Sequence: Synthetic oligonucleotide
uucauacgugacuguauuc

SEQ ID NO: 2319340 - RNA, 19 nt, Artificial Sequence
  Description of Artificial Sequence: Synthetic oligonucleotide
aucuuucucaguucuuaaa

SEQ ID NO: 2319341 - RNA, 19 nt, Artificial Sequence
  Description of Artificial Sequence: Synthetic oligonucleotide
uuguuccaugaaucuacug

SEQ ID NO: 2319342 - RNA, 19 nt, Artificial Sequence
  Description of Artificial Sequence: Synthetic oligonucleotide
cuuagugucugguccccug

SEQ ID NO: 2319343 - RNA, 19 nt, Artificial Sequence
  Description of Artificial Sequence: Synthetic oligonucleotide
cugacaaauacucuaaauu

SEQ ID NO: 2319344 - RNA, 19 nt, Artificial Sequence
  Description of Artificial Sequence: Synthetic oligonucleotide
agguuggcuaacacaauag

SEQ ID NO: 2319345 - RNA, 19 nt, Artificial Sequence
  Description of Artificial Sequence: Synthetic oligonucleotide
cauuccauccaaugaucuc

SEQ ID NO: 2319346 - RNA, 19 nt, Artificial Sequence
  Description of Artificial Sequence: Synthetic oligonucleotide
caaaacaucuuucucaguu

SEQ ID NO: 2319347 - RNA, 19 nt, Artificial Sequence
  Description of Artificial Sequence: Synthetic oligonucleotide
aaaagacauuacauacuau

SEQ ID NO: 2319348 - RNA, 19 nt, Artificial Sequence
  Description of Artificial Sequence: Synthetic oligonucleotide
auuaaguucugaacuuagu

SEQ ID NO: 2319349 - RNA, 19 nt, Artificial Sequence
  Description of Artificial Sequence: Synthetic oligonucleotide
gagguuggcuaacacaaua

SEQ ID NO: 2319350 - RNA, 19 nt, Artificial Sequence
  Description of Artificial Sequence: Synthetic oligonucleotide
uuccaugaaucuacugaau

SEQ ID NO: 2319351 - RNA, 19 nt, Artificial Sequence
  Description of Artificial Sequence: Synthetic oligonucleotide
auacuagcaaaaccauuua

SEQ ID NO: 2319352 - RNA, 19 nt, Artificial Sequence
  Description of Artificial Sequence: Synthetic oligonucleotide
guucugaacuuagugucug

SEQ ID NO: 2319353 - RNA, 19 nt, Artificial Sequence
  Description of Artificial Sequence: Synthetic oligonucleotide
augaaucuacugaaucuug

SEQ ID NO: 2319354 - RNA, 19 nt, Artificial Sequence
  Description of Artificial Sequence: Synthetic oligonucleotide
uccccugauaauguaaaua

SEQ ID NO: 2319355 - RNA, 19 nt, Artificial Sequence
  Description of Artificial Sequence: Synthetic oligonucleotide
guguugauaguuuguucca

SEQ ID NO: 2319356 - RNA, 19 nt, Artificial Sequence
  Description of Artificial Sequence: Synthetic oligonucleotide
uauucuucccagugugcau

SEQ ID NO: 2319357 - RNA, 19 nt, Artificial Sequence
  Description of Artificial Sequence: Synthetic oligonucleotide
guauucuucccagugugca

SEQ ID NO: 2319358 - RNA, 19 nt, Artificial Sequence
  Description of Artificial Sequence: Synthetic oligonucleotide
auucugacaaauacucuaa

SEQ ID NO: 2319359 - RNA, 19 nt, Artificial Sequence
  Description of Artificial Sequence: Synthetic oligonucleotide
uuauuaccuaaggaauuua

SEQ ID NO: 2319360 - RNA, 19 nt, Artificial Sequence
  Description of Artificial Sequence: Synthetic oligonucleotide
cccuuaauuuucucgauuc

SEQ ID NO: 2319361 - RNA, 19 nt, Artificial Sequence
  Description of Artificial Sequence: Synthetic oligonucleotide
ugucagccauaauuacaca

SEQ ID NO: 2319362 - RNA, 19 nt, Artificial Sequence
  Description of Artificial Sequence: Synthetic oligonucleotide
aacaugaaugggaguuaug

SEQ ID NO: 2319363 - RNA, 19 nt, Artificial Sequence
  Description of Artificial Sequence: Synthetic oligonucleotide
acauuccauccaaugaucu

SEQ ID NO: 2319364 - RNA, 19 nt, Artificial Sequence
  Description of Artificial Sequence: Synthetic oligonucleotide
uguugauaguuuguuccau

SEQ ID NO: 2319365 - RNA, 19 nt, Artificial Sequence
  Description of Artificial Sequence: Synthetic oligonucleotide
auuaccuaaggaauuuaua

SEQ ID NO: 2319366 - RNA, 19 nt, Artificial Sequence
  Description of Artificial Sequence: Synthetic oligonucleotide
gggaguuaugcaaagagaa

SEQ ID NO: 2319367 - RNA, 19 nt, Artificial Sequence
  Description of Artificial Sequence: Synthetic oligonucleotide
gucugguccccugauaaug

SEQ ID NO: 2319368 - RNA, 19 nt, Artificial Sequence
  Description of Artificial Sequence: Synthetic oligonucleotide
acaaaacaucuuucucagu

SEQ ID NO: 2319369 - RNA, 19 nt, Artificial Sequence
  Description of Artificial Sequence: Synthetic oligonucleotide
ugguccccugauaauguaa

SEQ ID NO: 2319370 - RNA, 19 nt, Artificial Sequence
  Description of Artificial Sequence: Synthetic oligonucleotide
uuccauccaaugaucucau

SEQ ID NO: 2319371 - RNA, 19 nt, Artificial Sequence
  Description of Artificial Sequence: Synthetic oligonucleotide
aacacacucccugcaguga

SEQ ID NO: 2319372 - RNA, 19 nt, Artificial Sequence
  Description of Artificial Sequence: Synthetic oligonucleotide
ucgauucauacgugacugu

SEQ ID NO: 2319373 - RNA, 19 nt, Artificial Sequence
  Description of Artificial Sequence: Synthetic oligonucleotide
acaucuuucucaguucuua

SEQ ID NO: 2319374 - RNA, 19 nt, Artificial Sequence
  Description of Artificial Sequence: Synthetic oligonucleotide
gugucugguccccugauaa

SEQ ID NO: 2319375 - RNA, 19 nt, Artificial Sequence
  Description of Artificial Sequence: Synthetic oligonucleotide
aaauucugcccaagauaca

SEQ ID NO: 2319376 - RNA, 19 nt, Artificial Sequence
  Description of Artificial Sequence: Synthetic oligonucleotide
acauacuauuaaguucuga

SEQ ID NO: 2319377 - RNA, 19 nt, Artificial Sequence
  Description of Artificial Sequence: Synthetic oligonucleotide
aguucugaacuuagugucu

SEQ ID NO: 2319378 - RNA, 19 nt, Artificial Sequence
  Description of Artificial Sequence: Synthetic oligonucleotide
acucccugcagugauuacu

SEQ ID NO: 2319379 - RNA, 19 nt, Artificial Sequence
  Description of Artificial Sequence: Synthetic oligonucleotide
aguuuguuccaugaaucua

SEQ ID NO: 2319380 - RNA, 19 nt, Artificial Sequence
  Description of Artificial Sequence: Synthetic oligonucleotide
cauaaaucagagcccuuaa

SEQ ID NO: 2319381 - RNA, 19 nt, Artificial Sequence
  Description of Artificial Sequence: Synthetic oligonucleotide
ccaagauacaccaaaccaa

SEQ ID NO: 2319382 - RNA, 19 nt, Artificial Sequence
  Description of Artificial Sequence: Synthetic oligonucleotide
cccaagauacaccaaacca

SEQ ID NO: 2319383 - RNA, 19 nt, Artificial Sequence
  Description of Artificial Sequence: Synthetic oligonucleotide
gaaacaugaaugggaguua

SEQ ID NO: 2319384 - RNA, 19 nt, Artificial Sequence
  Description of Artificial Sequence: Synthetic oligonucleotide
gucagccauaauuacacau

SEQ ID NO: 2319385 - RNA, 19 nt, Artificial Sequence
  Description of Artificial Sequence: Synthetic oligonucleotide
gcccaagauacaccaaacc

SEQ ID NO: 2319386 - RNA, 19 nt, Artificial Sequence
  Description of Artificial Sequence: Synthetic oligonucleotide
cuucccagugugcauccuc

SEQ ID NO: 2319387 - RNA, 19 nt, Artificial Sequence
  Description of Artificial Sequence: Synthetic oligonucleotide
cuauuaaguucugaacuua

SEQ ID NO: 2319388 - RNA, 19 nt, Artificial Sequence
  Description of Artificial Sequence: Synthetic oligonucleotide
ccugcagugauuacuaaaa

SEQ ID NO: 2319389 - RNA, 19 nt, Artificial Sequence
  Description of Artificial Sequence: Synthetic oligonucleotide
augauagacaaaacaucuu

SEQ ID NO: 2319390 - RNA, 19 nt, Artificial Sequence
  Description of Artificial Sequence: Synthetic oligonucleotide
cuuaauuuucucgauucau

SEQ ID NO: 2319391 - RNA, 19 nt, Artificial Sequence
  Description of Artificial Sequence: Synthetic oligonucleotide
cugcccaagauacaccaaa

SEQ ID NO: 2319392 - RNA, 19 nt, Artificial Sequence
  Description of Artificial Sequence: Synthetic oligonucleotide
cagugugcauccucucuuc

SEQ ID NO: 2319393 - RNA, 19 nt, Artificial Sequence
  Description of Artificial Sequence: Synthetic oligonucleotide
agcccuuaauuuucucgau

SEQ ID NO: 2319394 - RNA, 19 nt, Artificial Sequence
  Description of Artificial Sequence: Synthetic oligonucleotide
ccuaaggaauuuauaaucu

SEQ ID NO: 2319395 - RNA, 19 nt, Artificial Sequence
  Description of Artificial Sequence: Synthetic oligonucleotide
caucuuucucaguucuuaa

SEQ ID NO: 2319396 - RNA, 19 nt, Artificial Sequence
  Description of Artificial Sequence: Synthetic oligonucleotide
ugucugguccccugauaau

SEQ ID NO: 2319397 - RNA, 19 nt, Artificial Sequence
  Description of Artificial Sequence: Synthetic oligonucleotide
uagugucugguccccugau

SEQ ID NO: 2319398 - RNA, 19 nt, Artificial Sequence
  Description of Artificial Sequence: Synthetic oligonucleotide
ccauccaaugaucucauaa

SEQ ID NO: 2319399 - RNA, 19 nt, Artificial Sequence
  Description of Artificial Sequence: Synthetic oligonucleotide
gauucauacgugacuguau

SEQ ID NO: 2319400 - RNA, 19 nt, Artificial Sequence
  Description of Artificial Sequence: Synthetic oligonucleotide
agugucugguccccugaua

SEQ ID NO: 2319401 - RNA, 19 nt, Artificial Sequence
  Description of Artificial Sequence: Synthetic oligonucleotide
cucccugcagugauuacua

SEQ ID NO: 2319402 - RNA, 19 nt, Artificial Sequence
  Description of Artificial Sequence: Synthetic oligonucleotide
caugaaucuacugaaucuu

SEQ ID NO: 2319403 - RNA, 19 nt, Artificial Sequence
  Description of Artificial Sequence: Synthetic oligonucleotide
aucuugcauacuagcaaaa

SEQ ID NO: 2319404 - RNA, 19 nt, Artificial Sequence
  Description of Artificial Sequence: Synthetic oligonucleotide
caaaaccauuuauuaccua

SEQ ID NO: 2319405 - RNA, 19 nt, Artificial Sequence
  Description of Artificial Sequence: Synthetic oligonucleotide
ccaugaaucuacugaaucu

SEQ ID NO: 2319406 - RNA, 19 nt, Artificial Sequence
  Description of Artificial Sequence: Synthetic oligonucleotide
ggaguuaugcaaagagaaa

SEQ ID NO: 2319407 - RNA, 19 nt, Artificial Sequence
  Description of Artificial Sequence: Synthetic oligonucleotide
cagagcccuuaauuuucuc

SEQ ID NO: 2319408 - RNA, 19 nt, Artificial Sequence
  Description of Artificial Sequence: Synthetic oligonucleotide
acacucccugcagugauua

SEQ ID NO: 2319409 - RNA, 19 nt, Artificial Sequence
  Description of Artificial Sequence: Synthetic oligonucleotide
ucccugcagugauuacuaa

SEQ ID NO: 2319410 - RNA, 19 nt, Artificial Sequence
  Description of Artificial Sequence: Synthetic oligonucleotide
ccuuaauuuucucgauuca

SEQ ID NO: 2319411 - RNA, 19 nt, Artificial Sequence
  Description of Artificial Sequence: Synthetic oligonucleotide
acuuagugucugguccccu

SEQ ID NO: 2319412 - RNA, 19 nt, Artificial Sequence
  Description of Artificial Sequence: Synthetic oligonucleotide
gcaaaaccauuuauuaccu

SEQ ID NO: 2319413 - RNA, 19 nt, Artificial Sequence
  Description of Artificial Sequence: Synthetic oligonucleotide
cccugauaauguaaauaca

SEQ ID NO: 2319414 - RNA, 19 nt, Artificial Sequence
  Description of Artificial Sequence: Synthetic oligonucleotide
uccauccaaugaucucaua

SEQ ID NO: 2319415 - RNA, 19 nt, Artificial Sequence
  Description of Artificial Sequence: Synthetic oligonucleotide
gugauuacuaaaagacauu

SEQ ID NO: 2319416 - RNA, 19 nt, Artificial Sequence
  Description of Artificial Sequence: Synthetic oligonucleotide
agagguuggcuaacacaau

SEQ ID NO: 2319417 - RNA, 19 nt, Artificial Sequence
  Description of Artificial Sequence: Synthetic oligonucleotide
gguccccugauaauguaaa

SEQ ID NO: 2319418 - RNA, 19 nt, Artificial Sequence
  Description of Artificial Sequence: Synthetic oligonucleotide
ucuucccagugugcauccu

SEQ ID NO: 2319419 - RNA, 19 nt, Artificial Sequence
  Description of Artificial Sequence: Synthetic oligonucleotide
cacucccugcagugauuac

SEQ ID NO: 2319420 - RNA, 19 nt, Artificial Sequence
  Description of Artificial Sequence: Synthetic oligonucleotide
cugguccccugauaaugua

SEQ ID NO: 2319421 - RNA, 19 nt, Artificial Sequence
  Description of Artificial Sequence: Synthetic oligonucleotide
cccugcagugauuacuaaa

SEQ ID NO: 2319422 - RNA, 19 nt, Artificial Sequence
  Description of Artificial Sequence: Synthetic oligonucleotide
guccccugauaauguaaau

SEQ ID NO: 2319423 - RNA, 19 nt, Artificial Sequence
  Description of Artificial Sequence: Synthetic oligonucleotide
cuacugaaucuugcauacu

SEQ ID NO: 2319424 - RNA, 19 nt, Artificial Sequence
  Description of Artificial Sequence: Synthetic oligonucleotide
gcccuuaauuuucucgauu

SEQ ID NO: 2319425 - RNA, 19 nt, Artificial Sequence
  Description of Artificial Sequence: Synthetic oligonucleotide
gcauacuagcaaaaccauu

SEQ ID NO: 2319426 - RNA, 19 nt, Artificial Sequence
  Description of Artificial Sequence: Synthetic oligonucleotide
cgauucauacgugacugua

SEQ ID NO: 2319427 - RNA, 19 nt, Artificial Sequence
  Description of Artificial Sequence: Synthetic oligonucleotide
ccagugugcauccucucuu

SEQ ID NO: 2319428 - RNA, 19 nt, Artificial Sequence
  Description of Artificial Sequence: Synthetic oligonucleotide
cacacucccugcagugauu

SEQ ID NO: 2319429 - RNA, 19 nt, Artificial Sequence
  Description of Artificial Sequence: Synthetic oligonucleotide
cccagugugcauccucucu

SEQ ID NO: 2319430 - RNA, 19 nt, Artificial Sequence
  Description of Artificial Sequence: Synthetic oligonucleotide
uuuaccauaauaaagugga

SEQ ID NO: 2319431 - RNA, 19 nt, Artificial Sequence
  Description of Artificial Sequence: Synthetic oligonucleotide
aauuuugaggucauaaugc

SEQ ID NO: 2319432 - RNA, 19 nt, Artificial Sequence
  Description of Artificial Sequence: Synthetic oligonucleotide
aauaaaguggaucaccaag

SEQ ID NO: 2319433 - RNA, 19 nt, Artificial Sequence
  Description of Artificial Sequence: Synthetic oligonucleotide
aaguggaucaccaagagac

SEQ ID NO: 2319434 - RNA, 19 nt, Artificial Sequence
  Description of Artificial Sequence: Synthetic oligonucleotide
aaaucaaguaaucucagcu

SEQ ID NO: 2319435 - RNA, 19 nt, Artificial Sequence
  Description of Artificial Sequence: Synthetic oligonucleotide
uguugugcuaguaaaauag

SEQ ID NO: 2319436 - RNA, 19 nt, Artificial Sequence
  Description of Artificial Sequence: Synthetic oligonucleotide
aaguugaaugaucaucugc

SEQ ID NO: 2319437 - RNA, 19 nt, Artificial Sequence
  Description of Artificial Sequence: Synthetic oligonucleotide
agucaucagauuuugaugg

SEQ ID NO: 2319438 - RNA, 19 nt, Artificial Sequence
  Description of Artificial Sequence: Synthetic oligonucleotide
uauuuccugagcuugaggg

SEQ ID NO: 2319439 - RNA, 19 nt, Artificial Sequence
  Description of Artificial Sequence: Synthetic oligonucleotide
ugaaugaucaucugcagag

SEQ ID NO: 2319440 - RNA, 19 nt, Artificial Sequence
  Description of Artificial Sequence: Synthetic oligonucleotide
gauuuaaggaagcugcugg

SEQ ID NO: 2319441 - RNA, 19 nt, Artificial Sequence
  Description of Artificial Sequence: Synthetic oligonucleotide
ugcuuuagaaauuuugagg

SEQ ID NO: 2319442 - RNA, 19 nt, Artificial Sequence
  Description of Artificial Sequence: Synthetic oligonucleotide
uuuuacaucaugagcuugg

SEQ ID NO: 2319443 - RNA, 19 nt, Artificial Sequence
  Description of Artificial Sequence: Synthetic oligonucleotide
aacaccguuucauugggcg

SEQ ID NO: 2319444 - RNA, 19 nt, Artificial Sequence
  Description of Artificial Sequence: Synthetic oligonucleotide
aauaccucuucaaacaccg

SEQ ID NO: 2319445 - RNA, 19 nt, Artificial Sequence
  Description of Artificial Sequence: Synthetic oligonucleotide
uaauucgucuuuuacauca

SEQ ID NO: 2319446 - RNA, 19 nt, Artificial Sequence
  Description of Artificial Sequence: Synthetic oligonucleotide
aaguaaucucagcugaggg

SEQ ID NO: 2319447 - RNA, 19 nt, Artificial Sequence
  Description of Artificial Sequence: Synthetic oligonucleotide
uugacugucauuuucuuca

SEQ ID NO: 2319448 - RNA, 19 nt, Artificial Sequence
  Description of Artificial Sequence: Synthetic oligonucleotide
aggaguuggagauuuaagg

SEQ ID NO: 2319449 - RNA, 19 nt, Artificial Sequence
  Description of Artificial Sequence: Synthetic oligonucleotide
uacuuuagcauauuucucc

SEQ ID NO: 2319450 - RNA, 19 nt, Artificial Sequence
  Description of Artificial Sequence: Synthetic oligonucleotide
uuugacccaauaauaaacc

SEQ ID NO: 2319451 - RNA, 19 nt, Artificial Sequence
  Description of Artificial Sequence: Synthetic oligonucleotide
uaguaaaauaguuaccuga

SEQ ID NO: 2319452 - RNA, 19 nt, Artificial Sequence
  Description of Artificial Sequence: Synthetic oligonucleotide
accauaauaaaguggauca

SEQ ID NO: 2319453 - RNA, 19 nt, Artificial Sequence
  Description of Artificial Sequence: Synthetic oligonucleotide
uugaguaccaccuucacau

SEQ ID NO: 2319454 - RNA, 19 nt, Artificial Sequence
  Description of Artificial Sequence: Synthetic oligonucleotide
uuuagaaauuuugagguca

SEQ ID NO: 2319455 - RNA, 19 nt, Artificial Sequence
  Description of Artificial Sequence: Synthetic oligonucleotide
caauaauaaaccaaguuga

SEQ ID NO: 2319456 - RNA, 19 nt, Artificial Sequence
  Description of Artificial Sequence: Synthetic oligonucleotide
ugauuaacuacccucucug

SEQ ID NO: 2319457 - RNA, 19 nt, Artificial Sequence
  Description of Artificial Sequence: Synthetic oligonucleotide
aagaaaucaaguaaucuca

SEQ ID NO: 2319458 - RNA, 19 nt, Artificial Sequence
  Description of Artificial Sequence: Synthetic oligonucleotide
aaaauaguuaccugaggaa

SEQ ID NO: 2319459 - RNA, 19 nt, Artificial Sequence
  Description of Artificial Sequence: Synthetic oligonucleotide
uuguauauugaguaccacc

SEQ ID NO: 2319460 - RNA, 19 nt, Artificial Sequence
  Description of Artificial Sequence: Synthetic oligonucleotide
uacuucagaaggcacagcc

SEQ ID NO: 2319461 - RNA, 19 nt, Artificial Sequence
  Description of Artificial Sequence: Synthetic oligonucleotide
gaugauuuccgagagagac

SEQ ID NO: 2319462 - RNA, 19 nt, Artificial Sequence
  Description of Artificial Sequence: Synthetic oligonucleotide
uaugagacaucuucacugg

SEQ ID NO: 2319463 - RNA, 19 nt, Artificial Sequence
  Description of Artificial Sequence: Synthetic oligonucleotide
aguaaucucagcugagggg

SEQ ID NO: 2319464 - RNA, 19 nt, Artificial Sequence
  Description of Artificial Sequence: Synthetic oligonucleotide
uuguaagaaaucaaguaau

SEQ ID NO: 2319465 - RNA, 19 nt, Artificial Sequence
  Description of Artificial Sequence: Synthetic oligonucleotide
aaugaucaucugcagagga

SEQ ID NO: 2319466 - RNA, 19 nt, Artificial Sequence
  Description of Artificial Sequence: Synthetic oligonucleotide
uauauugaguaccaccuuc

SEQ ID NO: 2319467 - RNA, 19 nt, Artificial Sequence
  Description of Artificial Sequence: Synthetic oligonucleotide
agcauauuucuccacaucu

SEQ ID NO: 2319468 - RNA, 19 nt, Artificial Sequence
  Description of Artificial Sequence: Synthetic oligonucleotide
ugaacagacacagucucgg

SEQ ID NO: 2319469 - RNA, 19 nt, Artificial Sequence
  Description of Artificial Sequence: Synthetic oligonucleotide
aacugaagacugaacagac

SEQ ID NO: 2319470 - RNA, 19 nt, Artificial Sequence
  Description of Artificial Sequence: Synthetic oligonucleotide
aaugagacagguccugcug

SEQ ID NO: 2319471 - RNA, 19 nt, Artificial Sequence
  Description of Artificial Sequence: Synthetic oligonucleotide
uacauaauucgucuuuuac

SEQ ID NO: 2319472 - RNA, 19 nt, Artificial Sequence
  Description of Artificial Sequence: Synthetic oligonucleotide
uucgucuuuuacaucauga

SEQ ID NO: 2319473 - RNA, 19 nt, Artificial Sequence
  Description of Artificial Sequence: Synthetic oligonucleotide
gauugagacuggcugaacc

SEQ ID NO: 2319474 - RNA, 19 nt, Artificial Sequence
  Description of Artificial Sequence: Synthetic oligonucleotide
ccaauaauaaaccaaguug

SEQ ID NO: 2319475 - RNA, 19 nt, Artificial Sequence
  Description of Artificial Sequence: Synthetic oligonucleotide
gacccaauaauaaaccaag

SEQ ID NO: 2319476 - RNA, 19 nt, Artificial Sequence
  Description of Artificial Sequence: Synthetic oligonucleotide
ucuuguauauugaguacca

SEQ ID NO: 2319477 - RNA, 19 nt, Artificial Sequence
  Description of Artificial Sequence: Synthetic oligonucleotide
ugaggaacuauuuccugag

SEQ ID NO: 2319478 - RNA, 19 nt, Artificial Sequence
  Description of Artificial Sequence: Synthetic oligonucleotide
uguugguugagagucauca

SEQ ID NO: 2319479 - RNA, 19 nt, Artificial Sequence
  Description of Artificial Sequence: Synthetic oligonucleotide
agacuguugguugagaguc

SEQ ID NO: 2319480 - RNA, 19 nt, Artificial Sequence
  Description of Artificial Sequence: Synthetic oligonucleotide
uugguugagagucaucaga

SEQ ID NO: 2319481 - RNA, 19 nt, Artificial Sequence
  Description of Artificial Sequence: Synthetic oligonucleotide
gauguuuuacucccuuucc

SEQ ID NO: 2319482 - RNA, 19 nt, Artificial Sequence
  Description of Artificial Sequence: Synthetic oligonucleotide
caaaacugaagacugaaca

SEQ ID NO: 2319483 - RNA, 19 nt, Artificial Sequence
  Description of Artificial Sequence: Synthetic oligonucleotide
aucaaguaaucucagcuga

SEQ ID NO: 2319484 - RNA, 19 nt, Artificial Sequence
  Description of Artificial Sequence: Synthetic oligonucleotide
uccugcuuuagaaauuuug

SEQ ID NO: 2319485 - RNA, 19 nt, Artificial Sequence
  Description of Artificial Sequence: Synthetic oligonucleotide
uacugauuaacuacccucu

SEQ ID NO: 2319486 - RNA, 19 nt, Artificial Sequence
  Description of Artificial Sequence: Synthetic oligonucleotide
auucaauacauaauucguc

SEQ ID NO: 2319487 - RNA, 19 nt, Artificial Sequence
  Description of Artificial Sequence: Synthetic oligonucleotide
uucuuguauauugaguacc

SEQ ID NO: 2319488 - RNA, 19 nt, Artificial Sequence
  Description of Artificial Sequence: Synthetic oligonucleotide
aaaccaaguugaaugauca

SEQ ID NO: 2319489 - RNA, 19 nt, Artificial Sequence
  Description of Artificial Sequence: Synthetic oligonucleotide
gagucaucagauuuugaug

SEQ ID NO: 2319490 - RNA, 19 nt, Artificial Sequence
  Description of Artificial Sequence: Synthetic oligonucleotide
gaaaucaaguaaucucagc

SEQ ID NO: 2319491 - RNA, 19 nt, Artificial Sequence
  Description of Artificial Sequence: Synthetic oligonucleotide
agagucaucagauuuugau

SEQ ID NO: 2319492 - RNA, 19 nt, Artificial Sequence
  Description of Artificial Sequence: Synthetic oligonucleotide
ucgucuuuuacaucaugag

SEQ ID NO: 2319493 - RNA, 19 nt, Artificial Sequence
  Description of Artificial Sequence: Synthetic oligonucleotide
auaaugcugaccugcuuuc

SEQ ID NO: 2319494 - RNA, 19 nt, Artificial Sequence
  Description of Artificial Sequence: Synthetic oligonucleotide
accaaguugaaugaucauc

SEQ ID NO: 2319495 - RNA, 19 nt, Artificial Sequence
  Description of Artificial Sequence: Synthetic oligonucleotide
auuuugaggucauaaugcu

SEQ ID NO: 2319496 - RNA, 19 nt, Artificial Sequence
  Description of Artificial Sequence: Synthetic oligonucleotide
uuaaggaagcugcuggccu

SEQ ID NO: 2319497 - RNA, 19 nt, Artificial Sequence
  Description of Artificial Sequence: Synthetic oligonucleotide
cagaugauuuccgagagag

SEQ ID NO: 2319498 - RNA, 19 nt, Artificial Sequence
  Description of Artificial Sequence: Synthetic oligonucleotide
cugguacugauuaacuacc

SEQ ID NO: 2319499 - RNA, 19 nt, Artificial Sequence
  Description of Artificial Sequence: Synthetic oligonucleotide
ugacccaauaauaaaccaa

SEQ ID NO: 2319500 - RNA, 19 nt, Artificial Sequence
  Description of Artificial Sequence: Synthetic oligonucleotide
cugcuuuagaaauuuugag

SEQ ID NO: 2319501 - RNA, 19 nt, Artificial Sequence
  Description of Artificial Sequence: Synthetic oligonucleotide
aaaguggaucaccaagaga

SEQ ID NO: 2319502 - RNA, 19 nt, Artificial Sequence
  Description of Artificial Sequence: Synthetic oligonucleotide
ggagauuuaaggaagcugc

SEQ ID NO: 2319503 - RNA, 19 nt, Artificial Sequence
  Description of Artificial Sequence: Synthetic oligonucleotide
uggcugaaccacuagagcu

SEQ ID NO: 2319504 - RNA, 19 nt, Artificial Sequence
  Description of Artificial Sequence: Synthetic oligonucleotide
ucaaguaaucucagcugag

SEQ ID NO: 2319505 - RNA, 19 nt, Artificial Sequence
  Description of Artificial Sequence: Synthetic oligonucleotide
aguguucaucuuuugccgg

SEQ ID NO: 2319506 - RNA, 19 nt, Artificial Sequence
  Description of Artificial Sequence: Synthetic oligonucleotide
aguugaaugaucaucugca

SEQ ID NO: 2319507 - RNA, 19 nt, Artificial Sequence
  Description of Artificial Sequence: Synthetic oligonucleotide
aaguuugaugggugggguc

SEQ ID NO: 2319508 - RNA, 19 nt, Artificial Sequence
  Description of Artificial Sequence: Synthetic oligonucleotide
ugcaagauggucagcuuug

SEQ ID NO: 2319509 - RNA, 19 nt, Artificial Sequence
  Description of Artificial Sequence: Synthetic oligonucleotide
acuugacugagcuccacag

SEQ ID NO: 2319510 - RNA, 19 nt, Artificial Sequence
  Description of Artificial Sequence: Synthetic oligonucleotide
aguuugauggguggggucg

SEQ ID NO: 2319511 - RNA, 19 nt, Artificial Sequence
  Description of Artificial Sequence: Synthetic oligonucleotide
uucaucugcuuuccaaggc

SEQ ID NO: 2319512 - RNA, 19 nt, Artificial Sequence
  Description of Artificial Sequence: Synthetic oligonucleotide
ugaaccacuagagcuauga

SEQ ID NO: 2319513 - RNA, 19 nt, Artificial Sequence
  Description of Artificial Sequence: Synthetic oligonucleotide
auaauaaaguggaucacca

SEQ ID NO: 2319514 - RNA, 19 nt, Artificial Sequence
  Description of Artificial Sequence: Synthetic oligonucleotide
agacauuugacugucauuu

SEQ ID NO: 2319515 - RNA, 19 nt, Artificial Sequence
  Description of Artificial Sequence: Synthetic oligonucleotide
uuucuuguauauugaguac

SEQ ID NO: 2319516 - RNA, 19 nt, Artificial Sequence
  Description of Artificial Sequence: Synthetic oligonucleotide
agaaauuuugaggucauaa

SEQ ID NO: 2319517 - RNA, 19 nt, Artificial Sequence
  Description of Artificial Sequence: Synthetic oligonucleotide
auaauucgucuuuuacauc

SEQ ID NO: 2319518 - RNA, 19 nt, Artificial Sequence
  Description of Artificial Sequence: Synthetic oligonucleotide
guacugauuaacuacccuc

SEQ ID NO: 2319519 - RNA, 19 nt, Artificial Sequence
  Description of Artificial Sequence: Synthetic oligonucleotide
ucuucacugggcauuuggc

SEQ ID NO: 2319520 - RNA, 19 nt, Artificial Sequence
  Description of Artificial Sequence: Synthetic oligonucleotide
auugagacuggcugaacca

SEQ ID NO: 2319521 - RNA, 19 nt, Artificial Sequence
  Description of Artificial Sequence: Synthetic oligonucleotide
gaggucauaaugcugaccu

SEQ ID NO: 2319522 - RNA, 19 nt, Artificial Sequence
  Description of Artificial Sequence: Synthetic oligonucleotide
gcuuagaugauggaggagg

SEQ ID NO: 2319523 - RNA, 19 nt, Artificial Sequence
  Description of Artificial Sequence: Synthetic oligonucleotide
gauuaacuacccucucugc

SEQ ID NO: 2319524 - RNA, 19 nt, Artificial Sequence
  Description of Artificial Sequence: Synthetic oligonucleotide
aguuggagauuuaaggaag

SEQ ID NO: 2319525 - RNA, 19 nt, Artificial Sequence
  Description of Artificial Sequence: Synthetic oligonucleotide
cugcaucagucuuugaccc

SEQ ID NO: 2319526 - RNA, 19 nt, Artificial Sequence
  Description of Artificial Sequence: Synthetic oligonucleotide
uaccauaauaaaguggauc

SEQ ID NO: 2319527 - RNA, 19 nt, Artificial Sequence
  Description of Artificial Sequence: Synthetic oligonucleotide
uuaccugaggaacuauuuc

SEQ ID NO: 2319528 - RNA, 19 nt, Artificial Sequence
  Description of Artificial Sequence: Synthetic oligonucleotide
ugguugagagucaucagau

SEQ ID NO: 2319529 - RNA, 19 nt, Artificial Sequence
  Description of Artificial Sequence: Synthetic oligonucleotide
ugaucaucugcagaggagu

SEQ ID NO: 2319530 - RNA, 19 nt, Artificial Sequence
  Description of Artificial Sequence: Synthetic oligonucleotide
uggagauuuaaggaagcug

SEQ ID NO: 2319531 - RNA, 19 nt, Artificial Sequence
  Description of Artificial Sequence: Synthetic oligonucleotide
uuuacucccuuucccaaaa

SEQ ID NO: 2319532 - RNA, 19 nt, Artificial Sequence
  Description of Artificial Sequence: Synthetic oligonucleotide
uucagaaggcacagccagg

SEQ ID NO: 2319533 - RNA, 19 nt, Artificial Sequence
  Description of Artificial Sequence: Synthetic oligonucleotide
caaacaccguuucauuggg

SEQ ID NO: 2319534 - RNA, 19 nt, Artificial Sequence
  Description of Artificial Sequence: Synthetic oligonucleotide
ucguucuggaccaacuccu

SEQ ID NO: 2319535 - RNA, 19 nt, Artificial Sequence
  Description of Artificial Sequence: Synthetic oligonucleotide
auaaaguggaucaccaaga

SEQ ID NO: 2319536 - RNA, 19 nt, Artificial Sequence
  Description of Artificial Sequence: Synthetic oligonucleotide
gacugagcuccacagauga

SEQ ID NO: 2319537 - RNA, 19 nt, Artificial Sequence
  Description of Artificial Sequence: Synthetic oligonucleotide
gaguuggagauuuaaggaa

SEQ ID NO: 2319538 - RNA, 19 nt, Artificial Sequence
  Description of Artificial Sequence: Synthetic oligonucleotide
uuagaaauuuugaggucau

SEQ ID NO: 2319539 - RNA, 19 nt, Artificial Sequence
  Description of Artificial Sequence: Synthetic oligonucleotide
uuagcauauuucuccacau

SEQ ID NO: 2319540 - RNA, 19 nt, Artificial Sequence
  Description of Artificial Sequence: Synthetic oligonucleotide
acuccugguacugauuaac

SEQ ID NO: 2319541 - RNA, 19 nt, Artificial Sequence
  Description of Artificial Sequence: Synthetic oligonucleotide
ggauggagacauuugacug

SEQ ID NO: 2319542 - RNA, 19 nt, Artificial Sequence
  Description of Artificial Sequence: Synthetic oligonucleotide
uuacaucaugagcuuggcc

SEQ ID NO: 2319543 - RNA, 19 nt, Artificial Sequence
  Description of Artificial Sequence: Synthetic oligonucleotide
cacagaugauuuccgagag

SEQ ID NO: 2319544 - RNA, 19 nt, Artificial Sequence
  Description of Artificial Sequence: Synthetic oligonucleotide
gcugacuugacugagcucc

SEQ ID NO: 2319545 - RNA, 19 nt, Artificial Sequence
  Description of Artificial Sequence: Synthetic oligonucleotide
caaguaaucucagcugagg

SEQ ID NO: 2319546 - RNA, 19 nt, Artificial Sequence
  Description of Artificial Sequence: Synthetic oligonucleotide
cacaucuacuucagaaggc

SEQ ID NO: 2319547 - RNA, 19 nt, Artificial Sequence
  Description of Artificial Sequence: Synthetic oligonucleotide
ugguacugauuaacuaccc

SEQ ID NO: 2319548 - RNA, 19 nt, Artificial Sequence
  Description of Artificial Sequence: Synthetic oligonucleotide
uugugcuaguaaaauaguu

SEQ ID NO: 2319549 - RNA, 19 nt, Artificial Sequence
  Description of Artificial Sequence: Synthetic oligonucleotide
acaaugagacagguccugc

SEQ ID NO: 2319550 - RNA, 19 nt, Artificial Sequence
  Description of Artificial Sequence: Synthetic oligonucleotide
gaauaccucuucaaacacc

SEQ ID NO: 2319551 - RNA, 19 nt, Artificial Sequence
  Description of Artificial Sequence: Synthetic oligonucleotide
ugggauggagacauuugac

SEQ ID NO: 2319552 - RNA, 19 nt, Artificial Sequence
  Description of Artificial Sequence: Synthetic oligonucleotide
cauaauucgucuuuuacau

SEQ ID NO: 2319553 - RNA, 19 nt, Artificial Sequence
  Description of Artificial Sequence: Synthetic oligonucleotide
gcuuuagaaauuuugaggu

SEQ ID NO: 2319554 - RNA, 19 nt, Artificial Sequence
  Description of Artificial Sequence: Synthetic oligonucleotide
ugauuuccgagagagacuu

SEQ ID NO: 2319555 - RNA, 19 nt, Artificial Sequence
  Description of Artificial Sequence: Synthetic oligonucleotide
agaaaucaaguaaucucag

SEQ ID NO: 2319556 - RNA, 19 nt, Artificial Sequence
  Description of Artificial Sequence: Synthetic oligonucleotide
uuccgagagagacuuggcu

SEQ ID NO: 2319557 - RNA, 19 nt, Artificial Sequence
  Description of Artificial Sequence: Synthetic oligonucleotide
uugagagucaucagauuuu

SEQ ID NO: 2319558 - RNA, 19 nt, Artificial Sequence
  Description of Artificial Sequence: Synthetic oligonucleotide
gagagacuuggcuuagaug

SEQ ID NO: 2319559 - RNA, 19 nt, Artificial Sequence
  Description of Artificial Sequence: Synthetic oligonucleotide
uaaggaagcugcuggccug

SEQ ID NO: 2319560 - RNA, 19 nt, Artificial Sequence
  Description of Artificial Sequence: Synthetic oligonucleotide
uaccucuucaaacaccguu

SEQ ID NO: 2319561 - RNA, 19 nt, Artificial Sequence
  Description of Artificial Sequence: Synthetic oligonucleotide
uuuacaucaugagcuuggc

SEQ ID NO: 2319562 - RNA, 19 nt, Artificial Sequence
  Description of Artificial Sequence: Synthetic oligonucleotide
ggaguuggagauuuaagga

SEQ ID NO: 2319563 - RNA, 19 nt, Artificial Sequence
  Description of Artificial Sequence: Synthetic oligonucleotide
ucaauacauaauucgucuu

SEQ ID NO: 2319564 - RNA, 19 nt, Artificial Sequence
  Description of Artificial Sequence: Synthetic oligonucleotide
cuauuuccugagcuugagg

SEQ ID NO: 2319565 - RNA, 19 nt, Artificial Sequence
  Description of Artificial Sequence: Synthetic oligonucleotide
auguccacacaauuuccug

SEQ ID NO: 2319566 - RNA, 19 nt, Artificial Sequence
  Description of Artificial Sequence: Synthetic oligonucleotide
augcugacuugacugagcu

SEQ ID NO: 2319567 - RNA, 19 nt, Artificial Sequence
  Description of Artificial Sequence: Synthetic oligonucleotide
auggagacauuugacuguc

SEQ ID NO: 2319568 - RNA, 19 nt, Artificial Sequence
  Description of Artificial Sequence: Synthetic oligonucleotide
aaacaccguuucauugggc

SEQ ID NO: 2319569 - RNA, 19 nt, Artificial Sequence
  Description of Artificial Sequence: Synthetic oligonucleotide
cauucaauacauaauucgu

SEQ ID NO: 2319570 - RNA, 19 nt, Artificial Sequence
  Description of Artificial Sequence: Synthetic oligonucleotide
uccguuuccacauguccac

SEQ ID NO: 2319571 - RNA, 19 nt, Artificial Sequence
  Description of Artificial Sequence: Synthetic oligonucleotide
acuggcugaaccacuagag

SEQ ID NO: 2319572 - RNA, 19 nt, Artificial Sequence
  Description of Artificial Sequence: Synthetic oligonucleotide
gaggaguuggagauuuaag

SEQ ID NO: 2319573 - RNA, 19 nt, Artificial Sequence
  Description of Artificial Sequence: Synthetic oligonucleotide
ugucuccuccccuggauug

SEQ ID NO: 2319574 - RNA, 19 nt, Artificial Sequence
  Description of Artificial Sequence: Synthetic oligonucleotide
ugagacagguccugcugcc

SEQ ID NO: 2319575 - RNA, 19 nt, Artificial Sequence
  Description of Artificial Sequence: Synthetic oligonucleotide
uuuccgagagagacuuggc

SEQ ID NO: 2319576 - RNA, 19 nt, Artificial Sequence
  Description of Artificial Sequence: Synthetic oligonucleotide
uuccaaggcuguauuuuac

SEQ ID NO: 2319577 - RNA, 19 nt, Artificial Sequence
  Description of Artificial Sequence: Synthetic oligonucleotide
uccgagagagacuuggcuu

SEQ ID NO: 2319578 - RNA, 19 nt, Artificial Sequence
  Description of Artificial Sequence: Synthetic oligonucleotide
ccugguacugauuaacuac

SEQ ID NO: 2319579 - RNA, 19 nt, Artificial Sequence
  Description of Artificial Sequence: Synthetic oligonucleotide
uggaccaacuccugguacu

SEQ ID NO: 2319580 - RNA, 19 nt, Artificial Sequence
  Description of Artificial Sequence: Synthetic oligonucleotide
agagagacuuggcuuagau

SEQ ID NO: 2319581 - RNA, 19 nt, Artificial Sequence
  Description of Artificial Sequence: Synthetic oligonucleotide
guuacaggggcuccguuuc

SEQ ID NO: 2319582 - RNA, 19 nt, Artificial Sequence
  Description of Artificial Sequence: Synthetic oligonucleotide
auugggcgaguguucaucu

SEQ ID NO: 2319583 - RNA, 19 nt, Artificial Sequence
  Description of Artificial Sequence: Synthetic oligonucleotide
guugguugagagucaucag

SEQ ID NO: 2319584 - RNA, 19 nt, Artificial Sequence
  Description of Artificial Sequence: Synthetic oligonucleotide
cuuuagcauauuucuccac

SEQ ID NO: 2319585 - RNA, 19 nt, Artificial Sequence
  Description of Artificial Sequence: Synthetic oligonucleotide
auucgucuuuuacaucaug

SEQ ID NO: 2319586 - RNA, 19 nt, Artificial Sequence
  Description of Artificial Sequence: Synthetic oligonucleotide
guuggagauuuaaggaagc

SEQ ID NO: 2319587 - RNA, 19 nt, Artificial Sequence
  Description of Artificial Sequence: Synthetic oligonucleotide
gggaggaggacaaugagac

SEQ ID NO: 2319588 - RNA, 19 nt, Artificial Sequence
  Description of Artificial Sequence: Synthetic oligonucleotide
uuaccauaauaaaguggau

SEQ ID NO: 2319589 - RNA, 19 nt, Artificial Sequence
  Description of Artificial Sequence: Synthetic oligonucleotide
caaguugaaugaucaucug

SEQ ID NO: 2319590 - RNA, 19 nt, Artificial Sequence
  Description of Artificial Sequence: Synthetic oligonucleotide
uaacuacccucucugcauc

SEQ ID NO: 2319591 - RNA, 19 nt, Artificial Sequence
  Description of Artificial Sequence: Synthetic oligonucleotide
aucaugagcuuggccagac

SEQ ID NO: 2319592 - RNA, 19 nt, Artificial Sequence
  Description of Artificial Sequence: Synthetic oligonucleotide
cgaguguucaucuuuugcc

SEQ ID NO: 2319593 - RNA, 19 nt, Artificial Sequence
  Description of Artificial Sequence: Synthetic oligonucleotide
guugagagucaucagauuu

SEQ ID NO: 2319594 - RNA, 19 nt, Artificial Sequence
  Description of Artificial Sequence: Synthetic oligonucleotide
aaccaaguugaaugaucau

SEQ ID NO: 2319595 - RNA, 19 nt, Artificial Sequence
  Description of Artificial Sequence: Synthetic oligonucleotide
cuuagaugauggaggagga

SEQ ID NO: 2319596 - RNA, 19 nt, Artificial Sequence
  Description of Artificial Sequence: Synthetic oligonucleotide
cuuuuacaucaugagcuug

SEQ ID NO: 2319597 - RNA, 19 nt, Artificial Sequence
  Description of Artificial Sequence: Synthetic oligonucleotide
ugccgguucagggaggacc

SEQ ID NO: 2319598 - RNA, 19 nt, Artificial Sequence
  Description of Artificial Sequence: Synthetic oligonucleotide
ugaccugcuuuccuuuccu

SEQ ID NO: 2319599 - RNA, 19 nt, Artificial Sequence
  Description of Artificial Sequence: Synthetic oligonucleotide
gaggaacuauuuccugagc

SEQ ID NO: 2319600 - RNA, 19 nt, Artificial Sequence
  Description of Artificial Sequence: Synthetic oligonucleotide
uuggagauuuaaggaagcu

SEQ ID NO: 2319601 - RNA, 19 nt, Artificial Sequence
  Description of Artificial Sequence: Synthetic oligonucleotide
ucccaaaacugaagacuga

SEQ ID NO: 2319602 - RNA, 19 nt, Artificial Sequence
  Description of Artificial Sequence: Synthetic oligonucleotide
ugaggucauaaugcugacc

SEQ ID NO: 2319603 - RNA, 19 nt, Artificial Sequence
  Description of Artificial Sequence: Synthetic oligonucleotide
uugagacuggcugaaccac

SEQ ID NO: 2319604 - RNA, 19 nt, Artificial Sequence
  Description of Artificial Sequence: Synthetic oligonucleotide
gcuaguaaaauaguuaccu

SEQ ID NO: 2319605 - RNA, 19 nt, Artificial Sequence
  Description of Artificial Sequence: Synthetic oligonucleotide
augaucaucugcagaggag

SEQ ID NO: 2319606 - RNA, 19 nt, Artificial Sequence
  Description of Artificial Sequence: Synthetic oligonucleotide
gaaagcaugcugacuugac

SEQ ID NO: 2319607 - RNA, 19 nt, Artificial Sequence
  Description of Artificial Sequence: Synthetic oligonucleotide
agucuuugacccaauaaua

SEQ ID NO: 2319608 - RNA, 19 nt, Artificial Sequence
  Description of Artificial Sequence: Synthetic oligonucleotide
auacauaauucgucuuuua

SEQ ID NO: 2319609 - RNA, 19 nt, Artificial Sequence
  Description of Artificial Sequence: Synthetic oligonucleotide
agaaagcaugcugacuuga

SEQ ID NO: 2319610 - RNA, 19 nt, Artificial Sequence
  Description of Artificial Sequence: Synthetic oligonucleotide
cuuguauauugaguaccac

SEQ ID NO: 2319611 - RNA, 19 nt, Artificial Sequence
  Description of Artificial Sequence: Synthetic oligonucleotide
ugggcgaguguucaucuuu

SEQ ID NO: 2319612 - RNA, 19 nt, Artificial Sequence
  Description of Artificial Sequence: Synthetic oligonucleotide
acagaugauuuccgagaga

SEQ ID NO: 2319613 - RNA, 19 nt, Artificial Sequence
  Description of Artificial Sequence: Synthetic oligonucleotide
uuccacauguccacacaau

SEQ ID NO: 2319614 - RNA, 19 nt, Artificial Sequence
  Description of Artificial Sequence: Synthetic oligonucleotide
uggccuguugugcuaguaa

SEQ ID NO: 2319615 - RNA, 19 nt, Artificial Sequence
  Description of Artificial Sequence: Synthetic oligonucleotide
ucucgggcuguucugucuc

SEQ ID NO: 2319616 - RNA, 19 nt, Artificial Sequence
  Description of Artificial Sequence: Synthetic oligonucleotide
acacaauuuccugcuuuag

SEQ ID NO: 2319617 - RNA, 19 nt, Artificial Sequence
  Description of Artificial Sequence: Synthetic oligonucleotide
aacuccugguacugauuaa

SEQ ID NO: 2319618 - RNA, 19 nt, Artificial Sequence
  Description of Artificial Sequence: Synthetic oligonucleotide
ucagauuuugauggauuuu

SEQ ID NO: 2319619 - RNA, 19 nt, Artificial Sequence
  Description of Artificial Sequence: Synthetic oligonucleotide
agggaggaccuggaauacc

SEQ ID NO: 2319620 - RNA, 19 nt, Artificial Sequence
  Description of Artificial Sequence: Synthetic oligonucleotide
uuacaggggcuccguuucc

SEQ ID NO: 2319621 - RNA, 19 nt, Artificial Sequence
  Description of Artificial Sequence: Synthetic oligonucleotide
gacuugacugagcuccaca

SEQ ID NO: 2319622 - RNA, 19 nt, Artificial Sequence
  Description of Artificial Sequence: Synthetic oligonucleotide
ugcuuuccaaggcuguauu

SEQ ID NO: 2319623 - RNA, 19 nt, Artificial Sequence
  Description of Artificial Sequence: Synthetic oligonucleotide
acuagagcuaugagacauc

SEQ ID NO: 2319624 - RNA, 19 nt, Artificial Sequence
  Description of Artificial Sequence: Synthetic oligonucleotide
gcuugagggaaguuugaug

SEQ ID NO: 2319625 - RNA, 19 nt, Artificial Sequence
  Description of Artificial Sequence: Synthetic oligonucleotide
uugaggucauaaugcugac

SEQ ID NO: 2319626 - RNA, 19 nt, Artificial Sequence
  Description of Artificial Sequence: Synthetic oligonucleotide
ccugcuuuagaaauuuuga

SEQ ID NO: 2319627 - RNA, 19 nt, Artificial Sequence
  Description of Artificial Sequence: Synthetic oligonucleotide
cuggauugagacuggcuga

SEQ ID NO: 2319628 - RNA, 19 nt, Artificial Sequence
  Description of Artificial Sequence: Synthetic oligonucleotide
ucauaaugcugaccugcuu

SEQ ID NO: 2319629 - RNA, 19 nt, Artificial Sequence
  Description of Artificial Sequence: Synthetic oligonucleotide
aggaggacaaugagacagg

SEQ ID NO: 2319630 - RNA, 19 nt, Artificial Sequence
  Description of Artificial Sequence: Synthetic oligonucleotide
caccguuucauugggcgag

SEQ ID NO: 2319631 - RNA, 19 nt, Artificial Sequence
  Description of Artificial Sequence: Synthetic oligonucleotide
agucucgggcuguucuguc

SEQ ID NO: 2319632 - RNA, 19 nt, Artificial Sequence
  Description of Artificial Sequence: Synthetic oligonucleotide
agugggauggagacauuug

SEQ ID NO: 2319633 - RNA, 19 nt, Artificial Sequence
  Description of Artificial Sequence: Synthetic oligonucleotide
acaccguuucauugggcga

SEQ ID NO: 2319634 - RNA, 19 nt, Artificial Sequence
  Description of Artificial Sequence: Synthetic oligonucleotide
uggggucgauguuuuacuc

SEQ ID NO: 2319635 - RNA, 19 nt, Artificial Sequence
  Description of Artificial Sequence: Synthetic oligonucleotide
agacuggcugaaccacuag

SEQ ID NO: 2319636 - RNA, 19 nt, Artificial Sequence
  Description of Artificial Sequence: Synthetic oligonucleotide
aggucauaaugcugaccug

SEQ ID NO: 2319637 - RNA, 19 nt, Artificial Sequence
  Description of Artificial Sequence: Synthetic oligonucleotide
uuacucccuuucccaaaac

SEQ ID NO: 2319638 - RNA, 19 nt, Artificial Sequence
  Description of Artificial Sequence: Synthetic oligonucleotide
cuggaccaacuccugguac

SEQ ID NO: 2319639 - RNA, 19 nt, Artificial Sequence
  Description of Artificial Sequence: Synthetic oligonucleotide
ggagaaagcaugcugacuu

SEQ ID NO: 2319640 - RNA, 19 nt, Artificial Sequence
  Description of Artificial Sequence: Synthetic oligonucleotide
auaguuaccugaggaacua

SEQ ID NO: 2319641 - RNA, 19 nt, Artificial Sequence
  Description of Artificial Sequence: Synthetic oligonucleotide
aauucgucuuuuacaucau

SEQ ID NO: 2319642 - RNA, 19 nt, Artificial Sequence
  Description of Artificial Sequence: Synthetic oligonucleotide
ccagacuguugguugagag

SEQ ID NO: 2319643 - RNA, 19 nt, Artificial Sequence
  Description of Artificial Sequence: Synthetic oligonucleotide
gucaucagauuuugaugga

SEQ ID NO: 2319644 - RNA, 19 nt, Artificial Sequence
  Description of Artificial Sequence: Synthetic oligonucleotide
ucgauguuuuacucccuuu

SEQ ID NO: 2319645 - RNA, 19 nt, Artificial Sequence
  Description of Artificial Sequence: Synthetic oligonucleotide
gcgaguguucaucuuuugc

SEQ ID NO: 2319646 - RNA, 19 nt, Artificial Sequence
  Description of Artificial Sequence: Synthetic oligonucleotide
uccccuggauugagacugg

SEQ ID NO: 2319647 - RNA, 19 nt, Artificial Sequence
  Description of Artificial Sequence: Synthetic oligonucleotide
ccaccuucacauucaauac

SEQ ID NO: 2319648 - RNA, 19 nt, Artificial Sequence
  Description of Artificial Sequence: Synthetic oligonucleotide
cauaaugcugaccugcuuu

SEQ ID NO: 2319649 - RNA, 19 nt, Artificial Sequence
  Description of Artificial Sequence: Synthetic oligonucleotide
cauugggcgaguguucauc

SEQ ID NO: 2319650 - RNA, 19 nt, Artificial Sequence
  Description of Artificial Sequence: Synthetic oligonucleotide
augauuuccgagagagacu

SEQ ID NO: 2319651 - RNA, 19 nt, Artificial Sequence
  Description of Artificial Sequence: Synthetic oligonucleotide
ccaaaacugaagacugaac

SEQ ID NO: 2319652 - RNA, 19 nt, Artificial Sequence
  Description of Artificial Sequence: Synthetic oligonucleotide
ccaaguugaaugaucaucu

SEQ ID NO: 2319653 - RNA, 19 nt, Artificial Sequence
  Description of Artificial Sequence: Synthetic oligonucleotide
caacuccugguacugauua

SEQ ID NO: 2319654 - RNA, 19 nt, Artificial Sequence
  Description of Artificial Sequence: Synthetic oligonucleotide
acugaagacugaacagaca

SEQ ID NO: 2319655 - RNA, 19 nt, Artificial Sequence
  Description of Artificial Sequence: Synthetic oligonucleotide
cuugacugagcuccacaga

SEQ ID NO: 2319656 - RNA, 19 nt, Artificial Sequence
  Description of Artificial Sequence: Synthetic oligonucleotide
cagggcggcaggagaaagc

SEQ ID NO: 2319657 - RNA, 19 nt, Artificial Sequence
  Description of Artificial Sequence: Synthetic oligonucleotide
uggagacauuugacuguca

SEQ ID NO: 2319658 - RNA, 19 nt, Artificial Sequence
  Description of Artificial Sequence: Synthetic oligonucleotide
cauuuggccucguucugga

SEQ ID NO: 2319659 - RNA, 19 nt, Artificial Sequence
  Description of Artificial Sequence: Synthetic oligonucleotide
cuguugugcuaguaaaaua

SEQ ID NO: 2319660 - RNA, 19 nt, Artificial Sequence
  Description of Artificial Sequence: Synthetic oligonucleotide
ggcggcaggagaaagcaug

SEQ ID NO: 2319661 - RNA, 19 nt, Artificial Sequence
  Description of Artificial Sequence: Synthetic oligonucleotide
acccaauaauaaaccaagu

SEQ ID NO: 2319662 - RNA, 19 nt, Artificial Sequence
  Description of Artificial Sequence: Synthetic oligonucleotide
cacacaauuuccugcuuua

SEQ ID NO: 2319663 - RNA, 19 nt, Artificial Sequence
  Description of Artificial Sequence: Synthetic oligonucleotide
acuguugguugagagucau

SEQ ID NO: 2319664 - RNA, 19 nt, Artificial Sequence
  Description of Artificial Sequence: Synthetic oligonucleotide
aucagucuuugacccaaua

SEQ ID NO: 2319665 - RNA, 19 nt, Artificial Sequence
  Description of Artificial Sequence: Synthetic oligonucleotide
cugauuaacuacccucucu

SEQ ID NO: 2319666 - RNA, 19 nt, Artificial Sequence
  Description of Artificial Sequence: Synthetic oligonucleotide
gcauuuggccucguucugg

SEQ ID NO: 2319667 - RNA, 19 nt, Artificial Sequence
  Description of Artificial Sequence: Synthetic oligonucleotide
acuacccucucugcaucag

SEQ ID NO: 2319668 - RNA, 19 nt, Artificial Sequence
  Description of Artificial Sequence: Synthetic oligonucleotide
uugauggguggggucgaug

SEQ ID NO: 2319669 - RNA, 19 nt, Artificial Sequence
  Description of Artificial Sequence: Synthetic oligonucleotide
gaaguuugauggguggggu

SEQ ID NO: 2319670 - RNA, 19 nt, Artificial Sequence
  Description of Artificial Sequence: Synthetic oligonucleotide
cauguccacacaauuuccu

SEQ ID NO: 2319671 - RNA, 19 nt, Artificial Sequence
  Description of Artificial Sequence: Synthetic oligonucleotide
gggauggagacauuugacu

SEQ ID NO: 2319672 - RNA, 19 nt, Artificial Sequence
  Description of Artificial Sequence: Synthetic oligonucleotide
aguuaccugaggaacuauu

SEQ ID NO: 2319673 - RNA, 19 nt, Artificial Sequence
  Description of Artificial Sequence: Synthetic oligonucleotide
acagggcggcaggagaaag

SEQ ID NO: 2319674 - RNA, 19 nt, Artificial Sequence
  Description of Artificial Sequence: Synthetic oligonucleotide
auuuccugcuuuagaaauu

SEQ ID NO: 2319675 - RNA, 19 nt, Artificial Sequence
  Description of Artificial Sequence: Synthetic oligonucleotide
gagauuuaaggaagcugcu

SEQ ID NO: 2319676 - RNA, 19 nt, Artificial Sequence
  Description of Artificial Sequence: Synthetic oligonucleotide
uagaaauuuugaggucaua

SEQ ID NO: 2319677 - RNA, 19 nt, Artificial Sequence
  Description of Artificial Sequence: Synthetic oligonucleotide
uagagcuaugagacaucuu

SEQ ID NO: 2319678 - RNA, 19 nt, Artificial Sequence
  Description of Artificial Sequence: Synthetic oligonucleotide
uccacacaauuuccugcuu

SEQ ID NO: 2319679 - RNA, 19 nt, Artificial Sequence
  Description of Artificial Sequence: Synthetic oligonucleotide
ugaguaccaccuucacauu

SEQ ID NO: 2319680 - RNA, 19 nt, Artificial Sequence
  Description of Artificial Sequence: Synthetic oligonucleotide
cuccacagaugauuuccga

SEQ ID NO: 2319681 - RNA, 19 nt, Artificial Sequence
  Description of Artificial Sequence: Synthetic oligonucleotide
ugcugacuugacugagcuc

SEQ ID NO: 2319682 - RNA, 19 nt, Artificial Sequence
  Description of Artificial Sequence: Synthetic oligonucleotide
gagacauuugacugucauu

SEQ ID NO: 2319683 - RNA, 19 nt, Artificial Sequence
  Description of Artificial Sequence: Synthetic oligonucleotide
ccugaggaacuauuuccug

SEQ ID NO: 2319684 - RNA, 19 nt, Artificial Sequence
  Description of Artificial Sequence: Synthetic oligonucleotide
agcuugagggaaguuugau

SEQ ID NO: 2319685 - RNA, 19 nt, Artificial Sequence
  Description of Artificial Sequence: Synthetic oligonucleotide
ucauugggcgaguguucau

SEQ ID NO: 2319686 - RNA, 19 nt, Artificial Sequence
  Description of Artificial Sequence: Synthetic oligonucleotide
uuccugcuuuagaaauuuu

SEQ ID NO: 2319687 - RNA, 19 nt, Artificial Sequence
  Description of Artificial Sequence: Synthetic oligonucleotide
gauuuccgagagagacuug

SEQ ID NO: 2319688 - RNA, 19 nt, Artificial Sequence
  Description of Artificial Sequence: Synthetic oligonucleotide
auggguggggucgauguuu

SEQ ID NO: 2319689 - RNA, 19 nt, Artificial Sequence
  Description of Artificial Sequence: Synthetic oligonucleotide
agaugauuuccgagagaga

SEQ ID NO: 2319690 - RNA, 19 nt, Artificial Sequence
  Description of Artificial Sequence: Synthetic oligonucleotide
cuagagcuaugagacaucu

SEQ ID NO: 2319691 - RNA, 19 nt, Artificial Sequence
  Description of Artificial Sequence: Synthetic oligonucleotide
ugacuugacugagcuccac

SEQ ID NO: 2319692 - RNA, 19 nt, Artificial Sequence
  Description of Artificial Sequence: Synthetic oligonucleotide
gguacugauuaacuacccu

SEQ ID NO: 2319693 - RNA, 19 nt, Artificial Sequence
  Description of Artificial Sequence: Synthetic oligonucleotide
gagagucaucagauuuuga

SEQ ID NO: 2319694 - RNA, 19 nt, Artificial Sequence
  Description of Artificial Sequence: Synthetic oligonucleotide
cacuagagcuaugagacau

SEQ ID NO: 2319695 - RNA, 19 nt, Artificial Sequence
  Description of Artificial Sequence: Synthetic oligonucleotide
guggggucgauguuuuacu

SEQ ID NO: 2319696 - RNA, 19 nt, Artificial Sequence
  Description of Artificial Sequence: Synthetic oligonucleotide
cuguugguugagagucauc

SEQ ID NO: 2319697 - RNA, 19 nt, Artificial Sequence
  Description of Artificial Sequence: Synthetic oligonucleotide
gagacuggcugaaccacua

SEQ ID NO: 2319698 - RNA, 19 nt, Artificial Sequence
  Description of Artificial Sequence: Synthetic oligonucleotide
uaguuaccugaggaacuau

SEQ ID NO: 2319699 - RNA, 19 nt, Artificial Sequence
  Description of Artificial Sequence: Synthetic oligonucleotide
ggccuguugugcuaguaaa

SEQ ID NO: 2319700 - RNA, 19 nt, Artificial Sequence
  Description of Artificial Sequence: Synthetic oligonucleotide
caaugagacagguccugcu

SEQ ID NO: 2319701 - RNA, 19 nt, Artificial Sequence
  Description of Artificial Sequence: Synthetic oligonucleotide
cagacuguugguugagagu

SEQ ID NO: 2319702 - RNA, 19 nt, Artificial Sequence
  Description of Artificial Sequence: Synthetic oligonucleotide
ucucugcaucagucuuuga

SEQ ID NO: 2319703 - RNA, 19 nt, Artificial Sequence
  Description of Artificial Sequence: Synthetic oligonucleotide
guauauugaguaccaccuu

SEQ ID NO: 2319704 - RNA, 19 nt, Artificial Sequence
  Description of Artificial Sequence: Synthetic oligonucleotide
ggaccaacuccugguacug

SEQ ID NO: 2319705 - RNA, 19 nt, Artificial Sequence
  Description of Artificial Sequence: Synthetic oligonucleotide
cugaaccacuagagcuaug

SEQ ID NO: 2319706 - RNA, 19 nt, Artificial Sequence
  Description of Artificial Sequence: Synthetic oligonucleotide
cugacuugacugagcucca

SEQ ID NO: 2319707 - RNA, 19 nt, Artificial Sequence
  Description of Artificial Sequence: Synthetic oligonucleotide
ggcgaguguucaucuuuug

SEQ ID NO: 2319708 - RNA, 19 nt, Artificial Sequence
  Description of Artificial Sequence: Synthetic oligonucleotide
ggaggaguuggagauuuaa

SEQ ID NO: 2319709 - RNA, 19 nt, Artificial Sequence
  Description of Artificial Sequence: Synthetic oligonucleotide
agacacagucucgggcugu

SEQ ID NO: 2319710 - RNA, 19 nt, Artificial Sequence
  Description of Artificial Sequence: Synthetic oligonucleotide
cacagucucgggcuguucu

SEQ ID NO: 2319711 - RNA, 19 nt, Artificial Sequence
  Description of Artificial Sequence: Synthetic oligonucleotide
aggcuguauuuuaccauaa

SEQ ID NO: 2319712 - RNA, 19 nt, Artificial Sequence
  Description of Artificial Sequence: Synthetic oligonucleotide
uugggcgaguguucaucuu

SEQ ID NO: 2319713 - RNA, 19 nt, Artificial Sequence
  Description of Artificial Sequence: Synthetic oligonucleotide
uuugauggguggggucgau

SEQ ID NO: 2319714 - RNA, 19 nt, Artificial Sequence
  Description of Artificial Sequence: Synthetic oligonucleotide
ucgggcuguucugucuccu

SEQ ID NO: 2319715 - RNA, 19 nt, Artificial Sequence
  Description of Artificial Sequence: Synthetic oligonucleotide
ggcuuagaugauggaggag

SEQ ID NO: 2319716 - RNA, 19 nt, Artificial Sequence
  Description of Artificial Sequence: Synthetic oligonucleotide
guuugauggguggggucga

SEQ ID NO: 2319717 - RNA, 19 nt, Artificial Sequence
  Description of Artificial Sequence: Synthetic oligonucleotide
gagagagacuuggcuuaga

SEQ ID NO: 2319718 - RNA, 19 nt, Artificial Sequence
  Description of Artificial Sequence: Synthetic oligonucleotide
gcggcaggagaaagcaugc

SEQ ID NO: 2319719 - RNA, 19 nt, Artificial Sequence
  Description of Artificial Sequence: Synthetic oligonucleotide
auaccucuucaaacaccgu

SEQ ID NO: 2319720 - RNA, 19 nt, Artificial Sequence
  Description of Artificial Sequence: Synthetic oligonucleotide
agguuacaggggcuccguu

SEQ ID NO: 2319721 - RNA, 19 nt, Artificial Sequence
  Description of Artificial Sequence: Synthetic oligonucleotide
cccaauaauaaaccaaguu

SEQ ID NO: 2319722 - RNA, 19 nt, Artificial Sequence
  Description of Artificial Sequence: Synthetic oligonucleotide
ccagguuacaggggcuccg

SEQ ID NO: 2319723 - RNA, 19 nt, Artificial Sequence
  Description of Artificial Sequence: Synthetic oligonucleotide
ccucguucuggaccaacuc

SEQ ID NO: 2319724 - RNA, 19 nt, Artificial Sequence
  Description of Artificial Sequence: Synthetic oligonucleotide
accguuucauugggcgagu

SEQ ID NO: 2319725 - RNA, 19 nt, Artificial Sequence
  Description of Artificial Sequence: Synthetic oligonucleotide
cugagcuugagggaaguuu

SEQ ID NO: 2319726 - RNA, 19 nt, Artificial Sequence
  Description of Artificial Sequence: Synthetic oligonucleotide
ccgagagagacuuggcuua

SEQ ID NO: 2319727 - RNA, 19 nt, Artificial Sequence
  Description of Artificial Sequence: Synthetic oligonucleotide
aggugacagggcggcagga

SEQ ID NO: 2319728 - RNA, 19 nt, Artificial Sequence
  Description of Artificial Sequence: Synthetic oligonucleotide
acugagcuccacagaugau

SEQ ID NO: 2319729 - RNA, 19 nt, Artificial Sequence
  Description of Artificial Sequence: Synthetic oligonucleotide
cagcuuuguuuucuuguau

SEQ ID NO: 2319730 - RNA, 19 nt, Artificial Sequence
  Description of Artificial Sequence: Synthetic oligonucleotide
gccagguuacaggggcucc

SEQ ID NO: 2319731 - RNA, 19 nt, Artificial Sequence
  Description of Artificial Sequence: Synthetic oligonucleotide
ggaggacaaugagacaggu

SEQ ID NO: 2319732 - RNA, 19 nt, Artificial Sequence
  Description of Artificial Sequence: Synthetic oligonucleotide
cgguucagggaggaccugg

SEQ ID NO: 2319733 - RNA, 19 nt, Artificial Sequence
  Description of Artificial Sequence: Synthetic oligonucleotide
ggacaaugagacagguccu

SEQ ID NO: 2319734 - RNA, 19 nt, Artificial Sequence
  Description of Artificial Sequence: Synthetic oligonucleotide
gguugagagucaucagauu

SEQ ID NO: 2319735 - RNA, 19 nt, Artificial Sequence
  Description of Artificial Sequence: Synthetic oligonucleotide
ggggcuccguuuccacaug

SEQ ID NO: 2319736 - RNA, 19 nt, Artificial Sequence
  Description of Artificial Sequence: Synthetic oligonucleotide
ggcuguauuuuaccauaau

SEQ ID NO: 2319737 - RNA, 19 nt, Artificial Sequence
  Description of Artificial Sequence: Synthetic oligonucleotide
cuccuccccuggauugaga

SEQ ID NO: 2319738 - RNA, 19 nt, Artificial Sequence
  Description of Artificial Sequence: Synthetic oligonucleotide
ccacuagagcuaugagaca

SEQ ID NO: 2319739 - RNA, 19 nt, Artificial Sequence
  Description of Artificial Sequence: Synthetic oligonucleotide
ccuguugugcuaguaaaau

SEQ ID NO: 2319740 - RNA, 19 nt, Artificial Sequence
  Description of Artificial Sequence: Synthetic oligonucleotide
ccacauguccacacaauuu

SEQ ID NO: 2319741 - RNA, 19 nt, Artificial Sequence
  Description of Artificial Sequence: Synthetic oligonucleotide
cgagagagacuuggcuuag

SEQ ID NO: 2319742 - RNA, 19 nt, Artificial Sequence
  Description of Artificial Sequence: Synthetic oligonucleotide
cugcuuuccaaggcuguau

SEQ ID NO: 2319743 - RNA, 19 nt, Artificial Sequence
  Description of Artificial Sequence: Synthetic oligonucleotide
gcuuuccaaggcuguauuu

SEQ ID NO: 2319744 - RNA, 19 nt, Artificial Sequence
  Description of Artificial Sequence: Synthetic oligonucleotide
ggcuccguuuccacauguc

SEQ ID NO: 2319745 - RNA, 19 nt, Artificial Sequence
  Description of Artificial Sequence: Synthetic oligonucleotide
gcugaaccacuagagcuau

SEQ ID NO: 2319746 - RNA, 19 nt, Artificial Sequence
  Description of Artificial Sequence: Synthetic oligonucleotide
cugcuggccuguugugcua

SEQ ID NO: 2319747 - RNA, 19 nt, Artificial Sequence
  Description of Artificial Sequence: Synthetic oligonucleotide
cagucucgggcuguucugu

SEQ ID NO: 2319748 - RNA, 19 nt, Artificial Sequence
  Description of Artificial Sequence: Synthetic oligonucleotide
cuggccuguugugcuagua

SEQ ID NO: 2319749 - RNA, 19 nt, Artificial Sequence
  Description of Artificial Sequence: Synthetic oligonucleotide
gcaagauggucagcuuugu

SEQ ID NO: 2319750 - RNA, 19 nt, Artificial Sequence
  Description of Artificial Sequence: Synthetic oligonucleotide
cugccgguucagggaggac

SEQ ID NO: 2319751 - RNA, 19 nt, Artificial Sequence
  Description of Artificial Sequence: Synthetic oligonucleotide
ccacacaauuuccugcuuu

SEQ ID NO: 2319752 - RNA, 19 nt, Artificial Sequence
  Description of Artificial Sequence: Synthetic oligonucleotide
ccccuggauugagacuggc

SEQ ID NO: 2319753 - RNA, 19 nt, Artificial Sequence
  Description of Artificial Sequence: Synthetic oligonucleotide
gggcuccguuuccacaugu

SEQ ID NO: 2319754 - RNA, 19 nt, Artificial Sequence
  Description of Artificial Sequence: Synthetic oligonucleotide
acugggcauuuggccucgu

SEQ ID NO: 2319755 - RNA, 19 nt, Artificial Sequence
  Description of Artificial Sequence: Synthetic oligonucleotide
ccguuucauugggcgagug

SEQ ID NO: 2319756 - RNA, 19 nt, Artificial Sequence
  Description of Artificial Sequence: Synthetic oligonucleotide
gccucguucuggaccaacu

SEQ ID NO: 2319757 - RNA, 19 nt, Artificial Sequence
  Description of Artificial Sequence: Synthetic oligonucleotide
ggucgauguuuuacucccu

SEQ ID NO: 2319758 - RNA, 19 nt, Artificial Sequence
  Description of Artificial Sequence: Synthetic oligonucleotide
gggcgaguguucaucuuuu

SEQ ID NO: 2319759 - RNA, 19 nt, Artificial Sequence
  Description of Artificial Sequence: Synthetic oligonucleotide
cugggcauuuggccucguu

SEQ ID NO: 2319760 - RNA, 19 nt, Artificial Sequence
  Description of Artificial Sequence: Synthetic oligonucleotide
ccuccccuggauugagacu

SEQ ID NO: 2319761 - RNA, 19 nt, Artificial Sequence
  Description of Artificial Sequence: Synthetic oligonucleotide
ggguggggucgauguuuua

SEQ ID NO: 2319762 - RNA, 19 nt, Artificial Sequence
  Description of Artificial Sequence: Synthetic oligonucleotide
ccgguucagggaggaccug

SEQ ID NO: 2319763 - RNA, 19 nt, Artificial Sequence
  Description of Artificial Sequence: Synthetic oligonucleotide
ggagugggauggagacauu

SEQ ID NO: 2319764 - RNA, 19 nt, Artificial Sequence
  Description of Artificial Sequence: Synthetic oligonucleotide
aauaaauuaaggcacacau

SEQ ID NO: 2319765 - RNA, 19 nt, Artificial Sequence
  Description of Artificial Sequence: Synthetic oligonucleotide
uuuauuagcacaaaauuac

SEQ ID NO: 2319766 - RNA, 19 nt, Artificial Sequence
  Description of Artificial Sequence: Synthetic oligonucleotide
aauuaaggcacacaucagg

SEQ ID NO: 2319767 - RNA, 19 nt, Artificial Sequence
  Description of Artificial Sequence: Synthetic oligonucleotide
aauuacaccaacccaggag

SEQ ID NO: 2319768 - RNA, 19 nt, Artificial Sequence
  Description of Artificial Sequence: Synthetic oligonucleotide
uuagcacaaaauuacacca

SEQ ID NO: 2319769 - RNA, 19 nt, Artificial Sequence
  Description of Artificial Sequence: Synthetic oligonucleotide
caguaauaaauuaaggcac

SEQ ID NO: 2319770 - RNA, 19 nt, Artificial Sequence
  Description of Artificial Sequence: Synthetic oligonucleotide
aacggguguacauagguug

SEQ ID NO: 2319771 - RNA, 19 nt, Artificial Sequence
  Description of Artificial Sequence: Synthetic oligonucleotide
guaugagagucccagaggg

SEQ ID NO: 2319772 - RNA, 19 nt, Artificial Sequence
  Description of Artificial Sequence: Synthetic oligonucleotide
aauuggaagccccgguggc

SEQ ID NO: 2319773 - RNA, 19 nt, Artificial Sequence
  Description of Artificial Sequence: Synthetic oligonucleotide
acuacggauggacaugugc

SEQ ID NO: 2319774 - RNA, 19 nt, Artificial Sequence
  Description of Artificial Sequence: Synthetic oligonucleotide
aagacugccuuguggacac

SEQ ID NO: 2319775 - RNA, 19 nt, Artificial Sequence
  Description of Artificial Sequence: Synthetic oligonucleotide
auuacaccaacccaggagu

SEQ ID NO: 2319776 - RNA, 19 nt, Artificial Sequence
  Description of Artificial Sequence: Synthetic oligonucleotide
aaaauuacaccaacccagg

SEQ ID NO: 2319777 - RNA, 19 nt, Artificial Sequence
  Description of Artificial Sequence: Synthetic oligonucleotide
aauuacccuuuauuagcac

SEQ ID NO: 2319778 - RNA, 19 nt, Artificial Sequence
  Description of Artificial Sequence: Synthetic oligonucleotide
cugcuuaucuucaucagcc

SEQ ID NO: 2319779 - RNA, 19 nt, Artificial Sequence
  Description of Artificial Sequence: Synthetic oligonucleotide
ucucugguaucccaaaggc

SEQ ID NO: 2319780 - RNA, 19 nt, Artificial Sequence
  Description of Artificial Sequence: Synthetic oligonucleotide
uuauuagcacaaaauuaca

SEQ ID NO: 2319781 - RNA, 19 nt, Artificial Sequence
  Description of Artificial Sequence: Synthetic oligonucleotide
cacacaucaggcuaagggg

SEQ ID NO: 2319782 - RNA, 19 nt, Artificial Sequence
  Description of Artificial Sequence: Synthetic oligonucleotide
uaauuacccuuuauuagca

SEQ ID NO: 2319783 - RNA, 19 nt, Artificial Sequence
  Description of Artificial Sequence: Synthetic oligonucleotide
uuggaagacugccuugugg

SEQ ID NO: 2319784 - RNA, 19 nt, Artificial Sequence
  Description of Artificial Sequence: Synthetic oligonucleotide
gaauuggaagccccggugg

SEQ ID NO: 2319785 - RNA, 19 nt, Artificial Sequence
  Description of Artificial Sequence: Synthetic oligonucleotide
augagagucccagagggcc

SEQ ID NO: 2319786 - RNA, 19 nt, Artificial Sequence
  Description of Artificial Sequence: Synthetic oligonucleotide
gaaggcgucaucgauacug

SEQ ID NO: 2319787 - RNA, 19 nt, Artificial Sequence
  Description of Artificial Sequence: Synthetic oligonucleotide
uacauagguuggaagacug

SEQ ID NO: 2319788 - RNA, 19 nt, Artificial Sequence
  Description of Artificial Sequence: Synthetic oligonucleotide
uagaagaauuggaagcccc

SEQ ID NO: 2319789 - RNA, 19 nt, Artificial Sequence
  Description of Artificial Sequence: Synthetic oligonucleotide
cuacggauggacaugugcc

SEQ ID NO: 2319790 - RNA, 19 nt, Artificial Sequence
  Description of Artificial Sequence: Synthetic oligonucleotide
aagccuggcacaaagaaga

SEQ ID NO: 2319791 - RNA, 19 nt, Artificial Sequence
  Description of Artificial Sequence: Synthetic oligonucleotide
auaagcacuagccccagca

SEQ ID NO: 2319792 - RNA, 19 nt, Artificial Sequence
  Description of Artificial Sequence: Synthetic oligonucleotide
aucgauacugaacuggggu

SEQ ID NO: 2319793 - RNA, 19 nt, Artificial Sequence
  Description of Artificial Sequence: Synthetic oligonucleotide
cuuuauuagcacaaaauua

SEQ ID NO: 2319794 - RNA, 19 nt, Artificial Sequence
  Description of Artificial Sequence: Synthetic oligonucleotide
ucacgugauagacucccgg

SEQ ID NO: 2319795 - RNA, 19 nt, Artificial Sequence
  Description of Artificial Sequence: Synthetic oligonucleotide
aaucccuggugcugacucc

SEQ ID NO: 2319796 - RNA, 19 nt, Artificial Sequence
  Description of Artificial Sequence: Synthetic oligonucleotide
uggacuccggcccaggucc

SEQ ID NO: 2319797 - RNA, 19 nt, Artificial Sequence
  Description of Artificial Sequence: Synthetic oligonucleotide
ugaagaucacgugauagac

SEQ ID NO: 2319798 - RNA, 19 nt, Artificial Sequence
  Description of Artificial Sequence: Synthetic oligonucleotide
auuacccuuuauuagcaca

SEQ ID NO: 2319799 - RNA, 19 nt, Artificial Sequence
  Description of Artificial Sequence: Synthetic oligonucleotide
aaaggaggccagaacuacc

SEQ ID NO: 2319800 - RNA, 19 nt, Artificial Sequence
  Description of Artificial Sequence: Synthetic oligonucleotide
ugaugcuuuggaucucugg

SEQ ID NO: 2319801 - RNA, 19 nt, Artificial Sequence
  Description of Artificial Sequence: Synthetic oligonucleotide
auaaauuaaggcacacauc

SEQ ID NO: 2319802 - RNA, 19 nt, Artificial Sequence
  Description of Artificial Sequence: Synthetic oligonucleotide
uuacccuuuauuagcacaa

SEQ ID NO: 2319803 - RNA, 19 nt, Artificial Sequence
  Description of Artificial Sequence: Synthetic oligonucleotide
cuaagggguagcaugcccc

SEQ ID NO: 2319804 - RNA, 19 nt, Artificial Sequence
  Description of Artificial Sequence: Synthetic oligonucleotide
agugcagcggcccgaagcg

SEQ ID NO: 2319805 - RNA, 19 nt, Artificial Sequence
  Description of Artificial Sequence: Synthetic oligonucleotide
ugagcaaauccugagggga

SEQ ID NO: 2319806 - RNA, 19 nt, Artificial Sequence
  Description of Artificial Sequence: Synthetic oligonucleotide
uaauaaauuaaggcacaca

SEQ ID NO: 2319807 - RNA, 19 nt, Artificial Sequence
  Description of Artificial Sequence: Synthetic oligonucleotide
aagaauuggaagccccggu

SEQ ID NO: 2319808 - RNA, 19 nt, Artificial Sequence
  Description of Artificial Sequence: Synthetic oligonucleotide
uggaucaaaggaugcuggg

SEQ ID NO: 2319809 - RNA, 19 nt, Artificial Sequence
  Description of Artificial Sequence: Synthetic oligonucleotide
gucaucgauacugaacugg

SEQ ID NO: 2319810 - RNA, 19 nt, Artificial Sequence
  Description of Artificial Sequence: Synthetic oligonucleotide
aaauuacaccaacccagga

SEQ ID NO: 2319811 - RNA, 19 nt, Artificial Sequence
  Description of Artificial Sequence: Synthetic oligonucleotide
gaucacgugauagacuccc

SEQ ID NO: 2319812 - RNA, 19 nt, Artificial Sequence
  Description of Artificial Sequence: Synthetic oligonucleotide
gcacacaucaggcuaaggg

SEQ ID NO: 2319813 - RNA, 19 nt, Artificial Sequence
  Description of Artificial Sequence: Synthetic oligonucleotide
uagcaugccccaaacuucc

SEQ ID NO: 2319814 - RNA, 19 nt, Artificial Sequence
  Description of Artificial Sequence: Synthetic oligonucleotide
agaauuggaagccccggug

SEQ ID NO: 2319815 - RNA, 19 nt, Artificial Sequence
  Description of Artificial Sequence: Synthetic oligonucleotide
uguacauagguuggaagac

SEQ ID NO: 2319816 - RNA, 19 nt, Artificial Sequence
  Description of Artificial Sequence: Synthetic oligonucleotide
uggcacaaagaagauggcg

SEQ ID NO: 2319817 - RNA, 19 nt, Artificial Sequence
  Description of Artificial Sequence: Synthetic oligonucleotide
gaagaauuggaagccccgg

SEQ ID NO: 2319818 - RNA, 19 nt, Artificial Sequence
  Description of Artificial Sequence: Synthetic oligonucleotide
augaagaucacgugauaga

SEQ ID NO: 2319819 - RNA, 19 nt, Artificial Sequence
  Description of Artificial Sequence: Synthetic oligonucleotide
uuuuccagguucugguagc

SEQ ID NO: 2319820 - RNA, 19 nt, Artificial Sequence
  Description of Artificial Sequence: Synthetic oligonucleotide
guucugguagcgcagccgg

SEQ ID NO: 2319821 - RNA, 19 nt, Artificial Sequence
  Description of Artificial Sequence: Synthetic oligonucleotide
ucgggugccgcucauggcc

SEQ ID NO: 2319822 - RNA, 19 nt, Artificial Sequence
  Description of Artificial Sequence: Synthetic oligonucleotide
aagcgggcaaccccgcugg

SEQ ID NO: 2319823 - RNA, 19 nt, Artificial Sequence
  Description of Artificial Sequence: Synthetic oligonucleotide
cauagguuggaagacugcc

SEQ ID NO: 2319824 - RNA, 19 nt, Artificial Sequence
  Description of Artificial Sequence: Synthetic oligonucleotide
guguacauagguuggaaga

SEQ ID NO: 2319825 - RNA, 19 nt, Artificial Sequence
  Description of Artificial Sequence: Synthetic oligonucleotide
aaauuaaggcacacaucag

SEQ ID NO: 2319826 - RNA, 19 nt, Artificial Sequence
  Description of Artificial Sequence: Synthetic oligonucleotide
ugagaacuacggauggaca

SEQ ID NO: 2319827 - RNA, 19 nt, Artificial Sequence
  Description of Artificial Sequence: Synthetic oligonucleotide
ucgaaggcgucaucgauac

SEQ ID NO: 2319828 - RNA, 19 nt, Artificial Sequence
  Description of Artificial Sequence: Synthetic oligonucleotide
aaccccgcuggacuccggc

SEQ ID NO: 2319829 - RNA, 19 nt, Artificial Sequence
  Description of Artificial Sequence: Synthetic oligonucleotide
uacggauggacaugugccc

SEQ ID NO: 2319830 - RNA, 19 nt, Artificial Sequence
  Description of Artificial Sequence: Synthetic oligonucleotide
acagcagaugaagaucacg

SEQ ID NO: 2319831 - RNA, 19 nt, Artificial Sequence
  Description of Artificial Sequence: Synthetic oligonucleotide
cugagcaaauccugagggg

SEQ ID NO: 2319832 - RNA, 19 nt, Artificial Sequence
  Description of Artificial Sequence: Synthetic oligonucleotide
agaagaauuggaagccccg

SEQ ID NO: 2319833 - RNA, 19 nt, Artificial Sequence
  Description of Artificial Sequence: Synthetic oligonucleotide
cacugagaacuacggaugg

SEQ ID NO: 2319834 - RNA, 19 nt, Artificial Sequence
  Description of Artificial Sequence: Synthetic oligonucleotide
cucugguaucccaaaggcc

SEQ ID NO: 2319835 - RNA, 19 nt, Artificial Sequence
  Description of Artificial Sequence: Synthetic oligonucleotide
ccugagcaaauccugaggg

SEQ ID NO: 2319836 - RNA, 19 nt, Artificial Sequence
  Description of Artificial Sequence: Synthetic oligonucleotide
gguaugagagucccagagg

SEQ ID NO: 2319837 - RNA, 19 nt, Artificial Sequence
  Description of Artificial Sequence: Synthetic oligonucleotide
aaaguagggcagguagaag

SEQ ID NO: 2319838 - RNA, 19 nt, Artificial Sequence
  Description of Artificial Sequence: Synthetic oligonucleotide
ucgauacugaacugggguc

SEQ ID NO: 2319839 - RNA, 19 nt, Artificial Sequence
  Description of Artificial Sequence: Synthetic oligonucleotide
gauacugaacuggggucgg

SEQ ID NO: 2319840 - RNA, 19 nt, Artificial Sequence
  Description of Artificial Sequence: Synthetic oligonucleotide
uagggcagguagaagaauu

SEQ ID NO: 2319841 - RNA, 19 nt, Artificial Sequence
  Description of Artificial Sequence: Synthetic oligonucleotide
gaaacggguguacauaggu

SEQ ID NO: 2319842 - RNA, 19 nt, Artificial Sequence
  Description of Artificial Sequence: Synthetic oligonucleotide
caucgauacugaacugggg

SEQ ID NO: 2319843 - RNA, 19 nt, Artificial Sequence
  Description of Artificial Sequence: Synthetic oligonucleotide
aaggaccacugagaacuac

SEQ ID NO: 2319844 - RNA, 19 nt, Artificial Sequence
  Description of Artificial Sequence: Synthetic oligonucleotide
gaccaggauaagcacuagc

SEQ ID NO: 2319845 - RNA, 19 nt, Artificial Sequence
  Description of Artificial Sequence: Synthetic oligonucleotide
uggccugaugcuuuggauc

SEQ ID NO: 2319846 - RNA, 19 nt, Artificial Sequence
  Description of Artificial Sequence: Synthetic oligonucleotide
uccugaggggacugguggg

SEQ ID NO: 2319847 - RNA, 19 nt, Artificial Sequence
  Description of Artificial Sequence: Synthetic oligonucleotide
aggaccacugagaacuacg

SEQ ID NO: 2319848 - RNA, 19 nt, Artificial Sequence
  Description of Artificial Sequence: Synthetic oligonucleotide
guagaagaauuggaagccc

SEQ ID NO: 2319849 - RNA, 19 nt, Artificial Sequence
  Description of Artificial Sequence: Synthetic oligonucleotide
agaacuacggauggacaug

SEQ ID NO: 2319850 - RNA, 19 nt, Artificial Sequence
  Description of Artificial Sequence: Synthetic oligonucleotide
gggacuagcagcaggaagc

SEQ ID NO: 2319851 - RNA, 19 nt, Artificial Sequence
  Description of Artificial Sequence: Synthetic oligonucleotide
ggacugguggguaugagag

SEQ ID NO: 2319852 - RNA, 19 nt, Artificial Sequence
  Description of Artificial Sequence: Synthetic oligonucleotide
gcucacuucucaaaguagg

SEQ ID NO: 2319853 - RNA, 19 nt, Artificial Sequence
  Description of Artificial Sequence: Synthetic oligonucleotide
uagacucccgggacuagca

SEQ ID NO: 2319854 - RNA, 19 nt, Artificial Sequence
  Description of Artificial Sequence: Synthetic oligonucleotide
uaagggguagcaugcccca

SEQ ID NO: 2319855 - RNA, 19 nt, Artificial Sequence
  Description of Artificial Sequence: Synthetic oligonucleotide
gcagaugaagaucacguga

SEQ ID NO: 2319856 - RNA, 19 nt, Artificial Sequence
  Description of Artificial Sequence: Synthetic oligonucleotide
ugcuuaucuucaucagcca

SEQ ID NO: 2319857 - RNA, 19 nt, Artificial Sequence
  Description of Artificial Sequence: Synthetic oligonucleotide
gacucccgggacuagcagc

SEQ ID NO: 2319858 - RNA, 19 nt, Artificial Sequence
  Description of Artificial Sequence: Synthetic oligonucleotide
ucugagccggccuacgguc

SEQ ID NO: 2319859 - RNA, 19 nt, Artificial Sequence
  Description of Artificial Sequence: Synthetic oligonucleotide
agaacuacccgccgguuuu

SEQ ID NO: 2319860 - RNA, 19 nt, Artificial Sequence
  Description of Artificial Sequence: Synthetic oligonucleotide
aucccuggugcugacuccc

SEQ ID NO: 2319861 - RNA, 19 nt, Artificial Sequence
  Description of Artificial Sequence: Synthetic oligonucleotide
aaauccugaggggacuggu

SEQ ID NO: 2319862 - RNA, 19 nt, Artificial Sequence
  Description of Artificial Sequence: Synthetic oligonucleotide
acgugauagacucccggga

SEQ ID NO: 2319863 - RNA, 19 nt, Artificial Sequence
  Description of Artificial Sequence: Synthetic oligonucleotide
gaagcgggcaaccccgcug

SEQ ID NO: 2319864 - RNA, 19 nt, Artificial Sequence
  Description of Artificial Sequence: Synthetic oligonucleotide
agugcugggugguacugcu

SEQ ID NO: 2319865 - RNA, 19 nt, Artificial Sequence
  Description of Artificial Sequence: Synthetic oligonucleotide
gaagacugccuuguggaca

SEQ ID NO: 2319866 - RNA, 19 nt, Artificial Sequence
  Description of Artificial Sequence: Synthetic oligonucleotide
ucccgggacuagcagcagg

SEQ ID NO: 2319867 - RNA, 19 nt, Artificial Sequence
  Description of Artificial Sequence: Synthetic oligonucleotide
gaggccagaacuacccgcc

SEQ ID NO: 2319868 - RNA, 19 nt, Artificial Sequence
  Description of Artificial Sequence: Synthetic oligonucleotide
caucggacucuggagaggc

SEQ ID NO: 2319869 - RNA, 19 nt, Artificial Sequence
  Description of Artificial Sequence: Synthetic oligonucleotide
ggaugcuggguccagcugc

SEQ ID NO: 2319870 - RNA, 19 nt, Artificial Sequence
  Description of Artificial Sequence: Synthetic oligonucleotide
caaacuuccugagcaaauc

SEQ ID NO: 2319871 - RNA, 19 nt, Artificial Sequence
  Description of Artificial Sequence: Synthetic oligonucleotide
gacacguggagguggccug

SEQ ID NO: 2319872 - RNA, 19 nt, Artificial Sequence
  Description of Artificial Sequence: Synthetic oligonucleotide
ugagagucccagagggccu

SEQ ID NO: 2319873 - RNA, 19 nt, Artificial Sequence
  Description of Artificial Sequence: Synthetic oligonucleotide
gaagaaacggguguacaua

SEQ ID NO: 2319874 - RNA, 19 nt, Artificial Sequence
  Description of Artificial Sequence: Synthetic oligonucleotide
aggaggccagaacuacccg

SEQ ID NO: 2319875 - RNA, 19 nt, Artificial Sequence
  Description of Artificial Sequence: Synthetic oligonucleotide
acccuuuauuagcacaaaa

SEQ ID NO: 2319876 - RNA, 19 nt, Artificial Sequence
  Description of Artificial Sequence: Synthetic oligonucleotide
ugugcccagaaucccuggu

SEQ ID NO: 2319877 - RNA, 19 nt, Artificial Sequence
  Description of Artificial Sequence: Synthetic oligonucleotide
cagcucgaaggcgucaucg

SEQ ID NO: 2319878 - RNA, 19 nt, Artificial Sequence
  Description of Artificial Sequence: Synthetic oligonucleotide
ucugguagcgcagccggga

SEQ ID NO: 2319879 - RNA, 19 nt, Artificial Sequence
  Description of Artificial Sequence: Synthetic oligonucleotide
cugguaucccaaaggccag

SEQ ID NO: 2319880 - RNA, 19 nt, Artificial Sequence
  Description of Artificial Sequence: Synthetic oligonucleotide
aauccugaggggacuggug

SEQ ID NO: 2319881 - RNA, 19 nt, Artificial Sequence
  Description of Artificial Sequence: Synthetic oligonucleotide
ucccacgccgaccaggaua

SEQ ID NO: 2319882 - RNA, 19 nt, Artificial Sequence
  Description of Artificial Sequence: Synthetic oligonucleotide
gagaacuacggauggacau

SEQ ID NO: 2319883 - RNA, 19 nt, Artificial Sequence
  Description of Artificial Sequence: Synthetic oligonucleotide
uucagggcccaguaauaaa

SEQ ID NO: 2319884 - RNA, 19 nt, Artificial Sequence
  Description of Artificial Sequence: Synthetic oligonucleotide
guagcaugccccaaacuuc

SEQ ID NO: 2319885 - RNA, 19 nt, Artificial Sequence
  Description of Artificial Sequence: Synthetic oligonucleotide
acaccaacccaggaguuca

SEQ ID NO: 2319886 - RNA, 19 nt, Artificial Sequence
  Description of Artificial Sequence: Synthetic oligonucleotide
aucugagccggccuacggu

SEQ ID NO: 2319887 - RNA, 19 nt, Artificial Sequence
  Description of Artificial Sequence: Synthetic oligonucleotide
acggguguacauagguugg

SEQ ID NO: 2319888 - RNA, 19 nt, Artificial Sequence
  Description of Artificial Sequence: Synthetic oligonucleotide
agaaacggguguacauagg

SEQ ID NO: 2319889 - RNA, 19 nt, Artificial Sequence
  Description of Artificial Sequence: Synthetic oligonucleotide
agaucacgugauagacucc

SEQ ID NO: 2319890 - RNA, 19 nt, Artificial Sequence
  Description of Artificial Sequence: Synthetic oligonucleotide
gauaagcacuagccccagc

SEQ ID NO: 2319891 - RNA, 19 nt, Artificial Sequence
  Description of Artificial Sequence: Synthetic oligonucleotide
caucugagccggccuacgg

SEQ ID NO: 2319892 - RNA, 19 nt, Artificial Sequence
  Description of Artificial Sequence: Synthetic oligonucleotide
ggucgggugccgcucaugg

SEQ ID NO: 2319893 - RNA, 19 nt, Artificial Sequence
  Description of Artificial Sequence: Synthetic oligonucleotide
auagguuggaagacugccu

SEQ ID NO: 2319894 - RNA, 19 nt, Artificial Sequence
  Description of Artificial Sequence: Synthetic oligonucleotide
ugauagacucccgggacua

SEQ ID NO: 2319895 - RNA, 19 nt, Artificial Sequence
  Description of Artificial Sequence: Synthetic oligonucleotide
cuggcacaaagaagauggc

SEQ ID NO: 2319896 - RNA, 19 nt, Artificial Sequence
  Description of Artificial Sequence: Synthetic oligonucleotide
cucgaagugcagcggcccg

SEQ ID NO: 2319897 - RNA, 19 nt, Artificial Sequence
  Description of Artificial Sequence: Synthetic oligonucleotide
uuacaccaacccaggaguu

SEQ ID NO: 2319898 - RNA, 19 nt, Artificial Sequence
  Description of Artificial Sequence: Synthetic oligonucleotide
cagcagaugaagaucacgu

SEQ ID NO: 2319899 - RNA, 19 nt, Artificial Sequence
  Description of Artificial Sequence: Synthetic oligonucleotide
auggacaugugcccagaau

SEQ ID NO: 2319900 - RNA, 19 nt, Artificial Sequence
  Description of Artificial Sequence: Synthetic oligonucleotide
ggacaugugcccagaaucc

SEQ ID NO: 2319901 - RNA, 19 nt, Artificial Sequence
  Description of Artificial Sequence: Synthetic oligonucleotide
ccaacccaggaguucaggg

SEQ ID NO: 2319902 - RNA, 19 nt, Artificial Sequence
  Description of Artificial Sequence: Synthetic oligonucleotide
augccccaaacuuccugag

SEQ ID NO: 2319903 - RNA, 19 nt, Artificial Sequence
  Description of Artificial Sequence: Synthetic oligonucleotide
aaggcgucaucgauacuga

SEQ ID NO: 2319904 - RNA, 19 nt, Artificial Sequence
  Description of Artificial Sequence: Synthetic oligonucleotide
ucccgcguccuccaggguc

SEQ ID NO: 2319905 - RNA, 19 nt, Artificial Sequence
  Description of Artificial Sequence: Synthetic oligonucleotide
ugagccggccuacgguccc

SEQ ID NO: 2319906 - RNA, 19 nt, Artificial Sequence
  Description of Artificial Sequence: Synthetic oligonucleotide
ucgaaccuggcccggcgcu

SEQ ID NO: 2319907 - RNA, 19 nt, Artificial Sequence
  Description of Artificial Sequence: Synthetic oligonucleotide
gagcaaauccugaggggac

SEQ ID NO: 2319908 - RNA, 19 nt, Artificial Sequence
  Description of Artificial Sequence: Synthetic oligonucleotide
agggcccaguaauaaauua

SEQ ID NO: 2319909 - RNA, 19 nt, Artificial Sequence
  Description of Artificial Sequence: Synthetic oligonucleotide
aaacggguguacauagguu

SEQ ID NO: 2319910 - RNA, 19 nt, Artificial Sequence
  Description of Artificial Sequence: Synthetic oligonucleotide
ccacugagaacuacggaug

SEQ ID NO: 2319911 - RNA, 19 nt, Artificial Sequence
  Description of Artificial Sequence: Synthetic oligonucleotide
agaugaagaucacgugaua

SEQ ID NO: 2319912 - RNA, 19 nt, Artificial Sequence
  Description of Artificial Sequence: Synthetic oligonucleotide
uacugaacuggggucgggu

SEQ ID NO: 2319913 - RNA, 19 nt, Artificial Sequence
  Description of Artificial Sequence: Synthetic oligonucleotide
aggccagaacuacccgccg

SEQ ID NO: 2319914 - RNA, 19 nt, Artificial Sequence
  Description of Artificial Sequence: Synthetic oligonucleotide
gcagcaggcauuguaggag

SEQ ID NO: 2319915 - RNA, 19 nt, Artificial Sequence
  Description of Artificial Sequence: Synthetic oligonucleotide
acgccgaccaggauaagca

SEQ ID NO: 2319916 - RNA, 19 nt, Artificial Sequence
  Description of Artificial Sequence: Synthetic oligonucleotide
agcucgaaggcgucaucga

SEQ ID NO: 2319917 - RNA, 19 nt, Artificial Sequence
  Description of Artificial Sequence: Synthetic oligonucleotide
gcugaaggaccacugagaa

SEQ ID NO: 2319918 - RNA, 19 nt, Artificial Sequence
  Description of Artificial Sequence: Synthetic oligonucleotide
gcgucaucgauacugaacu

SEQ ID NO: 2319919 - RNA, 19 nt, Artificial Sequence
  Description of Artificial Sequence: Synthetic oligonucleotide
aggaguucagggcccagua

SEQ ID NO: 2319920 - RNA, 19 nt, Artificial Sequence
  Description of Artificial Sequence: Synthetic oligonucleotide
gcuaagggguagcaugccc

SEQ ID NO: 2319921 - RNA, 19 nt, Artificial Sequence
  Description of Artificial Sequence: Synthetic oligonucleotide
gaaccuggcccggcgcucg

SEQ ID NO: 2319922 - RNA, 19 nt, Artificial Sequence
  Description of Artificial Sequence: Synthetic oligonucleotide
cacgccgaccaggauaagc

SEQ ID NO: 2319923 - RNA, 19 nt, Artificial Sequence
  Description of Artificial Sequence: Synthetic oligonucleotide
ggucccgcguccuccaggg

SEQ ID NO: 2319924 - RNA, 19 nt, Artificial Sequence
  Description of Artificial Sequence: Synthetic oligonucleotide
gguagcaugccccaaacuu

SEQ ID NO: 2319925 - RNA, 19 nt, Artificial Sequence
  Description of Artificial Sequence: Synthetic oligonucleotide
uggcccggcgcucgaagug

SEQ ID NO: 2319926 - RNA, 19 nt, Artificial Sequence
  Description of Artificial Sequence: Synthetic oligonucleotide
gguucugguagcgcagccg

SEQ ID NO: 2319927 - RNA, 19 nt, Artificial Sequence
  Description of Artificial Sequence: Synthetic oligonucleotide
uggcccuugacagcacagc

SEQ ID NO: 2319928 - RNA, 19 nt, Artificial Sequence
  Description of Artificial Sequence: Synthetic oligonucleotide
cagaugaagaucacgugau

SEQ ID NO: 2319929 - RNA, 19 nt, Artificial Sequence
  Description of Artificial Sequence: Synthetic oligonucleotide
gaagaucacgugauagacu

SEQ ID NO: 2319930 - RNA, 19 nt, Artificial Sequence
  Description of Artificial Sequence: Synthetic oligonucleotide
guaucccaaaggccagcug

SEQ ID NO: 2319931 - RNA, 19 nt, Artificial Sequence
  Description of Artificial Sequence: Synthetic oligonucleotide
cacagcagaugaagaucac

SEQ ID NO: 2319932 - RNA, 19 nt, Artificial Sequence
  Description of Artificial Sequence: Synthetic oligonucleotide
gcagaaaggaggccagaac

SEQ ID NO: 2319933 - RNA, 19 nt, Artificial Sequence
  Description of Artificial Sequence: Synthetic oligonucleotide
acaugugcccagaaucccu

SEQ ID NO: 2319934 - RNA, 19 nt, Artificial Sequence
  Description of Artificial Sequence: Synthetic oligonucleotide
acugagaacuacggaugga

SEQ ID NO: 2319935 - RNA, 19 nt, Artificial Sequence
  Description of Artificial Sequence: Synthetic oligonucleotide
ugguaucccaaaggccagc

SEQ ID NO: 2319936 - RNA, 19 nt, Artificial Sequence
  Description of Artificial Sequence: Synthetic oligonucleotide
gaacuacggauggacaugu

SEQ ID NO: 2319937 - RNA, 19 nt, Artificial Sequence
  Description of Artificial Sequence: Synthetic oligonucleotide
agggucagcucgaaggcgu

SEQ ID NO: 2319938 - RNA, 19 nt, Artificial Sequence
  Description of Artificial Sequence: Synthetic oligonucleotide
cccgaagcgggcaaccccg

SEQ ID NO: 2319939 - RNA, 19 nt, Artificial Sequence
  Description of Artificial Sequence: Synthetic oligonucleotide
caccuccagucccacgccg

SEQ ID NO: 2319940 - RNA, 19 nt, Artificial Sequence
  Description of Artificial Sequence: Synthetic oligonucleotide
agggguagcaugccccaaa

SEQ ID NO: 2319941 - RNA, 19 nt, Artificial Sequence
  Description of Artificial Sequence: Synthetic oligonucleotide
ugaggggacugguggguau

SEQ ID NO: 2319942 - RNA, 19 nt, Artificial Sequence
  Description of Artificial Sequence: Synthetic oligonucleotide
acggauggacaugugccca

SEQ ID NO: 2319943 - RNA, 19 nt, Artificial Sequence
  Description of Artificial Sequence: Synthetic oligonucleotide
auacugaacuggggucggg

SEQ ID NO: 2319944 - RNA, 19 nt, Artificial Sequence
  Description of Artificial Sequence: Synthetic oligonucleotide
ggccagaacuacccgccgg

SEQ ID NO: 2319945 - RNA, 19 nt, Artificial Sequence
  Description of Artificial Sequence: Synthetic oligonucleotide
cucgaaccuggcccggcgc

SEQ ID NO: 2319946 - RNA, 19 nt, Artificial Sequence
  Description of Artificial Sequence: Synthetic oligonucleotide
gauggcgcuggagacaccu

SEQ ID NO: 2319947 - RNA, 19 nt, Artificial Sequence
  Description of Artificial Sequence: Synthetic oligonucleotide
cucgaaggcgucaucgaua

SEQ ID NO: 2319948 - RNA, 19 nt, Artificial Sequence
  Description of Artificial Sequence: Synthetic oligonucleotide
ucggacucuggagaggcuu

SEQ ID NO: 2319949 - RNA, 19 nt, Artificial Sequence
  Description of Artificial Sequence: Synthetic oligonucleotide
cugaugcuuuggaucucug

SEQ ID NO: 2319950 - RNA, 19 nt, Artificial Sequence
  Description of Artificial Sequence: Synthetic oligonucleotide
cagcucacuucucaaagua

SEQ ID NO: 2319951 - RNA, 19 nt, Artificial Sequence
  Description of Artificial Sequence: Synthetic oligonucleotide
cgauacugaacuggggucg

SEQ ID NO: 2319952 - RNA, 19 nt, Artificial Sequence
  Description of Artificial Sequence: Synthetic oligonucleotide
uuguggacacguggaggug

SEQ ID NO: 2319953 - RNA, 19 nt, Artificial Sequence
  Description of Artificial Sequence: Synthetic oligonucleotide
caucaggcuaagggguagc

SEQ ID NO: 2319954 - RNA, 19 nt, Artificial Sequence
  Description of Artificial Sequence: Synthetic oligonucleotide
ucagcucgaaggcgucauc

SEQ ID NO: 2319955 - RNA, 19 nt, Artificial Sequence
  Description of Artificial Sequence: Synthetic oligonucleotide
ucgaagugcagcggcccga

SEQ ID NO: 2319956 - RNA, 19 nt, Artificial Sequence
  Description of Artificial Sequence: Synthetic oligonucleotide
uacccuuuauuagcacaaa

SEQ ID NO: 2319957 - RNA, 19 nt, Artificial Sequence
  Description of Artificial Sequence: Synthetic oligonucleotide
aucaggcuaagggguagca

SEQ ID NO: 2319958 - RNA, 19 nt, Artificial Sequence
  Description of Artificial Sequence: Synthetic oligonucleotide
gaagugcagcggcccgaag

SEQ ID NO: 2319959 - RNA, 19 nt, Artificial Sequence
  Description of Artificial Sequence: Synthetic oligonucleotide
ggcgucaucgauacugaac

SEQ ID NO: 2319960 - RNA, 19 nt, Artificial Sequence
  Description of Artificial Sequence: Synthetic oligonucleotide
acuggggucgggugccgcu

SEQ ID NO: 2319961 - RNA, 19 nt, Artificial Sequence
  Description of Artificial Sequence: Synthetic oligonucleotide
ggcagguagaagaauugga

SEQ ID NO: 2319962 - RNA, 19 nt, Artificial Sequence
  Description of Artificial Sequence: Synthetic oligonucleotide
aacuacggauggacaugug

SEQ ID NO: 2319963 - RNA, 19 nt, Artificial Sequence
  Description of Artificial Sequence: Synthetic oligonucleotide
gaggggacugguggguaug

SEQ ID NO: 2319964 - RNA, 19 nt, Artificial Sequence
  Description of Artificial Sequence: Synthetic oligonucleotide
guucagggcccaguaauaa

SEQ ID NO: 2319965 - RNA, 19 nt, Artificial Sequence
  Description of Artificial Sequence: Synthetic oligonucleotide
cuggacuccggcccagguc

SEQ ID NO: 2319966 - RNA, 19 nt, Artificial Sequence
  Description of Artificial Sequence: Synthetic oligonucleotide
uaggcgcccagcgccgccg

SEQ ID NO: 2319967 - RNA, 19 nt, Artificial Sequence
  Description of Artificial Sequence: Synthetic oligonucleotide
gugauagacucccgggacu

SEQ ID NO: 2319968 - RNA, 19 nt, Artificial Sequence
  Description of Artificial Sequence: Synthetic oligonucleotide
gggacugcuuaucuucauc

SEQ ID NO: 2319969 - RNA, 19 nt, Artificial Sequence
  Description of Artificial Sequence: Synthetic oligonucleotide
cugguagcgcagccgggac

SEQ ID NO: 2319970 - RNA, 19 nt, Artificial Sequence
  Description of Artificial Sequence: Synthetic oligonucleotide
gggacugguggguaugaga

SEQ ID NO: 2319971 - RNA, 19 nt, Artificial Sequence
  Description of Artificial Sequence: Synthetic oligonucleotide
ggagacaccuggagagggg

SEQ ID NO: 2319972 - RNA, 19 nt, Artificial Sequence
  Description of Artificial Sequence: Synthetic oligonucleotide
guacauagguuggaagacu

SEQ ID NO: 2319973 - RNA, 19 nt, Artificial Sequence
  Description of Artificial Sequence: Synthetic oligonucleotide
cccaucggacucuggagag

SEQ ID NO: 2319974 - RNA, 19 nt, Artificial Sequence
  Description of Artificial Sequence: Synthetic oligonucleotide
uggggucgggugccgcuca

SEQ ID NO: 2319975 - RNA, 19 nt, Artificial Sequence
  Description of Artificial Sequence: Synthetic oligonucleotide
gaggcuugggcuccauccu

SEQ ID NO: 2319976 - RNA, 19 nt, Artificial Sequence
  Description of Artificial Sequence: Synthetic oligonucleotide
cgugauagacucccgggac

SEQ ID NO: 2319977 - RNA, 19 nt, Artificial Sequence
  Description of Artificial Sequence: Synthetic oligonucleotide
caccaacccaggaguucag

SEQ ID NO: 2319978 - RNA, 19 nt, Artificial Sequence
  Description of Artificial Sequence: Synthetic oligonucleotide
agucccacgccgaccagga

SEQ ID NO: 2319979 - RNA, 19 nt, Artificial Sequence
  Description of Artificial Sequence: Synthetic oligonucleotide
ggccugaugcuuuggaucu

SEQ ID NO: 2319980 - RNA, 19 nt, Artificial Sequence
  Description of Artificial Sequence: Synthetic oligonucleotide
gagaggcuugggcuccauc

SEQ ID NO: 2319981 - RNA, 19 nt, Artificial Sequence
  Description of Artificial Sequence: Synthetic oligonucleotide
aguucagggcccaguaaua

SEQ ID NO: 2319982 - RNA, 19 nt, Artificial Sequence
  Description of Artificial Sequence: Synthetic oligonucleotide
agccccgguggcccuugac

SEQ ID NO: 2319983 - RNA, 19 nt, Artificial Sequence
  Description of Artificial Sequence: Synthetic oligonucleotide
agcaggcauuguaggagug

SEQ ID NO: 2319984 - RNA, 19 nt, Artificial Sequence
  Description of Artificial Sequence: Synthetic oligonucleotide
cacaucaggcuaaggggua

SEQ ID NO: 2319985 - RNA, 19 nt, Artificial Sequence
  Description of Artificial Sequence: Synthetic oligonucleotide
cccuugacagcacagcaga

SEQ ID NO: 2319986 - RNA, 19 nt, Artificial Sequence
  Description of Artificial Sequence: Synthetic oligonucleotide
cuagccccagcagcaggag

SEQ ID NO: 2319987 - RNA, 19 nt, Artificial Sequence
  Description of Artificial Sequence: Synthetic oligonucleotide
gucgggugccgcucauggc

SEQ ID NO: 2319988 - RNA, 19 nt, Artificial Sequence
  Description of Artificial Sequence: Synthetic oligonucleotide
ggacucuggagaggcuugg

SEQ ID NO: 2319989 - RNA, 19 nt, Artificial Sequence
  Description of Artificial Sequence: Synthetic oligonucleotide
aggcacacaucaggcuaag

SEQ ID NO: 2319990 - RNA, 19 nt, Artificial Sequence
  Description of Artificial Sequence: Synthetic oligonucleotide
acguggagguggccugaug

SEQ ID NO: 2319991 - RNA, 19 nt, Artificial Sequence
  Description of Artificial Sequence: Synthetic oligonucleotide
gacuccggcccaggucccg

SEQ ID NO: 2319992 - RNA, 19 nt, Artificial Sequence
  Description of Artificial Sequence: Synthetic oligonucleotide
gggaagaaacggguguaca

SEQ ID NO: 2319993 - RNA, 19 nt, Artificial Sequence
  Description of Artificial Sequence: Synthetic oligonucleotide
aagggguagcaugccccaa

SEQ ID NO: 2319994 - RNA, 19 nt, Artificial Sequence
  Description of Artificial Sequence: Synthetic oligonucleotide
uacugcugauggugcugaa

SEQ ID NO: 2319995 - RNA, 19 nt, Artificial Sequence
  Description of Artificial Sequence: Synthetic oligonucleotide
gcccuugacagcacagcag

SEQ ID NO: 2319996 - RNA, 19 nt, Artificial Sequence
  Description of Artificial Sequence: Synthetic oligonucleotide
aggcgucaucgauacugaa

SEQ ID NO: 2319997 - RNA, 19 nt, Artificial Sequence
  Description of Artificial Sequence: Synthetic oligonucleotide
guggagguggccugaugcu

SEQ ID NO: 2319998 - RNA, 19 nt, Artificial Sequence
  Description of Artificial Sequence: Synthetic oligonucleotide
uggacacguggagguggcc

SEQ ID NO: 2319999 - RNA, 19 nt, Artificial Sequence
  Description of Artificial Sequence: Synthetic oligonucleotide
cuccggcccaggucccgcg

SEQ ID NO: 2320000 - RNA, 19 nt, Artificial Sequence
  Description of Artificial Sequence: Synthetic oligonucleotide
gcuuuggaucucugguauc

SEQ ID NO: 2320001 - RNA, 19 nt, Artificial Sequence
  Description of Artificial Sequence: Synthetic oligonucleotide
cccgccuaggcgcccagcg

SEQ ID NO: 2320002 - RNA, 19 nt, Artificial Sequence
  Description of Artificial Sequence: Synthetic oligonucleotide
gcucgaagugcagcggccc

SEQ ID NO: 2320003 - RNA, 19 nt, Artificial Sequence
  Description of Artificial Sequence: Synthetic oligonucleotide
gguuggaagacugccuugu

SEQ ID NO: 2320004 - RNA, 19 nt, Artificial Sequence
  Description of Artificial Sequence: Synthetic oligonucleotide
caggcauuguaggagugcu

SEQ ID NO: 2320005 - RNA, 19 nt, Artificial Sequence
  Description of Artificial Sequence: Synthetic oligonucleotide
ggaucaaaggaugcugggu

SEQ ID NO: 2320006 - RNA, 19 nt, Artificial Sequence
  Description of Artificial Sequence: Synthetic oligonucleotide
uccggcccaggucccgcgu

SEQ ID NO: 2320007 - RNA, 19 nt, Artificial Sequence
  Description of Artificial Sequence: Synthetic oligonucleotide
aaccuggcccggcgcucga

SEQ ID NO: 2320008 - RNA, 19 nt, Artificial Sequence
  Description of Artificial Sequence: Synthetic oligonucleotide
cagcaggcauuguaggagu

SEQ ID NO: 2320009 - RNA, 19 nt, Artificial Sequence
  Description of Artificial Sequence: Synthetic oligonucleotide
ggcacacaucaggcuaagg

SEQ ID NO: 2320010 - RNA, 19 nt, Artificial Sequence
  Description of Artificial Sequence: Synthetic oligonucleotide
ggaguucagggcccaguaa

SEQ ID NO: 2320011 - RNA, 19 nt, Artificial Sequence
  Description of Artificial Sequence: Synthetic oligonucleotide
cgggacuagcagcaggaag

SEQ ID NO: 2320012 - RNA, 19 nt, Artificial Sequence
  Description of Artificial Sequence: Synthetic oligonucleotide
ccucgaaccuggcccggcg

SEQ ID NO: 2320013 - RNA, 19 nt, Artificial Sequence
  Description of Artificial Sequence: Synthetic oligonucleotide
gacugccuuguggacacgu

SEQ ID NO: 2320014 - RNA, 19 nt, Artificial Sequence
  Description of Artificial Sequence: Synthetic oligonucleotide
gguggcccuugacagcaca

SEQ ID NO: 2320015 - RNA, 19 nt, Artificial Sequence
  Description of Artificial Sequence: Synthetic oligonucleotide
ggcuccauccucaucauuu

SEQ ID NO: 2320016 - RNA, 19 nt, Artificial Sequence
  Description of Artificial Sequence: Synthetic oligonucleotide
gaaggaccacugagaacua

SEQ ID NO: 2320017 - RNA, 19 nt, Artificial Sequence
  Description of Artificial Sequence: Synthetic oligonucleotide
cgccuaggcgcccagcgcc

SEQ ID NO: 2320018 - RNA, 19 nt, Artificial Sequence
  Description of Artificial Sequence: Synthetic oligonucleotide
agacugccuuguggacacg

SEQ ID NO: 2320019 - RNA, 19 nt, Artificial Sequence
  Description of Artificial Sequence: Synthetic oligonucleotide
caaccccgcuggacuccgg

SEQ ID NO: 2320020 - RNA, 19 nt, Artificial Sequence
  Description of Artificial Sequence: Synthetic oligonucleotide
gcagcucacuucucaaagu

SEQ ID NO: 2320021 - RNA, 19 nt, Artificial Sequence
  Description of Artificial Sequence: Synthetic oligonucleotide
gcaaccccgcuggacuccg

SEQ ID NO: 2320022 - RNA, 19 nt, Artificial Sequence
  Description of Artificial Sequence: Synthetic oligonucleotide
caccucgaaccuggcccgg

SEQ ID NO: 2320023 - RNA, 19 nt, Artificial Sequence
  Description of Artificial Sequence: Synthetic oligonucleotide
ccgaccaggauaagcacua

SEQ ID NO: 2320024 - RNA, 19 nt, Artificial Sequence
  Description of Artificial Sequence: Synthetic oligonucleotide
agcggcccgaagcgggcaa

SEQ ID NO: 2320025 - RNA, 19 nt, Artificial Sequence
  Description of Artificial Sequence: Synthetic oligonucleotide
ccaucggacucuggagagg

SEQ ID NO: 2320026 - RNA, 19 nt, Artificial Sequence
  Description of Artificial Sequence: Synthetic oligonucleotide
cagccaccucgaaccuggc

SEQ ID NO: 2320027 - RNA, 19 nt, Artificial Sequence
  Description of Artificial Sequence: Synthetic oligonucleotide
cccacgccgaccaggauaa

SEQ ID NO: 2320028 - RNA, 19 nt, Artificial Sequence
  Description of Artificial Sequence: Synthetic oligonucleotide
cccgggacuagcagcagga

SEQ ID NO: 2320029 - RNA, 19 nt, Artificial Sequence
  Description of Artificial Sequence: Synthetic oligonucleotide
ggguguacauagguuggaa

SEQ ID NO: 2320030 - RNA, 19 nt, Artificial Sequence
  Description of Artificial Sequence: Synthetic oligonucleotide
gugcugggugguacugcug

SEQ ID NO: 2320031 - RNA, 19 nt, Artificial Sequence
  Description of Artificial Sequence: Synthetic oligonucleotide
cgucaucgauacugaacug

SEQ ID NO: 2320032 - RNA, 19 nt, Artificial Sequence
  Description of Artificial Sequence: Synthetic oligonucleotide
ggcuugggcuccauccuca

SEQ ID NO: 2320033 - RNA, 19 nt, Artificial Sequence
  Description of Artificial Sequence: Synthetic oligonucleotide
ccaucugagccggccuacg

SEQ ID NO: 2320034 - RNA, 19 nt, Artificial Sequence
  Description of Artificial Sequence: Synthetic oligonucleotide
caggucccgcguccuccag

SEQ ID NO: 2320035 - RNA, 19 nt, Artificial Sequence
  Description of Artificial Sequence: Synthetic oligonucleotide
cuggggucgggugccgcuc

SEQ ID NO: 2320036 - RNA, 19 nt, Artificial Sequence
  Description of Artificial Sequence: Synthetic oligonucleotide
gguaucccaaaggccagcu

SEQ ID NO: 2320037 - RNA, 19 nt, Artificial Sequence
  Description of Artificial Sequence: Synthetic oligonucleotide
ggcaaccccgcuggacucc

SEQ ID NO: 2320038 - RNA, 19 nt, Artificial Sequence
  Description of Artificial Sequence: Synthetic oligonucleotide
gccgccaucugagccggcc

SEQ ID NO: 2320039 - RNA, 19 nt, Artificial Sequence
  Description of Artificial Sequence: Synthetic oligonucleotide
gggcaaccccgcuggacuc

SEQ ID NO: 2320040 - RNA, 19 nt, Artificial Sequence
  Description of Artificial Sequence: Synthetic oligonucleotide
guagggcagguagaagaau

SEQ ID NO: 2320041 - RNA, 19 nt, Artificial Sequence
  Description of Artificial Sequence: Synthetic oligonucleotide
cagaacuacccgccgguuu

SEQ ID NO: 2320042 - RNA, 19 nt, Artificial Sequence
  Description of Artificial Sequence: Synthetic oligonucleotide
cagggcccaguaauaaauu

SEQ ID NO: 2320043 - RNA, 19 nt, Artificial Sequence
  Description of Artificial Sequence: Synthetic oligonucleotide
cccgguggcccuugacagc

SEQ ID NO: 2320044 - RNA, 19 nt, Artificial Sequence
  Description of Artificial Sequence: Synthetic oligonucleotide
agcgggcaaccccgcugga

SEQ ID NO: 2320045 - RNA, 19 nt, Artificial Sequence
  Description of Artificial Sequence: Synthetic oligonucleotide
cggacucuggagaggcuug

SEQ ID NO: 2320046 - RNA, 19 nt, Artificial Sequence
  Description of Artificial Sequence: Synthetic oligonucleotide
gccuaggcgcccagcgccg

SEQ ID NO: 2320047 - RNA, 19 nt, Artificial Sequence
  Description of Artificial Sequence: Synthetic oligonucleotide
ggacacguggagguggccu

SEQ ID NO: 2320048 - RNA, 19 nt, Artificial Sequence
  Description of Artificial Sequence: Synthetic oligonucleotide
ccaaacuuccugagcaaau

SEQ ID NO: 2320049 - RNA, 19 nt, Artificial Sequence
  Description of Artificial Sequence: Synthetic oligonucleotide
ccuggcccggcgcucgaag

SEQ ID NO: 2320050 - RNA, 19 nt, Artificial Sequence
  Description of Artificial Sequence: Synthetic oligonucleotide
gucagcucgaaggcgucau

SEQ ID NO: 2320051 - RNA, 19 nt, Artificial Sequence
  Description of Artificial Sequence: Synthetic oligonucleotide
gcucgaaggcgucaucgau

SEQ ID NO: 2320052 - RNA, 19 nt, Artificial Sequence
  Description of Artificial Sequence: Synthetic oligonucleotide
gccaucugagccggccuac

SEQ ID NO: 2320053 - RNA, 19 nt, Artificial Sequence
  Description of Artificial Sequence: Synthetic oligonucleotide
ggcccgaagcgggcaaccc

SEQ ID NO: 2320054 - RNA, 19 nt, Artificial Sequence
  Description of Artificial Sequence: Synthetic oligonucleotide
cccgcguccuccaggguca

SEQ ID NO: 2320055 - RNA, 19 nt, Artificial Sequence
  Description of Artificial Sequence: Synthetic oligonucleotide
cgggugccgcucauggccc

SEQ ID NO: 2320056 - RNA, 19 nt, Artificial Sequence
  Description of Artificial Sequence: Synthetic oligonucleotide
gggugccgcucauggcccc

SEQ ID NO: 2320057 - RNA, 19 nt, Artificial Sequence
  Description of Artificial Sequence: Synthetic oligonucleotide
cgccgaccaggauaagcac

SEQ ID NO: 2320058 - RNA, 19 nt, Artificial Sequence
  Description of Artificial Sequence: Synthetic oligonucleotide
gccgaccaggauaagcacu

SEQ ID NO: 2320059 - RNA, 19 nt, Artificial Sequence
  Description of Artificial Sequence: Synthetic oligonucleotide
ccgccuaggcgcccagcgc

SEQ ID NO: 2320060 - RNA, 19 nt, Artificial Sequence
  Description of Artificial Sequence: Synthetic oligonucleotide
cuggcccggcgcucgaagu

SEQ ID NO: 2320061 - RNA, 19 nt, Artificial Sequence
  Description of Artificial Sequence: Synthetic oligonucleotide
gcagcggcccgaagcgggc

SEQ ID NO: 2320062 - RNA, 19 nt, Artificial Sequence
  Description of Artificial Sequence: Synthetic oligonucleotide
agagucccagagggccuuu

SEQ ID NO: 2320063 - RNA, 19 nt, Artificial Sequence
  Description of Artificial Sequence: Synthetic oligonucleotide
gggucagcucgaaggcguc

SEQ ID NO: 2320064 - RNA, 19 nt, Artificial Sequence
  Description of Artificial Sequence: Synthetic oligonucleotide
gcgggcaaccccgcuggac

SEQ ID NO: 2320065 - RNA, 19 nt, Artificial Sequence
  Description of Artificial Sequence: Synthetic oligonucleotide
ggacuccggcccagguccc

SEQ ID NO: 2320066 - RNA, 19 nt, Artificial Sequence
  Description of Artificial Sequence: Synthetic oligonucleotide
gggucgggugccgcucaug

SEQ ID NO: 2320067 - RNA, 19 nt, Artificial Sequence
  Description of Artificial Sequence: Synthetic oligonucleotide
gccugaugcuuuggaucuc

SEQ ID NO: 2320068 - RNA, 19 nt, Artificial Sequence
  Description of Artificial Sequence: Synthetic oligonucleotide
ccuaggcgcccagcgccgc

SEQ ID NO: 2320069 - RNA, 19 nt, Artificial Sequence
  Description of Artificial Sequence: Synthetic oligonucleotide
gcgcagccgggacugcuua

SEQ ID NO: 2320070 - RNA, 19 nt, Artificial Sequence
  Description of Artificial Sequence: Synthetic oligonucleotide
cagcggcccgaagcgggca

SEQ ID NO: 2320071 - RNA, 19 nt, Artificial Sequence
  Description of Artificial Sequence: Synthetic oligonucleotide
cgggcaaccccgcuggacu

SEQ ID NO: 2320072 - RNA, 19 nt, Artificial Sequence
  Description of Artificial Sequence: Synthetic oligonucleotide
gcccaggucccgcguccuc

SEQ ID NO: 2320073 - RNA, 19 nt, Artificial Sequence
  Description of Artificial Sequence: Synthetic oligonucleotide
cggguguacauagguugga

SEQ ID NO: 2320074 - RNA, 19 nt, Artificial Sequence
  Description of Artificial Sequence: Synthetic oligonucleotide
gcggcccgaagcgggcaac

SEQ ID NO: 2320075 - RNA, 19 nt, Artificial Sequence
  Description of Artificial Sequence: Synthetic oligonucleotide
cgaaccuggcccggcgcuc

SEQ ID NO: 2320076 - RNA, 19 nt, Artificial Sequence
  Description of Artificial Sequence: Synthetic oligonucleotide
gucccacgccgaccaggau

SEQ ID NO: 2320077 - RNA, 19 nt, Artificial Sequence
  Description of Artificial Sequence: Synthetic oligonucleotide
cgaagugcagcggcccgaa

SEQ ID NO: 2320078 - RNA, 19 nt, Artificial Sequence
  Description of Artificial Sequence: Synthetic oligonucleotide
cacguggagguggccugau

SEQ ID NO: 2320079 - RNA, 19 nt, Artificial Sequence
  Description of Artificial Sequence: Synthetic oligonucleotide
cgccaucugagccggccua

SEQ ID NO: 2320080 - RNA, 19 nt, Artificial Sequence
  Description of Artificial Sequence: Synthetic oligonucleotide
ccgggacuagcagcaggaa

SEQ ID NO: 2320081 - RNA, 19 nt, Artificial Sequence
  Description of Artificial Sequence: Synthetic oligonucleotide
ccacgccgaccaggauaag

SEQ ID NO: 2320082 - RNA, 19 nt, Artificial Sequence
  Description of Artificial Sequence: Synthetic oligonucleotide
ccgcguccuccagggucag

SEQ ID NO: 2320083 - RNA, 19 nt, Artificial Sequence
  Description of Artificial Sequence: Synthetic oligonucleotide
ggagaggcuugggcuccau

SEQ ID NO: 2320084 - RNA, 19 nt, Artificial Sequence
  Description of Artificial Sequence: Synthetic oligonucleotide
ggggucgggugccgcucau

SEQ ID NO: 2320085 - RNA, 19 nt, Artificial Sequence
  Description of Artificial Sequence: Synthetic oligonucleotide
ccagaacuacccgccgguu

SEQ ID NO: 2320086 - RNA, 19 nt, Artificial Sequence
  Description of Artificial Sequence: Synthetic oligonucleotide
cgggacugcuuaucuucau

SEQ ID NO: 2320087 - RNA, 19 nt, Artificial Sequence
  Description of Artificial Sequence: Synthetic oligonucleotide
cgaagcgggcaaccccgcu

SEQ ID NO: 2320088 - RNA, 19 nt, Artificial Sequence
  Description of Artificial Sequence: Synthetic oligonucleotide
cgcccgccuaggcgcccag

SEQ ID NO: 2320089 - RNA, 19 nt, Artificial Sequence
  Description of Artificial Sequence: Synthetic oligonucleotide
cgaaggcgucaucgauacu

SEQ ID NO: 2320090 - RNA, 19 nt, Artificial Sequence
  Description of Artificial Sequence: Synthetic oligonucleotide
cgcagccgggacugcuuau

SEQ ID NO: 2320091 - RNA, 19 nt, Artificial Sequence
  Description of Artificial Sequence: Synthetic oligonucleotide
aacaggaugacacccagcg

SEQ ID NO: 2320092 - RNA, 19 nt, Artificial Sequence
  Description of Artificial Sequence: Synthetic oligonucleotide
  modified_base (10)..(10): a, c, u, g, unknown or other
aaggcaaacncuucccggg

SEQ ID NO: 2320093 - RNA, 19 nt, Artificial Sequence
  Description of Artificial Sequence: Synthetic oligonucleotide
aagccuuggccccugagcc

SEQ ID NO: 2320094 - RNA, 19 nt, Artificial Sequence
  Description of Artificial Sequence: Synthetic oligonucleotide
  modified_base (14)..(14): a, c, u, g, unknown or other
agcgaaggcaaacncuucc

SEQ ID NO: 2320095 - RNA, 19 nt, Artificial Sequence
  Description of Artificial Sequence: Synthetic oligonucleotide
ucacgaaccaccaagcgca

SEQ ID NO: 2320096 - RNA, 19 nt, Artificial Sequence
  Description of Artificial Sequence: Synthetic oligonucleotide
gaagcuaggccacagcccg

SEQ ID NO: 2320097 - RNA, 19 nt, Artificial Sequence
  Description of Artificial Sequence: Synthetic oligonucleotide
acugacaucucuuagcccu

SEQ ID NO: 2320098 - RNA, 19 nt, Artificial Sequence
  Description of Artificial Sequence: Synthetic oligonucleotide
aggaagcuaggccacagcc

SEQ ID NO: 2320099 - RNA, 19 nt, Artificial Sequence
  Description of Artificial Sequence: Synthetic oligonucleotide
gaauggacccagcagagag

SEQ ID NO: 2320100 - RNA, 19 nt, Artificial Sequence
  Description of Artificial Sequence: Synthetic oligonucleotide
ugacugacaucucuuagcc

SEQ ID NO: 2320101 - RNA, 19 nt, Artificial Sequence
  Description of Artificial Sequence: Synthetic oligonucleotide
agaacgaugccagaccucc

SEQ ID NO: 2320102 - RNA, 19 nt, Artificial Sequence
  Description of Artificial Sequence: Synthetic oligonucleotide
auuggauuuggguuggcag

SEQ ID NO: 2320103 - RNA, 19 nt, Artificial Sequence
  Description of Artificial Sequence: Synthetic oligonucleotide
  modified_base (11)..(11): a, c, u, g, unknown or other
gaaggcaaacncuucccgg

SEQ ID NO: 2320104 - RNA, 19 nt, Artificial Sequence
  Description of Artificial Sequence: Synthetic oligonucleotide
aaucagcuuacuucaaagu

SEQ ID NO: 2320105 - RNA, 19 nt, Artificial Sequence
  Description of Artificial Sequence: Synthetic oligonucleotide
ucagcuuacuucaaaguaa

SEQ ID NO: 2320106 - RNA, 19 nt, Artificial Sequence
  Description of Artificial Sequence: Synthetic oligonucleotide
accgagaacgaccaccggc

SEQ ID NO: 2320107 - RNA, 19 nt, Artificial Sequence
  Description of Artificial Sequence: Synthetic oligonucleotide
cauaggaccgagaacgacc

SEQ ID NO: 2320108 - RNA, 19 nt, Artificial Sequence
  Description of Artificial Sequence: Synthetic oligonucleotide
uguagcugggcgaaggaug

SEQ ID NO: 2320109 - RNA, 19 nt, Artificial Sequence
  Description of Artificial Sequence: Synthetic oligonucleotide
  modified_base (5)..(5): a, c, u, g, unknown or other
aaacncuucccgggcaucc

SEQ ID NO: 2320110 - RNA, 19 nt, Artificial Sequence
  Description of Artificial Sequence: Synthetic oligonucleotide
cuagaaucagcuuacuuca

SEQ ID NO: 2320111 - RNA, 19 nt, Artificial Sequence
  Description of Artificial Sequence: Synthetic oligonucleotide
cuggguaugagucccaccc

SEQ ID NO: 2320112 - RNA, 19 nt, Artificial Sequence
  Description of Artificial Sequence: Synthetic oligonucleotide
ucucuuagcccuagaauca

SEQ ID NO: 2320113 - RNA, 19 nt, Artificial Sequence
  Description of Artificial Sequence: Synthetic oligonucleotide
gcacauaggaccgagaacg

SEQ ID NO: 2320114 - RNA, 19 nt, Artificial Sequence
  Description of Artificial Sequence: Synthetic oligonucleotide
acuucaaaguaaaauccac

SEQ ID NO: 2320115 - RNA, 19 nt, Artificial Sequence
  Description of Artificial Sequence: Synthetic oligonucleotide
aacucacgaaccaccaagc

SEQ ID NO: 2320116 - RNA, 19 nt, Artificial Sequence
  Description of Artificial Sequence: Synthetic oligonucleotide
accggcaaagcgcacagcg

SEQ ID NO: 2320117 - RNA, 19 nt, Artificial Sequence
  Description of Artificial Sequence: Synthetic oligonucleotide
aacccaguggggcagguug

SEQ ID NO: 2320118 - RNA, 19 nt, Artificial Sequence
  Description of Artificial Sequence: Synthetic oligonucleotide
aacgaugccagaccuccag

SEQ ID NO: 2320119 - RNA, 19 nt, Artificial Sequence
  Description of Artificial Sequence: Synthetic oligonucleotide
aagcgcagguaguggaagc

SEQ ID NO: 2320120 - RNA, 19 nt, Artificial Sequence
  Description of Artificial Sequence: Synthetic oligonucleotide
gguggcagaacccaguggg

SEQ ID NO: 2320121 - RNA, 19 nt, Artificial Sequence
  Description of Artificial Sequence: Synthetic oligonucleotide
aacgaccaccggcaaagcg

SEQ ID NO: 2320122 - RNA, 19 nt, Artificial Sequence
  Description of Artificial Sequence: Synthetic oligonucleotide
uuggcagacaagguguugg

SEQ ID NO: 2320123 - RNA, 19 nt, Artificial Sequence
  Description of Artificial Sequence: Synthetic oligonucleotide
uucgagauuggauuugggu

SEQ ID NO: 2320124 - RNA, 19 nt, Artificial Sequence
  Description of Artificial Sequence: Synthetic oligonucleotide
uggguuggcagacaaggug

SEQ ID NO: 2320125 - RNA, 19 nt, Artificial Sequence
  Description of Artificial Sequence: Synthetic oligonucleotide
ucgagauuggauuuggguu

SEQ ID NO: 2320126 - RNA, 19 nt, Artificial Sequence
  Description of Artificial Sequence: Synthetic oligonucleotide
agagcuagaacgaugccag

SEQ ID NO: 2320127 - RNA, 19 nt, Artificial Sequence
  Description of Artificial Sequence: Synthetic oligonucleotide
caacucacgaaccaccaag

SEQ ID NO: 2320128 - RNA, 19 nt, Artificial Sequence
  Description of Artificial Sequence: Synthetic oligonucleotide
uuggauuuggguuggcaga

SEQ ID NO: 2320129 - RNA, 19 nt, Artificial Sequence
  Description of Artificial Sequence: Synthetic oligonucleotide
aaccaccaagcgcagguag

SEQ ID NO: 2320130 - RNA, 19 nt, Artificial Sequence
  Description of Artificial Sequence: Synthetic oligonucleotide
agaacgaccaccggcaaag

SEQ ID NO: 2320131 - RNA, 19 nt, Artificial Sequence
  Description of Artificial Sequence: Synthetic oligonucleotide
agcacauaggaccgagaac

SEQ ID NO: 2320132 - RNA, 19 nt, Artificial Sequence
  Description of Artificial Sequence: Synthetic oligonucleotide
aggaccgagaacgaccacc

SEQ ID NO: 2320133 - RNA, 19 nt, Artificial Sequence
  Description of Artificial Sequence: Synthetic oligonucleotide
aucagcuuacuucaaagua

SEQ ID NO: 2320134 - RNA, 19 nt, Artificial Sequence
  Description of Artificial Sequence: Synthetic oligonucleotide
cucacgaaccaccaagcgc

SEQ ID NO: 2320135 - RNA, 19 nt, Artificial Sequence
  Description of Artificial Sequence: Synthetic oligonucleotide
ucggcugccagcacauagg

SEQ ID NO: 2320136 - RNA, 19 nt, Artificial Sequence
  Description of Artificial Sequence: Synthetic oligonucleotide
ccuagaaucagcuuacuuc

SEQ ID NO: 2320137 - RNA, 19 nt, Artificial Sequence
  Description of Artificial Sequence: Synthetic oligonucleotide
acgaccaccggcaaagcgc

SEQ ID NO: 2320138 - RNA, 19 nt, Artificial Sequence
  Description of Artificial Sequence: Synthetic oligonucleotide
ucauguagcugggcgaagg

SEQ ID NO: 2320139 - RNA, 19 nt, Artificial Sequence
  Description of Artificial Sequence: Synthetic oligonucleotide
  modified_base (9)..(9): a, c, u, g, unknown or other
aggcaaacncuucccgggc

SEQ ID NO: 2320140 - RNA, 19 nt, Artificial Sequence
  Description of Artificial Sequence: Synthetic oligonucleotide
uagcccuagaaucagcuua

SEQ ID NO: 2320141 - RNA, 19 nt, Artificial Sequence
  Description of Artificial Sequence: Synthetic oligonucleotide
agcuagaacgaugccagac

SEQ ID NO: 2320142 - RNA, 19 nt, Artificial Sequence
  Description of Artificial Sequence: Synthetic oligonucleotide
gagccuucgaggaagcuag

SEQ ID NO: 2320143 - RNA, 19 nt, Artificial Sequence
  Description of Artificial Sequence: Synthetic oligonucleotide
gugagaauggacccagcag

SEQ ID NO: 2320144 - RNA, 19 nt, Artificial Sequence
  Description of Artificial Sequence: Synthetic oligonucleotide
guaugagucccacccagag

SEQ ID NO: 2320145 - RNA, 19 nt, Artificial Sequence
  Description of Artificial Sequence: Synthetic oligonucleotide
uaugagucccacccagagc

SEQ ID NO: 2320146 - RNA, 19 nt, Artificial Sequence
  Description of Artificial Sequence: Synthetic oligonucleotide
acucacgaaccaccaagcg

SEQ ID NO: 2320147 - RNA, 19 nt, Artificial Sequence
  Description of Artificial Sequence: Synthetic oligonucleotide
accagcuccaccgugcaac

SEQ ID NO: 2320148 - RNA, 19 nt, Artificial Sequence
  Description of Artificial Sequence: Synthetic oligonucleotide
gaagagagccagcacugug

SEQ ID NO: 2320149 - RNA, 19 nt, Artificial Sequence
  Description of Artificial Sequence: Synthetic oligonucleotide
aauggacccagcagagagg

SEQ ID NO: 2320150 - RNA, 19 nt, Artificial Sequence
  Description of Artificial Sequence: Synthetic oligonucleotide
auggacccagcagagaggg

SEQ ID NO: 2320151 - RNA, 19 nt, Artificial Sequence
  Description of Artificial Sequence: Synthetic oligonucleotide
cuucgaggaagcuaggcca

SEQ ID NO: 2320152 - RNA, 19 nt, Artificial Sequence
  Description of Artificial Sequence: Synthetic oligonucleotide
agcacuguggugagaaugg

SEQ ID NO: 2320153 - RNA, 19 nt, Artificial Sequence
  Description of Artificial Sequence: Synthetic oligonucleotide
ugucccacccaacacugga

SEQ ID NO: 2320154 - RNA, 19 nt, Artificial Sequence
  Description of Artificial Sequence: Synthetic oligonucleotide
gaugccagaccuccaggcc

SEQ ID NO: 2320155 - RNA, 19 nt, Artificial Sequence
  Description of Artificial Sequence: Synthetic oligonucleotide
ucggguucgagauuggauu

SEQ ID NO: 2320156 - RNA, 19 nt, Artificial Sequence
  Description of Artificial Sequence: Synthetic oligonucleotide
aaagcgcacagcgaaggca

SEQ ID NO: 2320157 - RNA, 19 nt, Artificial Sequence
  Description of Artificial Sequence: Synthetic oligonucleotide
cuaucuggguggcagggag

SEQ ID NO: 2320158 - RNA, 19 nt, Artificial Sequence
  Description of Artificial Sequence: Synthetic oligonucleotide
ugggcgaaggaugccaagg

SEQ ID NO: 2320159 - RNA, 19 nt, Artificial Sequence
  Description of Artificial Sequence: Synthetic oligonucleotide
ucacccaucccuccagggc

SEQ ID NO: 2320160 - RNA, 19 nt, Artificial Sequence
  Description of Artificial Sequence: Synthetic oligonucleotide
cuguggugagaauggaccc

SEQ ID NO: 2320161 - RNA, 19 nt, Artificial Sequence
  Description of Artificial Sequence: Synthetic oligonucleotide
ugcuccaacucacgaacca

SEQ ID NO: 2320162 - RNA, 19 nt, Artificial Sequence
  Description of Artificial Sequence: Synthetic oligonucleotide
agguugucccacccaacac

SEQ ID NO: 2320163 - RNA, 19 nt, Artificial Sequence
  Description of Artificial Sequence: Synthetic oligonucleotide
agaaucagcuuacuucaaa

SEQ ID NO: 2320164 - RNA, 19 nt, Artificial Sequence
  Description of Artificial Sequence: Synthetic oligonucleotide
cauggaaucaguggaggug

SEQ ID NO: 2320165 - RNA, 19 nt, Artificial Sequence
  Description of Artificial Sequence: Synthetic oligonucleotide
caacccuccaacaggauga

SEQ ID NO: 2320166 - RNA, 19 nt, Artificial Sequence
  Description of Artificial Sequence: Synthetic oligonucleotide
guuggcagggcuucccucc

SEQ ID NO: 2320167 - RNA, 19 nt, Artificial Sequence
  Description of Artificial Sequence: Synthetic oligonucleotide
cugccagcacauaggaccg

SEQ ID NO: 2320168 - RNA, 19 nt, Artificial Sequence
  Description of Artificial Sequence: Synthetic oligonucleotide
ucgccuccgacucaaagua

SEQ ID NO: 2320169 - RNA, 19 nt, Artificial Sequence
  Description of Artificial Sequence: Synthetic oligonucleotide
acaucucuuagcccuagaa

SEQ ID NO: 2320170 - RNA, 19 nt, Artificial Sequence
  Description of Artificial Sequence: Synthetic oligonucleotide
ugcucauguagcugggcga

SEQ ID NO: 2320171 - RNA, 19 nt, Artificial Sequence
  Description of Artificial Sequence: Synthetic oligonucleotide
uucgaggaagcuaggccac

SEQ ID NO: 2320172 - RNA, 19 nt, Artificial Sequence
  Description of Artificial Sequence: Synthetic oligonucleotide
ugcccggccauucuccuug

SEQ ID NO: 2320173 - RNA, 19 nt, Artificial Sequence
  Description of Artificial Sequence: Synthetic oligonucleotide
acauaggaccgagaacgac

SEQ ID NO: 2320174 - RNA, 19 nt, Artificial Sequence
  Description of Artificial Sequence: Synthetic oligonucleotide
  modified_base (16)..(16): a, c, u, g, unknown or other
acagcgaaggcaaacncuu

SEQ ID NO: 2320175 - RNA, 19 nt, Artificial Sequence
  Description of Artificial Sequence: Synthetic oligonucleotide
gcuggcucgagacagggcc

SEQ ID NO: 2320176 - RNA, 19 nt, Artificial Sequence
  Description of Artificial Sequence: Synthetic oligonucleotide
  modified_base (3)..(3): a, c, u, g, unknown or other
acncuucccgggcauccac

SEQ ID NO: 2320177 - RNA, 19 nt, Artificial Sequence
  Description of Artificial Sequence: Synthetic oligonucleotide
gauuuggguuggcagacaa

SEQ ID NO: 2320178 - RNA, 19 nt, Artificial Sequence
  Description of Artificial Sequence: Synthetic oligonucleotide
ugggucucggguucgagau

SEQ ID NO: 2320179 - RNA, 19 nt, Artificial Sequence
  Description of Artificial Sequence: Synthetic oligonucleotide
aucaguggaggugucuguc

SEQ ID NO: 2320180 - RNA, 19 nt, Artificial Sequence
  Description of Artificial Sequence: Synthetic oligonucleotide
ucgagacagggccuucacc

SEQ ID NO: 2320181 - RNA, 19 nt, Artificial Sequence
  Description of Artificial Sequence: Synthetic oligonucleotide
agcccuagaaucagcuuac

SEQ ID NO: 2320182 - RNA, 19 nt, Artificial Sequence
  Description of Artificial Sequence: Synthetic oligonucleotide
gcuagaacgaugccagacc

SEQ ID NO: 2320183 - RNA, 19 nt, Artificial Sequence
  Description of Artificial Sequence: Synthetic oligonucleotide
auacugcccggccauucuc

SEQ ID NO: 2320184 - RNA, 19 nt, Artificial Sequence
  Description of Artificial Sequence: Synthetic oligonucleotide
uacugcccggccauucucc

SEQ ID NO: 2320185 - RNA, 19 nt, Artificial Sequence
  Description of Artificial Sequence: Synthetic oligonucleotide
uggauuuggguuggcagac

SEQ ID NO: 2320186 - RNA, 19 nt, Artificial Sequence
  Description of Artificial Sequence: Synthetic oligonucleotide
gucggcugccagcacauag

SEQ ID NO: 2320187 - RNA, 19 nt, Artificial Sequence
  Description of Artificial Sequence: Synthetic oligonucleotide
uguggugagaauggaccca

SEQ ID NO: 2320188 - RNA, 19 nt, Artificial Sequence
  Description of Artificial Sequence: Synthetic oligonucleotide
aauccacagacaagccuug

SEQ ID NO: 2320189 - RNA, 19 nt, Artificial Sequence
  Description of Artificial Sequence: Synthetic oligonucleotide
cuccaacaggaugacaccc

SEQ ID NO: 2320190 - RNA, 19 nt, Artificial Sequence
  Description of Artificial Sequence: Synthetic oligonucleotide
acgaugccagaccuccagg

SEQ ID NO: 2320191 - RNA, 19 nt, Artificial Sequence
  Description of Artificial Sequence: Synthetic oligonucleotide
agcggugggcgcuucgggg

SEQ ID NO: 2320192 - RNA, 19 nt, Artificial Sequence
  Description of Artificial Sequence: Synthetic oligonucleotide
uguucgggcagcgcgcucc

SEQ ID NO: 2320193 - RNA, 19 nt, Artificial Sequence
  Description of Artificial Sequence: Synthetic oligonucleotide
cccagagcuagaacgaugc

SEQ ID NO: 2320194 - RNA, 19 nt, Artificial Sequence
  Description of Artificial Sequence: Synthetic oligonucleotide
uuggguuggcagacaaggu

SEQ ID NO: 2320195 - RNA, 19 nt, Artificial Sequence
  Description of Artificial Sequence: Synthetic oligonucleotide
ggaagcuggcucgagacag

SEQ ID NO: 2320196 - RNA, 19 nt, Artificial Sequence
  Description of Artificial Sequence: Synthetic oligonucleotide
guagcugggcgaaggaugc

SEQ ID NO: 2320197 - RNA, 19 nt, Artificial Sequence
  Description of Artificial Sequence: Synthetic oligonucleotide
cccuccaacaggaugacac

SEQ ID NO: 2320198 - RNA, 19 nt, Artificial Sequence
  Description of Artificial Sequence: Synthetic oligonucleotide
ugguccuggguaugagucc

SEQ ID NO: 2320199 - RNA, 19 nt, Artificial Sequence
  Description of Artificial Sequence: Synthetic oligonucleotide
aacccuccaacaggaugac

SEQ ID NO: 2320200 - RNA, 19 nt, Artificial Sequence
  Description of Artificial Sequence: Synthetic oligonucleotide
guugucccacccaacacug

SEQ ID NO: 2320201 - RNA, 19 nt, Artificial Sequence
  Description of Artificial Sequence: Synthetic oligonucleotide
ugucugucuccuccaggug

SEQ ID NO: 2320202 - RNA, 19 nt, Artificial Sequence
  Description of Artificial Sequence: Synthetic oligonucleotide
uggaagcuggcucgagaca

SEQ ID NO: 2320203 - RNA, 19 nt, Artificial Sequence
  Description of Artificial Sequence: Synthetic oligonucleotide
agcuccaccgugcaacccu

SEQ ID NO: 2320204 - RNA, 19 nt, Artificial Sequence
  Description of Artificial Sequence: Synthetic oligonucleotide
uggcagaacccaguggggc

SEQ ID NO: 2320205 - RNA, 19 nt, Artificial Sequence
  Description of Artificial Sequence: Synthetic oligonucleotide
ugucuccuccaggugagcc

SEQ ID NO: 2320206 - RNA, 19 nt, Artificial Sequence
  Description of Artificial Sequence: Synthetic oligonucleotide
agacaagguguuggcaggg

SEQ ID NO: 2320207 - RNA, 19 nt, Artificial Sequence
  Description of Artificial Sequence: Synthetic oligonucleotide
ucguacccuguccaugacu

SEQ ID NO: 2320208 - RNA, 19 nt, Artificial Sequence
  Description of Artificial Sequence: Synthetic oligonucleotide
uagaaucagcuuacuucaa

SEQ ID NO: 2320209 - RNA, 19 nt, Artificial Sequence
  Description of Artificial Sequence: Synthetic oligonucleotide
cuggcugucggcugccagc

SEQ ID NO: 2320210 - RNA, 19 nt, Artificial Sequence
  Description of Artificial Sequence: Synthetic oligonucleotide
caaagcgcacagcgaaggc

SEQ ID NO: 2320211 - RNA, 19 nt, Artificial Sequence
  Description of Artificial Sequence: Synthetic oligonucleotide
uacccuguccaugacugac

SEQ ID NO: 2320212 - RNA, 19 nt, Artificial Sequence
  Description of Artificial Sequence: Synthetic oligonucleotide
gauuggauuuggguuggca

SEQ ID NO: 2320213 - RNA, 19 nt, Artificial Sequence
  Description of Artificial Sequence: Synthetic oligonucleotide
caccgugcaacccuccaac

SEQ ID NO: 2320214 - RNA, 19 nt, Artificial Sequence
  Description of Artificial Sequence: Synthetic oligonucleotide
ugagccuucgaggaagcua

SEQ ID NO: 2320215 - RNA, 19 nt, Artificial Sequence
  Description of Artificial Sequence: Synthetic oligonucleotide
ugggugcagaggcccuucg

SEQ ID NO: 2320216 - RNA, 19 nt, Artificial Sequence
  Description of Artificial Sequence: Synthetic oligonucleotide
gguucgagauuggauuugg

SEQ ID NO: 2320217 - RNA, 19 nt, Artificial Sequence
  Description of Artificial Sequence: Synthetic oligonucleotide
cagcuuacuucaaaguaaa

SEQ ID NO: 2320218 - RNA, 19 nt, Artificial Sequence
  Description of Artificial Sequence: Synthetic oligonucleotide
uagaacgaugccagaccuc

SEQ ID NO: 2320219 - RNA, 19 nt, Artificial Sequence
  Description of Artificial Sequence: Synthetic oligonucleotide
ccuucgaggaagcuaggcc

SEQ ID NO: 2320220 - RNA, 19 nt, Artificial Sequence
  Description of Artificial Sequence: Synthetic oligonucleotide
cucuuagcccuagaaucag

SEQ ID NO: 2320221 - RNA, 19 nt, Artificial Sequence
  Description of Artificial Sequence: Synthetic oligonucleotide
ggaccgagaacgaccaccg

SEQ ID NO: 2320222 - RNA, 19 nt, Artificial Sequence
  Description of Artificial Sequence: Synthetic oligonucleotide
gcaaagcgcacagcgaagg

SEQ ID NO: 2320223 - RNA, 19 nt, Artificial Sequence
  Description of Artificial Sequence: Synthetic oligonucleotide
cuuagcccuagaaucagcu

SEQ ID NO: 2320224 - RNA, 19 nt, Artificial Sequence
  Description of Artificial Sequence: Synthetic oligonucleotide
auucuccuugggucucggg

SEQ ID NO: 2320225 - RNA, 19 nt, Artificial Sequence
  Description of Artificial Sequence: Synthetic oligonucleotide
uguugggugcagaggcccu

SEQ ID NO: 2320226 - RNA, 19 nt, Artificial Sequence
  Description of Artificial Sequence: Synthetic oligonucleotide
uaggccacagcccgggauu

SEQ ID NO: 2320227 - RNA, 19 nt, Artificial Sequence
  Description of Artificial Sequence: Synthetic oligonucleotide
cagagcuagaacgaugcca

SEQ ID NO: 2320228 - RNA, 19 nt, Artificial Sequence
  Description of Artificial Sequence: Synthetic oligonucleotide
gcaacccuccaacaggaug

SEQ ID NO: 2320229 - RNA, 19 nt, Artificial Sequence
  Description of Artificial Sequence: Synthetic oligonucleotide
uuagcccuagaaucagcuu

SEQ ID NO: 2320230 - RNA, 19 nt, Artificial Sequence
  Description of Artificial Sequence: Synthetic oligonucleotide
guucgagauuggauuuggg

SEQ ID NO: 2320231 - RNA, 19 nt, Artificial Sequence
  Description of Artificial Sequence: Synthetic oligonucleotide
gagucccacccagagcuag

SEQ ID NO: 2320232 - RNA, 19 nt, Artificial Sequence
  Description of Artificial Sequence: Synthetic oligonucleotide
cuccgacucaaaguagaag

SEQ ID NO: 2320233 - RNA, 19 nt, Artificial Sequence
  Description of Artificial Sequence: Synthetic oligonucleotide
caagcgcagguaguggaag

SEQ ID NO: 2320234 - RNA, 19 nt, Artificial Sequence
  Description of Artificial Sequence: Synthetic oligonucleotide
  modified_base (4)..(4): a, c, u, g, unknown or other
aacncuucccgggcaucca

SEQ ID NO: 2320235 - RNA, 19 nt, Artificial Sequence
  Description of Artificial Sequence: Synthetic oligonucleotide
  modified_base (2)..(2): a, c, u, g, unknown or other
cncuucccgggcauccacc

SEQ ID NO: 2320236 - RNA, 19 nt, Artificial Sequence
  Description of Artificial Sequence: Synthetic oligonucleotide
acgccacuggcuccugagg

SEQ ID NO: 2320237 - RNA, 19 nt, Artificial Sequence
  Description of Artificial Sequence: Synthetic oligonucleotide
agcuaggccacagcccggg

SEQ ID NO: 2320238 - RNA, 19 nt, Artificial Sequence
  Description of Artificial Sequence: Synthetic oligonucleotide
gcgaaggaugccaagggcc

SEQ ID NO: 2320239 - RNA, 19 nt, Artificial Sequence
  Description of Artificial Sequence: Synthetic oligonucleotide
ccgacucaaaguagaagag

SEQ ID NO: 2320240 - RNA, 19 nt, Artificial Sequence
  Description of Artificial Sequence: Synthetic oligonucleotide
cacgccacuggcuccugag

SEQ ID NO: 2320241 - RNA, 19 nt, Artificial Sequence
  Description of Artificial Sequence: Synthetic oligonucleotide
cuagaacgaugccagaccu

SEQ ID NO: 2320242 - RNA, 19 nt, Artificial Sequence
  Description of Artificial Sequence: Synthetic oligonucleotide
aggcccuucgacggggugg

SEQ ID NO: 2320243 - RNA, 19 nt, Artificial Sequence
  Description of Artificial Sequence: Synthetic oligonucleotide
cagguugucccacccaaca

SEQ ID NO: 2320244 - RNA, 19 nt, Artificial Sequence
  Description of Artificial Sequence: Synthetic oligonucleotide
uguuggcagggcuucccuc

SEQ ID NO: 2320245 - RNA, 19 nt, Artificial Sequence
  Description of Artificial Sequence: Synthetic oligonucleotide
cgugcaacccuccaacagg

SEQ ID NO: 2320246 - RNA, 19 nt, Artificial Sequence
  Description of Artificial Sequence: Synthetic oligonucleotide
gacacccagcggcucucgg

SEQ ID NO: 2320247 - RNA, 19 nt, Artificial Sequence
  Description of Artificial Sequence: Synthetic oligonucleotide
ggcagcgcgcuccauacug

SEQ ID NO: 2320248 - RNA, 19 nt, Artificial Sequence
  Description of Artificial Sequence: Synthetic oligonucleotide
auuuggguuggcagacaag

SEQ ID NO: 2320249 - RNA, 19 nt, Artificial Sequence
  Description of Artificial Sequence: Synthetic oligonucleotide
gacaagguguuggcagggc

SEQ ID NO: 2320250 - RNA, 19 nt, Artificial Sequence
  Description of Artificial Sequence: Synthetic oligonucleotide
gaccgagaacgaccaccgg

SEQ ID NO: 2320251 - RNA, 19 nt, Artificial Sequence
  Description of Artificial Sequence: Synthetic oligonucleotide
ggcgaaggaugccaagggc

SEQ ID NO: 2320252 - RNA, 19 nt, Artificial Sequence
  Description of Artificial Sequence: Synthetic oligonucleotide
cguacccuguccaugacug

SEQ ID NO: 2320253 - RNA, 19 nt, Artificial Sequence
  Description of Artificial Sequence: Synthetic oligonucleotide
cucggcucgccuccgacuc

SEQ ID NO: 2320254 - RNA, 19 nt, Artificial Sequence
  Description of Artificial Sequence: Synthetic oligonucleotide
cuucgacggggugggagcg

SEQ ID NO: 2320255 - RNA, 19 nt, Artificial Sequence
  Description of Artificial Sequence: Synthetic oligonucleotide
gcgcgcuccauacugcccg

SEQ ID NO: 2320256 - RNA, 19 nt, Artificial Sequence
  Description of Artificial Sequence: Synthetic oligonucleotide
ucucggcucgccuccgacu

SEQ ID NO: 2320257 - RNA, 19 nt, Artificial Sequence
  Description of Artificial Sequence: Synthetic oligonucleotide
ggaagcuaggccacagccc

SEQ ID NO: 2320258 - RNA, 19 nt, Artificial Sequence
  Description of Artificial Sequence: Synthetic oligonucleotide
ucucggguucgagauugga

SEQ ID NO: 2320259 - RNA, 19 nt, Artificial Sequence
  Description of Artificial Sequence: Synthetic oligonucleotide
agaauggacccagcagaga

SEQ ID NO: 2320260 - RNA, 19 nt, Artificial Sequence
  Description of Artificial Sequence: Synthetic oligonucleotide
accgugcaacccuccaaca

SEQ ID NO: 2320261 - RNA, 19 nt, Artificial Sequence
  Description of Artificial Sequence: Synthetic oligonucleotide
cagcgcgcuccauacugcc

SEQ ID NO: 2320262 - RNA, 19 nt, Artificial Sequence
  Description of Artificial Sequence: Synthetic oligonucleotide
cucgagacagggccuucac

SEQ ID NO: 2320263 - RNA, 19 nt, Artificial Sequence
  Description of Artificial Sequence: Synthetic oligonucleotide
caccaagcgcagguagugg

SEQ ID NO: 2320264 - RNA, 19 nt, Artificial Sequence
  Description of Artificial Sequence: Synthetic oligonucleotide
aagcuaggccacagcccgg

SEQ ID NO: 2320265 - RNA, 19 nt, Artificial Sequence
  Description of Artificial Sequence: Synthetic oligonucleotide
guuggcagacaagguguug

SEQ ID NO: 2320266 - RNA, 19 nt, Artificial Sequence
  Description of Artificial Sequence: Synthetic oligonucleotide
augacacccagcggcucuc

SEQ ID NO: 2320267 - RNA, 19 nt, Artificial Sequence
  Description of Artificial Sequence: Synthetic oligonucleotide
agcgcgcuccauacugccc

SEQ ID NO: 2320268 - RNA, 19 nt, Artificial Sequence
  Description of Artificial Sequence: Synthetic oligonucleotide
agcugggcgaaggaugcca

SEQ ID NO: 2320269 - RNA, 19 nt, Artificial Sequence
  Description of Artificial Sequence: Synthetic oligonucleotide
gacccagcagagagggccc

SEQ ID NO: 2320270 - RNA, 19 nt, Artificial Sequence
  Description of Artificial Sequence: Synthetic oligonucleotide
cacauaggaccgagaacga

SEQ ID NO: 2320271 - RNA, 19 nt, Artificial Sequence
  Description of Artificial Sequence: Synthetic oligonucleotide
cugggcgaaggaugccaag

SEQ ID NO: 2320272 - RNA, 19 nt, Artificial Sequence
  Description of Artificial Sequence: Synthetic oligonucleotide
gacaucucuuagcccuaga

SEQ ID NO: 2320273 - RNA, 19 nt, Artificial Sequence
  Description of Artificial Sequence: Synthetic oligonucleotide
  modified_base (17)..(17): a, c, u, g, unknown or other
cacagcgaaggcaaacncu

SEQ ID NO: 2320274 - RNA, 19 nt, Artificial Sequence
  Description of Artificial Sequence: Synthetic oligonucleotide
cacgaaccaccaagcgcag

SEQ ID NO: 2320275 - RNA, 19 nt, Artificial Sequence
  Description of Artificial Sequence: Synthetic oligonucleotide
ugacacccagcggcucucg

SEQ ID NO: 2320276 - RNA, 19 nt, Artificial Sequence
  Description of Artificial Sequence: Synthetic oligonucleotide
caucucuuagcccuagaau

SEQ ID NO: 2320277 - RNA, 19 nt, Artificial Sequence
  Description of Artificial Sequence: Synthetic oligonucleotide
uucgacggggugggagcgg

SEQ ID NO: 2320278 - RNA, 19 nt, Artificial Sequence
  Description of Artificial Sequence: Synthetic oligonucleotide
ucgggcagcgcgcuccaua

SEQ ID NO: 2320279 - RNA, 19 nt, Artificial Sequence
  Description of Artificial Sequence: Synthetic oligonucleotide
ccuucgacggggugggagc

SEQ ID NO: 2320280 - RNA, 19 nt, Artificial Sequence
  Description of Artificial Sequence: Synthetic oligonucleotide
ugccaagggccuguugggu

SEQ ID NO: 2320281 - RNA, 19 nt, Artificial Sequence
  Description of Artificial Sequence: Synthetic oligonucleotide
  modified_base (15)..(15): a, c, u, g, unknown or other
cagcgaaggcaaacncuuc

SEQ ID NO: 2320282 - RNA, 19 nt, Artificial Sequence
  Description of Artificial Sequence: Synthetic oligonucleotide
  modified_base (18)..(18): a, c, u, g, unknown or other
gcacagcgaaggcaaacnc

SEQ ID NO: 2320283 - RNA, 19 nt, Artificial Sequence
  Description of Artificial Sequence: Synthetic oligonucleotide
agagggcccacuggcuauc

SEQ ID NO: 2320284 - RNA, 19 nt, Artificial Sequence
  Description of Artificial Sequence: Synthetic oligonucleotide
gguugucccacccaacacu

SEQ ID NO: 2320285 - RNA, 19 nt, Artificial Sequence
  Description of Artificial Sequence: Synthetic oligonucleotide
  modified_base (13)..(13): a, c, u, g, unknown or other
gcgaaggcaaacncuuccc

SEQ ID NO: 2320286 - RNA, 19 nt, Artificial Sequence
  Description of Artificial Sequence: Synthetic oligonucleotide
acgaaccaccaagcgcagg

SEQ ID NO: 2320287 - RNA, 19 nt, Artificial Sequence
  Description of Artificial Sequence: Synthetic oligonucleotide
uccuggguaugagucccac

SEQ ID NO: 2320288 - RNA, 19 nt, Artificial Sequence
  Description of Artificial Sequence: Synthetic oligonucleotide
ugcaacccuccaacaggau

SEQ ID NO: 2320289 - RNA, 19 nt, Artificial Sequence
  Description of Artificial Sequence: Synthetic oligonucleotide
gccaagggccuguugggug

SEQ ID NO: 2320290 - RNA, 19 nt, Artificial Sequence
  Description of Artificial Sequence: Synthetic oligonucleotide
gguuguucgggcagcgcgc

SEQ ID NO: 2320291 - RNA, 19 nt, Artificial Sequence
  Description of Artificial Sequence: Synthetic oligonucleotide
ucgaggaagcuaggccaca

SEQ ID NO: 2320292 - RNA, 19 nt, Artificial Sequence
  Description of Artificial Sequence: Synthetic oligonucleotide
cucgccuccgacucaaagu

SEQ ID NO: 2320293 - RNA, 19 nt, Artificial Sequence
  Description of Artificial Sequence: Synthetic oligonucleotide
gggccuguugggugcagag

SEQ ID NO: 2320294 - RNA, 19 nt, Artificial Sequence
  Description of Artificial Sequence: Synthetic oligonucleotide
  modified_base (6)..(6): a, c, u, g, unknown or other
caaacncuucccgggcauc

SEQ ID NO: 2320295 - RNA, 19 nt, Artificial Sequence
  Description of Artificial Sequence: Synthetic oligonucleotide
uucggggcugcaguggguu

SEQ ID NO: 2320296 - RNA, 19 nt, Artificial Sequence
  Description of Artificial Sequence: Synthetic oligonucleotide
agccuuggccccugagcca

SEQ ID NO: 2320297 - RNA, 19 nt, Artificial Sequence
  Description of Artificial Sequence: Synthetic oligonucleotide
ggcagaacccaguggggca

SEQ ID NO: 2320298 - RNA, 19 nt, Artificial Sequence
  Description of Artificial Sequence: Synthetic oligonucleotide
gaacgaccaccggcaaagc

SEQ ID NO: 2320299 - RNA, 19 nt, Artificial Sequence
  Description of Artificial Sequence: Synthetic oligonucleotide
ggcccacuggcuaucuggg

SEQ ID NO: 2320300 - RNA, 19 nt, Artificial Sequence
  Description of Artificial Sequence: Synthetic oligonucleotide
cgacucaaaguagaagagc

SEQ ID NO: 2320301 - RNA, 19 nt, Artificial Sequence
  Description of Artificial Sequence: Synthetic oligonucleotide
ccgagaacgaccaccggca

SEQ ID NO: 2320302 - RNA, 19 nt, Artificial Sequence
  Description of Artificial Sequence: Synthetic oligonucleotide
  modified_base (8)..(8): a, c, u, g, unknown or other
ggcaaacncuucccgggca

SEQ ID NO: 2320303 - RNA, 19 nt, Artificial Sequence
  Description of Artificial Sequence: Synthetic oligonucleotide
gcucgccuccgacucaaag

SEQ ID NO: 2320304 - RNA, 19 nt, Artificial Sequence
  Description of Artificial Sequence: Synthetic oligonucleotide
ugagucccacccagagcua

SEQ ID NO: 2320305 - RNA, 19 nt, Artificial Sequence
  Description of Artificial Sequence: Synthetic oligonucleotide
uggguuguucgggcagcgc

SEQ ID NO: 2320306 - RNA, 19 nt, Artificial Sequence
  Description of Artificial Sequence: Synthetic oligonucleotide
ggccagcuaggccagccug

SEQ ID NO: 2320307 - RNA, 19 nt, Artificial Sequence
  Description of Artificial Sequence: Synthetic oligonucleotide
gaggcccuucgacggggug

SEQ ID NO: 2320308 - RNA, 19 nt, Artificial Sequence
  Description of Artificial Sequence: Synthetic oligonucleotide
ucgacggggugggagcggu

SEQ ID NO: 2320309 - RNA, 19 nt, Artificial Sequence
  Description of Artificial Sequence: Synthetic oligonucleotide
ggcaaagcgcacagcgaag

SEQ ID NO: 2320310 - RNA, 19 nt, Artificial Sequence
  Description of Artificial Sequence: Synthetic oligonucleotide
ccgugcaacccuccaacag

SEQ ID NO: 2320311 - RNA, 19 nt, Artificial Sequence
  Description of Artificial Sequence: Synthetic oligonucleotide
gccacuggcuccugagggc

SEQ ID NO: 2320312 - RNA, 19 nt, Artificial Sequence
  Description of Artificial Sequence: Synthetic oligonucleotide
ucggcucgccuccgacuca

SEQ ID NO: 2320313 - RNA, 19 nt, Artificial Sequence
  Description of Artificial Sequence: Synthetic oligonucleotide
cucguacccuguccaugac

SEQ ID NO: 2320314 - RNA, 19 nt, Artificial Sequence
  Description of Artificial Sequence: Synthetic oligonucleotide
cuccaccgugcaacccucc

SEQ ID NO: 2320315 - RNA, 19 nt, Artificial Sequence
  Description of Artificial Sequence: Synthetic oligonucleotide
ccgcauggcugccagcugc

SEQ ID NO: 2320316 - RNA, 19 nt, Artificial Sequence
  Description of Artificial Sequence: Synthetic oligonucleotide
cacccaucccuccagggcu

SEQ ID NO: 2320317 - RNA, 19 nt, Artificial Sequence
  Description of Artificial Sequence: Synthetic oligonucleotide
guaguggaagcuggcucga

SEQ ID NO: 2320318 - RNA, 19 nt, Artificial Sequence
  Description of Artificial Sequence: Synthetic oligonucleotide
uugggugcagaggcccuuc

SEQ ID NO: 2320319 - RNA, 19 nt, Artificial Sequence
  Description of Artificial Sequence: Synthetic oligonucleotide
gccuccacgccacuggcuc

SEQ ID NO: 2320320 - RNA, 19 nt, Artificial Sequence
  Description of Artificial Sequence: Synthetic oligonucleotide
guacccuguccaugacuga

SEQ ID NO: 2320321 - RNA, 19 nt, Artificial Sequence
  Description of Artificial Sequence: Synthetic oligonucleotide
acccuguccaugacugaca

SEQ ID NO: 2320322 - RNA, 19 nt, Artificial Sequence
  Description of Artificial Sequence: Synthetic oligonucleotide
ggcccuucgacgggguggg

SEQ ID NO: 2320323 - RNA, 19 nt, Artificial Sequence
  Description of Artificial Sequence: Synthetic oligonucleotide
agcccgggauuggagguca

SEQ ID NO: 2320324 - RNA, 19 nt, Artificial Sequence
  Description of Artificial Sequence: Synthetic oligonucleotide
agcuuacuucaaaguaaaa

SEQ ID NO: 2320325 - RNA, 19 nt, Artificial Sequence
  Description of Artificial Sequence: Synthetic oligonucleotide
ggguucgagauuggauuug

SEQ ID NO: 2320326 - RNA, 19 nt, Artificial Sequence
  Description of Artificial Sequence: Synthetic oligonucleotide
ggccuguugggugcagagg

SEQ ID NO: 2320327 - RNA, 19 nt, Artificial Sequence
  Description of Artificial Sequence: Synthetic oligonucleotide
gcggugggcgcuucggggc

SEQ ID NO: 2320328 - RNA, 19 nt, Artificial Sequence
  Description of Artificial Sequence: Synthetic oligonucleotide
cucggguucgagauuggau

SEQ ID NO: 2320329 - RNA, 19 nt, Artificial Sequence
  Description of Artificial Sequence: Synthetic oligonucleotide
ggcagggcuucccucccgc

SEQ ID NO: 2320330 - RNA, 19 nt, Artificial Sequence
  Description of Artificial Sequence: Synthetic oligonucleotide
cggccauucuccuuggguc

SEQ ID NO: 2320331 - RNA, 19 nt, Artificial Sequence
  Description of Artificial Sequence: Synthetic oligonucleotide
gcuccaacucacgaaccac

SEQ ID NO: 2320332 - RNA, 19 nt, Artificial Sequence
  Description of Artificial Sequence: Synthetic oligonucleotide
cacuggcuaucuggguggc

SEQ ID NO: 2320333 - RNA, 19 nt, Artificial Sequence
  Description of Artificial Sequence: Synthetic oligonucleotide
gcuccauacugcccggcca

SEQ ID NO: 2320334 - RNA, 19 nt, Artificial Sequence
  Description of Artificial Sequence: Synthetic oligonucleotide
gucucggguucgagauugg

SEQ ID NO: 2320335 - RNA, 19 nt, Artificial Sequence
  Description of Artificial Sequence: Synthetic oligonucleotide
ccucguacccuguccauga

SEQ ID NO: 2320336 - RNA, 19 nt, Artificial Sequence
  Description of Artificial Sequence: Synthetic oligonucleotide
gaacgaugccagaccucca

SEQ ID NO: 2320337 - RNA, 19 nt, Artificial Sequence
  Description of Artificial Sequence: Synthetic oligonucleotide
gccuuggccccugagccag

SEQ ID NO: 2320338 - RNA, 19 nt, Artificial Sequence
  Description of Artificial Sequence: Synthetic oligonucleotide
ggguuggcagacaaggugu

SEQ ID NO: 2320339 - RNA, 19 nt, Artificial Sequence
  Description of Artificial Sequence: Synthetic oligonucleotide
uuguucgggcagcgcgcuc

SEQ ID NO: 2320340 - RNA, 19 nt, Artificial Sequence
  Description of Artificial Sequence: Synthetic oligonucleotide
cugacaucucuuagcccua

SEQ ID NO: 2320341 - RNA, 19 nt, Artificial Sequence
  Description of Artificial Sequence: Synthetic oligonucleotide
gccuucgaggaagcuaggc

SEQ ID NO: 2320342 - RNA, 19 nt, Artificial Sequence
  Description of Artificial Sequence: Synthetic oligonucleotide
gguaugagucccacccaga

SEQ ID NO: 2320343 - RNA, 19 nt, Artificial Sequence
  Description of Artificial Sequence: Synthetic oligonucleotide
caagguguuggcagggcuu

SEQ ID NO: 2320344 - RNA, 19 nt, Artificial Sequence
  Description of Artificial Sequence: Synthetic oligonucleotide
ccaccggcaaagcgcacag

SEQ ID NO: 2320345 - RNA, 19 nt, Artificial Sequence
  Description of Artificial Sequence: Synthetic oligonucleotide
ccacccagagcuagaacga

SEQ ID NO: 2320346 - RNA, 19 nt, Artificial Sequence
  Description of Artificial Sequence: Synthetic oligonucleotide
agccuucgaggaagcuagg

SEQ ID NO: 2320347 - RNA, 19 nt, Artificial Sequence
  Description of Artificial Sequence: Synthetic oligonucleotide
gaaccaccaagcgcaggua

SEQ ID NO: 2320348 - RNA, 19 nt, Artificial Sequence
  Description of Artificial Sequence: Synthetic oligonucleotide
gccuccgacucaaaguaga

SEQ ID NO: 2320349 - RNA, 19 nt, Artificial Sequence
  Description of Artificial Sequence: Synthetic oligonucleotide
gacaagccuuggccccuga

SEQ ID NO: 2320350 - RNA, 19 nt, Artificial Sequence
  Description of Artificial Sequence: Synthetic oligonucleotide
gcauggaaucaguggaggu

SEQ ID NO: 2320351 - RNA, 19 nt, Artificial Sequence
  Description of Artificial Sequence: Synthetic oligonucleotide
acccaguggggcagguugu

SEQ ID NO: 2320352 - RNA, 19 nt, Artificial Sequence
  Description of Artificial Sequence: Synthetic oligonucleotide
agucccacccagagcuaga

SEQ ID NO: 2320353 - RNA, 19 nt, Artificial Sequence
  Description of Artificial Sequence: Synthetic oligonucleotide
uggcucgagacagggccuu

SEQ ID NO: 2320354 - RNA, 19 nt, Artificial Sequence
  Description of Artificial Sequence: Synthetic oligonucleotide
  modified_base (7)..(7): a, c, u, g, unknown or other
gcaaacncuucccgggcau

SEQ ID NO: 2320355 - RNA, 19 nt, Artificial Sequence
  Description of Artificial Sequence: Synthetic oligonucleotide
cucccgcauggcugccagc

SEQ ID NO: 2320356 - RNA, 19 nt, Artificial Sequence
  Description of Artificial Sequence: Synthetic oligonucleotide
gcucauguagcugggcgaa

SEQ ID NO: 2320357 - RNA, 19 nt, Artificial Sequence
  Description of Artificial Sequence: Synthetic oligonucleotide
ccguccauagugcucaugu

SEQ ID NO: 2320358 - RNA, 19 nt, Artificial Sequence
  Description of Artificial Sequence: Synthetic oligonucleotide
ggcccugguggcagaaccc

SEQ ID NO: 2320359 - RNA, 19 nt, Artificial Sequence
  Description of Artificial Sequence: Synthetic oligonucleotide
gggagcggugggcgcuucg

SEQ ID NO: 2320360 - RNA, 19 nt, Artificial Sequence
  Description of Artificial Sequence: Synthetic oligonucleotide
gcgcagguaguggaagcug

SEQ ID NO: 2320361 - RNA, 19 nt, Artificial Sequence
  Description of Artificial Sequence: Synthetic oligonucleotide
ccuccacgccacuggcucc

SEQ ID NO: 2320362 - RNA, 19 nt, Artificial Sequence
  Description of Artificial Sequence: Synthetic oligonucleotide
ggcgcuucggggcugcagu

SEQ ID NO: 2320363 - RNA, 19 nt, Artificial Sequence
  Description of Artificial Sequence: Synthetic oligonucleotide
gcagcgcgcuccauacugc

SEQ ID NO: 2320364 - RNA, 19 nt, Artificial Sequence
  Description of Artificial Sequence: Synthetic oligonucleotide
cuaggccacagcccgggau

SEQ ID NO: 2320365 - RNA, 19 nt, Artificial Sequence
  Description of Artificial Sequence: Synthetic oligonucleotide
guuguucgggcagcgcgcu

SEQ ID NO: 2320366 - RNA, 19 nt, Artificial Sequence
  Description of Artificial Sequence: Synthetic oligonucleotide
ggcugguccuggguaugag

SEQ ID NO: 2320367 - RNA, 19 nt, Artificial Sequence
  Description of Artificial Sequence: Synthetic oligonucleotide
caccggcaaagcgcacagc

SEQ ID NO: 2320368 - RNA, 19 nt, Artificial Sequence
  Description of Artificial Sequence: Synthetic oligonucleotide
acccuccaacaggaugaca

SEQ ID NO: 2320369 - RNA, 19 nt, Artificial Sequence
  Description of Artificial Sequence: Synthetic oligonucleotide
cccuucgacggggugggag

SEQ ID NO: 2320370 - RNA, 19 nt, Artificial Sequence
  Description of Artificial Sequence: Synthetic oligonucleotide
cuggcucgagacagggccu

SEQ ID NO: 2320371 - RNA, 19 nt, Artificial Sequence
  Description of Artificial Sequence: Synthetic oligonucleotide
cugcaggcauggaaucagu

SEQ ID NO: 2320372 - RNA, 19 nt, Artificial Sequence
  Description of Artificial Sequence: Synthetic oligonucleotide
uccugagggcccgcaccuc

SEQ ID NO: 2320373 - RNA, 19 nt, Artificial Sequence
  Description of Artificial Sequence: Synthetic oligonucleotide
guggcagggagcagugccu

SEQ ID NO: 2320374 - RNA, 19 nt, Artificial Sequence
  Description of Artificial Sequence: Synthetic oligonucleotide
cgggcagcgcgcuccauac

SEQ ID NO: 2320375 - RNA, 19 nt, Artificial Sequence
  Description of Artificial Sequence: Synthetic oligonucleotide
ccgcaccucccguccauag

SEQ ID NO: 2320376 - RNA, 19 nt, Artificial Sequence
  Description of Artificial Sequence: Synthetic oligonucleotide
gcgcuucggggcugcagug

SEQ ID NO: 2320377 - RNA, 19 nt, Artificial Sequence
  Description of Artificial Sequence: Synthetic oligonucleotide
cccacccaacacuggaaga

SEQ ID NO: 2320378 - RNA, 19 nt, Artificial Sequence
  Description of Artificial Sequence: Synthetic oligonucleotide
agaggcccuucgacggggu

SEQ ID NO: 2320379 - RNA, 19 nt, Artificial Sequence
  Description of Artificial Sequence: Synthetic oligonucleotide
gcagguugucccacccaac

SEQ ID NO: 2320380 - RNA, 19 nt, Artificial Sequence
  Description of Artificial Sequence: Synthetic oligonucleotide
uccacgccacuggcuccug

SEQ ID NO: 2320381 - RNA, 19 nt, Artificial Sequence
  Description of Artificial Sequence: Synthetic oligonucleotide
gcuaucuggguggcaggga

SEQ ID NO: 2320382 - RNA, 19 nt, Artificial Sequence
  Description of Artificial Sequence: Synthetic oligonucleotide
cgcuccauacugcccggcc

SEQ ID NO: 2320383 - RNA, 19 nt, Artificial Sequence
  Description of Artificial Sequence: Synthetic oligonucleotide
ccuccgacucaaaguagaa

SEQ ID NO: 2320384 - RNA, 19 nt, Artificial Sequence
  Description of Artificial Sequence: Synthetic oligonucleotide
cgaccaccggcaaagcgca

SEQ ID NO: 2320385 - RNA, 19 nt, Artificial Sequence
  Description of Artificial Sequence: Synthetic oligonucleotide
ccccugcaggcauggaauc

SEQ ID NO: 2320386 - RNA, 19 nt, Artificial Sequence
  Description of Artificial Sequence: Synthetic oligonucleotide
gcgcacagcgaaggcaaac

SEQ ID NO: 2320387 - RNA, 19 nt, Artificial Sequence
  Description of Artificial Sequence: Synthetic oligonucleotide
cggcaaagcgcacagcgaa

SEQ ID NO: 2320388 - RNA, 19 nt, Artificial Sequence
  Description of Artificial Sequence: Synthetic oligonucleotide
gggagccaagaggcccugg

SEQ ID NO: 2320389 - RNA, 19 nt, Artificial Sequence
  Description of Artificial Sequence: Synthetic oligonucleotide
cgaaccaccaagcgcaggu

SEQ ID NO: 2320390 - RNA, 19 nt, Artificial Sequence
  Description of Artificial Sequence: Synthetic oligonucleotide
cccgggauuggaggucagg

SEQ ID NO: 2320391 - RNA, 19 nt, Artificial Sequence
  Description of Artificial Sequence: Synthetic oligonucleotide
gcacuguggugagaaugga

SEQ ID NO: 2320392 - RNA, 19 nt, Artificial Sequence
  Description of Artificial Sequence: Synthetic oligonucleotide
ccggcaaagcgcacagcga

SEQ ID NO: 2320393 - RNA, 19 nt, Artificial Sequence
  Description of Artificial Sequence: Synthetic oligonucleotide
ugucggcugccagcacaua

SEQ ID NO: 2320394 - RNA, 19 nt, Artificial Sequence
  Description of Artificial Sequence: Synthetic oligonucleotide
gcucgagacagggccuuca

SEQ ID NO: 2320395 - RNA, 19 nt, Artificial Sequence
  Description of Artificial Sequence: Synthetic oligonucleotide
ggaagagagccagcacugu

SEQ ID NO: 2320396 - RNA, 19 nt, Artificial Sequence
  Description of Artificial Sequence: Synthetic oligonucleotide
gaccaccggcaaagcgcac

SEQ ID NO: 2320397 - RNA, 19 nt, Artificial Sequence
  Description of Artificial Sequence: Synthetic oligonucleotide
guccuggguaugaguccca

SEQ ID NO: 2320398 - RNA, 19 nt, Artificial Sequence
  Description of Artificial Sequence: Synthetic oligonucleotide
ccaacucacgaaccaccaa

SEQ ID NO: 2320399 - RNA, 19 nt, Artificial Sequence
  Description of Artificial Sequence: Synthetic oligonucleotide
cgccuccgacucaaaguag

SEQ ID NO: 2320400 - RNA, 19 nt, Artificial Sequence
  Description of Artificial Sequence: Synthetic oligonucleotide
  modified_base (19)..(19): a, c, u, g, unknown or other
cgcacagcgaaggcaaacn

SEQ ID NO: 2320401 - RNA, 19 nt, Artificial Sequence
  Description of Artificial Sequence: Synthetic oligonucleotide
agcgcacagcgaaggcaaa

SEQ ID NO: 2320402 - RNA, 19 nt, Artificial Sequence
  Description of Artificial Sequence: Synthetic oligonucleotide
cagacaagccuuggccccu

SEQ ID NO: 2320403 - RNA, 19 nt, Artificial Sequence
  Description of Artificial Sequence: Synthetic oligonucleotide
ggcucucggcucgccuccg

SEQ ID NO: 2320404 - RNA, 19 nt, Artificial Sequence
  Description of Artificial Sequence: Synthetic oligonucleotide
caucccuccagggcugccu

SEQ ID NO: 2320405 - RNA, 19 nt, Artificial Sequence
  Description of Artificial Sequence: Synthetic oligonucleotide
gggcgcuucggggcugcag

SEQ ID NO: 2320406 - RNA, 19 nt, Artificial Sequence
  Description of Artificial Sequence: Synthetic oligonucleotide
gcugggcgaaggaugccaa

SEQ ID NO: 2320407 - RNA, 19 nt, Artificial Sequence
  Description of Artificial Sequence: Synthetic oligonucleotide
ugggagcggugggcgcuuc

SEQ ID NO: 2320408 - RNA, 19 nt, Artificial Sequence
  Description of Artificial Sequence: Synthetic oligonucleotide
gugagccuucgaggaagcu

SEQ ID NO: 2320409 - RNA, 19 nt, Artificial Sequence
  Description of Artificial Sequence: Synthetic oligonucleotide
caccagcuccaccgugcaa

SEQ ID NO: 2320410 - RNA, 19 nt, Artificial Sequence
  Description of Artificial Sequence: Synthetic oligonucleotide
gcuaggccacagcccggga

SEQ ID NO: 2320411 - RNA, 19 nt, Artificial Sequence
  Description of Artificial Sequence: Synthetic oligonucleotide
ggugggcgcuucggggcug

SEQ ID NO: 2320412 - RNA, 19 nt, Artificial Sequence
  Description of Artificial Sequence: Synthetic oligonucleotide
guugggugcagaggcccuu

SEQ ID NO: 2320413 - RNA, 19 nt, Artificial Sequence
  Description of Artificial Sequence: Synthetic oligonucleotide
ccggccauucuccuugggu

SEQ ID NO: 2320414 - RNA, 19 nt, Artificial Sequence
  Description of Artificial Sequence: Synthetic oligonucleotide
cacccagagcuagaacgau

SEQ ID NO: 2320415 - RNA, 19 nt, Artificial Sequence
  Description of Artificial Sequence: Synthetic oligonucleotide
ccaccgugcaacccuccaa

SEQ ID NO: 2320416 - RNA, 19 nt, Artificial Sequence
  Description of Artificial Sequence: Synthetic oligonucleotide
ugggcgcuucggggcugca

SEQ ID NO: 2320417 - RNA, 19 nt, Artificial Sequence
  Description of Artificial Sequence: Synthetic oligonucleotide
gaacccaguggggcagguu

SEQ ID NO: 2320418 - RNA, 19 nt, Artificial Sequence
  Description of Artificial Sequence: Synthetic oligonucleotide
cggcugccagcacauagga

SEQ ID NO: 2320419 - RNA, 19 nt, Artificial Sequence
  Description of Artificial Sequence: Synthetic oligonucleotide
cccuagaaucagcuuacuu

SEQ ID NO: 2320420 - RNA, 19 nt, Artificial Sequence
  Description of Artificial Sequence: Synthetic oligonucleotide
gcgcuccauacugcccggc

SEQ ID NO: 2320421 - RNA, 19 nt, Artificial Sequence
  Description of Artificial Sequence: Synthetic oligonucleotide
cguccauagugcucaugua

SEQ ID NO: 2320422 - RNA, 19 nt, Artificial Sequence
  Description of Artificial Sequence: Synthetic oligonucleotide
ggcucgagacagggccuuc

SEQ ID NO: 2320423 - RNA, 19 nt, Artificial Sequence
  Description of Artificial Sequence: Synthetic oligonucleotide
ggcccgcaccucccgucca

SEQ ID NO: 2320424 - RNA, 19 nt, Artificial Sequence
  Description of Artificial Sequence: Synthetic oligonucleotide
cggguucgagauuggauuu

SEQ ID NO: 2320425 - RNA, 19 nt, Artificial Sequence
  Description of Artificial Sequence: Synthetic oligonucleotide
ccuugggucucggguucga

SEQ ID NO: 2320426 - RNA, 19 nt, Artificial Sequence
  Description of Artificial Sequence: Synthetic oligonucleotide
cugcccggccauucuccuu

SEQ ID NO: 2320427 - RNA, 19 nt, Artificial Sequence
  Description of Artificial Sequence: Synthetic oligonucleotide
gcccuagaaucagcuuacu

SEQ ID NO: 2320428 - RNA, 19 nt, Artificial Sequence
  Description of Artificial Sequence: Synthetic oligonucleotide
gggucucggguucgagauu

SEQ ID NO: 2320429 - RNA, 19 nt, Artificial Sequence
  Description of Artificial Sequence: Synthetic oligonucleotide
gggcagcgcgcuccauacu

SEQ ID NO: 2320430 - RNA, 19 nt, Artificial Sequence
  Description of Artificial Sequence: Synthetic oligonucleotide
gcccucguacccuguccau

SEQ ID NO: 2320431 - RNA, 19 nt, Artificial Sequence
  Description of Artificial Sequence: Synthetic oligonucleotide
cgacggggugggagcggug

SEQ ID NO: 2320432 - RNA, 19 nt, Artificial Sequence
  Description of Artificial Sequence: Synthetic oligonucleotide
gugggagcggugggcgcuu

SEQ ID NO: 2320433 - RNA, 19 nt, Artificial Sequence
  Description of Artificial Sequence: Synthetic oligonucleotide
cgcaccucccguccauagu

SEQ ID NO: 2320434 - RNA, 19 nt, Artificial Sequence
  Description of Artificial Sequence: Synthetic oligonucleotide
ggcucgccuccgacucaaa

SEQ ID NO: 2320435 - RNA, 19 nt, Artificial Sequence
  Description of Artificial Sequence: Synthetic oligonucleotide
cggcucgccuccgacucaa

SEQ ID NO: 2320436 - RNA, 19 nt, Artificial Sequence
  Description of Artificial Sequence: Synthetic oligonucleotide
cccgcaccucccguccaua

SEQ ID NO: 2320437 - RNA, 19 nt, Artificial Sequence
  Description of Artificial Sequence: Synthetic oligonucleotide
gcccuucgacgggguggga

SEQ ID NO: 2320438 - RNA, 19 nt, Artificial Sequence
  Description of Artificial Sequence: Synthetic oligonucleotide
cggugggcgcuucggggcu

SEQ ID NO: 2320439 - RNA, 19 nt, Artificial Sequence
  Description of Artificial Sequence: Synthetic oligonucleotide
uuugauauuaucugcauag

SEQ ID NO: 2320440 - RNA, 19 nt, Artificial Sequence
  Description of Artificial Sequence: Synthetic oligonucleotide
aagaauuggguccagcccc

SEQ ID NO: 2320441 - RNA, 19 nt, Artificial Sequence
  Description of Artificial Sequence: Synthetic oligonucleotide
cuuagugccacacagguag

SEQ ID NO: 2320442 - RNA, 19 nt, Artificial Sequence
  Description of Artificial Sequence: Synthetic oligonucleotide
uucaaaucugcccuuaacc

SEQ ID NO: 2320443 - RNA, 19 nt, Artificial Sequence
  Description of Artificial Sequence: Synthetic oligonucleotide
cuucguagcgcucagaucc

SEQ ID NO: 2320444 - RNA, 19 nt, Artificial Sequence
  Description of Artificial Sequence: Synthetic oligonucleotide
acaagaauuggguccagcc

SEQ ID NO: 2320445 - RNA, 19 nt, Artificial Sequence
  Description of Artificial Sequence: Synthetic oligonucleotide
ugaguugugacucagugau

SEQ ID NO: 2320446 - RNA, 19 nt, Artificial Sequence
  Description of Artificial Sequence: Synthetic oligonucleotide
ucaaaucugcccuuaaccc

SEQ ID NO: 2320447 - RNA, 19 nt, Artificial Sequence
  Description of Artificial Sequence: Synthetic oligonucleotide
aagccugggauucaaaucu

SEQ ID NO: 2320448 - RNA, 19 nt, Artificial Sequence
  Description of Artificial Sequence: Synthetic oligonucleotide
ucauuuaauucucccaggc

SEQ ID NO: 2320449 - RNA, 19 nt, Artificial Sequence
  Description of Artificial Sequence: Synthetic oligonucleotide
acacagguagaucugacag

SEQ ID NO: 2320450 - RNA, 19 nt, Artificial Sequence
  Description of Artificial Sequence: Synthetic oligonucleotide
gaugaguugugacucagug

SEQ ID NO: 2320451 - RNA, 19 nt, Artificial Sequence
  Description of Artificial Sequence: Synthetic oligonucleotide
uucauuuaauucucccagg

SEQ ID NO: 2320452 - RNA, 19 nt, Artificial Sequence
  Description of Artificial Sequence: Synthetic oligonucleotide
uaucgcuccaccaggcucg

SEQ ID NO: 2320453 - RNA, 19 nt, Artificial Sequence
  Description of Artificial Sequence: Synthetic oligonucleotide
ugauauuaucugcauaguc

SEQ ID NO: 2320454 - RNA, 19 nt, Artificial Sequence
  Description of Artificial Sequence: Synthetic oligonucleotide
ugugacucagugaugacaa

SEQ ID NO: 2320455 - RNA, 19 nt, Artificial Sequence
  Description of Artificial Sequence: Synthetic oligonucleotide
aucauggaagucuacacga

SEQ ID NO: 2320456 - RNA, 19 nt, Artificial Sequence
  Description of Artificial Sequence: Synthetic oligonucleotide
auucaaaucugcccuuaac

SEQ ID NO: 2320457 - RNA, 19 nt, Artificial Sequence
  Description of Artificial Sequence: Synthetic oligonucleotide
agcaggucgcucuuagugc

SEQ ID NO: 2320458 - RNA, 19 nt, Artificial Sequence
  Description of Artificial Sequence: Synthetic oligonucleotide
gaugacaacagcuguagaa

SEQ ID NO: 2320459 - RNA, 19 nt, Artificial Sequence
  Description of Artificial Sequence: Synthetic oligonucleotide
cucuaaacugcgcagcucc

SEQ ID NO: 2320460 - RNA, 19 nt, Artificial Sequence
  Description of Artificial Sequence: Synthetic oligonucleotide
uggggaauucauuuaauuc

SEQ ID NO: 2320461 - RNA, 19 nt, Artificial Sequence
  Description of Artificial Sequence: Synthetic oligonucleotide
caucauggaagucuacacg

SEQ ID NO: 2320462 - RNA, 19 nt, Artificial Sequence
  Description of Artificial Sequence: Synthetic oligonucleotide
acgaaggcagccccgaugg

SEQ ID NO: 2320463 - RNA, 19 nt, Artificial Sequence
  Description of Artificial Sequence: Synthetic oligonucleotide
uaaggguuugccuucuggc

SEQ ID NO: 2320464 - RNA, 19 nt, Artificial Sequence
  Description of Artificial Sequence: Synthetic oligonucleotide
acgcacaucaccuuggcca

SEQ ID NO: 2320465 - RNA, 19 nt, Artificial Sequence
  Description of Artificial Sequence: Synthetic oligonucleotide
ggucauaacagacaauggc

SEQ ID NO: 2320466 - RNA, 19 nt, Artificial Sequence
  Description of Artificial Sequence: Synthetic oligonucleotide
auauuaucugcauagucuu

SEQ ID NO: 2320467 - RNA, 19 nt, Artificial Sequence
  Description of Artificial Sequence: Synthetic oligonucleotide
caaauacccagagucaccg

SEQ ID NO: 2320468 - RNA, 19 nt, Artificial Sequence
  Description of Artificial Sequence: Synthetic oligonucleotide
augacaacagcuguagaag

SEQ ID NO: 2320469 - RNA, 19 nt, Artificial Sequence
  Description of Artificial Sequence: Synthetic oligonucleotide
acucagugaugacaacagc

SEQ ID NO: 2320470 - RNA, 19 nt, Artificial Sequence
  Description of Artificial Sequence: Synthetic oligonucleotide
aaggguuugccuucuggcu

SEQ ID NO: 2320471 - RNA, 19 nt, Artificial Sequence
  Description of Artificial Sequence: Synthetic oligonucleotide
cauuuaauucucccaggcc

SEQ ID NO: 2320472 - RNA, 19 nt, Artificial Sequence
  Description of Artificial Sequence: Synthetic oligonucleotide
uagcucagacacuugacca

SEQ ID NO: 2320473 - RNA, 19 nt, Artificial Sequence
  Description of Artificial Sequence: Synthetic oligonucleotide
guagcucagacacuugacc

SEQ ID NO: 2320474 - RNA, 19 nt, Artificial Sequence
  Description of Artificial Sequence: Synthetic oligonucleotide
ucugcauagucuuggacau

SEQ ID NO: 2320475 - RNA, 19 nt, Artificial Sequence
  Description of Artificial Sequence: Synthetic oligonucleotide
agacacuugaccaugccag

SEQ ID NO: 2320476 - RNA, 19 nt, Artificial Sequence
  Description of Artificial Sequence: Synthetic oligonucleotide
caagaauuggguccagccc

SEQ ID NO: 2320477 - RNA, 19 nt, Artificial Sequence
  Description of Artificial Sequence: Synthetic oligonucleotide
uauuaucugcauagucuug

SEQ ID NO: 2320478 - RNA, 19 nt, Artificial Sequence
  Description of Artificial Sequence: Synthetic oligonucleotide
aguugugacucagugauga

SEQ ID NO: 2320479 - RNA, 19 nt, Artificial Sequence
  Description of Artificial Sequence: Synthetic oligonucleotide
ucuccgacgcacaucaccu

SEQ ID NO: 2320480 - RNA, 19 nt, Artificial Sequence
  Description of Artificial Sequence: Synthetic oligonucleotide
guaaggguuugccuucugg

SEQ ID NO: 2320481 - RNA, 19 nt, Artificial Sequence
  Description of Artificial Sequence: Synthetic oligonucleotide
auggaagucuacacgacgg

SEQ ID NO: 2320482 - RNA, 19 nt, Artificial Sequence
  Description of Artificial Sequence: Synthetic oligonucleotide
gacucagugaugacaacag

SEQ ID NO: 2320483 - RNA, 19 nt, Artificial Sequence
  Description of Artificial Sequence: Synthetic oligonucleotide
agguagaucugacagcccu

SEQ ID NO: 2320484 - RNA, 19 nt, Artificial Sequence
  Description of Artificial Sequence: Synthetic oligonucleotide
gucuuggacaucauggaag

SEQ ID NO: 2320485 - RNA, 19 nt, Artificial Sequence
  Description of Artificial Sequence: Synthetic oligonucleotide
ugacucagugaugacaaca

SEQ ID NO: 2320486 - RNA, 19 nt, Artificial Sequence
  Description of Artificial Sequence: Synthetic oligonucleotide
gaagucuacacgacggcgc

SEQ ID NO: 2320487 - RNA, 19 nt, Artificial Sequence
  Description of Artificial Sequence: Synthetic oligonucleotide
acuuggcucucucaaagcu

SEQ ID NO: 2320488 - RNA, 19 nt, Artificial Sequence
  Description of Artificial Sequence: Synthetic oligonucleotide
agagucaccguccggucuc

SEQ ID NO: 2320489 - RNA, 19 nt, Artificial Sequence
  Description of Artificial Sequence: Synthetic oligonucleotide
uagucuuggacaucaugga

SEQ ID NO: 2320490 - RNA, 19 nt, Artificial Sequence
  Description of Artificial Sequence: Synthetic oligonucleotide
caagaagcggucgugcacg

SEQ ID NO: 2320491 - RNA, 19 nt, Artificial Sequence
  Description of Artificial Sequence: Synthetic oligonucleotide
guagaaguaaggguuugcc

SEQ ID NO: 2320492 - RNA, 19 nt, Artificial Sequence
  Description of Artificial Sequence: Synthetic oligonucleotide
uggaaagcagccacacuga

SEQ ID NO: 2320493 - RNA, 19 nt, Artificial Sequence
  Description of Artificial Sequence: Synthetic oligonucleotide
uuucgcaccccgguaauag

SEQ ID NO: 2320494 - RNA, 19 nt, Artificial Sequence
  Description of Artificial Sequence: Synthetic oligonucleotide
gagcccgagccucagaccc

SEQ ID NO: 2320495 - RNA, 19 nt, Artificial Sequence
  Description of Artificial Sequence: Synthetic oligonucleotide
auaggggcccaccaagaag

SEQ ID NO: 2320496 - RNA, 19 nt, Artificial Sequence
  Description of Artificial Sequence: Synthetic oligonucleotide
cacuuucuggaagagcucg

SEQ ID NO: 2320497 - RNA, 19 nt, Artificial Sequence
  Description of Artificial Sequence: Synthetic oligonucleotide
uaaacugcgcagcuccuuc

SEQ ID NO: 2320498 - RNA, 19 nt, Artificial Sequence
  Description of Artificial Sequence: Synthetic oligonucleotide
cuuaacccucuucaugccc

SEQ ID NO: 2320499 - RNA, 19 nt, Artificial Sequence
  Description of Artificial Sequence: Synthetic oligonucleotide
ccuggaguagcucagacac

SEQ ID NO: 2320500 - RNA, 19 nt, Artificial Sequence
  Description of Artificial Sequence: Synthetic oligonucleotide
agauccugcucauggcuuc

SEQ ID NO: 2320501 - RNA, 19 nt, Artificial Sequence
  Description of Artificial Sequence: Synthetic oligonucleotide
uggaagucuacacgacggc

SEQ ID NO: 2320502 - RNA, 19 nt, Artificial Sequence
  Description of Artificial Sequence: Synthetic oligonucleotide
auacccagagucaccgucc

SEQ ID NO: 2320503 - RNA, 19 nt, Artificial Sequence
  Description of Artificial Sequence: Synthetic oligonucleotide
cauagucuuggacaucaug

SEQ ID NO: 2320504 - RNA, 19 nt, Artificial Sequence
  Description of Artificial Sequence: Synthetic oligonucleotide
uugugacucagugaugaca

SEQ ID NO: 2320505 - RNA, 19 nt, Artificial Sequence
  Description of Artificial Sequence: Synthetic oligonucleotide
aggccagaugaguugugac

SEQ ID NO: 2320506 - RNA, 19 nt, Artificial Sequence
  Description of Artificial Sequence: Synthetic oligonucleotide
ucauggaagucuacacgac

SEQ ID NO: 2320507 - RNA, 19 nt, Artificial Sequence
  Description of Artificial Sequence: Synthetic oligonucleotide
agaccccaaccccaagggc

SEQ ID NO: 2320508 - RNA, 19 nt, Artificial Sequence
  Description of Artificial Sequence: Synthetic oligonucleotide
uccgacgcacaucaccuug

SEQ ID NO: 2320509 - RNA, 19 nt, Artificial Sequence
  Description of Artificial Sequence: Synthetic oligonucleotide
uccagcaggucgcucuuag

SEQ ID NO: 2320510 - RNA, 19 nt, Artificial Sequence
  Description of Artificial Sequence: Synthetic oligonucleotide
cugauaggggcccaccaag

SEQ ID NO: 2320511 - RNA, 19 nt, Artificial Sequence
  Description of Artificial Sequence: Synthetic oligonucleotide
cuggauguuucaaagagcu

SEQ ID NO: 2320512 - RNA, 19 nt, Artificial Sequence
  Description of Artificial Sequence: Synthetic oligonucleotide
ugauaggggcccaccaaga

SEQ ID NO: 2320513 - RNA, 19 nt, Artificial Sequence
  Description of Artificial Sequence: Synthetic oligonucleotide
uacccagagucaccguccg

SEQ ID NO: 2320514 - RNA, 19 nt, Artificial Sequence
  Description of Artificial Sequence: Synthetic oligonucleotide
aguagcucagacacuugac

SEQ ID NO: 2320515 - RNA, 19 nt, Artificial Sequence
  Description of Artificial Sequence: Synthetic oligonucleotide
augaguugugacucaguga

SEQ ID NO: 2320516 - RNA, 19 nt, Artificial Sequence
  Description of Artificial Sequence: Synthetic oligonucleotide
uccucuaaacugcgcagcu

SEQ ID NO: 2320517 - RNA, 19 nt, Artificial Sequence
  Description of Artificial Sequence: Synthetic oligonucleotide
cacguaucgcuccaccagg

SEQ ID NO: 2320518 - RNA, 19 nt, Artificial Sequence
  Description of Artificial Sequence: Synthetic oligonucleotide
ucagauccugcuguguccc

SEQ ID NO: 2320519 - RNA, 19 nt, Artificial Sequence
  Description of Artificial Sequence: Synthetic oligonucleotide
uggacaucauggaagucua

SEQ ID NO: 2320520 - RNA, 19 nt, Artificial Sequence
  Description of Artificial Sequence: Synthetic oligonucleotide
acagucugcccaguacugc

SEQ ID NO: 2320521 - RNA, 19 nt, Artificial Sequence
  Description of Artificial Sequence: Synthetic oligonucleotide
cccuuaacccucuucaugc

SEQ ID NO: 2320522 - RNA, 19 nt, Artificial Sequence
  Description of Artificial Sequence: Synthetic oligonucleotide
cagcaggucgcucuuagug

SEQ ID NO: 2320523 - RNA, 19 nt, Artificial Sequence
  Description of Artificial Sequence: Synthetic oligonucleotide
ugugucccaaauacccaga

SEQ ID NO: 2320524 - RNA, 19 nt, Artificial Sequence
  Description of Artificial Sequence: Synthetic oligonucleotide
ggggaauucauuuaauucu

SEQ ID NO: 2320525 - RNA, 19 nt, Artificial Sequence
  Description of Artificial Sequence: Synthetic oligonucleotide
cagaccccaaccccaaggg

SEQ ID NO: 2320526 - RNA, 19 nt, Artificial Sequence
  Description of Artificial Sequence: Synthetic oligonucleotide
ucugacagcccuccucuaa

SEQ ID NO: 2320527 - RNA, 19 nt, Artificial Sequence
  Description of Artificial Sequence: Synthetic oligonucleotide
cuucaugcccacagucugc

SEQ ID NO: 2320528 - RNA, 19 nt, Artificial Sequence
  Description of Artificial Sequence: Synthetic oligonucleotide
uugcuggauguuucaaaga

SEQ ID NO: 2320529 - RNA, 19 nt, Artificial Sequence
  Description of Artificial Sequence: Synthetic oligonucleotide
ugaugacaacagcuguaga

SEQ ID NO: 2320530 - RNA, 19 nt, Artificial Sequence
  Description of Artificial Sequence: Synthetic oligonucleotide
gucuccgacgcacaucacc

SEQ ID NO: 2320531 - RNA, 19 nt, Artificial Sequence
  Description of Artificial Sequence: Synthetic oligonucleotide
aggucauaacagacaaugg

SEQ ID NO: 2320532 - RNA, 19 nt, Artificial Sequence
  Description of Artificial Sequence: Synthetic oligonucleotide
ugcacguaucgcuccacca

SEQ ID NO: 2320533 - RNA, 19 nt, Artificial Sequence
  Description of Artificial Sequence: Synthetic oligonucleotide
cagucugcccaguacugcc

SEQ ID NO: 2320534 - RNA, 19 nt, Artificial Sequence
  Description of Artificial Sequence: Synthetic oligonucleotide
ucuggggaauucauuuaau

SEQ ID NO: 2320535 - RNA, 19 nt, Artificial Sequence
  Description of Artificial Sequence: Synthetic oligonucleotide
aaauacccagagucaccgu

SEQ ID NO: 2320536 - RNA, 19 nt, Artificial Sequence
  Description of Artificial Sequence: Synthetic oligonucleotide
guagaucugacagcccucc

SEQ ID NO: 2320537 - RNA, 19 nt, Artificial Sequence
  Description of Artificial Sequence: Synthetic oligonucleotide
cacuugaccaugccagccc

SEQ ID NO: 2320538 - RNA, 19 nt, Artificial Sequence
  Description of Artificial Sequence: Synthetic oligonucleotide
ucuaaacugcgcagcuccu

SEQ ID NO: 2320539 - RNA, 19 nt, Artificial Sequence
  Description of Artificial Sequence: Synthetic oligonucleotide
ucucucaaagcugcugcug

SEQ ID NO: 2320540 - RNA, 19 nt, Artificial Sequence
  Description of Artificial Sequence: Synthetic oligonucleotide
gugucccaaauacccagag

SEQ ID NO: 2320541 - RNA, 19 nt, Artificial Sequence
  Description of Artificial Sequence: Synthetic oligonucleotide
ucaccguccggucuccgac

SEQ ID NO: 2320542 - RNA, 19 nt, Artificial Sequence
  Description of Artificial Sequence: Synthetic oligonucleotide
accguccggucuccgacgc

SEQ ID NO: 2320543 - RNA, 19 nt, Artificial Sequence
  Description of Artificial Sequence: Synthetic oligonucleotide
ggaagucuacacgacggcg

SEQ ID NO: 2320544 - RNA, 19 nt, Artificial Sequence
  Description of Artificial Sequence: Synthetic oligonucleotide
cuugcccagcaucaccacc

SEQ ID NO: 2320545 - RNA, 19 nt, Artificial Sequence
  Description of Artificial Sequence: Synthetic oligonucleotide
cccgaugguguucugauag

SEQ ID NO: 2320546 - RNA, 19 nt, Artificial Sequence
  Description of Artificial Sequence: Synthetic oligonucleotide
agcggucgugcacguaucg

SEQ ID NO: 2320547 - RNA, 19 nt, Artificial Sequence
  Description of Artificial Sequence: Synthetic oligonucleotide
ugcccgcucaugcucccgg

SEQ ID NO: 2320548 - RNA, 19 nt, Artificial Sequence
  Description of Artificial Sequence: Synthetic oligonucleotide
ucuuagugccacacaggua

SEQ ID NO: 2320549 - RNA, 19 nt, Artificial Sequence
  Description of Artificial Sequence: Synthetic oligonucleotide
gacaagaauuggguccagc

SEQ ID NO: 2320550 - RNA, 19 nt, Artificial Sequence
  Description of Artificial Sequence: Synthetic oligonucleotide
guaucgcuccaccaggcuc

SEQ ID NO: 2320551 - RNA, 19 nt, Artificial Sequence
  Description of Artificial Sequence: Synthetic oligonucleotide
agcucagacacuugaccau

SEQ ID NO: 2320552 - RNA, 19 nt, Artificial Sequence
  Description of Artificial Sequence: Synthetic oligonucleotide
uuagugccacacagguaga

SEQ ID NO: 2320553 - RNA, 19 nt, Artificial Sequence
  Description of Artificial Sequence: Synthetic oligonucleotide
ucguccacacucuggccug

SEQ ID NO: 2320554 - RNA, 19 nt, Artificial Sequence
  Description of Artificial Sequence: Synthetic oligonucleotide
ugaccaugccagcccagac

SEQ ID NO: 2320555 - RNA, 19 nt, Artificial Sequence
  Description of Artificial Sequence: Synthetic oligonucleotide
cugcugugucccaaauacc

SEQ ID NO: 2320556 - RNA, 19 nt, Artificial Sequence
  Description of Artificial Sequence: Synthetic oligonucleotide
acacugacguaauccucug

SEQ ID NO: 2320557 - RNA, 19 nt, Artificial Sequence
  Description of Artificial Sequence: Synthetic oligonucleotide
ucgcaccccgguaauagau

SEQ ID NO: 2320558 - RNA, 19 nt, Artificial Sequence
  Description of Artificial Sequence: Synthetic oligonucleotide
ucgucuugcccacguacuc

SEQ ID NO: 2320559 - RNA, 19 nt, Artificial Sequence
  Description of Artificial Sequence: Synthetic oligonucleotide
gauccugcucauggcuucg

SEQ ID NO: 2320560 - RNA, 19 nt, Artificial Sequence
  Description of Artificial Sequence: Synthetic oligonucleotide
cugucaugggcaccuggag

SEQ ID NO: 2320561 - RNA, 19 nt, Artificial Sequence
  Description of Artificial Sequence: Synthetic oligonucleotide
acguaucgcuccaccaggc

SEQ ID NO: 2320562 - RNA, 19 nt, Artificial Sequence
  Description of Artificial Sequence: Synthetic oligonucleotide
aagaagcggucgugcacgu

SEQ ID NO: 2320563 - RNA, 19 nt, Artificial Sequence
  Description of Artificial Sequence: Synthetic oligonucleotide
acguccacgcgcugcccgc

SEQ ID NO: 2320564 - RNA, 19 nt, Artificial Sequence
  Description of Artificial Sequence: Synthetic oligonucleotide
caccuucacguccacgcgc

SEQ ID NO: 2320565 - RNA, 19 nt, Artificial Sequence
  Description of Artificial Sequence: Synthetic oligonucleotide
gauaggggcccaccaagaa

SEQ ID NO: 2320566 - RNA, 19 nt, Artificial Sequence
  Description of Artificial Sequence: Synthetic oligonucleotide
ugacagcccuccucuaaac

SEQ ID NO: 2320567 - RNA, 19 nt, Artificial Sequence
  Description of Artificial Sequence: Synthetic oligonucleotide
agcuuucgcaccccgguaa

SEQ ID NO: 2320568 - RNA, 19 nt, Artificial Sequence
  Description of Artificial Sequence: Synthetic oligonucleotide
uuggccacgaaggcagccc

SEQ ID NO: 2320569 - RNA, 19 nt, Artificial Sequence
  Description of Artificial Sequence: Synthetic oligonucleotide
aagagcucguccacacucu

SEQ ID NO: 2320570 - RNA, 19 nt, Artificial Sequence
  Description of Artificial Sequence: Synthetic oligonucleotide
caauggcagcuuucgcacc

SEQ ID NO: 2320571 - RNA, 19 nt, Artificial Sequence
  Description of Artificial Sequence: Synthetic oligonucleotide
uucguagcgcucagauccu

SEQ ID NO: 2320572 - RNA, 19 nt, Artificial Sequence
  Description of Artificial Sequence: Synthetic oligonucleotide
gugccacacagguagaucu

SEQ ID NO: 2320573 - RNA, 19 nt, Artificial Sequence
  Description of Artificial Sequence: Synthetic oligonucleotide
cagaugaguugugacucag

SEQ ID NO: 2320574 - RNA, 19 nt, Artificial Sequence
  Description of Artificial Sequence: Synthetic oligonucleotide
uggcagcuuucgcaccccg

SEQ ID NO: 2320575 - RNA, 19 nt, Artificial Sequence
  Description of Artificial Sequence: Synthetic oligonucleotide
uugaccaugccagcccaga

SEQ ID NO: 2320576 - RNA, 19 nt, Artificial Sequence
  Description of Artificial Sequence: Synthetic oligonucleotide
aguacugccuccguuccau

SEQ ID NO: 2320577 - RNA, 19 nt, Artificial Sequence
  Description of Artificial Sequence: Synthetic oligonucleotide
caaaucugcccuuaacccu

SEQ ID NO: 2320578 - RNA, 19 nt, Artificial Sequence
  Description of Artificial Sequence: Synthetic oligonucleotide
cucuuagugccacacaggu

SEQ ID NO: 2320579 - RNA, 19 nt, Artificial Sequence
  Description of Artificial Sequence: Synthetic oligonucleotide
guacuccuugcccagcauc

SEQ ID NO: 2320580 - RNA, 19 nt, Artificial Sequence
  Description of Artificial Sequence: Synthetic oligonucleotide
gcacguaucgcuccaccag

SEQ ID NO: 2320581 - RNA, 19 nt, Artificial Sequence
  Description of Artificial Sequence: Synthetic oligonucleotide
gucgugcacguaucgcucc

SEQ ID NO: 2320582 - RNA, 19 nt, Artificial Sequence
  Description of Artificial Sequence: Synthetic oligonucleotide
ccaaauacccagagucacc

SEQ ID NO: 2320583 - RNA, 19 nt, Artificial Sequence
  Description of Artificial Sequence: Synthetic oligonucleotide
gcaggucgcucuuagugcc

SEQ ID NO: 2320584 - RNA, 19 nt, Artificial Sequence
  Description of Artificial Sequence: Synthetic oligonucleotide
cacgaaggcagccccgaug

SEQ ID NO: 2320585 - RNA, 19 nt, Artificial Sequence
  Description of Artificial Sequence: Synthetic oligonucleotide
cacacugacguaauccucu

SEQ ID NO: 2320586 - RNA, 19 nt, Artificial Sequence
  Description of Artificial Sequence: Synthetic oligonucleotide
uucgcaccccgguaauaga

SEQ ID NO: 2320587 - RNA, 19 nt, Artificial Sequence
  Description of Artificial Sequence: Synthetic oligonucleotide
gcaccccgguaauagaucc

SEQ ID NO: 2320588 - RNA, 19 nt, Artificial Sequence
  Description of Artificial Sequence: Synthetic oligonucleotide
cucuggggaauucauuuaa

SEQ ID NO: 2320589 - RNA, 19 nt, Artificial Sequence
  Description of Artificial Sequence: Synthetic oligonucleotide
accccgguaauagauccug

SEQ ID NO: 2320590 - RNA, 19 nt, Artificial Sequence
  Description of Artificial Sequence: Synthetic oligonucleotide
aguaaggguuugccuucug

SEQ ID NO: 2320591 - RNA, 19 nt, Artificial Sequence
  Description of Artificial Sequence: Synthetic oligonucleotide
uccacacucuggccugucu

SEQ ID NO: 2320592 - RNA, 19 nt, Artificial Sequence
  Description of Artificial Sequence: Synthetic oligonucleotide
cagcccagacaagaauugg

SEQ ID NO: 2320593 - RNA, 19 nt, Artificial Sequence
  Description of Artificial Sequence: Synthetic oligonucleotide
ggauagaagccugggauuc

SEQ ID NO: 2320594 - RNA, 19 nt, Artificial Sequence
  Description of Artificial Sequence: Synthetic oligonucleotide
gacguaauccucugccacu

SEQ ID NO: 2320595 - RNA, 19 nt, Artificial Sequence
  Description of Artificial Sequence: Synthetic oligonucleotide
gucuacacgacggcgccgc

SEQ ID NO: 2320596 - RNA, 19 nt, Artificial Sequence
  Description of Artificial Sequence: Synthetic oligonucleotide
acguacuccuugcccagca

SEQ ID NO: 2320597 - RNA, 19 nt, Artificial Sequence
  Description of Artificial Sequence: Synthetic oligonucleotide
caccaagaagcggucgugc

SEQ ID NO: 2320598 - RNA, 19 nt, Artificial Sequence
  Description of Artificial Sequence: Synthetic oligonucleotide
ucgugcacguaucgcucca

SEQ ID NO: 2320599 - RNA, 19 nt, Artificial Sequence
  Description of Artificial Sequence: Synthetic oligonucleotide
cugacguaauccucugcca

SEQ ID NO: 2320600 - RNA, 19 nt, Artificial Sequence
  Description of Artificial Sequence: Synthetic oligonucleotide
guugugacucagugaugac

SEQ ID NO: 2320601 - RNA, 19 nt, Artificial Sequence
  Description of Artificial Sequence: Synthetic oligonucleotide
ucgcucuuagugccacaca

SEQ ID NO: 2320602 - RNA, 19 nt, Artificial Sequence
  Description of Artificial Sequence: Synthetic oligonucleotide
ugccuccguuccaugggcc

SEQ ID NO: 2320603 - RNA, 19 nt, Artificial Sequence
  Description of Artificial Sequence: Synthetic oligonucleotide
gauagaagccugggauuca

SEQ ID NO: 2320604 - RNA, 19 nt, Artificial Sequence
  Description of Artificial Sequence: Synthetic oligonucleotide
auggcuucguagcgcucag

SEQ ID NO: 2320605 - RNA, 19 nt, Artificial Sequence
  Description of Artificial Sequence: Synthetic oligonucleotide
cacguccacgcgcugcccg

SEQ ID NO: 2320606 - RNA, 19 nt, Artificial Sequence
  Description of Artificial Sequence: Synthetic oligonucleotide
cuggcucagauccacaccu

SEQ ID NO: 2320607 - RNA, 19 nt, Artificial Sequence
  Description of Artificial Sequence: Synthetic oligonucleotide
aagcggucgugcacguauc

SEQ ID NO: 2320608 - RNA, 19 nt, Artificial Sequence
  Description of Artificial Sequence: Synthetic oligonucleotide
aggucgcucuuagugccac

SEQ ID NO: 2320609 - RNA, 19 nt, Artificial Sequence
  Description of Artificial Sequence: Synthetic oligonucleotide
ggcuuugauauuaucugca

SEQ ID NO: 2320610 - RNA, 19 nt, Artificial Sequence
  Description of Artificial Sequence: Synthetic oligonucleotide
cacugacguaauccucugc

SEQ ID NO: 2320611 - RNA, 19 nt, Artificial Sequence
  Description of Artificial Sequence: Synthetic oligonucleotide
auggcagcuuucgcacccc

SEQ ID NO: 2320612 - RNA, 19 nt, Artificial Sequence
  Description of Artificial Sequence: Synthetic oligonucleotide
cagguagaucugacagccc

SEQ ID NO: 2320613 - RNA, 19 nt, Artificial Sequence
  Description of Artificial Sequence: Synthetic oligonucleotide
uaacccucuucaugcccac

SEQ ID NO: 2320614 - RNA, 19 nt, Artificial Sequence
  Description of Artificial Sequence: Synthetic oligonucleotide
uuccaugggccagcacagg

SEQ ID NO: 2320615 - RNA, 19 nt, Artificial Sequence
  Description of Artificial Sequence: Synthetic oligonucleotide
caccuggaguagcucagac

SEQ ID NO: 2320616 - RNA, 19 nt, Artificial Sequence
  Description of Artificial Sequence: Synthetic oligonucleotide
ugcccuuaacccucuucau

SEQ ID NO: 2320617 - RNA, 19 nt, Artificial Sequence
  Description of Artificial Sequence: Synthetic oligonucleotide
ggaaagcagccacacugac

SEQ ID NO: 2320618 - RNA, 19 nt, Artificial Sequence
  Description of Artificial Sequence: Synthetic oligonucleotide
guucugauaggggcccacc

SEQ ID NO: 2320619 - RNA, 19 nt, Artificial Sequence
  Description of Artificial Sequence: Synthetic oligonucleotide
gcccuuaacccucuucaug

SEQ ID NO: 2320620 - RNA, 19 nt, Artificial Sequence
  Description of Artificial Sequence: Synthetic oligonucleotide
agucuacacgacggcgccg

SEQ ID NO: 2320621 - RNA, 19 nt, Artificial Sequence
  Description of Artificial Sequence: Synthetic oligonucleotide
gcucuuagugccacacagg

SEQ ID NO: 2320622 - RNA, 19 nt, Artificial Sequence
  Description of Artificial Sequence: Synthetic oligonucleotide
cgcucuuagugccacacag

SEQ ID NO: 2320623 - RNA, 19 nt, Artificial Sequence
  Description of Artificial Sequence: Synthetic oligonucleotide
ucuacacgacggcgccgcc

SEQ ID NO: 2320624 - RNA, 19 nt, Artificial Sequence
  Description of Artificial Sequence: Synthetic oligonucleotide
gaguugugacucagugaug

SEQ ID NO: 2320625 - RNA, 19 nt, Artificial Sequence
  Description of Artificial Sequence: Synthetic oligonucleotide
cugcccaguacugccuccg

SEQ ID NO: 2320626 - RNA, 19 nt, Artificial Sequence
  Description of Artificial Sequence: Synthetic oligonucleotide
caccaggcucgucuugccc

SEQ ID NO: 2320627 - RNA, 19 nt, Artificial Sequence
  Description of Artificial Sequence: Synthetic oligonucleotide
cccaaauacccagagucac

SEQ ID NO: 2320628 - RNA, 19 nt, Artificial Sequence
  Description of Artificial Sequence: Synthetic oligonucleotide
agagcugggcuuugauauu

SEQ ID NO: 2320629 - RNA, 19 nt, Artificial Sequence
  Description of Artificial Sequence: Synthetic oligonucleotide
gcucagauccugcuguguc

SEQ ID NO: 2320630 - RNA, 19 nt, Artificial Sequence
  Description of Artificial Sequence: Synthetic oligonucleotide
gcucgucuugcccacguac

SEQ ID NO: 2320631 - RNA, 19 nt, Artificial Sequence
  Description of Artificial Sequence: Synthetic oligonucleotide
gacagcccuccucuaaacu

SEQ ID NO: 2320632 - RNA, 19 nt, Artificial Sequence
  Description of Artificial Sequence: Synthetic oligonucleotide
ccuuaacccucuucaugcc

SEQ ID NO: 2320633 - RNA, 19 nt, Artificial Sequence
  Description of Artificial Sequence: Synthetic oligonucleotide
gacggcgccgccugucuuc

SEQ ID NO: 2320634 - RNA, 19 nt, Artificial Sequence
  Description of Artificial Sequence: Synthetic oligonucleotide
uccacgcgcugcccgcuca

SEQ ID NO: 2320635 - RNA, 19 nt, Artificial Sequence
  Description of Artificial Sequence: Synthetic oligonucleotide
acggcgccgccugucuucc

SEQ ID NO: 2320636 - RNA, 19 nt, Artificial Sequence
  Description of Artificial Sequence: Synthetic oligonucleotide
cccaguacugccuccguuc

SEQ ID NO: 2320637 - RNA, 19 nt, Artificial Sequence
  Description of Artificial Sequence: Synthetic oligonucleotide
cccagacaagaauuggguc

SEQ ID NO: 2320638 - RNA, 19 nt, Artificial Sequence
  Description of Artificial Sequence: Synthetic oligonucleotide
accuucacguccacgcgcu

SEQ ID NO: 2320639 - RNA, 19 nt, Artificial Sequence
  Description of Artificial Sequence: Synthetic oligonucleotide
uccggucuccgacgcacau

SEQ ID NO: 2320640 - RNA, 19 nt, Artificial Sequence
  Description of Artificial Sequence: Synthetic oligonucleotide
uccugcucauggcuucgua

SEQ ID NO: 2320641 - RNA, 19 nt, Artificial Sequence
  Description of Artificial Sequence: Synthetic oligonucleotide
cucgccacggcgggguccg

SEQ ID NO: 2320642 - RNA, 19 nt, Artificial Sequence
  Description of Artificial Sequence: Synthetic oligonucleotide
ccaguacugccuccguucc

SEQ ID NO: 2320643 - RNA, 19 nt, Artificial Sequence
  Description of Artificial Sequence: Synthetic oligonucleotide
acguaauccucugccacuu

SEQ ID NO: 2320644 - RNA, 19 nt, Artificial Sequence
  Description of Artificial Sequence: Synthetic oligonucleotide
cugacagcccuccucuaaa

SEQ ID NO: 2320645 - RNA, 19 nt, Artificial Sequence
  Description of Artificial Sequence: Synthetic oligonucleotide
gagcugggcuuugauauua

SEQ ID NO: 2320646 - RNA, 19 nt, Artificial Sequence
  Description of Artificial Sequence: Synthetic oligonucleotide
ccgguaauagauccugcuc

SEQ ID NO: 2320647 - RNA, 19 nt, Artificial Sequence
  Description of Artificial Sequence: Synthetic oligonucleotide
aggcucgucuugcccacgu

SEQ ID NO: 2320648 - RNA, 19 nt, Artificial Sequence
  Description of Artificial Sequence: Synthetic oligonucleotide
ccaagaagcggucgugcac

SEQ ID NO: 2320649 - RNA, 19 nt, Artificial Sequence
  Description of Artificial Sequence: Synthetic oligonucleotide
cguuccaugggccagcaca

SEQ ID NO: 2320650 - RNA, 19 nt, Artificial Sequence
  Description of Artificial Sequence: Synthetic oligonucleotide
ucauggcuucguagcgcuc

SEQ ID NO: 2320651 - RNA, 19 nt, Artificial Sequence
  Description of Artificial Sequence: Synthetic oligonucleotide
cucagaccccaaccccaag

SEQ ID NO: 2320652 - RNA, 19 nt, Artificial Sequence
  Description of Artificial Sequence: Synthetic oligonucleotide
agacaagaauuggguccag

SEQ ID NO: 2320653 - RNA, 19 nt, Artificial Sequence
  Description of Artificial Sequence: Synthetic oligonucleotide
ugcccaguacugccuccgu

SEQ ID NO: 2320654 - RNA, 19 nt, Artificial Sequence
  Description of Artificial Sequence: Synthetic oligonucleotide
gcucagauccacaccuuug

SEQ ID NO: 2320655 - RNA, 19 nt, Artificial Sequence
  Description of Artificial Sequence: Synthetic oligonucleotide
cuggggaauucauuuaauu

SEQ ID NO: 2320656 - RNA, 19 nt, Artificial Sequence
  Description of Artificial Sequence: Synthetic oligonucleotide
ccgacgcacaucaccuugg

SEQ ID NO: 2320657 - RNA, 19 nt, Artificial Sequence
  Description of Artificial Sequence: Synthetic oligonucleotide
ucguagcgcucagauccug

SEQ ID NO: 2320658 - RNA, 19 nt, Artificial Sequence
  Description of Artificial Sequence: Synthetic oligonucleotide
guagcgcucagauccugcu

SEQ ID NO: 2320659 - RNA, 19 nt, Artificial Sequence
  Description of Artificial Sequence: Synthetic oligonucleotide
agcccgagccucagacccc

SEQ ID NO: 2320660 - RNA, 19 nt, Artificial Sequence
  Description of Artificial Sequence: Synthetic oligonucleotide
aggugccaccucugcuguc

SEQ ID NO: 2320661 - RNA, 19 nt, Artificial Sequence
  Description of Artificial Sequence: Synthetic oligonucleotide
acgacggcgccgccugucu

SEQ ID NO: 2320662 - RNA, 19 nt, Artificial Sequence
  Description of Artificial Sequence: Synthetic oligonucleotide
cuccguuccaugggccagc

SEQ ID NO: 2320663 - RNA, 19 nt, Artificial Sequence
  Description of Artificial Sequence: Synthetic oligonucleotide
uggcucagauccacaccuu

SEQ ID NO: 2320664 - RNA, 19 nt, Artificial Sequence
  Description of Artificial Sequence: Synthetic oligonucleotide
cugccacuuucuggaagag

SEQ ID NO: 2320665 - RNA, 19 nt, Artificial Sequence
  Description of Artificial Sequence: Synthetic oligonucleotide
cucgucuugcccacguacu

SEQ ID NO: 2320666 - RNA, 19 nt, Artificial Sequence
  Description of Artificial Sequence: Synthetic oligonucleotide
uccguuccaugggccagca

SEQ ID NO: 2320667 - RNA, 19 nt, Artificial Sequence
  Description of Artificial Sequence: Synthetic oligonucleotide
ggccagaugaguugugacu

SEQ ID NO: 2320668 - RNA, 19 nt, Artificial Sequence
  Description of Artificial Sequence: Synthetic oligonucleotide
gcucauggcuucguagcgc

SEQ ID NO: 2320669 - RNA, 19 nt, Artificial Sequence
  Description of Artificial Sequence: Synthetic oligonucleotide
aggggcccaccaagaagcg

SEQ ID NO: 2320670 - RNA, 19 nt, Artificial Sequence
  Description of Artificial Sequence: Synthetic oligonucleotide
gagucaccguccggucucc

SEQ ID NO: 2320671 - RNA, 19 nt, Artificial Sequence
  Description of Artificial Sequence: Synthetic oligonucleotide
gucaccguccggucuccga

SEQ ID NO: 2320672 - RNA, 19 nt, Artificial Sequence
  Description of Artificial Sequence: Synthetic oligonucleotide
gcuucguagcgcucagauc

SEQ ID NO: 2320673 - RNA, 19 nt, Artificial Sequence
  Description of Artificial Sequence: Synthetic oligonucleotide
ccgagcccgagccucagac

SEQ ID NO: 2320674 - RNA, 19 nt, Artificial Sequence
  Description of Artificial Sequence: Synthetic oligonucleotide
agucaccguccggucuccg

SEQ ID NO: 2320675 - RNA, 19 nt, Artificial Sequence
  Description of Artificial Sequence: Synthetic oligonucleotide
aucugacagcccuccucua

SEQ ID NO: 2320676 - RNA, 19 nt, Artificial Sequence
  Description of Artificial Sequence: Synthetic oligonucleotide
ggucgugcacguaucgcuc

SEQ ID NO: 2320677 - RNA, 19 nt, Artificial Sequence
  Description of Artificial Sequence: Synthetic oligonucleotide
gucuugcuggauguuucaa

SEQ ID NO: 2320678 - RNA, 19 nt, Artificial Sequence
  Description of Artificial Sequence: Synthetic oligonucleotide
cguagcgcucagauccugc

SEQ ID NO: 2320679 - RNA, 19 nt, Artificial Sequence
  Description of Artificial Sequence: Synthetic oligonucleotide
gcucguccacacucuggcc

SEQ ID NO: 2320680 - RNA, 19 nt, Artificial Sequence
  Description of Artificial Sequence: Synthetic oligonucleotide
ggcuucguagcgcucagau

SEQ ID NO: 2320681 - RNA, 19 nt, Artificial Sequence
  Description of Artificial Sequence: Synthetic oligonucleotide
cgcacaucaccuuggccac

SEQ ID NO: 2320682 - RNA, 19 nt, Artificial Sequence
  Description of Artificial Sequence: Synthetic oligonucleotide
gaauuggguccagccccuc

SEQ ID NO: 2320683 - RNA, 19 nt, Artificial Sequence
  Description of Artificial Sequence: Synthetic oligonucleotide
caaagagcugggcuuugau

SEQ ID NO: 2320684 - RNA, 19 nt, Artificial Sequence
  Description of Artificial Sequence: Synthetic oligonucleotide
ggaguagcucagacacuug

SEQ ID NO: 2320685 - RNA, 19 nt, Artificial Sequence
  Description of Artificial Sequence: Synthetic oligonucleotide
cucaugcucccggggccgc

SEQ ID NO: 2320686 - RNA, 19 nt, Artificial Sequence
  Description of Artificial Sequence: Synthetic oligonucleotide
caggucgcucuuagugcca

SEQ ID NO: 2320687 - RNA, 19 nt, Artificial Sequence
  Description of Artificial Sequence: Synthetic oligonucleotide
ccccgguaauagauccugc

SEQ ID NO: 2320688 - RNA, 19 nt, Artificial Sequence
  Description of Artificial Sequence: Synthetic oligonucleotide
uggcuucguagcgcucaga

SEQ ID NO: 2320689 - RNA, 19 nt, Artificial Sequence
  Description of Artificial Sequence: Synthetic oligonucleotide
ggauucaaaucugcccuua

SEQ ID NO: 2320690 - RNA, 19 nt, Artificial Sequence
  Description of Artificial Sequence: Synthetic oligonucleotide
augccagcccagacaagaa

SEQ ID NO: 2320691 - RNA, 19 nt, Artificial Sequence
  Description of Artificial Sequence: Synthetic oligonucleotide
ggggcccaccaagaagcgg

SEQ ID NO: 2320692 - RNA, 19 nt, Artificial Sequence
  Description of Artificial Sequence: Synthetic oligonucleotide
gccgccucgccacggcggg

SEQ ID NO: 2320693 - RNA, 19 nt, Artificial Sequence
  Description of Artificial Sequence: Synthetic oligonucleotide
caguacugccuccguucca

SEQ ID NO: 2320694 - RNA, 19 nt, Artificial Sequence
  Description of Artificial Sequence: Synthetic oligonucleotide
cagcuccuucacccagaac

SEQ ID NO: 2320695 - RNA, 19 nt, Artificial Sequence
  Description of Artificial Sequence: Synthetic oligonucleotide
gcccaccaagaagcggucg

SEQ ID NO: 2320696 - RNA, 19 nt, Artificial Sequence
  Description of Artificial Sequence: Synthetic oligonucleotide
cagauccugcuguguccca

SEQ ID NO: 2320697 - RNA, 19 nt, Artificial Sequence
  Description of Artificial Sequence: Synthetic oligonucleotide
ggccacgaaggcagccccg

SEQ ID NO: 2320698 - RNA, 19 nt, Artificial Sequence
  Description of Artificial Sequence: Synthetic oligonucleotide
ccaccaagaagcggucgug

SEQ ID NO: 2320699 - RNA, 19 nt, Artificial Sequence
  Description of Artificial Sequence: Synthetic oligonucleotide
gcccgcucaugcucccggg

SEQ ID NO: 2320700 - RNA, 19 nt, Artificial Sequence
  Description of Artificial Sequence: Synthetic oligonucleotide
gcacaucaccuuggccacg

SEQ ID NO: 2320701 - RNA, 19 nt, Artificial Sequence
  Description of Artificial Sequence: Synthetic oligonucleotide
gcggucgugcacguaucgc

SEQ ID NO: 2320702 - RNA, 19 nt, Artificial Sequence
  Description of Artificial Sequence: Synthetic oligonucleotide
ggcgccgccugucuuccuc

SEQ ID NO: 2320703 - RNA, 19 nt, Artificial Sequence
  Description of Artificial Sequence: Synthetic oligonucleotide
cacaggcaggugccaccuc

SEQ ID NO: 2320704 - RNA, 19 nt, Artificial Sequence
  Description of Artificial Sequence: Synthetic oligonucleotide
cacgacggcgccgccuguc

SEQ ID NO: 2320705 - RNA, 19 nt, Artificial Sequence
  Description of Artificial Sequence: Synthetic oligonucleotide
ggccgccucgccacggcgg

SEQ ID NO: 2320706 - RNA, 19 nt, Artificial Sequence
  Description of Artificial Sequence: Synthetic oligonucleotide
ggccugucuugcuggaugu

SEQ ID NO: 2320707 - RNA, 19 nt, Artificial Sequence
  Description of Artificial Sequence: Synthetic oligonucleotide
cagcuuucgcaccccggua

SEQ ID NO: 2320708 - RNA, 19 nt, Artificial Sequence
  Description of Artificial Sequence: Synthetic oligonucleotide
acacgacggcgccgccugu

SEQ ID NO: 2320709 - RNA, 19 nt, Artificial Sequence
  Description of Artificial Sequence: Synthetic oligonucleotide
aucgcuccaccaggcucgu

SEQ ID NO: 2320710 - RNA, 19 nt, Artificial Sequence
  Description of Artificial Sequence: Synthetic oligonucleotide
ccuccguuccaugggccag

SEQ ID NO: 2320711 - RNA, 19 nt, Artificial Sequence
  Description of Artificial Sequence: Synthetic oligonucleotide
cgacgcacaucaccuuggc

SEQ ID NO: 2320712 - RNA, 19 nt, Artificial Sequence
  Description of Artificial Sequence: Synthetic oligonucleotide
cuuucgcaccccgguaaua

SEQ ID NO: 2320713 - RNA, 19 nt, Artificial Sequence
  Description of Artificial Sequence: Synthetic oligonucleotide
cacccagaacuuggcucuc

SEQ ID NO: 2320714 - RNA, 19 nt, Artificial Sequence
  Description of Artificial Sequence: Synthetic oligonucleotide
cccgguaauagauccugcu

SEQ ID NO: 2320715 - RNA, 19 nt, Artificial Sequence
  Description of Artificial Sequence: Synthetic oligonucleotide
ccaggccagaugaguugug

SEQ ID NO: 2320716 - RNA, 19 nt, Artificial Sequence
  Description of Artificial Sequence: Synthetic oligonucleotide
cccucuggggaauucauuu

SEQ ID NO: 2320717 - RNA, 19 nt, Artificial Sequence
  Description of Artificial Sequence: Synthetic oligonucleotide
cgagcccgagccucagacc

SEQ ID NO: 2320718 - RNA, 19 nt, Artificial Sequence
  Description of Artificial Sequence: Synthetic oligonucleotide
ccccggccgagcccgagcc

SEQ ID NO: 2320719 - RNA, 19 nt, Artificial Sequence
  Description of Artificial Sequence: Synthetic oligonucleotide
cucccggggccgccucgcc

SEQ ID NO: 2320720 - RNA, 19 nt, Artificial Sequence
  Description of Artificial Sequence: Synthetic oligonucleotide
ccucuggggaauucauuua

SEQ ID NO: 2320721 - RNA, 19 nt, Artificial Sequence
  Description of Artificial Sequence: Synthetic oligonucleotide
agaagcggucgugcacgua

SEQ ID NO: 2320722 - RNA, 19 nt, Artificial Sequence
  Description of Artificial Sequence: Synthetic oligonucleotide
gguuugccuucuggcucag

SEQ ID NO: 2320723 - RNA, 19 nt, Artificial Sequence
  Description of Artificial Sequence: Synthetic oligonucleotide
ccgagccucagaccccaac

SEQ ID NO: 2320724 - RNA, 19 nt, Artificial Sequence
  Description of Artificial Sequence: Synthetic oligonucleotide
gggauucaaaucugcccuu

SEQ ID NO: 2320725 - RNA, 19 nt, Artificial Sequence
  Description of Artificial Sequence: Synthetic oligonucleotide
aucugcccuuaacccucuu

SEQ ID NO: 2320726 - RNA, 19 nt, Artificial Sequence
  Description of Artificial Sequence: Synthetic oligonucleotide
ggcucagauccacaccuuu

SEQ ID NO: 2320727 - RNA, 19 nt, Artificial Sequence
  Description of Artificial Sequence: Synthetic oligonucleotide
ccaugccagcccagacaag

SEQ ID NO: 2320728 - RNA, 19 nt, Artificial Sequence
  Description of Artificial Sequence: Synthetic oligonucleotide
cccggggccgccucgccac

SEQ ID NO: 2320729 - RNA, 19 nt, Artificial Sequence
  Description of Artificial Sequence: Synthetic oligonucleotide
gcgcugcccgcucaugcuc

SEQ ID NO: 2320730 - RNA, 19 nt, Artificial Sequence
  Description of Artificial Sequence: Synthetic oligonucleotide
cccaaccccaagggccucg

SEQ ID NO: 2320731 - RNA, 19 nt, Artificial Sequence
  Description of Artificial Sequence: Synthetic oligonucleotide
ugcugucagugaggucaua

SEQ ID NO: 2320732 - RNA, 19 nt, Artificial Sequence
  Description of Artificial Sequence: Synthetic oligonucleotide
guccacgcgcugcccgcuc

SEQ ID NO: 2320733 - RNA, 19 nt, Artificial Sequence
  Description of Artificial Sequence: Synthetic oligonucleotide
caccccgguaauagauccu

SEQ ID NO: 2320734 - RNA, 19 nt, Artificial Sequence
  Description of Artificial Sequence: Synthetic oligonucleotide
cguccggucuccgacgcac

SEQ ID NO: 2320735 - RNA, 19 nt, Artificial Sequence
  Description of Artificial Sequence: Synthetic oligonucleotide
cacgcgcugcccgcucaug

SEQ ID NO: 2320736 - RNA, 19 nt, Artificial Sequence
  Description of Artificial Sequence: Synthetic oligonucleotide
ggcgggguccgcgcggccc

SEQ ID NO: 2320737 - RNA, 19 nt, Artificial Sequence
  Description of Artificial Sequence: Synthetic oligonucleotide
gguccgcgcggccccggcc

SEQ ID NO: 2320738 - RNA, 19 nt, Artificial Sequence
  Description of Artificial Sequence: Synthetic oligonucleotide
ccaaccccaagggccucgc

SEQ ID NO: 2320739 - RNA, 19 nt, Artificial Sequence
  Description of Artificial Sequence: Synthetic oligonucleotide
gccccgaugguguucugau

SEQ ID NO: 2320740 - RNA, 19 nt, Artificial Sequence
  Description of Artificial Sequence: Synthetic oligonucleotide
ggggccgccucgccacggc

SEQ ID NO: 2320741 - RNA, 19 nt, Artificial Sequence
  Description of Artificial Sequence: Synthetic oligonucleotide
guccggucuccgacgcaca

SEQ ID NO: 2320742 - RNA, 19 nt, Artificial Sequence
  Description of Artificial Sequence: Synthetic oligonucleotide
cuacacgacggcgccgccu

SEQ ID NO: 2320743 - RNA, 19 nt, Artificial Sequence
  Description of Artificial Sequence: Synthetic oligonucleotide
cccaccaagaagcggucgu

SEQ ID NO: 2320744 - RNA, 19 nt, Artificial Sequence
  Description of Artificial Sequence: Synthetic oligonucleotide
gcagccccgaugguguucu

SEQ ID NO: 2320745 - RNA, 19 nt, Artificial Sequence
  Description of Artificial Sequence: Synthetic oligonucleotide
gcuuucgcaccccgguaau

SEQ ID NO: 2320746 - RNA, 19 nt, Artificial Sequence
  Description of Artificial Sequence: Synthetic oligonucleotide
gcccuccucuaaacugcgc

SEQ ID NO: 2320747 - RNA, 19 nt, Artificial Sequence
  Description of Artificial Sequence: Synthetic oligonucleotide
ccuucacguccacgcgcug

SEQ ID NO: 2320748 - RNA, 19 nt, Artificial Sequence
  Description of Artificial Sequence: Synthetic oligonucleotide
ggcagccccgaugguguuc

SEQ ID NO: 2320749 - RNA, 19 nt, Artificial Sequence
  Description of Artificial Sequence: Synthetic oligonucleotide
cagccccgaugguguucug

SEQ ID NO: 2320750 - RNA, 19 nt, Artificial Sequence
  Description of Artificial Sequence: Synthetic oligonucleotide
ccggccgagcccgagccuc

SEQ ID NO: 2320751 - RNA, 19 nt, Artificial Sequence
  Description of Artificial Sequence: Synthetic oligonucleotide
gccccggccgagcccgagc

SEQ ID NO: 2320752 - RNA, 19 nt, Artificial Sequence
  Description of Artificial Sequence: Synthetic oligonucleotide
ccucgccacggcggggucc

SEQ ID NO: 2320753 - RNA, 19 nt, Artificial Sequence
  Description of Artificial Sequence: Synthetic oligonucleotide
ggcucgucuugcccacgua

SEQ ID NO: 2320754 - RNA, 19 nt, Artificial Sequence
  Description of Artificial Sequence: Synthetic oligonucleotide
ggccgagcccgagccucag

SEQ ID NO: 2320755 - RNA, 19 nt, Artificial Sequence
  Description of Artificial Sequence: Synthetic oligonucleotide
cuccgacgcacaucaccuu

SEQ ID NO: 2320756 - RNA, 19 nt, Artificial Sequence
  Description of Artificial Sequence: Synthetic oligonucleotide
ccggucuccgacgcacauc

SEQ ID NO: 2320757 - RNA, 19 nt, Artificial Sequence
  Description of Artificial Sequence: Synthetic oligonucleotide
ggucuccgacgcacaucac

SEQ ID NO: 2320758 - RNA, 19 nt, Artificial Sequence
  Description of Artificial Sequence: Synthetic oligonucleotide
gcagccacacugacguaau

SEQ ID NO: 2320759 - RNA, 19 nt, Artificial Sequence
  Description of Artificial Sequence: Synthetic oligonucleotide
cgugcacguaucgcuccac

SEQ ID NO: 2320760 - RNA, 19 nt, Artificial Sequence
  Description of Artificial Sequence: Synthetic oligonucleotide
caugcucccggggccgccu

SEQ ID NO: 2320761 - RNA, 19 nt, Artificial Sequence
  Description of Artificial Sequence: Synthetic oligonucleotide
ccugucuugcuggauguuu

SEQ ID NO: 2320762 - RNA, 19 nt, Artificial Sequence
  Description of Artificial Sequence: Synthetic oligonucleotide
gcgcggccccggccgagcc

SEQ ID NO: 2320763 - RNA, 19 nt, Artificial Sequence
  Description of Artificial Sequence: Synthetic oligonucleotide
gccgagcccgagccucaga

SEQ ID NO: 2320764 - RNA, 19 nt, Artificial Sequence
  Description of Artificial Sequence: Synthetic oligonucleotide
ccguuccaugggccagcac

SEQ ID NO: 2320765 - RNA, 19 nt, Artificial Sequence
  Description of Artificial Sequence: Synthetic oligonucleotide
ucgccacggcgggguccgc

SEQ ID NO: 2320766 - RNA, 19 nt, Artificial Sequence
  Description of Artificial Sequence: Synthetic oligonucleotide
gcccaguacugccuccguu

SEQ ID NO: 2320767 - RNA, 19 nt, Artificial Sequence
  Description of Artificial Sequence: Synthetic oligonucleotide
cguaucgcuccaccaggcu

SEQ ID NO: 2320768 - RNA, 19 nt, Artificial Sequence
  Description of Artificial Sequence: Synthetic oligonucleotide
gcauagucuuggacaucau

SEQ ID NO: 2320769 - RNA, 19 nt, Artificial Sequence
  Description of Artificial Sequence: Synthetic oligonucleotide
ggccccggccgagcccgag

SEQ ID NO: 2320770 - RNA, 19 nt, Artificial Sequence
  Description of Artificial Sequence: Synthetic oligonucleotide
gccucgccacggcgggguc

SEQ ID NO: 2320771 - RNA, 19 nt, Artificial Sequence
  Description of Artificial Sequence: Synthetic oligonucleotide
gccccucuggggaauucau

SEQ ID NO: 2320772 - RNA, 19 nt, Artificial Sequence
  Description of Artificial Sequence: Synthetic oligonucleotide
ccccucuggggaauucauu

SEQ ID NO: 2320773 - RNA, 19 nt, Artificial Sequence
  Description of Artificial Sequence: Synthetic oligonucleotide
ccccaaccccaagggccuc

SEQ ID NO: 2320774 - RNA, 19 nt, Artificial Sequence
  Description of Artificial Sequence: Synthetic oligonucleotide
cgcgcugcccgcucaugcu

SEQ ID NO: 2320775 - RNA, 19 nt, Artificial Sequence
  Description of Artificial Sequence: Synthetic oligonucleotide
ccguccggucuccgacgca

SEQ ID NO: 2320776 - RNA, 19 nt, Artificial Sequence
  Description of Artificial Sequence: Synthetic oligonucleotide
cggccgagcccgagccuca

SEQ ID NO: 2320777 - RNA, 19 nt, Artificial Sequence
  Description of Artificial Sequence: Synthetic oligonucleotide
cgcgcggccccggccgagc

SEQ ID NO: 2320778 - RNA, 19 nt, Artificial Sequence
  Description of Artificial Sequence: Synthetic oligonucleotide
cgcucagauccugcugugu

SEQ ID NO: 2320779 - RNA, 19 nt, Artificial Sequence
  Description of Artificial Sequence: Synthetic oligonucleotide
cguaauccucugccacuuu

SEQ ID NO: 2320780 - RNA, 19 nt, Artificial Sequence
  Description of Artificial Sequence: Synthetic oligonucleotide
cgggguccgcgcggccccg

SEQ ID NO: 2320781 - RNA, 19 nt, Artificial Sequence
  Description of Artificial Sequence: Synthetic oligonucleotide
cccgagccucagaccccaa

SEQ ID NO: 2320782 - RNA, 19 nt, Artificial Sequence
  Description of Artificial Sequence: Synthetic oligonucleotide
cgccucgccacggcggggu

SEQ ID NO: 2320783 - RNA, 19 nt, Artificial Sequence
  Description of Artificial Sequence: Synthetic oligonucleotide
cccggccgagcccgagccu

SEQ ID NO: 2320784 - RNA, 19 nt, Artificial Sequence
  Description of Artificial Sequence: Synthetic oligonucleotide
cguccacgcgcugcccgcu

SEQ ID NO: 2320785 - RNA, 19 nt, Artificial Sequence
  Description of Artificial Sequence: Synthetic oligonucleotide
cgacggcgccgccugucuu

SEQ ID NO: 2320786 - RNA, 19 nt, Artificial Sequence
  Description of Artificial Sequence: Synthetic oligonucleotide
uaaagggucgauuaaaugg

SEQ ID NO: 2320787 - RNA, 19 nt, Artificial Sequence
  Description of Artificial Sequence: Synthetic oligonucleotide
uuauaauucaguuuugcug

SEQ ID NO: 2320788 - RNA, 19 nt, Artificial Sequence
  Description of Artificial Sequence: Synthetic oligonucleotide
auaagggucagcugaaugc

SEQ ID NO: 2320789 - RNA, 19 nt, Artificial Sequence
  Description of Artificial Sequence: Synthetic oligonucleotide
ucuaauuggagguaaagga

SEQ ID NO: 2320790 - RNA, 19 nt, Artificial Sequence
  Description of Artificial Sequence: Synthetic oligonucleotide
ugagcuagaaaacuaacug

SEQ ID NO: 2320791 - RNA, 19 nt, Artificial Sequence
  Description of Artificial Sequence: Synthetic oligonucleotide
ucauauuuaucucccacgg

SEQ ID NO: 2320792 - RNA, 19 nt, Artificial Sequence
  Description of Artificial Sequence: Synthetic oligonucleotide
uaauuggagguaaaggacg

SEQ ID NO: 2320793 - RNA, 19 nt, Artificial Sequence
  Description of Artificial Sequence: Synthetic oligonucleotide
cucuuuugcaguaaaaucc

SEQ ID NO: 2320794 - RNA, 19 nt, Artificial Sequence
  Description of Artificial Sequence: Synthetic oligonucleotide
uaaauggugacucauauuu

SEQ ID NO: 2320795 - RNA, 19 nt, Artificial Sequence
  Description of Artificial Sequence: Synthetic oligonucleotide
aaugcaguggguaagguuc

SEQ ID NO: 2320796 - RNA, 19 nt, Artificial Sequence
  Description of Artificial Sequence: Synthetic oligonucleotide
aguucuucacauuuauugc

SEQ ID NO: 2320797 - RNA, 19 nt, Artificial Sequence
  Description of Artificial Sequence: Synthetic oligonucleotide
aaucaugcguuccagagca

SEQ ID NO: 2320798 - RNA, 19 nt, Artificial Sequence
  Description of Artificial Sequence: Synthetic oligonucleotide
uaugcuaugaauuggucug

SEQ ID NO: 2320799 - RNA, 19 nt, Artificial Sequence
  Description of Artificial Sequence: Synthetic oligonucleotide
uuaucuuucuuauaauuca

SEQ ID NO: 2320800 - RNA, 19 nt, Artificial Sequence
  Description of Artificial Sequence: Synthetic oligonucleotide
auauuuaucucccacggug

SEQ ID NO: 2320801 - RNA, 19 nt, Artificial Sequence
  Description of Artificial Sequence: Synthetic oligonucleotide
uaaauuuccuuuaaaugcu

SEQ ID NO: 2320802 - RNA, 19 nt, Artificial Sequence
  Description of Artificial Sequence: Synthetic oligonucleotide
ugaguuacugagaugagcu

SEQ ID NO: 2320803 - RNA, 19 nt, Artificial Sequence
  Description of Artificial Sequence: Synthetic oligonucleotide
aaaacuaacugccuuccca

SEQ ID NO: 2320804 - RNA, 19 nt, Artificial Sequence
  Description of Artificial Sequence: Synthetic oligonucleotide
caaaauagucuuuagggug

SEQ ID NO: 2320805 - RNA, 19 nt, Artificial Sequence
  Description of Artificial Sequence: Synthetic oligonucleotide
agcuagaaaacuaacugcc

SEQ ID NO: 2320806 - RNA, 19 nt, Artificial Sequence
  Description of Artificial Sequence: Synthetic oligonucleotide
auuccagugaguuacugag

SEQ ID NO: 2320807 - RNA, 19 nt, Artificial Sequence
  Description of Artificial Sequence: Synthetic oligonucleotide
caucauacaagucagaaga

SEQ ID NO: 2320808 - RNA, 19 nt, Artificial Sequence
  Description of Artificial Sequence: Synthetic oligonucleotide
uuugcugcaucauacaagu

SEQ ID NO: 2320809 - RNA, 19 nt, Artificial Sequence
  Description of Artificial Sequence: Synthetic oligonucleotide
cauuuuggccauauaaggg

SEQ ID NO: 2320810 - RNA, 19 nt, Artificial Sequence
  Description of Artificial Sequence: Synthetic oligonucleotide
acauucagcgccauuaugc

SEQ ID NO: 2320811 - RNA, 19 nt, Artificial Sequence
  Description of Artificial Sequence: Synthetic oligonucleotide
auuugguggauggaaaacc

SEQ ID NO: 2320812 - RNA, 19 nt, Artificial Sequence
  Description of Artificial Sequence: Synthetic oligonucleotide
aguaugucugccgagauag

SEQ ID NO: 2320813 - RNA, 19 nt, Artificial Sequence
  Description of Artificial Sequence: Synthetic oligonucleotide
ucugccaucauauacuguc

SEQ ID NO: 2320814 - RNA, 19 nt, Artificial Sequence
  Description of Artificial Sequence: Synthetic oligonucleotide
auagucuuuagggugaagg

SEQ ID NO: 2320815 - RNA, 19 nt, Artificial Sequence
  Description of Artificial Sequence: Synthetic oligonucleotide
uaucuuucuuauaauucag

SEQ ID NO: 2320816 - RNA, 19 nt, Artificial Sequence
  Description of Artificial Sequence: Synthetic oligonucleotide
aauggugacucauauuuau

SEQ ID NO: 2320817 - RNA, 19 nt, Artificial Sequence
  Description of Artificial Sequence: Synthetic oligonucleotide
uuuccuuuaaaugcucugg

SEQ ID NO: 2320818 - RNA, 19 nt, Artificial Sequence
  Description of Artificial Sequence: Synthetic oligonucleotide
cauuuuguauuccagugag

SEQ ID NO: 2320819 - RNA, 19 nt, Artificial Sequence
  Description of Artificial Sequence: Synthetic oligonucleotide
agguaaaggacgcucuagc

SEQ ID NO: 2320820 - RNA, 19 nt, Artificial Sequence
  Description of Artificial Sequence: Synthetic oligonucleotide
cuuagauccucuuuugcag

SEQ ID NO: 2320821 - RNA, 19 nt, Artificial Sequence
  Description of Artificial Sequence: Synthetic oligonucleotide
aagguucaaaugucccugc

SEQ ID NO: 2320822 - RNA, 19 nt, Artificial Sequence
  Description of Artificial Sequence: Synthetic oligonucleotide
cucauauuuaucucccacg

SEQ ID NO: 2320823 - RNA, 19 nt, Artificial Sequence
  Description of Artificial Sequence: Synthetic oligonucleotide
auuuuggccauauaagggu

SEQ ID NO: 2320824 - RNA, 19 nt, Artificial Sequence
  Description of Artificial Sequence: Synthetic oligonucleotide
uuaaggacgauuuccuucu

SEQ ID NO: 2320825 - RNA, 19 nt, Artificial Sequence
  Description of Artificial Sequence: Synthetic oligonucleotide
uuaugcuaugaauuggucu

SEQ ID NO: 2320826 - RNA, 19 nt, Artificial Sequence
  Description of Artificial Sequence: Synthetic oligonucleotide
aauccuacuuuacuuuucu

SEQ ID NO: 2320827 - RNA, 19 nt, Artificial Sequence
  Description of Artificial Sequence: Synthetic oligonucleotide
agaaaacuaacugccuucc

SEQ ID NO: 2320828 - RNA, 19 nt, Artificial Sequence
  Description of Artificial Sequence: Synthetic oligonucleotide
uuguauuccagugaguuac

SEQ ID NO: 2320829 - RNA, 19 nt, Artificial Sequence
  Description of Artificial Sequence: Synthetic oligonucleotide
gagcuagaaaacuaacugc

SEQ ID NO: 2320830 - RNA, 19 nt, Artificial Sequence
  Description of Artificial Sequence: Synthetic oligonucleotide
aaaauccuugaaaacuggg

SEQ ID NO: 2320831 - RNA, 19 nt, Artificial Sequence
  Description of Artificial Sequence: Synthetic oligonucleotide
aaaauguccuuagauccuc

SEQ ID NO: 2320832 - RNA, 19 nt, Artificial Sequence
  Description of Artificial Sequence: Synthetic oligonucleotide
uuacuaucaaaauagucuu

SEQ ID NO: 2320833 - RNA, 19 nt, Artificial Sequence
  Description of Artificial Sequence: Synthetic oligonucleotide
auuaaauggugacucauau

SEQ ID NO: 2320834 - RNA, 19 nt, Artificial Sequence
  Description of Artificial Sequence: Synthetic oligonucleotide
gacgcucuagcaaauaggg

SEQ ID NO: 2320835 - RNA, 19 nt, Artificial Sequence
  Description of Artificial Sequence: Synthetic oligonucleotide
acuugauucagauucuggu

SEQ ID NO: 2320836 - RNA, 19 nt, Artificial Sequence
  Description of Artificial Sequence: Synthetic oligonucleotide
uauaagggucagcugaaug

SEQ ID NO: 2320837 - RNA, 19 nt, Artificial Sequence
  Description of Artificial Sequence: Synthetic oligonucleotide
uuugcaguaaaauccuacu

SEQ ID NO: 2320838 - RNA, 19 nt, Artificial Sequence
  Description of Artificial Sequence: Synthetic oligonucleotide
uuaaagggucgauuaaaug

SEQ ID NO: 2320839 - RNA, 19 nt, Artificial Sequence
  Description of Artificial Sequence: Synthetic oligonucleotide
aaaauagucuuuaggguga

SEQ ID NO: 2320840 - RNA, 19 nt, Artificial Sequence
  Description of Artificial Sequence: Synthetic oligonucleotide
ucuuauaauucaguuuugc

SEQ ID NO: 2320841 - RNA, 19 nt, Artificial Sequence
  Description of Artificial Sequence: Synthetic oligonucleotide
guuacuaucaaaauagucu

SEQ ID NO: 2320842 - RNA, 19 nt, Artificial Sequence
  Description of Artificial Sequence: Synthetic oligonucleotide
uuugaguagccgauggugu

SEQ ID NO: 2320843 - RNA, 19 nt, Artificial Sequence
  Description of Artificial Sequence: Synthetic oligonucleotide
gucuauuuugcuugcagcc

SEQ ID NO: 2320844 - RNA, 19 nt, Artificial Sequence
  Description of Artificial Sequence: Synthetic oligonucleotide
uauuuaucucccacgguga

SEQ ID NO: 2320845 - RNA, 19 nt, Artificial Sequence
  Description of Artificial Sequence: Synthetic oligonucleotide
uucaggaaucaucuuuucc

SEQ ID NO: 2320846 - RNA, 19 nt, Artificial Sequence
  Description of Artificial Sequence: Synthetic oligonucleotide
ugucuauuuugcuugcagc

SEQ ID NO: 2320847 - RNA, 19 nt, Artificial Sequence
  Description of Artificial Sequence: Synthetic oligonucleotide
uaaaggacgcucuagcaaa

SEQ ID NO: 2320848 - RNA, 19 nt, Artificial Sequence
  Description of Artificial Sequence: Synthetic oligonucleotide
uuagggugaagguucaacu

SEQ ID NO: 2320849 - RNA, 19 nt, Artificial Sequence
  Description of Artificial Sequence: Synthetic oligonucleotide
aagggugacccuuugagua

SEQ ID NO: 2320850 - RNA, 19 nt, Artificial Sequence
  Description of Artificial Sequence: Synthetic oligonucleotide
uuacuuuucuaccuaggaa

SEQ ID NO: 2320851 - RNA, 19 nt, Artificial Sequence
  Description of Artificial Sequence: Synthetic oligonucleotide
gugacucauauuuaucucc

SEQ ID NO: 2320852 - RNA, 19 nt, Artificial Sequence
  Description of Artificial Sequence: Synthetic oligonucleotide
uuuugguccauuuggugga

SEQ ID NO: 2320853 - RNA, 19 nt, Artificial Sequence
  Description of Artificial Sequence: Synthetic oligonucleotide
uuuuacccggagaggaggg

SEQ ID NO: 2320854 - RNA, 19 nt, Artificial Sequence
  Description of Artificial Sequence: Synthetic oligonucleotide
uuugguggauggaaaaccu

SEQ ID NO: 2320855 - RNA, 19 nt, Artificial Sequence
  Description of Artificial Sequence: Synthetic oligonucleotide
aaggcuuaaggacgauuuc

SEQ ID NO: 2320856 - RNA, 19 nt, Artificial Sequence
  Description of Artificial Sequence: Synthetic oligonucleotide
aaaguacccugcuuggaga

SEQ ID NO: 2320857 - RNA, 19 nt, Artificial Sequence
  Description of Artificial Sequence: Synthetic oligonucleotide
aucgguuuucccuccuucc

SEQ ID NO: 2320858 - RNA, 19 nt, Artificial Sequence
  Description of Artificial Sequence: Synthetic oligonucleotide
aaagggucgauuaaauggu

SEQ ID NO: 2320859 - RNA, 19 nt, Artificial Sequence
  Description of Artificial Sequence: Synthetic oligonucleotide
uaaaauccuacuuuacuuu

SEQ ID NO: 2320860 - RNA, 19 nt, Artificial Sequence
  Description of Artificial Sequence: Synthetic oligonucleotide
aggcuuaaggacgauuucc

SEQ ID NO: 2320861 - RNA, 19 nt, Artificial Sequence
  Description of Artificial Sequence: Synthetic oligonucleotide
gauggaaaaccuucucccc

SEQ ID NO: 2320862 - RNA, 19 nt, Artificial Sequence
  Description of Artificial Sequence: Synthetic oligonucleotide
gggguuacuaucaaaauag

SEQ ID NO: 2320863 - RNA, 19 nt, Artificial Sequence
  Description of Artificial Sequence: Synthetic oligonucleotide
ucauauacugucuccgaac

SEQ ID NO: 2320864 - RNA, 19 nt, Artificial Sequence
  Description of Artificial Sequence: Synthetic oligonucleotide
cugucuccgaacuugauuc

SEQ ID NO: 2320865 - RNA, 19 nt, Artificial Sequence
  Description of Artificial Sequence: Synthetic oligonucleotide
guauucugccaucauauac

SEQ ID NO: 2320866 - RNA, 19 nt, Artificial Sequence
  Description of Artificial Sequence: Synthetic oligonucleotide
cuuuacuuuucuaccuagg

SEQ ID NO: 2320867 - RNA, 19 nt, Artificial Sequence
  Description of Artificial Sequence: Synthetic oligonucleotide
aguuacugagaugagcuag

SEQ ID NO: 2320868 - RNA, 19 nt, Artificial Sequence
  Description of Artificial Sequence: Synthetic oligonucleotide
uuaucucccacggugaugu

SEQ ID NO: 2320869 - RNA, 19 nt, Artificial Sequence
  Description of Artificial Sequence: Synthetic oligonucleotide
ugguccauuugguggaugg

SEQ ID NO: 2320870 - RNA, 19 nt, Artificial Sequence
  Description of Artificial Sequence: Synthetic oligonucleotide
ugagaugagcuagaaaacu

SEQ ID NO: 2320871 - RNA, 19 nt, Artificial Sequence
  Description of Artificial Sequence: Synthetic oligonucleotide
ucagauucugguagccucc

SEQ ID NO: 2320872 - RNA, 19 nt, Artificial Sequence
  Description of Artificial Sequence: Synthetic oligonucleotide
ugcagccucauuaaagggu

SEQ ID NO: 2320873 - RNA, 19 nt, Artificial Sequence
  Description of Artificial Sequence: Synthetic oligonucleotide
uugagucucagguuuaaau

SEQ ID NO: 2320874 - RNA, 19 nt, Artificial Sequence
  Description of Artificial Sequence: Synthetic oligonucleotide
agucuuguaguucuucaca

SEQ ID NO: 2320875 - RNA, 19 nt, Artificial Sequence
  Description of Artificial Sequence: Synthetic oligonucleotide
aauagggguuacuaucaaa

SEQ ID NO: 2320876 - RNA, 19 nt, Artificial Sequence
  Description of Artificial Sequence: Synthetic oligonucleotide
uguauuccaucucacugaa

SEQ ID NO: 2320877 - RNA, 19 nt, Artificial Sequence
  Description of Artificial Sequence: Synthetic oligonucleotide
ugccgagauagucuuguag

SEQ ID NO: 2320878 - RNA, 19 nt, Artificial Sequence
  Description of Artificial Sequence: Synthetic oligonucleotide
uguccuuagauccucuuuu

SEQ ID NO: 2320879 - RNA, 19 nt, Artificial Sequence
  Description of Artificial Sequence: Synthetic oligonucleotide
ggagaggagggcuugaaag

SEQ ID NO: 2320880 - RNA, 19 nt, Artificial Sequence
  Description of Artificial Sequence: Synthetic oligonucleotide
gaaucaugcguuccagagc

SEQ ID NO: 2320881 - RNA, 19 nt, Artificial Sequence
  Description of Artificial Sequence: Synthetic oligonucleotide
uucagauucugguagccuc

SEQ ID NO: 2320882 - RNA, 19 nt, Artificial Sequence
  Description of Artificial Sequence: Synthetic oligonucleotide
gucaaaguacccugcuugg

SEQ ID NO: 2320883 - RNA, 19 nt, Artificial Sequence
  Description of Artificial Sequence: Synthetic oligonucleotide
caaaguacccugcuuggag

SEQ ID NO: 2320884 - RNA, 19 nt, Artificial Sequence
  Description of Artificial Sequence: Synthetic oligonucleotide
ggaaucaugcguuccagag

SEQ ID NO: 2320885 - RNA, 19 nt, Artificial Sequence
  Description of Artificial Sequence: Synthetic oligonucleotide
ucauuaaagggucgauuaa

SEQ ID NO: 2320886 - RNA, 19 nt, Artificial Sequence
  Description of Artificial Sequence: Synthetic oligonucleotide
aaaggcuuaaggacgauuu

SEQ ID NO: 2320887 - RNA, 19 nt, Artificial Sequence
  Description of Artificial Sequence: Synthetic oligonucleotide
uucuuauaauucaguuuug

SEQ ID NO: 2320888 - RNA, 19 nt, Artificial Sequence
  Description of Artificial Sequence: Synthetic oligonucleotide
gaugguguucuucauuauc

SEQ ID NO: 2320889 - RNA, 19 nt, Artificial Sequence
  Description of Artificial Sequence: Synthetic oligonucleotide
uaaaugcucuggaaucaug

SEQ ID NO: 2320890 - RNA, 19 nt, Artificial Sequence
  Description of Artificial Sequence: Synthetic oligonucleotide
uccuuagauccucuuuugc

SEQ ID NO: 2320891 - RNA, 19 nt, Artificial Sequence
  Description of Artificial Sequence: Synthetic oligonucleotide
ccuacuuuacuuuucuacc

SEQ ID NO: 2320892 - RNA, 19 nt, Artificial Sequence
  Description of Artificial Sequence: Synthetic oligonucleotide
caaauagggguuacuauca

SEQ ID NO: 2320893 - RNA, 19 nt, Artificial Sequence
  Description of Artificial Sequence: Synthetic oligonucleotide
uuagauccucuuuugcagu

SEQ ID NO: 2320894 - RNA, 19 nt, Artificial Sequence
  Description of Artificial Sequence: Synthetic oligonucleotide
ggucaaaguacccugcuug

SEQ ID NO: 2320895 - RNA, 19 nt, Artificial Sequence
  Description of Artificial Sequence: Synthetic oligonucleotide
uagcaucugucuauuuugc

SEQ ID NO: 2320896 - RNA, 19 nt, Artificial Sequence
  Description of Artificial Sequence: Synthetic oligonucleotide
uagucuuuagggugaaggu

SEQ ID NO: 2320897 - RNA, 19 nt, Artificial Sequence
  Description of Artificial Sequence: Synthetic oligonucleotide
uccauaucgguuuucccuc

SEQ ID NO: 2320898 - RNA, 19 nt, Artificial Sequence
  Description of Artificial Sequence: Synthetic oligonucleotide
gcuugaaaggcuuaaggac

SEQ ID NO: 2320899 - RNA, 19 nt, Artificial Sequence
  Description of Artificial Sequence: Synthetic oligonucleotide
cuuugaguagccgauggug

SEQ ID NO: 2320900 - RNA, 19 nt, Artificial Sequence
  Description of Artificial Sequence: Synthetic oligonucleotide
uuuggccauauaaggguca

SEQ ID NO: 2320901 - RNA, 19 nt, Artificial Sequence
  Description of Artificial Sequence: Synthetic oligonucleotide
gucgauuaaauggugacuc

SEQ ID NO: 2320902 - RNA, 19 nt, Artificial Sequence
  Description of Artificial Sequence: Synthetic oligonucleotide
ugcaucauacaagucagaa

SEQ ID NO: 2320903 - RNA, 19 nt, Artificial Sequence
  Description of Artificial Sequence: Synthetic oligonucleotide
uuucccuccuuccccaggc

SEQ ID NO: 2320904 - RNA, 19 nt, Artificial Sequence
  Description of Artificial Sequence: Synthetic oligonucleotide
uuuagggugaagguucaac

SEQ ID NO: 2320905 - RNA, 19 nt, Artificial Sequence
  Description of Artificial Sequence: Synthetic oligonucleotide
aggacgcucuagcaaauag

SEQ ID NO: 2320906 - RNA, 19 nt, Artificial Sequence
  Description of Artificial Sequence: Synthetic oligonucleotide
ucaguuuugcugcaucaua

SEQ ID NO: 2320907 - RNA, 19 nt, Artificial Sequence
  Description of Artificial Sequence: Synthetic oligonucleotide
guagccuccccucaaaauc

SEQ ID NO: 2320908 - RNA, 19 nt, Artificial Sequence
  Description of Artificial Sequence: Synthetic oligonucleotide
gaaaacuaacugccuuccc

SEQ ID NO: 2320909 - RNA, 19 nt, Artificial Sequence
  Description of Artificial Sequence: Synthetic oligonucleotide
ucauuaucuuucuuauaau

SEQ ID NO: 2320910 - RNA, 19 nt, Artificial Sequence
  Description of Artificial Sequence: Synthetic oligonucleotide
uugguauucugccaucaua

SEQ ID NO: 2320911 - RNA, 19 nt, Artificial Sequence
  Description of Artificial Sequence: Synthetic oligonucleotide
aagaggccaauccucucca

SEQ ID NO: 2320912 - RNA, 19 nt, Artificial Sequence
  Description of Artificial Sequence: Synthetic oligonucleotide
auagggguuacuaucaaaa

SEQ ID NO: 2320913 - RNA, 19 nt, Artificial Sequence
  Description of Artificial Sequence: Synthetic oligonucleotide
acuaucaaaauagucuuua

SEQ ID NO: 2320914 - RNA, 19 nt, Artificial Sequence
  Description of Artificial Sequence: Synthetic oligonucleotide
uggguaagguucaaauguc

SEQ ID NO: 2320915 - RNA, 19 nt, Artificial Sequence
  Description of Artificial Sequence: Synthetic oligonucleotide
uucaacuugaagggugacc

SEQ ID NO: 2320916 - RNA, 19 nt, Artificial Sequence
  Description of Artificial Sequence: Synthetic oligonucleotide
auuaugcuaugaauugguc

SEQ ID NO: 2320917 - RNA, 19 nt, Artificial Sequence
  Description of Artificial Sequence: Synthetic oligonucleotide
gaugagcuagaaaacuaac

SEQ ID NO: 2320918 - RNA, 19 nt, Artificial Sequence
  Description of Artificial Sequence: Synthetic oligonucleotide
agggguuacuaucaaaaua

SEQ ID NO: 2320919 - RNA, 19 nt, Artificial Sequence
  Description of Artificial Sequence: Synthetic oligonucleotide
gcaaauagggguuacuauc

SEQ ID NO: 2320920 - RNA, 19 nt, Artificial Sequence
  Description of Artificial Sequence: Synthetic oligonucleotide
cuucuaauuggagguaaag

SEQ ID NO: 2320921 - RNA, 19 nt, Artificial Sequence
  Description of Artificial Sequence: Synthetic oligonucleotide
uugcaguaaaauccuacuu

SEQ ID NO: 2320922 - RNA, 19 nt, Artificial Sequence
  Description of Artificial Sequence: Synthetic oligonucleotide
agcaaauagggguuacuau

SEQ ID NO: 2320923 - RNA, 19 nt, Artificial Sequence
  Description of Artificial Sequence: Synthetic oligonucleotide
ucgauuaaauggugacuca

SEQ ID NO: 2320924 - RNA, 19 nt, Artificial Sequence
  Description of Artificial Sequence: Synthetic oligonucleotide
gccauuaugcuaugaauug

SEQ ID NO: 2320925 - RNA, 19 nt, Artificial Sequence
  Description of Artificial Sequence: Synthetic oligonucleotide
uuuguauuccagugaguua

SEQ ID NO: 2320926 - RNA, 19 nt, Artificial Sequence
  Description of Artificial Sequence: Synthetic oligonucleotide
uagucuuguaguucuucac

SEQ ID NO: 2320927 - RNA, 19 nt, Artificial Sequence
  Description of Artificial Sequence: Synthetic oligonucleotide
ugucccugccuucaugcca

SEQ ID NO: 2320928 - RNA, 19 nt, Artificial Sequence
  Description of Artificial Sequence: Synthetic oligonucleotide
aucauauacugucuccgaa

SEQ ID NO: 2320929 - RNA, 19 nt, Artificial Sequence
  Description of Artificial Sequence: Synthetic oligonucleotide
uuaaauggugacucauauu

SEQ ID NO: 2320930 - RNA, 19 nt, Artificial Sequence
  Description of Artificial Sequence: Synthetic oligonucleotide
gacauucagcgccauuaug

SEQ ID NO: 2320931 - RNA, 19 nt, Artificial Sequence
  Description of Artificial Sequence: Synthetic oligonucleotide
agaccggacauuuccuuug

SEQ ID NO: 2320932 - RNA, 19 nt, Artificial Sequence
  Description of Artificial Sequence: Synthetic oligonucleotide
uccuuuaaaugcucuggaa

SEQ ID NO: 2320933 - RNA, 19 nt, Artificial Sequence
  Description of Artificial Sequence: Synthetic oligonucleotide
augcucuggaaucaugcgu

SEQ ID NO: 2320934 - RNA, 19 nt, Artificial Sequence
  Description of Artificial Sequence: Synthetic oligonucleotide
ggugauguauuccaucuca

SEQ ID NO: 2320935 - RNA, 19 nt, Artificial Sequence
  Description of Artificial Sequence: Synthetic oligonucleotide
ucuccgaacuugauucaga

SEQ ID NO: 2320936 - RNA, 19 nt, Artificial Sequence
  Description of Artificial Sequence: Synthetic oligonucleotide
ucuucuaauuggagguaaa

SEQ ID NO: 2320937 - RNA, 19 nt, Artificial Sequence
  Description of Artificial Sequence: Synthetic oligonucleotide
guaaaggacgcucuagcaa

SEQ ID NO: 2320938 - RNA, 19 nt, Artificial Sequence
  Description of Artificial Sequence: Synthetic oligonucleotide
aacuaacugccuucccagu

SEQ ID NO: 2320939 - RNA, 19 nt, Artificial Sequence
  Description of Artificial Sequence: Synthetic oligonucleotide
augcuaugaauuggucugc

SEQ ID NO: 2320940 - RNA, 19 nt, Artificial Sequence
  Description of Artificial Sequence: Synthetic oligonucleotide
gacgauuuccuucuuuucu

SEQ ID NO: 2320941 - RNA, 19 nt, Artificial Sequence
  Description of Artificial Sequence: Synthetic oligonucleotide
gucuuuagggugaagguuc

SEQ ID NO: 2320942 - RNA, 19 nt, Artificial Sequence
  Description of Artificial Sequence: Synthetic oligonucleotide
auaauucaguuuugcugca

SEQ ID NO: 2320943 - RNA, 19 nt, Artificial Sequence
  Description of Artificial Sequence: Synthetic oligonucleotide
augagcuagaaaacuaacu

SEQ ID NO: 2320944 - RNA, 19 nt, Artificial Sequence
  Description of Artificial Sequence: Synthetic oligonucleotide
uaugucugccgagauaguc

SEQ ID NO: 2320945 - RNA, 19 nt, Artificial Sequence
  Description of Artificial Sequence: Synthetic oligonucleotide
gccaauccucuccauaucg

SEQ ID NO: 2320946 - RNA, 19 nt, Artificial Sequence
  Description of Artificial Sequence: Synthetic oligonucleotide
auuaaagggucgauuaaau

SEQ ID NO: 2320947 - RNA, 19 nt, Artificial Sequence
  Description of Artificial Sequence: Synthetic oligonucleotide
uaucgguuuucccuccuuc

SEQ ID NO: 2320948 - RNA, 19 nt, Artificial Sequence
  Description of Artificial Sequence: Synthetic oligonucleotide
agauucugguagccucccc

SEQ ID NO: 2320949 - RNA, 19 nt, Artificial Sequence
  Description of Artificial Sequence: Synthetic oligonucleotide
gagguaaaggacgcucuag

SEQ ID NO: 2320950 - RNA, 19 nt, Artificial Sequence
  Description of Artificial Sequence: Synthetic oligonucleotide
guacccugcuuggagaccg

SEQ ID NO: 2320951 - RNA, 19 nt, Artificial Sequence
  Description of Artificial Sequence: Synthetic oligonucleotide
uuugguauucugccaucau

SEQ ID NO: 2320952 - RNA, 19 nt, Artificial Sequence
  Description of Artificial Sequence: Synthetic oligonucleotide
ucauacaagucagaagauu

SEQ ID NO: 2320953 - RNA, 19 nt, Artificial Sequence
  Description of Artificial Sequence: Synthetic oligonucleotide
aggacgauuuccuucuuuu

SEQ ID NO: 2320954 - RNA, 19 nt, Artificial Sequence
  Description of Artificial Sequence: Synthetic oligonucleotide
aauguccuuagauccucuu

SEQ ID NO: 2320955 - RNA, 19 nt, Artificial Sequence
  Description of Artificial Sequence: Synthetic oligonucleotide
agggugacccuuugaguag

SEQ ID NO: 2320956 - RNA, 19 nt, Artificial Sequence
  Description of Artificial Sequence: Synthetic oligonucleotide
cugaaugcaguggguaagg

SEQ ID NO: 2320957 - RNA, 19 nt, Artificial Sequence
  Description of Artificial Sequence: Synthetic oligonucleotide
gugaguuacugagaugagc

SEQ ID NO: 2320958 - RNA, 19 nt, Artificial Sequence
  Description of Artificial Sequence: Synthetic oligonucleotide
uguauuccagugaguuacu

SEQ ID NO: 2320959 - RNA, 19 nt, Artificial Sequence
  Description of Artificial Sequence: Synthetic oligonucleotide
ugccaucauauacugucuc

SEQ ID NO: 2320960 - RNA, 19 nt, Artificial Sequence
  Description of Artificial Sequence: Synthetic oligonucleotide
uacuaucaaaauagucuuu

SEQ ID NO: 2320961 - RNA, 19 nt, Artificial Sequence
  Description of Artificial Sequence: Synthetic oligonucleotide
agguuuaaauuuccuuuaa

SEQ ID NO: 2320962 - RNA, 19 nt, Artificial Sequence
  Description of Artificial Sequence: Synthetic oligonucleotide
aggccaauccucuccauau

SEQ ID NO: 2320963 - RNA, 19 nt, Artificial Sequence
  Description of Artificial Sequence: Synthetic oligonucleotide
cuugauucagauucuggua

SEQ ID NO: 2320964 - RNA, 19 nt, Artificial Sequence
  Description of Artificial Sequence: Synthetic oligonucleotide
uuuaucucccacggugaug

SEQ ID NO: 2320965 - RNA, 19 nt, Artificial Sequence
  Description of Artificial Sequence: Synthetic oligonucleotide
aauagucuuuagggugaag

SEQ ID NO: 2320966 - RNA, 19 nt, Artificial Sequence
  Description of Artificial Sequence: Synthetic oligonucleotide
uuucaggaaucaucuuuuc

SEQ ID NO: 2320967 - RNA, 19 nt, Artificial Sequence
  Description of Artificial Sequence: Synthetic oligonucleotide
uuccagugaguuacugaga

SEQ ID NO: 2320968 - RNA, 19 nt, Artificial Sequence
  Description of Artificial Sequence: Synthetic oligonucleotide
uagcaaauagggguuacua

SEQ ID NO: 2320969 - RNA, 19 nt, Artificial Sequence
  Description of Artificial Sequence: Synthetic oligonucleotide
uuggagguaaaggacgcuc

SEQ ID NO: 2320970 - RNA, 19 nt, Artificial Sequence
  Description of Artificial Sequence: Synthetic oligonucleotide
cauacaagucagaagauuu

SEQ ID NO: 2320971 - RNA, 19 nt, Artificial Sequence
  Description of Artificial Sequence: Synthetic oligonucleotide
gguaagguucaaauguccc

SEQ ID NO: 2320972 - RNA, 19 nt, Artificial Sequence
  Description of Artificial Sequence: Synthetic oligonucleotide
agcgccauuaugcuaugaa

SEQ ID NO: 2320973 - RNA, 19 nt, Artificial Sequence
  Description of Artificial Sequence: Synthetic oligonucleotide
ccauauaagggucagcuga

SEQ ID NO: 2320974 - RNA, 19 nt, Artificial Sequence
  Description of Artificial Sequence: Synthetic oligonucleotide
uagggguuacuaucaaaau

SEQ ID NO: 2320975 - RNA, 19 nt, Artificial Sequence
  Description of Artificial Sequence: Synthetic oligonucleotide
acugucuccgaacuugauu

SEQ ID NO: 2320976 - RNA, 19 nt, Artificial Sequence
  Description of Artificial Sequence: Synthetic oligonucleotide
agguucaacuugaagggug

SEQ ID NO: 2320977 - RNA, 19 nt, Artificial Sequence
  Description of Artificial Sequence: Synthetic oligonucleotide
ucucccacggugauguauu

SEQ ID NO: 2320978 - RNA, 19 nt, Artificial Sequence
  Description of Artificial Sequence: Synthetic oligonucleotide
uacugagaugagcuagaaa

SEQ ID NO: 2320979 - RNA, 19 nt, Artificial Sequence
  Description of Artificial Sequence: Synthetic oligonucleotide
cauuaugcuaugaauuggu

SEQ ID NO: 2320980 - RNA, 19 nt, Artificial Sequence
  Description of Artificial Sequence: Synthetic oligonucleotide
acuaacugccuucccagua

SEQ ID NO: 2320981 - RNA, 19 nt, Artificial Sequence
  Description of Artificial Sequence: Synthetic oligonucleotide
uagggugaagguucaacuu

SEQ ID NO: 2320982 - RNA, 19 nt, Artificial Sequence
  Description of Artificial Sequence: Synthetic oligonucleotide
aaggacgauuuccuucuuu

SEQ ID NO: 2320983 - RNA, 19 nt, Artificial Sequence
  Description of Artificial Sequence: Synthetic oligonucleotide
agcaucugucuauuuugcu

SEQ ID NO: 2320984 - RNA, 19 nt, Artificial Sequence
  Description of Artificial Sequence: Synthetic oligonucleotide
auuuaucucccacggugau

SEQ ID NO: 2320985 - RNA, 19 nt, Artificial Sequence
  Description of Artificial Sequence: Synthetic oligonucleotide
uggagaccggacauuuccu

SEQ ID NO: 2320986 - RNA, 19 nt, Artificial Sequence
  Description of Artificial Sequence: Synthetic oligonucleotide
auggugacucauauuuauc

SEQ ID NO: 2320987 - RNA, 19 nt, Artificial Sequence
  Description of Artificial Sequence: Synthetic oligonucleotide
agaugagcuagaaaacuaa

SEQ ID NO: 2320988 - RNA, 19 nt, Artificial Sequence
  Description of Artificial Sequence: Synthetic oligonucleotide
uucaaaugucccugccuuc

SEQ ID NO: 2320989 - RNA, 19 nt, Artificial Sequence
  Description of Artificial Sequence: Synthetic oligonucleotide
ucuagcaaauagggguuac

SEQ ID NO: 2320990 - RNA, 19 nt, Artificial Sequence
  Description of Artificial Sequence: Synthetic oligonucleotide
gauuaaauggugacucaua

SEQ ID NO: 2320991 - RNA, 19 nt, Artificial Sequence
  Description of Artificial Sequence: Synthetic oligonucleotide
aguacccugcuuggagacc

SEQ ID NO: 2320992 - RNA, 19 nt, Artificial Sequence
  Description of Artificial Sequence: Synthetic oligonucleotide
ucuuguaguucuucacauu

SEQ ID NO: 2320993 - RNA, 19 nt, Artificial Sequence
  Description of Artificial Sequence: Synthetic oligonucleotide
gguuacuaucaaaauaguc

SEQ ID NO: 2320994 - RNA, 19 nt, Artificial Sequence
  Description of Artificial Sequence: Synthetic oligonucleotide
gagucucagguuuaaauuu

SEQ ID NO: 2320995 - RNA, 19 nt, Artificial Sequence
  Description of Artificial Sequence: Synthetic oligonucleotide
ugucuccgaacuugauuca

SEQ ID NO: 2320996 - RNA, 19 nt, Artificial Sequence
  Description of Artificial Sequence: Synthetic oligonucleotide
uugcuugcagccucauuaa

SEQ ID NO: 2320997 - RNA, 19 nt, Artificial Sequence
  Description of Artificial Sequence: Synthetic oligonucleotide
ugucugccgagauagucuu

SEQ ID NO: 2320998 - RNA, 19 nt, Artificial Sequence
  Description of Artificial Sequence: Synthetic oligonucleotide
agcugaaugcaguggguaa

SEQ ID NO: 2320999 - RNA, 19 nt, Artificial Sequence
  Description of Artificial Sequence: Synthetic oligonucleotide
aagggucgauuaaauggug

SEQ ID NO: 2321000 - RNA, 19 nt, Artificial Sequence
  Description of Artificial Sequence: Synthetic oligonucleotide
ccaucauauacugucuccg

SEQ ID NO: 2321001 - RNA, 19 nt, Artificial Sequence
  Description of Artificial Sequence: Synthetic oligonucleotide
cauauaagggucagcugaa

SEQ ID NO: 2321002 - RNA, 19 nt, Artificial Sequence
  Description of Artificial Sequence: Synthetic oligonucleotide
cauuaaagggucgauuaaa

SEQ ID NO: 2321003 - RNA, 19 nt, Artificial Sequence
  Description of Artificial Sequence: Synthetic oligonucleotide
gguaaaggacgcucuagca

SEQ ID NO: 2321004 - RNA, 19 nt, Artificial Sequence
  Description of Artificial Sequence: Synthetic oligonucleotide
gagaugagcuagaaaacua

SEQ ID NO: 2321005 - RNA, 19 nt, Artificial Sequence
  Description of Artificial Sequence: Synthetic oligonucleotide
cauuaucuuucuuauaauu

SEQ ID NO: 2321006 - RNA, 19 nt, Artificial Sequence
  Description of Artificial Sequence: Synthetic oligonucleotide
uucaguuuugcugcaucau

SEQ ID NO: 2321007 - RNA, 19 nt, Artificial Sequence
  Description of Artificial Sequence: Synthetic oligonucleotide
ggugacucauauuuaucuc

SEQ ID NO: 2321008 - RNA, 19 nt, Artificial Sequence
  Description of Artificial Sequence: Synthetic oligonucleotide
aaauagucuuuagggugaa

SEQ ID NO: 2321009 - RNA, 19 nt, Artificial Sequence
  Description of Artificial Sequence: Synthetic oligonucleotide
cuacuuuacuuuucuaccu

SEQ ID NO: 2321010 - RNA, 19 nt, Artificial Sequence
  Description of Artificial Sequence: Synthetic oligonucleotide
caucauauacugucuccga

SEQ ID NO: 2321011 - RNA, 19 nt, Artificial Sequence
  Description of Artificial Sequence: Synthetic oligonucleotide
gggucgauuaaauggugac

SEQ ID NO: 2321012 - RNA, 19 nt, Artificial Sequence
  Description of Artificial Sequence: Synthetic oligonucleotide
uugaguagccgaugguguu

SEQ ID NO: 2321013 - RNA, 19 nt, Artificial Sequence
  Description of Artificial Sequence: Synthetic oligonucleotide
cuccauaucgguuuucccu

SEQ ID NO: 2321014 - RNA, 19 nt, Artificial Sequence
  Description of Artificial Sequence: Synthetic oligonucleotide
aaauguccuuagauccucu

SEQ ID NO: 2321015 - RNA, 19 nt, Artificial Sequence
  Description of Artificial Sequence: Synthetic oligonucleotide
cuuguaguucuucacauuu

SEQ ID NO: 2321016 - RNA, 19 nt, Artificial Sequence
  Description of Artificial Sequence: Synthetic oligonucleotide
ggacgcucuagcaaauagg

SEQ ID NO: 2321017 - RNA, 19 nt, Artificial Sequence
  Description of Artificial Sequence: Synthetic oligonucleotide
gcuugcagccucauuaaag

SEQ ID NO: 2321018 - RNA, 19 nt, Artificial Sequence
  Description of Artificial Sequence: Synthetic oligonucleotide
guuacugagaugagcuaga

SEQ ID NO: 2321019 - RNA, 19 nt, Artificial Sequence
  Description of Artificial Sequence: Synthetic oligonucleotide
uuacccggagaggagggcu

SEQ ID NO: 2321020 - RNA, 19 nt, Artificial Sequence
  Description of Artificial Sequence: Synthetic oligonucleotide
ugaagaggccaauccucuc

SEQ ID NO: 2321021 - RNA, 19 nt, Artificial Sequence
  Description of Artificial Sequence: Synthetic oligonucleotide
uuugacauucagcgccauu

SEQ ID NO: 2321022 - RNA, 19 nt, Artificial Sequence
  Description of Artificial Sequence: Synthetic oligonucleotide
augucugccgagauagucu

SEQ ID NO: 2321023 - RNA, 19 nt, Artificial Sequence
  Description of Artificial Sequence: Synthetic oligonucleotide
ccauuaugcuaugaauugg

SEQ ID NO: 2321024 - RNA, 19 nt, Artificial Sequence
  Description of Artificial Sequence: Synthetic oligonucleotide
auguccuuagauccucuuu

SEQ ID NO: 2321025 - RNA, 19 nt, Artificial Sequence
  Description of Artificial Sequence: Synthetic oligonucleotide
ugaguagccgaugguguuc

SEQ ID NO: 2321026 - RNA, 19 nt, Artificial Sequence
  Description of Artificial Sequence: Synthetic oligonucleotide
ucccaguaugucugccgag

SEQ ID NO: 2321027 - RNA, 19 nt, Artificial Sequence
  Description of Artificial Sequence: Synthetic oligonucleotide
ugaaugcaguggguaaggu

SEQ ID NO: 2321028 - RNA, 19 nt, Artificial Sequence
  Description of Artificial Sequence: Synthetic oligonucleotide
ugcuaugaauuggucugcu

SEQ ID NO: 2321029 - RNA, 19 nt, Artificial Sequence
  Description of Artificial Sequence: Synthetic oligonucleotide
uuuacccggagaggagggc

SEQ ID NO: 2321030 - RNA, 19 nt, Artificial Sequence
  Description of Artificial Sequence: Synthetic oligonucleotide
ugcuugcagccucauuaaa

SEQ ID NO: 2321031 - RNA, 19 nt, Artificial Sequence
  Description of Artificial Sequence: Synthetic oligonucleotide
guauuccagugaguuacug

SEQ ID NO: 2321032 - RNA, 19 nt, Artificial Sequence
  Description of Artificial Sequence: Synthetic oligonucleotide
ugguagccuccccucaaaa

SEQ ID NO: 2321033 - RNA, 19 nt, Artificial Sequence
  Description of Artificial Sequence: Synthetic oligonucleotide
agugaguuacugagaugag

SEQ ID NO: 2321034 - RNA, 19 nt, Artificial Sequence
  Description of Artificial Sequence: Synthetic oligonucleotide
cagccucauuaaagggucg

SEQ ID NO: 2321035 - RNA, 19 nt, Artificial Sequence
  Description of Artificial Sequence: Synthetic oligonucleotide
uccccucaaaauccuugaa

SEQ ID NO: 2321036 - RNA, 19 nt, Artificial Sequence
  Description of Artificial Sequence: Synthetic oligonucleotide
gucuccgaacuugauucag

SEQ ID NO: 2321037 - RNA, 19 nt, Artificial Sequence
  Description of Artificial Sequence: Synthetic oligonucleotide
ccuuagauccucuuuugca

SEQ ID NO: 2321038 - RNA, 19 nt, Artificial Sequence
  Description of Artificial Sequence: Synthetic oligonucleotide
auuuuguauuccagugagu

SEQ ID NO: 2321039 - RNA, 19 nt, Artificial Sequence
  Description of Artificial Sequence: Synthetic oligonucleotide
acgcucuagcaaauagggg

SEQ ID NO: 2321040 - RNA, 19 nt, Artificial Sequence
  Description of Artificial Sequence: Synthetic oligonucleotide
ggguaagguucaaaugucc

SEQ ID NO: 2321041 - RNA, 19 nt, Artificial Sequence
  Description of Artificial Sequence: Synthetic oligonucleotide
auucagcgccauuaugcua

SEQ ID NO: 2321042 - RNA, 19 nt, Artificial Sequence
  Description of Artificial Sequence: Synthetic oligonucleotide
ucaugcguuccagagcauu

SEQ ID NO: 2321043 - RNA, 19 nt, Artificial Sequence
  Description of Artificial Sequence: Synthetic oligonucleotide
agggucgauuaaaugguga

SEQ ID NO: 2321044 - RNA, 19 nt, Artificial Sequence
  Description of Artificial Sequence: Synthetic oligonucleotide
ucccacggugauguauucc

SEQ ID NO: 2321045 - RNA, 19 nt, Artificial Sequence
  Description of Artificial Sequence: Synthetic oligonucleotide
uucuuguggugaacuccaa

SEQ ID NO: 2321046 - RNA, 19 nt, Artificial Sequence
  Description of Artificial Sequence: Synthetic oligonucleotide
gaguuacugagaugagcua

SEQ ID NO: 2321047 - RNA, 19 nt, Artificial Sequence
  Description of Artificial Sequence: Synthetic oligonucleotide
uacccugcuuggagaccgg

SEQ ID NO: 2321048 - RNA, 19 nt, Artificial Sequence
  Description of Artificial Sequence: Synthetic oligonucleotide
cuccccucaaaauccuuga

SEQ ID NO: 2321049 - RNA, 19 nt, Artificial Sequence
  Description of Artificial Sequence: Synthetic oligonucleotide
cuuccccaggcaugauggc

SEQ ID NO: 2321050 - RNA, 19 nt, Artificial Sequence
  Description of Artificial Sequence: Synthetic oligonucleotide
agccucauuaaagggucga

SEQ ID NO: 2321051 - RNA, 19 nt, Artificial Sequence
  Description of Artificial Sequence: Synthetic oligonucleotide
cagauucugguagccuccc

SEQ ID NO: 2321052 - RNA, 19 nt, Artificial Sequence
  Description of Artificial Sequence: Synthetic oligonucleotide
cauucagcgccauuaugcu

SEQ ID NO: 2321053 - RNA, 19 nt, Artificial Sequence
  Description of Artificial Sequence: Synthetic oligonucleotide
gggucagcugaaugcagug

SEQ ID NO: 2321054 - RNA, 19 nt, Artificial Sequence
  Description of Artificial Sequence: Synthetic oligonucleotide
ucagcgccauuaugcuaug

SEQ ID NO: 2321055 - RNA, 19 nt, Artificial Sequence
  Description of Artificial Sequence: Synthetic oligonucleotide
gccauauaagggucagcug

SEQ ID NO: 2321056 - RNA, 19 nt, Artificial Sequence
  Description of Artificial Sequence: Synthetic oligonucleotide
gaggccaauccucuccaua

SEQ ID NO: 2321057 - RNA, 19 nt, Artificial Sequence
  Description of Artificial Sequence: Synthetic oligonucleotide
uacugucuccgaacuugau

SEQ ID NO: 2321058 - RNA, 19 nt, Artificial Sequence
  Description of Artificial Sequence: Synthetic oligonucleotide
guccauuugguggauggaa

SEQ ID NO: 2321059 - RNA, 19 nt, Artificial Sequence
  Description of Artificial Sequence: Synthetic oligonucleotide
gccgagauagucuuguagu

SEQ ID NO: 2321060 - RNA, 19 nt, Artificial Sequence
  Description of Artificial Sequence: Synthetic oligonucleotide
auaucgguuuucccuccuu

SEQ ID NO: 2321061 - RNA, 19 nt, Artificial Sequence
  Description of Artificial Sequence: Synthetic oligonucleotide
aguugagucucagguuuaa

SEQ ID NO: 2321062 - RNA, 19 nt, Artificial Sequence
  Description of Artificial Sequence: Synthetic oligonucleotide
uccucuccauaucgguuuu

SEQ ID NO: 2321063 - RNA, 19 nt, Artificial Sequence
  Description of Artificial Sequence: Synthetic oligonucleotide
cucuucuaauuggagguaa

SEQ ID NO: 2321064 - RNA, 19 nt, Artificial Sequence
  Description of Artificial Sequence: Synthetic oligonucleotide
caauccucuccauaucggu

SEQ ID NO: 2321065 - RNA, 19 nt, Artificial Sequence
  Description of Artificial Sequence: Synthetic oligonucleotide
gcagccucauuaaaggguc

SEQ ID NO: 2321066 - RNA, 19 nt, Artificial Sequence
  Description of Artificial Sequence: Synthetic oligonucleotide
ggacgauuuccuucuuuuc

SEQ ID NO: 2321067 - RNA, 19 nt, Artificial Sequence
  Description of Artificial Sequence: Synthetic oligonucleotide
caguggguaagguucaaau

SEQ ID NO: 2321068 - RNA, 19 nt, Artificial Sequence
  Description of Artificial Sequence: Synthetic oligonucleotide
gguucaacuugaaggguga

SEQ ID NO: 2321069 - RNA, 19 nt, Artificial Sequence
  Description of Artificial Sequence: Synthetic oligonucleotide
cauauuuaucucccacggu

SEQ ID NO: 2321070 - RNA, 19 nt, Artificial Sequence
  Description of Artificial Sequence: Synthetic oligonucleotide
guauuccaucucacugaag

SEQ ID NO: 2321071 - RNA, 19 nt, Artificial Sequence
  Description of Artificial Sequence: Synthetic oligonucleotide
ggccauauaagggucagcu

SEQ ID NO: 2321072 - RNA, 19 nt, Artificial Sequence
  Description of Artificial Sequence: Synthetic oligonucleotide
uggccauauaagggucagc

SEQ ID NO: 2321073 - RNA, 19 nt, Artificial Sequence
  Description of Artificial Sequence: Synthetic oligonucleotide
uaaggacgauuuccuucuu

SEQ ID NO: 2321074 - RNA, 19 nt, Artificial Sequence
  Description of Artificial Sequence: Synthetic oligonucleotide
aucucccacggugauguau

SEQ ID NO: 2321075 - RNA, 19 nt, Artificial Sequence
  Description of Artificial Sequence: Synthetic oligonucleotide
gagggcuugaaaggcuuaa

SEQ ID NO: 2321076 - RNA, 19 nt, Artificial Sequence
  Description of Artificial Sequence: Synthetic oligonucleotide
uuugguccauuugguggau

SEQ ID NO: 2321077 - RNA, 19 nt, Artificial Sequence
  Description of Artificial Sequence: Synthetic oligonucleotide
ccauaucgguuuucccucc

SEQ ID NO: 2321078 - RNA, 19 nt, Artificial Sequence
  Description of Artificial Sequence: Synthetic oligonucleotide
cuaacugccuucccaguau

SEQ ID NO: 2321079 - RNA, 19 nt, Artificial Sequence
  Description of Artificial Sequence: Synthetic oligonucleotide
acccuuugaguagccgaug

SEQ ID NO: 2321080 - RNA, 19 nt, Artificial Sequence
  Description of Artificial Sequence: Synthetic oligonucleotide
gggugaagguucaacuuga

SEQ ID NO: 2321081 - RNA, 19 nt, Artificial Sequence
  Description of Artificial Sequence: Synthetic oligonucleotide
augcaguggguaagguuca

SEQ ID NO: 2321082 - RNA, 19 nt, Artificial Sequence
  Description of Artificial Sequence: Synthetic oligonucleotide
ccuuuaaaugcucuggaau

SEQ ID NO: 2321083 - RNA, 19 nt, Artificial Sequence
  Description of Artificial Sequence: Synthetic oligonucleotide
cuccgaacuugauucagau

SEQ ID NO: 2321084 - RNA, 19 nt, Artificial Sequence
  Description of Artificial Sequence: Synthetic oligonucleotide
cugcaucauacaagucaga

SEQ ID NO: 2321085 - RNA, 19 nt, Artificial Sequence
  Description of Artificial Sequence: Synthetic oligonucleotide
cgcucuagcaaauaggggu

SEQ ID NO: 2321086 - RNA, 19 nt, Artificial Sequence
  Description of Artificial Sequence: Synthetic oligonucleotide
gaaaggcuuaaggacgauu

SEQ ID NO: 2321087 - RNA, 19 nt, Artificial Sequence
  Description of Artificial Sequence: Synthetic oligonucleotide
cucccacggugauguauuc

SEQ ID NO: 2321088 - RNA, 19 nt, Artificial Sequence
  Description of Artificial Sequence: Synthetic oligonucleotide
acuugaagggugacccuuu

SEQ ID NO: 2321089 - RNA, 19 nt, Artificial Sequence
  Description of Artificial Sequence: Synthetic oligonucleotide
ccgaugguguucuucauua

SEQ ID NO: 2321090 - RNA, 19 nt, Artificial Sequence
  Description of Artificial Sequence: Synthetic oligonucleotide
gaguagccgaugguguucu

SEQ ID NO: 2321091 - RNA, 19 nt, Artificial Sequence
  Description of Artificial Sequence: Synthetic oligonucleotide
augcguuccagagcauuuu

SEQ ID NO: 2321092 - RNA, 19 nt, Artificial Sequence
  Description of Artificial Sequence: Synthetic oligonucleotide
gaccggacauuuccuuugu

SEQ ID NO: 2321093 - RNA, 19 nt, Artificial Sequence
  Description of Artificial Sequence: Synthetic oligonucleotide
ccagugaguuacugagaug

SEQ ID NO: 2321094 - RNA, 19 nt, Artificial Sequence
  Description of Artificial Sequence: Synthetic oligonucleotide
cugccaucauauacugucu

SEQ ID NO: 2321095 - RNA, 19 nt, Artificial Sequence
  Description of Artificial Sequence: Synthetic oligonucleotide
gacccuuugaguagccgau

SEQ ID NO: 2321096 - RNA, 19 nt, Artificial Sequence
  Description of Artificial Sequence: Synthetic oligonucleotide
ccauuugguggauggaaaa

SEQ ID NO: 2321097 - RNA, 19 nt, Artificial Sequence
  Description of Artificial Sequence: Synthetic oligonucleotide
agccgaugguguucuucau

SEQ ID NO: 2321098 - RNA, 19 nt, Artificial Sequence
  Description of Artificial Sequence: Synthetic oligonucleotide
gggugacccuuugaguagc

SEQ ID NO: 2321099 - RNA, 19 nt, Artificial Sequence
  Description of Artificial Sequence: Synthetic oligonucleotide
ugcaguggguaagguucaa

SEQ ID NO: 2321100 - RNA, 19 nt, Artificial Sequence
  Description of Artificial Sequence: Synthetic oligonucleotide
ggcuuaaggacgauuuccu

SEQ ID NO: 2321101 - RNA, 19 nt, Artificial Sequence
  Description of Artificial Sequence: Synthetic oligonucleotide
ggagguaaaggacgcucua

SEQ ID NO: 2321102 - RNA, 19 nt, Artificial Sequence
  Description of Artificial Sequence: Synthetic oligonucleotide
caguaugucugccgagaua

SEQ ID NO: 2321103 - RNA, 19 nt, Artificial Sequence
  Description of Artificial Sequence: Synthetic oligonucleotide
caugcguuccagagcauuu

SEQ ID NO: 2321104 - RNA, 19 nt, Artificial Sequence
  Description of Artificial Sequence: Synthetic oligonucleotide
cgguuuucccuccuucccc

SEQ ID NO: 2321105 - RNA, 19 nt, Artificial Sequence
  Description of Artificial Sequence: Synthetic oligonucleotide
accggacauuuccuuuguu

SEQ ID NO: 2321106 - RNA, 19 nt, Artificial Sequence
  Description of Artificial Sequence: Synthetic oligonucleotide
gguggauggaaaaccuucu

SEQ ID NO: 2321107 - RNA, 19 nt, Artificial Sequence
  Description of Artificial Sequence: Synthetic oligonucleotide
ggucgauuaaauggugacu

SEQ ID NO: 2321108 - RNA, 19 nt, Artificial Sequence
  Description of Artificial Sequence: Synthetic oligonucleotide
ccccucaaaauccuugaaa

SEQ ID NO: 2321109 - RNA, 19 nt, Artificial Sequence
  Description of Artificial Sequence: Synthetic oligonucleotide
ccagagcauuuuguauucc

SEQ ID NO: 2321110 - RNA, 19 nt, Artificial Sequence
  Description of Artificial Sequence: Synthetic oligonucleotide
acccggagaggagggcuug

SEQ ID NO: 2321111 - RNA, 19 nt, Artificial Sequence
  Description of Artificial Sequence: Synthetic oligonucleotide
ggugacccuuugaguagcc

SEQ ID NO: 2321112 - RNA, 19 nt, Artificial Sequence
  Description of Artificial Sequence: Synthetic oligonucleotide
cugguagccuccccucaaa

SEQ ID NO: 2321113 - RNA, 19 nt, Artificial Sequence
  Description of Artificial Sequence: Synthetic oligonucleotide
cucuagcaaauagggguua

SEQ ID NO: 2321114 - RNA, 19 nt, Artificial Sequence
  Description of Artificial Sequence: Synthetic oligonucleotide
agccuccccucaaaauccu

SEQ ID NO: 2321115 - RNA, 19 nt, Artificial Sequence
  Description of Artificial Sequence: Synthetic oligonucleotide
gguagccuccccucaaaau

SEQ ID NO: 2321116 - RNA, 19 nt, Artificial Sequence
  Description of Artificial Sequence: Synthetic oligonucleotide
cauaucgguuuucccuccu

SEQ ID NO: 2321117 - RNA, 19 nt, Artificial Sequence
  Description of Artificial Sequence: Synthetic oligonucleotide
gucugccgagauagucuug

SEQ ID NO: 2321118 - RNA, 19 nt, Artificial Sequence
  Description of Artificial Sequence: Synthetic oligonucleotide
guaguucuucacauuuauu

SEQ ID NO: 2321119 - RNA, 19 nt, Artificial Sequence
  Description of Artificial Sequence: Synthetic oligonucleotide
uucaugccaccagccuuuu

SEQ ID NO: 2321120 - RNA, 19 nt, Artificial Sequence
  Description of Artificial Sequence: Synthetic oligonucleotide
gguccauuugguggaugga

SEQ ID NO: 2321121 - RNA, 19 nt, Artificial Sequence
  Description of Artificial Sequence: Synthetic oligonucleotide
ccuucccaguaugucugcc

SEQ ID NO: 2321122 - RNA, 19 nt, Artificial Sequence
  Description of Artificial Sequence: Synthetic oligonucleotide
acccugcuuggagaccgga

SEQ ID NO: 2321123 - RNA, 19 nt, Artificial Sequence
  Description of Artificial Sequence: Synthetic oligonucleotide
ggguuacuaucaaaauagu

SEQ ID NO: 2321124 - RNA, 19 nt, Artificial Sequence
  Description of Artificial Sequence: Synthetic oligonucleotide
ggugaagguucaacuugaa

SEQ ID NO: 2321125 - RNA, 19 nt, Artificial Sequence
  Description of Artificial Sequence: Synthetic oligonucleotide
cccaguaugucugccgaga

SEQ ID NO: 2321126 - RNA, 19 nt, Artificial Sequence
  Description of Artificial Sequence: Synthetic oligonucleotide
ggagaccggacauuuccuu

SEQ ID NO: 2321127 - RNA, 19 nt, Artificial Sequence
  Description of Artificial Sequence: Synthetic oligonucleotide
caaaugucccugccuucau

SEQ ID NO: 2321128 - RNA, 19 nt, Artificial Sequence
  Description of Artificial Sequence: Synthetic oligonucleotide
cgccauuaugcuaugaauu

SEQ ID NO: 2321129 - RNA, 19 nt, Artificial Sequence
  Description of Artificial Sequence: Synthetic oligonucleotide
cugccgagauagucuugua

SEQ ID NO: 2321130 - RNA, 19 nt, Artificial Sequence
  Description of Artificial Sequence: Synthetic oligonucleotide
aucaugcguuccagagcau

SEQ ID NO: 2321131 - RNA, 19 nt, Artificial Sequence
  Description of Artificial Sequence: Synthetic oligonucleotide
gcuaugaauuggucugcuu

SEQ ID NO: 2321132 - RNA, 19 nt, Artificial Sequence
  Description of Artificial Sequence: Synthetic oligonucleotide
cggugauguauuccaucuc

SEQ ID NO: 2321133 - RNA, 19 nt, Artificial Sequence
  Description of Artificial Sequence: Synthetic oligonucleotide
guaugucugccgagauagu

SEQ ID NO: 2321134 - RNA, 19 nt, Artificial Sequence
  Description of Artificial Sequence: Synthetic oligonucleotide
gggucaaaguacccugcuu

SEQ ID NO: 2321135 - RNA, 19 nt, Artificial Sequence
  Description of Artificial Sequence: Synthetic oligonucleotide
ccccaggcaugauggcuuc

SEQ ID NO: 2321136 - RNA, 19 nt, Artificial Sequence
  Description of Artificial Sequence: Synthetic oligonucleotide
ccgagauagucuuguaguu

SEQ ID NO: 2321137 - RNA, 19 nt, Artificial Sequence
  Description of Artificial Sequence: Synthetic oligonucleotide
ccuuugaguagccgauggu

SEQ ID NO: 2321138 - RNA, 19 nt, Artificial Sequence
  Description of Artificial Sequence: Synthetic oligonucleotide
cagcgccauuaugcuauga

SEQ ID NO: 2321139 - RNA, 19 nt, Artificial Sequence
  Description of Artificial Sequence: Synthetic oligonucleotide
gccgaugguguucuucauu

SEQ ID NO: 2321140 - RNA, 19 nt, Artificial Sequence
  Description of Artificial Sequence: Synthetic oligonucleotide
ggagggcuugaaaggcuua

SEQ ID NO: 2321141 - RNA, 19 nt, Artificial Sequence
  Description of Artificial Sequence: Synthetic oligonucleotide
cgauuaaauggugacucau

SEQ ID NO: 2321142 - RNA, 19 nt, Artificial Sequence
  Description of Artificial Sequence: Synthetic oligonucleotide
cccggguagcaucugucua

SEQ ID NO: 2321143 - RNA, 19 nt, Artificial Sequence
  Description of Artificial Sequence: Synthetic oligonucleotide
ccucauuaaagggucgauu

SEQ ID NO: 2321144 - RNA, 19 nt, Artificial Sequence
  Description of Artificial Sequence: Synthetic oligonucleotide
ccaguaugucugccgagau

SEQ ID NO: 2321145 - RNA, 19 nt, Artificial Sequence
  Description of Artificial Sequence: Synthetic oligonucleotide
ccccggguagcaucugucu

SEQ ID NO: 2321146 - RNA, 19 nt, Artificial Sequence
  Description of Artificial Sequence: Synthetic oligonucleotide
ggguagcaucugucuauuu

SEQ ID NO: 2321147 - RNA, 19 nt, Artificial Sequence
  Description of Artificial Sequence: Synthetic oligonucleotide
ccacggugauguauuccau

SEQ ID NO: 2321148 - RNA, 19 nt, Artificial Sequence
  Description of Artificial Sequence: Synthetic oligonucleotide
ccggagaggagggcuugaa

SEQ ID NO: 2321149 - RNA, 19 nt, Artificial Sequence
  Description of Artificial Sequence: Synthetic oligonucleotide
ccaggcaugauggcuucuu

SEQ ID NO: 2321150 - RNA, 19 nt, Artificial Sequence
  Description of Artificial Sequence: Synthetic oligonucleotide
cggguagcaucugucuauu

SEQ ID NO: 2321151 - RNA, 19 nt, Artificial Sequence
  Description of Artificial Sequence: Synthetic oligonucleotide
aaagacuggacauauauac

SEQ ID NO: 2321152 - RNA, 19 nt, Artificial Sequence
  Description of Artificial Sequence: Synthetic oligonucleotide
auuaauugcaaacaccagc

SEQ ID NO: 2321153 - RNA, 19 nt, Artificial Sequence
  Description of Artificial Sequence: Synthetic oligonucleotide
ucauuaauugcaaacacca

SEQ ID NO: 2321154 - RNA, 19 nt, Artificial Sequence
  Description of Artificial Sequence: Synthetic oligonucleotide
aauugcaaacaccagcagg

SEQ ID NO: 2321155 - RNA, 19 nt, Artificial Sequence
  Description of Artificial Sequence: Synthetic oligonucleotide
gaaugugaagguaagaggg

SEQ ID NO: 2321156 - RNA, 19 nt, Artificial Sequence
  Description of Artificial Sequence: Synthetic oligonucleotide
acauauauacagcagugac

SEQ ID NO: 2321157 - RNA, 19 nt, Artificial Sequence
  Description of Artificial Sequence: Synthetic oligonucleotide
accuagaggagacugaggc

SEQ ID NO: 2321158 - RNA, 19 nt, Artificial Sequence
  Description of Artificial Sequence: Synthetic oligonucleotide
aaaguaagccauguggugg

SEQ ID NO: 2321159 - RNA, 19 nt, Artificial Sequence
  Description of Artificial Sequence: Synthetic oligonucleotide
accucaucgacauucagac

SEQ ID NO: 2321160 - RNA, 19 nt, Artificial Sequence
  Description of Artificial Sequence: Synthetic oligonucleotide
cucaucgacauucagacgc

SEQ ID NO: 2321161 - RNA, 19 nt, Artificial Sequence
  Description of Artificial Sequence: Synthetic oligonucleotide
agaaugugaagguaagagg

SEQ ID NO: 2321162 - RNA, 19 nt, Artificial Sequence
  Description of Artificial Sequence: Synthetic oligonucleotide
aaacaccucaucgacauuc

SEQ ID NO: 2321163 - RNA, 19 nt, Artificial Sequence
  Description of Artificial Sequence: Synthetic oligonucleotide
agacuggacauauauacag

SEQ ID NO: 2321164 - RNA, 19 nt, Artificial Sequence
  Description of Artificial Sequence: Synthetic oligonucleotide
ucaaaguaagccauguggu

SEQ ID NO: 2321165 - RNA, 19 nt, Artificial Sequence
  Description of Artificial Sequence: Synthetic oligonucleotide
uccugaggaaccuagagga

SEQ ID NO: 2321166 - RNA, 19 nt, Artificial Sequence
  Description of Artificial Sequence: Synthetic oligonucleotide
uacuaaagaaggcacucag

SEQ ID NO: 2321167 - RNA, 19 nt, Artificial Sequence
  Description of Artificial Sequence: Synthetic oligonucleotide
uacagcagugacaaggacc

SEQ ID NO: 2321168 - RNA, 19 nt, Artificial Sequence
  Description of Artificial Sequence: Synthetic oligonucleotide
uucccaacuagcacaacgg

SEQ ID NO: 2321169 - RNA, 19 nt, Artificial Sequence
  Description of Artificial Sequence: Synthetic oligonucleotide
uggacauauauacagcagu

SEQ ID NO: 2321170 - RNA, 19 nt, Artificial Sequence
  Description of Artificial Sequence: Synthetic oligonucleotide
aaaggagguacuaaagaag

SEQ ID NO: 2321171 - RNA, 19 nt, Artificial Sequence
  Description of Artificial Sequence: Synthetic oligonucleotide
ugucauuaauugcaaacac

SEQ ID NO: 2321172 - RNA, 19 nt, Artificial Sequence
  Description of Artificial Sequence: Synthetic oligonucleotide
agaucggaggaccuggcgc

SEQ ID NO: 2321173 - RNA, 19 nt, Artificial Sequence
  Description of Artificial Sequence: Synthetic oligonucleotide
agggaugccauccacagug

SEQ ID NO: 2321174 - RNA, 19 nt, Artificial Sequence
  Description of Artificial Sequence: Synthetic oligonucleotide
gguauuuccggacaguccg

SEQ ID NO: 2321175 - RNA, 19 nt, Artificial Sequence
  Description of Artificial Sequence: Synthetic oligonucleotide
gucgcuuggagcuauuugg

SEQ ID NO: 2321176 - RNA, 19 nt, Artificial Sequence
  Description of Artificial Sequence: Synthetic oligonucleotide
gacaaggaccuccugaacc

SEQ ID NO: 2321177 - RNA, 19 nt, Artificial Sequence
  Description of Artificial Sequence: Synthetic oligonucleotide
aacggggaaaucgucacgg

SEQ ID NO: 2321178 - RNA, 19 nt, Artificial Sequence
  Description of Artificial Sequence: Synthetic oligonucleotide
aggagggaguucuugcucc

SEQ ID NO: 2321179 - RNA, 19 nt, Artificial Sequence
  Description of Artificial Sequence: Synthetic oligonucleotide
uggugggaagcacugaaag

SEQ ID NO: 2321180 - RNA, 19 nt, Artificial Sequence
  Description of Artificial Sequence: Synthetic oligonucleotide
guucccaacuagcacaacg

SEQ ID NO: 2321181 - RNA, 19 nt, Artificial Sequence
  Description of Artificial Sequence: Synthetic oligonucleotide
gaaaggagguacuaaagaa

SEQ ID NO: 2321182 - RNA, 19 nt, Artificial Sequence
  Description of Artificial Sequence: Synthetic oligonucleotide
aaggcacucagugguagcc

SEQ ID NO: 2321183 - RNA, 19 nt, Artificial Sequence
  Description of Artificial Sequence: Synthetic oligonucleotide
uugcccaccucauugaagc

SEQ ID NO: 2321184 - RNA, 19 nt, Artificial Sequence
  Description of Artificial Sequence: Synthetic oligonucleotide
agaggccucaaaguaagcc

SEQ ID NO: 2321185 - RNA, 19 nt, Artificial Sequence
  Description of Artificial Sequence: Synthetic oligonucleotide
acaacggggaaaucgucac

SEQ ID NO: 2321186 - RNA, 19 nt, Artificial Sequence
  Description of Artificial Sequence: Synthetic oligonucleotide
gucguagucagacacgaag

SEQ ID NO: 2321187 - RNA, 19 nt, Artificial Sequence
  Description of Artificial Sequence: Synthetic oligonucleotide
cauucagacgccauuuggc

SEQ ID NO: 2321188 - RNA, 19 nt, Artificial Sequence
  Description of Artificial Sequence: Synthetic oligonucleotide
gacgccauuuggcagaggc

SEQ ID NO: 2321189 - RNA, 19 nt, Artificial Sequence
  Description of Artificial Sequence: Synthetic oligonucleotide
uguccugaggaaccuagag

SEQ ID NO: 2321190 - RNA, 19 nt, Artificial Sequence
  Description of Artificial Sequence: Synthetic oligonucleotide
aagguaagaggguguagug

SEQ ID NO: 2321191 - RNA, 19 nt, Artificial Sequence
  Description of Artificial Sequence: Synthetic oligonucleotide
uagcacaacggggaaaucg

SEQ ID NO: 2321192 - RNA, 19 nt, Artificial Sequence
  Description of Artificial Sequence: Synthetic oligonucleotide
gugggaagcacugaaagag

SEQ ID NO: 2321193 - RNA, 19 nt, Artificial Sequence
  Description of Artificial Sequence: Synthetic oligonucleotide
ugcgugaauagcuugccca

SEQ ID NO: 2321194 - RNA, 19 nt, Artificial Sequence
  Description of Artificial Sequence: Synthetic oligonucleotide
agaucuuuguguaggaguc

SEQ ID NO: 2321195 - RNA, 19 nt, Artificial Sequence
  Description of Artificial Sequence: Synthetic oligonucleotide
gagcuauuuggcuacagca

SEQ ID NO: 2321196 - RNA, 19 nt, Artificial Sequence
  Description of Artificial Sequence: Synthetic oligonucleotide
uuuccggacaguccggacc

SEQ ID NO: 2321197 - RNA, 19 nt, Artificial Sequence
  Description of Artificial Sequence: Synthetic oligonucleotide
agugacaaggaccuccuga

SEQ ID NO: 2321198 - RNA, 19 nt, Artificial Sequence
  Description of Artificial Sequence: Synthetic oligonucleotide
ugaggaucugcgugaauag

SEQ ID NO: 2321199 - RNA, 19 nt, Artificial Sequence
  Description of Artificial Sequence: Synthetic oligonucleotide
cucauugaagcucugccug

SEQ ID NO: 2321200 - RNA, 19 nt, Artificial Sequence
  Description of Artificial Sequence: Synthetic oligonucleotide
guugccagcacgcauguac

SEQ ID NO: 2321201 - RNA, 19 nt, Artificial Sequence
  Description of Artificial Sequence: Synthetic oligonucleotide
ucugccugucauuaauugc

SEQ ID NO: 2321202 - RNA, 19 nt, Artificial Sequence
  Description of Artificial Sequence: Synthetic oligonucleotide
gaaaucgucacgguccuug

SEQ ID NO: 2321203 - RNA, 19 nt, Artificial Sequence
  Description of Artificial Sequence: Synthetic oligonucleotide
ugaggaaccuagaggagac

SEQ ID NO: 2321204 - RNA, 19 nt, Artificial Sequence
  Description of Artificial Sequence: Synthetic oligonucleotide
ucccaacuagcacaacggg

SEQ ID NO: 2321205 - RNA, 19 nt, Artificial Sequence
  Description of Artificial Sequence: Synthetic oligonucleotide
agcacgcauguacugcucc

SEQ ID NO: 2321206 - RNA, 19 nt, Artificial Sequence
  Description of Artificial Sequence: Synthetic oligonucleotide
ucguagucagacacgaagu

SEQ ID NO: 2321207 - RNA, 19 nt, Artificial Sequence
  Description of Artificial Sequence: Synthetic oligonucleotide
cauuaauugcaaacaccag

SEQ ID NO: 2321208 - RNA, 19 nt, Artificial Sequence
  Description of Artificial Sequence: Synthetic oligonucleotide
uucagaucggaggaccugg

SEQ ID NO: 2321209 - RNA, 19 nt, Artificial Sequence
  Description of Artificial Sequence: Synthetic oligonucleotide
uagcuugcccaccucauug

SEQ ID NO: 2321210 - RNA, 19 nt, Artificial Sequence
  Description of Artificial Sequence: Synthetic oligonucleotide
aaucgucacgguccuugac

SEQ ID NO: 2321211 - RNA, 19 nt, Artificial Sequence
  Description of Artificial Sequence: Synthetic oligonucleotide
cagcuugugagucucgccg

SEQ ID NO: 2321212 - RNA, 19 nt, Artificial Sequence
  Description of Artificial Sequence: Synthetic oligonucleotide
auucagacgccauuuggca

SEQ ID NO: 2321213 - RNA, 19 nt, Artificial Sequence
  Description of Artificial Sequence: Synthetic oligonucleotide
aacaccagcaggaagccgu

SEQ ID NO: 2321214 - RNA, 19 nt, Artificial Sequence
  Description of Artificial Sequence: Synthetic oligonucleotide
gcuauuuggcuacagcagg

SEQ ID NO: 2321215 - RNA, 19 nt, Artificial Sequence
  Description of Artificial Sequence: Synthetic oligonucleotide
cuuggagcuauuuggcuac

SEQ ID NO: 2321216 - RNA, 19 nt, Artificial Sequence
  Description of Artificial Sequence: Synthetic oligonucleotide
ugugaagguaagagggugu

SEQ ID NO: 2321217 - RNA, 19 nt, Artificial Sequence
  Description of Artificial Sequence: Synthetic oligonucleotide
cauauauacagcagugaca

SEQ ID NO: 2321218 - RNA, 19 nt, Artificial Sequence
  Description of Artificial Sequence: Synthetic oligonucleotide
gucauuaauugcaaacacc

SEQ ID NO: 2321219 - RNA, 19 nt, Artificial Sequence
  Description of Artificial Sequence: Synthetic oligonucleotide
uugugagucucgccgggcg

SEQ ID NO: 2321220 - RNA, 19 nt, Artificial Sequence
  Description of Artificial Sequence: Synthetic oligonucleotide
aagccauguggugggaagc

SEQ ID NO: 2321221 - RNA, 19 nt, Artificial Sequence
  Description of Artificial Sequence: Synthetic oligonucleotide
caaaguaagccauguggug

SEQ ID NO: 2321222 - RNA, 19 nt, Artificial Sequence
  Description of Artificial Sequence: Synthetic oligonucleotide
uggggucguagucagacac

SEQ ID NO: 2321223 - RNA, 19 nt, Artificial Sequence
  Description of Artificial Sequence: Synthetic oligonucleotide
uucagacgccauuuggcag

SEQ ID NO: 2321224 - RNA, 19 nt, Artificial Sequence
  Description of Artificial Sequence: Synthetic oligonucleotide
ggaggcuucagaucggagg

SEQ ID NO: 2321225 - RNA, 19 nt, Artificial Sequence
  Description of Artificial Sequence: Synthetic oligonucleotide
caccaaauuccucuugacc

SEQ ID NO: 2321226 - RNA, 19 nt, Artificial Sequence
  Description of Artificial Sequence: Synthetic oligonucleotide
ugguauuuccggacagucc

SEQ ID NO: 2321227 - RNA, 19 nt, Artificial Sequence
  Description of Artificial Sequence: Synthetic oligonucleotide
gaaccuagaggagacugag

SEQ ID NO: 2321228 - RNA, 19 nt, Artificial Sequence
  Description of Artificial Sequence: Synthetic oligonucleotide
cacgaaguaggacuggaug

SEQ ID NO: 2321229 - RNA, 19 nt, Artificial Sequence
  Description of Artificial Sequence: Synthetic oligonucleotide
acagugcagaucuuugugu

SEQ ID NO: 2321230 - RNA, 19 nt, Artificial Sequence
  Description of Artificial Sequence: Synthetic oligonucleotide
aaugugaagguaagagggu

SEQ ID NO: 2321231 - RNA, 19 nt, Artificial Sequence
  Description of Artificial Sequence: Synthetic oligonucleotide
ucaucgacauucagacgcc

SEQ ID NO: 2321232 - RNA, 19 nt, Artificial Sequence
  Description of Artificial Sequence: Synthetic oligonucleotide
gagguacuaaagaaggcac

SEQ ID NO: 2321233 - RNA, 19 nt, Artificial Sequence
  Description of Artificial Sequence: Synthetic oligonucleotide
agugcagaucuuuguguag

SEQ ID NO: 2321234 - RNA, 19 nt, Artificial Sequence
  Description of Artificial Sequence: Synthetic oligonucleotide
ugugagucucgccgggcgg

SEQ ID NO: 2321235 - RNA, 19 nt, Artificial Sequence
  Description of Artificial Sequence: Synthetic oligonucleotide
aucgucacgguccuugacu

SEQ ID NO: 2321236 - RNA, 19 nt, Artificial Sequence
  Description of Artificial Sequence: Synthetic oligonucleotide
cugccugucauuaauugca

SEQ ID NO: 2321237 - RNA, 19 nt, Artificial Sequence
  Description of Artificial Sequence: Synthetic oligonucleotide
guagucagacacgaaguag

SEQ ID NO: 2321238 - RNA, 19 nt, Artificial Sequence
  Description of Artificial Sequence: Synthetic oligonucleotide
gaauagcuugcccaccuca

SEQ ID NO: 2321239 - RNA, 19 nt, Artificial Sequence
  Description of Artificial Sequence: Synthetic oligonucleotide
ucgcuuggagcuauuuggc

SEQ ID NO: 2321240 - RNA, 19 nt, Artificial Sequence
  Description of Artificial Sequence: Synthetic oligonucleotide
gaucugcgugaauagcuug

SEQ ID NO: 2321241 - RNA, 19 nt, Artificial Sequence
  Description of Artificial Sequence: Synthetic oligonucleotide
uccugguauuuccggacag

SEQ ID NO: 2321242 - RNA, 19 nt, Artificial Sequence
  Description of Artificial Sequence: Synthetic oligonucleotide
ugggcuaggagggaguucu

SEQ ID NO: 2321243 - RNA, 19 nt, Artificial Sequence
  Description of Artificial Sequence: Synthetic oligonucleotide
aagacuggacauauauaca

SEQ ID NO: 2321244 - RNA, 19 nt, Artificial Sequence
  Description of Artificial Sequence: Synthetic oligonucleotide
agcuauuuggcuacagcag

SEQ ID NO: 2321245 - RNA, 19 nt, Artificial Sequence
  Description of Artificial Sequence: Synthetic oligonucleotide
gcuacagcaggaugcaggg

SEQ ID NO: 2321246 - RNA, 19 nt, Artificial Sequence
  Description of Artificial Sequence: Synthetic oligonucleotide
aaaucgucacgguccuuga

SEQ ID NO: 2321247 - RNA, 19 nt, Artificial Sequence
  Description of Artificial Sequence: Synthetic oligonucleotide
gacauucagacgccauuug

SEQ ID NO: 2321248 - RNA, 19 nt, Artificial Sequence
  Description of Artificial Sequence: Synthetic oligonucleotide
gaaagaggaggcuucagau

SEQ ID NO: 2321249 - RNA, 19 nt, Artificial Sequence
  Description of Artificial Sequence: Synthetic oligonucleotide
ucugccuuguucccaacua

SEQ ID NO: 2321250 - RNA, 19 nt, Artificial Sequence
  Description of Artificial Sequence: Synthetic oligonucleotide
aagugugaggcagcugguc

SEQ ID NO: 2321251 - RNA, 19 nt, Artificial Sequence
  Description of Artificial Sequence: Synthetic oligonucleotide
cagacacgaaguaggacug

SEQ ID NO: 2321252 - RNA, 19 nt, Artificial Sequence
  Description of Artificial Sequence: Synthetic oligonucleotide
cucugccugucauuaauug

SEQ ID NO: 2321253 - RNA, 19 nt, Artificial Sequence
  Description of Artificial Sequence: Synthetic oligonucleotide
gacuggacauauauacagc

SEQ ID NO: 2321254 - RNA, 19 nt, Artificial Sequence
  Description of Artificial Sequence: Synthetic oligonucleotide
auuuccggacaguccggac

SEQ ID NO: 2321255 - RNA, 19 nt, Artificial Sequence
  Description of Artificial Sequence: Synthetic oligonucleotide
gaagccguugccagcacgc

SEQ ID NO: 2321256 - RNA, 19 nt, Artificial Sequence
  Description of Artificial Sequence: Synthetic oligonucleotide
aggaaccuagaggagacug

SEQ ID NO: 2321257 - RNA, 19 nt, Artificial Sequence
  Description of Artificial Sequence: Synthetic oligonucleotide
cugucauuaauugcaaaca

SEQ ID NO: 2321258 - RNA, 19 nt, Artificial Sequence
  Description of Artificial Sequence: Synthetic oligonucleotide
uuguucccaacuagcacaa

SEQ ID NO: 2321259 - RNA, 19 nt, Artificial Sequence
  Description of Artificial Sequence: Synthetic oligonucleotide
acuagcacaacggggaaau

SEQ ID NO: 2321260 - RNA, 19 nt, Artificial Sequence
  Description of Artificial Sequence: Synthetic oligonucleotide
ugaagguaagaggguguag

SEQ ID NO: 2321261 - RNA, 19 nt, Artificial Sequence
  Description of Artificial Sequence: Synthetic oligonucleotide
cuugcccaccucauugaag

SEQ ID NO: 2321262 - RNA, 19 nt, Artificial Sequence
  Description of Artificial Sequence: Synthetic oligonucleotide
uaggagggaguucuugcuc

SEQ ID NO: 2321263 - RNA, 19 nt, Artificial Sequence
  Description of Artificial Sequence: Synthetic oligonucleotide
uuuguguaggaguccucaa

SEQ ID NO: 2321264 - RNA, 19 nt, Artificial Sequence
  Description of Artificial Sequence: Synthetic oligonucleotide
ucagaucggaggaccuggc

SEQ ID NO: 2321265 - RNA, 19 nt, Artificial Sequence
  Description of Artificial Sequence: Synthetic oligonucleotide
ggacauauauacagcagug

SEQ ID NO: 2321266 - RNA, 19 nt, Artificial Sequence
  Description of Artificial Sequence: Synthetic oligonucleotide
ucgacauucagacgccauu

SEQ ID NO: 2321267 - RNA, 19 nt, Artificial Sequence
  Description of Artificial Sequence: Synthetic oligonucleotide
aaccuagaggagacugagg

SEQ ID NO: 2321268 - RNA, 19 nt, Artificial Sequence
  Description of Artificial Sequence: Synthetic oligonucleotide
aggaucugcgugaauagcu

SEQ ID NO: 2321269 - RNA, 19 nt, Artificial Sequence
  Description of Artificial Sequence: Synthetic oligonucleotide
agaaggcacucagugguag

SEQ ID NO: 2321270 - RNA, 19 nt, Artificial Sequence
  Description of Artificial Sequence: Synthetic oligonucleotide
aaggaccuccugaacccac

SEQ ID NO: 2321271 - RNA, 19 nt, Artificial Sequence
  Description of Artificial Sequence: Synthetic oligonucleotide
gaagguaagaggguguagu

SEQ ID NO: 2321272 - RNA, 19 nt, Artificial Sequence
  Description of Artificial Sequence: Synthetic oligonucleotide
aauagcuugcccaccucau

SEQ ID NO: 2321273 - RNA, 19 nt, Artificial Sequence
  Description of Artificial Sequence: Synthetic oligonucleotide
ugcuccugguauuuccgga

SEQ ID NO: 2321274 - RNA, 19 nt, Artificial Sequence
  Description of Artificial Sequence: Synthetic oligonucleotide
ucgucacgguccuugacuc

SEQ ID NO: 2321275 - RNA, 19 nt, Artificial Sequence
  Description of Artificial Sequence: Synthetic oligonucleotide
gagagcuugugguggucgc

SEQ ID NO: 2321276 - RNA, 19 nt, Artificial Sequence
  Description of Artificial Sequence: Synthetic oligonucleotide
ggagcuauuuggcuacagc

SEQ ID NO: 2321277 - RNA, 19 nt, Artificial Sequence
  Description of Artificial Sequence: Synthetic oligonucleotide
cccaacuagcacaacgggg

SEQ ID NO: 2321278 - RNA, 19 nt, Artificial Sequence
  Description of Artificial Sequence: Synthetic oligonucleotide
ccucaggccacacaaagug

SEQ ID NO: 2321279 - RNA, 19 nt, Artificial Sequence
  Description of Artificial Sequence: Synthetic oligonucleotide
gaacccaccaggggcuugg

SEQ ID NO: 2321280 - RNA, 19 nt, Artificial Sequence
  Description of Artificial Sequence: Synthetic oligonucleotide
cacaacggggaaaucguca

SEQ ID NO: 2321281 - RNA, 19 nt, Artificial Sequence
  Description of Artificial Sequence: Synthetic oligonucleotide
augccauccacagugcaga

SEQ ID NO: 2321282 - RNA, 19 nt, Artificial Sequence
  Description of Artificial Sequence: Synthetic oligonucleotide
ugaauagcuugcccaccuc

SEQ ID NO: 2321283 - RNA, 19 nt, Artificial Sequence
  Description of Artificial Sequence: Synthetic oligonucleotide
gaggaucugcgugaauagc

SEQ ID NO: 2321284 - RNA, 19 nt, Artificial Sequence
  Description of Artificial Sequence: Synthetic oligonucleotide
acuaaagaaggcacucagu

SEQ ID NO: 2321285 - RNA, 19 nt, Artificial Sequence
  Description of Artificial Sequence: Synthetic oligonucleotide
uauuuccggacaguccgga

SEQ ID NO: 2321286 - RNA, 19 nt, Artificial Sequence
  Description of Artificial Sequence: Synthetic oligonucleotide
gguacuaaagaaggcacuc

SEQ ID NO: 2321287 - RNA, 19 nt, Artificial Sequence
  Description of Artificial Sequence: Synthetic oligonucleotide
ccaacuagcacaacgggga

SEQ ID NO: 2321288 - RNA, 19 nt, Artificial Sequence
  Description of Artificial Sequence: Synthetic oligonucleotide
guaguguguccugaggaac

SEQ ID NO: 2321289 - RNA, 19 nt, Artificial Sequence
  Description of Artificial Sequence: Synthetic oligonucleotide
ugccugucauuaauugcaa

SEQ ID NO: 2321290 - RNA, 19 nt, Artificial Sequence
  Description of Artificial Sequence: Synthetic oligonucleotide
aggcacucagugguagccc

SEQ ID NO: 2321291 - RNA, 19 nt, Artificial Sequence
  Description of Artificial Sequence: Synthetic oligonucleotide
agaggguguaguguguccu

SEQ ID NO: 2321292 - RNA, 19 nt, Artificial Sequence
  Description of Artificial Sequence: Synthetic oligonucleotide
agcacaacggggaaaucgu

SEQ ID NO: 2321293 - RNA, 19 nt, Artificial Sequence
  Description of Artificial Sequence: Synthetic oligonucleotide
gccacacaaagugugaggc

SEQ ID NO: 2321294 - RNA, 19 nt, Artificial Sequence
  Description of Artificial Sequence: Synthetic oligonucleotide
ccagcuagagccucaggcc

SEQ ID NO: 2321295 - RNA, 19 nt, Artificial Sequence
  Description of Artificial Sequence: Synthetic oligonucleotide
caacggggaaaucgucacg

SEQ ID NO: 2321296 - RNA, 19 nt, Artificial Sequence
  Description of Artificial Sequence: Synthetic oligonucleotide
uagaggagacugaggccca

SEQ ID NO: 2321297 - RNA, 19 nt, Artificial Sequence
  Description of Artificial Sequence: Synthetic oligonucleotide
uauuuggcuacagcaggau

SEQ ID NO: 2321298 - RNA, 19 nt, Artificial Sequence
  Description of Artificial Sequence: Synthetic oligonucleotide
aacaccucaucgacauuca

SEQ ID NO: 2321299 - RNA, 19 nt, Artificial Sequence
  Description of Artificial Sequence: Synthetic oligonucleotide
ucccgcauggcaccaaauu

SEQ ID NO: 2321300 - RNA, 19 nt, Artificial Sequence
  Description of Artificial Sequence: Synthetic oligonucleotide
agcgcgcucuugcccacgc

SEQ ID NO: 2321301 - RNA, 19 nt, Artificial Sequence
  Description of Artificial Sequence: Synthetic oligonucleotide
cagaucggaggaccuggcg

SEQ ID NO: 2321302 - RNA, 19 nt, Artificial Sequence
  Description of Artificial Sequence: Synthetic oligonucleotide
cagaucuuuguguaggagu

SEQ ID NO: 2321303 - RNA, 19 nt, Artificial Sequence
  Description of Artificial Sequence: Synthetic oligonucleotide
aguccggaccagcugcuca

SEQ ID NO: 2321304 - RNA, 19 nt, Artificial Sequence
  Description of Artificial Sequence: Synthetic oligonucleotide
guauuuccggacaguccgg

SEQ ID NO: 2321305 - RNA, 19 nt, Artificial Sequence
  Description of Artificial Sequence: Synthetic oligonucleotide
aucugccuuguucccaacu

SEQ ID NO: 2321306 - RNA, 19 nt, Artificial Sequence
  Description of Artificial Sequence: Synthetic oligonucleotide
cacgcauguacugcucccg

SEQ ID NO: 2321307 - RNA, 19 nt, Artificial Sequence
  Description of Artificial Sequence: Synthetic oligonucleotide
acgccauuuggcagaggcc

SEQ ID NO: 2321308 - RNA, 19 nt, Artificial Sequence
  Description of Artificial Sequence: Synthetic oligonucleotide
gacacgaaguaggacugga

SEQ ID NO: 2321309 - RNA, 19 nt, Artificial Sequence
  Description of Artificial Sequence: Synthetic oligonucleotide
guacuaaagaaggcacuca

SEQ ID NO: 2321310 - RNA, 19 nt, Artificial Sequence
  Description of Artificial Sequence: Synthetic oligonucleotide
aggaccuccugaacccacc

SEQ ID NO: 2321311 - RNA, 19 nt, Artificial Sequence
  Description of Artificial Sequence: Synthetic oligonucleotide
cugcgugaauagcuugccc

SEQ ID NO: 2321312 - RNA, 19 nt, Artificial Sequence
  Description of Artificial Sequence: Synthetic oligonucleotide
aacuagcacaacggggaaa

SEQ ID NO: 2321313 - RNA, 19 nt, Artificial Sequence
  Description of Artificial Sequence: Synthetic oligonucleotide
agguacuaaagaaggcacu

SEQ ID NO: 2321314 - RNA, 19 nt, Artificial Sequence
  Description of Artificial Sequence: Synthetic oligonucleotide
agacacgaaguaggacugg

SEQ ID NO: 2321315 - RNA, 19 nt, Artificial Sequence
  Description of Artificial Sequence: Synthetic oligonucleotide
gaucggaggaccuggcgcu

SEQ ID NO: 2321316 - RNA, 19 nt, Artificial Sequence
  Description of Artificial Sequence: Synthetic oligonucleotide
uggagcuauuuggcuacag

SEQ ID NO: 2321317 - RNA, 19 nt, Artificial Sequence
  Description of Artificial Sequence: Synthetic oligonucleotide
gugguggucgcuuggagcu

SEQ ID NO: 2321318 - RNA, 19 nt, Artificial Sequence
  Description of Artificial Sequence: Synthetic oligonucleotide
agcuagagccucaggccac

SEQ ID NO: 2321319 - RNA, 19 nt, Artificial Sequence
  Description of Artificial Sequence: Synthetic oligonucleotide
cugaggaucugcgugaaua

SEQ ID NO: 2321320 - RNA, 19 nt, Artificial Sequence
  Description of Artificial Sequence: Synthetic oligonucleotide
agucagacacgaaguagga

SEQ ID NO: 2321321 - RNA, 19 nt, Artificial Sequence
  Description of Artificial Sequence: Synthetic oligonucleotide
gucagcgcgcucuugccca

SEQ ID NO: 2321322 - RNA, 19 nt, Artificial Sequence
  Description of Artificial Sequence: Synthetic oligonucleotide
ggaagccguugccagcacg

SEQ ID NO: 2321323 - RNA, 19 nt, Artificial Sequence
  Description of Artificial Sequence: Synthetic oligonucleotide
ggucgcuuggagcuauuug

SEQ ID NO: 2321324 - RNA, 19 nt, Artificial Sequence
  Description of Artificial Sequence: Synthetic oligonucleotide
auagcuugcccaccucauu

SEQ ID NO: 2321325 - RNA, 19 nt, Artificial Sequence
  Description of Artificial Sequence: Synthetic oligonucleotide
cagcuagagccucaggcca

SEQ ID NO: 2321326 - RNA, 19 nt, Artificial Sequence
  Description of Artificial Sequence: Synthetic oligonucleotide
ggugggaagcacugaaaga

SEQ ID NO: 2321327 - RNA, 19 nt, Artificial Sequence
  Description of Artificial Sequence: Synthetic oligonucleotide
agcuugugguggucgcuug

SEQ ID NO: 2321328 - RNA, 19 nt, Artificial Sequence
  Description of Artificial Sequence: Synthetic oligonucleotide
gugaauagcuugcccaccu

SEQ ID NO: 2321329 - RNA, 19 nt, Artificial Sequence
  Description of Artificial Sequence: Synthetic oligonucleotide
gugagucucgccgggcggg

SEQ ID NO: 2321330 - RNA, 19 nt, Artificial Sequence
  Description of Artificial Sequence: Synthetic oligonucleotide
cuucagaucggaggaccug

SEQ ID NO: 2321331 - RNA, 19 nt, Artificial Sequence
  Description of Artificial Sequence: Synthetic oligonucleotide
cuugugagucucgccgggc

SEQ ID NO: 2321332 - RNA, 19 nt, Artificial Sequence
  Description of Artificial Sequence: Synthetic oligonucleotide
caccucauugaagcucugc

SEQ ID NO: 2321333 - RNA, 19 nt, Artificial Sequence
  Description of Artificial Sequence: Synthetic oligonucleotide
ugagucucgccgggcgggg

SEQ ID NO: 2321334 - RNA, 19 nt, Artificial Sequence
  Description of Artificial Sequence: Synthetic oligonucleotide
cauugaagcucugccuguc

SEQ ID NO: 2321335 - RNA, 19 nt, Artificial Sequence
  Description of Artificial Sequence: Synthetic oligonucleotide
gcuugugagucucgccggg

SEQ ID NO: 2321336 - RNA, 19 nt, Artificial Sequence
  Description of Artificial Sequence: Synthetic oligonucleotide
gucagacacgaaguaggac

SEQ ID NO: 2321337 - RNA, 19 nt, Artificial Sequence
  Description of Artificial Sequence: Synthetic oligonucleotide
auggcaccaaauuccucuu

SEQ ID NO: 2321338 - RNA, 19 nt, Artificial Sequence
  Description of Artificial Sequence: Synthetic oligonucleotide
gacgccgccccgcugcuca

SEQ ID NO: 2321339 - RNA, 19 nt, Artificial Sequence
  Description of Artificial Sequence: Synthetic oligonucleotide
gccagaaugugaagguaag

SEQ ID NO: 2321340 - RNA, 19 nt, Artificial Sequence
  Description of Artificial Sequence: Synthetic oligonucleotide
gaccaccagcuugugaguc

SEQ ID NO: 2321341 - RNA, 19 nt, Artificial Sequence
  Description of Artificial Sequence: Synthetic oligonucleotide
ucugaggaucugcgugaau

SEQ ID NO: 2321342 - RNA, 19 nt, Artificial Sequence
  Description of Artificial Sequence: Synthetic oligonucleotide
gcgugaauagcuugcccac

SEQ ID NO: 2321343 - RNA, 19 nt, Artificial Sequence
  Description of Artificial Sequence: Synthetic oligonucleotide
gcuccugguauuuccggac

SEQ ID NO: 2321344 - RNA, 19 nt, Artificial Sequence
  Description of Artificial Sequence: Synthetic oligonucleotide
gcuuggagcuauuuggcua

SEQ ID NO: 2321345 - RNA, 19 nt, Artificial Sequence
  Description of Artificial Sequence: Synthetic oligonucleotide
acggggaaaucgucacggu

SEQ ID NO: 2321346 - RNA, 19 nt, Artificial Sequence
  Description of Artificial Sequence: Synthetic oligonucleotide
aggguguaguguguccuga

SEQ ID NO: 2321347 - RNA, 19 nt, Artificial Sequence
  Description of Artificial Sequence: Synthetic oligonucleotide
ggguguaguguguccugag

SEQ ID NO: 2321348 - RNA, 19 nt, Artificial Sequence
  Description of Artificial Sequence: Synthetic oligonucleotide
auuuggcagaggccucaaa

SEQ ID NO: 2321349 - RNA, 19 nt, Artificial Sequence
  Description of Artificial Sequence: Synthetic oligonucleotide
cuccugguauuuccggaca

SEQ ID NO: 2321350 - RNA, 19 nt, Artificial Sequence
  Description of Artificial Sequence: Synthetic oligonucleotide
agagcuugugguggucgcu

SEQ ID NO: 2321351 - RNA, 19 nt, Artificial Sequence
  Description of Artificial Sequence: Synthetic oligonucleotide
ggucagcgcgcucuugccc

SEQ ID NO: 2321352 - RNA, 19 nt, Artificial Sequence
  Description of Artificial Sequence: Synthetic oligonucleotide
ugguagccccaggaggcca

SEQ ID NO: 2321353 - RNA, 19 nt, Artificial Sequence
  Description of Artificial Sequence: Synthetic oligonucleotide
uggcuacagcaggaugcag

SEQ ID NO: 2321354 - RNA, 19 nt, Artificial Sequence
  Description of Artificial Sequence: Synthetic oligonucleotide
gaccuggcgcugugucucc

SEQ ID NO: 2321355 - RNA, 19 nt, Artificial Sequence
  Description of Artificial Sequence: Synthetic oligonucleotide
ugaacccaccaggggcuug

SEQ ID NO: 2321356 - RNA, 19 nt, Artificial Sequence
  Description of Artificial Sequence: Synthetic oligonucleotide
agucccggacgccgccccg

SEQ ID NO: 2321357 - RNA, 19 nt, Artificial Sequence
  Description of Artificial Sequence: Synthetic oligonucleotide
gugaagguaagagggugua

SEQ ID NO: 2321358 - RNA, 19 nt, Artificial Sequence
  Description of Artificial Sequence: Synthetic oligonucleotide
agccguugccagcacgcau

SEQ ID NO: 2321359 - RNA, 19 nt, Artificial Sequence
  Description of Artificial Sequence: Synthetic oligonucleotide
ccucaucgacauucagacg

SEQ ID NO: 2321360 - RNA, 19 nt, Artificial Sequence
  Description of Artificial Sequence: Synthetic oligonucleotide
gugcagggaugccauccac

SEQ ID NO: 2321361 - RNA, 19 nt, Artificial Sequence
  Description of Artificial Sequence: Synthetic oligonucleotide
cuugugguggucgcuugga

SEQ ID NO: 2321362 - RNA, 19 nt, Artificial Sequence
  Description of Artificial Sequence: Synthetic oligonucleotide
ggggucguagucagacacg

SEQ ID NO: 2321363 - RNA, 19 nt, Artificial Sequence
  Description of Artificial Sequence: Synthetic oligonucleotide
gcacgcauguacugcuccc

SEQ ID NO: 2321364 - RNA, 19 nt, Artificial Sequence
  Description of Artificial Sequence: Synthetic oligonucleotide
ggucccaagagagcuugug

SEQ ID NO: 2321365 - RNA, 19 nt, Artificial Sequence
  Description of Artificial Sequence: Synthetic oligonucleotide
uuggagcuauuuggcuaca

SEQ ID NO: 2321366 - RNA, 19 nt, Artificial Sequence
  Description of Artificial Sequence: Synthetic oligonucleotide
ggacaguccggaccagcug

SEQ ID NO: 2321367 - RNA, 19 nt, Artificial Sequence
  Description of Artificial Sequence: Synthetic oligonucleotide
uggucccaagagagcuugu

SEQ ID NO: 2321368 - RNA, 19 nt, Artificial Sequence
  Description of Artificial Sequence: Synthetic oligonucleotide
gcaggaagccguugccagc

SEQ ID NO: 2321369 - RNA, 19 nt, Artificial Sequence
  Description of Artificial Sequence: Synthetic oligonucleotide
aucgacauucagacgccau

SEQ ID NO: 2321370 - RNA, 19 nt, Artificial Sequence
  Description of Artificial Sequence: Synthetic oligonucleotide
ccucaaaguaagccaugug

SEQ ID NO: 2321371 - RNA, 19 nt, Artificial Sequence
  Description of Artificial Sequence: Synthetic oligonucleotide
cagacgccauuuggcagag

SEQ ID NO: 2321372 - RNA, 19 nt, Artificial Sequence
  Description of Artificial Sequence: Synthetic oligonucleotide
gggucguagucagacacga

SEQ ID NO: 2321373 - RNA, 19 nt, Artificial Sequence
  Description of Artificial Sequence: Synthetic oligonucleotide
ggcgcugugucuccagauc

SEQ ID NO: 2321374 - RNA, 19 nt, Artificial Sequence
  Description of Artificial Sequence: Synthetic oligonucleotide
ggaugccauccacagugca

SEQ ID NO: 2321375 - RNA, 19 nt, Artificial Sequence
  Description of Artificial Sequence: Synthetic oligonucleotide
acacgaaguaggacuggau

SEQ ID NO: 2321376 - RNA, 19 nt, Artificial Sequence
  Description of Artificial Sequence: Synthetic oligonucleotide
cagcacgcauguacugcuc

SEQ ID NO: 2321377 - RNA, 19 nt, Artificial Sequence
  Description of Artificial Sequence: Synthetic oligonucleotide
caacuagcacaacggggaa

SEQ ID NO: 2321378 - RNA, 19 nt, Artificial Sequence
  Description of Artificial Sequence: Synthetic oligonucleotide
ggagcacuuggugggcuag

SEQ ID NO: 2321379 - RNA, 19 nt, Artificial Sequence
  Description of Artificial Sequence: Synthetic oligonucleotide
gugguagccccaggaggcc

SEQ ID NO: 2321380 - RNA, 19 nt, Artificial Sequence
  Description of Artificial Sequence: Synthetic oligonucleotide
cagucccggacgccgcccc

SEQ ID NO: 2321381 - RNA, 19 nt, Artificial Sequence
  Description of Artificial Sequence: Synthetic oligonucleotide
guccggaccagcugcucaa

SEQ ID NO: 2321382 - RNA, 19 nt, Artificial Sequence
  Description of Artificial Sequence: Synthetic oligonucleotide
cagugacaaggaccuccug

SEQ ID NO: 2321383 - RNA, 19 nt, Artificial Sequence
  Description of Artificial Sequence: Synthetic oligonucleotide
auguggugggaagcacuga

SEQ ID NO: 2321384 - RNA, 19 nt, Artificial Sequence
  Description of Artificial Sequence: Synthetic oligonucleotide
guaagccauguggugggaa

SEQ ID NO: 2321385 - RNA, 19 nt, Artificial Sequence
  Description of Artificial Sequence: Synthetic oligonucleotide
guggggucguagucagaca

SEQ ID NO: 2321386 - RNA, 19 nt, Artificial Sequence
  Description of Artificial Sequence: Synthetic oligonucleotide
guaagaggguguagugugu

SEQ ID NO: 2321387 - RNA, 19 nt, Artificial Sequence
  Description of Artificial Sequence: Synthetic oligonucleotide
cuagcacaacggggaaauc

SEQ ID NO: 2321388 - RNA, 19 nt, Artificial Sequence
  Description of Artificial Sequence: Synthetic oligonucleotide
ucggaggaccuggcgcugu

SEQ ID NO: 2321389 - RNA, 19 nt, Artificial Sequence
  Description of Artificial Sequence: Synthetic oligonucleotide
uggucgcuuggagcuauuu

SEQ ID NO: 2321390 - RNA, 19 nt, Artificial Sequence
  Description of Artificial Sequence: Synthetic oligonucleotide
guggugggaagcacugaaa

SEQ ID NO: 2321391 - RNA, 19 nt, Artificial Sequence
  Description of Artificial Sequence: Synthetic oligonucleotide
caucgacauucagacgcca

SEQ ID NO: 2321392 - RNA, 19 nt, Artificial Sequence
  Description of Artificial Sequence: Synthetic oligonucleotide
caaggaccuccugaaccca

SEQ ID NO: 2321393 - RNA, 19 nt, Artificial Sequence
  Description of Artificial Sequence: Synthetic oligonucleotide
ucccggacgccgccccgcu

SEQ ID NO: 2321394 - RNA, 19 nt, Artificial Sequence
  Description of Artificial Sequence: Synthetic oligonucleotide
cgccccgcugcucaugucg

SEQ ID NO: 2321395 - RNA, 19 nt, Artificial Sequence
  Description of Artificial Sequence: Synthetic oligonucleotide
gggaaaucgucacgguccu

SEQ ID NO: 2321396 - RNA, 19 nt, Artificial Sequence
  Description of Artificial Sequence: Synthetic oligonucleotide
uccggacaguccggaccag

SEQ ID NO: 2321397 - RNA, 19 nt, Artificial Sequence
  Description of Artificial Sequence: Synthetic oligonucleotide
ggccucaaaguaagccaug

SEQ ID NO: 2321398 - RNA, 19 nt, Artificial Sequence
  Description of Artificial Sequence: Synthetic oligonucleotide
gccgcccacgaccaccagc

SEQ ID NO: 2321399 - RNA, 19 nt, Artificial Sequence
  Description of Artificial Sequence: Synthetic oligonucleotide
uccggaccagcugcucaaa

SEQ ID NO: 2321400 - RNA, 19 nt, Artificial Sequence
  Description of Artificial Sequence: Synthetic oligonucleotide
cgugaauagcuugcccacc

SEQ ID NO: 2321401 - RNA, 19 nt, Artificial Sequence
  Description of Artificial Sequence: Synthetic oligonucleotide
gcgcugugucuccagaucu

SEQ ID NO: 2321402 - RNA, 19 nt, Artificial Sequence
  Description of Artificial Sequence: Synthetic oligonucleotide
agacgccauuuggcagagg

SEQ ID NO: 2321403 - RNA, 19 nt, Artificial Sequence
  Description of Artificial Sequence: Synthetic oligonucleotide
cggggaaaucgucacgguc

SEQ ID NO: 2321404 - RNA, 19 nt, Artificial Sequence
  Description of Artificial Sequence: Synthetic oligonucleotide
ccagaaugugaagguaaga

SEQ ID NO: 2321405 - RNA, 19 nt, Artificial Sequence
  Description of Artificial Sequence: Synthetic oligonucleotide
gcuugcccaccucauugaa

SEQ ID NO: 2321406 - RNA, 19 nt, Artificial Sequence
  Description of Artificial Sequence: Synthetic oligonucleotide
gccucaaaguaagccaugu

SEQ ID NO: 2321407 - RNA, 19 nt, Artificial Sequence
  Description of Artificial Sequence: Synthetic oligonucleotide
gagcuugugguggucgcuu

SEQ ID NO: 2321408 - RNA, 19 nt, Artificial Sequence
  Description of Artificial Sequence: Synthetic oligonucleotide
cauuuggcagaggccucaa

SEQ ID NO: 2321409 - RNA, 19 nt, Artificial Sequence
  Description of Artificial Sequence: Synthetic oligonucleotide
gcacaacggggaaaucguc

SEQ ID NO: 2321410 - RNA, 19 nt, Artificial Sequence
  Description of Artificial Sequence: Synthetic oligonucleotide
gucccggacgccgccccgc

SEQ ID NO: 2321411 - RNA, 19 nt, Artificial Sequence
  Description of Artificial Sequence: Synthetic oligonucleotide
cagcgcgcucuugcccacg

SEQ ID NO: 2321412 - RNA, 19 nt, Artificial Sequence
  Description of Artificial Sequence: Synthetic oligonucleotide
ggagggaguucuugcuccu

SEQ ID NO: 2321413 - RNA, 19 nt, Artificial Sequence
  Description of Artificial Sequence: Synthetic oligonucleotide
ccggaccagcugcucaaac

SEQ ID NO: 2321414 - RNA, 19 nt, Artificial Sequence
  Description of Artificial Sequence: Synthetic oligonucleotide
ugcucccgcauggcaccaa

SEQ ID NO: 2321415 - RNA, 19 nt, Artificial Sequence
  Description of Artificial Sequence: Synthetic oligonucleotide
caguccggaccagcugcuc

SEQ ID NO: 2321416 - RNA, 19 nt, Artificial Sequence
  Description of Artificial Sequence: Synthetic oligonucleotide
gcagugacaaggaccuccu

SEQ ID NO: 2321417 - RNA, 19 nt, Artificial Sequence
  Description of Artificial Sequence: Synthetic oligonucleotide
ccagcacgcauguacugcu

SEQ ID NO: 2321418 - RNA, 19 nt, Artificial Sequence
  Description of Artificial Sequence: Synthetic oligonucleotide
gccauccacagugcagauc

SEQ ID NO: 2321419 - RNA, 19 nt, Artificial Sequence
  Description of Artificial Sequence: Synthetic oligonucleotide
gggagcacuuggugggcua

SEQ ID NO: 2321420 - RNA, 19 nt, Artificial Sequence
  Description of Artificial Sequence: Synthetic oligonucleotide
ccggacaguccggaccagc

SEQ ID NO: 2321421 - RNA, 19 nt, Artificial Sequence
  Description of Artificial Sequence: Synthetic oligonucleotide
gcacugaaagaggaggcuu

SEQ ID NO: 2321422 - RNA, 19 nt, Artificial Sequence
  Description of Artificial Sequence: Synthetic oligonucleotide
cagggaugccauccacagu

SEQ ID NO: 2321423 - RNA, 19 nt, Artificial Sequence
  Description of Artificial Sequence: Synthetic oligonucleotide
caggggcuugggugggaaa

SEQ ID NO: 2321424 - RNA, 19 nt, Artificial Sequence
  Description of Artificial Sequence: Synthetic oligonucleotide
gccccgcugcucaugucgc

SEQ ID NO: 2321425 - RNA, 19 nt, Artificial Sequence
  Description of Artificial Sequence: Synthetic oligonucleotide
gcucccgcauggcaccaaa

SEQ ID NO: 2321426 - RNA, 19 nt, Artificial Sequence
  Description of Artificial Sequence: Synthetic oligonucleotide
gaccagcaguguccagaau

SEQ ID NO: 2321427 - RNA, 19 nt, Artificial Sequence
  Description of Artificial Sequence: Synthetic oligonucleotide
cgcccagucccggacgccg

SEQ ID NO: 2321428 - RNA, 19 nt, Artificial Sequence
  Description of Artificial Sequence: Synthetic oligonucleotide
ccccgcccagucccggacg

SEQ ID NO: 2321429 - RNA, 19 nt, Artificial Sequence
  Description of Artificial Sequence: Synthetic oligonucleotide
ggucguagucagacacgaa

SEQ ID NO: 2321430 - RNA, 19 nt, Artificial Sequence
  Description of Artificial Sequence: Synthetic oligonucleotide
ccagucccggacgccgccc

SEQ ID NO: 2321431 - RNA, 19 nt, Artificial Sequence
  Description of Artificial Sequence: Synthetic oligonucleotide
cgcugcucaugucgccacc

SEQ ID NO: 2321432 - RNA, 19 nt, Artificial Sequence
  Description of Artificial Sequence: Synthetic oligonucleotide
cucccgcauggcaccaaau

SEQ ID NO: 2321433 - RNA, 19 nt, Artificial Sequence
  Description of Artificial Sequence: Synthetic oligonucleotide
gcgcgcucuugcccacgcc

SEQ ID NO: 2321434 - RNA, 19 nt, Artificial Sequence
  Description of Artificial Sequence: Synthetic oligonucleotide
gguggucgcuuggagcuau

SEQ ID NO: 2321435 - RNA, 19 nt, Artificial Sequence
  Description of Artificial Sequence: Synthetic oligonucleotide
cccgcugcucaugucgcca

SEQ ID NO: 2321436 - RNA, 19 nt, Artificial Sequence
  Description of Artificial Sequence: Synthetic oligonucleotide
gccgugcagggaugccauc

SEQ ID NO: 2321437 - RNA, 19 nt, Artificial Sequence
  Description of Artificial Sequence: Synthetic oligonucleotide
gcccagucccggacgccgc

SEQ ID NO: 2321438 - RNA, 19 nt, Artificial Sequence
  Description of Artificial Sequence: Synthetic oligonucleotide
ggugggcuaggagggaguu

SEQ ID NO: 2321439 - RNA, 19 nt, Artificial Sequence
  Description of Artificial Sequence: Synthetic oligonucleotide
cggacaguccggaccagcu

SEQ ID NO: 2321440 - RNA, 19 nt, Artificial Sequence
  Description of Artificial Sequence: Synthetic oligonucleotide
gccgccccgcugcucaugu

SEQ ID NO: 2321441 - RNA, 19 nt, Artificial Sequence
  Description of Artificial Sequence: Synthetic oligonucleotide
cggaggaccuggcgcugug

SEQ ID NO: 2321442 - RNA, 19 nt, Artificial Sequence
  Description of Artificial Sequence: Synthetic oligonucleotide
ggaggaccuggcgcugugu

SEQ ID NO: 2321443 - RNA, 19 nt, Artificial Sequence
  Description of Artificial Sequence: Synthetic oligonucleotide
cgacauucagacgccauuu

SEQ ID NO: 2321444 - RNA, 19 nt, Artificial Sequence
  Description of Artificial Sequence: Synthetic oligonucleotide
ccguugccagcacgcaugu

SEQ ID NO: 2321445 - RNA, 19 nt, Artificial Sequence
  Description of Artificial Sequence: Synthetic oligonucleotide
ccgcccagucccggacgcc

SEQ ID NO: 2321446 - RNA, 19 nt, Artificial Sequence
  Description of Artificial Sequence: Synthetic oligonucleotide
ccgccccgcugcucauguc

SEQ ID NO: 2321447 - RNA, 19 nt, Artificial Sequence
  Description of Artificial Sequence: Synthetic oligonucleotide
guggucgcuuggagcuauu

SEQ ID NO: 2321448 - RNA, 19 nt, Artificial Sequence
  Description of Artificial Sequence: Synthetic oligonucleotide
cgccgccccgcugcucaug

SEQ ID NO: 2321449 - RNA, 19 nt, Artificial Sequence
  Description of Artificial Sequence: Synthetic oligonucleotide
cguugccagcacgcaugua

SEQ ID NO: 2321450 - RNA, 19 nt, Artificial Sequence
  Description of Artificial Sequence: Synthetic oligonucleotide
aaugguaccgcgcagccgc

SEQ ID NO: 2321451 - RNA, 19 nt, Artificial Sequence
  Description of Artificial Sequence: Synthetic oligonucleotide
aaagcaaguuuauuucugc

SEQ ID NO: 2321452 - RNA, 19 nt, Artificial Sequence
  Description of Artificial Sequence: Synthetic oligonucleotide
uauuccaccaucuuuacug

SEQ ID NO: 2321453 - RNA, 19 nt, Artificial Sequence
  Description of Artificial Sequence: Synthetic oligonucleotide
aagaaguagacacuccccg

SEQ ID NO: 2321454 - RNA, 19 nt, Artificial Sequence
  Description of Artificial Sequence: Synthetic oligonucleotide
gacaugauagauuuucagg

SEQ ID NO: 2321455 - RNA, 19 nt, Artificial Sequence
  Description of Artificial Sequence: Synthetic oligonucleotide
uuguucuuuauaaagcaag

SEQ ID NO: 2321456 - RNA, 19 nt, Artificial Sequence
  Description of Artificial Sequence: Synthetic oligonucleotide
aaaggaaccaggcaucuug

SEQ ID NO: 2321457 - RNA, 19 nt, Artificial Sequence
  Description of Artificial Sequence: Synthetic oligonucleotide
uugagucuggacauuagcg

SEQ ID NO: 2321458 - RNA, 19 nt, Artificial Sequence
  Description of Artificial Sequence: Synthetic oligonucleotide
aguggaaaguuucuggugg

SEQ ID NO: 2321459 - RNA, 19 nt, Artificial Sequence
  Description of Artificial Sequence: Synthetic oligonucleotide
ucuuuauaaagcaaguuua

SEQ ID NO: 2321460 - RNA, 19 nt, Artificial Sequence
  Description of Artificial Sequence: Synthetic oligonucleotide
uauaaagcaaguuuauuuc

SEQ ID NO: 2321461 - RNA, 19 nt, Artificial Sequence
  Description of Artificial Sequence: Synthetic oligonucleotide
gaaccaggcaucuugacag

SEQ ID NO: 2321462 - RNA, 19 nt, Artificial Sequence
  Description of Artificial Sequence: Synthetic oligonucleotide
uuauaaagcaaguuuauuu

SEQ ID NO: 2321463 - RNA, 19 nt, Artificial Sequence
  Description of Artificial Sequence: Synthetic oligonucleotide
caagagaucagucugguac

SEQ ID NO: 2321464 - RNA, 19 nt, Artificial Sequence
  Description of Artificial Sequence: Synthetic oligonucleotide
agauaaguucuccaaagag

SEQ ID NO: 2321465 - RNA, 19 nt, Artificial Sequence
  Description of Artificial Sequence: Synthetic oligonucleotide
ugagcaagagaucagucug

SEQ ID NO: 2321466 - RNA, 19 nt, Artificial Sequence
  Description of Artificial Sequence: Synthetic oligonucleotide
uauguuuauguccagggaa

SEQ ID NO: 2321467 - RNA, 19 nt, Artificial Sequence
  Description of Artificial Sequence: Synthetic oligonucleotide
uucuuuauaaagcaaguuu

SEQ ID NO: 2321468 - RNA, 19 nt, Artificial Sequence
  Description of Artificial Sequence: Synthetic oligonucleotide
aucagucugguacuggggc

SEQ ID NO: 2321469 - RNA, 19 nt, Artificial Sequence
  Description of Artificial Sequence: Synthetic oligonucleotide
uaaagcaaguuuauuucug

SEQ ID NO: 2321470 - RNA, 19 nt, Artificial Sequence
  Description of Artificial Sequence: Synthetic oligonucleotide
auuagcgagguuuuaaaga

SEQ ID NO: 2321471 - RNA, 19 nt, Artificial Sequence
  Description of Artificial Sequence: Synthetic oligonucleotide
cauuauguuguauuccacc

SEQ ID NO: 2321472 - RNA, 19 nt, Artificial Sequence
  Description of Artificial Sequence: Synthetic oligonucleotide
aacguccucaaaaugguac

SEQ ID NO: 2321473 - RNA, 19 nt, Artificial Sequence
  Description of Artificial Sequence: Synthetic oligonucleotide
aguuuauuucugcagagga

SEQ ID NO: 2321474 - RNA, 19 nt, Artificial Sequence
  Description of Artificial Sequence: Synthetic oligonucleotide
uguucaaaguuacccaggc

SEQ ID NO: 2321475 - RNA, 19 nt, Artificial Sequence
  Description of Artificial Sequence: Synthetic oligonucleotide
auuauguuguauuccacca

SEQ ID NO: 2321476 - RNA, 19 nt, Artificial Sequence
  Description of Artificial Sequence: Synthetic oligonucleotide
aucaugaagagucaaacua

SEQ ID NO: 2321477 - RNA, 19 nt, Artificial Sequence
  Description of Artificial Sequence: Synthetic oligonucleotide
uuagcgagguuuuaaagaa

SEQ ID NO: 2321478 - RNA, 19 nt, Artificial Sequence
  Description of Artificial Sequence: Synthetic oligonucleotide
ucaaaguuacccaggcucc

SEQ ID NO: 2321479 - RNA, 19 nt, Artificial Sequence
  Description of Artificial Sequence: Synthetic oligonucleotide
gugucuuauguuuaugucc

SEQ ID NO: 2321480 - RNA, 19 nt, Artificial Sequence
  Description of Artificial Sequence: Synthetic oligonucleotide
agaaguagacacuccccgc

SEQ ID NO: 2321481 - RNA, 19 nt, Artificial Sequence
  Description of Artificial Sequence: Synthetic oligonucleotide
uagaucugagacuugaguc

SEQ ID NO: 2321482 - RNA, 19 nt, Artificial Sequence
  Description of Artificial Sequence: Synthetic oligonucleotide
cacgaucagacucuggucg

SEQ ID NO: 2321483 - RNA, 19 nt, Artificial Sequence
  Description of Artificial Sequence: Synthetic oligonucleotide
cuacaagggccuuugaggc

SEQ ID NO: 2321484 - RNA, 19 nt, Artificial Sequence
  Description of Artificial Sequence: Synthetic oligonucleotide
guugggaucaugaagaguc

SEQ ID NO: 2321485 - RNA, 19 nt, Artificial Sequence
  Description of Artificial Sequence: Synthetic oligonucleotide
agcaaguuuauuucugcag

SEQ ID NO: 2321486 - RNA, 19 nt, Artificial Sequence
  Description of Artificial Sequence: Synthetic oligonucleotide
uuauguccagggaagaagu

SEQ ID NO: 2321487 - RNA, 19 nt, Artificial Sequence
  Description of Artificial Sequence: Synthetic oligonucleotide
uauguuguauuccaccauc

SEQ ID NO: 2321488 - RNA, 19 nt, Artificial Sequence
  Description of Artificial Sequence: Synthetic oligonucleotide
aaguuuauuucugcagagg

SEQ ID NO: 2321489 - RNA, 19 nt, Artificial Sequence
  Description of Artificial Sequence: Synthetic oligonucleotide
ucuccaaagagagaggcug

SEQ ID NO: 2321490 - RNA, 19 nt, Artificial Sequence
  Description of Artificial Sequence: Synthetic oligonucleotide
uuuagcuaccugcugcuug

SEQ ID NO: 2321491 - RNA, 19 nt, Artificial Sequence
  Description of Artificial Sequence: Synthetic oligonucleotide
uuucuggugggcuccauag

SEQ ID NO: 2321492 - RNA, 19 nt, Artificial Sequence
  Description of Artificial Sequence: Synthetic oligonucleotide
uacccaggcuccaaggugg

SEQ ID NO: 2321493 - RNA, 19 nt, Artificial Sequence
  Description of Artificial Sequence: Synthetic oligonucleotide
aaaauguugggaucaugaa

SEQ ID NO: 2321494 - RNA, 19 nt, Artificial Sequence
  Description of Artificial Sequence: Synthetic oligonucleotide
caugauagauuuucagggc

SEQ ID NO: 2321495 - RNA, 19 nt, Artificial Sequence
  Description of Artificial Sequence: Synthetic oligonucleotide
agaucagucugguacuggg

SEQ ID NO: 2321496 - RNA, 19 nt, Artificial Sequence
  Description of Artificial Sequence: Synthetic oligonucleotide
gauaaguucuccaaagaga

SEQ ID NO: 2321497 - RNA, 19 nt, Artificial Sequence
  Description of Artificial Sequence: Synthetic oligonucleotide
agucaaacuagucaccagu

SEQ ID NO: 2321498 - RNA, 19 nt, Artificial Sequence
  Description of Artificial Sequence: Synthetic oligonucleotide
uuauguuuauguccaggga

SEQ ID NO: 2321499 - RNA, 19 nt, Artificial Sequence
  Description of Artificial Sequence: Synthetic oligonucleotide
ugagucuggacauuagcga

SEQ ID NO: 2321500 - RNA, 19 nt, Artificial Sequence
  Description of Artificial Sequence: Synthetic oligonucleotide
aagagaucagucugguacu

SEQ ID NO: 2321501 - RNA, 19 nt, Artificial Sequence
  Description of Artificial Sequence: Synthetic oligonucleotide
aagagucaaacuagucacc

SEQ ID NO: 2321502 - RNA, 19 nt, Artificial Sequence
  Description of Artificial Sequence: Synthetic oligonucleotide
auagaucugagacuugagu

SEQ ID NO: 2321503 - RNA, 19 nt, Artificial Sequence
  Description of Artificial Sequence: Synthetic oligonucleotide
caagagaccuccuguacgg

SEQ ID NO: 2321504 - RNA, 19 nt, Artificial Sequence
  Description of Artificial Sequence: Synthetic oligonucleotide
agaucugagacuugagucu

SEQ ID NO: 2321505 - RNA, 19 nt, Artificial Sequence
  Description of Artificial Sequence: Synthetic oligonucleotide
gagucuggacauuagcgag

SEQ ID NO: 2321506 - RNA, 19 nt, Artificial Sequence
  Description of Artificial Sequence: Synthetic oligonucleotide
ugauagauuuucagggcca

SEQ ID NO: 2321507 - RNA, 19 nt, Artificial Sequence
  Description of Artificial Sequence: Synthetic oligonucleotide
auaguggaaaguuucuggu

SEQ ID NO: 2321508 - RNA, 19 nt, Artificial Sequence
  Description of Artificial Sequence: Synthetic oligonucleotide
ucaaacuagucaccaguug

SEQ ID NO: 2321509 - RNA, 19 nt, Artificial Sequence
  Description of Artificial Sequence: Synthetic oligonucleotide
gaaaacuucuugguugucc

SEQ ID NO: 2321510 - RNA, 19 nt, Artificial Sequence
  Description of Artificial Sequence: Synthetic oligonucleotide
ucagagauaaguucuccaa

SEQ ID NO: 2321511 - RNA, 19 nt, Artificial Sequence
  Description of Artificial Sequence: Synthetic oligonucleotide
agauuuucagggccaagag

SEQ ID NO: 2321512 - RNA, 19 nt, Artificial Sequence
  Description of Artificial Sequence: Synthetic oligonucleotide
uguccagggaagaaguaga

SEQ ID NO: 2321513 - RNA, 19 nt, Artificial Sequence
  Description of Artificial Sequence: Synthetic oligonucleotide
caguuguucaaaguuaccc

SEQ ID NO: 2321514 - RNA, 19 nt, Artificial Sequence
  Description of Artificial Sequence: Synthetic oligonucleotide
ugcacagauaacacgugca

SEQ ID NO: 2321515 - RNA, 19 nt, Artificial Sequence
  Description of Artificial Sequence: Synthetic oligonucleotide
caaguuuauuucugcagag

SEQ ID NO: 2321516 - RNA, 19 nt, Artificial Sequence
  Description of Artificial Sequence: Synthetic oligonucleotide
aagcaaguuuauuucugca

SEQ ID NO: 2321517 - RNA, 19 nt, Artificial Sequence
  Description of Artificial Sequence: Synthetic oligonucleotide
aaguagacacuccccgcuc

SEQ ID NO: 2321518 - RNA, 19 nt, Artificial Sequence
  Description of Artificial Sequence: Synthetic oligonucleotide
aacuagucaccaguuguuc

SEQ ID NO: 2321519 - RNA, 19 nt, Artificial Sequence
  Description of Artificial Sequence: Synthetic oligonucleotide
ugauugaaggugagcaaga

SEQ ID NO: 2321520 - RNA, 19 nt, Artificial Sequence
  Description of Artificial Sequence: Synthetic oligonucleotide
agaacggcggagaaggcgc

SEQ ID NO: 2321521 - RNA, 19 nt, Artificial Sequence
  Description of Artificial Sequence: Synthetic oligonucleotide
ucaaaaugguaccgcgcag

SEQ ID NO: 2321522 - RNA, 19 nt, Artificial Sequence
  Description of Artificial Sequence: Synthetic oligonucleotide
cauuagcgagguuuuaaag

SEQ ID NO: 2321523 - RNA, 19 nt, Artificial Sequence
  Description of Artificial Sequence: Synthetic oligonucleotide
gauaacacgugcacggccc

SEQ ID NO: 2321524 - RNA, 19 nt, Artificial Sequence
  Description of Artificial Sequence: Synthetic oligonucleotide
acgugcacggcccuagccc

SEQ ID NO: 2321525 - RNA, 19 nt, Artificial Sequence
  Description of Artificial Sequence: Synthetic oligonucleotide
uagauuuucagggccaaga

SEQ ID NO: 2321526 - RNA, 19 nt, Artificial Sequence
  Description of Artificial Sequence: Synthetic oligonucleotide
ucuugguuguccgggaccg

SEQ ID NO: 2321527 - RNA, 19 nt, Artificial Sequence
  Description of Artificial Sequence: Synthetic oligonucleotide
aaccaggcaucuugacagc

SEQ ID NO: 2321528 - RNA, 19 nt, Artificial Sequence
  Description of Artificial Sequence: Synthetic oligonucleotide
cugauguagugugacaucc

SEQ ID NO: 2321529 - RNA, 19 nt, Artificial Sequence
  Description of Artificial Sequence: Synthetic oligonucleotide
cuugagucuggacauuagc

SEQ ID NO: 2321530 - RNA, 19 nt, Artificial Sequence
  Description of Artificial Sequence: Synthetic oligonucleotide
agcgagguuuuaaagaauc

SEQ ID NO: 2321531 - RNA, 19 nt, Artificial Sequence
  Description of Artificial Sequence: Synthetic oligonucleotide
aguuacccaggcuccaagg

SEQ ID NO: 2321532 - RNA, 19 nt, Artificial Sequence
  Description of Artificial Sequence: Synthetic oligonucleotide
uuauuucugcagaggaggu

SEQ ID NO: 2321533 - RNA, 19 nt, Artificial Sequence
  Description of Artificial Sequence: Synthetic oligonucleotide
uuacccaggcuccaaggug

SEQ ID NO: 2321534 - RNA, 19 nt, Artificial Sequence
  Description of Artificial Sequence: Synthetic oligonucleotide
gaagaaguagacacucccc

SEQ ID NO: 2321535 - RNA, 19 nt, Artificial Sequence
  Description of Artificial Sequence: Synthetic oligonucleotide
cugauugaaggugagcaag

SEQ ID NO: 2321536 - RNA, 19 nt, Artificial Sequence
  Description of Artificial Sequence: Synthetic oligonucleotide
ccuacaagggccuuugagg

SEQ ID NO: 2321537 - RNA, 19 nt, Artificial Sequence
  Description of Artificial Sequence: Synthetic oligonucleotide
ucgcucacauccauggccc

SEQ ID NO: 2321538 - RNA, 19 nt, Artificial Sequence
  Description of Artificial Sequence: Synthetic oligonucleotide
aauccuacaagggccuuug

SEQ ID NO: 2321539 - RNA, 19 nt, Artificial Sequence
  Description of Artificial Sequence: Synthetic oligonucleotide
auuucugcagaggaggugu

SEQ ID NO: 2321540 - RNA, 19 nt, Artificial Sequence
  Description of Artificial Sequence: Synthetic oligonucleotide
uggugggcuccauagaucu

SEQ ID NO: 2321541 - RNA, 19 nt, Artificial Sequence
  Description of Artificial Sequence: Synthetic oligonucleotide
agguggacaugauagauuu

SEQ ID NO: 2321542 - RNA, 19 nt, Artificial Sequence
  Description of Artificial Sequence: Synthetic oligonucleotide
gauuuucagggccaagaga

SEQ ID NO: 2321543 - RNA, 19 nt, Artificial Sequence
  Description of Artificial Sequence: Synthetic oligonucleotide
uggacaugauagauuuuca

SEQ ID NO: 2321544 - RNA, 19 nt, Artificial Sequence
  Description of Artificial Sequence: Synthetic oligonucleotide
gagauaaguucuccaaaga

SEQ ID NO: 2321545 - RNA, 19 nt, Artificial Sequence
  Description of Artificial Sequence: Synthetic oligonucleotide
uuauguuguauuccaccau

SEQ ID NO: 2321546 - RNA, 19 nt, Artificial Sequence
  Description of Artificial Sequence: Synthetic oligonucleotide
agcagcauuauguuguauu

SEQ ID NO: 2321547 - RNA, 19 nt, Artificial Sequence
  Description of Artificial Sequence: Synthetic oligonucleotide
uucuugguuguccgggacc

SEQ ID NO: 2321548 - RNA, 19 nt, Artificial Sequence
  Description of Artificial Sequence: Synthetic oligonucleotide
uuugcuaccugcugguuuu

SEQ ID NO: 2321549 - RNA, 19 nt, Artificial Sequence
  Description of Artificial Sequence: Synthetic oligonucleotide
acgaagcaaggccugaugu

SEQ ID NO: 2321550 - RNA, 19 nt, Artificial Sequence
  Description of Artificial Sequence: Synthetic oligonucleotide
auguuuauguccagggaag

SEQ ID NO: 2321551 - RNA, 19 nt, Artificial Sequence
  Description of Artificial Sequence: Synthetic oligonucleotide
caaaaugguaccgcgcagc

SEQ ID NO: 2321552 - RNA, 19 nt, Artificial Sequence
  Description of Artificial Sequence: Synthetic oligonucleotide
gagaacggcggagaaggcg

SEQ ID NO: 2321553 - RNA, 19 nt, Artificial Sequence
  Description of Artificial Sequence: Synthetic oligonucleotide
gggagaacggcggagaagg

SEQ ID NO: 2321554 - RNA, 19 nt, Artificial Sequence
  Description of Artificial Sequence: Synthetic oligonucleotide
acacuccccgcucagaacu

SEQ ID NO: 2321555 - RNA, 19 nt, Artificial Sequence
  Description of Artificial Sequence: Synthetic oligonucleotide
ggacaugauagauuuucag

SEQ ID NO: 2321556 - RNA, 19 nt, Artificial Sequence
  Description of Artificial Sequence: Synthetic oligonucleotide
uggcagaaaacuucuuggu

SEQ ID NO: 2321557 - RNA, 19 nt, Artificial Sequence
  Description of Artificial Sequence: Synthetic oligonucleotide
cucaaaaugguaccgcgca

SEQ ID NO: 2321558 - RNA, 19 nt, Artificial Sequence
  Description of Artificial Sequence: Synthetic oligonucleotide
cacagauaacacgugcacg

SEQ ID NO: 2321559 - RNA, 19 nt, Artificial Sequence
  Description of Artificial Sequence: Synthetic oligonucleotide
uuucagggccaagagaccu

SEQ ID NO: 2321560 - RNA, 19 nt, Artificial Sequence
  Description of Artificial Sequence: Synthetic oligonucleotide
cauagaucugagacuugag

SEQ ID NO: 2321561 - RNA, 19 nt, Artificial Sequence
  Description of Artificial Sequence: Synthetic oligonucleotide
gccaacguccucaaaaugg

SEQ ID NO: 2321562 - RNA, 19 nt, Artificial Sequence
  Description of Artificial Sequence: Synthetic oligonucleotide
acgaucagacucuggucgg

SEQ ID NO: 2321563 - RNA, 19 nt, Artificial Sequence
  Description of Artificial Sequence: Synthetic oligonucleotide
guggacaugauagauuuuc

SEQ ID NO: 2321564 - RNA, 19 nt, Artificial Sequence
  Description of Artificial Sequence: Synthetic oligonucleotide
gaucugagacuugagucug

SEQ ID NO: 2321565 - RNA, 19 nt, Artificial Sequence
  Description of Artificial Sequence: Synthetic oligonucleotide
agagucaaacuagucacca

SEQ ID NO: 2321566 - RNA, 19 nt, Artificial Sequence
  Description of Artificial Sequence: Synthetic oligonucleotide
agugugacauccuuugcua

SEQ ID NO: 2321567 - RNA, 19 nt, Artificial Sequence
  Description of Artificial Sequence: Synthetic oligonucleotide
acauuagcgagguuuuaaa

SEQ ID NO: 2321568 - RNA, 19 nt, Artificial Sequence
  Description of Artificial Sequence: Synthetic oligonucleotide
aaaugguaccgcgcagccg

SEQ ID NO: 2321569 - RNA, 19 nt, Artificial Sequence
  Description of Artificial Sequence: Synthetic oligonucleotide
agagagaggcugcacagau

SEQ ID NO: 2321570 - RNA, 19 nt, Artificial Sequence
  Description of Artificial Sequence: Synthetic oligonucleotide
gagcaagagaucagucugg

SEQ ID NO: 2321571 - RNA, 19 nt, Artificial Sequence
  Description of Artificial Sequence: Synthetic oligonucleotide
ucuuuacuggggaccaaaa

SEQ ID NO: 2321572 - RNA, 19 nt, Artificial Sequence
  Description of Artificial Sequence: Synthetic oligonucleotide
caaagagagaggcugcaca

SEQ ID NO: 2321573 - RNA, 19 nt, Artificial Sequence
  Description of Artificial Sequence: Synthetic oligonucleotide
ugauguagugugacauccu

SEQ ID NO: 2321574 - RNA, 19 nt, Artificial Sequence
  Description of Artificial Sequence: Synthetic oligonucleotide
uguuuauguccagggaaga

SEQ ID NO: 2321575 - RNA, 19 nt, Artificial Sequence
  Description of Artificial Sequence: Synthetic oligonucleotide
ucugguacuggggcagacg

SEQ ID NO: 2321576 - RNA, 19 nt, Artificial Sequence
  Description of Artificial Sequence: Synthetic oligonucleotide
uggacauuagcgagguuuu

SEQ ID NO: 2321577 - RNA, 19 nt, Artificial Sequence
  Description of Artificial Sequence: Synthetic oligonucleotide
uccgaauaguggaaaguuu

SEQ ID NO: 2321578 - RNA, 19 nt, Artificial Sequence
  Description of Artificial Sequence: Synthetic oligonucleotide
gaucaugaagagucaaacu

SEQ ID NO: 2321579 - RNA, 19 nt, Artificial Sequence
  Description of Artificial Sequence: Synthetic oligonucleotide
gagguuuuaaagaauccua

SEQ ID NO: 2321580 - RNA, 19 nt, Artificial Sequence
  Description of Artificial Sequence: Synthetic oligonucleotide
gacgaagcaaggccugaug

SEQ ID NO: 2321581 - RNA, 19 nt, Artificial Sequence
  Description of Artificial Sequence: Synthetic oligonucleotide
uauuucugcagaggaggug

SEQ ID NO: 2321582 - RNA, 19 nt, Artificial Sequence
  Description of Artificial Sequence: Synthetic oligonucleotide
uguuguauuccaccaucuu

SEQ ID NO: 2321583 - RNA, 19 nt, Artificial Sequence
  Description of Artificial Sequence: Synthetic oligonucleotide
uccgggaccggucggaggu

SEQ ID NO: 2321584 - RNA, 19 nt, Artificial Sequence
  Description of Artificial Sequence: Synthetic oligonucleotide
aacacgugcacggcccuag

SEQ ID NO: 2321585 - RNA, 19 nt, Artificial Sequence
  Description of Artificial Sequence: Synthetic oligonucleotide
ugaaggugagcaagagauc

SEQ ID NO: 2321586 - RNA, 19 nt, Artificial Sequence
  Description of Artificial Sequence: Synthetic oligonucleotide
agcaaggccugauguagug

SEQ ID NO: 2321587 - RNA, 19 nt, Artificial Sequence
  Description of Artificial Sequence: Synthetic oligonucleotide
uccccgaguccucagcagc

SEQ ID NO: 2321588 - RNA, 19 nt, Artificial Sequence
  Description of Artificial Sequence: Synthetic oligonucleotide
cagcauuauguuguauucc

SEQ ID NO: 2321589 - RNA, 19 nt, Artificial Sequence
  Description of Artificial Sequence: Synthetic oligonucleotide
ggaucaugaagagucaaac

SEQ ID NO: 2321590 - RNA, 19 nt, Artificial Sequence
  Description of Artificial Sequence: Synthetic oligonucleotide
aaacuagucaccaguuguu

SEQ ID NO: 2321591 - RNA, 19 nt, Artificial Sequence
  Description of Artificial Sequence: Synthetic oligonucleotide
caaacuagucaccaguugu

SEQ ID NO: 2321592 - RNA, 19 nt, Artificial Sequence
  Description of Artificial Sequence: Synthetic oligonucleotide
agucuggacauuagcgagg

SEQ ID NO: 2321593 - RNA, 19 nt, Artificial Sequence
  Description of Artificial Sequence: Synthetic oligonucleotide
gagaucagucugguacugg

SEQ ID NO: 2321594 - RNA, 19 nt, Artificial Sequence
  Description of Artificial Sequence: Synthetic oligonucleotide
cucagagauaaguucucca

SEQ ID NO: 2321595 - RNA, 19 nt, Artificial Sequence
  Description of Artificial Sequence: Synthetic oligonucleotide
ccgaauaguggaaaguuuc

SEQ ID NO: 2321596 - RNA, 19 nt, Artificial Sequence
  Description of Artificial Sequence: Synthetic oligonucleotide
aguuccacgaucagacucu

SEQ ID NO: 2321597 - RNA, 19 nt, Artificial Sequence
  Description of Artificial Sequence: Synthetic oligonucleotide
gagacuugagucuggacau

SEQ ID NO: 2321598 - RNA, 19 nt, Artificial Sequence
  Description of Artificial Sequence: Synthetic oligonucleotide
guagugugacauccuuugc

SEQ ID NO: 2321599 - RNA, 19 nt, Artificial Sequence
  Description of Artificial Sequence: Synthetic oligonucleotide
ucugagacuugagucugga

SEQ ID NO: 2321600 - RNA, 19 nt, Artificial Sequence
  Description of Artificial Sequence: Synthetic oligonucleotide
agccgcuucgccccgcacg

SEQ ID NO: 2321601 - RNA, 19 nt, Artificial Sequence
  Description of Artificial Sequence: Synthetic oligonucleotide
ugcugguuuucuuuagcua

SEQ ID NO: 2321602 - RNA, 19 nt, Artificial Sequence
  Description of Artificial Sequence: Synthetic oligonucleotide
agaaaggaaccaggcaucu

SEQ ID NO: 2321603 - RNA, 19 nt, Artificial Sequence
  Description of Artificial Sequence: Synthetic oligonucleotide
aguucuccaaagagagagg

SEQ ID NO: 2321604 - RNA, 19 nt, Artificial Sequence
  Description of Artificial Sequence: Synthetic oligonucleotide
ccaagagaccuccuguacg

SEQ ID NO: 2321605 - RNA, 19 nt, Artificial Sequence
  Description of Artificial Sequence: Synthetic oligonucleotide
ggugucuuauguuuauguc

SEQ ID NO: 2321606 - RNA, 19 nt, Artificial Sequence
  Description of Artificial Sequence: Synthetic oligonucleotide
aggccugauguagugugac

SEQ ID NO: 2321607 - RNA, 19 nt, Artificial Sequence
  Description of Artificial Sequence: Synthetic oligonucleotide
aaggaaccaggcaucuuga

SEQ ID NO: 2321608 - RNA, 19 nt, Artificial Sequence
  Description of Artificial Sequence: Synthetic oligonucleotide
cauccuuugcuaccugcug

SEQ ID NO: 2321609 - RNA, 19 nt, Artificial Sequence
  Description of Artificial Sequence: Synthetic oligonucleotide
cugcaccccgccaacgucc

SEQ ID NO: 2321610 - RNA, 19 nt, Artificial Sequence
  Description of Artificial Sequence: Synthetic oligonucleotide
uccauagaucugagacuug

SEQ ID NO: 2321611 - RNA, 19 nt, Artificial Sequence
  Description of Artificial Sequence: Synthetic oligonucleotide
agggccaagagaccuccug

SEQ ID NO: 2321612 - RNA, 19 nt, Artificial Sequence
  Description of Artificial Sequence: Synthetic oligonucleotide
cuagucaccaguuguucaa

SEQ ID NO: 2321613 - RNA, 19 nt, Artificial Sequence
  Description of Artificial Sequence: Synthetic oligonucleotide
uuccacgaucagacucugg

SEQ ID NO: 2321614 - RNA, 19 nt, Artificial Sequence
  Description of Artificial Sequence: Synthetic oligonucleotide
agaaggcgccuccgaauag

SEQ ID NO: 2321615 - RNA, 19 nt, Artificial Sequence
  Description of Artificial Sequence: Synthetic oligonucleotide
uucuggugggcuccauaga

SEQ ID NO: 2321616 - RNA, 19 nt, Artificial Sequence
  Description of Artificial Sequence: Synthetic oligonucleotide
agacacuccccgcucagaa

SEQ ID NO: 2321617 - RNA, 19 nt, Artificial Sequence
  Description of Artificial Sequence: Synthetic oligonucleotide
ggcugauugaaggugagca

SEQ ID NO: 2321618 - RNA, 19 nt, Artificial Sequence
  Description of Artificial Sequence: Synthetic oligonucleotide
agacucuggucggucacgg

SEQ ID NO: 2321619 - RNA, 19 nt, Artificial Sequence
  Description of Artificial Sequence: Synthetic oligonucleotide
guagacacuccccgcucag

SEQ ID NO: 2321620 - RNA, 19 nt, Artificial Sequence
  Description of Artificial Sequence: Synthetic oligonucleotide
aaaguuacccaggcuccaa

SEQ ID NO: 2321621 - RNA, 19 nt, Artificial Sequence
  Description of Artificial Sequence: Synthetic oligonucleotide
aagguggacaugauagauu

SEQ ID NO: 2321622 - RNA, 19 nt, Artificial Sequence
  Description of Artificial Sequence: Synthetic oligonucleotide
gggcagacgaagcaaggcc

SEQ ID NO: 2321623 - RNA, 19 nt, Artificial Sequence
  Description of Artificial Sequence: Synthetic oligonucleotide
guuguauuccaccaucuuu

SEQ ID NO: 2321624 - RNA, 19 nt, Artificial Sequence
  Description of Artificial Sequence: Synthetic oligonucleotide
auagauuuucagggccaag

SEQ ID NO: 2321625 - RNA, 19 nt, Artificial Sequence
  Description of Artificial Sequence: Synthetic oligonucleotide
gugagcaagagaucagucu

SEQ ID NO: 2321626 - RNA, 19 nt, Artificial Sequence
  Description of Artificial Sequence: Synthetic oligonucleotide
agaaaacuucuugguuguc

SEQ ID NO: 2321627 - RNA, 19 nt, Artificial Sequence
  Description of Artificial Sequence: Synthetic oligonucleotide
gguuguccgggaccggucg

SEQ ID NO: 2321628 - RNA, 19 nt, Artificial Sequence
  Description of Artificial Sequence: Synthetic oligonucleotide
auaacacgugcacggcccu

SEQ ID NO: 2321629 - RNA, 19 nt, Artificial Sequence
  Description of Artificial Sequence: Synthetic oligonucleotide
agaggaggugucuuauguu

SEQ ID NO: 2321630 - RNA, 19 nt, Artificial Sequence
  Description of Artificial Sequence: Synthetic oligonucleotide
uagcgagguuuuaaagaau

SEQ ID NO: 2321631 - RNA, 19 nt, Artificial Sequence
  Description of Artificial Sequence: Synthetic oligonucleotide
gucuuauguuuauguccag

SEQ ID NO: 2321632 - RNA, 19 nt, Artificial Sequence
  Description of Artificial Sequence: Synthetic oligonucleotide
ggaaccaggcaucuugaca

SEQ ID NO: 2321633 - RNA, 19 nt, Artificial Sequence
  Description of Artificial Sequence: Synthetic oligonucleotide
gauagauuuucagggccaa

SEQ ID NO: 2321634 - RNA, 19 nt, Artificial Sequence
  Description of Artificial Sequence: Synthetic oligonucleotide
acaagggccuuugaggcau

SEQ ID NO: 2321635 - RNA, 19 nt, Artificial Sequence
  Description of Artificial Sequence: Synthetic oligonucleotide
gaggaggugucuuauguuu

SEQ ID NO: 2321636 - RNA, 19 nt, Artificial Sequence
  Description of Artificial Sequence: Synthetic oligonucleotide
agagaucagucugguacug

SEQ ID NO: 2321637 - RNA, 19 nt, Artificial Sequence
  Description of Artificial Sequence: Synthetic oligonucleotide
aggugagcaagagaucagu

SEQ ID NO: 2321638 - RNA, 19 nt, Artificial Sequence
  Description of Artificial Sequence: Synthetic oligonucleotide
cagauaacacgugcacggc

SEQ ID NO: 2321639 - RNA, 19 nt, Artificial Sequence
  Description of Artificial Sequence: Synthetic oligonucleotide
acacgugcacggcccuagc

SEQ ID NO: 2321640 - RNA, 19 nt, Artificial Sequence
  Description of Artificial Sequence: Synthetic oligonucleotide
agcaagagaucagucuggu

SEQ ID NO: 2321641 - RNA, 19 nt, Artificial Sequence
  Description of Artificial Sequence: Synthetic oligonucleotide
cagagauaaguucuccaaa

SEQ ID NO: 2321642 - RNA, 19 nt, Artificial Sequence
  Description of Artificial Sequence: Synthetic oligonucleotide
guccucaaaaugguaccgc

SEQ ID NO: 2321643 - RNA, 19 nt, Artificial Sequence
  Description of Artificial Sequence: Synthetic oligonucleotide
gacucuggucggucacggg

SEQ ID NO: 2321644 - RNA, 19 nt, Artificial Sequence
  Description of Artificial Sequence: Synthetic oligonucleotide
cacgugggccugcagcucc

SEQ ID NO: 2321645 - RNA, 19 nt, Artificial Sequence
  Description of Artificial Sequence: Synthetic oligonucleotide
gucacgggauggcagaaaa

SEQ ID NO: 2321646 - RNA, 19 nt, Artificial Sequence
  Description of Artificial Sequence: Synthetic oligonucleotide
ugggaucaugaagagucaa

SEQ ID NO: 2321647 - RNA, 19 nt, Artificial Sequence
  Description of Artificial Sequence: Synthetic oligonucleotide
gacacuccccgcucagaac

SEQ ID NO: 2321648 - RNA, 19 nt, Artificial Sequence
  Description of Artificial Sequence: Synthetic oligonucleotide
uuucugcagaggagguguc

SEQ ID NO: 2321649 - RNA, 19 nt, Artificial Sequence
  Description of Artificial Sequence: Synthetic oligonucleotide
acuugagucuggacauuag

SEQ ID NO: 2321650 - RNA, 19 nt, Artificial Sequence
  Description of Artificial Sequence: Synthetic oligonucleotide
guuguccgggaccggucgg

SEQ ID NO: 2321651 - RNA, 19 nt, Artificial Sequence
  Description of Artificial Sequence: Synthetic oligonucleotide
ccucaaaaugguaccgcgc

SEQ ID NO: 2321652 - RNA, 19 nt, Artificial Sequence
  Description of Artificial Sequence: Synthetic oligonucleotide
aaggcgccuccgaauagug

SEQ ID NO: 2321653 - RNA, 19 nt, Artificial Sequence
  Description of Artificial Sequence: Synthetic oligonucleotide
cagaaaacuucuugguugu

SEQ ID NO: 2321654 - RNA, 19 nt, Artificial Sequence
  Description of Artificial Sequence: Synthetic oligonucleotide
uugguuguccgggaccggu

SEQ ID NO: 2321655 - RNA, 19 nt, Artificial Sequence
  Description of Artificial Sequence: Synthetic oligonucleotide
aagcaaggccugauguagu

SEQ ID NO: 2321656 - RNA, 19 nt, Artificial Sequence
  Description of Artificial Sequence: Synthetic oligonucleotide
aucuuuacuggggaccaaa

SEQ ID NO: 2321657 - RNA, 19 nt, Artificial Sequence
  Description of Artificial Sequence: Synthetic oligonucleotide
cugagacuugagucuggac

SEQ ID NO: 2321658 - RNA, 19 nt, Artificial Sequence
  Description of Artificial Sequence: Synthetic oligonucleotide
ugcagaggaggugucuuau

SEQ ID NO: 2321659 - RNA, 19 nt, Artificial Sequence
  Description of Artificial Sequence: Synthetic oligonucleotide
guccucagcagcauuaugu

SEQ ID NO: 2321660 - RNA, 19 nt, Artificial Sequence
  Description of Artificial Sequence: Synthetic oligonucleotide
ggcgccuccgaauagugga

SEQ ID NO: 2321661 - RNA, 19 nt, Artificial Sequence
  Description of Artificial Sequence: Synthetic oligonucleotide
caccaucuuuacuggggac

SEQ ID NO: 2321662 - RNA, 19 nt, Artificial Sequence
  Description of Artificial Sequence: Synthetic oligonucleotide
cacgugcacggcccuagcc

SEQ ID NO: 2321663 - RNA, 19 nt, Artificial Sequence
  Description of Artificial Sequence: Synthetic oligonucleotide
guuuauguccagggaagaa

SEQ ID NO: 2321664 - RNA, 19 nt, Artificial Sequence
  Description of Artificial Sequence: Synthetic oligonucleotide
accgcgcagccgcuucgcc

SEQ ID NO: 2321665 - RNA, 19 nt, Artificial Sequence
  Description of Artificial Sequence: Synthetic oligonucleotide
cuccccgcucagaacuggg

SEQ ID NO: 2321666 - RNA, 19 nt, Artificial Sequence
  Description of Artificial Sequence: Synthetic oligonucleotide
gucggucacgggauggcag

SEQ ID NO: 2321667 - RNA, 19 nt, Artificial Sequence
  Description of Artificial Sequence: Synthetic oligonucleotide
gaucagacucuggucgguc

SEQ ID NO: 2321668 - RNA, 19 nt, Artificial Sequence
  Description of Artificial Sequence: Synthetic oligonucleotide
guuacccaggcuccaaggu

SEQ ID NO: 2321669 - RNA, 19 nt, Artificial Sequence
  Description of Artificial Sequence: Synthetic oligonucleotide
uccccgcucagaacugggu

SEQ ID NO: 2321670 - RNA, 19 nt, Artificial Sequence
  Description of Artificial Sequence: Synthetic oligonucleotide
guaccgcgcagccgcuucg

SEQ ID NO: 2321671 - RNA, 19 nt, Artificial Sequence
  Description of Artificial Sequence: Synthetic oligonucleotide
cuggucggucacgggaugg

SEQ ID NO: 2321672 - RNA, 19 nt, Artificial Sequence
  Description of Artificial Sequence: Synthetic oligonucleotide
cacgggauggcagaaaacu

SEQ ID NO: 2321673 - RNA, 19 nt, Artificial Sequence
  Description of Artificial Sequence: Synthetic oligonucleotide
cuggacauuagcgagguuu

SEQ ID NO: 2321674 - RNA, 19 nt, Artificial Sequence
  Description of Artificial Sequence: Synthetic oligonucleotide
cccgcucagaacugggucc

SEQ ID NO: 2321675 - RNA, 19 nt, Artificial Sequence
  Description of Artificial Sequence: Synthetic oligonucleotide
ugguuguccgggaccgguc

SEQ ID NO: 2321676 - RNA, 19 nt, Artificial Sequence
  Description of Artificial Sequence: Synthetic oligonucleotide
uggucggucacgggauggc

SEQ ID NO: 2321677 - RNA, 19 nt, Artificial Sequence
  Description of Artificial Sequence: Synthetic oligonucleotide
ugcaccccgccaacguccu

SEQ ID NO: 2321678 - RNA, 19 nt, Artificial Sequence
  Description of Artificial Sequence: Synthetic oligonucleotide
uucgccccgcacgugggcc

SEQ ID NO: 2321679 - RNA, 19 nt, Artificial Sequence
  Description of Artificial Sequence: Synthetic oligonucleotide
acuccccgcucagaacugg

SEQ ID NO: 2321680 - RNA, 19 nt, Artificial Sequence
  Description of Artificial Sequence: Synthetic oligonucleotide
guccccgaguccucagcag

SEQ ID NO: 2321681 - RNA, 19 nt, Artificial Sequence
  Description of Artificial Sequence: Synthetic oligonucleotide
gccuccgaauaguggaaag

SEQ ID NO: 2321682 - RNA, 19 nt, Artificial Sequence
  Description of Artificial Sequence: Synthetic oligonucleotide
agggccuuugaggcaucac

SEQ ID NO: 2321683 - RNA, 19 nt, Artificial Sequence
  Description of Artificial Sequence: Synthetic oligonucleotide
accggucggaggucgcuca

SEQ ID NO: 2321684 - RNA, 19 nt, Artificial Sequence
  Description of Artificial Sequence: Synthetic oligonucleotide
gcgagguuuuaaagaaucc

SEQ ID NO: 2321685 - RNA, 19 nt, Artificial Sequence
  Description of Artificial Sequence: Synthetic oligonucleotide
guucaaaguuacccaggcu

SEQ ID NO: 2321686 - RNA, 19 nt, Artificial Sequence
  Description of Artificial Sequence: Synthetic oligonucleotide
cugcugguuuucuuuagcu

SEQ ID NO: 2321687 - RNA, 19 nt, Artificial Sequence
  Description of Artificial Sequence: Synthetic oligonucleotide
cucagaacuggguccccga

SEQ ID NO: 2321688 - RNA, 19 nt, Artificial Sequence
  Description of Artificial Sequence: Synthetic oligonucleotide
gccaagagaccuccuguac

SEQ ID NO: 2321689 - RNA, 19 nt, Artificial Sequence
  Description of Artificial Sequence: Synthetic oligonucleotide
uguccgggaccggucggag

SEQ ID NO: 2321690 - RNA, 19 nt, Artificial Sequence
  Description of Artificial Sequence: Synthetic oligonucleotide
aagggccuuugaggcauca

SEQ ID NO: 2321691 - RNA, 19 nt, Artificial Sequence
  Description of Artificial Sequence: Synthetic oligonucleotide
cuccauagaucugagacuu

SEQ ID NO: 2321692 - RNA, 19 nt, Artificial Sequence
  Description of Artificial Sequence: Synthetic oligonucleotide
gccccucagagauaaguuc

SEQ ID NO: 2321693 - RNA, 19 nt, Artificial Sequence
  Description of Artificial Sequence: Synthetic oligonucleotide
ccugauguagugugacauc

SEQ ID NO: 2321694 - RNA, 19 nt, Artificial Sequence
  Description of Artificial Sequence: Synthetic oligonucleotide
ggugagcaagagaucaguc

SEQ ID NO: 2321695 - RNA, 19 nt, Artificial Sequence
  Description of Artificial Sequence: Synthetic oligonucleotide
uuguccgggaccggucgga

SEQ ID NO: 2321696 - RNA, 19 nt, Artificial Sequence
  Description of Artificial Sequence: Synthetic oligonucleotide
guccgggaccggucggagg

SEQ ID NO: 2321697 - RNA, 19 nt, Artificial Sequence
  Description of Artificial Sequence: Synthetic oligonucleotide
cgggauggcagaaaacuuc

SEQ ID NO: 2321698 - RNA, 19 nt, Artificial Sequence
  Description of Artificial Sequence: Synthetic oligonucleotide
caaaguuacccaggcucca

SEQ ID NO: 2321699 - RNA, 19 nt, Artificial Sequence
  Description of Artificial Sequence: Synthetic oligonucleotide
ggcugcacagauaacacgu

SEQ ID NO: 2321700 - RNA, 19 nt, Artificial Sequence
  Description of Artificial Sequence: Synthetic oligonucleotide
gaacggcggagaaggcgcc

SEQ ID NO: 2321701 - RNA, 19 nt, Artificial Sequence
  Description of Artificial Sequence: Synthetic oligonucleotide
guuccacgaucagacucug

SEQ ID NO: 2321702 - RNA, 19 nt, Artificial Sequence
  Description of Artificial Sequence: Synthetic oligonucleotide
ugcuaccugcugguuuucu

SEQ ID NO: 2321703 - RNA, 19 nt, Artificial Sequence
  Description of Artificial Sequence: Synthetic oligonucleotide
caucuugacagcagccccu

SEQ ID NO: 2321704 - RNA, 19 nt, Artificial Sequence
  Description of Artificial Sequence: Synthetic oligonucleotide
guuucuggugggcuccaua

SEQ ID NO: 2321705 - RNA, 19 nt, Artificial Sequence
  Description of Artificial Sequence: Synthetic oligonucleotide
cuugguuguccgggaccgg

SEQ ID NO: 2321706 - RNA, 19 nt, Artificial Sequence
  Description of Artificial Sequence: Synthetic oligonucleotide
guauuccaccaucuuuacu

SEQ ID NO: 2321707 - RNA, 19 nt, Artificial Sequence
  Description of Artificial Sequence: Synthetic oligonucleotide
gccuuugaggcaucacuuc

SEQ ID NO: 2321708 - RNA, 19 nt, Artificial Sequence
  Description of Artificial Sequence: Synthetic oligonucleotide
gcauuauguuguauuccac

SEQ ID NO: 2321709 - RNA, 19 nt, Artificial Sequence
  Description of Artificial Sequence: Synthetic oligonucleotide
ggggcagacgaagcaaggc

SEQ ID NO: 2321710 - RNA, 19 nt, Artificial Sequence
  Description of Artificial Sequence: Synthetic oligonucleotide
aggaggugucuuauguuua

SEQ ID NO: 2321711 - RNA, 19 nt, Artificial Sequence
  Description of Artificial Sequence: Synthetic oligonucleotide
aacggcggagaaggcgccu

SEQ ID NO: 2321712 - RNA, 19 nt, Artificial Sequence
  Description of Artificial Sequence: Synthetic oligonucleotide
cacuccccgcucagaacug

SEQ ID NO: 2321713 - RNA, 19 nt, Artificial Sequence
  Description of Artificial Sequence: Synthetic oligonucleotide
aggcgccuccgaauagugg

SEQ ID NO: 2321714 - RNA, 19 nt, Artificial Sequence
  Description of Artificial Sequence: Synthetic oligonucleotide
auccuacaagggccuuuga

SEQ ID NO: 2321715 - RNA, 19 nt, Artificial Sequence
  Description of Artificial Sequence: Synthetic oligonucleotide
ccauagaucugagacuuga

SEQ ID NO: 2321716 - RNA, 19 nt, Artificial Sequence
  Description of Artificial Sequence: Synthetic oligonucleotide
gaaggcgccuccgaauagu

SEQ ID NO: 2321717 - RNA, 19 nt, Artificial Sequence
  Description of Artificial Sequence: Synthetic oligonucleotide
gcucagaacuggguccccg

SEQ ID NO: 2321718 - RNA, 19 nt, Artificial Sequence
  Description of Artificial Sequence: Synthetic oligonucleotide
cuucgccccgcacgugggc

SEQ ID NO: 2321719 - RNA, 19 nt, Artificial Sequence
  Description of Artificial Sequence: Synthetic oligonucleotide
uagcuaccugcugcuugcc

SEQ ID NO: 2321720 - RNA, 19 nt, Artificial Sequence
  Description of Artificial Sequence: Synthetic oligonucleotide
ggucgcucacauccauggc

SEQ ID NO: 2321721 - RNA, 19 nt, Artificial Sequence
  Description of Artificial Sequence: Synthetic oligonucleotide
acgggauggcagaaaacuu

SEQ ID NO: 2321722 - RNA, 19 nt, Artificial Sequence
  Description of Artificial Sequence: Synthetic oligonucleotide
agccccucagagauaaguu

SEQ ID NO: 2321723 - RNA, 19 nt, Artificial Sequence
  Description of Artificial Sequence: Synthetic oligonucleotide
cuaccugcugguuuucuuu

SEQ ID NO: 2321724 - RNA, 19 nt, Artificial Sequence
  Description of Artificial Sequence: Synthetic oligonucleotide
cuuugcuaccugcugguuu

SEQ ID NO: 2321725 - RNA, 19 nt, Artificial Sequence
  Description of Artificial Sequence: Synthetic oligonucleotide
gcugcacagauaacacgug

SEQ ID NO: 2321726 - RNA, 19 nt, Artificial Sequence
  Description of Artificial Sequence: Synthetic oligonucleotide
cguccucaaaaugguaccg

SEQ ID NO: 2321727 - RNA, 19 nt, Artificial Sequence
  Description of Artificial Sequence: Synthetic oligonucleotide
gucaaacuagucaccaguu

SEQ ID NO: 2321728 - RNA, 19 nt, Artificial Sequence
  Description of Artificial Sequence: Synthetic oligonucleotide
ccacgaucagacucugguc

SEQ ID NO: 2321729 - RNA, 19 nt, Artificial Sequence
  Description of Artificial Sequence: Synthetic oligonucleotide
gucuggacauuagcgaggu

SEQ ID NO: 2321730 - RNA, 19 nt, Artificial Sequence
  Description of Artificial Sequence: Synthetic oligonucleotide
gguccccgaguccucagca

SEQ ID NO: 2321731 - RNA, 19 nt, Artificial Sequence
  Description of Artificial Sequence: Synthetic oligonucleotide
cuccaagguggacaugaua

SEQ ID NO: 2321732 - RNA, 19 nt, Artificial Sequence
  Description of Artificial Sequence: Synthetic oligonucleotide
ggcagaaaacuucuugguu

SEQ ID NO: 2321733 - RNA, 19 nt, Artificial Sequence
  Description of Artificial Sequence: Synthetic oligonucleotide
caacguccucaaaauggua

SEQ ID NO: 2321734 - RNA, 19 nt, Artificial Sequence
  Description of Artificial Sequence: Synthetic oligonucleotide
cgugcacggcccuagcccc

SEQ ID NO: 2321735 - RNA, 19 nt, Artificial Sequence
  Description of Artificial Sequence: Synthetic oligonucleotide
cuccgaauaguggaaaguu

SEQ ID NO: 2321736 - RNA, 19 nt, Artificial Sequence
  Description of Artificial Sequence: Synthetic oligonucleotide
ggggagaacggcggagaag

SEQ ID NO: 2321737 - RNA, 19 nt, Artificial Sequence
  Description of Artificial Sequence: Synthetic oligonucleotide
gggaucaugaagagucaaa

SEQ ID NO: 2321738 - RNA, 19 nt, Artificial Sequence
  Description of Artificial Sequence: Synthetic oligonucleotide
uaccgcgcagccgcuucgc

SEQ ID NO: 2321739 - RNA, 19 nt, Artificial Sequence
  Description of Artificial Sequence: Synthetic oligonucleotide
gguaccgcgcagccgcuuc

SEQ ID NO: 2321740 - RNA, 19 nt, Artificial Sequence
  Description of Artificial Sequence: Synthetic oligonucleotide
ccgcacgugggccugcagc

SEQ ID NO: 2321741 - RNA, 19 nt, Artificial Sequence
  Description of Artificial Sequence: Synthetic oligonucleotide
cccgccaacguccucaaaa

SEQ ID NO: 2321742 - RNA, 19 nt, Artificial Sequence
  Description of Artificial Sequence: Synthetic oligonucleotide
caccccgccaacguccuca

SEQ ID NO: 2321743 - RNA, 19 nt, Artificial Sequence
  Description of Artificial Sequence: Synthetic oligonucleotide
uaacacgugcacggcccua

SEQ ID NO: 2321744 - RNA, 19 nt, Artificial Sequence
  Description of Artificial Sequence: Synthetic oligonucleotide
agaauccuacaagggccuu

SEQ ID NO: 2321745 - RNA, 19 nt, Artificial Sequence
  Description of Artificial Sequence: Synthetic oligonucleotide
gcugcuugccagaaaggaa

SEQ ID NO: 2321746 - RNA, 19 nt, Artificial Sequence
  Description of Artificial Sequence: Synthetic oligonucleotide
ggggcugauugaaggugag

SEQ ID NO: 2321747 - RNA, 19 nt, Artificial Sequence
  Description of Artificial Sequence: Synthetic oligonucleotide
ccaacguccucaaaauggu

SEQ ID NO: 2321748 - RNA, 19 nt, Artificial Sequence
  Description of Artificial Sequence: Synthetic oligonucleotide
agacuugagucuggacauu

SEQ ID NO: 2321749 - RNA, 19 nt, Artificial Sequence
  Description of Artificial Sequence: Synthetic oligonucleotide
gaauccuacaagggccuuu

SEQ ID NO: 2321750 - RNA, 19 nt, Artificial Sequence
  Description of Artificial Sequence: Synthetic oligonucleotide
gaccggucggaggucgcuc

SEQ ID NO: 2321751 - RNA, 19 nt, Artificial Sequence
  Description of Artificial Sequence: Synthetic oligonucleotide
ggaggugucuuauguuuau

SEQ ID NO: 2321752 - RNA, 19 nt, Artificial Sequence
  Description of Artificial Sequence: Synthetic oligonucleotide
gucggaggucgcucacauc

SEQ ID NO: 2321753 - RNA, 19 nt, Artificial Sequence
  Description of Artificial Sequence: Synthetic oligonucleotide
gggcugauugaaggugagc

SEQ ID NO: 2321754 - RNA, 19 nt, Artificial Sequence
  Description of Artificial Sequence: Synthetic oligonucleotide
ccccucagagauaaguucu

SEQ ID NO: 2321755 - RNA, 19 nt, Artificial Sequence
  Description of Artificial Sequence: Synthetic oligonucleotide
cucuggucggucacgggau

SEQ ID NO: 2321756 - RNA, 19 nt, Artificial Sequence
  Description of Artificial Sequence: Synthetic oligonucleotide
uugcuaccugcugguuuuc

SEQ ID NO: 2321757 - RNA, 19 nt, Artificial Sequence
  Description of Artificial Sequence: Synthetic oligonucleotide
cagccccucagagauaagu

SEQ ID NO: 2321758 - RNA, 19 nt, Artificial Sequence
  Description of Artificial Sequence: Synthetic oligonucleotide
gccugauguagugugacau

SEQ ID NO: 2321759 - RNA, 19 nt, Artificial Sequence
  Description of Artificial Sequence: Synthetic oligonucleotide
ccgcucagaacuggguccc

SEQ ID NO: 2321760 - RNA, 19 nt, Artificial Sequence
  Description of Artificial Sequence: Synthetic oligonucleotide
ccccgcucagaacuggguc

SEQ ID NO: 2321761 - RNA, 19 nt, Artificial Sequence
  Description of Artificial Sequence: Synthetic oligonucleotide
ggagaacggcggagaaggc

SEQ ID NO: 2321762 - RNA, 19 nt, Artificial Sequence
  Description of Artificial Sequence: Synthetic oligonucleotide
aguuucuggugggcuccau

SEQ ID NO: 2321763 - RNA, 19 nt, Artificial Sequence
  Description of Artificial Sequence: Synthetic oligonucleotide
gaaaggaaccaggcaucuu

SEQ ID NO: 2321764 - RNA, 19 nt, Artificial Sequence
  Description of Artificial Sequence: Synthetic oligonucleotide
accccgccaacguccucaa

SEQ ID NO: 2321765 - RNA, 19 nt, Artificial Sequence
  Description of Artificial Sequence: Synthetic oligonucleotide
gcaagagaucagucuggua

SEQ ID NO: 2321766 - RNA, 19 nt, Artificial Sequence
  Description of Artificial Sequence: Synthetic oligonucleotide
gcucacauccauggcccca

SEQ ID NO: 2321767 - RNA, 19 nt, Artificial Sequence
  Description of Artificial Sequence: Synthetic oligonucleotide
ggucggaggucgcucacau

SEQ ID NO: 2321768 - RNA, 19 nt, Artificial Sequence
  Description of Artificial Sequence: Synthetic oligonucleotide
cgccaacguccucaaaaug

SEQ ID NO: 2321769 - RNA, 19 nt, Artificial Sequence
  Description of Artificial Sequence: Synthetic oligonucleotide
gcggagaaggcgccuccga

SEQ ID NO: 2321770 - RNA, 19 nt, Artificial Sequence
  Description of Artificial Sequence: Synthetic oligonucleotide
caucuuuacuggggaccaa

SEQ ID NO: 2321771 - RNA, 19 nt, Artificial Sequence
  Description of Artificial Sequence: Synthetic oligonucleotide
ggacauuagcgagguuuua

SEQ ID NO: 2321772 - RNA, 19 nt, Artificial Sequence
  Description of Artificial Sequence: Synthetic oligonucleotide
ugguaccgcgcagccgcuu

SEQ ID NO: 2321773 - RNA, 19 nt, Artificial Sequence
  Description of Artificial Sequence: Synthetic oligonucleotide
acgugggccugcagcucca

SEQ ID NO: 2321774 - RNA, 19 nt, Artificial Sequence
  Description of Artificial Sequence: Synthetic oligonucleotide
gcuccagaaguuccacgau

SEQ ID NO: 2321775 - RNA, 19 nt, Artificial Sequence
  Description of Artificial Sequence: Synthetic oligonucleotide
cgcucacauccauggcccc

SEQ ID NO: 2321776 - RNA, 19 nt, Artificial Sequence
  Description of Artificial Sequence: Synthetic oligonucleotide
ggucacgggauggcagaaa

SEQ ID NO: 2321777 - RNA, 19 nt, Artificial Sequence
  Description of Artificial Sequence: Synthetic oligonucleotide
gccgcuucgccccgcacgu

SEQ ID NO: 2321778 - RNA, 19 nt, Artificial Sequence
  Description of Artificial Sequence: Synthetic oligonucleotide
ccuccgaauaguggaaagu

SEQ ID NO: 2321779 - RNA, 19 nt, Artificial Sequence
  Description of Artificial Sequence: Synthetic oligonucleotide
cuuuagcuaccugcugcuu

SEQ ID NO: 2321780 - RNA, 19 nt, Artificial Sequence
  Description of Artificial Sequence: Synthetic oligonucleotide
cgggaccggucggaggucg

SEQ ID NO: 2321781 - RNA, 19 nt, Artificial Sequence
  Description of Artificial Sequence: Synthetic oligonucleotide
ccgccaacguccucaaaau

SEQ ID NO: 2321782 - RNA, 19 nt, Artificial Sequence
  Description of Artificial Sequence: Synthetic oligonucleotide
gggaccggucggaggucgc

SEQ ID NO: 2321783 - RNA, 19 nt, Artificial Sequence
  Description of Artificial Sequence: Synthetic oligonucleotide
gcagccgcuucgccccgca

SEQ ID NO: 2321784 - RNA, 19 nt, Artificial Sequence
  Description of Artificial Sequence: Synthetic oligonucleotide
ccggucggaggucgcucac

SEQ ID NO: 2321785 - RNA, 19 nt, Artificial Sequence
  Description of Artificial Sequence: Synthetic oligonucleotide
ccccugcaccccgccaacg

SEQ ID NO: 2321786 - RNA, 19 nt, Artificial Sequence
  Description of Artificial Sequence: Synthetic oligonucleotide
cggcggagaaggcgccucc

SEQ ID NO: 2321787 - RNA, 19 nt, Artificial Sequence
  Description of Artificial Sequence: Synthetic oligonucleotide
gcgccuccgaauaguggaa

SEQ ID NO: 2321788 - RNA, 19 nt, Artificial Sequence
  Description of Artificial Sequence: Synthetic oligonucleotide
cagggccaagagaccuccu

SEQ ID NO: 2321789 - RNA, 19 nt, Artificial Sequence
  Description of Artificial Sequence: Synthetic oligonucleotide
cggaggucgcucacaucca

SEQ ID NO: 2321790 - RNA, 19 nt, Artificial Sequence
  Description of Artificial Sequence: Synthetic oligonucleotide
gguggacaugauagauuuu

SEQ ID NO: 2321791 - RNA, 19 nt, Artificial Sequence
  Description of Artificial Sequence: Synthetic oligonucleotide
cagcagcauuauguuguau

SEQ ID NO: 2321792 - RNA, 19 nt, Artificial Sequence
  Description of Artificial Sequence: Synthetic oligonucleotide
cccgcacgugggccugcag

SEQ ID NO: 2321793 - RNA, 19 nt, Artificial Sequence
  Description of Artificial Sequence: Synthetic oligonucleotide
ggaccggucggaggucgcu

SEQ ID NO: 2321794 - RNA, 19 nt, Artificial Sequence
  Description of Artificial Sequence: Synthetic oligonucleotide
gccugcagcuccagaaguu

SEQ ID NO: 2321795 - RNA, 19 nt, Artificial Sequence
  Description of Artificial Sequence: Synthetic oligonucleotide
cccugcaccccgccaacgu

SEQ ID NO: 2321796 - RNA, 19 nt, Artificial Sequence
  Description of Artificial Sequence: Synthetic oligonucleotide
gcaccccgccaacguccuc

SEQ ID NO: 2321797 - RNA, 19 nt, Artificial Sequence
  Description of Artificial Sequence: Synthetic oligonucleotide
cgccuccgaauaguggaaa

SEQ ID NO: 2321798 - RNA, 19 nt, Artificial Sequence
  Description of Artificial Sequence: Synthetic oligonucleotide
ccgggaccggucggagguc

SEQ ID NO: 2321799 - RNA, 19 nt, Artificial Sequence
  Description of Artificial Sequence: Synthetic oligonucleotide
cgaucagacucuggucggu

SEQ ID NO: 2321800 - RNA, 19 nt, Artificial Sequence
  Description of Artificial Sequence: Synthetic oligonucleotide
ccgaguccucagcagcauu

SEQ ID NO: 2321801 - RNA, 19 nt, Artificial Sequence
  Description of Artificial Sequence: Synthetic oligonucleotide
cggucggaggucgcucaca

SEQ ID NO: 2321802 - RNA, 19 nt, Artificial Sequence
  Description of Artificial Sequence: Synthetic oligonucleotide
ccgcuucgccccgcacgug

SEQ ID NO: 2321803 - RNA, 19 nt, Artificial Sequence
  Description of Artificial Sequence: Synthetic oligonucleotide
ccuuugcuaccugcugguu

SEQ ID NO: 2321804 - RNA, 19 nt, Artificial Sequence
  Description of Artificial Sequence: Synthetic oligonucleotide
cggucacgggauggcagaa

SEQ ID NO: 2321805 - RNA, 19 nt, Artificial Sequence
  Description of Artificial Sequence: Synthetic oligonucleotide
cccgaguccucagcagcau

SEQ ID NO: 2321806 - RNA, 19 nt, Artificial Sequence
  Description of Artificial Sequence: Synthetic oligonucleotide
ccccgccaacguccucaaa

SEQ ID NO: 2321807 - RNA, 19 nt, Artificial Sequence
  Description of Artificial Sequence: Synthetic oligonucleotide
aaugaggagacgcaguugc

SEQ ID NO: 2321808 - RNA, 19 nt, Artificial Sequence
  Description of Artificial Sequence: Synthetic oligonucleotide
uauauauauauauauaaca

SEQ ID NO: 2321809 - RNA, 19 nt, Artificial Sequence
  Description of Artificial Sequence: Synthetic oligonucleotide
auauauauauaauaugggg

SEQ ID NO: 2321810 - RNA, 19 nt, Artificial Sequence
  Description of Artificial Sequence: Synthetic oligonucleotide
uauauauauauaauauggg

SEQ ID NO: 2321811 - RNA, 19 nt, Artificial Sequence
  Description of Artificial Sequence: Synthetic oligonucleotide
auauauauauauaauaugg

SEQ ID NO: 2321812 - RNA, 19 nt, Artificial Sequence
  Description of Artificial Sequence: Synthetic oligonucleotide
uauauauauauauauauaa

SEQ ID NO: 2321813 - RNA, 19 nt, Artificial Sequence
  Description of Artificial Sequence: Synthetic oligonucleotide
uauauauauauauauauau

SEQ ID NO: 2321814 - RNA, 19 nt, Artificial Sequence
  Description of Artificial Sequence: Synthetic oligonucleotide
auauauauauauaacacac

SEQ ID NO: 2321815 - RNA, 19 nt, Artificial Sequence
  Description of Artificial Sequence: Synthetic oligonucleotide
uauauauauauauaauaug

SEQ ID NO: 2321816 - RNA, 19 nt, Artificial Sequence
  Description of Artificial Sequence: Synthetic oligonucleotide
auauauauauauauaacac

SEQ ID NO: 2321817 - RNA, 19 nt, Artificial Sequence
  Description of Artificial Sequence: Synthetic oligonucleotide
ucuguagcaauguagauug

SEQ ID NO: 2321818 - RNA, 19 nt, Artificial Sequence
  Description of Artificial Sequence: Synthetic oligonucleotide
uuuaauaugccacuguccu

SEQ ID NO: 2321819 - RNA, 19 nt, Artificial Sequence
  Description of Artificial Sequence: Synthetic oligonucleotide
uuucauuaaggucagggag

SEQ ID NO: 2321820 - RNA, 19 nt, Artificial Sequence
  Description of Artificial Sequence: Synthetic oligonucleotide
uauauauauauauauaaua

SEQ ID NO: 2321821 - RNA, 19 nt, Artificial Sequence
  Description of Artificial Sequence: Synthetic oligonucleotide
uauauauauauauaacaca

SEQ ID NO: 2321822 - RNA, 19 nt, Artificial Sequence
  Description of Artificial Sequence: Synthetic oligonucleotide
aacuauagagaucaguuga

SEQ ID NO: 2321823 - RNA, 19 nt, Artificial Sequence
  Description of Artificial Sequence: Synthetic oligonucleotide
uuuauaaggucacuuuagg

SEQ ID NO: 2321824 - RNA, 19 nt, Artificial Sequence
  Description of Artificial Sequence: Synthetic oligonucleotide
aaagaaggaagacugccuc

SEQ ID NO: 2321825 - RNA, 19 nt, Artificial Sequence
  Description of Artificial Sequence: Synthetic oligonucleotide
gaugaaugcccacauaggg

SEQ ID NO: 2321826 - RNA, 19 nt, Artificial Sequence
  Description of Artificial Sequence: Synthetic oligonucleotide
ugaaaagcggccaaggccc

SEQ ID NO: 2321827 - RNA, 19 nt, Artificial Sequence
  Description of Artificial Sequence: Synthetic oligonucleotide
uuuucaaguagucauggcu

SEQ ID NO: 2321828 - RNA, 19 nt, Artificial Sequence
  Description of Artificial Sequence: Synthetic oligonucleotide
aagccaugaagugugaccc

SEQ ID NO: 2321829 - RNA, 19 nt, Artificial Sequence
  Description of Artificial Sequence: Synthetic oligonucleotide
gauuucauuaaggucaggg

SEQ ID NO: 2321830 - RNA, 19 nt, Artificial Sequence
  Description of Artificial Sequence: Synthetic oligonucleotide
auauauauauauauauaac

SEQ ID NO: 2321831 - RNA, 19 nt, Artificial Sequence
  Description of Artificial Sequence: Synthetic oligonucleotide
uaaccuuauauauauauau

SEQ ID NO: 2321832 - RNA, 19 nt, Artificial Sequence
  Description of Artificial Sequence: Synthetic oligonucleotide
ugcaucaaaacuauagaga

SEQ ID NO: 2321833 - RNA, 19 nt, Artificial Sequence
  Description of Artificial Sequence: Synthetic oligonucleotide
uauaaggucacuuuaggua

SEQ ID NO: 2321834 - RNA, 19 nt, Artificial Sequence
  Description of Artificial Sequence: Synthetic oligonucleotide
aaacuauagagaucaguug

SEQ ID NO: 2321835 - RNA, 19 nt, Artificial Sequence
  Description of Artificial Sequence: Synthetic oligonucleotide
uuugcaucaaaacuauaga

SEQ ID NO: 2321836 - RNA, 19 nt, Artificial Sequence
  Description of Artificial Sequence: Synthetic oligonucleotide
uuauauauauauauauaua

SEQ ID NO: 2321837 - RNA, 19 nt, Artificial Sequence
  Description of Artificial Sequence: Synthetic oligonucleotide
agugugacccugcaguucc

SEQ ID NO: 2321838 - RNA, 19 nt, Artificial Sequence
  Description of Artificial Sequence: Synthetic oligonucleotide
uauauauauauaacacaca

SEQ ID NO: 2321839 - RNA, 19 nt, Artificial Sequence
  Description of Artificial Sequence: Synthetic oligonucleotide
uauagagaucaguugagug

SEQ ID NO: 2321840 - RNA, 19 nt, Artificial Sequence
  Description of Artificial Sequence: Synthetic oligonucleotide
uggcacauagcucucagag

SEQ ID NO: 2321841 - RNA, 19 nt, Artificial Sequence
  Description of Artificial Sequence: Synthetic oligonucleotide
cauucuuccagucggagcc

SEQ ID NO: 2321842 - RNA, 19 nt, Artificial Sequence
  Description of Artificial Sequence: Synthetic oligonucleotide
aucaaaauucaucccgugg

SEQ ID NO: 2321843 - RNA, 19 nt, Artificial Sequence
  Description of Artificial Sequence: Synthetic oligonucleotide
auauauauauauauaauau

SEQ ID NO: 2321844 - RNA, 19 nt, Artificial Sequence
  Description of Artificial Sequence: Synthetic oligonucleotide
uugucuguauuuauaaggu

SEQ ID NO: 2321845 - RNA, 19 nt, Artificial Sequence
  Description of Artificial Sequence: Synthetic oligonucleotide
accuuauauauauauauau

SEQ ID NO: 2321846 - RNA, 19 nt, Artificial Sequence
  Description of Artificial Sequence: Synthetic oligonucleotide
auagagaucaguugagugu

SEQ ID NO: 2321847 - RNA, 19 nt, Artificial Sequence
  Description of Artificial Sequence: Synthetic oligonucleotide
aucuuaaccuuauauauau

SEQ ID NO: 2321848 - RNA, 19 nt, Artificial Sequence
  Description of Artificial Sequence: Synthetic oligonucleotide
aaugcgcagaugaaugccc

SEQ ID NO: 2321849 - RNA, 19 nt, Artificial Sequence
  Description of Artificial Sequence: Synthetic oligonucleotide
aucucuggcacauagcucu

SEQ ID NO: 2321850 - RNA, 19 nt, Artificial Sequence
  Description of Artificial Sequence: Synthetic oligonucleotide
ugaggggaagccaugaagu

SEQ ID NO: 2321851 - RNA, 19 nt, Artificial Sequence
  Description of Artificial Sequence: Synthetic oligonucleotide
gaucaguugaguguccugg

SEQ ID NO: 2321852 - RNA, 19 nt, Artificial Sequence
  Description of Artificial Sequence: Synthetic oligonucleotide
ucuauccaugccaaagaag

SEQ ID NO: 2321853 - RNA, 19 nt, Artificial Sequence
  Description of Artificial Sequence: Synthetic oligonucleotide
cuuauauauauauauauau

SEQ ID NO: 2321854 - RNA, 19 nt, Artificial Sequence
  Description of Artificial Sequence: Synthetic oligonucleotide
uuauaaggucacuuuaggu

SEQ ID NO: 2321855 - RNA, 19 nt, Artificial Sequence
  Description of Artificial Sequence: Synthetic oligonucleotide
accuucaacccugaaaagc

SEQ ID NO: 2321856 - RNA, 19 nt, Artificial Sequence
  Description of Artificial Sequence: Synthetic oligonucleotide
uuguuugcaaaacccaacu

SEQ ID NO: 2321857 - RNA, 19 nt, Artificial Sequence
  Description of Artificial Sequence: Synthetic oligonucleotide
gaagccaugaagugugacc

SEQ ID NO: 2321858 - RNA, 19 nt, Artificial Sequence
  Description of Artificial Sequence: Synthetic oligonucleotide
aaauucaucccguggcuga

SEQ ID NO: 2321859 - RNA, 19 nt, Artificial Sequence
  Description of Artificial Sequence: Synthetic oligonucleotide
ugugcuaagggauuccacu

SEQ ID NO: 2321860 - RNA, 19 nt, Artificial Sequence
  Description of Artificial Sequence: Synthetic oligonucleotide
aacuuuaauaugccacugu

SEQ ID NO: 2321861 - RNA, 19 nt, Artificial Sequence
  Description of Artificial Sequence: Synthetic oligonucleotide
ucggcuguagcccacacac

SEQ ID NO: 2321862 - RNA, 19 nt, Artificial Sequence
  Description of Artificial Sequence: Synthetic oligonucleotide
cugaaaagcggccaaggcc

SEQ ID NO: 2321863 - RNA, 19 nt, Artificial Sequence
  Description of Artificial Sequence: Synthetic oligonucleotide
uuucaaguagucauggcuu

SEQ ID NO: 2321864 - RNA, 19 nt, Artificial Sequence
  Description of Artificial Sequence: Synthetic oligonucleotide
uuaaccuuauauauauaua

SEQ ID NO: 2321865 - RNA, 19 nt, Artificial Sequence
  Description of Artificial Sequence: Synthetic oligonucleotide
cauauauauauauauauau

SEQ ID NO: 2321866 - RNA, 19 nt, Artificial Sequence
  Description of Artificial Sequence: Synthetic oligonucleotide
aggucagggaggcacaugg

SEQ ID NO: 2321867 - RNA, 19 nt, Artificial Sequence
  Description of Artificial Sequence: Synthetic oligonucleotide
guagucauggcuuugcauc

SEQ ID NO: 2321868 - RNA, 19 nt, Artificial Sequence
  Description of Artificial Sequence: Synthetic oligonucleotide
aacccaacuuuaauaugcc

SEQ ID NO: 2321869 - RNA, 19 nt, Artificial Sequence
  Description of Artificial Sequence: Synthetic oligonucleotide
ucccgcuucacgaaggcag

SEQ ID NO: 2321870 - RNA, 19 nt, Artificial Sequence
  Description of Artificial Sequence: Synthetic oligonucleotide
ccugucacaaccuucaacc

SEQ ID NO: 2321871 - RNA, 19 nt, Artificial Sequence
  Description of Artificial Sequence: Synthetic oligonucleotide
uguagauugaccuggcauu

SEQ ID NO: 2321872 - RNA, 19 nt, Artificial Sequence
  Description of Artificial Sequence: Synthetic oligonucleotide
ucacuuuagguaucugugc

SEQ ID NO: 2321873 - RNA, 19 nt, Artificial Sequence
  Description of Artificial Sequence: Synthetic oligonucleotide
ugcaguuccguccuucagc

SEQ ID NO: 2321874 - RNA, 19 nt, Artificial Sequence
  Description of Artificial Sequence: Synthetic oligonucleotide
uggcuuugcaucaaaacua

SEQ ID NO: 2321875 - RNA, 19 nt, Artificial Sequence
  Description of Artificial Sequence: Synthetic oligonucleotide
ucagggaggcacaugguca

SEQ ID NO: 2321876 - RNA, 19 nt, Artificial Sequence
  Description of Artificial Sequence: Synthetic oligonucleotide
uguauuuauaaggucacuu

SEQ ID NO: 2321877 - RNA, 19 nt, Artificial Sequence
  Description of Artificial Sequence: Synthetic oligonucleotide
uucaacccugaaaagcggc

SEQ ID NO: 2321878 - RNA, 19 nt, Artificial Sequence
  Description of Artificial Sequence: Synthetic oligonucleotide
ugucacaaccuucaacccu

SEQ ID NO: 2321879 - RNA, 19 nt, Artificial Sequence
  Description of Artificial Sequence: Synthetic oligonucleotide
auauauauauauauauaau

SEQ ID NO: 2321880 - RNA, 19 nt, Artificial Sequence
  Description of Artificial Sequence: Synthetic oligonucleotide
cuuugucuguauuuauaag

SEQ ID NO: 2321881 - RNA, 19 nt, Artificial Sequence
  Description of Artificial Sequence: Synthetic oligonucleotide
gacgcaguugccaaugaag

SEQ ID NO: 2321882 - RNA, 19 nt, Artificial Sequence
  Description of Artificial Sequence: Synthetic oligonucleotide
ccaggugugaucaaaauuc

SEQ ID NO: 2321883 - RNA, 19 nt, Artificial Sequence
  Description of Artificial Sequence: Synthetic oligonucleotide
agcaauguagauugaccug

SEQ ID NO: 2321884 - RNA, 19 nt, Artificial Sequence
  Description of Artificial Sequence: Synthetic oligonucleotide
gauguacaggucgaccugg

SEQ ID NO: 2321885 - RNA, 19 nt, Artificial Sequence
  Description of Artificial Sequence: Synthetic oligonucleotide
aauguagauugaccuggca

SEQ ID NO: 2321886 - RNA, 19 nt, Artificial Sequence
  Description of Artificial Sequence: Synthetic oligonucleotide
auguagauugaccuggcau

SEQ ID NO: 2321887 - RNA, 19 nt, Artificial Sequence
  Description of Artificial Sequence: Synthetic oligonucleotide
agagggucuauccaugcca

SEQ ID NO: 2321888 - RNA, 19 nt, Artificial Sequence
  Description of Artificial Sequence: Synthetic oligonucleotide
ugcaaaacccaacuuuaau

SEQ ID NO: 2321889 - RNA, 19 nt, Artificial Sequence
  Description of Artificial Sequence: Synthetic oligonucleotide
ccuucaacccugaaaagcg

SEQ ID NO: 2321890 - RNA, 19 nt, Artificial Sequence
  Description of Artificial Sequence: Synthetic oligonucleotide
ugaaugaggagacgcaguu

SEQ ID NO: 2321891 - RNA, 19 nt, Artificial Sequence
  Description of Artificial Sequence: Synthetic oligonucleotide
guagcaauguagauugacc

SEQ ID NO: 2321892 - RNA, 19 nt, Artificial Sequence
  Description of Artificial Sequence: Synthetic oligonucleotide
agagucuguagcaauguag

SEQ ID NO: 2321893 - RNA, 19 nt, Artificial Sequence
  Description of Artificial Sequence: Synthetic oligonucleotide
cacauauauauauauauau

SEQ ID NO: 2321894 - RNA, 19 nt, Artificial Sequence
  Description of Artificial Sequence: Synthetic oligonucleotide
agauugaccuggcauucag

SEQ ID NO: 2321895 - RNA, 19 nt, Artificial Sequence
  Description of Artificial Sequence: Synthetic oligonucleotide
aaccuucaacccugaaaag

SEQ ID NO: 2321896 - RNA, 19 nt, Artificial Sequence
  Description of Artificial Sequence: Synthetic oligonucleotide
gucacuuuagguaucugug

SEQ ID NO: 2321897 - RNA, 19 nt, Artificial Sequence
  Description of Artificial Sequence: Synthetic oligonucleotide
aaagcggccaaggcccacc

SEQ ID NO: 2321898 - RNA, 19 nt, Artificial Sequence
  Description of Artificial Sequence: Synthetic oligonucleotide
uucaucccguggcugagag

SEQ ID NO: 2321899 - RNA, 19 nt, Artificial Sequence
  Description of Artificial Sequence: Synthetic oligonucleotide
auauauauauauauauaua

SEQ ID NO: 2321900 - RNA, 19 nt, Artificial Sequence
  Description of Artificial Sequence: Synthetic oligonucleotide
cacaccuauaaucucagca

SEQ ID NO: 2321901 - RNA, 19 nt, Artificial Sequence
  Description of Artificial Sequence: Synthetic oligonucleotide
gcaguugccaaugaagugg

SEQ ID NO: 2321902 - RNA, 19 nt, Artificial Sequence
  Description of Artificial Sequence: Synthetic oligonucleotide
cuuaaccuuauauauauau

SEQ ID NO: 2321903 - RNA, 19 nt, Artificial Sequence
  Description of Artificial Sequence: Synthetic oligonucleotide
agugaaugaggagacgcag

SEQ ID NO: 2321904 - RNA, 19 nt, Artificial Sequence
  Description of Artificial Sequence: Synthetic oligonucleotide
cuucaacccugaaaagcgg

SEQ ID NO: 2321905 - RNA, 19 nt, Artificial Sequence
  Description of Artificial Sequence: Synthetic oligonucleotide
cucuccggucuuuacaacc

SEQ ID NO: 2321906 - RNA, 19 nt, Artificial Sequence
  Description of Artificial Sequence: Synthetic oligonucleotide
cacacauauauauauauau

SEQ ID NO: 2321907 - RNA, 19 nt, Artificial Sequence
  Description of Artificial Sequence: Synthetic oligonucleotide
ucaaaacuauagagaucag

SEQ ID NO: 2321908 - RNA, 19 nt, Artificial Sequence
  Description of Artificial Sequence: Synthetic oligonucleotide
acuauagagaucaguugag

SEQ ID NO: 2321909 - RNA, 19 nt, Artificial Sequence
  Description of Artificial Sequence: Synthetic oligonucleotide
ugcuaagggauuccacuga

SEQ ID NO: 2321910 - RNA, 19 nt, Artificial Sequence
  Description of Artificial Sequence: Synthetic oligonucleotide
uagucauggcuuugcauca

SEQ ID NO: 2321911 - RNA, 19 nt, Artificial Sequence
  Description of Artificial Sequence: Synthetic oligonucleotide
gaucaucuuaaccuuauau

SEQ ID NO: 2321912 - RNA, 19 nt, Artificial Sequence
  Description of Artificial Sequence: Synthetic oligonucleotide
gccaaggauguacaggucg

SEQ ID NO: 2321913 - RNA, 19 nt, Artificial Sequence
  Description of Artificial Sequence: Synthetic oligonucleotide
ucaguugaguguccuggca

SEQ ID NO: 2321914 - RNA, 19 nt, Artificial Sequence
  Description of Artificial Sequence: Synthetic oligonucleotide
cuggaucucuggcacauag

SEQ ID NO: 2321915 - RNA, 19 nt, Artificial Sequence
  Description of Artificial Sequence: Synthetic oligonucleotide
ugagagggucuauccaugc

SEQ ID NO: 2321916 - RNA, 19 nt, Artificial Sequence
  Description of Artificial Sequence: Synthetic oligonucleotide
agaugaaugcccacauagg

SEQ ID NO: 2321917 - RNA, 19 nt, Artificial Sequence
  Description of Artificial Sequence: Synthetic oligonucleotide
ugucuguauuuauaagguc

SEQ ID NO: 2321918 - RNA, 19 nt, Artificial Sequence
  Description of Artificial Sequence: Synthetic oligonucleotide
cugaggggaagccaugaag

SEQ ID NO: 2321919 - RNA, 19 nt, Artificial Sequence
  Description of Artificial Sequence: Synthetic oligonucleotide
auagggccggaugaggugg

SEQ ID NO: 2321920 - RNA, 19 nt, Artificial Sequence
  Description of Artificial Sequence: Synthetic oligonucleotide
acauauauauauauauaua

SEQ ID NO: 2321921 - RNA, 19 nt, Artificial Sequence
  Description of Artificial Sequence: Synthetic oligonucleotide
uugaccuggcauucagugc

SEQ ID NO: 2321922 - RNA, 19 nt, Artificial Sequence
  Description of Artificial Sequence: Synthetic oligonucleotide
aguugaguguccuggcaca

SEQ ID NO: 2321923 - RNA, 19 nt, Artificial Sequence
  Description of Artificial Sequence: Synthetic oligonucleotide
aaccuuauauauauauaua

SEQ ID NO: 2321924 - RNA, 19 nt, Artificial Sequence
  Description of Artificial Sequence: Synthetic oligonucleotide
gaguuuucaaguagucaug

SEQ ID NO: 2321925 - RNA, 19 nt, Artificial Sequence
  Description of Artificial Sequence: Synthetic oligonucleotide
ugagaucaucuuaaccuua

SEQ ID NO: 2321926 - RNA, 19 nt, Artificial Sequence
  Description of Artificial Sequence: Synthetic oligonucleotide
ggagccaaugcgcagauga

SEQ ID NO: 2321927 - RNA, 19 nt, Artificial Sequence
  Description of Artificial Sequence: Synthetic oligonucleotide
uuuagguaucugugcuaag

SEQ ID NO: 2321928 - RNA, 19 nt, Artificial Sequence
  Description of Artificial Sequence: Synthetic oligonucleotide
aauucaucccguggcugag

SEQ ID NO: 2321929 - RNA, 19 nt, Artificial Sequence
  Description of Artificial Sequence: Synthetic oligonucleotide
ugaucugggccucuccggu

SEQ ID NO: 2321930 - RNA, 19 nt, Artificial Sequence
  Description of Artificial Sequence: Synthetic oligonucleotide
agguaucugugcuaaggga

SEQ ID NO: 2321931 - RNA, 19 nt, Artificial Sequence
  Description of Artificial Sequence: Synthetic oligonucleotide
uguuugcaaaacccaacuu

SEQ ID NO: 2321932 - RNA, 19 nt, Artificial Sequence
  Description of Artificial Sequence: Synthetic oligonucleotide
gugcuaagggauuccacug

SEQ ID NO: 2321933 - RNA, 19 nt, Artificial Sequence
  Description of Artificial Sequence: Synthetic oligonucleotide
cccaacuuuaauaugccac

SEQ ID NO: 2321934 - RNA, 19 nt, Artificial Sequence
  Description of Artificial Sequence: Synthetic oligonucleotide
uugcaaaacccaacuuuaa

SEQ ID NO: 2321935 - RNA, 19 nt, Artificial Sequence
  Description of Artificial Sequence: Synthetic oligonucleotide
caauguagauugaccuggc

SEQ ID NO: 2321936 - RNA, 19 nt, Artificial Sequence
  Description of Artificial Sequence: Synthetic oligonucleotide
ucggcuaugagaucaucuu

SEQ ID NO: 2321937 - RNA, 19 nt, Artificial Sequence
  Description of Artificial Sequence: Synthetic oligonucleotide
uguacaggucgaccugggc

SEQ ID NO: 2321938 - RNA, 19 nt, Artificial Sequence
  Description of Artificial Sequence: Synthetic oligonucleotide
augaagugugacccugcag

SEQ ID NO: 2321939 - RNA, 19 nt, Artificial Sequence
  Description of Artificial Sequence: Synthetic oligonucleotide
cugucacaaccuucaaccc

SEQ ID NO: 2321940 - RNA, 19 nt, Artificial Sequence
  Description of Artificial Sequence: Synthetic oligonucleotide
acgaaggcagugaaugagg

SEQ ID NO: 2321941 - RNA, 19 nt, Artificial Sequence
  Description of Artificial Sequence: Synthetic oligonucleotide
ggugugaucaaaauucauc

SEQ ID NO: 2321942 - RNA, 19 nt, Artificial Sequence
  Description of Artificial Sequence: Synthetic oligonucleotide
cacgaaggcagugaaugag

SEQ ID NO: 2321943 - RNA, 19 nt, Artificial Sequence
  Description of Artificial Sequence: Synthetic oligonucleotide
cugaucugggccucuccgg

SEQ ID NO: 2321944 - RNA, 19 nt, Artificial Sequence
  Description of Artificial Sequence: Synthetic oligonucleotide
uggcugagagggucuaucc

SEQ ID NO: 2321945 - RNA, 19 nt, Artificial Sequence
  Description of Artificial Sequence: Synthetic oligonucleotide
cuguagcccacacacugag

SEQ ID NO: 2321946 - RNA, 19 nt, Artificial Sequence
  Description of Artificial Sequence: Synthetic oligonucleotide
aaggucacuuuagguaucu

SEQ ID NO: 2321947 - RNA, 19 nt, Artificial Sequence
  Description of Artificial Sequence: Synthetic oligonucleotide
ucuuaaccuuauauauaua

SEQ ID NO: 2321948 - RNA, 19 nt, Artificial Sequence
  Description of Artificial Sequence: Synthetic oligonucleotide
caguugaguguccuggcac

SEQ ID NO: 2321949 - RNA, 19 nt, Artificial Sequence
  Description of Artificial Sequence: Synthetic oligonucleotide
guuccguccuucagcaugg

SEQ ID NO: 2321950 - RNA, 19 nt, Artificial Sequence
  Description of Artificial Sequence: Synthetic oligonucleotide
ggaguuuucaaguagucau

SEQ ID NO: 2321951 - RNA, 19 nt, Artificial Sequence
  Description of Artificial Sequence: Synthetic oligonucleotide
uuggcuuugucuguauuua

SEQ ID NO: 2321952 - RNA, 19 nt, Artificial Sequence
  Description of Artificial Sequence: Synthetic oligonucleotide
aacccugaaaagcggccaa

SEQ ID NO: 2321953 - RNA, 19 nt, Artificial Sequence
  Description of Artificial Sequence: Synthetic oligonucleotide
agaucaguugaguguccug

SEQ ID NO: 2321954 - RNA, 19 nt, Artificial Sequence
  Description of Artificial Sequence: Synthetic oligonucleotide
ucaaguagucauggcuuug

SEQ ID NO: 2321955 - RNA, 19 nt, Artificial Sequence
  Description of Artificial Sequence: Synthetic oligonucleotide
ucugugcuaagggauucca

SEQ ID NO: 2321956 - RNA, 19 nt, Artificial Sequence
  Description of Artificial Sequence: Synthetic oligonucleotide
caacuuuaauaugccacug

SEQ ID NO: 2321957 - RNA, 19 nt, Artificial Sequence
  Description of Artificial Sequence: Synthetic oligonucleotide
acacauauauauauauaua

SEQ ID NO: 2321958 - RNA, 19 nt, Artificial Sequence
  Description of Artificial Sequence: Synthetic oligonucleotide
cugagagggucuauccaug

SEQ ID NO: 2321959 - RNA, 19 nt, Artificial Sequence
  Description of Artificial Sequence: Synthetic oligonucleotide
gcaaaacccaacuuuaaua

SEQ ID NO: 2321960 - RNA, 19 nt, Artificial Sequence
  Description of Artificial Sequence: Synthetic oligonucleotide
gaaugaggagacgcaguug

SEQ ID NO: 2321961 - RNA, 19 nt, Artificial Sequence
  Description of Artificial Sequence: Synthetic oligonucleotide
caucuuaaccuuauauaua

SEQ ID NO: 2321962 - RNA, 19 nt, Artificial Sequence
  Description of Artificial Sequence: Synthetic oligonucleotide
aaaagcggccaaggcccac

SEQ ID NO: 2321963 - RNA, 19 nt, Artificial Sequence
  Description of Artificial Sequence: Synthetic oligonucleotide
gcugaucugggccucuccg

SEQ ID NO: 2321964 - RNA, 19 nt, Artificial Sequence
  Description of Artificial Sequence: Synthetic oligonucleotide
cacacacauauauauauau

SEQ ID NO: 2321965 - RNA, 19 nt, Artificial Sequence
  Description of Artificial Sequence: Synthetic oligonucleotide
cauagggccggaugaggug

SEQ ID NO: 2321966 - RNA, 19 nt, Artificial Sequence
  Description of Artificial Sequence: Synthetic oligonucleotide
acuuuagguaucugugcua

SEQ ID NO: 2321967 - RNA, 19 nt, Artificial Sequence
  Description of Artificial Sequence: Synthetic oligonucleotide
acccaacuuuaauaugcca

SEQ ID NO: 2321968 - RNA, 19 nt, Artificial Sequence
  Description of Artificial Sequence: Synthetic oligonucleotide
cuuuagguaucugugcuaa

SEQ ID NO: 2321969 - RNA, 19 nt, Artificial Sequence
  Description of Artificial Sequence: Synthetic oligonucleotide
acgcaguugccaaugaagu

SEQ ID NO: 2321970 - RNA, 19 nt, Artificial Sequence
  Description of Artificial Sequence: Synthetic oligonucleotide
gaaugcccacauagggccg

SEQ ID NO: 2321971 - RNA, 19 nt, Artificial Sequence
  Description of Artificial Sequence: Synthetic oligonucleotide
cacauagggccggaugagg

SEQ ID NO: 2321972 - RNA, 19 nt, Artificial Sequence
  Description of Artificial Sequence: Synthetic oligonucleotide
gggucuauccaugccaaag

SEQ ID NO: 2321973 - RNA, 19 nt, Artificial Sequence
  Description of Artificial Sequence: Synthetic oligonucleotide
cugccucccauggaggucc

SEQ ID NO: 2321974 - RNA, 19 nt, Artificial Sequence
  Description of Artificial Sequence: Synthetic oligonucleotide
gaggagacgcaguugccaa

SEQ ID NO: 2321975 - RNA, 19 nt, Artificial Sequence
  Description of Artificial Sequence: Synthetic oligonucleotide
agccucggcuaugagauca

SEQ ID NO: 2321976 - RNA, 19 nt, Artificial Sequence
  Description of Artificial Sequence: Synthetic oligonucleotide
uggucagccuggccaagga

SEQ ID NO: 2321977 - RNA, 19 nt, Artificial Sequence
  Description of Artificial Sequence: Synthetic oligonucleotide
caggugugaucaaaauuca

SEQ ID NO: 2321978 - RNA, 19 nt, Artificial Sequence
  Description of Artificial Sequence: Synthetic oligonucleotide
ugcccucacccacagcuuc

SEQ ID NO: 2321979 - RNA, 19 nt, Artificial Sequence
  Description of Artificial Sequence: Synthetic oligonucleotide
aggggaagccaugaagugu

SEQ ID NO: 2321980 - RNA, 19 nt, Artificial Sequence
  Description of Artificial Sequence: Synthetic oligonucleotide
ucaucccguggcugagagg

SEQ ID NO: 2321981 - RNA, 19 nt, Artificial Sequence
  Description of Artificial Sequence: Synthetic oligonucleotide
gaugaggugggugcugauc

SEQ ID NO: 2321982 - RNA, 19 nt, Artificial Sequence
  Description of Artificial Sequence: Synthetic oligonucleotide
ggggaagccaugaagugug

SEQ ID NO: 2321983 - RNA, 19 nt, Artificial Sequence
  Description of Artificial Sequence: Synthetic oligonucleotide
cugugcuaagggauuccac

SEQ ID NO: 2321984 - RNA, 19 nt, Artificial Sequence
  Description of Artificial Sequence: Synthetic oligonucleotide
gccaaugaaguggucagcc

SEQ ID NO: 2321985 - RNA, 19 nt, Artificial Sequence
  Description of Artificial Sequence: Synthetic oligonucleotide
agucggagccaaugcgcag

SEQ ID NO: 2321986 - RNA, 19 nt, Artificial Sequence
  Description of Artificial Sequence: Synthetic oligonucleotide
cauucagugcccucaccca

SEQ ID NO: 2321987 - RNA, 19 nt, Artificial Sequence
  Description of Artificial Sequence: Synthetic oligonucleotide
ccuuauauauauauauaua

SEQ ID NO: 2321988 - RNA, 19 nt, Artificial Sequence
  Description of Artificial Sequence: Synthetic oligonucleotide
acacacauauauauauaua

SEQ ID NO: 2321989 - RNA, 19 nt, Artificial Sequence
  Description of Artificial Sequence: Synthetic oligonucleotide
gccaaugcgcagaugaaug

SEQ ID NO: 2321990 - RNA, 19 nt, Artificial Sequence
  Description of Artificial Sequence: Synthetic oligonucleotide
uagauugaccuggcauuca

SEQ ID NO: 2321991 - RNA, 19 nt, Artificial Sequence
  Description of Artificial Sequence: Synthetic oligonucleotide
agcccgcuggauuucauua

SEQ ID NO: 2321992 - RNA, 19 nt, Artificial Sequence
  Description of Artificial Sequence: Synthetic oligonucleotide
gaagacugccucccaugga

SEQ ID NO: 2321993 - RNA, 19 nt, Artificial Sequence
  Description of Artificial Sequence: Synthetic oligonucleotide
ccaaugcgcagaugaaugc

SEQ ID NO: 2321994 - RNA, 19 nt, Artificial Sequence
  Description of Artificial Sequence: Synthetic oligonucleotide
uccguccuucagcauggca

SEQ ID NO: 2321995 - RNA, 19 nt, Artificial Sequence
  Description of Artificial Sequence: Synthetic oligonucleotide
uggcuuugucuguauuuau

SEQ ID NO: 2321996 - RNA, 19 nt, Artificial Sequence
  Description of Artificial Sequence: Synthetic oligonucleotide
ucacaaccuucaacccuga

SEQ ID NO: 2321997 - RNA, 19 nt, Artificial Sequence
  Description of Artificial Sequence: Synthetic oligonucleotide
ccagucggagccaaugcgc

SEQ ID NO: 2321998 - RNA, 19 nt, Artificial Sequence
  Description of Artificial Sequence: Synthetic oligonucleotide
caaaacuauagagaucagu

SEQ ID NO: 2321999 - RNA, 19 nt, Artificial Sequence
  Description of Artificial Sequence: Synthetic oligonucleotide
ccugaaaagcggccaaggc

SEQ ID NO: 2322000 - RNA, 19 nt, Artificial Sequence
  Description of Artificial Sequence: Synthetic oligonucleotide
cacuuuagguaucugugcu

SEQ ID NO: 2322001 - RNA, 19 nt, Artificial Sequence
  Description of Artificial Sequence: Synthetic oligonucleotide
ugcgcagaugaaugcccac

SEQ ID NO: 2322002 - RNA, 19 nt, Artificial Sequence
  Description of Artificial Sequence: Synthetic oligonucleotide
ugcuggaucucuggcacau

SEQ ID NO: 2322003 - RNA, 19 nt, Artificial Sequence
  Description of Artificial Sequence: Synthetic oligonucleotide
agacgcaguugccaaugaa

SEQ ID NO: 2322004 - RNA, 19 nt, Artificial Sequence
  Description of Artificial Sequence: Synthetic oligonucleotide
acuguccugucacaaccuu

SEQ ID NO: 2322005 - RNA, 19 nt, Artificial Sequence
  Description of Artificial Sequence: Synthetic oligonucleotide
aaggucagggaggcacaug

SEQ ID NO: 2322006 - RNA, 19 nt, Artificial Sequence
  Description of Artificial Sequence: Synthetic oligonucleotide
gcaguuccguccuucagca

SEQ ID NO: 2322007 - RNA, 19 nt, Artificial Sequence
  Description of Artificial Sequence: Synthetic oligonucleotide
acugaggggaagccaugaa

SEQ ID NO: 2322008 - RNA, 19 nt, Artificial Sequence
  Description of Artificial Sequence: Synthetic oligonucleotide
ggcuaugagaucaucuuaa

SEQ ID NO: 2322009 - RNA, 19 nt, Artificial Sequence
  Description of Artificial Sequence: Synthetic oligonucleotide
auguacaggucgaccuggg

SEQ ID NO: 2322010 - RNA, 19 nt, Artificial Sequence
  Description of Artificial Sequence: Synthetic oligonucleotide
agccaugaagugugacccu

SEQ ID NO: 2322011 - RNA, 19 nt, Artificial Sequence
  Description of Artificial Sequence: Synthetic oligonucleotide
agccaaugcgcagaugaau

SEQ ID NO: 2322012 - RNA, 19 nt, Artificial Sequence
  Description of Artificial Sequence: Synthetic oligonucleotide
cugcaguuccguccuucag

SEQ ID NO: 2322013 - RNA, 19 nt, Artificial Sequence
  Description of Artificial Sequence: Synthetic oligonucleotide
ucccauggaggucccgcuc

SEQ ID NO: 2322014 - RNA, 19 nt, Artificial Sequence
  Description of Artificial Sequence: Synthetic oligonucleotide
cagucggagccaaugcgca

SEQ ID NO: 2322015 - RNA, 19 nt, Artificial Sequence
  Description of Artificial Sequence: Synthetic oligonucleotide
ucucuggcacauagcucuc

SEQ ID NO: 2322016 - RNA, 19 nt, Artificial Sequence
  Description of Artificial Sequence: Synthetic oligonucleotide
gagacgcaguugccaauga

SEQ ID NO: 2322017 - RNA, 19 nt, Artificial Sequence
  Description of Artificial Sequence: Synthetic oligonucleotide
guggucagccuggccaagg

SEQ ID NO: 2322018 - RNA, 19 nt, Artificial Sequence
  Description of Artificial Sequence: Synthetic oligonucleotide
ucggagccaaugcgcagau

SEQ ID NO: 2322019 - RNA, 19 nt, Artificial Sequence
  Description of Artificial Sequence: Synthetic oligonucleotide
ggagacgcaguugccaaug

SEQ ID NO: 2322020 - RNA, 19 nt, Artificial Sequence
  Description of Artificial Sequence: Synthetic oligonucleotide
cucggcuaugagaucaucu

SEQ ID NO: 2322021 - RNA, 19 nt, Artificial Sequence
  Description of Artificial Sequence: Synthetic oligonucleotide
guugaguguccuggcacac

SEQ ID NO: 2322022 - RNA, 19 nt, Artificial Sequence
  Description of Artificial Sequence: Synthetic oligonucleotide
ugugacccugcaguuccgu

SEQ ID NO: 2322023 - RNA, 19 nt, Artificial Sequence
  Description of Artificial Sequence: Synthetic oligonucleotide
gagggucuauccaugccaa

SEQ ID NO: 2322024 - RNA, 19 nt, Artificial Sequence
  Description of Artificial Sequence: Synthetic oligonucleotide
ccgcuggauuucauuaagg

SEQ ID NO: 2322025 - RNA, 19 nt, Artificial Sequence
  Description of Artificial Sequence: Synthetic oligonucleotide
acccugaaaagcggccaag

SEQ ID NO: 2322026 - RNA, 19 nt, Artificial Sequence
  Description of Artificial Sequence: Synthetic oligonucleotide
gggaguuuucaaguaguca

SEQ ID NO: 2322027 - RNA, 19 nt, Artificial Sequence
  Description of Artificial Sequence: Synthetic oligonucleotide
ggucgcugugcuucggcug

SEQ ID NO: 2322028 - RNA, 19 nt, Artificial Sequence
  Description of Artificial Sequence: Synthetic oligonucleotide
gguaucugugcuaagggau

SEQ ID NO: 2322029 - RNA, 19 nt, Artificial Sequence
  Description of Artificial Sequence: Synthetic oligonucleotide
aggagacgcaguugccaau

SEQ ID NO: 2322030 - RNA, 19 nt, Artificial Sequence
  Description of Artificial Sequence: Synthetic oligonucleotide
ccaugaagugugacccugc

SEQ ID NO: 2322031 - RNA, 19 nt, Artificial Sequence
  Description of Artificial Sequence: Synthetic oligonucleotide
gucggagccaaugcgcaga

SEQ ID NO: 2322032 - RNA, 19 nt, Artificial Sequence
  Description of Artificial Sequence: Synthetic oligonucleotide
ggcauucuuccagucggag

SEQ ID NO: 2322033 - RNA, 19 nt, Artificial Sequence
  Description of Artificial Sequence: Synthetic oligonucleotide
guggcugagagggucuauc

SEQ ID NO: 2322034 - RNA, 19 nt, Artificial Sequence
  Description of Artificial Sequence: Synthetic oligonucleotide
gagaucaguugaguguccu

SEQ ID NO: 2322035 - RNA, 19 nt, Artificial Sequence
  Description of Artificial Sequence: Synthetic oligonucleotide
ucuuccagucggagccaau

SEQ ID NO: 2322036 - RNA, 19 nt, Artificial Sequence
  Description of Artificial Sequence: Synthetic oligonucleotide
aggugugaucaaaauucau

SEQ ID NO: 2322037 - RNA, 19 nt, Artificial Sequence
  Description of Artificial Sequence: Synthetic oligonucleotide
caacccugaaaagcggcca

SEQ ID NO: 2322038 - RNA, 19 nt, Artificial Sequence
  Description of Artificial Sequence: Synthetic oligonucleotide
gacugccucccauggaggu

SEQ ID NO: 2322039 - RNA, 19 nt, Artificial Sequence
  Description of Artificial Sequence: Synthetic oligonucleotide
augcgcagaugaaugccca

SEQ ID NO: 2322040 - RNA, 19 nt, Artificial Sequence
  Description of Artificial Sequence: Synthetic oligonucleotide
cauggaggucccgcucccg

SEQ ID NO: 2322041 - RNA, 19 nt, Artificial Sequence
  Description of Artificial Sequence: Synthetic oligonucleotide
aguugccaaugaagugguc

SEQ ID NO: 2322042 - RNA, 19 nt, Artificial Sequence
  Description of Artificial Sequence: Synthetic oligonucleotide
gaaaagcggccaaggccca

SEQ ID NO: 2322043 - RNA, 19 nt, Artificial Sequence
  Description of Artificial Sequence: Synthetic oligonucleotide
gcggccaaggcccaccuuc

SEQ ID NO: 2322044 - RNA, 19 nt, Artificial Sequence
  Description of Artificial Sequence: Synthetic oligonucleotide
gaccuggcauucagugccc

SEQ ID NO: 2322045 - RNA, 19 nt, Artificial Sequence
  Description of Artificial Sequence: Synthetic oligonucleotide
gaguguccuggcacacacc

SEQ ID NO: 2322046 - RNA, 19 nt, Artificial Sequence
  Description of Artificial Sequence: Synthetic oligonucleotide
ggcugagagggucuaucca

SEQ ID NO: 2322047 - RNA, 19 nt, Artificial Sequence
  Description of Artificial Sequence: Synthetic oligonucleotide
cccugaaaagcggccaagg

SEQ ID NO: 2322048 - RNA, 19 nt, Artificial Sequence
  Description of Artificial Sequence: Synthetic oligonucleotide
cccauggaggucccgcucc

SEQ ID NO: 2322049 - RNA, 19 nt, Artificial Sequence
  Description of Artificial Sequence: Synthetic oligonucleotide
ccaaggauguacaggucga

SEQ ID NO: 2322050 - RNA, 19 nt, Artificial Sequence
  Description of Artificial Sequence: Synthetic oligonucleotide
gauugaccuggcauucagu

SEQ ID NO: 2322051 - RNA, 19 nt, Artificial Sequence
  Description of Artificial Sequence: Synthetic oligonucleotide
agggucuauccaugccaaa

SEQ ID NO: 2322052 - RNA, 19 nt, Artificial Sequence
  Description of Artificial Sequence: Synthetic oligonucleotide
auucaucccguggcugaga

SEQ ID NO: 2322053 - RNA, 19 nt, Artificial Sequence
  Description of Artificial Sequence: Synthetic oligonucleotide
gcccacauagggccggaug

SEQ ID NO: 2322054 - RNA, 19 nt, Artificial Sequence
  Description of Artificial Sequence: Synthetic oligonucleotide
gccucuccggucuuuacaa

SEQ ID NO: 2322055 - RNA, 19 nt, Artificial Sequence
  Description of Artificial Sequence: Synthetic oligonucleotide
gugaaugaggagacgcagu

SEQ ID NO: 2322056 - RNA, 19 nt, Artificial Sequence
  Description of Artificial Sequence: Synthetic oligonucleotide
gccagccucggcuaugaga

SEQ ID NO: 2322057 - RNA, 19 nt, Artificial Sequence
  Description of Artificial Sequence: Synthetic oligonucleotide
gagccaaugcgcagaugaa

SEQ ID NO: 2322058 - RNA, 19 nt, Artificial Sequence
  Description of Artificial Sequence: Synthetic oligonucleotide
aggucacuuuagguaucug

SEQ ID NO: 2322059 - RNA, 19 nt, Artificial Sequence
  Description of Artificial Sequence: Synthetic oligonucleotide
ccagccucggcuaugagau

SEQ ID NO: 2322060 - RNA, 19 nt, Artificial Sequence
  Description of Artificial Sequence: Synthetic oligonucleotide
ccaugccaaagaaggaaga

SEQ ID NO: 2322061 - RNA, 19 nt, Artificial Sequence
  Description of Artificial Sequence: Synthetic oligonucleotide
ggggaguuuucaaguaguc

SEQ ID NO: 2322062 - RNA, 19 nt, Artificial Sequence
  Description of Artificial Sequence: Synthetic oligonucleotide
cacauagcucucagagucu

SEQ ID NO: 2322063 - RNA, 19 nt, Artificial Sequence
  Description of Artificial Sequence: Synthetic oligonucleotide
cagagucuguagcaaugua

SEQ ID NO: 2322064 - RNA, 19 nt, Artificial Sequence
  Description of Artificial Sequence: Synthetic oligonucleotide
ggccucuccggucuuuaca

SEQ ID NO: 2322065 - RNA, 19 nt, Artificial Sequence
  Description of Artificial Sequence: Synthetic oligonucleotide
accucagguuucaggcuca

SEQ ID NO: 2322066 - RNA, 19 nt, Artificial Sequence
  Description of Artificial Sequence: Synthetic oligonucleotide
gugugacccugcaguuccg

SEQ ID NO: 2322067 - RNA, 19 nt, Artificial Sequence
  Description of Artificial Sequence: Synthetic oligonucleotide
cuuugaagagcugcuggau

SEQ ID NO: 2322068 - RNA, 19 nt, Artificial Sequence
  Description of Artificial Sequence: Synthetic oligonucleotide
ugccucccauggagguccc

SEQ ID NO: 2322069 - RNA, 19 nt, Artificial Sequence
  Description of Artificial Sequence: Synthetic oligonucleotide
ggcuuugucuguauuuaua

SEQ ID NO: 2322070 - RNA, 19 nt, Artificial Sequence
  Description of Artificial Sequence: Synthetic oligonucleotide
ccggucuuuacaaccaucu

SEQ ID NO: 2322071 - RNA, 19 nt, Artificial Sequence
  Description of Artificial Sequence: Synthetic oligonucleotide
ggggucgcugugcuucggc

SEQ ID NO: 2322072 - RNA, 19 nt, Artificial Sequence
  Description of Artificial Sequence: Synthetic oligonucleotide
ucacagcccgcuggauuuc

SEQ ID NO: 2322073 - RNA, 19 nt, Artificial Sequence
  Description of Artificial Sequence: Synthetic oligonucleotide
ccucccauggaggucccgc

SEQ ID NO: 2322074 - RNA, 19 nt, Artificial Sequence
  Description of Artificial Sequence: Synthetic oligonucleotide
agggaggcacauggucaug

SEQ ID NO: 2322075 - RNA, 19 nt, Artificial Sequence
  Description of Artificial Sequence: Synthetic oligonucleotide
cacuguccugucacaaccu

SEQ ID NO: 2322076 - RNA, 19 nt, Artificial Sequence
  Description of Artificial Sequence: Synthetic oligonucleotide
gcuaagggauuccacugau

SEQ ID NO: 2322077 - RNA, 19 nt, Artificial Sequence
  Description of Artificial Sequence: Synthetic oligonucleotide
gcacauggucauggugagg

SEQ ID NO: 2322078 - RNA, 19 nt, Artificial Sequence
  Description of Artificial Sequence: Synthetic oligonucleotide
cuucacgaaggcagugaau

SEQ ID NO: 2322079 - RNA, 19 nt, Artificial Sequence
  Description of Artificial Sequence: Synthetic oligonucleotide
cuaagggauuccacugauu

SEQ ID NO: 2322080 - RNA, 19 nt, Artificial Sequence
  Description of Artificial Sequence: Synthetic oligonucleotide
cauagcucucagagucugu

SEQ ID NO: 2322081 - RNA, 19 nt, Artificial Sequence
  Description of Artificial Sequence: Synthetic oligonucleotide
ugggccucuccggucuuua

SEQ ID NO: 2322082 - RNA, 19 nt, Artificial Sequence
  Description of Artificial Sequence: Synthetic oligonucleotide
cauuaaggucagggaggca

SEQ ID NO: 2322083 - RNA, 19 nt, Artificial Sequence
  Description of Artificial Sequence: Synthetic oligonucleotide
cagggaggcacauggucau

SEQ ID NO: 2322084 - RNA, 19 nt, Artificial Sequence
  Description of Artificial Sequence: Synthetic oligonucleotide
gcuguagcccacacacuga

SEQ ID NO: 2322085 - RNA, 19 nt, Artificial Sequence
  Description of Artificial Sequence: Synthetic oligonucleotide
gcgcagaugaaugcccaca

SEQ ID NO: 2322086 - RNA, 19 nt, Artificial Sequence
  Description of Artificial Sequence: Synthetic oligonucleotide
gcuccaggugugaucaaaa

SEQ ID NO: 2322087 - RNA, 19 nt, Artificial Sequence
  Description of Artificial Sequence: Synthetic oligonucleotide
cgcucccgcuucacgaagg

SEQ ID NO: 2322088 - RNA, 19 nt, Artificial Sequence
  Description of Artificial Sequence: Synthetic oligonucleotide
cacaaccuucaacccugaa

SEQ ID NO: 2322089 - RNA, 19 nt, Artificial Sequence
  Description of Artificial Sequence: Synthetic oligonucleotide
cagccucggcuaugagauc

SEQ ID NO: 2322090 - RNA, 19 nt, Artificial Sequence
  Description of Artificial Sequence: Synthetic oligonucleotide
cucccauggaggucccgcu

SEQ ID NO: 2322091 - RNA, 19 nt, Artificial Sequence
  Description of Artificial Sequence: Synthetic oligonucleotide
gcccgcuggauuucauuaa

SEQ ID NO: 2322092 - RNA, 19 nt, Artificial Sequence
  Description of Artificial Sequence: Synthetic oligonucleotide
ggcuccaggugugaucaaa

SEQ ID NO: 2322093 - RNA, 19 nt, Artificial Sequence
  Description of Artificial Sequence: Synthetic oligonucleotide
cucccgcuucacgaaggca

SEQ ID NO: 2322094 - RNA, 19 nt, Artificial Sequence
  Description of Artificial Sequence: Synthetic oligonucleotide
ccaaugaaguggucagccu

SEQ ID NO: 2322095 - RNA, 19 nt, Artificial Sequence
  Description of Artificial Sequence: Synthetic oligonucleotide
ugcccacauagggccggau

SEQ ID NO: 2322096 - RNA, 19 nt, Artificial Sequence
  Description of Artificial Sequence: Synthetic oligonucleotide
agcggccaaggcccaccuu

SEQ ID NO: 2322097 - RNA, 19 nt, Artificial Sequence
  Description of Artificial Sequence: Synthetic oligonucleotide
ggcccaccuucuccuuggc

SEQ ID NO: 2322098 - RNA, 19 nt, Artificial Sequence
  Description of Artificial Sequence: Synthetic oligonucleotide
gccuggccaaggauguaca

SEQ ID NO: 2322099 - RNA, 19 nt, Artificial Sequence
  Description of Artificial Sequence: Synthetic oligonucleotide
acagcccgcuggauuucau

SEQ ID NO: 2322100 - RNA, 19 nt, Artificial Sequence
  Description of Artificial Sequence: Synthetic oligonucleotide
ccgcucccgcuucacgaag

SEQ ID NO: 2322101 - RNA, 19 nt, Artificial Sequence
  Description of Artificial Sequence: Synthetic oligonucleotide
aucccguggcugagagggu

SEQ ID NO: 2322102 - RNA, 19 nt, Artificial Sequence
  Description of Artificial Sequence: Synthetic oligonucleotide
ucgcugugcuucggcugua

SEQ ID NO: 2322103 - RNA, 19 nt, Artificial Sequence
  Description of Artificial Sequence: Synthetic oligonucleotide
ggccagccucggcuaugag

SEQ ID NO: 2322104 - RNA, 19 nt, Artificial Sequence
  Description of Artificial Sequence: Synthetic oligonucleotide
guguccuggcacacaccua

SEQ ID NO: 2322105 - RNA, 19 nt, Artificial Sequence
  Description of Artificial Sequence: Synthetic oligonucleotide
cccucacccacagcuucac

SEQ ID NO: 2322106 - RNA, 19 nt, Artificial Sequence
  Description of Artificial Sequence: Synthetic oligonucleotide
ccuggcacacaccuauaau

SEQ ID NO: 2322107 - RNA, 19 nt, Artificial Sequence
  Description of Artificial Sequence: Synthetic oligonucleotide
cggcuaugagaucaucuua

SEQ ID NO: 2322108 - RNA, 19 nt, Artificial Sequence
  Description of Artificial Sequence: Synthetic oligonucleotide
acccugcaguuccguccuu

SEQ ID NO: 2322109 - RNA, 19 nt, Artificial Sequence
  Description of Artificial Sequence: Synthetic oligonucleotide
cagcccgcuggauuucauu

SEQ ID NO: 2322110 - RNA, 19 nt, Artificial Sequence
  Description of Artificial Sequence: Synthetic oligonucleotide
ggucccgcucccgcuucac

SEQ ID NO: 2322111 - RNA, 19 nt, Artificial Sequence
  Description of Artificial Sequence: Synthetic oligonucleotide
ggaggucccgcucccgcuu

SEQ ID NO: 2322112 - RNA, 19 nt, Artificial Sequence
  Description of Artificial Sequence: Synthetic oligonucleotide
gccucccauggaggucccg

SEQ ID NO: 2322113 - RNA, 19 nt, Artificial Sequence
  Description of Artificial Sequence: Synthetic oligonucleotide
ccucacccacagcuucaca

SEQ ID NO: 2322114 - RNA, 19 nt, Artificial Sequence
  Description of Artificial Sequence: Synthetic oligonucleotide
cgcagaugaaugcccacau

SEQ ID NO: 2322115 - RNA, 19 nt, Artificial Sequence
  Description of Artificial Sequence: Synthetic oligonucleotide
caguuccguccuucagcau

SEQ ID NO: 2322116 - RNA, 19 nt, Artificial Sequence
  Description of Artificial Sequence: Synthetic oligonucleotide
gugcccucacccacagcuu

SEQ ID NO: 2322117 - RNA, 19 nt, Artificial Sequence
  Description of Artificial Sequence: Synthetic oligonucleotide
cccguggcugagagggucu

SEQ ID NO: 2322118 - RNA, 19 nt, Artificial Sequence
  Description of Artificial Sequence: Synthetic oligonucleotide
cagccuggccaaggaugua

SEQ ID NO: 2322119 - RNA, 19 nt, Artificial Sequence
  Description of Artificial Sequence: Synthetic oligonucleotide
cggagccaaugcgcagaug

SEQ ID NO: 2322120 - RNA, 19 nt, Artificial Sequence
  Description of Artificial Sequence: Synthetic oligonucleotide
cggccaaggcccaccuucu

SEQ ID NO: 2322121 - RNA, 19 nt, Artificial Sequence
  Description of Artificial Sequence: Synthetic oligonucleotide
cugggccucuccggucuuu

SEQ ID NO: 2322122 - RNA, 19 nt, Artificial Sequence
  Description of Artificial Sequence: Synthetic oligonucleotide
ccguggcugagagggucua

SEQ ID NO: 2322123 - RNA, 19 nt, Artificial Sequence
  Description of Artificial Sequence: Synthetic oligonucleotide
auuguuaucucgcaaauac

SEQ ID NO: 2322124 - RNA, 19 nt, Artificial Sequence
  Description of Artificial Sequence: Synthetic oligonucleotide
aaugugauuguucccaccc

SEQ ID NO: 2322125 - RNA, 19 nt, Artificial Sequence
  Description of Artificial Sequence: Synthetic oligonucleotide
uuauaaauccagaacaucc

SEQ ID NO: 2322126 - RNA, 19 nt, Artificial Sequence
  Description of Artificial Sequence: Synthetic oligonucleotide
uauaguucaguucacaggc

SEQ ID NO: 2322127 - RNA, 19 nt, Artificial Sequence
  Description of Artificial Sequence: Synthetic oligonucleotide
uuuguguuaagaaugaaga

SEQ ID NO: 2322128 - RNA, 19 nt, Artificial Sequence
  Description of Artificial Sequence: Synthetic oligonucleotide
augaauauguuucagaagu

SEQ ID NO: 2322129 - RNA, 19 nt, Artificial Sequence
  Description of Artificial Sequence: Synthetic oligonucleotide
agaguugugguccagcugc

SEQ ID NO: 2322130 - RNA, 19 nt, Artificial Sequence
  Description of Artificial Sequence: Synthetic oligonucleotide
uguuaucucgcaaauacag

SEQ ID NO: 2322131 - RNA, 19 nt, Artificial Sequence
  Description of Artificial Sequence: Synthetic oligonucleotide
cacacaaugauauggaagg

SEQ ID NO: 2322132 - RNA, 19 nt, Artificial Sequence
  Description of Artificial Sequence: Synthetic oligonucleotide
uuuacaaauuacaaaggug

SEQ ID NO: 2322133 - RNA, 19 nt, Artificial Sequence
  Description of Artificial Sequence: Synthetic oligonucleotide
agugacaagaaguucugcc

SEQ ID NO: 2322134 - RNA, 19 nt, Artificial Sequence
  Description of Artificial Sequence: Synthetic oligonucleotide
auaaauauuaaccuguuuu

SEQ ID NO: 2322135 - RNA, 19 nt, Artificial Sequence
  Description of Artificial Sequence: Synthetic oligonucleotide
ucuacacacaaugauaugg

SEQ ID NO: 2322136 - RNA, 19 nt, Artificial Sequence
  Description of Artificial Sequence: Synthetic oligonucleotide
aauugauguuacuggaaac

SEQ ID NO: 2322137 - RNA, 19 nt, Artificial Sequence
  Description of Artificial Sequence: Synthetic oligonucleotide
guuaagaaugaagagaagg

SEQ ID NO: 2322138 - RNA, 19 nt, Artificial Sequence
  Description of Artificial Sequence: Synthetic oligonucleotide
uuaagaaugaagagaagga

SEQ ID NO: 2322139 - RNA, 19 nt, Artificial Sequence
  Description of Artificial Sequence: Synthetic oligonucleotide
aaccccugacucuauaucc

SEQ ID NO: 2322140 - RNA, 19 nt, Artificial Sequence
  Description of Artificial Sequence: Synthetic oligonucleotide
auauuaaccuguuuucuac

SEQ ID NO: 2322141 - RNA, 19 nt, Artificial Sequence
  Description of Artificial Sequence: Synthetic oligonucleotide
gaguaauugauguuacugg

SEQ ID NO: 2322142 - RNA, 19 nt, Artificial Sequence
  Description of Artificial Sequence: Synthetic oligonucleotide
ugagauauuguuaucucgc

SEQ ID NO: 2322143 - RNA, 19 nt, Artificial Sequence
  Description of Artificial Sequence: Synthetic oligonucleotide
uuauaguucaguucacagg

SEQ ID NO: 2322144 - RNA, 19 nt, Artificial Sequence
  Description of Artificial Sequence: Synthetic oligonucleotide
uaugauuuacaaauuacaa

SEQ ID NO: 2322145 - RNA, 19 nt, Artificial Sequence
  Description of Artificial Sequence: Synthetic oligonucleotide
auugauguuacuggaaacc

SEQ ID NO: 2322146 - RNA, 19 nt, Artificial Sequence
  Description of Artificial Sequence: Synthetic oligonucleotide
uuacuggaaaccaaagucc

SEQ ID NO: 2322147 - RNA, 19 nt, Artificial Sequence
  Description of Artificial Sequence: Synthetic oligonucleotide
gacucuauauccuaaagca

SEQ ID NO: 2322148 - RNA, 19 nt, Artificial Sequence
  Description of Artificial Sequence: Synthetic oligonucleotide
uuaugaauauguuucagaa

SEQ ID NO: 2322149 - RNA, 19 nt, Artificial Sequence
  Description of Artificial Sequence: Synthetic oligonucleotide
aaagaccuggccuagaaaa

SEQ ID NO: 2322150 - RNA, 19 nt, Artificial Sequence
  Description of Artificial Sequence: Synthetic oligonucleotide
guuguuugaaauucuagcc

SEQ ID NO: 2322151 - RNA, 19 nt, Artificial Sequence
  Description of Artificial Sequence: Synthetic oligonucleotide
ugauauggaaggcaguaag

SEQ ID NO: 2322152 - RNA, 19 nt, Artificial Sequence
  Description of Artificial Sequence: Synthetic oligonucleotide
uuguuugaaauucuagccc

SEQ ID NO: 2322153 - RNA, 19 nt, Artificial Sequence
  Description of Artificial Sequence: Synthetic oligonucleotide
uccaacgucuccaacagag

SEQ ID NO: 2322154 - RNA, 19 nt, Artificial Sequence
  Description of Artificial Sequence: Synthetic oligonucleotide
aauucuagcccagauuaac

SEQ ID NO: 2322155 - RNA, 19 nt, Artificial Sequence
  Description of Artificial Sequence: Synthetic oligonucleotide
uuuaugaauauguuucaga

SEQ ID NO: 2322156 - RNA, 19 nt, Artificial Sequence
  Description of Artificial Sequence: Synthetic oligonucleotide
acauccugaaggcaaaugg

SEQ ID NO: 2322157 - RNA, 19 nt, Artificial Sequence
  Description of Artificial Sequence: Synthetic oligonucleotide
uuucuacacacaaugauau

SEQ ID NO: 2322158 - RNA, 19 nt, Artificial Sequence
  Description of Artificial Sequence: Synthetic oligonucleotide
uguuugaaauucuagccca

SEQ ID NO: 2322159 - RNA, 19 nt, Artificial Sequence
  Description of Artificial Sequence: Synthetic oligonucleotide
ugacucuauauccuaaagc

SEQ ID NO: 2322160 - RNA, 19 nt, Artificial Sequence
  Description of Artificial Sequence: Synthetic oligonucleotide
aagcauuucuaugauuuac

SEQ ID NO: 2322161 - RNA, 19 nt, Artificial Sequence
  Description of Artificial Sequence: Synthetic oligonucleotide
auuaaccuguuuucuacac

SEQ ID NO: 2322162 - RNA, 19 nt, Artificial Sequence
  Description of Artificial Sequence: Synthetic oligonucleotide
uguaaugugauuguuccca

SEQ ID NO: 2322163 - RNA, 19 nt, Artificial Sequence
  Description of Artificial Sequence: Synthetic oligonucleotide
uaugaauauguuucagaag

SEQ ID NO: 2322164 - RNA, 19 nt, Artificial Sequence
  Description of Artificial Sequence: Synthetic oligonucleotide
aaaguccacaugugguccc

SEQ ID NO: 2322165 - RNA, 19 nt, Artificial Sequence
  Description of Artificial Sequence: Synthetic oligonucleotide
uccuaaagcauucugucac

SEQ ID NO: 2322166 - RNA, 19 nt, Artificial Sequence
  Description of Artificial Sequence: Synthetic oligonucleotide
uguuguugaagagagcuag

SEQ ID NO: 2322167 - RNA, 19 nt, Artificial Sequence
  Description of Artificial Sequence: Synthetic oligonucleotide
caaaggcucagcuacagag

SEQ ID NO: 2322168 - RNA, 19 nt, Artificial Sequence
  Description of Artificial Sequence: Synthetic oligonucleotide
uucugucacagauaaaaug

SEQ ID NO: 2322169 - RNA, 19 nt, Artificial Sequence
  Description of Artificial Sequence: Synthetic oligonucleotide
aaggauagguauuggguug

SEQ ID NO: 2322170 - RNA, 19 nt, Artificial Sequence
  Description of Artificial Sequence: Synthetic oligonucleotide
guuguuuguguuaagaaug

SEQ ID NO: 2322171 - RNA, 19 nt, Artificial Sequence
  Description of Artificial Sequence: Synthetic oligonucleotide
uaauugauguuacuggaaa

SEQ ID NO: 2322172 - RNA, 19 nt, Artificial Sequence
  Description of Artificial Sequence: Synthetic oligonucleotide
ucagcuacagaguaauuga

SEQ ID NO: 2322173 - RNA, 19 nt, Artificial Sequence
  Description of Artificial Sequence: Synthetic oligonucleotide
uauauccuaaagcauucug

SEQ ID NO: 2322174 - RNA, 19 nt, Artificial Sequence
  Description of Artificial Sequence: Synthetic oligonucleotide
auagguauuggguuggcug

SEQ ID NO: 2322175 - RNA, 19 nt, Artificial Sequence
  Description of Artificial Sequence: Synthetic oligonucleotide
aauggagcugucuuuuaug

SEQ ID NO: 2322176 - RNA, 19 nt, Artificial Sequence
  Description of Artificial Sequence: Synthetic oligonucleotide
ugucacagauaaaauggag

SEQ ID NO: 2322177 - RNA, 19 nt, Artificial Sequence
  Description of Artificial Sequence: Synthetic oligonucleotide
aguaauugauguuacugga

SEQ ID NO: 2322178 - RNA, 19 nt, Artificial Sequence
  Description of Artificial Sequence: Synthetic oligonucleotide
accaaggcaaggcagcagc

SEQ ID NO: 2322179 - RNA, 19 nt, Artificial Sequence
  Description of Artificial Sequence: Synthetic oligonucleotide
aacugcaaggagguguugc

SEQ ID NO: 2322180 - RNA, 19 nt, Artificial Sequence
  Description of Artificial Sequence: Synthetic oligonucleotide
ucuuauaaauccagaacau

SEQ ID NO: 2322181 - RNA, 19 nt, Artificial Sequence
  Description of Artificial Sequence: Synthetic oligonucleotide
gauauuguuaucucgcaaa

SEQ ID NO: 2322182 - RNA, 19 nt, Artificial Sequence
  Description of Artificial Sequence: Synthetic oligonucleotide
agaguaauugauguuacug

SEQ ID NO: 2322183 - RNA, 19 nt, Artificial Sequence
  Description of Artificial Sequence: Synthetic oligonucleotide
cugagauauuguuaucucg

SEQ ID NO: 2322184 - RNA, 19 nt, Artificial Sequence
  Description of Artificial Sequence: Synthetic oligonucleotide
aagagagcuagcuucugca

SEQ ID NO: 2322185 - RNA, 19 nt, Artificial Sequence
  Description of Artificial Sequence: Synthetic oligonucleotide
uguuacuggaaaccaaagu

SEQ ID NO: 2322186 - RNA, 19 nt, Artificial Sequence
  Description of Artificial Sequence: Synthetic oligonucleotide
acagauaaaauggagcugu

SEQ ID NO: 2322187 - RNA, 19 nt, Artificial Sequence
  Description of Artificial Sequence: Synthetic oligonucleotide
ucuauauccuaaagcauuc

SEQ ID NO: 2322188 - RNA, 19 nt, Artificial Sequence
  Description of Artificial Sequence: Synthetic oligonucleotide
uggggugagguccuguugg

SEQ ID NO: 2322189 - RNA, 19 nt, Artificial Sequence
  Description of Artificial Sequence: Synthetic oligonucleotide
aagagaaggauagguauug

SEQ ID NO: 2322190 - RNA, 19 nt, Artificial Sequence
  Description of Artificial Sequence: Synthetic oligonucleotide
uguuguuuguguuaagaau

SEQ ID NO: 2322191 - RNA, 19 nt, Artificial Sequence
  Description of Artificial Sequence: Synthetic oligonucleotide
ugacaagaaguucugccug

SEQ ID NO: 2322192 - RNA, 19 nt, Artificial Sequence
  Description of Artificial Sequence: Synthetic oligonucleotide
uucuaugauuuacaaauua

SEQ ID NO: 2322193 - RNA, 19 nt, Artificial Sequence
  Description of Artificial Sequence: Synthetic oligonucleotide
gguuguuugaaauucuagc

SEQ ID NO: 2322194 - RNA, 19 nt, Artificial Sequence
  Description of Artificial Sequence: Synthetic oligonucleotide
uucacaggcagcaacucga

SEQ ID NO: 2322195 - RNA, 19 nt, Artificial Sequence
  Description of Artificial Sequence: Synthetic oligonucleotide
guuuguguuaagaaugaag

SEQ ID NO: 2322196 - RNA, 19 nt, Artificial Sequence
  Description of Artificial Sequence: Synthetic oligonucleotide
uacagagcugugcagacac

SEQ ID NO: 2322197 - RNA, 19 nt, Artificial Sequence
  Description of Artificial Sequence: Synthetic oligonucleotide
aaugauauggaaggcagua

SEQ ID NO: 2322198 - RNA, 19 nt, Artificial Sequence
  Description of Artificial Sequence: Synthetic oligonucleotide
uacaaauuacaaaggugac

SEQ ID NO: 2322199 - RNA, 19 nt, Artificial Sequence
  Description of Artificial Sequence: Synthetic oligonucleotide
aucucgcaaauacagagcu

SEQ ID NO: 2322200 - RNA, 19 nt, Artificial Sequence
  Description of Artificial Sequence: Synthetic oligonucleotide
uacaaaggugacauuuuga

SEQ ID NO: 2322201 - RNA, 19 nt, Artificial Sequence
  Description of Artificial Sequence: Synthetic oligonucleotide
acucaaucagugugcagac

SEQ ID NO: 2322202 - RNA, 19 nt, Artificial Sequence
  Description of Artificial Sequence: Synthetic oligonucleotide
agcauucugucacagauaa

SEQ ID NO: 2322203 - RNA, 19 nt, Artificial Sequence
  Description of Artificial Sequence: Synthetic oligonucleotide
uaucucgcaaauacagagc

SEQ ID NO: 2322204 - RNA, 19 nt, Artificial Sequence
  Description of Artificial Sequence: Synthetic oligonucleotide
acaaugauauggaaggcag

SEQ ID NO: 2322205 - RNA, 19 nt, Artificial Sequence
  Description of Artificial Sequence: Synthetic oligonucleotide
aguccguuguuauaguuca

SEQ ID NO: 2322206 - RNA, 19 nt, Artificial Sequence
  Description of Artificial Sequence: Synthetic oligonucleotide
aaguccguuguuauaguuc

SEQ ID NO: 2322207 - RNA, 19 nt, Artificial Sequence
  Description of Artificial Sequence: Synthetic oligonucleotide
gcuguaaugugauuguucc

SEQ ID NO: 2322208 - RNA, 19 nt, Artificial Sequence
  Description of Artificial Sequence: Synthetic oligonucleotide
uacagaguaauugauguua

SEQ ID NO: 2322209 - RNA, 19 nt, Artificial Sequence
  Description of Artificial Sequence: Synthetic oligonucleotide
uuaaccuguuuucuacaca

SEQ ID NO: 2322210 - RNA, 19 nt, Artificial Sequence
  Description of Artificial Sequence: Synthetic oligonucleotide
uguggucccagcuggagug

SEQ ID NO: 2322211 - RNA, 19 nt, Artificial Sequence
  Description of Artificial Sequence: Synthetic oligonucleotide
aaauggagcugucuuuuau

SEQ ID NO: 2322212 - RNA, 19 nt, Artificial Sequence
  Description of Artificial Sequence: Synthetic oligonucleotide
aaucagugugcagacaccu

SEQ ID NO: 2322213 - RNA, 19 nt, Artificial Sequence
  Description of Artificial Sequence: Synthetic oligonucleotide
gauauggaaggcaguaagc

SEQ ID NO: 2322214 - RNA, 19 nt, Artificial Sequence
  Description of Artificial Sequence: Synthetic oligonucleotide
uauuggguuggcugucugg

SEQ ID NO: 2322215 - RNA, 19 nt, Artificial Sequence
  Description of Artificial Sequence: Synthetic oligonucleotide
acuccaacgucuccaacag

SEQ ID NO: 2322216 - RNA, 19 nt, Artificial Sequence
  Description of Artificial Sequence: Synthetic oligonucleotide
agcagcuguaaugugauug

SEQ ID NO: 2322217 - RNA, 19 nt, Artificial Sequence
  Description of Artificial Sequence: Synthetic oligonucleotide
aagaaugaagagaaggaua

SEQ ID NO: 2322218 - RNA, 19 nt, Artificial Sequence
  Description of Artificial Sequence: Synthetic oligonucleotide
uuguuaucucgcaaauaca

SEQ ID NO: 2322219 - RNA, 19 nt, Artificial Sequence
  Description of Artificial Sequence: Synthetic oligonucleotide
ucugagauauuguuaucuc

SEQ ID NO: 2322220 - RNA, 19 nt, Artificial Sequence
  Description of Artificial Sequence: Synthetic oligonucleotide
uggaguguggucauguuuu

SEQ ID NO: 2322221 - RNA, 19 nt, Artificial Sequence
  Description of Artificial Sequence: Synthetic oligonucleotide
cagaaguccguuguuauag

SEQ ID NO: 2322222 - RNA, 19 nt, Artificial Sequence
  Description of Artificial Sequence: Synthetic oligonucleotide
cauggaguaggcacagccg

SEQ ID NO: 2322223 - RNA, 19 nt, Artificial Sequence
  Description of Artificial Sequence: Synthetic oligonucleotide
uugaaauucuagcccagau

SEQ ID NO: 2322224 - RNA, 19 nt, Artificial Sequence
  Description of Artificial Sequence: Synthetic oligonucleotide
gucuccaacagaguugugg

SEQ ID NO: 2322225 - RNA, 19 nt, Artificial Sequence
  Description of Artificial Sequence: Synthetic oligonucleotide
ucuagcccagauuaacucu

SEQ ID NO: 2322226 - RNA, 19 nt, Artificial Sequence
  Description of Artificial Sequence: Synthetic oligonucleotide
auauggaaggcaguaagca

SEQ ID NO: 2322227 - RNA, 19 nt, Artificial Sequence
  Description of Artificial Sequence: Synthetic oligonucleotide
gaagagagcuagcuucugc

SEQ ID NO: 2322228 - RNA, 19 nt, Artificial Sequence
  Description of Artificial Sequence: Synthetic oligonucleotide
uugauguuacuggaaacca

SEQ ID NO: 2322229 - RNA, 19 nt, Artificial Sequence
  Description of Artificial Sequence: Synthetic oligonucleotide
agcuguuccacuccaacgu

SEQ ID NO: 2322230 - RNA, 19 nt, Artificial Sequence
  Description of Artificial Sequence: Synthetic oligonucleotide
ucugccugugugcaaggag

SEQ ID NO: 2322231 - RNA, 19 nt, Artificial Sequence
  Description of Artificial Sequence: Synthetic oligonucleotide
uggagagcauacucaauca

SEQ ID NO: 2322232 - RNA, 19 nt, Artificial Sequence
  Description of Artificial Sequence: Synthetic oligonucleotide
cucggugcccuuaucaccc

SEQ ID NO: 2322233 - RNA, 19 nt, Artificial Sequence
  Description of Artificial Sequence: Synthetic oligonucleotide
agagcauacucaaucagug

SEQ ID NO: 2322234 - RNA, 19 nt, Artificial Sequence
  Description of Artificial Sequence: Synthetic oligonucleotide
acagaguaauugauguuac

SEQ ID NO: 2322235 - RNA, 19 nt, Artificial Sequence
  Description of Artificial Sequence: Synthetic oligonucleotide
gauaaaauggagcugucuu

SEQ ID NO: 2322236 - RNA, 19 nt, Artificial Sequence
  Description of Artificial Sequence: Synthetic oligonucleotide
uagguauuggguuggcugu

SEQ ID NO: 2322237 - RNA, 19 nt, Artificial Sequence
  Description of Artificial Sequence: Synthetic oligonucleotide
guggagagcauacucaauc

SEQ ID NO: 2322238 - RNA, 19 nt, Artificial Sequence
  Description of Artificial Sequence: Synthetic oligonucleotide
ugauuguucccacccucag

SEQ ID NO: 2322239 - RNA, 19 nt, Artificial Sequence
  Description of Artificial Sequence: Synthetic oligonucleotide
acaaauuacaaaggugaca

SEQ ID NO: 2322240 - RNA, 19 nt, Artificial Sequence
  Description of Artificial Sequence: Synthetic oligonucleotide
ugcaaggagguguugcucu

SEQ ID NO: 2322241 - RNA, 19 nt, Artificial Sequence
  Description of Artificial Sequence: Synthetic oligonucleotide
aaggcucagcuacagagua

SEQ ID NO: 2322242 - RNA, 19 nt, Artificial Sequence
  Description of Artificial Sequence: Synthetic oligonucleotide
auauuguuaucucgcaaau

SEQ ID NO: 2322243 - RNA, 19 nt, Artificial Sequence
  Description of Artificial Sequence: Synthetic oligonucleotide
uucuagcccagauuaacuc

SEQ ID NO: 2322244 - RNA, 19 nt, Artificial Sequence
  Description of Artificial Sequence: Synthetic oligonucleotide
aaaagaccuggccuagaaa

SEQ ID NO: 2322245 - RNA, 19 nt, Artificial Sequence
  Description of Artificial Sequence: Synthetic oligonucleotide
auauccuaaagcauucugu

SEQ ID NO: 2322246 - RNA, 19 nt, Artificial Sequence
  Description of Artificial Sequence: Synthetic oligonucleotide
ucgaucugagauauuguua

SEQ ID NO: 2322247 - RNA, 19 nt, Artificial Sequence
  Description of Artificial Sequence: Synthetic oligonucleotide
ugauguuacuggaaaccaa

SEQ ID NO: 2322248 - RNA, 19 nt, Artificial Sequence
  Description of Artificial Sequence: Synthetic oligonucleotide
ugucuuuuaugaauauguu

SEQ ID NO: 2322249 - RNA, 19 nt, Artificial Sequence
  Description of Artificial Sequence: Synthetic oligonucleotide
accucgaucugagauauug

SEQ ID NO: 2322250 - RNA, 19 nt, Artificial Sequence
  Description of Artificial Sequence: Synthetic oligonucleotide
gcaguaagcauuucuauga

SEQ ID NO: 2322251 - RNA, 19 nt, Artificial Sequence
  Description of Artificial Sequence: Synthetic oligonucleotide
gagauauuguuaucucgca

SEQ ID NO: 2322252 - RNA, 19 nt, Artificial Sequence
  Description of Artificial Sequence: Synthetic oligonucleotide
agacaccucgaucugagau

SEQ ID NO: 2322253 - RNA, 19 nt, Artificial Sequence
  Description of Artificial Sequence: Synthetic oligonucleotide
gauguuacuggaaaccaaa

SEQ ID NO: 2322254 - RNA, 19 nt, Artificial Sequence
  Description of Artificial Sequence: Synthetic oligonucleotide
aacauccugaaggcaaaug

SEQ ID NO: 2322255 - RNA, 19 nt, Artificial Sequence
  Description of Artificial Sequence: Synthetic oligonucleotide
gagcugugcagacaccaag

SEQ ID NO: 2322256 - RNA, 19 nt, Artificial Sequence
  Description of Artificial Sequence: Synthetic oligonucleotide
agcuguaaugugauuguuc

SEQ ID NO: 2322257 - RNA, 19 nt, Artificial Sequence
  Description of Artificial Sequence: Synthetic oligonucleotide
acacaaaagaccuggccua

SEQ ID NO: 2322258 - RNA, 19 nt, Artificial Sequence
  Description of Artificial Sequence: Synthetic oligonucleotide
auccuaaagcauucuguca

SEQ ID NO: 2322259 - RNA, 19 nt, Artificial Sequence
  Description of Artificial Sequence: Synthetic oligonucleotide
uucuacacacaaugauaug

SEQ ID NO: 2322260 - RNA, 19 nt, Artificial Sequence
  Description of Artificial Sequence: Synthetic oligonucleotide
cagcuguuccacuccaacg

SEQ ID NO: 2322261 - RNA, 19 nt, Artificial Sequence
  Description of Artificial Sequence: Synthetic oligonucleotide
aguucugccugugugcaag

SEQ ID NO: 2322262 - RNA, 19 nt, Artificial Sequence
  Description of Artificial Sequence: Synthetic oligonucleotide
cuacacacaaugauaugga

SEQ ID NO: 2322263 - RNA, 19 nt, Artificial Sequence
  Description of Artificial Sequence: Synthetic oligonucleotide
gaugcccaaccccugacuc

SEQ ID NO: 2322264 - RNA, 19 nt, Artificial Sequence
  Description of Artificial Sequence: Synthetic oligonucleotide
gcaaauacagagcugugca

SEQ ID NO: 2322265 - RNA, 19 nt, Artificial Sequence
  Description of Artificial Sequence: Synthetic oligonucleotide
caaauuacaaaggugacau

SEQ ID NO: 2322266 - RNA, 19 nt, Artificial Sequence
  Description of Artificial Sequence: Synthetic oligonucleotide
aggauagguauuggguugg

SEQ ID NO: 2322267 - RNA, 19 nt, Artificial Sequence
  Description of Artificial Sequence: Synthetic oligonucleotide
acacucguugccccagaac

SEQ ID NO: 2322268 - RNA, 19 nt, Artificial Sequence
  Description of Artificial Sequence: Synthetic oligonucleotide
cacaguggagagcauacuc

SEQ ID NO: 2322269 - RNA, 19 nt, Artificial Sequence
  Description of Artificial Sequence: Synthetic oligonucleotide
ggagguguugcucuugagc

SEQ ID NO: 2322270 - RNA, 19 nt, Artificial Sequence
  Description of Artificial Sequence: Synthetic oligonucleotide
ggcaguaagcauuucuaug

SEQ ID NO: 2322271 - RNA, 19 nt, Artificial Sequence
  Description of Artificial Sequence: Synthetic oligonucleotide
cuguaaugugauuguuccc

SEQ ID NO: 2322272 - RNA, 19 nt, Artificial Sequence
  Description of Artificial Sequence: Synthetic oligonucleotide
uccguuguuauaguucagu

SEQ ID NO: 2322273 - RNA, 19 nt, Artificial Sequence
  Description of Artificial Sequence: Synthetic oligonucleotide
caaucagugugcagacacc

SEQ ID NO: 2322274 - RNA, 19 nt, Artificial Sequence
  Description of Artificial Sequence: Synthetic oligonucleotide
aaaauggagcugucuuuua

SEQ ID NO: 2322275 - RNA, 19 nt, Artificial Sequence
  Description of Artificial Sequence: Synthetic oligonucleotide
auguuucagaaguccguug

SEQ ID NO: 2322276 - RNA, 19 nt, Artificial Sequence
  Description of Artificial Sequence: Synthetic oligonucleotide
aaaggcucagcuacagagu

SEQ ID NO: 2322277 - RNA, 19 nt, Artificial Sequence
  Description of Artificial Sequence: Synthetic oligonucleotide
aaggcaguaagcauuucua

SEQ ID NO: 2322278 - RNA, 19 nt, Artificial Sequence
  Description of Artificial Sequence: Synthetic oligonucleotide
ucucgcaaauacagagcug

SEQ ID NO: 2322279 - RNA, 19 nt, Artificial Sequence
  Description of Artificial Sequence: Synthetic oligonucleotide
acugcaaggagguguugcu

SEQ ID NO: 2322280 - RNA, 19 nt, Artificial Sequence
  Description of Artificial Sequence: Synthetic oligonucleotide
auauguuucagaaguccgu

SEQ ID NO: 2322281 - RNA, 19 nt, Artificial Sequence
  Description of Artificial Sequence: Synthetic oligonucleotide
uaagcauuucuaugauuua

SEQ ID NO: 2322282 - RNA, 19 nt, Artificial Sequence
  Description of Artificial Sequence: Synthetic oligonucleotide
guaaugugauuguucccac

SEQ ID NO: 2322283 - RNA, 19 nt, Artificial Sequence
  Description of Artificial Sequence: Synthetic oligonucleotide
caacucgaggccugguggg

SEQ ID NO: 2322284 - RNA, 19 nt, Artificial Sequence
  Description of Artificial Sequence: Synthetic oligonucleotide
gcaacucgaggccuggugg

SEQ ID NO: 2322285 - RNA, 19 nt, Artificial Sequence
  Description of Artificial Sequence: Synthetic oligonucleotide
guaagcauuucuaugauuu

SEQ ID NO: 2322286 - RNA, 19 nt, Artificial Sequence
  Description of Artificial Sequence: Synthetic oligonucleotide
cugugugcaaggagcuugg

SEQ ID NO: 2322287 - RNA, 19 nt, Artificial Sequence
  Description of Artificial Sequence: Synthetic oligonucleotide
ugggguuguuugaaauucu

SEQ ID NO: 2322288 - RNA, 19 nt, Artificial Sequence
  Description of Artificial Sequence: Synthetic oligonucleotide
accaaaguccacauguggu

SEQ ID NO: 2322289 - RNA, 19 nt, Artificial Sequence
  Description of Artificial Sequence: Synthetic oligonucleotide
gauuccaaaggcucagcua

SEQ ID NO: 2322290 - RNA, 19 nt, Artificial Sequence
  Description of Artificial Sequence: Synthetic oligonucleotide
acagccgucugugagcuug

SEQ ID NO: 2322291 - RNA, 19 nt, Artificial Sequence
  Description of Artificial Sequence: Synthetic oligonucleotide
aguaagcauuucuaugauu

SEQ ID NO: 2322292 - RNA, 19 nt, Artificial Sequence
  Description of Artificial Sequence: Synthetic oligonucleotide
agcaacucgaggccuggug

SEQ ID NO: 2322293 - RNA, 19 nt, Artificial Sequence
  Description of Artificial Sequence: Synthetic oligonucleotide
agcuacagaguaauugaug

SEQ ID NO: 2322294 - RNA, 19 nt, Artificial Sequence
  Description of Artificial Sequence: Synthetic oligonucleotide
uggccauggaguaggcaca

SEQ ID NO: 2322295 - RNA, 19 nt, Artificial Sequence
  Description of Artificial Sequence: Synthetic oligonucleotide
cacuccaacgucuccaaca

SEQ ID NO: 2322296 - RNA, 19 nt, Artificial Sequence
  Description of Artificial Sequence: Synthetic oligonucleotide
aacucgaggccuggugggg

SEQ ID NO: 2322297 - RNA, 19 nt, Artificial Sequence
  Description of Artificial Sequence: Synthetic oligonucleotide
guucaguucacaggcagca

SEQ ID NO: 2322298 - RNA, 19 nt, Artificial Sequence
  Description of Artificial Sequence: Synthetic oligonucleotide
auguuacuggaaaccaaag

SEQ ID NO: 2322299 - RNA, 19 nt, Artificial Sequence
  Description of Artificial Sequence: Synthetic oligonucleotide
uauuguuaucucgcaaaua

SEQ ID NO: 2322300 - RNA, 19 nt, Artificial Sequence
  Description of Artificial Sequence: Synthetic oligonucleotide
ucgcaaauacagagcugug

SEQ ID NO: 2322301 - RNA, 19 nt, Artificial Sequence
  Description of Artificial Sequence: Synthetic oligonucleotide
auucuagcccagauuaacu

SEQ ID NO: 2322302 - RNA, 19 nt, Artificial Sequence
  Description of Artificial Sequence: Synthetic oligonucleotide
agaaguccguuguuauagu

SEQ ID NO: 2322303 - RNA, 19 nt, Artificial Sequence
  Description of Artificial Sequence: Synthetic oligonucleotide
cacagauaaaauggagcug

SEQ ID NO: 2322304 - RNA, 19 nt, Artificial Sequence
  Description of Artificial Sequence: Synthetic oligonucleotide
aggcaguaagcauuucuau

SEQ ID NO: 2322305 - RNA, 19 nt, Artificial Sequence
  Description of Artificial Sequence: Synthetic oligonucleotide
ugccugugugcaaggagcu

SEQ ID NO: 2322306 - RNA, 19 nt, Artificial Sequence
  Description of Artificial Sequence: Synthetic oligonucleotide
cacaaugauauggaaggca

SEQ ID NO: 2322307 - RNA, 19 nt, Artificial Sequence
  Description of Artificial Sequence: Synthetic oligonucleotide
uuccaaaggcucagcuaca

SEQ ID NO: 2322308 - RNA, 19 nt, Artificial Sequence
  Description of Artificial Sequence: Synthetic oligonucleotide
ucagaaguccguuguuaua

SEQ ID NO: 2322309 - RNA, 19 nt, Artificial Sequence
  Description of Artificial Sequence: Synthetic oligonucleotide
acgucuccaacagaguugu

SEQ ID NO: 2322310 - RNA, 19 nt, Artificial Sequence
  Description of Artificial Sequence: Synthetic oligonucleotide
gugggguuguuugaaauuc

SEQ ID NO: 2322311 - RNA, 19 nt, Artificial Sequence
  Description of Artificial Sequence: Synthetic oligonucleotide
ccauggaguaggcacagcc

SEQ ID NO: 2322312 - RNA, 19 nt, Artificial Sequence
  Description of Artificial Sequence: Synthetic oligonucleotide
gugacaagaaguucugccu

SEQ ID NO: 2322313 - RNA, 19 nt, Artificial Sequence
  Description of Artificial Sequence: Synthetic oligonucleotide
cucuauauccuaaagcauu

SEQ ID NO: 2322314 - RNA, 19 nt, Artificial Sequence
  Description of Artificial Sequence: Synthetic oligonucleotide
aaauucuagcccagauuaa

SEQ ID NO: 2322315 - RNA, 19 nt, Artificial Sequence
  Description of Artificial Sequence: Synthetic oligonucleotide
guaggcacagccgucugug

SEQ ID NO: 2322316 - RNA, 19 nt, Artificial Sequence
  Description of Artificial Sequence: Synthetic oligonucleotide
auuacaaaggugacauuuu

SEQ ID NO: 2322317 - RNA, 19 nt, Artificial Sequence
  Description of Artificial Sequence: Synthetic oligonucleotide
auggaaggcaguaagcauu

SEQ ID NO: 2322318 - RNA, 19 nt, Artificial Sequence
  Description of Artificial Sequence: Synthetic oligonucleotide
augugauuguucccacccu

SEQ ID NO: 2322319 - RNA, 19 nt, Artificial Sequence
  Description of Artificial Sequence: Synthetic oligonucleotide
gacaccucgaucugagaua

SEQ ID NO: 2322320 - RNA, 19 nt, Artificial Sequence
  Description of Artificial Sequence: Synthetic oligonucleotide
caccuugggcuccagcagc

SEQ ID NO: 2322321 - RNA, 19 nt, Artificial Sequence
  Description of Artificial Sequence: Synthetic oligonucleotide
guaauugauguuacuggaa

SEQ ID NO: 2322322 - RNA, 19 nt, Artificial Sequence
  Description of Artificial Sequence: Synthetic oligonucleotide
guccuguugggccucggug

SEQ ID NO: 2322323 - RNA, 19 nt, Artificial Sequence
  Description of Artificial Sequence: Synthetic oligonucleotide
caaccccugacucuauauc

SEQ ID NO: 2322324 - RNA, 19 nt, Artificial Sequence
  Description of Artificial Sequence: Synthetic oligonucleotide
guuguugaagagagcuagc

SEQ ID NO: 2322325 - RNA, 19 nt, Artificial Sequence
  Description of Artificial Sequence: Synthetic oligonucleotide
cacaaaagaccuggccuag

SEQ ID NO: 2322326 - RNA, 19 nt, Artificial Sequence
  Description of Artificial Sequence: Synthetic oligonucleotide
ugaaggcaaauggcuguug

SEQ ID NO: 2322327 - RNA, 19 nt, Artificial Sequence
  Description of Artificial Sequence: Synthetic oligonucleotide
augaagagaaggauaggua

SEQ ID NO: 2322328 - RNA, 19 nt, Artificial Sequence
  Description of Artificial Sequence: Synthetic oligonucleotide
aagcuguagcugagggagg

SEQ ID NO: 2322329 - RNA, 19 nt, Artificial Sequence
  Description of Artificial Sequence: Synthetic oligonucleotide
acucuauauccuaaagcau

SEQ ID NO: 2322330 - RNA, 19 nt, Artificial Sequence
  Description of Artificial Sequence: Synthetic oligonucleotide
gagagcauacucaaucagu

SEQ ID NO: 2322331 - RNA, 19 nt, Artificial Sequence
  Description of Artificial Sequence: Synthetic oligonucleotide
cucgcaaauacagagcugu

SEQ ID NO: 2322332 - RNA, 19 nt, Artificial Sequence
  Description of Artificial Sequence: Synthetic oligonucleotide
gacaagaaguucugccugu

SEQ ID NO: 2322333 - RNA, 19 nt, Artificial Sequence
  Description of Artificial Sequence: Synthetic oligonucleotide
caaaagaccuggccuagaa

SEQ ID NO: 2322334 - RNA, 19 nt, Artificial Sequence
  Description of Artificial Sequence: Synthetic oligonucleotide
acaagaaguucugccugug

SEQ ID NO: 2322335 - RNA, 19 nt, Artificial Sequence
  Description of Artificial Sequence: Synthetic oligonucleotide
uggcuguuguuuguguuaa

SEQ ID NO: 2322336 - RNA, 19 nt, Artificial Sequence
  Description of Artificial Sequence: Synthetic oligonucleotide
guagaugcccaaccccuga

SEQ ID NO: 2322337 - RNA, 19 nt, Artificial Sequence
  Description of Artificial Sequence: Synthetic oligonucleotide
ggaaaccaaaguccacaug

SEQ ID NO: 2322338 - RNA, 19 nt, Artificial Sequence
  Description of Artificial Sequence: Synthetic oligonucleotide
agcugucuuuuaugaauau

SEQ ID NO: 2322339 - RNA, 19 nt, Artificial Sequence
  Description of Artificial Sequence: Synthetic oligonucleotide
agguauuggguuggcuguc

SEQ ID NO: 2322340 - RNA, 19 nt, Artificial Sequence
  Description of Artificial Sequence: Synthetic oligonucleotide
ugcagacaccucgaucuga

SEQ ID NO: 2322341 - RNA, 19 nt, Artificial Sequence
  Description of Artificial Sequence: Synthetic oligonucleotide
augauauggaaggcaguaa

SEQ ID NO: 2322342 - RNA, 19 nt, Artificial Sequence
  Description of Artificial Sequence: Synthetic oligonucleotide
cuagcccagauuaacucua

SEQ ID NO: 2322343 - RNA, 19 nt, Artificial Sequence
  Description of Artificial Sequence: Synthetic oligonucleotide
ucguugccccagaacccag

SEQ ID NO: 2322344 - RNA, 19 nt, Artificial Sequence
  Description of Artificial Sequence: Synthetic oligonucleotide
aggagguguugcucuugag

SEQ ID NO: 2322345 - RNA, 19 nt, Artificial Sequence
  Description of Artificial Sequence: Synthetic oligonucleotide
aucagugugcagacaccuc

SEQ ID NO: 2322346 - RNA, 19 nt, Artificial Sequence
  Description of Artificial Sequence: Synthetic oligonucleotide
aggugacauuuugaaaaca

SEQ ID NO: 2322347 - RNA, 19 nt, Artificial Sequence
  Description of Artificial Sequence: Synthetic oligonucleotide
gugcccuuaucacccacac

SEQ ID NO: 2322348 - RNA, 19 nt, Artificial Sequence
  Description of Artificial Sequence: Synthetic oligonucleotide
agcuguagcugagggagga

SEQ ID NO: 2322349 - RNA, 19 nt, Artificial Sequence
  Description of Artificial Sequence: Synthetic oligonucleotide
cauguggucccagcuggag

SEQ ID NO: 2322350 - RNA, 19 nt, Artificial Sequence
  Description of Artificial Sequence: Synthetic oligonucleotide
uagcccagauuaacucuaa

SEQ ID NO: 2322351 - RNA, 19 nt, Artificial Sequence
  Description of Artificial Sequence: Synthetic oligonucleotide
agugugcagacaccucgau

SEQ ID NO: 2322352 - RNA, 19 nt, Artificial Sequence
  Description of Artificial Sequence: Synthetic oligonucleotide
augcccaaccccugacucu

SEQ ID NO: 2322353 - RNA, 19 nt, Artificial Sequence
  Description of Artificial Sequence: Synthetic oligonucleotide
cacccucagugacaagaag

SEQ ID NO: 2322354 - RNA, 19 nt, Artificial Sequence
  Description of Artificial Sequence: Synthetic oligonucleotide
cuccaacagaguugugguc

SEQ ID NO: 2322355 - RNA, 19 nt, Artificial Sequence
  Description of Artificial Sequence: Synthetic oligonucleotide
caaggcaaggcagcagcug

SEQ ID NO: 2322356 - RNA, 19 nt, Artificial Sequence
  Description of Artificial Sequence: Synthetic oligonucleotide
ggcacagccgucugugagc

SEQ ID NO: 2322357 - RNA, 19 nt, Artificial Sequence
  Description of Artificial Sequence: Synthetic oligonucleotide
cacccacacucguugcccc

SEQ ID NO: 2322358 - RNA, 19 nt, Artificial Sequence
  Description of Artificial Sequence: Synthetic oligonucleotide
agaacauccugaaggcaaa

SEQ ID NO: 2322359 - RNA, 19 nt, Artificial Sequence
  Description of Artificial Sequence: Synthetic oligonucleotide
aagcauucugucacagaua

SEQ ID NO: 2322360 - RNA, 19 nt, Artificial Sequence
  Description of Artificial Sequence: Synthetic oligonucleotide
uguugggccucggugcccu

SEQ ID NO: 2322361 - RNA, 19 nt, Artificial Sequence
  Description of Artificial Sequence: Synthetic oligonucleotide
gaaguccguuguuauaguu

SEQ ID NO: 2322362 - RNA, 19 nt, Artificial Sequence
  Description of Artificial Sequence: Synthetic oligonucleotide
ugcccaaccccugacucua

SEQ ID NO: 2322363 - RNA, 19 nt, Artificial Sequence
  Description of Artificial Sequence: Synthetic oligonucleotide
acaaaagaccuggccuaga

SEQ ID NO: 2322364 - RNA, 19 nt, Artificial Sequence
  Description of Artificial Sequence: Synthetic oligonucleotide
ggaacugauuccaaaggcu

SEQ ID NO: 2322365 - RNA, 19 nt, Artificial Sequence
  Description of Artificial Sequence: Synthetic oligonucleotide
agcccagauuaacucuaaa

SEQ ID NO: 2322366 - RNA, 19 nt, Artificial Sequence
  Description of Artificial Sequence: Synthetic oligonucleotide
ccucggugcccuuaucacc

SEQ ID NO: 2322367 - RNA, 19 nt, Artificial Sequence
  Description of Artificial Sequence: Synthetic oligonucleotide
gauagguauuggguuggcu

SEQ ID NO: 2322368 - RNA, 19 nt, Artificial Sequence
  Description of Artificial Sequence: Synthetic oligonucleotide
caaugauauggaaggcagu

SEQ ID NO: 2322369 - RNA, 19 nt, Artificial Sequence
  Description of Artificial Sequence: Synthetic oligonucleotide
cgcaaauacagagcugugc

SEQ ID NO: 2322370 - RNA, 19 nt, Artificial Sequence
  Description of Artificial Sequence: Synthetic oligonucleotide
gcaaggcagcagcuguucc

SEQ ID NO: 2322371 - RNA, 19 nt, Artificial Sequence
  Description of Artificial Sequence: Synthetic oligonucleotide
gaacugcaaggagguguug

SEQ ID NO: 2322372 - RNA, 19 nt, Artificial Sequence
  Description of Artificial Sequence: Synthetic oligonucleotide
ugggccucggugcccuuau

SEQ ID NO: 2322373 - RNA, 19 nt, Artificial Sequence
  Description of Artificial Sequence: Synthetic oligonucleotide
cucguugccccagaaccca

SEQ ID NO: 2322374 - RNA, 19 nt, Artificial Sequence
  Description of Artificial Sequence: Synthetic oligonucleotide
caacgucuccaacagaguu

SEQ ID NO: 2322375 - RNA, 19 nt, Artificial Sequence
  Description of Artificial Sequence: Synthetic oligonucleotide
aguggagagcauacucaau

SEQ ID NO: 2322376 - RNA, 19 nt, Artificial Sequence
  Description of Artificial Sequence: Synthetic oligonucleotide
gagcuagcuucugcagcug

SEQ ID NO: 2322377 - RNA, 19 nt, Artificial Sequence
  Description of Artificial Sequence: Synthetic oligonucleotide
ccgucugugagcuuguugu

SEQ ID NO: 2322378 - RNA, 19 nt, Artificial Sequence
  Description of Artificial Sequence: Synthetic oligonucleotide
cagaguaauugauguuacu

SEQ ID NO: 2322379 - RNA, 19 nt, Artificial Sequence
  Description of Artificial Sequence: Synthetic oligonucleotide
ucggugcccuuaucaccca

SEQ ID NO: 2322380 - RNA, 19 nt, Artificial Sequence
  Description of Artificial Sequence: Synthetic oligonucleotide
ggccucggugcccuuauca

SEQ ID NO: 2322381 - RNA, 19 nt, Artificial Sequence
  Description of Artificial Sequence: Synthetic oligonucleotide
cccagaacccaggaacugc

SEQ ID NO: 2322382 - RNA, 19 nt, Artificial Sequence
  Description of Artificial Sequence: Synthetic oligonucleotide
acucgaggccugguggggu

SEQ ID NO: 2322383 - RNA, 19 nt, Artificial Sequence
  Description of Artificial Sequence: Synthetic oligonucleotide
gccgucugugagcuuguug

SEQ ID NO: 2322384 - RNA, 19 nt, Artificial Sequence
  Description of Artificial Sequence: Synthetic oligonucleotide
ucgaggccuggugggguug

SEQ ID NO: 2322385 - RNA, 19 nt, Artificial Sequence
  Description of Artificial Sequence: Synthetic oligonucleotide
cuacagaguaauugauguu

SEQ ID NO: 2322386 - RNA, 19 nt, Artificial Sequence
  Description of Artificial Sequence: Synthetic oligonucleotide
gaguugugguccagcugca

SEQ ID NO: 2322387 - RNA, 19 nt, Artificial Sequence
  Description of Artificial Sequence: Synthetic oligonucleotide
ggcuguuguuuguguuaag

SEQ ID NO: 2322388 - RNA, 19 nt, Artificial Sequence
  Description of Artificial Sequence: Synthetic oligonucleotide
cuauauccuaaagcauucu

SEQ ID NO: 2322389 - RNA, 19 nt, Artificial Sequence
  Description of Artificial Sequence: Synthetic oligonucleotide
cucaaucagugugcagaca

SEQ ID NO: 2322390 - RNA, 19 nt, Artificial Sequence
  Description of Artificial Sequence: Synthetic oligonucleotide
caguaagcauuucuaugau

SEQ ID NO: 2322391 - RNA, 19 nt, Artificial Sequence
  Description of Artificial Sequence: Synthetic oligonucleotide
uugagccccugggccagca

SEQ ID NO: 2322392 - RNA, 19 nt, Artificial Sequence
  Description of Artificial Sequence: Synthetic oligonucleotide
ggauagguauuggguuggc

SEQ ID NO: 2322393 - RNA, 19 nt, Artificial Sequence
  Description of Artificial Sequence: Synthetic oligonucleotide
acauguggucccagcugga

SEQ ID NO: 2322394 - RNA, 19 nt, Artificial Sequence
  Description of Artificial Sequence: Synthetic oligonucleotide
cuguugggccucggugccc

SEQ ID NO: 2322395 - RNA, 19 nt, Artificial Sequence
  Description of Artificial Sequence: Synthetic oligonucleotide
ccucagugacaagaaguuc

SEQ ID NO: 2322396 - RNA, 19 nt, Artificial Sequence
  Description of Artificial Sequence: Synthetic oligonucleotide
ggcaaggcagcagcuguuc

SEQ ID NO: 2322397 - RNA, 19 nt, Artificial Sequence
  Description of Artificial Sequence: Synthetic oligonucleotide
ggugggguuguuugaaauu

SEQ ID NO: 2322398 - RNA, 19 nt, Artificial Sequence
  Description of Artificial Sequence: Synthetic oligonucleotide
gggugagguccuguugggc

SEQ ID NO: 2322399 - RNA, 19 nt, Artificial Sequence
  Description of Artificial Sequence: Synthetic oligonucleotide
ggugcccuuaucacccaca

SEQ ID NO: 2322400 - RNA, 19 nt, Artificial Sequence
  Description of Artificial Sequence: Synthetic oligonucleotide
cacacucguugccccagaa

SEQ ID NO: 2322401 - RNA, 19 nt, Artificial Sequence
  Description of Artificial Sequence: Synthetic oligonucleotide
gggguuguuugaaauucua

SEQ ID NO: 2322402 - RNA, 19 nt, Artificial Sequence
  Description of Artificial Sequence: Synthetic oligonucleotide
gaacauccugaaggcaaau

SEQ ID NO: 2322403 - RNA, 19 nt, Artificial Sequence
  Description of Artificial Sequence: Synthetic oligonucleotide
ggaguaggcacagccgucu

SEQ ID NO: 2322404 - RNA, 19 nt, Artificial Sequence
  Description of Artificial Sequence: Synthetic oligonucleotide
cguugccccagaacccagg

SEQ ID NO: 2322405 - RNA, 19 nt, Artificial Sequence
  Description of Artificial Sequence: Synthetic oligonucleotide
agguccuguugggccucgg

SEQ ID NO: 2322406 - RNA, 19 nt, Artificial Sequence
  Description of Artificial Sequence: Synthetic oligonucleotide
gccuggugggguuguuuga

SEQ ID NO: 2322407 - RNA, 19 nt, Artificial Sequence
  Description of Artificial Sequence: Synthetic oligonucleotide
aggccuggugggguuguuu

SEQ ID NO: 2322408 - RNA, 19 nt, Artificial Sequence
  Description of Artificial Sequence: Synthetic oligonucleotide
cccugacucuauauccuaa

SEQ ID NO: 2322409 - RNA, 19 nt, Artificial Sequence
  Description of Artificial Sequence: Synthetic oligonucleotide
ccacccucagugacaagaa

SEQ ID NO: 2322410 - RNA, 19 nt, Artificial Sequence
  Description of Artificial Sequence: Synthetic oligonucleotide
ccacuccaacgucuccaac

SEQ ID NO: 2322411 - RNA, 19 nt, Artificial Sequence
  Description of Artificial Sequence: Synthetic oligonucleotide
ccucgaucugagauauugu

SEQ ID NO: 2322412 - RNA, 19 nt, Artificial Sequence
  Description of Artificial Sequence: Synthetic oligonucleotide
ccguuguuauaguucaguu

SEQ ID NO: 2322413 - RNA, 19 nt, Artificial Sequence
  Description of Artificial Sequence: Synthetic oligonucleotide
ccuggugggguuguuugaa

SEQ ID NO: 2322414 - RNA, 19 nt, Artificial Sequence
  Description of Artificial Sequence: Synthetic oligonucleotide
ccaaccccugacucuauau

SEQ ID NO: 2322415 - RNA, 19 nt, Artificial Sequence
  Description of Artificial Sequence: Synthetic oligonucleotide
ccccugacucuauauccua

SEQ ID NO: 2322416 - RNA, 19 nt, Artificial Sequence
  Description of Artificial Sequence: Synthetic oligonucleotide
gccccagaacccaggaacu

SEQ ID NO: 2322417 - RNA, 19 nt, Artificial Sequence
  Description of Artificial Sequence: Synthetic oligonucleotide
gcauucugucacagauaaa

SEQ ID NO: 2322418 - RNA, 19 nt, Artificial Sequence
  Description of Artificial Sequence: Synthetic oligonucleotide
gucuggggugagguccugu

SEQ ID NO: 2322419 - RNA, 19 nt, Artificial Sequence
  Description of Artificial Sequence: Synthetic oligonucleotide
cucgaggccuggugggguu

SEQ ID NO: 2322420 - RNA, 19 nt, Artificial Sequence
  Description of Artificial Sequence: Synthetic oligonucleotide
guggucccagcuggagugu

SEQ ID NO: 2322421 - RNA, 19 nt, Artificial Sequence
  Description of Artificial Sequence: Synthetic oligonucleotide
agccgucugugagcuuguu

SEQ ID NO: 2322422 - RNA, 19 nt, Artificial Sequence
  Description of Artificial Sequence: Synthetic oligonucleotide
ccacacucguugccccaga

SEQ ID NO: 2322423 - RNA, 19 nt, Artificial Sequence
  Description of Artificial Sequence: Synthetic oligonucleotide
cgucuccaacagaguugug

SEQ ID NO: 2322424 - RNA, 19 nt, Artificial Sequence
  Description of Artificial Sequence: Synthetic oligonucleotide
cagcaacucgaggccuggu

SEQ ID NO: 2322425 - RNA, 19 nt, Artificial Sequence
  Description of Artificial Sequence: Synthetic oligonucleotide
caccucgaucugagauauu

SEQ ID NO: 2322426 - RNA, 19 nt, Artificial Sequence
  Description of Artificial Sequence: Synthetic oligonucleotide
gcucagcuacagaguaauu

SEQ ID NO: 2322427 - RNA, 19 nt, Artificial Sequence
  Description of Artificial Sequence: Synthetic oligonucleotide
gccugugugcaaggagcuu

SEQ ID NO: 2322428 - RNA, 19 nt, Artificial Sequence
  Description of Artificial Sequence: Synthetic oligonucleotide
cacagccgucugugagcuu

SEQ ID NO: 2322429 - RNA, 19 nt, Artificial Sequence
  Description of Artificial Sequence: Synthetic oligonucleotide
gcccaaccccugacucuau

SEQ ID NO: 2322430 - RNA, 19 nt, Artificial Sequence
  Description of Artificial Sequence: Synthetic oligonucleotide
ugauauuuuggaaagagcc

SEQ ID NO: 2322431 - RNA, 19 nt, Artificial Sequence
  Description of Artificial Sequence: Synthetic oligonucleotide
uucucuaugguaaauuugg

SEQ ID NO: 2322432 - RNA, 19 nt, Artificial Sequence
  Description of Artificial Sequence: Synthetic oligonucleotide
ugccauaaaccuuugaugg

SEQ ID NO: 2322433 - RNA, 19 nt, Artificial Sequence
  Description of Artificial Sequence: Synthetic oligonucleotide
ucugugaacaucucaaggg

SEQ ID NO: 2322434 - RNA, 19 nt, Artificial Sequence
  Description of Artificial Sequence: Synthetic oligonucleotide
ucggauauugccauaaacc

SEQ ID NO: 2322435 - RNA, 19 nt, Artificial Sequence
  Description of Artificial Sequence: Synthetic oligonucleotide
ucugcuaaaacaauccgug

SEQ ID NO: 2322436 - RNA, 19 nt, Artificial Sequence
  Description of Artificial Sequence: Synthetic oligonucleotide
aaggcuuucacaaaaucgg

SEQ ID NO: 2322437 - RNA, 19 nt, Artificial Sequence
  Description of Artificial Sequence: Synthetic oligonucleotide
uuauucuagaagcagggga

SEQ ID NO: 2322438 - RNA, 19 nt, Artificial Sequence
  Description of Artificial Sequence: Synthetic oligonucleotide
uuuuaggggcuuaacgucg

SEQ ID NO: 2322439 - RNA, 19 nt, Artificial Sequence
  Description of Artificial Sequence: Synthetic oligonucleotide
aaauguucuacuaucggag

SEQ ID NO: 2322440 - RNA, 19 nt, Artificial Sequence
  Description of Artificial Sequence: Synthetic oligonucleotide
uuccuauugcccuugacag

SEQ ID NO: 2322441 - RNA, 19 nt, Artificial Sequence
  Description of Artificial Sequence: Synthetic oligonucleotide
uccuuuuaggggcuuaacg

SEQ ID NO: 2322442 - RNA, 19 nt, Artificial Sequence
  Description of Artificial Sequence: Synthetic oligonucleotide
gauauuuuggaaagagccg

SEQ ID NO: 2322443 - RNA, 19 nt, Artificial Sequence
  Description of Artificial Sequence: Synthetic oligonucleotide
aaaaucggcugcuuuuguc

SEQ ID NO: 2322444 - RNA, 19 nt, Artificial Sequence
  Description of Artificial Sequence: Synthetic oligonucleotide
agaaugugaacuuucacau

SEQ ID NO: 2322445 - RNA, 19 nt, Artificial Sequence
  Description of Artificial Sequence: Synthetic oligonucleotide
ugaaacccgagaacaaagg

SEQ ID NO: 2322446 - RNA, 19 nt, Artificial Sequence
  Description of Artificial Sequence: Synthetic oligonucleotide
uuggaaagagccgagaaug

SEQ ID NO: 2322447 - RNA, 19 nt, Artificial Sequence
  Description of Artificial Sequence: Synthetic oligonucleotide
gagaaugugaacuuucaca

SEQ ID NO: 2322448 - RNA, 19 nt, Artificial Sequence
  Description of Artificial Sequence: Synthetic oligonucleotide
gauaagggcaagugcaucc

SEQ ID NO: 2322449 - RNA, 19 nt, Artificial Sequence
  Description of Artificial Sequence: Synthetic oligonucleotide
aaaucggcugcuuuuguca

SEQ ID NO: 2322450 - RNA, 19 nt, Artificial Sequence
  Description of Artificial Sequence: Synthetic oligonucleotide
ucauccagccugauaaggg

SEQ ID NO: 2322451 - RNA, 19 nt, Artificial Sequence
  Description of Artificial Sequence: Synthetic oligonucleotide
auauuuaaauuauucuaga

SEQ ID NO: 2322452 - RNA, 19 nt, Artificial Sequence
  Description of Artificial Sequence: Synthetic oligonucleotide
ugaaaaggaaccugagcag

SEQ ID NO: 2322453 - RNA, 19 nt, Artificial Sequence
  Description of Artificial Sequence: Synthetic oligonucleotide
aaaacaauccguguccgug

SEQ ID NO: 2322454 - RNA, 19 nt, Artificial Sequence
  Description of Artificial Sequence: Synthetic oligonucleotide
cuugauauuuuggaaagag

SEQ ID NO: 2322455 - RNA, 19 nt, Artificial Sequence
  Description of Artificial Sequence: Synthetic oligonucleotide
aaagcguaucugaaguccc

SEQ ID NO: 2322456 - RNA, 19 nt, Artificial Sequence
  Description of Artificial Sequence: Synthetic oligonucleotide
uggaggauuuccuaggaug

SEQ ID NO: 2322457 - RNA, 19 nt, Artificial Sequence
  Description of Artificial Sequence: Synthetic oligonucleotide
aguccuguuaaaccuuccc

SEQ ID NO: 2322458 - RNA, 19 nt, Artificial Sequence
  Description of Artificial Sequence: Synthetic oligonucleotide
ucgguuauuucaaaagacu

SEQ ID NO: 2322459 - RNA, 19 nt, Artificial Sequence
  Description of Artificial Sequence: Synthetic oligonucleotide
ugaacuuucacaucugcua

SEQ ID NO: 2322460 - RNA, 19 nt, Artificial Sequence
  Description of Artificial Sequence: Synthetic oligonucleotide
auugccauaaaccuuugau

SEQ ID NO: 2322461 - RNA, 19 nt, Artificial Sequence
  Description of Artificial Sequence: Synthetic oligonucleotide
uugccauaaaccuuugaug

SEQ ID NO: 2322462 - RNA, 19 nt, Artificial Sequence
  Description of Artificial Sequence: Synthetic oligonucleotide
aagaugggccucuucgccg

SEQ ID NO: 2322463 - RNA, 19 nt, Artificial Sequence
  Description of Artificial Sequence: Synthetic oligonucleotide
uaaagcguaucugaagucc

SEQ ID NO: 2322464 - RNA, 19 nt, Artificial Sequence
  Description of Artificial Sequence: Synthetic oligonucleotide
ucugcuugggcugagaccu

SEQ ID NO: 2322465 - RNA, 19 nt, Artificial Sequence
  Description of Artificial Sequence: Synthetic oligonucleotide
uuauuucaaaagacucuag

SEQ ID NO: 2322466 - RNA, 19 nt, Artificial Sequence
  Description of Artificial Sequence: Synthetic oligonucleotide
aggugaucuccuuuuaggg

SEQ ID NO: 2322467 - RNA, 19 nt, Artificial Sequence
  Description of Artificial Sequence: Synthetic oligonucleotide
uucagguuaaagcguaucu

SEQ ID NO: 2322468 - RNA, 19 nt, Artificial Sequence
  Description of Artificial Sequence: Synthetic oligonucleotide
ugcuaaaacaauccguguc

SEQ ID NO: 2322469 - RNA, 19 nt, Artificial Sequence
  Description of Artificial Sequence: Synthetic oligonucleotide
cuuaacgucgguuauuuca

SEQ ID NO: 2322470 - RNA, 19 nt, Artificial Sequence
  Description of Artificial Sequence: Synthetic oligonucleotide
aacaucucaagggucgagg

SEQ ID NO: 2322471 - RNA, 19 nt, Artificial Sequence
  Description of Artificial Sequence: Synthetic oligonucleotide
aaaagacucuaggaagagg

SEQ ID NO: 2322472 - RNA, 19 nt, Artificial Sequence
  Description of Artificial Sequence: Synthetic oligonucleotide
aggucauccagccugauaa

SEQ ID NO: 2322473 - RNA, 19 nt, Artificial Sequence
  Description of Artificial Sequence: Synthetic oligonucleotide
uuaacgucgguuauuucaa

SEQ ID NO: 2322474 - RNA, 19 nt, Artificial Sequence
  Description of Artificial Sequence: Synthetic oligonucleotide
agugcaaguccuguuaaac

SEQ ID NO: 2322475 - RNA, 19 nt, Artificial Sequence
  Description of Artificial Sequence: Synthetic oligonucleotide
aagugcauccuccaccuga

SEQ ID NO: 2322476 - RNA, 19 nt, Artificial Sequence
  Description of Artificial Sequence: Synthetic oligonucleotide
uuaaaccuucccuuucugc

SEQ ID NO: 2322477 - RNA, 19 nt, Artificial Sequence
  Description of Artificial Sequence: Synthetic oligonucleotide
uauuuuggaaagagccgag

SEQ ID NO: 2322478 - RNA, 19 nt, Artificial Sequence
  Description of Artificial Sequence: Synthetic oligonucleotide
uguuaaaccuucccuuucu

SEQ ID NO: 2322479 - RNA, 19 nt, Artificial Sequence
  Description of Artificial Sequence: Synthetic oligonucleotide
uuugcaaguccugauuucc

SEQ ID NO: 2322480 - RNA, 19 nt, Artificial Sequence
  Description of Artificial Sequence: Synthetic oligonucleotide
ucgaggggaaucagaaccg

SEQ ID NO: 2322481 - RNA, 19 nt, Artificial Sequence
  Description of Artificial Sequence: Synthetic oligonucleotide
uuuaggggcuuaacgucgg

SEQ ID NO: 2322482 - RNA, 19 nt, Artificial Sequence
  Description of Artificial Sequence: Synthetic oligonucleotide
ugcguuuccaucucggcca

SEQ ID NO: 2322483 - RNA, 19 nt, Artificial Sequence
  Description of Artificial Sequence: Synthetic oligonucleotide
ugugugacgggaguaaagc

SEQ ID NO: 2322484 - RNA, 19 nt, Artificial Sequence
  Description of Artificial Sequence: Synthetic oligonucleotide
aaccuucccuuucugcuuc

SEQ ID NO: 2322485 - RNA, 19 nt, Artificial Sequence
  Description of Artificial Sequence: Synthetic oligonucleotide
aaacaauccguguccgugu

SEQ ID NO: 2322486 - RNA, 19 nt, Artificial Sequence
  Description of Artificial Sequence: Synthetic oligonucleotide
aacaauccguguccguguc

SEQ ID NO: 2322487 - RNA, 19 nt, Artificial Sequence
  Description of Artificial Sequence: Synthetic oligonucleotide
uaucggaguaaauaucuuc

SEQ ID NO: 2322488 - RNA, 19 nt, Artificial Sequence
  Description of Artificial Sequence: Synthetic oligonucleotide
acgucgguuauuucaaaag

SEQ ID NO: 2322489 - RNA, 19 nt, Artificial Sequence
  Description of Artificial Sequence: Synthetic oligonucleotide
acaucucaagggucgaggg

SEQ ID NO: 2322490 - RNA, 19 nt, Artificial Sequence
  Description of Artificial Sequence: Synthetic oligonucleotide
aaccgguccgcugaucugc

SEQ ID NO: 2322491 - RNA, 19 nt, Artificial Sequence
  Description of Artificial Sequence: Synthetic oligonucleotide
cugaaacccgagaacaaag

SEQ ID NO: 2322492 - RNA, 19 nt, Artificial Sequence
  Description of Artificial Sequence: Synthetic oligonucleotide
cuuuuaggggcuuaacguc

SEQ ID NO: 2322493 - RNA, 19 nt, Artificial Sequence
  Description of Artificial Sequence: Synthetic oligonucleotide
gaagaugggccucuucgcc

SEQ ID NO: 2322494 - RNA, 19 nt, Artificial Sequence
  Description of Artificial Sequence: Synthetic oligonucleotide
ggaacugacauccuuggug

SEQ ID NO: 2322495 - RNA, 19 nt, Artificial Sequence
  Description of Artificial Sequence: Synthetic oligonucleotide
agagccgagaaugugaacu

SEQ ID NO: 2322496 - RNA, 19 nt, Artificial Sequence
  Description of Artificial Sequence: Synthetic oligonucleotide
acuaucggaguaaauaucu

SEQ ID NO: 2322497 - RNA, 19 nt, Artificial Sequence
  Description of Artificial Sequence: Synthetic oligonucleotide
ucuuucccagucaggagcc

SEQ ID NO: 2322498 - RNA, 19 nt, Artificial Sequence
  Description of Artificial Sequence: Synthetic oligonucleotide
uugcagauggcaguccucg

SEQ ID NO: 2322499 - RNA, 19 nt, Artificial Sequence
  Description of Artificial Sequence: Synthetic oligonucleotide
uucugcguuuccaucucgg

SEQ ID NO: 2322500 - RNA, 19 nt, Artificial Sequence
  Description of Artificial Sequence: Synthetic oligonucleotide
cuuucacaaaaucggcugc

SEQ ID NO: 2322501 - RNA, 19 nt, Artificial Sequence
  Description of Artificial Sequence: Synthetic oligonucleotide
uaucuguucgcggggaccg

SEQ ID NO: 2322502 - RNA, 19 nt, Artificial Sequence
  Description of Artificial Sequence: Synthetic oligonucleotide
caaauguucuacuaucgga

SEQ ID NO: 2322503 - RNA, 19 nt, Artificial Sequence
  Description of Artificial Sequence: Synthetic oligonucleotide
cuaaaacaauccguguccg

SEQ ID NO: 2322504 - RNA, 19 nt, Artificial Sequence
  Description of Artificial Sequence: Synthetic oligonucleotide
ugugaacaucucaaggguc

SEQ ID NO: 2322505 - RNA, 19 nt, Artificial Sequence
  Description of Artificial Sequence: Synthetic oligonucleotide
aaagccguccuccgccccg

SEQ ID NO: 2322506 - RNA, 19 nt, Artificial Sequence
  Description of Artificial Sequence: Synthetic oligonucleotide
uacuaucggaguaaauauc

SEQ ID NO: 2322507 - RNA, 19 nt, Artificial Sequence
  Description of Artificial Sequence: Synthetic oligonucleotide
ucccaaauguucuacuauc

SEQ ID NO: 2322508 - RNA, 19 nt, Artificial Sequence
  Description of Artificial Sequence: Synthetic oligonucleotide
aacgucgguuauuucaaaa

SEQ ID NO: 2322509 - RNA, 19 nt, Artificial Sequence
  Description of Artificial Sequence: Synthetic oligonucleotide
ccaguuuucuuuuaauggc

SEQ ID NO: 2322510 - RNA, 19 nt, Artificial Sequence
  Description of Artificial Sequence: Synthetic oligonucleotide
auaaaccuuugauggagga

SEQ ID NO: 2322511 - RNA, 19 nt, Artificial Sequence
  Description of Artificial Sequence: Synthetic oligonucleotide
aucagaaccgguccgcuga

SEQ ID NO: 2322512 - RNA, 19 nt, Artificial Sequence
  Description of Artificial Sequence: Synthetic oligonucleotide
aaucagaaccgguccgcug

SEQ ID NO: 2322513 - RNA, 19 nt, Artificial Sequence
  Description of Artificial Sequence: Synthetic oligonucleotide
cauccagccugauaagggc

SEQ ID NO: 2322514 - RNA, 19 nt, Artificial Sequence
  Description of Artificial Sequence: Synthetic oligonucleotide
gguuaaagcguaucugaag

SEQ ID NO: 2322515 - RNA, 19 nt, Artificial Sequence
  Description of Artificial Sequence: Synthetic oligonucleotide
uccuauugcccuugacagg

SEQ ID NO: 2322516 - RNA, 19 nt, Artificial Sequence
  Description of Artificial Sequence: Synthetic oligonucleotide
gaaagagccgagaauguga

SEQ ID NO: 2322517 - RNA, 19 nt, Artificial Sequence
  Description of Artificial Sequence: Synthetic oligonucleotide
uccuuugccagcaauucuu

SEQ ID NO: 2322518 - RNA, 19 nt, Artificial Sequence
  Description of Artificial Sequence: Synthetic oligonucleotide
cuuccuauugcccuugaca

SEQ ID NO: 2322519 - RNA, 19 nt, Artificial Sequence
  Description of Artificial Sequence: Synthetic oligonucleotide
agaaccgguccgcugaucu

SEQ ID NO: 2322520 - RNA, 19 nt, Artificial Sequence
  Description of Artificial Sequence: Synthetic oligonucleotide
aagagccgagaaugugaac

SEQ ID NO: 2322521 - RNA, 19 nt, Artificial Sequence
  Description of Artificial Sequence: Synthetic oligonucleotide
aucggaguaaauaucuuca

SEQ ID NO: 2322522 - RNA, 19 nt, Artificial Sequence
  Description of Artificial Sequence: Synthetic oligonucleotide
aagucccaaauguucuacu

SEQ ID NO: 2322523 - RNA, 19 nt, Artificial Sequence
  Description of Artificial Sequence: Synthetic oligonucleotide
cucggauauugccauaaac

SEQ ID NO: 2322524 - RNA, 19 nt, Artificial Sequence
  Description of Artificial Sequence: Synthetic oligonucleotide
cagcaauucuuccuauugc

SEQ ID NO: 2322525 - RNA, 19 nt, Artificial Sequence
  Description of Artificial Sequence: Synthetic oligonucleotide
uuuugucagggaacugaca

SEQ ID NO: 2322526 - RNA, 19 nt, Artificial Sequence
  Description of Artificial Sequence: Synthetic oligonucleotide
agcggagggaagaugggcc

SEQ ID NO: 2322527 - RNA, 19 nt, Artificial Sequence
  Description of Artificial Sequence: Synthetic oligonucleotide
gcuuucacaaaaucggcug

SEQ ID NO: 2322528 - RNA, 19 nt, Artificial Sequence
  Description of Artificial Sequence: Synthetic oligonucleotide
ugggaaaucuucccauggu

SEQ ID NO: 2322529 - RNA, 19 nt, Artificial Sequence
  Description of Artificial Sequence: Synthetic oligonucleotide
guuauuucaaaagacucua

SEQ ID NO: 2322530 - RNA, 19 nt, Artificial Sequence
  Description of Artificial Sequence: Synthetic oligonucleotide
cagguuaaagcguaucuga

SEQ ID NO: 2322531 - RNA, 19 nt, Artificial Sequence
  Description of Artificial Sequence: Synthetic oligonucleotide
cuuuuaauggcguguaucu

SEQ ID NO: 2322532 - RNA, 19 nt, Artificial Sequence
  Description of Artificial Sequence: Synthetic oligonucleotide
uucucgucucuucuuuccc

SEQ ID NO: 2322533 - RNA, 19 nt, Artificial Sequence
  Description of Artificial Sequence: Synthetic oligonucleotide
uggaaagagccgagaaugu

SEQ ID NO: 2322534 - RNA, 19 nt, Artificial Sequence
  Description of Artificial Sequence: Synthetic oligonucleotide
aacuuucacaucugcuaaa

SEQ ID NO: 2322535 - RNA, 19 nt, Artificial Sequence
  Description of Artificial Sequence: Synthetic oligonucleotide
cugagaccugaaaaggaac

SEQ ID NO: 2322536 - RNA, 19 nt, Artificial Sequence
  Description of Artificial Sequence: Synthetic oligonucleotide
gucacauucucuaugguaa

SEQ ID NO: 2322537 - RNA, 19 nt, Artificial Sequence
  Description of Artificial Sequence: Synthetic oligonucleotide
uuaauggcguguaucuguu

SEQ ID NO: 2322538 - RNA, 19 nt, Artificial Sequence
  Description of Artificial Sequence: Synthetic oligonucleotide
aagacucuaggaagagguc

SEQ ID NO: 2322539 - RNA, 19 nt, Artificial Sequence
  Description of Artificial Sequence: Synthetic oligonucleotide
ugcaaguccugauuuccac

SEQ ID NO: 2322540 - RNA, 19 nt, Artificial Sequence
  Description of Artificial Sequence: Synthetic oligonucleotide
gauuuccacauuccuugac

SEQ ID NO: 2322541 - RNA, 19 nt, Artificial Sequence
  Description of Artificial Sequence: Synthetic oligonucleotide
gucgguuauuucaaaagac

SEQ ID NO: 2322542 - RNA, 19 nt, Artificial Sequence
  Description of Artificial Sequence: Synthetic oligonucleotide
aacccgagaacaaaggcuu

SEQ ID NO: 2322543 - RNA, 19 nt, Artificial Sequence
  Description of Artificial Sequence: Synthetic oligonucleotide
auucucuaugguaaauuug

SEQ ID NO: 2322544 - RNA, 19 nt, Artificial Sequence
  Description of Artificial Sequence: Synthetic oligonucleotide
aucucaagggucgagggga

SEQ ID NO: 2322545 - RNA, 19 nt, Artificial Sequence
  Description of Artificial Sequence: Synthetic oligonucleotide
agacucuaggaagagguca

SEQ ID NO: 2322546 - RNA, 19 nt, Artificial Sequence
  Description of Artificial Sequence: Synthetic oligonucleotide
uauugccauaaaccuuuga

SEQ ID NO: 2322547 - RNA, 19 nt, Artificial Sequence
  Description of Artificial Sequence: Synthetic oligonucleotide
ucugcguuuccaucucggc

SEQ ID NO: 2322548 - RNA, 19 nt, Artificial Sequence
  Description of Artificial Sequence: Synthetic oligonucleotide
uaaaacaauccguguccgu

SEQ ID NO: 2322549 - RNA, 19 nt, Artificial Sequence
  Description of Artificial Sequence: Synthetic oligonucleotide
aaagagccgagaaugugaa

SEQ ID NO: 2322550 - RNA, 19 nt, Artificial Sequence
  Description of Artificial Sequence: Synthetic oligonucleotide
guuaaaccuucccuuucug

SEQ ID NO: 2322551 - RNA, 19 nt, Artificial Sequence
  Description of Artificial Sequence: Synthetic oligonucleotide
cugcguuuccaucucggcc

SEQ ID NO: 2322552 - RNA, 19 nt, Artificial Sequence
  Description of Artificial Sequence: Synthetic oligonucleotide
uugcaaguccugauuucca

SEQ ID NO: 2322553 - RNA, 19 nt, Artificial Sequence
  Description of Artificial Sequence: Synthetic oligonucleotide
caucucaagggucgagggg

SEQ ID NO: 2322554 - RNA, 19 nt, Artificial Sequence
  Description of Artificial Sequence: Synthetic oligonucleotide
ucgccaucuugauauuuug

SEQ ID NO: 2322555 - RNA, 19 nt, Artificial Sequence
  Description of Artificial Sequence: Synthetic oligonucleotide
uccgccugucgcuucuucg

SEQ ID NO: 2322556 - RNA, 19 nt, Artificial Sequence
  Description of Artificial Sequence: Synthetic oligonucleotide
ucuccguccugucccgccg

SEQ ID NO: 2322557 - RNA, 19 nt, Artificial Sequence
  Description of Artificial Sequence: Synthetic oligonucleotide
uggugucuuugcaaguccu

SEQ ID NO: 2322558 - RNA, 19 nt, Artificial Sequence
  Description of Artificial Sequence: Synthetic oligonucleotide
aucugcuaaaacaauccgu

SEQ ID NO: 2322559 - RNA, 19 nt, Artificial Sequence
  Description of Artificial Sequence: Synthetic oligonucleotide
gaagucccaaauguucuac

SEQ ID NO: 2322560 - RNA, 19 nt, Artificial Sequence
  Description of Artificial Sequence: Synthetic oligonucleotide
ccugauaagggcaagugca

SEQ ID NO: 2322561 - RNA, 19 nt, Artificial Sequence
  Description of Artificial Sequence: Synthetic oligonucleotide
uggcguguaucuguucgcg

SEQ ID NO: 2322562 - RNA, 19 nt, Artificial Sequence
  Description of Artificial Sequence: Synthetic oligonucleotide
uugacaggugaucuccuuu

SEQ ID NO: 2322563 - RNA, 19 nt, Artificial Sequence
  Description of Artificial Sequence: Synthetic oligonucleotide
uucuagaagcaggggagug

SEQ ID NO: 2322564 - RNA, 19 nt, Artificial Sequence
  Description of Artificial Sequence: Synthetic oligonucleotide
gugugacgggaguaaagcc

SEQ ID NO: 2322565 - RNA, 19 nt, Artificial Sequence
  Description of Artificial Sequence: Synthetic oligonucleotide
uggcugggaaaucuuccca

SEQ ID NO: 2322566 - RNA, 19 nt, Artificial Sequence
  Description of Artificial Sequence: Synthetic oligonucleotide
cauccuccaccugaaaccc

SEQ ID NO: 2322567 - RNA, 19 nt, Artificial Sequence
  Description of Artificial Sequence: Synthetic oligonucleotide
ugacaggugaucuccuuuu

SEQ ID NO: 2322568 - RNA, 19 nt, Artificial Sequence
  Description of Artificial Sequence: Synthetic oligonucleotide
ucggaguaaauaucuucau

SEQ ID NO: 2322569 - RNA, 19 nt, Artificial Sequence
  Description of Artificial Sequence: Synthetic oligonucleotide
uccgcugaucugcuggcca

SEQ ID NO: 2322570 - RNA, 19 nt, Artificial Sequence
  Description of Artificial Sequence: Synthetic oligonucleotide
aguuuucuuuuaauggcgu

SEQ ID NO: 2322571 - RNA, 19 nt, Artificial Sequence
  Description of Artificial Sequence: Synthetic oligonucleotide
ggcaagugcauccuccacc

SEQ ID NO: 2322572 - RNA, 19 nt, Artificial Sequence
  Description of Artificial Sequence: Synthetic oligonucleotide
uguccgugucacauucucu

SEQ ID NO: 2322573 - RNA, 19 nt, Artificial Sequence
  Description of Artificial Sequence: Synthetic oligonucleotide
gucaggagccgcucgcccg

SEQ ID NO: 2322574 - RNA, 19 nt, Artificial Sequence
  Description of Artificial Sequence: Synthetic oligonucleotide
uucccaugguuuucuguga

SEQ ID NO: 2322575 - RNA, 19 nt, Artificial Sequence
  Description of Artificial Sequence: Synthetic oligonucleotide
agucccaaauguucuacua

SEQ ID NO: 2322576 - RNA, 19 nt, Artificial Sequence
  Description of Artificial Sequence: Synthetic oligonucleotide
gcguguaucuguucgcggg

SEQ ID NO: 2322577 - RNA, 19 nt, Artificial Sequence
  Description of Artificial Sequence: Synthetic oligonucleotide
ucacauucucuaugguaaa

SEQ ID NO: 2322578 - RNA, 19 nt, Artificial Sequence
  Description of Artificial Sequence: Synthetic oligonucleotide
auguucuacuaucggagua

SEQ ID NO: 2322579 - RNA, 19 nt, Artificial Sequence
  Description of Artificial Sequence: Synthetic oligonucleotide
uaaaccuuugauggaggau

SEQ ID NO: 2322580 - RNA, 19 nt, Artificial Sequence
  Description of Artificial Sequence: Synthetic oligonucleotide
gccaucuugauauuuugga

SEQ ID NO: 2322581 - RNA, 19 nt, Artificial Sequence
  Description of Artificial Sequence: Synthetic oligonucleotide
cgugucacauucucuaugg

SEQ ID NO: 2322582 - RNA, 19 nt, Artificial Sequence
  Description of Artificial Sequence: Synthetic oligonucleotide
ucuuccuauugcccuugac

SEQ ID NO: 2322583 - RNA, 19 nt, Artificial Sequence
  Description of Artificial Sequence: Synthetic oligonucleotide
ggggaaucagaaccggucc

SEQ ID NO: 2322584 - RNA, 19 nt, Artificial Sequence
  Description of Artificial Sequence: Synthetic oligonucleotide
cuacuaucggaguaaauau

SEQ ID NO: 2322585 - RNA, 19 nt, Artificial Sequence
  Description of Artificial Sequence: Synthetic oligonucleotide
uugucagggaacugacauc

SEQ ID NO: 2322586 - RNA, 19 nt, Artificial Sequence
  Description of Artificial Sequence: Synthetic oligonucleotide
auuuuggaaagagccgaga

SEQ ID NO: 2322587 - RNA, 19 nt, Artificial Sequence
  Description of Artificial Sequence: Synthetic oligonucleotide
aggggcuuaacgucgguua

SEQ ID NO: 2322588 - RNA, 19 nt, Artificial Sequence
  Description of Artificial Sequence: Synthetic oligonucleotide
ugauaagggcaagugcauc

SEQ ID NO: 2322589 - RNA, 19 nt, Artificial Sequence
  Description of Artificial Sequence: Synthetic oligonucleotide
gggaguaaagccguccucc

SEQ ID NO: 2322590 - RNA, 19 nt, Artificial Sequence
  Description of Artificial Sequence: Synthetic oligonucleotide
ucaagggucgaggggaauc

SEQ ID NO: 2322591 - RNA, 19 nt, Artificial Sequence
  Description of Artificial Sequence: Synthetic oligonucleotide
ugcccuugacaggugaucu

SEQ ID NO: 2322592 - RNA, 19 nt, Artificial Sequence
  Description of Artificial Sequence: Synthetic oligonucleotide
acgggaguaaagccguccu

SEQ ID NO: 2322593 - RNA, 19 nt, Artificial Sequence
  Description of Artificial Sequence: Synthetic oligonucleotide
ucuguucgcggggaccggg

SEQ ID NO: 2322594 - RNA, 19 nt, Artificial Sequence
  Description of Artificial Sequence: Synthetic oligonucleotide
uuucccagucaggagccgc

SEQ ID NO: 2322595 - RNA, 19 nt, Artificial Sequence
  Description of Artificial Sequence: Synthetic oligonucleotide
guaaagccguccuccgccc

SEQ ID NO: 2322596 - RNA, 19 nt, Artificial Sequence
  Description of Artificial Sequence: Synthetic oligonucleotide
caauccguguccgugucac

SEQ ID NO: 2322597 - RNA, 19 nt, Artificial Sequence
  Description of Artificial Sequence: Synthetic oligonucleotide
ggaagaugggccucuucgc

SEQ ID NO: 2322598 - RNA, 19 nt, Artificial Sequence
  Description of Artificial Sequence: Synthetic oligonucleotide
caauucuuccuauugcccu

SEQ ID NO: 2322599 - RNA, 19 nt, Artificial Sequence
  Description of Artificial Sequence: Synthetic oligonucleotide
gacgggaguaaagccgucc

SEQ ID NO: 2322600 - RNA, 19 nt, Artificial Sequence
  Description of Artificial Sequence: Synthetic oligonucleotide
guccucgccaucuugauau

SEQ ID NO: 2322601 - RNA, 19 nt, Artificial Sequence
  Description of Artificial Sequence: Synthetic oligonucleotide
gaacaucucaagggucgag

SEQ ID NO: 2322602 - RNA, 19 nt, Artificial Sequence
  Description of Artificial Sequence: Synthetic oligonucleotide
agccugauaagggcaagug

SEQ ID NO: 2322603 - RNA, 19 nt, Artificial Sequence
  Description of Artificial Sequence: Synthetic oligonucleotide
uaaagccguccuccgcccc

SEQ ID NO: 2322604 - RNA, 19 nt, Artificial Sequence
  Description of Artificial Sequence: Synthetic oligonucleotide
auaagggcaagugcauccu

SEQ ID NO: 2322605 - RNA, 19 nt, Artificial Sequence
  Description of Artificial Sequence: Synthetic oligonucleotide
uucccagucaggagccgcu

SEQ ID NO: 2322606 - RNA, 19 nt, Artificial Sequence
  Description of Artificial Sequence: Synthetic oligonucleotide
uucuacuaucggaguaaau

SEQ ID NO: 2322607 - RNA, 19 nt, Artificial Sequence
  Description of Artificial Sequence: Synthetic oligonucleotide
auucuagaagcaggggagu

SEQ ID NO: 2322608 - RNA, 19 nt, Artificial Sequence
  Description of Artificial Sequence: Synthetic oligonucleotide
cuucagguuaaagcguauc

SEQ ID NO: 2322609 - RNA, 19 nt, Artificial Sequence
  Description of Artificial Sequence: Synthetic oligonucleotide
uguccaugcggcuggcguc

SEQ ID NO: 2322610 - RNA, 19 nt, Artificial Sequence
  Description of Artificial Sequence: Synthetic oligonucleotide
guaucuguucgcggggacc

SEQ ID NO: 2322611 - RNA, 19 nt, Artificial Sequence
  Description of Artificial Sequence: Synthetic oligonucleotide
cugaagucccaaauguucu

SEQ ID NO: 2322612 - RNA, 19 nt, Artificial Sequence
  Description of Artificial Sequence: Synthetic oligonucleotide
accugaaaaggaaccugag

SEQ ID NO: 2322613 - RNA, 19 nt, Artificial Sequence
  Description of Artificial Sequence: Synthetic oligonucleotide
guccgugucacauucucua

SEQ ID NO: 2322614 - RNA, 19 nt, Artificial Sequence
  Description of Artificial Sequence: Synthetic oligonucleotide
gagcggagggaagaugggc

SEQ ID NO: 2322615 - RNA, 19 nt, Artificial Sequence
  Description of Artificial Sequence: Synthetic oligonucleotide
cgguuauuucaaaagacuc

SEQ ID NO: 2322616 - RNA, 19 nt, Artificial Sequence
  Description of Artificial Sequence: Synthetic oligonucleotide
gagguugcagauggcaguc

SEQ ID NO: 2322617 - RNA, 19 nt, Artificial Sequence
  Description of Artificial Sequence: Synthetic oligonucleotide
auggaggauuuccuaggau

SEQ ID NO: 2322618 - RNA, 19 nt, Artificial Sequence
  Description of Artificial Sequence: Synthetic oligonucleotide
agguugcagauggcagucc

SEQ ID NO: 2322619 - RNA, 19 nt, Artificial Sequence
  Description of Artificial Sequence: Synthetic oligonucleotide
gucgcuucuucgcccgccg

SEQ ID NO: 2322620 - RNA, 19 nt, Artificial Sequence
  Description of Artificial Sequence: Synthetic oligonucleotide
aagcguaucugaaguccca

SEQ ID NO: 2322621 - RNA, 19 nt, Artificial Sequence
  Description of Artificial Sequence: Synthetic oligonucleotide
uucuucgcccgccggcccc

SEQ ID NO: 2322622 - RNA, 19 nt, Artificial Sequence
  Description of Artificial Sequence: Synthetic oligonucleotide
aauccguguccgugucaca

SEQ ID NO: 2322623 - RNA, 19 nt, Artificial Sequence
  Description of Artificial Sequence: Synthetic oligonucleotide
gcagauggcaguccucgcc

SEQ ID NO: 2322624 - RNA, 19 nt, Artificial Sequence
  Description of Artificial Sequence: Synthetic oligonucleotide
gccugauaagggcaagugc

SEQ ID NO: 2322625 - RNA, 19 nt, Artificial Sequence
  Description of Artificial Sequence: Synthetic oligonucleotide
guguccgugucacauucuc

SEQ ID NO: 2322626 - RNA, 19 nt, Artificial Sequence
  Description of Artificial Sequence: Synthetic oligonucleotide
ggcgucuccguccuguccc

SEQ ID NO: 2322627 - RNA, 19 nt, Artificial Sequence
  Description of Artificial Sequence: Synthetic oligonucleotide
gaaccgguccgcugaucug

SEQ ID NO: 2322628 - RNA, 19 nt, Artificial Sequence
  Description of Artificial Sequence: Synthetic oligonucleotide
ggaaagagccgagaaugug

SEQ ID NO: 2322629 - RNA, 19 nt, Artificial Sequence
  Description of Artificial Sequence: Synthetic oligonucleotide
ucugugugugacgggagua

SEQ ID NO: 2322630 - RNA, 19 nt, Artificial Sequence
  Description of Artificial Sequence: Synthetic oligonucleotide
aagggucgaggggaaucag

SEQ ID NO: 2322631 - RNA, 19 nt, Artificial Sequence
  Description of Artificial Sequence: Synthetic oligonucleotide
gugugugacgggaguaaag

SEQ ID NO: 2322632 - RNA, 19 nt, Artificial Sequence
  Description of Artificial Sequence: Synthetic oligonucleotide
uaacgucgguuauuucaaa

SEQ ID NO: 2322633 - RNA, 19 nt, Artificial Sequence
  Description of Artificial Sequence: Synthetic oligonucleotide
gguuauuucaaaagacucu

SEQ ID NO: 2322634 - RNA, 19 nt, Artificial Sequence
  Description of Artificial Sequence: Synthetic oligonucleotide
ucgcuucuucgcccgccgg

SEQ ID NO: 2322635 - RNA, 19 nt, Artificial Sequence
  Description of Artificial Sequence: Synthetic oligonucleotide
gcuuuugucagggaacuga

SEQ ID NO: 2322636 - RNA, 19 nt, Artificial Sequence
  Description of Artificial Sequence: Synthetic oligonucleotide
aaguccugauuuccacauu

SEQ ID NO: 2322637 - RNA, 19 nt, Artificial Sequence
  Description of Artificial Sequence: Synthetic oligonucleotide
uccgugucacauucucuau

SEQ ID NO: 2322638 - RNA, 19 nt, Artificial Sequence
  Description of Artificial Sequence: Synthetic oligonucleotide
ggaaucagaaccgguccgc

SEQ ID NO: 2322639 - RNA, 19 nt, Artificial Sequence
  Description of Artificial Sequence: Synthetic oligonucleotide
cugugaacaucucaagggu

SEQ ID NO: 2322640 - RNA, 19 nt, Artificial Sequence
  Description of Artificial Sequence: Synthetic oligonucleotide
aaccuuugauggaggauuu

SEQ ID NO: 2322641 - RNA, 19 nt, Artificial Sequence
  Description of Artificial Sequence: Synthetic oligonucleotide
agguuaaagcguaucugaa

SEQ ID NO: 2322642 - RNA, 19 nt, Artificial Sequence
  Description of Artificial Sequence: Synthetic oligonucleotide
guccuguuaaaccuucccu

SEQ ID NO: 2322643 - RNA, 19 nt, Artificial Sequence
  Description of Artificial Sequence: Synthetic oligonucleotide
uuaggggcuuaacgucggu

SEQ ID NO: 2322644 - RNA, 19 nt, Artificial Sequence
  Description of Artificial Sequence: Synthetic oligonucleotide
gugucuuugcaaguccuga

SEQ ID NO: 2322645 - RNA, 19 nt, Artificial Sequence
  Description of Artificial Sequence: Synthetic oligonucleotide
cauucucuaugguaaauuu

SEQ ID NO: 2322646 - RNA, 19 nt, Artificial Sequence
  Description of Artificial Sequence: Synthetic oligonucleotide
uaauggcguguaucuguuc

SEQ ID NO: 2322647 - RNA, 19 nt, Artificial Sequence
  Description of Artificial Sequence: Synthetic oligonucleotide
uggcgucuccguccugucc

SEQ ID NO: 2322648 - RNA, 19 nt, Artificial Sequence
  Description of Artificial Sequence: Synthetic oligonucleotide
cagauggcaguccucgcca

SEQ ID NO: 2322649 - RNA, 19 nt, Artificial Sequence
  Description of Artificial Sequence: Synthetic oligonucleotide
uucgcggggaccgggauuu

SEQ ID NO: 2322650 - RNA, 19 nt, Artificial Sequence
  Description of Artificial Sequence: Synthetic oligonucleotide
accuuugauggaggauuuc

SEQ ID NO: 2322651 - RNA, 19 nt, Artificial Sequence
  Description of Artificial Sequence: Synthetic oligonucleotide
ggcguguaucuguucgcgg

SEQ ID NO: 2322652 - RNA, 19 nt, Artificial Sequence
  Description of Artificial Sequence: Synthetic oligonucleotide
uucacaaaaucggcugcuu

SEQ ID NO: 2322653 - RNA, 19 nt, Artificial Sequence
  Description of Artificial Sequence: Synthetic oligonucleotide
acaauccguguccguguca

SEQ ID NO: 2322654 - RNA, 19 nt, Artificial Sequence
  Description of Artificial Sequence: Synthetic oligonucleotide
ucagaaccgguccgcugau

SEQ ID NO: 2322655 - RNA, 19 nt, Artificial Sequence
  Description of Artificial Sequence: Synthetic oligonucleotide
gcugcuuuugucagggaac

SEQ ID NO: 2322656 - RNA, 19 nt, Artificial Sequence
  Description of Artificial Sequence: Synthetic oligonucleotide
ugucgcuucuucgcccgcc

SEQ ID NO: 2322657 - RNA, 19 nt, Artificial Sequence
  Description of Artificial Sequence: Synthetic oligonucleotide
gguguucugcguuuccauc

SEQ ID NO: 2322658 - RNA, 19 nt, Artificial Sequence
  Description of Artificial Sequence: Synthetic oligonucleotide
ugcuuuugucagggaacug

SEQ ID NO: 2322659 - RNA, 19 nt, Artificial Sequence
  Description of Artificial Sequence: Synthetic oligonucleotide
gauggcaguccucgccauc

SEQ ID NO: 2322660 - RNA, 19 nt, Artificial Sequence
  Description of Artificial Sequence: Synthetic oligonucleotide
ccuuuuaggggcuuaacgu

SEQ ID NO: 2322661 - RNA, 19 nt, Artificial Sequence
  Description of Artificial Sequence: Synthetic oligonucleotide
uugcccuugacaggugauc

SEQ ID NO: 2322662 - RNA, 19 nt, Artificial Sequence
  Description of Artificial Sequence: Synthetic oligonucleotide
ggucauccagccugauaag

SEQ ID NO: 2322663 - RNA, 19 nt, Artificial Sequence
  Description of Artificial Sequence: Synthetic oligonucleotide
auccguguccgugucacau

SEQ ID NO: 2322664 - RNA, 19 nt, Artificial Sequence
  Description of Artificial Sequence: Synthetic oligonucleotide
cucuaugguaaauuugguu

SEQ ID NO: 2322665 - RNA, 19 nt, Artificial Sequence
  Description of Artificial Sequence: Synthetic oligonucleotide
ggagccgcucgcccgagag

SEQ ID NO: 2322666 - RNA, 19 nt, Artificial Sequence
  Description of Artificial Sequence: Synthetic oligonucleotide
ucccgccgcugacagcugc

SEQ ID NO: 2322667 - RNA, 19 nt, Artificial Sequence
  Description of Artificial Sequence: Synthetic oligonucleotide
uguucgcggggaccgggau

SEQ ID NO: 2322668 - RNA, 19 nt, Artificial Sequence
  Description of Artificial Sequence: Synthetic oligonucleotide
ccugucgcuucuucgcccg

SEQ ID NO: 2322669 - RNA, 19 nt, Artificial Sequence
  Description of Artificial Sequence: Synthetic oligonucleotide
gcaaguccugauuuccaca

SEQ ID NO: 2322670 - RNA, 19 nt, Artificial Sequence
  Description of Artificial Sequence: Synthetic oligonucleotide
cccuugacaggugaucucc

SEQ ID NO: 2322671 - RNA, 19 nt, Artificial Sequence
  Description of Artificial Sequence: Synthetic oligonucleotide
gacaggugaucuccuuuua

SEQ ID NO: 2322672 - RNA, 19 nt, Artificial Sequence
  Description of Artificial Sequence: Synthetic oligonucleotide
auauugccauaaaccuuug

SEQ ID NO: 2322673 - RNA, 19 nt, Artificial Sequence
  Description of Artificial Sequence: Synthetic oligonucleotide
gccauaaaccuuugaugga

SEQ ID NO: 2322674 - RNA, 19 nt, Artificial Sequence
  Description of Artificial Sequence: Synthetic oligonucleotide
cuaggaugagguugcagau

SEQ ID NO: 2322675 - RNA, 19 nt, Artificial Sequence
  Description of Artificial Sequence: Synthetic oligonucleotide
cuucuucgcccgccggccc

SEQ ID NO: 2322676 - RNA, 19 nt, Artificial Sequence
  Description of Artificial Sequence: Synthetic oligonucleotide
agugcauccuccaccugaa

SEQ ID NO: 2322677 - RNA, 19 nt, Artificial Sequence
  Description of Artificial Sequence: Synthetic oligonucleotide
aguccucgccaucuugaua

SEQ ID NO: 2322678 - RNA, 19 nt, Artificial Sequence
  Description of Artificial Sequence: Synthetic oligonucleotide
cuuucccagucaggagccg

SEQ ID NO: 2322679 - RNA, 19 nt, Artificial Sequence
  Description of Artificial Sequence: Synthetic oligonucleotide
aggggagugcaaguccugu

SEQ ID NO: 2322680 - RNA, 19 nt, Artificial Sequence
  Description of Artificial Sequence: Synthetic oligonucleotide
gucccaaauguucuacuau

SEQ ID NO: 2322681 - RNA, 19 nt, Artificial Sequence
  Description of Artificial Sequence: Synthetic oligonucleotide
caagggucgaggggaauca

SEQ ID NO: 2322682 - RNA, 19 nt, Artificial Sequence
  Description of Artificial Sequence: Synthetic oligonucleotide
agcguaucugaagucccaa

SEQ ID NO: 2322683 - RNA, 19 nt, Artificial Sequence
  Description of Artificial Sequence: Synthetic oligonucleotide
uccuccgccccgguguucu

SEQ ID NO: 2322684 - RNA, 19 nt, Artificial Sequence
  Description of Artificial Sequence: Synthetic oligonucleotide
ggugucuuugcaaguccug

SEQ ID NO: 2322685 - RNA, 19 nt, Artificial Sequence
  Description of Artificial Sequence: Synthetic oligonucleotide
agauggcaguccucgccau

SEQ ID NO: 2322686 - RNA, 19 nt, Artificial Sequence
  Description of Artificial Sequence: Synthetic oligonucleotide
cuccuuuuaggggcuuaac

SEQ ID NO: 2322687 - RNA, 19 nt, Artificial Sequence
  Description of Artificial Sequence: Synthetic oligonucleotide
cgccaucuugauauuuugg

SEQ ID NO: 2322688 - RNA, 19 nt, Artificial Sequence
  Description of Artificial Sequence: Synthetic oligonucleotide
guucuacuaucggaguaaa

SEQ ID NO: 2322689 - RNA, 19 nt, Artificial Sequence
  Description of Artificial Sequence: Synthetic oligonucleotide
ugacgggaguaaagccguc

SEQ ID NO: 2322690 - RNA, 19 nt, Artificial Sequence
  Description of Artificial Sequence: Synthetic oligonucleotide
ggauuuccuaggaugaggu

SEQ ID NO: 2322691 - RNA, 19 nt, Artificial Sequence
  Description of Artificial Sequence: Synthetic oligonucleotide
gguccgcugaucugcuggc

SEQ ID NO: 2322692 - RNA, 19 nt, Artificial Sequence
  Description of Artificial Sequence: Synthetic oligonucleotide
gacucuaggaagaggucau

SEQ ID NO: 2322693 - RNA, 19 nt, Artificial Sequence
  Description of Artificial Sequence: Synthetic oligonucleotide
cugcuaaaacaauccgugu

SEQ ID NO: 2322694 - RNA, 19 nt, Artificial Sequence
  Description of Artificial Sequence: Synthetic oligonucleotide
cguguaucuguucgcgggg

SEQ ID NO: 2322695 - RNA, 19 nt, Artificial Sequence
  Description of Artificial Sequence: Synthetic oligonucleotide
cagucaggagccgcucgcc

SEQ ID NO: 2322696 - RNA, 19 nt, Artificial Sequence
  Description of Artificial Sequence: Synthetic oligonucleotide
ggucgaggggaaucagaac

SEQ ID NO: 2322697 - RNA, 19 nt, Artificial Sequence
  Description of Artificial Sequence: Synthetic oligonucleotide
gggagugcaaguccuguua

SEQ ID NO: 2322698 - RNA, 19 nt, Artificial Sequence
  Description of Artificial Sequence: Synthetic oligonucleotide
guguccaugcggcuggcgu

SEQ ID NO: 2322699 - RNA, 19 nt, Artificial Sequence
  Description of Artificial Sequence: Synthetic oligonucleotide
gaugggccucuucgccggc

SEQ ID NO: 2322700 - RNA, 19 nt, Artificial Sequence
  Description of Artificial Sequence: Synthetic oligonucleotide
gaaucagaaccgguccgcu

SEQ ID NO: 2322701 - RNA, 19 nt, Artificial Sequence
  Description of Artificial Sequence: Synthetic oligonucleotide
ggcaguccucgccaucuug

SEQ ID NO: 2322702 - RNA, 19 nt, Artificial Sequence
  Description of Artificial Sequence: Synthetic oligonucleotide
cugauaagggcaagugcau

SEQ ID NO: 2322703 - RNA, 19 nt, Artificial Sequence
  Description of Artificial Sequence: Synthetic oligonucleotide
uaggggcuuaacgucgguu

SEQ ID NO: 2322704 - RNA, 19 nt, Artificial Sequence
  Description of Artificial Sequence: Synthetic oligonucleotide
uccguguccgugucacauu

SEQ ID NO: 2322705 - RNA, 19 nt, Artificial Sequence
  Description of Artificial Sequence: Synthetic oligonucleotide
cgagaaugugaacuuucac

SEQ ID NO: 2322706 - RNA, 19 nt, Artificial Sequence
  Description of Artificial Sequence: Synthetic oligonucleotide
gauuuccuaggaugagguu

SEQ ID NO: 2322707 - RNA, 19 nt, Artificial Sequence
  Description of Artificial Sequence: Synthetic oligonucleotide
gugacgggaguaaagccgu

SEQ ID NO: 2322708 - RNA, 19 nt, Artificial Sequence
  Description of Artificial Sequence: Synthetic oligonucleotide
cggauauugccauaaaccu

SEQ ID NO: 2322709 - RNA, 19 nt, Artificial Sequence
  Description of Artificial Sequence: Synthetic oligonucleotide
agggucgaggggaaucaga

SEQ ID NO: 2322710 - RNA, 19 nt, Artificial Sequence
  Description of Artificial Sequence: Synthetic oligonucleotide
aucuguucgcggggaccgg

SEQ ID NO: 2322711 - RNA, 19 nt, Artificial Sequence
  Description of Artificial Sequence: Synthetic oligonucleotide
auugcccuugacaggugau

SEQ ID NO: 2322712 - RNA, 19 nt, Artificial Sequence
  Description of Artificial Sequence: Synthetic oligonucleotide
ccgugucacauucucuaug

SEQ ID NO: 2322713 - RNA, 19 nt, Artificial Sequence
  Description of Artificial Sequence: Synthetic oligonucleotide
cgucgguuauuucaaaaga

SEQ ID NO: 2322714 - RNA, 19 nt, Artificial Sequence
  Description of Artificial Sequence: Synthetic oligonucleotide
caagugcauccuccaccug

SEQ ID NO: 2322715 - RNA, 19 nt, Artificial Sequence
  Description of Artificial Sequence: Synthetic oligonucleotide
gagccgagaaugugaacuu

SEQ ID NO: 2322716 - RNA, 19 nt, Artificial Sequence
  Description of Artificial Sequence: Synthetic oligonucleotide
acuucagguuaaagcguau

SEQ ID NO: 2322717 - RNA, 19 nt, Artificial Sequence
  Description of Artificial Sequence: Synthetic oligonucleotide
ccgccugucgcuucuucgc

SEQ ID NO: 2322718 - RNA, 19 nt, Artificial Sequence
  Description of Artificial Sequence: Synthetic oligonucleotide
gccgagaaugugaacuuuc

SEQ ID NO: 2322719 - RNA, 19 nt, Artificial Sequence
  Description of Artificial Sequence: Synthetic oligonucleotide
ccugucccgccgcugacag

SEQ ID NO: 2322720 - RNA, 19 nt, Artificial Sequence
  Description of Artificial Sequence: Synthetic oligonucleotide
gguugcagauggcaguccu

SEQ ID NO: 2322721 - RNA, 19 nt, Artificial Sequence
  Description of Artificial Sequence: Synthetic oligonucleotide
uuccuaggaugagguugca

SEQ ID NO: 2322722 - RNA, 19 nt, Artificial Sequence
  Description of Artificial Sequence: Synthetic oligonucleotide
caaaaucggcugcuuuugu

SEQ ID NO: 2322723 - RNA, 19 nt, Artificial Sequence
  Description of Artificial Sequence: Synthetic oligonucleotide
cugcuuuugucagggaacu

SEQ ID NO: 2322724 - RNA, 19 nt, Artificial Sequence
  Description of Artificial Sequence: Synthetic oligonucleotide
gcuucuucgcccgccggcc

SEQ ID NO: 2322725 - RNA, 19 nt, Artificial Sequence
  Description of Artificial Sequence: Synthetic oligonucleotide
cgguccgcugaucugcugg

SEQ ID NO: 2322726 - RNA, 19 nt, Artificial Sequence
  Description of Artificial Sequence: Synthetic oligonucleotide
gcugaucugcuggccacag

SEQ ID NO: 2322727 - RNA, 19 nt, Artificial Sequence
  Description of Artificial Sequence: Synthetic oligonucleotide
cuaucggaguaaauaucuu

SEQ ID NO: 2322728 - RNA, 19 nt, Artificial Sequence
  Description of Artificial Sequence: Synthetic oligonucleotide
gccugucgcuucuucgccc

SEQ ID NO: 2322729 - RNA, 19 nt, Artificial Sequence
  Description of Artificial Sequence: Synthetic oligonucleotide
agccgagaaugugaacuuu

SEQ ID NO: 2322730 - RNA, 19 nt, Artificial Sequence
  Description of Artificial Sequence: Synthetic oligonucleotide
ccuugacuucagguuaaag

SEQ ID NO: 2322731 - RNA, 19 nt, Artificial Sequence
  Description of Artificial Sequence: Synthetic oligonucleotide
cccaugguuuucugugaac

SEQ ID NO: 2322732 - RNA, 19 nt, Artificial Sequence
  Description of Artificial Sequence: Synthetic oligonucleotide
ccguguccgugucacauuc

SEQ ID NO: 2322733 - RNA, 19 nt, Artificial Sequence
  Description of Artificial Sequence: Synthetic oligonucleotide
cgagaacaaaggcuuucac

SEQ ID NO: 2322734 - RNA, 19 nt, Artificial Sequence
  Description of Artificial Sequence: Synthetic oligonucleotide
cccagucaggagccgcucg

SEQ ID NO: 2322735 - RNA, 19 nt, Artificial Sequence
  Description of Artificial Sequence: Synthetic oligonucleotide
ucgcccgagagcggaggga

SEQ ID NO: 2322736 - RNA, 19 nt, Artificial Sequence
  Description of Artificial Sequence: Synthetic oligonucleotide
ggcuuucacaaaaucggcu

SEQ ID NO: 2322737 - RNA, 19 nt, Artificial Sequence
  Description of Artificial Sequence: Synthetic oligonucleotide
cugucgcuucuucgcccgc

SEQ ID NO: 2322738 - RNA, 19 nt, Artificial Sequence
  Description of Artificial Sequence: Synthetic oligonucleotide
gcaguccucgccaucuuga

SEQ ID NO: 2322739 - RNA, 19 nt, Artificial Sequence
  Description of Artificial Sequence: Synthetic oligonucleotide
gaggggaaucagaaccggu

SEQ ID NO: 2322740 - RNA, 19 nt, Artificial Sequence
  Description of Artificial Sequence: Synthetic oligonucleotide
cuggcgucuccguccuguc

SEQ ID NO: 2322741 - RNA, 19 nt, Artificial Sequence
  Description of Artificial Sequence: Synthetic oligonucleotide
ucuucgccggcagggccuc

SEQ ID NO: 2322742 - RNA, 19 nt, Artificial Sequence
  Description of Artificial Sequence: Synthetic oligonucleotide
ggauauugccauaaaccuu

SEQ ID NO: 2322743 - RNA, 19 nt, Artificial Sequence
  Description of Artificial Sequence: Synthetic oligonucleotide
gcuuaacgucgguuauuuc

SEQ ID NO: 2322744 - RNA, 19 nt, Artificial Sequence
  Description of Artificial Sequence: Synthetic oligonucleotide
ucccagucaggagccgcuc

SEQ ID NO: 2322745 - RNA, 19 nt, Artificial Sequence
  Description of Artificial Sequence: Synthetic oligonucleotide
gccacagcucggauauugc

SEQ ID NO: 2322746 - RNA, 19 nt, Artificial Sequence
  Description of Artificial Sequence: Synthetic oligonucleotide
gcaguagguggcugggaaa

SEQ ID NO: 2322747 - RNA, 19 nt, Artificial Sequence
  Description of Artificial Sequence: Synthetic oligonucleotide
guccgcugaucugcuggcc

SEQ ID NO: 2322748 - RNA, 19 nt, Artificial Sequence
  Description of Artificial Sequence: Synthetic oligonucleotide
cuguucgcggggaccggga

SEQ ID NO: 2322749 - RNA, 19 nt, Artificial Sequence
  Description of Artificial Sequence: Synthetic oligonucleotide
uccucgccaucuugauauu

SEQ ID NO: 2322750 - RNA, 19 nt, Artificial Sequence
  Description of Artificial Sequence: Synthetic oligonucleotide
gcgucuccguccugucccg

SEQ ID NO: 2322751 - RNA, 19 nt, Artificial Sequence
  Description of Artificial Sequence: Synthetic oligonucleotide
uggcaguccucgccaucuu

SEQ ID NO: 2322752 - RNA, 19 nt, Artificial Sequence
  Description of Artificial Sequence: Synthetic oligonucleotide
cugucccgccgcugacagc

SEQ ID NO: 2322753 - RNA, 19 nt, Artificial Sequence
  Description of Artificial Sequence: Synthetic oligonucleotide
cuugacaggugaucuccuu

SEQ ID NO: 2322754 - RNA, 19 nt, Artificial Sequence
  Description of Artificial Sequence: Synthetic oligonucleotide
cucuucgccggcagggccu

SEQ ID NO: 2322755 - RNA, 19 nt, Artificial Sequence
  Description of Artificial Sequence: Synthetic oligonucleotide
caguagguggcugggaaau

SEQ ID NO: 2322756 - RNA, 19 nt, Artificial Sequence
  Description of Artificial Sequence: Synthetic oligonucleotide
ggcugggaaaucuucccau

SEQ ID NO: 2322757 - RNA, 19 nt, Artificial Sequence
  Description of Artificial Sequence: Synthetic oligonucleotide
cuccgccugucgcuucuuc

SEQ ID NO: 2322758 - RNA, 19 nt, Artificial Sequence
  Description of Artificial Sequence: Synthetic oligonucleotide
augcggcuggcgucuccgu

SEQ ID NO: 2322759 - RNA, 19 nt, Artificial Sequence
  Description of Artificial Sequence: Synthetic oligonucleotide
cccgagaacaaaggcuuuc

SEQ ID NO: 2322760 - RNA, 19 nt, Artificial Sequence
  Description of Artificial Sequence: Synthetic oligonucleotide
gcguaucugaagucccaaa

SEQ ID NO: 2322761 - RNA, 19 nt, Artificial Sequence
  Description of Artificial Sequence: Synthetic oligonucleotide
cgaggggaaucagaaccgg

SEQ ID NO: 2322762 - RNA, 19 nt, Artificial Sequence
  Description of Artificial Sequence: Synthetic oligonucleotide
ccgcugaucugcuggccac

SEQ ID NO: 2322763 - RNA, 19 nt, Artificial Sequence
  Description of Artificial Sequence: Synthetic oligonucleotide
cacauucucuaugguaaau

SEQ ID NO: 2322764 - RNA, 19 nt, Artificial Sequence
  Description of Artificial Sequence: Synthetic oligonucleotide
ggcuuaacgucgguuauuu

SEQ ID NO: 2322765 - RNA, 19 nt, Artificial Sequence
  Description of Artificial Sequence: Synthetic oligonucleotide
ccgagaacaaaggcuuuca

SEQ ID NO: 2322766 - RNA, 19 nt, Artificial Sequence
  Description of Artificial Sequence: Synthetic oligonucleotide
gcccuugacaggugaucuc

SEQ ID NO: 2322767 - RNA, 19 nt, Artificial Sequence
  Description of Artificial Sequence: Synthetic oligonucleotide
gcucgcccgagagcggagg

SEQ ID NO: 2322768 - RNA, 19 nt, Artificial Sequence
  Description of Artificial Sequence: Synthetic oligonucleotide
augggccucuucgccggca

SEQ ID NO: 2322769 - RNA, 19 nt, Artificial Sequence
  Description of Artificial Sequence: Synthetic oligonucleotide
accgguccgcugaucugcu

SEQ ID NO: 2322770 - RNA, 19 nt, Artificial Sequence
  Description of Artificial Sequence: Synthetic oligonucleotide
cccucugugugugacggga

SEQ ID NO: 2322771 - RNA, 19 nt, Artificial Sequence
  Description of Artificial Sequence: Synthetic oligonucleotide
cagaaccgguccgcugauc

SEQ ID NO: 2322772 - RNA, 19 nt, Artificial Sequence
  Description of Artificial Sequence: Synthetic oligonucleotide
cccgguguucugcguuucc

SEQ ID NO: 2322773 - RNA, 19 nt, Artificial Sequence
  Description of Artificial Sequence: Synthetic oligonucleotide
gcucggauauugccauaaa

SEQ ID NO: 2322774 - RNA, 19 nt, Artificial Sequence
  Description of Artificial Sequence: Synthetic oligonucleotide
gugcauccuccaccugaaa

SEQ ID NO: 2322775 - RNA, 19 nt, Artificial Sequence
  Description of Artificial Sequence: Synthetic oligonucleotide
acccgagaacaaaggcuuu

SEQ ID NO: 2322776 - RNA, 19 nt, Artificial Sequence
  Description of Artificial Sequence: Synthetic oligonucleotide
cugacauccuuggugucuu

SEQ ID NO: 2322777 - RNA, 19 nt, Artificial Sequence
  Description of Artificial Sequence: Synthetic oligonucleotide
ggggcuuaacgucgguuau

SEQ ID NO: 2322778 - RNA, 19 nt, Artificial Sequence
  Description of Artificial Sequence: Synthetic oligonucleotide
cgccugucgcuucuucgcc

SEQ ID NO: 2322779 - RNA, 19 nt, Artificial Sequence
  Description of Artificial Sequence: Synthetic oligonucleotide
gcggagggaagaugggccu

SEQ ID NO: 2322780 - RNA, 19 nt, Artificial Sequence
  Description of Artificial Sequence: Synthetic oligonucleotide
caguccucgccaucuugau

SEQ ID NO: 2322781 - RNA, 19 nt, Artificial Sequence
  Description of Artificial Sequence: Synthetic oligonucleotide
uccaugcggcuggcgucuc

SEQ ID NO: 2322782 - RNA, 19 nt, Artificial Sequence
  Description of Artificial Sequence: Synthetic oligonucleotide
guucgcggggaccgggauu

SEQ ID NO: 2322783 - RNA, 19 nt, Artificial Sequence
  Description of Artificial Sequence: Synthetic oligonucleotide
gcaaguccuguuaaaccuu

SEQ ID NO: 2322784 - RNA, 19 nt, Artificial Sequence
  Description of Artificial Sequence: Synthetic oligonucleotide
gcuggcgucuccguccugu

SEQ ID NO: 2322785 - RNA, 19 nt, Artificial Sequence
  Description of Artificial Sequence: Synthetic oligonucleotide
gcguuuccaucucggccaa

SEQ ID NO: 2322786 - RNA, 19 nt, Artificial Sequence
  Description of Artificial Sequence: Synthetic oligonucleotide
ccuuggugucuuugcaagu

SEQ ID NO: 2322787 - RNA, 19 nt, Artificial Sequence
  Description of Artificial Sequence: Synthetic oligonucleotide
ccgguguucugcguuucca

SEQ ID NO: 2322788 - RNA, 19 nt, Artificial Sequence
  Description of Artificial Sequence: Synthetic oligonucleotide
cuucgccggcagggccucc

SEQ ID NO: 2322789 - RNA, 19 nt, Artificial Sequence
  Description of Artificial Sequence: Synthetic oligonucleotide
ccuugacaggugaucuccu

SEQ ID NO: 2322790 - RNA, 19 nt, Artificial Sequence
  Description of Artificial Sequence: Synthetic oligonucleotide
ggggagugcaaguccuguu

SEQ ID NO: 2322791 - RNA, 19 nt, Artificial Sequence
  Description of Artificial Sequence: Synthetic oligonucleotide
gcccgagagcggagggaag

SEQ ID NO: 2322792 - RNA, 19 nt, Artificial Sequence
  Description of Artificial Sequence: Synthetic oligonucleotide
cgcugacagcugcuccgcc

SEQ ID NO: 2322793 - RNA, 19 nt, Artificial Sequence
  Description of Artificial Sequence: Synthetic oligonucleotide
gucccgccgcugacagcug

SEQ ID NO: 2322794 - RNA, 19 nt, Artificial Sequence
  Description of Artificial Sequence: Synthetic oligonucleotide
uggccacagcucggauauu

SEQ ID NO: 2322795 - RNA, 19 nt, Artificial Sequence
  Description of Artificial Sequence: Synthetic oligonucleotide
cguguccaugcggcuggcg

SEQ ID NO: 2322796 - RNA, 19 nt, Artificial Sequence
  Description of Artificial Sequence: Synthetic oligonucleotide
ccgguccgcugaucugcug

SEQ ID NO: 2322797 - RNA, 19 nt, Artificial Sequence
  Description of Artificial Sequence: Synthetic oligonucleotide
cucaagggucgaggggaau

SEQ ID NO: 2322798 - RNA, 19 nt, Artificial Sequence
  Description of Artificial Sequence: Synthetic oligonucleotide
guccuccgccccgguguuc

SEQ ID NO: 2322799 - RNA, 19 nt, Artificial Sequence
  Description of Artificial Sequence: Synthetic oligonucleotide
gggcuuaacgucgguuauu

SEQ ID NO: 2322800 - RNA, 19 nt, Artificial Sequence
  Description of Artificial Sequence: Synthetic oligonucleotide
ggcuggcgucuccguccug

SEQ ID NO: 2322801 - RNA, 19 nt, Artificial Sequence
  Description of Artificial Sequence: Synthetic oligonucleotide
ucgcggggaccgggauuuu

SEQ ID NO: 2322802 - RNA, 19 nt, Artificial Sequence
  Description of Artificial Sequence: Synthetic oligonucleotide
ccgccgcugacagcugcuc

SEQ ID NO: 2322803 - RNA, 19 nt, Artificial Sequence
  Description of Artificial Sequence: Synthetic oligonucleotide
ccuccgccccgguguucug

SEQ ID NO: 2322804 - RNA, 19 nt, Artificial Sequence
  Description of Artificial Sequence: Synthetic oligonucleotide
cgucuccguccugucccgc

SEQ ID NO: 2322805 - RNA, 19 nt, Artificial Sequence
  Description of Artificial Sequence: Synthetic oligonucleotide
cgcccgagagcggagggaa

SEQ ID NO: 2322806 - RNA, 19 nt, Artificial Sequence
  Description of Artificial Sequence: Synthetic oligonucleotide
gccccgguguucugcguuu

SEQ ID NO: 2322807 - RNA, 19 nt, Artificial Sequence
  Description of Artificial Sequence: Synthetic oligonucleotide
cgcugaucugcuggccaca

SEQ ID NO: 2322808 - RNA, 19 nt, Artificial Sequence
  Description of Artificial Sequence: Synthetic oligonucleotide
cguguccgugucacauucu

SEQ ID NO: 2322809 - RNA, 19 nt, Artificial Sequence
  Description of Artificial Sequence: Synthetic oligonucleotide
ccucgccaucuugauauuu

SEQ ID NO: 2322810 - RNA, 19 nt, Artificial Sequence
  Description of Artificial Sequence: Synthetic oligonucleotide
gcuccgccugucgcuucuu

SEQ ID NO: 2322811 - RNA, 19 nt, Artificial Sequence
  Description of Artificial Sequence: Synthetic oligonucleotide
ccgccccgguguucugcgu

SEQ ID NO: 2322812 - RNA, 19 nt, Artificial Sequence
  Description of Artificial Sequence: Synthetic oligonucleotide
aauaguagcacacaugucu

SEQ ID NO: 2322813 - RNA, 19 nt, Artificial Sequence
  Description of Artificial Sequence: Synthetic oligonucleotide
aauagaaguccccaacgcc

SEQ ID NO: 2322814 - RNA, 19 nt, Artificial Sequence
  Description of Artificial Sequence: Synthetic oligonucleotide
aacggugugauccauauug

SEQ ID NO: 2322815 - RNA, 19 nt, Artificial Sequence
  Description of Artificial Sequence: Synthetic oligonucleotide
acuguuuugacaucugggc

SEQ ID NO: 2322816 - RNA, 19 nt, Artificial Sequence
  Description of Artificial Sequence: Synthetic oligonucleotide
aauucuucuagguuggucu

SEQ ID NO: 2322817 - RNA, 19 nt, Artificial Sequence
  Description of Artificial Sequence: Synthetic oligonucleotide
auaauagaaguccccaacg

SEQ ID NO: 2322818 - RNA, 19 nt, Artificial Sequence
  Description of Artificial Sequence: Synthetic oligonucleotide
auuccgauguuucagggcg

SEQ ID NO: 2322819 - RNA, 19 nt, Artificial Sequence
  Description of Artificial Sequence: Synthetic oligonucleotide
ucuagguuggucuuaaaca

SEQ ID NO: 2322820 - RNA, 19 nt, Artificial Sequence
  Description of Artificial Sequence: Synthetic oligonucleotide
auaggugccgcccacaggg

SEQ ID NO: 2322821 - RNA, 19 nt, Artificial Sequence
  Description of Artificial Sequence: Synthetic oligonucleotide
aaugagauaggugccgccc

SEQ ID NO: 2322822 - RNA, 19 nt, Artificial Sequence
  Description of Artificial Sequence: Synthetic oligonucleotide
aguuaucagaccuccauuc

SEQ ID NO: 2322823 - RNA, 19 nt, Artificial Sequence
  Description of Artificial Sequence: Synthetic oligonucleotide
uuaucagaccuccauuccg

SEQ ID NO: 2322824 - RNA, 19 nt, Artificial Sequence
  Description of Artificial Sequence: Synthetic oligonucleotide
uuggucuuaaacaugucca

SEQ ID NO: 2322825 - RNA, 19 nt, Artificial Sequence
  Description of Artificial Sequence: Synthetic oligonucleotide
aauaaucuggacacccagc

SEQ ID NO: 2322826 - RNA, 19 nt, Artificial Sequence
  Description of Artificial Sequence: Synthetic oligonucleotide
uuaagacuggcuuugauuu

SEQ ID NO: 2322827 - RNA, 19 nt, Artificial Sequence
  Description of Artificial Sequence: Synthetic oligonucleotide
acuuuaucaagggaaggcc

SEQ ID NO: 2322828 - RNA, 19 nt, Artificial Sequence
  Description of Artificial Sequence: Synthetic oligonucleotide
agaggauccaccccaauag

SEQ ID NO: 2322829 - RNA, 19 nt, Artificial Sequence
  Description of Artificial Sequence: Synthetic oligonucleotide
ugacaucugggccagcugg

SEQ ID NO: 2322830 - RNA, 19 nt, Artificial Sequence
  Description of Artificial Sequence: Synthetic oligonucleotide
uaauagaaguccccaacgc

SEQ ID NO: 2322831 - RNA, 19 nt, Artificial Sequence
  Description of Artificial Sequence: Synthetic oligonucleotide
uuggcugacguccugagca

SEQ ID NO: 2322832 - RNA, 19 nt, Artificial Sequence
  Description of Artificial Sequence: Synthetic oligonucleotide
uguccaacuguuuugacau

SEQ ID NO: 2322833 - RNA, 19 nt, Artificial Sequence
  Description of Artificial Sequence: Synthetic oligonucleotide
uuauacuuggccucggcga

SEQ ID NO: 2322834 - RNA, 19 nt, Artificial Sequence
  Description of Artificial Sequence: Synthetic oligonucleotide
uucaauaaucuggacaccc

SEQ ID NO: 2322835 - RNA, 19 nt, Artificial Sequence
  Description of Artificial Sequence: Synthetic oligonucleotide
aacuguuuugacaucuggg

SEQ ID NO: 2322836 - RNA, 19 nt, Artificial Sequence
  Description of Artificial Sequence: Synthetic oligonucleotide
aaacuugccccuuccuuuc

SEQ ID NO: 2322837 - RNA, 19 nt, Artificial Sequence
  Description of Artificial Sequence: Synthetic oligonucleotide
uccauauugagcucagcug

SEQ ID NO: 2322838 - RNA, 19 nt, Artificial Sequence
  Description of Artificial Sequence: Synthetic oligonucleotide
agucccucguuccuuauac

SEQ ID NO: 2322839 - RNA, 19 nt, Artificial Sequence
  Description of Artificial Sequence: Synthetic oligonucleotide
auaaucuggacacccagcu

SEQ ID NO: 2322840 - RNA, 19 nt, Artificial Sequence
  Description of Artificial Sequence: Synthetic oligonucleotide
uucuagguuggucuuaaac

SEQ ID NO: 2322841 - RNA, 19 nt, Artificial Sequence
  Description of Artificial Sequence: Synthetic oligonucleotide
cauaauagaaguccccaac

SEQ ID NO: 2322842 - RNA, 19 nt, Artificial Sequence
  Description of Artificial Sequence: Synthetic oligonucleotide
ugugaagagagcuggcagc

SEQ ID NO: 2322843 - RNA, 19 nt, Artificial Sequence
  Description of Artificial Sequence: Synthetic oligonucleotide
uccugagcaaacuugcccc

SEQ ID NO: 2322844 - RNA, 19 nt, Artificial Sequence
  Description of Artificial Sequence: Synthetic oligonucleotide
auugagcucagcuggaaca

SEQ ID NO: 2322845 - RNA, 19 nt, Artificial Sequence
  Description of Artificial Sequence: Synthetic oligonucleotide
uggccuacugcuauguacc

SEQ ID NO: 2322846 - RNA, 19 nt, Artificial Sequence
  Description of Artificial Sequence: Synthetic oligonucleotide
aacgcccagcaucucagac

SEQ ID NO: 2322847 - RNA, 19 nt, Artificial Sequence
  Description of Artificial Sequence: Synthetic oligonucleotide
cuuauacuuggccucggcg

SEQ ID NO: 2322848 - RNA, 19 nt, Artificial Sequence
  Description of Artificial Sequence: Synthetic oligonucleotide
auccauauugagcucagcu

SEQ ID NO: 2322849 - RNA, 19 nt, Artificial Sequence
  Description of Artificial Sequence: Synthetic oligonucleotide
uccauuccgauguuucagg

SEQ ID NO: 2322850 - RNA, 19 nt, Artificial Sequence
  Description of Artificial Sequence: Synthetic oligonucleotide
gaacucaggguucuuccgg

SEQ ID NO: 2322851 - RNA, 19 nt, Artificial Sequence
  Description of Artificial Sequence: Synthetic oligonucleotide
uuuaucaagggaaggccuc

SEQ ID NO: 2322852 - RNA, 19 nt, Artificial Sequence
  Description of Artificial Sequence: Synthetic oligonucleotide
uaucagaccuccauuccga

SEQ ID NO: 2322853 - RNA, 19 nt, Artificial Sequence
  Description of Artificial Sequence: Synthetic oligonucleotide
agcucauaauagaaguccc

SEQ ID NO: 2322854 - RNA, 19 nt, Artificial Sequence
  Description of Artificial Sequence: Synthetic oligonucleotide
ucacugacagucacguacc

SEQ ID NO: 2322855 - RNA, 19 nt, Artificial Sequence
  Description of Artificial Sequence: Synthetic oligonucleotide
aguagcacacaugucuugg

SEQ ID NO: 2322856 - RNA, 19 nt, Artificial Sequence
  Description of Artificial Sequence: Synthetic oligonucleotide
caauaaucuggacacccag

SEQ ID NO: 2322857 - RNA, 19 nt, Artificial Sequence
  Description of Artificial Sequence: Synthetic oligonucleotide
ugauggaguuccuccagag

SEQ ID NO: 2322858 - RNA, 19 nt, Artificial Sequence
  Description of Artificial Sequence: Synthetic oligonucleotide
aacacaacggugugaucca

SEQ ID NO: 2322859 - RNA, 19 nt, Artificial Sequence
  Description of Artificial Sequence: Synthetic oligonucleotide
agaguuaucagaccuccau

SEQ ID NO: 2322860 - RNA, 19 nt, Artificial Sequence
  Description of Artificial Sequence: Synthetic oligonucleotide
ugauuucacugacagucac

SEQ ID NO: 2322861 - RNA, 19 nt, Artificial Sequence
  Description of Artificial Sequence: Synthetic oligonucleotide
aaacccuuuuccagaggcc

SEQ ID NO: 2322862 - RNA, 19 nt, Artificial Sequence
  Description of Artificial Sequence: Synthetic oligonucleotide
ucugaucaggucgucuugg

SEQ ID NO: 2322863 - RNA, 19 nt, Artificial Sequence
  Description of Artificial Sequence: Synthetic oligonucleotide
cacuuuaucaagggaaggc

SEQ ID NO: 2322864 - RNA, 19 nt, Artificial Sequence
  Description of Artificial Sequence: Synthetic oligonucleotide
gauuucacugacagucacg

SEQ ID NO: 2322865 - RNA, 19 nt, Artificial Sequence
  Description of Artificial Sequence: Synthetic oligonucleotide
ucggcgagcuucuucuugg

SEQ ID NO: 2322866 - RNA, 19 nt, Artificial Sequence
  Description of Artificial Sequence: Synthetic oligonucleotide
agugggcuuccccuggagc

SEQ ID NO: 2322867 - RNA, 19 nt, Artificial Sequence
  Description of Artificial Sequence: Synthetic oligonucleotide
guuaucagaccuccauucc

SEQ ID NO: 2322868 - RNA, 19 nt, Artificial Sequence
  Description of Artificial Sequence: Synthetic oligonucleotide
agaccaaaacccuuuucca

SEQ ID NO: 2322869 - RNA, 19 nt, Artificial Sequence
  Description of Artificial Sequence: Synthetic oligonucleotide
gugugauccauauugagcu

SEQ ID NO: 2322870 - RNA, 19 nt, Artificial Sequence
  Description of Artificial Sequence: Synthetic oligonucleotide
uuggccuacugcuauguac

SEQ ID NO: 2322871 - RNA, 19 nt, Artificial Sequence
  Description of Artificial Sequence: Synthetic oligonucleotide
gguguuccaacacuugccg

SEQ ID NO: 2322872 - RNA, 19 nt, Artificial Sequence
  Description of Artificial Sequence: Synthetic oligonucleotide
ugcugagaucuccugggag

SEQ ID NO: 2322873 - RNA, 19 nt, Artificial Sequence
  Description of Artificial Sequence: Synthetic oligonucleotide
caacuguuuugacaucugg

SEQ ID NO: 2322874 - RNA, 19 nt, Artificial Sequence
  Description of Artificial Sequence: Synthetic oligonucleotide
gauccaccccaauaguagc

SEQ ID NO: 2322875 - RNA, 19 nt, Artificial Sequence
  Description of Artificial Sequence: Synthetic oligonucleotide
ucguuccuuauacuuggcc

SEQ ID NO: 2322876 - RNA, 19 nt, Artificial Sequence
  Description of Artificial Sequence: Synthetic oligonucleotide
auguccaacuguuuugaca

SEQ ID NO: 2322877 - RNA, 19 nt, Artificial Sequence
  Description of Artificial Sequence: Synthetic oligonucleotide
ugauccauauugagcucag

SEQ ID NO: 2322878 - RNA, 19 nt, Artificial Sequence
  Description of Artificial Sequence: Synthetic oligonucleotide
agguguuccaacacuugcc

SEQ ID NO: 2322879 - RNA, 19 nt, Artificial Sequence
  Description of Artificial Sequence: Synthetic oligonucleotide
caugucuuggaacuggaca

SEQ ID NO: 2322880 - RNA, 19 nt, Artificial Sequence
  Description of Artificial Sequence: Synthetic oligonucleotide
aagacagucccucguuccu

SEQ ID NO: 2322881 - RNA, 19 nt, Artificial Sequence
  Description of Artificial Sequence: Synthetic oligonucleotide
uccaacuguuuugacaucu

SEQ ID NO: 2322882 - RNA, 19 nt, Artificial Sequence
  Description of Artificial Sequence: Synthetic oligonucleotide
ugggaguagagaucuguga

SEQ ID NO: 2322883 - RNA, 19 nt, Artificial Sequence
  Description of Artificial Sequence: Synthetic oligonucleotide
agugcccagugcuuucagc

SEQ ID NO: 2322884 - RNA, 19 nt, Artificial Sequence
  Description of Artificial Sequence: Synthetic oligonucleotide
aacucaggguucuuccgga

SEQ ID NO: 2322885 - RNA, 19 nt, Artificial Sequence
  Description of Artificial Sequence: Synthetic oligonucleotide
cugaaugagauaggugccg

SEQ ID NO: 2322886 - RNA, 19 nt, Artificial Sequence
  Description of Artificial Sequence: Synthetic oligonucleotide
cugcugauggaguuccucc

SEQ ID NO: 2322887 - RNA, 19 nt, Artificial Sequence
  Description of Artificial Sequence: Synthetic oligonucleotide
gaguagagaucugugaaga

SEQ ID NO: 2322888 - RNA, 19 nt, Artificial Sequence
  Description of Artificial Sequence: Synthetic oligonucleotide
ugaaugagauaggugccgc

SEQ ID NO: 2322889 - RNA, 19 nt, Artificial Sequence
  Description of Artificial Sequence: Synthetic oligonucleotide
cagguuuguucacaggcag

SEQ ID NO: 2322890 - RNA, 19 nt, Artificial Sequence
  Description of Artificial Sequence: Synthetic oligonucleotide
ucccacuuaagacuggcuu

SEQ ID NO: 2322891 - RNA, 19 nt, Artificial Sequence
  Description of Artificial Sequence: Synthetic oligonucleotide
uccagaggccagaggaucc

SEQ ID NO: 2322892 - RNA, 19 nt, Artificial Sequence
  Description of Artificial Sequence: Synthetic oligonucleotide
uauguaccccuccacacuu

SEQ ID NO: 2322893 - RNA, 19 nt, Artificial Sequence
  Description of Artificial Sequence: Synthetic oligonucleotide
aacaccugcugauggaguu

SEQ ID NO: 2322894 - RNA, 19 nt, Artificial Sequence
  Description of Artificial Sequence: Synthetic oligonucleotide
acguccugagcaaacuugc

SEQ ID NO: 2322895 - RNA, 19 nt, Artificial Sequence
  Description of Artificial Sequence: Synthetic oligonucleotide
cugugaagagagcuggcag

SEQ ID NO: 2322896 - RNA, 19 nt, Artificial Sequence
  Description of Artificial Sequence: Synthetic oligonucleotide
cauuccgauguuucagggc

SEQ ID NO: 2322897 - RNA, 19 nt, Artificial Sequence
  Description of Artificial Sequence: Synthetic oligonucleotide
gaaugagauaggugccgcc

SEQ ID NO: 2322898 - RNA, 19 nt, Artificial Sequence
  Description of Artificial Sequence: Synthetic oligonucleotide
guuccuuauacuuggccuc

SEQ ID NO: 2322899 - RNA, 19 nt, Artificial Sequence
  Description of Artificial Sequence: Synthetic oligonucleotide
cagguguuccaacacuugc

SEQ ID NO: 2322900 - RNA, 19 nt, Artificial Sequence
  Description of Artificial Sequence: Synthetic oligonucleotide
gauggcgccagcucccacc

SEQ ID NO: 2322901 - RNA, 19 nt, Artificial Sequence
  Description of Artificial Sequence: Synthetic oligonucleotide
ugcaacacaacggugugau

SEQ ID NO: 2322902 - RNA, 19 nt, Artificial Sequence
  Description of Artificial Sequence: Synthetic oligonucleotide
acaacggugugauccauau

SEQ ID NO: 2322903 - RNA, 19 nt, Artificial Sequence
  Description of Artificial Sequence: Synthetic oligonucleotide
agauaggugccgcccacag

SEQ ID NO: 2322904 - RNA, 19 nt, Artificial Sequence
  Description of Artificial Sequence: Synthetic oligonucleotide
gucgucuuggcugacgucc

SEQ ID NO: 2322905 - RNA, 19 nt, Artificial Sequence
  Description of Artificial Sequence: Synthetic oligonucleotide
acacuuuaucaagggaagg

SEQ ID NO: 2322906 - RNA, 19 nt, Artificial Sequence
  Description of Artificial Sequence: Synthetic oligonucleotide
uggucuuaaacauguccaa

SEQ ID NO: 2322907 - RNA, 19 nt, Artificial Sequence
  Description of Artificial Sequence: Synthetic oligonucleotide
gcaucucagaccaaaaccc

SEQ ID NO: 2322908 - RNA, 19 nt, Artificial Sequence
  Description of Artificial Sequence: Synthetic oligonucleotide
gauaggugccgcccacagg

SEQ ID NO: 2322909 - RNA, 19 nt, Artificial Sequence
  Description of Artificial Sequence: Synthetic oligonucleotide
gacguccugagcaaacuug

SEQ ID NO: 2322910 - RNA, 19 nt, Artificial Sequence
  Description of Artificial Sequence: Synthetic oligonucleotide
ucagccaagacagucccuc

SEQ ID NO: 2322911 - RNA, 19 nt, Artificial Sequence
  Description of Artificial Sequence: Synthetic oligonucleotide
acacccagcucauaauaga

SEQ ID NO: 2322912 - RNA, 19 nt, Artificial Sequence
  Description of Artificial Sequence: Synthetic oligonucleotide
gucuuaaacauguccaacu

SEQ ID NO: 2322913 - RNA, 19 nt, Artificial Sequence
  Description of Artificial Sequence: Synthetic oligonucleotide
uaccccuccacacuuuauc

SEQ ID NO: 2322914 - RNA, 19 nt, Artificial Sequence
  Description of Artificial Sequence: Synthetic oligonucleotide
ggugugauccauauugagc

SEQ ID NO: 2322915 - RNA, 19 nt, Artificial Sequence
  Description of Artificial Sequence: Synthetic oligonucleotide
uccagaguuaucagaccuc

SEQ ID NO: 2322916 - RNA, 19 nt, Artificial Sequence
  Description of Artificial Sequence: Synthetic oligonucleotide
uagcagguguuccaacacu

SEQ ID NO: 2322917 - RNA, 19 nt, Artificial Sequence
  Description of Artificial Sequence: Synthetic oligonucleotide
uagcacacaugucuuggaa

SEQ ID NO: 2322918 - RNA, 19 nt, Artificial Sequence
  Description of Artificial Sequence: Synthetic oligonucleotide
agguuggucuuaaacaugu

SEQ ID NO: 2322919 - RNA, 19 nt, Artificial Sequence
  Description of Artificial Sequence: Synthetic oligonucleotide
uacugcuauguaccccucc

SEQ ID NO: 2322920 - RNA, 19 nt, Artificial Sequence
  Description of Artificial Sequence: Synthetic oligonucleotide
uaguagcacacaugucuug

SEQ ID NO: 2322921 - RNA, 19 nt, Artificial Sequence
  Description of Artificial Sequence: Synthetic oligonucleotide
uccccaacgcccagcaucu

SEQ ID NO: 2322922 - RNA, 19 nt, Artificial Sequence
  Description of Artificial Sequence: Synthetic oligonucleotide
uugacaucugggccagcug

SEQ ID NO: 2322923 - RNA, 19 nt, Artificial Sequence
  Description of Artificial Sequence: Synthetic oligonucleotide
ugagcaaacuugccccuuc

SEQ ID NO: 2322924 - RNA, 19 nt, Artificial Sequence
  Description of Artificial Sequence: Synthetic oligonucleotide
ugagauaggugccgcccac

SEQ ID NO: 2322925 - RNA, 19 nt, Artificial Sequence
  Description of Artificial Sequence: Synthetic oligonucleotide
aggccagaggauccacccc

SEQ ID NO: 2322926 - RNA, 19 nt, Artificial Sequence
  Description of Artificial Sequence: Synthetic oligonucleotide
caccccaauaguagcacac

SEQ ID NO: 2322927 - RNA, 19 nt, Artificial Sequence
  Description of Artificial Sequence: Synthetic oligonucleotide
gauguuucagggcgaggca

SEQ ID NO: 2322928 - RNA, 19 nt, Artificial Sequence
  Description of Artificial Sequence: Synthetic oligonucleotide
ucagaccuccauuccgaug

SEQ ID NO: 2322929 - RNA, 19 nt, Artificial Sequence
  Description of Artificial Sequence: Synthetic oligonucleotide
aucaggucgucuuggcuga

SEQ ID NO: 2322930 - RNA, 19 nt, Artificial Sequence
  Description of Artificial Sequence: Synthetic oligonucleotide
cuuucaacaccugcugaug

SEQ ID NO: 2322931 - RNA, 19 nt, Artificial Sequence
  Description of Artificial Sequence: Synthetic oligonucleotide
accuccauuccgauguuuc

SEQ ID NO: 2322932 - RNA, 19 nt, Artificial Sequence
  Description of Artificial Sequence: Synthetic oligonucleotide
agcugcaacacaacggugu

SEQ ID NO: 2322933 - RNA, 19 nt, Artificial Sequence
  Description of Artificial Sequence: Synthetic oligonucleotide
uugccccuuccuuucaaca

SEQ ID NO: 2322934 - RNA, 19 nt, Artificial Sequence
  Description of Artificial Sequence: Synthetic oligonucleotide
ccucguuccuuauacuugg

SEQ ID NO: 2322935 - RNA, 19 nt, Artificial Sequence
  Description of Artificial Sequence: Synthetic oligonucleotide
guuccuccagaguuaucag

SEQ ID NO: 2322936 - RNA, 19 nt, Artificial Sequence
  Description of Artificial Sequence: Synthetic oligonucleotide
ucuuggaacuggacacgga

SEQ ID NO: 2322937 - RNA, 19 nt, Artificial Sequence
  Description of Artificial Sequence: Synthetic oligonucleotide
cuuuagcagguguuccaac

SEQ ID NO: 2322938 - RNA, 19 nt, Artificial Sequence
  Description of Artificial Sequence: Synthetic oligonucleotide
cuuggaacuggacacggaa

SEQ ID NO: 2322939 - RNA, 19 nt, Artificial Sequence
  Description of Artificial Sequence: Synthetic oligonucleotide
augagauaggugccgccca

SEQ ID NO: 2322940 - RNA, 19 nt, Artificial Sequence
  Description of Artificial Sequence: Synthetic oligonucleotide
ucuucuagguuggucuuaa

SEQ ID NO: 2322941 - RNA, 19 nt, Artificial Sequence
  Description of Artificial Sequence: Synthetic oligonucleotide
cuagguuggucuuaaacau

SEQ ID NO: 2322942 - RNA, 19 nt, Artificial Sequence
  Description of Artificial Sequence: Synthetic oligonucleotide
ucccucguuccuuauacuu

SEQ ID NO: 2322943 - RNA, 19 nt, Artificial Sequence
  Description of Artificial Sequence: Synthetic oligonucleotide
caaaacccuuuuccagagg

SEQ ID NO: 2322944 - RNA, 19 nt, Artificial Sequence
  Description of Artificial Sequence: Synthetic oligonucleotide
ggauccaccccaauaguag

SEQ ID NO: 2322945 - RNA, 19 nt, Artificial Sequence
  Description of Artificial Sequence: Synthetic oligonucleotide
acuuaagacuggcuuugau

SEQ ID NO: 2322946 - RNA, 19 nt, Artificial Sequence
  Description of Artificial Sequence: Synthetic oligonucleotide
gaacuggacacggaacuca

SEQ ID NO: 2322947 - RNA, 19 nt, Artificial Sequence
  Description of Artificial Sequence: Synthetic oligonucleotide
uggaguuccuccagaguua

SEQ ID NO: 2322948 - RNA, 19 nt, Artificial Sequence
  Description of Artificial Sequence: Synthetic oligonucleotide
ugugauccauauugagcuc

SEQ ID NO: 2322949 - RNA, 19 nt, Artificial Sequence
  Description of Artificial Sequence: Synthetic oligonucleotide
gaggcacacuucaauaauc

SEQ ID NO: 2322950 - RNA, 19 nt, Artificial Sequence
  Description of Artificial Sequence: Synthetic oligonucleotide
cuucaauaaucuggacacc

SEQ ID NO: 2322951 - RNA, 19 nt, Artificial Sequence
  Description of Artificial Sequence: Synthetic oligonucleotide
ucuuccggaucucuugcuu

SEQ ID NO: 2322952 - RNA, 19 nt, Artificial Sequence
  Description of Artificial Sequence: Synthetic oligonucleotide
aggcuaguccuuccuuuag

SEQ ID NO: 2322953 - RNA, 19 nt, Artificial Sequence
  Description of Artificial Sequence: Synthetic oligonucleotide
aucaagggaaggccucucu

SEQ ID NO: 2322954 - RNA, 19 nt, Artificial Sequence
  Description of Artificial Sequence: Synthetic oligonucleotide
guccccaacgcccagcauc

SEQ ID NO: 2322955 - RNA, 19 nt, Artificial Sequence
  Description of Artificial Sequence: Synthetic oligonucleotide
uuccaacacuugccgagcu

SEQ ID NO: 2322956 - RNA, 19 nt, Artificial Sequence
  Description of Artificial Sequence: Synthetic oligonucleotide
aggcacacuucaauaaucu

SEQ ID NO: 2322957 - RNA, 19 nt, Artificial Sequence
  Description of Artificial Sequence: Synthetic oligonucleotide
cuuuaucaagggaaggccu

SEQ ID NO: 2322958 - RNA, 19 nt, Artificial Sequence
  Description of Artificial Sequence: Synthetic oligonucleotide
uguaccccuccacacuuua

SEQ ID NO: 2322959 - RNA, 19 nt, Artificial Sequence
  Description of Artificial Sequence: Synthetic oligonucleotide
gcuauguaccccuccacac

SEQ ID NO: 2322960 - RNA, 19 nt, Artificial Sequence
  Description of Artificial Sequence: Synthetic oligonucleotide
ugcuugugcuugcuggcaa

SEQ ID NO: 2322961 - RNA, 19 nt, Artificial Sequence
  Description of Artificial Sequence: Synthetic oligonucleotide
uccgauguuucagggcgag

SEQ ID NO: 2322962 - RNA, 19 nt, Artificial Sequence
  Description of Artificial Sequence: Synthetic oligonucleotide
aggucgucuuggcugacgu

SEQ ID NO: 2322963 - RNA, 19 nt, Artificial Sequence
  Description of Artificial Sequence: Synthetic oligonucleotide
acaugucuuggaacuggac

SEQ ID NO: 2322964 - RNA, 19 nt, Artificial Sequence
  Description of Artificial Sequence: Synthetic oligonucleotide
cauauugagcucagcugga

SEQ ID NO: 2322965 - RNA, 19 nt, Artificial Sequence
  Description of Artificial Sequence: Synthetic oligonucleotide
acggaacucaggguucuuc

SEQ ID NO: 2322966 - RNA, 19 nt, Artificial Sequence
  Description of Artificial Sequence: Synthetic oligonucleotide
guccccuuuggccuacugc

SEQ ID NO: 2322967 - RNA, 19 nt, Artificial Sequence
  Description of Artificial Sequence: Synthetic oligonucleotide
ccaacacuugccgagcucg

SEQ ID NO: 2322968 - RNA, 19 nt, Artificial Sequence
  Description of Artificial Sequence: Synthetic oligonucleotide
auacuuggccucggcgagc

SEQ ID NO: 2322969 - RNA, 19 nt, Artificial Sequence
  Description of Artificial Sequence: Synthetic oligonucleotide
cucuccgcgucccagcuuc

SEQ ID NO: 2322970 - RNA, 19 nt, Artificial Sequence
  Description of Artificial Sequence: Synthetic oligonucleotide
uucuuggcgauggcgccag

SEQ ID NO: 2322971 - RNA, 19 nt, Artificial Sequence
  Description of Artificial Sequence: Synthetic oligonucleotide
cuuaagacuggcuuugauu

SEQ ID NO: 2322972 - RNA, 19 nt, Artificial Sequence
  Description of Artificial Sequence: Synthetic oligonucleotide
cuuggcugacguccugagc

SEQ ID NO: 2322973 - RNA, 19 nt, Artificial Sequence
  Description of Artificial Sequence: Synthetic oligonucleotide
ccaauaguagcacacaugu

SEQ ID NO: 2322974 - RNA, 19 nt, Artificial Sequence
  Description of Artificial Sequence: Synthetic oligonucleotide
ugacguccugagcaaacuu

SEQ ID NO: 2322975 - RNA, 19 nt, Artificial Sequence
  Description of Artificial Sequence: Synthetic oligonucleotide
aacacuugccgagcucgcu

SEQ ID NO: 2322976 - RNA, 19 nt, Artificial Sequence
  Description of Artificial Sequence: Synthetic oligonucleotide
agccaagacagucccucgu

SEQ ID NO: 2322977 - RNA, 19 nt, Artificial Sequence
  Description of Artificial Sequence: Synthetic oligonucleotide
cauguccaacuguuuugac

SEQ ID NO: 2322978 - RNA, 19 nt, Artificial Sequence
  Description of Artificial Sequence: Synthetic oligonucleotide
auaguagcacacaugucuu

SEQ ID NO: 2322979 - RNA, 19 nt, Artificial Sequence
  Description of Artificial Sequence: Synthetic oligonucleotide
cucugaucaggucgucuug

SEQ ID NO: 2322980 - RNA, 19 nt, Artificial Sequence
  Description of Artificial Sequence: Synthetic oligonucleotide
cuugccccuuccuuucaac

SEQ ID NO: 2322981 - RNA, 19 nt, Artificial Sequence
  Description of Artificial Sequence: Synthetic oligonucleotide
gagagcuggcagccaguag

SEQ ID NO: 2322982 - RNA, 19 nt, Artificial Sequence
  Description of Artificial Sequence: Synthetic oligonucleotide
gaacagacugaaugagaua

SEQ ID NO: 2322983 - RNA, 19 nt, Artificial Sequence
  Description of Artificial Sequence: Synthetic oligonucleotide
guuccaacacuugccgagc

SEQ ID NO: 2322984 - RNA, 19 nt, Artificial Sequence
  Description of Artificial Sequence: Synthetic oligonucleotide
cagccaagacagucccucg

SEQ ID NO: 2322985 - RNA, 19 nt, Artificial Sequence
  Description of Artificial Sequence: Synthetic oligonucleotide
cugguccucagccaagaca

SEQ ID NO: 2322986 - RNA, 19 nt, Artificial Sequence
  Description of Artificial Sequence: Synthetic oligonucleotide
accccagcucuccgcgucc

SEQ ID NO: 2322987 - RNA, 19 nt, Artificial Sequence
  Description of Artificial Sequence: Synthetic oligonucleotide
ucuggccuccucugcugag

SEQ ID NO: 2322988 - RNA, 19 nt, Artificial Sequence
  Description of Artificial Sequence: Synthetic oligonucleotide
ccacacuuuaucaagggaa

SEQ ID NO: 2322989 - RNA, 19 nt, Artificial Sequence
  Description of Artificial Sequence: Synthetic oligonucleotide
cucguuccuuauacuuggc

SEQ ID NO: 2322990 - RNA, 19 nt, Artificial Sequence
  Description of Artificial Sequence: Synthetic oligonucleotide
cugacagucacguacccau

SEQ ID NO: 2322991 - RNA, 19 nt, Artificial Sequence
  Description of Artificial Sequence: Synthetic oligonucleotide
ccagaguuaucagaccucc

SEQ ID NO: 2322992 - RNA, 19 nt, Artificial Sequence
  Description of Artificial Sequence: Synthetic oligonucleotide
ccauuccgauguuucaggg

SEQ ID NO: 2322993 - RNA, 19 nt, Artificial Sequence
  Description of Artificial Sequence: Synthetic oligonucleotide
ggcacacuucaauaaucug

SEQ ID NO: 2322994 - RNA, 19 nt, Artificial Sequence
  Description of Artificial Sequence: Synthetic oligonucleotide
guagcacacaugucuugga

SEQ ID NO: 2322995 - RNA, 19 nt, Artificial Sequence
  Description of Artificial Sequence: Synthetic oligonucleotide
uuuggccuacugcuaugua

SEQ ID NO: 2322996 - RNA, 19 nt, Artificial Sequence
  Description of Artificial Sequence: Synthetic oligonucleotide
ggugcauccccaccccggg

SEQ ID NO: 2322997 - RNA, 19 nt, Artificial Sequence
  Description of Artificial Sequence: Synthetic oligonucleotide
uugcuugugcuugcuggca

SEQ ID NO: 2322998 - RNA, 19 nt, Artificial Sequence
  Description of Artificial Sequence: Synthetic oligonucleotide
cccuccacacuuuaucaag

SEQ ID NO: 2322999 - RNA, 19 nt, Artificial Sequence
  Description of Artificial Sequence: Synthetic oligonucleotide
ggcuaguccuuccuuuagc

SEQ ID NO: 2323000 - RNA, 19 nt, Artificial Sequence
  Description of Artificial Sequence: Synthetic oligonucleotide
cucggcgagcuucuucuug

SEQ ID NO: 2323001 - RNA, 19 nt, Artificial Sequence
  Description of Artificial Sequence: Synthetic oligonucleotide
cuccagaguuaucagaccu

SEQ ID NO: 2323002 - RNA, 19 nt, Artificial Sequence
  Description of Artificial Sequence: Synthetic oligonucleotide
cacugacagucacguaccc

SEQ ID NO: 2323003 - RNA, 19 nt, Artificial Sequence
  Description of Artificial Sequence: Synthetic oligonucleotide
ccgcccacagggaugaugc

SEQ ID NO: 2323004 - RNA, 19 nt, Artificial Sequence
  Description of Artificial Sequence: Synthetic oligonucleotide
acugacagucacguaccca

SEQ ID NO: 2323005 - RNA, 19 nt, Artificial Sequence
  Description of Artificial Sequence: Synthetic oligonucleotide
uucacaggcagguccccuu

SEQ ID NO: 2323006 - RNA, 19 nt, Artificial Sequence
  Description of Artificial Sequence: Synthetic oligonucleotide
ugaagagagcuggcagcca

SEQ ID NO: 2323007 - RNA, 19 nt, Artificial Sequence
  Description of Artificial Sequence: Synthetic oligonucleotide
cugcuauguaccccuccac

SEQ ID NO: 2323008 - RNA, 19 nt, Artificial Sequence
  Description of Artificial Sequence: Synthetic oligonucleotide
gcgagcuucuucuuggcga

SEQ ID NO: 2323009 - RNA, 19 nt, Artificial Sequence
  Description of Artificial Sequence: Synthetic oligonucleotide
agcuucuugauggcucuga

SEQ ID NO: 2323010 - RNA, 19 nt, Artificial Sequence
  Description of Artificial Sequence: Synthetic oligonucleotide
ggcgagcuucuucuuggcg

SEQ ID NO: 2323011 - RNA, 19 nt, Artificial Sequence
  Description of Artificial Sequence: Synthetic oligonucleotide
cgauguuucagggcgaggc

SEQ ID NO: 2323012 - RNA, 19 nt, Artificial Sequence
  Description of Artificial Sequence: Synthetic oligonucleotide
aucagaccuccauuccgau

SEQ ID NO: 2323013 - RNA, 19 nt, Artificial Sequence
  Description of Artificial Sequence: Synthetic oligonucleotide
auauugagcucagcuggaa

SEQ ID NO: 2323014 - RNA, 19 nt, Artificial Sequence
  Description of Artificial Sequence: Synthetic oligonucleotide
cacaugucuuggaacugga

SEQ ID NO: 2323015 - RNA, 19 nt, Artificial Sequence
  Description of Artificial Sequence: Synthetic oligonucleotide
cacacaugucuuggaacug

SEQ ID NO: 2323016 - RNA, 19 nt, Artificial Sequence
  Description of Artificial Sequence: Synthetic oligonucleotide
uaucaagggaaggccucuc

SEQ ID NO: 2323017 - RNA, 19 nt, Artificial Sequence
  Description of Artificial Sequence: Synthetic oligonucleotide
ccaacgcccagcaucucag

SEQ ID NO: 2323018 - RNA, 19 nt, Artificial Sequence
  Description of Artificial Sequence: Synthetic oligonucleotide
ugacagucacguacccauu

SEQ ID NO: 2323019 - RNA, 19 nt, Artificial Sequence
  Description of Artificial Sequence: Synthetic oligonucleotide
cugauggaguuccuccaga

SEQ ID NO: 2323020 - RNA, 19 nt, Artificial Sequence
  Description of Artificial Sequence: Synthetic oligonucleotide
accccaauaguagcacaca

SEQ ID NO: 2323021 - RNA, 19 nt, Artificial Sequence
  Description of Artificial Sequence: Synthetic oligonucleotide
gaucuccugggaguagaga

SEQ ID NO: 2323022 - RNA, 19 nt, Artificial Sequence
  Description of Artificial Sequence: Synthetic oligonucleotide
caucucagaccaaaacccu

SEQ ID NO: 2323023 - RNA, 19 nt, Artificial Sequence
  Description of Artificial Sequence: Synthetic oligonucleotide
uucuucuagguuggucuua

SEQ ID NO: 2323024 - RNA, 19 nt, Artificial Sequence
  Description of Artificial Sequence: Synthetic oligonucleotide
uugccgagcucgcuccguc

SEQ ID NO: 2323025 - RNA, 19 nt, Artificial Sequence
  Description of Artificial Sequence: Synthetic oligonucleotide
cccucguuccuuauacuug

SEQ ID NO: 2323026 - RNA, 19 nt, Artificial Sequence
  Description of Artificial Sequence: Synthetic oligonucleotide
gacagucccucguuccuua

SEQ ID NO: 2323027 - RNA, 19 nt, Artificial Sequence
  Description of Artificial Sequence: Synthetic oligonucleotide
cagaggauccaccccaaua

SEQ ID NO: 2323028 - RNA, 19 nt, Artificial Sequence
  Description of Artificial Sequence: Synthetic oligonucleotide
gaggauccaccccaauagu

SEQ ID NO: 2323029 - RNA, 19 nt, Artificial Sequence
  Description of Artificial Sequence: Synthetic oligonucleotide
gaccccagcucuccgcguc

SEQ ID NO: 2323030 - RNA, 19 nt, Artificial Sequence
  Description of Artificial Sequence: Synthetic oligonucleotide
ggccagaggauccacccca

SEQ ID NO: 2323031 - RNA, 19 nt, Artificial Sequence
  Description of Artificial Sequence: Synthetic oligonucleotide
uggcugacguccugagcaa

SEQ ID NO: 2323032 - RNA, 19 nt, Artificial Sequence
  Description of Artificial Sequence: Synthetic oligonucleotide
aggauccaccccaauagua

SEQ ID NO: 2323033 - RNA, 19 nt, Artificial Sequence
  Description of Artificial Sequence: Synthetic oligonucleotide
acggugugauccauauuga

SEQ ID NO: 2323034 - RNA, 19 nt, Artificial Sequence
  Description of Artificial Sequence: Synthetic oligonucleotide
acacggaacucaggguucu

SEQ ID NO: 2323035 - RNA, 19 nt, Artificial Sequence
  Description of Artificial Sequence: Synthetic oligonucleotide
cuauguaccccuccacacu

SEQ ID NO: 2323036 - RNA, 19 nt, Artificial Sequence
  Description of Artificial Sequence: Synthetic oligonucleotide
gccaguagugggcuucccc

SEQ ID NO: 2323037 - RNA, 19 nt, Artificial Sequence
  Description of Artificial Sequence: Synthetic oligonucleotide
uaggugccgcccacaggga

SEQ ID NO: 2323038 - RNA, 19 nt, Artificial Sequence
  Description of Artificial Sequence: Synthetic oligonucleotide
aucucagaccaaaacccuu

SEQ ID NO: 2323039 - RNA, 19 nt, Artificial Sequence
  Description of Artificial Sequence: Synthetic oligonucleotide
acuugccccuuccuuucaa

SEQ ID NO: 2323040 - RNA, 19 nt, Artificial Sequence
  Description of Artificial Sequence: Synthetic oligonucleotide
cggaacucaggguucuucc

SEQ ID NO: 2323041 - RNA, 19 nt, Artificial Sequence
  Description of Artificial Sequence: Synthetic oligonucleotide
guuucagggcgaggcacac

SEQ ID NO: 2323042 - RNA, 19 nt, Artificial Sequence
  Description of Artificial Sequence: Synthetic oligonucleotide
gguuuguucacaggcaggu

SEQ ID NO: 2323043 - RNA, 19 nt, Artificial Sequence
  Description of Artificial Sequence: Synthetic oligonucleotide
ccuuauacuuggccucggc

SEQ ID NO: 2323044 - RNA, 19 nt, Artificial Sequence
  Description of Artificial Sequence: Synthetic oligonucleotide
guuuguucacaggcagguc

SEQ ID NO: 2323045 - RNA, 19 nt, Artificial Sequence
  Description of Artificial Sequence: Synthetic oligonucleotide
ccaacuguuuugacaucug

SEQ ID NO: 2323046 - RNA, 19 nt, Artificial Sequence
  Description of Artificial Sequence: Synthetic oligonucleotide
ggacacccagcucauaaua

SEQ ID NO: 2323047 - RNA, 19 nt, Artificial Sequence
  Description of Artificial Sequence: Synthetic oligonucleotide
cuacugcuauguaccccuc

SEQ ID NO: 2323048 - RNA, 19 nt, Artificial Sequence
  Description of Artificial Sequence: Synthetic oligonucleotide
cagaguuaucagaccucca

SEQ ID NO: 2323049 - RNA, 19 nt, Artificial Sequence
  Description of Artificial Sequence: Synthetic oligonucleotide
accccgcgccggugcaucc

SEQ ID NO: 2323050 - RNA, 19 nt, Artificial Sequence
  Description of Artificial Sequence: Synthetic oligonucleotide
gagauaggugccgcccaca

SEQ ID NO: 2323051 - RNA, 19 nt, Artificial Sequence
  Description of Artificial Sequence: Synthetic oligonucleotide
ugccgagcucgcuccgucu

SEQ ID NO: 2323052 - RNA, 19 nt, Artificial Sequence
  Description of Artificial Sequence: Synthetic oligonucleotide
ggccuacugcuauguaccc

SEQ ID NO: 2323053 - RNA, 19 nt, Artificial Sequence
  Description of Artificial Sequence: Synthetic oligonucleotide
guagugggcuuccccugga

SEQ ID NO: 2323054 - RNA, 19 nt, Artificial Sequence
  Description of Artificial Sequence: Synthetic oligonucleotide
ggacacggaacucaggguu

SEQ ID NO: 2323055 - RNA, 19 nt, Artificial Sequence
  Description of Artificial Sequence: Synthetic oligonucleotide
ggcgaggcacacuucaaua

SEQ ID NO: 2323056 - RNA, 19 nt, Artificial Sequence
  Description of Artificial Sequence: Synthetic oligonucleotide
guccaacuguuuugacauc

SEQ ID NO: 2323057 - RNA, 19 nt, Artificial Sequence
  Description of Artificial Sequence: Synthetic oligonucleotide
ccuacugcuauguaccccu

SEQ ID NO: 2323058 - RNA, 19 nt, Artificial Sequence
  Description of Artificial Sequence: Synthetic oligonucleotide
ccggaucucuugcuugugc

SEQ ID NO: 2323059 - RNA, 19 nt, Artificial Sequence
  Description of Artificial Sequence: Synthetic oligonucleotide
uuuugacaucugggccagc

SEQ ID NO: 2323060 - RNA, 19 nt, Artificial Sequence
  Description of Artificial Sequence: Synthetic oligonucleotide
caggcuaguccuuccuuua

SEQ ID NO: 2323061 - RNA, 19 nt, Artificial Sequence
  Description of Artificial Sequence: Synthetic oligonucleotide
cggugugauccauauugag

SEQ ID NO: 2323062 - RNA, 19 nt, Artificial Sequence
  Description of Artificial Sequence: Synthetic oligonucleotide
gugcuugcuggcaaauucu

SEQ ID NO: 2323063 - RNA, 19 nt, Artificial Sequence
  Description of Artificial Sequence: Synthetic oligonucleotide
gugcauccccaccccgggc

SEQ ID NO: 2323064 - RNA, 19 nt, Artificial Sequence
  Description of Artificial Sequence: Synthetic oligonucleotide
ucuuggcgauggcgccagc

SEQ ID NO: 2323065 - RNA, 19 nt, Artificial Sequence
  Description of Artificial Sequence: Synthetic oligonucleotide
cacaacggugugauccaua

SEQ ID NO: 2323066 - RNA, 19 nt, Artificial Sequence
  Description of Artificial Sequence: Synthetic oligonucleotide
ucuccgcgucccagcuucu

SEQ ID NO: 2323067 - RNA, 19 nt, Artificial Sequence
  Description of Artificial Sequence: Synthetic oligonucleotide
gcugacguccugagcaaac

SEQ ID NO: 2323068 - RNA, 19 nt, Artificial Sequence
  Description of Artificial Sequence: Synthetic oligonucleotide
cguuccuuauacuuggccu

SEQ ID NO: 2323069 - RNA, 19 nt, Artificial Sequence
  Description of Artificial Sequence: Synthetic oligonucleotide
ccuuuuccagaggccagag

SEQ ID NO: 2323070 - RNA, 19 nt, Artificial Sequence
  Description of Artificial Sequence: Synthetic oligonucleotide
acacaacggugugauccau

SEQ ID NO: 2323071 - RNA, 19 nt, Artificial Sequence
  Description of Artificial Sequence: Synthetic oligonucleotide
cguccugagcaaacuugcc

SEQ ID NO: 2323072 - RNA, 19 nt, Artificial Sequence
  Description of Artificial Sequence: Synthetic oligonucleotide
agccagugcccagugcuuu

SEQ ID NO: 2323073 - RNA, 19 nt, Artificial Sequence
  Description of Artificial Sequence: Synthetic oligonucleotide
cacuuaagacuggcuuuga

SEQ ID NO: 2323074 - RNA, 19 nt, Artificial Sequence
  Description of Artificial Sequence: Synthetic oligonucleotide
ggcuuugauuucacugaca

SEQ ID NO: 2323075 - RNA, 19 nt, Artificial Sequence
  Description of Artificial Sequence: Synthetic oligonucleotide
ggcgauggcgccagcuccc

SEQ ID NO: 2323076 - RNA, 19 nt, Artificial Sequence
  Description of Artificial Sequence: Synthetic oligonucleotide
gcagccaguagugggcuuc

SEQ ID NO: 2323077 - RNA, 19 nt, Artificial Sequence
  Description of Artificial Sequence: Synthetic oligonucleotide
ccgucucccacuuaagacu

SEQ ID NO: 2323078 - RNA, 19 nt, Artificial Sequence
  Description of Artificial Sequence: Synthetic oligonucleotide
caacgcccagcaucucaga

SEQ ID NO: 2323079 - RNA, 19 nt, Artificial Sequence
  Description of Artificial Sequence: Synthetic oligonucleotide
ccaguagugggcuuccccu

SEQ ID NO: 2323080 - RNA, 19 nt, Artificial Sequence
  Description of Artificial Sequence: Synthetic oligonucleotide
gguuggucuuaaacauguc

SEQ ID NO: 2323081 - RNA, 19 nt, Artificial Sequence
  Description of Artificial Sequence: Synthetic oligonucleotide
uggcgccagcucccacccc

SEQ ID NO: 2323082 - RNA, 19 nt, Artificial Sequence
  Description of Artificial Sequence: Synthetic oligonucleotide
gccggugcauccccacccc

SEQ ID NO: 2323083 - RNA, 19 nt, Artificial Sequence
  Description of Artificial Sequence: Synthetic oligonucleotide
gccagcucccaccccgcgc

SEQ ID NO: 2323084 - RNA, 19 nt, Artificial Sequence
  Description of Artificial Sequence: Synthetic oligonucleotide
ccuuucaacaccugcugau

SEQ ID NO: 2323085 - RNA, 19 nt, Artificial Sequence
  Description of Artificial Sequence: Synthetic oligonucleotide
cggugcauccccaccccgg

SEQ ID NO: 2323086 - RNA, 19 nt, Artificial Sequence
  Description of Artificial Sequence: Synthetic oligonucleotide
cugacguccugagcaaacu

SEQ ID NO: 2323087 - RNA, 19 nt, Artificial Sequence
  Description of Artificial Sequence: Synthetic oligonucleotide
gcucugaucaggucgucuu

SEQ ID NO: 2323088 - RNA, 19 nt, Artificial Sequence
  Description of Artificial Sequence: Synthetic oligonucleotide
ggucgucuuggcugacguc

SEQ ID NO: 2323089 - RNA, 19 nt, Artificial Sequence
  Description of Artificial Sequence: Synthetic oligonucleotide
cagcucccaccccgcgccg

SEQ ID NO: 2323090 - RNA, 19 nt, Artificial Sequence
  Description of Artificial Sequence: Synthetic oligonucleotide
gaguuccuccagaguuauc

SEQ ID NO: 2323091 - RNA, 19 nt, Artificial Sequence
  Description of Artificial Sequence: Synthetic oligonucleotide
cucccacuuaagacuggcu

SEQ ID NO: 2323092 - RNA, 19 nt, Artificial Sequence
  Description of Artificial Sequence: Synthetic oligonucleotide
agcccggaccccagcucuc

SEQ ID NO: 2323093 - RNA, 19 nt, Artificial Sequence
  Description of Artificial Sequence: Synthetic oligonucleotide
cggaccccagcucuccgcg

SEQ ID NO: 2323094 - RNA, 19 nt, Artificial Sequence
  Description of Artificial Sequence: Synthetic oligonucleotide
gucccucguuccuuauacu

SEQ ID NO: 2323095 - RNA, 19 nt, Artificial Sequence
  Description of Artificial Sequence: Synthetic oligonucleotide
cucagaccaaaacccuuuu

SEQ ID NO: 2323096 - RNA, 19 nt, Artificial Sequence
  Description of Artificial Sequence: Synthetic oligonucleotide
agggcgaggcacacuucaa

SEQ ID NO: 2323097 - RNA, 19 nt, Artificial Sequence
  Description of Artificial Sequence: Synthetic oligonucleotide
cccaacgcccagcaucuca

SEQ ID NO: 2323098 - RNA, 19 nt, Artificial Sequence
  Description of Artificial Sequence: Synthetic oligonucleotide
ccggaccccagcucuccgc

SEQ ID NO: 2323099 - RNA, 19 nt, Artificial Sequence
  Description of Artificial Sequence: Synthetic oligonucleotide
ccgagcucgcuccgucucc

SEQ ID NO: 2323100 - RNA, 19 nt, Artificial Sequence
  Description of Artificial Sequence: Synthetic oligonucleotide
gccgagcucgcuccgucuc

SEQ ID NO: 2323101 - RNA, 19 nt, Artificial Sequence
  Description of Artificial Sequence: Synthetic oligonucleotide
cuccgcgucccagcuucug

SEQ ID NO: 2323102 - RNA, 19 nt, Artificial Sequence
  Description of Artificial Sequence: Synthetic oligonucleotide
cagcccggaccccagcucu

SEQ ID NO: 2323103 - RNA, 19 nt, Artificial Sequence
  Description of Artificial Sequence: Synthetic oligonucleotide
ccggugcauccccaccccg

SEQ ID NO: 2323104 - RNA, 19 nt, Artificial Sequence
  Description of Artificial Sequence: Synthetic oligonucleotide
gccgcccacagggaugaug

SEQ ID NO: 2323105 - RNA, 19 nt, Artificial Sequence
  Description of Artificial Sequence: Synthetic oligonucleotide
cucagccaagacagucccu

SEQ ID NO: 2323106 - RNA, 19 nt, Artificial Sequence
  Description of Artificial Sequence: Synthetic oligonucleotide
ccaccccaauaguagcaca

SEQ ID NO: 2323107 - RNA, 19 nt, Artificial Sequence
  Description of Artificial Sequence: Synthetic oligonucleotide
ccgauguuucagggcgagg

SEQ ID NO: 2323108 - RNA, 19 nt, Artificial Sequence
  Description of Artificial Sequence: Synthetic oligonucleotide
ggaguuccuccagaguuau

SEQ ID NO: 2323109 - RNA, 19 nt, Artificial Sequence
  Description of Artificial Sequence: Synthetic oligonucleotide
cagguccccuuuggccuac

SEQ ID NO: 2323110 - RNA, 19 nt, Artificial Sequence
  Description of Artificial Sequence: Synthetic oligonucleotide
gcgccggugcauccccacc

SEQ ID NO: 2323111 - RNA, 19 nt, Artificial Sequence
  Description of Artificial Sequence: Synthetic oligonucleotide
ccugggaguagagaucugu

SEQ ID NO: 2323112 - RNA, 19 nt, Artificial Sequence
  Description of Artificial Sequence: Synthetic oligonucleotide
ccccuccacacuuuaucaa

SEQ ID NO: 2323113 - RNA, 19 nt, Artificial Sequence
  Description of Artificial Sequence: Synthetic oligonucleotide
gggcgaggcacacuucaau

SEQ ID NO: 2323114 - RNA, 19 nt, Artificial Sequence
  Description of Artificial Sequence: Synthetic oligonucleotide
cccggaccccagcucuccg

SEQ ID NO: 2323115 - RNA, 19 nt, Artificial Sequence
  Description of Artificial Sequence: Synthetic oligonucleotide
ccugagcaaacuugccccu

SEQ ID NO: 2323116 - RNA, 19 nt, Artificial Sequence
  Description of Artificial Sequence: Synthetic oligonucleotide
cucgcuccgucucccacuu

SEQ ID NO: 2323117 - RNA, 19 nt, Artificial Sequence
  Description of Artificial Sequence: Synthetic oligonucleotide
cccuuuuccagaggccaga

SEQ ID NO: 2323118 - RNA, 19 nt, Artificial Sequence
  Description of Artificial Sequence: Synthetic oligonucleotide
gaccuccauuccgauguuu

SEQ ID NO: 2323119 - RNA, 19 nt, Artificial Sequence
  Description of Artificial Sequence: Synthetic oligonucleotide
gcucgcuccgucucccacu

SEQ ID NO: 2323120 - RNA, 19 nt, Artificial Sequence
  Description of Artificial Sequence: Synthetic oligonucleotide
gcagguccccuuuggccua

SEQ ID NO: 2323121 - RNA, 19 nt, Artificial Sequence
  Description of Artificial Sequence: Synthetic oligonucleotide
cgcuccgucucccacuuaa

SEQ ID NO: 2323122 - RNA, 19 nt, Artificial Sequence
  Description of Artificial Sequence: Synthetic oligonucleotide
ccccaauaguagcacacau

SEQ ID NO: 2323123 - RNA, 19 nt, Artificial Sequence
  Description of Artificial Sequence: Synthetic oligonucleotide
cgagcucgcuccgucuccc

SEQ ID NO: 2323124 - RNA, 19 nt, Artificial Sequence
  Description of Artificial Sequence: Synthetic oligonucleotide
cggcgagcuucuucuuggc

SEQ ID NO: 2323125 - RNA, 19 nt, Artificial Sequence
  Description of Artificial Sequence: Synthetic oligonucleotide
ggcuuccccuggagccugg

SEQ ID NO: 2323126 - RNA, 19 nt, Artificial Sequence
  Description of Artificial Sequence: Synthetic oligonucleotide
ccagaggccagaggaucca

SEQ ID NO: 2323127 - RNA, 19 nt, Artificial Sequence
  Description of Artificial Sequence: Synthetic oligonucleotide
cuugccgagcucgcuccgu

SEQ ID NO: 2323128 - RNA, 19 nt, Artificial Sequence
  Description of Artificial Sequence: Synthetic oligonucleotide
ccaggcuaguccuuccuuu

SEQ ID NO: 2323129 - RNA, 19 nt, Artificial Sequence
  Description of Artificial Sequence: Synthetic oligonucleotide
gcccggaccccagcucucc

SEQ ID NO: 2323130 - RNA, 19 nt, Artificial Sequence
  Description of Artificial Sequence: Synthetic oligonucleotide
caacggugugauccauauu

SEQ ID NO: 2323131 - RNA, 19 nt, Artificial Sequence
  Description of Artificial Sequence: Synthetic oligonucleotide
cccuuuggccuacugcuau

SEQ ID NO: 2323132 - RNA, 19 nt, Artificial Sequence
  Description of Artificial Sequence: Synthetic oligonucleotide
cgaggcacacuucaauaau

SEQ ID NO: 2323133 - RNA, 19 nt, Artificial Sequence
  Description of Artificial Sequence: Synthetic oligonucleotide
cagcuggaacagacugaau

SEQ ID NO: 2323134 - RNA, 19 nt, Artificial Sequence
  Description of Artificial Sequence: Synthetic oligonucleotide
gccaggcuaguccuuccuu

SEQ ID NO: 2323135 - RNA, 19 nt, Artificial Sequence
  Description of Artificial Sequence: Synthetic oligonucleotide
gcgauggcgccagcuccca

SEQ ID NO: 2323136 - RNA, 19 nt, Artificial Sequence
  Description of Artificial Sequence: Synthetic oligonucleotide
gcuuccccuggagccugga

SEQ ID NO: 2323137 - RNA, 19 nt, Artificial Sequence
  Description of Artificial Sequence: Synthetic oligonucleotide
cgauggcgccagcucccac

SEQ ID NO: 2323138 - RNA, 19 nt, Artificial Sequence
  Description of Artificial Sequence: Synthetic oligonucleotide
gcucccaccccgcgccggu

SEQ ID NO: 2323139 - RNA, 19 nt, Artificial Sequence
  Description of Artificial Sequence: Synthetic oligonucleotide
ugccgcccacagggaugau

SEQ ID NO: 2323140 - RNA, 19 nt, Artificial Sequence
  Description of Artificial Sequence: Synthetic oligonucleotide
ggcagccaguagugggcuu

SEQ ID NO: 2323141 - RNA, 19 nt, Artificial Sequence
  Description of Artificial Sequence: Synthetic oligonucleotide
cccaccccgcgccggugca

SEQ ID NO: 2323142 - RNA, 19 nt, Artificial Sequence
  Description of Artificial Sequence: Synthetic oligonucleotide
cacggaacucaggguucuu

SEQ ID NO: 2323143 - RNA, 19 nt, Artificial Sequence
  Description of Artificial Sequence: Synthetic oligonucleotide
ccccaacgcccagcaucuc

SEQ ID NO: 2323144 - RNA, 19 nt, Artificial Sequence
  Description of Artificial Sequence: Synthetic oligonucleotide
ccgggccgccccgcagccc

SEQ ID NO: 2323145 - RNA, 19 nt, Artificial Sequence
  Description of Artificial Sequence: Synthetic oligonucleotide
ccucggcgagcuucuucuu

SEQ ID NO: 2323146 - RNA, 19 nt, Artificial Sequence
  Description of Artificial Sequence: Synthetic oligonucleotide
aaaacugaagccuugaacc

SEQ ID NO: 2323147 - RNA, 19 nt, Artificial Sequence
  Description of Artificial Sequence: Synthetic oligonucleotide
aaaacgguuaaacagaagc

SEQ ID NO: 2323148 - RNA, 19 nt, Artificial Sequence
  Description of Artificial Sequence: Synthetic oligonucleotide
agaaauaauacagaaaacg

SEQ ID NO: 2323149 - RNA, 19 nt, Artificial Sequence
  Description of Artificial Sequence: Synthetic oligonucleotide
uuaaacagaagccugugag

SEQ ID NO: 2323150 - RNA, 19 nt, Artificial Sequence
  Description of Artificial Sequence: Synthetic oligonucleotide
acagaaaacgguuaaacag

SEQ ID NO: 2323151 - RNA, 19 nt, Artificial Sequence
  Description of Artificial Sequence: Synthetic oligonucleotide
aauuuuacaucuaaaacug

SEQ ID NO: 2323152 - RNA, 19 nt, Artificial Sequence
  Description of Artificial Sequence: Synthetic oligonucleotide
uuacaucuaaaacugaagc

SEQ ID NO: 2323153 - RNA, 19 nt, Artificial Sequence
  Description of Artificial Sequence: Synthetic oligonucleotide
uuuacaucuaaaacugaag

SEQ ID NO: 2323154 - RNA, 19 nt, Artificial Sequence
  Description of Artificial Sequence: Synthetic oligonucleotide
gaauuuuacaucuaaaacu

SEQ ID NO: 2323155 - RNA, 19 nt, Artificial Sequence
  Description of Artificial Sequence: Synthetic oligonucleotide
aaacgguuaaacagaagcc

SEQ ID NO: 2323156 - RNA, 19 nt, Artificial Sequence
  Description of Artificial Sequence: Synthetic oligonucleotide
aaacugaagccuugaaccg

SEQ ID NO: 2323157 - RNA, 19 nt, Artificial Sequence
  Description of Artificial Sequence: Synthetic oligonucleotide
aauuggacuucaccucucc

SEQ ID NO: 2323158 - RNA, 19 nt, Artificial Sequence
  Description of Artificial Sequence: Synthetic oligonucleotide
aaauaauacagaaaacggu

SEQ ID NO: 2323159 - RNA, 19 nt, Artificial Sequence
  Description of Artificial Sequence: Synthetic oligonucleotide
uacaucuaaaacugaagcc

SEQ ID NO: 2323160 - RNA, 19 nt, Artificial Sequence
  Description of Artificial Sequence: Synthetic oligonucleotide
aauaauacagaaaacgguu

SEQ ID NO: 2323161 - RNA, 19 nt, Artificial Sequence
  Description of Artificial Sequence: Synthetic oligonucleotide
uuuuacaucuaaaacugaa

SEQ ID NO: 2323162 - RNA, 19 nt, Artificial Sequence
  Description of Artificial Sequence: Synthetic oligonucleotide
uaaaacugaagccuugaac

SEQ ID NO: 2323163 - RNA, 19 nt, Artificial Sequence
  Description of Artificial Sequence: Synthetic oligonucleotide
uaaacagaagccugugagg

SEQ ID NO: 2323164 - RNA, 19 nt, Artificial Sequence
  Description of Artificial Sequence: Synthetic oligonucleotide
aguccaagucuccugacac

SEQ ID NO: 2323165 - RNA, 19 nt, Artificial Sequence
  Description of Artificial Sequence: Synthetic oligonucleotide
augaauuggacuucaccuc

SEQ ID NO: 2323166 - RNA, 19 nt, Artificial Sequence
  Description of Artificial Sequence: Synthetic oligonucleotide
gaugaauuggacuucaccu

SEQ ID NO: 2323167 - RNA, 19 nt, Artificial Sequence
  Description of Artificial Sequence: Synthetic oligonucleotide
aaucggaggaccaggauag

SEQ ID NO: 2323168 - RNA, 19 nt, Artificial Sequence
  Description of Artificial Sequence: Synthetic oligonucleotide
uacagaaaacgguuaaaca

SEQ ID NO: 2323169 - RNA, 19 nt, Artificial Sequence
  Description of Artificial Sequence: Synthetic oligonucleotide
acaucuaaaacugaagccu

SEQ ID NO: 2323170 - RNA, 19 nt, Artificial Sequence
  Description of Artificial Sequence: Synthetic oligonucleotide
aaacagaagccugugagga

SEQ ID NO: 2323171 - RNA, 19 nt, Artificial Sequence
  Description of Artificial Sequence: Synthetic oligonucleotide
ugaauuggacuucaccucu

SEQ ID NO: 2323172 - RNA, 19 nt, Artificial Sequence
  Description of Artificial Sequence: Synthetic oligonucleotide
uuagaauuuuacaucuaaa

SEQ ID NO: 2323173 - RNA, 19 nt, Artificial Sequence
  Description of Artificial Sequence: Synthetic oligonucleotide
aacgguuaaacagaagccu

SEQ ID NO: 2323174 - RNA, 19 nt, Artificial Sequence
  Description of Artificial Sequence: Synthetic oligonucleotide
ugggacuaaggcaugggcc

SEQ ID NO: 2323175 - RNA, 19 nt, Artificial Sequence
  Description of Artificial Sequence: Synthetic oligonucleotide
ugugaggaugaauuggacu

SEQ ID NO: 2323176 - RNA, 19 nt, Artificial Sequence
  Description of Artificial Sequence: Synthetic oligonucleotide
uggacuucaccucucccag

SEQ ID NO: 2323177 - RNA, 19 nt, Artificial Sequence
  Description of Artificial Sequence: Synthetic oligonucleotide
gaugcccacgaucaaucgg

SEQ ID NO: 2323178 - RNA, 19 nt, Artificial Sequence
  Description of Artificial Sequence: Synthetic oligonucleotide
auuggacuucaccucuccc

SEQ ID NO: 2323179 - RNA, 19 nt, Artificial Sequence
  Description of Artificial Sequence: Synthetic oligonucleotide
ugaagccuugaaccguugg

SEQ ID NO: 2323180 - RNA, 19 nt, Artificial Sequence
  Description of Artificial Sequence: Synthetic oligonucleotide
guuagaauuuuacaucuaa

SEQ ID NO: 2323181 - RNA, 19 nt, Artificial Sequence
  Description of Artificial Sequence: Synthetic oligonucleotide
uuggacuucaccucuccca

SEQ ID NO: 2323182 - RNA, 19 nt, Artificial Sequence
  Description of Artificial Sequence: Synthetic oligonucleotide
cagaaauaauacagaaaac

SEQ ID NO: 2323183 - RNA, 19 nt, Artificial Sequence
  Description of Artificial Sequence: Synthetic oligonucleotide
ccagaaauaauacagaaaa

SEQ ID NO: 2323184 - RNA, 19 nt, Artificial Sequence
  Description of Artificial Sequence: Synthetic oligonucleotide
ucgaaguugggguuggggu

SEQ ID NO: 2323185 - RNA, 19 nt, Artificial Sequence
  Description of Artificial Sequence: Synthetic oligonucleotide
cagaaaacgguuaaacaga

SEQ ID NO: 2323186 - RNA, 19 nt, Artificial Sequence
  Description of Artificial Sequence: Synthetic oligonucleotide
gaaguugggguuggggucg

SEQ ID NO: 2323187 - RNA, 19 nt, Artificial Sequence
  Description of Artificial Sequence: Synthetic oligonucleotide
gaucaaucggaggaccagg

SEQ ID NO: 2323188 - RNA, 19 nt, Artificial Sequence
  Description of Artificial Sequence: Synthetic oligonucleotide
ucuaaaacugaagccuuga

SEQ ID NO: 2323189 - RNA, 19 nt, Artificial Sequence
  Description of Artificial Sequence: Synthetic oligonucleotide
accucucccaguuagaauu

SEQ ID NO: 2323190 - RNA, 19 nt, Artificial Sequence
  Description of Artificial Sequence: Synthetic oligonucleotide
aauacagaaaacgguuaaa

SEQ ID NO: 2323191 - RNA, 19 nt, Artificial Sequence
  Description of Artificial Sequence: Synthetic oligonucleotide
ucccaguuagaauuuuaca

SEQ ID NO: 2323192 - RNA, 19 nt, Artificial Sequence
  Description of Artificial Sequence: Synthetic oligonucleotide
gccaccagaaauaauacag

SEQ ID NO: 2323193 - RNA, 19 nt, Artificial Sequence
  Description of Artificial Sequence: Synthetic oligonucleotide
cuucaccucucccaguuag

SEQ ID NO: 2323194 - RNA, 19 nt, Artificial Sequence
  Description of Artificial Sequence: Synthetic oligonucleotide
cucccaguuagaauuuuac

SEQ ID NO: 2323195 - RNA, 19 nt, Artificial Sequence
  Description of Artificial Sequence: Synthetic oligonucleotide
agugcugggacuaaggcau

SEQ ID NO: 2323196 - RNA, 19 nt, Artificial Sequence
  Description of Artificial Sequence: Synthetic oligonucleotide
ucuccugacaccucccacu

SEQ ID NO: 2323197 - RNA, 19 nt, Artificial Sequence
  Description of Artificial Sequence: Synthetic oligonucleotide
aagccugugaggaugaauu

SEQ ID NO: 2323198 - RNA, 19 nt, Artificial Sequence
  Description of Artificial Sequence: Synthetic oligonucleotide
ggaugaauuggacuucacc

SEQ ID NO: 2323199 - RNA, 19 nt, Artificial Sequence
  Description of Artificial Sequence: Synthetic oligonucleotide
gaaccguuggagcagucca

SEQ ID NO: 2323200 - RNA, 19 nt, Artificial Sequence
  Description of Artificial Sequence: Synthetic oligonucleotide
acagaagccugugaggaug

SEQ ID NO: 2323201 - RNA, 19 nt, Artificial Sequence
  Description of Artificial Sequence: Synthetic oligonucleotide
uccaagucuccugacaccu

SEQ ID NO: 2323202 - RNA, 19 nt, Artificial Sequence
  Description of Artificial Sequence: Synthetic oligonucleotide
ucggaggaccaggauagcg

SEQ ID NO: 2323203 - RNA, 19 nt, Artificial Sequence
  Description of Artificial Sequence: Synthetic oligonucleotide
ccaguuagaauuuuacauc

SEQ ID NO: 2323204 - RNA, 19 nt, Artificial Sequence
  Description of Artificial Sequence: Synthetic oligonucleotide
aacugaagccuugaaccgu

SEQ ID NO: 2323205 - RNA, 19 nt, Artificial Sequence
  Description of Artificial Sequence: Synthetic oligonucleotide
uugggguuggggucgacac

SEQ ID NO: 2323206 - RNA, 19 nt, Artificial Sequence
  Description of Artificial Sequence: Synthetic oligonucleotide
agcaguccaagucuccuga

SEQ ID NO: 2323207 - RNA, 19 nt, Artificial Sequence
  Description of Artificial Sequence: Synthetic oligonucleotide
gagugcugggacuaaggca

SEQ ID NO: 2323208 - RNA, 19 nt, Artificial Sequence
  Description of Artificial Sequence: Synthetic oligonucleotide
guuaaacagaagccuguga

SEQ ID NO: 2323209 - RNA, 19 nt, Artificial Sequence
  Description of Artificial Sequence: Synthetic oligonucleotide
gaaaacgguuaaacagaag

SEQ ID NO: 2323210 - RNA, 19 nt, Artificial Sequence
  Description of Artificial Sequence: Synthetic oligonucleotide
ugaaccguuggagcagucc

SEQ ID NO: 2323211 - RNA, 19 nt, Artificial Sequence
  Description of Artificial Sequence: Synthetic oligonucleotide
caguuagaauuuuacaucu

SEQ ID NO: 2323212 - RNA, 19 nt, Artificial Sequence
  Description of Artificial Sequence: Synthetic oligonucleotide
cugggacuaaggcaugggc

SEQ ID NO: 2323213 - RNA, 19 nt, Artificial Sequence
  Description of Artificial Sequence: Synthetic oligonucleotide
aagucuccugacaccuccc

SEQ ID NO: 2323214 - RNA, 19 nt, Artificial Sequence
  Description of Artificial Sequence: Synthetic oligonucleotide
aacagaagccugugaggau

SEQ ID NO: 2323215 - RNA, 19 nt, Artificial Sequence
  Description of Artificial Sequence: Synthetic oligonucleotide
caccagaaauaauacagaa

SEQ ID NO: 2323216 - RNA, 19 nt, Artificial Sequence
  Description of Artificial Sequence: Synthetic oligonucleotide
aggaugcccacgaucaauc

SEQ ID NO: 2323217 - RNA, 19 nt, Artificial Sequence
  Description of Artificial Sequence: Synthetic oligonucleotide
auaauacagaaaacgguua

SEQ ID NO: 2323218 - RNA, 19 nt, Artificial Sequence
  Description of Artificial Sequence: Synthetic oligonucleotide
aaaugccaggaugcccacg

SEQ ID NO: 2323219 - RNA, 19 nt, Artificial Sequence
  Description of Artificial Sequence: Synthetic oligonucleotide
acgguuaaacagaagccug

SEQ ID NO: 2323220 - RNA, 19 nt, Artificial Sequence
  Description of Artificial Sequence: Synthetic oligonucleotide
uuggagcaguccaagucuc

SEQ ID NO: 2323221 - RNA, 19 nt, Artificial Sequence
  Description of Artificial Sequence: Synthetic oligonucleotide
agaaaacgguuaaacagaa

SEQ ID NO: 2323222 - RNA, 19 nt, Artificial Sequence
  Description of Artificial Sequence: Synthetic oligonucleotide
gugaggaugaauuggacuu

SEQ ID NO: 2323223 - RNA, 19 nt, Artificial Sequence
  Description of Artificial Sequence: Synthetic oligonucleotide
guuggagcaguccaagucu

SEQ ID NO: 2323224 - RNA, 19 nt, Artificial Sequence
  Description of Artificial Sequence: Synthetic oligonucleotide
ggaggaccaggauagcgag

SEQ ID NO: 2323225 - RNA, 19 nt, Artificial Sequence
  Description of Artificial Sequence: Synthetic oligonucleotide
cucgaaguugggguugggg

SEQ ID NO: 2323226 - RNA, 19 nt, Artificial Sequence
  Description of Artificial Sequence: Synthetic oligonucleotide
uggagcaguccaagucucc

SEQ ID NO: 2323227 - RNA, 19 nt, Artificial Sequence
  Description of Artificial Sequence: Synthetic oligonucleotide
ucucccaguuagaauuuua

SEQ ID NO: 2323228 - RNA, 19 nt, Artificial Sequence
  Description of Artificial Sequence: Synthetic oligonucleotide
ucaaucggaggaccaggau

SEQ ID NO: 2323229 - RNA, 19 nt, Artificial Sequence
  Description of Artificial Sequence: Synthetic oligonucleotide
agccugugaggaugaauug

SEQ ID NO: 2323230 - RNA, 19 nt, Artificial Sequence
  Description of Artificial Sequence: Synthetic oligonucleotide
ggaaaugccaggaugccca

SEQ ID NO: 2323231 - RNA, 19 nt, Artificial Sequence
  Description of Artificial Sequence: Synthetic oligonucleotide
aaggcaugggccaccagaa

SEQ ID NO: 2323232 - RNA, 19 nt, Artificial Sequence
  Description of Artificial Sequence: Synthetic oligonucleotide
accagaaauaauacagaaa

SEQ ID NO: 2323233 - RNA, 19 nt, Artificial Sequence
  Description of Artificial Sequence: Synthetic oligonucleotide
cugugaggaugaauuggac

SEQ ID NO: 2323234 - RNA, 19 nt, Artificial Sequence
  Description of Artificial Sequence: Synthetic oligonucleotide
auuuuacaucuaaaacuga

SEQ ID NO: 2323235 - RNA, 19 nt, Artificial Sequence
  Description of Artificial Sequence: Synthetic oligonucleotide
ugcugggacuaaggcaugg

SEQ ID NO: 2323236 - RNA, 19 nt, Artificial Sequence
  Description of Artificial Sequence: Synthetic oligonucleotide
gagcaguccaagucuccug

SEQ ID NO: 2323237 - RNA, 19 nt, Artificial Sequence
  Description of Artificial Sequence: Synthetic oligonucleotide
ugaggaugaauuggacuuc

SEQ ID NO: 2323238 - RNA, 19 nt, Artificial Sequence
  Description of Artificial Sequence: Synthetic oligonucleotide
acuucucgaaguugggguu

SEQ ID NO: 2323239 - RNA, 19 nt, Artificial Sequence
  Description of Artificial Sequence: Synthetic oligonucleotide
ugccaggaugcccacgauc

SEQ ID NO: 2323240 - RNA, 19 nt, Artificial Sequence
  Description of Artificial Sequence: Synthetic oligonucleotide
augcccacgaucaaucgga

SEQ ID NO: 2323241 - RNA, 19 nt, Artificial Sequence
  Description of Artificial Sequence: Synthetic oligonucleotide
gggacuaaggcaugggcca

SEQ ID NO: 2323242 - RNA, 19 nt, Artificial Sequence
  Description of Artificial Sequence: Synthetic oligonucleotide
aucuaaaacugaagccuug

SEQ ID NO: 2323243 - RNA, 19 nt, Artificial Sequence
  Description of Artificial Sequence: Synthetic oligonucleotide
cacgaucaaucggaggacc

SEQ ID NO: 2323244 - RNA, 19 nt, Artificial Sequence
  Description of Artificial Sequence: Synthetic oligonucleotide
gaggaugaauuggacuuca

SEQ ID NO: 2323245 - RNA, 19 nt, Artificial Sequence
  Description of Artificial Sequence: Synthetic oligonucleotide
ucaccucucccaguuagaa

SEQ ID NO: 2323246 - RNA, 19 nt, Artificial Sequence
  Description of Artificial Sequence: Synthetic oligonucleotide
ugcccacgaucaaucggag

SEQ ID NO: 2323247 - RNA, 19 nt, Artificial Sequence
  Description of Artificial Sequence: Synthetic oligonucleotide
guccaagucuccugacacc

SEQ ID NO: 2323248 - RNA, 19 nt, Artificial Sequence
  Description of Artificial Sequence: Synthetic oligonucleotide
gaaaugccaggaugcccac

SEQ ID NO: 2323249 - RNA, 19 nt, Artificial Sequence
  Description of Artificial Sequence: Synthetic oligonucleotide
caaucggaggaccaggaua

SEQ ID NO: 2323250 - RNA, 19 nt, Artificial Sequence
  Description of Artificial Sequence: Synthetic oligonucleotide
gguuaaacagaagccugug

SEQ ID NO: 2323251 - RNA, 19 nt, Artificial Sequence
  Description of Artificial Sequence: Synthetic oligonucleotide
cuaaaacugaagccuugaa

SEQ ID NO: 2323252 - RNA, 19 nt, Artificial Sequence
  Description of Artificial Sequence: Synthetic oligonucleotide
gccugugaggaugaauugg

SEQ ID NO: 2323253 - RNA, 19 nt, Artificial Sequence
  Description of Artificial Sequence: Synthetic oligonucleotide
ggaugcccacgaucaaucg

SEQ ID NO: 2323254 - RNA, 19 nt, Artificial Sequence
  Description of Artificial Sequence: Synthetic oligonucleotide
gaccaggauagcgagcguc

SEQ ID NO: 2323255 - RNA, 19 nt, Artificial Sequence
  Description of Artificial Sequence: Synthetic oligonucleotide
cuucucgaaguugggguug

SEQ ID NO: 2323256 - RNA, 19 nt, Artificial Sequence
  Description of Artificial Sequence: Synthetic oligonucleotide
cccacgaucaaucggagga

SEQ ID NO: 2323257 - RNA, 19 nt, Artificial Sequence
  Description of Artificial Sequence: Synthetic oligonucleotide
accguuggagcaguccaag

SEQ ID NO: 2323258 - RNA, 19 nt, Artificial Sequence
  Description of Artificial Sequence: Synthetic oligonucleotide
ugggguuggggucgacaca

SEQ ID NO: 2323259 - RNA, 19 nt, Artificial Sequence
  Description of Artificial Sequence: Synthetic oligonucleotide
aucaaucggaggaccagga

SEQ ID NO: 2323260 - RNA, 19 nt, Artificial Sequence
  Description of Artificial Sequence: Synthetic oligonucleotide
aggaugaauuggacuucac

SEQ ID NO: 2323261 - RNA, 19 nt, Artificial Sequence
  Description of Artificial Sequence: Synthetic oligonucleotide
gacuaaggcaugggccacc

SEQ ID NO: 2323262 - RNA, 19 nt, Artificial Sequence
  Description of Artificial Sequence: Synthetic oligonucleotide
gaauuggacuucaccucuc

SEQ ID NO: 2323263 - RNA, 19 nt, Artificial Sequence
  Description of Artificial Sequence: Synthetic oligonucleotide
acuaaggcaugggccacca

SEQ ID NO: 2323264 - RNA, 19 nt, Artificial Sequence
  Description of Artificial Sequence: Synthetic oligonucleotide
accaggauagcgagcguca

SEQ ID NO: 2323265 - RNA, 19 nt, Artificial Sequence
  Description of Artificial Sequence: Synthetic oligonucleotide
aucggaggaccaggauagc

SEQ ID NO: 2323266 - RNA, 19 nt, Artificial Sequence
  Description of Artificial Sequence: Synthetic oligonucleotide
ccugugaggaugaauugga

SEQ ID NO: 2323267 - RNA, 19 nt, Artificial Sequence
  Description of Artificial Sequence: Synthetic oligonucleotide
acgaucaaucggaggacca

SEQ ID NO: 2323268 - RNA, 19 nt, Artificial Sequence
  Description of Artificial Sequence: Synthetic oligonucleotide
gccuugaaccguuggagca

SEQ ID NO: 2323269 - RNA, 19 nt, Artificial Sequence
  Description of Artificial Sequence: Synthetic oligonucleotide
cccaguuagaauuuuacau

SEQ ID NO: 2323270 - RNA, 19 nt, Artificial Sequence
  Description of Artificial Sequence: Synthetic oligonucleotide
gucuccugacaccucccac

SEQ ID NO: 2323271 - RNA, 19 nt, Artificial Sequence
  Description of Artificial Sequence: Synthetic oligonucleotide
aguuagaauuuuacaucua

SEQ ID NO: 2323272 - RNA, 19 nt, Artificial Sequence
  Description of Artificial Sequence: Synthetic oligonucleotide
gacuucaccucucccaguu

SEQ ID NO: 2323273 - RNA, 19 nt, Artificial Sequence
  Description of Artificial Sequence: Synthetic oligonucleotide
gccaggaugcccacgauca

SEQ ID NO: 2323274 - RNA, 19 nt, Artificial Sequence
  Description of Artificial Sequence: Synthetic oligonucleotide
caggauagcgagcgucauc

SEQ ID NO: 2323275 - RNA, 19 nt, Artificial Sequence
  Description of Artificial Sequence: Synthetic oligonucleotide
caucuaaaacugaagccuu

SEQ ID NO: 2323276 - RNA, 19 nt, Artificial Sequence
  Description of Artificial Sequence: Synthetic oligonucleotide
cugaagccuugaaccguug

SEQ ID NO: 2323277 - RNA, 19 nt, Artificial Sequence
  Description of Artificial Sequence: Synthetic oligonucleotide
caguccaagucuccugaca

SEQ ID NO: 2323278 - RNA, 19 nt, Artificial Sequence
  Description of Artificial Sequence: Synthetic oligonucleotide
gaggaccaggauagcgagc

SEQ ID NO: 2323279 - RNA, 19 nt, Artificial Sequence
  Description of Artificial Sequence: Synthetic oligonucleotide
aaccguuggagcaguccaa

SEQ ID NO: 2323280 - RNA, 19 nt, Artificial Sequence
  Description of Artificial Sequence: Synthetic oligonucleotide
acugaagccuugaaccguu

SEQ ID NO: 2323281 - RNA, 19 nt, Artificial Sequence
  Description of Artificial Sequence: Synthetic oligonucleotide
ccaccagaaauaauacaga

SEQ ID NO: 2323282 - RNA, 19 nt, Artificial Sequence
  Description of Artificial Sequence: Synthetic oligonucleotide
ggccaccagaaauaauaca

SEQ ID NO: 2323283 - RNA, 19 nt, Artificial Sequence
  Description of Artificial Sequence: Synthetic oligonucleotide
uugaaccguuggagcaguc

SEQ ID NO: 2323284 - RNA, 19 nt, Artificial Sequence
  Description of Artificial Sequence: Synthetic oligonucleotide
cguuggagcaguccaaguc

SEQ ID NO: 2323285 - RNA, 19 nt, Artificial Sequence
  Description of Artificial Sequence: Synthetic oligonucleotide
gcugggacuaaggcauggg

SEQ ID NO: 2323286 - RNA, 19 nt, Artificial Sequence
  Description of Artificial Sequence: Synthetic oligonucleotide
uccugacaccucccacuau

SEQ ID NO: 2323287 - RNA, 19 nt, Artificial Sequence
  Description of Artificial Sequence: Synthetic oligonucleotide
acuucaccucucccaguua

SEQ ID NO: 2323288 - RNA, 19 nt, Artificial Sequence
  Description of Artificial Sequence: Synthetic oligonucleotide
caugggccaccagaaauaa

SEQ ID NO: 2323289 - RNA, 19 nt, Artificial Sequence
  Description of Artificial Sequence: Synthetic oligonucleotide
gcccacgaucaaucggagg

SEQ ID NO: 2323290 - RNA, 19 nt, Artificial Sequence
  Description of Artificial Sequence: Synthetic oligonucleotide
ccuugaaccguuggagcag

SEQ ID NO: 2323291 - RNA, 19 nt, Artificial Sequence
  Description of Artificial Sequence: Synthetic oligonucleotide
aaguugggguuggggucga

SEQ ID NO: 2323292 - RNA, 19 nt, Artificial Sequence
  Description of Artificial Sequence: Synthetic oligonucleotide
aggcaugggccaccagaaa

SEQ ID NO: 2323293 - RNA, 19 nt, Artificial Sequence
  Description of Artificial Sequence: Synthetic oligonucleotide
gaagccugugaggaugaau

SEQ ID NO: 2323294 - RNA, 19 nt, Artificial Sequence
  Description of Artificial Sequence: Synthetic oligonucleotide
cuccugacaccucccacua

SEQ ID NO: 2323295 - RNA, 19 nt, Artificial Sequence
  Description of Artificial Sequence: Synthetic oligonucleotide
gcaguccaagucuccugac

SEQ ID NO: 2323296 - RNA, 19 nt, Artificial Sequence
  Description of Artificial Sequence: Synthetic oligonucleotide
gccgcaccaaaguccagga

SEQ ID NO: 2323297 - RNA, 19 nt, Artificial Sequence
  Description of Artificial Sequence: Synthetic oligonucleotide
aguugggguuggggucgac

SEQ ID NO: 2323298 - RNA, 19 nt, Artificial Sequence
  Description of Artificial Sequence: Synthetic oligonucleotide
ggacuaaggcaugggccac

SEQ ID NO: 2323299 - RNA, 19 nt, Artificial Sequence
  Description of Artificial Sequence: Synthetic oligonucleotide
cgaucaaucggaggaccag

SEQ ID NO: 2323300 - RNA, 19 nt, Artificial Sequence
  Description of Artificial Sequence: Synthetic oligonucleotide
cuugaaccguuggagcagu

SEQ ID NO: 2323301 - RNA, 19 nt, Artificial Sequence
  Description of Artificial Sequence: Synthetic oligonucleotide
ggggccgcaccaaagucca

SEQ ID NO: 2323302 - RNA, 19 nt, Artificial Sequence
  Description of Artificial Sequence: Synthetic oligonucleotide
ccacgaucaaucggaggac

SEQ ID NO: 2323303 - RNA, 19 nt, Artificial Sequence
  Description of Artificial Sequence: Synthetic oligonucleotide
cggaggaccaggauagcga

SEQ ID NO: 2323304 - RNA, 19 nt, Artificial Sequence
  Description of Artificial Sequence: Synthetic oligonucleotide
ggagcaguccaagucuccu

SEQ ID NO: 2323305 - RNA, 19 nt, Artificial Sequence
  Description of Artificial Sequence: Synthetic oligonucleotide
ccaagucuccugacaccuc

SEQ ID NO: 2323306 - RNA, 19 nt, Artificial Sequence
  Description of Artificial Sequence: Synthetic oligonucleotide
augggccaccagaaauaau

SEQ ID NO: 2323307 - RNA, 19 nt, Artificial Sequence
  Description of Artificial Sequence: Synthetic oligonucleotide
caggaugcccacgaucaau

SEQ ID NO: 2323308 - RNA, 19 nt, Artificial Sequence
  Description of Artificial Sequence: Synthetic oligonucleotide
caccucucccaguuagaau

SEQ ID NO: 2323309 - RNA, 19 nt, Artificial Sequence
  Description of Artificial Sequence: Synthetic oligonucleotide
ccugacaccucccacuauu

SEQ ID NO: 2323310 - RNA, 19 nt, Artificial Sequence
  Description of Artificial Sequence: Synthetic oligonucleotide
ccgcaccaaaguccaggac

SEQ ID NO: 2323311 - RNA, 19 nt, Artificial Sequence
  Description of Artificial Sequence: Synthetic oligonucleotide
cgguuaaacagaagccugu

SEQ ID NO: 2323312 - RNA, 19 nt, Artificial Sequence
  Description of Artificial Sequence: Synthetic oligonucleotide
ggacuucaccucucccagu

SEQ ID NO: 2323313 - RNA, 19 nt, Artificial Sequence
  Description of Artificial Sequence: Synthetic oligonucleotide
cucucccaguuagaauuuu

SEQ ID NO: 2323314 - RNA, 19 nt, Artificial Sequence
  Description of Artificial Sequence: Synthetic oligonucleotide
ccaggaugcccacgaucaa

SEQ ID NO: 2323315 - RNA, 19 nt, Artificial Sequence
  Description of Artificial Sequence: Synthetic oligonucleotide
ggaccaggauagcgagcgu

SEQ ID NO: 2323316 - RNA, 19 nt, Artificial Sequence
  Description of Artificial Sequence: Synthetic oligonucleotide
ccguuggagcaguccaagu

SEQ ID NO: 2323317 - RNA, 19 nt, Artificial Sequence
  Description of Artificial Sequence: Synthetic oligonucleotide
gggccgcaccaaaguccag

SEQ ID NO: 2323318 - RNA, 19 nt, Artificial Sequence
  Description of Artificial Sequence: Synthetic oligonucleotide
ccucucccaguuagaauuu

SEQ ID NO: 2323319 - RNA, 19 nt, Artificial Sequence
  Description of Artificial Sequence: Synthetic oligonucleotide
ccaggauagcgagcgucau

SEQ ID NO: 2323320 - RNA, 19 nt, Artificial Sequence
  Description of Artificial Sequence: Synthetic oligonucleotide
auagacgagacacaggacg

SEQ ID NO: 2323321 - RNA, 19 nt, Artificial Sequence
  Description of Artificial Sequence: Synthetic oligonucleotide
ucauagacgagacacagga

SEQ ID NO: 2323322 - RNA, 19 nt, Artificial Sequence
  Description of Artificial Sequence: Synthetic oligonucleotide
uuaguucccacuaaaacac

SEQ ID NO: 2323323 - RNA, 19 nt, Artificial Sequence
  Description of Artificial Sequence: Synthetic oligonucleotide
aagaauuccaggccuuggc

SEQ ID NO: 2323324 - RNA, 19 nt, Artificial Sequence
  Description of Artificial Sequence: Synthetic oligonucleotide
auaucugagaaguaccagg

SEQ ID NO: 2323325 - RNA, 19 nt, Artificial Sequence
  Description of Artificial Sequence: Synthetic oligonucleotide
aaugggucccaucacuucg

SEQ ID NO: 2323326 - RNA, 19 nt, Artificial Sequence
  Description of Artificial Sequence: Synthetic oligonucleotide
auaauuguccaucuccuuc

SEQ ID NO: 2323327 - RNA, 19 nt, Artificial Sequence
  Description of Artificial Sequence: Synthetic oligonucleotide
uuucaaagaauuccaggcc

SEQ ID NO: 2323328 - RNA, 19 nt, Artificial Sequence
  Description of Artificial Sequence: Synthetic oligonucleotide
gaacuguuuggccagacag

SEQ ID NO: 2323329 - RNA, 19 nt, Artificial Sequence
  Description of Artificial Sequence: Synthetic oligonucleotide
caggguaugaaacaugucc

SEQ ID NO: 2323330 - RNA, 19 nt, Artificial Sequence
  Description of Artificial Sequence: Synthetic oligonucleotide
acuucggaacauuuguacc

SEQ ID NO: 2323331 - RNA, 19 nt, Artificial Sequence
  Description of Artificial Sequence: Synthetic oligonucleotide
auuuggggacagcugaucc

SEQ ID NO: 2323332 - RNA, 19 nt, Artificial Sequence
  Description of Artificial Sequence: Synthetic oligonucleotide
ucuuaguucccacuaaaac

SEQ ID NO: 2323333 - RNA, 19 nt, Artificial Sequence
  Description of Artificial Sequence: Synthetic oligonucleotide
uucaaagaauuccaggccu

SEQ ID NO: 2323334 - RNA, 19 nt, Artificial Sequence
  Description of Artificial Sequence: Synthetic oligonucleotide
ugugguaauaucugagaag

SEQ ID NO: 2323335 - RNA, 19 nt, Artificial Sequence
  Description of Artificial Sequence: Synthetic oligonucleotide
agaauuccaggccuuggcc

SEQ ID NO: 2323336 - RNA, 19 nt, Artificial Sequence
  Description of Artificial Sequence: Synthetic oligonucleotide
uaucugagaaguaccaggc

SEQ ID NO: 2323337 - RNA, 19 nt, Artificial Sequence
  Description of Artificial Sequence: Synthetic oligonucleotide
cauuucagagaacagcucc

SEQ ID NO: 2323338 - RNA, 19 nt, Artificial Sequence
  Description of Artificial Sequence: Synthetic oligonucleotide
uucuuuuggaaaugggucc

SEQ ID NO: 2323339 - RNA, 19 nt, Artificial Sequence
  Description of Artificial Sequence: Synthetic oligonucleotide
uaauaucugagaaguacca

SEQ ID NO: 2323340 - RNA, 19 nt, Artificial Sequence
  Description of Artificial Sequence: Synthetic oligonucleotide
aacauuuguaccagggccg

SEQ ID NO: 2323341 - RNA, 19 nt, Artificial Sequence
  Description of Artificial Sequence: Synthetic oligonucleotide
acuaaaacaccugggaggg

SEQ ID NO: 2323342 - RNA, 19 nt, Artificial Sequence
  Description of Artificial Sequence: Synthetic oligonucleotide
ugucauuugugucaagaac

SEQ ID NO: 2323343 - RNA, 19 nt, Artificial Sequence
  Description of Artificial Sequence: Synthetic oligonucleotide
uucccacuaaaacaccugg

SEQ ID NO: 2323344 - RNA, 19 nt, Artificial Sequence
  Description of Artificial Sequence: Synthetic oligonucleotide
agaauuuggggacagcuga

SEQ ID NO: 2323345 - RNA, 19 nt, Artificial Sequence
  Description of Artificial Sequence: Synthetic oligonucleotide
cuuaguucccacuaaaaca

SEQ ID NO: 2323346 - RNA, 19 nt, Artificial Sequence
  Description of Artificial Sequence: Synthetic oligonucleotide
gaaggauggauggagaggc

SEQ ID NO: 2323347 - RNA, 19 nt, Artificial Sequence
  Description of Artificial Sequence: Synthetic oligonucleotide
aaggacugcucauugguca

SEQ ID NO: 2323348 - RNA, 19 nt, Artificial Sequence
  Description of Artificial Sequence: Synthetic oligonucleotide
aaaugggucccaucacuuc

SEQ ID NO: 2323349 - RNA, 19 nt, Artificial Sequence
  Description of Artificial Sequence: Synthetic oligonucleotide
uaaaacaccugggagggag

SEQ ID NO: 2323350 - RNA, 19 nt, Artificial Sequence
  Description of Artificial Sequence: Synthetic oligonucleotide
aauaucugagaaguaccag

SEQ ID NO: 2323351 - RNA, 19 nt, Artificial Sequence
  Description of Artificial Sequence: Synthetic oligonucleotide
aguauaguucuuuuggaaa

SEQ ID NO: 2323352 - RNA, 19 nt, Artificial Sequence
  Description of Artificial Sequence: Synthetic oligonucleotide
aagaggguuagaauuuggg

SEQ ID NO: 2323353 - RNA, 19 nt, Artificial Sequence
  Description of Artificial Sequence: Synthetic oligonucleotide
ugugucaagaacuggcacu

SEQ ID NO: 2323354 - RNA, 19 nt, Artificial Sequence
  Description of Artificial Sequence: Synthetic oligonucleotide
uauuugacagcugugguaa

SEQ ID NO: 2323355 - RNA, 19 nt, Artificial Sequence
  Description of Artificial Sequence: Synthetic oligonucleotide
aucacuucggaacauuugu

SEQ ID NO: 2323356 - RNA, 19 nt, Artificial Sequence
  Description of Artificial Sequence: Synthetic oligonucleotide
uucacagauguuucaaaga

SEQ ID NO: 2323357 - RNA, 19 nt, Artificial Sequence
  Description of Artificial Sequence: Synthetic oligonucleotide
gaugaaggacugcucauug

SEQ ID NO: 2323358 - RNA, 19 nt, Artificial Sequence
  Description of Artificial Sequence: Synthetic oligonucleotide
cucauuggucacaucauag

SEQ ID NO: 2323359 - RNA, 19 nt, Artificial Sequence
  Description of Artificial Sequence: Synthetic oligonucleotide
cuguucgucggccagagag

SEQ ID NO: 2323360 - RNA, 19 nt, Artificial Sequence
  Description of Artificial Sequence: Synthetic oligonucleotide
ucagaguauaguucuuuug

SEQ ID NO: 2323361 - RNA, 19 nt, Artificial Sequence
  Description of Artificial Sequence: Synthetic oligonucleotide
guaauaucugagaaguacc

SEQ ID NO: 2323362 - RNA, 19 nt, Artificial Sequence
  Description of Artificial Sequence: Synthetic oligonucleotide
aauccacuguucgucggcc

SEQ ID NO: 2323363 - RNA, 19 nt, Artificial Sequence
  Description of Artificial Sequence: Synthetic oligonucleotide
agguauucggagucugggc

SEQ ID NO: 2323364 - RNA, 19 nt, Artificial Sequence
  Description of Artificial Sequence: Synthetic oligonucleotide
uagaauuuggggacagcug

SEQ ID NO: 2323365 - RNA, 19 nt, Artificial Sequence
  Description of Artificial Sequence: Synthetic oligonucleotide
uguucgucggccagagagg

SEQ ID NO: 2323366 - RNA, 19 nt, Artificial Sequence
  Description of Artificial Sequence: Synthetic oligonucleotide
uuguugcagcugaugaagg

SEQ ID NO: 2323367 - RNA, 19 nt, Artificial Sequence
  Description of Artificial Sequence: Synthetic oligonucleotide
cuuguugcagcugaugaag

SEQ ID NO: 2323368 - RNA, 19 nt, Artificial Sequence
  Description of Artificial Sequence: Synthetic oligonucleotide
aauuuggggacagcugauc

SEQ ID NO: 2323369 - RNA, 19 nt, Artificial Sequence
  Description of Artificial Sequence: Synthetic oligonucleotide
ucgaaggauggauggagag

SEQ ID NO: 2323370 - RNA, 19 nt, Artificial Sequence
  Description of Artificial Sequence: Synthetic oligonucleotide
agaguauaguucuuuugga

SEQ ID NO: 2323371 - RNA, 19 nt, Artificial Sequence
  Description of Artificial Sequence: Synthetic oligonucleotide
ucccacuaaaacaccuggg

SEQ ID NO: 2323372 - RNA, 19 nt, Artificial Sequence
  Description of Artificial Sequence: Synthetic oligonucleotide
gaagaauccacuguucguc

SEQ ID NO: 2323373 - RNA, 19 nt, Artificial Sequence
  Description of Artificial Sequence: Synthetic oligonucleotide
aaagaggguuagaauuugg

SEQ ID NO: 2323374 - RNA, 19 nt, Artificial Sequence
  Description of Artificial Sequence: Synthetic oligonucleotide
gaugcauuuggcugcuagc

SEQ ID NO: 2323375 - RNA, 19 nt, Artificial Sequence
  Description of Artificial Sequence: Synthetic oligonucleotide
uuauuugacagcuguggua

SEQ ID NO: 2323376 - RNA, 19 nt, Artificial Sequence
  Description of Artificial Sequence: Synthetic oligonucleotide
aaauggggccucauaauug

SEQ ID NO: 2323377 - RNA, 19 nt, Artificial Sequence
  Description of Artificial Sequence: Synthetic oligonucleotide
gguaauaucugagaaguac

SEQ ID NO: 2323378 - RNA, 19 nt, Artificial Sequence
  Description of Artificial Sequence: Synthetic oligonucleotide
ucuuuuggaaauggguccc

SEQ ID NO: 2323379 - RNA, 19 nt, Artificial Sequence
  Description of Artificial Sequence: Synthetic oligonucleotide
aggauggauggagaggccc

SEQ ID NO: 2323380 - RNA, 19 nt, Artificial Sequence
  Description of Artificial Sequence: Synthetic oligonucleotide
aguucuuuuggaaaugggu

SEQ ID NO: 2323381 - RNA, 19 nt, Artificial Sequence
  Description of Artificial Sequence: Synthetic oligonucleotide
agaagaauccacuguucgu

SEQ ID NO: 2323382 - RNA, 19 nt, Artificial Sequence
  Description of Artificial Sequence: Synthetic oligonucleotide
gagguauucggagucuggg

SEQ ID NO: 2323383 - RNA, 19 nt, Artificial Sequence
  Description of Artificial Sequence: Synthetic oligonucleotide
cacuucggaacauuuguac

SEQ ID NO: 2323384 - RNA, 19 nt, Artificial Sequence
  Description of Artificial Sequence: Synthetic oligonucleotide
ugucuuaguucccacuaaa

SEQ ID NO: 2323385 - RNA, 19 nt, Artificial Sequence
  Description of Artificial Sequence: Synthetic oligonucleotide
gacguugggcuucaaggcc

SEQ ID NO: 2323386 - RNA, 19 nt, Artificial Sequence
  Description of Artificial Sequence: Synthetic oligonucleotide
aggaggguggcugaaagag

SEQ ID NO: 2323387 - RNA, 19 nt, Artificial Sequence
  Description of Artificial Sequence: Synthetic oligonucleotide
gguauucggagucugggcc

SEQ ID NO: 2323388 - RNA, 19 nt, Artificial Sequence
  Description of Artificial Sequence: Synthetic oligonucleotide
uugugucaagaacuggcac

SEQ ID NO: 2323389 - RNA, 19 nt, Artificial Sequence
  Description of Artificial Sequence: Synthetic oligonucleotide
gaguauaguucuuuuggaa

SEQ ID NO: 2323390 - RNA, 19 nt, Artificial Sequence
  Description of Artificial Sequence: Synthetic oligonucleotide
agaauccacuguucgucgg

SEQ ID NO: 2323391 - RNA, 19 nt, Artificial Sequence
  Description of Artificial Sequence: Synthetic oligonucleotide
gacguugggacucucccac

SEQ ID NO: 2323392 - RNA, 19 nt, Artificial Sequence
  Description of Artificial Sequence: Synthetic oligonucleotide
ugugggacaguccaccaua

SEQ ID NO: 2323393 - RNA, 19 nt, Artificial Sequence
  Description of Artificial Sequence: Synthetic oligonucleotide
gaaagaggguuagaauuug

SEQ ID NO: 2323394 - RNA, 19 nt, Artificial Sequence
  Description of Artificial Sequence: Synthetic oligonucleotide
aggacugcucauuggucac

SEQ ID NO: 2323395 - RNA, 19 nt, Artificial Sequence
  Description of Artificial Sequence: Synthetic oligonucleotide
auaccuucacaccagggua

SEQ ID NO: 2323396 - RNA, 19 nt, Artificial Sequence
  Description of Artificial Sequence: Synthetic oligonucleotide
agagaggucugucuuaguu

SEQ ID NO: 2323397 - RNA, 19 nt, Artificial Sequence
  Description of Artificial Sequence: Synthetic oligonucleotide
ugaaauggggccucauaau

SEQ ID NO: 2323398 - RNA, 19 nt, Artificial Sequence
  Description of Artificial Sequence: Synthetic oligonucleotide
uucggaacauuuguaccag

SEQ ID NO: 2323399 - RNA, 19 nt, Artificial Sequence
  Description of Artificial Sequence: Synthetic oligonucleotide
uuuggccagacagugaaau

SEQ ID NO: 2323400 - RNA, 19 nt, Artificial Sequence
  Description of Artificial Sequence: Synthetic oligonucleotide
ggcaauuccaucuucuguc

SEQ ID NO: 2323401 - RNA, 19 nt, Artificial Sequence
  Description of Artificial Sequence: Synthetic oligonucleotide
cugggagggagguauucgg

SEQ ID NO: 2323402 - RNA, 19 nt, Artificial Sequence
  Description of Artificial Sequence: Synthetic oligonucleotide
guaugaaacauguccaccu

SEQ ID NO: 2323403 - RNA, 19 nt, Artificial Sequence
  Description of Artificial Sequence: Synthetic oligonucleotide
gugaaauggggccucauaa

SEQ ID NO: 2323404 - RNA, 19 nt, Artificial Sequence
  Description of Artificial Sequence: Synthetic oligonucleotide
uccacuguucgucggccag

SEQ ID NO: 2323405 - RNA, 19 nt, Artificial Sequence
  Description of Artificial Sequence: Synthetic oligonucleotide
cugcucauuggucacauca

SEQ ID NO: 2323406 - RNA, 19 nt, Artificial Sequence
  Description of Artificial Sequence: Synthetic oligonucleotide
ucuugccuacagcugaguc

SEQ ID NO: 2323407 - RNA, 19 nt, Artificial Sequence
  Description of Artificial Sequence: Synthetic oligonucleotide
ucaaagaauuccaggccuu

SEQ ID NO: 2323408 - RNA, 19 nt, Artificial Sequence
  Description of Artificial Sequence: Synthetic oligonucleotide
accauaccuucacaccagg

SEQ ID NO: 2323409 - RNA, 19 nt, Artificial Sequence
  Description of Artificial Sequence: Synthetic oligonucleotide
gugguaauaucugagaagu

SEQ ID NO: 2323410 - RNA, 19 nt, Artificial Sequence
  Description of Artificial Sequence: Synthetic oligonucleotide
uccacaccuguugucagag

SEQ ID NO: 2323411 - RNA, 19 nt, Artificial Sequence
  Description of Artificial Sequence: Synthetic oligonucleotide
ggaacauuuguaccagggc

SEQ ID NO: 2323412 - RNA, 19 nt, Artificial Sequence
  Description of Artificial Sequence: Synthetic oligonucleotide
acguugggcuucaaggccc

SEQ ID NO: 2323413 - RNA, 19 nt, Artificial Sequence
  Description of Artificial Sequence: Synthetic oligonucleotide
auuuguaccagggccgucu

SEQ ID NO: 2323414 - RNA, 19 nt, Artificial Sequence
  Description of Artificial Sequence: Synthetic oligonucleotide
guauucggagucugggccc

SEQ ID NO: 2323415 - RNA, 19 nt, Artificial Sequence
  Description of Artificial Sequence: Synthetic oligonucleotide
aaggauggauggagaggcc

SEQ ID NO: 2323416 - RNA, 19 nt, Artificial Sequence
  Description of Artificial Sequence: Synthetic oligonucleotide
aggguaugaaacaugucca

SEQ ID NO: 2323417 - RNA, 19 nt, Artificial Sequence
  Description of Artificial Sequence: Synthetic oligonucleotide
ucggaacauuuguaccagg

SEQ ID NO: 2323418 - RNA, 19 nt, Artificial Sequence
  Description of Artificial Sequence: Synthetic oligonucleotide
ggagcguaggguugggugg

SEQ ID NO: 2323419 - RNA, 19 nt, Artificial Sequence
  Description of Artificial Sequence: Synthetic oligonucleotide
uauucggagucugggcccg

SEQ ID NO: 2323420 - RNA, 19 nt, Artificial Sequence
  Description of Artificial Sequence: Synthetic oligonucleotide
uaguucccacuaaaacacc

SEQ ID NO: 2323421 - RNA, 19 nt, Artificial Sequence
  Description of Artificial Sequence: Synthetic oligonucleotide
uugggacucucccacaauu

SEQ ID NO: 2323422 - RNA, 19 nt, Artificial Sequence
  Description of Artificial Sequence: Synthetic oligonucleotide
gagggagguauucggaguc

SEQ ID NO: 2323423 - RNA, 19 nt, Artificial Sequence
  Description of Artificial Sequence: Synthetic oligonucleotide
ucgucggccagagaggucu

SEQ ID NO: 2323424 - RNA, 19 nt, Artificial Sequence
  Description of Artificial Sequence: Synthetic oligonucleotide
caugguaaccagccucuag

SEQ ID NO: 2323425 - RNA, 19 nt, Artificial Sequence
  Description of Artificial Sequence: Synthetic oligonucleotide
augcauuuggcugcuagcu

SEQ ID NO: 2323426 - RNA, 19 nt, Artificial Sequence
  Description of Artificial Sequence: Synthetic oligonucleotide
uuuggaaaugggucccauc

SEQ ID NO: 2323427 - RNA, 19 nt, Artificial Sequence
  Description of Artificial Sequence: Synthetic oligonucleotide
cucauuuuauuugacagcu

SEQ ID NO: 2323428 - RNA, 19 nt, Artificial Sequence
  Description of Artificial Sequence: Synthetic oligonucleotide
accaggcaauuccaucuuc

SEQ ID NO: 2323429 - RNA, 19 nt, Artificial Sequence
  Description of Artificial Sequence: Synthetic oligonucleotide
gauggauggagaggcccgg

SEQ ID NO: 2323430 - RNA, 19 nt, Artificial Sequence
  Description of Artificial Sequence: Synthetic oligonucleotide
aacuguuuggccagacagu

SEQ ID NO: 2323431 - RNA, 19 nt, Artificial Sequence
  Description of Artificial Sequence: Synthetic oligonucleotide
accaggguaugaaacaugu

SEQ ID NO: 2323432 - RNA, 19 nt, Artificial Sequence
  Description of Artificial Sequence: Synthetic oligonucleotide
gcugcuagcuucaccaugg

SEQ ID NO: 2323433 - RNA, 19 nt, Artificial Sequence
  Description of Artificial Sequence: Synthetic oligonucleotide
gguggaacuguuuggccag

SEQ ID NO: 2323434 - RNA, 19 nt, Artificial Sequence
  Description of Artificial Sequence: Synthetic oligonucleotide
ucacuucggaacauuugua

SEQ ID NO: 2323435 - RNA, 19 nt, Artificial Sequence
  Description of Artificial Sequence: Synthetic oligonucleotide
cacuuguugcagcugauga

SEQ ID NO: 2323436 - RNA, 19 nt, Artificial Sequence
  Description of Artificial Sequence: Synthetic oligonucleotide
caccaugguaaccagccuc

SEQ ID NO: 2323437 - RNA, 19 nt, Artificial Sequence
  Description of Artificial Sequence: Synthetic oligonucleotide
ggaugcauuuggcugcuag

SEQ ID NO: 2323438 - RNA, 19 nt, Artificial Sequence
  Description of Artificial Sequence: Synthetic oligonucleotide
caugccugggccugagaag

SEQ ID NO: 2323439 - RNA, 19 nt, Artificial Sequence
  Description of Artificial Sequence: Synthetic oligonucleotide
acacaggacguugggacuc

SEQ ID NO: 2323440 - RNA, 19 nt, Artificial Sequence
  Description of Artificial Sequence: Synthetic oligonucleotide
gguaugaaacauguccacc

SEQ ID NO: 2323441 - RNA, 19 nt, Artificial Sequence
  Description of Artificial Sequence: Synthetic oligonucleotide
uggccucgaaggauggaug

SEQ ID NO: 2323442 - RNA, 19 nt, Artificial Sequence
  Description of Artificial Sequence: Synthetic oligonucleotide
caccauaccuucacaccag

SEQ ID NO: 2323443 - RNA, 19 nt, Artificial Sequence
  Description of Artificial Sequence: Synthetic oligonucleotide
uaggguuggguggacguug

SEQ ID NO: 2323444 - RNA, 19 nt, Artificial Sequence
  Description of Artificial Sequence: Synthetic oligonucleotide
ggacguugggcuucaaggc

SEQ ID NO: 2323445 - RNA, 19 nt, Artificial Sequence
  Description of Artificial Sequence: Synthetic oligonucleotide
cauagacgagacacaggac

SEQ ID NO: 2323446 - RNA, 19 nt, Artificial Sequence
  Description of Artificial Sequence: Synthetic oligonucleotide
guaccaggcaauuccaucu

SEQ ID NO: 2323447 - RNA, 19 nt, Artificial Sequence
  Description of Artificial Sequence: Synthetic oligonucleotide
agugaaauggggccucaua

SEQ ID NO: 2323448 - RNA, 19 nt, Artificial Sequence
  Description of Artificial Sequence: Synthetic oligonucleotide
gaaauggggccucauaauu

SEQ ID NO: 2323449 - RNA, 19 nt, Artificial Sequence
  Description of Artificial Sequence: Synthetic oligonucleotide
cagcugguggaacuguuug

SEQ ID NO: 2323450 - RNA, 19 nt, Artificial Sequence
  Description of Artificial Sequence: Synthetic oligonucleotide
cugugguaauaucugagaa

SEQ ID NO: 2323451 - RNA, 19 nt, Artificial Sequence
  Description of Artificial Sequence: Synthetic oligonucleotide
cacaccaggguaugaaaca

SEQ ID NO: 2323452 - RNA, 19 nt, Artificial Sequence
  Description of Artificial Sequence: Synthetic oligonucleotide
aguucccacuaaaacaccu

SEQ ID NO: 2323453 - RNA, 19 nt, Artificial Sequence
  Description of Artificial Sequence: Synthetic oligonucleotide
uuugacagcugugguaaua

SEQ ID NO: 2323454 - RNA, 19 nt, Artificial Sequence
  Description of Artificial Sequence: Synthetic oligonucleotide
guuggguggacguugggcu

SEQ ID NO: 2323455 - RNA, 19 nt, Artificial Sequence
  Description of Artificial Sequence: Synthetic oligonucleotide
ugggacaguccaccauacc

SEQ ID NO: 2323456 - RNA, 19 nt, Artificial Sequence
  Description of Artificial Sequence: Synthetic oligonucleotide
ugcauuuggcugcuagcuu

SEQ ID NO: 2323457 - RNA, 19 nt, Artificial Sequence
  Description of Artificial Sequence: Synthetic oligonucleotide
gcauuuggcugcuagcuuc

SEQ ID NO: 2323458 - RNA, 19 nt, Artificial Sequence
  Description of Artificial Sequence: Synthetic oligonucleotide
ugagaaguaccaggcaauu

SEQ ID NO: 2323459 - RNA, 19 nt, Artificial Sequence
  Description of Artificial Sequence: Synthetic oligonucleotide
agggccgucuugccuacag

SEQ ID NO: 2323460 - RNA, 19 nt, Artificial Sequence
  Description of Artificial Sequence: Synthetic oligonucleotide
cucucccacaauuuaucca

SEQ ID NO: 2323461 - RNA, 19 nt, Artificial Sequence
  Description of Artificial Sequence: Synthetic oligonucleotide
gaaggacugcucauugguc

SEQ ID NO: 2323462 - RNA, 19 nt, Artificial Sequence
  Description of Artificial Sequence: Synthetic oligonucleotide
cucccacaauuuauccagc

SEQ ID NO: 2323463 - RNA, 19 nt, Artificial Sequence
  Description of Artificial Sequence: Synthetic oligonucleotide
guggacguugggcuucaag

SEQ ID NO: 2323464 - RNA, 19 nt, Artificial Sequence
  Description of Artificial Sequence: Synthetic oligonucleotide
cugucauuugugucaagaa

SEQ ID NO: 2323465 - RNA, 19 nt, Artificial Sequence
  Description of Artificial Sequence: Synthetic oligonucleotide
agacagugaaauggggccu

SEQ ID NO: 2323466 - RNA, 19 nt, Artificial Sequence
  Description of Artificial Sequence: Synthetic oligonucleotide
cagccggcagaguugccgg

SEQ ID NO: 2323467 - RNA, 19 nt, Artificial Sequence
  Description of Artificial Sequence: Synthetic oligonucleotide
guuagaauuuggggacagc

SEQ ID NO: 2323468 - RNA, 19 nt, Artificial Sequence
  Description of Artificial Sequence: Synthetic oligonucleotide
gagaaguaccaggcaauuc

SEQ ID NO: 2323469 - RNA, 19 nt, Artificial Sequence
  Description of Artificial Sequence: Synthetic oligonucleotide
ggguaugaaacauguccac

SEQ ID NO: 2323470 - RNA, 19 nt, Artificial Sequence
  Description of Artificial Sequence: Synthetic oligonucleotide
cggaacauuuguaccaggg

SEQ ID NO: 2323471 - RNA, 19 nt, Artificial Sequence
  Description of Artificial Sequence: Synthetic oligonucleotide
acgagacacaggacguugg

SEQ ID NO: 2323472 - RNA, 19 nt, Artificial Sequence
  Description of Artificial Sequence: Synthetic oligonucleotide
gcugugguaauaucugaga

SEQ ID NO: 2323473 - RNA, 19 nt, Artificial Sequence
  Description of Artificial Sequence: Synthetic oligonucleotide
ugggccugagaagaaucca

SEQ ID NO: 2323474 - RNA, 19 nt, Artificial Sequence
  Description of Artificial Sequence: Synthetic oligonucleotide
ugcuagcuucaccauggua

SEQ ID NO: 2323475 - RNA, 19 nt, Artificial Sequence
  Description of Artificial Sequence: Synthetic oligonucleotide
gguuagaauuuggggacag

SEQ ID NO: 2323476 - RNA, 19 nt, Artificial Sequence
  Description of Artificial Sequence: Synthetic oligonucleotide
acaccugggagggagguau

SEQ ID NO: 2323477 - RNA, 19 nt, Artificial Sequence
  Description of Artificial Sequence: Synthetic oligonucleotide
cacaccuguugucagagua

SEQ ID NO: 2323478 - RNA, 19 nt, Artificial Sequence
  Description of Artificial Sequence: Synthetic oligonucleotide
ggauggauggagaggcccg

SEQ ID NO: 2323479 - RNA, 19 nt, Artificial Sequence
  Description of Artificial Sequence: Synthetic oligonucleotide
acugcucauuggucacauc

SEQ ID NO: 2323480 - RNA, 19 nt, Artificial Sequence
  Description of Artificial Sequence: Synthetic oligonucleotide
acauuuguaccagggccgu

SEQ ID NO: 2323481 - RNA, 19 nt, Artificial Sequence
  Description of Artificial Sequence: Synthetic oligonucleotide
accagggccgucuugccua

SEQ ID NO: 2323482 - RNA, 19 nt, Artificial Sequence
  Description of Artificial Sequence: Synthetic oligonucleotide
ugacagcugugguaauauc

SEQ ID NO: 2323483 - RNA, 19 nt, Artificial Sequence
  Description of Artificial Sequence: Synthetic oligonucleotide
agcugaugaaggacugcuc

SEQ ID NO: 2323484 - RNA, 19 nt, Artificial Sequence
  Description of Artificial Sequence: Synthetic oligonucleotide
cagagcccaugccugggcc

SEQ ID NO: 2323485 - RNA, 19 nt, Artificial Sequence
  Description of Artificial Sequence: Synthetic oligonucleotide
cucgaaggauggauggaga

SEQ ID NO: 2323486 - RNA, 19 nt, Artificial Sequence
  Description of Artificial Sequence: Synthetic oligonucleotide
uaccaggcaauuccaucuu

SEQ ID NO: 2323487 - RNA, 19 nt, Artificial Sequence
  Description of Artificial Sequence: Synthetic oligonucleotide
uuuguaccagggccgucuu

SEQ ID NO: 2323488 - RNA, 19 nt, Artificial Sequence
  Description of Artificial Sequence: Synthetic oligonucleotide
aaguaccaggcaauuccau

SEQ ID NO: 2323489 - RNA, 19 nt, Artificial Sequence
  Description of Artificial Sequence: Synthetic oligonucleotide
gguuggguggacguugggc

SEQ ID NO: 2323490 - RNA, 19 nt, Artificial Sequence
  Description of Artificial Sequence: Synthetic oligonucleotide
accugggagggagguauuc

SEQ ID NO: 2323491 - RNA, 19 nt, Artificial Sequence
  Description of Artificial Sequence: Synthetic oligonucleotide
gucaguccaccugugggac

SEQ ID NO: 2323492 - RNA, 19 nt, Artificial Sequence
  Description of Artificial Sequence: Synthetic oligonucleotide
ggagguauucggagucugg

SEQ ID NO: 2323493 - RNA, 19 nt, Artificial Sequence
  Description of Artificial Sequence: Synthetic oligonucleotide
gacacaggacguugggacu

SEQ ID NO: 2323494 - RNA, 19 nt, Artificial Sequence
  Description of Artificial Sequence: Synthetic oligonucleotide
ggaaaugggucccaucacu

SEQ ID NO: 2323495 - RNA, 19 nt, Artificial Sequence
  Description of Artificial Sequence: Synthetic oligonucleotide
ccauaccuucacaccaggg

SEQ ID NO: 2323496 - RNA, 19 nt, Artificial Sequence
  Description of Artificial Sequence: Synthetic oligonucleotide
cacuguucgucggccagag

SEQ ID NO: 2323497 - RNA, 19 nt, Artificial Sequence
  Description of Artificial Sequence: Synthetic oligonucleotide
gaugagggucugcugggcu

SEQ ID NO: 2323498 - RNA, 19 nt, Artificial Sequence
  Description of Artificial Sequence: Synthetic oligonucleotide
ccuguggccucgaaggaug

SEQ ID NO: 2323499 - RNA, 19 nt, Artificial Sequence
  Description of Artificial Sequence: Synthetic oligonucleotide
gggauuggggaggagggug

SEQ ID NO: 2323500 - RNA, 19 nt, Artificial Sequence
  Description of Artificial Sequence: Synthetic oligonucleotide
cccacuaaaacaccuggga

SEQ ID NO: 2323501 - RNA, 19 nt, Artificial Sequence
  Description of Artificial Sequence: Synthetic oligonucleotide
gucuuaguucccacuaaaa

SEQ ID NO: 2323502 - RNA, 19 nt, Artificial Sequence
  Description of Artificial Sequence: Synthetic oligonucleotide
uggaacuguuuggccagac

SEQ ID NO: 2323503 - RNA, 19 nt, Artificial Sequence
  Description of Artificial Sequence: Synthetic oligonucleotide
gcagccggcagaguugccg

SEQ ID NO: 2323504 - RNA, 19 nt, Artificial Sequence
  Description of Artificial Sequence: Synthetic oligonucleotide
ucggagucugggcccgaac

SEQ ID NO: 2323505 - RNA, 19 nt, Artificial Sequence
  Description of Artificial Sequence: Synthetic oligonucleotide
ggcugaaagaggguuagaa

SEQ ID NO: 2323506 - RNA, 19 nt, Artificial Sequence
  Description of Artificial Sequence: Synthetic oligonucleotide
uuggguggacguugggcuu

SEQ ID NO: 2323507 - RNA, 19 nt, Artificial Sequence
  Description of Artificial Sequence: Synthetic oligonucleotide
ccaccauaccuucacacca

SEQ ID NO: 2323508 - RNA, 19 nt, Artificial Sequence
  Description of Artificial Sequence: Synthetic oligonucleotide
uccuugcccgccgagucaa

SEQ ID NO: 2323509 - RNA, 19 nt, Artificial Sequence
  Description of Artificial Sequence: Synthetic oligonucleotide
gaaaugggucccaucacuu

SEQ ID NO: 2323510 - RNA, 19 nt, Artificial Sequence
  Description of Artificial Sequence: Synthetic oligonucleotide
gaggucugucuuaguuccc

SEQ ID NO: 2323511 - RNA, 19 nt, Artificial Sequence
  Description of Artificial Sequence: Synthetic oligonucleotide
ggaacuguuuggccagaca

SEQ ID NO: 2323512 - RNA, 19 nt, Artificial Sequence
  Description of Artificial Sequence: Synthetic oligonucleotide
gaguuccacacugucauuu

SEQ ID NO: 2323513 - RNA, 19 nt, Artificial Sequence
  Description of Artificial Sequence: Synthetic oligonucleotide
caccaccaaauccacaccu

SEQ ID NO: 2323514 - RNA, 19 nt, Artificial Sequence
  Description of Artificial Sequence: Synthetic oligonucleotide
auggggccucauaauuguc

SEQ ID NO: 2323515 - RNA, 19 nt, Artificial Sequence
  Description of Artificial Sequence: Synthetic oligonucleotide
guuccacacugucauuugu

SEQ ID NO: 2323516 - RNA, 19 nt, Artificial Sequence
  Description of Artificial Sequence: Synthetic oligonucleotide
cugucuuaguucccacuaa

SEQ ID NO: 2323517 - RNA, 19 nt, Artificial Sequence
  Description of Artificial Sequence: Synthetic oligonucleotide
agaguuccacacugucauu

SEQ ID NO: 2323518 - RNA, 19 nt, Artificial Sequence
  Description of Artificial Sequence: Synthetic oligonucleotide
ugccuacagcugagucucc

SEQ ID NO: 2323519 - RNA, 19 nt, Artificial Sequence
  Description of Artificial Sequence: Synthetic oligonucleotide
cuguuuggccagacaguga

SEQ ID NO: 2323520 - RNA, 19 nt, Artificial Sequence
  Description of Artificial Sequence: Synthetic oligonucleotide
agggagguauucggagucu

SEQ ID NO: 2323521 - RNA, 19 nt, Artificial Sequence
  Description of Artificial Sequence: Synthetic oligonucleotide
gugggacaguccaccauac

SEQ ID NO: 2323522 - RNA, 19 nt, Artificial Sequence
  Description of Artificial Sequence: Synthetic oligonucleotide
gagcguaggguugggugga

SEQ ID NO: 2323523 - RNA, 19 nt, Artificial Sequence
  Description of Artificial Sequence: Synthetic oligonucleotide
uguggccucgaaggaugga

SEQ ID NO: 2323524 - RNA, 19 nt, Artificial Sequence
  Description of Artificial Sequence: Synthetic oligonucleotide
agaggcccgggagcguagg

SEQ ID NO: 2323525 - RNA, 19 nt, Artificial Sequence
  Description of Artificial Sequence: Synthetic oligonucleotide
acguugggacucucccaca

SEQ ID NO: 2323526 - RNA, 19 nt, Artificial Sequence
  Description of Artificial Sequence: Synthetic oligonucleotide
acagugaaauggggccuca

SEQ ID NO: 2323527 - RNA, 19 nt, Artificial Sequence
  Description of Artificial Sequence: Synthetic oligonucleotide
uucgucggccagagagguc

SEQ ID NO: 2323528 - RNA, 19 nt, Artificial Sequence
  Description of Artificial Sequence: Synthetic oligonucleotide
ccugggagggagguauucg

SEQ ID NO: 2323529 - RNA, 19 nt, Artificial Sequence
  Description of Artificial Sequence: Synthetic oligonucleotide
gucugucuuaguucccacu

SEQ ID NO: 2323530 - RNA, 19 nt, Artificial Sequence
  Description of Artificial Sequence: Synthetic oligonucleotide
uagcagggauuggggagga

SEQ ID NO: 2323531 - RNA, 19 nt, Artificial Sequence
  Description of Artificial Sequence: Synthetic oligonucleotide
gggccugagaagaauccac

SEQ ID NO: 2323532 - RNA, 19 nt, Artificial Sequence
  Description of Artificial Sequence: Synthetic oligonucleotide
gcugaaagaggguuagaau

SEQ ID NO: 2323533 - RNA, 19 nt, Artificial Sequence
  Description of Artificial Sequence: Synthetic oligonucleotide
agcguaggguuggguggac

SEQ ID NO: 2323534 - RNA, 19 nt, Artificial Sequence
  Description of Artificial Sequence: Synthetic oligonucleotide
cuggagagaugagggucug

SEQ ID NO: 2323535 - RNA, 19 nt, Artificial Sequence
  Description of Artificial Sequence: Synthetic oligonucleotide
cacugucauuugugucaag

SEQ ID NO: 2323536 - RNA, 19 nt, Artificial Sequence
  Description of Artificial Sequence: Synthetic oligonucleotide
uggcugcuagcuucaccau

SEQ ID NO: 2323537 - RNA, 19 nt, Artificial Sequence
  Description of Artificial Sequence: Synthetic oligonucleotide
cgagacacaggacguuggg

SEQ ID NO: 2323538 - RNA, 19 nt, Artificial Sequence
  Description of Artificial Sequence: Synthetic oligonucleotide
uucucccgguacagcuggu

SEQ ID NO: 2323539 - RNA, 19 nt, Artificial Sequence
  Description of Artificial Sequence: Synthetic oligonucleotide
ggacguugggacucuccca

SEQ ID NO: 2323540 - RNA, 19 nt, Artificial Sequence
  Description of Artificial Sequence: Synthetic oligonucleotide
gaauuuggggacagcugau

SEQ ID NO: 2323541 - RNA, 19 nt, Artificial Sequence
  Description of Artificial Sequence: Synthetic oligonucleotide
gggagguauucggagucug

SEQ ID NO: 2323542 - RNA, 19 nt, Artificial Sequence
  Description of Artificial Sequence: Synthetic oligonucleotide
acaggacguugggacucuc

SEQ ID NO: 2323543 - RNA, 19 nt, Artificial Sequence
  Description of Artificial Sequence: Synthetic oligonucleotide
ccucauaauuguccaucuc

SEQ ID NO: 2323544 - RNA, 19 nt, Artificial Sequence
  Description of Artificial Sequence: Synthetic oligonucleotide
acuguucgucggccagaga

SEQ ID NO: 2323545 - RNA, 19 nt, Artificial Sequence
  Description of Artificial Sequence: Synthetic oligonucleotide
ggccgucuugccuacagcu

SEQ ID NO: 2323546 - RNA, 19 nt, Artificial Sequence
  Description of Artificial Sequence: Synthetic oligonucleotide
gcccagagcccaugccugg

SEQ ID NO: 2323547 - RNA, 19 nt, Artificial Sequence
  Description of Artificial Sequence: Synthetic oligonucleotide
guucgucggccagagaggu

SEQ ID NO: 2323548 - RNA, 19 nt, Artificial Sequence
  Description of Artificial Sequence: Synthetic oligonucleotide
gcauuucagagaacagcuc

SEQ ID NO: 2323549 - RNA, 19 nt, Artificial Sequence
  Description of Artificial Sequence: Synthetic oligonucleotide
ggagggagguauucggagu

SEQ ID NO: 2323550 - RNA, 19 nt, Artificial Sequence
  Description of Artificial Sequence: Synthetic oligonucleotide
gcucccaacagcccagcaa

SEQ ID NO: 2323551 - RNA, 19 nt, Artificial Sequence
  Description of Artificial Sequence: Synthetic oligonucleotide
caccuguugucagaguaua

SEQ ID NO: 2323552 - RNA, 19 nt, Artificial Sequence
  Description of Artificial Sequence: Synthetic oligonucleotide
ccgaaccuucuccagccac

SEQ ID NO: 2323553 - RNA, 19 nt, Artificial Sequence
  Description of Artificial Sequence: Synthetic oligonucleotide
ccgucuugccuacagcuga

SEQ ID NO: 2323554 - RNA, 19 nt, Artificial Sequence
  Description of Artificial Sequence: Synthetic oligonucleotide
cauuuguaccagggccguc

SEQ ID NO: 2323555 - RNA, 19 nt, Artificial Sequence
  Description of Artificial Sequence: Synthetic oligonucleotide
uucggagucugggcccgaa

SEQ ID NO: 2323556 - RNA, 19 nt, Artificial Sequence
  Description of Artificial Sequence: Synthetic oligonucleotide
ccaggguaugaaacauguc

SEQ ID NO: 2323557 - RNA, 19 nt, Artificial Sequence
  Description of Artificial Sequence: Synthetic oligonucleotide
ggguuggguggacguuggg

SEQ ID NO: 2323558 - RNA, 19 nt, Artificial Sequence
  Description of Artificial Sequence: Synthetic oligonucleotide
cuaaaacaccugggaggga

SEQ ID NO: 2323559 - RNA, 19 nt, Artificial Sequence
  Description of Artificial Sequence: Synthetic oligonucleotide
gacugcucauuggucacau

SEQ ID NO: 2323560 - RNA, 19 nt, Artificial Sequence
  Description of Artificial Sequence: Synthetic oligonucleotide
ggguuagaauuuggggaca

SEQ ID NO: 2323561 - RNA, 19 nt, Artificial Sequence
  Description of Artificial Sequence: Synthetic oligonucleotide
gguggcugaaagaggguua

SEQ ID NO: 2323562 - RNA, 19 nt, Artificial Sequence
  Description of Artificial Sequence: Synthetic oligonucleotide
guggccucgaaggauggau

SEQ ID NO: 2323563 - RNA, 19 nt, Artificial Sequence
  Description of Artificial Sequence: Synthetic oligonucleotide
aaccagccucuagcaggga

SEQ ID NO: 2323564 - RNA, 19 nt, Artificial Sequence
  Description of Artificial Sequence: Synthetic oligonucleotide
gggccgucuugccuacagc

SEQ ID NO: 2323565 - RNA, 19 nt, Artificial Sequence
  Description of Artificial Sequence: Synthetic oligonucleotide
cagcuccuugcccgccgag

SEQ ID NO: 2323566 - RNA, 19 nt, Artificial Sequence
  Description of Artificial Sequence: Synthetic oligonucleotide
gcguaggguuggguggacg

SEQ ID NO: 2323567 - RNA, 19 nt, Artificial Sequence
  Description of Artificial Sequence: Synthetic oligonucleotide
guugggacucucccacaau

SEQ ID NO: 2323568 - RNA, 19 nt, Artificial Sequence
  Description of Artificial Sequence: Synthetic oligonucleotide
cgucuugccuacagcugag

SEQ ID NO: 2323569 - RNA, 19 nt, Artificial Sequence
  Description of Artificial Sequence: Synthetic oligonucleotide
cuugcccgccgagucaaaa

SEQ ID NO: 2323570 - RNA, 19 nt, Artificial Sequence
  Description of Artificial Sequence: Synthetic oligonucleotide
ccuggagagaugagggucu

SEQ ID NO: 2323571 - RNA, 19 nt, Artificial Sequence
  Description of Artificial Sequence: Synthetic oligonucleotide
agcugaucccagggccugu

SEQ ID NO: 2323572 - RNA, 19 nt, Artificial Sequence
  Description of Artificial Sequence: Synthetic oligonucleotide
cguugggcuucaaggcccc

SEQ ID NO: 2323573 - RNA, 19 nt, Artificial Sequence
  Description of Artificial Sequence: Synthetic oligonucleotide
guggaacuguuuggccaga

SEQ ID NO: 2323574 - RNA, 19 nt, Artificial Sequence
  Description of Artificial Sequence: Synthetic oligonucleotide
cccgggagcguaggguugg

SEQ ID NO: 2323575 - RNA, 19 nt, Artificial Sequence
  Description of Artificial Sequence: Synthetic oligonucleotide
ggacaguccaccauaccuu

SEQ ID NO: 2323576 - RNA, 19 nt, Artificial Sequence
  Description of Artificial Sequence: Synthetic oligonucleotide
ccugugggacaguccacca

SEQ ID NO: 2323577 - RNA, 19 nt, Artificial Sequence
  Description of Artificial Sequence: Synthetic oligonucleotide
ggacugcucauuggucaca

SEQ ID NO: 2323578 - RNA, 19 nt, Artificial Sequence
  Description of Artificial Sequence: Synthetic oligonucleotide
gggucugcugggcucccaa

SEQ ID NO: 2323579 - RNA, 19 nt, Artificial Sequence
  Description of Artificial Sequence: Synthetic oligonucleotide
auucggagucugggcccga

SEQ ID NO: 2323580 - RNA, 19 nt, Artificial Sequence
  Description of Artificial Sequence: Synthetic oligonucleotide
ggccagagaggucugucuu

SEQ ID NO: 2323581 - RNA, 19 nt, Artificial Sequence
  Description of Artificial Sequence: Synthetic oligonucleotide
gccucgaaggauggaugga

SEQ ID NO: 2323582 - RNA, 19 nt, Artificial Sequence
  Description of Artificial Sequence: Synthetic oligonucleotide
aguccaccugugggacagu

SEQ ID NO: 2323583 - RNA, 19 nt, Artificial Sequence
  Description of Artificial Sequence: Synthetic oligonucleotide
ggcucccaacagcccagca

SEQ ID NO: 2323584 - RNA, 19 nt, Artificial Sequence
  Description of Artificial Sequence: Synthetic oligonucleotide
cagccuggucaguccaccu

SEQ ID NO: 2323585 - RNA, 19 nt, Artificial Sequence
  Description of Artificial Sequence: Synthetic oligonucleotide
guaggguuggguggacguu

SEQ ID NO: 2323586 - RNA, 19 nt, Artificial Sequence
  Description of Artificial Sequence: Synthetic oligonucleotide
cugcuagcuucaccauggu

SEQ ID NO: 2323587 - RNA, 19 nt, Artificial Sequence
  Description of Artificial Sequence: Synthetic oligonucleotide
gucuccugccaggaugcau

SEQ ID NO: 2323588 - RNA, 19 nt, Artificial Sequence
  Description of Artificial Sequence: Synthetic oligonucleotide
cguaggguuggguggacgu

SEQ ID NO: 2323589 - RNA, 19 nt, Artificial Sequence
  Description of Artificial Sequence: Synthetic oligonucleotide
cugagucuccugccaggau

SEQ ID NO: 2323590 - RNA, 19 nt, Artificial Sequence
  Description of Artificial Sequence: Synthetic oligonucleotide
cguugggacucucccacaa

SEQ ID NO: 2323591 - RNA, 19 nt, Artificial Sequence
  Description of Artificial Sequence: Synthetic oligonucleotide
gcccgggagcguaggguug

SEQ ID NO: 2323592 - RNA, 19 nt, Artificial Sequence
  Description of Artificial Sequence: Synthetic oligonucleotide
cacaggacguugggacucu

SEQ ID NO: 2323593 - RNA, 19 nt, Artificial Sequence
  Description of Artificial Sequence: Synthetic oligonucleotide
gggaggaggguggcugaaa

SEQ ID NO: 2323594 - RNA, 19 nt, Artificial Sequence
  Description of Artificial Sequence: Synthetic oligonucleotide
ggcccgggagcguaggguu

SEQ ID NO: 2323595 - RNA, 19 nt, Artificial Sequence
  Description of Artificial Sequence: Synthetic oligonucleotide
ccagccucuagcagggauu

SEQ ID NO: 2323596 - RNA, 19 nt, Artificial Sequence
  Description of Artificial Sequence: Synthetic oligonucleotide
ccuucacaccaggguauga

SEQ ID NO: 2323597 - RNA, 19 nt, Artificial Sequence
  Description of Artificial Sequence: Synthetic oligonucleotide
ggguggacguugggcuuca

SEQ ID NO: 2323598 - RNA, 19 nt, Artificial Sequence
  Description of Artificial Sequence: Synthetic oligonucleotide
gggccucauaauuguccau

SEQ ID NO: 2323599 - RNA, 19 nt, Artificial Sequence
  Description of Artificial Sequence: Synthetic oligonucleotide
ggggaggaggguggcugaa

SEQ ID NO: 2323600 - RNA, 19 nt, Artificial Sequence
  Description of Artificial Sequence: Synthetic oligonucleotide
ccgggagcguaggguuggg

SEQ ID NO: 2323601 - RNA, 19 nt, Artificial Sequence
  Description of Artificial Sequence: Synthetic oligonucleotide
ggcagccggcagaguugcc

SEQ ID NO: 2323602 - RNA, 19 nt, Artificial Sequence
  Description of Artificial Sequence: Synthetic oligonucleotide
cggccagagaggucugucu

SEQ ID NO: 2323603 - RNA, 19 nt, Artificial Sequence
  Description of Artificial Sequence: Synthetic oligonucleotide
cagggccgucuugccuaca

SEQ ID NO: 2323604 - RNA, 19 nt, Artificial Sequence
  Description of Artificial Sequence: Synthetic oligonucleotide
ccaugguaaccagccucua

SEQ ID NO: 2323605 - RNA, 19 nt, Artificial Sequence
  Description of Artificial Sequence: Synthetic oligonucleotide
gguggacguugggcuucaa

SEQ ID NO: 2323606 - RNA, 19 nt, Artificial Sequence
  Description of Artificial Sequence: Synthetic oligonucleotide
ccuugcccgccgagucaaa

SEQ ID NO: 2323607 - RNA, 19 nt, Artificial Sequence
  Description of Artificial Sequence: Synthetic oligonucleotide
uaauaguggugaaagagcg

SEQ ID NO: 2323608 - RNA, 19 nt, Artificial Sequence
  Description of Artificial Sequence: Synthetic oligonucleotide
uuauccagaauauuguggg

SEQ ID NO: 2323609 - RNA, 19 nt, Artificial Sequence
  Description of Artificial Sequence: Synthetic oligonucleotide
auaagcuggccuuugaagc

SEQ ID NO: 2323610 - RNA, 19 nt, Artificial Sequence
  Description of Artificial Sequence: Synthetic oligonucleotide
aguccauguaguuagacac

SEQ ID NO: 2323611 - RNA, 19 nt, Artificial Sequence
  Description of Artificial Sequence: Synthetic oligonucleotide
uguaguuagacacaaugug

SEQ ID NO: 2323612 - RNA, 19 nt, Artificial Sequence
  Description of Artificial Sequence: Synthetic oligonucleotide
uuugcgacaauccucacug

SEQ ID NO: 2323613 - RNA, 19 nt, Artificial Sequence
  Description of Artificial Sequence: Synthetic oligonucleotide
agauugugggcuuuggacc

SEQ ID NO: 2323614 - RNA, 19 nt, Artificial Sequence
  Description of Artificial Sequence: Synthetic oligonucleotide
aggaauguuguuuugguag

SEQ ID NO: 2323615 - RNA, 19 nt, Artificial Sequence
  Description of Artificial Sequence: Synthetic oligonucleotide
gaauauugugggaagaggg

SEQ ID NO: 2323616 - RNA, 19 nt, Artificial Sequence
  Description of Artificial Sequence: Synthetic oligonucleotide
aaugggauaauagugguga

SEQ ID NO: 2323617 - RNA, 19 nt, Artificial Sequence
  Description of Artificial Sequence: Synthetic oligonucleotide
aagaacaucuuauaucccu

SEQ ID NO: 2323618 - RNA, 19 nt, Artificial Sequence
  Description of Artificial Sequence: Synthetic oligonucleotide
uaagcaaaucugcucaagg

SEQ ID NO: 2323619 - RNA, 19 nt, Artificial Sequence
  Description of Artificial Sequence: Synthetic oligonucleotide
aacaucuuauaucccuccc

SEQ ID NO: 2323620 - RNA, 19 nt, Artificial Sequence
  Description of Artificial Sequence: Synthetic oligonucleotide
ucucaaugggauaauagug

SEQ ID NO: 2323621 - RNA, 19 nt, Artificial Sequence
  Description of Artificial Sequence: Synthetic oligonucleotide
uccauuguaagcaaaucug

SEQ ID NO: 2323622 - RNA, 19 nt, Artificial Sequence
  Description of Artificial Sequence: Synthetic oligonucleotide
cucaaugggauaauagugg

SEQ ID NO: 2323623 - RNA, 19 nt, Artificial Sequence
  Description of Artificial Sequence: Synthetic oligonucleotide
aaccagaguucucacacac

SEQ ID NO: 2323624 - RNA, 19 nt, Artificial Sequence
  Description of Artificial Sequence: Synthetic oligonucleotide
auuguaagcaaaucugcuc

SEQ ID NO: 2323625 - RNA, 19 nt, Artificial Sequence
  Description of Artificial Sequence: Synthetic oligonucleotide
aaaccauccucacugaagu

SEQ ID NO: 2323626 - RNA, 19 nt, Artificial Sequence
  Description of Artificial Sequence: Synthetic oligonucleotide
ugagggucgaucucaaugg

SEQ ID NO: 2323627 - RNA, 19 nt, Artificial Sequence
  Description of Artificial Sequence: Synthetic oligonucleotide
ggcaacuucucuuugaugg

SEQ ID NO: 2323628 - RNA, 19 nt, Artificial Sequence
  Description of Artificial Sequence: Synthetic oligonucleotide
caggauaucgccaaugccc

SEQ ID NO: 2323629 - RNA, 19 nt, Artificial Sequence
  Description of Artificial Sequence: Synthetic oligonucleotide
caccuugucauuuaggaag

SEQ ID NO: 2323630 - RNA, 19 nt, Artificial Sequence
  Description of Artificial Sequence: Synthetic oligonucleotide
ucuuauaucccucccugag

SEQ ID NO: 2323631 - RNA, 19 nt, Artificial Sequence
  Description of Artificial Sequence: Synthetic oligonucleotide
accacuguaccauaugagg

SEQ ID NO: 2323632 - RNA, 19 nt, Artificial Sequence
  Description of Artificial Sequence: Synthetic oligonucleotide
aaccacuugcgcuaucugg

SEQ ID NO: 2323633 - RNA, 19 nt, Artificial Sequence
  Description of Artificial Sequence: Synthetic oligonucleotide
cugaaguccauguaguuag

SEQ ID NO: 2323634 - RNA, 19 nt, Artificial Sequence
  Description of Artificial Sequence: Synthetic oligonucleotide
aauauugugggaagagggg

SEQ ID NO: 2323635 - RNA, 19 nt, Artificial Sequence
  Description of Artificial Sequence: Synthetic oligonucleotide
aaaagaggaauguuguuuu

SEQ ID NO: 2323636 - RNA, 19 nt, Artificial Sequence
  Description of Artificial Sequence: Synthetic oligonucleotide
uaguuagacacaaugugga

SEQ ID NO: 2323637 - RNA, 19 nt, Artificial Sequence
  Description of Artificial Sequence: Synthetic oligonucleotide
agcaaaucugcucaagguc

SEQ ID NO: 2323638 - RNA, 19 nt, Artificial Sequence
  Description of Artificial Sequence: Synthetic oligonucleotide
agaguucucacacacggag

SEQ ID NO: 2323639 - RNA, 19 nt, Artificial Sequence
  Description of Artificial Sequence: Synthetic oligonucleotide
uuuaggaagccaaucuuga

SEQ ID NO: 2323640 - RNA, 19 nt, Artificial Sequence
  Description of Artificial Sequence: Synthetic oligonucleotide
aucgcuguccauuguaagc

SEQ ID NO: 2323641 - RNA, 19 nt, Artificial Sequence
  Description of Artificial Sequence: Synthetic oligonucleotide
cauggagucuccaagcagg

SEQ ID NO: 2323642 - RNA, 19 nt, Artificial Sequence
  Description of Artificial Sequence: Synthetic oligonucleotide
auaggaauccauguagcgc

SEQ ID NO: 2323643 - RNA, 19 nt, Artificial Sequence
  Description of Artificial Sequence: Synthetic oligonucleotide
ugauuuugcuguuauccag

SEQ ID NO: 2323644 - RNA, 19 nt, Artificial Sequence
  Description of Artificial Sequence: Synthetic oligonucleotide
guaguuagacacaaugugg

SEQ ID NO: 2323645 - RNA, 19 nt, Artificial Sequence
  Description of Artificial Sequence: Synthetic oligonucleotide
aucuggaauuucuguaucc

SEQ ID NO: 2323646 - RNA, 19 nt, Artificial Sequence
  Description of Artificial Sequence: Synthetic oligonucleotide
auauugugggaagaggggc

SEQ ID NO: 2323647 - RNA, 19 nt, Artificial Sequence
  Description of Artificial Sequence: Synthetic oligonucleotide
agcgcugugagcucuuugc

SEQ ID NO: 2323648 - RNA, 19 nt, Artificial Sequence
  Description of Artificial Sequence: Synthetic oligonucleotide
ucggauaauuucuuccagg

SEQ ID NO: 2323649 - RNA, 19 nt, Artificial Sequence
  Description of Artificial Sequence: Synthetic oligonucleotide
gaacacuuucaucugucgg

SEQ ID NO: 2323650 - RNA, 19 nt, Artificial Sequence
  Description of Artificial Sequence: Synthetic oligonucleotide
aagcaaaucugcucaaggu

SEQ ID NO: 2323651 - RNA, 19 nt, Artificial Sequence
  Description of Artificial Sequence: Synthetic oligonucleotide
aaugucauaggaauccaug

SEQ ID NO: 2323652 - RNA, 19 nt, Artificial Sequence
  Description of Artificial Sequence: Synthetic oligonucleotide
uguuauccagaauauugug

SEQ ID NO: 2323653 - RNA, 19 nt, Artificial Sequence
  Description of Artificial Sequence: Synthetic oligonucleotide
ucaucugucggauaauuuc

SEQ ID NO: 2323654 - RNA, 19 nt, Artificial Sequence
  Description of Artificial Sequence: Synthetic oligonucleotide
caggaaaccauccucacug

SEQ ID NO: 2323655 - RNA, 19 nt, Artificial Sequence
  Description of Artificial Sequence: Synthetic oligonucleotide
cauaggaauccauguagcg

SEQ ID NO: 2323656 - RNA, 19 nt, Artificial Sequence
  Description of Artificial Sequence: Synthetic oligonucleotide
uguucugcaccccagggac

SEQ ID NO: 2323657 - RNA, 19 nt, Artificial Sequence
  Description of Artificial Sequence: Synthetic oligonucleotide
aucucaaugggauaauagu

SEQ ID NO: 2323658 - RNA, 19 nt, Artificial Sequence
  Description of Artificial Sequence: Synthetic oligonucleotide
uuugauggucuggugaggg

SEQ ID NO: 2323659 - RNA, 19 nt, Artificial Sequence
  Description of Artificial Sequence: Synthetic oligonucleotide
gagauugugggcuuuggac

SEQ ID NO: 2323660 - RNA, 19 nt, Artificial Sequence
  Description of Artificial Sequence: Synthetic oligonucleotide
aauaguggugaaagagcgc

SEQ ID NO: 2323661 - RNA, 19 nt, Artificial Sequence
  Description of Artificial Sequence: Synthetic oligonucleotide
auguuguuuugguagagug

SEQ ID NO: 2323662 - RNA, 19 nt, Artificial Sequence
  Description of Artificial Sequence: Synthetic oligonucleotide
ugugucaaagaacaucuua

SEQ ID NO: 2323663 - RNA, 19 nt, Artificial Sequence
  Description of Artificial Sequence: Synthetic oligonucleotide
gagcuauucuuguuguagg

SEQ ID NO: 2323664 - RNA, 19 nt, Artificial Sequence
  Description of Artificial Sequence: Synthetic oligonucleotide
ucugcucaaggucauguca

SEQ ID NO: 2323665 - RNA, 19 nt, Artificial Sequence
  Description of Artificial Sequence: Synthetic oligonucleotide
acaauguggauguuggggu

SEQ ID NO: 2323666 - RNA, 19 nt, Artificial Sequence
  Description of Artificial Sequence: Synthetic oligonucleotide
uggagcuccauguagucgc

SEQ ID NO: 2323667 - RNA, 19 nt, Artificial Sequence
  Description of Artificial Sequence: Synthetic oligonucleotide
ugaaguugcuggaaguaac

SEQ ID NO: 2323668 - RNA, 19 nt, Artificial Sequence
  Description of Artificial Sequence: Synthetic oligonucleotide
agaauauugugggaagagg

SEQ ID NO: 2323669 - RNA, 19 nt, Artificial Sequence
  Description of Artificial Sequence: Synthetic oligonucleotide
cuuuggaccaccacuguac

SEQ ID NO: 2323670 - RNA, 19 nt, Artificial Sequence
  Description of Artificial Sequence: Synthetic oligonucleotide
ucaaugggauaauaguggu

SEQ ID NO: 2323671 - RNA, 19 nt, Artificial Sequence
  Description of Artificial Sequence: Synthetic oligonucleotide
ugucggauaauuucuucca

SEQ ID NO: 2323672 - RNA, 19 nt, Artificial Sequence
  Description of Artificial Sequence: Synthetic oligonucleotide
ugcgcuaucuggaauuucu

SEQ ID NO: 2323673 - RNA, 19 nt, Artificial Sequence
  Description of Artificial Sequence: Synthetic oligonucleotide
uguuguuuugguagagugu

SEQ ID NO: 2323674 - RNA, 19 nt, Artificial Sequence
  Description of Artificial Sequence: Synthetic oligonucleotide
cacaauguggauguugggg

SEQ ID NO: 2323675 - RNA, 19 nt, Artificial Sequence
  Description of Artificial Sequence: Synthetic oligonucleotide
augucaaaaucagaaauca

SEQ ID NO: 2323676 - RNA, 19 nt, Artificial Sequence
  Description of Artificial Sequence: Synthetic oligonucleotide
aguucucacacacggagcu

SEQ ID NO: 2323677 - RNA, 19 nt, Artificial Sequence
  Description of Artificial Sequence: Synthetic oligonucleotide
caucagacuguucaccucc

SEQ ID NO: 2323678 - RNA, 19 nt, Artificial Sequence
  Description of Artificial Sequence: Synthetic oligonucleotide
uaagcuggccuuugaagcc

SEQ ID NO: 2323679 - RNA, 19 nt, Artificial Sequence
  Description of Artificial Sequence: Synthetic oligonucleotide
uuucuuccaggauaucgcc

SEQ ID NO: 2323680 - RNA, 19 nt, Artificial Sequence
  Description of Artificial Sequence: Synthetic oligonucleotide
uugcaggaaaccauccuca

SEQ ID NO: 2323681 - RNA, 19 nt, Artificial Sequence
  Description of Artificial Sequence: Synthetic oligonucleotide
gaauguucugcaccccagg

SEQ ID NO: 2323682 - RNA, 19 nt, Artificial Sequence
  Description of Artificial Sequence: Synthetic oligonucleotide
ugucaaaaucagaaaucac

SEQ ID NO: 2323683 - RNA, 19 nt, Artificial Sequence
  Description of Artificial Sequence: Synthetic oligonucleotide
aggaagccaaucuugagaa

SEQ ID NO: 2323684 - RNA, 19 nt, Artificial Sequence
  Description of Artificial Sequence: Synthetic oligonucleotide
aaaucagaaaucaccugca

SEQ ID NO: 2323685 - RNA, 19 nt, Artificial Sequence
  Description of Artificial Sequence: Synthetic oligonucleotide
ugccgcaucaagaccgugg

SEQ ID NO: 2323686 - RNA, 19 nt, Artificial Sequence
  Description of Artificial Sequence: Synthetic oligonucleotide
uuuggaccaccacuguacc

SEQ ID NO: 2323687 - RNA, 19 nt, Artificial Sequence
  Description of Artificial Sequence: Synthetic oligonucleotide
auuuaggaagccaaucuug

SEQ ID NO: 2323688 - RNA, 19 nt, Artificial Sequence
  Description of Artificial Sequence: Synthetic oligonucleotide
gugagggucgaucucaaug

SEQ ID NO: 2323689 - RNA, 19 nt, Artificial Sequence
  Description of Artificial Sequence: Synthetic oligonucleotide
caucuuauaucccucccug

SEQ ID NO: 2323690 - RNA, 19 nt, Artificial Sequence
  Description of Artificial Sequence: Synthetic oligonucleotide
cuuauaucccucccugagc

SEQ ID NO: 2323691 - RNA, 19 nt, Artificial Sequence
  Description of Artificial Sequence: Synthetic oligonucleotide
guuagacacaauguggaug

SEQ ID NO: 2323692 - RNA, 19 nt, Artificial Sequence
  Description of Artificial Sequence: Synthetic oligonucleotide
gggauaauaguggugaaag

SEQ ID NO: 2323693 - RNA, 19 nt, Artificial Sequence
  Description of Artificial Sequence: Synthetic oligonucleotide
agaggaauguuguuuuggu

SEQ ID NO: 2323694 - RNA, 19 nt, Artificial Sequence
  Description of Artificial Sequence: Synthetic oligonucleotide
aaucugcucaaggucaugu

SEQ ID NO: 2323695 - RNA, 19 nt, Artificial Sequence
  Description of Artificial Sequence: Synthetic oligonucleotide
uucaccuccuccgccaucg

SEQ ID NO: 2323696 - RNA, 19 nt, Artificial Sequence
  Description of Artificial Sequence: Synthetic oligonucleotide
ugucauaggaauccaugua

SEQ ID NO: 2323697 - RNA, 19 nt, Artificial Sequence
  Description of Artificial Sequence: Synthetic oligonucleotide
aagggcgcccacgauuucc

SEQ ID NO: 2323698 - RNA, 19 nt, Artificial Sequence
  Description of Artificial Sequence: Synthetic oligonucleotide
cuugcaggaaaccauccuc

SEQ ID NO: 2323699 - RNA, 19 nt, Artificial Sequence
  Description of Artificial Sequence: Synthetic oligonucleotide
agaaaucaccugcaggcga

SEQ ID NO: 2323700 - RNA, 19 nt, Artificial Sequence
  Description of Artificial Sequence: Synthetic oligonucleotide
gauugugggcuuuggacca

SEQ ID NO: 2323701 - RNA, 19 nt, Artificial Sequence
  Description of Artificial Sequence: Synthetic oligonucleotide
gccgaaaagaugaaaagag

SEQ ID NO: 2323702 - RNA, 19 nt, Artificial Sequence
  Description of Artificial Sequence: Synthetic oligonucleotide
gaaguugcuggaaguaacc

SEQ ID NO: 2323703 - RNA, 19 nt, Artificial Sequence
  Description of Artificial Sequence: Synthetic oligonucleotide
ggugaaagagcgcugugag

SEQ ID NO: 2323704 - RNA, 19 nt, Artificial Sequence
  Description of Artificial Sequence: Synthetic oligonucleotide
acaucuuauaucccucccu

SEQ ID NO: 2323705 - RNA, 19 nt, Artificial Sequence
  Description of Artificial Sequence: Synthetic oligonucleotide
agaacaucuuauaucccuc

SEQ ID NO: 2323706 - RNA, 19 nt, Artificial Sequence
  Description of Artificial Sequence: Synthetic oligonucleotide
uaugaggcaacuucucuuu

SEQ ID NO: 2323707 - RNA, 19 nt, Artificial Sequence
  Description of Artificial Sequence: Synthetic oligonucleotide
uguugguuuugcccugaag

SEQ ID NO: 2323708 - RNA, 19 nt, Artificial Sequence
  Description of Artificial Sequence: Synthetic oligonucleotide
aaccauccucacugaaguc

SEQ ID NO: 2323709 - RNA, 19 nt, Artificial Sequence
  Description of Artificial Sequence: Synthetic oligonucleotide
uguaccauaugaggcaacu

SEQ ID NO: 2323710 - RNA, 19 nt, Artificial Sequence
  Description of Artificial Sequence: Synthetic oligonucleotide
aggauaucgccaaugcccg

SEQ ID NO: 2323711 - RNA, 19 nt, Artificial Sequence
  Description of Artificial Sequence: Synthetic oligonucleotide
ucuggaauuucuguauccu

SEQ ID NO: 2323712 - RNA, 19 nt, Artificial Sequence
  Description of Artificial Sequence: Synthetic oligonucleotide
gauaucgccaaugcccgcc

SEQ ID NO: 2323713 - RNA, 19 nt, Artificial Sequence
  Description of Artificial Sequence: Synthetic oligonucleotide
ccagaguucucacacacgg

SEQ ID NO: 2323714 - RNA, 19 nt, Artificial Sequence
  Description of Artificial Sequence: Synthetic oligonucleotide
auaugaggcaacuucucuu

SEQ ID NO: 2323715 - RNA, 19 nt, Artificial Sequence
  Description of Artificial Sequence: Synthetic oligonucleotide
cagaauauugugggaagag

SEQ ID NO: 2323716 - RNA, 19 nt, Artificial Sequence
  Description of Artificial Sequence: Synthetic oligonucleotide
aguaaccagaguucucaca

SEQ ID NO: 2323717 - RNA, 19 nt, Artificial Sequence
  Description of Artificial Sequence: Synthetic oligonucleotide
uguuuugguagaguguguc

SEQ ID NO: 2323718 - RNA, 19 nt, Artificial Sequence
  Description of Artificial Sequence: Synthetic oligonucleotide
agcucuuugcgacaauccu

SEQ ID NO: 2323719 - RNA, 19 nt, Artificial Sequence
  Description of Artificial Sequence: Synthetic oligonucleotide
ugguuuugcccugaaguug

SEQ ID NO: 2323720 - RNA, 19 nt, Artificial Sequence
  Description of Artificial Sequence: Synthetic oligonucleotide
gaauguuguuuugguagag

SEQ ID NO: 2323721 - RNA, 19 nt, Artificial Sequence
  Description of Artificial Sequence: Synthetic oligonucleotide
ucgcuguccauuguaagca

SEQ ID NO: 2323722 - RNA, 19 nt, Artificial Sequence
  Description of Artificial Sequence: Synthetic oligonucleotide
gagugugucaaagaacauc

SEQ ID NO: 2323723 - RNA, 19 nt, Artificial Sequence
  Description of Artificial Sequence: Synthetic oligonucleotide
uuaggagcccuggagcucc

SEQ ID NO: 2323724 - RNA, 19 nt, Artificial Sequence
  Description of Artificial Sequence: Synthetic oligonucleotide
uugaccacguccagcgucu

SEQ ID NO: 2323725 - RNA, 19 nt, Artificial Sequence
  Description of Artificial Sequence: Synthetic oligonucleotide
agcuauucuuguuguaggu

SEQ ID NO: 2323726 - RNA, 19 nt, Artificial Sequence
  Description of Artificial Sequence: Synthetic oligonucleotide
uugggguggaacacuuuca

SEQ ID NO: 2323727 - RNA, 19 nt, Artificial Sequence
  Description of Artificial Sequence: Synthetic oligonucleotide
guuguagguguggauaagc

SEQ ID NO: 2323728 - RNA, 19 nt, Artificial Sequence
  Description of Artificial Sequence: Synthetic oligonucleotide
ugucauuuaggaagccaau

SEQ ID NO: 2323729 - RNA, 19 nt, Artificial Sequence
  Description of Artificial Sequence: Synthetic oligonucleotide
cacggagcuauucuuguug

SEQ ID NO: 2323730 - RNA, 19 nt, Artificial Sequence
  Description of Artificial Sequence: Synthetic oligonucleotide
gucggauaauuucuuccag

SEQ ID NO: 2323731 - RNA, 19 nt, Artificial Sequence
  Description of Artificial Sequence: Synthetic oligonucleotide
acucuccaaccacuugcgc

SEQ ID NO: 2323732 - RNA, 19 nt, Artificial Sequence
  Description of Artificial Sequence: Synthetic oligonucleotide
aaguugcuggaaguaacca

SEQ ID NO: 2323733 - RNA, 19 nt, Artificial Sequence
  Description of Artificial Sequence: Synthetic oligonucleotide
ccgaaaagaugaaaagagg

SEQ ID NO: 2323734 - RNA, 19 nt, Artificial Sequence
  Description of Artificial Sequence: Synthetic oligonucleotide
ugaaaagaggaauguuguu

SEQ ID NO: 2323735 - RNA, 19 nt, Artificial Sequence
  Description of Artificial Sequence: Synthetic oligonucleotide
ggagcuauucuuguuguag

SEQ ID NO: 2323736 - RNA, 19 nt, Artificial Sequence
  Description of Artificial Sequence: Synthetic oligonucleotide
uccauguaguuagacacaa

SEQ ID NO: 2323737 - RNA, 19 nt, Artificial Sequence
  Description of Artificial Sequence: Synthetic oligonucleotide
auaucccucccugagcauc

SEQ ID NO: 2323738 - RNA, 19 nt, Artificial Sequence
  Description of Artificial Sequence: Synthetic oligonucleotide
ucaccugcaggcgaucucc

SEQ ID NO: 2323739 - RNA, 19 nt, Artificial Sequence
  Description of Artificial Sequence: Synthetic oligonucleotide
gaauccauguagcgcuccc

SEQ ID NO: 2323740 - RNA, 19 nt, Artificial Sequence
  Description of Artificial Sequence: Synthetic oligonucleotide
ugcgacaauccucacugau

SEQ ID NO: 2323741 - RNA, 19 nt, Artificial Sequence
  Description of Artificial Sequence: Synthetic oligonucleotide
gagaauguucugcacccca

SEQ ID NO: 2323742 - RNA, 19 nt, Artificial Sequence
  Description of Artificial Sequence: Synthetic oligonucleotide
uagguguggauaagcuggc

SEQ ID NO: 2323743 - RNA, 19 nt, Artificial Sequence
  Description of Artificial Sequence: Synthetic oligonucleotide
uguaagcaaaucugcucaa

SEQ ID NO: 2323744 - RNA, 19 nt, Artificial Sequence
  Description of Artificial Sequence: Synthetic oligonucleotide
caccacuguaccauaugag

SEQ ID NO: 2323745 - RNA, 19 nt, Artificial Sequence
  Description of Artificial Sequence: Synthetic oligonucleotide
ucugucggauaauuucuuc

SEQ ID NO: 2323746 - RNA, 19 nt, Artificial Sequence
  Description of Artificial Sequence: Synthetic oligonucleotide
gaagccuugcaggaaacca

SEQ ID NO: 2323747 - RNA, 19 nt, Artificial Sequence
  Description of Artificial Sequence: Synthetic oligonucleotide
caaugggauaauaguggug

SEQ ID NO: 2323748 - RNA, 19 nt, Artificial Sequence
  Description of Artificial Sequence: Synthetic oligonucleotide
ugagcaucgcaguggacuc

SEQ ID NO: 2323749 - RNA, 19 nt, Artificial Sequence
  Description of Artificial Sequence: Synthetic oligonucleotide
auaucgccaaugcccgccg

SEQ ID NO: 2323750 - RNA, 19 nt, Artificial Sequence
  Description of Artificial Sequence: Synthetic oligonucleotide
uggccuuugaagccuugca

SEQ ID NO: 2323751 - RNA, 19 nt, Artificial Sequence
  Description of Artificial Sequence: Synthetic oligonucleotide
acuugcgcuaucuggaauu

SEQ ID NO: 2323752 - RNA, 19 nt, Artificial Sequence
  Description of Artificial Sequence: Synthetic oligonucleotide
aagccaaucuugagaaugu

SEQ ID NO: 2323753 - RNA, 19 nt, Artificial Sequence
  Description of Artificial Sequence: Synthetic oligonucleotide
cuggcacaggagauugugg

SEQ ID NO: 2323754 - RNA, 19 nt, Artificial Sequence
  Description of Artificial Sequence: Synthetic oligonucleotide
aguuagacacaauguggau

SEQ ID NO: 2323755 - RNA, 19 nt, Artificial Sequence
  Description of Artificial Sequence: Synthetic oligonucleotide
ucgcaguggacucuccaac

SEQ ID NO: 2323756 - RNA, 19 nt, Artificial Sequence
  Description of Artificial Sequence: Synthetic oligonucleotide
gaaaagaggaauguuguuu

SEQ ID NO: 2323757 - RNA, 19 nt, Artificial Sequence
  Description of Artificial Sequence: Synthetic oligonucleotide
accauaugaggcaacuucu

SEQ ID NO: 2323758 - RNA, 19 nt, Artificial Sequence
  Description of Artificial Sequence: Synthetic oligonucleotide
cagaaaucaccugcaggcg

SEQ ID NO: 2323759 - RNA, 19 nt, Artificial Sequence
  Description of Artificial Sequence: Synthetic oligonucleotide
ucccugagcaucgcagugg

SEQ ID NO: 2323760 - RNA, 19 nt, Artificial Sequence
  Description of Artificial Sequence: Synthetic oligonucleotide
acgauuuccugcacccgcc

SEQ ID NO: 2323761 - RNA, 19 nt, Artificial Sequence
  Description of Artificial Sequence: Synthetic oligonucleotide
uggaccaccacuguaccau

SEQ ID NO: 2323762 - RNA, 19 nt, Artificial Sequence
  Description of Artificial Sequence: Synthetic oligonucleotide
guaagcaaaucugcucaag

SEQ ID NO: 2323763 - RNA, 19 nt, Artificial Sequence
  Description of Artificial Sequence: Synthetic oligonucleotide
uggauaagcuggccuuuga

SEQ ID NO: 2323764 - RNA, 19 nt, Artificial Sequence
  Description of Artificial Sequence: Synthetic oligonucleotide
caucgcuguccauuguaag

SEQ ID NO: 2323765 - RNA, 19 nt, Artificial Sequence
  Description of Artificial Sequence: Synthetic oligonucleotide
accguggccuucaucagac

SEQ ID NO: 2323766 - RNA, 19 nt, Artificial Sequence
  Description of Artificial Sequence: Synthetic oligonucleotide
aguggugaaagagcgcugu

SEQ ID NO: 2323767 - RNA, 19 nt, Artificial Sequence
  Description of Artificial Sequence: Synthetic oligonucleotide
guuuugguagaguguguca

SEQ ID NO: 2323768 - RNA, 19 nt, Artificial Sequence
  Description of Artificial Sequence: Synthetic oligonucleotide
uguuguagguguggauaag

SEQ ID NO: 2323769 - RNA, 19 nt, Artificial Sequence
  Description of Artificial Sequence: Synthetic oligonucleotide
gaaguccauguaguuagac

SEQ ID NO: 2323770 - RNA, 19 nt, Artificial Sequence
  Description of Artificial Sequence: Synthetic oligonucleotide
uucugcaccccagggaccc

SEQ ID NO: 2323771 - RNA, 19 nt, Artificial Sequence
  Description of Artificial Sequence: Synthetic oligonucleotide
ugagcucuuugcgacaauc

SEQ ID NO: 2323772 - RNA, 19 nt, Artificial Sequence
  Description of Artificial Sequence: Synthetic oligonucleotide
gagcucuuugcgacaaucc

SEQ ID NO: 2323773 - RNA, 19 nt, Artificial Sequence
  Description of Artificial Sequence: Synthetic oligonucleotide
ugaaguccauguaguuaga

SEQ ID NO: 2323774 - RNA, 19 nt, Artificial Sequence
  Description of Artificial Sequence: Synthetic oligonucleotide
acggagcuauucuuguugu

SEQ ID NO: 2323775 - RNA, 19 nt, Artificial Sequence
  Description of Artificial Sequence: Synthetic oligonucleotide
augcccgccgaaaagauga

SEQ ID NO: 2323776 - RNA, 19 nt, Artificial Sequence
  Description of Artificial Sequence: Synthetic oligonucleotide
uguccauuguaagcaaauc

SEQ ID NO: 2323777 - RNA, 19 nt, Artificial Sequence
  Description of Artificial Sequence: Synthetic oligonucleotide
gguuuugcccugaaguugc

SEQ ID NO: 2323778 - RNA, 19 nt, Artificial Sequence
  Description of Artificial Sequence: Synthetic oligonucleotide
gucauuuaggaagccaauc

SEQ ID NO: 2323779 - RNA, 19 nt, Artificial Sequence
  Description of Artificial Sequence: Synthetic oligonucleotide
uccuccgccccugcgaagg

SEQ ID NO: 2323780 - RNA, 19 nt, Artificial Sequence
  Description of Artificial Sequence: Synthetic oligonucleotide
ugggauaauaguggugaaa

SEQ ID NO: 2323781 - RNA, 19 nt, Artificial Sequence
  Description of Artificial Sequence: Synthetic oligonucleotide
gugaaagagcgcugugagc

SEQ ID NO: 2323782 - RNA, 19 nt, Artificial Sequence
  Description of Artificial Sequence: Synthetic oligonucleotide
ugaagccuugcaggaaacc

SEQ ID NO: 2323783 - RNA, 19 nt, Artificial Sequence
  Description of Artificial Sequence: Synthetic oligonucleotide
cugcaggcgaucuccuccg

SEQ ID NO: 2323784 - RNA, 19 nt, Artificial Sequence
  Description of Artificial Sequence: Synthetic oligonucleotide
aggcgaucuccuccgcccc

SEQ ID NO: 2323785 - RNA, 19 nt, Artificial Sequence
  Description of Artificial Sequence: Synthetic oligonucleotide
agaauguucugcaccccag

SEQ ID NO: 2323786 - RNA, 19 nt, Artificial Sequence
  Description of Artificial Sequence: Synthetic oligonucleotide
ucaucagacuguucaccuc

SEQ ID NO: 2323787 - RNA, 19 nt, Artificial Sequence
  Description of Artificial Sequence: Synthetic oligonucleotide
auguagucgcccuggcuca

SEQ ID NO: 2323788 - RNA, 19 nt, Artificial Sequence
  Description of Artificial Sequence: Synthetic oligonucleotide
cauguagcgcucccgccgc

SEQ ID NO: 2323789 - RNA, 19 nt, Artificial Sequence
  Description of Artificial Sequence: Synthetic oligonucleotide
acugaaguccauguaguua

SEQ ID NO: 2323790 - RNA, 19 nt, Artificial Sequence
  Description of Artificial Sequence: Synthetic oligonucleotide
ggccuuugaagccuugcag

SEQ ID NO: 2323791 - RNA, 19 nt, Artificial Sequence
  Description of Artificial Sequence: Synthetic oligonucleotide
ggcugccgcaucaagaccg

SEQ ID NO: 2323792 - RNA, 19 nt, Artificial Sequence
  Description of Artificial Sequence: Synthetic oligonucleotide
guauccucugcuggcacag

SEQ ID NO: 2323793 - RNA, 19 nt, Artificial Sequence
  Description of Artificial Sequence: Synthetic oligonucleotide
accacuugcgcuaucugga

SEQ ID NO: 2323794 - RNA, 19 nt, Artificial Sequence
  Description of Artificial Sequence: Synthetic oligonucleotide
augaggcaacuucucuuug

SEQ ID NO: 2323795 - RNA, 19 nt, Artificial Sequence
  Description of Artificial Sequence: Synthetic oligonucleotide
acaaugucauaggaaucca

SEQ ID NO: 2323796 - RNA, 19 nt, Artificial Sequence
  Description of Artificial Sequence: Synthetic oligonucleotide
ggaauguuguuuugguaga

SEQ ID NO: 2323797 - RNA, 19 nt, Artificial Sequence
  Description of Artificial Sequence: Synthetic oligonucleotide
ugugagcucuuugcgacaa

SEQ ID NO: 2323798 - RNA, 19 nt, Artificial Sequence
  Description of Artificial Sequence: Synthetic oligonucleotide
uuuccugcacccgcccggg

SEQ ID NO: 2323799 - RNA, 19 nt, Artificial Sequence
  Description of Artificial Sequence: Synthetic oligonucleotide
gagucuccaagcaggagga

SEQ ID NO: 2323800 - RNA, 19 nt, Artificial Sequence
  Description of Artificial Sequence: Synthetic oligonucleotide
gcaaaucugcucaagguca

SEQ ID NO: 2323801 - RNA, 19 nt, Artificial Sequence
  Description of Artificial Sequence: Synthetic oligonucleotide
agccuugcaggaaaccauc

SEQ ID NO: 2323802 - RNA, 19 nt, Artificial Sequence
  Description of Artificial Sequence: Synthetic oligonucleotide
aagccuugcaggaaaccau

SEQ ID NO: 2323803 - RNA, 19 nt, Artificial Sequence
  Description of Artificial Sequence: Synthetic oligonucleotide
uugauggucuggugagggu

SEQ ID NO: 2323804 - RNA, 19 nt, Artificial Sequence
  Description of Artificial Sequence: Synthetic oligonucleotide
aucgcaguggacucuccaa

SEQ ID NO: 2323805 - RNA, 19 nt, Artificial Sequence
  Description of Artificial Sequence: Synthetic oligonucleotide
uugcccugaaguugcugga

SEQ ID NO: 2323806 - RNA, 19 nt, Artificial Sequence
  Description of Artificial Sequence: Synthetic oligonucleotide
aggaaaccauccucacuga

SEQ ID NO: 2323807 - RNA, 19 nt, Artificial Sequence
  Description of Artificial Sequence: Synthetic oligonucleotide
caucugucggauaauuucu

SEQ ID NO: 2323808 - RNA, 19 nt, Artificial Sequence
  Description of Artificial Sequence: Synthetic oligonucleotide
gaucuccuccgccccugcg

SEQ ID NO: 2323809 - RNA, 19 nt, Artificial Sequence
  Description of Artificial Sequence: Synthetic oligonucleotide
agcccauugaccacgucca

SEQ ID NO: 2323810 - RNA, 19 nt, Artificial Sequence
  Description of Artificial Sequence: Synthetic oligonucleotide
agaccguggccuucaucag

SEQ ID NO: 2323811 - RNA, 19 nt, Artificial Sequence
  Description of Artificial Sequence: Synthetic oligonucleotide
aguggacucuccaaccacu

SEQ ID NO: 2323812 - RNA, 19 nt, Artificial Sequence
  Description of Artificial Sequence: Synthetic oligonucleotide
gcuaucuggaauuucugua

SEQ ID NO: 2323813 - RNA, 19 nt, Artificial Sequence
  Description of Artificial Sequence: Synthetic oligonucleotide
caacuucucuuugaugguc

SEQ ID NO: 2323814 - RNA, 19 nt, Artificial Sequence
  Description of Artificial Sequence: Synthetic oligonucleotide
ggauaauaguggugaaaga

SEQ ID NO: 2323815 - RNA, 19 nt, Artificial Sequence
  Description of Artificial Sequence: Synthetic oligonucleotide
accagaguucucacacacg

SEQ ID NO: 2323816 - RNA, 19 nt, Artificial Sequence
  Description of Artificial Sequence: Synthetic oligonucleotide
cccacgauuuccugcaccc

SEQ ID NO: 2323817 - RNA, 19 nt, Artificial Sequence
  Description of Artificial Sequence: Synthetic oligonucleotide
acacuuucaucugucggau

SEQ ID NO: 2323818 - RNA, 19 nt, Artificial Sequence
  Description of Artificial Sequence: Synthetic oligonucleotide
ccauguagcgcucccgccg

SEQ ID NO: 2323819 - RNA, 19 nt, Artificial Sequence
  Description of Artificial Sequence: Synthetic oligonucleotide
cucaaggucaugucaaaau

SEQ ID NO: 2323820 - RNA, 19 nt, Artificial Sequence
  Description of Artificial Sequence: Synthetic oligonucleotide
uagucgcccuggcucagga

SEQ ID NO: 2323821 - RNA, 19 nt, Artificial Sequence
  Description of Artificial Sequence: Synthetic oligonucleotide
auugugggcuuuggaccac

SEQ ID NO: 2323822 - RNA, 19 nt, Artificial Sequence
  Description of Artificial Sequence: Synthetic oligonucleotide
cauaugaggcaacuucucu

SEQ ID NO: 2323823 - RNA, 19 nt, Artificial Sequence
  Description of Artificial Sequence: Synthetic oligonucleotide
augggauaauaguggugaa

SEQ ID NO: 2323824 - RNA, 19 nt, Artificial Sequence
  Description of Artificial Sequence: Synthetic oligonucleotide
ccugcaggcgaucuccucc

SEQ ID NO: 2323825 - RNA, 19 nt, Artificial Sequence
  Description of Artificial Sequence: Synthetic oligonucleotide
gaccguggccuucaucaga

SEQ ID NO: 2323826 - RNA, 19 nt, Artificial Sequence
  Description of Artificial Sequence: Synthetic oligonucleotide
uguggauaagcuggccuuu

SEQ ID NO: 2323827 - RNA, 19 nt, Artificial Sequence
  Description of Artificial Sequence: Synthetic oligonucleotide
uauaucccucccugagcau

SEQ ID NO: 2323828 - RNA, 19 nt, Artificial Sequence
  Description of Artificial Sequence: Synthetic oligonucleotide
gccaaugcccgccgaaaag

SEQ ID NO: 2323829 - RNA, 19 nt, Artificial Sequence
  Description of Artificial Sequence: Synthetic oligonucleotide
cacguccagcgucucgucc

SEQ ID NO: 2323830 - RNA, 19 nt, Artificial Sequence
  Description of Artificial Sequence: Synthetic oligonucleotide
guggugaaagagcgcugug

SEQ ID NO: 2323831 - RNA, 19 nt, Artificial Sequence
  Description of Artificial Sequence: Synthetic oligonucleotide
gccgcaucaagaccguggc

SEQ ID NO: 2323832 - RNA, 19 nt, Artificial Sequence
  Description of Artificial Sequence: Synthetic oligonucleotide
cuguaccauaugaggcaac

SEQ ID NO: 2323833 - RNA, 19 nt, Artificial Sequence
  Description of Artificial Sequence: Synthetic oligonucleotide
gaggcaacuucucuuugau

SEQ ID NO: 2323834 - RNA, 19 nt, Artificial Sequence
  Description of Artificial Sequence: Synthetic oligonucleotide
ccgccgaaaagaugaaaag

SEQ ID NO: 2323835 - RNA, 19 nt, Artificial Sequence
  Description of Artificial Sequence: Synthetic oligonucleotide
gauguugguuuugcccuga

SEQ ID NO: 2323836 - RNA, 19 nt, Artificial Sequence
  Description of Artificial Sequence: Synthetic oligonucleotide
gagcgcugugagcucuuug

SEQ ID NO: 2323837 - RNA, 19 nt, Artificial Sequence
  Description of Artificial Sequence: Synthetic oligonucleotide
uugcgacaauccucacuga

SEQ ID NO: 2323838 - RNA, 19 nt, Artificial Sequence
  Description of Artificial Sequence: Synthetic oligonucleotide
ucuuugcgacaauccucac

SEQ ID NO: 2323839 - RNA, 19 nt, Artificial Sequence
  Description of Artificial Sequence: Synthetic oligonucleotide
ggauguugguuuugcccug

SEQ ID NO: 2323840 - RNA, 19 nt, Artificial Sequence
  Description of Artificial Sequence: Synthetic oligonucleotide
uguagucgcccuggcucag

SEQ ID NO: 2323841 - RNA, 19 nt, Artificial Sequence
  Description of Artificial Sequence: Synthetic oligonucleotide
gaagaggggcaucgcuguc

SEQ ID NO: 2323842 - RNA, 19 nt, Artificial Sequence
  Description of Artificial Sequence: Synthetic oligonucleotide
aggucaugucaaaaucaga

SEQ ID NO: 2323843 - RNA, 19 nt, Artificial Sequence
  Description of Artificial Sequence: Synthetic oligonucleotide
uaucgccaaugcccgccga

SEQ ID NO: 2323844 - RNA, 19 nt, Artificial Sequence
  Description of Artificial Sequence: Synthetic oligonucleotide
aggaauccauguagcgcuc

SEQ ID NO: 2323845 - RNA, 19 nt, Artificial Sequence
  Description of Artificial Sequence: Synthetic oligonucleotide
gcgcugugagcucuuugcg

SEQ ID NO: 2323846 - RNA, 19 nt, Artificial Sequence
  Description of Artificial Sequence: Synthetic oligonucleotide
gggcuuuggaccaccacug

SEQ ID NO: 2323847 - RNA, 19 nt, Artificial Sequence
  Description of Artificial Sequence: Synthetic oligonucleotide
cuuaggagcccuggagcuc

SEQ ID NO: 2323848 - RNA, 19 nt, Artificial Sequence
  Description of Artificial Sequence: Synthetic oligonucleotide
aucgccaaugcccgccgaa

SEQ ID NO: 2323849 - RNA, 19 nt, Artificial Sequence
  Description of Artificial Sequence: Synthetic oligonucleotide
ccauaugaggcaacuucuc

SEQ ID NO: 2323850 - RNA, 19 nt, Artificial Sequence
  Description of Artificial Sequence: Synthetic oligonucleotide
uugugggcuuuggaccacc

SEQ ID NO: 2323851 - RNA, 19 nt, Artificial Sequence
  Description of Artificial Sequence: Synthetic oligonucleotide
guccauguaguuagacaca

SEQ ID NO: 2323852 - RNA, 19 nt, Artificial Sequence
  Description of Artificial Sequence: Synthetic oligonucleotide
gcgacaauccucacugaug

SEQ ID NO: 2323853 - RNA, 19 nt, Artificial Sequence
  Description of Artificial Sequence: Synthetic oligonucleotide
gcccugaaguugcuggaag

SEQ ID NO: 2323854 - RNA, 19 nt, Artificial Sequence
  Description of Artificial Sequence: Synthetic oligonucleotide
ccauggagucuccaagcag

SEQ ID NO: 2323855 - RNA, 19 nt, Artificial Sequence
  Description of Artificial Sequence: Synthetic oligonucleotide
cagaguucucacacacgga

SEQ ID NO: 2323856 - RNA, 19 nt, Artificial Sequence
  Description of Artificial Sequence: Synthetic oligonucleotide
cgacaauccucacugauga

SEQ ID NO: 2323857 - RNA, 19 nt, Artificial Sequence
  Description of Artificial Sequence: Synthetic oligonucleotide
ugcaggcgaucuccuccgc

SEQ ID NO: 2323858 - RNA, 19 nt, Artificial Sequence
  Description of Artificial Sequence: Synthetic oligonucleotide
ucgaucucaaugggauaau

SEQ ID NO: 2323859 - RNA, 19 nt, Artificial Sequence
  Description of Artificial Sequence: Synthetic oligonucleotide
ggcgcccacgauuuccugc

SEQ ID NO: 2323860 - RNA, 19 nt, Artificial Sequence
  Description of Artificial Sequence: Synthetic oligonucleotide
gucuggugagggucgaucu

SEQ ID NO: 2323861 - RNA, 19 nt, Artificial Sequence
  Description of Artificial Sequence: Synthetic oligonucleotide
aggggcaucgcuguccauu

SEQ ID NO: 2323862 - RNA, 19 nt, Artificial Sequence
  Description of Artificial Sequence: Synthetic oligonucleotide
ugcccugaaguugcuggaa

SEQ ID NO: 2323863 - RNA, 19 nt, Artificial Sequence
  Description of Artificial Sequence: Synthetic oligonucleotide
cucguccuucuccagcaca

SEQ ID NO: 2323864 - RNA, 19 nt, Artificial Sequence
  Description of Artificial Sequence: Synthetic oligonucleotide
ucccucccugagcaucgca

SEQ ID NO: 2323865 - RNA, 19 nt, Artificial Sequence
  Description of Artificial Sequence: Synthetic oligonucleotide
caucgcaguggacucucca

SEQ ID NO: 2323866 - RNA, 19 nt, Artificial Sequence
  Description of Artificial Sequence: Synthetic oligonucleotide
caagaccguggccuucauc

SEQ ID NO: 2323867 - RNA, 19 nt, Artificial Sequence
  Description of Artificial Sequence: Synthetic oligonucleotide
gugggcuuuggaccaccac

SEQ ID NO: 2323868 - RNA, 19 nt, Artificial Sequence
  Description of Artificial Sequence: Synthetic oligonucleotide
guguggauaagcuggccuu

SEQ ID NO: 2323869 - RNA, 19 nt, Artificial Sequence
  Description of Artificial Sequence: Synthetic oligonucleotide
ucgccaaugcccgccgaaa

SEQ ID NO: 2323870 - RNA, 19 nt, Artificial Sequence
  Description of Artificial Sequence: Synthetic oligonucleotide
guagucgcccuggcucagg

SEQ ID NO: 2323871 - RNA, 19 nt, Artificial Sequence
  Description of Artificial Sequence: Synthetic oligonucleotide
agagugugucaaagaacau

SEQ ID NO: 2323872 - RNA, 19 nt, Artificial Sequence
  Description of Artificial Sequence: Synthetic oligonucleotide
cccgccgaaaagaugaaaa

SEQ ID NO: 2323873 - RNA, 19 nt, Artificial Sequence
  Description of Artificial Sequence: Synthetic oligonucleotide
ggaaaccauccucacugaa

SEQ ID NO: 2323874 - RNA, 19 nt, Artificial Sequence
  Description of Artificial Sequence: Synthetic oligonucleotide
ggaauccauguagcgcucc

SEQ ID NO: 2323875 - RNA, 19 nt, Artificial Sequence
  Description of Artificial Sequence: Synthetic oligonucleotide
guucugcaccccagggacc

SEQ ID NO: 2323876 - RNA, 19 nt, Artificial Sequence
  Description of Artificial Sequence: Synthetic oligonucleotide
ugcgaagggcgcccacgau

SEQ ID NO: 2323877 - RNA, 19 nt, Artificial Sequence
  Description of Artificial Sequence: Synthetic oligonucleotide
gagcuccauguagucgccc

SEQ ID NO: 2323878 - RNA, 19 nt, Artificial Sequence
  Description of Artificial Sequence: Synthetic oligonucleotide
cacacggagcuauucuugu

SEQ ID NO: 2323879 - RNA, 19 nt, Artificial Sequence
  Description of Artificial Sequence: Synthetic oligonucleotide
ggaagaggggcaucgcugu

SEQ ID NO: 2323880 - RNA, 19 nt, Artificial Sequence
  Description of Artificial Sequence: Synthetic oligonucleotide
auguugguuuugcccugaa

SEQ ID NO: 2323881 - RNA, 19 nt, Artificial Sequence
  Description of Artificial Sequence: Synthetic oligonucleotide
aucccucccugagcaucgc

SEQ ID NO: 2323882 - RNA, 19 nt, Artificial Sequence
  Description of Artificial Sequence: Synthetic oligonucleotide
ccaccacuguaccauauga

SEQ ID NO: 2323883 - RNA, 19 nt, Artificial Sequence
  Description of Artificial Sequence: Synthetic oligonucleotide
ggauaucgccaaugcccgc

SEQ ID NO: 2323884 - RNA, 19 nt, Artificial Sequence
  Description of Artificial Sequence: Synthetic oligonucleotide
ggaaguaaccagaguucuc

SEQ ID NO: 2323885 - RNA, 19 nt, Artificial Sequence
  Description of Artificial Sequence: Synthetic oligonucleotide
caaugucauaggaauccau

SEQ ID NO: 2323886 - RNA, 19 nt, Artificial Sequence
  Description of Artificial Sequence: Synthetic oligonucleotide
uugcgcuaucuggaauuuc

SEQ ID NO: 2323887 - RNA, 19 nt, Artificial Sequence
  Description of Artificial Sequence: Synthetic oligonucleotide
ugcccgccgaaaagaugaa

SEQ ID NO: 2323888 - RNA, 19 nt, Artificial Sequence
  Description of Artificial Sequence: Synthetic oligonucleotide
caucaagaccguggccuuc

SEQ ID NO: 2323889 - RNA, 19 nt, Artificial Sequence
  Description of Artificial Sequence: Synthetic oligonucleotide
ggauaauuucuuccaggau

SEQ ID NO: 2323890 - RNA, 19 nt, Artificial Sequence
  Description of Artificial Sequence: Synthetic oligonucleotide
gcccacgauuuccugcacc

SEQ ID NO: 2323891 - RNA, 19 nt, Artificial Sequence
  Description of Artificial Sequence: Synthetic oligonucleotide
gcacaaugucauaggaauc

SEQ ID NO: 2323892 - RNA, 19 nt, Artificial Sequence
  Description of Artificial Sequence: Synthetic oligonucleotide
cugcgaagggcgcccacga

SEQ ID NO: 2323893 - RNA, 19 nt, Artificial Sequence
  Description of Artificial Sequence: Synthetic oligonucleotide
ggcaucgcuguccauugua

SEQ ID NO: 2323894 - RNA, 19 nt, Artificial Sequence
  Description of Artificial Sequence: Synthetic oligonucleotide
gugggaagaggggcaucgc

SEQ ID NO: 2323895 - RNA, 19 nt, Artificial Sequence
  Description of Artificial Sequence: Synthetic oligonucleotide
gaagggcgcccacgauuuc

SEQ ID NO: 2323896 - RNA, 19 nt, Artificial Sequence
  Description of Artificial Sequence: Synthetic oligonucleotide
gccuugcaggaaaccaucc

SEQ ID NO: 2323897 - RNA, 19 nt, Artificial Sequence
  Description of Artificial Sequence: Synthetic oligonucleotide
cacacacggagcuauucuu

SEQ ID NO: 2323898 - RNA, 19 nt, Artificial Sequence
  Description of Artificial Sequence: Synthetic oligonucleotide
gcuuuggaccaccacugua

SEQ ID NO: 2323899 - RNA, 19 nt, Artificial Sequence
  Description of Artificial Sequence: Synthetic oligonucleotide
gacaauccucacugaugau

SEQ ID NO: 2323900 - RNA, 19 nt, Artificial Sequence
  Description of Artificial Sequence: Synthetic oligonucleotide
gcgcccacgauuuccugca

SEQ ID NO: 2323901 - RNA, 19 nt, Artificial Sequence
  Description of Artificial Sequence: Synthetic oligonucleotide
ccugcgaagggcgcccacg

SEQ ID NO: 2323902 - RNA, 19 nt, Artificial Sequence
  Description of Artificial Sequence: Synthetic oligonucleotide
ccagaauauugugggaaga

SEQ ID NO: 2323903 - RNA, 19 nt, Artificial Sequence
  Description of Artificial Sequence: Synthetic oligonucleotide
auguagcgcucccgccgcu

SEQ ID NO: 2323904 - RNA, 19 nt, Artificial Sequence
  Description of Artificial Sequence: Synthetic oligonucleotide
gggaccccaucagccauag

SEQ ID NO: 2323905 - RNA, 19 nt, Artificial Sequence
  Description of Artificial Sequence: Synthetic oligonucleotide
agucgcccuggcucaggau

SEQ ID NO: 2323906 - RNA, 19 nt, Artificial Sequence
  Description of Artificial Sequence: Synthetic oligonucleotide
caaugcccgccgaaaagau

SEQ ID NO: 2323907 - RNA, 19 nt, Artificial Sequence
  Description of Artificial Sequence: Synthetic oligonucleotide
gggucgaucucaaugggau

SEQ ID NO: 2323908 - RNA, 19 nt, Artificial Sequence
  Description of Artificial Sequence: Synthetic oligonucleotide
gcgcuaucuggaauuucug

SEQ ID NO: 2323909 - RNA, 19 nt, Artificial Sequence
  Description of Artificial Sequence: Synthetic oligonucleotide
ccuugucauuuaggaagcc

SEQ ID NO: 2323910 - RNA, 19 nt, Artificial Sequence
  Description of Artificial Sequence: Synthetic oligonucleotide
augugcugcagcagcccau

SEQ ID NO: 2323911 - RNA, 19 nt, Artificial Sequence
  Description of Artificial Sequence: Synthetic oligonucleotide
cccauggagucuccaagca

SEQ ID NO: 2323912 - RNA, 19 nt, Artificial Sequence
  Description of Artificial Sequence: Synthetic oligonucleotide
ccuccuccgccaucgcgcc

SEQ ID NO: 2323913 - RNA, 19 nt, Artificial Sequence
  Description of Artificial Sequence: Synthetic oligonucleotide
cacccgcccgggcugccgc

SEQ ID NO: 2323914 - RNA, 19 nt, Artificial Sequence
  Description of Artificial Sequence: Synthetic oligonucleotide
cgccgaaaagaugaaaaga

SEQ ID NO: 2323915 - RNA, 19 nt, Artificial Sequence
  Description of Artificial Sequence: Synthetic oligonucleotide
ggucgaucucaaugggaua

SEQ ID NO: 2323916 - RNA, 19 nt, Artificial Sequence
  Description of Artificial Sequence: Synthetic oligonucleotide
cuccuccgccccugcgaag

SEQ ID NO: 2323917 - RNA, 19 nt, Artificial Sequence
  Description of Artificial Sequence: Synthetic oligonucleotide
gcccauugaccacguccag

SEQ ID NO: 2323918 - RNA, 19 nt, Artificial Sequence
  Description of Artificial Sequence: Synthetic oligonucleotide
ccaccuugucauuuaggaa

SEQ ID NO: 2323919 - RNA, 19 nt, Artificial Sequence
  Description of Artificial Sequence: Synthetic oligonucleotide
cacugaaguccauguaguu

SEQ ID NO: 2323920 - RNA, 19 nt, Artificial Sequence
  Description of Artificial Sequence: Synthetic oligonucleotide
ccacgauuuccugcacccg

SEQ ID NO: 2323921 - RNA, 19 nt, Artificial Sequence
  Description of Artificial Sequence: Synthetic oligonucleotide
gcaucgcuguccauuguaa

SEQ ID NO: 2323922 - RNA, 19 nt, Artificial Sequence
  Description of Artificial Sequence: Synthetic oligonucleotide
ugaccacguccagcgucuc

SEQ ID NO: 2323923 - RNA, 19 nt, Artificial Sequence
  Description of Artificial Sequence: Synthetic oligonucleotide
gcucccgccgcuccuccac

SEQ ID NO: 2323924 - RNA, 19 nt, Artificial Sequence
  Description of Artificial Sequence: Synthetic oligonucleotide
ccgcaucaagaccguggcc

SEQ ID NO: 2323925 - RNA, 19 nt, Artificial Sequence
  Description of Artificial Sequence: Synthetic oligonucleotide
cccugagcaucgcagugga

SEQ ID NO: 2323926 - RNA, 19 nt, Artificial Sequence
  Description of Artificial Sequence: Synthetic oligonucleotide
gcgucucguccuucuccag

SEQ ID NO: 2323927 - RNA, 19 nt, Artificial Sequence
  Description of Artificial Sequence: Synthetic oligonucleotide
gagcaucgcaguggacucu

SEQ ID NO: 2323928 - RNA, 19 nt, Artificial Sequence
  Description of Artificial Sequence: Synthetic oligonucleotide
gaccaccacuguaccauau

SEQ ID NO: 2323929 - RNA, 19 nt, Artificial Sequence
  Description of Artificial Sequence: Synthetic oligonucleotide
cugccgcaucaagaccgug

SEQ ID NO: 2323930 - RNA, 19 nt, Artificial Sequence
  Description of Artificial Sequence: Synthetic oligonucleotide
agagcgcugugagcucuuu

SEQ ID NO: 2323931 - RNA, 19 nt, Artificial Sequence
  Description of Artificial Sequence: Synthetic oligonucleotide
cauugaccacguccagcgu

SEQ ID NO: 2323932 - RNA, 19 nt, Artificial Sequence
  Description of Artificial Sequence: Synthetic oligonucleotide
ccgggcugccgcaucaaga

SEQ ID NO: 2323933 - RNA, 19 nt, Artificial Sequence
  Description of Artificial Sequence: Synthetic oligonucleotide
cacuugcgcuaucuggaau

SEQ ID NO: 2323934 - RNA, 19 nt, Artificial Sequence
  Description of Artificial Sequence: Synthetic oligonucleotide
cugcacccgcccgggcugc

SEQ ID NO: 2323935 - RNA, 19 nt, Artificial Sequence
  Description of Artificial Sequence: Synthetic oligonucleotide
cuugcgcuaucuggaauuu

SEQ ID NO: 2323936 - RNA, 19 nt, Artificial Sequence
  Description of Artificial Sequence: Synthetic oligonucleotide
ggaccaccacuguaccaua

SEQ ID NO: 2323937 - RNA, 19 nt, Artificial Sequence
  Description of Artificial Sequence: Synthetic oligonucleotide
cugcaccccagggacccca

SEQ ID NO: 2323938 - RNA, 19 nt, Artificial Sequence
  Description of Artificial Sequence: Synthetic oligonucleotide
ggcuuuggaccaccacugu

SEQ ID NO: 2323939 - RNA, 19 nt, Artificial Sequence
  Description of Artificial Sequence: Synthetic oligonucleotide
gcgaucuccuccgccccug

SEQ ID NO: 2323940 - RNA, 19 nt, Artificial Sequence
  Description of Artificial Sequence: Synthetic oligonucleotide
ccacuugcgcuaucuggaa

SEQ ID NO: 2323941 - RNA, 19 nt, Artificial Sequence
  Description of Artificial Sequence: Synthetic oligonucleotide
ugcacccgcccgggcugcc

SEQ ID NO: 2323942 - RNA, 19 nt, Artificial Sequence
  Description of Artificial Sequence: Synthetic oligonucleotide
gcgaagggcgcccacgauu

SEQ ID NO: 2323943 - RNA, 19 nt, Artificial Sequence
  Description of Artificial Sequence: Synthetic oligonucleotide
guuuugcccugaaguugcu

SEQ ID NO: 2323944 - RNA, 19 nt, Artificial Sequence
  Description of Artificial Sequence: Synthetic oligonucleotide
ccaaccacuugcgcuaucu

SEQ ID NO: 2323945 - RNA, 19 nt, Artificial Sequence
  Description of Artificial Sequence: Synthetic oligonucleotide
cccgggcugccgcaucaag

SEQ ID NO: 2323946 - RNA, 19 nt, Artificial Sequence
  Description of Artificial Sequence: Synthetic oligonucleotide
gccccugcgaagggcgccc

SEQ ID NO: 2323947 - RNA, 19 nt, Artificial Sequence
  Description of Artificial Sequence: Synthetic oligonucleotide
cauccucacugaaguccau

SEQ ID NO: 2323948 - RNA, 19 nt, Artificial Sequence
  Description of Artificial Sequence: Synthetic oligonucleotide
gugagcucuuugcgacaau

SEQ ID NO: 2323949 - RNA, 19 nt, Artificial Sequence
  Description of Artificial Sequence: Synthetic oligonucleotide
ccucccugagcaucgcagu

SEQ ID NO: 2323950 - RNA, 19 nt, Artificial Sequence
  Description of Artificial Sequence: Synthetic oligonucleotide
ggugagggucgaucucaau

SEQ ID NO: 2323951 - RNA, 19 nt, Artificial Sequence
  Description of Artificial Sequence: Synthetic oligonucleotide
gcagcccauugaccacguc

SEQ ID NO: 2323952 - RNA, 19 nt, Artificial Sequence
  Description of Artificial Sequence: Synthetic oligonucleotide
gcacccgcccgggcugccg

SEQ ID NO: 2323953 - RNA, 19 nt, Artificial Sequence
  Description of Artificial Sequence: Synthetic oligonucleotide
cgaagggcgcccacgauuu

SEQ ID NO: 2323954 - RNA, 19 nt, Artificial Sequence
  Description of Artificial Sequence: Synthetic oligonucleotide
ggccuucaucagacuguuc

SEQ ID NO: 2323955 - RNA, 19 nt, Artificial Sequence
  Description of Artificial Sequence: Synthetic oligonucleotide
cgaucucaaugggauaaua

SEQ ID NO: 2323956 - RNA, 19 nt, Artificial Sequence
  Description of Artificial Sequence: Synthetic oligonucleotide
cgcuguccauuguaagcaa

SEQ ID NO: 2323957 - RNA, 19 nt, Artificial Sequence
  Description of Artificial Sequence: Synthetic oligonucleotide
gcccgccgaaaagaugaaa

SEQ ID NO: 2323958 - RNA, 19 nt, Artificial Sequence
  Description of Artificial Sequence: Synthetic oligonucleotide
ccauguaguuagacacaau

SEQ ID NO: 2323959 - RNA, 19 nt, Artificial Sequence
  Description of Artificial Sequence: Synthetic oligonucleotide
gaggggcaucgcuguccau

SEQ ID NO: 2323960 - RNA, 19 nt, Artificial Sequence
  Description of Artificial Sequence: Synthetic oligonucleotide
cgccaaugcccgccgaaaa

SEQ ID NO: 2323961 - RNA, 19 nt, Artificial Sequence
  Description of Artificial Sequence: Synthetic oligonucleotide
gggcaucgcuguccauugu

SEQ ID NO: 2323962 - RNA, 19 nt, Artificial Sequence
  Description of Artificial Sequence: Synthetic oligonucleotide
gcugccgcaucaagaccgu

SEQ ID NO: 2323963 - RNA, 19 nt, Artificial Sequence
  Description of Artificial Sequence: Synthetic oligonucleotide
cggagcuauucuuguugua

SEQ ID NO: 2323964 - RNA, 19 nt, Artificial Sequence
  Description of Artificial Sequence: Synthetic oligonucleotide
cgcccacgauuuccugcac

SEQ ID NO: 2323965 - RNA, 19 nt, Artificial Sequence
  Description of Artificial Sequence: Synthetic oligonucleotide
ggaccccaucagccauagu

SEQ ID NO: 2323966 - RNA, 19 nt, Artificial Sequence
  Description of Artificial Sequence: Synthetic oligonucleotide
ccguggccuucaucagacu

SEQ ID NO: 2323967 - RNA, 19 nt, Artificial Sequence
  Description of Artificial Sequence: Synthetic oligonucleotide
cccgcccgggcugccgcau

SEQ ID NO: 2323968 - RNA, 19 nt, Artificial Sequence
  Description of Artificial Sequence: Synthetic oligonucleotide
uagaguaauguauucauag

SEQ ID NO: 2323969 - RNA, 19 nt, Artificial Sequence
  Description of Artificial Sequence: Synthetic oligonucleotide
uaaaugccaacucaucugg

SEQ ID NO: 2323970 - RNA, 19 nt, Artificial Sequence
  Description of Artificial Sequence: Synthetic oligonucleotide
uuuaaaugccaacucaucu

SEQ ID NO: 2323971 - RNA, 19 nt, Artificial Sequence
  Description of Artificial Sequence: Synthetic oligonucleotide
uguauucauagcuuaaagc

SEQ ID NO: 2323972 - RNA, 19 nt, Artificial Sequence
  Description of Artificial Sequence: Synthetic oligonucleotide
agaguaauguauucauagc

SEQ ID NO: 2323973 - RNA, 19 nt, Artificial Sequence
  Description of Artificial Sequence: Synthetic oligonucleotide
caauguaucucuuggaccc

SEQ ID NO: 2323974 - RNA, 19 nt, Artificial Sequence
  Description of Artificial Sequence: Synthetic oligonucleotide
uucagugcagaguagagug

SEQ ID NO: 2323975 - RNA, 19 nt, Artificial Sequence
  Description of Artificial Sequence: Synthetic oligonucleotide
ucaucaaugguccaucugu

SEQ ID NO: 2323976 - RNA, 19 nt, Artificial Sequence
  Description of Artificial Sequence: Synthetic oligonucleotide
uucuuguguuauuuuaucg

SEQ ID NO: 2323977 - RNA, 19 nt, Artificial Sequence
  Description of Artificial Sequence: Synthetic oligonucleotide
ucuucaaguguaaacggcc

SEQ ID NO: 2323978 - RNA, 19 nt, Artificial Sequence
  Description of Artificial Sequence: Synthetic oligonucleotide
ugcucuucaaguguaaacg

SEQ ID NO: 2323979 - RNA, 19 nt, Artificial Sequence
  Description of Artificial Sequence: Synthetic oligonucleotide
uauauucccaguaaacuuc

SEQ ID NO: 2323980 - RNA, 19 nt, Artificial Sequence
  Description of Artificial Sequence: Synthetic oligonucleotide
aggaagagaguucuuugcc

SEQ ID NO: 2323981 - RNA, 19 nt, Artificial Sequence
  Description of Artificial Sequence: Synthetic oligonucleotide
agcguugacaaccucugcc

SEQ ID NO: 2323982 - RNA, 19 nt, Artificial Sequence
  Description of Artificial Sequence: Synthetic oligonucleotide
uguuauuuuaucguauggc

SEQ ID NO: 2323983 - RNA, 19 nt, Artificial Sequence
  Description of Artificial Sequence: Synthetic oligonucleotide
augucauugaccaagcuuc

SEQ ID NO: 2323984 - RNA, 19 nt, Artificial Sequence
  Description of Artificial Sequence: Synthetic oligonucleotide
acagucacuagccuggcgg

SEQ ID NO: 2323985 - RNA, 19 nt, Artificial Sequence
  Description of Artificial Sequence: Synthetic oligonucleotide
acuugcauuauauucccag

SEQ ID NO: 2323986 - RNA, 19 nt, Artificial Sequence
  Description of Artificial Sequence: Synthetic oligonucleotide
ucaucgguuaccuucccgg

SEQ ID NO: 2323987 - RNA, 19 nt, Artificial Sequence
  Description of Artificial Sequence: Synthetic oligonucleotide
aaugucauugaccaagcuu

SEQ ID NO: 2323988 - RNA, 19 nt, Artificial Sequence
  Description of Artificial Sequence: Synthetic oligonucleotide
uucaauaucuucuuguguu

SEQ ID NO: 2323989 - RNA, 19 nt, Artificial Sequence
  Description of Artificial Sequence: Synthetic oligonucleotide
ucuuguguuauuuuaucgu

SEQ ID NO: 2323990 - RNA, 19 nt, Artificial Sequence
  Description of Artificial Sequence: Synthetic oligonucleotide
aacucaucuggcaaaagag

SEQ ID NO: 2323991 - RNA, 19 nt, Artificial Sequence
  Description of Artificial Sequence: Synthetic oligonucleotide
aauccagcgugucgguugc

SEQ ID NO: 2323992 - RNA, 19 nt, Artificial Sequence
  Description of Artificial Sequence: Synthetic oligonucleotide
agcgacaacagcuuagcag

SEQ ID NO: 2323993 - RNA, 19 nt, Artificial Sequence
  Description of Artificial Sequence: Synthetic oligonucleotide
aauggcaauguaucucuug

SEQ ID NO: 2323994 - RNA, 19 nt, Artificial Sequence
  Description of Artificial Sequence: Synthetic oligonucleotide
aacagcuuagcagccaggg

SEQ ID NO: 2323995 - RNA, 19 nt, Artificial Sequence
  Description of Artificial Sequence: Synthetic oligonucleotide
cuuugucucacuuagagua

SEQ ID NO: 2323996 - RNA, 19 nt, Artificial Sequence
  Description of Artificial Sequence: Synthetic oligonucleotide
ucuuccaaucccaaccacc

SEQ ID NO: 2323997 - RNA, 19 nt, Artificial Sequence
  Description of Artificial Sequence: Synthetic oligonucleotide
cagcuuagcagccagggcg

SEQ ID NO: 2323998 - RNA, 19 nt, Artificial Sequence
  Description of Artificial Sequence: Synthetic oligonucleotide
uugugcacggcgaacacgc

SEQ ID NO: 2323999 - RNA, 19 nt, Artificial Sequence
  Description of Artificial Sequence: Synthetic oligonucleotide
ugucuuaauuucauccucu

SEQ ID NO: 2324000 - RNA, 19 nt, Artificial Sequence
  Description of Artificial Sequence: Synthetic oligonucleotide
aaagagaugugcaguguuc

SEQ ID NO: 2324001 - RNA, 19 nt, Artificial Sequence
  Description of Artificial Sequence: Synthetic oligonucleotide
aaaagagaugugcaguguu

SEQ ID NO: 2324002 - RNA, 19 nt, Artificial Sequence
  Description of Artificial Sequence: Synthetic oligonucleotide
agugucuuaauuucauccu

SEQ ID NO: 2324003 - RNA, 19 nt, Artificial Sequence
  Description of Artificial Sequence: Synthetic oligonucleotide
uucccaguaaacuucugca

SEQ ID NO: 2324004 - RNA, 19 nt, Artificial Sequence
  Description of Artificial Sequence: Synthetic oligonucleotide
cuucugauguagaagccgc

SEQ ID NO: 2324005 - RNA, 19 nt, Artificial Sequence
  Description of Artificial Sequence: Synthetic oligonucleotide
ugcauuauauucccaguaa

SEQ ID NO: 2324006 - RNA, 19 nt, Artificial Sequence
  Description of Artificial Sequence: Synthetic oligonucleotide
uucaacgucugccuuugcc

SEQ ID NO: 2324007 - RNA, 19 nt, Artificial Sequence
  Description of Artificial Sequence: Synthetic oligonucleotide
ugcagaaugccuucaauau

SEQ ID NO: 2324008 - RNA, 19 nt, Artificial Sequence
  Description of Artificial Sequence: Synthetic oligonucleotide
ucuucagugcagaguagag

SEQ ID NO: 2324009 - RNA, 19 nt, Artificial Sequence
  Description of Artificial Sequence: Synthetic oligonucleotide
uguaaacggccccuguuug

SEQ ID NO: 2324010 - RNA, 19 nt, Artificial Sequence
  Description of Artificial Sequence: Synthetic oligonucleotide
aaugguccaucugucuucg

SEQ ID NO: 2324011 - RNA, 19 nt, Artificial Sequence
  Description of Artificial Sequence: Synthetic oligonucleotide
aauguaucucuuggacccc

SEQ ID NO: 2324012 - RNA, 19 nt, Artificial Sequence
  Description of Artificial Sequence: Synthetic oligonucleotide
uucccgguagaauccagcg

SEQ ID NO: 2324013 - RNA, 19 nt, Artificial Sequence
  Description of Artificial Sequence: Synthetic oligonucleotide
gaguaauguauucauagcu

SEQ ID NO: 2324014 - RNA, 19 nt, Artificial Sequence
  Description of Artificial Sequence: Synthetic oligonucleotide
gguacuugcauuauauucc

SEQ ID NO: 2324015 - RNA, 19 nt, Artificial Sequence
  Description of Artificial Sequence: Synthetic oligonucleotide
uucucaucgguuaccuucc

SEQ ID NO: 2324016 - RNA, 19 nt, Artificial Sequence
  Description of Artificial Sequence: Synthetic oligonucleotide
ucaacgucugccuuugccu

SEQ ID NO: 2324017 - RNA, 19 nt, Artificial Sequence
  Description of Artificial Sequence: Synthetic oligonucleotide
uucaaguguaaacggcccc

SEQ ID NO: 2324018 - RNA, 19 nt, Artificial Sequence
  Description of Artificial Sequence: Synthetic oligonucleotide
agcacgugggcacaggaag

SEQ ID NO: 2324019 - RNA, 19 nt, Artificial Sequence
  Description of Artificial Sequence: Synthetic oligonucleotide
cuucaaguguaaacggccc

SEQ ID NO: 2324020 - RNA, 19 nt, Artificial Sequence
  Description of Artificial Sequence: Synthetic oligonucleotide
gaugugcaguguucaaggg

SEQ ID NO: 2324021 - RNA, 19 nt, Artificial Sequence
  Description of Artificial Sequence: Synthetic oligonucleotide
ucagugcagaguagagugg

SEQ ID NO: 2324022 - RNA, 19 nt, Artificial Sequence
  Description of Artificial Sequence: Synthetic oligonucleotide
uguagaagccgccuccgca

SEQ ID NO: 2324023 - RNA, 19 nt, Artificial Sequence
  Description of Artificial Sequence: Synthetic oligonucleotide
aacauacuggucaacauuu

SEQ ID NO: 2324024 - RNA, 19 nt, Artificial Sequence
  Description of Artificial Sequence: Synthetic oligonucleotide
uuggaccccgacaacauac

SEQ ID NO: 2324025 - RNA, 19 nt, Artificial Sequence
  Description of Artificial Sequence: Synthetic oligonucleotide
gaauccagcgugucgguug

SEQ ID NO: 2324026 - RNA, 19 nt, Artificial Sequence
  Description of Artificial Sequence: Synthetic oligonucleotide
ucacuuagaguaauguauu

SEQ ID NO: 2324027 - RNA, 19 nt, Artificial Sequence
  Description of Artificial Sequence: Synthetic oligonucleotide
guacuugcauuauauuccc

SEQ ID NO: 2324028 - RNA, 19 nt, Artificial Sequence
  Description of Artificial Sequence: Synthetic oligonucleotide
uaucguauggcuucucauc

SEQ ID NO: 2324029 - RNA, 19 nt, Artificial Sequence
  Description of Artificial Sequence: Synthetic oligonucleotide
uuaaagccuggucacugga

SEQ ID NO: 2324030 - RNA, 19 nt, Artificial Sequence
  Description of Artificial Sequence: Synthetic oligonucleotide
uugcauuauauucccagua

SEQ ID NO: 2324031 - RNA, 19 nt, Artificial Sequence
  Description of Artificial Sequence: Synthetic oligonucleotide
agaguucuuugccaauguc

SEQ ID NO: 2324032 - RNA, 19 nt, Artificial Sequence
  Description of Artificial Sequence: Synthetic oligonucleotide
aucucuuggaccccgacaa

SEQ ID NO: 2324033 - RNA, 19 nt, Artificial Sequence
  Description of Artificial Sequence: Synthetic oligonucleotide
aauucuccaauggcaaugu

SEQ ID NO: 2324034 - RNA, 19 nt, Artificial Sequence
  Description of Artificial Sequence: Synthetic oligonucleotide
aucccaaccaccagaacac

SEQ ID NO: 2324035 - RNA, 19 nt, Artificial Sequence
  Description of Artificial Sequence: Synthetic oligonucleotide
aaaugccaacucaucuggc

SEQ ID NO: 2324036 - RNA, 19 nt, Artificial Sequence
  Description of Artificial Sequence: Synthetic oligonucleotide
acagcuuagcagccagggc

SEQ ID NO: 2324037 - RNA, 19 nt, Artificial Sequence
  Description of Artificial Sequence: Synthetic oligonucleotide
uguucaagggacugugcga

SEQ ID NO: 2324038 - RNA, 19 nt, Artificial Sequence
  Description of Artificial Sequence: Synthetic oligonucleotide
uguacacagucacuagccu

SEQ ID NO: 2324039 - RNA, 19 nt, Artificial Sequence
  Description of Artificial Sequence: Synthetic oligonucleotide
acuuagaguaauguauuca

SEQ ID NO: 2324040 - RNA, 19 nt, Artificial Sequence
  Description of Artificial Sequence: Synthetic oligonucleotide
cuucuuguguuauuuuauc

SEQ ID NO: 2324041 - RNA, 19 nt, Artificial Sequence
  Description of Artificial Sequence: Synthetic oligonucleotide
uagcuuaaagccuggucac

SEQ ID NO: 2324042 - RNA, 19 nt, Artificial Sequence
  Description of Artificial Sequence: Synthetic oligonucleotide
gauguagaagccgccuccg

SEQ ID NO: 2324043 - RNA, 19 nt, Artificial Sequence
  Description of Artificial Sequence: Synthetic oligonucleotide
gagaugugcaguguucaag

SEQ ID NO: 2324044 - RNA, 19 nt, Artificial Sequence
  Description of Artificial Sequence: Synthetic oligonucleotide
gaccccgacaacauacugg

SEQ ID NO: 2324045 - RNA, 19 nt, Artificial Sequence
  Description of Artificial Sequence: Synthetic oligonucleotide
ucucacuuagaguaaugua

SEQ ID NO: 2324046 - RNA, 19 nt, Artificial Sequence
  Description of Artificial Sequence: Synthetic oligonucleotide
ugcacggcgaacacgccgc

SEQ ID NO: 2324047 - RNA, 19 nt, Artificial Sequence
  Description of Artificial Sequence: Synthetic oligonucleotide
uuugucucacuuagaguaa

SEQ ID NO: 2324048 - RNA, 19 nt, Artificial Sequence
  Description of Artificial Sequence: Synthetic oligonucleotide
cagccgauugagcagcucg

SEQ ID NO: 2324049 - RNA, 19 nt, Artificial Sequence
  Description of Artificial Sequence: Synthetic oligonucleotide
guacacagucacuagccug

SEQ ID NO: 2324050 - RNA, 19 nt, Artificial Sequence
  Description of Artificial Sequence: Synthetic oligonucleotide
caccagaacaccuugugca

SEQ ID NO: 2324051 - RNA, 19 nt, Artificial Sequence
  Description of Artificial Sequence: Synthetic oligonucleotide
ucaauaucuucuuguguua

SEQ ID NO: 2324052 - RNA, 19 nt, Artificial Sequence
  Description of Artificial Sequence: Synthetic oligonucleotide
guaaacggccccuguuugg

SEQ ID NO: 2324053 - RNA, 19 nt, Artificial Sequence
  Description of Artificial Sequence: Synthetic oligonucleotide
accccgacaacauacuggu

SEQ ID NO: 2324054 - RNA, 19 nt, Artificial Sequence
  Description of Artificial Sequence: Synthetic oligonucleotide
ugagcagcucggcugacgu

SEQ ID NO: 2324055 - RNA, 19 nt, Artificial Sequence
  Description of Artificial Sequence: Synthetic oligonucleotide
auugaccaagcuucugaug

SEQ ID NO: 2324056 - RNA, 19 nt, Artificial Sequence
  Description of Artificial Sequence: Synthetic oligonucleotide
uuaucguauggcuucucau

SEQ ID NO: 2324057 - RNA, 19 nt, Artificial Sequence
  Description of Artificial Sequence: Synthetic oligonucleotide
ugagcgacaacagcuuagc

SEQ ID NO: 2324058 - RNA, 19 nt, Artificial Sequence
  Description of Artificial Sequence: Synthetic oligonucleotide
uucggggagggcaugcucu

SEQ ID NO: 2324059 - RNA, 19 nt, Artificial Sequence
  Description of Artificial Sequence: Synthetic oligonucleotide
cucacuuagaguaauguau

SEQ ID NO: 2324060 - RNA, 19 nt, Artificial Sequence
  Description of Artificial Sequence: Synthetic oligonucleotide
uucugauguagaagccgcc

SEQ ID NO: 2324061 - RNA, 19 nt, Artificial Sequence
  Description of Artificial Sequence: Synthetic oligonucleotide
uugugcagcacuguccagc

SEQ ID NO: 2324062 - RNA, 19 nt, Artificial Sequence
  Description of Artificial Sequence: Synthetic oligonucleotide
ugucucacuuagaguaaug

SEQ ID NO: 2324063 - RNA, 19 nt, Artificial Sequence
  Description of Artificial Sequence: Synthetic oligonucleotide
gcaauguaucucuuggacc

SEQ ID NO: 2324064 - RNA, 19 nt, Artificial Sequence
  Description of Artificial Sequence: Synthetic oligonucleotide
auguagaagccgccuccgc

SEQ ID NO: 2324065 - RNA, 19 nt, Artificial Sequence
  Description of Artificial Sequence: Synthetic oligonucleotide
uaccuucccgguagaaucc

SEQ ID NO: 2324066 - RNA, 19 nt, Artificial Sequence
  Description of Artificial Sequence: Synthetic oligonucleotide
gauugagcagcucggcuga

SEQ ID NO: 2324067 - RNA, 19 nt, Artificial Sequence
  Description of Artificial Sequence: Synthetic oligonucleotide
ucaaguguaaacggccccu

SEQ ID NO: 2324068 - RNA, 19 nt, Artificial Sequence
  Description of Artificial Sequence: Synthetic oligonucleotide
uccaauggcaauguaucuc

SEQ ID NO: 2324069 - RNA, 19 nt, Artificial Sequence
  Description of Artificial Sequence: Synthetic oligonucleotide
aguaauguauucauagcuu

SEQ ID NO: 2324070 - RNA, 19 nt, Artificial Sequence
  Description of Artificial Sequence: Synthetic oligonucleotide
augugcaguguucaaggga

SEQ ID NO: 2324071 - RNA, 19 nt, Artificial Sequence
  Description of Artificial Sequence: Synthetic oligonucleotide
caauucuccaauggcaaug

SEQ ID NO: 2324072 - RNA, 19 nt, Artificial Sequence
  Description of Artificial Sequence: Synthetic oligonucleotide
ucuucaacgucugccuuug

SEQ ID NO: 2324073 - RNA, 19 nt, Artificial Sequence
  Description of Artificial Sequence: Synthetic oligonucleotide
ugccucuuguuccacucug

SEQ ID NO: 2324074 - RNA, 19 nt, Artificial Sequence
  Description of Artificial Sequence: Synthetic oligonucleotide
gcgaacacgccgcugagcg

SEQ ID NO: 2324075 - RNA, 19 nt, Artificial Sequence
  Description of Artificial Sequence: Synthetic oligonucleotide
cugugcgaugucaucaaug

SEQ ID NO: 2324076 - RNA, 19 nt, Artificial Sequence
  Description of Artificial Sequence: Synthetic oligonucleotide
ucugauguagaagccgccu

SEQ ID NO: 2324077 - RNA, 19 nt, Artificial Sequence
  Description of Artificial Sequence: Synthetic oligonucleotide
agagaguucuuugccaaug

SEQ ID NO: 2324078 - RNA, 19 nt, Artificial Sequence
  Description of Artificial Sequence: Synthetic oligonucleotide
ggcaauguaucucuuggac

SEQ ID NO: 2324079 - RNA, 19 nt, Artificial Sequence
  Description of Artificial Sequence: Synthetic oligonucleotide
ucaugagcguugacaaccu

SEQ ID NO: 2324080 - RNA, 19 nt, Artificial Sequence
  Description of Artificial Sequence: Synthetic oligonucleotide
cugagcgacaacagcuuag

SEQ ID NO: 2324081 - RNA, 19 nt, Artificial Sequence
  Description of Artificial Sequence: Synthetic oligonucleotide
ugucauugaccaagcuucu

SEQ ID NO: 2324082 - RNA, 19 nt, Artificial Sequence
  Description of Artificial Sequence: Synthetic oligonucleotide
cuuguguuauuuuaucgua

SEQ ID NO: 2324083 - RNA, 19 nt, Artificial Sequence
  Description of Artificial Sequence: Synthetic oligonucleotide
aaguguaaacggccccugu

SEQ ID NO: 2324084 - RNA, 19 nt, Artificial Sequence
  Description of Artificial Sequence: Synthetic oligonucleotide
cuuagaguaauguauucau

SEQ ID NO: 2324085 - RNA, 19 nt, Artificial Sequence
  Description of Artificial Sequence: Synthetic oligonucleotide
gugucuuaauuucauccuc

SEQ ID NO: 2324086 - RNA, 19 nt, Artificial Sequence
  Description of Artificial Sequence: Synthetic oligonucleotide
cauucaacauccaguguga

SEQ ID NO: 2324087 - RNA, 19 nt, Artificial Sequence
  Description of Artificial Sequence: Synthetic oligonucleotide
cacuuagaguaauguauuc

SEQ ID NO: 2324088 - RNA, 19 nt, Artificial Sequence
  Description of Artificial Sequence: Synthetic oligonucleotide
cuucagccgauugagcagc

SEQ ID NO: 2324089 - RNA, 19 nt, Artificial Sequence
  Description of Artificial Sequence: Synthetic oligonucleotide
ugacgugggccccuugggc

SEQ ID NO: 2324090 - RNA, 19 nt, Artificial Sequence
  Description of Artificial Sequence: Synthetic oligonucleotide
caucaaugguccaucuguc

SEQ ID NO: 2324091 - RNA, 19 nt, Artificial Sequence
  Description of Artificial Sequence: Synthetic oligonucleotide
uuccaaucccaaccaccag

SEQ ID NO: 2324092 - RNA, 19 nt, Artificial Sequence
  Description of Artificial Sequence: Synthetic oligonucleotide
cuugggcuugugcacggcg

SEQ ID NO: 2324093 - RNA, 19 nt, Artificial Sequence
  Description of Artificial Sequence: Synthetic oligonucleotide
gauuucucagauuuugguu

SEQ ID NO: 2324094 - RNA, 19 nt, Artificial Sequence
  Description of Artificial Sequence: Synthetic oligonucleotide
cauccagugugaagagcgg

SEQ ID NO: 2324095 - RNA, 19 nt, Artificial Sequence
  Description of Artificial Sequence: Synthetic oligonucleotide
gaacacgccgcugagcgac

SEQ ID NO: 2324096 - RNA, 19 nt, Artificial Sequence
  Description of Artificial Sequence: Synthetic oligonucleotide
ugcaguguucaagggacug

SEQ ID NO: 2324097 - RNA, 19 nt, Artificial Sequence
  Description of Artificial Sequence: Synthetic oligonucleotide
ucuuggaccccgacaacau

SEQ ID NO: 2324098 - RNA, 19 nt, Artificial Sequence
  Description of Artificial Sequence: Synthetic oligonucleotide
uugggcuugugcacggcga

SEQ ID NO: 2324099 - RNA, 19 nt, Artificial Sequence
  Description of Artificial Sequence: Synthetic oligonucleotide
aggagggcgaugcuguaca

SEQ ID NO: 2324100 - RNA, 19 nt, Artificial Sequence
  Description of Artificial Sequence: Synthetic oligonucleotide
uuucucagauuuugguuuu

SEQ ID NO: 2324101 - RNA, 19 nt, Artificial Sequence
  Description of Artificial Sequence: Synthetic oligonucleotide
uggcaauguaucucuugga

SEQ ID NO: 2324102 - RNA, 19 nt, Artificial Sequence
  Description of Artificial Sequence: Synthetic oligonucleotide
cagucacuagccuggcggg

SEQ ID NO: 2324103 - RNA, 19 nt, Artificial Sequence
  Description of Artificial Sequence: Synthetic oligonucleotide
ccguguccaaucuucaacg

SEQ ID NO: 2324104 - RNA, 19 nt, Artificial Sequence
  Description of Artificial Sequence: Synthetic oligonucleotide
uggaaccucaggagggcga

SEQ ID NO: 2324105 - RNA, 19 nt, Artificial Sequence
  Description of Artificial Sequence: Synthetic oligonucleotide
agcgugucgguugcuuucc

SEQ ID NO: 2324106 - RNA, 19 nt, Artificial Sequence
  Description of Artificial Sequence: Synthetic oligonucleotide
uguuuggugcgggucagcu

SEQ ID NO: 2324107 - RNA, 19 nt, Artificial Sequence
  Description of Artificial Sequence: Synthetic oligonucleotide
uaaacggccccuguuuggu

SEQ ID NO: 2324108 - RNA, 19 nt, Artificial Sequence
  Description of Artificial Sequence: Synthetic oligonucleotide
gcuguacacagucacuagc

SEQ ID NO: 2324109 - RNA, 19 nt, Artificial Sequence
  Description of Artificial Sequence: Synthetic oligonucleotide
aguguaaacggccccuguu

SEQ ID NO: 2324110 - RNA, 19 nt, Artificial Sequence
  Description of Artificial Sequence: Synthetic oligonucleotide
gugcacggcgaacacgccg

SEQ ID NO: 2324111 - RNA, 19 nt, Artificial Sequence
  Description of Artificial Sequence: Synthetic oligonucleotide
aagccuggucacuggauuu

SEQ ID NO: 2324112 - RNA, 19 nt, Artificial Sequence
  Description of Artificial Sequence: Synthetic oligonucleotide
auguaucucuuggaccccg

SEQ ID NO: 2324113 - RNA, 19 nt, Artificial Sequence
  Description of Artificial Sequence: Synthetic oligonucleotide
uacuugcauuauauuccca

SEQ ID NO: 2324114 - RNA, 19 nt, Artificial Sequence
  Description of Artificial Sequence: Synthetic oligonucleotide
ccuucaauaucuucuugug

SEQ ID NO: 2324115 - RNA, 19 nt, Artificial Sequence
  Description of Artificial Sequence: Synthetic oligonucleotide
augagcguugacaaccucu

SEQ ID NO: 2324116 - RNA, 19 nt, Artificial Sequence
  Description of Artificial Sequence: Synthetic oligonucleotide
uguaucucuuggaccccga

SEQ ID NO: 2324117 - RNA, 19 nt, Artificial Sequence
  Description of Artificial Sequence: Synthetic oligonucleotide
cuucaugagcguugacaac

SEQ ID NO: 2324118 - RNA, 19 nt, Artificial Sequence
  Description of Artificial Sequence: Synthetic oligonucleotide
agugugaagagcgguggcu

SEQ ID NO: 2324119 - RNA, 19 nt, Artificial Sequence
  Description of Artificial Sequence: Synthetic oligonucleotide
aaacggccccuguuuggug

SEQ ID NO: 2324120 - RNA, 19 nt, Artificial Sequence
  Description of Artificial Sequence: Synthetic oligonucleotide
agcuucgccucucuucaug

SEQ ID NO: 2324121 - RNA, 19 nt, Artificial Sequence
  Description of Artificial Sequence: Synthetic oligonucleotide
auauucccaguaaacuucu

SEQ ID NO: 2324122 - RNA, 19 nt, Artificial Sequence
  Description of Artificial Sequence: Synthetic oligonucleotide
acggcgaacacgccgcuga

SEQ ID NO: 2324123 - RNA, 19 nt, Artificial Sequence
  Description of Artificial Sequence: Synthetic oligonucleotide
agcuuagcagccagggcgg

SEQ ID NO: 2324124 - RNA, 19 nt, Artificial Sequence
  Description of Artificial Sequence: Synthetic oligonucleotide
agaagccgccuccgcauuc

SEQ ID NO: 2324125 - RNA, 19 nt, Artificial Sequence
  Description of Artificial Sequence: Synthetic oligonucleotide
ugacaaccucugcccaucc

SEQ ID NO: 2324126 - RNA, 19 nt, Artificial Sequence
  Description of Artificial Sequence: Synthetic oligonucleotide
auuuuaucguauggcuucu

SEQ ID NO: 2324127 - RNA, 19 nt, Artificial Sequence
  Description of Artificial Sequence: Synthetic oligonucleotide
ucugccuuugccucuuguu

SEQ ID NO: 2324128 - RNA, 19 nt, Artificial Sequence
  Description of Artificial Sequence: Synthetic oligonucleotide
cuccgcauucaacauccag

SEQ ID NO: 2324129 - RNA, 19 nt, Artificial Sequence
  Description of Artificial Sequence: Synthetic oligonucleotide
caacgucugccuuugccuc

SEQ ID NO: 2324130 - RNA, 19 nt, Artificial Sequence
  Description of Artificial Sequence: Synthetic oligonucleotide
ugccaacucaucuggcaaa

SEQ ID NO: 2324131 - RNA, 19 nt, Artificial Sequence
  Description of Artificial Sequence: Synthetic oligonucleotide
ggcgaugcuguacacaguc

SEQ ID NO: 2324132 - RNA, 19 nt, Artificial Sequence
  Description of Artificial Sequence: Synthetic oligonucleotide
ucccgguagaauccagcgu

SEQ ID NO: 2324133 - RNA, 19 nt, Artificial Sequence
  Description of Artificial Sequence: Synthetic oligonucleotide
cugacgugggccccuuggg

SEQ ID NO: 2324134 - RNA, 19 nt, Artificial Sequence
  Description of Artificial Sequence: Synthetic oligonucleotide
guguccaaucuucaacguc

SEQ ID NO: 2324135 - RNA, 19 nt, Artificial Sequence
  Description of Artificial Sequence: Synthetic oligonucleotide
caguguucaagggacugug

SEQ ID NO: 2324136 - RNA, 19 nt, Artificial Sequence
  Description of Artificial Sequence: Synthetic oligonucleotide
cugcagaaugccuucaaua

SEQ ID NO: 2324137 - RNA, 19 nt, Artificial Sequence
  Description of Artificial Sequence: Synthetic oligonucleotide
cccgguagaauccagcgug

SEQ ID NO: 2324138 - RNA, 19 nt, Artificial Sequence
  Description of Artificial Sequence: Synthetic oligonucleotide
gcguugacaaccucugccc

SEQ ID NO: 2324139 - RNA, 19 nt, Artificial Sequence
  Description of Artificial Sequence: Synthetic oligonucleotide
cucaucuggcaaaagagau

SEQ ID NO: 2324140 - RNA, 19 nt, Artificial Sequence
  Description of Artificial Sequence: Synthetic oligonucleotide
uucccucuuugucucacuu

SEQ ID NO: 2324141 - RNA, 19 nt, Artificial Sequence
  Description of Artificial Sequence: Synthetic oligonucleotide
ucacuagccuggcgggucu

SEQ ID NO: 2324142 - RNA, 19 nt, Artificial Sequence
  Description of Artificial Sequence: Synthetic oligonucleotide
ucucaucgguuaccuuccc

SEQ ID NO: 2324143 - RNA, 19 nt, Artificial Sequence
  Description of Artificial Sequence: Synthetic oligonucleotide
uucaagggacugugcgaug

SEQ ID NO: 2324144 - RNA, 19 nt, Artificial Sequence
  Description of Artificial Sequence: Synthetic oligonucleotide
ugcgggucagcuccagcac

SEQ ID NO: 2324145 - RNA, 19 nt, Artificial Sequence
  Description of Artificial Sequence: Synthetic oligonucleotide
gugucgguugcuuucccca

SEQ ID NO: 2324146 - RNA, 19 nt, Artificial Sequence
  Description of Artificial Sequence: Synthetic oligonucleotide
uugacaaccucugcccauc

SEQ ID NO: 2324147 - RNA, 19 nt, Artificial Sequence
  Description of Artificial Sequence: Synthetic oligonucleotide
uugccucuuguuccacucu

SEQ ID NO: 2324148 - RNA, 19 nt, Artificial Sequence
  Description of Artificial Sequence: Synthetic oligonucleotide
uagaauccagcgugucggu

SEQ ID NO: 2324149 - RNA, 19 nt, Artificial Sequence
  Description of Artificial Sequence: Synthetic oligonucleotide
cacucuggggaaggcaucc

SEQ ID NO: 2324150 - RNA, 19 nt, Artificial Sequence
  Description of Artificial Sequence: Synthetic oligonucleotide
ccgcauucaacauccagug

SEQ ID NO: 2324151 - RNA, 19 nt, Artificial Sequence
  Description of Artificial Sequence: Synthetic oligonucleotide
caucccagcuucugccagc

SEQ ID NO: 2324152 - RNA, 19 nt, Artificial Sequence
  Description of Artificial Sequence: Synthetic oligonucleotide
augcuguacacagucacua

SEQ ID NO: 2324153 - RNA, 19 nt, Artificial Sequence
  Description of Artificial Sequence: Synthetic oligonucleotide
acacagucacuagccuggc

SEQ ID NO: 2324154 - RNA, 19 nt, Artificial Sequence
  Description of Artificial Sequence: Synthetic oligonucleotide
agugcagaguagagugggg

SEQ ID NO: 2324155 - RNA, 19 nt, Artificial Sequence
  Description of Artificial Sequence: Synthetic oligonucleotide
gaagagcgguggcuggaac

SEQ ID NO: 2324156 - RNA, 19 nt, Artificial Sequence
  Description of Artificial Sequence: Synthetic oligonucleotide
uugucucacuuagaguaau

SEQ ID NO: 2324157 - RNA, 19 nt, Artificial Sequence
  Description of Artificial Sequence: Synthetic oligonucleotide
cccgacaacauacugguca

SEQ ID NO: 2324158 - RNA, 19 nt, Artificial Sequence
  Description of Artificial Sequence: Synthetic oligonucleotide
cuugcauuauauucccagu

SEQ ID NO: 2324159 - RNA, 19 nt, Artificial Sequence
  Description of Artificial Sequence: Synthetic oligonucleotide
gagcguugacaaccucugc

SEQ ID NO: 2324160 - RNA, 19 nt, Artificial Sequence
  Description of Artificial Sequence: Synthetic oligonucleotide
gugcgggucagcuccagca

SEQ ID NO: 2324161 - RNA, 19 nt, Artificial Sequence
  Description of Artificial Sequence: Synthetic oligonucleotide
gacugugcgaugucaucaa

SEQ ID NO: 2324162 - RNA, 19 nt, Artificial Sequence
  Description of Artificial Sequence: Synthetic oligonucleotide
caucugucuucggggaggg

SEQ ID NO: 2324163 - RNA, 19 nt, Artificial Sequence
  Description of Artificial Sequence: Synthetic oligonucleotide
ucgguugcuuuccccaauu

SEQ ID NO: 2324164 - RNA, 19 nt, Artificial Sequence
  Description of Artificial Sequence: Synthetic oligonucleotide
ugaccaagcuucugaugua

SEQ ID NO: 2324165 - RNA, 19 nt, Artificial Sequence
  Description of Artificial Sequence: Synthetic oligonucleotide
ucuucccucuuugucucac

SEQ ID NO: 2324166 - RNA, 19 nt, Artificial Sequence
  Description of Artificial Sequence: Synthetic oligonucleotide
ugucgguugcuuuccccaa

SEQ ID NO: 2324167 - RNA, 19 nt, Artificial Sequence
  Description of Artificial Sequence: Synthetic oligonucleotide
gagaguucuuugccaaugu

SEQ ID NO: 2324168 - RNA, 19 nt, Artificial Sequence
  Description of Artificial Sequence: Synthetic oligonucleotide
ggauuucucagauuuuggu

SEQ ID NO: 2324169 - RNA, 19 nt, Artificial Sequence
  Description of Artificial Sequence: Synthetic oligonucleotide
gcuuaaagccuggucacug

SEQ ID NO: 2324170 - RNA, 19 nt, Artificial Sequence
  Description of Artificial Sequence: Synthetic oligonucleotide
ugugcacggcgaacacgcc

SEQ ID NO: 2324171 - RNA, 19 nt, Artificial Sequence
  Description of Artificial Sequence: Synthetic oligonucleotide
cucuuccaaucccaaccac

SEQ ID NO: 2324172 - RNA, 19 nt, Artificial Sequence
  Description of Artificial Sequence: Synthetic oligonucleotide
cacagucacuagccuggcg

SEQ ID NO: 2324173 - RNA, 19 nt, Artificial Sequence
  Description of Artificial Sequence: Synthetic oligonucleotide
cuggaaccucaggagggcg

SEQ ID NO: 2324174 - RNA, 19 nt, Artificial Sequence
  Description of Artificial Sequence: Synthetic oligonucleotide
acggccccuguuuggugcg

SEQ ID NO: 2324175 - RNA, 19 nt, Artificial Sequence
  Description of Artificial Sequence: Synthetic oligonucleotide
cuugugcagcacuguccag

SEQ ID NO: 2324176 - RNA, 19 nt, Artificial Sequence
  Description of Artificial Sequence: Synthetic oligonucleotide
uuuuaucguauggcuucuc

SEQ ID NO: 2324177 - RNA, 19 nt, Artificial Sequence
  Description of Artificial Sequence: Synthetic oligonucleotide
aucgguuaccuucccggua

SEQ ID NO: 2324178 - RNA, 19 nt, Artificial Sequence
  Description of Artificial Sequence: Synthetic oligonucleotide
gucauugaccaagcuucug

SEQ ID NO: 2324179 - RNA, 19 nt, Artificial Sequence
  Description of Artificial Sequence: Synthetic oligonucleotide
gaacaccuugugcagcacu

SEQ ID NO: 2324180 - RNA, 19 nt, Artificial Sequence
  Description of Artificial Sequence: Synthetic oligonucleotide
ucucuucaugagcguugac

SEQ ID NO: 2324181 - RNA, 19 nt, Artificial Sequence
  Description of Artificial Sequence: Synthetic oligonucleotide
cagcgugucgguugcuuuc

SEQ ID NO: 2324182 - RNA, 19 nt, Artificial Sequence
  Description of Artificial Sequence: Synthetic oligonucleotide
gagcgacaacagcuuagca

SEQ ID NO: 2324183 - RNA, 19 nt, Artificial Sequence
  Description of Artificial Sequence: Synthetic oligonucleotide
agcuuaaagccuggucacu

SEQ ID NO: 2324184 - RNA, 19 nt, Artificial Sequence
  Description of Artificial Sequence: Synthetic oligonucleotide
cgauugagcagcucggcug

SEQ ID NO: 2324185 - RNA, 19 nt, Artificial Sequence
  Description of Artificial Sequence: Synthetic oligonucleotide
ucccaaccaccagaacacc

SEQ ID NO: 2324186 - RNA, 19 nt, Artificial Sequence
  Description of Artificial Sequence: Synthetic oligonucleotide
gucucacuuagaguaaugu

SEQ ID NO: 2324187 - RNA, 19 nt, Artificial Sequence
  Description of Artificial Sequence: Synthetic oligonucleotide
acgccgcugagcgacaaca

SEQ ID NO: 2324188 - RNA, 19 nt, Artificial Sequence
  Description of Artificial Sequence: Synthetic oligonucleotide
ccaccagaacaccuugugc

SEQ ID NO: 2324189 - RNA, 19 nt, Artificial Sequence
  Description of Artificial Sequence: Synthetic oligonucleotide
auugagcagcucggcugac

SEQ ID NO: 2324190 - RNA, 19 nt, Artificial Sequence
  Description of Artificial Sequence: Synthetic oligonucleotide
cauccuucuucagugcaga

SEQ ID NO: 2324191 - RNA, 19 nt, Artificial Sequence
  Description of Artificial Sequence: Synthetic oligonucleotide
acuagccuggcgggucugg

SEQ ID NO: 2324192 - RNA, 19 nt, Artificial Sequence
  Description of Artificial Sequence: Synthetic oligonucleotide
uggccucagagugucuuaa

SEQ ID NO: 2324193 - RNA, 19 nt, Artificial Sequence
  Description of Artificial Sequence: Synthetic oligonucleotide
ccucucuucaugagcguug

SEQ ID NO: 2324194 - RNA, 19 nt, Artificial Sequence
  Description of Artificial Sequence: Synthetic oligonucleotide
auucaacauccagugugaa

SEQ ID NO: 2324195 - RNA, 19 nt, Artificial Sequence
  Description of Artificial Sequence: Synthetic oligonucleotide
cccaguaaacuucugcaga

SEQ ID NO: 2324196 - RNA, 19 nt, Artificial Sequence
  Description of Artificial Sequence: Synthetic oligonucleotide
gcgggucagcuccagcacg

SEQ ID NO: 2324197 - RNA, 19 nt, Artificial Sequence
  Description of Artificial Sequence: Synthetic oligonucleotide
guucaagggacugugcgau

SEQ ID NO: 2324198 - RNA, 19 nt, Artificial Sequence
  Description of Artificial Sequence: Synthetic oligonucleotide
guagaagccgccuccgcau

SEQ ID NO: 2324199 - RNA, 19 nt, Artificial Sequence
  Description of Artificial Sequence: Synthetic oligonucleotide
ggccccuugggcuugugca

SEQ ID NO: 2324200 - RNA, 19 nt, Artificial Sequence
  Description of Artificial Sequence: Synthetic oligonucleotide
ccaucugucuucggggagg

SEQ ID NO: 2324201 - RNA, 19 nt, Artificial Sequence
  Description of Artificial Sequence: Synthetic oligonucleotide
uagaagccgccuccgcauu

SEQ ID NO: 2324202 - RNA, 19 nt, Artificial Sequence
  Description of Artificial Sequence: Synthetic oligonucleotide
ugccaaugucauugaccaa

SEQ ID NO: 2324203 - RNA, 19 nt, Artificial Sequence
  Description of Artificial Sequence: Synthetic oligonucleotide
caugagcguugacaaccuc

SEQ ID NO: 2324204 - RNA, 19 nt, Artificial Sequence
  Description of Artificial Sequence: Synthetic oligonucleotide
ccaguaaacuucugcagaa

SEQ ID NO: 2324205 - RNA, 19 nt, Artificial Sequence
  Description of Artificial Sequence: Synthetic oligonucleotide
ccuugugcagcacugucca

SEQ ID NO: 2324206 - RNA, 19 nt, Artificial Sequence
  Description of Artificial Sequence: Synthetic oligonucleotide
gaagccgccuccgcauuca

SEQ ID NO: 2324207 - RNA, 19 nt, Artificial Sequence
  Description of Artificial Sequence: Synthetic oligonucleotide
cucuggggaaggcauccca

SEQ ID NO: 2324208 - RNA, 19 nt, Artificial Sequence
  Description of Artificial Sequence: Synthetic oligonucleotide
ggaccccgacaacauacug

SEQ ID NO: 2324209 - RNA, 19 nt, Artificial Sequence
  Description of Artificial Sequence: Synthetic oligonucleotide
gccgcugagcgacaacagc

SEQ ID NO: 2324210 - RNA, 19 nt, Artificial Sequence
  Description of Artificial Sequence: Synthetic oligonucleotide
cucucuucaugagcguuga

SEQ ID NO: 2324211 - RNA, 19 nt, Artificial Sequence
  Description of Artificial Sequence: Synthetic oligonucleotide
cuagccuggcgggucuggc

SEQ ID NO: 2324212 - RNA, 19 nt, Artificial Sequence
  Description of Artificial Sequence: Synthetic oligonucleotide
cccaauucuccaauggcaa

SEQ ID NO: 2324213 - RNA, 19 nt, Artificial Sequence
  Description of Artificial Sequence: Synthetic oligonucleotide
cuucaacgucugccuuugc

SEQ ID NO: 2324214 - RNA, 19 nt, Artificial Sequence
  Description of Artificial Sequence: Synthetic oligonucleotide
ggcacaggaagagaguucu

SEQ ID NO: 2324215 - RNA, 19 nt, Artificial Sequence
  Description of Artificial Sequence: Synthetic oligonucleotide
cuccaauggcaauguaucu

SEQ ID NO: 2324216 - RNA, 19 nt, Artificial Sequence
  Description of Artificial Sequence: Synthetic oligonucleotide
guugacaaccucugcccau

SEQ ID NO: 2324217 - RNA, 19 nt, Artificial Sequence
  Description of Artificial Sequence: Synthetic oligonucleotide
agucacuagccuggcgggu

SEQ ID NO: 2324218 - RNA, 19 nt, Artificial Sequence
  Description of Artificial Sequence: Synthetic oligonucleotide
cccgaggcuggccucagag

SEQ ID NO: 2324219 - RNA, 19 nt, Artificial Sequence
  Description of Artificial Sequence: Synthetic oligonucleotide
guuccacucuggggaaggc

SEQ ID NO: 2324220 - RNA, 19 nt, Artificial Sequence
  Description of Artificial Sequence: Synthetic oligonucleotide
guuaccuucccgguagaau

SEQ ID NO: 2324221 - RNA, 19 nt, Artificial Sequence
  Description of Artificial Sequence: Synthetic oligonucleotide
caaaagagaugugcagugu

SEQ ID NO: 2324222 - RNA, 19 nt, Artificial Sequence
  Description of Artificial Sequence: Synthetic oligonucleotide
ggcggccuuggagagcugg

SEQ ID NO: 2324223 - RNA, 19 nt, Artificial Sequence
  Description of Artificial Sequence: Synthetic oligonucleotide
gccucuuguuccacucugg

SEQ ID NO: 2324224 - RNA, 19 nt, Artificial Sequence
  Description of Artificial Sequence: Synthetic oligonucleotide
uccagcgugucgguugcuu

SEQ ID NO: 2324225 - RNA, 19 nt, Artificial Sequence
  Description of Artificial Sequence: Synthetic oligonucleotide
gaaccucaggagggcgaug

SEQ ID NO: 2324226 - RNA, 19 nt, Artificial Sequence
  Description of Artificial Sequence: Synthetic oligonucleotide
agggacugugcgaugucau

SEQ ID NO: 2324227 - RNA, 19 nt, Artificial Sequence
  Description of Artificial Sequence: Synthetic oligonucleotide
ggcuugugcacggcgaaca

SEQ ID NO: 2324228 - RNA, 19 nt, Artificial Sequence
  Description of Artificial Sequence: Synthetic oligonucleotide
agaauccagcgugucgguu

SEQ ID NO: 2324229 - RNA, 19 nt, Artificial Sequence
  Description of Artificial Sequence: Synthetic oligonucleotide
gggacugugcgaugucauc

SEQ ID NO: 2324230 - RNA, 19 nt, Artificial Sequence
  Description of Artificial Sequence: Synthetic oligonucleotide
caauaucuucuuguguuau

SEQ ID NO: 2324231 - RNA, 19 nt, Artificial Sequence
  Description of Artificial Sequence: Synthetic oligonucleotide
ucggggagggcaugcucuu

SEQ ID NO: 2324232 - RNA, 19 nt, Artificial Sequence
  Description of Artificial Sequence: Synthetic oligonucleotide
gggucuggccuccacagcu

SEQ ID NO: 2324233 - RNA, 19 nt, Artificial Sequence
  Description of Artificial Sequence: Synthetic oligonucleotide
ucagccgauugagcagcuc

SEQ ID NO: 2324234 - RNA, 19 nt, Artificial Sequence
  Description of Artificial Sequence: Synthetic oligonucleotide
gacaaccucugcccauccu

SEQ ID NO: 2324235 - RNA, 19 nt, Artificial Sequence
  Description of Artificial Sequence: Synthetic oligonucleotide
cuccguguccaaucuucaa

SEQ ID NO: 2324236 - RNA, 19 nt, Artificial Sequence
  Description of Artificial Sequence: Synthetic oligonucleotide
cuuggaccccgacaacaua

SEQ ID NO: 2324237 - RNA, 19 nt, Artificial Sequence
  Description of Artificial Sequence: Synthetic oligonucleotide
caaugucauugaccaagcu

SEQ ID NO: 2324238 - RNA, 19 nt, Artificial Sequence
  Description of Artificial Sequence: Synthetic oligonucleotide
caucgguuaccuucccggu

SEQ ID NO: 2324239 - RNA, 19 nt, Artificial Sequence
  Description of Artificial Sequence: Synthetic oligonucleotide
cagcacgugggcacaggaa

SEQ ID NO: 2324240 - RNA, 19 nt, Artificial Sequence
  Description of Artificial Sequence: Synthetic oligonucleotide
gccuuugccucuuguucca

SEQ ID NO: 2324241 - RNA, 19 nt, Artificial Sequence
  Description of Artificial Sequence: Synthetic oligonucleotide
gugcgaugucaucaauggu

SEQ ID NO: 2324242 - RNA, 19 nt, Artificial Sequence
  Description of Artificial Sequence: Synthetic oligonucleotide
ucggcugacgugggccccu

SEQ ID NO: 2324243 - RNA, 19 nt, Artificial Sequence
  Description of Artificial Sequence: Synthetic oligonucleotide
ccagggcggccuuggagag

SEQ ID NO: 2324244 - RNA, 19 nt, Artificial Sequence
  Description of Artificial Sequence: Synthetic oligonucleotide
gccgauugagcagcucggc

SEQ ID NO: 2324245 - RNA, 19 nt, Artificial Sequence
  Description of Artificial Sequence: Synthetic oligonucleotide
ggcaugcucuucaagugua

SEQ ID NO: 2324246 - RNA, 19 nt, Artificial Sequence
  Description of Artificial Sequence: Synthetic oligonucleotide
cccuugggcuugugcacgg

SEQ ID NO: 2324247 - RNA, 19 nt, Artificial Sequence
  Description of Artificial Sequence: Synthetic oligonucleotide
cagcucggcugacgugggc

SEQ ID NO: 2324248 - RNA, 19 nt, Artificial Sequence
  Description of Artificial Sequence: Synthetic oligonucleotide
uggcgggucuggccuccac

SEQ ID NO: 2324249 - RNA, 19 nt, Artificial Sequence
  Description of Artificial Sequence: Synthetic oligonucleotide
ggagggcgaugcuguacac

SEQ ID NO: 2324250 - RNA, 19 nt, Artificial Sequence
  Description of Artificial Sequence: Synthetic oligonucleotide
cuggccucagagugucuua

SEQ ID NO: 2324251 - RNA, 19 nt, Artificial Sequence
  Description of Artificial Sequence: Synthetic oligonucleotide
gcugagcgacaacagcuua

SEQ ID NO: 2324252 - RNA, 19 nt, Artificial Sequence
  Description of Artificial Sequence: Synthetic oligonucleotide
ccaacucaucuggcaaaag

SEQ ID NO: 2324253 - RNA, 19 nt, Artificial Sequence
  Description of Artificial Sequence: Synthetic oligonucleotide
cacgccgcugagcgacaac

SEQ ID NO: 2324254 - RNA, 19 nt, Artificial Sequence
  Description of Artificial Sequence: Synthetic oligonucleotide
cccuguuuggugcggguca

SEQ ID NO: 2324255 - RNA, 19 nt, Artificial Sequence
  Description of Artificial Sequence: Synthetic oligonucleotide
ggcgggucuggccuccaca

SEQ ID NO: 2324256 - RNA, 19 nt, Artificial Sequence
  Description of Artificial Sequence: Synthetic oligonucleotide
cugucuucggggagggcau

SEQ ID NO: 2324257 - RNA, 19 nt, Artificial Sequence
  Description of Artificial Sequence: Synthetic oligonucleotide
gcggccuuggagagcuggg

SEQ ID NO: 2324258 - RNA, 19 nt, Artificial Sequence
  Description of Artificial Sequence: Synthetic oligonucleotide
ccgcugagcgacaacagcu

SEQ ID NO: 2324259 - RNA, 19 nt, Artificial Sequence
  Description of Artificial Sequence: Synthetic oligonucleotide
cacggcgaacacgccgcug

SEQ ID NO: 2324260 - RNA, 19 nt, Artificial Sequence
  Description of Artificial Sequence: Synthetic oligonucleotide
gggccccuugggcuugugc

SEQ ID NO: 2324261 - RNA, 19 nt, Artificial Sequence
  Description of Artificial Sequence: Synthetic oligonucleotide
gucugccuuugccucuugu

SEQ ID NO: 2324262 - RNA, 19 nt, Artificial Sequence
  Description of Artificial Sequence: Synthetic oligonucleotide
cgucccuccguguccaauc

SEQ ID NO: 2324263 - RNA, 19 nt, Artificial Sequence
  Description of Artificial Sequence: Synthetic oligonucleotide
gucgguugcuuuccccaau

SEQ ID NO: 2324264 - RNA, 19 nt, Artificial Sequence
  Description of Artificial Sequence: Synthetic oligonucleotide
caguaaacuucugcagaau

SEQ ID NO: 2324265 - RNA, 19 nt, Artificial Sequence
  Description of Artificial Sequence: Synthetic oligonucleotide
cacuagccuggcgggucug

SEQ ID NO: 2324266 - RNA, 19 nt, Artificial Sequence
  Description of Artificial Sequence: Synthetic oligonucleotide
ccucuuugucucacuuaga

SEQ ID NO: 2324267 - RNA, 19 nt, Artificial Sequence
  Description of Artificial Sequence: Synthetic oligonucleotide
gguuaccuucccgguagaa

SEQ ID NO: 2324268 - RNA, 19 nt, Artificial Sequence
  Description of Artificial Sequence: Synthetic oligonucleotide
cguugacaaccucugccca

SEQ ID NO: 2324269 - RNA, 19 nt, Artificial Sequence
  Description of Artificial Sequence: Synthetic oligonucleotide
cagcgucccuccgugucca

SEQ ID NO: 2324270 - RNA, 19 nt, Artificial Sequence
  Description of Artificial Sequence: Synthetic oligonucleotide
gggguacuugcauuauauu

SEQ ID NO: 2324271 - RNA, 19 nt, Artificial Sequence
  Description of Artificial Sequence: Synthetic oligonucleotide
gcgaugcuguacacaguca

SEQ ID NO: 2324272 - RNA, 19 nt, Artificial Sequence
  Description of Artificial Sequence: Synthetic oligonucleotide
gcuuagcagccagggcggc

SEQ ID NO: 2324273 - RNA, 19 nt, Artificial Sequence
  Description of Artificial Sequence: Synthetic oligonucleotide
acacgccgcugagcgacaa

SEQ ID NO: 2324274 - RNA, 19 nt, Artificial Sequence
  Description of Artificial Sequence: Synthetic oligonucleotide
gcaugcucuucaaguguaa

SEQ ID NO: 2324275 - RNA, 19 nt, Artificial Sequence
  Description of Artificial Sequence: Synthetic oligonucleotide
gggcuugugcacggcgaac

SEQ ID NO: 2324276 - RNA, 19 nt, Artificial Sequence
  Description of Artificial Sequence: Synthetic oligonucleotide
gugcaguguucaagggacu

SEQ ID NO: 2324277 - RNA, 19 nt, Artificial Sequence
  Description of Artificial Sequence: Synthetic oligonucleotide
cgccgcugagcgacaacag

SEQ ID NO: 2324278 - RNA, 19 nt, Artificial Sequence
  Description of Artificial Sequence: Synthetic oligonucleotide
ccaauucuccaauggcaau

SEQ ID NO: 2324279 - RNA, 19 nt, Artificial Sequence
  Description of Artificial Sequence: Synthetic oligonucleotide
agcgucccuccguguccaa

SEQ ID NO: 2324280 - RNA, 19 nt, Artificial Sequence
  Description of Artificial Sequence: Synthetic oligonucleotide
auccagcgugucgguugcu

SEQ ID NO: 2324281 - RNA, 19 nt, Artificial Sequence
  Description of Artificial Sequence: Synthetic oligonucleotide
ggaaccucaggagggcgau

SEQ ID NO: 2324282 - RNA, 19 nt, Artificial Sequence
  Description of Artificial Sequence: Synthetic oligonucleotide
ccuugggcuugugcacggc

SEQ ID NO: 2324283 - RNA, 19 nt, Artificial Sequence
  Description of Artificial Sequence: Synthetic oligonucleotide
ccgauugagcagcucggcu

SEQ ID NO: 2324284 - RNA, 19 nt, Artificial Sequence
  Description of Artificial Sequence: Synthetic oligonucleotide
cgccuccgcauucaacauc

SEQ ID NO: 2324285 - RNA, 19 nt, Artificial Sequence
  Description of Artificial Sequence: Synthetic oligonucleotide
cggccuuggagagcugggc

SEQ ID NO: 2324286 - RNA, 19 nt, Artificial Sequence
  Description of Artificial Sequence: Synthetic oligonucleotide
ccccgacaacauacugguc

SEQ ID NO: 2324287 - RNA, 19 nt, Artificial Sequence
  Description of Artificial Sequence: Synthetic oligonucleotide
cguguccaaucuucaacgu

SEQ ID NO: 2324288 - RNA, 19 nt, Artificial Sequence
  Description of Artificial Sequence: Synthetic oligonucleotide
guccagcgucccuccgugu

SEQ ID NO: 2324289 - RNA, 19 nt, Artificial Sequence
  Description of Artificial Sequence: Synthetic oligonucleotide
ccgguagaauccagcgugu

SEQ ID NO: 2324290 - RNA, 19 nt, Artificial Sequence
  Description of Artificial Sequence: Synthetic oligonucleotide
ggccucagagugucuuaau

SEQ ID NO: 2324291 - RNA, 19 nt, Artificial Sequence
  Description of Artificial Sequence: Synthetic oligonucleotide
gccuggucacuggauuucu

SEQ ID NO: 2324292 - RNA, 19 nt, Artificial Sequence
  Description of Artificial Sequence: Synthetic oligonucleotide
gccuggcgggucuggccuc

SEQ ID NO: 2324293 - RNA, 19 nt, Artificial Sequence
  Description of Artificial Sequence: Synthetic oligonucleotide
cgaacacgccgcugagcga

SEQ ID NO: 2324294 - RNA, 19 nt, Artificial Sequence
  Description of Artificial Sequence: Synthetic oligonucleotide
cgcauucaacauccagugu

SEQ ID NO: 2324295 - RNA, 19 nt, Artificial Sequence
  Description of Artificial Sequence: Synthetic oligonucleotide
ccagcgugucgguugcuuu

SEQ ID NO: 2324296 - RNA, 19 nt, Artificial Sequence
  Description of Artificial Sequence: Synthetic oligonucleotide
gccccuguuuggugcgggu

SEQ ID NO: 2324297 - RNA, 19 nt, Artificial Sequence
  Description of Artificial Sequence: Synthetic oligonucleotide
ggucuggccuccacagcuu

SEQ ID NO: 2324298 - RNA, 19 nt, Artificial Sequence
  Description of Artificial Sequence: Synthetic oligonucleotide
gcacggcgaacacgccgcu

SEQ ID NO: 2324299 - RNA, 19 nt, Artificial Sequence
  Description of Artificial Sequence: Synthetic oligonucleotide
cgugggccccuugggcuug

SEQ ID NO: 2324300 - RNA, 19 nt, Artificial Sequence
  Description of Artificial Sequence: Synthetic oligonucleotide
cgcugagcgacaacagcuu

SEQ ID NO: 2324301 - RNA, 19 nt, Artificial Sequence
  Description of Artificial Sequence: Synthetic oligonucleotide
cgguuaccuucccgguaga

SEQ ID NO: 2324302 - RNA, 19 nt, Artificial Sequence
  Description of Artificial Sequence: Synthetic oligonucleotide
gcgucccuccguguccaau

SEQ ID NO: 2324303 - RNA, 19 nt, Artificial Sequence
  Description of Artificial Sequence: Synthetic oligonucleotide
cgccucucuucaugagcgu

SEQ ID NO: 2324304 - RNA, 19 nt, Artificial Sequence
  Description of Artificial Sequence: Synthetic oligonucleotide
auuuauaguaacuucaggc

SEQ ID NO: 2324305 - RNA, 19 nt, Artificial Sequence
  Description of Artificial Sequence: Synthetic oligonucleotide
uuuaauuccacaaaugacu

SEQ ID NO: 2324306 - RNA, 19 nt, Artificial Sequence
  Description of Artificial Sequence: Synthetic oligonucleotide
auuacuaucguuaagguuc

SEQ ID NO: 2324307 - RNA, 19 nt, Artificial Sequence
  Description of Artificial Sequence: Synthetic oligonucleotide
aguaucaucaaacacagca

SEQ ID NO: 2324308 - RNA, 19 nt, Artificial Sequence
  Description of Artificial Sequence: Synthetic oligonucleotide
aguaacuucaggcaacugc

SEQ ID NO: 2324309 - RNA, 19 nt, Artificial Sequence
  Description of Artificial Sequence: Synthetic oligonucleotide
aaauauuuccaucguaguc

SEQ ID NO: 2324310 - RNA, 19 nt, Artificial Sequence
  Description of Artificial Sequence: Synthetic oligonucleotide
uuaucugugaguuuucaag

SEQ ID NO: 2324311 - RNA, 19 nt, Artificial Sequence
  Description of Artificial Sequence: Synthetic oligonucleotide
uuuauaguaacuucaggca

SEQ ID NO: 2324312 - RNA, 19 nt, Artificial Sequence
  Description of Artificial Sequence: Synthetic oligonucleotide
uccauuacuaucguuaagg

SEQ ID NO: 2324313 - RNA, 19 nt, Artificial Sequence
  Description of Artificial Sequence: Synthetic oligonucleotide
acaguuuugaauccggccg

SEQ ID NO: 2324314 - RNA, 19 nt, Artificial Sequence
  Description of Artificial Sequence: Synthetic oligonucleotide
ucaacgaucagcaaaguau

SEQ ID NO: 2324315 - RNA, 19 nt, Artificial Sequence
  Description of Artificial Sequence: Synthetic oligonucleotide
ugguagauccacauuaggg

SEQ ID NO: 2324316 - RNA, 19 nt, Artificial Sequence
  Description of Artificial Sequence: Synthetic oligonucleotide
aacugcacgacucaugcag

SEQ ID NO: 2324317 - RNA, 19 nt, Artificial Sequence
  Description of Artificial Sequence: Synthetic oligonucleotide
uuaauuccacaaaugacug

SEQ ID NO: 2324318 - RNA, 19 nt, Artificial Sequence
  Description of Artificial Sequence: Synthetic oligonucleotide
uuuaaauuaacuucugcua

SEQ ID NO: 2324319 - RNA, 19 nt, Artificial Sequence
  Description of Artificial Sequence: Synthetic oligonucleotide
uaucugugaguuuucaagg

SEQ ID NO: 2324320 - RNA, 19 nt, Artificial Sequence
  Description of Artificial Sequence: Synthetic oligonucleotide
ucuuuaaagcugcuaacag

SEQ ID NO: 2324321 - RNA, 19 nt, Artificial Sequence
  Description of Artificial Sequence: Synthetic oligonucleotide
ugaguuuucaaggacaucu

SEQ ID NO: 2324322 - RNA, 19 nt, Artificial Sequence
  Description of Artificial Sequence: Synthetic oligonucleotide
aaaauauuuccaucguagu

SEQ ID NO: 2324323 - RNA, 19 nt, Artificial Sequence
  Description of Artificial Sequence: Synthetic oligonucleotide
aauuccacaaaugacugug

SEQ ID NO: 2324324 - RNA, 19 nt, Artificial Sequence
  Description of Artificial Sequence: Synthetic oligonucleotide
caaaguaucaucaaacaca

SEQ ID NO: 2324325 - RNA, 19 nt, Artificial Sequence
  Description of Artificial Sequence: Synthetic oligonucleotide
uggagaaaugcauaagucc

SEQ ID NO: 2324326 - RNA, 19 nt, Artificial Sequence
  Description of Artificial Sequence: Synthetic oligonucleotide
uguuuugcaaugguggugg

SEQ ID NO: 2324327 - RNA, 19 nt, Artificial Sequence
  Description of Artificial Sequence: Synthetic oligonucleotide
uccuguaauacuccagugg

SEQ ID NO: 2324328 - RNA, 19 nt, Artificial Sequence
  Description of Artificial Sequence: Synthetic oligonucleotide
gaaaccucgaugaacacag

SEQ ID NO: 2324329 - RNA, 19 nt, Artificial Sequence
  Description of Artificial Sequence: Synthetic oligonucleotide
ucauuuguguuucauacuc

SEQ ID NO: 2324330 - RNA, 19 nt, Artificial Sequence
  Description of Artificial Sequence: Synthetic oligonucleotide
gaaacugcacgacucaugc

SEQ ID NO: 2324331 - RNA, 19 nt, Artificial Sequence
  Description of Artificial Sequence: Synthetic oligonucleotide
aaccucgaugaacacagcg

SEQ ID NO: 2324332 - RNA, 19 nt, Artificial Sequence
  Description of Artificial Sequence: Synthetic oligonucleotide
ugcacaguguaacaaauac

SEQ ID NO: 2324333 - RNA, 19 nt, Artificial Sequence
  Description of Artificial Sequence: Synthetic oligonucleotide
uucucuuccaucaggucgg

SEQ ID NO: 2324334 - RNA, 19 nt, Artificial Sequence
  Description of Artificial Sequence: Synthetic oligonucleotide
cuuuaauuccacaaaugac

SEQ ID NO: 2324335 - RNA, 19 nt, Artificial Sequence
  Description of Artificial Sequence: Synthetic oligonucleotide
agucuaggcaaauaagguc

SEQ ID NO: 2324336 - RNA, 19 nt, Artificial Sequence
  Description of Artificial Sequence: Synthetic oligonucleotide
ucauccauuacuaucguua

SEQ ID NO: 2324337 - RNA, 19 nt, Artificial Sequence
  Description of Artificial Sequence: Synthetic oligonucleotide
aauaaggucacaguacaga

SEQ ID NO: 2324338 - RNA, 19 nt, Artificial Sequence
  Description of Artificial Sequence: Synthetic oligonucleotide
uugugaagagaacacagcu

SEQ ID NO: 2324339 - RNA, 19 nt, Artificial Sequence
  Description of Artificial Sequence: Synthetic oligonucleotide
ugcuaaagcaguuucuuca

SEQ ID NO: 2324340 - RNA, 19 nt, Artificial Sequence
  Description of Artificial Sequence: Synthetic oligonucleotide
ugugguucugaauucacca

SEQ ID NO: 2324341 - RNA, 19 nt, Artificial Sequence
  Description of Artificial Sequence: Synthetic oligonucleotide
auugaaccuauguuaacag

SEQ ID NO: 2324342 - RNA, 19 nt, Artificial Sequence
  Description of Artificial Sequence: Synthetic oligonucleotide
uuauaguaacuucaggcaa

SEQ ID NO: 2324343 - RNA, 19 nt, Artificial Sequence
  Description of Artificial Sequence: Synthetic oligonucleotide
uuaauuaucugugaguuuu

SEQ ID NO: 2324344 - RNA, 19 nt, Artificial Sequence
  Description of Artificial Sequence: Synthetic oligonucleotide
ucuaacauucaaauaacuu

SEQ ID NO: 2324345 - RNA, 19 nt, Artificial Sequence
  Description of Artificial Sequence: Synthetic oligonucleotide
uuugugaagagaacacagc

SEQ ID NO: 2324346 - RNA, 19 nt, Artificial Sequence
  Description of Artificial Sequence: Synthetic oligonucleotide
acugauugaaccuauguua

SEQ ID NO: 2324347 - RNA, 19 nt, Artificial Sequence
  Description of Artificial Sequence: Synthetic oligonucleotide
aguaaguccacucccaccu

SEQ ID NO: 2324348 - RNA, 19 nt, Artificial Sequence
  Description of Artificial Sequence: Synthetic oligonucleotide
uguuucauacucugaauga

SEQ ID NO: 2324349 - RNA, 19 nt, Artificial Sequence
  Description of Artificial Sequence: Synthetic oligonucleotide
gacaacauauccucuauca

SEQ ID NO: 2324350 - RNA, 19 nt, Artificial Sequence
  Description of Artificial Sequence: Synthetic oligonucleotide
uuaagguuccuguugacaa

SEQ ID NO: 2324351 - RNA, 19 nt, Artificial Sequence
  Description of Artificial Sequence: Synthetic oligonucleotide
uuagggacaacauauccuc

SEQ ID NO: 2324352 - RNA, 19 nt, Artificial Sequence
  Description of Artificial Sequence: Synthetic oligonucleotide
ugugcaggcauccaaaaua

SEQ ID NO: 2324353 - RNA, 19 nt, Artificial Sequence
  Description of Artificial Sequence: Synthetic oligonucleotide
ugaaccuauguuaacaguu

SEQ ID NO: 2324354 - RNA, 19 nt, Artificial Sequence
  Description of Artificial Sequence: Synthetic oligonucleotide
gacaucugcaaugaacugg

SEQ ID NO: 2324355 - RNA, 19 nt, Artificial Sequence
  Description of Artificial Sequence: Synthetic oligonucleotide
auguuaacaguugugguuc

SEQ ID NO: 2324356 - RNA, 19 nt, Artificial Sequence
  Description of Artificial Sequence: Synthetic oligonucleotide
uuuacagcuguuuugcaau

SEQ ID NO: 2324357 - RNA, 19 nt, Artificial Sequence
  Description of Artificial Sequence: Synthetic oligonucleotide
agaaccgucagcuguacug

SEQ ID NO: 2324358 - RNA, 19 nt, Artificial Sequence
  Description of Artificial Sequence: Synthetic oligonucleotide
aaaugcauaaguccucuuu

SEQ ID NO: 2324359 - RNA, 19 nt, Artificial Sequence
  Description of Artificial Sequence: Synthetic oligonucleotide
ucuuaauuaucugugaguu

SEQ ID NO: 2324360 - RNA, 19 nt, Artificial Sequence
  Description of Artificial Sequence: Synthetic oligonucleotide
aauucugcuuuaauuccac

SEQ ID NO: 2324361 - RNA, 19 nt, Artificial Sequence
  Description of Artificial Sequence: Synthetic oligonucleotide
uuuucaaggacaucugcaa

SEQ ID NO: 2324362 - RNA, 19 nt, Artificial Sequence
  Description of Artificial Sequence: Synthetic oligonucleotide
uagucuaggcaaauaaggu

SEQ ID NO: 2324363 - RNA, 19 nt, Artificial Sequence
  Description of Artificial Sequence: Synthetic oligonucleotide
uauguuaacaguugugguu

SEQ ID NO: 2324364 - RNA, 19 nt, Artificial Sequence
  Description of Artificial Sequence: Synthetic oligonucleotide
uguaauacuccagugguuc

SEQ ID NO: 2324365 - RNA, 19 nt, Artificial Sequence
  Description of Artificial Sequence: Synthetic oligonucleotide
ugcaaauucugcuuuaauu

SEQ ID NO: 2324366 - RNA, 19 nt, Artificial Sequence
  Description of Artificial Sequence: Synthetic oligonucleotide
uccaucguagucuaggcaa

SEQ ID NO: 2324367 - RNA, 19 nt, Artificial Sequence
  Description of Artificial Sequence: Synthetic oligonucleotide
guuugugaagagaacacag

SEQ ID NO: 2324368 - RNA, 19 nt, Artificial Sequence
  Description of Artificial Sequence: Synthetic oligonucleotide
uucuaacauucaaauaacu

SEQ ID NO: 2324369 - RNA, 19 nt, Artificial Sequence
  Description of Artificial Sequence: Synthetic oligonucleotide
uggguuuguucuaacauuc

SEQ ID NO: 2324370 - RNA, 19 nt, Artificial Sequence
  Description of Artificial Sequence: Synthetic oligonucleotide
agcaaaguaucaucaaaca

SEQ ID NO: 2324371 - RNA, 19 nt, Artificial Sequence
  Description of Artificial Sequence: Synthetic oligonucleotide
cagcaaaguaucaucaaac

SEQ ID NO: 2324372 - RNA, 19 nt, Artificial Sequence
  Description of Artificial Sequence: Synthetic oligonucleotide
cuucauuuauaguaacuuc

SEQ ID NO: 2324373 - RNA, 19 nt, Artificial Sequence
  Description of Artificial Sequence: Synthetic oligonucleotide
uucuucauuuauaguaacu

SEQ ID NO: 2324374 - RNA, 19 nt, Artificial Sequence
  Description of Artificial Sequence: Synthetic oligonucleotide
aagagaacacagcuugccu

SEQ ID NO: 2324375 - RNA, 19 nt, Artificial Sequence
  Description of Artificial Sequence: Synthetic oligonucleotide
accaaguucucuuccauca

SEQ ID NO: 2324376 - RNA, 19 nt, Artificial Sequence
  Description of Artificial Sequence: Synthetic oligonucleotide
cuuuaaauuaacuucugcu

SEQ ID NO: 2324377 - RNA, 19 nt, Artificial Sequence
  Description of Artificial Sequence: Synthetic oligonucleotide
uuacuaucguuaagguucc

SEQ ID NO: 2324378 - RNA, 19 nt, Artificial Sequence
  Description of Artificial Sequence: Synthetic oligonucleotide
acacagcggugguagaucc

SEQ ID NO: 2324379 - RNA, 19 nt, Artificial Sequence
  Description of Artificial Sequence: Synthetic oligonucleotide
uucagaaaccuccuguaau

SEQ ID NO: 2324380 - RNA, 19 nt, Artificial Sequence
  Description of Artificial Sequence: Synthetic oligonucleotide
ugcuaacagagcaaaugug

SEQ ID NO: 2324381 - RNA, 19 nt, Artificial Sequence
  Description of Artificial Sequence: Synthetic oligonucleotide
uucuuugugucucgaaacu

SEQ ID NO: 2324382 - RNA, 19 nt, Artificial Sequence
  Description of Artificial Sequence: Synthetic oligonucleotide
ucugugaguuuucaaggac

SEQ ID NO: 2324383 - RNA, 19 nt, Artificial Sequence
  Description of Artificial Sequence: Synthetic oligonucleotide
aucguuaagguuccuguug

SEQ ID NO: 2324384 - RNA, 19 nt, Artificial Sequence
  Description of Artificial Sequence: Synthetic oligonucleotide
ucuucauuuauaguaacuu

SEQ ID NO: 2324385 - RNA, 19 nt, Artificial Sequence
  Description of Artificial Sequence: Synthetic oligonucleotide
aacccaagcaagcuugccu

SEQ ID NO: 2324386 - RNA, 19 nt, Artificial Sequence
  Description of Artificial Sequence: Synthetic oligonucleotide
aguacagaacccaagcaag

SEQ ID NO: 2324387 - RNA, 19 nt, Artificial Sequence
  Description of Artificial Sequence: Synthetic oligonucleotide
ucguagucuaggcaaauaa

SEQ ID NO: 2324388 - RNA, 19 nt, Artificial Sequence
  Description of Artificial Sequence: Synthetic oligonucleotide
aaccuauguuaacaguugu

SEQ ID NO: 2324389 - RNA, 19 nt, Artificial Sequence
  Description of Artificial Sequence: Synthetic oligonucleotide
gguuccacaguuuugaauc

SEQ ID NO: 2324390 - RNA, 19 nt, Artificial Sequence
  Description of Artificial Sequence: Synthetic oligonucleotide
gaaaccuccuguaauacuc

SEQ ID NO: 2324391 - RNA, 19 nt, Artificial Sequence
  Description of Artificial Sequence: Synthetic oligonucleotide
ucguuaagguuccuguuga

SEQ ID NO: 2324392 - RNA, 19 nt, Artificial Sequence
  Description of Artificial Sequence: Synthetic oligonucleotide
agcaaaggaaguugcaacu

SEQ ID NO: 2324393 - RNA, 19 nt, Artificial Sequence
  Description of Artificial Sequence: Synthetic oligonucleotide
ugguuugugaagagaacac

SEQ ID NO: 2324394 - RNA, 19 nt, Artificial Sequence
  Description of Artificial Sequence: Synthetic oligonucleotide
uuugugucucgaaacugca

SEQ ID NO: 2324395 - RNA, 19 nt, Artificial Sequence
  Description of Artificial Sequence: Synthetic oligonucleotide
auaaggucacaguacagaa

SEQ ID NO: 2324396 - RNA, 19 nt, Artificial Sequence
  Description of Artificial Sequence: Synthetic oligonucleotide
uguuccuccucuccaguag

SEQ ID NO: 2324397 - RNA, 19 nt, Artificial Sequence
  Description of Artificial Sequence: Synthetic oligonucleotide
guagauccacauuagggac

SEQ ID NO: 2324398 - RNA, 19 nt, Artificial Sequence
  Description of Artificial Sequence: Synthetic oligonucleotide
ugugaguuuucaaggacau

SEQ ID NO: 2324399 - RNA, 19 nt, Artificial Sequence
  Description of Artificial Sequence: Synthetic oligonucleotide
uucauacucugaaugacuu

SEQ ID NO: 2324400 - RNA, 19 nt, Artificial Sequence
  Description of Artificial Sequence: Synthetic oligonucleotide
gaaguugcaacuggguuug

SEQ ID NO: 2324401 - RNA, 19 nt, Artificial Sequence
  Description of Artificial Sequence: Synthetic oligonucleotide
uacugauugaaccuauguu

SEQ ID NO: 2324402 - RNA, 19 nt, Artificial Sequence
  Description of Artificial Sequence: Synthetic oligonucleotide
cacaguuuugaauccggcc

SEQ ID NO: 2324403 - RNA, 19 nt, Artificial Sequence
  Description of Artificial Sequence: Synthetic oligonucleotide
ucagcuguacugauugaac

SEQ ID NO: 2324404 - RNA, 19 nt, Artificial Sequence
  Description of Artificial Sequence: Synthetic oligonucleotide
aguguaacaaauacaauuu

SEQ ID NO: 2324405 - RNA, 19 nt, Artificial Sequence
  Description of Artificial Sequence: Synthetic oligonucleotide
ucuccaguaggaucaacga

SEQ ID NO: 2324406 - RNA, 19 nt, Artificial Sequence
  Description of Artificial Sequence: Synthetic oligonucleotide
ucagaaaccuccuguaaua

SEQ ID NO: 2324407 - RNA, 19 nt, Artificial Sequence
  Description of Artificial Sequence: Synthetic oligonucleotide
uccacaaaugacuguggug

SEQ ID NO: 2324408 - RNA, 19 nt, Artificial Sequence
  Description of Artificial Sequence: Synthetic oligonucleotide
cagcuguacugauugaacc

SEQ ID NO: 2324409 - RNA, 19 nt, Artificial Sequence
  Description of Artificial Sequence: Synthetic oligonucleotide
cuggagaaaugcauaaguc

SEQ ID NO: 2324410 - RNA, 19 nt, Artificial Sequence
  Description of Artificial Sequence: Synthetic oligonucleotide
ucucgaaacugcacgacuc

SEQ ID NO: 2324411 - RNA, 19 nt, Artificial Sequence
  Description of Artificial Sequence: Synthetic oligonucleotide
uacuccagugguuccacag

SEQ ID NO: 2324412 - RNA, 19 nt, Artificial Sequence
  Description of Artificial Sequence: Synthetic oligonucleotide
aaauaaggucacaguacag

SEQ ID NO: 2324413 - RNA, 19 nt, Artificial Sequence
  Description of Artificial Sequence: Synthetic oligonucleotide
ugaacuggcugguuacuug

SEQ ID NO: 2324414 - RNA, 19 nt, Artificial Sequence
  Description of Artificial Sequence: Synthetic oligonucleotide
caacgaucagcaaaguauc

SEQ ID NO: 2324415 - RNA, 19 nt, Artificial Sequence
  Description of Artificial Sequence: Synthetic oligonucleotide
ugugcacaguguaacaaau

SEQ ID NO: 2324416 - RNA, 19 nt, Artificial Sequence
  Description of Artificial Sequence: Synthetic oligonucleotide
aacacagcggugguagauc

SEQ ID NO: 2324417 - RNA, 19 nt, Artificial Sequence
  Description of Artificial Sequence: Synthetic oligonucleotide
acuggguuuguucuaacau

SEQ ID NO: 2324418 - RNA, 19 nt, Artificial Sequence
  Description of Artificial Sequence: Synthetic oligonucleotide
cuaacauucaaauaacuuu

SEQ ID NO: 2324419 - RNA, 19 nt, Artificial Sequence
  Description of Artificial Sequence: Synthetic oligonucleotide
cagaacccaagcaagcuug

SEQ ID NO: 2324420 - RNA, 19 nt, Artificial Sequence
  Description of Artificial Sequence: Synthetic oligonucleotide
gaaccuauguuaacaguug

SEQ ID NO: 2324421 - RNA, 19 nt, Artificial Sequence
  Description of Artificial Sequence: Synthetic oligonucleotide
uaagguuccuguugacaag

SEQ ID NO: 2324422 - RNA, 19 nt, Artificial Sequence
  Description of Artificial Sequence: Synthetic oligonucleotide
cuaucaggggcaucuagug

SEQ ID NO: 2324423 - RNA, 19 nt, Artificial Sequence
  Description of Artificial Sequence: Synthetic oligonucleotide
uuaacaguugugguucuga

SEQ ID NO: 2324424 - RNA, 19 nt, Artificial Sequence
  Description of Artificial Sequence: Synthetic oligonucleotide
uaaggucacaguacagaac

SEQ ID NO: 2324425 - RNA, 19 nt, Artificial Sequence
  Description of Artificial Sequence: Synthetic oligonucleotide
uguacugauugaaccuaug

SEQ ID NO: 2324426 - RNA, 19 nt, Artificial Sequence
  Description of Artificial Sequence: Synthetic oligonucleotide
caggcauccaaaauauuuc

SEQ ID NO: 2324427 - RNA, 19 nt, Artificial Sequence
  Description of Artificial Sequence: Synthetic oligonucleotide
agcuccaguaaguccacuc

SEQ ID NO: 2324428 - RNA, 19 nt, Artificial Sequence
  Description of Artificial Sequence: Synthetic oligonucleotide
ccuauguuaacaguugugg

SEQ ID NO: 2324429 - RNA, 19 nt, Artificial Sequence
  Description of Artificial Sequence: Synthetic oligonucleotide
aggucggcaguuuucuuuc

SEQ ID NO: 2324430 - RNA, 19 nt, Artificial Sequence
  Description of Artificial Sequence: Synthetic oligonucleotide
uguugacaaguguuccucc

SEQ ID NO: 2324431 - RNA, 19 nt, Artificial Sequence
  Description of Artificial Sequence: Synthetic oligonucleotide
guaggaucaacgaucagca

SEQ ID NO: 2324432 - RNA, 19 nt, Artificial Sequence
  Description of Artificial Sequence: Synthetic oligonucleotide
agugguuccacaguuuuga

SEQ ID NO: 2324433 - RNA, 19 nt, Artificial Sequence
  Description of Artificial Sequence: Synthetic oligonucleotide
caaugaacuggcugguuac

SEQ ID NO: 2324434 - RNA, 19 nt, Artificial Sequence
  Description of Artificial Sequence: Synthetic oligonucleotide
uccaguaaguccacuccca

SEQ ID NO: 2324435 - RNA, 19 nt, Artificial Sequence
  Description of Artificial Sequence: Synthetic oligonucleotide
uccacauuagggacaacau

SEQ ID NO: 2324436 - RNA, 19 nt, Artificial Sequence
  Description of Artificial Sequence: Synthetic oligonucleotide
guaacuucaggcaacugca

SEQ ID NO: 2324437 - RNA, 19 nt, Artificial Sequence
  Description of Artificial Sequence: Synthetic oligonucleotide
auuagggacaacauauccu

SEQ ID NO: 2324438 - RNA, 19 nt, Artificial Sequence
  Description of Artificial Sequence: Synthetic oligonucleotide
uugaaccuauguuaacagu

SEQ ID NO: 2324439 - RNA, 19 nt, Artificial Sequence
  Description of Artificial Sequence: Synthetic oligonucleotide
guugcaacuggguuuguuc

SEQ ID NO: 2324440 - RNA, 19 nt, Artificial Sequence
  Description of Artificial Sequence: Synthetic oligonucleotide
aaguuuagcuccaguaagu

SEQ ID NO: 2324441 - RNA, 19 nt, Artificial Sequence
  Description of Artificial Sequence: Synthetic oligonucleotide
ggaucaacgaucagcaaag

SEQ ID NO: 2324442 - RNA, 19 nt, Artificial Sequence
  Description of Artificial Sequence: Synthetic oligonucleotide
ucuaggcaaauaaggucac

SEQ ID NO: 2324443 - RNA, 19 nt, Artificial Sequence
  Description of Artificial Sequence: Synthetic oligonucleotide
gcuucacuagagcagaacc

SEQ ID NO: 2324444 - RNA, 19 nt, Artificial Sequence
  Description of Artificial Sequence: Synthetic oligonucleotide
aagcaagcuugccuggaga

SEQ ID NO: 2324445 - RNA, 19 nt, Artificial Sequence
  Description of Artificial Sequence: Synthetic oligonucleotide
cuggcugguuacuugggcc

SEQ ID NO: 2324446 - RNA, 19 nt, Artificial Sequence
  Description of Artificial Sequence: Synthetic oligonucleotide
gugguagauccacauuagg

SEQ ID NO: 2324447 - RNA, 19 nt, Artificial Sequence
  Description of Artificial Sequence: Synthetic oligonucleotide
aguuuucuuucagaaaccu

SEQ ID NO: 2324448 - RNA, 19 nt, Artificial Sequence
  Description of Artificial Sequence: Synthetic oligonucleotide
guucuaacauucaaauaac

SEQ ID NO: 2324449 - RNA, 19 nt, Artificial Sequence
  Description of Artificial Sequence: Synthetic oligonucleotide
guuucauacucugaaugac

SEQ ID NO: 2324450 - RNA, 19 nt, Artificial Sequence
  Description of Artificial Sequence: Synthetic oligonucleotide
aguuuugaauccggccgcc

SEQ ID NO: 2324451 - RNA, 19 nt, Artificial Sequence
  Description of Artificial Sequence: Synthetic oligonucleotide
agaaaccuccuguaauacu

SEQ ID NO: 2324452 - RNA, 19 nt, Artificial Sequence
  Description of Artificial Sequence: Synthetic oligonucleotide
cacauuagggacaacauau

SEQ ID NO: 2324453 - RNA, 19 nt, Artificial Sequence
  Description of Artificial Sequence: Synthetic oligonucleotide
accucgaugaacacagcgg

SEQ ID NO: 2324454 - RNA, 19 nt, Artificial Sequence
  Description of Artificial Sequence: Synthetic oligonucleotide
uuuugaauccggccgccau

SEQ ID NO: 2324455 - RNA, 19 nt, Artificial Sequence
  Description of Artificial Sequence: Synthetic oligonucleotide
uuccacaguuuugaauccg

SEQ ID NO: 2324456 - RNA, 19 nt, Artificial Sequence
  Description of Artificial Sequence: Synthetic oligonucleotide
uuacagcuguuuugcaaug

SEQ ID NO: 2324457 - RNA, 19 nt, Artificial Sequence
  Description of Artificial Sequence: Synthetic oligonucleotide
caguccgaaaccucgauga

SEQ ID NO: 2324458 - RNA, 19 nt, Artificial Sequence
  Description of Artificial Sequence: Synthetic oligonucleotide
caguuuugaauccggccgc

SEQ ID NO: 2324459 - RNA, 19 nt, Artificial Sequence
  Description of Artificial Sequence: Synthetic oligonucleotide
ugauugaaccuauguuaac

SEQ ID NO: 2324460 - RNA, 19 nt, Artificial Sequence
  Description of Artificial Sequence: Synthetic oligonucleotide
aaacacagcaaaggaaguu

SEQ ID NO: 2324461 - RNA, 19 nt, Artificial Sequence
  Description of Artificial Sequence: Synthetic oligonucleotide
agcuugccuggagaaaugc

SEQ ID NO: 2324462 - RNA, 19 nt, Artificial Sequence
  Description of Artificial Sequence: Synthetic oligonucleotide
cuccaguaaguccacuccc

SEQ ID NO: 2324463 - RNA, 19 nt, Artificial Sequence
  Description of Artificial Sequence: Synthetic oligonucleotide
aaaugugcaggcauccaaa

SEQ ID NO: 2324464 - RNA, 19 nt, Artificial Sequence
  Description of Artificial Sequence: Synthetic oligonucleotide
aaguaucaucaaacacagc

SEQ ID NO: 2324465 - RNA, 19 nt, Artificial Sequence
  Description of Artificial Sequence: Synthetic oligonucleotide
uuguucuaacauucaaaua

SEQ ID NO: 2324466 - RNA, 19 nt, Artificial Sequence
  Description of Artificial Sequence: Synthetic oligonucleotide
uacagaacccaagcaagcu

SEQ ID NO: 2324467 - RNA, 19 nt, Artificial Sequence
  Description of Artificial Sequence: Synthetic oligonucleotide
ucugcuaaagcaguuucuu

SEQ ID NO: 2324468 - RNA, 19 nt, Artificial Sequence
  Description of Artificial Sequence: Synthetic oligonucleotide
aaccuccuguaauacucca

SEQ ID NO: 2324469 - RNA, 19 nt, Artificial Sequence
  Description of Artificial Sequence: Synthetic oligonucleotide
caguguaacaaauacaauu

SEQ ID NO: 2324470 - RNA, 19 nt, Artificial Sequence
  Description of Artificial Sequence: Synthetic oligonucleotide
uccuguugacaaguguucc

SEQ ID NO: 2324471 - RNA, 19 nt, Artificial Sequence
  Description of Artificial Sequence: Synthetic oligonucleotide
aggcaaauaaggucacagu

SEQ ID NO: 2324472 - RNA, 19 nt, Artificial Sequence
  Description of Artificial Sequence: Synthetic oligonucleotide
acuaucguuaagguuccug

SEQ ID NO: 2324473 - RNA, 19 nt, Artificial Sequence
  Description of Artificial Sequence: Synthetic oligonucleotide
aggaaguugcaacuggguu

SEQ ID NO: 2324474 - RNA, 19 nt, Artificial Sequence
  Description of Artificial Sequence: Synthetic oligonucleotide
auccauuacuaucguuaag

SEQ ID NO: 2324475 - RNA, 19 nt, Artificial Sequence
  Description of Artificial Sequence: Synthetic oligonucleotide
ucggcaguuuucuuucaga

SEQ ID NO: 2324476 - RNA, 19 nt, Artificial Sequence
  Description of Artificial Sequence: Synthetic oligonucleotide
acauuagggacaacauauc

SEQ ID NO: 2324477 - RNA, 19 nt, Artificial Sequence
  Description of Artificial Sequence: Synthetic oligonucleotide
caucuagugguggugcugc

SEQ ID NO: 2324478 - RNA, 19 nt, Artificial Sequence
  Description of Artificial Sequence: Synthetic oligonucleotide
agccugugcacaguguaac

SEQ ID NO: 2324479 - RNA, 19 nt, Artificial Sequence
  Description of Artificial Sequence: Synthetic oligonucleotide
uucaggcaacugcacauuc

SEQ ID NO: 2324480 - RNA, 19 nt, Artificial Sequence
  Description of Artificial Sequence: Synthetic oligonucleotide
ugcauaaguccucuuucuu

SEQ ID NO: 2324481 - RNA, 19 nt, Artificial Sequence
  Description of Artificial Sequence: Synthetic oligonucleotide
caguaaguccacucccacc

SEQ ID NO: 2324482 - RNA, 19 nt, Artificial Sequence
  Description of Artificial Sequence: Synthetic oligonucleotide
auauuuccaucguagucua

SEQ ID NO: 2324483 - RNA, 19 nt, Artificial Sequence
  Description of Artificial Sequence: Synthetic oligonucleotide
aaggaaguugcaacugggu

SEQ ID NO: 2324484 - RNA, 19 nt, Artificial Sequence
  Description of Artificial Sequence: Synthetic oligonucleotide
ugaauucaccaaguucucu

SEQ ID NO: 2324485 - RNA, 19 nt, Artificial Sequence
  Description of Artificial Sequence: Synthetic oligonucleotide
uaacaguugugguucugaa

SEQ ID NO: 2324486 - RNA, 19 nt, Artificial Sequence
  Description of Artificial Sequence: Synthetic oligonucleotide
aaacugcacgacucaugca

SEQ ID NO: 2324487 - RNA, 19 nt, Artificial Sequence
  Description of Artificial Sequence: Synthetic oligonucleotide
ggcaaauaaggucacagua

SEQ ID NO: 2324488 - RNA, 19 nt, Artificial Sequence
  Description of Artificial Sequence: Synthetic oligonucleotide
aucaacgaucagcaaagua

SEQ ID NO: 2324489 - RNA, 19 nt, Artificial Sequence
  Description of Artificial Sequence: Synthetic oligonucleotide
uugugucucgaaacugcac

SEQ ID NO: 2324490 - RNA, 19 nt, Artificial Sequence
  Description of Artificial Sequence: Synthetic oligonucleotide
uauuuccaucguagucuag

SEQ ID NO: 2324491 - RNA, 19 nt, Artificial Sequence
  Description of Artificial Sequence: Synthetic oligonucleotide
uguuaacaguugugguucu

SEQ ID NO: 2324492 - RNA, 19 nt, Artificial Sequence
  Description of Artificial Sequence: Synthetic oligonucleotide
gcaaauaaggucacaguac

SEQ ID NO: 2324493 - RNA, 19 nt, Artificial Sequence
  Description of Artificial Sequence: Synthetic oligonucleotide
auauccucuaucaggggca

SEQ ID NO: 2324494 - RNA, 19 nt, Artificial Sequence
  Description of Artificial Sequence: Synthetic oligonucleotide
cucuaucaggggcaucuag

SEQ ID NO: 2324495 - RNA, 19 nt, Artificial Sequence
  Description of Artificial Sequence: Synthetic oligonucleotide
gcugcuaacagagcaaaug

SEQ ID NO: 2324496 - RNA, 19 nt, Artificial Sequence
  Description of Artificial Sequence: Synthetic oligonucleotide
agaacccaagcaagcuugc

SEQ ID NO: 2324497 - RNA, 19 nt, Artificial Sequence
  Description of Artificial Sequence: Synthetic oligonucleotide
uugccuggagaaaugcaua

SEQ ID NO: 2324498 - RNA, 19 nt, Artificial Sequence
  Description of Artificial Sequence: Synthetic oligonucleotide
aacgaucagcaaaguauca

SEQ ID NO: 2324499 - RNA, 19 nt, Artificial Sequence
  Description of Artificial Sequence: Synthetic oligonucleotide
guuaagguuccuguugaca

SEQ ID NO: 2324500 - RNA, 19 nt, Artificial Sequence
  Description of Artificial Sequence: Synthetic oligonucleotide
aaaccucgaugaacacagc

SEQ ID NO: 2324501 - RNA, 19 nt, Artificial Sequence
  Description of Artificial Sequence: Synthetic oligonucleotide
uaucguuaagguuccuguu

SEQ ID NO: 2324502 - RNA, 19 nt, Artificial Sequence
  Description of Artificial Sequence: Synthetic oligonucleotide
ugguuccacaguuuugaau

SEQ ID NO: 2324503 - RNA, 19 nt, Artificial Sequence
  Description of Artificial Sequence: Synthetic oligonucleotide
caucuagcagcuuguucac

SEQ ID NO: 2324504 - RNA, 19 nt, Artificial Sequence
  Description of Artificial Sequence: Synthetic oligonucleotide
cuccuguaauacuccagug

SEQ ID NO: 2324505 - RNA, 19 nt, Artificial Sequence
  Description of Artificial Sequence: Synthetic oligonucleotide
aguugugguucugaauuca

SEQ ID NO: 2324506 - RNA, 19 nt, Artificial Sequence
  Description of Artificial Sequence: Synthetic oligonucleotide
acagaacccaagcaagcuu

SEQ ID NO: 2324507 - RNA, 19 nt, Artificial Sequence
  Description of Artificial Sequence: Synthetic oligonucleotide
caugcaguccugaaguuua

SEQ ID NO: 2324508 - RNA, 19 nt, Artificial Sequence
  Description of Artificial Sequence: Synthetic oligonucleotide
uuuugcaauggugguggcu

SEQ ID NO: 2324509 - RNA, 19 nt, Artificial Sequence
  Description of Artificial Sequence: Synthetic oligonucleotide
cuaucguuaagguuccugu

SEQ ID NO: 2324510 - RNA, 19 nt, Artificial Sequence
  Description of Artificial Sequence: Synthetic oligonucleotide
agagcagaaccgucagcug

SEQ ID NO: 2324511 - RNA, 19 nt, Artificial Sequence
  Description of Artificial Sequence: Synthetic oligonucleotide
ugguggcuauucauuugug

SEQ ID NO: 2324512 - RNA, 19 nt, Artificial Sequence
  Description of Artificial Sequence: Synthetic oligonucleotide
cacuagagcagaaccguca

SEQ ID NO: 2324513 - RNA, 19 nt, Artificial Sequence
  Description of Artificial Sequence: Synthetic oligonucleotide
cuagagcagaaccgucagc

SEQ ID NO: 2324514 - RNA, 19 nt, Artificial Sequence
  Description of Artificial Sequence: Synthetic oligonucleotide
gguccaguccgaaaccucg

SEQ ID NO: 2324515 - RNA, 19 nt, Artificial Sequence
  Description of Artificial Sequence: Synthetic oligonucleotide
cuguugacaaguguuccuc

SEQ ID NO: 2324516 - RNA, 19 nt, Artificial Sequence
  Description of Artificial Sequence: Synthetic oligonucleotide
cagaaaccuccuguaauac

SEQ ID NO: 2324517 - RNA, 19 nt, Artificial Sequence
  Description of Artificial Sequence: Synthetic oligonucleotide
ugcacgacucaugcagucc

SEQ ID NO: 2324518 - RNA, 19 nt, Artificial Sequence
  Description of Artificial Sequence: Synthetic oligonucleotide
cucgaugaacacagcggug

SEQ ID NO: 2324519 - RNA, 19 nt, Artificial Sequence
  Description of Artificial Sequence: Synthetic oligonucleotide
cauccauuacuaucguuaa

SEQ ID NO: 2324520 - RNA, 19 nt, Artificial Sequence
  Description of Artificial Sequence: Synthetic oligonucleotide
agcggugguagauccacau

SEQ ID NO: 2324521 - RNA, 19 nt, Artificial Sequence
  Description of Artificial Sequence: Synthetic oligonucleotide
ugacugugguguuccccag

SEQ ID NO: 2324522 - RNA, 19 nt, Artificial Sequence
  Description of Artificial Sequence: Synthetic oligonucleotide
cuauguuaacaguuguggu

SEQ ID NO: 2324523 - RNA, 19 nt, Artificial Sequence
  Description of Artificial Sequence: Synthetic oligonucleotide
caguugugguucugaauuc

SEQ ID NO: 2324524 - RNA, 19 nt, Artificial Sequence
  Description of Artificial Sequence: Synthetic oligonucleotide
gaaccgucagcuguacuga

SEQ ID NO: 2324525 - RNA, 19 nt, Artificial Sequence
  Description of Artificial Sequence: Synthetic oligonucleotide
agauccacauuagggacaa

SEQ ID NO: 2324526 - RNA, 19 nt, Artificial Sequence
  Description of Artificial Sequence: Synthetic oligonucleotide
cugcuaacagagcaaaugu

SEQ ID NO: 2324527 - RNA, 19 nt, Artificial Sequence
  Description of Artificial Sequence: Synthetic oligonucleotide
ucaugcaguccugaaguuu

SEQ ID NO: 2324528 - RNA, 19 nt, Artificial Sequence
  Description of Artificial Sequence: Synthetic oligonucleotide
gacaaguguuccuccucuc

SEQ ID NO: 2324529 - RNA, 19 nt, Artificial Sequence
  Description of Artificial Sequence: Synthetic oligonucleotide
ggugguagauccacauuag

SEQ ID NO: 2324530 - RNA, 19 nt, Artificial Sequence
  Description of Artificial Sequence: Synthetic oligonucleotide
cguagucuaggcaaauaag

SEQ ID NO: 2324531 - RNA, 19 nt, Artificial Sequence
  Description of Artificial Sequence: Synthetic oligonucleotide
ugcaguccugaaguuuagc

SEQ ID NO: 2324532 - RNA, 19 nt, Artificial Sequence
  Description of Artificial Sequence: Synthetic oligonucleotide
gugucucgaaacugcacga

SEQ ID NO: 2324533 - RNA, 19 nt, Artificial Sequence
  Description of Artificial Sequence: Synthetic oligonucleotide
uccaguccgaaaccucgau

SEQ ID NO: 2324534 - RNA, 19 nt, Artificial Sequence
  Description of Artificial Sequence: Synthetic oligonucleotide
gaacccaagcaagcuugcc

SEQ ID NO: 2324535 - RNA, 19 nt, Artificial Sequence
  Description of Artificial Sequence: Synthetic oligonucleotide
gguggugcugcaaauucug

SEQ ID NO: 2324536 - RNA, 19 nt, Artificial Sequence
  Description of Artificial Sequence: Synthetic oligonucleotide
aaccgucagcuguacugau

SEQ ID NO: 2324537 - RNA, 19 nt, Artificial Sequence
  Description of Artificial Sequence: Synthetic oligonucleotide
ggcaacugcacauucuuua

SEQ ID NO: 2324538 - RNA, 19 nt, Artificial Sequence
  Description of Artificial Sequence: Synthetic oligonucleotide
cuugggccucuucuccagg

SEQ ID NO: 2324539 - RNA, 19 nt, Artificial Sequence
  Description of Artificial Sequence: Synthetic oligonucleotide
guggcuauucauuuguguu

SEQ ID NO: 2324540 - RNA, 19 nt, Artificial Sequence
  Description of Artificial Sequence: Synthetic oligonucleotide
ggugguggcuauucauuug

SEQ ID NO: 2324541 - RNA, 19 nt, Artificial Sequence
  Description of Artificial Sequence: Synthetic oligonucleotide
aagcuugccuggagaaaug

SEQ ID NO: 2324542 - RNA, 19 nt, Artificial Sequence
  Description of Artificial Sequence: Synthetic oligonucleotide
cuugccuggagaaaugcau

SEQ ID NO: 2324543 - RNA, 19 nt, Artificial Sequence
  Description of Artificial Sequence: Synthetic oligonucleotide
cuagugguggugcugcaaa

SEQ ID NO: 2324544 - RNA, 19 nt, Artificial Sequence
  Description of Artificial Sequence: Synthetic oligonucleotide
guuaacaguugugguucug

SEQ ID NO: 2324545 - RNA, 19 nt, Artificial Sequence
  Description of Artificial Sequence: Synthetic oligonucleotide
ugcugcaaauucugcuuua

SEQ ID NO: 2324546 - RNA, 19 nt, Artificial Sequence
  Description of Artificial Sequence: Synthetic oligonucleotide
ccgucagcuguacugauug

SEQ ID NO: 2324547 - RNA, 19 nt, Artificial Sequence
  Description of Artificial Sequence: Synthetic oligonucleotide
cucgaaacugcacgacuca

SEQ ID NO: 2324548 - RNA, 19 nt, Artificial Sequence
  Description of Artificial Sequence: Synthetic oligonucleotide
acuucugcuaaagcaguuu

SEQ ID NO: 2324549 - RNA, 19 nt, Artificial Sequence
  Description of Artificial Sequence: Synthetic oligonucleotide
acauucuuuaaagcugcua

SEQ ID NO: 2324550 - RNA, 19 nt, Artificial Sequence
  Description of Artificial Sequence: Synthetic oligonucleotide
ggacaucugcaaugaacug

SEQ ID NO: 2324551 - RNA, 19 nt, Artificial Sequence
  Description of Artificial Sequence: Synthetic oligonucleotide
guccgaaaccucgaugaac

SEQ ID NO: 2324552 - RNA, 19 nt, Artificial Sequence
  Description of Artificial Sequence: Synthetic oligonucleotide
gugguggcuauucauuugu

SEQ ID NO: 2324553 - RNA, 19 nt, Artificial Sequence
  Description of Artificial Sequence: Synthetic oligonucleotide
guuuugcaauggugguggc

SEQ ID NO: 2324554 - RNA, 19 nt, Artificial Sequence
  Description of Artificial Sequence: Synthetic oligonucleotide
ucuagugguggugcugcaa

SEQ ID NO: 2324555 - RNA, 19 nt, Artificial Sequence
  Description of Artificial Sequence: Synthetic oligonucleotide
guugacaaguguuccuccu

SEQ ID NO: 2324556 - RNA, 19 nt, Artificial Sequence
  Description of Artificial Sequence: Synthetic oligonucleotide
uaggaucaacgaucagcaa

SEQ ID NO: 2324557 - RNA, 19 nt, Artificial Sequence
  Description of Artificial Sequence: Synthetic oligonucleotide
ggagguccaguccgaaacc

SEQ ID NO: 2324558 - RNA, 19 nt, Artificial Sequence
  Description of Artificial Sequence: Synthetic oligonucleotide
aguccgaaaccucgaugaa

SEQ ID NO: 2324559 - RNA, 19 nt, Artificial Sequence
  Description of Artificial Sequence: Synthetic oligonucleotide
ucgaaacugcacgacucau

SEQ ID NO: 2324560 - RNA, 19 nt, Artificial Sequence
  Description of Artificial Sequence: Synthetic oligonucleotide
gguuacuugggccucuucu

SEQ ID NO: 2324561 - RNA, 19 nt, Artificial Sequence
  Description of Artificial Sequence: Synthetic oligonucleotide
ucacuucuuugugucucga

SEQ ID NO: 2324562 - RNA, 19 nt, Artificial Sequence
  Description of Artificial Sequence: Synthetic oligonucleotide
cugcacgacucaugcaguc

SEQ ID NO: 2324563 - RNA, 19 nt, Artificial Sequence
  Description of Artificial Sequence: Synthetic oligonucleotide
gucagcuguacugauugaa

SEQ ID NO: 2324564 - RNA, 19 nt, Artificial Sequence
  Description of Artificial Sequence: Synthetic oligonucleotide
gcauaaguccucuuucuua

SEQ ID NO: 2324565 - RNA, 19 nt, Artificial Sequence
  Description of Artificial Sequence: Synthetic oligonucleotide
uccugaaguuuagcuccag

SEQ ID NO: 2324566 - RNA, 19 nt, Artificial Sequence
  Description of Artificial Sequence: Synthetic oligonucleotide
accuccuguaauacuccag

SEQ ID NO: 2324567 - RNA, 19 nt, Artificial Sequence
  Description of Artificial Sequence: Synthetic oligonucleotide
cauuuguguuucauacucu

SEQ ID NO: 2324568 - RNA, 19 nt, Artificial Sequence
  Description of Artificial Sequence: Synthetic oligonucleotide
caacuggguuuguucuaac

SEQ ID NO: 2324569 - RNA, 19 nt, Artificial Sequence
  Description of Artificial Sequence: Synthetic oligonucleotide
gcaaugaacuggcugguua

SEQ ID NO: 2324570 - RNA, 19 nt, Artificial Sequence
  Description of Artificial Sequence: Synthetic oligonucleotide
ccaguaggaucaacgauca

SEQ ID NO: 2324571 - RNA, 19 nt, Artificial Sequence
  Description of Artificial Sequence: Synthetic oligonucleotide
auacuccagugguuccaca

SEQ ID NO: 2324572 - RNA, 19 nt, Artificial Sequence
  Description of Artificial Sequence: Synthetic oligonucleotide
ggucacaguacagaaccca

SEQ ID NO: 2324573 - RNA, 19 nt, Artificial Sequence
  Description of Artificial Sequence: Synthetic oligonucleotide
gucacaguacagaacccaa

SEQ ID NO: 2324574 - RNA, 19 nt, Artificial Sequence
  Description of Artificial Sequence: Synthetic oligonucleotide
ggacaacauauccucuauc

SEQ ID NO: 2324575 - RNA, 19 nt, Artificial Sequence
  Description of Artificial Sequence: Synthetic oligonucleotide
cacgacucaugcaguccug

SEQ ID NO: 2324576 - RNA, 19 nt, Artificial Sequence
  Description of Artificial Sequence: Synthetic oligonucleotide
gucucgaaacugcacgacu

SEQ ID NO: 2324577 - RNA, 19 nt, Artificial Sequence
  Description of Artificial Sequence: Synthetic oligonucleotide
acgacucaugcaguccuga

SEQ ID NO: 2324578 - RNA, 19 nt, Artificial Sequence
  Description of Artificial Sequence: Synthetic oligonucleotide
augaacuggcugguuacuu

SEQ ID NO: 2324579 - RNA, 19 nt, Artificial Sequence
  Description of Artificial Sequence: Synthetic oligonucleotide
acugcacgacucaugcagu

SEQ ID NO: 2324580 - RNA, 19 nt, Artificial Sequence
  Description of Artificial Sequence: Synthetic oligonucleotide
aucuagugguggugcugca

SEQ ID NO: 2324581 - RNA, 19 nt, Artificial Sequence
  Description of Artificial Sequence: Synthetic oligonucleotide
gaugaacacagcgguggua

SEQ ID NO: 2324582 - RNA, 19 nt, Artificial Sequence
  Description of Artificial Sequence: Synthetic oligonucleotide
ugguuacuugggccucuuc

SEQ ID NO: 2324583 - RNA, 19 nt, Artificial Sequence
  Description of Artificial Sequence: Synthetic oligonucleotide
ugccuuccucauccauuac

SEQ ID NO: 2324584 - RNA, 19 nt, Artificial Sequence
  Description of Artificial Sequence: Synthetic oligonucleotide
ggcauccaaaauauuucca

SEQ ID NO: 2324585 - RNA, 19 nt, Artificial Sequence
  Description of Artificial Sequence: Synthetic oligonucleotide
caauggugguggcuauuca

SEQ ID NO: 2324586 - RNA, 19 nt, Artificial Sequence
  Description of Artificial Sequence: Synthetic oligonucleotide
aucguagucuaggcaaaua

SEQ ID NO: 2324587 - RNA, 19 nt, Artificial Sequence
  Description of Artificial Sequence: Synthetic oligonucleotide
gguggcuauucauuugugu

SEQ ID NO: 2324588 - RNA, 19 nt, Artificial Sequence
  Description of Artificial Sequence: Synthetic oligonucleotide
aguugcaacuggguuuguu

SEQ ID NO: 2324589 - RNA, 19 nt, Artificial Sequence
  Description of Artificial Sequence: Synthetic oligonucleotide
ccuggagaaaugcauaagu

SEQ ID NO: 2324590 - RNA, 19 nt, Artificial Sequence
  Description of Artificial Sequence: Synthetic oligonucleotide
caagcuugccuggagaaau

SEQ ID NO: 2324591 - RNA, 19 nt, Artificial Sequence
  Description of Artificial Sequence: Synthetic oligonucleotide
ucaggucggcaguuuucuu

SEQ ID NO: 2324592 - RNA, 19 nt, Artificial Sequence
  Description of Artificial Sequence: Synthetic oligonucleotide
ccuccucuccaguaggauc

SEQ ID NO: 2324593 - RNA, 19 nt, Artificial Sequence
  Description of Artificial Sequence: Synthetic oligonucleotide
gcaauggugguggcuauuc

SEQ ID NO: 2324594 - RNA, 19 nt, Artificial Sequence
  Description of Artificial Sequence: Synthetic oligonucleotide
cgaaacugcacgacucaug

SEQ ID NO: 2324595 - RNA, 19 nt, Artificial Sequence
  Description of Artificial Sequence: Synthetic oligonucleotide
gggcaucuagugguggugc

SEQ ID NO: 2324596 - RNA, 19 nt, Artificial Sequence
  Description of Artificial Sequence: Synthetic oligonucleotide
agcagaaccgucagcugua

SEQ ID NO: 2324597 - RNA, 19 nt, Artificial Sequence
  Description of Artificial Sequence: Synthetic oligonucleotide
gugaguuuucaaggacauc

SEQ ID NO: 2324598 - RNA, 19 nt, Artificial Sequence
  Description of Artificial Sequence: Synthetic oligonucleotide
caguuucuucauuuauagu

SEQ ID NO: 2324599 - RNA, 19 nt, Artificial Sequence
  Description of Artificial Sequence: Synthetic oligonucleotide
gaacacagcggugguagau

SEQ ID NO: 2324600 - RNA, 19 nt, Artificial Sequence
  Description of Artificial Sequence: Synthetic oligonucleotide
gaaaugcauaaguccucuu

SEQ ID NO: 2324601 - RNA, 19 nt, Artificial Sequence
  Description of Artificial Sequence: Synthetic oligonucleotide
ccaguccgaaaccucgaug

SEQ ID NO: 2324602 - RNA, 19 nt, Artificial Sequence
  Description of Artificial Sequence: Synthetic oligonucleotide
gccuggagaaaugcauaag

SEQ ID NO: 2324603 - RNA, 19 nt, Artificial Sequence
  Description of Artificial Sequence: Synthetic oligonucleotide
gugcaggcauccaaaauau

SEQ ID NO: 2324604 - RNA, 19 nt, Artificial Sequence
  Description of Artificial Sequence: Synthetic oligonucleotide
cagagcaaaugugcaggca

SEQ ID NO: 2324605 - RNA, 19 nt, Artificial Sequence
  Description of Artificial Sequence: Synthetic oligonucleotide
gugguuccacaguuuugaa

SEQ ID NO: 2324606 - RNA, 19 nt, Artificial Sequence
  Description of Artificial Sequence: Synthetic oligonucleotide
gagguccaguccgaaaccu

SEQ ID NO: 2324607 - RNA, 19 nt, Artificial Sequence
  Description of Artificial Sequence: Synthetic oligonucleotide
cuauucauuuguguuucau

SEQ ID NO: 2324608 - RNA, 19 nt, Artificial Sequence
  Description of Artificial Sequence: Synthetic oligonucleotide
cucccaccugguuugugaa

SEQ ID NO: 2324609 - RNA, 19 nt, Artificial Sequence
  Description of Artificial Sequence: Synthetic oligonucleotide
ugcaauggugguggcuauu

SEQ ID NO: 2324610 - RNA, 19 nt, Artificial Sequence
  Description of Artificial Sequence: Synthetic oligonucleotide
gcaucuagugguggugcug

SEQ ID NO: 2324611 - RNA, 19 nt, Artificial Sequence
  Description of Artificial Sequence: Synthetic oligonucleotide
gcuguacugauugaaccua

SEQ ID NO: 2324612 - RNA, 19 nt, Artificial Sequence
  Description of Artificial Sequence: Synthetic oligonucleotide
cuccaguaggaucaacgau

SEQ ID NO: 2324613 - RNA, 19 nt, Artificial Sequence
  Description of Artificial Sequence: Synthetic oligonucleotide
gcuauucauuuguguuuca

SEQ ID NO: 2324614 - RNA, 19 nt, Artificial Sequence
  Description of Artificial Sequence: Synthetic oligonucleotide
gaucaacgaucagcaaagu

SEQ ID NO: 2324615 - RNA, 19 nt, Artificial Sequence
  Description of Artificial Sequence: Synthetic oligonucleotide
uacuaucguuaagguuccu

SEQ ID NO: 2324616 - RNA, 19 nt, Artificial Sequence
  Description of Artificial Sequence: Synthetic oligonucleotide
gugcacaguguaacaaaua

SEQ ID NO: 2324617 - RNA, 19 nt, Artificial Sequence
  Description of Artificial Sequence: Synthetic oligonucleotide
ggggcaucuagugguggug

SEQ ID NO: 2324618 - RNA, 19 nt, Artificial Sequence
  Description of Artificial Sequence: Synthetic oligonucleotide
aaguugcaacuggguuugu

SEQ ID NO: 2324619 - RNA, 19 nt, Artificial Sequence
  Description of Artificial Sequence: Synthetic oligonucleotide
ccagcuucacuagagcaga

SEQ ID NO: 2324620 - RNA, 19 nt, Artificial Sequence
  Description of Artificial Sequence: Synthetic oligonucleotide
gcaacuggguuuguucuaa

SEQ ID NO: 2324621 - RNA, 19 nt, Artificial Sequence
  Description of Artificial Sequence: Synthetic oligonucleotide
guccugaaguuuagcucca

SEQ ID NO: 2324622 - RNA, 19 nt, Artificial Sequence
  Description of Artificial Sequence: Synthetic oligonucleotide
caggucggcaguuuucuuu

SEQ ID NO: 2324623 - RNA, 19 nt, Artificial Sequence
  Description of Artificial Sequence: Synthetic oligonucleotide
guccacucccaccugguuu

SEQ ID NO: 2324624 - RNA, 19 nt, Artificial Sequence
  Description of Artificial Sequence: Synthetic oligonucleotide
gugcugcaaauucugcuuu

SEQ ID NO: 2324625 - RNA, 19 nt, Artificial Sequence
  Description of Artificial Sequence: Synthetic oligonucleotide
ccauuacuaucguuaaggu

SEQ ID NO: 2324626 - RNA, 19 nt, Artificial Sequence
  Description of Artificial Sequence: Synthetic oligonucleotide
cacagcggugguagaucca

SEQ ID NO: 2324627 - RNA, 19 nt, Artificial Sequence
  Description of Artificial Sequence: Synthetic oligonucleotide
ccucgaugaacacagcggu

SEQ ID NO: 2324628 - RNA, 19 nt, Artificial Sequence
  Description of Artificial Sequence: Synthetic oligonucleotide
agcugcuaacagagcaaau

SEQ ID NO: 2324629 - RNA, 19 nt, Artificial Sequence
  Description of Artificial Sequence: Synthetic oligonucleotide
gcacgacucaugcaguccu

SEQ ID NO: 2324630 - RNA, 19 nt, Artificial Sequence
  Description of Artificial Sequence: Synthetic oligonucleotide
guccaguccgaaaccucga

SEQ ID NO: 2324631 - RNA, 19 nt, Artificial Sequence
  Description of Artificial Sequence: Synthetic oligonucleotide
ccuccuguaauacuccagu

SEQ ID NO: 2324632 - RNA, 19 nt, Artificial Sequence
  Description of Artificial Sequence: Synthetic oligonucleotide
caggagguccaguccgaaa

SEQ ID NO: 2324633 - RNA, 19 nt, Artificial Sequence
  Description of Artificial Sequence: Synthetic oligonucleotide
cacauucuuuaaagcugcu

SEQ ID NO: 2324634 - RNA, 19 nt, Artificial Sequence
  Description of Artificial Sequence: Synthetic oligonucleotide
gccugugcacaguguaaca

SEQ ID NO: 2324635 - RNA, 19 nt, Artificial Sequence
  Description of Artificial Sequence: Synthetic oligonucleotide
gcugcaaauucugcuuuaa

SEQ ID NO: 2324636 - RNA, 19 nt, Artificial Sequence
  Description of Artificial Sequence: Synthetic oligonucleotide
cggugguagauccacauua

SEQ ID NO: 2324637 - RNA, 19 nt, Artificial Sequence
  Description of Artificial Sequence: Synthetic oligonucleotide
cccaccugguuugugaaga

SEQ ID NO: 2324638 - RNA, 19 nt, Artificial Sequence
  Description of Artificial Sequence: Synthetic oligonucleotide
ccgaaaccucgaugaacac

SEQ ID NO: 2324639 - RNA, 19 nt, Artificial Sequence
  Description of Artificial Sequence: Synthetic oligonucleotide
gcuugccuggagaaaugca

SEQ ID NO: 2324640 - RNA, 19 nt, Artificial Sequence
  Description of Artificial Sequence: Synthetic oligonucleotide
accgucagcuguacugauu

SEQ ID NO: 2324641 - RNA, 19 nt, Artificial Sequence
  Description of Artificial Sequence: Synthetic oligonucleotide
cucauccauuacuaucguu

SEQ ID NO: 2324642 - RNA, 19 nt, Artificial Sequence
  Description of Artificial Sequence: Synthetic oligonucleotide
gauccacauuagggacaac

SEQ ID NO: 2324643 - RNA, 19 nt, Artificial Sequence
  Description of Artificial Sequence: Synthetic oligonucleotide
cagcggugguagauccaca

SEQ ID NO: 2324644 - RNA, 19 nt, Artificial Sequence
  Description of Artificial Sequence: Synthetic oligonucleotide
ugacuucaucuagcagcuu

SEQ ID NO: 2324645 - RNA, 19 nt, Artificial Sequence
  Description of Artificial Sequence: Synthetic oligonucleotide
cagcuucacuagagcagaa

SEQ ID NO: 2324646 - RNA, 19 nt, Artificial Sequence
  Description of Artificial Sequence: Synthetic oligonucleotide
ggucggcaguuuucuuuca

SEQ ID NO: 2324647 - RNA, 19 nt, Artificial Sequence
  Description of Artificial Sequence: Synthetic oligonucleotide
ccaucguagucuaggcaaa

SEQ ID NO: 2324648 - RNA, 19 nt, Artificial Sequence
  Description of Artificial Sequence: Synthetic oligonucleotide
ccuguugacaaguguuccu

SEQ ID NO: 2324649 - RNA, 19 nt, Artificial Sequence
  Description of Artificial Sequence: Synthetic oligonucleotide
cgaaaccucgaugaacaca

SEQ ID NO: 2324650 - RNA, 19 nt, Artificial Sequence
  Description of Artificial Sequence: Synthetic oligonucleotide
gcagaaccgucagcuguac

SEQ ID NO: 2324651 - RNA, 19 nt, Artificial Sequence
  Description of Artificial Sequence: Synthetic oligonucleotide
cugcaaugaacuggcuggu

SEQ ID NO: 2324652 - RNA, 19 nt, Artificial Sequence
  Description of Artificial Sequence: Synthetic oligonucleotide
ggccucuucuccaggaggu

SEQ ID NO: 2324653 - RNA, 19 nt, Artificial Sequence
  Description of Artificial Sequence: Synthetic oligonucleotide
ggcugguuacuugggccuc

SEQ ID NO: 2324654 - RNA, 19 nt, Artificial Sequence
  Description of Artificial Sequence: Synthetic oligonucleotide
caucguagucuaggcaaau

SEQ ID NO: 2324655 - RNA, 19 nt, Artificial Sequence
  Description of Artificial Sequence: Synthetic oligonucleotide
cagaaccgucagcuguacu

SEQ ID NO: 2324656 - RNA, 19 nt, Artificial Sequence
  Description of Artificial Sequence: Synthetic oligonucleotide
ccaagcaagcuugccugga

SEQ ID NO: 2324657 - RNA, 19 nt, Artificial Sequence
  Description of Artificial Sequence: Synthetic oligonucleotide
cgacucaugcaguccugaa

SEQ ID NO: 2324658 - RNA, 19 nt, Artificial Sequence
  Description of Artificial Sequence: Synthetic oligonucleotide
gcugguuacuugggccucu

SEQ ID NO: 2324659 - RNA, 19 nt, Artificial Sequence
  Description of Artificial Sequence: Synthetic oligonucleotide
gcggugguagauccacauu

SEQ ID NO: 2324660 - RNA, 19 nt, Artificial Sequence
  Description of Artificial Sequence: Synthetic oligonucleotide
cugugguguuccccagcuu

SEQ ID NO: 2324661 - RNA, 19 nt, Artificial Sequence
  Description of Artificial Sequence: Synthetic oligonucleotide
ccaucaggucggcaguuuu

SEQ ID NO: 2324662 - RNA, 19 nt, Artificial Sequence
  Description of Artificial Sequence: Synthetic oligonucleotide
cugguuacuugggccucuu

SEQ ID NO: 2324663 - RNA, 19 nt, Artificial Sequence
  Description of Artificial Sequence: Synthetic oligonucleotide
aauaacaugauaaugauac

SEQ ID NO: 2324664 - RNA, 19 nt, Artificial Sequence
  Description of Artificial Sequence: Synthetic oligonucleotide
uuaucuaugauaaugagga

SEQ ID NO: 2324665 - RNA, 19 nt, Artificial Sequence
  Description of Artificial Sequence: Synthetic oligonucleotide
aaucaauuauaguaagucc

SEQ ID NO: 2324666 - RNA, 19 nt, Artificial Sequence
  Description of Artificial Sequence: Synthetic oligonucleotide
aacacaggaaaucagucac

SEQ ID NO: 2324667 - RNA, 19 nt, Artificial Sequence
  Description of Artificial Sequence: Synthetic oligonucleotide
auguaugugaaucuugucc

SEQ ID NO: 2324668 - RNA, 19 nt, Artificial Sequence
  Description of Artificial Sequence: Synthetic oligonucleotide
auugcaagaaucaaaaccc

SEQ ID NO: 2324669 - RNA, 19 nt, Artificial Sequence
  Description of Artificial Sequence: Synthetic oligonucleotide
auuugcaggauauacaagg

SEQ ID NO: 2324670 - RNA, 19 nt, Artificial Sequence
  Description of Artificial Sequence: Synthetic oligonucleotide
aauaaucaauuauaguaag

SEQ ID NO: 2324671 - RNA, 19 nt, Artificial Sequence
  Description of Artificial Sequence: Synthetic oligonucleotide
acaugauaaugauacaucc

SEQ ID NO: 2324672 - RNA, 19 nt, Artificial Sequence
  Description of Artificial Sequence: Synthetic oligonucleotide
ucuaugauaaugaggaaag

SEQ ID NO: 2324673 - RNA, 19 nt, Artificial Sequence
  Description of Artificial Sequence: Synthetic oligonucleotide
aauuggucuaacuucuuac

SEQ ID NO: 2324674 - RNA, 19 nt, Artificial Sequence
  Description of Artificial Sequence: Synthetic oligonucleotide
uuaucuuacacauuugcag

SEQ ID NO: 2324675 - RNA, 19 nt, Artificial Sequence
  Description of Artificial Sequence: Synthetic oligonucleotide
uuaaauaccuacuuagagc

SEQ ID NO: 2324676 - RNA, 19 nt, Artificial Sequence
  Description of Artificial Sequence: Synthetic oligonucleotide
uaaauaccuacuuagagcu

SEQ ID NO: 2324677 - RNA, 19 nt, Artificial Sequence
  Description of Artificial Sequence: Synthetic oligonucleotide
aauguauuuacauguguug

SEQ ID NO: 2324678 - RNA, 19 nt, Artificial Sequence
  Description of Artificial Sequence: Synthetic oligonucleotide
cuuacaaagagcuaaaaga

SEQ ID NO: 2324679 - RNA, 19 nt, Artificial Sequence
  Description of Artificial Sequence: Synthetic oligonucleotide
aauuguuucaaucuauaau

SEQ ID NO: 2324680 - RNA, 19 nt, Artificial Sequence
  Description of Artificial Sequence: Synthetic oligonucleotide
acuaauuaaguuuacacau

SEQ ID NO: 2324681 - RNA, 19 nt, Artificial Sequence
  Description of Artificial Sequence: Synthetic oligonucleotide
auaaugaggaaagaggugg

SEQ ID NO: 2324682 - RNA, 19 nt, Artificial Sequence
  Description of Artificial Sequence: Synthetic oligonucleotide
uaucuuacacauuugcagg

SEQ ID NO: 2324683 - RNA, 19 nt, Artificial Sequence
  Description of Artificial Sequence: Synthetic oligonucleotide
agugaaauuaauaacauga

SEQ ID NO: 2324684 - RNA, 19 nt, Artificial Sequence
  Description of Artificial Sequence: Synthetic oligonucleotide
ugauaaugaggaaagaggu

SEQ ID NO: 2324685 - RNA, 19 nt, Artificial Sequence
  Description of Artificial Sequence: Synthetic oligonucleotide
aauaccuacuuagagcuac

SEQ ID NO: 2324686 - RNA, 19 nt, Artificial Sequence
  Description of Artificial Sequence: Synthetic oligonucleotide
auuaaguuuacacaucucu

SEQ ID NO: 2324687 - RNA, 19 nt, Artificial Sequence
  Description of Artificial Sequence: Synthetic oligonucleotide
ucuuacaaagagcuaaaag

SEQ ID NO: 2324688 - RNA, 19 nt, Artificial Sequence
  Description of Artificial Sequence: Synthetic oligonucleotide
gauagugaaauuaauaaca

SEQ ID NO: 2324689 - RNA, 19 nt, Artificial Sequence
  Description of Artificial Sequence: Synthetic oligonucleotide
uuacuaauuaaguuuacac

SEQ ID NO: 2324690 - RNA, 19 nt, Artificial Sequence
  Description of Artificial Sequence: Synthetic oligonucleotide
uaaugauacauccaguagu

SEQ ID NO: 2324691 - RNA, 19 nt, Artificial Sequence
  Description of Artificial Sequence: Synthetic oligonucleotide
auuguuucaaucuauaauu

SEQ ID NO: 2324692 - RNA, 19 nt, Artificial Sequence
  Description of Artificial Sequence: Synthetic oligonucleotide
aagccaacaugugagaagc

SEQ ID NO: 2324693 - RNA, 19 nt, Artificial Sequence
  Description of Artificial Sequence: Synthetic oligonucleotide
aguuauuuaauucuuuaga

SEQ ID NO: 2324694 - RNA, 19 nt, Artificial Sequence
  Description of Artificial Sequence: Synthetic oligonucleotide
aagagcuguccauauacac

SEQ ID NO: 2324695 - RNA, 19 nt, Artificial Sequence
  Description of Artificial Sequence: Synthetic oligonucleotide
uguuucaaucuauaauugg

SEQ ID NO: 2324696 - RNA, 19 nt, Artificial Sequence
  Description of Artificial Sequence: Synthetic oligonucleotide
acuaauucuacccaauugu

SEQ ID NO: 2324697 - RNA, 19 nt, Artificial Sequence
  Description of Artificial Sequence: Synthetic oligonucleotide
ucucaaacuaauucuaccc

SEQ ID NO: 2324698 - RNA, 19 nt, Artificial Sequence
  Description of Artificial Sequence: Synthetic oligonucleotide
cuuaaauaccuacuuagag

SEQ ID NO: 2324699 - RNA, 19 nt, Artificial Sequence
  Description of Artificial Sequence: Synthetic oligonucleotide
aauuauaguaaguccacaa

SEQ ID NO: 2324700 - RNA, 19 nt, Artificial Sequence
  Description of Artificial Sequence: Synthetic oligonucleotide
aacuaauucuacccaauug

SEQ ID NO: 2324701 - RNA, 19 nt, Artificial Sequence
  Description of Artificial Sequence: Synthetic oligonucleotide
cuuagaguagacauauucc

SEQ ID NO: 2324702 - RNA, 19 nt, Artificial Sequence
  Description of Artificial Sequence: Synthetic oligonucleotide
cuuagagcuacauauaauc

SEQ ID NO: 2324703 - RNA, 19 nt, Artificial Sequence
  Description of Artificial Sequence: Synthetic oligonucleotide
uauaguaaguccacaaaac

SEQ ID NO: 2324704 - RNA, 19 nt, Artificial Sequence
  Description of Artificial Sequence: Synthetic oligonucleotide
caagaaucaaaacccaugg

SEQ ID NO: 2324705 - RNA, 19 nt, Artificial Sequence
  Description of Artificial Sequence: Synthetic oligonucleotide
uacuaauuaaguuuacaca

SEQ ID NO: 2324706 - RNA, 19 nt, Artificial Sequence
  Description of Artificial Sequence: Synthetic oligonucleotide
ucuauaauuggucuaacuu

SEQ ID NO: 2324707 - RNA, 19 nt, Artificial Sequence
  Description of Artificial Sequence: Synthetic oligonucleotide
uuuaucuuacacauuugca

SEQ ID NO: 2324708 - RNA, 19 nt, Artificial Sequence
  Description of Artificial Sequence: Synthetic oligonucleotide
ucucaguuaucuaugauaa

SEQ ID NO: 2324709 - RNA, 19 nt, Artificial Sequence
  Description of Artificial Sequence: Synthetic oligonucleotide
aacaugauaaugauacauc

SEQ ID NO: 2324710 - RNA, 19 nt, Artificial Sequence
  Description of Artificial Sequence: Synthetic oligonucleotide
uacauugcaagaaucaaaa

SEQ ID NO: 2324711 - RNA, 19 nt, Artificial Sequence
  Description of Artificial Sequence: Synthetic oligonucleotide
aacucuacaccuacaauac

SEQ ID NO: 2324712 - RNA, 19 nt, Artificial Sequence
  Description of Artificial Sequence: Synthetic oligonucleotide
uguaugugaaucuuguccu

SEQ ID NO: 2324713 - RNA, 19 nt, Artificial Sequence
  Description of Artificial Sequence: Synthetic oligonucleotide
auauaaucaauucucaguu

SEQ ID NO: 2324714 - RNA, 19 nt, Artificial Sequence
  Description of Artificial Sequence: Synthetic oligonucleotide
uuugcaggauauacaaggg

SEQ ID NO: 2324715 - RNA, 19 nt, Artificial Sequence
  Description of Artificial Sequence: Synthetic oligonucleotide
ugacuggacaauaacaacu

SEQ ID NO: 2324716 - RNA, 19 nt, Artificial Sequence
  Description of Artificial Sequence: Synthetic oligonucleotide
augauaaugaggaaagagg

SEQ ID NO: 2324717 - RNA, 19 nt, Artificial Sequence
  Description of Artificial Sequence: Synthetic oligonucleotide
agagcuaaaagagugacug

SEQ ID NO: 2324718 - RNA, 19 nt, Artificial Sequence
  Description of Artificial Sequence: Synthetic oligonucleotide
cuauaauuggucuaacuuc

SEQ ID NO: 2324719 - RNA, 19 nt, Artificial Sequence
  Description of Artificial Sequence: Synthetic oligonucleotide
cuaacuucuuacaaagagc

SEQ ID NO: 2324720 - RNA, 19 nt, Artificial Sequence
  Description of Artificial Sequence: Synthetic oligonucleotide
ugauagugaaauuaauaac

SEQ ID NO: 2324721 - RNA, 19 nt, Artificial Sequence
  Description of Artificial Sequence: Synthetic oligonucleotide
aauguaugugaaucuuguc

SEQ ID NO: 2324722 - RNA, 19 nt, Artificial Sequence
  Description of Artificial Sequence: Synthetic oligonucleotide
gaguuauuuaauucuuuag

SEQ ID NO: 2324723 - RNA, 19 nt, Artificial Sequence
  Description of Artificial Sequence: Synthetic oligonucleotide
uuagagcuacauauaauca

SEQ ID NO: 2324724 - RNA, 19 nt, Artificial Sequence
  Description of Artificial Sequence: Synthetic oligonucleotide
agcuacauauaaucaauuc

SEQ ID NO: 2324725 - RNA, 19 nt, Artificial Sequence
  Description of Artificial Sequence: Synthetic oligonucleotide
ugugauagugaaauuaaua

SEQ ID NO: 2324726 - RNA, 19 nt, Artificial Sequence
  Description of Artificial Sequence: Synthetic oligonucleotide
aaugauacauccaguagug

SEQ ID NO: 2324727 - RNA, 19 nt, Artificial Sequence
  Description of Artificial Sequence: Synthetic oligonucleotide
aauaaggcacauacauugc

SEQ ID NO: 2324728 - RNA, 19 nt, Artificial Sequence
  Description of Artificial Sequence: Synthetic oligonucleotide
augucaauguaugugaauc

SEQ ID NO: 2324729 - RNA, 19 nt, Artificial Sequence
  Description of Artificial Sequence: Synthetic oligonucleotide
ucaauuauaguaaguccac

SEQ ID NO: 2324730 - RNA, 19 nt, Artificial Sequence
  Description of Artificial Sequence: Synthetic oligonucleotide
uucaaucuauaauuggucu

SEQ ID NO: 2324731 - RNA, 19 nt, Artificial Sequence
  Description of Artificial Sequence: Synthetic oligonucleotide
auaaucaauucucaguuau

SEQ ID NO: 2324732 - RNA, 19 nt, Artificial Sequence
  Description of Artificial Sequence: Synthetic oligonucleotide
auaguaaguccacaaaaca

SEQ ID NO: 2324733 - RNA, 19 nt, Artificial Sequence
  Description of Artificial Sequence: Synthetic oligonucleotide
uuucaaucuauaauugguc

SEQ ID NO: 2324734 - RNA, 19 nt, Artificial Sequence
  Description of Artificial Sequence: Synthetic oligonucleotide
cacaucucuuaaaauaggg

SEQ ID NO: 2324735 - RNA, 19 nt, Artificial Sequence
  Description of Artificial Sequence: Synthetic oligonucleotide
uacaaggguaacuugucag

SEQ ID NO: 2324736 - RNA, 19 nt, Artificial Sequence
  Description of Artificial Sequence: Synthetic oligonucleotide
caacaugugagaagcaggg

SEQ ID NO: 2324737 - RNA, 19 nt, Artificial Sequence
  Description of Artificial Sequence: Synthetic oligonucleotide
uuaaaauagggcacuuaga

SEQ ID NO: 2324738 - RNA, 19 nt, Artificial Sequence
  Description of Artificial Sequence: Synthetic oligonucleotide
auugacaagagaaacauaa

SEQ ID NO: 2324739 - RNA, 19 nt, Artificial Sequence
  Description of Artificial Sequence: Synthetic oligonucleotide
aauaacaacugguccuucu

SEQ ID NO: 2324740 - RNA, 19 nt, Artificial Sequence
  Description of Artificial Sequence: Synthetic oligonucleotide
gauaaugauacauccagua

SEQ ID NO: 2324741 - RNA, 19 nt, Artificial Sequence
  Description of Artificial Sequence: Synthetic oligonucleotide
ucuacaccuacaauacuug

SEQ ID NO: 2324742 - RNA, 19 nt, Artificial Sequence
  Description of Artificial Sequence: Synthetic oligonucleotide
aaacauaaaauaaggcaca

SEQ ID NO: 2324743 - RNA, 19 nt, Artificial Sequence
  Description of Artificial Sequence: Synthetic oligonucleotide
caacaagccaacaugugag

SEQ ID NO: 2324744 - RNA, 19 nt, Artificial Sequence
  Description of Artificial Sequence: Synthetic oligonucleotide
aguuaucuaugauaaugag

SEQ ID NO: 2324745 - RNA, 19 nt, Artificial Sequence
  Description of Artificial Sequence: Synthetic oligonucleotide
uaguggguugcuuaaauac

SEQ ID NO: 2324746 - RNA, 19 nt, Artificial Sequence
  Description of Artificial Sequence: Synthetic oligonucleotide
agcucagaccacuacaauc

SEQ ID NO: 2324747 - RNA, 19 nt, Artificial Sequence
  Description of Artificial Sequence: Synthetic oligonucleotide
acauccuccuaucagcuuc

SEQ ID NO: 2324748 - RNA, 19 nt, Artificial Sequence
  Description of Artificial Sequence: Synthetic oligonucleotide
agaggugggaccaauaauc

SEQ ID NO: 2324749 - RNA, 19 nt, Artificial Sequence
  Description of Artificial Sequence: Synthetic oligonucleotide
auaccaacucuacaccuac

SEQ ID NO: 2324750 - RNA, 19 nt, Artificial Sequence
  Description of Artificial Sequence: Synthetic oligonucleotide
aaggguaacuugucagagg

SEQ ID NO: 2324751 - RNA, 19 nt, Artificial Sequence
  Description of Artificial Sequence: Synthetic oligonucleotide
aucaauuauaguaagucca

SEQ ID NO: 2324752 - RNA, 19 nt, Artificial Sequence
  Description of Artificial Sequence: Synthetic oligonucleotide
caggaaaucagucacacga

SEQ ID NO: 2324753 - RNA, 19 nt, Artificial Sequence
  Description of Artificial Sequence: Synthetic oligonucleotide
gagaacauccuccuaucag

SEQ ID NO: 2324754 - RNA, 19 nt, Artificial Sequence
  Description of Artificial Sequence: Synthetic oligonucleotide
gauauacaaggguaacuug

SEQ ID NO: 2324755 - RNA, 19 nt, Artificial Sequence
  Description of Artificial Sequence: Synthetic oligonucleotide
aaagagugacugucugaac

SEQ ID NO: 2324756 - RNA, 19 nt, Artificial Sequence
  Description of Artificial Sequence: Synthetic oligonucleotide
aaagaggugggaccaauaa

SEQ ID NO: 2324757 - RNA, 19 nt, Artificial Sequence
  Description of Artificial Sequence: Synthetic oligonucleotide
uuuacuaauuaaguuuaca

SEQ ID NO: 2324758 - RNA, 19 nt, Artificial Sequence
  Description of Artificial Sequence: Synthetic oligonucleotide
uacaaagagcuaaaagagu

SEQ ID NO: 2324759 - RNA, 19 nt, Artificial Sequence
  Description of Artificial Sequence: Synthetic oligonucleotide
ucgaggaaggcccaaggcc

SEQ ID NO: 2324760 - RNA, 19 nt, Artificial Sequence
  Description of Artificial Sequence: Synthetic oligonucleotide
acaacaagccaacauguga

SEQ ID NO: 2324761 - RNA, 19 nt, Artificial Sequence
  Description of Artificial Sequence: Synthetic oligonucleotide
agcuaaaagagugacuguc

SEQ ID NO: 2324762 - RNA, 19 nt, Artificial Sequence
  Description of Artificial Sequence: Synthetic oligonucleotide
uacuuagagcuacauauaa

SEQ ID NO: 2324763 - RNA, 19 nt, Artificial Sequence
  Description of Artificial Sequence: Synthetic oligonucleotide
uacccaauuguuucaaucu

SEQ ID NO: 2324764 - RNA, 19 nt, Artificial Sequence
  Description of Artificial Sequence: Synthetic oligonucleotide
cuugaauguauuuacaugu

SEQ ID NO: 2324765 - RNA, 19 nt, Artificial Sequence
  Description of Artificial Sequence: Synthetic oligonucleotide
caauaaucaauuauaguaa

SEQ ID NO: 2324766 - RNA, 19 nt, Artificial Sequence
  Description of Artificial Sequence: Synthetic oligonucleotide
uagacauauucccuuguga

SEQ ID NO: 2324767 - RNA, 19 nt, Artificial Sequence
  Description of Artificial Sequence: Synthetic oligonucleotide
accuacaauacuugaaugu

SEQ ID NO: 2324768 - RNA, 19 nt, Artificial Sequence
  Description of Artificial Sequence: Synthetic oligonucleotide
ugcaggauauacaagggua

SEQ ID NO: 2324769 - RNA, 19 nt, Artificial Sequence
  Description of Artificial Sequence: Synthetic oligonucleotide
ggucuaacuucuuacaaag

SEQ ID NO: 2324770 - RNA, 19 nt, Artificial Sequence
  Description of Artificial Sequence: Synthetic oligonucleotide
aggguaacuugucagagga

SEQ ID NO: 2324771 - RNA, 19 nt, Artificial Sequence
  Description of Artificial Sequence: Synthetic oligonucleotide
uuucgaggaaggcccaagg

SEQ ID NO: 2324772 - RNA, 19 nt, Artificial Sequence
  Description of Artificial Sequence: Synthetic oligonucleotide
ucaaacuaauucuacccaa

SEQ ID NO: 2324773 - RNA, 19 nt, Artificial Sequence
  Description of Artificial Sequence: Synthetic oligonucleotide
augagcacugagcagccac

SEQ ID NO: 2324774 - RNA, 19 nt, Artificial Sequence
  Description of Artificial Sequence: Synthetic oligonucleotide
aguggguugcuuaaauacc

SEQ ID NO: 2324775 - RNA, 19 nt, Artificial Sequence
  Description of Artificial Sequence: Synthetic oligonucleotide
uagagcuacauauaaucaa

SEQ ID NO: 2324776 - RNA, 19 nt, Artificial Sequence
  Description of Artificial Sequence: Synthetic oligonucleotide
aaucuauaauuggucuaac

SEQ ID NO: 2324777 - RNA, 19 nt, Artificial Sequence
  Description of Artificial Sequence: Synthetic oligonucleotide
ucaaacaacacaggaaauc

SEQ ID NO: 2324778 - RNA, 19 nt, Artificial Sequence
  Description of Artificial Sequence: Synthetic oligonucleotide
uauacaaggguaacuuguc

SEQ ID NO: 2324779 - RNA, 19 nt, Artificial Sequence
  Description of Artificial Sequence: Synthetic oligonucleotide
aacaacacaggaaaucagu

SEQ ID NO: 2324780 - RNA, 19 nt, Artificial Sequence
  Description of Artificial Sequence: Synthetic oligonucleotide
cuaagugguucugaaagcc

SEQ ID NO: 2324781 - RNA, 19 nt, Artificial Sequence
  Description of Artificial Sequence: Synthetic oligonucleotide
ucucauugacaagagaaac

SEQ ID NO: 2324782 - RNA, 19 nt, Artificial Sequence
  Description of Artificial Sequence: Synthetic oligonucleotide
ccaauaaucaauuauagua

SEQ ID NO: 2324783 - RNA, 19 nt, Artificial Sequence
  Description of Artificial Sequence: Synthetic oligonucleotide
caugugagaagcagggaag

SEQ ID NO: 2324784 - RNA, 19 nt, Artificial Sequence
  Description of Artificial Sequence: Synthetic oligonucleotide
ugauaaugauacauccagu

SEQ ID NO: 2324785 - RNA, 19 nt, Artificial Sequence
  Description of Artificial Sequence: Synthetic oligonucleotide
acuucuuacaaagagcuaa

SEQ ID NO: 2324786 - RNA, 19 nt, Artificial Sequence
  Description of Artificial Sequence: Synthetic oligonucleotide
agacauauucccuugugau

SEQ ID NO: 2324787 - RNA, 19 nt, Artificial Sequence
  Description of Artificial Sequence: Synthetic oligonucleotide
uagaguagacauauucccu

SEQ ID NO: 2324788 - RNA, 19 nt, Artificial Sequence
  Description of Artificial Sequence: Synthetic oligonucleotide
acauugcaagaaucaaaac

SEQ ID NO: 2324789 - RNA, 19 nt, Artificial Sequence
  Description of Artificial Sequence: Synthetic oligonucleotide
aguaaguccacaaaacagu

SEQ ID NO: 2324790 - RNA, 19 nt, Artificial Sequence
  Description of Artificial Sequence: Synthetic oligonucleotide
cuuuuacuaauuaaguuua

SEQ ID NO: 2324791 - RNA, 19 nt, Artificial Sequence
  Description of Artificial Sequence: Synthetic oligonucleotide
uacaauacuugaauguauu

SEQ ID NO: 2324792 - RNA, 19 nt, Artificial Sequence
  Description of Artificial Sequence: Synthetic oligonucleotide
gacaauaacaacugguccu

SEQ ID NO: 2324793 - RNA, 19 nt, Artificial Sequence
  Description of Artificial Sequence: Synthetic oligonucleotide
uggccuaugagcacugagc

SEQ ID NO: 2324794 - RNA, 19 nt, Artificial Sequence
  Description of Artificial Sequence: Synthetic oligonucleotide
uaaaagagugacugucuga

SEQ ID NO: 2324795 - RNA, 19 nt, Artificial Sequence
  Description of Artificial Sequence: Synthetic oligonucleotide
cacacgacagcucagacca

SEQ ID NO: 2324796 - RNA, 19 nt, Artificial Sequence
  Description of Artificial Sequence: Synthetic oligonucleotide
aaacuaauucuacccaauu

SEQ ID NO: 2324797 - RNA, 19 nt, Artificial Sequence
  Description of Artificial Sequence: Synthetic oligonucleotide
gauaaugaggaaagaggug

SEQ ID NO: 2324798 - RNA, 19 nt, Artificial Sequence
  Description of Artificial Sequence: Synthetic oligonucleotide
guuuacacaucucuuaaaa

SEQ ID NO: 2324799 - RNA, 19 nt, Artificial Sequence
  Description of Artificial Sequence: Synthetic oligonucleotide
uuuuacuaauuaaguuuac

SEQ ID NO: 2324800 - RNA, 19 nt, Artificial Sequence
  Description of Artificial Sequence: Synthetic oligonucleotide
uaauaacaugauaaugaua

SEQ ID NO: 2324801 - RNA, 19 nt, Artificial Sequence
  Description of Artificial Sequence: Synthetic oligonucleotide
auuggucuaacuucuuaca

SEQ ID NO: 2324802 - RNA, 19 nt, Artificial Sequence
  Description of Artificial Sequence: Synthetic oligonucleotide
acaccuacaauacuugaau

SEQ ID NO: 2324803 - RNA, 19 nt, Artificial Sequence
  Description of Artificial Sequence: Synthetic oligonucleotide
auaaggcacauacauugca

SEQ ID NO: 2324804 - RNA, 19 nt, Artificial Sequence
  Description of Artificial Sequence: Synthetic oligonucleotide
auauacaaggguaacuugu

SEQ ID NO: 2324805 - RNA, 19 nt, Artificial Sequence
  Description of Artificial Sequence: Synthetic oligonucleotide
uuuguuacaaaaggacuaa

SEQ ID NO: 2324806 - RNA, 19 nt, Artificial Sequence
  Description of Artificial Sequence: Synthetic oligonucleotide
ucaaucuauaauuggucua

SEQ ID NO: 2324807 - RNA, 19 nt, Artificial Sequence
  Description of Artificial Sequence: Synthetic oligonucleotide
aacaagccaacaugugaga

SEQ ID NO: 2324808 - RNA, 19 nt, Artificial Sequence
  Description of Artificial Sequence: Synthetic oligonucleotide
uugcaagaaucaaaaccca

SEQ ID NO: 2324809 - RNA, 19 nt, Artificial Sequence
  Description of Artificial Sequence: Synthetic oligonucleotide
cuaucagcuucaaacaaca

SEQ ID NO: 2324810 - RNA, 19 nt, Artificial Sequence
  Description of Artificial Sequence: Synthetic oligonucleotide
gaaucuuguccuuuuacua

SEQ ID NO: 2324811 - RNA, 19 nt, Artificial Sequence
  Description of Artificial Sequence: Synthetic oligonucleotide
uucgaggaaggcccaaggc

SEQ ID NO: 2324812 - RNA, 19 nt, Artificial Sequence
  Description of Artificial Sequence: Synthetic oligonucleotide
caagccaacaugugagaag

SEQ ID NO: 2324813 - RNA, 19 nt, Artificial Sequence
  Description of Artificial Sequence: Synthetic oligonucleotide
acaauccugggcucgcuuc

SEQ ID NO: 2324814 - RNA, 19 nt, Artificial Sequence
  Description of Artificial Sequence: Synthetic oligonucleotide
acauaccaacucuacaccu

SEQ ID NO: 2324815 - RNA, 19 nt, Artificial Sequence
  Description of Artificial Sequence: Synthetic oligonucleotide
uugcaggauauacaagggu

SEQ ID NO: 2324816 - RNA, 19 nt, Artificial Sequence
  Description of Artificial Sequence: Synthetic oligonucleotide
aggagaacauccuccuauc

SEQ ID NO: 2324817 - RNA, 19 nt, Artificial Sequence
  Description of Artificial Sequence: Synthetic oligonucleotide
acaaggguaacuugucaga

SEQ ID NO: 2324818 - RNA, 19 nt, Artificial Sequence
  Description of Artificial Sequence: Synthetic oligonucleotide
agaguucaugugucugggc

SEQ ID NO: 2324819 - RNA, 19 nt, Artificial Sequence
  Description of Artificial Sequence: Synthetic oligonucleotide
cuugugauagugaaauuaa

SEQ ID NO: 2324820 - RNA, 19 nt, Artificial Sequence
  Description of Artificial Sequence: Synthetic oligonucleotide
cuacccaauuguuucaauc

SEQ ID NO: 2324821 - RNA, 19 nt, Artificial Sequence
  Description of Artificial Sequence: Synthetic oligonucleotide
aagaggugggaccaauaau

SEQ ID NO: 2324822 - RNA, 19 nt, Artificial Sequence
  Description of Artificial Sequence: Synthetic oligonucleotide
uggucuaacuucuuacaaa

SEQ ID NO: 2324823 - RNA, 19 nt, Artificial Sequence
  Description of Artificial Sequence: Synthetic oligonucleotide
uugacaagagaaacauaaa

SEQ ID NO: 2324824 - RNA, 19 nt, Artificial Sequence
  Description of Artificial Sequence: Synthetic oligonucleotide
auucccuugugauagugaa

SEQ ID NO: 2324825 - RNA, 19 nt, Artificial Sequence
  Description of Artificial Sequence: Synthetic oligonucleotide
agaguagacauauucccuu

SEQ ID NO: 2324826 - RNA, 19 nt, Artificial Sequence
  Description of Artificial Sequence: Synthetic oligonucleotide
aucuuacacauuugcagga

SEQ ID NO: 2324827 - RNA, 19 nt, Artificial Sequence
  Description of Artificial Sequence: Synthetic oligonucleotide
gaguagacauauucccuug

SEQ ID NO: 2324828 - RNA, 19 nt, Artificial Sequence
  Description of Artificial Sequence: Synthetic oligonucleotide
uauaaucaauucucaguua

SEQ ID NO: 2324829 - RNA, 19 nt, Artificial Sequence
  Description of Artificial Sequence: Synthetic oligonucleotide
caacucuacaccuacaaua

SEQ ID NO: 2324830 - RNA, 19 nt, Artificial Sequence
  Description of Artificial Sequence: Synthetic oligonucleotide
aauagggcacuuagaguag

SEQ ID NO: 2324831 - RNA, 19 nt, Artificial Sequence
  Description of Artificial Sequence: Synthetic oligonucleotide
acauacauugcaagaauca

SEQ ID NO: 2324832 - RNA, 19 nt, Artificial Sequence
  Description of Artificial Sequence: Synthetic oligonucleotide
cauguguuguucuuuaaaa

SEQ ID NO: 2324833 - RNA, 19 nt, Artificial Sequence
  Description of Artificial Sequence: Synthetic oligonucleotide
uuggagugcugacuggaca

SEQ ID NO: 2324834 - RNA, 19 nt, Artificial Sequence
  Description of Artificial Sequence: Synthetic oligonucleotide
ugcaagaaucaaaacccau

SEQ ID NO: 2324835 - RNA, 19 nt, Artificial Sequence
  Description of Artificial Sequence: Synthetic oligonucleotide
guagacauauucccuugug

SEQ ID NO: 2324836 - RNA, 19 nt, Artificial Sequence
  Description of Artificial Sequence: Synthetic oligonucleotide
aaacaguucucaaacuaau

SEQ ID NO: 2324837 - RNA, 19 nt, Artificial Sequence
  Description of Artificial Sequence: Synthetic oligonucleotide
auagugaaauuaauaacau

SEQ ID NO: 2324838 - RNA, 19 nt, Artificial Sequence
  Description of Artificial Sequence: Synthetic oligonucleotide
cuugguaacacugucugga

SEQ ID NO: 2324839 - RNA, 19 nt, Artificial Sequence
  Description of Artificial Sequence: Synthetic oligonucleotide
uaaguccacaaaacaguuc

SEQ ID NO: 2324840 - RNA, 19 nt, Artificial Sequence
  Description of Artificial Sequence: Synthetic oligonucleotide
cugacuggacaauaacaac

SEQ ID NO: 2324841 - RNA, 19 nt, Artificial Sequence
  Description of Artificial Sequence: Synthetic oligonucleotide
acuacaauccugggcucgc

SEQ ID NO: 2324842 - RNA, 19 nt, Artificial Sequence
  Description of Artificial Sequence: Synthetic oligonucleotide
ugguaacacugucuggaca

SEQ ID NO: 2324843 - RNA, 19 nt, Artificial Sequence
  Description of Artificial Sequence: Synthetic oligonucleotide
uugugauagugaaauuaau

SEQ ID NO: 2324844 - RNA, 19 nt, Artificial Sequence
  Description of Artificial Sequence: Synthetic oligonucleotide
acauguguuguucuuuaaa

SEQ ID NO: 2324845 - RNA, 19 nt, Artificial Sequence
  Description of Artificial Sequence: Synthetic oligonucleotide
uccacaaaacaguucucaa

SEQ ID NO: 2324846 - RNA, 19 nt, Artificial Sequence
  Description of Artificial Sequence: Synthetic oligonucleotide
gacagcucagaccacuaca

SEQ ID NO: 2324847 - RNA, 19 nt, Artificial Sequence
  Description of Artificial Sequence: Synthetic oligonucleotide
ugaacaagagcuguccaua

SEQ ID NO: 2324848 - RNA, 19 nt, Artificial Sequence
  Description of Artificial Sequence: Synthetic oligonucleotide
cucaaacuaauucuaccca

SEQ ID NO: 2324849 - RNA, 19 nt, Artificial Sequence
  Description of Artificial Sequence: Synthetic oligonucleotide
accaacucuacaccuacaa

SEQ ID NO: 2324850 - RNA, 19 nt, Artificial Sequence
  Description of Artificial Sequence: Synthetic oligonucleotide
aggaaaucagucacacgac

SEQ ID NO: 2324851 - RNA, 19 nt, Artificial Sequence
  Description of Artificial Sequence: Synthetic oligonucleotide
gacaugcagccuuggagug

SEQ ID NO: 2324852 - RNA, 19 nt, Artificial Sequence
  Description of Artificial Sequence: Synthetic oligonucleotide
uggagugcugacuggacaa

SEQ ID NO: 2324853 - RNA, 19 nt, Artificial Sequence
  Description of Artificial Sequence: Synthetic oligonucleotide
caccuacaauacuugaaug

SEQ ID NO: 2324854 - RNA, 19 nt, Artificial Sequence
  Description of Artificial Sequence: Synthetic oligonucleotide
uuuacauguguuguucuuu

SEQ ID NO: 2324855 - RNA, 19 nt, Artificial Sequence
  Description of Artificial Sequence: Synthetic oligonucleotide
acacaucucuuaaaauagg

SEQ ID NO: 2324856 - RNA, 19 nt, Artificial Sequence
  Description of Artificial Sequence: Synthetic oligonucleotide
cuaugagcacugagcagcc

SEQ ID NO: 2324857 - RNA, 19 nt, Artificial Sequence
  Description of Artificial Sequence: Synthetic oligonucleotide
uccaguaguggguugcuua

SEQ ID NO: 2324858 - RNA, 19 nt, Artificial Sequence
  Description of Artificial Sequence: Synthetic oligonucleotide
agagcuacauauaaucaau

SEQ ID NO: 2324859 - RNA, 19 nt, Artificial Sequence
  Description of Artificial Sequence: Synthetic oligonucleotide
uuuucgaggaaggcccaag

SEQ ID NO: 2324860 - RNA, 19 nt, Artificial Sequence
  Description of Artificial Sequence: Synthetic oligonucleotide
ccaacaugugagaagcagg

SEQ ID NO: 2324861 - RNA, 19 nt, Artificial Sequence
  Description of Artificial Sequence: Synthetic oligonucleotide
gaacauaguuuaucuuaca

SEQ ID NO: 2324862 - RNA, 19 nt, Artificial Sequence
  Description of Artificial Sequence: Synthetic oligonucleotide
ugucuggacaugcagccuu

SEQ ID NO: 2324863 - RNA, 19 nt, Artificial Sequence
  Description of Artificial Sequence: Synthetic oligonucleotide
aaaggacuaagugguucug

SEQ ID NO: 2324864 - RNA, 19 nt, Artificial Sequence
  Description of Artificial Sequence: Synthetic oligonucleotide
gcucagaccacuacaaucc

SEQ ID NO: 2324865 - RNA, 19 nt, Artificial Sequence
  Description of Artificial Sequence: Synthetic oligonucleotide
auuuacauguguuguucuu

SEQ ID NO: 2324866 - RNA, 19 nt, Artificial Sequence
  Description of Artificial Sequence: Synthetic oligonucleotide
aagcagggaagugaguuau

SEQ ID NO: 2324867 - RNA, 19 nt, Artificial Sequence
  Description of Artificial Sequence: Synthetic oligonucleotide
caaagagcuaaaagaguga

SEQ ID NO: 2324868 - RNA, 19 nt, Artificial Sequence
  Description of Artificial Sequence: Synthetic oligonucleotide
caacacaggaaaucaguca

SEQ ID NO: 2324869 - RNA, 19 nt, Artificial Sequence
  Description of Artificial Sequence: Synthetic oligonucleotide
aggauauacaaggguaacu

SEQ ID NO: 2324870 - RNA, 19 nt, Artificial Sequence
  Description of Artificial Sequence: Synthetic oligonucleotide
aaggacuaagugguucuga

SEQ ID NO: 2324871 - RNA, 19 nt, Artificial Sequence
  Description of Artificial Sequence: Synthetic oligonucleotide
aacaagagcuguccauaua

SEQ ID NO: 2324872 - RNA, 19 nt, Artificial Sequence
  Description of Artificial Sequence: Synthetic oligonucleotide
aggacuaagugguucugaa

SEQ ID NO: 2324873 - RNA, 19 nt, Artificial Sequence
  Description of Artificial Sequence: Synthetic oligonucleotide
uaucagcuucaaacaacac

SEQ ID NO: 2324874 - RNA, 19 nt, Artificial Sequence
  Description of Artificial Sequence: Synthetic oligonucleotide
cauuccuguggccuaugag

SEQ ID NO: 2324875 - RNA, 19 nt, Artificial Sequence
  Description of Artificial Sequence: Synthetic oligonucleotide
gcuacauauaaucaauucu

SEQ ID NO: 2324876 - RNA, 19 nt, Artificial Sequence
  Description of Artificial Sequence: Synthetic oligonucleotide
aagugguucugaaagccaa

SEQ ID NO: 2324877 - RNA, 19 nt, Artificial Sequence
  Description of Artificial Sequence: Synthetic oligonucleotide
cagaguucaugugucuggg

SEQ ID NO: 2324878 - RNA, 19 nt, Artificial Sequence
  Description of Artificial Sequence: Synthetic oligonucleotide
augauacauccaguagugg

SEQ ID NO: 2324879 - RNA, 19 nt, Artificial Sequence
  Description of Artificial Sequence: Synthetic oligonucleotide
uaucuaugauaaugaggaa

SEQ ID NO: 2324880 - RNA, 19 nt, Artificial Sequence
  Description of Artificial Sequence: Synthetic oligonucleotide
cuccuaucagcuucaaaca

SEQ ID NO: 2324881 - RNA, 19 nt, Artificial Sequence
  Description of Artificial Sequence: Synthetic oligonucleotide
caauuguuucaaucuauaa

SEQ ID NO: 2324882 - RNA, 19 nt, Artificial Sequence
  Description of Artificial Sequence: Synthetic oligonucleotide
gauacauccaguagugggu

SEQ ID NO: 2324883 - RNA, 19 nt, Artificial Sequence
  Description of Artificial Sequence: Synthetic oligonucleotide
gaggaaagaggugggacca

SEQ ID NO: 2324884 - RNA, 19 nt, Artificial Sequence
  Description of Artificial Sequence: Synthetic oligonucleotide
gguaacuugucagaggaga

SEQ ID NO: 2324885 - RNA, 19 nt, Artificial Sequence
  Description of Artificial Sequence: Synthetic oligonucleotide
acaugcagccuuggagugc

SEQ ID NO: 2324886 - RNA, 19 nt, Artificial Sequence
  Description of Artificial Sequence: Synthetic oligonucleotide
caaucuauaauuggucuaa

SEQ ID NO: 2324887 - RNA, 19 nt, Artificial Sequence
  Description of Artificial Sequence: Synthetic oligonucleotide
caauguaugugaaucuugu

SEQ ID NO: 2324888 - RNA, 19 nt, Artificial Sequence
  Description of Artificial Sequence: Synthetic oligonucleotide
aacaugugagaagcaggga

SEQ ID NO: 2324889 - RNA, 19 nt, Artificial Sequence
  Description of Artificial Sequence: Synthetic oligonucleotide
uggcucacaacaagccaac

SEQ ID NO: 2324890 - RNA, 19 nt, Artificial Sequence
  Description of Artificial Sequence: Synthetic oligonucleotide
ccuacuuagagcuacauau

SEQ ID NO: 2324891 - RNA, 19 nt, Artificial Sequence
  Description of Artificial Sequence: Synthetic oligonucleotide
agugaguuauuuaauucuu

SEQ ID NO: 2324892 - RNA, 19 nt, Artificial Sequence
  Description of Artificial Sequence: Synthetic oligonucleotide
ugugucugggcugccauuc

SEQ ID NO: 2324893 - RNA, 19 nt, Artificial Sequence
  Description of Artificial Sequence: Synthetic oligonucleotide
caauacuugaauguauuua

SEQ ID NO: 2324894 - RNA, 19 nt, Artificial Sequence
  Description of Artificial Sequence: Synthetic oligonucleotide
ccuaucagcuucaaacaac

SEQ ID NO: 2324895 - RNA, 19 nt, Artificial Sequence
  Description of Artificial Sequence: Synthetic oligonucleotide
cuuggagugcugacuggac

SEQ ID NO: 2324896 - RNA, 19 nt, Artificial Sequence
  Description of Artificial Sequence: Synthetic oligonucleotide
cuggacaauaacaacuggu

SEQ ID NO: 2324897 - RNA, 19 nt, Artificial Sequence
  Description of Artificial Sequence: Synthetic oligonucleotide
uaugugaaucuuguccuuu

SEQ ID NO: 2324898 - RNA, 19 nt, Artificial Sequence
  Description of Artificial Sequence: Synthetic oligonucleotide
guggccuaugagcacugag

SEQ ID NO: 2324899 - RNA, 19 nt, Artificial Sequence
  Description of Artificial Sequence: Synthetic oligonucleotide
ggaaaucagucacacgaca

SEQ ID NO: 2324900 - RNA, 19 nt, Artificial Sequence
  Description of Artificial Sequence: Synthetic oligonucleotide
agugacugucugaacaaga

SEQ ID NO: 2324901 - RNA, 19 nt, Artificial Sequence
  Description of Artificial Sequence: Synthetic oligonucleotide
ucuuacacauuugcaggau

SEQ ID NO: 2324902 - RNA, 19 nt, Artificial Sequence
  Description of Artificial Sequence: Synthetic oligonucleotide
uagggcacuuagaguagac

SEQ ID NO: 2324903 - RNA, 19 nt, Artificial Sequence
  Description of Artificial Sequence: Synthetic oligonucleotide
acucuacaccuacaauacu

SEQ ID NO: 2324904 - RNA, 19 nt, Artificial Sequence
  Description of Artificial Sequence: Synthetic oligonucleotide
cacuacaauccugggcucg

SEQ ID NO: 2324905 - RNA, 19 nt, Artificial Sequence
  Description of Artificial Sequence: Synthetic oligonucleotide
gaggugggaccaauaauca

SEQ ID NO: 2324906 - RNA, 19 nt, Artificial Sequence
  Description of Artificial Sequence: Synthetic oligonucleotide
ugggcucgcuucuugguaa

SEQ ID NO: 2324907 - RNA, 19 nt, Artificial Sequence
  Description of Artificial Sequence: Synthetic oligonucleotide
uacauguguuguucuuuaa

SEQ ID NO: 2324908 - RNA, 19 nt, Artificial Sequence
  Description of Artificial Sequence: Synthetic oligonucleotide
caggauauacaaggguaac

SEQ ID NO: 2324909 - RNA, 19 nt, Artificial Sequence
  Description of Artificial Sequence: Synthetic oligonucleotide
aacauccuccuaucagcuu

SEQ ID NO: 2324910 - RNA, 19 nt, Artificial Sequence
  Description of Artificial Sequence: Synthetic oligonucleotide
ggaccaauaaucaauuaua

SEQ ID NO: 2324911 - RNA, 19 nt, Artificial Sequence
  Description of Artificial Sequence: Synthetic oligonucleotide
augugagaagcagggaagu

SEQ ID NO: 2324912 - RNA, 19 nt, Artificial Sequence
  Description of Artificial Sequence: Synthetic oligonucleotide
aucagucacacgacagcuc

SEQ ID NO: 2324913 - RNA, 19 nt, Artificial Sequence
  Description of Artificial Sequence: Synthetic oligonucleotide
gaagcagggaagugaguua

SEQ ID NO: 2324914 - RNA, 19 nt, Artificial Sequence
  Description of Artificial Sequence: Synthetic oligonucleotide
cauggcucacaacaagcca

SEQ ID NO: 2324915 - RNA, 19 nt, Artificial Sequence
  Description of Artificial Sequence: Synthetic oligonucleotide
uggguugcuuaaauaccua

SEQ ID NO: 2324916 - RNA, 19 nt, Artificial Sequence
  Description of Artificial Sequence: Synthetic oligonucleotide
ggccuaugagcacugagca

SEQ ID NO: 2324917 - RNA, 19 nt, Artificial Sequence
  Description of Artificial Sequence: Synthetic oligonucleotide
ccauggcucacaacaagcc

SEQ ID NO: 2324918 - RNA, 19 nt, Artificial Sequence
  Description of Artificial Sequence: Synthetic oligonucleotide
acuuagagcuacauauaau

SEQ ID NO: 2324919 - RNA, 19 nt, Artificial Sequence
  Description of Artificial Sequence: Synthetic oligonucleotide
uucuacccaauuguuucaa

SEQ ID NO: 2324920 - RNA, 19 nt, Artificial Sequence
  Description of Artificial Sequence: Synthetic oligonucleotide
acaagccaacaugugagaa

SEQ ID NO: 2324921 - RNA, 19 nt, Artificial Sequence
  Description of Artificial Sequence: Synthetic oligonucleotide
ggguugcuuaaauaccuac

SEQ ID NO: 2324922 - RNA, 19 nt, Artificial Sequence
  Description of Artificial Sequence: Synthetic oligonucleotide
accuacuuagagcuacaua

SEQ ID NO: 2324923 - RNA, 19 nt, Artificial Sequence
  Description of Artificial Sequence: Synthetic oligonucleotide
agucacacgacagcucaga

SEQ ID NO: 2324924 - RNA, 19 nt, Artificial Sequence
  Description of Artificial Sequence: Synthetic oligonucleotide
caagagcuguccauauaca

SEQ ID NO: 2324925 - RNA, 19 nt, Artificial Sequence
  Description of Artificial Sequence: Synthetic oligonucleotide
cccauggcucacaacaagc

SEQ ID NO: 2324926 - RNA, 19 nt, Artificial Sequence
  Description of Artificial Sequence: Synthetic oligonucleotide
caaggcagaguucaugugu

SEQ ID NO: 2324927 - RNA, 19 nt, Artificial Sequence
  Description of Artificial Sequence: Synthetic oligonucleotide
cauaccaacucuacaccua

SEQ ID NO: 2324928 - RNA, 19 nt, Artificial Sequence
  Description of Artificial Sequence: Synthetic oligonucleotide
cucuacaccuacaauacuu

SEQ ID NO: 2324929 - RNA, 19 nt, Artificial Sequence
  Description of Artificial Sequence: Synthetic oligonucleotide
ugggaccaauaaucaauua

SEQ ID NO: 2324930 - RNA, 19 nt, Artificial Sequence
  Description of Artificial Sequence: Synthetic oligonucleotide
uacaauccugggcucgcuu

SEQ ID NO: 2324931 - RNA, 19 nt, Artificial Sequence
  Description of Artificial Sequence: Synthetic oligonucleotide
acauaaaauaaggcacaua

SEQ ID NO: 2324932 - RNA, 19 nt, Artificial Sequence
  Description of Artificial Sequence: Synthetic oligonucleotide
ccuuuuacuaauuaaguuu

SEQ ID NO: 2324933 - RNA, 19 nt, Artificial Sequence
  Description of Artificial Sequence: Synthetic oligonucleotide
guccuuuuacuaauuaagu

SEQ ID NO: 2324934 - RNA, 19 nt, Artificial Sequence
  Description of Artificial Sequence: Synthetic oligonucleotide
aggugggaccaauaaucaa

SEQ ID NO: 2324935 - RNA, 19 nt, Artificial Sequence
  Description of Artificial Sequence: Synthetic oligonucleotide
cuacaauacuugaauguau

SEQ ID NO: 2324936 - RNA, 19 nt, Artificial Sequence
  Description of Artificial Sequence: Synthetic oligonucleotide
ggacaugcagccuuggagu

SEQ ID NO: 2324937 - RNA, 19 nt, Artificial Sequence
  Description of Artificial Sequence: Synthetic oligonucleotide
gcuuaaauaccuacuuaga

SEQ ID NO: 2324938 - RNA, 19 nt, Artificial Sequence
  Description of Artificial Sequence: Synthetic oligonucleotide
auagggcacuuagaguaga

SEQ ID NO: 2324939 - RNA, 19 nt, Artificial Sequence
  Description of Artificial Sequence: Synthetic oligonucleotide
cuuacacauuugcaggaua

SEQ ID NO: 2324940 - RNA, 19 nt, Artificial Sequence
  Description of Artificial Sequence: Synthetic oligonucleotide
gggaccaauaaucaauuau

SEQ ID NO: 2324941 - RNA, 19 nt, Artificial Sequence
  Description of Artificial Sequence: Synthetic oligonucleotide
auacauccaguaguggguu

SEQ ID NO: 2324942 - RNA, 19 nt, Artificial Sequence
  Description of Artificial Sequence: Synthetic oligonucleotide
aacuucuuacaaagagcua

SEQ ID NO: 2324943 - RNA, 19 nt, Artificial Sequence
  Description of Artificial Sequence: Synthetic oligonucleotide
gaacaagagcuguccauau

SEQ ID NO: 2324944 - RNA, 19 nt, Artificial Sequence
  Description of Artificial Sequence: Synthetic oligonucleotide
aggcccaaggccaucacau

SEQ ID NO: 2324945 - RNA, 19 nt, Artificial Sequence
  Description of Artificial Sequence: Synthetic oligonucleotide
aaauaccuacuuagagcua

SEQ ID NO: 2324946 - RNA, 19 nt, Artificial Sequence
  Description of Artificial Sequence: Synthetic oligonucleotide
guggguugcuuaaauaccu

SEQ ID NO: 2324947 - RNA, 19 nt, Artificial Sequence
  Description of Artificial Sequence: Synthetic oligonucleotide
guaacacugucuggacaug

SEQ ID NO: 2324948 - RNA, 19 nt, Artificial Sequence
  Description of Artificial Sequence: Synthetic oligonucleotide
cagucacacgacagcucag

SEQ ID NO: 2324949 - RNA, 19 nt, Artificial Sequence
  Description of Artificial Sequence: Synthetic oligonucleotide
uaccuacuuagagcuacau

SEQ ID NO: 2324950 - RNA, 19 nt, Artificial Sequence
  Description of Artificial Sequence: Synthetic oligonucleotide
cauugacaagagaaacaua

SEQ ID NO: 2324951 - RNA, 19 nt, Artificial Sequence
  Description of Artificial Sequence: Synthetic oligonucleotide
ggcagaguucaugugucug

SEQ ID NO: 2324952 - RNA, 19 nt, Artificial Sequence
  Description of Artificial Sequence: Synthetic oligonucleotide
ggauauacaaggguaacuu

SEQ ID NO: 2324953 - RNA, 19 nt, Artificial Sequence
  Description of Artificial Sequence: Synthetic oligonucleotide
gaaagaggugggaccaaua

SEQ ID NO: 2324954 - RNA, 19 nt, Artificial Sequence
  Description of Artificial Sequence: Synthetic oligonucleotide
gccuaugagcacugagcag

SEQ ID NO: 2324955 - RNA, 19 nt, Artificial Sequence
  Description of Artificial Sequence: Synthetic oligonucleotide
gaaaaggaacauaguuuau

SEQ ID NO: 2324956 - RNA, 19 nt, Artificial Sequence
  Description of Artificial Sequence: Synthetic oligonucleotide
guaaguccacaaaacaguu

SEQ ID NO: 2324957 - RNA, 19 nt, Artificial Sequence
  Description of Artificial Sequence: Synthetic oligonucleotide
cugaacaagagcuguccau

SEQ ID NO: 2324958 - RNA, 19 nt, Artificial Sequence
  Description of Artificial Sequence: Synthetic oligonucleotide
ccuugugauagugaaauua

SEQ ID NO: 2324959 - RNA, 19 nt, Artificial Sequence
  Description of Artificial Sequence: Synthetic oligonucleotide
auaccuacuuagagcuaca

SEQ ID NO: 2324960 - RNA, 19 nt, Artificial Sequence
  Description of Artificial Sequence: Synthetic oligonucleotide
gcaggauauacaaggguaa

SEQ ID NO: 2324961 - RNA, 19 nt, Artificial Sequence
  Description of Artificial Sequence: Synthetic oligonucleotide
ggacuaagugguucugaaa

SEQ ID NO: 2324962 - RNA, 19 nt, Artificial Sequence
  Description of Artificial Sequence: Synthetic oligonucleotide
ccuacaauacuugaaugua

SEQ ID NO: 2324963 - RNA, 19 nt, Artificial Sequence
  Description of Artificial Sequence: Synthetic oligonucleotide
uucaugugucugggcugcc

SEQ ID NO: 2324964 - RNA, 19 nt, Artificial Sequence
  Description of Artificial Sequence: Synthetic oligonucleotide
aggaaggcccaaggccauc

SEQ ID NO: 2324965 - RNA, 19 nt, Artificial Sequence
  Description of Artificial Sequence: Synthetic oligonucleotide
gcacuuagaguagacauau

SEQ ID NO: 2324966 - RNA, 19 nt, Artificial Sequence
  Description of Artificial Sequence: Synthetic oligonucleotide
gcagccuuggagugcugac

SEQ ID NO: 2324967 - RNA, 19 nt, Artificial Sequence
  Description of Artificial Sequence: Synthetic oligonucleotide
guaugugaaucuuguccuu

SEQ ID NO: 2324968 - RNA, 19 nt, Artificial Sequence
  Description of Artificial Sequence: Synthetic oligonucleotide
gcucgcuucuugguaacac

SEQ ID NO: 2324969 - RNA, 19 nt, Artificial Sequence
  Description of Artificial Sequence: Synthetic oligonucleotide
caugcagccuuggagugcu

SEQ ID NO: 2324970 - RNA, 19 nt, Artificial Sequence
  Description of Artificial Sequence: Synthetic oligonucleotide
acacgacagcucagaccac

SEQ ID NO: 2324971 - RNA, 19 nt, Artificial Sequence
  Description of Artificial Sequence: Synthetic oligonucleotide
gugggaccaauaaucaauu

SEQ ID NO: 2324972 - RNA, 19 nt, Artificial Sequence
  Description of Artificial Sequence: Synthetic oligonucleotide
aggaaagaggugggaccaa

SEQ ID NO: 2324973 - RNA, 19 nt, Artificial Sequence
  Description of Artificial Sequence: Synthetic oligonucleotide
ccaucacauaccaacucua

SEQ ID NO: 2324974 - RNA, 19 nt, Artificial Sequence
  Description of Artificial Sequence: Synthetic oligonucleotide
caauccugggcucgcuucu

SEQ ID NO: 2324975 - RNA, 19 nt, Artificial Sequence
  Description of Artificial Sequence: Synthetic oligonucleotide
cucagaccacuacaauccu

SEQ ID NO: 2324976 - RNA, 19 nt, Artificial Sequence
  Description of Artificial Sequence: Synthetic oligonucleotide
cugggcucgcuucuuggua

SEQ ID NO: 2324977 - RNA, 19 nt, Artificial Sequence
  Description of Artificial Sequence: Synthetic oligonucleotide
cugaaagccaaggcagagu

SEQ ID NO: 2324978 - RNA, 19 nt, Artificial Sequence
  Description of Artificial Sequence: Synthetic oligonucleotide
caaggccaucacauaccaa

SEQ ID NO: 2324979 - RNA, 19 nt, Artificial Sequence
  Description of Artificial Sequence: Synthetic oligonucleotide
cucaguuaucuaugauaau

SEQ ID NO: 2324980 - RNA, 19 nt, Artificial Sequence
  Description of Artificial Sequence: Synthetic oligonucleotide
agccaacaugugagaagca

SEQ ID NO: 2324981 - RNA, 19 nt, Artificial Sequence
  Description of Artificial Sequence: Synthetic oligonucleotide
ccaguaguggguugcuuaa

SEQ ID NO: 2324982 - RNA, 19 nt, Artificial Sequence
  Description of Artificial Sequence: Synthetic oligonucleotide
cacgacagcucagaccacu

SEQ ID NO: 2324983 - RNA, 19 nt, Artificial Sequence
  Description of Artificial Sequence: Synthetic oligonucleotide
acgacagcucagaccacua

SEQ ID NO: 2324984 - RNA, 19 nt, Artificial Sequence
  Description of Artificial Sequence: Synthetic oligonucleotide
gggaagugaguuauuuaau

SEQ ID NO: 2324985 - RNA, 19 nt, Artificial Sequence
  Description of Artificial Sequence: Synthetic oligonucleotide
caguaguggguugcuuaaa

SEQ ID NO: 2324986 - RNA, 19 nt, Artificial Sequence
  Description of Artificial Sequence: Synthetic oligonucleotide
agcagggaagugaguuauu

SEQ ID NO: 2324987 - RNA, 19 nt, Artificial Sequence
  Description of Artificial Sequence: Synthetic oligonucleotide
gaggaaggcccaaggccau

SEQ ID NO: 2324988 - RNA, 19 nt, Artificial Sequence
  Description of Artificial Sequence: Synthetic oligonucleotide
cgacagcucagaccacuac

SEQ ID NO: 2324989 - RNA, 19 nt, Artificial Sequence
  Description of Artificial Sequence: Synthetic oligonucleotide
gcagggaagugaguuauuu

SEQ ID NO: 2324990 - RNA, 19 nt, Artificial Sequence
  Description of Artificial Sequence: Synthetic oligonucleotide
ggaaagaggugggaccaau

SEQ ID NO: 2324991 - RNA, 19 nt, Artificial Sequence
  Description of Artificial Sequence: Synthetic oligonucleotide
ccauuccuguggccuauga

SEQ ID NO: 2324992 - RNA, 19 nt, Artificial Sequence
  Description of Artificial Sequence: Synthetic oligonucleotide
cuacaauccugggcucgcu

SEQ ID NO: 2324993 - RNA, 19 nt, Artificial Sequence
  Description of Artificial Sequence: Synthetic oligonucleotide
ggcucgcuucuugguaaca

SEQ ID NO: 2324994 - RNA, 19 nt, Artificial Sequence
  Description of Artificial Sequence: Synthetic oligonucleotide
ggagugcugacuggacaau

SEQ ID NO: 2324995 - RNA, 19 nt, Artificial Sequence
  Description of Artificial Sequence: Synthetic oligonucleotide
cccuugugauagugaaauu

SEQ ID NO: 2324996 - RNA, 19 nt, Artificial Sequence
  Description of Artificial Sequence: Synthetic oligonucleotide
uauaauggaauccaaugcc

SEQ ID NO: 2324997 - RNA, 19 nt, Artificial Sequence
  Description of Artificial Sequence: Synthetic oligonucleotide
agaaguaaguucuucugcc

SEQ ID NO: 2324998 - RNA, 19 nt, Artificial Sequence
  Description of Artificial Sequence: Synthetic oligonucleotide
uguguaaugacagagguug

SEQ ID NO: 2324999 - RNA, 19 nt, Artificial Sequence
  Description of Artificial Sequence: Synthetic oligonucleotide
auuagcaagaugcaugacg

SEQ ID NO: 2325000 - RNA, 19 nt, Artificial Sequence
  Description of Artificial Sequence: Synthetic oligonucleotide
cuguccauuagcaagaugc

SEQ ID NO: 2325001 - RNA, 19 nt, Artificial Sequence
  Description of Artificial Sequence: Synthetic oligonucleotide
aauguugggcaccauggac

SEQ ID NO: 2325002 - RNA, 19 nt, Artificial Sequence
  Description of Artificial Sequence: Synthetic oligonucleotide
aaucuuuaugagcuaacag

SEQ ID NO: 2325003 - RNA, 19 nt, Artificial Sequence
  Description of Artificial Sequence: Synthetic oligonucleotide
auaaccuaaguggagaggc

SEQ ID NO: 2325004 - RNA, 19 nt, Artificial Sequence
  Description of Artificial Sequence: Synthetic oligonucleotide
uuuaugagcuaacagcagc

SEQ ID NO: 2325005 - RNA, 19 nt, Artificial Sequence
  Description of Artificial Sequence: Synthetic oligonucleotide
uuagcaagaugcaugacga

SEQ ID NO: 2325006 - RNA, 19 nt, Artificial Sequence
  Description of Artificial Sequence: Synthetic oligonucleotide
aauguugacuucauuacuc

SEQ ID NO: 2325007 - RNA, 19 nt, Artificial Sequence
  Description of Artificial Sequence: Synthetic oligonucleotide
acuacuguuaacugguggg

SEQ ID NO: 2325008 - RNA, 19 nt, Artificial Sequence
  Description of Artificial Sequence: Synthetic oligonucleotide
aauccaaugcccucuguag

SEQ ID NO: 2325009 - RNA, 19 nt, Artificial Sequence
  Description of Artificial Sequence: Synthetic oligonucleotide
uucauuacucagcugaaug

SEQ ID NO: 2325010 - RNA, 19 nt, Artificial Sequence
  Description of Artificial Sequence: Synthetic oligonucleotide
aaggcaucugaacuggagg

SEQ ID NO: 2325011 - RNA, 19 nt, Artificial Sequence
  Description of Artificial Sequence: Synthetic oligonucleotide
cuauaauggaauccaaugc

SEQ ID NO: 2325012 - RNA, 19 nt, Artificial Sequence
  Description of Artificial Sequence: Synthetic oligonucleotide
uaaguggagaggcagaaga

SEQ ID NO: 2325013 - RNA, 19 nt, Artificial Sequence
  Description of Artificial Sequence: Synthetic oligonucleotide
uggaucuucaucuacugug

SEQ ID NO: 2325014 - RNA, 19 nt, Artificial Sequence
  Description of Artificial Sequence: Synthetic oligonucleotide
aggcagaagaaccaggacg

SEQ ID NO: 2325015 - RNA, 19 nt, Artificial Sequence
  Description of Artificial Sequence: Synthetic oligonucleotide
aauggaauccaaugcccuc

SEQ ID NO: 2325016 - RNA, 19 nt, Artificial Sequence
  Description of Artificial Sequence: Synthetic oligonucleotide
cauuucguuaguaauguug

SEQ ID NO: 2325017 - RNA, 19 nt, Artificial Sequence
  Description of Artificial Sequence: Synthetic oligonucleotide
cauuccacaaccuccauug

SEQ ID NO: 2325018 - RNA, 19 nt, Artificial Sequence
  Description of Artificial Sequence: Synthetic oligonucleotide
aacugagcuacuucauuuc

SEQ ID NO: 2325019 - RNA, 19 nt, Artificial Sequence
  Description of Artificial Sequence: Synthetic oligonucleotide
auaauggaauccaaugccc

SEQ ID NO: 2325020 - RNA, 19 nt, Artificial Sequence
  Description of Artificial Sequence: Synthetic oligonucleotide
uugacuucauuacucagcu

SEQ ID NO: 2325021 - RNA, 19 nt, Artificial Sequence
  Description of Artificial Sequence: Synthetic oligonucleotide
gacuuggugggucagagug

SEQ ID NO: 2325022 - RNA, 19 nt, Artificial Sequence
  Description of Artificial Sequence: Synthetic oligonucleotide
uuuagucucaucuuggcuu

SEQ ID NO: 2325023 - RNA, 19 nt, Artificial Sequence
  Description of Artificial Sequence: Synthetic oligonucleotide
ggugaaguggaucauaacc

SEQ ID NO: 2325024 - RNA, 19 nt, Artificial Sequence
  Description of Artificial Sequence: Synthetic oligonucleotide
guaauguugacuucauuac

SEQ ID NO: 2325025 - RNA, 19 nt, Artificial Sequence
  Description of Artificial Sequence: Synthetic oligonucleotide
aagaugcaugacgagaggg

SEQ ID NO: 2325026 - RNA, 19 nt, Artificial Sequence
  Description of Artificial Sequence: Synthetic oligonucleotide
uucuaacugagcuacuuca

SEQ ID NO: 2325027 - RNA, 19 nt, Artificial Sequence
  Description of Artificial Sequence: Synthetic oligonucleotide
gagaaguaaguucuucugc

SEQ ID NO: 2325028 - RNA, 19 nt, Artificial Sequence
  Description of Artificial Sequence: Synthetic oligonucleotide
gacagggcaaucuuuauga

SEQ ID NO: 2325029 - RNA, 19 nt, Artificial Sequence
  Description of Artificial Sequence: Synthetic oligonucleotide
aucuucaucuacugugcgc

SEQ ID NO: 2325030 - RNA, 19 nt, Artificial Sequence
  Description of Artificial Sequence: Synthetic oligonucleotide
auugacugaagagacuugg

SEQ ID NO: 2325031 - RNA, 19 nt, Artificial Sequence
  Description of Artificial Sequence: Synthetic oligonucleotide
aaaaucgcugccgacgcuc

SEQ ID NO: 2325032 - RNA, 19 nt, Artificial Sequence
  Description of Artificial Sequence: Synthetic oligonucleotide
uuaugagcuaacagcagcu

SEQ ID NO: 2325033 - RNA, 19 nt, Artificial Sequence
  Description of Artificial Sequence: Synthetic oligonucleotide
aguaaguucuucugccuuc

SEQ ID NO: 2325034 - RNA, 19 nt, Artificial Sequence
  Description of Artificial Sequence: Synthetic oligonucleotide
gaucccauuugccuguuag

SEQ ID NO: 2325035 - RNA, 19 nt, Artificial Sequence
  Description of Artificial Sequence: Synthetic oligonucleotide
uguaaugacagagguuggg

SEQ ID NO: 2325036 - RNA, 19 nt, Artificial Sequence
  Description of Artificial Sequence: Synthetic oligonucleotide
aaugacagagguuggggaa

SEQ ID NO: 2325037 - RNA, 19 nt, Artificial Sequence
  Description of Artificial Sequence: Synthetic oligonucleotide
ugcaugacgagagggaggg

SEQ ID NO: 2325038 - RNA, 19 nt, Artificial Sequence
  Description of Artificial Sequence: Synthetic oligonucleotide
agcgaaauaacagaaggca

SEQ ID NO: 2325039 - RNA, 19 nt, Artificial Sequence
  Description of Artificial Sequence: Synthetic oligonucleotide
ucguuaguaauguugacuu

SEQ ID NO: 2325040 - RNA, 19 nt, Artificial Sequence
  Description of Artificial Sequence: Synthetic oligonucleotide
ucauuacucagcugaaugu

SEQ ID NO: 2325041 - RNA, 19 nt, Artificial Sequence
  Description of Artificial Sequence: Synthetic oligonucleotide
uacgauaguggguguaggg

SEQ ID NO: 2325042 - RNA, 19 nt, Artificial Sequence
  Description of Artificial Sequence: Synthetic oligonucleotide
aguugggugaaguggauca

SEQ ID NO: 2325043 - RNA, 19 nt, Artificial Sequence
  Description of Artificial Sequence: Synthetic oligonucleotide
uuuuagucucaucuuggcu

SEQ ID NO: 2325044 - RNA, 19 nt, Artificial Sequence
  Description of Artificial Sequence: Synthetic oligonucleotide
uucauuucguuaguaaugu

SEQ ID NO: 2325045 - RNA, 19 nt, Artificial Sequence
  Description of Artificial Sequence: Synthetic oligonucleotide
gucagaguggcuuuuaguc

SEQ ID NO: 2325046 - RNA, 19 nt, Artificial Sequence
  Description of Artificial Sequence: Synthetic oligonucleotide
uucuuuuccagggaggaca

SEQ ID NO: 2325047 - RNA, 19 nt, Artificial Sequence
  Description of Artificial Sequence: Synthetic oligonucleotide
agggaggacacccacagcu

SEQ ID NO: 2325048 - RNA, 19 nt, Artificial Sequence
  Description of Artificial Sequence: Synthetic oligonucleotide
agaagaaccaggacguacg

SEQ ID NO: 2325049 - RNA, 19 nt, Artificial Sequence
  Description of Artificial Sequence: Synthetic oligonucleotide
cuuuuagucucaucuuggc

SEQ ID NO: 2325050 - RNA, 19 nt, Artificial Sequence
  Description of Artificial Sequence: Synthetic oligonucleotide
uaaugacagagguugggga

SEQ ID NO: 2325051 - RNA, 19 nt, Artificial Sequence
  Description of Artificial Sequence: Synthetic oligonucleotide
uaggagaucccauuugccu

SEQ ID NO: 2325052 - RNA, 19 nt, Artificial Sequence
  Description of Artificial Sequence: Synthetic oligonucleotide
auaccaggaauguugggca

SEQ ID NO: 2325053 - RNA, 19 nt, Artificial Sequence
  Description of Artificial Sequence: Synthetic oligonucleotide
uucguuaguaauguugacu

SEQ ID NO: 2325054 - RNA, 19 nt, Artificial Sequence
  Description of Artificial Sequence: Synthetic oligonucleotide
uaacuggugggccagguau

SEQ ID NO: 2325055 - RNA, 19 nt, Artificial Sequence
  Description of Artificial Sequence: Synthetic oligonucleotide
auuucguuaguaauguuga

SEQ ID NO: 2325056 - RNA, 19 nt, Artificial Sequence
  Description of Artificial Sequence: Synthetic oligonucleotide
cuggccagcgaaauaacag

SEQ ID NO: 2325057 - RNA, 19 nt, Artificial Sequence
  Description of Artificial Sequence: Synthetic oligonucleotide
aaguggaucauaaccuaag

SEQ ID NO: 2325058 - RNA, 19 nt, Artificial Sequence
  Description of Artificial Sequence: Synthetic oligonucleotide
agguauaccaggaauguug

SEQ ID NO: 2325059 - RNA, 19 nt, Artificial Sequence
  Description of Artificial Sequence: Synthetic oligonucleotide
aaccuaaguggagaggcag

SEQ ID NO: 2325060 - RNA, 19 nt, Artificial Sequence
  Description of Artificial Sequence: Synthetic oligonucleotide
caggacguacgauaguggg

SEQ ID NO: 2325061 - RNA, 19 nt, Artificial Sequence
  Description of Artificial Sequence: Synthetic oligonucleotide
accuccauugacugaagag

SEQ ID NO: 2325062 - RNA, 19 nt, Artificial Sequence
  Description of Artificial Sequence: Synthetic oligonucleotide
agaaccaggacguacgaua

SEQ ID NO: 2325063 - RNA, 19 nt, Artificial Sequence
  Description of Artificial Sequence: Synthetic oligonucleotide
auggacacaggucuggcca

SEQ ID NO: 2325064 - RNA, 19 nt, Artificial Sequence
  Description of Artificial Sequence: Synthetic oligonucleotide
gauggcauaggguggccag

SEQ ID NO: 2325065 - RNA, 19 nt, Artificial Sequence
  Description of Artificial Sequence: Synthetic oligonucleotide
guggaucauaaccuaagug

SEQ ID NO: 2325066 - RNA, 19 nt, Artificial Sequence
  Description of Artificial Sequence: Synthetic oligonucleotide
uccaaugcccucuguagug

SEQ ID NO: 2325067 - RNA, 19 nt, Artificial Sequence
  Description of Artificial Sequence: Synthetic oligonucleotide
guugacuucauuacucagc

SEQ ID NO: 2325068 - RNA, 19 nt, Artificial Sequence
  Description of Artificial Sequence: Synthetic oligonucleotide
uaacagaaggcaucugaac

SEQ ID NO: 2325069 - RNA, 19 nt, Artificial Sequence
  Description of Artificial Sequence: Synthetic oligonucleotide
cagcgaaauaacagaaggc

SEQ ID NO: 2325070 - RNA, 19 nt, Artificial Sequence
  Description of Artificial Sequence: Synthetic oligonucleotide
uaacugagcuacuucauuu

SEQ ID NO: 2325071 - RNA, 19 nt, Artificial Sequence
  Description of Artificial Sequence: Synthetic oligonucleotide
cuggaugaggaucugguuc

SEQ ID NO: 2325072 - RNA, 19 nt, Artificial Sequence
  Description of Artificial Sequence: Synthetic oligonucleotide
gauggagaaauggagccac

SEQ ID NO: 2325073 - RNA, 19 nt, Artificial Sequence
  Description of Artificial Sequence: Synthetic oligonucleotide
gaucauaaccuaaguggag

SEQ ID NO: 2325074 - RNA, 19 nt, Artificial Sequence
  Description of Artificial Sequence: Synthetic oligonucleotide
uggccagauggagaaaugg

SEQ ID NO: 2325075 - RNA, 19 nt, Artificial Sequence
  Description of Artificial Sequence: Synthetic oligonucleotide
ggaauguugggcaccaugg

SEQ ID NO: 2325076 - RNA, 19 nt, Artificial Sequence
  Description of Artificial Sequence: Synthetic oligonucleotide
aucauaaccuaaguggaga

SEQ ID NO: 2325077 - RNA, 19 nt, Artificial Sequence
  Description of Artificial Sequence: Synthetic oligonucleotide
uggguguagggguagaaau

SEQ ID NO: 2325078 - RNA, 19 nt, Artificial Sequence
  Description of Artificial Sequence: Synthetic oligonucleotide
agcugaauguucugagaag

SEQ ID NO: 2325079 - RNA, 19 nt, Artificial Sequence
  Description of Artificial Sequence: Synthetic oligonucleotide
cacuacuguuaacuggugg

SEQ ID NO: 2325080 - RNA, 19 nt, Artificial Sequence
  Description of Artificial Sequence: Synthetic oligonucleotide
uuccacaaccuccauugac

SEQ ID NO: 2325081 - RNA, 19 nt, Artificial Sequence
  Description of Artificial Sequence: Synthetic oligonucleotide
auuacucagcugaauguuc

SEQ ID NO: 2325082 - RNA, 19 nt, Artificial Sequence
  Description of Artificial Sequence: Synthetic oligonucleotide
acgauaguggguguagggg

SEQ ID NO: 2325083 - RNA, 19 nt, Artificial Sequence
  Description of Artificial Sequence: Synthetic oligonucleotide
cucagcugaauguucugag

SEQ ID NO: 2325084 - RNA, 19 nt, Artificial Sequence
  Description of Artificial Sequence: Synthetic oligonucleotide
aggaauguugggcaccaug

SEQ ID NO: 2325085 - RNA, 19 nt, Artificial Sequence
  Description of Artificial Sequence: Synthetic oligonucleotide
aguggaucauaaccuaagu

SEQ ID NO: 2325086 - RNA, 19 nt, Artificial Sequence
  Description of Artificial Sequence: Synthetic oligonucleotide
ucuggccagcgaaauaaca

SEQ ID NO: 2325087 - RNA, 19 nt, Artificial Sequence
  Description of Artificial Sequence: Synthetic oligonucleotide
auguugacuucauuacuca

SEQ ID NO: 2325088 - RNA, 19 nt, Artificial Sequence
  Description of Artificial Sequence: Synthetic oligonucleotide
uggccagcgaaauaacaga

SEQ ID NO: 2325089 - RNA, 19 nt, Artificial Sequence
  Description of Artificial Sequence: Synthetic oligonucleotide
caugacgagagggagggag

SEQ ID NO: 2325090 - RNA, 19 nt, Artificial Sequence
  Description of Artificial Sequence: Synthetic oligonucleotide
uuccaaaggagguccugag

SEQ ID NO: 2325091 - RNA, 19 nt, Artificial Sequence
  Description of Artificial Sequence: Synthetic oligonucleotide
ugggugaaguggaucauaa

SEQ ID NO: 2325092 - RNA, 19 nt, Artificial Sequence
  Description of Artificial Sequence: Synthetic oligonucleotide
ucagcugaauguucugaga

SEQ ID NO: 2325093 - RNA, 19 nt, Artificial Sequence
  Description of Artificial Sequence: Synthetic oligonucleotide
gaaccaggacguacgauag

SEQ ID NO: 2325094 - RNA, 19 nt, Artificial Sequence
  Description of Artificial Sequence: Synthetic oligonucleotide
cugguucugcucuggacgg

SEQ ID NO: 2325095 - RNA, 19 nt, Artificial Sequence
  Description of Artificial Sequence: Synthetic oligonucleotide
ugagcuacuucauuucguu

SEQ ID NO: 2325096 - RNA, 19 nt, Artificial Sequence
  Description of Artificial Sequence: Synthetic oligonucleotide
uuuggcggcaccgggaggc

SEQ ID NO: 2325097 - RNA, 19 nt, Artificial Sequence
  Description of Artificial Sequence: Synthetic oligonucleotide
aauggagccacuacuguua

SEQ ID NO: 2325098 - RNA, 19 nt, Artificial Sequence
  Description of Artificial Sequence: Synthetic oligonucleotide
gagaaauggagccacuacu

SEQ ID NO: 2325099 - RNA, 19 nt, Artificial Sequence
  Description of Artificial Sequence: Synthetic oligonucleotide
gguauaccaggaauguugg

SEQ ID NO: 2325100 - RNA, 19 nt, Artificial Sequence
  Description of Artificial Sequence: Synthetic oligonucleotide
cauaaccuaaguggagagg

SEQ ID NO: 2325101 - RNA, 19 nt, Artificial Sequence
  Description of Artificial Sequence: Synthetic oligonucleotide
uccgcuuuuggcggcaccg

SEQ ID NO: 2325102 - RNA, 19 nt, Artificial Sequence
  Description of Artificial Sequence: Synthetic oligonucleotide
uacuguuaacuggugggcc

SEQ ID NO: 2325103 - RNA, 19 nt, Artificial Sequence
  Description of Artificial Sequence: Synthetic oligonucleotide
agcaagaugcaugacgaga

SEQ ID NO: 2325104 - RNA, 19 nt, Artificial Sequence
  Description of Artificial Sequence: Synthetic oligonucleotide
uuaagaacaggggcugcug

SEQ ID NO: 2325105 - RNA, 19 nt, Artificial Sequence
  Description of Artificial Sequence: Synthetic oligonucleotide
uaaccuaaguggagaggca

SEQ ID NO: 2325106 - RNA, 19 nt, Artificial Sequence
  Description of Artificial Sequence: Synthetic oligonucleotide
uggagagaccuguggcugg

SEQ ID NO: 2325107 - RNA, 19 nt, Artificial Sequence
  Description of Artificial Sequence: Synthetic oligonucleotide
cuacugugcgccgacgucg

SEQ ID NO: 2325108 - RNA, 19 nt, Artificial Sequence
  Description of Artificial Sequence: Synthetic oligonucleotide
agccuguguaaugacagag

SEQ ID NO: 2325109 - RNA, 19 nt, Artificial Sequence
  Description of Artificial Sequence: Synthetic oligonucleotide
gagacuuggugggucagag

SEQ ID NO: 2325110 - RNA, 19 nt, Artificial Sequence
  Description of Artificial Sequence: Synthetic oligonucleotide
gguaucagggugcuggaug

SEQ ID NO: 2325111 - RNA, 19 nt, Artificial Sequence
  Description of Artificial Sequence: Synthetic oligonucleotide
cuuuuggcggcaccgggag

SEQ ID NO: 2325112 - RNA, 19 nt, Artificial Sequence
  Description of Artificial Sequence: Synthetic oligonucleotide
caagaugcaugacgagagg

SEQ ID NO: 2325113 - RNA, 19 nt, Artificial Sequence
  Description of Artificial Sequence: Synthetic oligonucleotide
uuucguuaguaauguugac

SEQ ID NO: 2325114 - RNA, 19 nt, Artificial Sequence
  Description of Artificial Sequence: Synthetic oligonucleotide
accaggacguacgauagug

SEQ ID NO: 2325115 - RNA, 19 nt, Artificial Sequence
  Description of Artificial Sequence: Synthetic oligonucleotide
uggagccuguguaaugaca

SEQ ID NO: 2325116 - RNA, 19 nt, Artificial Sequence
  Description of Artificial Sequence: Synthetic oligonucleotide
acaaccuccauugacugaa

SEQ ID NO: 2325117 - RNA, 19 nt, Artificial Sequence
  Description of Artificial Sequence: Synthetic oligonucleotide
uaugagcuaacagcagcug

SEQ ID NO: 2325118 - RNA, 19 nt, Artificial Sequence
  Description of Artificial Sequence: Synthetic oligonucleotide
cuacuguuaacuggugggc

SEQ ID NO: 2325119 - RNA, 19 nt, Artificial Sequence
  Description of Artificial Sequence: Synthetic oligonucleotide
uccauugacugaagagacu

SEQ ID NO: 2325120 - RNA, 19 nt, Artificial Sequence
  Description of Artificial Sequence: Synthetic oligonucleotide
acagccaucuauaauggaa

SEQ ID NO: 2325121 - RNA, 19 nt, Artificial Sequence
  Description of Artificial Sequence: Synthetic oligonucleotide
gaagagacuugguggguca

SEQ ID NO: 2325122 - RNA, 19 nt, Artificial Sequence
  Description of Artificial Sequence: Synthetic oligonucleotide
auccaaugcccucuguagu

SEQ ID NO: 2325123 - RNA, 19 nt, Artificial Sequence
  Description of Artificial Sequence: Synthetic oligonucleotide
gcugccgacgcucaucugg

SEQ ID NO: 2325124 - RNA, 19 nt, Artificial Sequence
  Description of Artificial Sequence: Synthetic oligonucleotide
gagaccuguggcugggcag

SEQ ID NO: 2325125 - RNA, 19 nt, Artificial Sequence
  Description of Artificial Sequence: Synthetic oligonucleotide
ucccauuugccuguuagau

SEQ ID NO: 2325126 - RNA, 19 nt, Artificial Sequence
  Description of Artificial Sequence: Synthetic oligonucleotide
gaauccaaugcccucugua

SEQ ID NO: 2325127 - RNA, 19 nt, Artificial Sequence
  Description of Artificial Sequence: Synthetic oligonucleotide
gcaagaugcaugacgagag

SEQ ID NO: 2325128 - RNA, 19 nt, Artificial Sequence
  Description of Artificial Sequence: Synthetic oligonucleotide
ucuguccauuagcaagaug

SEQ ID NO: 2325129 - RNA, 19 nt, Artificial Sequence
  Description of Artificial Sequence: Synthetic oligonucleotide
ucaucuacugugcgccgac

SEQ ID NO: 2325130 - RNA, 19 nt, Artificial Sequence
  Description of Artificial Sequence: Synthetic oligonucleotide
uggaauccaaugcccucug

SEQ ID NO: 2325131 - RNA, 19 nt, Artificial Sequence
  Description of Artificial Sequence: Synthetic oligonucleotide
augacgagagggagggagc

SEQ ID NO: 2325132 - RNA, 19 nt, Artificial Sequence
  Description of Artificial Sequence: Synthetic oligonucleotide
auaacagaaggcaucugaa

SEQ ID NO: 2325133 - RNA, 19 nt, Artificial Sequence
  Description of Artificial Sequence: Synthetic oligonucleotide
aagaacaggggcugcuguu

SEQ ID NO: 2325134 - RNA, 19 nt, Artificial Sequence
  Description of Artificial Sequence: Synthetic oligonucleotide
ucuacugugcgccgacguc

SEQ ID NO: 2325135 - RNA, 19 nt, Artificial Sequence
  Description of Artificial Sequence: Synthetic oligonucleotide
cauggacacaggucuggcc

SEQ ID NO: 2325136 - RNA, 19 nt, Artificial Sequence
  Description of Artificial Sequence: Synthetic oligonucleotide
agaugguggagccugugua

SEQ ID NO: 2325137 - RNA, 19 nt, Artificial Sequence
  Description of Artificial Sequence: Synthetic oligonucleotide
guacccaccaccauuccac

SEQ ID NO: 2325138 - RNA, 19 nt, Artificial Sequence
  Description of Artificial Sequence: Synthetic oligonucleotide
gcuuuuagucucaucuugg

SEQ ID NO: 2325139 - RNA, 19 nt, Artificial Sequence
  Description of Artificial Sequence: Synthetic oligonucleotide
aguacccaccaccauucca

SEQ ID NO: 2325140 - RNA, 19 nt, Artificial Sequence
  Description of Artificial Sequence: Synthetic oligonucleotide
gaauguugggcaccaugga

SEQ ID NO: 2325141 - RNA, 19 nt, Artificial Sequence
  Description of Artificial Sequence: Synthetic oligonucleotide
ggagccuguguaaugacag

SEQ ID NO: 2325142 - RNA, 19 nt, Artificial Sequence
  Description of Artificial Sequence: Synthetic oligonucleotide
uggacgggcugucaccaug

SEQ ID NO: 2325143 - RNA, 19 nt, Artificial Sequence
  Description of Artificial Sequence: Synthetic oligonucleotide
uagcaagaugcaugacgag

SEQ ID NO: 2325144 - RNA, 19 nt, Artificial Sequence
  Description of Artificial Sequence: Synthetic oligonucleotide
ggacguacgauagugggug

SEQ ID NO: 2325145 - RNA, 19 nt, Artificial Sequence
  Description of Artificial Sequence: Synthetic oligonucleotide
ugaagagacuugguggguc

SEQ ID NO: 2325146 - RNA, 19 nt, Artificial Sequence
  Description of Artificial Sequence: Synthetic oligonucleotide
uuuuggcggcaccgggagg

SEQ ID NO: 2325147 - RNA, 19 nt, Artificial Sequence
  Description of Artificial Sequence: Synthetic oligonucleotide
cagcuuccgcuuuuggcgg

SEQ ID NO: 2325148 - RNA, 19 nt, Artificial Sequence
  Description of Artificial Sequence: Synthetic oligonucleotide
gaugguggagccuguguaa

SEQ ID NO: 2325149 - RNA, 19 nt, Artificial Sequence
  Description of Artificial Sequence: Synthetic oligonucleotide
aucagggugcuggaugagg

SEQ ID NO: 2325150 - RNA, 19 nt, Artificial Sequence
  Description of Artificial Sequence: Synthetic oligonucleotide
cuucaucuacugugcgccg

SEQ ID NO: 2325151 - RNA, 19 nt, Artificial Sequence
  Description of Artificial Sequence: Synthetic oligonucleotide
auggaauccaaugcccucu

SEQ ID NO: 2325152 - RNA, 19 nt, Artificial Sequence
  Description of Artificial Sequence: Synthetic oligonucleotide
gaagaaccaggacguacga

SEQ ID NO: 2325153 - RNA, 19 nt, Artificial Sequence
  Description of Artificial Sequence: Synthetic oligonucleotide
ugugcgccgacgucguccc

SEQ ID NO: 2325154 - RNA, 19 nt, Artificial Sequence
  Description of Artificial Sequence: Synthetic oligonucleotide
agcacaggcauggucuguc

SEQ ID NO: 2325155 - RNA, 19 nt, Artificial Sequence
  Description of Artificial Sequence: Synthetic oligonucleotide
gaaguaaguucuucugccu

SEQ ID NO: 2325156 - RNA, 19 nt, Artificial Sequence
  Description of Artificial Sequence: Synthetic oligonucleotide
ugacgagagggagggagcc

SEQ ID NO: 2325157 - RNA, 19 nt, Artificial Sequence
  Description of Artificial Sequence: Synthetic oligonucleotide
aucuauaauggaauccaau

SEQ ID NO: 2325158 - RNA, 19 nt, Artificial Sequence
  Description of Artificial Sequence: Synthetic oligonucleotide
aagagacuuggugggucag

SEQ ID NO: 2325159 - RNA, 19 nt, Artificial Sequence
  Description of Artificial Sequence: Synthetic oligonucleotide
ggagaaauggagccacuac

SEQ ID NO: 2325160 - RNA, 19 nt, Artificial Sequence
  Description of Artificial Sequence: Synthetic oligonucleotide
ggaucauaaccuaagugga

SEQ ID NO: 2325161 - RNA, 19 nt, Artificial Sequence
  Description of Artificial Sequence: Synthetic oligonucleotide
uucugcucuggacgggcug

SEQ ID NO: 2325162 - RNA, 19 nt, Artificial Sequence
  Description of Artificial Sequence: Synthetic oligonucleotide
gugaaguggaucauaaccu

SEQ ID NO: 2325163 - RNA, 19 nt, Artificial Sequence
  Description of Artificial Sequence: Synthetic oligonucleotide
caguaggagaucccauuug

SEQ ID NO: 2325164 - RNA, 19 nt, Artificial Sequence
  Description of Artificial Sequence: Synthetic oligonucleotide
caaucuuuaugagcuaaca

SEQ ID NO: 2325165 - RNA, 19 nt, Artificial Sequence
  Description of Artificial Sequence: Synthetic oligonucleotide
aggggcugcuguuccaaag

SEQ ID NO: 2325166 - RNA, 19 nt, Artificial Sequence
  Description of Artificial Sequence: Synthetic oligonucleotide
caucuuggcuucugauggc

SEQ ID NO: 2325167 - RNA, 19 nt, Artificial Sequence
  Description of Artificial Sequence: Synthetic oligonucleotide
agagguuggggaaggaaga

SEQ ID NO: 2325168 - RNA, 19 nt, Artificial Sequence
  Description of Artificial Sequence: Synthetic oligonucleotide
guacgauaguggguguagg

SEQ ID NO: 2325169 - RNA, 19 nt, Artificial Sequence
  Description of Artificial Sequence: Synthetic oligonucleotide
aaugcccucuguagugcag

SEQ ID NO: 2325170 - RNA, 19 nt, Artificial Sequence
  Description of Artificial Sequence: Synthetic oligonucleotide
gugggccagguauaccagg

SEQ ID NO: 2325171 - RNA, 19 nt, Artificial Sequence
  Description of Artificial Sequence: Synthetic oligonucleotide
ucgcugccgacgcucaucu

SEQ ID NO: 2325172 - RNA, 19 nt, Artificial Sequence
  Description of Artificial Sequence: Synthetic oligonucleotide
uuaacuggugggccaggua

SEQ ID NO: 2325173 - RNA, 19 nt, Artificial Sequence
  Description of Artificial Sequence: Synthetic oligonucleotide
uguuccaaaggagguccug

SEQ ID NO: 2325174 - RNA, 19 nt, Artificial Sequence
  Description of Artificial Sequence: Synthetic oligonucleotide
agcuuccgcuuuuggcggc

SEQ ID NO: 2325175 - RNA, 19 nt, Artificial Sequence
  Description of Artificial Sequence: Synthetic oligonucleotide
agagaccuguggcugggca

SEQ ID NO: 2325176 - RNA, 19 nt, Artificial Sequence
  Description of Artificial Sequence: Synthetic oligonucleotide
auuugccuguuagauggug

SEQ ID NO: 2325177 - RNA, 19 nt, Artificial Sequence
  Description of Artificial Sequence: Synthetic oligonucleotide
cagcugaauguucugagaa

SEQ ID NO: 2325178 - RNA, 19 nt, Artificial Sequence
  Description of Artificial Sequence: Synthetic oligonucleotide
ggaucuucaucuacugugc

SEQ ID NO: 2325179 - RNA, 19 nt, Artificial Sequence
  Description of Artificial Sequence: Synthetic oligonucleotide
agaugcaugacgagaggga

SEQ ID NO: 2325180 - RNA, 19 nt, Artificial Sequence
  Description of Artificial Sequence: Synthetic oligonucleotide
uucaucuacugugcgccga

SEQ ID NO: 2325181 - RNA, 19 nt, Artificial Sequence
  Description of Artificial Sequence: Synthetic oligonucleotide
acaggcauggucuguccau

SEQ ID NO: 2325182 - RNA, 19 nt, Artificial Sequence
  Description of Artificial Sequence: Synthetic oligonucleotide
uuagaugguggagccugug

SEQ ID NO: 2325183 - RNA, 19 nt, Artificial Sequence
  Description of Artificial Sequence: Synthetic oligonucleotide
guguaaugacagagguugg

SEQ ID NO: 2325184 - RNA, 19 nt, Artificial Sequence
  Description of Artificial Sequence: Synthetic oligonucleotide
agauggagaaauggagcca

SEQ ID NO: 2325185 - RNA, 19 nt, Artificial Sequence
  Description of Artificial Sequence: Synthetic oligonucleotide
acuuggugggucagagugg

SEQ ID NO: 2325186 - RNA, 19 nt, Artificial Sequence
  Description of Artificial Sequence: Synthetic oligonucleotide
gaaguggaucauaaccuaa

SEQ ID NO: 2325187 - RNA, 19 nt, Artificial Sequence
  Description of Artificial Sequence: Synthetic oligonucleotide
acgagagggagggagccag

SEQ ID NO: 2325188 - RNA, 19 nt, Artificial Sequence
  Description of Artificial Sequence: Synthetic oligonucleotide
agugcuaggggugggcuga

SEQ ID NO: 2325189 - RNA, 19 nt, Artificial Sequence
  Description of Artificial Sequence: Synthetic oligonucleotide
agugcagugacagggcaau

SEQ ID NO: 2325190 - RNA, 19 nt, Artificial Sequence
  Description of Artificial Sequence: Synthetic oligonucleotide
cuaggggugggcugagcug

SEQ ID NO: 2325191 - RNA, 19 nt, Artificial Sequence
  Description of Artificial Sequence: Synthetic oligonucleotide
guagugcagugacagggca

SEQ ID NO: 2325192 - RNA, 19 nt, Artificial Sequence
  Description of Artificial Sequence: Synthetic oligonucleotide
gaggacacccacagcuucc

SEQ ID NO: 2325193 - RNA, 19 nt, Artificial Sequence
  Description of Artificial Sequence: Synthetic oligonucleotide
augcaugacgagagggagg

SEQ ID NO: 2325194 - RNA, 19 nt, Artificial Sequence
  Description of Artificial Sequence: Synthetic oligonucleotide
auaguggguguagggguag

SEQ ID NO: 2325195 - RNA, 19 nt, Artificial Sequence
  Description of Artificial Sequence: Synthetic oligonucleotide
cuaaguggagaggcagaag

SEQ ID NO: 2325196 - RNA, 19 nt, Artificial Sequence
  Description of Artificial Sequence: Synthetic oligonucleotide
caccauuccacaaccucca

SEQ ID NO: 2325197 - RNA, 19 nt, Artificial Sequence
  Description of Artificial Sequence: Synthetic oligonucleotide
ugccuguuagaugguggag

SEQ ID NO: 2325198 - RNA, 19 nt, Artificial Sequence
  Description of Artificial Sequence: Synthetic oligonucleotide
cauaggguggccagaugga

SEQ ID NO: 2325199 - RNA, 19 nt, Artificial Sequence
  Description of Artificial Sequence: Synthetic oligonucleotide
uggagaaauggagccacua

SEQ ID NO: 2325200 - RNA, 19 nt, Artificial Sequence
  Description of Artificial Sequence: Synthetic oligonucleotide
gacagccaucuauaaugga

SEQ ID NO: 2325201 - RNA, 19 nt, Artificial Sequence
  Description of Artificial Sequence: Synthetic oligonucleotide
uacugugcgccgacgucgu

SEQ ID NO: 2325202 - RNA, 19 nt, Artificial Sequence
  Description of Artificial Sequence: Synthetic oligonucleotide
uucugagaaguaaguucuu

SEQ ID NO: 2325203 - RNA, 19 nt, Artificial Sequence
  Description of Artificial Sequence: Synthetic oligonucleotide
cuguuaacuggugggccag

SEQ ID NO: 2325204 - RNA, 19 nt, Artificial Sequence
  Description of Artificial Sequence: Synthetic oligonucleotide
ugauggcauaggguggcca

SEQ ID NO: 2325205 - RNA, 19 nt, Artificial Sequence
  Description of Artificial Sequence: Synthetic oligonucleotide
gcauggucuguccauuagc

SEQ ID NO: 2325206 - RNA, 19 nt, Artificial Sequence
  Description of Artificial Sequence: Synthetic oligonucleotide
auggucuguccauuagcaa

SEQ ID NO: 2325207 - RNA, 19 nt, Artificial Sequence
  Description of Artificial Sequence: Synthetic oligonucleotide
auguucugagaaguaaguu

SEQ ID NO: 2325208 - RNA, 19 nt, Artificial Sequence
  Description of Artificial Sequence: Synthetic oligonucleotide
aaaucgcugccgacgcuca

SEQ ID NO: 2325209 - RNA, 19 nt, Artificial Sequence
  Description of Artificial Sequence: Synthetic oligonucleotide
ucauuucguuaguaauguu

SEQ ID NO: 2325210 - RNA, 19 nt, Artificial Sequence
  Description of Artificial Sequence: Synthetic oligonucleotide
guuccaaaggagguccuga

SEQ ID NO: 2325211 - RNA, 19 nt, Artificial Sequence
  Description of Artificial Sequence: Synthetic oligonucleotide
uacccaccaccauuccaca

SEQ ID NO: 2325212 - RNA, 19 nt, Artificial Sequence
  Description of Artificial Sequence: Synthetic oligonucleotide
acgggcugucaccauggug

SEQ ID NO: 2325213 - RNA, 19 nt, Artificial Sequence
  Description of Artificial Sequence: Synthetic oligonucleotide
cugugcgccgacgucgucc

SEQ ID NO: 2325214 - RNA, 19 nt, Artificial Sequence
  Description of Artificial Sequence: Synthetic oligonucleotide
aucgcugccgacgcucauc

SEQ ID NO: 2325215 - RNA, 19 nt, Artificial Sequence
  Description of Artificial Sequence: Synthetic oligonucleotide
guggcugacagccaucuau

SEQ ID NO: 2325216 - RNA, 19 nt, Artificial Sequence
  Description of Artificial Sequence: Synthetic oligonucleotide
uaucagggugcuggaugag

SEQ ID NO: 2325217 - RNA, 19 nt, Artificial Sequence
  Description of Artificial Sequence: Synthetic oligonucleotide
ggcauggucuguccauuag

SEQ ID NO: 2325218 - RNA, 19 nt, Artificial Sequence
  Description of Artificial Sequence: Synthetic oligonucleotide
auggagccacuacuguuaa

SEQ ID NO: 2325219 - RNA, 19 nt, Artificial Sequence
  Description of Artificial Sequence: Synthetic oligonucleotide
gagccaguaggagauccca

SEQ ID NO: 2325220 - RNA, 19 nt, Artificial Sequence
  Description of Artificial Sequence: Synthetic oligonucleotide
gccuguguaaugacagagg

SEQ ID NO: 2325221 - RNA, 19 nt, Artificial Sequence
  Description of Artificial Sequence: Synthetic oligonucleotide
gcaccauggacacaggucu

SEQ ID NO: 2325222 - RNA, 19 nt, Artificial Sequence
  Description of Artificial Sequence: Synthetic oligonucleotide
ggagccacuacuguuaacu

SEQ ID NO: 2325223 - RNA, 19 nt, Artificial Sequence
  Description of Artificial Sequence: Synthetic oligonucleotide
gauaguggguguaggggua

SEQ ID NO: 2325224 - RNA, 19 nt, Artificial Sequence
  Description of Artificial Sequence: Synthetic oligonucleotide
uugggugaaguggaucaua

SEQ ID NO: 2325225 - RNA, 19 nt, Artificial Sequence
  Description of Artificial Sequence: Synthetic oligonucleotide
agacuuggugggucagagu

SEQ ID NO: 2325226 - RNA, 19 nt, Artificial Sequence
  Description of Artificial Sequence: Synthetic oligonucleotide
gagccuguguaaugacaga

SEQ ID NO: 2325227 - RNA, 19 nt, Artificial Sequence
  Description of Artificial Sequence: Synthetic oligonucleotide
ccaggacguacgauagugg

SEQ ID NO: 2325228 - RNA, 19 nt, Artificial Sequence
  Description of Artificial Sequence: Synthetic oligonucleotide
gaguugggugaaguggauc

SEQ ID NO: 2325229 - RNA, 19 nt, Artificial Sequence
  Description of Artificial Sequence: Synthetic oligonucleotide
uuccgcuuuuggcggcacc

SEQ ID NO: 2325230 - RNA, 19 nt, Artificial Sequence
  Description of Artificial Sequence: Synthetic oligonucleotide
cccucuguagugcagugac

SEQ ID NO: 2325231 - RNA, 19 nt, Artificial Sequence
  Description of Artificial Sequence: Synthetic oligonucleotide
caaccuccauugacugaag

SEQ ID NO: 2325232 - RNA, 19 nt, Artificial Sequence
  Description of Artificial Sequence: Synthetic oligonucleotide
gagcuacuucauuucguua

SEQ ID NO: 2325233 - RNA, 19 nt, Artificial Sequence
  Description of Artificial Sequence: Synthetic oligonucleotide
ggucuggccagcgaaauaa

SEQ ID NO: 2325234 - RNA, 19 nt, Artificial Sequence
  Description of Artificial Sequence: Synthetic oligonucleotide
aggacguacgauagugggu

SEQ ID NO: 2325235 - RNA, 19 nt, Artificial Sequence
  Description of Artificial Sequence: Synthetic oligonucleotide
cauuagcaagaugcaugac

SEQ ID NO: 2325236 - RNA, 19 nt, Artificial Sequence
  Description of Artificial Sequence: Synthetic oligonucleotide
ccacaaccuccauugacug

SEQ ID NO: 2325237 - RNA, 19 nt, Artificial Sequence
  Description of Artificial Sequence: Synthetic oligonucleotide
ggcaccgggaggcugcagc

SEQ ID NO: 2325238 - RNA, 19 nt, Artificial Sequence
  Description of Artificial Sequence: Synthetic oligonucleotide
ggaggacacccacagcuuc

SEQ ID NO: 2325239 - RNA, 19 nt, Artificial Sequence
  Description of Artificial Sequence: Synthetic oligonucleotide
caucuacugugcgccgacg

SEQ ID NO: 2325240 - RNA, 19 nt, Artificial Sequence
  Description of Artificial Sequence: Synthetic oligonucleotide
ccuccauugacugaagaga

SEQ ID NO: 2325241 - RNA, 19 nt, Artificial Sequence
  Description of Artificial Sequence: Synthetic oligonucleotide
gggucagaguggcuuuuag

SEQ ID NO: 2325242 - RNA, 19 nt, Artificial Sequence
  Description of Artificial Sequence: Synthetic oligonucleotide
ggaugggguaucagggugc

SEQ ID NO: 2325243 - RNA, 19 nt, Artificial Sequence
  Description of Artificial Sequence: Synthetic oligonucleotide
ggcaucugaacuggaggcc

SEQ ID NO: 2325244 - RNA, 19 nt, Artificial Sequence
  Description of Artificial Sequence: Synthetic oligonucleotide
cccauuugccuguuagaug

SEQ ID NO: 2325245 - RNA, 19 nt, Artificial Sequence
  Description of Artificial Sequence: Synthetic oligonucleotide
gagggagccaguaggagau

SEQ ID NO: 2325246 - RNA, 19 nt, Artificial Sequence
  Description of Artificial Sequence: Synthetic oligonucleotide
cagccaucuauaauggaau

SEQ ID NO: 2325247 - RNA, 19 nt, Artificial Sequence
  Description of Artificial Sequence: Synthetic oligonucleotide
aaucgcugccgacgcucau

SEQ ID NO: 2325248 - RNA, 19 nt, Artificial Sequence
  Description of Artificial Sequence: Synthetic oligonucleotide
uggcauaggguggccagau

SEQ ID NO: 2325249 - RNA, 19 nt, Artificial Sequence
  Description of Artificial Sequence: Synthetic oligonucleotide
ggacgggcugucaccaugg

SEQ ID NO: 2325250 - RNA, 19 nt, Artificial Sequence
  Description of Artificial Sequence: Synthetic oligonucleotide
agagacuuggugggucaga

SEQ ID NO: 2325251 - RNA, 19 nt, Artificial Sequence
  Description of Artificial Sequence: Synthetic oligonucleotide
acuggaggcccuggcagca

SEQ ID NO: 2325252 - RNA, 19 nt, Artificial Sequence
  Description of Artificial Sequence: Synthetic oligonucleotide
agcucgguuucgcucuaaa

SEQ ID NO: 2325253 - RNA, 19 nt, Artificial Sequence
  Description of Artificial Sequence: Synthetic oligonucleotide
caguacccaccaccauucc

SEQ ID NO: 2325254 - RNA, 19 nt, Artificial Sequence
  Description of Artificial Sequence: Synthetic oligonucleotide
gcaaucuuuaugagcuaac

SEQ ID NO: 2325255 - RNA, 19 nt, Artificial Sequence
  Description of Artificial Sequence: Synthetic oligonucleotide
acacaggucuggccagcga

SEQ ID NO: 2325256 - RNA, 19 nt, Artificial Sequence
  Description of Artificial Sequence: Synthetic oligonucleotide
gggagccaguaggagaucc

SEQ ID NO: 2325257 - RNA, 19 nt, Artificial Sequence
  Description of Artificial Sequence: Synthetic oligonucleotide
caaugcccucuguagugca

SEQ ID NO: 2325258 - RNA, 19 nt, Artificial Sequence
  Description of Artificial Sequence: Synthetic oligonucleotide
uggagccacuacuguuaac

SEQ ID NO: 2325259 - RNA, 19 nt, Artificial Sequence
  Description of Artificial Sequence: Synthetic oligonucleotide
gguuaagaacaggggcugc

SEQ ID NO: 2325260 - RNA, 19 nt, Artificial Sequence
  Description of Artificial Sequence: Synthetic oligonucleotide
acgcucaucuggaucuuca

SEQ ID NO: 2325261 - RNA, 19 nt, Artificial Sequence
  Description of Artificial Sequence: Synthetic oligonucleotide
cugagcuacuucauuucgu

SEQ ID NO: 2325262 - RNA, 19 nt, Artificial Sequence
  Description of Artificial Sequence: Synthetic oligonucleotide
aacuggugggccagguaua

SEQ ID NO: 2325263 - RNA, 19 nt, Artificial Sequence
  Description of Artificial Sequence: Synthetic oligonucleotide
ggcaaucuuuaugagcuaa

SEQ ID NO: 2325264 - RNA, 19 nt, Artificial Sequence
  Description of Artificial Sequence: Synthetic oligonucleotide
ggcaccauggacacagguc

SEQ ID NO: 2325265 - RNA, 19 nt, Artificial Sequence
  Description of Artificial Sequence: Synthetic oligonucleotide
guggccagauggagaaaug

SEQ ID NO: 2325266 - RNA, 19 nt, Artificial Sequence
  Description of Artificial Sequence: Synthetic oligonucleotide
cugccgacgcucaucugga

SEQ ID NO: 2325267 - RNA, 19 nt, Artificial Sequence
  Description of Artificial Sequence: Synthetic oligonucleotide
cuaacugagcuacuucauu

SEQ ID NO: 2325268 - RNA, 19 nt, Artificial Sequence
  Description of Artificial Sequence: Synthetic oligonucleotide
agaguggcuuuuagucuca

SEQ ID NO: 2325269 - RNA, 19 nt, Artificial Sequence
  Description of Artificial Sequence: Synthetic oligonucleotide
cacaggcauggucugucca

SEQ ID NO: 2325270 - RNA, 19 nt, Artificial Sequence
  Description of Artificial Sequence: Synthetic oligonucleotide
gggugaaguggaucauaac

SEQ ID NO: 2325271 - RNA, 19 nt, Artificial Sequence
  Description of Artificial Sequence: Synthetic oligonucleotide
aguggguguagggguagaa

SEQ ID NO: 2325272 - RNA, 19 nt, Artificial Sequence
  Description of Artificial Sequence: Synthetic oligonucleotide
accauuccacaaccuccau

SEQ ID NO: 2325273 - RNA, 19 nt, Artificial Sequence
  Description of Artificial Sequence: Synthetic oligonucleotide
gcagcacaggcauggucug

SEQ ID NO: 2325274 - RNA, 19 nt, Artificial Sequence
  Description of Artificial Sequence: Synthetic oligonucleotide
cugauggcauaggguggcc

SEQ ID NO: 2325275 - RNA, 19 nt, Artificial Sequence
  Description of Artificial Sequence: Synthetic oligonucleotide
acugugcgccgacgucguc

SEQ ID NO: 2325276 - RNA, 19 nt, Artificial Sequence
  Description of Artificial Sequence: Synthetic oligonucleotide
ggguguagggguagaaauc

SEQ ID NO: 2325277 - RNA, 19 nt, Artificial Sequence
  Description of Artificial Sequence: Synthetic oligonucleotide
cauuacucagcugaauguu

SEQ ID NO: 2325278 - RNA, 19 nt, Artificial Sequence
  Description of Artificial Sequence: Synthetic oligonucleotide
ggagaucccauuugccugu

SEQ ID NO: 2325279 - RNA, 19 nt, Artificial Sequence
  Description of Artificial Sequence: Synthetic oligonucleotide
gccacuacuguuaacuggu

SEQ ID NO: 2325280 - RNA, 19 nt, Artificial Sequence
  Description of Artificial Sequence: Synthetic oligonucleotide
gacgcucaucuggaucuuc

SEQ ID NO: 2325281 - RNA, 19 nt, Artificial Sequence
  Description of Artificial Sequence: Synthetic oligonucleotide
ccaaugcccucuguagugc

SEQ ID NO: 2325282 - RNA, 19 nt, Artificial Sequence
  Description of Artificial Sequence: Synthetic oligonucleotide
gaugggguaucagggugcu

SEQ ID NO: 2325283 - RNA, 19 nt, Artificial Sequence
  Description of Artificial Sequence: Synthetic oligonucleotide
ggagccaguaggagauccc

SEQ ID NO: 2325284 - RNA, 19 nt, Artificial Sequence
  Description of Artificial Sequence: Synthetic oligonucleotide
ggucagaguggcuuuuagu

SEQ ID NO: 2325285 - RNA, 19 nt, Artificial Sequence
  Description of Artificial Sequence: Synthetic oligonucleotide
gucuggccagcgaaauaac

SEQ ID NO: 2325286 - RNA, 19 nt, Artificial Sequence
  Description of Artificial Sequence: Synthetic oligonucleotide
cguacgauaguggguguag

SEQ ID NO: 2325287 - RNA, 19 nt, Artificial Sequence
  Description of Artificial Sequence: Synthetic oligonucleotide
gacgagagggagggagcca

SEQ ID NO: 2325288 - RNA, 19 nt, Artificial Sequence
  Description of Artificial Sequence: Synthetic oligonucleotide
gcucuggacgggcugucac

SEQ ID NO: 2325289 - RNA, 19 nt, Artificial Sequence
  Description of Artificial Sequence: Synthetic oligonucleotide
agggagccaguaggagauc

SEQ ID NO: 2325290 - RNA, 19 nt, Artificial Sequence
  Description of Artificial Sequence: Synthetic oligonucleotide
ugggucagaguggcuuuua

SEQ ID NO: 2325291 - RNA, 19 nt, Artificial Sequence
  Description of Artificial Sequence: Synthetic oligonucleotide
cguuaguaauguugacuuc

SEQ ID NO: 2325292 - RNA, 19 nt, Artificial Sequence
  Description of Artificial Sequence: Synthetic oligonucleotide
acguacgauagugggugua

SEQ ID NO: 2325293 - RNA, 19 nt, Artificial Sequence
  Description of Artificial Sequence: Synthetic oligonucleotide
gacguacgauagugggugu

SEQ ID NO: 2325294 - RNA, 19 nt, Artificial Sequence
  Description of Artificial Sequence: Synthetic oligonucleotide
gccgacgcucaucuggauc

SEQ ID NO: 2325295 - RNA, 19 nt, Artificial Sequence
  Description of Artificial Sequence: Synthetic oligonucleotide
ugcuaggggugggcugagc

SEQ ID NO: 2325296 - RNA, 19 nt, Artificial Sequence
  Description of Artificial Sequence: Synthetic oligonucleotide
acccacagcuuccgcuuuu

SEQ ID NO: 2325297 - RNA, 19 nt, Artificial Sequence
  Description of Artificial Sequence: Synthetic oligonucleotide
agaucccauuugccuguua

SEQ ID NO: 2325298 - RNA, 19 nt, Artificial Sequence
  Description of Artificial Sequence: Synthetic oligonucleotide
ggcugacagccaucuauaa

SEQ ID NO: 2325299 - RNA, 19 nt, Artificial Sequence
  Description of Artificial Sequence: Synthetic oligonucleotide
ggcaguacccaccaccauu

SEQ ID NO: 2325300 - RNA, 19 nt, Artificial Sequence
  Description of Artificial Sequence: Synthetic oligonucleotide
gcucgguuucgcucuaaaa

SEQ ID NO: 2325301 - RNA, 19 nt, Artificial Sequence
  Description of Artificial Sequence: Synthetic oligonucleotide
ccacuacuguuaacuggug

SEQ ID NO: 2325302 - RNA, 19 nt, Artificial Sequence
  Description of Artificial Sequence: Synthetic oligonucleotide
caucugaacuggaggcccu

SEQ ID NO: 2325303 - RNA, 19 nt, Artificial Sequence
  Description of Artificial Sequence: Synthetic oligonucleotide
ccauggacacaggucuggc

SEQ ID NO: 2325304 - RNA, 19 nt, Artificial Sequence
  Description of Artificial Sequence: Synthetic oligonucleotide
gcgaaauaacagaaggcau

SEQ ID NO: 2325305 - RNA, 19 nt, Artificial Sequence
  Description of Artificial Sequence: Synthetic oligonucleotide
ccgacgcucaucuggaucu

SEQ ID NO: 2325306 - RNA, 19 nt, Artificial Sequence
  Description of Artificial Sequence: Synthetic oligonucleotide
gcuuuuggcggcaccggga

SEQ ID NO: 2325307 - RNA, 19 nt, Artificial Sequence
  Description of Artificial Sequence: Synthetic oligonucleotide
ggaugaggaucugguucug

SEQ ID NO: 2325308 - RNA, 19 nt, Artificial Sequence
  Description of Artificial Sequence: Synthetic oligonucleotide
ugccgacgcucaucuggau

SEQ ID NO: 2325309 - RNA, 19 nt, Artificial Sequence
  Description of Artificial Sequence: Synthetic oligonucleotide
gggguaucagggugcugga

SEQ ID NO: 2325310 - RNA, 19 nt, Artificial Sequence
  Description of Artificial Sequence: Synthetic oligonucleotide
cgcuuuuggcggcaccggg

SEQ ID NO: 2325311 - RNA, 19 nt, Artificial Sequence
  Description of Artificial Sequence: Synthetic oligonucleotide
cuuccgcuuuuggcggcac

SEQ ID NO: 2325312 - RNA, 19 nt, Artificial Sequence
  Description of Artificial Sequence: Synthetic oligonucleotide
uuggcggcaccgggaggcu

SEQ ID NO: 2325313 - RNA, 19 nt, Artificial Sequence
  Description of Artificial Sequence: Synthetic oligonucleotide
cauuugccuguuagauggu

SEQ ID NO: 2325314 - RNA, 19 nt, Artificial Sequence
  Description of Artificial Sequence: Synthetic oligonucleotide
ggcggcaccgggaggcugc

SEQ ID NO: 2325315 - RNA, 19 nt, Artificial Sequence
  Description of Artificial Sequence: Synthetic oligonucleotide
ccauugacugaagagacuu

SEQ ID NO: 2325316 - RNA, 19 nt, Artificial Sequence
  Description of Artificial Sequence: Synthetic oligonucleotide
gcaggggaugggguaucag

SEQ ID NO: 2325317 - RNA, 19 nt, Artificial Sequence
  Description of Artificial Sequence: Synthetic oligonucleotide
cgauaguggguguaggggu

SEQ ID NO: 2325318 - RNA, 19 nt, Artificial Sequence
  Description of Artificial Sequence: Synthetic oligonucleotide
ccagguauaccaggaaugu

SEQ ID NO: 2325319 - RNA, 19 nt, Artificial Sequence
  Description of Artificial Sequence: Synthetic oligonucleotide
gccaguaggagaucccauu

SEQ ID NO: 2325320 - RNA, 19 nt, Artificial Sequence
  Description of Artificial Sequence: Synthetic oligonucleotide
cugcucuggacgggcuguc

SEQ ID NO: 2325321 - RNA, 19 nt, Artificial Sequence
  Description of Artificial Sequence: Synthetic oligonucleotide
caccgggaggcugcagcuc

SEQ ID NO: 2325322 - RNA, 19 nt, Artificial Sequence
  Description of Artificial Sequence: Synthetic oligonucleotide
caccauggugcuggcagua

SEQ ID NO: 2325323 - RNA, 19 nt, Artificial Sequence
  Description of Artificial Sequence: Synthetic oligonucleotide
ccgcuuuuggcggcaccgg

SEQ ID NO: 2325324 - RNA, 19 nt, Artificial Sequence
  Description of Artificial Sequence: Synthetic oligonucleotide
cccagugcuaggggugggc

SEQ ID NO: 2325325 - RNA, 19 nt, Artificial Sequence
  Description of Artificial Sequence: Synthetic oligonucleotide
caggggcugcuguuccaaa

SEQ ID NO: 2325326 - RNA, 19 nt, Artificial Sequence
  Description of Artificial Sequence: Synthetic oligonucleotide
ggugggucagaguggcuuu

SEQ ID NO: 2325327 - RNA, 19 nt, Artificial Sequence
  Description of Artificial Sequence: Synthetic oligonucleotide
cuguuagaugguggagccu

SEQ ID NO: 2325328 - RNA, 19 nt, Artificial Sequence
  Description of Artificial Sequence: Synthetic oligonucleotide
guucugcucuggacgggcu

SEQ ID NO: 2325329 - RNA, 19 nt, Artificial Sequence
  Description of Artificial Sequence: Synthetic oligonucleotide
cagguauaccaggaauguu

SEQ ID NO: 2325330 - RNA, 19 nt, Artificial Sequence
  Description of Artificial Sequence: Synthetic oligonucleotide
ggggugggcugagcuggag

SEQ ID NO: 2325331 - RNA, 19 nt, Artificial Sequence
  Description of Artificial Sequence: Synthetic oligonucleotide
caggucuggccagcgaaau

SEQ ID NO: 2325332 - RNA, 19 nt, Artificial Sequence
  Description of Artificial Sequence: Synthetic oligonucleotide
gcaccgggaggcugcagcu

SEQ ID NO: 2325333 - RNA, 19 nt, Artificial Sequence
  Description of Artificial Sequence: Synthetic oligonucleotide
ggcaggggaugggguauca

SEQ ID NO: 2325334 - RNA, 19 nt, Artificial Sequence
  Description of Artificial Sequence: Synthetic oligonucleotide
gggcugucaccauggugcu

SEQ ID NO: 2325335 - RNA, 19 nt, Artificial Sequence
  Description of Artificial Sequence: Synthetic oligonucleotide
gcuuccgcuuuuggcggca

SEQ ID NO: 2325336 - RNA, 19 nt, Artificial Sequence
  Description of Artificial Sequence: Synthetic oligonucleotide
gugcgccgacgucgucccc

SEQ ID NO: 2325337 - RNA, 19 nt, Artificial Sequence
  Description of Artificial Sequence: Synthetic oligonucleotide
gcagaagaaccaggacgua

SEQ ID NO: 2325338 - RNA, 19 nt, Artificial Sequence
  Description of Artificial Sequence: Synthetic oligonucleotide
caggcauggucuguccauu

SEQ ID NO: 2325339 - RNA, 19 nt, Artificial Sequence
  Description of Artificial Sequence: Synthetic oligonucleotide
ccauuccacaaccuccauu

SEQ ID NO: 2325340 - RNA, 19 nt, Artificial Sequence
  Description of Artificial Sequence: Synthetic oligonucleotide
gugggucagaguggcuuuu

SEQ ID NO: 2325341 - RNA, 19 nt, Artificial Sequence
  Description of Artificial Sequence: Synthetic oligonucleotide
cagcacaggcauggucugu

SEQ ID NO: 2325342 - RNA, 19 nt, Artificial Sequence
  Description of Artificial Sequence: Synthetic oligonucleotide
gcagcucgguuucgcucua

SEQ ID NO: 2325343 - RNA, 19 nt, Artificial Sequence
  Description of Artificial Sequence: Synthetic oligonucleotide
cuggacgggcugucaccau

SEQ ID NO: 2325344 - RNA, 19 nt, Artificial Sequence
  Description of Artificial Sequence: Synthetic oligonucleotide
gggaggacacccacagcuu

SEQ ID NO: 2325345 - RNA, 19 nt, Artificial Sequence
  Description of Artificial Sequence: Synthetic oligonucleotide
gcaugacgagagggaggga

SEQ ID NO: 2325346 - RNA, 19 nt, Artificial Sequence
  Description of Artificial Sequence: Synthetic oligonucleotide
cagcucgguuucgcucuaa

SEQ ID NO: 2325347 - RNA, 19 nt, Artificial Sequence
  Description of Artificial Sequence: Synthetic oligonucleotide
ggguaucagggugcuggau

SEQ ID NO: 2325348 - RNA, 19 nt, Artificial Sequence
  Description of Artificial Sequence: Synthetic oligonucleotide
cgcugccgacgcucaucug

SEQ ID NO: 2325349 - RNA, 19 nt, Artificial Sequence
  Description of Artificial Sequence: Synthetic oligonucleotide
gcggcaccgggaggcugca

SEQ ID NO: 2325350 - RNA, 19 nt, Artificial Sequence
  Description of Artificial Sequence: Synthetic oligonucleotide
cggcaccgggaggcugcag

SEQ ID NO: 2325351 - RNA, 19 nt, Artificial Sequence
  Description of Artificial Sequence: Synthetic oligonucleotide
cgacgcucaucuggaucuu

SEQ ID NO: 2325352 - RNA, 19 nt, Artificial Sequence
  Description of Artificial Sequence: Synthetic oligonucleotide
aaccauuucaucucaaccg

SEQ ID NO: 2325353 - RNA, 19 nt, Artificial Sequence
  Description of Artificial Sequence: Synthetic oligonucleotide
  modified_base (5)..(5): a, c, u, g, unknown or other
uuuunuuacauuucuuggg

SEQ ID NO: 2325354 - RNA, 19 nt, Artificial Sequence
  Description of Artificial Sequence: Synthetic oligonucleotide
uguuggaucauaagaaagg

SEQ ID NO: 2325355 - RNA, 19 nt, Artificial Sequence
  Description of Artificial Sequence: Synthetic oligonucleotide
uauuauaucugcauagcgc

SEQ ID NO: 2325356 - RNA, 19 nt, Artificial Sequence
  Description of Artificial Sequence: Synthetic oligonucleotide
  modified_base (4)..(4): a, c, u, g, unknown or other
uuunuuacauuucuuggga

SEQ ID NO: 2325357 - RNA, 19 nt, Artificial Sequence
  Description of Artificial Sequence: Synthetic oligonucleotide
uucuucaaaagcaucaacc

SEQ ID NO: 2325358 - RNA, 19 nt, Artificial Sequence
  Description of Artificial Sequence: Synthetic oligonucleotide
aucauaagaaaggauagcc

SEQ ID NO: 2325359 - RNA, 19 nt, Artificial Sequence
  Description of Artificial Sequence: Synthetic oligonucleotide
agaaaggauagccacaagg

SEQ ID NO: 2325360 - RNA, 19 nt, Artificial Sequence
  Description of Artificial Sequence: Synthetic oligonucleotide
cucuuaaacacuuuggcgc

SEQ ID NO: 2325361 - RNA, 19 nt, Artificial Sequence
  Description of Artificial Sequence: Synthetic oligonucleotide
aaauccaauguuucggguc

SEQ ID NO: 2325362 - RNA, 19 nt, Artificial Sequence
  Description of Artificial Sequence: Synthetic oligonucleotide
aacuauuuugucucagagg

SEQ ID NO: 2325363 - RNA, 19 nt, Artificial Sequence
  Description of Artificial Sequence: Synthetic oligonucleotide
ucuuuaauagcugaugucc

SEQ ID NO: 2325364 - RNA, 19 nt, Artificial Sequence
  Description of Artificial Sequence: Synthetic oligonucleotide
uuuacuuuucuguaaggag

SEQ ID NO: 2325365 - RNA, 19 nt, Artificial Sequence
  Description of Artificial Sequence: Synthetic oligonucleotide
acuaaugacccucuauccc

SEQ ID NO: 2325366 - RNA, 19 nt, Artificial Sequence
  Description of Artificial Sequence: Synthetic oligonucleotide
uuuguaggcaacuauuuug

SEQ ID NO: 2325367 - RNA, 19 nt, Artificial Sequence
  Description of Artificial Sequence: Synthetic oligonucleotide
cauuuugaaccaaauaacc

SEQ ID NO: 2325368 - RNA, 19 nt, Artificial Sequence
  Description of Artificial Sequence: Synthetic oligonucleotide
uuacuuuucuguaaggaga

SEQ ID NO: 2325369 - RNA, 19 nt, Artificial Sequence
  Description of Artificial Sequence: Synthetic oligonucleotide
aauccugucaaacuugcca

SEQ ID NO: 2325370 - RNA, 19 nt, Artificial Sequence
  Description of Artificial Sequence: Synthetic oligonucleotide
auuauaucugcauagcgcu

SEQ ID NO: 2325371 - RNA, 19 nt, Artificial Sequence
  Description of Artificial Sequence: Synthetic oligonucleotide
uguauauggaagauucugc

SEQ ID NO: 2325372 - RNA, 19 nt, Artificial Sequence
  Description of Artificial Sequence: Synthetic oligonucleotide
uaagaaauguguccaaaug

SEQ ID NO: 2325373 - RNA, 19 nt, Artificial Sequence
  Description of Artificial Sequence: Synthetic oligonucleotide
uaaccuuuuaaguucagca

SEQ ID NO: 2325374 - RNA, 19 nt, Artificial Sequence
  Description of Artificial Sequence: Synthetic oligonucleotide
cucuacaccaacuacagug

SEQ ID NO: 2325375 - RNA, 19 nt, Artificial Sequence
  Description of Artificial Sequence: Synthetic oligonucleotide
aaguucagcaucuggaaca

SEQ ID NO: 2325376 - RNA, 19 nt, Artificial Sequence
  Description of Artificial Sequence: Synthetic oligonucleotide
accauuucaucucaaccgc

SEQ ID NO: 2325377 - RNA, 19 nt, Artificial Sequence
  Description of Artificial Sequence: Synthetic oligonucleotide
uggaucauaagaaaggaua

SEQ ID NO: 2325378 - RNA, 19 nt, Artificial Sequence
  Description of Artificial Sequence: Synthetic oligonucleotide
accgcuuuuccacagaggg

SEQ ID NO: 2325379 - RNA, 19 nt, Artificial Sequence
  Description of Artificial Sequence: Synthetic oligonucleotide
uuguuggaucauaagaaag

SEQ ID NO: 2325380 - RNA, 19 nt, Artificial Sequence
  Description of Artificial Sequence: Synthetic oligonucleotide
auuucuugggacuggagag

SEQ ID NO: 2325381 - RNA, 19 nt, Artificial Sequence
  Description of Artificial Sequence: Synthetic oligonucleotide
aaauguguccaaaugcuuc

SEQ ID NO: 2325382 - RNA, 19 nt, Artificial Sequence
  Description of Artificial Sequence: Synthetic oligonucleotide
uguaaggagauacaauuuc

SEQ ID NO: 2325383 - RNA, 19 nt, Artificial Sequence
  Description of Artificial Sequence: Synthetic oligonucleotide
aacauaaaaugguggaccu

SEQ ID NO: 2325384 - RNA, 19 nt, Artificial Sequence
  Description of Artificial Sequence: Synthetic oligonucleotide
ucuguaaggagauacaauu

SEQ ID NO: 2325385 - RNA, 19 nt, Artificial Sequence
  Description of Artificial Sequence: Synthetic oligonucleotide
aucucaaccgcuuuuccac

SEQ ID NO: 2325386 - RNA, 19 nt, Artificial Sequence
  Description of Artificial Sequence: Synthetic oligonucleotide
guauuauaucugcauagcg

SEQ ID NO: 2325387 - RNA, 19 nt, Artificial Sequence
  Description of Artificial Sequence: Synthetic oligonucleotide
ucuucaaaagcaucaaccu

SEQ ID NO: 2325388 - RNA, 19 nt, Artificial Sequence
  Description of Artificial Sequence: Synthetic oligonucleotide
uuuccucagacccuagccg

SEQ ID NO: 2325389 - RNA, 19 nt, Artificial Sequence
  Description of Artificial Sequence: Synthetic oligonucleotide
aauccaauguuucggguca

SEQ ID NO: 2325390 - RNA, 19 nt, Artificial Sequence
  Description of Artificial Sequence: Synthetic oligonucleotide
aaggagauacaauuucuca

SEQ ID NO: 2325391 - RNA, 19 nt, Artificial Sequence
  Description of Artificial Sequence: Synthetic oligonucleotide
aguuguagcauccauaguu

SEQ ID NO: 2325392 - RNA, 19 nt, Artificial Sequence
  Description of Artificial Sequence: Synthetic oligonucleotide
caaacuugccaauauuugc

SEQ ID NO: 2325393 - RNA, 19 nt, Artificial Sequence
  Description of Artificial Sequence: Synthetic oligonucleotide
uuuugaaccaaauaaccuu

SEQ ID NO: 2325394 - RNA, 19 nt, Artificial Sequence
  Description of Artificial Sequence: Synthetic oligonucleotide
cucuguauauggaagauuc

SEQ ID NO: 2325395 - RNA, 19 nt, Artificial Sequence
  Description of Artificial Sequence: Synthetic oligonucleotide
agaacucuuaaacacuuug

SEQ ID NO: 2325396 - RNA, 19 nt, Artificial Sequence
  Description of Artificial Sequence: Synthetic oligonucleotide
aauguguccaaaugcuucu

SEQ ID NO: 2325397 - RNA, 19 nt, Artificial Sequence
  Description of Artificial Sequence: Synthetic oligonucleotide
ucauaagaaaggauagcca

SEQ ID NO: 2325398 - RNA, 19 nt, Artificial Sequence
  Description of Artificial Sequence: Synthetic oligonucleotide
aacuugccaauauuugcuc

SEQ ID NO: 2325399 - RNA, 19 nt, Artificial Sequence
  Description of Artificial Sequence: Synthetic oligonucleotide
uggaacauaaaauggugga

SEQ ID NO: 2325400 - RNA, 19 nt, Artificial Sequence
  Description of Artificial Sequence: Synthetic oligonucleotide
uacagugaaauauucccug

SEQ ID NO: 2325401 - RNA, 19 nt, Artificial Sequence
  Description of Artificial Sequence: Synthetic oligonucleotide
aauguuucgggucacccau

SEQ ID NO: 2325402 - RNA, 19 nt, Artificial Sequence
  Description of Artificial Sequence: Synthetic oligonucleotide
  modified_base (2)..(2): a, c, u, g, unknown or other
unuuacauuucuugggacu

SEQ ID NO: 2325403 - RNA, 19 nt, Artificial Sequence
  Description of Artificial Sequence: Synthetic oligonucleotide
cauaaaaugguggaccugc

SEQ ID NO: 2325404 - RNA, 19 nt, Artificial Sequence
  Description of Artificial Sequence: Synthetic oligonucleotide
caguauuauaucugcauag

SEQ ID NO: 2325405 - RNA, 19 nt, Artificial Sequence
  Description of Artificial Sequence: Synthetic oligonucleotide
agugaaauauucccugaag

SEQ ID NO: 2325406 - RNA, 19 nt, Artificial Sequence
  Description of Artificial Sequence: Synthetic oligonucleotide
aaacccuuuucucaguaga

SEQ ID NO: 2325407 - RNA, 19 nt, Artificial Sequence
  Description of Artificial Sequence: Synthetic oligonucleotide
agccgcuuuccucagaccc

SEQ ID NO: 2325408 - RNA, 19 nt, Artificial Sequence
  Description of Artificial Sequence: Synthetic oligonucleotide
ucuuaaacacuuuggcgcc

SEQ ID NO: 2325409 - RNA, 19 nt, Artificial Sequence
  Description of Artificial Sequence: Synthetic oligonucleotide
uucagcaucuggaacauaa

SEQ ID NO: 2325410 - RNA, 19 nt, Artificial Sequence
  Description of Artificial Sequence: Synthetic oligonucleotide
cuggaacauaaaauggugg

SEQ ID NO: 2325411 - RNA, 19 nt, Artificial Sequence
  Description of Artificial Sequence: Synthetic oligonucleotide
cucacggucaccuggauug

SEQ ID NO: 2325412 - RNA, 19 nt, Artificial Sequence
  Description of Artificial Sequence: Synthetic oligonucleotide
ggaugcugcauuuugaacc

SEQ ID NO: 2325413 - RNA, 19 nt, Artificial Sequence
  Description of Artificial Sequence: Synthetic oligonucleotide
guucuucugcacuucagcg

SEQ ID NO: 2325414 - RNA, 19 nt, Artificial Sequence
  Description of Artificial Sequence: Synthetic oligonucleotide
uuaugucuuucuucaaaag

SEQ ID NO: 2325415 - RNA, 19 nt, Artificial Sequence
  Description of Artificial Sequence: Synthetic oligonucleotide
uuugaaccaaauaaccuuu

SEQ ID NO: 2325416 - RNA, 19 nt, Artificial Sequence
  Description of Artificial Sequence: Synthetic oligonucleotide
uagagacaguauuauaucu

SEQ ID NO: 2325417 - RNA, 19 nt, Artificial Sequence
  Description of Artificial Sequence: Synthetic oligonucleotide
aaccuuuuaaguucagcau

SEQ ID NO: 2325418 - RNA, 19 nt, Artificial Sequence
  Description of Artificial Sequence: Synthetic oligonucleotide
uggaagauucugcucugcg

SEQ ID NO: 2325419 - RNA, 19 nt, Artificial Sequence
  Description of Artificial Sequence: Synthetic oligonucleotide
agcauccauaguuuguagg

SEQ ID NO: 2325420 - RNA, 19 nt, Artificial Sequence
  Description of Artificial Sequence: Synthetic oligonucleotide
ugcauguuuuguuggauca

SEQ ID NO: 2325421 - RNA, 19 nt, Artificial Sequence
  Description of Artificial Sequence: Synthetic oligonucleotide
caucaaguggaguuguagc

SEQ ID NO: 2325422 - RNA, 19 nt, Artificial Sequence
  Description of Artificial Sequence: Synthetic oligonucleotide
uuaaguucagcaucuggaa

SEQ ID NO: 2325423 - RNA, 19 nt, Artificial Sequence
  Description of Artificial Sequence: Synthetic oligonucleotide
aguagagacaguauuauau

SEQ ID NO: 2325424 - RNA, 19 nt, Artificial Sequence
  Description of Artificial Sequence: Synthetic oligonucleotide
ucuacaccaacuacagugu

SEQ ID NO: 2325425 - RNA, 19 nt, Artificial Sequence
  Description of Artificial Sequence: Synthetic oligonucleotide
uaaggagauacaauuucuc

SEQ ID NO: 2325426 - RNA, 19 nt, Artificial Sequence
  Description of Artificial Sequence: Synthetic oligonucleotide
agguauugaaacccuuuuc

SEQ ID NO: 2325427 - RNA, 19 nt, Artificial Sequence
  Description of Artificial Sequence: Synthetic oligonucleotide
aaacacuuuggcgccaggg

SEQ ID NO: 2325428 - RNA, 19 nt, Artificial Sequence
  Description of Artificial Sequence: Synthetic oligonucleotide
caacuauuuugucucagag

SEQ ID NO: 2325429 - RNA, 19 nt, Artificial Sequence
  Description of Artificial Sequence: Synthetic oligonucleotide
ggaguuguagcauccauag

SEQ ID NO: 2325430 - RNA, 19 nt, Artificial Sequence
  Description of Artificial Sequence: Synthetic oligonucleotide
aaaggauagccacaaggua

SEQ ID NO: 2325431 - RNA, 19 nt, Artificial Sequence
  Description of Artificial Sequence: Synthetic oligonucleotide
  modified_base (3)..(3): a, c, u, g, unknown or other
uunuuacauuucuugggac

SEQ ID NO: 2325432 - RNA, 19 nt, Artificial Sequence
  Description of Artificial Sequence: Synthetic oligonucleotide
aacacuuuggcgccaggga

SEQ ID NO: 2325433 - RNA, 19 nt, Artificial Sequence
  Description of Artificial Sequence: Synthetic oligonucleotide
aaugguuccucuguauaug

SEQ ID NO: 2325434 - RNA, 19 nt, Artificial Sequence
  Description of Artificial Sequence: Synthetic oligonucleotide
gacccucuaucccaaaucc

SEQ ID NO: 2325435 - RNA, 19 nt, Artificial Sequence
  Description of Artificial Sequence: Synthetic oligonucleotide
aucaaguggaguuguagca

SEQ ID NO: 2325436 - RNA, 19 nt, Artificial Sequence
  Description of Artificial Sequence: Synthetic oligonucleotide
uuaauagcugauguccuug

SEQ ID NO: 2325437 - RNA, 19 nt, Artificial Sequence
  Description of Artificial Sequence: Synthetic oligonucleotide
uuucacugaucucuacacc

SEQ ID NO: 2325438 - RNA, 19 nt, Artificial Sequence
  Description of Artificial Sequence: Synthetic oligonucleotide
gugaaauauucccugaaga

SEQ ID NO: 2325439 - RNA, 19 nt, Artificial Sequence
  Description of Artificial Sequence: Synthetic oligonucleotide
uucuuccaggcuuaguacc

SEQ ID NO: 2325440 - RNA, 19 nt, Artificial Sequence
  Description of Artificial Sequence: Synthetic oligonucleotide
aaggauagccacaagguau

SEQ ID NO: 2325441 - RNA, 19 nt, Artificial Sequence
  Description of Artificial Sequence: Synthetic oligonucleotide
uaaguucagcaucuggaac

SEQ ID NO: 2325442 - RNA, 19 nt, Artificial Sequence
  Description of Artificial Sequence: Synthetic oligonucleotide
ucuaucccaaauccuguca

SEQ ID NO: 2325443 - RNA, 19 nt, Artificial Sequence
  Description of Artificial Sequence: Synthetic oligonucleotide
aguaaagggugcuccauca

SEQ ID NO: 2325444 - RNA, 19 nt, Artificial Sequence
  Description of Artificial Sequence: Synthetic oligonucleotide
ggugaaauccaauguuucg

SEQ ID NO: 2325445 - RNA, 19 nt, Artificial Sequence
  Description of Artificial Sequence: Synthetic oligonucleotide
ucuuccaggcuuaguaccc

SEQ ID NO: 2325446 - RNA, 19 nt, Artificial Sequence
  Description of Artificial Sequence: Synthetic oligonucleotide
aaagggagccaauucccca

SEQ ID NO: 2325447 - RNA, 19 nt, Artificial Sequence
  Description of Artificial Sequence: Synthetic oligonucleotide
gaagauucugcucugcgaa

SEQ ID NO: 2325448 - RNA, 19 nt, Artificial Sequence
  Description of Artificial Sequence: Synthetic oligonucleotide
auagccacaagguauugaa

SEQ ID NO: 2325449 - RNA, 19 nt, Artificial Sequence
  Description of Artificial Sequence: Synthetic oligonucleotide
uuccuggugaaauccaaug

SEQ ID NO: 2325450 - RNA, 19 nt, Artificial Sequence
  Description of Artificial Sequence: Synthetic oligonucleotide
auuuugaaccaaauaaccu

SEQ ID NO: 2325451 - RNA, 19 nt, Artificial Sequence
  Description of Artificial Sequence: Synthetic oligonucleotide
agaaauguguccaaaugcu

SEQ ID NO: 2325452 - RNA, 19 nt, Artificial Sequence
  Description of Artificial Sequence: Synthetic oligonucleotide
ugauggccacuaaugaccc

SEQ ID NO: 2325453 - RNA, 19 nt, Artificial Sequence
  Description of Artificial Sequence: Synthetic oligonucleotide
aaguggaguuguagcaucc

SEQ ID NO: 2325454 - RNA, 19 nt, Artificial Sequence
  Description of Artificial Sequence: Synthetic oligonucleotide
aggagauacaauuucucaa

SEQ ID NO: 2325455 - RNA, 19 nt, Artificial Sequence
  Description of Artificial Sequence: Synthetic oligonucleotide
uucagcgucaaagugcucu

SEQ ID NO: 2325456 - RNA, 19 nt, Artificial Sequence
  Description of Artificial Sequence: Synthetic oligonucleotide
uauauggaagauucugcuc

SEQ ID NO: 2325457 - RNA, 19 nt, Artificial Sequence
  Description of Artificial Sequence: Synthetic oligonucleotide
caguacagugaaauauucc

SEQ ID NO: 2325458 - RNA, 19 nt, Artificial Sequence
  Description of Artificial Sequence: Synthetic oligonucleotide
auaguuuguaggcaacuau

SEQ ID NO: 2325459 - RNA, 19 nt, Artificial Sequence
  Description of Artificial Sequence: Synthetic oligonucleotide
ugcacuucagcgucaaagu

SEQ ID NO: 2325460 - RNA, 19 nt, Artificial Sequence
  Description of Artificial Sequence: Synthetic oligonucleotide
guagagacaguauuauauc

SEQ ID NO: 2325461 - RNA, 19 nt, Artificial Sequence
  Description of Artificial Sequence: Synthetic oligonucleotide
uccuggugaaauccaaugu

SEQ ID NO: 2325462 - RNA, 19 nt, Artificial Sequence
  Description of Artificial Sequence: Synthetic oligonucleotide
ugaaugguuccucuguaua

SEQ ID NO: 2325463 - RNA, 19 nt, Artificial Sequence
  Description of Artificial Sequence: Synthetic oligonucleotide
acaguauuauaucugcaua

SEQ ID NO: 2325464 - RNA, 19 nt, Artificial Sequence
  Description of Artificial Sequence: Synthetic oligonucleotide
aaauccugucaaacuugcc

SEQ ID NO: 2325465 - RNA, 19 nt, Artificial Sequence
  Description of Artificial Sequence: Synthetic oligonucleotide
aucccaaauccugucaaac

SEQ ID NO: 2325466 - RNA, 19 nt, Artificial Sequence
  Description of Artificial Sequence: Synthetic oligonucleotide
uaguuuguaggcaacuauu

SEQ ID NO: 2325467 - RNA, 19 nt, Artificial Sequence
  Description of Artificial Sequence: Synthetic oligonucleotide
cuugccaauauuugcucug

SEQ ID NO: 2325468 - RNA, 19 nt, Artificial Sequence
  Description of Artificial Sequence: Synthetic oligonucleotide
aaauucccgaaucccaauu

SEQ ID NO: 2325469 - RNA, 19 nt, Artificial Sequence
  Description of Artificial Sequence: Synthetic oligonucleotide
cuaaugacccucuauccca

SEQ ID NO: 2325470 - RNA, 19 nt, Artificial Sequence
  Description of Artificial Sequence: Synthetic oligonucleotide
aauucccgaaucccaauuu

SEQ ID NO: 2325471 - RNA, 19 nt, Artificial Sequence
  Description of Artificial Sequence: Synthetic oligonucleotide
uucccgaaucccaauuuca

SEQ ID NO: 2325472 - RNA, 19 nt, Artificial Sequence
  Description of Artificial Sequence: Synthetic oligonucleotide
ugcauagcgcucacgguca

SEQ ID NO: 2325473 - RNA, 19 nt, Artificial Sequence
  Description of Artificial Sequence: Synthetic oligonucleotide
aaagggugcuccaucacca

SEQ ID NO: 2325474 - RNA, 19 nt, Artificial Sequence
  Description of Artificial Sequence: Synthetic oligonucleotide
gaccugcauguuuuguugg

SEQ ID NO: 2325475 - RNA, 19 nt, Artificial Sequence
  Description of Artificial Sequence: Synthetic oligonucleotide
ggaucauaagaaaggauag

SEQ ID NO: 2325476 - RNA, 19 nt, Artificial Sequence
  Description of Artificial Sequence: Synthetic oligonucleotide
aagaaaggauagccacaag

SEQ ID NO: 2325477 - RNA, 19 nt, Artificial Sequence
  Description of Artificial Sequence: Synthetic oligonucleotide
gcucuuucacaucaagugg

SEQ ID NO: 2325478 - RNA, 19 nt, Artificial Sequence
  Description of Artificial Sequence: Synthetic oligonucleotide
agagacaguauuauaucug

SEQ ID NO: 2325479 - RNA, 19 nt, Artificial Sequence
  Description of Artificial Sequence: Synthetic oligonucleotide
uucuucugcacuucagcgu

SEQ ID NO: 2325480 - RNA, 19 nt, Artificial Sequence
  Description of Artificial Sequence: Synthetic oligonucleotide
uauggaagauucugcucug

SEQ ID NO: 2325481 - RNA, 19 nt, Artificial Sequence
  Description of Artificial Sequence: Synthetic oligonucleotide
agugccucggcucugccca

SEQ ID NO: 2325482 - RNA, 19 nt, Artificial Sequence
  Description of Artificial Sequence: Synthetic oligonucleotide
gcauccauaguuuguaggc

SEQ ID NO: 2325483 - RNA, 19 nt, Artificial Sequence
  Description of Artificial Sequence: Synthetic oligonucleotide
auuucauugaaugguuccu

SEQ ID NO: 2325484 - RNA, 19 nt, Artificial Sequence
  Description of Artificial Sequence: Synthetic oligonucleotide
ucaguagagacaguauuau

SEQ ID NO: 2325485 - RNA, 19 nt, Artificial Sequence
  Description of Artificial Sequence: Synthetic oligonucleotide
uuuaauagcugauguccuu

SEQ ID NO: 2325486 - RNA, 19 nt, Artificial Sequence
  Description of Artificial Sequence: Synthetic oligonucleotide
uuacauuucuugggacugg

SEQ ID NO: 2325487 - RNA, 19 nt, Artificial Sequence
  Description of Artificial Sequence: Synthetic oligonucleotide
uugucucagaggcugcugu

SEQ ID NO: 2325488 - RNA, 19 nt, Artificial Sequence
  Description of Artificial Sequence: Synthetic oligonucleotide
agcgcucacggucaccugg

SEQ ID NO: 2325489 - RNA, 19 nt, Artificial Sequence
  Description of Artificial Sequence: Synthetic oligonucleotide
ucccaaauccugucaaacu

SEQ ID NO: 2325490 - RNA, 19 nt, Artificial Sequence
  Description of Artificial Sequence: Synthetic oligonucleotide
uggauugauggccacuaau

SEQ ID NO: 2325491 - RNA, 19 nt, Artificial Sequence
  Description of Artificial Sequence: Synthetic oligonucleotide
auggccacuaaugacccuc

SEQ ID NO: 2325492 - RNA, 19 nt, Artificial Sequence
  Description of Artificial Sequence: Synthetic oligonucleotide
acagugaaauauucccuga

SEQ ID NO: 2325493 - RNA, 19 nt, Artificial Sequence
  Description of Artificial Sequence: Synthetic oligonucleotide
cauuucuugggacuggaga

SEQ ID NO: 2325494 - RNA, 19 nt, Artificial Sequence
  Description of Artificial Sequence: Synthetic oligonucleotide
aacccuuuucucaguagag

SEQ ID NO: 2325495 - RNA, 19 nt, Artificial Sequence
  Description of Artificial Sequence: Synthetic oligonucleotide
aucucuacaccaacuacag

SEQ ID NO: 2325496 - RNA, 19 nt, Artificial Sequence
  Description of Artificial Sequence: Synthetic oligonucleotide
gccuuuaagaaaugugucc

SEQ ID NO: 2325497 - RNA, 19 nt, Artificial Sequence
  Description of Artificial Sequence: Synthetic oligonucleotide
ugacccucuaucccaaauc

SEQ ID NO: 2325498 - RNA, 19 nt, Artificial Sequence
  Description of Artificial Sequence: Synthetic oligonucleotide
ucaccuggauugauggcca

SEQ ID NO: 2325499 - RNA, 19 nt, Artificial Sequence
  Description of Artificial Sequence: Synthetic oligonucleotide
uuaaacacuuuggcgccag

SEQ ID NO: 2325500 - RNA, 19 nt, Artificial Sequence
  Description of Artificial Sequence: Synthetic oligonucleotide
uaauagcugauguccuugu

SEQ ID NO: 2325501 - RNA, 19 nt, Artificial Sequence
  Description of Artificial Sequence: Synthetic oligonucleotide
ucccgaaucccaauuucac

SEQ ID NO: 2325502 - RNA, 19 nt, Artificial Sequence
  Description of Artificial Sequence: Synthetic oligonucleotide
gaaaggauagccacaaggu

SEQ ID NO: 2325503 - RNA, 19 nt, Artificial Sequence
  Description of Artificial Sequence: Synthetic oligonucleotide
auccugucaaacuugccaa

SEQ ID NO: 2325504 - RNA, 19 nt, Artificial Sequence
  Description of Artificial Sequence: Synthetic oligonucleotide
guuggaucauaagaaagga

SEQ ID NO: 2325505 - RNA, 19 nt, Artificial Sequence
  Description of Artificial Sequence: Synthetic oligonucleotide
acacucucaguccacucug

SEQ ID NO: 2325506 - RNA, 19 nt, Artificial Sequence
  Description of Artificial Sequence: Synthetic oligonucleotide
acuugccaauauuugcucu

SEQ ID NO: 2325507 - RNA, 19 nt, Artificial Sequence
  Description of Artificial Sequence: Synthetic oligonucleotide
uuuggcgccagggauuuca

SEQ ID NO: 2325508 - RNA, 19 nt, Artificial Sequence
  Description of Artificial Sequence: Synthetic oligonucleotide
uaguacccgguucuucugc

SEQ ID NO: 2325509 - RNA, 19 nt, Artificial Sequence
  Description of Artificial Sequence: Synthetic oligonucleotide
uuauaucugcauagcgcuc

SEQ ID NO: 2325510 - RNA, 19 nt, Artificial Sequence
  Description of Artificial Sequence: Synthetic oligonucleotide
cugcauagcgcucacgguc

SEQ ID NO: 2325511 - RNA, 19 nt, Artificial Sequence
  Description of Artificial Sequence: Synthetic oligonucleotide
guauauggaagauucugcu

SEQ ID NO: 2325512 - RNA, 19 nt, Artificial Sequence
  Description of Artificial Sequence: Synthetic oligonucleotide
ccagggauuucauugaaug

SEQ ID NO: 2325513 - RNA, 19 nt, Artificial Sequence
  Description of Artificial Sequence: Synthetic oligonucleotide
cucucaguccacucuggcc

SEQ ID NO: 2325514 - RNA, 19 nt, Artificial Sequence
  Description of Artificial Sequence: Synthetic oligonucleotide
cauucuuccaggcuuagua

SEQ ID NO: 2325515 - RNA, 19 nt, Artificial Sequence
  Description of Artificial Sequence: Synthetic oligonucleotide
gguauugaaacccuuuucu

SEQ ID NO: 2325516 - RNA, 19 nt, Artificial Sequence
  Description of Artificial Sequence: Synthetic oligonucleotide
agcaucuggaacauaaaau

SEQ ID NO: 2325517 - RNA, 19 nt, Artificial Sequence
  Description of Artificial Sequence: Synthetic oligonucleotide
uucucaguagagacaguau

SEQ ID NO: 2325518 - RNA, 19 nt, Artificial Sequence
  Description of Artificial Sequence: Synthetic oligonucleotide
uuaguacccgguucuucug

SEQ ID NO: 2325519 - RNA, 19 nt, Artificial Sequence
  Description of Artificial Sequence: Synthetic oligonucleotide
uuucaucucaaccgcuuuu

SEQ ID NO: 2325520 - RNA, 19 nt, Artificial Sequence
  Description of Artificial Sequence: Synthetic oligonucleotide
uagcauccauaguuuguag

SEQ ID NO: 2325521 - RNA, 19 nt, Artificial Sequence
  Description of Artificial Sequence: Synthetic oligonucleotide
uaaacacuuuggcgccagg

SEQ ID NO: 2325522 - RNA, 19 nt, Artificial Sequence
  Description of Artificial Sequence: Synthetic oligonucleotide
auuuugucucagaggcugc

SEQ ID NO: 2325523 - RNA, 19 nt, Artificial Sequence
  Description of Artificial Sequence: Synthetic oligonucleotide
acuucagcgucaaagugcu

SEQ ID NO: 2325524 - RNA, 19 nt, Artificial Sequence
  Description of Artificial Sequence: Synthetic oligonucleotide
caaguggaguuguagcauc

SEQ ID NO: 2325525 - RNA, 19 nt, Artificial Sequence
  Description of Artificial Sequence: Synthetic oligonucleotide
aagauucugcucugcgaaa

SEQ ID NO: 2325526 - RNA, 19 nt, Artificial Sequence
  Description of Artificial Sequence: Synthetic oligonucleotide
accuccucaaggcagcgga

SEQ ID NO: 2325527 - RNA, 19 nt, Artificial Sequence
  Description of Artificial Sequence: Synthetic oligonucleotide
aggcuuaguacccgguucu

SEQ ID NO: 2325528 - RNA, 19 nt, Artificial Sequence
  Description of Artificial Sequence: Synthetic oligonucleotide
guaggcaacuauuuugucu

SEQ ID NO: 2325529 - RNA, 19 nt, Artificial Sequence
  Description of Artificial Sequence: Synthetic oligonucleotide
gauguccuuguuccuggug

SEQ ID NO: 2325530 - RNA, 19 nt, Artificial Sequence
  Description of Artificial Sequence: Synthetic oligonucleotide
uucaucucaaccgcuuuuc

SEQ ID NO: 2325531 - RNA, 19 nt, Artificial Sequence
  Description of Artificial Sequence: Synthetic oligonucleotide
ccgaaucccaauuucacug

SEQ ID NO: 2325532 - RNA, 19 nt, Artificial Sequence
  Description of Artificial Sequence: Synthetic oligonucleotide
ugcugcauuuugaaccaaa

SEQ ID NO: 2325533 - RNA, 19 nt, Artificial Sequence
  Description of Artificial Sequence: Synthetic oligonucleotide
cuucuuuaauagcugaugu

SEQ ID NO: 2325534 - RNA, 19 nt, Artificial Sequence
  Description of Artificial Sequence: Synthetic oligonucleotide
caaccgcuuuuccacagag

SEQ ID NO: 2325535 - RNA, 19 nt, Artificial Sequence
  Description of Artificial Sequence: Synthetic oligonucleotide
cugcauguuuuguuggauc

SEQ ID NO: 2325536 - RNA, 19 nt, Artificial Sequence
  Description of Artificial Sequence: Synthetic oligonucleotide
ucucaaccgcuuuuccaca

SEQ ID NO: 2325537 - RNA, 19 nt, Artificial Sequence
  Description of Artificial Sequence: Synthetic oligonucleotide
uuugcucugggaagaucaa

SEQ ID NO: 2325538 - RNA, 19 nt, Artificial Sequence
  Description of Artificial Sequence: Synthetic oligonucleotide
cucaguagagacaguauua

SEQ ID NO: 2325539 - RNA, 19 nt, Artificial Sequence
  Description of Artificial Sequence: Synthetic oligonucleotide
cucggcucugcccagccgc

SEQ ID NO: 2325540 - RNA, 19 nt, Artificial Sequence
  Description of Artificial Sequence: Synthetic oligonucleotide
auagcgcucacggucaccu

SEQ ID NO: 2325541 - RNA, 19 nt, Artificial Sequence
  Description of Artificial Sequence: Synthetic oligonucleotide
uugaaccaaauaaccuuuu

SEQ ID NO: 2325542 - RNA, 19 nt, Artificial Sequence
  Description of Artificial Sequence: Synthetic oligonucleotide
ucaaccgcuuuuccacaga

SEQ ID NO: 2325543 - RNA, 19 nt, Artificial Sequence
  Description of Artificial Sequence: Synthetic oligonucleotide
uguaggcaacuauuuuguc

SEQ ID NO: 2325544 - RNA, 19 nt, Artificial Sequence
  Description of Artificial Sequence: Synthetic oligonucleotide
uguguccaaaugcuucuuu

SEQ ID NO: 2325545 - RNA, 19 nt, Artificial Sequence
  Description of Artificial Sequence: Synthetic oligonucleotide
ugguggaccugcauguuuu

SEQ ID NO: 2325546 - RNA, 19 nt, Artificial Sequence
  Description of Artificial Sequence: Synthetic oligonucleotide
uaucccaaauccugucaaa

SEQ ID NO: 2325547 - RNA, 19 nt, Artificial Sequence
  Description of Artificial Sequence: Synthetic oligonucleotide
aaccgcuuuuccacagagg

SEQ ID NO: 2325548 - RNA, 19 nt, Artificial Sequence
  Description of Artificial Sequence: Synthetic oligonucleotide
uacccgguucuucugcacu

SEQ ID NO: 2325549 - RNA, 19 nt, Artificial Sequence
  Description of Artificial Sequence: Synthetic oligonucleotide
gccacaagguauugaaacc

SEQ ID NO: 2325550 - RNA, 19 nt, Artificial Sequence
  Description of Artificial Sequence: Synthetic oligonucleotide
uguuucgggucacccauuu

SEQ ID NO: 2325551 - RNA, 19 nt, Artificial Sequence
  Description of Artificial Sequence: Synthetic oligonucleotide
uugaaacccuuuucucagu

SEQ ID NO: 2325552 - RNA, 19 nt, Artificial Sequence
  Description of Artificial Sequence: Synthetic oligonucleotide
uguggccccgcucugcaaa

SEQ ID NO: 2325553 - RNA, 19 nt, Artificial Sequence
  Description of Artificial Sequence: Synthetic oligonucleotide
caauuucacugaucucuac

SEQ ID NO: 2325554 - RNA, 19 nt, Artificial Sequence
  Description of Artificial Sequence: Synthetic oligonucleotide
ggaccugcauguuuuguug

SEQ ID NO: 2325555 - RNA, 19 nt, Artificial Sequence
  Description of Artificial Sequence: Synthetic oligonucleotide
uggaccugcauguuuuguu

SEQ ID NO: 2325556 - RNA, 19 nt, Artificial Sequence
  Description of Artificial Sequence: Synthetic oligonucleotide
uccuuguuccuggugaaau

SEQ ID NO: 2325557 - RNA, 19 nt, Artificial Sequence
  Description of Artificial Sequence: Synthetic oligonucleotide
acugaucucuacaccaacu

SEQ ID NO: 2325558 - RNA, 19 nt, Artificial Sequence
  Description of Artificial Sequence: Synthetic oligonucleotide
uuuugucucagaggcugcu

SEQ ID NO: 2325559 - RNA, 19 nt, Artificial Sequence
  Description of Artificial Sequence: Synthetic oligonucleotide
cucuaucccaaauccuguc

SEQ ID NO: 2325560 - RNA, 19 nt, Artificial Sequence
  Description of Artificial Sequence: Synthetic oligonucleotide
ucucuacaccaacuacagu

SEQ ID NO: 2325561 - RNA, 19 nt, Artificial Sequence
  Description of Artificial Sequence: Synthetic oligonucleotide
aguuuguaggcaacuauuu

SEQ ID NO: 2325562 - RNA, 19 nt, Artificial Sequence
  Description of Artificial Sequence: Synthetic oligonucleotide
cccuuuucucaguagagac

SEQ ID NO: 2325563 - RNA, 19 nt, Artificial Sequence
  Description of Artificial Sequence: Synthetic oligonucleotide
cuuaguacccgguucuucu

SEQ ID NO: 2325564 - RNA, 19 nt, Artificial Sequence
  Description of Artificial Sequence: Synthetic oligonucleotide
agggagccaauuccccagg

SEQ ID NO: 2325565 - RNA, 19 nt, Artificial Sequence
  Description of Artificial Sequence: Synthetic oligonucleotide
acauaaaaugguggaccug

SEQ ID NO: 2325566 - RNA, 19 nt, Artificial Sequence
  Description of Artificial Sequence: Synthetic oligonucleotide
gaaugguuccucuguauau

SEQ ID NO: 2325567 - RNA, 19 nt, Artificial Sequence
  Description of Artificial Sequence: Synthetic oligonucleotide
aguacccgguucuucugca

SEQ ID NO: 2325568 - RNA, 19 nt, Artificial Sequence
  Description of Artificial Sequence: Synthetic oligonucleotide
uccucagacccuagccggc

SEQ ID NO: 2325569 - RNA, 19 nt, Artificial Sequence
  Description of Artificial Sequence: Synthetic oligonucleotide
caucucaaccgcuuuucca

SEQ ID NO: 2325570 - RNA, 19 nt, Artificial Sequence
  Description of Artificial Sequence: Synthetic oligonucleotide
uagccacaagguauugaaa

SEQ ID NO: 2325571 - RNA, 19 nt, Artificial Sequence
  Description of Artificial Sequence: Synthetic oligonucleotide
ccacaagguauugaaaccc

SEQ ID NO: 2325572 - RNA, 19 nt, Artificial Sequence
  Description of Artificial Sequence: Synthetic oligonucleotide
cacucucaguccacucugg

SEQ ID NO: 2325573 - RNA, 19 nt, Artificial Sequence
  Description of Artificial Sequence: Synthetic oligonucleotide
uaacacucucaguccacuc

SEQ ID NO: 2325574 - RNA, 19 nt, Artificial Sequence
  Description of Artificial Sequence: Synthetic oligonucleotide
cucagaggcugcugucucc

SEQ ID NO: 2325575 - RNA, 19 nt, Artificial Sequence
  Description of Artificial Sequence: Synthetic oligonucleotide
accugcauguuuuguugga

SEQ ID NO: 2325576 - RNA, 19 nt, Artificial Sequence
  Description of Artificial Sequence: Synthetic oligonucleotide
cacugaucucuacaccaac

SEQ ID NO: 2325577 - RNA, 19 nt, Artificial Sequence
  Description of Artificial Sequence: Synthetic oligonucleotide
cccucuaucccaaauccug

SEQ ID NO: 2325578 - RNA, 19 nt, Artificial Sequence
  Description of Artificial Sequence: Synthetic oligonucleotide
guaaggagauacaauuucu

SEQ ID NO: 2325579 - RNA, 19 nt, Artificial Sequence
  Description of Artificial Sequence: Synthetic oligonucleotide
caauguuucgggucaccca

SEQ ID NO: 2325580 - RNA, 19 nt, Artificial Sequence
  Description of Artificial Sequence: Synthetic oligonucleotide
ccaauauuugcucugggaa

SEQ ID NO: 2325581 - RNA, 19 nt, Artificial Sequence
  Description of Artificial Sequence: Synthetic oligonucleotide
agauucugcucugcgaaaa

SEQ ID NO: 2325582 - RNA, 19 nt, Artificial Sequence
  Description of Artificial Sequence: Synthetic oligonucleotide
caauuccccaggcuuuaug

SEQ ID NO: 2325583 - RNA, 19 nt, Artificial Sequence
  Description of Artificial Sequence: Synthetic oligonucleotide
agcaguacagugaaauauu

SEQ ID NO: 2325584 - RNA, 19 nt, Artificial Sequence
  Description of Artificial Sequence: Synthetic oligonucleotide
aaugacccucuaucccaaa

SEQ ID NO: 2325585 - RNA, 19 nt, Artificial Sequence
  Description of Artificial Sequence: Synthetic oligonucleotide
uccaggcuuaguacccggu

SEQ ID NO: 2325586 - RNA, 19 nt, Artificial Sequence
  Description of Artificial Sequence: Synthetic oligonucleotide
ggaagauucugcucugcga

SEQ ID NO: 2325587 - RNA, 19 nt, Artificial Sequence
  Description of Artificial Sequence: Synthetic oligonucleotide
guagcauccauaguuugua

SEQ ID NO: 2325588 - RNA, 19 nt, Artificial Sequence
  Description of Artificial Sequence: Synthetic oligonucleotide
cucaaggcagcggaugcug

SEQ ID NO: 2325589 - RNA, 19 nt, Artificial Sequence
  Description of Artificial Sequence: Synthetic oligonucleotide
augacccucuaucccaaau

SEQ ID NO: 2325590 - RNA, 19 nt, Artificial Sequence
  Description of Artificial Sequence: Synthetic oligonucleotide
auauucccugaagaacucu

SEQ ID NO: 2325591 - RNA, 19 nt, Artificial Sequence
  Description of Artificial Sequence: Synthetic oligonucleotide
acccuuuucucaguagaga

SEQ ID NO: 2325592 - RNA, 19 nt, Artificial Sequence
  Description of Artificial Sequence: Synthetic oligonucleotide
gggucacccauuuacuuuc

SEQ ID NO: 2325593 - RNA, 19 nt, Artificial Sequence
  Description of Artificial Sequence: Synthetic oligonucleotide
aguguggccccgcucugca

SEQ ID NO: 2325594 - RNA, 19 nt, Artificial Sequence
  Description of Artificial Sequence: Synthetic oligonucleotide
uccugucaaacuugccaau

SEQ ID NO: 2325595 - RNA, 19 nt, Artificial Sequence
  Description of Artificial Sequence: Synthetic oligonucleotide
uccaauguuucgggucacc

SEQ ID NO: 2325596 - RNA, 19 nt, Artificial Sequence
  Description of Artificial Sequence: Synthetic oligonucleotide
ugucuccagugccucggcu

SEQ ID NO: 2325597 - RNA, 19 nt, Artificial Sequence
  Description of Artificial Sequence: Synthetic oligonucleotide
cacucuggccuuuaagaaa

SEQ ID NO: 2325598 - RNA, 19 nt, Artificial Sequence
  Description of Artificial Sequence: Synthetic oligonucleotide
auguuuuguuggaucauaa

SEQ ID NO: 2325599 - RNA, 19 nt, Artificial Sequence
  Description of Artificial Sequence: Synthetic oligonucleotide
gccaauauuugcucuggga

SEQ ID NO: 2325600 - RNA, 19 nt, Artificial Sequence
  Description of Artificial Sequence: Synthetic oligonucleotide
cagcggaugcugcauuuug

SEQ ID NO: 2325601 - RNA, 19 nt, Artificial Sequence
  Description of Artificial Sequence: Synthetic oligonucleotide
gucaaacuugccaauauuu

SEQ ID NO: 2325602 - RNA, 19 nt, Artificial Sequence
  Description of Artificial Sequence: Synthetic oligonucleotide
ccaaauaaccuuuuaaguu

SEQ ID NO: 2325603 - RNA, 19 nt, Artificial Sequence
  Description of Artificial Sequence: Synthetic oligonucleotide
cauccauaguuuguaggca

SEQ ID NO: 2325604 - RNA, 19 nt, Artificial Sequence
  Description of Artificial Sequence: Synthetic oligonucleotide
gcaacuauuuugucucaga

SEQ ID NO: 2325605 - RNA, 19 nt, Artificial Sequence
  Description of Artificial Sequence: Synthetic oligonucleotide
acccauuuacuuucccauu

SEQ ID NO: 2325606 - RNA, 19 nt, Artificial Sequence
  Description of Artificial Sequence: Synthetic oligonucleotide
cagugaaauauucccugaa

SEQ ID NO: 2325607 - RNA, 19 nt, Artificial Sequence
  Description of Artificial Sequence: Synthetic oligonucleotide
gagccaauuccccaggcuu

SEQ ID NO: 2325608 - RNA, 19 nt, Artificial Sequence
  Description of Artificial Sequence: Synthetic oligonucleotide
guacagugaaauauucccu

SEQ ID NO: 2325609 - RNA, 19 nt, Artificial Sequence
  Description of Artificial Sequence: Synthetic oligonucleotide
acauuucuugggacuggag

SEQ ID NO: 2325610 - RNA, 19 nt, Artificial Sequence
  Description of Artificial Sequence: Synthetic oligonucleotide
aaggcagcggaugcugcau

SEQ ID NO: 2325611 - RNA, 19 nt, Artificial Sequence
  Description of Artificial Sequence: Synthetic oligonucleotide
caucaaccuccucaaggca

SEQ ID NO: 2325612 - RNA, 19 nt, Artificial Sequence
  Description of Artificial Sequence: Synthetic oligonucleotide
guuuguaggcaacuauuuu

SEQ ID NO: 2325613 - RNA, 19 nt, Artificial Sequence
  Description of Artificial Sequence: Synthetic oligonucleotide
ggcaacuauuuugucucag

SEQ ID NO: 2325614 - RNA, 19 nt, Artificial Sequence
  Description of Artificial Sequence: Synthetic oligonucleotide
uugcucugggaagaucaaa

SEQ ID NO: 2325615 - RNA, 19 nt, Artificial Sequence
  Description of Artificial Sequence: Synthetic oligonucleotide
cagugccucggcucugccc

SEQ ID NO: 2325616 - RNA, 19 nt, Artificial Sequence
  Description of Artificial Sequence: Synthetic oligonucleotide
cacaagguauugaaacccu

SEQ ID NO: 2325617 - RNA, 19 nt, Artificial Sequence
  Description of Artificial Sequence: Synthetic oligonucleotide
gcaguacagugaaauauuc

SEQ ID NO: 2325618 - RNA, 19 nt, Artificial Sequence
  Description of Artificial Sequence: Synthetic oligonucleotide
caccaacuacaguguggcc

SEQ ID NO: 2325619 - RNA, 19 nt, Artificial Sequence
  Description of Artificial Sequence: Synthetic oligonucleotide
auauuugcucugggaagau

SEQ ID NO: 2325620 - RNA, 19 nt, Artificial Sequence
  Description of Artificial Sequence: Synthetic oligonucleotide
agcggaugcugcauuuuga

SEQ ID NO: 2325621 - RNA, 19 nt, Artificial Sequence
  Description of Artificial Sequence: Synthetic oligonucleotide
acggucaccuggauugaug

SEQ ID NO: 2325622 - RNA, 19 nt, Artificial Sequence
  Description of Artificial Sequence: Synthetic oligonucleotide
uucugcacuucagcgucaa

SEQ ID NO: 2325623 - RNA, 19 nt, Artificial Sequence
  Description of Artificial Sequence: Synthetic oligonucleotide
caagguauugaaacccuuu

SEQ ID NO: 2325624 - RNA, 19 nt, Artificial Sequence
  Description of Artificial Sequence: Synthetic oligonucleotide
acaagguauugaaacccuu

SEQ ID NO: 2325625 - RNA, 19 nt, Artificial Sequence
  Description of Artificial Sequence: Synthetic oligonucleotide
acuuuggcgccagggauuu

SEQ ID NO: 2325626 - RNA, 19 nt, Artificial Sequence
  Description of Artificial Sequence: Synthetic oligonucleotide
caguagagacaguauuaua

SEQ ID NO: 2325627 - RNA, 19 nt, Artificial Sequence
  Description of Artificial Sequence: Synthetic oligonucleotide
cuguaaggagauacaauuu

SEQ ID NO: 2325628 - RNA, 19 nt, Artificial Sequence
  Description of Artificial Sequence: Synthetic oligonucleotide
cagcaguacagugaaauau

SEQ ID NO: 2325629 - RNA, 19 nt, Artificial Sequence
  Description of Artificial Sequence: Synthetic oligonucleotide
ggucaccuggauugauggc

SEQ ID NO: 2325630 - RNA, 19 nt, Artificial Sequence
  Description of Artificial Sequence: Synthetic oligonucleotide
guacccgguucuucugcac

SEQ ID NO: 2325631 - RNA, 19 nt, Artificial Sequence
  Description of Artificial Sequence: Synthetic oligonucleotide
ucggcucugcccagccgcu

SEQ ID NO: 2325632 - RNA, 19 nt, Artificial Sequence
  Description of Artificial Sequence: Synthetic oligonucleotide
cuuaaacacuuuggcgcca

SEQ ID NO: 2325633 - RNA, 19 nt, Artificial Sequence
  Description of Artificial Sequence: Synthetic oligonucleotide
cugucuccagugccucggc

SEQ ID NO: 2325634 - RNA, 19 nt, Artificial Sequence
  Description of Artificial Sequence: Synthetic oligonucleotide
uuggcgccagggauuucau

SEQ ID NO: 2325635 - RNA, 19 nt, Artificial Sequence
  Description of Artificial Sequence: Synthetic oligonucleotide
cauagcgcucacggucacc

SEQ ID NO: 2325636 - RNA, 19 nt, Artificial Sequence
  Description of Artificial Sequence: Synthetic oligonucleotide
cuacaguguggccccgcuc

SEQ ID NO: 2325637 - RNA, 19 nt, Artificial Sequence
  Description of Artificial Sequence: Synthetic oligonucleotide
ccgcuuuuccacagagggg

SEQ ID NO: 2325638 - RNA, 19 nt, Artificial Sequence
  Description of Artificial Sequence: Synthetic oligonucleotide
cgucaaagugcucuuucac

SEQ ID NO: 2325639 - RNA, 19 nt, Artificial Sequence
  Description of Artificial Sequence: Synthetic oligonucleotide
ucacggucaccuggauuga

SEQ ID NO: 2325640 - RNA, 19 nt, Artificial Sequence
  Description of Artificial Sequence: Synthetic oligonucleotide
cugggaguaaagggugcuc

SEQ ID NO: 2325641 - RNA, 19 nt, Artificial Sequence
  Description of Artificial Sequence: Synthetic oligonucleotide
acccucuaucccaaauccu

SEQ ID NO: 2325642 - RNA, 19 nt, Artificial Sequence
  Description of Artificial Sequence: Synthetic oligonucleotide
accuggauugauggccacu

SEQ ID NO: 2325643 - RNA, 19 nt, Artificial Sequence
  Description of Artificial Sequence: Synthetic oligonucleotide
caccuggauugauggccac

SEQ ID NO: 2325644 - RNA, 19 nt, Artificial Sequence
  Description of Artificial Sequence: Synthetic oligonucleotide
gggagccaauuccccaggc

SEQ ID NO: 2325645 - RNA, 19 nt, Artificial Sequence
  Description of Artificial Sequence: Synthetic oligonucleotide
caacuacaguguggccccg

SEQ ID NO: 2325646 - RNA, 19 nt, Artificial Sequence
  Description of Artificial Sequence: Synthetic oligonucleotide
guggccccgcucugcaaac

SEQ ID NO: 2325647 - RNA, 19 nt, Artificial Sequence
  Description of Artificial Sequence: Synthetic oligonucleotide
ggauagccacaagguauug

SEQ ID NO: 2325648 - RNA, 19 nt, Artificial Sequence
  Description of Artificial Sequence: Synthetic oligonucleotide
auguguccaaaugcuucuu

SEQ ID NO: 2325649 - RNA, 19 nt, Artificial Sequence
  Description of Artificial Sequence: Synthetic oligonucleotide
caggcuuuaugucuuucuu

SEQ ID NO: 2325650 - RNA, 19 nt, Artificial Sequence
  Description of Artificial Sequence: Synthetic oligonucleotide
cuuucacaucaaguggagu

SEQ ID NO: 2325651 - RNA, 19 nt, Artificial Sequence
  Description of Artificial Sequence: Synthetic oligonucleotide
cuucagcgucaaagugcuc

SEQ ID NO: 2325652 - RNA, 19 nt, Artificial Sequence
  Description of Artificial Sequence: Synthetic oligonucleotide
cuggauugauggccacuaa

SEQ ID NO: 2325653 - RNA, 19 nt, Artificial Sequence
  Description of Artificial Sequence: Synthetic oligonucleotide
guuucgggucacccauuua

SEQ ID NO: 2325654 - RNA, 19 nt, Artificial Sequence
  Description of Artificial Sequence: Synthetic oligonucleotide
cggaugcugcauuuugaac

SEQ ID NO: 2325655 - RNA, 19 nt, Artificial Sequence
  Description of Artificial Sequence: Synthetic oligonucleotide
gcgccagggauuucauuga

SEQ ID NO: 2325656 - RNA, 19 nt, Artificial Sequence
  Description of Artificial Sequence: Synthetic oligonucleotide
uggcgccagggauuucauu

SEQ ID NO: 2325657 - RNA, 19 nt, Artificial Sequence
  Description of Artificial Sequence: Synthetic oligonucleotide
cgaaucccaauuucacuga

SEQ ID NO: 2325658 - RNA, 19 nt, Artificial Sequence
  Description of Artificial Sequence: Synthetic oligonucleotide
guuccuggugaaauccaau

SEQ ID NO: 2325659 - RNA, 19 nt, Artificial Sequence
  Description of Artificial Sequence: Synthetic oligonucleotide
gccacuaaugacccucuau

SEQ ID NO: 2325660 - RNA, 19 nt, Artificial Sequence
  Description of Artificial Sequence: Synthetic oligonucleotide
gugccucggcucugcccag

SEQ ID NO: 2325661 - RNA, 19 nt, Artificial Sequence
  Description of Artificial Sequence: Synthetic oligonucleotide
gggauuucauugaaugguu

SEQ ID NO: 2325662 - RNA, 19 nt, Artificial Sequence
  Description of Artificial Sequence: Synthetic oligonucleotide
ggccccgcucugcaaacca

SEQ ID NO: 2325663 - RNA, 19 nt, Artificial Sequence
  Description of Artificial Sequence: Synthetic oligonucleotide
guccuuguuccuggugaaa

SEQ ID NO: 2325664 - RNA, 19 nt, Artificial Sequence
  Description of Artificial Sequence: Synthetic oligonucleotide
ccucuaucccaaauccugu

SEQ ID NO: 2325665 - RNA, 19 nt, Artificial Sequence
  Description of Artificial Sequence: Synthetic oligonucleotide
guggaccugcauguuuugu

SEQ ID NO: 2325666 - RNA, 19 nt, Artificial Sequence
  Description of Artificial Sequence: Synthetic oligonucleotide
auguuucgggucacccauu

SEQ ID NO: 2325667 - RNA, 19 nt, Artificial Sequence
  Description of Artificial Sequence: Synthetic oligonucleotide
gcauagcgcucacggucac

SEQ ID NO: 2325668 - RNA, 19 nt, Artificial Sequence
  Description of Artificial Sequence: Synthetic oligonucleotide
gcaaaccauuucaucucaa

SEQ ID NO: 2325669 - RNA, 19 nt, Artificial Sequence
  Description of Artificial Sequence: Synthetic oligonucleotide
ccgcucugcaaaccauuuc

SEQ ID NO: 2325670 - RNA, 19 nt, Artificial Sequence
  Description of Artificial Sequence: Synthetic oligonucleotide
cccgaaucccaauuucacu

SEQ ID NO: 2325671 - RNA, 19 nt, Artificial Sequence
  Description of Artificial Sequence: Synthetic oligonucleotide
ggaguaaagggugcuccau

SEQ ID NO: 2325672 - RNA, 19 nt, Artificial Sequence
  Description of Artificial Sequence: Synthetic oligonucleotide
ccugucaaacuugccaaua

SEQ ID NO: 2325673 - RNA, 19 nt, Artificial Sequence
  Description of Artificial Sequence: Synthetic oligonucleotide
ccauuucaucucaaccgcu

SEQ ID NO: 2325674 - RNA, 19 nt, Artificial Sequence
  Description of Artificial Sequence: Synthetic oligonucleotide
cccauucuuccaggcuuag

SEQ ID NO: 2325675 - RNA, 19 nt, Artificial Sequence
  Description of Artificial Sequence: Synthetic oligonucleotide
guguggccccgcucugcaa

SEQ ID NO: 2325676 - RNA, 19 nt, Artificial Sequence
  Description of Artificial Sequence: Synthetic oligonucleotide
cuuuggcgccagggauuuc

SEQ ID NO: 2325677 - RNA, 19 nt, Artificial Sequence
  Description of Artificial Sequence: Synthetic oligonucleotide
gccaauuccccaggcuuua

SEQ ID NO: 2325678 - RNA, 19 nt, Artificial Sequence
  Description of Artificial Sequence: Synthetic oligonucleotide
gcccagccgcuuuccucag

SEQ ID NO: 2325679 - RNA, 19 nt, Artificial Sequence
  Description of Artificial Sequence: Synthetic oligonucleotide
gcauguuuuguuggaucau

SEQ ID NO: 2325680 - RNA, 19 nt, Artificial Sequence
  Description of Artificial Sequence: Synthetic oligonucleotide
ggcagcggaugcugcauuu

SEQ ID NO: 2325681 - RNA, 19 nt, Artificial Sequence
  Description of Artificial Sequence: Synthetic oligonucleotide
gcgcucacggucaccugga

SEQ ID NO: 2325682 - RNA, 19 nt, Artificial Sequence
  Description of Artificial Sequence: Synthetic oligonucleotide
ggccacuaaugacccucua

SEQ ID NO: 2325683 - RNA, 19 nt, Artificial Sequence
  Description of Artificial Sequence: Synthetic oligonucleotide
gcucacggucaccuggauu

SEQ ID NO: 2325684 - RNA, 19 nt, Artificial Sequence
  Description of Artificial Sequence: Synthetic oligonucleotide
gccgcuuuccucagacccu

SEQ ID NO: 2325685 - RNA, 19 nt, Artificial Sequence
  Description of Artificial Sequence: Synthetic oligonucleotide
caguccacucuggccuuua

SEQ ID NO: 2325686 - RNA, 19 nt, Artificial Sequence
  Description of Artificial Sequence: Synthetic oligonucleotide
gccagggauuucauugaau

SEQ ID NO: 2325687 - RNA, 19 nt, Artificial Sequence
  Description of Artificial Sequence: Synthetic oligonucleotide
ccaggcuuaguacccgguu

SEQ ID NO: 2325688 - RNA, 19 nt, Artificial Sequence
  Description of Artificial Sequence: Synthetic oligonucleotide
cacggucaccuggauugau

SEQ ID NO: 2325689 - RNA, 19 nt, Artificial Sequence
  Description of Artificial Sequence: Synthetic oligonucleotide
cgccagggauuucauugaa

SEQ ID NO: 2325690 - RNA, 19 nt, Artificial Sequence
  Description of Artificial Sequence: Synthetic oligonucleotide
ggcuuaguacccgguucuu

SEQ ID NO: 2325691 - RNA, 19 nt, Artificial Sequence
  Description of Artificial Sequence: Synthetic oligonucleotide
gcagcggaugcugcauuuu

SEQ ID NO: 2325692 - RNA, 19 nt, Artificial Sequence
  Description of Artificial Sequence: Synthetic oligonucleotide
ccauucuuccaggcuuagu

SEQ ID NO: 2325693 - RNA, 19 nt, Artificial Sequence
  Description of Artificial Sequence: Synthetic oligonucleotide
ccuccucaaggcagcggau

SEQ ID NO: 2325694 - RNA, 19 nt, Artificial Sequence
  Description of Artificial Sequence: Synthetic oligonucleotide
ccccgcucugcaaaccauu

SEQ ID NO: 2325695 - RNA, 19 nt, Artificial Sequence
  Description of Artificial Sequence: Synthetic oligonucleotide
gccccgcucugcaaaccau

SEQ ID NO: 2325696 - RNA, 19 nt, Artificial Sequence
  Description of Artificial Sequence: Synthetic oligonucleotide
ccaauuccccaggcuuuau

SEQ ID NO: 2325697 - RNA, 19 nt, Artificial Sequence
  Description of Artificial Sequence: Synthetic oligonucleotide
cgcucacggucaccuggau

SEQ ID NO: 2325698 - RNA, 19 nt, Artificial Sequence
  Description of Artificial Sequence: Synthetic oligonucleotide
aacaugauggcauugaccc

SEQ ID NO: 2325699 - RNA, 19 nt, Artificial Sequence
  Description of Artificial Sequence: Synthetic oligonucleotide
ucagcauagaacaugaugg

SEQ ID NO: 2325700 - RNA, 19 nt, Artificial Sequence
  Description of Artificial Sequence: Synthetic oligonucleotide
aaggccaugagugaaaugc

SEQ ID NO: 2325701 - RNA, 19 nt, Artificial Sequence
  Description of Artificial Sequence: Synthetic oligonucleotide
aauaggaccuggaugaugc

SEQ ID NO: 2325702 - RNA, 19 nt, Artificial Sequence
  Description of Artificial Sequence: Synthetic oligonucleotide
ugugauuuguucuagaguc

SEQ ID NO: 2325703 - RNA, 19 nt, Artificial Sequence
  Description of Artificial Sequence: Synthetic oligonucleotide
ucaaccuggacaaggaggg

SEQ ID NO: 2325704 - RNA, 19 nt, Artificial Sequence
  Description of Artificial Sequence: Synthetic oligonucleotide
aagccagcaaugaagaggc

SEQ ID NO: 2325705 - RNA, 19 nt, Artificial Sequence
  Description of Artificial Sequence: Synthetic oligonucleotide
aaccucguagcauaggucu

SEQ ID NO: 2325706 - RNA, 19 nt, Artificial Sequence
  Description of Artificial Sequence: Synthetic oligonucleotide
ugagguguggcucagcuac

SEQ ID NO: 2325707 - RNA, 19 nt, Artificial Sequence
  Description of Artificial Sequence: Synthetic oligonucleotide
acccuugacaugcagaggg

SEQ ID NO: 2325708 - RNA, 19 nt, Artificial Sequence
  Description of Artificial Sequence: Synthetic oligonucleotide
aaaaggacacugaggauac

SEQ ID NO: 2325709 - RNA, 19 nt, Artificial Sequence
  Description of Artificial Sequence: Synthetic oligonucleotide
cuugaaguagguaccaaag

SEQ ID NO: 2325710 - RNA, 19 nt, Artificial Sequence
  Description of Artificial Sequence: Synthetic oligonucleotide
auuuguucuagaguccugc

SEQ ID NO: 2325711 - RNA, 19 nt, Artificial Sequence
  Description of Artificial Sequence: Synthetic oligonucleotide
aaguagguaccaaaggcac

SEQ ID NO: 2325712 - RNA, 19 nt, Artificial Sequence
  Description of Artificial Sequence: Synthetic oligonucleotide
ucugaaacccaaagcaagc

SEQ ID NO: 2325713 - RNA, 19 nt, Artificial Sequence
  Description of Artificial Sequence: Synthetic oligonucleotide
acucuacuccuucugaaac

SEQ ID NO: 2325714 - RNA, 19 nt, Artificial Sequence
  Description of Artificial Sequence: Synthetic oligonucleotide
gucagcuugaaguagguac

SEQ ID NO: 2325715 - RNA, 19 nt, Artificial Sequence
  Description of Artificial Sequence: Synthetic oligonucleotide
cacauggacgucaacaggc

SEQ ID NO: 2325716 - RNA, 19 nt, Artificial Sequence
  Description of Artificial Sequence: Synthetic oligonucleotide
auugaccccugacagcugc

SEQ ID NO: 2325717 - RNA, 19 nt, Artificial Sequence
  Description of Artificial Sequence: Synthetic oligonucleotide
aucuggugaaccucguagc

SEQ ID NO: 2325718 - RNA, 19 nt, Artificial Sequence
  Description of Artificial Sequence: Synthetic oligonucleotide
ucagggacgaaggucagcg

SEQ ID NO: 2325719 - RNA, 19 nt, Artificial Sequence
  Description of Artificial Sequence: Synthetic oligonucleotide
caaugaaccaguuggugag

SEQ ID NO: 2325720 - RNA, 19 nt, Artificial Sequence
  Description of Artificial Sequence: Synthetic oligonucleotide
uggcauugaccccugacag

SEQ ID NO: 2325721 - RNA, 19 nt, Artificial Sequence
  Description of Artificial Sequence: Synthetic oligonucleotide
uuuagucucagggacgaag

SEQ ID NO: 2325722 - RNA, 19 nt, Artificial Sequence
  Description of Artificial Sequence: Synthetic oligonucleotide
ugaaccucguagcauaggu

SEQ ID NO: 2325723 - RNA, 19 nt, Artificial Sequence
  Description of Artificial Sequence: Synthetic oligonucleotide
ugaggauacagaaggcagc

SEQ ID NO: 2325724 - RNA, 19 nt, Artificial Sequence
  Description of Artificial Sequence: Synthetic oligonucleotide
accagaaaggccaaugaac

SEQ ID NO: 2325725 - RNA, 19 nt, Artificial Sequence
  Description of Artificial Sequence: Synthetic oligonucleotide
gacuagauccagaaucugg

SEQ ID NO: 2325726 - RNA, 19 nt, Artificial Sequence
  Description of Artificial Sequence: Synthetic oligonucleotide
caaggaggggcucugaggc

SEQ ID NO: 2325727 - RNA, 19 nt, Artificial Sequence
  Description of Artificial Sequence: Synthetic oligonucleotide
cucagcauagaacaugaug

SEQ ID NO: 2325728 - RNA, 19 nt, Artificial Sequence
  Description of Artificial Sequence: Synthetic oligonucleotide
gacacagacaccaguagcc

SEQ ID NO: 2325729 - RNA, 19 nt, Artificial Sequence
  Description of Artificial Sequence: Synthetic oligonucleotide
ugggucagcuugaaguagg

SEQ ID NO: 2325730 - RNA, 19 nt, Artificial Sequence
  Description of Artificial Sequence: Synthetic oligonucleotide
uccuucugaaacccaaagc

SEQ ID NO: 2325731 - RNA, 19 nt, Artificial Sequence
  Description of Artificial Sequence: Synthetic oligonucleotide
cagaaucuggugaaccucg

SEQ ID NO: 2325732 - RNA, 19 nt, Artificial Sequence
  Description of Artificial Sequence: Synthetic oligonucleotide
agaaaggccaaugaaccag

SEQ ID NO: 2325733 - RNA, 19 nt, Artificial Sequence
  Description of Artificial Sequence: Synthetic oligonucleotide
cugccagucacagaaaggg

SEQ ID NO: 2325734 - RNA, 19 nt, Artificial Sequence
  Description of Artificial Sequence: Synthetic oligonucleotide
uuuugucaccagaaaggcc

SEQ ID NO: 2325735 - RNA, 19 nt, Artificial Sequence
  Description of Artificial Sequence: Synthetic oligonucleotide
ugccuuuagucucagggac

SEQ ID NO: 2325736 - RNA, 19 nt, Artificial Sequence
  Description of Artificial Sequence: Synthetic oligonucleotide
uguucuagaguccugccuu

SEQ ID NO: 2325737 - RNA, 19 nt, Artificial Sequence
  Description of Artificial Sequence: Synthetic oligonucleotide
auggacgucaacaggcucc

SEQ ID NO: 2325738 - RNA, 19 nt, Artificial Sequence
  Description of Artificial Sequence: Synthetic oligonucleotide
auuaugagggcugccacag

SEQ ID NO: 2325739 - RNA, 19 nt, Artificial Sequence
  Description of Artificial Sequence: Synthetic oligonucleotide
gagugaaaugccaaugaug

SEQ ID NO: 2325740 - RNA, 19 nt, Artificial Sequence
  Description of Artificial Sequence: Synthetic oligonucleotide
aaggccaaugaaccaguug

SEQ ID NO: 2325741 - RNA, 19 nt, Artificial Sequence
  Description of Artificial Sequence: Synthetic oligonucleotide
gaagcagucuccucccugc

SEQ ID NO: 2325742 - RNA, 19 nt, Artificial Sequence
  Description of Artificial Sequence: Synthetic oligonucleotide
aaccaguuggugaggacac

SEQ ID NO: 2325743 - RNA, 19 nt, Artificial Sequence
  Description of Artificial Sequence: Synthetic oligonucleotide
ucuagaguccugccuuuag

SEQ ID NO: 2325744 - RNA, 19 nt, Artificial Sequence
  Description of Artificial Sequence: Synthetic oligonucleotide
gaaguagguaccaaaggca

SEQ ID NO: 2325745 - RNA, 19 nt, Artificial Sequence
  Description of Artificial Sequence: Synthetic oligonucleotide
acucaugcugaauaccaug

SEQ ID NO: 2325746 - RNA, 19 nt, Artificial Sequence
  Description of Artificial Sequence: Synthetic oligonucleotide
uguggcucagcuacaggcc

SEQ ID NO: 2325747 - RNA, 19 nt, Artificial Sequence
  Description of Artificial Sequence: Synthetic oligonucleotide
acagagacuagauccagaa

SEQ ID NO: 2325748 - RNA, 19 nt, Artificial Sequence
  Description of Artificial Sequence: Synthetic oligonucleotide
ugagugaaaugccaaugau

SEQ ID NO: 2325749 - RNA, 19 nt, Artificial Sequence
  Description of Artificial Sequence: Synthetic oligonucleotide
ucggacaugaggagccagg

SEQ ID NO: 2325750 - RNA, 19 nt, Artificial Sequence
  Description of Artificial Sequence: Synthetic oligonucleotide
cuugacaugcagagggaag

SEQ ID NO: 2325751 - RNA, 19 nt, Artificial Sequence
  Description of Artificial Sequence: Synthetic oligonucleotide
aucucggacaugaggagcc

SEQ ID NO: 2325752 - RNA, 19 nt, Artificial Sequence
  Description of Artificial Sequence: Synthetic oligonucleotide
aggggauggguccccagcc

SEQ ID NO: 2325753 - RNA, 19 nt, Artificial Sequence
  Description of Artificial Sequence: Synthetic oligonucleotide
cauagucccucgaaauggg

SEQ ID NO: 2325754 - RNA, 19 nt, Artificial Sequence
  Description of Artificial Sequence: Synthetic oligonucleotide
gaacaugauggcauugacc

SEQ ID NO: 2325755 - RNA, 19 nt, Artificial Sequence
  Description of Artificial Sequence: Synthetic oligonucleotide
uuuguucuagaguccugcc

SEQ ID NO: 2325756 - RNA, 19 nt, Artificial Sequence
  Description of Artificial Sequence: Synthetic oligonucleotide
acaugauggcauugacccc

SEQ ID NO: 2325757 - RNA, 19 nt, Artificial Sequence
  Description of Artificial Sequence: Synthetic oligonucleotide
uugacaugcagagggaaga

SEQ ID NO: 2325758 - RNA, 19 nt, Artificial Sequence
  Description of Artificial Sequence: Synthetic oligonucleotide
ugauuuguucuagaguccu

SEQ ID NO: 2325759 - RNA, 19 nt, Artificial Sequence
  Description of Artificial Sequence: Synthetic oligonucleotide
ucgaaaugggcugugauuu

SEQ ID NO: 2325760 - RNA, 19 nt, Artificial Sequence
  Description of Artificial Sequence: Synthetic oligonucleotide
ucucaaccuggacaaggag

SEQ ID NO: 2325761 - RNA, 19 nt, Artificial Sequence
  Description of Artificial Sequence: Synthetic oligonucleotide
ugggucucaaccuggacaa

SEQ ID NO: 2325762 - RNA, 19 nt, Artificial Sequence
  Description of Artificial Sequence: Synthetic oligonucleotide
cagaaggcaccguagggcc

SEQ ID NO: 2325763 - RNA, 19 nt, Artificial Sequence
  Description of Artificial Sequence: Synthetic oligonucleotide
cagaaaggggcugucauag

SEQ ID NO: 2325764 - RNA, 19 nt, Artificial Sequence
  Description of Artificial Sequence: Synthetic oligonucleotide
ugccagucacagaaagggg

SEQ ID NO: 2325765 - RNA, 19 nt, Artificial Sequence
  Description of Artificial Sequence: Synthetic oligonucleotide
uuguucuagaguccugccu

SEQ ID NO: 2325766 - RNA, 19 nt, Artificial Sequence
  Description of Artificial Sequence: Synthetic oligonucleotide
cucuacuccuucugaaacc

SEQ ID NO: 2325767 - RNA, 19 nt, Artificial Sequence
  Description of Artificial Sequence: Synthetic oligonucleotide
ugaggacacagacaccagu

SEQ ID NO: 2325768 - RNA, 19 nt, Artificial Sequence
  Description of Artificial Sequence: Synthetic oligonucleotide
ucucagauguccugugugu

SEQ ID NO: 2325769 - RNA, 19 nt, Artificial Sequence
  Description of Artificial Sequence: Synthetic oligonucleotide
accaugaccacaccugaca

SEQ ID NO: 2325770 - RNA, 19 nt, Artificial Sequence
  Description of Artificial Sequence: Synthetic oligonucleotide
acagaaggcagcagugagc

SEQ ID NO: 2325771 - RNA, 19 nt, Artificial Sequence
  Description of Artificial Sequence: Synthetic oligonucleotide
uccauuaugagggcugcca

SEQ ID NO: 2325772 - RNA, 19 nt, Artificial Sequence
  Description of Artificial Sequence: Synthetic oligonucleotide
uagucccucgaaaugggcu

SEQ ID NO: 2325773 - RNA, 19 nt, Artificial Sequence
  Description of Artificial Sequence: Synthetic oligonucleotide
acuagauccagaaucuggu

SEQ ID NO: 2325774 - RNA, 19 nt, Artificial Sequence
  Description of Artificial Sequence: Synthetic oligonucleotide
agucccucgaaaugggcug

SEQ ID NO: 2325775 - RNA, 19 nt, Artificial Sequence
  Description of Artificial Sequence: Synthetic oligonucleotide
aggcacucaugcugaauac

SEQ ID NO: 2325776 - RNA, 19 nt, Artificial Sequence
  Description of Artificial Sequence: Synthetic oligonucleotide
agggacgaaggucagcgug

SEQ ID NO: 2325777 - RNA, 19 nt, Artificial Sequence
  Description of Artificial Sequence: Synthetic oligonucleotide
aacccaaagcaagcccagc

SEQ ID NO: 2325778 - RNA, 19 nt, Artificial Sequence
  Description of Artificial Sequence: Synthetic oligonucleotide
gauggcauugaccccugac

SEQ ID NO: 2325779 - RNA, 19 nt, Artificial Sequence
  Description of Artificial Sequence: Synthetic oligonucleotide
auaccaugaccacaccuga

SEQ ID NO: 2325780 - RNA, 19 nt, Artificial Sequence
  Description of Artificial Sequence: Synthetic oligonucleotide
cagagaugggcacuaggag

SEQ ID NO: 2325781 - RNA, 19 nt, Artificial Sequence
  Description of Artificial Sequence: Synthetic oligonucleotide
ugagccagaaggcaccgua

SEQ ID NO: 2325782 - RNA, 19 nt, Artificial Sequence
  Description of Artificial Sequence: Synthetic oligonucleotide
acgucaacaggcuccgcag

SEQ ID NO: 2325783 - RNA, 19 nt, Artificial Sequence
  Description of Artificial Sequence: Synthetic oligonucleotide
cuguccauuaugagggcug

SEQ ID NO: 2325784 - RNA, 19 nt, Artificial Sequence
  Description of Artificial Sequence: Synthetic oligonucleotide
cugaaacccaaagcaagcc

SEQ ID NO: 2325785 - RNA, 19 nt, Artificial Sequence
  Description of Artificial Sequence: Synthetic oligonucleotide
gugaccgaggccaagcugc

SEQ ID NO: 2325786 - RNA, 19 nt, Artificial Sequence
  Description of Artificial Sequence: Synthetic oligonucleotide
cuagauccagaaucuggug

SEQ ID NO: 2325787 - RNA, 19 nt, Artificial Sequence
  Description of Artificial Sequence: Synthetic oligonucleotide
ugaauaccaugaccacacc

SEQ ID NO: 2325788 - RNA, 19 nt, Artificial Sequence
  Description of Artificial Sequence: Synthetic oligonucleotide
gucagcgugaaaaggacac

SEQ ID NO: 2325789 - RNA, 19 nt, Artificial Sequence
  Description of Artificial Sequence: Synthetic oligonucleotide
uaggucugggucucaaccu

SEQ ID NO: 2325790 - RNA, 19 nt, Artificial Sequence
  Description of Artificial Sequence: Synthetic oligonucleotide
gaacucuuuugucaccaga

SEQ ID NO: 2325791 - RNA, 19 nt, Artificial Sequence
  Description of Artificial Sequence: Synthetic oligonucleotide
gacgucaacaggcuccgca

SEQ ID NO: 2325792 - RNA, 19 nt, Artificial Sequence
  Description of Artificial Sequence: Synthetic oligonucleotide
gaaggcaccguagggcccg

SEQ ID NO: 2325793 - RNA, 19 nt, Artificial Sequence
  Description of Artificial Sequence: Synthetic oligonucleotide
uggugaaccucguagcaua

SEQ ID NO: 2325794 - RNA, 19 nt, Artificial Sequence
  Description of Artificial Sequence: Synthetic oligonucleotide
caaagcaagcccagcucag

SEQ ID NO: 2325795 - RNA, 19 nt, Artificial Sequence
  Description of Artificial Sequence: Synthetic oligonucleotide
guagguaccaaaggcacuc

SEQ ID NO: 2325796 - RNA, 19 nt, Artificial Sequence
  Description of Artificial Sequence: Synthetic oligonucleotide
caugaccacaccugacaag

SEQ ID NO: 2325797 - RNA, 19 nt, Artificial Sequence
  Description of Artificial Sequence: Synthetic oligonucleotide
uggacgucaacaggcuccg

SEQ ID NO: 2325798 - RNA, 19 nt, Artificial Sequence
  Description of Artificial Sequence: Synthetic oligonucleotide
ugcugaauaccaugaccac

SEQ ID NO: 2325799 - RNA, 19 nt, Artificial Sequence
  Description of Artificial Sequence: Synthetic oligonucleotide
cagugagccagaaggcacc

SEQ ID NO: 2325800 - RNA, 19 nt, Artificial Sequence
  Description of Artificial Sequence: Synthetic oligonucleotide
gaauaggaccuggaugaug

SEQ ID NO: 2325801 - RNA, 19 nt, Artificial Sequence
  Description of Artificial Sequence: Synthetic oligonucleotide
auagucccucgaaaugggc

SEQ ID NO: 2325802 - RNA, 19 nt, Artificial Sequence
  Description of Artificial Sequence: Synthetic oligonucleotide
guagccacacccuugacau

SEQ ID NO: 2325803 - RNA, 19 nt, Artificial Sequence
  Description of Artificial Sequence: Synthetic oligonucleotide
aggucagcgugaaaaggac

SEQ ID NO: 2325804 - RNA, 19 nt, Artificial Sequence
  Description of Artificial Sequence: Synthetic oligonucleotide
aggccaugagugaaaugcc

SEQ ID NO: 2325805 - RNA, 19 nt, Artificial Sequence
  Description of Artificial Sequence: Synthetic oligonucleotide
uguccauuaugagggcugc

SEQ ID NO: 2325806 - RNA, 19 nt, Artificial Sequence
  Description of Artificial Sequence: Synthetic oligonucleotide
gaccacaccugacaagguc

SEQ ID NO: 2325807 - RNA, 19 nt, Artificial Sequence
  Description of Artificial Sequence: Synthetic oligonucleotide
auagaacaugauggcauug

SEQ ID NO: 2325808 - RNA, 19 nt, Artificial Sequence
  Description of Artificial Sequence: Synthetic oligonucleotide
cacugaggauacagaaggc

SEQ ID NO: 2325809 - RNA, 19 nt, Artificial Sequence
  Description of Artificial Sequence: Synthetic oligonucleotide
ugggcugugauuuguucua

SEQ ID NO: 2325810 - RNA, 19 nt, Artificial Sequence
  Description of Artificial Sequence: Synthetic oligonucleotide
gaugaugcccacggugacc

SEQ ID NO: 2325811 - RNA, 19 nt, Artificial Sequence
  Description of Artificial Sequence: Synthetic oligonucleotide
acggugaccgaggccaagc

SEQ ID NO: 2325812 - RNA, 19 nt, Artificial Sequence
  Description of Artificial Sequence: Synthetic oligonucleotide
guagcauaggucugggucu

SEQ ID NO: 2325813 - RNA, 19 nt, Artificial Sequence
  Description of Artificial Sequence: Synthetic oligonucleotide
ucuguccauuaugagggcu

SEQ ID NO: 2325814 - RNA, 19 nt, Artificial Sequence
  Description of Artificial Sequence: Synthetic oligonucleotide
agcuacaggccacucuacu

SEQ ID NO: 2325815 - RNA, 19 nt, Artificial Sequence
  Description of Artificial Sequence: Synthetic oligonucleotide
gugauuuguucuagagucc

SEQ ID NO: 2325816 - RNA, 19 nt, Artificial Sequence
  Description of Artificial Sequence: Synthetic oligonucleotide
aggcacaugcugcccacag

SEQ ID NO: 2325817 - RNA, 19 nt, Artificial Sequence
  Description of Artificial Sequence: Synthetic oligonucleotide
aacugagguguggcucagc

SEQ ID NO: 2325818 - RNA, 19 nt, Artificial Sequence
  Description of Artificial Sequence: Synthetic oligonucleotide
cuacagagacuagauccag

SEQ ID NO: 2325819 - RNA, 19 nt, Artificial Sequence
  Description of Artificial Sequence: Synthetic oligonucleotide
cagcgugaaaaggacacug

SEQ ID NO: 2325820 - RNA, 19 nt, Artificial Sequence
  Description of Artificial Sequence: Synthetic oligonucleotide
gcgugaaaaggacacugag

SEQ ID NO: 2325821 - RNA, 19 nt, Artificial Sequence
  Description of Artificial Sequence: Synthetic oligonucleotide
caccgcaaagccagcaaug

SEQ ID NO: 2325822 - RNA, 19 nt, Artificial Sequence
  Description of Artificial Sequence: Synthetic oligonucleotide
uaccaugaccacaccugac

SEQ ID NO: 2325823 - RNA, 19 nt, Artificial Sequence
  Description of Artificial Sequence: Synthetic oligonucleotide
cauuaugagggcugccaca

SEQ ID NO: 2325824 - RNA, 19 nt, Artificial Sequence
  Description of Artificial Sequence: Synthetic oligonucleotide
cacagacaccaguagccac

SEQ ID NO: 2325825 - RNA, 19 nt, Artificial Sequence
  Description of Artificial Sequence: Synthetic oligonucleotide
accguagggcccgaggauc

SEQ ID NO: 2325826 - RNA, 19 nt, Artificial Sequence
  Description of Artificial Sequence: Synthetic oligonucleotide
agugagccagaaggcaccg

SEQ ID NO: 2325827 - RNA, 19 nt, Artificial Sequence
  Description of Artificial Sequence: Synthetic oligonucleotide
augccaaugaugaggggcu

SEQ ID NO: 2325828 - RNA, 19 nt, Artificial Sequence
  Description of Artificial Sequence: Synthetic oligonucleotide
gaagaggcacaugcugccc

SEQ ID NO: 2325829 - RNA, 19 nt, Artificial Sequence
  Description of Artificial Sequence: Synthetic oligonucleotide
caugcagagggaagaucuc

SEQ ID NO: 2325830 - RNA, 19 nt, Artificial Sequence
  Description of Artificial Sequence: Synthetic oligonucleotide
cccacauggacgucaacag

SEQ ID NO: 2325831 - RNA, 19 nt, Artificial Sequence
  Description of Artificial Sequence: Synthetic oligonucleotide
ggucucagcauagaacaug

SEQ ID NO: 2325832 - RNA, 19 nt, Artificial Sequence
  Description of Artificial Sequence: Synthetic oligonucleotide
aaaggcacucaugcugaau

SEQ ID NO: 2325833 - RNA, 19 nt, Artificial Sequence
  Description of Artificial Sequence: Synthetic oligonucleotide
cugccuuuagucucaggga

SEQ ID NO: 2325834 - RNA, 19 nt, Artificial Sequence
  Description of Artificial Sequence: Synthetic oligonucleotide
ggcugccagucacagaaag

SEQ ID NO: 2325835 - RNA, 19 nt, Artificial Sequence
  Description of Artificial Sequence: Synthetic oligonucleotide
agaugggcacuaggaggcc

SEQ ID NO: 2325836 - RNA, 19 nt, Artificial Sequence
  Description of Artificial Sequence: Synthetic oligonucleotide
agcuucucagauguccugu

SEQ ID NO: 2325837 - RNA, 19 nt, Artificial Sequence
  Description of Artificial Sequence: Synthetic oligonucleotide
aggaccuggaugaugccca

SEQ ID NO: 2325838 - RNA, 19 nt, Artificial Sequence
  Description of Artificial Sequence: Synthetic oligonucleotide
agacaccaguagccacacc

SEQ ID NO: 2325839 - RNA, 19 nt, Artificial Sequence
  Description of Artificial Sequence: Synthetic oligonucleotide
agacuagauccagaaucug

SEQ ID NO: 2325840 - RNA, 19 nt, Artificial Sequence
  Description of Artificial Sequence: Synthetic oligonucleotide
ccaaugaaccaguugguga

SEQ ID NO: 2325841 - RNA, 19 nt, Artificial Sequence
  Description of Artificial Sequence: Synthetic oligonucleotide
cugcucuguccauuaugag

SEQ ID NO: 2325842 - RNA, 19 nt, Artificial Sequence
  Description of Artificial Sequence: Synthetic oligonucleotide
gaaccucguagcauagguc

SEQ ID NO: 2325843 - RNA, 19 nt, Artificial Sequence
  Description of Artificial Sequence: Synthetic oligonucleotide
ucagcgugaaaaggacacu

SEQ ID NO: 2325844 - RNA, 19 nt, Artificial Sequence
  Description of Artificial Sequence: Synthetic oligonucleotide
uguuggggccacucugggu

SEQ ID NO: 2325845 - RNA, 19 nt, Artificial Sequence
  Description of Artificial Sequence: Synthetic oligonucleotide
caggggauggguccccagc

SEQ ID NO: 2325846 - RNA, 19 nt, Artificial Sequence
  Description of Artificial Sequence: Synthetic oligonucleotide
uggucucagcauagaacau

SEQ ID NO: 2325847 - RNA, 19 nt, Artificial Sequence
  Description of Artificial Sequence: Synthetic oligonucleotide
cucguagcauaggucuggg

SEQ ID NO: 2325848 - RNA, 19 nt, Artificial Sequence
  Description of Artificial Sequence: Synthetic oligonucleotide
gaggccuacaugggaggag

SEQ ID NO: 2325849 - RNA, 19 nt, Artificial Sequence
  Description of Artificial Sequence: Synthetic oligonucleotide
ggauacagaaggcagcagu

SEQ ID NO: 2325850 - RNA, 19 nt, Artificial Sequence
  Description of Artificial Sequence: Synthetic oligonucleotide
cucuguccauuaugagggc

SEQ ID NO: 2325851 - RNA, 19 nt, Artificial Sequence
  Description of Artificial Sequence: Synthetic oligonucleotide
cacacccuugacaugcaga

SEQ ID NO: 2325852 - RNA, 19 nt, Artificial Sequence
  Description of Artificial Sequence: Synthetic oligonucleotide
cauggacgucaacaggcuc

SEQ ID NO: 2325853 - RNA, 19 nt, Artificial Sequence
  Description of Artificial Sequence: Synthetic oligonucleotide
ugcaggcuacagagacuag

SEQ ID NO: 2325854 - RNA, 19 nt, Artificial Sequence
  Description of Artificial Sequence: Synthetic oligonucleotide
gauccagaaucuggugaac

SEQ ID NO: 2325855 - RNA, 19 nt, Artificial Sequence
  Description of Artificial Sequence: Synthetic oligonucleotide
gacaugcagagggaagauc

SEQ ID NO: 2325856 - RNA, 19 nt, Artificial Sequence
  Description of Artificial Sequence: Synthetic oligonucleotide
uggacaaggaggggcucug

SEQ ID NO: 2325857 - RNA, 19 nt, Artificial Sequence
  Description of Artificial Sequence: Synthetic oligonucleotide
guggcucagcuacaggcca

SEQ ID NO: 2325858 - RNA, 19 nt, Artificial Sequence
  Description of Artificial Sequence: Synthetic oligonucleotide
accccugacagcugcugga

SEQ ID NO: 2325859 - RNA, 19 nt, Artificial Sequence
  Description of Artificial Sequence: Synthetic oligonucleotide
gcugcugaacucuuuuguc

SEQ ID NO: 2325860 - RNA, 19 nt, Artificial Sequence
  Description of Artificial Sequence: Synthetic oligonucleotide
gugaaccucguagcauagg

SEQ ID NO: 2325861 - RNA, 19 nt, Artificial Sequence
  Description of Artificial Sequence: Synthetic oligonucleotide
ugaccgaggccaagcugcu

SEQ ID NO: 2325862 - RNA, 19 nt, Artificial Sequence
  Description of Artificial Sequence: Synthetic oligonucleotide
ugacaugcagagggaagau

SEQ ID NO: 2325863 - RNA, 19 nt, Artificial Sequence
  Description of Artificial Sequence: Synthetic oligonucleotide
aggccuacaugggaggagu

SEQ ID NO: 2325864 - RNA, 19 nt, Artificial Sequence
  Description of Artificial Sequence: Synthetic oligonucleotide
gcuugaaguagguaccaaa

SEQ ID NO: 2325865 - RNA, 19 nt, Artificial Sequence
  Description of Artificial Sequence: Synthetic oligonucleotide
ccugcucuguccauuauga

SEQ ID NO: 2325866 - RNA, 19 nt, Artificial Sequence
  Description of Artificial Sequence: Synthetic oligonucleotide
agguaccaaaggcacucau

SEQ ID NO: 2325867 - RNA, 19 nt, Artificial Sequence
  Description of Artificial Sequence: Synthetic oligonucleotide
gagggaagaucucggacau

SEQ ID NO: 2325868 - RNA, 19 nt, Artificial Sequence
  Description of Artificial Sequence: Synthetic oligonucleotide
agcgugaaaaggacacuga

SEQ ID NO: 2325869 - RNA, 19 nt, Artificial Sequence
  Description of Artificial Sequence: Synthetic oligonucleotide
ugaugcugcugaacucuuu

SEQ ID NO: 2325870 - RNA, 19 nt, Artificial Sequence
  Description of Artificial Sequence: Synthetic oligonucleotide
gcuacaggccacucuacuc

SEQ ID NO: 2325871 - RNA, 19 nt, Artificial Sequence
  Description of Artificial Sequence: Synthetic oligonucleotide
gaaucuggugaaccucgua

SEQ ID NO: 2325872 - RNA, 19 nt, Artificial Sequence
  Description of Artificial Sequence: Synthetic oligonucleotide
gcagagaugggcacuagga

SEQ ID NO: 2325873 - RNA, 19 nt, Artificial Sequence
  Description of Artificial Sequence: Synthetic oligonucleotide
agccaggccagccccacau

SEQ ID NO: 2325874 - RNA, 19 nt, Artificial Sequence
  Description of Artificial Sequence: Synthetic oligonucleotide
ugaauaggaccuggaugau

SEQ ID NO: 2325875 - RNA, 19 nt, Artificial Sequence
  Description of Artificial Sequence: Synthetic oligonucleotide
gauggguccccagcccacc

SEQ ID NO: 2325876 - RNA, 19 nt, Artificial Sequence
  Description of Artificial Sequence: Synthetic oligonucleotide
caggccacucuacuccuuc

SEQ ID NO: 2325877 - RNA, 19 nt, Artificial Sequence
  Description of Artificial Sequence: Synthetic oligonucleotide
gaccuggaugaugcccacg

SEQ ID NO: 2325878 - RNA, 19 nt, Artificial Sequence
  Description of Artificial Sequence: Synthetic oligonucleotide
uugaccccugacagcugcu

SEQ ID NO: 2325879 - RNA, 19 nt, Artificial Sequence
  Description of Artificial Sequence: Synthetic oligonucleotide
cugaggccugaggaguagg

SEQ ID NO: 2325880 - RNA, 19 nt, Artificial Sequence
  Description of Artificial Sequence: Synthetic oligonucleotide
uagguaccaaaggcacuca

SEQ ID NO: 2325881 - RNA, 19 nt, Artificial Sequence
  Description of Artificial Sequence: Synthetic oligonucleotide
ucguagcauaggucugggu

SEQ ID NO: 2325882 - RNA, 19 nt, Artificial Sequence
  Description of Artificial Sequence: Synthetic oligonucleotide
gcugccagucacagaaagg

SEQ ID NO: 2325883 - RNA, 19 nt, Artificial Sequence
  Description of Artificial Sequence: Synthetic oligonucleotide
ggugaccgaggccaagcug

SEQ ID NO: 2325884 - RNA, 19 nt, Artificial Sequence
  Description of Artificial Sequence: Synthetic oligonucleotide
caugaggagccaggggaug

SEQ ID NO: 2325885 - RNA, 19 nt, Artificial Sequence
  Description of Artificial Sequence: Synthetic oligonucleotide
ggcucaaacugaggugugg

SEQ ID NO: 2325886 - RNA, 19 nt, Artificial Sequence
  Description of Artificial Sequence: Synthetic oligonucleotide
gcuacagagacuagaucca

SEQ ID NO: 2325887 - RNA, 19 nt, Artificial Sequence
  Description of Artificial Sequence: Synthetic oligonucleotide
gccuuuagucucagggacg

SEQ ID NO: 2325888 - RNA, 19 nt, Artificial Sequence
  Description of Artificial Sequence: Synthetic oligonucleotide
gccaaugaaccaguuggug

SEQ ID NO: 2325889 - RNA, 19 nt, Artificial Sequence
  Description of Artificial Sequence: Synthetic oligonucleotide
agcugcuggaaggccauga

SEQ ID NO: 2325890 - RNA, 19 nt, Artificial Sequence
  Description of Artificial Sequence: Synthetic oligonucleotide
ugauggcauugaccccuga

SEQ ID NO: 2325891 - RNA, 19 nt, Artificial Sequence
  Description of Artificial Sequence: Synthetic oligonucleotide
ccauuaugagggcugccac

SEQ ID NO: 2325892 - RNA, 19 nt, Artificial Sequence
  Description of Artificial Sequence: Synthetic oligonucleotide
aaaggccaaugaaccaguu

SEQ ID NO: 2325893 - RNA, 19 nt, Artificial Sequence
  Description of Artificial Sequence: Synthetic oligonucleotide
cacccuugacaugcagagg

SEQ ID NO: 2325894 - RNA, 19 nt, Artificial Sequence
  Description of Artificial Sequence: Synthetic oligonucleotide
ggugaaccucguagcauag

SEQ ID NO: 2325895 - RNA, 19 nt, Artificial Sequence
  Description of Artificial Sequence: Synthetic oligonucleotide
cauugaccccugacagcug

SEQ ID NO: 2325896 - RNA, 19 nt, Artificial Sequence
  Description of Artificial Sequence: Synthetic oligonucleotide
ccaguuggugaggacacag

SEQ ID NO: 2325897 - RNA, 19 nt, Artificial Sequence
  Description of Artificial Sequence: Synthetic oligonucleotide
guagggcccgaggaucucc

SEQ ID NO: 2325898 - RNA, 19 nt, Artificial Sequence
  Description of Artificial Sequence: Synthetic oligonucleotide
cagcuacaggccacucuac

SEQ ID NO: 2325899 - RNA, 19 nt, Artificial Sequence
  Description of Artificial Sequence: Synthetic oligonucleotide
agaaucuggugaaccucgu

SEQ ID NO: 2325900 - RNA, 19 nt, Artificial Sequence
  Description of Artificial Sequence: Synthetic oligonucleotide
uccgcagagaugggcacua

SEQ ID NO: 2325901 - RNA, 19 nt, Artificial Sequence
  Description of Artificial Sequence: Synthetic oligonucleotide
caguuggugaggacacaga

SEQ ID NO: 2325902 - RNA, 19 nt, Artificial Sequence
  Description of Artificial Sequence: Synthetic oligonucleotide
ucucggacaugaggagcca

SEQ ID NO: 2325903 - RNA, 19 nt, Artificial Sequence
  Description of Artificial Sequence: Synthetic oligonucleotide
cucggacaugaggagccag

SEQ ID NO: 2325904 - RNA, 19 nt, Artificial Sequence
  Description of Artificial Sequence: Synthetic oligonucleotide
uucuagaguccugccuuua

SEQ ID NO: 2325905 - RNA, 19 nt, Artificial Sequence
  Description of Artificial Sequence: Synthetic oligonucleotide
gcacuaggaggccuacaug

SEQ ID NO: 2325906 - RNA, 19 nt, Artificial Sequence
  Description of Artificial Sequence: Synthetic oligonucleotide
ccucguagcauaggucugg

SEQ ID NO: 2325907 - RNA, 19 nt, Artificial Sequence
  Description of Artificial Sequence: Synthetic oligonucleotide
ccacaccugacaaggucag

SEQ ID NO: 2325908 - RNA, 19 nt, Artificial Sequence
  Description of Artificial Sequence: Synthetic oligonucleotide
gagccaggggauggguccc

SEQ ID NO: 2325909 - RNA, 19 nt, Artificial Sequence
  Description of Artificial Sequence: Synthetic oligonucleotide
gaguuguuggggccacucu

SEQ ID NO: 2325910 - RNA, 19 nt, Artificial Sequence
  Description of Artificial Sequence: Synthetic oligonucleotide
cucgaaaugggcugugauu

SEQ ID NO: 2325911 - RNA, 19 nt, Artificial Sequence
  Description of Artificial Sequence: Synthetic oligonucleotide
cuacuccuucugaaaccca

SEQ ID NO: 2325912 - RNA, 19 nt, Artificial Sequence
  Description of Artificial Sequence: Synthetic oligonucleotide
cacagaaaggggcugucau

SEQ ID NO: 2325913 - RNA, 19 nt, Artificial Sequence
  Description of Artificial Sequence: Synthetic oligonucleotide
gcaggcuacagagacuaga

SEQ ID NO: 2325914 - RNA, 19 nt, Artificial Sequence
  Description of Artificial Sequence: Synthetic oligonucleotide
gucacagaaaggggcuguc

SEQ ID NO: 2325915 - RNA, 19 nt, Artificial Sequence
  Description of Artificial Sequence: Synthetic oligonucleotide
gccacucuacuccuucuga

SEQ ID NO: 2325916 - RNA, 19 nt, Artificial Sequence
  Description of Artificial Sequence: Synthetic oligonucleotide
gcaccguagggcccgagga

SEQ ID NO: 2325917 - RNA, 19 nt, Artificial Sequence
  Description of Artificial Sequence: Synthetic oligonucleotide
ucccucgaaaugggcugug

SEQ ID NO: 2325918 - RNA, 19 nt, Artificial Sequence
  Description of Artificial Sequence: Synthetic oligonucleotide
ggcacuaggaggccuacau

SEQ ID NO: 2325919 - RNA, 19 nt, Artificial Sequence
  Description of Artificial Sequence: Synthetic oligonucleotide
ggccaugagugaaaugcca

SEQ ID NO: 2325920 - RNA, 19 nt, Artificial Sequence
  Description of Artificial Sequence: Synthetic oligonucleotide
gccuacaugggaggaguug

SEQ ID NO: 2325921 - RNA, 19 nt, Artificial Sequence
  Description of Artificial Sequence: Synthetic oligonucleotide
ggaguuguuggggccacuc

SEQ ID NO: 2325922 - RNA, 19 nt, Artificial Sequence
  Description of Artificial Sequence: Synthetic oligonucleotide
ucccugcucuguccauuau

SEQ ID NO: 2325923 - RNA, 19 nt, Artificial Sequence
  Description of Artificial Sequence: Synthetic oligonucleotide
gcaagcccagcucagggcu

SEQ ID NO: 2325924 - RNA, 19 nt, Artificial Sequence
  Description of Artificial Sequence: Synthetic oligonucleotide
ccaguagccacacccuuga

SEQ ID NO: 2325925 - RNA, 19 nt, Artificial Sequence
  Description of Artificial Sequence: Synthetic oligonucleotide
ugggcacuaggaggccuac

SEQ ID NO: 2325926 - RNA, 19 nt, Artificial Sequence
  Description of Artificial Sequence: Synthetic oligonucleotide
aggcucaaacugaggugug

SEQ ID NO: 2325927 - RNA, 19 nt, Artificial Sequence
  Description of Artificial Sequence: Synthetic oligonucleotide
ccuuuagucucagggacga

SEQ ID NO: 2325928 - RNA, 19 nt, Artificial Sequence
  Description of Artificial Sequence: Synthetic oligonucleotide
cucagcuacaggccacucu

SEQ ID NO: 2325929 - RNA, 19 nt, Artificial Sequence
  Description of Artificial Sequence: Synthetic oligonucleotide
gggcccgaggaucuccaug

SEQ ID NO: 2325930 - RNA, 19 nt, Artificial Sequence
  Description of Artificial Sequence: Synthetic oligonucleotide
cgcagagaugggcacuagg

SEQ ID NO: 2325931 - RNA, 19 nt, Artificial Sequence
  Description of Artificial Sequence: Synthetic oligonucleotide
accaguuggugaggacaca

SEQ ID NO: 2325932 - RNA, 19 nt, Artificial Sequence
  Description of Artificial Sequence: Synthetic oligonucleotide
caguagccacacccuugac

SEQ ID NO: 2325933 - RNA, 19 nt, Artificial Sequence
  Description of Artificial Sequence: Synthetic oligonucleotide
gccaugagugaaaugccaa

SEQ ID NO: 2325934 - RNA, 19 nt, Artificial Sequence
  Description of Artificial Sequence: Synthetic oligonucleotide
gggcugugauuuguucuag

SEQ ID NO: 2325935 - RNA, 19 nt, Artificial Sequence
  Description of Artificial Sequence: Synthetic oligonucleotide
cagauguccugugugugcu

SEQ ID NO: 2325936 - RNA, 19 nt, Artificial Sequence
  Description of Artificial Sequence: Synthetic oligonucleotide
gacgaaggucagcgugaaa

SEQ ID NO: 2325937 - RNA, 19 nt, Artificial Sequence
  Description of Artificial Sequence: Synthetic oligonucleotide
caaaggcacucaugcugaa

SEQ ID NO: 2325938 - RNA, 19 nt, Artificial Sequence
  Description of Artificial Sequence: Synthetic oligonucleotide
cccgaggaucuccaugaug

SEQ ID NO: 2325939 - RNA, 19 nt, Artificial Sequence
  Description of Artificial Sequence: Synthetic oligonucleotide
cagcugugaauaggaccug

SEQ ID NO: 2325940 - RNA, 19 nt, Artificial Sequence
  Description of Artificial Sequence: Synthetic oligonucleotide
gcugugaauaggaccugga

SEQ ID NO: 2325941 - RNA, 19 nt, Artificial Sequence
  Description of Artificial Sequence: Synthetic oligonucleotide
gaccgaggccaagcugcug

SEQ ID NO: 2325942 - RNA, 19 nt, Artificial Sequence
  Description of Artificial Sequence: Synthetic oligonucleotide
agcccaccgcaaagccagc

SEQ ID NO: 2325943 - RNA, 19 nt, Artificial Sequence
  Description of Artificial Sequence: Synthetic oligonucleotide
cucccugcucuguccauua

SEQ ID NO: 2325944 - RNA, 19 nt, Artificial Sequence
  Description of Artificial Sequence: Synthetic oligonucleotide
cacucaugcugaauaccau

SEQ ID NO: 2325945 - RNA, 19 nt, Artificial Sequence
  Description of Artificial Sequence: Synthetic oligonucleotide
guucuagaguccugccuuu

SEQ ID NO: 2325946 - RNA, 19 nt, Artificial Sequence
  Description of Artificial Sequence: Synthetic oligonucleotide
cacggugaccgaggccaag

SEQ ID NO: 2325947 - RNA, 19 nt, Artificial Sequence
  Description of Artificial Sequence: Synthetic oligonucleotide
ggaccuggaugaugcccac

SEQ ID NO: 2325948 - RNA, 19 nt, Artificial Sequence
  Description of Artificial Sequence: Synthetic oligonucleotide
agcauaggucugggucuca

SEQ ID NO: 2325949 - RNA, 19 nt, Artificial Sequence
  Description of Artificial Sequence: Synthetic oligonucleotide
guccccagcccaccgcaaa

SEQ ID NO: 2325950 - RNA, 19 nt, Artificial Sequence
  Description of Artificial Sequence: Synthetic oligonucleotide
gugugugcugcaggcuaca

SEQ ID NO: 2325951 - RNA, 19 nt, Artificial Sequence
  Description of Artificial Sequence: Synthetic oligonucleotide
ccacucuacuccuucugaa

SEQ ID NO: 2325952 - RNA, 19 nt, Artificial Sequence
  Description of Artificial Sequence: Synthetic oligonucleotide
ggaggccuacaugggagga

SEQ ID NO: 2325953 - RNA, 19 nt, Artificial Sequence
  Description of Artificial Sequence: Synthetic oligonucleotide
cagagacuagauccagaau

SEQ ID NO: 2325954 - RNA, 19 nt, Artificial Sequence
  Description of Artificial Sequence: Synthetic oligonucleotide
ccuacaugggaggaguugu

SEQ ID NO: 2325955 - RNA, 19 nt, Artificial Sequence
  Description of Artificial Sequence: Synthetic oligonucleotide
cccugacagcugcuggaag

SEQ ID NO: 2325956 - RNA, 19 nt, Artificial Sequence
  Description of Artificial Sequence: Synthetic oligonucleotide
cuacaugggaggaguuguu

SEQ ID NO: 2325957 - RNA, 19 nt, Artificial Sequence
  Description of Artificial Sequence: Synthetic oligonucleotide
aaggcaccguagggcccga

SEQ ID NO: 2325958 - RNA, 19 nt, Artificial Sequence
  Description of Artificial Sequence: Synthetic oligonucleotide
agggcccgaggaucuccau

SEQ ID NO: 2325959 - RNA, 19 nt, Artificial Sequence
  Description of Artificial Sequence: Synthetic oligonucleotide
ggauggguccccagcccac

SEQ ID NO: 2325960 - RNA, 19 nt, Artificial Sequence
  Description of Artificial Sequence: Synthetic oligonucleotide
cuggugaaccucguagcau

SEQ ID NO: 2325961 - RNA, 19 nt, Artificial Sequence
  Description of Artificial Sequence: Synthetic oligonucleotide
ccagcccaccgcaaagcca

SEQ ID NO: 2325962 - RNA, 19 nt, Artificial Sequence
  Description of Artificial Sequence: Synthetic oligonucleotide
cuuuagucucagggacgaa

SEQ ID NO: 2325963 - RNA, 19 nt, Artificial Sequence
  Description of Artificial Sequence: Synthetic oligonucleotide
agccccacauggacgucaa

SEQ ID NO: 2325964 - RNA, 19 nt, Artificial Sequence
  Description of Artificial Sequence: Synthetic oligonucleotide
ccuugacaugcagagggaa

SEQ ID NO: 2325965 - RNA, 19 nt, Artificial Sequence
  Description of Artificial Sequence: Synthetic oligonucleotide
ggaaggccaugagugaaau

SEQ ID NO: 2325966 - RNA, 19 nt, Artificial Sequence
  Description of Artificial Sequence: Synthetic oligonucleotide
ccaugagugaaaugccaau

SEQ ID NO: 2325967 - RNA, 19 nt, Artificial Sequence
  Description of Artificial Sequence: Synthetic oligonucleotide
aggggcugucauagucccu

SEQ ID NO: 2325968 - RNA, 19 nt, Artificial Sequence
  Description of Artificial Sequence: Synthetic oligonucleotide
ggccaaugaaccaguuggu

SEQ ID NO: 2325969 - RNA, 19 nt, Artificial Sequence
  Description of Artificial Sequence: Synthetic oligonucleotide
gucccucgaaaugggcugu

SEQ ID NO: 2325970 - RNA, 19 nt, Artificial Sequence
  Description of Artificial Sequence: Synthetic oligonucleotide
gcccacggugaccgaggcc

SEQ ID NO: 2325971 - RNA, 19 nt, Artificial Sequence
  Description of Artificial Sequence: Synthetic oligonucleotide
cagaagcagucuccucccu

SEQ ID NO: 2325972 - RNA, 19 nt, Artificial Sequence
  Description of Artificial Sequence: Synthetic oligonucleotide
acaggccacucuacuccuu

SEQ ID NO: 2325973 - RNA, 19 nt, Artificial Sequence
  Description of Artificial Sequence: Synthetic oligonucleotide
caccaguagccacacccuu

SEQ ID NO: 2325974 - RNA, 19 nt, Artificial Sequence
  Description of Artificial Sequence: Synthetic oligonucleotide
caccguagggcccgaggau

SEQ ID NO: 2325975 - RNA, 19 nt, Artificial Sequence
  Description of Artificial Sequence: Synthetic oligonucleotide
ccgaggccaagcugcuguc

SEQ ID NO: 2325976 - RNA, 19 nt, Artificial Sequence
  Description of Artificial Sequence: Synthetic oligonucleotide
cagggacgaaggucagcgu

SEQ ID NO: 2325977 - RNA, 19 nt, Artificial Sequence
  Description of Artificial Sequence: Synthetic oligonucleotide
cgaggccaagcugcugucc

SEQ ID NO: 2325978 - RNA, 19 nt, Artificial Sequence
  Description of Artificial Sequence: Synthetic oligonucleotide
aggcaccguagggcccgag

SEQ ID NO: 2325979 - RNA, 19 nt, Artificial Sequence
  Description of Artificial Sequence: Synthetic oligonucleotide
ccucgaaaugggcugugau

SEQ ID NO: 2325980 - RNA, 19 nt, Artificial Sequence
  Description of Artificial Sequence: Synthetic oligonucleotide
cuccgcagagaugggcacu

SEQ ID NO: 2325981 - RNA, 19 nt, Artificial Sequence
  Description of Artificial Sequence: Synthetic oligonucleotide
cccaccgcaaagccagcaa

SEQ ID NO: 2325982 - RNA, 19 nt, Artificial Sequence
  Description of Artificial Sequence: Synthetic oligonucleotide
ggacgucaacaggcuccgc

SEQ ID NO: 2325983 - RNA, 19 nt, Artificial Sequence
  Description of Artificial Sequence: Synthetic oligonucleotide
gcucagcuacaggccacuc

SEQ ID NO: 2325984 - RNA, 19 nt, Artificial Sequence
  Description of Artificial Sequence: Synthetic oligonucleotide
gcccaccgcaaagccagca

SEQ ID NO: 2325985 - RNA, 19 nt, Artificial Sequence
  Description of Artificial Sequence: Synthetic oligonucleotide
ccaccgcaaagccagcaau

SEQ ID NO: 2325986 - RNA, 19 nt, Artificial Sequence
  Description of Artificial Sequence: Synthetic oligonucleotide
gggcacuaggaggccuaca

SEQ ID NO: 2325987 - RNA, 19 nt, Artificial Sequence
  Description of Artificial Sequence: Synthetic oligonucleotide
ggcugccacagcugugaau

SEQ ID NO: 2325988 - RNA, 19 nt, Artificial Sequence
  Description of Artificial Sequence: Synthetic oligonucleotide
ccguagggcccgaggaucu

SEQ ID NO: 2325989 - RNA, 19 nt, Artificial Sequence
  Description of Artificial Sequence: Synthetic oligonucleotide
gccccacauggacgucaac

SEQ ID NO: 2325990 - RNA, 19 nt, Artificial Sequence
  Description of Artificial Sequence: Synthetic oligonucleotide
ccgcagagaugggcacuag

SEQ ID NO: 2325991 - RNA, 19 nt, Artificial Sequence
  Description of Artificial Sequence: Synthetic oligonucleotide
cccucgaaaugggcuguga

SEQ ID NO: 2325992 - RNA, 19 nt, Artificial Sequence
  Description of Artificial Sequence: Synthetic oligonucleotide
ccccugacagcugcuggaa

SEQ ID NO: 2325993 - RNA, 19 nt, Artificial Sequence
  Description of Artificial Sequence: Synthetic oligonucleotide
gguccccagcccaccgcaa

SEQ ID NO: 2325994 - RNA, 19 nt, Artificial Sequence
  Description of Artificial Sequence: Synthetic oligonucleotide
cguagggcccgaggaucuc

SEQ ID NO: 2325995 - RNA, 19 nt, Artificial Sequence
  Description of Artificial Sequence: Synthetic oligonucleotide
gcccgaggaucuccaugau

SEQ ID NO: 2325996 - RNA, 19 nt, Artificial Sequence
  Description of Artificial Sequence: Synthetic oligonucleotide
ggccuacaugggaggaguu

SEQ ID NO: 2325997 - RNA, 19 nt, Artificial Sequence
  Description of Artificial Sequence: Synthetic oligonucleotide
ccucccugcucuguccauu

SEQ ID NO: 2325998 - RNA, 19 nt, Artificial Sequence
  Description of Artificial Sequence: Synthetic oligonucleotide
aacauggauauacuguggc

SEQ ID NO: 2325999 - RNA, 19 nt, Artificial Sequence
  Description of Artificial Sequence: Synthetic oligonucleotide
acuggaacuaacaagaagc

SEQ ID NO: 2326000 - RNA, 19 nt, Artificial Sequence
  Description of Artificial Sequence: Synthetic oligonucleotide
aaaacuugcguuuuggagu

SEQ ID NO: 2326001 - RNA, 19 nt, Artificial Sequence
  Description of Artificial Sequence: Synthetic oligonucleotide
uguagcuugaucucaaagg

SEQ ID NO: 2326002 - RNA, 19 nt, Artificial Sequence
  Description of Artificial Sequence: Synthetic oligonucleotide
aaagcugucgaacaggugu

SEQ ID NO: 2326003 - RNA, 19 nt, Artificial Sequence
  Description of Artificial Sequence: Synthetic oligonucleotide
aaaacuggaacuaacaaga

SEQ ID NO: 2326004 - RNA, 19 nt, Artificial Sequence
  Description of Artificial Sequence: Synthetic oligonucleotide
ucuuaagucgaacaguuug

SEQ ID NO: 2326005 - RNA, 19 nt, Artificial Sequence
  Description of Artificial Sequence: Synthetic oligonucleotide
agaacuauguuuugguugg

SEQ ID NO: 2326006 - RNA, 19 nt, Artificial Sequence
  Description of Artificial Sequence: Synthetic oligonucleotide
aacaguuugguuucauggg

SEQ ID NO: 2326007 - RNA, 19 nt, Artificial Sequence
  Description of Artificial Sequence: Synthetic oligonucleotide
uguaacauggauauacugu

SEQ ID NO: 2326008 - RNA, 19 nt, Artificial Sequence
  Description of Artificial Sequence: Synthetic oligonucleotide
uguacaaauccaaagcugu

SEQ ID NO: 2326009 - RNA, 19 nt, Artificial Sequence
  Description of Artificial Sequence: Synthetic oligonucleotide
uugaguggaaugaagagcu

SEQ ID NO: 2326010 - RNA, 19 nt, Artificial Sequence
  Description of Artificial Sequence: Synthetic oligonucleotide
aaauccaaagcugucgaac

SEQ ID NO: 2326011 - RNA, 19 nt, Artificial Sequence
  Description of Artificial Sequence: Synthetic oligonucleotide
aucggcaaacuucucaucc

SEQ ID NO: 2326012 - RNA, 19 nt, Artificial Sequence
  Description of Artificial Sequence: Synthetic oligonucleotide
aaguuaaaagcagaggcag

SEQ ID NO: 2326013 - RNA, 19 nt, Artificial Sequence
  Description of Artificial Sequence: Synthetic oligonucleotide
aaagccaacccuagaaugc

SEQ ID NO: 2326014 - RNA, 19 nt, Artificial Sequence
  Description of Artificial Sequence: Synthetic oligonucleotide
ucacgguugacacagaagu

SEQ ID NO: 2326015 - RNA, 19 nt, Artificial Sequence
  Description of Artificial Sequence: Synthetic oligonucleotide
ggaaguuaaaagcagaggc

SEQ ID NO: 2326016 - RNA, 19 nt, Artificial Sequence
  Description of Artificial Sequence: Synthetic oligonucleotide
uuuucgaugccaaccuugg

SEQ ID NO: 2326017 - RNA, 19 nt, Artificial Sequence
  Description of Artificial Sequence: Synthetic oligonucleotide
acuaacaagaagccgcagg

SEQ ID NO: 2326018 - RNA, 19 nt, Artificial Sequence
  Description of Artificial Sequence: Synthetic oligonucleotide
guaacauggauauacugug

SEQ ID NO: 2326019 - RNA, 19 nt, Artificial Sequence
  Description of Artificial Sequence: Synthetic oligonucleotide
ucagcagggaaguuaaaag

SEQ ID NO: 2326020 - RNA, 19 nt, Artificial Sequence
  Description of Artificial Sequence: Synthetic oligonucleotide
cuuaagucgaacaguuugg

SEQ ID NO: 2326021 - RNA, 19 nt, Artificial Sequence
  Description of Artificial Sequence: Synthetic oligonucleotide
aacuggaacuaacaagaag

SEQ ID NO: 2326022 - RNA, 19 nt, Artificial Sequence
  Description of Artificial Sequence: Synthetic oligonucleotide
uacaaauccaaagcugucg

SEQ ID NO: 2326023 - RNA, 19 nt, Artificial Sequence
  Description of Artificial Sequence: Synthetic oligonucleotide
guagcuugaucucaaaggc

SEQ ID NO: 2326024 - RNA, 19 nt, Artificial Sequence
  Description of Artificial Sequence: Synthetic oligonucleotide
uauguuuugguugguagag

SEQ ID NO: 2326025 - RNA, 19 nt, Artificial Sequence
  Description of Artificial Sequence: Synthetic oligonucleotide
acuauguuuugguugguag

SEQ ID NO: 2326026 - RNA, 19 nt, Artificial Sequence
  Description of Artificial Sequence: Synthetic oligonucleotide
aacccuagaaugcccacag

SEQ ID NO: 2326027 - RNA, 19 nt, Artificial Sequence
  Description of Artificial Sequence: Synthetic oligonucleotide
uucgaugccaaccuuggac

SEQ ID NO: 2326028 - RNA, 19 nt, Artificial Sequence
  Description of Artificial Sequence: Synthetic oligonucleotide
uaaaagcagaggcagaaua

SEQ ID NO: 2326029 - RNA, 19 nt, Artificial Sequence
  Description of Artificial Sequence: Synthetic oligonucleotide
agcugcaccacucuagccg

SEQ ID NO: 2326030 - RNA, 19 nt, Artificial Sequence
  Description of Artificial Sequence: Synthetic oligonucleotide
uuucuuaagucgaacaguu

SEQ ID NO: 2326031 - RNA, 19 nt, Artificial Sequence
  Description of Artificial Sequence: Synthetic oligonucleotide
uaacauggauauacugugg

SEQ ID NO: 2326032 - RNA, 19 nt, Artificial Sequence
  Description of Artificial Sequence: Synthetic oligonucleotide
ucuuucucccaacucauac

SEQ ID NO: 2326033 - RNA, 19 nt, Artificial Sequence
  Description of Artificial Sequence: Synthetic oligonucleotide
aaguuuccgugguaguaac

SEQ ID NO: 2326034 - RNA, 19 nt, Artificial Sequence
  Description of Artificial Sequence: Synthetic oligonucleotide
guuguucacaucgacaucc

SEQ ID NO: 2326035 - RNA, 19 nt, Artificial Sequence
  Description of Artificial Sequence: Synthetic oligonucleotide
uguuuugguugguagagcu

SEQ ID NO: 2326036 - RNA, 19 nt, Artificial Sequence
  Description of Artificial Sequence: Synthetic oligonucleotide
uggaccaucucgaagagua

SEQ ID NO: 2326037 - RNA, 19 nt, Artificial Sequence
  Description of Artificial Sequence: Synthetic oligonucleotide
ucucgaagaguacuguggc

SEQ ID NO: 2326038 - RNA, 19 nt, Artificial Sequence
  Description of Artificial Sequence: Synthetic oligonucleotide
cuaacuggaaagccaaccc

SEQ ID NO: 2326039 - RNA, 19 nt, Artificial Sequence
  Description of Artificial Sequence: Synthetic oligonucleotide
ugcguuuuggaguaaggca

SEQ ID NO: 2326040 - RNA, 19 nt, Artificial Sequence
  Description of Artificial Sequence: Synthetic oligonucleotide
agucgaacaguuugguuuc

SEQ ID NO: 2326041 - RNA, 19 nt, Artificial Sequence
  Description of Artificial Sequence: Synthetic oligonucleotide
ucgccauacagguaacugg

SEQ ID NO: 2326042 - RNA, 19 nt, Artificial Sequence
  Description of Artificial Sequence: Synthetic oligonucleotide
aguacuguggcagucacug

SEQ ID NO: 2326043 - RNA, 19 nt, Artificial Sequence
  Description of Artificial Sequence: Synthetic oligonucleotide
aagccaacccuagaaugcc

SEQ ID NO: 2326044 - RNA, 19 nt, Artificial Sequence
  Description of Artificial Sequence: Synthetic oligonucleotide
cagaggaucgccauacagg

SEQ ID NO: 2326045 - RNA, 19 nt, Artificial Sequence
  Description of Artificial Sequence: Synthetic oligonucleotide
aggcagaauauuuaucuug

SEQ ID NO: 2326046 - RNA, 19 nt, Artificial Sequence
  Description of Artificial Sequence: Synthetic oligonucleotide
ucgaagaguacuguggcag

SEQ ID NO: 2326047 - RNA, 19 nt, Artificial Sequence
  Description of Artificial Sequence: Synthetic oligonucleotide
agaggaucgccauacaggu

SEQ ID NO: 2326048 - RNA, 19 nt, Artificial Sequence
  Description of Artificial Sequence: Synthetic oligonucleotide
ugacacagaagucugugaa

SEQ ID NO: 2326049 - RNA, 19 nt, Artificial Sequence
  Description of Artificial Sequence: Synthetic oligonucleotide
acagcugcaccacucuagc

SEQ ID NO: 2326050 - RNA, 19 nt, Artificial Sequence
  Description of Artificial Sequence: Synthetic oligonucleotide
ggaacuaacaagaagccgc

SEQ ID NO: 2326051 - RNA, 19 nt, Artificial Sequence
  Description of Artificial Sequence: Synthetic oligonucleotide
uauaggcccaguuguagcc

SEQ ID NO: 2326052 - RNA, 19 nt, Artificial Sequence
  Description of Artificial Sequence: Synthetic oligonucleotide
cauacuugugcaaaggcca

SEQ ID NO: 2326053 - RNA, 19 nt, Artificial Sequence
  Description of Artificial Sequence: Synthetic oligonucleotide
uuccgugguaguaacagcu

SEQ ID NO: 2326054 - RNA, 19 nt, Artificial Sequence
  Description of Artificial Sequence: Synthetic oligonucleotide
uugagcaagcagcugaggu

SEQ ID NO: 2326055 - RNA, 19 nt, Artificial Sequence
  Description of Artificial Sequence: Synthetic oligonucleotide
gucagcaugguguuauagg

SEQ ID NO: 2326056 - RNA, 19 nt, Artificial Sequence
  Description of Artificial Sequence: Synthetic oligonucleotide
agagccuaacuggaaagcc

SEQ ID NO: 2326057 - RNA, 19 nt, Artificial Sequence
  Description of Artificial Sequence: Synthetic oligonucleotide
cuuguucucagcagggaag

SEQ ID NO: 2326058 - RNA, 19 nt, Artificial Sequence
  Description of Artificial Sequence: Synthetic oligonucleotide
cuggaacuaacaagaagcc

SEQ ID NO: 2326059 - RNA, 19 nt, Artificial Sequence
  Description of Artificial Sequence: Synthetic oligonucleotide
auugagagagaaguuuccg

SEQ ID NO: 2326060 - RNA, 19 nt, Artificial Sequence
  Description of Artificial Sequence: Synthetic oligonucleotide
guucacaucgacauccagg

SEQ ID NO: 2326061 - RNA, 19 nt, Artificial Sequence
  Description of Artificial Sequence: Synthetic oligonucleotide
gaugcccagagccuaacug

SEQ ID NO: 2326062 - RNA, 19 nt, Artificial Sequence
  Description of Artificial Sequence: Synthetic oligonucleotide
ucccaacucauacuugugc

SEQ ID NO: 2326063 - RNA, 19 nt, Artificial Sequence
  Description of Artificial Sequence: Synthetic oligonucleotide
uuauaggcccaguuguagc

SEQ ID NO: 2326064 - RNA, 19 nt, Artificial Sequence
  Description of Artificial Sequence: Synthetic oligonucleotide
uggaacuaacaagaagccg

SEQ ID NO: 2326065 - RNA, 19 nt, Artificial Sequence
  Description of Artificial Sequence: Synthetic oligonucleotide
aaacuugcguuuuggagua

SEQ ID NO: 2326066 - RNA, 19 nt, Artificial Sequence
  Description of Artificial Sequence: Synthetic oligonucleotide
aguggccccacucacugac

SEQ ID NO: 2326067 - RNA, 19 nt, Artificial Sequence
  Description of Artificial Sequence: Synthetic oligonucleotide
cuuuucgaugccaaccuug

SEQ ID NO: 2326068 - RNA, 19 nt, Artificial Sequence
  Description of Artificial Sequence: Synthetic oligonucleotide
uucgcugccguccuugagc

SEQ ID NO: 2326069 - RNA, 19 nt, Artificial Sequence
  Description of Artificial Sequence: Synthetic oligonucleotide
agagaaguuuccgugguag

SEQ ID NO: 2326070 - RNA, 19 nt, Artificial Sequence
  Description of Artificial Sequence: Synthetic oligonucleotide
aggaucgccauacagguaa

SEQ ID NO: 2326071 - RNA, 19 nt, Artificial Sequence
  Description of Artificial Sequence: Synthetic oligonucleotide
ucucccaacucauacuugu

SEQ ID NO: 2326072 - RNA, 19 nt, Artificial Sequence
  Description of Artificial Sequence: Synthetic oligonucleotide
ucgacauccagggucacag

SEQ ID NO: 2326073 - RNA, 19 nt, Artificial Sequence
  Description of Artificial Sequence: Synthetic oligonucleotide
cacaucgacauccaggguc

SEQ ID NO: 2326074 - RNA, 19 nt, Artificial Sequence
  Description of Artificial Sequence: Synthetic oligonucleotide
agaguacuguggcagucac

SEQ ID NO: 2326075 - RNA, 19 nt, Artificial Sequence
  Description of Artificial Sequence: Synthetic oligonucleotide
ggagguagcuuuucgaugc

SEQ ID NO: 2326076 - RNA, 19 nt, Artificial Sequence
  Description of Artificial Sequence: Synthetic oligonucleotide
uccaaagcugucgaacagg

SEQ ID NO: 2326077 - RNA, 19 nt, Artificial Sequence
  Description of Artificial Sequence: Synthetic oligonucleotide
auggauauacuguggcuug

SEQ ID NO: 2326078 - RNA, 19 nt, Artificial Sequence
  Description of Artificial Sequence: Synthetic oligonucleotide
uguuuuggucagcauggug

SEQ ID NO: 2326079 - RNA, 19 nt, Artificial Sequence
  Description of Artificial Sequence: Synthetic oligonucleotide
ugaccagucgguugucacg

SEQ ID NO: 2326080 - RNA, 19 nt, Artificial Sequence
  Description of Artificial Sequence: Synthetic oligonucleotide
guuuguccagaacaugacc

SEQ ID NO: 2326081 - RNA, 19 nt, Artificial Sequence
  Description of Artificial Sequence: Synthetic oligonucleotide
aucucgaagaguacugugg

SEQ ID NO: 2326082 - RNA, 19 nt, Artificial Sequence
  Description of Artificial Sequence: Synthetic oligonucleotide
ugcaaaaggcccuccaaaa

SEQ ID NO: 2326083 - RNA, 19 nt, Artificial Sequence
  Description of Artificial Sequence: Synthetic oligonucleotide
augaccagucgguugucac

SEQ ID NO: 2326084 - RNA, 19 nt, Artificial Sequence
  Description of Artificial Sequence: Synthetic oligonucleotide
cuguaacauggauauacug

SEQ ID NO: 2326085 - RNA, 19 nt, Artificial Sequence
  Description of Artificial Sequence: Synthetic oligonucleotide
aaaagcagaggcagaauau

SEQ ID NO: 2326086 - RNA, 19 nt, Artificial Sequence
  Description of Artificial Sequence: Synthetic oligonucleotide
ucgguuguucacaucgaca

SEQ ID NO: 2326087 - RNA, 19 nt, Artificial Sequence
  Description of Artificial Sequence: Synthetic oligonucleotide
ucgaacagguguucgcugc

SEQ ID NO: 2326088 - RNA, 19 nt, Artificial Sequence
  Description of Artificial Sequence: Synthetic oligonucleotide
cuugcguuuuggaguaagg

SEQ ID NO: 2326089 - RNA, 19 nt, Artificial Sequence
  Description of Artificial Sequence: Synthetic oligonucleotide
agcugguggaguuccgucg

SEQ ID NO: 2326090 - RNA, 19 nt, Artificial Sequence
  Description of Artificial Sequence: Synthetic oligonucleotide
aguuguagccaacccgcuc

SEQ ID NO: 2326091 - RNA, 19 nt, Artificial Sequence
  Description of Artificial Sequence: Synthetic oligonucleotide
  modified_base (2)..(2): a, c, u, g, unknown or other
cngaaaacuugcguuuugg

SEQ ID NO: 2326092 - RNA, 19 nt, Artificial Sequence
  Description of Artificial Sequence: Synthetic oligonucleotide
ugucccuguaacauggaua

SEQ ID NO: 2326093 - RNA, 19 nt, Artificial Sequence
  Description of Artificial Sequence: Synthetic oligonucleotide
gguguuauaggcccaguug

SEQ ID NO: 2326094 - RNA, 19 nt, Artificial Sequence
  Description of Artificial Sequence: Synthetic oligonucleotide
ugguaguaacagcugcacc

SEQ ID NO: 2326095 - RNA, 19 nt, Artificial Sequence
  Description of Artificial Sequence: Synthetic oligonucleotide
gaccagucgguugucacgg

SEQ ID NO: 2326096 - RNA, 19 nt, Artificial Sequence
  Description of Artificial Sequence: Synthetic oligonucleotide
uugcguuuuggaguaaggc

SEQ ID NO: 2326097 - RNA, 19 nt, Artificial Sequence
  Description of Artificial Sequence: Synthetic oligonucleotide
uucacagaacuauguuuug

SEQ ID NO: 2326098 - RNA, 19 nt, Artificial Sequence
  Description of Artificial Sequence: Synthetic oligonucleotide
guguagcuugaucucaaag

SEQ ID NO: 2326099 - RNA, 19 nt, Artificial Sequence
  Description of Artificial Sequence: Synthetic oligonucleotide
guuauaggcccaguuguag

SEQ ID NO: 2326100 - RNA, 19 nt, Artificial Sequence
  Description of Artificial Sequence: Synthetic oligonucleotide
ccaaccuuggaccaucucg

SEQ ID NO: 2326101 - RNA, 19 nt, Artificial Sequence
  Description of Artificial Sequence: Synthetic oligonucleotide
ugcauugagagagaaguuu

SEQ ID NO: 2326102 - RNA, 19 nt, Artificial Sequence
  Description of Artificial Sequence: Synthetic oligonucleotide
uuaagucgaacaguuuggu

SEQ ID NO: 2326103 - RNA, 19 nt, Artificial Sequence
  Description of Artificial Sequence: Synthetic oligonucleotide
agcgccauguuuuggucag

SEQ ID NO: 2326104 - RNA, 19 nt, Artificial Sequence
  Description of Artificial Sequence: Synthetic oligonucleotide
agggaaguuaaaagcagag

SEQ ID NO: 2326105 - RNA, 19 nt, Artificial Sequence
  Description of Artificial Sequence: Synthetic oligonucleotide
uucgguuguucacaucgac

SEQ ID NO: 2326106 - RNA, 19 nt, Artificial Sequence
  Description of Artificial Sequence: Synthetic oligonucleotide
acauggauauacuguggcu

SEQ ID NO: 2326107 - RNA, 19 nt, Artificial Sequence
  Description of Artificial Sequence: Synthetic oligonucleotide
uugacacagaagucuguga

SEQ ID NO: 2326108 - RNA, 19 nt, Artificial Sequence
  Description of Artificial Sequence: Synthetic oligonucleotide
agcagggaaguuaaaagca

SEQ ID NO: 2326109 - RNA, 19 nt, Artificial Sequence
  Description of Artificial Sequence: Synthetic oligonucleotide
acugacaguagcaaccuga

SEQ ID NO: 2326110 - RNA, 19 nt, Artificial Sequence
  Description of Artificial Sequence: Synthetic oligonucleotide
ucggcaaacuucucauccc

SEQ ID NO: 2326111 - RNA, 19 nt, Artificial Sequence
  Description of Artificial Sequence: Synthetic oligonucleotide
aaagcagaggcagaauauu

SEQ ID NO: 2326112 - RNA, 19 nt, Artificial Sequence
  Description of Artificial Sequence: Synthetic oligonucleotide
ucgguugucacgguugaca

SEQ ID NO: 2326113 - RNA, 19 nt, Artificial Sequence
  Description of Artificial Sequence: Synthetic oligonucleotide
cuuguacaaauccaaagcu

SEQ ID NO: 2326114 - RNA, 19 nt, Artificial Sequence
  Description of Artificial Sequence: Synthetic oligonucleotide
guugacacagaagucugug

SEQ ID NO: 2326115 - RNA, 19 nt, Artificial Sequence
  Description of Artificial Sequence: Synthetic oligonucleotide
gagaucuggguggugguag

SEQ ID NO: 2326116 - RNA, 19 nt, Artificial Sequence
  Description of Artificial Sequence: Synthetic oligonucleotide
aaaggcccuccaaaacugg

SEQ ID NO: 2326117 - RNA, 19 nt, Artificial Sequence
  Description of Artificial Sequence: Synthetic oligonucleotide
  modified_base (6)..(6): a, c, u, g, unknown or other
ugcccngaaaacuugcguu

SEQ ID NO: 2326118 - RNA, 19 nt, Artificial Sequence
  Description of Artificial Sequence: Synthetic oligonucleotide
  modified_base (9)..(9): a, c, u, g, unknown or other
ugcugcccngaaaacuugc

SEQ ID NO: 2326119 - RNA, 19 nt, Artificial Sequence
  Description of Artificial Sequence: Synthetic oligonucleotide
cuauguuuugguugguaga

SEQ ID NO: 2326120 - RNA, 19 nt, Artificial Sequence
  Description of Artificial Sequence: Synthetic oligonucleotide
aguaaggcagcugaagaaa

SEQ ID NO: 2326121 - RNA, 19 nt, Artificial Sequence
  Description of Artificial Sequence: Synthetic oligonucleotide
agagcgccauguuuugguc

SEQ ID NO: 2326122 - RNA, 19 nt, Artificial Sequence
  Description of Artificial Sequence: Synthetic oligonucleotide
ugucacgguugacacagaa

SEQ ID NO: 2326123 - RNA, 19 nt, Artificial Sequence
  Description of Artificial Sequence: Synthetic oligonucleotide
ccaguuguagccaacccgc

SEQ ID NO: 2326124 - RNA, 19 nt, Artificial Sequence
  Description of Artificial Sequence: Synthetic oligonucleotide
gaguaaggcagcugaagaa

SEQ ID NO: 2326125 - RNA, 19 nt, Artificial Sequence
  Description of Artificial Sequence: Synthetic oligonucleotide
gguuucauggggcacuggc

SEQ ID NO: 2326126 - RNA, 19 nt, Artificial Sequence
  Description of Artificial Sequence: Synthetic oligonucleotide
uucucauccccuguggcac

SEQ ID NO: 2326127 - RNA, 19 nt, Artificial Sequence
  Description of Artificial Sequence: Synthetic oligonucleotide
uccgugguaguaacagcug

SEQ ID NO: 2326128 - RNA, 19 nt, Artificial Sequence
  Description of Artificial Sequence: Synthetic oligonucleotide
acuagagcgccauguuuug

SEQ ID NO: 2326129 - RNA, 19 nt, Artificial Sequence
  Description of Artificial Sequence: Synthetic oligonucleotide
uggaguuccgucgccggcg

SEQ ID NO: 2326130 - RNA, 19 nt, Artificial Sequence
  Description of Artificial Sequence: Synthetic oligonucleotide
aacagguguucgcugccgu

SEQ ID NO: 2326131 - RNA, 19 nt, Artificial Sequence
  Description of Artificial Sequence: Synthetic oligonucleotide
cguucgguuguucacaucg

SEQ ID NO: 2326132 - RNA, 19 nt, Artificial Sequence
  Description of Artificial Sequence: Synthetic oligonucleotide
uccaguguagcuugaucuc

SEQ ID NO: 2326133 - RNA, 19 nt, Artificial Sequence
  Description of Artificial Sequence: Synthetic oligonucleotide
guuuuggucagcauggugu

SEQ ID NO: 2326134 - RNA, 19 nt, Artificial Sequence
  Description of Artificial Sequence: Synthetic oligonucleotide
guagcaaccugaugcccag

SEQ ID NO: 2326135 - RNA, 19 nt, Artificial Sequence
  Description of Artificial Sequence: Synthetic oligonucleotide
caucucgaagaguacugug

SEQ ID NO: 2326136 - RNA, 19 nt, Artificial Sequence
  Description of Artificial Sequence: Synthetic oligonucleotide
gcguuuuggaguaaggcag

SEQ ID NO: 2326137 - RNA, 19 nt, Artificial Sequence
  Description of Artificial Sequence: Synthetic oligonucleotide
ugucgaacagguguucgcu

SEQ ID NO: 2326138 - RNA, 19 nt, Artificial Sequence
  Description of Artificial Sequence: Synthetic oligonucleotide
uggccccacucacugacag

SEQ ID NO: 2326139 - RNA, 19 nt, Artificial Sequence
  Description of Artificial Sequence: Synthetic oligonucleotide
caaccuuggaccaucucga

SEQ ID NO: 2326140 - RNA, 19 nt, Artificial Sequence
  Description of Artificial Sequence: Synthetic oligonucleotide
cagccgaucggcaaacuuc

SEQ ID NO: 2326141 - RNA, 19 nt, Artificial Sequence
  Description of Artificial Sequence: Synthetic oligonucleotide
cccuagaaugcccacagcc

SEQ ID NO: 2326142 - RNA, 19 nt, Artificial Sequence
  Description of Artificial Sequence: Synthetic oligonucleotide
aucgccauacagguaacug

SEQ ID NO: 2326143 - RNA, 19 nt, Artificial Sequence
  Description of Artificial Sequence: Synthetic oligonucleotide
gcaugcaucuucuccaggc

SEQ ID NO: 2326144 - RNA, 19 nt, Artificial Sequence
  Description of Artificial Sequence: Synthetic oligonucleotide
gggaaguuaaaagcagagg

SEQ ID NO: 2326145 - RNA, 19 nt, Artificial Sequence
  Description of Artificial Sequence: Synthetic oligonucleotide
agugcaaaaggcccuccaa

SEQ ID NO: 2326146 - RNA, 19 nt, Artificial Sequence
  Description of Artificial Sequence: Synthetic oligonucleotide
aacuaacaagaagccgcag

SEQ ID NO: 2326147 - RNA, 19 nt, Artificial Sequence
  Description of Artificial Sequence: Synthetic oligonucleotide
aacuggaaagccaacccua

SEQ ID NO: 2326148 - RNA, 19 nt, Artificial Sequence
  Description of Artificial Sequence: Synthetic oligonucleotide
acccgcucuucacagaacu

SEQ ID NO: 2326149 - RNA, 19 nt, Artificial Sequence
  Description of Artificial Sequence: Synthetic oligonucleotide
cugucgaacagguguucgc

SEQ ID NO: 2326150 - RNA, 19 nt, Artificial Sequence
  Description of Artificial Sequence: Synthetic oligonucleotide
gaacuaacaagaagccgca

SEQ ID NO: 2326151 - RNA, 19 nt, Artificial Sequence
  Description of Artificial Sequence: Synthetic oligonucleotide
uuggucagcaugguguuau

SEQ ID NO: 2326152 - RNA, 19 nt, Artificial Sequence
  Description of Artificial Sequence: Synthetic oligonucleotide
uuuuggaguaaggcagcug

SEQ ID NO: 2326153 - RNA, 19 nt, Artificial Sequence
  Description of Artificial Sequence: Synthetic oligonucleotide
gaaguuuccgugguaguaa

SEQ ID NO: 2326154 - RNA, 19 nt, Artificial Sequence
  Description of Artificial Sequence: Synthetic oligonucleotide
acagccuuucuuaagucga

SEQ ID NO: 2326155 - RNA, 19 nt, Artificial Sequence
  Description of Artificial Sequence: Synthetic oligonucleotide
ccguccuugagcaagcagc

SEQ ID NO: 2326156 - RNA, 19 nt, Artificial Sequence
  Description of Artificial Sequence: Synthetic oligonucleotide
cuuggaccaucucgaagag

SEQ ID NO: 2326157 - RNA, 19 nt, Artificial Sequence
  Description of Artificial Sequence: Synthetic oligonucleotide
ccauguuuuggucagcaug

SEQ ID NO: 2326158 - RNA, 19 nt, Artificial Sequence
  Description of Artificial Sequence: Synthetic oligonucleotide
ggaguaaggcagcugaaga

SEQ ID NO: 2326159 - RNA, 19 nt, Artificial Sequence
  Description of Artificial Sequence: Synthetic oligonucleotide
ucacaguccucugcucugg

SEQ ID NO: 2326160 - RNA, 19 nt, Artificial Sequence
  Description of Artificial Sequence: Synthetic oligonucleotide
gaacagguguucgcugccg

SEQ ID NO: 2326161 - RNA, 19 nt, Artificial Sequence
  Description of Artificial Sequence: Synthetic oligonucleotide
guaaggcagcugaagaaac

SEQ ID NO: 2326162 - RNA, 19 nt, Artificial Sequence
  Description of Artificial Sequence: Synthetic oligonucleotide
cagucgguugucacgguug

SEQ ID NO: 2326163 - RNA, 19 nt, Artificial Sequence
  Description of Artificial Sequence: Synthetic oligonucleotide
uaagucgaacaguuugguu

SEQ ID NO: 2326164 - RNA, 19 nt, Artificial Sequence
  Description of Artificial Sequence: Synthetic oligonucleotide
ugguguuauaggcccaguu

SEQ ID NO: 2326165 - RNA, 19 nt, Artificial Sequence
  Description of Artificial Sequence: Synthetic oligonucleotide
guuguagccaacccgcucu

SEQ ID NO: 2326166 - RNA, 19 nt, Artificial Sequence
  Description of Artificial Sequence: Synthetic oligonucleotide
acuugcguuuuggaguaag

SEQ ID NO: 2326167 - RNA, 19 nt, Artificial Sequence
  Description of Artificial Sequence: Synthetic oligonucleotide
cagaggcagaauauuuauc

SEQ ID NO: 2326168 - RNA, 19 nt, Artificial Sequence
  Description of Artificial Sequence: Synthetic oligonucleotide
uucauggggcacuggcaug

SEQ ID NO: 2326169 - RNA, 19 nt, Artificial Sequence
  Description of Artificial Sequence: Synthetic oligonucleotide
agccuuucuuaagucgaac

SEQ ID NO: 2326170 - RNA, 19 nt, Artificial Sequence
  Description of Artificial Sequence: Synthetic oligonucleotide
uagccgguccguucgguug

SEQ ID NO: 2326171 - RNA, 19 nt, Artificial Sequence
  Description of Artificial Sequence: Synthetic oligonucleotide
cccuguaacauggauauac

SEQ ID NO: 2326172 - RNA, 19 nt, Artificial Sequence
  Description of Artificial Sequence: Synthetic oligonucleotide
guaguaacagcugcaccac

SEQ ID NO: 2326173 - RNA, 19 nt, Artificial Sequence
  Description of Artificial Sequence: Synthetic oligonucleotide
ucgcugccguccuugagca

SEQ ID NO: 2326174 - RNA, 19 nt, Artificial Sequence
  Description of Artificial Sequence: Synthetic oligonucleotide
gucccuguaacauggauau

SEQ ID NO: 2326175 - RNA, 19 nt, Artificial Sequence
  Description of Artificial Sequence: Synthetic oligonucleotide
gcagaggaucgccauacag

SEQ ID NO: 2326176 - RNA, 19 nt, Artificial Sequence
  Description of Artificial Sequence: Synthetic oligonucleotide
ucgcagaggaucgccauac

SEQ ID NO: 2326177 - RNA, 19 nt, Artificial Sequence
  Description of Artificial Sequence: Synthetic oligonucleotide
uucuuaagucgaacaguuu

SEQ ID NO: 2326178 - RNA, 19 nt, Artificial Sequence
  Description of Artificial Sequence: Synthetic oligonucleotide
aacuauguuuugguuggua

SEQ ID NO: 2326179 - RNA, 19 nt, Artificial Sequence
  Description of Artificial Sequence: Synthetic oligonucleotide
aaacuggaacuaacaagaa

SEQ ID NO: 2326180 - RNA, 19 nt, Artificial Sequence
  Description of Artificial Sequence: Synthetic oligonucleotide
gcugcaccacucuagccgg

SEQ ID NO: 2326181 - RNA, 19 nt, Artificial Sequence
  Description of Artificial Sequence: Synthetic oligonucleotide
caugguguuauaggcccag

SEQ ID NO: 2326182 - RNA, 19 nt, Artificial Sequence
  Description of Artificial Sequence: Synthetic oligonucleotide
cagggaaguuaaaagcaga

SEQ ID NO: 2326183 - RNA, 19 nt, Artificial Sequence
  Description of Artificial Sequence: Synthetic oligonucleotide
ugguggaguuccgucgccg

SEQ ID NO: 2326184 - RNA, 19 nt, Artificial Sequence
  Description of Artificial Sequence: Synthetic oligonucleotide
gaagaguacuguggcaguc

SEQ ID NO: 2326185 - RNA, 19 nt, Artificial Sequence
  Description of Artificial Sequence: Synthetic oligonucleotide
accaucucgaagaguacug

SEQ ID NO: 2326186 - RNA, 19 nt, Artificial Sequence
  Description of Artificial Sequence: Synthetic oligonucleotide
augcccacagccuuucuua

SEQ ID NO: 2326187 - RNA, 19 nt, Artificial Sequence
  Description of Artificial Sequence: Synthetic oligonucleotide
agucgguugucacgguuga

SEQ ID NO: 2326188 - RNA, 19 nt, Artificial Sequence
  Description of Artificial Sequence: Synthetic oligonucleotide
acaucgacauccaggguca

SEQ ID NO: 2326189 - RNA, 19 nt, Artificial Sequence
  Description of Artificial Sequence: Synthetic oligonucleotide
agaaguuuccgugguagua

SEQ ID NO: 2326190 - RNA, 19 nt, Artificial Sequence
  Description of Artificial Sequence: Synthetic oligonucleotide
ugaugcccagagccuaacu

SEQ ID NO: 2326191 - RNA, 19 nt, Artificial Sequence
  Description of Artificial Sequence: Synthetic oligonucleotide
caccacucuagccgguccg

SEQ ID NO: 2326192 - RNA, 19 nt, Artificial Sequence
  Description of Artificial Sequence: Synthetic oligonucleotide
gagguagcuuuucgaugcc

SEQ ID NO: 2326193 - RNA, 19 nt, Artificial Sequence
  Description of Artificial Sequence: Synthetic oligonucleotide
ccuaacuggaaagccaacc

SEQ ID NO: 2326194 - RNA, 19 nt, Artificial Sequence
  Description of Artificial Sequence: Synthetic oligonucleotide
uggcacuagagcgccaugu

SEQ ID NO: 2326195 - RNA, 19 nt, Artificial Sequence
  Description of Artificial Sequence: Synthetic oligonucleotide
gucacgguugacacagaag

SEQ ID NO: 2326196 - RNA, 19 nt, Artificial Sequence
  Description of Artificial Sequence: Synthetic oligonucleotide
aguccucugcucugggaca

SEQ ID NO: 2326197 - RNA, 19 nt, Artificial Sequence
  Description of Artificial Sequence: Synthetic oligonucleotide
gucgaacagguguucgcug

SEQ ID NO: 2326198 - RNA, 19 nt, Artificial Sequence
  Description of Artificial Sequence: Synthetic oligonucleotide
ccagaacaugaccagucgg

SEQ ID NO: 2326199 - RNA, 19 nt, Artificial Sequence
  Description of Artificial Sequence: Synthetic oligonucleotide
cacagaagucugugaaguc

SEQ ID NO: 2326200 - RNA, 19 nt, Artificial Sequence
  Description of Artificial Sequence: Synthetic oligonucleotide
ggcgagaucuggguggugg

SEQ ID NO: 2326201 - RNA, 19 nt, Artificial Sequence
  Description of Artificial Sequence: Synthetic oligonucleotide
guuuugguugguagagcug

SEQ ID NO: 2326202 - RNA, 19 nt, Artificial Sequence
  Description of Artificial Sequence: Synthetic oligonucleotide
cagguguucgcugccgucc

SEQ ID NO: 2326203 - RNA, 19 nt, Artificial Sequence
  Description of Artificial Sequence: Synthetic oligonucleotide
uaacagcugcaccacucua

SEQ ID NO: 2326204 - RNA, 19 nt, Artificial Sequence
  Description of Artificial Sequence: Synthetic oligonucleotide
gaaguccuucagcagccga

SEQ ID NO: 2326205 - RNA, 19 nt, Artificial Sequence
  Description of Artificial Sequence: Synthetic oligonucleotide
guggaaugaagagcugggc

SEQ ID NO: 2326206 - RNA, 19 nt, Artificial Sequence
  Description of Artificial Sequence: Synthetic oligonucleotide
cacgguugacacagaaguc

SEQ ID NO: 2326207 - RNA, 19 nt, Artificial Sequence
  Description of Artificial Sequence: Synthetic oligonucleotide
ccccuguggcacuagagcg

SEQ ID NO: 2326208 - RNA, 19 nt, Artificial Sequence
  Description of Artificial Sequence: Synthetic oligonucleotide
gcaaaaggcccuccaaaac

SEQ ID NO: 2326209 - RNA, 19 nt, Artificial Sequence
  Description of Artificial Sequence: Synthetic oligonucleotide
gugguaguaacagcugcac

SEQ ID NO: 2326210 - RNA, 19 nt, Artificial Sequence
  Description of Artificial Sequence: Synthetic oligonucleotide
  modified_base (14)..(14): a, c, u, g, unknown or other
ggcgcugcugcccngaaaa

SEQ ID NO: 2326211 - RNA, 19 nt, Artificial Sequence
  Description of Artificial Sequence: Synthetic oligonucleotide
augccaaccuuggaccauc

SEQ ID NO: 2326212 - RNA, 19 nt, Artificial Sequence
  Description of Artificial Sequence: Synthetic oligonucleotide
uugguagagcugguggagu

SEQ ID NO: 2326213 - RNA, 19 nt, Artificial Sequence
  Description of Artificial Sequence: Synthetic oligonucleotide
cuagagcgccauguuuugg

SEQ ID NO: 2326214 - RNA, 19 nt, Artificial Sequence
  Description of Artificial Sequence: Synthetic oligonucleotide
agccaacccuagaaugccc

SEQ ID NO: 2326215 - RNA, 19 nt, Artificial Sequence
  Description of Artificial Sequence: Synthetic oligonucleotide
cgccauacagguaacuggg

SEQ ID NO: 2326216 - RNA, 19 nt, Artificial Sequence
  Description of Artificial Sequence: Synthetic oligonucleotide
aaccugaugcccagagccu

SEQ ID NO: 2326217 - RNA, 19 nt, Artificial Sequence
  Description of Artificial Sequence: Synthetic oligonucleotide
cuuucuuaagucgaacagu

SEQ ID NO: 2326218 - RNA, 19 nt, Artificial Sequence
  Description of Artificial Sequence: Synthetic oligonucleotide
guaacugggcagugcaaaa

SEQ ID NO: 2326219 - RNA, 19 nt, Artificial Sequence
  Description of Artificial Sequence: Synthetic oligonucleotide
uggauauacuguggcuugu

SEQ ID NO: 2326220 - RNA, 19 nt, Artificial Sequence
  Description of Artificial Sequence: Synthetic oligonucleotide
cucccaacucauacuugug

SEQ ID NO: 2326221 - RNA, 19 nt, Artificial Sequence
  Description of Artificial Sequence: Synthetic oligonucleotide
gguggaguuccgucgccgg

SEQ ID NO: 2326222 - RNA, 19 nt, Artificial Sequence
  Description of Artificial Sequence: Synthetic oligonucleotide
uagccaacccgcucuucac

SEQ ID NO: 2326223 - RNA, 19 nt, Artificial Sequence
  Description of Artificial Sequence: Synthetic oligonucleotide
uguggcacuagagcgccau

SEQ ID NO: 2326224 - RNA, 19 nt, Artificial Sequence
  Description of Artificial Sequence: Synthetic oligonucleotide
aacccgcucuucacagaac

SEQ ID NO: 2326225 - RNA, 19 nt, Artificial Sequence
  Description of Artificial Sequence: Synthetic oligonucleotide
ugguagagcugguggaguu

SEQ ID NO: 2326226 - RNA, 19 nt, Artificial Sequence
  Description of Artificial Sequence: Synthetic oligonucleotide
aguguagcuugaucucaaa

SEQ ID NO: 2326227 - RNA, 19 nt, Artificial Sequence
  Description of Artificial Sequence: Synthetic oligonucleotide
ucacaucgacauccagggu

SEQ ID NO: 2326228 - RNA, 19 nt, Artificial Sequence
  Description of Artificial Sequence: Synthetic oligonucleotide
caugcaucuucuccaggca

SEQ ID NO: 2326229 - RNA, 19 nt, Artificial Sequence
  Description of Artificial Sequence: Synthetic oligonucleotide
agccgaucggcaaacuucu

SEQ ID NO: 2326230 - RNA, 19 nt, Artificial Sequence
  Description of Artificial Sequence: Synthetic oligonucleotide
agccaacccgcucuucaca

SEQ ID NO: 2326231 - RNA, 19 nt, Artificial Sequence
  Description of Artificial Sequence: Synthetic oligonucleotide
uccguucgguuguucacau

SEQ ID NO: 2326232 - RNA, 19 nt, Artificial Sequence
  Description of Artificial Sequence: Synthetic oligonucleotide
uguucgcugccguccuuga

SEQ ID NO: 2326233 - RNA, 19 nt, Artificial Sequence
  Description of Artificial Sequence: Synthetic oligonucleotide
gcauugagagagaaguuuc

SEQ ID NO: 2326234 - RNA, 19 nt, Artificial Sequence
  Description of Artificial Sequence: Synthetic oligonucleotide
agccuaacuggaaagccaa

SEQ ID NO: 2326235 - RNA, 19 nt, Artificial Sequence
  Description of Artificial Sequence: Synthetic oligonucleotide
gccuuucuuaagucgaaca

SEQ ID NO: 2326236 - RNA, 19 nt, Artificial Sequence
  Description of Artificial Sequence: Synthetic oligonucleotide
cucagcagggaaguuaaaa

SEQ ID NO: 2326237 - RNA, 19 nt, Artificial Sequence
  Description of Artificial Sequence: Synthetic oligonucleotide
cuugaucucaaaggcugca

SEQ ID NO: 2326238 - RNA, 19 nt, Artificial Sequence
  Description of Artificial Sequence: Synthetic oligonucleotide
cacucuagccgguccguuc

SEQ ID NO: 2326239 - RNA, 19 nt, Artificial Sequence
  Description of Artificial Sequence: Synthetic oligonucleotide
gcugccguccuugagcaag

SEQ ID NO: 2326240 - RNA, 19 nt, Artificial Sequence
  Description of Artificial Sequence: Synthetic oligonucleotide
agcugucgaacagguguuc

SEQ ID NO: 2326241 - RNA, 19 nt, Artificial Sequence
  Description of Artificial Sequence: Synthetic oligonucleotide
gcugucgaacagguguucg

SEQ ID NO: 2326242 - RNA, 19 nt, Artificial Sequence
  Description of Artificial Sequence: Synthetic oligonucleotide
aagcugucgaacagguguu

SEQ ID NO: 2326243 - RNA, 19 nt, Artificial Sequence
  Description of Artificial Sequence: Synthetic oligonucleotide
cugccguccuugagcaagc

SEQ ID NO: 2326244 - RNA, 19 nt, Artificial Sequence
  Description of Artificial Sequence: Synthetic oligonucleotide
ggucagcaugguguuauag

SEQ ID NO: 2326245 - RNA, 19 nt, Artificial Sequence
  Description of Artificial Sequence: Synthetic oligonucleotide
aguuccgucgccggcgcug

SEQ ID NO: 2326246 - RNA, 19 nt, Artificial Sequence
  Description of Artificial Sequence: Synthetic oligonucleotide
ucucauccccuguggcacu

SEQ ID NO: 2326247 - RNA, 19 nt, Artificial Sequence
  Description of Artificial Sequence: Synthetic oligonucleotide
gcugguggaguuccgucgc

SEQ ID NO: 2326248 - RNA, 19 nt, Artificial Sequence
  Description of Artificial Sequence: Synthetic oligonucleotide
gagaaguuuccgugguagu

SEQ ID NO: 2326249 - RNA, 19 nt, Artificial Sequence
  Description of Artificial Sequence: Synthetic oligonucleotide
agguguucgcugccguccu

SEQ ID NO: 2326250 - RNA, 19 nt, Artificial Sequence
  Description of Artificial Sequence: Synthetic oligonucleotide
gaccaucucgaagaguacu

SEQ ID NO: 2326251 - RNA, 19 nt, Artificial Sequence
  Description of Artificial Sequence: Synthetic oligonucleotide
ccgugguaguaacagcugc

SEQ ID NO: 2326252 - RNA, 19 nt, Artificial Sequence
  Description of Artificial Sequence: Synthetic oligonucleotide
ugccaaccuuggaccaucu

SEQ ID NO: 2326253 - RNA, 19 nt, Artificial Sequence
  Description of Artificial Sequence: Synthetic oligonucleotide
caacccgcucuucacagaa

SEQ ID NO: 2326254 - RNA, 19 nt, Artificial Sequence
  Description of Artificial Sequence: Synthetic oligonucleotide
agccgguccguucgguugu

SEQ ID NO: 2326255 - RNA, 19 nt, Artificial Sequence
  Description of Artificial Sequence: Synthetic oligonucleotide
ggcagaauauuuaucuugu

SEQ ID NO: 2326256 - RNA, 19 nt, Artificial Sequence
  Description of Artificial Sequence: Synthetic oligonucleotide
uuggaccaucucgaagagu

SEQ ID NO: 2326257 - RNA, 19 nt, Artificial Sequence
  Description of Artificial Sequence: Synthetic oligonucleotide
gagagaaguuuccguggua

SEQ ID NO: 2326258 - RNA, 19 nt, Artificial Sequence
  Description of Artificial Sequence: Synthetic oligonucleotide
auccccuguggcacuagag

SEQ ID NO: 2326259 - RNA, 19 nt, Artificial Sequence
  Description of Artificial Sequence: Synthetic oligonucleotide
uuguagccaacccgcucuu

SEQ ID NO: 2326260 - RNA, 19 nt, Artificial Sequence
  Description of Artificial Sequence: Synthetic oligonucleotide
ucucagcagggaaguuaaa

SEQ ID NO: 2326261 - RNA, 19 nt, Artificial Sequence
  Description of Artificial Sequence: Synthetic oligonucleotide
cguuuuggaguaaggcagc

SEQ ID NO: 2326262 - RNA, 19 nt, Artificial Sequence
  Description of Artificial Sequence: Synthetic oligonucleotide
guguucgcugccguccuug

SEQ ID NO: 2326263 - RNA, 19 nt, Artificial Sequence
  Description of Artificial Sequence: Synthetic oligonucleotide
cugguggaguuccgucgcc

SEQ ID NO: 2326264 - RNA, 19 nt, Artificial Sequence
  Description of Artificial Sequence: Synthetic oligonucleotide
  modified_base (8)..(8): a, c, u, g, unknown or other
gcugcccngaaaacuugcg

SEQ ID NO: 2326265 - RNA, 19 nt, Artificial Sequence
  Description of Artificial Sequence: Synthetic oligonucleotide
ccauacagguaacugggca

SEQ ID NO: 2326266 - RNA, 19 nt, Artificial Sequence
  Description of Artificial Sequence: Synthetic oligonucleotide
gguccguucgguuguucac

SEQ ID NO: 2326267 - RNA, 19 nt, Artificial Sequence
  Description of Artificial Sequence: Synthetic oligonucleotide
gcuuguucucagcagggaa

SEQ ID NO: 2326268 - RNA, 19 nt, Artificial Sequence
  Description of Artificial Sequence: Synthetic oligonucleotide
ucgaacaguuugguuucau

SEQ ID NO: 2326269 - RNA, 19 nt, Artificial Sequence
  Description of Artificial Sequence: Synthetic oligonucleotide
  modified_base (3)..(3): a, c, u, g, unknown or other
ccngaaaacuugcguuuug

SEQ ID NO: 2326270 - RNA, 19 nt, Artificial Sequence
  Description of Artificial Sequence: Synthetic oligonucleotide
  modified_base (19)..(19): a, c, u, g, unknown or other
ucgccggcgcugcugcccn

SEQ ID NO: 2326271 - RNA, 19 nt, Artificial Sequence
  Description of Artificial Sequence: Synthetic oligonucleotide
gguuguucacaucgacauc

SEQ ID NO: 2326272 - RNA, 19 nt, Artificial Sequence
  Description of Artificial Sequence: Synthetic oligonucleotide
cuggaaagccaacccuaga

SEQ ID NO: 2326273 - RNA, 19 nt, Artificial Sequence
  Description of Artificial Sequence: Synthetic oligonucleotide
uugucacgguugacacaga

SEQ ID NO: 2326274 - RNA, 19 nt, Artificial Sequence
  Description of Artificial Sequence: Synthetic oligonucleotide
gcaguuuguccagaacaug

SEQ ID NO: 2326275 - RNA, 19 nt, Artificial Sequence
  Description of Artificial Sequence: Synthetic oligonucleotide
ucuagccgguccguucggu

SEQ ID NO: 2326276 - RNA, 19 nt, Artificial Sequence
  Description of Artificial Sequence: Synthetic oligonucleotide
cccuguggcacuagagcgc

SEQ ID NO: 2326277 - RNA, 19 nt, Artificial Sequence
  Description of Artificial Sequence: Synthetic oligonucleotide
caggagguagcuuuucgau

SEQ ID NO: 2326278 - RNA, 19 nt, Artificial Sequence
  Description of Artificial Sequence: Synthetic oligonucleotide
guccguucgguuguucaca

SEQ ID NO: 2326279 - RNA, 19 nt, Artificial Sequence
  Description of Artificial Sequence: Synthetic oligonucleotide
  modified_base (7)..(7): a, c, u, g, unknown or other
cugcccngaaaacuugcgu

SEQ ID NO: 2326280 - RNA, 19 nt, Artificial Sequence
  Description of Artificial Sequence: Synthetic oligonucleotide
aucgacauccagggucaca

SEQ ID NO: 2326281 - RNA, 19 nt, Artificial Sequence
  Description of Artificial Sequence: Synthetic oligonucleotide
ugcaccacucuagccgguc

SEQ ID NO: 2326282 - RNA, 19 nt, Artificial Sequence
  Description of Artificial Sequence: Synthetic oligonucleotide
gcuugaucucaaaggcugc

SEQ ID NO: 2326283 - RNA, 19 nt, Artificial Sequence
  Description of Artificial Sequence: Synthetic oligonucleotide
cagugcaaaaggcccucca

SEQ ID NO: 2326284 - RNA, 19 nt, Artificial Sequence
  Description of Artificial Sequence: Synthetic oligonucleotide
ggaaagccaacccuagaau

SEQ ID NO: 2326285 - RNA, 19 nt, Artificial Sequence
  Description of Artificial Sequence: Synthetic oligonucleotide
cgaacaguuugguuucaug

SEQ ID NO: 2326286 - RNA, 19 nt, Artificial Sequence
  Description of Artificial Sequence: Synthetic oligonucleotide
gguagcuuuucgaugccaa

SEQ ID NO: 2326287 - RNA, 19 nt, Artificial Sequence
  Description of Artificial Sequence: Synthetic oligonucleotide
ccuguggcacuagagcgcc

SEQ ID NO: 2326288 - RNA, 19 nt, Artificial Sequence
  Description of Artificial Sequence: Synthetic oligonucleotide
guucgguuguucacaucga

SEQ ID NO: 2326289 - RNA, 19 nt, Artificial Sequence
  Description of Artificial Sequence: Synthetic oligonucleotide
gaagccgcaggagguagcu

SEQ ID NO: 2326290 - RNA, 19 nt, Artificial Sequence
  Description of Artificial Sequence: Synthetic oligonucleotide
cggcaaacuucucaucccc

SEQ ID NO: 2326291 - RNA, 19 nt, Artificial Sequence
  Description of Artificial Sequence: Synthetic oligonucleotide
ggcugcauugagagagaag

SEQ ID NO: 2326292 - RNA, 19 nt, Artificial Sequence
  Description of Artificial Sequence: Synthetic oligonucleotide
cugaugcccagagccuaac

SEQ ID NO: 2326293 - RNA, 19 nt, Artificial Sequence
  Description of Artificial Sequence: Synthetic oligonucleotide
ggaguuccgucgccggcgc

SEQ ID NO: 2326294 - RNA, 19 nt, Artificial Sequence
  Description of Artificial Sequence: Synthetic oligonucleotide
guggcacuagagcgccaug

SEQ ID NO: 2326295 - RNA, 19 nt, Artificial Sequence
  Description of Artificial Sequence: Synthetic oligonucleotide
ugggcucgcagaggaucgc

SEQ ID NO: 2326296 - RNA, 19 nt, Artificial Sequence
  Description of Artificial Sequence: Synthetic oligonucleotide
uggucagcaugguguuaua

SEQ ID NO: 2326297 - RNA, 19 nt, Artificial Sequence
  Description of Artificial Sequence: Synthetic oligonucleotide
accacucuagccgguccgu

SEQ ID NO: 2326298 - RNA, 19 nt, Artificial Sequence
  Description of Artificial Sequence: Synthetic oligonucleotide
agcaguggccccacucacu

SEQ ID NO: 2326299 - RNA, 19 nt, Artificial Sequence
  Description of Artificial Sequence: Synthetic oligonucleotide
augguguuauaggcccagu

SEQ ID NO: 2326300 - RNA, 19 nt, Artificial Sequence
  Description of Artificial Sequence: Synthetic oligonucleotide
gccguccuugagcaagcag

SEQ ID NO: 2326301 - RNA, 19 nt, Artificial Sequence
  Description of Artificial Sequence: Synthetic oligonucleotide
gcaccacucuagccggucc

SEQ ID NO: 2326302 - RNA, 19 nt, Artificial Sequence
  Description of Artificial Sequence: Synthetic oligonucleotide
accagucgguugucacggu

SEQ ID NO: 2326303 - RNA, 19 nt, Artificial Sequence
  Description of Artificial Sequence: Synthetic oligonucleotide
gcagaauauuuaucuugua

SEQ ID NO: 2326304 - RNA, 19 nt, Artificial Sequence
  Description of Artificial Sequence: Synthetic oligonucleotide
cgcaggagguagcuuuucg

SEQ ID NO: 2326305 - RNA, 19 nt, Artificial Sequence
  Description of Artificial Sequence: Synthetic oligonucleotide
ccgaucggcaaacuucuca

SEQ ID NO: 2326306 - RNA, 19 nt, Artificial Sequence
  Description of Artificial Sequence: Synthetic oligonucleotide
cgcucuucacagaacuaug

SEQ ID NO: 2326307 - RNA, 19 nt, Artificial Sequence
  Description of Artificial Sequence: Synthetic oligonucleotide
cacuggcaugcaucuucuc

SEQ ID NO: 2326308 - RNA, 19 nt, Artificial Sequence
  Description of Artificial Sequence: Synthetic oligonucleotide
uagcaaccugaugcccaga

SEQ ID NO: 2326309 - RNA, 19 nt, Artificial Sequence
  Description of Artificial Sequence: Synthetic oligonucleotide
gaucgccauacagguaacu

SEQ ID NO: 2326310 - RNA, 19 nt, Artificial Sequence
  Description of Artificial Sequence: Synthetic oligonucleotide
cagcagccgaucggcaaac

SEQ ID NO: 2326311 - RNA, 19 nt, Artificial Sequence
  Description of Artificial Sequence: Synthetic oligonucleotide
gccauacagguaacugggc

SEQ ID NO: 2326312 - RNA, 19 nt, Artificial Sequence
  Description of Artificial Sequence: Synthetic oligonucleotide
gucgccggcgcugcugccc

SEQ ID NO: 2326313 - RNA, 19 nt, Artificial Sequence
  Description of Artificial Sequence: Synthetic oligonucleotide
aacuugcguuuuggaguaa

SEQ ID NO: 2326314 - RNA, 19 nt, Artificial Sequence
  Description of Artificial Sequence: Synthetic oligonucleotide
ccaaagcugucgaacaggu

SEQ ID NO: 2326315 - RNA, 19 nt, Artificial Sequence
  Description of Artificial Sequence: Synthetic oligonucleotide
ugccguccuugagcaagca

SEQ ID NO: 2326316 - RNA, 19 nt, Artificial Sequence
  Description of Artificial Sequence: Synthetic oligonucleotide
cauccccuguggcacuaga

SEQ ID NO: 2326317 - RNA, 19 nt, Artificial Sequence
  Description of Artificial Sequence: Synthetic oligonucleotide
cgaacagguguucgcugcc

SEQ ID NO: 2326318 - RNA, 19 nt, Artificial Sequence
  Description of Artificial Sequence: Synthetic oligonucleotide
gccaacccuagaaugccca

SEQ ID NO: 2326319 - RNA, 19 nt, Artificial Sequence
  Description of Artificial Sequence: Synthetic oligonucleotide
gaugccaaccuuggaccau

SEQ ID NO: 2326320 - RNA, 19 nt, Artificial Sequence
  Description of Artificial Sequence: Synthetic oligonucleotide
ccaguguagcuugaucuca

SEQ ID NO: 2326321 - RNA, 19 nt, Artificial Sequence
  Description of Artificial Sequence: Synthetic oligonucleotide
gucgaacaguuugguuuca

SEQ ID NO: 2326322 - RNA, 19 nt, Artificial Sequence
  Description of Artificial Sequence: Synthetic oligonucleotide
gaacuauguuuugguuggu

SEQ ID NO: 2326323 - RNA, 19 nt, Artificial Sequence
  Description of Artificial Sequence: Synthetic oligonucleotide
ggcaguuuguccagaacau

SEQ ID NO: 2326324 - RNA, 19 nt, Artificial Sequence
  Description of Artificial Sequence: Synthetic oligonucleotide
gccccacucacugacagua

SEQ ID NO: 2326325 - RNA, 19 nt, Artificial Sequence
  Description of Artificial Sequence: Synthetic oligonucleotide
cucgcagaggaucgccaua

SEQ ID NO: 2326326 - RNA, 19 nt, Artificial Sequence
  Description of Artificial Sequence: Synthetic oligonucleotide
gaggaucgccauacaggua

SEQ ID NO: 2326327 - RNA, 19 nt, Artificial Sequence
  Description of Artificial Sequence: Synthetic oligonucleotide
cugcauugagagagaaguu

SEQ ID NO: 2326328 - RNA, 19 nt, Artificial Sequence
  Description of Artificial Sequence: Synthetic oligonucleotide
gucgguugucacgguugac

SEQ ID NO: 2326329 - RNA, 19 nt, Artificial Sequence
  Description of Artificial Sequence: Synthetic oligonucleotide
ucccuguaacauggauaua

SEQ ID NO: 2326330 - RNA, 19 nt, Artificial Sequence
  Description of Artificial Sequence: Synthetic oligonucleotide
agcagccgaucggcaaacu

SEQ ID NO: 2326331 - RNA, 19 nt, Artificial Sequence
  Description of Artificial Sequence: Synthetic oligonucleotide
caucgacauccagggucac

SEQ ID NO: 2326332 - RNA, 19 nt, Artificial Sequence
  Description of Artificial Sequence: Synthetic oligonucleotide
  modified_base (5)..(5): a, c, u, g, unknown or other
gcccngaaaacuugcguuu

SEQ ID NO: 2326333 - RNA, 19 nt, Artificial Sequence
  Description of Artificial Sequence: Synthetic oligonucleotide
caguuguagccaacccgcu

SEQ ID NO: 2326334 - RNA, 19 nt, Artificial Sequence
  Description of Artificial Sequence: Synthetic oligonucleotide
ggcuuguucucagcaggga

SEQ ID NO: 2326335 - RNA, 19 nt, Artificial Sequence
  Description of Artificial Sequence: Synthetic oligonucleotide
gaguacuguggcagucacu

SEQ ID NO: 2326336 - RNA, 19 nt, Artificial Sequence
  Description of Artificial Sequence: Synthetic oligonucleotide
cgguuguucacaucgacau

SEQ ID NO: 2326337 - RNA, 19 nt, Artificial Sequence
  Description of Artificial Sequence: Synthetic oligonucleotide
gucuuucucccaacucaua

SEQ ID NO: 2326338 - RNA, 19 nt, Artificial Sequence
  Description of Artificial Sequence: Synthetic oligonucleotide
ccccacucacugacaguag

SEQ ID NO: 2326339 - RNA, 19 nt, Artificial Sequence
  Description of Artificial Sequence: Synthetic oligonucleotide
cugucccuguaacauggau

SEQ ID NO: 2326340 - RNA, 19 nt, Artificial Sequence
  Description of Artificial Sequence: Synthetic oligonucleotide
gggcucgcagaggaucgcc

SEQ ID NO: 2326341 - RNA, 19 nt, Artificial Sequence
  Description of Artificial Sequence: Synthetic oligonucleotide
ggaucgccauacagguaac

SEQ ID NO: 2326342 - RNA, 19 nt, Artificial Sequence
  Description of Artificial Sequence: Synthetic oligonucleotide
  modified_base (11)..(11): a, c, u, g, unknown or other
gcugcugcccngaaaacuu

SEQ ID NO: 2326343 - RNA, 19 nt, Artificial Sequence
  Description of Artificial Sequence: Synthetic oligonucleotide
uggcgagaucuggguggug

SEQ ID NO: 2326344 - RNA, 19 nt, Artificial Sequence
  Description of Artificial Sequence: Synthetic oligonucleotide
gccuaacuggaaagccaac

SEQ ID NO: 2326345 - RNA, 19 nt, Artificial Sequence
  Description of Artificial Sequence: Synthetic oligonucleotide
gguugacacagaagucugu

SEQ ID NO: 2326346 - RNA, 19 nt, Artificial Sequence
  Description of Artificial Sequence: Synthetic oligonucleotide
cccuccaaaacuggaacua

SEQ ID NO: 2326347 - RNA, 19 nt, Artificial Sequence
  Description of Artificial Sequence: Synthetic oligonucleotide
gcacuagagcgccauguuu

SEQ ID NO: 2326348 - RNA, 19 nt, Artificial Sequence
  Description of Artificial Sequence: Synthetic oligonucleotide
ggcucgcagaggaucgcca

SEQ ID NO: 2326349 - RNA, 19 nt, Artificial Sequence
  Description of Artificial Sequence: Synthetic oligonucleotide
ggcaaacuucucauccccu

SEQ ID NO: 2326350 - RNA, 19 nt, Artificial Sequence
  Description of Artificial Sequence: Synthetic oligonucleotide
gccaaccuuggaccaucuc

SEQ ID NO: 2326351 - RNA, 19 nt, Artificial Sequence
  Description of Artificial Sequence: Synthetic oligonucleotide
cgaugccaaccuuggacca

SEQ ID NO: 2326352 - RNA, 19 nt, Artificial Sequence
  Description of Artificial Sequence: Synthetic oligonucleotide
gguagcggcagcagcugcu

SEQ ID NO: 2326353 - RNA, 19 nt, Artificial Sequence
  Description of Artificial Sequence: Synthetic oligonucleotide
ggcacuagagcgccauguu

SEQ ID NO: 2326354 - RNA, 19 nt, Artificial Sequence
  Description of Artificial Sequence: Synthetic oligonucleotide
cuagccgguccguucgguu

SEQ ID NO: 2326355 - RNA, 19 nt, Artificial Sequence
  Description of Artificial Sequence: Synthetic oligonucleotide
guggccccacucacugaca

SEQ ID NO: 2326356 - RNA, 19 nt, Artificial Sequence
  Description of Artificial Sequence: Synthetic oligonucleotide
cguccuugagcaagcagcu

SEQ ID NO: 2326357 - RNA, 19 nt, Artificial Sequence
  Description of Artificial Sequence: Synthetic oligonucleotide
ccaacccgcucuucacaga

SEQ ID NO: 2326358 - RNA, 19 nt, Artificial Sequence
  Description of Artificial Sequence: Synthetic oligonucleotide
cucauccccuguggcacua

SEQ ID NO: 2326359 - RNA, 19 nt, Artificial Sequence
  Description of Artificial Sequence: Synthetic oligonucleotide
gcuuuucgaugccaaccuu

SEQ ID NO: 2326360 - RNA, 19 nt, Artificial Sequence
  Description of Artificial Sequence: Synthetic oligonucleotide
gcagccgaucggcaaacuu

SEQ ID NO: 2326361 - RNA, 19 nt, Artificial Sequence
  Description of Artificial Sequence: Synthetic oligonucleotide
guagcggcagcagcugcuu

SEQ ID NO: 2326362 - RNA, 19 nt, Artificial Sequence
  Description of Artificial Sequence: Synthetic oligonucleotide
cgguccguucgguuguuca

SEQ ID NO: 2326363 - RNA, 19 nt, Artificial Sequence
  Description of Artificial Sequence: Synthetic oligonucleotide
gcucgcagaggaucgccau

SEQ ID NO: 2326364 - RNA, 19 nt, Artificial Sequence
  Description of Artificial Sequence: Synthetic oligonucleotide
ccguucgguuguucacauc

SEQ ID NO: 2326365 - RNA, 19 nt, Artificial Sequence
  Description of Artificial Sequence: Synthetic oligonucleotide
gaguuccgucgccggcgcu

SEQ ID NO: 2326366 - RNA, 19 nt, Artificial Sequence
  Description of Artificial Sequence: Synthetic oligonucleotide
  modified_base (13)..(13): a, c, u, g, unknown or other
gcgcugcugcccngaaaac

SEQ ID NO: 2326367 - RNA, 19 nt, Artificial Sequence
  Description of Artificial Sequence: Synthetic oligonucleotide
cgaagaguacuguggcagu

SEQ ID NO: 2326368 - RNA, 19 nt, Artificial Sequence
  Description of Artificial Sequence: Synthetic oligonucleotide
ccgcucuucacagaacuau

SEQ ID NO: 2326369 - RNA, 19 nt, Artificial Sequence
  Description of Artificial Sequence: Synthetic oligonucleotide
gcgccauguuuuggucagc

SEQ ID NO: 2326370 - RNA, 19 nt, Artificial Sequence
  Description of Artificial Sequence: Synthetic oligonucleotide
cugcaccacucuagccggu

SEQ ID NO: 2326371 - RNA, 19 nt, Artificial Sequence
  Description of Artificial Sequence: Synthetic oligonucleotide
cccgcucuucacagaacua

SEQ ID NO: 2326372 - RNA, 19 nt, Artificial Sequence
  Description of Artificial Sequence: Synthetic oligonucleotide
ggccccacucacugacagu

SEQ ID NO: 2326373 - RNA, 19 nt, Artificial Sequence
  Description of Artificial Sequence: Synthetic oligonucleotide
  modified_base (4)..(4): a, c, u, g, unknown or other
cccngaaaacuugcguuuu

SEQ ID NO: 2326374 - RNA, 19 nt, Artificial Sequence
  Description of Artificial Sequence: Synthetic oligonucleotide
gccgaucggcaaacuucuc

SEQ ID NO: 2326375 - RNA, 19 nt, Artificial Sequence
  Description of Artificial Sequence: Synthetic oligonucleotide
ccagucgguugucacgguu

SEQ ID NO: 2326376 - RNA, 19 nt, Artificial Sequence
  Description of Artificial Sequence: Synthetic oligonucleotide
  modified_base (17)..(17): a, c, u, g, unknown or other
gccggcgcugcugcccnga

SEQ ID NO: 2326377 - RNA, 19 nt, Artificial Sequence
  Description of Artificial Sequence: Synthetic oligonucleotide
gguguucgcugccguccuu

SEQ ID NO: 2326378 - RNA, 19 nt, Artificial Sequence
  Description of Artificial Sequence: Synthetic oligonucleotide
ccgguccguucgguuguuc

SEQ ID NO: 2326379 - RNA, 19 nt, Artificial Sequence
  Description of Artificial Sequence: Synthetic oligonucleotide
  modified_base (16)..(16): a, c, u, g, unknown or other
ccggcgcugcugcccngaa

SEQ ID NO: 2326380 - RNA, 19 nt, Artificial Sequence
  Description of Artificial Sequence: Synthetic oligonucleotide
gggcacuggcaugcaucuu

SEQ ID NO: 2326381 - RNA, 19 nt, Artificial Sequence
  Description of Artificial Sequence: Synthetic oligonucleotide
  modified_base (15)..(15): a, c, u, g, unknown or other
cggcgcugcugcccngaaa

SEQ ID NO: 2326382 - RNA, 19 nt, Artificial Sequence
  Description of Artificial Sequence: Synthetic oligonucleotide
ccacucuagccgguccguu

SEQ ID NO: 2326383 - RNA, 19 nt, Artificial Sequence
  Description of Artificial Sequence: Synthetic oligonucleotide
cgcugccguccuugagcaa

SEQ ID NO: 2326384 - RNA, 19 nt, Artificial Sequence
  Description of Artificial Sequence: Synthetic oligonucleotide
gccgguccguucgguuguu

SEQ ID NO: 2326385 - RNA, 19 nt, Artificial Sequence
  Description of Artificial Sequence: Synthetic oligonucleotide
  modified_base (1)..(1): a, c, u, g, unknown or other
ngaaaacuugcguuuugga

SEQ ID NO: 2326386 - RNA, 19 nt, Artificial Sequence
  Description of Artificial Sequence: Synthetic oligonucleotide
aacacugugcucuuguagc

SEQ ID NO: 2326387 - RNA, 19 nt, Artificial Sequence
  Description of Artificial Sequence: Synthetic oligonucleotide
aauaguauccaaaggaaac

SEQ ID NO: 2326388 - RNA, 19 nt, Artificial Sequence
  Description of Artificial Sequence: Synthetic oligonucleotide
aaauaacccugcuaguccc

SEQ ID NO: 2326389 - RNA, 19 nt, Artificial Sequence
  Description of Artificial Sequence: Synthetic oligonucleotide
auauauuccacgaaaaccg

SEQ ID NO: 2326390 - RNA, 19 nt, Artificial Sequence
  Description of Artificial Sequence: Synthetic oligonucleotide
ucuaacagcaagcugcggg

SEQ ID NO: 2326391 - RNA, 19 nt, Artificial Sequence
  Description of Artificial Sequence: Synthetic oligonucleotide
aaaacauagcagcauuagg

SEQ ID NO: 2326392 - RNA, 19 nt, Artificial Sequence
  Description of Artificial Sequence: Synthetic oligonucleotide
aacuggaccaacgagaaag

SEQ ID NO: 2326393 - RNA, 19 nt, Artificial Sequence
  Description of Artificial Sequence: Synthetic oligonucleotide
uuugccagcaugauccucg

SEQ ID NO: 2326394 - RNA, 19 nt, Artificial Sequence
  Description of Artificial Sequence: Synthetic oligonucleotide
aaaaccgccagccuuguug

SEQ ID NO: 2326395 - RNA, 19 nt, Artificial Sequence
  Description of Artificial Sequence: Synthetic oligonucleotide
cuuaauaguauccaaagga

SEQ ID NO: 2326396 - RNA, 19 nt, Artificial Sequence
  Description of Artificial Sequence: Synthetic oligonucleotide
gucauaggcacccagaaag

SEQ ID NO: 2326397 - RNA, 19 nt, Artificial Sequence
  Description of Artificial Sequence: Synthetic oligonucleotide
aaacauagcagcauuagga

SEQ ID NO: 2326398 - RNA, 19 nt, Artificial Sequence
  Description of Artificial Sequence: Synthetic oligonucleotide
uaaaguuagagguggagga

SEQ ID NO: 2326399 - RNA, 19 nt, Artificial Sequence
  Description of Artificial Sequence: Synthetic oligonucleotide
aaaggaaacaagaucaagu

SEQ ID NO: 2326400 - RNA, 19 nt, Artificial Sequence
  Description of Artificial Sequence: Synthetic oligonucleotide
aucaagucaacugaggcac

SEQ ID NO: 2326401 - RNA, 19 nt, Artificial Sequence
  Description of Artificial Sequence: Synthetic oligonucleotide
cauauauuccacgaaaacc

SEQ ID NO: 2326402 - RNA, 19 nt, Artificial Sequence
  Description of Artificial Sequence: Synthetic oligonucleotide
uucaaggauucccacaaag

SEQ ID NO: 2326403 - RNA, 19 nt, Artificial Sequence
  Description of Artificial Sequence: Synthetic oligonucleotide
gucuuaauaguauccaaag

SEQ ID NO: 2326404 - RNA, 19 nt, Artificial Sequence
  Description of Artificial Sequence: Synthetic oligonucleotide
acaagaucaagucaacuga

SEQ ID NO: 2326405 - RNA, 19 nt, Artificial Sequence
  Description of Artificial Sequence: Synthetic oligonucleotide
aggaacucgaaucaagcag

SEQ ID NO: 2326406 - RNA, 19 nt, Artificial Sequence
  Description of Artificial Sequence: Synthetic oligonucleotide
uaggcacccagaaagauga

SEQ ID NO: 2326407 - RNA, 19 nt, Artificial Sequence
  Description of Artificial Sequence: Synthetic oligonucleotide
aagaauccaccaugugacc

SEQ ID NO: 2326408 - RNA, 19 nt, Artificial Sequence
  Description of Artificial Sequence: Synthetic oligonucleotide
uauuucacguauucauagg

SEQ ID NO: 2326409 - RNA, 19 nt, Artificial Sequence
  Description of Artificial Sequence: Synthetic oligonucleotide
ugugcagcaaauauuucac

SEQ ID NO: 2326410 - RNA, 19 nt, Artificial Sequence
  Description of Artificial Sequence: Synthetic oligonucleotide
ugcuuaacuacuucagaag

SEQ ID NO: 2326411 - RNA, 19 nt, Artificial Sequence
  Description of Artificial Sequence: Synthetic oligonucleotide
uuagagguggaggagaagc

SEQ ID NO: 2326412 - RNA, 19 nt, Artificial Sequence
  Description of Artificial Sequence: Synthetic oligonucleotide
uucacguauucauagguga

SEQ ID NO: 2326413 - RNA, 19 nt, Artificial Sequence
  Description of Artificial Sequence: Synthetic oligonucleotide
aacauagcagcauuaggaa

SEQ ID NO: 2326414 - RNA, 19 nt, Artificial Sequence
  Description of Artificial Sequence: Synthetic oligonucleotide
acccaauagcuguagaagg

SEQ ID NO: 2326415 - RNA, 19 nt, Artificial Sequence
  Description of Artificial Sequence: Synthetic oligonucleotide
agucaacugaggcaccugc

SEQ ID NO: 2326416 - RNA, 19 nt, Artificial Sequence
  Description of Artificial Sequence: Synthetic oligonucleotide
uaauaguauccaaaggaaa

SEQ ID NO: 2326417 - RNA, 19 nt, Artificial Sequence
  Description of Artificial Sequence: Synthetic oligonucleotide
ugucuuaauaguauccaaa

SEQ ID NO: 2326418 - RNA, 19 nt, Artificial Sequence
  Description of Artificial Sequence: Synthetic oligonucleotide
uauuccacgaaaaccgcca

SEQ ID NO: 2326419 - RNA, 19 nt, Artificial Sequence
  Description of Artificial Sequence: Synthetic oligonucleotide
cuaaaguuagagguggagg

SEQ ID NO: 2326420 - RNA, 19 nt, Artificial Sequence
  Description of Artificial Sequence: Synthetic oligonucleotide
auuucacguauucauaggu

SEQ ID NO: 2326421 - RNA, 19 nt, Artificial Sequence
  Description of Artificial Sequence: Synthetic oligonucleotide
aaaggaaacuggaccaacg

SEQ ID NO: 2326422 - RNA, 19 nt, Artificial Sequence
  Description of Artificial Sequence: Synthetic oligonucleotide
caaauaacccugcuagucc

SEQ ID NO: 2326423 - RNA, 19 nt, Artificial Sequence
  Description of Artificial Sequence: Synthetic oligonucleotide
aacuacuucagaaggaacu

SEQ ID NO: 2326424 - RNA, 19 nt, Artificial Sequence
  Description of Artificial Sequence: Synthetic oligonucleotide
uuucacguauucauaggug

SEQ ID NO: 2326425 - RNA, 19 nt, Artificial Sequence
  Description of Artificial Sequence: Synthetic oligonucleotide
ugcagcaaauauuucacgu

SEQ ID NO: 2326426 - RNA, 19 nt, Artificial Sequence
  Description of Artificial Sequence: Synthetic oligonucleotide
agcgcuuucaaggauuccc

SEQ ID NO: 2326427 - RNA, 19 nt, Artificial Sequence
  Description of Artificial Sequence: Synthetic oligonucleotide
uauauuccacgaaaaccgc

SEQ ID NO: 2326428 - RNA, 19 nt, Artificial Sequence
  Description of Artificial Sequence: Synthetic oligonucleotide
agaauccaccaugugaccc

SEQ ID NO: 2326429 - RNA, 19 nt, Artificial Sequence
  Description of Artificial Sequence: Synthetic oligonucleotide
gaagcagacaccugugccc

SEQ ID NO: 2326430 - RNA, 19 nt, Artificial Sequence
  Description of Artificial Sequence: Synthetic oligonucleotide
aaggaacucgaaucaagca

SEQ ID NO: 2326431 - RNA, 19 nt, Artificial Sequence
  Description of Artificial Sequence: Synthetic oligonucleotide
ugcgaaaccaccugcaaaa

SEQ ID NO: 2326432 - RNA, 19 nt, Artificial Sequence
  Description of Artificial Sequence: Synthetic oligonucleotide
ugauugcugccauucgugg

SEQ ID NO: 2326433 - RNA, 19 nt, Artificial Sequence
  Description of Artificial Sequence: Synthetic oligonucleotide
ugcauauauuccacgaaaa

SEQ ID NO: 2326434 - RNA, 19 nt, Artificial Sequence
  Description of Artificial Sequence: Synthetic oligonucleotide
aacgagaaaggaaucucuc

SEQ ID NO: 2326435 - RNA, 19 nt, Artificial Sequence
  Description of Artificial Sequence: Synthetic oligonucleotide
ucacguauucauaggugag

SEQ ID NO: 2326436 - RNA, 19 nt, Artificial Sequence
  Description of Artificial Sequence: Synthetic oligonucleotide
uacuccuccagccaccagc

SEQ ID NO: 2326437 - RNA, 19 nt, Artificial Sequence
  Description of Artificial Sequence: Synthetic oligonucleotide
ugauccucgucuuagccac

SEQ ID NO: 2326438 - RNA, 19 nt, Artificial Sequence
  Description of Artificial Sequence: Synthetic oligonucleotide
caagaucaagucaacugag

SEQ ID NO: 2326439 - RNA, 19 nt, Artificial Sequence
  Description of Artificial Sequence: Synthetic oligonucleotide
aagaucaagucaacugagg

SEQ ID NO: 2326440 - RNA, 19 nt, Artificial Sequence
  Description of Artificial Sequence: Synthetic oligonucleotide
uucccacaaaggaaacugg

SEQ ID NO: 2326441 - RNA, 19 nt, Artificial Sequence
  Description of Artificial Sequence: Synthetic oligonucleotide
uacuucagaaggaacucga

SEQ ID NO: 2326442 - RNA, 19 nt, Artificial Sequence
  Description of Artificial Sequence: Synthetic oligonucleotide
aaaagcuccgcagacugcu

SEQ ID NO: 2326443 - RNA, 19 nt, Artificial Sequence
  Description of Artificial Sequence: Synthetic oligonucleotide
uccacgaaaaccgccagcc

SEQ ID NO: 2326444 - RNA, 19 nt, Artificial Sequence
  Description of Artificial Sequence: Synthetic oligonucleotide
ucgucuuagccacauccag

SEQ ID NO: 2326445 - RNA, 19 nt, Artificial Sequence
  Description of Artificial Sequence: Synthetic oligonucleotide
auucccacaaaggaaacug

SEQ ID NO: 2326446 - RNA, 19 nt, Artificial Sequence
  Description of Artificial Sequence: Synthetic oligonucleotide
aggugcugaccccaggagc

SEQ ID NO: 2326447 - RNA, 19 nt, Artificial Sequence
  Description of Artificial Sequence: Synthetic oligonucleotide
aggaaacaagaucaaguca

SEQ ID NO: 2326448 - RNA, 19 nt, Artificial Sequence
  Description of Artificial Sequence: Synthetic oligonucleotide
cuuguugaauccuugggga

SEQ ID NO: 2326449 - RNA, 19 nt, Artificial Sequence
  Description of Artificial Sequence: Synthetic oligonucleotide
ugcgggucuggucauaggc

SEQ ID NO: 2326450 - RNA, 19 nt, Artificial Sequence
  Description of Artificial Sequence: Synthetic oligonucleotide
aggaaacuggaccaacgag

SEQ ID NO: 2326451 - RNA, 19 nt, Artificial Sequence
  Description of Artificial Sequence: Synthetic oligonucleotide
uccuuggggacucugcagc

SEQ ID NO: 2326452 - RNA, 19 nt, Artificial Sequence
  Description of Artificial Sequence: Synthetic oligonucleotide
gaauccaccaugugacccc

SEQ ID NO: 2326453 - RNA, 19 nt, Artificial Sequence
  Description of Artificial Sequence: Synthetic oligonucleotide
agaagggacaccugcauau

SEQ ID NO: 2326454 - RNA, 19 nt, Artificial Sequence
  Description of Artificial Sequence: Synthetic oligonucleotide
cugacugccaagaauccac

SEQ ID NO: 2326455 - RNA, 19 nt, Artificial Sequence
  Description of Artificial Sequence: Synthetic oligonucleotide
gacccaauagcuguagaag

SEQ ID NO: 2326456 - RNA, 19 nt, Artificial Sequence
  Description of Artificial Sequence: Synthetic oligonucleotide
aagcagacaccugugcccg

SEQ ID NO: 2326457 - RNA, 19 nt, Artificial Sequence
  Description of Artificial Sequence: Synthetic oligonucleotide
uggaccaacgagaaaggaa

SEQ ID NO: 2326458 - RNA, 19 nt, Artificial Sequence
  Description of Artificial Sequence: Synthetic oligonucleotide
auauuccacgaaaaccgcc

SEQ ID NO: 2326459 - RNA, 19 nt, Artificial Sequence
  Description of Artificial Sequence: Synthetic oligonucleotide
aaaccgccagccuuguuga

SEQ ID NO: 2326460 - RNA, 19 nt, Artificial Sequence
  Description of Artificial Sequence: Synthetic oligonucleotide
aaacaagaucaagucaacu

SEQ ID NO: 2326461 - RNA, 19 nt, Artificial Sequence
  Description of Artificial Sequence: Synthetic oligonucleotide
cugcugacugccaagaauc

SEQ ID NO: 2326462 - RNA, 19 nt, Artificial Sequence
  Description of Artificial Sequence: Synthetic oligonucleotide
aauauuucacguauucaua

SEQ ID NO: 2326463 - RNA, 19 nt, Artificial Sequence
  Description of Artificial Sequence: Synthetic oligonucleotide
agaagcaggugcugacccc

SEQ ID NO: 2326464 - RNA, 19 nt, Artificial Sequence
  Description of Artificial Sequence: Synthetic oligonucleotide
uguagccucgguacagucc

SEQ ID NO: 2326465 - RNA, 19 nt, Artificial Sequence
  Description of Artificial Sequence: Synthetic oligonucleotide
agguguaguaacugcagcu

SEQ ID NO: 2326466 - RNA, 19 nt, Artificial Sequence
  Description of Artificial Sequence: Synthetic oligonucleotide
caaggauucccacaaagga

SEQ ID NO: 2326467 - RNA, 19 nt, Artificial Sequence
  Description of Artificial Sequence: Synthetic oligonucleotide
cacaaaggaaacuggacca

SEQ ID NO: 2326468 - RNA, 19 nt, Artificial Sequence
  Description of Artificial Sequence: Synthetic oligonucleotide
caugauccucgucuuagcc

SEQ ID NO: 2326469 - RNA, 19 nt, Artificial Sequence
  Description of Artificial Sequence: Synthetic oligonucleotide
guaacugcagcugcgaaac

SEQ ID NO: 2326470 - RNA, 19 nt, Artificial Sequence
  Description of Artificial Sequence: Synthetic oligonucleotide
ggaacucgaaucaagcagg

SEQ ID NO: 2326471 - RNA, 19 nt, Artificial Sequence
  Description of Artificial Sequence: Synthetic oligonucleotide
cauucgugggaagacaccc

SEQ ID NO: 2326472 - RNA, 19 nt, Artificial Sequence
  Description of Artificial Sequence: Synthetic oligonucleotide
ucagugugcagcaaauauu

SEQ ID NO: 2326473 - RNA, 19 nt, Artificial Sequence
  Description of Artificial Sequence: Synthetic oligonucleotide
cugcuagucccugugagcg

SEQ ID NO: 2326474 - RNA, 19 nt, Artificial Sequence
  Description of Artificial Sequence: Synthetic oligonucleotide
ggacuaaaguuagaggugg

SEQ ID NO: 2326475 - RNA, 19 nt, Artificial Sequence
  Description of Artificial Sequence: Synthetic oligonucleotide
cauccagagguguaguaac

SEQ ID NO: 2326476 - RNA, 19 nt, Artificial Sequence
  Description of Artificial Sequence: Synthetic oligonucleotide
ucauaggcacccagaaaga

SEQ ID NO: 2326477 - RNA, 19 nt, Artificial Sequence
  Description of Artificial Sequence: Synthetic oligonucleotide
cuuaacuacuucagaagga

SEQ ID NO: 2326478 - RNA, 19 nt, Artificial Sequence
  Description of Artificial Sequence: Synthetic oligonucleotide
gaagacacccgcaaauaac

SEQ ID NO: 2326479 - RNA, 19 nt, Artificial Sequence
  Description of Artificial Sequence: Synthetic oligonucleotide
cucgaaucaagcaggcaac

SEQ ID NO: 2326480 - RNA, 19 nt, Artificial Sequence
  Description of Artificial Sequence: Synthetic oligonucleotide
aacagcaagcugcgggucu

SEQ ID NO: 2326481 - RNA, 19 nt, Artificial Sequence
  Description of Artificial Sequence: Synthetic oligonucleotide
cacccagaaagaugaagcc

SEQ ID NO: 2326482 - RNA, 19 nt, Artificial Sequence
  Description of Artificial Sequence: Synthetic oligonucleotide
uugucuuaauaguauccaa

SEQ ID NO: 2326483 - RNA, 19 nt, Artificial Sequence
  Description of Artificial Sequence: Synthetic oligonucleotide
cugauugcugccauucgug

SEQ ID NO: 2326484 - RNA, 19 nt, Artificial Sequence
  Description of Artificial Sequence: Synthetic oligonucleotide
agagagcacacucccaaca

SEQ ID NO: 2326485 - RNA, 19 nt, Artificial Sequence
  Description of Artificial Sequence: Synthetic oligonucleotide
agccuuguugaauccuugg

SEQ ID NO: 2326486 - RNA, 19 nt, Artificial Sequence
  Description of Artificial Sequence: Synthetic oligonucleotide
accugcaaaagcuccgcag

SEQ ID NO: 2326487 - RNA, 19 nt, Artificial Sequence
  Description of Artificial Sequence: Synthetic oligonucleotide
acgagaaaggaaucucucu

SEQ ID NO: 2326488 - RNA, 19 nt, Artificial Sequence
  Description of Artificial Sequence: Synthetic oligonucleotide
aaggauucccacaaaggaa

SEQ ID NO: 2326489 - RNA, 19 nt, Artificial Sequence
  Description of Artificial Sequence: Synthetic oligonucleotide
caauagcuguagaagggac

SEQ ID NO: 2326490 - RNA, 19 nt, Artificial Sequence
  Description of Artificial Sequence: Synthetic oligonucleotide
uucaccggccugaagugug

SEQ ID NO: 2326491 - RNA, 19 nt, Artificial Sequence
  Description of Artificial Sequence: Synthetic oligonucleotide
accugcauauauuccacga

SEQ ID NO: 2326492 - RNA, 19 nt, Artificial Sequence
  Description of Artificial Sequence: Synthetic oligonucleotide
uguugaauccuuggggacu

SEQ ID NO: 2326493 - RNA, 19 nt, Artificial Sequence
  Description of Artificial Sequence: Synthetic oligonucleotide
ugugaugcugagucagugu

SEQ ID NO: 2326494 - RNA, 19 nt, Artificial Sequence
  Description of Artificial Sequence: Synthetic oligonucleotide
ggaaacaagaucaagucaa

SEQ ID NO: 2326495 - RNA, 19 nt, Artificial Sequence
  Description of Artificial Sequence: Synthetic oligonucleotide
ugaccagagcgcuuucaag

SEQ ID NO: 2326496 - RNA, 19 nt, Artificial Sequence
  Description of Artificial Sequence: Synthetic oligonucleotide
aguaacugcagcugcgaaa

SEQ ID NO: 2326497 - RNA, 19 nt, Artificial Sequence
  Description of Artificial Sequence: Synthetic oligonucleotide
aauccaccaugugaccccg

SEQ ID NO: 2326498 - RNA, 19 nt, Artificial Sequence
  Description of Artificial Sequence: Synthetic oligonucleotide
gcagcauuaggaaaggacc

SEQ ID NO: 2326499 - RNA, 19 nt, Artificial Sequence
  Description of Artificial Sequence: Synthetic oligonucleotide
agcaugauccucgucuuag

SEQ ID NO: 2326500 - RNA, 19 nt, Artificial Sequence
  Description of Artificial Sequence: Synthetic oligonucleotide
augauccucgucuuagcca

SEQ ID NO: 2326501 - RNA, 19 nt, Artificial Sequence
  Description of Artificial Sequence: Synthetic oligonucleotide
cugccaagaauccaccaug

SEQ ID NO: 2326502 - RNA, 19 nt, Artificial Sequence
  Description of Artificial Sequence: Synthetic oligonucleotide
caccaugugaccccgucgc

SEQ ID NO: 2326503 - RNA, 19 nt, Artificial Sequence
  Description of Artificial Sequence: Synthetic oligonucleotide
agcuguagaagggacaccu

SEQ ID NO: 2326504 - RNA, 19 nt, Artificial Sequence
  Description of Artificial Sequence: Synthetic oligonucleotide
ucaacugaggcaccugcua

SEQ ID NO: 2326505 - RNA, 19 nt, Artificial Sequence
  Description of Artificial Sequence: Synthetic oligonucleotide
aacccugcuagucccugug

SEQ ID NO: 2326506 - RNA, 19 nt, Artificial Sequence
  Description of Artificial Sequence: Synthetic oligonucleotide
aggaaaggacccaauagcu

SEQ ID NO: 2326507 - RNA, 19 nt, Artificial Sequence
  Description of Artificial Sequence: Synthetic oligonucleotide
aagggacaccugcauauau

SEQ ID NO: 2326508 - RNA, 19 nt, Artificial Sequence
  Description of Artificial Sequence: Synthetic oligonucleotide
ucgguacaguccuuggaug

SEQ ID NO: 2326509 - RNA, 19 nt, Artificial Sequence
  Description of Artificial Sequence: Synthetic oligonucleotide
ccgcaaauaacccugcuag

SEQ ID NO: 2326510 - RNA, 19 nt, Artificial Sequence
  Description of Artificial Sequence: Synthetic oligonucleotide
ugcugacugccaagaaucc

SEQ ID NO: 2326511 - RNA, 19 nt, Artificial Sequence
  Description of Artificial Sequence: Synthetic oligonucleotide
gaggccgugaagcccggcg

SEQ ID NO: 2326512 - RNA, 19 nt, Artificial Sequence
  Description of Artificial Sequence: Synthetic oligonucleotide
acauagcagcauuaggaaa

SEQ ID NO: 2326513 - RNA, 19 nt, Artificial Sequence
  Description of Artificial Sequence: Synthetic oligonucleotide
cucccaugcugauugcugc

SEQ ID NO: 2326514 - RNA, 19 nt, Artificial Sequence
  Description of Artificial Sequence: Synthetic oligonucleotide
caagcugcgggucugguca

SEQ ID NO: 2326515 - RNA, 19 nt, Artificial Sequence
  Description of Artificial Sequence: Synthetic oligonucleotide
ccuugucuuaauaguaucc

SEQ ID NO: 2326516 - RNA, 19 nt, Artificial Sequence
  Description of Artificial Sequence: Synthetic oligonucleotide
cuuagccacauccagaggu

SEQ ID NO: 2326517 - RNA, 19 nt, Artificial Sequence
  Description of Artificial Sequence: Synthetic oligonucleotide
gaugcugagucagugugca

SEQ ID NO: 2326518 - RNA, 19 nt, Artificial Sequence
  Description of Artificial Sequence: Synthetic oligonucleotide
acugccaagaauccaccau

SEQ ID NO: 2326519 - RNA, 19 nt, Artificial Sequence
  Description of Artificial Sequence: Synthetic oligonucleotide
auuccacgaaaaccgccag

SEQ ID NO: 2326520 - RNA, 19 nt, Artificial Sequence
  Description of Artificial Sequence: Synthetic oligonucleotide
aggacuaaaguuagaggug

SEQ ID NO: 2326521 - RNA, 19 nt, Artificial Sequence
  Description of Artificial Sequence: Synthetic oligonucleotide
agacacccgcaaauaaccc

SEQ ID NO: 2326522 - RNA, 19 nt, Artificial Sequence
  Description of Artificial Sequence: Synthetic oligonucleotide
cagcaugugcuucaccggc

SEQ ID NO: 2326523 - RNA, 19 nt, Artificial Sequence
  Description of Artificial Sequence: Synthetic oligonucleotide
uuccacgaaaaccgccagc

SEQ ID NO: 2326524 - RNA, 19 nt, Artificial Sequence
  Description of Artificial Sequence: Synthetic oligonucleotide
aggauucccacaaaggaaa

SEQ ID NO: 2326525 - RNA, 19 nt, Artificial Sequence
  Description of Artificial Sequence: Synthetic oligonucleotide
gcauauauuccacgaaaac

SEQ ID NO: 2326526 - RNA, 19 nt, Artificial Sequence
  Description of Artificial Sequence: Synthetic oligonucleotide
accagagcgcuuucaagga

SEQ ID NO: 2326527 - RNA, 19 nt, Artificial Sequence
  Description of Artificial Sequence: Synthetic oligonucleotide
cccaauagcuguagaaggg

SEQ ID NO: 2326528 - RNA, 19 nt, Artificial Sequence
  Description of Artificial Sequence: Synthetic oligonucleotide
ucgaaucaagcaggcaacc

SEQ ID NO: 2326529 - RNA, 19 nt, Artificial Sequence
  Description of Artificial Sequence: Synthetic oligonucleotide
gaccccgucgccaugacca

SEQ ID NO: 2326530 - RNA, 19 nt, Artificial Sequence
  Description of Artificial Sequence: Synthetic oligonucleotide
ggaaacuggaccaacgaga

SEQ ID NO: 2326531 - RNA, 19 nt, Artificial Sequence
  Description of Artificial Sequence: Synthetic oligonucleotide
ccucgucuuagccacaucc

SEQ ID NO: 2326532 - RNA, 19 nt, Artificial Sequence
  Description of Artificial Sequence: Synthetic oligonucleotide
cugcauauauuccacgaaa

SEQ ID NO: 2326533 - RNA, 19 nt, Artificial Sequence
  Description of Artificial Sequence: Synthetic oligonucleotide
gaacucgaaucaagcaggc

SEQ ID NO: 2326534 - RNA, 19 nt, Artificial Sequence
  Description of Artificial Sequence: Synthetic oligonucleotide
auaggcacccagaaagaug

SEQ ID NO: 2326535 - RNA, 19 nt, Artificial Sequence
  Description of Artificial Sequence: Synthetic oligonucleotide
acuggaccaacgagaaagg

SEQ ID NO: 2326536 - RNA, 19 nt, Artificial Sequence
  Description of Artificial Sequence: Synthetic oligonucleotide
gaagugugaugcugaguca

SEQ ID NO: 2326537 - RNA, 19 nt, Artificial Sequence
  Description of Artificial Sequence: Synthetic oligonucleotide
agcuccgcagacugcugac

SEQ ID NO: 2326538 - RNA, 19 nt, Artificial Sequence
  Description of Artificial Sequence: Synthetic oligonucleotide
ugcuacuccuccagccacc

SEQ ID NO: 2326539 - RNA, 19 nt, Artificial Sequence
  Description of Artificial Sequence: Synthetic oligonucleotide
agcaugugcuucaccggcc

SEQ ID NO: 2326540 - RNA, 19 nt, Artificial Sequence
  Description of Artificial Sequence: Synthetic oligonucleotide
cagagguguaguaacugca

SEQ ID NO: 2326541 - RNA, 19 nt, Artificial Sequence
  Description of Artificial Sequence: Synthetic oligonucleotide
acguauucauaggugagaa

SEQ ID NO: 2326542 - RNA, 19 nt, Artificial Sequence
  Description of Artificial Sequence: Synthetic oligonucleotide
ugcccucuucauuuaagau

SEQ ID NO: 2326543 - RNA, 19 nt, Artificial Sequence
  Description of Artificial Sequence: Synthetic oligonucleotide
cugcaaaagcuccgcagac

SEQ ID NO: 2326544 - RNA, 19 nt, Artificial Sequence
  Description of Artificial Sequence: Synthetic oligonucleotide
agagcgcuuucaaggauuc

SEQ ID NO: 2326545 - RNA, 19 nt, Artificial Sequence
  Description of Artificial Sequence: Synthetic oligonucleotide
acacccgcaaauaacccug

SEQ ID NO: 2326546 - RNA, 19 nt, Artificial Sequence
  Description of Artificial Sequence: Synthetic oligonucleotide
gcgaggacuaaaguuagag

SEQ ID NO: 2326547 - RNA, 19 nt, Artificial Sequence
  Description of Artificial Sequence: Synthetic oligonucleotide
gguguaguaacugcagcug

SEQ ID NO: 2326548 - RNA, 19 nt, Artificial Sequence
  Description of Artificial Sequence: Synthetic oligonucleotide
augaccagagcgcuuucaa

SEQ ID NO: 2326549 - RNA, 19 nt, Artificial Sequence
  Description of Artificial Sequence: Synthetic oligonucleotide
gugagcgccacaccgcaug

SEQ ID NO: 2326550 - RNA, 19 nt, Artificial Sequence
  Description of Artificial Sequence: Synthetic oligonucleotide
agcauuaggaaaggaccca

SEQ ID NO: 2326551 - RNA, 19 nt, Artificial Sequence
  Description of Artificial Sequence: Synthetic oligonucleotide
acgaaaaccgccagccuug

SEQ ID NO: 2326552 - RNA, 19 nt, Artificial Sequence
  Description of Artificial Sequence: Synthetic oligonucleotide
ccaagaauccaccauguga

SEQ ID NO: 2326553 - RNA, 19 nt, Artificial Sequence
  Description of Artificial Sequence: Synthetic oligonucleotide
aauaacccugcuagucccu

SEQ ID NO: 2326554 - RNA, 19 nt, Artificial Sequence
  Description of Artificial Sequence: Synthetic oligonucleotide
uccaccaugugaccccguc

SEQ ID NO: 2326555 - RNA, 19 nt, Artificial Sequence
  Description of Artificial Sequence: Synthetic oligonucleotide
auucgugggaagacacccg

SEQ ID NO: 2326556 - RNA, 19 nt, Artificial Sequence
  Description of Artificial Sequence: Synthetic oligonucleotide
acauccagagguguaguaa

SEQ ID NO: 2326557 - RNA, 19 nt, Artificial Sequence
  Description of Artificial Sequence: Synthetic oligonucleotide
gcaaauaacccugcuaguc

SEQ ID NO: 2326558 - RNA, 19 nt, Artificial Sequence
  Description of Artificial Sequence: Synthetic oligonucleotide
aagucaacugaggcaccug

SEQ ID NO: 2326559 - RNA, 19 nt, Artificial Sequence
  Description of Artificial Sequence: Synthetic oligonucleotide
agugugcagcaaauauuuc

SEQ ID NO: 2326560 - RNA, 19 nt, Artificial Sequence
  Description of Artificial Sequence: Synthetic oligonucleotide
uccgcagacugcugacugc

SEQ ID NO: 2326561 - RNA, 19 nt, Artificial Sequence
  Description of Artificial Sequence: Synthetic oligonucleotide
aacucgaaucaagcaggca

SEQ ID NO: 2326562 - RNA, 19 nt, Artificial Sequence
  Description of Artificial Sequence: Synthetic oligonucleotide
uucuaacagcaagcugcgg

SEQ ID NO: 2326563 - RNA, 19 nt, Artificial Sequence
  Description of Artificial Sequence: Synthetic oligonucleotide
ugugaccccgucgccauga

SEQ ID NO: 2326564 - RNA, 19 nt, Artificial Sequence
  Description of Artificial Sequence: Synthetic oligonucleotide
ggaaaggacccaauagcug

SEQ ID NO: 2326565 - RNA, 19 nt, Artificial Sequence
  Description of Artificial Sequence: Synthetic oligonucleotide
guugaauccuuggggacuc

SEQ ID NO: 2326566 - RNA, 19 nt, Artificial Sequence
  Description of Artificial Sequence: Synthetic oligonucleotide
gcaggcaaccacuucuccc

SEQ ID NO: 2326567 - RNA, 19 nt, Artificial Sequence
  Description of Artificial Sequence: Synthetic oligonucleotide
cuccgcagacugcugacug

SEQ ID NO: 2326568 - RNA, 19 nt, Artificial Sequence
  Description of Artificial Sequence: Synthetic oligonucleotide
uuguagccucgguacaguc

SEQ ID NO: 2326569 - RNA, 19 nt, Artificial Sequence
  Description of Artificial Sequence: Synthetic oligonucleotide
gugugaugcugagucagug

SEQ ID NO: 2326570 - RNA, 19 nt, Artificial Sequence
  Description of Artificial Sequence: Synthetic oligonucleotide
guacaguccuuggaugccc

SEQ ID NO: 2326571 - RNA, 19 nt, Artificial Sequence
  Description of Artificial Sequence: Synthetic oligonucleotide
gacacccgcaaauaacccu

SEQ ID NO: 2326572 - RNA, 19 nt, Artificial Sequence
  Description of Artificial Sequence: Synthetic oligonucleotide
ucgugggaagacacccgca

SEQ ID NO: 2326573 - RNA, 19 nt, Artificial Sequence
  Description of Artificial Sequence: Synthetic oligonucleotide
acucccaacagcagugcug

SEQ ID NO: 2326574 - RNA, 19 nt, Artificial Sequence
  Description of Artificial Sequence: Synthetic oligonucleotide
cucgucuuagccacaucca

SEQ ID NO: 2326575 - RNA, 19 nt, Artificial Sequence
  Description of Artificial Sequence: Synthetic oligonucleotide
cuaacagcaagcugcgggu

SEQ ID NO: 2326576 - RNA, 19 nt, Artificial Sequence
  Description of Artificial Sequence: Synthetic oligonucleotide
ugccauucgugggaagaca

SEQ ID NO: 2326577 - RNA, 19 nt, Artificial Sequence
  Description of Artificial Sequence: Synthetic oligonucleotide
gaccccgcgaggacuaaag

SEQ ID NO: 2326578 - RNA, 19 nt, Artificial Sequence
  Description of Artificial Sequence: Synthetic oligonucleotide
cgaggacuaaaguuagagg

SEQ ID NO: 2326579 - RNA, 19 nt, Artificial Sequence
  Description of Artificial Sequence: Synthetic oligonucleotide
cagcugcgaaaccaccugc

SEQ ID NO: 2326580 - RNA, 19 nt, Artificial Sequence
  Description of Artificial Sequence: Synthetic oligonucleotide
ugcuagucccugugagcgc

SEQ ID NO: 2326581 - RNA, 19 nt, Artificial Sequence
  Description of Artificial Sequence: Synthetic oligonucleotide
agcagacaccugugcccgc

SEQ ID NO: 2326582 - RNA, 19 nt, Artificial Sequence
  Description of Artificial Sequence: Synthetic oligonucleotide
cugcuacuccuccagccac

SEQ ID NO: 2326583 - RNA, 19 nt, Artificial Sequence
  Description of Artificial Sequence: Synthetic oligonucleotide
agacugcugacugccaaga

SEQ ID NO: 2326584 - RNA, 19 nt, Artificial Sequence
  Description of Artificial Sequence: Synthetic oligonucleotide
caggugcugaccccaggag

SEQ ID NO: 2326585 - RNA, 19 nt, Artificial Sequence
  Description of Artificial Sequence: Synthetic oligonucleotide
cagagagcacacucccaac

SEQ ID NO: 2326586 - RNA, 19 nt, Artificial Sequence
  Description of Artificial Sequence: Synthetic oligonucleotide
ugcccgcugcuuaacuacu

SEQ ID NO: 2326587 - RNA, 19 nt, Artificial Sequence
  Description of Artificial Sequence: Synthetic oligonucleotide
cagugugcagcaaauauuu

SEQ ID NO: 2326588 - RNA, 19 nt, Artificial Sequence
  Description of Artificial Sequence: Synthetic oligonucleotide
caacgagaaaggaaucucu

SEQ ID NO: 2326589 - RNA, 19 nt, Artificial Sequence
  Description of Artificial Sequence: Synthetic oligonucleotide
auaacccugcuagucccug

SEQ ID NO: 2326590 - RNA, 19 nt, Artificial Sequence
  Description of Artificial Sequence: Synthetic oligonucleotide
ugcuggagcccgccuuugc

SEQ ID NO: 2326591 - RNA, 19 nt, Artificial Sequence
  Description of Artificial Sequence: Synthetic oligonucleotide
agcgccacaccgcaugcau

SEQ ID NO: 2326592 - RNA, 19 nt, Artificial Sequence
  Description of Artificial Sequence: Synthetic oligonucleotide
cuggucauaggcacccaga

SEQ ID NO: 2326593 - RNA, 19 nt, Artificial Sequence
  Description of Artificial Sequence: Synthetic oligonucleotide
guuagagguggaggagaag

SEQ ID NO: 2326594 - RNA, 19 nt, Artificial Sequence
  Description of Artificial Sequence: Synthetic oligonucleotide
ccggccugaagugugaugc

SEQ ID NO: 2326595 - RNA, 19 nt, Artificial Sequence
  Description of Artificial Sequence: Synthetic oligonucleotide
ugaccccgucgccaugacc

SEQ ID NO: 2326596 - RNA, 19 nt, Artificial Sequence
  Description of Artificial Sequence: Synthetic oligonucleotide
cgagaaaggaaucucucuc

SEQ ID NO: 2326597 - RNA, 19 nt, Artificial Sequence
  Description of Artificial Sequence: Synthetic oligonucleotide
augugcuucaccggccuga

SEQ ID NO: 2326598 - RNA, 19 nt, Artificial Sequence
  Description of Artificial Sequence: Synthetic oligonucleotide
ggaagacacccgcaaauaa

SEQ ID NO: 2326599 - RNA, 19 nt, Artificial Sequence
  Description of Artificial Sequence: Synthetic oligonucleotide
aggacccaauagcuguaga

SEQ ID NO: 2326600 - RNA, 19 nt, Artificial Sequence
  Description of Artificial Sequence: Synthetic oligonucleotide
aaagcuccgcagacugcug

SEQ ID NO: 2326601 - RNA, 19 nt, Artificial Sequence
  Description of Artificial Sequence: Synthetic oligonucleotide
ucgccaugaccagagcgcu

SEQ ID NO: 2326602 - RNA, 19 nt, Artificial Sequence
  Description of Artificial Sequence: Synthetic oligonucleotide
uaacccugcuagucccugu

SEQ ID NO: 2326603 - RNA, 19 nt, Artificial Sequence
  Description of Artificial Sequence: Synthetic oligonucleotide
ggcacccagaaagaugaag

SEQ ID NO: 2326604 - RNA, 19 nt, Artificial Sequence
  Description of Artificial Sequence: Synthetic oligonucleotide
cacguauucauaggugaga

SEQ ID NO: 2326605 - RNA, 19 nt, Artificial Sequence
  Description of Artificial Sequence: Synthetic oligonucleotide
cacccgcaaauaacccugc

SEQ ID NO: 2326606 - RNA, 19 nt, Artificial Sequence
  Description of Artificial Sequence: Synthetic oligonucleotide
gacuaaaguuagaggugga

SEQ ID NO: 2326607 - RNA, 19 nt, Artificial Sequence
  Description of Artificial Sequence: Synthetic oligonucleotide
agugcuggagcccgccuuu

SEQ ID NO: 2326608 - RNA, 19 nt, Artificial Sequence
  Description of Artificial Sequence: Synthetic oligonucleotide
acgggcucuuccugcccac

SEQ ID NO: 2326609 - RNA, 19 nt, Artificial Sequence
  Description of Artificial Sequence: Synthetic oligonucleotide
ccagcaugugcuucaccgg

SEQ ID NO: 2326610 - RNA, 19 nt, Artificial Sequence
  Description of Artificial Sequence: Synthetic oligonucleotide
acagcaagcugcgggucug

SEQ ID NO: 2326611 - RNA, 19 nt, Artificial Sequence
  Description of Artificial Sequence: Synthetic oligonucleotide
gguacaguccuuggaugcc

SEQ ID NO: 2326612 - RNA, 19 nt, Artificial Sequence
  Description of Artificial Sequence: Synthetic oligonucleotide
gcuucaccggccugaagug

SEQ ID NO: 2326613 - RNA, 19 nt, Artificial Sequence
  Description of Artificial Sequence: Synthetic oligonucleotide
uggggacucugcagccuug

SEQ ID NO: 2326614 - RNA, 19 nt, Artificial Sequence
  Description of Artificial Sequence: Synthetic oligonucleotide
gaccaacgagaaaggaauc

SEQ ID NO: 2326615 - RNA, 19 nt, Artificial Sequence
  Description of Artificial Sequence: Synthetic oligonucleotide
ugaagccucccaugcugau

SEQ ID NO: 2326616 - RNA, 19 nt, Artificial Sequence
  Description of Artificial Sequence: Synthetic oligonucleotide
agcaaauauuucacguauu

SEQ ID NO: 2326617 - RNA, 19 nt, Artificial Sequence
  Description of Artificial Sequence: Synthetic oligonucleotide
ucucaacacugugcucuug

SEQ ID NO: 2326618 - RNA, 19 nt, Artificial Sequence
  Description of Artificial Sequence: Synthetic oligonucleotide
cuucagaaggaacucgaau

SEQ ID NO: 2326619 - RNA, 19 nt, Artificial Sequence
  Description of Artificial Sequence: Synthetic oligonucleotide
gauucccacaaaggaaacu

SEQ ID NO: 2326620 - RNA, 19 nt, Artificial Sequence
  Description of Artificial Sequence: Synthetic oligonucleotide
ccugcuagucccugugagc

SEQ ID NO: 2326621 - RNA, 19 nt, Artificial Sequence
  Description of Artificial Sequence: Synthetic oligonucleotide
uugccagcaugauccucgu

SEQ ID NO: 2326622 - RNA, 19 nt, Artificial Sequence
  Description of Artificial Sequence: Synthetic oligonucleotide
cugccauucgugggaagac

SEQ ID NO: 2326623 - RNA, 19 nt, Artificial Sequence
  Description of Artificial Sequence: Synthetic oligonucleotide
ccugaagugugaugcugag

SEQ ID NO: 2326624 - RNA, 19 nt, Artificial Sequence
  Description of Artificial Sequence: Synthetic oligonucleotide
accggccugaagugugaug

SEQ ID NO: 2326625 - RNA, 19 nt, Artificial Sequence
  Description of Artificial Sequence: Synthetic oligonucleotide
gcuagucccugugagcgcc

SEQ ID NO: 2326626 - RNA, 19 nt, Artificial Sequence
  Description of Artificial Sequence: Synthetic oligonucleotide
cugcgaaaccaccugcaaa

SEQ ID NO: 2326627 - RNA, 19 nt, Artificial Sequence
  Description of Artificial Sequence: Synthetic oligonucleotide
gcauccauggucccgccga

SEQ ID NO: 2326628 - RNA, 19 nt, Artificial Sequence
  Description of Artificial Sequence: Synthetic oligonucleotide
acuucagaaggaacucgaa

SEQ ID NO: 2326629 - RNA, 19 nt, Artificial Sequence
  Description of Artificial Sequence: Synthetic oligonucleotide
agugugaugcugagucagu

SEQ ID NO: 2326630 - RNA, 19 nt, Artificial Sequence
  Description of Artificial Sequence: Synthetic oligonucleotide
cucaacacugugcucuugu

SEQ ID NO: 2326631 - RNA, 19 nt, Artificial Sequence
  Description of Artificial Sequence: Synthetic oligonucleotide
uggaugcccucuucauuua

SEQ ID NO: 2326632 - RNA, 19 nt, Artificial Sequence
  Description of Artificial Sequence: Synthetic oligonucleotide
ccugugagcgccacaccgc

SEQ ID NO: 2326633 - RNA, 19 nt, Artificial Sequence
  Description of Artificial Sequence: Synthetic oligonucleotide
ugcugccauucgugggaag

SEQ ID NO: 2326634 - RNA, 19 nt, Artificial Sequence
  Description of Artificial Sequence: Synthetic oligonucleotide
cccggcgcauccauggucc

SEQ ID NO: 2326635 - RNA, 19 nt, Artificial Sequence
  Description of Artificial Sequence: Synthetic oligonucleotide
cucgguacaguccuuggau

SEQ ID NO: 2326636 - RNA, 19 nt, Artificial Sequence
  Description of Artificial Sequence: Synthetic oligonucleotide
agcugcgaaaccaccugca

SEQ ID NO: 2326637 - RNA, 19 nt, Artificial Sequence
  Description of Artificial Sequence: Synthetic oligonucleotide
gcagccuugucuuaauagu

SEQ ID NO: 2326638 - RNA, 19 nt, Artificial Sequence
  Description of Artificial Sequence: Synthetic oligonucleotide
ccaacgagaaaggaaucuc

SEQ ID NO: 2326639 - RNA, 19 nt, Artificial Sequence
  Description of Artificial Sequence: Synthetic oligonucleotide
cgaaaccaccugcaaaagc

SEQ ID NO: 2326640 - RNA, 19 nt, Artificial Sequence
  Description of Artificial Sequence: Synthetic oligonucleotide
ggacaccugcauauauucc

SEQ ID NO: 2326641 - RNA, 19 nt, Artificial Sequence
  Description of Artificial Sequence: Synthetic oligonucleotide
acccgcaaauaacccugcu

SEQ ID NO: 2326642 - RNA, 19 nt, Artificial Sequence
  Description of Artificial Sequence: Synthetic oligonucleotide
cugugagcgccacaccgca

SEQ ID NO: 2326643 - RNA, 19 nt, Artificial Sequence
  Description of Artificial Sequence: Synthetic oligonucleotide
cauccauggucccgccgac

SEQ ID NO: 2326644 - RNA, 19 nt, Artificial Sequence
  Description of Artificial Sequence: Synthetic oligonucleotide
ccauucgugggaagacacc

SEQ ID NO: 2326645 - RNA, 19 nt, Artificial Sequence
  Description of Artificial Sequence: Synthetic oligonucleotide
gaaucucucucaacacugu

SEQ ID NO: 2326646 - RNA, 19 nt, Artificial Sequence
  Description of Artificial Sequence: Synthetic oligonucleotide
agccucgguacaguccuug

SEQ ID NO: 2326647 - RNA, 19 nt, Artificial Sequence
  Description of Artificial Sequence: Synthetic oligonucleotide
cgccacaccgcaugcaugg

SEQ ID NO: 2326648 - RNA, 19 nt, Artificial Sequence
  Description of Artificial Sequence: Synthetic oligonucleotide
ugugagcgccacaccgcau

SEQ ID NO: 2326649 - RNA, 19 nt, Artificial Sequence
  Description of Artificial Sequence: Synthetic oligonucleotide
accccgcgaggacuaaagu

SEQ ID NO: 2326650 - RNA, 19 nt, Artificial Sequence
  Description of Artificial Sequence: Synthetic oligonucleotide
gacugcugacugccaagaa

SEQ ID NO: 2326651 - RNA, 19 nt, Artificial Sequence
  Description of Artificial Sequence: Synthetic oligonucleotide
acccugcuagucccuguga

SEQ ID NO: 2326652 - RNA, 19 nt, Artificial Sequence
  Description of Artificial Sequence: Synthetic oligonucleotide
acaccgcaugcauggcaga

SEQ ID NO: 2326653 - RNA, 19 nt, Artificial Sequence
  Description of Artificial Sequence: Synthetic oligonucleotide
ccaccaugugaccccgucg

SEQ ID NO: 2326654 - RNA, 19 nt, Artificial Sequence
  Description of Artificial Sequence: Synthetic oligonucleotide
gugggaagacacccgcaaa

SEQ ID NO: 2326655 - RNA, 19 nt, Artificial Sequence
  Description of Artificial Sequence: Synthetic oligonucleotide
accgcaugcauggcagaga

SEQ ID NO: 2326656 - RNA, 19 nt, Artificial Sequence
  Description of Artificial Sequence: Synthetic oligonucleotide
aucaagcaggcaaccacuu

SEQ ID NO: 2326657 - RNA, 19 nt, Artificial Sequence
  Description of Artificial Sequence: Synthetic oligonucleotide
gccauucgugggaagacac

SEQ ID NO: 2326658 - RNA, 19 nt, Artificial Sequence
  Description of Artificial Sequence: Synthetic oligonucleotide
gucccgccgaccccgcgag

SEQ ID NO: 2326659 - RNA, 19 nt, Artificial Sequence
  Description of Artificial Sequence: Synthetic oligonucleotide
accccgucgccaugaccag

SEQ ID NO: 2326660 - RNA, 19 nt, Artificial Sequence
  Description of Artificial Sequence: Synthetic oligonucleotide
ggcgcauccauggucccgc

SEQ ID NO: 2326661 - RNA, 19 nt, Artificial Sequence
  Description of Artificial Sequence: Synthetic oligonucleotide
ccgcgaggacuaaaguuag

SEQ ID NO: 2326662 - RNA, 19 nt, Artificial Sequence
  Description of Artificial Sequence: Synthetic oligonucleotide
accugugcccgcugcuuaa

SEQ ID NO: 2326663 - RNA, 19 nt, Artificial Sequence
  Description of Artificial Sequence: Synthetic oligonucleotide
agggacaccugcauauauu

SEQ ID NO: 2326664 - RNA, 19 nt, Artificial Sequence
  Description of Artificial Sequence: Synthetic oligonucleotide
gccucgguacaguccuugg

SEQ ID NO: 2326665 - RNA, 19 nt, Artificial Sequence
  Description of Artificial Sequence: Synthetic oligonucleotide
cccugcuagucccugugag

SEQ ID NO: 2326666 - RNA, 19 nt, Artificial Sequence
  Description of Artificial Sequence: Synthetic oligonucleotide
cacgaaaaccgccagccuu

SEQ ID NO: 2326667 - RNA, 19 nt, Artificial Sequence
  Description of Artificial Sequence: Synthetic oligonucleotide
uccucgucuuagccacauc

SEQ ID NO: 2326668 - RNA, 19 nt, Artificial Sequence
  Description of Artificial Sequence: Synthetic oligonucleotide
cccgcgaggacuaaaguua

SEQ ID NO: 2326669 - RNA, 19 nt, Artificial Sequence
  Description of Artificial Sequence: Synthetic oligonucleotide
gaagggacaccugcauaua

SEQ ID NO: 2326670 - RNA, 19 nt, Artificial Sequence
  Description of Artificial Sequence: Synthetic oligonucleotide
ggucauaggcacccagaaa

SEQ ID NO: 2326671 - RNA, 19 nt, Artificial Sequence
  Description of Artificial Sequence: Synthetic oligonucleotide
accgccagccuuguugaau

SEQ ID NO: 2326672 - RNA, 19 nt, Artificial Sequence
  Description of Artificial Sequence: Synthetic oligonucleotide
gcugauugcugccauucgu

SEQ ID NO: 2326673 - RNA, 19 nt, Artificial Sequence
  Description of Artificial Sequence: Synthetic oligonucleotide
cuggaccaacgagaaagga

SEQ ID NO: 2326674 - RNA, 19 nt, Artificial Sequence
  Description of Artificial Sequence: Synthetic oligonucleotide
cuccagccaccagcgaggc

SEQ ID NO: 2326675 - RNA, 19 nt, Artificial Sequence
  Description of Artificial Sequence: Synthetic oligonucleotide
aaccgccagccuuguugaa

SEQ ID NO: 2326676 - RNA, 19 nt, Artificial Sequence
  Description of Artificial Sequence: Synthetic oligonucleotide
ggauucccacaaaggaaac

SEQ ID NO: 2326677 - RNA, 19 nt, Artificial Sequence
  Description of Artificial Sequence: Synthetic oligonucleotide
gcugccauucgugggaaga

SEQ ID NO: 2326678 - RNA, 19 nt, Artificial Sequence
  Description of Artificial Sequence: Synthetic oligonucleotide
ccaauagcuguagaaggga

SEQ ID NO: 2326679 - RNA, 19 nt, Artificial Sequence
  Description of Artificial Sequence: Synthetic oligonucleotide
gcgaaaccaccugcaaaag

SEQ ID NO: 2326680 - RNA, 19 nt, Artificial Sequence
  Description of Artificial Sequence: Synthetic oligonucleotide
cuacuccuccagccaccag

SEQ ID NO: 2326681 - RNA, 19 nt, Artificial Sequence
  Description of Artificial Sequence: Synthetic oligonucleotide
ggcucuuccugcccacuuc

SEQ ID NO: 2326682 - RNA, 19 nt, Artificial Sequence
  Description of Artificial Sequence: Synthetic oligonucleotide
gagcccgccuuugccagca

SEQ ID NO: 2326683 - RNA, 19 nt, Artificial Sequence
  Description of Artificial Sequence: Synthetic oligonucleotide
ucccaacagcagugcugga

SEQ ID NO: 2326684 - RNA, 19 nt, Artificial Sequence
  Description of Artificial Sequence: Synthetic oligonucleotide
gccugaagugugaugcuga

SEQ ID NO: 2326685 - RNA, 19 nt, Artificial Sequence
  Description of Artificial Sequence: Synthetic oligonucleotide
cagagcgcuuucaaggauu

SEQ ID NO: 2326686 - RNA, 19 nt, Artificial Sequence
  Description of Artificial Sequence: Synthetic oligonucleotide
uagucccugugagcgccac

SEQ ID NO: 2326687 - RNA, 19 nt, Artificial Sequence
  Description of Artificial Sequence: Synthetic oligonucleotide
ccgcagacugcugacugcc

SEQ ID NO: 2326688 - RNA, 19 nt, Artificial Sequence
  Description of Artificial Sequence: Synthetic oligonucleotide
cgugaagcccggcgcaucc

SEQ ID NO: 2326689 - RNA, 19 nt, Artificial Sequence
  Description of Artificial Sequence: Synthetic oligonucleotide
gcugcgaaaccaccugcaa

SEQ ID NO: 2326690 - RNA, 19 nt, Artificial Sequence
  Description of Artificial Sequence: Synthetic oligonucleotide
ucccgccgaccccgcgagg

SEQ ID NO: 2326691 - RNA, 19 nt, Artificial Sequence
  Description of Artificial Sequence: Synthetic oligonucleotide
caugugaccccgucgccau

SEQ ID NO: 2326692 - RNA, 19 nt, Artificial Sequence
  Description of Artificial Sequence: Synthetic oligonucleotide
ccaccugcaaaagcuccgc

SEQ ID NO: 2326693 - RNA, 19 nt, Artificial Sequence
  Description of Artificial Sequence: Synthetic oligonucleotide
ccugcuacuccuccagcca

SEQ ID NO: 2326694 - RNA, 19 nt, Artificial Sequence
  Description of Artificial Sequence: Synthetic oligonucleotide
gcaagcugcgggucugguc

SEQ ID NO: 2326695 - RNA, 19 nt, Artificial Sequence
  Description of Artificial Sequence: Synthetic oligonucleotide
agcaagcugcgggucuggu

SEQ ID NO: 2326696 - RNA, 19 nt, Artificial Sequence
  Description of Artificial Sequence: Synthetic oligonucleotide
agcccggcgcauccauggu

SEQ ID NO: 2326697 - RNA, 19 nt, Artificial Sequence
  Description of Artificial Sequence: Synthetic oligonucleotide
cccgccuuugccagcauga

SEQ ID NO: 2326698 - RNA, 19 nt, Artificial Sequence
  Description of Artificial Sequence: Synthetic oligonucleotide
cagcagugcuggagcccgc

SEQ ID NO: 2326699 - RNA, 19 nt, Artificial Sequence
  Description of Artificial Sequence: Synthetic oligonucleotide
gcgcuuucaaggauuccca

SEQ ID NO: 2326700 - RNA, 19 nt, Artificial Sequence
  Description of Artificial Sequence: Synthetic oligonucleotide
cuagucccugugagcgcca

SEQ ID NO: 2326701 - RNA, 19 nt, Artificial Sequence
  Description of Artificial Sequence: Synthetic oligonucleotide
cucccgcagaggcggccag

SEQ ID NO: 2326702 - RNA, 19 nt, Artificial Sequence
  Description of Artificial Sequence: Synthetic oligonucleotide
gauccucgucuuagccaca

SEQ ID NO: 2326703 - RNA, 19 nt, Artificial Sequence
  Description of Artificial Sequence: Synthetic oligonucleotide
cgucuuagccacauccaga

SEQ ID NO: 2326704 - RNA, 19 nt, Artificial Sequence
  Description of Artificial Sequence: Synthetic oligonucleotide
caccagcgaggccgugaag

SEQ ID NO: 2326705 - RNA, 19 nt, Artificial Sequence
  Description of Artificial Sequence: Synthetic oligonucleotide
gugaccccgucgccaugac

SEQ ID NO: 2326706 - RNA, 19 nt, Artificial Sequence
  Description of Artificial Sequence: Synthetic oligonucleotide
gcgggucuggucauaggca

SEQ ID NO: 2326707 - RNA, 19 nt, Artificial Sequence
  Description of Artificial Sequence: Synthetic oligonucleotide
cugcagccuugucuuaaua

SEQ ID NO: 2326708 - RNA, 19 nt, Artificial Sequence
  Description of Artificial Sequence: Synthetic oligonucleotide
uagccucgguacaguccuu

SEQ ID NO: 2326709 - RNA, 19 nt, Artificial Sequence
  Description of Artificial Sequence: Synthetic oligonucleotide
gcuacuccuccagccacca

SEQ ID NO: 2326710 - RNA, 19 nt, Artificial Sequence
  Description of Artificial Sequence: Synthetic oligonucleotide
ggagcccgccuuugccagc

SEQ ID NO: 2326711 - RNA, 19 nt, Artificial Sequence
  Description of Artificial Sequence: Synthetic oligonucleotide
ccucgguacaguccuugga

SEQ ID NO: 2326712 - RNA, 19 nt, Artificial Sequence
  Description of Artificial Sequence: Synthetic oligonucleotide
cccgcaaauaacccugcua

SEQ ID NO: 2326713 - RNA, 19 nt, Artificial Sequence
  Description of Artificial Sequence: Synthetic oligonucleotide
cagcaugauccucgucuua

SEQ ID NO: 2326714 - RNA, 19 nt, Artificial Sequence
  Description of Artificial Sequence: Synthetic oligonucleotide
caugcugauugcugccauu

SEQ ID NO: 2326715 - RNA, 19 nt, Artificial Sequence
  Description of Artificial Sequence: Synthetic oligonucleotide
cacugugcucuuguagccu

SEQ ID NO: 2326716 - RNA, 19 nt, Artificial Sequence
  Description of Artificial Sequence: Synthetic oligonucleotide
gugaagcccggcgcaucca

SEQ ID NO: 2326717 - RNA, 19 nt, Artificial Sequence
  Description of Artificial Sequence: Synthetic oligonucleotide
cuucaccggccugaagugu

SEQ ID NO: 2326718 - RNA, 19 nt, Artificial Sequence
  Description of Artificial Sequence: Synthetic oligonucleotide
ccacaccgcaugcauggca

SEQ ID NO: 2326719 - RNA, 19 nt, Artificial Sequence
  Description of Artificial Sequence: Synthetic oligonucleotide
cgugggaagacacccgcaa

SEQ ID NO: 2326720 - RNA, 19 nt, Artificial Sequence
  Description of Artificial Sequence: Synthetic oligonucleotide
gaaaaccgccagccuuguu

SEQ ID NO: 2326721 - RNA, 19 nt, Artificial Sequence
  Description of Artificial Sequence: Synthetic oligonucleotide
gcccggcgcauccaugguc

SEQ ID NO: 2326722 - RNA, 19 nt, Artificial Sequence
  Description of Artificial Sequence: Synthetic oligonucleotide
cguauucauaggugagaaa

SEQ ID NO: 2326723 - RNA, 19 nt, Artificial Sequence
  Description of Artificial Sequence: Synthetic oligonucleotide
cgaaucaagcaggcaacca

SEQ ID NO: 2326724 - RNA, 19 nt, Artificial Sequence
  Description of Artificial Sequence: Synthetic oligonucleotide
cugagucagugugcagcaa

SEQ ID NO: 2326725 - RNA, 19 nt, Artificial Sequence
  Description of Artificial Sequence: Synthetic oligonucleotide
cugugcccgcugcuuaacu

SEQ ID NO: 2326726 - RNA, 19 nt, Artificial Sequence
  Description of Artificial Sequence: Synthetic oligonucleotide
cgcauccauggucccgccg

SEQ ID NO: 2326727 - RNA, 19 nt, Artificial Sequence
  Description of Artificial Sequence: Synthetic oligonucleotide
gccaugaccagagcgcuuu

SEQ ID NO: 2326728 - RNA, 19 nt, Artificial Sequence
  Description of Artificial Sequence: Synthetic oligonucleotide
gccaccagcgaggccguga

SEQ ID NO: 2326729 - RNA, 19 nt, Artificial Sequence
  Description of Artificial Sequence: Synthetic oligonucleotide
gccacaccgcaugcauggc

SEQ ID NO: 2326730 - RNA, 19 nt, Artificial Sequence
  Description of Artificial Sequence: Synthetic oligonucleotide
ccggcgcauccaugguccc

SEQ ID NO: 2326731 - RNA, 19 nt, Artificial Sequence
  Description of Artificial Sequence: Synthetic oligonucleotide
ccugugcccgcugcuuaac

SEQ ID NO: 2326732 - RNA, 19 nt, Artificial Sequence
  Description of Artificial Sequence: Synthetic oligonucleotide
ccaccagcgaggccgugaa

SEQ ID NO: 2326733 - RNA, 19 nt, Artificial Sequence
  Description of Artificial Sequence: Synthetic oligonucleotide
agcugcgggucuggucaua

SEQ ID NO: 2326734 - RNA, 19 nt, Artificial Sequence
  Description of Artificial Sequence: Synthetic oligonucleotide
cgcaaauaacccugcuagu

SEQ ID NO: 2326735 - RNA, 19 nt, Artificial Sequence
  Description of Artificial Sequence: Synthetic oligonucleotide
agcccgccuuugccagcau

SEQ ID NO: 2326736 - RNA, 19 nt, Artificial Sequence
  Description of Artificial Sequence: Synthetic oligonucleotide
ccccgcgaggacuaaaguu

SEQ ID NO: 2326737 - RNA, 19 nt, Artificial Sequence
  Description of Artificial Sequence: Synthetic oligonucleotide
cggcgcauccauggucccg

SEQ ID NO: 2326738 - RNA, 19 nt, Artificial Sequence
  Description of Artificial Sequence: Synthetic oligonucleotide
cgcgaggacuaaaguuaga

SEQ ID NO: 2326739 - RNA, 19 nt, Artificial Sequence
  Description of Artificial Sequence: Synthetic oligonucleotide
cagccaccagcgaggccgu

SEQ ID NO: 2326740 - RNA, 19 nt, Artificial Sequence
  Description of Artificial Sequence: Synthetic oligonucleotide
ccgugaagcccggcgcauc

SEQ ID NO: 2326741 - RNA, 19 nt, Artificial Sequence
  Description of Artificial Sequence: Synthetic oligonucleotide
ccagagcgcuuucaaggau

SEQ ID NO: 2326742 - RNA, 19 nt, Artificial Sequence
  Description of Artificial Sequence: Synthetic oligonucleotide
ccacgaaaaccgccagccu

SEQ ID NO: 2326743 - RNA, 19 nt, Artificial Sequence
  Description of Artificial Sequence: Synthetic oligonucleotide
gggcucuuccugcccacuu

SEQ ID NO: 2326744 - RNA, 19 nt, Artificial Sequence
  Description of Artificial Sequence: Synthetic oligonucleotide
ccgccgaccccgcgaggac

SEQ ID NO: 2326745 - RNA, 19 nt, Artificial Sequence
  Description of Artificial Sequence: Synthetic oligonucleotide
gccgaccccgcgaggacua

SEQ ID NO: 2326746 - RNA, 19 nt, Artificial Sequence
  Description of Artificial Sequence: Synthetic oligonucleotide
caccggccugaagugugau

SEQ ID NO: 2326747 - RNA, 19 nt, Artificial Sequence
  Description of Artificial Sequence: Synthetic oligonucleotide
ccccgucgccaugaccaga

SEQ ID NO: 2326748 - RNA, 19 nt, Artificial Sequence
  Description of Artificial Sequence: Synthetic oligonucleotide
gcccgcugcuuaacuacuu

SEQ ID NO: 2326749 - RNA, 19 nt, Artificial Sequence
  Description of Artificial Sequence: Synthetic oligonucleotide
ccgccuuugccagcaugau

SEQ ID NO: 2326750 - RNA, 19 nt, Artificial Sequence
  Description of Artificial Sequence: Synthetic oligonucleotide
cgaccccgcgaggacuaaa

SEQ ID NO: 2326751 - RNA, 19 nt, Artificial Sequence
  Description of Artificial Sequence: Synthetic oligonucleotide
ccgaccccgcgaggacuaa

SEQ ID NO: 2326752 - RNA, 19 nt, Artificial Sequence
  Description of Artificial Sequence: Synthetic oligonucleotide
cgccgaccccgcgaggacu

SEQ ID NO: 2326753 - RNA, 19 nt, Artificial Sequence
  Description of Artificial Sequence: Synthetic oligonucleotide
ccgcagaggcggccagcau

SEQ ID NO: 2326754 - RNA, 19 nt, Artificial Sequence
  Description of Artificial Sequence: Synthetic oligonucleotide
uagacuuugacaaagaacu

SEQ ID NO: 2326755 - RNA, 19 nt, Artificial Sequence
  Description of Artificial Sequence: Synthetic oligonucleotide
aaccauagcccuuagacac

SEQ ID NO: 2326756 - RNA, 19 nt, Artificial Sequence
  Description of Artificial Sequence: Synthetic oligonucleotide
aauuuugacgcucaucacg

SEQ ID NO: 2326757 - RNA, 19 nt, Artificial Sequence
  Description of Artificial Sequence: Synthetic oligonucleotide
auuucacaaaaccauagcc

SEQ ID NO: 2326758 - RNA, 19 nt, Artificial Sequence
  Description of Artificial Sequence: Synthetic oligonucleotide
uuucggauaauuuugacgc

SEQ ID NO: 2326759 - RNA, 19 nt, Artificial Sequence
  Description of Artificial Sequence: Synthetic oligonucleotide
auaauuuugacgcucauca

SEQ ID NO: 2326760 - RNA, 19 nt, Artificial Sequence
  Description of Artificial Sequence: Synthetic oligonucleotide
guuuaaaacguuuugcagg

SEQ ID NO: 2326761 - RNA, 19 nt, Artificial Sequence
  Description of Artificial Sequence: Synthetic oligonucleotide
ucauaugucugcauggugc

SEQ ID NO: 2326762 - RNA, 19 nt, Artificial Sequence
  Description of Artificial Sequence: Synthetic oligonucleotide
gugacaguccaucagagcg

SEQ ID NO: 2326763 - RNA, 19 nt, Artificial Sequence
  Description of Artificial Sequence: Synthetic oligonucleotide
aacauuucucggcuguggc

SEQ ID NO: 2326764 - RNA, 19 nt, Artificial Sequence
  Description of Artificial Sequence: Synthetic oligonucleotide
guaacuauacaucuggcug

SEQ ID NO: 2326765 - RNA, 19 nt, Artificial Sequence
  Description of Artificial Sequence: Synthetic oligonucleotide
uaugcaaacauuucucggc

SEQ ID NO: 2326766 - RNA, 19 nt, Artificial Sequence
  Description of Artificial Sequence: Synthetic oligonucleotide
ucuucauaugucugcaugg

SEQ ID NO: 2326767 - RNA, 19 nt, Artificial Sequence
  Description of Artificial Sequence: Synthetic oligonucleotide
uuuaaaacguuuugcaggu

SEQ ID NO: 2326768 - RNA, 19 nt, Artificial Sequence
  Description of Artificial Sequence: Synthetic oligonucleotide
auuuuaugcaaacauuucu

SEQ ID NO: 2326769 - RNA, 19 nt, Artificial Sequence
  Description of Artificial Sequence: Synthetic oligonucleotide
uuuuaugcaaacauuucuc

SEQ ID NO: 2326770 - RNA, 19 nt, Artificial Sequence
  Description of Artificial Sequence: Synthetic oligonucleotide
uuaugcaaacauuucucgg

SEQ ID NO: 2326771 - RNA, 19 nt, Artificial Sequence
  Description of Artificial Sequence: Synthetic oligonucleotide
guuucggauaauuuugacg

SEQ ID NO: 2326772 - RNA, 19 nt, Artificial Sequence
  Description of Artificial Sequence: Synthetic oligonucleotide
uucaguuuaaaacguuuug

SEQ ID NO: 2326773 - RNA, 19 nt, Artificial Sequence
  Description of Artificial Sequence: Synthetic oligonucleotide
aagaacucauacagcaugc

SEQ ID NO: 2326774 - RNA, 19 nt, Artificial Sequence
  Description of Artificial Sequence: Synthetic oligonucleotide
ugggauuccagugaggcgg

SEQ ID NO: 2326775 - RNA, 19 nt, Artificial Sequence
  Description of Artificial Sequence: Synthetic oligonucleotide
agagggaauacucagggcu

SEQ ID NO: 2326776 - RNA, 19 nt, Artificial Sequence
  Description of Artificial Sequence: Synthetic oligonucleotide
ucaguuuaaaacguuuugc

SEQ ID NO: 2326777 - RNA, 19 nt, Artificial Sequence
  Description of Artificial Sequence: Synthetic oligonucleotide
uaaaacguuuugcaggugu

SEQ ID NO: 2326778 - RNA, 19 nt, Artificial Sequence
  Description of Artificial Sequence: Synthetic oligonucleotide
uugacaaagaacucauaca

SEQ ID NO: 2326779 - RNA, 19 nt, Artificial Sequence
  Description of Artificial Sequence: Synthetic oligonucleotide
gcauaauucaguuuaaaac

SEQ ID NO: 2326780 - RNA, 19 nt, Artificial Sequence
  Description of Artificial Sequence: Synthetic oligonucleotide
uacucaaccggcuuuacac

SEQ ID NO: 2326781 - RNA, 19 nt, Artificial Sequence
  Description of Artificial Sequence: Synthetic oligonucleotide
guuguuuuccauaaguggc

SEQ ID NO: 2326782 - RNA, 19 nt, Artificial Sequence
  Description of Artificial Sequence: Synthetic oligonucleotide
uguaacuauacaucuggcu

SEQ ID NO: 2326783 - RNA, 19 nt, Artificial Sequence
  Description of Artificial Sequence: Synthetic oligonucleotide
agacacgccugucuggucc

SEQ ID NO: 2326784 - RNA, 19 nt, Artificial Sequence
  Description of Artificial Sequence: Synthetic oligonucleotide
gcuguaacuauacaucugg

SEQ ID NO: 2326785 - RNA, 19 nt, Artificial Sequence
  Description of Artificial Sequence: Synthetic oligonucleotide
auuuugacgcucaucacgg

SEQ ID NO: 2326786 - RNA, 19 nt, Artificial Sequence
  Description of Artificial Sequence: Synthetic oligonucleotide
ugguuguuuuccauaagug

SEQ ID NO: 2326787 - RNA, 19 nt, Artificial Sequence
  Description of Artificial Sequence: Synthetic oligonucleotide
uuuagggauggccacacuc

SEQ ID NO: 2326788 - RNA, 19 nt, Artificial Sequence
  Description of Artificial Sequence: Synthetic oligonucleotide
uaacuauacaucuggcugu

SEQ ID NO: 2326789 - RNA, 19 nt, Artificial Sequence
  Description of Artificial Sequence: Synthetic oligonucleotide
uuuuccauaaguggcauaa

SEQ ID NO: 2326790 - RNA, 19 nt, Artificial Sequence
  Description of Artificial Sequence: Synthetic oligonucleotide
cauaaguggcauaauucag

SEQ ID NO: 2326791 - RNA, 19 nt, Artificial Sequence
  Description of Artificial Sequence: Synthetic oligonucleotide
uguguguagccguacuggg

SEQ ID NO: 2326792 - RNA, 19 nt, Artificial Sequence
  Description of Artificial Sequence: Synthetic oligonucleotide
uacacggcucgcuuuaggg

SEQ ID NO: 2326793 - RNA, 19 nt, Artificial Sequence
  Description of Artificial Sequence: Synthetic oligonucleotide
uacaacauggcagggaucu

SEQ ID NO: 2326794 - RNA, 19 nt, Artificial Sequence
  Description of Artificial Sequence: Synthetic oligonucleotide
gagggguagacuuugacaa

SEQ ID NO: 2326795 - RNA, 19 nt, Artificial Sequence
  Description of Artificial Sequence: Synthetic oligonucleotide
ucugugaauuucacaaaac

SEQ ID NO: 2326796 - RNA, 19 nt, Artificial Sequence
  Description of Artificial Sequence: Synthetic oligonucleotide
aggcgcacagguuuagacc

SEQ ID NO: 2326797 - RNA, 19 nt, Artificial Sequence
  Description of Artificial Sequence: Synthetic oligonucleotide
aaacguuuugcaggugugg

SEQ ID NO: 2326798 - RNA, 19 nt, Artificial Sequence
  Description of Artificial Sequence: Synthetic oligonucleotide
ucggcuguggccaaaucug

SEQ ID NO: 2326799 - RNA, 19 nt, Artificial Sequence
  Description of Artificial Sequence: Synthetic oligonucleotide
uuagaccccaguccuacug

SEQ ID NO: 2326800 - RNA, 19 nt, Artificial Sequence
  Description of Artificial Sequence: Synthetic oligonucleotide
uucacucuguuccaugaac

SEQ ID NO: 2326801 - RNA, 19 nt, Artificial Sequence
  Description of Artificial Sequence: Synthetic oligonucleotide
auaauucaguuuaaaacgu

SEQ ID NO: 2326802 - RNA, 19 nt, Artificial Sequence
  Description of Artificial Sequence: Synthetic oligonucleotide
auuccagugaggcgguuuc

SEQ ID NO: 2326803 - RNA, 19 nt, Artificial Sequence
  Description of Artificial Sequence: Synthetic oligonucleotide
uugacgcucaucacggucu

SEQ ID NO: 2326804 - RNA, 19 nt, Artificial Sequence
  Description of Artificial Sequence: Synthetic oligonucleotide
ugguaauacugguuguagc

SEQ ID NO: 2326805 - RNA, 19 nt, Artificial Sequence
  Description of Artificial Sequence: Synthetic oligonucleotide
uggcaaaggcucuagagau

SEQ ID NO: 2326806 - RNA, 19 nt, Artificial Sequence
  Description of Artificial Sequence: Synthetic oligonucleotide
uauugucugguuguuuucc

SEQ ID NO: 2326807 - RNA, 19 nt, Artificial Sequence
  Description of Artificial Sequence: Synthetic oligonucleotide
acucaaccggcuuuacacg

SEQ ID NO: 2326808 - RNA, 19 nt, Artificial Sequence
  Description of Artificial Sequence: Synthetic oligonucleotide
aauucaguuuaaaacguuu

SEQ ID NO: 2326809 - RNA, 19 nt, Artificial Sequence
  Description of Artificial Sequence: Synthetic oligonucleotide
cucaaccggcuuuacacgg

SEQ ID NO: 2326810 - RNA, 19 nt, Artificial Sequence
  Description of Artificial Sequence: Synthetic oligonucleotide
uccaauucaucugugaauu

SEQ ID NO: 2326811 - RNA, 19 nt, Artificial Sequence
  Description of Artificial Sequence: Synthetic oligonucleotide
aucacggucucgcccaugg

SEQ ID NO: 2326812 - RNA, 19 nt, Artificial Sequence
  Description of Artificial Sequence: Synthetic oligonucleotide
auaguaguucugguacugc

SEQ ID NO: 2326813 - RNA, 19 nt, Artificial Sequence
  Description of Artificial Sequence: Synthetic oligonucleotide
agguuuagaccccaguccu

SEQ ID NO: 2326814 - RNA, 19 nt, Artificial Sequence
  Description of Artificial Sequence: Synthetic oligonucleotide
auggcagggaucucugagg

SEQ ID NO: 2326815 - RNA, 19 nt, Artificial Sequence
  Description of Artificial Sequence: Synthetic oligonucleotide
agaacucauacagcaugcc

SEQ ID NO: 2326816 - RNA, 19 nt, Artificial Sequence
  Description of Artificial Sequence: Synthetic oligonucleotide
uuccauaaguggcauaauu

SEQ ID NO: 2326817 - RNA, 19 nt, Artificial Sequence
  Description of Artificial Sequence: Synthetic oligonucleotide
guagacuuugacaaagaac

SEQ ID NO: 2326818 - RNA, 19 nt, Artificial Sequence
  Description of Artificial Sequence: Synthetic oligonucleotide
uuugacgcucaucacgguc

SEQ ID NO: 2326819 - RNA, 19 nt, Artificial Sequence
  Description of Artificial Sequence: Synthetic oligonucleotide
ggcauaguaguucugguac

SEQ ID NO: 2326820 - RNA, 19 nt, Artificial Sequence
  Description of Artificial Sequence: Synthetic oligonucleotide
gacaaagaacucauacagc

SEQ ID NO: 2326821 - RNA, 19 nt, Artificial Sequence
  Description of Artificial Sequence: Synthetic oligonucleotide
cuuagacacgccugucugg

SEQ ID NO: 2326822 - RNA, 19 nt, Artificial Sequence
  Description of Artificial Sequence: Synthetic oligonucleotide
accggcuuuacacggcucg

SEQ ID NO: 2326823 - RNA, 19 nt, Artificial Sequence
  Description of Artificial Sequence: Synthetic oligonucleotide
aucagagcgucauacaguu

SEQ ID NO: 2326824 - RNA, 19 nt, Artificial Sequence
  Description of Artificial Sequence: Synthetic oligonucleotide
ucuagagaugaaguucuca

SEQ ID NO: 2326825 - RNA, 19 nt, Artificial Sequence
  Description of Artificial Sequence: Synthetic oligonucleotide
cacgucuggggucaggucc

SEQ ID NO: 2326826 - RNA, 19 nt, Artificial Sequence
  Description of Artificial Sequence: Synthetic oligonucleotide
aaaacguuuugcaggugug

SEQ ID NO: 2326827 - RNA, 19 nt, Artificial Sequence
  Description of Artificial Sequence: Synthetic oligonucleotide
uccuuguuggccucaguca

SEQ ID NO: 2326828 - RNA, 19 nt, Artificial Sequence
  Description of Artificial Sequence: Synthetic oligonucleotide
agggcuauugucugguugu

SEQ ID NO: 2326829 - RNA, 19 nt, Artificial Sequence
  Description of Artificial Sequence: Synthetic oligonucleotide
gauaauuuugacgcucauc

SEQ ID NO: 2326830 - RNA, 19 nt, Artificial Sequence
  Description of Artificial Sequence: Synthetic oligonucleotide
auaaguggcauaauucagu

SEQ ID NO: 2326831 - RNA, 19 nt, Artificial Sequence
  Description of Artificial Sequence: Synthetic oligonucleotide
agagcaucauccccaaccu

SEQ ID NO: 2326832 - RNA, 19 nt, Artificial Sequence
  Description of Artificial Sequence: Synthetic oligonucleotide
uuacacggcucgcuuuagg

SEQ ID NO: 2326833 - RNA, 19 nt, Artificial Sequence
  Description of Artificial Sequence: Synthetic oligonucleotide
ucugguuguuuuccauaag

SEQ ID NO: 2326834 - RNA, 19 nt, Artificial Sequence
  Description of Artificial Sequence: Synthetic oligonucleotide
gaacucauacagcaugcca

SEQ ID NO: 2326835 - RNA, 19 nt, Artificial Sequence
  Description of Artificial Sequence: Synthetic oligonucleotide
uaauucaguuuaaaacguu

SEQ ID NO: 2326836 - RNA, 19 nt, Artificial Sequence
  Description of Artificial Sequence: Synthetic oligonucleotide
caucuggcuguacucaacc

SEQ ID NO: 2326837 - RNA, 19 nt, Artificial Sequence
  Description of Artificial Sequence: Synthetic oligonucleotide
caugccaucauccacgucu

SEQ ID NO: 2326838 - RNA, 19 nt, Artificial Sequence
  Description of Artificial Sequence: Synthetic oligonucleotide
aaaccaccuugccuccccg

SEQ ID NO: 2326839 - RNA, 19 nt, Artificial Sequence
  Description of Artificial Sequence: Synthetic oligonucleotide
aggagggguagacuuugac

SEQ ID NO: 2326840 - RNA, 19 nt, Artificial Sequence
  Description of Artificial Sequence: Synthetic oligonucleotide
agucacauccagcuguggu

SEQ ID NO: 2326841 - RNA, 19 nt, Artificial Sequence
  Description of Artificial Sequence: Synthetic oligonucleotide
gaucucugaggauacagua

SEQ ID NO: 2326842 - RNA, 19 nt, Artificial Sequence
  Description of Artificial Sequence: Synthetic oligonucleotide
cuuccagagcaucaucccc

SEQ ID NO: 2326843 - RNA, 19 nt, Artificial Sequence
  Description of Artificial Sequence: Synthetic oligonucleotide
ucugaggauacaguaucca

SEQ ID NO: 2326844 - RNA, 19 nt, Artificial Sequence
  Description of Artificial Sequence: Synthetic oligonucleotide
cuguaacuauacaucuggc

SEQ ID NO: 2326845 - RNA, 19 nt, Artificial Sequence
  Description of Artificial Sequence: Synthetic oligonucleotide
ucagucacauccagcugug

SEQ ID NO: 2326846 - RNA, 19 nt, Artificial Sequence
  Description of Artificial Sequence: Synthetic oligonucleotide
cauggcagggaucucugag

SEQ ID NO: 2326847 - RNA, 19 nt, Artificial Sequence
  Description of Artificial Sequence: Synthetic oligonucleotide
ugacaguccaucagagcgu

SEQ ID NO: 2326848 - RNA, 19 nt, Artificial Sequence
  Description of Artificial Sequence: Synthetic oligonucleotide
uacugguuguagcuguaac

SEQ ID NO: 2326849 - RNA, 19 nt, Artificial Sequence
  Description of Artificial Sequence: Synthetic oligonucleotide
agcgucauacaguucuuca

SEQ ID NO: 2326850 - RNA, 19 nt, Artificial Sequence
  Description of Artificial Sequence: Synthetic oligonucleotide
uggcacuccgucaaggcuc

SEQ ID NO: 2326851 - RNA, 19 nt, Artificial Sequence
  Description of Artificial Sequence: Synthetic oligonucleotide
ggcgcacagguuuagaccc

SEQ ID NO: 2326852 - RNA, 19 nt, Artificial Sequence
  Description of Artificial Sequence: Synthetic oligonucleotide
ucuggucguagccccacug

SEQ ID NO: 2326853 - RNA, 19 nt, Artificial Sequence
  Description of Artificial Sequence: Synthetic oligonucleotide
uuagacacgccugucuggu

SEQ ID NO: 2326854 - RNA, 19 nt, Artificial Sequence
  Description of Artificial Sequence: Synthetic oligonucleotide
gcugccuguguucuggucg

SEQ ID NO: 2326855 - RNA, 19 nt, Artificial Sequence
  Description of Artificial Sequence: Synthetic oligonucleotide
ucaaccggcuuuacacggc

SEQ ID NO: 2326856 - RNA, 19 nt, Artificial Sequence
  Description of Artificial Sequence: Synthetic oligonucleotide
cacaaagagggaauacuca

SEQ ID NO: 2326857 - RNA, 19 nt, Artificial Sequence
  Description of Artificial Sequence: Synthetic oligonucleotide
cucgcuuuagggauggcca

SEQ ID NO: 2326858 - RNA, 19 nt, Artificial Sequence
  Description of Artificial Sequence: Synthetic oligonucleotide
cugguaauacugguuguag

SEQ ID NO: 2326859 - RNA, 19 nt, Artificial Sequence
  Description of Artificial Sequence: Synthetic oligonucleotide
auugucugguuguuuucca

SEQ ID NO: 2326860 - RNA, 19 nt, Artificial Sequence
  Description of Artificial Sequence: Synthetic oligonucleotide
uuguagcuguaacuauaca

SEQ ID NO: 2326861 - RNA, 19 nt, Artificial Sequence
  Description of Artificial Sequence: Synthetic oligonucleotide
gucauacaguucuucacuc

SEQ ID NO: 2326862 - RNA, 19 nt, Artificial Sequence
  Description of Artificial Sequence: Synthetic oligonucleotide
cauaguaguucugguacug

SEQ ID NO: 2326863 - RNA, 19 nt, Artificial Sequence
  Description of Artificial Sequence: Synthetic oligonucleotide
cagugacaguccaucagag

SEQ ID NO: 2326864 - RNA, 19 nt, Artificial Sequence
  Description of Artificial Sequence: Synthetic oligonucleotide
aggggcuucccauuaauuu

SEQ ID NO: 2326865 - RNA, 19 nt, Artificial Sequence
  Description of Artificial Sequence: Synthetic oligonucleotide
uccgucaaggcucgcuucu

SEQ ID NO: 2326866 - RNA, 19 nt, Artificial Sequence
  Description of Artificial Sequence: Synthetic oligonucleotide
ucauccacgucugggguca

SEQ ID NO: 2326867 - RNA, 19 nt, Artificial Sequence
  Description of Artificial Sequence: Synthetic oligonucleotide
uucggauaauuuugacgcu

SEQ ID NO: 2326868 - RNA, 19 nt, Artificial Sequence
  Description of Artificial Sequence: Synthetic oligonucleotide
gguuccaggucucccaucc

SEQ ID NO: 2326869 - RNA, 19 nt, Artificial Sequence
  Description of Artificial Sequence: Synthetic oligonucleotide
uguggccaaaucugcaaau

SEQ ID NO: 2326870 - RNA, 19 nt, Artificial Sequence
  Description of Artificial Sequence: Synthetic oligonucleotide
acucagggcuauugucugg

SEQ ID NO: 2326871 - RNA, 19 nt, Artificial Sequence
  Description of Artificial Sequence: Synthetic oligonucleotide
cuggucguagccccacugg

SEQ ID NO: 2326872 - RNA, 19 nt, Artificial Sequence
  Description of Artificial Sequence: Synthetic oligonucleotide
ggcauaauucaguuuaaaa

SEQ ID NO: 2326873 - RNA, 19 nt, Artificial Sequence
  Description of Artificial Sequence: Synthetic oligonucleotide
guuuagaccccaguccuac

SEQ ID NO: 2326874 - RNA, 19 nt, Artificial Sequence
  Description of Artificial Sequence: Synthetic oligonucleotide
gaccgugcgggccuguggc

SEQ ID NO: 2326875 - RNA, 19 nt, Artificial Sequence
  Description of Artificial Sequence: Synthetic oligonucleotide
guacugcugguaauacugg

SEQ ID NO: 2326876 - RNA, 19 nt, Artificial Sequence
  Description of Artificial Sequence: Synthetic oligonucleotide
cuauugucugguuguuuuc

SEQ ID NO: 2326877 - RNA, 19 nt, Artificial Sequence
  Description of Artificial Sequence: Synthetic oligonucleotide
agacuuugacaaagaacuc

SEQ ID NO: 2326878 - RNA, 19 nt, Artificial Sequence
  Description of Artificial Sequence: Synthetic oligonucleotide
acggucucgcccauggugg

SEQ ID NO: 2326879 - RNA, 19 nt, Artificial Sequence
  Description of Artificial Sequence: Synthetic oligonucleotide
uccaggggcugccagugac

SEQ ID NO: 2326880 - RNA, 19 nt, Artificial Sequence
  Description of Artificial Sequence: Synthetic oligonucleotide
ugcauggugcucugugugu

SEQ ID NO: 2326881 - RNA, 19 nt, Artificial Sequence
  Description of Artificial Sequence: Synthetic oligonucleotide
agugaggcgguuucggaua

SEQ ID NO: 2326882 - RNA, 19 nt, Artificial Sequence
  Description of Artificial Sequence: Synthetic oligonucleotide
gauacaguauccaggggcu

SEQ ID NO: 2326883 - RNA, 19 nt, Artificial Sequence
  Description of Artificial Sequence: Synthetic oligonucleotide
ucucauccauguaggguuc

SEQ ID NO: 2326884 - RNA, 19 nt, Artificial Sequence
  Description of Artificial Sequence: Synthetic oligonucleotide
ugguacugcugguaauacu

SEQ ID NO: 2326885 - RNA, 19 nt, Artificial Sequence
  Description of Artificial Sequence: Synthetic oligonucleotide
aaguggcauaauucaguuu

SEQ ID NO: 2326886 - RNA, 19 nt, Artificial Sequence
  Description of Artificial Sequence: Synthetic oligonucleotide
cuagagaugaaguucucau

SEQ ID NO: 2326887 - RNA, 19 nt, Artificial Sequence
  Description of Artificial Sequence: Synthetic oligonucleotide
caggcgcacagguuuagac

SEQ ID NO: 2326888 - RNA, 19 nt, Artificial Sequence
  Description of Artificial Sequence: Synthetic oligonucleotide
auucaguuuaaaacguuuu

SEQ ID NO: 2326889 - RNA, 19 nt, Artificial Sequence
  Description of Artificial Sequence: Synthetic oligonucleotide
cugcauggugcucugugug

SEQ ID NO: 2326890 - RNA, 19 nt, Artificial Sequence
  Description of Artificial Sequence: Synthetic oligonucleotide
cacggucucgcccauggug

SEQ ID NO: 2326891 - RNA, 19 nt, Artificial Sequence
  Description of Artificial Sequence: Synthetic oligonucleotide
cugucugguccaaaaccac

SEQ ID NO: 2326892 - RNA, 19 nt, Artificial Sequence
  Description of Artificial Sequence: Synthetic oligonucleotide
ugccuccccggcaggaggg

SEQ ID NO: 2326893 - RNA, 19 nt, Artificial Sequence
  Description of Artificial Sequence: Synthetic oligonucleotide
acguuuugcagguguggcu

SEQ ID NO: 2326894 - RNA, 19 nt, Artificial Sequence
  Description of Artificial Sequence: Synthetic oligonucleotide
gaauacucagggcuauugu

SEQ ID NO: 2326895 - RNA, 19 nt, Artificial Sequence
  Description of Artificial Sequence: Synthetic oligonucleotide
ugguuguagcuguaacuau

SEQ ID NO: 2326896 - RNA, 19 nt, Artificial Sequence
  Description of Artificial Sequence: Synthetic oligonucleotide
caguccuacugcucccugg

SEQ ID NO: 2326897 - RNA, 19 nt, Artificial Sequence
  Description of Artificial Sequence: Synthetic oligonucleotide
cauuucucggcuguggcca

SEQ ID NO: 2326898 - RNA, 19 nt, Artificial Sequence
  Description of Artificial Sequence: Synthetic oligonucleotide
uuaaaacguuuugcaggug

SEQ ID NO: 2326899 - RNA, 19 nt, Artificial Sequence
  Description of Artificial Sequence: Synthetic oligonucleotide
cauccagcuguggugcugg

SEQ ID NO: 2326900 - RNA, 19 nt, Artificial Sequence
  Description of Artificial Sequence: Synthetic oligonucleotide
cagggcuauugucugguug

SEQ ID NO: 2326901 - RNA, 19 nt, Artificial Sequence
  Description of Artificial Sequence: Synthetic oligonucleotide
aacuauacaucuggcugua

SEQ ID NO: 2326902 - RNA, 19 nt, Artificial Sequence
  Description of Artificial Sequence: Synthetic oligonucleotide
gucugguuguuuuccauaa

SEQ ID NO: 2326903 - RNA, 19 nt, Artificial Sequence
  Description of Artificial Sequence: Synthetic oligonucleotide
acacggcucgcuuuaggga

SEQ ID NO: 2326904 - RNA, 19 nt, Artificial Sequence
  Description of Artificial Sequence: Synthetic oligonucleotide
uuuacacggcucgcuuuag

SEQ ID NO: 2326905 - RNA, 19 nt, Artificial Sequence
  Description of Artificial Sequence: Synthetic oligonucleotide
gggguagacuuugacaaag

SEQ ID NO: 2326906 - RNA, 19 nt, Artificial Sequence
  Description of Artificial Sequence: Synthetic oligonucleotide
cauggugcucuguguguag

SEQ ID NO: 2326907 - RNA, 19 nt, Artificial Sequence
  Description of Artificial Sequence: Synthetic oligonucleotide
uguggugcugggucuucca

SEQ ID NO: 2326908 - RNA, 19 nt, Artificial Sequence
  Description of Artificial Sequence: Synthetic oligonucleotide
ucgcuuuagggauggccac

SEQ ID NO: 2326909 - RNA, 19 nt, Artificial Sequence
  Description of Artificial Sequence: Synthetic oligonucleotide
gucguagccccacugggca

SEQ ID NO: 2326910 - RNA, 19 nt, Artificial Sequence
  Description of Artificial Sequence: Synthetic oligonucleotide
uuuagaccccaguccuacu

SEQ ID NO: 2326911 - RNA, 19 nt, Artificial Sequence
  Description of Artificial Sequence: Synthetic oligonucleotide
acgucuggggucagguccc

SEQ ID NO: 2326912 - RNA, 19 nt, Artificial Sequence
  Description of Artificial Sequence: Synthetic oligonucleotide
uguaggguuccaggucucc

SEQ ID NO: 2326913 - RNA, 19 nt, Artificial Sequence
  Description of Artificial Sequence: Synthetic oligonucleotide
cuauacaucuggcuguacu

SEQ ID NO: 2326914 - RNA, 19 nt, Artificial Sequence
  Description of Artificial Sequence: Synthetic oligonucleotide
cucagucacauccagcugu

SEQ ID NO: 2326915 - RNA, 19 nt, Artificial Sequence
  Description of Artificial Sequence: Synthetic oligonucleotide
cauguaggguuccaggucu

SEQ ID NO: 2326916 - RNA, 19 nt, Artificial Sequence
  Description of Artificial Sequence: Synthetic oligonucleotide
agcuguaacuauacaucug

SEQ ID NO: 2326917 - RNA, 19 nt, Artificial Sequence
  Description of Artificial Sequence: Synthetic oligonucleotide
acuauacaucuggcuguac

SEQ ID NO: 2326918 - RNA, 19 nt, Artificial Sequence
  Description of Artificial Sequence: Synthetic oligonucleotide
agcaugccaucauccacgu

SEQ ID NO: 2326919 - RNA, 19 nt, Artificial Sequence
  Description of Artificial Sequence: Synthetic oligonucleotide
ucugguccaaaaccaccuu

SEQ ID NO: 2326920 - RNA, 19 nt, Artificial Sequence
  Description of Artificial Sequence: Synthetic oligonucleotide
gguagacuuugacaaagaa

SEQ ID NO: 2326921 - RNA, 19 nt, Artificial Sequence
  Description of Artificial Sequence: Synthetic oligonucleotide
guucugguacugcugguaa

SEQ ID NO: 2326922 - RNA, 19 nt, Artificial Sequence
  Description of Artificial Sequence: Synthetic oligonucleotide
auaugucugcauggugcuc

SEQ ID NO: 2326923 - RNA, 19 nt, Artificial Sequence
  Description of Artificial Sequence: Synthetic oligonucleotide
gcgguuucggauaauuuug

SEQ ID NO: 2326924 - RNA, 19 nt, Artificial Sequence
  Description of Artificial Sequence: Synthetic oligonucleotide
accauagcccuuagacacg

SEQ ID NO: 2326925 - RNA, 19 nt, Artificial Sequence
  Description of Artificial Sequence: Synthetic oligonucleotide
uccacgucuggggucaggu

SEQ ID NO: 2326926 - RNA, 19 nt, Artificial Sequence
  Description of Artificial Sequence: Synthetic oligonucleotide
aggcucuagagaugaaguu

SEQ ID NO: 2326927 - RNA, 19 nt, Artificial Sequence
  Description of Artificial Sequence: Synthetic oligonucleotide
cugguuguagcuguaacua

SEQ ID NO: 2326928 - RNA, 19 nt, Artificial Sequence
  Description of Artificial Sequence: Synthetic oligonucleotide
gguccaaaaccaccuugcc

SEQ ID NO: 2326929 - RNA, 19 nt, Artificial Sequence
  Description of Artificial Sequence: Synthetic oligonucleotide
aaggcucgcuucuguucca

SEQ ID NO: 2326930 - RNA, 19 nt, Artificial Sequence
  Description of Artificial Sequence: Synthetic oligonucleotide
cuguuccaauucaucugug

SEQ ID NO: 2326931 - RNA, 19 nt, Artificial Sequence
  Description of Artificial Sequence: Synthetic oligonucleotide
ggugcucuguguguagccg

SEQ ID NO: 2326932 - RNA, 19 nt, Artificial Sequence
  Description of Artificial Sequence: Synthetic oligonucleotide
gccaucauccacgucuggg

SEQ ID NO: 2326933 - RNA, 19 nt, Artificial Sequence
  Description of Artificial Sequence: Synthetic oligonucleotide
caggucucccauccacagg

SEQ ID NO: 2326934 - RNA, 19 nt, Artificial Sequence
  Description of Artificial Sequence: Synthetic oligonucleotide
aucucugaggauacaguau

SEQ ID NO: 2326935 - RNA, 19 nt, Artificial Sequence
  Description of Artificial Sequence: Synthetic oligonucleotide
cuuuacacggcucgcuuua

SEQ ID NO: 2326936 - RNA, 19 nt, Artificial Sequence
  Description of Artificial Sequence: Synthetic oligonucleotide
acuccgucaaggcucgcuu

SEQ ID NO: 2326937 - RNA, 19 nt, Artificial Sequence
  Description of Artificial Sequence: Synthetic oligonucleotide
uaguucugguacugcuggu

SEQ ID NO: 2326938 - RNA, 19 nt, Artificial Sequence
  Description of Artificial Sequence: Synthetic oligonucleotide
ccuuagacacgccugucug

SEQ ID NO: 2326939 - RNA, 19 nt, Artificial Sequence
  Description of Artificial Sequence: Synthetic oligonucleotide
cauaugucugcauggugcu

SEQ ID NO: 2326940 - RNA, 19 nt, Artificial Sequence
  Description of Artificial Sequence: Synthetic oligonucleotide
ugcucccuggcacuccguc

SEQ ID NO: 2326941 - RNA, 19 nt, Artificial Sequence
  Description of Artificial Sequence: Synthetic oligonucleotide
caccuugccuccccggcag

SEQ ID NO: 2326942 - RNA, 19 nt, Artificial Sequence
  Description of Artificial Sequence: Synthetic oligonucleotide
agccccacugggcauagua

SEQ ID NO: 2326943 - RNA, 19 nt, Artificial Sequence
  Description of Artificial Sequence: Synthetic oligonucleotide
ugacgcucaucacggucuc

SEQ ID NO: 2326944 - RNA, 19 nt, Artificial Sequence
  Description of Artificial Sequence: Synthetic oligonucleotide
uggcuacaacauggcaggg

SEQ ID NO: 2326945 - RNA, 19 nt, Artificial Sequence
  Description of Artificial Sequence: Synthetic oligonucleotide
uguacucaaccggcuuuac

SEQ ID NO: 2326946 - RNA, 19 nt, Artificial Sequence
  Description of Artificial Sequence: Synthetic oligonucleotide
aguucugguacugcuggua

SEQ ID NO: 2326947 - RNA, 19 nt, Artificial Sequence
  Description of Artificial Sequence: Synthetic oligonucleotide
uuuccauaaguggcauaau

SEQ ID NO: 2326948 - RNA, 19 nt, Artificial Sequence
  Description of Artificial Sequence: Synthetic oligonucleotide
guccaaaaccaccuugccu

SEQ ID NO: 2326949 - RNA, 19 nt, Artificial Sequence
  Description of Artificial Sequence: Synthetic oligonucleotide
agggguagacuuugacaaa

SEQ ID NO: 2326950 - RNA, 19 nt, Artificial Sequence
  Description of Artificial Sequence: Synthetic oligonucleotide
aguagccagcugggauucc

SEQ ID NO: 2326951 - RNA, 19 nt, Artificial Sequence
  Description of Artificial Sequence: Synthetic oligonucleotide
caucagagcgucauacagu

SEQ ID NO: 2326952 - RNA, 19 nt, Artificial Sequence
  Description of Artificial Sequence: Synthetic oligonucleotide
aaccggcuuuacacggcuc

SEQ ID NO: 2326953 - RNA, 19 nt, Artificial Sequence
  Description of Artificial Sequence: Synthetic oligonucleotide
acaacauggcagggaucuc

SEQ ID NO: 2326954 - RNA, 19 nt, Artificial Sequence
  Description of Artificial Sequence: Synthetic oligonucleotide
gagggaauacucagggcua

SEQ ID NO: 2326955 - RNA, 19 nt, Artificial Sequence
  Description of Artificial Sequence: Synthetic oligonucleotide
cauagcccuuagacacgcc

SEQ ID NO: 2326956 - RNA, 19 nt, Artificial Sequence
  Description of Artificial Sequence: Synthetic oligonucleotide
uucuggucguagccccacu

SEQ ID NO: 2326957 - RNA, 19 nt, Artificial Sequence
  Description of Artificial Sequence: Synthetic oligonucleotide
aaggggcuucccauuaauu

SEQ ID NO: 2326958 - RNA, 19 nt, Artificial Sequence
  Description of Artificial Sequence: Synthetic oligonucleotide
caaaaccaccuugccuccc

SEQ ID NO: 2326959 - RNA, 19 nt, Artificial Sequence
  Description of Artificial Sequence: Synthetic oligonucleotide
accgugcgggccuguggcg

SEQ ID NO: 2326960 - RNA, 19 nt, Artificial Sequence
  Description of Artificial Sequence: Synthetic oligonucleotide
ccuguguucuggucguagc

SEQ ID NO: 2326961 - RNA, 19 nt, Artificial Sequence
  Description of Artificial Sequence: Synthetic oligonucleotide
aggguuccaggucucccau

SEQ ID NO: 2326962 - RNA, 19 nt, Artificial Sequence
  Description of Artificial Sequence: Synthetic oligonucleotide
augccaucauccacgucug

SEQ ID NO: 2326963 - RNA, 19 nt, Artificial Sequence
  Description of Artificial Sequence: Synthetic oligonucleotide
gccacacucaggcgcacag

SEQ ID NO: 2326964 - RNA, 19 nt, Artificial Sequence
  Description of Artificial Sequence: Synthetic oligonucleotide
cccauccacaggcuggccg

SEQ ID NO: 2326965 - RNA, 19 nt, Artificial Sequence
  Description of Artificial Sequence: Synthetic oligonucleotide
ucaggcgcacagguuuaga

SEQ ID NO: 2326966 - RNA, 19 nt, Artificial Sequence
  Description of Artificial Sequence: Synthetic oligonucleotide
cuccgucaaggcucgcuuc

SEQ ID NO: 2326967 - RNA, 19 nt, Artificial Sequence
  Description of Artificial Sequence: Synthetic oligonucleotide
auguaggguuccaggucuc

SEQ ID NO: 2326968 - RNA, 19 nt, Artificial Sequence
  Description of Artificial Sequence: Synthetic oligonucleotide
gcucgcuuuagggauggcc

SEQ ID NO: 2326969 - RNA, 19 nt, Artificial Sequence
  Description of Artificial Sequence: Synthetic oligonucleotide
gcaaacauuucucggcugu

SEQ ID NO: 2326970 - RNA, 19 nt, Artificial Sequence
  Description of Artificial Sequence: Synthetic oligonucleotide
caguagccagcugggauuc

SEQ ID NO: 2326971 - RNA, 19 nt, Artificial Sequence
  Description of Artificial Sequence: Synthetic oligonucleotide
agggaauacucagggcuau

SEQ ID NO: 2326972 - RNA, 19 nt, Artificial Sequence
  Description of Artificial Sequence: Synthetic oligonucleotide
cacacucaggcgcacaggu

SEQ ID NO: 2326973 - RNA, 19 nt, Artificial Sequence
  Description of Artificial Sequence: Synthetic oligonucleotide
cuguggccaaaucugcaaa

SEQ ID NO: 2326974 - RNA, 19 nt, Artificial Sequence
  Description of Artificial Sequence: Synthetic oligonucleotide
gcuauugucugguuguuuu

SEQ ID NO: 2326975 - RNA, 19 nt, Artificial Sequence
  Description of Artificial Sequence: Synthetic oligonucleotide
gucugguccaaaaccaccu

SEQ ID NO: 2326976 - RNA, 19 nt, Artificial Sequence
  Description of Artificial Sequence: Synthetic oligonucleotide
ucucggcuguggccaaauc

SEQ ID NO: 2326977 - RNA, 19 nt, Artificial Sequence
  Description of Artificial Sequence: Synthetic oligonucleotide
ccauguaggguuccagguc

SEQ ID NO: 2326978 - RNA, 19 nt, Artificial Sequence
  Description of Artificial Sequence: Synthetic oligonucleotide
ggcacuccgucaaggcucg

SEQ ID NO: 2326979 - RNA, 19 nt, Artificial Sequence
  Description of Artificial Sequence: Synthetic oligonucleotide
cuucacucuguuccaugaa

SEQ ID NO: 2326980 - RNA, 19 nt, Artificial Sequence
  Description of Artificial Sequence: Synthetic oligonucleotide
uccccggcaggagggguag

SEQ ID NO: 2326981 - RNA, 19 nt, Artificial Sequence
  Description of Artificial Sequence: Synthetic oligonucleotide
accuugccuccccggcagg

SEQ ID NO: 2326982 - RNA, 19 nt, Artificial Sequence
  Description of Artificial Sequence: Synthetic oligonucleotide
caucccgcauccgggcggg

SEQ ID NO: 2326983 - RNA, 19 nt, Artificial Sequence
  Description of Artificial Sequence: Synthetic oligonucleotide
uagacacgccugucugguc

SEQ ID NO: 2326984 - RNA, 19 nt, Artificial Sequence
  Description of Artificial Sequence: Synthetic oligonucleotide
ucaucacggucucgcccau

SEQ ID NO: 2326985 - RNA, 19 nt, Artificial Sequence
  Description of Artificial Sequence: Synthetic oligonucleotide
gcuguggccaaaucugcaa

SEQ ID NO: 2326986 - RNA, 19 nt, Artificial Sequence
  Description of Artificial Sequence: Synthetic oligonucleotide
gcagggaucucugaggaua

SEQ ID NO: 2326987 - RNA, 19 nt, Artificial Sequence
  Description of Artificial Sequence: Synthetic oligonucleotide
cacugggcauaguaguucu

SEQ ID NO: 2326988 - RNA, 19 nt, Artificial Sequence
  Description of Artificial Sequence: Synthetic oligonucleotide
ggcgguuucggauaauuuu

SEQ ID NO: 2326989 - RNA, 19 nt, Artificial Sequence
  Description of Artificial Sequence: Synthetic oligonucleotide
ggucguagccccacugggc

SEQ ID NO: 2326990 - RNA, 19 nt, Artificial Sequence
  Description of Artificial Sequence: Synthetic oligonucleotide
ccauagcccuuagacacgc

SEQ ID NO: 2326991 - RNA, 19 nt, Artificial Sequence
  Description of Artificial Sequence: Synthetic oligonucleotide
cucaggcgcacagguuuag

SEQ ID NO: 2326992 - RNA, 19 nt, Artificial Sequence
  Description of Artificial Sequence: Synthetic oligonucleotide
cagucacauccagcugugg

SEQ ID NO: 2326993 - RNA, 19 nt, Artificial Sequence
  Description of Artificial Sequence: Synthetic oligonucleotide
ggaccgugcgggccugugg

SEQ ID NO: 2326994 - RNA, 19 nt, Artificial Sequence
  Description of Artificial Sequence: Synthetic oligonucleotide
ucagggcuauugucugguu

SEQ ID NO: 2326995 - RNA, 19 nt, Artificial Sequence
  Description of Artificial Sequence: Synthetic oligonucleotide
gggcauaguaguucuggua

SEQ ID NO: 2326996 - RNA, 19 nt, Artificial Sequence
  Description of Artificial Sequence: Synthetic oligonucleotide
cacggcucgcuuuagggau

SEQ ID NO: 2326997 - RNA, 19 nt, Artificial Sequence
  Description of Artificial Sequence: Synthetic oligonucleotide
guauccaggggcugccagu

SEQ ID NO: 2326998 - RNA, 19 nt, Artificial Sequence
  Description of Artificial Sequence: Synthetic oligonucleotide
caacauggcagggaucucu

SEQ ID NO: 2326999 - RNA, 19 nt, Artificial Sequence
  Description of Artificial Sequence: Synthetic oligonucleotide
ucguagccccacugggcau

SEQ ID NO: 2327000 - RNA, 19 nt, Artificial Sequence
  Description of Artificial Sequence: Synthetic oligonucleotide
gccaucccgcauccgggcg

SEQ ID NO: 2327001 - RNA, 19 nt, Artificial Sequence
  Description of Artificial Sequence: Synthetic oligonucleotide
gugaggcgguuucggauaa

SEQ ID NO: 2327002 - RNA, 19 nt, Artificial Sequence
  Description of Artificial Sequence: Synthetic oligonucleotide
guggcauaauucaguuuaa

SEQ ID NO: 2327003 - RNA, 19 nt, Artificial Sequence
  Description of Artificial Sequence: Synthetic oligonucleotide
guagccccacugggcauag

SEQ ID NO: 2327004 - RNA, 19 nt, Artificial Sequence
  Description of Artificial Sequence: Synthetic oligonucleotide
cguuuugcagguguggcuc

SEQ ID NO: 2327005 - RNA, 19 nt, Artificial Sequence
  Description of Artificial Sequence: Synthetic oligonucleotide
cccaaccucuucauauguc

SEQ ID NO: 2327006 - RNA, 19 nt, Artificial Sequence
  Description of Artificial Sequence: Synthetic oligonucleotide
gggguagcuguagcuguag

SEQ ID NO: 2327007 - RNA, 19 nt, Artificial Sequence
  Description of Artificial Sequence: Synthetic oligonucleotide
ccaucccgcauccgggcgg

SEQ ID NO: 2327008 - RNA, 19 nt, Artificial Sequence
  Description of Artificial Sequence: Synthetic oligonucleotide
cucgcccaugguggcaaag

SEQ ID NO: 2327009 - RNA, 19 nt, Artificial Sequence
  Description of Artificial Sequence: Synthetic oligonucleotide
cuacugcucccuggcacuc

SEQ ID NO: 2327010 - RNA, 19 nt, Artificial Sequence
  Description of Artificial Sequence: Synthetic oligonucleotide
ucccgcauccgggcgggga

SEQ ID NO: 2327011 - RNA, 19 nt, Artificial Sequence
  Description of Artificial Sequence: Synthetic oligonucleotide
gccuguguucuggucguag

SEQ ID NO: 2327012 - RNA, 19 nt, Artificial Sequence
  Description of Artificial Sequence: Synthetic oligonucleotide
ccgccaucccgcauccggg

SEQ ID NO: 2327013 - RNA, 19 nt, Artificial Sequence
  Description of Artificial Sequence: Synthetic oligonucleotide
gauuccagugaggcgguuu

SEQ ID NO: 2327014 - RNA, 19 nt, Artificial Sequence
  Description of Artificial Sequence: Synthetic oligonucleotide
gccccacugggcauaguag

SEQ ID NO: 2327015 - RNA, 19 nt, Artificial Sequence
  Description of Artificial Sequence: Synthetic oligonucleotide
cuguacucaaccggcuuua

SEQ ID NO: 2327016 - RNA, 19 nt, Artificial Sequence
  Description of Artificial Sequence: Synthetic oligonucleotide
guccuacugcucccuggca

SEQ ID NO: 2327017 - RNA, 19 nt, Artificial Sequence
  Description of Artificial Sequence: Synthetic oligonucleotide
cauccgggcggggaccgug

SEQ ID NO: 2327018 - RNA, 19 nt, Artificial Sequence
  Description of Artificial Sequence: Synthetic oligonucleotide
acggcucgcuuuagggaug

SEQ ID NO: 2327019 - RNA, 19 nt, Artificial Sequence
  Description of Artificial Sequence: Synthetic oligonucleotide
aggcgguuucggauaauuu

SEQ ID NO: 2327020 - RNA, 19 nt, Artificial Sequence
  Description of Artificial Sequence: Synthetic oligonucleotide
cagugaggcgguuucggau

SEQ ID NO: 2327021 - RNA, 19 nt, Artificial Sequence
  Description of Artificial Sequence: Synthetic oligonucleotide
caaaggcucuagagaugaa

SEQ ID NO: 2327022 - RNA, 19 nt, Artificial Sequence
  Description of Artificial Sequence: Synthetic oligonucleotide
ucccauccacaggcuggcc

SEQ ID NO: 2327023 - RNA, 19 nt, Artificial Sequence
  Description of Artificial Sequence: Synthetic oligonucleotide
gaggcgguuucggauaauu

SEQ ID NO: 2327024 - RNA, 19 nt, Artificial Sequence
  Description of Artificial Sequence: Synthetic oligonucleotide
gggcuucccauuaauuuua

SEQ ID NO: 2327025 - RNA, 19 nt, Artificial Sequence
  Description of Artificial Sequence: Synthetic oligonucleotide
caaccggcuuuacacggcu

SEQ ID NO: 2327026 - RNA, 19 nt, Artificial Sequence
  Description of Artificial Sequence: Synthetic oligonucleotide
gucucgcccaugguggcaa

SEQ ID NO: 2327027 - RNA, 19 nt, Artificial Sequence
  Description of Artificial Sequence: Synthetic oligonucleotide
caggagggguagacuuuga

SEQ ID NO: 2327028 - RNA, 19 nt, Artificial Sequence
  Description of Artificial Sequence: Synthetic oligonucleotide
gucaaggcucgcuucuguu

SEQ ID NO: 2327029 - RNA, 19 nt, Artificial Sequence
  Description of Artificial Sequence: Synthetic oligonucleotide
ucucgcccaugguggcaaa

SEQ ID NO: 2327030 - RNA, 19 nt, Artificial Sequence
  Description of Artificial Sequence: Synthetic oligonucleotide
gcaguagccagcugggauu

SEQ ID NO: 2327031 - RNA, 19 nt, Artificial Sequence
  Description of Artificial Sequence: Synthetic oligonucleotide
acucaggcgcacagguuua

SEQ ID NO: 2327032 - RNA, 19 nt, Artificial Sequence
  Description of Artificial Sequence: Synthetic oligonucleotide
caugguggcaaaggcucua

SEQ ID NO: 2327033 - RNA, 19 nt, Artificial Sequence
  Description of Artificial Sequence: Synthetic oligonucleotide
ggauaauuuugacgcucau

SEQ ID NO: 2327034 - RNA, 19 nt, Artificial Sequence
  Description of Artificial Sequence: Synthetic oligonucleotide
gcuguacucaaccggcuuu

SEQ ID NO: 2327035 - RNA, 19 nt, Artificial Sequence
  Description of Artificial Sequence: Synthetic oligonucleotide
caucacggucucgcccaug

SEQ ID NO: 2327036 - RNA, 19 nt, Artificial Sequence
  Description of Artificial Sequence: Synthetic oligonucleotide
ugaggcgguuucggauaau

SEQ ID NO: 2327037 - RNA, 19 nt, Artificial Sequence
  Description of Artificial Sequence: Synthetic oligonucleotide
ccagugaggcgguuucgga

SEQ ID NO: 2327038 - RNA, 19 nt, Artificial Sequence
  Description of Artificial Sequence: Synthetic oligonucleotide
aggcucgcuucuguuccaa

SEQ ID NO: 2327039 - RNA, 19 nt, Artificial Sequence
  Description of Artificial Sequence: Synthetic oligonucleotide
cuuuagggauggccacacu

SEQ ID NO: 2327040 - RNA, 19 nt, Artificial Sequence
  Description of Artificial Sequence: Synthetic oligonucleotide
gguuuagaccccaguccua

SEQ ID NO: 2327041 - RNA, 19 nt, Artificial Sequence
  Description of Artificial Sequence: Synthetic oligonucleotide
ccggcuuuacacggcucgc

SEQ ID NO: 2327042 - RNA, 19 nt, Artificial Sequence
  Description of Artificial Sequence: Synthetic oligonucleotide
ggcuuuacacggcucgcuu

SEQ ID NO: 2327043 - RNA, 19 nt, Artificial Sequence
  Description of Artificial Sequence: Synthetic oligonucleotide
cccgcauccgggcggggac

SEQ ID NO: 2327044 - RNA, 19 nt, Artificial Sequence
  Description of Artificial Sequence: Synthetic oligonucleotide
ccuacugcucccuggcacu

SEQ ID NO: 2327045 - RNA, 19 nt, Artificial Sequence
  Description of Artificial Sequence: Synthetic oligonucleotide
gcuuuacacggcucgcuuu

SEQ ID NO: 2327046 - RNA, 19 nt, Artificial Sequence
  Description of Artificial Sequence: Synthetic oligonucleotide
cauccacgucuggggucag

SEQ ID NO: 2327047 - RNA, 19 nt, Artificial Sequence
  Description of Artificial Sequence: Synthetic oligonucleotide
ggcggggaccgugcgggcc

SEQ ID NO: 2327048 - RNA, 19 nt, Artificial Sequence
  Description of Artificial Sequence: Synthetic oligonucleotide
ccccacugggcauaguagu

SEQ ID NO: 2327049 - RNA, 19 nt, Artificial Sequence
  Description of Artificial Sequence: Synthetic oligonucleotide
cgccugucugguccaaaac

SEQ ID NO: 2327050 - RNA, 19 nt, Artificial Sequence
  Description of Artificial Sequence: Synthetic oligonucleotide
ccacgucuggggucagguc

SEQ ID NO: 2327051 - RNA, 19 nt, Artificial Sequence
  Description of Artificial Sequence: Synthetic oligonucleotide
cacuccgucaaggcucgcu

SEQ ID NO: 2327052 - RNA, 19 nt, Artificial Sequence
  Description of Artificial Sequence: Synthetic oligonucleotide
cgccaucccgcauccgggc

SEQ ID NO: 2327053 - RNA, 19 nt, Artificial Sequence
  Description of Artificial Sequence: Synthetic oligonucleotide
cccuuagacacgccugucu

SEQ ID NO: 2327054 - RNA, 19 nt, Artificial Sequence
  Description of Artificial Sequence: Synthetic oligonucleotide
ccgugcgggccuguggcgc

SEQ ID NO: 2327055 - RNA, 19 nt, Artificial Sequence
  Description of Artificial Sequence: Synthetic oligonucleotide
ggucucgcccaugguggca

SEQ ID NO: 2327056 - RNA, 19 nt, Artificial Sequence
  Description of Artificial Sequence: Synthetic oligonucleotide
aucccgcauccgggcgggg

SEQ ID NO: 2327057 - RNA, 19 nt, Artificial Sequence
  Description of Artificial Sequence: Synthetic oligonucleotide
ccaccuugccuccccggca

SEQ ID NO: 2327058 - RNA, 19 nt, Artificial Sequence
  Description of Artificial Sequence: Synthetic oligonucleotide
gugcgggccuguggcgcgc

SEQ ID NO: 2327059 - RNA, 19 nt, Artificial Sequence
  Description of Artificial Sequence: Synthetic oligonucleotide
acacgccugucugguccaa

SEQ ID NO: 2327060 - RNA, 19 nt, Artificial Sequence
  Description of Artificial Sequence: Synthetic oligonucleotide
cggcucgcuuuagggaugg

SEQ ID NO: 2327061 - RNA, 19 nt, Artificial Sequence
  Description of Artificial Sequence: Synthetic oligonucleotide
cggucucgcccaugguggc

SEQ ID NO: 2327062 - RNA, 19 nt, Artificial Sequence
  Description of Artificial Sequence: Synthetic oligonucleotide
ccgggcggggaccgugcgg

SEQ ID NO: 2327063 - RNA, 19 nt, Artificial Sequence
  Description of Artificial Sequence: Synthetic oligonucleotide
ccgucaaggcucgcuucug

SEQ ID NO: 2327064 - RNA, 19 nt, Artificial Sequence
  Description of Artificial Sequence: Synthetic oligonucleotide
gggaccgugcgggccugug

SEQ ID NO: 2327065 - RNA, 19 nt, Artificial Sequence
  Description of Artificial Sequence: Synthetic oligonucleotide
ccccaaccucuucauaugu

SEQ ID NO: 2327066 - RNA, 19 nt, Artificial Sequence
  Description of Artificial Sequence: Synthetic oligonucleotide
ccaauucaucugugaauuu

SEQ ID NO: 2327067 - RNA, 19 nt, Artificial Sequence
  Description of Artificial Sequence: Synthetic oligonucleotide
cacgccugucugguccaaa

SEQ ID NO: 2327068 - RNA, 19 nt, Artificial Sequence
  Description of Artificial Sequence: Synthetic oligonucleotide
cgcauccgggcggggaccg

SEQ ID NO: 2327069 - RNA, 19 nt, Artificial Sequence
  Description of Artificial Sequence: Synthetic oligonucleotide
gggauuccagugaggcggu

SEQ ID NO: 2327070 - RNA, 19 nt, Artificial Sequence
  Description of Artificial Sequence: Synthetic oligonucleotide
ggcuggccgccaucccgca

SEQ ID NO: 2327071 - RNA, 19 nt, Artificial Sequence
  Description of Artificial Sequence: Synthetic oligonucleotide
gggcggggaccgugcgggc

SEQ ID NO: 2327072 - RNA, 19 nt, Artificial Sequence
  Description of Artificial Sequence: Synthetic oligonucleotide
ccgcauccgggcggggacc

SEQ ID NO: 2327073 - RNA, 19 nt, Artificial Sequence
  Description of Artificial Sequence: Synthetic oligonucleotide
ggcuucccauuaauuuuau

SEQ ID NO: 2327074 - RNA, 19 nt, Artificial Sequence
  Description of Artificial Sequence: Synthetic oligonucleotide
cgcuuuagggauggccaca

SEQ ID NO: 2327075 - RNA, 19 nt, Artificial Sequence
  Description of Artificial Sequence: Synthetic oligonucleotide
gcggggaccgugcgggccu

SEQ ID NO: 2327076 - RNA, 19 nt, Artificial Sequence
  Description of Artificial Sequence: Synthetic oligonucleotide
ggcucgcuuuagggauggc

SEQ ID NO: 2327077 - RNA, 19 nt, Artificial Sequence
  Description of Artificial Sequence: Synthetic oligonucleotide
ccucuucauaugucugcau

SEQ ID NO: 2327078 - RNA, 19 nt, Artificial Sequence
  Description of Artificial Sequence: Synthetic oligonucleotide
cgcacagguuuagacccca

SEQ ID NO: 2327079 - RNA, 19 nt, Artificial Sequence
  Description of Artificial Sequence: Synthetic oligonucleotide
ccuugccuccccggcagga

SEQ ID NO: 2327080 - RNA, 19 nt, Artificial Sequence
  Description of Artificial Sequence: Synthetic oligonucleotide
ggcucgcuucuguuccaau

SEQ ID NO: 2327081 - RNA, 19 nt, Artificial Sequence
  Description of Artificial Sequence: Synthetic oligonucleotide
gggaauacucagggcuauu

SEQ ID NO: 2327082 - RNA, 19 nt, Artificial Sequence
  Description of Artificial Sequence: Synthetic oligonucleotide
cgucaaggcucgcuucugu

SEQ ID NO: 2327083 - RNA, 19 nt, Artificial Sequence
  Description of Artificial Sequence: Synthetic oligonucleotide
gcugggucuuccagagcau

SEQ ID NO: 2327084 - RNA, 19 nt, Artificial Sequence
  Description of Artificial Sequence: Synthetic oligonucleotide
cguagccccacugggcaua

SEQ ID NO: 2327085 - RNA, 19 nt, Artificial Sequence
  Description of Artificial Sequence: Synthetic oligonucleotide
gcacuccgucaaggcucgc

SEQ ID NO: 2327086 - RNA, 19 nt, Artificial Sequence
  Description of Artificial Sequence: Synthetic oligonucleotide
cccaguccuacugcucccu

SEQ ID NO: 2327087 - RNA, 19 nt, Artificial Sequence
  Description of Artificial Sequence: Synthetic oligonucleotide
ccggcaggagggguagacu

SEQ ID NO: 2327088 - RNA, 19 nt, Artificial Sequence
  Description of Artificial Sequence: Synthetic oligonucleotide
cggcuuuacacggcucgcu

SEQ ID NO: 2327089 - RNA, 19 nt, Artificial Sequence
  Description of Artificial Sequence: Synthetic oligonucleotide
ggauuccagugaggcgguu

SEQ ID NO: 2327090 - RNA, 19 nt, Artificial Sequence
  Description of Artificial Sequence: Synthetic oligonucleotide
cggggaccgugcgggccug

SEQ ID NO: 2327091 - RNA, 19 nt, Artificial Sequence
  Description of Artificial Sequence: Synthetic oligonucleotide
gcauccgggcggggaccgu

SEQ ID NO: 2327092 - RNA, 19 nt, Artificial Sequence
  Description of Artificial Sequence: Synthetic oligonucleotide
ggggaccgugcgggccugu

SEQ ID NO: 2327093 - RNA, 19 nt, Artificial Sequence
  Description of Artificial Sequence: Synthetic oligonucleotide
agcacuaucacauacaugg

SEQ ID NO: 2327094 - RNA, 19 nt, Artificial Sequence
  Description of Artificial Sequence: Synthetic oligonucleotide
aguaguuucccauaacucc

SEQ ID NO: 2327095 - RNA, 19 nt, Artificial Sequence
  Description of Artificial Sequence: Synthetic oligonucleotide
uugagaaucaucuaaagaa

SEQ ID NO: 2327096 - RNA, 19 nt, Artificial Sequence
  Description of Artificial Sequence: Synthetic oligonucleotide
aauuguuuggacuugagua

SEQ ID NO: 2327097 - RNA, 19 nt, Artificial Sequence
  Description of Artificial Sequence: Synthetic oligonucleotide
gaugcuuuagaaaagauga

SEQ ID NO: 2327098 - RNA, 19 nt, Artificial Sequence
  Description of Artificial Sequence: Synthetic oligonucleotide
aacaacccaaaugacauac

SEQ ID NO: 2327099 - RNA, 19 nt, Artificial Sequence
  Description of Artificial Sequence: Synthetic oligonucleotide
aucuaaagaaacugguagc

SEQ ID NO: 2327100 - RNA, 19 nt, Artificial Sequence
  Description of Artificial Sequence: Synthetic oligonucleotide
ucuggauguuaacugaugg

SEQ ID NO: 2327101 - RNA, 19 nt, Artificial Sequence
  Description of Artificial Sequence: Synthetic oligonucleotide
aauggaugaucauuucagg

SEQ ID NO: 2327102 - RNA, 19 nt, Artificial Sequence
  Description of Artificial Sequence: Synthetic oligonucleotide
acauauuggaugaagaagg

SEQ ID NO: 2327103 - RNA, 19 nt, Artificial Sequence
  Description of Artificial Sequence: Synthetic oligonucleotide
aacauauuggaugaagaag

SEQ ID NO: 2327104 - RNA, 19 nt, Artificial Sequence
  Description of Artificial Sequence: Synthetic oligonucleotide
gaaacugguagcaaaagcc

SEQ ID NO: 2327105 - RNA, 19 nt, Artificial Sequence
  Description of Artificial Sequence: Synthetic oligonucleotide
caucuaaagaaacugguag

SEQ ID NO: 2327106 - RNA, 19 nt, Artificial Sequence
  Description of Artificial Sequence: Synthetic oligonucleotide
cuugaauagacauggacug

SEQ ID NO: 2327107 - RNA, 19 nt, Artificial Sequence
  Description of Artificial Sequence: Synthetic oligonucleotide
uaugcuguccaccagugcc

SEQ ID NO: 2327108 - RNA, 19 nt, Artificial Sequence
  Description of Artificial Sequence: Synthetic oligonucleotide
ucaacaacccaaaugacau

SEQ ID NO: 2327109 - RNA, 19 nt, Artificial Sequence
  Description of Artificial Sequence: Synthetic oligonucleotide
cacagaaacauauuggaug

SEQ ID NO: 2327110 - RNA, 19 nt, Artificial Sequence
  Description of Artificial Sequence: Synthetic oligonucleotide
uauuggaugaagaaggaua

SEQ ID NO: 2327111 - RNA, 19 nt, Artificial Sequence
  Description of Artificial Sequence: Synthetic oligonucleotide
aaucaucuaaagaaacugg

SEQ ID NO: 2327112 - RNA, 19 nt, Artificial Sequence
  Description of Artificial Sequence: Synthetic oligonucleotide
auuguuuggacuugaguag

SEQ ID NO: 2327113 - RNA, 19 nt, Artificial Sequence
  Description of Artificial Sequence: Synthetic oligonucleotide
uauguggcaaguaaaauuu

SEQ ID NO: 2327114 - RNA, 19 nt, Artificial Sequence
  Description of Artificial Sequence: Synthetic oligonucleotide
ugaagaaggauacuguaaa

SEQ ID NO: 2327115 - RNA, 19 nt, Artificial Sequence
  Description of Artificial Sequence: Synthetic oligonucleotide
uauugccucuucauuaagg

SEQ ID NO: 2327116 - RNA, 19 nt, Artificial Sequence
  Description of Artificial Sequence: Synthetic oligonucleotide
ugaguaguuucccauaacu

SEQ ID NO: 2327117 - RNA, 19 nt, Artificial Sequence
  Description of Artificial Sequence: Synthetic oligonucleotide
aaacauauuggaugaagaa

SEQ ID NO: 2327118 - RNA, 19 nt, Artificial Sequence
  Description of Artificial Sequence: Synthetic oligonucleotide
uacuguaaaugucucaaca

SEQ ID NO: 2327119 - RNA, 19 nt, Artificial Sequence
  Description of Artificial Sequence: Synthetic oligonucleotide
uuuuauguggcaaguaaaa

SEQ ID NO: 2327120 - RNA, 19 nt, Artificial Sequence
  Description of Artificial Sequence: Synthetic oligonucleotide
ugugaguacacucuguguc

SEQ ID NO: 2327121 - RNA, 19 nt, Artificial Sequence
  Description of Artificial Sequence: Synthetic oligonucleotide
agcacgugcauguauugcc

SEQ ID NO: 2327122 - RNA, 19 nt, Artificial Sequence
  Description of Artificial Sequence: Synthetic oligonucleotide
uuccucucucuccagaugg

SEQ ID NO: 2327123 - RNA, 19 nt, Artificial Sequence
  Description of Artificial Sequence: Synthetic oligonucleotide
guagugagagcugauaugg

SEQ ID NO: 2327124 - RNA, 19 nt, Artificial Sequence
  Description of Artificial Sequence: Synthetic oligonucleotide
cuucuaaaugucuucagug

SEQ ID NO: 2327125 - RNA, 19 nt, Artificial Sequence
  Description of Artificial Sequence: Synthetic oligonucleotide
aagaaggauacuguaaaug

SEQ ID NO: 2327126 - RNA, 19 nt, Artificial Sequence
  Description of Artificial Sequence: Synthetic oligonucleotide
ugucucaacaacccaaaug

SEQ ID NO: 2327127 - RNA, 19 nt, Artificial Sequence
  Description of Artificial Sequence: Synthetic oligonucleotide
acagaaacauauuggauga

SEQ ID NO: 2327128 - RNA, 19 nt, Artificial Sequence
  Description of Artificial Sequence: Synthetic oligonucleotide
acaagcauacauuacacau

SEQ ID NO: 2327129 - RNA, 19 nt, Artificial Sequence
  Description of Artificial Sequence: Synthetic oligonucleotide
uguucuagcuagaaacaag

SEQ ID NO: 2327130 - RNA, 19 nt, Artificial Sequence
  Description of Artificial Sequence: Synthetic oligonucleotide
gaaucugccauugacuuag

SEQ ID NO: 2327131 - RNA, 19 nt, Artificial Sequence
  Description of Artificial Sequence: Synthetic oligonucleotide
uggaugaucauuucaggug

SEQ ID NO: 2327132 - RNA, 19 nt, Artificial Sequence
  Description of Artificial Sequence: Synthetic oligonucleotide
ugagcccugaugaagcacg

SEQ ID NO: 2327133 - RNA, 19 nt, Artificial Sequence
  Description of Artificial Sequence: Synthetic oligonucleotide
ucuaaagaaacugguagca

SEQ ID NO: 2327134 - RNA, 19 nt, Artificial Sequence
  Description of Artificial Sequence: Synthetic oligonucleotide
ucugugaguagugagagcu

SEQ ID NO: 2327135 - RNA, 19 nt, Artificial Sequence
  Description of Artificial Sequence: Synthetic oligonucleotide
ugagaaucaucuaaagaaa

SEQ ID NO: 2327136 - RNA, 19 nt, Artificial Sequence
  Description of Artificial Sequence: Synthetic oligonucleotide
cugaacuugguauggaggc

SEQ ID NO: 2327137 - RNA, 19 nt, Artificial Sequence
  Description of Artificial Sequence: Synthetic oligonucleotide
ucuagcuagaaacaagcau

SEQ ID NO: 2327138 - RNA, 19 nt, Artificial Sequence
  Description of Artificial Sequence: Synthetic oligonucleotide
auuuuaucugcuuuaugcu

SEQ ID NO: 2327139 - RNA, 19 nt, Artificial Sequence
  Description of Artificial Sequence: Synthetic oligonucleotide
uauggaggcugucagguug

SEQ ID NO: 2327140 - RNA, 19 nt, Artificial Sequence
  Description of Artificial Sequence: Synthetic oligonucleotide
aaggauacuguaaaugucu

SEQ ID NO: 2327141 - RNA, 19 nt, Artificial Sequence
  Description of Artificial Sequence: Synthetic oligonucleotide
ucuucuaaaugucuucagu

SEQ ID NO: 2327142 - RNA, 19 nt, Artificial Sequence
  Description of Artificial Sequence: Synthetic oligonucleotide
caugcacuuauucaguagc

SEQ ID NO: 2327143 - RNA, 19 nt, Artificial Sequence
  Description of Artificial Sequence: Synthetic oligonucleotide
ugugugaguacacucugug

SEQ ID NO: 2327144 - RNA, 19 nt, Artificial Sequence
  Description of Artificial Sequence: Synthetic oligonucleotide
uuauguggcaaguaaaauu

SEQ ID NO: 2327145 - RNA, 19 nt, Artificial Sequence
  Description of Artificial Sequence: Synthetic oligonucleotide
auuugaauuguuuggacuu

SEQ ID NO: 2327146 - RNA, 19 nt, Artificial Sequence
  Description of Artificial Sequence: Synthetic oligonucleotide
uauucaguagcucuuccuc

SEQ ID NO: 2327147 - RNA, 19 nt, Artificial Sequence
  Description of Artificial Sequence: Synthetic oligonucleotide
gacuuagggauuugaauug

SEQ ID NO: 2327148 - RNA, 19 nt, Artificial Sequence
  Description of Artificial Sequence: Synthetic oligonucleotide
auacacagaaacauauugg

SEQ ID NO: 2327149 - RNA, 19 nt, Artificial Sequence
  Description of Artificial Sequence: Synthetic oligonucleotide
uggaugaagaaggauacug

SEQ ID NO: 2327150 - RNA, 19 nt, Artificial Sequence
  Description of Artificial Sequence: Synthetic oligonucleotide
aaugcugcacagguagcgc

SEQ ID NO: 2327151 - RNA, 19 nt, Artificial Sequence
  Description of Artificial Sequence: Synthetic oligonucleotide
ugccuugucuucuaaaugu

SEQ ID NO: 2327152 - RNA, 19 nt, Artificial Sequence
  Description of Artificial Sequence: Synthetic oligonucleotide
aacaagcauacauuacaca

SEQ ID NO: 2327153 - RNA, 19 nt, Artificial Sequence
  Description of Artificial Sequence: Synthetic oligonucleotide
gcauacauuacacauacac

SEQ ID NO: 2327154 - RNA, 19 nt, Artificial Sequence
  Description of Artificial Sequence: Synthetic oligonucleotide
acuaucacauacauggcuc

SEQ ID NO: 2327155 - RNA, 19 nt, Artificial Sequence
  Description of Artificial Sequence: Synthetic oligonucleotide
uggauguuaacugauggcu

SEQ ID NO: 2327156 - RNA, 19 nt, Artificial Sequence
  Description of Artificial Sequence: Synthetic oligonucleotide
agcaucuggauguuaacug

SEQ ID NO: 2327157 - RNA, 19 nt, Artificial Sequence
  Description of Artificial Sequence: Synthetic oligonucleotide
aguuacagaucuuagcaau

SEQ ID NO: 2327158 - RNA, 19 nt, Artificial Sequence
  Description of Artificial Sequence: Synthetic oligonucleotide
uuuaugcuguccaccagug

SEQ ID NO: 2327159 - RNA, 19 nt, Artificial Sequence
  Description of Artificial Sequence: Synthetic oligonucleotide
ucuggaugcuuuagaaaag

SEQ ID NO: 2327160 - RNA, 19 nt, Artificial Sequence
  Description of Artificial Sequence: Synthetic oligonucleotide
agaaacauauuggaugaag

SEQ ID NO: 2327161 - RNA, 19 nt, Artificial Sequence
  Description of Artificial Sequence: Synthetic oligonucleotide
caaagauuccucucucucc

SEQ ID NO: 2327162 - RNA, 19 nt, Artificial Sequence
  Description of Artificial Sequence: Synthetic oligonucleotide
gguagcaaaagccagucug

SEQ ID NO: 2327163 - RNA, 19 nt, Artificial Sequence
  Description of Artificial Sequence: Synthetic oligonucleotide
aaugacauacuggugacua

SEQ ID NO: 2327164 - RNA, 19 nt, Artificial Sequence
  Description of Artificial Sequence: Synthetic oligonucleotide
ugucagguugaccugagau

SEQ ID NO: 2327165 - RNA, 19 nt, Artificial Sequence
  Description of Artificial Sequence: Synthetic oligonucleotide
ugaauagacauggacugca

SEQ ID NO: 2327166 - RNA, 19 nt, Artificial Sequence
  Description of Artificial Sequence: Synthetic oligonucleotide
uuugugagcccugaugaag

SEQ ID NO: 2327167 - RNA, 19 nt, Artificial Sequence
  Description of Artificial Sequence: Synthetic oligonucleotide
uugugagcccugaugaagc

SEQ ID NO: 2327168 - RNA, 19 nt, Artificial Sequence
  Description of Artificial Sequence: Synthetic oligonucleotide
guucuagcuagaaacaagc

SEQ ID NO: 2327169 - RNA, 19 nt, Artificial Sequence
  Description of Artificial Sequence: Synthetic oligonucleotide
auuaagguccucagguagc

SEQ ID NO: 2327170 - RNA, 19 nt, Artificial Sequence
  Description of Artificial Sequence: Synthetic oligonucleotide
gauguuaacugauggcuga

SEQ ID NO: 2327171 - RNA, 19 nt, Artificial Sequence
  Description of Artificial Sequence: Synthetic oligonucleotide
uuacagaucuuagcaaugc

SEQ ID NO: 2327172 - RNA, 19 nt, Artificial Sequence
  Description of Artificial Sequence: Synthetic oligonucleotide
uggcucacaacucuugcug

SEQ ID NO: 2327173 - RNA, 19 nt, Artificial Sequence
  Description of Artificial Sequence: Synthetic oligonucleotide
augguugagaaucaucuaa

SEQ ID NO: 2327174 - RNA, 19 nt, Artificial Sequence
  Description of Artificial Sequence: Synthetic oligonucleotide
cuagcuagaaacaagcaua

SEQ ID NO: 2327175 - RNA, 19 nt, Artificial Sequence
  Description of Artificial Sequence: Synthetic oligonucleotide
uagcuagaaacaagcauac

SEQ ID NO: 2327176 - RNA, 19 nt, Artificial Sequence
  Description of Artificial Sequence: Synthetic oligonucleotide
aguagugagagcugauaug

SEQ ID NO: 2327177 - RNA, 19 nt, Artificial Sequence
  Description of Artificial Sequence: Synthetic oligonucleotide
auggaugaucauuucaggu

SEQ ID NO: 2327178 - RNA, 19 nt, Artificial Sequence
  Description of Artificial Sequence: Synthetic oligonucleotide
gauacuguaaaugucucaa

SEQ ID NO: 2327179 - RNA, 19 nt, Artificial Sequence
  Description of Artificial Sequence: Synthetic oligonucleotide
uugacuuagggauuugaau

SEQ ID NO: 2327180 - RNA, 19 nt, Artificial Sequence
  Description of Artificial Sequence: Synthetic oligonucleotide
gaaacauauuggaugaaga

SEQ ID NO: 2327181 - RNA, 19 nt, Artificial Sequence
  Description of Artificial Sequence: Synthetic oligonucleotide
ggaguuacagaucuuagca

SEQ ID NO: 2327182 - RNA, 19 nt, Artificial Sequence
  Description of Artificial Sequence: Synthetic oligonucleotide
aagcacgugcauguauugc

SEQ ID NO: 2327183 - RNA, 19 nt, Artificial Sequence
  Description of Artificial Sequence: Synthetic oligonucleotide
acaacucuugcuguccacc

SEQ ID NO: 2327184 - RNA, 19 nt, Artificial Sequence
  Description of Artificial Sequence: Synthetic oligonucleotide
ugauggcugaacuugguau

SEQ ID NO: 2327185 - RNA, 19 nt, Artificial Sequence
  Description of Artificial Sequence: Synthetic oligonucleotide
aaacugguagcaaaagcca

SEQ ID NO: 2327186 - RNA, 19 nt, Artificial Sequence
  Description of Artificial Sequence: Synthetic oligonucleotide
ugcuuuaugcuguccacca

SEQ ID NO: 2327187 - RNA, 19 nt, Artificial Sequence
  Description of Artificial Sequence: Synthetic oligonucleotide
ucauuucagguguugcagc

SEQ ID NO: 2327188 - RNA, 19 nt, Artificial Sequence
  Description of Artificial Sequence: Synthetic oligonucleotide
gagaaucaucuaaagaaac

SEQ ID NO: 2327189 - RNA, 19 nt, Artificial Sequence
  Description of Artificial Sequence: Synthetic oligonucleotide
acauacuggugacuagcac

SEQ ID NO: 2327190 - RNA, 19 nt, Artificial Sequence
  Description of Artificial Sequence: Synthetic oligonucleotide
uguauugccucuucauuaa

SEQ ID NO: 2327191 - RNA, 19 nt, Artificial Sequence
  Description of Artificial Sequence: Synthetic oligonucleotide
aaaugucucaacaacccaa

SEQ ID NO: 2327192 - RNA, 19 nt, Artificial Sequence
  Description of Artificial Sequence: Synthetic oligonucleotide
uaauuguucuagcuagaaa

SEQ ID NO: 2327193 - RNA, 19 nt, Artificial Sequence
  Description of Artificial Sequence: Synthetic oligonucleotide
cuucauuaagguccucagg

SEQ ID NO: 2327194 - RNA, 19 nt, Artificial Sequence
  Description of Artificial Sequence: Synthetic oligonucleotide
augaaucugccauugacuu

SEQ ID NO: 2327195 - RNA, 19 nt, Artificial Sequence
  Description of Artificial Sequence: Synthetic oligonucleotide
aucauuucagguguugcag

SEQ ID NO: 2327196 - RNA, 19 nt, Artificial Sequence
  Description of Artificial Sequence: Synthetic oligonucleotide
cuggauguuaacugauggc

SEQ ID NO: 2327197 - RNA, 19 nt, Artificial Sequence
  Description of Artificial Sequence: Synthetic oligonucleotide
ugacauacuggugacuagc

SEQ ID NO: 2327198 - RNA, 19 nt, Artificial Sequence
  Description of Artificial Sequence: Synthetic oligonucleotide
uucuagcuagaaacaagca

SEQ ID NO: 2327199 - RNA, 19 nt, Artificial Sequence
  Description of Artificial Sequence: Synthetic oligonucleotide
gauuugaauuguuuggacu

SEQ ID NO: 2327200 - RNA, 19 nt, Artificial Sequence
  Description of Artificial Sequence: Synthetic oligonucleotide
ugguugagaaucaucuaaa

SEQ ID NO: 2327201 - RNA, 19 nt, Artificial Sequence
  Description of Artificial Sequence: Synthetic oligonucleotide
uuagggauuugaauuguuu

SEQ ID NO: 2327202 - RNA, 19 nt, Artificial Sequence
  Description of Artificial Sequence: Synthetic oligonucleotide
ugcuuuagaaaagaugaau

SEQ ID NO: 2327203 - RNA, 19 nt, Artificial Sequence
  Description of Artificial Sequence: Synthetic oligonucleotide
gacuagcacuaucacauac

SEQ ID NO: 2327204 - RNA, 19 nt, Artificial Sequence
  Description of Artificial Sequence: Synthetic oligonucleotide
gaugaagaaggauacugua

SEQ ID NO: 2327205 - RNA, 19 nt, Artificial Sequence
  Description of Artificial Sequence: Synthetic oligonucleotide
ucugccuugucuucuaaau

SEQ ID NO: 2327206 - RNA, 19 nt, Artificial Sequence
  Description of Artificial Sequence: Synthetic oligonucleotide
acuggugacuagcacuauc

SEQ ID NO: 2327207 - RNA, 19 nt, Artificial Sequence
  Description of Artificial Sequence: Synthetic oligonucleotide
aagccagucugccuugucu

SEQ ID NO: 2327208 - RNA, 19 nt, Artificial Sequence
  Description of Artificial Sequence: Synthetic oligonucleotide
uuugaauuguuuggacuug

SEQ ID NO: 2327209 - RNA, 19 nt, Artificial Sequence
  Description of Artificial Sequence: Synthetic oligonucleotide
uggcaaguaaaauuuuaau

SEQ ID NO: 2327210 - RNA, 19 nt, Artificial Sequence
  Description of Artificial Sequence: Synthetic oligonucleotide
uuuugaugcguauccaauu

SEQ ID NO: 2327211 - RNA, 19 nt, Artificial Sequence
  Description of Artificial Sequence: Synthetic oligonucleotide
agugacuuacaucuuguuu

SEQ ID NO: 2327212 - RNA, 19 nt, Artificial Sequence
  Description of Artificial Sequence: Synthetic oligonucleotide
ugugaguagugagagcuga

SEQ ID NO: 2327213 - RNA, 19 nt, Artificial Sequence
  Description of Artificial Sequence: Synthetic oligonucleotide
uuuaacccuuccuuguguc

SEQ ID NO: 2327214 - RNA, 19 nt, Artificial Sequence
  Description of Artificial Sequence: Synthetic oligonucleotide
ugaagcacgugcauguauu

SEQ ID NO: 2327215 - RNA, 19 nt, Artificial Sequence
  Description of Artificial Sequence: Synthetic oligonucleotide
gugaguacacucugugucc

SEQ ID NO: 2327216 - RNA, 19 nt, Artificial Sequence
  Description of Artificial Sequence: Synthetic oligonucleotide
aucaucuaaagaaacuggu

SEQ ID NO: 2327217 - RNA, 19 nt, Artificial Sequence
  Description of Artificial Sequence: Synthetic oligonucleotide
uacagaucuuagcaaugcu

SEQ ID NO: 2327218 - RNA, 19 nt, Artificial Sequence
  Description of Artificial Sequence: Synthetic oligonucleotide
ugauauggcuccugugaug

SEQ ID NO: 2327219 - RNA, 19 nt, Artificial Sequence
  Description of Artificial Sequence: Synthetic oligonucleotide
uuuauguggcaaguaaaau

SEQ ID NO: 2327220 - RNA, 19 nt, Artificial Sequence
  Description of Artificial Sequence: Synthetic oligonucleotide
augcucaaagauuccucuc

SEQ ID NO: 2327221 - RNA, 19 nt, Artificial Sequence
  Description of Artificial Sequence: Synthetic oligonucleotide
agauggugucgccauguag

SEQ ID NO: 2327222 - RNA, 19 nt, Artificial Sequence
  Description of Artificial Sequence: Synthetic oligonucleotide
gucgccauguagugcaggg

SEQ ID NO: 2327223 - RNA, 19 nt, Artificial Sequence
  Description of Artificial Sequence: Synthetic oligonucleotide
gaagcacgugcauguauug

SEQ ID NO: 2327224 - RNA, 19 nt, Artificial Sequence
  Description of Artificial Sequence: Synthetic oligonucleotide
ugcuguuucugugaguagu

SEQ ID NO: 2327225 - RNA, 19 nt, Artificial Sequence
  Description of Artificial Sequence: Synthetic oligonucleotide
gguugagaaucaucuaaag

SEQ ID NO: 2327226 - RNA, 19 nt, Artificial Sequence
  Description of Artificial Sequence: Synthetic oligonucleotide
ucugguucagcaucuggau

SEQ ID NO: 2327227 - RNA, 19 nt, Artificial Sequence
  Description of Artificial Sequence: Synthetic oligonucleotide
uugaauagacauggacugc

SEQ ID NO: 2327228 - RNA, 19 nt, Artificial Sequence
  Description of Artificial Sequence: Synthetic oligonucleotide
caaugcugcacagguagcg

SEQ ID NO: 2327229 - RNA, 19 nt, Artificial Sequence
  Description of Artificial Sequence: Synthetic oligonucleotide
uccaccagugccuuuggaa

SEQ ID NO: 2327230 - RNA, 19 nt, Artificial Sequence
  Description of Artificial Sequence: Synthetic oligonucleotide
uggacuugaguaguuuccc

SEQ ID NO: 2327231 - RNA, 19 nt, Artificial Sequence
  Description of Artificial Sequence: Synthetic oligonucleotide
aagaugaaucugccauuga

SEQ ID NO: 2327232 - RNA, 19 nt, Artificial Sequence
  Description of Artificial Sequence: Synthetic oligonucleotide
cuuagcaaugcugcacagg

SEQ ID NO: 2327233 - RNA, 19 nt, Artificial Sequence
  Description of Artificial Sequence: Synthetic oligonucleotide
guagcaaaagccagucugc

SEQ ID NO: 2327234 - RNA, 19 nt, Artificial Sequence
  Description of Artificial Sequence: Synthetic oligonucleotide
ucaguggucuccacaggga

SEQ ID NO: 2327235 - RNA, 19 nt, Artificial Sequence
  Description of Artificial Sequence: Synthetic oligonucleotide
aaugucucaacaacccaaa

SEQ ID NO: 2327236 - RNA, 19 nt, Artificial Sequence
  Description of Artificial Sequence: Synthetic oligonucleotide
ugagugagggcaccuggcu

SEQ ID NO: 2327237 - RNA, 19 nt, Artificial Sequence
  Description of Artificial Sequence: Synthetic oligonucleotide
uaguuucccauaacuccug

SEQ ID NO: 2327238 - RNA, 19 nt, Artificial Sequence
  Description of Artificial Sequence: Synthetic oligonucleotide
uuaugcuguccaccagugc

SEQ ID NO: 2327239 - RNA, 19 nt, Artificial Sequence
  Description of Artificial Sequence: Synthetic oligonucleotide
gaguaguuucccauaacuc

SEQ ID NO: 2327240 - RNA, 19 nt, Artificial Sequence
  Description of Artificial Sequence: Synthetic oligonucleotide
aguagcucuuccuccuuug

SEQ ID NO: 2327241 - RNA, 19 nt, Artificial Sequence
  Description of Artificial Sequence: Synthetic oligonucleotide
gugacuuacaucuuguuuu

SEQ ID NO: 2327242 - RNA, 19 nt, Artificial Sequence
  Description of Artificial Sequence: Synthetic oligonucleotide
cuggugacuagcacuauca

SEQ ID NO: 2327243 - RNA, 19 nt, Artificial Sequence
  Description of Artificial Sequence: Synthetic oligonucleotide
ucacaacucuugcugucca

SEQ ID NO: 2327244 - RNA, 19 nt, Artificial Sequence
  Description of Artificial Sequence: Synthetic oligonucleotide
ucauuaagguccucaggua

SEQ ID NO: 2327245 - RNA, 19 nt, Artificial Sequence
  Description of Artificial Sequence: Synthetic oligonucleotide
uugaauuguuuggacuuga

SEQ ID NO: 2327246 - RNA, 19 nt, Artificial Sequence
  Description of Artificial Sequence: Synthetic oligonucleotide
cccucuuuaauuuuaucug

SEQ ID NO: 2327247 - RNA, 19 nt, Artificial Sequence
  Description of Artificial Sequence: Synthetic oligonucleotide
agccgcaaugcucaaagau

SEQ ID NO: 2327248 - RNA, 19 nt, Artificial Sequence
  Description of Artificial Sequence: Synthetic oligonucleotide
uuaacccuuccuugugucu

SEQ ID NO: 2327249 - RNA, 19 nt, Artificial Sequence
  Description of Artificial Sequence: Synthetic oligonucleotide
agguugaccugagauguuc

SEQ ID NO: 2327250 - RNA, 19 nt, Artificial Sequence
  Description of Artificial Sequence: Synthetic oligonucleotide
aucugccauugacuuaggg

SEQ ID NO: 2327251 - RNA, 19 nt, Artificial Sequence
  Description of Artificial Sequence: Synthetic oligonucleotide
agaucuuagcaaugcugca

SEQ ID NO: 2327252 - RNA, 19 nt, Artificial Sequence
  Description of Artificial Sequence: Synthetic oligonucleotide
uagacauggacugcaugca

SEQ ID NO: 2327253 - RNA, 19 nt, Artificial Sequence
  Description of Artificial Sequence: Synthetic oligonucleotide
gaguuacagaucuuagcaa

SEQ ID NO: 2327254 - RNA, 19 nt, Artificial Sequence
  Description of Artificial Sequence: Synthetic oligonucleotide
uuguuuggacuugaguagu

SEQ ID NO: 2327255 - RNA, 19 nt, Artificial Sequence
  Description of Artificial Sequence: Synthetic oligonucleotide
guugaccugagauguuccc

SEQ ID NO: 2327256 - RNA, 19 nt, Artificial Sequence
  Description of Artificial Sequence: Synthetic oligonucleotide
cauauuggaugaagaagga

SEQ ID NO: 2327257 - RNA, 19 nt, Artificial Sequence
  Description of Artificial Sequence: Synthetic oligonucleotide
ggaugcuuuagaaaagaug

SEQ ID NO: 2327258 - RNA, 19 nt, Artificial Sequence
  Description of Artificial Sequence: Synthetic oligonucleotide
uagcacuaucacauacaug

SEQ ID NO: 2327259 - RNA, 19 nt, Artificial Sequence
  Description of Artificial Sequence: Synthetic oligonucleotide
auggacugcaugcacuuau

SEQ ID NO: 2327260 - RNA, 19 nt, Artificial Sequence
  Description of Artificial Sequence: Synthetic oligonucleotide
auuucagguguugcagccg

SEQ ID NO: 2327261 - RNA, 19 nt, Artificial Sequence
  Description of Artificial Sequence: Synthetic oligonucleotide
uggaugcuuuagaaaagau

SEQ ID NO: 2327262 - RNA, 19 nt, Artificial Sequence
  Description of Artificial Sequence: Synthetic oligonucleotide
guucccggcucuugaauag

SEQ ID NO: 2327263 - RNA, 19 nt, Artificial Sequence
  Description of Artificial Sequence: Synthetic oligonucleotide
guuaacugauggcugaacu

SEQ ID NO: 2327264 - RNA, 19 nt, Artificial Sequence
  Description of Artificial Sequence: Synthetic oligonucleotide
gauggugucgccauguagu

SEQ ID NO: 2327265 - RNA, 19 nt, Artificial Sequence
  Description of Artificial Sequence: Synthetic oligonucleotide
gaauuguuuggacuugagu

SEQ ID NO: 2327266 - RNA, 19 nt, Artificial Sequence
  Description of Artificial Sequence: Synthetic oligonucleotide
cuuggcaaugugugaguac

SEQ ID NO: 2327267 - RNA, 19 nt, Artificial Sequence
  Description of Artificial Sequence: Synthetic oligonucleotide
gaugaaucugccauugacu

SEQ ID NO: 2327268 - RNA, 19 nt, Artificial Sequence
  Description of Artificial Sequence: Synthetic oligonucleotide
uuuugugagcccugaugaa

SEQ ID NO: 2327269 - RNA, 19 nt, Artificial Sequence
  Description of Artificial Sequence: Synthetic oligonucleotide
ggaaugcuguuucugugag

SEQ ID NO: 2327270 - RNA, 19 nt, Artificial Sequence
  Description of Artificial Sequence: Synthetic oligonucleotide
auggugucgccauguagug

SEQ ID NO: 2327271 - RNA, 19 nt, Artificial Sequence
  Description of Artificial Sequence: Synthetic oligonucleotide
uggugacuagcacuaucac

SEQ ID NO: 2327272 - RNA, 19 nt, Artificial Sequence
  Description of Artificial Sequence: Synthetic oligonucleotide
agauguucccggcucuuga

SEQ ID NO: 2327273 - RNA, 19 nt, Artificial Sequence
  Description of Artificial Sequence: Synthetic oligonucleotide
cacagggaauggaugauca

SEQ ID NO: 2327274 - RNA, 19 nt, Artificial Sequence
  Description of Artificial Sequence: Synthetic oligonucleotide
ggugucgccauguagugca

SEQ ID NO: 2327275 - RNA, 19 nt, Artificial Sequence
  Description of Artificial Sequence: Synthetic oligonucleotide
ugugaugagugagggcacc

SEQ ID NO: 2327276 - RNA, 19 nt, Artificial Sequence
  Description of Artificial Sequence: Synthetic oligonucleotide
uguucccggcucuugaaua

SEQ ID NO: 2327277 - RNA, 19 nt, Artificial Sequence
  Description of Artificial Sequence: Synthetic oligonucleotide
cucacaacucuugcugucc

SEQ ID NO: 2327278 - RNA, 19 nt, Artificial Sequence
  Description of Artificial Sequence: Synthetic oligonucleotide
acuagcacuaucacauaca

SEQ ID NO: 2327279 - RNA, 19 nt, Artificial Sequence
  Description of Artificial Sequence: Synthetic oligonucleotide
accagugccuuuggaauuc

SEQ ID NO: 2327280 - RNA, 19 nt, Artificial Sequence
  Description of Artificial Sequence: Synthetic oligonucleotide
ugcaugcacuuauucagua

SEQ ID NO: 2327281 - RNA, 19 nt, Artificial Sequence
  Description of Artificial Sequence: Synthetic oligonucleotide
cugccauugacuuagggau

SEQ ID NO: 2327282 - RNA, 19 nt, Artificial Sequence
  Description of Artificial Sequence: Synthetic oligonucleotide
cuaucacauacauggcuca

SEQ ID NO: 2327283 - RNA, 19 nt, Artificial Sequence
  Description of Artificial Sequence: Synthetic oligonucleotide
gcuagaaacaagcauacau

SEQ ID NO: 2327284 - RNA, 19 nt, Artificial Sequence
  Description of Artificial Sequence: Synthetic oligonucleotide
guauugccucuucauuaag

SEQ ID NO: 2327285 - RNA, 19 nt, Artificial Sequence
  Description of Artificial Sequence: Synthetic oligonucleotide
cagcuuggcaaugugugag

SEQ ID NO: 2327286 - RNA, 19 nt, Artificial Sequence
  Description of Artificial Sequence: Synthetic oligonucleotide
ugugagcccugaugaagca

SEQ ID NO: 2327287 - RNA, 19 nt, Artificial Sequence
  Description of Artificial Sequence: Synthetic oligonucleotide
uguuaacugauggcugaac

SEQ ID NO: 2327288 - RNA, 19 nt, Artificial Sequence
  Description of Artificial Sequence: Synthetic oligonucleotide
cuccugugaugagugaggg

SEQ ID NO: 2327289 - RNA, 19 nt, Artificial Sequence
  Description of Artificial Sequence: Synthetic oligonucleotide
ugaacuugguauggaggcu

SEQ ID NO: 2327290 - RNA, 19 nt, Artificial Sequence
  Description of Artificial Sequence: Synthetic oligonucleotide
ugcacuuauucaguagcuc

SEQ ID NO: 2327291 - RNA, 19 nt, Artificial Sequence
  Description of Artificial Sequence: Synthetic oligonucleotide
cagguagccggaguuacag

SEQ ID NO: 2327292 - RNA, 19 nt, Artificial Sequence
  Description of Artificial Sequence: Synthetic oligonucleotide
uaacccuuccuugugucuc

SEQ ID NO: 2327293 - RNA, 19 nt, Artificial Sequence
  Description of Artificial Sequence: Synthetic oligonucleotide
ugaguagugagagcugaua

SEQ ID NO: 2327294 - RNA, 19 nt, Artificial Sequence
  Description of Artificial Sequence: Synthetic oligonucleotide
auugacuuagggauuugaa

SEQ ID NO: 2327295 - RNA, 19 nt, Artificial Sequence
  Description of Artificial Sequence: Synthetic oligonucleotide
ugaaucugccauugacuua

SEQ ID NO: 2327296 - RNA, 19 nt, Artificial Sequence
  Description of Artificial Sequence: Synthetic oligonucleotide
augaucauuucagguguug

SEQ ID NO: 2327297 - RNA, 19 nt, Artificial Sequence
  Description of Artificial Sequence: Synthetic oligonucleotide
acuuagggauuugaauugu

SEQ ID NO: 2327298 - RNA, 19 nt, Artificial Sequence
  Description of Artificial Sequence: Synthetic oligonucleotide
gaguagugagagcugauau

SEQ ID NO: 2327299 - RNA, 19 nt, Artificial Sequence
  Description of Artificial Sequence: Synthetic oligonucleotide
caagcauacauuacacaua

SEQ ID NO: 2327300 - RNA, 19 nt, Artificial Sequence
  Description of Artificial Sequence: Synthetic oligonucleotide
ucagguagccggaguuaca

SEQ ID NO: 2327301 - RNA, 19 nt, Artificial Sequence
  Description of Artificial Sequence: Synthetic oligonucleotide
ggugacuagcacuaucaca

SEQ ID NO: 2327302 - RNA, 19 nt, Artificial Sequence
  Description of Artificial Sequence: Synthetic oligonucleotide
ucacucaugcaugguugag

SEQ ID NO: 2327303 - RNA, 19 nt, Artificial Sequence
  Description of Artificial Sequence: Synthetic oligonucleotide
ggcaaguaaaauuuuaauu

SEQ ID NO: 2327304 - RNA, 19 nt, Artificial Sequence
  Description of Artificial Sequence: Synthetic oligonucleotide
gguguugcagccgcaaugc

SEQ ID NO: 2327305 - RNA, 19 nt, Artificial Sequence
  Description of Artificial Sequence: Synthetic oligonucleotide
agcugauauggcuccugug

SEQ ID NO: 2327306 - RNA, 19 nt, Artificial Sequence
  Description of Artificial Sequence: Synthetic oligonucleotide
gcccugaugaagcacgugc

SEQ ID NO: 2327307 - RNA, 19 nt, Artificial Sequence
  Description of Artificial Sequence: Synthetic oligonucleotide
uguuuggacuugaguaguu

SEQ ID NO: 2327308 - RNA, 19 nt, Artificial Sequence
  Description of Artificial Sequence: Synthetic oligonucleotide
cauuacacauacacagaaa

SEQ ID NO: 2327309 - RNA, 19 nt, Artificial Sequence
  Description of Artificial Sequence: Synthetic oligonucleotide
acgugcauguauugccucu

SEQ ID NO: 2327310 - RNA, 19 nt, Artificial Sequence
  Description of Artificial Sequence: Synthetic oligonucleotide
ugaugagugagggcaccug

SEQ ID NO: 2327311 - RNA, 19 nt, Artificial Sequence
  Description of Artificial Sequence: Synthetic oligonucleotide
gacauacuggugacuagca

SEQ ID NO: 2327312 - RNA, 19 nt, Artificial Sequence
  Description of Artificial Sequence: Synthetic oligonucleotide
acugguagcaaaagccagu

SEQ ID NO: 2327313 - RNA, 19 nt, Artificial Sequence
  Description of Artificial Sequence: Synthetic oligonucleotide
gugagagcugauauggcuc

SEQ ID NO: 2327314 - RNA, 19 nt, Artificial Sequence
  Description of Artificial Sequence: Synthetic oligonucleotide
uccugugaugagugagggc

SEQ ID NO: 2327315 - RNA, 19 nt, Artificial Sequence
  Description of Artificial Sequence: Synthetic oligonucleotide
ccuuccuugugucucagug

SEQ ID NO: 2327316 - RNA, 19 nt, Artificial Sequence
  Description of Artificial Sequence: Synthetic oligonucleotide
ggaugaucauuucaggugu

SEQ ID NO: 2327317 - RNA, 19 nt, Artificial Sequence
  Description of Artificial Sequence: Synthetic oligonucleotide
uggcaaugugugaguacac

SEQ ID NO: 2327318 - RNA, 19 nt, Artificial Sequence
  Description of Artificial Sequence: Synthetic oligonucleotide
gaagaaggauacuguaaau

SEQ ID NO: 2327319 - RNA, 19 nt, Artificial Sequence
  Description of Artificial Sequence: Synthetic oligonucleotide
guggcaaguaaaauuuuaa

SEQ ID NO: 2327320 - RNA, 19 nt, Artificial Sequence
  Description of Artificial Sequence: Synthetic oligonucleotide
ggauguuaacugauggcug

SEQ ID NO: 2327321 - RNA, 19 nt, Artificial Sequence
  Description of Artificial Sequence: Synthetic oligonucleotide
ucccggcucuugaauagac

SEQ ID NO: 2327322 - RNA, 19 nt, Artificial Sequence
  Description of Artificial Sequence: Synthetic oligonucleotide
ugucgccauguagugcagg

SEQ ID NO: 2327323 - RNA, 19 nt, Artificial Sequence
  Description of Artificial Sequence: Synthetic oligonucleotide
gcaugcacuuauucaguag

SEQ ID NO: 2327324 - RNA, 19 nt, Artificial Sequence
  Description of Artificial Sequence: Synthetic oligonucleotide
ugugucccucuuuaauuuu

SEQ ID NO: 2327325 - RNA, 19 nt, Artificial Sequence
  Description of Artificial Sequence: Synthetic oligonucleotide
gaccugagauguucccggc

SEQ ID NO: 2327326 - RNA, 19 nt, Artificial Sequence
  Description of Artificial Sequence: Synthetic oligonucleotide
caccuggcuuuugugagcc

SEQ ID NO: 2327327 - RNA, 19 nt, Artificial Sequence
  Description of Artificial Sequence: Synthetic oligonucleotide
aaaugucuucagugacuua

SEQ ID NO: 2327328 - RNA, 19 nt, Artificial Sequence
  Description of Artificial Sequence: Synthetic oligonucleotide
ccgcaaugcucaaagauuc

SEQ ID NO: 2327329 - RNA, 19 nt, Artificial Sequence
  Description of Artificial Sequence: Synthetic oligonucleotide
cuuuaugcuguccaccagu

SEQ ID NO: 2327330 - RNA, 19 nt, Artificial Sequence
  Description of Artificial Sequence: Synthetic oligonucleotide
ccugugaugagugagggca

SEQ ID NO: 2327331 - RNA, 19 nt, Artificial Sequence
  Description of Artificial Sequence: Synthetic oligonucleotide
gacuugaguaguuucccau

SEQ ID NO: 2327332 - RNA, 19 nt, Artificial Sequence
  Description of Artificial Sequence: Synthetic oligonucleotide
auacuggugacuagcacua

SEQ ID NO: 2327333 - RNA, 19 nt, Artificial Sequence
  Description of Artificial Sequence: Synthetic oligonucleotide
aaaagccagucugccuugu

SEQ ID NO: 2327334 - RNA, 19 nt, Artificial Sequence
  Description of Artificial Sequence: Synthetic oligonucleotide
cugugaguagugagagcug

SEQ ID NO: 2327335 - RNA, 19 nt, Artificial Sequence
  Description of Artificial Sequence: Synthetic oligonucleotide
cuggaugcuuuagaaaaga

SEQ ID NO: 2327336 - RNA, 19 nt, Artificial Sequence
  Description of Artificial Sequence: Synthetic oligonucleotide
gauguucccggcucuugaa

SEQ ID NO: 2327337 - RNA, 19 nt, Artificial Sequence
  Description of Artificial Sequence: Synthetic oligonucleotide
agugaguucuggaugcuuu

SEQ ID NO: 2327338 - RNA, 19 nt, Artificial Sequence
  Description of Artificial Sequence: Synthetic oligonucleotide
guuucccauaacuccugca

SEQ ID NO: 2327339 - RNA, 19 nt, Artificial Sequence
  Description of Artificial Sequence: Synthetic oligonucleotide
ggauacuguaaaugucuca

SEQ ID NO: 2327340 - RNA, 19 nt, Artificial Sequence
  Description of Artificial Sequence: Synthetic oligonucleotide
ugccauugacuuagggauu

SEQ ID NO: 2327341 - RNA, 19 nt, Artificial Sequence
  Description of Artificial Sequence: Synthetic oligonucleotide
gggauuugaauuguuugga

SEQ ID NO: 2327342 - RNA, 19 nt, Artificial Sequence
  Description of Artificial Sequence: Synthetic oligonucleotide
cacuaucacauacauggcu

SEQ ID NO: 2327343 - RNA, 19 nt, Artificial Sequence
  Description of Artificial Sequence: Synthetic oligonucleotide
ggggaaugcuguuucugug

SEQ ID NO: 2327344 - RNA, 19 nt, Artificial Sequence
  Description of Artificial Sequence: Synthetic oligonucleotide
augcacuuauucaguagcu

SEQ ID NO: 2327345 - RNA, 19 nt, Artificial Sequence
  Description of Artificial Sequence: Synthetic oligonucleotide
agccagucugccuugucuu

SEQ ID NO: 2327346 - RNA, 19 nt, Artificial Sequence
  Description of Artificial Sequence: Synthetic oligonucleotide
cacauacauggcucacaac

SEQ ID NO: 2327347 - RNA, 19 nt, Artificial Sequence
  Description of Artificial Sequence: Synthetic oligonucleotide
uucagguguugcagccgca

SEQ ID NO: 2327348 - RNA, 19 nt, Artificial Sequence
  Description of Artificial Sequence: Synthetic oligonucleotide
ugcacagguagcgcuucug

SEQ ID NO: 2327349 - RNA, 19 nt, Artificial Sequence
  Description of Artificial Sequence: Synthetic oligonucleotide
uggacugcaugcacuuauu

SEQ ID NO: 2327350 - RNA, 19 nt, Artificial Sequence
  Description of Artificial Sequence: Synthetic oligonucleotide
gagauguucccggcucuug

SEQ ID NO: 2327351 - RNA, 19 nt, Artificial Sequence
  Description of Artificial Sequence: Synthetic oligonucleotide
acagggaauggaugaucau

SEQ ID NO: 2327352 - RNA, 19 nt, Artificial Sequence
  Description of Artificial Sequence: Synthetic oligonucleotide
cuugugucucaguggucuc

SEQ ID NO: 2327353 - RNA, 19 nt, Artificial Sequence
  Description of Artificial Sequence: Synthetic oligonucleotide
gugccuuuggaauucuggu

SEQ ID NO: 2327354 - RNA, 19 nt, Artificial Sequence
  Description of Artificial Sequence: Synthetic oligonucleotide
cuagcacuaucacauacau

SEQ ID NO: 2327355 - RNA, 19 nt, Artificial Sequence
  Description of Artificial Sequence: Synthetic oligonucleotide
gcaugguugagaaucaucu

SEQ ID NO: 2327356 - RNA, 19 nt, Artificial Sequence
  Description of Artificial Sequence: Synthetic oligonucleotide
accuggcuuuugugagccc

SEQ ID NO: 2327357 - RNA, 19 nt, Artificial Sequence
  Description of Artificial Sequence: Synthetic oligonucleotide
ugacuagcacuaucacaua

SEQ ID NO: 2327358 - RNA, 19 nt, Artificial Sequence
  Description of Artificial Sequence: Synthetic oligonucleotide
gcacuuauucaguagcucu

SEQ ID NO: 2327359 - RNA, 19 nt, Artificial Sequence
  Description of Artificial Sequence: Synthetic oligonucleotide
cauugacuuagggauuuga

SEQ ID NO: 2327360 - RNA, 19 nt, Artificial Sequence
  Description of Artificial Sequence: Synthetic oligonucleotide
uggugucgccauguagugc

SEQ ID NO: 2327361 - RNA, 19 nt, Artificial Sequence
  Description of Artificial Sequence: Synthetic oligonucleotide
gcacagguagcgcuucugc

SEQ ID NO: 2327362 - RNA, 19 nt, Artificial Sequence
  Description of Artificial Sequence: Synthetic oligonucleotide
cggaguuacagaucuuagc

SEQ ID NO: 2327363 - RNA, 19 nt, Artificial Sequence
  Description of Artificial Sequence: Synthetic oligonucleotide
caugguugagaaucaucua

SEQ ID NO: 2327364 - RNA, 19 nt, Artificial Sequence
  Description of Artificial Sequence: Synthetic oligonucleotide
augcuuuagaaaagaugaa

SEQ ID NO: 2327365 - RNA, 19 nt, Artificial Sequence
  Description of Artificial Sequence: Synthetic oligonucleotide
ccauaacuccugcagcuug

SEQ ID NO: 2327366 - RNA, 19 nt, Artificial Sequence
  Description of Artificial Sequence: Synthetic oligonucleotide
gguugaccugagauguucc

SEQ ID NO: 2327367 - RNA, 19 nt, Artificial Sequence
  Description of Artificial Sequence: Synthetic oligonucleotide
agcuagaaacaagcauaca

SEQ ID NO: 2327368 - RNA, 19 nt, Artificial Sequence
  Description of Artificial Sequence: Synthetic oligonucleotide
ggcuccugugaugagugag

SEQ ID NO: 2327369 - RNA, 19 nt, Artificial Sequence
  Description of Artificial Sequence: Synthetic oligonucleotide
gucccucuuuaauuuuauc

SEQ ID NO: 2327370 - RNA, 19 nt, Artificial Sequence
  Description of Artificial Sequence: Synthetic oligonucleotide
agguagccggaguuacaga

SEQ ID NO: 2327371 - RNA, 19 nt, Artificial Sequence
  Description of Artificial Sequence: Synthetic oligonucleotide
gcucaaagauuccucucuc

SEQ ID NO: 2327372 - RNA, 19 nt, Artificial Sequence
  Description of Artificial Sequence: Synthetic oligonucleotide
cacucaugcaugguugaga

SEQ ID NO: 2327373 - RNA, 19 nt, Artificial Sequence
  Description of Artificial Sequence: Synthetic oligonucleotide
gguagccggaguuacagau

SEQ ID NO: 2327374 - RNA, 19 nt, Artificial Sequence
  Description of Artificial Sequence: Synthetic oligonucleotide
acaacccaaaugacauacu

SEQ ID NO: 2327375 - RNA, 19 nt, Artificial Sequence
  Description of Artificial Sequence: Synthetic oligonucleotide
cucaaagauuccucucucu

SEQ ID NO: 2327376 - RNA, 19 nt, Artificial Sequence
  Description of Artificial Sequence: Synthetic oligonucleotide
uucugcccugcagugaguu

SEQ ID NO: 2327377 - RNA, 19 nt, Artificial Sequence
  Description of Artificial Sequence: Synthetic oligonucleotide
auguuaacugauggcugaa

SEQ ID NO: 2327378 - RNA, 19 nt, Artificial Sequence
  Description of Artificial Sequence: Synthetic oligonucleotide
ccggaguuacagaucuuag

SEQ ID NO: 2327379 - RNA, 19 nt, Artificial Sequence
  Description of Artificial Sequence: Synthetic oligonucleotide
cccaaaugacauacuggug

SEQ ID NO: 2327380 - RNA, 19 nt, Artificial Sequence
  Description of Artificial Sequence: Synthetic oligonucleotide
augugugaguacacucugu

SEQ ID NO: 2327381 - RNA, 19 nt, Artificial Sequence
  Description of Artificial Sequence: Synthetic oligonucleotide
guagccggaguuacagauc

SEQ ID NO: 2327382 - RNA, 19 nt, Artificial Sequence
  Description of Artificial Sequence: Synthetic oligonucleotide
gaaugcuguuucugugagu

SEQ ID NO: 2327383 - RNA, 19 nt, Artificial Sequence
  Description of Artificial Sequence: Synthetic oligonucleotide
caguggucuccacagggaa

SEQ ID NO: 2327384 - RNA, 19 nt, Artificial Sequence
  Description of Artificial Sequence: Synthetic oligonucleotide
ggaugaagaaggauacugu

SEQ ID NO: 2327385 - RNA, 19 nt, Artificial Sequence
  Description of Artificial Sequence: Synthetic oligonucleotide
cuguuucugugaguaguga

SEQ ID NO: 2327386 - RNA, 19 nt, Artificial Sequence
  Description of Artificial Sequence: Synthetic oligonucleotide
aguggucuccacagggaau

SEQ ID NO: 2327387 - RNA, 19 nt, Artificial Sequence
  Description of Artificial Sequence: Synthetic oligonucleotide
cugauauggcuccugugau

SEQ ID NO: 2327388 - RNA, 19 nt, Artificial Sequence
  Description of Artificial Sequence: Synthetic oligonucleotide
gugagcccugaugaagcac

SEQ ID NO: 2327389 - RNA, 19 nt, Artificial Sequence
  Description of Artificial Sequence: Synthetic oligonucleotide
cacuuauucaguagcucuu

SEQ ID NO: 2327390 - RNA, 19 nt, Artificial Sequence
  Description of Artificial Sequence: Synthetic oligonucleotide
gggcaccuggcuuuuguga

SEQ ID NO: 2327391 - RNA, 19 nt, Artificial Sequence
  Description of Artificial Sequence: Synthetic oligonucleotide
gcaccuggcuuuugugagc

SEQ ID NO: 2327392 - RNA, 19 nt, Artificial Sequence
  Description of Artificial Sequence: Synthetic oligonucleotide
cugugucccucuuuaauuu

SEQ ID NO: 2327393 - RNA, 19 nt, Artificial Sequence
  Description of Artificial Sequence: Synthetic oligonucleotide
caacucuugcuguccaccu

SEQ ID NO: 2327394 - RNA, 19 nt, Artificial Sequence
  Description of Artificial Sequence: Synthetic oligonucleotide
cugcaugcacuuauucagu

SEQ ID NO: 2327395 - RNA, 19 nt, Artificial Sequence
  Description of Artificial Sequence: Synthetic oligonucleotide
caacaacccaaaugacaua

SEQ ID NO: 2327396 - RNA, 19 nt, Artificial Sequence
  Description of Artificial Sequence: Synthetic oligonucleotide
gcacuaucacauacauggc

SEQ ID NO: 2327397 - RNA, 19 nt, Artificial Sequence
  Description of Artificial Sequence: Synthetic oligonucleotide
gaauagacauggacugcau

SEQ ID NO: 2327398 - RNA, 19 nt, Artificial Sequence
  Description of Artificial Sequence: Synthetic oligonucleotide
cuuagggauuugaauuguu

SEQ ID NO: 2327399 - RNA, 19 nt, Artificial Sequence
  Description of Artificial Sequence: Synthetic oligonucleotide
gugucccucuuuaauuuua

SEQ ID NO: 2327400 - RNA, 19 nt, Artificial Sequence
  Description of Artificial Sequence: Synthetic oligonucleotide
agcccugaugaagcacgug

SEQ ID NO: 2327401 - RNA, 19 nt, Artificial Sequence
  Description of Artificial Sequence: Synthetic oligonucleotide
gaguacacucugugucccu

SEQ ID NO: 2327402 - RNA, 19 nt, Artificial Sequence
  Description of Artificial Sequence: Synthetic oligonucleotide
uacuggugacuagcacuau

SEQ ID NO: 2327403 - RNA, 19 nt, Artificial Sequence
  Description of Artificial Sequence: Synthetic oligonucleotide
gugucucaguggucuccac

SEQ ID NO: 2327404 - RNA, 19 nt, Artificial Sequence
  Description of Artificial Sequence: Synthetic oligonucleotide
acccuuccuugugucucag

SEQ ID NO: 2327405 - RNA, 19 nt, Artificial Sequence
  Description of Artificial Sequence: Synthetic oligonucleotide
cagggaauggaugaucauu

SEQ ID NO: 2327406 - RNA, 19 nt, Artificial Sequence
  Description of Artificial Sequence: Synthetic oligonucleotide
cagaaacauauuggaugaa

SEQ ID NO: 2327407 - RNA, 19 nt, Artificial Sequence
  Description of Artificial Sequence: Synthetic oligonucleotide
cugucagguugaccugaga

SEQ ID NO: 2327408 - RNA, 19 nt, Artificial Sequence
  Description of Artificial Sequence: Synthetic oligonucleotide
ggaggcugucagguugacc

SEQ ID NO: 2327409 - RNA, 19 nt, Artificial Sequence
  Description of Artificial Sequence: Synthetic oligonucleotide
gugucgccauguagugcag

SEQ ID NO: 2327410 - RNA, 19 nt, Artificial Sequence
  Description of Artificial Sequence: Synthetic oligonucleotide
gguccucagguagccggag

SEQ ID NO: 2327411 - RNA, 19 nt, Artificial Sequence
  Description of Artificial Sequence: Synthetic oligonucleotide
cagccgcaaugcucaaaga

SEQ ID NO: 2327412 - RNA, 19 nt, Artificial Sequence
  Description of Artificial Sequence: Synthetic oligonucleotide
ccuugugucucaguggucu

SEQ ID NO: 2327413 - RNA, 19 nt, Artificial Sequence
  Description of Artificial Sequence: Synthetic oligonucleotide
ccacagggaauggaugauc

SEQ ID NO: 2327414 - RNA, 19 nt, Artificial Sequence
  Description of Artificial Sequence: Synthetic oligonucleotide
ccucucucuccagauggug

SEQ ID NO: 2327415 - RNA, 19 nt, Artificial Sequence
  Description of Artificial Sequence: Synthetic oligonucleotide
guagcgcuucugcccugca

SEQ ID NO: 2327416 - RNA, 19 nt, Artificial Sequence
  Description of Artificial Sequence: Synthetic oligonucleotide
ccggcucuugaauagacau

SEQ ID NO: 2327417 - RNA, 19 nt, Artificial Sequence
  Description of Artificial Sequence: Synthetic oligonucleotide
cagauggugucgccaugua

SEQ ID NO: 2327418 - RNA, 19 nt, Artificial Sequence
  Description of Artificial Sequence: Synthetic oligonucleotide
guauggaggcugucagguu

SEQ ID NO: 2327419 - RNA, 19 nt, Artificial Sequence
  Description of Artificial Sequence: Synthetic oligonucleotide
guguugcagccgcaaugcu

SEQ ID NO: 2327420 - RNA, 19 nt, Artificial Sequence
  Description of Artificial Sequence: Synthetic oligonucleotide
gccgcaaugcucaaagauu

SEQ ID NO: 2327421 - RNA, 19 nt, Artificial Sequence
  Description of Artificial Sequence: Synthetic oligonucleotide
gugaguagugagagcugau

SEQ ID NO: 2327422 - RNA, 19 nt, Artificial Sequence
  Description of Artificial Sequence: Synthetic oligonucleotide
ccauugacuuagggauuug

SEQ ID NO: 2327423 - RNA, 19 nt, Artificial Sequence
  Description of Artificial Sequence: Synthetic oligonucleotide
cccggcucuugaauagaca

SEQ ID NO: 2327424 - RNA, 19 nt, Artificial Sequence
  Description of Artificial Sequence: Synthetic oligonucleotide
gccauugacuuagggauuu

SEQ ID NO: 2327425 - RNA, 19 nt, Artificial Sequence
  Description of Artificial Sequence: Synthetic oligonucleotide
ggcuuuugugagcccugau

SEQ ID NO: 2327426 - RNA, 19 nt, Artificial Sequence
  Description of Artificial Sequence: Synthetic oligonucleotide
cagugaguucuggaugcuu

SEQ ID NO: 2327427 - RNA, 19 nt, Artificial Sequence
  Description of Artificial Sequence: Synthetic oligonucleotide
gcagugaguucuggaugcu

SEQ ID NO: 2327428 - RNA, 19 nt, Artificial Sequence
  Description of Artificial Sequence: Synthetic oligonucleotide
ccucagguagccggaguua

SEQ ID NO: 2327429 - RNA, 19 nt, Artificial Sequence
  Description of Artificial Sequence: Synthetic oligonucleotide
gcuguccaccagugccuuu

SEQ ID NO: 2327430 - RNA, 19 nt, Artificial Sequence
  Description of Artificial Sequence: Synthetic oligonucleotide
cgugcauguauugccucuu

SEQ ID NO: 2327431 - RNA, 19 nt, Artificial Sequence
  Description of Artificial Sequence: Synthetic oligonucleotide
acuauaggcaugcaguacc

SEQ ID NO: 2327432 - RNA, 19 nt, Artificial Sequence
  Description of Artificial Sequence: Synthetic oligonucleotide
aacuuccuaacucacaaag

SEQ ID NO: 2327433 - RNA, 19 nt, Artificial Sequence
  Description of Artificial Sequence: Synthetic oligonucleotide
agacuaaggacauugcuac

SEQ ID NO: 2327434 - RNA, 19 nt, Artificial Sequence
  Description of Artificial Sequence: Synthetic oligonucleotide
uccuaacucacaaagcugg

SEQ ID NO: 2327435 - RNA, 19 nt, Artificial Sequence
  Description of Artificial Sequence: Synthetic oligonucleotide
guucaagggaucuugaggg

SEQ ID NO: 2327436 - RNA, 19 nt, Artificial Sequence
  Description of Artificial Sequence: Synthetic oligonucleotide
aaagcuggaaucaacacag

SEQ ID NO: 2327437 - RNA, 19 nt, Artificial Sequence
  Description of Artificial Sequence: Synthetic oligonucleotide
agcuaaaccaccuccuucc

SEQ ID NO: 2327438 - RNA, 19 nt, Artificial Sequence
  Description of Artificial Sequence: Synthetic oligonucleotide
aggacauugcuacaggggc

SEQ ID NO: 2327439 - RNA, 19 nt, Artificial Sequence
  Description of Artificial Sequence: Synthetic oligonucleotide
uuauugacuggaauugucc

SEQ ID NO: 2327440 - RNA, 19 nt, Artificial Sequence
  Description of Artificial Sequence: Synthetic oligonucleotide
auuccaaaccaguucaagg

SEQ ID NO: 2327441 - RNA, 19 nt, Artificial Sequence
  Description of Artificial Sequence: Synthetic oligonucleotide
aguucaagggaucuugagg

SEQ ID NO: 2327442 - RNA, 19 nt, Artificial Sequence
  Description of Artificial Sequence: Synthetic oligonucleotide
aaucaacacagacuaagga

SEQ ID NO: 2327443 - RNA, 19 nt, Artificial Sequence
  Description of Artificial Sequence: Synthetic oligonucleotide
uucuacacugcucagcuug

SEQ ID NO: 2327444 - RNA, 19 nt, Artificial Sequence
  Description of Artificial Sequence: Synthetic oligonucleotide
ugggagucagcuuugauca

SEQ ID NO: 2327445 - RNA, 19 nt, Artificial Sequence
  Description of Artificial Sequence: Synthetic oligonucleotide
aacucaacuuccuaacuca

SEQ ID NO: 2327446 - RNA, 19 nt, Artificial Sequence
  Description of Artificial Sequence: Synthetic oligonucleotide
aaguagauucaggucaggc

SEQ ID NO: 2327447 - RNA, 19 nt, Artificial Sequence
  Description of Artificial Sequence: Synthetic oligonucleotide
uauuaugaaagauggccug

SEQ ID NO: 2327448 - RNA, 19 nt, Artificial Sequence
  Description of Artificial Sequence: Synthetic oligonucleotide
gacucuugggucuugguag

SEQ ID NO: 2327449 - RNA, 19 nt, Artificial Sequence
  Description of Artificial Sequence: Synthetic oligonucleotide
auuuuauugacuggaauug

SEQ ID NO: 2327450 - RNA, 19 nt, Artificial Sequence
  Description of Artificial Sequence: Synthetic oligonucleotide
uagccuauuuccaagugcc

SEQ ID NO: 2327451 - RNA, 19 nt, Artificial Sequence
  Description of Artificial Sequence: Synthetic oligonucleotide
ucaacuuccuaacucacaa

SEQ ID NO: 2327452 - RNA, 19 nt, Artificial Sequence
  Description of Artificial Sequence: Synthetic oligonucleotide
ucuucuacacugcucagcu

SEQ ID NO: 2327453 - RNA, 19 nt, Artificial Sequence
  Description of Artificial Sequence: Synthetic oligonucleotide
aucuugagggaccacagag

SEQ ID NO: 2327454 - RNA, 19 nt, Artificial Sequence
  Description of Artificial Sequence: Synthetic oligonucleotide
aagauggccugaguaaggc

SEQ ID NO: 2327455 - RNA, 19 nt, Artificial Sequence
  Description of Artificial Sequence: Synthetic oligonucleotide
uauauccgcagccagcuga

SEQ ID NO: 2327456 - RNA, 19 nt, Artificial Sequence
  Description of Artificial Sequence: Synthetic oligonucleotide
aaaccaccuccuuccaagc

SEQ ID NO: 2327457 - RNA, 19 nt, Artificial Sequence
  Description of Artificial Sequence: Synthetic oligonucleotide
ucuugagggaccacagagg

SEQ ID NO: 2327458 - RNA, 19 nt, Artificial Sequence
  Description of Artificial Sequence: Synthetic oligonucleotide
uucggaaguagauucaggu

SEQ ID NO: 2327459 - RNA, 19 nt, Artificial Sequence
  Description of Artificial Sequence: Synthetic oligonucleotide
uugaucacccugaaggucu

SEQ ID NO: 2327460 - RNA, 19 nt, Artificial Sequence
  Description of Artificial Sequence: Synthetic oligonucleotide
cugugagggaccaagauuc

SEQ ID NO: 2327461 - RNA, 19 nt, Artificial Sequence
  Description of Artificial Sequence: Synthetic oligonucleotide
gcuauuaugaaagauggcc

SEQ ID NO: 2327462 - RNA, 19 nt, Artificial Sequence
  Description of Artificial Sequence: Synthetic oligonucleotide
ucaaauuuccuaacucaac

SEQ ID NO: 2327463 - RNA, 19 nt, Artificial Sequence
  Description of Artificial Sequence: Synthetic oligonucleotide
cauuagcugagacaggggc

SEQ ID NO: 2327464 - RNA, 19 nt, Artificial Sequence
  Description of Artificial Sequence: Synthetic oligonucleotide
uuuauugacuggaauuguc

SEQ ID NO: 2327465 - RNA, 19 nt, Artificial Sequence
  Description of Artificial Sequence: Synthetic oligonucleotide
ucgugaggcauacugcagg

SEQ ID NO: 2327466 - RNA, 19 nt, Artificial Sequence
  Description of Artificial Sequence: Synthetic oligonucleotide
agauggcuauguucaaugc

SEQ ID NO: 2327467 - RNA, 19 nt, Artificial Sequence
  Description of Artificial Sequence: Synthetic oligonucleotide
gauggcuauguucaaugcc

SEQ ID NO: 2327468 - RNA, 19 nt, Artificial Sequence
  Description of Artificial Sequence: Synthetic oligonucleotide
ugcgccuucguagagaugc

SEQ ID NO: 2327469 - RNA, 19 nt, Artificial Sequence
  Description of Artificial Sequence: Synthetic oligonucleotide
gaaucaacacagacuaagg

SEQ ID NO: 2327470 - RNA, 19 nt, Artificial Sequence
  Description of Artificial Sequence: Synthetic oligonucleotide
uaacucaacuuccuaacuc

SEQ ID NO: 2327471 - RNA, 19 nt, Artificial Sequence
  Description of Artificial Sequence: Synthetic oligonucleotide
aaggacauugcuacagggg

SEQ ID NO: 2327472 - RNA, 19 nt, Artificial Sequence
  Description of Artificial Sequence: Synthetic oligonucleotide
uaacucacaaagcuggaau

SEQ ID NO: 2327473 - RNA, 19 nt, Artificial Sequence
  Description of Artificial Sequence: Synthetic oligonucleotide
gaaagauggccugaguaag

SEQ ID NO: 2327474 - RNA, 19 nt, Artificial Sequence
  Description of Artificial Sequence: Synthetic oligonucleotide
ugcuacaggggcauuagcu

SEQ ID NO: 2327475 - RNA, 19 nt, Artificial Sequence
  Description of Artificial Sequence: Synthetic oligonucleotide
uacugcaggggcccgaccg

SEQ ID NO: 2327476 - RNA, 19 nt, Artificial Sequence
  Description of Artificial Sequence: Synthetic oligonucleotide
gauggccugaguaaggcag

SEQ ID NO: 2327477 - RNA, 19 nt, Artificial Sequence
  Description of Artificial Sequence: Synthetic oligonucleotide
agagaugccucgccgggcc

SEQ ID NO: 2327478 - RNA, 19 nt, Artificial Sequence
  Description of Artificial Sequence: Synthetic oligonucleotide
gagguauuuuauugacugg

SEQ ID NO: 2327479 - RNA, 19 nt, Artificial Sequence
  Description of Artificial Sequence: Synthetic oligonucleotide
acuaaggacauugcuacag

SEQ ID NO: 2327480 - RNA, 19 nt, Artificial Sequence
  Description of Artificial Sequence: Synthetic oligonucleotide
cuugguagggcccuugcgc

SEQ ID NO: 2327481 - RNA, 19 nt, Artificial Sequence
  Description of Artificial Sequence: Synthetic oligonucleotide
gaggagcuaaaccaccucc

SEQ ID NO: 2327482 - RNA, 19 nt, Artificial Sequence
  Description of Artificial Sequence: Synthetic oligonucleotide
uuccuaacucacaaagcug

SEQ ID NO: 2327483 - RNA, 19 nt, Artificial Sequence
  Description of Artificial Sequence: Synthetic oligonucleotide
uggaauuguccugagcuag

SEQ ID NO: 2327484 - RNA, 19 nt, Artificial Sequence
  Description of Artificial Sequence: Synthetic oligonucleotide
uugauucgagucuggaggc

SEQ ID NO: 2327485 - RNA, 19 nt, Artificial Sequence
  Description of Artificial Sequence: Synthetic oligonucleotide
uaaggcaguggcauccaag

SEQ ID NO: 2327486 - RNA, 19 nt, Artificial Sequence
  Description of Artificial Sequence: Synthetic oligonucleotide
ucguagagaugccucgccg

SEQ ID NO: 2327487 - RNA, 19 nt, Artificial Sequence
  Description of Artificial Sequence: Synthetic oligonucleotide
cuagccuauuuccaagugc

SEQ ID NO: 2327488 - RNA, 19 nt, Artificial Sequence
  Description of Artificial Sequence: Synthetic oligonucleotide
uuuccaagugccuuucuuc

SEQ ID NO: 2327489 - RNA, 19 nt, Artificial Sequence
  Description of Artificial Sequence: Synthetic oligonucleotide
uucaacgccgcccgcuucg

SEQ ID NO: 2327490 - RNA, 19 nt, Artificial Sequence
  Description of Artificial Sequence: Synthetic oligonucleotide
accccaguugauucgaguc

SEQ ID NO: 2327491 - RNA, 19 nt, Artificial Sequence
  Description of Artificial Sequence: Synthetic oligonucleotide
augaaagauggccugagua

SEQ ID NO: 2327492 - RNA, 19 nt, Artificial Sequence
  Description of Artificial Sequence: Synthetic oligonucleotide
uggaggcuggcuauauccg

SEQ ID NO: 2327493 - RNA, 19 nt, Artificial Sequence
  Description of Artificial Sequence: Synthetic oligonucleotide
ugagggaccacagaggauc

SEQ ID NO: 2327494 - RNA, 19 nt, Artificial Sequence
  Description of Artificial Sequence: Synthetic oligonucleotide
cuauguucaaugccuucgg

SEQ ID NO: 2327495 - RNA, 19 nt, Artificial Sequence
  Description of Artificial Sequence: Synthetic oligonucleotide
auugacuggaauuguccug

SEQ ID NO: 2327496 - RNA, 19 nt, Artificial Sequence
  Description of Artificial Sequence: Synthetic oligonucleotide
cuaaggacauugcuacagg

SEQ ID NO: 2327497 - RNA, 19 nt, Artificial Sequence
  Description of Artificial Sequence: Synthetic oligonucleotide
uuaugaaagauggccugag

SEQ ID NO: 2327498 - RNA, 19 nt, Artificial Sequence
  Description of Artificial Sequence: Synthetic oligonucleotide
acagacuaaggacauugcu

SEQ ID NO: 2327499 - RNA, 19 nt, Artificial Sequence
  Description of Artificial Sequence: Synthetic oligonucleotide
agaccugaggcuccauucg

SEQ ID NO: 2327500 - RNA, 19 nt, Artificial Sequence
  Description of Artificial Sequence: Synthetic oligonucleotide
ugagggaccaagauuccaa

SEQ ID NO: 2327501 - RNA, 19 nt, Artificial Sequence
  Description of Artificial Sequence: Synthetic oligonucleotide
cuugggucuugguagggcc

SEQ ID NO: 2327502 - RNA, 19 nt, Artificial Sequence
  Description of Artificial Sequence: Synthetic oligonucleotide
uuuuauugacuggaauugu

SEQ ID NO: 2327503 - RNA, 19 nt, Artificial Sequence
  Description of Artificial Sequence: Synthetic oligonucleotide
aauuguccugagcuagccu

SEQ ID NO: 2327504 - RNA, 19 nt, Artificial Sequence
  Description of Artificial Sequence: Synthetic oligonucleotide
gagacaggggcuauuauga

SEQ ID NO: 2327505 - RNA, 19 nt, Artificial Sequence
  Description of Artificial Sequence: Synthetic oligonucleotide
uauguucaaugccuucgga

SEQ ID NO: 2327506 - RNA, 19 nt, Artificial Sequence
  Description of Artificial Sequence: Synthetic oligonucleotide
ugccuucggaaguagauuc

SEQ ID NO: 2327507 - RNA, 19 nt, Artificial Sequence
  Description of Artificial Sequence: Synthetic oligonucleotide
acgccgaggagcuaaacca

SEQ ID NO: 2327508 - RNA, 19 nt, Artificial Sequence
  Description of Artificial Sequence: Synthetic oligonucleotide
uuccaagccgccuaaucac

SEQ ID NO: 2327509 - RNA, 19 nt, Artificial Sequence
  Description of Artificial Sequence: Synthetic oligonucleotide
gggaccaagauuccaaacc

SEQ ID NO: 2327510 - RNA, 19 nt, Artificial Sequence
  Description of Artificial Sequence: Synthetic oligonucleotide
ucacaaagcuggaaucaac

SEQ ID NO: 2327511 - RNA, 19 nt, Artificial Sequence
  Description of Artificial Sequence: Synthetic oligonucleotide
cugggagucagcuuugauc

SEQ ID NO: 2327512 - RNA, 19 nt, Artificial Sequence
  Description of Artificial Sequence: Synthetic oligonucleotide
ggggcauuagcugagacag

SEQ ID NO: 2327513 - RNA, 19 nt, Artificial Sequence
  Description of Artificial Sequence: Synthetic oligonucleotide
guagagaugccucgccggg

SEQ ID NO: 2327514 - RNA, 19 nt, Artificial Sequence
  Description of Artificial Sequence: Synthetic oligonucleotide
uugguagggcccuugcgcc

SEQ ID NO: 2327515 - RNA, 19 nt, Artificial Sequence
  Description of Artificial Sequence: Synthetic oligonucleotide
auagcgagccuuggcaagc

SEQ ID NO: 2327516 - RNA, 19 nt, Artificial Sequence
  Description of Artificial Sequence: Synthetic oligonucleotide
aaaccaguucaagggaucu

SEQ ID NO: 2327517 - RNA, 19 nt, Artificial Sequence
  Description of Artificial Sequence: Synthetic oligonucleotide
uucguagagaugccucgcc

SEQ ID NO: 2327518 - RNA, 19 nt, Artificial Sequence
  Description of Artificial Sequence: Synthetic oligonucleotide
gaaccgggaguccaacucc

SEQ ID NO: 2327519 - RNA, 19 nt, Artificial Sequence
  Description of Artificial Sequence: Synthetic oligonucleotide
cuucggaaguagauucagg

SEQ ID NO: 2327520 - RNA, 19 nt, Artificial Sequence
  Description of Artificial Sequence: Synthetic oligonucleotide
ggcauuagcugagacaggg

SEQ ID NO: 2327521 - RNA, 19 nt, Artificial Sequence
  Description of Artificial Sequence: Synthetic oligonucleotide
auggcuauguucaaugccu

SEQ ID NO: 2327522 - RNA, 19 nt, Artificial Sequence
  Description of Artificial Sequence: Synthetic oligonucleotide
aaugccuucggaaguagau

SEQ ID NO: 2327523 - RNA, 19 nt, Artificial Sequence
  Description of Artificial Sequence: Synthetic oligonucleotide
uccacccgggcguucaacg

SEQ ID NO: 2327524 - RNA, 19 nt, Artificial Sequence
  Description of Artificial Sequence: Synthetic oligonucleotide
gaguaaggcaguggcaucc

SEQ ID NO: 2327525 - RNA, 19 nt, Artificial Sequence
  Description of Artificial Sequence: Synthetic oligonucleotide
caagggaucuugagggacc

SEQ ID NO: 2327526 - RNA, 19 nt, Artificial Sequence
  Description of Artificial Sequence: Synthetic oligonucleotide
cuugagggaccacagagga

SEQ ID NO: 2327527 - RNA, 19 nt, Artificial Sequence
  Description of Artificial Sequence: Synthetic oligonucleotide
gcuauguucaaugccuucg

SEQ ID NO: 2327528 - RNA, 19 nt, Artificial Sequence
  Description of Artificial Sequence: Synthetic oligonucleotide
ucccgcagggccgaaaccg

SEQ ID NO: 2327529 - RNA, 19 nt, Artificial Sequence
  Description of Artificial Sequence: Synthetic oligonucleotide
cuauuaugaaagauggccu

SEQ ID NO: 2327530 - RNA, 19 nt, Artificial Sequence
  Description of Artificial Sequence: Synthetic oligonucleotide
ucggaaguagauucagguc

SEQ ID NO: 2327531 - RNA, 19 nt, Artificial Sequence
  Description of Artificial Sequence: Synthetic oligonucleotide
caaauuuccuaacucaacu

SEQ ID NO: 2327532 - RNA, 19 nt, Artificial Sequence
  Description of Artificial Sequence: Synthetic oligonucleotide
auuaugaaagauggccuga

SEQ ID NO: 2327533 - RNA, 19 nt, Artificial Sequence
  Description of Artificial Sequence: Synthetic oligonucleotide
gaauuguccugagcuagcc

SEQ ID NO: 2327534 - RNA, 19 nt, Artificial Sequence
  Description of Artificial Sequence: Synthetic oligonucleotide
uccgaccccaguugauucg

SEQ ID NO: 2327535 - RNA, 19 nt, Artificial Sequence
  Description of Artificial Sequence: Synthetic oligonucleotide
ucaagggaucuugagggac

SEQ ID NO: 2327536 - RNA, 19 nt, Artificial Sequence
  Description of Artificial Sequence: Synthetic oligonucleotide
uuugaucacccugaagguc

SEQ ID NO: 2327537 - RNA, 19 nt, Artificial Sequence
  Description of Artificial Sequence: Synthetic oligonucleotide
accaguucaagggaucuug

SEQ ID NO: 2327538 - RNA, 19 nt, Artificial Sequence
  Description of Artificial Sequence: Synthetic oligonucleotide
cauagcgagccuuggcaag

SEQ ID NO: 2327539 - RNA, 19 nt, Artificial Sequence
  Description of Artificial Sequence: Synthetic oligonucleotide
acccugaaggucugggguc

SEQ ID NO: 2327540 - RNA, 19 nt, Artificial Sequence
  Description of Artificial Sequence: Synthetic oligonucleotide
auugcuacaggggcauuag

SEQ ID NO: 2327541 - RNA, 19 nt, Artificial Sequence
  Description of Artificial Sequence: Synthetic oligonucleotide
aucaaauuuccuaacucaa

SEQ ID NO: 2327542 - RNA, 19 nt, Artificial Sequence
  Description of Artificial Sequence: Synthetic oligonucleotide
aaaccgccauggcccagac

SEQ ID NO: 2327543 - RNA, 19 nt, Artificial Sequence
  Description of Artificial Sequence: Synthetic oligonucleotide
gauucgagucuggaggcug

SEQ ID NO: 2327544 - RNA, 19 nt, Artificial Sequence
  Description of Artificial Sequence: Synthetic oligonucleotide
uucaagggaucuugaggga

SEQ ID NO: 2327545 - RNA, 19 nt, Artificial Sequence
  Description of Artificial Sequence: Synthetic oligonucleotide
cacagacuaaggacauugc

SEQ ID NO: 2327546 - RNA, 19 nt, Artificial Sequence
  Description of Artificial Sequence: Synthetic oligonucleotide
uugggucuugguagggccc

SEQ ID NO: 2327547 - RNA, 19 nt, Artificial Sequence
  Description of Artificial Sequence: Synthetic oligonucleotide
caugcaguaccaugcccag

SEQ ID NO: 2327548 - RNA, 19 nt, Artificial Sequence
  Description of Artificial Sequence: Synthetic oligonucleotide
cauggcauagcgagccuug

SEQ ID NO: 2327549 - RNA, 19 nt, Artificial Sequence
  Description of Artificial Sequence: Synthetic oligonucleotide
gaccaagauuccaaaccag

SEQ ID NO: 2327550 - RNA, 19 nt, Artificial Sequence
  Description of Artificial Sequence: Synthetic oligonucleotide
gagcuaaaccaccuccuuc

SEQ ID NO: 2327551 - RNA, 19 nt, Artificial Sequence
  Description of Artificial Sequence: Synthetic oligonucleotide
cagacuaaggacauugcua

SEQ ID NO: 2327552 - RNA, 19 nt, Artificial Sequence
  Description of Artificial Sequence: Synthetic oligonucleotide
ugccucagccgcuagaguu

SEQ ID NO: 2327553 - RNA, 19 nt, Artificial Sequence
  Description of Artificial Sequence: Synthetic oligonucleotide
uuagcugagacaggggcua

SEQ ID NO: 2327554 - RNA, 19 nt, Artificial Sequence
  Description of Artificial Sequence: Synthetic oligonucleotide
aggggcauuagcugagaca

SEQ ID NO: 2327555 - RNA, 19 nt, Artificial Sequence
  Description of Artificial Sequence: Synthetic oligonucleotide
ccuaacucaacuuccuaac

SEQ ID NO: 2327556 - RNA, 19 nt, Artificial Sequence
  Description of Artificial Sequence: Synthetic oligonucleotide
accacagaggauccugacu

SEQ ID NO: 2327557 - RNA, 19 nt, Artificial Sequence
  Description of Artificial Sequence: Synthetic oligonucleotide
cagaccugaggcuccauuc

SEQ ID NO: 2327558 - RNA, 19 nt, Artificial Sequence
  Description of Artificial Sequence: Synthetic oligonucleotide
ccugagcuagccuauuucc

SEQ ID NO: 2327559 - RNA, 19 nt, Artificial Sequence
  Description of Artificial Sequence: Synthetic oligonucleotide
ggaccaagauuccaaacca

SEQ ID NO: 2327560 - RNA, 19 nt, Artificial Sequence
  Description of Artificial Sequence: Synthetic oligonucleotide
ucagccgcuagaguugcug

SEQ ID NO: 2327561 - RNA, 19 nt, Artificial Sequence
  Description of Artificial Sequence: Synthetic oligonucleotide
gcuacaggggcauuagcug

SEQ ID NO: 2327562 - RNA, 19 nt, Artificial Sequence
  Description of Artificial Sequence: Synthetic oligonucleotide
ugacuccgaccccaguuga

SEQ ID NO: 2327563 - RNA, 19 nt, Artificial Sequence
  Description of Artificial Sequence: Synthetic oligonucleotide
gacuauaggcaugcaguac

SEQ ID NO: 2327564 - RNA, 19 nt, Artificial Sequence
  Description of Artificial Sequence: Synthetic oligonucleotide
ucaaugccuucggaaguag

SEQ ID NO: 2327565 - RNA, 19 nt, Artificial Sequence
  Description of Artificial Sequence: Synthetic oligonucleotide
ccauucgugaggcauacug

SEQ ID NO: 2327566 - RNA, 19 nt, Artificial Sequence
  Description of Artificial Sequence: Synthetic oligonucleotide
ucggggaucugggagucag

SEQ ID NO: 2327567 - RNA, 19 nt, Artificial Sequence
  Description of Artificial Sequence: Synthetic oligonucleotide
cugacuccgaccccaguug

SEQ ID NO: 2327568 - RNA, 19 nt, Artificial Sequence
  Description of Artificial Sequence: Synthetic oligonucleotide
auuagcugagacaggggcu

SEQ ID NO: 2327569 - RNA, 19 nt, Artificial Sequence
  Description of Artificial Sequence: Synthetic oligonucleotide
ugaguaaggcaguggcauc

SEQ ID NO: 2327570 - RNA, 19 nt, Artificial Sequence
  Description of Artificial Sequence: Synthetic oligonucleotide
uugcuacaggggcauuagc

SEQ ID NO: 2327571 - RNA, 19 nt, Artificial Sequence
  Description of Artificial Sequence: Synthetic oligonucleotide
ugaucacccugaaggucug

SEQ ID NO: 2327572 - RNA, 19 nt, Artificial Sequence
  Description of Artificial Sequence: Synthetic oligonucleotide
ccacagaggauccugacuc

SEQ ID NO: 2327573 - RNA, 19 nt, Artificial Sequence
  Description of Artificial Sequence: Synthetic oligonucleotide
gaggcauacugcaggggcc

SEQ ID NO: 2327574 - RNA, 19 nt, Artificial Sequence
  Description of Artificial Sequence: Synthetic oligonucleotide
gucgcuggcgcgcacgcag

SEQ ID NO: 2327575 - RNA, 19 nt, Artificial Sequence
  Description of Artificial Sequence: Synthetic oligonucleotide
uuccuaacucaacuuccua

SEQ ID NO: 2327576 - RNA, 19 nt, Artificial Sequence
  Description of Artificial Sequence: Synthetic oligonucleotide
gcgcccauggcauagcgag

SEQ ID NO: 2327577 - RNA, 19 nt, Artificial Sequence
  Description of Artificial Sequence: Synthetic oligonucleotide
caggucgcugagcagcugc

SEQ ID NO: 2327578 - RNA, 19 nt, Artificial Sequence
  Description of Artificial Sequence: Synthetic oligonucleotide
cagccgcuagaguugcugg

SEQ ID NO: 2327579 - RNA, 19 nt, Artificial Sequence
  Description of Artificial Sequence: Synthetic oligonucleotide
ugcaggaaccgggagucca

SEQ ID NO: 2327580 - RNA, 19 nt, Artificial Sequence
  Description of Artificial Sequence: Synthetic oligonucleotide
ggaaguagauucaggucag

SEQ ID NO: 2327581 - RNA, 19 nt, Artificial Sequence
  Description of Artificial Sequence: Synthetic oligonucleotide
gccgaaaccgccauggccc

SEQ ID NO: 2327582 - RNA, 19 nt, Artificial Sequence
  Description of Artificial Sequence: Synthetic oligonucleotide
ccuucguagagaugccucg

SEQ ID NO: 2327583 - RNA, 19 nt, Artificial Sequence
  Description of Artificial Sequence: Synthetic oligonucleotide
auacugcaggggcccgacc

SEQ ID NO: 2327584 - RNA, 19 nt, Artificial Sequence
  Description of Artificial Sequence: Synthetic oligonucleotide
cuucguagagaugccucgc

SEQ ID NO: 2327585 - RNA, 19 nt, Artificial Sequence
  Description of Artificial Sequence: Synthetic oligonucleotide
gcuggcuauauccgcagcc

SEQ ID NO: 2327586 - RNA, 19 nt, Artificial Sequence
  Description of Artificial Sequence: Synthetic oligonucleotide
ggcauagcgagccuuggca

SEQ ID NO: 2327587 - RNA, 19 nt, Artificial Sequence
  Description of Artificial Sequence: Synthetic oligonucleotide
cugagcuagccuauuucca

SEQ ID NO: 2327588 - RNA, 19 nt, Artificial Sequence
  Description of Artificial Sequence: Synthetic oligonucleotide
auucgagucuggaggcugg

SEQ ID NO: 2327589 - RNA, 19 nt, Artificial Sequence
  Description of Artificial Sequence: Synthetic oligonucleotide
uuguccugagcuagccuau

SEQ ID NO: 2327590 - RNA, 19 nt, Artificial Sequence
  Description of Artificial Sequence: Synthetic oligonucleotide
gacuaaggacauugcuaca

SEQ ID NO: 2327591 - RNA, 19 nt, Artificial Sequence
  Description of Artificial Sequence: Synthetic oligonucleotide
agaugccucgccgggcccc

SEQ ID NO: 2327592 - RNA, 19 nt, Artificial Sequence
  Description of Artificial Sequence: Synthetic oligonucleotide
ggcccgaccgacuuggcgc

SEQ ID NO: 2327593 - RNA, 19 nt, Artificial Sequence
  Description of Artificial Sequence: Synthetic oligonucleotide
uaggacgccgaggagcuaa

SEQ ID NO: 2327594 - RNA, 19 nt, Artificial Sequence
  Description of Artificial Sequence: Synthetic oligonucleotide
ggauccugacucuuggguc

SEQ ID NO: 2327595 - RNA, 19 nt, Artificial Sequence
  Description of Artificial Sequence: Synthetic oligonucleotide
cacgcagaccugaggcucc

SEQ ID NO: 2327596 - RNA, 19 nt, Artificial Sequence
  Description of Artificial Sequence: Synthetic oligonucleotide
ccagacgcuguuaggacgc

SEQ ID NO: 2327597 - RNA, 19 nt, Artificial Sequence
  Description of Artificial Sequence: Synthetic oligonucleotide
ggaaccgggaguccaacuc

SEQ ID NO: 2327598 - RNA, 19 nt, Artificial Sequence
  Description of Artificial Sequence: Synthetic oligonucleotide
cuuugaucacccugaaggu

SEQ ID NO: 2327599 - RNA, 19 nt, Artificial Sequence
  Description of Artificial Sequence: Synthetic oligonucleotide
cuuggcgcccauggcauag

SEQ ID NO: 2327600 - RNA, 19 nt, Artificial Sequence
  Description of Artificial Sequence: Synthetic oligonucleotide
cuccgaccccaguugauuc

SEQ ID NO: 2327601 - RNA, 19 nt, Artificial Sequence
  Description of Artificial Sequence: Synthetic oligonucleotide
agcuugccucaucaaauuu

SEQ ID NO: 2327602 - RNA, 19 nt, Artificial Sequence
  Description of Artificial Sequence: Synthetic oligonucleotide
cggaaguagauucagguca

SEQ ID NO: 2327603 - RNA, 19 nt, Artificial Sequence
  Description of Artificial Sequence: Synthetic oligonucleotide
gccagagguauuuuauuga

SEQ ID NO: 2327604 - RNA, 19 nt, Artificial Sequence
  Description of Artificial Sequence: Synthetic oligonucleotide
uggcuauguucaaugccuu

SEQ ID NO: 2327605 - RNA, 19 nt, Artificial Sequence
  Description of Artificial Sequence: Synthetic oligonucleotide
aggggcccgaccgacuugg

SEQ ID NO: 2327606 - RNA, 19 nt, Artificial Sequence
  Description of Artificial Sequence: Synthetic oligonucleotide
uagcgagccuuggcaagcg

SEQ ID NO: 2327607 - RNA, 19 nt, Artificial Sequence
  Description of Artificial Sequence: Synthetic oligonucleotide
ggaggcuggcuauauccgc

SEQ ID NO: 2327608 - RNA, 19 nt, Artificial Sequence
  Description of Artificial Sequence: Synthetic oligonucleotide
uugagggaccacagaggau

SEQ ID NO: 2327609 - RNA, 19 nt, Artificial Sequence
  Description of Artificial Sequence: Synthetic oligonucleotide
gacgcuguuaggacgccga

SEQ ID NO: 2327610 - RNA, 19 nt, Artificial Sequence
  Description of Artificial Sequence: Synthetic oligonucleotide
cacccgggcguucaacgcc

SEQ ID NO: 2327611 - RNA, 19 nt, Artificial Sequence
  Description of Artificial Sequence: Synthetic oligonucleotide
uagagaugccucgccgggc

SEQ ID NO: 2327612 - RNA, 19 nt, Artificial Sequence
  Description of Artificial Sequence: Synthetic oligonucleotide
aaccgggaguccaacuccu

SEQ ID NO: 2327613 - RNA, 19 nt, Artificial Sequence
  Description of Artificial Sequence: Synthetic oligonucleotide
cccagacgcuguuaggacg

SEQ ID NO: 2327614 - RNA, 19 nt, Artificial Sequence
  Description of Artificial Sequence: Synthetic oligonucleotide
aggggcuauuaugaaagau

SEQ ID NO: 2327615 - RNA, 19 nt, Artificial Sequence
  Description of Artificial Sequence: Synthetic oligonucleotide
agacaggggcuauuaugaa

SEQ ID NO: 2327616 - RNA, 19 nt, Artificial Sequence
  Description of Artificial Sequence: Synthetic oligonucleotide
ugauucgagucuggaggcu

SEQ ID NO: 2327617 - RNA, 19 nt, Artificial Sequence
  Description of Artificial Sequence: Synthetic oligonucleotide
gcgcacgcagaccugaggc

SEQ ID NO: 2327618 - RNA, 19 nt, Artificial Sequence
  Description of Artificial Sequence: Synthetic oligonucleotide
aggaaccgggaguccaacu

SEQ ID NO: 2327619 - RNA, 19 nt, Artificial Sequence
  Description of Artificial Sequence: Synthetic oligonucleotide
cguagagaugccucgccgg

SEQ ID NO: 2327620 - RNA, 19 nt, Artificial Sequence
  Description of Artificial Sequence: Synthetic oligonucleotide
cuaacucaacuuccuaacu

SEQ ID NO: 2327621 - RNA, 19 nt, Artificial Sequence
  Description of Artificial Sequence: Synthetic oligonucleotide
gggcguucaacgccgcccg

SEQ ID NO: 2327622 - RNA, 19 nt, Artificial Sequence
  Description of Artificial Sequence: Synthetic oligonucleotide
acgcuguuaggacgccgag

SEQ ID NO: 2327623 - RNA, 19 nt, Artificial Sequence
  Description of Artificial Sequence: Synthetic oligonucleotide
cuccauucgugaggcauac

SEQ ID NO: 2327624 - RNA, 19 nt, Artificial Sequence
  Description of Artificial Sequence: Synthetic oligonucleotide
agacgcuguuaggacgccg

SEQ ID NO: 2327625 - RNA, 19 nt, Artificial Sequence
  Description of Artificial Sequence: Synthetic oligonucleotide
gaaaccgccauggcccaga

SEQ ID NO: 2327626 - RNA, 19 nt, Artificial Sequence
  Description of Artificial Sequence: Synthetic oligonucleotide
acugcaggggcccgaccga

SEQ ID NO: 2327627 - RNA, 19 nt, Artificial Sequence
  Description of Artificial Sequence: Synthetic oligonucleotide
ccugccgaagacugugagg

SEQ ID NO: 2327628 - RNA, 19 nt, Artificial Sequence
  Description of Artificial Sequence: Synthetic oligonucleotide
cuauauccgcagccagcug

SEQ ID NO: 2327629 - RNA, 19 nt, Artificial Sequence
  Description of Artificial Sequence: Synthetic oligonucleotide
aacacagacuaaggacauu

SEQ ID NO: 2327630 - RNA, 19 nt, Artificial Sequence
  Description of Artificial Sequence: Synthetic oligonucleotide
gcaugcaguaccaugccca

SEQ ID NO: 2327631 - RNA, 19 nt, Artificial Sequence
  Description of Artificial Sequence: Synthetic oligonucleotide
cauacugcaggggcccgac

SEQ ID NO: 2327632 - RNA, 19 nt, Artificial Sequence
  Description of Artificial Sequence: Synthetic oligonucleotide
ggaauuguccugagcuagc

SEQ ID NO: 2327633 - RNA, 19 nt, Artificial Sequence
  Description of Artificial Sequence: Synthetic oligonucleotide
ggcuauuaugaaagauggc

SEQ ID NO: 2327634 - RNA, 19 nt, Artificial Sequence
  Description of Artificial Sequence: Synthetic oligonucleotide
cuggcuauauccgcagcca

SEQ ID NO: 2327635 - RNA, 19 nt, Artificial Sequence
  Description of Artificial Sequence: Synthetic oligonucleotide
ugguagggcccuugcgccu

SEQ ID NO: 2327636 - RNA, 19 nt, Artificial Sequence
  Description of Artificial Sequence: Synthetic oligonucleotide
uucgagucuggaggcuggc

SEQ ID NO: 2327637 - RNA, 19 nt, Artificial Sequence
  Description of Artificial Sequence: Synthetic oligonucleotide
cuggaauuguccugagcua

SEQ ID NO: 2327638 - RNA, 19 nt, Artificial Sequence
  Description of Artificial Sequence: Synthetic oligonucleotide
aaccaguucaagggaucuu

SEQ ID NO: 2327639 - RNA, 19 nt, Artificial Sequence
  Description of Artificial Sequence: Synthetic oligonucleotide
guuaggacgccgaggagcu

SEQ ID NO: 2327640 - RNA, 19 nt, Artificial Sequence
  Description of Artificial Sequence: Synthetic oligonucleotide
caaugccuucggaaguaga

SEQ ID NO: 2327641 - RNA, 19 nt, Artificial Sequence
  Description of Artificial Sequence: Synthetic oligonucleotide
cugaguaaggcaguggcau

SEQ ID NO: 2327642 - RNA, 19 nt, Artificial Sequence
  Description of Artificial Sequence: Synthetic oligonucleotide
gcccauggcauagcgagcc

SEQ ID NO: 2327643 - RNA, 19 nt, Artificial Sequence
  Description of Artificial Sequence: Synthetic oligonucleotide
agucagcuuugaucacccu

SEQ ID NO: 2327644 - RNA, 19 nt, Artificial Sequence
  Description of Artificial Sequence: Synthetic oligonucleotide
aagcuggaaucaacacaga

SEQ ID NO: 2327645 - RNA, 19 nt, Artificial Sequence
  Description of Artificial Sequence: Synthetic oligonucleotide
gcuggaaucaacacagacu

SEQ ID NO: 2327646 - RNA, 19 nt, Artificial Sequence
  Description of Artificial Sequence: Synthetic oligonucleotide
acccgggcguucaacgccg

SEQ ID NO: 2327647 - RNA, 19 nt, Artificial Sequence
  Description of Artificial Sequence: Synthetic oligonucleotide
gacauugcuacaggggcau

SEQ ID NO: 2327648 - RNA, 19 nt, Artificial Sequence
  Description of Artificial Sequence: Synthetic oligonucleotide
accugaggcuccauucgug

SEQ ID NO: 2327649 - RNA, 19 nt, Artificial Sequence
  Description of Artificial Sequence: Synthetic oligonucleotide
ccuucggaaguagauucag

SEQ ID NO: 2327650 - RNA, 19 nt, Artificial Sequence
  Description of Artificial Sequence: Synthetic oligonucleotide
gggaccacagaggauccug

SEQ ID NO: 2327651 - RNA, 19 nt, Artificial Sequence
  Description of Artificial Sequence: Synthetic oligonucleotide
uauccgcagccagcugaag

SEQ ID NO: 2327652 - RNA, 19 nt, Artificial Sequence
  Description of Artificial Sequence: Synthetic oligonucleotide
gccgaagacugugagggac

SEQ ID NO: 2327653 - RNA, 19 nt, Artificial Sequence
  Description of Artificial Sequence: Synthetic oligonucleotide
gaccugaggcuccauucgu

SEQ ID NO: 2327654 - RNA, 19 nt, Artificial Sequence
  Description of Artificial Sequence: Synthetic oligonucleotide
ggcuauguucaaugccuuc

SEQ ID NO: 2327655 - RNA, 19 nt, Artificial Sequence
  Description of Artificial Sequence: Synthetic oligonucleotide
agauuccaaaccaguucaa

SEQ ID NO: 2327656 - RNA, 19 nt, Artificial Sequence
  Description of Artificial Sequence: Synthetic oligonucleotide
cuugcgccuucguagagau

SEQ ID NO: 2327657 - RNA, 19 nt, Artificial Sequence
  Description of Artificial Sequence: Synthetic oligonucleotide
ucgcuggcgcgcacgcaga

SEQ ID NO: 2327658 - RNA, 19 nt, Artificial Sequence
  Description of Artificial Sequence: Synthetic oligonucleotide
cucccgcagggccgaaacc

SEQ ID NO: 2327659 - RNA, 19 nt, Artificial Sequence
  Description of Artificial Sequence: Synthetic oligonucleotide
auauccgcagccagcugaa

SEQ ID NO: 2327660 - RNA, 19 nt, Artificial Sequence
  Description of Artificial Sequence: Synthetic oligonucleotide
gaccccaguugauucgagu

SEQ ID NO: 2327661 - RNA, 19 nt, Artificial Sequence
  Description of Artificial Sequence: Synthetic oligonucleotide
acuccgaccccaguugauu

SEQ ID NO: 2327662 - RNA, 19 nt, Artificial Sequence
  Description of Artificial Sequence: Synthetic oligonucleotide
ggagcugacuccgacccca

SEQ ID NO: 2327663 - RNA, 19 nt, Artificial Sequence
  Description of Artificial Sequence: Synthetic oligonucleotide
uugcgccuucguagagaug

SEQ ID NO: 2327664 - RNA, 19 nt, Artificial Sequence
  Description of Artificial Sequence: Synthetic oligonucleotide
auggccugaguaaggcagu

SEQ ID NO: 2327665 - RNA, 19 nt, Artificial Sequence
  Description of Artificial Sequence: Synthetic oligonucleotide
ccgggaguccaacuccucc

SEQ ID NO: 2327666 - RNA, 19 nt, Artificial Sequence
  Description of Artificial Sequence: Synthetic oligonucleotide
gccugccgaagacugugag

SEQ ID NO: 2327667 - RNA, 19 nt, Artificial Sequence
  Description of Artificial Sequence: Synthetic oligonucleotide
ucaacgccgcccgcuucgc

SEQ ID NO: 2327668 - RNA, 19 nt, Artificial Sequence
  Description of Artificial Sequence: Synthetic oligonucleotide
ccgcuucgccucuaguucc

SEQ ID NO: 2327669 - RNA, 19 nt, Artificial Sequence
  Description of Artificial Sequence: Synthetic oligonucleotide
gggcccgaccgacuuggcg

SEQ ID NO: 2327670 - RNA, 19 nt, Artificial Sequence
  Description of Artificial Sequence: Synthetic oligonucleotide
agccuauuuccaagugccu

SEQ ID NO: 2327671 - RNA, 19 nt, Artificial Sequence
  Description of Artificial Sequence: Synthetic oligonucleotide
gcauagcgagccuuggcaa

SEQ ID NO: 2327672 - RNA, 19 nt, Artificial Sequence
  Description of Artificial Sequence: Synthetic oligonucleotide
gcuauauccgcagccagcu

SEQ ID NO: 2327673 - RNA, 19 nt, Artificial Sequence
  Description of Artificial Sequence: Synthetic oligonucleotide
cccgcuucgccucuaguuc

SEQ ID NO: 2327674 - RNA, 19 nt, Artificial Sequence
  Description of Artificial Sequence: Synthetic oligonucleotide
caggggcuauuaugaaaga

SEQ ID NO: 2327675 - RNA, 19 nt, Artificial Sequence
  Description of Artificial Sequence: Synthetic oligonucleotide
gcuagaguugcugggacua

SEQ ID NO: 2327676 - RNA, 19 nt, Artificial Sequence
  Description of Artificial Sequence: Synthetic oligonucleotide
ggcccagacgcuguuagga

SEQ ID NO: 2327677 - RNA, 19 nt, Artificial Sequence
  Description of Artificial Sequence: Synthetic oligonucleotide
ccuuccaagccgccuaauc

SEQ ID NO: 2327678 - RNA, 19 nt, Artificial Sequence
  Description of Artificial Sequence: Synthetic oligonucleotide
cugggcgucgcuggcgcgc

SEQ ID NO: 2327679 - RNA, 19 nt, Artificial Sequence
  Description of Artificial Sequence: Synthetic oligonucleotide
guucaacgccgcccgcuuc

SEQ ID NO: 2327680 - RNA, 19 nt, Artificial Sequence
  Description of Artificial Sequence: Synthetic oligonucleotide
ggacauugcuacaggggca

SEQ ID NO: 2327681 - RNA, 19 nt, Artificial Sequence
  Description of Artificial Sequence: Synthetic oligonucleotide
ggccugaguaaggcagugg

SEQ ID NO: 2327682 - RNA, 19 nt, Artificial Sequence
  Description of Artificial Sequence: Synthetic oligonucleotide
gcgagccuuggcaagcgag

SEQ ID NO: 2327683 - RNA, 19 nt, Artificial Sequence
  Description of Artificial Sequence: Synthetic oligonucleotide
agcugacuccgaccccagu

SEQ ID NO: 2327684 - RNA, 19 nt, Artificial Sequence
  Description of Artificial Sequence: Synthetic oligonucleotide
ccagcccuccuccacccgg

SEQ ID NO: 2327685 - RNA, 19 nt, Artificial Sequence
  Description of Artificial Sequence: Synthetic oligonucleotide
acaggggcauuagcugaga

SEQ ID NO: 2327686 - RNA, 19 nt, Artificial Sequence
  Description of Artificial Sequence: Synthetic oligonucleotide
ggguccauccugggcgucg

SEQ ID NO: 2327687 - RNA, 19 nt, Artificial Sequence
  Description of Artificial Sequence: Synthetic oligonucleotide
gccgaggagcuaaaccacc

SEQ ID NO: 2327688 - RNA, 19 nt, Artificial Sequence
  Description of Artificial Sequence: Synthetic oligonucleotide
uccauucgugaggcauacu

SEQ ID NO: 2327689 - RNA, 19 nt, Artificial Sequence
  Description of Artificial Sequence: Synthetic oligonucleotide
uguccugagcuagccuauu

SEQ ID NO: 2327690 - RNA, 19 nt, Artificial Sequence
  Description of Artificial Sequence: Synthetic oligonucleotide
gcccagacgcuguuaggac

SEQ ID NO: 2327691 - RNA, 19 nt, Artificial Sequence
  Description of Artificial Sequence: Synthetic oligonucleotide
ggcuggcuauauccgcagc

SEQ ID NO: 2327692 - RNA, 19 nt, Artificial Sequence
  Description of Artificial Sequence: Synthetic oligonucleotide
gggccugccgaagacugug

SEQ ID NO: 2327693 - RNA, 19 nt, Artificial Sequence
  Description of Artificial Sequence: Synthetic oligonucleotide
gccucagccgcuagaguug

SEQ ID NO: 2327694 - RNA, 19 nt, Artificial Sequence
  Description of Artificial Sequence: Synthetic oligonucleotide
ccuaacucacaaagcugga

SEQ ID NO: 2327695 - RNA, 19 nt, Artificial Sequence
  Description of Artificial Sequence: Synthetic oligonucleotide
cagacgcuguuaggacgcc

SEQ ID NO: 2327696 - RNA, 19 nt, Artificial Sequence
  Description of Artificial Sequence: Synthetic oligonucleotide
cccggagcugacuccgacc

SEQ ID NO: 2327697 - RNA, 19 nt, Artificial Sequence
  Description of Artificial Sequence: Synthetic oligonucleotide
gccuucguagagaugccuc

SEQ ID NO: 2327698 - RNA, 19 nt, Artificial Sequence
  Description of Artificial Sequence: Synthetic oligonucleotide
ccaguucaagggaucuuga

SEQ ID NO: 2327699 - RNA, 19 nt, Artificial Sequence
  Description of Artificial Sequence: Synthetic oligonucleotide
caacgccgcccgcuucgcc

SEQ ID NO: 2327700 - RNA, 19 nt, Artificial Sequence
  Description of Artificial Sequence: Synthetic oligonucleotide
ccacccgggcguucaacgc

SEQ ID NO: 2327701 - RNA, 19 nt, Artificial Sequence
  Description of Artificial Sequence: Synthetic oligonucleotide
gcccgaccgacuuggcgcc

SEQ ID NO: 2327702 - RNA, 19 nt, Artificial Sequence
  Description of Artificial Sequence: Synthetic oligonucleotide
cccaggguccaacuccuuc

SEQ ID NO: 2327703 - RNA, 19 nt, Artificial Sequence
  Description of Artificial Sequence: Synthetic oligonucleotide
acuuggcgcccauggcaua

SEQ ID NO: 2327704 - RNA, 19 nt, Artificial Sequence
  Description of Artificial Sequence: Synthetic oligonucleotide
ugggcgucgcuggcgcgca

SEQ ID NO: 2327705 - RNA, 19 nt, Artificial Sequence
  Description of Artificial Sequence: Synthetic oligonucleotide
cugcaggggcccgaccgac

SEQ ID NO: 2327706 - RNA, 19 nt, Artificial Sequence
  Description of Artificial Sequence: Synthetic oligonucleotide
gcgagagccagcccuccuc

SEQ ID NO: 2327707 - RNA, 19 nt, Artificial Sequence
  Description of Artificial Sequence: Synthetic oligonucleotide
cagggccgaaaccgccaug

SEQ ID NO: 2327708 - RNA, 19 nt, Artificial Sequence
  Description of Artificial Sequence: Synthetic oligonucleotide
ggcaagcgagagccagccc

SEQ ID NO: 2327709 - RNA, 19 nt, Artificial Sequence
  Description of Artificial Sequence: Synthetic oligonucleotide
uccuuccaagccgccuaau

SEQ ID NO: 2327710 - RNA, 19 nt, Artificial Sequence
  Description of Artificial Sequence: Synthetic oligonucleotide
agggcccuugcgccuucgu

SEQ ID NO: 2327711 - RNA, 19 nt, Artificial Sequence
  Description of Artificial Sequence: Synthetic oligonucleotide
ccgacuuggcgcccauggc

SEQ ID NO: 2327712 - RNA, 19 nt, Artificial Sequence
  Description of Artificial Sequence: Synthetic oligonucleotide
ccgcuagaguugcugggac

SEQ ID NO: 2327713 - RNA, 19 nt, Artificial Sequence
  Description of Artificial Sequence: Synthetic oligonucleotide
gaugccucgccgggcccca

SEQ ID NO: 2327714 - RNA, 19 nt, Artificial Sequence
  Description of Artificial Sequence: Synthetic oligonucleotide
ccucagccgcuagaguugc

SEQ ID NO: 2327715 - RNA, 19 nt, Artificial Sequence
  Description of Artificial Sequence: Synthetic oligonucleotide
cagcuuugaucacccugaa

SEQ ID NO: 2327716 - RNA, 19 nt, Artificial Sequence
  Description of Artificial Sequence: Synthetic oligonucleotide
agucuggaggcuggcuaua

SEQ ID NO: 2327717 - RNA, 19 nt, Artificial Sequence
  Description of Artificial Sequence: Synthetic oligonucleotide
cuccuuccaagccgccuaa

SEQ ID NO: 2327718 - RNA, 19 nt, Artificial Sequence
  Description of Artificial Sequence: Synthetic oligonucleotide
cagcuugccucaucaaauu

SEQ ID NO: 2327719 - RNA, 19 nt, Artificial Sequence
  Description of Artificial Sequence: Synthetic oligonucleotide
cuccacccgggcguucaac

SEQ ID NO: 2327720 - RNA, 19 nt, Artificial Sequence
  Description of Artificial Sequence: Synthetic oligonucleotide
caggggcccgaccgacuug

SEQ ID NO: 2327721 - RNA, 19 nt, Artificial Sequence
  Description of Artificial Sequence: Synthetic oligonucleotide
gccgcuagaguugcuggga

SEQ ID NO: 2327722 - RNA, 19 nt, Artificial Sequence
  Description of Artificial Sequence: Synthetic oligonucleotide
gcugacuccgaccccaguu

SEQ ID NO: 2327723 - RNA, 19 nt, Artificial Sequence
  Description of Artificial Sequence: Synthetic oligonucleotide
ggagcuaaaccaccuccuu

SEQ ID NO: 2327724 - RNA, 19 nt, Artificial Sequence
  Description of Artificial Sequence: Synthetic oligonucleotide
cgccgaggagcuaaaccac

SEQ ID NO: 2327725 - RNA, 19 nt, Artificial Sequence
  Description of Artificial Sequence: Synthetic oligonucleotide
gggccgaaaccgccauggc

SEQ ID NO: 2327726 - RNA, 19 nt, Artificial Sequence
  Description of Artificial Sequence: Synthetic oligonucleotide
agcugagacaggggcuauu

SEQ ID NO: 2327727 - RNA, 19 nt, Artificial Sequence
  Description of Artificial Sequence: Synthetic oligonucleotide
cgcuguuaggacgccgagg

SEQ ID NO: 2327728 - RNA, 19 nt, Artificial Sequence
  Description of Artificial Sequence: Synthetic oligonucleotide
caugcccagccagagguau

SEQ ID NO: 2327729 - RNA, 19 nt, Artificial Sequence
  Description of Artificial Sequence: Synthetic oligonucleotide
gccuucggaaguagauuca

SEQ ID NO: 2327730 - RNA, 19 nt, Artificial Sequence
  Description of Artificial Sequence: Synthetic oligonucleotide
acgcagaccugaggcucca

SEQ ID NO: 2327731 - RNA, 19 nt, Artificial Sequence
  Description of Artificial Sequence: Synthetic oligonucleotide
ggcauccaagauggcuaug

SEQ ID NO: 2327732 - RNA, 19 nt, Artificial Sequence
  Description of Artificial Sequence: Synthetic oligonucleotide
cgggcguucaacgccgccc

SEQ ID NO: 2327733 - RNA, 19 nt, Artificial Sequence
  Description of Artificial Sequence: Synthetic oligonucleotide
ggcguucaacgccgcccgc

SEQ ID NO: 2327734 - RNA, 19 nt, Artificial Sequence
  Description of Artificial Sequence: Synthetic oligonucleotide
ccaacuccucccgcagggc

SEQ ID NO: 2327735 - RNA, 19 nt, Artificial Sequence
  Description of Artificial Sequence: Synthetic oligonucleotide
gcgucgcuggcgcgcacgc

SEQ ID NO: 2327736 - RNA, 19 nt, Artificial Sequence
  Description of Artificial Sequence: Synthetic oligonucleotide
acauugcuacaggggcauu

SEQ ID NO: 2327737 - RNA, 19 nt, Artificial Sequence
  Description of Artificial Sequence: Synthetic oligonucleotide
cccggaagcuggccugggc

SEQ ID NO: 2327738 - RNA, 19 nt, Artificial Sequence
  Description of Artificial Sequence: Synthetic oligonucleotide
gcucagcuugccucaucaa

SEQ ID NO: 2327739 - RNA, 19 nt, Artificial Sequence
  Description of Artificial Sequence: Synthetic oligonucleotide
gcuggcgcgcacgcagacc

SEQ ID NO: 2327740 - RNA, 19 nt, Artificial Sequence
  Description of Artificial Sequence: Synthetic oligonucleotide
gccuauuuccaagugccuu

SEQ ID NO: 2327741 - RNA, 19 nt, Artificial Sequence
  Description of Artificial Sequence: Synthetic oligonucleotide
cccuugcgccuucguagag

SEQ ID NO: 2327742 - RNA, 19 nt, Artificial Sequence
  Description of Artificial Sequence: Synthetic oligonucleotide
ggcgcgcacgcagaccuga

SEQ ID NO: 2327743 - RNA, 19 nt, Artificial Sequence
  Description of Artificial Sequence: Synthetic oligonucleotide
gacuccgaccccaguugau

SEQ ID NO: 2327744 - RNA, 19 nt, Artificial Sequence
  Description of Artificial Sequence: Synthetic oligonucleotide
aggacgccgaggagcuaaa

SEQ ID NO: 2327745 - RNA, 19 nt, Artificial Sequence
  Description of Artificial Sequence: Synthetic oligonucleotide
ccgaggagcuaaaccaccu

SEQ ID NO: 2327746 - RNA, 19 nt, Artificial Sequence
  Description of Artificial Sequence: Synthetic oligonucleotide
cuagaguugcugggacuau

SEQ ID NO: 2327747 - RNA, 19 nt, Artificial Sequence
  Description of Artificial Sequence: Synthetic oligonucleotide
cgcccauggcauagcgagc

SEQ ID NO: 2327748 - RNA, 19 nt, Artificial Sequence
  Description of Artificial Sequence: Synthetic oligonucleotide
gcgccuucguagagaugcc

SEQ ID NO: 2327749 - RNA, 19 nt, Artificial Sequence
  Description of Artificial Sequence: Synthetic oligonucleotide
gcaggaaccgggaguccaa

SEQ ID NO: 2327750 - RNA, 19 nt, Artificial Sequence
  Description of Artificial Sequence: Synthetic oligonucleotide
ccgaaaccgccauggccca

SEQ ID NO: 2327751 - RNA, 19 nt, Artificial Sequence
  Description of Artificial Sequence: Synthetic oligonucleotide
ggcgcccauggcauagcga

SEQ ID NO: 2327752 - RNA, 19 nt, Artificial Sequence
  Description of Artificial Sequence: Synthetic oligonucleotide
ggacgccgaggagcuaaac

SEQ ID NO: 2327753 - RNA, 19 nt, Artificial Sequence
  Description of Artificial Sequence: Synthetic oligonucleotide
gcccgcuucgccucuaguu

SEQ ID NO: 2327754 - RNA, 19 nt, Artificial Sequence
  Description of Artificial Sequence: Synthetic oligonucleotide
cgaccccaguugauucgag

SEQ ID NO: 2327755 - RNA, 19 nt, Artificial Sequence
  Description of Artificial Sequence: Synthetic oligonucleotide
ccgggcguucaacgccgcc

SEQ ID NO: 2327756 - RNA, 19 nt, Artificial Sequence
  Description of Artificial Sequence: Synthetic oligonucleotide
cucggggaucugggaguca

SEQ ID NO: 2327757 - RNA, 19 nt, Artificial Sequence
  Description of Artificial Sequence: Synthetic oligonucleotide
ccgaccccaguugauucga

SEQ ID NO: 2327758 - RNA, 19 nt, Artificial Sequence
  Description of Artificial Sequence: Synthetic oligonucleotide
cgcagggccgaaaccgcca

SEQ ID NO: 2327759 - RNA, 19 nt, Artificial Sequence
  Description of Artificial Sequence: Synthetic oligonucleotide
gcgcgcacgcagaccugag

SEQ ID NO: 2327760 - RNA, 19 nt, Artificial Sequence
  Description of Artificial Sequence: Synthetic oligonucleotide
cccgggcguucaacgccgc

SEQ ID NO: 2327761 - RNA, 19 nt, Artificial Sequence
  Description of Artificial Sequence: Synthetic oligonucleotide
gcaggggcccgaccgacuu

SEQ ID NO: 2327762 - RNA, 19 nt, Artificial Sequence
  Description of Artificial Sequence: Synthetic oligonucleotide
gcguucaacgccgcccgcu

SEQ ID NO: 2327763 - RNA, 19 nt, Artificial Sequence
  Description of Artificial Sequence: Synthetic oligonucleotide
gguagggcccuugcgccuu

SEQ ID NO: 2327764 - RNA, 19 nt, Artificial Sequence
  Description of Artificial Sequence: Synthetic oligonucleotide
ccgcccgcuucgccucuag

SEQ ID NO: 2327765 - RNA, 19 nt, Artificial Sequence
  Description of Artificial Sequence: Synthetic oligonucleotide
cgcuggcgcgcacgcagac

SEQ ID NO: 2327766 - RNA, 19 nt, Artificial Sequence
  Description of Artificial Sequence: Synthetic oligonucleotide
cgcuagaguugcugggacu

SEQ ID NO: 2327767 - RNA, 19 nt, Artificial Sequence
  Description of Artificial Sequence: Synthetic oligonucleotide
cccgaccgacuuggcgccc

SEQ ID NO: 2327768 - RNA, 19 nt, Artificial Sequence
  Description of Artificial Sequence: Synthetic oligonucleotide
ccgaccgacuuggcgccca

SEQ ID NO: 2327769 - RNA, 19 nt, Artificial Sequence
  Description of Artificial Sequence: Synthetic oligonucleotide
gccccacuuccucggggau

SEQ ID NO: 2327770 - RNA, 19 nt, Artificial Sequence
  Description of Artificial Sequence: Synthetic oligonucleotide
cccauggcauagcgagccu

SEQ ID NO: 2327771 - RNA, 19 nt, Artificial Sequence
  Description of Artificial Sequence: Synthetic oligonucleotide
cgcuucgccucuaguuccu

SEQ ID NO: 2327772 - RNA, 19 nt, Artificial Sequence
  Description of Artificial Sequence: Synthetic oligonucleotide
cguucaacgccgcccgcuu

SEQ ID NO: 2327773 - RNA, 19 nt, Artificial Sequence
  Description of Artificial Sequence: Synthetic oligonucleotide
gccucgccgggccccacuu

SEQ ID NO: 2327774 - RNA, 19 nt, Artificial Sequence
  Description of Artificial Sequence: Synthetic oligonucleotide
gccccggagcugacuccga

SEQ ID NO: 2327775 - RNA, 19 nt, Artificial Sequence
  Description of Artificial Sequence: Synthetic oligonucleotide
cgccuucguagagaugccu

SEQ ID NO: 2327776 - RNA, 19 nt, Artificial Sequence
  Description of Artificial Sequence: Synthetic oligonucleotide
ccauggcccagacgcuguu

SEQ ID NO: 2327777 - RNA, 19 nt, Artificial Sequence
  Description of Artificial Sequence: Synthetic oligonucleotide
cgucgcuggcgcgcacgca

SEQ ID NO: 2327778 - RNA, 19 nt, Artificial Sequence
  Description of Artificial Sequence: Synthetic oligonucleotide
gccgcccgcuucgccucua

SEQ ID NO: 2327779 - RNA, 19 nt, Artificial Sequence
  Description of Artificial Sequence: Synthetic oligonucleotide
cgcccgcuucgccucuagu

SEQ ID NO: 2327780 - RNA, 19 nt, Artificial Sequence
  Description of Artificial Sequence: Synthetic oligonucleotide
cgaccgacuuggcgcccau

SEQ ID NO: 2327781 - RNA, 19 nt, Artificial Sequence
  Description of Artificial Sequence: Synthetic oligonucleotide
cgcagaccugaggcuccau

SEQ ID NO: 2327782 - RNA, 19 nt, Artificial Sequence
  Description of Artificial Sequence: Synthetic oligonucleotide
cgccgcccgcuucgccucu

SEQ ID NO: 2327783 - RNA, 19 nt, Artificial Sequence
  Description of Artificial Sequence: Synthetic oligonucleotide
ucauugugaaccaaugucc

SEQ ID NO: 2327784 - RNA, 19 nt, Artificial Sequence
  Description of Artificial Sequence: Synthetic oligonucleotide
ugaaccaauguccaguccc

SEQ ID NO: 2327785 - RNA, 19 nt, Artificial Sequence
  Description of Artificial Sequence: Synthetic oligonucleotide
uaaaucacuuuauuugucc

SEQ ID NO: 2327786 - RNA, 19 nt, Artificial Sequence
  Description of Artificial Sequence: Synthetic oligonucleotide
guagccaucgcucauggcg

SEQ ID NO: 2327787 - RNA, 19 nt, Artificial Sequence
  Description of Artificial Sequence: Synthetic oligonucleotide
uggucuuuggcucuguacc

SEQ ID NO: 2327788 - RNA, 19 nt, Artificial Sequence
  Description of Artificial Sequence: Synthetic oligonucleotide
ucuuuuagggacaccacac

SEQ ID NO: 2327789 - RNA, 19 nt, Artificial Sequence
  Description of Artificial Sequence: Synthetic oligonucleotide
uaggucucaagacugguca

SEQ ID NO: 2327790 - RNA, 19 nt, Artificial Sequence
  Description of Artificial Sequence: Synthetic oligonucleotide
ucgccuaccaccacugugg

SEQ ID NO: 2327791 - RNA, 19 nt, Artificial Sequence
  Description of Artificial Sequence: Synthetic oligonucleotide
ccauaaaucacuuuauuug

SEQ ID NO: 2327792 - RNA, 19 nt, Artificial Sequence
  Description of Artificial Sequence: Synthetic oligonucleotide
ucucccagaucucacagca

SEQ ID NO: 2327793 - RNA, 19 nt, Artificial Sequence
  Description of Artificial Sequence: Synthetic oligonucleotide
uggucaggcggccacaccg

SEQ ID NO: 2327794 - RNA, 19 nt, Artificial Sequence
  Description of Artificial Sequence: Synthetic oligonucleotide
uuauuuguccucacuggca

SEQ ID NO: 2327795 - RNA, 19 nt, Artificial Sequence
  Description of Artificial Sequence: Synthetic oligonucleotide
gucauugugaaccaauguc

SEQ ID NO: 2327796 - RNA, 19 nt, Artificial Sequence
  Description of Artificial Sequence: Synthetic oligonucleotide
uguccagucccuuugcccc

SEQ ID NO: 2327797 - RNA, 19 nt, Artificial Sequence
  Description of Artificial Sequence: Synthetic oligonucleotide
cuguaccucucuuuuaggg

SEQ ID NO: 2327798 - RNA, 19 nt, Artificial Sequence
  Description of Artificial Sequence: Synthetic oligonucleotide
gguccuuucuuccucaagg

SEQ ID NO: 2327799 - RNA, 19 nt, Artificial Sequence
  Description of Artificial Sequence: Synthetic oligonucleotide
uguaccucucuuuuaggga

SEQ ID NO: 2327800 - RNA, 19 nt, Artificial Sequence
  Description of Artificial Sequence: Synthetic oligonucleotide
ugucauugugaaccaaugu

SEQ ID NO: 2327801 - RNA, 19 nt, Artificial Sequence
  Description of Artificial Sequence: Synthetic oligonucleotide
uauuuguccucacuggcau

SEQ ID NO: 2327802 - RNA, 19 nt, Artificial Sequence
  Description of Artificial Sequence: Synthetic oligonucleotide
aggauucaagagcugcugg

SEQ ID NO: 2327803 - RNA, 19 nt, Artificial Sequence
  Description of Artificial Sequence: Synthetic oligonucleotide
ggcaccucuacccacacgg

SEQ ID NO: 2327804 - RNA, 19 nt, Artificial Sequence
  Description of Artificial Sequence: Synthetic oligonucleotide
uacagggcaggauucaaga

SEQ ID NO: 2327805 - RNA, 19 nt, Artificial Sequence
  Description of Artificial Sequence: Synthetic oligonucleotide
auggucuuuggcucuguac

SEQ ID NO: 2327806 - RNA, 19 nt, Artificial Sequence
  Description of Artificial Sequence: Synthetic oligonucleotide
cuucacaggacgauuccgc

SEQ ID NO: 2327807 - RNA, 19 nt, Artificial Sequence
  Description of Artificial Sequence: Synthetic oligonucleotide
uguaggacgggcuggccag

SEQ ID NO: 2327808 - RNA, 19 nt, Artificial Sequence
  Description of Artificial Sequence: Synthetic oligonucleotide
uucccuaggucucaagacu

SEQ ID NO: 2327809 - RNA, 19 nt, Artificial Sequence
  Description of Artificial Sequence: Synthetic oligonucleotide
auaaaucacuuuauuuguc

SEQ ID NO: 2327810 - RNA, 19 nt, Artificial Sequence
  Description of Artificial Sequence: Synthetic oligonucleotide
aagaugucauugugaacca

SEQ ID NO: 2327811 - RNA, 19 nt, Artificial Sequence
  Description of Artificial Sequence: Synthetic oligonucleotide
agggacaccacacucuucu

SEQ ID NO: 2327812 - RNA, 19 nt, Artificial Sequence
  Description of Artificial Sequence: Synthetic oligonucleotide
acuagggucguaucgugug

SEQ ID NO: 2327813 - RNA, 19 nt, Artificial Sequence
  Description of Artificial Sequence: Synthetic oligonucleotide
ucuguaccucucuuuuagg

SEQ ID NO: 2327814 - RNA, 19 nt, Artificial Sequence
  Description of Artificial Sequence: Synthetic oligonucleotide
gaucucacagcacgcacug

SEQ ID NO: 2327815 - RNA, 19 nt, Artificial Sequence
  Description of Artificial Sequence: Synthetic oligonucleotide
ucccuaggucucaagacug

SEQ ID NO: 2327816 - RNA, 19 nt, Artificial Sequence
  Description of Artificial Sequence: Synthetic oligonucleotide
auugugaaccaauguccag

SEQ ID NO: 2327817 - RNA, 19 nt, Artificial Sequence
  Description of Artificial Sequence: Synthetic oligonucleotide
guaccucucuuuuagggac

SEQ ID NO: 2327818 - RNA, 19 nt, Artificial Sequence
  Description of Artificial Sequence: Synthetic oligonucleotide
aaggcacuagggucguauc

SEQ ID NO: 2327819 - RNA, 19 nt, Artificial Sequence
  Description of Artificial Sequence: Synthetic oligonucleotide
uugugaaccaauguccagu

SEQ ID NO: 2327820 - RNA, 19 nt, Artificial Sequence
  Description of Artificial Sequence: Synthetic oligonucleotide
gacgcuagcgggaggaccg

SEQ ID NO: 2327821 - RNA, 19 nt, Artificial Sequence
  Description of Artificial Sequence: Synthetic oligonucleotide
uucacaggacgauuccgcc

SEQ ID NO: 2327822 - RNA, 19 nt, Artificial Sequence
  Description of Artificial Sequence: Synthetic oligonucleotide
cauaaaucacuuuauuugu

SEQ ID NO: 2327823 - RNA, 19 nt, Artificial Sequence
  Description of Artificial Sequence: Synthetic oligonucleotide
ucauggcgaagccucagcu

SEQ ID NO: 2327824 - RNA, 19 nt, Artificial Sequence
  Description of Artificial Sequence: Synthetic oligonucleotide
ugugaaccaauguccaguc

SEQ ID NO: 2327825 - RNA, 19 nt, Artificial Sequence
  Description of Artificial Sequence: Synthetic oligonucleotide
aggcacuagggucguaucg

SEQ ID NO: 2327826 - RNA, 19 nt, Artificial Sequence
  Description of Artificial Sequence: Synthetic oligonucleotide
ucucaagacuggucaggcg

SEQ ID NO: 2327827 - RNA, 19 nt, Artificial Sequence
  Description of Artificial Sequence: Synthetic oligonucleotide
cuucccuaggucucaagac

SEQ ID NO: 2327828 - RNA, 19 nt, Artificial Sequence
  Description of Artificial Sequence: Synthetic oligonucleotide
agccucugcaccaaggcac

SEQ ID NO: 2327829 - RNA, 19 nt, Artificial Sequence
  Description of Artificial Sequence: Synthetic oligonucleotide
agucucccagaucucacag

SEQ ID NO: 2327830 - RNA, 19 nt, Artificial Sequence
  Description of Artificial Sequence: Synthetic oligonucleotide
agggucguaucgugugucc

SEQ ID NO: 2327831 - RNA, 19 nt, Artificial Sequence
  Description of Artificial Sequence: Synthetic oligonucleotide
cagcuuuuccuucuugggc

SEQ ID NO: 2327832 - RNA, 19 nt, Artificial Sequence
  Description of Artificial Sequence: Synthetic oligonucleotide
agcucccgaaaccgggucc

SEQ ID NO: 2327833 - RNA, 19 nt, Artificial Sequence
  Description of Artificial Sequence: Synthetic oligonucleotide
ucacagcacgcacuguccc

SEQ ID NO: 2327834 - RNA, 19 nt, Artificial Sequence
  Description of Artificial Sequence: Synthetic oligonucleotide
cuaagcuccacuggccugg

SEQ ID NO: 2327835 - RNA, 19 nt, Artificial Sequence
  Description of Artificial Sequence: Synthetic oligonucleotide
aaaauggucuuuggcucug

SEQ ID NO: 2327836 - RNA, 19 nt, Artificial Sequence
  Description of Artificial Sequence: Synthetic oligonucleotide
uagccaucgcucauggcga

SEQ ID NO: 2327837 - RNA, 19 nt, Artificial Sequence
  Description of Artificial Sequence: Synthetic oligonucleotide
cauugugaaccaaugucca

SEQ ID NO: 2327838 - RNA, 19 nt, Artificial Sequence
  Description of Artificial Sequence: Synthetic oligonucleotide
ucucuuuuagggacaccac

SEQ ID NO: 2327839 - RNA, 19 nt, Artificial Sequence
  Description of Artificial Sequence: Synthetic oligonucleotide
ucccggucagagcuguccg

SEQ ID NO: 2327840 - RNA, 19 nt, Artificial Sequence
  Description of Artificial Sequence: Synthetic oligonucleotide
agcggcuggcuccaagugg

SEQ ID NO: 2327841 - RNA, 19 nt, Artificial Sequence
  Description of Artificial Sequence: Synthetic oligonucleotide
cucacagcacgcacugucc

SEQ ID NO: 2327842 - RNA, 19 nt, Artificial Sequence
  Description of Artificial Sequence: Synthetic oligonucleotide
gauucaagagcugcuggca

SEQ ID NO: 2327843 - RNA, 19 nt, Artificial Sequence
  Description of Artificial Sequence: Synthetic oligonucleotide
caguccauaaaucacuuua

SEQ ID NO: 2327844 - RNA, 19 nt, Artificial Sequence
  Description of Artificial Sequence: Synthetic oligonucleotide
ccugcaucugguuugcugc

SEQ ID NO: 2327845 - RNA, 19 nt, Artificial Sequence
  Description of Artificial Sequence: Synthetic oligonucleotide
agguagggcaucccucagg

SEQ ID NO: 2327846 - RNA, 19 nt, Artificial Sequence
  Description of Artificial Sequence: Synthetic oligonucleotide
uaucguguguccuggcaaa

SEQ ID NO: 2327847 - RNA, 19 nt, Artificial Sequence
  Description of Artificial Sequence: Synthetic oligonucleotide
ggacaccacacucuucugg

SEQ ID NO: 2327848 - RNA, 19 nt, Artificial Sequence
  Description of Artificial Sequence: Synthetic oligonucleotide
ggcaaaauggucuuuggcu

SEQ ID NO: 2327849 - RNA, 19 nt, Artificial Sequence
  Description of Artificial Sequence: Synthetic oligonucleotide
agggcaggauucaagagcu

SEQ ID NO: 2327850 - RNA, 19 nt, Artificial Sequence
  Description of Artificial Sequence: Synthetic oligonucleotide
cuaggucucaagacugguc

SEQ ID NO: 2327851 - RNA, 19 nt, Artificial Sequence
  Description of Artificial Sequence: Synthetic oligonucleotide
uggcccugcgccuucgugc

SEQ ID NO: 2327852 - RNA, 19 nt, Artificial Sequence
  Description of Artificial Sequence: Synthetic oligonucleotide
agcgcccucacuuucccca

SEQ ID NO: 2327853 - RNA, 19 nt, Artificial Sequence
  Description of Artificial Sequence: Synthetic oligonucleotide
gucguaucguguguccugg

SEQ ID NO: 2327854 - RNA, 19 nt, Artificial Sequence
  Description of Artificial Sequence: Synthetic oligonucleotide
aggucucaagacuggucag

SEQ ID NO: 2327855 - RNA, 19 nt, Artificial Sequence
  Description of Artificial Sequence: Synthetic oligonucleotide
accgguacagggcaggauu

SEQ ID NO: 2327856 - RNA, 19 nt, Artificial Sequence
  Description of Artificial Sequence: Synthetic oligonucleotide
cuucgugccuccuugagcu

SEQ ID NO: 2327857 - RNA, 19 nt, Artificial Sequence
  Description of Artificial Sequence: Synthetic oligonucleotide
accggguccuuucuuccuc

SEQ ID NO: 2327858 - RNA, 19 nt, Artificial Sequence
  Description of Artificial Sequence: Synthetic oligonucleotide
aucugguuugcugcugccg

SEQ ID NO: 2327859 - RNA, 19 nt, Artificial Sequence
  Description of Artificial Sequence: Synthetic oligonucleotide
gacuggcucuguaggacgg

SEQ ID NO: 2327860 - RNA, 19 nt, Artificial Sequence
  Description of Artificial Sequence: Synthetic oligonucleotide
uguccucacuggcaucucu

SEQ ID NO: 2327861 - RNA, 19 nt, Artificial Sequence
  Description of Artificial Sequence: Synthetic oligonucleotide
caauguccagucccuuugc

SEQ ID NO: 2327862 - RNA, 19 nt, Artificial Sequence
  Description of Artificial Sequence: Synthetic oligonucleotide
auccggcuaagcuccacug

SEQ ID NO: 2327863 - RNA, 19 nt, Artificial Sequence
  Description of Artificial Sequence: Synthetic oligonucleotide
aaccggguccuuucuuccu

SEQ ID NO: 2327864 - RNA, 19 nt, Artificial Sequence
  Description of Artificial Sequence: Synthetic oligonucleotide
gucgccuaccaccacugug

SEQ ID NO: 2327865 - RNA, 19 nt, Artificial Sequence
  Description of Artificial Sequence: Synthetic oligonucleotide
cagaucucacagcacgcac

SEQ ID NO: 2327866 - RNA, 19 nt, Artificial Sequence
  Description of Artificial Sequence: Synthetic oligonucleotide
accucuacccacacggcag

SEQ ID NO: 2327867 - RNA, 19 nt, Artificial Sequence
  Description of Artificial Sequence: Synthetic oligonucleotide
gacaccacacucuucuggu

SEQ ID NO: 2327868 - RNA, 19 nt, Artificial Sequence
  Description of Artificial Sequence: Synthetic oligonucleotide
gaagccgcagaagggcucc

SEQ ID NO: 2327869 - RNA, 19 nt, Artificial Sequence
  Description of Artificial Sequence: Synthetic oligonucleotide
cucauggcgaagccucagc

SEQ ID NO: 2327870 - RNA, 19 nt, Artificial Sequence
  Description of Artificial Sequence: Synthetic oligonucleotide
agccaguccauaaaucacu

SEQ ID NO: 2327871 - RNA, 19 nt, Artificial Sequence
  Description of Artificial Sequence: Synthetic oligonucleotide
cugcaccaaggcacuaggg

SEQ ID NO: 2327872 - RNA, 19 nt, Artificial Sequence
  Description of Artificial Sequence: Synthetic oligonucleotide
ucacuuuauuuguccucac

SEQ ID NO: 2327873 - RNA, 19 nt, Artificial Sequence
  Description of Artificial Sequence: Synthetic oligonucleotide
guaucguguguccuggcaa

SEQ ID NO: 2327874 - RNA, 19 nt, Artificial Sequence
  Description of Artificial Sequence: Synthetic oligonucleotide
caggggacuggcucuguag

SEQ ID NO: 2327875 - RNA, 19 nt, Artificial Sequence
  Description of Artificial Sequence: Synthetic oligonucleotide
accucucuuuuagggacac

SEQ ID NO: 2327876 - RNA, 19 nt, Artificial Sequence
  Description of Artificial Sequence: Synthetic oligonucleotide
caggcggccacaccgguac

SEQ ID NO: 2327877 - RNA, 19 nt, Artificial Sequence
  Description of Artificial Sequence: Synthetic oligonucleotide
ccuggcaaagaugucauug

SEQ ID NO: 2327878 - RNA, 19 nt, Artificial Sequence
  Description of Artificial Sequence: Synthetic oligonucleotide
ggcaggauucaagagcugc

SEQ ID NO: 2327879 - RNA, 19 nt, Artificial Sequence
  Description of Artificial Sequence: Synthetic oligonucleotide
guacagggcaggauucaag

SEQ ID NO: 2327880 - RNA, 19 nt, Artificial Sequence
  Description of Artificial Sequence: Synthetic oligonucleotide
agaucucacagcacgcacu

SEQ ID NO: 2327881 - RNA, 19 nt, Artificial Sequence
  Description of Artificial Sequence: Synthetic oligonucleotide
cuacccacacggcagucuc

SEQ ID NO: 2327882 - RNA, 19 nt, Artificial Sequence
  Description of Artificial Sequence: Synthetic oligonucleotide
gugaaccaauguccagucc

SEQ ID NO: 2327883 - RNA, 19 nt, Artificial Sequence
  Description of Artificial Sequence: Synthetic oligonucleotide
ggucucaagacuggucagg

SEQ ID NO: 2327884 - RNA, 19 nt, Artificial Sequence
  Description of Artificial Sequence: Synthetic oligonucleotide
acggaagccaguccauaaa

SEQ ID NO: 2327885 - RNA, 19 nt, Artificial Sequence
  Description of Artificial Sequence: Synthetic oligonucleotide
uagcgggaggaccggcucc

SEQ ID NO: 2327886 - RNA, 19 nt, Artificial Sequence
  Description of Artificial Sequence: Synthetic oligonucleotide
uguagccaucgcucauggc

SEQ ID NO: 2327887 - RNA, 19 nt, Artificial Sequence
  Description of Artificial Sequence: Synthetic oligonucleotide
gaagccucagcuuuuccuu

SEQ ID NO: 2327888 - RNA, 19 nt, Artificial Sequence
  Description of Artificial Sequence: Synthetic oligonucleotide
uggcaccucuacccacacg

SEQ ID NO: 2327889 - RNA, 19 nt, Artificial Sequence
  Description of Artificial Sequence: Synthetic oligonucleotide
gcucauccggcuaagcucc

SEQ ID NO: 2327890 - RNA, 19 nt, Artificial Sequence
  Description of Artificial Sequence: Synthetic oligonucleotide
gugcacacgugcucgcagc

SEQ ID NO: 2327891 - RNA, 19 nt, Artificial Sequence
  Description of Artificial Sequence: Synthetic oligonucleotide
gggaggaccggcuccgggg

SEQ ID NO: 2327892 - RNA, 19 nt, Artificial Sequence
  Description of Artificial Sequence: Synthetic oligonucleotide
accaauguccagucccuuu

SEQ ID NO: 2327893 - RNA, 19 nt, Artificial Sequence
  Description of Artificial Sequence: Synthetic oligonucleotide
caaggagcugcugucucug

SEQ ID NO: 2327894 - RNA, 19 nt, Artificial Sequence
  Description of Artificial Sequence: Synthetic oligonucleotide
caucgcucauggcgaagcc

SEQ ID NO: 2327895 - RNA, 19 nt, Artificial Sequence
  Description of Artificial Sequence: Synthetic oligonucleotide
ggucguaucguguguccug

SEQ ID NO: 2327896 - RNA, 19 nt, Artificial Sequence
  Description of Artificial Sequence: Synthetic oligonucleotide
cucugcaccaaggcacuag

SEQ ID NO: 2327897 - RNA, 19 nt, Artificial Sequence
  Description of Artificial Sequence: Synthetic oligonucleotide
gagcggcuggcuccaagug

SEQ ID NO: 2327898 - RNA, 19 nt, Artificial Sequence
  Description of Artificial Sequence: Synthetic oligonucleotide
agcucagguagggcauccc

SEQ ID NO: 2327899 - RNA, 19 nt, Artificial Sequence
  Description of Artificial Sequence: Synthetic oligonucleotide
caaaauggucuuuggcucu

SEQ ID NO: 2327900 - RNA, 19 nt, Artificial Sequence
  Description of Artificial Sequence: Synthetic oligonucleotide
gucagagcuguccgccacc

SEQ ID NO: 2327901 - RNA, 19 nt, Artificial Sequence
  Description of Artificial Sequence: Synthetic oligonucleotide
cacaccgguacagggcagg

SEQ ID NO: 2327902 - RNA, 19 nt, Artificial Sequence
  Description of Artificial Sequence: Synthetic oligonucleotide
ugagcucauccggcuaagc

SEQ ID NO: 2327903 - RNA, 19 nt, Artificial Sequence
  Description of Artificial Sequence: Synthetic oligonucleotide
uaagcuccacuggccuggg

SEQ ID NO: 2327904 - RNA, 19 nt, Artificial Sequence
  Description of Artificial Sequence: Synthetic oligonucleotide
gcaucugguuugcugcugc

SEQ ID NO: 2327905 - RNA, 19 nt, Artificial Sequence
  Description of Artificial Sequence: Synthetic oligonucleotide
ggugcacacgugcucgcag

SEQ ID NO: 2327906 - RNA, 19 nt, Artificial Sequence
  Description of Artificial Sequence: Synthetic oligonucleotide
ugguuugcugcugccggcu

SEQ ID NO: 2327907 - RNA, 19 nt, Artificial Sequence
  Description of Artificial Sequence: Synthetic oligonucleotide
aggaccggcuccggggcgc

SEQ ID NO: 2327908 - RNA, 19 nt, Artificial Sequence
  Description of Artificial Sequence: Synthetic oligonucleotide
agcgggaggaccggcuccg

SEQ ID NO: 2327909 - RNA, 19 nt, Artificial Sequence
  Description of Artificial Sequence: Synthetic oligonucleotide
gaggaccggcuccggggcg

SEQ ID NO: 2327910 - RNA, 19 nt, Artificial Sequence
  Description of Artificial Sequence: Synthetic oligonucleotide
acggccgcccggugcacac

SEQ ID NO: 2327911 - RNA, 19 nt, Artificial Sequence
  Description of Artificial Sequence: Synthetic oligonucleotide
ccggcuaagcuccacuggc

SEQ ID NO: 2327912 - RNA, 19 nt, Artificial Sequence
  Description of Artificial Sequence: Synthetic oligonucleotide
cuagcgggaggaccggcuc

SEQ ID NO: 2327913 - RNA, 19 nt, Artificial Sequence
  Description of Artificial Sequence: Synthetic oligonucleotide
cuguaggacgggcuggcca

SEQ ID NO: 2327914 - RNA, 19 nt, Artificial Sequence
  Description of Artificial Sequence: Synthetic oligonucleotide
ucguaucguguguccuggc

SEQ ID NO: 2327915 - RNA, 19 nt, Artificial Sequence
  Description of Artificial Sequence: Synthetic oligonucleotide
cacugucccggucagagcu

SEQ ID NO: 2327916 - RNA, 19 nt, Artificial Sequence
  Description of Artificial Sequence: Synthetic oligonucleotide
gcggcuggcuccaaguggg

SEQ ID NO: 2327917 - RNA, 19 nt, Artificial Sequence
  Description of Artificial Sequence: Synthetic oligonucleotide
cuuuuagggacaccacacu

SEQ ID NO: 2327918 - RNA, 19 nt, Artificial Sequence
  Description of Artificial Sequence: Synthetic oligonucleotide
caagacuggucaggcggcc

SEQ ID NO: 2327919 - RNA, 19 nt, Artificial Sequence
  Description of Artificial Sequence: Synthetic oligonucleotide
aucgcucauggcgaagccu

SEQ ID NO: 2327920 - RNA, 19 nt, Artificial Sequence
  Description of Artificial Sequence: Synthetic oligonucleotide
aggagcggcuggcuccaag

SEQ ID NO: 2327921 - RNA, 19 nt, Artificial Sequence
  Description of Artificial Sequence: Synthetic oligonucleotide
gaagggcuccgggccacgg

SEQ ID NO: 2327922 - RNA, 19 nt, Artificial Sequence
  Description of Artificial Sequence: Synthetic oligonucleotide
gcagccuccgcgucgggcc

SEQ ID NO: 2327923 - RNA, 19 nt, Artificial Sequence
  Description of Artificial Sequence: Synthetic oligonucleotide
acacgugcucgcagcgccc

SEQ ID NO: 2327924 - RNA, 19 nt, Artificial Sequence
  Description of Artificial Sequence: Synthetic oligonucleotide
cacggaagccaguccauaa

SEQ ID NO: 2327925 - RNA, 19 nt, Artificial Sequence
  Description of Artificial Sequence: Synthetic oligonucleotide
cacgcacugucccggucag

SEQ ID NO: 2327926 - RNA, 19 nt, Artificial Sequence
  Description of Artificial Sequence: Synthetic oligonucleotide
caccucuacccacacggca

SEQ ID NO: 2327927 - RNA, 19 nt, Artificial Sequence
  Description of Artificial Sequence: Synthetic oligonucleotide
gaaccaauguccagucccu

SEQ ID NO: 2327928 - RNA, 19 nt, Artificial Sequence
  Description of Artificial Sequence: Synthetic oligonucleotide
gcuaagcuccacuggccug

SEQ ID NO: 2327929 - RNA, 19 nt, Artificial Sequence
  Description of Artificial Sequence: Synthetic oligonucleotide
ccuucgugccuccuugagc

SEQ ID NO: 2327930 - RNA, 19 nt, Artificial Sequence
  Description of Artificial Sequence: Synthetic oligonucleotide
ggaagccaguccauaaauc

SEQ ID NO: 2327931 - RNA, 19 nt, Artificial Sequence
  Description of Artificial Sequence: Synthetic oligonucleotide
ggacgggcuggccagcagc

SEQ ID NO: 2327932 - RNA, 19 nt, Artificial Sequence
  Description of Artificial Sequence: Synthetic oligonucleotide
cagguagggcaucccucag

SEQ ID NO: 2327933 - RNA, 19 nt, Artificial Sequence
  Description of Artificial Sequence: Synthetic oligonucleotide
cagucucccagaucucaca

SEQ ID NO: 2327934 - RNA, 19 nt, Artificial Sequence
  Description of Artificial Sequence: Synthetic oligonucleotide
cccagaucucacagcacgc

SEQ ID NO: 2327935 - RNA, 19 nt, Artificial Sequence
  Description of Artificial Sequence: Synthetic oligonucleotide
gagcugcuggcaccucuac

SEQ ID NO: 2327936 - RNA, 19 nt, Artificial Sequence
  Description of Artificial Sequence: Synthetic oligonucleotide
ggaggaccggcuccggggc

SEQ ID NO: 2327937 - RNA, 19 nt, Artificial Sequence
  Description of Artificial Sequence: Synthetic oligonucleotide
gccacaccgguacagggca

SEQ ID NO: 2327938 - RNA, 19 nt, Artificial Sequence
  Description of Artificial Sequence: Synthetic oligonucleotide
cacuuuccccaucuucaca

SEQ ID NO: 2327939 - RNA, 19 nt, Artificial Sequence
  Description of Artificial Sequence: Synthetic oligonucleotide
gcacuagggucguaucgug

SEQ ID NO: 2327940 - RNA, 19 nt, Artificial Sequence
  Description of Artificial Sequence: Synthetic oligonucleotide
cacacggcagucucccaga

SEQ ID NO: 2327941 - RNA, 19 nt, Artificial Sequence
  Description of Artificial Sequence: Synthetic oligonucleotide
ucgcagcgcccucacuuuc

SEQ ID NO: 2327942 - RNA, 19 nt, Artificial Sequence
  Description of Artificial Sequence: Synthetic oligonucleotide
ucaggcggccacaccggua

SEQ ID NO: 2327943 - RNA, 19 nt, Artificial Sequence
  Description of Artificial Sequence: Synthetic oligonucleotide
agaugucauugugaaccaa

SEQ ID NO: 2327944 - RNA, 19 nt, Artificial Sequence
  Description of Artificial Sequence: Synthetic oligonucleotide
gccgcagaagggcuccggg

SEQ ID NO: 2327945 - RNA, 19 nt, Artificial Sequence
  Description of Artificial Sequence: Synthetic oligonucleotide
aggucgccuaccaccacug

SEQ ID NO: 2327946 - RNA, 19 nt, Artificial Sequence
  Description of Artificial Sequence: Synthetic oligonucleotide
ggguccuuucuuccucaag

SEQ ID NO: 2327947 - RNA, 19 nt, Artificial Sequence
  Description of Artificial Sequence: Synthetic oligonucleotide
cacuuuauuuguccucacu

SEQ ID NO: 2327948 - RNA, 19 nt, Artificial Sequence
  Description of Artificial Sequence: Synthetic oligonucleotide
aggacgggcuggccagcag

SEQ ID NO: 2327949 - RNA, 19 nt, Artificial Sequence
  Description of Artificial Sequence: Synthetic oligonucleotide
cuggccagcagcucccgaa

SEQ ID NO: 2327950 - RNA, 19 nt, Artificial Sequence
  Description of Artificial Sequence: Synthetic oligonucleotide
ggucagagcuguccgccac

SEQ ID NO: 2327951 - RNA, 19 nt, Artificial Sequence
  Description of Artificial Sequence: Synthetic oligonucleotide
cuggucaggcggccacacc

SEQ ID NO: 2327952 - RNA, 19 nt, Artificial Sequence
  Description of Artificial Sequence: Synthetic oligonucleotide
ccacacggcagucucccag

SEQ ID NO: 2327953 - RNA, 19 nt, Artificial Sequence
  Description of Artificial Sequence: Synthetic oligonucleotide
ggcccugcgccuucgugcc

SEQ ID NO: 2327954 - RNA, 19 nt, Artificial Sequence
  Description of Artificial Sequence: Synthetic oligonucleotide
ccaucgcucauggcgaagc

SEQ ID NO: 2327955 - RNA, 19 nt, Artificial Sequence
  Description of Artificial Sequence: Synthetic oligonucleotide
cagcucagguagggcaucc

SEQ ID NO: 2327956 - RNA, 19 nt, Artificial Sequence
  Description of Artificial Sequence: Synthetic oligonucleotide
cccugcaucugguuugcug

SEQ ID NO: 2327957 - RNA, 19 nt, Artificial Sequence
  Description of Artificial Sequence: Synthetic oligonucleotide
uggcgaagccucagcuuuu

SEQ ID NO: 2327958 - RNA, 19 nt, Artificial Sequence
  Description of Artificial Sequence: Synthetic oligonucleotide
ucauccggcuaagcuccac

SEQ ID NO: 2327959 - RNA, 19 nt, Artificial Sequence
  Description of Artificial Sequence: Synthetic oligonucleotide
uaggacgggcuggccagca

SEQ ID NO: 2327960 - RNA, 19 nt, Artificial Sequence
  Description of Artificial Sequence: Synthetic oligonucleotide
acacggcagucucccagau

SEQ ID NO: 2327961 - RNA, 19 nt, Artificial Sequence
  Description of Artificial Sequence: Synthetic oligonucleotide
ccuucccuaggucucaaga

SEQ ID NO: 2327962 - RNA, 19 nt, Artificial Sequence
  Description of Artificial Sequence: Synthetic oligonucleotide
gcugagcucauccggcuaa

SEQ ID NO: 2327963 - RNA, 19 nt, Artificial Sequence
  Description of Artificial Sequence: Synthetic oligonucleotide
uccuggcaaagaugucauu

SEQ ID NO: 2327964 - RNA, 19 nt, Artificial Sequence
  Description of Artificial Sequence: Synthetic oligonucleotide
gccuucgugccuccuugag

SEQ ID NO: 2327965 - RNA, 19 nt, Artificial Sequence
  Description of Artificial Sequence: Synthetic oligonucleotide
cagcucccgaaaccggguc

SEQ ID NO: 2327966 - RNA, 19 nt, Artificial Sequence
  Description of Artificial Sequence: Synthetic oligonucleotide
accaaggcacuagggucgu

SEQ ID NO: 2327967 - RNA, 19 nt, Artificial Sequence
  Description of Artificial Sequence: Synthetic oligonucleotide
cccggugcacacgugcucg

SEQ ID NO: 2327968 - RNA, 19 nt, Artificial Sequence
  Description of Artificial Sequence: Synthetic oligonucleotide
gcacgcacugucccgguca

SEQ ID NO: 2327969 - RNA, 19 nt, Artificial Sequence
  Description of Artificial Sequence: Synthetic oligonucleotide
ggcagucucccagaucuca

SEQ ID NO: 2327970 - RNA, 19 nt, Artificial Sequence
  Description of Artificial Sequence: Synthetic oligonucleotide
ggccacaccgguacagggc

SEQ ID NO: 2327971 - RNA, 19 nt, Artificial Sequence
  Description of Artificial Sequence: Synthetic oligonucleotide
cacggcagucucccagauc

SEQ ID NO: 2327972 - RNA, 19 nt, Artificial Sequence
  Description of Artificial Sequence: Synthetic oligonucleotide
cagcgcccucacuuucccc

SEQ ID NO: 2327973 - RNA, 19 nt, Artificial Sequence
  Description of Artificial Sequence: Synthetic oligonucleotide
gcugccgcccgauggccag

SEQ ID NO: 2327974 - RNA, 19 nt, Artificial Sequence
  Description of Artificial Sequence: Synthetic oligonucleotide
gcgccuucgugccuccuug

SEQ ID NO: 2327975 - RNA, 19 nt, Artificial Sequence
  Description of Artificial Sequence: Synthetic oligonucleotide
acaccgguacagggcagga

SEQ ID NO: 2327976 - RNA, 19 nt, Artificial Sequence
  Description of Artificial Sequence: Synthetic oligonucleotide
gcuuuauggcuucaauuuu

SEQ ID NO: 2327977 - RNA, 19 nt, Artificial Sequence
  Description of Artificial Sequence: Synthetic oligonucleotide
gcagcgcccucacuuuccc

SEQ ID NO: 2327978 - RNA, 19 nt, Artificial Sequence
  Description of Artificial Sequence: Synthetic oligonucleotide
cccgaaaccggguccuuuc

SEQ ID NO: 2327979 - RNA, 19 nt, Artificial Sequence
  Description of Artificial Sequence: Synthetic oligonucleotide
ggcuaagcuccacuggccu

SEQ ID NO: 2327980 - RNA, 19 nt, Artificial Sequence
  Description of Artificial Sequence: Synthetic oligonucleotide
ccgguacagggcaggauuc

SEQ ID NO: 2327981 - RNA, 19 nt, Artificial Sequence
  Description of Artificial Sequence: Synthetic oligonucleotide
acgcuagcgggaggaccgg

SEQ ID NO: 2327982 - RNA, 19 nt, Artificial Sequence
  Description of Artificial Sequence: Synthetic oligonucleotide
cuagggucguaucgugugu

SEQ ID NO: 2327983 - RNA, 19 nt, Artificial Sequence
  Description of Artificial Sequence: Synthetic oligonucleotide
cacuagggucguaucgugu

SEQ ID NO: 2327984 - RNA, 19 nt, Artificial Sequence
  Description of Artificial Sequence: Synthetic oligonucleotide
ggcgcagccuccgcgucgg

SEQ ID NO: 2327985 - RNA, 19 nt, Artificial Sequence
  Description of Artificial Sequence: Synthetic oligonucleotide
ggcuccaagugggaaguga

SEQ ID NO: 2327986 - RNA, 19 nt, Artificial Sequence
  Description of Artificial Sequence: Synthetic oligonucleotide
ccggucagagcuguccgcc

SEQ ID NO: 2327987 - RNA, 19 nt, Artificial Sequence
  Description of Artificial Sequence: Synthetic oligonucleotide
ccgcccgauggccagcagg

SEQ ID NO: 2327988 - RNA, 19 nt, Artificial Sequence
  Description of Artificial Sequence: Synthetic oligonucleotide
ucccgaaaccggguccuuu

SEQ ID NO: 2327989 - RNA, 19 nt, Artificial Sequence
  Description of Artificial Sequence: Synthetic oligonucleotide
gcuccaagugggaagugaa

SEQ ID NO: 2327990 - RNA, 19 nt, Artificial Sequence
  Description of Artificial Sequence: Synthetic oligonucleotide
guaggacgggcuggccagc

SEQ ID NO: 2327991 - RNA, 19 nt, Artificial Sequence
  Description of Artificial Sequence: Synthetic oligonucleotide
uucgugccuccuugagcuu

SEQ ID NO: 2327992 - RNA, 19 nt, Artificial Sequence
  Description of Artificial Sequence: Synthetic oligonucleotide
cagcugccgcccgauggcc

SEQ ID NO: 2327993 - RNA, 19 nt, Artificial Sequence
  Description of Artificial Sequence: Synthetic oligonucleotide
gcagaagggcuccgggcca

SEQ ID NO: 2327994 - RNA, 19 nt, Artificial Sequence
  Description of Artificial Sequence: Synthetic oligonucleotide
cuccgggccacggaagcca

SEQ ID NO: 2327995 - RNA, 19 nt, Artificial Sequence
  Description of Artificial Sequence: Synthetic oligonucleotide
gggcgcagccuccgcgucg

SEQ ID NO: 2327996 - RNA, 19 nt, Artificial Sequence
  Description of Artificial Sequence: Synthetic oligonucleotide
ugucccggucagagcuguc

SEQ ID NO: 2327997 - RNA, 19 nt, Artificial Sequence
  Description of Artificial Sequence: Synthetic oligonucleotide
cauccggcuaagcuccacu

SEQ ID NO: 2327998 - RNA, 19 nt, Artificial Sequence
  Description of Artificial Sequence: Synthetic oligonucleotide
caaggcacuagggucguau

SEQ ID NO: 2327999 - RNA, 19 nt, Artificial Sequence
  Description of Artificial Sequence: Synthetic oligonucleotide
ggcacuagggucguaucgu

SEQ ID NO: 2328000 - RNA, 19 nt, Artificial Sequence
  Description of Artificial Sequence: Synthetic oligonucleotide
acgggcuggccagcagcuc

SEQ ID NO: 2328001 - RNA, 19 nt, Artificial Sequence
  Description of Artificial Sequence: Synthetic oligonucleotide
gcagucucccagaucucac

SEQ ID NO: 2328002 - RNA, 19 nt, Artificial Sequence
  Description of Artificial Sequence: Synthetic oligonucleotide
ggcggccacaccgguacag

SEQ ID NO: 2328003 - RNA, 19 nt, Artificial Sequence
  Description of Artificial Sequence: Synthetic oligonucleotide
gcggccacaccgguacagg

SEQ ID NO: 2328004 - RNA, 19 nt, Artificial Sequence
  Description of Artificial Sequence: Synthetic oligonucleotide
ggagcggcuggcuccaagu

SEQ ID NO: 2328005 - RNA, 19 nt, Artificial Sequence
  Description of Artificial Sequence: Synthetic oligonucleotide
caggucgccuaccaccacu

SEQ ID NO: 2328006 - RNA, 19 nt, Artificial Sequence
  Description of Artificial Sequence: Synthetic oligonucleotide
cggcuaagcuccacuggcc

SEQ ID NO: 2328007 - RNA, 19 nt, Artificial Sequence
  Description of Artificial Sequence: Synthetic oligonucleotide
gacgggcuggccagcagcu

SEQ ID NO: 2328008 - RNA, 19 nt, Artificial Sequence
  Description of Artificial Sequence: Synthetic oligonucleotide
cccggucagagcuguccgc

SEQ ID NO: 2328009 - RNA, 19 nt, Artificial Sequence
  Description of Artificial Sequence: Synthetic oligonucleotide
gccuaccaccacuguggcc

SEQ ID NO: 2328010 - RNA, 19 nt, Artificial Sequence
  Description of Artificial Sequence: Synthetic oligonucleotide
cuccgcccgccgacgcuag

SEQ ID NO: 2328011 - RNA, 19 nt, Artificial Sequence
  Description of Artificial Sequence: Synthetic oligonucleotide
gcccgccgacgcuagcggg

SEQ ID NO: 2328012 - RNA, 19 nt, Artificial Sequence
  Description of Artificial Sequence: Synthetic oligonucleotide
cggccacaccgguacaggg

SEQ ID NO: 2328013 - RNA, 19 nt, Artificial Sequence
  Description of Artificial Sequence: Synthetic oligonucleotide
ccgcccggugcacacgugc

SEQ ID NO: 2328014 - RNA, 19 nt, Artificial Sequence
  Description of Artificial Sequence: Synthetic oligonucleotide
ccagaucucacagcacgca

SEQ ID NO: 2328015 - RNA, 19 nt, Artificial Sequence
  Description of Artificial Sequence: Synthetic oligonucleotide
gcuugcuggucacccugca

SEQ ID NO: 2328016 - RNA, 19 nt, Artificial Sequence
  Description of Artificial Sequence: Synthetic oligonucleotide
gcucuguaccucucuuuua

SEQ ID NO: 2328017 - RNA, 19 nt, Artificial Sequence
  Description of Artificial Sequence: Synthetic oligonucleotide
cucauccggcuaagcucca

SEQ ID NO: 2328018 - RNA, 19 nt, Artificial Sequence
  Description of Artificial Sequence: Synthetic oligonucleotide
gcaggauucaagagcugcu

SEQ ID NO: 2328019 - RNA, 19 nt, Artificial Sequence
  Description of Artificial Sequence: Synthetic oligonucleotide
cccgauggccagcagggga

SEQ ID NO: 2328020 - RNA, 19 nt, Artificial Sequence
  Description of Artificial Sequence: Synthetic oligonucleotide
gccgacgcuagcgggagga

SEQ ID NO: 2328021 - RNA, 19 nt, Artificial Sequence
  Description of Artificial Sequence: Synthetic oligonucleotide
cguaucguguguccuggca

SEQ ID NO: 2328022 - RNA, 19 nt, Artificial Sequence
  Description of Artificial Sequence: Synthetic oligonucleotide
gcaccucuacccacacggc

SEQ ID NO: 2328023 - RNA, 19 nt, Artificial Sequence
  Description of Artificial Sequence: Synthetic oligonucleotide
ggcgaagccucagcuuuuc

SEQ ID NO: 2328024 - RNA, 19 nt, Artificial Sequence
  Description of Artificial Sequence: Synthetic oligonucleotide
cuugcuggucacccugcau

SEQ ID NO: 2328025 - RNA, 19 nt, Artificial Sequence
  Description of Artificial Sequence: Synthetic oligonucleotide
cgcagcgcccucacuuucc

SEQ ID NO: 2328026 - RNA, 19 nt, Artificial Sequence
  Description of Artificial Sequence: Synthetic oligonucleotide
cgcgucgggccucacggcc

SEQ ID NO: 2328027 - RNA, 19 nt, Artificial Sequence
  Description of Artificial Sequence: Synthetic oligonucleotide
agccuccgcgucgggccuc

SEQ ID NO: 2328028 - RNA, 19 nt, Artificial Sequence
  Description of Artificial Sequence: Synthetic oligonucleotide
ccacaccgguacagggcag

SEQ ID NO: 2328029 - RNA, 19 nt, Artificial Sequence
  Description of Artificial Sequence: Synthetic oligonucleotide
gucaggcggccacaccggu

SEQ ID NO: 2328030 - RNA, 19 nt, Artificial Sequence
  Description of Artificial Sequence: Synthetic oligonucleotide
gccaucgcucauggcgaag

SEQ ID NO: 2328031 - RNA, 19 nt, Artificial Sequence
  Description of Artificial Sequence: Synthetic oligonucleotide
cccuucccuaggucucaag

SEQ ID NO: 2328032 - RNA, 19 nt, Artificial Sequence
  Description of Artificial Sequence: Synthetic oligonucleotide
ccaccacuguggcccugcg

SEQ ID NO: 2328033 - RNA, 19 nt, Artificial Sequence
  Description of Artificial Sequence: Synthetic oligonucleotide
cgacgcuagcgggaggacc

SEQ ID NO: 2328034 - RNA, 19 nt, Artificial Sequence
  Description of Artificial Sequence: Synthetic oligonucleotide
ccgcccgccgacgcuagcg

SEQ ID NO: 2328035 - RNA, 19 nt, Artificial Sequence
  Description of Artificial Sequence: Synthetic oligonucleotide
cgccuaccaccacuguggc

SEQ ID NO: 2328036 - RNA, 19 nt, Artificial Sequence
  Description of Artificial Sequence: Synthetic oligonucleotide
cucgcagcgcccucacuuu

SEQ ID NO: 2328037 - RNA, 19 nt, Artificial Sequence
  Description of Artificial Sequence: Synthetic oligonucleotide
ccucucuuuuagggacacc

SEQ ID NO: 2328038 - RNA, 19 nt, Artificial Sequence
  Description of Artificial Sequence: Synthetic oligonucleotide
gcaggucgccuaccaccac

SEQ ID NO: 2328039 - RNA, 19 nt, Artificial Sequence
  Description of Artificial Sequence: Synthetic oligonucleotide
ccugcgccuucgugccucc

SEQ ID NO: 2328040 - RNA, 19 nt, Artificial Sequence
  Description of Artificial Sequence: Synthetic oligonucleotide
cuaccaccacuguggcccu

SEQ ID NO: 2328041 - RNA, 19 nt, Artificial Sequence
  Description of Artificial Sequence: Synthetic oligonucleotide
gcccggugcacacgugcuc

SEQ ID NO: 2328042 - RNA, 19 nt, Artificial Sequence
  Description of Artificial Sequence: Synthetic oligonucleotide
gcaggagcggcuggcucca

SEQ ID NO: 2328043 - RNA, 19 nt, Artificial Sequence
  Description of Artificial Sequence: Synthetic oligonucleotide
acccugcaucugguuugcu

SEQ ID NO: 2328044 - RNA, 19 nt, Artificial Sequence
  Description of Artificial Sequence: Synthetic oligonucleotide
acgcacugucccggucaga

SEQ ID NO: 2328045 - RNA, 19 nt, Artificial Sequence
  Description of Artificial Sequence: Synthetic oligonucleotide
gggucguaucguguguccu

SEQ ID NO: 2328046 - RNA, 19 nt, Artificial Sequence
  Description of Artificial Sequence: Synthetic oligonucleotide
cacacucuucugguccagu

SEQ ID NO: 2328047 - RNA, 19 nt, Artificial Sequence
  Description of Artificial Sequence: Synthetic oligonucleotide
gcaggggacuggcucugua

SEQ ID NO: 2328048 - RNA, 19 nt, Artificial Sequence
  Description of Artificial Sequence: Synthetic oligonucleotide
cccgccgacgcuagcggga

SEQ ID NO: 2328049 - RNA, 19 nt, Artificial Sequence
  Description of Artificial Sequence: Synthetic oligonucleotide
gggccgggcgcagccuccg

SEQ ID NO: 2328050 - RNA, 19 nt, Artificial Sequence
  Description of Artificial Sequence: Synthetic oligonucleotide
gcucccgaaaccggguccu

SEQ ID NO: 2328051 - RNA, 19 nt, Artificial Sequence
  Description of Artificial Sequence: Synthetic oligonucleotide
cguguguccuggcaaagau

SEQ ID NO: 2328052 - RNA, 19 nt, Artificial Sequence
  Description of Artificial Sequence: Synthetic oligonucleotide
cgcccgccgacgcuagcgg

SEQ ID NO: 2328053 - RNA, 19 nt, Artificial Sequence
  Description of Artificial Sequence: Synthetic oligonucleotide
cgggccacggaagccaguc

SEQ ID NO: 2328054 - RNA, 19 nt, Artificial Sequence
  Description of Artificial Sequence: Synthetic oligonucleotide
ccgccgacgcuagcgggag

SEQ ID NO: 2328055 - RNA, 19 nt, Artificial Sequence
  Description of Artificial Sequence: Synthetic oligonucleotide
gcuagcgggaggaccggcu

SEQ ID NO: 2328056 - RNA, 19 nt, Artificial Sequence
  Description of Artificial Sequence: Synthetic oligonucleotide
ccuaggucucaagacuggu

SEQ ID NO: 2328057 - RNA, 19 nt, Artificial Sequence
  Description of Artificial Sequence: Synthetic oligonucleotide
cacgugcucgcagcgcccu

SEQ ID NO: 2328058 - RNA, 19 nt, Artificial Sequence
  Description of Artificial Sequence: Synthetic oligonucleotide
gcagcucccgaaaccgggu

SEQ ID NO: 2328059 - RNA, 19 nt, Artificial Sequence
  Description of Artificial Sequence: Synthetic oligonucleotide
ggucgccuaccaccacugu

SEQ ID NO: 2328060 - RNA, 19 nt, Artificial Sequence
  Description of Artificial Sequence: Synthetic oligonucleotide
gucgggccucacggccgcc

SEQ ID NO: 2328061 - RNA, 19 nt, Artificial Sequence
  Description of Artificial Sequence: Synthetic oligonucleotide
cccgcuccgcccgccgacg

SEQ ID NO: 2328062 - RNA, 19 nt, Artificial Sequence
  Description of Artificial Sequence: Synthetic oligonucleotide
cagcacgcacugucccggu

SEQ ID NO: 2328063 - RNA, 19 nt, Artificial Sequence
  Description of Artificial Sequence: Synthetic oligonucleotide
gccucacggccgcccggug

SEQ ID NO: 2328064 - RNA, 19 nt, Artificial Sequence
  Description of Artificial Sequence: Synthetic oligonucleotide
ggccgcccggugcacacgu

SEQ ID NO: 2328065 - RNA, 19 nt, Artificial Sequence
  Description of Artificial Sequence: Synthetic oligonucleotide
cgcagccuccgcgucgggc

SEQ ID NO: 2328066 - RNA, 19 nt, Artificial Sequence
  Description of Artificial Sequence: Synthetic oligonucleotide
ccaguccauaaaucacuuu

SEQ ID NO: 2328067 - RNA, 19 nt, Artificial Sequence
  Description of Artificial Sequence: Synthetic oligonucleotide
ccgaaaccggguccuuucu

SEQ ID NO: 2328068 - RNA, 19 nt, Artificial Sequence
  Description of Artificial Sequence: Synthetic oligonucleotide
ccgacgcuagcgggaggac

SEQ ID NO: 2328069 - RNA, 19 nt, Artificial Sequence
  Description of Artificial Sequence: Synthetic oligonucleotide
ccgcuccgcccgccgacgc

SEQ ID NO: 2328070 - RNA, 19 nt, Artificial Sequence
  Description of Artificial Sequence: Synthetic oligonucleotide
gcuccgcccgccgacgcua

SEQ ID NO: 2328071 - RNA, 19 nt, Artificial Sequence
  Description of Artificial Sequence: Synthetic oligonucleotide
caccgguacagggcaggau

SEQ ID NO: 2328072 - RNA, 19 nt, Artificial Sequence
  Description of Artificial Sequence: Synthetic oligonucleotide
ccacggaagccaguccaua

SEQ ID NO: 2328073 - RNA, 19 nt, Artificial Sequence
  Description of Artificial Sequence: Synthetic oligonucleotide
cgcuagcgggaggaccggc

SEQ ID NO: 2328074 - RNA, 19 nt, Artificial Sequence
  Description of Artificial Sequence: Synthetic oligonucleotide
cgugcucgcagcgcccuca

SEQ ID NO: 2328075 - RNA, 19 nt, Artificial Sequence
  Description of Artificial Sequence: Synthetic oligonucleotide
gcgcagccuccgcgucggg

SEQ ID NO: 2328076 - RNA, 19 nt, Artificial Sequence
  Description of Artificial Sequence: Synthetic oligonucleotide
gccacggaagccaguccau

SEQ ID NO: 2328077 - RNA, 19 nt, Artificial Sequence
  Description of Artificial Sequence: Synthetic oligonucleotide
ggccucacggccgcccggu

SEQ ID NO: 2328078 - RNA, 19 nt, Artificial Sequence
  Description of Artificial Sequence: Synthetic oligonucleotide
cgccgacgcuagcgggagg

SEQ ID NO: 2328079 - RNA, 19 nt, Artificial Sequence
  Description of Artificial Sequence: Synthetic oligonucleotide
gcgcccucacuuuccccau

SEQ ID NO: 2328080 - RNA, 19 nt, Artificial Sequence
  Description of Artificial Sequence: Synthetic oligonucleotide
gccgcccggugcacacgug

SEQ ID NO: 2328081 - RNA, 19 nt, Artificial Sequence
  Description of Artificial Sequence: Synthetic oligonucleotide
ccgggcgcagccuccgcgu

SEQ ID NO: 2328082 - RNA, 19 nt, Artificial Sequence
  Description of Artificial Sequence: Synthetic oligonucleotide
gccuccgcgucgggccuca

SEQ ID NO: 2328083 - RNA, 19 nt, Artificial Sequence
  Description of Artificial Sequence: Synthetic oligonucleotide
cgaaaccggguccuuucuu

SEQ ID NO: 2328084 - RNA, 19 nt, Artificial Sequence
  Description of Artificial Sequence: Synthetic oligonucleotide
cgggcgcagccuccgcguc

SEQ ID NO: 2328085 - RNA, 19 nt, Artificial Sequence
  Description of Artificial Sequence: Synthetic oligonucleotide
ccgccaccuuccagcugca

SEQ ID NO: 2328086 - RNA, 19 nt, Artificial Sequence
  Description of Artificial Sequence: Synthetic oligonucleotide
cucccgaaaccggguccuu

SEQ ID NO: 2328087 - RNA, 19 nt, Artificial Sequence
  Description of Artificial Sequence: Synthetic oligonucleotide
gcgcggggccgggcgcagc

SEQ ID NO: 2328088 - RNA, 19 nt, Artificial Sequence
  Description of Artificial Sequence: Synthetic oligonucleotide
cugcgccuucgugccuccu

SEQ ID NO: 2328089 - RNA, 19 nt, Artificial Sequence
  Description of Artificial Sequence: Synthetic oligonucleotide
ccccuucccuaggucucaa

SEQ ID NO: 2328090 - RNA, 19 nt, Artificial Sequence
  Description of Artificial Sequence: Synthetic oligonucleotide
ccaaggcacuagggucgua

SEQ ID NO: 2328091 - RNA, 19 nt, Artificial Sequence
  Description of Artificial Sequence: Synthetic oligonucleotide
ccgggccacggaagccagu

SEQ ID NO: 2328092 - RNA, 19 nt, Artificial Sequence
  Description of Artificial Sequence: Synthetic oligonucleotide
ccuccgcgucgggccucac

SEQ ID NO: 2328093 - RNA, 19 nt, Artificial Sequence
  Description of Artificial Sequence: Synthetic oligonucleotide
cgcuccgcccgccgacgcu

SEQ ID NO: 2328094 - RNA, 19 nt, Artificial Sequence
  Description of Artificial Sequence: Synthetic oligonucleotide
agaaugaagagcgagaagg

SEQ ID NO: 2328095 - RNA, 19 nt, Artificial Sequence
  Description of Artificial Sequence: Synthetic oligonucleotide
aaaagguggacguugcagg

SEQ ID NO: 2328096 - RNA, 19 nt, Artificial Sequence
  Description of Artificial Sequence: Synthetic oligonucleotide
uucacuaucagccaccgug

SEQ ID NO: 2328097 - RNA, 19 nt, Artificial Sequence
  Description of Artificial Sequence: Synthetic oligonucleotide
  modified_base (19)..(19): a, c, u, g, unknown or other
aaugguuauagugugaugn

SEQ ID NO: 2328098 - RNA, 19 nt, Artificial Sequence
  Description of Artificial Sequence: Synthetic oligonucleotide
agaccuaaugguuauagug

SEQ ID NO: 2328099 - RNA, 19 nt, Artificial Sequence
  Description of Artificial Sequence: Synthetic oligonucleotide
aggccgacgacacaguucc

SEQ ID NO: 2328100 - RNA, 19 nt, Artificial Sequence
  Description of Artificial Sequence: Synthetic oligonucleotide
acuacucaggccuccaagc

SEQ ID NO: 2328101 - RNA, 19 nt, Artificial Sequence
  Description of Artificial Sequence: Synthetic oligonucleotide
ugaagagcgagaaggagug

SEQ ID NO: 2328102 - RNA, 19 nt, Artificial Sequence
  Description of Artificial Sequence: Synthetic oligonucleotide
acagagaaaguggugaugg

SEQ ID NO: 2328103 - RNA, 19 nt, Artificial Sequence
  Description of Artificial Sequence: Synthetic oligonucleotide
aaccacaugcugcaggaag

SEQ ID NO: 2328104 - RNA, 19 nt, Artificial Sequence
  Description of Artificial Sequence: Synthetic oligonucleotide
guugggaugacuucagaag

SEQ ID NO: 2328105 - RNA, 19 nt, Artificial Sequence
  Description of Artificial Sequence: Synthetic oligonucleotide
cuuacuaggacccuuuguc

SEQ ID NO: 2328106 - RNA, 19 nt, Artificial Sequence
  Description of Artificial Sequence: Synthetic oligonucleotide
agcauaacgcucaggaugc

SEQ ID NO: 2328107 - RNA, 19 nt, Artificial Sequence
  Description of Artificial Sequence: Synthetic oligonucleotide
acuaggacccuuugucacc

SEQ ID NO: 2328108 - RNA, 19 nt, Artificial Sequence
  Description of Artificial Sequence: Synthetic oligonucleotide
ugagcuggacuacucaggc

SEQ ID NO: 2328109 - RNA, 19 nt, Artificial Sequence
  Description of Artificial Sequence: Synthetic oligonucleotide
caugauuaagcccaggcca

SEQ ID NO: 2328110 - RNA, 19 nt, Artificial Sequence
  Description of Artificial Sequence: Synthetic oligonucleotide
  modified_base (16)..(16): a, c, u, g, unknown or other
gguuauagugugaugnucc

SEQ ID NO: 2328111 - RNA, 19 nt, Artificial Sequence
  Description of Artificial Sequence: Synthetic oligonucleotide
uggagcccagaccuaaugg

SEQ ID NO: 2328112 - RNA, 19 nt, Artificial Sequence
  Description of Artificial Sequence: Synthetic oligonucleotide
cagcauaacgcucaggaug

SEQ ID NO: 2328113 - RNA, 19 nt, Artificial Sequence
  Description of Artificial Sequence: Synthetic oligonucleotide
uucuugcugacaaagugaa

SEQ ID NO: 2328114 - RNA, 19 nt, Artificial Sequence
  Description of Artificial Sequence: Synthetic oligonucleotide
aagagcgagaaggagugag

SEQ ID NO: 2328115 - RNA, 19 nt, Artificial Sequence
  Description of Artificial Sequence: Synthetic oligonucleotide
agcuggacuacucaggccu

SEQ ID NO: 2328116 - RNA, 19 nt, Artificial Sequence
  Description of Artificial Sequence: Synthetic oligonucleotide
cuugcugacaaagugaaca

SEQ ID NO: 2328117 - RNA, 19 nt, Artificial Sequence
  Description of Artificial Sequence: Synthetic oligonucleotide
uccugucuaccuuacuagg

SEQ ID NO: 2328118 - RNA, 19 nt, Artificial Sequence
  Description of Artificial Sequence: Synthetic oligonucleotide
ugaggauggcagaagcuug

SEQ ID NO: 2328119 - RNA, 19 nt, Artificial Sequence
  Description of Artificial Sequence: Synthetic oligonucleotide
accuaaugguuauagugug

SEQ ID NO: 2328120 - RNA, 19 nt, Artificial Sequence
  Description of Artificial Sequence: Synthetic oligonucleotide
gguaguugagcagagaggc

SEQ ID NO: 2328121 - RNA, 19 nt, Artificial Sequence
  Description of Artificial Sequence: Synthetic oligonucleotide
  modified_base (14)..(14): a, c, u, g, unknown or other
uuauagugugaugnucccc

SEQ ID NO: 2328122 - RNA, 19 nt, Artificial Sequence
  Description of Artificial Sequence: Synthetic oligonucleotide
acagcgguuaggugguggc

SEQ ID NO: 2328123 - RNA, 19 nt, Artificial Sequence
  Description of Artificial Sequence: Synthetic oligonucleotide
uuacuaggacccuuuguca

SEQ ID NO: 2328124 - RNA, 19 nt, Artificial Sequence
  Description of Artificial Sequence: Synthetic oligonucleotide
gaggagaagaguccaagca

SEQ ID NO: 2328125 - RNA, 19 nt, Artificial Sequence
  Description of Artificial Sequence: Synthetic oligonucleotide
uuaagcccaggccacggcc

SEQ ID NO: 2328126 - RNA, 19 nt, Artificial Sequence
  Description of Artificial Sequence: Synthetic oligonucleotide
gauggcagcaucgcgguag

SEQ ID NO: 2328127 - RNA, 19 nt, Artificial Sequence
  Description of Artificial Sequence: Synthetic oligonucleotide
ggauccucagcacagacug

SEQ ID NO: 2328128 - RNA, 19 nt, Artificial Sequence
  Description of Artificial Sequence: Synthetic oligonucleotide
auuaagcccaggccacggc

SEQ ID NO: 2328129 - RNA, 19 nt, Artificial Sequence
  Description of Artificial Sequence: Synthetic oligonucleotide
aaguggugauggcagcauc

SEQ ID NO: 2328130 - RNA, 19 nt, Artificial Sequence
  Description of Artificial Sequence: Synthetic oligonucleotide
agcgagaaggagugaggcc

SEQ ID NO: 2328131 - RNA, 19 nt, Artificial Sequence
  Description of Artificial Sequence: Synthetic oligonucleotide
  modified_base (15)..(15): a, c, u, g, unknown or other
guuauagugugaugnuccc

SEQ ID NO: 2328132 - RNA, 19 nt, Artificial Sequence
  Description of Artificial Sequence: Synthetic oligonucleotide
acgacacaguuccccaucc

SEQ ID NO: 2328133 - RNA, 19 nt, Artificial Sequence
  Description of Artificial Sequence: Synthetic oligonucleotide
cugauucuugcugacaaag

SEQ ID NO: 2328134 - RNA, 19 nt, Artificial Sequence
  Description of Artificial Sequence: Synthetic oligonucleotide
cucagaggcuguuuagagg

SEQ ID NO: 2328135 - RNA, 19 nt, Artificial Sequence
  Description of Artificial Sequence: Synthetic oligonucleotide
ucugacgcuucacuaucag

SEQ ID NO: 2328136 - RNA, 19 nt, Artificial Sequence
  Description of Artificial Sequence: Synthetic oligonucleotide
uugagcagagaggcgaggg

SEQ ID NO: 2328137 - RNA, 19 nt, Artificial Sequence
  Description of Artificial Sequence: Synthetic oligonucleotide
ucaaucugacgcuucacua

SEQ ID NO: 2328138 - RNA, 19 nt, Artificial Sequence
  Description of Artificial Sequence: Synthetic oligonucleotide
aggagugaggccuggaaga

SEQ ID NO: 2328139 - RNA, 19 nt, Artificial Sequence
  Description of Artificial Sequence: Synthetic oligonucleotide
gaguaccucuggcagaagc

SEQ ID NO: 2328140 - RNA, 19 nt, Artificial Sequence
  Description of Artificial Sequence: Synthetic oligonucleotide
uucagaagcaaggagggua

SEQ ID NO: 2328141 - RNA, 19 nt, Artificial Sequence
  Description of Artificial Sequence: Synthetic oligonucleotide
uacuaggacccuuugucac

SEQ ID NO: 2328142 - RNA, 19 nt, Artificial Sequence
  Description of Artificial Sequence: Synthetic oligonucleotide
uuucuguguggccagcuuc

SEQ ID NO: 2328143 - RNA, 19 nt, Artificial Sequence
  Description of Artificial Sequence: Synthetic oligonucleotide
gacuacucaggccuccaag

SEQ ID NO: 2328144 - RNA, 19 nt, Artificial Sequence
  Description of Artificial Sequence: Synthetic oligonucleotide
uaacgcucaggaugcagag

SEQ ID NO: 2328145 - RNA, 19 nt, Artificial Sequence
  Description of Artificial Sequence: Synthetic oligonucleotide
augauuaagcccaggccac

SEQ ID NO: 2328146 - RNA, 19 nt, Artificial Sequence
  Description of Artificial Sequence: Synthetic oligonucleotide
ucuccuagauggcuggagu

SEQ ID NO: 2328147 - RNA, 19 nt, Artificial Sequence
  Description of Artificial Sequence: Synthetic oligonucleotide
uuagagggcaggguuagga

SEQ ID NO: 2328148 - RNA, 19 nt, Artificial Sequence
  Description of Artificial Sequence: Synthetic oligonucleotide
guuucgcucagccaggauc

SEQ ID NO: 2328149 - RNA, 19 nt, Artificial Sequence
  Description of Artificial Sequence: Synthetic oligonucleotide
ugcaggaaggcuccauggc

SEQ ID NO: 2328150 - RNA, 19 nt, Artificial Sequence
  Description of Artificial Sequence: Synthetic oligonucleotide
uguuuagagggcaggguua

SEQ ID NO: 2328151 - RNA, 19 nt, Artificial Sequence
  Description of Artificial Sequence: Synthetic oligonucleotide
cuacucaggccuccaagcg

SEQ ID NO: 2328152 - RNA, 19 nt, Artificial Sequence
  Description of Artificial Sequence: Synthetic oligonucleotide
cugagcuggacuacucagg

SEQ ID NO: 2328153 - RNA, 19 nt, Artificial Sequence
  Description of Artificial Sequence: Synthetic oligonucleotide
agcagcgggacauggucac

SEQ ID NO: 2328154 - RNA, 19 nt, Artificial Sequence
  Description of Artificial Sequence: Synthetic oligonucleotide
uccauggcccauguggagg

SEQ ID NO: 2328155 - RNA, 19 nt, Artificial Sequence
  Description of Artificial Sequence: Synthetic oligonucleotide
uggugauggcagcaucgcg

SEQ ID NO: 2328156 - RNA, 19 nt, Artificial Sequence
  Description of Artificial Sequence: Synthetic oligonucleotide
gauuaagcccaggccacgg

SEQ ID NO: 2328157 - RNA, 19 nt, Artificial Sequence
  Description of Artificial Sequence: Synthetic oligonucleotide
aguggugauggcagcaucg

SEQ ID NO: 2328158 - RNA, 19 nt, Artificial Sequence
  Description of Artificial Sequence: Synthetic oligonucleotide
agcaucgcgguaguugagc

SEQ ID NO: 2328159 - RNA, 19 nt, Artificial Sequence
  Description of Artificial Sequence: Synthetic oligonucleotide
uaaugguuauagugugaug

SEQ ID NO: 2328160 - RNA, 19 nt, Artificial Sequence
  Description of Artificial Sequence: Synthetic oligonucleotide
agccucugagccuuuuggg

SEQ ID NO: 2328161 - RNA, 19 nt, Artificial Sequence
  Description of Artificial Sequence: Synthetic oligonucleotide
agacugggccuccucaauc

SEQ ID NO: 2328162 - RNA, 19 nt, Artificial Sequence
  Description of Artificial Sequence: Synthetic oligonucleotide
cugcaggaaggcuccaugg

SEQ ID NO: 2328163 - RNA, 19 nt, Artificial Sequence
  Description of Artificial Sequence: Synthetic oligonucleotide
uccaagcgccccaagugcc

SEQ ID NO: 2328164 - RNA, 19 nt, Artificial Sequence
  Description of Artificial Sequence: Synthetic oligonucleotide
agguggacguugcagggag

SEQ ID NO: 2328165 - RNA, 19 nt, Artificial Sequence
  Description of Artificial Sequence: Synthetic oligonucleotide
acgcuucacuaucagccac

SEQ ID NO: 2328166 - RNA, 19 nt, Artificial Sequence
  Description of Artificial Sequence: Synthetic oligonucleotide
aggguuaggaguggcuagc

SEQ ID NO: 2328167 - RNA, 19 nt, Artificial Sequence
  Description of Artificial Sequence: Synthetic oligonucleotide
augaagagcgagaaggagu

SEQ ID NO: 2328168 - RNA, 19 nt, Artificial Sequence
  Description of Artificial Sequence: Synthetic oligonucleotide
ggacguugcagggagaggg

SEQ ID NO: 2328169 - RNA, 19 nt, Artificial Sequence
  Description of Artificial Sequence: Synthetic oligonucleotide
agaaacagaccaggccagc

SEQ ID NO: 2328170 - RNA, 19 nt, Artificial Sequence
  Description of Artificial Sequence: Synthetic oligonucleotide
uugcugacaaagugaacaa

SEQ ID NO: 2328171 - RNA, 19 nt, Artificial Sequence
  Description of Artificial Sequence: Synthetic oligonucleotide
ugauuaagcccaggccacg

SEQ ID NO: 2328172 - RNA, 19 nt, Artificial Sequence
  Description of Artificial Sequence: Synthetic oligonucleotide
cuagcagcgggacaugguc

SEQ ID NO: 2328173 - RNA, 19 nt, Artificial Sequence
  Description of Artificial Sequence: Synthetic oligonucleotide
aucccggaguaccucuggc

SEQ ID NO: 2328174 - RNA, 19 nt, Artificial Sequence
  Description of Artificial Sequence: Synthetic oligonucleotide
gagcgagaaggagugaggc

SEQ ID NO: 2328175 - RNA, 19 nt, Artificial Sequence
  Description of Artificial Sequence: Synthetic oligonucleotide
augacuucagaagcaagga

SEQ ID NO: 2328176 - RNA, 19 nt, Artificial Sequence
  Description of Artificial Sequence: Synthetic oligonucleotide
ggagugaggagccucugag

SEQ ID NO: 2328177 - RNA, 19 nt, Artificial Sequence
  Description of Artificial Sequence: Synthetic oligonucleotide
aaggccgacgacacaguuc

SEQ ID NO: 2328178 - RNA, 19 nt, Artificial Sequence
  Description of Artificial Sequence: Synthetic oligonucleotide
gccgguuucgcucagccag

SEQ ID NO: 2328179 - RNA, 19 nt, Artificial Sequence
  Description of Artificial Sequence: Synthetic oligonucleotide
cuccaagcgccccaagugc

SEQ ID NO: 2328180 - RNA, 19 nt, Artificial Sequence
  Description of Artificial Sequence: Synthetic oligonucleotide
caucgccgugcucagaggc

SEQ ID NO: 2328181 - RNA, 19 nt, Artificial Sequence
  Description of Artificial Sequence: Synthetic oligonucleotide
cacaggauggagcccagac

SEQ ID NO: 2328182 - RNA, 19 nt, Artificial Sequence
  Description of Artificial Sequence: Synthetic oligonucleotide
uuaggugguggcugucuca

SEQ ID NO: 2328183 - RNA, 19 nt, Artificial Sequence
  Description of Artificial Sequence: Synthetic oligonucleotide
gcagguguucuccaguucc

SEQ ID NO: 2328184 - RNA, 19 nt, Artificial Sequence
  Description of Artificial Sequence: Synthetic oligonucleotide
aagcuugggaggagaagag

SEQ ID NO: 2328185 - RNA, 19 nt, Artificial Sequence
  Description of Artificial Sequence: Synthetic oligonucleotide
gacuccagaaacagaccag

SEQ ID NO: 2328186 - RNA, 19 nt, Artificial Sequence
  Description of Artificial Sequence: Synthetic oligonucleotide
uccuagauggcuggaguga

SEQ ID NO: 2328187 - RNA, 19 nt, Artificial Sequence
  Description of Artificial Sequence: Synthetic oligonucleotide
cugacgcuucacuaucagc

SEQ ID NO: 2328188 - RNA, 19 nt, Artificial Sequence
  Description of Artificial Sequence: Synthetic oligonucleotide
uugucaccuuucugugugg

SEQ ID NO: 2328189 - RNA, 19 nt, Artificial Sequence
  Description of Artificial Sequence: Synthetic oligonucleotide
  modified_base (17)..(17): a, c, u, g, unknown or other
ugguuauagugugaugnuc

SEQ ID NO: 2328190 - RNA, 19 nt, Artificial Sequence
  Description of Artificial Sequence: Synthetic oligonucleotide
auaacgcucaggaugcaga

SEQ ID NO: 2328191 - RNA, 19 nt, Artificial Sequence
  Description of Artificial Sequence: Synthetic oligonucleotide
cuccuagauggcuggagug

SEQ ID NO: 2328192 - RNA, 19 nt, Artificial Sequence
  Description of Artificial Sequence: Synthetic oligonucleotide
gccaugauuaagcccaggc

SEQ ID NO: 2328193 - RNA, 19 nt, Artificial Sequence
  Description of Artificial Sequence: Synthetic oligonucleotide
acacaguuccccaucccgg

SEQ ID NO: 2328194 - RNA, 19 nt, Artificial Sequence
  Description of Artificial Sequence: Synthetic oligonucleotide
gaccuaaugguuauagugu

SEQ ID NO: 2328195 - RNA, 19 nt, Artificial Sequence
  Description of Artificial Sequence: Synthetic oligonucleotide
uagcagcgggacaugguca

SEQ ID NO: 2328196 - RNA, 19 nt, Artificial Sequence
  Description of Artificial Sequence: Synthetic oligonucleotide
auggagcccagaccuaaug

SEQ ID NO: 2328197 - RNA, 19 nt, Artificial Sequence
  Description of Artificial Sequence: Synthetic oligonucleotide
accucuggcagaagcuugc

SEQ ID NO: 2328198 - RNA, 19 nt, Artificial Sequence
  Description of Artificial Sequence: Synthetic oligonucleotide
aaaguggugauggcagcau

SEQ ID NO: 2328199 - RNA, 19 nt, Artificial Sequence
  Description of Artificial Sequence: Synthetic oligonucleotide
cuaucagccaccgugcgga

SEQ ID NO: 2328200 - RNA, 19 nt, Artificial Sequence
  Description of Artificial Sequence: Synthetic oligonucleotide
agcgggacauggucacagc

SEQ ID NO: 2328201 - RNA, 19 nt, Artificial Sequence
  Description of Artificial Sequence: Synthetic oligonucleotide
auggucacagcgguuaggu

SEQ ID NO: 2328202 - RNA, 19 nt, Artificial Sequence
  Description of Artificial Sequence: Synthetic oligonucleotide
aucgcgguaguugagcaga

SEQ ID NO: 2328203 - RNA, 19 nt, Artificial Sequence
  Description of Artificial Sequence: Synthetic oligonucleotide
aggaggguacugaggaugg

SEQ ID NO: 2328204 - RNA, 19 nt, Artificial Sequence
  Description of Artificial Sequence: Synthetic oligonucleotide
ugggccuccucaaucugac

SEQ ID NO: 2328205 - RNA, 19 nt, Artificial Sequence
  Description of Artificial Sequence: Synthetic oligonucleotide
aagaguccaagcacagaga

SEQ ID NO: 2328206 - RNA, 19 nt, Artificial Sequence
  Description of Artificial Sequence: Synthetic oligonucleotide
guugcagggagagggcagg

SEQ ID NO: 2328207 - RNA, 19 nt, Artificial Sequence
  Description of Artificial Sequence: Synthetic oligonucleotide
ugcucagaggcuguuuaga

SEQ ID NO: 2328208 - RNA, 19 nt, Artificial Sequence
  Description of Artificial Sequence: Synthetic oligonucleotide
agagcgagaaggagugagg

SEQ ID NO: 2328209 - RNA, 19 nt, Artificial Sequence
  Description of Artificial Sequence: Synthetic oligonucleotide
ucuugcugacaaagugaac

SEQ ID NO: 2328210 - RNA, 19 nt, Artificial Sequence
  Description of Artificial Sequence: Synthetic oligonucleotide
gacgcuucacuaucagcca

SEQ ID NO: 2328211 - RNA, 19 nt, Artificial Sequence
  Description of Artificial Sequence: Synthetic oligonucleotide
ccaugauuaagcccaggcc

SEQ ID NO: 2328212 - RNA, 19 nt, Artificial Sequence
  Description of Artificial Sequence: Synthetic oligonucleotide
ugaggccuggaagaugucu

SEQ ID NO: 2328213 - RNA, 19 nt, Artificial Sequence
  Description of Artificial Sequence: Synthetic oligonucleotide
ggacuccagaaacagacca

SEQ ID NO: 2328214 - RNA, 19 nt, Artificial Sequence
  Description of Artificial Sequence: Synthetic oligonucleotide
cauggggccgguuucgcuc

SEQ ID NO: 2328215 - RNA, 19 nt, Artificial Sequence
  Description of Artificial Sequence: Synthetic oligonucleotide
gaaggagugaggccuggaa

SEQ ID NO: 2328216 - RNA, 19 nt, Artificial Sequence
  Description of Artificial Sequence: Synthetic oligonucleotide
guaguugagcagagaggcg

SEQ ID NO: 2328217 - RNA, 19 nt, Artificial Sequence
  Description of Artificial Sequence: Synthetic oligonucleotide
cauaacgcucaggaugcag

SEQ ID NO: 2328218 - RNA, 19 nt, Artificial Sequence
  Description of Artificial Sequence: Synthetic oligonucleotide
gcucagaggcuguuuagag

SEQ ID NO: 2328219 - RNA, 19 nt, Artificial Sequence
  Description of Artificial Sequence: Synthetic oligonucleotide
uuuagagggcaggguuagg

SEQ ID NO: 2328220 - RNA, 19 nt, Artificial Sequence
  Description of Artificial Sequence: Synthetic oligonucleotide
cacugauucuugcugacaa

SEQ ID NO: 2328221 - RNA, 19 nt, Artificial Sequence
  Description of Artificial Sequence: Synthetic oligonucleotide
cacuaucagccaccgugcg

SEQ ID NO: 2328222 - RNA, 19 nt, Artificial Sequence
  Description of Artificial Sequence: Synthetic oligonucleotide
gacauggucacagcgguua

SEQ ID NO: 2328223 - RNA, 19 nt, Artificial Sequence
  Description of Artificial Sequence: Synthetic oligonucleotide
agaggcgagggaaaaggug

SEQ ID NO: 2328224 - RNA, 19 nt, Artificial Sequence
  Description of Artificial Sequence: Synthetic oligonucleotide
ucccggaguaccucuggca

SEQ ID NO: 2328225 - RNA, 19 nt, Artificial Sequence
  Description of Artificial Sequence: Synthetic oligonucleotide
guggacguugcagggagag

SEQ ID NO: 2328226 - RNA, 19 nt, Artificial Sequence
  Description of Artificial Sequence: Synthetic oligonucleotide
uaccuuacuaggacccuuu

SEQ ID NO: 2328227 - RNA, 19 nt, Artificial Sequence
  Description of Artificial Sequence: Synthetic oligonucleotide
ugcggacuccagaaacaga

SEQ ID NO: 2328228 - RNA, 19 nt, Artificial Sequence
  Description of Artificial Sequence: Synthetic oligonucleotide
acugauucuugcugacaaa

SEQ ID NO: 2328229 - RNA, 19 nt, Artificial Sequence
  Description of Artificial Sequence: Synthetic oligonucleotide
gagcuggacuacucaggcc

SEQ ID NO: 2328230 - RNA, 19 nt, Artificial Sequence
  Description of Artificial Sequence: Synthetic oligonucleotide
gucaccuuucuguguggcc

SEQ ID NO: 2328231 - RNA, 19 nt, Artificial Sequence
  Description of Artificial Sequence: Synthetic oligonucleotide
agcgguuaggugguggcug

SEQ ID NO: 2328232 - RNA, 19 nt, Artificial Sequence
  Description of Artificial Sequence: Synthetic oligonucleotide
gaggcuguuuagagggcag

SEQ ID NO: 2328233 - RNA, 19 nt, Artificial Sequence
  Description of Artificial Sequence: Synthetic oligonucleotide
accuuacuaggacccuuug

SEQ ID NO: 2328234 - RNA, 19 nt, Artificial Sequence
  Description of Artificial Sequence: Synthetic oligonucleotide
ugcugacaaagugaacaaa

SEQ ID NO: 2328235 - RNA, 19 nt, Artificial Sequence
  Description of Artificial Sequence: Synthetic oligonucleotide
ugaggagccucugagccuu

SEQ ID NO: 2328236 - RNA, 19 nt, Artificial Sequence
  Description of Artificial Sequence: Synthetic oligonucleotide
caucccggaguaccucugg

SEQ ID NO: 2328237 - RNA, 19 nt, Artificial Sequence
  Description of Artificial Sequence: Synthetic oligonucleotide
aagguggacguugcaggga

SEQ ID NO: 2328238 - RNA, 19 nt, Artificial Sequence
  Description of Artificial Sequence: Synthetic oligonucleotide
cuuugggcacaggauggag

SEQ ID NO: 2328239 - RNA, 19 nt, Artificial Sequence
  Description of Artificial Sequence: Synthetic oligonucleotide
gcggacuccagaaacagac

SEQ ID NO: 2328240 - RNA, 19 nt, Artificial Sequence
  Description of Artificial Sequence: Synthetic oligonucleotide
caucgcgguaguugagcag

SEQ ID NO: 2328241 - RNA, 19 nt, Artificial Sequence
  Description of Artificial Sequence: Synthetic oligonucleotide
gguugggaugacuucagaa

SEQ ID NO: 2328242 - RNA, 19 nt, Artificial Sequence
  Description of Artificial Sequence: Synthetic oligonucleotide
cucuggcagaagcuugcgc

SEQ ID NO: 2328243 - RNA, 19 nt, Artificial Sequence
  Description of Artificial Sequence: Synthetic oligonucleotide
cucugagcucuccuagaug

SEQ ID NO: 2328244 - RNA, 19 nt, Artificial Sequence
  Description of Artificial Sequence: Synthetic oligonucleotide
gagaaggagugaggccugg

SEQ ID NO: 2328245 - RNA, 19 nt, Artificial Sequence
  Description of Artificial Sequence: Synthetic oligonucleotide
aguugagcagagaggcgag

SEQ ID NO: 2328246 - RNA, 19 nt, Artificial Sequence
  Description of Artificial Sequence: Synthetic oligonucleotide
gcucaggaugcagaggagg

SEQ ID NO: 2328247 - RNA, 19 nt, Artificial Sequence
  Description of Artificial Sequence: Synthetic oligonucleotide
gugguggcugucucaggag

SEQ ID NO: 2328248 - RNA, 19 nt, Artificial Sequence
  Description of Artificial Sequence: Synthetic oligonucleotide
gugcggacuccagaaacag

SEQ ID NO: 2328249 - RNA, 19 nt, Artificial Sequence
  Description of Artificial Sequence: Synthetic oligonucleotide
gcugucucaggagggaagg

SEQ ID NO: 2328250 - RNA, 19 nt, Artificial Sequence
  Description of Artificial Sequence: Synthetic oligonucleotide
gguuaggaguggcuagcag

SEQ ID NO: 2328251 - RNA, 19 nt, Artificial Sequence
  Description of Artificial Sequence: Synthetic oligonucleotide
aggcuguuuagagggcagg

SEQ ID NO: 2328252 - RNA, 19 nt, Artificial Sequence
  Description of Artificial Sequence: Synthetic oligonucleotide
guacugaggauggcagaag

SEQ ID NO: 2328253 - RNA, 19 nt, Artificial Sequence
  Description of Artificial Sequence: Synthetic oligonucleotide
gcgggacauggucacagcg

SEQ ID NO: 2328254 - RNA, 19 nt, Artificial Sequence
  Description of Artificial Sequence: Synthetic oligonucleotide
ucugagccuuuuggguggg

SEQ ID NO: 2328255 - RNA, 19 nt, Artificial Sequence
  Description of Artificial Sequence: Synthetic oligonucleotide
acagugguugggaugacuu

SEQ ID NO: 2328256 - RNA, 19 nt, Artificial Sequence
  Description of Artificial Sequence: Synthetic oligonucleotide
ggugguggcugucucagga

SEQ ID NO: 2328257 - RNA, 19 nt, Artificial Sequence
  Description of Artificial Sequence: Synthetic oligonucleotide
aguggcuagcagcgggaca

SEQ ID NO: 2328258 - RNA, 19 nt, Artificial Sequence
  Description of Artificial Sequence: Synthetic oligonucleotide
uaggaguggcuagcagcgg

SEQ ID NO: 2328259 - RNA, 19 nt, Artificial Sequence
  Description of Artificial Sequence: Synthetic oligonucleotide
ucccagcaucugcccaugg

SEQ ID NO: 2328260 - RNA, 19 nt, Artificial Sequence
  Description of Artificial Sequence: Synthetic oligonucleotide
uuuugggugggguggccuu

SEQ ID NO: 2328261 - RNA, 19 nt, Artificial Sequence
  Description of Artificial Sequence: Synthetic oligonucleotide
ggccgccagaaccacaugc

SEQ ID NO: 2328262 - RNA, 19 nt, Artificial Sequence
  Description of Artificial Sequence: Synthetic oligonucleotide
gcgagggaaaagguggacg

SEQ ID NO: 2328263 - RNA, 19 nt, Artificial Sequence
  Description of Artificial Sequence: Synthetic oligonucleotide
ccagaccuaaugguuauag

SEQ ID NO: 2328264 - RNA, 19 nt, Artificial Sequence
  Description of Artificial Sequence: Synthetic oligonucleotide
ggcuguuuagagggcaggg

SEQ ID NO: 2328265 - RNA, 19 nt, Artificial Sequence
  Description of Artificial Sequence: Synthetic oligonucleotide
uggcagaagcuugcgcuug

SEQ ID NO: 2328266 - RNA, 19 nt, Artificial Sequence
  Description of Artificial Sequence: Synthetic oligonucleotide
gaggcgcugagcuggacua

SEQ ID NO: 2328267 - RNA, 19 nt, Artificial Sequence
  Description of Artificial Sequence: Synthetic oligonucleotide
guuggggacaggcccucug

SEQ ID NO: 2328268 - RNA, 19 nt, Artificial Sequence
  Description of Artificial Sequence: Synthetic oligonucleotide
cuaaugguuauagugugau

SEQ ID NO: 2328269 - RNA, 19 nt, Artificial Sequence
  Description of Artificial Sequence: Synthetic oligonucleotide
uucccaucgccgugcucag

SEQ ID NO: 2328270 - RNA, 19 nt, Artificial Sequence
  Description of Artificial Sequence: Synthetic oligonucleotide
gacguugcagggagagggc

SEQ ID NO: 2328271 - RNA, 19 nt, Artificial Sequence
  Description of Artificial Sequence: Synthetic oligonucleotide
cacagcgguuagguggugg

SEQ ID NO: 2328272 - RNA, 19 nt, Artificial Sequence
  Description of Artificial Sequence: Synthetic oligonucleotide
ggcagcaucgcgguaguug

SEQ ID NO: 2328273 - RNA, 19 nt, Artificial Sequence
  Description of Artificial Sequence: Synthetic oligonucleotide
gugguugggaugacuucag

SEQ ID NO: 2328274 - RNA, 19 nt, Artificial Sequence
  Description of Artificial Sequence: Synthetic oligonucleotide
agaggagggcgcaggccgc

SEQ ID NO: 2328275 - RNA, 19 nt, Artificial Sequence
  Description of Artificial Sequence: Synthetic oligonucleotide
cagugguugggaugacuuc

SEQ ID NO: 2328276 - RNA, 19 nt, Artificial Sequence
  Description of Artificial Sequence: Synthetic oligonucleotide
gcagcaucgcgguaguuga

SEQ ID NO: 2328277 - RNA, 19 nt, Artificial Sequence
  Description of Artificial Sequence: Synthetic oligonucleotide
ucgccgugcucagaggcug

SEQ ID NO: 2328278 - RNA, 19 nt, Artificial Sequence
  Description of Artificial Sequence: Synthetic oligonucleotide
gguggcugucucaggaggg

SEQ ID NO: 2328279 - RNA, 19 nt, Artificial Sequence
  Description of Artificial Sequence: Synthetic oligonucleotide
gucucuggcagcagcauaa

SEQ ID NO: 2328280 - RNA, 19 nt, Artificial Sequence
  Description of Artificial Sequence: Synthetic oligonucleotide
cagaagcuugcgcuugguc

SEQ ID NO: 2328281 - RNA, 19 nt, Artificial Sequence
  Description of Artificial Sequence: Synthetic oligonucleotide
aguuccccaucccggagua

SEQ ID NO: 2328282 - RNA, 19 nt, Artificial Sequence
  Description of Artificial Sequence: Synthetic oligonucleotide
acccgcacugauucuugcu

SEQ ID NO: 2328283 - RNA, 19 nt, Artificial Sequence
  Description of Artificial Sequence: Synthetic oligonucleotide
cuugccuuccugucuaccu

SEQ ID NO: 2328284 - RNA, 19 nt, Artificial Sequence
  Description of Artificial Sequence: Synthetic oligonucleotide
auggggccgguuucgcuca

SEQ ID NO: 2328285 - RNA, 19 nt, Artificial Sequence
  Description of Artificial Sequence: Synthetic oligonucleotide
ggaugacuucagaagcaag

SEQ ID NO: 2328286 - RNA, 19 nt, Artificial Sequence
  Description of Artificial Sequence: Synthetic oligonucleotide
cacaguuccccaucccgga

SEQ ID NO: 2328287 - RNA, 19 nt, Artificial Sequence
  Description of Artificial Sequence: Synthetic oligonucleotide
caaucugacgcuucacuau

SEQ ID NO: 2328288 - RNA, 19 nt, Artificial Sequence
  Description of Artificial Sequence: Synthetic oligonucleotide
auggcagcaucgcgguagu

SEQ ID NO: 2328289 - RNA, 19 nt, Artificial Sequence
  Description of Artificial Sequence: Synthetic oligonucleotide
aagcgccccaagugccaug

SEQ ID NO: 2328290 - RNA, 19 nt, Artificial Sequence
  Description of Artificial Sequence: Synthetic oligonucleotide
cacccgcacugauucuugc

SEQ ID NO: 2328291 - RNA, 19 nt, Artificial Sequence
  Description of Artificial Sequence: Synthetic oligonucleotide
cccggaguaccucuggcag

SEQ ID NO: 2328292 - RNA, 19 nt, Artificial Sequence
  Description of Artificial Sequence: Synthetic oligonucleotide
cuggacuacucaggccucc

SEQ ID NO: 2328293 - RNA, 19 nt, Artificial Sequence
  Description of Artificial Sequence: Synthetic oligonucleotide
ccuccaagcgccccaagug

SEQ ID NO: 2328294 - RNA, 19 nt, Artificial Sequence
  Description of Artificial Sequence: Synthetic oligonucleotide
ucucuggcagcagcauaac

SEQ ID NO: 2328295 - RNA, 19 nt, Artificial Sequence
  Description of Artificial Sequence: Synthetic oligonucleotide
gggacaggcccucugagcu

SEQ ID NO: 2328296 - RNA, 19 nt, Artificial Sequence
  Description of Artificial Sequence: Synthetic oligonucleotide
gcaucugcccauggggccg

SEQ ID NO: 2328297 - RNA, 19 nt, Artificial Sequence
  Description of Artificial Sequence: Synthetic oligonucleotide
ccuagauggcuggagugag

SEQ ID NO: 2328298 - RNA, 19 nt, Artificial Sequence
  Description of Artificial Sequence: Synthetic oligonucleotide
cuguuuagagggcaggguu

SEQ ID NO: 2328299 - RNA, 19 nt, Artificial Sequence
  Description of Artificial Sequence: Synthetic oligonucleotide
ugggguggccuugccuucc

SEQ ID NO: 2328300 - RNA, 19 nt, Artificial Sequence
  Description of Artificial Sequence: Synthetic oligonucleotide
cagcuucccaucgccgugc

SEQ ID NO: 2328301 - RNA, 19 nt, Artificial Sequence
  Description of Artificial Sequence: Synthetic oligonucleotide
cccgcacugauucuugcug

SEQ ID NO: 2328302 - RNA, 19 nt, Artificial Sequence
  Description of Artificial Sequence: Synthetic oligonucleotide
agcgccccaagugccauga

SEQ ID NO: 2328303 - RNA, 19 nt, Artificial Sequence
  Description of Artificial Sequence: Synthetic oligonucleotide
ccugucuaccuuacuagga

SEQ ID NO: 2328304 - RNA, 19 nt, Artificial Sequence
  Description of Artificial Sequence: Synthetic oligonucleotide
uaucagccaccgugcggac

SEQ ID NO: 2328305 - RNA, 19 nt, Artificial Sequence
  Description of Artificial Sequence: Synthetic oligonucleotide
gaguggcuagcagcgggac

SEQ ID NO: 2328306 - RNA, 19 nt, Artificial Sequence
  Description of Artificial Sequence: Synthetic oligonucleotide
cagcaucgcgguaguugag

SEQ ID NO: 2328307 - RNA, 19 nt, Artificial Sequence
  Description of Artificial Sequence: Synthetic oligonucleotide
agaaggagugaggccugga

SEQ ID NO: 2328308 - RNA, 19 nt, Artificial Sequence
  Description of Artificial Sequence: Synthetic oligonucleotide
caccgugcggacuccagaa

SEQ ID NO: 2328309 - RNA, 19 nt, Artificial Sequence
  Description of Artificial Sequence: Synthetic oligonucleotide
ccuaaugguuauaguguga

SEQ ID NO: 2328310 - RNA, 19 nt, Artificial Sequence
  Description of Artificial Sequence: Synthetic oligonucleotide
gaguccaagcacagagaaa

SEQ ID NO: 2328311 - RNA, 19 nt, Artificial Sequence
  Description of Artificial Sequence: Synthetic oligonucleotide
agcccagaccuaaugguua

SEQ ID NO: 2328312 - RNA, 19 nt, Artificial Sequence
  Description of Artificial Sequence: Synthetic oligonucleotide
ggagcccagaccuaauggu

SEQ ID NO: 2328313 - RNA, 19 nt, Artificial Sequence
  Description of Artificial Sequence: Synthetic oligonucleotide
gccgacgacacaguucccc

SEQ ID NO: 2328314 - RNA, 19 nt, Artificial Sequence
  Description of Artificial Sequence: Synthetic oligonucleotide
gggccgguuucgcucagcc

SEQ ID NO: 2328315 - RNA, 19 nt, Artificial Sequence
  Description of Artificial Sequence: Synthetic oligonucleotide
gaagagcgagaaggaguga

SEQ ID NO: 2328316 - RNA, 19 nt, Artificial Sequence
  Description of Artificial Sequence: Synthetic oligonucleotide
ccgugcggacuccagaaac

SEQ ID NO: 2328317 - RNA, 19 nt, Artificial Sequence
  Description of Artificial Sequence: Synthetic oligonucleotide
uggcugucucaggagggaa

SEQ ID NO: 2328318 - RNA, 19 nt, Artificial Sequence
  Description of Artificial Sequence: Synthetic oligonucleotide
cucaggccuccaagcgccc

SEQ ID NO: 2328319 - RNA, 19 nt, Artificial Sequence
  Description of Artificial Sequence: Synthetic oligonucleotide
accgugcggacuccagaaa

SEQ ID NO: 2328320 - RNA, 19 nt, Artificial Sequence
  Description of Artificial Sequence: Synthetic oligonucleotide
caucugcccauggggccgg

SEQ ID NO: 2328321 - RNA, 19 nt, Artificial Sequence
  Description of Artificial Sequence: Synthetic oligonucleotide
ggagaugggguuggggaca

SEQ ID NO: 2328322 - RNA, 19 nt, Artificial Sequence
  Description of Artificial Sequence: Synthetic oligonucleotide
cagaccuaaugguuauagu

SEQ ID NO: 2328323 - RNA, 19 nt, Artificial Sequence
  Description of Artificial Sequence: Synthetic oligonucleotide
gaggagggcgcaggccgcc

SEQ ID NO: 2328324 - RNA, 19 nt, Artificial Sequence
  Description of Artificial Sequence: Synthetic oligonucleotide
agcuucccaucgccgugcu

SEQ ID NO: 2328325 - RNA, 19 nt, Artificial Sequence
  Description of Artificial Sequence: Synthetic oligonucleotide
aucgccgugcucagaggcu

SEQ ID NO: 2328326 - RNA, 19 nt, Artificial Sequence
  Description of Artificial Sequence: Synthetic oligonucleotide
gucacagcgguuagguggu

SEQ ID NO: 2328327 - RNA, 19 nt, Artificial Sequence
  Description of Artificial Sequence: Synthetic oligonucleotide
cugaggauggcagaagcuu

SEQ ID NO: 2328328 - RNA, 19 nt, Artificial Sequence
  Description of Artificial Sequence: Synthetic oligonucleotide
gaaggccgacgacacaguu

SEQ ID NO: 2328329 - RNA, 19 nt, Artificial Sequence
  Description of Artificial Sequence: Synthetic oligonucleotide
ggguacugaggauggcaga

SEQ ID NO: 2328330 - RNA, 19 nt, Artificial Sequence
  Description of Artificial Sequence: Synthetic oligonucleotide
ggagagggcagguguucuc

SEQ ID NO: 2328331 - RNA, 19 nt, Artificial Sequence
  Description of Artificial Sequence: Synthetic oligonucleotide
cuggagugaggagccucug

SEQ ID NO: 2328332 - RNA, 19 nt, Artificial Sequence
  Description of Artificial Sequence: Synthetic oligonucleotide
aucagccaccgugcggacu

SEQ ID NO: 2328333 - RNA, 19 nt, Artificial Sequence
  Description of Artificial Sequence: Synthetic oligonucleotide
cuaggacccuuugucaccu

SEQ ID NO: 2328334 - RNA, 19 nt, Artificial Sequence
  Description of Artificial Sequence: Synthetic oligonucleotide
gcagaagcuugggaggaga

SEQ ID NO: 2328335 - RNA, 19 nt, Artificial Sequence
  Description of Artificial Sequence: Synthetic oligonucleotide
ggccccgcacagugguugg

SEQ ID NO: 2328336 - RNA, 19 nt, Artificial Sequence
  Description of Artificial Sequence: Synthetic oligonucleotide
gcuccauggcccaugugga

SEQ ID NO: 2328337 - RNA, 19 nt, Artificial Sequence
  Description of Artificial Sequence: Synthetic oligonucleotide
ggugggguggccuugccuu

SEQ ID NO: 2328338 - RNA, 19 nt, Artificial Sequence
  Description of Artificial Sequence: Synthetic oligonucleotide
ggauggagcccagaccuaa

SEQ ID NO: 2328339 - RNA, 19 nt, Artificial Sequence
  Description of Artificial Sequence: Synthetic oligonucleotide
gagggcgcaggccgccaga

SEQ ID NO: 2328340 - RNA, 19 nt, Artificial Sequence
  Description of Artificial Sequence: Synthetic oligonucleotide
aggccgccagaaccacaug

SEQ ID NO: 2328341 - RNA, 19 nt, Artificial Sequence
  Description of Artificial Sequence: Synthetic oligonucleotide
caggccgccagaaccacau

SEQ ID NO: 2328342 - RNA, 19 nt, Artificial Sequence
  Description of Artificial Sequence: Synthetic oligonucleotide
ccgccagaaccacaugcug

SEQ ID NO: 2328343 - RNA, 19 nt, Artificial Sequence
  Description of Artificial Sequence: Synthetic oligonucleotide
ccaucgccgugcucagagg

SEQ ID NO: 2328344 - RNA, 19 nt, Artificial Sequence
  Description of Artificial Sequence: Synthetic oligonucleotide
ucacagcgguuagguggug

SEQ ID NO: 2328345 - RNA, 19 nt, Artificial Sequence
  Description of Artificial Sequence: Synthetic oligonucleotide
aggcuccauggcccaugug

SEQ ID NO: 2328346 - RNA, 19 nt, Artificial Sequence
  Description of Artificial Sequence: Synthetic oligonucleotide
ggaguggcuagcagcggga

SEQ ID NO: 2328347 - RNA, 19 nt, Artificial Sequence
  Description of Artificial Sequence: Synthetic oligonucleotide
ccgcacagugguugggaug

SEQ ID NO: 2328348 - RNA, 19 nt, Artificial Sequence
  Description of Artificial Sequence: Synthetic oligonucleotide
ccacccgcacugauucuug

SEQ ID NO: 2328349 - RNA, 19 nt, Artificial Sequence
  Description of Artificial Sequence: Synthetic oligonucleotide
ggucucuggcagcagcaua

SEQ ID NO: 2328350 - RNA, 19 nt, Artificial Sequence
  Description of Artificial Sequence: Synthetic oligonucleotide
ggacaggcccucugagcuc

SEQ ID NO: 2328351 - RNA, 19 nt, Artificial Sequence
  Description of Artificial Sequence: Synthetic oligonucleotide
cgcacugauucuugcugac

SEQ ID NO: 2328352 - RNA, 19 nt, Artificial Sequence
  Description of Artificial Sequence: Synthetic oligonucleotide
ggaggcgcugagcuggacu

SEQ ID NO: 2328353 - RNA, 19 nt, Artificial Sequence
  Description of Artificial Sequence: Synthetic oligonucleotide
cuuuugggugggguggccu

SEQ ID NO: 2328354 - RNA, 19 nt, Artificial Sequence
  Description of Artificial Sequence: Synthetic oligonucleotide
gcccauggggccgguuucg

SEQ ID NO: 2328355 - RNA, 19 nt, Artificial Sequence
  Description of Artificial Sequence: Synthetic oligonucleotide
caguuccccaucccggagu

SEQ ID NO: 2328356 - RNA, 19 nt, Artificial Sequence
  Description of Artificial Sequence: Synthetic oligonucleotide
ccaucccggaguaccucug

SEQ ID NO: 2328357 - RNA, 19 nt, Artificial Sequence
  Description of Artificial Sequence: Synthetic oligonucleotide
cuuucuguguggccagcuu

SEQ ID NO: 2328358 - RNA, 19 nt, Artificial Sequence
  Description of Artificial Sequence: Synthetic oligonucleotide
ggcuggagugaggagccuc

SEQ ID NO: 2328359 - RNA, 19 nt, Artificial Sequence
  Description of Artificial Sequence: Synthetic oligonucleotide
gcacugauucuugcugaca

SEQ ID NO: 2328360 - RNA, 19 nt, Artificial Sequence
  Description of Artificial Sequence: Synthetic oligonucleotide
ccuugccuuccugucuacc

SEQ ID NO: 2328361 - RNA, 19 nt, Artificial Sequence
  Description of Artificial Sequence: Synthetic oligonucleotide
cuggcagaagcuugcgcuu

SEQ ID NO: 2328362 - RNA, 19 nt, Artificial Sequence
  Description of Artificial Sequence: Synthetic oligonucleotide
uggcuggagugaggagccu

SEQ ID NO: 2328363 - RNA, 19 nt, Artificial Sequence
  Description of Artificial Sequence: Synthetic oligonucleotide
gauggagcccagaccuaau

SEQ ID NO: 2328364 - RNA, 19 nt, Artificial Sequence
  Description of Artificial Sequence: Synthetic oligonucleotide
cgagggaaaagguggacgu

SEQ ID NO: 2328365 - RNA, 19 nt, Artificial Sequence
  Description of Artificial Sequence: Synthetic oligonucleotide
cgugcggacuccagaaaca

SEQ ID NO: 2328366 - RNA, 19 nt, Artificial Sequence
  Description of Artificial Sequence: Synthetic oligonucleotide
gcagcauaacgcucaggau

SEQ ID NO: 2328367 - RNA, 19 nt, Artificial Sequence
  Description of Artificial Sequence: Synthetic oligonucleotide
agcuugcgcuuggucucug

SEQ ID NO: 2328368 - RNA, 19 nt, Artificial Sequence
  Description of Artificial Sequence: Synthetic oligonucleotide
ucccaucgccgugcucaga

SEQ ID NO: 2328369 - RNA, 19 nt, Artificial Sequence
  Description of Artificial Sequence: Synthetic oligonucleotide
cacggccccgcacaguggu

SEQ ID NO: 2328370 - RNA, 19 nt, Artificial Sequence
  Description of Artificial Sequence: Synthetic oligonucleotide
uggaggcgcugagcuggac

SEQ ID NO: 2328371 - RNA, 19 nt, Artificial Sequence
  Description of Artificial Sequence: Synthetic oligonucleotide
guccaagcacagagaaagu

SEQ ID NO: 2328372 - RNA, 19 nt, Artificial Sequence
  Description of Artificial Sequence: Synthetic oligonucleotide
ccuuacuaggacccuuugu

SEQ ID NO: 2328373 - RNA, 19 nt, Artificial Sequence
  Description of Artificial Sequence: Synthetic oligonucleotide
aggauggagcccagaccua

SEQ ID NO: 2328374 - RNA, 19 nt, Artificial Sequence
  Description of Artificial Sequence: Synthetic oligonucleotide
ggaguaccucuggcagaag

SEQ ID NO: 2328375 - RNA, 19 nt, Artificial Sequence
  Description of Artificial Sequence: Synthetic oligonucleotide
cacagugguugggaugacu

SEQ ID NO: 2328376 - RNA, 19 nt, Artificial Sequence
  Description of Artificial Sequence: Synthetic oligonucleotide
cuaccuuacuaggacccuu

SEQ ID NO: 2328377 - RNA, 19 nt, Artificial Sequence
  Description of Artificial Sequence: Synthetic oligonucleotide
ggccgguuucgcucagcca

SEQ ID NO: 2328378 - RNA, 19 nt, Artificial Sequence
  Description of Artificial Sequence: Synthetic oligonucleotide
ccaagcgccccaagugcca

SEQ ID NO: 2328379 - RNA, 19 nt, Artificial Sequence
  Description of Artificial Sequence: Synthetic oligonucleotide
cuucacuaucagccaccgu

SEQ ID NO: 2328380 - RNA, 19 nt, Artificial Sequence
  Description of Artificial Sequence: Synthetic oligonucleotide
gcuggacuacucaggccuc

SEQ ID NO: 2328381 - RNA, 19 nt, Artificial Sequence
  Description of Artificial Sequence: Synthetic oligonucleotide
agccaccgugcggacucca

SEQ ID NO: 2328382 - RNA, 19 nt, Artificial Sequence
  Description of Artificial Sequence: Synthetic oligonucleotide
ccggaguaccucuggcaga

SEQ ID NO: 2328383 - RNA, 19 nt, Artificial Sequence
  Description of Artificial Sequence: Synthetic oligonucleotide
cgugcucagaggcuguuua

SEQ ID NO: 2328384 - RNA, 19 nt, Artificial Sequence
  Description of Artificial Sequence: Synthetic oligonucleotide
cagacugggccuccucaau

SEQ ID NO: 2328385 - RNA, 19 nt, Artificial Sequence
  Description of Artificial Sequence: Synthetic oligonucleotide
gccaccgugcggacuccag

SEQ ID NO: 2328386 - RNA, 19 nt, Artificial Sequence
  Description of Artificial Sequence: Synthetic oligonucleotide
ucugcccauggggccgguu

SEQ ID NO: 2328387 - RNA, 19 nt, Artificial Sequence
  Description of Artificial Sequence: Synthetic oligonucleotide
aggagccucugagccuuuu

SEQ ID NO: 2328388 - RNA, 19 nt, Artificial Sequence
  Description of Artificial Sequence: Synthetic oligonucleotide
gcgguuaggugguggcugu

SEQ ID NO: 2328389 - RNA, 19 nt, Artificial Sequence
  Description of Artificial Sequence: Synthetic oligonucleotide
gccgccagaaccacaugcu

SEQ ID NO: 2328390 - RNA, 19 nt, Artificial Sequence
  Description of Artificial Sequence: Synthetic oligonucleotide
ggccuccaagcgccccaag

SEQ ID NO: 2328391 - RNA, 19 nt, Artificial Sequence
  Description of Artificial Sequence: Synthetic oligonucleotide
guggaggcgcugagcugga

SEQ ID NO: 2328392 - RNA, 19 nt, Artificial Sequence
  Description of Artificial Sequence: Synthetic oligonucleotide
gcccagaccuaaugguuau

SEQ ID NO: 2328393 - RNA, 19 nt, Artificial Sequence
  Description of Artificial Sequence: Synthetic oligonucleotide
ccaccgugcggacuccaga

SEQ ID NO: 2328394 - RNA, 19 nt, Artificial Sequence
  Description of Artificial Sequence: Synthetic oligonucleotide
gguggacguugcagggaga

SEQ ID NO: 2328395 - RNA, 19 nt, Artificial Sequence
  Description of Artificial Sequence: Synthetic oligonucleotide
ggcaggguuaggaguggcu

SEQ ID NO: 2328396 - RNA, 19 nt, Artificial Sequence
  Description of Artificial Sequence: Synthetic oligonucleotide
gcuagcagcgggacauggu

SEQ ID NO: 2328397 - RNA, 19 nt, Artificial Sequence
  Description of Artificial Sequence: Synthetic oligonucleotide
gcauaacgcucaggaugca

SEQ ID NO: 2328398 - RNA, 19 nt, Artificial Sequence
  Description of Artificial Sequence: Synthetic oligonucleotide
gggcgcaggccgccagaac

SEQ ID NO: 2328399 - RNA, 19 nt, Artificial Sequence
  Description of Artificial Sequence: Synthetic oligonucleotide
ccaggccacggccccgcac

SEQ ID NO: 2328400 - RNA, 19 nt, Artificial Sequence
  Description of Artificial Sequence: Synthetic oligonucleotide
gcgcugagcuggacuacuc

SEQ ID NO: 2328401 - RNA, 19 nt, Artificial Sequence
  Description of Artificial Sequence: Synthetic oligonucleotide
cccaucccggaguaccucu

SEQ ID NO: 2328402 - RNA, 19 nt, Artificial Sequence
  Description of Artificial Sequence: Synthetic oligonucleotide
ggaaggccgacgacacagu

SEQ ID NO: 2328403 - RNA, 19 nt, Artificial Sequence
  Description of Artificial Sequence: Synthetic oligonucleotide
cagcgguuaggugguggcu

SEQ ID NO: 2328404 - RNA, 19 nt, Artificial Sequence
  Description of Artificial Sequence: Synthetic oligonucleotide
gguuucgcucagccaggau

SEQ ID NO: 2328405 - RNA, 19 nt, Artificial Sequence
  Description of Artificial Sequence: Synthetic oligonucleotide
caagcgccccaagugccau

SEQ ID NO: 2328406 - RNA, 19 nt, Artificial Sequence
  Description of Artificial Sequence: Synthetic oligonucleotide
gcacagugguugggaugac

SEQ ID NO: 2328407 - RNA, 19 nt, Artificial Sequence
  Description of Artificial Sequence: Synthetic oligonucleotide
cggccccgcacagugguug

SEQ ID NO: 2328408 - RNA, 19 nt, Artificial Sequence
  Description of Artificial Sequence: Synthetic oligonucleotide
ggccgacgacacaguuccc

SEQ ID NO: 2328409 - RNA, 19 nt, Artificial Sequence
  Description of Artificial Sequence: Synthetic oligonucleotide
acggccccgcacagugguu

SEQ ID NO: 2328410 - RNA, 19 nt, Artificial Sequence
  Description of Artificial Sequence: Synthetic oligonucleotide
gggguggccuugccuuccu

SEQ ID NO: 2328411 - RNA, 19 nt, Artificial Sequence
  Description of Artificial Sequence: Synthetic oligonucleotide
ggacauggucacagcgguu

SEQ ID NO: 2328412 - RNA, 19 nt, Artificial Sequence
  Description of Artificial Sequence: Synthetic oligonucleotide
cccgcacagugguugggau

SEQ ID NO: 2328413 - RNA, 19 nt, Artificial Sequence
  Description of Artificial Sequence: Synthetic oligonucleotide
gguuggggacaggcccucu

SEQ ID NO: 2328414 - RNA, 19 nt, Artificial Sequence
  Description of Artificial Sequence: Synthetic oligonucleotide
cccagaccuaaugguuaua

SEQ ID NO: 2328415 - RNA, 19 nt, Artificial Sequence
  Description of Artificial Sequence: Synthetic oligonucleotide
cgcgguaguugagcagaga

SEQ ID NO: 2328416 - RNA, 19 nt, Artificial Sequence
  Description of Artificial Sequence: Synthetic oligonucleotide
cgguuaggugguggcuguc

SEQ ID NO: 2328417 - RNA, 19 nt, Artificial Sequence
  Description of Artificial Sequence: Synthetic oligonucleotide
gaggagccucugagccuuu

SEQ ID NO: 2328418 - RNA, 19 nt, Artificial Sequence
  Description of Artificial Sequence: Synthetic oligonucleotide
cccacccgcacugauucuu

SEQ ID NO: 2328419 - RNA, 19 nt, Artificial Sequence
  Description of Artificial Sequence: Synthetic oligonucleotide
cgacgacacaguuccccau

SEQ ID NO: 2328420 - RNA, 19 nt, Artificial Sequence
  Description of Artificial Sequence: Synthetic oligonucleotide
cgccccaagugccaugauu

SEQ ID NO: 2328421 - RNA, 19 nt, Artificial Sequence
  Description of Artificial Sequence: Synthetic oligonucleotide
gccgugcucagaggcuguu

SEQ ID NO: 2328422 - RNA, 19 nt, Artificial Sequence
  Description of Artificial Sequence: Synthetic oligonucleotide
ccccacccgcacugauucu

SEQ ID NO: 2328423 - RNA, 19 nt, Artificial Sequence
  Description of Artificial Sequence: Synthetic oligonucleotide
gcgccccaagugccaugau

SEQ ID NO: 2328424 - RNA, 19 nt, Artificial Sequence
  Description of Artificial Sequence: Synthetic oligonucleotide
cgccgugcucagaggcugu

SEQ ID NO: 2328425 - RNA, 19 nt, Artificial Sequence
  Description of Artificial Sequence: Synthetic oligonucleotide
ccgugcucagaggcuguuu

SEQ ID NO: 2328426 - RNA, 19 nt, Artificial Sequence
  Description of Artificial Sequence: Synthetic oligonucleotide
gauagaaauacccuugggg

SEQ ID NO: 2328427 - RNA, 19 nt, Artificial Sequence
  Description of Artificial Sequence: Synthetic oligonucleotide
aacgguuugucauugugcc

SEQ ID NO: 2328428 - RNA, 19 nt, Artificial Sequence
  Description of Artificial Sequence: Synthetic oligonucleotide
auaacagccuucuugagag

SEQ ID NO: 2328429 - RNA, 19 nt, Artificial Sequence
  Description of Artificial Sequence: Synthetic oligonucleotide
guugcuauaagauaccagc

SEQ ID NO: 2328430 - RNA, 19 nt, Artificial Sequence
  Description of Artificial Sequence: Synthetic oligonucleotide
uccucuaagaguaucagca

SEQ ID NO: 2328431 - RNA, 19 nt, Artificial Sequence
  Description of Artificial Sequence: Synthetic oligonucleotide
agaauaggagucucggucc

SEQ ID NO: 2328432 - RNA, 19 nt, Artificial Sequence
  Description of Artificial Sequence: Synthetic oligonucleotide
uuguguugcuauaagauac

SEQ ID NO: 2328433 - RNA, 19 nt, Artificial Sequence
  Description of Artificial Sequence: Synthetic oligonucleotide
auaagauaccagcucaagg

SEQ ID NO: 2328434 - RNA, 19 nt, Artificial Sequence
  Description of Artificial Sequence: Synthetic oligonucleotide
acacugauagcacacgucg

SEQ ID NO: 2328435 - RNA, 19 nt, Artificial Sequence
  Description of Artificial Sequence: Synthetic oligonucleotide
caaggagauagaaauaccc

SEQ ID NO: 2328436 - RNA, 19 nt, Artificial Sequence
  Description of Artificial Sequence: Synthetic oligonucleotide
ugaagaaauugaccgagcc

SEQ ID NO: 2328437 - RNA, 19 nt, Artificial Sequence
  Description of Artificial Sequence: Synthetic oligonucleotide
uccaugauaccacacacca

SEQ ID NO: 2328438 - RNA, 19 nt, Artificial Sequence
  Description of Artificial Sequence: Synthetic oligonucleotide
acugauagcacacgucggc

SEQ ID NO: 2328439 - RNA, 19 nt, Artificial Sequence
  Description of Artificial Sequence: Synthetic oligonucleotide
ucuaagaguaucagcagcu

SEQ ID NO: 2328440 - RNA, 19 nt, Artificial Sequence
  Description of Artificial Sequence: Synthetic oligonucleotide
aagccaagccaguauuccc

SEQ ID NO: 2328441 - RNA, 19 nt, Artificial Sequence
  Description of Artificial Sequence: Synthetic oligonucleotide
gagauagaaauacccuugg

SEQ ID NO: 2328442 - RNA, 19 nt, Artificial Sequence
  Description of Artificial Sequence: Synthetic oligonucleotide
uagaaauacccuuggggag

SEQ ID NO: 2328443 - RNA, 19 nt, Artificial Sequence
  Description of Artificial Sequence: Synthetic oligonucleotide
gagaguacgccccaccgcg

SEQ ID NO: 2328444 - RNA, 19 nt, Artificial Sequence
  Description of Artificial Sequence: Synthetic oligonucleotide
agcauaacagccuucuuga

SEQ ID NO: 2328445 - RNA, 19 nt, Artificial Sequence
  Description of Artificial Sequence: Synthetic oligonucleotide
ucuugagagaguacgcccc

SEQ ID NO: 2328446 - RNA, 19 nt, Artificial Sequence
  Description of Artificial Sequence: Synthetic oligonucleotide
acaguuaccagaauaggag

SEQ ID NO: 2328447 - RNA, 19 nt, Artificial Sequence
  Description of Artificial Sequence: Synthetic oligonucleotide
caaagagaagcugucauag

SEQ ID NO: 2328448 - RNA, 19 nt, Artificial Sequence
  Description of Artificial Sequence: Synthetic oligonucleotide
agucgcagcucauacacuc

SEQ ID NO: 2328449 - RNA, 19 nt, Artificial Sequence
  Description of Artificial Sequence: Synthetic oligonucleotide
gucaccaccgcacaagccg

SEQ ID NO: 2328450 - RNA, 19 nt, Artificial Sequence
  Description of Artificial Sequence: Synthetic oligonucleotide
acggcuggucaccugaugc

SEQ ID NO: 2328451 - RNA, 19 nt, Artificial Sequence
  Description of Artificial Sequence: Synthetic oligonucleotide
uggucugauggaaacagca

SEQ ID NO: 2328452 - RNA, 19 nt, Artificial Sequence
  Description of Artificial Sequence: Synthetic oligonucleotide
ucaaggagauagaaauacc

SEQ ID NO: 2328453 - RNA, 19 nt, Artificial Sequence
  Description of Artificial Sequence: Synthetic oligonucleotide
uuugucauugugccaggag

SEQ ID NO: 2328454 - RNA, 19 nt, Artificial Sequence
  Description of Artificial Sequence: Synthetic oligonucleotide
cuguccacagugcugaacg

SEQ ID NO: 2328455 - RNA, 19 nt, Artificial Sequence
  Description of Artificial Sequence: Synthetic oligonucleotide
caugggacagucaccaccg

SEQ ID NO: 2328456 - RNA, 19 nt, Artificial Sequence
  Description of Artificial Sequence: Synthetic oligonucleotide
uaagaguaucagcagcuca

SEQ ID NO: 2328457 - RNA, 19 nt, Artificial Sequence
  Description of Artificial Sequence: Synthetic oligonucleotide
acucucagguuccaaagag

SEQ ID NO: 2328458 - RNA, 19 nt, Artificial Sequence
  Description of Artificial Sequence: Synthetic oligonucleotide
uguguugcuauaagauacc

SEQ ID NO: 2328459 - RNA, 19 nt, Artificial Sequence
  Description of Artificial Sequence: Synthetic oligonucleotide
ugaacgguuugucauugug

SEQ ID NO: 2328460 - RNA, 19 nt, Artificial Sequence
  Description of Artificial Sequence: Synthetic oligonucleotide
agauagaaauacccuuggg

SEQ ID NO: 2328461 - RNA, 19 nt, Artificial Sequence
  Description of Artificial Sequence: Synthetic oligonucleotide
uuggggaguacucauggga

SEQ ID NO: 2328462 - RNA, 19 nt, Artificial Sequence
  Description of Artificial Sequence: Synthetic oligonucleotide
guagugaccuccaugauac

SEQ ID NO: 2328463 - RNA, 19 nt, Artificial Sequence
  Description of Artificial Sequence: Synthetic oligonucleotide
ucauugugccaggagaggg

SEQ ID NO: 2328464 - RNA, 19 nt, Artificial Sequence
  Description of Artificial Sequence: Synthetic oligonucleotide
ucauacacuccacucugcc

SEQ ID NO: 2328465 - RNA, 19 nt, Artificial Sequence
  Description of Artificial Sequence: Synthetic oligonucleotide
ugcuauaagauaccagcuc

SEQ ID NO: 2328466 - RNA, 19 nt, Artificial Sequence
  Description of Artificial Sequence: Synthetic oligonucleotide
uauaagauaccagcucaag

SEQ ID NO: 2328467 - RNA, 19 nt, Artificial Sequence
  Description of Artificial Sequence: Synthetic oligonucleotide
ugucauagugggcucgugc

SEQ ID NO: 2328468 - RNA, 19 nt, Artificial Sequence
  Description of Artificial Sequence: Synthetic oligonucleotide
cucuaagaguaucagcagc

SEQ ID NO: 2328469 - RNA, 19 nt, Artificial Sequence
  Description of Artificial Sequence: Synthetic oligonucleotide
agagaguacgccccaccgc

SEQ ID NO: 2328470 - RNA, 19 nt, Artificial Sequence
  Description of Artificial Sequence: Synthetic oligonucleotide
uugcuauaagauaccagcu

SEQ ID NO: 2328471 - RNA, 19 nt, Artificial Sequence
  Description of Artificial Sequence: Synthetic oligonucleotide
auggaaacagcaaggugcc

SEQ ID NO: 2328472 - RNA, 19 nt, Artificial Sequence
  Description of Artificial Sequence: Synthetic oligonucleotide
cagaauaggagucucgguc

SEQ ID NO: 2328473 - RNA, 19 nt, Artificial Sequence
  Description of Artificial Sequence: Synthetic oligonucleotide
gagagaguacgccccaccg

SEQ ID NO: 2328474 - RNA, 19 nt, Artificial Sequence
  Description of Artificial Sequence: Synthetic oligonucleotide
aguaucagcagcucauggu

SEQ ID NO: 2328475 - RNA, 19 nt, Artificial Sequence
  Description of Artificial Sequence: Synthetic oligonucleotide
aaggagauagaaauacccu

SEQ ID NO: 2328476 - RNA, 19 nt, Artificial Sequence
  Description of Artificial Sequence: Synthetic oligonucleotide
ugccaguuggugaagaaau

SEQ ID NO: 2328477 - RNA, 19 nt, Artificial Sequence
  Description of Artificial Sequence: Synthetic oligonucleotide
gaagaaauugaccgagcca

SEQ ID NO: 2328478 - RNA, 19 nt, Artificial Sequence
  Description of Artificial Sequence: Synthetic oligonucleotide
acauuguguugcuauaaga

SEQ ID NO: 2328479 - RNA, 19 nt, Artificial Sequence
  Description of Artificial Sequence: Synthetic oligonucleotide
aagccaguauuccccaucu

SEQ ID NO: 2328480 - RNA, 19 nt, Artificial Sequence
  Description of Artificial Sequence: Synthetic oligonucleotide
guacucaugggacagucac

SEQ ID NO: 2328481 - RNA, 19 nt, Artificial Sequence
  Description of Artificial Sequence: Synthetic oligonucleotide
aguauuccccaucuggccu

SEQ ID NO: 2328482 - RNA, 19 nt, Artificial Sequence
  Description of Artificial Sequence: Synthetic oligonucleotide
ucugccugugaccugcccc

SEQ ID NO: 2328483 - RNA, 19 nt, Artificial Sequence
  Description of Artificial Sequence: Synthetic oligonucleotide
uaccagaauaggagucucg

SEQ ID NO: 2328484 - RNA, 19 nt, Artificial Sequence
  Description of Artificial Sequence: Synthetic oligonucleotide
aguuaccagaauaggaguc

SEQ ID NO: 2328485 - RNA, 19 nt, Artificial Sequence
  Description of Artificial Sequence: Synthetic oligonucleotide
cagcauaacagccuucuug

SEQ ID NO: 2328486 - RNA, 19 nt, Artificial Sequence
  Description of Artificial Sequence: Synthetic oligonucleotide
agcaucaccaugguacugg

SEQ ID NO: 2328487 - RNA, 19 nt, Artificial Sequence
  Description of Artificial Sequence: Synthetic oligonucleotide
gaccgagccaucuugccgc

SEQ ID NO: 2328488 - RNA, 19 nt, Artificial Sequence
  Description of Artificial Sequence: Synthetic oligonucleotide
acuggucugauggaaacag

SEQ ID NO: 2328489 - RNA, 19 nt, Artificial Sequence
  Description of Artificial Sequence: Synthetic oligonucleotide
gucauagugggcucgugcc

SEQ ID NO: 2328490 - RNA, 19 nt, Artificial Sequence
  Description of Artificial Sequence: Synthetic oligonucleotide
guaucagcagcucaugguc

SEQ ID NO: 2328491 - RNA, 19 nt, Artificial Sequence
  Description of Artificial Sequence: Synthetic oligonucleotide
ugguuccaagccaagccag

SEQ ID NO: 2328492 - RNA, 19 nt, Artificial Sequence
  Description of Artificial Sequence: Synthetic oligonucleotide
aggagauagaaauacccuu

SEQ ID NO: 2328493 - RNA, 19 nt, Artificial Sequence
  Description of Artificial Sequence: Synthetic oligonucleotide
uggggaguacucaugggac

SEQ ID NO: 2328494 - RNA, 19 nt, Artificial Sequence
  Description of Artificial Sequence: Synthetic oligonucleotide
gaacgguuugucauugugc

SEQ ID NO: 2328495 - RNA, 19 nt, Artificial Sequence
  Description of Artificial Sequence: Synthetic oligonucleotide
auaccacacaccauugagg

SEQ ID NO: 2328496 - RNA, 19 nt, Artificial Sequence
  Description of Artificial Sequence: Synthetic oligonucleotide
guaguggucacucucaggu

SEQ ID NO: 2328497 - RNA, 19 nt, Artificial Sequence
  Description of Artificial Sequence: Synthetic oligonucleotide
cacacgucggcccagucgc

SEQ ID NO: 2328498 - RNA, 19 nt, Artificial Sequence
  Description of Artificial Sequence: Synthetic oligonucleotide
uggaguuuuggguccagac

SEQ ID NO: 2328499 - RNA, 19 nt, Artificial Sequence
  Description of Artificial Sequence: Synthetic oligonucleotide
ugagagaguacgccccacc

SEQ ID NO: 2328500 - RNA, 19 nt, Artificial Sequence
  Description of Artificial Sequence: Synthetic oligonucleotide
gaauaggagucucgguccc

SEQ ID NO: 2328501 - RNA, 19 nt, Artificial Sequence
  Description of Artificial Sequence: Synthetic oligonucleotide
guagaccccguccugguag

SEQ ID NO: 2328502 - RNA, 19 nt, Artificial Sequence
  Description of Artificial Sequence: Synthetic oligonucleotide
ucauagugggcucgugccc

SEQ ID NO: 2328503 - RNA, 19 nt, Artificial Sequence
  Description of Artificial Sequence: Synthetic oligonucleotide
ugauaccacacaccauuga

SEQ ID NO: 2328504 - RNA, 19 nt, Artificial Sequence
  Description of Artificial Sequence: Synthetic oligonucleotide
ugacgguccagccuccgcc

SEQ ID NO: 2328505 - RNA, 19 nt, Artificial Sequence
  Description of Artificial Sequence: Synthetic oligonucleotide
auugaccgagccaucuugc

SEQ ID NO: 2328506 - RNA, 19 nt, Artificial Sequence
  Description of Artificial Sequence: Synthetic oligonucleotide
aagaguaucagcagcucau

SEQ ID NO: 2328507 - RNA, 19 nt, Artificial Sequence
  Description of Artificial Sequence: Synthetic oligonucleotide
ggugaagaaauugaccgag

SEQ ID NO: 2328508 - RNA, 19 nt, Artificial Sequence
  Description of Artificial Sequence: Synthetic oligonucleotide
cugcccacuagacucagag

SEQ ID NO: 2328509 - RNA, 19 nt, Artificial Sequence
  Description of Artificial Sequence: Synthetic oligonucleotide
gcuauaagauaccagcuca

SEQ ID NO: 2328510 - RNA, 19 nt, Artificial Sequence
  Description of Artificial Sequence: Synthetic oligonucleotide
ucuggccucccaaagccug

SEQ ID NO: 2328511 - RNA, 19 nt, Artificial Sequence
  Description of Artificial Sequence: Synthetic oligonucleotide
cacaguuaccagaauagga

SEQ ID NO: 2328512 - RNA, 19 nt, Artificial Sequence
  Description of Artificial Sequence: Synthetic oligonucleotide
ugcacugguuccaagccaa

SEQ ID NO: 2328513 - RNA, 19 nt, Artificial Sequence
  Description of Artificial Sequence: Synthetic oligonucleotide
uggugaagaaauugaccga

SEQ ID NO: 2328514 - RNA, 19 nt, Artificial Sequence
  Description of Artificial Sequence: Synthetic oligonucleotide
cacauuguguugcuauaag

SEQ ID NO: 2328515 - RNA, 19 nt, Artificial Sequence
  Description of Artificial Sequence: Synthetic oligonucleotide
caguauuccccaucuggcc

SEQ ID NO: 2328516 - RNA, 19 nt, Artificial Sequence
  Description of Artificial Sequence: Synthetic oligonucleotide
agaaauacccuuggggagu

SEQ ID NO: 2328517 - RNA, 19 nt, Artificial Sequence
  Description of Artificial Sequence: Synthetic oligonucleotide
cuccaugauaccacacacc

SEQ ID NO: 2328518 - RNA, 19 nt, Artificial Sequence
  Description of Artificial Sequence: Synthetic oligonucleotide
aagcugucauagugggcuc

SEQ ID NO: 2328519 - RNA, 19 nt, Artificial Sequence
  Description of Artificial Sequence: Synthetic oligonucleotide
gcucugaucucucuggugc

SEQ ID NO: 2328520 - RNA, 19 nt, Artificial Sequence
  Description of Artificial Sequence: Synthetic oligonucleotide
uacucaugggacagucacc

SEQ ID NO: 2328521 - RNA, 19 nt, Artificial Sequence
  Description of Artificial Sequence: Synthetic oligonucleotide
uccugcugccucaagcucu

SEQ ID NO: 2328522 - RNA, 19 nt, Artificial Sequence
  Description of Artificial Sequence: Synthetic oligonucleotide
guuggagugggcacaggcg

SEQ ID NO: 2328523 - RNA, 19 nt, Artificial Sequence
  Description of Artificial Sequence: Synthetic oligonucleotide
uguccacagugcugaacgg

SEQ ID NO: 2328524 - RNA, 19 nt, Artificial Sequence
  Description of Artificial Sequence: Synthetic oligonucleotide
ggcacaguuaccagaauag

SEQ ID NO: 2328525 - RNA, 19 nt, Artificial Sequence
  Description of Artificial Sequence: Synthetic oligonucleotide
cacugauagcacacgucgg

SEQ ID NO: 2328526 - RNA, 19 nt, Artificial Sequence
  Description of Artificial Sequence: Synthetic oligonucleotide
aaauugaccgagccaucuu

SEQ ID NO: 2328527 - RNA, 19 nt, Artificial Sequence
  Description of Artificial Sequence: Synthetic oligonucleotide
gggcccacuggucugaugg

SEQ ID NO: 2328528 - RNA, 19 nt, Artificial Sequence
  Description of Artificial Sequence: Synthetic oligonucleotide
accccguccugguagcggc

SEQ ID NO: 2328529 - RNA, 19 nt, Artificial Sequence
  Description of Artificial Sequence: Synthetic oligonucleotide
caagccaagccaguauucc

SEQ ID NO: 2328530 - RNA, 19 nt, Artificial Sequence
  Description of Artificial Sequence: Synthetic oligonucleotide
ugugccaggagagggaauc

SEQ ID NO: 2328531 - RNA, 19 nt, Artificial Sequence
  Description of Artificial Sequence: Synthetic oligonucleotide
ucgcagcucauacacucca

SEQ ID NO: 2328532 - RNA, 19 nt, Artificial Sequence
  Description of Artificial Sequence: Synthetic oligonucleotide
gacgguaguggucacucuc

SEQ ID NO: 2328533 - RNA, 19 nt, Artificial Sequence
  Description of Artificial Sequence: Synthetic oligonucleotide
cugguagcggcuccgguag

SEQ ID NO: 2328534 - RNA, 19 nt, Artificial Sequence
  Description of Artificial Sequence: Synthetic oligonucleotide
ucggucccuguccacagug

SEQ ID NO: 2328535 - RNA, 19 nt, Artificial Sequence
  Description of Artificial Sequence: Synthetic oligonucleotide
acagggcacaguuaccaga

SEQ ID NO: 2328536 - RNA, 19 nt, Artificial Sequence
  Description of Artificial Sequence: Synthetic oligonucleotide
ugggacagucaccaccgca

SEQ ID NO: 2328537 - RNA, 19 nt, Artificial Sequence
  Description of Artificial Sequence: Synthetic oligonucleotide
ugcccacuagacucagagg

SEQ ID NO: 2328538 - RNA, 19 nt, Artificial Sequence
  Description of Artificial Sequence: Synthetic oligonucleotide
aguccucuaagaguaucag

SEQ ID NO: 2328539 - RNA, 19 nt, Artificial Sequence
  Description of Artificial Sequence: Synthetic oligonucleotide
augacgguccagccuccgc

SEQ ID NO: 2328540 - RNA, 19 nt, Artificial Sequence
  Description of Artificial Sequence: Synthetic oligonucleotide
uugaccgagccaucuugcc

SEQ ID NO: 2328541 - RNA, 19 nt, Artificial Sequence
  Description of Artificial Sequence: Synthetic oligonucleotide
guccucuaagaguaucagc

SEQ ID NO: 2328542 - RNA, 19 nt, Artificial Sequence
  Description of Artificial Sequence: Synthetic oligonucleotide
ugccccgugagccucugca

SEQ ID NO: 2328543 - RNA, 19 nt, Artificial Sequence
  Description of Artificial Sequence: Synthetic oligonucleotide
cauagugggcucgugcccc

SEQ ID NO: 2328544 - RNA, 19 nt, Artificial Sequence
  Description of Artificial Sequence: Synthetic oligonucleotide
aggcgugguaccaccagcc

SEQ ID NO: 2328545 - RNA, 19 nt, Artificial Sequence
  Description of Artificial Sequence: Synthetic oligonucleotide
cucauacacuccacucugc

SEQ ID NO: 2328546 - RNA, 19 nt, Artificial Sequence
  Description of Artificial Sequence: Synthetic oligonucleotide
ugaccuccaugauaccaca

SEQ ID NO: 2328547 - RNA, 19 nt, Artificial Sequence
  Description of Artificial Sequence: Synthetic oligonucleotide
ucccuguccacagugcuga

SEQ ID NO: 2328548 - RNA, 19 nt, Artificial Sequence
  Description of Artificial Sequence: Synthetic oligonucleotide
cacacugauagcacacguc

SEQ ID NO: 2328549 - RNA, 19 nt, Artificial Sequence
  Description of Artificial Sequence: Synthetic oligonucleotide
agaggcaccagaggcagug

SEQ ID NO: 2328550 - RNA, 19 nt, Artificial Sequence
  Description of Artificial Sequence: Synthetic oligonucleotide
caugauaccacacaccauu

SEQ ID NO: 2328551 - RNA, 19 nt, Artificial Sequence
  Description of Artificial Sequence: Synthetic oligonucleotide
agaagcugucauagugggc

SEQ ID NO: 2328552 - RNA, 19 nt, Artificial Sequence
  Description of Artificial Sequence: Synthetic oligonucleotide
aagccgggucagcauaaca

SEQ ID NO: 2328553 - RNA, 19 nt, Artificial Sequence
  Description of Artificial Sequence: Synthetic oligonucleotide
gguuggagugggcacaggc

SEQ ID NO: 2328554 - RNA, 19 nt, Artificial Sequence
  Description of Artificial Sequence: Synthetic oligonucleotide
uggugcucuggaguuuugg

SEQ ID NO: 2328555 - RNA, 19 nt, Artificial Sequence
  Description of Artificial Sequence: Synthetic oligonucleotide
gaucucucuggugcucugg

SEQ ID NO: 2328556 - RNA, 19 nt, Artificial Sequence
  Description of Artificial Sequence: Synthetic oligonucleotide
aggagucucggucccuguc

SEQ ID NO: 2328557 - RNA, 19 nt, Artificial Sequence
  Description of Artificial Sequence: Synthetic oligonucleotide
caccccaguccucuaagag

SEQ ID NO: 2328558 - RNA, 19 nt, Artificial Sequence
  Description of Artificial Sequence: Synthetic oligonucleotide
ucuugccgccucuggauga

SEQ ID NO: 2328559 - RNA, 19 nt, Artificial Sequence
  Description of Artificial Sequence: Synthetic oligonucleotide
gcucauacacuccacucug

SEQ ID NO: 2328560 - RNA, 19 nt, Artificial Sequence
  Description of Artificial Sequence: Synthetic oligonucleotide
ccacacaccauugagguug

SEQ ID NO: 2328561 - RNA, 19 nt, Artificial Sequence
  Description of Artificial Sequence: Synthetic oligonucleotide
acaggcgugguaccaccag

SEQ ID NO: 2328562 - RNA, 19 nt, Artificial Sequence
  Description of Artificial Sequence: Synthetic oligonucleotide
ugugaccugccccgugagc

SEQ ID NO: 2328563 - RNA, 19 nt, Artificial Sequence
  Description of Artificial Sequence: Synthetic oligonucleotide
guacagggcacaguuacca

SEQ ID NO: 2328564 - RNA, 19 nt, Artificial Sequence
  Description of Artificial Sequence: Synthetic oligonucleotide
aucuugccgccucuggaug

SEQ ID NO: 2328565 - RNA, 19 nt, Artificial Sequence
  Description of Artificial Sequence: Synthetic oligonucleotide
cuauaagauaccagcucaa

SEQ ID NO: 2328566 - RNA, 19 nt, Artificial Sequence
  Description of Artificial Sequence: Synthetic oligonucleotide
uuaccagaauaggagucuc

SEQ ID NO: 2328567 - RNA, 19 nt, Artificial Sequence
  Description of Artificial Sequence: Synthetic oligonucleotide
uucacaccacacugauagc

SEQ ID NO: 2328568 - RNA, 19 nt, Artificial Sequence
  Description of Artificial Sequence: Synthetic oligonucleotide
agaaauugaccgagccauc

SEQ ID NO: 2328569 - RNA, 19 nt, Artificial Sequence
  Description of Artificial Sequence: Synthetic oligonucleotide
acagucccuccacgggccc

SEQ ID NO: 2328570 - RNA, 19 nt, Artificial Sequence
  Description of Artificial Sequence: Synthetic oligonucleotide
auacccuuggggaguacuc

SEQ ID NO: 2328571 - RNA, 19 nt, Artificial Sequence
  Description of Artificial Sequence: Synthetic oligonucleotide
caagccaguauuccccauc

SEQ ID NO: 2328572 - RNA, 19 nt, Artificial Sequence
  Description of Artificial Sequence: Synthetic oligonucleotide
cagucaccaccgcacaagc

SEQ ID NO: 2328573 - RNA, 19 nt, Artificial Sequence
  Description of Artificial Sequence: Synthetic oligonucleotide
agaguaucagcagcucaug

SEQ ID NO: 2328574 - RNA, 19 nt, Artificial Sequence
  Description of Artificial Sequence: Synthetic oligonucleotide
gaaauugaccgagccaucu

SEQ ID NO: 2328575 - RNA, 19 nt, Artificial Sequence
  Description of Artificial Sequence: Synthetic oligonucleotide
ccagucgcagcucauacac

SEQ ID NO: 2328576 - RNA, 19 nt, Artificial Sequence
  Description of Artificial Sequence: Synthetic oligonucleotide
cacacaccauugagguugg

SEQ ID NO: 2328577 - RNA, 19 nt, Artificial Sequence
  Description of Artificial Sequence: Synthetic oligonucleotide
gguaguggucacucucagg

SEQ ID NO: 2328578 - RNA, 19 nt, Artificial Sequence
  Description of Artificial Sequence: Synthetic oligonucleotide
cacucugccugugaccugc

SEQ ID NO: 2328579 - RNA, 19 nt, Artificial Sequence
  Description of Artificial Sequence: Synthetic oligonucleotide
uacuggccaagccgcagac

SEQ ID NO: 2328580 - RNA, 19 nt, Artificial Sequence
  Description of Artificial Sequence: Synthetic oligonucleotide
gaguacucaugggacaguc

SEQ ID NO: 2328581 - RNA, 19 nt, Artificial Sequence
  Description of Artificial Sequence: Synthetic oligonucleotide
acgucggcccagucgcagc

SEQ ID NO: 2328582 - RNA, 19 nt, Artificial Sequence
  Description of Artificial Sequence: Synthetic oligonucleotide
aauaggagucucggucccu

SEQ ID NO: 2328583 - RNA, 19 nt, Artificial Sequence
  Description of Artificial Sequence: Synthetic oligonucleotide
cuccacucugccugugacc

SEQ ID NO: 2328584 - RNA, 19 nt, Artificial Sequence
  Description of Artificial Sequence: Synthetic oligonucleotide
gugaccuccaugauaccac

SEQ ID NO: 2328585 - RNA, 19 nt, Artificial Sequence
  Description of Artificial Sequence: Synthetic oligonucleotide
gauaccagcucaaggagau

SEQ ID NO: 2328586 - RNA, 19 nt, Artificial Sequence
  Description of Artificial Sequence: Synthetic oligonucleotide
gacgguccagccuccgccc

SEQ ID NO: 2328587 - RNA, 19 nt, Artificial Sequence
  Description of Artificial Sequence: Synthetic oligonucleotide
cugguuccaagccaagcca

SEQ ID NO: 2328588 - RNA, 19 nt, Artificial Sequence
  Description of Artificial Sequence: Synthetic oligonucleotide
augauaccacacaccauug

SEQ ID NO: 2328589 - RNA, 19 nt, Artificial Sequence
  Description of Artificial Sequence: Synthetic oligonucleotide
agaggcagugguaggaccu

SEQ ID NO: 2328590 - RNA, 19 nt, Artificial Sequence
  Description of Artificial Sequence: Synthetic oligonucleotide
agcugucauagugggcucg

SEQ ID NO: 2328591 - RNA, 19 nt, Artificial Sequence
  Description of Artificial Sequence: Synthetic oligonucleotide
acacauuguguugcuauaa

SEQ ID NO: 2328592 - RNA, 19 nt, Artificial Sequence
  Description of Artificial Sequence: Synthetic oligonucleotide
ccuucuugagagaguacgc

SEQ ID NO: 2328593 - RNA, 19 nt, Artificial Sequence
  Description of Artificial Sequence: Synthetic oligonucleotide
caguccucuaagaguauca

SEQ ID NO: 2328594 - RNA, 19 nt, Artificial Sequence
  Description of Artificial Sequence: Synthetic oligonucleotide
uacccuuggggaguacuca

SEQ ID NO: 2328595 - RNA, 19 nt, Artificial Sequence
  Description of Artificial Sequence: Synthetic oligonucleotide
caucaccaugguacuggcc

SEQ ID NO: 2328596 - RNA, 19 nt, Artificial Sequence
  Description of Artificial Sequence: Synthetic oligonucleotide
ugaucucucuggugcucug

SEQ ID NO: 2328597 - RNA, 19 nt, Artificial Sequence
  Description of Artificial Sequence: Synthetic oligonucleotide
guauuccccaucuggccuc

SEQ ID NO: 2328598 - RNA, 19 nt, Artificial Sequence
  Description of Artificial Sequence: Synthetic oligonucleotide
ugccaggagagggaauccc

SEQ ID NO: 2328599 - RNA, 19 nt, Artificial Sequence
  Description of Artificial Sequence: Synthetic oligonucleotide
gugggcucgugccccacgg

SEQ ID NO: 2328600 - RNA, 19 nt, Artificial Sequence
  Description of Artificial Sequence: Synthetic oligonucleotide
cauugugccaggagaggga

SEQ ID NO: 2328601 - RNA, 19 nt, Artificial Sequence
  Description of Artificial Sequence: Synthetic oligonucleotide
gugggcacaggcgugguac

SEQ ID NO: 2328602 - RNA, 19 nt, Artificial Sequence
  Description of Artificial Sequence: Synthetic oligonucleotide
gaacucggcccaguagacc

SEQ ID NO: 2328603 - RNA, 19 nt, Artificial Sequence
  Description of Artificial Sequence: Synthetic oligonucleotide
ucaccaugguacuggccaa

SEQ ID NO: 2328604 - RNA, 19 nt, Artificial Sequence
  Description of Artificial Sequence: Synthetic oligonucleotide
gcacaguuaccagaauagg

SEQ ID NO: 2328605 - RNA, 19 nt, Artificial Sequence
  Description of Artificial Sequence: Synthetic oligonucleotide
caggcgugguaccaccagc

SEQ ID NO: 2328606 - RNA, 19 nt, Artificial Sequence
  Description of Artificial Sequence: Synthetic oligonucleotide
cagacgguaguggucacuc

SEQ ID NO: 2328607 - RNA, 19 nt, Artificial Sequence
  Description of Artificial Sequence: Synthetic oligonucleotide
agugggcucgugccccacg

SEQ ID NO: 2328608 - RNA, 19 nt, Artificial Sequence
  Description of Artificial Sequence: Synthetic oligonucleotide
agguuccaaagagaagcug

SEQ ID NO: 2328609 - RNA, 19 nt, Artificial Sequence
  Description of Artificial Sequence: Synthetic oligonucleotide
agggaauccccagcaucac

SEQ ID NO: 2328610 - RNA, 19 nt, Artificial Sequence
  Description of Artificial Sequence: Synthetic oligonucleotide
cacugguuccaagccaagc

SEQ ID NO: 2328611 - RNA, 19 nt, Artificial Sequence
  Description of Artificial Sequence: Synthetic oligonucleotide
ggagccagaggcaccagag

SEQ ID NO: 2328612 - RNA, 19 nt, Artificial Sequence
  Description of Artificial Sequence: Synthetic oligonucleotide
gaugacgguccagccuccg

SEQ ID NO: 2328613 - RNA, 19 nt, Artificial Sequence
  Description of Artificial Sequence: Synthetic oligonucleotide
gggaguacucaugggacag

SEQ ID NO: 2328614 - RNA, 19 nt, Artificial Sequence
  Description of Artificial Sequence: Synthetic oligonucleotide
auugugccaggagagggaa

SEQ ID NO: 2328615 - RNA, 19 nt, Artificial Sequence
  Description of Artificial Sequence: Synthetic oligonucleotide
ugcugccucaagcucugau

SEQ ID NO: 2328616 - RNA, 19 nt, Artificial Sequence
  Description of Artificial Sequence: Synthetic oligonucleotide
acgguuugucauugugcca

SEQ ID NO: 2328617 - RNA, 19 nt, Artificial Sequence
  Description of Artificial Sequence: Synthetic oligonucleotide
ccucuaagaguaucagcag

SEQ ID NO: 2328618 - RNA, 19 nt, Artificial Sequence
  Description of Artificial Sequence: Synthetic oligonucleotide
guuaccagaauaggagucu

SEQ ID NO: 2328619 - RNA, 19 nt, Artificial Sequence
  Description of Artificial Sequence: Synthetic oligonucleotide
ucagcauaacagccuucuu

SEQ ID NO: 2328620 - RNA, 19 nt, Artificial Sequence
  Description of Artificial Sequence: Synthetic oligonucleotide
uuccccaucuggccuccca

SEQ ID NO: 2328621 - RNA, 19 nt, Artificial Sequence
  Description of Artificial Sequence: Synthetic oligonucleotide
gcacacgucggcccagucg

SEQ ID NO: 2328622 - RNA, 19 nt, Artificial Sequence
  Description of Artificial Sequence: Synthetic oligonucleotide
ugggcacaggcgugguacc

SEQ ID NO: 2328623 - RNA, 19 nt, Artificial Sequence
  Description of Artificial Sequence: Synthetic oligonucleotide
agccgcagacgguaguggu

SEQ ID NO: 2328624 - RNA, 19 nt, Artificial Sequence
  Description of Artificial Sequence: Synthetic oligonucleotide
guguugcuauaagauacca

SEQ ID NO: 2328625 - RNA, 19 nt, Artificial Sequence
  Description of Artificial Sequence: Synthetic oligonucleotide
caagccgcagacgguagug

SEQ ID NO: 2328626 - RNA, 19 nt, Artificial Sequence
  Description of Artificial Sequence: Synthetic oligonucleotide
caguuaccagaauaggagu

SEQ ID NO: 2328627 - RNA, 19 nt, Artificial Sequence
  Description of Artificial Sequence: Synthetic oligonucleotide
ugaccugccccgugagccu

SEQ ID NO: 2328628 - RNA, 19 nt, Artificial Sequence
  Description of Artificial Sequence: Synthetic oligonucleotide
gaccccguccugguagcgg

SEQ ID NO: 2328629 - RNA, 19 nt, Artificial Sequence
  Description of Artificial Sequence: Synthetic oligonucleotide
agucccuccacgggcccac

SEQ ID NO: 2328630 - RNA, 19 nt, Artificial Sequence
  Description of Artificial Sequence: Synthetic oligonucleotide
acccuuggggaguacucau

SEQ ID NO: 2328631 - RNA, 19 nt, Artificial Sequence
  Description of Artificial Sequence: Synthetic oligonucleotide
aguacucaugggacaguca

SEQ ID NO: 2328632 - RNA, 19 nt, Artificial Sequence
  Description of Artificial Sequence: Synthetic oligonucleotide
gcauaacagccuucuugag

SEQ ID NO: 2328633 - RNA, 19 nt, Artificial Sequence
  Description of Artificial Sequence: Synthetic oligonucleotide
gcugccucaagcucugauc

SEQ ID NO: 2328634 - RNA, 19 nt, Artificial Sequence
  Description of Artificial Sequence: Synthetic oligonucleotide
acgguaguggucacucuca

SEQ ID NO: 2328635 - RNA, 19 nt, Artificial Sequence
  Description of Artificial Sequence: Synthetic oligonucleotide
guacuggccaagccgcaga

SEQ ID NO: 2328636 - RNA, 19 nt, Artificial Sequence
  Description of Artificial Sequence: Synthetic oligonucleotide
acgaugguacagggcacag

SEQ ID NO: 2328637 - RNA, 19 nt, Artificial Sequence
  Description of Artificial Sequence: Synthetic oligonucleotide
gguguugccggcacugccc

SEQ ID NO: 2328638 - RNA, 19 nt, Artificial Sequence
  Description of Artificial Sequence: Synthetic oligonucleotide
gacagucaccaccgcacaa

SEQ ID NO: 2328639 - RNA, 19 nt, Artificial Sequence
  Description of Artificial Sequence: Synthetic oligonucleotide
agcacacgucggcccaguc

SEQ ID NO: 2328640 - RNA, 19 nt, Artificial Sequence
  Description of Artificial Sequence: Synthetic oligonucleotide
uacgccccaccgcggaacu

SEQ ID NO: 2328641 - RNA, 19 nt, Artificial Sequence
  Description of Artificial Sequence: Synthetic oligonucleotide
gaguacgccccaccgcgga

SEQ ID NO: 2328642 - RNA, 19 nt, Artificial Sequence
  Description of Artificial Sequence: Synthetic oligonucleotide
aaacagcaaggugcccagu

SEQ ID NO: 2328643 - RNA, 19 nt, Artificial Sequence
  Description of Artificial Sequence: Synthetic oligonucleotide
agacgguaguggucacucu

SEQ ID NO: 2328644 - RNA, 19 nt, Artificial Sequence
  Description of Artificial Sequence: Synthetic oligonucleotide
agccaguauuccccaucug

SEQ ID NO: 2328645 - RNA, 19 nt, Artificial Sequence
  Description of Artificial Sequence: Synthetic oligonucleotide
acucggcccaguagacccc

SEQ ID NO: 2328646 - RNA, 19 nt, Artificial Sequence
  Description of Artificial Sequence: Synthetic oligonucleotide
cgguuugucauugugccag

SEQ ID NO: 2328647 - RNA, 19 nt, Artificial Sequence
  Description of Artificial Sequence: Synthetic oligonucleotide
caccgcacaagccggguca

SEQ ID NO: 2328648 - RNA, 19 nt, Artificial Sequence
  Description of Artificial Sequence: Synthetic oligonucleotide
gcugaacgguuugucauug

SEQ ID NO: 2328649 - RNA, 19 nt, Artificial Sequence
  Description of Artificial Sequence: Synthetic oligonucleotide
auagugggcucgugcccca

SEQ ID NO: 2328650 - RNA, 19 nt, Artificial Sequence
  Description of Artificial Sequence: Synthetic oligonucleotide
ggcccaguagaccccgucc

SEQ ID NO: 2328651 - RNA, 19 nt, Artificial Sequence
  Description of Artificial Sequence: Synthetic oligonucleotide
cugugaccugccccgugag

SEQ ID NO: 2328652 - RNA, 19 nt, Artificial Sequence
  Description of Artificial Sequence: Synthetic oligonucleotide
cccacuagacucagaggag

SEQ ID NO: 2328653 - RNA, 19 nt, Artificial Sequence
  Description of Artificial Sequence: Synthetic oligonucleotide
uaggagucucggucccugu

SEQ ID NO: 2328654 - RNA, 19 nt, Artificial Sequence
  Description of Artificial Sequence: Synthetic oligonucleotide
gucgcagcucauacacucc

SEQ ID NO: 2328655 - RNA, 19 nt, Artificial Sequence
  Description of Artificial Sequence: Synthetic oligonucleotide
gccaucuugccgccucugg

SEQ ID NO: 2328656 - RNA, 19 nt, Artificial Sequence
  Description of Artificial Sequence: Synthetic oligonucleotide
gcgugguaccaccagcccc

SEQ ID NO: 2328657 - RNA, 19 nt, Artificial Sequence
  Description of Artificial Sequence: Synthetic oligonucleotide
ccacuggucugauggaaac

SEQ ID NO: 2328658 - RNA, 19 nt, Artificial Sequence
  Description of Artificial Sequence: Synthetic oligonucleotide
gaaauacccuuggggagua

SEQ ID NO: 2328659 - RNA, 19 nt, Artificial Sequence
  Description of Artificial Sequence: Synthetic oligonucleotide
agaguacgccccaccgcgg

SEQ ID NO: 2328660 - RNA, 19 nt, Artificial Sequence
  Description of Artificial Sequence: Synthetic oligonucleotide
cucucuggugcucuggagu

SEQ ID NO: 2328661 - RNA, 19 nt, Artificial Sequence
  Description of Artificial Sequence: Synthetic oligonucleotide
caccaccgcacaagccggg

SEQ ID NO: 2328662 - RNA, 19 nt, Artificial Sequence
  Description of Artificial Sequence: Synthetic oligonucleotide
ugggcucgugccccacggc

SEQ ID NO: 2328663 - RNA, 19 nt, Artificial Sequence
  Description of Artificial Sequence: Synthetic oligonucleotide
cauacacuccacucugccu

SEQ ID NO: 2328664 - RNA, 19 nt, Artificial Sequence
  Description of Artificial Sequence: Synthetic oligonucleotide
uggccaagccgcagacggu

SEQ ID NO: 2328665 - RNA, 19 nt, Artificial Sequence
  Description of Artificial Sequence: Synthetic oligonucleotide
gcaucaccaugguacuggc

SEQ ID NO: 2328666 - RNA, 19 nt, Artificial Sequence
  Description of Artificial Sequence: Synthetic oligonucleotide
aguagaccccguccuggua

SEQ ID NO: 2328667 - RNA, 19 nt, Artificial Sequence
  Description of Artificial Sequence: Synthetic oligonucleotide
guguugccggcacugccca

SEQ ID NO: 2328668 - RNA, 19 nt, Artificial Sequence
  Description of Artificial Sequence: Synthetic oligonucleotide
ccaguagaccccguccugg

SEQ ID NO: 2328669 - RNA, 19 nt, Artificial Sequence
  Description of Artificial Sequence: Synthetic oligonucleotide
caccaugguacuggccaag

SEQ ID NO: 2328670 - RNA, 19 nt, Artificial Sequence
  Description of Artificial Sequence: Synthetic oligonucleotide
acggccaccccaguccucu

SEQ ID NO: 2328671 - RNA, 19 nt, Artificial Sequence
  Description of Artificial Sequence: Synthetic oligonucleotide
cagugcugaacgguuuguc

SEQ ID NO: 2328672 - RNA, 19 nt, Artificial Sequence
  Description of Artificial Sequence: Synthetic oligonucleotide
gguacagggcacaguuacc

SEQ ID NO: 2328673 - RNA, 19 nt, Artificial Sequence
  Description of Artificial Sequence: Synthetic oligonucleotide
guuugucauugugccagga

SEQ ID NO: 2328674 - RNA, 19 nt, Artificial Sequence
  Description of Artificial Sequence: Synthetic oligonucleotide
uugugccaggagagggaau

SEQ ID NO: 2328675 - RNA, 19 nt, Artificial Sequence
  Description of Artificial Sequence: Synthetic oligonucleotide
gggcucgugccccacggcc

SEQ ID NO: 2328676 - RNA, 19 nt, Artificial Sequence
  Description of Artificial Sequence: Synthetic oligonucleotide
ggcuccgguagugaccucc

SEQ ID NO: 2328677 - RNA, 19 nt, Artificial Sequence
  Description of Artificial Sequence: Synthetic oligonucleotide
ccaagccaagccaguauuc

SEQ ID NO: 2328678 - RNA, 19 nt, Artificial Sequence
  Description of Artificial Sequence: Synthetic oligonucleotide
uggccucccaaagccugcc

SEQ ID NO: 2328679 - RNA, 19 nt, Artificial Sequence
  Description of Artificial Sequence: Synthetic oligonucleotide
uugccgccucuggaugacg

SEQ ID NO: 2328680 - RNA, 19 nt, Artificial Sequence
  Description of Artificial Sequence: Synthetic oligonucleotide
ucgugccccacggccaccc

SEQ ID NO: 2328681 - RNA, 19 nt, Artificial Sequence
  Description of Artificial Sequence: Synthetic oligonucleotide
cuugccgccucuggaugac

SEQ ID NO: 2328682 - RNA, 19 nt, Artificial Sequence
  Description of Artificial Sequence: Synthetic oligonucleotide
augguccccacggcugguc

SEQ ID NO: 2328683 - RNA, 19 nt, Artificial Sequence
  Description of Artificial Sequence: Synthetic oligonucleotide
cacaagccgggucagcaua

SEQ ID NO: 2328684 - RNA, 19 nt, Artificial Sequence
  Description of Artificial Sequence: Synthetic oligonucleotide
gugccaggagagggaaucc

SEQ ID NO: 2328685 - RNA, 19 nt, Artificial Sequence
  Description of Artificial Sequence: Synthetic oligonucleotide
gcggaacucggcccaguag

SEQ ID NO: 2328686 - RNA, 19 nt, Artificial Sequence
  Description of Artificial Sequence: Synthetic oligonucleotide
ggcgugguaccaccagccc

SEQ ID NO: 2328687 - RNA, 19 nt, Artificial Sequence
  Description of Artificial Sequence: Synthetic oligonucleotide
cacgaugguacagggcaca

SEQ ID NO: 2328688 - RNA, 19 nt, Artificial Sequence
  Description of Artificial Sequence: Synthetic oligonucleotide
cagccuucuugagagagua

SEQ ID NO: 2328689 - RNA, 19 nt, Artificial Sequence
  Description of Artificial Sequence: Synthetic oligonucleotide
ccugccuuguagugcugcc

SEQ ID NO: 2328690 - RNA, 19 nt, Artificial Sequence
  Description of Artificial Sequence: Synthetic oligonucleotide
aguacgccccaccgcggaa

SEQ ID NO: 2328691 - RNA, 19 nt, Artificial Sequence
  Description of Artificial Sequence: Synthetic oligonucleotide
guuccaagccaagccagua

SEQ ID NO: 2328692 - RNA, 19 nt, Artificial Sequence
  Description of Artificial Sequence: Synthetic oligonucleotide
gccaggagagggaaucccc

SEQ ID NO: 2328693 - RNA, 19 nt, Artificial Sequence
  Description of Artificial Sequence: Synthetic oligonucleotide
ugccggcacugcccacuag

SEQ ID NO: 2328694 - RNA, 19 nt, Artificial Sequence
  Description of Artificial Sequence: Synthetic oligonucleotide
acaagccgggucagcauaa

SEQ ID NO: 2328695 - RNA, 19 nt, Artificial Sequence
  Description of Artificial Sequence: Synthetic oligonucleotide
caucuugccgccucuggau

SEQ ID NO: 2328696 - RNA, 19 nt, Artificial Sequence
  Description of Artificial Sequence: Synthetic oligonucleotide
agaccccguccugguagcg

SEQ ID NO: 2328697 - RNA, 19 nt, Artificial Sequence
  Description of Artificial Sequence: Synthetic oligonucleotide
ggucugauggaaacagcaa

SEQ ID NO: 2328698 - RNA, 19 nt, Artificial Sequence
  Description of Artificial Sequence: Synthetic oligonucleotide
uugccggcacugcccacua

SEQ ID NO: 2328699 - RNA, 19 nt, Artificial Sequence
  Description of Artificial Sequence: Synthetic oligonucleotide
gcccagucgcagcucauac

SEQ ID NO: 2328700 - RNA, 19 nt, Artificial Sequence
  Description of Artificial Sequence: Synthetic oligonucleotide
cuggugcucuggaguuuug

SEQ ID NO: 2328701 - RNA, 19 nt, Artificial Sequence
  Description of Artificial Sequence: Synthetic oligonucleotide
uguugccggcacugcccac

SEQ ID NO: 2328702 - RNA, 19 nt, Artificial Sequence
  Description of Artificial Sequence: Synthetic oligonucleotide
cacuggucugauggaaaca

SEQ ID NO: 2328703 - RNA, 19 nt, Artificial Sequence
  Description of Artificial Sequence: Synthetic oligonucleotide
guacgccccaccgcggaac

SEQ ID NO: 2328704 - RNA, 19 nt, Artificial Sequence
  Description of Artificial Sequence: Synthetic oligonucleotide
ccaaagagaagcugucaua

SEQ ID NO: 2328705 - RNA, 19 nt, Artificial Sequence
  Description of Artificial Sequence: Synthetic oligonucleotide
guagcggcuccgguaguga

SEQ ID NO: 2328706 - RNA, 19 nt, Artificial Sequence
  Description of Artificial Sequence: Synthetic oligonucleotide
gccggcacugcccacuaga

SEQ ID NO: 2328707 - RNA, 19 nt, Artificial Sequence
  Description of Artificial Sequence: Synthetic oligonucleotide
cuccacgggcccacugguc

SEQ ID NO: 2328708 - RNA, 19 nt, Artificial Sequence
  Description of Artificial Sequence: Synthetic oligonucleotide
gccucugcacagucccucc

SEQ ID NO: 2328709 - RNA, 19 nt, Artificial Sequence
  Description of Artificial Sequence: Synthetic oligonucleotide
acgguccagccuccgcccu

SEQ ID NO: 2328710 - RNA, 19 nt, Artificial Sequence
  Description of Artificial Sequence: Synthetic oligonucleotide
caagccgggucagcauaac

SEQ ID NO: 2328711 - RNA, 19 nt, Artificial Sequence
  Description of Artificial Sequence: Synthetic oligonucleotide
cacuccacucugccuguga

SEQ ID NO: 2328712 - RNA, 19 nt, Artificial Sequence
  Description of Artificial Sequence: Synthetic oligonucleotide
cugccuuguagugcugcca

SEQ ID NO: 2328713 - RNA, 19 nt, Artificial Sequence
  Description of Artificial Sequence: Synthetic oligonucleotide
ccaccgcggaacucggccc

SEQ ID NO: 2328714 - RNA, 19 nt, Artificial Sequence
  Description of Artificial Sequence: Synthetic oligonucleotide
gcagcucauacacuccacu

SEQ ID NO: 2328715 - RNA, 19 nt, Artificial Sequence
  Description of Artificial Sequence: Synthetic oligonucleotide
uagcacacgucggcccagu

SEQ ID NO: 2328716 - RNA, 19 nt, Artificial Sequence
  Description of Artificial Sequence: Synthetic oligonucleotide
ccacgaugguacagggcac

SEQ ID NO: 2328717 - RNA, 19 nt, Artificial Sequence
  Description of Artificial Sequence: Synthetic oligonucleotide
accaccgcacaagccgggu

SEQ ID NO: 2328718 - RNA, 19 nt, Artificial Sequence
  Description of Artificial Sequence: Synthetic oligonucleotide
guuuuggguccagacuccu

SEQ ID NO: 2328719 - RNA, 19 nt, Artificial Sequence
  Description of Artificial Sequence: Synthetic oligonucleotide
ccggcacugcccacuagac

SEQ ID NO: 2328720 - RNA, 19 nt, Artificial Sequence
  Description of Artificial Sequence: Synthetic oligonucleotide
caccgcggaacucggccca

SEQ ID NO: 2328721 - RNA, 19 nt, Artificial Sequence
  Description of Artificial Sequence: Synthetic oligonucleotide
guugccggcacugcccacu

SEQ ID NO: 2328722 - RNA, 19 nt, Artificial Sequence
  Description of Artificial Sequence: Synthetic oligonucleotide
ccucaagcucugaucucuc

SEQ ID NO: 2328723 - RNA, 19 nt, Artificial Sequence
  Description of Artificial Sequence: Synthetic oligonucleotide
gugccccacggccacccca

SEQ ID NO: 2328724 - RNA, 19 nt, Artificial Sequence
  Description of Artificial Sequence: Synthetic oligonucleotide
ccaucuugccgccucugga

SEQ ID NO: 2328725 - RNA, 19 nt, Artificial Sequence
  Description of Artificial Sequence: Synthetic oligonucleotide
ccccacgaugguacagggc

SEQ ID NO: 2328726 - RNA, 19 nt, Artificial Sequence
  Description of Artificial Sequence: Synthetic oligonucleotide
cccaguagaccccguccug

SEQ ID NO: 2328727 - RNA, 19 nt, Artificial Sequence
  Description of Artificial Sequence: Synthetic oligonucleotide
cugaucucucuggugcucu

SEQ ID NO: 2328728 - RNA, 19 nt, Artificial Sequence
  Description of Artificial Sequence: Synthetic oligonucleotide
auaccagcucaaggagaua

SEQ ID NO: 2328729 - RNA, 19 nt, Artificial Sequence
  Description of Artificial Sequence: Synthetic oligonucleotide
gccucaagcucugaucucu

SEQ ID NO: 2328730 - RNA, 19 nt, Artificial Sequence
  Description of Artificial Sequence: Synthetic oligonucleotide
ugccugugaccugccccgu

SEQ ID NO: 2328731 - RNA, 19 nt, Artificial Sequence
  Description of Artificial Sequence: Synthetic oligonucleotide
accgcggaacucggcccag

SEQ ID NO: 2328732 - RNA, 19 nt, Artificial Sequence
  Description of Artificial Sequence: Synthetic oligonucleotide
caguagaccccguccuggu

SEQ ID NO: 2328733 - RNA, 19 nt, Artificial Sequence
  Description of Artificial Sequence: Synthetic oligonucleotide
ggaugacgguccagccucc

SEQ ID NO: 2328734 - RNA, 19 nt, Artificial Sequence
  Description of Artificial Sequence: Synthetic oligonucleotide
uagugggcucgugccccac

SEQ ID NO: 2328735 - RNA, 19 nt, Artificial Sequence
  Description of Artificial Sequence: Synthetic oligonucleotide
cgguaguggucacucucag

SEQ ID NO: 2328736 - RNA, 19 nt, Artificial Sequence
  Description of Artificial Sequence: Synthetic oligonucleotide
ccgcagacgguagugguca

SEQ ID NO: 2328737 - RNA, 19 nt, Artificial Sequence
  Description of Artificial Sequence: Synthetic oligonucleotide
gccaagccgcagacgguag

SEQ ID NO: 2328738 - RNA, 19 nt, Artificial Sequence
  Description of Artificial Sequence: Synthetic oligonucleotide
gcccaguagaccccguccu

SEQ ID NO: 2328739 - RNA, 19 nt, Artificial Sequence
  Description of Artificial Sequence: Synthetic oligonucleotide
cacggccaccccaguccuc

SEQ ID NO: 2328740 - RNA, 19 nt, Artificial Sequence
  Description of Artificial Sequence: Synthetic oligonucleotide
gguccagacuccugcuggu

SEQ ID NO: 2328741 - RNA, 19 nt, Artificial Sequence
  Description of Artificial Sequence: Synthetic oligonucleotide
cagucgcagcucauacacu

SEQ ID NO: 2328742 - RNA, 19 nt, Artificial Sequence
  Description of Artificial Sequence: Synthetic oligonucleotide
acgccccaccgcggaacuc

SEQ ID NO: 2328743 - RNA, 19 nt, Artificial Sequence
  Description of Artificial Sequence: Synthetic oligonucleotide
cgccccaccgcggaacucg

SEQ ID NO: 2328744 - RNA, 19 nt, Artificial Sequence
  Description of Artificial Sequence: Synthetic oligonucleotide
cucgugccccacggccacc

SEQ ID NO: 2328745 - RNA, 19 nt, Artificial Sequence
  Description of Artificial Sequence: Synthetic oligonucleotide
gccgcagacgguagugguc

SEQ ID NO: 2328746 - RNA, 19 nt, Artificial Sequence
  Description of Artificial Sequence: Synthetic oligonucleotide
gguuccaagccaagccagu

SEQ ID NO: 2328747 - RNA, 19 nt, Artificial Sequence
  Description of Artificial Sequence: Synthetic oligonucleotide
ccacgggcccacuggucug

SEQ ID NO: 2328748 - RNA, 19 nt, Artificial Sequence
  Description of Artificial Sequence: Synthetic oligonucleotide
acacaccauugagguugga

SEQ ID NO: 2328749 - RNA, 19 nt, Artificial Sequence
  Description of Artificial Sequence: Synthetic oligonucleotide
ccgccucuggaugacgguc

SEQ ID NO: 2328750 - RNA, 19 nt, Artificial Sequence
  Description of Artificial Sequence: Synthetic oligonucleotide
cacgggcccacuggucuga

SEQ ID NO: 2328751 - RNA, 19 nt, Artificial Sequence
  Description of Artificial Sequence: Synthetic oligonucleotide
ccaccgcacaagccggguc

SEQ ID NO: 2328752 - RNA, 19 nt, Artificial Sequence
  Description of Artificial Sequence: Synthetic oligonucleotide
ccaccccaguccucuaaga

SEQ ID NO: 2328753 - RNA, 19 nt, Artificial Sequence
  Description of Artificial Sequence: Synthetic oligonucleotide
ggccaccccaguccucuaa

SEQ ID NO: 2328754 - RNA, 19 nt, Artificial Sequence
  Description of Artificial Sequence: Synthetic oligonucleotide
cguccugguagcggcuccg

SEQ ID NO: 2328755 - RNA, 19 nt, Artificial Sequence
  Description of Artificial Sequence: Synthetic oligonucleotide
gcuccgguagugaccucca

SEQ ID NO: 2328756 - RNA, 19 nt, Artificial Sequence
  Description of Artificial Sequence: Synthetic oligonucleotide
gggcacaggcgugguacca

SEQ ID NO: 2328757 - RNA, 19 nt, Artificial Sequence
  Description of Artificial Sequence: Synthetic oligonucleotide
gucaccugaugcacugguu

SEQ ID NO: 2328758 - RNA, 19 nt, Artificial Sequence
  Description of Artificial Sequence: Synthetic oligonucleotide
gucggcccagucgcagcuc

SEQ ID NO: 2328759 - RNA, 19 nt, Artificial Sequence
  Description of Artificial Sequence: Synthetic oligonucleotide
ccacucugccugugaccug

SEQ ID NO: 2328760 - RNA, 19 nt, Artificial Sequence
  Description of Artificial Sequence: Synthetic oligonucleotide
ggaguacucaugggacagu

SEQ ID NO: 2328761 - RNA, 19 nt, Artificial Sequence
  Description of Artificial Sequence: Synthetic oligonucleotide
ccucuggaugacgguccag

SEQ ID NO: 2328762 - RNA, 19 nt, Artificial Sequence
  Description of Artificial Sequence: Synthetic oligonucleotide
gcugucauagugggcucgu

SEQ ID NO: 2328763 - RNA, 19 nt, Artificial Sequence
  Description of Artificial Sequence: Synthetic oligonucleotide
cggcuggucaccugaugca

SEQ ID NO: 2328764 - RNA, 19 nt, Artificial Sequence
  Description of Artificial Sequence: Synthetic oligonucleotide
accugccccgugagccucu

SEQ ID NO: 2328765 - RNA, 19 nt, Artificial Sequence
  Description of Artificial Sequence: Synthetic oligonucleotide
cagucccuccacgggccca

SEQ ID NO: 2328766 - RNA, 19 nt, Artificial Sequence
  Description of Artificial Sequence: Synthetic oligonucleotide
cucggucccuguccacagu

SEQ ID NO: 2328767 - RNA, 19 nt, Artificial Sequence
  Description of Artificial Sequence: Synthetic oligonucleotide
ccccacggccaccccaguc

SEQ ID NO: 2328768 - RNA, 19 nt, Artificial Sequence
  Description of Artificial Sequence: Synthetic oligonucleotide
gccuuguagugcugccagu

SEQ ID NO: 2328769 - RNA, 19 nt, Artificial Sequence
  Description of Artificial Sequence: Synthetic oligonucleotide
cuccgcccuccugcugcug

SEQ ID NO: 2328770 - RNA, 19 nt, Artificial Sequence
  Description of Artificial Sequence: Synthetic oligonucleotide
ccccaccgcggaacucggc

SEQ ID NO: 2328771 - RNA, 19 nt, Artificial Sequence
  Description of Artificial Sequence: Synthetic oligonucleotide
gccaguuggugaagaaauu

SEQ ID NO: 2328772 - RNA, 19 nt, Artificial Sequence
  Description of Artificial Sequence: Synthetic oligonucleotide
ggcccagucgcagcucaua

SEQ ID NO: 2328773 - RNA, 19 nt, Artificial Sequence
  Description of Artificial Sequence: Synthetic oligonucleotide
gcagacgguaguggucacu

SEQ ID NO: 2328774 - RNA, 19 nt, Artificial Sequence
  Description of Artificial Sequence: Synthetic oligonucleotide
cgcagacgguaguggucac

SEQ ID NO: 2328775 - RNA, 19 nt, Artificial Sequence
  Description of Artificial Sequence: Synthetic oligonucleotide
caugguccccacggcuggu

SEQ ID NO: 2328776 - RNA, 19 nt, Artificial Sequence
  Description of Artificial Sequence: Synthetic oligonucleotide
gccgccucuggaugacggu

SEQ ID NO: 2328777 - RNA, 19 nt, Artificial Sequence
  Description of Artificial Sequence: Synthetic oligonucleotide
gggguuccugcugccucaa

SEQ ID NO: 2328778 - RNA, 19 nt, Artificial Sequence
  Description of Artificial Sequence: Synthetic oligonucleotide
ccacagugcugaacgguuu

SEQ ID NO: 2328779 - RNA, 19 nt, Artificial Sequence
  Description of Artificial Sequence: Synthetic oligonucleotide
cucuggugcucuggaguuu

SEQ ID NO: 2328780 - RNA, 19 nt, Artificial Sequence
  Description of Artificial Sequence: Synthetic oligonucleotide
ccaagccgcagacgguagu

SEQ ID NO: 2328781 - RNA, 19 nt, Artificial Sequence
  Description of Artificial Sequence: Synthetic oligonucleotide
ggccucccaaagccugccu

SEQ ID NO: 2328782 - RNA, 19 nt, Artificial Sequence
  Description of Artificial Sequence: Synthetic oligonucleotide
ccccacggcuggucaccug

SEQ ID NO: 2328783 - RNA, 19 nt, Artificial Sequence
  Description of Artificial Sequence: Synthetic oligonucleotide
ccacggccaccccaguccu

SEQ ID NO: 2328784 - RNA, 19 nt, Artificial Sequence
  Description of Artificial Sequence: Synthetic oligonucleotide
ccaagccaguauuccccau

SEQ ID NO: 2328785 - RNA, 19 nt, Artificial Sequence
  Description of Artificial Sequence: Synthetic oligonucleotide
cgcggaacucggcccagua

SEQ ID NO: 2328786 - RNA, 19 nt, Artificial Sequence
  Description of Artificial Sequence: Synthetic oligonucleotide
cgucggcccagucgcagcu

SEQ ID NO: 2328787 - RNA, 19 nt, Artificial Sequence
  Description of Artificial Sequence: Synthetic oligonucleotide
cggcacugcccacuagacu

SEQ ID NO: 2328788 - RNA, 19 nt, Artificial Sequence
  Description of Artificial Sequence: Synthetic oligonucleotide
gucccuccacgggcccacu

SEQ ID NO: 2328789 - RNA, 19 nt, Artificial Sequence
  Description of Artificial Sequence: Synthetic oligonucleotide
ccuccgcccuccugcugcu

SEQ ID NO: 2328790 - RNA, 19 nt, Artificial Sequence
  Description of Artificial Sequence: Synthetic oligonucleotide
ccccguccugguagcggcu

SEQ ID NO: 2328791 - RNA, 19 nt, Artificial Sequence
  Description of Artificial Sequence: Synthetic oligonucleotide
gccccacggccaccccagu

SEQ ID NO: 2328792 - RNA, 19 nt, Artificial Sequence
  Description of Artificial Sequence: Synthetic oligonucleotide
ccgcccuccugcugcuguu

SEQ ID NO: 2328793 - RNA, 19 nt, Artificial Sequence
  Description of Artificial Sequence: Synthetic oligonucleotide
ccgcggaacucggcccagu

SEQ ID NO: 2328794 - RNA, 19 nt, Artificial Sequence
  Description of Artificial Sequence: Synthetic oligonucleotide
cggcccagucgcagcucau

SEQ ID NO: 2328795 - RNA, 19 nt, Artificial Sequence
  Description of Artificial Sequence: Synthetic oligonucleotide
aagaucauuguacaucugg

SEQ ID NO: 2328796 - RNA, 19 nt, Artificial Sequence
  Description of Artificial Sequence: Synthetic oligonucleotide
auugacaacaugcacuggc

SEQ ID NO: 2328797 - RNA, 19 nt, Artificial Sequence
  Description of Artificial Sequence: Synthetic oligonucleotide
ucauaugugguuuugaagu

SEQ ID NO: 2328798 - RNA, 19 nt, Artificial Sequence
  Description of Artificial Sequence: Synthetic oligonucleotide
aagucauaaacauugggcu

SEQ ID NO: 2328799 - RNA, 19 nt, Artificial Sequence
  Description of Artificial Sequence: Synthetic oligonucleotide
uguaaaauuccguucugcg

SEQ ID NO: 2328800 - RNA, 19 nt, Artificial Sequence
  Description of Artificial Sequence: Synthetic oligonucleotide
aguauaaacaaacaucaga

SEQ ID NO: 2328801 - RNA, 19 nt, Artificial Sequence
  Description of Artificial Sequence: Synthetic oligonucleotide
uguacaucuggucauaugu

SEQ ID NO: 2328802 - RNA, 19 nt, Artificial Sequence
  Description of Artificial Sequence: Synthetic oligonucleotide
acaagugagaaucagguca

SEQ ID NO: 2328803 - RNA, 19 nt, Artificial Sequence
  Description of Artificial Sequence: Synthetic oligonucleotide
uccaacauauguaaaauuc

SEQ ID NO: 2328804 - RNA, 19 nt, Artificial Sequence
  Description of Artificial Sequence: Synthetic oligonucleotide
gaagucaucaacccggaag

SEQ ID NO: 2328805 - RNA, 19 nt, Artificial Sequence
  Description of Artificial Sequence: Synthetic oligonucleotide
caacauauguaaaauuccg

SEQ ID NO: 2328806 - RNA, 19 nt, Artificial Sequence
  Description of Artificial Sequence: Synthetic oligonucleotide
gaagucauaaacauugggc

SEQ ID NO: 2328807 - RNA, 19 nt, Artificial Sequence
  Description of Artificial Sequence: Synthetic oligonucleotide
auauguaaaauuccguucu

SEQ ID NO: 2328808 - RNA, 19 nt, Artificial Sequence
  Description of Artificial Sequence: Synthetic oligonucleotide
aguucuggaaccuuucggg

SEQ ID NO: 2328809 - RNA, 19 nt, Artificial Sequence
  Description of Artificial Sequence: Synthetic oligonucleotide
uaggcuguacaguaaaccg

SEQ ID NO: 2328810 - RNA, 19 nt, Artificial Sequence
  Description of Artificial Sequence: Synthetic oligonucleotide
ucacaagugagaaucaggu

SEQ ID NO: 2328811 - RNA, 19 nt, Artificial Sequence
  Description of Artificial Sequence: Synthetic oligonucleotide
agcaguauaaacaaacauc

SEQ ID NO: 2328812 - RNA, 19 nt, Artificial Sequence
  Description of Artificial Sequence: Synthetic oligonucleotide
cauauguacaguacauugg

SEQ ID NO: 2328813 - RNA, 19 nt, Artificial Sequence
  Description of Artificial Sequence: Synthetic oligonucleotide
aaccggaagucaucaaccc

SEQ ID NO: 2328814 - RNA, 19 nt, Artificial Sequence
  Description of Artificial Sequence: Synthetic oligonucleotide
uuauuucuguccaacauau

SEQ ID NO: 2328815 - RNA, 19 nt, Artificial Sequence
  Description of Artificial Sequence: Synthetic oligonucleotide
aaacauugggcuugucagg

SEQ ID NO: 2328816 - RNA, 19 nt, Artificial Sequence
  Description of Artificial Sequence: Synthetic oligonucleotide
agaagaucauuguacaucu

SEQ ID NO: 2328817 - RNA, 19 nt, Artificial Sequence
  Description of Artificial Sequence: Synthetic oligonucleotide
aacaauggauuucaaccug

SEQ ID NO: 2328818 - RNA, 19 nt, Artificial Sequence
  Description of Artificial Sequence: Synthetic oligonucleotide
gacaacaugcacuggcugg

SEQ ID NO: 2328819 - RNA, 19 nt, Artificial Sequence
  Description of Artificial Sequence: Synthetic oligonucleotide
uuuuauuucuguccaacau

SEQ ID NO: 2328820 - RNA, 19 nt, Artificial Sequence
  Description of Artificial Sequence: Synthetic oligonucleotide
uuuauuucuguccaacaua

SEQ ID NO: 2328821 - RNA, 19 nt, Artificial Sequence
  Description of Artificial Sequence: Synthetic oligonucleotide
uucuucacaagugagaauc

SEQ ID NO: 2328822 - RNA, 19 nt, Artificial Sequence
  Description of Artificial Sequence: Synthetic oligonucleotide
uggaauucagaucuucuac

SEQ ID NO: 2328823 - RNA, 19 nt, Artificial Sequence
  Description of Artificial Sequence: Synthetic oligonucleotide
aaaguggcuccaaaggugg

SEQ ID NO: 2328824 - RNA, 19 nt, Artificial Sequence
  Description of Artificial Sequence: Synthetic oligonucleotide
acagugugcagaaaggccc

SEQ ID NO: 2328825 - RNA, 19 nt, Artificial Sequence
  Description of Artificial Sequence: Synthetic oligonucleotide
auggauuucaaccuggcau

SEQ ID NO: 2328826 - RNA, 19 nt, Artificial Sequence
  Description of Artificial Sequence: Synthetic oligonucleotide
auguacaguacauugguga

SEQ ID NO: 2328827 - RNA, 19 nt, Artificial Sequence
  Description of Artificial Sequence: Synthetic oligonucleotide
aguaaaccgucuuuauuuc

SEQ ID NO: 2328828 - RNA, 19 nt, Artificial Sequence
  Description of Artificial Sequence: Synthetic oligonucleotide
acauugacaacaugcacug

SEQ ID NO: 2328829 - RNA, 19 nt, Artificial Sequence
  Description of Artificial Sequence: Synthetic oligonucleotide
ucuggaaccuuucgggccg

SEQ ID NO: 2328830 - RNA, 19 nt, Artificial Sequence
  Description of Artificial Sequence: Synthetic oligonucleotide
aggucaaacagguccuugc

SEQ ID NO: 2328831 - RNA, 19 nt, Artificial Sequence
  Description of Artificial Sequence: Synthetic oligonucleotide
cauauguaaaauuccguuc

SEQ ID NO: 2328832 - RNA, 19 nt, Artificial Sequence
  Description of Artificial Sequence: Synthetic oligonucleotide
uuacucgagcacacgaccg

SEQ ID NO: 2328833 - RNA, 19 nt, Artificial Sequence
  Description of Artificial Sequence: Synthetic oligonucleotide
agaccauucaccaaccacg

SEQ ID NO: 2328834 - RNA, 19 nt, Artificial Sequence
  Description of Artificial Sequence: Synthetic oligonucleotide
ucgcagauaaggaaugccc

SEQ ID NO: 2328835 - RNA, 19 nt, Artificial Sequence
  Description of Artificial Sequence: Synthetic oligonucleotide
gacacugaaaccccgcuug

SEQ ID NO: 2328836 - RNA, 19 nt, Artificial Sequence
  Description of Artificial Sequence: Synthetic oligonucleotide
uuccuguuccaaaggaccg

SEQ ID NO: 2328837 - RNA, 19 nt, Artificial Sequence
  Description of Artificial Sequence: Synthetic oligonucleotide
uuccguucugcguauagag

SEQ ID NO: 2328838 - RNA, 19 nt, Artificial Sequence
  Description of Artificial Sequence: Synthetic oligonucleotide
cuucucauuccauauguac

SEQ ID NO: 2328839 - RNA, 19 nt, Artificial Sequence
  Description of Artificial Sequence: Synthetic oligonucleotide
ugaguuccuguuccaaagg

SEQ ID NO: 2328840 - RNA, 19 nt, Artificial Sequence
  Description of Artificial Sequence: Synthetic oligonucleotide
aauuccguucugcguauag

SEQ ID NO: 2328841 - RNA, 19 nt, Artificial Sequence
  Description of Artificial Sequence: Synthetic oligonucleotide
auuccauauguacaguaca

SEQ ID NO: 2328842 - RNA, 19 nt, Artificial Sequence
  Description of Artificial Sequence: Synthetic oligonucleotide
uguucucuggaauucagau

SEQ ID NO: 2328843 - RNA, 19 nt, Artificial Sequence
  Description of Artificial Sequence: Synthetic oligonucleotide
uuccgcccgaggaagaugg

SEQ ID NO: 2328844 - RNA, 19 nt, Artificial Sequence
  Description of Artificial Sequence: Synthetic oligonucleotide
uauguaaaauuccguucug

SEQ ID NO: 2328845 - RNA, 19 nt, Artificial Sequence
  Description of Artificial Sequence: Synthetic oligonucleotide
uguuccaaaggaccggaca

SEQ ID NO: 2328846 - RNA, 19 nt, Artificial Sequence
  Description of Artificial Sequence: Synthetic oligonucleotide
cauauccucagugugcugg

SEQ ID NO: 2328847 - RNA, 19 nt, Artificial Sequence
  Description of Artificial Sequence: Synthetic oligonucleotide
uguacaguacauuggugac

SEQ ID NO: 2328848 - RNA, 19 nt, Artificial Sequence
  Description of Artificial Sequence: Synthetic oligonucleotide
ugugguuuugaagucauaa

SEQ ID NO: 2328849 - RNA, 19 nt, Artificial Sequence
  Description of Artificial Sequence: Synthetic oligonucleotide
uagcaguauaaacaaacau

SEQ ID NO: 2328850 - RNA, 19 nt, Artificial Sequence
  Description of Artificial Sequence: Synthetic oligonucleotide
gucauaugugguuuugaag

SEQ ID NO: 2328851 - RNA, 19 nt, Artificial Sequence
  Description of Artificial Sequence: Synthetic oligonucleotide
aacauauguaaaauuccgu

SEQ ID NO: 2328852 - RNA, 19 nt, Artificial Sequence
  Description of Artificial Sequence: Synthetic oligonucleotide
caaccggaagucaucaacc

SEQ ID NO: 2328853 - RNA, 19 nt, Artificial Sequence
  Description of Artificial Sequence: Synthetic oligonucleotide
gagaagaucauuguacauc

SEQ ID NO: 2328854 - RNA, 19 nt, Artificial Sequence
  Description of Artificial Sequence: Synthetic oligonucleotide
uucuacaaccuggucauag

SEQ ID NO: 2328855 - RNA, 19 nt, Artificial Sequence
  Description of Artificial Sequence: Synthetic oligonucleotide
uguacaguaaaccgucuuu

SEQ ID NO: 2328856 - RNA, 19 nt, Artificial Sequence
  Description of Artificial Sequence: Synthetic oligonucleotide
acaacaugcacuggcuggc

SEQ ID NO: 2328857 - RNA, 19 nt, Artificial Sequence
  Description of Artificial Sequence: Synthetic oligonucleotide
cauuccauauguacaguac

SEQ ID NO: 2328858 - RNA, 19 nt, Artificial Sequence
  Description of Artificial Sequence: Synthetic oligonucleotide
uacaguacauuggugacgu

SEQ ID NO: 2328859 - RNA, 19 nt, Artificial Sequence
  Description of Artificial Sequence: Synthetic oligonucleotide
guuacucgagcacacgacc

SEQ ID NO: 2328860 - RNA, 19 nt, Artificial Sequence
  Description of Artificial Sequence: Synthetic oligonucleotide
auccuuuuauuucugucca

SEQ ID NO: 2328861 - RNA, 19 nt, Artificial Sequence
  Description of Artificial Sequence: Synthetic oligonucleotide
agugagaaucaggucaaac

SEQ ID NO: 2328862 - RNA, 19 nt, Artificial Sequence
  Description of Artificial Sequence: Synthetic oligonucleotide
auagacucuuucuucacaa

SEQ ID NO: 2328863 - RNA, 19 nt, Artificial Sequence
  Description of Artificial Sequence: Synthetic oligonucleotide
agaaucaggucaaacaggu

SEQ ID NO: 2328864 - RNA, 19 nt, Artificial Sequence
  Description of Artificial Sequence: Synthetic oligonucleotide
gaucauuguacaucugguc

SEQ ID NO: 2328865 - RNA, 19 nt, Artificial Sequence
  Description of Artificial Sequence: Synthetic oligonucleotide
ucaaccuggcauuucugug

SEQ ID NO: 2328866 - RNA, 19 nt, Artificial Sequence
  Description of Artificial Sequence: Synthetic oligonucleotide
uuccauauguacaguacau

SEQ ID NO: 2328867 - RNA, 19 nt, Artificial Sequence
  Description of Artificial Sequence: Synthetic oligonucleotide
uacaaccuggucauagacu

SEQ ID NO: 2328868 - RNA, 19 nt, Artificial Sequence
  Description of Artificial Sequence: Synthetic oligonucleotide
ugcguauagaguucuuugu

SEQ ID NO: 2328869 - RNA, 19 nt, Artificial Sequence
  Description of Artificial Sequence: Synthetic oligonucleotide
gcaguauaaacaaacauca

SEQ ID NO: 2328870 - RNA, 19 nt, Artificial Sequence
  Description of Artificial Sequence: Synthetic oligonucleotide
acugaaaccccgcuugcug

SEQ ID NO: 2328871 - RNA, 19 nt, Artificial Sequence
  Description of Artificial Sequence: Synthetic oligonucleotide
acaucagaagggaaaacag

SEQ ID NO: 2328872 - RNA, 19 nt, Artificial Sequence
  Description of Artificial Sequence: Synthetic oligonucleotide
acucuuucuucacaaguga

SEQ ID NO: 2328873 - RNA, 19 nt, Artificial Sequence
  Description of Artificial Sequence: Synthetic oligonucleotide
guuccaaaggaccggacac

SEQ ID NO: 2328874 - RNA, 19 nt, Artificial Sequence
  Description of Artificial Sequence: Synthetic oligonucleotide
uucaaccuggcauuucugu

SEQ ID NO: 2328875 - RNA, 19 nt, Artificial Sequence
  Description of Artificial Sequence: Synthetic oligonucleotide
ugguuacucgagcacacga

SEQ ID NO: 2328876 - RNA, 19 nt, Artificial Sequence
  Description of Artificial Sequence: Synthetic oligonucleotide
uucacaugaguuccuguuc

SEQ ID NO: 2328877 - RNA, 19 nt, Artificial Sequence
  Description of Artificial Sequence: Synthetic oligonucleotide
gaauucagaucuucuacaa

SEQ ID NO: 2328878 - RNA, 19 nt, Artificial Sequence
  Description of Artificial Sequence: Synthetic oligonucleotide
uaugugguuuugaagucau

SEQ ID NO: 2328879 - RNA, 19 nt, Artificial Sequence
  Description of Artificial Sequence: Synthetic oligonucleotide
ugacaacaugcacuggcug

SEQ ID NO: 2328880 - RNA, 19 nt, Artificial Sequence
  Description of Artificial Sequence: Synthetic oligonucleotide
aaaauuccguucugcguau

SEQ ID NO: 2328881 - RNA, 19 nt, Artificial Sequence
  Description of Artificial Sequence: Synthetic oligonucleotide
cauugggcuugucaggugc

SEQ ID NO: 2328882 - RNA, 19 nt, Artificial Sequence
  Description of Artificial Sequence: Synthetic oligonucleotide
acaauggauuucaaccugg

SEQ ID NO: 2328883 - RNA, 19 nt, Artificial Sequence
  Description of Artificial Sequence: Synthetic oligonucleotide
acacugaaaccccgcuugc

SEQ ID NO: 2328884 - RNA, 19 nt, Artificial Sequence
  Description of Artificial Sequence: Synthetic oligonucleotide
ucuacaaccuggucauaga

SEQ ID NO: 2328885 - RNA, 19 nt, Artificial Sequence
  Description of Artificial Sequence: Synthetic oligonucleotide
uggauuucaaccuggcauu

SEQ ID NO: 2328886 - RNA, 19 nt, Artificial Sequence
  Description of Artificial Sequence: Synthetic oligonucleotide
cauucaccaaccacgggug

SEQ ID NO: 2328887 - RNA, 19 nt, Artificial Sequence
  Description of Artificial Sequence: Synthetic oligonucleotide
uggucauagacucuuucuu

SEQ ID NO: 2328888 - RNA, 19 nt, Artificial Sequence
  Description of Artificial Sequence: Synthetic oligonucleotide
gaaccuuucgggccggggc

SEQ ID NO: 2328889 - RNA, 19 nt, Artificial Sequence
  Description of Artificial Sequence: Synthetic oligonucleotide
ucugguuacucgagcacac

SEQ ID NO: 2328890 - RNA, 19 nt, Artificial Sequence
  Description of Artificial Sequence: Synthetic oligonucleotide
guaggcuguacaguaaacc

SEQ ID NO: 2328891 - RNA, 19 nt, Artificial Sequence
  Description of Artificial Sequence: Synthetic oligonucleotide
accggaagucaucaacccg

SEQ ID NO: 2328892 - RNA, 19 nt, Artificial Sequence
  Description of Artificial Sequence: Synthetic oligonucleotide
cugcguauagaguucuuug

SEQ ID NO: 2328893 - RNA, 19 nt, Artificial Sequence
  Description of Artificial Sequence: Synthetic oligonucleotide
cauaugugguuuugaaguc

SEQ ID NO: 2328894 - RNA, 19 nt, Artificial Sequence
  Description of Artificial Sequence: Synthetic oligonucleotide
caguucuggaaccuuucgg

SEQ ID NO: 2328895 - RNA, 19 nt, Artificial Sequence
  Description of Artificial Sequence: Synthetic oligonucleotide
uguccaacauauguaaaau

SEQ ID NO: 2328896 - RNA, 19 nt, Artificial Sequence
  Description of Artificial Sequence: Synthetic oligonucleotide
uggcagaggucgcagauaa

SEQ ID NO: 2328897 - RNA, 19 nt, Artificial Sequence
  Description of Artificial Sequence: Synthetic oligonucleotide
gaccauucaccaaccacgg

SEQ ID NO: 2328898 - RNA, 19 nt, Artificial Sequence
  Description of Artificial Sequence: Synthetic oligonucleotide
augacggcauggcaccggc

SEQ ID NO: 2328899 - RNA, 19 nt, Artificial Sequence
  Description of Artificial Sequence: Synthetic oligonucleotide
uguugugugccuccaugcu

SEQ ID NO: 2328900 - RNA, 19 nt, Artificial Sequence
  Description of Artificial Sequence: Synthetic oligonucleotide
ugcagaaaggcccggccac

SEQ ID NO: 2328901 - RNA, 19 nt, Artificial Sequence
  Description of Artificial Sequence: Synthetic oligonucleotide
uccgguucugguuacucga

SEQ ID NO: 2328902 - RNA, 19 nt, Artificial Sequence
  Description of Artificial Sequence: Synthetic oligonucleotide
cuacaaccuggucauagac

SEQ ID NO: 2328903 - RNA, 19 nt, Artificial Sequence
  Description of Artificial Sequence: Synthetic oligonucleotide
cugagaagaucauuguaca

SEQ ID NO: 2328904 - RNA, 19 nt, Artificial Sequence
  Description of Artificial Sequence: Synthetic oligonucleotide
cugaacucccaccuagaag

SEQ ID NO: 2328905 - RNA, 19 nt, Artificial Sequence
  Description of Artificial Sequence: Synthetic oligonucleotide
uguaggcuguacaguaaac

SEQ ID NO: 2328906 - RNA, 19 nt, Artificial Sequence
  Description of Artificial Sequence: Synthetic oligonucleotide
ugagaagaucauuguacau

SEQ ID NO: 2328907 - RNA, 19 nt, Artificial Sequence
  Description of Artificial Sequence: Synthetic oligonucleotide
uacucgagcacacgaccgc

SEQ ID NO: 2328908 - RNA, 19 nt, Artificial Sequence
  Description of Artificial Sequence: Synthetic oligonucleotide
uauuucuguccaacauaug

SEQ ID NO: 2328909 - RNA, 19 nt, Artificial Sequence
  Description of Artificial Sequence: Synthetic oligonucleotide
guacaguacauuggugacg

SEQ ID NO: 2328910 - RNA, 19 nt, Artificial Sequence
  Description of Artificial Sequence: Synthetic oligonucleotide
uuguacaucuggucauaug

SEQ ID NO: 2328911 - RNA, 19 nt, Artificial Sequence
  Description of Artificial Sequence: Synthetic oligonucleotide
ugaaaccccgcuugcugag

SEQ ID NO: 2328912 - RNA, 19 nt, Artificial Sequence
  Description of Artificial Sequence: Synthetic oligonucleotide
gugacguacaccuagcagu

SEQ ID NO: 2328913 - RNA, 19 nt, Artificial Sequence
  Description of Artificial Sequence: Synthetic oligonucleotide
uccugagaagaucauugua

SEQ ID NO: 2328914 - RNA, 19 nt, Artificial Sequence
  Description of Artificial Sequence: Synthetic oligonucleotide
uacauuggugacguacacc

SEQ ID NO: 2328915 - RNA, 19 nt, Artificial Sequence
  Description of Artificial Sequence: Synthetic oligonucleotide
caguacauuggugacguac

SEQ ID NO: 2328916 - RNA, 19 nt, Artificial Sequence
  Description of Artificial Sequence: Synthetic oligonucleotide
ugacguacaccuagcagua

SEQ ID NO: 2328917 - RNA, 19 nt, Artificial Sequence
  Description of Artificial Sequence: Synthetic oligonucleotide
aaaccgucuuuauuucuuu

SEQ ID NO: 2328918 - RNA, 19 nt, Artificial Sequence
  Description of Artificial Sequence: Synthetic oligonucleotide
cacauugacaacaugcacu

SEQ ID NO: 2328919 - RNA, 19 nt, Artificial Sequence
  Description of Artificial Sequence: Synthetic oligonucleotide
uuggugacguacaccuagc

SEQ ID NO: 2328920 - RNA, 19 nt, Artificial Sequence
  Description of Artificial Sequence: Synthetic oligonucleotide
cagaccauucaccaaccac

SEQ ID NO: 2328921 - RNA, 19 nt, Artificial Sequence
  Description of Artificial Sequence: Synthetic oligonucleotide
uuccugagaagaucauugu

SEQ ID NO: 2328922 - RNA, 19 nt, Artificial Sequence
  Description of Artificial Sequence: Synthetic oligonucleotide
uacaguaaaccgucuuuau

SEQ ID NO: 2328923 - RNA, 19 nt, Artificial Sequence
  Description of Artificial Sequence: Synthetic oligonucleotide
aguacauuggugacguaca

SEQ ID NO: 2328924 - RNA, 19 nt, Artificial Sequence
  Description of Artificial Sequence: Synthetic oligonucleotide
ggaauucagaucuucuaca

SEQ ID NO: 2328925 - RNA, 19 nt, Artificial Sequence
  Description of Artificial Sequence: Synthetic oligonucleotide
acaguaaaccgucuuuauu

SEQ ID NO: 2328926 - RNA, 19 nt, Artificial Sequence
  Description of Artificial Sequence: Synthetic oligonucleotide
auucaccaaccacgggugg

SEQ ID NO: 2328927 - RNA, 19 nt, Artificial Sequence
  Description of Artificial Sequence: Synthetic oligonucleotide
agaucauuguacaucuggu

SEQ ID NO: 2328928 - RNA, 19 nt, Artificial Sequence
  Description of Artificial Sequence: Synthetic oligonucleotide
uauagaguucuuugucuuu

SEQ ID NO: 2328929 - RNA, 19 nt, Artificial Sequence
  Description of Artificial Sequence: Synthetic oligonucleotide
auaugugguuuugaaguca

SEQ ID NO: 2328930 - RNA, 19 nt, Artificial Sequence
  Description of Artificial Sequence: Synthetic oligonucleotide
cuucacaagugagaaucag

SEQ ID NO: 2328931 - RNA, 19 nt, Artificial Sequence
  Description of Artificial Sequence: Synthetic oligonucleotide
gagcacacgaccgccaccc

SEQ ID NO: 2328932 - RNA, 19 nt, Artificial Sequence
  Description of Artificial Sequence: Synthetic oligonucleotide
cuuugucuuuccugagaag

SEQ ID NO: 2328933 - RNA, 19 nt, Artificial Sequence
  Description of Artificial Sequence: Synthetic oligonucleotide
uccguucugcguauagagu

SEQ ID NO: 2328934 - RNA, 19 nt, Artificial Sequence
  Description of Artificial Sequence: Synthetic oligonucleotide
ucuccuguucucuggaauu

SEQ ID NO: 2328935 - RNA, 19 nt, Artificial Sequence
  Description of Artificial Sequence: Synthetic oligonucleotide
cuguccaacauauguaaaa

SEQ ID NO: 2328936 - RNA, 19 nt, Artificial Sequence
  Description of Artificial Sequence: Synthetic oligonucleotide
ggugacguacaccuagcag

SEQ ID NO: 2328937 - RNA, 19 nt, Artificial Sequence
  Description of Artificial Sequence: Synthetic oligonucleotide
acucccaccuagaagccgg

SEQ ID NO: 2328938 - RNA, 19 nt, Artificial Sequence
  Description of Artificial Sequence: Synthetic oligonucleotide
uccuugcaguucuggaacc

SEQ ID NO: 2328939 - RNA, 19 nt, Artificial Sequence
  Description of Artificial Sequence: Synthetic oligonucleotide
guaaaauuccguucugcgu

SEQ ID NO: 2328940 - RNA, 19 nt, Artificial Sequence
  Description of Artificial Sequence: Synthetic oligonucleotide
ugugcagggcagaccauuc

SEQ ID NO: 2328941 - RNA, 19 nt, Artificial Sequence
  Description of Artificial Sequence: Synthetic oligonucleotide
uggugacguacaccuagca

SEQ ID NO: 2328942 - RNA, 19 nt, Artificial Sequence
  Description of Artificial Sequence: Synthetic oligonucleotide
guacaucuggucauaugug

SEQ ID NO: 2328943 - RNA, 19 nt, Artificial Sequence
  Description of Artificial Sequence: Synthetic oligonucleotide
aagggaaaacagauugaaa

SEQ ID NO: 2328944 - RNA, 19 nt, Artificial Sequence
  Description of Artificial Sequence: Synthetic oligonucleotide
aaguggcuccaaagguggc

SEQ ID NO: 2328945 - RNA, 19 nt, Artificial Sequence
  Description of Artificial Sequence: Synthetic oligonucleotide
ggugaugacggcauggcac

SEQ ID NO: 2328946 - RNA, 19 nt, Artificial Sequence
  Description of Artificial Sequence: Synthetic oligonucleotide
caggucuccuguucucugg

SEQ ID NO: 2328947 - RNA, 19 nt, Artificial Sequence
  Description of Artificial Sequence: Synthetic oligonucleotide
gaugacggcauggcaccgg

SEQ ID NO: 2328948 - RNA, 19 nt, Artificial Sequence
  Description of Artificial Sequence: Synthetic oligonucleotide
caccuagcaguauaaacaa

SEQ ID NO: 2328949 - RNA, 19 nt, Artificial Sequence
  Description of Artificial Sequence: Synthetic oligonucleotide
ugggagcuucacaugaguu

SEQ ID NO: 2328950 - RNA, 19 nt, Artificial Sequence
  Description of Artificial Sequence: Synthetic oligonucleotide
aaccgucuuuauuucuuuu

SEQ ID NO: 2328951 - RNA, 19 nt, Artificial Sequence
  Description of Artificial Sequence: Synthetic oligonucleotide
accauucaccaaccacggg

SEQ ID NO: 2328952 - RNA, 19 nt, Artificial Sequence
  Description of Artificial Sequence: Synthetic oligonucleotide
auggcggcaaccggaaguc

SEQ ID NO: 2328953 - RNA, 19 nt, Artificial Sequence
  Description of Artificial Sequence: Synthetic oligonucleotide
guacauuggugacguacac

SEQ ID NO: 2328954 - RNA, 19 nt, Artificial Sequence
  Description of Artificial Sequence: Synthetic oligonucleotide
caagugagaaucaggucaa

SEQ ID NO: 2328955 - RNA, 19 nt, Artificial Sequence
  Description of Artificial Sequence: Synthetic oligonucleotide
gucgcagauaaggaaugcc

SEQ ID NO: 2328956 - RNA, 19 nt, Artificial Sequence
  Description of Artificial Sequence: Synthetic oligonucleotide
agcggugaugacggcaugg

SEQ ID NO: 2328957 - RNA, 19 nt, Artificial Sequence
  Description of Artificial Sequence: Synthetic oligonucleotide
cauagacucuuucuucaca

SEQ ID NO: 2328958 - RNA, 19 nt, Artificial Sequence
  Description of Artificial Sequence: Synthetic oligonucleotide
ggcuugauccuuuuauuuc

SEQ ID NO: 2328959 - RNA, 19 nt, Artificial Sequence
  Description of Artificial Sequence: Synthetic oligonucleotide
ucuuuccugagaagaucau

SEQ ID NO: 2328960 - RNA, 19 nt, Artificial Sequence
  Description of Artificial Sequence: Synthetic oligonucleotide
caaaggaccggacacugaa

SEQ ID NO: 2328961 - RNA, 19 nt, Artificial Sequence
  Description of Artificial Sequence: Synthetic oligonucleotide
auauccucagugugcugga

SEQ ID NO: 2328962 - RNA, 19 nt, Artificial Sequence
  Description of Artificial Sequence: Synthetic oligonucleotide
gauggcggcaaccggaagu

SEQ ID NO: 2328963 - RNA, 19 nt, Artificial Sequence
  Description of Artificial Sequence: Synthetic oligonucleotide
acuggcagaggucgcagau

SEQ ID NO: 2328964 - RNA, 19 nt, Artificial Sequence
  Description of Artificial Sequence: Synthetic oligonucleotide
ucugcguauagaguucuuu

SEQ ID NO: 2328965 - RNA, 19 nt, Artificial Sequence
  Description of Artificial Sequence: Synthetic oligonucleotide
uccauauguacaguacauu

SEQ ID NO: 2328966 - RNA, 19 nt, Artificial Sequence
  Description of Artificial Sequence: Synthetic oligonucleotide
gcaaccggaagucaucaac

SEQ ID NO: 2328967 - RNA, 19 nt, Artificial Sequence
  Description of Artificial Sequence: Synthetic oligonucleotide
gguucugguuacucgagca

SEQ ID NO: 2328968 - RNA, 19 nt, Artificial Sequence
  Description of Artificial Sequence: Synthetic oligonucleotide
uggucauaugugguuuuga

SEQ ID NO: 2328969 - RNA, 19 nt, Artificial Sequence
  Description of Artificial Sequence: Synthetic oligonucleotide
acguacaccuagcaguaua

SEQ ID NO: 2328970 - RNA, 19 nt, Artificial Sequence
  Description of Artificial Sequence: Synthetic oligonucleotide
accacggguggcucaguag

SEQ ID NO: 2328971 - RNA, 19 nt, Artificial Sequence
  Description of Artificial Sequence: Synthetic oligonucleotide
ucgagcacacgaccgccac

SEQ ID NO: 2328972 - RNA, 19 nt, Artificial Sequence
  Description of Artificial Sequence: Synthetic oligonucleotide
ucaccaaccacggguggcu

SEQ ID NO: 2328973 - RNA, 19 nt, Artificial Sequence
  Description of Artificial Sequence: Synthetic oligonucleotide
cagggcagaccauucacca

SEQ ID NO: 2328974 - RNA, 19 nt, Artificial Sequence
  Description of Artificial Sequence: Synthetic oligonucleotide
ugaugacggcauggcaccg

SEQ ID NO: 2328975 - RNA, 19 nt, Artificial Sequence
  Description of Artificial Sequence: Synthetic oligonucleotide
acccgcagcggugaugacg

SEQ ID NO: 2328976 - RNA, 19 nt, Artificial Sequence
  Description of Artificial Sequence: Synthetic oligonucleotide
ucuggucauaugugguuuu

SEQ ID NO: 2328977 - RNA, 19 nt, Artificial Sequence
  Description of Artificial Sequence: Synthetic oligonucleotide
cugaaaccccgcuugcuga

SEQ ID NO: 2328978 - RNA, 19 nt, Artificial Sequence
  Description of Artificial Sequence: Synthetic oligonucleotide
gaagaucauuguacaucug

SEQ ID NO: 2328979 - RNA, 19 nt, Artificial Sequence
  Description of Artificial Sequence: Synthetic oligonucleotide
uccuguucucuggaauuca

SEQ ID NO: 2328980 - RNA, 19 nt, Artificial Sequence
  Description of Artificial Sequence: Synthetic oligonucleotide
cccgcagcggugaugacgg

SEQ ID NO: 2328981 - RNA, 19 nt, Artificial Sequence
  Description of Artificial Sequence: Synthetic oligonucleotide
gcuugucaggugcuggucc

SEQ ID NO: 2328982 - RNA, 19 nt, Artificial Sequence
  Description of Artificial Sequence: Synthetic oligonucleotide
aggcuguacaguaaaccgu

SEQ ID NO: 2328983 - RNA, 19 nt, Artificial Sequence
  Description of Artificial Sequence: Synthetic oligonucleotide
cagaggucgcagauaagga

SEQ ID NO: 2328984 - RNA, 19 nt, Artificial Sequence
  Description of Artificial Sequence: Synthetic oligonucleotide
auacacuggcagaggucgc

SEQ ID NO: 2328985 - RNA, 19 nt, Artificial Sequence
  Description of Artificial Sequence: Synthetic oligonucleotide
ggucauaugugguuuugaa

SEQ ID NO: 2328986 - RNA, 19 nt, Artificial Sequence
  Description of Artificial Sequence: Synthetic oligonucleotide
auuccguucugcguauaga

SEQ ID NO: 2328987 - RNA, 19 nt, Artificial Sequence
  Description of Artificial Sequence: Synthetic oligonucleotide
gauuucaaccuggcauuuc

SEQ ID NO: 2328988 - RNA, 19 nt, Artificial Sequence
  Description of Artificial Sequence: Synthetic oligonucleotide
gcguauagaguucuuuguc

SEQ ID NO: 2328989 - RNA, 19 nt, Artificial Sequence
  Description of Artificial Sequence: Synthetic oligonucleotide
gaacucccaccuagaagcc

SEQ ID NO: 2328990 - RNA, 19 nt, Artificial Sequence
  Description of Artificial Sequence: Synthetic oligonucleotide
guacaguaaaccgucuuua

SEQ ID NO: 2328991 - RNA, 19 nt, Artificial Sequence
  Description of Artificial Sequence: Synthetic oligonucleotide
caugcuccgguucugguua

SEQ ID NO: 2328992 - RNA, 19 nt, Artificial Sequence
  Description of Artificial Sequence: Synthetic oligonucleotide
cgcagauaaggaaugcccc

SEQ ID NO: 2328993 - RNA, 19 nt, Artificial Sequence
  Description of Artificial Sequence: Synthetic oligonucleotide
aagauggcggcaaccggaa

SEQ ID NO: 2328994 - RNA, 19 nt, Artificial Sequence
  Description of Artificial Sequence: Synthetic oligonucleotide
aaccacggguggcucagua

SEQ ID NO: 2328995 - RNA, 19 nt, Artificial Sequence
  Description of Artificial Sequence: Synthetic oligonucleotide
gaccggacacugaaacccc

SEQ ID NO: 2328996 - RNA, 19 nt, Artificial Sequence
  Description of Artificial Sequence: Synthetic oligonucleotide
cugguuacucgagcacacg

SEQ ID NO: 2328997 - RNA, 19 nt, Artificial Sequence
  Description of Artificial Sequence: Synthetic oligonucleotide
guaaaccgucuuuauuucu

SEQ ID NO: 2328998 - RNA, 19 nt, Artificial Sequence
  Description of Artificial Sequence: Synthetic oligonucleotide
aggucgcagauaaggaaug

SEQ ID NO: 2328999 - RNA, 19 nt, Artificial Sequence
  Description of Artificial Sequence: Synthetic oligonucleotide
cuguucucuggaauucaga

SEQ ID NO: 2329000 - RNA, 19 nt, Artificial Sequence
  Description of Artificial Sequence: Synthetic oligonucleotide
agugugcagaaaggcccgg

SEQ ID NO: 2329001 - RNA, 19 nt, Artificial Sequence
  Description of Artificial Sequence: Synthetic oligonucleotide
ggucaaacagguccuugca

SEQ ID NO: 2329002 - RNA, 19 nt, Artificial Sequence
  Description of Artificial Sequence: Synthetic oligonucleotide
augcuccgguucugguuac

SEQ ID NO: 2329003 - RNA, 19 nt, Artificial Sequence
  Description of Artificial Sequence: Synthetic oligonucleotide
aucuggucauaugugguuu

SEQ ID NO: 2329004 - RNA, 19 nt, Artificial Sequence
  Description of Artificial Sequence: Synthetic oligonucleotide
auggcaccggccgaccguc

SEQ ID NO: 2329005 - RNA, 19 nt, Artificial Sequence
  Description of Artificial Sequence: Synthetic oligonucleotide
ggcuguacaguaaaccguc

SEQ ID NO: 2329006 - RNA, 19 nt, Artificial Sequence
  Description of Artificial Sequence: Synthetic oligonucleotide
gaaucaggucaaacagguc

SEQ ID NO: 2329007 - RNA, 19 nt, Artificial Sequence
  Description of Artificial Sequence: Synthetic oligonucleotide
cuggucauaugugguuuug

SEQ ID NO: 2329008 - RNA, 19 nt, Artificial Sequence
  Description of Artificial Sequence: Synthetic oligonucleotide
agauggcggcaaccggaag

SEQ ID NO: 2329009 - RNA, 19 nt, Artificial Sequence
  Description of Artificial Sequence: Synthetic oligonucleotide
ggcccggccacucuucucc

SEQ ID NO: 2329010 - RNA, 19 nt, Artificial Sequence
  Description of Artificial Sequence: Synthetic oligonucleotide
uccgcgcuacccacggcac

SEQ ID NO: 2329011 - RNA, 19 nt, Artificial Sequence
  Description of Artificial Sequence: Synthetic oligonucleotide
gaggucgcagauaaggaau

SEQ ID NO: 2329012 - RNA, 19 nt, Artificial Sequence
  Description of Artificial Sequence: Synthetic oligonucleotide
cuccuguucucuggaauuc

SEQ ID NO: 2329013 - RNA, 19 nt, Artificial Sequence
  Description of Artificial Sequence: Synthetic oligonucleotide
guccgcgcuacccacggca

SEQ ID NO: 2329014 - RNA, 19 nt, Artificial Sequence
  Description of Artificial Sequence: Synthetic oligonucleotide
gguuacucgagcacacgac

SEQ ID NO: 2329015 - RNA, 19 nt, Artificial Sequence
  Description of Artificial Sequence: Synthetic oligonucleotide
cuguuccaaaggaccggac

SEQ ID NO: 2329016 - RNA, 19 nt, Artificial Sequence
  Description of Artificial Sequence: Synthetic oligonucleotide
accuagaagccggcuuccg

SEQ ID NO: 2329017 - RNA, 19 nt, Artificial Sequence
  Description of Artificial Sequence: Synthetic oligonucleotide
uugggcuugucaggugcug

SEQ ID NO: 2329018 - RNA, 19 nt, Artificial Sequence
  Description of Artificial Sequence: Synthetic oligonucleotide
accaaccacggguggcuca

SEQ ID NO: 2329019 - RNA, 19 nt, Artificial Sequence
  Description of Artificial Sequence: Synthetic oligonucleotide
accggacacugaaaccccg

SEQ ID NO: 2329020 - RNA, 19 nt, Artificial Sequence
  Description of Artificial Sequence: Synthetic oligonucleotide
gcacccgccacugaacucc

SEQ ID NO: 2329021 - RNA, 19 nt, Artificial Sequence
  Description of Artificial Sequence: Synthetic oligonucleotide
uguccuggauguccacauu

SEQ ID NO: 2329022 - RNA, 19 nt, Artificial Sequence
  Description of Artificial Sequence: Synthetic oligonucleotide
agcacacgaccgccacccg

SEQ ID NO: 2329023 - RNA, 19 nt, Artificial Sequence
  Description of Artificial Sequence: Synthetic oligonucleotide
ugcugguccugggagcuuc

SEQ ID NO: 2329024 - RNA, 19 nt, Artificial Sequence
  Description of Artificial Sequence: Synthetic oligonucleotide
gaccguccgcgcuacccac

SEQ ID NO: 2329025 - RNA, 19 nt, Artificial Sequence
  Description of Artificial Sequence: Synthetic oligonucleotide
gguccugggagcuucacau

SEQ ID NO: 2329026 - RNA, 19 nt, Artificial Sequence
  Description of Artificial Sequence: Synthetic oligonucleotide
caccuagaagccggcuucc

SEQ ID NO: 2329027 - RNA, 19 nt, Artificial Sequence
  Description of Artificial Sequence: Synthetic oligonucleotide
cuacccacggcacccgcca

SEQ ID NO: 2329028 - RNA, 19 nt, Artificial Sequence
  Description of Artificial Sequence: Synthetic oligonucleotide
guccaacauauguaaaauu

SEQ ID NO: 2329029 - RNA, 19 nt, Artificial Sequence
  Description of Artificial Sequence: Synthetic oligonucleotide
aaccccgcuugcugaggau

SEQ ID NO: 2329030 - RNA, 19 nt, Artificial Sequence
  Description of Artificial Sequence: Synthetic oligonucleotide
acggcacccgccacugaac

SEQ ID NO: 2329031 - RNA, 19 nt, Artificial Sequence
  Description of Artificial Sequence: Synthetic oligonucleotide
ccaccuagaagccggcuuc

SEQ ID NO: 2329032 - RNA, 19 nt, Artificial Sequence
  Description of Artificial Sequence: Synthetic oligonucleotide
uucugcguauagaguucuu

SEQ ID NO: 2329033 - RNA, 19 nt, Artificial Sequence
  Description of Artificial Sequence: Synthetic oligonucleotide
ccauucaccaaccacgggu

SEQ ID NO: 2329034 - RNA, 19 nt, Artificial Sequence
  Description of Artificial Sequence: Synthetic oligonucleotide
ggucgcagauaaggaaugc

SEQ ID NO: 2329035 - RNA, 19 nt, Artificial Sequence
  Description of Artificial Sequence: Synthetic oligonucleotide
cuugucaggugcugguccu

SEQ ID NO: 2329036 - RNA, 19 nt, Artificial Sequence
  Description of Artificial Sequence: Synthetic oligonucleotide
aaauuccguucugcguaua

SEQ ID NO: 2329037 - RNA, 19 nt, Artificial Sequence
  Description of Artificial Sequence: Synthetic oligonucleotide
uucgggccggggcuugauc

SEQ ID NO: 2329038 - RNA, 19 nt, Artificial Sequence
  Description of Artificial Sequence: Synthetic oligonucleotide
gugcagggcagaccauuca

SEQ ID NO: 2329039 - RNA, 19 nt, Artificial Sequence
  Description of Artificial Sequence: Synthetic oligonucleotide
cgcccgaggaagauggcgg

SEQ ID NO: 2329040 - RNA, 19 nt, Artificial Sequence
  Description of Artificial Sequence: Synthetic oligonucleotide
acacgaccgccacccgcag

SEQ ID NO: 2329041 - RNA, 19 nt, Artificial Sequence
  Description of Artificial Sequence: Synthetic oligonucleotide
uccgcccgaggaagauggc

SEQ ID NO: 2329042 - RNA, 19 nt, Artificial Sequence
  Description of Artificial Sequence: Synthetic oligonucleotide
ggaaccuuucgggccgggg

SEQ ID NO: 2329043 - RNA, 19 nt, Artificial Sequence
  Description of Artificial Sequence: Synthetic oligonucleotide
uggaaccuuucgggccggg

SEQ ID NO: 2329044 - RNA, 19 nt, Artificial Sequence
  Description of Artificial Sequence: Synthetic oligonucleotide
cuuccgcccgaggaagaug

SEQ ID NO: 2329045 - RNA, 19 nt, Artificial Sequence
  Description of Artificial Sequence: Synthetic oligonucleotide
cucgagcacacgaccgcca

SEQ ID NO: 2329046 - RNA, 19 nt, Artificial Sequence
  Description of Artificial Sequence: Synthetic oligonucleotide
caugguuguccuggauguc

SEQ ID NO: 2329047 - RNA, 19 nt, Artificial Sequence
  Description of Artificial Sequence: Synthetic oligonucleotide
cacccgccacugaacuccc

SEQ ID NO: 2329048 - RNA, 19 nt, Artificial Sequence
  Description of Artificial Sequence: Synthetic oligonucleotide
ggauacacuggcagagguc

SEQ ID NO: 2329049 - RNA, 19 nt, Artificial Sequence
  Description of Artificial Sequence: Synthetic oligonucleotide
guucugcguauagaguucu

SEQ ID NO: 2329050 - RNA, 19 nt, Artificial Sequence
  Description of Artificial Sequence: Synthetic oligonucleotide
accuagcaguauaaacaaa

SEQ ID NO: 2329051 - RNA, 19 nt, Artificial Sequence
  Description of Artificial Sequence: Synthetic oligonucleotide
accggccgaccguccgcgc

SEQ ID NO: 2329052 - RNA, 19 nt, Artificial Sequence
  Description of Artificial Sequence: Synthetic oligonucleotide
aagccggcuuccgcccgag

SEQ ID NO: 2329053 - RNA, 19 nt, Artificial Sequence
  Description of Artificial Sequence: Synthetic oligonucleotide
gcauggcaccggccgaccg

SEQ ID NO: 2329054 - RNA, 19 nt, Artificial Sequence
  Description of Artificial Sequence: Synthetic oligonucleotide
caucuggucauaugugguu

SEQ ID NO: 2329055 - RNA, 19 nt, Artificial Sequence
  Description of Artificial Sequence: Synthetic oligonucleotide
cacggcacccgccacugaa

SEQ ID NO: 2329056 - RNA, 19 nt, Artificial Sequence
  Description of Artificial Sequence: Synthetic oligonucleotide
caccggccgaccguccgcg

SEQ ID NO: 2329057 - RNA, 19 nt, Artificial Sequence
  Description of Artificial Sequence: Synthetic oligonucleotide
cguauagaguucuuugucu

SEQ ID NO: 2329058 - RNA, 19 nt, Artificial Sequence
  Description of Artificial Sequence: Synthetic oligonucleotide
ccggacacugaaaccccgc

SEQ ID NO: 2329059 - RNA, 19 nt, Artificial Sequence
  Description of Artificial Sequence: Synthetic oligonucleotide
cacgaccgccacccgcagc

SEQ ID NO: 2329060 - RNA, 19 nt, Artificial Sequence
  Description of Artificial Sequence: Synthetic oligonucleotide
ccacggguggcucaguaga

SEQ ID NO: 2329061 - RNA, 19 nt, Artificial Sequence
  Description of Artificial Sequence: Synthetic oligonucleotide
cguucugcguauagaguuc

SEQ ID NO: 2329062 - RNA, 19 nt, Artificial Sequence
  Description of Artificial Sequence: Synthetic oligonucleotide
gcggugaugacggcauggc

SEQ ID NO: 2329063 - RNA, 19 nt, Artificial Sequence
  Description of Artificial Sequence: Synthetic oligonucleotide
ucccaccuagaagccggcu

SEQ ID NO: 2329064 - RNA, 19 nt, Artificial Sequence
  Description of Artificial Sequence: Synthetic oligonucleotide
accguccgcgcuacccacg

SEQ ID NO: 2329065 - RNA, 19 nt, Artificial Sequence
  Description of Artificial Sequence: Synthetic oligonucleotide
ggcucaguagaagcagaca

SEQ ID NO: 2329066 - RNA, 19 nt, Artificial Sequence
  Description of Artificial Sequence: Synthetic oligonucleotide
cuggcaggucuccuguucu

SEQ ID NO: 2329067 - RNA, 19 nt, Artificial Sequence
  Description of Artificial Sequence: Synthetic oligonucleotide
uggcaccggccgaccgucc

SEQ ID NO: 2329068 - RNA, 19 nt, Artificial Sequence
  Description of Artificial Sequence: Synthetic oligonucleotide
cauuggugacguacaccua

SEQ ID NO: 2329069 - RNA, 19 nt, Artificial Sequence
  Description of Artificial Sequence: Synthetic oligonucleotide
cacggguggcucaguagaa

SEQ ID NO: 2329070 - RNA, 19 nt, Artificial Sequence
  Description of Artificial Sequence: Synthetic oligonucleotide
ccgccacugaacucccacc

SEQ ID NO: 2329071 - RNA, 19 nt, Artificial Sequence
  Description of Artificial Sequence: Synthetic oligonucleotide
gccggcuuccgcccgagga

SEQ ID NO: 2329072 - RNA, 19 nt, Artificial Sequence
  Description of Artificial Sequence: Synthetic oligonucleotide
ccaggguggccucuucaug

SEQ ID NO: 2329073 - RNA, 19 nt, Artificial Sequence
  Description of Artificial Sequence: Synthetic oligonucleotide
cccgccacugaacucccac

SEQ ID NO: 2329074 - RNA, 19 nt, Artificial Sequence
  Description of Artificial Sequence: Synthetic oligonucleotide
cuuuccugagaagaucauu

SEQ ID NO: 2329075 - RNA, 19 nt, Artificial Sequence
  Description of Artificial Sequence: Synthetic oligonucleotide
accgccacccgcagcggug

SEQ ID NO: 2329076 - RNA, 19 nt, Artificial Sequence
  Description of Artificial Sequence: Synthetic oligonucleotide
ccaaccacggguggcucag

SEQ ID NO: 2329077 - RNA, 19 nt, Artificial Sequence
  Description of Artificial Sequence: Synthetic oligonucleotide
caugcacuggcuggcaggu

SEQ ID NO: 2329078 - RNA, 19 nt, Artificial Sequence
  Description of Artificial Sequence: Synthetic oligonucleotide
acaguacauuggugacgua

SEQ ID NO: 2329079 - RNA, 19 nt, Artificial Sequence
  Description of Artificial Sequence: Synthetic oligonucleotide
cguacaccuagcaguauaa

SEQ ID NO: 2329080 - RNA, 19 nt, Artificial Sequence
  Description of Artificial Sequence: Synthetic oligonucleotide
ugcuccgguucugguuacu

SEQ ID NO: 2329081 - RNA, 19 nt, Artificial Sequence
  Description of Artificial Sequence: Synthetic oligonucleotide
agccggcuuccgcccgagg

SEQ ID NO: 2329082 - RNA, 19 nt, Artificial Sequence
  Description of Artificial Sequence: Synthetic oligonucleotide
cagcggugaugacggcaug

SEQ ID NO: 2329083 - RNA, 19 nt, Artificial Sequence
  Description of Artificial Sequence: Synthetic oligonucleotide
ccgcccgaggaagauggcg

SEQ ID NO: 2329084 - RNA, 19 nt, Artificial Sequence
  Description of Artificial Sequence: Synthetic oligonucleotide
ccguccgcgcuacccacgg

SEQ ID NO: 2329085 - RNA, 19 nt, Artificial Sequence
  Description of Artificial Sequence: Synthetic oligonucleotide
uuucgggccggggcuugau

SEQ ID NO: 2329086 - RNA, 19 nt, Artificial Sequence
  Description of Artificial Sequence: Synthetic oligonucleotide
ccguucugcguauagaguu

SEQ ID NO: 2329087 - RNA, 19 nt, Artificial Sequence
  Description of Artificial Sequence: Synthetic oligonucleotide
caaccuggucauagacucu

SEQ ID NO: 2329088 - RNA, 19 nt, Artificial Sequence
  Description of Artificial Sequence: Synthetic oligonucleotide
gcuacccacggcacccgcc

SEQ ID NO: 2329089 - RNA, 19 nt, Artificial Sequence
  Description of Artificial Sequence: Synthetic oligonucleotide
gcuucacaugaguuccugu

SEQ ID NO: 2329090 - RNA, 19 nt, Artificial Sequence
  Description of Artificial Sequence: Synthetic oligonucleotide
ccgaccguccgcgcuaccc

SEQ ID NO: 2329091 - RNA, 19 nt, Artificial Sequence
  Description of Artificial Sequence: Synthetic oligonucleotide
cauggcaccggccgaccgu

SEQ ID NO: 2329092 - RNA, 19 nt, Artificial Sequence
  Description of Artificial Sequence: Synthetic oligonucleotide
ccauauccucagugugcug

SEQ ID NO: 2329093 - RNA, 19 nt, Artificial Sequence
  Description of Artificial Sequence: Synthetic oligonucleotide
ggcagaggucgcagauaag

SEQ ID NO: 2329094 - RNA, 19 nt, Artificial Sequence
  Description of Artificial Sequence: Synthetic oligonucleotide
augugguuuugaagucaua

SEQ ID NO: 2329095 - RNA, 19 nt, Artificial Sequence
  Description of Artificial Sequence: Synthetic oligonucleotide
ggcacccgccacugaacuc

SEQ ID NO: 2329096 - RNA, 19 nt, Artificial Sequence
  Description of Artificial Sequence: Synthetic oligonucleotide
ggcuugucaggugcugguc

SEQ ID NO: 2329097 - RNA, 19 nt, Artificial Sequence
  Description of Artificial Sequence: Synthetic oligonucleotide
caccaaccacggguggcuc

SEQ ID NO: 2329098 - RNA, 19 nt, Artificial Sequence
  Description of Artificial Sequence: Synthetic oligonucleotide
ccacccgcagcggugauga

SEQ ID NO: 2329099 - RNA, 19 nt, Artificial Sequence
  Description of Artificial Sequence: Synthetic oligonucleotide
gcuccgguucugguuacuc

SEQ ID NO: 2329100 - RNA, 19 nt, Artificial Sequence
  Description of Artificial Sequence: Synthetic oligonucleotide
ggcaaccggaagucaucaa

SEQ ID NO: 2329101 - RNA, 19 nt, Artificial Sequence
  Description of Artificial Sequence: Synthetic oligonucleotide
cacugaaaccccgcuugcu

SEQ ID NO: 2329102 - RNA, 19 nt, Artificial Sequence
  Description of Artificial Sequence: Synthetic oligonucleotide
gcaccggccgaccguccgc

SEQ ID NO: 2329103 - RNA, 19 nt, Artificial Sequence
  Description of Artificial Sequence: Synthetic oligonucleotide
ggcauggcaccggccgacc

SEQ ID NO: 2329104 - RNA, 19 nt, Artificial Sequence
  Description of Artificial Sequence: Synthetic oligonucleotide
gaccgccacccgcagcggu

SEQ ID NO: 2329105 - RNA, 19 nt, Artificial Sequence
  Description of Artificial Sequence: Synthetic oligonucleotide
accuuucgggccggggcuu

SEQ ID NO: 2329106 - RNA, 19 nt, Artificial Sequence
  Description of Artificial Sequence: Synthetic oligonucleotide
ggacacugaaaccccgcuu

SEQ ID NO: 2329107 - RNA, 19 nt, Artificial Sequence
  Description of Artificial Sequence: Synthetic oligonucleotide
gcggcaaccggaagucauc

SEQ ID NO: 2329108 - RNA, 19 nt, Artificial Sequence
  Description of Artificial Sequence: Synthetic oligonucleotide
cgucuuuauuucuuuuggu

SEQ ID NO: 2329109 - RNA, 19 nt, Artificial Sequence
  Description of Artificial Sequence: Synthetic oligonucleotide
gguggcugugcagggcaga

SEQ ID NO: 2329110 - RNA, 19 nt, Artificial Sequence
  Description of Artificial Sequence: Synthetic oligonucleotide
cgaggaagauggcggcaac

SEQ ID NO: 2329111 - RNA, 19 nt, Artificial Sequence
  Description of Artificial Sequence: Synthetic oligonucleotide
cgagcacacgaccgccacc

SEQ ID NO: 2329112 - RNA, 19 nt, Artificial Sequence
  Description of Artificial Sequence: Synthetic oligonucleotide
gacguacaccuagcaguau

SEQ ID NO: 2329113 - RNA, 19 nt, Artificial Sequence
  Description of Artificial Sequence: Synthetic oligonucleotide
ggcaggucuccuguucucu

SEQ ID NO: 2329114 - RNA, 19 nt, Artificial Sequence
  Description of Artificial Sequence: Synthetic oligonucleotide
cuuucgggccggggcuuga

SEQ ID NO: 2329115 - RNA, 19 nt, Artificial Sequence
  Description of Artificial Sequence: Synthetic oligonucleotide
ccgcgcuacccacggcacc

SEQ ID NO: 2329116 - RNA, 19 nt, Artificial Sequence
  Description of Artificial Sequence: Synthetic oligonucleotide
gcuguacaguaaaccgucu

SEQ ID NO: 2329117 - RNA, 19 nt, Artificial Sequence
  Description of Artificial Sequence: Synthetic oligonucleotide
gcgcuacccacggcacccg

SEQ ID NO: 2329118 - RNA, 19 nt, Artificial Sequence
  Description of Artificial Sequence: Synthetic oligonucleotide
ccgaggaagauggcggcaa

SEQ ID NO: 2329119 - RNA, 19 nt, Artificial Sequence
  Description of Artificial Sequence: Synthetic oligonucleotide
ggcggcaaccggaagucau

SEQ ID NO: 2329120 - RNA, 19 nt, Artificial Sequence
  Description of Artificial Sequence: Synthetic oligonucleotide
gccacccgcagcggugaug

SEQ ID NO: 2329121 - RNA, 19 nt, Artificial Sequence
  Description of Artificial Sequence: Synthetic oligonucleotide
ccggcuuccgcccgaggaa

SEQ ID NO: 2329122 - RNA, 19 nt, Artificial Sequence
  Description of Artificial Sequence: Synthetic oligonucleotide
cggggcuugauccuuuuau

SEQ ID NO: 2329123 - RNA, 19 nt, Artificial Sequence
  Description of Artificial Sequence: Synthetic oligonucleotide
cgaccguccgcgcuaccca

SEQ ID NO: 2329124 - RNA, 19 nt, Artificial Sequence
  Description of Artificial Sequence: Synthetic oligonucleotide
cggcaaccggaagucauca

SEQ ID NO: 2329125 - RNA, 19 nt, Artificial Sequence
  Description of Artificial Sequence: Synthetic oligonucleotide
cgcuacccacggcacccgc

SEQ ID NO: 2329126 - RNA, 19 nt, Artificial Sequence
  Description of Artificial Sequence: Synthetic oligonucleotide
ccaugcuccgguucugguu

SEQ ID NO: 2329127 - RNA, 19 nt, Artificial Sequence
  Description of Artificial Sequence: Synthetic oligonucleotide
gugccuccaugcuccgguu

SEQ ID NO: 2329128 - RNA, 19 nt, Artificial Sequence
  Description of Artificial Sequence: Synthetic oligonucleotide
ccucagugugcuggauaca

SEQ ID NO: 2329129 - RNA, 19 nt, Artificial Sequence
  Description of Artificial Sequence: Synthetic oligonucleotide
cccaccuagaagccggcuu

SEQ ID NO: 2329130 - RNA, 19 nt, Artificial Sequence
  Description of Artificial Sequence: Synthetic oligonucleotide
ggccgaccguccgcgcuac

SEQ ID NO: 2329131 - RNA, 19 nt, Artificial Sequence
  Description of Artificial Sequence: Synthetic oligonucleotide
cggcauggcaccggccgac

SEQ ID NO: 2329132 - RNA, 19 nt, Artificial Sequence
  Description of Artificial Sequence: Synthetic oligonucleotide
ccgcagcggugaugacggc

SEQ ID NO: 2329133 - RNA, 19 nt, Artificial Sequence
  Description of Artificial Sequence: Synthetic oligonucleotide
gcuuccgcccgaggaagau

SEQ ID NO: 2329134 - RNA, 19 nt, Artificial Sequence
  Description of Artificial Sequence: Synthetic oligonucleotide
gccgaccguccgcgcuacc

SEQ ID NO: 2329135 - RNA, 19 nt, Artificial Sequence
  Description of Artificial Sequence: Synthetic oligonucleotide
cguccgcgcuacccacggc

SEQ ID NO: 2329136 - RNA, 19 nt, Artificial Sequence
  Description of Artificial Sequence: Synthetic oligonucleotide
caaccacggguggcucagu

SEQ ID NO: 2329137 - RNA, 19 nt, Artificial Sequence
  Description of Artificial Sequence: Synthetic oligonucleotide
gcccggccacucuucuccu

SEQ ID NO: 2329138 - RNA, 19 nt, Artificial Sequence
  Description of Artificial Sequence: Synthetic oligonucleotide
cgaccgccacccgcagcgg

SEQ ID NO: 2329139 - RNA, 19 nt, Artificial Sequence
  Description of Artificial Sequence: Synthetic oligonucleotide
ccggggcuugauccuuuua

SEQ ID NO: 2329140 - RNA, 19 nt, Artificial Sequence
  Description of Artificial Sequence: Synthetic oligonucleotide
gugcugguccugggagcuu

SEQ ID NO: 2329141 - RNA, 19 nt, Artificial Sequence
  Description of Artificial Sequence: Synthetic oligonucleotide
ccacggcacccgccacuga

SEQ ID NO: 2329142 - RNA, 19 nt, Artificial Sequence
  Description of Artificial Sequence: Synthetic oligonucleotide
gggccggggcuugauccuu
